United States Patent Application Publication US 2020/0095579 A1 - sequence listing, part 7

SEQ ID NO: 83441 - DNA, 20 bp, Artificial Sequence
  Description of Artificial Sequence: Synthetic oligonucleotide
  Target: LAMA2; (-) strand; PAM type: NRG; PAM sequence: CAG
tcagtatgtcattttaccca

SEQ ID NO: 83442 - DNA, 20 bp, Artificial Sequence
  Description of Artificial Sequence: Synthetic oligonucleotide
  Target: LAMA2; (-) strand; PAM type: NRG; PAM sequence: CAG
aagtgatgtccatatcagct

SEQ ID NO: 83443 - DNA, 20 bp, Artificial Sequence
  Description of Artificial Sequence: Synthetic oligonucleotide
  Target: LAMA2; (-) strand; PAM type: NRG; PAM sequence: CAG
gggagaagtgatgtccatat

SEQ ID NO: 83444 - DNA, 20 bp, Artificial Sequence
  Description of Artificial Sequence: Synthetic oligonucleotide
  Target: LAMA2; (-) strand; PAM type: NRG; PAM sequence: AAG
taaaatagcaaaagtgggag

SEQ ID NO: 83445 - DNA, 20 bp, Artificial Sequence
  Description of Artificial Sequence: Synthetic oligonucleotide
  Target: LAMA2; (-) strand; PAM type: NRG; PAM sequence: GAG
ttttaaaatagcaaaagtgg

SEQ ID NO: 83446 - DNA, 20 bp, Artificial Sequence
  Description of Artificial Sequence: Synthetic oligonucleotide
  Target: LAMA2; (-) strand; PAM type: NRG; PAM sequence: GGG
atttttaaaatagcaaaagt

SEQ ID NO: 83447 - DNA, 20 bp, Artificial Sequence
  Description of Artificial Sequence: Synthetic oligonucleotide
  Target: LAMA2; (-) strand; PAM type: NRG; PAM sequence: TGG
tatttttaaaatagcaaaag

SEQ ID NO: 83448 - DNA, 20 bp, Artificial Sequence
  Description of Artificial Sequence: Synthetic oligonucleotide
  Target: LAMA2; (-) strand; PAM type: NRG; PAM sequence: AAG
ctgtatttttaaaatagcaa

SEQ ID NO: 83449 - DNA, 20 bp, Artificial Sequence
  Description of Artificial Sequence: Synthetic oligonucleotide
  Target: LAMA2; (-) strand; PAM type: NRG; PAM sequence: TAG
gcatatctgtatttttaaaa

SEQ ID NO: 83450 - DNA, 20 bp, Artificial Sequence
  Description of Artificial Sequence: Synthetic oligonucleotide
  Target: LAMA2; (-) strand; PAM type: NRG; PAM sequence: CAG
atctatttgctatgtttatg

SEQ ID NO: 83451 - DNA, 20 bp, Artificial Sequence
  Description of Artificial Sequence: Synthetic oligonucleotide
  Target: LAMA2; (-) strand; PAM type: NRG; PAM sequence: AGG
ccctctttggtctgacatct

SEQ ID NO: 83452 - DNA, 20 bp, Artificial Sequence
  Description of Artificial Sequence: Synthetic oligonucleotide
  Target: LAMA2; (-) strand; PAM type: NRG; PAM sequence: TAG
tccctctttggtctgacatc

SEQ ID NO: 83453 - DNA, 20 bp, Artificial Sequence
  Description of Artificial Sequence: Synthetic oligonucleotide
  Target: LAMA2; (-) strand; PAM type: NRG; PAM sequence: TGG
ttaacttagatttccctctt

SEQ ID NO: 83454 - DNA, 20 bp, Artificial Sequence
  Description of Artificial Sequence: Synthetic oligonucleotide
  Target: LAMA2; (-) strand; PAM type: NRG; PAM sequence: TAG
gcttttgcttatgcttaact

SEQ ID NO: 83455 - DNA, 20 bp, Artificial Sequence
  Description of Artificial Sequence: Synthetic oligonucleotide
  Target: LAMA2; (-) strand; PAM type: NRG; PAM sequence: GAG
ccagttgctcagtttagctt

SEQ ID NO: 83456 - DNA, 20 bp, Artificial Sequence
  Description of Artificial Sequence: Synthetic oligonucleotide
  Target: LAMA2; (-) strand; PAM type: NRG; PAM sequence: TAG
atgaccccagttgctcagtt

SEQ ID NO: 83457 - DNA, 20 bp, Artificial Sequence
  Description of Artificial Sequence: Synthetic oligonucleotide
  Target: LAMA2; (-) strand; PAM type: NRG; PAM sequence: CAG
accccatgaccccagttgct

SEQ ID NO: 83458 - DNA, 20 bp, Artificial Sequence
  Description of Artificial Sequence: Synthetic oligonucleotide
  Target: LAMA2; (-) strand; PAM type: NRG; PAM sequence: CAG
caccctccaccccatgaccc

SEQ ID NO: 83459 - DNA, 20 bp, Artificial Sequence
  Description of Artificial Sequence: Synthetic oligonucleotide
  Target: LAMA2; (-) strand; PAM type: NRG; PAM sequence: AAG
ttagccctgatcttagaact

SEQ ID NO: 83460 - DNA, 20 bp, Artificial Sequence
  Description of Artificial Sequence: Synthetic oligonucleotide
  Target: LAMA2; (-) strand; PAM type: NRG; PAM sequence: TAG
ccaaactttagccctgatct

SEQ ID NO: 83461 - DNA, 20 bp, Artificial Sequence
  Description of Artificial Sequence: Synthetic oligonucleotide
  Target: LAMA2; (-) strand; PAM type: NRG; PAM sequence: TAG
ggcattaaaactccaaactt

SEQ ID NO: 83462 - DNA, 20 bp, Artificial Sequence
  Description of Artificial Sequence: Synthetic oligonucleotide
  Target: LAMA2; (-) strand; PAM type: NRG; PAM sequence: GGG
ctagtgtcaagtcctagtga

SEQ ID NO: 83463 - DNA, 20 bp, Artificial Sequence
  Description of Artificial Sequence: Synthetic oligonucleotide
  Target: LAMA2; (-) strand; PAM type: NRG; PAM sequence: AGG
cctagtgtcaagtcctagtg

SEQ ID NO: 83464 - DNA, 20 bp, Artificial Sequence
  Description of Artificial Sequence: Synthetic oligonucleotide
  Target: LAMA2; (-) strand; PAM type: NRG; PAM sequence: GAG
tcctagtgtcaagtcctagt

SEQ ID NO: 83465 - DNA, 20 bp, Artificial Sequence
  Description of Artificial Sequence: Synthetic oligonucleotide
  Target: LAMA2; (-) strand; PAM type: NRG; PAM sequence: TAG
caaatcctagtgtcaagtcc

SEQ ID NO: 83466 - DNA, 20 bp, Artificial Sequence
  Description of Artificial Sequence: Synthetic oligonucleotide
  Target: LAMA2; (-) strand; PAM type: NRG; PAM sequence: AAG
tgggtccaaatcctagtgtc

SEQ ID NO: 83467 - DNA, 20 bp, Artificial Sequence
  Description of Artificial Sequence: Synthetic oligonucleotide
  Target: LAMA2; (-) strand; PAM type: NRG; PAM sequence: TAG
ccgtctgtgggtccaaatcc

SEQ ID NO: 83468 - DNA, 20 bp, Artificial Sequence
  Description of Artificial Sequence: Synthetic oligonucleotide
  Target: LAMA2; (-) strand; PAM type: NRG; PAM sequence: GGG
cagctgcaatttccgtctgt

SEQ ID NO: 83469 - DNA, 20 bp, Artificial Sequence
  Description of Artificial Sequence: Synthetic oligonucleotide
  Target: LAMA2; (-) strand; PAM type: NRG; PAM sequence: TGG
tcagctgcaatttccgtctg

SEQ ID NO: 83470 - DNA, 20 bp, Artificial Sequence
  Description of Artificial Sequence: Synthetic oligonucleotide
  Target: LAMA2; (-) strand; PAM type: NRG; PAM sequence: CAG
tgtccctgcttcagggagtt

SEQ ID NO: 83471 - DNA, 20 bp, Artificial Sequence
  Description of Artificial Sequence: Synthetic oligonucleotide
  Target: LAMA2; (-) strand; PAM type: NRG; PAM sequence: GAG
tctagtgtccctgcttcagg

SEQ ID NO: 83472 - DNA, 20 bp, Artificial Sequence
  Description of Artificial Sequence: Synthetic oligonucleotide
  Target: LAMA2; (-) strand; PAM type: NRG; PAM sequence: GGG
tttctagtgtccctgcttca

SEQ ID NO: 83473 - DNA, 20 bp, Artificial Sequence
  Description of Artificial Sequence: Synthetic oligonucleotide
  Target: LAMA2; (-) strand; PAM type: NRG; PAM sequence: AGG
atttctagtgtccctgcttc

SEQ ID NO: 83474 - DNA, 20 bp, Artificial Sequence
  Description of Artificial Sequence: Synthetic oligonucleotide
  Target: LAMA2; (-) strand; PAM type: NRG; PAM sequence: CAG
catttctagtgtccctgctt

SEQ ID NO: 83475 - DNA, 20 bp, Artificial Sequence
  Description of Artificial Sequence: Synthetic oligonucleotide
  Target: LAMA2; (-) strand; PAM type: NRG; PAM sequence: TAG
tcactgtctgaaagcatttc

SEQ ID NO: 83476 - DNA, 20 bp, Artificial Sequence
  Description of Artificial Sequence: Synthetic oligonucleotide
  Target: LAMA2; (-) strand; PAM type: NRG; PAM sequence: AAG
gcccccatttcactgtctga

SEQ ID NO: 83477 - DNA, 20 bp, Artificial Sequence
  Description of Artificial Sequence: Synthetic oligonucleotide
  Target: LAMA2; (-) strand; PAM type: NRG; PAM sequence: TAG
ggcttgcaggaagaattttc

SEQ ID NO: 83478 - DNA, 20 bp, Artificial Sequence
  Description of Artificial Sequence: Synthetic oligonucleotide
  Target: LAMA2; (-) strand; PAM type: NRG; PAM sequence: AAG
tgcctctgtaggcttgcagg

SEQ ID NO: 83479 - DNA, 20 bp, Artificial Sequence
  Description of Artificial Sequence: Synthetic oligonucleotide
  Target: LAMA2; (-) strand; PAM type: NRG; PAM sequence: AGG
agctgcctctgtaggcttgc

SEQ ID NO: 83480 - DNA, 20 bp, Artificial Sequence
  Description of Artificial Sequence: Synthetic oligonucleotide
  Target: LAMA2; (-) strand; PAM type: NRG; PAM sequence: CAG
tagctgcctctgtaggcttg

SEQ ID NO: 83481 - DNA, 20 bp, Artificial Sequence
  Description of Artificial Sequence: Synthetic oligonucleotide
  Target: LAMA2; (-) strand; PAM type: NRG; PAM sequence: AGG
aattttctagctgcctctgt

SEQ ID NO: 83482 - DNA, 20 bp, Artificial Sequence
  Description of Artificial Sequence: Synthetic oligonucleotide
  Target: LAMA2; (-) strand; PAM type: NRG; PAM sequence: TAG
aaattttctagctgcctctg

SEQ ID NO: 83483 - DNA, 20 bp, Artificial Sequence
  Description of Artificial Sequence: Synthetic oligonucleotide
  Target: LAMA2; (-) strand; PAM type: NRG; PAM sequence: TAG
cccctaagagaaaaattttc

SEQ ID NO: 83484 - DNA, 20 bp, Artificial Sequence
  Description of Artificial Sequence: Synthetic oligonucleotide
  Target: LAMA2; (-) strand; PAM type: NRG; PAM sequence: GAG
tacccacccagagcccctaa

SEQ ID NO: 83485 - DNA, 20 bp, Artificial Sequence
  Description of Artificial Sequence: Synthetic oligonucleotide
  Target: LAMA2; (-) strand; PAM type: NRG; PAM sequence: AAG
tttacccacccagagcccct

SEQ ID NO: 83486 - DNA, 20 bp, Artificial Sequence
  Description of Artificial Sequence: Synthetic oligonucleotide
  Target: LAMA2; (-) strand; PAM type: NRG; PAM sequence: GAG
tagtaacttttacccaccca

SEQ ID NO: 83487 - DNA, 20 bp, Artificial Sequence
  Description of Artificial Sequence: Synthetic oligonucleotide
  Target: LAMA2; (-) strand; PAM type: NRG; PAM sequence: CAG
ggtagtaacttttacccacc

SEQ ID NO: 83488 - DNA, 20 bp, Artificial Sequence
  Description of Artificial Sequence: Synthetic oligonucleotide
  Target: LAMA2; (-) strand; PAM type: NRG; PAM sequence: TAG
ggattcggtcctacacaagg

SEQ ID NO: 83489 - DNA, 20 bp, Artificial Sequence
  Description of Artificial Sequence: Synthetic oligonucleotide
  Target: LAMA2; (-) strand; PAM type: NRG; PAM sequence: AGG
tggggattcggtcctacaca

SEQ ID NO: 83490 - DNA, 20 bp, Artificial Sequence
  Description of Artificial Sequence: Synthetic oligonucleotide
  Target: LAMA2; (-) strand; PAM type: NRG; PAM sequence: AAG
ttggggattcggtcctacac

SEQ ID NO: 83491 - DNA, 20 bp, Artificial Sequence
  Description of Artificial Sequence: Synthetic oligonucleotide
  Target: LAMA2; (-) strand; PAM type: NRG; PAM sequence: CGG
ggcacacaggtttggggatt

SEQ ID NO: 83492 - DNA, 20 bp, Artificial Sequence
  Description of Artificial Sequence: Synthetic oligonucleotide
  Target: LAMA2; (-) strand; PAM type: NRG; PAM sequence: GGG
ccacgtggcacacaggtttg

SEQ ID NO: 83493 - DNA, 20 bp, Artificial Sequence
  Description of Artificial Sequence: Synthetic oligonucleotide
  Target: LAMA2; (-) strand; PAM type: NRG; PAM sequence: GGG
cccacgtggcacacaggttt

SEQ ID NO: 83494 - DNA, 20 bp, Artificial Sequence
  Description of Artificial Sequence: Synthetic oligonucleotide
  Target: LAMA2; (-) strand; PAM type: NRG; PAM sequence: TGG
tcccacgtggcacacaggtt

SEQ ID NO: 83495 - DNA, 20 bp, Artificial Sequence
  Description of Artificial Sequence: Synthetic oligonucleotide
  Target: LAMA2; (-) strand; PAM type: NRG; PAM sequence: AGG
cccattcccacgtggcacac

SEQ ID NO: 83496 - DNA, 20 bp, Artificial Sequence
  Description of Artificial Sequence: Synthetic oligonucleotide
  Target: LAMA2; (-) strand; PAM type: NRG; PAM sequence: CAG
tcccattcccacgtggcaca

SEQ ID NO: 83497 - DNA, 20 bp, Artificial Sequence
  Description of Artificial Sequence: Synthetic oligonucleotide
  Target: LAMA2; (-) strand; PAM type: NRG; PAM sequence: TGG
aaatgtatcccattcccacg

SEQ ID NO: 83498 - DNA, 20 bp, Artificial Sequence
  Description of Artificial Sequence: Synthetic oligonucleotide
  Target: LAMA2; (-) strand; PAM type: NRG; PAM sequence: GAG
agaatgccagcacataaggg

SEQ ID NO: 83499 - DNA, 20 bp, Artificial Sequence
  Description of Artificial Sequence: Synthetic oligonucleotide
  Target: LAMA2; (-) strand; PAM type: NRG; PAM sequence: GGG
gaagaatgccagcacataag

SEQ ID NO: 83500 - DNA, 20 bp, Artificial Sequence
  Description of Artificial Sequence: Synthetic oligonucleotide
  Target: LAMA2; (-) strand; PAM type: NRG; PAM sequence: GGG
tgaagaatgccagcacataa

SEQ ID NO: 83501 - DNA, 20 bp, Artificial Sequence
  Description of Artificial Sequence: Synthetic oligonucleotide
  Target: LAMA2; (-) strand; PAM type: NRG; PAM sequence: AGG
ttgaagaatgccagcacata

SEQ ID NO: 83502 - DNA, 20 bp, Artificial Sequence
  Description of Artificial Sequence: Synthetic oligonucleotide
  Target: LAMA2; (-) strand; PAM type: NRG; PAM sequence: AAG
gttgaagaatgccagcacat

SEQ ID NO: 83503 - DNA, 20 bp, Artificial Sequence
  Description of Artificial Sequence: Synthetic oligonucleotide
  Target: LAMA2; (-) strand; PAM type: NRG; PAM sequence: CAG
cttgacttgttgaagaatgc

SEQ ID NO: 83504 - DNA, 20 bp, Artificial Sequence
  Description of Artificial Sequence: Synthetic oligonucleotide
  Target: LAMA2; (-) strand; PAM type: NRG; PAM sequence: AAG
atcatttccttgacttgttg

SEQ ID NO: 83505 - DNA, 20 bp, Artificial Sequence
  Description of Artificial Sequence: Synthetic oligonucleotide
  Target: LAMA2; (-) strand; PAM type: NRG; PAM sequence: GGG
ggctgtattatttttcctat

SEQ ID NO: 83506 - DNA, 20 bp, Artificial Sequence
  Description of Artificial Sequence: Synthetic oligonucleotide
  Target: LAMA2; (-) strand; PAM type: NRG; PAM sequence: TGG
aggctgtattatttttccta

SEQ ID NO: 83507 - DNA, 20 bp, Artificial Sequence
  Description of Artificial Sequence: Synthetic oligonucleotide
  Target: LAMA2; (-) strand; PAM type: NRG; PAM sequence: AGG
gatgagatcattttcagttg

SEQ ID NO: 83508 - DNA, 20 bp, Artificial Sequence
  Description of Artificial Sequence: Synthetic oligonucleotide
  Target: LAMA2; (-) strand; PAM type: NRG; PAM sequence: GAG
tgatgagatcattttcagtt

SEQ ID NO: 83509 - DNA, 20 bp, Artificial Sequence
  Description of Artificial Sequence: Synthetic oligonucleotide
  Target: LAMA2; (-) strand; PAM type: NRG; PAM sequence: CAG
ctttgtgatgagatcatttt

SEQ ID NO: 83510 - DNA, 20 bp, Artificial Sequence
  Description of Artificial Sequence: Synthetic oligonucleotide
  Target: LAMA2; (-) strand; PAM type: NRG; PAM sequence: GAG
tactttacttgctttgtgat

SEQ ID NO: 83511 - DNA, 20 bp, Artificial Sequence
  Description of Artificial Sequence: Synthetic oligonucleotide
  Target: LAMA2; (-) strand; PAM type: NRG; PAM sequence: TAG
tggctactggtttccttttg

SEQ ID NO: 83512 - DNA, 20 bp, Artificial Sequence
  Description of Artificial Sequence: Synthetic oligonucleotide
  Target: LAMA2; (-) strand; PAM type: NRG; PAM sequence: TGG
atcctcatttttgtggctac

SEQ ID NO: 83513 - DNA, 20 bp, Artificial Sequence
  Description of Artificial Sequence: Synthetic oligonucleotide
  Target: LAMA2; (-) strand; PAM type: NRG; PAM sequence: TGG
tacaaatatcctcatttttg

SEQ ID NO: 83514 - DNA, 20 bp, Artificial Sequence
  Description of Artificial Sequence: Synthetic oligonucleotide
  Target: LAMA2; (-) strand; PAM type: NRG; PAM sequence: TAG
ttatttcagactaccctttc

SEQ ID NO: 83515 - DNA, 20 bp, Artificial Sequence
  Description of Artificial Sequence: Synthetic oligonucleotide
  Target: LAMA2; (-) strand; PAM type: NRG; PAM sequence: CAG
ttatgaatacaaatttattt

SEQ ID NO: 83516 - DNA, 20 bp, Artificial Sequence
  Description of Artificial Sequence: Synthetic oligonucleotide
  Target: LAMA2; (-) strand; PAM type: NRG; PAM sequence: CAG
atgtgataagaatatgatca

SEQ ID NO: 83517 - DNA, 20 bp, Artificial Sequence
  Description of Artificial Sequence: Synthetic oligonucleotide
  Target: LAMA2; (-) strand; PAM type: NRG; PAM sequence: AAG
atttttatgatttatgtgat

SEQ ID NO: 83518 - DNA, 20 bp, Artificial Sequence
  Description of Artificial Sequence: Synthetic oligonucleotide
  Target: LAMA2; (-) strand; PAM type: NRG; PAM sequence: TAG
gttacttttgaattttaata

SEQ ID NO: 83519 - DNA, 20 bp, Artificial Sequence
  Description of Artificial Sequence: Synthetic oligonucleotide
  Target: LAMA2; (-) strand; PAM type: NRG; PAM sequence: TGG
acatgtttcttttccaaacc

SEQ ID NO: 83520 - DNA, 20 bp, Artificial Sequence
  Description of Artificial Sequence: Synthetic oligonucleotide
  Target: LAMA2; (-) strand; PAM type: NRG; PAM sequence: AAG
catatttttttcatttctgg

SEQ ID NO: 83521 - DNA, 20 bp, Artificial Sequence
  Description of Artificial Sequence: Synthetic oligonucleotide
  Target: LAMA2; (-) strand; PAM type: NRG; PAM sequence: TGG
ctgcatatttttttcatttc

SEQ ID NO: 83522 - DNA, 20 bp, Artificial Sequence
  Description of Artificial Sequence: Synthetic oligonucleotide
  Target: LAMA2; (-) strand; PAM type: NRG; PAM sequence: CAG
atttctgattttctatcctg

SEQ ID NO: 83523 - DNA, 20 bp, Artificial Sequence
  Description of Artificial Sequence: Synthetic oligonucleotide
  Target: LAMA2; (-) strand; PAM type: NRG; PAM sequence: AGG
aatttataggtaattttttc

SEQ ID NO: 83524 - DNA, 20 bp, Artificial Sequence
  Description of Artificial Sequence: Synthetic oligonucleotide
  Target: LAMA2; (-) strand; PAM type: NRG; PAM sequence: CAG
caatttataggtaatttttt

SEQ ID NO: 83525 - DNA, 20 bp, Artificial Sequence
  Description of Artificial Sequence: Synthetic oligonucleotide
  Target: LAMA2; (-) strand; PAM type: NRG; PAM sequence: AGG
acttccctatgtcaatttat

SEQ ID NO: 83526 - DNA, 20 bp, Artificial Sequence
  Description of Artificial Sequence: Synthetic oligonucleotide
  Target: LAMA2; (-) strand; PAM type: NRG; PAM sequence: TAG
tacttccctatgtcaattta

SEQ ID NO: 83527 - DNA, 20 bp, Artificial Sequence
  Description of Artificial Sequence: Synthetic oligonucleotide
  Target: LAMA2; (-) strand; PAM type: NRG; PAM sequence: TAG
ttacaattctgtgagtcagt

SEQ ID NO: 83528 - DNA, 20 bp, Artificial Sequence
  Description of Artificial Sequence: Synthetic oligonucleotide
  Target: LAMA2; (-) strand; PAM type: NRG; PAM sequence: CAG
aattttacaattctgtgagt

SEQ ID NO: 83529 - DNA, 20 bp, Artificial Sequence
  Description of Artificial Sequence: Synthetic oligonucleotide
  Target: LAMA2; (-) strand; PAM type: NRG; PAM sequence: GAG
gttcaattttacaattctgt

SEQ ID NO: 83530 - DNA, 20 bp, Artificial Sequence
  Description of Artificial Sequence: Synthetic oligonucleotide
  Target: LAMA2; (-) strand; PAM type: NRG; PAM sequence: TGG
acttcttctaatctcttctt

SEQ ID NO: 83531 - DNA, 20 bp, Artificial Sequence
  Description of Artificial Sequence: Synthetic oligonucleotide
  Target: LAMA2; (-) strand; PAM type: NRG; PAM sequence: TAG
ctcaaactgaggatttataa

SEQ ID NO: 83532 - DNA, 20 bp, Artificial Sequence
  Description of Artificial Sequence: Synthetic oligonucleotide
  Target: LAMA2; (-) strand; PAM type: NRG; PAM sequence: AGG
tttttatcatcctcaaactg

SEQ ID NO: 83533 - DNA, 20 bp, Artificial Sequence
  Description of Artificial Sequence: Synthetic oligonucleotide
  Target: LAMA2; (-) strand; PAM type: NRG; PAM sequence: GAG
ttttttatcatcctcaaact

SEQ ID NO: 83534 - DNA, 20 bp, Artificial Sequence
  Description of Artificial Sequence: Synthetic oligonucleotide
  Target: LAMA2; (-) strand; PAM type: NRG; PAM sequence: TAG
gacaggttttctactagggg

SEQ ID NO: 83535 - DNA, 20 bp, Artificial Sequence
  Description of Artificial Sequence: Synthetic oligonucleotide
  Target: LAMA2; (-) strand; PAM type: NRG; PAM sequence: GGG
gttgacaggttttctactag

SEQ ID NO: 83536 - DNA, 20 bp, Artificial Sequence
  Description of Artificial Sequence: Synthetic oligonucleotide
  Target: LAMA2; (-) strand; PAM type: NRG; PAM sequence: GGG
ggttgacaggttttctacta

SEQ ID NO: 83537 - DNA, 20 bp, Artificial Sequence
  Description of Artificial Sequence: Synthetic oligonucleotide
  Target: LAMA2; (-) strand; PAM type: NRG; PAM sequence: AGG
tggttgacaggttttctact

SEQ ID NO: 83538 - DNA, 20 bp, Artificial Sequence
  Description of Artificial Sequence: Synthetic oligonucleotide
  Target: LAMA2; (-) strand; PAM type: NRG; PAM sequence: TAG
ctggttgacaggttttctac

SEQ ID NO: 83539 - DNA, 20 bp, Artificial Sequence
  Description of Artificial Sequence: Synthetic oligonucleotide
  Target: LAMA2; (-) strand; PAM type: NRG; PAM sequence: AGG
tctttgtcttgctggttgac

SEQ ID NO: 83540 - DNA, 20 bp, Artificial Sequence
  Description of Artificial Sequence: Synthetic oligonucleotide
  Target: LAMA2; (-) strand; PAM type: NRG; PAM sequence: CAG
ctctttgtcttgctggttga

SEQ ID NO: 83541 - DNA, 20 bp, Artificial Sequence
  Description of Artificial Sequence: Synthetic oligonucleotide
  Target: LAMA2; (-) strand; PAM type: NRG; PAM sequence: TGG
tatttttctctttgtcttgc

SEQ ID NO: 83542 - DNA, 20 bp, Artificial Sequence
  Description of Artificial Sequence: Synthetic oligonucleotide
  Target: LAMA2; (-) strand; PAM type: NRG; PAM sequence: CAG
acaataaagatatttgcccc

SEQ ID NO: 83543 - DNA, 20 bp, Artificial Sequence
  Description of Artificial Sequence: Synthetic oligonucleotide
  Target: LAMA2; (-) strand; PAM type: NRG; PAM sequence: AAG
agtggtaaacactcacaata

SEQ ID NO: 83544 - DNA, 20 bp, Artificial Sequence
  Description of Artificial Sequence: Synthetic oligonucleotide
  Target: LAMA2; (-) strand; PAM type: NRG; PAM sequence: TGG
ccatgaagttggactgtgag

SEQ ID NO: 83545 - DNA, 20 bp, Artificial Sequence
  Description of Artificial Sequence: Synthetic oligonucleotide
  Target: LAMA2; (-) strand; PAM type: NRG; PAM sequence: GAG
tttccatgaagttggactgt

SEQ ID NO: 83546 - DNA, 20 bp, Artificial Sequence
  Description of Artificial Sequence: Synthetic oligonucleotide
  Target: LAMA2; (-) strand; PAM type: NRG; PAM sequence: TGG
taatattctttccatgaagt

SEQ ID NO: 83547 - DNA, 20 bp, Artificial Sequence
  Description of Artificial Sequence: Synthetic oligonucleotide
  Target: LAMA2; (-) strand; PAM type: NRG; PAM sequence: AAG
tatttaatattctttccatg

SEQ ID NO: 83548 - DNA, 20 bp, Artificial Sequence
  Description of Artificial Sequence: Synthetic oligonucleotide
  Target: LAMA2; (-) strand; PAM type: NRG; PAM sequence: AGG
gggttcaatattcttactaa

SEQ ID NO: 83549 - DNA, 20 bp, Artificial Sequence
  Description of Artificial Sequence: Synthetic oligonucleotide
  Target: LAMA2; (-) strand; PAM type: NRG; PAM sequence: AAG
tgggttcaatattcttacta

SEQ ID NO: 83550 - DNA, 20 bp, Artificial Sequence
  Description of Artificial Sequence: Synthetic oligonucleotide
  Target: LAMA2; (-) strand; PAM type: NRG; PAM sequence: GGG
atctagtgaaactgtcttat

SEQ ID NO: 83551 - DNA, 20 bp, Artificial Sequence
  Description of Artificial Sequence: Synthetic oligonucleotide
  Target: LAMA2; (-) strand; PAM type: NRG; PAM sequence: TGG
aatctagtgaaactgtctta

SEQ ID NO: 83552 - DNA, 20 bp, Artificial Sequence
  Description of Artificial Sequence: Synthetic oligonucleotide
  Target: LAMA2; (-) strand; PAM type: NRG; PAM sequence: TAG
gattcttctggactataatc

SEQ ID NO: 83553 - DNA, 20 bp, Artificial Sequence
  Description of Artificial Sequence: Synthetic oligonucleotide
  Target: LAMA2; (-) strand; PAM type: NRG; PAM sequence: TGG
tttttatagattgattcttc

SEQ ID NO: 83554 - DNA, 20 bp, Artificial Sequence
  Description of Artificial Sequence: Synthetic oligonucleotide
  Target: LAMA2; (-) strand; PAM type: NRG; PAM sequence: TAG
agaaatactactgcttttta

SEQ ID NO: 83555 - DNA, 20 bp, Artificial Sequence
  Description of Artificial Sequence: Synthetic oligonucleotide
  Target: LAMA2; (-) strand; PAM type: NRG; PAM sequence: TAG
atttgcttgtcactgacata

SEQ ID NO: 83556 - DNA, 20 bp, Artificial Sequence
  Description of Artificial Sequence: Synthetic oligonucleotide
  Target: LAMA2; (-) strand; PAM type: NRG; PAM sequence: AAG
gaagtttttcttgctattct

SEQ ID NO: 83557 - DNA, 20 bp, Artificial Sequence
  Description of Artificial Sequence: Synthetic oligonucleotide
  Target: LAMA2; (-) strand; PAM type: NRG; PAM sequence: AAG
acttatttttaggtatcatg

SEQ ID NO: 83558 - DNA, 20 bp, Artificial Sequence
  Description of Artificial Sequence: Synthetic oligonucleotide
  Target: LAMA2; (-) strand; PAM type: NRG; PAM sequence: AGG
ttttacaaacacttattttt

SEQ ID NO: 83559 - DNA, 20 bp, Artificial Sequence
  Description of Artificial Sequence: Synthetic oligonucleotide
  Target: LAMA2; (-) strand; PAM type: NRG; PAM sequence: TAG
attttacaaacacttatttt

SEQ ID NO: 83560 - DNA, 20 bp, Artificial Sequence
  Description of Artificial Sequence: Synthetic oligonucleotide
  Target: LAMA2; (-) strand; PAM type: NRG; PAM sequence: TAG
tcctcagctgtctcctcatt

SEQ ID NO: 83561 - DNA, 20 bp, Artificial Sequence
  Description of Artificial Sequence: Synthetic oligonucleotide
  Target: LAMA2; (-) strand; PAM type: NRG; PAM sequence: CAG
cactggtacttggtgatcct

SEQ ID NO: 83562 - DNA, 20 bp, Artificial Sequence
  Description of Artificial Sequence: Synthetic oligonucleotide
  Target: LAMA2; (-) strand; PAM type: NRG; PAM sequence: TGG
cacagattttcactggtact

SEQ ID NO: 83563 - DNA, 20 bp, Artificial Sequence
  Description of Artificial Sequence: Synthetic oligonucleotide
  Target: LAMA2; (-) strand; PAM type: NRG; PAM sequence: TGG
caaatttcacagattttcac

SEQ ID NO: 83564 - DNA, 20 bp, Artificial Sequence
  Description of Artificial Sequence: Synthetic oligonucleotide
  Target: LAMA2; (-) strand; PAM type: NRG; PAM sequence: CAG
ggtaaacatttcaaatttca

SEQ ID NO: 83565 - DNA, 20 bp, Artificial Sequence
  Description of Artificial Sequence: Synthetic oligonucleotide
  Target: LAMA2; (-) strand; PAM type: NRG; PAM sequence: TGG
attaactctattaatagaaa

SEQ ID NO: 83566 - DNA, 20 bp, Artificial Sequence
  Description of Artificial Sequence: Synthetic oligonucleotide
  Target: LAMA2; (-) strand; PAM type: NRG; PAM sequence: TAG
gtactaattaactctattaa

SEQ ID NO: 83567 - DNA, 20 bp, Artificial Sequence
  Description of Artificial Sequence: Synthetic oligonucleotide
  Target: LAMA2; (-) strand; PAM type: NRG; PAM sequence: TGG
catattgccctcctaaattg

SEQ ID NO: 83568 - DNA, 20 bp, Artificial Sequence
  Description of Artificial Sequence: Synthetic oligonucleotide
  Target: LAMA2; (-) strand; PAM type: NRG; PAM sequence: TAG
tttatcaccttcaaagatac

SEQ ID NO: 83569 - DNA, 20 bp, Artificial Sequence
  Description of Artificial Sequence: Synthetic oligonucleotide
  Target: LAMA2; (-) strand; PAM type: NRG; PAM sequence: AAG
acagggttttatcaccttca

SEQ ID NO: 83570 - DNA, 20 bp, Artificial Sequence
  Description of Artificial Sequence: Synthetic oligonucleotide
  Target: LAMA2; (-) strand; PAM type: NRG; PAM sequence: GGG
tgtggaattgctggttgaca

SEQ ID NO: 83571 - DNA, 20 bp, Artificial Sequence
  Description of Artificial Sequence: Synthetic oligonucleotide
  Target: LAMA2; (-) strand; PAM type: NRG; PAM sequence: AGG
atgtggaattgctggttgac

SEQ ID NO: 83572 - DNA, 20 bp, Artificial Sequence
  Description of Artificial Sequence: Synthetic oligonucleotide
  Target: LAMA2; (-) strand; PAM type: NRG; PAM sequence: CAG
gatgtggaattgctggttga

SEQ ID NO: 83573 - DNA, 20 bp, Artificial Sequence
  Description of Artificial Sequence: Synthetic oligonucleotide
  Target: LAMA2; (-) strand; PAM type: NRG; PAM sequence: TGG
atgtttggatgtggaattgc

SEQ ID NO: 83574 - DNA, 20 bp, Artificial Sequence
  Description of Artificial Sequence: Synthetic oligonucleotide
  Target: LAMA2; (-) strand; PAM type: NRG; PAM sequence: TGG
ttggggtaaatgtttggatg

SEQ ID NO: 83575 - DNA, 20 bp, Artificial Sequence
  Description of Artificial Sequence: Synthetic oligonucleotide
  Target: LAMA2; (-) strand; PAM type: NRG; PAM sequence: TGG
agttttttggggtaaatgtt

SEQ ID NO: 83576 - DNA, 20 bp, Artificial Sequence
  Description of Artificial Sequence: Synthetic oligonucleotide
  Target: LAMA2; (-) strand; PAM type: NRG; PAM sequence: GGG
tacattgtaagagttttttg

SEQ ID NO: 83577 - DNA, 20 bp, Artificial Sequence
  Description of Artificial Sequence: Synthetic oligonucleotide
  Target: LAMA2; (-) strand; PAM type: NRG; PAM sequence: GGG
atacattgtaagagtttttt

SEQ ID NO: 83578 - DNA, 20 bp, Artificial Sequence
  Description of Artificial Sequence: Synthetic oligonucleotide
  Target: LAMA2; (-) strand; PAM type: NRG; PAM sequence: TGG
tatacattgtaagagttttt

SEQ ID NO: 83579 - DNA, 20 bp, Artificial Sequence
  Description of Artificial Sequence: Synthetic oligonucleotide
  Target: LAMA2; (-) strand; PAM type: NRG; PAM sequence: GAG
tttttctctatacattgtaa

SEQ ID NO: 83580 - DNA, 20 bp, Artificial Sequence
  Description of Artificial Sequence: Synthetic oligonucleotide
  Target: LAMA2; (-) strand; PAM type: NRG; PAM sequence: AAG
ggtttttctctatacattgt

SEQ ID NO: 83581 - DNA, 20 bp, Artificial Sequence
  Description of Artificial Sequence: Synthetic oligonucleotide
  Target: LAMA2; (-) strand; PAM type: NRG; PAM sequence: TGG
tacgttgagcacattttaga

SEQ ID NO: 83582 - DNA, 20 bp, Artificial Sequence
  Description of Artificial Sequence: Synthetic oligonucleotide
  Target: LAMA2; (-) strand; PAM type: NRG; PAM sequence: TAG
catttacgttgagcacattt

SEQ ID NO: 83583 - DNA, 20 bp, Artificial Sequence
  Description of Artificial Sequence: Synthetic oligonucleotide
  Target: LAMA2; (-) strand; PAM type: NRG; PAM sequence: GAG
atagtaagtacatttacgtt

SEQ ID NO: 83584 - DNA, 20 bp, Artificial Sequence
  Description of Artificial Sequence: Synthetic oligonucleotide
  Target: LAMA2; (-) strand; PAM type: NRG; PAM sequence: AAG
tttctcattttcatcatagt

SEQ ID NO: 83585 - DNA, 20 bp, Artificial Sequence
  Description of Artificial Sequence: Synthetic oligonucleotide
  Target: LAMA2; (-) strand; PAM type: NRG; PAM sequence: TAG
tatttttctcattttcatca

SEQ ID NO: 83586 - DNA, 20 bp, Artificial Sequence
  Description of Artificial Sequence: Synthetic oligonucleotide
  Target: LAMA2; (-) strand; PAM type: NRG; PAM sequence: AGG
tgtttcttttatcagattaa

SEQ ID NO: 83587 - DNA, 20 bp, Artificial Sequence
  Description of Artificial Sequence: Synthetic oligonucleotide
  Target: LAMA2; (-) strand; PAM type: NRG; PAM sequence: AAG
ctgtttcttttatcagatta

SEQ ID NO: 83588 - DNA, 20 bp, Artificial Sequence
  Description of Artificial Sequence: Synthetic oligonucleotide
  Target: LAMA2; (-) strand; PAM type: NRG; PAM sequence: CAG
actttaactgtttcttttat

SEQ ID NO: 83589 - DNA, 20 bp, Artificial Sequence
  Description of Artificial Sequence: Synthetic oligonucleotide
  Target: LAMA2; (-) strand; PAM type: NRG; PAM sequence: AAG
tttatcatggtttatacatg

SEQ ID NO: 83590 - DNA, 20 bp, Artificial Sequence
  Description of Artificial Sequence: Synthetic oligonucleotide
  Target: LAMA2; (-) strand; PAM type: NRG; PAM sequence: TGG
gaagtttctgaaatttatca

SEQ ID NO: 83591 - DNA, 20 bp, Artificial Sequence
  Description of Artificial Sequence: Synthetic oligonucleotide
  Target: LAMA2; (-) strand; PAM type: NRG; PAM sequence: AAG
gacattgttttttccacctg

SEQ ID NO: 83592 - DNA, 20 bp, Artificial Sequence
  Description of Artificial Sequence: Synthetic oligonucleotide
  Target: LAMA2; (-) strand; PAM type: NRG; PAM sequence: TAG
atatgtattcacaaacaatg

SEQ ID NO: 83593 - DNA, 20 bp, Artificial Sequence
  Description of Artificial Sequence: Synthetic oligonucleotide
  Target: LAMA2; (-) strand; PAM type: NRG; PAM sequence: AAG
gaaattagtacttaccctac

SEQ ID NO: 83594 - DNA, 20 bp, Artificial Sequence
  Description of Artificial Sequence: Synthetic oligonucleotide
  Target: LAMA2; (-) strand; PAM type: NRG; PAM sequence: TAG
ggtaactactattctgaaat

SEQ ID NO: 83595 - DNA, 20 bp, Artificial Sequence
  Description of Artificial Sequence: Synthetic oligonucleotide
  Target: LAMA2; (-) strand; PAM type: NRG; PAM sequence: AGG
tccctttcctgtttctctag

SEQ ID NO: 83596 - DNA, 20 bp, Artificial Sequence
  Description of Artificial Sequence: Synthetic oligonucleotide
  Target: LAMA2; (-) strand; PAM type: NRG; PAM sequence: GAG
ttccctttcctgtttctcta

SEQ ID NO: 83597 - DNA, 20 bp, Artificial Sequence
  Description of Artificial Sequence: Synthetic oligonucleotide
  Target: LAMA2; (-) strand; PAM type: NRG; PAM sequence: TAG
tattccctttcctgtttctc

SEQ ID NO: 83598 - DNA, 20 bp, Artificial Sequence
  Description of Artificial Sequence: Synthetic oligonucleotide
  Target: LAMA2; (-) strand; PAM type: NRG; PAM sequence: TAG
atttttaaagcaatgatact

SEQ ID NO: 83599 - DNA, 20 bp, Artificial Sequence
  Description of Artificial Sequence: Synthetic oligonucleotide
  Target: LAMA2; (-) strand; PAM type: NRG; PAM sequence: AAG
ttgcctcagatatattttta

SEQ ID NO: 83600 - DNA, 20 bp, Artificial Sequence
  Description of Artificial Sequence: Synthetic oligonucleotide
  Target: LAMA2; (-) strand; PAM type: NRG; PAM sequence: CAG
tttatattttatatttgcct

SEQ ID NO: 83601 - DNA, 20 bp, Artificial Sequence
  Description of Artificial Sequence: Synthetic oligonucleotide
  Target: LAMA2; (-) strand; PAM type: NRG; PAM sequence: AGG
gcattacccatgcaacctag

SEQ ID NO: 83602 - DNA, 20 bp, Artificial Sequence
  Description of Artificial Sequence: Synthetic oligonucleotide
  Target: LAMA2; (-) strand; PAM type: NRG; PAM sequence: GAG
tgcattacccatgcaaccta

SEQ ID NO: 83603 - DNA, 20 bp, Artificial Sequence
  Description of Artificial Sequence: Synthetic oligonucleotide
  Target: LAMA2; (-) strand; PAM type: NRG; PAM sequence: TAG
catgcattacccatgcaacc

SEQ ID NO: 83604 - DNA, 20 bp, Artificial Sequence
  Description of Artificial Sequence: Synthetic oligonucleotide
  Target: LAMA2; (-) strand; PAM type: NRG; PAM sequence: AAG
attatattaagacattcaaa

SEQ ID NO: 83605 - DNA, 20 bp, Artificial Sequence
  Description of Artificial Sequence: Synthetic oligonucleotide
  Target: LAMA2; (-) strand; PAM type: NRG; PAM sequence: AAG
tttaaattagaaattatatt

SEQ ID NO: 83606 - DNA, 20 bp, Artificial Sequence
  Description of Artificial Sequence: Synthetic oligonucleotide
  Target: LAMA2; (-) strand; PAM type: NRG; PAM sequence: TAG
caattaaagaaattttaaat

SEQ ID NO: 83607 - DNA, 20 bp, Artificial Sequence
  Description of Artificial Sequence: Synthetic oligonucleotide
  Target: LAMA2; (-) strand; PAM type: NRG; PAM sequence: AAG
ttcttttttacattcaatta

SEQ ID NO: 83608 - DNA, 20 bp, Artificial Sequence
  Description of Artificial Sequence: Synthetic oligonucleotide
  Target: LAMA2; (-) strand; PAM type: NRG; PAM sequence: TGG
cattctcctctttttaaatc

SEQ ID NO: 83609 - DNA, 20 bp, Artificial Sequence
  Description of Artificial Sequence: Synthetic oligonucleotide
  Target: LAMA2; (-) strand; PAM type: NRG; PAM sequence: TAG
atgtgtaaaatgtaataatg

SEQ ID NO: 83610 - DNA, 20 bp, Artificial Sequence
  Description of Artificial Sequence: Synthetic oligonucleotide
  Target: LAMA2; (-) strand; PAM type: NRG; PAM sequence: GAG
tcattaacatcattgttgaa

SEQ ID NO: 83611 - DNA, 20 bp, Artificial Sequence
  Description of Artificial Sequence: Synthetic oligonucleotide
  Target: LAMA2; (-) strand; PAM type: NRG; PAM sequence: AAG
attcattaacatcattgttg

SEQ ID NO: 83612 - DNA, 20 bp, Artificial Sequence
  Description of Artificial Sequence: Synthetic oligonucleotide
  Target: LAMA2; (-) strand; PAM type: NRG; PAM sequence: TAG
aacatttgagtgtcttgagc

SEQ ID NO: 83613 - DNA, 20 bp, Artificial Sequence
  Description of Artificial Sequence: Synthetic oligonucleotide
  Target: LAMA2; (-) strand; PAM type: NRG; PAM sequence: GAG
tataaacatttgagtgtctt

SEQ ID NO: 83614 - DNA, 20 bp, Artificial Sequence
  Description of Artificial Sequence: Synthetic oligonucleotide
  Target: LAMA2; (-) strand; PAM type: NRG; PAM sequence: GAG
caaaaatattataaacattt

SEQ ID NO: 83615 - DNA, 20 bp, Artificial Sequence
  Description of Artificial Sequence: Synthetic oligonucleotide
  Target: LAMA2; (-) strand; PAM type: NRG; PAM sequence: GAG
ttgcctcttgtaattcgtga

SEQ ID NO: 83616 - DNA, 20 bp, Artificial Sequence
  Description of Artificial Sequence: Synthetic oligonucleotide
  Target: LAMA2; (-) strand; PAM type: NRG; PAM sequence: GAG
acttgcctcttgtaattcgt

SEQ ID NO: 83617 - DNA, 20 bp, Artificial Sequence
  Description of Artificial Sequence: Synthetic oligonucleotide
  Target: LAMA2; (-) strand; PAM type: NRG; PAM sequence: GAG
caatgacttgtcatatatct

SEQ ID NO: 83618 - DNA, 20 bp, Artificial Sequence
  Description of Artificial Sequence: Synthetic oligonucleotide
  Target: LAMA2; (-) strand; PAM type: NRG; PAM sequence: TAG
tgagagtcagacagcactta

SEQ ID NO: 83619 - DNA, 20 bp, Artificial Sequence
  Description of Artificial Sequence: Synthetic oligonucleotide
  Target: LAMA2; (-) strand; PAM type: NRG; PAM sequence: CAG
aacaaatactgagagtcaga

SEQ ID NO: 83620 - DNA, 20 bp, Artificial Sequence
  Description of Artificial Sequence: Synthetic oligonucleotide
  Target: LAMA2; (-) strand; PAM type: NRG; PAM sequence: CAG
aataaacaaatactgagagt

SEQ ID NO: 83621 - DNA, 20 bp, Artificial Sequence
  Description of Artificial Sequence: Synthetic oligonucleotide
  Target: LAMA2; (-) strand; PAM type: NRG; PAM sequence: GAG
ttgaaataaacaaatactga

SEQ ID NO: 83622 - DNA, 20 bp, Artificial Sequence
  Description of Artificial Sequence: Synthetic oligonucleotide
  Target: LAMA2; (-) strand; PAM type: NRG; PAM sequence: GAG
acttgaaataaacaaatact

SEQ ID NO: 83623 - DNA, 20 bp, Artificial Sequence
  Description of Artificial Sequence: Synthetic oligonucleotide
  Target: LAMA2; (-) strand; PAM type: NRG; PAM sequence: TGG
aagagccaatttctagcata

SEQ ID NO: 83624 - DNA, 20 bp, Artificial Sequence
  Description of Artificial Sequence: Synthetic oligonucleotide
  Target: LAMA2; (-) strand; PAM type: NRG; PAM sequence: TAG
actgcaaaagagccaatttc

SEQ ID NO: 83625 - DNA, 20 bp, Artificial Sequence
  Description of Artificial Sequence: Synthetic oligonucleotide
  Target: LAMA2; (-) strand; PAM type: NRG; PAM sequence: GAG
tatgacaccaaactgcaaaa

SEQ ID NO: 83626 - DNA, 20 bp, Artificial Sequence
  Description of Artificial Sequence: Synthetic oligonucleotide
  Target: LAMA2; (-) strand; PAM type: NRG; PAM sequence: AAG
aatatgacaccaaactgcaa

SEQ ID NO: 83627 - DNA, 20 bp, Artificial Sequence
  Description of Artificial Sequence: Synthetic oligonucleotide
  Target: LAMA2; (-) strand; PAM type: NRG; PAM sequence: GAG
tgtcaatttatattatgtgt

SEQ ID NO: 83628 - DNA, 20 bp, Artificial Sequence
  Description of Artificial Sequence: Synthetic oligonucleotide
  Target: LAMA2; (-) strand; PAM type: NRG; PAM sequence: TAG
taaaagcacatgttcctaac

SEQ ID NO: 83629 - DNA, 20 bp, Artificial Sequence
  Description of Artificial Sequence: Synthetic oligonucleotide
  Target: LAMA2; (-) strand; PAM type: NRG; PAM sequence: AAG
taagactttgataaaaataa

SEQ ID NO: 83630 - DNA, 20 bp, Artificial Sequence
  Description of Artificial Sequence: Synthetic oligonucleotide
  Target: LAMA2; (-) strand; PAM type: NRG; PAM sequence: AAG
actatttatctttctattat

SEQ ID NO: 83631 - DNA, 20 bp, Artificial Sequence
  Description of Artificial Sequence: Synthetic oligonucleotide
  Target: LAMA2; (-) strand; PAM type: NRG; PAM sequence: TAG
aaaatacagactttgatttc

SEQ ID NO: 83632 - DNA, 20 bp, Artificial Sequence
  Description of Artificial Sequence: Synthetic oligonucleotide
  Target: LAMA2; (-) strand; PAM type: NRG; PAM sequence: CAG
agcaaaacaagatgaaaata

SEQ ID NO: 83633 - DNA, 20 bp, Artificial Sequence
  Description of Artificial Sequence: Synthetic oligonucleotide
  Target: LAMA2; (-) strand; PAM type: NRG; PAM sequence: AAG
caataaaaacaaagcaaaac

SEQ ID NO: 83634 - DNA, 20 bp, Artificial Sequence
  Description of Artificial Sequence: Synthetic oligonucleotide
  Target: LAMA2; (-) strand; PAM type: NRG; PAM sequence: AAG
tggaaaatgcaataaaaaca

SEQ ID NO: 83635 - DNA, 20 bp, Artificial Sequence
  Description of Artificial Sequence: Synthetic oligonucleotide
  Target: LAMA2; (-) strand; PAM type: NRG; PAM sequence: TGG
gtgggcctgtaaggacttaa

SEQ ID NO: 83636 - DNA, 20 bp, Artificial Sequence
  Description of Artificial Sequence: Synthetic oligonucleotide
  Target: LAMA2; (-) strand; PAM type: NRG; PAM sequence: AGG
catagtctcgtgggcctgta

SEQ ID NO: 83637 - DNA, 20 bp, Artificial Sequence
  Description of Artificial Sequence: Synthetic oligonucleotide
  Target: LAMA2; (-) strand; PAM type: NRG; PAM sequence: AAG
acatagtctcgtgggcctgt

SEQ ID NO: 83638 - DNA, 20 bp, Artificial Sequence
  Description of Artificial Sequence: Synthetic oligonucleotide
  Target: LAMA2; (-) strand; PAM type: NRG; PAM sequence: GGG
gccagatcacatagtctcgt

SEQ ID NO: 83639 - DNA, 20 bp, Artificial Sequence
  Description of Artificial Sequence: Synthetic oligonucleotide
  Target: LAMA2; (-) strand; PAM type: NRG; PAM sequence: TGG
ggccagatcacatagtctcg

SEQ ID NO: 83640 - DNA, 20 bp, Artificial Sequence
  Description of Artificial Sequence: Synthetic oligonucleotide
  Target: LAMA2; (-) strand; PAM type: NRG; PAM sequence: TAG
taagccaaggccagatcaca

SEQ ID NO: 83641 - DNA, 20 bp, Artificial Sequence
  Description of Artificial Sequence: Synthetic oligonucleotide
  Target: LAMA2; (-) strand; PAM type: NRG; PAM sequence: CAG
ctggagaggtaagccaaggc

SEQ ID NO: 83642 - DNA, 20 bp, Artificial Sequence
  Description of Artificial Sequence: Synthetic oligonucleotide
  Target: LAMA2; (-) strand; PAM type: NRG; PAM sequence: AGG
cattctggagaggtaagcca

SEQ ID NO: 83643 - DNA, 20 bp, Artificial Sequence
  Description of Artificial Sequence: Synthetic oligonucleotide
  Target: LAMA2; (-) strand; PAM type: NRG; PAM sequence: AAG
acattctggagaggtaagcc

SEQ ID NO: 83644 - DNA, 20 bp, Artificial Sequence
  Description of Artificial Sequence: Synthetic oligonucleotide
  Target: LAMA2; (-) strand; PAM type: NRG; PAM sequence: AAG
caagaacattctggagaggt

SEQ ID NO: 83645 - DNA, 20 bp, Artificial Sequence
  Description of Artificial Sequence: Synthetic oligonucleotide
  Target: LAMA2; (-) strand; PAM type: NRG; PAM sequence: AGG
aactcaagaacattctggag

SEQ ID NO: 83646 - DNA, 20 bp, Artificial Sequence
  Description of Artificial Sequence: Synthetic oligonucleotide
  Target: LAMA2; (-) strand; PAM type: NRG; PAM sequence: GAG
aaactcaagaacattctgga

SEQ ID NO: 83647 - DNA, 20 bp, Artificial Sequence
  Description of Artificial Sequence: Synthetic oligonucleotide
  Target: LAMA2; (-) strand; PAM type: NRG; PAM sequence: GAG
tgaaactcaagaacattctg

SEQ ID NO: 83648 - DNA, 20 bp, Artificial Sequence
  Description of Artificial Sequence: Synthetic oligonucleotide
  Target: LAMA2; (-) strand; PAM type: NRG; PAM sequence: TGG
actgaaactcaagaacattc

SEQ ID NO: 83649 - DNA, 20 bp, Artificial Sequence
  Description of Artificial Sequence: Synthetic oligonucleotide
  Target: LAMA2; (-) strand; PAM type: NRG; PAM sequence: AAG
aaaaacagtgactgaaactc

SEQ ID NO: 83650 - DNA, 20 bp, Artificial Sequence
  Description of Artificial Sequence: Synthetic oligonucleotide
  Target: LAMA2; (-) strand; PAM type: NRG; PAM sequence: CAG
atttaagcaaagctgaaaaa

SEQ ID NO: 83651 - DNA, 20 bp, Artificial Sequence
  Description of Artificial Sequence: Synthetic oligonucleotide
  Target: LAMA2; (-) strand; PAM type: NRG; PAM sequence: AAG
agactcaagaaatttaagca

SEQ ID NO: 83652 - DNA, 20 bp, Artificial Sequence
  Description of Artificial Sequence: Synthetic oligonucleotide
  Target: LAMA2; (-) strand; PAM type: NRG; PAM sequence: AAG
ctaagagactcaagaaattt

SEQ ID NO: 83653 - DNA, 20 bp, Artificial Sequence
  Description of Artificial Sequence: Synthetic oligonucleotide
  Target: LAMA2; (-) strand; PAM type: NRG; PAM sequence: AAG
tacaaacaactaagagactc

SEQ ID NO: 83654 - DNA, 20 bp, Artificial Sequence
  Description of Artificial Sequence: Synthetic oligonucleotide
  Target: LAMA2; (-) strand; PAM type: NRG; PAM sequence: GAG
cagatgctacaaacaactaa

SEQ ID NO: 83655 - DNA, 20 bp, Artificial Sequence
  Description of Artificial Sequence: Synthetic oligonucleotide
  Target: LAMA2; (-) strand; PAM type: NRG; PAM sequence: AAG
tccagatgctacaaacaact

SEQ ID NO: 83656 - DNA, 20 bp, Artificial Sequence
  Description of Artificial Sequence: Synthetic oligonucleotide
  Target: LAMA2; (-) strand; PAM type: NRG; PAM sequence: CAG
gaatagaacttataaaattc

SEQ ID NO: 83657 - DNA, 20 bp, Artificial Sequence
  Description of Artificial Sequence: Synthetic oligonucleotide
  Target: LAMA2; (-) strand; PAM type: NRG; PAM sequence: TAG
ggtatcccaagaaatctgaa

SEQ ID NO: 83658 - DNA, 20 bp, Artificial Sequence
  Description of Artificial Sequence: Synthetic oligonucleotide
  Target: LAMA2; (-) strand; PAM type: NRG; PAM sequence: AAG
ggctagaaatgaggtatccc

SEQ ID NO: 83659 - DNA, 20 bp, Artificial Sequence
  Description of Artificial Sequence: Synthetic oligonucleotide
  Target: LAMA2; (-) strand; PAM type: NRG; PAM sequence: AGG
aaggaatagggctagaaatg

SEQ ID NO: 83660 - DNA, 20 bp, Artificial Sequence
  Description of Artificial Sequence: Synthetic oligonucleotide
  Target: LAMA2; (-) strand; PAM type: NRG; PAM sequence: GAG
aaaggaatagggctagaaat

SEQ ID NO: 83661 - DNA, 20 bp, Artificial Sequence
  Description of Artificial Sequence: Synthetic oligonucleotide
  Target: LAMA2; (-) strand; PAM type: NRG; PAM sequence: TAG
gctaagcaaaggaatagggc

SEQ ID NO: 83662 - DNA, 20 bp, Artificial Sequence
  Description of Artificial Sequence: Synthetic oligonucleotide
  Target: LAMA2; (-) strand; PAM type: NRG; PAM sequence: GGG
cctggctaagcaaaggaata

SEQ ID NO: 83663 - DNA, 20 bp, Artificial Sequence
  Description of Artificial Sequence: Synthetic oligonucleotide
  Target: LAMA2; (-) strand; PAM type: NRG; PAM sequence: AGG
gcctggctaagcaaaggaat

SEQ ID NO: 83664 - DNA, 20 bp, Artificial Sequence
  Description of Artificial Sequence: Synthetic oligonucleotide
  Target: LAMA2; (-) strand; PAM type: NRG; PAM sequence: TAG
tgcctggctaagcaaaggaa

SEQ ID NO: 83665 - DNA, 20 bp, Artificial Sequence
  Description of Artificial Sequence: Synthetic oligonucleotide
  Target: LAMA2; (-) strand; PAM type: NRG; PAM sequence: AGG
aaaaatgcctggctaagcaa

SEQ ID NO: 83666 - DNA, 20 bp, Artificial Sequence
  Description of Artificial Sequence: Synthetic oligonucleotide
  Target: LAMA2; (-) strand; PAM type: NRG; PAM sequence: AAG
taaaaatgcctggctaagca

SEQ ID NO: 83667 - DNA, 20 bp, Artificial Sequence
  Description of Artificial Sequence: Synthetic oligonucleotide
  Target: LAMA2; (-) strand; PAM type: NRG; PAM sequence: AAG
gccattaaaaatgcctggct

SEQ ID NO: 83668 - DNA, 20 bp, Artificial Sequence
  Description of Artificial Sequence: Synthetic oligonucleotide
  Target: LAMA2; (-) strand; PAM type: NRG; PAM sequence: TGG
gccgagccattaaaaatgcc

SEQ ID NO: 83669 - DNA, 20 bp, Artificial Sequence
  Description of Artificial Sequence: Synthetic oligonucleotide
  Target: LAMA2; (-) strand; PAM type: NRG; PAM sequence: GAG
gagaaagttgaagttaagcc

SEQ ID NO: 83670 - DNA, 20 bp, Artificial Sequence
  Description of Artificial Sequence: Synthetic oligonucleotide
  Target: LAMA2; (-) strand; PAM type: NRG; PAM sequence: AAG
ttcctgagaaagttgaagtt

SEQ ID NO: 83671 - DNA, 20 bp, Artificial Sequence
  Description of Artificial Sequence: Synthetic oligonucleotide
  Target: LAMA2; (-) strand; PAM type: NRG; PAM sequence: AAG
cagctttcctgagaaagttg

SEQ ID NO: 83672 - DNA, 20 bp, Artificial Sequence
  Description of Artificial Sequence: Synthetic oligonucleotide
  Target: LAMA2; (-) strand; PAM type: NRG; PAM sequence: AAG
caggggcagctttcctgaga

SEQ ID NO: 83673 - DNA, 20 bp, Artificial Sequence
  Description of Artificial Sequence: Synthetic oligonucleotide
  Target: LAMA2; (-) strand; PAM type: NRG; PAM sequence: GAG
gatgcaggggcagctttcct

SEQ ID NO: 83674 - DNA, 20 bp, Artificial Sequence
  Description of Artificial Sequence: Synthetic oligonucleotide
  Target: LAMA2; (-) strand; PAM type: NRG; PAM sequence: CAG
atgacttgaggatgcagggg

SEQ ID NO: 83675 - DNA, 20 bp, Artificial Sequence
  Description of Artificial Sequence: Synthetic oligonucleotide
  Target: LAMA2; (-) strand; PAM type: NRG; PAM sequence: GGG
gatatgacttgaggatgcag

SEQ ID NO: 83676 - DNA, 20 bp, Artificial Sequence
  Description of Artificial Sequence: Synthetic oligonucleotide
  Target: LAMA2; (-) strand; PAM type: NRG; PAM sequence: GGG
tgatatgacttgaggatgca

SEQ ID NO: 83677 - DNA, 20 bp, Artificial Sequence
  Description of Artificial Sequence: Synthetic oligonucleotide
  Target: LAMA2; (-) strand; PAM type: NRG; PAM sequence: AGG
atgatatgacttgaggatgc

SEQ ID NO: 83678 - DNA, 20 bp, Artificial Sequence
  Description of Artificial Sequence: Synthetic oligonucleotide
  Target: LAMA2; (-) strand; PAM type: NRG; PAM sequence: CAG
aatgatatgacttgaggatg

SEQ ID NO: 83679 - DNA, 20 bp, Artificial Sequence
  Description of Artificial Sequence: Synthetic oligonucleotide
  Target: LAMA2; (-) strand; PAM type: NRG; PAM sequence: AGG
catgagaatgatatgacttg

SEQ ID NO: 83680 - DNA, 20 bp, Artificial Sequence
  Description of Artificial Sequence: Synthetic oligonucleotide
  Target: LAMA2; (-) strand; PAM type: NRG; PAM sequence: GAG
ccatgagaatgatatgactt

SEQ ID NO: 83681 - DNA, 20 bp, Artificial Sequence
  Description of Artificial Sequence: Synthetic oligonucleotide
  Target: LAMA2; (-) strand; PAM type: NRG; PAM sequence: GAG
ttgaaaagtgattatgccat

SEQ ID NO: 83682 - DNA, 20 bp, Artificial Sequence
  Description of Artificial Sequence: Synthetic oligonucleotide
  Target: LAMA2; (-) strand; PAM type: NRG; PAM sequence: AAG
agaaaagaaaaaggtttgaa

SEQ ID NO: 83683 - DNA, 20 bp, Artificial Sequence
  Description of Artificial Sequence: Synthetic oligonucleotide
  Target: LAMA2; (-) strand; PAM type: NRG; PAM sequence: AGG
gatcataaaagaaaagaaaa

SEQ ID NO: 83684 - DNA, 20 bp, Artificial Sequence
  Description of Artificial Sequence: Synthetic oligonucleotide
  Target: LAMA2; (-) strand; PAM type: NRG; PAM sequence: AAG
agatcataaaagaaaagaaa

SEQ ID NO: 83685 - DNA, 20 bp, Artificial Sequence
  Description of Artificial Sequence: Synthetic oligonucleotide
  Target: LAMA2; (-) strand; PAM type: NRG; PAM sequence: AAG
attatgagatcataaaagaa

SEQ ID NO: 83686 - DNA, 20 bp, Artificial Sequence
  Description of Artificial Sequence: Synthetic oligonucleotide
  Target: LAMA2; (-) strand; PAM type: NRG; PAM sequence: AAG
tactcattatgagatcataa

SEQ ID NO: 83687 - DNA, 20 bp, Artificial Sequence
  Description of Artificial Sequence: Synthetic oligonucleotide
  Target: LAMA2; (-) strand; PAM type: NRG; PAM sequence: GAG
aaaacagaattactcattat

SEQ ID NO: 83688 - DNA, 20 bp, Artificial Sequence
  Description of Artificial Sequence: Synthetic oligonucleotide
  Target: LAMA2; (-) strand; PAM type: NRG; PAM sequence: CAG
gaggtaagatagacataaaa

SEQ ID NO: 83689 - DNA, 20 bp, Artificial Sequence
  Description of Artificial Sequence: Synthetic oligonucleotide
  Target: LAMA2; (-) strand; PAM type: NRG; PAM sequence: TAG
tatcatcaccagaggtaaga

SEQ ID NO: 83690 - DNA, 20 bp, Artificial Sequence
  Description of Artificial Sequence: Synthetic oligonucleotide
  Target: LAMA2; (-) strand; PAM type: NRG; PAM sequence: AAG
tccatatcatcaccagaggt

SEQ ID NO: 83691 - DNA, 20 bp, Artificial Sequence
  Description of Artificial Sequence: Synthetic oligonucleotide
  Target: LAMA2; (-) strand; PAM type: NRG; PAM sequence: AGG
agggtccatatcatcaccag

SEQ ID NO: 83692 - DNA, 20 bp, Artificial Sequence
  Description of Artificial Sequence: Synthetic oligonucleotide
  Target: LAMA2; (-) strand; PAM type: NRG; PAM sequence: GAG
tagggtccatatcatcacca

SEQ ID NO: 83693 - DNA, 20 bp, Artificial Sequence
  Description of Artificial Sequence: Synthetic oligonucleotide
  Target: LAMA2; (-) strand; PAM type: NRG; PAM sequence: CAG
tatagggtccatatcatcac

SEQ ID NO: 83694 - DNA, 20 bp, Artificial Sequence
  Description of Artificial Sequence: Synthetic oligonucleotide
  Target: LAMA2; (-) strand; PAM type: NRG; PAM sequence: GGG
aatggtaaagaaaatatata

SEQ ID NO: 83695 - DNA, 20 bp, Artificial Sequence
  Description of Artificial Sequence: Synthetic oligonucleotide
  Target: LAMA2; (-) strand; PAM type: NRG; PAM sequence: AGG
caatggtaaagaaaatatat

SEQ ID NO: 83696 - DNA, 20 bp, Artificial Sequence
  Description of Artificial Sequence: Synthetic oligonucleotide
  Target: LAMA2; (-) strand; PAM type: NRG; PAM sequence: TAG
gcaatggtaaagaaaatata

SEQ ID NO: 83697 - DNA, 20 bp, Artificial Sequence
  Description of Artificial Sequence: Synthetic oligonucleotide
  Target: LAMA2; (-) strand; PAM type: NRG; PAM sequence: AAG
cttcttattgtgcaatggta

SEQ ID NO: 83698 - DNA, 20 bp, Artificial Sequence
  Description of Artificial Sequence: Synthetic oligonucleotide
  Target: LAMA2; (-) strand; PAM type: NRG; PAM sequence: TGG
gttatcttcttattgtgcaa

SEQ ID NO: 83699 - DNA, 20 bp, Artificial Sequence
  Description of Artificial Sequence: Synthetic oligonucleotide
  Target: LAMA2; (-) strand; PAM type: NRG; PAM sequence: GAG
cttccttctttcttttgtat

SEQ ID NO: 83700 - DNA, 20 bp, Artificial Sequence
  Description of Artificial Sequence: Synthetic oligonucleotide
  Target: LAMA2; (-) strand; PAM type: NRG; PAM sequence: TAG
gtcaaagcttcacgagattt

SEQ ID NO: 83701 - DNA, 20 bp, Artificial Sequence
  Description of Artificial Sequence: Synthetic oligonucleotide
  Target: LAMA2; (-) strand; PAM type: NRG; PAM sequence: GAG
aatgactgtcaaagcttcac

SEQ ID NO: 83702 - DNA, 20 bp, Artificial Sequence
  Description of Artificial Sequence: Synthetic oligonucleotide
  Target: LAMA2; (-) strand; PAM type: NRG; PAM sequence: AAG
gaaaggctaaatgactgtca

SEQ ID NO: 83703 - DNA, 20 bp, Artificial Sequence
  Description of Artificial Sequence: Synthetic oligonucleotide
  Target: LAMA2; (-) strand; PAM type: NRG; PAM sequence: AGG
attataaaacagaatcggaa

SEQ ID NO: 83704 - DNA, 20 bp, Artificial Sequence
  Description of Artificial Sequence: Synthetic oligonucleotide
  Target: LAMA2; (-) strand; PAM type: NRG; PAM sequence: AAG
gattataaaacagaatcgga

SEQ ID NO: 83705 - DNA, 20 bp, Artificial Sequence
  Description of Artificial Sequence: Synthetic oligonucleotide
  Target: LAMA2; (-) strand; PAM type: NRG; PAM sequence: CGG
catagattataaaacagaat

SEQ ID NO: 83706 - DNA, 20 bp, Artificial Sequence
  Description of Artificial Sequence: Synthetic oligonucleotide
  Target: LAMA2; (-) strand; PAM type: NRG; PAM sequence: CAG
ccatttcatagattataaaa

SEQ ID NO: 83707 - DNA, 20 bp, Artificial Sequence
  Description of Artificial Sequence: Synthetic oligonucleotide
  Target: LAMA2; (-) strand; PAM type: NRG; PAM sequence: TAG
gattcaataacaccatttca

SEQ ID NO: 83708 - DNA, 20 bp, Artificial Sequence
  Description of Artificial Sequence: Synthetic oligonucleotide
  Target: LAMA2; (-) strand; PAM type: NRG; PAM sequence: AAG
atacctactgagaggcagaa

SEQ ID NO: 83709 - DNA, 20 bp, Artificial Sequence
  Description of Artificial Sequence: Synthetic oligonucleotide
  Target: LAMA2; (-) strand; PAM type: NRG; PAM sequence: CAG
taattatacctactgagagg

SEQ ID NO: 83710 - DNA, 20 bp, Artificial Sequence
  Description of Artificial Sequence: Synthetic oligonucleotide
  Target: LAMA2; (-) strand; PAM type: NRG; PAM sequence: AGG
tgataattatacctactgag

SEQ ID NO: 83711 - DNA, 20 bp, Artificial Sequence
  Description of Artificial Sequence: Synthetic oligonucleotide
  Target: LAMA2; (-) strand; PAM type: NRG; PAM sequence: GAG
gtgataattatacctactga

SEQ ID NO: 83712 - DNA, 20 bp, Artificial Sequence
  Description of Artificial Sequence: Synthetic oligonucleotide
  Target: LAMA2; (-) strand; PAM type: NRG; PAM sequence: GAG
gtgtgataattatacctact

SEQ ID NO: 83713 - DNA, 20 bp, Artificial Sequence
  Description of Artificial Sequence: Synthetic oligonucleotide
  Target: LAMA2; (-) strand; PAM type: NRG; PAM sequence: CAG
tttatacttgtacagggctt

SEQ ID NO: 83714 - DNA, 20 bp, Artificial Sequence
  Description of Artificial Sequence: Synthetic oligonucleotide
  Target: LAMA2; (-) strand; PAM type: NRG; PAM sequence: GGG
ttatactttatacttgtaca

SEQ ID NO: 83715 - DNA, 20 bp, Artificial Sequence
  Description of Artificial Sequence: Synthetic oligonucleotide
  Target: LAMA2; (-) strand; PAM type: NRG; PAM sequence: AGG
gttatactttatacttgtac

SEQ ID NO: 83716 - DNA, 20 bp, Artificial Sequence
  Description of Artificial Sequence: Synthetic oligonucleotide
  Target: LAMA2; (-) strand; PAM type: NRG; PAM sequence: CAG
ggttatactttatacttgta

SEQ ID NO: 83717 - DNA, 20 bp, Artificial Sequence
  Description of Artificial Sequence: Synthetic oligonucleotide
  Target: LAMA2; (-) strand; PAM type: NRG; PAM sequence: TGG
agtaatccagtaggtattta

SEQ ID NO: 83718 - DNA, 20 bp, Artificial Sequence
  Description of Artificial Sequence: Synthetic oligonucleotide
  Target: LAMA2; (-) strand; PAM type: NRG; PAM sequence: AGG
acaacaaaaagtaatccagt

SEQ ID NO: 83719 - DNA, 20 bp, Artificial Sequence
  Description of Artificial Sequence: Synthetic oligonucleotide
  Target: LAMA2; (-) strand; PAM type: NRG; PAM sequence: TAG
aacaacaaaaagtaatccag

SEQ ID NO: 83720 - DNA, 20 bp, Artificial Sequence
  Description of Artificial Sequence: Synthetic oligonucleotide
  Target: LAMA2; (-) strand; PAM type: NRG; PAM sequence: CAG
aacaacaacaaaaagtaatc

SEQ ID NO: 83721 - DNA, 20 bp, Artificial Sequence
  Description of Artificial Sequence: Synthetic oligonucleotide
  Target: LAMA2; (-) strand; PAM type: NRG; PAM sequence: AAG
gcaatataaacaacaacaaa

SEQ ID NO: 83722 - DNA, 20 bp, Artificial Sequence
  Description of Artificial Sequence: Synthetic oligonucleotide
  Target: LAMA2; (-) strand; PAM type: NRG; PAM sequence: AAG
aacttatctctacttgggaa

SEQ ID NO: 83723 - DNA, 20 bp, Artificial Sequence
  Description of Artificial Sequence: Synthetic oligonucleotide
  Target: LAMA2; (-) strand; PAM type: NRG; PAM sequence: GGG
acagaaacttatctctactt

SEQ ID NO: 83724 - DNA, 20 bp, Artificial Sequence
  Description of Artificial Sequence: Synthetic oligonucleotide
  Target: LAMA2; (-) strand; PAM type: NRG; PAM sequence: TGG
aacagaaacttatctctact

SEQ ID NO: 83725 - DNA, 20 bp, Artificial Sequence
  Description of Artificial Sequence: Synthetic oligonucleotide
  Target: LAMA2; (-) strand; PAM type: NRG; PAM sequence: CAG
atcctttcagggaaaaagaa

SEQ ID NO: 83726 - DNA, 20 bp, Artificial Sequence
  Description of Artificial Sequence: Synthetic oligonucleotide
  Target: LAMA2; (-) strand; PAM type: NRG; PAM sequence: AAG
taaaaatcctttcagggaaa

SEQ ID NO: 83727 - DNA, 20 bp, Artificial Sequence
  Description of Artificial Sequence: Synthetic oligonucleotide
  Target: LAMA2; (-) strand; PAM type: NRG; PAM sequence: GGG
acaccataaaaatcctttca

SEQ ID NO: 83728 - DNA, 20 bp, Artificial Sequence
  Description of Artificial Sequence: Synthetic oligonucleotide
  Target: LAMA2; (-) strand; PAM type: NRG; PAM sequence: AGG
cacaccataaaaatcctttc

SEQ ID NO: 83729 - DNA, 20 bp, Artificial Sequence
  Description of Artificial Sequence: Synthetic oligonucleotide
  Target: LAMA2; (-) strand; PAM type: NRG; PAM sequence: CAG
acacaccataaaaatccttt

SEQ ID NO: 83730 - DNA, 20 bp, Artificial Sequence
  Description of Artificial Sequence: Synthetic oligonucleotide
  Target: LAMA2; (-) strand; PAM type: NRG; PAM sequence: GGG
tacacaaatgaaaaagaaga

SEQ ID NO: 83731 - DNA, 20 bp, Artificial Sequence
  Description of Artificial Sequence: Synthetic oligonucleotide
  Target: LAMA2; (-) strand; PAM type: NRG; PAM sequence: AGG
gtacacaaatgaaaaagaag

SEQ ID NO: 83732 - DNA, 20 bp, Artificial Sequence
  Description of Artificial Sequence: Synthetic oligonucleotide
  Target: LAMA2; (-) strand; PAM type: NRG; PAM sequence: GAG
tgtacacaaatgaaaaagaa

SEQ ID NO: 83733 - DNA, 20 bp, Artificial Sequence
  Description of Artificial Sequence: Synthetic oligonucleotide
  Target: LAMA2; (-) strand; PAM type: NRG; PAM sequence: AAG
cctgtacacaaatgaaaaag

SEQ ID NO: 83734 - DNA, 20 bp, Artificial Sequence
  Description of Artificial Sequence: Synthetic oligonucleotide
  Target: LAMA2; (-) strand; PAM type: NRG; PAM sequence: AAG
attcctgtacacaaatgaaa

SEQ ID NO: 83735 - DNA, 20 bp, Artificial Sequence
  Description of Artificial Sequence: Synthetic oligonucleotide
  Target: LAMA2; (-) strand; PAM type: NRG; PAM sequence: AAG
atcaagtctacaagttaatg

SEQ ID NO: 83736 - DNA, 20 bp, Artificial Sequence
  Description of Artificial Sequence: Synthetic oligonucleotide
  Target: LAMA2; (-) strand; PAM type: NRG; PAM sequence: AAG
tgcccaggaatcaagtctac

SEQ ID NO: 83737 - DNA, 20 bp, Artificial Sequence
  Description of Artificial Sequence: Synthetic oligonucleotide
  Target: LAMA2; (-) strand; PAM type: NRG; PAM sequence: AAG
tgtaaaaatgcccaggaatc

SEQ ID NO: 83738 - DNA, 20 bp, Artificial Sequence
  Description of Artificial Sequence: Synthetic oligonucleotide
  Target: LAMA2; (-) strand; PAM type: NRG; PAM sequence: AGG
gtccatttgtaaaaatgccc

SEQ ID NO: 83739 - DNA, 20 bp, Artificial Sequence
  Description of Artificial Sequence: Synthetic oligonucleotide
  Target: LAMA2; (-) strand; PAM type: NRG; PAM sequence: CAG
agtccatttgtaaaaatgcc

SEQ ID NO: 83740 - DNA, 20 bp, Artificial Sequence
  Description of Artificial Sequence: Synthetic oligonucleotide
  Target: LAMA2; (-) strand; PAM type: NRG; PAM sequence: AAG
aggattaaatgtacacattg

SEQ ID NO: 83741 - DNA, 20 bp, Artificial Sequence
  Description of Artificial Sequence: Synthetic oligonucleotide
  Target: LAMA2; (-) strand; PAM type: NRG; PAM sequence: AGG
tacatctgtaatttagattc

SEQ ID NO: 83742 - DNA, 20 bp, Artificial Sequence
  Description of Artificial Sequence: Synthetic oligonucleotide
  Target: LAMA2; (-) strand; PAM type: NRG; PAM sequence: CAG
ctacatctgtaatttagatt

SEQ ID NO: 83743 - DNA, 20 bp, Artificial Sequence
  Description of Artificial Sequence: Synthetic oligonucleotide
  Target: LAMA2; (-) strand; PAM type: NRG; PAM sequence: TAG
aaaattctacatctgtaatt

SEQ ID NO: 83744 - DNA, 20 bp, Artificial Sequence
  Description of Artificial Sequence: Synthetic oligonucleotide
  Target: LAMA2; (-) strand; PAM type: NRG; PAM sequence: GAG
ttgaactgtaggggttgcaa

SEQ ID NO: 83745 - DNA, 20 bp, Artificial Sequence
  Description of Artificial Sequence: Synthetic oligonucleotide
  Target: LAMA2; (-) strand; PAM type: NRG; PAM sequence: AAG
atttgaactgtaggggttgc

SEQ ID NO: 83746 - DNA, 20 bp, Artificial Sequence
  Description of Artificial Sequence: Synthetic oligonucleotide
  Target: LAMA2; (-) strand; PAM type: NRG; PAM sequence: GGG
taatattatttgaactgtag

SEQ ID NO: 83747 - DNA, 20 bp, Artificial Sequence
  Description of Artificial Sequence: Synthetic oligonucleotide
  Target: LAMA2; (-) strand; PAM type: NRG; PAM sequence: GGG
ataatattatttgaactgta

SEQ ID NO: 83748 - DNA, 20 bp, Artificial Sequence
  Description of Artificial Sequence: Synthetic oligonucleotide
  Target: LAMA2; (-) strand; PAM type: NRG; PAM sequence: AGG
cataatattatttgaactgt

SEQ ID NO: 83749 - DNA, 20 bp, Artificial Sequence
  Description of Artificial Sequence: Synthetic oligonucleotide
  Target: LAMA2; (-) strand; PAM type: NRG; PAM sequence: TAG
acataatattatttgaactg

SEQ ID NO: 83750 - DNA, 20 bp, Artificial Sequence
  Description of Artificial Sequence: Synthetic oligonucleotide
  Target: LAMA2; (-) strand; PAM type: NRG; PAM sequence: GAG
ccaaaatttggtcaaggaga

SEQ ID NO: 83751 - DNA, 20 bp, Artificial Sequence
  Description of Artificial Sequence: Synthetic oligonucleotide
  Target: LAMA2; (-) strand; PAM type: NRG; PAM sequence: GAG
ttccaaaatttggtcaagga

SEQ ID NO: 83752 - DNA, 20 bp, Artificial Sequence
  Description of Artificial Sequence: Synthetic oligonucleotide
  Target: LAMA2; (-) strand; PAM type: NRG; PAM sequence: GAG
ctttccaaaatttggtcaag

SEQ ID NO: 83753 - DNA, 20 bp, Artificial Sequence
  Description of Artificial Sequence: Synthetic oligonucleotide
  Target: LAMA2; (-) strand; PAM type: NRG; PAM sequence: AGG
gactttccaaaatttggtca

SEQ ID NO: 83754 - DNA, 20 bp, Artificial Sequence
  Description of Artificial Sequence: Synthetic oligonucleotide
  Target: LAMA2; (-) strand; PAM type: NRG; PAM sequence: AAG
agactttccaaaatttggtc

SEQ ID NO: 83755 - DNA, 20 bp, Artificial Sequence
  Description of Artificial Sequence: Synthetic oligonucleotide
  Target: LAMA2; (-) strand; PAM type: NRG; PAM sequence: TGG
agagaagactttccaaaatt

SEQ ID NO: 83756 - DNA, 20 bp, Artificial Sequence
  Description of Artificial Sequence: Synthetic oligonucleotide
  Target: LAMA2; (-) strand; PAM type: NRG; PAM sequence: AAG
atcaaaaagaggactcagag

SEQ ID NO: 83757 - DNA, 20 bp, Artificial Sequence
  Description of Artificial Sequence: Synthetic oligonucleotide
  Target: LAMA2; (-) strand; PAM type: NRG; PAM sequence: GAG
ctcatcaaaaagaggactca

SEQ ID NO: 83758 - DNA, 20 bp, Artificial Sequence
  Description of Artificial Sequence: Synthetic oligonucleotide
  Target: LAMA2; (-) strand; PAM type: NRG; PAM sequence: CAG
gcctcatcaaaaagaggact

SEQ ID NO: 83759 - DNA, 20 bp, Artificial Sequence
  Description of Artificial Sequence: Synthetic oligonucleotide
  Target: LAMA2; (-) strand; PAM type: NRG; PAM sequence: AGG
gatgaggcctcatcaaaaag

SEQ ID NO: 83760 - DNA, 20 bp, Artificial Sequence
  Description of Artificial Sequence: Synthetic oligonucleotide
  Target: LAMA2; (-) strand; PAM type: NRG; PAM sequence: GAG
cgatgaggcctcatcaaaaa

SEQ ID NO: 83761 - DNA, 20 bp, Artificial Sequence
  Description of Artificial Sequence: Synthetic oligonucleotide
  Target: LAMA2; (-) strand; PAM type: NRG; PAM sequence: AAG
aacgatgaggcctcatcaaa

SEQ ID NO: 83762 - DNA, 20 bp, Artificial Sequence
  Description of Artificial Sequence: Synthetic oligonucleotide
  Target: LAMA2; (-) strand; PAM type: NRG; PAM sequence: AGG
gaggacaagggtcaacgatg

SEQ ID NO: 83763 - DNA, 20 bp, Artificial Sequence
  Description of Artificial Sequence: Synthetic oligonucleotide
  Target: LAMA2; (-) strand; PAM type: NRG; PAM sequence: GAG
tgaggacaagggtcaacgat

SEQ ID NO: 83764 - DNA, 20 bp, Artificial Sequence
  Description of Artificial Sequence: Synthetic oligonucleotide
  Target: LAMA2; (-) strand; PAM type: NRG; PAM sequence: GGG
caagctaggtttgaggacaa

SEQ ID NO: 83765 - DNA, 20 bp, Artificial Sequence
  Description of Artificial Sequence: Synthetic oligonucleotide
  Target: LAMA2; (-) strand; PAM type: NRG; PAM sequence: AGG
ccaagctaggtttgaggaca

SEQ ID NO: 83766 - DNA, 20 bp, Artificial Sequence
  Description of Artificial Sequence: Synthetic oligonucleotide
  Target: LAMA2; (-) strand; PAM type: NRG; PAM sequence: AAG
accaagctaggtttgaggac

SEQ ID NO: 83767 - DNA, 20 bp, Artificial Sequence
  Description of Artificial Sequence: Synthetic oligonucleotide
  Target: LAMA2; (-) strand; PAM type: NRG; PAM sequence: AGG
ctttaaccaagctaggtttg

SEQ ID NO: 83768 - DNA, 20 bp, Artificial Sequence
  Description of Artificial Sequence: Synthetic oligonucleotide
  Target: LAMA2; (-) strand; PAM type: NRG; PAM sequence: GAG
gctttaaccaagctaggttt

SEQ ID NO: 83769 - DNA, 20 bp, Artificial Sequence
  Description of Artificial Sequence: Synthetic oligonucleotide
  Target: LAMA2; (-) strand; PAM type: NRG; PAM sequence: AGG
attcttgctttaaccaagct

SEQ ID NO: 83770 - DNA, 20 bp, Artificial Sequence
  Description of Artificial Sequence: Synthetic oligonucleotide
  Target: LAMA2; (-) strand; PAM type: NRG; PAM sequence: TAG
aattcttgctttaaccaagc

SEQ ID NO: 83771 - DNA, 20 bp, Artificial Sequence
  Description of Artificial Sequence: Synthetic oligonucleotide
  Target: LAMA2; (-) strand; PAM type: NRG; PAM sequence: AAG
gcagaattcttgctttaacc

SEQ ID NO: 83772 - DNA, 20 bp, Artificial Sequence
  Description of Artificial Sequence: Synthetic oligonucleotide
  Target: LAMA2; (-) strand; PAM type: NRG; PAM sequence: CAG
ttcttaacacactgacttag

SEQ ID NO: 83773 - DNA, 20 bp, Artificial Sequence
  Description of Artificial Sequence: Synthetic oligonucleotide
  Target: LAMA2; (-) strand; PAM type: NRG; PAM sequence: TAG
gtgttcttaacacactgact

SEQ ID NO: 83774 - DNA, 20 bp, Artificial Sequence
  Description of Artificial Sequence: Synthetic oligonucleotide
  Target: LAMA2; (-) strand; PAM type: NRG; PAM sequence: AGG
gggatcagatatcaagggta

SEQ ID NO: 83775 - DNA, 20 bp, Artificial Sequence
  Description of Artificial Sequence: Synthetic oligonucleotide
  Target: LAMA2; (-) strand; PAM type: NRG; PAM sequence: AAG
agggatcagatatcaagggt

SEQ ID NO: 83776 - DNA, 20 bp, Artificial Sequence
  Description of Artificial Sequence: Synthetic oligonucleotide
  Target: LAMA2; (-) strand; PAM type: NRG; PAM sequence: GGG
ccagagggatcagatatcaa

SEQ ID NO: 83777 - DNA, 20 bp, Artificial Sequence
  Description of Artificial Sequence: Synthetic oligonucleotide
  Target: LAMA2; (-) strand; PAM type: NRG; PAM sequence: AGG
gccagagggatcagatatca

SEQ ID NO: 83778 - DNA, 20 bp, Artificial Sequence
  Description of Artificial Sequence: Synthetic oligonucleotide
  Target: LAMA2; (-) strand; PAM type: NRG; PAM sequence: AAG
ggccagagggatcagatatc

SEQ ID NO: 83779 - DNA, 20 bp, Artificial Sequence
  Description of Artificial Sequence: Synthetic oligonucleotide
  Target: LAMA2; (-) strand; PAM type: NRG; PAM sequence: CAG
tgaagacaggccagagggat

SEQ ID NO: 83780 - DNA, 20 bp, Artificial Sequence
  Description of Artificial Sequence: Synthetic oligonucleotide
  Target: LAMA2; (-) strand; PAM type: NRG; PAM sequence: GGG
cttgttgaagacaggccaga

SEQ ID NO: 83781 - DNA, 20 bp, Artificial Sequence
  Description of Artificial Sequence: Synthetic oligonucleotide
  Target: LAMA2; (-) strand; PAM type: NRG; PAM sequence: AGG
tcttgttgaagacaggccag

SEQ ID NO: 83782 - DNA, 20 bp, Artificial Sequence
  Description of Artificial Sequence: Synthetic oligonucleotide
  Target: LAMA2; (-) strand; PAM type: NRG; PAM sequence: GAG
ttcttgttgaagacaggcca

SEQ ID NO: 83783 - DNA, 20 bp, Artificial Sequence
  Description of Artificial Sequence: Synthetic oligonucleotide
  Target: LAMA2; (-) strand; PAM type: NRG; PAM sequence: CAG
gattcttgttgaagacaggc

SEQ ID NO: 83784 - DNA, 20 bp, Artificial Sequence
  Description of Artificial Sequence: Synthetic oligonucleotide
  Target: LAMA2; (-) strand; PAM type: NRG; PAM sequence: AGG
acaggattcttgttgaagac

SEQ ID NO: 83785 - DNA, 20 bp, Artificial Sequence
  Description of Artificial Sequence: Synthetic oligonucleotide
  Target: LAMA2; (-) strand; PAM type: NRG; PAM sequence: CAG
aacaggattcttgttgaaga

SEQ ID NO: 83786 - DNA, 20 bp, Artificial Sequence
  Description of Artificial Sequence: Synthetic oligonucleotide
  Target: LAMA2; (-) strand; PAM type: NRG; PAM sequence: AAG
aattaacaggattcttgttg

SEQ ID NO: 83787 - DNA, 20 bp, Artificial Sequence
  Description of Artificial Sequence: Synthetic oligonucleotide
  Target: LAMA2; (-) strand; PAM type: NRG; PAM sequence: AGG
tcttgctaaaccaaattaac

SEQ ID NO: 83788 - DNA, 20 bp, Artificial Sequence
  Description of Artificial Sequence: Synthetic oligonucleotide
  Target: LAMA2; (-) strand; PAM type: NRG; PAM sequence: CAG
ttcttgctaaaccaaattaa

SEQ ID NO: 83789 - DNA, 20 bp, Artificial Sequence
  Description of Artificial Sequence: Synthetic oligonucleotide
  Target: LAMA2; (-) strand; PAM type: NRG; PAM sequence: GGG
gacatcaggggtaggtaggg

SEQ ID NO: 83790 - DNA, 20 bp, Artificial Sequence
  Description of Artificial Sequence: Synthetic oligonucleotide
  Target: LAMA2; (-) strand; PAM type: NRG; PAM sequence: GGG
agacatcaggggtaggtagg

SEQ ID NO: 83791 - DNA, 20 bp, Artificial Sequence
  Description of Artificial Sequence: Synthetic oligonucleotide
  Target: LAMA2; (-) strand; PAM type: NRG; PAM sequence: GGG
gagacatcaggggtaggtag

SEQ ID NO: 83792 - DNA, 20 bp, Artificial Sequence
  Description of Artificial Sequence: Synthetic oligonucleotide
  Target: LAMA2; (-) strand; PAM type: NRG; PAM sequence: GGG
ggagacatcaggggtaggta

SEQ ID NO: 83793 - DNA, 20 bp, Artificial Sequence
  Description of Artificial Sequence: Synthetic oligonucleotide
  Target: LAMA2; (-) strand; PAM type: NRG; PAM sequence: AGG
aggagacatcaggggtaggt

SEQ ID NO: 83794 - DNA, 20 bp, Artificial Sequence
  Description of Artificial Sequence: Synthetic oligonucleotide
  Target: LAMA2; (-) strand; PAM type: NRG; PAM sequence: TAG
gaggagacatcaggggtagg

SEQ ID NO: 83795 - DNA, 20 bp, Artificial Sequence
  Description of Artificial Sequence: Synthetic oligonucleotide
  Target: LAMA2; (-) strand; PAM type: NRG; PAM sequence: AGG
taagaggagacatcaggggt

SEQ ID NO: 83796 - DNA, 20 bp, Artificial Sequence
  Description of Artificial Sequence: Synthetic oligonucleotide
  Target: LAMA2; (-) strand; PAM type: NRG; PAM sequence: TAG
ttaagaggagacatcagggg

SEQ ID NO: 83797 - DNA, 20 bp, Artificial Sequence
  Description of Artificial Sequence: Synthetic oligonucleotide
  Target: LAMA2; (-) strand; PAM type: NRG; PAM sequence: GGG
tcattaagaggagacatcag

SEQ ID NO: 83798 - DNA, 20 bp, Artificial Sequence
  Description of Artificial Sequence: Synthetic oligonucleotide
  Target: LAMA2; (-) strand; PAM type: NRG; PAM sequence: GGG
atcattaagaggagacatca

SEQ ID NO: 83799 - DNA, 20 bp, Artificial Sequence
  Description of Artificial Sequence: Synthetic oligonucleotide
  Target: LAMA2; (-) strand; PAM type: NRG; PAM sequence: AGG
aatcattaagaggagacatc

SEQ ID NO: 83800 - DNA, 20 bp, Artificial Sequence
  Description of Artificial Sequence: Synthetic oligonucleotide
  Target: LAMA2; (-) strand; PAM type: NRG; PAM sequence: CAG
caatcattaagaggagacat

SEQ ID NO: 83801 - DNA, 20 bp, Artificial Sequence
  Description of Artificial Sequence: Synthetic oligonucleotide
  Target: LAMA2; (-) strand; PAM type: NRG; PAM sequence: GAG
gggcgaacaatcattaagag

SEQ ID NO: 83802 - DNA, 20 bp, Artificial Sequence
  Description of Artificial Sequence: Synthetic oligonucleotide
  Target: LAMA2; (-) strand; PAM type: NRG; PAM sequence: AGG
aggggcgaacaatcattaag

SEQ ID NO: 83803 - DNA, 20 bp, Artificial Sequence
  Description of Artificial Sequence: Synthetic oligonucleotide
  Target: LAMA2; (-) strand; PAM type: NRG; PAM sequence: GAG
caggggcgaacaatcattaa

SEQ ID NO: 83804 - DNA, 20 bp, Artificial Sequence
  Description of Artificial Sequence: Synthetic oligonucleotide
  Target: LAMA2; (-) strand; PAM type: NRG; PAM sequence: AAG
atcaggggcgaacaatcatt

SEQ ID NO: 83805 - DNA, 20 bp, Artificial Sequence
  Description of Artificial Sequence: Synthetic oligonucleotide
  Target: LAMA2; (-) strand; PAM type: NRG; PAM sequence: GGG
tagccacgagcaaggatcag

SEQ ID NO: 83806 - DNA, 20 bp, Artificial Sequence
  Description of Artificial Sequence: Synthetic oligonucleotide
  Target: LAMA2; (-) strand; PAM type: NRG; PAM sequence: GGG
atagccacgagcaaggatca

SEQ ID NO: 83807 - DNA, 20 bp, Artificial Sequence
  Description of Artificial Sequence: Synthetic oligonucleotide
  Target: LAMA2; (-) strand; PAM type: NRG; PAM sequence: AGG
tatagccacgagcaaggatc

SEQ ID NO: 83808 - DNA, 20 bp, Artificial Sequence
  Description of Artificial Sequence: Synthetic oligonucleotide
  Target: LAMA2; (-) strand; PAM type: NRG; PAM sequence: CAG
ttatagccacgagcaaggat

SEQ ID NO: 83809 - DNA, 20 bp, Artificial Sequence
  Description of Artificial Sequence: Synthetic oligonucleotide
  Target: LAMA2; (-) strand; PAM type: NRG; PAM sequence: AGG
gagatttatagccacgagca

SEQ ID NO: 83810 - DNA, 20 bp, Artificial Sequence
  Description of Artificial Sequence: Synthetic oligonucleotide
  Target: LAMA2; (-) strand; PAM type: NRG; PAM sequence: AAG
agagatttatagccacgagc

SEQ ID NO: 83811 - DNA, 20 bp, Artificial Sequence
  Description of Artificial Sequence: Synthetic oligonucleotide
  Target: LAMA2; (-) strand; PAM type: NRG; PAM sequence: GAG
gggtagagatttatagccac

SEQ ID NO: 83812 - DNA, 20 bp, Artificial Sequence
  Description of Artificial Sequence: Synthetic oligonucleotide
  Target: LAMA2; (-) strand; PAM type: NRG; PAM sequence: TAG
aggaaaagggtagagattta

SEQ ID NO: 83813 - DNA, 20 bp, Artificial Sequence
  Description of Artificial Sequence: Synthetic oligonucleotide
  Target: LAMA2; (-) strand; PAM type: NRG; PAM sequence: GAG
cagtgccaaggaaaagggta

SEQ ID NO: 83814 - DNA, 20 bp, Artificial Sequence
  Description of Artificial Sequence: Synthetic oligonucleotide
  Target: LAMA2; (-) strand; PAM type: NRG; PAM sequence: TAG
ttcagtgccaaggaaaaggg

SEQ ID NO: 83815 - DNA, 20 bp, Artificial Sequence
  Description of Artificial Sequence: Synthetic oligonucleotide
  Target: LAMA2; (-) strand; PAM type: NRG; PAM sequence: GGG
ggattcagtgccaaggaaaa

SEQ ID NO: 83816 - DNA, 20 bp, Artificial Sequence
  Description of Artificial Sequence: Synthetic oligonucleotide
  Target: LAMA2; (-) strand; PAM type: NRG; PAM sequence: AGG
gggattcagtgccaaggaaa

SEQ ID NO: 83817 - DNA, 20 bp, Artificial Sequence
  Description of Artificial Sequence: Synthetic oligonucleotide
  Target: LAMA2; (-) strand; PAM type: NRG; PAM sequence: AAG
agggattcagtgccaaggaa

SEQ ID NO: 83818 - DNA, 20 bp, Artificial Sequence
  Description of Artificial Sequence: Synthetic oligonucleotide
  Target: LAMA2; (-) strand; PAM type: NRG; PAM sequence: AGG
caagtagggattcagtgcca

SEQ ID NO: 83819 - DNA, 20 bp, Artificial Sequence
  Description of Artificial Sequence: Synthetic oligonucleotide
  Target: LAMA2; (-) strand; PAM type: NRG; PAM sequence: AAG
acaagtagggattcagtgcc

SEQ ID NO: 83820 - DNA, 20 bp, Artificial Sequence
  Description of Artificial Sequence: Synthetic oligonucleotide
  Target: LAMA2; (-) strand; PAM type: NRG; PAM sequence: CAG
aacatgaacaagtagggatt

SEQ ID NO: 83821 - DNA, 20 bp, Artificial Sequence
  Description of Artificial Sequence: Synthetic oligonucleotide
  Target: LAMA2; (-) strand; PAM type: NRG; PAM sequence: GGG
caatacaacatgaacaagta

SEQ ID NO: 83822 - DNA, 20 bp, Artificial Sequence
  Description of Artificial Sequence: Synthetic oligonucleotide
  Target: LAMA2; (-) strand; PAM type: NRG; PAM sequence: AGG
ccaatacaacatgaacaagt

SEQ ID NO: 83823 - DNA, 20 bp, Artificial Sequence
  Description of Artificial Sequence: Synthetic oligonucleotide
  Target: LAMA2; (-) strand; PAM type: NRG; PAM sequence: TAG
cccaatacaacatgaacaag

SEQ ID NO: 83824 - DNA, 20 bp, Artificial Sequence
  Description of Artificial Sequence: Synthetic oligonucleotide
  Target: LAMA2; (-) strand; PAM type: NRG; PAM sequence: AAG
attcccaatacaacatgaac

SEQ ID NO: 83825 - DNA, 20 bp, Artificial Sequence
  Description of Artificial Sequence: Synthetic oligonucleotide
  Target: LAMA2; (-) strand; PAM type: NRG; PAM sequence: TAG
aagcaaccttagtaaagaac

SEQ ID NO: 83826 - DNA, 20 bp, Artificial Sequence
  Description of Artificial Sequence: Synthetic oligonucleotide
  Target: LAMA2; (-) strand; PAM type: NRG; PAM sequence: AAG
gagaaaaagcaaccttagta

SEQ ID NO: 83827 - DNA, 20 bp, Artificial Sequence
  Description of Artificial Sequence: Synthetic oligonucleotide
  Target: LAMA2; (-) strand; PAM type: NRG; PAM sequence: TAG
caatagagaaaaagcaacct

SEQ ID NO: 83828 - DNA, 20 bp, Artificial Sequence
  Description of Artificial Sequence: Synthetic oligonucleotide
  Target: LAMA2; (-) strand; PAM type: NRG; PAM sequence: AAG
aaactatggcaatagagaaa

SEQ ID NO: 83829 - DNA, 20 bp, Artificial Sequence
  Description of Artificial Sequence: Synthetic oligonucleotide
  Target: LAMA2; (-) strand; PAM type: NRG; PAM sequence: GAG
agtgagaaactatggcaata

SEQ ID NO: 83830 - DNA, 20 bp, Artificial Sequence
  Description of Artificial Sequence: Synthetic oligonucleotide
  Target: LAMA2; (-) strand; PAM type: NRG; PAM sequence: TAG
tcagtgagaaactatggcaa

SEQ ID NO: 83831 - DNA, 20 bp, Artificial Sequence
  Description of Artificial Sequence: Synthetic oligonucleotide
  Target: LAMA2; (-) strand; PAM type: NRG; PAM sequence: TGG
taggcttcagtgagaaacta

SEQ ID NO: 83832 - DNA, 20 bp, Artificial Sequence
  Description of Artificial Sequence: Synthetic oligonucleotide
  Target: LAMA2; (-) strand; PAM type: NRG; PAM sequence: GAG
cgatgaaaataggcttcagt

SEQ ID NO: 83833 - DNA, 20 bp, Artificial Sequence
  Description of Artificial Sequence: Synthetic oligonucleotide
  Target: LAMA2; (-) strand; PAM type: NRG; PAM sequence: CAG
aaaacgatgaaaataggctt

SEQ ID NO: 83834 - DNA, 20 bp, Artificial Sequence
  Description of Artificial Sequence: Synthetic oligonucleotide
  Target: LAMA2; (-) strand; PAM type: NRG; PAM sequence: AGG
gtagttaaaacgatgaaaat

SEQ ID NO: 83835 - DNA, 20 bp, Artificial Sequence
  Description of Artificial Sequence: Synthetic oligonucleotide
  Target: LAMA2; (-) strand; PAM type: NRG; PAM sequence: TAG
agtagttaaaacgatgaaaa

SEQ ID NO: 83836 - DNA, 20 bp, Artificial Sequence
  Description of Artificial Sequence: Synthetic oligonucleotide
  Target: LAMA2; (-) strand; PAM type: NRG; PAM sequence: TAG
agagaaccagagctggacag

SEQ ID NO: 83837 - DNA, 20 bp, Artificial Sequence
  Description of Artificial Sequence: Synthetic oligonucleotide
  Target: LAMA2; (-) strand; PAM type: NRG; PAM sequence: CAG
gaaagagaaccagagctgga

SEQ ID NO: 83838 - DNA, 20 bp, Artificial Sequence
  Description of Artificial Sequence: Synthetic oligonucleotide
  Target: LAMA2; (-) strand; PAM type: NRG; PAM sequence: TGG
ttgtgaaagagaaccagagc

SEQ ID NO: 83839 - DNA, 20 bp, Artificial Sequence
  Description of Artificial Sequence: Synthetic oligonucleotide
  Target: LAMA2; (-) strand; PAM type: NRG; PAM sequence: GAG
aatattgtgaaagagaacca

SEQ ID NO: 83840 - DNA, 20 bp, Artificial Sequence
  Description of Artificial Sequence: Synthetic oligonucleotide
  Target: LAMA2; (-) strand; PAM type: NRG; PAM sequence: CAG
ttaatattgtgaaagagaac

SEQ ID NO: 83841 - DNA, 20 bp, Artificial Sequence
  Description of Artificial Sequence: Synthetic oligonucleotide
  Target: LAMA2; (-) strand; PAM type: NRG; PAM sequence: GAG
cagcttttaatattgtgaaa

SEQ ID NO: 83842 - DNA, 20 bp, Artificial Sequence
  Description of Artificial Sequence: Synthetic oligonucleotide
  Target: LAMA2; (-) strand; PAM type: NRG; PAM sequence: AAG
ttcagcttttaatattgtga

SEQ ID NO: 83843 - DNA, 20 bp, Artificial Sequence
  Description of Artificial Sequence: Synthetic oligonucleotide
  Target: LAMA2; (-) strand; PAM type: NRG; PAM sequence: CAG
gttctcaattttcacaagtt

SEQ ID NO: 83844 - DNA, 20 bp, Artificial Sequence
  Description of Artificial Sequence: Synthetic oligonucleotide
  Target: LAMA2; (-) strand; PAM type: NRG; PAM sequence: AAG
cattagttctcaattttcac

SEQ ID NO: 83845 - DNA, 20 bp, Artificial Sequence
  Description of Artificial Sequence: Synthetic oligonucleotide
  Target: LAMA2; (-) strand; PAM type: NRG; PAM sequence: TAG
agaaggaaatacataaacat

SEQ ID NO: 83846 - DNA, 20 bp, Artificial Sequence
  Description of Artificial Sequence: Synthetic oligonucleotide
  Target: LAMA2; (-) strand; PAM type: NRG; PAM sequence: AGG
tgatgggttagggagggaga

SEQ ID NO: 83847 - DNA, 20 bp, Artificial Sequence
  Description of Artificial Sequence: Synthetic oligonucleotide
  Target: LAMA2; (-) strand; PAM type: NRG; PAM sequence: AAG
ttgatgggttagggagggag

SEQ ID NO: 83848 - DNA, 20 bp, Artificial Sequence
  Description of Artificial Sequence: Synthetic oligonucleotide
  Target: LAMA2; (-) strand; PAM type: NRG; PAM sequence: GAG
tagttgatgggttagggagg

SEQ ID NO: 83849 - DNA, 20 bp, Artificial Sequence
  Description of Artificial Sequence: Synthetic oligonucleotide
  Target: LAMA2; (-) strand; PAM type: NRG; PAM sequence: GGG
aatagttgatgggttaggga

SEQ ID NO: 83850 - DNA, 20 bp, Artificial Sequence
  Description of Artificial Sequence: Synthetic oligonucleotide
  Target: LAMA2; (-) strand; PAM type: NRG; PAM sequence: AGG
taatagttgatgggttaggg

SEQ ID NO: 83851 - DNA, 20 bp, Artificial Sequence
  Description of Artificial Sequence: Synthetic oligonucleotide
  Target: LAMA2; (-) strand; PAM type: NRG; PAM sequence: GAG
ataatagttgatgggttagg

SEQ ID NO: 83852 - DNA, 20 bp, Artificial Sequence
  Description of Artificial Sequence: Synthetic oligonucleotide
  Target: LAMA2; (-) strand; PAM type: NRG; PAM sequence: GGG
agataatagttgatgggtta

SEQ ID NO: 83853 - DNA, 20 bp, Artificial Sequence
  Description of Artificial Sequence: Synthetic oligonucleotide
  Target: LAMA2; (-) strand; PAM type: NRG; PAM sequence: AGG
tagataatagttgatgggtt

SEQ ID NO: 83854 - DNA, 20 bp, Artificial Sequence
  Description of Artificial Sequence: Synthetic oligonucleotide
  Target: LAMA2; (-) strand; PAM type: NRG; PAM sequence: TAG
ctagataatagttgatgggt

SEQ ID NO: 83855 - DNA, 20 bp, Artificial Sequence
  Description of Artificial Sequence: Synthetic oligonucleotide
  Target: LAMA2; (-) strand; PAM type: NRG; PAM sequence: GGG
aaggctagataatagttgat

SEQ ID NO: 83856 - DNA, 20 bp, Artificial Sequence
  Description of Artificial Sequence: Synthetic oligonucleotide
  Target: LAMA2; (-) strand; PAM type: NRG; PAM sequence: TGG
caaggctagataatagttga

SEQ ID NO: 83857 - DNA, 20 bp, Artificial Sequence
  Description of Artificial Sequence: Synthetic oligonucleotide
  Target: LAMA2; (-) strand; PAM type: NRG; PAM sequence: TAG
acttttccaaggctagataa

SEQ ID NO: 83858 - DNA, 20 bp, Artificial Sequence
  Description of Artificial Sequence: Synthetic oligonucleotide
  Target: LAMA2; (-) strand; PAM type: NRG; PAM sequence: TAG
aaaacacacttttccaaggc

SEQ ID NO: 83859 - DNA, 20 bp, Artificial Sequence
  Description of Artificial Sequence: Synthetic oligonucleotide
  Target: LAMA2; (-) strand; PAM type: NRG; PAM sequence: AGG
tcctaaaacacacttttcca

SEQ ID NO: 83860 - DNA, 20 bp, Artificial Sequence
  Description of Artificial Sequence: Synthetic oligonucleotide
  Target: LAMA2; (-) strand; PAM type: NRG; PAM sequence: AAG
ctcctaaaacacacttttcc

SEQ ID NO: 83861 - DNA, 20 bp, Artificial Sequence
  Description of Artificial Sequence: Synthetic oligonucleotide
  Target: LAMA2; (-) strand; PAM type: NRG; PAM sequence: AGG
ttaattagcagtatttgttg

SEQ ID NO: 83862 - DNA, 20 bp, Artificial Sequence
  Description of Artificial Sequence: Synthetic oligonucleotide
  Target: LAMA2; (-) strand; PAM type: NRG; PAM sequence: GAG
gttaattagcagtatttgtt

SEQ ID NO: 83863 - DNA, 20 bp, Artificial Sequence
  Description of Artificial Sequence: Synthetic oligonucleotide
  Target: LAMA2; (-) strand; PAM type: NRG; PAM sequence: CAG
aaggataattagttaattag

SEQ ID NO: 83864 - DNA, 20 bp, Artificial Sequence
  Description of Artificial Sequence: Synthetic oligonucleotide
  Target: LAMA2; (-) strand; PAM type: NRG; PAM sequence: TAG
aagaaggataattagttaat

SEQ ID NO: 83865 - DNA, 20 bp, Artificial Sequence
  Description of Artificial Sequence: Synthetic oligonucleotide
  Target: LAMA2; (-) strand; PAM type: NRG; PAM sequence: TAG
gttaacaaaagaaggataat

SEQ ID NO: 83866 - DNA, 20 bp, Artificial Sequence
  Description of Artificial Sequence: Synthetic oligonucleotide
  Target: LAMA2; (-) strand; PAM type: NRG; PAM sequence: AGG
taaaataagttaacaaaaga

SEQ ID NO: 83867 - DNA, 20 bp, Artificial Sequence
  Description of Artificial Sequence: Synthetic oligonucleotide
  Target: LAMA2; (-) strand; PAM type: NRG; PAM sequence: AAG
ttaaaataagttaacaaaag

SEQ ID NO: 83868 - DNA, 20 bp, Artificial Sequence
  Description of Artificial Sequence: Synthetic oligonucleotide
  Target: LAMA2; (-) strand; PAM type: NRG; PAM sequence: AAG
gtattaaaataagttaacaa

SEQ ID NO: 83869 - DNA, 20 bp, Artificial Sequence
  Description of Artificial Sequence: Synthetic oligonucleotide
  Target: LAMA2; (-) strand; PAM type: NRG; PAM sequence: AAG
atgcatcctagtattaaaat

SEQ ID NO: 83870 - DNA, 20 bp, Artificial Sequence
  Description of Artificial Sequence: Synthetic oligonucleotide
  Target: LAMA2; (-) strand; PAM type: NRG; PAM sequence: TAG
acctttagactaatgcatcc

SEQ ID NO: 83871 - DNA, 20 bp, Artificial Sequence
  Description of Artificial Sequence: Synthetic oligonucleotide
  Target: LAMA2; (-) strand; PAM type: NRG; PAM sequence: TAG
ttttcttctgttatgacctt

SEQ ID NO: 83872 - DNA, 20 bp, Artificial Sequence
  Description of Artificial Sequence: Synthetic oligonucleotide
  Target: LAMA2; (-) strand; PAM type: NRG; PAM sequence: AGG
ggtagtttgtagttaattac

SEQ ID NO: 83873 - DNA, 20 bp, Artificial Sequence
  Description of Artificial Sequence: Synthetic oligonucleotide
  Target: LAMA2; (-) strand; PAM type: NRG; PAM sequence: CAG
tggtagtttgtagttaatta

SEQ ID NO: 83874 - DNA, 20 bp, Artificial Sequence
  Description of Artificial Sequence: Synthetic oligonucleotide
  Target: LAMA2; (-) strand; PAM type: NRG; PAM sequence: TAG
cttggttttttggtagtttg

SEQ ID NO: 83875 - DNA, 20 bp, Artificial Sequence
  Description of Artificial Sequence: Synthetic oligonucleotide
  Target: LAMA2; (-) strand; PAM type: NRG; PAM sequence: TAG
agtcatgcttggttttttgg

SEQ ID NO: 83876 - DNA, 20 bp, Artificial Sequence
  Description of Artificial Sequence: Synthetic oligonucleotide
  Target: LAMA2; (-) strand; PAM type: NRG; PAM sequence: TGG
ctcagtcatgcttggttttt

SEQ ID NO: 83877 - DNA, 20 bp, Artificial Sequence
  Description of Artificial Sequence: Synthetic oligonucleotide
  Target: LAMA2; (-) strand; PAM type: NRG; PAM sequence: TGG
aggaatttctcagtcatgct

SEQ ID NO: 83878 - DNA, 20 bp, Artificial Sequence
  Description of Artificial Sequence: Synthetic oligonucleotide
  Target: LAMA2; (-) strand; PAM type: NRG; PAM sequence: CAG
taattgcttcaggaatttct

SEQ ID NO: 83879 - DNA, 20 bp, Artificial Sequence
  Description of Artificial Sequence: Synthetic oligonucleotide
  Target: LAMA2; (-) strand; PAM type: NRG; PAM sequence: AGG
ttttgtgtgataattgcttc

SEQ ID NO: 83880 - DNA, 20 bp, Artificial Sequence
  Description of Artificial Sequence: Synthetic oligonucleotide
  Target: LAMA2; (-) strand; PAM type: NRG; PAM sequence: CAG
tttttgtgtgataattgctt

SEQ ID NO: 83881 - DNA, 20 bp, Artificial Sequence
  Description of Artificial Sequence: Synthetic oligonucleotide
  Target: LAMA2; (-) strand; PAM type: NRG; PAM sequence: AAG
gaatagctccagtgacattt

SEQ ID NO: 83882 - DNA, 20 bp, Artificial Sequence
  Description of Artificial Sequence: Synthetic oligonucleotide
  Target: LAMA2; (-) strand; PAM type: NRG; PAM sequence: CAG
aaagttaccaggaatagctc

SEQ ID NO: 83883 - DNA, 20 bp, Artificial Sequence
  Description of Artificial Sequence: Synthetic oligonucleotide
  Target: LAMA2; (-) strand; PAM type: NRG; PAM sequence: TAG
actgacaaagttaccaggaa

SEQ ID NO: 83884 - DNA, 20 bp, Artificial Sequence
  Description of Artificial Sequence: Synthetic oligonucleotide
  Target: LAMA2; (-) strand; PAM type: NRG; PAM sequence: AGG
gtactactgacaaagttacc

SEQ ID NO: 83885 - DNA, 20 bp, Artificial Sequence
  Description of Artificial Sequence: Synthetic oligonucleotide
  Target: LAMA2; (-) strand; PAM type: NRG; PAM sequence: CAG
agtactactgacaaagttac

SEQ ID NO: 83886 - DNA, 20 bp, Artificial Sequence
  Description of Artificial Sequence: Synthetic oligonucleotide
  Target: LAMA2; (-) strand; PAM type: NRG; PAM sequence: AAG
agctgggagtactactgaca

SEQ ID NO: 83887 - DNA, 20 bp, Artificial Sequence
  Description of Artificial Sequence: Synthetic oligonucleotide
  Target: LAMA2; (-) strand; PAM type: NRG; PAM sequence: GAG
tgtgattgttagtcagctgg

SEQ ID NO: 83888 - DNA, 20 bp, Artificial Sequence
  Description of Artificial Sequence: Synthetic oligonucleotide
  Target: LAMA2; (-) strand; PAM type: NRG; PAM sequence: GGG
actgtgattgttagtcagct

SEQ ID NO: 83889 - DNA, 20 bp, Artificial Sequence
  Description of Artificial Sequence: Synthetic oligonucleotide
  Target: LAMA2; (-) strand; PAM type: NRG; PAM sequence: TGG
aactgtgattgttagtcagc

SEQ ID NO: 83890 - DNA, 20 bp, Artificial Sequence
  Description of Artificial Sequence: Synthetic oligonucleotide
  Target: LAMA2; (-) strand; PAM type: NRG; PAM sequence: CAG
attgaactgtgattgttagt

SEQ ID NO: 83891 - DNA, 20 bp, Artificial Sequence
  Description of Artificial Sequence: Synthetic oligonucleotide
  Target: LAMA2; (-) strand; PAM type: NRG; PAM sequence: TAG
acatattgaactgtgattgt

SEQ ID NO: 83892 - DNA, 20 bp, Artificial Sequence
  Description of Artificial Sequence: Synthetic oligonucleotide
  Target: LAMA2; (-) strand; PAM type: NRG; PAM sequence: CAG
taaactaggtacaacttcag

SEQ ID NO: 83893 - DNA, 20 bp, Artificial Sequence
  Description of Artificial Sequence: Synthetic oligonucleotide
  Target: LAMA2; (-) strand; PAM type: NRG; PAM sequence: CAG
ttataaactaggtacaactt

SEQ ID NO: 83894 - DNA, 20 bp, Artificial Sequence
  Description of Artificial Sequence: Synthetic oligonucleotide
  Target: LAMA2; (-) strand; PAM type: NRG; PAM sequence: AGG
aagctactgctttataaact

SEQ ID NO: 83895 - DNA, 20 bp, Artificial Sequence
  Description of Artificial Sequence: Synthetic oligonucleotide
  Target: LAMA2; (-) strand; PAM type: NRG; PAM sequence: TAG
gaagctactgctttataaac

SEQ ID NO: 83896 - DNA, 20 bp, Artificial Sequence
  Description of Artificial Sequence: Synthetic oligonucleotide
  Target: LAMA2; (-) strand; PAM type: NRG; PAM sequence: AAG
tcttgtattctttctcatag

SEQ ID NO: 83897 - DNA, 20 bp, Artificial Sequence
  Description of Artificial Sequence: Synthetic oligonucleotide
  Target: LAMA2; (-) strand; PAM type: NRG; PAM sequence: TAG
ttttcttgtattctttctca

SEQ ID NO: 83898 - DNA, 20 bp, Artificial Sequence
  Description of Artificial Sequence: Synthetic oligonucleotide
  Target: LAMA2; (-) strand; PAM type: NRG; PAM sequence: TAG
ctctggagaaatagtcaccg

SEQ ID NO: 83899 - DNA, 20 bp, Artificial Sequence
  Description of Artificial Sequence: Synthetic oligonucleotide
  Target: LAMA2; (-) strand; PAM type: NRG; PAM sequence: TAG
acagtttttctctggagaaa

SEQ ID NO: 83900 - DNA, 20 bp, Artificial Sequence
  Description of Artificial Sequence: Synthetic oligonucleotide
  Target: LAMA2; (-) strand; PAM type: NRG; PAM sequence: GAG
ctcagtacagtttttctctg

SEQ ID NO: 83901 - DNA, 20 bp, Artificial Sequence
  Description of Artificial Sequence: Synthetic oligonucleotide
  Target: LAMA2; (-) strand; PAM type: NRG; PAM sequence: TGG
tcctcagtacagtttttctc

SEQ ID NO: 83902 - DNA, 20 bp, Artificial Sequence
  Description of Artificial Sequence: Synthetic oligonucleotide
  Target: LAMA2; (-) strand; PAM type: NRG; PAM sequence: CAG
ttgctatagtttcctcagta

SEQ ID NO: 83903 - DNA, 20 bp, Artificial Sequence
  Description of Artificial Sequence: Synthetic oligonucleotide
  Target: LAMA2; (-) strand; PAM type: NRG; PAM sequence: CAG
tctttttgctatagtttcct

SEQ ID NO: 83904 - DNA, 20 bp, Artificial Sequence
  Description of Artificial Sequence: Synthetic oligonucleotide
  Target: LAMA2; (-) strand; PAM type: NRG; PAM sequence: TAG
catcaattttctttttgcta

SEQ ID NO: 83905 - DNA, 20 bp, Artificial Sequence
  Description of Artificial Sequence: Synthetic oligonucleotide
  Target: LAMA2; (-) strand; PAM type: NRG; PAM sequence: GAG
tgtttttgatttcttgaagt

SEQ ID NO: 83906 - DNA, 20 bp, Artificial Sequence
  Description of Artificial Sequence: Synthetic oligonucleotide
  Target: LAMA2; (-) strand; PAM type: NRG; PAM sequence: AAG
cttttgtttttgatttcttg

SEQ ID NO: 83907 - DNA, 20 bp, Artificial Sequence
  Description of Artificial Sequence: Synthetic oligonucleotide
  Target: LAMA2; (-) strand; PAM type: NRG; PAM sequence: AAG
tgaattagaaaaattttact

SEQ ID NO: 83908 - DNA, 20 bp, Artificial Sequence
  Description of Artificial Sequence: Synthetic oligonucleotide
  Target: LAMA2; (-) strand; PAM type: NRG; PAM sequence: TAG
ctttaaaaacaaagttgaat

SEQ ID NO: 83909 - DNA, 20 bp, Artificial Sequence
  Description of Artificial Sequence: Synthetic oligonucleotide
  Target: LAMA2; (-) strand; PAM type: NRG; PAM sequence: AAG
ctcttttccctttaaaaaca

SEQ ID NO: 83910 - DNA, 20 bp, Artificial Sequence
  Description of Artificial Sequence: Synthetic oligonucleotide
  Target: LAMA2; (-) strand; PAM type: NRG; PAM sequence: TAG
atggctgtcttttttttctt

SEQ ID NO: 83911 - DNA, 20 bp, Artificial Sequence
  Description of Artificial Sequence: Synthetic oligonucleotide
  Target: LAMA2; (-) strand; PAM type: NRG; PAM sequence: TGG
gcctacgctacaaaaaatca

SEQ ID NO: 83912 - DNA, 20 bp, Artificial Sequence
  Description of Artificial Sequence: Synthetic oligonucleotide
  Target: LAMA2; (-) strand; PAM type: NRG; PAM sequence: TGG
ttgaacatagctcaatgttg

SEQ ID NO: 83913 - DNA, 20 bp, Artificial Sequence
  Description of Artificial Sequence: Synthetic oligonucleotide
  Target: LAMA2; (-) strand; PAM type: NRG; PAM sequence: TAG
acatctatttcctttgaaca

SEQ ID NO: 83914 - DNA, 20 bp, Artificial Sequence
  Description of Artificial Sequence: Synthetic oligonucleotide
  Target: LAMA2; (-) strand; PAM type: NRG; PAM sequence: TAG
ttaggaagaaatgtgtgctt

SEQ ID NO: 83915 - DNA, 20 bp, Artificial Sequence
  Description of Artificial Sequence: Synthetic oligonucleotide
  Target: LAMA2; (-) strand; PAM type: NRG; PAM sequence: AAG
ccaattttcattcttttagg

SEQ ID NO: 83916 - DNA, 20 bp, Artificial Sequence
  Description of Artificial Sequence: Synthetic oligonucleotide
  Target: LAMA2; (-) strand; PAM type: NRG; PAM sequence: AGG
gaaccaattttcattctttt

SEQ ID NO: 83917 - DNA, 20 bp, Artificial Sequence
  Description of Artificial Sequence: Synthetic oligonucleotide
  Target: LAMA2; (-) strand; PAM type: NRG; PAM sequence: TAG
agaaccaattttcattcttt

SEQ ID NO: 83918 - DNA, 20 bp, Artificial Sequence
  Description of Artificial Sequence: Synthetic oligonucleotide
  Target: LAMA2; (-) strand; PAM type: NRG; PAM sequence: AAG
atatgatatttttgttccca

SEQ ID NO: 83919 - DNA, 20 bp, Artificial Sequence
  Description of Artificial Sequence: Synthetic oligonucleotide
  Target: LAMA2; (-) strand; PAM type: NRG; PAM sequence: CAG
ctccagatatattttatgta

SEQ ID NO: 83920 - DNA, 20 bp, Artificial Sequence
  Description of Artificial Sequence: Synthetic oligonucleotide
  Target: LAMA2; (-) strand; PAM type: NRG; PAM sequence: CAG
accatgaaactttaatactc

SEQ ID NO: 83921 - DNA, 20 bp, Artificial Sequence
  Description of Artificial Sequence: Synthetic oligonucleotide
  Target: LAMA2; (-) strand; PAM type: NRG; PAM sequence: TAG
atgtccctatggagcctata

SEQ ID NO: 83922 - DNA, 20 bp, Artificial Sequence
  Description of Artificial Sequence: Synthetic oligonucleotide
  Target: LAMA2; (-) strand; PAM type: NRG; PAM sequence: GAG
tttatcatcatgtccctatg

SEQ ID NO: 83923 - DNA, 20 bp, Artificial Sequence
  Description of Artificial Sequence: Synthetic oligonucleotide
  Target: LAMA2; (-) strand; PAM type: NRG; PAM sequence: TGG
tttttatcatcatgtcccta

SEQ ID NO: 83924 - DNA, 20 bp, Artificial Sequence
  Description of Artificial Sequence: Synthetic oligonucleotide
  Target: LAMA2; (-) strand; PAM type: NRG; PAM sequence: TAG
cacatcacttcactttagac

SEQ ID NO: 83925 - DNA, 20 bp, Artificial Sequence
  Description of Artificial Sequence: Synthetic oligonucleotide
  Target: LAMA2; (-) strand; PAM type: NRG; PAM sequence: TAG
taaaacacatcacttcactt

SEQ ID NO: 83926 - DNA, 20 bp, Artificial Sequence
  Description of Artificial Sequence: Synthetic oligonucleotide
  Target: LAMA2; (-) strand; PAM type: NRG; PAM sequence: TAG
aaatgaaatatgaactataa

SEQ ID NO: 83927 - DNA, 20 bp, Artificial Sequence
  Description of Artificial Sequence: Synthetic oligonucleotide
  Target: LAMA2; (-) strand; PAM type: NRG; PAM sequence: TAG
aacgctacagacttccactc

SEQ ID NO: 83928 - DNA, 20 bp, Artificial Sequence
  Description of Artificial Sequence: Synthetic oligonucleotide
  Target: LAMA2; (-) strand; PAM type: NRG; PAM sequence: CAG
cggtaatttctagaacgcta

SEQ ID NO: 83929 - DNA, 20 bp, Artificial Sequence
  Description of Artificial Sequence: Synthetic oligonucleotide
  Target: LAMA2; (-) strand; PAM type: NRG; PAM sequence: TAG
ctataaaacacggtaatttc

SEQ ID NO: 83930 - DNA, 20 bp, Artificial Sequence
  Description of Artificial Sequence: Synthetic oligonucleotide
  Target: LAMA2; (-) strand; PAM type: NRG; PAM sequence: CGG
acactacagcctataaaaca

SEQ ID NO: 83931 - DNA, 20 bp, Artificial Sequence
  Description of Artificial Sequence: Synthetic oligonucleotide
  Target: LAMA2; (-) strand; PAM type: NRG; PAM sequence: CAG
taatgataattttcacacta

SEQ ID NO: 83932 - DNA, 20 bp, Artificial Sequence
  Description of Artificial Sequence: Synthetic oligonucleotide
  Target: LAMA2; (-) strand; PAM type: NRG; PAM sequence: TAG
tttatttgtatagagtccat

SEQ ID NO: 83933 - DNA, 20 bp, Artificial Sequence
  Description of Artificial Sequence: Synthetic oligonucleotide
  Target: LAMA2; (-) strand; PAM type: NRG; PAM sequence: GAG
tttaacactttatttgtata

SEQ ID NO: 83934 - DNA, 20 bp, Artificial Sequence
  Description of Artificial Sequence: Synthetic oligonucleotide
  Target: LAMA2; (-) strand; PAM type: NRG; PAM sequence: TAG
attttaacactttatttgta

SEQ ID NO: 83935 - DNA, 20 bp, Artificial Sequence
  Description of Artificial Sequence: Synthetic oligonucleotide
  Target: LAMA2; (-) strand; PAM type: NRG; PAM sequence: AAG
ctctcagcattcctactggg

SEQ ID NO: 83936 - DNA, 20 bp, Artificial Sequence
  Description of Artificial Sequence: Synthetic oligonucleotide
  Target: LAMA2; (-) strand; PAM type: NRG; PAM sequence: GGG
aacctctcagcattcctact

SEQ ID NO: 83937 - DNA, 20 bp, Artificial Sequence
  Description of Artificial Sequence: Synthetic oligonucleotide
  Target: LAMA2; (-) strand; PAM type: NRG; PAM sequence: TGG
aaacctctcagcattcctac

SEQ ID NO: 83938 - DNA, 20 bp, Artificial Sequence
  Description of Artificial Sequence: Synthetic oligonucleotide
  Target: LAMA2; (-) strand; PAM type: NRG; PAM sequence: CAG
gtctaatctattaaacctct

SEQ ID NO: 83939 - DNA, 20 bp, Artificial Sequence
  Description of Artificial Sequence: Synthetic oligonucleotide
  Target: LAMA2; (-) strand; PAM type: NRG; PAM sequence: GAG
ctgttaatctaaacaaaatg

SEQ ID NO: 83940 - DNA, 20 bp, Artificial Sequence
  Description of Artificial Sequence: Synthetic oligonucleotide
  Target: LAMA2; (-) strand; PAM type: NRG; PAM sequence: TGG
aactgttaatctaaacaaaa

SEQ ID NO: 83941 - DNA, 20 bp, Artificial Sequence
  Description of Artificial Sequence: Synthetic oligonucleotide
  Target: LAMA2; (-) strand; PAM type: NRG; PAM sequence: AAG
taatttaataaaaattttta

SEQ ID NO: 83942 - DNA, 20 bp, Artificial Sequence
  Description of Artificial Sequence: Synthetic oligonucleotide
  Target: LAMA2; (-) strand; PAM type: NRG; PAM sequence: TGG
tttgtttatctatacttcaa

SEQ ID NO: 83943 - DNA, 20 bp, Artificial Sequence
  Description of Artificial Sequence: Synthetic oligonucleotide
  Target: LAMA2; (-) strand; PAM type: NRG; PAM sequence: AAG
ttgtactgatgaattttaaa

SEQ ID NO: 83944 - DNA, 20 bp, Artificial Sequence
  Description of Artificial Sequence: Synthetic oligonucleotide
  Target: LAMA2; (-) strand; PAM type: NRG; PAM sequence: GAG
aatgttattttaatcatcat

SEQ ID NO: 83945 - DNA, 20 bp, Artificial Sequence
  Description of Artificial Sequence: Synthetic oligonucleotide
  Target: LAMA2; (-) strand; PAM type: NRG; PAM sequence: CAG
ggtaaaagttttgtaccttc

SEQ ID NO: 83946 - DNA, 20 bp, Artificial Sequence
  Description of Artificial Sequence: Synthetic oligonucleotide
  Target: LAMA2; (-) strand; PAM type: NRG; PAM sequence: AAG
atatcgaatgatgaaggtaa

SEQ ID NO: 83947 - DNA, 20 bp, Artificial Sequence
  Description of Artificial Sequence: Synthetic oligonucleotide
  Target: LAMA2; (-) strand; PAM type: NRG; PAM sequence: AGG
acctaaatatcgaatgatga

SEQ ID NO: 83948 - DNA, 20 bp, Artificial Sequence
  Description of Artificial Sequence: Synthetic oligonucleotide
  Target: LAMA2; (-) strand; PAM type: NRG; PAM sequence: AAG
aacctaaatatcgaatgatg

SEQ ID NO: 83949 - DNA, 20 bp, Artificial Sequence
  Description of Artificial Sequence: Synthetic oligonucleotide
  Target: LAMA2; (-) strand; PAM type: NRG; PAM sequence: GGG
tcagtccctaaagcatagat

SEQ ID NO: 83950 - DNA, 20 bp, Artificial Sequence
  Description of Artificial Sequence: Synthetic oligonucleotide
  Target: LAMA2; (-) strand; PAM type: NRG; PAM sequence: TGG
ttcagtccctaaagcataga

SEQ ID NO: 83951 - DNA, 20 bp, Artificial Sequence
  Description of Artificial Sequence: Synthetic oligonucleotide
  Target: LAMA2; (-) strand; PAM type: NRG; PAM sequence: TAG
ccaattcagtccctaaagca

SEQ ID NO: 83952 - DNA, 20 bp, Artificial Sequence
  Description of Artificial Sequence: Synthetic oligonucleotide
  Target: LAMA2; (-) strand; PAM type: NRG; PAM sequence: AAG
accatccaattcagtcccta

SEQ ID NO: 83953 - DNA, 20 bp, Artificial Sequence
  Description of Artificial Sequence: Synthetic oligonucleotide
  Target: LAMA2; (-) strand; PAM type: NRG; PAM sequence: CAG
cttattaccaccatccaatt

SEQ ID NO: 83954 - DNA, 20 bp, Artificial Sequence
  Description of Artificial Sequence: Synthetic oligonucleotide
  Target: LAMA2; (-) strand; PAM type: NRG; PAM sequence: CAG
tgccatccataagattggca

SEQ ID NO: 83955 - DNA, 20 bp, Artificial Sequence
  Description of Artificial Sequence: Synthetic oligonucleotide
  Target: LAMA2; (-) strand; PAM type: NRG; PAM sequence: TGG
tttcttgccatccataagat

SEQ ID NO: 83956 - DNA, 20 bp, Artificial Sequence
  Description of Artificial Sequence: Synthetic oligonucleotide
  Target: LAMA2; (-) strand; PAM type: NRG; PAM sequence: AAG
gttcttttcttgccatccat

SEQ ID NO: 83957 - DNA, 20 bp, Artificial Sequence
  Description of Artificial Sequence: Synthetic oligonucleotide
  Target: LAMA2; (-) strand; PAM type: NRG; PAM sequence: CAG
aataaataaataaatacaca

SEQ ID NO: 83958 - DNA, 20 bp, Artificial Sequence
  Description of Artificial Sequence: Synthetic oligonucleotide
  Target: LAMA2; (-) strand; PAM type: NRG; PAM sequence: GGG
atgtaaaaatatctactaaa

SEQ ID NO: 83959 - DNA, 20 bp, Artificial Sequence
  Description of Artificial Sequence: Synthetic oligonucleotide
  Target: LAMA2; (-) strand; PAM type: NRG; PAM sequence: AGG
gatgtaaaaatatctactaa

SEQ ID NO: 83960 - DNA, 20 bp, Artificial Sequence
  Description of Artificial Sequence: Synthetic oligonucleotide
  Target: LAMA2; (-) strand; PAM type: NRG; PAM sequence: AAG
agatgtaaaaatatctacta

SEQ ID NO: 83961 - DNA, 20 bp, Artificial Sequence
  Description of Artificial Sequence: Synthetic oligonucleotide
  Target: LAMA2; (-) strand; PAM type: NRG; PAM sequence: CAG
tccagatgtgagaatgtctc

SEQ ID NO: 83962 - DNA, 20 bp, Artificial Sequence
  Description of Artificial Sequence: Synthetic oligonucleotide
  Target: LAMA2; (-) strand; PAM type: NRG; PAM sequence: GAG
cagtgtcctcttccagatgt

SEQ ID NO: 83963 - DNA, 20 bp, Artificial Sequence
  Description of Artificial Sequence: Synthetic oligonucleotide
  Target: LAMA2; (-) strand; PAM type: NRG; PAM sequence: CAG
actgttgcagtgtcctcttc

SEQ ID NO: 83964 - DNA, 20 bp, Artificial Sequence
  Description of Artificial Sequence: Synthetic oligonucleotide
  Target: LAMA2; (-) strand; PAM type: NRG; PAM sequence: CAG
attaaaataggctactgttg

SEQ ID NO: 83965 - DNA, 20 bp, Artificial Sequence
  Description of Artificial Sequence: Synthetic oligonucleotide
  Target: LAMA2; (-) strand; PAM type: NRG; PAM sequence: AGG
tttcatgacaagattaaaat

SEQ ID NO: 83966 - DNA, 20 bp, Artificial Sequence
  Description of Artificial Sequence: Synthetic oligonucleotide
  Target: LAMA2; (-) strand; PAM type: NRG; PAM sequence: TAG
ttttcatgacaagattaaaa

SEQ ID NO: 83967 - DNA, 20 bp, Artificial Sequence
  Description of Artificial Sequence: Synthetic oligonucleotide
  Target: LAMA2; (-) strand; PAM type: NRG; PAM sequence: AAG
tatcccaagattttcatgac

SEQ ID NO: 83968 - DNA, 20 bp, Artificial Sequence
  Description of Artificial Sequence: Synthetic oligonucleotide
  Target: LAMA2; (-) strand; PAM type: NRG; PAM sequence: AAG
gagcaaaaaagatgtatccc

SEQ ID NO: 83969 - DNA, 20 bp, Artificial Sequence
  Description of Artificial Sequence: Synthetic oligonucleotide
  Target: LAMA2; (-) strand; PAM type: NRG; PAM sequence: AAG
aaccagggagttgagcaaaa

SEQ ID NO: 83970 - DNA, 20 bp, Artificial Sequence
  Description of Artificial Sequence: Synthetic oligonucleotide
  Target: LAMA2; (-) strand; PAM type: NRG; PAM sequence: GAG
gacagaaaaaccagggagtt

SEQ ID NO: 83971 - DNA, 20 bp, Artificial Sequence
  Description of Artificial Sequence: Synthetic oligonucleotide
  Target: LAMA2; (-) strand; PAM type: NRG; PAM sequence: GAG
aataagacagaaaaaccagg

SEQ ID NO: 83972 - DNA, 20 bp, Artificial Sequence
  Description of Artificial Sequence: Synthetic oligonucleotide
  Target: LAMA2; (-) strand; PAM type: NRG; PAM sequence: GGG
aaaataagacagaaaaacca

SEQ ID NO: 83973 - DNA, 20 bp, Artificial Sequence
  Description of Artificial Sequence: Synthetic oligonucleotide
  Target: LAMA2; (-) strand; PAM type: NRG; PAM sequence: AGG
aaaaataagacagaaaaacc

SEQ ID NO: 83974 - DNA, 20 bp, Artificial Sequence
  Description of Artificial Sequence: Synthetic oligonucleotide
  Target: LAMA2; (-) strand; PAM type: NRG; PAM sequence: CAG
aaaaaataagacagaaaaac

SEQ ID NO: 83975 - DNA, 20 bp, Artificial Sequence
  Description of Artificial Sequence: Synthetic oligonucleotide
  Target: LAMA2; (-) strand; PAM type: NRG; PAM sequence: CAG
ccccgaagaaaaaaataaga

SEQ ID NO: 83976 - DNA, 20 bp, Artificial Sequence
  Description of Artificial Sequence: Synthetic oligonucleotide
  Target: LAMA2; (-) strand; PAM type: NRG; PAM sequence: AAG
tatgccccgaagaaaaaaat

SEQ ID NO: 83977 - DNA, 20 bp, Artificial Sequence
  Description of Artificial Sequence: Synthetic oligonucleotide
  Target: LAMA2; (-) strand; PAM type: NRG; PAM sequence: AAG
ccagtgtccactatgccccg

SEQ ID NO: 83978 - DNA, 20 bp, Artificial Sequence
  Description of Artificial Sequence: Synthetic oligonucleotide
  Target: LAMA2; (-) strand; PAM type: NRG; PAM sequence: CAG
tctgacaccaaattcatcac

SEQ ID NO: 83979 - DNA, 20 bp, Artificial Sequence
  Description of Artificial Sequence: Synthetic oligonucleotide
  Target: LAMA2; (-) strand; PAM type: NRG; PAM sequence: TGG
ggggtacagacaacatgttc

SEQ ID NO: 83980 - DNA, 20 bp, Artificial Sequence
  Description of Artificial Sequence: Synthetic oligonucleotide
  Target: LAMA2; (-) strand; PAM type: NRG; PAM sequence: CAG
tcactgctgtaagaggggta

SEQ ID NO: 83981 - DNA, 20 bp, Artificial Sequence
  Description of Artificial Sequence: Synthetic oligonucleotide
  Target: LAMA2; (-) strand; PAM type: NRG; PAM sequence: GGG
gaaaatcactgctgtaagag

SEQ ID NO: 83982 - DNA, 20 bp, Artificial Sequence
  Description of Artificial Sequence: Synthetic oligonucleotide
  Target: LAMA2; (-) strand; PAM type: NRG; PAM sequence: GGG
agaaaatcactgctgtaaga

SEQ ID NO: 83983 - DNA, 20 bp, Artificial Sequence
  Description of Artificial Sequence: Synthetic oligonucleotide
  Target: LAMA2; (-) strand; PAM type: NRG; PAM sequence: AGG
aagaaaatcactgctgtaag

SEQ ID NO: 83984 - DNA, 20 bp, Artificial Sequence
  Description of Artificial Sequence: Synthetic oligonucleotide
  Target: LAMA2; (-) strand; PAM type: NRG; PAM sequence: GAG
gaagaaaatcactgctgtaa

SEQ ID NO: 83985 - DNA, 20 bp, Artificial Sequence
  Description of Artificial Sequence: Synthetic oligonucleotide
  Target: LAMA2; (-) strand; PAM type: NRG; PAM sequence: AAG
tggaagaaaatcactgctgt

SEQ ID NO: 83986 - DNA, 20 bp, Artificial Sequence
  Description of Artificial Sequence: Synthetic oligonucleotide
  Target: LAMA2; (-) strand; PAM type: NRG; PAM sequence: AAG
ataattatattacaaggtgg

SEQ ID NO: 83987 - DNA, 20 bp, Artificial Sequence
  Description of Artificial Sequence: Synthetic oligonucleotide
  Target: LAMA2; (-) strand; PAM type: NRG; PAM sequence: TGG
cagataattatattacaagg

SEQ ID NO: 83988 - DNA, 20 bp, Artificial Sequence
  Description of Artificial Sequence: Synthetic oligonucleotide
  Target: LAMA2; (-) strand; PAM type: NRG; PAM sequence: AGG
cttcagataattatattaca

SEQ ID NO: 83989 - DNA, 20 bp, Artificial Sequence
  Description of Artificial Sequence: Synthetic oligonucleotide
  Target: LAMA2; (-) strand; PAM type: NRG; PAM sequence: AAG
acttcagataattatattac

SEQ ID NO: 83990 - DNA, 20 bp, Artificial Sequence
  Description of Artificial Sequence: Synthetic oligonucleotide
  Target: LAMA2; (-) strand; PAM type: NRG; PAM sequence: CAG
ctttctgatgaggcggactt

SEQ ID NO: 83991 - DNA, 20 bp, Artificial Sequence
  Description of Artificial Sequence: Synthetic oligonucleotide
  Target: LAMA2; (-) strand; PAM type: NRG; PAM sequence: CGG
ctatgtactttctgatgagg

SEQ ID NO: 83992 - DNA, 20 bp, Artificial Sequence
  Description of Artificial Sequence: Synthetic oligonucleotide
  Target: LAMA2; (-) strand; PAM type: NRG; PAM sequence: AGG
tccctatgtactttctgatg

SEQ ID NO: 83993 - DNA, 20 bp, Artificial Sequence
  Description of Artificial Sequence: Synthetic oligonucleotide
  Target: LAMA2; (-) strand; PAM type: NRG; PAM sequence: GAG
ttccctatgtactttctgat

SEQ ID NO: 83994 - DNA, 20 bp, Artificial Sequence
  Description of Artificial Sequence: Synthetic oligonucleotide
  Target: LAMA2; (-) strand; PAM type: NRG; PAM sequence: TAG
ttggagaaatagagtcacga

SEQ ID NO: 83995 - DNA, 20 bp, Artificial Sequence
  Description of Artificial Sequence: Synthetic oligonucleotide
  Target: LAMA2; (-) strand; PAM type: NRG; PAM sequence: GAG
agtttctacttggagaaata

SEQ ID NO: 83996 - DNA, 20 bp, Artificial Sequence
  Description of Artificial Sequence: Synthetic oligonucleotide
  Target: LAMA2; (-) strand; PAM type: NRG; PAM sequence: TAG
acagtttctacttggagaaa

SEQ ID NO: 83997 - DNA, 20 bp, Artificial Sequence
  Description of Artificial Sequence: Synthetic oligonucleotide
  Target: LAMA2; (-) strand; PAM type: NRG; PAM sequence: GAG
cttagcacagtttctacttg

SEQ ID NO: 83998 - DNA, 20 bp, Artificial Sequence
  Description of Artificial Sequence: Synthetic oligonucleotide
  Target: LAMA2; (-) strand; PAM type: NRG; PAM sequence: TGG
cccttagcacagtttctact

SEQ ID NO: 83999 - DNA, 20 bp, Artificial Sequence
  Description of Artificial Sequence: Synthetic oligonucleotide
  Target: LAMA2; (-) strand; PAM type: NRG; PAM sequence: CAG
ttgctttagttcccttagca

SEQ ID NO: 84000 - DNA, 20 bp, Artificial Sequence
  Description of Artificial Sequence: Synthetic oligonucleotide
  Target: LAMA2; (-) strand; PAM type: NRG; PAM sequence: TAG
cttttttgctttagttccct

SEQ ID NO: 84001 - DNA, 20 bp, Artificial Sequence
  Description of Artificial Sequence: Synthetic oligonucleotide
  Target: LAMA2; (-) strand; PAM type: NRG; PAM sequence: TAG
aggaattttcttttttgctt

SEQ ID NO: 84002 - DNA, 20 bp, Artificial Sequence
  Description of Artificial Sequence: Synthetic oligonucleotide
  Target: LAMA2; (-) strand; PAM type: NRG; PAM sequence: AGG
aggattatagcaaaggaagt

SEQ ID NO: 84003 - DNA, 20 bp, Artificial Sequence
  Description of Artificial Sequence: Synthetic oligonucleotide
  Target: LAMA2; (-) strand; PAM type: NRG; PAM sequence: TAG
gaggattatagcaaaggaag

SEQ ID NO: 84004 - DNA, 20 bp, Artificial Sequence
  Description of Artificial Sequence: Synthetic oligonucleotide
  Target: LAMA2; (-) strand; PAM type: NRG; PAM sequence: AAG
caagaggattatagcaaagg

SEQ ID NO: 84005 - DNA, 20 bp, Artificial Sequence
  Description of Artificial Sequence: Synthetic oligonucleotide
  Target: LAMA2; (-) strand; PAM type: NRG; PAM sequence: AGG
cctcaagaggattatagcaa

SEQ ID NO: 84006 - DNA, 20 bp, Artificial Sequence
  Description of Artificial Sequence: Synthetic oligonucleotide
  Target: LAMA2; (-) strand; PAM type: NRG; PAM sequence: AAG
ccctcaagaggattatagca

SEQ ID NO: 84007 - DNA, 20 bp, Artificial Sequence
  Description of Artificial Sequence: Synthetic oligonucleotide
  Target: LAMA2; (-) strand; PAM type: NRG; PAM sequence: TAG
aaatgccctcaagaggatta

SEQ ID NO: 84008 - DNA, 20 bp, Artificial Sequence
  Description of Artificial Sequence: Synthetic oligonucleotide
  Target: LAMA2; (-) strand; PAM type: NRG; PAM sequence: AGG
aatataaaaatgccctcaag

SEQ ID NO: 84009 - DNA, 20 bp, Artificial Sequence
  Description of Artificial Sequence: Synthetic oligonucleotide
  Target: LAMA2; (-) strand; PAM type: NRG; PAM sequence: GAG
gaatataaaaatgccctcaa

SEQ ID NO: 84010 - DNA, 20 bp, Artificial Sequence
  Description of Artificial Sequence: Synthetic oligonucleotide
  Target: LAMA2; (-) strand; PAM type: NRG; PAM sequence: AAG
gggaatataaaaatgccctc

SEQ ID NO: 84011 - DNA, 20 bp, Artificial Sequence
  Description of Artificial Sequence: Synthetic oligonucleotide
  Target: LAMA2; (-) strand; PAM type: NRG; PAM sequence: GGG
aagacatatgagatatcaca

SEQ ID NO: 84012 - DNA, 20 bp, Artificial Sequence
  Description of Artificial Sequence: Synthetic oligonucleotide
  Target: LAMA2; (-) strand; PAM type: NRG; PAM sequence: AGG
caagacatatgagatatcac

SEQ ID NO: 84013 - DNA, 20 bp, Artificial Sequence
  Description of Artificial Sequence: Synthetic oligonucleotide
  Target: LAMA2; (-) strand; PAM type: NRG; PAM sequence: CAG
acaagacatatgagatatca

SEQ ID NO: 84014 - DNA, 20 bp, Artificial Sequence
  Description of Artificial Sequence: Synthetic oligonucleotide
  Target: LAMA2; (-) strand; PAM type: NRG; PAM sequence: GAG
ctactatatacaagacatat

SEQ ID NO: 84015 - DNA, 20 bp, Artificial Sequence
  Description of Artificial Sequence: Synthetic oligonucleotide
  Target: LAMA2; (-) strand; PAM type: NRG; PAM sequence: AAG
atagctgaactactatatac

SEQ ID NO: 84016 - DNA, 20 bp, Artificial Sequence
  Description of Artificial Sequence: Synthetic oligonucleotide
  Target: LAMA2; (-) strand; PAM type: NRG; PAM sequence: TAG
attattcgttcatcaactca

SEQ ID NO: 84017 - DNA, 20 bp, Artificial Sequence
  Description of Artificial Sequence: Synthetic oligonucleotide
  Target: LAMA2; (-) strand; PAM type: NRG; PAM sequence: GAG
aagccatctgctttatggtt

SEQ ID NO: 84018 - DNA, 20 bp, Artificial Sequence
  Description of Artificial Sequence: Synthetic oligonucleotide
  Target: LAMA2; (-) strand; PAM type: NRG; PAM sequence: TGG
aagtgaagccatctgcttta

SEQ ID NO: 84019 - DNA, 20 bp, Artificial Sequence
  Description of Artificial Sequence: Synthetic oligonucleotide
  Target: LAMA2; (-) strand; PAM type: NRG; PAM sequence: AAG
tgattcccagcttgaaagtg

SEQ ID NO: 84020 - DNA, 20 bp, Artificial Sequence
  Description of Artificial Sequence: Synthetic oligonucleotide
  Target: LAMA2; (-) strand; PAM type: NRG; PAM sequence: AAG
ttttttgattcccagcttga

SEQ ID NO: 84021 - DNA, 20 bp, Artificial Sequence
  Description of Artificial Sequence: Synthetic oligonucleotide
  Target: LAMA2; (-) strand; PAM type: NRG; PAM sequence: CAG
acttaaagttttttgattcc

SEQ ID NO: 84022 - DNA, 20 bp, Artificial Sequence
  Description of Artificial Sequence: Synthetic oligonucleotide
  Target: LAMA2; (-) strand; PAM type: NRG; PAM sequence: AAG
catgaatattctagcactta

SEQ ID NO: 84023 - DNA, 20 bp, Artificial Sequence
  Description of Artificial Sequence: Synthetic oligonucleotide
  Target: LAMA2; (-) strand; PAM type: NRG; PAM sequence: TAG
tcctcttgacatgaatattc

SEQ ID NO: 84024 - DNA, 20 bp, Artificial Sequence
  Description of Artificial Sequence: Synthetic oligonucleotide
  Target: LAMA2; (-) strand; PAM type: NRG; PAM sequence: AAG
cattcctggcttattcttgg

SEQ ID NO: 84025 - DNA, 20 bp, Artificial Sequence
  Description of Artificial Sequence: Synthetic oligonucleotide
  Target: LAMA2; (-) strand; PAM type: NRG; PAM sequence: TGG
ttgcattcctggcttattct

SEQ ID NO: 84026 - DNA, 20 bp, Artificial Sequence
  Description of Artificial Sequence: Synthetic oligonucleotide
  Target: LAMA2; (-) strand; PAM type: NRG; PAM sequence: TGG
tcagcccctaattgcattcc

SEQ ID NO: 84027 - DNA, 20 bp, Artificial Sequence
  Description of Artificial Sequence: Synthetic oligonucleotide
  Target: LAMA2; (-) strand; PAM type: NRG; PAM sequence: CAG
gaccattgtcatccatgagt

SEQ ID NO: 84028 - DNA, 20 bp, Artificial Sequence
  Description of Artificial Sequence: Synthetic oligonucleotide
  Target: LAMA2; (-) strand; PAM type: NRG; PAM sequence: GAG
catcgaccattgtcatccat

SEQ ID NO: 84029 - DNA, 20 bp, Artificial Sequence
  Description of Artificial Sequence: Synthetic oligonucleotide
  Target: LAMA2; (-) strand; PAM type: NRG; PAM sequence: GGG
attctttctatgtgtcccca

SEQ ID NO: 84030 - DNA, 20 bp, Artificial Sequence
  Description of Artificial Sequence: Synthetic oligonucleotide
  Target: LAMA2; (-) strand; PAM type: NRG; PAM sequence: AGG
aattctttctatgtgtcccc

SEQ ID NO: 84031 - DNA, 20 bp, Artificial Sequence
  Description of Artificial Sequence: Synthetic oligonucleotide
  Target: LAMA2; (-) strand; PAM type: NRG; PAM sequence: CAG
caattctttctatgtgtccc

SEQ ID NO: 84032 - DNA, 20 bp, Artificial Sequence
  Description of Artificial Sequence: Synthetic oligonucleotide
  Target: LAMA2; (-) strand; PAM type: NRG; PAM sequence: TAG
tatatatgatcttgacagtc

SEQ ID NO: 84033 - DNA, 20 bp, Artificial Sequence
  Description of Artificial Sequence: Synthetic oligonucleotide
  Target: LAMA2; (-) strand; PAM type: NRG; PAM sequence: CAG
gttaatatatatgatcttga

SEQ ID NO: 84034 - DNA, 20 bp, Artificial Sequence
  Description of Artificial Sequence: Synthetic oligonucleotide
  Target: LAMA2; (-) strand; PAM type: NRG; PAM sequence: TAG
caaaatttcccgccttctat

SEQ ID NO: 84035 - DNA, 20 bp, Artificial Sequence
  Description of Artificial Sequence: Synthetic oligonucleotide
  Target: LAMA2; (-) strand; PAM type: NRG; PAM sequence: GAG
cttttgtgcacattttcata

SEQ ID NO: 84036 - DNA, 20 bp, Artificial Sequence
  Description of Artificial Sequence: Synthetic oligonucleotide
  Target: LAMA2; (-) strand; PAM type: NRG; PAM sequence: TAG
gacttttgtgcacattttca

SEQ ID NO: 84037 - DNA, 20 bp, Artificial Sequence
  Description of Artificial Sequence: Synthetic oligonucleotide
  Target: LAMA2; (-) strand; PAM type: NRG; PAM sequence: GGG
acacagaagtatagtgttct

SEQ ID NO: 84038 - DNA, 20 bp, Artificial Sequence
  Description of Artificial Sequence: Synthetic oligonucleotide
  Target: LAMA2; (-) strand; PAM type: NRG; PAM sequence: TGG
aacacagaagtatagtgttc

SEQ ID NO: 84039 - DNA, 20 bp, Artificial Sequence
  Description of Artificial Sequence: Synthetic oligonucleotide
  Target: LAMA2; (-) strand; PAM type: NRG; PAM sequence: TAG
acagttcaaacacagaagta

SEQ ID NO: 84040 - DNA, 20 bp, Artificial Sequence
  Description of Artificial Sequence: Synthetic oligonucleotide
  Target: LAMA2; (-) strand; PAM type: NRG; PAM sequence: AAG
gtagcacagttcaaacacag

SEQ ID NO: 84041 - DNA, 20 bp, Artificial Sequence
  Description of Artificial Sequence: Synthetic oligonucleotide
  Target: LAMA2; (-) strand; PAM type: NRG; PAM sequence: CAG
agagtagcacagttcaaaca

SEQ ID NO: 84042 - DNA, 20 bp, Artificial Sequence
  Description of Artificial Sequence: Synthetic oligonucleotide
  Target: LAMA2; (-) strand; PAM type: NRG; PAM sequence: CAG
ttatataatttagagtagca

SEQ ID NO: 84043 - DNA, 20 bp, Artificial Sequence
  Description of Artificial Sequence: Synthetic oligonucleotide
  Target: LAMA2; (-) strand; PAM type: NRG; PAM sequence: TAG
atattttatataatttagag

SEQ ID NO: 84044 - DNA, 20 bp, Artificial Sequence
  Description of Artificial Sequence: Synthetic oligonucleotide
  Target: LAMA2; (-) strand; PAM type: NRG; PAM sequence: GAG
agtatattttatataattta

SEQ ID NO: 84045 - DNA, 20 bp, Artificial Sequence
  Description of Artificial Sequence: Synthetic oligonucleotide
  Target: LAMA2; (-) strand; PAM type: NRG; PAM sequence: TAG
agagtatattttatataatt

SEQ ID NO: 84046 - DNA, 20 bp, Artificial Sequence
  Description of Artificial Sequence: Synthetic oligonucleotide
  Target: LAMA2; (-) strand; PAM type: NRG; PAM sequence: GAG
tctttctttactacattata

SEQ ID NO: 84047 - DNA, 20 bp, Artificial Sequence
  Description of Artificial Sequence: Synthetic oligonucleotide
  Target: LAMA2; (-) strand; PAM type: NRG; PAM sequence: TAG
aatctttctttactacatta

SEQ ID NO: 84048 - DNA, 20 bp, Artificial Sequence
  Description of Artificial Sequence: Synthetic oligonucleotide
  Target: LAMA2; (-) strand; PAM type: NRG; PAM sequence: AAG
aaatgtgagacattggcata

SEQ ID NO: 84049 - DNA, 20 bp, Artificial Sequence
  Description of Artificial Sequence: Synthetic oligonucleotide
  Target: LAMA2; (-) strand; PAM type: NRG; PAM sequence: TGG
gtctataaaatgtgagacat

SEQ ID NO: 84050 - DNA, 20 bp, Artificial Sequence
  Description of Artificial Sequence: Synthetic oligonucleotide
  Target: LAMA2; (-) strand; PAM type: NRG; PAM sequence: GAG
gtaaaatgtctataaaatgt

SEQ ID NO: 84051 - DNA, 20 bp, Artificial Sequence
  Description of Artificial Sequence: Synthetic oligonucleotide
  Target: LAMA2; (-) strand; PAM type: NRG; PAM sequence: AGG
taacttaagttgacagtagc

SEQ ID NO: 84052 - DNA, 20 bp, Artificial Sequence
  Description of Artificial Sequence: Synthetic oligonucleotide
  Target: LAMA2; (-) strand; PAM type: NRG; PAM sequence: CAG
gtaacttaagttgacagtag

SEQ ID NO: 84053 - DNA, 20 bp, Artificial Sequence
  Description of Artificial Sequence: Synthetic oligonucleotide
  Target: LAMA2; (-) strand; PAM type: NRG; PAM sequence: TAG
tgagtaacttaagttgacag

SEQ ID NO: 84054 - DNA, 20 bp, Artificial Sequence
  Description of Artificial Sequence: Synthetic oligonucleotide
  Target: LAMA2; (-) strand; PAM type: NRG; PAM sequence: CAG
acttgagtaacttaagttga

SEQ ID NO: 84055 - DNA, 20 bp, Artificial Sequence
  Description of Artificial Sequence: Synthetic oligonucleotide
  Target: LAMA2; (-) strand; PAM type: NRG; PAM sequence: AAG
gaactatacttgagtaactt

SEQ ID NO: 84056 - DNA, 20 bp, Artificial Sequence
  Description of Artificial Sequence: Synthetic oligonucleotide
  Target: LAMA2; (-) strand; PAM type: NRG; PAM sequence: GAG
aaatcaacagaactatactt

SEQ ID NO: 84057 - DNA, 20 bp, Artificial Sequence
  Description of Artificial Sequence: Synthetic oligonucleotide
  Target: LAMA2; (-) strand; PAM type: NRG; PAM sequence: CAG
ttcattaggagataaatcaa

SEQ ID NO: 84058 - DNA, 20 bp, Artificial Sequence
  Description of Artificial Sequence: Synthetic oligonucleotide
  Target: LAMA2; (-) strand; PAM type: NRG; PAM sequence: GAG
cattagcggttgttcattag

SEQ ID NO: 84059 - DNA, 20 bp, Artificial Sequence
  Description of Artificial Sequence: Synthetic oligonucleotide
  Target: LAMA2; (-) strand; PAM type: NRG; PAM sequence: AGG
gtcattagcggttgttcatt

SEQ ID NO: 84060 - DNA, 20 bp, Artificial Sequence
  Description of Artificial Sequence: Synthetic oligonucleotide
  Target: LAMA2; (-) strand; PAM type: NRG; PAM sequence: TAG
agtcattagcggttgttcat

SEQ ID NO: 84061 - DNA, 20 bp, Artificial Sequence
  Description of Artificial Sequence: Synthetic oligonucleotide
  Target: LAMA2; (-) strand; PAM type: NRG; PAM sequence: CGG
aggaattggtaagtcattag

SEQ ID NO: 84062 - DNA, 20 bp, Artificial Sequence
  Description of Artificial Sequence: Synthetic oligonucleotide
  Target: LAMA2; (-) strand; PAM type: NRG; PAM sequence: TAG
cttaggaattggtaagtcat

SEQ ID NO: 84063 - DNA, 20 bp, Artificial Sequence
  Description of Artificial Sequence: Synthetic oligonucleotide
  Target: LAMA2; (-) strand; PAM type: NRG; PAM sequence: AAG
gatattccttaggaattggt

SEQ ID NO: 84064 - DNA, 20 bp, Artificial Sequence
  Description of Artificial Sequence: Synthetic oligonucleotide
  Target: LAMA2; (-) strand; PAM type: NRG; PAM sequence: TGG
aagagatattccttaggaat

SEQ ID NO: 84065 - DNA, 20 bp, Artificial Sequence
  Description of Artificial Sequence: Synthetic oligonucleotide
  Target: LAMA2; (-) strand; PAM type: NRG; PAM sequence: AGG
catcctaagagatattcctt

SEQ ID NO: 84066 - DNA, 20 bp, Artificial Sequence
  Description of Artificial Sequence: Synthetic oligonucleotide
  Target: LAMA2; (-) strand; PAM type: NRG; PAM sequence: TAG
ccatcctaagagatattcct

SEQ ID NO: 84067 - DNA, 20 bp, Artificial Sequence
  Description of Artificial Sequence: Synthetic oligonucleotide
  Target: LAMA2; (-) strand; PAM type: NRG; PAM sequence: GAG
cctcagaaagtccatcctaa

SEQ ID NO: 84068 - DNA, 20 bp, Artificial Sequence
  Description of Artificial Sequence: Synthetic oligonucleotide
  Target: LAMA2; (-) strand; PAM type: NRG; PAM sequence: AAG
gccctcagaaagtccatcct

SEQ ID NO: 84069 - DNA, 20 bp, Artificial Sequence
  Description of Artificial Sequence: Synthetic oligonucleotide
  Target: LAMA2; (-) strand; PAM type: NRG; PAM sequence: AAG
tccagggccctgccctcaga

SEQ ID NO: 84070 - DNA, 20 bp, Artificial Sequence
  Description of Artificial Sequence: Synthetic oligonucleotide
  Target: LAMA2; (-) strand; PAM type: NRG; PAM sequence: CAG
gagatccagggccctgccct

SEQ ID NO: 84071 - DNA, 20 bp, Artificial Sequence
  Description of Artificial Sequence: Synthetic oligonucleotide
  Target: LAMA2; (-) strand; PAM type: NRG; PAM sequence: GGG
cacttggtacttgagatcca

SEQ ID NO: 84072 - DNA, 20 bp, Artificial Sequence
  Description of Artificial Sequence: Synthetic oligonucleotide
  Target: LAMA2; (-) strand; PAM type: NRG; PAM sequence: AGG
tcacttggtacttgagatcc

SEQ ID NO: 84073 - DNA, 20 bp, Artificial Sequence
  Description of Artificial Sequence: Synthetic oligonucleotide
  Target: LAMA2; (-) strand; PAM type: NRG; PAM sequence: CAG
ttcacttggtacttgagatc

SEQ ID NO: 84074 - DNA, 20 bp, Artificial Sequence
  Description of Artificial Sequence: Synthetic oligonucleotide
  Target: LAMA2; (-) strand; PAM type: NRG; PAM sequence: GAG
tagaacttcacttggtactt

SEQ ID NO: 84075 - DNA, 20 bp, Artificial Sequence
  Description of Artificial Sequence: Synthetic oligonucleotide
  Target: LAMA2; (-) strand; PAM type: NRG; PAM sequence: TGG
ctgtatgctagaacttcact

SEQ ID NO: 84076 - DNA, 20 bp, Artificial Sequence
  Description of Artificial Sequence: Synthetic oligonucleotide
  Target: LAMA2; (-) strand; PAM type: NRG; PAM sequence: TAG
atttaatacttcctgtatgc

SEQ ID NO: 84077 - DNA, 20 bp, Artificial Sequence
  Description of Artificial Sequence: Synthetic oligonucleotide
  Target: LAMA2; (-) strand; PAM type: NRG; PAM sequence: CAG
cattttggataagggatact

SEQ ID NO: 84078 - DNA, 20 bp, Artificial Sequence
  Description of Artificial Sequence: Synthetic oligonucleotide
  Target: LAMA2; (-) strand; PAM type: NRG; PAM sequence: GGG
gtctcaagcattttggataa

SEQ ID NO: 84079 - DNA, 20 bp, Artificial Sequence
  Description of Artificial Sequence: Synthetic oligonucleotide
  Target: LAMA2; (-) strand; PAM type: NRG; PAM sequence: AGG
ggtctcaagcattttggata

SEQ ID NO: 84080 - DNA, 20 bp, Artificial Sequence
  Description of Artificial Sequence: Synthetic oligonucleotide
  Target: LAMA2; (-) strand; PAM type: NRG; PAM sequence: AAG
tggtctcaagcattttggat

SEQ ID NO: 84081 - DNA, 20 bp, Artificial Sequence
  Description of Artificial Sequence: Synthetic oligonucleotide
  Target: LAMA2; (-) strand; PAM type: NRG; PAM sequence: TGG
atttctggtctcaagcattt

SEQ ID NO: 84082 - DNA, 20 bp, Artificial Sequence
  Description of Artificial Sequence: Synthetic oligonucleotide
  Target: LAMA2; (-) strand; PAM type: NRG; PAM sequence: AAG
tcggaaacatttctggtctc

SEQ ID NO: 84083 - DNA, 20 bp, Artificial Sequence
  Description of Artificial Sequence: Synthetic oligonucleotide
  Target: LAMA2; (-) strand; PAM type: NRG; PAM sequence: TGG
taccaaatcggaaacatttc

SEQ ID NO: 84084 - DNA, 20 bp, Artificial Sequence
  Description of Artificial Sequence: Synthetic oligonucleotide
  Target: LAMA2; (-) strand; PAM type: NRG; PAM sequence: CGG
aatccgaaaaaataccaaat

SEQ ID NO: 84085 - DNA, 20 bp, Artificial Sequence
  Description of Artificial Sequence: Synthetic oligonucleotide
  Target: LAMA2; (-) strand; PAM type: NRG; PAM sequence: CAG
tctgattaggaatgatcagc

SEQ ID NO: 84086 - DNA, 20 bp, Artificial Sequence
  Description of Artificial Sequence: Synthetic oligonucleotide
  Target: LAMA2; (-) strand; PAM type: NRG; PAM sequence: CAG
attttctgattaggaatgat

SEQ ID NO: 84087 - DNA, 20 bp, Artificial Sequence
  Description of Artificial Sequence: Synthetic oligonucleotide
  Target: LAMA2; (-) strand; PAM type: NRG; PAM sequence: AGG
agattttggattttctgatt

SEQ ID NO: 84088 - DNA, 20 bp, Artificial Sequence
  Description of Artificial Sequence: Synthetic oligonucleotide
  Target: LAMA2; (-) strand; PAM type: NRG; PAM sequence: TAG
cagattttggattttctgat

SEQ ID NO: 84089 - DNA, 20 bp, Artificial Sequence
  Description of Artificial Sequence: Synthetic oligonucleotide
  Target: LAMA2; (-) strand; PAM type: NRG; PAM sequence: TGG
cactagagcatttcagattt

SEQ ID NO: 84090 - DNA, 20 bp, Artificial Sequence
  Description of Artificial Sequence: Synthetic oligonucleotide
  Target: LAMA2; (-) strand; PAM type: NRG; PAM sequence: CAG
gaatgttcactagagcattt

SEQ ID NO: 84091 - DNA, 20 bp, Artificial Sequence
  Description of Artificial Sequence: Synthetic oligonucleotide
  Target: LAMA2; (-) strand; PAM type: NRG; PAM sequence: GAG
ctcaaatggaatgttcacta

SEQ ID NO: 84092 - DNA, 20 bp, Artificial Sequence
  Description of Artificial Sequence: Synthetic oligonucleotide
  Target: LAMA2; (-) strand; PAM type: NRG; PAM sequence: TAG
tgctcaaatggaatgttcac

SEQ ID NO: 84093 - DNA, 20 bp, Artificial Sequence
  Description of Artificial Sequence: Synthetic oligonucleotide
  Target: LAMA2; (-) strand; PAM type: NRG; PAM sequence: TGG
gcacctatatgatgctcaaa

SEQ ID NO: 84094 - DNA, 20 bp, Artificial Sequence
  Description of Artificial Sequence: Synthetic oligonucleotide
  Target: LAMA2; (-) strand; PAM type: NRG; PAM sequence: GGG
ttcaaaatttgaaactttgg

SEQ ID NO: 84095 - DNA, 20 bp, Artificial Sequence
  Description of Artificial Sequence: Synthetic oligonucleotide
  Target: LAMA2; (-) strand; PAM type: NRG; PAM sequence: GGG
tttcaaaatttgaaactttg

SEQ ID NO: 84096 - DNA, 20 bp, Artificial Sequence
  Description of Artificial Sequence: Synthetic oligonucleotide
  Target: LAMA2; (-) strand; PAM type: NRG; PAM sequence: GGG
gtttcaaaatttgaaacttt

SEQ ID NO: 84097 - DNA, 20 bp, Artificial Sequence
  Description of Artificial Sequence: Synthetic oligonucleotide
  Target: LAMA2; (-) strand; PAM type: NRG; PAM sequence: TGG
tgtttcaaaatttgaaactt

SEQ ID NO: 84098 - DNA, 20 bp, Artificial Sequence
  Description of Artificial Sequence: Synthetic oligonucleotide
  Target: LAMA2; (-) strand; PAM type: NRG; PAM sequence: CAG
gcaggttgagcatccctaat

SEQ ID NO: 84099 - DNA, 20 bp, Artificial Sequence
  Description of Artificial Sequence: Synthetic oligonucleotide
  Target: LAMA2; (-) strand; PAM type: NRG; PAM sequence: GAG
tcaagacaaatgtgcaggtt

SEQ ID NO: 84100 - DNA, 20 bp, Artificial Sequence
  Description of Artificial Sequence: Synthetic oligonucleotide
  Target: LAMA2; (-) strand; PAM type: NRG; PAM sequence: AGG
atttttcaagacaaatgtgc

SEQ ID NO: 84101 - DNA, 20 bp, Artificial Sequence
  Description of Artificial Sequence: Synthetic oligonucleotide
  Target: LAMA2; (-) strand; PAM type: NRG; PAM sequence: CAG
tatttttcaagacaaatgtg

SEQ ID NO: 84102 - DNA, 20 bp, Artificial Sequence
  Description of Artificial Sequence: Synthetic oligonucleotide
  Target: LAMA2; (-) strand; PAM type: NRG; PAM sequence: AAG
ttattcattatttatttttc

SEQ ID NO: 84103 - DNA, 20 bp, Artificial Sequence
  Description of Artificial Sequence: Synthetic oligonucleotide
  Target: LAMA2; (-) strand; PAM type: NRG; PAM sequence: AGG
gaattcattttaaaagttgg

SEQ ID NO: 84104 - DNA, 20 bp, Artificial Sequence
  Description of Artificial Sequence: Synthetic oligonucleotide
  Target: LAMA2; (-) strand; PAM type: NRG; PAM sequence: GAG
agaattcattttaaaagttg

SEQ ID NO: 84105 - DNA, 20 bp, Artificial Sequence
  Description of Artificial Sequence: Synthetic oligonucleotide
  Target: LAMA2; (-) strand; PAM type: NRG; PAM sequence: TGG
caagaattcattttaaaagt

SEQ ID NO: 84106 - DNA, 20 bp, Artificial Sequence
  Description of Artificial Sequence: Synthetic oligonucleotide
  Target: LAMA2; (-) strand; PAM type: NRG; PAM sequence: AAG
ggaacaagaattcattttaa

SEQ ID NO: 84107 - DNA, 20 bp, Artificial Sequence
  Description of Artificial Sequence: Synthetic oligonucleotide
  Target: LAMA2; (-) strand; PAM type: NRG; PAM sequence: AAG
ttagcaaagacattgggaac

SEQ ID NO: 84108 - DNA, 20 bp, Artificial Sequence
  Description of Artificial Sequence: Synthetic oligonucleotide
  Target: LAMA2; (-) strand; PAM type: NRG; PAM sequence: GGG
ccgatgttagcaaagacatt

SEQ ID NO: 84109 - DNA, 20 bp, Artificial Sequence
  Description of Artificial Sequence: Synthetic oligonucleotide
  Target: LAMA2; (-) strand; PAM type: NRG; PAM sequence: TGG
accgatgttagcaaagacat

SEQ ID NO: 84110 - DNA, 20 bp, Artificial Sequence
  Description of Artificial Sequence: Synthetic oligonucleotide
  Target: LAMA2; (-) strand; PAM type: NRG; PAM sequence: AAG
atgagagaccgatgttagca

SEQ ID NO: 84111 - DNA, 20 bp, Artificial Sequence
  Description of Artificial Sequence: Synthetic oligonucleotide
  Target: LAMA2; (-) strand; PAM type: NRG; PAM sequence: TAG
atagaatgagagaccgatgt

SEQ ID NO: 84112 - DNA, 20 bp, Artificial Sequence
  Description of Artificial Sequence: Synthetic oligonucleotide
  Target: LAMA2; (-) strand; PAM type: NRG; PAM sequence: GAG
tgtggacatagatagaatga

SEQ ID NO: 84113 - DNA, 20 bp, Artificial Sequence
  Description of Artificial Sequence: Synthetic oligonucleotide
  Target: LAMA2; (-) strand; PAM type: NRG; PAM sequence: GAG
cttgtggacatagatagaat

SEQ ID NO: 84114 - DNA, 20 bp, Artificial Sequence
  Description of Artificial Sequence: Synthetic oligonucleotide
  Target: LAMA2; (-) strand; PAM type: NRG; PAM sequence: TAG
attcaacttgtggacataga

SEQ ID NO: 84115 - DNA, 20 bp, Artificial Sequence
  Description of Artificial Sequence: Synthetic oligonucleotide
  Target: LAMA2; (-) strand; PAM type: NRG; PAM sequence: TAG
aaaaattcaacttgtggaca

SEQ ID NO: 84116 - DNA, 20 bp, Artificial Sequence
  Description of Artificial Sequence: Synthetic oligonucleotide
  Target: LAMA2; (-) strand; PAM type: NRG; PAM sequence: TGG
tggtttaaaaattcaacttg

SEQ ID NO: 84117 - DNA, 20 bp, Artificial Sequence
  Description of Artificial Sequence: Synthetic oligonucleotide
  Target: LAMA2; (-) strand; PAM type: NRG; PAM sequence: TGG
ttgacctgatccttgaagca

SEQ ID NO: 84118 - DNA, 20 bp, Artificial Sequence
  Description of Artificial Sequence: Synthetic oligonucleotide
  Target: LAMA2; (-) strand; PAM type: NRG; PAM sequence: AAG
ggagtttgacctgatccttg

SEQ ID NO: 84119 - DNA, 20 bp, Artificial Sequence
  Description of Artificial Sequence: Synthetic oligonucleotide
  Target: LAMA2; (-) strand; PAM type: NRG; PAM sequence: GAG
gaagctttatgacaggagtg

SEQ ID NO: 84120 - DNA, 20 bp, Artificial Sequence
  Description of Artificial Sequence: Synthetic oligonucleotide
  Target: LAMA2; (-) strand; PAM type: NRG; PAM sequence: TGG
aggaagctttatgacaggag

SEQ ID NO: 84121 - DNA, 20 bp, Artificial Sequence
  Description of Artificial Sequence: Synthetic oligonucleotide
  Target: LAMA2; (-) strand; PAM type: NRG; PAM sequence: GAG
ttaaggaagctttatgacag

SEQ ID NO: 84122 - DNA, 20 bp, Artificial Sequence
  Description of Artificial Sequence: Synthetic oligonucleotide
  Target: LAMA2; (-) strand; PAM type: NRG; PAM sequence: AGG
gcttaaggaagctttatgac

SEQ ID NO: 84123 - DNA, 20 bp, Artificial Sequence
  Description of Artificial Sequence: Synthetic oligonucleotide
  Target: LAMA2; (-) strand; PAM type: NRG; PAM sequence: CAG
ggcttaaggaagctttatga

SEQ ID NO: 84124 - DNA, 20 bp, Artificial Sequence
  Description of Artificial Sequence: Synthetic oligonucleotide
  Target: LAMA2; (-) strand; PAM type: NRG; PAM sequence: AAG
ttttgctataaggcttaagg

SEQ ID NO: 84125 - DNA, 20 bp, Artificial Sequence
  Description of Artificial Sequence: Synthetic oligonucleotide
  Target: LAMA2; (-) strand; PAM type: NRG; PAM sequence: AGG
aatttttgctataaggctta

SEQ ID NO: 84126 - DNA, 20 bp, Artificial Sequence
  Description of Artificial Sequence: Synthetic oligonucleotide
  Target: LAMA2; (-) strand; PAM type: NRG; PAM sequence: AAG
taatttttgctataaggctt

SEQ ID NO: 84127 - DNA, 20 bp, Artificial Sequence
  Description of Artificial Sequence: Synthetic oligonucleotide
  Target: LAMA2; (-) strand; PAM type: NRG; PAM sequence: AGG
aagcactaatttttgctata

SEQ ID NO: 84128 - DNA, 20 bp, Artificial Sequence
  Description of Artificial Sequence: Synthetic oligonucleotide
  Target: LAMA2; (-) strand; PAM type: NRG; PAM sequence: AAG
gaagcactaatttttgctat

SEQ ID NO: 84129 - DNA, 20 bp, Artificial Sequence
  Description of Artificial Sequence: Synthetic oligonucleotide
  Target: LAMA2; (-) strand; PAM type: NRG; PAM sequence: AAG
taattacgggaacatagagg

SEQ ID NO: 84130 - DNA, 20 bp, Artificial Sequence
  Description of Artificial Sequence: Synthetic oligonucleotide
  Target: LAMA2; (-) strand; PAM type: NRG; PAM sequence: AGG
aaataattacgggaacatag

SEQ ID NO: 84131 - DNA, 20 bp, Artificial Sequence
  Description of Artificial Sequence: Synthetic oligonucleotide
  Target: LAMA2; (-) strand; PAM type: NRG; PAM sequence: GAG
taaataattacgggaacata

SEQ ID NO: 84132 - DNA, 20 bp, Artificial Sequence
  Description of Artificial Sequence: Synthetic oligonucleotide
  Target: LAMA2; (-) strand; PAM type: NRG; PAM sequence: TAG
aataaataattacgggaaca

SEQ ID NO: 84133 - DNA, 20 bp, Artificial Sequence
  Description of Artificial Sequence: Synthetic oligonucleotide
  Target: LAMA2; (-) strand; PAM type: NRG; PAM sequence: GGG
tctgagaaataaataattac

SEQ ID NO: 84134 - DNA, 20 bp, Artificial Sequence
  Description of Artificial Sequence: Synthetic oligonucleotide
  Target: LAMA2; (-) strand; PAM type: NRG; PAM sequence: CGG
atctgagaaataaataatta

SEQ ID NO: 84135 - DNA, 20 bp, Artificial Sequence
  Description of Artificial Sequence: Synthetic oligonucleotide
  Target: LAMA2; (-) strand; PAM type: NRG; PAM sequence: GAG
ggaatatggtaagtgcatct

SEQ ID NO: 84136 - DNA, 20 bp, Artificial Sequence
  Description of Artificial Sequence: Synthetic oligonucleotide
  Target: LAMA2; (-) strand; PAM type: NRG; PAM sequence: AAG
aatgcaaggtggaatatggt

SEQ ID NO: 84137 - DNA, 20 bp, Artificial Sequence
  Description of Artificial Sequence: Synthetic oligonucleotide
  Target: LAMA2; (-) strand; PAM type: NRG; PAM sequence: TGG
ctataatgcaaggtggaata

SEQ ID NO: 84138 - DNA, 20 bp, Artificial Sequence
  Description of Artificial Sequence: Synthetic oligonucleotide
  Target: LAMA2; (-) strand; PAM type: NRG; PAM sequence: TGG
caatcaactataatgcaagg

SEQ ID NO: 84139 - DNA, 20 bp, Artificial Sequence
  Description of Artificial Sequence: Synthetic oligonucleotide
  Target: LAMA2; (-) strand; PAM type: NRG; PAM sequence: AGG
tcacaatcaactataatgca

SEQ ID NO: 84140 - DNA, 20 bp, Artificial Sequence
  Description of Artificial Sequence: Synthetic oligonucleotide
  Target: LAMA2; (-) strand; PAM type: NRG; PAM sequence: AAG
ctcacaatcaactataatgc

SEQ ID NO: 84141 - DNA, 20 bp, Artificial Sequence
  Description of Artificial Sequence: Synthetic oligonucleotide
  Target: LAMA2; (-) strand; PAM type: NRG; PAM sequence: AAG
ccaatatctagttgggtaaa

SEQ ID NO: 84142 - DNA, 20 bp, Artificial Sequence
  Description of Artificial Sequence: Synthetic oligonucleotide
  Target: LAMA2; (-) strand; PAM type: NRG; PAM sequence: GGG
ttaaaggccaatatctagtt

SEQ ID NO: 84143 - DNA, 20 bp, Artificial Sequence
  Description of Artificial Sequence: Synthetic oligonucleotide
  Target: LAMA2; (-) strand; PAM type: NRG; PAM sequence: TGG
tttaaaggccaatatctagt

SEQ ID NO: 84144 - DNA, 20 bp, Artificial Sequence
  Description of Artificial Sequence: Synthetic oligonucleotide
  Target: LAMA2; (-) strand; PAM type: NRG; PAM sequence: TAG
tgtctttaaaggccaatatc

SEQ ID NO: 84145 - DNA, 20 bp, Artificial Sequence
  Description of Artificial Sequence: Synthetic oligonucleotide
  Target: LAMA2; (-) strand; PAM type: NRG; PAM sequence: AGG
ttaaataagtctgtctttaa

SEQ ID NO: 84146 - DNA, 20 bp, Artificial Sequence
  Description of Artificial Sequence: Synthetic oligonucleotide
  Target: LAMA2; (-) strand; PAM type: NRG; PAM sequence: AAG
tttaaataagtctgtcttta

SEQ ID NO: 84147 - DNA, 20 bp, Artificial Sequence
  Description of Artificial Sequence: Synthetic oligonucleotide
  Target: LAMA2; (-) strand; PAM type: NRG; PAM sequence: AAG
gtcaaggtctgtctttaaat

SEQ ID NO: 84148 - DNA, 20 bp, Artificial Sequence
  Description of Artificial Sequence: Synthetic oligonucleotide
  Target: LAMA2; (-) strand; PAM type: NRG; PAM sequence: AGG
ctatgaagataaataagtca

SEQ ID NO: 84149 - DNA, 20 bp, Artificial Sequence
  Description of Artificial Sequence: Synthetic oligonucleotide
  Target: LAMA2; (-) strand; PAM type: NRG; PAM sequence: AAG
actatgaagataaataagtc

SEQ ID NO: 84150 - DNA, 20 bp, Artificial Sequence
  Description of Artificial Sequence: Synthetic oligonucleotide
  Target: LAMA2; (-) strand; PAM type: NRG; PAM sequence: AAG
taggcactatgaagataaat

SEQ ID NO: 84151 - DNA, 20 bp, Artificial Sequence
  Description of Artificial Sequence: Synthetic oligonucleotide
  Target: LAMA2; (-) strand; PAM type: NRG; PAM sequence: AAG
taggaattctaggcactatg

SEQ ID NO: 84152 - DNA, 20 bp, Artificial Sequence
  Description of Artificial Sequence: Synthetic oligonucleotide
  Target: LAMA2; (-) strand; PAM type: NRG; PAM sequence: AGG
cacattagggtaggaattct

SEQ ID NO: 84153 - DNA, 20 bp, Artificial Sequence
  Description of Artificial Sequence: Synthetic oligonucleotide
  Target: LAMA2; (-) strand; PAM type: NRG; PAM sequence: TAG
acacattagggtaggaattc

SEQ ID NO: 84154 - DNA, 20 bp, Artificial Sequence
  Description of Artificial Sequence: Synthetic oligonucleotide
  Target: LAMA2; (-) strand; PAM type: NRG; PAM sequence: AGG
ctgaagcaacacattagggt

SEQ ID NO: 84155 - DNA, 20 bp, Artificial Sequence
  Description of Artificial Sequence: Synthetic oligonucleotide
  Target: LAMA2; (-) strand; PAM type: NRG; PAM sequence: TAG
cctgaagcaacacattaggg

SEQ ID NO: 84156 - DNA, 20 bp, Artificial Sequence
  Description of Artificial Sequence: Synthetic oligonucleotide
  Target: LAMA2; (-) strand; PAM type: NRG; PAM sequence: GGG
taacctgaagcaacacatta

SEQ ID NO: 84157 - DNA, 20 bp, Artificial Sequence
  Description of Artificial Sequence: Synthetic oligonucleotide
  Target: LAMA2; (-) strand; PAM type: NRG; PAM sequence: AGG
ataacctgaagcaacacatt

SEQ ID NO: 84158 - DNA, 20 bp, Artificial Sequence
  Description of Artificial Sequence: Synthetic oligonucleotide
  Target: LAMA2; (-) strand; PAM type: NRG; PAM sequence: TAG
aataacctgaagcaacacat

SEQ ID NO: 84159 - DNA, 20 bp, Artificial Sequence
  Description of Artificial Sequence: Synthetic oligonucleotide
  Target: LAMA2; (-) strand; PAM type: NRG; PAM sequence: AAG
caattttatttaataacctg

SEQ ID NO: 84160 - DNA, 20 bp, Artificial Sequence
  Description of Artificial Sequence: Synthetic oligonucleotide
  Target: LAMA2; (-) strand; PAM type: NRG; PAM sequence: TAG
tccttagctccattttagcc

SEQ ID NO: 84161 - DNA, 20 bp, Artificial Sequence
  Description of Artificial Sequence: Synthetic oligonucleotide
  Target: LAMA2; (-) strand; PAM type: NRG; PAM sequence: TAG
cattttccttagctccattt

SEQ ID NO: 84162 - DNA, 20 bp, Artificial Sequence
  Description of Artificial Sequence: Synthetic oligonucleotide
  Target: LAMA2; (-) strand; PAM type: NRG; PAM sequence: TAG
gacattagctacattttcct

SEQ ID NO: 84163 - DNA, 20 bp, Artificial Sequence
  Description of Artificial Sequence: Synthetic oligonucleotide
  Target: LAMA2; (-) strand; PAM type: NRG; PAM sequence: TAG
aattagaaatttgcagacat

SEQ ID NO: 84164 - DNA, 20 bp, Artificial Sequence
  Description of Artificial Sequence: Synthetic oligonucleotide
  Target: LAMA2; (-) strand; PAM type: NRG; PAM sequence: CAG
gttcaacaattagaaatttg

SEQ ID NO: 84165 - DNA, 20 bp, Artificial Sequence
  Description of Artificial Sequence: Synthetic oligonucleotide
  Target: LAMA2; (-) strand; PAM type: NRG; PAM sequence: TAG
ttcagactaagttcaacaat

SEQ ID NO: 84166 - DNA, 20 bp, Artificial Sequence
  Description of Artificial Sequence: Synthetic oligonucleotide
  Target: LAMA2; (-) strand; PAM type: NRG; PAM sequence: AAG
actattctgagattcagact

SEQ ID NO: 84167 - DNA, 20 bp, Artificial Sequence
  Description of Artificial Sequence: Synthetic oligonucleotide
  Target: LAMA2; (-) strand; PAM type: NRG; PAM sequence: CAG
aatgccactattctgagatt

SEQ ID NO: 84168 - DNA, 20 bp, Artificial Sequence
  Description of Artificial Sequence: Synthetic oligonucleotide
  Target: LAMA2; (-) strand; PAM type: NRG; PAM sequence: GAG
gcttataatgccactattct

SEQ ID NO: 84169 - DNA, 20 bp, Artificial Sequence
  Description of Artificial Sequence: Synthetic oligonucleotide
  Target: LAMA2; (-) strand; PAM type: NRG; PAM sequence: AAG
tttcatttactctaatttga

SEQ ID NO: 84170 - DNA, 20 bp, Artificial Sequence
  Description of Artificial Sequence: Synthetic oligonucleotide
  Target: LAMA2; (-) strand; PAM type: NRG; PAM sequence: TGG
atactgtgttcttatgcgct

SEQ ID NO: 84171 - DNA, 20 bp, Artificial Sequence
  Description of Artificial Sequence: Synthetic oligonucleotide
  Target: LAMA2; (-) strand; PAM type: NRG; PAM sequence: CAG
atcccgttgaggacacagta

SEQ ID NO: 84172 - DNA, 20 bp, Artificial Sequence
  Description of Artificial Sequence: Synthetic oligonucleotide
  Target: LAMA2; (-) strand; PAM type: NRG; PAM sequence: CAG
agtttatcccgttgaggaca

SEQ ID NO: 84173 - DNA, 20 bp, Artificial Sequence
  Description of Artificial Sequence: Synthetic oligonucleotide
  Target: LAMA2; (-) strand; PAM type: NRG; PAM sequence: AGG
tgatttagtttatcccgttg

SEQ ID NO: 84174 - DNA, 20 bp, Artificial Sequence
  Description of Artificial Sequence: Synthetic oligonucleotide
  Target: LAMA2; (-) strand; PAM type: NRG; PAM sequence: GAG
atgatttagtttatcccgtt

SEQ ID NO: 84175 - DNA, 20 bp, Artificial Sequence
  Description of Artificial Sequence: Synthetic oligonucleotide
  Target: LAMA2; (-) strand; PAM type: NRG; PAM sequence: TAG
acatatctgtaattatgatt

SEQ ID NO: 84176 - DNA, 20 bp, Artificial Sequence
  Description of Artificial Sequence: Synthetic oligonucleotide
  Target: LAMA2; (-) strand; PAM type: NRG; PAM sequence: AAG
aaaagagtataaaggcaaga

SEQ ID NO: 84177 - DNA, 20 bp, Artificial Sequence
  Description of Artificial Sequence: Synthetic oligonucleotide
  Target: LAMA2; (-) strand; PAM type: NRG; PAM sequence: AAG
cttcaaaagagtataaaggc

SEQ ID NO: 84178 - DNA, 20 bp, Artificial Sequence
  Description of Artificial Sequence: Synthetic oligonucleotide
  Target: LAMA2; (-) strand; PAM type: NRG; PAM sequence: AGG
gcatcttcaaaagagtataa

SEQ ID NO: 84179 - DNA, 20 bp, Artificial Sequence
  Description of Artificial Sequence: Synthetic oligonucleotide
  Target: LAMA2; (-) strand; PAM type: NRG; PAM sequence: AAG
agcatcttcaaaagagtata

SEQ ID NO: 84180 - DNA, 20 bp, Artificial Sequence
  Description of Artificial Sequence: Synthetic oligonucleotide
  Target: LAMA2; (-) strand; PAM type: NRG; PAM sequence: GAG
agttgagagcatcttcaaaa

SEQ ID NO: 84181 - DNA, 20 bp, Artificial Sequence
  Description of Artificial Sequence: Synthetic oligonucleotide
  Target: LAMA2; (-) strand; PAM type: NRG; PAM sequence: AAG
gaagttgagagcatcttcaa

SEQ ID NO: 84182 - DNA, 20 bp, Artificial Sequence
  Description of Artificial Sequence: Synthetic oligonucleotide
  Target: LAMA2; (-) strand; PAM type: NRG; PAM sequence: GAG
ccccaaagcactgaagttga

SEQ ID NO: 84183 - DNA, 20 bp, Artificial Sequence
  Description of Artificial Sequence: Synthetic oligonucleotide
  Target: LAMA2; (-) strand; PAM type: NRG; PAM sequence: GAG
atccccaaagcactgaagtt

SEQ ID NO: 84184 - DNA, 20 bp, Artificial Sequence
  Description of Artificial Sequence: Synthetic oligonucleotide
  Target: LAMA2; (-) strand; PAM type: NRG; PAM sequence: AAG
aataaatccccaaagcactg

SEQ ID NO: 84185 - DNA, 20 bp, Artificial Sequence
  Description of Artificial Sequence: Synthetic oligonucleotide
  Target: LAMA2; (-) strand; PAM type: NRG; PAM sequence: AAG
cagtgacaaataaatcccca

SEQ ID NO: 84186 - DNA, 20 bp, Artificial Sequence
  Description of Artificial Sequence: Synthetic oligonucleotide
  Target: LAMA2; (-) strand; PAM type: NRG; PAM sequence: CAG
tcaaactaatttcagactta

SEQ ID NO: 84187 - DNA, 20 bp, Artificial Sequence
  Description of Artificial Sequence: Synthetic oligonucleotide
  Target: LAMA2; (-) strand; PAM type: NRG; PAM sequence: CAG
aaaactaatcaaactaattt

SEQ ID NO: 84188 - DNA, 20 bp, Artificial Sequence
  Description of Artificial Sequence: Synthetic oligonucleotide
  Target: LAMA2; (-) strand; PAM type: NRG; PAM sequence: CAG
cattttgaaatgatagatat

SEQ ID NO: 84189 - DNA, 20 bp, Artificial Sequence
  Description of Artificial Sequence: Synthetic oligonucleotide
  Target: LAMA2; (-) strand; PAM type: NRG; PAM sequence: TAG
tttcagacattttgaaatga

SEQ ID NO: 84190 - DNA, 20 bp, Artificial Sequence
  Description of Artificial Sequence: Synthetic oligonucleotide
  Target: LAMA2; (-) strand; PAM type: NRG; PAM sequence: CAG
ttactttttaaggcagattt

SEQ ID NO: 84191 - DNA, 20 bp, Artificial Sequence
  Description of Artificial Sequence: Synthetic oligonucleotide
  Target: LAMA2; (-) strand; PAM type: NRG; PAM sequence: CAG
tgccagcttactttttaagg

SEQ ID NO: 84192 - DNA, 20 bp, Artificial Sequence
  Description of Artificial Sequence: Synthetic oligonucleotide
  Target: LAMA2; (-) strand; PAM type: NRG; PAM sequence: AGG
ttgtgccagcttacttttta

SEQ ID NO: 84193 - DNA, 20 bp, Artificial Sequence
  Description of Artificial Sequence: Synthetic oligonucleotide
  Target: LAMA2; (-) strand; PAM type: NRG; PAM sequence: AAG
tttgtgccagcttacttttt

SEQ ID NO: 84194 - DNA, 20 bp, Artificial Sequence
  Description of Artificial Sequence: Synthetic oligonucleotide
  Target: LAMA2; (-) strand; PAM type: NRG; PAM sequence: CAG
cactgccccaagatttgtgc

SEQ ID NO: 84195 - DNA, 20 bp, Artificial Sequence
  Description of Artificial Sequence: Synthetic oligonucleotide
  Target: LAMA2; (-) strand; PAM type: NRG; PAM sequence: AAG
accttaataagcactgcccc

SEQ ID NO: 84196 - DNA, 20 bp, Artificial Sequence
  Description of Artificial Sequence: Synthetic oligonucleotide
  Target: LAMA2; (-) strand; PAM type: NRG; PAM sequence: AAG
ttctatgtgggaaccttaat

SEQ ID NO: 84197 - DNA, 20 bp, Artificial Sequence
  Description of Artificial Sequence: Synthetic oligonucleotide
  Target: LAMA2; (-) strand; PAM type: NRG; PAM sequence: GGG
aaactcagccacttctatgt

SEQ ID NO: 84198 - DNA, 20 bp, Artificial Sequence
  Description of Artificial Sequence: Synthetic oligonucleotide
  Target: LAMA2; (-) strand; PAM type: NRG; PAM sequence: TGG
caaactcagccacttctatg

SEQ ID NO: 84199 - DNA, 20 bp, Artificial Sequence
  Description of Artificial Sequence: Synthetic oligonucleotide
  Target: LAMA2; (-) strand; PAM type: NRG; PAM sequence: CAG
ctatgactcatttacaaact

SEQ ID NO: 84200 - DNA, 20 bp, Artificial Sequence
  Description of Artificial Sequence: Synthetic oligonucleotide
  Target: LAMA2; (-) strand; PAM type: NRG; PAM sequence: GAG
gcagtcctccttatatccaa

SEQ ID NO: 84201 - DNA, 20 bp, Artificial Sequence
  Description of Artificial Sequence: Synthetic oligonucleotide
  Target: LAMA2; (-) strand; PAM type: NRG; PAM sequence: AAG
aagcagtcctccttatatcc

SEQ ID NO: 84202 - DNA, 20 bp, Artificial Sequence
  Description of Artificial Sequence: Synthetic oligonucleotide
  Target: LAMA2; (-) strand; PAM type: NRG; PAM sequence: CAG
aaatttaagaataaacaaag

SEQ ID NO: 84203 - DNA, 20 bp, Artificial Sequence
  Description of Artificial Sequence: Synthetic oligonucleotide
  Target: LAMA2; (-) strand; PAM type: NRG; PAM sequence: AAG
gaaaaatttaagaataaaca

SEQ ID NO: 84204 - DNA, 20 bp, Artificial Sequence
  Description of Artificial Sequence: Synthetic oligonucleotide
  Target: LAMA2; (-) strand; PAM type: NRG; PAM sequence: AAG
agaagtaaggagaaaaattt

SEQ ID NO: 84205 - DNA, 20 bp, Artificial Sequence
  Description of Artificial Sequence: Synthetic oligonucleotide
  Target: LAMA2; (-) strand; PAM type: NRG; PAM sequence: GAG
aaatagcatgaagaagtaag

SEQ ID NO: 84206 - DNA, 20 bp, Artificial Sequence
  Description of Artificial Sequence: Synthetic oligonucleotide
  Target: LAMA2; (-) strand; PAM type: NRG; PAM sequence: AGG
aaaaatagcatgaagaagta

SEQ ID NO: 84207 - DNA, 20 bp, Artificial Sequence
  Description of Artificial Sequence: Synthetic oligonucleotide
  Target: LAMA2; (-) strand; PAM type: NRG; PAM sequence: AAG
gaaaaatagcatgaagaagt

SEQ ID NO: 84208 - DNA, 20 bp, Artificial Sequence
  Description of Artificial Sequence: Synthetic oligonucleotide
  Target: LAMA2; (-) strand; PAM type: NRG; PAM sequence: AAG
aagagaaaaatagcatgaag

SEQ ID NO: 84209 - DNA, 20 bp, Artificial Sequence
  Description of Artificial Sequence: Synthetic oligonucleotide
  Target: LAMA2; (-) strand; PAM type: NRG; PAM sequence: AAG
gagaagagaaaaatagcatg

SEQ ID NO: 84210 - DNA, 20 bp, Artificial Sequence
  Description of Artificial Sequence: Synthetic oligonucleotide
  Target: LAMA2; (-) strand; PAM type: NRG; PAM sequence: TAG
atcagaagagaagagaaaaa

SEQ ID NO: 84211 - DNA, 20 bp, Artificial Sequence
  Description of Artificial Sequence: Synthetic oligonucleotide
  Target: LAMA2; (-) strand; PAM type: NRG; PAM sequence: GAG
taaggaaaatcagaagagaa

SEQ ID NO: 84212 - DNA, 20 bp, Artificial Sequence
  Description of Artificial Sequence: Synthetic oligonucleotide
  Target: LAMA2; (-) strand; PAM type: NRG; PAM sequence: AAG
tataaggaaaatcagaagag

SEQ ID NO: 84213 - DNA, 20 bp, Artificial Sequence
  Description of Artificial Sequence: Synthetic oligonucleotide
  Target: LAMA2; (-) strand; PAM type: NRG; PAM sequence: GAG
acatataaggaaaatcagaa

SEQ ID NO: 84214 - DNA, 20 bp, Artificial Sequence
  Description of Artificial Sequence: Synthetic oligonucleotide
  Target: LAMA2; (-) strand; PAM type: NRG; PAM sequence: AAG
gaacatataaggaaaatcag

SEQ ID NO: 84215 - DNA, 20 bp, Artificial Sequence
  Description of Artificial Sequence: Synthetic oligonucleotide
  Target: LAMA2; (-) strand; PAM type: NRG; PAM sequence: CAG
tgagaacatataaggaaaat

SEQ ID NO: 84216 - DNA, 20 bp, Artificial Sequence
  Description of Artificial Sequence: Synthetic oligonucleotide
  Target: LAMA2; (-) strand; PAM type: NRG; PAM sequence: AGG
ataaaatctgagaacatata

SEQ ID NO: 84217 - DNA, 20 bp, Artificial Sequence
  Description of Artificial Sequence: Synthetic oligonucleotide
  Target: LAMA2; (-) strand; PAM type: NRG; PAM sequence: AAG
gataaaatctgagaacatat

SEQ ID NO: 84218 - DNA, 20 bp, Artificial Sequence
  Description of Artificial Sequence: Synthetic oligonucleotide
  Target: LAMA2; (-) strand; PAM type: NRG; PAM sequence: GAG
agatagggatgataaaatct

SEQ ID NO: 84219 - DNA, 20 bp, Artificial Sequence
  Description of Artificial Sequence: Synthetic oligonucleotide
  Target: LAMA2; (-) strand; PAM type: NRG; PAM sequence: GGG
cccagattgagcagaagata

SEQ ID NO: 84220 - DNA, 20 bp, Artificial Sequence
  Description of Artificial Sequence: Synthetic oligonucleotide
  Target: LAMA2; (-) strand; PAM type: NRG; PAM sequence: AGG
acccagattgagcagaagat

SEQ ID NO: 84221 - DNA, 20 bp, Artificial Sequence
  Description of Artificial Sequence: Synthetic oligonucleotide
  Target: LAMA2; (-) strand; PAM type: NRG; PAM sequence: TAG
aacccagattgagcagaaga

SEQ ID NO: 84222 - DNA, 20 bp, Artificial Sequence
  Description of Artificial Sequence: Synthetic oligonucleotide
  Target: LAMA2; (-) strand; PAM type: NRG; PAM sequence: AAG
aacaaacccagattgagcag

SEQ ID NO: 84223 - DNA, 20 bp, Artificial Sequence
  Description of Artificial Sequence: Synthetic oligonucleotide
  Target: LAMA2; (-) strand; PAM type: NRG; PAM sequence: CAG
ttaaacaaacccagattgag

SEQ ID NO: 84224 - DNA, 20 bp, Artificial Sequence
  Description of Artificial Sequence: Synthetic oligonucleotide
  Target: LAMA2; (-) strand; PAM type: NRG; PAM sequence: GAG
actttaaacaaacccagatt

SEQ ID NO: 84225 - DNA, 20 bp, Artificial Sequence
  Description of Artificial Sequence: Synthetic oligonucleotide
  Target: LAMA2; (-) strand; PAM type: NRG; PAM sequence: CAG
aaaaacactttaaacaaacc

SEQ ID NO: 84226 - DNA, 20 bp, Artificial Sequence
  Description of Artificial Sequence: Synthetic oligonucleotide
  Target: LAMA2; (-) strand; PAM type: NRG; PAM sequence: GAG
aagtgctatacgcatagtac

SEQ ID NO: 84227 - DNA, 20 bp, Artificial Sequence
  Description of Artificial Sequence: Synthetic oligonucleotide
  Target: LAMA2; (-) strand; PAM type: NRG; PAM sequence: TAG
atagcaaagtgctatacgca

SEQ ID NO: 84228 - DNA, 20 bp, Artificial Sequence
  Description of Artificial Sequence: Synthetic oligonucleotide
  Target: LAMA2; (-) strand; PAM type: NRG; PAM sequence: AAG
catgtttttcatgcatagca

SEQ ID NO: 84229 - DNA, 20 bp, Artificial Sequence
  Description of Artificial Sequence: Synthetic oligonucleotide
  Target: LAMA2; (-) strand; PAM type: NRG; PAM sequence: TAG
gcagtcatgtttttcatgca

SEQ ID NO: 84230 - DNA, 20 bp, Artificial Sequence
  Description of Artificial Sequence: Synthetic oligonucleotide
  Target: LAMA2; (-) strand; PAM type: NRG; PAM sequence: CAG
agttcaaataaatctcttgg

SEQ ID NO: 84231 - DNA, 20 bp, Artificial Sequence
  Description of Artificial Sequence: Synthetic oligonucleotide
  Target: LAMA2; (-) strand; PAM type: NRG; PAM sequence: TGG
ttaagttcaaataaatctct

SEQ ID NO: 84232 - DNA, 20 bp, Artificial Sequence
  Description of Artificial Sequence: Synthetic oligonucleotide
  Target: LAMA2; (-) strand; PAM type: NRG; PAM sequence: AAG
ttagcttcataaaatttatt

SEQ ID NO: 84233 - DNA, 20 bp, Artificial Sequence
  Description of Artificial Sequence: Synthetic oligonucleotide
  Target: LAMA2; (-) strand; PAM type: NRG; PAM sequence: TAG
cctggtacagcactgagcat

SEQ ID NO: 84234 - DNA, 20 bp, Artificial Sequence
  Description of Artificial Sequence: Synthetic oligonucleotide
  Target: LAMA2; (-) strand; PAM type: NRG; PAM sequence: GAG
atggttcctggtacagcact

SEQ ID NO: 84235 - DNA, 20 bp, Artificial Sequence
  Description of Artificial Sequence: Synthetic oligonucleotide
  Target: LAMA2; (-) strand; PAM type: NRG; PAM sequence: CAG
aaataacatggttcctggta

SEQ ID NO: 84236 - DNA, 20 bp, Artificial Sequence
  Description of Artificial Sequence: Synthetic oligonucleotide
  Target: LAMA2; (-) strand; PAM type: NRG; PAM sequence: TGG
tgagaaaataacatggttcc

SEQ ID NO: 84237 - DNA, 20 bp, Artificial Sequence
  Description of Artificial Sequence: Synthetic oligonucleotide
  Target: LAMA2; (-) strand; PAM type: NRG; PAM sequence: TGG
tatagtctgagaaaataaca

SEQ ID NO: 84238 - DNA, 20 bp, Artificial Sequence
  Description of Artificial Sequence: Synthetic oligonucleotide
  Target: LAMA2; (-) strand; PAM type: NRG; PAM sequence: GAG
tcttactaactttatagtct

SEQ ID NO: 84239 - DNA, 20 bp, Artificial Sequence
  Description of Artificial Sequence: Synthetic oligonucleotide
  Target: LAMA2; (-) strand; PAM type: NRG; PAM sequence: TAG
attctgtcttactaacttta

SEQ ID NO: 84240 - DNA, 20 bp, Artificial Sequence
  Description of Artificial Sequence: Synthetic oligonucleotide
  Target: LAMA2; (-) strand; PAM type: NRG; PAM sequence: TAG
taccataatctattcagagg

SEQ ID NO: 84241 - DNA, 20 bp, Artificial Sequence
  Description of Artificial Sequence: Synthetic oligonucleotide
  Target: LAMA2; (-) strand; PAM type: NRG; PAM sequence: AGG
atctaccataatctattcag

SEQ ID NO: 84242 - DNA, 20 bp, Artificial Sequence
  Description of Artificial Sequence: Synthetic oligonucleotide
  Target: LAMA2; (-) strand; PAM type: NRG; PAM sequence: GAG
tatctaccataatctattca

SEQ ID NO: 84243 - DNA, 20 bp, Artificial Sequence
  Description of Artificial Sequence: Synthetic oligonucleotide
  Target: LAMA2; (-) strand; PAM type: NRG; PAM sequence: CAG
gctatctaccataatctatt

SEQ ID NO: 84244 - DNA, 20 bp, Artificial Sequence
  Description of Artificial Sequence: Synthetic oligonucleotide
  Target: LAMA2; (-) strand; PAM type: NRG; PAM sequence: TAG
tgctcaaagattgttctctc

SEQ ID NO: 84245 - DNA, 20 bp, Artificial Sequence
  Description of Artificial Sequence: Synthetic oligonucleotide
  Target: LAMA2; (-) strand; PAM type: NRG; PAM sequence: AAG
ccacaaaaaagtattgctca

SEQ ID NO: 84246 - DNA, 20 bp, Artificial Sequence
  Description of Artificial Sequence: Synthetic oligonucleotide
  Target: LAMA2; (-) strand; PAM type: NRG; PAM sequence: AAG
accctatcacaaccacaaaa

SEQ ID NO: 84247 - DNA, 20 bp, Artificial Sequence
  Description of Artificial Sequence: Synthetic oligonucleotide
  Target: LAMA2; (-) strand; PAM type: NRG; PAM sequence: TGG
ctctctccatgtagttttcg

SEQ ID NO: 84248 - DNA, 20 bp, Artificial Sequence
  Description of Artificial Sequence: Synthetic oligonucleotide
  Target: LAMA2; (-) strand; PAM type: NRG; PAM sequence: TAG
aactaacttctctctccatg

SEQ ID NO: 84249 - DNA, 20 bp, Artificial Sequence
  Description of Artificial Sequence: Synthetic oligonucleotide
  Target: LAMA2; (-) strand; PAM type: NRG; PAM sequence: TGG
ggctttttaaaaaattccct

SEQ ID NO: 84250 - DNA, 20 bp, Artificial Sequence
  Description of Artificial Sequence: Synthetic oligonucleotide
  Target: LAMA2; (-) strand; PAM type: NRG; PAM sequence: AGG
ttcccttattatcaatactg

SEQ ID NO: 84251 - DNA, 20 bp, Artificial Sequence
  Description of Artificial Sequence: Synthetic oligonucleotide
  Target: LAMA2; (-) strand; PAM type: NRG; PAM sequence: GAG
attcccttattatcaatact

SEQ ID NO: 84252 - DNA, 20 bp, Artificial Sequence
  Description of Artificial Sequence: Synthetic oligonucleotide
  Target: LAMA2; (-) strand; PAM type: NRG; PAM sequence: CAG
gcatcctgctttccaggaaa

SEQ ID NO: 84253 - DNA, 20 bp, Artificial Sequence
  Description of Artificial Sequence: Synthetic oligonucleotide
  Target: LAMA2; (-) strand; PAM type: NRG; PAM sequence: AGG
aggaaggcatcctgctttcc

SEQ ID NO: 84254 - DNA, 20 bp, Artificial Sequence
  Description of Artificial Sequence: Synthetic oligonucleotide
  Target: LAMA2; (-) strand; PAM type: NRG; PAM sequence: CAG
aaggaaggcatcctgctttc

SEQ ID NO: 84255 - DNA, 20 bp, Artificial Sequence
  Description of Artificial Sequence: Synthetic oligonucleotide
  Target: LAMA2; (-) strand; PAM type: NRG; PAM sequence: AGG
taactaataattctaaagga

SEQ ID NO: 84256 - DNA, 20 bp, Artificial Sequence
  Description of Artificial Sequence: Synthetic oligonucleotide
  Target: LAMA2; (-) strand; PAM type: NRG; PAM sequence: AAG
ttaactaataattctaaagg

SEQ ID NO: 84257 - DNA, 20 bp, Artificial Sequence
  Description of Artificial Sequence: Synthetic oligonucleotide
  Target: LAMA2; (-) strand; PAM type: NRG; PAM sequence: AGG
atcttaactaataattctaa

SEQ ID NO: 84258 - DNA, 20 bp, Artificial Sequence
  Description of Artificial Sequence: Synthetic oligonucleotide
  Target: LAMA2; (-) strand; PAM type: NRG; PAM sequence: AAG
aatcttaactaataattcta

SEQ ID NO: 84259 - DNA, 20 bp, Artificial Sequence
  Description of Artificial Sequence: Synthetic oligonucleotide
  Target: LAMA2; (-) strand; PAM type: NRG; PAM sequence: TGG
taatctctcaatttaaagag

SEQ ID NO: 84260 - DNA, 20 bp, Artificial Sequence
  Description of Artificial Sequence: Synthetic oligonucleotide
  Target: LAMA2; (-) strand; PAM type: NRG; PAM sequence: GAG
atataatctctcaatttaaa

SEQ ID NO: 84261 - DNA, 20 bp, Artificial Sequence
  Description of Artificial Sequence: Synthetic oligonucleotide
  Target: LAMA2; (-) strand; PAM type: NRG; PAM sequence: AAG
ggatataatctctcaattta

SEQ ID NO: 84262 - DNA, 20 bp, Artificial Sequence
  Description of Artificial Sequence: Synthetic oligonucleotide
  Target: LAMA2; (-) strand; PAM type: NRG; PAM sequence: AGG
catataatgaaaaacaggga

SEQ ID NO: 84263 - DNA, 20 bp, Artificial Sequence
  Description of Artificial Sequence: Synthetic oligonucleotide
  Target: LAMA2; (-) strand; PAM type: NRG; PAM sequence: AAG
ccatataatgaaaaacaggg

SEQ ID NO: 84264 - DNA, 20 bp, Artificial Sequence
  Description of Artificial Sequence: Synthetic oligonucleotide
  Target: LAMA2; (-) strand; PAM type: NRG; PAM sequence: GGG
tgaccatataatgaaaaaca

SEQ ID NO: 84265 - DNA, 20 bp, Artificial Sequence
  Description of Artificial Sequence: Synthetic oligonucleotide
  Target: LAMA2; (-) strand; PAM type: NRG; PAM sequence: AGG
ctgaccatataatgaaaaac

SEQ ID NO: 84266 - DNA, 20 bp, Artificial Sequence
  Description of Artificial Sequence: Synthetic oligonucleotide
  Target: LAMA2; (-) strand; PAM type: NRG; PAM sequence: CAG
gctgaccatataatgaaaaa

SEQ ID NO: 84267 - DNA, 20 bp, Artificial Sequence
  Description of Artificial Sequence: Synthetic oligonucleotide
  Target: LAMA2; (-) strand; PAM type: NRG; PAM sequence: AAG
atgtggactcaggccagtga

SEQ ID NO: 84268 - DNA, 20 bp, Artificial Sequence
  Description of Artificial Sequence: Synthetic oligonucleotide
  Target: LAMA2; (-) strand; PAM type: NRG; PAM sequence: CAG
cttaaaatgtggactcaggc

SEQ ID NO: 84269 - DNA, 20 bp, Artificial Sequence
  Description of Artificial Sequence: Synthetic oligonucleotide
  Target: LAMA2; (-) strand; PAM type: NRG; PAM sequence: AGG
tgagcttaaaatgtggactc

SEQ ID NO: 84270 - DNA, 20 bp, Artificial Sequence
  Description of Artificial Sequence: Synthetic oligonucleotide
  Target: LAMA2; (-) strand; PAM type: NRG; PAM sequence: CAG
ttgagcttaaaatgtggact

SEQ ID NO: 84271 - DNA, 20 bp, Artificial Sequence
  Description of Artificial Sequence: Synthetic oligonucleotide
  Target: LAMA2; (-) strand; PAM type: NRG; PAM sequence: TGG
atatagttgagcttaaaatg

SEQ ID NO: 84272 - DNA, 20 bp, Artificial Sequence
  Description of Artificial Sequence: Synthetic oligonucleotide
  Target: LAMA2; (-) strand; PAM type: NRG; PAM sequence: GAG
aaaattatttgtatatagtt

SEQ ID NO: 84273 - DNA, 20 bp, Artificial Sequence
  Description of Artificial Sequence: Synthetic oligonucleotide
  Target: LAMA2; (-) strand; PAM type: NRG; PAM sequence: TAG
actgaaaaattatttgtata

SEQ ID NO: 84274 - DNA, 20 bp, Artificial Sequence
  Description of Artificial Sequence: Synthetic oligonucleotide
  Target: LAMA2; (-) strand; PAM type: NRG; PAM sequence: CAG
ggtttcattaatcctactct

SEQ ID NO: 84275 - DNA, 20 bp, Artificial Sequence
  Description of Artificial Sequence: Synthetic oligonucleotide
  Target: LAMA2; (-) strand; PAM type: NRG; PAM sequence: TGG
tctgtgactgctctccagac

SEQ ID NO: 84276 - DNA, 20 bp, Artificial Sequence
  Description of Artificial Sequence: Synthetic oligonucleotide
  Target: LAMA2; (-) strand; PAM type: NRG; PAM sequence: CAG
ctcattctgtgactgctctc

SEQ ID NO: 84277 - DNA, 20 bp, Artificial Sequence
  Description of Artificial Sequence: Synthetic oligonucleotide
  Target: LAMA2; (-) strand; PAM type: NRG; PAM sequence: AAG
cacatagtgatactatggga

SEQ ID NO: 84278 - DNA, 20 bp, Artificial Sequence
  Description of Artificial Sequence: Synthetic oligonucleotide
  Target: LAMA2; (-) strand; PAM type: NRG; PAM sequence: GGG
tagtcacatagtgatactat

SEQ ID NO: 84279 - DNA, 20 bp, Artificial Sequence
  Description of Artificial Sequence: Synthetic oligonucleotide
  Target: LAMA2; (-) strand; PAM type: NRG; PAM sequence: TGG
ttagtcacatagtgatacta

SEQ ID NO: 84280 - DNA, 20 bp, Artificial Sequence
  Description of Artificial Sequence: Synthetic oligonucleotide
  Target: LAMA2; (-) strand; PAM type: NRG; PAM sequence: TAG
agtacaatcagttagtcaca

SEQ ID NO: 84281 - DNA, 20 bp, Artificial Sequence
  Description of Artificial Sequence: Synthetic oligonucleotide
  Target: LAMA2; (-) strand; PAM type: NRG; PAM sequence: TAG
aacacatcagtacaatcagt

SEQ ID NO: 84282 - DNA, 20 bp, Artificial Sequence
  Description of Artificial Sequence: Synthetic oligonucleotide
  Target: LAMA2; (-) strand; PAM type: NRG; PAM sequence: CAG
ctgtaacacatcagtacaat

SEQ ID NO: 84283 - DNA, 20 bp, Artificial Sequence
  Description of Artificial Sequence: Synthetic oligonucleotide
  Target: LAMA2; (-) strand; PAM type: NRG; PAM sequence: CAG
cagtgttttctgtaacacat

SEQ ID NO: 84284 - DNA, 20 bp, Artificial Sequence
  Description of Artificial Sequence: Synthetic oligonucleotide
  Target: LAMA2; (-) strand; PAM type: NRG; PAM sequence: CAG
ttcctctggttaacttttta

SEQ ID NO: 84285 - DNA, 20 bp, Artificial Sequence
  Description of Artificial Sequence: Synthetic oligonucleotide
  Target: LAMA2; (-) strand; PAM type: NRG; PAM sequence: TGG
tagaaagcaaagttttcctc

SEQ ID NO: 84286 - DNA, 20 bp, Artificial Sequence
  Description of Artificial Sequence: Synthetic oligonucleotide
  Target: LAMA2; (-) strand; PAM type: NRG; PAM sequence: AAG
atcagataaagtagaaagca

SEQ ID NO: 84287 - DNA, 20 bp, Artificial Sequence
  Description of Artificial Sequence: Synthetic oligonucleotide
  Target: LAMA2; (-) strand; PAM type: NRG; PAM sequence: AAG
taaagatcagataaagtaga

SEQ ID NO: 84288 - DNA, 20 bp, Artificial Sequence
  Description of Artificial Sequence: Synthetic oligonucleotide
  Target: LAMA2; (-) strand; PAM type: NRG; PAM sequence: TAG
ggggtaaagatcagataaag

SEQ ID NO: 84289 - DNA, 20 bp, Artificial Sequence
  Description of Artificial Sequence: Synthetic oligonucleotide
  Target: LAMA2; (-) strand; PAM type: NRG; PAM sequence: AAG
actggggtaaagatcagata

SEQ ID NO: 84290 - DNA, 20 bp, Artificial Sequence
  Description of Artificial Sequence: Synthetic oligonucleotide
  Target: LAMA2; (-) strand; PAM type: NRG; PAM sequence: CAG
agagaaactggggtaaagat

SEQ ID NO: 84291 - DNA, 20 bp, Artificial Sequence
  Description of Artificial Sequence: Synthetic oligonucleotide
  Target: LAMA2; (-) strand; PAM type: NRG; PAM sequence: AAG
caggtagagaaactggggta

SEQ ID NO: 84292 - DNA, 20 bp, Artificial Sequence
  Description of Artificial Sequence: Synthetic oligonucleotide
  Target: LAMA2; (-) strand; PAM type: NRG; PAM sequence: GGG
tttgacaggtagagaaactg

SEQ ID NO: 84293 - DNA, 20 bp, Artificial Sequence
  Description of Artificial Sequence: Synthetic oligonucleotide
  Target: LAMA2; (-) strand; PAM type: NRG; PAM sequence: GGG
atttgacaggtagagaaact

SEQ ID NO: 84294 - DNA, 20 bp, Artificial Sequence
  Description of Artificial Sequence: Synthetic oligonucleotide
  Target: LAMA2; (-) strand; PAM type: NRG; PAM sequence: TGG
aatttgacaggtagagaaac

SEQ ID NO: 84295 - DNA, 20 bp, Artificial Sequence
  Description of Artificial Sequence: Synthetic oligonucleotide
  Target: LAMA2; (-) strand; PAM type: NRG; PAM sequence: GAG
gcataggaatttgacaggta

SEQ ID NO: 84296 - DNA, 20 bp, Artificial Sequence
  Description of Artificial Sequence: Synthetic oligonucleotide
  Target: LAMA2; (-) strand; PAM type: NRG; PAM sequence: TAG
aagcataggaatttgacagg

SEQ ID NO: 84297 - DNA, 20 bp, Artificial Sequence
  Description of Artificial Sequence: Synthetic oligonucleotide
  Target: LAMA2; (-) strand; PAM type: NRG; PAM sequence: AGG
ggcaagcataggaatttgac

SEQ ID NO: 84298 - DNA, 20 bp, Artificial Sequence
  Description of Artificial Sequence: Synthetic oligonucleotide
  Target: LAMA2; (-) strand; PAM type: NRG; PAM sequence: CAG
aggcaagcataggaatttga

SEQ ID NO: 84299 - DNA, 20 bp, Artificial Sequence
  Description of Artificial Sequence: Synthetic oligonucleotide
  Target: LAMA2; (-) strand; PAM type: NRG; PAM sequence: AGG
tgtacatttgaggcaagcat

SEQ ID NO: 84300 - DNA, 20 bp, Artificial Sequence
  Description of Artificial Sequence: Synthetic oligonucleotide
  Target: LAMA2; (-) strand; PAM type: NRG; PAM sequence: TAG
atgtacatttgaggcaagca

SEQ ID NO: 84301 - DNA, 20 bp, Artificial Sequence
  Description of Artificial Sequence: Synthetic oligonucleotide
  Target: LAMA2; (-) strand; PAM type: NRG; PAM sequence: AAG
aaaatatgtacatttgaggc

SEQ ID NO: 84302 - DNA, 20 bp, Artificial Sequence
  Description of Artificial Sequence: Synthetic oligonucleotide
  Target: LAMA2; (-) strand; PAM type: NRG; PAM sequence: AGG
attaaaaatatgtacatttg

SEQ ID NO: 84303 - DNA, 20 bp, Artificial Sequence
  Description of Artificial Sequence: Synthetic oligonucleotide
  Target: LAMA2; (-) strand; PAM type: NRG; PAM sequence: GAG
gattaaaaatatgtacattt

SEQ ID NO: 84304 - DNA, 20 bp, Artificial Sequence
  Description of Artificial Sequence: Synthetic oligonucleotide
  Target: LAMA2; (-) strand; PAM type: NRG; PAM sequence: CAG
tataaatacttttcacattt

SEQ ID NO: 84305 - DNA, 20 bp, Artificial Sequence
  Description of Artificial Sequence: Synthetic oligonucleotide
  Target: LAMA2; (-) strand; PAM type: NRG; PAM sequence: CAG
atagaacattgatattacac

SEQ ID NO: 84306 - DNA, 20 bp, Artificial Sequence
  Description of Artificial Sequence: Synthetic oligonucleotide
  Target: LAMA2; (-) strand; PAM type: NRG; PAM sequence: TAG
attaatgcatggatgtataa

SEQ ID NO: 84307 - DNA, 20 bp, Artificial Sequence
  Description of Artificial Sequence: Synthetic oligonucleotide
  Target: LAMA2; (-) strand; PAM type: NRG; PAM sequence: TGG
aaattaaagacattaatgca

SEQ ID NO: 84308 - DNA, 20 bp, Artificial Sequence
  Description of Artificial Sequence: Synthetic oligonucleotide
  Target: LAMA2; (-) strand; PAM type: NRG; PAM sequence: AAG
ttaatttcatggtaaaatta

SEQ ID NO: 84309 - DNA, 20 bp, Artificial Sequence
  Description of Artificial Sequence: Synthetic oligonucleotide
  Target: LAMA2; (-) strand; PAM type: NRG; PAM sequence: TGG
aggtacttcatttaatttca

SEQ ID NO: 84310 - DNA, 20 bp, Artificial Sequence
  Description of Artificial Sequence: Synthetic oligonucleotide
  Target: LAMA2; (-) strand; PAM type: NRG; PAM sequence: AGG
agttcactgttctgttattg

SEQ ID NO: 84311 - DNA, 20 bp, Artificial Sequence
  Description of Artificial Sequence: Synthetic oligonucleotide
  Target: LAMA2; (-) strand; PAM type: NRG; PAM sequence: GAG
aagttcactgttctgttatt

SEQ ID NO: 84312 - DNA, 20 bp, Artificial Sequence
  Description of Artificial Sequence: Synthetic oligonucleotide
  Target: LAMA2; (-) strand; PAM type: NRG; PAM sequence: AAG
ttattgagctacttcattta

SEQ ID NO: 84313 - DNA, 20 bp, Artificial Sequence
  Description of Artificial Sequence: Synthetic oligonucleotide
  Target: LAMA2; (-) strand; PAM type: NRG; PAM sequence: GAG
aggttcactgttctgttatt

SEQ ID NO: 84314 - DNA, 20 bp, Artificial Sequence
  Description of Artificial Sequence: Synthetic oligonucleotide
  Target: LAMA2; (-) strand; PAM type: NRG; PAM sequence: AGG
tgactaaaatggggccagtt

SEQ ID NO: 84315 - DNA, 20 bp, Artificial Sequence
  Description of Artificial Sequence: Synthetic oligonucleotide
  Target: LAMA2; (-) strand; PAM type: NRG; PAM sequence: TAG
ttgactaaaatggggccagt

SEQ ID NO: 84316 - DNA, 20 bp, Artificial Sequence
  Description of Artificial Sequence: Synthetic oligonucleotide
  Target: LAMA2; (-) strand; PAM type: NRG; PAM sequence: CAG
tagattgactaaaatggggc

SEQ ID NO: 84317 - DNA, 20 bp, Artificial Sequence
  Description of Artificial Sequence: Synthetic oligonucleotide
  Target: LAMA2; (-) strand; PAM type: NRG; PAM sequence: GGG
gcattagattgactaaaatg

SEQ ID NO: 84318 - DNA, 20 bp, Artificial Sequence
  Description of Artificial Sequence: Synthetic oligonucleotide
  Target: LAMA2; (-) strand; PAM type: NRG; PAM sequence: GGG
tgcattagattgactaaaat

SEQ ID NO: 84319 - DNA, 20 bp, Artificial Sequence
  Description of Artificial Sequence: Synthetic oligonucleotide
  Target: LAMA2; (-) strand; PAM type: NRG; PAM sequence: TGG
atgcattagattgactaaaa

SEQ ID NO: 84320 - DNA, 20 bp, Artificial Sequence
  Description of Artificial Sequence: Synthetic oligonucleotide
  Target: LAMA2; (-) strand; PAM type: NRG; PAM sequence: TAG
atacctgtgcaggaatgcat

SEQ ID NO: 84321 - DNA, 20 bp, Artificial Sequence
  Description of Artificial Sequence: Synthetic oligonucleotide
  Target: LAMA2; (-) strand; PAM type: NRG; PAM sequence: AGG
gtcatgataaatacctgtgc

SEQ ID NO: 84322 - DNA, 20 bp, Artificial Sequence
  Description of Artificial Sequence: Synthetic oligonucleotide
  Target: LAMA2; (-) strand; PAM type: NRG; PAM sequence: CAG
tgtcatgataaatacctgtg

SEQ ID NO: 84323 - DNA, 20 bp, Artificial Sequence
  Description of Artificial Sequence: Synthetic oligonucleotide
  Target: LAMA2; (-) strand; PAM type: NRG; PAM sequence: GAG
cttcatgtaggttgagtgta

SEQ ID NO: 84324 - DNA, 20 bp, Artificial Sequence
  Description of Artificial Sequence: Synthetic oligonucleotide
  Target: LAMA2; (-) strand; PAM type: NRG; PAM sequence: TAG
atcttcatgtaggttgagtg

SEQ ID NO: 84325 - DNA, 20 bp, Artificial Sequence
  Description of Artificial Sequence: Synthetic oligonucleotide
  Target: LAMA2; (-) strand; PAM type: NRG; PAM sequence: GAG
tgttgatcttcatgtaggtt

SEQ ID NO: 84326 - DNA, 20 bp, Artificial Sequence
  Description of Artificial Sequence: Synthetic oligonucleotide
  Target: LAMA2; (-) strand; PAM type: NRG; PAM sequence: AGG
gactatgttgatcttcatgt

SEQ ID NO: 84327 - DNA, 20 bp, Artificial Sequence
  Description of Artificial Sequence: Synthetic oligonucleotide
  Target: LAMA2; (-) strand; PAM type: NRG; PAM sequence: TAG
tgactatgttgatcttcatg

SEQ ID NO: 84328 - DNA, 20 bp, Artificial Sequence
  Description of Artificial Sequence: Synthetic oligonucleotide
  Target: LAMA2; (-) strand; PAM type: NRG; PAM sequence: AAG
atgcaaatctactctcgtaa

SEQ ID NO: 84329 - DNA, 20 bp, Artificial Sequence
  Description of Artificial Sequence: Synthetic oligonucleotide
  Target: LAMA2; (-) strand; PAM type: NRG; PAM sequence: TGG
tggtgagaaagattattgga

SEQ ID NO: 84330 - DNA, 20 bp, Artificial Sequence
  Description of Artificial Sequence: Synthetic oligonucleotide
  Target: LAMA2; (-) strand; PAM type: NRG; PAM sequence: TGG
acactggtgagaaagattat

SEQ ID NO: 84331 - DNA, 20 bp, Artificial Sequence
  Description of Artificial Sequence: Synthetic oligonucleotide
  Target: LAMA2; (-) strand; PAM type: NRG; PAM sequence: AAG
ttctaattacactggtgaga

SEQ ID NO: 84332 - DNA, 20 bp, Artificial Sequence
  Description of Artificial Sequence: Synthetic oligonucleotide
  Target: LAMA2; (-) strand; PAM type: NRG; PAM sequence: GAG
tcctttctaattacactggt

SEQ ID NO: 84333 - DNA, 20 bp, Artificial Sequence
  Description of Artificial Sequence: Synthetic oligonucleotide
  Target: LAMA2; (-) strand; PAM type: NRG; PAM sequence: TGG
tgtatcctttctaattacac

SEQ ID NO: 84334 - DNA, 20 bp, Artificial Sequence
  Description of Artificial Sequence: Synthetic oligonucleotide
  Target: LAMA2; (-) strand; PAM type: NRG; PAM sequence: AAG
ctgctcaaaagctatgtgtt

SEQ ID NO: 84335 - DNA, 20 bp, Artificial Sequence
  Description of Artificial Sequence: Synthetic oligonucleotide
  Target: LAMA2; (-) strand; PAM type: NRG; PAM sequence: AAG
atttttaaaaatctgctcaa

SEQ ID NO: 84336 - DNA, 20 bp, Artificial Sequence
  Description of Artificial Sequence: Synthetic oligonucleotide
  Target: LAMA2; (-) strand; PAM type: NRG; PAM sequence: AGG
gctgcgtccatgtctgtata

SEQ ID NO: 84337 - DNA, 20 bp, Artificial Sequence
  Description of Artificial Sequence: Synthetic oligonucleotide
  Target: LAMA2; (-) strand; PAM type: NRG; PAM sequence: AAG
agctgcgtccatgtctgtat

SEQ ID NO: 84338 - DNA, 20 bp, Artificial Sequence
  Description of Artificial Sequence: Synthetic oligonucleotide
  Target: LAMA2; (-) strand; PAM type: NRG; PAM sequence: GAG
gaggtatccttcaacattat

SEQ ID NO: 84339 - DNA, 20 bp, Artificial Sequence
  Description of Artificial Sequence: Synthetic oligonucleotide
  Target: LAMA2; (-) strand; PAM type: NRG; PAM sequence: AGG
aagagatgtatcagcaacag

SEQ ID NO: 84340 - DNA, 20 bp, Artificial Sequence
  Description of Artificial Sequence: Synthetic oligonucleotide
  Target: LAMA2; (-) strand; PAM type: NRG; PAM sequence: GAG
aaagagatgtatcagcaaca

SEQ ID NO: 84341 - DNA, 20 bp, Artificial Sequence
  Description of Artificial Sequence: Synthetic oligonucleotide
  Target: LAMA2; (-) strand; PAM type: NRG; PAM sequence: CAG
ataaagagatgtatcagcaa

SEQ ID NO: 84342 - DNA, 20 bp, Artificial Sequence
  Description of Artificial Sequence: Synthetic oligonucleotide
  Target: LAMA2; (-) strand; PAM type: NRG; PAM sequence: CAG
ctgcaaataaagagatgtat

SEQ ID NO: 84343 - DNA, 20 bp, Artificial Sequence
  Description of Artificial Sequence: Synthetic oligonucleotide
  Target: LAMA2; (-) strand; PAM type: NRG; PAM sequence: GAG
aacattttcctgcaaataaa

SEQ ID NO: 84344 - DNA, 20 bp, Artificial Sequence
  Description of Artificial Sequence: Synthetic oligonucleotide
  Target: LAMA2; (-) strand; PAM type: NRG; PAM sequence: AAG
tcaacattttcctgcaaata

SEQ ID NO: 84345 - DNA, 20 bp, Artificial Sequence
  Description of Artificial Sequence: Synthetic oligonucleotide
  Target: LAMA2; (-) strand; PAM type: NRG; PAM sequence: CAG
agccggatttgcaacgacta

SEQ ID NO: 84346 - DNA, 20 bp, Artificial Sequence
  Description of Artificial Sequence: Synthetic oligonucleotide
  Target: LAMA2; (-) strand; PAM type: NRG; PAM sequence: CGG
ctcttgcaaattgaagaagc

SEQ ID NO: 84347 - DNA, 20 bp, Artificial Sequence
  Description of Artificial Sequence: Synthetic oligonucleotide
  Target: LAMA2; (-) strand; PAM type: NRG; PAM sequence: AAG
tatcctcttgcaaattgaag

SEQ ID NO: 84348 - DNA, 20 bp, Artificial Sequence
  Description of Artificial Sequence: Synthetic oligonucleotide
  Target: LAMA2; (-) strand; PAM type: NRG; PAM sequence: AAG
aattatcctcttgcaaattg

SEQ ID NO: 84349 - DNA, 20 bp, Artificial Sequence
  Description of Artificial Sequence: Synthetic oligonucleotide
  Target: LAMA2; (-) strand; PAM type: NRG; PAM sequence: CAG
ctgaacagaaacactcatcg

SEQ ID NO: 84350 - DNA, 20 bp, Artificial Sequence
  Description of Artificial Sequence: Synthetic oligonucleotide
  Target: LAMA2; (-) strand; PAM type: NRG; PAM sequence: CAG
atctgtttgaaacccctgaa

SEQ ID NO: 84351 - DNA, 20 bp, Artificial Sequence
  Description of Artificial Sequence: Synthetic oligonucleotide
  Target: LAMA2; (-) strand; PAM type: NRG; PAM sequence: AGG
tactttgccataggtccagt

SEQ ID NO: 84352 - DNA, 20 bp, Artificial Sequence
  Description of Artificial Sequence: Synthetic oligonucleotide
  Target: LAMA2; (-) strand; PAM type: NRG; PAM sequence: TAG
ttactttgccataggtccag

SEQ ID NO: 84353 - DNA, 20 bp, Artificial Sequence
  Description of Artificial Sequence: Synthetic oligonucleotide
  Target: LAMA2; (-) strand; PAM type: NRG; PAM sequence: CAG
tgcttactttgccataggtc

SEQ ID NO: 84354 - DNA, 20 bp, Artificial Sequence
  Description of Artificial Sequence: Synthetic oligonucleotide
  Target: LAMA2; (-) strand; PAM type: NRG; PAM sequence: AGG
gtgcttgcttactttgccat

SEQ ID NO: 84355 - DNA, 20 bp, Artificial Sequence
  Description of Artificial Sequence: Synthetic oligonucleotide
  Target: LAMA2; (-) strand; PAM type: NRG; PAM sequence: TAG
ggtgcttgcttactttgcca

SEQ ID NO: 84356 - DNA, 20 bp, Artificial Sequence
  Description of Artificial Sequence: Synthetic oligonucleotide
  Target: LAMA2; (-) strand; PAM type: NRG; PAM sequence: TGG
gggcagcaaacagaaccaaa

SEQ ID NO: 84357 - DNA, 20 bp, Artificial Sequence
  Description of Artificial Sequence: Synthetic oligonucleotide
  Target: LAMA2; (-) strand; PAM type: NRG; PAM sequence: CAG
aaggctgctggggcagcaaa

SEQ ID NO: 84358 - DNA, 20 bp, Artificial Sequence
  Description of Artificial Sequence: Synthetic oligonucleotide
  Target: LAMA2; (-) strand; PAM type: NRG; PAM sequence: CAG
aacaaagaaggctgctgggg

SEQ ID NO: 84359 - DNA, 20 bp, Artificial Sequence
  Description of Artificial Sequence: Synthetic oligonucleotide
  Target: LAMA2; (-) strand; PAM type: NRG; PAM sequence: GGG
agcaacaaagaaggctgctg

SEQ ID NO: 84360 - DNA, 20 bp, Artificial Sequence
  Description of Artificial Sequence: Synthetic oligonucleotide
  Target: LAMA2; (-) strand; PAM type: NRG; PAM sequence: GGG
aagcaacaaagaaggctgct

SEQ ID NO: 84361 - DNA, 20 bp, Artificial Sequence
  Description of Artificial Sequence: Synthetic oligonucleotide
  Target: LAMA2; (-) strand; PAM type: NRG; PAM sequence: TGG
aaagcaacaaagaaggctgc

SEQ ID NO: 84362 - DNA, 20 bp, Artificial Sequence
  Description of Artificial Sequence: Synthetic oligonucleotide
  Target: LAMA2; (-) strand; PAM type: NRG; PAM sequence: AGG
aacgatgaaagcaacaaaga

SEQ ID NO: 84363 - DNA, 20 bp, Artificial Sequence
  Description of Artificial Sequence: Synthetic oligonucleotide
  Target: LAMA2; (-) strand; PAM type: NRG; PAM sequence: AAG
caacgatgaaagcaacaaag

SEQ ID NO: 84364 - DNA, 20 bp, Artificial Sequence
  Description of Artificial Sequence: Synthetic oligonucleotide
  Target: LAMA2; (-) strand; PAM type: NRG; PAM sequence: AAG
gaacaacgatgaaagcaaca

SEQ ID NO: 84365 - DNA, 20 bp, Artificial Sequence
  Description of Artificial Sequence: Synthetic oligonucleotide
  Target: LAMA2; (-) strand; PAM type: NRG; PAM sequence: AAG
atacaaaagaacaacgatga

SEQ ID NO: 84366 - DNA, 20 bp, Artificial Sequence
  Description of Artificial Sequence: Synthetic oligonucleotide
  Target: LAMA2; (-) strand; PAM type: NRG; PAM sequence: AAG
atcagaaactgttcatacaa

SEQ ID NO: 84367 - DNA, 20 bp, Artificial Sequence
  Description of Artificial Sequence: Synthetic oligonucleotide
  Target: LAMA2; (-) strand; PAM type: NRG; PAM sequence: CAG
tttatgtagaagttcactat

SEQ ID NO: 84368 - DNA, 20 bp, Artificial Sequence
  Description of Artificial Sequence: Synthetic oligonucleotide
  Target: LAMA2; (-) strand; PAM type: NRG; PAM sequence: AAG
cttcctgtaactttatgtag

SEQ ID NO: 84369 - DNA, 20 bp, Artificial Sequence
  Description of Artificial Sequence: Synthetic oligonucleotide
  Target: LAMA2; (-) strand; PAM type: NRG; PAM sequence: TAG
cttcttcctgtaactttatg

SEQ ID NO: 84370 - DNA, 20 bp, Artificial Sequence
  Description of Artificial Sequence: Synthetic oligonucleotide
  Target: LAMA2; (-) strand; PAM type: NRG; PAM sequence: AAG
aaaatacacaacagcatttg

SEQ ID NO: 84371 - DNA, 20 bp, Artificial Sequence
  Description of Artificial Sequence: Synthetic oligonucleotide
  Target: LAMA2; (-) strand; PAM type: NRG; PAM sequence: CAG
ctttgagcaaaaatacacaa

SEQ ID NO: 84372 - DNA, 20 bp, Artificial Sequence
  Description of Artificial Sequence: Synthetic oligonucleotide
  Target: LAMA2; (-) strand; PAM type: NRG; PAM sequence: GAG
aatacaacctcaaaggcttt

SEQ ID NO: 84373 - DNA, 20 bp, Artificial Sequence
  Description of Artificial Sequence: Synthetic oligonucleotide
  Target: LAMA2; (-) strand; PAM type: NRG; PAM sequence: AGG
tattacaaatacaacctcaa

SEQ ID NO: 84374 - DNA, 20 bp, Artificial Sequence
  Description of Artificial Sequence: Synthetic oligonucleotide
  Target: LAMA2; (-) strand; PAM type: NRG; PAM sequence: AAG
atattacaaatacaacctca

SEQ ID NO: 84375 - DNA, 20 bp, Artificial Sequence
  Description of Artificial Sequence: Synthetic oligonucleotide
  Target: LAMA2; (-) strand; PAM type: NRG; PAM sequence: CAG
ctacctattctaagaaattc

SEQ ID NO: 84376 - DNA, 20 bp, Artificial Sequence
  Description of Artificial Sequence: Synthetic oligonucleotide
  Target: LAMA2; (-) strand; PAM type: NRG; PAM sequence: AAG
agactatgtctacctattct

SEQ ID NO: 84377 - DNA, 20 bp, Artificial Sequence
  Description of Artificial Sequence: Synthetic oligonucleotide
  Target: LAMA2; (-) strand; PAM type: NRG; PAM sequence: AAG
gagtaatcatggacactaaa

SEQ ID NO: 84378 - DNA, 20 bp, Artificial Sequence
  Description of Artificial Sequence: Synthetic oligonucleotide
  Target: LAMA2; (-) strand; PAM type: NRG; PAM sequence: TGG
attgtttcatagagtaatca

SEQ ID NO: 84379 - DNA, 20 bp, Artificial Sequence
  Description of Artificial Sequence: Synthetic oligonucleotide
  Target: LAMA2; (-) strand; PAM type: NRG; PAM sequence: GAG
aattgcattattgtttcata

SEQ ID NO: 84380 - DNA, 20 bp, Artificial Sequence
  Description of Artificial Sequence: Synthetic oligonucleotide
  Target: LAMA2; (-) strand; PAM type: NRG; PAM sequence: TAG
ttaattgcattattgtttca

SEQ ID NO: 84381 - DNA, 20 bp, Artificial Sequence
  Description of Artificial Sequence: Synthetic oligonucleotide
  Target: LAMA2; (-) strand; PAM type: NRG; PAM sequence: GAG
tcttaaatcatgcacccttg

SEQ ID NO: 84382 - DNA, 20 bp, Artificial Sequence
  Description of Artificial Sequence: Synthetic oligonucleotide
  Target: LAMA2; (-) strand; PAM type: NRG; PAM sequence: TGG
tctcttaaatcatgcaccct

SEQ ID NO: 84383 - DNA, 20 bp, Artificial Sequence
  Description of Artificial Sequence: Synthetic oligonucleotide
  Target: LAMA2; (-) strand; PAM type: NRG; PAM sequence: TAG
atataattcatatcacaatg

SEQ ID NO: 84384 - DNA, 20 bp, Artificial Sequence
  Description of Artificial Sequence: Synthetic oligonucleotide
  Target: LAMA2; (-) strand; PAM type: NRG; PAM sequence: TGG
gcatacgaacatactagtaa

SEQ ID NO: 84385 - DNA, 20 bp, Artificial Sequence
  Description of Artificial Sequence: Synthetic oligonucleotide
  Target: LAMA2; (-) strand; PAM type: NRG; PAM sequence: TAG
caacttgcatacgaacatac

SEQ ID NO: 84386 - DNA, 20 bp, Artificial Sequence
  Description of Artificial Sequence: Synthetic oligonucleotide
  Target: LAMA2; (-) strand; PAM type: NRG; PAM sequence: GAG
ttatgtatacagatgataca

SEQ ID NO: 84387 - DNA, 20 bp, Artificial Sequence
  Description of Artificial Sequence: Synthetic oligonucleotide
  Target: LAMA2; (-) strand; PAM type: NRG; PAM sequence: CAG
tattatgtatacagatgata

SEQ ID NO: 84388 - DNA, 20 bp, Artificial Sequence
  Description of Artificial Sequence: Synthetic oligonucleotide
  Target: LAMA2; (-) strand; PAM type: NRG; PAM sequence: CAG
gataatatgtattatgtata

SEQ ID NO: 84389 - DNA, 20 bp, Artificial Sequence
  Description of Artificial Sequence: Synthetic oligonucleotide
  Target: LAMA2; (-) strand; PAM type: NRG; PAM sequence: TGG
aatagtaactaaagcgttgg

SEQ ID NO: 84390 - DNA, 20 bp, Artificial Sequence
  Description of Artificial Sequence: Synthetic oligonucleotide
  Target: LAMA2; (-) strand; PAM type: NRG; PAM sequence: TGG
tcaaatagtaactaaagcgt

SEQ ID NO: 84391 - DNA, 20 bp, Artificial Sequence
  Description of Artificial Sequence: Synthetic oligonucleotide
  Target: LAMA2; (-) strand; PAM type: NRG; PAM sequence: AAG
gcaacatcaaatagtaacta

SEQ ID NO: 84392 - DNA, 20 bp, Artificial Sequence
  Description of Artificial Sequence: Synthetic oligonucleotide
  Target: LAMA2; (-) strand; PAM type: NRG; PAM sequence: TAG
agagcctaggcaacatcaaa

SEQ ID NO: 84393 - DNA, 20 bp, Artificial Sequence
  Description of Artificial Sequence: Synthetic oligonucleotide
  Target: LAMA2; (-) strand; PAM type: NRG; PAM sequence: AGG
ttttaataatgaaagagcct

SEQ ID NO: 84394 - DNA, 20 bp, Artificial Sequence
  Description of Artificial Sequence: Synthetic oligonucleotide
  Target: LAMA2; (-) strand; PAM type: NRG; PAM sequence: TAG
cttttaataatgaaagagcc

SEQ ID NO: 84395 - DNA, 20 bp, Artificial Sequence
  Description of Artificial Sequence: Synthetic oligonucleotide
  Target: LAMA2; (-) strand; PAM type: NRG; PAM sequence: GAG
gtccccttttaataatgaaa

SEQ ID NO: 84396 - DNA, 20 bp, Artificial Sequence
  Description of Artificial Sequence: Synthetic oligonucleotide
  Target: LAMA2; (-) strand; PAM type: NRG; PAM sequence: AAG
atgtccccttttaataatga

SEQ ID NO: 84397 - DNA, 20 bp, Artificial Sequence
  Description of Artificial Sequence: Synthetic oligonucleotide
  Target: LAMA2; (-) strand; PAM type: NRG; PAM sequence: AGG
ttcaaaccaactcagaatga

SEQ ID NO: 84398 - DNA, 20 bp, Artificial Sequence
  Description of Artificial Sequence: Synthetic oligonucleotide
  Target: LAMA2; (-) strand; PAM type: NRG; PAM sequence: AAG
tttcaaaccaactcagaatg

SEQ ID NO: 84399 - DNA, 20 bp, Artificial Sequence
  Description of Artificial Sequence: Synthetic oligonucleotide
  Target: LAMA2; (-) strand; PAM type: NRG; PAM sequence: CAG
aataatttttcaaaccaact

SEQ ID NO: 84400 - DNA, 20 bp, Artificial Sequence
  Description of Artificial Sequence: Synthetic oligonucleotide
  Target: LAMA2; (-) strand; PAM type: NRG; PAM sequence: AAG
cagttgctattaaatagttt

SEQ ID NO: 84401 - DNA, 20 bp, Artificial Sequence
  Description of Artificial Sequence: Synthetic oligonucleotide
  Target: LAMA2; (-) strand; PAM type: NRG; PAM sequence: TAG
aaatttcagttgctattaaa

SEQ ID NO: 84402 - DNA, 20 bp, Artificial Sequence
  Description of Artificial Sequence: Synthetic oligonucleotide
  Target: LAMA2; (-) strand; PAM type: NRG; PAM sequence: CAG
acgttaaagaaagaaaattt

SEQ ID NO: 84403 - DNA, 20 bp, Artificial Sequence
  Description of Artificial Sequence: Synthetic oligonucleotide
  Target: LAMA2; (-) strand; PAM type: NRG; PAM sequence: AAG
aaacacatttacgttaaaga

SEQ ID NO: 84404 - DNA, 20 bp, Artificial Sequence
  Description of Artificial Sequence: Synthetic oligonucleotide
  Target: LAMA2; (-) strand; PAM type: NRG; PAM sequence: AAG
aggtaaacacatttacgtta

SEQ ID NO: 84405 - DNA, 20 bp, Artificial Sequence
  Description of Artificial Sequence: Synthetic oligonucleotide
  Target: LAMA2; (-) strand; PAM type: NRG; PAM sequence: AGG
tgtaggcagtgaagttagaa

SEQ ID NO: 84406 - DNA, 20 bp, Artificial Sequence
  Description of Artificial Sequence: Synthetic oligonucleotide
  Target: LAMA2; (-) strand; PAM type: NRG; PAM sequence: AAG
gtgtaggcagtgaagttaga

SEQ ID NO: 84407 - DNA, 20 bp, Artificial Sequence
  Description of Artificial Sequence: Synthetic oligonucleotide
  Target: LAMA2; (-) strand; PAM type: NRG; PAM sequence: TAG
ggtagtgtaggcagtgaagt

SEQ ID NO: 84408 - DNA, 20 bp, Artificial Sequence
  Description of Artificial Sequence: Synthetic oligonucleotide
  Target: LAMA2; (-) strand; PAM type: NRG; PAM sequence: AAG
agtgggtagtgtaggcagtg

SEQ ID NO: 84409 - DNA, 20 bp, Artificial Sequence
  Description of Artificial Sequence: Synthetic oligonucleotide
  Target: LAMA2; (-) strand; PAM type: NRG; PAM sequence: CAG
aaggcagtgggtagtgtagg

SEQ ID NO: 84410 - DNA, 20 bp, Artificial Sequence
  Description of Artificial Sequence: Synthetic oligonucleotide
  Target: LAMA2; (-) strand; PAM type: NRG; PAM sequence: AGG
gaaaaggcagtgggtagtgt

SEQ ID NO: 84411 - DNA, 20 bp, Artificial Sequence
  Description of Artificial Sequence: Synthetic oligonucleotide
  Target: LAMA2; (-) strand; PAM type: NRG; PAM sequence: TAG
tgaaaaggcagtgggtagtg

SEQ ID NO: 84412 - DNA, 20 bp, Artificial Sequence
  Description of Artificial Sequence: Synthetic oligonucleotide
  Target: LAMA2; (-) strand; PAM type: NRG; PAM sequence: TAG
agatttgaaaaggcagtggg

SEQ ID NO: 84413 - DNA, 20 bp, Artificial Sequence
  Description of Artificial Sequence: Synthetic oligonucleotide
  Target: LAMA2; (-) strand; PAM type: NRG; PAM sequence: GGG
cacagatttgaaaaggcagt

SEQ ID NO: 84414 - DNA, 20 bp, Artificial Sequence
  Description of Artificial Sequence: Synthetic oligonucleotide
  Target: LAMA2; (-) strand; PAM type: NRG; PAM sequence: TGG
gcacagatttgaaaaggcag

SEQ ID NO: 84415 - DNA, 20 bp, Artificial Sequence
  Description of Artificial Sequence: Synthetic oligonucleotide
  Target: LAMA2; (-) strand; PAM type: NRG; PAM sequence: CAG
tttgcacagatttgaaaagg

SEQ ID NO: 84416 - DNA, 20 bp, Artificial Sequence
  Description of Artificial Sequence: Synthetic oligonucleotide
  Target: LAMA2; (-) strand; PAM type: NRG; PAM sequence: AGG
ctctttgcacagatttgaaa

SEQ ID NO: 84417 - DNA, 20 bp, Artificial Sequence
  Description of Artificial Sequence: Synthetic oligonucleotide
  Target: LAMA2; (-) strand; PAM type: NRG; PAM sequence: AAG
gctctttgcacagatttgaa

SEQ ID NO: 84418 - DNA, 20 bp, Artificial Sequence
  Description of Artificial Sequence: Synthetic oligonucleotide
  Target: LAMA2; (-) strand; PAM type: NRG; PAM sequence: CAG
gagacaacatgctctttgca

SEQ ID NO: 84419 - DNA, 20 bp, Artificial Sequence
  Description of Artificial Sequence: Synthetic oligonucleotide
  Target: LAMA2; (-) strand; PAM type: NRG; PAM sequence: GAG
ctgacacttttctgtatagg

SEQ ID NO: 84420 - DNA, 20 bp, Artificial Sequence
  Description of Artificial Sequence: Synthetic oligonucleotide
  Target: LAMA2; (-) strand; PAM type: NRG; PAM sequence: GGG
ctctgacacttttctgtata

SEQ ID NO: 84421 - DNA, 20 bp, Artificial Sequence
  Description of Artificial Sequence: Synthetic oligonucleotide
  Target: LAMA2; (-) strand; PAM type: NRG; PAM sequence: AGG
cctctgacacttttctgtat

SEQ ID NO: 84422 - DNA, 20 bp, Artificial Sequence
  Description of Artificial Sequence: Synthetic oligonucleotide
  Target: LAMA2; (-) strand; PAM type: NRG; PAM sequence: TAG
tcctctgacacttttctgta

SEQ ID NO: 84423 - DNA, 20 bp, Artificial Sequence
  Description of Artificial Sequence: Synthetic oligonucleotide
  Target: LAMA2; (-) strand; PAM type: NRG; PAM sequence: AGG
ggctgtgtgaaattcccaga

SEQ ID NO: 84424 - DNA, 20 bp, Artificial Sequence
  Description of Artificial Sequence: Synthetic oligonucleotide
  Target: LAMA2; (-) strand; PAM type: NRG; PAM sequence: AAG
aggctgtgtgaaattcccag

SEQ ID NO: 84425 - DNA, 20 bp, Artificial Sequence
  Description of Artificial Sequence: Synthetic oligonucleotide
  Target: LAMA2; (-) strand; PAM type: NRG; PAM sequence: CAG
cacaggctgtgtgaaattcc

SEQ ID NO: 84426 - DNA, 20 bp, Artificial Sequence
  Description of Artificial Sequence: Synthetic oligonucleotide
  Target: LAMA2; (-) strand; PAM type: NRG; PAM sequence: AGG
actcttaagtccagccacac

SEQ ID NO: 84427 - DNA, 20 bp, Artificial Sequence
  Description of Artificial Sequence: Synthetic oligonucleotide
  Target: LAMA2; (-) strand; PAM type: NRG; PAM sequence: CAG
cactcttaagtccagccaca

SEQ ID NO: 84428 - DNA, 20 bp, Artificial Sequence
  Description of Artificial Sequence: Synthetic oligonucleotide
  Target: LAMA2; (-) strand; PAM type: NRG; PAM sequence: CAG
ccattctgcactcttaagtc

SEQ ID NO: 84429 - DNA, 20 bp, Artificial Sequence
  Description of Artificial Sequence: Synthetic oligonucleotide
  Target: LAMA2; (-) strand; PAM type: NRG; PAM sequence: AAG
tcctaccattctgcactctt

SEQ ID NO: 84430 - DNA, 20 bp, Artificial Sequence
  Description of Artificial Sequence: Synthetic oligonucleotide
  Target: LAMA2; (-) strand; PAM type: NRG; PAM sequence: CAG
tctagacttctttctctctc

SEQ ID NO: 84431 - DNA, 20 bp, Artificial Sequence
  Description of Artificial Sequence: Synthetic oligonucleotide
  Target: LAMA2; (-) strand; PAM type: NRG; PAM sequence: TAG
tagattctcattcccccgtc

SEQ ID NO: 84432 - DNA, 20 bp, Artificial Sequence
  Description of Artificial Sequence: Synthetic oligonucleotide
  Target: LAMA2; (-) strand; PAM type: NRG; PAM sequence: TAG
atattcaaccctataagttc

SEQ ID NO: 84433 - DNA, 20 bp, Artificial Sequence
  Description of Artificial Sequence: Synthetic oligonucleotide
  Target: LAMA2; (-) strand; PAM type: NRG; PAM sequence: AAG
cttagtatattcaaccctat

SEQ ID NO: 84434 - DNA, 20 bp, Artificial Sequence
  Description of Artificial Sequence: Synthetic oligonucleotide
  Target: LAMA2; (-) strand; PAM type: NRG; PAM sequence: TAG
agtaaaatatctcaaattct

SEQ ID NO: 84435 - DNA, 20 bp, Artificial Sequence
  Description of Artificial Sequence: Synthetic oligonucleotide
  Target: LAMA2; (-) strand; PAM type: NRG; PAM sequence: AAG
aatttcttcaatgacactcc

SEQ ID NO: 84436 - DNA, 20 bp, Artificial Sequence
  Description of Artificial Sequence: Synthetic oligonucleotide
  Target: LAMA2; (-) strand; PAM type: NRG; PAM sequence: TAG
actctgataatgtcagtctt

SEQ ID NO: 84437 - DNA, 20 bp, Artificial Sequence
  Description of Artificial Sequence: Synthetic oligonucleotide
  Target: LAMA2; (-) strand; PAM type: NRG; PAM sequence: CAG
aaacacaactctgataatgt

SEQ ID NO: 84438 - DNA, 20 bp, Artificial Sequence
  Description of Artificial Sequence: Synthetic oligonucleotide
  Target: LAMA2; (-) strand; PAM type: NRG; PAM sequence: TAG
gaaatagtttatctaaatag

SEQ ID NO: 84439 - DNA, 20 bp, Artificial Sequence
  Description of Artificial Sequence: Synthetic oligonucleotide
  Target: LAMA2; (-) strand; PAM type: NRG; PAM sequence: TAG
taggaaatagtttatctaaa

SEQ ID NO: 84440 - DNA, 20 bp, Artificial Sequence
  Description of Artificial Sequence: Synthetic oligonucleotide
  Target: LAMA2; (-) strand; PAM type: NRG; PAM sequence: TAG
aggaagaagtgtttaggaaa

SEQ ID NO: 84441 - DNA, 20 bp, Artificial Sequence
  Description of Artificial Sequence: Synthetic oligonucleotide
  Target: LAMA2; (-) strand; PAM type: NRG; PAM sequence: AGG
gttgaaaggaagaagtgttt

SEQ ID NO: 84442 - DNA, 20 bp, Artificial Sequence
  Description of Artificial Sequence: Synthetic oligonucleotide
  Target: LAMA2; (-) strand; PAM type: NRG; PAM sequence: TAG
agttgaaaggaagaagtgtt

SEQ ID NO: 84443 - DNA, 20 bp, Artificial Sequence
  Description of Artificial Sequence: Synthetic oligonucleotide
  Target: LAMA2; (-) strand; PAM type: NRG; PAM sequence: AAG
tgattaaagttgaaaggaag

SEQ ID NO: 84444 - DNA, 20 bp, Artificial Sequence
  Description of Artificial Sequence: Synthetic oligonucleotide
  Target: LAMA2; (-) strand; PAM type: NRG; PAM sequence: AAG
cactgattaaagttgaaagg

SEQ ID NO: 84445 - DNA, 20 bp, Artificial Sequence
  Description of Artificial Sequence: Synthetic oligonucleotide
  Target: LAMA2; (-) strand; PAM type: NRG; PAM sequence: AGG
gttcactgattaaagttgaa

SEQ ID NO: 84446 - DNA, 20 bp, Artificial Sequence
  Description of Artificial Sequence: Synthetic oligonucleotide
  Target: LAMA2; (-) strand; PAM type: NRG; PAM sequence: AAG
agttcactgattaaagttga

SEQ ID NO: 84447 - DNA, 20 bp, Artificial Sequence
  Description of Artificial Sequence: Synthetic oligonucleotide
  Target: LAMA2; (-) strand; PAM type: NRG; PAM sequence: AAG
caggattagttcactgatta

SEQ ID NO: 84448 - DNA, 20 bp, Artificial Sequence
  Description of Artificial Sequence: Synthetic oligonucleotide
  Target: LAMA2; (-) strand; PAM type: NRG; PAM sequence: TAG
tttatagctctgttcaggat

SEQ ID NO: 84449 - DNA, 20 bp, Artificial Sequence
  Description of Artificial Sequence: Synthetic oligonucleotide
  Target: LAMA2; (-) strand; PAM type: NRG; PAM sequence: AGG
aatattttatagctctgttc

SEQ ID NO: 84450 - DNA, 20 bp, Artificial Sequence
  Description of Artificial Sequence: Synthetic oligonucleotide
  Target: LAMA2; (-) strand; PAM type: NRG; PAM sequence: CAG
aaatattttatagctctgtt

SEQ ID NO: 84451 - DNA, 20 bp, Artificial Sequence
  Description of Artificial Sequence: Synthetic oligonucleotide
  Target: LAMA2; (-) strand; PAM type: NRG; PAM sequence: TAG
caggcagagaaaatatttta

SEQ ID NO: 84452 - DNA, 20 bp, Artificial Sequence
  Description of Artificial Sequence: Synthetic oligonucleotide
  Target: LAMA2; (-) strand; PAM type: NRG; PAM sequence: GAG
acttaaaagcactgcaggca

SEQ ID NO: 84453 - DNA, 20 bp, Artificial Sequence
  Description of Artificial Sequence: Synthetic oligonucleotide
  Target: LAMA2; (-) strand; PAM type: NRG; PAM sequence: CAG
tgacttaaaagcactgcagg

SEQ ID NO: 84454 - DNA, 20 bp, Artificial Sequence
  Description of Artificial Sequence: Synthetic oligonucleotide
  Target: LAMA2; (-) strand; PAM type: NRG; PAM sequence: AGG
gcttgacttaaaagcactgc

SEQ ID NO: 84455 - DNA, 20 bp, Artificial Sequence
  Description of Artificial Sequence: Synthetic oligonucleotide
  Target: LAMA2; (-) strand; PAM type: NRG; PAM sequence: CAG
ggcttgacttaaaagcactg

SEQ ID NO: 84456 - DNA, 20 bp, Artificial Sequence
  Description of Artificial Sequence: Synthetic oligonucleotide
  Target: LAMA2; (-) strand; PAM type: NRG; PAM sequence: AAG
taatatgaggcttgacttaa

SEQ ID NO: 84457 - DNA, 20 bp, Artificial Sequence
  Description of Artificial Sequence: Synthetic oligonucleotide
  Target: LAMA2; (-) strand; PAM type: NRG; PAM sequence: AGG
agataatatttcataatatg

SEQ ID NO: 84458 - DNA, 20 bp, Artificial Sequence
  Description of Artificial Sequence: Synthetic oligonucleotide
  Target: LAMA2; (-) strand; PAM type: NRG; PAM sequence: GAG
tagataatatttcataatat

SEQ ID NO: 84459 - DNA, 20 bp, Artificial Sequence
  Description of Artificial Sequence: Synthetic oligonucleotide
  Target: LAMA2; (-) strand; PAM type: NRG; PAM sequence: TAG
gcaatacagttgataacgta

SEQ ID NO: 84460 - DNA, 20 bp, Artificial Sequence
  Description of Artificial Sequence: Synthetic oligonucleotide
  Target: LAMA2; (-) strand; PAM type: NRG; PAM sequence: CAG
agtctgctctgaaagcaata

SEQ ID NO: 84461 - DNA, 20 bp, Artificial Sequence
  Description of Artificial Sequence: Synthetic oligonucleotide
  Target: LAMA2; (-) strand; PAM type: NRG; PAM sequence: AAG
ttctttgaagtctgctctga

SEQ ID NO: 84462 - DNA, 20 bp, Artificial Sequence
  Description of Artificial Sequence: Synthetic oligonucleotide
  Target: LAMA2; (-) strand; PAM type: NRG; PAM sequence: AAG
catctgtggttgattctttg

SEQ ID NO: 84463 - DNA, 20 bp, Artificial Sequence
  Description of Artificial Sequence: Synthetic oligonucleotide
  Target: LAMA2; (-) strand; PAM type: NRG; PAM sequence: TGG
ttagactagatgtccatctg

SEQ ID NO: 84464 - DNA, 20 bp, Artificial Sequence
  Description of Artificial Sequence: Synthetic oligonucleotide
  Target: LAMA2; (-) strand; PAM type: NRG; PAM sequence: TAG
aacaaaagaggaagttagac

SEQ ID NO: 84465 - DNA, 20 bp, Artificial Sequence
  Description of Artificial Sequence: Synthetic oligonucleotide
  Target: LAMA2; (-) strand; PAM type: NRG; PAM sequence: TAG
ttataaacaaaagaggaagt

SEQ ID NO: 84466 - DNA, 20 bp, Artificial Sequence
  Description of Artificial Sequence: Synthetic oligonucleotide
  Target: LAMA2; (-) strand; PAM type: NRG; PAM sequence: AAG
gactttataaacaaaagagg

SEQ ID NO: 84467 - DNA, 20 bp, Artificial Sequence
  Description of Artificial Sequence: Synthetic oligonucleotide
  Target: LAMA2; (-) strand; PAM type: NRG; PAM sequence: AGG
tgggactttataaacaaaag

SEQ ID NO: 84468 - DNA, 20 bp, Artificial Sequence
  Description of Artificial Sequence: Synthetic oligonucleotide
  Target: LAMA2; (-) strand; PAM type: NRG; PAM sequence: GAG
gtgggactttataaacaaaa

SEQ ID NO: 84469 - DNA, 20 bp, Artificial Sequence
  Description of Artificial Sequence: Synthetic oligonucleotide
  Target: LAMA2; (-) strand; PAM type: NRG; PAM sequence: AAG
gggtgggactttataaacaa

SEQ ID NO: 84470 - DNA, 20 bp, Artificial Sequence
  Description of Artificial Sequence: Synthetic oligonucleotide
  Target: LAMA2; (-) strand; PAM type: NRG; PAM sequence: GGG
ggcagtctggagggtggggt

SEQ ID NO: 84471 - DNA, 20 bp, Artificial Sequence
  Description of Artificial Sequence: Synthetic oligonucleotide
  Target: LAMA2; (-) strand; PAM type: NRG; PAM sequence: TGG
gggcagtctggagggtgggg

SEQ ID NO: 84472 - DNA, 20 bp, Artificial Sequence
  Description of Artificial Sequence: Synthetic oligonucleotide
  Target: LAMA2; (-) strand; PAM type: NRG; PAM sequence: GGG
gtggggcagtctggagggtg

SEQ ID NO: 84473 - DNA, 20 bp, Artificial Sequence
  Description of Artificial Sequence: Synthetic oligonucleotide
  Target: LAMA2; (-) strand; PAM type: NRG; PAM sequence: GGG
agtggggcagtctggagggt

SEQ ID NO: 84474 - DNA, 20 bp, Artificial Sequence
  Description of Artificial Sequence: Synthetic oligonucleotide
  Target: LAMA2; (-) strand; PAM type: NRG; PAM sequence: TGG
cagtggggcagtctggaggg

SEQ ID NO: 84475 - DNA, 20 bp, Artificial Sequence
  Description of Artificial Sequence: Synthetic oligonucleotide
  Target: LAMA2; (-) strand; PAM type: NRG; PAM sequence: GGG
tatcagtggggcagtctgga

SEQ ID NO: 84476 - DNA, 20 bp, Artificial Sequence
  Description of Artificial Sequence: Synthetic oligonucleotide
  Target: LAMA2; (-) strand; PAM type: NRG; PAM sequence: AGG
ctatcagtggggcagtctgg

SEQ ID NO: 84477 - DNA, 20 bp, Artificial Sequence
  Description of Artificial Sequence: Synthetic oligonucleotide
  Target: LAMA2; (-) strand; PAM type: NRG; PAM sequence: GAG
tctatcagtggggcagtctg

SEQ ID NO: 84478 - DNA, 20 bp, Artificial Sequence
  Description of Artificial Sequence: Synthetic oligonucleotide
  Target: LAMA2; (-) strand; PAM type: NRG; PAM sequence: TGG
gatctatcagtggggcagtc

SEQ ID NO: 84479 - DNA, 20 bp, Artificial Sequence
  Description of Artificial Sequence: Synthetic oligonucleotide
  Target: LAMA2; (-) strand; PAM type: NRG; PAM sequence: CAG
actttgatctatcagtgggg

SEQ ID NO: 84480 - DNA, 20 bp, Artificial Sequence
  Description of Artificial Sequence: Synthetic oligonucleotide
  Target: LAMA2; (-) strand; PAM type: NRG; PAM sequence: GGG
gaaactttgatctatcagtg

SEQ ID NO: 84481 - DNA, 20 bp, Artificial Sequence
  Description of Artificial Sequence: Synthetic oligonucleotide
  Target: LAMA2; (-) strand; PAM type: NRG; PAM sequence: GGG
tgaaactttgatctatcagt

SEQ ID NO: 84482 - DNA, 20 bp, Artificial Sequence
  Description of Artificial Sequence: Synthetic oligonucleotide
  Target: LAMA2; (-) strand; PAM type: NRG; PAM sequence: TGG
atgaaactttgatctatcag

SEQ ID NO: 84483 - DNA, 20 bp, Artificial Sequence
  Description of Artificial Sequence: Synthetic oligonucleotide
  Target: LAMA2; (-) strand; PAM type: NRG; PAM sequence: CAG
gctatgaaactttgatctat

SEQ ID NO: 84484 - DNA, 20 bp, Artificial Sequence
  Description of Artificial Sequence: Synthetic oligonucleotide
  Target: LAMA2; (-) strand; PAM type: NRG; PAM sequence: TGG
taccagctctgccccttggc

SEQ ID NO: 84485 - DNA, 20 bp, Artificial Sequence
  Description of Artificial Sequence: Synthetic oligonucleotide
  Target: LAMA2; (-) strand; PAM type: NRG; PAM sequence: TGG
tgagtaccagctctgcccct

SEQ ID NO: 84486 - DNA, 20 bp, Artificial Sequence
  Description of Artificial Sequence: Synthetic oligonucleotide
  Target: LAMA2; (-) strand; PAM type: NRG; PAM sequence: CAG
gatgatcaaagcttgagtac

SEQ ID NO: 84487 - DNA, 20 bp, Artificial Sequence
  Description of Artificial Sequence: Synthetic oligonucleotide
  Target: LAMA2; (-) strand; PAM type: NRG; PAM sequence: GAG
gcatctgatgatcaaagctt

SEQ ID NO: 84488 - DNA, 20 bp, Artificial Sequence
  Description of Artificial Sequence: Synthetic oligonucleotide
  Target: LAMA2; (-) strand; PAM type: NRG; PAM sequence: AAG
tctctagcatctgatgatca

SEQ ID NO: 84489 - DNA, 20 bp, Artificial Sequence
  Description of Artificial Sequence: Synthetic oligonucleotide
  Target: LAMA2; (-) strand; PAM type: NRG; PAM sequence: TAG
tgaatgggattctgtgtctc

SEQ ID NO: 84490 - DNA, 20 bp, Artificial Sequence
  Description of Artificial Sequence: Synthetic oligonucleotide
  Target: LAMA2; (-) strand; PAM type: NRG; PAM sequence: GGG
gcattgtaagacagttgaat

SEQ ID NO: 84491 - DNA, 20 bp, Artificial Sequence
  Description of Artificial Sequence: Synthetic oligonucleotide
  Target: LAMA2; (-) strand; PAM type: NRG; PAM sequence: TGG
ggcattgtaagacagttgaa

SEQ ID NO: 84492 - DNA, 20 bp, Artificial Sequence
  Description of Artificial Sequence: Synthetic oligonucleotide
  Target: LAMA2; (-) strand; PAM type: NRG; PAM sequence: CAG
acccttgaggcattgtaaga

SEQ ID NO: 84493 - DNA, 20 bp, Artificial Sequence
  Description of Artificial Sequence: Synthetic oligonucleotide
  Target: LAMA2; (-) strand; PAM type: NRG; PAM sequence: AAG
cgtcacccttgaggcattgt

SEQ ID NO: 84494 - DNA, 20 bp, Artificial Sequence
  Description of Artificial Sequence: Synthetic oligonucleotide
  Target: LAMA2; (-) strand; PAM type: NRG; PAM sequence: AGG
cctttctaacgtcacccttg

SEQ ID NO: 84495 - DNA, 20 bp, Artificial Sequence
  Description of Artificial Sequence: Synthetic oligonucleotide
  Target: LAMA2; (-) strand; PAM type: NRG; PAM sequence: GAG
ccctttctaacgtcaccctt

SEQ ID NO: 84496 - DNA, 20 bp, Artificial Sequence
  Description of Artificial Sequence: Synthetic oligonucleotide
  Target: LAMA2; (-) strand; PAM type: NRG; PAM sequence: AAG
ctgttgactttctggacaac

SEQ ID NO: 84497 - DNA, 20 bp, Artificial Sequence
  Description of Artificial Sequence: Synthetic oligonucleotide
  Target: LAMA2; (-) strand; PAM type: NRG; PAM sequence: TGG
ggtacaacctgttgactttc

SEQ ID NO: 84498 - DNA, 20 bp, Artificial Sequence
  Description of Artificial Sequence: Synthetic oligonucleotide
  Target: LAMA2; (-) strand; PAM type: NRG; PAM sequence: AGG
ttaaatgagaaatagaaacc

SEQ ID NO: 84499 - DNA, 20 bp, Artificial Sequence
  Description of Artificial Sequence: Synthetic oligonucleotide
  Target: LAMA2; (-) strand; PAM type: NRG; PAM sequence: CAG
gttaaatgagaaatagaaac

SEQ ID NO: 84500 - DNA, 20 bp, Artificial Sequence
  Description of Artificial Sequence: Synthetic oligonucleotide
  Target: LAMA2; (-) strand; PAM type: NRG; PAM sequence: TAG
tcccttagttaaatgagaaa

SEQ ID NO: 84501 - DNA, 20 bp, Artificial Sequence
  Description of Artificial Sequence: Synthetic oligonucleotide
  Target: LAMA2; (-) strand; PAM type: NRG; PAM sequence: GAG
tgcaattcccttagttaaat

SEQ ID NO: 84502 - DNA, 20 bp, Artificial Sequence
  Description of Artificial Sequence: Synthetic oligonucleotide
  Target: LAMA2; (-) strand; PAM type: NRG; PAM sequence: TAG
tggaatcactgcaattccct

SEQ ID NO: 84503 - DNA, 20 bp, Artificial Sequence
  Description of Artificial Sequence: Synthetic oligonucleotide
  Target: LAMA2; (-) strand; PAM type: NRG; PAM sequence: TGG
ctctgcttatcccaaagctg

SEQ ID NO: 84504 - DNA, 20 bp, Artificial Sequence
  Description of Artificial Sequence: Synthetic oligonucleotide
  Target: LAMA2; (-) strand; PAM type: NRG; PAM sequence: AAG
atttgactctgcttatccca

SEQ ID NO: 84505 - DNA, 20 bp, Artificial Sequence
  Description of Artificial Sequence: Synthetic oligonucleotide
  Target: LAMA2; (-) strand; PAM type: NRG; PAM sequence: TAG
tattttttaaaatttcttca

SEQ ID NO: 84506 - DNA, 20 bp, Artificial Sequence
  Description of Artificial Sequence: Synthetic oligonucleotide
  Target: LAMA2; (-) strand; PAM type: NRG; PAM sequence: TGG
atgctaagggtgactctatg

SEQ ID NO: 84507 - DNA, 20 bp, Artificial Sequence
  Description of Artificial Sequence: Synthetic oligonucleotide
  Target: LAMA2; (-) strand; PAM type: NRG; PAM sequence: GGG
gatgggaagcagaatgctaa

SEQ ID NO: 84508 - DNA, 20 bp, Artificial Sequence
  Description of Artificial Sequence: Synthetic oligonucleotide
  Target: LAMA2; (-) strand; PAM type: NRG; PAM sequence: AGG
tgatgggaagcagaatgcta

SEQ ID NO: 84509 - DNA, 20 bp, Artificial Sequence
  Description of Artificial Sequence: Synthetic oligonucleotide
  Target: LAMA2; (-) strand; PAM type: NRG; PAM sequence: AAG
gtgatgggaagcagaatgct

SEQ ID NO: 84510 - DNA, 20 bp, Artificial Sequence
  Description of Artificial Sequence: Synthetic oligonucleotide
  Target: LAMA2; (-) strand; PAM type: NRG; PAM sequence: CAG
atgttgtgggtgatgggaag

SEQ ID NO: 84511 - DNA, 20 bp, Artificial Sequence
  Description of Artificial Sequence: Synthetic oligonucleotide
  Target: LAMA2; (-) strand; PAM type: NRG; PAM sequence: AAG
ttcatgttgtgggtgatggg

SEQ ID NO: 84512 - DNA, 20 bp, Artificial Sequence
  Description of Artificial Sequence: Synthetic oligonucleotide
  Target: LAMA2; (-) strand; PAM type: NRG; PAM sequence: GGG
tgcttcatgttgtgggtgat

SEQ ID NO: 84513 - DNA, 20 bp, Artificial Sequence
  Description of Artificial Sequence: Synthetic oligonucleotide
  Target: LAMA2; (-) strand; PAM type: NRG; PAM sequence: TGG
ctgcttcatgttgtgggtga

SEQ ID NO: 84514 - DNA, 20 bp, Artificial Sequence
  Description of Artificial Sequence: Synthetic oligonucleotide
  Target: LAMA2; (-) strand; PAM type: NRG; PAM sequence: GGG
catgagctgcttcatgttgt

SEQ ID NO: 84515 - DNA, 20 bp, Artificial Sequence
  Description of Artificial Sequence: Synthetic oligonucleotide
  Target: LAMA2; (-) strand; PAM type: NRG; PAM sequence: TGG
gcatgagctgcttcatgttg

SEQ ID NO: 84516 - DNA, 20 bp, Artificial Sequence
  Description of Artificial Sequence: Synthetic oligonucleotide
  Target: LAMA2; (-) strand; PAM type: NRG; PAM sequence: GAG
ggaacctactagacatgcat

SEQ ID NO: 84517 - DNA, 20 bp, Artificial Sequence
  Description of Artificial Sequence: Synthetic oligonucleotide
  Target: LAMA2; (-) strand; PAM type: NRG; PAM sequence: TAG
accagctaccaggaacctac

SEQ ID NO: 84518 - DNA, 20 bp, Artificial Sequence
  Description of Artificial Sequence: Synthetic oligonucleotide
  Target: LAMA2; (-) strand; PAM type: NRG; PAM sequence: AGG
ggcttagggtaccagctacc

SEQ ID NO: 84519 - DNA, 20 bp, Artificial Sequence
  Description of Artificial Sequence: Synthetic oligonucleotide
  Target: LAMA2; (-) strand; PAM type: NRG; PAM sequence: CAG
gggcttagggtaccagctac

SEQ ID NO: 84520 - DNA, 20 bp, Artificial Sequence
  Description of Artificial Sequence: Synthetic oligonucleotide
  Target: LAMA2; (-) strand; PAM type: NRG; PAM sequence: CAG
ttactgagggcttagggtac

SEQ ID NO: 84521 - DNA, 20 bp, Artificial Sequence
  Description of Artificial Sequence: Synthetic oligonucleotide
  Target: LAMA2; (-) strand; PAM type: NRG; PAM sequence: GGG
cactgattactgagggctta

SEQ ID NO: 84522 - DNA, 20 bp, Artificial Sequence
  Description of Artificial Sequence: Synthetic oligonucleotide
  Target: LAMA2; (-) strand; PAM type: NRG; PAM sequence: AGG
acactgattactgagggctt

SEQ ID NO: 84523 - DNA, 20 bp, Artificial Sequence
  Description of Artificial Sequence: Synthetic oligonucleotide
  Target: LAMA2; (-) strand; PAM type: NRG; PAM sequence: TAG
aacactgattactgagggct

SEQ ID NO: 84524 - DNA, 20 bp, Artificial Sequence
  Description of Artificial Sequence: Synthetic oligonucleotide
  Target: LAMA2; (-) strand; PAM type: NRG; PAM sequence: GGG
gacaaaacactgattactga

SEQ ID NO: 84525 - DNA, 20 bp, Artificial Sequence
  Description of Artificial Sequence: Synthetic oligonucleotide
  Target: LAMA2; (-) strand; PAM type: NRG; PAM sequence: AGG
ggacaaaacactgattactg

SEQ ID NO: 84526 - DNA, 20 bp, Artificial Sequence
  Description of Artificial Sequence: Synthetic oligonucleotide
  Target: LAMA2; (-) strand; PAM type: NRG; PAM sequence: GAG
aggacaaaacactgattact

SEQ ID NO: 84527 - DNA, 20 bp, Artificial Sequence
  Description of Artificial Sequence: Synthetic oligonucleotide
  Target: LAMA2; (-) strand; PAM type: NRG; PAM sequence: AGG
ttaaagcatcctacctagtc

SEQ ID NO: 84528 - DNA, 20 bp, Artificial Sequence
  Description of Artificial Sequence: Synthetic oligonucleotide
  Target: LAMA2; (-) strand; PAM type: NRG; PAM sequence: CAG
tttaaagcatcctacctagt

SEQ ID NO: 84529 - DNA, 20 bp, Artificial Sequence
  Description of Artificial Sequence: Synthetic oligonucleotide
  Target: LAMA2; (-) strand; PAM type: NRG; PAM sequence: TAG
ctaatttaaagcatcctacc

SEQ ID NO: 84530 - DNA, 20 bp, Artificial Sequence
  Description of Artificial Sequence: Synthetic oligonucleotide
  Target: LAMA2; (-) strand; PAM type: NRG; PAM sequence: AAG
acagctacacctctaattta

SEQ ID NO: 84531 - DNA, 20 bp, Artificial Sequence
  Description of Artificial Sequence: Synthetic oligonucleotide
  Target: LAMA2; (-) strand; PAM type: NRG; PAM sequence: CAG
ttcagccaaggtcaggccta

SEQ ID NO: 84532 - DNA, 20 bp, Artificial Sequence
  Description of Artificial Sequence: Synthetic oligonucleotide
  Target: LAMA2; (-) strand; PAM type: NRG; PAM sequence: AGG
tttatgcttcagccaaggtc

SEQ ID NO: 84533 - DNA, 20 bp, Artificial Sequence
  Description of Artificial Sequence: Synthetic oligonucleotide
  Target: LAMA2; (-) strand; PAM type: NRG; PAM sequence: CAG
ctttatgcttcagccaaggt

SEQ ID NO: 84534 - DNA, 20 bp, Artificial Sequence
  Description of Artificial Sequence: Synthetic oligonucleotide
  Target: LAMA2; (-) strand; PAM type: NRG; PAM sequence: AGG
acatctttatgcttcagcca

SEQ ID NO: 84535 - DNA, 20 bp, Artificial Sequence
  Description of Artificial Sequence: Synthetic oligonucleotide
  Target: LAMA2; (-) strand; PAM type: NRG; PAM sequence: AAG
tacatctttatgcttcagcc

SEQ ID NO: 84536 - DNA, 20 bp, Artificial Sequence
  Description of Artificial Sequence: Synthetic oligonucleotide
  Target: LAMA2; (-) strand; PAM type: NRG; PAM sequence: CAG
gtttttacatctttatgctt

SEQ ID NO: 84537 - DNA, 20 bp, Artificial Sequence
  Description of Artificial Sequence: Synthetic oligonucleotide
  Target: LAMA2; (-) strand; PAM type: NRG; PAM sequence: GGG
gaaccttaaaggaggaatct

SEQ ID NO: 84538 - DNA, 20 bp, Artificial Sequence
  Description of Artificial Sequence: Synthetic oligonucleotide
  Target: LAMA2; (-) strand; PAM type: NRG; PAM sequence: TGG
ggaaccttaaaggaggaatc

SEQ ID NO: 84539 - DNA, 20 bp, Artificial Sequence
  Description of Artificial Sequence: Synthetic oligonucleotide
  Target: LAMA2; (-) strand; PAM type: NRG; PAM sequence: AGG
aatggaaggaaccttaaagg

SEQ ID NO: 84540 - DNA, 20 bp, Artificial Sequence
  Description of Artificial Sequence: Synthetic oligonucleotide
  Target: LAMA2; (-) strand; PAM type: NRG; PAM sequence: GAG
aaatggaaggaaccttaaag

SEQ ID NO: 84541 - DNA, 20 bp, Artificial Sequence
  Description of Artificial Sequence: Synthetic oligonucleotide
  Target: LAMA2; (-) strand; PAM type: NRG; PAM sequence: AGG
agaaatggaaggaaccttaa

SEQ ID NO: 84542 - DNA, 20 bp, Artificial Sequence
  Description of Artificial Sequence: Synthetic oligonucleotide
  Target: LAMA2; (-) strand; PAM type: NRG; PAM sequence: AAG
cagaaatggaaggaacctta

SEQ ID NO: 84543 - DNA, 20 bp, Artificial Sequence
  Description of Artificial Sequence: Synthetic oligonucleotide
  Target: LAMA2; (-) strand; PAM type: NRG; PAM sequence: AGG
atccctggcccagaaatgga

SEQ ID NO: 84544 - DNA, 20 bp, Artificial Sequence
  Description of Artificial Sequence: Synthetic oligonucleotide
  Target: LAMA2; (-) strand; PAM type: NRG; PAM sequence: AAG
gatccctggcccagaaatgg

SEQ ID NO: 84545 - DNA, 20 bp, Artificial Sequence
  Description of Artificial Sequence: Synthetic oligonucleotide
  Target: LAMA2; (-) strand; PAM type: NRG; PAM sequence: TGG
ctagatccctggcccagaaa

SEQ ID NO: 84546 - DNA, 20 bp, Artificial Sequence
  Description of Artificial Sequence: Synthetic oligonucleotide
  Target: LAMA2; (-) strand; PAM type: NRG; PAM sequence: CAG
tacagcctagatccctggcc

SEQ ID NO: 84547 - DNA, 20 bp, Artificial Sequence
  Description of Artificial Sequence: Synthetic oligonucleotide
  Target: LAMA2; (-) strand; PAM type: NRG; PAM sequence: TGG
ggacctacagcctagatccc

SEQ ID NO: 84548 - DNA, 20 bp, Artificial Sequence
  Description of Artificial Sequence: Synthetic oligonucleotide
  Target: LAMA2; (-) strand; PAM type: NRG; PAM sequence: TAG
tgctgtggggacctacagcc

SEQ ID NO: 84549 - DNA, 20 bp, Artificial Sequence
  Description of Artificial Sequence: Synthetic oligonucleotide
  Target: LAMA2; (-) strand; PAM type: NRG; PAM sequence: CAG
agaagtgctgtggggaccta

SEQ ID NO: 84550 - DNA, 20 bp, Artificial Sequence
  Description of Artificial Sequence: Synthetic oligonucleotide
  Target: LAMA2; (-) strand; PAM type: NRG; PAM sequence: GGG
atagggtcagaagtgctgtg

SEQ ID NO: 84551 - DNA, 20 bp, Artificial Sequence
  Description of Artificial Sequence: Synthetic oligonucleotide
  Target: LAMA2; (-) strand; PAM type: NRG; PAM sequence: GGG
gatagggtcagaagtgctgt

SEQ ID NO: 84552 - DNA, 20 bp, Artificial Sequence
  Description of Artificial Sequence: Synthetic oligonucleotide
  Target: LAMA2; (-) strand; PAM type: NRG; PAM sequence: TGG
agatagggtcagaagtgctg

SEQ ID NO: 84553 - DNA, 20 bp, Artificial Sequence
  Description of Artificial Sequence: Synthetic oligonucleotide
  Target: LAMA2; (-) strand; PAM type: NRG; PAM sequence: AAG
attccttcagatagggtcag

SEQ ID NO: 84554 - DNA, 20 bp, Artificial Sequence
  Description of Artificial Sequence: Synthetic oligonucleotide
  Target: LAMA2; (-) strand; PAM type: NRG; PAM sequence: CAG
tgtattccttcagatagggt

SEQ ID NO: 84555 - DNA, 20 bp, Artificial Sequence
  Description of Artificial Sequence: Synthetic oligonucleotide
  Target: LAMA2; (-) strand; PAM type: NRG; PAM sequence: GGG
tgtatgtattccttcagata

SEQ ID NO: 84556 - DNA, 20 bp, Artificial Sequence
  Description of Artificial Sequence: Synthetic oligonucleotide
  Target: LAMA2; (-) strand; PAM type: NRG; PAM sequence: AGG
ctgtatgtattccttcagat

SEQ ID NO: 84557 - DNA, 20 bp, Artificial Sequence
  Description of Artificial Sequence: Synthetic oligonucleotide
  Target: LAMA2; (-) strand; PAM type: NRG; PAM sequence: TAG
actgtatgtattccttcaga

SEQ ID NO: 84558 - DNA, 20 bp, Artificial Sequence
  Description of Artificial Sequence: Synthetic oligonucleotide
  Target: LAMA2; (-) strand; PAM type: NRG; PAM sequence: CAG
caatactgtatgtattcctt

SEQ ID NO: 84559 - DNA, 20 bp, Artificial Sequence
  Description of Artificial Sequence: Synthetic oligonucleotide
  Target: LAMA2; (-) strand; PAM type: NRG; PAM sequence: TGG
cttggtgctatgacaacacc

SEQ ID NO: 84560 - DNA, 20 bp, Artificial Sequence
  Description of Artificial Sequence: Synthetic oligonucleotide
  Target: LAMA2; (-) strand; PAM type: NRG; PAM sequence: TGG
atatttgaacccaccagcct

SEQ ID NO: 84561 - DNA, 20 bp, Artificial Sequence
  Description of Artificial Sequence: Synthetic oligonucleotide
  Target: LAMA2; (-) strand; PAM type: NRG; PAM sequence: CAG
ttaaggatatttgaacccac

SEQ ID NO: 84562 - DNA, 20 bp, Artificial Sequence
  Description of Artificial Sequence: Synthetic oligonucleotide
  Target: LAMA2; (-) strand; PAM type: NRG; PAM sequence: AGG
aatttctactttgaggctta

SEQ ID NO: 84563 - DNA, 20 bp, Artificial Sequence
  Description of Artificial Sequence: Synthetic oligonucleotide
  Target: LAMA2; (-) strand; PAM type: NRG; PAM sequence: AAG
aaatttctactttgaggctt

SEQ ID NO: 84564 - DNA, 20 bp, Artificial Sequence
  Description of Artificial Sequence: Synthetic oligonucleotide
  Target: LAMA2; (-) strand; PAM type: NRG; PAM sequence: AGG
tttttaaaatttctactttg

SEQ ID NO: 84565 - DNA, 20 bp, Artificial Sequence
  Description of Artificial Sequence: Synthetic oligonucleotide
  Target: LAMA2; (-) strand; PAM type: NRG; PAM sequence: GAG
ctttttaaaatttctacttt

SEQ ID NO: 84566 - DNA, 20 bp, Artificial Sequence
  Description of Artificial Sequence: Synthetic oligonucleotide
  Target: LAMA2; (-) strand; PAM type: NRG; PAM sequence: CAG
ctgaaaggtggtgtttcatt

SEQ ID NO: 84567 - DNA, 20 bp, Artificial Sequence
  Description of Artificial Sequence: Synthetic oligonucleotide
  Target: LAMA2; (-) strand; PAM type: NRG; PAM sequence: TGG
ctatgcaagtacctgaaagg

SEQ ID NO: 84568 - DNA, 20 bp, Artificial Sequence
  Description of Artificial Sequence: Synthetic oligonucleotide
  Target: LAMA2; (-) strand; PAM type: NRG; PAM sequence: AGG
aaactatgcaagtacctgaa

SEQ ID NO: 84569 - DNA, 20 bp, Artificial Sequence
  Description of Artificial Sequence: Synthetic oligonucleotide
  Target: LAMA2; (-) strand; PAM type: NRG; PAM sequence: AAG
gaaactatgcaagtacctga

SEQ ID NO: 84570 - DNA, 20 bp, Artificial Sequence
  Description of Artificial Sequence: Synthetic oligonucleotide
  Target: LAMA2; (-) strand; PAM type: NRG; PAM sequence: AAG
gaaaaagaaagaaactatgc

SEQ ID NO: 84571 - DNA, 20 bp, Artificial Sequence
  Description of Artificial Sequence: Synthetic oligonucleotide
  Target: LAMA2; (-) strand; PAM type: NRG; PAM sequence: AAG
gtaatgcagagggaaaaaga

SEQ ID NO: 84572 - DNA, 20 bp, Artificial Sequence
  Description of Artificial Sequence: Synthetic oligonucleotide
  Target: LAMA2; (-) strand; PAM type: NRG; PAM sequence: AAG
atttgtaatgcagagggaaa

SEQ ID NO: 84573 - DNA, 20 bp, Artificial Sequence
  Description of Artificial Sequence: Synthetic oligonucleotide
  Target: LAMA2; (-) strand; PAM type: NRG; PAM sequence: GGG
gtatgtatttgtaatgcaga

SEQ ID NO: 84574 - DNA, 20 bp, Artificial Sequence
  Description of Artificial Sequence: Synthetic oligonucleotide
  Target: LAMA2; (-) strand; PAM type: NRG; PAM sequence: AGG
cgtatgtatttgtaatgcag

SEQ ID NO: 84575 - DNA, 20 bp, Artificial Sequence
  Description of Artificial Sequence: Synthetic oligonucleotide
  Target: LAMA2; (-) strand; PAM type: NRG; PAM sequence: GAG
gcgtatgtatttgtaatgca

SEQ ID NO: 84576 - DNA, 20 bp, Artificial Sequence
  Description of Artificial Sequence: Synthetic oligonucleotide
  Target: LAMA2; (-) strand; PAM type: NRG; PAM sequence: CAG
ttgcgtatgtatttgtaatg

SEQ ID NO: 84577 - DNA, 20 bp, Artificial Sequence
  Description of Artificial Sequence: Synthetic oligonucleotide
  Target: LAMA2; (-) strand; PAM type: NRG; PAM sequence: AAG
ttggaaaaaacaacctgaaa

SEQ ID NO: 84578 - DNA, 20 bp, Artificial Sequence
  Description of Artificial Sequence: Synthetic oligonucleotide
  Target: LAMA2; (-) strand; PAM type: NRG; PAM sequence: TGG
tagtagtttattgttgcttt

SEQ ID NO: 84579 - DNA, 20 bp, Artificial Sequence
  Description of Artificial Sequence: Synthetic oligonucleotide
  Target: LAMA2; (-) strand; PAM type: NRG; PAM sequence: TAG
cgtattttttactccactag

SEQ ID NO: 84580 - DNA, 20 bp, Artificial Sequence
  Description of Artificial Sequence: Synthetic oligonucleotide
  Target: LAMA2; (-) strand; PAM type: NRG; PAM sequence: TAG
ttccgtattttttactccac

SEQ ID NO: 84581 - DNA, 20 bp, Artificial Sequence
  Description of Artificial Sequence: Synthetic oligonucleotide
  Target: LAMA2; (-) strand; PAM type: NRG; PAM sequence: CAG
taatcaaacagttggacttt

SEQ ID NO: 84582 - DNA, 20 bp, Artificial Sequence
  Description of Artificial Sequence: Synthetic oligonucleotide
  Target: LAMA2; (-) strand; PAM type: NRG; PAM sequence: TGG
catacacttaatcaaacagt

SEQ ID NO: 84583 - DNA, 20 bp, Artificial Sequence
  Description of Artificial Sequence: Synthetic oligonucleotide
  Target: LAMA2; (-) strand; PAM type: NRG; PAM sequence: CAG
ataacatacacttaatcaaa

SEQ ID NO: 84584 - DNA, 20 bp, Artificial Sequence
  Description of Artificial Sequence: Synthetic oligonucleotide
  Target: LAMA2; (-) strand; PAM type: NRG; PAM sequence: TGG
attcactcaaagtcatacaa

SEQ ID NO: 84585 - DNA, 20 bp, Artificial Sequence
  Description of Artificial Sequence: Synthetic oligonucleotide
  Target: LAMA2; (-) strand; PAM type: NRG; PAM sequence: AAG
taaaaatagaaattcactca

SEQ ID NO: 84586 - DNA, 20 bp, Artificial Sequence
  Description of Artificial Sequence: Synthetic oligonucleotide
  Target: LAMA2; (-) strand; PAM type: NRG; PAM sequence: TAG
aaataccactttcttaaaaa

SEQ ID NO: 84587 - DNA, 20 bp, Artificial Sequence
  Description of Artificial Sequence: Synthetic oligonucleotide
  Target: LAMA2; (-) strand; PAM type: NRG; PAM sequence: TGG
ctatgctttttaaaaaattg

SEQ ID NO: 84588 - DNA, 20 bp, Artificial Sequence
  Description of Artificial Sequence: Synthetic oligonucleotide
  Target: LAMA2; (-) strand; PAM type: NRG; PAM sequence: AGG
gatgtttctaggagtttcca

SEQ ID NO: 84589 - DNA, 20 bp, Artificial Sequence
  Description of Artificial Sequence: Synthetic oligonucleotide
  Target: LAMA2; (-) strand; PAM type: NRG; PAM sequence: AAG
tgatgtttctaggagtttcc

SEQ ID NO: 84590 - DNA, 20 bp, Artificial Sequence
  Description of Artificial Sequence: Synthetic oligonucleotide
  Target: LAMA2; (-) strand; PAM type: NRG; PAM sequence: GAG
tttttccttgatgtttctag

SEQ ID NO: 84591 - DNA, 20 bp, Artificial Sequence
  Description of Artificial Sequence: Synthetic oligonucleotide
  Target: LAMA2; (-) strand; PAM type: NRG; PAM sequence: AGG
tttttttccttgatgtttct

SEQ ID NO: 84592 - DNA, 20 bp, Artificial Sequence
  Description of Artificial Sequence: Synthetic oligonucleotide
  Target: LAMA2; (-) strand; PAM type: NRG; PAM sequence: TAG
ttttttttccttgatgtttc

SEQ ID NO: 84593 - DNA, 20 bp, Artificial Sequence
  Description of Artificial Sequence: Synthetic oligonucleotide
  Target: LAMA2; (-) strand; PAM type: NRG; PAM sequence: AGG
catattatatgtactcacat

SEQ ID NO: 84594 - DNA, 20 bp, Artificial Sequence
  Description of Artificial Sequence: Synthetic oligonucleotide
  Target: LAMA2; (-) strand; PAM type: NRG; PAM sequence: TAG
acatattatatgtactcaca

SEQ ID NO: 84595 - DNA, 20 bp, Artificial Sequence
  Description of Artificial Sequence: Synthetic oligonucleotide
  Target: LAMA2; (-) strand; PAM type: NRG; PAM sequence: TAG
ctgagcattatgaatatcat

SEQ ID NO: 84596 - DNA, 20 bp, Artificial Sequence
  Description of Artificial Sequence: Synthetic oligonucleotide
  Target: LAMA2; (-) strand; PAM type: NRG; PAM sequence: GAG
aaacatttagaaaaaaacct

SEQ ID NO: 84597 - DNA, 20 bp, Artificial Sequence
  Description of Artificial Sequence: Synthetic oligonucleotide
  Target: LAMA2; (-) strand; PAM type: NRG; PAM sequence: TAG
aaaaccaaaccacaaacatt

SEQ ID NO: 84598 - DNA, 20 bp, Artificial Sequence
  Description of Artificial Sequence: Synthetic oligonucleotide
  Target: LAMA2; (-) strand; PAM type: NRG; PAM sequence: TGG
ttcctggtcgtgtccacttt

SEQ ID NO: 84599 - DNA, 20 bp, Artificial Sequence
  Description of Artificial Sequence: Synthetic oligonucleotide
  Target: LAMA2; (-) strand; PAM type: NRG; PAM sequence: TGG
gcttttctctttcatgttcc

SEQ ID NO: 84600 - DNA, 20 bp, Artificial Sequence
  Description of Artificial Sequence: Synthetic oligonucleotide
  Target: LAMA2; (-) strand; PAM type: NRG; PAM sequence: CAG
aatttttaaaaaatatctat

SEQ ID NO: 84601 - DNA, 20 bp, Artificial Sequence
  Description of Artificial Sequence: Synthetic oligonucleotide
  Target: LAMA2; (-) strand; PAM type: NRG; PAM sequence: CAG
tgtatcttagagaaaacaca

SEQ ID NO: 84602 - DNA, 20 bp, Artificial Sequence
  Description of Artificial Sequence: Synthetic oligonucleotide
  Target: LAMA2; (-) strand; PAM type: NRG; PAM sequence: GAG
cactcatatcttgtatctta

SEQ ID NO: 84603 - DNA, 20 bp, Artificial Sequence
  Description of Artificial Sequence: Synthetic oligonucleotide
  Target: LAMA2; (-) strand; PAM type: NRG; PAM sequence: TAG
gccactcatatcttgtatct

SEQ ID NO: 84604 - DNA, 20 bp, Artificial Sequence
  Description of Artificial Sequence: Synthetic oligonucleotide
  Target: LAMA2; (-) strand; PAM type: NRG; PAM sequence: CAG
caggaaggtcagtcagatac

SEQ ID NO: 84605 - DNA, 20 bp, Artificial Sequence
  Description of Artificial Sequence: Synthetic oligonucleotide
  Target: LAMA2; (-) strand; PAM type: NRG; PAM sequence: CAG
atgcggccaggaaggtcagt

SEQ ID NO: 84606 - DNA, 20 bp, Artificial Sequence
  Description of Artificial Sequence: Synthetic oligonucleotide
  Target: LAMA2; (-) strand; PAM type: NRG; PAM sequence: CAG
tcgaatgcggccaggaaggt

SEQ ID NO: 84607 - DNA, 20 bp, Artificial Sequence
  Description of Artificial Sequence: Synthetic oligonucleotide
  Target: LAMA2; (-) strand; PAM type: NRG; PAM sequence: AGG
ccactcgaatgcggccagga

SEQ ID NO: 84608 - DNA, 20 bp, Artificial Sequence
  Description of Artificial Sequence: Synthetic oligonucleotide
  Target: LAMA2; (-) strand; PAM type: NRG; PAM sequence: AAG
gccactcgaatgcggccagg

SEQ ID NO: 84609 - DNA, 20 bp, Artificial Sequence
  Description of Artificial Sequence: Synthetic oligonucleotide
  Target: LAMA2; (-) strand; PAM type: NRG; PAM sequence: AGG
ggagccactcgaatgcggcc

SEQ ID NO: 84610 - DNA, 20 bp, Artificial Sequence
  Description of Artificial Sequence: Synthetic oligonucleotide
  Target: LAMA2; (-) strand; PAM type: NRG; PAM sequence: CAG
gggagccactcgaatgcggc

SEQ ID NO: 84611 - DNA, 20 bp, Artificial Sequence
  Description of Artificial Sequence: Synthetic oligonucleotide
  Target: LAMA2; (-) strand; PAM type: NRG; PAM sequence: CGG
gctggggagccactcgaatg

SEQ ID NO: 84612 - DNA, 20 bp, Artificial Sequence
  Description of Artificial Sequence: Synthetic oligonucleotide
  Target: LAMA2; (-) strand; PAM type: NRG; PAM sequence: GAG
gtccaagtcgtcctgctggg

SEQ ID NO: 84613 - DNA, 20 bp, Artificial Sequence
  Description of Artificial Sequence: Synthetic oligonucleotide
  Target: LAMA2; (-) strand; PAM type: NRG; PAM sequence: GGG
gagtccaagtcgtcctgctg

SEQ ID NO: 84614 - DNA, 20 bp, Artificial Sequence
  Description of Artificial Sequence: Synthetic oligonucleotide
  Target: LAMA2; (-) strand; PAM type: NRG; PAM sequence: GGG
tgagtccaagtcgtcctgct

SEQ ID NO: 84615 - DNA, 20 bp, Artificial Sequence
  Description of Artificial Sequence: Synthetic oligonucleotide
  Target: LAMA2; (-) strand; PAM type: NRG; PAM sequence: TGG
gtgagtccaagtcgtcctgc

SEQ ID NO: 84616 - DNA, 20 bp, Artificial Sequence
  Description of Artificial Sequence: Synthetic oligonucleotide
  Target: LAMA2; (-) strand; PAM type: NRG; PAM sequence: AAG
tgatctgctgaggtgagtcc

SEQ ID NO: 84617 - DNA, 20 bp, Artificial Sequence
  Description of Artificial Sequence: Synthetic oligonucleotide
  Target: LAMA2; (-) strand; PAM type: NRG; PAM sequence: GAG
tgatgctgatctgctgaggt

SEQ ID NO: 84618 - DNA, 20 bp, Artificial Sequence
  Description of Artificial Sequence: Synthetic oligonucleotide
  Target: LAMA2; (-) strand; PAM type: NRG; PAM sequence: AGG
ttactgatgctgatctgctg

SEQ ID NO: 84619 - DNA, 20 bp, Artificial Sequence
  Description of Artificial Sequence: Synthetic oligonucleotide
  Target: LAMA2; (-) strand; PAM type: NRG; PAM sequence: GAG
gttactgatgctgatctgct

SEQ ID NO: 84620 - DNA, 20 bp, Artificial Sequence
  Description of Artificial Sequence: Synthetic oligonucleotide
  Target: LAMA2; (-) strand; PAM type: NRG; PAM sequence: GGG
gctgtgcggcagggcttgcc

SEQ ID NO: 84621 - DNA, 20 bp, Artificial Sequence
  Description of Artificial Sequence: Synthetic oligonucleotide
  Target: LAMA2; (-) strand; PAM type: NRG; PAM sequence: CGG
agctgtgcggcagggcttgc

SEQ ID NO: 84622 - DNA, 20 bp, Artificial Sequence
  Description of Artificial Sequence: Synthetic oligonucleotide
  Target: LAMA2; (-) strand; PAM type: NRG; PAM sequence: GGG
ccagtagtagctgtgcggca

SEQ ID NO: 84623 - DNA, 20 bp, Artificial Sequence
  Description of Artificial Sequence: Synthetic oligonucleotide
  Target: LAMA2; (-) strand; PAM type: NRG; PAM sequence: AGG
tccagtagtagctgtgcggc

SEQ ID NO: 84624 - DNA, 20 bp, Artificial Sequence
  Description of Artificial Sequence: Synthetic oligonucleotide
  Target: LAMA2; (-) strand; PAM type: NRG; PAM sequence: CAG
ctccagtagtagctgtgcgg

SEQ ID NO: 84625 - DNA, 20 bp, Artificial Sequence
  Description of Artificial Sequence: Synthetic oligonucleotide
  Target: LAMA2; (-) strand; PAM type: NRG; PAM sequence: CGG
gcgctccagtagtagctgtg

SEQ ID NO: 84626 - DNA, 20 bp, Artificial Sequence
  Description of Artificial Sequence: Synthetic oligonucleotide
  Target: LAMA2; (-) strand; PAM type: NRG; PAM sequence: TAG
gagccggcgcgctccagtag

SEQ ID NO: 84627 - DNA, 20 bp, Artificial Sequence
  Description of Artificial Sequence: Synthetic oligonucleotide
  Target: LAMA2; (-) strand; PAM type: NRG; PAM sequence: TAG
agggagccggcgcgctccag

SEQ ID NO: 84628 - DNA, 20 bp, Artificial Sequence
  Description of Artificial Sequence: Synthetic oligonucleotide
  Target: LAMA2; (-) strand; PAM type: NRG; PAM sequence: CAG
gatagggagccggcgcgctc

SEQ ID NO: 84629 - DNA, 20 bp, Artificial Sequence
  Description of Artificial Sequence: Synthetic oligonucleotide
  Target: LAMA2; (-) strand; PAM type: NRG; PAM sequence: CGG
ttgtttcccagatagggagc

SEQ ID NO: 84630 - DNA, 20 bp, Artificial Sequence
  Description of Artificial Sequence: Synthetic oligonucleotide
  Target: LAMA2; (-) strand; PAM type: NRG; PAM sequence: GAG
tactttgtttcccagatagg

SEQ ID NO: 84631 - DNA, 20 bp, Artificial Sequence
  Description of Artificial Sequence: Synthetic oligonucleotide
  Target: LAMA2; (-) strand; PAM type: NRG; PAM sequence: GGG
cttactttgtttcccagata

SEQ ID NO: 84632 - DNA, 20 bp, Artificial Sequence
  Description of Artificial Sequence: Synthetic oligonucleotide
  Target: LAMA2; (-) strand; PAM type: NRG; PAM sequence: AGG
acttactttgtttcccagat

SEQ ID NO: 84633 - DNA, 20 bp, Artificial Sequence
  Description of Artificial Sequence: Synthetic oligonucleotide
  Target: LAMA2; (-) strand; PAM type: NRG; PAM sequence: TAG
gacttactttgtttcccaga

SEQ ID NO: 84634 - DNA, 20 bp, Artificial Sequence
  Description of Artificial Sequence: Synthetic oligonucleotide
  Target: LAMA2; (-) strand; PAM type: NRG; PAM sequence: CAG
cgtggacttactttgtttcc

SEQ ID NO: 84635 - DNA, 20 bp, Artificial Sequence
  Description of Artificial Sequence: Synthetic oligonucleotide
  Target: LAMA2; (-) strand; PAM type: NRG; PAM sequence: TGG
agaatagcgggaagcaagcg

SEQ ID NO: 84636 - DNA, 20 bp, Artificial Sequence
  Description of Artificial Sequence: Synthetic oligonucleotide
  Target: LAMA2; (-) strand; PAM type: NRG; PAM sequence: AAG
aaagcagaatagcgggaagc

SEQ ID NO: 84637 - DNA, 20 bp, Artificial Sequence
  Description of Artificial Sequence: Synthetic oligonucleotide
  Target: LAMA2; (-) strand; PAM type: NRG; PAM sequence: AAG
agttaaagcagaatagcggg

SEQ ID NO: 84638 - DNA, 20 bp, Artificial Sequence
  Description of Artificial Sequence: Synthetic oligonucleotide
  Target: LAMA2; (-) strand; PAM type: NRG; PAM sequence: GGG
gtcagttaaagcagaatagc

SEQ ID NO: 84639 - DNA, 20 bp, Artificial Sequence
  Description of Artificial Sequence: Synthetic oligonucleotide
  Target: LAMA2; (-) strand; PAM type: NRG; PAM sequence: CGG
agtcagttaaagcagaatag

SEQ ID NO: 84640 - DNA, 20 bp, Artificial Sequence
  Description of Artificial Sequence: Synthetic oligonucleotide
  Target: LAMA2; (-) strand; PAM type: NRG; PAM sequence: TAG
atcagtcagttaaagcagaa

SEQ ID NO: 84641 - DNA, 20 bp, Artificial Sequence
  Description of Artificial Sequence: Synthetic oligonucleotide
  Target: LAMA2; (-) strand; PAM type: NRG; PAM sequence: CAG
tcacgatcagtcagttaaag

SEQ ID NO: 84642 - DNA, 20 bp, Artificial Sequence
  Description of Artificial Sequence: Synthetic oligonucleotide
  Target: LAMA2; (-) strand; PAM type: NRG; PAM sequence: AAG
ttctcacgatcagtcagtta

SEQ ID NO: 84643 - DNA, 20 bp, Artificial Sequence
  Description of Artificial Sequence: Synthetic oligonucleotide
  Target: LAMA2; (-) strand; PAM type: NRG; PAM sequence: CAG
aacccattctcacgatcagt

SEQ ID NO: 84644 - DNA, 20 bp, Artificial Sequence
  Description of Artificial Sequence: Synthetic oligonucleotide
  Target: LAMA2; (-) strand; PAM type: NRG; PAM sequence: CAG
ctaaaacccattctcacgat

SEQ ID NO: 84645 - DNA, 20 bp, Artificial Sequence
  Description of Artificial Sequence: Synthetic oligonucleotide
  Target: LAMA2; (-) strand; PAM type: NRG; PAM sequence: AAG
ttgattttgtctttctttaa

SEQ ID NO: 84646 - DNA, 20 bp, Artificial Sequence
  Description of Artificial Sequence: Synthetic oligonucleotide
  Target: LAMA2; (-) strand; PAM type: NRG; PAM sequence: CAG
ctggttctggcaatccaatt

SEQ ID NO: 84647 - DNA, 20 bp, Artificial Sequence
  Description of Artificial Sequence: Synthetic oligonucleotide
  Target: LAMA2; (-) strand; PAM type: NRG; PAM sequence: TGG
caatgtgatttagctggttc

SEQ ID NO: 84648 - DNA, 20 bp, Artificial Sequence
  Description of Artificial Sequence: Synthetic oligonucleotide
  Target: LAMA2; (-) strand; PAM type: NRG; PAM sequence: TGG
ccaactcaatgtgatttagc

SEQ ID NO: 84649 - DNA, 20 bp, Artificial Sequence
  Description of Artificial Sequence: Synthetic oligonucleotide
  Target: LAMA2; (-) strand; PAM type: NRG; PAM sequence: TAG
acgcccaactcaatgtgatt

SEQ ID NO: 84650 - DNA, 20 bp, Artificial Sequence
  Description of Artificial Sequence: Synthetic oligonucleotide
  Target: LAMA2; (-) strand; PAM type: NRG; PAM sequence: AAG
taaggtcttgtgcaacatgg

SEQ ID NO: 84651 - DNA, 20 bp, Artificial Sequence
  Description of Artificial Sequence: Synthetic oligonucleotide
  Target: LAMA2; (-) strand; PAM type: NRG; PAM sequence: TGG
ctttaaggtcttgtgcaaca

SEQ ID NO: 84652 - DNA, 20 bp, Artificial Sequence
  Description of Artificial Sequence: Synthetic oligonucleotide
  Target: LAMA2; (-) strand; PAM type: NRG; PAM sequence: AGG
aaggatgccgtggctcttta

SEQ ID NO: 84653 - DNA, 20 bp, Artificial Sequence
  Description of Artificial Sequence: Synthetic oligonucleotide
  Target: LAMA2; (-) strand; PAM type: NRG; PAM sequence: AAG
taaggatgccgtggctcttt

SEQ ID NO: 84654 - DNA, 20 bp, Artificial Sequence
  Description of Artificial Sequence: Synthetic oligonucleotide
  Target: LAMA2; (-) strand; PAM type: NRG; PAM sequence: TGG
gttgcatattaaggatgccg

SEQ ID NO: 84655 - DNA, 20 bp, Artificial Sequence
  Description of Artificial Sequence: Synthetic oligonucleotide
  Target: LAMA2; (-) strand; PAM type: NRG; PAM sequence: AGG
ctatacaaagttgcatatta

SEQ ID NO: 84656 - DNA, 20 bp, Artificial Sequence
  Description of Artificial Sequence: Synthetic oligonucleotide
  Target: LAMA2; (-) strand; PAM type: NRG; PAM sequence: AAG
gctatacaaagttgcatatt

SEQ ID NO: 84657 - DNA, 20 bp, Artificial Sequence
  Description of Artificial Sequence: Synthetic oligonucleotide
  Target: LAMA2; (-) strand; PAM type: NRG; PAM sequence: AAG
catagaacatcagctataca

SEQ ID NO: 84658 - DNA, 20 bp, Artificial Sequence
  Description of Artificial Sequence: Synthetic oligonucleotide
  Target: LAMA2; (-) strand; PAM type: NRG; PAM sequence: CAG
aaaaagtttacatagaacat

SEQ ID NO: 84659 - DNA, 20 bp, Artificial Sequence
  Description of Artificial Sequence: Synthetic oligonucleotide
  Target: LAMA2; (-) strand; PAM type: NRG; PAM sequence: TAG
gcccattcaaaaagtttaca

SEQ ID NO: 84660 - DNA, 20 bp, Artificial Sequence
  Description of Artificial Sequence: Synthetic oligonucleotide
  Target: LAMA2; (-) strand; PAM type: NRG; PAM sequence: AAG
aatttatttgcccattcaaa

SEQ ID NO: 84661 - DNA, 20 bp, Artificial Sequence
  Description of Artificial Sequence: Synthetic oligonucleotide
  Target: LAMA2; (-) strand; PAM type: NRG; PAM sequence: CGG
gctttacgaaaatacactag

SEQ ID NO: 84662 - DNA, 20 bp, Artificial Sequence
  Description of Artificial Sequence: Synthetic oligonucleotide
  Target: LAMA2; (-) strand; PAM type: NRG; PAM sequence: TAG
tttgctttacgaaaatacac

SEQ ID NO: 84663 - DNA, 20 bp, Artificial Sequence
  Description of Artificial Sequence: Synthetic oligonucleotide
  Target: LAMA2; (-) strand; PAM type: NRG; PAM sequence: CAG
cttttcacataaacacaaca

SEQ ID NO: 84664 - DNA, 20 bp, Artificial Sequence
  Description of Artificial Sequence: Synthetic oligonucleotide
  Target: LAMA2; (-) strand; PAM type: NRG; PAM sequence: CAG
ccacagacaactccagaaaa

SEQ ID NO: 84665 - DNA, 20 bp, Artificial Sequence
  Description of Artificial Sequence: Synthetic oligonucleotide
  Target: LAMA2; (-) strand; PAM type: NRG; PAM sequence: CAG
tatcccaccacagacaactc

SEQ ID NO: 84666 - DNA, 20 bp, Artificial Sequence
  Description of Artificial Sequence: Synthetic oligonucleotide
  Target: LAMA2; (-) strand; PAM type: NRG; PAM sequence: CAG
ctttagtaagtatcccacca

SEQ ID NO: 84667 - DNA, 20 bp, Artificial Sequence
  Description of Artificial Sequence: Synthetic oligonucleotide
  Target: LAMA2; (-) strand; PAM type: NRG; PAM sequence: AAG
ccgatgagaaaaactttagt

SEQ ID NO: 84668 - DNA, 20 bp, Artificial Sequence
  Description of Artificial Sequence: Synthetic oligonucleotide
  Target: LAMA2; (-) strand; PAM type: NRG; PAM sequence: TAG
gaaaccgatgagaaaaactt

SEQ ID NO: 84669 - DNA, 20 bp, Artificial Sequence
  Description of Artificial Sequence: Synthetic oligonucleotide
  Target: LAMA2; (-) strand; PAM type: NRG; PAM sequence: GAG
gaaatgaaatagaaaccgat

SEQ ID NO: 84670 - DNA, 20 bp, Artificial Sequence
  Description of Artificial Sequence: Synthetic oligonucleotide
  Target: LAMA2; (-) strand; PAM type: NRG; PAM sequence: TAG
gtatcagttttgaaatgaaa

SEQ ID NO: 84671 - DNA, 20 bp, Artificial Sequence
  Description of Artificial Sequence: Synthetic oligonucleotide
  Target: LAMA2; (-) strand; PAM type: NRG; PAM sequence: CAG
aaagtaaatctcctgagtat

SEQ ID NO: 84672 - DNA, 20 bp, Artificial Sequence
  Description of Artificial Sequence: Synthetic oligonucleotide
  Target: LAMA2; (-) strand; PAM type: NRG; PAM sequence: GAG
gaaggaaaagtaaatctcct

SEQ ID NO: 84673 - DNA, 20 bp, Artificial Sequence
  Description of Artificial Sequence: Synthetic oligonucleotide
  Target: LAMA2; (-) strand; PAM type: NRG; PAM sequence: AAG
ttcatatcaggtagaaggaa

SEQ ID NO: 84674 - DNA, 20 bp, Artificial Sequence
  Description of Artificial Sequence: Synthetic oligonucleotide
  Target: LAMA2; (-) strand; PAM type: NRG; PAM sequence: AGG
taacattcatatcaggtaga

SEQ ID NO: 84675 - DNA, 20 bp, Artificial Sequence
  Description of Artificial Sequence: Synthetic oligonucleotide
  Target: LAMA2; (-) strand; PAM type: NRG; PAM sequence: AAG
ttaacattcatatcaggtag

SEQ ID NO: 84676 - DNA, 20 bp, Artificial Sequence
  Description of Artificial Sequence: Synthetic oligonucleotide
  Target: LAMA2; (-) strand; PAM type: NRG; PAM sequence: TAG
caattaacattcatatcagg

SEQ ID NO: 84677 - DNA, 20 bp, Artificial Sequence
  Description of Artificial Sequence: Synthetic oligonucleotide
  Target: LAMA2; (-) strand; PAM type: NRG; PAM sequence: AGG
ttccaattaacattcatatc

SEQ ID NO: 84678 - DNA, 20 bp, Artificial Sequence
  Description of Artificial Sequence: Synthetic oligonucleotide
  Target: LAMA2; (-) strand; PAM type: NRG; PAM sequence: CAG
tttccaattaacattcatat

SEQ ID NO: 84679 - DNA, 20 bp, Artificial Sequence
  Description of Artificial Sequence: Synthetic oligonucleotide
  Target: LAMA2; (-) strand; PAM type: NRG; PAM sequence: TAG
cctcatggcaagcatttaat

SEQ ID NO: 84680 - DNA, 20 bp, Artificial Sequence
  Description of Artificial Sequence: Synthetic oligonucleotide
  Target: LAMA2; (-) strand; PAM type: NRG; PAM sequence: AAG
gtttacataagcctcatggc

SEQ ID NO: 84681 - DNA, 20 bp, Artificial Sequence
  Description of Artificial Sequence: Synthetic oligonucleotide
  Target: LAMA2; (-) strand; PAM type: NRG; PAM sequence: TGG
tgttgtttacataagcctca

SEQ ID NO: 84682 - DNA, 20 bp, Artificial Sequence
  Description of Artificial Sequence: Synthetic oligonucleotide
  Target: LAMA2; (-) strand; PAM type: NRG; PAM sequence: AAG
agcaaatatgttgtttacat

SEQ ID NO: 84683 - DNA, 20 bp, Artificial Sequence
  Description of Artificial Sequence: Synthetic oligonucleotide
  Target: LAMA2; (-) strand; PAM type: NRG; PAM sequence: CAG
ggtagtttctgcctgagctc

SEQ ID NO: 84684 - DNA, 20 bp, Artificial Sequence
  Description of Artificial Sequence: Synthetic oligonucleotide
  Target: LAMA2; (-) strand; PAM type: NRG; PAM sequence: GAG
ttttagggtagtttctgcct

SEQ ID NO: 84685 - DNA, 20 bp, Artificial Sequence
  Description of Artificial Sequence: Synthetic oligonucleotide
  Target: LAMA2; (-) strand; PAM type: NRG; PAM sequence: TAG
ccaatctggcacttttaggg

SEQ ID NO: 84686 - DNA, 20 bp, Artificial Sequence
  Description of Artificial Sequence: Synthetic oligonucleotide
  Target: LAMA2; (-) strand; PAM type: NRG; PAM sequence: GGG
cttccaatctggcactttta

SEQ ID NO: 84687 - DNA, 20 bp, Artificial Sequence
  Description of Artificial Sequence: Synthetic oligonucleotide
  Target: LAMA2; (-) strand; PAM type: NRG; PAM sequence: AGG
gcttccaatctggcactttt

SEQ ID NO: 84688 - DNA, 20 bp, Artificial Sequence
  Description of Artificial Sequence: Synthetic oligonucleotide
  Target: LAMA2; (-) strand; PAM type: NRG; PAM sequence: TAG
tgcttccaatctggcacttt

SEQ ID NO: 84689 - DNA, 20 bp, Artificial Sequence
  Description of Artificial Sequence: Synthetic oligonucleotide
  Target: LAMA2; (-) strand; PAM type: NRG; PAM sequence: TGG
aaacaaacgtgcttccaatc

SEQ ID NO: 84690 - DNA, 20 bp, Artificial Sequence
  Description of Artificial Sequence: Synthetic oligonucleotide
  Target: LAMA2; (-) strand; PAM type: NRG; PAM sequence: GGG
gtatgtttttacatatgtgt

SEQ ID NO: 84691 - DNA, 20 bp, Artificial Sequence
  Description of Artificial Sequence: Synthetic oligonucleotide
  Target: LAMA2; (-) strand; PAM type: NRG; PAM sequence: TGG
tgtatgtttttacatatgtg

SEQ ID NO: 84692 - DNA, 20 bp, Artificial Sequence
  Description of Artificial Sequence: Synthetic oligonucleotide
  Target: LAMA2; (-) strand; PAM type: NRG; PAM sequence: AGG
aaaataagcctgtatttctg

SEQ ID NO: 84693 - DNA, 20 bp, Artificial Sequence
  Description of Artificial Sequence: Synthetic oligonucleotide
  Target: LAMA2; (-) strand; PAM type: NRG; PAM sequence: GAG
aaaaataagcctgtatttct

SEQ ID NO: 84694 - DNA, 20 bp, Artificial Sequence
  Description of Artificial Sequence: Synthetic oligonucleotide
  Target: LAMA2; (-) strand; PAM type: NRG; PAM sequence: AAG
aatccacaacagaaaaaaat

SEQ ID NO: 84695 - DNA, 20 bp, Artificial Sequence
  Description of Artificial Sequence: Synthetic oligonucleotide
  Target: LAMA2; (-) strand; PAM type: NRG; PAM sequence: CAG
tagatagaagtaatccacaa

SEQ ID NO: 84696 - DNA, 20 bp, Artificial Sequence
  Description of Artificial Sequence: Synthetic oligonucleotide
  Target: LAMA2; (-) strand; PAM type: NRG; PAM sequence: AAG
caggatatctatctagatag

SEQ ID NO: 84697 - DNA, 20 bp, Artificial Sequence
  Description of Artificial Sequence: Synthetic oligonucleotide
  Target: LAMA2; (-) strand; PAM type: NRG; PAM sequence: TAG
ccccaggatatctatctaga

SEQ ID NO: 84698 - DNA, 20 bp, Artificial Sequence
  Description of Artificial Sequence: Synthetic oligonucleotide
  Target: LAMA2; (-) strand; PAM type: NRG; PAM sequence: TAG
taaaccccaggatatctatc

SEQ ID NO: 84699 - DNA, 20 bp, Artificial Sequence
  Description of Artificial Sequence: Synthetic oligonucleotide
  Target: LAMA2; (-) strand; PAM type: NRG; PAM sequence: AGG
aaaataaaattctaaacccc

SEQ ID NO: 84700 - DNA, 20 bp, Artificial Sequence
  Description of Artificial Sequence: Synthetic oligonucleotide
  Target: LAMA2; (-) strand; PAM type: NRG; PAM sequence: CAG
taaaataaaattctaaaccc

SEQ ID NO: 84701 - DNA, 20 bp, Artificial Sequence
  Description of Artificial Sequence: Synthetic oligonucleotide
  Target: LAMA2; (-) strand; PAM type: NRG; PAM sequence: AAG
tttccaacaaagtattaggc

SEQ ID NO: 84702 - DNA, 20 bp, Artificial Sequence
  Description of Artificial Sequence: Synthetic oligonucleotide
  Target: LAMA2; (-) strand; PAM type: NRG; PAM sequence: AGG
tttgtttccaacaaagtatt

SEQ ID NO: 84703 - DNA, 20 bp, Artificial Sequence
  Description of Artificial Sequence: Synthetic oligonucleotide
  Target: LAMA2; (-) strand; PAM type: NRG; PAM sequence: TAG
ttttgtttccaacaaagtat

SEQ ID NO: 84704 - DNA, 20 bp, Artificial Sequence
  Description of Artificial Sequence: Synthetic oligonucleotide
  Target: LAMA2; (-) strand; PAM type: NRG; PAM sequence: AAG
accaaattttgtttccaaca

SEQ ID NO: 84705 - DNA, 20 bp, Artificial Sequence
  Description of Artificial Sequence: Synthetic oligonucleotide
  Target: LAMA2; (-) strand; PAM type: NRG; PAM sequence: AAG
aagtattcacgtttataaat

SEQ ID NO: 84706 - DNA, 20 bp, Artificial Sequence
  Description of Artificial Sequence: Synthetic oligonucleotide
  Target: LAMA2; (-) strand; PAM type: NRG; PAM sequence: AAG
ttaactttcacagaacaagc

SEQ ID NO: 84707 - DNA, 20 bp, Artificial Sequence
  Description of Artificial Sequence: Synthetic oligonucleotide
  Target: LAMA2; (-) strand; PAM type: NRG; PAM sequence: AAG
ggtattaactttcacagaac

SEQ ID NO: 84708 - DNA, 20 bp, Artificial Sequence
  Description of Artificial Sequence: Synthetic oligonucleotide
  Target: LAMA2; (-) strand; PAM type: NRG; PAM sequence: CAG
tgagaaggtattaactttca

SEQ ID NO: 84709 - DNA, 20 bp, Artificial Sequence
  Description of Artificial Sequence: Synthetic oligonucleotide
  Target: LAMA2; (-) strand; PAM type: NRG; PAM sequence: AGG
attttaactatcagctgaga

SEQ ID NO: 84710 - DNA, 20 bp, Artificial Sequence
  Description of Artificial Sequence: Synthetic oligonucleotide
  Target: LAMA2; (-) strand; PAM type: NRG; PAM sequence: AAG
tattttaactatcagctgag

SEQ ID NO: 84711 - DNA, 20 bp, Artificial Sequence
  Description of Artificial Sequence: Synthetic oligonucleotide
  Target: LAMA2; (-) strand; PAM type: NRG; PAM sequence: GAG
aggtattttaactatcagct

SEQ ID NO: 84712 - DNA, 20 bp, Artificial Sequence
  Description of Artificial Sequence: Synthetic oligonucleotide
  Target: LAMA2; (-) strand; PAM type: NRG; PAM sequence: CAG
tgatcaggtattttaactat

SEQ ID NO: 84713 - DNA, 20 bp, Artificial Sequence
  Description of Artificial Sequence: Synthetic oligonucleotide
  Target: LAMA2; (-) strand; PAM type: NRG; PAM sequence: AGG
tcacaccttctggtgtgatc

SEQ ID NO: 84714 - DNA, 20 bp, Artificial Sequence
  Description of Artificial Sequence: Synthetic oligonucleotide
  Target: LAMA2; (-) strand; PAM type: NRG; PAM sequence: CAG
atcacaccttctggtgtgat

SEQ ID NO: 84715 - DNA, 20 bp, Artificial Sequence
  Description of Artificial Sequence: Synthetic oligonucleotide
  Target: LAMA2; (-) strand; PAM type: NRG; PAM sequence: TGG
gattttcccatcacaccttc

SEQ ID NO: 84716 - DNA, 20 bp, Artificial Sequence
  Description of Artificial Sequence: Synthetic oligonucleotide
  Target: LAMA2; (-) strand; PAM type: NRG; PAM sequence: GGG
aaacaacattaatttaggaa

SEQ ID NO: 84717 - DNA, 20 bp, Artificial Sequence
  Description of Artificial Sequence: Synthetic oligonucleotide
  Target: LAMA2; (-) strand; PAM type: NRG; PAM sequence: AGG
taaacaacattaatttagga

SEQ ID NO: 84718 - DNA, 20 bp, Artificial Sequence
  Description of Artificial Sequence: Synthetic oligonucleotide
  Target: LAMA2; (-) strand; PAM type: NRG; PAM sequence: AAG
ttaaacaacattaatttagg

SEQ ID NO: 84719 - DNA, 20 bp, Artificial Sequence
  Description of Artificial Sequence: Synthetic oligonucleotide
  Target: LAMA2; (-) strand; PAM type: NRG; PAM sequence: AGG
ggcttaaacaacattaattt

SEQ ID NO: 84720 - DNA, 20 bp, Artificial Sequence
  Description of Artificial Sequence: Synthetic oligonucleotide
  Target: LAMA2; (-) strand; PAM type: NRG; PAM sequence: TAG
aggcttaaacaacattaatt

SEQ ID NO: 84721 - DNA, 20 bp, Artificial Sequence
  Description of Artificial Sequence: Synthetic oligonucleotide
  Target: LAMA2; (-) strand; PAM type: NRG; PAM sequence: AGG
tattttgttaggtgtaaact

SEQ ID NO: 84722 - DNA, 20 bp, Artificial Sequence
  Description of Artificial Sequence: Synthetic oligonucleotide
  Target: LAMA2; (-) strand; PAM type: NRG; PAM sequence: TAG
atattttgttaggtgtaaac

SEQ ID NO: 84723 - DNA, 20 bp, Artificial Sequence
  Description of Artificial Sequence: Synthetic oligonucleotide
  Target: LAMA2; (-) strand; PAM type: NRG; PAM sequence: AGG
aaataatgctatattttgtt

SEQ ID NO: 84724 - DNA, 20 bp, Artificial Sequence
  Description of Artificial Sequence: Synthetic oligonucleotide
  Target: LAMA2; (-) strand; PAM type: NRG; PAM sequence: TAG
taaataatgctatattttgt

SEQ ID NO: 84725 - DNA, 20 bp, Artificial Sequence
  Description of Artificial Sequence: Synthetic oligonucleotide
  Target: LAMA2; (-) strand; PAM type: NRG; PAM sequence: AAG
tcaatactcacatgtcatgc

SEQ ID NO: 84726 - DNA, 20 bp, Artificial Sequence
  Description of Artificial Sequence: Synthetic oligonucleotide
  Target: LAMA2; (-) strand; PAM type: NRG; PAM sequence: AAG
tgagtagcatatgagatact

SEQ ID NO: 84727 - DNA, 20 bp, Artificial Sequence
  Description of Artificial Sequence: Synthetic oligonucleotide
  Target: LAMA2; (-) strand; PAM type: NRG; PAM sequence: GAG
ccattcactgagtagcatat

SEQ ID NO: 84728 - DNA, 20 bp, Artificial Sequence
  Description of Artificial Sequence: Synthetic oligonucleotide
  Target: LAMA2; (-) strand; PAM type: NRG; PAM sequence: TAG
accagttcccattcactgag

SEQ ID NO: 84729 - DNA, 20 bp, Artificial Sequence
  Description of Artificial Sequence: Synthetic oligonucleotide
  Target: LAMA2; (-) strand; PAM type: NRG; PAM sequence: GAG
accaccagttcccattcact

SEQ ID NO: 84730 - DNA, 20 bp, Artificial Sequence
  Description of Artificial Sequence: Synthetic oligonucleotide
  Target: LAMA2; (-) strand; PAM type: NRG; PAM sequence: CAG
tttcaaccagccaacaccac

SEQ ID NO: 84731 - DNA, 20 bp, Artificial Sequence
  Description of Artificial Sequence: Synthetic oligonucleotide
  Target: LAMA2; (-) strand; PAM type: NRG; PAM sequence: CAG
taagttaaaagtgtttcaac

SEQ ID NO: 84732 - DNA, 20 bp, Artificial Sequence
  Description of Artificial Sequence: Synthetic oligonucleotide
  Target: LAMA2; (-) strand; PAM type: NRG; PAM sequence: AAG
agaaactggccataagttaa

SEQ ID NO: 84733 - DNA, 20 bp, Artificial Sequence
  Description of Artificial Sequence: Synthetic oligonucleotide
  Target: LAMA2; (-) strand; PAM type: NRG; PAM sequence: AAG
aaatataagaaactggccat

SEQ ID NO: 84734 - DNA, 20 bp, Artificial Sequence
  Description of Artificial Sequence: Synthetic oligonucleotide
  Target: LAMA2; (-) strand; PAM type: NRG; PAM sequence: TGG
ttctgttaaatataagaaac

SEQ ID NO: 84735 - DNA, 20 bp, Artificial Sequence
  Description of Artificial Sequence: Synthetic oligonucleotide
  Target: LAMA2; (-) strand; PAM type: NRG; PAM sequence: AAG
ttcagagttctgttaaatat

SEQ ID NO: 84736 - DNA, 20 bp, Artificial Sequence
  Description of Artificial Sequence: Synthetic oligonucleotide
  Target: LAMA2; (-) strand; PAM type: NRG; PAM sequence: GAG
attttttgtaatagcattca

SEQ ID NO: 84737 - DNA, 20 bp, Artificial Sequence
  Description of Artificial Sequence: Synthetic oligonucleotide
  Target: LAMA2; (-) strand; PAM type: NRG; PAM sequence: CAG
acattttttgtaatagcatt

SEQ ID NO: 84738 - DNA, 20 bp, Artificial Sequence
  Description of Artificial Sequence: Synthetic oligonucleotide
  Target: LAMA2; (-) strand; PAM type: NRG; PAM sequence: TAG
catttacacattttttgtaa

SEQ ID NO: 84739 - DNA, 20 bp, Artificial Sequence
  Description of Artificial Sequence: Synthetic oligonucleotide
  Target: LAMA2; (-) strand; PAM type: NRG; PAM sequence: TAG
tgttcattgaaaatgtcttt

SEQ ID NO: 84740 - DNA, 20 bp, Artificial Sequence
  Description of Artificial Sequence: Synthetic oligonucleotide
  Target: LAMA2; (-) strand; PAM type: NRG; PAM sequence: CAG
ttaattcgatttttatttta

SEQ ID NO: 84741 - DNA, 20 bp, Artificial Sequence
  Description of Artificial Sequence: Synthetic oligonucleotide
  Target: LAMA2; (-) strand; PAM type: NRG; PAM sequence: AAG
gtaaagggccttgcaaataa

SEQ ID NO: 84742 - DNA, 20 bp, Artificial Sequence
  Description of Artificial Sequence: Synthetic oligonucleotide
  Target: LAMA2; (-) strand; PAM type: NRG; PAM sequence: GGG
aaatgacttcttgctgtaaa

SEQ ID NO: 84743 - DNA, 20 bp, Artificial Sequence
  Description of Artificial Sequence: Synthetic oligonucleotide
  Target: LAMA2; (-) strand; PAM type: NRG; PAM sequence: AGG
aaaatgacttcttgctgtaa

SEQ ID NO: 84744 - DNA, 20 bp, Artificial Sequence
  Description of Artificial Sequence: Synthetic oligonucleotide
  Target: LAMA2; (-) strand; PAM type: NRG; PAM sequence: AAG
taaaatgacttcttgctgta

SEQ ID NO: 84745 - DNA, 20 bp, Artificial Sequence
  Description of Artificial Sequence: Synthetic oligonucleotide
  Target: LAMA2; (-) strand; PAM type: NRG; PAM sequence: AGG
cagagtttcctaaatagaat

SEQ ID NO: 84746 - DNA, 20 bp, Artificial Sequence
  Description of Artificial Sequence: Synthetic oligonucleotide
  Target: LAMA2; (-) strand; PAM type: NRG; PAM sequence: TAG
ccagagtttcctaaatagaa

SEQ ID NO: 84747 - DNA, 20 bp, Artificial Sequence
  Description of Artificial Sequence: Synthetic oligonucleotide
  Target: LAMA2; (-) strand; PAM type: NRG; PAM sequence: TAG
gaataccagagtttcctaaa

SEQ ID NO: 84748 - DNA, 20 bp, Artificial Sequence
  Description of Artificial Sequence: Synthetic oligonucleotide
  Target: LAMA2; (-) strand; PAM type: NRG; PAM sequence: GAG
ttgttcttttgggaatacca

SEQ ID NO: 84749 - DNA, 20 bp, Artificial Sequence
  Description of Artificial Sequence: Synthetic oligonucleotide
  Target: LAMA2; (-) strand; PAM type: NRG; PAM sequence: CAG
ttttgttcttttgggaatac

SEQ ID NO: 84750 - DNA, 20 bp, Artificial Sequence
  Description of Artificial Sequence: Synthetic oligonucleotide
  Target: LAMA2; (-) strand; PAM type: NRG; PAM sequence: GGG
atgtgctgttttgttctttt

SEQ ID NO: 84751 - DNA, 20 bp, Artificial Sequence
  Description of Artificial Sequence: Synthetic oligonucleotide
  Target: LAMA2; (-) strand; PAM type: NRG; PAM sequence: TGG
tatgtgctgttttgttcttt

SEQ ID NO: 84752 - DNA, 20 bp, Artificial Sequence
  Description of Artificial Sequence: Synthetic oligonucleotide
  Target: LAMA2; (-) strand; PAM type: NRG; PAM sequence: AAG
attttaagcagtagaaattc

SEQ ID NO: 84753 - DNA, 20 bp, Artificial Sequence
  Description of Artificial Sequence: Synthetic oligonucleotide
  Target: LAMA2; (-) strand; PAM type: NRG; PAM sequence: TAG
tttttggcaattttaagcag

SEQ ID NO: 84754 - DNA, 20 bp, Artificial Sequence
  Description of Artificial Sequence: Synthetic oligonucleotide
  Target: LAMA2; (-) strand; PAM type: NRG; PAM sequence: CAG
atttttttggcaattttaag

SEQ ID NO: 84755 - DNA, 20 bp, Artificial Sequence
  Description of Artificial Sequence: Synthetic oligonucleotide
  Target: LAMA2; (-) strand; PAM type: NRG; PAM sequence: AAG
tatatttttttggcaatttt

SEQ ID NO: 84756 - DNA, 20 bp, Artificial Sequence
  Description of Artificial Sequence: Synthetic oligonucleotide
  Target: LAMA2; (-) strand; PAM type: NRG; PAM sequence: TGG
agtatatttttatatttttt

SEQ ID NO: 84757 - DNA, 20 bp, Artificial Sequence
  Description of Artificial Sequence: Synthetic oligonucleotide
  Target: LAMA2; (-) strand; PAM type: NRG; PAM sequence: CAG
ttgttttttttttaaattga

SEQ ID NO: 84758 - DNA, 20 bp, Artificial Sequence
  Description of Artificial Sequence: Synthetic oligonucleotide
  Target: LAMA2; (-) strand; PAM type: NRG; PAM sequence: CAG
aaggctcttcttggagctct

SEQ ID NO: 84759 - DNA, 20 bp, Artificial Sequence
  Description of Artificial Sequence: Synthetic oligonucleotide
  Target: LAMA2; (-) strand; PAM type: NRG; PAM sequence: GAG
ttgacctaaggctcttcttg

SEQ ID NO: 84760 - DNA, 20 bp, Artificial Sequence
  Description of Artificial Sequence: Synthetic oligonucleotide
  Target: LAMA2; (-) strand; PAM type: NRG; PAM sequence: TGG
ttttgacctaaggctcttct

SEQ ID NO: 84761 - DNA, 20 bp, Artificial Sequence
  Description of Artificial Sequence: Synthetic oligonucleotide
  Target: LAMA2; (-) strand; PAM type: NRG; PAM sequence: AGG
attcatccaattttgaccta

SEQ ID NO: 84762 - DNA, 20 bp, Artificial Sequence
  Description of Artificial Sequence: Synthetic oligonucleotide
  Target: LAMA2; (-) strand; PAM type: NRG; PAM sequence: AAG
aattcatccaattttgacct

SEQ ID NO: 84763 - DNA, 20 bp, Artificial Sequence
  Description of Artificial Sequence: Synthetic oligonucleotide
  Target: LAMA2; (-) strand; PAM type: NRG; PAM sequence: AGG
ttgccatcatataagaaata

SEQ ID NO: 84764 - DNA, 20 bp, Artificial Sequence
  Description of Artificial Sequence: Synthetic oligonucleotide
  Target: LAMA2; (-) strand; PAM type: NRG; PAM sequence: AAG
gttgccatcatataagaaat

SEQ ID NO: 84765 - DNA, 20 bp, Artificial Sequence
  Description of Artificial Sequence: Synthetic oligonucleotide
  Target: LAMA2; (-) strand; PAM type: NRG; PAM sequence: AAG
attaagtgttgccatcatat

SEQ ID NO: 84766 - DNA, 20 bp, Artificial Sequence
  Description of Artificial Sequence: Synthetic oligonucleotide
  Target: LAMA2; (-) strand; PAM type: NRG; PAM sequence: AAG
tattataagctactttaatt

SEQ ID NO: 84767 - DNA, 20 bp, Artificial Sequence
  Description of Artificial Sequence: Synthetic oligonucleotide
  Target: LAMA2; (-) strand; PAM type: NRG; PAM sequence: AAG
gtaaagaatatttctattat

SEQ ID NO: 84768 - DNA, 20 bp, Artificial Sequence
  Description of Artificial Sequence: Synthetic oligonucleotide
  Target: LAMA2; (-) strand; PAM type: NRG; PAM sequence: AAG
aaaggatggaaaatctggta

SEQ ID NO: 84769 - DNA, 20 bp, Artificial Sequence
  Description of Artificial Sequence: Synthetic oligonucleotide
  Target: LAMA2; (-) strand; PAM type: NRG; PAM sequence: TGG
agaagaaaggatggaaaatc

SEQ ID NO: 84770 - DNA, 20 bp, Artificial Sequence
  Description of Artificial Sequence: Synthetic oligonucleotide
  Target: LAMA2; (-) strand; PAM type: NRG; PAM sequence: TGG
tatgaccaaagaagaaagga

SEQ ID NO: 84771 - DNA, 20 bp, Artificial Sequence
  Description of Artificial Sequence: Synthetic oligonucleotide
  Target: LAMA2; (-) strand; PAM type: NRG; PAM sequence: AGG
tgcatatgaccaaagaagaa

SEQ ID NO: 84772 - DNA, 20 bp, Artificial Sequence
  Description of Artificial Sequence: Synthetic oligonucleotide
  Target: LAMA2; (-) strand; PAM type: NRG; PAM sequence: AAG
atgcatatgaccaaagaaga

SEQ ID NO: 84773 - DNA, 20 bp, Artificial Sequence
  Description of Artificial Sequence: Synthetic oligonucleotide
  Target: LAMA2; (-) strand; PAM type: NRG; PAM sequence: AAG
aaaaatgcatatgaccaaag

SEQ ID NO: 84774 - DNA, 20 bp, Artificial Sequence
  Description of Artificial Sequence: Synthetic oligonucleotide
  Target: LAMA2; (-) strand; PAM type: NRG; PAM sequence: AAG
aaaaaaaatgcatatgacca

SEQ ID NO: 84775 - DNA, 20 bp, Artificial Sequence
  Description of Artificial Sequence: Synthetic oligonucleotide
  Target: LAMA2; (-) strand; PAM type: NRG; PAM sequence: CAG
tcagtttgattgtcagccaa

SEQ ID NO: 84776 - DNA, 20 bp, Artificial Sequence
  Description of Artificial Sequence: Synthetic oligonucleotide
  Target: LAMA2; (-) strand; PAM type: NRG; PAM sequence: CAG
ccttctgtcagtttgattgt

SEQ ID NO: 84777 - DNA, 20 bp, Artificial Sequence
  Description of Artificial Sequence: Synthetic oligonucleotide
  Target: LAMA2; (-) strand; PAM type: NRG; PAM sequence: CAG
tttgcttgctttccttctgt

SEQ ID NO: 84778 - DNA, 20 bp, Artificial Sequence
  Description of Artificial Sequence: Synthetic oligonucleotide
  Target: LAMA2; (-) strand; PAM type: NRG; PAM sequence: GGG
gggaaccaacaactactaat

SEQ ID NO: 84779 - DNA, 20 bp, Artificial Sequence
  Description of Artificial Sequence: Synthetic oligonucleotide
  Target: LAMA2; (-) strand; PAM type: NRG; PAM sequence: TGG
cgggaaccaacaactactaa

SEQ ID NO: 84780 - DNA, 20 bp, Artificial Sequence
  Description of Artificial Sequence: Synthetic oligonucleotide
  Target: LAMA2; (-) strand; PAM type: NRG; PAM sequence: GGG
ggataagggaagttatcttc

SEQ ID NO: 84781 - DNA, 20 bp, Artificial Sequence
  Description of Artificial Sequence: Synthetic oligonucleotide
  Target: LAMA2; (-) strand; PAM type: NRG; PAM sequence: CGG
aggataagggaagttatctt

SEQ ID NO: 84782 - DNA, 20 bp, Artificial Sequence
  Description of Artificial Sequence: Synthetic oligonucleotide
  Target: LAMA2; (-) strand; PAM type: NRG; PAM sequence: AAG
tatttcagccaggataaggg

SEQ ID NO: 84783 - DNA, 20 bp, Artificial Sequence
  Description of Artificial Sequence: Synthetic oligonucleotide
  Target: LAMA2; (-) strand; PAM type: NRG; PAM sequence: GGG
aaatatttcagccaggataa

SEQ ID NO: 84784 - DNA, 20 bp, Artificial Sequence
  Description of Artificial Sequence: Synthetic oligonucleotide
  Target: LAMA2; (-) strand; PAM type: NRG; PAM sequence: AGG
aaaatatttcagccaggata

SEQ ID NO: 84785 - DNA, 20 bp, Artificial Sequence
  Description of Artificial Sequence: Synthetic oligonucleotide
  Target: LAMA2; (-) strand; PAM type: NRG; PAM sequence: AAG
aaaaatatttcagccaggat

SEQ ID NO: 84786 - DNA, 20 bp, Artificial Sequence
  Description of Artificial Sequence: Synthetic oligonucleotide
  Target: LAMA2; (-) strand; PAM type: NRG; PAM sequence: AGG
ataagaaaaatatttcagcc

SEQ ID NO: 84787 - DNA, 20 bp, Artificial Sequence
  Description of Artificial Sequence: Synthetic oligonucleotide
  Target: LAMA2; (-) strand; PAM type: NRG; PAM sequence: CAG
tataagaaaaatatttcagc

SEQ ID NO: 84788 - DNA, 20 bp, Artificial Sequence
  Description of Artificial Sequence: Synthetic oligonucleotide
  Target: LAMA2; (-) strand; PAM type: NRG; PAM sequence: CAG
gggttataagaaaaatattt

SEQ ID NO: 84789 - DNA, 20 bp, Artificial Sequence
  Description of Artificial Sequence: Synthetic oligonucleotide
  Target: LAMA2; (-) strand; PAM type: NRG; PAM sequence: AAG
agagcttcactgtgggttat

SEQ ID NO: 84790 - DNA, 20 bp, Artificial Sequence
  Description of Artificial Sequence: Synthetic oligonucleotide
  Target: LAMA2; (-) strand; PAM type: NRG; PAM sequence: GGG
aatatgaagagcttcactgt

SEQ ID NO: 84791 - DNA, 20 bp, Artificial Sequence
  Description of Artificial Sequence: Synthetic oligonucleotide
  Target: LAMA2; (-) strand; PAM type: NRG; PAM sequence: TGG
gaatatgaagagcttcactg

SEQ ID NO: 84792 - DNA, 20 bp, Artificial Sequence
  Description of Artificial Sequence: Synthetic oligonucleotide
  Target: LAMA2; (-) strand; PAM type: NRG; PAM sequence: GAG
gatcggtaggggaatatgaa

SEQ ID NO: 84793 - DNA, 20 bp, Artificial Sequence
  Description of Artificial Sequence: Synthetic oligonucleotide
  Target: LAMA2; (-) strand; PAM type: NRG; PAM sequence: AAG
atgatcggtaggggaatatg

SEQ ID NO: 84794 - DNA, 20 bp, Artificial Sequence
  Description of Artificial Sequence: Synthetic oligonucleotide
  Target: LAMA2; (-) strand; PAM type: NRG; PAM sequence: GGG
gatgtgaaaatgatcggtag

SEQ ID NO: 84795 - DNA, 20 bp, Artificial Sequence
  Description of Artificial Sequence: Synthetic oligonucleotide
  Target: LAMA2; (-) strand; PAM type: NRG; PAM sequence: GGG
tgatgtgaaaatgatcggta

SEQ ID NO: 84796 - DNA, 20 bp, Artificial Sequence
  Description of Artificial Sequence: Synthetic oligonucleotide
  Target: LAMA2; (-) strand; PAM type: NRG; PAM sequence: AGG
ttgatgtgaaaatgatcggt

SEQ ID NO: 84797 - DNA, 20 bp, Artificial Sequence
  Description of Artificial Sequence: Synthetic oligonucleotide
  Target: LAMA2; (-) strand; PAM type: NRG; PAM sequence: TAG
tttgatgtgaaaatgatcgg

SEQ ID NO: 84798 - DNA, 20 bp, Artificial Sequence
  Description of Artificial Sequence: Synthetic oligonucleotide
  Target: LAMA2; (-) strand; PAM type: NRG; PAM sequence: CGG
tgttttgatgtgaaaatgat

SEQ ID NO: 84799 - DNA, 20 bp, Artificial Sequence
  Description of Artificial Sequence: Synthetic oligonucleotide
  Target: LAMA2; (-) strand; PAM type: NRG; PAM sequence: CAG
aacggcagtacaggcaagaa

SEQ ID NO: 84800 - DNA, 20 bp, Artificial Sequence
  Description of Artificial Sequence: Synthetic oligonucleotide
  Target: LAMA2; (-) strand; PAM type: NRG; PAM sequence: AAG
atggaaacggcagtacaggc

SEQ ID NO: 84801 - DNA, 20 bp, Artificial Sequence
  Description of Artificial Sequence: Synthetic oligonucleotide
  Target: LAMA2; (-) strand; PAM type: NRG; PAM sequence: AGG
ctgaatggaaacggcagtac

SEQ ID NO: 84802 - DNA, 20 bp, Artificial Sequence
  Description of Artificial Sequence: Synthetic oligonucleotide
  Target: LAMA2; (-) strand; PAM type: NRG; PAM sequence: CAG
actgaatggaaacggcagta

SEQ ID NO: 84803 - DNA, 20 bp, Artificial Sequence
  Description of Artificial Sequence: Synthetic oligonucleotide
  Target: LAMA2; (-) strand; PAM type: NRG; PAM sequence: CAG
tgttcactgaatggaaacgg

SEQ ID NO: 84804 - DNA, 20 bp, Artificial Sequence
  Description of Artificial Sequence: Synthetic oligonucleotide
  Target: LAMA2; (-) strand; PAM type: NRG; PAM sequence: CGG
ttttgttcactgaatggaaa

SEQ ID NO: 84805 - DNA, 20 bp, Artificial Sequence
  Description of Artificial Sequence: Synthetic oligonucleotide
  Target: LAMA2; (-) strand; PAM type: NRG; PAM sequence: TGG
atgttattttgttcactgaa

SEQ ID NO: 84806 - DNA, 20 bp, Artificial Sequence
  Description of Artificial Sequence: Synthetic oligonucleotide
  Target: LAMA2; (-) strand; PAM type: NRG; PAM sequence: GGG
gcctgacagtaaaccaccaa

SEQ ID NO: 84807 - DNA, 20 bp, Artificial Sequence
  Description of Artificial Sequence: Synthetic oligonucleotide
  Target: LAMA2; (-) strand; PAM type: NRG; PAM sequence: AGG
tgcctgacagtaaaccacca

SEQ ID NO: 84808 - DNA, 20 bp, Artificial Sequence
  Description of Artificial Sequence: Synthetic oligonucleotide
  Target: LAMA2; (-) strand; PAM type: NRG; PAM sequence: AAG
atgcctgacagtaaaccacc

SEQ ID NO: 84809 - DNA, 20 bp, Artificial Sequence
  Description of Artificial Sequence: Synthetic oligonucleotide
  Target: LAMA2; (-) strand; PAM type: NRG; PAM sequence: CAG
attcatactgagatgcctga

SEQ ID NO: 84810 - DNA, 20 bp, Artificial Sequence
  Description of Artificial Sequence: Synthetic oligonucleotide
  Target: LAMA2; (-) strand; PAM type: NRG; PAM sequence: GAG
caaattgtttcattcatact

SEQ ID NO: 84811 - DNA, 20 bp, Artificial Sequence
  Description of Artificial Sequence: Synthetic oligonucleotide
  Target: LAMA2; (-) strand; PAM type: NRG; PAM sequence: AGG
tttacatggttcagttatta

SEQ ID NO: 84812 - DNA, 20 bp, Artificial Sequence
  Description of Artificial Sequence: Synthetic oligonucleotide
  Target: LAMA2; (-) strand; PAM type: NRG; PAM sequence: AAG
atttacatggttcagttatt

SEQ ID NO: 84813 - DNA, 20 bp, Artificial Sequence
  Description of Artificial Sequence: Synthetic oligonucleotide
  Target: LAMA2; (-) strand; PAM type: NRG; PAM sequence: CAG
tatcaaaaatttacatggtt

SEQ ID NO: 84814 - DNA, 20 bp, Artificial Sequence
  Description of Artificial Sequence: Synthetic oligonucleotide
  Target: LAMA2; (-) strand; PAM type: NRG; PAM sequence: TGG
tgtagtatcaaaaatttaca

SEQ ID NO: 84815 - DNA, 20 bp, Artificial Sequence
  Description of Artificial Sequence: Synthetic oligonucleotide
  Target: LAMA2; (-) strand; PAM type: NRG; PAM sequence: TAG
gagagcttgcagtattattg

SEQ ID NO: 84816 - DNA, 20 bp, Artificial Sequence
  Description of Artificial Sequence: Synthetic oligonucleotide
  Target: LAMA2; (-) strand; PAM type: NRG; PAM sequence: CAG
tggtaatttctgagagcttg

SEQ ID NO: 84817 - DNA, 20 bp, Artificial Sequence
  Description of Artificial Sequence: Synthetic oligonucleotide
  Target: LAMA2; (-) strand; PAM type: NRG; PAM sequence: GAG
tgtactgtggtaatttctga

SEQ ID NO: 84818 - DNA, 20 bp, Artificial Sequence
  Description of Artificial Sequence: Synthetic oligonucleotide
  Target: LAMA2; (-) strand; PAM type: NRG; PAM sequence: GAG
gatgtactgtggtaatttct

SEQ ID NO: 84819 - DNA, 20 bp, Artificial Sequence
  Description of Artificial Sequence: Synthetic oligonucleotide
  Target: LAMA2; (-) strand; PAM type: NRG; PAM sequence: TGG
atgacagttaagatgtactg

SEQ ID NO: 84820 - DNA, 20 bp, Artificial Sequence
  Description of Artificial Sequence: Synthetic oligonucleotide
  Target: LAMA2; (-) strand; PAM type: NRG; PAM sequence: AAG
cgtgatgtgacatgacagtt

SEQ ID NO: 84821 - DNA, 20 bp, Artificial Sequence
  Description of Artificial Sequence: Synthetic oligonucleotide
  Target: LAMA2; (-) strand; PAM type: NRG; PAM sequence: CAG
atttacgtgatgtgacatga

SEQ ID NO: 84822 - DNA, 20 bp, Artificial Sequence
  Description of Artificial Sequence: Synthetic oligonucleotide
  Target: LAMA2; (-) strand; PAM type: NRG; PAM sequence: AAG
gatattaaatcaaccaagct

SEQ ID NO: 84823 - DNA, 20 bp, Artificial Sequence
  Description of Artificial Sequence: Synthetic oligonucleotide
  Target: LAMA2; (-) strand; PAM type: NRG; PAM sequence: AAG
agcaagatattaaatcaacc

SEQ ID NO: 84824 - DNA, 20 bp, Artificial Sequence
  Description of Artificial Sequence: Synthetic oligonucleotide
  Target: LAMA2; (-) strand; PAM type: NRG; PAM sequence: AAG
caattttccacttccttagc

SEQ ID NO: 84825 - DNA, 20 bp, Artificial Sequence
  Description of Artificial Sequence: Synthetic oligonucleotide
  Target: LAMA2; (-) strand; PAM type: NRG; PAM sequence: TAG
cctacaattttccacttcct

SEQ ID NO: 84826 - DNA, 20 bp, Artificial Sequence
  Description of Artificial Sequence: Synthetic oligonucleotide
  Target: LAMA2; (-) strand; PAM type: NRG; PAM sequence: AGG
ctttattgaatttaccaaca

SEQ ID NO: 84827 - DNA, 20 bp, Artificial Sequence
  Description of Artificial Sequence: Synthetic oligonucleotide
  Target: LAMA2; (-) strand; PAM type: NRG; PAM sequence: AAG
gctttattgaatttaccaac

SEQ ID NO: 84828 - DNA, 20 bp, Artificial Sequence
  Description of Artificial Sequence: Synthetic oligonucleotide
  Target: LAMA2; (-) strand; PAM type: NRG; PAM sequence: TGG
gcctcaactatttagaaaag

SEQ ID NO: 84829 - DNA, 20 bp, Artificial Sequence
  Description of Artificial Sequence: Synthetic oligonucleotide
  Target: LAMA2; (-) strand; PAM type: NRG; PAM sequence: AAG
ttagcctcaactatttagaa

SEQ ID NO: 84830 - DNA, 20 bp, Artificial Sequence
  Description of Artificial Sequence: Synthetic oligonucleotide
  Target: LAMA2; (-) strand; PAM type: NRG; PAM sequence: TAG
agaatttagcctcaactatt

SEQ ID NO: 84831 - DNA, 20 bp, Artificial Sequence
  Description of Artificial Sequence: Synthetic oligonucleotide
  Target: LAMA2; (-) strand; PAM type: NRG; PAM sequence: TAG
gcaattactggtaaagaatt

SEQ ID NO: 84832 - DNA, 20 bp, Artificial Sequence
  Description of Artificial Sequence: Synthetic oligonucleotide
  Target: LAMA2; (-) strand; PAM type: NRG; PAM sequence: AAG
tcgaacagcaattactggta

SEQ ID NO: 84833 - DNA, 20 bp, Artificial Sequence
  Description of Artificial Sequence: Synthetic oligonucleotide
  Target: LAMA2; (-) strand; PAM type: NRG; PAM sequence: TGG
ctgattcgaacagcaattac

SEQ ID NO: 84834 - DNA, 20 bp, Artificial Sequence
  Description of Artificial Sequence: Synthetic oligonucleotide
  Target: LAMA2; (-) strand; PAM type: NRG; PAM sequence: CAG
ggcaatggttctgattcgaa

SEQ ID NO: 84835 - DNA, 20 bp, Artificial Sequence
  Description of Artificial Sequence: Synthetic oligonucleotide
  Target: LAMA2; (-) strand; PAM type: NRG; PAM sequence: TGG
tttctgtcagattctggcaa

SEQ ID NO: 84836 - DNA, 20 bp, Artificial Sequence
  Description of Artificial Sequence: Synthetic oligonucleotide
  Target: LAMA2; (-) strand; PAM type: NRG; PAM sequence: TGG
acgctatttctgtcagattc

SEQ ID NO: 84837 - DNA, 20 bp, Artificial Sequence
  Description of Artificial Sequence: Synthetic oligonucleotide
  Target: LAMA2; (-) strand; PAM type: NRG; PAM sequence: CAG
tcttgatacgctatttctgt

SEQ ID NO: 84838 - DNA, 20 bp, Artificial Sequence
  Description of Artificial Sequence: Synthetic oligonucleotide
  Target: LAMA2; (-) strand; PAM type: NRG; PAM sequence: CAG
aataaaattcaatatttaag

SEQ ID NO: 84839 - DNA, 20 bp, Artificial Sequence
  Description of Artificial Sequence: Synthetic oligonucleotide
  Target: LAMA2; (-) strand; PAM type: NRG; PAM sequence: AAG
gtaaataaaattcaatattt

SEQ ID NO: 84840 - DNA, 20 bp, Artificial Sequence
  Description of Artificial Sequence: Synthetic oligonucleotide
  Target: LAMA2; (-) strand; PAM type: NRG; PAM sequence: TGG
gtaccatagactcctggtca

SEQ ID NO: 84841 - DNA, 20 bp, Artificial Sequence
  Description of Artificial Sequence: Synthetic oligonucleotide
  Target: LAMA2; (-) strand; PAM type: NRG; PAM sequence: TGG
gattatgtaccatagactcc

SEQ ID NO: 84842 - DNA, 20 bp, Artificial Sequence
  Description of Artificial Sequence: Synthetic oligonucleotide
  Target: LAMA2; (-) strand; PAM type: NRG; PAM sequence: TAG
agaggaaggattatgtacca

SEQ ID NO: 84843 - DNA, 20 bp, Artificial Sequence
  Description of Artificial Sequence: Synthetic oligonucleotide
  Target: LAMA2; (-) strand; PAM type: NRG; PAM sequence: AGG
aacactaaaaaagcagagga

SEQ ID NO: 84844 - DNA, 20 bp, Artificial Sequence
  Description of Artificial Sequence: Synthetic oligonucleotide
  Target: LAMA2; (-) strand; PAM type: NRG; PAM sequence: AAG
taacactaaaaaagcagagg

SEQ ID NO: 84845 - DNA, 20 bp, Artificial Sequence
  Description of Artificial Sequence: Synthetic oligonucleotide
  Target: LAMA2; (-) strand; PAM type: NRG; PAM sequence: AGG
aaataacactaaaaaagcag

SEQ ID NO: 84846 - DNA, 20 bp, Artificial Sequence
  Description of Artificial Sequence: Synthetic oligonucleotide
  Target: LAMA2; (-) strand; PAM type: NRG; PAM sequence: GAG
gaaataacactaaaaaagca

SEQ ID NO: 84847 - DNA, 20 bp, Artificial Sequence
  Description of Artificial Sequence: Synthetic oligonucleotide
  Target: LAMA2; (-) strand; PAM type: NRG; PAM sequence: CAG
aggaaataacactaaaaaag

SEQ ID NO: 84848 - DNA, 20 bp, Artificial Sequence
  Description of Artificial Sequence: Synthetic oligonucleotide
  Target: LAMA2; (-) strand; PAM type: NRG; PAM sequence: AAG
attaggaaataacactaaaa

SEQ ID NO: 84849 - DNA, 20 bp, Artificial Sequence
  Description of Artificial Sequence: Synthetic oligonucleotide
  Target: LAMA2; (-) strand; PAM type: NRG; PAM sequence: AGG
tctcataattttttccaatt

SEQ ID NO: 84850 - DNA, 20 bp, Artificial Sequence
  Description of Artificial Sequence: Synthetic oligonucleotide
  Target: LAMA2; (-) strand; PAM type: NRG; PAM sequence: TAG
atctcataattttttccaat

SEQ ID NO: 84851 - DNA, 20 bp, Artificial Sequence
  Description of Artificial Sequence: Synthetic oligonucleotide
  Target: LAMA2; (-) strand; PAM type: NRG; PAM sequence: TAG
aaatatttaggaaaagctaa

SEQ ID NO: 84852 - DNA, 20 bp, Artificial Sequence
  Description of Artificial Sequence: Synthetic oligonucleotide
  Target: LAMA2; (-) strand; PAM type: NRG; PAM sequence: AAG
tgtatataaatatttaggaa

SEQ ID NO: 84853 - DNA, 20 bp, Artificial Sequence
  Description of Artificial Sequence: Synthetic oligonucleotide
  Target: LAMA2; (-) strand; PAM type: NRG; PAM sequence: AGG
aagtctgtatataaatattt

SEQ ID NO: 84854 - DNA, 20 bp, Artificial Sequence
  Description of Artificial Sequence: Synthetic oligonucleotide
  Target: LAMA2; (-) strand; PAM type: NRG; PAM sequence: TAG
aaagtctgtatataaatatt

SEQ ID NO: 84855 - DNA, 20 bp, Artificial Sequence
  Description of Artificial Sequence: Synthetic oligonucleotide
  Target: LAMA2; (-) strand; PAM type: NRG; PAM sequence: AAG
gcaacttggaaaatgtttga

SEQ ID NO: 84856 - DNA, 20 bp, Artificial Sequence
  Description of Artificial Sequence: Synthetic oligonucleotide
  Target: LAMA2; (-) strand; PAM type: NRG; PAM sequence: TGG
agccttataaccaagcaact

SEQ ID NO: 84857 - DNA, 20 bp, Artificial Sequence
  Description of Artificial Sequence: Synthetic oligonucleotide
  Target: LAMA2; (-) strand; PAM type: NRG; PAM sequence: AAG
ttagaagaagccttataacc

SEQ ID NO: 84858 - DNA, 20 bp, Artificial Sequence
  Description of Artificial Sequence: Synthetic oligonucleotide
  Target: LAMA2; (-) strand; PAM type: NRG; PAM sequence: AAG
tatcgcccttctgttagaag

SEQ ID NO: 84859 - DNA, 20 bp, Artificial Sequence
  Description of Artificial Sequence: Synthetic oligonucleotide
  Target: LAMA2; (-) strand; PAM type: NRG; PAM sequence: AAG
gcatatcgcccttctgttag

SEQ ID NO: 84860 - DNA, 20 bp, Artificial Sequence
  Description of Artificial Sequence: Synthetic oligonucleotide
  Target: LAMA2; (-) strand; PAM type: NRG; PAM sequence: TAG
acagcatatcgcccttctgt

SEQ ID NO: 84861 - DNA, 20 bp, Artificial Sequence
  Description of Artificial Sequence: Synthetic oligonucleotide
  Target: LAMA2; (-) strand; PAM type: NRG; PAM sequence: CAG
ccattataagagaacatgca

SEQ ID NO: 84862 - DNA, 20 bp, Artificial Sequence
  Description of Artificial Sequence: Synthetic oligonucleotide
  Target: LAMA2; (-) strand; PAM type: NRG; PAM sequence: GAG
atgtggcatctccattataa

SEQ ID NO: 84863 - DNA, 20 bp, Artificial Sequence
  Description of Artificial Sequence: Synthetic oligonucleotide
  Target: LAMA2; (-) strand; PAM type: NRG; PAM sequence: AAG
gcatgtggcatctccattat

SEQ ID NO: 84864 - DNA, 20 bp, Artificial Sequence
  Description of Artificial Sequence: Synthetic oligonucleotide
  Target: LAMA2; (-) strand; PAM type: NRG; PAM sequence: TGG
aaaaaaagaataacagcatg

SEQ ID NO: 84865 - DNA, 20 bp, Artificial Sequence
  Description of Artificial Sequence: Synthetic oligonucleotide
  Target: LAMA2; (-) strand; PAM type: NRG; PAM sequence: CAG
ggctcctaaaaaaagaataa

SEQ ID NO: 84866 - DNA, 20 bp, Artificial Sequence
  Description of Artificial Sequence: Synthetic oligonucleotide
  Target: LAMA2; (-) strand; PAM type: NRG; PAM sequence: AAG
tgggattaggctcctaaaaa

SEQ ID NO: 84867 - DNA, 20 bp, Artificial Sequence
  Description of Artificial Sequence: Synthetic oligonucleotide
  Target: LAMA2; (-) strand; PAM type: NRG; PAM sequence: AGG
cacttttattatttgggatt

SEQ ID NO: 84868 - DNA, 20 bp, Artificial Sequence
  Description of Artificial Sequence: Synthetic oligonucleotide
  Target: LAMA2; (-) strand; PAM type: NRG; PAM sequence: TAG
ccacttttattatttgggat

SEQ ID NO: 84869 - DNA, 20 bp, Artificial Sequence
  Description of Artificial Sequence: Synthetic oligonucleotide
  Target: LAMA2; (-) strand; PAM type: NRG; PAM sequence: GGG
gtgagccacttttattattt

SEQ ID NO: 84870 - DNA, 20 bp, Artificial Sequence
  Description of Artificial Sequence: Synthetic oligonucleotide
  Target: LAMA2; (-) strand; PAM type: NRG; PAM sequence: TGG
tgtgagccacttttattatt

SEQ ID NO: 84871 - DNA, 20 bp, Artificial Sequence
  Description of Artificial Sequence: Synthetic oligonucleotide
  Target: LAMA2; (-) strand; PAM type: NRG; PAM sequence: GAG
agcaaaaatgtgtcccatgt

SEQ ID NO: 84872 - DNA, 20 bp, Artificial Sequence
  Description of Artificial Sequence: Synthetic oligonucleotide
  Target: LAMA2; (-) strand; PAM type: NRG; PAM sequence: TAG
aaccaggcagacatccatgt

SEQ ID NO: 84873 - DNA, 20 bp, Artificial Sequence
  Description of Artificial Sequence: Synthetic oligonucleotide
  Target: LAMA2; (-) strand; PAM type: NRG; PAM sequence: CAG
tgagttttattacaaccagg

SEQ ID NO: 84874 - DNA, 20 bp, Artificial Sequence
  Description of Artificial Sequence: Synthetic oligonucleotide
  Target: LAMA2; (-) strand; PAM type: NRG; PAM sequence: AGG
tcttgagttttattacaacc

SEQ ID NO: 84875 - DNA, 20 bp, Artificial Sequence
  Description of Artificial Sequence: Synthetic oligonucleotide
  Target: LAMA2; (-) strand; PAM type: NRG; PAM sequence: CAG
ttcttgagttttattacaac

SEQ ID NO: 84876 - DNA, 20 bp, Artificial Sequence
  Description of Artificial Sequence: Synthetic oligonucleotide
  Target: LAMA2; (-) strand; PAM type: NRG; PAM sequence: GAG
ctaaattggctagtattctt

SEQ ID NO: 84877 - DNA, 20 bp, Artificial Sequence
  Description of Artificial Sequence: Synthetic oligonucleotide
  Target: LAMA2; (-) strand; PAM type: NRG; PAM sequence: TAG
cactcctttgctaaattggc

SEQ ID NO: 84878 - DNA, 20 bp, Artificial Sequence
  Description of Artificial Sequence: Synthetic oligonucleotide
  Target: LAMA2; (-) strand; PAM type: NRG; PAM sequence: TGG
aaagcactcctttgctaaat

SEQ ID NO: 84879 - DNA, 20 bp, Artificial Sequence
  Description of Artificial Sequence: Synthetic oligonucleotide
  Target: LAMA2; (-) strand; PAM type: NRG; PAM sequence: AAG
aaaatgtttcacaggataca

SEQ ID NO: 84880 - DNA, 20 bp, Artificial Sequence
  Description of Artificial Sequence: Synthetic oligonucleotide
  Target: LAMA2; (-) strand; PAM type: NRG; PAM sequence: AGG
aaatgtgaaaaatgtttcac

SEQ ID NO: 84881 - DNA, 20 bp, Artificial Sequence
  Description of Artificial Sequence: Synthetic oligonucleotide
  Target: LAMA2; (-) strand; PAM type: NRG; PAM sequence: CAG
aaaatgtgaaaaatgtttca

SEQ ID NO: 84882 - DNA, 20 bp, Artificial Sequence
  Description of Artificial Sequence: Synthetic oligonucleotide
  Target: LAMA2; (-) strand; PAM type: NRG; PAM sequence: CAG
tatacttcattattccaaaa

SEQ ID NO: 84883 - DNA, 20 bp, Artificial Sequence
  Description of Artificial Sequence: Synthetic oligonucleotide
  Target: LAMA2; (-) strand; PAM type: NRG; PAM sequence: AGG
aaaacgtgctaagttttcct

SEQ ID NO: 84884 - DNA, 20 bp, Artificial Sequence
  Description of Artificial Sequence: Synthetic oligonucleotide
  Target: LAMA2; (-) strand; PAM type: NRG; PAM sequence: TAG
aaaaacgtgctaagttttcc

SEQ ID NO: 84885 - DNA, 20 bp, Artificial Sequence
  Description of Artificial Sequence: Synthetic oligonucleotide
  Target: LAMA2; (-) strand; PAM type: NRG; PAM sequence: AAG
agaaagtataaaaacgtgct

SEQ ID NO: 84886 - DNA, 20 bp, Artificial Sequence
  Description of Artificial Sequence: Synthetic oligonucleotide
  Target: LAMA2; (-) strand; PAM type: NRG; PAM sequence: AAG
gtgggaatttcaaaaataga

SEQ ID NO: 84887 - DNA, 20 bp, Artificial Sequence
  Description of Artificial Sequence: Synthetic oligonucleotide
  Target: LAMA2; (-) strand; PAM type: NRG; PAM sequence: TAG
gactgtgggaatttcaaaaa

SEQ ID NO: 84888 - DNA, 20 bp, Artificial Sequence
  Description of Artificial Sequence: Synthetic oligonucleotide
  Target: LAMA2; (-) strand; PAM type: NRG; PAM sequence: GGG
caactcctagctgagactgt

SEQ ID NO: 84889 - DNA, 20 bp, Artificial Sequence
  Description of Artificial Sequence: Synthetic oligonucleotide
  Target: LAMA2; (-) strand; PAM type: NRG; PAM sequence: TGG
acaactcctagctgagactg

SEQ ID NO: 84890 - DNA, 20 bp, Artificial Sequence
  Description of Artificial Sequence: Synthetic oligonucleotide
  Target: LAMA2; (-) strand; PAM type: NRG; PAM sequence: GAG
tggaggaacaactcctagct

SEQ ID NO: 84891 - DNA, 20 bp, Artificial Sequence
  Description of Artificial Sequence: Synthetic oligonucleotide
  Target: LAMA2; (-) strand; PAM type: NRG; PAM sequence: TAG
aaaattggaggaacaactcc

SEQ ID NO: 84892 - DNA, 20 bp, Artificial Sequence
  Description of Artificial Sequence: Synthetic oligonucleotide
  Target: LAMA2; (-) strand; PAM type: NRG; PAM sequence: AGG
tacataggggaaaaaattgg

SEQ ID NO: 84893 - DNA, 20 bp, Artificial Sequence
  Description of Artificial Sequence: Synthetic oligonucleotide
  Target: LAMA2; (-) strand; PAM type: NRG; PAM sequence: GAG
gtacataggggaaaaaattg

SEQ ID NO: 84894 - DNA, 20 bp, Artificial Sequence
  Description of Artificial Sequence: Synthetic oligonucleotide
  Target: LAMA2; (-) strand; PAM type: NRG; PAM sequence: TGG
tggtacataggggaaaaaat

SEQ ID NO: 84895 - DNA, 20 bp, Artificial Sequence
  Description of Artificial Sequence: Synthetic oligonucleotide
  Target: LAMA2; (-) strand; PAM type: NRG; PAM sequence: GGG
aaatattcactggtacatag

SEQ ID NO: 84896 - DNA, 20 bp, Artificial Sequence
  Description of Artificial Sequence: Synthetic oligonucleotide
  Target: LAMA2; (-) strand; PAM type: NRG; PAM sequence: GGG
caaatattcactggtacata

SEQ ID NO: 84897 - DNA, 20 bp, Artificial Sequence
  Description of Artificial Sequence: Synthetic oligonucleotide
  Target: LAMA2; (-) strand; PAM type: NRG; PAM sequence: AGG
ccaaatattcactggtacat

SEQ ID NO: 84898 - DNA, 20 bp, Artificial Sequence
  Description of Artificial Sequence: Synthetic oligonucleotide
  Target: LAMA2; (-) strand; PAM type: NRG; PAM sequence: TAG
gccaaatattcactggtaca

SEQ ID NO: 84899 - DNA, 20 bp, Artificial Sequence
  Description of Artificial Sequence: Synthetic oligonucleotide
  Target: LAMA2; (-) strand; PAM type: NRG; PAM sequence: TGG
cagttgtgccaaatattcac

SEQ ID NO: 84900 - DNA, 20 bp, Artificial Sequence
  Description of Artificial Sequence: Synthetic oligonucleotide
  Target: LAMA2; (-) strand; PAM type: NRG; PAM sequence: CAG
aaattaacacttgattctgc

SEQ ID NO: 84901 - DNA, 20 bp, Artificial Sequence
  Description of Artificial Sequence: Synthetic oligonucleotide
  Target: LAMA2; (-) strand; PAM type: NRG; PAM sequence: GGG
ttgactatcaagaacgaggc

SEQ ID NO: 84902 - DNA, 20 bp, Artificial Sequence
  Description of Artificial Sequence: Synthetic oligonucleotide
  Target: LAMA2; (-) strand; PAM type: NRG; PAM sequence: CGG
tttgactatcaagaacgagg

SEQ ID NO: 84903 - DNA, 20 bp, Artificial Sequence
  Description of Artificial Sequence: Synthetic oligonucleotide
  Target: LAMA2; (-) strand; PAM type: NRG; PAM sequence: AGG
ctctttgactatcaagaacg

SEQ ID NO: 84904 - DNA, 20 bp, Artificial Sequence
  Description of Artificial Sequence: Synthetic oligonucleotide
  Target: LAMA2; (-) strand; PAM type: NRG; PAM sequence: GAG
tctctttgactatcaagaac

SEQ ID NO: 84905 - DNA, 20 bp, Artificial Sequence
  Description of Artificial Sequence: Synthetic oligonucleotide
  Target: LAMA2; (-) strand; PAM type: NRG; PAM sequence: AAG
tttaattctctttgactatc

SEQ ID NO: 84906 - DNA, 20 bp, Artificial Sequence
  Description of Artificial Sequence: Synthetic oligonucleotide
  Target: LAMA2; (-) strand; PAM type: NRG; PAM sequence: GGG
tgcacctaggatagccctgt

SEQ ID NO: 84907 - DNA, 20 bp, Artificial Sequence
  Description of Artificial Sequence: Synthetic oligonucleotide
  Target: LAMA2; (-) strand; PAM type: NRG; PAM sequence: TGG
atgcacctaggatagccctg

SEQ ID NO: 84908 - DNA, 20 bp, Artificial Sequence
  Description of Artificial Sequence: Synthetic oligonucleotide
  Target: LAMA2; (-) strand; PAM type: NRG; PAM sequence: TAG
aaaatgaaatgcacctagga

SEQ ID NO: 84909 - DNA, 20 bp, Artificial Sequence
  Description of Artificial Sequence: Synthetic oligonucleotide
  Target: LAMA2; (-) strand; PAM type: NRG; PAM sequence: AGG
tttgaaaatgaaatgcacct

SEQ ID NO: 84910 - DNA, 20 bp, Artificial Sequence
  Description of Artificial Sequence: Synthetic oligonucleotide
  Target: LAMA2; (-) strand; PAM type: NRG; PAM sequence: TAG
ttttgaaaatgaaatgcacc

SEQ ID NO: 84911 - DNA, 20 bp, Artificial Sequence
  Description of Artificial Sequence: Synthetic oligonucleotide
  Target: LAMA2; (-) strand; PAM type: NRG; PAM sequence: AAG
accaagcattaacatttgcc

SEQ ID NO: 84912 - DNA, 20 bp, Artificial Sequence
  Description of Artificial Sequence: Synthetic oligonucleotide
  Target: LAMA2; (-) strand; PAM type: NRG; PAM sequence: AAG
taaacaaatgccctaaaacc

SEQ ID NO: 84913 - DNA, 20 bp, Artificial Sequence
  Description of Artificial Sequence: Synthetic oligonucleotide
  Target: LAMA2; (-) strand; PAM type: NRG; PAM sequence: TAG
tagctctttccactgctgcc

SEQ ID NO: 84914 - DNA, 20 bp, Artificial Sequence
  Description of Artificial Sequence: Synthetic oligonucleotide
  Target: LAMA2; (-) strand; PAM type: NRG; PAM sequence: TAG
cagcaggattctttgtcctc

SEQ ID NO: 84915 - DNA, 20 bp, Artificial Sequence
  Description of Artificial Sequence: Synthetic oligonucleotide
  Target: LAMA2; (-) strand; PAM type: NRG; PAM sequence: AGG
gtagcctgcagcaaaccagc

SEQ ID NO: 84916 - DNA, 20 bp, Artificial Sequence
  Description of Artificial Sequence: Synthetic oligonucleotide
  Target: LAMA2; (-) strand; PAM type: NRG; PAM sequence: CAG
tgtagcctgcagcaaaccag

SEQ ID NO: 84917 - DNA, 20 bp, Artificial Sequence
  Description of Artificial Sequence: Synthetic oligonucleotide
  Target: LAMA2; (-) strand; PAM type: NRG; PAM sequence: CAG
agctgtagcctgcagcaaac

SEQ ID NO: 84918 - DNA, 20 bp, Artificial Sequence
  Description of Artificial Sequence: Synthetic oligonucleotide
  Target: LAMA2; (-) strand; PAM type: NRG; PAM sequence: CAG
ttctgaatagctgtagcctg

SEQ ID NO: 84919 - DNA, 20 bp, Artificial Sequence
  Description of Artificial Sequence: Synthetic oligonucleotide
  Target: LAMA2; (-) strand; PAM type: NRG; PAM sequence: TAG
aaactgtttctgaatagctg

SEQ ID NO: 84920 - DNA, 20 bp, Artificial Sequence
  Description of Artificial Sequence: Synthetic oligonucleotide
  Target: LAMA2; (-) strand; PAM type: NRG; PAM sequence: TAG
attcccaaactgtttctgaa

SEQ ID NO: 84921 - DNA, 20 bp, Artificial Sequence
  Description of Artificial Sequence: Synthetic oligonucleotide
  Target: LAMA2; (-) strand; PAM type: NRG; PAM sequence: CAG
tagcacttagtttactaggg

SEQ ID NO: 84922 - DNA, 20 bp, Artificial Sequence
  Description of Artificial Sequence: Synthetic oligonucleotide
  Target: LAMA2; (-) strand; PAM type: NRG; PAM sequence: GGG
cagtagcacttagtttacta

SEQ ID NO: 84923 - DNA, 20 bp, Artificial Sequence
  Description of Artificial Sequence: Synthetic oligonucleotide
  Target: LAMA2; (-) strand; PAM type: NRG; PAM sequence: AGG
ccagtagcacttagtttact

SEQ ID NO: 84924 - DNA, 20 bp, Artificial Sequence
  Description of Artificial Sequence: Synthetic oligonucleotide
  Target: LAMA2; (-) strand; PAM type: NRG; PAM sequence: TAG
tccagtagcacttagtttac

SEQ ID NO: 84925 - DNA, 20 bp, Artificial Sequence
  Description of Artificial Sequence: Synthetic oligonucleotide
  Target: LAMA2; (-) strand; PAM type: NRG; PAM sequence: TAG
tgcaatgttccagtagcact

SEQ ID NO: 84926 - DNA, 20 bp, Artificial Sequence
  Description of Artificial Sequence: Synthetic oligonucleotide
  Target: LAMA2; (-) strand; PAM type: NRG; PAM sequence: TAG
tgactgttgcaatgttccag

SEQ ID NO: 84927 - DNA, 20 bp, Artificial Sequence
  Description of Artificial Sequence: Synthetic oligonucleotide
  Target: LAMA2; (-) strand; PAM type: NRG; PAM sequence: CAG
aaatgactgttgcaatgttc

SEQ ID NO: 84928 - DNA, 20 bp, Artificial Sequence
  Description of Artificial Sequence: Synthetic oligonucleotide
  Target: LAMA2; (-) strand; PAM type: NRG; PAM sequence: AAG
cagaccactagggcaacctt

SEQ ID NO: 84929 - DNA, 20 bp, Artificial Sequence
  Description of Artificial Sequence: Synthetic oligonucleotide
  Target: LAMA2; (-) strand; PAM type: NRG; PAM sequence: GGG
tcaactatttcagaccacta

SEQ ID NO: 84930 - DNA, 20 bp, Artificial Sequence
  Description of Artificial Sequence: Synthetic oligonucleotide
  Target: LAMA2; (-) strand; PAM type: NRG; PAM sequence: AGG
ctcaactatttcagaccact

SEQ ID NO: 84931 - DNA, 20 bp, Artificial Sequence
  Description of Artificial Sequence: Synthetic oligonucleotide
  Target: LAMA2; (-) strand; PAM type: NRG; PAM sequence: TAG
cctcaactatttcagaccac

SEQ ID NO: 84932 - DNA, 20 bp, Artificial Sequence
  Description of Artificial Sequence: Synthetic oligonucleotide
  Target: LAMA2; (-) strand; PAM type: NRG; PAM sequence: CAG
ggaagctgcctcaactattt

SEQ ID NO: 84933 - DNA, 20 bp, Artificial Sequence
  Description of Artificial Sequence: Synthetic oligonucleotide
  Target: LAMA2; (-) strand; PAM type: NRG; PAM sequence: AAG
gcaaagagaattgcttttgg

SEQ ID NO: 84934 - DNA, 20 bp, Artificial Sequence
  Description of Artificial Sequence: Synthetic oligonucleotide
  Target: LAMA2; (-) strand; PAM type: NRG; PAM sequence: TGG
gatgcaaagagaattgcttt

SEQ ID NO: 84935 - DNA, 20 bp, Artificial Sequence
  Description of Artificial Sequence: Synthetic oligonucleotide
  Target: LAMA2; (-) strand; PAM type: NRG; PAM sequence: GAG
cagaactttacagatgcaaa

SEQ ID NO: 84936 - DNA, 20 bp, Artificial Sequence
  Description of Artificial Sequence: Synthetic oligonucleotide
  Target: LAMA2; (-) strand; PAM type: NRG; PAM sequence: AAG
cccagaactttacagatgca

SEQ ID NO: 84937 - DNA, 20 bp, Artificial Sequence
  Description of Artificial Sequence: Synthetic oligonucleotide
  Target: LAMA2; (-) strand; PAM type: NRG; PAM sequence: CAG
tagcttctcccagaacttta

SEQ ID NO: 84938 - DNA, 20 bp, Artificial Sequence
  Description of Artificial Sequence: Synthetic oligonucleotide
  Target: LAMA2; (-) strand; PAM type: NRG; PAM sequence: CAG
caagccaagctagcttctcc

SEQ ID NO: 84939 - DNA, 20 bp, Artificial Sequence
  Description of Artificial Sequence: Synthetic oligonucleotide
  Target: LAMA2; (-) strand; PAM type: NRG; PAM sequence: TAG
gaacagcagacaagccaagc

SEQ ID NO: 84940 - DNA, 20 bp, Artificial Sequence
  Description of Artificial Sequence: Synthetic oligonucleotide
  Target: LAMA2; (-) strand; PAM type: NRG; PAM sequence: AAG
gcaggaacagcagacaagcc

SEQ ID NO: 84941 - DNA, 20 bp, Artificial Sequence
  Description of Artificial Sequence: Synthetic oligonucleotide
  Target: LAMA2; (-) strand; PAM type: NRG; PAM sequence: AAG
gtaatgcaggaacagcagac

SEQ ID NO: 84942 - DNA, 20 bp, Artificial Sequence
  Description of Artificial Sequence: Synthetic oligonucleotide
  Target: LAMA2; (-) strand; PAM type: NRG; PAM sequence: CAG
taatggtaatgcaggaacag

SEQ ID NO: 84943 - DNA, 20 bp, Artificial Sequence
  Description of Artificial Sequence: Synthetic oligonucleotide
  Target: LAMA2; (-) strand; PAM type: NRG; PAM sequence: CAG
ccttaatggtaatgcaggaa

SEQ ID NO: 84944 - DNA, 20 bp, Artificial Sequence
  Description of Artificial Sequence: Synthetic oligonucleotide
  Target: LAMA2; (-) strand; PAM type: NRG; PAM sequence: AGG
tcaaaccttaatggtaatgc

SEQ ID NO: 84945 - DNA, 20 bp, Artificial Sequence
  Description of Artificial Sequence: Synthetic oligonucleotide
  Target: LAMA2; (-) strand; PAM type: NRG; PAM sequence: CAG
ttcaaaccttaatggtaatg

SEQ ID NO: 84946 - DNA, 20 bp, Artificial Sequence
  Description of Artificial Sequence: Synthetic oligonucleotide
  Target: LAMA2; (-) strand; PAM type: NRG; PAM sequence: TGG
gagagaatttcaaaccttaa

SEQ ID NO: 84947 - DNA, 20 bp, Artificial Sequence
  Description of Artificial Sequence: Synthetic oligonucleotide
  Target: LAMA2; (-) strand; PAM type: NRG; PAM sequence: GAG
aatttaataatattcagaga

SEQ ID NO: 84948 - DNA, 20 bp, Artificial Sequence
  Description of Artificial Sequence: Synthetic oligonucleotide
  Target: LAMA2; (-) strand; PAM type: NRG; PAM sequence: GAG
ttaatttaataatattcaga

SEQ ID NO: 84949 - DNA, 20 bp, Artificial Sequence
  Description of Artificial Sequence: Synthetic oligonucleotide
  Target: LAMA2; (-) strand; PAM type: NRG; PAM sequence: GAG
gattaatttaataatattca

SEQ ID NO: 84950 - DNA, 20 bp, Artificial Sequence
  Description of Artificial Sequence: Synthetic oligonucleotide
  Target: LAMA2; (-) strand; PAM type: NRG; PAM sequence: CAG
aagattaatttaataatatt

SEQ ID NO: 84951 - DNA, 20 bp, Artificial Sequence
  Description of Artificial Sequence: Synthetic oligonucleotide
  Target: LAMA2; (-) strand; PAM type: NRG; PAM sequence: AAG
tggtaaagaacaaatcacat

SEQ ID NO: 84952 - DNA, 20 bp, Artificial Sequence
  Description of Artificial Sequence: Synthetic oligonucleotide
  Target: LAMA2; (-) strand; PAM type: NRG; PAM sequence: AAG
aaaataagcaggttttggta

SEQ ID NO: 84953 - DNA, 20 bp, Artificial Sequence
  Description of Artificial Sequence: Synthetic oligonucleotide
  Target: LAMA2; (-) strand; PAM type: NRG; PAM sequence: TGG
tgtagaaaataagcaggttt

SEQ ID NO: 84954 - DNA, 20 bp, Artificial Sequence
  Description of Artificial Sequence: Synthetic oligonucleotide
  Target: LAMA2; (-) strand; PAM type: NRG; PAM sequence: AGG
taatgctgtagaaaataagc

SEQ ID NO: 84955 - DNA, 20 bp, Artificial Sequence
  Description of Artificial Sequence: Synthetic oligonucleotide
  Target: LAMA2; (-) strand; PAM type: NRG; PAM sequence: CAG
ataatgctgtagaaaataag

SEQ ID NO: 84956 - DNA, 20 bp, Artificial Sequence
  Description of Artificial Sequence: Synthetic oligonucleotide
  Target: LAMA2; (-) strand; PAM type: NRG; PAM sequence: AAG
agcataatgctgtagaaaat

SEQ ID NO: 84957 - DNA, 20 bp, Artificial Sequence
  Description of Artificial Sequence: Synthetic oligonucleotide
  Target: LAMA2; (-) strand; PAM type: NRG; PAM sequence: TAG
agaaagatagcataatgctg

SEQ ID NO: 84958 - DNA, 20 bp, Artificial Sequence
  Description of Artificial Sequence: Synthetic oligonucleotide
  Target: LAMA2; (-) strand; PAM type: NRG; PAM sequence: TAG
ctaagctagaaacagaaaga

SEQ ID NO: 84959 - DNA, 20 bp, Artificial Sequence
  Description of Artificial Sequence: Synthetic oligonucleotide
  Target: LAMA2; (-) strand; PAM type: NRG; PAM sequence: AAG
ttctctaagctagaaacaga

SEQ ID NO: 84960 - DNA, 20 bp, Artificial Sequence
  Description of Artificial Sequence: Synthetic oligonucleotide
  Target: LAMA2; (-) strand; PAM type: NRG; PAM sequence: CAG
aggcttctctaagctagaaa

SEQ ID NO: 84961 - DNA, 20 bp, Artificial Sequence
  Description of Artificial Sequence: Synthetic oligonucleotide
  Target: LAMA2; (-) strand; PAM type: NRG; PAM sequence: TAG
atttaaaggcttctctaagc

SEQ ID NO: 84962 - DNA, 20 bp, Artificial Sequence
  Description of Artificial Sequence: Synthetic oligonucleotide
  Target: LAMA2; (-) strand; PAM type: NRG; PAM sequence: AAG
acaaatttaaaggcttctct

SEQ ID NO: 84963 - DNA, 20 bp, Artificial Sequence
  Description of Artificial Sequence: Synthetic oligonucleotide
  Target: LAMA2; (-) strand; PAM type: NRG; PAM sequence: AGG
aactatatgaacaaatttaa

SEQ ID NO: 84964 - DNA, 20 bp, Artificial Sequence
  Description of Artificial Sequence: Synthetic oligonucleotide
  Target: LAMA2; (-) strand; PAM type: NRG; PAM sequence: AAG
caactatatgaacaaattta

SEQ ID NO: 84965 - DNA, 20 bp, Artificial Sequence
  Description of Artificial Sequence: Synthetic oligonucleotide
  Target: LAMA2; (-) strand; PAM type: NRG; PAM sequence: TGG
aactagactataggtattct

SEQ ID NO: 84966 - DNA, 20 bp, Artificial Sequence
  Description of Artificial Sequence: Synthetic oligonucleotide
  Target: LAMA2; (-) strand; PAM type: NRG; PAM sequence: AGG
tgcatcttaaactagactat

SEQ ID NO: 84967 - DNA, 20 bp, Artificial Sequence
  Description of Artificial Sequence: Synthetic oligonucleotide
  Target: LAMA2; (-) strand; PAM type: NRG; PAM sequence: TAG
gtgcatcttaaactagacta

SEQ ID NO: 84968 - DNA, 20 bp, Artificial Sequence
  Description of Artificial Sequence: Synthetic oligonucleotide
  Target: LAMA2; (-) strand; PAM type: NRG; PAM sequence: TAG
tcctaatgtgcatcttaaac

SEQ ID NO: 84969 - DNA, 20 bp, Artificial Sequence
  Description of Artificial Sequence: Synthetic oligonucleotide
  Target: LAMA2; (-) strand; PAM type: NRG; PAM sequence: CAG
gccagatgctattatgtcag

SEQ ID NO: 84970 - DNA, 20 bp, Artificial Sequence
  Description of Artificial Sequence: Synthetic oligonucleotide
  Target: LAMA2; (-) strand; PAM type: NRG; PAM sequence: CAG
gaagccagatgctattatgt

SEQ ID NO: 84971 - DNA, 20 bp, Artificial Sequence
  Description of Artificial Sequence: Synthetic oligonucleotide
  Target: LAMA2; (-) strand; PAM type: NRG; PAM sequence: CAG
cagagattacttttagaagc

SEQ ID NO: 84972 - DNA, 20 bp, Artificial Sequence
  Description of Artificial Sequence: Synthetic oligonucleotide
  Target: LAMA2; (-) strand; PAM type: NRG; PAM sequence: AAG
ttaccagagattacttttag

SEQ ID NO: 84973 - DNA, 20 bp, Artificial Sequence
  Description of Artificial Sequence: Synthetic oligonucleotide
  Target: LAMA2; (-) strand; PAM type: NRG; PAM sequence: TAG
agtttaccagagattacttt

SEQ ID NO: 84974 - DNA, 20 bp, Artificial Sequence
  Description of Artificial Sequence: Synthetic oligonucleotide
  Target: LAMA2; (-) strand; PAM type: NRG; PAM sequence: GAG
caaaacaaaagagtttacca

SEQ ID NO: 84975 - DNA, 20 bp, Artificial Sequence
  Description of Artificial Sequence: Synthetic oligonucleotide
  Target: LAMA2; (-) strand; PAM type: NRG; PAM sequence: CAG
aacaaaacaaaagagtttac

SEQ ID NO: 84976 - DNA, 20 bp, Artificial Sequence
  Description of Artificial Sequence: Synthetic oligonucleotide
  Target: LAMA2; (-) strand; PAM type: NRG; PAM sequence: GAG
gcaagaacaacaaaacaaaa

SEQ ID NO: 84977 - DNA, 20 bp, Artificial Sequence
  Description of Artificial Sequence: Synthetic oligonucleotide
  Target: LAMA2; (-) strand; PAM type: NRG; PAM sequence: AAG
aagcaagaacaacaaaacaa

SEQ ID NO: 84978 - DNA, 20 bp, Artificial Sequence
  Description of Artificial Sequence: Synthetic oligonucleotide
  Target: LAMA2; (-) strand; PAM type: NRG; PAM sequence: AAG
agtagaatggaaagtcaagc

SEQ ID NO: 84979 - DNA, 20 bp, Artificial Sequence
  Description of Artificial Sequence: Synthetic oligonucleotide
  Target: LAMA2; (-) strand; PAM type: NRG; PAM sequence: AAG
gtgaagtagaatggaaagtc

SEQ ID NO: 84980 - DNA, 20 bp, Artificial Sequence
  Description of Artificial Sequence: Synthetic oligonucleotide
  Target: LAMA2; (-) strand; PAM type: NRG; PAM sequence: AAG
gatccgtgaagtagaatgga

SEQ ID NO: 84981 - DNA, 20 bp, Artificial Sequence
  Description of Artificial Sequence: Synthetic oligonucleotide
  Target: LAMA2; (-) strand; PAM type: NRG; PAM sequence: TGG
ttgagatccgtgaagtagaa

SEQ ID NO: 84982 - DNA, 20 bp, Artificial Sequence
  Description of Artificial Sequence: Synthetic oligonucleotide
  Target: LAMA2; (-) strand; PAM type: NRG; PAM sequence: TAG
ttaatttgagatccgtgaag

SEQ ID NO: 84983 - DNA, 20 bp, Artificial Sequence
  Description of Artificial Sequence: Synthetic oligonucleotide
  Target: LAMA2; (-) strand; PAM type: NRG; PAM sequence: AAG
gctttaatttgagatccgtg

SEQ ID NO: 84984 - DNA, 20 bp, Artificial Sequence
  Description of Artificial Sequence: Synthetic oligonucleotide
  Target: LAMA2; (-) strand; PAM type: NRG; PAM sequence: GAG
caaatctatagctttaattt

SEQ ID NO: 84985 - DNA, 20 bp, Artificial Sequence
  Description of Artificial Sequence: Synthetic oligonucleotide
  Target: LAMA2; (-) strand; PAM type: NRG; PAM sequence: TAG
agtttccttcttcaaatcta

SEQ ID NO: 84986 - DNA, 20 bp, Artificial Sequence
  Description of Artificial Sequence: Synthetic oligonucleotide
  Target: LAMA2; (-) strand; PAM type: NRG; PAM sequence: CAG
gtcctacaaatctcaaatat

SEQ ID NO: 84987 - DNA, 20 bp, Artificial Sequence
  Description of Artificial Sequence: Synthetic oligonucleotide
  Target: LAMA2; (-) strand; PAM type: NRG; PAM sequence: GAG
ttgagcttcttttatatgat

SEQ ID NO: 84988 - DNA, 20 bp, Artificial Sequence
  Description of Artificial Sequence: Synthetic oligonucleotide
  Target: LAMA2; (-) strand; PAM type: NRG; PAM sequence: GAG
tcaattacaaggtatttgtt

SEQ ID NO: 84989 - DNA, 20 bp, Artificial Sequence
  Description of Artificial Sequence: Synthetic oligonucleotide
  Target: LAMA2; (-) strand; PAM type: NRG; PAM sequence: AGG
agcatgtagcatcaattaca

SEQ ID NO: 84990 - DNA, 20 bp, Artificial Sequence
  Description of Artificial Sequence: Synthetic oligonucleotide
  Target: LAMA2; (-) strand; PAM type: NRG; PAM sequence: AAG
aagcatgtagcatcaattac

SEQ ID NO: 84991 - DNA, 20 bp, Artificial Sequence
  Description of Artificial Sequence: Synthetic oligonucleotide
  Target: LAMA2; (-) strand; PAM type: NRG; PAM sequence: TAG
gtttgtttgtgttaagcatg

SEQ ID NO: 84992 - DNA, 20 bp, Artificial Sequence
  Description of Artificial Sequence: Synthetic oligonucleotide
  Target: LAMA2; (-) strand; PAM type: NRG; PAM sequence: AAG
gagttttgtttgtttgtgtt

SEQ ID NO: 84993 - DNA, 20 bp, Artificial Sequence
  Description of Artificial Sequence: Synthetic oligonucleotide
  Target: LAMA2; (-) strand; PAM type: NRG; PAM sequence: GAG
ctaaaaaaaacaatttctta

SEQ ID NO: 84994 - DNA, 20 bp, Artificial Sequence
  Description of Artificial Sequence: Synthetic oligonucleotide
  Target: LAMA2; (-) strand; PAM type: NRG; PAM sequence: TAG
acctaaaaaaaacaatttct

SEQ ID NO: 84995 - DNA, 20 bp, Artificial Sequence
  Description of Artificial Sequence: Synthetic oligonucleotide
  Target: LAMA2; (-) strand; PAM type: NRG; PAM sequence: GAG
ccaactcaatgggcatttct

SEQ ID NO: 84996 - DNA, 20 bp, Artificial Sequence
  Description of Artificial Sequence: Synthetic oligonucleotide
  Target: LAMA2; (-) strand; PAM type: NRG; PAM sequence: GGG
tcccacaaatccaactcaat

SEQ ID NO: 84997 - DNA, 20 bp, Artificial Sequence
  Description of Artificial Sequence: Synthetic oligonucleotide
  Target: LAMA2; (-) strand; PAM type: NRG; PAM sequence: TGG
ctcccacaaatccaactcaa

SEQ ID NO: 84998 - DNA, 20 bp, Artificial Sequence
  Description of Artificial Sequence: Synthetic oligonucleotide
  Target: LAMA2; (-) strand; PAM type: NRG; PAM sequence: CAG
aattattttgtaaagcaaga

SEQ ID NO: 84999 - DNA, 20 bp, Artificial Sequence
  Description of Artificial Sequence: Synthetic oligonucleotide
  Target: LAMA2; (-) strand; PAM type: NRG; PAM sequence: AAG
ttttaattattttgtaaagc

SEQ ID NO: 85000 - DNA, 20 bp, Artificial Sequence
  Description of Artificial Sequence: Synthetic oligonucleotide
  Target: LAMA2; (-) strand; PAM type: NRG; PAM sequence: AAG
gagtttttaattattttgta

SEQ ID NO: 85001 - DNA, 20 bp, Artificial Sequence
  Description of Artificial Sequence: Synthetic oligonucleotide
  Target: LAMA2; (-) strand; PAM type: NRG; PAM sequence: GAG
agtggaacatatttgttagc

SEQ ID NO: 85002 - DNA, 20 bp, Artificial Sequence
  Description of Artificial Sequence: Synthetic oligonucleotide
  Target: LAMA2; (-) strand; PAM type: NRG; PAM sequence: TAG
ggagagtggaacatatttgt

SEQ ID NO: 85003 - DNA, 20 bp, Artificial Sequence
  Description of Artificial Sequence: Synthetic oligonucleotide
  Target: LAMA2; (-) strand; PAM type: NRG; PAM sequence: TGG
atatgctgctcaaaggagag

SEQ ID NO: 85004 - DNA, 20 bp, Artificial Sequence
  Description of Artificial Sequence: Synthetic oligonucleotide
  Target: LAMA2; (-) strand; PAM type: NRG; PAM sequence: GAG
aaaatatgctgctcaaagga

SEQ ID NO: 85005 - DNA, 20 bp, Artificial Sequence
  Description of Artificial Sequence: Synthetic oligonucleotide
  Target: LAMA2; (-) strand; PAM type: NRG; PAM sequence: GAG
acaaaatatgctgctcaaag

SEQ ID NO: 85006 - DNA, 20 bp, Artificial Sequence
  Description of Artificial Sequence: Synthetic oligonucleotide
  Target: LAMA2; (-) strand; PAM type: NRG; PAM sequence: AGG
tcacaaaatatgctgctcaa

SEQ ID NO: 85007 - DNA, 20 bp, Artificial Sequence
  Description of Artificial Sequence: Synthetic oligonucleotide
  Target: LAMA2; (-) strand; PAM type: NRG; PAM sequence: AAG
gtcacaaaatatgctgctca

SEQ ID NO: 85008 - DNA, 20 bp, Artificial Sequence
  Description of Artificial Sequence: Synthetic oligonucleotide
  Target: LAMA2; (-) strand; PAM type: NRG; PAM sequence: AAG
ttgaggactatggagcaaag

SEQ ID NO: 85009 - DNA, 20 bp, Artificial Sequence
  Description of Artificial Sequence: Synthetic oligonucleotide
  Target: LAMA2; (-) strand; PAM type: NRG; PAM sequence: AAG
attttgaggactatggagca

SEQ ID NO: 85010 - DNA, 20 bp, Artificial Sequence
  Description of Artificial Sequence: Synthetic oligonucleotide
  Target: LAMA2; (-) strand; PAM type: NRG; PAM sequence: GAG
gaataattttgaggactatg

SEQ ID NO: 85011 - DNA, 20 bp, Artificial Sequence
  Description of Artificial Sequence: Synthetic oligonucleotide
  Target: LAMA2; (-) strand; PAM type: NRG; PAM sequence: TGG
ctgaataattttgaggacta

SEQ ID NO: 85012 - DNA, 20 bp, Artificial Sequence
  Description of Artificial Sequence: Synthetic oligonucleotide
  Target: LAMA2; (-) strand; PAM type: NRG; PAM sequence: AGG
tccacttctgaataattttg

SEQ ID NO: 85013 - DNA, 20 bp, Artificial Sequence
  Description of Artificial Sequence: Synthetic oligonucleotide
  Target: LAMA2; (-) strand; PAM type: NRG; PAM sequence: GAG
ctccacttctgaataatttt

SEQ ID NO: 85014 - DNA, 20 bp, Artificial Sequence
  Description of Artificial Sequence: Synthetic oligonucleotide
  Target: LAMA2; (-) strand; PAM type: NRG; PAM sequence: GGG
aagttatggatggcgaggag

SEQ ID NO: 85015 - DNA, 20 bp, Artificial Sequence
  Description of Artificial Sequence: Synthetic oligonucleotide
  Target: LAMA2; (-) strand; PAM type: NRG; PAM sequence: GGG
gaagttatggatggcgagga

SEQ ID NO: 85016 - DNA, 20 bp, Artificial Sequence
  Description of Artificial Sequence: Synthetic oligonucleotide
  Target: LAMA2; (-) strand; PAM type: NRG; PAM sequence: AGG
ggaagttatggatggcgagg

SEQ ID NO: 85017 - DNA, 20 bp, Artificial Sequence
  Description of Artificial Sequence: Synthetic oligonucleotide
  Target: LAMA2; (-) strand; PAM type: NRG; PAM sequence: GAG
aggaagttatggatggcgag

SEQ ID NO: 85018 - DNA, 20 bp, Artificial Sequence
  Description of Artificial Sequence: Synthetic oligonucleotide
  Target: LAMA2; (-) strand; PAM type: NRG; PAM sequence: AGG
ggaggaagttatggatggcg

SEQ ID NO: 85019 - DNA, 20 bp, Artificial Sequence
  Description of Artificial Sequence: Synthetic oligonucleotide
  Target: LAMA2; (-) strand; PAM type: NRG; PAM sequence: GAG
aggaggaagttatggatggc

SEQ ID NO: 85020 - DNA, 20 bp, Artificial Sequence
  Description of Artificial Sequence: Synthetic oligonucleotide
  Target: LAMA2; (-) strand; PAM type: NRG; PAM sequence: TGG
aaataggaggaagttatgga

SEQ ID NO: 85021 - DNA, 20 bp, Artificial Sequence
  Description of Artificial Sequence: Synthetic oligonucleotide
  Target: LAMA2; (-) strand; PAM type: NRG; PAM sequence: TGG
atttaaataggaggaagtta

SEQ ID NO: 85022 - DNA, 20 bp, Artificial Sequence
  Description of Artificial Sequence: Synthetic oligonucleotide
  Target: LAMA2; (-) strand; PAM type: NRG; PAM sequence: AAG
tccaagatttaaataggagg

SEQ ID NO: 85023 - DNA, 20 bp, Artificial Sequence
  Description of Artificial Sequence: Synthetic oligonucleotide
  Target: LAMA2; (-) strand; PAM type: NRG; PAM sequence: AGG
taatccaagatttaaatagg

SEQ ID NO: 85024 - DNA, 20 bp, Artificial Sequence
  Description of Artificial Sequence: Synthetic oligonucleotide
  Target: LAMA2; (-) strand; PAM type: NRG; PAM sequence: GAG
ttaatccaagatttaaatag

SEQ ID NO: 85025 - DNA, 20 bp, Artificial Sequence
  Description of Artificial Sequence: Synthetic oligonucleotide
  Target: LAMA2; (-) strand; PAM type: NRG; PAM sequence: AGG
atttaatccaagatttaaat

SEQ ID NO: 85026 - DNA, 20 bp, Artificial Sequence
  Description of Artificial Sequence: Synthetic oligonucleotide
  Target: LAMA2; (-) strand; PAM type: NRG; PAM sequence: TAG
catttaatccaagatttaaa

SEQ ID NO: 85027 - DNA, 20 bp, Artificial Sequence
  Description of Artificial Sequence: Synthetic oligonucleotide
  Target: LAMA2; (-) strand; PAM type: NRG; PAM sequence: AAG
ttaactaacccatttaatcc

SEQ ID NO: 85028 - DNA, 20 bp, Artificial Sequence
  Description of Artificial Sequence: Synthetic oligonucleotide
  Target: LAMA2; (-) strand; PAM type: NRG; PAM sequence: TAG
atttatcctatttactttta

SEQ ID NO: 85029 - DNA, 20 bp, Artificial Sequence
  Description of Artificial Sequence: Synthetic oligonucleotide
  Target: LAMA2; (-) strand; PAM type: NRG; PAM sequence: CAG
atggaataaaaaatcaacca

SEQ ID NO: 85030 - DNA, 20 bp, Artificial Sequence
  Description of Artificial Sequence: Synthetic oligonucleotide
  Target: LAMA2; (-) strand; PAM type: NRG; PAM sequence: TGG
tcttgatgggatctgattta

SEQ ID NO: 85031 - DNA, 20 bp, Artificial Sequence
  Description of Artificial Sequence: Synthetic oligonucleotide
  Target: LAMA2; (-) strand; PAM type: NRG; PAM sequence: GGG
attgccaagttagtcttgat

SEQ ID NO: 85032 - DNA, 20 bp, Artificial Sequence
  Description of Artificial Sequence: Synthetic oligonucleotide
  Target: LAMA2; (-) strand; PAM type: NRG; PAM sequence: TGG
cattgccaagttagtcttga

SEQ ID NO: 85033 - DNA, 20 bp, Artificial Sequence
  Description of Artificial Sequence: Synthetic oligonucleotide
  Target: LAMA2; (-) strand; PAM type: NRG; PAM sequence: TAG
gttctactccattgccaagt

SEQ ID NO: 85034 - DNA, 20 bp, Artificial Sequence
  Description of Artificial Sequence: Synthetic oligonucleotide
  Target: LAMA2; (-) strand; PAM type: NRG; PAM sequence: AAG
cctggttctactccattgcc

SEQ ID NO: 85035 - DNA, 20 bp, Artificial Sequence
  Description of Artificial Sequence: Synthetic oligonucleotide
  Target: LAMA2; (-) strand; PAM type: NRG; PAM sequence: TGG
taggcagcaaaccttcttcc

SEQ ID NO: 85036 - DNA, 20 bp, Artificial Sequence
  Description of Artificial Sequence: Synthetic oligonucleotide
  Target: LAMA2; (-) strand; PAM type: NRG; PAM sequence: CAG
ttcattcagtttattctagg

SEQ ID NO: 85037 - DNA, 20 bp, Artificial Sequence
  Description of Artificial Sequence: Synthetic oligonucleotide
  Target: LAMA2; (-) strand; PAM type: NRG; PAM sequence: AGG
aaattcattcagtttattct

SEQ ID NO: 85038 - DNA, 20 bp, Artificial Sequence
  Description of Artificial Sequence: Synthetic oligonucleotide
  Target: LAMA2; (-) strand; PAM type: NRG; PAM sequence: TAG
caaattcattcagtttattc

SEQ ID NO: 85039 - DNA, 20 bp, Artificial Sequence
  Description of Artificial Sequence: Synthetic oligonucleotide
  Target: LAMA2; (-) strand; PAM type: NRG; PAM sequence: CAG
ttttggtttacaaattcatt

SEQ ID NO: 85040 - DNA, 20 bp, Artificial Sequence
  Description of Artificial Sequence: Synthetic oligonucleotide
  Target: LAMA2; (-) strand; PAM type: NRG; PAM sequence: TGG
gggtcttagaattttatttt

SEQ ID NO: 85041 - DNA, 20 bp, Artificial Sequence
  Description of Artificial Sequence: Synthetic oligonucleotide
  Target: LAMA2; (-) strand; PAM type: NRG; PAM sequence: TAG
gtccgttcagtcaggggtct

SEQ ID NO: 85042 - DNA, 20 bp, Artificial Sequence
  Description of Artificial Sequence: Synthetic oligonucleotide
  Target: LAMA2; (-) strand; PAM type: NRG; PAM sequence: GGG
aagggggtccgttcagtcag

SEQ ID NO: 85043 - DNA, 20 bp, Artificial Sequence
  Description of Artificial Sequence: Synthetic oligonucleotide
  Target: LAMA2; (-) strand; PAM type: NRG; PAM sequence: GGG
gaagggggtccgttcagtca

SEQ ID NO: 85044 - DNA, 20 bp, Artificial Sequence
  Description of Artificial Sequence: Synthetic oligonucleotide
  Target: LAMA2; (-) strand; PAM type: NRG; PAM sequence: AGG
agaagggggtccgttcagtc

SEQ ID NO: 85045 - DNA, 20 bp, Artificial Sequence
  Description of Artificial Sequence: Synthetic oligonucleotide
  Target: LAMA2; (-) strand; PAM type: NRG; PAM sequence: CAG
aagaagggggtccgttcagt

SEQ ID NO: 85046 - DNA, 20 bp, Artificial Sequence
  Description of Artificial Sequence: Synthetic oligonucleotide
  Target: LAMA2; (-) strand; PAM type: NRG; PAM sequence: CAG
ggccaagaagggggtccgtt

SEQ ID NO: 85047 - DNA, 20 bp, Artificial Sequence
  Description of Artificial Sequence: Synthetic oligonucleotide
  Target: LAMA2; (-) strand; PAM type: NRG; PAM sequence: GGG
gattcccttggccaagaagg

SEQ ID NO: 85048 - DNA, 20 bp, Artificial Sequence
  Description of Artificial Sequence: Synthetic oligonucleotide
  Target: LAMA2; (-) strand; PAM type: NRG; PAM sequence: GGG
ggattcccttggccaagaag

SEQ ID NO: 85049 - DNA, 20 bp, Artificial Sequence
  Description of Artificial Sequence: Synthetic oligonucleotide
  Target: LAMA2; (-) strand; PAM type: NRG; PAM sequence: GGG
gggattcccttggccaagaa

SEQ ID NO: 85050 - DNA, 20 bp, Artificial Sequence
  Description of Artificial Sequence: Synthetic oligonucleotide
  Target: LAMA2; (-) strand; PAM type: NRG; PAM sequence: AGG
tgggattcccttggccaaga

SEQ ID NO: 85051 - DNA, 20 bp, Artificial Sequence
  Description of Artificial Sequence: Synthetic oligonucleotide
  Target: LAMA2; (-) strand; PAM type: NRG; PAM sequence: AAG
ttgggattcccttggccaag

SEQ ID NO: 85052 - DNA, 20 bp, Artificial Sequence
  Description of Artificial Sequence: Synthetic oligonucleotide
  Target: LAMA2; (-) strand; PAM type: NRG; PAM sequence: AAG
tctttgggattcccttggcc

SEQ ID NO: 85053 - DNA, 20 bp, Artificial Sequence
  Description of Artificial Sequence: Synthetic oligonucleotide
  Target: LAMA2; (-) strand; PAM type: NRG; PAM sequence: TGG
aggtttctttgggattccct

SEQ ID NO: 85054 - DNA, 20 bp, Artificial Sequence
  Description of Artificial Sequence: Synthetic oligonucleotide
  Target: LAMA2; (-) strand; PAM type: NRG; PAM sequence: GGG
aggtttctttaggtttcttt

SEQ ID NO: 85055 - DNA, 20 bp, Artificial Sequence
  Description of Artificial Sequence: Synthetic oligonucleotide
  Target: LAMA2; (-) strand; PAM type: NRG; PAM sequence: TGG
caggtttctttaggtttctt

SEQ ID NO: 85056 - DNA, 20 bp, Artificial Sequence
  Description of Artificial Sequence: Synthetic oligonucleotide
  Target: LAMA2; (-) strand; PAM type: NRG; PAM sequence: AGG
catgatgttcaggtttcttt

SEQ ID NO: 85057 - DNA, 20 bp, Artificial Sequence
  Description of Artificial Sequence: Synthetic oligonucleotide
  Target: LAMA2; (-) strand; PAM type: NRG; PAM sequence: TAG
ccatgatgttcaggtttctt

SEQ ID NO: 85058 - DNA, 20 bp, Artificial Sequence
  Description of Artificial Sequence: Synthetic oligonucleotide
  Target: LAMA2; (-) strand; PAM type: NRG; PAM sequence: AGG
cgtcccttcccatgatgttc

SEQ ID NO: 85059 - DNA, 20 bp, Artificial Sequence
  Description of Artificial Sequence: Synthetic oligonucleotide
  Target: LAMA2; (-) strand; PAM type: NRG; PAM sequence: CAG
tcgtcccttcccatgatgtt

SEQ ID NO: 85060 - DNA, 20 bp, Artificial Sequence
  Description of Artificial Sequence: Synthetic oligonucleotide
  Target: LAMA2; (-) strand; PAM type: NRG; PAM sequence: AGG
aaagggagcagggtataatg

SEQ ID NO: 85061 - DNA, 20 bp, Artificial Sequence
  Description of Artificial Sequence: Synthetic oligonucleotide
  Target: LAMA2; (-) strand; PAM type: NRG; PAM sequence: GAG
caaagggagcagggtataat

SEQ ID NO: 85062 - DNA, 20 bp, Artificial Sequence
  Description of Artificial Sequence: Synthetic oligonucleotide
  Target: LAMA2; (-) strand; PAM type: NRG; PAM sequence: GGG
tctaaactccaaagggagca

SEQ ID NO: 85063 - DNA, 20 bp, Artificial Sequence
  Description of Artificial Sequence: Synthetic oligonucleotide
  Target: LAMA2; (-) strand; PAM type: NRG; PAM sequence: AGG
gtctaaactccaaagggagc

SEQ ID NO: 85064 - DNA, 20 bp, Artificial Sequence
  Description of Artificial Sequence: Synthetic oligonucleotide
  Target: LAMA2; (-) strand; PAM type: NRG; PAM sequence: CAG
tgtctaaactccaaagggag

SEQ ID NO: 85065 - DNA, 20 bp, Artificial Sequence
  Description of Artificial Sequence: Synthetic oligonucleotide
  Target: LAMA2; (-) strand; PAM type: NRG; PAM sequence: GAG
tggtgtctaaactccaaagg

SEQ ID NO: 85066 - DNA, 20 bp, Artificial Sequence
  Description of Artificial Sequence: Synthetic oligonucleotide
  Target: LAMA2; (-) strand; PAM type: NRG; PAM sequence: GGG
tgtggtgtctaaactccaaa

SEQ ID NO: 85067 - DNA, 20 bp, Artificial Sequence
  Description of Artificial Sequence: Synthetic oligonucleotide
  Target: LAMA2; (-) strand; PAM type: NRG; PAM sequence: AGG
ctgtggtgtctaaactccaa

SEQ ID NO: 85068 - DNA, 20 bp, Artificial Sequence
  Description of Artificial Sequence: Synthetic oligonucleotide
  Target: LAMA2; (-) strand; PAM type: NRG; PAM sequence: AAG
tctgtggtgtctaaactcca

SEQ ID NO: 85069 - DNA, 20 bp, Artificial Sequence
  Description of Artificial Sequence: Synthetic oligonucleotide
  Target: LAMA2; (-) strand; PAM type: NRG; PAM sequence: TGG
ttaatgttactgttggtctg

SEQ ID NO: 85070 - DNA, 20 bp, Artificial Sequence
  Description of Artificial Sequence: Synthetic oligonucleotide
  Target: LAMA2; (-) strand; PAM type: NRG; PAM sequence: TGG
ctctgttttaatgttactgt

SEQ ID NO: 85071 - DNA, 20 bp, Artificial Sequence
  Description of Artificial Sequence: Synthetic oligonucleotide
  Target: LAMA2; (-) strand; PAM type: NRG; PAM sequence: CAG
ctgtaaagtgtctgtctagt

SEQ ID NO: 85072 - DNA, 20 bp, Artificial Sequence
  Description of Artificial Sequence: Synthetic oligonucleotide
  Target: LAMA2; (-) strand; PAM type: NRG; PAM sequence: TAG
gttgctgtaaagtgtctgtc

SEQ ID NO: 85073 - DNA, 20 bp, Artificial Sequence
  Description of Artificial Sequence: Synthetic oligonucleotide
  Target: LAMA2; (-) strand; PAM type: NRG; PAM sequence: AAG
tttggtatcttgttgctgta

SEQ ID NO: 85074 - DNA, 20 bp, Artificial Sequence
  Description of Artificial Sequence: Synthetic oligonucleotide
  Target: LAMA2; (-) strand; PAM type: NRG; PAM sequence: TGG
accagagtgaggttagaatt

SEQ ID NO: 85075 - DNA, 20 bp, Artificial Sequence
  Description of Artificial Sequence: Synthetic oligonucleotide
  Target: LAMA2; (-) strand; PAM type: NRG; PAM sequence: TAG
atgctataccagagtgaggt

SEQ ID NO: 85076 - DNA, 20 bp, Artificial Sequence
  Description of Artificial Sequence: Synthetic oligonucleotide
  Target: LAMA2; (-) strand; PAM type: NRG; PAM sequence: AGG
tgttatgctataccagagtg

SEQ ID NO: 85077 - DNA, 20 bp, Artificial Sequence
  Description of Artificial Sequence: Synthetic oligonucleotide
  Target: LAMA2; (-) strand; PAM type: NRG; PAM sequence: GAG
atgttatgctataccagagt

SEQ ID NO: 85078 - DNA, 20 bp, Artificial Sequence
  Description of Artificial Sequence: Synthetic oligonucleotide
  Target: LAMA2; (-) strand; PAM type: NRG; PAM sequence: GAG
tgttatgttatgctatacca

SEQ ID NO: 85079 - DNA, 20 bp, Artificial Sequence
  Description of Artificial Sequence: Synthetic oligonucleotide
  Target: LAMA2; (-) strand; PAM type: NRG; PAM sequence: CAG
tctgttatgttatgctatac

SEQ ID NO: 85080 - DNA, 20 bp, Artificial Sequence
  Description of Artificial Sequence: Synthetic oligonucleotide
  Target: LAMA2; (-) strand; PAM type: NRG; PAM sequence: GGG
aaatactttgatttctttta

SEQ ID NO: 85081 - DNA, 20 bp, Artificial Sequence
  Description of Artificial Sequence: Synthetic oligonucleotide
  Target: LAMA2; (-) strand; PAM type: NRG; PAM sequence: AGG
aaaatactttgatttctttt

SEQ ID NO: 85082 - DNA, 20 bp, Artificial Sequence
  Description of Artificial Sequence: Synthetic oligonucleotide
  Target: LAMA2; (-) strand; PAM type: NRG; PAM sequence: TAG
taaaatactttgatttcttt

SEQ ID NO: 85083 - DNA, 20 bp, Artificial Sequence
  Description of Artificial Sequence: Synthetic oligonucleotide
  Target: LAMA2; (-) strand; PAM type: NRG; PAM sequence: TGG
tatgtcaaataaatatattt

SEQ ID NO: 85084 - DNA, 20 bp, Artificial Sequence
  Description of Artificial Sequence: Synthetic oligonucleotide
  Target: LAMA2; (-) strand; PAM type: NRG; PAM sequence: CAG
acagctttgcaaggtcattt

SEQ ID NO: 85085 - DNA, 20 bp, Artificial Sequence
  Description of Artificial Sequence: Synthetic oligonucleotide
  Target: LAMA2; (-) strand; PAM type: NRG; PAM sequence: AGG
ccccaagagacagctttgca

SEQ ID NO: 85086 - DNA, 20 bp, Artificial Sequence
  Description of Artificial Sequence: Synthetic oligonucleotide
  Target: LAMA2; (-) strand; PAM type: NRG; PAM sequence: AAG
tccccaagagacagctttgc

SEQ ID NO: 85087 - DNA, 20 bp, Artificial Sequence
  Description of Artificial Sequence: Synthetic oligonucleotide
  Target: LAMA2; (-) strand; PAM type: NRG; PAM sequence: CAG
atgcaaatttccccaagaga

SEQ ID NO: 85088 - DNA, 20 bp, Artificial Sequence
  Description of Artificial Sequence: Synthetic oligonucleotide
  Target: LAMA2; (-) strand; PAM type: NRG; PAM sequence: GAG
tagaatgcaaatttccccaa

SEQ ID NO: 85089 - DNA, 20 bp, Artificial Sequence
  Description of Artificial Sequence: Synthetic oligonucleotide
  Target: LAMA2; (-) strand; PAM type: NRG; PAM sequence: AAG
tatagaatgcaaatttcccc

SEQ ID NO: 85090 - DNA, 20 bp, Artificial Sequence
  Description of Artificial Sequence: Synthetic oligonucleotide
  Target: LAMA2; (-) strand; PAM type: NRG; PAM sequence: TAG
taagggaaggagattctcta

SEQ ID NO: 85091 - DNA, 20 bp, Artificial Sequence
  Description of Artificial Sequence: Synthetic oligonucleotide
  Target: LAMA2; (-) strand; PAM type: NRG; PAM sequence: GAG
aaaagacttagtaagggaag

SEQ ID NO: 85092 - DNA, 20 bp, Artificial Sequence
  Description of Artificial Sequence: Synthetic oligonucleotide
  Target: LAMA2; (-) strand; PAM type: NRG; PAM sequence: AGG
agaaaagacttagtaaggga

SEQ ID NO: 85093 - DNA, 20 bp, Artificial Sequence
  Description of Artificial Sequence: Synthetic oligonucleotide
  Target: LAMA2; (-) strand; PAM type: NRG; PAM sequence: AAG
cagaaaagacttagtaaggg

SEQ ID NO: 85094 - DNA, 20 bp, Artificial Sequence
  Description of Artificial Sequence: Synthetic oligonucleotide
  Target: LAMA2; (-) strand; PAM type: NRG; PAM sequence: GGG
ctccagaaaagacttagtaa

SEQ ID NO: 85095 - DNA, 20 bp, Artificial Sequence
  Description of Artificial Sequence: Synthetic oligonucleotide
  Target: LAMA2; (-) strand; PAM type: NRG; PAM sequence: AGG
tctccagaaaagacttagta

SEQ ID NO: 85096 - DNA, 20 bp, Artificial Sequence
  Description of Artificial Sequence: Synthetic oligonucleotide
  Target: LAMA2; (-) strand; PAM type: NRG; PAM sequence: AAG
ctctccagaaaagacttagt

SEQ ID NO: 85097 - DNA, 20 bp, Artificial Sequence
  Description of Artificial Sequence: Synthetic oligonucleotide
  Target: LAMA2; (-) strand; PAM type: NRG; PAM sequence: TAG
ctgactctccagaaaagact

SEQ ID NO: 85098 - DNA, 20 bp, Artificial Sequence
  Description of Artificial Sequence: Synthetic oligonucleotide
  Target: LAMA2; (-) strand; PAM type: NRG; PAM sequence: AAG
aggtatctgactctccagaa

SEQ ID NO: 85099 - DNA, 20 bp, Artificial Sequence
  Description of Artificial Sequence: Synthetic oligonucleotide
  Target: LAMA2; (-) strand; PAM type: NRG; PAM sequence: CAG
ttaaaaggtatctgactctc

SEQ ID NO: 85100 - DNA, 20 bp, Artificial Sequence
  Description of Artificial Sequence: Synthetic oligonucleotide
  Target: LAMA2; (-) strand; PAM type: NRG; PAM sequence: AGG
gtctcttgccagaccttaaa

SEQ ID NO: 85101 - DNA, 20 bp, Artificial Sequence
  Description of Artificial Sequence: Synthetic oligonucleotide
  Target: LAMA2; (-) strand; PAM type: NRG; PAM sequence: AAG
tgtctcttgccagaccttaa

SEQ ID NO: 85102 - DNA, 20 bp, Artificial Sequence
  Description of Artificial Sequence: Synthetic oligonucleotide
  Target: LAMA2; (-) strand; PAM type: NRG; PAM sequence: CAG
tgatggtgaatgtctcttgc

SEQ ID NO: 85103 - DNA, 20 bp, Artificial Sequence
  Description of Artificial Sequence: Synthetic oligonucleotide
  Target: LAMA2; (-) strand; PAM type: NRG; PAM sequence: TGG
agggtaaagtagcaggctga

SEQ ID NO: 85104 - DNA, 20 bp, Artificial Sequence
  Description of Artificial Sequence: Synthetic oligonucleotide
  Target: LAMA2; (-) strand; PAM type: NRG; PAM sequence: AGG
aggtagtagggtaaagtagc

SEQ ID NO: 85105 - DNA, 20 bp, Artificial Sequence
  Description of Artificial Sequence: Synthetic oligonucleotide
  Target: LAMA2; (-) strand; PAM type: NRG; PAM sequence: CAG
aaggtagtagggtaaagtag

SEQ ID NO: 85106 - DNA, 20 bp, Artificial Sequence
  Description of Artificial Sequence: Synthetic oligonucleotide
  Target: LAMA2; (-) strand; PAM type: NRG; PAM sequence: TAG
ctcaaggtagtagggtaaag

SEQ ID NO: 85107 - DNA, 20 bp, Artificial Sequence
  Description of Artificial Sequence: Synthetic oligonucleotide
  Target: LAMA2; (-) strand; PAM type: NRG; PAM sequence: AAG
agcctcaaggtagtagggta

SEQ ID NO: 85108 - DNA, 20 bp, Artificial Sequence
  Description of Artificial Sequence: Synthetic oligonucleotide
  Target: LAMA2; (-) strand; PAM type: NRG; PAM sequence: GGG
gatgaagcctcaaggtagta

SEQ ID NO: 85109 - DNA, 20 bp, Artificial Sequence
  Description of Artificial Sequence: Synthetic oligonucleotide
  Target: LAMA2; (-) strand; PAM type: NRG; PAM sequence: AGG
agatgaagcctcaaggtagt

SEQ ID NO: 85110 - DNA, 20 bp, Artificial Sequence
  Description of Artificial Sequence: Synthetic oligonucleotide
  Target: LAMA2; (-) strand; PAM type: NRG; PAM sequence: TAG
tagatgaagcctcaaggtag

SEQ ID NO: 85111 - DNA, 20 bp, Artificial Sequence
  Description of Artificial Sequence: Synthetic oligonucleotide
  Target: LAMA2; (-) strand; PAM type: NRG; PAM sequence: TAG
atgtagatgaagcctcaagg

SEQ ID NO: 85112 - DNA, 20 bp, Artificial Sequence
  Description of Artificial Sequence: Synthetic oligonucleotide
  Target: LAMA2; (-) strand; PAM type: NRG; PAM sequence: AGG
gtcatgtagatgaagcctca

SEQ ID NO: 85113 - DNA, 20 bp, Artificial Sequence
  Description of Artificial Sequence: Synthetic oligonucleotide
  Target: LAMA2; (-) strand; PAM type: NRG; PAM sequence: AAG
tgtcatgtagatgaagcctc

SEQ ID NO: 85114 - DNA, 20 bp, Artificial Sequence
  Description of Artificial Sequence: Synthetic oligonucleotide
  Target: LAMA2; (-) strand; PAM type: NRG; PAM sequence: AAG
cggttcttgtcatgtagatg

SEQ ID NO: 85115 - DNA, 20 bp, Artificial Sequence
  Description of Artificial Sequence: Synthetic oligonucleotide
  Target: LAMA2; (-) strand; PAM type: NRG; PAM sequence: TAG
aagccacggttcttgtcatg

SEQ ID NO: 85116 - DNA, 20 bp, Artificial Sequence
  Description of Artificial Sequence: Synthetic oligonucleotide
  Target: LAMA2; (-) strand; PAM type: NRG; PAM sequence: CGG
agagtgggttgtggaagcca

SEQ ID NO: 85117 - DNA, 20 bp, Artificial Sequence
  Description of Artificial Sequence: Synthetic oligonucleotide
  Target: LAMA2; (-) strand; PAM type: NRG; PAM sequence: AAG
gttaagagagtgggttgtgg

SEQ ID NO: 85118 - DNA, 20 bp, Artificial Sequence
  Description of Artificial Sequence: Synthetic oligonucleotide
  Target: LAMA2; (-) strand; PAM type: NRG; PAM sequence: TGG
tgagttaagagagtgggttg

SEQ ID NO: 85119 - DNA, 20 bp, Artificial Sequence
  Description of Artificial Sequence: Synthetic oligonucleotide
  Target: LAMA2; (-) strand; PAM type: NRG; PAM sequence: GGG
tcagcttgagttaagagagt

SEQ ID NO: 85120 - DNA, 20 bp, Artificial Sequence
  Description of Artificial Sequence: Synthetic oligonucleotide
  Target: LAMA2; (-) strand; PAM type: NRG; PAM sequence: TGG
gtcagcttgagttaagagag

SEQ ID NO: 85121 - DNA, 20 bp, Artificial Sequence
  Description of Artificial Sequence: Synthetic oligonucleotide
  Target: LAMA2; (-) strand; PAM type: NRG; PAM sequence: GAG
gaagtcagcttgagttaaga

SEQ ID NO: 85122 - DNA, 20 bp, Artificial Sequence
  Description of Artificial Sequence: Synthetic oligonucleotide
  Target: LAMA2; (-) strand; PAM type: NRG; PAM sequence: GAG
ttgaagtcagcttgagttaa

SEQ ID NO: 85123 - DNA, 20 bp, Artificial Sequence
  Description of Artificial Sequence: Synthetic oligonucleotide
  Target: LAMA2; (-) strand; PAM type: NRG; PAM sequence: AAG
agttgaagtcagcttgagtt

SEQ ID NO: 85124 - DNA, 20 bp, Artificial Sequence
  Description of Artificial Sequence: Synthetic oligonucleotide
  Target: LAMA2; (-) strand; PAM type: NRG; PAM sequence: GAG
tgaacagttgaagtcagctt

SEQ ID NO: 85125 - DNA, 20 bp, Artificial Sequence
  Description of Artificial Sequence: Synthetic oligonucleotide
  Target: LAMA2; (-) strand; PAM type: NRG; PAM sequence: CAG
tctgcctgaacagttgaagt

SEQ ID NO: 85126 - DNA, 20 bp, Artificial Sequence
  Description of Artificial Sequence: Synthetic oligonucleotide
  Target: LAMA2; (-) strand; PAM type: NRG; PAM sequence: AAG
aaattctgcctgaacagttg

SEQ ID NO: 85127 - DNA, 20 bp, Artificial Sequence
  Description of Artificial Sequence: Synthetic oligonucleotide
  Target: LAMA2; (-) strand; PAM type: NRG; PAM sequence: CAG
agagtaaaattctgcctgaa

SEQ ID NO: 85128 - DNA, 20 bp, Artificial Sequence
  Description of Artificial Sequence: Synthetic oligonucleotide
  Target: LAMA2; (-) strand; PAM type: NRG; PAM sequence: GAG
tgactggcaattggtcgaaa

SEQ ID NO: 85129 - DNA, 20 bp, Artificial Sequence
  Description of Artificial Sequence: Synthetic oligonucleotide
  Target: LAMA2; (-) strand; PAM type: NRG; PAM sequence: AAG
tctgactggcaattggtcga

SEQ ID NO: 85130 - DNA, 20 bp, Artificial Sequence
  Description of Artificial Sequence: Synthetic oligonucleotide
  Target: LAMA2; (-) strand; PAM type: NRG; PAM sequence: TGG
aagattttctgactggcaat

SEQ ID NO: 85131 - DNA, 20 bp, Artificial Sequence
  Description of Artificial Sequence: Synthetic oligonucleotide
  Target: LAMA2; (-) strand; PAM type: NRG; PAM sequence: TGG
ggattcaaagattttctgac

SEQ ID NO: 85132 - DNA, 20 bp, Artificial Sequence
  Description of Artificial Sequence: Synthetic oligonucleotide
  Target: LAMA2; (-) strand; PAM type: NRG; PAM sequence: AAG
ccaagtcattgatggattca

SEQ ID NO: 85133 - DNA, 20 bp, Artificial Sequence
  Description of Artificial Sequence: Synthetic oligonucleotide
  Target: LAMA2; (-) strand; PAM type: NRG; PAM sequence: TGG
gggggcttccaagtcattga

SEQ ID NO: 85134 - DNA, 20 bp, Artificial Sequence
  Description of Artificial Sequence: Synthetic oligonucleotide
  Target: LAMA2; (-) strand; PAM type: NRG; PAM sequence: AAG
gaagcgaggtgggggcttcc

SEQ ID NO: 85135 - DNA, 20 bp, Artificial Sequence
  Description of Artificial Sequence: Synthetic oligonucleotide
  Target: LAMA2; (-) strand; PAM type: NRG; PAM sequence: GGG
gacatcttgaagcgaggtgg

SEQ ID NO: 85136 - DNA, 20 bp, Artificial Sequence
  Description of Artificial Sequence: Synthetic oligonucleotide
  Target: LAMA2; (-) strand; PAM type: NRG; PAM sequence: GGG
ggacatcttgaagcgaggtg

SEQ ID NO: 85137 - DNA, 20 bp, Artificial Sequence
  Description of Artificial Sequence: Synthetic oligonucleotide
  Target: LAMA2; (-) strand; PAM type: NRG; PAM sequence: GGG
aggacatcttgaagcgaggt

SEQ ID NO: 85138 - DNA, 20 bp, Artificial Sequence
  Description of Artificial Sequence: Synthetic oligonucleotide
  Target: LAMA2; (-) strand; PAM type: NRG; PAM sequence: TGG
taggacatcttgaagcgagg

SEQ ID NO: 85139 - DNA, 20 bp, Artificial Sequence
  Description of Artificial Sequence: Synthetic oligonucleotide
  Target: LAMA2; (-) strand; PAM type: NRG; PAM sequence: AGG
aagtaggacatcttgaagcg

SEQ ID NO: 85140 - DNA, 20 bp, Artificial Sequence
  Description of Artificial Sequence: Synthetic oligonucleotide
  Target: LAMA2; (-) strand; PAM type: NRG; PAM sequence: GAG
aaagtaggacatcttgaagc

SEQ ID NO: 85141 - DNA, 20 bp, Artificial Sequence
  Description of Artificial Sequence: Synthetic oligonucleotide
  Target: LAMA2; (-) strand; PAM type: NRG; PAM sequence: AAG
cagaaaagtaggacatcttg

SEQ ID NO: 85142 - DNA, 20 bp, Artificial Sequence
  Description of Artificial Sequence: Synthetic oligonucleotide
  Target: LAMA2; (-) strand; PAM type: NRG; PAM sequence: AGG
ttggttcggcccagaaaagt

SEQ ID NO: 85143 - DNA, 20 bp, Artificial Sequence
  Description of Artificial Sequence: Synthetic oligonucleotide
  Target: LAMA2; (-) strand; PAM type: NRG; PAM sequence: TAG
attggttcggcccagaaaag

SEQ ID NO: 85144 - DNA, 20 bp, Artificial Sequence
  Description of Artificial Sequence: Synthetic oligonucleotide
  Target: LAMA2; (-) strand; PAM type: NRG; PAM sequence: AAG
cacattggttcggcccagaa

SEQ ID NO: 85145 - DNA, 20 bp, Artificial Sequence
  Description of Artificial Sequence: Synthetic oligonucleotide
  Target: LAMA2; (-) strand; PAM type: NRG; PAM sequence: CAG
agttacacattggttcggcc

SEQ ID NO: 85146 - DNA, 20 bp, Artificial Sequence
  Description of Artificial Sequence: Synthetic oligonucleotide
  Target: LAMA2; (-) strand; PAM type: NRG; PAM sequence: CGG
tactaagttacacattggtt

SEQ ID NO: 85147 - DNA, 20 bp, Artificial Sequence
  Description of Artificial Sequence: Synthetic oligonucleotide
  Target: LAMA2; (-) strand; PAM type: NRG; PAM sequence: TGG
accagtactaagttacacat

SEQ ID NO: 85148 - DNA, 20 bp, Artificial Sequence
  Description of Artificial Sequence: Synthetic oligonucleotide
  Target: LAMA2; (-) strand; PAM type: NRG; PAM sequence: AAG
caaagacatacaccagtact

SEQ ID NO: 85149 - DNA, 20 bp, Artificial Sequence
  Description of Artificial Sequence: Synthetic oligonucleotide
  Target: LAMA2; (-) strand; PAM type: NRG; PAM sequence: CAG
ttgcaggcaaagacatacac

SEQ ID NO: 85150 - DNA, 20 bp, Artificial Sequence
  Description of Artificial Sequence: Synthetic oligonucleotide
  Target: LAMA2; (-) strand; PAM type: NRG; PAM sequence: AAG
ggagacgaaagttgcaggca

SEQ ID NO: 85151 - DNA, 20 bp, Artificial Sequence
  Description of Artificial Sequence: Synthetic oligonucleotide
  Target: LAMA2; (-) strand; PAM type: NRG; PAM sequence: AGG
tttagggagacgaaagttgc

SEQ ID NO: 85152 - DNA, 20 bp, Artificial Sequence
  Description of Artificial Sequence: Synthetic oligonucleotide
  Target: LAMA2; (-) strand; PAM type: NRG; PAM sequence: CAG
ttttagggagacgaaagttg

SEQ ID NO: 85153 - DNA, 20 bp, Artificial Sequence
  Description of Artificial Sequence: Synthetic oligonucleotide
  Target: LAMA2; (-) strand; PAM type: NRG; PAM sequence: AAG
tatatattttagggagacga

SEQ ID NO: 85154 - DNA, 20 bp, Artificial Sequence
  Description of Artificial Sequence: Synthetic oligonucleotide
  Target: LAMA2; (-) strand; PAM type: NRG; PAM sequence: GAG
ttggcgttatatattttagg

SEQ ID NO: 85155 - DNA, 20 bp, Artificial Sequence
  Description of Artificial Sequence: Synthetic oligonucleotide
  Target: LAMA2; (-) strand; PAM type: NRG; PAM sequence: GGG
gcttggcgttatatatttta

SEQ ID NO: 85156 - DNA, 20 bp, Artificial Sequence
  Description of Artificial Sequence: Synthetic oligonucleotide
  Target: LAMA2; (-) strand; PAM type: NRG; PAM sequence: AGG
agcttggcgttatatatttt

SEQ ID NO: 85157 - DNA, 20 bp, Artificial Sequence
  Description of Artificial Sequence: Synthetic oligonucleotide
  Target: LAMA2; (-) strand; PAM type: NRG; PAM sequence: TAG
cagcttggcgttatatattt

SEQ ID NO: 85158 - DNA, 20 bp, Artificial Sequence
  Description of Artificial Sequence: Synthetic oligonucleotide
  Target: LAMA2; (-) strand; PAM type: NRG; PAM sequence: TGG
aagatgactgggttacagct

SEQ ID NO: 85159 - DNA, 20 bp, Artificial Sequence
  Description of Artificial Sequence: Synthetic oligonucleotide
  Target: LAMA2; (-) strand; PAM type: NRG; PAM sequence: CAG
tgccaaagatgactgggtta

SEQ ID NO: 85160 - DNA, 20 bp, Artificial Sequence
  Description of Artificial Sequence: Synthetic oligonucleotide
  Target: LAMA2; (-) strand; PAM type: NRG; PAM sequence: GGG
aatatgtgccaaagatgact

SEQ ID NO: 85161 - DNA, 20 bp, Artificial Sequence
  Description of Artificial Sequence: Synthetic oligonucleotide
  Target: LAMA2; (-) strand; PAM type: NRG; PAM sequence: TGG
gaatatgtgccaaagatgac

SEQ ID NO: 85162 - DNA, 20 bp, Artificial Sequence
  Description of Artificial Sequence: Synthetic oligonucleotide
  Target: LAMA2; (-) strand; PAM type: NRG; PAM sequence: AAG
ggtcctgagaatatgtgcca

SEQ ID NO: 85163 - DNA, 20 bp, Artificial Sequence
  Description of Artificial Sequence: Synthetic oligonucleotide
  Target: LAMA2; (-) strand; PAM type: NRG; PAM sequence: GAG
acacagccttaggaggtcct

SEQ ID NO: 85164 - DNA, 20 bp, Artificial Sequence
  Description of Artificial Sequence: Synthetic oligonucleotide
  Target: LAMA2; (-) strand; PAM type: NRG; PAM sequence: AGG
gcctgtgacacagccttagg

SEQ ID NO: 85165 - DNA, 20 bp, Artificial Sequence
  Description of Artificial Sequence: Synthetic oligonucleotide
  Target: LAMA2; (-) strand; PAM type: NRG; PAM sequence: GAG
ggcctgtgacacagccttag

SEQ ID NO: 85166 - DNA, 20 bp, Artificial Sequence
  Description of Artificial Sequence: Synthetic oligonucleotide
  Target: LAMA2; (-) strand; PAM type: NRG; PAM sequence: AGG
atggcctgtgacacagcctt

SEQ ID NO: 85167 - DNA, 20 bp, Artificial Sequence
  Description of Artificial Sequence: Synthetic oligonucleotide
  Target: LAMA2; (-) strand; PAM type: NRG; PAM sequence: TAG
catggcctgtgacacagcct

SEQ ID NO: 85168 - DNA, 20 bp, Artificial Sequence
  Description of Artificial Sequence: Synthetic oligonucleotide
  Target: LAMA2; (-) strand; PAM type: NRG; PAM sequence: CAG
aaggaccatggcctgtgaca

SEQ ID NO: 85169 - DNA, 20 bp, Artificial Sequence
  Description of Artificial Sequence: Synthetic oligonucleotide
  Target: LAMA2; (-) strand; PAM type: NRG; PAM sequence: TGG
tttggcaaggttaaggacca

SEQ ID NO: 85170 - DNA, 20 bp, Artificial Sequence
  Description of Artificial Sequence: Synthetic oligonucleotide
  Target: LAMA2; (-) strand; PAM type: NRG; PAM sequence: AGG
aggtttatttggcaaggtta

SEQ ID NO: 85171 - DNA, 20 bp, Artificial Sequence
  Description of Artificial Sequence: Synthetic oligonucleotide
  Target: LAMA2; (-) strand; PAM type: NRG; PAM sequence: AAG
gaggtttatttggcaaggtt

SEQ ID NO: 85172 - DNA, 20 bp, Artificial Sequence
  Description of Artificial Sequence: Synthetic oligonucleotide
  Target: LAMA2; (-) strand; PAM type: NRG; PAM sequence: AGG
atttagaggtttatttggca

SEQ ID NO: 85173 - DNA, 20 bp, Artificial Sequence
  Description of Artificial Sequence: Synthetic oligonucleotide
  Target: LAMA2; (-) strand; PAM type: NRG; PAM sequence: AAG
aatttagaggtttatttggc

SEQ ID NO: 85174 - DNA, 20 bp, Artificial Sequence
  Description of Artificial Sequence: Synthetic oligonucleotide
  Target: LAMA2; (-) strand; PAM type: NRG; PAM sequence: TGG
aatcaatttagaggtttatt

SEQ ID NO: 85175 - DNA, 20 bp, Artificial Sequence
  Description of Artificial Sequence: Synthetic oligonucleotide
  Target: LAMA2; (-) strand; PAM type: NRG; PAM sequence: AGG
acaggtctcaatcaatttag

SEQ ID NO: 85176 - DNA, 20 bp, Artificial Sequence
  Description of Artificial Sequence: Synthetic oligonucleotide
  Target: LAMA2; (-) strand; PAM type: NRG; PAM sequence: GAG
aacaggtctcaatcaattta

SEQ ID NO: 85177 - DNA, 20 bp, Artificial Sequence
  Description of Artificial Sequence: Synthetic oligonucleotide
  Target: LAMA2; (-) strand; PAM type: NRG; PAM sequence: TAG
gaaacaggtctcaatcaatt

SEQ ID NO: 85178 - DNA, 20 bp, Artificial Sequence
  Description of Artificial Sequence: Synthetic oligonucleotide
  Target: LAMA2; (-) strand; PAM type: NRG; PAM sequence: AGG
aaccaaaaagtatcagaaac

SEQ ID NO: 85179 - DNA, 20 bp, Artificial Sequence
  Description of Artificial Sequence: Synthetic oligonucleotide
  Target: LAMA2; (-) strand; PAM type: NRG; PAM sequence: CAG
aaaccaaaaagtatcagaaa

SEQ ID NO: 85180 - DNA, 20 bp, Artificial Sequence
  Description of Artificial Sequence: Synthetic oligonucleotide
  Target: LAMA2; (-) strand; PAM type: NRG; PAM sequence: CAG
atttgtaaaccaaaaagtat

SEQ ID NO: 85181 - DNA, 20 bp, Artificial Sequence
  Description of Artificial Sequence: Synthetic oligonucleotide
  Target: LAMA2; (-) strand; PAM type: NRG; PAM sequence: AAG
ttaacaatttgtaaaccaaa

SEQ ID NO: 85182 - DNA, 20 bp, Artificial Sequence
  Description of Artificial Sequence: Synthetic oligonucleotide
  Target: LAMA2; (-) strand; PAM type: NRG; PAM sequence: GAG
catagctatgggaaataaat

SEQ ID NO: 85183 - DNA, 20 bp, Artificial Sequence
  Description of Artificial Sequence: Synthetic oligonucleotide
  Target: LAMA2; (-) strand; PAM type: NRG; PAM sequence: GGG
gcagattctatcatagctat

SEQ ID NO: 85184 - DNA, 20 bp, Artificial Sequence
  Description of Artificial Sequence: Synthetic oligonucleotide
  Target: LAMA2; (-) strand; PAM type: NRG; PAM sequence: TGG
agcagattctatcatagcta

SEQ ID NO: 85185 - DNA, 20 bp, Artificial Sequence
  Description of Artificial Sequence: Synthetic oligonucleotide
  Target: LAMA2; (-) strand; PAM type: NRG; PAM sequence: TAG
ttacacagcagattctatca

SEQ ID NO: 85186 - DNA, 20 bp, Artificial Sequence
  Description of Artificial Sequence: Synthetic oligonucleotide
  Target: LAMA2; (-) strand; PAM type: NRG; PAM sequence: CAG
tttgtgttacttttacacag

SEQ ID NO: 85187 - DNA, 20 bp, Artificial Sequence
  Description of Artificial Sequence: Synthetic oligonucleotide
  Target: LAMA2; (-) strand; PAM type: NRG; PAM sequence: CAG
gcatttgtgttacttttaca

SEQ ID NO: 85188 - DNA, 20 bp, Artificial Sequence
  Description of Artificial Sequence: Synthetic oligonucleotide
  Target: LAMA2; (-) strand; PAM type: NRG; PAM sequence: GAG
aggtttctatgtttgacctt

SEQ ID NO: 85189 - DNA, 20 bp, Artificial Sequence
  Description of Artificial Sequence: Synthetic oligonucleotide
  Target: LAMA2; (-) strand; PAM type: NRG; PAM sequence: AGG
atgacggatatgtaagacag

SEQ ID NO: 85190 - DNA, 20 bp, Artificial Sequence
  Description of Artificial Sequence: Synthetic oligonucleotide
  Target: LAMA2; (-) strand; PAM type: NRG; PAM sequence: GAG
tatgacggatatgtaagaca

SEQ ID NO: 85191 - DNA, 20 bp, Artificial Sequence
  Description of Artificial Sequence: Synthetic oligonucleotide
  Target: LAMA2; (-) strand; PAM type: NRG; PAM sequence: CAG
gttatgacggatatgtaaga

SEQ ID NO: 85192 - DNA, 20 bp, Artificial Sequence
  Description of Artificial Sequence: Synthetic oligonucleotide
  Target: LAMA2; (-) strand; PAM type: NRG; PAM sequence: AAG
gaatgttatgacggatatgt

SEQ ID NO: 85193 - DNA, 20 bp, Artificial Sequence
  Description of Artificial Sequence: Synthetic oligonucleotide
  Target: LAMA2; (-) strand; PAM type: NRG; PAM sequence: CGG
acgtcaagagaatgttatga

SEQ ID NO: 85194 - DNA, 20 bp, Artificial Sequence
  Description of Artificial Sequence: Synthetic oligonucleotide
  Target: LAMA2; (-) strand; PAM type: NRG; PAM sequence: GAG
ttaattaggaaaaacgtcaa

SEQ ID NO: 85195 - DNA, 20 bp, Artificial Sequence
  Description of Artificial Sequence: Synthetic oligonucleotide
  Target: LAMA2; (-) strand; PAM type: NRG; PAM sequence: AAG
atttaattaggaaaaacgtc

SEQ ID NO: 85196 - DNA, 20 bp, Artificial Sequence
  Description of Artificial Sequence: Synthetic oligonucleotide
  Target: LAMA2; (-) strand; PAM type: NRG; PAM sequence: AGG
aatgctttataaatttaatt

SEQ ID NO: 85197 - DNA, 20 bp, Artificial Sequence
  Description of Artificial Sequence: Synthetic oligonucleotide
  Target: LAMA2; (-) strand; PAM type: NRG; PAM sequence: TAG
taatgctttataaatttaat

SEQ ID NO: 85198 - DNA, 20 bp, Artificial Sequence
  Description of Artificial Sequence: Synthetic oligonucleotide
  Target: LAMA2; (-) strand; PAM type: NRG; PAM sequence: TAG
tatataacaatttttaacat

SEQ ID NO: 85199 - DNA, 20 bp, Artificial Sequence
  Description of Artificial Sequence: Synthetic oligonucleotide
  Target: LAMA2; (-) strand; PAM type: NRG; PAM sequence: CAG
aaaatgtaaaacactgtaga

SEQ ID NO: 85200 - DNA, 20 bp, Artificial Sequence
  Description of Artificial Sequence: Synthetic oligonucleotide
  Target: LAMA2; (-) strand; PAM type: NRG; PAM sequence: TAG
aaacaaaatgtaaaacactg

SEQ ID NO: 85201 - DNA, 20 bp, Artificial Sequence
  Description of Artificial Sequence: Synthetic oligonucleotide
  Target: LAMA2; (-) strand; PAM type: NRG; PAM sequence: CAG
tctcctatctagtattcatt

SEQ ID NO: 85202 - DNA, 20 bp, Artificial Sequence
  Description of Artificial Sequence: Synthetic oligonucleotide
  Target: LAMA2; (-) strand; PAM type: NRG; PAM sequence: TAG
aaatggaacattctcctatc

SEQ ID NO: 85203 - DNA, 20 bp, Artificial Sequence
  Description of Artificial Sequence: Synthetic oligonucleotide
  Target: LAMA2; (-) strand; PAM type: NRG; PAM sequence: TGG
tctcaagagtttttattaaa

SEQ ID NO: 85204 - DNA, 20 bp, Artificial Sequence
  Description of Artificial Sequence: Synthetic oligonucleotide
  Target: LAMA2; (-) strand; PAM type: NRG; PAM sequence: GAG
agctattttatttttctcaa

SEQ ID NO: 85205 - DNA, 20 bp, Artificial Sequence
  Description of Artificial Sequence: Synthetic oligonucleotide
  Target: LAMA2; (-) strand; PAM type: NRG; PAM sequence: AAG
taagctattttatttttctc

SEQ ID NO: 85206 - DNA, 20 bp, Artificial Sequence
  Description of Artificial Sequence: Synthetic oligonucleotide
  Target: LAMA2; (-) strand; PAM type: NRG; PAM sequence: AAG
cattgaaattactgttaagt

SEQ ID NO: 85207 - DNA, 20 bp, Artificial Sequence
  Description of Artificial Sequence: Synthetic oligonucleotide
  Target: LAMA2; (-) strand; PAM type: NRG; PAM sequence: AAG
ctcacattgaaattactgtt

SEQ ID NO: 85208 - DNA, 20 bp, Artificial Sequence
  Description of Artificial Sequence: Synthetic oligonucleotide
  Target: LAMA2; (-) strand; PAM type: NRG; PAM sequence: AAG
aatgtagccctagattacgt

SEQ ID NO: 85209 - DNA, 20 bp, Artificial Sequence
  Description of Artificial Sequence: Synthetic oligonucleotide
  Target: LAMA2; (-) strand; PAM type: NRG; PAM sequence: TAG
aattcctgccaatgtagccc

SEQ ID NO: 85210 - DNA, 20 bp, Artificial Sequence
  Description of Artificial Sequence: Synthetic oligonucleotide
  Target: LAMA2; (-) strand; PAM type: NRG; PAM sequence: TAG
ccagtaaattcctgccaatg

SEQ ID NO: 85211 - DNA, 20 bp, Artificial Sequence
  Description of Artificial Sequence: Synthetic oligonucleotide
  Target: LAMA2; (-) strand; PAM type: NRG; PAM sequence: CAG
actacctcctttgtcctgac

SEQ ID NO: 85212 - DNA, 20 bp, Artificial Sequence
  Description of Artificial Sequence: Synthetic oligonucleotide
  Target: LAMA2; (-) strand; PAM type: NRG; PAM sequence: CAG
taggtgacatgcgttttgtg

SEQ ID NO: 85213 - DNA, 20 bp, Artificial Sequence
  Description of Artificial Sequence: Synthetic oligonucleotide
  Target: LAMA2; (-) strand; PAM type: NRG; PAM sequence: AGG
taatatttaataataatatt

SEQ ID NO: 85214 - DNA, 20 bp, Artificial Sequence
  Description of Artificial Sequence: Synthetic oligonucleotide
  Target: LAMA2; (-) strand; PAM type: NRG; PAM sequence: TAG
ataatatttaataataatat

SEQ ID NO: 85215 - DNA, 20 bp, Artificial Sequence
  Description of Artificial Sequence: Synthetic oligonucleotide
  Target: LAMA2; (-) strand; PAM type: NRG; PAM sequence: AAG
aaaaagagaaattcacaagt

SEQ ID NO: 85216 - DNA, 20 bp, Artificial Sequence
  Description of Artificial Sequence: Synthetic oligonucleotide
  Target: LAMA2; (-) strand; PAM type: NRG; PAM sequence: AAG
agataaaaagagaaattcac

SEQ ID NO: 85217 - DNA, 20 bp, Artificial Sequence
  Description of Artificial Sequence: Synthetic oligonucleotide
  Target: LAMA2; (-) strand; PAM type: NRG; PAM sequence: GAG
tatattaacaaagataaaaa

SEQ ID NO: 85218 - DNA, 20 bp, Artificial Sequence
  Description of Artificial Sequence: Synthetic oligonucleotide
  Target: LAMA2; (-) strand; PAM type: NRG; PAM sequence: AAG
tgtatattaacaaagataaa

SEQ ID NO: 85219 - DNA, 20 bp, Artificial Sequence
  Description of Artificial Sequence: Synthetic oligonucleotide
  Target: LAMA2; (-) strand; PAM type: NRG; PAM sequence: AAG
ttgggtcatgtatattaaca

SEQ ID NO: 85220 - DNA, 20 bp, Artificial Sequence
  Description of Artificial Sequence: Synthetic oligonucleotide
  Target: LAMA2; (-) strand; PAM type: NRG; PAM sequence: GGG
ggtttattagctgatgactt

SEQ ID NO: 85221 - DNA, 20 bp, Artificial Sequence
  Description of Artificial Sequence: Synthetic oligonucleotide
  Target: LAMA2; (-) strand; PAM type: NRG; PAM sequence: TGG
tggtttattagctgatgact

SEQ ID NO: 85222 - DNA, 20 bp, Artificial Sequence
  Description of Artificial Sequence: Synthetic oligonucleotide
  Target: LAMA2; (-) strand; PAM type: NRG; PAM sequence: TAG
atttggatttcttggtttat

SEQ ID NO: 85223 - DNA, 20 bp, Artificial Sequence
  Description of Artificial Sequence: Synthetic oligonucleotide
  Target: LAMA2; (-) strand; PAM type: NRG; PAM sequence: TGG
tcttcctaatttggatttct

SEQ ID NO: 85224 - DNA, 20 bp, Artificial Sequence
  Description of Artificial Sequence: Synthetic oligonucleotide
  Target: LAMA2; (-) strand; PAM type: NRG; PAM sequence: TGG
ggctctatttcttcctaatt

SEQ ID NO: 85225 - DNA, 20 bp, Artificial Sequence
  Description of Artificial Sequence: Synthetic oligonucleotide
  Target: LAMA2; (-) strand; PAM type: NRG; PAM sequence: TGG
acacatctggattgtaatcc

SEQ ID NO: 85226 - DNA, 20 bp, Artificial Sequence
  Description of Artificial Sequence: Synthetic oligonucleotide
  Target: LAMA2; (-) strand; PAM type: NRG; PAM sequence: TGG
gaatgggctatagacacatc

SEQ ID NO: 85227 - DNA, 20 bp, Artificial Sequence
  Description of Artificial Sequence: Synthetic oligonucleotide
  Target: LAMA2; (-) strand; PAM type: NRG; PAM sequence: TAG
tgcttaactggaatgggcta

SEQ ID NO: 85228 - DNA, 20 bp, Artificial Sequence
  Description of Artificial Sequence: Synthetic oligonucleotide
  Target: LAMA2; (-) strand; PAM type: NRG; PAM sequence: GGG
aaaaaatgcttaactggaat

SEQ ID NO: 85229 - DNA, 20 bp, Artificial Sequence
  Description of Artificial Sequence: Synthetic oligonucleotide
  Target: LAMA2; (-) strand; PAM type: NRG; PAM sequence: TGG
gaaaaaatgcttaactggaa

SEQ ID NO: 85230 - DNA, 20 bp, Artificial Sequence
  Description of Artificial Sequence: Synthetic oligonucleotide
  Target: LAMA2; (-) strand; PAM type: NRG; PAM sequence: TGG
tgattgaaaaaatgcttaac

SEQ ID NO: 85231 - DNA, 20 bp, Artificial Sequence
  Description of Artificial Sequence: Synthetic oligonucleotide
  Target: LAMA2; (-) strand; PAM type: NRG; PAM sequence: AAG
tccaaagatcaatgccttgc

SEQ ID NO: 85232 - DNA, 20 bp, Artificial Sequence
  Description of Artificial Sequence: Synthetic oligonucleotide
  Target: LAMA2; (-) strand; PAM type: NRG; PAM sequence: AAG
gcttcagcatctctattcca

SEQ ID NO: 85233 - DNA, 20 bp, Artificial Sequence
  Description of Artificial Sequence: Synthetic oligonucleotide
  Target: LAMA2; (-) strand; PAM type: NRG; PAM sequence: CAG
ttcttttgaataagctgctt

SEQ ID NO: 85234 - DNA, 20 bp, Artificial Sequence
  Description of Artificial Sequence: Synthetic oligonucleotide
  Target: LAMA2; (-) strand; PAM type: NRG; PAM sequence: AAG
tcgttccctttcttttgaat

SEQ ID NO: 85235 - DNA, 20 bp, Artificial Sequence
  Description of Artificial Sequence: Synthetic oligonucleotide
  Target: LAMA2; (-) strand; PAM type: NRG; PAM sequence: TGG
aaaccatttaaaaaacttgt

SEQ ID NO: 85236 - DNA, 20 bp, Artificial Sequence
  Description of Artificial Sequence: Synthetic oligonucleotide
  Target: LAMA2; (-) strand; PAM type: NRG; PAM sequence: GAG
ttgcttgattaatcttgcca

SEQ ID NO: 85237 - DNA, 20 bp, Artificial Sequence
  Description of Artificial Sequence: Synthetic oligonucleotide
  Target: LAMA2; (-) strand; PAM type: NRG; PAM sequence: CAG
ttttgcttgattaatcttgc

SEQ ID NO: 85238 - DNA, 20 bp, Artificial Sequence
  Description of Artificial Sequence: Synthetic oligonucleotide
  Target: LAMA2; (-) strand; PAM type: NRG; PAM sequence: CAG
gtttatttttgaagtaattg

SEQ ID NO: 85239 - DNA, 20 bp, Artificial Sequence
  Description of Artificial Sequence: Synthetic oligonucleotide
  Target: LAMA2; (-) strand; PAM type: NRG; PAM sequence: AAG
tccttatttgtttatttttg

SEQ ID NO: 85240 - DNA, 20 bp, Artificial Sequence
  Description of Artificial Sequence: Synthetic oligonucleotide
  Target: LAMA2; (-) strand; PAM type: NRG; PAM sequence: AGG
ttaagttgcattttcctaga

SEQ ID NO: 85241 - DNA, 20 bp, Artificial Sequence
  Description of Artificial Sequence: Synthetic oligonucleotide
  Target: LAMA2; (-) strand; PAM type: NRG; PAM sequence: AAG
tttaagttgcattttcctag

SEQ ID NO: 85242 - DNA, 20 bp, Artificial Sequence
  Description of Artificial Sequence: Synthetic oligonucleotide
  Target: LAMA2; (-) strand; PAM type: NRG; PAM sequence: TAG
ttttttaagttgcattttcc

SEQ ID NO: 85243 - DNA, 20 bp, Artificial Sequence
  Description of Artificial Sequence: Synthetic oligonucleotide
  Target: LAMA2; (-) strand; PAM type: NRG; PAM sequence: AAG
ttctttgagtcagttttttt

SEQ ID NO: 85244 - DNA, 20 bp, Artificial Sequence
  Description of Artificial Sequence: Synthetic oligonucleotide
  Target: LAMA2; (-) strand; PAM type: NRG; PAM sequence: CAG
tagattttttttctttgagt

SEQ ID NO: 85245 - DNA, 20 bp, Artificial Sequence
  Description of Artificial Sequence: Synthetic oligonucleotide
  Target: LAMA2; (-) strand; PAM type: NRG; PAM sequence: GAG
attatagattttttttcttt

SEQ ID NO: 85246 - DNA, 20 bp, Artificial Sequence
  Description of Artificial Sequence: Synthetic oligonucleotide
  Target: LAMA2; (-) strand; PAM type: NRG; PAM sequence: TAG
ttaatgtttatctgacatta

SEQ ID NO: 85247 - DNA, 20 bp, Artificial Sequence
  Description of Artificial Sequence: Synthetic oligonucleotide
  Target: LAMA2; (-) strand; PAM type: NRG; PAM sequence: AGG
ttggagttaacttcattgga

SEQ ID NO: 85248 - DNA, 20 bp, Artificial Sequence
  Description of Artificial Sequence: Synthetic oligonucleotide
  Target: LAMA2; (-) strand; PAM type: NRG; PAM sequence: AAG
cttggagttaacttcattgg

SEQ ID NO: 85249 - DNA, 20 bp, Artificial Sequence
  Description of Artificial Sequence: Synthetic oligonucleotide
  Target: LAMA2; (-) strand; PAM type: NRG; PAM sequence: TGG
aggcttggagttaacttcat

SEQ ID NO: 85250 - DNA, 20 bp, Artificial Sequence
  Description of Artificial Sequence: Synthetic oligonucleotide
  Target: LAMA2; (-) strand; PAM type: NRG; PAM sequence: GAG
cttgcaaatcaataggcttg

SEQ ID NO: 85251 - DNA, 20 bp, Artificial Sequence
  Description of Artificial Sequence: Synthetic oligonucleotide
  Target: LAMA2; (-) strand; PAM type: NRG; PAM sequence: TGG
tacttgcaaatcaataggct

SEQ ID NO: 85252 - DNA, 20 bp, Artificial Sequence
  Description of Artificial Sequence: Synthetic oligonucleotide
  Target: LAMA2; (-) strand; PAM type: NRG; PAM sequence: AGG
gatattacttgcaaatcaat

SEQ ID NO: 85253 - DNA, 20 bp, Artificial Sequence
  Description of Artificial Sequence: Synthetic oligonucleotide
  Target: LAMA2; (-) strand; PAM type: NRG; PAM sequence: TAG
tgatattacttgcaaatcaa

SEQ ID NO: 85254 - DNA, 20 bp, Artificial Sequence
  Description of Artificial Sequence: Synthetic oligonucleotide
  Target: LAMA2; (-) strand; PAM type: NRG; PAM sequence: AAG
cagttgttctattctctgga

SEQ ID NO: 85255 - DNA, 20 bp, Artificial Sequence
  Description of Artificial Sequence: Synthetic oligonucleotide
  Target: LAMA2; (-) strand; PAM type: NRG; PAM sequence: TGG
gtcccagttgttctattctc

SEQ ID NO: 85256 - DNA, 20 bp, Artificial Sequence
  Description of Artificial Sequence: Synthetic oligonucleotide
  Target: LAMA2; (-) strand; PAM type: NRG; PAM sequence: CAG
attatgtgaggagtacgtcc

SEQ ID NO: 85257 - DNA, 20 bp, Artificial Sequence
  Description of Artificial Sequence: Synthetic oligonucleotide
  Target: LAMA2; (-) strand; PAM type: NRG; PAM sequence: GAG
gccacataaaattatgtgag

SEQ ID NO: 85258 - DNA, 20 bp, Artificial Sequence
  Description of Artificial Sequence: Synthetic oligonucleotide
  Target: LAMA2; (-) strand; PAM type: NRG; PAM sequence: AGG
aagccacataaaattatgtg

SEQ ID NO: 85259 - DNA, 20 bp, Artificial Sequence
  Description of Artificial Sequence: Synthetic oligonucleotide
  Target: LAMA2; (-) strand; PAM type: NRG; PAM sequence: GAG
caagccacataaaattatgt

SEQ ID NO: 85260 - DNA, 20 bp, Artificial Sequence
  Description of Artificial Sequence: Synthetic oligonucleotide
  Target: LAMA2; (-) strand; PAM type: NRG; PAM sequence: AAG
tcttgtcaagattttatatc

SEQ ID NO: 85261 - DNA, 20 bp, Artificial Sequence
  Description of Artificial Sequence: Synthetic oligonucleotide
  Target: LAMA2; (-) strand; PAM type: NRG; PAM sequence: AAG
ttcttcatagtcctcttgtc

SEQ ID NO: 85262 - DNA, 20 bp, Artificial Sequence
  Description of Artificial Sequence: Synthetic oligonucleotide
  Target: LAMA2; (-) strand; PAM type: NRG; PAM sequence: TAG
ggtaggggttttcttcttca

SEQ ID NO: 85263 - DNA, 20 bp, Artificial Sequence
  Description of Artificial Sequence: Synthetic oligonucleotide
  Target: LAMA2; (-) strand; PAM type: NRG; PAM sequence: GGG
tcatgagtgactttgggtag

SEQ ID NO: 85264 - DNA, 20 bp, Artificial Sequence
  Description of Artificial Sequence: Synthetic oligonucleotide
  Target: LAMA2; (-) strand; PAM type: NRG; PAM sequence: GGG
ttcatgagtgactttgggta

SEQ ID NO: 85265 - DNA, 20 bp, Artificial Sequence
  Description of Artificial Sequence: Synthetic oligonucleotide
  Target: LAMA2; (-) strand; PAM type: NRG; PAM sequence: AGG
gttcatgagtgactttgggt

SEQ ID NO: 85266 - DNA, 20 bp, Artificial Sequence
  Description of Artificial Sequence: Synthetic oligonucleotide
  Target: LAMA2; (-) strand; PAM type: NRG; PAM sequence: TAG
cgttcatgagtgactttggg

SEQ ID NO: 85267 - DNA, 20 bp, Artificial Sequence
  Description of Artificial Sequence: Synthetic oligonucleotide
  Target: LAMA2; (-) strand; PAM type: NRG; PAM sequence: GGG
ctacgttcatgagtgacttt

SEQ ID NO: 85268 - DNA, 20 bp, Artificial Sequence
  Description of Artificial Sequence: Synthetic oligonucleotide
  Target: LAMA2; (-) strand; PAM type: NRG; PAM sequence: TGG
tctacgttcatgagtgactt

SEQ ID NO: 85269 - DNA, 20 bp, Artificial Sequence
  Description of Artificial Sequence: Synthetic oligonucleotide
  Target: LAMA2; (-) strand; PAM type: NRG; PAM sequence: GAG
atattttcatctacgttcat

SEQ ID NO: 85270 - DNA, 20 bp, Artificial Sequence
  Description of Artificial Sequence: Synthetic oligonucleotide
  Target: LAMA2; (-) strand; PAM type: NRG; PAM sequence: AGG
gggttgttaatattttattt

SEQ ID NO: 85271 - DNA, 20 bp, Artificial Sequence
  Description of Artificial Sequence: Synthetic oligonucleotide
  Target: LAMA2; (-) strand; PAM type: NRG; PAM sequence: TAG
tgggttgttaatattttatt

SEQ ID NO: 85272 - DNA, 20 bp, Artificial Sequence
  Description of Artificial Sequence: Synthetic oligonucleotide
  Target: LAMA2; (-) strand; PAM type: NRG; PAM sequence: GGG
ttttataaactgatggattt

SEQ ID NO: 85273 - DNA, 20 bp, Artificial Sequence
  Description of Artificial Sequence: Synthetic oligonucleotide
  Target: LAMA2; (-) strand; PAM type: NRG; PAM sequence: TGG
tttttataaactgatggatt

SEQ ID NO: 85274 - DNA, 20 bp, Artificial Sequence
  Description of Artificial Sequence: Synthetic oligonucleotide
  Target: LAMA2; (-) strand; PAM type: NRG; PAM sequence: TGG
tgactatttttataaactga

SEQ ID NO: 85275 - DNA, 20 bp, Artificial Sequence
  Description of Artificial Sequence: Synthetic oligonucleotide
  Target: LAMA2; (-) strand; PAM type: NRG; PAM sequence: TAG
taaaatccacttggccaatt

SEQ ID NO: 85276 - DNA, 20 bp, Artificial Sequence
  Description of Artificial Sequence: Synthetic oligonucleotide
  Target: LAMA2; (-) strand; PAM type: NRG; PAM sequence: TGG
cacggatgataaaatccact

SEQ ID NO: 85277 - DNA, 20 bp, Artificial Sequence
  Description of Artificial Sequence: Synthetic oligonucleotide
  Target: LAMA2; (-) strand; PAM type: NRG; PAM sequence: CGG
ttttaaagtaacctcaaaca

SEQ ID NO: 85278 - DNA, 20 bp, Artificial Sequence
  Description of Artificial Sequence: Synthetic oligonucleotide
  Target: LAMA2; (-) strand; PAM type: NRG; PAM sequence: AAG
aaactggttttctaatttta

SEQ ID NO: 85279 - DNA, 20 bp, Artificial Sequence
  Description of Artificial Sequence: Synthetic oligonucleotide
  Target: LAMA2; (-) strand; PAM type: NRG; PAM sequence: TGG
atatggtcaattacttaaac

SEQ ID NO: 85280 - DNA, 20 bp, Artificial Sequence
  Description of Artificial Sequence: Synthetic oligonucleotide
  Target: LAMA2; (-) strand; PAM type: NRG; PAM sequence: TGG
tctcttttaatcagtcaata

SEQ ID NO: 85281 - DNA, 20 bp, Artificial Sequence
  Description of Artificial Sequence: Synthetic oligonucleotide
  Target: LAMA2; (-) strand; PAM type: NRG; PAM sequence: CAG
tgatttttttctcttttaat

SEQ ID NO: 85282 - DNA, 20 bp, Artificial Sequence
  Description of Artificial Sequence: Synthetic oligonucleotide
  Target: LAMA2; (-) strand; PAM type: NRG; PAM sequence: GAG
tttctttttctgtgtctatt

SEQ ID NO: 85283 - DNA, 20 bp, Artificial Sequence
  Description of Artificial Sequence: Synthetic oligonucleotide
  Target: LAMA2; (-) strand; PAM type: NRG; PAM sequence: AAG
ttcaaaatttttcagacatg

SEQ ID NO: 85284 - DNA, 20 bp, Artificial Sequence
  Description of Artificial Sequence: Synthetic oligonucleotide
  Target: LAMA2; (-) strand; PAM type: NRG; PAM sequence: CAG
ttctagttttcaaaattttt

SEQ ID NO: 85285 - DNA, 20 bp, Artificial Sequence
  Description of Artificial Sequence: Synthetic oligonucleotide
  Target: LAMA2; (-) strand; PAM type: NRG; PAM sequence: TAG
ttaaagtgcttttccaattc

SEQ ID NO: 85286 - DNA, 20 bp, Artificial Sequence
  Description of Artificial Sequence: Synthetic oligonucleotide
  Target: LAMA2; (-) strand; PAM type: NRG; PAM sequence: AAG
tagatagccttcatcagtta

SEQ ID NO: 85287 - DNA, 20 bp, Artificial Sequence
  Description of Artificial Sequence: Synthetic oligonucleotide
  Target: LAMA2; (-) strand; PAM type: NRG; PAM sequence: CAG
tttatgtagatagccttcat

SEQ ID NO: 85288 - DNA, 20 bp, Artificial Sequence
  Description of Artificial Sequence: Synthetic oligonucleotide
  Target: LAMA2; (-) strand; PAM type: NRG; PAM sequence: TAG
gctattgatttttatgtaga

SEQ ID NO: 85289 - DNA, 20 bp, Artificial Sequence
  Description of Artificial Sequence: Synthetic oligonucleotide
  Target: LAMA2; (-) strand; PAM type: NRG; PAM sequence: TAG
atttgctattgatttttatg

SEQ ID NO: 85290 - DNA, 20 bp, Artificial Sequence
  Description of Artificial Sequence: Synthetic oligonucleotide
  Target: LAMA2; (-) strand; PAM type: NRG; PAM sequence: AAG
ttgaacattttatattaaat

SEQ ID NO: 85291 - DNA, 20 bp, Artificial Sequence
  Description of Artificial Sequence: Synthetic oligonucleotide
  Target: LAMA2; (-) strand; PAM type: NRG; PAM sequence: GAG
taagtgggagtcgttatagt

SEQ ID NO: 85292 - DNA, 20 bp, Artificial Sequence
  Description of Artificial Sequence: Synthetic oligonucleotide
  Target: LAMA2; (-) strand; PAM type: NRG; PAM sequence: TAG
atgttaagtgggagtcgtta

SEQ ID NO: 85293 - DNA, 20 bp, Artificial Sequence
  Description of Artificial Sequence: Synthetic oligonucleotide
  Target: LAMA2; (-) strand; PAM type: NRG; PAM sequence: GAG
tctagcacaatgttaagtgg

SEQ ID NO: 85294 - DNA, 20 bp, Artificial Sequence
  Description of Artificial Sequence: Synthetic oligonucleotide
  Target: LAMA2; (-) strand; PAM type: NRG; PAM sequence: GGG
cttctagcacaatgttaagt

SEQ ID NO: 85295 - DNA, 20 bp, Artificial Sequence
  Description of Artificial Sequence: Synthetic oligonucleotide
  Target: LAMA2; (-) strand; PAM type: NRG; PAM sequence: TGG
tcttctagcacaatgttaag

SEQ ID NO: 85296 - DNA, 20 bp, Artificial Sequence
  Description of Artificial Sequence: Synthetic oligonucleotide
  Target: LAMA2; (-) strand; PAM type: NRG; PAM sequence: AAG
acatcttctagcacaatgtt

SEQ ID NO: 85297 - DNA, 20 bp, Artificial Sequence
  Description of Artificial Sequence: Synthetic oligonucleotide
  Target: LAMA2; (-) strand; PAM type: NRG; PAM sequence: TAG
actgcactgtccacatcttc

SEQ ID NO: 85298 - DNA, 20 bp, Artificial Sequence
  Description of Artificial Sequence: Synthetic oligonucleotide
  Target: LAMA2; (-) strand; PAM type: NRG; PAM sequence: GAG
taagtatatcatctataagt

SEQ ID NO: 85299 - DNA, 20 bp, Artificial Sequence
  Description of Artificial Sequence: Synthetic oligonucleotide
  Target: LAMA2; (-) strand; PAM type: NRG; PAM sequence: AAG
cagataagtatatcatctat

SEQ ID NO: 85300 - DNA, 20 bp, Artificial Sequence
  Description of Artificial Sequence: Synthetic oligonucleotide
  Target: LAMA2; (-) strand; PAM type: NRG; PAM sequence: AAG
tcttgattttacaagcagat

SEQ ID NO: 85301 - DNA, 20 bp, Artificial Sequence
  Description of Artificial Sequence: Synthetic oligonucleotide
  Target: LAMA2; (-) strand; PAM type: NRG; PAM sequence: CAG
gattctcttgattttacaag

SEQ ID NO: 85302 - DNA, 20 bp, Artificial Sequence
  Description of Artificial Sequence: Synthetic oligonucleotide
  Target: LAMA2; (-) strand; PAM type: NRG; PAM sequence: AAG
gtagattctcttgattttac

SEQ ID NO: 85303 - DNA, 20 bp, Artificial Sequence
  Description of Artificial Sequence: Synthetic oligonucleotide
  Target: LAMA2; (-) strand; PAM type: NRG; PAM sequence: TAG
actgattaagaatttgtctg

SEQ ID NO: 85304 - DNA, 20 bp, Artificial Sequence
  Description of Artificial Sequence: Synthetic oligonucleotide
  Target: LAMA2; (-) strand; PAM type: NRG; PAM sequence: AAG
tccttattgactcactgatt

SEQ ID NO: 85305 - DNA, 20 bp, Artificial Sequence
  Description of Artificial Sequence: Synthetic oligonucleotide
  Target: LAMA2; (-) strand; PAM type: NRG; PAM sequence: TAG
ttgtatattaattttgcata

SEQ ID NO: 85306 - DNA, 20 bp, Artificial Sequence
  Description of Artificial Sequence: Synthetic oligonucleotide
  Target: LAMA2; (-) strand; PAM type: NRG; PAM sequence: AAG
tgaaaagtgttgttgatata

SEQ ID NO: 85307 - DNA, 20 bp, Artificial Sequence
  Description of Artificial Sequence: Synthetic oligonucleotide
  Target: LAMA2; (-) strand; PAM type: NRG; PAM sequence: AAG
tcttaaaaattttttttgaa

SEQ ID NO: 85308 - DNA, 20 bp, Artificial Sequence
  Description of Artificial Sequence: Synthetic oligonucleotide
  Target: LAMA2; (-) strand; PAM type: NRG; PAM sequence: TGG
atatgtattgctattataca

SEQ ID NO: 85309 - DNA, 20 bp, Artificial Sequence
  Description of Artificial Sequence: Synthetic oligonucleotide
  Target: LAMA2; (-) strand; PAM type: NRG; PAM sequence: TGG
ttccctacaaatttaatcct

SEQ ID NO: 85310 - DNA, 20 bp, Artificial Sequence
  Description of Artificial Sequence: Synthetic oligonucleotide
  Target: LAMA2; (-) strand; PAM type: NRG; PAM sequence: TGG
ttttgattattcttggccat

SEQ ID NO: 85311 - DNA, 20 bp, Artificial Sequence
  Description of Artificial Sequence: Synthetic oligonucleotide
  Target: LAMA2; (-) strand; PAM type: NRG; PAM sequence: TGG
taatttcttttgattattct

SEQ ID NO: 85312 - DNA, 20 bp, Artificial Sequence
  Description of Artificial Sequence: Synthetic oligonucleotide
  Target: LAMA2; (-) strand; PAM type: NRG; PAM sequence: GAG
agtgctgggattacatatgt

SEQ ID NO: 85313 - DNA, 20 bp, Artificial Sequence
  Description of Artificial Sequence: Synthetic oligonucleotide
  Target: LAMA2; (-) strand; PAM type: NRG; PAM sequence: GGG
ccttggcctcccaaagtgct

SEQ ID NO: 85314 - DNA, 20 bp, Artificial Sequence
  Description of Artificial Sequence: Synthetic oligonucleotide
  Target: LAMA2; (-) strand; PAM type: NRG; PAM sequence: TGG
accttggcctcccaaagtgc

SEQ ID NO: 85315 - DNA, 20 bp, Artificial Sequence
  Description of Artificial Sequence: Synthetic oligonucleotide
  Target: LAMA2; (-) strand; PAM type: NRG; PAM sequence: AAG
ccacctaccttggcctccca

SEQ ID NO: 85316 - DNA, 20 bp, Artificial Sequence
  Description of Artificial Sequence: Synthetic oligonucleotide
  Target: LAMA2; (-) strand; PAM type: NRG; PAM sequence: TGG
ctcaggtgatccacctacct

SEQ ID NO: 85317 - DNA, 20 bp, Artificial Sequence
  Description of Artificial Sequence: Synthetic oligonucleotide
  Target: LAMA2; (-) strand; PAM type: NRG; PAM sequence: AGG
ggtctcgaacttctgacctc

SEQ ID NO: 85318 - DNA, 20 bp, Artificial Sequence
  Description of Artificial Sequence: Synthetic oligonucleotide
  Target: LAMA2; (-) strand; PAM type: NRG; PAM sequence: CAG
tggtctcgaacttctgacct

SEQ ID NO: 85319 - DNA, 20 bp, Artificial Sequence
  Description of Artificial Sequence: Synthetic oligonucleotide
  Target: LAMA2; (-) strand; PAM type: NRG; PAM sequence: TGG
ttttgccatgttggccaggg

SEQ ID NO: 85320 - DNA, 20 bp, Artificial Sequence
  Description of Artificial Sequence: Synthetic oligonucleotide
  Target: LAMA2; (-) strand; PAM type: NRG; PAM sequence: GGG
gggttttgccatgttggcca

SEQ ID NO: 85321 - DNA, 20 bp, Artificial Sequence
  Description of Artificial Sequence: Synthetic oligonucleotide
  Target: LAMA2; (-) strand; PAM type: NRG; PAM sequence: AGG
agggttttgccatgttggcc

SEQ ID NO: 85322 - DNA, 20 bp, Artificial Sequence
  Description of Artificial Sequence: Synthetic oligonucleotide
  Target: LAMA2; (-) strand; PAM type: NRG; PAM sequence: CAG
cagggttttgccatgttggc

SEQ ID NO: 85323 - DNA, 20 bp, Artificial Sequence
  Description of Artificial Sequence: Synthetic oligonucleotide
  Target: LAMA2; (-) strand; PAM type: NRG; PAM sequence: TGG
gagacagggttttgccatgt

SEQ ID NO: 85324 - DNA, 20 bp, Artificial Sequence
  Description of Artificial Sequence: Synthetic oligonucleotide
  Target: LAMA2; (-) strand; PAM type: NRG; PAM sequence: GGG
ttgtatttttagtagagaca

SEQ ID NO: 85325 - DNA, 20 bp, Artificial Sequence
  Description of Artificial Sequence: Synthetic oligonucleotide
  Target: LAMA2; (-) strand; PAM type: NRG; PAM sequence: AGG
tttgtatttttagtagagac

SEQ ID NO: 85326 - DNA, 20 bp, Artificial Sequence
  Description of Artificial Sequence: Synthetic oligonucleotide
  Target: LAMA2; (-) strand; PAM type: NRG; PAM sequence: CAG
ttttgtatttttagtagaga

SEQ ID NO: 85327 - DNA, 20 bp, Artificial Sequence
  Description of Artificial Sequence: Synthetic oligonucleotide
  Target: LAMA2; (-) strand; PAM type: NRG; PAM sequence: GAG
taatttttgtatttttagta

SEQ ID NO: 85328 - DNA, 20 bp, Artificial Sequence
  Description of Artificial Sequence: Synthetic oligonucleotide
  Target: LAMA2; (-) strand; PAM type: NRG; PAM sequence: TAG
gctaatttttgtatttttag

SEQ ID NO: 85329 - DNA, 20 bp, Artificial Sequence
  Description of Artificial Sequence: Synthetic oligonucleotide
  Target: LAMA2; (-) strand; PAM type: NRG; PAM sequence: TAG
ctggctaatttttgtatttt

SEQ ID NO: 85330 - DNA, 20 bp, Artificial Sequence
  Description of Artificial Sequence: Synthetic oligonucleotide
  Target: LAMA2; (-) strand; PAM type: NRG; PAM sequence: TGG
caggcgtttgtcaccacacc

SEQ ID NO: 85331 - DNA, 20 bp, Artificial Sequence
  Description of Artificial Sequence: Synthetic oligonucleotide
  Target: LAMA2; (-) strand; PAM type: NRG; PAM sequence: AGG
tcccgagtagctgggattgc

SEQ ID NO: 85332 - DNA, 20 bp, Artificial Sequence
  Description of Artificial Sequence: Synthetic oligonucleotide
  Target: LAMA2; (-) strand; PAM type: NRG; PAM sequence: CAG
ctcccgagtagctgggattg

SEQ ID NO: 85333 - DNA, 20 bp, Artificial Sequence
  Description of Artificial Sequence: Synthetic oligonucleotide
  Target: LAMA2; (-) strand; PAM type: NRG; PAM sequence: GGG
catcagcctcccgagtagct

SEQ ID NO: 85334 - DNA, 20 bp, Artificial Sequence
  Description of Artificial Sequence: Synthetic oligonucleotide
  Target: LAMA2; (-) strand; PAM type: NRG; PAM sequence: TGG
gcatcagcctcccgagtagc

SEQ ID NO: 85335 - DNA, 20 bp, Artificial Sequence
  Description of Artificial Sequence: Synthetic oligonucleotide
  Target: LAMA2; (-) strand; PAM type: NRG; PAM sequence: TAG
tcttgcatcagcctcccgag

SEQ ID NO: 85336 - DNA, 20 bp, Artificial Sequence
  Description of Artificial Sequence: Synthetic oligonucleotide
  Target: LAMA2; (-) strand; PAM type: NRG; PAM sequence: GAG
ttctcttgcatcagcctccc

SEQ ID NO: 85337 - DNA, 20 bp, Artificial Sequence
  Description of Artificial Sequence: Synthetic oligonucleotide
  Target: LAMA2; (-) strand; PAM type: NRG; PAM sequence: CAG
tccaagcaattctcttgcat

SEQ ID NO: 85338 - DNA, 20 bp, Artificial Sequence
  Description of Artificial Sequence: Synthetic oligonucleotide
  Target: LAMA2; (-) strand; PAM type: NRG; PAM sequence: AAG
agcctctgcctcctgggtcc

SEQ ID NO: 85339 - DNA, 20 bp, Artificial Sequence
  Description of Artificial Sequence: Synthetic oligonucleotide
  Target: LAMA2; (-) strand; PAM type: NRG; PAM sequence: GGG
cactgcagcctctgcctcct

SEQ ID NO: 85340 - DNA, 20 bp, Artificial Sequence
  Description of Artificial Sequence: Synthetic oligonucleotide
  Target: LAMA2; (-) strand; PAM type: NRG; PAM sequence: TGG
tcactgcagcctctgcctcc

SEQ ID NO: 85341 - DNA, 20 bp, Artificial Sequence
  Description of Artificial Sequence: Synthetic oligonucleotide
  Target: LAMA2; (-) strand; PAM type: NRG; PAM sequence: CAG
gacccaatcttggctcactg

SEQ ID NO: 85342 - DNA, 20 bp, Artificial Sequence
  Description of Artificial Sequence: Synthetic oligonucleotide
  Target: LAMA2; (-) strand; PAM type: NRG; PAM sequence: TGG
ggagtgcagtgacccaatct

SEQ ID NO: 85343 - DNA, 20 bp, Artificial Sequence
  Description of Artificial Sequence: Synthetic oligonucleotide
  Target: LAMA2; (-) strand; PAM type: NRG; PAM sequence: CAG
ctatgccccaggctggagtg

SEQ ID NO: 85344 - DNA, 20 bp, Artificial Sequence
  Description of Artificial Sequence: Synthetic oligonucleotide
  Target: LAMA2; (-) strand; PAM type: NRG; PAM sequence: GAG
tcgctctatgccccaggctg

SEQ ID NO: 85345 - DNA, 20 bp, Artificial Sequence
  Description of Artificial Sequence: Synthetic oligonucleotide
  Target: LAMA2; (-) strand; PAM type: NRG; PAM sequence: TGG
tctcgctctatgccccaggc

SEQ ID NO: 85346 - DNA, 20 bp, Artificial Sequence
  Description of Artificial Sequence: Synthetic oligonucleotide
  Target: LAMA2; (-) strand; PAM type: NRG; PAM sequence: AGG
agggtctcgctctatgcccc

SEQ ID NO: 85347 - DNA, 20 bp, Artificial Sequence
  Description of Artificial Sequence: Synthetic oligonucleotide
  Target: LAMA2; (-) strand; PAM type: NRG; PAM sequence: CAG
gagggtctcgctctatgccc

SEQ ID NO: 85348 - DNA, 20 bp, Artificial Sequence
  Description of Artificial Sequence: Synthetic oligonucleotide
  Target: LAMA2; (-) strand; PAM type: NRG; PAM sequence: GGG
tatatatatatttttggaga

SEQ ID NO: 85349 - DNA, 20 bp, Artificial Sequence
  Description of Artificial Sequence: Synthetic oligonucleotide
  Target: LAMA2; (-) strand; PAM type: NRG; PAM sequence: AGG
gtatatatatatttttggag

SEQ ID NO: 85350 - DNA, 20 bp, Artificial Sequence
  Description of Artificial Sequence: Synthetic oligonucleotide
  Target: LAMA2; (-) strand; PAM type: NRG; PAM sequence: GAG
tgtatatatatatttttgga

SEQ ID NO: 85351 - DNA, 20 bp, Artificial Sequence
  Description of Artificial Sequence: Synthetic oligonucleotide
  Target: LAMA2; (-) strand; PAM type: NRG; PAM sequence: GAG
cgtgtatatatatatttttg

SEQ ID NO: 85352 - DNA, 20 bp, Artificial Sequence
  Description of Artificial Sequence: Synthetic oligonucleotide
  Target: LAMA2; (-) strand; PAM type: NRG; PAM sequence: TGG
cacgtgtatatatatatttt

SEQ ID NO: 85353 - DNA, 20 bp, Artificial Sequence
  Description of Artificial Sequence: Synthetic oligonucleotide
  Target: LAMA2; (-) strand; PAM type: NRG; PAM sequence: TAG
aaagccccacttctttcctt

SEQ ID NO: 85354 - DNA, 20 bp, Artificial Sequence
  Description of Artificial Sequence: Synthetic oligonucleotide
  Target: LAMA2; (-) strand; PAM type: NRG; PAM sequence: AAG
tgacctaatccctttccaaa

SEQ ID NO: 85355 - DNA, 20 bp, Artificial Sequence
  Description of Artificial Sequence: Synthetic oligonucleotide
  Target: LAMA2; (-) strand; PAM type: NRG; PAM sequence: TAG
ttaattccattcatggagat

SEQ ID NO: 85356 - DNA, 20 bp, Artificial Sequence
  Description of Artificial Sequence: Synthetic oligonucleotide
  Target: LAMA2; (-) strand; PAM type: NRG; PAM sequence: GAG
gggcattaattccattcatg

SEQ ID NO: 85357 - DNA, 20 bp, Artificial Sequence
  Description of Artificial Sequence: Synthetic oligonucleotide
  Target: LAMA2; (-) strand; PAM type: NRG; PAM sequence: TGG
aagggcattaattccattca

SEQ ID NO: 85358 - DNA, 20 bp, Artificial Sequence
  Description of Artificial Sequence: Synthetic oligonucleotide
  Target: LAMA2; (-) strand; PAM type: NRG; PAM sequence: GGG
atcagataagattttcataa

SEQ ID NO: 85359 - DNA, 20 bp, Artificial Sequence
  Description of Artificial Sequence: Synthetic oligonucleotide
  Target: LAMA2; (-) strand; PAM type: NRG; PAM sequence: AGG
tatcagataagattttcata

SEQ ID NO: 85360 - DNA, 20 bp, Artificial Sequence
  Description of Artificial Sequence: Synthetic oligonucleotide
  Target: LAMA2; (-) strand; PAM type: NRG; PAM sequence: AAG
atatcagataagattttcat

SEQ ID NO: 85361 - DNA, 20 bp, Artificial Sequence
  Description of Artificial Sequence: Synthetic oligonucleotide
  Target: LAMA2; (-) strand; PAM type: NRG; PAM sequence: AAG
cctaactctttatatcagat

SEQ ID NO: 85362 - DNA, 20 bp, Artificial Sequence
  Description of Artificial Sequence: Synthetic oligonucleotide
  Target: LAMA2; (-) strand; PAM type: NRG; PAM sequence: CAG
taagtcctaactctttatat

SEQ ID NO: 85363 - DNA, 20 bp, Artificial Sequence
  Description of Artificial Sequence: Synthetic oligonucleotide
  Target: LAMA2; (-) strand; PAM type: NRG; PAM sequence: AAG
gtcattatatcttttaaagt

SEQ ID NO: 85364 - DNA, 20 bp, Artificial Sequence
  Description of Artificial Sequence: Synthetic oligonucleotide
  Target: LAMA2; (-) strand; PAM type: NRG; PAM sequence: AAG
cttagtcattatatctttta

SEQ ID NO: 85365 - DNA, 20 bp, Artificial Sequence
  Description of Artificial Sequence: Synthetic oligonucleotide
  Target: LAMA2; (-) strand; PAM type: NRG; PAM sequence: TAG
acactgatagcattttgcct

SEQ ID NO: 85366 - DNA, 20 bp, Artificial Sequence
  Description of Artificial Sequence: Synthetic oligonucleotide
  Target: LAMA2; (-) strand; PAM type: NRG; PAM sequence: TAG
ttggtttattttcacactga

SEQ ID NO: 85367 - DNA, 20 bp, Artificial Sequence
  Description of Artificial Sequence: Synthetic oligonucleotide
  Target: LAMA2; (-) strand; PAM type: NRG; PAM sequence: TGG
ggctattttttcaggtctat

SEQ ID NO: 85368 - DNA, 20 bp, Artificial Sequence
  Description of Artificial Sequence: Synthetic oligonucleotide
  Target: LAMA2; (-) strand; PAM type: NRG; PAM sequence: AGG
tatctatgggctattttttc

SEQ ID NO: 85369 - DNA, 20 bp, Artificial Sequence
  Description of Artificial Sequence: Synthetic oligonucleotide
  Target: LAMA2; (-) strand; PAM type: NRG; PAM sequence: CAG
atatctatgggctatttttt

SEQ ID NO: 85370 - DNA, 20 bp, Artificial Sequence
  Description of Artificial Sequence: Synthetic oligonucleotide
  Target: LAMA2; (-) strand; PAM type: NRG; PAM sequence: GGG
tctatgtatgtgatatctat

SEQ ID NO: 85371 - DNA, 20 bp, Artificial Sequence
  Description of Artificial Sequence: Synthetic oligonucleotide
  Target: LAMA2; (-) strand; PAM type: NRG; PAM sequence: TGG
atctatgtatgtgatatcta

SEQ ID NO: 85372 - DNA, 20 bp, Artificial Sequence
  Description of Artificial Sequence: Synthetic oligonucleotide
  Target: LAMA2; (-) strand; PAM type: NRG; PAM sequence: AAG
tgcctatttcaataaaagtt

SEQ ID NO: 85373 - DNA, 20 bp, Artificial Sequence
  Description of Artificial Sequence: Synthetic oligonucleotide
  Target: LAMA2; (-) strand; PAM type: NRG; PAM sequence: AAG
tgcaatgcctatttcaataa

SEQ ID NO: 85374 - DNA, 20 bp, Artificial Sequence
  Description of Artificial Sequence: Synthetic oligonucleotide
  Target: LAMA2; (-) strand; PAM type: NRG; PAM sequence: GGG
accagaccatttactgtata

SEQ ID NO: 85375 - DNA, 20 bp, Artificial Sequence
  Description of Artificial Sequence: Synthetic oligonucleotide
  Target: LAMA2; (-) strand; PAM type: NRG; PAM sequence: AGG
taccagaccatttactgtat

SEQ ID NO: 85376 - DNA, 20 bp, Artificial Sequence
  Description of Artificial Sequence: Synthetic oligonucleotide
  Target: LAMA2; (-) strand; PAM type: NRG; PAM sequence: TAG
gtaccagaccatttactgta

SEQ ID NO: 85377 - DNA, 20 bp, Artificial Sequence
  Description of Artificial Sequence: Synthetic oligonucleotide
  Target: LAMA2; (-) strand; PAM type: NRG; PAM sequence: CAG
ctctagataatcagtggtac

SEQ ID NO: 85378 - DNA, 20 bp, Artificial Sequence
  Description of Artificial Sequence: Synthetic oligonucleotide
  Target: LAMA2; (-) strand; PAM type: NRG; PAM sequence: TGG
ttttttctctagataatcag

SEQ ID NO: 85379 - DNA, 20 bp, Artificial Sequence
  Description of Artificial Sequence: Synthetic oligonucleotide
  Target: LAMA2; (-) strand; PAM type: NRG; PAM sequence: CAG
attttttttctctagataat

SEQ ID NO: 85380 - DNA, 20 bp, Artificial Sequence
  Description of Artificial Sequence: Synthetic oligonucleotide
  Target: LAMA2; (-) strand; PAM type: NRG; PAM sequence: TAG
gaaattttattttttttctc

SEQ ID NO: 85381 - DNA, 20 bp, Artificial Sequence
  Description of Artificial Sequence: Synthetic oligonucleotide
  Target: LAMA2; (-) strand; PAM type: NRG; PAM sequence: CAG
tataatgtggagtaaggatg

SEQ ID NO: 85382 - DNA, 20 bp, Artificial Sequence
  Description of Artificial Sequence: Synthetic oligonucleotide
  Target: LAMA2; (-) strand; PAM type: NRG; PAM sequence: AGG
tttatgtataatgtggagta

SEQ ID NO: 85383 - DNA, 20 bp, Artificial Sequence
  Description of Artificial Sequence: Synthetic oligonucleotide
  Target: LAMA2; (-) strand; PAM type: NRG; PAM sequence: AAG
ttttatgtataatgtggagt

SEQ ID NO: 85384 - DNA, 20 bp, Artificial Sequence
  Description of Artificial Sequence: Synthetic oligonucleotide
  Target: LAMA2; (-) strand; PAM type: NRG; PAM sequence: GAG
ttatttttatgtataatgtg

SEQ ID NO: 85385 - DNA, 20 bp, Artificial Sequence
  Description of Artificial Sequence: Synthetic oligonucleotide
  Target: LAMA2; (-) strand; PAM type: NRG; PAM sequence: TGG
gtttatttttatgtataatg

SEQ ID NO: 85386 - DNA, 20 bp, Artificial Sequence
  Description of Artificial Sequence: Synthetic oligonucleotide
  Target: LAMA2; (-) strand; PAM type: NRG; PAM sequence: GAG
tttatgatttgtttcaaggg

SEQ ID NO: 85387 - DNA, 20 bp, Artificial Sequence
  Description of Artificial Sequence: Synthetic oligonucleotide
  Target: LAMA2; (-) strand; PAM type: NRG; PAM sequence: GGG
aatttatgatttgtttcaag

SEQ ID NO: 85388 - DNA, 20 bp, Artificial Sequence
  Description of Artificial Sequence: Synthetic oligonucleotide
  Target: LAMA2; (-) strand; PAM type: NRG; PAM sequence: GGG
aaatttatgatttgtttcaa

SEQ ID NO: 85389 - DNA, 20 bp, Artificial Sequence
  Description of Artificial Sequence: Synthetic oligonucleotide
  Target: LAMA2; (-) strand; PAM type: NRG; PAM sequence: AGG
aaaatttatgatttgtttca

SEQ ID NO: 85390 - DNA, 20 bp, Artificial Sequence
  Description of Artificial Sequence: Synthetic oligonucleotide
  Target: LAMA2; (-) strand; PAM type: NRG; PAM sequence: AAG
gaaaatttatgatttgtttc

SEQ ID NO: 85391 - DNA, 20 bp, Artificial Sequence
  Description of Artificial Sequence: Synthetic oligonucleotide
  Target: LAMA2; (-) strand; PAM type: NRG; PAM sequence: TAG
tctttataaaggtttgtctt

SEQ ID NO: 85392 - DNA, 20 bp, Artificial Sequence
  Description of Artificial Sequence: Synthetic oligonucleotide
  Target: LAMA2; (-) strand; PAM type: NRG; PAM sequence: AGG
tcaatgtgttgtctttataa

SEQ ID NO: 85393 - DNA, 20 bp, Artificial Sequence
  Description of Artificial Sequence: Synthetic oligonucleotide
  Target: LAMA2; (-) strand; PAM type: NRG; PAM sequence: AAG
ctcaatgtgttgtctttata

SEQ ID NO: 85394 - DNA, 20 bp, Artificial Sequence
  Description of Artificial Sequence: Synthetic oligonucleotide
  Target: LAMA2; (-) strand; PAM type: NRG; PAM sequence: CAG
tattcaattatggtcaggag

SEQ ID NO: 85395 - DNA, 20 bp, Artificial Sequence
  Description of Artificial Sequence: Synthetic oligonucleotide
  Target: LAMA2; (-) strand; PAM type: NRG; PAM sequence: GAG
tattattcaattatggtcag

SEQ ID NO: 85396 - DNA, 20 bp, Artificial Sequence
  Description of Artificial Sequence: Synthetic oligonucleotide
  Target: LAMA2; (-) strand; PAM type: NRG; PAM sequence: AGG
actattattcaattatggtc

SEQ ID NO: 85397 - DNA, 20 bp, Artificial Sequence
  Description of Artificial Sequence: Synthetic oligonucleotide
  Target: LAMA2; (-) strand; PAM type: NRG; PAM sequence: CAG
tactattattcaattatggt

SEQ ID NO: 85398 - DNA, 20 bp, Artificial Sequence
  Description of Artificial Sequence: Synthetic oligonucleotide
  Target: LAMA2; (-) strand; PAM type: NRG; PAM sequence: TGG
tagatactattattcaatta

SEQ ID NO: 85399 - DNA, 20 bp, Artificial Sequence
  Description of Artificial Sequence: Synthetic oligonucleotide
  Target: LAMA2; (-) strand; PAM type: NRG; PAM sequence: TAG
ttaaggtagataaggaaatc

SEQ ID NO: 85400 - DNA, 20 bp, Artificial Sequence
  Description of Artificial Sequence: Synthetic oligonucleotide
  Target: LAMA2; (-) strand; PAM type: NRG; PAM sequence: AGG
gttgttgtttaaggtagata

SEQ ID NO: 85401 - DNA, 20 bp, Artificial Sequence
  Description of Artificial Sequence: Synthetic oligonucleotide
  Target: LAMA2; (-) strand; PAM type: NRG; PAM sequence: AAG
tgttgttgtttaaggtagat

SEQ ID NO: 85402 - DNA, 20 bp, Artificial Sequence
  Description of Artificial Sequence: Synthetic oligonucleotide
  Target: LAMA2; (-) strand; PAM type: NRG; PAM sequence: TAG
ggctttgttgttgtttaagg

SEQ ID NO: 85403 - DNA, 20 bp, Artificial Sequence
  Description of Artificial Sequence: Synthetic oligonucleotide
  Target: LAMA2; (-) strand; PAM type: NRG; PAM sequence: AGG
tcaggctttgttgttgttta

SEQ ID NO: 85404 - DNA, 20 bp, Artificial Sequence
  Description of Artificial Sequence: Synthetic oligonucleotide
  Target: LAMA2; (-) strand; PAM type: NRG; PAM sequence: AAG
ctcaggctttgttgttgttt

SEQ ID NO: 85405 - DNA, 20 bp, Artificial Sequence
  Description of Artificial Sequence: Synthetic oligonucleotide
  Target: LAMA2; (-) strand; PAM type: NRG; PAM sequence: AGG
ttccacattttttccccctc

SEQ ID NO: 85406 - DNA, 20 bp, Artificial Sequence
  Description of Artificial Sequence: Synthetic oligonucleotide
  Target: LAMA2; (-) strand; PAM type: NRG; PAM sequence: CAG
gttccacattttttccccct

SEQ ID NO: 85407 - DNA, 20 bp, Artificial Sequence
  Description of Artificial Sequence: Synthetic oligonucleotide
  Target: LAMA2; (-) strand; PAM type: NRG; PAM sequence: GAG
gttttatgctatctgtggaa

SEQ ID NO: 85408 - DNA, 20 bp, Artificial Sequence
  Description of Artificial Sequence: Synthetic oligonucleotide
  Target: LAMA2; (-) strand; PAM type: NRG; PAM sequence: AAG
cagttttatgctatctgtgg

SEQ ID NO: 85409 - DNA, 20 bp, Artificial Sequence
  Description of Artificial Sequence: Synthetic oligonucleotide
  Target: LAMA2; (-) strand; PAM type: NRG; PAM sequence: TGG
tcacagttttatgctatctg

SEQ ID NO: 85410 - DNA, 20 bp, Artificial Sequence
  Description of Artificial Sequence: Synthetic oligonucleotide
  Target: LAMA2; (-) strand; PAM type: NRG; PAM sequence: CAG
tttctctttttcagagatca

SEQ ID NO: 85411 - DNA, 20 bp, Artificial Sequence
  Description of Artificial Sequence: Synthetic oligonucleotide
  Target: LAMA2; (-) strand; PAM type: NRG; PAM sequence: GAG
ccatttgtttctctttttca

SEQ ID NO: 85412 - DNA, 20 bp, Artificial Sequence
  Description of Artificial Sequence: Synthetic oligonucleotide
  Target: LAMA2; (-) strand; PAM type: NRG; PAM sequence: CAG
ccccatttgtttctcttttt

SEQ ID NO: 85413 - DNA, 20 bp, Artificial Sequence
  Description of Artificial Sequence: Synthetic oligonucleotide
  Target: LAMA2; (-) strand; PAM type: NRG; PAM sequence: GGG
gtccccaggcaataatcttg

SEQ ID NO: 85414 - DNA, 20 bp, Artificial Sequence
  Description of Artificial Sequence: Synthetic oligonucleotide
  Target: LAMA2; (-) strand; PAM type: NRG; PAM sequence: GGG
tgtccccaggcaataatctt

SEQ ID NO: 85415 - DNA, 20 bp, Artificial Sequence
  Description of Artificial Sequence: Synthetic oligonucleotide
  Target: LAMA2; (-) strand; PAM type: NRG; PAM sequence: TGG
ctgtccccaggcaataatct

SEQ ID NO: 85416 - DNA, 20 bp, Artificial Sequence
  Description of Artificial Sequence: Synthetic oligonucleotide
  Target: LAMA2; (-) strand; PAM type: NRG; PAM sequence: AGG
tcaccctggagactgtcccc

SEQ ID NO: 85417 - DNA, 20 bp, Artificial Sequence
  Description of Artificial Sequence: Synthetic oligonucleotide
  Target: LAMA2; (-) strand; PAM type: NRG; PAM sequence: CAG
ttcaccctggagactgtccc

SEQ ID NO: 85418 - DNA, 20 bp, Artificial Sequence
  Description of Artificial Sequence: Synthetic oligonucleotide
  Target: LAMA2; (-) strand; PAM type: NRG; PAM sequence: GAG
taccaatgcacttcaccctg

SEQ ID NO: 85419 - DNA, 20 bp, Artificial Sequence
  Description of Artificial Sequence: Synthetic oligonucleotide
  Target: LAMA2; (-) strand; PAM type: NRG; PAM sequence: TGG
tataccaatgcacttcaccc

SEQ ID NO: 85420 - DNA, 20 bp, Artificial Sequence
  Description of Artificial Sequence: Synthetic oligonucleotide
  Target: LAMA2; (-) strand; PAM type: NRG; PAM sequence: TGG
tggcaaggccaggctgtgtt

SEQ ID NO: 85421 - DNA, 20 bp, Artificial Sequence
  Description of Artificial Sequence: Synthetic oligonucleotide
  Target: LAMA2; (-) strand; PAM type: NRG; PAM sequence: AGG
tctttcaatttggcaaggcc

SEQ ID NO: 85422 - DNA, 20 bp, Artificial Sequence
  Description of Artificial Sequence: Synthetic oligonucleotide
  Target: LAMA2; (-) strand; PAM type: NRG; PAM sequence: CAG
gtctttcaatttggcaaggc

SEQ ID NO: 85423 - DNA, 20 bp, Artificial Sequence
  Description of Artificial Sequence: Synthetic oligonucleotide
  Target: LAMA2; (-) strand; PAM type: NRG; PAM sequence: AGG
ctctgtctttcaatttggca

SEQ ID NO: 85424 - DNA, 20 bp, Artificial Sequence
  Description of Artificial Sequence: Synthetic oligonucleotide
  Target: LAMA2; (-) strand; PAM type: NRG; PAM sequence: AAG
cctctgtctttcaatttggc

SEQ ID NO: 85425 - DNA, 20 bp, Artificial Sequence
  Description of Artificial Sequence: Synthetic oligonucleotide
  Target: LAMA2; (-) strand; PAM type: NRG; PAM sequence: TGG
ctaacctctgtctttcaatt

SEQ ID NO: 85426 - DNA, 20 bp, Artificial Sequence
  Description of Artificial Sequence: Synthetic oligonucleotide
  Target: LAMA2; (-) strand; PAM type: NRG; PAM sequence: TGG
ctcacaaatgctagctgcct

SEQ ID NO: 85427 - DNA, 20 bp, Artificial Sequence
  Description of Artificial Sequence: Synthetic oligonucleotide
  Target: LAMA2; (-) strand; PAM type: NRG; PAM sequence: TAG
gtatgctgcctcacaaatgc

SEQ ID NO: 85428 - DNA, 20 bp, Artificial Sequence
  Description of Artificial Sequence: Synthetic oligonucleotide
  Target: LAMA2; (-) strand; PAM type: NRG; PAM sequence: AGG
tctctctctctgtgcaggtc

SEQ ID NO: 85429 - DNA, 20 bp, Artificial Sequence
  Description of Artificial Sequence: Synthetic oligonucleotide
  Target: LAMA2; (-) strand; PAM type: NRG; PAM sequence: CAG
gtctctctctctgtgcaggt

SEQ ID NO: 85430 - DNA, 20 bp, Artificial Sequence
  Description of Artificial Sequence: Synthetic oligonucleotide
  Target: LAMA2; (-) strand; PAM type: NRG; PAM sequence: AGG
cctcgtctctctctctgtgc

SEQ ID NO: 85431 - DNA, 20 bp, Artificial Sequence
  Description of Artificial Sequence: Synthetic oligonucleotide
  Target: LAMA2; (-) strand; PAM type: NRG; PAM sequence: CAG
tcctcgtctctctctctgtg

SEQ ID NO: 85432 - DNA, 20 bp, Artificial Sequence
  Description of Artificial Sequence: Synthetic oligonucleotide
  Target: LAMA2; (-) strand; PAM type: NRG; PAM sequence: CAG
tttctctttgcagatagctg

SEQ ID NO: 85433 - DNA, 20 bp, Artificial Sequence
  Description of Artificial Sequence: Synthetic oligonucleotide
  Target: LAMA2; (-) strand; PAM type: NRG; PAM sequence: TAG
ctccggtttctctttgcaga

SEQ ID NO: 85434 - DNA, 20 bp, Artificial Sequence
  Description of Artificial Sequence: Synthetic oligonucleotide
  Target: LAMA2; (-) strand; PAM type: NRG; PAM sequence: CAG
agtactccggtttctctttg

SEQ ID NO: 85435 - DNA, 20 bp, Artificial Sequence
  Description of Artificial Sequence: Synthetic oligonucleotide
  Target: LAMA2; (-) strand; PAM type: NRG; PAM sequence: CGG
atatttgcaactcagtactc

SEQ ID NO: 85436 - DNA, 20 bp, Artificial Sequence
  Description of Artificial Sequence: Synthetic oligonucleotide
  Target: LAMA2; (-) strand; PAM type: NRG; PAM sequence: CAG
tctttcacatatttgcaact

SEQ ID NO: 85437 - DNA, 20 bp, Artificial Sequence
  Description of Artificial Sequence: Synthetic oligonucleotide
  Target: LAMA2; (-) strand; PAM type: NRG; PAM sequence: TAG
attctttcattagccttagg

SEQ ID NO: 85438 - DNA, 20 bp, Artificial Sequence
  Description of Artificial Sequence: Synthetic oligonucleotide
  Target: LAMA2; (-) strand; PAM type: NRG; PAM sequence: AGG
gtgattctttcattagcctt

SEQ ID NO: 85439 - DNA, 20 bp, Artificial Sequence
  Description of Artificial Sequence: Synthetic oligonucleotide
  Target: LAMA2; (-) strand; PAM type: NRG; PAM sequence: TAG
agtgattctttcattagcct

SEQ ID NO: 85440 - DNA, 20 bp, Artificial Sequence
  Description of Artificial Sequence: Synthetic oligonucleotide
  Target: LAMA2; (-) strand; PAM type: NRG; PAM sequence: TAG
ctttttagtgattctttcat

SEQ ID NO: 85441 - DNA, 20 bp, Artificial Sequence
  Description of Artificial Sequence: Synthetic oligonucleotide
  Target: LAMA2; (-) strand; PAM type: NRG; PAM sequence: TAG
ttgtttctcttactactttt

SEQ ID NO: 85442 - DNA, 20 bp, Artificial Sequence
  Description of Artificial Sequence: Synthetic oligonucleotide
  Target: LAMA2; (-) strand; PAM type: NRG; PAM sequence: AGG
tagcagccctgtatcagctc

SEQ ID NO: 85443 - DNA, 20 bp, Artificial Sequence
  Description of Artificial Sequence: Synthetic oligonucleotide
  Target: LAMA2; (-) strand; PAM type: NRG; PAM sequence: CAG
ttagcagccctgtatcagct

SEQ ID NO: 85444 - DNA, 20 bp, Artificial Sequence
  Description of Artificial Sequence: Synthetic oligonucleotide
  Target: LAMA2; (-) strand; PAM type: NRG; PAM sequence: CAG
aactattagcagccctgtat

SEQ ID NO: 85445 - DNA, 20 bp, Artificial Sequence
  Description of Artificial Sequence: Synthetic oligonucleotide
  Target: LAMA2; (-) strand; PAM type: NRG; PAM sequence: CAG
ttaggaaaataaactattag

SEQ ID NO: 85446 - DNA, 20 bp, Artificial Sequence
  Description of Artificial Sequence: Synthetic oligonucleotide
  Target: LAMA2; (-) strand; PAM type: NRG; PAM sequence: TAG
gtgttaggaaaataaactat

SEQ ID NO: 85447 - DNA, 20 bp, Artificial Sequence
  Description of Artificial Sequence: Synthetic oligonucleotide
  Target: LAMA2; (-) strand; PAM type: NRG; PAM sequence: AGG
gacattccactttgggtgtt

SEQ ID NO: 85448 - DNA, 20 bp, Artificial Sequence
  Description of Artificial Sequence: Synthetic oligonucleotide
  Target: LAMA2; (-) strand; PAM type: NRG; PAM sequence: TAG
agacattccactttgggtgt

SEQ ID NO: 85449 - DNA, 20 bp, Artificial Sequence
  Description of Artificial Sequence: Synthetic oligonucleotide
  Target: LAMA2; (-) strand; PAM type: NRG; PAM sequence: GGG
ttatgaagacattccacttt

SEQ ID NO: 85450 - DNA, 20 bp, Artificial Sequence
  Description of Artificial Sequence: Synthetic oligonucleotide
  Target: LAMA2; (-) strand; PAM type: NRG; PAM sequence: TGG
cttatgaagacattccactt

SEQ ID NO: 85451 - DNA, 20 bp, Artificial Sequence
  Description of Artificial Sequence: Synthetic oligonucleotide
  Target: LAMA2; (-) strand; PAM type: NRG; PAM sequence: AAG
ctaatttagtccctcttatg

SEQ ID NO: 85452 - DNA, 20 bp, Artificial Sequence
  Description of Artificial Sequence: Synthetic oligonucleotide
  Target: LAMA2; (-) strand; PAM type: NRG; PAM sequence: TAG
cttgtagtttggagctaatt

SEQ ID NO: 85453 - DNA, 20 bp, Artificial Sequence
  Description of Artificial Sequence: Synthetic oligonucleotide
  Target: LAMA2; (-) strand; PAM type: NRG; PAM sequence: GAG
ctagagtagcttgtagtttg

SEQ ID NO: 85454 - DNA, 20 bp, Artificial Sequence
  Description of Artificial Sequence: Synthetic oligonucleotide
  Target: LAMA2; (-) strand; PAM type: NRG; PAM sequence: TGG
acctagagtagcttgtagtt

SEQ ID NO: 85455 - DNA, 20 bp, Artificial Sequence
  Description of Artificial Sequence: Synthetic oligonucleotide
  Target: LAMA2; (-) strand; PAM type: NRG; PAM sequence: TAG
ggtgaacctagagtagcttg

SEQ ID NO: 85456 - DNA, 20 bp, Artificial Sequence
  Description of Artificial Sequence: Synthetic oligonucleotide
  Target: LAMA2; (-) strand; PAM type: NRG; PAM sequence: TAG
ttgttggggtgaacctagag

SEQ ID NO: 85457 - DNA, 20 bp, Artificial Sequence
  Description of Artificial Sequence: Synthetic oligonucleotide
  Target: LAMA2; (-) strand; PAM type: NRG; PAM sequence: GAG
gatttgttggggtgaaccta

SEQ ID NO: 85458 - DNA, 20 bp, Artificial Sequence
  Description of Artificial Sequence: Synthetic oligonucleotide
  Target: LAMA2; (-) strand; PAM type: NRG; PAM sequence: TAG
aagatttgttggggtgaacc

SEQ ID NO: 85459 - DNA, 20 bp, Artificial Sequence
  Description of Artificial Sequence: Synthetic oligonucleotide
  Target: LAMA2; (-) strand; PAM type: NRG; PAM sequence: GGG
gctgttttcaagatttgttg

SEQ ID NO: 85460 - DNA, 20 bp, Artificial Sequence
  Description of Artificial Sequence: Synthetic oligonucleotide
  Target: LAMA2; (-) strand; PAM type: NRG; PAM sequence: GGG
ggctgttttcaagatttgtt

SEQ ID NO: 85461 - DNA, 20 bp, Artificial Sequence
  Description of Artificial Sequence: Synthetic oligonucleotide
  Target: LAMA2; (-) strand; PAM type: NRG; PAM sequence: TGG
aggctgttttcaagatttgt

SEQ ID NO: 85462 - DNA, 20 bp, Artificial Sequence
  Description of Artificial Sequence: Synthetic oligonucleotide
  Target: LAMA2; (-) strand; PAM type: NRG; PAM sequence: AAG
cttcttttaaggctgttttc

SEQ ID NO: 85463 - DNA, 20 bp, Artificial Sequence
  Description of Artificial Sequence: Synthetic oligonucleotide
  Target: LAMA2; (-) strand; PAM type: NRG; PAM sequence: AGG
gaataagttgacttctttta

SEQ ID NO: 85464 - DNA, 20 bp, Artificial Sequence
  Description of Artificial Sequence: Synthetic oligonucleotide
  Target: LAMA2; (-) strand; PAM type: NRG; PAM sequence: AAG
ggaataagttgacttctttt

SEQ ID NO: 85465 - DNA, 20 bp, Artificial Sequence
  Description of Artificial Sequence: Synthetic oligonucleotide
  Target: LAMA2; (-) strand; PAM type: NRG; PAM sequence: AAG
gcagttaatttatttggaat

SEQ ID NO: 85466 - DNA, 20 bp, Artificial Sequence
  Description of Artificial Sequence: Synthetic oligonucleotide
  Target: LAMA2; (-) strand; PAM type: NRG; PAM sequence: TGG
tggcatgcagttaatttatt

SEQ ID NO: 85467 - DNA, 20 bp, Artificial Sequence
  Description of Artificial Sequence: Synthetic oligonucleotide
  Target: LAMA2; (-) strand; PAM type: NRG; PAM sequence: CAG
ttggactttgttctggcatg

SEQ ID NO: 85468 - DNA, 20 bp, Artificial Sequence
  Description of Artificial Sequence: Synthetic oligonucleotide
  Target: LAMA2; (-) strand; PAM type: NRG; PAM sequence: TGG
aatagtattggactttgttc

SEQ ID NO: 85469 - DNA, 20 bp, Artificial Sequence
  Description of Artificial Sequence: Synthetic oligonucleotide
  Target: LAMA2; (-) strand; PAM type: NRG; PAM sequence: TGG
ttgttgtaattaaatagtat

SEQ ID NO: 85470 - DNA, 20 bp, Artificial Sequence
  Description of Artificial Sequence: Synthetic oligonucleotide
  Target: LAMA2; (-) strand; PAM type: NRG; PAM sequence: TAG
tggattttgttgtaattaaa

SEQ ID NO: 85471 - DNA, 20 bp, Artificial Sequence
  Description of Artificial Sequence: Synthetic oligonucleotide
  Target: LAMA2; (-) strand; PAM type: NRG; PAM sequence: TGG
aattttacattgttgagtgc

SEQ ID NO: 85472 - DNA, 20 bp, Artificial Sequence
  Description of Artificial Sequence: Synthetic oligonucleotide
  Target: LAMA2; (-) strand; PAM type: NRG; PAM sequence: GAG
atcatgaattttacattgtt

SEQ ID NO: 85473 - DNA, 20 bp, Artificial Sequence
  Description of Artificial Sequence: Synthetic oligonucleotide
  Target: LAMA2; (-) strand; PAM type: NRG; PAM sequence: TAG
ctgcttgtttatgtacctgg

SEQ ID NO: 85474 - DNA, 20 bp, Artificial Sequence
  Description of Artificial Sequence: Synthetic oligonucleotide
  Target: LAMA2; (-) strand; PAM type: NRG; PAM sequence: TGG
gctctgcttgtttatgtacc

SEQ ID NO: 85475 - DNA, 20 bp, Artificial Sequence
  Description of Artificial Sequence: Synthetic oligonucleotide
  Target: LAMA2; (-) strand; PAM type: NRG; PAM sequence: TGG
attgattttcctcctggtag

SEQ ID NO: 85476 - DNA, 20 bp, Artificial Sequence
  Description of Artificial Sequence: Synthetic oligonucleotide
  Target: LAMA2; (-) strand; PAM type: NRG; PAM sequence: TAG
ttgattgattttcctcctgg

SEQ ID NO: 85477 - DNA, 20 bp, Artificial Sequence
  Description of Artificial Sequence: Synthetic oligonucleotide
  Target: LAMA2; (-) strand; PAM type: NRG; PAM sequence: TGG
ccattgattgattttcctcc

SEQ ID NO: 85478 - DNA, 20 bp, Artificial Sequence
  Description of Artificial Sequence: Synthetic oligonucleotide
  Target: LAMA2; (-) strand; PAM type: NRG; PAM sequence: GGG
catgattttcttgccatttg

SEQ ID NO: 85479 - DNA, 20 bp, Artificial Sequence
  Description of Artificial Sequence: Synthetic oligonucleotide
  Target: LAMA2; (-) strand; PAM type: NRG; PAM sequence: GGG
acatgattttcttgccattt

SEQ ID NO: 85480 - DNA, 20 bp, Artificial Sequence
  Description of Artificial Sequence: Synthetic oligonucleotide
  Target: LAMA2; (-) strand; PAM type: NRG; PAM sequence: TGG
gacatgattttcttgccatt

SEQ ID NO: 85481 - DNA, 20 bp, Artificial Sequence
  Description of Artificial Sequence: Synthetic oligonucleotide
  Target: LAMA2; (-) strand; PAM type: NRG; PAM sequence: CAG
tgattgcttttacaattttc

SEQ ID NO: 85482 - DNA, 20 bp, Artificial Sequence
  Description of Artificial Sequence: Synthetic oligonucleotide
  Target: LAMA2; (-) strand; PAM type: NRG; PAM sequence: TAG
gccaccgcgcctggccatgt

SEQ ID NO: 85483 - DNA, 20 bp, Artificial Sequence
  Description of Artificial Sequence: Synthetic oligonucleotide
  Target: LAMA2; (-) strand; PAM type: NRG; PAM sequence: TGG
caggcatgagccaccgcgcc

SEQ ID NO: 85484 - DNA, 20 bp, Artificial Sequence
  Description of Artificial Sequence: Synthetic oligonucleotide
  Target: LAMA2; (-) strand; PAM type: NRG; PAM sequence: GAG
agtgctgggattacaggcat

SEQ ID NO: 85485 - DNA, 20 bp, Artificial Sequence
  Description of Artificial Sequence: Synthetic oligonucleotide
  Target: LAMA2; (-) strand; PAM type: NRG; PAM sequence: AGG
tcccaaagtgctgggattac

SEQ ID NO: 85486 - DNA, 20 bp, Artificial Sequence
  Description of Artificial Sequence: Synthetic oligonucleotide
  Target: LAMA2; (-) strand; PAM type: NRG; PAM sequence: CAG
ctcccaaagtgctgggatta

SEQ ID NO: 85487 - DNA, 20 bp, Artificial Sequence
  Description of Artificial Sequence: Synthetic oligonucleotide
  Target: LAMA2; (-) strand; PAM type: NRG; PAM sequence: GGG
ccttggcctcccaaagtgct

SEQ ID NO: 85488 - DNA, 20 bp, Artificial Sequence
  Description of Artificial Sequence: Synthetic oligonucleotide
  Target: LAMA2; (-) strand; PAM type: NRG; PAM sequence: TGG
gccttggcctcccaaagtgc

SEQ ID NO: 85489 - DNA, 20 bp, Artificial Sequence
  Description of Artificial Sequence: Synthetic oligonucleotide
  Target: LAMA2; (-) strand; PAM type: NRG; PAM sequence: AAG
ccacctgccttggcctccca

SEQ ID NO: 85490 - DNA, 20 bp, Artificial Sequence
  Description of Artificial Sequence: Synthetic oligonucleotide
  Target: LAMA2; (-) strand; PAM type: NRG; PAM sequence: TGG
acctcgtgatccacctgcct

SEQ ID NO: 85491 - DNA, 20 bp, Artificial Sequence
  Description of Artificial Sequence: Synthetic oligonucleotide
  Target: LAMA2; (-) strand; PAM type: NRG; PAM sequence: TGG
tttcaccatattggccaggc

SEQ ID NO: 85492 - DNA, 20 bp, Artificial Sequence
  Description of Artificial Sequence: Synthetic oligonucleotide
  Target: LAMA2; (-) strand; PAM type: NRG; PAM sequence: AGG
ggggtttcaccatattggcc

SEQ ID NO: 85493 - DNA, 20 bp, Artificial Sequence
  Description of Artificial Sequence: Synthetic oligonucleotide
  Target: LAMA2; (-) strand; PAM type: NRG; PAM sequence: CAG
tggggtttcaccatattggc

SEQ ID NO: 85494 - DNA, 20 bp, Artificial Sequence
  Description of Artificial Sequence: Synthetic oligonucleotide
  Target: LAMA2; (-) strand; PAM type: NRG; PAM sequence: TGG
gagatggggtttcaccatat

SEQ ID NO: 85495 - DNA, 20 bp, Artificial Sequence
  Description of Artificial Sequence: Synthetic oligonucleotide
  Target: LAMA2; (-) strand; PAM type: NRG; PAM sequence: GGG
ttgtatttttagtagagatg

SEQ ID NO: 85496 - DNA, 20 bp, Artificial Sequence
  Description of Artificial Sequence: Synthetic oligonucleotide
  Target: LAMA2; (-) strand; PAM type: NRG; PAM sequence: GGG
tttgtatttttagtagagat

SEQ ID NO: 85497 - DNA, 20 bp, Artificial Sequence
  Description of Artificial Sequence: Synthetic oligonucleotide
  Target: LAMA2; (-) strand; PAM type: NRG; PAM sequence: TGG
ttttgtatttttagtagaga

SEQ ID NO: 85498 - DNA, 20 bp, Artificial Sequence
  Description of Artificial Sequence: Synthetic oligonucleotide
  Target: LAMA2; (-) strand; PAM type: NRG; PAM sequence: GAG
taatttttgtatttttagta

SEQ ID NO: 85499 - DNA, 20 bp, Artificial Sequence
  Description of Artificial Sequence: Synthetic oligonucleotide
  Target: LAMA2; (-) strand; PAM type: NRG; PAM sequence: TAG
gctaatttttgtatttttag

SEQ ID NO: 85500 - DNA, 20 bp, Artificial Sequence
  Description of Artificial Sequence: Synthetic oligonucleotide
  Target: LAMA2; (-) strand; PAM type: NRG; PAM sequence: TAG
ccagctaatttttgtatttt

SEQ ID NO: 85501 - DNA, 20 bp, Artificial Sequence
  Description of Artificial Sequence: Synthetic oligonucleotide
  Target: LAMA2; (-) strand; PAM type: NRG; PAM sequence: CAG
caggtgtgcaccaccatgcc

SEQ ID NO: 85502 - DNA, 20 bp, Artificial Sequence
  Description of Artificial Sequence: Synthetic oligonucleotide
  Target: LAMA2; (-) strand; PAM type: NRG; PAM sequence: AGG
tcctgagcagctgggactac

SEQ ID NO: 85503 - DNA, 20 bp, Artificial Sequence
  Description of Artificial Sequence: Synthetic oligonucleotide
  Target: LAMA2; (-) strand; PAM type: NRG; PAM sequence: CAG
ctcctgagcagctgggacta

SEQ ID NO: 85504 - DNA, 20 bp, Artificial Sequence
  Description of Artificial Sequence: Synthetic oligonucleotide
  Target: LAMA2; (-) strand; PAM type: NRG; PAM sequence: GGG
cctcagcctcctgagcagct

SEQ ID NO: 85505 - DNA, 20 bp, Artificial Sequence
  Description of Artificial Sequence: Synthetic oligonucleotide
  Target: LAMA2; (-) strand; PAM type: NRG; PAM sequence: TGG
gcctcagcctcctgagcagc

SEQ ID NO: 85506 - DNA, 20 bp, Artificial Sequence
  Description of Artificial Sequence: Synthetic oligonucleotide
  Target: LAMA2; (-) strand; PAM type: NRG; PAM sequence: CAG
tcctgcctcagcctcctgag

SEQ ID NO: 85507 - DNA, 20 bp, Artificial Sequence
  Description of Artificial Sequence: Synthetic oligonucleotide
  Target: LAMA2; (-) strand; PAM type: NRG; PAM sequence: GAG
ttctcctgcctcagcctcct

SEQ ID NO: 85508 - DNA, 20 bp, Artificial Sequence
  Description of Artificial Sequence: Synthetic oligonucleotide
  Target: LAMA2; (-) strand; PAM type: NRG; PAM sequence: CAG
ttcaagtgattctcctgcct

SEQ ID NO: 85509 - DNA, 20 bp, Artificial Sequence
  Description of Artificial Sequence: Synthetic oligonucleotide
  Target: LAMA2; (-) strand; PAM type: NRG; PAM sequence: AAG
aaccatcgcctcccaggttc

SEQ ID NO: 85510 - DNA, 20 bp, Artificial Sequence
  Description of Artificial Sequence: Synthetic oligonucleotide
  Target: LAMA2; (-) strand; PAM type: NRG; PAM sequence: AGG
cactgaaaccatcgcctccc

SEQ ID NO: 85511 - DNA, 20 bp, Artificial Sequence
  Description of Artificial Sequence: Synthetic oligonucleotide
  Target: LAMA2; (-) strand; PAM type: NRG; PAM sequence: CAG
tcactgaaaccatcgcctcc

SEQ ID NO: 85512 - DNA, 20 bp, Artificial Sequence
  Description of Artificial Sequence: Synthetic oligonucleotide
  Target: LAMA2; (-) strand; PAM type: NRG; PAM sequence: CGG
ggagtgcagtggtatgatct

SEQ ID NO: 85513 - DNA, 20 bp, Artificial Sequence
  Description of Artificial Sequence: Synthetic oligonucleotide
  Target: LAMA2; (-) strand; PAM type: NRG; PAM sequence: TGG
ttgcttaggctggagtgcag

SEQ ID NO: 85514 - DNA, 20 bp, Artificial Sequence
  Description of Artificial Sequence: Synthetic oligonucleotide
  Target: LAMA2; (-) strand; PAM type: NRG; PAM sequence: CAG
ctgttgcttaggctggagtg

SEQ ID NO: 85515 - DNA, 20 bp, Artificial Sequence
  Description of Artificial Sequence: Synthetic oligonucleotide
  Target: LAMA2; (-) strand; PAM type: NRG; PAM sequence: GAG
tcgctctgttgcttaggctg

SEQ ID NO: 85516 - DNA, 20 bp, Artificial Sequence
  Description of Artificial Sequence: Synthetic oligonucleotide
  Target: LAMA2; (-) strand; PAM type: NRG; PAM sequence: TGG
tctcgctctgttgcttaggc

SEQ ID NO: 85517 - DNA, 20 bp, Artificial Sequence
  Description of Artificial Sequence: Synthetic oligonucleotide
  Target: LAMA2; (-) strand; PAM type: NRG; PAM sequence: AGG
agactctcgctctgttgctt

SEQ ID NO: 85518 - DNA, 20 bp, Artificial Sequence
  Description of Artificial Sequence: Synthetic oligonucleotide
  Target: LAMA2; (-) strand; PAM type: NRG; PAM sequence: TAG
cagactctcgctctgttgct

SEQ ID NO: 85519 - DNA, 20 bp, Artificial Sequence
  Description of Artificial Sequence: Synthetic oligonucleotide
  Target: LAMA2; (-) strand; PAM type: NRG; PAM sequence: CAG
ttttttttttttttttgaga

SEQ ID NO: 85520 - DNA, 20 bp, Artificial Sequence
  Description of Artificial Sequence: Synthetic oligonucleotide
  Target: LAMA2; (-) strand; PAM type: NRG; PAM sequence: GAG
tttttttttttttttttttt

SEQ ID NO: 85521 - DNA, 20 bp, Artificial Sequence
  Description of Artificial Sequence: Synthetic oligonucleotide
  Target: LAMA2; (-) strand; PAM type: NRG; PAM sequence: AAG
catagcatatagggtctgac

SEQ ID NO: 85522 - DNA, 20 bp, Artificial Sequence
  Description of Artificial Sequence: Synthetic oligonucleotide
  Target: LAMA2; (-) strand; PAM type: NRG; PAM sequence: GGG
catttggaccatagcatata

SEQ ID NO: 85523 - DNA, 20 bp, Artificial Sequence
  Description of Artificial Sequence: Synthetic oligonucleotide
  Target: LAMA2; (-) strand; PAM type: NRG; PAM sequence: AGG
acatttggaccatagcatat

SEQ ID NO: 85524 - DNA, 20 bp, Artificial Sequence
  Description of Artificial Sequence: Synthetic oligonucleotide
  Target: LAMA2; (-) strand; PAM type: NRG; PAM sequence: TAG
aacatttggaccatagcata

SEQ ID NO: 85525 - DNA, 20 bp, Artificial Sequence
  Description of Artificial Sequence: Synthetic oligonucleotide
  Target: LAMA2; (-) strand; PAM type: NRG; PAM sequence: TAG
ggacaccaacatttggacca

SEQ ID NO: 85526 - DNA, 20 bp, Artificial Sequence
  Description of Artificial Sequence: Synthetic oligonucleotide
  Target: LAMA2; (-) strand; PAM type: NRG; PAM sequence: TGG
tttagggggacaccaacatt

SEQ ID NO: 85527 - DNA, 20 bp, Artificial Sequence
  Description of Artificial Sequence: Synthetic oligonucleotide
  Target: LAMA2; (-) strand; PAM type: NRG; PAM sequence: GGG
tccagcatataagttttagg

SEQ ID NO: 85528 - DNA, 20 bp, Artificial Sequence
  Description of Artificial Sequence: Synthetic oligonucleotide
  Target: LAMA2; (-) strand; PAM type: NRG; PAM sequence: GGG
ttccagcatataagttttag

SEQ ID NO: 85529 - DNA, 20 bp, Artificial Sequence
  Description of Artificial Sequence: Synthetic oligonucleotide
  Target: LAMA2; (-) strand; PAM type: NRG; PAM sequence: GGG
gttccagcatataagtttta

SEQ ID NO: 85530 - DNA, 20 bp, Artificial Sequence
  Description of Artificial Sequence: Synthetic oligonucleotide
  Target: LAMA2; (-) strand; PAM type: NRG; PAM sequence: AGG
ggttccagcatataagtttt

SEQ ID NO: 85531 - DNA, 20 bp, Artificial Sequence
  Description of Artificial Sequence: Synthetic oligonucleotide
  Target: LAMA2; (-) strand; PAM type: NRG; PAM sequence: TAG
aggttccagcatataagttt

SEQ ID NO: 85532 - DNA, 20 bp, Artificial Sequence
  Description of Artificial Sequence: Synthetic oligonucleotide
  Target: LAMA2; (-) strand; PAM type: NRG; PAM sequence: AAG
ggcattaggttccagcatat

SEQ ID NO: 85533 - DNA, 20 bp, Artificial Sequence
  Description of Artificial Sequence: Synthetic oligonucleotide
  Target: LAMA2; (-) strand; PAM type: NRG; PAM sequence: CAG
tcacattaggcattaggttc

SEQ ID NO: 85534 - DNA, 20 bp, Artificial Sequence
  Description of Artificial Sequence: Synthetic oligonucleotide
  Target: LAMA2; (-) strand; PAM type: NRG; PAM sequence: AGG
atactatcacattaggcatt

SEQ ID NO: 85535 - DNA, 20 bp, Artificial Sequence
  Description of Artificial Sequence: Synthetic oligonucleotide
  Target: LAMA2; (-) strand; PAM type: NRG; PAM sequence: TAG
aatactatcacattaggcat

SEQ ID NO: 85536 - DNA, 20 bp, Artificial Sequence
  Description of Artificial Sequence: Synthetic oligonucleotide
  Target: LAMA2; (-) strand; PAM type: NRG; PAM sequence: AGG
cctctaaatactatcacatt

SEQ ID NO: 85537 - DNA, 20 bp, Artificial Sequence
  Description of Artificial Sequence: Synthetic oligonucleotide
  Target: LAMA2; (-) strand; PAM type: NRG; PAM sequence: TAG
acctctaaatactatcacat

SEQ ID NO: 85538 - DNA, 20 bp, Artificial Sequence
  Description of Artificial Sequence: Synthetic oligonucleotide
  Target: LAMA2; (-) strand; PAM type: NRG; PAM sequence: AAG
tgacttaatcactcccccaa

SEQ ID NO: 85539 - DNA, 20 bp, Artificial Sequence
  Description of Artificial Sequence: Synthetic oligonucleotide
  Target: LAMA2; (-) strand; PAM type: NRG; PAM sequence: GAG
aatcccattcatggagatta

SEQ ID NO: 85540 - DNA, 20 bp, Artificial Sequence
  Description of Artificial Sequence: Synthetic oligonucleotide
  Target: LAMA2; (-) strand; PAM type: NRG; PAM sequence: TAG
ttaatcccattcatggagat

SEQ ID NO: 85541 - DNA, 20 bp, Artificial Sequence
  Description of Artificial Sequence: Synthetic oligonucleotide
  Target: LAMA2; (-) strand; PAM type: NRG; PAM sequence: GAG
ggatgttaatcccattcatg

SEQ ID NO: 85542 - DNA, 20 bp, Artificial Sequence
  Description of Artificial Sequence: Synthetic oligonucleotide
  Target: LAMA2; (-) strand; PAM type: NRG; PAM sequence: TGG
aaggatgttaatcccattca

SEQ ID NO: 85543 - DNA, 20 bp, Artificial Sequence
  Description of Artificial Sequence: Synthetic oligonucleotide
  Target: LAMA2; (-) strand; PAM type: NRG; PAM sequence: AGG
catcctcaacctcttttgta

SEQ ID NO: 85544 - DNA, 20 bp, Artificial Sequence
  Description of Artificial Sequence: Synthetic oligonucleotide
  Target: LAMA2; (-) strand; PAM type: NRG; PAM sequence: AAG
gcatcctcaacctcttttgt

SEQ ID NO: 85545 - DNA, 20 bp, Artificial Sequence
  Description of Artificial Sequence: Synthetic oligonucleotide
  Target: LAMA2; (-) strand; PAM type: NRG; PAM sequence: CAG
acgtaaaggaaagggcaagg

SEQ ID NO: 85546 - DNA, 20 bp, Artificial Sequence
  Description of Artificial Sequence: Synthetic oligonucleotide
  Target: LAMA2; (-) strand; PAM type: NRG; PAM sequence: AGG
ttcacgtaaaggaaagggca

SEQ ID NO: 85547 - DNA, 20 bp, Artificial Sequence
  Description of Artificial Sequence: Synthetic oligonucleotide
  Target: LAMA2; (-) strand; PAM type: NRG; PAM sequence: AAG
cttcacgtaaaggaaagggc

SEQ ID NO: 85548 - DNA, 20 bp, Artificial Sequence
  Description of Artificial Sequence: Synthetic oligonucleotide
  Target: LAMA2; (-) strand; PAM type: NRG; PAM sequence: GGG
gccccttcacgtaaaggaaa

SEQ ID NO: 85549 - DNA, 20 bp, Artificial Sequence
  Description of Artificial Sequence: Synthetic oligonucleotide
  Target: LAMA2; (-) strand; PAM type: NRG; PAM sequence: AGG
tgccccttcacgtaaaggaa

SEQ ID NO: 85550 - DNA, 20 bp, Artificial Sequence
  Description of Artificial Sequence: Synthetic oligonucleotide
  Target: LAMA2; (-) strand; PAM type: NRG; PAM sequence: AAG
ctgccccttcacgtaaagga

SEQ ID NO: 85551 - DNA, 20 bp, Artificial Sequence
  Description of Artificial Sequence: Synthetic oligonucleotide
  Target: LAMA2; (-) strand; PAM type: NRG; PAM sequence: AGG
cttgctgccccttcacgtaa

SEQ ID NO: 85552 - DNA, 20 bp, Artificial Sequence
  Description of Artificial Sequence: Synthetic oligonucleotide
  Target: LAMA2; (-) strand; PAM type: NRG; PAM sequence: AAG
ccttgctgccccttcacgta

SEQ ID NO: 85553 - DNA, 20 bp, Artificial Sequence
  Description of Artificial Sequence: Synthetic oligonucleotide
  Target: LAMA2; (-) strand; PAM type: NRG; PAM sequence: TGG
cttgctctctgcttccaagg

SEQ ID NO: 85554 - DNA, 20 bp, Artificial Sequence
  Description of Artificial Sequence: Synthetic oligonucleotide
  Target: LAMA2; (-) strand; PAM type: NRG; PAM sequence: AGG
gggcttgctctctgcttcca

SEQ ID NO: 85555 - DNA, 20 bp, Artificial Sequence
  Description of Artificial Sequence: Synthetic oligonucleotide
  Target: LAMA2; (-) strand; PAM type: NRG; PAM sequence: AAG
agggcttgctctctgcttcc

SEQ ID NO: 85556 - DNA, 20 bp, Artificial Sequence
  Description of Artificial Sequence: Synthetic oligonucleotide
  Target: LAMA2; (-) strand; PAM type: NRG; PAM sequence: GGG
gcagatttgatgtgtggtga

SEQ ID NO: 85557 - DNA, 20 bp, Artificial Sequence
  Description of Artificial Sequence: Synthetic oligonucleotide
  Target: LAMA2; (-) strand; PAM type: NRG; PAM sequence: AGG
agcagatttgatgtgtggtg

SEQ ID NO: 85558 - DNA, 20 bp, Artificial Sequence
  Description of Artificial Sequence: Synthetic oligonucleotide
  Target: LAMA2; (-) strand; PAM type: NRG; PAM sequence: GAG
cagcagatttgatgtgtggt

SEQ ID NO: 85559 - DNA, 20 bp, Artificial Sequence
  Description of Artificial Sequence: Synthetic oligonucleotide
  Target: LAMA2; (-) strand; PAM type: NRG; PAM sequence: TGG
gcatcagcagatttgatgtg

SEQ ID NO: 85560 - DNA, 20 bp, Artificial Sequence
  Description of Artificial Sequence: Synthetic oligonucleotide
  Target: LAMA2; (-) strand; PAM type: NRG; PAM sequence: CAG
atccaagatccaggcatcag

SEQ ID NO: 85561 - DNA, 20 bp, Artificial Sequence
  Description of Artificial Sequence: Synthetic oligonucleotide
  Target: LAMA2; (-) strand; PAM type: NRG; PAM sequence: CAG
gaaatccaagatccaggcat

SEQ ID NO: 85562 - DNA, 20 bp, Artificial Sequence
  Description of Artificial Sequence: Synthetic oligonucleotide
  Target: LAMA2; (-) strand; PAM type: NRG; PAM sequence: AGG
gactaggaaatccaagatcc

SEQ ID NO: 85563 - DNA, 20 bp, Artificial Sequence
  Description of Artificial Sequence: Synthetic oligonucleotide
  Target: LAMA2; (-) strand; PAM type: NRG; PAM sequence: CAG
agactaggaaatccaagatc

SEQ ID NO: 85564 - DNA, 20 bp, Artificial Sequence
  Description of Artificial Sequence: Synthetic oligonucleotide
  Target: LAMA2; (-) strand; PAM type: NRG; PAM sequence: AAG
tgctggagactaggaaatcc

SEQ ID NO: 85565 - DNA, 20 bp, Artificial Sequence
  Description of Artificial Sequence: Synthetic oligonucleotide
  Target: LAMA2; (-) strand; PAM type: NRG; PAM sequence: AGG
tgctcacagtgctggagact

SEQ ID NO: 85566 - DNA, 20 bp, Artificial Sequence
  Description of Artificial Sequence: Synthetic oligonucleotide
  Target: LAMA2; (-) strand; PAM type: NRG; PAM sequence: TAG
ctgctcacagtgctggagac

SEQ ID NO: 85567 - DNA, 20 bp, Artificial Sequence
  Description of Artificial Sequence: Synthetic oligonucleotide
  Target: LAMA2; (-) strand; PAM type: NRG; PAM sequence: GAG
atatactgctcacagtgctg

SEQ ID NO: 85568 - DNA, 20 bp, Artificial Sequence
  Description of Artificial Sequence: Synthetic oligonucleotide
  Target: LAMA2; (-) strand; PAM type: NRG; PAM sequence: TGG
aaatatactgctcacagtgc

SEQ ID NO: 85569 - DNA, 20 bp, Artificial Sequence
  Description of Artificial Sequence: Synthetic oligonucleotide
  Target: LAMA2; (-) strand; PAM type: NRG; PAM sequence: CAG
cattaaaaatatactgctca

SEQ ID NO: 85570 - DNA, 20 bp, Artificial Sequence
  Description of Artificial Sequence: Synthetic oligonucleotide
  Target: LAMA2; (-) strand; PAM type: NRG; PAM sequence: AAG
acagggactaggtagttttt

SEQ ID NO: 85571 - DNA, 20 bp, Artificial Sequence
  Description of Artificial Sequence: Synthetic oligonucleotide
  Target: LAMA2; (-) strand; PAM type: NRG; PAM sequence: TAG
acaaaataacagggactagg

SEQ ID NO: 85572 - DNA, 20 bp, Artificial Sequence
  Description of Artificial Sequence: Synthetic oligonucleotide
  Target: LAMA2; (-) strand; PAM type: NRG; PAM sequence: AGG
acaacaaaataacagggact

SEQ ID NO: 85573 - DNA, 20 bp, Artificial Sequence
  Description of Artificial Sequence: Synthetic oligonucleotide
  Target: LAMA2; (-) strand; PAM type: NRG; PAM sequence: TAG
tacaacaaaataacagggac

SEQ ID NO: 85574 - DNA, 20 bp, Artificial Sequence
  Description of Artificial Sequence: Synthetic oligonucleotide
  Target: LAMA2; (-) strand; PAM type: NRG; PAM sequence: GGG
gctgctacaacaaaataaca

SEQ ID NO: 85575 - DNA, 20 bp, Artificial Sequence
  Description of Artificial Sequence: Synthetic oligonucleotide
  Target: LAMA2; (-) strand; PAM type: NRG; PAM sequence: AGG
ggctgctacaacaaaataac

SEQ ID NO: 85576 - DNA, 20 bp, Artificial Sequence
  Description of Artificial Sequence: Synthetic oligonucleotide
  Target: LAMA2; (-) strand; PAM type: NRG; PAM sequence: CAG
aggctgctacaacaaaataa

SEQ ID NO: 85577 - DNA, 20 bp, Artificial Sequence
  Description of Artificial Sequence: Synthetic oligonucleotide
  Target: LAMA2; (-) strand; PAM type: NRG; PAM sequence: AGG
caaagtgtactgatgcattc

SEQ ID NO: 85578 - DNA, 20 bp, Artificial Sequence
  Description of Artificial Sequence: Synthetic oligonucleotide
  Target: LAMA2; (-) strand; PAM type: NRG; PAM sequence: CAG
gcaaagtgtactgatgcatt

SEQ ID NO: 85579 - DNA, 20 bp, Artificial Sequence
  Description of Artificial Sequence: Synthetic oligonucleotide
  Target: LAMA2; (-) strand; PAM type: NRG; PAM sequence: AAG
gtattgtattctggcttgca

SEQ ID NO: 85580 - DNA, 20 bp, Artificial Sequence
  Description of Artificial Sequence: Synthetic oligonucleotide
  Target: LAMA2; (-) strand; PAM type: NRG; PAM sequence: TGG
catatctctgtattgtattc

SEQ ID NO: 85581 - DNA, 20 bp, Artificial Sequence
  Description of Artificial Sequence: Synthetic oligonucleotide
  Target: LAMA2; (-) strand; PAM type: NRG; PAM sequence: TAG
ggtaaagaattatagactga

SEQ ID NO: 85582 - DNA, 20 bp, Artificial Sequence
  Description of Artificial Sequence: Synthetic oligonucleotide
  Target: LAMA2; (-) strand; PAM type: NRG; PAM sequence: TAG
ttttgcctggtaaagaatta

SEQ ID NO: 85583 - DNA, 20 bp, Artificial Sequence
  Description of Artificial Sequence: Synthetic oligonucleotide
  Target: LAMA2; (-) strand; PAM type: NRG; PAM sequence: AAG
gaagacatttttgcctggta

SEQ ID NO: 85584 - DNA, 20 bp, Artificial Sequence
  Description of Artificial Sequence: Synthetic oligonucleotide
  Target: LAMA2; (-) strand; PAM type: NRG; PAM sequence: TGG
ttttggaagacatttttgcc

SEQ ID NO: 85585 - DNA, 20 bp, Artificial Sequence
  Description of Artificial Sequence: Synthetic oligonucleotide
  Target: LAMA2; (-) strand; PAM type: NRG; PAM sequence: AAG
tgttttttcttcagttttgg

SEQ ID NO: 85586 - DNA, 20 bp, Artificial Sequence
  Description of Artificial Sequence: Synthetic oligonucleotide
  Target: LAMA2; (-) strand; PAM type: NRG; PAM sequence: TGG
ctttgttttttcttcagttt

SEQ ID NO: 85587 - DNA, 20 bp, Artificial Sequence
  Description of Artificial Sequence: Synthetic oligonucleotide
  Target: LAMA2; (-) strand; PAM type: NRG; PAM sequence: CAG
aacaatctttgttttttctt

SEQ ID NO: 85588 - DNA, 20 bp, Artificial Sequence
  Description of Artificial Sequence: Synthetic oligonucleotide
  Target: LAMA2; (-) strand; PAM type: NRG; PAM sequence: CAG
acatttcttcttgtgtacat

SEQ ID NO: 85589 - DNA, 20 bp, Artificial Sequence
  Description of Artificial Sequence: Synthetic oligonucleotide
  Target: LAMA2; (-) strand; PAM type: NRG; PAM sequence: AAG
taacatttttcttttgcctg

SEQ ID NO: 85590 - DNA, 20 bp, Artificial Sequence
  Description of Artificial Sequence: Synthetic oligonucleotide
  Target: LAMA2; (-) strand; PAM type: NRG; PAM sequence: TGG
tgtaggagtaaatttccatc

SEQ ID NO: 85591 - DNA, 20 bp, Artificial Sequence
  Description of Artificial Sequence: Synthetic oligonucleotide
  Target: LAMA2; (-) strand; PAM type: NRG; PAM sequence: GAG
cacttaatttctatttgtag

SEQ ID NO: 85592 - DNA, 20 bp, Artificial Sequence
  Description of Artificial Sequence: Synthetic oligonucleotide
  Target: LAMA2; (-) strand; PAM type: NRG; PAM sequence: AGG
tacacttaatttctatttgt

SEQ ID NO: 85593 - DNA, 20 bp, Artificial Sequence
  Description of Artificial Sequence: Synthetic oligonucleotide
  Target: LAMA2; (-) strand; PAM type: NRG; PAM sequence: TAG
atacacttaatttctatttg

SEQ ID NO: 85594 - DNA, 20 bp, Artificial Sequence
  Description of Artificial Sequence: Synthetic oligonucleotide
  Target: LAMA2; (-) strand; PAM type: NRG; PAM sequence: AAG
gacagctagcactagtgaca

SEQ ID NO: 85595 - DNA, 20 bp, Artificial Sequence
  Description of Artificial Sequence: Synthetic oligonucleotide
  Target: LAMA2; (-) strand; PAM type: NRG; PAM sequence: TAG
ggtcttgtgacagctagcac

SEQ ID NO: 85596 - DNA, 20 bp, Artificial Sequence
  Description of Artificial Sequence: Synthetic oligonucleotide
  Target: LAMA2; (-) strand; PAM type: NRG; PAM sequence: TAG
gctagaggtcttgtgacagc

SEQ ID NO: 85597 - DNA, 20 bp, Artificial Sequence
  Description of Artificial Sequence: Synthetic oligonucleotide
  Target: LAMA2; (-) strand; PAM type: NRG; PAM sequence: CAG
actggctagaggtcttgtga

SEQ ID NO: 85598 - DNA, 20 bp, Artificial Sequence
  Description of Artificial Sequence: Synthetic oligonucleotide
  Target: LAMA2; (-) strand; PAM type: NRG; PAM sequence: AGG
ctgaaaacatgactggctag

SEQ ID NO: 85599 - DNA, 20 bp, Artificial Sequence
  Description of Artificial Sequence: Synthetic oligonucleotide
  Target: LAMA2; (-) strand; PAM type: NRG; PAM sequence: GAG
gctgaaaacatgactggcta

SEQ ID NO: 85600 - DNA, 20 bp, Artificial Sequence
  Description of Artificial Sequence: Synthetic oligonucleotide
  Target: LAMA2; (-) strand; PAM type: NRG; PAM sequence: TAG
cagctgaaaacatgactggc

SEQ ID NO: 85601 - DNA, 20 bp, Artificial Sequence
  Description of Artificial Sequence: Synthetic oligonucleotide
  Target: LAMA2; (-) strand; PAM type: NRG; PAM sequence: TGG
cctacagctgaaaacatgac

SEQ ID NO: 85602 - DNA, 20 bp, Artificial Sequence
  Description of Artificial Sequence: Synthetic oligonucleotide
  Target: LAMA2; (-) strand; PAM type: NRG; PAM sequence: CAG
aaccatggtgttaggcccta

SEQ ID NO: 85603 - DNA, 20 bp, Artificial Sequence
  Description of Artificial Sequence: Synthetic oligonucleotide
  Target: LAMA2; (-) strand; PAM type: NRG; PAM sequence: AGG
cattccttaaccatggtgtt

SEQ ID NO: 85604 - DNA, 20 bp, Artificial Sequence
  Description of Artificial Sequence: Synthetic oligonucleotide
  Target: LAMA2; (-) strand; PAM type: NRG; PAM sequence: TAG
ccattccttaaccatggtgt

SEQ ID NO: 85605 - DNA, 20 bp, Artificial Sequence
  Description of Artificial Sequence: Synthetic oligonucleotide
  Target: LAMA2; (-) strand; PAM type: NRG; PAM sequence: TGG
aggtaaccattccttaacca

SEQ ID NO: 85606 - DNA, 20 bp, Artificial Sequence
  Description of Artificial Sequence: Synthetic oligonucleotide
  Target: LAMA2; (-) strand; PAM type: NRG; PAM sequence: AGG
tactttaagtttgtgtattt

SEQ ID NO: 85607 - DNA, 20 bp, Artificial Sequence
  Description of Artificial Sequence: Synthetic oligonucleotide
  Target: LAMA2; (-) strand; PAM type: NRG; PAM sequence: TAG
ctactttaagtttgtgtatt

SEQ ID NO: 85608 - DNA, 20 bp, Artificial Sequence
  Description of Artificial Sequence: Synthetic oligonucleotide
  Target: LAMA2; (-) strand; PAM type: NRG; PAM sequence: AAG
agtatttgaagttctacttt

SEQ ID NO: 85609 - DNA, 20 bp, Artificial Sequence
  Description of Artificial Sequence: Synthetic oligonucleotide
  Target: LAMA2; (-) strand; PAM type: NRG; PAM sequence: AAG
ttttatacaggaagtatttg

SEQ ID NO: 85610 - DNA, 20 bp, Artificial Sequence
  Description of Artificial Sequence: Synthetic oligonucleotide
  Target: LAMA2; (-) strand; PAM type: NRG; PAM sequence: AAG
gagggaaaattttatacagg

SEQ ID NO: 85611 - DNA, 20 bp, Artificial Sequence
  Description of Artificial Sequence: Synthetic oligonucleotide
  Target: LAMA2; (-) strand; PAM type: NRG; PAM sequence: AGG
tcagagggaaaattttatac

SEQ ID NO: 85612 - DNA, 20 bp, Artificial Sequence
  Description of Artificial Sequence: Synthetic oligonucleotide
  Target: LAMA2; (-) strand; PAM type: NRG; PAM sequence: CAG
ttcagagggaaaattttata

SEQ ID NO: 85613 - DNA, 20 bp, Artificial Sequence
  Description of Artificial Sequence: Synthetic oligonucleotide
  Target: LAMA2; (-) strand; PAM type: NRG; PAM sequence: GGG
tttctttttaaaacttcaga

SEQ ID NO: 85614 - DNA, 20 bp, Artificial Sequence
  Description of Artificial Sequence: Synthetic oligonucleotide
  Target: LAMA2; (-) strand; PAM type: NRG; PAM sequence: AGG
ctttctttttaaaacttcag

SEQ ID NO: 85615 - DNA, 20 bp, Artificial Sequence
  Description of Artificial Sequence: Synthetic oligonucleotide
  Target: LAMA2; (-) strand; PAM type: NRG; PAM sequence: GAG
tctttctttttaaaacttca

SEQ ID NO: 85616 - DNA, 20 bp, Artificial Sequence
  Description of Artificial Sequence: Synthetic oligonucleotide
  Target: LAMA2; (-) strand; PAM type: NRG; PAM sequence: CAG
agtctttctttttaaaactt

SEQ ID NO: 85617 - DNA, 20 bp, Artificial Sequence
  Description of Artificial Sequence: Synthetic oligonucleotide
  Target: LAMA2; (-) strand; PAM type: NRG; PAM sequence: CAG
tttatactcttcttacaacc

SEQ ID NO: 85618 - DNA, 20 bp, Artificial Sequence
  Description of Artificial Sequence: Synthetic oligonucleotide
  Target: LAMA2; (-) strand; PAM type: NRG; PAM sequence: AAG
gaaatgagagctggagaagc

SEQ ID NO: 85619 - DNA, 20 bp, Artificial Sequence
  Description of Artificial Sequence: Synthetic oligonucleotide
  Target: LAMA2; (-) strand; PAM type: NRG; PAM sequence: AAG
atgagaaatgagagctggag

SEQ ID NO: 85620 - DNA, 20 bp, Artificial Sequence
  Description of Artificial Sequence: Synthetic oligonucleotide
  Target: LAMA2; (-) strand; PAM type: NRG; PAM sequence: GAG
gaaatgagaaatgagagctg

SEQ ID NO: 85621 - DNA, 20 bp, Artificial Sequence
  Description of Artificial Sequence: Synthetic oligonucleotide
  Target: LAMA2; (-) strand; PAM type: NRG; PAM sequence: TGG
ttgaaatgagaaatgagagc

SEQ ID NO: 85622 - DNA, 20 bp, Artificial Sequence
  Description of Artificial Sequence: Synthetic oligonucleotide
  Target: LAMA2; (-) strand; PAM type: NRG; PAM sequence: GAG
aagtttgaaatgagaaatga

SEQ ID NO: 85623 - DNA, 20 bp, Artificial Sequence
  Description of Artificial Sequence: Synthetic oligonucleotide
  Target: LAMA2; (-) strand; PAM type: NRG; PAM sequence: GAG
ttaagtttgaaatgagaaat

SEQ ID NO: 85624 - DNA, 20 bp, Artificial Sequence
  Description of Artificial Sequence: Synthetic oligonucleotide
  Target: LAMA2; (-) strand; PAM type: NRG; PAM sequence: GAG
tctttctttaagtttgaaat

SEQ ID NO: 85625 - DNA, 20 bp, Artificial Sequence
  Description of Artificial Sequence: Synthetic oligonucleotide
  Target: LAMA2; (-) strand; PAM type: NRG; PAM sequence: AAG
ggtgctggttttctttcttt

SEQ ID NO: 85626 - DNA, 20 bp, Artificial Sequence
  Description of Artificial Sequence: Synthetic oligonucleotide
  Target: LAMA2; (-) strand; PAM type: NRG; PAM sequence: TGG
aaacactttcaaattggtgc

SEQ ID NO: 85627 - DNA, 20 bp, Artificial Sequence
  Description of Artificial Sequence: Synthetic oligonucleotide
  Target: LAMA2; (-) strand; PAM type: NRG; PAM sequence: TGG
ttattgaaacactttcaaat

SEQ ID NO: 85628 - DNA, 20 bp, Artificial Sequence
  Description of Artificial Sequence: Synthetic oligonucleotide
  Target: LAMA2; (-) strand; PAM type: NRG; PAM sequence: GAG
aacgtgaagttttacattga

SEQ ID NO: 85629 - DNA, 20 bp, Artificial Sequence
  Description of Artificial Sequence: Synthetic oligonucleotide
  Target: LAMA2; (-) strand; PAM type: NRG; PAM sequence: GAG
acaacgtgaagttttacatt

SEQ ID NO: 85630 - DNA, 20 bp, Artificial Sequence
  Description of Artificial Sequence: Synthetic oligonucleotide
  Target: LAMA2; (-) strand; PAM type: NRG; PAM sequence: AAG
aagctacagaaaacaacgtg

SEQ ID NO: 85631 - DNA, 20 bp, Artificial Sequence
  Description of Artificial Sequence: Synthetic oligonucleotide
  Target: LAMA2; (-) strand; PAM type: NRG; PAM sequence: CAG
aagaagttactgaaaagcta

SEQ ID NO: 85632 - DNA, 20 bp, Artificial Sequence
  Description of Artificial Sequence: Synthetic oligonucleotide
  Target: LAMA2; (-) strand; PAM type: NRG; PAM sequence: AAG
gagtgtaagaagttactgaa

SEQ ID NO: 85633 - DNA, 20 bp, Artificial Sequence
  Description of Artificial Sequence: Synthetic oligonucleotide
  Target: LAMA2; (-) strand; PAM type: NRG; PAM sequence: AAG
acatagaacatgagtgtaag

SEQ ID NO: 85634 - DNA, 20 bp, Artificial Sequence
  Description of Artificial Sequence: Synthetic oligonucleotide
  Target: LAMA2; (-) strand; PAM type: NRG; PAM sequence: AAG
cgcacatagaacatgagtgt

SEQ ID NO: 85635 - DNA, 20 bp, Artificial Sequence
  Description of Artificial Sequence: Synthetic oligonucleotide
  Target: LAMA2; (-) strand; PAM type: NRG; PAM sequence: GAG
ctgagccgcacatagaacat

SEQ ID NO: 85636 - DNA, 20 bp, Artificial Sequence
  Description of Artificial Sequence: Synthetic oligonucleotide
  Target: LAMA2; (-) strand; PAM type: NRG; PAM sequence: TAG
gttccccactgagccgcaca

SEQ ID NO: 85637 - DNA, 20 bp, Artificial Sequence
  Description of Artificial Sequence: Synthetic oligonucleotide
  Target: LAMA2; (-) strand; PAM type: NRG; PAM sequence: GAG
gatacagatagttccccact

SEQ ID NO: 85638 - DNA, 20 bp, Artificial Sequence
  Description of Artificial Sequence: Synthetic oligonucleotide
  Target: LAMA2; (-) strand; PAM type: NRG; PAM sequence: TAG
aacaatccactggatacaga

SEQ ID NO: 85639 - DNA, 20 bp, Artificial Sequence
  Description of Artificial Sequence: Synthetic oligonucleotide
  Target: LAMA2; (-) strand; PAM type: NRG; PAM sequence: CAG
aaccaacaatccactggata

SEQ ID NO: 85640 - DNA, 20 bp, Artificial Sequence
  Description of Artificial Sequence: Synthetic oligonucleotide
  Target: LAMA2; (-) strand; PAM type: NRG; PAM sequence: TGG
tgtcagaaccaacaatccac

SEQ ID NO: 85641 - DNA, 20 bp, Artificial Sequence
  Description of Artificial Sequence: Synthetic oligonucleotide
  Target: LAMA2; (-) strand; PAM type: NRG; PAM sequence: CAG
atgcacgtaggctagtgtgt

SEQ ID NO: 85642 - DNA, 20 bp, Artificial Sequence
  Description of Artificial Sequence: Synthetic oligonucleotide
  Target: LAMA2; (-) strand; PAM type: NRG; PAM sequence: TAG
tgccccatatgcacgtaggc

SEQ ID NO: 85643 - DNA, 20 bp, Artificial Sequence
  Description of Artificial Sequence: Synthetic oligonucleotide
  Target: LAMA2; (-) strand; PAM type: NRG; PAM sequence: AGG
gggttgccccatatgcacgt

SEQ ID NO: 85644 - DNA, 20 bp, Artificial Sequence
  Description of Artificial Sequence: Synthetic oligonucleotide
  Target: LAMA2; (-) strand; PAM type: NRG; PAM sequence: TAG
ggggttgccccatatgcacg

SEQ ID NO: 85645 - DNA, 20 bp, Artificial Sequence
  Description of Artificial Sequence: Synthetic oligonucleotide
  Target: LAMA2; (-) strand; PAM type: NRG; PAM sequence: GGG
ggcaggggccagcatgttgg

SEQ ID NO: 85646 - DNA, 20 bp, Artificial Sequence
  Description of Artificial Sequence: Synthetic oligonucleotide
  Target: LAMA2; (-) strand; PAM type: NRG; PAM sequence: GGG
tggcaggggccagcatgttg

SEQ ID NO: 85647 - DNA, 20 bp, Artificial Sequence
  Description of Artificial Sequence: Synthetic oligonucleotide
  Target: LAMA2; (-) strand; PAM type: NRG; PAM sequence: GGG
gtggcaggggccagcatgtt

SEQ ID NO: 85648 - DNA, 20 bp, Artificial Sequence
  Description of Artificial Sequence: Synthetic oligonucleotide
  Target: LAMA2; (-) strand; PAM type: NRG; PAM sequence: TGG
agtggcaggggccagcatgt

SEQ ID NO: 85649 - DNA, 20 bp, Artificial Sequence
  Description of Artificial Sequence: Synthetic oligonucleotide
  Target: LAMA2; (-) strand; PAM type: NRG; PAM sequence: CAG
ctattgcaagtggcaggggc

SEQ ID NO: 85650 - DNA, 20 bp, Artificial Sequence
  Description of Artificial Sequence: Synthetic oligonucleotide
  Target: LAMA2; (-) strand; PAM type: NRG; PAM sequence: GGG
tgatctattgcaagtggcag

SEQ ID NO: 85651 - DNA, 20 bp, Artificial Sequence
  Description of Artificial Sequence: Synthetic oligonucleotide
  Target: LAMA2; (-) strand; PAM type: NRG; PAM sequence: GGG
ctgatctattgcaagtggca

SEQ ID NO: 85652 - DNA, 20 bp, Artificial Sequence
  Description of Artificial Sequence: Synthetic oligonucleotide
  Target: LAMA2; (-) strand; PAM type: NRG; PAM sequence: AGG
tctgatctattgcaagtggc

SEQ ID NO: 85653 - DNA, 20 bp, Artificial Sequence
  Description of Artificial Sequence: Synthetic oligonucleotide
  Target: LAMA2; (-) strand; PAM type: NRG; PAM sequence: CAG
gtctgatctattgcaagtgg

SEQ ID NO: 85654 - DNA, 20 bp, Artificial Sequence
  Description of Artificial Sequence: Synthetic oligonucleotide
  Target: LAMA2; (-) strand; PAM type: NRG; PAM sequence: TGG
tgggtctgatctattgcaag

SEQ ID NO: 85655 - DNA, 20 bp, Artificial Sequence
  Description of Artificial Sequence: Synthetic oligonucleotide
  Target: LAMA2; (-) strand; PAM type: NRG; PAM sequence: AAG
gggtgggtctgatctattgc

SEQ ID NO: 85656 - DNA, 20 bp, Artificial Sequence
  Description of Artificial Sequence: Synthetic oligonucleotide
  Target: LAMA2; (-) strand; PAM type: NRG; PAM sequence: GGG
ctcactcaaccacaaggggt

SEQ ID NO: 85657 - DNA, 20 bp, Artificial Sequence
  Description of Artificial Sequence: Synthetic oligonucleotide
  Target: LAMA2; (-) strand; PAM type: NRG; PAM sequence: TGG
cctcactcaaccacaagggg

SEQ ID NO: 85658 - DNA, 20 bp, Artificial Sequence
  Description of Artificial Sequence: Synthetic oligonucleotide
  Target: LAMA2; (-) strand; PAM type: NRG; PAM sequence: GGG
ctgcctcactcaaccacaag

SEQ ID NO: 85659 - DNA, 20 bp, Artificial Sequence
  Description of Artificial Sequence: Synthetic oligonucleotide
  Target: LAMA2; (-) strand; PAM type: NRG; PAM sequence: GGG
actgcctcactcaaccacaa

SEQ ID NO: 85660 - DNA, 20 bp, Artificial Sequence
  Description of Artificial Sequence: Synthetic oligonucleotide
  Target: LAMA2; (-) strand; PAM type: NRG; PAM sequence: AGG
tactgcctcactcaaccaca

SEQ ID NO: 85661 - DNA, 20 bp, Artificial Sequence
  Description of Artificial Sequence: Synthetic oligonucleotide
  Target: LAMA2; (-) strand; PAM type: NRG; PAM sequence: AAG
atactgcctcactcaaccac

SEQ ID NO: 85662 - DNA, 20 bp, Artificial Sequence
  Description of Artificial Sequence: Synthetic oligonucleotide
  Target: LAMA2; (-) strand; PAM type: NRG; PAM sequence: TAG
agtaaacaaaatgccaggtt

SEQ ID NO: 85663 - DNA, 20 bp, Artificial Sequence
  Description of Artificial Sequence: Synthetic oligonucleotide
  Target: LAMA2; (-) strand; PAM type: NRG; PAM sequence: AGG
acaacagtaaacaaaatgcc

SEQ ID NO: 85664 - DNA, 20 bp, Artificial Sequence
  Description of Artificial Sequence: Synthetic oligonucleotide
  Target: LAMA2; (-) strand; PAM type: NRG; PAM sequence: CAG
aacaacagtaaacaaaatgc

SEQ ID NO: 85665 - DNA, 20 bp, Artificial Sequence
  Description of Artificial Sequence: Synthetic oligonucleotide
  Target: LAMA2; (-) strand; PAM type: NRG; PAM sequence: CAG
ctaccaacaacactcaacaa

SEQ ID NO: 85666 - DNA, 20 bp, Artificial Sequence
  Description of Artificial Sequence: Synthetic oligonucleotide
  Target: LAMA2; (-) strand; PAM type: NRG; PAM sequence: TGG
ctctctccttagcttgtaga

SEQ ID NO: 85667 - DNA, 20 bp, Artificial Sequence
  Description of Artificial Sequence: Synthetic oligonucleotide
  Target: LAMA2; (-) strand; PAM type: NRG; PAM sequence: TAG
agccctctctccttagcttg

SEQ ID NO: 85668 - DNA, 20 bp, Artificial Sequence
  Description of Artificial Sequence: Synthetic oligonucleotide
  Target: LAMA2; (-) strand; PAM type: NRG; PAM sequence: TAG
ctgttgcagccctctctcct

SEQ ID NO: 85669 - DNA, 20 bp, Artificial Sequence
  Description of Artificial Sequence: Synthetic oligonucleotide
  Target: LAMA2; (-) strand; PAM type: NRG; PAM sequence: CAG
tacaaggaattaagctgttg

SEQ ID NO: 85670 - DNA, 20 bp, Artificial Sequence
  Description of Artificial Sequence: Synthetic oligonucleotide
  Target: LAMA2; (-) strand; PAM type: NRG; PAM sequence: AAG
tatgaacactacaaggaatt

SEQ ID NO: 85671 - DNA, 20 bp, Artificial Sequence
  Description of Artificial Sequence: Synthetic oligonucleotide
  Target: LAMA2; (-) strand; PAM type: NRG; PAM sequence: AGG
ggttctttatgaacactaca

SEQ ID NO: 85672 - DNA, 20 bp, Artificial Sequence
  Description of Artificial Sequence: Synthetic oligonucleotide
  Target: LAMA2; (-) strand; PAM type: NRG; PAM sequence: AAG
tggttctttatgaacactac

SEQ ID NO: 85673 - DNA, 20 bp, Artificial Sequence
  Description of Artificial Sequence: Synthetic oligonucleotide
  Target: LAMA2; (-) strand; PAM type: NRG; PAM sequence: TGG
gatcaagctgtcagcaggat

SEQ ID NO: 85674 - DNA, 20 bp, Artificial Sequence
  Description of Artificial Sequence: Synthetic oligonucleotide
  Target: LAMA2; (-) strand; PAM type: NRG; PAM sequence: AGG
tgtgagatcaagctgtcagc

SEQ ID NO: 85675 - DNA, 20 bp, Artificial Sequence
  Description of Artificial Sequence: Synthetic oligonucleotide
  Target: LAMA2; (-) strand; PAM type: NRG; PAM sequence: CAG
atgtgagatcaagctgtcag

SEQ ID NO: 85676 - DNA, 20 bp, Artificial Sequence
  Description of Artificial Sequence: Synthetic oligonucleotide
  Target: LAMA2; (-) strand; PAM type: NRG; PAM sequence: CAG
gctatgtgagatcaagctgt

SEQ ID NO: 85677 - DNA, 20 bp, Artificial Sequence
  Description of Artificial Sequence: Synthetic oligonucleotide
  Target: LAMA2; (-) strand; PAM type: NRG; PAM sequence: AAG
ttattttgctatgtgagatc

SEQ ID NO: 85678 - DNA, 20 bp, Artificial Sequence
  Description of Artificial Sequence: Synthetic oligonucleotide
  Target: LAMA2; (-) strand; PAM type: NRG; PAM sequence: GAG
catgtattattttgctatgt

SEQ ID NO: 85679 - DNA, 20 bp, Artificial Sequence
  Description of Artificial Sequence: Synthetic oligonucleotide
  Target: LAMA2; (-) strand; PAM type: NRG; PAM sequence: AAG
tggaaatcaaggaggaaaaa

SEQ ID NO: 85680 - DNA, 20 bp, Artificial Sequence
  Description of Artificial Sequence: Synthetic oligonucleotide
  Target: LAMA2; (-) strand; PAM type: NRG; PAM sequence: AGG
aattctcatggaaatcaagg

SEQ ID NO: 85681 - DNA, 20 bp, Artificial Sequence
  Description of Artificial Sequence: Synthetic oligonucleotide
  Target: LAMA2; (-) strand; PAM type: NRG; PAM sequence: GAG
caattctcatggaaatcaag

SEQ ID NO: 85682 - DNA, 20 bp, Artificial Sequence
  Description of Artificial Sequence: Synthetic oligonucleotide
  Target: LAMA2; (-) strand; PAM type: NRG; PAM sequence: AGG
cccaattctcatggaaatca

SEQ ID NO: 85683 - DNA, 20 bp, Artificial Sequence
  Description of Artificial Sequence: Synthetic oligonucleotide
  Target: LAMA2; (-) strand; PAM type: NRG; PAM sequence: AAG
acccaattctcatggaaatc

SEQ ID NO: 85684 - DNA, 20 bp, Artificial Sequence
  Description of Artificial Sequence: Synthetic oligonucleotide
  Target: LAMA2; (-) strand; PAM type: NRG; PAM sequence: TGG
tagctttcacccaattctca

SEQ ID NO: 85685 - DNA, 20 bp, Artificial Sequence
  Description of Artificial Sequence: Synthetic oligonucleotide
  Target: LAMA2; (-) strand; PAM type: NRG; PAM sequence: TAG
tcatccgcttatatgagtaa

SEQ ID NO: 85686 - DNA, 20 bp, Artificial Sequence
  Description of Artificial Sequence: Synthetic oligonucleotide
  Target: LAMA2; (-) strand; PAM type: NRG; PAM sequence: GAG
atcaggtcatccgcttatat

SEQ ID NO: 85687 - DNA, 20 bp, Artificial Sequence
  Description of Artificial Sequence: Synthetic oligonucleotide
  Target: LAMA2; (-) strand; PAM type: NRG; PAM sequence: AGG
accacaaaaatgagagaatc

SEQ ID NO: 85688 - DNA, 20 bp, Artificial Sequence
  Description of Artificial Sequence: Synthetic oligonucleotide
  Target: LAMA2; (-) strand; PAM type: NRG; PAM sequence: CAG
aaccacaaaaatgagagaat

SEQ ID NO: 85689 - DNA, 20 bp, Artificial Sequence
  Description of Artificial Sequence: Synthetic oligonucleotide
  Target: LAMA2; (-) strand; PAM type: NRG; PAM sequence: GAG
aaaggtaaccacaaaaatga

SEQ ID NO: 85690 - DNA, 20 bp, Artificial Sequence
  Description of Artificial Sequence: Synthetic oligonucleotide
  Target: LAMA2; (-) strand; PAM type: NRG; PAM sequence: GAG
tcaaaggtaaccacaaaaat

SEQ ID NO: 85691 - DNA, 20 bp, Artificial Sequence
  Description of Artificial Sequence: Synthetic oligonucleotide
  Target: LAMA2; (-) strand; PAM type: NRG; PAM sequence: AGG
aagaccaaaacactaatcaa

SEQ ID NO: 85692 - DNA, 20 bp, Artificial Sequence
  Description of Artificial Sequence: Synthetic oligonucleotide
  Target: LAMA2; (-) strand; PAM type: NRG; PAM sequence: AAG
aaagaccaaaacactaatca

SEQ ID NO: 85693 - DNA, 20 bp, Artificial Sequence
  Description of Artificial Sequence: Synthetic oligonucleotide
  Target: LAMA2; (-) strand; PAM type: NRG; PAM sequence: AAG
tcaggtctgtgaaacgcata

SEQ ID NO: 85694 - DNA, 20 bp, Artificial Sequence
  Description of Artificial Sequence: Synthetic oligonucleotide
  Target: LAMA2; (-) strand; PAM type: NRG; PAM sequence: AGG
agagatccagcatttgaatc

SEQ ID NO: 85695 - DNA, 20 bp, Artificial Sequence
  Description of Artificial Sequence: Synthetic oligonucleotide
  Target: LAMA2; (-) strand; PAM type: NRG; PAM sequence: CAG
cagagatccagcatttgaat

SEQ ID NO: 85696 - DNA, 20 bp, Artificial Sequence
  Description of Artificial Sequence: Synthetic oligonucleotide
  Target: LAMA2; (-) strand; PAM type: NRG; PAM sequence: CAG
aagctaataaagcagagatc

SEQ ID NO: 85697 - DNA, 20 bp, Artificial Sequence
  Description of Artificial Sequence: Synthetic oligonucleotide
  Target: LAMA2; (-) strand; PAM type: NRG; PAM sequence: GAG
atcacaaagctaataaagca

SEQ ID NO: 85698 - DNA, 20 bp, Artificial Sequence
  Description of Artificial Sequence: Synthetic oligonucleotide
  Target: LAMA2; (-) strand; PAM type: NRG; PAM sequence: CAG
agatcacaaagctaataaag

SEQ ID NO: 85699 - DNA, 20 bp, Artificial Sequence
  Description of Artificial Sequence: Synthetic oligonucleotide
  Target: LAMA2; (-) strand; PAM type: NRG; PAM sequence: AAG
ccaagatcacaaagctaata

SEQ ID NO: 85700 - DNA, 20 bp, Artificial Sequence
  Description of Artificial Sequence: Synthetic oligonucleotide
  Target: LAMA2; (-) strand; PAM type: NRG; PAM sequence: AAG
gggatatgtccaagatcaca

SEQ ID NO: 85701 - DNA, 20 bp, Artificial Sequence
  Description of Artificial Sequence: Synthetic oligonucleotide
  Target: LAMA2; (-) strand; PAM type: NRG; PAM sequence: AAG
ctagattaagggatatgtcc

SEQ ID NO: 85702 - DNA, 20 bp, Artificial Sequence
  Description of Artificial Sequence: Synthetic oligonucleotide
  Target: LAMA2; (-) strand; PAM type: NRG; PAM sequence: GGG
atctggctcaactagattaa

SEQ ID NO: 85703 - DNA, 20 bp, Artificial Sequence
  Description of Artificial Sequence: Synthetic oligonucleotide
  Target: LAMA2; (-) strand; PAM type: NRG; PAM sequence: AGG
aatctggctcaactagatta

SEQ ID NO: 85704 - DNA, 20 bp, Artificial Sequence
  Description of Artificial Sequence: Synthetic oligonucleotide
  Target: LAMA2; (-) strand; PAM type: NRG; PAM sequence: AAG
gaatctggctcaactagatt

SEQ ID NO: 85705 - DNA, 20 bp, Artificial Sequence
  Description of Artificial Sequence: Synthetic oligonucleotide
  Target: LAMA2; (-) strand; PAM type: NRG; PAM sequence: TAG
taatgagaatctggctcaac

SEQ ID NO: 85706 - DNA, 20 bp, Artificial Sequence
  Description of Artificial Sequence: Synthetic oligonucleotide
  Target: LAMA2; (-) strand; PAM type: NRG; PAM sequence: TGG
ttttgcagataatgagaatc

SEQ ID NO: 85707 - DNA, 20 bp, Artificial Sequence
  Description of Artificial Sequence: Synthetic oligonucleotide
  Target: LAMA2; (-) strand; PAM type: NRG; PAM sequence: GAG
agcctcattttgcagataat

SEQ ID NO: 85708 - DNA, 20 bp, Artificial Sequence
  Description of Artificial Sequence: Synthetic oligonucleotide
  Target: LAMA2; (-) strand; PAM type: NRG; PAM sequence: CAG
gtgctagaagcctcattttg

SEQ ID NO: 85709 - DNA, 20 bp, Artificial Sequence
  Description of Artificial Sequence: Synthetic oligonucleotide
  Target: LAMA2; (-) strand; PAM type: NRG; PAM sequence: AAG
acaattctgaggggtgctag

SEQ ID NO: 85710 - DNA, 20 bp, Artificial Sequence
  Description of Artificial Sequence: Synthetic oligonucleotide
  Target: LAMA2; (-) strand; PAM type: NRG; PAM sequence: TAG
tgtacaattctgaggggtgc

SEQ ID NO: 85711 - DNA, 20 bp, Artificial Sequence
  Description of Artificial Sequence: Synthetic oligonucleotide
  Target: LAMA2; (-) strand; PAM type: NRG; PAM sequence: GGG
gagctttgtacaattctgag

SEQ ID NO: 85712 - DNA, 20 bp, Artificial Sequence
  Description of Artificial Sequence: Synthetic oligonucleotide
  Target: LAMA2; (-) strand; PAM type: NRG; PAM sequence: GGG
agagctttgtacaattctga

SEQ ID NO: 85713 - DNA, 20 bp, Artificial Sequence
  Description of Artificial Sequence: Synthetic oligonucleotide
  Target: LAMA2; (-) strand; PAM type: NRG; PAM sequence: AGG
gagagctttgtacaattctg

SEQ ID NO: 85714 - DNA, 20 bp, Artificial Sequence
  Description of Artificial Sequence: Synthetic oligonucleotide
  Target: LAMA2; (-) strand; PAM type: NRG; PAM sequence: GAG
cgagagctttgtacaattct

SEQ ID NO: 85715 - DNA, 20 bp, Artificial Sequence
  Description of Artificial Sequence: Synthetic oligonucleotide
  Target: LAMA2; (-) strand; PAM type: NRG; PAM sequence: GAG
tgtgctaaggacattttcga

SEQ ID NO: 85716 - DNA, 20 bp, Artificial Sequence
  Description of Artificial Sequence: Synthetic oligonucleotide
  Target: LAMA2; (-) strand; PAM type: NRG; PAM sequence: GAG
tgtgtgctaaggacattttc

SEQ ID NO: 85717 - DNA, 20 bp, Artificial Sequence
  Description of Artificial Sequence: Synthetic oligonucleotide
  Target: LAMA2; (-) strand; PAM type: NRG; PAM sequence: AGG
cggacagcttctgtgtgcta

SEQ ID NO: 85718 - DNA, 20 bp, Artificial Sequence
  Description of Artificial Sequence: Synthetic oligonucleotide
  Target: LAMA2; (-) strand; PAM type: NRG; PAM sequence: AAG
tcggacagcttctgtgtgct

SEQ ID NO: 85719 - DNA, 20 bp, Artificial Sequence
  Description of Artificial Sequence: Synthetic oligonucleotide
  Target: LAMA2; (-) strand; PAM type: NRG; PAM sequence: CAG
agcaattggcatttatcgga

SEQ ID NO: 85720 - DNA, 20 bp, Artificial Sequence
  Description of Artificial Sequence: Synthetic oligonucleotide
  Target: LAMA2; (-) strand; PAM type: NRG; PAM sequence: CGG
ataaagcaattggcatttat

SEQ ID NO: 85721 - DNA, 20 bp, Artificial Sequence
  Description of Artificial Sequence: Synthetic oligonucleotide
  Target: LAMA2; (-) strand; PAM type: NRG; PAM sequence: TGG
acagaaattcataaagcaat

SEQ ID NO: 85722 - DNA, 20 bp, Artificial Sequence
  Description of Artificial Sequence: Synthetic oligonucleotide
  Target: LAMA2; (-) strand; PAM type: NRG; PAM sequence: AAG
tacaactacagaaattcata

SEQ ID NO: 85723 - DNA, 20 bp, Artificial Sequence
  Description of Artificial Sequence: Synthetic oligonucleotide
  Target: LAMA2; (-) strand; PAM type: NRG; PAM sequence: CAG
attactgcagcatacaacta

SEQ ID NO: 85724 - DNA, 20 bp, Artificial Sequence
  Description of Artificial Sequence: Synthetic oligonucleotide
  Target: LAMA2; (-) strand; PAM type: NRG; PAM sequence: CAG
atctccaaaataaattactg

SEQ ID NO: 85725 - DNA, 20 bp, Artificial Sequence
  Description of Artificial Sequence: Synthetic oligonucleotide
  Target: LAMA2; (-) strand; PAM type: NRG; PAM sequence: AAG
cgtcttttactgatataagg

SEQ ID NO: 85726 - DNA, 20 bp, Artificial Sequence
  Description of Artificial Sequence: Synthetic oligonucleotide
  Target: LAMA2; (-) strand; PAM type: NRG; PAM sequence: AGG
aaacgtcttttactgatata

SEQ ID NO: 85727 - DNA, 20 bp, Artificial Sequence
  Description of Artificial Sequence: Synthetic oligonucleotide
  Target: LAMA2; (-) strand; PAM type: NRG; PAM sequence: AAG
caaacgtcttttactgatat

SEQ ID NO: 85728 - DNA, 20 bp, Artificial Sequence
  Description of Artificial Sequence: Synthetic oligonucleotide
  Target: LAMA2; (-) strand; PAM type: NRG; PAM sequence: AAG
actatgtcagacaggtgaca

SEQ ID NO: 85729 - DNA, 20 bp, Artificial Sequence
  Description of Artificial Sequence: Synthetic oligonucleotide
  Target: LAMA2; (-) strand; PAM type: NRG; PAM sequence: AGG
caccagatactatgtcagac

SEQ ID NO: 85730 - DNA, 20 bp, Artificial Sequence
  Description of Artificial Sequence: Synthetic oligonucleotide
  Target: LAMA2; (-) strand; PAM type: NRG; PAM sequence: CAG
ccaccagatactatgtcaga

SEQ ID NO: 85731 - DNA, 20 bp, Artificial Sequence
  Description of Artificial Sequence: Synthetic oligonucleotide
  Target: LAMA2; (-) strand; PAM type: NRG; PAM sequence: CAG
actaccaccagatactatgt

SEQ ID NO: 85732 - DNA, 20 bp, Artificial Sequence
  Description of Artificial Sequence: Synthetic oligonucleotide
  Target: LAMA2; (-) strand; PAM type: NRG; PAM sequence: CAG
tgtcttatccttactaccac

SEQ ID NO: 85733 - DNA, 20 bp, Artificial Sequence
  Description of Artificial Sequence: Synthetic oligonucleotide
  Target: LAMA2; (-) strand; PAM type: NRG; PAM sequence: AGG
tgctgcaaagctgccattaa

SEQ ID NO: 85734 - DNA, 20 bp, Artificial Sequence
  Description of Artificial Sequence: Synthetic oligonucleotide
  Target: LAMA2; (-) strand; PAM type: NRG; PAM sequence: AAG
ttgctgcaaagctgccatta

SEQ ID NO: 85735 - DNA, 20 bp, Artificial Sequence
  Description of Artificial Sequence: Synthetic oligonucleotide
  Target: LAMA2; (-) strand; PAM type: NRG; PAM sequence: AAG
atgttttgcactttgctgca

SEQ ID NO: 85736 - DNA, 20 bp, Artificial Sequence
  Description of Artificial Sequence: Synthetic oligonucleotide
  Target: LAMA2; (-) strand; PAM type: NRG; PAM sequence: TGG
ctgcgggtatttcacaaatc

SEQ ID NO: 85737 - DNA, 20 bp, Artificial Sequence
  Description of Artificial Sequence: Synthetic oligonucleotide
  Target: LAMA2; (-) strand; PAM type: NRG; PAM sequence: GGG
taaagtctaaaacactctgc

SEQ ID NO: 85738 - DNA, 20 bp, Artificial Sequence
  Description of Artificial Sequence: Synthetic oligonucleotide
  Target: LAMA2; (-) strand; PAM type: NRG; PAM sequence: CGG
ataaagtctaaaacactctg

SEQ ID NO: 85739 - DNA, 20 bp, Artificial Sequence
  Description of Artificial Sequence: Synthetic oligonucleotide
  Target: LAMA2; (-) strand; PAM type: NRG; PAM sequence: AAG
aatttggcaccttcaaaata

SEQ ID NO: 85740 - DNA, 20 bp, Artificial Sequence
  Description of Artificial Sequence: Synthetic oligonucleotide
  Target: LAMA2; (-) strand; PAM type: NRG; PAM sequence: TGG
gatgcatgttagctctaatt

SEQ ID NO: 85741 - DNA, 20 bp, Artificial Sequence
  Description of Artificial Sequence: Synthetic oligonucleotide
  Target: LAMA2; (-) strand; PAM type: NRG; PAM sequence: TAG
agacatgaagcgatgcatgt

SEQ ID NO: 85742 - DNA, 20 bp, Artificial Sequence
  Description of Artificial Sequence: Synthetic oligonucleotide
  Target: LAMA2; (-) strand; PAM type: NRG; PAM sequence: AAG
aattttcttgggaagacatg

SEQ ID NO: 85743 - DNA, 20 bp, Artificial Sequence
  Description of Artificial Sequence: Synthetic oligonucleotide
  Target: LAMA2; (-) strand; PAM type: NRG; PAM sequence: AAG
tgtcatgtaattttcttggg

SEQ ID NO: 85744 - DNA, 20 bp, Artificial Sequence
  Description of Artificial Sequence: Synthetic oligonucleotide
  Target: LAMA2; (-) strand; PAM type: NRG; PAM sequence: GGG
atttgtcatgtaattttctt

SEQ ID NO: 85745 - DNA, 20 bp, Artificial Sequence
  Description of Artificial Sequence: Synthetic oligonucleotide
  Target: LAMA2; (-) strand; PAM type: NRG; PAM sequence: TGG
tatttgtcatgtaattttct

SEQ ID NO: 85746 - DNA, 20 bp, Artificial Sequence
  Description of Artificial Sequence: Synthetic oligonucleotide
  Target: LAMA2; (-) strand; PAM type: NRG; PAM sequence: TAG
ggttgtcagtgaagcagaga

SEQ ID NO: 85747 - DNA, 20 bp, Artificial Sequence
  Description of Artificial Sequence: Synthetic oligonucleotide
  Target: LAMA2; (-) strand; PAM type: NRG; PAM sequence: GAG
gccaggttgtcagtgaagca

SEQ ID NO: 85748 - DNA, 20 bp, Artificial Sequence
  Description of Artificial Sequence: Synthetic oligonucleotide
  Target: LAMA2; (-) strand; PAM type: NRG; PAM sequence: CAG
ctgccaggttgtcagtgaag

SEQ ID NO: 85749 - DNA, 20 bp, Artificial Sequence
  Description of Artificial Sequence: Synthetic oligonucleotide
  Target: LAMA2; (-) strand; PAM type: NRG; PAM sequence: AAG
tcactgccaggttgtcagtg

SEQ ID NO: 85750 - DNA, 20 bp, Artificial Sequence
  Description of Artificial Sequence: Synthetic oligonucleotide
  Target: LAMA2; (-) strand; PAM type: NRG; PAM sequence: CAG
ccctttcactgccaggttgt

SEQ ID NO: 85751 - DNA, 20 bp, Artificial Sequence
  Description of Artificial Sequence: Synthetic oligonucleotide
  Target: LAMA2; (-) strand; PAM type: NRG; PAM sequence: AGG
ctcaaatccctttcactgcc

SEQ ID NO: 85752 - DNA, 20 bp, Artificial Sequence
  Description of Artificial Sequence: Synthetic oligonucleotide
  Target: LAMA2; (-) strand; PAM type: NRG; PAM sequence: CAG
cctcaaatccctttcactgc

SEQ ID NO: 85753 - DNA, 20 bp, Artificial Sequence
  Description of Artificial Sequence: Synthetic oligonucleotide
  Target: LAMA2; (-) strand; PAM type: NRG; PAM sequence: GGG
ttctctaattagttactgat

SEQ ID NO: 85754 - DNA, 20 bp, Artificial Sequence
  Description of Artificial Sequence: Synthetic oligonucleotide
  Target: LAMA2; (-) strand; PAM type: NRG; PAM sequence: TGG
cttctctaattagttactga

SEQ ID NO: 85755 - DNA, 20 bp, Artificial Sequence
  Description of Artificial Sequence: Synthetic oligonucleotide
  Target: LAMA2; (-) strand; PAM type: NRG; PAM sequence: TAG
ataacatttacttctctaat

SEQ ID NO: 85756 - DNA, 20 bp, Artificial Sequence
  Description of Artificial Sequence: Synthetic oligonucleotide
  Target: LAMA2; (-) strand; PAM type: NRG; PAM sequence: TAG
tgtagccacagaatactgac

SEQ ID NO: 85757 - DNA, 20 bp, Artificial Sequence
  Description of Artificial Sequence: Synthetic oligonucleotide
  Target: LAMA2; (-) strand; PAM type: NRG; PAM sequence: CAG
aacttgccacattgtagcca

SEQ ID NO: 85758 - DNA, 20 bp, Artificial Sequence
  Description of Artificial Sequence: Synthetic oligonucleotide
  Target: LAMA2; (-) strand; PAM type: NRG; PAM sequence: TAG
tattttaacttgccacattg

SEQ ID NO: 85759 - DNA, 20 bp, Artificial Sequence
  Description of Artificial Sequence: Synthetic oligonucleotide
  Target: LAMA2; (-) strand; PAM type: NRG; PAM sequence: AGG
ttgcgttagcgcccacctta

SEQ ID NO: 85760 - DNA, 20 bp, Artificial Sequence
  Description of Artificial Sequence: Synthetic oligonucleotide
  Target: LAMA2; (-) strand; PAM type: NRG; PAM sequence: AAG
attgcgttagcgcccacctt

SEQ ID NO: 85761 - DNA, 20 bp, Artificial Sequence
  Description of Artificial Sequence: Synthetic oligonucleotide
  Target: LAMA2; (-) strand; PAM type: NRG; PAM sequence: TAG
ggataccagtcatattgcgt

SEQ ID NO: 85762 - DNA, 20 bp, Artificial Sequence
  Description of Artificial Sequence: Synthetic oligonucleotide
  Target: LAMA2; (-) strand; PAM type: NRG; PAM sequence: CAG
tttttttttcataaggatac

SEQ ID NO: 85763 - DNA, 20 bp, Artificial Sequence
  Description of Artificial Sequence: Synthetic oligonucleotide
  Target: LAMA2; (-) strand; PAM type: NRG; PAM sequence: AGG
ccttttttttttttttcata

SEQ ID NO: 85764 - DNA, 20 bp, Artificial Sequence
  Description of Artificial Sequence: Synthetic oligonucleotide
  Target: LAMA2; (-) strand; PAM type: NRG; PAM sequence: AAG
tccttttttttttttttcat

SEQ ID NO: 85765 - DNA, 20 bp, Artificial Sequence
  Description of Artificial Sequence: Synthetic oligonucleotide
  Target: LAMA2; (-) strand; PAM type: NRG; PAM sequence: CGG
tcacatggtgtttaccctgt

SEQ ID NO: 85766 - DNA, 20 bp, Artificial Sequence
  Description of Artificial Sequence: Synthetic oligonucleotide
  Target: LAMA2; (-) strand; PAM type: NRG; PAM sequence: TGG
tggccatcatcatgttcaca

SEQ ID NO: 85767 - DNA, 20 bp, Artificial Sequence
  Description of Artificial Sequence: Synthetic oligonucleotide
  Target: LAMA2; (-) strand; PAM type: NRG; PAM sequence: TGG
ctctctcctttgcttgtgaa

SEQ ID NO: 85768 - DNA, 20 bp, Artificial Sequence
  Description of Artificial Sequence: Synthetic oligonucleotide
  Target: LAMA2; (-) strand; PAM type: NRG; PAM sequence: AGG
ggctaagaggaatctgttcc

SEQ ID NO: 85769 - DNA, 20 bp, Artificial Sequence
  Description of Artificial Sequence: Synthetic oligonucleotide
  Target: LAMA2; (-) strand; PAM type: NRG; PAM sequence: CAG
gggctaagaggaatctgttc

SEQ ID NO: 85770 - DNA, 20 bp, Artificial Sequence
  Description of Artificial Sequence: Synthetic oligonucleotide
  Target: LAMA2; (-) strand; PAM type: NRG; PAM sequence: AGG
agttccctttgagggctaag

SEQ ID NO: 85771 - DNA, 20 bp, Artificial Sequence
  Description of Artificial Sequence: Synthetic oligonucleotide
  Target: LAMA2; (-) strand; PAM type: NRG; PAM sequence: GAG
tagttccctttgagggctaa

SEQ ID NO: 85772 - DNA, 20 bp, Artificial Sequence
  Description of Artificial Sequence: Synthetic oligonucleotide
  Target: LAMA2; (-) strand; PAM type: NRG; PAM sequence: AAG
gttagttccctttgagggct

SEQ ID NO: 85773 - DNA, 20 bp, Artificial Sequence
  Description of Artificial Sequence: Synthetic oligonucleotide
  Target: LAMA2; (-) strand; PAM type: NRG; PAM sequence: GGG
gcagggttagttccctttga

SEQ ID NO: 85774 - DNA, 20 bp, Artificial Sequence
  Description of Artificial Sequence: Synthetic oligonucleotide
  Target: LAMA2; (-) strand; PAM type: NRG; PAM sequence: AGG
ggcagggttagttccctttg

SEQ ID NO: 85775 - DNA, 20 bp, Artificial Sequence
  Description of Artificial Sequence: Synthetic oligonucleotide
  Target: LAMA2; (-) strand; PAM type: NRG; PAM sequence: GAG
cggcagggttagttcccttt

SEQ ID NO: 85776 - DNA, 20 bp, Artificial Sequence
  Description of Artificial Sequence: Synthetic oligonucleotide
  Target: LAMA2; (-) strand; PAM type: NRG; PAM sequence: TAG
aatcaaggtatcggcagggt

SEQ ID NO: 85777 - DNA, 20 bp, Artificial Sequence
  Description of Artificial Sequence: Synthetic oligonucleotide
  Target: LAMA2; (-) strand; PAM type: NRG; PAM sequence: GGG
ctgaaatcaaggtatcggca

SEQ ID NO: 85778 - DNA, 20 bp, Artificial Sequence
  Description of Artificial Sequence: Synthetic oligonucleotide
  Target: LAMA2; (-) strand; PAM type: NRG; PAM sequence: AGG
tctgaaatcaaggtatcggc

SEQ ID NO: 85779 - DNA, 20 bp, Artificial Sequence
  Description of Artificial Sequence: Synthetic oligonucleotide
  Target: LAMA2; (-) strand; PAM type: NRG; PAM sequence: CAG
gtctgaaatcaaggtatcgg

SEQ ID NO: 85780 - DNA, 20 bp, Artificial Sequence
  Description of Artificial Sequence: Synthetic oligonucleotide
  Target: LAMA2; (-) strand; PAM type: NRG; PAM sequence: CGG
caagtctgaaatcaaggtat

SEQ ID NO: 85781 - DNA, 20 bp, Artificial Sequence
  Description of Artificial Sequence: Synthetic oligonucleotide
  Target: LAMA2; (-) strand; PAM type: NRG; PAM sequence: AGG
aggctacaagtctgaaatca

SEQ ID NO: 85782 - DNA, 20 bp, Artificial Sequence
  Description of Artificial Sequence: Synthetic oligonucleotide
  Target: LAMA2; (-) strand; PAM type: NRG; PAM sequence: AAG
gaggctacaagtctgaaatc

SEQ ID NO: 85783 - DNA, 20 bp, Artificial Sequence
  Description of Artificial Sequence: Synthetic oligonucleotide
  Target: LAMA2; (-) strand; PAM type: NRG; PAM sequence: AAG
ttcacagttctagaggctac

SEQ ID NO: 85784 - DNA, 20 bp, Artificial Sequence
  Description of Artificial Sequence: Synthetic oligonucleotide
  Target: LAMA2; (-) strand; PAM type: NRG; PAM sequence: AGG
gtattgtttcacagttctag

SEQ ID NO: 85785 - DNA, 20 bp, Artificial Sequence
  Description of Artificial Sequence: Synthetic oligonucleotide
  Target: LAMA2; (-) strand; PAM type: NRG; PAM sequence: GAG
tgtattgtttcacagttcta

SEQ ID NO: 85786 - DNA, 20 bp, Artificial Sequence
  Description of Artificial Sequence: Synthetic oligonucleotide
  Target: LAMA2; (-) strand; PAM type: NRG; PAM sequence: TAG
aatgtattgtttcacagttc

SEQ ID NO: 85787 - DNA, 20 bp, Artificial Sequence
  Description of Artificial Sequence: Synthetic oligonucleotide
  Target: LAMA2; (-) strand; PAM type: NRG; PAM sequence: CAG
aacagaaatgtattgtttca

SEQ ID NO: 85788 - DNA, 20 bp, Artificial Sequence
  Description of Artificial Sequence: Synthetic oligonucleotide
  Target: LAMA2; (-) strand; PAM type: NRG; PAM sequence: CAG
agactgggtggcttatacaa

SEQ ID NO: 85789 - DNA, 20 bp, Artificial Sequence
  Description of Artificial Sequence: Synthetic oligonucleotide
  Target: LAMA2; (-) strand; PAM type: NRG; PAM sequence: TGG
ataaaataccatagactggg

SEQ ID NO: 85790 - DNA, 20 bp, Artificial Sequence
  Description of Artificial Sequence: Synthetic oligonucleotide
  Target: LAMA2; (-) strand; PAM type: NRG; PAM sequence: GGG
ataataaaataccatagact

SEQ ID NO: 85791 - DNA, 20 bp, Artificial Sequence
  Description of Artificial Sequence: Synthetic oligonucleotide
  Target: LAMA2; (-) strand; PAM type: NRG; PAM sequence: TGG
cataataaaataccatagac

SEQ ID NO: 85792 - DNA, 20 bp, Artificial Sequence
  Description of Artificial Sequence: Synthetic oligonucleotide
  Target: LAMA2; (-) strand; PAM type: NRG; PAM sequence: TAG
gctgccataataaaatacca

SEQ ID NO: 85793 - DNA, 20 bp, Artificial Sequence
  Description of Artificial Sequence: Synthetic oligonucleotide
  Target: LAMA2; (-) strand; PAM type: NRG; PAM sequence: GGG
tgatttgtattggtttgcta

SEQ ID NO: 85794 - DNA, 20 bp, Artificial Sequence
  Description of Artificial Sequence: Synthetic oligonucleotide
  Target: LAMA2; (-) strand; PAM type: NRG; PAM sequence: AGG
atgatttgtattggtttgct

SEQ ID NO: 85795 - DNA, 20 bp, Artificial Sequence
  Description of Artificial Sequence: Synthetic oligonucleotide
  Target: LAMA2; (-) strand; PAM type: NRG; PAM sequence: TAG
tatgatttgtattggtttgc

SEQ ID NO: 85796 - DNA, 20 bp, Artificial Sequence
  Description of Artificial Sequence: Synthetic oligonucleotide
  Target: LAMA2; (-) strand; PAM type: NRG; PAM sequence: TGG
tgatgttttatgatttgtat

SEQ ID NO: 85797 - DNA, 20 bp, Artificial Sequence
  Description of Artificial Sequence: Synthetic oligonucleotide
  Target: LAMA2; (-) strand; PAM type: NRG; PAM sequence: GAG
ataacaagaatgaaaattat

SEQ ID NO: 85798 - DNA, 20 bp, Artificial Sequence
  Description of Artificial Sequence: Synthetic oligonucleotide
  Target: LAMA2; (-) strand; PAM type: NRG; PAM sequence: AAG
ttgttttatatatatataac

SEQ ID NO: 85799 - DNA, 20 bp, Artificial Sequence
  Description of Artificial Sequence: Synthetic oligonucleotide
  Target: LAMA2; (-) strand; PAM type: NRG; PAM sequence: GAG
acttctttatacattagaga

SEQ ID NO: 85800 - DNA, 20 bp, Artificial Sequence
  Description of Artificial Sequence: Synthetic oligonucleotide
  Target: LAMA2; (-) strand; PAM type: NRG; PAM sequence: GAG
taacttctttatacattaga

SEQ ID NO: 85801 - DNA, 20 bp, Artificial Sequence
  Description of Artificial Sequence: Synthetic oligonucleotide
  Target: LAMA2; (-) strand; PAM type: NRG; PAM sequence: GAG
tttaacttctttatacatta

SEQ ID NO: 85802 - DNA, 20 bp, Artificial Sequence
  Description of Artificial Sequence: Synthetic oligonucleotide
  Target: LAMA2; (-) strand; PAM type: NRG; PAM sequence: TAG
tctttaacttctttatacat

SEQ ID NO: 85803 - DNA, 20 bp, Artificial Sequence
  Description of Artificial Sequence: Synthetic oligonucleotide
  Target: LAMA2; (-) strand; PAM type: NRG; PAM sequence: TGG
attcatttctgttggactgc

SEQ ID NO: 85804 - DNA, 20 bp, Artificial Sequence
  Description of Artificial Sequence: Synthetic oligonucleotide
  Target: LAMA2; (-) strand; PAM type: NRG; PAM sequence: TGG
aactgctcattcatttctgt

SEQ ID NO: 85805 - DNA, 20 bp, Artificial Sequence
  Description of Artificial Sequence: Synthetic oligonucleotide
  Target: LAMA2; (-) strand; PAM type: NRG; PAM sequence: GAG
gtaccgtttcatacatttaa

SEQ ID NO: 85806 - DNA, 20 bp, Artificial Sequence
  Description of Artificial Sequence: Synthetic oligonucleotide
  Target: LAMA2; (-) strand; PAM type: NRG; PAM sequence: AAG
gagtaccgtttcatacattt

SEQ ID NO: 85807 - DNA, 20 bp, Artificial Sequence
  Description of Artificial Sequence: Synthetic oligonucleotide
  Target: LAMA2; (-) strand; PAM type: NRG; PAM sequence: GAG
agcatactatgagtcgggtt

SEQ ID NO: 85808 - DNA, 20 bp, Artificial Sequence
  Description of Artificial Sequence: Synthetic oligonucleotide
  Target: LAMA2; (-) strand; PAM type: NRG; PAM sequence: GGG
tagttagcatactatgagtc

SEQ ID NO: 85809 - DNA, 20 bp, Artificial Sequence
  Description of Artificial Sequence: Synthetic oligonucleotide
  Target: LAMA2; (-) strand; PAM type: NRG; PAM sequence: CGG
gtagttagcatactatgagt

SEQ ID NO: 85810 - DNA, 20 bp, Artificial Sequence
  Description of Artificial Sequence: Synthetic oligonucleotide
  Target: LAMA2; (-) strand; PAM type: NRG; PAM sequence: GAG
cagtgtagttagcatactat

SEQ ID NO: 85811 - DNA, 20 bp, Artificial Sequence
  Description of Artificial Sequence: Synthetic oligonucleotide
  Target: LAMA2; (-) strand; PAM type: NRG; PAM sequence: TAG
caatgatttctcagtgtagt

SEQ ID NO: 85812 - DNA, 20 bp, Artificial Sequence
  Description of Artificial Sequence: Synthetic oligonucleotide
  Target: LAMA2; (-) strand; PAM type: NRG; PAM sequence: TAG
aagacaatgatttctcagtg

SEQ ID NO: 85813 - DNA, 20 bp, Artificial Sequence
  Description of Artificial Sequence: Synthetic oligonucleotide
  Target: LAMA2; (-) strand; PAM type: NRG; PAM sequence: CAG
gttagaagacaatgatttct

SEQ ID NO: 85814 - DNA, 20 bp, Artificial Sequence
  Description of Artificial Sequence: Synthetic oligonucleotide
  Target: LAMA2; (-) strand; PAM type: NRG; PAM sequence: AAG
ttgactttcctatatgttag

SEQ ID NO: 85815 - DNA, 20 bp, Artificial Sequence
  Description of Artificial Sequence: Synthetic oligonucleotide
  Target: LAMA2; (-) strand; PAM type: NRG; PAM sequence: TAG
tggttgactttcctatatgt

SEQ ID NO: 85816 - DNA, 20 bp, Artificial Sequence
  Description of Artificial Sequence: Synthetic oligonucleotide
  Target: LAMA2; (-) strand; PAM type: NRG; PAM sequence: TGG
aatggcatgtgttattcatt

SEQ ID NO: 85817 - DNA, 20 bp, Artificial Sequence
  Description of Artificial Sequence: Synthetic oligonucleotide
  Target: LAMA2; (-) strand; PAM type: NRG; PAM sequence: TGG
tcctgaagaagccacaggaa

SEQ ID NO: 85818 - DNA, 20 bp, Artificial Sequence
  Description of Artificial Sequence: Synthetic oligonucleotide
  Target: LAMA2; (-) strand; PAM type: NRG; PAM sequence: AGG
tttgttcctgaagaagccac

SEQ ID NO: 85819 - DNA, 20 bp, Artificial Sequence
  Description of Artificial Sequence: Synthetic oligonucleotide
  Target: LAMA2; (-) strand; PAM type: NRG; PAM sequence: CAG
ctttgttcctgaagaagcca

SEQ ID NO: 85820 - DNA, 20 bp, Artificial Sequence
  Description of Artificial Sequence: Synthetic oligonucleotide
  Target: LAMA2; (-) strand; PAM type: NRG; PAM sequence: AAG
gaggacctttgttcctgaag

SEQ ID NO: 85821 - DNA, 20 bp, Artificial Sequence
  Description of Artificial Sequence: Synthetic oligonucleotide
  Target: LAMA2; (-) strand; PAM type: NRG; PAM sequence: AAG
taggaggacctttgttcctg

SEQ ID NO: 85822 - DNA, 20 bp, Artificial Sequence
  Description of Artificial Sequence: Synthetic oligonucleotide
  Target: LAMA2; (-) strand; PAM type: NRG; PAM sequence: AGG
attcacactaccaatttagg

SEQ ID NO: 85823 - DNA, 20 bp, Artificial Sequence
  Description of Artificial Sequence: Synthetic oligonucleotide
  Target: LAMA2; (-) strand; PAM type: NRG; PAM sequence: GAG
tattcacactaccaatttag

SEQ ID NO: 85824 - DNA, 20 bp, Artificial Sequence
  Description of Artificial Sequence: Synthetic oligonucleotide
  Target: LAMA2; (-) strand; PAM type: NRG; PAM sequence: AGG
tatattcacactaccaattt

SEQ ID NO: 85825 - DNA, 20 bp, Artificial Sequence
  Description of Artificial Sequence: Synthetic oligonucleotide
  Target: LAMA2; (-) strand; PAM type: NRG; PAM sequence: TAG
gtatattcacactaccaatt

SEQ ID NO: 85826 - DNA, 20 bp, Artificial Sequence
  Description of Artificial Sequence: Synthetic oligonucleotide
  Target: LAMA2; (-) strand; PAM type: NRG; PAM sequence: TGG
ataactttggattttttttt

SEQ ID NO: 85827 - DNA, 20 bp, Artificial Sequence
  Description of Artificial Sequence: Synthetic oligonucleotide
  Target: LAMA2; (-) strand; PAM type: NRG; PAM sequence: TGG
accctgcccagctataactt

SEQ ID NO: 85828 - DNA, 20 bp, Artificial Sequence
  Description of Artificial Sequence: Synthetic oligonucleotide
  Target: LAMA2; (-) strand; PAM type: NRG; PAM sequence: CAG
caggcatgagccaccctgcc

SEQ ID NO: 85829 - DNA, 20 bp, Artificial Sequence
  Description of Artificial Sequence: Synthetic oligonucleotide
  Target: LAMA2; (-) strand; PAM type: NRG; PAM sequence: GAG
agtgctgggattacaggcat

SEQ ID NO: 85830 - DNA, 20 bp, Artificial Sequence
  Description of Artificial Sequence: Synthetic oligonucleotide
  Target: LAMA2; (-) strand; PAM type: NRG; PAM sequence: AGG
tcccaaagtgctgggattac

SEQ ID NO: 85831 - DNA, 20 bp, Artificial Sequence
  Description of Artificial Sequence: Synthetic oligonucleotide
  Target: LAMA2; (-) strand; PAM type: NRG; PAM sequence: CAG
ctcccaaagtgctgggatta

SEQ ID NO: 85832 - DNA, 20 bp, Artificial Sequence
  Description of Artificial Sequence: Synthetic oligonucleotide
  Target: LAMA2; (-) strand; PAM type: NRG; PAM sequence: GGG
cctcagcctcccaaagtgct

SEQ ID NO: 85833 - DNA, 20 bp, Artificial Sequence
  Description of Artificial Sequence: Synthetic oligonucleotide
  Target: LAMA2; (-) strand; PAM type: NRG; PAM sequence: TGG
gcctcagcctcccaaagtgc

SEQ ID NO: 85834 - DNA, 20 bp, Artificial Sequence
  Description of Artificial Sequence: Synthetic oligonucleotide
  Target: LAMA2; (-) strand; PAM type: NRG; PAM sequence: AAG
ccatctgcctcagcctccca

SEQ ID NO: 85835 - DNA, 20 bp, Artificial Sequence
  Description of Artificial Sequence: Synthetic oligonucleotide
  Target: LAMA2; (-) strand; PAM type: NRG; PAM sequence: CAG
acgtcgtgatccatctgcct

SEQ ID NO: 85836 - DNA, 20 bp, Artificial Sequence
  Description of Artificial Sequence: Synthetic oligonucleotide
  Target: LAMA2; (-) strand; PAM type: NRG; PAM sequence: TGG
tttcaccatgttaaccagga

SEQ ID NO: 85837 - DNA, 20 bp, Artificial Sequence
  Description of Artificial Sequence: Synthetic oligonucleotide
  Target: LAMA2; (-) strand; PAM type: NRG; PAM sequence: AGG
ggggtttcaccatgttaacc

SEQ ID NO: 85838 - DNA, 20 bp, Artificial Sequence
  Description of Artificial Sequence: Synthetic oligonucleotide
  Target: LAMA2; (-) strand; PAM type: NRG; PAM sequence: CAG
cggggtttcaccatgttaac

SEQ ID NO: 85839 - DNA, 20 bp, Artificial Sequence
  Description of Artificial Sequence: Synthetic oligonucleotide
  Target: LAMA2; (-) strand; PAM type: NRG; PAM sequence: GGG
tattttttttagtagagacg

SEQ ID NO: 85840 - DNA, 20 bp, Artificial Sequence
  Description of Artificial Sequence: Synthetic oligonucleotide
  Target: LAMA2; (-) strand; PAM type: NRG; PAM sequence: GGG
gtattttttttagtagagac

SEQ ID NO: 85841 - DNA, 20 bp, Artificial Sequence
  Description of Artificial Sequence: Synthetic oligonucleotide
  Target: LAMA2; (-) strand; PAM type: NRG; PAM sequence: CGG
tgtattttttttagtagaga

SEQ ID NO: 85842 - DNA, 20 bp, Artificial Sequence
  Description of Artificial Sequence: Synthetic oligonucleotide
  Target: LAMA2; (-) strand; PAM type: NRG; PAM sequence: GAG
tttttgtattttttttagta

SEQ ID NO: 85843 - DNA, 20 bp, Artificial Sequence
  Description of Artificial Sequence: Synthetic oligonucleotide
  Target: LAMA2; (-) strand; PAM type: NRG; PAM sequence: TAG
attttttgtattttttttag

SEQ ID NO: 85844 - DNA, 20 bp, Artificial Sequence
  Description of Artificial Sequence: Synthetic oligonucleotide
  Target: LAMA2; (-) strand; PAM type: NRG; PAM sequence: TAG
ctaattttttgtattttttt

SEQ ID NO: 85845 - DNA, 20 bp, Artificial Sequence
  Description of Artificial Sequence: Synthetic oligonucleotide
  Target: LAMA2; (-) strand; PAM type: NRG; PAM sequence: CAG
caggcgtgtgccactaggtc

SEQ ID NO: 85846 - DNA, 20 bp, Artificial Sequence
  Description of Artificial Sequence: Synthetic oligonucleotide
  Target: LAMA2; (-) strand; PAM type: NRG; PAM sequence: AGG
gactacaggcgtgtgccact

SEQ ID NO: 85847 - DNA, 20 bp, Artificial Sequence
  Description of Artificial Sequence: Synthetic oligonucleotide
  Target: LAMA2; (-) strand; PAM type: NRG; PAM sequence: TAG
ggactacaggcgtgtgccac

SEQ ID NO: 85848 - DNA, 20 bp, Artificial Sequence
  Description of Artificial Sequence: Synthetic oligonucleotide
  Target: LAMA2; (-) strand; PAM type: NRG; PAM sequence: AGG
tctcaagtagctgggactac

SEQ ID NO: 85849 - DNA, 20 bp, Artificial Sequence
  Description of Artificial Sequence: Synthetic oligonucleotide
  Target: LAMA2; (-) strand; PAM type: NRG; PAM sequence: CAG
ctctcaagtagctgggacta

SEQ ID NO: 85850 - DNA, 20 bp, Artificial Sequence
  Description of Artificial Sequence: Synthetic oligonucleotide
  Target: LAMA2; (-) strand; PAM type: NRG; PAM sequence: GGG
cctcagcctctcaagtagct

SEQ ID NO: 85851 - DNA, 20 bp, Artificial Sequence
  Description of Artificial Sequence: Synthetic oligonucleotide
  Target: LAMA2; (-) strand; PAM type: NRG; PAM sequence: TGG
gcctcagcctctcaagtagc

SEQ ID NO: 85852 - DNA, 20 bp, Artificial Sequence
  Description of Artificial Sequence: Synthetic oligonucleotide
  Target: LAMA2; (-) strand; PAM type: NRG; PAM sequence: TAG
tcctgcctcagcctctcaag

SEQ ID NO: 85853 - DNA, 20 bp, Artificial Sequence
  Description of Artificial Sequence: Synthetic oligonucleotide
  Target: LAMA2; (-) strand; PAM type: NRG; PAM sequence: AAG
ttctcctgcctcagcctctc

SEQ ID NO: 85854 - DNA, 20 bp, Artificial Sequence
  Description of Artificial Sequence: Synthetic oligonucleotide
  Target: LAMA2; (-) strand; PAM type: NRG; PAM sequence: CAG
ttcaagcgattctcctgcct

SEQ ID NO: 85855 - DNA, 20 bp, Artificial Sequence
  Description of Artificial Sequence: Synthetic oligonucleotide
  Target: LAMA2; (-) strand; PAM type: NRG; PAM sequence: AAG
aacctctgcctcctggattc

SEQ ID NO: 85856 - DNA, 20 bp, Artificial Sequence
  Description of Artificial Sequence: Synthetic oligonucleotide
  Target: LAMA2; (-) strand; PAM type: NRG; PAM sequence: TGG
tcactgcaacctctgcctcc

SEQ ID NO: 85857 - DNA, 20 bp, Artificial Sequence
  Description of Artificial Sequence: Synthetic oligonucleotide
  Target: LAMA2; (-) strand; PAM type: NRG; PAM sequence: TGG
tcacccaggctggagtgtag

SEQ ID NO: 85858 - DNA, 20 bp, Artificial Sequence
  Description of Artificial Sequence: Synthetic oligonucleotide
  Target: LAMA2; (-) strand; PAM type: NRG; PAM sequence: TAG
ctgtcacccaggctggagtg

SEQ ID NO: 85859 - DNA, 20 bp, Artificial Sequence
  Description of Artificial Sequence: Synthetic oligonucleotide
  Target: LAMA2; (-) strand; PAM type: NRG; PAM sequence: GAG
ttgctctgtcacccaggctg

SEQ ID NO: 85860 - DNA, 20 bp, Artificial Sequence
  Description of Artificial Sequence: Synthetic oligonucleotide
  Target: LAMA2; (-) strand; PAM type: NRG; PAM sequence: TGG
ccttgctctgtcacccaggc

SEQ ID NO: 85861 - DNA, 20 bp, Artificial Sequence
  Description of Artificial Sequence: Synthetic oligonucleotide
  Target: LAMA2; (-) strand; PAM type: NRG; PAM sequence: AGG
aatcccttgctctgtcaccc

SEQ ID NO: 85862 - DNA, 20 bp, Artificial Sequence
  Description of Artificial Sequence: Synthetic oligonucleotide
  Target: LAMA2; (-) strand; PAM type: NRG; PAM sequence: CAG
gaatcccttgctctgtcacc

SEQ ID NO: 85863 - DNA, 20 bp, Artificial Sequence
  Description of Artificial Sequence: Synthetic oligonucleotide
  Target: LAMA2; (-) strand; PAM type: NRG; PAM sequence: TGG
tttttcttttttttttgaga

SEQ ID NO: 85864 - DNA, 20 bp, Artificial Sequence
  Description of Artificial Sequence: Synthetic oligonucleotide
  Target: LAMA2; (-) strand; PAM type: NRG; PAM sequence: GAG
ttcttttttctttttttttt

SEQ ID NO: 85865 - DNA, 20 bp, Artificial Sequence
  Description of Artificial Sequence: Synthetic oligonucleotide
  Target: LAMA2; (-) strand; PAM type: NRG; PAM sequence: TGG
agactgtgcatttataactt

SEQ ID NO: 85866 - DNA, 20 bp, Artificial Sequence
  Description of Artificial Sequence: Synthetic oligonucleotide
  Target: LAMA2; (-) strand; PAM type: NRG; PAM sequence: AAG
ttcccagaagagaagtatgt

SEQ ID NO: 85867 - DNA, 20 bp, Artificial Sequence
  Description of Artificial Sequence: Synthetic oligonucleotide
  Target: LAMA2; (-) strand; PAM type: NRG; PAM sequence: AAG
agaataaattcccagaagag

SEQ ID NO: 85868 - DNA, 20 bp, Artificial Sequence
  Description of Artificial Sequence: Synthetic oligonucleotide
  Target: LAMA2; (-) strand; PAM type: NRG; PAM sequence: GAG
tacagaataaattcccagaa

SEQ ID NO: 85869 - DNA, 20 bp, Artificial Sequence
  Description of Artificial Sequence: Synthetic oligonucleotide
  Target: LAMA2; (-) strand; PAM type: NRG; PAM sequence: AAG
cttacagaataaattcccag

SEQ ID NO: 85870 - DNA, 20 bp, Artificial Sequence
  Description of Artificial Sequence: Synthetic oligonucleotide
  Target: LAMA2; (-) strand; PAM type: NRG; PAM sequence: CAG
atacttacagaataaattcc

SEQ ID NO: 85871 - DNA, 20 bp, Artificial Sequence
  Description of Artificial Sequence: Synthetic oligonucleotide
  Target: LAMA2; (-) strand; PAM type: NRG; PAM sequence: CAG
tatatatatatatatactta

SEQ ID NO: 85872 - DNA, 20 bp, Artificial Sequence
  Description of Artificial Sequence: Synthetic oligonucleotide
  Target: LAMA2; (-) strand; PAM type: NRG; PAM sequence: TGG
gtgacaattacaaacatttc

SEQ ID NO: 85873 - DNA, 20 bp, Artificial Sequence
  Description of Artificial Sequence: Synthetic oligonucleotide
  Target: LAMA2; (-) strand; PAM type: NRG; PAM sequence: TGG
ctcagtgattggcagctttg

SEQ ID NO: 85874 - DNA, 20 bp, Artificial Sequence
  Description of Artificial Sequence: Synthetic oligonucleotide
  Target: LAMA2; (-) strand; PAM type: NRG; PAM sequence: CAG
atcagtctctcagtgattgg

SEQ ID NO: 85875 - DNA, 20 bp, Artificial Sequence
  Description of Artificial Sequence: Synthetic oligonucleotide
  Target: LAMA2; (-) strand; PAM type: NRG; PAM sequence: TGG
ttaatcagtctctcagtgat

SEQ ID NO: 85876 - DNA, 20 bp, Artificial Sequence
  Description of Artificial Sequence: Synthetic oligonucleotide
  Target: LAMA2; (-) strand; PAM type: NRG; PAM sequence: CAG
aactcatttaatcagtctct

SEQ ID NO: 85877 - DNA, 20 bp, Artificial Sequence
  Description of Artificial Sequence: Synthetic oligonucleotide
  Target: LAMA2; (-) strand; PAM type: NRG; PAM sequence: CAG
tgtaccaaaactcatttaat

SEQ ID NO: 85878 - DNA, 20 bp, Artificial Sequence
  Description of Artificial Sequence: Synthetic oligonucleotide
  Target: LAMA2; (-) strand; PAM type: NRG; PAM sequence: GAG
tttatagtgtttgatggcac

SEQ ID NO: 85879 - DNA, 20 bp, Artificial Sequence
  Description of Artificial Sequence: Synthetic oligonucleotide
  Target: LAMA2; (-) strand; PAM type: NRG; PAM sequence: TGG
aataattttatagtgtttga

SEQ ID NO: 85880 - DNA, 20 bp, Artificial Sequence
  Description of Artificial Sequence: Synthetic oligonucleotide
  Target: LAMA2; (-) strand; PAM type: NRG; PAM sequence: TAG
ttccttttttaataatttta

SEQ ID NO: 85881 - DNA, 20 bp, Artificial Sequence
  Description of Artificial Sequence: Synthetic oligonucleotide
  Target: LAMA2; (-) strand; PAM type: NRG; PAM sequence: TGG
aatttatttaaaatacacct

SEQ ID NO: 85882 - DNA, 20 bp, Artificial Sequence
  Description of Artificial Sequence: Synthetic oligonucleotide
  Target: LAMA2; (-) strand; PAM type: NRG; PAM sequence: AAG
gccagtgcacctggcctcct

SEQ ID NO: 85883 - DNA, 20 bp, Artificial Sequence
  Description of Artificial Sequence: Synthetic oligonucleotide
  Target: LAMA2; (-) strand; PAM type: NRG; PAM sequence: TGG
caggcgtgagccagtgcacc

SEQ ID NO: 85884 - DNA, 20 bp, Artificial Sequence
  Description of Artificial Sequence: Synthetic oligonucleotide
  Target: LAMA2; (-) strand; PAM type: NRG; PAM sequence: CAG
ttgggattacaggcgtgagc

SEQ ID NO: 85885 - DNA, 20 bp, Artificial Sequence
  Description of Artificial Sequence: Synthetic oligonucleotide
  Target: LAMA2; (-) strand; PAM type: NRG; PAM sequence: GAG
agtgttgggattacaggcgt

SEQ ID NO: 85886 - DNA, 20 bp, Artificial Sequence
  Description of Artificial Sequence: Synthetic oligonucleotide
  Target: LAMA2; (-) strand; PAM type: NRG; PAM sequence: AGG
accaaaagtgttgggattac

SEQ ID NO: 85887 - DNA, 20 bp, Artificial Sequence
  Description of Artificial Sequence: Synthetic oligonucleotide
  Target: LAMA2; (-) strand; PAM type: NRG; PAM sequence: CAG
caccaaaagtgttgggatta

SEQ ID NO: 85888 - DNA, 20 bp, Artificial Sequence
  Description of Artificial Sequence: Synthetic oligonucleotide
  Target: LAMA2; (-) strand; PAM type: NRG; PAM sequence: GGG
tctcaaccaccaaaagtgtt

SEQ ID NO: 85889 - DNA, 20 bp, Artificial Sequence
  Description of Artificial Sequence: Synthetic oligonucleotide
  Target: LAMA2; (-) strand; PAM type: NRG; PAM sequence: TGG
gtctcaaccaccaaaagtgt

SEQ ID NO: 85890 - DNA, 20 bp, Artificial Sequence
  Description of Artificial Sequence: Synthetic oligonucleotide
  Target: LAMA2; (-) strand; PAM type: NRG; PAM sequence: AAG
ctgcctgtctcaaccaccaa

SEQ ID NO: 85891 - DNA, 20 bp, Artificial Sequence
  Description of Artificial Sequence: Synthetic oligonucleotide
  Target: LAMA2; (-) strand; PAM type: NRG; PAM sequence: CAG
ggtcttgaactcctggtctc

SEQ ID NO: 85892 - DNA, 20 bp, Artificial Sequence
  Description of Artificial Sequence: Synthetic oligonucleotide
  Target: LAMA2; (-) strand; PAM type: NRG; PAM sequence: TGG
ccaggctggtcttgaactcc

SEQ ID NO: 85893 - DNA, 20 bp, Artificial Sequence
  Description of Artificial Sequence: Synthetic oligonucleotide
  Target: LAMA2; (-) strand; PAM type: NRG; PAM sequence: TGG
tttcaccatgttggccaggc

SEQ ID NO: 85894 - DNA, 20 bp, Artificial Sequence
  Description of Artificial Sequence: Synthetic oligonucleotide
  Target: LAMA2; (-) strand; PAM type: NRG; PAM sequence: AGG
ggggtttcaccatgttggcc

SEQ ID NO: 85895 - DNA, 20 bp, Artificial Sequence
  Description of Artificial Sequence: Synthetic oligonucleotide
  Target: LAMA2; (-) strand; PAM type: NRG; PAM sequence: CAG
tggggtttcaccatgttggc

SEQ ID NO: 85896 - DNA, 20 bp, Artificial Sequence
  Description of Artificial Sequence: Synthetic oligonucleotide
  Target: LAMA2; (-) strand; PAM type: NRG; PAM sequence: TGG
agagtggggtttcaccatgt

SEQ ID NO: 85897 - DNA, 20 bp, Artificial Sequence
  Description of Artificial Sequence: Synthetic oligonucleotide
  Target: LAMA2; (-) strand; PAM type: NRG; PAM sequence: GGG
tttgtatttttagtagagtg

SEQ ID NO: 85898 - DNA, 20 bp, Artificial Sequence
  Description of Artificial Sequence: Synthetic oligonucleotide
  Target: LAMA2; (-) strand; PAM type: NRG; PAM sequence: GGG
ttttgtatttttagtagagt

SEQ ID NO: 85899 - DNA, 20 bp, Artificial Sequence
  Description of Artificial Sequence: Synthetic oligonucleotide
  Target: LAMA2; (-) strand; PAM type: NRG; PAM sequence: TGG
tttttgtatttttagtagag

SEQ ID NO: 85900 - DNA, 20 bp, Artificial Sequence
  Description of Artificial Sequence: Synthetic oligonucleotide
  Target: LAMA2; (-) strand; PAM type: NRG; PAM sequence: GAG
taatttttgtatttttagta

SEQ ID NO: 85901 - DNA, 20 bp, Artificial Sequence
  Description of Artificial Sequence: Synthetic oligonucleotide
  Target: LAMA2; (-) strand; PAM type: NRG; PAM sequence: TAG
gctaatttttgtatttttag

SEQ ID NO: 85902 - DNA, 20 bp, Artificial Sequence
  Description of Artificial Sequence: Synthetic oligonucleotide
  Target: LAMA2; (-) strand; PAM type: NRG; PAM sequence: TAG
cccgctaatttttgtatttt

SEQ ID NO: 85903 - DNA, 20 bp, Artificial Sequence
  Description of Artificial Sequence: Synthetic oligonucleotide
  Target: LAMA2; (-) strand; PAM type: NRG; PAM sequence: GGG
cctcagcctccctggtagtg

SEQ ID NO: 85904 - DNA, 20 bp, Artificial Sequence
  Description of Artificial Sequence: Synthetic oligonucleotide
  Target: LAMA2; (-) strand; PAM type: NRG; PAM sequence: GGG
gcctcagcctccctggtagt

SEQ ID NO: 85905 - DNA, 20 bp, Artificial Sequence
  Description of Artificial Sequence: Synthetic oligonucleotide
  Target: LAMA2; (-) strand; PAM type: NRG; PAM sequence: TGG
tgcctcagcctccctggtag

SEQ ID NO: 85906 - DNA, 20 bp, Artificial Sequence
  Description of Artificial Sequence: Synthetic oligonucleotide
  Target: LAMA2; (-) strand; PAM type: NRG; PAM sequence: TAG
tcatgcctcagcctccctgg

SEQ ID NO: 85907 - DNA, 20 bp, Artificial Sequence
  Description of Artificial Sequence: Synthetic oligonucleotide
  Target: LAMA2; (-) strand; PAM type: NRG; PAM sequence: TGG
ttctcatgcctcagcctccc

SEQ ID NO: 85908 - DNA, 20 bp, Artificial Sequence
  Description of Artificial Sequence: Synthetic oligonucleotide
  Target: LAMA2; (-) strand; PAM type: NRG; PAM sequence: CAG
ttcaggtgattctcatgcct

SEQ ID NO: 85909 - DNA, 20 bp, Artificial Sequence
  Description of Artificial Sequence: Synthetic oligonucleotide
  Target: LAMA2; (-) strand; PAM type: NRG; PAM sequence: AGG
aatctccgcctccggagttc

SEQ ID NO: 85910 - DNA, 20 bp, Artificial Sequence
  Description of Artificial Sequence: Synthetic oligonucleotide
  Target: LAMA2; (-) strand; PAM type: NRG; PAM sequence: CAG
caatctccgcctccggagtt

SEQ ID NO: 85911 - DNA, 20 bp, Artificial Sequence
  Description of Artificial Sequence: Synthetic oligonucleotide
  Target: LAMA2; (-) strand; PAM type: NRG; PAM sequence: GAG
cactgcaatctccgcctccg

SEQ ID NO: 85912 - DNA, 20 bp, Artificial Sequence
  Description of Artificial Sequence: Synthetic oligonucleotide
  Target: LAMA2; (-) strand; PAM type: NRG; PAM sequence: CGG
ctcactgcaatctccgcctc

SEQ ID NO: 85913 - DNA, 20 bp, Artificial Sequence
  Description of Artificial Sequence: Synthetic oligonucleotide
  Target: LAMA2; (-) strand; PAM type: NRG; PAM sequence: CAG
ggagtgcagtggcacaattt

SEQ ID NO: 85914 - DNA, 20 bp, Artificial Sequence
  Description of Artificial Sequence: Synthetic oligonucleotide
  Target: LAMA2; (-) strand; PAM type: NRG; PAM sequence: TGG
tcacccaggctggagtgcag

SEQ ID NO: 85915 - DNA, 20 bp, Artificial Sequence
  Description of Artificial Sequence: Synthetic oligonucleotide
  Target: LAMA2; (-) strand; PAM type: NRG; PAM sequence: CAG
ctgtcacccaggctggagtg

SEQ ID NO: 85916 - DNA, 20 bp, Artificial Sequence
  Description of Artificial Sequence: Synthetic oligonucleotide
  Target: LAMA2; (-) strand; PAM type: NRG; PAM sequence: GAG
tcagtctgtcacccaggctg

SEQ ID NO: 85917 - DNA, 20 bp, Artificial Sequence
  Description of Artificial Sequence: Synthetic oligonucleotide
  Target: LAMA2; (-) strand; PAM type: NRG; PAM sequence: TGG
tctcagtctgtcacccaggc

SEQ ID NO: 85918 - DNA, 20 bp, Artificial Sequence
  Description of Artificial Sequence: Synthetic oligonucleotide
  Target: LAMA2; (-) strand; PAM type: NRG; PAM sequence: AGG
ggagtctcagtctgtcaccc

SEQ ID NO: 85919 - DNA, 20 bp, Artificial Sequence
  Description of Artificial Sequence: Synthetic oligonucleotide
  Target: LAMA2; (-) strand; PAM type: NRG; PAM sequence: CAG
tggagtctcagtctgtcacc

SEQ ID NO: 85920 - DNA, 20 bp, Artificial Sequence
  Description of Artificial Sequence: Synthetic oligonucleotide
  Target: LAMA2; (-) strand; PAM type: NRG; PAM sequence: CAG
ttttttttgagatggagtct

SEQ ID NO: 85921 - DNA, 20 bp, Artificial Sequence
  Description of Artificial Sequence: Synthetic oligonucleotide
  Target: LAMA2; (-) strand; PAM type: NRG; PAM sequence: GAG
tttcttttttttttgagatg

SEQ ID NO: 85922 - DNA, 20 bp, Artificial Sequence
  Description of Artificial Sequence: Synthetic oligonucleotide
  Target: LAMA2; (-) strand; PAM type: NRG; PAM sequence: TGG
cctttcttttttttttgaga

SEQ ID NO: 85923 - DNA, 20 bp, Artificial Sequence
  Description of Artificial Sequence: Synthetic oligonucleotide
  Target: LAMA2; (-) strand; PAM type: NRG; PAM sequence: GAG
ttttcctttctttttttttt

SEQ ID NO: 85924 - DNA, 20 bp, Artificial Sequence
  Description of Artificial Sequence: Synthetic oligonucleotide
  Target: LAMA2; (-) strand; PAM type: NRG; PAM sequence: AGG
agataaactactttgttcct

SEQ ID NO: 85925 - DNA, 20 bp, Artificial Sequence
  Description of Artificial Sequence: Synthetic oligonucleotide
  Target: LAMA2; (-) strand; PAM type: NRG; PAM sequence: TAG
tagataaactactttgttcc

SEQ ID NO: 85926 - DNA, 20 bp, Artificial Sequence
  Description of Artificial Sequence: Synthetic oligonucleotide
  Target: LAMA2; (-) strand; PAM type: NRG; PAM sequence: TAG
agtcatacatatagattaga

SEQ ID NO: 85927 - DNA, 20 bp, Artificial Sequence
  Description of Artificial Sequence: Synthetic oligonucleotide
  Target: LAMA2; (-) strand; PAM type: NRG; PAM sequence: TAG
tagtagtcatacatatagat

SEQ ID NO: 85928 - DNA, 20 bp, Artificial Sequence
  Description of Artificial Sequence: Synthetic oligonucleotide
  Target: LAMA2; (-) strand; PAM type: NRG; PAM sequence: TAG
acaaatagtagtcatacata

SEQ ID NO: 85929 - DNA, 20 bp, Artificial Sequence
  Description of Artificial Sequence: Synthetic oligonucleotide
  Target: LAMA2; (-) strand; PAM type: NRG; PAM sequence: TAG
ccactttaaaagacaaatag

SEQ ID NO: 85930 - DNA, 20 bp, Artificial Sequence
  Description of Artificial Sequence: Synthetic oligonucleotide
  Target: LAMA2; (-) strand; PAM type: NRG; PAM sequence: TAG
tctccactttaaaagacaaa

SEQ ID NO: 85931 - DNA, 20 bp, Artificial Sequence
  Description of Artificial Sequence: Synthetic oligonucleotide
  Target: LAMA2; (-) strand; PAM type: NRG; PAM sequence: AAG
tattcgtttctccactttaa

SEQ ID NO: 85932 - DNA, 20 bp, Artificial Sequence
  Description of Artificial Sequence: Synthetic oligonucleotide
  Target: LAMA2; (-) strand; PAM type: NRG; PAM sequence: AGG
taagtcaccttataattaca

SEQ ID NO: 85933 - DNA, 20 bp, Artificial Sequence
  Description of Artificial Sequence: Synthetic oligonucleotide
  Target: LAMA2; (-) strand; PAM type: NRG; PAM sequence: AAG
ctaagtcaccttataattac

SEQ ID NO: 85934 - DNA, 20 bp, Artificial Sequence
  Description of Artificial Sequence: Synthetic oligonucleotide
  Target: LAMA2; (-) strand; PAM type: NRG; PAM sequence: AAG
agatgtgactctaaatagct

SEQ ID NO: 85935 - DNA, 20 bp, Artificial Sequence
  Description of Artificial Sequence: Synthetic oligonucleotide
  Target: LAMA2; (-) strand; PAM type: NRG; PAM sequence: TAG
atgctagatgtgactctaaa

SEQ ID NO: 85936 - DNA, 20 bp, Artificial Sequence
  Description of Artificial Sequence: Synthetic oligonucleotide
  Target: LAMA2; (-) strand; PAM type: NRG; PAM sequence: TAG
actcaccttgatgcaaatgc

SEQ ID NO: 85937 - DNA, 20 bp, Artificial Sequence
  Description of Artificial Sequence: Synthetic oligonucleotide
  Target: LAMA2; (-) strand; PAM type: NRG; PAM sequence: GAG
ggcactagaacagagctttt

SEQ ID NO: 85938 - DNA, 20 bp, Artificial Sequence
  Description of Artificial Sequence: Synthetic oligonucleotide
  Target: LAMA2; (-) strand; PAM type: NRG; PAM sequence: GAG
ttgagtggggcactagaaca

SEQ ID NO: 85939 - DNA, 20 bp, Artificial Sequence
  Description of Artificial Sequence: Synthetic oligonucleotide
  Target: LAMA2; (-) strand; PAM type: NRG; PAM sequence: CAG
tcttgagtggggcactagaa

SEQ ID NO: 85940 - DNA, 20 bp, Artificial Sequence
  Description of Artificial Sequence: Synthetic oligonucleotide
  Target: LAMA2; (-) strand; PAM type: NRG; PAM sequence: TAG
tctgttcttgagtggggcac

SEQ ID NO: 85941 - DNA, 20 bp, Artificial Sequence
  Description of Artificial Sequence: Synthetic oligonucleotide
  Target: LAMA2; (-) strand; PAM type: NRG; PAM sequence: GGG
acaatatctgttcttgagtg

SEQ ID NO: 85942 - DNA, 20 bp, Artificial Sequence
  Description of Artificial Sequence: Synthetic oligonucleotide
  Target: LAMA2; (-) strand; PAM type: NRG; PAM sequence: GGG
gacaatatctgttcttgagt

SEQ ID NO: 85943 - DNA, 20 bp, Artificial Sequence
  Description of Artificial Sequence: Synthetic oligonucleotide
  Target: LAMA2; (-) strand; PAM type: NRG; PAM sequence: TGG
tgacaatatctgttcttgag

SEQ ID NO: 85944 - DNA, 20 bp, Artificial Sequence
  Description of Artificial Sequence: Synthetic oligonucleotide
  Target: LAMA2; (-) strand; PAM type: NRG; PAM sequence: GAG
atttgacaatatctgttctt

SEQ ID NO: 85945 - DNA, 20 bp, Artificial Sequence
  Description of Artificial Sequence: Synthetic oligonucleotide
  Target: LAMA2; (-) strand; PAM type: NRG; PAM sequence: CAG
aataaaaatcaagtctattc

SEQ ID NO: 85946 - DNA, 20 bp, Artificial Sequence
  Description of Artificial Sequence: Synthetic oligonucleotide
  Target: LAMA2; (-) strand; PAM type: NRG; PAM sequence: AAG
ttaaatcagcaataaaaatc

SEQ ID NO: 85947 - DNA, 20 bp, Artificial Sequence
  Description of Artificial Sequence: Synthetic oligonucleotide
  Target: LAMA2; (-) strand; PAM type: NRG; PAM sequence: CAG
tagtttgtaatagattaaat

SEQ ID NO: 85948 - DNA, 20 bp, Artificial Sequence
  Description of Artificial Sequence: Synthetic oligonucleotide
  Target: LAMA2; (-) strand; PAM type: NRG; PAM sequence: TAG
agaaaagcaatagtttgtaa

SEQ ID NO: 85949 - DNA, 20 bp, Artificial Sequence
  Description of Artificial Sequence: Synthetic oligonucleotide
  Target: LAMA2; (-) strand; PAM type: NRG; PAM sequence: TAG
agcttagaatagaaaagcaa

SEQ ID NO: 85950 - DNA, 20 bp, Artificial Sequence
  Description of Artificial Sequence: Synthetic oligonucleotide
  Target: LAMA2; (-) strand; PAM type: NRG; PAM sequence: AAG
tacaacagcttagaatagaa

SEQ ID NO: 85951 - DNA, 20 bp, Artificial Sequence
  Description of Artificial Sequence: Synthetic oligonucleotide
  Target: LAMA2; (-) strand; PAM type: NRG; PAM sequence: TAG
atttttacaacagcttagaa

SEQ ID NO: 85952 - DNA, 20 bp, Artificial Sequence
  Description of Artificial Sequence: Synthetic oligonucleotide
  Target: LAMA2; (-) strand; PAM type: NRG; PAM sequence: TAG
caataatttttacaacagct

SEQ ID NO: 85953 - DNA, 20 bp, Artificial Sequence
  Description of Artificial Sequence: Synthetic oligonucleotide
  Target: LAMA2; (-) strand; PAM type: NRG; PAM sequence: CAG
taaagcaataatttttacaa

SEQ ID NO: 85954 - DNA, 20 bp, Artificial Sequence
  Description of Artificial Sequence: Synthetic oligonucleotide
  Target: LAMA2; (-) strand; PAM type: NRG; PAM sequence: AAG
cttattaagtgatcatatta

SEQ ID NO: 85955 - DNA, 20 bp, Artificial Sequence
  Description of Artificial Sequence: Synthetic oligonucleotide
  Target: LAMA2; (-) strand; PAM type: NRG; PAM sequence: AAG
tggggcatttaatgcttatt

SEQ ID NO: 85956 - DNA, 20 bp, Artificial Sequence
  Description of Artificial Sequence: Synthetic oligonucleotide
  Target: LAMA2; (-) strand; PAM type: NRG; PAM sequence: GGG
atttttagcagataggattg

SEQ ID NO: 85957 - DNA, 20 bp, Artificial Sequence
  Description of Artificial Sequence: Synthetic oligonucleotide
  Target: LAMA2; (-) strand; PAM type: NRG; PAM sequence: GGG
aatttttagcagataggatt

SEQ ID NO: 85958 - DNA, 20 bp, Artificial Sequence
  Description of Artificial Sequence: Synthetic oligonucleotide
  Target: LAMA2; (-) strand; PAM type: NRG; PAM sequence: TGG
caatttttagcagataggat

SEQ ID NO: 85959 - DNA, 20 bp, Artificial Sequence
  Description of Artificial Sequence: Synthetic oligonucleotide
  Target: LAMA2; (-) strand; PAM type: NRG; PAM sequence: AGG
ccaaacaatttttagcagat

SEQ ID NO: 85960 - DNA, 20 bp, Artificial Sequence
  Description of Artificial Sequence: Synthetic oligonucleotide
  Target: LAMA2; (-) strand; PAM type: NRG; PAM sequence: TAG
gccaaacaatttttagcaga

SEQ ID NO: 85961 - DNA, 20 bp, Artificial Sequence
  Description of Artificial Sequence: Synthetic oligonucleotide
  Target: LAMA2; (-) strand; PAM type: NRG; PAM sequence: CAG
acatgccaaacaatttttag

SEQ ID NO: 85962 - DNA, 20 bp, Artificial Sequence
  Description of Artificial Sequence: Synthetic oligonucleotide
  Target: LAMA2; (-) strand; PAM type: NRG; PAM sequence: TAG
taaacatgccaaacaatttt

SEQ ID NO: 85963 - DNA, 20 bp, Artificial Sequence
  Description of Artificial Sequence: Synthetic oligonucleotide
  Target: LAMA2; (-) strand; PAM type: NRG; PAM sequence: GAG
gaagatacttgaaaagataa

SEQ ID NO: 85964 - DNA, 20 bp, Artificial Sequence
  Description of Artificial Sequence: Synthetic oligonucleotide
  Target: LAMA2; (-) strand; PAM type: NRG; PAM sequence: AAG
ttgaagatacttgaaaagat

SEQ ID NO: 85965 - DNA, 20 bp, Artificial Sequence
  Description of Artificial Sequence: Synthetic oligonucleotide
  Target: LAMA2; (-) strand; PAM type: NRG; PAM sequence: AAG
atttcttgaagatacttgaa

SEQ ID NO: 85966 - DNA, 20 bp, Artificial Sequence
  Description of Artificial Sequence: Synthetic oligonucleotide
  Target: LAMA2; (-) strand; PAM type: NRG; PAM sequence: AAG
ctgaaaataagaatttcttg

SEQ ID NO: 85967 - DNA, 20 bp, Artificial Sequence
  Description of Artificial Sequence: Synthetic oligonucleotide
  Target: LAMA2; (-) strand; PAM type: NRG; PAM sequence: AAG
caacatgccctgctgaaaat

SEQ ID NO: 85968 - DNA, 20 bp, Artificial Sequence
  Description of Artificial Sequence: Synthetic oligonucleotide
  Target: LAMA2; (-) strand; PAM type: NRG; PAM sequence: AAG
acatcaggaataaaaaatgt

SEQ ID NO: 85969 - DNA, 20 bp, Artificial Sequence
  Description of Artificial Sequence: Synthetic oligonucleotide
  Target: LAMA2; (-) strand; PAM type: NRG; PAM sequence: AGG
ggaagtgatgagaagacatc

SEQ ID NO: 85970 - DNA, 20 bp, Artificial Sequence
  Description of Artificial Sequence: Synthetic oligonucleotide
  Target: LAMA2; (-) strand; PAM type: NRG; PAM sequence: CAG
tggaagtgatgagaagacat

SEQ ID NO: 85971 - DNA, 20 bp, Artificial Sequence
  Description of Artificial Sequence: Synthetic oligonucleotide
  Target: LAMA2; (-) strand; PAM type: NRG; PAM sequence: AAG
ctactgttggaagtgatgag

SEQ ID NO: 85972 - DNA, 20 bp, Artificial Sequence
  Description of Artificial Sequence: Synthetic oligonucleotide
  Target: LAMA2; (-) strand; PAM type: NRG; PAM sequence: GAG
tggctactgttggaagtgat

SEQ ID NO: 85973 - DNA, 20 bp, Artificial Sequence
  Description of Artificial Sequence: Synthetic oligonucleotide
  Target: LAMA2; (-) strand; PAM type: NRG; PAM sequence: AAG
gactcagtggctactgttgg

SEQ ID NO: 85974 - DNA, 20 bp, Artificial Sequence
  Description of Artificial Sequence: Synthetic oligonucleotide
  Target: LAMA2; (-) strand; PAM type: NRG; PAM sequence: TGG
tttgactcagtggctactgt

SEQ ID NO: 85975 - DNA, 20 bp, Artificial Sequence
  Description of Artificial Sequence: Synthetic oligonucleotide
  Target: LAMA2; (-) strand; PAM type: NRG; PAM sequence: TGG
gagcaactgctttgactcag

SEQ ID NO: 85976 - DNA, 20 bp, Artificial Sequence
  Description of Artificial Sequence: Synthetic oligonucleotide
  Target: LAMA2; (-) strand; PAM type: NRG; PAM sequence: CAG
agagagcaactgctttgact

SEQ ID NO: 85977 - DNA, 20 bp, Artificial Sequence
  Description of Artificial Sequence: Synthetic oligonucleotide
  Target: LAMA2; (-) strand; PAM type: NRG; PAM sequence: GAG
ttagaaaaagtaaggaaaga

SEQ ID NO: 85978 - DNA, 20 bp, Artificial Sequence
  Description of Artificial Sequence: Synthetic oligonucleotide
  Target: LAMA2; (-) strand; PAM type: NRG; PAM sequence: GAG
ctttagaaaaagtaaggaaa

SEQ ID NO: 85979 - DNA, 20 bp, Artificial Sequence
  Description of Artificial Sequence: Synthetic oligonucleotide
  Target: LAMA2; (-) strand; PAM type: NRG; PAM sequence: AAG
agctttagaaaaagtaagga

SEQ ID NO: 85980 - DNA, 20 bp, Artificial Sequence
  Description of Artificial Sequence: Synthetic oligonucleotide
  Target: LAMA2; (-) strand; PAM type: NRG; PAM sequence: AGG
ggagagctttagaaaaagta

SEQ ID NO: 85981 - DNA, 20 bp, Artificial Sequence
  Description of Artificial Sequence: Synthetic oligonucleotide
  Target: LAMA2; (-) strand; PAM type: NRG; PAM sequence: AAG
gggagagctttagaaaaagt

SEQ ID NO: 85982 - DNA, 20 bp, Artificial Sequence
  Description of Artificial Sequence: Synthetic oligonucleotide
  Target: LAMA2; (-) strand; PAM type: NRG; PAM sequence: AAG
tagagggagagctttagaaa

SEQ ID NO: 85983 - DNA, 20 bp, Artificial Sequence
  Description of Artificial Sequence: Synthetic oligonucleotide
  Target: LAMA2; (-) strand; PAM type: NRG; PAM sequence: TAG
ctaatatagagggagagctt

SEQ ID NO: 85984 - DNA, 20 bp, Artificial Sequence
  Description of Artificial Sequence: Synthetic oligonucleotide
  Target: LAMA2; (-) strand; PAM type: NRG; PAM sequence: GAG
acacagctaatatagaggga

SEQ ID NO: 85985 - DNA, 20 bp, Artificial Sequence
  Description of Artificial Sequence: Synthetic oligonucleotide
  Target: LAMA2; (-) strand; PAM type: NRG; PAM sequence: GAG
agacacagctaatatagagg

SEQ ID NO: 85986 - DNA, 20 bp, Artificial Sequence
  Description of Artificial Sequence: Synthetic oligonucleotide
  Target: LAMA2; (-) strand; PAM type: NRG; PAM sequence: GGG
tcagacacagctaatataga

SEQ ID NO: 85987 - DNA, 20 bp, Artificial Sequence
  Description of Artificial Sequence: Synthetic oligonucleotide
  Target: LAMA2; (-) strand; PAM type: NRG; PAM sequence: AGG
ctcagacacagctaatatag

SEQ ID NO: 85988 - DNA, 20 bp, Artificial Sequence
  Description of Artificial Sequence: Synthetic oligonucleotide
  Target: LAMA2; (-) strand; PAM type: NRG; PAM sequence: GAG
tctcagacacagctaatata

SEQ ID NO: 85989 - DNA, 20 bp, Artificial Sequence
  Description of Artificial Sequence: Synthetic oligonucleotide
  Target: LAMA2; (-) strand; PAM type: NRG; PAM sequence: TAG
aatctcagacacagctaata

SEQ ID NO: 85990 - DNA, 20 bp, Artificial Sequence
  Description of Artificial Sequence: Synthetic oligonucleotide
  Target: LAMA2; (-) strand; PAM type: NRG; PAM sequence: CAG
actgcctgcaatctcagaca

SEQ ID NO: 85991 - DNA, 20 bp, Artificial Sequence
  Description of Artificial Sequence: Synthetic oligonucleotide
  Target: LAMA2; (-) strand; PAM type: NRG; PAM sequence: CAG
attttaactgcctgcaatct

SEQ ID NO: 85992 - DNA, 20 bp, Artificial Sequence
  Description of Artificial Sequence: Synthetic oligonucleotide
  Target: LAMA2; (-) strand; PAM type: NRG; PAM sequence: TGG
tttttcagtgtgccaaatgt

SEQ ID NO: 85993 - DNA, 20 bp, Artificial Sequence
  Description of Artificial Sequence: Synthetic oligonucleotide
  Target: LAMA2; (-) strand; PAM type: NRG; PAM sequence: CAG
ctatcacatagccccttttt

SEQ ID NO: 85994 - DNA, 20 bp, Artificial Sequence
  Description of Artificial Sequence: Synthetic oligonucleotide
  Target: LAMA2; (-) strand; PAM type: NRG; PAM sequence: TAG
cagttggaggccctatcaca

SEQ ID NO: 85995 - DNA, 20 bp, Artificial Sequence
  Description of Artificial Sequence: Synthetic oligonucleotide
  Target: LAMA2; (-) strand; PAM type: NRG; PAM sequence: AGG
attcatcacatttcagttgg

SEQ ID NO: 85996 - DNA, 20 bp, Artificial Sequence
  Description of Artificial Sequence: Synthetic oligonucleotide
  Target: LAMA2; (-) strand; PAM type: NRG; PAM sequence: GAG
aattcatcacatttcagttg

SEQ ID NO: 85997 - DNA, 20 bp, Artificial Sequence
  Description of Artificial Sequence: Synthetic oligonucleotide
  Target: LAMA2; (-) strand; PAM type: NRG; PAM sequence: TGG
ataattcatcacatttcagt

SEQ ID NO: 85998 - DNA, 20 bp, Artificial Sequence
  Description of Artificial Sequence: Synthetic oligonucleotide
  Target: LAMA2; (-) strand; PAM type: NRG; PAM sequence: CAG
tttaataattcatcacattt

SEQ ID NO: 85999 - DNA, 20 bp, Artificial Sequence
  Description of Artificial Sequence: Synthetic oligonucleotide
  Target: LAMA2; (-) strand; PAM type: NRG; PAM sequence: AGG
ggagataagcactctttcac

SEQ ID NO: 86000 - DNA, 20 bp, Artificial Sequence
  Description of Artificial Sequence: Synthetic oligonucleotide
  Target: LAMA2; (-) strand; PAM type: NRG; PAM sequence: CAG
aggagataagcactctttca

SEQ ID NO: 86001 - DNA, 20 bp, Artificial Sequence
  Description of Artificial Sequence: Synthetic oligonucleotide
  Target: LAMA2; (-) strand; PAM type: NRG; PAM sequence: AAG
tcgatgtgcctcaaggagat

SEQ ID NO: 86002 - DNA, 20 bp, Artificial Sequence
  Description of Artificial Sequence: Synthetic oligonucleotide
  Target: LAMA2; (-) strand; PAM type: NRG; PAM sequence: GAG
agctttcgatgtgcctcaag

SEQ ID NO: 86003 - DNA, 20 bp, Artificial Sequence
  Description of Artificial Sequence: Synthetic oligonucleotide
  Target: LAMA2; (-) strand; PAM type: NRG; PAM sequence: AGG
tcagctttcgatgtgcctca

SEQ ID NO: 86004 - DNA, 20 bp, Artificial Sequence
  Description of Artificial Sequence: Synthetic oligonucleotide
  Target: LAMA2; (-) strand; PAM type: NRG; PAM sequence: AAG
gtcagctttcgatgtgcctc

SEQ ID NO: 86005 - DNA, 20 bp, Artificial Sequence
  Description of Artificial Sequence: Synthetic oligonucleotide
  Target: LAMA2; (-) strand; PAM type: NRG; PAM sequence: CAG
tctaattggctcaattccgt

SEQ ID NO: 86006 - DNA, 20 bp, Artificial Sequence
  Description of Artificial Sequence: Synthetic oligonucleotide
  Target: LAMA2; (-) strand; PAM type: NRG; PAM sequence: TGG
gaagagacagtcagtctaat

SEQ ID NO: 86007 - DNA, 20 bp, Artificial Sequence
  Description of Artificial Sequence: Synthetic oligonucleotide
  Target: LAMA2; (-) strand; PAM type: NRG; PAM sequence: CAG
caactcattgaagagacagt

SEQ ID NO: 86008 - DNA, 20 bp, Artificial Sequence
  Description of Artificial Sequence: Synthetic oligonucleotide
  Target: LAMA2; (-) strand; PAM type: NRG; PAM sequence: CAG
gtcacaactcattgaagaga

SEQ ID NO: 86009 - DNA, 20 bp, Artificial Sequence
  Description of Artificial Sequence: Synthetic oligonucleotide
  Target: LAMA2; (-) strand; PAM type: NRG; PAM sequence: GAG
ataggtcacaactcattgaa

SEQ ID NO: 86010 - DNA, 20 bp, Artificial Sequence
  Description of Artificial Sequence: Synthetic oligonucleotide
  Target: LAMA2; (-) strand; PAM type: NRG; PAM sequence: AAG
tgataggtcacaactcattg

SEQ ID NO: 86011 - DNA, 20 bp, Artificial Sequence
  Description of Artificial Sequence: Synthetic oligonucleotide
  Target: LAMA2; (-) strand; PAM type: NRG; PAM sequence: AGG
aataagctattaccattgat

SEQ ID NO: 86012 - DNA, 20 bp, Artificial Sequence
  Description of Artificial Sequence: Synthetic oligonucleotide
  Target: LAMA2; (-) strand; PAM type: NRG; PAM sequence: TAG
taataagctattaccattga

SEQ ID NO: 86013 - DNA, 20 bp, Artificial Sequence
  Description of Artificial Sequence: Synthetic oligonucleotide
  Target: LAMA2; (-) strand; PAM type: NRG; PAM sequence: AAG
ggttcatttatcatcataat

SEQ ID NO: 86014 - DNA, 20 bp, Artificial Sequence
  Description of Artificial Sequence: Synthetic oligonucleotide
  Target: LAMA2; (-) strand; PAM type: NRG; PAM sequence: GGG
caggcttcagtttgagagat

SEQ ID NO: 86015 - DNA, 20 bp, Artificial Sequence
  Description of Artificial Sequence: Synthetic oligonucleotide
  Target: LAMA2; (-) strand; PAM type: NRG; PAM sequence: TGG
tcaggcttcagtttgagaga

SEQ ID NO: 86016 - DNA, 20 bp, Artificial Sequence
  Description of Artificial Sequence: Synthetic oligonucleotide
  Target: LAMA2; (-) strand; PAM type: NRG; PAM sequence: GAG
gtactcaggcttcagtttga

SEQ ID NO: 86017 - DNA, 20 bp, Artificial Sequence
  Description of Artificial Sequence: Synthetic oligonucleotide
  Target: LAMA2; (-) strand; PAM type: NRG; PAM sequence: GAG
gtgtactcaggcttcagttt

SEQ ID NO: 86018 - DNA, 20 bp, Artificial Sequence
  Description of Artificial Sequence: Synthetic oligonucleotide
  Target: LAMA2; (-) strand; PAM type: NRG; PAM sequence: CAG
tgaagtgtgtactcaggctt

SEQ ID NO: 86019 - DNA, 20 bp, Artificial Sequence
  Description of Artificial Sequence: Synthetic oligonucleotide
  Target: LAMA2; (-) strand; PAM type: NRG; PAM sequence: AGG
aactgctgaagtgtgtactc

SEQ ID NO: 86020 - DNA, 20 bp, Artificial Sequence
  Description of Artificial Sequence: Synthetic oligonucleotide
  Target: LAMA2; (-) strand; PAM type: NRG; PAM sequence: CAG
caactgctgaagtgtgtact

SEQ ID NO: 86021 - DNA, 20 bp, Artificial Sequence
  Description of Artificial Sequence: Synthetic oligonucleotide
  Target: LAMA2; (-) strand; PAM type: NRG; PAM sequence: AAG
atgattcaaggcaactgctg

SEQ ID NO: 86022 - DNA, 20 bp, Artificial Sequence
  Description of Artificial Sequence: Synthetic oligonucleotide
  Target: LAMA2; (-) strand; PAM type: NRG; PAM sequence: AGG
ggcaatggcctcatgattca

SEQ ID NO: 86023 - DNA, 20 bp, Artificial Sequence
  Description of Artificial Sequence: Synthetic oligonucleotide
  Target: LAMA2; (-) strand; PAM type: NRG; PAM sequence: AAG
aggcaatggcctcatgattc

SEQ ID NO: 86024 - DNA, 20 bp, Artificial Sequence
  Description of Artificial Sequence: Synthetic oligonucleotide
  Target: LAMA2; (-) strand; PAM type: NRG; PAM sequence: TGG
gatctgaagttgagaggcaa

SEQ ID NO: 86025 - DNA, 20 bp, Artificial Sequence
  Description of Artificial Sequence: Synthetic oligonucleotide
  Target: LAMA2; (-) strand; PAM type: NRG; PAM sequence: AGG
gctgtcgatctgaagttgag

SEQ ID NO: 86026 - DNA, 20 bp, Artificial Sequence
  Description of Artificial Sequence: Synthetic oligonucleotide
  Target: LAMA2; (-) strand; PAM type: NRG; PAM sequence: GAG
tgctgtcgatctgaagttga

SEQ ID NO: 86027 - DNA, 20 bp, Artificial Sequence
  Description of Artificial Sequence: Synthetic oligonucleotide
  Target: LAMA2; (-) strand; PAM type: NRG; PAM sequence: GAG
actgctgtcgatctgaagtt

SEQ ID NO: 86028 - DNA, 20 bp, Artificial Sequence
  Description of Artificial Sequence: Synthetic oligonucleotide
  Target: LAMA2; (-) strand; PAM type: NRG; PAM sequence: AAG
ctgtcactgctgtcgatctg

SEQ ID NO: 86029 - DNA, 20 bp, Artificial Sequence
  Description of Artificial Sequence: Synthetic oligonucleotide
  Target: LAMA2; (-) strand; PAM type: NRG; PAM sequence: TGG
atgcatgctctctgctcctg

SEQ ID NO: 86030 - DNA, 20 bp, Artificial Sequence
  Description of Artificial Sequence: Synthetic oligonucleotide
  Target: LAMA2; (-) strand; PAM type: NRG; PAM sequence: TAG
gtaaaacaatcatctgtgtc

SEQ ID NO: 86031 - DNA, 20 bp, Artificial Sequence
  Description of Artificial Sequence: Synthetic oligonucleotide
  Target: LAMA2; (-) strand; PAM type: NRG; PAM sequence: GAG
agctgtaaatatattcatct

SEQ ID NO: 86032 - DNA, 20 bp, Artificial Sequence
  Description of Artificial Sequence: Synthetic oligonucleotide
  Target: LAMA2; (-) strand; PAM type: NRG; PAM sequence: TAG
agggcccgtttctttggaaa

SEQ ID NO: 86033 - DNA, 20 bp, Artificial Sequence
  Description of Artificial Sequence: Synthetic oligonucleotide
  Target: LAMA2; (-) strand; PAM type: NRG; PAM sequence: TGG
aaaagaagggcccgtttctt

SEQ ID NO: 86034 - DNA, 20 bp, Artificial Sequence
  Description of Artificial Sequence: Synthetic oligonucleotide
  Target: LAMA2; (-) strand; PAM type: NRG; PAM sequence: GGG
gaatacacaatgcaaaagaa

SEQ ID NO: 86035 - DNA, 20 bp, Artificial Sequence
  Description of Artificial Sequence: Synthetic oligonucleotide
  Target: LAMA2; (-) strand; PAM type: NRG; PAM sequence: AGG
cgaatacacaatgcaaaaga

SEQ ID NO: 86036 - DNA, 20 bp, Artificial Sequence
  Description of Artificial Sequence: Synthetic oligonucleotide
  Target: LAMA2; (-) strand; PAM type: NRG; PAM sequence: AAG
acgaatacacaatgcaaaag

SEQ ID NO: 86037 - DNA, 20 bp, Artificial Sequence
  Description of Artificial Sequence: Synthetic oligonucleotide
  Target: LAMA2; (-) strand; PAM type: NRG; PAM sequence: AAG
gatacgaatacacaatgcaa

SEQ ID NO: 86038 - DNA, 20 bp, Artificial Sequence
  Description of Artificial Sequence: Synthetic oligonucleotide
  Target: LAMA2; (-) strand; PAM type: NRG; PAM sequence: CAG
acgtcatatggtaactattt

SEQ ID NO: 86039 - DNA, 20 bp, Artificial Sequence
  Description of Artificial Sequence: Synthetic oligonucleotide
  Target: LAMA2; (-) strand; PAM type: NRG; PAM sequence: TGG
ctaatgaaggaaacgtcata

SEQ ID NO: 86040 - DNA, 20 bp, Artificial Sequence
  Description of Artificial Sequence: Synthetic oligonucleotide
  Target: LAMA2; (-) strand; PAM type: NRG; PAM sequence: AGG
aggggttctcttcctaatga

SEQ ID NO: 86041 - DNA, 20 bp, Artificial Sequence
  Description of Artificial Sequence: Synthetic oligonucleotide
  Target: LAMA2; (-) strand; PAM type: NRG; PAM sequence: AAG
gaggggttctcttcctaatg

SEQ ID NO: 86042 - DNA, 20 bp, Artificial Sequence
  Description of Artificial Sequence: Synthetic oligonucleotide
  Target: LAMA2; (-) strand; PAM type: NRG; PAM sequence: GGG
agaatgctacagccagggag

SEQ ID NO: 86043 - DNA, 20 bp, Artificial Sequence
  Description of Artificial Sequence: Synthetic oligonucleotide
  Target: LAMA2; (-) strand; PAM type: NRG; PAM sequence: GGG
cagaatgctacagccaggga

SEQ ID NO: 86044 - DNA, 20 bp, Artificial Sequence
  Description of Artificial Sequence: Synthetic oligonucleotide
  Target: LAMA2; (-) strand; PAM type: NRG; PAM sequence: AGG
tcagaatgctacagccaggg

SEQ ID NO: 86045 - DNA, 20 bp, Artificial Sequence
  Description of Artificial Sequence: Synthetic oligonucleotide
  Target: LAMA2; (-) strand; PAM type: NRG; PAM sequence: GAG
ttcagaatgctacagccagg

SEQ ID NO: 86046 - DNA, 20 bp, Artificial Sequence
  Description of Artificial Sequence: Synthetic oligonucleotide
  Target: LAMA2; (-) strand; PAM type: NRG; PAM sequence: GGG
atttcagaatgctacagcca

SEQ ID NO: 86047 - DNA, 20 bp, Artificial Sequence
  Description of Artificial Sequence: Synthetic oligonucleotide
  Target: LAMA2; (-) strand; PAM type: NRG; PAM sequence: AGG
tatttcagaatgctacagcc

SEQ ID NO: 86048 - DNA, 20 bp, Artificial Sequence
  Description of Artificial Sequence: Synthetic oligonucleotide
  Target: LAMA2; (-) strand; PAM type: NRG; PAM sequence: CAG
ttatttcagaatgctacagc

SEQ ID NO: 86049 - DNA, 20 bp, Artificial Sequence
  Description of Artificial Sequence: Synthetic oligonucleotide
  Target: LAMA2; (-) strand; PAM type: NRG; PAM sequence: CAG
ccagttatttcagaatgcta

SEQ ID NO: 86050 - DNA, 20 bp, Artificial Sequence
  Description of Artificial Sequence: Synthetic oligonucleotide
  Target: LAMA2; (-) strand; PAM type: NRG; PAM sequence: CAG
ccttcaaaatccagttattt

SEQ ID NO: 86051 - DNA, 20 bp, Artificial Sequence
  Description of Artificial Sequence: Synthetic oligonucleotide
  Target: LAMA2; (-) strand; PAM type: NRG; PAM sequence: CAG
aaaaaaagaccttcaaaatc

SEQ ID NO: 86052 - DNA, 20 bp, Artificial Sequence
  Description of Artificial Sequence: Synthetic oligonucleotide
  Target: LAMA2; (-) strand; PAM type: NRG; PAM sequence: AAG
caaaaagtgaagaaaaaaaa

SEQ ID NO: 86053 - DNA, 20 bp, Artificial Sequence
  Description of Artificial Sequence: Synthetic oligonucleotide
  Target: LAMA2; (-) strand; PAM type: NRG; PAM sequence: AAG
taaacaataaacaaaaagtg

SEQ ID NO: 86054 - DNA, 20 bp, Artificial Sequence
  Description of Artificial Sequence: Synthetic oligonucleotide
  Target: LAMA2; (-) strand; PAM type: NRG; PAM sequence: AAG
cattgtaaacaataaacaaa

SEQ ID NO: 86055 - DNA, 20 bp, Artificial Sequence
  Description of Artificial Sequence: Synthetic oligonucleotide
  Target: LAMA2; (-) strand; PAM type: NRG; PAM sequence: GAG
gagttattactcacaagaat

SEQ ID NO: 86056 - DNA, 20 bp, Artificial Sequence
  Description of Artificial Sequence: Synthetic oligonucleotide
  Target: LAMA2; (-) strand; PAM type: NRG; PAM sequence: AAG
ggagttgagttattactcac

SEQ ID NO: 86057 - DNA, 20 bp, Artificial Sequence
  Description of Artificial Sequence: Synthetic oligonucleotide
  Target: LAMA2; (-) strand; PAM type: NRG; PAM sequence: GAG
attttacttaaccaggagtt

SEQ ID NO: 86058 - DNA, 20 bp, Artificial Sequence
  Description of Artificial Sequence: Synthetic oligonucleotide
  Target: LAMA2; (-) strand; PAM type: NRG; PAM sequence: GAG
ctgaaattttacttaaccag

SEQ ID NO: 86059 - DNA, 20 bp, Artificial Sequence
  Description of Artificial Sequence: Synthetic oligonucleotide
  Target: LAMA2; (-) strand; PAM type: NRG; PAM sequence: AGG
ttctgaaattttacttaacc

SEQ ID NO: 86060 - DNA, 20 bp, Artificial Sequence
  Description of Artificial Sequence: Synthetic oligonucleotide
  Target: LAMA2; (-) strand; PAM type: NRG; PAM sequence: CAG
attctgaaattttacttaac

SEQ ID NO: 86061 - DNA, 20 bp, Artificial Sequence
  Description of Artificial Sequence: Synthetic oligonucleotide
  Target: LAMA2; (-) strand; PAM type: NRG; PAM sequence: AAG
catacttgttttgatattac

SEQ ID NO: 86062 - DNA, 20 bp, Artificial Sequence
  Description of Artificial Sequence: Synthetic oligonucleotide
  Target: LAMA2; (-) strand; PAM type: NRG; PAM sequence: AGG
tataaaatgtgaaatgtaat

SEQ ID NO: 86063 - DNA, 20 bp, Artificial Sequence
  Description of Artificial Sequence: Synthetic oligonucleotide
  Target: LAMA2; (-) strand; PAM type: NRG; PAM sequence: TAG
atataaaatgtgaaatgtaa

SEQ ID NO: 86064 - DNA, 20 bp, Artificial Sequence
  Description of Artificial Sequence: Synthetic oligonucleotide
  Target: LAMA2; (-) strand; PAM type: NRG; PAM sequence: GGG
aagaaaaaagaatctctaag

SEQ ID NO: 86065 - DNA, 20 bp, Artificial Sequence
  Description of Artificial Sequence: Synthetic oligonucleotide
  Target: LAMA2; (-) strand; PAM type: NRG; PAM sequence: GGG
aaagaaaaaagaatctctaa

SEQ ID NO: 86066 - DNA, 20 bp, Artificial Sequence
  Description of Artificial Sequence: Synthetic oligonucleotide
  Target: LAMA2; (-) strand; PAM type: NRG; PAM sequence: AGG
caaagaaaaaagaatctcta

SEQ ID NO: 86067 - DNA, 20 bp, Artificial Sequence
  Description of Artificial Sequence: Synthetic oligonucleotide
  Target: LAMA2; (-) strand; PAM type: NRG; PAM sequence: AAG
acaaagaaaaaagaatctct

SEQ ID NO: 86068 - DNA, 20 bp, Artificial Sequence
  Description of Artificial Sequence: Synthetic oligonucleotide
  Target: LAMA2; (-) strand; PAM type: NRG; PAM sequence: AAG
aaacttctctacaaagaaaa

SEQ ID NO: 86069 - DNA, 20 bp, Artificial Sequence
  Description of Artificial Sequence: Synthetic oligonucleotide
  Target: LAMA2; (-) strand; PAM type: NRG; PAM sequence: AAG
ctctacaaaacttctctaca

SEQ ID NO: 86070 - DNA, 20 bp, Artificial Sequence
  Description of Artificial Sequence: Synthetic oligonucleotide
  Target: LAMA2; (-) strand; PAM type: NRG; PAM sequence: AGG
aaatattttgaaaaattaaa

SEQ ID NO: 86071 - DNA, 20 bp, Artificial Sequence
  Description of Artificial Sequence: Synthetic oligonucleotide
  Target: LAMA2; (-) strand; PAM type: NRG; PAM sequence: AAG
caaatattttgaaaaattaa

SEQ ID NO: 86072 - DNA, 20 bp, Artificial Sequence
  Description of Artificial Sequence: Synthetic oligonucleotide
  Target: LAMA2; (-) strand; PAM type: NRG; PAM sequence: AAG
caaatttcagtaactactta

SEQ ID NO: 86073 - DNA, 20 bp, Artificial Sequence
  Description of Artificial Sequence: Synthetic oligonucleotide
  Target: LAMA2; (-) strand; PAM type: NRG; PAM sequence: CAG
acatggaacttaccaaattt

SEQ ID NO: 86074 - DNA, 20 bp, Artificial Sequence
  Description of Artificial Sequence: Synthetic oligonucleotide
  Target: LAMA2; (-) strand; PAM type: NRG; PAM sequence: TGG
tgtatcaatatagcagcaca

SEQ ID NO: 86075 - DNA, 20 bp, Artificial Sequence
  Description of Artificial Sequence: Synthetic oligonucleotide
  Target: LAMA2; (-) strand; PAM type: NRG; PAM sequence: CAG
aacaaaatgtatcaatatag

SEQ ID NO: 86076 - DNA, 20 bp, Artificial Sequence
  Description of Artificial Sequence: Synthetic oligonucleotide
  Target: LAMA2; (-) strand; PAM type: NRG; PAM sequence: TAG
taaaacaaaatgtatcaata

SEQ ID NO: 86077 - DNA, 20 bp, Artificial Sequence
  Description of Artificial Sequence: Synthetic oligonucleotide
  Target: LAMA2; (-) strand; PAM type: NRG; PAM sequence: AAG
taatacttattaggaactgg

SEQ ID NO: 86078 - DNA, 20 bp, Artificial Sequence
  Description of Artificial Sequence: Synthetic oligonucleotide
  Target: LAMA2; (-) strand; PAM type: NRG; PAM sequence: TGG
gtctaatacttattaggaac

SEQ ID NO: 86079 - DNA, 20 bp, Artificial Sequence
  Description of Artificial Sequence: Synthetic oligonucleotide
  Target: LAMA2; (-) strand; PAM type: NRG; PAM sequence: AGG
acaggtgtctaatacttatt

SEQ ID NO: 86080 - DNA, 20 bp, Artificial Sequence
  Description of Artificial Sequence: Synthetic oligonucleotide
  Target: LAMA2; (-) strand; PAM type: NRG; PAM sequence: TAG
aacaggtgtctaatacttat

SEQ ID NO: 86081 - DNA, 20 bp, Artificial Sequence
  Description of Artificial Sequence: Synthetic oligonucleotide
  Target: LAMA2; (-) strand; PAM type: NRG; PAM sequence: AGG
ttgggaagttggcagctaac

SEQ ID NO: 86082 - DNA, 20 bp, Artificial Sequence
  Description of Artificial Sequence: Synthetic oligonucleotide
  Target: LAMA2; (-) strand; PAM type: NRG; PAM sequence: CAG
tttgggaagttggcagctaa

SEQ ID NO: 86083 - DNA, 20 bp, Artificial Sequence
  Description of Artificial Sequence: Synthetic oligonucleotide
  Target: LAMA2; (-) strand; PAM type: NRG; PAM sequence: CAG
gggtatttttgggaagttgg

SEQ ID NO: 86084 - DNA, 20 bp, Artificial Sequence
  Description of Artificial Sequence: Synthetic oligonucleotide
  Target: LAMA2; (-) strand; PAM type: NRG; PAM sequence: TGG
caggggtatttttgggaagt

SEQ ID NO: 86085 - DNA, 20 bp, Artificial Sequence
  Description of Artificial Sequence: Synthetic oligonucleotide
  Target: LAMA2; (-) strand; PAM type: NRG; PAM sequence: AAG
ttctcaggggtatttttggg

SEQ ID NO: 86086 - DNA, 20 bp, Artificial Sequence
  Description of Artificial Sequence: Synthetic oligonucleotide
  Target: LAMA2; (-) strand; PAM type: NRG; PAM sequence: GGG
tttttctcaggggtattttt

SEQ ID NO: 86087 - DNA, 20 bp, Artificial Sequence
  Description of Artificial Sequence: Synthetic oligonucleotide
  Target: LAMA2; (-) strand; PAM type: NRG; PAM sequence: TGG
ttttttctcaggggtatttt

SEQ ID NO: 86088 - DNA, 20 bp, Artificial Sequence
  Description of Artificial Sequence: Synthetic oligonucleotide
  Target: LAMA2; (-) strand; PAM type: NRG; PAM sequence: GGG
caggtttttttttttctcag

SEQ ID NO: 86089 - DNA, 20 bp, Artificial Sequence
  Description of Artificial Sequence: Synthetic oligonucleotide
  Target: LAMA2; (-) strand; PAM type: NRG; PAM sequence: GGG
acaggtttttttttttctca

SEQ ID NO: 86090 - DNA, 20 bp, Artificial Sequence
  Description of Artificial Sequence: Synthetic oligonucleotide
  Target: LAMA2; (-) strand; PAM type: NRG; PAM sequence: AGG
aacaggtttttttttttctc

SEQ ID NO: 86091 - DNA, 20 bp, Artificial Sequence
  Description of Artificial Sequence: Synthetic oligonucleotide
  Target: LAMA2; (-) strand; PAM type: NRG; PAM sequence: CAG
caacaggtttttttttttct

SEQ ID NO: 86092 - DNA, 20 bp, Artificial Sequence
  Description of Artificial Sequence: Synthetic oligonucleotide
  Target: LAMA2; (-) strand; PAM type: NRG; PAM sequence: AGG
cgtgaactttcttgaccaac

SEQ ID NO: 86093 - DNA, 20 bp, Artificial Sequence
  Description of Artificial Sequence: Synthetic oligonucleotide
  Target: LAMA2; (-) strand; PAM type: NRG; PAM sequence: CAG
tcgtgaactttcttgaccaa

SEQ ID NO: 86094 - DNA, 20 bp, Artificial Sequence
  Description of Artificial Sequence: Synthetic oligonucleotide
  Target: LAMA2; (-) strand; PAM type: NRG; PAM sequence: AGG
agacattactaagaatatca

SEQ ID NO: 86095 - DNA, 20 bp, Artificial Sequence
  Description of Artificial Sequence: Synthetic oligonucleotide
  Target: LAMA2; (-) strand; PAM type: NRG; PAM sequence: AAG
gagacattactaagaatatc

SEQ ID NO: 86096 - DNA, 20 bp, Artificial Sequence
  Description of Artificial Sequence: Synthetic oligonucleotide
  Target: LAMA2; (-) strand; PAM type: NRG; PAM sequence: AAG
tcaccttctgagacattact

SEQ ID NO: 86097 - DNA, 20 bp, Artificial Sequence
  Description of Artificial Sequence: Synthetic oligonucleotide
  Target: LAMA2; (-) strand; PAM type: NRG; PAM sequence: GAG
tcccctgaccctcaccttct

SEQ ID NO: 86098 - DNA, 20 bp, Artificial Sequence
  Description of Artificial Sequence: Synthetic oligonucleotide
  Target: LAMA2; (-) strand; PAM type: NRG; PAM sequence: AAG
atcaaccagccttttcccta

SEQ ID NO: 86099 - DNA, 20 bp, Artificial Sequence
  Description of Artificial Sequence: Synthetic oligonucleotide
  Target: LAMA2; (-) strand; PAM type: NRG; PAM sequence: CAG
agatttgccttgaaatcaac

SEQ ID NO: 86100 - DNA, 20 bp, Artificial Sequence
  Description of Artificial Sequence: Synthetic oligonucleotide
  Target: LAMA2; (-) strand; PAM type: NRG; PAM sequence: AAG
caaccagttccctctcactc

SEQ ID NO: 86101 - DNA, 20 bp, Artificial Sequence
  Description of Artificial Sequence: Synthetic oligonucleotide
  Target: LAMA2; (-) strand; PAM type: NRG; PAM sequence: CAG
aaaccctgcagaatcccaac

SEQ ID NO: 86102 - DNA, 20 bp, Artificial Sequence
  Description of Artificial Sequence: Synthetic oligonucleotide
  Target: LAMA2; (-) strand; PAM type: NRG; PAM sequence: CAG
ctattatataataaaccctg

SEQ ID NO: 86103 - DNA, 20 bp, Artificial Sequence
  Description of Artificial Sequence: Synthetic oligonucleotide
  Target: LAMA2; (-) strand; PAM type: NRG; PAM sequence: TGG
tcttcaatgtttgttcactc

SEQ ID NO: 86104 - DNA, 20 bp, Artificial Sequence
  Description of Artificial Sequence: Synthetic oligonucleotide
  Target: LAMA2; (-) strand; PAM type: NRG; PAM sequence: TAG
catctaagctaacttcctta

SEQ ID NO: 86105 - DNA, 20 bp, Artificial Sequence
  Description of Artificial Sequence: Synthetic oligonucleotide
  Target: LAMA2; (-) strand; PAM type: NRG; PAM sequence: AAG
gtctgctctgtgatccatct

SEQ ID NO: 86106 - DNA, 20 bp, Artificial Sequence
  Description of Artificial Sequence: Synthetic oligonucleotide
  Target: LAMA2; (-) strand; PAM type: NRG; PAM sequence: AAG
gaatgctgtgagcaatctcc

SEQ ID NO: 86107 - DNA, 20 bp, Artificial Sequence
  Description of Artificial Sequence: Synthetic oligonucleotide
  Target: LAMA2; (-) strand; PAM type: NRG; PAM sequence: GAG
ccctattttaagaatgctgt

SEQ ID NO: 86108 - DNA, 20 bp, Artificial Sequence
  Description of Artificial Sequence: Synthetic oligonucleotide
  Target: LAMA2; (-) strand; PAM type: NRG; PAM sequence: AAG
aaatgtccaccccctatttt

SEQ ID NO: 86109 - DNA, 20 bp, Artificial Sequence
  Description of Artificial Sequence: Synthetic oligonucleotide
  Target: LAMA2; (-) strand; PAM type: NRG; PAM sequence: AAG
tgctaaataatgctgggagt

SEQ ID NO: 86110 - DNA, 20 bp, Artificial Sequence
  Description of Artificial Sequence: Synthetic oligonucleotide
  Target: LAMA2; (-) strand; PAM type: NRG; PAM sequence: GAG
cctgtgctaaataatgctgg

SEQ ID NO: 86111 - DNA, 20 bp, Artificial Sequence
  Description of Artificial Sequence: Synthetic oligonucleotide
  Target: LAMA2; (-) strand; PAM type: NRG; PAM sequence: GGG
ttcctgtgctaaataatgct

SEQ ID NO: 86112 - DNA, 20 bp, Artificial Sequence
  Description of Artificial Sequence: Synthetic oligonucleotide
  Target: LAMA2; (-) strand; PAM type: NRG; PAM sequence: TGG
tttcctgtgctaaataatgc

SEQ ID NO: 86113 - DNA, 20 bp, Artificial Sequence
  Description of Artificial Sequence: Synthetic oligonucleotide
  Target: LAMA2; (-) strand; PAM type: NRG; PAM sequence: AAG
tatattgtctgtaagaacta

SEQ ID NO: 86114 - DNA, 20 bp, Artificial Sequence
  Description of Artificial Sequence: Synthetic oligonucleotide
  Target: LAMA2; (-) strand; PAM type: NRG; PAM sequence: AAG
taagtaaatatattgtctgt

SEQ ID NO: 86115 - DNA, 20 bp, Artificial Sequence
  Description of Artificial Sequence: Synthetic oligonucleotide
  Target: LAMA2; (-) strand; PAM type: NRG; PAM sequence: AAG
aaacagtgtcacagaagatt

SEQ ID NO: 86116 - DNA, 20 bp, Artificial Sequence
  Description of Artificial Sequence: Synthetic oligonucleotide
  Target: LAMA2; (-) strand; PAM type: NRG; PAM sequence: AAG
attaagaaacagtgtcacag

SEQ ID NO: 86117 - DNA, 20 bp, Artificial Sequence
  Description of Artificial Sequence: Synthetic oligonucleotide
  Target: LAMA2; (-) strand; PAM type: NRG; PAM sequence: CAG
tacattaagaaacagtgtca

SEQ ID NO: 86118 - DNA, 20 bp, Artificial Sequence
  Description of Artificial Sequence: Synthetic oligonucleotide
  Target: LAMA2; (-) strand; PAM type: NRG; PAM sequence: CAG
tcattttatacattaagaaa

SEQ ID NO: 86119 - DNA, 20 bp, Artificial Sequence
  Description of Artificial Sequence: Synthetic oligonucleotide
  Target: LAMA2; (-) strand; PAM type: NRG; PAM sequence: AAG
ttattttcattttatacatt

SEQ ID NO: 86120 - DNA, 20 bp, Artificial Sequence
  Description of Artificial Sequence: Synthetic oligonucleotide
  Target: LAMA2; (-) strand; PAM type: NRG; PAM sequence: AGG
tcaaaataacactataaagt

SEQ ID NO: 86121 - DNA, 20 bp, Artificial Sequence
  Description of Artificial Sequence: Synthetic oligonucleotide
  Target: LAMA2; (-) strand; PAM type: NRG; PAM sequence: TAG
ctcaaaataacactataaag

SEQ ID NO: 86122 - DNA, 20 bp, Artificial Sequence
  Description of Artificial Sequence: Synthetic oligonucleotide
  Target: LAMA2; (-) strand; PAM type: NRG; PAM sequence: AAG
accctcaaaataacactata

SEQ ID NO: 86123 - DNA, 20 bp, Artificial Sequence
  Description of Artificial Sequence: Synthetic oligonucleotide
  Target: LAMA2; (-) strand; PAM type: NRG; PAM sequence: GAG
tcattttcagacaccatctt

SEQ ID NO: 86124 - DNA, 20 bp, Artificial Sequence
  Description of Artificial Sequence: Synthetic oligonucleotide
  Target: LAMA2; (-) strand; PAM type: NRG; PAM sequence: CAG
taccaaatgcttatcatttt

SEQ ID NO: 86125 - DNA, 20 bp, Artificial Sequence
  Description of Artificial Sequence: Synthetic oligonucleotide
  Target: LAMA2; (-) strand; PAM type: NRG; PAM sequence: TAG
ccagttggagttaataataa

SEQ ID NO: 86126 - DNA, 20 bp, Artificial Sequence
  Description of Artificial Sequence: Synthetic oligonucleotide
  Target: LAMA2; (-) strand; PAM type: NRG; PAM sequence: GAG
cctcaaattaagcccagttg

SEQ ID NO: 86127 - DNA, 20 bp, Artificial Sequence
  Description of Artificial Sequence: Synthetic oligonucleotide
  Target: LAMA2; (-) strand; PAM type: NRG; PAM sequence: TGG
gacctcaaattaagcccagt

SEQ ID NO: 86128 - DNA, 20 bp, Artificial Sequence
  Description of Artificial Sequence: Synthetic oligonucleotide
  Target: LAMA2; (-) strand; PAM type: NRG; PAM sequence: CAG
gcctgacctcaaattaagcc

SEQ ID NO: 86129 - DNA, 20 bp, Artificial Sequence
  Description of Artificial Sequence: Synthetic oligonucleotide
  Target: LAMA2; (-) strand; PAM type: NRG; PAM sequence: AAG
ataatgcctgacctcaaatt

SEQ ID NO: 86130 - DNA, 20 bp, Artificial Sequence
  Description of Artificial Sequence: Synthetic oligonucleotide
  Target: LAMA2; (-) strand; PAM type: NRG; PAM sequence: GAG
tgtctgtttatgtgtgaggg

SEQ ID NO: 86131 - DNA, 20 bp, Artificial Sequence
  Description of Artificial Sequence: Synthetic oligonucleotide
  Target: LAMA2; (-) strand; PAM type: NRG; PAM sequence: GGG
tctgtctgtttatgtgtgag

SEQ ID NO: 86132 - DNA, 20 bp, Artificial Sequence
  Description of Artificial Sequence: Synthetic oligonucleotide
  Target: LAMA2; (-) strand; PAM type: NRG; PAM sequence: GGG
ttctgtctgtttatgtgtga

SEQ ID NO: 86133 - DNA, 20 bp, Artificial Sequence
  Description of Artificial Sequence: Synthetic oligonucleotide
  Target: LAMA2; (-) strand; PAM type: NRG; PAM sequence: AGG
tttctgtctgtttatgtgtg

SEQ ID NO: 86134 - DNA, 20 bp, Artificial Sequence
  Description of Artificial Sequence: Synthetic oligonucleotide
  Target: LAMA2; (-) strand; PAM type: NRG; PAM sequence: GAG
ctttctgtctgtttatgtgt

SEQ ID NO: 86135 - DNA, 20 bp, Artificial Sequence
  Description of Artificial Sequence: Synthetic oligonucleotide
  Target: LAMA2; (-) strand; PAM type: NRG; PAM sequence: GAG
cctaaaaattagacagatat

SEQ ID NO: 86136 - DNA, 20 bp, Artificial Sequence
  Description of Artificial Sequence: Synthetic oligonucleotide
  Target: LAMA2; (-) strand; PAM type: NRG; PAM sequence: CAG
aaaataccctaaaaattaga

SEQ ID NO: 86137 - DNA, 20 bp, Artificial Sequence
  Description of Artificial Sequence: Synthetic oligonucleotide
  Target: LAMA2; (-) strand; PAM type: NRG; PAM sequence: TAG
tatcaaaataccctaaaaat

SEQ ID NO: 86138 - DNA, 20 bp, Artificial Sequence
  Description of Artificial Sequence: Synthetic oligonucleotide
  Target: LAMA2; (-) strand; PAM type: NRG; PAM sequence: CAG
ctaagacaggtcctgacagt

SEQ ID NO: 86139 - DNA, 20 bp, Artificial Sequence
  Description of Artificial Sequence: Synthetic oligonucleotide
  Target: LAMA2; (-) strand; PAM type: NRG; PAM sequence: CAG
atctctaagacaggtcctga

SEQ ID NO: 86140 - DNA, 20 bp, Artificial Sequence
  Description of Artificial Sequence: Synthetic oligonucleotide
  Target: LAMA2; (-) strand; PAM type: NRG; PAM sequence: AGG
taccagatcatctctaagac

SEQ ID NO: 86141 - DNA, 20 bp, Artificial Sequence
  Description of Artificial Sequence: Synthetic oligonucleotide
  Target: LAMA2; (-) strand; PAM type: NRG; PAM sequence: CAG
ctaccagatcatctctaaga

SEQ ID NO: 86142 - DNA, 20 bp, Artificial Sequence
  Description of Artificial Sequence: Synthetic oligonucleotide
  Target: LAMA2; (-) strand; PAM type: NRG; PAM sequence: AAG
tgtcctaccagatcatctct

SEQ ID NO: 86143 - DNA, 20 bp, Artificial Sequence
  Description of Artificial Sequence: Synthetic oligonucleotide
  Target: LAMA2; (-) strand; PAM type: NRG; PAM sequence: CAG
aaagccatttactgtcctac

SEQ ID NO: 86144 - DNA, 20 bp, Artificial Sequence
  Description of Artificial Sequence: Synthetic oligonucleotide
  Target: LAMA2; (-) strand; PAM type: NRG; PAM sequence: AAG
cagatgaaaactggaaagaa

SEQ ID NO: 86145 - DNA, 20 bp, Artificial Sequence
  Description of Artificial Sequence: Synthetic oligonucleotide
  Target: LAMA2; (-) strand; PAM type: NRG; PAM sequence: AAG
agtcccagatgaaaactgga

SEQ ID NO: 86146 - DNA, 20 bp, Artificial Sequence
  Description of Artificial Sequence: Synthetic oligonucleotide
  Target: LAMA2; (-) strand; PAM type: NRG; PAM sequence: TGG
acccagtcccagatgaaaac

SEQ ID NO: 86147 - DNA, 20 bp, Artificial Sequence
  Description of Artificial Sequence: Synthetic oligonucleotide
  Target: LAMA2; (-) strand; PAM type: NRG; PAM sequence: CAG
gatcacttcaaacccagtcc

SEQ ID NO: 86148 - DNA, 20 bp, Artificial Sequence
  Description of Artificial Sequence: Synthetic oligonucleotide
  Target: LAMA2; (-) strand; PAM type: NRG; PAM sequence: CAG
gctgatgatcacttcaaacc

SEQ ID NO: 86149 - DNA, 20 bp, Artificial Sequence
  Description of Artificial Sequence: Synthetic oligonucleotide
  Target: LAMA2; (-) strand; PAM type: NRG; PAM sequence: AGG
gacttatttccagaacactg

SEQ ID NO: 86150 - DNA, 20 bp, Artificial Sequence
  Description of Artificial Sequence: Synthetic oligonucleotide
  Target: LAMA2; (-) strand; PAM type: NRG; PAM sequence: GAG
tgacttatttccagaacact

SEQ ID NO: 86151 - DNA, 20 bp, Artificial Sequence
  Description of Artificial Sequence: Synthetic oligonucleotide
  Target: LAMA2; (-) strand; PAM type: NRG; PAM sequence: CAG
cattataaatgacttatttc

SEQ ID NO: 86152 - DNA, 20 bp, Artificial Sequence
  Description of Artificial Sequence: Synthetic oligonucleotide
  Target: LAMA2; (-) strand; PAM type: NRG; PAM sequence: CAG
ttttgtctgtgggttatttc

SEQ ID NO: 86153 - DNA, 20 bp, Artificial Sequence
  Description of Artificial Sequence: Synthetic oligonucleotide
  Target: LAMA2; (-) strand; PAM type: NRG; PAM sequence: GGG
ttgcaaagctttttgtctgt

SEQ ID NO: 86154 - DNA, 20 bp, Artificial Sequence
  Description of Artificial Sequence: Synthetic oligonucleotide
  Target: LAMA2; (-) strand; PAM type: NRG; PAM sequence: TGG
cttgcaaagctttttgtctg

SEQ ID NO: 86155 - DNA, 20 bp, Artificial Sequence
  Description of Artificial Sequence: Synthetic oligonucleotide
  Target: LAMA2; (-) strand; PAM type: NRG; PAM sequence: AAG
gggaacttcaatggcttgca

SEQ ID NO: 86156 - DNA, 20 bp, Artificial Sequence
  Description of Artificial Sequence: Synthetic oligonucleotide
  Target: LAMA2; (-) strand; PAM type: NRG; PAM sequence: TGG
atggcctaggggaacttcaa

SEQ ID NO: 86157 - DNA, 20 bp, Artificial Sequence
  Description of Artificial Sequence: Synthetic oligonucleotide
  Target: LAMA2; (-) strand; PAM type: NRG; PAM sequence: GGG
taaggcagtaaatggcctag

SEQ ID NO: 86158 - DNA, 20 bp, Artificial Sequence
  Description of Artificial Sequence: Synthetic oligonucleotide
  Target: LAMA2; (-) strand; PAM type: NRG; PAM sequence: GGG
ttaaggcagtaaatggccta

SEQ ID NO: 86159 - DNA, 20 bp, Artificial Sequence
  Description of Artificial Sequence: Synthetic oligonucleotide
  Target: LAMA2; (-) strand; PAM type: NRG; PAM sequence: AGG
cttaaggcagtaaatggcct

SEQ ID NO: 86160 - DNA, 20 bp, Artificial Sequence
  Description of Artificial Sequence: Synthetic oligonucleotide
  Target: LAMA2; (-) strand; PAM type: NRG; PAM sequence: TAG
gcttaaggcagtaaatggcc

SEQ ID NO: 86161 - DNA, 20 bp, Artificial Sequence
  Description of Artificial Sequence: Synthetic oligonucleotide
  Target: LAMA2; (-) strand; PAM type: NRG; PAM sequence: TGG
aacgagcttaaggcagtaaa

SEQ ID NO: 86162 - DNA, 20 bp, Artificial Sequence
  Description of Artificial Sequence: Synthetic oligonucleotide
  Target: LAMA2; (-) strand; PAM type: NRG; PAM sequence: CAG
gagtaaaaacgagcttaagg

SEQ ID NO: 86163 - DNA, 20 bp, Artificial Sequence
  Description of Artificial Sequence: Synthetic oligonucleotide
  Target: LAMA2; (-) strand; PAM type: NRG; PAM sequence: AGG
tatgagtaaaaacgagctta

SEQ ID NO: 86164 - DNA, 20 bp, Artificial Sequence
  Description of Artificial Sequence: Synthetic oligonucleotide
  Target: LAMA2; (-) strand; PAM type: NRG; PAM sequence: AAG
gtatgagtaaaaacgagctt

SEQ ID NO: 86165 - DNA, 20 bp, Artificial Sequence
  Description of Artificial Sequence: Synthetic oligonucleotide
  Target: LAMA2; (-) strand; PAM type: NRG; PAM sequence: GAG
cctgcagtatgagtaaaaac

SEQ ID NO: 86166 - DNA, 20 bp, Artificial Sequence
  Description of Artificial Sequence: Synthetic oligonucleotide
  Target: LAMA2; (-) strand; PAM type: NRG; PAM sequence: GAG
tcttttttttcctgcagtat

SEQ ID NO: 86167 - DNA, 20 bp, Artificial Sequence
  Description of Artificial Sequence: Synthetic oligonucleotide
  Target: LAMA2; (-) strand; PAM type: NRG; PAM sequence: CAG
actcactcttttttttcctg

SEQ ID NO: 86168 - DNA, 20 bp, Artificial Sequence
  Description of Artificial Sequence: Synthetic oligonucleotide
  Target: LAMA2; (-) strand; PAM type: NRG; PAM sequence: AAG
aatttaaaattatgtgatat

SEQ ID NO: 86169 - DNA, 20 bp, Artificial Sequence
  Description of Artificial Sequence: Synthetic oligonucleotide
  Target: LAMA2; (-) strand; PAM type: NRG; PAM sequence: AAG
tgaacaaaaaaagcaaaata

SEQ ID NO: 86170 - DNA, 20 bp, Artificial Sequence
  Description of Artificial Sequence: Synthetic oligonucleotide
  Target: LAMA2; (-) strand; PAM type: NRG; PAM sequence: AAG
gtacttgtcttgaacaaaaa

SEQ ID NO: 86171 - DNA, 20 bp, Artificial Sequence
  Description of Artificial Sequence: Synthetic oligonucleotide
  Target: LAMA2; (-) strand; PAM type: NRG; PAM sequence: TAG
atcaagagcagacttaagat

SEQ ID NO: 86172 - DNA, 20 bp, Artificial Sequence
  Description of Artificial Sequence: Synthetic oligonucleotide
  Target: LAMA2; (-) strand; PAM type: NRG; PAM sequence: AAG
ttcggatcaagagcagactt

SEQ ID NO: 86173 - DNA, 20 bp, Artificial Sequence
  Description of Artificial Sequence: Synthetic oligonucleotide
  Target: LAMA2; (-) strand; PAM type: NRG; PAM sequence: CAG
aaagagtttcggatcaagag

SEQ ID NO: 86174 - DNA, 20 bp, Artificial Sequence
  Description of Artificial Sequence: Synthetic oligonucleotide
  Target: LAMA2; (-) strand; PAM type: NRG; PAM sequence: GAG
tcaaaagagtttcggatcaa

SEQ ID NO: 86175 - DNA, 20 bp, Artificial Sequence
  Description of Artificial Sequence: Synthetic oligonucleotide
  Target: LAMA2; (-) strand; PAM type: NRG; PAM sequence: AAG
tttcaaaagagtttcggatc

SEQ ID NO: 86176 - DNA, 20 bp, Artificial Sequence
  Description of Artificial Sequence: Synthetic oligonucleotide
  Target: LAMA2; (-) strand; PAM type: NRG; PAM sequence: CGG
gtaaagtttcaaaagagttt

SEQ ID NO: 86177 - DNA, 20 bp, Artificial Sequence
  Description of Artificial Sequence: Synthetic oligonucleotide
  Target: LAMA2; (-) strand; PAM type: NRG; PAM sequence: GAG
ttctaggtaaagtttcaaaa

SEQ ID NO: 86178 - DNA, 20 bp, Artificial Sequence
  Description of Artificial Sequence: Synthetic oligonucleotide
  Target: LAMA2; (-) strand; PAM type: NRG; PAM sequence: AAG
ttttctaggtaaagtttcaa

SEQ ID NO: 86179 - DNA, 20 bp, Artificial Sequence
  Description of Artificial Sequence: Synthetic oligonucleotide
  Target: LAMA2; (-) strand; PAM type: NRG; PAM sequence: AAG
gctctatcattttctaggta

SEQ ID NO: 86180 - DNA, 20 bp, Artificial Sequence
  Description of Artificial Sequence: Synthetic oligonucleotide
  Target: LAMA2; (-) strand; PAM type: NRG; PAM sequence: AGG
aaattgctctatcattttct

SEQ ID NO: 86181 - DNA, 20 bp, Artificial Sequence
  Description of Artificial Sequence: Synthetic oligonucleotide
  Target: LAMA2; (-) strand; PAM type: NRG; PAM sequence: TAG
taaattgctctatcattttc

SEQ ID NO: 86182 - DNA, 20 bp, Artificial Sequence
  Description of Artificial Sequence: Synthetic oligonucleotide
  Target: LAMA2; (-) strand; PAM type: NRG; PAM sequence: GAG
ccaaatctctgctagattgt

SEQ ID NO: 86183 - DNA, 20 bp, Artificial Sequence
  Description of Artificial Sequence: Synthetic oligonucleotide
  Target: LAMA2; (-) strand; PAM type: NRG; PAM sequence: TAG
atcaccctccaaatctctgc

SEQ ID NO: 86184 - DNA, 20 bp, Artificial Sequence
  Description of Artificial Sequence: Synthetic oligonucleotide
  Target: LAMA2; (-) strand; PAM type: NRG; PAM sequence: AAG
cagaaattatttcttgtgtt

SEQ ID NO: 86185 - DNA, 20 bp, Artificial Sequence
  Description of Artificial Sequence: Synthetic oligonucleotide
  Target: LAMA2; (-) strand; PAM type: NRG; PAM sequence: CAG
agctcatgagctttgtacaa

SEQ ID NO: 86186 - DNA, 20 bp, Artificial Sequence
  Description of Artificial Sequence: Synthetic oligonucleotide
  Target: LAMA2; (-) strand; PAM type: NRG; PAM sequence: GAG
tcaccatgcatgaagctcat

SEQ ID NO: 86187 - DNA, 20 bp, Artificial Sequence
  Description of Artificial Sequence: Synthetic oligonucleotide
  Target: LAMA2; (-) strand; PAM type: NRG; PAM sequence: AAG
aatatctttcaccatgcatg

SEQ ID NO: 86188 - DNA, 20 bp, Artificial Sequence
  Description of Artificial Sequence: Synthetic oligonucleotide
  Target: LAMA2; (-) strand; PAM type: NRG; PAM sequence: TAG
tgcatagttaacattttctt

SEQ ID NO: 86189 - DNA, 20 bp, Artificial Sequence
  Description of Artificial Sequence: Synthetic oligonucleotide
  Target: LAMA2; (-) strand; PAM type: NRG; PAM sequence: TAG
cacgagtttcattccctgca

SEQ ID NO: 86190 - DNA, 20 bp, Artificial Sequence
  Description of Artificial Sequence: Synthetic oligonucleotide
  Target: LAMA2; (-) strand; PAM type: NRG; PAM sequence: GAG
ttatgggatcaagctgtcac

SEQ ID NO: 86191 - DNA, 20 bp, Artificial Sequence
  Description of Artificial Sequence: Synthetic oligonucleotide
  Target: LAMA2; (-) strand; PAM type: NRG; PAM sequence: AAG
ttgctgagttttatgggatc

SEQ ID NO: 86192 - DNA, 20 bp, Artificial Sequence
  Description of Artificial Sequence: Synthetic oligonucleotide
  Target: LAMA2; (-) strand; PAM type: NRG; PAM sequence: GGG
tcatccttgctgagttttat

SEQ ID NO: 86193 - DNA, 20 bp, Artificial Sequence
  Description of Artificial Sequence: Synthetic oligonucleotide
  Target: LAMA2; (-) strand; PAM type: NRG; PAM sequence: TGG
ctcatccttgctgagtttta

SEQ ID NO: 86194 - DNA, 20 bp, Artificial Sequence
  Description of Artificial Sequence: Synthetic oligonucleotide
  Target: LAMA2; (-) strand; PAM type: NRG; PAM sequence: GAG
agtcaaacctcatccttgct

SEQ ID NO: 86195 - DNA, 20 bp, Artificial Sequence
  Description of Artificial Sequence: Synthetic oligonucleotide
  Target: LAMA2; (-) strand; PAM type: NRG; PAM sequence: GAG
ctatataaatcagggatgca

SEQ ID NO: 86196 - DNA, 20 bp, Artificial Sequence
  Description of Artificial Sequence: Synthetic oligonucleotide
  Target: LAMA2; (-) strand; PAM type: NRG; PAM sequence: CAG
tactatataaatcagggatg

SEQ ID NO: 86197 - DNA, 20 bp, Artificial Sequence
  Description of Artificial Sequence: Synthetic oligonucleotide
  Target: LAMA2; (-) strand; PAM type: NRG; PAM sequence: GGG
atactgtactatataaatca

SEQ ID NO: 86198 - DNA, 20 bp, Artificial Sequence
  Description of Artificial Sequence: Synthetic oligonucleotide
  Target: LAMA2; (-) strand; PAM type: NRG; PAM sequence: AGG
catactgtactatataaatc

SEQ ID NO: 86199 - DNA, 20 bp, Artificial Sequence
  Description of Artificial Sequence: Synthetic oligonucleotide
  Target: LAMA2; (-) strand; PAM type: NRG; PAM sequence: CAG
acatactgtactatataaat

SEQ ID NO: 86200 - DNA, 20 bp, Artificial Sequence
  Description of Artificial Sequence: Synthetic oligonucleotide
  Target: LAMA2; (-) strand; PAM type: NRG; PAM sequence: TGG
ttttgctgaaccccttaacc

SEQ ID NO: 86201 - DNA, 20 bp, Artificial Sequence
  Description of Artificial Sequence: Synthetic oligonucleotide
  Target: LAMA2; (-) strand; PAM type: NRG; PAM sequence: CAG
ttttaaaggagttaatttaa

SEQ ID NO: 86202 - DNA, 20 bp, Artificial Sequence
  Description of Artificial Sequence: Synthetic oligonucleotide
  Target: LAMA2; (-) strand; PAM type: NRG; PAM sequence: GAG
caataactagatttttaaag

SEQ ID NO: 86203 - DNA, 20 bp, Artificial Sequence
  Description of Artificial Sequence: Synthetic oligonucleotide
  Target: LAMA2; (-) strand; PAM type: NRG; PAM sequence: AGG
agcaataactagatttttaa

SEQ ID NO: 86204 - DNA, 20 bp, Artificial Sequence
  Description of Artificial Sequence: Synthetic oligonucleotide
  Target: LAMA2; (-) strand; PAM type: NRG; PAM sequence: AAG
tagcaataactagattttta

SEQ ID NO: 86205 - DNA, 20 bp, Artificial Sequence
  Description of Artificial Sequence: Synthetic oligonucleotide
  Target: LAMA2; (-) strand; PAM type: NRG; PAM sequence: TAG
gagactttcatagcaataac

SEQ ID NO: 86206 - DNA, 20 bp, Artificial Sequence
  Description of Artificial Sequence: Synthetic oligonucleotide
  Target: LAMA2; (-) strand; PAM type: NRG; PAM sequence: TAG
ccgcacttgagagactttca

SEQ ID NO: 86207 - DNA, 20 bp, Artificial Sequence
  Description of Artificial Sequence: Synthetic oligonucleotide
  Target: LAMA2; (-) strand; PAM type: NRG; PAM sequence: GAG
agcctgagcaccgcacttga

SEQ ID NO: 86208 - DNA, 20 bp, Artificial Sequence
  Description of Artificial Sequence: Synthetic oligonucleotide
  Target: LAMA2; (-) strand; PAM type: NRG; PAM sequence: GAG
aaagcctgagcaccgcactt

SEQ ID NO: 86209 - DNA, 20 bp, Artificial Sequence
  Description of Artificial Sequence: Synthetic oligonucleotide
  Target: LAMA2; (-) strand; PAM type: NRG; PAM sequence: GAG
tgactgatgcaaaaaagcct

SEQ ID NO: 86210 - DNA, 20 bp, Artificial Sequence
  Description of Artificial Sequence: Synthetic oligonucleotide
  Target: LAMA2; (-) strand; PAM type: NRG; PAM sequence: AAG
tccagatgactgatgcaaaa

SEQ ID NO: 86211 - DNA, 20 bp, Artificial Sequence
  Description of Artificial Sequence: Synthetic oligonucleotide
  Target: LAMA2; (-) strand; PAM type: NRG; PAM sequence: CAG
aacattttaaataaagactc

SEQ ID NO: 86212 - DNA, 20 bp, Artificial Sequence
  Description of Artificial Sequence: Synthetic oligonucleotide
  Target: LAMA2; (-) strand; PAM type: NRG; PAM sequence: AAG
aataataaacattttaaata

SEQ ID NO: 86213 - DNA, 20 bp, Artificial Sequence
  Description of Artificial Sequence: Synthetic oligonucleotide
  Target: LAMA2; (-) strand; PAM type: NRG; PAM sequence: CGG
caggcgtgagccaccgcgcc

SEQ ID NO: 86214 - DNA, 20 bp, Artificial Sequence
  Description of Artificial Sequence: Synthetic oligonucleotide
  Target: LAMA2; (-) strand; PAM type: NRG; PAM sequence: GAG
agtgctgggattacaggcgt

SEQ ID NO: 86215 - DNA, 20 bp, Artificial Sequence
  Description of Artificial Sequence: Synthetic oligonucleotide
  Target: LAMA2; (-) strand; PAM type: NRG; PAM sequence: AGG
tcccaaagtgctgggattac

SEQ ID NO: 86216 - DNA, 20 bp, Artificial Sequence
  Description of Artificial Sequence: Synthetic oligonucleotide
  Target: LAMA2; (-) strand; PAM type: NRG; PAM sequence: CAG
ctcccaaagtgctgggatta

SEQ ID NO: 86217 - DNA, 20 bp, Artificial Sequence
  Description of Artificial Sequence: Synthetic oligonucleotide
  Target: LAMA2; (-) strand; PAM type: NRG; PAM sequence: GGG
cctcagcctcccaaagtgct

SEQ ID NO: 86218 - DNA, 20 bp, Artificial Sequence
  Description of Artificial Sequence: Synthetic oligonucleotide
  Target: LAMA2; (-) strand; PAM type: NRG; PAM sequence: TGG
gcctcagcctcccaaagtgc

SEQ ID NO: 86219 - DNA, 20 bp, Artificial Sequence
  Description of Artificial Sequence: Synthetic oligonucleotide
  Target: LAMA2; (-) strand; PAM type: NRG; PAM sequence: AAG
ccgcccgcctcagcctccca

SEQ ID NO: 86220 - DNA, 20 bp, Artificial Sequence
  Description of Artificial Sequence: Synthetic oligonucleotide
  Target: LAMA2; (-) strand; PAM type: NRG; PAM sequence: CAG
acctcgttatccgcccgcct

SEQ ID NO: 86221 - DNA, 20 bp, Artificial Sequence
  Description of Artificial Sequence: Synthetic oligonucleotide
  Target: LAMA2; (-) strand; PAM type: NRG; PAM sequence: TGG
tttcatcgtgttagccagga

SEQ ID NO: 86222 - DNA, 20 bp, Artificial Sequence
  Description of Artificial Sequence: Synthetic oligonucleotide
  Target: LAMA2; (-) strand; PAM type: NRG; PAM sequence: AGG
gggatttcatcgtgttagcc

SEQ ID NO: 86223 - DNA, 20 bp, Artificial Sequence
  Description of Artificial Sequence: Synthetic oligonucleotide
  Target: LAMA2; (-) strand; PAM type: NRG; PAM sequence: CAG
tgggatttcatcgtgttagc

SEQ ID NO: 86224 - DNA, 20 bp, Artificial Sequence
  Description of Artificial Sequence: Synthetic oligonucleotide
  Target: LAMA2; (-) strand; PAM type: NRG; PAM sequence: TAG
gagatgggatttcatcgtgt

SEQ ID NO: 86225 - DNA, 20 bp, Artificial Sequence
  Description of Artificial Sequence: Synthetic oligonucleotide
  Target: LAMA2; (-) strand; PAM type: NRG; PAM sequence: GGG
tatgtatatttagtagagat

SEQ ID NO: 86226 - DNA, 20 bp, Artificial Sequence
  Description of Artificial Sequence: Synthetic oligonucleotide
  Target: LAMA2; (-) strand; PAM type: NRG; PAM sequence: TGG
ttatgtatatttagtagaga

SEQ ID NO: 86227 - DNA, 20 bp, Artificial Sequence
  Description of Artificial Sequence: Synthetic oligonucleotide
  Target: LAMA2; (-) strand; PAM type: NRG; PAM sequence: GAG
atttttatgtatatttagta

SEQ ID NO: 86228 - DNA, 20 bp, Artificial Sequence
  Description of Artificial Sequence: Synthetic oligonucleotide
  Target: LAMA2; (-) strand; PAM type: NRG; PAM sequence: TAG
taatttttatgtatatttag

SEQ ID NO: 86229 - DNA, 20 bp, Artificial Sequence
  Description of Artificial Sequence: Synthetic oligonucleotide
  Target: LAMA2; (-) strand; PAM type: NRG; PAM sequence: TAG
ggctaatttttatgtatatt

SEQ ID NO: 86230 - DNA, 20 bp, Artificial Sequence
  Description of Artificial Sequence: Synthetic oligonucleotide
  Target: LAMA2; (-) strand; PAM type: NRG; PAM sequence: TGG
caggtgcccgctaccctgcc

SEQ ID NO: 86231 - DNA, 20 bp, Artificial Sequence
  Description of Artificial Sequence: Synthetic oligonucleotide
  Target: LAMA2; (-) strand; PAM type: NRG; PAM sequence: AGG
tcccgagtagctgggattac

SEQ ID NO: 86232 - DNA, 20 bp, Artificial Sequence
  Description of Artificial Sequence: Synthetic oligonucleotide
  Target: LAMA2; (-) strand; PAM type: NRG; PAM sequence: CAG
ctcccgagtagctgggatta

SEQ ID NO: 86233 - DNA, 20 bp, Artificial Sequence
  Description of Artificial Sequence: Synthetic oligonucleotide
  Target: LAMA2; (-) strand; PAM type: NRG; PAM sequence: GGG
cctcagcctcccgagtagct

SEQ ID NO: 86234 - DNA, 20 bp, Artificial Sequence
  Description of Artificial Sequence: Synthetic oligonucleotide
  Target: LAMA2; (-) strand; PAM type: NRG; PAM sequence: TGG
gcctcagcctcccgagtagc

SEQ ID NO: 86235 - DNA, 20 bp, Artificial Sequence
  Description of Artificial Sequence: Synthetic oligonucleotide
  Target: LAMA2; (-) strand; PAM type: NRG; PAM sequence: TAG
tcctgcctcagcctcccgag

SEQ ID NO: 86236 - DNA, 20 bp, Artificial Sequence
  Description of Artificial Sequence: Synthetic oligonucleotide
  Target: LAMA2; (-) strand; PAM type: NRG; PAM sequence: GAG
ttctcctgcctcagcctccc

SEQ ID NO: 86237 - DNA, 20 bp, Artificial Sequence
  Description of Artificial Sequence: Synthetic oligonucleotide
  Target: LAMA2; (-) strand; PAM type: NRG; PAM sequence: CAG
ttcacgtcattctcctgcct

SEQ ID NO: 86238 - DNA, 20 bp, Artificial Sequence
  Description of Artificial Sequence: Synthetic oligonucleotide
  Target: LAMA2; (-) strand; PAM type: NRG; PAM sequence: CGG
tcactgcaagctccacctcc

SEQ ID NO: 86239 - DNA, 20 bp, Artificial Sequence
  Description of Artificial Sequence: Synthetic oligonucleotide
  Target: LAMA2; (-) strand; PAM type: NRG; PAM sequence: AAG
gcgcgatcacggctcactgc

SEQ ID NO: 86240 - DNA, 20 bp, Artificial Sequence
  Description of Artificial Sequence: Synthetic oligonucleotide
  Target: LAMA2; (-) strand; PAM type: NRG; PAM sequence: CGG
ggagtgcagtggcgcgatca

SEQ ID NO: 86241 - DNA, 20 bp, Artificial Sequence
  Description of Artificial Sequence: Synthetic oligonucleotide
  Target: LAMA2; (-) strand; PAM type: NRG; PAM sequence: TGG
tcgcccgggctggagtgcag

SEQ ID NO: 86242 - DNA, 20 bp, Artificial Sequence
  Description of Artificial Sequence: Synthetic oligonucleotide
  Target: LAMA2; (-) strand; PAM type: NRG; PAM sequence: CAG
ctgtcgcccgggctggagtg

SEQ ID NO: 86243 - DNA, 20 bp, Artificial Sequence
  Description of Artificial Sequence: Synthetic oligonucleotide
  Target: LAMA2; (-) strand; PAM type: NRG; PAM sequence: GAG
tcgctctgtcgcccgggctg

SEQ ID NO: 86244 - DNA, 20 bp, Artificial Sequence
  Description of Artificial Sequence: Synthetic oligonucleotide
  Target: LAMA2; (-) strand; PAM type: NRG; PAM sequence: TGG
tctcgctctgtcgcccgggc

SEQ ID NO: 86245 - DNA, 20 bp, Artificial Sequence
  Description of Artificial Sequence: Synthetic oligonucleotide
  Target: LAMA2; (-) strand; PAM type: NRG; PAM sequence: GGG
ggagtctcgctctgtcgccc

SEQ ID NO: 86246 - DNA, 20 bp, Artificial Sequence
  Description of Artificial Sequence: Synthetic oligonucleotide
  Target: LAMA2; (-) strand; PAM type: NRG; PAM sequence: CGG
tggagtctcgctctgtcgcc

SEQ ID NO: 86247 - DNA, 20 bp, Artificial Sequence
  Description of Artificial Sequence: Synthetic oligonucleotide
  Target: LAMA2; (-) strand; PAM type: NRG; PAM sequence: GAG
ttttttttttttttgagatg

SEQ ID NO: 86248 - DNA, 20 bp, Artificial Sequence
  Description of Artificial Sequence: Synthetic oligonucleotide
  Target: LAMA2; (-) strand; PAM type: NRG; PAM sequence: TGG
ttttttttttttttttgaga

SEQ ID NO: 86249 - DNA, 20 bp, Artificial Sequence
  Description of Artificial Sequence: Synthetic oligonucleotide
  Target: LAMA2; (-) strand; PAM type: NRG; PAM sequence: GAG
tttttttttttttttttttt

SEQ ID NO: 86250 - DNA, 20 bp, Artificial Sequence
  Description of Artificial Sequence: Synthetic oligonucleotide
  Target: LAMA2; (-) strand; PAM type: NRG; PAM sequence: TAG
gaatccagagtaagggtcaa

SEQ ID NO: 86251 - DNA, 20 bp, Artificial Sequence
  Description of Artificial Sequence: Synthetic oligonucleotide
  Target: LAMA2; (-) strand; PAM type: NRG; PAM sequence: GGG
gataagtgaatccagagtaa

SEQ ID NO: 86252 - DNA, 20 bp, Artificial Sequence
  Description of Artificial Sequence: Synthetic oligonucleotide
  Target: LAMA2; (-) strand; PAM type: NRG; PAM sequence: AGG
ggataagtgaatccagagta

SEQ ID NO: 86253 - DNA, 20 bp, Artificial Sequence
  Description of Artificial Sequence: Synthetic oligonucleotide
  Target: LAMA2; (-) strand; PAM type: NRG; PAM sequence: AAG
tggataagtgaatccagagt

SEQ ID NO: 86254 - DNA, 20 bp, Artificial Sequence
  Description of Artificial Sequence: Synthetic oligonucleotide
  Target: LAMA2; (-) strand; PAM type: NRG; PAM sequence: GAG
cttctggataagtgaatcca

SEQ ID NO: 86255 - DNA, 20 bp, Artificial Sequence
  Description of Artificial Sequence: Synthetic oligonucleotide
  Target: LAMA2; (-) strand; PAM type: NRG; PAM sequence: CAG
atcttctggataagtgaatc

SEQ ID NO: 86256 - DNA, 20 bp, Artificial Sequence
  Description of Artificial Sequence: Synthetic oligonucleotide
  Target: LAMA2; (-) strand; PAM type: NRG; PAM sequence: AAG
tttccccagatcttctggat

SEQ ID NO: 86257 - DNA, 20 bp, Artificial Sequence
  Description of Artificial Sequence: Synthetic oligonucleotide
  Target: LAMA2; (-) strand; PAM type: NRG; PAM sequence: TGG
gtagatttccccagatcttc

SEQ ID NO: 86258 - DNA, 20 bp, Artificial Sequence
  Description of Artificial Sequence: Synthetic oligonucleotide
  Target: LAMA2; (-) strand; PAM type: NRG; PAM sequence: CAG
attaaaaacgtagatttccc

SEQ ID NO: 86259 - DNA, 20 bp, Artificial Sequence
  Description of Artificial Sequence: Synthetic oligonucleotide
  Target: LAMA2; (-) strand; PAM type: NRG; PAM sequence: TAG
tggggagctgattaaaaacg

SEQ ID NO: 86260 - DNA, 20 bp, Artificial Sequence
  Description of Artificial Sequence: Synthetic oligonucleotide
  Target: LAMA2; (-) strand; PAM type: NRG; PAM sequence: GAG
tgggtaaataatcacttggg

SEQ ID NO: 86261 - DNA, 20 bp, Artificial Sequence
  Description of Artificial Sequence: Synthetic oligonucleotide
  Target: LAMA2; (-) strand; PAM type: NRG; PAM sequence: GGG
tatgggtaaataatcacttg

SEQ ID NO: 86262 - DNA, 20 bp, Artificial Sequence
  Description of Artificial Sequence: Synthetic oligonucleotide
  Target: LAMA2; (-) strand; PAM type: NRG; PAM sequence: GGG
ttatgggtaaataatcactt

SEQ ID NO: 86263 - DNA, 20 bp, Artificial Sequence
  Description of Artificial Sequence: Synthetic oligonucleotide
  Target: LAMA2; (-) strand; PAM type: NRG; PAM sequence: TGG
cttatgggtaaataatcact

SEQ ID NO: 86264 - DNA, 20 bp, Artificial Sequence
  Description of Artificial Sequence: Synthetic oligonucleotide
  Target: LAMA2; (-) strand; PAM type: NRG; PAM sequence: GGG
agtgccccccaaattcttat

SEQ ID NO: 86265 - DNA, 20 bp, Artificial Sequence
  Description of Artificial Sequence: Synthetic oligonucleotide
  Target: LAMA2; (-) strand; PAM type: NRG; PAM sequence: TGG
gagtgccccccaaattctta

SEQ ID NO: 86266 - DNA, 20 bp, Artificial Sequence
  Description of Artificial Sequence: Synthetic oligonucleotide
  Target: LAMA2; (-) strand; PAM type: NRG; PAM sequence: GAG
ttaaaaaagtagtcataaaa

SEQ ID NO: 86267 - DNA, 20 bp, Artificial Sequence
  Description of Artificial Sequence: Synthetic oligonucleotide
  Target: LAMA2; (-) strand; PAM type: NRG; PAM sequence: AAG
atttaaaaaagtagtcataa

SEQ ID NO: 86268 - DNA, 20 bp, Artificial Sequence
  Description of Artificial Sequence: Synthetic oligonucleotide
  Target: LAMA2; (-) strand; PAM type: NRG; PAM sequence: TAG
tcatcagtaatttaaaaaag

SEQ ID NO: 86269 - DNA, 20 bp, Artificial Sequence
  Description of Artificial Sequence: Synthetic oligonucleotide
  Target: LAMA2; (-) strand; PAM type: NRG; PAM sequence: AAG
taatcatcagtaatttaaaa

SEQ ID NO: 86270 - DNA, 20 bp, Artificial Sequence
  Description of Artificial Sequence: Synthetic oligonucleotide
  Target: LAMA2; (-) strand; PAM type: NRG; PAM sequence: CAG
atctgcagataattaatcat

SEQ ID NO: 86271 - DNA, 20 bp, Artificial Sequence
  Description of Artificial Sequence: Synthetic oligonucleotide
  Target: LAMA2; (-) strand; PAM type: NRG; PAM sequence: CAG
aaagtctagggaactatctg

SEQ ID NO: 86272 - DNA, 20 bp, Artificial Sequence
  Description of Artificial Sequence: Synthetic oligonucleotide
  Target: LAMA2; (-) strand; PAM type: NRG; PAM sequence: GGG
ccttggaaagtcaaagtcta

SEQ ID NO: 86273 - DNA, 20 bp, Artificial Sequence
  Description of Artificial Sequence: Synthetic oligonucleotide
  Target: LAMA2; (-) strand; PAM type: NRG; PAM sequence: AGG
gccttggaaagtcaaagtct

SEQ ID NO: 86274 - DNA, 20 bp, Artificial Sequence
  Description of Artificial Sequence: Synthetic oligonucleotide
  Target: LAMA2; (-) strand; PAM type: NRG; PAM sequence: TAG
agccttggaaagtcaaagtc

SEQ ID NO: 86275 - DNA, 20 bp, Artificial Sequence
  Description of Artificial Sequence: Synthetic oligonucleotide
  Target: LAMA2; (-) strand; PAM type: NRG; PAM sequence: AAG
tttaaagccttggaaagtca

SEQ ID NO: 86276 - DNA, 20 bp, Artificial Sequence
  Description of Artificial Sequence: Synthetic oligonucleotide
  Target: LAMA2; (-) strand; PAM type: NRG; PAM sequence: AAG
tgtttttttaaagccttgga

SEQ ID NO: 86277 - DNA, 20 bp, Artificial Sequence
  Description of Artificial Sequence: Synthetic oligonucleotide
  Target: LAMA2; (-) strand; PAM type: NRG; PAM sequence: TGG
tgtttgtttttttaaagcct

SEQ ID NO: 86278 - DNA, 20 bp, Artificial Sequence
  Description of Artificial Sequence: Synthetic oligonucleotide
  Target: LAMA2; (-) strand; PAM type: NRG; PAM sequence: AAG
tttgtttgtttgttttttta

SEQ ID NO: 86279 - DNA, 20 bp, Artificial Sequence
  Description of Artificial Sequence: Synthetic oligonucleotide
  Target: LAMA2; (-) strand; PAM type: NRG; PAM sequence: AGG
tcagactaaaagcatactgc

SEQ ID NO: 86280 - DNA, 20 bp, Artificial Sequence
  Description of Artificial Sequence: Synthetic oligonucleotide
  Target: LAMA2; (-) strand; PAM type: NRG; PAM sequence: CAG
ttcagactaaaagcatactg

SEQ ID NO: 86281 - DNA, 20 bp, Artificial Sequence
  Description of Artificial Sequence: Synthetic oligonucleotide
  Target: LAMA2; (-) strand; PAM type: NRG; PAM sequence: AAG
aatccctgaattcagactaa

SEQ ID NO: 86282 - DNA, 20 bp, Artificial Sequence
  Description of Artificial Sequence: Synthetic oligonucleotide
  Target: LAMA2; (-) strand; PAM type: NRG; PAM sequence: CAG
agaaagtcaatccctgaatt

SEQ ID NO: 86283 - DNA, 20 bp, Artificial Sequence
  Description of Artificial Sequence: Synthetic oligonucleotide
  Target: LAMA2; (-) strand; PAM type: NRG; PAM sequence: AAG
ggatagactattggataaga

SEQ ID NO: 86284 - DNA, 20 bp, Artificial Sequence
  Description of Artificial Sequence: Synthetic oligonucleotide
  Target: LAMA2; (-) strand; PAM type: NRG; PAM sequence: AAG
tacaggatagactattggat

SEQ ID NO: 86285 - DNA, 20 bp, Artificial Sequence
  Description of Artificial Sequence: Synthetic oligonucleotide
  Target: LAMA2; (-) strand; PAM type: NRG; PAM sequence: TGG
ccttgtacaggatagactat

SEQ ID NO: 86286 - DNA, 20 bp, Artificial Sequence
  Description of Artificial Sequence: Synthetic oligonucleotide
  Target: LAMA2; (-) strand; PAM type: NRG; PAM sequence: TAG
tagggttcccttgtacagga

SEQ ID NO: 86287 - DNA, 20 bp, Artificial Sequence
  Description of Artificial Sequence: Synthetic oligonucleotide
  Target: LAMA2; (-) strand; PAM type: NRG; PAM sequence: AGG
attttagggttcccttgtac

SEQ ID NO: 86288 - DNA, 20 bp, Artificial Sequence
  Description of Artificial Sequence: Synthetic oligonucleotide
  Target: LAMA2; (-) strand; PAM type: NRG; PAM sequence: CAG
tattttagggttcccttgta

SEQ ID NO: 86289 - DNA, 20 bp, Artificial Sequence
  Description of Artificial Sequence: Synthetic oligonucleotide
  Target: LAMA2; (-) strand; PAM type: NRG; PAM sequence: GGG
tggctaacgaggttatttta

SEQ ID NO: 86290 - DNA, 20 bp, Artificial Sequence
  Description of Artificial Sequence: Synthetic oligonucleotide
  Target: LAMA2; (-) strand; PAM type: NRG; PAM sequence: AGG
gtggctaacgaggttatttt

SEQ ID NO: 86291 - DNA, 20 bp, Artificial Sequence
  Description of Artificial Sequence: Synthetic oligonucleotide
  Target: LAMA2; (-) strand; PAM type: NRG; PAM sequence: TAG
ggtggctaacgaggttattt

SEQ ID NO: 86292 - DNA, 20 bp, Artificial Sequence
  Description of Artificial Sequence: Synthetic oligonucleotide
  Target: LAMA2; (-) strand; PAM type: NRG; PAM sequence: AGG
gtctttggtggtggctaacg

SEQ ID NO: 86293 - DNA, 20 bp, Artificial Sequence
  Description of Artificial Sequence: Synthetic oligonucleotide
  Target: LAMA2; (-) strand; PAM type: NRG; PAM sequence: GAG
agtctttggtggtggctaac

SEQ ID NO: 86294 - DNA, 20 bp, Artificial Sequence
  Description of Artificial Sequence: Synthetic oligonucleotide
  Target: LAMA2; (-) strand; PAM type: NRG; PAM sequence: TGG
atttacatagtctttggtgg

SEQ ID NO: 86295 - DNA, 20 bp, Artificial Sequence
  Description of Artificial Sequence: Synthetic oligonucleotide
  Target: LAMA2; (-) strand; PAM type: NRG; PAM sequence: TGG
tgtatttacatagtctttgg

SEQ ID NO: 86296 - DNA, 20 bp, Artificial Sequence
  Description of Artificial Sequence: Synthetic oligonucleotide
  Target: LAMA2; (-) strand; PAM type: NRG; PAM sequence: TGG
atttgtatttacatagtctt

SEQ ID NO: 86297 - DNA, 20 bp, Artificial Sequence
  Description of Artificial Sequence: Synthetic oligonucleotide
  Target: LAMA2; (-) strand; PAM type: NRG; PAM sequence: TAG
taaataaatttgtatttaca

SEQ ID NO: 86298 - DNA, 20 bp, Artificial Sequence
  Description of Artificial Sequence: Synthetic oligonucleotide
  Target: LAMA2; (-) strand; PAM type: NRG; PAM sequence: GAG
tgcgtggttcggtttctaat

SEQ ID NO: 86299 - DNA, 20 bp, Artificial Sequence
  Description of Artificial Sequence: Synthetic oligonucleotide
  Target: LAMA2; (-) strand; PAM type: NRG; PAM sequence: CGG
gtgcgtgcacatgcgtggtt

SEQ ID NO: 86300 - DNA, 20 bp, Artificial Sequence
  Description of Artificial Sequence: Synthetic oligonucleotide
  Target: LAMA2; (-) strand; PAM type: NRG; PAM sequence: TGG
tgtgtgtgcgtgcacatgcg

SEQ ID NO: 86301 - DNA, 20 bp, Artificial Sequence
  Description of Artificial Sequence: Synthetic oligonucleotide
  Target: LAMA2; (-) strand; PAM type: NRG; PAM sequence: TGG
atgtaaatgtgtggttggtg

SEQ ID NO: 86302 - DNA, 20 bp, Artificial Sequence
  Description of Artificial Sequence: Synthetic oligonucleotide
  Target: LAMA2; (-) strand; PAM type: NRG; PAM sequence: TGG
ttccaatgtaaatgtgtggt

SEQ ID NO: 86303 - DNA, 20 bp, Artificial Sequence
  Description of Artificial Sequence: Synthetic oligonucleotide
  Target: LAMA2; (-) strand; PAM type: NRG; PAM sequence: TGG
tttattccaatgtaaatgtg

SEQ ID NO: 86304 - DNA, 20 bp, Artificial Sequence
  Description of Artificial Sequence: Synthetic oligonucleotide
  Target: LAMA2; (-) strand; PAM type: NRG; PAM sequence: AAG
tttaaaaatagctgctttct

SEQ ID NO: 86305 - DNA, 20 bp, Artificial Sequence
  Description of Artificial Sequence: Synthetic oligonucleotide
  Target: LAMA2; (-) strand; PAM type: NRG; PAM sequence: TAG
acttcctgtttctttaaaaa

SEQ ID NO: 86306 - DNA, 20 bp, Artificial Sequence
  Description of Artificial Sequence: Synthetic oligonucleotide
  Target: LAMA2; (-) strand; PAM type: NRG; PAM sequence: TAG
aaattaatggcagtacatgt

SEQ ID NO: 86307 - DNA, 20 bp, Artificial Sequence
  Description of Artificial Sequence: Synthetic oligonucleotide
  Target: LAMA2; (-) strand; PAM type: NRG; PAM sequence: CAG
ctcccattccaaattaatgg

SEQ ID NO: 86308 - DNA, 20 bp, Artificial Sequence
  Description of Artificial Sequence: Synthetic oligonucleotide
  Target: LAMA2; (-) strand; PAM type: NRG; PAM sequence: TGG
tctctcccattccaaattaa

SEQ ID NO: 86309 - DNA, 20 bp, Artificial Sequence
  Description of Artificial Sequence: Synthetic oligonucleotide
  Target: LAMA2; (-) strand; PAM type: NRG; PAM sequence: AAG
cgcaatattctggttctgcc

SEQ ID NO: 86310 - DNA, 20 bp, Artificial Sequence
  Description of Artificial Sequence: Synthetic oligonucleotide
  Target: LAMA2; (-) strand; PAM type: NRG; PAM sequence: TGG
tcaatcctcacgcaatattc

SEQ ID NO: 86311 - DNA, 20 bp, Artificial Sequence
  Description of Artificial Sequence: Synthetic oligonucleotide
  Target: LAMA2; (-) strand; PAM type: NRG; PAM sequence: AAG
agaaactcttctagaatctg

SEQ ID NO: 86312 - DNA, 20 bp, Artificial Sequence
  Description of Artificial Sequence: Synthetic oligonucleotide
  Target: LAMA2; (-) strand; PAM type: NRG; PAM sequence: TAG
gaaagagctagaaactcttc

SEQ ID NO: 86313 - DNA, 20 bp, Artificial Sequence
  Description of Artificial Sequence: Synthetic oligonucleotide
  Target: LAMA2; (-) strand; PAM type: NRG; PAM sequence: TAG
aacacatattcagaaagagc

SEQ ID NO: 86314 - DNA, 20 bp, Artificial Sequence
  Description of Artificial Sequence: Synthetic oligonucleotide
  Target: LAMA2; (-) strand; PAM type: NRG; PAM sequence: GAG
tgttaacacatattcagaaa

SEQ ID NO: 86315 - DNA, 20 bp, Artificial Sequence
  Description of Artificial Sequence: Synthetic oligonucleotide
  Target: LAMA2; (-) strand; PAM type: NRG; PAM sequence: AAG
actgttaacacatattcaga

SEQ ID NO: 86316 - DNA, 20 bp, Artificial Sequence
  Description of Artificial Sequence: Synthetic oligonucleotide
  Target: LAMA2; (-) strand; PAM type: NRG; PAM sequence: CAG
cgaaactgttaacacatatt

SEQ ID NO: 86317 - DNA, 20 bp, Artificial Sequence
  Description of Artificial Sequence: Synthetic oligonucleotide
  Target: LAMA2; (-) strand; PAM type: NRG; PAM sequence: CAG
agtgggtagcagagctcaaa

SEQ ID NO: 86318 - DNA, 20 bp, Artificial Sequence
  Description of Artificial Sequence: Synthetic oligonucleotide
  Target: LAMA2; (-) strand; PAM type: NRG; PAM sequence: GAG
taactggctagtgggtagca

SEQ ID NO: 86319 - DNA, 20 bp, Artificial Sequence
  Description of Artificial Sequence: Synthetic oligonucleotide
  Target: LAMA2; (-) strand; PAM type: NRG; PAM sequence: CAG
tataactggctagtgggtag

SEQ ID NO: 86320 - DNA, 20 bp, Artificial Sequence
  Description of Artificial Sequence: Synthetic oligonucleotide
  Target: LAMA2; (-) strand; PAM type: NRG; PAM sequence: TAG
gtttataactggctagtggg

SEQ ID NO: 86321 - DNA, 20 bp, Artificial Sequence
  Description of Artificial Sequence: Synthetic oligonucleotide
  Target: LAMA2; (-) strand; PAM type: NRG; PAM sequence: GGG
tgtgtttataactggctagt

SEQ ID NO: 86322 - DNA, 20 bp, Artificial Sequence
  Description of Artificial Sequence: Synthetic oligonucleotide
  Target: LAMA2; (-) strand; PAM type: NRG; PAM sequence: TGG
ctgtgtttataactggctag

SEQ ID NO: 86323 - DNA, 20 bp, Artificial Sequence
  Description of Artificial Sequence: Synthetic oligonucleotide
  Target: LAMA2; (-) strand; PAM type: NRG; PAM sequence: TAG
tacctgtgtttataactggc

SEQ ID NO: 86324 - DNA, 20 bp, Artificial Sequence
  Description of Artificial Sequence: Synthetic oligonucleotide
  Target: LAMA2; (-) strand; PAM type: NRG; PAM sequence: TGG
gtcttacctgtgtttataac

SEQ ID NO: 86325 - DNA, 20 bp, Artificial Sequence
  Description of Artificial Sequence: Synthetic oligonucleotide
  Target: LAMA2; (-) strand; PAM type: NRG; PAM sequence: GGG
aacaggccctgtgaagttaa

SEQ ID NO: 86326 - DNA, 20 bp, Artificial Sequence
  Description of Artificial Sequence: Synthetic oligonucleotide
  Target: LAMA2; (-) strand; PAM type: NRG; PAM sequence: AGG
caacaggccctgtgaagtta

SEQ ID NO: 86327 - DNA, 20 bp, Artificial Sequence
  Description of Artificial Sequence: Synthetic oligonucleotide
  Target: LAMA2; (-) strand; PAM type: NRG; PAM sequence: AAG
ccaacaggccctgtgaagtt

SEQ ID NO: 86328 - DNA, 20 bp, Artificial Sequence
  Description of Artificial Sequence: Synthetic oligonucleotide
  Target: LAMA2; (-) strand; PAM type: NRG; PAM sequence: AAG
tcttcccaacaggccctgtg

SEQ ID NO: 86329 - DNA, 20 bp, Artificial Sequence
  Description of Artificial Sequence: Synthetic oligonucleotide
  Target: LAMA2; (-) strand; PAM type: NRG; PAM sequence: AGG
aattataacctcttcccaac

SEQ ID NO: 86330 - DNA, 20 bp, Artificial Sequence
  Description of Artificial Sequence: Synthetic oligonucleotide
  Target: LAMA2; (-) strand; PAM type: NRG; PAM sequence: CAG
aaattataacctcttcccaa

SEQ ID NO: 86331 - DNA, 20 bp, Artificial Sequence
  Description of Artificial Sequence: Synthetic oligonucleotide
  Target: LAMA2; (-) strand; PAM type: NRG; PAM sequence: AGG
taggattttgtttgaaaaac

SEQ ID NO: 86332 - DNA, 20 bp, Artificial Sequence
  Description of Artificial Sequence: Synthetic oligonucleotide
  Target: LAMA2; (-) strand; PAM type: NRG; PAM sequence: CAG
ttaggattttgtttgaaaaa

SEQ ID NO: 86333 - DNA, 20 bp, Artificial Sequence
  Description of Artificial Sequence: Synthetic oligonucleotide
  Target: LAMA2; (-) strand; PAM type: NRG; PAM sequence: AGG
tgtttttgggtgttctaatt

SEQ ID NO: 86334 - DNA, 20 bp, Artificial Sequence
  Description of Artificial Sequence: Synthetic oligonucleotide
  Target: LAMA2; (-) strand; PAM type: NRG; PAM sequence: TAG
ttgtttttgggtgttctaat

SEQ ID NO: 86335 - DNA, 20 bp, Artificial Sequence
  Description of Artificial Sequence: Synthetic oligonucleotide
  Target: LAMA2; (-) strand; PAM type: NRG; PAM sequence: GGG
cctttattttgtttgttttt

SEQ ID NO: 86336 - DNA, 20 bp, Artificial Sequence
  Description of Artificial Sequence: Synthetic oligonucleotide
  Target: LAMA2; (-) strand; PAM type: NRG; PAM sequence: TGG
tcctttattttgtttgtttt

SEQ ID NO: 86337 - DNA, 20 bp, Artificial Sequence
  Description of Artificial Sequence: Synthetic oligonucleotide
  Target: LAMA2; (-) strand; PAM type: NRG; PAM sequence: TGG
tctcatactgtaaccaggac

SEQ ID NO: 86338 - DNA, 20 bp, Artificial Sequence
  Description of Artificial Sequence: Synthetic oligonucleotide
  Target: LAMA2; (-) strand; PAM type: NRG; PAM sequence: AGG
atctgtctcatactgtaacc

SEQ ID NO: 86339 - DNA, 20 bp, Artificial Sequence
  Description of Artificial Sequence: Synthetic oligonucleotide
  Target: LAMA2; (-) strand; PAM type: NRG; PAM sequence: CAG
catctgtctcatactgtaac

SEQ ID NO: 86340 - DNA, 20 bp, Artificial Sequence
  Description of Artificial Sequence: Synthetic oligonucleotide
  Target: LAMA2; (-) strand; PAM type: NRG; PAM sequence: CGG
gttctgttgcccaccgtaac

SEQ ID NO: 86341 - DNA, 20 bp, Artificial Sequence
  Description of Artificial Sequence: Synthetic oligonucleotide
  Target: LAMA2; (-) strand; PAM type: NRG; PAM sequence: CAG
actctgtcgaccactgtagc

SEQ ID NO: 86342 - DNA, 20 bp, Artificial Sequence
  Description of Artificial Sequence: Synthetic oligonucleotide
  Target: LAMA2; (-) strand; PAM type: NRG; PAM sequence: TAG
atgaactctgtcgaccactg

SEQ ID NO: 86343 - DNA, 20 bp, Artificial Sequence
  Description of Artificial Sequence: Synthetic oligonucleotide
  Target: LAMA2; (-) strand; PAM type: NRG; PAM sequence: CAG
ctggccactgtaacaagcac

SEQ ID NO: 86344 - DNA, 20 bp, Artificial Sequence
  Description of Artificial Sequence: Synthetic oligonucleotide
  Target: LAMA2; (-) strand; PAM type: NRG; PAM sequence: AAG
ggcctactggccactgtaac

SEQ ID NO: 86345 - DNA, 20 bp, Artificial Sequence
  Description of Artificial Sequence: Synthetic oligonucleotide
  Target: LAMA2; (-) strand; PAM type: NRG; PAM sequence: TGG
taaccagaaaccaggcctac

SEQ ID NO: 86346 - DNA, 20 bp, Artificial Sequence
  Description of Artificial Sequence: Synthetic oligonucleotide
  Target: LAMA2; (-) strand; PAM type: NRG; PAM sequence: AGG
atgtgctataaccagaaacc

SEQ ID NO: 86347 - DNA, 20 bp, Artificial Sequence
  Description of Artificial Sequence: Synthetic oligonucleotide
  Target: LAMA2; (-) strand; PAM type: NRG; PAM sequence: CAG
catgtgctataaccagaaac

SEQ ID NO: 86348 - DNA, 20 bp, Artificial Sequence
  Description of Artificial Sequence: Synthetic oligonucleotide
  Target: LAMA2; (-) strand; PAM type: NRG; PAM sequence: CAG
actctgccatgtgctataac

SEQ ID NO: 86349 - DNA, 20 bp, Artificial Sequence
  Description of Artificial Sequence: Synthetic oligonucleotide
  Target: LAMA2; (-) strand; PAM type: NRG; PAM sequence: GAG
gtggggacataatgtaggta

SEQ ID NO: 86350 - DNA, 20 bp, Artificial Sequence
  Description of Artificial Sequence: Synthetic oligonucleotide
  Target: LAMA2; (-) strand; PAM type: NRG; PAM sequence: TAG
ccgtggggacataatgtagg

SEQ ID NO: 86351 - DNA, 20 bp, Artificial Sequence
  Description of Artificial Sequence: Synthetic oligonucleotide
  Target: LAMA2; (-) strand; PAM type: NRG; PAM sequence: AGG
aggccgtggggacataatgt

SEQ ID NO: 86352 - DNA, 20 bp, Artificial Sequence
  Description of Artificial Sequence: Synthetic oligonucleotide
  Target: LAMA2; (-) strand; PAM type: NRG; PAM sequence: TAG
gaggccgtggggacataatg

SEQ ID NO: 86353 - DNA, 20 bp, Artificial Sequence
  Description of Artificial Sequence: Synthetic oligonucleotide
  Target: LAMA2; (-) strand; PAM type: NRG; PAM sequence: GGG
aaaccacagatgaggccgtg

SEQ ID NO: 86354 - DNA, 20 bp, Artificial Sequence
  Description of Artificial Sequence: Synthetic oligonucleotide
  Target: LAMA2; (-) strand; PAM type: NRG; PAM sequence: GGG
gaaaccacagatgaggccgt

SEQ ID NO: 86355 - DNA, 20 bp, Artificial Sequence
  Description of Artificial Sequence: Synthetic oligonucleotide
  Target: LAMA2; (-) strand; PAM type: NRG; PAM sequence: TGG
ggaaaccacagatgaggccg

SEQ ID NO: 86356 - DNA, 20 bp, Artificial Sequence
  Description of Artificial Sequence: Synthetic oligonucleotide
  Target: LAMA2; (-) strand; PAM type: NRG; PAM sequence: AGG
ttatggggaaaccacagatg

SEQ ID NO: 86357 - DNA, 20 bp, Artificial Sequence
  Description of Artificial Sequence: Synthetic oligonucleotide
  Target: LAMA2; (-) strand; PAM type: NRG; PAM sequence: GAG
cttatggggaaaccacagat

SEQ ID NO: 86358 - DNA, 20 bp, Artificial Sequence
  Description of Artificial Sequence: Synthetic oligonucleotide
  Target: LAMA2; (-) strand; PAM type: NRG; PAM sequence: CAG
gttttcttatggggaaacca

SEQ ID NO: 86359 - DNA, 20 bp, Artificial Sequence
  Description of Artificial Sequence: Synthetic oligonucleotide
  Target: LAMA2; (-) strand; PAM type: NRG; PAM sequence: GGG
caaaaggtagttttcttatg

SEQ ID NO: 86360 - DNA, 20 bp, Artificial Sequence
  Description of Artificial Sequence: Synthetic oligonucleotide
  Target: LAMA2; (-) strand; PAM type: NRG; PAM sequence: GGG
ccaaaaggtagttttcttat

SEQ ID NO: 86361 - DNA, 20 bp, Artificial Sequence
  Description of Artificial Sequence: Synthetic oligonucleotide
  Target: LAMA2; (-) strand; PAM type: NRG; PAM sequence: TGG
cccaaaaggtagttttctta

SEQ ID NO: 86362 - DNA, 20 bp, Artificial Sequence
  Description of Artificial Sequence: Synthetic oligonucleotide
  Target: LAMA2; (-) strand; PAM type: NRG; PAM sequence: TAG
tatcatgttttcccaaaagg

SEQ ID NO: 86363 - DNA, 20 bp, Artificial Sequence
  Description of Artificial Sequence: Synthetic oligonucleotide
  Target: LAMA2; (-) strand; PAM type: NRG; PAM sequence: AGG
ttgtatcatgttttcccaaa

SEQ ID NO: 86364 - DNA, 20 bp, Artificial Sequence
  Description of Artificial Sequence: Synthetic oligonucleotide
  Target: LAMA2; (-) strand; PAM type: NRG; PAM sequence: AAG
tttgtatcatgttttcccaa

SEQ ID NO: 86365 - DNA, 20 bp, Artificial Sequence
  Description of Artificial Sequence: Synthetic oligonucleotide
  Target: LAMA2; (-) strand; PAM type: NRG; PAM sequence: GAG
ataaaattttaaatctgcag

SEQ ID NO: 86366 - DNA, 20 bp, Artificial Sequence
  Description of Artificial Sequence: Synthetic oligonucleotide
  Target: LAMA2; (-) strand; PAM type: NRG; PAM sequence: AGG
tcataaaattttaaatctgc

SEQ ID NO: 86367 - DNA, 20 bp, Artificial Sequence
  Description of Artificial Sequence: Synthetic oligonucleotide
  Target: LAMA2; (-) strand; PAM type: NRG; PAM sequence: CAG
ttcataaaattttaaatctg

SEQ ID NO: 86368 - DNA, 20 bp, Artificial Sequence
  Description of Artificial Sequence: Synthetic oligonucleotide
  Target: LAMA2; (-) strand; PAM type: NRG; PAM sequence: TGG
actgagtgtaagattatatt

SEQ ID NO: 86369 - DNA, 20 bp, Artificial Sequence
  Description of Artificial Sequence: Synthetic oligonucleotide
  Target: LAMA2; (-) strand; PAM type: NRG; PAM sequence: AAG
attagtagtcaactgagtgt

SEQ ID NO: 86370 - DNA, 20 bp, Artificial Sequence
  Description of Artificial Sequence: Synthetic oligonucleotide
  Target: LAMA2; (-) strand; PAM type: NRG; PAM sequence: GAG
tttattattagtagtcaact

SEQ ID NO: 86371 - DNA, 20 bp, Artificial Sequence
  Description of Artificial Sequence: Synthetic oligonucleotide
  Target: LAMA2; (-) strand; PAM type: NRG; PAM sequence: TAG
gtagggttatttattattag

SEQ ID NO: 86372 - DNA, 20 bp, Artificial Sequence
  Description of Artificial Sequence: Synthetic oligonucleotide
  Target: LAMA2; (-) strand; PAM type: NRG; PAM sequence: TAG
tttgtagggttatttattat

SEQ ID NO: 86373 - DNA, 20 bp, Artificial Sequence
  Description of Artificial Sequence: Synthetic oligonucleotide
  Target: LAMA2; (-) strand; PAM type: NRG; PAM sequence: GGG
tcactttaccatattttgta

SEQ ID NO: 86374 - DNA, 20 bp, Artificial Sequence
  Description of Artificial Sequence: Synthetic oligonucleotide
  Target: LAMA2; (-) strand; PAM type: NRG; PAM sequence: AGG
gtcactttaccatattttgt

SEQ ID NO: 86375 - DNA, 20 bp, Artificial Sequence
  Description of Artificial Sequence: Synthetic oligonucleotide
  Target: LAMA2; (-) strand; PAM type: NRG; PAM sequence: TAG
agtcactttaccatattttg

SEQ ID NO: 86376 - DNA, 20 bp, Artificial Sequence
  Description of Artificial Sequence: Synthetic oligonucleotide
  Target: LAMA2; (-) strand; PAM type: NRG; PAM sequence: GAG
tcttttcaattgttgtcatg

SEQ ID NO: 86377 - DNA, 20 bp, Artificial Sequence
  Description of Artificial Sequence: Synthetic oligonucleotide
  Target: LAMA2; (-) strand; PAM type: NRG; PAM sequence: TGG
tttcttttcaattgttgtca

SEQ ID NO: 86378 - DNA, 20 bp, Artificial Sequence
  Description of Artificial Sequence: Synthetic oligonucleotide
  Target: LAMA2; (-) strand; PAM type: NRG; PAM sequence: GAG
atatggacaatagctcagct

SEQ ID NO: 86379 - DNA, 20 bp, Artificial Sequence
  Description of Artificial Sequence: Synthetic oligonucleotide
  Target: LAMA2; (-) strand; PAM type: NRG; PAM sequence: CAG
tctagatatggacaatagct

SEQ ID NO: 86380 - DNA, 20 bp, Artificial Sequence
  Description of Artificial Sequence: Synthetic oligonucleotide
  Target: LAMA2; (-) strand; PAM type: NRG; PAM sequence: TAG
gtgcatctagatatggacaa

SEQ ID NO: 86381 - DNA, 20 bp, Artificial Sequence
  Description of Artificial Sequence: Synthetic oligonucleotide
  Target: LAMA2; (-) strand; PAM type: NRG; PAM sequence: TGG
atcatcagtgcatctagata

SEQ ID NO: 86382 - DNA, 20 bp, Artificial Sequence
  Description of Artificial Sequence: Synthetic oligonucleotide
  Target: LAMA2; (-) strand; PAM type: NRG; PAM sequence: TAG
ttgtgtatcatcagtgcatc

SEQ ID NO: 86383 - DNA, 20 bp, Artificial Sequence
  Description of Artificial Sequence: Synthetic oligonucleotide
  Target: LAMA2; (-) strand; PAM type: NRG; PAM sequence: CAG
tggctgggtttgtgtatcat

SEQ ID NO: 86384 - DNA, 20 bp, Artificial Sequence
  Description of Artificial Sequence: Synthetic oligonucleotide
  Target: LAMA2; (-) strand; PAM type: NRG; PAM sequence: GGG
atgccacattttctgtggct

SEQ ID NO: 86385 - DNA, 20 bp, Artificial Sequence
  Description of Artificial Sequence: Synthetic oligonucleotide
  Target: LAMA2; (-) strand; PAM type: NRG; PAM sequence: TGG
catgccacattttctgtggc

SEQ ID NO: 86386 - DNA, 20 bp, Artificial Sequence
  Description of Artificial Sequence: Synthetic oligonucleotide
  Target: LAMA2; (-) strand; PAM type: NRG; PAM sequence: TGG
gacacatgccacattttctg

SEQ ID NO: 86387 - DNA, 20 bp, Artificial Sequence
  Description of Artificial Sequence: Synthetic oligonucleotide
  Target: LAMA2; (-) strand; PAM type: NRG; PAM sequence: TAG
ttcagtgtcttgaatcattc

SEQ ID NO: 86388 - DNA, 20 bp, Artificial Sequence
  Description of Artificial Sequence: Synthetic oligonucleotide
  Target: LAMA2; (-) strand; PAM type: NRG; PAM sequence: CAG
tagcttgaacactggctgtt

SEQ ID NO: 86389 - DNA, 20 bp, Artificial Sequence
  Description of Artificial Sequence: Synthetic oligonucleotide
  Target: LAMA2; (-) strand; PAM type: NRG; PAM sequence: TGG
aaattacgtagcttgaacac

SEQ ID NO: 86390 - DNA, 20 bp, Artificial Sequence
  Description of Artificial Sequence: Synthetic oligonucleotide
  Target: LAMA2; (-) strand; PAM type: NRG; PAM sequence: TAG
aatataggtaagaaattacg

SEQ ID NO: 86391 - DNA, 20 bp, Artificial Sequence
  Description of Artificial Sequence: Synthetic oligonucleotide
  Target: LAMA2; (-) strand; PAM type: NRG; PAM sequence: AAG
ttttttcctgtaatataggt

SEQ ID NO: 86392 - DNA, 20 bp, Artificial Sequence
  Description of Artificial Sequence: Synthetic oligonucleotide
  Target: LAMA2; (-) strand; PAM type: NRG; PAM sequence: AGG
atggttttttcctgtaatat

SEQ ID NO: 86393 - DNA, 20 bp, Artificial Sequence
  Description of Artificial Sequence: Synthetic oligonucleotide
  Target: LAMA2; (-) strand; PAM type: NRG; PAM sequence: TAG
gatggttttttcctgtaata

SEQ ID NO: 86394 - DNA, 20 bp, Artificial Sequence
  Description of Artificial Sequence: Synthetic oligonucleotide
  Target: LAMA2; (-) strand; PAM type: NRG; PAM sequence: TGG
gaggtagaaaaagagttaga

SEQ ID NO: 86395 - DNA, 20 bp, Artificial Sequence
  Description of Artificial Sequence: Synthetic oligonucleotide
  Target: LAMA2; (-) strand; PAM type: NRG; PAM sequence: TAG
gttggaggtagaaaaagagt

SEQ ID NO: 86396 - DNA, 20 bp, Artificial Sequence
  Description of Artificial Sequence: Synthetic oligonucleotide
  Target: LAMA2; (-) strand; PAM type: NRG; PAM sequence: GAG
ggaggttggaggtagaaaaa

SEQ ID NO: 86397 - DNA, 20 bp, Artificial Sequence
  Description of Artificial Sequence: Synthetic oligonucleotide
  Target: LAMA2; (-) strand; PAM type: NRG; PAM sequence: AAG
agggaggttggaggtagaaa

SEQ ID NO: 86398 - DNA, 20 bp, Artificial Sequence
  Description of Artificial Sequence: Synthetic oligonucleotide
  Target: LAMA2; (-) strand; PAM type: NRG; PAM sequence: TAG
cagaggagggaggttggagg

SEQ ID NO: 86399 - DNA, 20 bp, Artificial Sequence
  Description of Artificial Sequence: Synthetic oligonucleotide
  Target: LAMA2; (-) strand; PAM type: NRG; PAM sequence: AGG
tttcagaggagggaggttgg

SEQ ID NO: 86400 - DNA, 20 bp, Artificial Sequence
  Description of Artificial Sequence: Synthetic oligonucleotide
  Target: LAMA2; (-) strand; PAM type: NRG; PAM sequence: GAG
atttcagaggagggaggttg

SEQ ID NO: 86401 - DNA, 20 bp, Artificial Sequence
  Description of Artificial Sequence: Synthetic oligonucleotide
  Target: LAMA2; (-) strand; PAM type: NRG; PAM sequence: TGG
acatttcagaggagggaggt

SEQ ID NO: 86402 - DNA, 20 bp, Artificial Sequence
  Description of Artificial Sequence: Synthetic oligonucleotide
  Target: LAMA2; (-) strand; PAM type: NRG; PAM sequence: AGG
aataacatttcagaggaggg

SEQ ID NO: 86403 - DNA, 20 bp, Artificial Sequence
  Description of Artificial Sequence: Synthetic oligonucleotide
  Target: LAMA2; (-) strand; PAM type: NRG; PAM sequence: GAG
gaataacatttcagaggagg

SEQ ID NO: 86404 - DNA, 20 bp, Artificial Sequence
  Description of Artificial Sequence: Synthetic oligonucleotide
  Target: LAMA2; (-) strand; PAM type: NRG; PAM sequence: GGG
gtgaataacatttcagagga

SEQ ID NO: 86405 - DNA, 20 bp, Artificial Sequence
  Description of Artificial Sequence: Synthetic oligonucleotide
  Target: LAMA2; (-) strand; PAM type: NRG; PAM sequence: AGG
tgtgaataacatttcagagg

SEQ ID NO: 86406 - DNA, 20 bp, Artificial Sequence
  Description of Artificial Sequence: Synthetic oligonucleotide
  Target: LAMA2; (-) strand; PAM type: NRG; PAM sequence: GAG
atgtgaataacatttcagag

SEQ ID NO: 86407 - DNA, 20 bp, Artificial Sequence
  Description of Artificial Sequence: Synthetic oligonucleotide
  Target: LAMA2; (-) strand; PAM type: NRG; PAM sequence: AGG
gtatgtgaataacatttcag

SEQ ID NO: 86408 - DNA, 20 bp, Artificial Sequence
  Description of Artificial Sequence: Synthetic oligonucleotide
  Target: LAMA2; (-) strand; PAM type: NRG; PAM sequence: GAG
ggtatgtgaataacatttca

SEQ ID NO: 86409 - DNA, 20 bp, Artificial Sequence
  Description of Artificial Sequence: Synthetic oligonucleotide
  Target: LAMA2; (-) strand; PAM type: NRG; PAM sequence: CAG
caggtatgtgaataacattt

SEQ ID NO: 86410 - DNA, 20 bp, Artificial Sequence
  Description of Artificial Sequence: Synthetic oligonucleotide
  Target: LAMA2; (-) strand; PAM type: NRG; PAM sequence: AGG
tataaagattcttctccacc

SEQ ID NO: 86411 - DNA, 20 bp, Artificial Sequence
  Description of Artificial Sequence: Synthetic oligonucleotide
  Target: LAMA2; (-) strand; PAM type: NRG; PAM sequence: CAG
ttataaagattcttctccac

SEQ ID NO: 86412 - DNA, 20 bp, Artificial Sequence
  Description of Artificial Sequence: Synthetic oligonucleotide
  Target: LAMA2; (-) strand; PAM type: NRG; PAM sequence: AAG
aatcaaatttgagttttata

SEQ ID NO: 86413 - DNA, 20 bp, Artificial Sequence
  Description of Artificial Sequence: Synthetic oligonucleotide
  Target: LAMA2; (-) strand; PAM type: NRG; PAM sequence: GAG
ggactaaggtaatcaaattt

SEQ ID NO: 86414 - DNA, 20 bp, Artificial Sequence
  Description of Artificial Sequence: Synthetic oligonucleotide
  Target: LAMA2; (-) strand; PAM type: NRG; PAM sequence: AGG
aaattttaagcagaggacta

SEQ ID NO: 86415 - DNA, 20 bp, Artificial Sequence
  Description of Artificial Sequence: Synthetic oligonucleotide
  Target: LAMA2; (-) strand; PAM type: NRG; PAM sequence: AAG
gaaattttaagcagaggact

SEQ ID NO: 86416 - DNA, 20 bp, Artificial Sequence
  Description of Artificial Sequence: Synthetic oligonucleotide
  Target: LAMA2; (-) strand; PAM type: NRG; PAM sequence: AGG
gacactgaaattttaagcag

SEQ ID NO: 86417 - DNA, 20 bp, Artificial Sequence
  Description of Artificial Sequence: Synthetic oligonucleotide
  Target: LAMA2; (-) strand; PAM type: NRG; PAM sequence: GAG
agacactgaaattttaagca

SEQ ID NO: 86418 - DNA, 20 bp, Artificial Sequence
  Description of Artificial Sequence: Synthetic oligonucleotide
  Target: LAMA2; (-) strand; PAM type: NRG; PAM sequence: CAG
aaagacactgaaattttaag

SEQ ID NO: 86419 - DNA, 20 bp, Artificial Sequence
  Description of Artificial Sequence: Synthetic oligonucleotide
  Target: LAMA2; (-) strand; PAM type: NRG; PAM sequence: AAG
ttgaaagacactgaaatttt

SEQ ID NO: 86420 - DNA, 20 bp, Artificial Sequence
  Description of Artificial Sequence: Synthetic oligonucleotide
  Target: LAMA2; (-) strand; PAM type: NRG; PAM sequence: AAG
ggtctctgagctttcattga

SEQ ID NO: 86421 - DNA, 20 bp, Artificial Sequence
  Description of Artificial Sequence: Synthetic oligonucleotide
  Target: LAMA2; (-) strand; PAM type: NRG; PAM sequence: GAG
ataagtccagaatggtctct

SEQ ID NO: 86422 - DNA, 20 bp, Artificial Sequence
  Description of Artificial Sequence: Synthetic oligonucleotide
  Target: LAMA2; (-) strand; PAM type: NRG; PAM sequence: TGG
agggagttataagtccagaa

SEQ ID NO: 86423 - DNA, 20 bp, Artificial Sequence
  Description of Artificial Sequence: Synthetic oligonucleotide
  Target: LAMA2; (-) strand; PAM type: NRG; PAM sequence: CAG
ctgcaagggagttataagtc

SEQ ID NO: 86424 - DNA, 20 bp, Artificial Sequence
  Description of Artificial Sequence: Synthetic oligonucleotide
  Target: LAMA2; (-) strand; PAM type: NRG; PAM sequence: AAG
ctgagctgcaagggagttat

SEQ ID NO: 86425 - DNA, 20 bp, Artificial Sequence
  Description of Artificial Sequence: Synthetic oligonucleotide
  Target: LAMA2; (-) strand; PAM type: NRG; PAM sequence: GAG
gtcccttctgagctgcaagg

SEQ ID NO: 86426 - DNA, 20 bp, Artificial Sequence
  Description of Artificial Sequence: Synthetic oligonucleotide
  Target: LAMA2; (-) strand; PAM type: NRG; PAM sequence: GGG
gggtcccttctgagctgcaa

SEQ ID NO: 86427 - DNA, 20 bp, Artificial Sequence
  Description of Artificial Sequence: Synthetic oligonucleotide
  Target: LAMA2; (-) strand; PAM type: NRG; PAM sequence: AGG
cgggtcccttctgagctgca

SEQ ID NO: 86428 - DNA, 20 bp, Artificial Sequence
  Description of Artificial Sequence: Synthetic oligonucleotide
  Target: LAMA2; (-) strand; PAM type: NRG; PAM sequence: AAG
acgggtcccttctgagctgc

SEQ ID NO: 86429 - DNA, 20 bp, Artificial Sequence
  Description of Artificial Sequence: Synthetic oligonucleotide
  Target: LAMA2; (-) strand; PAM type: NRG; PAM sequence: GAG
ctggaccacgggtcccttct

SEQ ID NO: 86430 - DNA, 20 bp, Artificial Sequence
  Description of Artificial Sequence: Synthetic oligonucleotide
  Target: LAMA2; (-) strand; PAM type: NRG; PAM sequence: GGG
cattttaattactggaccac

SEQ ID NO: 86431 - DNA, 20 bp, Artificial Sequence
  Description of Artificial Sequence: Synthetic oligonucleotide
  Target: LAMA2; (-) strand; PAM type: NRG; PAM sequence: CGG
gcattttaattactggacca

SEQ ID NO: 86432 - DNA, 20 bp, Artificial Sequence
  Description of Artificial Sequence: Synthetic oligonucleotide
  Target: LAMA2; (-) strand; PAM type: NRG; PAM sequence: TGG
accacgggcattttaattac

SEQ ID NO: 86433 - DNA, 20 bp, Artificial Sequence
  Description of Artificial Sequence: Synthetic oligonucleotide
  Target: LAMA2; (-) strand; PAM type: NRG; PAM sequence: GGG
gagcattgaacacttaccac

SEQ ID NO: 86434 - DNA, 20 bp, Artificial Sequence
  Description of Artificial Sequence: Synthetic oligonucleotide
  Target: LAMA2; (-) strand; PAM type: NRG; PAM sequence: CGG
agagcattgaacacttacca

SEQ ID NO: 86435 - DNA, 20 bp, Artificial Sequence
  Description of Artificial Sequence: Synthetic oligonucleotide
  Target: LAMA2; (-) strand; PAM type: NRG; PAM sequence: GAG
gtgagaagaaaagcatgaga

SEQ ID NO: 86436 - DNA, 20 bp, Artificial Sequence
  Description of Artificial Sequence: Synthetic oligonucleotide
  Target: LAMA2; (-) strand; PAM type: NRG; PAM sequence: GAG
ttgtgagaagaaaagcatga

SEQ ID NO: 86437 - DNA, 20 bp, Artificial Sequence
  Description of Artificial Sequence: Synthetic oligonucleotide
  Target: LAMA2; (-) strand; PAM type: NRG; PAM sequence: GAG
cattgtgagaagaaaagcat

SEQ ID NO: 86438 - DNA, 20 bp, Artificial Sequence
  Description of Artificial Sequence: Synthetic oligonucleotide
  Target: LAMA2; (-) strand; PAM type: NRG; PAM sequence: AAG
aagggacattgtgagaagaa

SEQ ID NO: 86439 - DNA, 20 bp, Artificial Sequence
  Description of Artificial Sequence: Synthetic oligonucleotide
  Target: LAMA2; (-) strand; PAM type: NRG; PAM sequence: AAG
tactgaagggacattgtgag

SEQ ID NO: 86440 - DNA, 20 bp, Artificial Sequence
  Description of Artificial Sequence: Synthetic oligonucleotide
  Target: LAMA2; (-) strand; PAM type: NRG; PAM sequence: GAG
ccgtactgaagggacattgt

SEQ ID NO: 86441 - DNA, 20 bp, Artificial Sequence
  Description of Artificial Sequence: Synthetic oligonucleotide
  Target: LAMA2; (-) strand; PAM type: NRG; PAM sequence: GGG
gaaagaaatcccgtactgaa

SEQ ID NO: 86442 - DNA, 20 bp, Artificial Sequence
  Description of Artificial Sequence: Synthetic oligonucleotide
  Target: LAMA2; (-) strand; PAM type: NRG; PAM sequence: AGG
agaaagaaatcccgtactga

SEQ ID NO: 86443 - DNA, 20 bp, Artificial Sequence
  Description of Artificial Sequence: Synthetic oligonucleotide
  Target: LAMA2; (-) strand; PAM type: NRG; PAM sequence: AAG
tagaaagaaatcccgtactg

SEQ ID NO: 86444 - DNA, 20 bp, Artificial Sequence
  Description of Artificial Sequence: Synthetic oligonucleotide
  Target: LAMA2; (-) strand; PAM type: NRG; PAM sequence: AAG
ttactcaggaaaatggtaga

SEQ ID NO: 86445 - DNA, 20 bp, Artificial Sequence
  Description of Artificial Sequence: Synthetic oligonucleotide
  Target: LAMA2; (-) strand; PAM type: NRG; PAM sequence: TAG
gtaattactcaggaaaatgg

SEQ ID NO: 86446 - DNA, 20 bp, Artificial Sequence
  Description of Artificial Sequence: Synthetic oligonucleotide
  Target: LAMA2; (-) strand; PAM type: NRG; PAM sequence: TGG
aaggtaattactcaggaaaa

SEQ ID NO: 86447 - DNA, 20 bp, Artificial Sequence
  Description of Artificial Sequence: Synthetic oligonucleotide
  Target: LAMA2; (-) strand; PAM type: NRG; PAM sequence: AGG
tgactagaaggtaattactc

SEQ ID NO: 86448 - DNA, 20 bp, Artificial Sequence
  Description of Artificial Sequence: Synthetic oligonucleotide
  Target: LAMA2; (-) strand; PAM type: NRG; PAM sequence: CAG
atgactagaaggtaattact

SEQ ID NO: 86449 - DNA, 20 bp, Artificial Sequence
  Description of Artificial Sequence: Synthetic oligonucleotide
  Target: LAMA2; (-) strand; PAM type: NRG; PAM sequence: AGG
ctttttgaatgatgactaga

SEQ ID NO: 86450 - DNA, 20 bp, Artificial Sequence
  Description of Artificial Sequence: Synthetic oligonucleotide
  Target: LAMA2; (-) strand; PAM type: NRG; PAM sequence: AAG
gctttttgaatgatgactag

SEQ ID NO: 86451 - DNA, 20 bp, Artificial Sequence
  Description of Artificial Sequence: Synthetic oligonucleotide
  Target: LAMA2; (-) strand; PAM type: NRG; PAM sequence: TAG
aatgctttttgaatgatgac

SEQ ID NO: 86452 - DNA, 20 bp, Artificial Sequence
  Description of Artificial Sequence: Synthetic oligonucleotide
  Target: LAMA2; (-) strand; PAM type: NRG; PAM sequence: TAG
gtgattagaaacatttccta

SEQ ID NO: 86453 - DNA, 20 bp, Artificial Sequence
  Description of Artificial Sequence: Synthetic oligonucleotide
  Target: LAMA2; (-) strand; PAM type: NRG; PAM sequence: TAG
gagctgggggatagggtgat

SEQ ID NO: 86454 - DNA, 20 bp, Artificial Sequence
  Description of Artificial Sequence: Synthetic oligonucleotide
  Target: LAMA2; (-) strand; PAM type: NRG; PAM sequence: GGG
tcagccagagctgggggata

SEQ ID NO: 86455 - DNA, 20 bp, Artificial Sequence
  Description of Artificial Sequence: Synthetic oligonucleotide
  Target: LAMA2; (-) strand; PAM type: NRG; PAM sequence: AGG
ctcagccagagctgggggat

SEQ ID NO: 86456 - DNA, 20 bp, Artificial Sequence
  Description of Artificial Sequence: Synthetic oligonucleotide
  Target: LAMA2; (-) strand; PAM type: NRG; PAM sequence: TAG
actcagccagagctggggga

SEQ ID NO: 86457 - DNA, 20 bp, Artificial Sequence
  Description of Artificial Sequence: Synthetic oligonucleotide
  Target: LAMA2; (-) strand; PAM type: NRG; PAM sequence: GGG
cctaactcagccagagctgg

SEQ ID NO: 86458 - DNA, 20 bp, Artificial Sequence
  Description of Artificial Sequence: Synthetic oligonucleotide
  Target: LAMA2; (-) strand; PAM type: NRG; PAM sequence: GGG
gcctaactcagccagagctg

SEQ ID NO: 86459 - DNA, 20 bp, Artificial Sequence
  Description of Artificial Sequence: Synthetic oligonucleotide
  Target: LAMA2; (-) strand; PAM type: NRG; PAM sequence: GGG
ggcctaactcagccagagct

SEQ ID NO: 86460 - DNA, 20 bp, Artificial Sequence
  Description of Artificial Sequence: Synthetic oligonucleotide
  Target: LAMA2; (-) strand; PAM type: NRG; PAM sequence: TGG
aggcctaactcagccagagc

SEQ ID NO: 86461 - DNA, 20 bp, Artificial Sequence
  Description of Artificial Sequence: Synthetic oligonucleotide
  Target: LAMA2; (-) strand; PAM type: NRG; PAM sequence: GAG
gagaaggcctaactcagcca

SEQ ID NO: 86462 - DNA, 20 bp, Artificial Sequence
  Description of Artificial Sequence: Synthetic oligonucleotide
  Target: LAMA2; (-) strand; PAM type: NRG; PAM sequence: CAG
cagagaaggcctaactcagc

SEQ ID NO: 86463 - DNA, 20 bp, Artificial Sequence
  Description of Artificial Sequence: Synthetic oligonucleotide
  Target: LAMA2; (-) strand; PAM type: NRG; PAM sequence: CAG
tgtgcagagaaggcctaact

SEQ ID NO: 86464 - DNA, 20 bp, Artificial Sequence
  Description of Artificial Sequence: Synthetic oligonucleotide
  Target: LAMA2; (-) strand; PAM type: NRG; PAM sequence: AGG
tcatgggaattgtgcagaga

SEQ ID NO: 86465 - DNA, 20 bp, Artificial Sequence
  Description of Artificial Sequence: Synthetic oligonucleotide
  Target: LAMA2; (-) strand; PAM type: NRG; PAM sequence: AAG
ttcatgggaattgtgcagag

SEQ ID NO: 86466 - DNA, 20 bp, Artificial Sequence
  Description of Artificial Sequence: Synthetic oligonucleotide
  Target: LAMA2; (-) strand; PAM type: NRG; PAM sequence: GAG
gctttcatgggaattgtgca

SEQ ID NO: 86467 - DNA, 20 bp, Artificial Sequence
  Description of Artificial Sequence: Synthetic oligonucleotide
  Target: LAMA2; (-) strand; PAM type: NRG; PAM sequence: CAG
gtgctttcatgggaattgtg

SEQ ID NO: 86468 - DNA, 20 bp, Artificial Sequence
  Description of Artificial Sequence: Synthetic oligonucleotide
  Target: LAMA2; (-) strand; PAM type: NRG; PAM sequence: GGG
tgggtggtaggtgctttcat

SEQ ID NO: 86469 - DNA, 20 bp, Artificial Sequence
  Description of Artificial Sequence: Synthetic oligonucleotide
  Target: LAMA2; (-) strand; PAM type: NRG; PAM sequence: TGG
ctgggtggtaggtgctttca

SEQ ID NO: 86470 - DNA, 20 bp, Artificial Sequence
  Description of Artificial Sequence: Synthetic oligonucleotide
  Target: LAMA2; (-) strand; PAM type: NRG; PAM sequence: AGG
atttctgcctgctgggtggt

SEQ ID NO: 86471 - DNA, 20 bp, Artificial Sequence
  Description of Artificial Sequence: Synthetic oligonucleotide
  Target: LAMA2; (-) strand; PAM type: NRG; PAM sequence: TAG
tatttctgcctgctgggtgg

SEQ ID NO: 86472 - DNA, 20 bp, Artificial Sequence
  Description of Artificial Sequence: Synthetic oligonucleotide
  Target: LAMA2; (-) strand; PAM type: NRG; PAM sequence: TGG
ggatatttctgcctgctggg

SEQ ID NO: 86473 - DNA, 20 bp, Artificial Sequence
  Description of Artificial Sequence: Synthetic oligonucleotide
  Target: LAMA2; (-) strand; PAM type: NRG; PAM sequence: GGG
gagggatatttctgcctgct

SEQ ID NO: 86474 - DNA, 20 bp, Artificial Sequence
  Description of Artificial Sequence: Synthetic oligonucleotide
  Target: LAMA2; (-) strand; PAM type: NRG; PAM sequence: TGG
agagggatatttctgcctgc

SEQ ID NO: 86475 - DNA, 20 bp, Artificial Sequence
  Description of Artificial Sequence: Synthetic oligonucleotide
  Target: LAMA2; (-) strand; PAM type: NRG; PAM sequence: GGG
tttagtgagaaagtcaaaga

SEQ ID NO: 86476 - DNA, 20 bp, Artificial Sequence
  Description of Artificial Sequence: Synthetic oligonucleotide
  Target: LAMA2; (-) strand; PAM type: NRG; PAM sequence: AGG
gtttagtgagaaagtcaaag

SEQ ID NO: 86477 - DNA, 20 bp, Artificial Sequence
  Description of Artificial Sequence: Synthetic oligonucleotide
  Target: LAMA2; (-) strand; PAM type: NRG; PAM sequence: GAG
agtttagtgagaaagtcaaa

SEQ ID NO: 86478 - DNA, 20 bp, Artificial Sequence
  Description of Artificial Sequence: Synthetic oligonucleotide
  Target: LAMA2; (-) strand; PAM type: NRG; PAM sequence: AAG
gcagtttagtgagaaagtca

SEQ ID NO: 86479 - DNA, 20 bp, Artificial Sequence
  Description of Artificial Sequence: Synthetic oligonucleotide
  Target: LAMA2; (-) strand; PAM type: NRG; PAM sequence: AAG
gaatttgcagtttagtgaga

SEQ ID NO: 86480 - DNA, 20 bp, Artificial Sequence
  Description of Artificial Sequence: Synthetic oligonucleotide
  Target: LAMA2; (-) strand; PAM type: NRG; PAM sequence: GAG
ccaggaatttgcagtttagt

SEQ ID NO: 86481 - DNA, 20 bp, Artificial Sequence
  Description of Artificial Sequence: Synthetic oligonucleotide
  Target: LAMA2; (-) strand; PAM type: NRG; PAM sequence: TAG
ctcaccaggaatttgcagtt

SEQ ID NO: 86482 - DNA, 20 bp, Artificial Sequence
  Description of Artificial Sequence: Synthetic oligonucleotide
  Target: LAMA2; (-) strand; PAM type: NRG; PAM sequence: CAG
tgtcactcaccaggaatttg

SEQ ID NO: 86483 - DNA, 20 bp, Artificial Sequence
  Description of Artificial Sequence: Synthetic oligonucleotide
  Target: LAMA2; (-) strand; PAM type: NRG; PAM sequence: AGG
gaatccagttgtcactcacc

SEQ ID NO: 86484 - DNA, 20 bp, Artificial Sequence
  Description of Artificial Sequence: Synthetic oligonucleotide
  Target: LAMA2; (-) strand; PAM type: NRG; PAM sequence: CAG
agaatccagttgtcactcac

SEQ ID NO: 86485 - DNA, 20 bp, Artificial Sequence
  Description of Artificial Sequence: Synthetic oligonucleotide
  Target: LAMA2; (-) strand; PAM type: NRG; PAM sequence: CAG
gttagaagaagaatagaatc

SEQ ID NO: 86486 - DNA, 20 bp, Artificial Sequence
  Description of Artificial Sequence: Synthetic oligonucleotide
  Target: LAMA2; (-) strand; PAM type: NRG; PAM sequence: TAG
tctagaggttagaagaagaa

SEQ ID NO: 86487 - DNA, 20 bp, Artificial Sequence
  Description of Artificial Sequence: Synthetic oligonucleotide
  Target: LAMA2; (-) strand; PAM type: NRG; PAM sequence: AAG
taggttctagaggttagaag

SEQ ID NO: 86488 - DNA, 20 bp, Artificial Sequence
  Description of Artificial Sequence: Synthetic oligonucleotide
  Target: LAMA2; (-) strand; PAM type: NRG; PAM sequence: AAG
tgctaggttctagaggttag

SEQ ID NO: 86489 - DNA, 20 bp, Artificial Sequence
  Description of Artificial Sequence: Synthetic oligonucleotide
  Target: LAMA2; (-) strand; PAM type: NRG; PAM sequence: TAG
atctgctaggttctagaggt

SEQ ID NO: 86490 - DNA, 20 bp, Artificial Sequence
  Description of Artificial Sequence: Synthetic oligonucleotide
  Target: LAMA2; (-) strand; PAM type: NRG; PAM sequence: AGG
agcaatctgctaggttctag

SEQ ID NO: 86491 - DNA, 20 bp, Artificial Sequence
  Description of Artificial Sequence: Synthetic oligonucleotide
  Target: LAMA2; (-) strand; PAM type: NRG; PAM sequence: GAG
aagcaatctgctaggttcta

SEQ ID NO: 86492 - DNA, 20 bp, Artificial Sequence
  Description of Artificial Sequence: Synthetic oligonucleotide
  Target: LAMA2; (-) strand; PAM type: NRG; PAM sequence: TAG
caaagcaatctgctaggttc

SEQ ID NO: 86493 - DNA, 20 bp, Artificial Sequence
  Description of Artificial Sequence: Synthetic oligonucleotide
  Target: LAMA2; (-) strand; PAM type: NRG; PAM sequence: AGG
ggtctccaaagcaatctgct

SEQ ID NO: 86494 - DNA, 20 bp, Artificial Sequence
  Description of Artificial Sequence: Synthetic oligonucleotide
  Target: LAMA2; (-) strand; PAM type: NRG; PAM sequence: TAG
aggtctccaaagcaatctgc

SEQ ID NO: 86495 - DNA, 20 bp, Artificial Sequence
  Description of Artificial Sequence: Synthetic oligonucleotide
  Target: LAMA2; (-) strand; PAM type: NRG; PAM sequence: AAG
ttaagttcctaaggtctcca

SEQ ID NO: 86496 - DNA, 20 bp, Artificial Sequence
  Description of Artificial Sequence: Synthetic oligonucleotide
  Target: LAMA2; (-) strand; PAM type: NRG; PAM sequence: AGG
aaagaattattaagttccta

SEQ ID NO: 86497 - DNA, 20 bp, Artificial Sequence
  Description of Artificial Sequence: Synthetic oligonucleotide
  Target: LAMA2; (-) strand; PAM type: NRG; PAM sequence: AAG
caaagaattattaagttcct

SEQ ID NO: 86498 - DNA, 20 bp, Artificial Sequence
  Description of Artificial Sequence: Synthetic oligonucleotide
  Target: LAMA2; (-) strand; PAM type: NRG; PAM sequence: AAG
tcactcaacaaagaattatt

SEQ ID NO: 86499 - DNA, 20 bp, Artificial Sequence
  Description of Artificial Sequence: Synthetic oligonucleotide
  Target: LAMA2; (-) strand; PAM type: NRG; PAM sequence: AAG
atccctttattcactcaaca

SEQ ID NO: 86500 - DNA, 20 bp, Artificial Sequence
  Description of Artificial Sequence: Synthetic oligonucleotide
  Target: LAMA2; (-) strand; PAM type: NRG; PAM sequence: AAG
aaataactgctgtccacaaa

SEQ ID NO: 86501 - DNA, 20 bp, Artificial Sequence
  Description of Artificial Sequence: Synthetic oligonucleotide
  Target: LAMA2; (-) strand; PAM type: NRG; PAM sequence: CAG
tctcttatcttttgtgtaaa

SEQ ID NO: 86502 - DNA, 20 bp, Artificial Sequence
  Description of Artificial Sequence: Synthetic oligonucleotide
  Target: LAMA2; (-) strand; PAM type: NRG; PAM sequence: AGG
tttcaaattttttaaaattt

SEQ ID NO: 86503 - DNA, 20 bp, Artificial Sequence
  Description of Artificial Sequence: Synthetic oligonucleotide
  Target: LAMA2; (-) strand; PAM type: NRG; PAM sequence: TAG
gtttcaaattttttaaaatt

SEQ ID NO: 86504 - DNA, 20 bp, Artificial Sequence
  Description of Artificial Sequence: Synthetic oligonucleotide
  Target: LAMA2; (-) strand; PAM type: NRG; PAM sequence: AAG
ttaaatccaacactttttgt

SEQ ID NO: 86505 - DNA, 20 bp, Artificial Sequence
  Description of Artificial Sequence: Synthetic oligonucleotide
  Target: LAMA2; (-) strand; PAM type: NRG; PAM sequence: AGG
tcggaaatccagacagacaa

SEQ ID NO: 86506 - DNA, 20 bp, Artificial Sequence
  Description of Artificial Sequence: Synthetic oligonucleotide
  Target: LAMA2; (-) strand; PAM type: NRG; PAM sequence: AAG
ttcggaaatccagacagaca

SEQ ID NO: 86507 - DNA, 20 bp, Artificial Sequence
  Description of Artificial Sequence: Synthetic oligonucleotide
  Target: LAMA2; (-) strand; PAM type: NRG; PAM sequence: CAG
aaatatttcggaaatccaga

SEQ ID NO: 86508 - DNA, 20 bp, Artificial Sequence
  Description of Artificial Sequence: Synthetic oligonucleotide
  Target: LAMA2; (-) strand; PAM type: NRG; PAM sequence: CAG
ttaaaaatatttcggaaatc

SEQ ID NO: 86509 - DNA, 20 bp, Artificial Sequence
  Description of Artificial Sequence: Synthetic oligonucleotide
  Target: LAMA2; (-) strand; PAM type: NRG; PAM sequence: CGG
aaaatcttttaaaaatattt

SEQ ID NO: 86510 - DNA, 20 bp, Artificial Sequence
  Description of Artificial Sequence: Synthetic oligonucleotide
  Target: LAMA2; (-) strand; PAM type: NRG; PAM sequence: CAG
gatgaggccttaaatgatcc

SEQ ID NO: 86511 - DNA, 20 bp, Artificial Sequence
  Description of Artificial Sequence: Synthetic oligonucleotide
  Target: LAMA2; (-) strand; PAM type: NRG; PAM sequence: AGG
cccttggttctgaacagatg

SEQ ID NO: 86512 - DNA, 20 bp, Artificial Sequence
  Description of Artificial Sequence: Synthetic oligonucleotide
  Target: LAMA2; (-) strand; PAM type: NRG; PAM sequence: GAG
ccccttggttctgaacagat

SEQ ID NO: 86513 - DNA, 20 bp, Artificial Sequence
  Description of Artificial Sequence: Synthetic oligonucleotide
  Target: LAMA2; (-) strand; PAM type: NRG; PAM sequence: CAG
gtcctccccttggttctgaa

SEQ ID NO: 86514 - DNA, 20 bp, Artificial Sequence
  Description of Artificial Sequence: Synthetic oligonucleotide
  Target: LAMA2; (-) strand; PAM type: NRG; PAM sequence: TGG
tactatttcggtcctcccct

SEQ ID NO: 86515 - DNA, 20 bp, Artificial Sequence
  Description of Artificial Sequence: Synthetic oligonucleotide
  Target: LAMA2; (-) strand; PAM type: NRG; PAM sequence: CGG
aagaatttggcatactattt

SEQ ID NO: 86516 - DNA, 20 bp, Artificial Sequence
  Description of Artificial Sequence: Synthetic oligonucleotide
  Target: LAMA2; (-) strand; PAM type: NRG; PAM sequence: TGG
ttgagggctggaaaagaatt

SEQ ID NO: 86517 - DNA, 20 bp, Artificial Sequence
  Description of Artificial Sequence: Synthetic oligonucleotide
  Target: LAMA2; (-) strand; PAM type: NRG; PAM sequence: AAG
ataaaatttgagggctggaa

SEQ ID NO: 86518 - DNA, 20 bp, Artificial Sequence
  Description of Artificial Sequence: Synthetic oligonucleotide
  Target: LAMA2; (-) strand; PAM type: NRG; PAM sequence: TGG
ggctcataaaatttgagggc

SEQ ID NO: 86519 - DNA, 20 bp, Artificial Sequence
  Description of Artificial Sequence: Synthetic oligonucleotide
  Target: LAMA2; (-) strand; PAM type: NRG; PAM sequence: GGG
ctcaggctcataaaatttga

SEQ ID NO: 86520 - DNA, 20 bp, Artificial Sequence
  Description of Artificial Sequence: Synthetic oligonucleotide
  Target: LAMA2; (-) strand; PAM type: NRG; PAM sequence: AGG
actcaggctcataaaatttg

SEQ ID NO: 86521 - DNA, 20 bp, Artificial Sequence
  Description of Artificial Sequence: Synthetic oligonucleotide
  Target: LAMA2; (-) strand; PAM type: NRG; PAM sequence: GAG
aactcaggctcataaaattt

SEQ ID NO: 86522 - DNA, 20 bp, Artificial Sequence
  Description of Artificial Sequence: Synthetic oligonucleotide
  Target: LAMA2; (-) strand; PAM type: NRG; PAM sequence: AGG
ttacccacacaatgcaactc

SEQ ID NO: 86523 - DNA, 20 bp, Artificial Sequence
  Description of Artificial Sequence: Synthetic oligonucleotide
  Target: LAMA2; (-) strand; PAM type: NRG; PAM sequence: CAG
tttacccacacaatgcaact

SEQ ID NO: 86524 - DNA, 20 bp, Artificial Sequence
  Description of Artificial Sequence: Synthetic oligonucleotide
  Target: LAMA2; (-) strand; PAM type: NRG; PAM sequence: AAG
cctcctgatccacagagcac

SEQ ID NO: 86525 - DNA, 20 bp, Artificial Sequence
  Description of Artificial Sequence: Synthetic oligonucleotide
  Target: LAMA2; (-) strand; PAM type: NRG; PAM sequence: GAG
taacttcctcctgatccaca

SEQ ID NO: 86526 - DNA, 20 bp, Artificial Sequence
  Description of Artificial Sequence: Synthetic oligonucleotide
  Target: LAMA2; (-) strand; PAM type: NRG; PAM sequence: CAG
tctaacttcctcctgatcca

SEQ ID NO: 86527 - DNA, 20 bp, Artificial Sequence
  Description of Artificial Sequence: Synthetic oligonucleotide
  Target: LAMA2; (-) strand; PAM type: NRG; PAM sequence: CAG
agtcctgctcaagttctttc

SEQ ID NO: 86528 - DNA, 20 bp, Artificial Sequence
  Description of Artificial Sequence: Synthetic oligonucleotide
  Target: LAMA2; (-) strand; PAM type: NRG; PAM sequence: AAG
catttaatagagtcctgctc

SEQ ID NO: 86529 - DNA, 20 bp, Artificial Sequence
  Description of Artificial Sequence: Synthetic oligonucleotide
  Target: LAMA2; (-) strand; PAM type: NRG; PAM sequence: GAG
cacacaaaacacatttaata

SEQ ID NO: 86530 - DNA, 20 bp, Artificial Sequence
  Description of Artificial Sequence: Synthetic oligonucleotide
  Target: LAMA2; (-) strand; PAM type: NRG; PAM sequence: TAG
ctcacacaaaacacatttaa

SEQ ID NO: 86531 - DNA, 20 bp, Artificial Sequence
  Description of Artificial Sequence: Synthetic oligonucleotide
  Target: LAMA2; (-) strand; PAM type: NRG; PAM sequence: GGG
ggaggaaccacaagaacaca

SEQ ID NO: 86532 - DNA, 20 bp, Artificial Sequence
  Description of Artificial Sequence: Synthetic oligonucleotide
  Target: LAMA2; (-) strand; PAM type: NRG; PAM sequence: AGG
tggaggaaccacaagaacac

SEQ ID NO: 86533 - DNA, 20 bp, Artificial Sequence
  Description of Artificial Sequence: Synthetic oligonucleotide
  Target: LAMA2; (-) strand; PAM type: NRG; PAM sequence: CAG
atggaggaaccacaagaaca

SEQ ID NO: 86534 - DNA, 20 bp, Artificial Sequence
  Description of Artificial Sequence: Synthetic oligonucleotide
  Target: LAMA2; (-) strand; PAM type: NRG; PAM sequence: AAG
ccctagcatggaggaaccac

SEQ ID NO: 86535 - DNA, 20 bp, Artificial Sequence
  Description of Artificial Sequence: Synthetic oligonucleotide
  Target: LAMA2; (-) strand; PAM type: NRG; PAM sequence: AGG
acctcctgcccctagcatgg

SEQ ID NO: 86536 - DNA, 20 bp, Artificial Sequence
  Description of Artificial Sequence: Synthetic oligonucleotide
  Target: LAMA2; (-) strand; PAM type: NRG; PAM sequence: GAG
tacctcctgcccctagcatg

SEQ ID NO: 86537 - DNA, 20 bp, Artificial Sequence
  Description of Artificial Sequence: Synthetic oligonucleotide
  Target: LAMA2; (-) strand; PAM type: NRG; PAM sequence: TGG
cctacctcctgcccctagca

SEQ ID NO: 86538 - DNA, 20 bp, Artificial Sequence
  Description of Artificial Sequence: Synthetic oligonucleotide
  Target: LAMA2; (-) strand; PAM type: NRG; PAM sequence: TAG
tccatcctacctcctgcccc

SEQ ID NO: 86539 - DNA, 20 bp, Artificial Sequence
  Description of Artificial Sequence: Synthetic oligonucleotide
  Target: LAMA2; (-) strand; PAM type: NRG; PAM sequence: GAG
catccggtttaagaggaaaa

SEQ ID NO: 86540 - DNA, 20 bp, Artificial Sequence
  Description of Artificial Sequence: Synthetic oligonucleotide
  Target: LAMA2; (-) strand; PAM type: NRG; PAM sequence: AAG
aacatccggtttaagaggaa

SEQ ID NO: 86541 - DNA, 20 bp, Artificial Sequence
  Description of Artificial Sequence: Synthetic oligonucleotide
  Target: LAMA2; (-) strand; PAM type: NRG; PAM sequence: AGG
aaaaaaacatccggtttaag

SEQ ID NO: 86542 - DNA, 20 bp, Artificial Sequence
  Description of Artificial Sequence: Synthetic oligonucleotide
  Target: LAMA2; (-) strand; PAM type: NRG; PAM sequence: GAG
aaaaaaaacatccggtttaa

SEQ ID NO: 86543 - DNA, 20 bp, Artificial Sequence
  Description of Artificial Sequence: Synthetic oligonucleotide
  Target: LAMA2; (-) strand; PAM type: NRG; PAM sequence: AAG
ttaaaaaaaacatccggttt

SEQ ID NO: 86544 - DNA, 20 bp, Artificial Sequence
  Description of Artificial Sequence: Synthetic oligonucleotide
  Target: LAMA2; (-) strand; PAM type: NRG; PAM sequence: CGG
ctgattttaaaaaaaacatc

SEQ ID NO: 86545 - DNA, 20 bp, Artificial Sequence
  Description of Artificial Sequence: Synthetic oligonucleotide
  Target: LAMA2; (-) strand; PAM type: NRG; PAM sequence: TGG
agtttccacattccattcca

SEQ ID NO: 86546 - DNA, 20 bp, Artificial Sequence
  Description of Artificial Sequence: Synthetic oligonucleotide
  Target: LAMA2; (-) strand; PAM type: NRG; PAM sequence: CAG
gacttaatctttcagggtct

SEQ ID NO: 86547 - DNA, 20 bp, Artificial Sequence
  Description of Artificial Sequence: Synthetic oligonucleotide
  Target: LAMA2; (-) strand; PAM type: NRG; PAM sequence: GGG
tcaagtgacttaatctttca

SEQ ID NO: 86548 - DNA, 20 bp, Artificial Sequence
  Description of Artificial Sequence: Synthetic oligonucleotide
  Target: LAMA2; (-) strand; PAM type: NRG; PAM sequence: AGG
ttcaagtgacttaatctttc

SEQ ID NO: 86549 - DNA, 20 bp, Artificial Sequence
  Description of Artificial Sequence: Synthetic oligonucleotide
  Target: LAMA2; (-) strand; PAM type: NRG; PAM sequence: CAG
gttcaagtgacttaatcttt

SEQ ID NO: 86550 - DNA, 20 bp, Artificial Sequence
  Description of Artificial Sequence: Synthetic oligonucleotide
  Target: LAMA2; (-) strand; PAM type: NRG; PAM sequence: AAG
gaagctgtatatctttgttc

SEQ ID NO: 86551 - DNA, 20 bp, Artificial Sequence
  Description of Artificial Sequence: Synthetic oligonucleotide
  Target: LAMA2; (-) strand; PAM type: NRG; PAM sequence: AAG
tgtctgcctggtctctggag

SEQ ID NO: 86552 - DNA, 20 bp, Artificial Sequence
  Description of Artificial Sequence: Synthetic oligonucleotide
  Target: LAMA2; (-) strand; PAM type: NRG; PAM sequence: GAG
tagtgtctgcctggtctctg

SEQ ID NO: 86553 - DNA, 20 bp, Artificial Sequence
  Description of Artificial Sequence: Synthetic oligonucleotide
  Target: LAMA2; (-) strand; PAM type: NRG; PAM sequence: TGG
cctagtgtctgcctggtctc

SEQ ID NO: 86554 - DNA, 20 bp, Artificial Sequence
  Description of Artificial Sequence: Synthetic oligonucleotide
  Target: LAMA2; (-) strand; PAM type: NRG; PAM sequence: TGG
tcataaacctagtgtctgcc

SEQ ID NO: 86555 - DNA, 20 bp, Artificial Sequence
  Description of Artificial Sequence: Synthetic oligonucleotide
  Target: LAMA2; (-) strand; PAM type: NRG; PAM sequence: TAG
aagtcaggaaatcataaacc

SEQ ID NO: 86556 - DNA, 20 bp, Artificial Sequence
  Description of Artificial Sequence: Synthetic oligonucleotide
  Target: LAMA2; (-) strand; PAM type: NRG; PAM sequence: AGG
agagatctgcagtggaagtc

SEQ ID NO: 86557 - DNA, 20 bp, Artificial Sequence
  Description of Artificial Sequence: Synthetic oligonucleotide
  Target: LAMA2; (-) strand; PAM type: NRG; PAM sequence: CAG
aagagatctgcagtggaagt

SEQ ID NO: 86558 - DNA, 20 bp, Artificial Sequence
  Description of Artificial Sequence: Synthetic oligonucleotide
  Target: LAMA2; (-) strand; PAM type: NRG; PAM sequence: AAG
tggtaagagatctgcagtgg

SEQ ID NO: 86559 - DNA, 20 bp, Artificial Sequence
  Description of Artificial Sequence: Synthetic oligonucleotide
  Target: LAMA2; (-) strand; PAM type: NRG; PAM sequence: TGG
aaatggtaagagatctgcag

SEQ ID NO: 86560 - DNA, 20 bp, Artificial Sequence
  Description of Artificial Sequence: Synthetic oligonucleotide
  Target: LAMA2; (-) strand; PAM type: NRG; PAM sequence: CAG
gaaaaatggtaagagatctg

SEQ ID NO: 86561 - DNA, 20 bp, Artificial Sequence
  Description of Artificial Sequence: Synthetic oligonucleotide
  Target: LAMA2; (-) strand; PAM type: NRG; PAM sequence: GAG
ctctcatagaaaaatggtaa

SEQ ID NO: 86562 - DNA, 20 bp, Artificial Sequence
  Description of Artificial Sequence: Synthetic oligonucleotide
  Target: LAMA2; (-) strand; PAM type: NRG; PAM sequence: AAG
gactctcatagaaaaatggt

SEQ ID NO: 86563 - DNA, 20 bp, Artificial Sequence
  Description of Artificial Sequence: Synthetic oligonucleotide
  Target: LAMA2; (-) strand; PAM type: NRG; PAM sequence: TGG
ttatgactctcatagaaaaa

SEQ ID NO: 86564 - DNA, 20 bp, Artificial Sequence
  Description of Artificial Sequence: Synthetic oligonucleotide
  Target: LAMA2; (-) strand; PAM type: NRG; PAM sequence: TAG
ttctttttttatgactctca

SEQ ID NO: 86565 - DNA, 20 bp, Artificial Sequence
  Description of Artificial Sequence: Synthetic oligonucleotide
  Target: LAMA2; (-) strand; PAM type: NRG; PAM sequence: TAG
caccttgactagaaagtaaa

SEQ ID NO: 86566 - DNA, 20 bp, Artificial Sequence
  Description of Artificial Sequence: Synthetic oligonucleotide
  Target: LAMA2; (-) strand; PAM type: NRG; PAM sequence: AAG
tttaacccaccttgactaga

SEQ ID NO: 86567 - DNA, 20 bp, Artificial Sequence
  Description of Artificial Sequence: Synthetic oligonucleotide
  Target: LAMA2; (-) strand; PAM type: NRG; PAM sequence: TAG
tgattttaacccaccttgac

SEQ ID NO: 86568 - DNA, 20 bp, Artificial Sequence
  Description of Artificial Sequence: Synthetic oligonucleotide
  Target: LAMA2; (-) strand; PAM type: NRG; PAM sequence: TGG
aatcgatgtttgaaaacaag

SEQ ID NO: 86569 - DNA, 20 bp, Artificial Sequence
  Description of Artificial Sequence: Synthetic oligonucleotide
  Target: LAMA2; (-) strand; PAM type: NRG; PAM sequence: AAG
cgaaatcgatgtttgaaaac

SEQ ID NO: 86570 - DNA, 20 bp, Artificial Sequence
  Description of Artificial Sequence: Synthetic oligonucleotide
  Target: LAMA2; (-) strand; PAM type: NRG; PAM sequence: TGG
aagtgaattttttaatttga

SEQ ID NO: 86571 - DNA, 20 bp, Artificial Sequence
  Description of Artificial Sequence: Synthetic oligonucleotide
  Target: LAMA2; (-) strand; PAM type: NRG; PAM sequence: AAG
aaagcaaattaaactcagtt

SEQ ID NO: 86572 - DNA, 20 bp, Artificial Sequence
  Description of Artificial Sequence: Synthetic oligonucleotide
  Target: LAMA2; (-) strand; PAM type: NRG; PAM sequence: CAG
aagtgaaagcaaattaaact

SEQ ID NO: 86573 - DNA, 20 bp, Artificial Sequence
  Description of Artificial Sequence: Synthetic oligonucleotide
  Target: LAMA2; (-) strand; PAM type: NRG; PAM sequence: AAG
ggcagctgcttcctaagtga

SEQ ID NO: 86574 - DNA, 20 bp, Artificial Sequence
  Description of Artificial Sequence: Synthetic oligonucleotide
  Target: LAMA2; (-) strand; PAM type: NRG; PAM sequence: AAG
ttgaaaggcagctgcttcct

SEQ ID NO: 86575 - DNA, 20 bp, Artificial Sequence
  Description of Artificial Sequence: Synthetic oligonucleotide
  Target: LAMA2; (-) strand; PAM type: NRG; PAM sequence: CAG
tattttattatcttgaaagg

SEQ ID NO: 86576 - DNA, 20 bp, Artificial Sequence
  Description of Artificial Sequence: Synthetic oligonucleotide
  Target: LAMA2; (-) strand; PAM type: NRG; PAM sequence: AGG
gtttattttattatcttgaa

SEQ ID NO: 86577 - DNA, 20 bp, Artificial Sequence
  Description of Artificial Sequence: Synthetic oligonucleotide
  Target: LAMA2; (-) strand; PAM type: NRG; PAM sequence: AAG
tgtttattttattatcttga

SEQ ID NO: 86578 - DNA, 20 bp, Artificial Sequence
  Description of Artificial Sequence: Synthetic oligonucleotide
  Target: LAMA2; (-) strand; PAM type: NRG; PAM sequence: CAG
aacatttaaattaaaagcca

SEQ ID NO: 86579 - DNA, 20 bp, Artificial Sequence
  Description of Artificial Sequence: Synthetic oligonucleotide
  Target: LAMA2; (-) strand; PAM type: NRG; PAM sequence: AAG
aaatcaaacatttaaattaa

SEQ ID NO: 86580 - DNA, 20 bp, Artificial Sequence
  Description of Artificial Sequence: Synthetic oligonucleotide
  Target: LAMA2; (-) strand; PAM type: NRG; PAM sequence: CAG
gcagagaatattttggaatc

SEQ ID NO: 86581 - DNA, 20 bp, Artificial Sequence
  Description of Artificial Sequence: Synthetic oligonucleotide
  Target: LAMA2; (-) strand; PAM type: NRG; PAM sequence: TGG
ttctcttgcagagaatattt

SEQ ID NO: 86582 - DNA, 20 bp, Artificial Sequence
  Description of Artificial Sequence: Synthetic oligonucleotide
  Target: LAMA2; (-) strand; PAM type: NRG; PAM sequence: GAG
atgtgtatgcttctcttgca

SEQ ID NO: 86583 - DNA, 20 bp, Artificial Sequence
  Description of Artificial Sequence: Synthetic oligonucleotide
  Target: LAMA2; (-) strand; PAM type: NRG; PAM sequence: CAG
gaatgtgtatgcttctcttg

SEQ ID NO: 86584 - DNA, 20 bp, Artificial Sequence
  Description of Artificial Sequence: Synthetic oligonucleotide
  Target: LAMA2; (-) strand; PAM type: NRG; PAM sequence: TAG
aataaacatttgaaatgctt

SEQ ID NO: 86585 - DNA, 20 bp, Artificial Sequence
  Description of Artificial Sequence: Synthetic oligonucleotide
  Target: LAMA2; (-) strand; PAM type: NRG; PAM sequence: AGG
acagaaagacagccacctct

SEQ ID NO: 86586 - DNA, 20 bp, Artificial Sequence
  Description of Artificial Sequence: Synthetic oligonucleotide
  Target: LAMA2; (-) strand; PAM type: NRG; PAM sequence: TAG
aacagaaagacagccacctc

SEQ ID NO: 86587 - DNA, 20 bp, Artificial Sequence
  Description of Artificial Sequence: Synthetic oligonucleotide
  Target: LAMA2; (-) strand; PAM type: NRG; PAM sequence: CAG
tatgcacagcaacagaaaga

SEQ ID NO: 86588 - DNA, 20 bp, Artificial Sequence
  Description of Artificial Sequence: Synthetic oligonucleotide
  Target: LAMA2; (-) strand; PAM type: NRG; PAM sequence: AAG
agggtatgcacagcaacaga

SEQ ID NO: 86589 - DNA, 20 bp, Artificial Sequence
  Description of Artificial Sequence: Synthetic oligonucleotide
  Target: LAMA2; (-) strand; PAM type: NRG; PAM sequence: CAG
gctcagggtatgcacagcaa

SEQ ID NO: 86590 - DNA, 20 bp, Artificial Sequence
  Description of Artificial Sequence: Synthetic oligonucleotide
  Target: LAMA2; (-) strand; PAM type: NRG; PAM sequence: CAG
aagtctgctcagggtatgca

SEQ ID NO: 86591 - DNA, 20 bp, Artificial Sequence
  Description of Artificial Sequence: Synthetic oligonucleotide
  Target: LAMA2; (-) strand; PAM type: NRG; PAM sequence: GGG
agcaatgtcaagtctgctca

SEQ ID NO: 86592 - DNA, 20 bp, Artificial Sequence
  Description of Artificial Sequence: Synthetic oligonucleotide
  Target: LAMA2; (-) strand; PAM type: NRG; PAM sequence: AGG
aagcaatgtcaagtctgctc

SEQ ID NO: 86593 - DNA, 20 bp, Artificial Sequence
  Description of Artificial Sequence: Synthetic oligonucleotide
  Target: LAMA2; (-) strand; PAM type: NRG; PAM sequence: CAG
aaagcaatgtcaagtctgct

SEQ ID NO: 86594 - DNA, 20 bp, Artificial Sequence
  Description of Artificial Sequence: Synthetic oligonucleotide
  Target: LAMA2; (-) strand; PAM type: NRG; PAM sequence: AAG
tgtgcttccaaagcaatgtc

SEQ ID NO: 86595 - DNA, 20 bp, Artificial Sequence
  Description of Artificial Sequence: Synthetic oligonucleotide
  Target: LAMA2; (-) strand; PAM type: NRG; PAM sequence: AAG
tcagaaaatatgtgcttcca

SEQ ID NO: 86596 - DNA, 20 bp, Artificial Sequence
  Description of Artificial Sequence: Synthetic oligonucleotide
  Target: LAMA2; (-) strand; PAM type: NRG; PAM sequence: CAG
tatgagagtaatatgtctat

SEQ ID NO: 86597 - DNA, 20 bp, Artificial Sequence
  Description of Artificial Sequence: Synthetic oligonucleotide
  Target: LAMA2; (-) strand; PAM type: NRG; PAM sequence: GAG
tgaaaaattttagattatga

SEQ ID NO: 86598 - DNA, 20 bp, Artificial Sequence
  Description of Artificial Sequence: Synthetic oligonucleotide
  Target: LAMA2; (-) strand; PAM type: NRG; PAM sequence: GAG
tctgaaaaattttagattat

SEQ ID NO: 86599 - DNA, 20 bp, Artificial Sequence
  Description of Artificial Sequence: Synthetic oligonucleotide
  Target: LAMA2; (-) strand; PAM type: NRG; PAM sequence: TAG
ttgtcacttctgaaaaattt

SEQ ID NO: 86600 - DNA, 20 bp, Artificial Sequence
  Description of Artificial Sequence: Synthetic oligonucleotide
  Target: LAMA2; (-) strand; PAM type: NRG; PAM sequence: TGG
ggagacagcgaagaagaaaa

SEQ ID NO: 86601 - DNA, 20 bp, Artificial Sequence
  Description of Artificial Sequence: Synthetic oligonucleotide
  Target: LAMA2; (-) strand; PAM type: NRG; PAM sequence: AAG
aaatcatggagacagcgaag

SEQ ID NO: 86602 - DNA, 20 bp, Artificial Sequence
  Description of Artificial Sequence: Synthetic oligonucleotide
  Target: LAMA2; (-) strand; PAM type: NRG; PAM sequence: AAG
gcaaaatcatggagacagcg

SEQ ID NO: 86603 - DNA, 20 bp, Artificial Sequence
  Description of Artificial Sequence: Synthetic oligonucleotide
  Target: LAMA2; (-) strand; PAM type: NRG; PAM sequence: CAG
aaaaagcaaaatcatggaga

SEQ ID NO: 86604 - DNA, 20 bp, Artificial Sequence
  Description of Artificial Sequence: Synthetic oligonucleotide
  Target: LAMA2; (-) strand; PAM type: NRG; PAM sequence: GAG
ttggaaaaagcaaaatcatg

SEQ ID NO: 86605 - DNA, 20 bp, Artificial Sequence
  Description of Artificial Sequence: Synthetic oligonucleotide
  Target: LAMA2; (-) strand; PAM type: NRG; PAM sequence: TGG
tcttggaaaaagcaaaatca

SEQ ID NO: 86606 - DNA, 20 bp, Artificial Sequence
  Description of Artificial Sequence: Synthetic oligonucleotide
  Target: LAMA2; (-) strand; PAM type: NRG; PAM sequence: AAG
actacatgacatcttggaaa

SEQ ID NO: 86607 - DNA, 20 bp, Artificial Sequence
  Description of Artificial Sequence: Synthetic oligonucleotide
  Target: LAMA2; (-) strand; PAM type: NRG; PAM sequence: TGG
attctaactacatgacatct

SEQ ID NO: 86608 - DNA, 20 bp, Artificial Sequence
  Description of Artificial Sequence: Synthetic oligonucleotide
  Target: LAMA2; (-) strand; PAM type: NRG; PAM sequence: AAG
gtgaaaaaagccaacctgaa

SEQ ID NO: 86609 - DNA, 20 bp, Artificial Sequence
  Description of Artificial Sequence: Synthetic oligonucleotide
  Target: LAMA2; (-) strand; PAM type: NRG; PAM sequence: AAG
ggcatattgctaagtgaaaa

SEQ ID NO: 86610 - DNA, 20 bp, Artificial Sequence
  Description of Artificial Sequence: Synthetic oligonucleotide
  Target: LAMA2; (-) strand; PAM type: NRG; PAM sequence: AAG
aaccttacaggcatattgct

SEQ ID NO: 86611 - DNA, 20 bp, Artificial Sequence
  Description of Artificial Sequence: Synthetic oligonucleotide
  Target: LAMA2; (-) strand; PAM type: NRG; PAM sequence: AGG
aagacatggcggaaccttac

SEQ ID NO: 86612 - DNA, 20 bp, Artificial Sequence
  Description of Artificial Sequence: Synthetic oligonucleotide
  Target: LAMA2; (-) strand; PAM type: NRG; PAM sequence: CAG
aaagacatggcggaacctta

SEQ ID NO: 86613 - DNA, 20 bp, Artificial Sequence
  Description of Artificial Sequence: Synthetic oligonucleotide
  Target: LAMA2; (-) strand; PAM type: NRG; PAM sequence: CGG
caaggcaagaaaagacatgg

SEQ ID NO: 86614 - DNA, 20 bp, Artificial Sequence
  Description of Artificial Sequence: Synthetic oligonucleotide
  Target: LAMA2; (-) strand; PAM type: NRG; PAM sequence: TGG
tatcaaggcaagaaaagaca

SEQ ID NO: 86615 - DNA, 20 bp, Artificial Sequence
  Description of Artificial Sequence: Synthetic oligonucleotide
  Target: LAMA2; (-) strand; PAM type: NRG; PAM sequence: AAG
atgaattatcaaggcaagaa

SEQ ID NO: 86616 - DNA, 20 bp, Artificial Sequence
  Description of Artificial Sequence: Synthetic oligonucleotide
  Target: LAMA2; (-) strand; PAM type: NRG; PAM sequence: AAG
aagaaatgaattatcaaggc

SEQ ID NO: 86617 - DNA, 20 bp, Artificial Sequence
  Description of Artificial Sequence: Synthetic oligonucleotide
  Target: LAMA2; (-) strand; PAM type: NRG; PAM sequence: AGG
taaaaagaaatgaattatca

SEQ ID NO: 86618 - DNA, 20 bp, Artificial Sequence
  Description of Artificial Sequence: Synthetic oligonucleotide
  Target: LAMA2; (-) strand; PAM type: NRG; PAM sequence: AAG
ctaaaaagaaatgaattatc

SEQ ID NO: 86619 - DNA, 20 bp, Artificial Sequence
  Description of Artificial Sequence: Synthetic oligonucleotide
  Target: LAMA2; (-) strand; PAM type: NRG; PAM sequence: AAG
aaatagtattcagagctaaa

SEQ ID NO: 86620 - DNA, 20 bp, Artificial Sequence
  Description of Artificial Sequence: Synthetic oligonucleotide
  Target: LAMA2; (-) strand; PAM type: NRG; PAM sequence: GAG
agacaacaaaatagtattca

SEQ ID NO: 86621 - DNA, 20 bp, Artificial Sequence
  Description of Artificial Sequence: Synthetic oligonucleotide
  Target: LAMA2; (-) strand; PAM type: NRG; PAM sequence: CAG
ccagacaacaaaatagtatt

SEQ ID NO: 86622 - DNA, 20 bp, Artificial Sequence
  Description of Artificial Sequence: Synthetic oligonucleotide
  Target: LAMA2; (-) strand; PAM type: NRG; PAM sequence: TAG
gttatatccagacaacaaaa

SEQ ID NO: 86623 - DNA, 20 bp, Artificial Sequence
  Description of Artificial Sequence: Synthetic oligonucleotide
  Target: LAMA2; (-) strand; PAM type: NRG; PAM sequence: CAG
aattcaactgtggttatatc

SEQ ID NO: 86624 - DNA, 20 bp, Artificial Sequence
  Description of Artificial Sequence: Synthetic oligonucleotide
  Target: LAMA2; (-) strand; PAM type: NRG; PAM sequence: TGG
gtaaatggataattcaactg

SEQ ID NO: 86625 - DNA, 20 bp, Artificial Sequence
  Description of Artificial Sequence: Synthetic oligonucleotide
  Target: LAMA2; (-) strand; PAM type: NRG; PAM sequence: TGG
gatgtttttcaggaggtaaa

SEQ ID NO: 86626 - DNA, 20 bp, Artificial Sequence
  Description of Artificial Sequence: Synthetic oligonucleotide
  Target: LAMA2; (-) strand; PAM type: NRG; PAM sequence: AGG
caagcaggatgtttttcagg

SEQ ID NO: 86627 - DNA, 20 bp, Artificial Sequence
  Description of Artificial Sequence: Synthetic oligonucleotide
  Target: LAMA2; (-) strand; PAM type: NRG; PAM sequence: GAG
gcaagcaggatgtttttcag

SEQ ID NO: 86628 - DNA, 20 bp, Artificial Sequence
  Description of Artificial Sequence: Synthetic oligonucleotide
  Target: LAMA2; (-) strand; PAM type: NRG; PAM sequence: AGG
tagcaagcaggatgtttttc

SEQ ID NO: 86629 - DNA, 20 bp, Artificial Sequence
  Description of Artificial Sequence: Synthetic oligonucleotide
  Target: LAMA2; (-) strand; PAM type: NRG; PAM sequence: CAG
gtagcaagcaggatgttttt

SEQ ID NO: 86630 - DNA, 20 bp, Artificial Sequence
  Description of Artificial Sequence: Synthetic oligonucleotide
  Target: LAMA2; (-) strand; PAM type: NRG; PAM sequence: AGG
gccagaacatggtagcaagc

SEQ ID NO: 86631 - DNA, 20 bp, Artificial Sequence
  Description of Artificial Sequence: Synthetic oligonucleotide
  Target: LAMA2; (-) strand; PAM type: NRG; PAM sequence: CAG
tgccagaacatggtagcaag

SEQ ID NO: 86632 - DNA, 20 bp, Artificial Sequence
  Description of Artificial Sequence: Synthetic oligonucleotide
  Target: LAMA2; (-) strand; PAM type: NRG; PAM sequence: AAG
tattgccagaacatggtagc

SEQ ID NO: 86633 - DNA, 20 bp, Artificial Sequence
  Description of Artificial Sequence: Synthetic oligonucleotide
  Target: LAMA2; (-) strand; PAM type: NRG; PAM sequence: TAG
ttcatattgccagaacatgg

SEQ ID NO: 86634 - DNA, 20 bp, Artificial Sequence
  Description of Artificial Sequence: Synthetic oligonucleotide
  Target: LAMA2; (-) strand; PAM type: NRG; PAM sequence: TGG
tgattcatattgccagaaca

SEQ ID NO: 86635 - DNA, 20 bp, Artificial Sequence
  Description of Artificial Sequence: Synthetic oligonucleotide
  Target: LAMA2; (-) strand; PAM type: NRG; PAM sequence: CAG
agcagcttgattcatattgc

SEQ ID NO: 86636 - DNA, 20 bp, Artificial Sequence
  Description of Artificial Sequence: Synthetic oligonucleotide
  Target: LAMA2; (-) strand; PAM type: NRG; PAM sequence: CAG
tatcacataagtgtttatag

SEQ ID NO: 86637 - DNA, 20 bp, Artificial Sequence
  Description of Artificial Sequence: Synthetic oligonucleotide
  Target: LAMA2; (-) strand; PAM type: NRG; PAM sequence: TAG
acttatcacataagtgttta

SEQ ID NO: 86638 - DNA, 20 bp, Artificial Sequence
  Description of Artificial Sequence: Synthetic oligonucleotide
  Target: LAMA2; (-) strand; PAM type: NRG; PAM sequence: AAG
ccacacaagacttatcacat

SEQ ID NO: 86639 - DNA, 20 bp, Artificial Sequence
  Description of Artificial Sequence: Synthetic oligonucleotide
  Target: LAMA2; (-) strand; PAM type: NRG; PAM sequence: AAG
ttgaatatttatatccacac

SEQ ID NO: 86640 - DNA, 20 bp, Artificial Sequence
  Description of Artificial Sequence: Synthetic oligonucleotide
  Target: LAMA2; (-) strand; PAM type: NRG; PAM sequence: AAG
tctttggtatttacccaaat

SEQ ID NO: 86641 - DNA, 20 bp, Artificial Sequence
  Description of Artificial Sequence: Synthetic oligonucleotide
  Target: LAMA2; (-) strand; PAM type: NRG; PAM sequence: TGG
gatccagtaattgcactctt

SEQ ID NO: 86642 - DNA, 20 bp, Artificial Sequence
  Description of Artificial Sequence: Synthetic oligonucleotide
  Target: LAMA2; (-) strand; PAM type: NRG; PAM sequence: CAG
catgctctgaccatatgatc

SEQ ID NO: 86643 - DNA, 20 bp, Artificial Sequence
  Description of Artificial Sequence: Synthetic oligonucleotide
  Target: LAMA2; (-) strand; PAM type: NRG; PAM sequence: TAG
ttggcagtttattacaaaac

SEQ ID NO: 86644 - DNA, 20 bp, Artificial Sequence
  Description of Artificial Sequence: Synthetic oligonucleotide
  Target: LAMA2; (-) strand; PAM type: NRG; PAM sequence: CAG
catattggaagatagtttgg

SEQ ID NO: 86645 - DNA, 20 bp, Artificial Sequence
  Description of Artificial Sequence: Synthetic oligonucleotide
  Target: LAMA2; (-) strand; PAM type: NRG; PAM sequence: TGG
aaccatattggaagatagtt

SEQ ID NO: 86646 - DNA, 20 bp, Artificial Sequence
  Description of Artificial Sequence: Synthetic oligonucleotide
  Target: LAMA2; (-) strand; PAM type: NRG; PAM sequence: TAG
tatacaaccatattggaaga

SEQ ID NO: 86647 - DNA, 20 bp, Artificial Sequence
  Description of Artificial Sequence: Synthetic oligonucleotide
  Target: LAMA2; (-) strand; PAM type: NRG; PAM sequence: AAG
aaattatacaaccatattgg

SEQ ID NO: 86648 - DNA, 20 bp, Artificial Sequence
  Description of Artificial Sequence: Synthetic oligonucleotide
  Target: LAMA2; (-) strand; PAM type: NRG; PAM sequence: TGG
gcaaaattatacaaccatat

SEQ ID NO: 86649 - DNA, 20 bp, Artificial Sequence
  Description of Artificial Sequence: Synthetic oligonucleotide
  Target: LAMA2; (-) strand; PAM type: NRG; PAM sequence: GAG
aactcttgttcattgctggt

SEQ ID NO: 86650 - DNA, 20 bp, Artificial Sequence
  Description of Artificial Sequence: Synthetic oligonucleotide
  Target: LAMA2; (-) strand; PAM type: NRG; PAM sequence: TGG
caggaactcttgttcattgc

SEQ ID NO: 86651 - DNA, 20 bp, Artificial Sequence
  Description of Artificial Sequence: Synthetic oligonucleotide
  Target: LAMA2; (-) strand; PAM type: NRG; PAM sequence: AGG
tggtgagaatgtggagaaac

SEQ ID NO: 86652 - DNA, 20 bp, Artificial Sequence
  Description of Artificial Sequence: Synthetic oligonucleotide
  Target: LAMA2; (-) strand; PAM type: NRG; PAM sequence: CAG
ctggtgagaatgtggagaaa

SEQ ID NO: 86653 - DNA, 20 bp, Artificial Sequence
  Description of Artificial Sequence: Synthetic oligonucleotide
  Target: LAMA2; (-) strand; PAM type: NRG; PAM sequence: GAG
gaaatgctggtgagaatgtg

SEQ ID NO: 86654 - DNA, 20 bp, Artificial Sequence
  Description of Artificial Sequence: Synthetic oligonucleotide
  Target: LAMA2; (-) strand; PAM type: NRG; PAM sequence: TGG
atgaaatgctggtgagaatg

SEQ ID NO: 86655 - DNA, 20 bp, Artificial Sequence
  Description of Artificial Sequence: Synthetic oligonucleotide
  Target: LAMA2; (-) strand; PAM type: NRG; PAM sequence: GAG
tgacaatatgaaatgctggt

SEQ ID NO: 86656 - DNA, 20 bp, Artificial Sequence
  Description of Artificial Sequence: Synthetic oligonucleotide
  Target: LAMA2; (-) strand; PAM type: NRG; PAM sequence: TGG
acattgacaatatgaaatgc

SEQ ID NO: 86657 - DNA, 20 bp, Artificial Sequence
  Description of Artificial Sequence: Synthetic oligonucleotide
  Target: LAMA2; (-) strand; PAM type: NRG; PAM sequence: TAG
ccactacatatctattagaa

SEQ ID NO: 86658 - DNA, 20 bp, Artificial Sequence
  Description of Artificial Sequence: Synthetic oligonucleotide
  Target: LAMA2; (-) strand; PAM type: NRG; PAM sequence: TAG
atataccactacatatctat

SEQ ID NO: 86659 - DNA, 20 bp, Artificial Sequence
  Description of Artificial Sequence: Synthetic oligonucleotide
  Target: LAMA2; (-) strand; PAM type: NRG; PAM sequence: GAG
ctcatcatcttacatcatta

SEQ ID NO: 86660 - DNA, 20 bp, Artificial Sequence
  Description of Artificial Sequence: Synthetic oligonucleotide
  Target: LAMA2; (-) strand; PAM type: NRG; PAM sequence: TAG
tgctcatcatcttacatcat

SEQ ID NO: 86661 - DNA, 20 bp, Artificial Sequence
  Description of Artificial Sequence: Synthetic oligonucleotide
  Target: LAMA2; (-) strand; PAM type: NRG; PAM sequence: AAG
cttatatacagatggaaaat

SEQ ID NO: 86662 - DNA, 20 bp, Artificial Sequence
  Description of Artificial Sequence: Synthetic oligonucleotide
  Target: LAMA2; (-) strand; PAM type: NRG; PAM sequence: TGG
cagcaaagcttatatacaga

SEQ ID NO: 86663 - DNA, 20 bp, Artificial Sequence
  Description of Artificial Sequence: Synthetic oligonucleotide
  Target: LAMA2; (-) strand; PAM type: NRG; PAM sequence: CAG
acctcagcaaagcttatata

SEQ ID NO: 86664 - DNA, 20 bp, Artificial Sequence
  Description of Artificial Sequence: Synthetic oligonucleotide
  Target: LAMA2; (-) strand; PAM type: NRG; PAM sequence: AAG
tctaaacagatacctcagca

SEQ ID NO: 86665 - DNA, 20 bp, Artificial Sequence
  Description of Artificial Sequence: Synthetic oligonucleotide
  Target: LAMA2; (-) strand; PAM type: NRG; PAM sequence: CAG
aaaaatctaaacagatacct

SEQ ID NO: 86666 - DNA, 20 bp, Artificial Sequence
  Description of Artificial Sequence: Synthetic oligonucleotide
  Target: LAMA2; (-) strand; PAM type: NRG; PAM sequence: CAG
aaaattggaaaaaatctaaa

SEQ ID NO: 86667 - DNA, 20 bp, Artificial Sequence
  Description of Artificial Sequence: Synthetic oligonucleotide
  Target: LAMA2; (-) strand; PAM type: NRG; PAM sequence: TGG
aagaaaataaatttaaaaat

SEQ ID NO: 86668 - DNA, 20 bp, Artificial Sequence
  Description of Artificial Sequence: Synthetic oligonucleotide
  Target: LAMA2; (-) strand; PAM type: NRG; PAM sequence: AAG
aactcttaaatctcaacaac

SEQ ID NO: 86669 - DNA, 20 bp, Artificial Sequence
  Description of Artificial Sequence: Synthetic oligonucleotide
  Target: LAMA2; (-) strand; PAM type: NRG; PAM sequence: AAG
gatatggtccaaaacataca

SEQ ID NO: 86670 - DNA, 20 bp, Artificial Sequence
  Description of Artificial Sequence: Synthetic oligonucleotide
  Target: LAMA2; (-) strand; PAM type: NRG; PAM sequence: TGG
tgcaaaagatatacctgata

SEQ ID NO: 86671 - DNA, 20 bp, Artificial Sequence
  Description of Artificial Sequence: Synthetic oligonucleotide
  Target: LAMA2; (-) strand; PAM type: NRG; PAM sequence: AAG
ttgcaagaaaatatttgcaa

SEQ ID NO: 86672 - DNA, 20 bp, Artificial Sequence
  Description of Artificial Sequence: Synthetic oligonucleotide
  Target: LAMA2; (-) strand; PAM type: NRG; PAM sequence: AAG
taagagaaactaccatttgc

SEQ ID NO: 86673 - DNA, 20 bp, Artificial Sequence
  Description of Artificial Sequence: Synthetic oligonucleotide
  Target: LAMA2; (-) strand; PAM type: NRG; PAM sequence: GAG
agacactgtgaagagaataa

SEQ ID NO: 86674 - DNA, 20 bp, Artificial Sequence
  Description of Artificial Sequence: Synthetic oligonucleotide
  Target: LAMA2; (-) strand; PAM type: NRG; PAM sequence: AAG
aaagacactgtgaagagaat

SEQ ID NO: 86675 - DNA, 20 bp, Artificial Sequence
  Description of Artificial Sequence: Synthetic oligonucleotide
  Target: LAMA2; (-) strand; PAM type: NRG; PAM sequence: GAG
tctgtgaaagacactgtgaa

SEQ ID NO: 86676 - DNA, 20 bp, Artificial Sequence
  Description of Artificial Sequence: Synthetic oligonucleotide
  Target: LAMA2; (-) strand; PAM type: NRG; PAM sequence: AAG
tctctgtgaaagacactgtg

SEQ ID NO: 86677 - DNA, 20 bp, Artificial Sequence
  Description of Artificial Sequence: Synthetic oligonucleotide
  Target: LAMA2; (-) strand; PAM type: NRG; PAM sequence: AAG
aaaaatcatcttctctgtga

SEQ ID NO: 86678 - DNA, 20 bp, Artificial Sequence
  Description of Artificial Sequence: Synthetic oligonucleotide
  Target: LAMA2; (-) strand; PAM type: NRG; PAM sequence: TAG
catgaaataaaaattcattt

SEQ ID NO: 86679 - DNA, 20 bp, Artificial Sequence
  Description of Artificial Sequence: Synthetic oligonucleotide
  Target: LAMA2; (-) strand; PAM type: NRG; PAM sequence: AAG
ttatatataacactaaagtc

SEQ ID NO: 86680 - DNA, 20 bp, Artificial Sequence
  Description of Artificial Sequence: Synthetic oligonucleotide
  Target: LAMA2; (-) strand; PAM type: NRG; PAM sequence: AAG
actctttatatataacacta

SEQ ID NO: 86681 - DNA, 20 bp, Artificial Sequence
  Description of Artificial Sequence: Synthetic oligonucleotide
  Target: LAMA2; (-) strand; PAM type: NRG; PAM sequence: CAG
tctaaataaccctgagtttg

SEQ ID NO: 86682 - DNA, 20 bp, Artificial Sequence
  Description of Artificial Sequence: Synthetic oligonucleotide
  Target: LAMA2; (-) strand; PAM type: NRG; PAM sequence: GAG
aagaaaatctaaataaccct

SEQ ID NO: 86683 - DNA, 20 bp, Artificial Sequence
  Description of Artificial Sequence: Synthetic oligonucleotide
  Target: LAMA2; (-) strand; PAM type: NRG; PAM sequence: AAG
actcttggaagataacatag

SEQ ID NO: 86684 - DNA, 20 bp, Artificial Sequence
  Description of Artificial Sequence: Synthetic oligonucleotide
  Target: LAMA2; (-) strand; PAM type: NRG; PAM sequence: TAG
atgactcttggaagataaca

SEQ ID NO: 86685 - DNA, 20 bp, Artificial Sequence
  Description of Artificial Sequence: Synthetic oligonucleotide
  Target: LAMA2; (-) strand; PAM type: NRG; PAM sequence: AAG
tgcaaaactatgactcttgg

SEQ ID NO: 86686 - DNA, 20 bp, Artificial Sequence
  Description of Artificial Sequence: Synthetic oligonucleotide
  Target: LAMA2; (-) strand; PAM type: NRG; PAM sequence: TGG
aaatgcaaaactatgactct

SEQ ID NO: 86687 - DNA, 20 bp, Artificial Sequence
  Description of Artificial Sequence: Synthetic oligonucleotide
  Target: LAMA2; (-) strand; PAM type: NRG; PAM sequence: TGG
atggatcatagacctcaaaa

SEQ ID NO: 86688 - DNA, 20 bp, Artificial Sequence
  Description of Artificial Sequence: Synthetic oligonucleotide
  Target: LAMA2; (-) strand; PAM type: NRG; PAM sequence: TAG
aattaacacaaaatggatca

SEQ ID NO: 86689 - DNA, 20 bp, Artificial Sequence
  Description of Artificial Sequence: Synthetic oligonucleotide
  Target: LAMA2; (-) strand; PAM type: NRG; PAM sequence: TGG
tcacaaaaattaacacaaaa

SEQ ID NO: 86690 - DNA, 20 bp, Artificial Sequence
  Description of Artificial Sequence: Synthetic oligonucleotide
  Target: LAMA2; (-) strand; PAM type: NRG; PAM sequence: TAG
aaaatacataaatgcagata

SEQ ID NO: 86691 - DNA, 20 bp, Artificial Sequence
  Description of Artificial Sequence: Synthetic oligonucleotide
  Target: LAMA2; (-) strand; PAM type: NRG; PAM sequence: CAG
tgtgaaaaaatacataaatg

SEQ ID NO: 86692 - DNA, 20 bp, Artificial Sequence
  Description of Artificial Sequence: Synthetic oligonucleotide
  Target: LAMA2; (-) strand; PAM type: NRG; PAM sequence: GAG
atagcaacagaaaattgact

SEQ ID NO: 86693 - DNA, 20 bp, Artificial Sequence
  Description of Artificial Sequence: Synthetic oligonucleotide
  Target: LAMA2; (-) strand; PAM type: NRG; PAM sequence: CAG
caggtattctgttatagcaa

SEQ ID NO: 86694 - DNA, 20 bp, Artificial Sequence
  Description of Artificial Sequence: Synthetic oligonucleotide
  Target: LAMA2; (-) strand; PAM type: NRG; PAM sequence: TAG
tagtctcaggtattctgtta

SEQ ID NO: 86695 - DNA, 20 bp, Artificial Sequence
  Description of Artificial Sequence: Synthetic oligonucleotide
  Target: LAMA2; (-) strand; PAM type: NRG; PAM sequence: AGG
tttataaattacctagtctc

SEQ ID NO: 86696 - DNA, 20 bp, Artificial Sequence
  Description of Artificial Sequence: Synthetic oligonucleotide
  Target: LAMA2; (-) strand; PAM type: NRG; PAM sequence: CAG
ctttataaattacctagtct

SEQ ID NO: 86697 - DNA, 20 bp, Artificial Sequence
  Description of Artificial Sequence: Synthetic oligonucleotide
  Target: LAMA2; (-) strand; PAM type: NRG; PAM sequence: TAG
tctctcctttataaattacc

SEQ ID NO: 86698 - DNA, 20 bp, Artificial Sequence
  Description of Artificial Sequence: Synthetic oligonucleotide
  Target: LAMA2; (-) strand; PAM type: NRG; PAM sequence: TAG
tcccaggatcacaagctaaa

SEQ ID NO: 86699 - DNA, 20 bp, Artificial Sequence
  Description of Artificial Sequence: Synthetic oligonucleotide
  Target: LAMA2; (-) strand; PAM type: NRG; PAM sequence: AAG
agtcaagctcccaggatcac

SEQ ID NO: 86700 - DNA, 20 bp, Artificial Sequence
  Description of Artificial Sequence: Synthetic oligonucleotide
  Target: LAMA2; (-) strand; PAM type: NRG; PAM sequence: AGG
gatctcctagtcaagctccc

SEQ ID NO: 86701 - DNA, 20 bp, Artificial Sequence
  Description of Artificial Sequence: Synthetic oligonucleotide
  Target: LAMA2; (-) strand; PAM type: NRG; PAM sequence: CAG
ggatctcctagtcaagctcc

SEQ ID NO: 86702 - DNA, 20 bp, Artificial Sequence
  Description of Artificial Sequence: Synthetic oligonucleotide
  Target: LAMA2; (-) strand; PAM type: NRG; PAM sequence: AAG
ctaacttggatctcctagtc

SEQ ID NO: 86703 - DNA, 20 bp, Artificial Sequence
  Description of Artificial Sequence: Synthetic oligonucleotide
  Target: LAMA2; (-) strand; PAM type: NRG; PAM sequence: TAG
ctgtcctaacttggatctcc

SEQ ID NO: 86704 - DNA, 20 bp, Artificial Sequence
  Description of Artificial Sequence: Synthetic oligonucleotide
  Target: LAMA2; (-) strand; PAM type: NRG; PAM sequence: TGG
caaatgcacctgtcctaact

SEQ ID NO: 86705 - DNA, 20 bp, Artificial Sequence
  Description of Artificial Sequence: Synthetic oligonucleotide
  Target: LAMA2; (-) strand; PAM type: NRG; PAM sequence: CAG
atgcagcacaagactctcac

SEQ ID NO: 86706 - DNA, 20 bp, Artificial Sequence
  Description of Artificial Sequence: Synthetic oligonucleotide
  Target: LAMA2; (-) strand; PAM type: NRG; PAM sequence: AAG
accatgttaagatgcagcac

SEQ ID NO: 86707 - DNA, 20 bp, Artificial Sequence
  Description of Artificial Sequence: Synthetic oligonucleotide
  Target: LAMA2; (-) strand; PAM type: NRG; PAM sequence: CAG
ttctccaccatgttaagatg

SEQ ID NO: 86708 - DNA, 20 bp, Artificial Sequence
  Description of Artificial Sequence: Synthetic oligonucleotide
  Target: LAMA2; (-) strand; PAM type: NRG; PAM sequence: AAG
ttccacttctccaccatgtt

SEQ ID NO: 86709 - DNA, 20 bp, Artificial Sequence
  Description of Artificial Sequence: Synthetic oligonucleotide
  Target: LAMA2; (-) strand; PAM type: NRG; PAM sequence: TGG
ggaaggctccctcttgtgtt

SEQ ID NO: 86710 - DNA, 20 bp, Artificial Sequence
  Description of Artificial Sequence: Synthetic oligonucleotide
  Target: LAMA2; (-) strand; PAM type: NRG; PAM sequence: AGG
gggtgggttgttaaaaagga

SEQ ID NO: 86711 - DNA, 20 bp, Artificial Sequence
  Description of Artificial Sequence: Synthetic oligonucleotide
  Target: LAMA2; (-) strand; PAM type: NRG; PAM sequence: AAG
agggtgggttgttaaaaagg

SEQ ID NO: 86712 - DNA, 20 bp, Artificial Sequence
  Description of Artificial Sequence: Synthetic oligonucleotide
  Target: LAMA2; (-) strand; PAM type: NRG; PAM sequence: AGG
tcgagggtgggttgttaaaa

SEQ ID NO: 86713 - DNA, 20 bp, Artificial Sequence
  Description of Artificial Sequence: Synthetic oligonucleotide
  Target: LAMA2; (-) strand; PAM type: NRG; PAM sequence: AAG
ctcgagggtgggttgttaaa

SEQ ID NO: 86714 - DNA, 20 bp, Artificial Sequence
  Description of Artificial Sequence: Synthetic oligonucleotide
  Target: LAMA2; (-) strand; PAM type: NRG; PAM sequence: GGG
ggattagctacctcgagggt

SEQ ID NO: 86715 - DNA, 20 bp, Artificial Sequence
  Description of Artificial Sequence: Synthetic oligonucleotide
  Target: LAMA2; (-) strand; PAM type: NRG; PAM sequence: TGG
tggattagctacctcgaggg

SEQ ID NO: 86716 - DNA, 20 bp, Artificial Sequence
  Description of Artificial Sequence: Synthetic oligonucleotide
  Target: LAMA2; (-) strand; PAM type: NRG; PAM sequence: GGG
gactggattagctacctcga

SEQ ID NO: 86717 - DNA, 20 bp, Artificial Sequence
  Description of Artificial Sequence: Synthetic oligonucleotide
  Target: LAMA2; (-) strand; PAM type: NRG; PAM sequence: AGG
ggactggattagctacctcg

SEQ ID NO: 86718 - DNA, 20 bp, Artificial Sequence
  Description of Artificial Sequence: Synthetic oligonucleotide
  Target: LAMA2; (-) strand; PAM type: NRG; PAM sequence: GAG
aggactggattagctacctc

SEQ ID NO: 86719 - DNA, 20 bp, Artificial Sequence
  Description of Artificial Sequence: Synthetic oligonucleotide
  Target: LAMA2; (-) strand; PAM type: NRG; PAM sequence: TAG
ttgctcttgtaggactggat

SEQ ID NO: 86720 - DNA, 20 bp, Artificial Sequence
  Description of Artificial Sequence: Synthetic oligonucleotide
  Target: LAMA2; (-) strand; PAM type: NRG; PAM sequence: TGG
agttcttgctcttgtaggac

SEQ ID NO: 86721 - DNA, 20 bp, Artificial Sequence
  Description of Artificial Sequence: Synthetic oligonucleotide
  Target: LAMA2; (-) strand; PAM type: NRG; PAM sequence: AGG
gagtgagttcttgctcttgt

SEQ ID NO: 86722 - DNA, 20 bp, Artificial Sequence
  Description of Artificial Sequence: Synthetic oligonucleotide
  Target: LAMA2; (-) strand; PAM type: NRG; PAM sequence: TAG
agagtgagttcttgctcttg

SEQ ID NO: 86723 - DNA, 20 bp, Artificial Sequence
  Description of Artificial Sequence: Synthetic oligonucleotide
  Target: LAMA2; (-) strand; PAM type: NRG; PAM sequence: GAG
attaatacctttcttagagt

SEQ ID NO: 86724 - DNA, 20 bp, Artificial Sequence
  Description of Artificial Sequence: Synthetic oligonucleotide
  Target: LAMA2; (-) strand; PAM type: NRG; PAM sequence: GAG
aggaattaatacctttctta

SEQ ID NO: 86725 - DNA, 20 bp, Artificial Sequence
  Description of Artificial Sequence: Synthetic oligonucleotide
  Target: LAMA2; (-) strand; PAM type: NRG; PAM sequence: TAG
aaaggaattaatacctttct

SEQ ID NO: 86726 - DNA, 20 bp, Artificial Sequence
  Description of Artificial Sequence: Synthetic oligonucleotide
  Target: LAMA2; (-) strand; PAM type: NRG; PAM sequence: AGG
aggtgattaggtttttaaaa

SEQ ID NO: 86727 - DNA, 20 bp, Artificial Sequence
  Description of Artificial Sequence: Synthetic oligonucleotide
  Target: LAMA2; (-) strand; PAM type: NRG; PAM sequence: AAG
gaggtgattaggtttttaaa

SEQ ID NO: 86728 - DNA, 20 bp, Artificial Sequence
  Description of Artificial Sequence: Synthetic oligonucleotide
  Target: LAMA2; (-) strand; PAM type: NRG; PAM sequence: AGG
ggtgccttggagaggtgatt

SEQ ID NO: 86729 - DNA, 20 bp, Artificial Sequence
  Description of Artificial Sequence: Synthetic oligonucleotide
  Target: LAMA2; (-) strand; PAM type: NRG; PAM sequence: TAG
tggtgccttggagaggtgat

SEQ ID NO: 86730 - DNA, 20 bp, Artificial Sequence
  Description of Artificial Sequence: Synthetic oligonucleotide
  Target: LAMA2; (-) strand; PAM type: NRG; PAM sequence: AGG
tgagaggtggtgccttggag

SEQ ID NO: 86731 - DNA, 20 bp, Artificial Sequence
  Description of Artificial Sequence: Synthetic oligonucleotide
  Target: LAMA2; (-) strand; PAM type: NRG; PAM sequence: GAG
ttgagaggtggtgccttgga

SEQ ID NO: 86732 - DNA, 20 bp, Artificial Sequence
  Description of Artificial Sequence: Synthetic oligonucleotide
  Target: LAMA2; (-) strand; PAM type: NRG; PAM sequence: GAG
tgttgagaggtggtgccttg

SEQ ID NO: 86733 - DNA, 20 bp, Artificial Sequence
  Description of Artificial Sequence: Synthetic oligonucleotide
  Target: LAMA2; (-) strand; PAM type: NRG; PAM sequence: TGG
gatgttgagaggtggtgcct

SEQ ID NO: 86734 - DNA, 20 bp, Artificial Sequence
  Description of Artificial Sequence: Synthetic oligonucleotide
  Target: LAMA2; (-) strand; PAM type: NRG; PAM sequence: TGG
aatggggtgatgttgagagg

SEQ ID NO: 86735 - DNA, 20 bp, Artificial Sequence
  Description of Artificial Sequence: Synthetic oligonucleotide
  Target: LAMA2; (-) strand; PAM type: NRG; PAM sequence: AGG
cctaatggggtgatgttgag

SEQ ID NO: 86736 - DNA, 20 bp, Artificial Sequence
  Description of Artificial Sequence: Synthetic oligonucleotide
  Target: LAMA2; (-) strand; PAM type: NRG; PAM sequence: GAG
tcctaatggggtgatgttga

SEQ ID NO: 86737 - DNA, 20 bp, Artificial Sequence
  Description of Artificial Sequence: Synthetic oligonucleotide
  Target: LAMA2; (-) strand; PAM type: NRG; PAM sequence: GAG
gttcctaatggggtgatgtt

SEQ ID NO: 86738 - DNA, 20 bp, Artificial Sequence
  Description of Artificial Sequence: Synthetic oligonucleotide
  Target: LAMA2; (-) strand; PAM type: NRG; PAM sequence: GGG
gtgaggtttggttcctaatg

SEQ ID NO: 86739 - DNA, 20 bp, Artificial Sequence
  Description of Artificial Sequence: Synthetic oligonucleotide
  Target: LAMA2; (-) strand; PAM type: NRG; PAM sequence: GGG
agtgaggtttggttcctaat

SEQ ID NO: 86740 - DNA, 20 bp, Artificial Sequence
  Description of Artificial Sequence: Synthetic oligonucleotide
  Target: LAMA2; (-) strand; PAM type: NRG; PAM sequence: TGG
tagtgaggtttggttcctaa

SEQ ID NO: 86741 - DNA, 20 bp, Artificial Sequence
  Description of Artificial Sequence: Synthetic oligonucleotide
  Target: LAMA2; (-) strand; PAM type: NRG; PAM sequence: TGG
tcaaaatccatagtgaggtt

SEQ ID NO: 86742 - DNA, 20 bp, Artificial Sequence
  Description of Artificial Sequence: Synthetic oligonucleotide
  Target: LAMA2; (-) strand; PAM type: NRG; PAM sequence: AGG
cacaatcaaaatccatagtg

SEQ ID NO: 86743 - DNA, 20 bp, Artificial Sequence
  Description of Artificial Sequence: Synthetic oligonucleotide
  Target: LAMA2; (-) strand; PAM type: NRG; PAM sequence: GAG
tcacaatcaaaatccatagt

SEQ ID NO: 86744 - DNA, 20 bp, Artificial Sequence
  Description of Artificial Sequence: Synthetic oligonucleotide
  Target: LAMA2; (-) strand; PAM type: NRG; PAM sequence: TAG
tttgtcacaatcaaaatcca

SEQ ID NO: 86745 - DNA, 20 bp, Artificial Sequence
  Description of Artificial Sequence: Synthetic oligonucleotide
  Target: LAMA2; (-) strand; PAM type: NRG; PAM sequence: TGG
tttgtgttatggttagaata

SEQ ID NO: 86746 - DNA, 20 bp, Artificial Sequence
  Description of Artificial Sequence: Synthetic oligonucleotide
  Target: LAMA2; (-) strand; PAM type: NRG; PAM sequence: TAG
gacatcatttgtgttatggt

SEQ ID NO: 86747 - DNA, 20 bp, Artificial Sequence
  Description of Artificial Sequence: Synthetic oligonucleotide
  Target: LAMA2; (-) strand; PAM type: NRG; PAM sequence: TGG
actggacatcatttgtgtta

SEQ ID NO: 86748 - DNA, 20 bp, Artificial Sequence
  Description of Artificial Sequence: Synthetic oligonucleotide
  Target: LAMA2; (-) strand; PAM type: NRG; PAM sequence: TGG
acaaatggcactagaaaaac

SEQ ID NO: 86749 - DNA, 20 bp, Artificial Sequence
  Description of Artificial Sequence: Synthetic oligonucleotide
  Target: LAMA2; (-) strand; PAM type: NRG; PAM sequence: TAG
gtgttttcaacaaatggcac

SEQ ID NO: 86750 - DNA, 20 bp, Artificial Sequence
  Description of Artificial Sequence: Synthetic oligonucleotide
  Target: LAMA2; (-) strand; PAM type: NRG; PAM sequence: TGG
aggaaagtgttttcaacaaa

SEQ ID NO: 86751 - DNA, 20 bp, Artificial Sequence
  Description of Artificial Sequence: Synthetic oligonucleotide
  Target: LAMA2; (-) strand; PAM type: NRG; PAM sequence: AAG
ggaattcaatgaagaaagga

SEQ ID NO: 86752 - DNA, 20 bp, Artificial Sequence
  Description of Artificial Sequence: Synthetic oligonucleotide
  Target: LAMA2; (-) strand; PAM type: NRG; PAM sequence: AGG
aaagggaattcaatgaagaa

SEQ ID NO: 86753 - DNA, 20 bp, Artificial Sequence
  Description of Artificial Sequence: Synthetic oligonucleotide
  Target: LAMA2; (-) strand; PAM type: NRG; PAM sequence: AAG
caaagggaattcaatgaaga

SEQ ID NO: 86754 - DNA, 20 bp, Artificial Sequence
  Description of Artificial Sequence: Synthetic oligonucleotide
  Target: LAMA2; (-) strand; PAM type: NRG; PAM sequence: AAG
ggagcaaagggaattcaatg

SEQ ID NO: 86755 - DNA, 20 bp, Artificial Sequence
  Description of Artificial Sequence: Synthetic oligonucleotide
  Target: LAMA2; (-) strand; PAM type: NRG; PAM sequence: GGG
atctttcacaaaggagcaaa

SEQ ID NO: 86756 - DNA, 20 bp, Artificial Sequence
  Description of Artificial Sequence: Synthetic oligonucleotide
  Target: LAMA2; (-) strand; PAM type: NRG; PAM sequence: AGG
gatctttcacaaaggagcaa

SEQ ID NO: 86757 - DNA, 20 bp, Artificial Sequence
  Description of Artificial Sequence: Synthetic oligonucleotide
  Target: LAMA2; (-) strand; PAM type: NRG; PAM sequence: AAG
tgatctttcacaaaggagca

SEQ ID NO: 86758 - DNA, 20 bp, Artificial Sequence
  Description of Artificial Sequence: Synthetic oligonucleotide
  Target: LAMA2; (-) strand; PAM type: NRG; PAM sequence: GAG
ccatctgatctttcacaaag

SEQ ID NO: 86759 - DNA, 20 bp, Artificial Sequence
  Description of Artificial Sequence: Synthetic oligonucleotide
  Target: LAMA2; (-) strand; PAM type: NRG; PAM sequence: AGG
ggccatctgatctttcacaa

SEQ ID NO: 86760 - DNA, 20 bp, Artificial Sequence
  Description of Artificial Sequence: Synthetic oligonucleotide
  Target: LAMA2; (-) strand; PAM type: NRG; PAM sequence: AAG
tggccatctgatctttcaca

SEQ ID NO: 86761 - DNA, 20 bp, Artificial Sequence
  Description of Artificial Sequence: Synthetic oligonucleotide
  Target: LAMA2; (-) strand; PAM type: NRG; PAM sequence: TGG
gaaatacacccgcatgaata

SEQ ID NO: 86762 - DNA, 20 bp, Artificial Sequence
  Description of Artificial Sequence: Synthetic oligonucleotide
  Target: LAMA2; (-) strand; PAM type: NRG; PAM sequence: CAG
atggaacagaatagccagcc

SEQ ID NO: 86763 - DNA, 20 bp, Artificial Sequence
  Description of Artificial Sequence: Synthetic oligonucleotide
  Target: LAMA2; (-) strand; PAM type: NRG; PAM sequence: CAG
gatcaatggaacagaatagc

SEQ ID NO: 86764 - DNA, 20 bp, Artificial Sequence
  Description of Artificial Sequence: Synthetic oligonucleotide
  Target: LAMA2; (-) strand; PAM type: NRG; PAM sequence: TAG
cttagatcaatggaacagaa

SEQ ID NO: 86765 - DNA, 20 bp, Artificial Sequence
  Description of Artificial Sequence: Synthetic oligonucleotide
  Target: LAMA2; (-) strand; PAM type: NRG; PAM sequence: CAG
agtcacttagatcaatggaa

SEQ ID NO: 86766 - DNA, 20 bp, Artificial Sequence
  Description of Artificial Sequence: Synthetic oligonucleotide
  Target: LAMA2; (-) strand; PAM type: NRG; PAM sequence: TGG
aaaaaagtcacttagatcaa

SEQ ID NO: 86767 - DNA, 20 bp, Artificial Sequence
  Description of Artificial Sequence: Synthetic oligonucleotide
  Target: LAMA2; (-) strand; PAM type: NRG; PAM sequence: TAG
ctggtcagaaaaaagtcact

SEQ ID NO: 86768 - DNA, 20 bp, Artificial Sequence
  Description of Artificial Sequence: Synthetic oligonucleotide
  Target: LAMA2; (-) strand; PAM type: NRG; PAM sequence: AAG
atatagtactggtcagaaaa

SEQ ID NO: 86769 - DNA, 20 bp, Artificial Sequence
  Description of Artificial Sequence: Synthetic oligonucleotide
  Target: LAMA2; (-) strand; PAM type: NRG; PAM sequence: CAG
caagacaatatagtactggt

SEQ ID NO: 86770 - DNA, 20 bp, Artificial Sequence
  Description of Artificial Sequence: Synthetic oligonucleotide
  Target: LAMA2; (-) strand; PAM type: NRG; PAM sequence: TGG
ttatcaagacaatatagtac

SEQ ID NO: 86771 - DNA, 20 bp, Artificial Sequence
  Description of Artificial Sequence: Synthetic oligonucleotide
  Target: LAMA2; (-) strand; PAM type: NRG; PAM sequence: TAG
ctatagttatcaagacaata

SEQ ID NO: 86772 - DNA, 20 bp, Artificial Sequence
  Description of Artificial Sequence: Synthetic oligonucleotide
  Target: LAMA2; (-) strand; PAM type: NRG; PAM sequence: AAG
agtataaaactatagttatc

SEQ ID NO: 86773 - DNA, 20 bp, Artificial Sequence
  Description of Artificial Sequence: Synthetic oligonucleotide
  Target: LAMA2; (-) strand; PAM type: NRG; PAM sequence: TAG
caagacttagtataaaacta

SEQ ID NO: 86774 - DNA, 20 bp, Artificial Sequence
  Description of Artificial Sequence: Synthetic oligonucleotide
  Target: LAMA2; (-) strand; PAM type: NRG; PAM sequence: TAG
cactacccaacttcaagact

SEQ ID NO: 86775 - DNA, 20 bp, Artificial Sequence
  Description of Artificial Sequence: Synthetic oligonucleotide
  Target: LAMA2; (-) strand; PAM type: NRG; PAM sequence: AAG
agctaacactacccaacttc

SEQ ID NO: 86776 - DNA, 20 bp, Artificial Sequence
  Description of Artificial Sequence: Synthetic oligonucleotide
  Target: LAMA2; (-) strand; PAM type: NRG; PAM sequence: AAG
taatattgaacaaacttgta

SEQ ID NO: 86777 - DNA, 20 bp, Artificial Sequence
  Description of Artificial Sequence: Synthetic oligonucleotide
  Target: LAMA2; (-) strand; PAM type: NRG; PAM sequence: CAG
tggagaggaaagaccaagaa

SEQ ID NO: 86778 - DNA, 20 bp, Artificial Sequence
  Description of Artificial Sequence: Synthetic oligonucleotide
  Target: LAMA2; (-) strand; PAM type: NRG; PAM sequence: AAG
ttatatggagaggaaagacc

SEQ ID NO: 86779 - DNA, 20 bp, Artificial Sequence
  Description of Artificial Sequence: Synthetic oligonucleotide
  Target: LAMA2; (-) strand; PAM type: NRG; PAM sequence: AAG
taaaatttatatggagagga

SEQ ID NO: 86780 - DNA, 20 bp, Artificial Sequence
  Description of Artificial Sequence: Synthetic oligonucleotide
  Target: LAMA2; (-) strand; PAM type: NRG; PAM sequence: AGG
attctaaaatttatatggag

SEQ ID NO: 86781 - DNA, 20 bp, Artificial Sequence
  Description of Artificial Sequence: Synthetic oligonucleotide
  Target: LAMA2; (-) strand; PAM type: NRG; PAM sequence: GAG
gattctaaaatttatatgga

SEQ ID NO: 86782 - DNA, 20 bp, Artificial Sequence
  Description of Artificial Sequence: Synthetic oligonucleotide
  Target: LAMA2; (-) strand; PAM type: NRG; PAM sequence: GAG
ctgattctaaaatttatatg

SEQ ID NO: 86783 - DNA, 20 bp, Artificial Sequence
  Description of Artificial Sequence: Synthetic oligonucleotide
  Target: LAMA2; (-) strand; PAM type: NRG; PAM sequence: TGG
cactgattctaaaatttata

SEQ ID NO: 86784 - DNA, 20 bp, Artificial Sequence
  Description of Artificial Sequence: Synthetic oligonucleotide
  Target: LAMA2; (-) strand; PAM type: NRG; PAM sequence: TGG
aatcccagcaagttattttt

SEQ ID NO: 86785 - DNA, 20 bp, Artificial Sequence
  Description of Artificial Sequence: Synthetic oligonucleotide
  Target: LAMA2; (-) strand; PAM type: NRG; PAM sequence: AAG
atcccagtcaaaatcccagc

SEQ ID NO: 86786 - DNA, 20 bp, Artificial Sequence
  Description of Artificial Sequence: Synthetic oligonucleotide
  Target: LAMA2; (-) strand; PAM type: NRG; PAM sequence: CAG
ggtaatcccagtcaaaatcc

SEQ ID NO: 86787 - DNA, 20 bp, Artificial Sequence
  Description of Artificial Sequence: Synthetic oligonucleotide
  Target: LAMA2; (-) strand; PAM type: NRG; PAM sequence: CAG
gtgtagattcaaggtaatcc

SEQ ID NO: 86788 - DNA, 20 bp, Artificial Sequence
  Description of Artificial Sequence: Synthetic oligonucleotide
  Target: LAMA2; (-) strand; PAM type: NRG; PAM sequence: AGG
tcccaatttgtgtagattca

SEQ ID NO: 86789 - DNA, 20 bp, Artificial Sequence
  Description of Artificial Sequence: Synthetic oligonucleotide
  Target: LAMA2; (-) strand; PAM type: NRG; PAM sequence: AAG
ttcccaatttgtgtagattc

SEQ ID NO: 86790 - DNA, 20 bp, Artificial Sequence
  Description of Artificial Sequence: Synthetic oligonucleotide
  Target: LAMA2; (-) strand; PAM type: NRG; PAM sequence: TAG
tcagttcttcccaatttgtg

SEQ ID NO: 86791 - DNA, 20 bp, Artificial Sequence
  Description of Artificial Sequence: Synthetic oligonucleotide
  Target: LAMA2; (-) strand; PAM type: NRG; PAM sequence: CAG
gaagactcaaggtaggatgt

SEQ ID NO: 86792 - DNA, 20 bp, Artificial Sequence
  Description of Artificial Sequence: Synthetic oligonucleotide
  Target: LAMA2; (-) strand; PAM type: NRG; PAM sequence: AGG
taaataggaagactcaaggt

SEQ ID NO: 86793 - DNA, 20 bp, Artificial Sequence
  Description of Artificial Sequence: Synthetic oligonucleotide
  Target: LAMA2; (-) strand; PAM type: NRG; PAM sequence: TAG
ataaataggaagactcaagg

SEQ ID NO: 86794 - DNA, 20 bp, Artificial Sequence
  Description of Artificial Sequence: Synthetic oligonucleotide
  Target: LAMA2; (-) strand; PAM type: NRG; PAM sequence: AGG
tccataaataggaagactca

SEQ ID NO: 86795 - DNA, 20 bp, Artificial Sequence
  Description of Artificial Sequence: Synthetic oligonucleotide
  Target: LAMA2; (-) strand; PAM type: NRG; PAM sequence: AAG
gtccataaataggaagactc

SEQ ID NO: 86796 - DNA, 20 bp, Artificial Sequence
  Description of Artificial Sequence: Synthetic oligonucleotide
  Target: LAMA2; (-) strand; PAM type: NRG; PAM sequence: AAG
attccatgtccataaatagg

SEQ ID NO: 86797 - DNA, 20 bp, Artificial Sequence
  Description of Artificial Sequence: Synthetic oligonucleotide
  Target: LAMA2; (-) strand; PAM type: NRG; PAM sequence: AGG
ggtattccatgtccataaat

SEQ ID NO: 86798 - DNA, 20 bp, Artificial Sequence
  Description of Artificial Sequence: Synthetic oligonucleotide
  Target: LAMA2; (-) strand; PAM type: NRG; PAM sequence: TAG
aggtattccatgtccataaa

SEQ ID NO: 86799 - DNA, 20 bp, Artificial Sequence
  Description of Artificial Sequence: Synthetic oligonucleotide
  Target: LAMA2; (-) strand; PAM type: NRG; PAM sequence: AGG
gaaaaattaaataaatggag

SEQ ID NO: 86800 - DNA, 20 bp, Artificial Sequence
  Description of Artificial Sequence: Synthetic oligonucleotide
  Target: LAMA2; (-) strand; PAM type: NRG; PAM sequence: GAG
agaaaaattaaataaatgga

SEQ ID NO: 86801 - DNA, 20 bp, Artificial Sequence
  Description of Artificial Sequence: Synthetic oligonucleotide
  Target: LAMA2; (-) strand; PAM type: NRG; PAM sequence: GAG
aaagaaaaattaaataaatg

SEQ ID NO: 86802 - DNA, 20 bp, Artificial Sequence
  Description of Artificial Sequence: Synthetic oligonucleotide
  Target: LAMA2; (-) strand; PAM type: NRG; PAM sequence: TGG
tcaaagaaaaattaaataaa

SEQ ID NO: 86803 - DNA, 20 bp, Artificial Sequence
  Description of Artificial Sequence: Synthetic oligonucleotide
  Target: LAMA2; (-) strand; PAM type: NRG; PAM sequence: AAG
aactccagtgaaagaaatca

SEQ ID NO: 86804 - DNA, 20 bp, Artificial Sequence
  Description of Artificial Sequence: Synthetic oligonucleotide
  Target: LAMA2; (-) strand; PAM type: NRG; PAM sequence: AAG
aaactataaaactccagtga

SEQ ID NO: 86805 - DNA, 20 bp, Artificial Sequence
  Description of Artificial Sequence: Synthetic oligonucleotide
  Target: LAMA2; (-) strand; PAM type: NRG; PAM sequence: CAG
tgaggaaaactataaaactc

SEQ ID NO: 86806 - DNA, 20 bp, Artificial Sequence
  Description of Artificial Sequence: Synthetic oligonucleotide
  Target: LAMA2; (-) strand; PAM type: NRG; PAM sequence: AGG
ttatgtacaaaatctatatg

SEQ ID NO: 86807 - DNA, 20 bp, Artificial Sequence
  Description of Artificial Sequence: Synthetic oligonucleotide
  Target: LAMA2; (-) strand; PAM type: NRG; PAM sequence: GAG
attatgtacaaaatctatat

SEQ ID NO: 86808 - DNA, 20 bp, Artificial Sequence
  Description of Artificial Sequence: Synthetic oligonucleotide
  Target: LAMA2; (-) strand; PAM type: NRG; PAM sequence: TAG
aaacacaagaccatttatac

SEQ ID NO: 86809 - DNA, 20 bp, Artificial Sequence
  Description of Artificial Sequence: Synthetic oligonucleotide
  Target: LAMA2; (-) strand; PAM type: NRG; PAM sequence: AAG
gaatgtgaagttaaaaacac

SEQ ID NO: 86810 - DNA, 20 bp, Artificial Sequence
  Description of Artificial Sequence: Synthetic oligonucleotide
  Target: LAMA2; (-) strand; PAM type: NRG; PAM sequence: AAG
gcaaagaaaattggaatgtg

SEQ ID NO: 86811 - DNA, 20 bp, Artificial Sequence
  Description of Artificial Sequence: Synthetic oligonucleotide
  Target: LAMA2; (-) strand; PAM type: NRG; PAM sequence: TGG
tatatattagcaaagaaaat

SEQ ID NO: 86812 - DNA, 20 bp, Artificial Sequence
  Description of Artificial Sequence: Synthetic oligonucleotide
  Target: LAMA2; (-) strand; PAM type: NRG; PAM sequence: AAG
tgctttcctatatattagca

SEQ ID NO: 86813 - DNA, 20 bp, Artificial Sequence
  Description of Artificial Sequence: Synthetic oligonucleotide
  Target: LAMA2; (-) strand; PAM type: NRG; PAM sequence: TAG
tcaattgctttcctatatat

SEQ ID NO: 86814 - DNA, 20 bp, Artificial Sequence
  Description of Artificial Sequence: Synthetic oligonucleotide
  Target: LAMA2; (-) strand; PAM type: NRG; PAM sequence: AAG
tgaagaaaaaggtggtataa

SEQ ID NO: 86815 - DNA, 20 bp, Artificial Sequence
  Description of Artificial Sequence: Synthetic oligonucleotide
  Target: LAMA2; (-) strand; PAM type: NRG; PAM sequence: TGG
catctgtctgaagaaaaagg

SEQ ID NO: 86816 - DNA, 20 bp, Artificial Sequence
  Description of Artificial Sequence: Synthetic oligonucleotide
  Target: LAMA2; (-) strand; PAM type: NRG; PAM sequence: AGG
ttccatctgtctgaagaaaa

SEQ ID NO: 86817 - DNA, 20 bp, Artificial Sequence
  Description of Artificial Sequence: Synthetic oligonucleotide
  Target: LAMA2; (-) strand; PAM type: NRG; PAM sequence: AAG
attccatctgtctgaagaaa

SEQ ID NO: 86818 - DNA, 20 bp, Artificial Sequence
  Description of Artificial Sequence: Synthetic oligonucleotide
  Target: LAMA2; (-) strand; PAM type: NRG; PAM sequence: AAG
cacttgattccatctgtctg

SEQ ID NO: 86819 - DNA, 20 bp, Artificial Sequence
  Description of Artificial Sequence: Synthetic oligonucleotide
  Target: LAMA2; (-) strand; PAM type: NRG; PAM sequence: AAG
gagcaacaaagccaatttct

SEQ ID NO: 86820 - DNA, 20 bp, Artificial Sequence
  Description of Artificial Sequence: Synthetic oligonucleotide
  Target: LAMA2; (-) strand; PAM type: NRG; PAM sequence: AAG
gatactcaggcagagcaaca

SEQ ID NO: 86821 - DNA, 20 bp, Artificial Sequence
  Description of Artificial Sequence: Synthetic oligonucleotide
  Target: LAMA2; (-) strand; PAM type: NRG; PAM sequence: GAG
attttcaagatactcaggca

SEQ ID NO: 86822 - DNA, 20 bp, Artificial Sequence
  Description of Artificial Sequence: Synthetic oligonucleotide
  Target: LAMA2; (-) strand; PAM type: NRG; PAM sequence: CAG
gaattttcaagatactcagg

SEQ ID NO: 86823 - DNA, 20 bp, Artificial Sequence
  Description of Artificial Sequence: Synthetic oligonucleotide
  Target: LAMA2; (-) strand; PAM type: NRG; PAM sequence: AGG
tgagaattttcaagatactc

SEQ ID NO: 86824 - DNA, 20 bp, Artificial Sequence
  Description of Artificial Sequence: Synthetic oligonucleotide
  Target: LAMA2; (-) strand; PAM type: NRG; PAM sequence: CAG
atgagaattttcaagatact

SEQ ID NO: 86825 - DNA, 20 bp, Artificial Sequence
  Description of Artificial Sequence: Synthetic oligonucleotide
  Target: LAMA2; (-) strand; PAM type: NRG; PAM sequence: AAG
gaaggaagatgagaattttc

SEQ ID NO: 86826 - DNA, 20 bp, Artificial Sequence
  Description of Artificial Sequence: Synthetic oligonucleotide
  Target: LAMA2; (-) strand; PAM type: NRG; PAM sequence: GAG
atggttctcagaaggaagat

SEQ ID NO: 86827 - DNA, 20 bp, Artificial Sequence
  Description of Artificial Sequence: Synthetic oligonucleotide
  Target: LAMA2; (-) strand; PAM type: NRG; PAM sequence: AAG
aggttatggttctcagaagg

SEQ ID NO: 86828 - DNA, 20 bp, Artificial Sequence
  Description of Artificial Sequence: Synthetic oligonucleotide
  Target: LAMA2; (-) strand; PAM type: NRG; PAM sequence: AGG
tgtaggttatggttctcaga

SEQ ID NO: 86829 - DNA, 20 bp, Artificial Sequence
  Description of Artificial Sequence: Synthetic oligonucleotide
  Target: LAMA2; (-) strand; PAM type: NRG; PAM sequence: AAG
atgtaggttatggttctcag

SEQ ID NO: 86830 - DNA, 20 bp, Artificial Sequence
  Description of Artificial Sequence: Synthetic oligonucleotide
  Target: LAMA2; (-) strand; PAM type: NRG; PAM sequence: CAG
gatatgtaggttatggttct

SEQ ID NO: 86831 - DNA, 20 bp, Artificial Sequence
  Description of Artificial Sequence: Synthetic oligonucleotide
  Target: LAMA2; (-) strand; PAM type: NRG; PAM sequence: TGG
accttgagatatgtaggtta

SEQ ID NO: 86832 - DNA, 20 bp, Artificial Sequence
  Description of Artificial Sequence: Synthetic oligonucleotide
  Target: LAMA2; (-) strand; PAM type: NRG; PAM sequence: AGG
tctataaccttgagatatgt

SEQ ID NO: 86833 - DNA, 20 bp, Artificial Sequence
  Description of Artificial Sequence: Synthetic oligonucleotide
  Target: LAMA2; (-) strand; PAM type: NRG; PAM sequence: TAG
atctataaccttgagatatg

SEQ ID NO: 86834 - DNA, 20 bp, Artificial Sequence
  Description of Artificial Sequence: Synthetic oligonucleotide
  Target: LAMA2; (-) strand; PAM type: NRG; PAM sequence: GAG
agcattttatctataacctt

SEQ ID NO: 86835 - DNA, 20 bp, Artificial Sequence
  Description of Artificial Sequence: Synthetic oligonucleotide
  Target: LAMA2; (-) strand; PAM type: NRG; PAM sequence: TAG
cattacaaggattttgtagg

SEQ ID NO: 86836 - DNA, 20 bp, Artificial Sequence
  Description of Artificial Sequence: Synthetic oligonucleotide
  Target: LAMA2; (-) strand; PAM type: NRG; PAM sequence: AGG
aagcattacaaggattttgt

SEQ ID NO: 86837 - DNA, 20 bp, Artificial Sequence
  Description of Artificial Sequence: Synthetic oligonucleotide
  Target: LAMA2; (-) strand; PAM type: NRG; PAM sequence: TAG
taagcattacaaggattttg

SEQ ID NO: 86838 - DNA, 20 bp, Artificial Sequence
  Description of Artificial Sequence: Synthetic oligonucleotide
  Target: LAMA2; (-) strand; PAM type: NRG; PAM sequence: AGG
tttagactgtaagcattaca

SEQ ID NO: 86839 - DNA, 20 bp, Artificial Sequence
  Description of Artificial Sequence: Synthetic oligonucleotide
  Target: LAMA2; (-) strand; PAM type: NRG; PAM sequence: AAG
ttttagactgtaagcattac

SEQ ID NO: 86840 - DNA, 20 bp, Artificial Sequence
  Description of Artificial Sequence: Synthetic oligonucleotide
  Target: LAMA2; (-) strand; PAM type: NRG; PAM sequence: AAG
tatttagtcttttagactgt

SEQ ID NO: 86841 - DNA, 20 bp, Artificial Sequence
  Description of Artificial Sequence: Synthetic oligonucleotide
  Target: LAMA2; (-) strand; PAM type: NRG; PAM sequence: TAG
tgaggccttatttagtcttt

SEQ ID NO: 86842 - DNA, 20 bp, Artificial Sequence
  Description of Artificial Sequence: Synthetic oligonucleotide
  Target: LAMA2; (-) strand; PAM type: NRG; PAM sequence: TAG
taatctcttgaggccttatt

SEQ ID NO: 86843 - DNA, 20 bp, Artificial Sequence
  Description of Artificial Sequence: Synthetic oligonucleotide
  Target: LAMA2; (-) strand; PAM type: NRG; PAM sequence: AGG
tgattttgaataatctcttg

SEQ ID NO: 86844 - DNA, 20 bp, Artificial Sequence
  Description of Artificial Sequence: Synthetic oligonucleotide
  Target: LAMA2; (-) strand; PAM type: NRG; PAM sequence: GAG
ctgattttgaataatctctt

SEQ ID NO: 86845 - DNA, 20 bp, Artificial Sequence
  Description of Artificial Sequence: Synthetic oligonucleotide
  Target: LAMA2; (-) strand; PAM type: NRG; PAM sequence: GGG
tagccctttatgactctact

SEQ ID NO: 86846 - DNA, 20 bp, Artificial Sequence
  Description of Artificial Sequence: Synthetic oligonucleotide
  Target: LAMA2; (-) strand; PAM type: NRG; PAM sequence: TGG
atagccctttatgactctac

SEQ ID NO: 86847 - DNA, 20 bp, Artificial Sequence
  Description of Artificial Sequence: Synthetic oligonucleotide
  Target: LAMA2; (-) strand; PAM type: NRG; PAM sequence: TAG
gaattgcagctaacataaca

SEQ ID NO: 86848 - DNA, 20 bp, Artificial Sequence
  Description of Artificial Sequence: Synthetic oligonucleotide
  Target: LAMA2; (-) strand; PAM type: NRG; PAM sequence: CAG
ttgatataggattagaattg

SEQ ID NO: 86849 - DNA, 20 bp, Artificial Sequence
  Description of Artificial Sequence: Synthetic oligonucleotide
  Target: LAMA2; (-) strand; PAM type: NRG; PAM sequence: TAG
cagaagctttgatataggat

SEQ ID NO: 86850 - DNA, 20 bp, Artificial Sequence
  Description of Artificial Sequence: Synthetic oligonucleotide
  Target: LAMA2; (-) strand; PAM type: NRG; PAM sequence: AGG
gaagtcagaagctttgatat

SEQ ID NO: 86851 - DNA, 20 bp, Artificial Sequence
  Description of Artificial Sequence: Synthetic oligonucleotide
  Target: LAMA2; (-) strand; PAM type: NRG; PAM sequence: TAG
ggaagtcagaagctttgata

SEQ ID NO: 86852 - DNA, 20 bp, Artificial Sequence
  Description of Artificial Sequence: Synthetic oligonucleotide
  Target: LAMA2; (-) strand; PAM type: NRG; PAM sequence: AAG
tatgggggagtggaagtcag

SEQ ID NO: 86853 - DNA, 20 bp, Artificial Sequence
  Description of Artificial Sequence: Synthetic oligonucleotide
  Target: LAMA2; (-) strand; PAM type: NRG; PAM sequence: CAG
agatatgggggagtggaagt

SEQ ID NO: 86854 - DNA, 20 bp, Artificial Sequence
  Description of Artificial Sequence: Synthetic oligonucleotide
  Target: LAMA2; (-) strand; PAM type: NRG; PAM sequence: AAG
ccttagatatgggggagtgg

SEQ ID NO: 86855 - DNA, 20 bp, Artificial Sequence
  Description of Artificial Sequence: Synthetic oligonucleotide
  Target: LAMA2; (-) strand; PAM type: NRG; PAM sequence: TGG
cctccttagatatgggggag

SEQ ID NO: 86856 - DNA, 20 bp, Artificial Sequence
  Description of Artificial Sequence: Synthetic oligonucleotide
  Target: LAMA2; (-) strand; PAM type: NRG; PAM sequence: GAG
aaacctccttagatatgggg

SEQ ID NO: 86857 - DNA, 20 bp, Artificial Sequence
  Description of Artificial Sequence: Synthetic oligonucleotide
  Target: LAMA2; (-) strand; PAM type: NRG; PAM sequence: GGG
ggaaacctccttagatatgg

SEQ ID NO: 86858 - DNA, 20 bp, Artificial Sequence
  Description of Artificial Sequence: Synthetic oligonucleotide
  Target: LAMA2; (-) strand; PAM type: NRG; PAM sequence: GGG
gggaaacctccttagatatg

SEQ ID NO: 86859 - DNA, 20 bp, Artificial Sequence
  Description of Artificial Sequence: Synthetic oligonucleotide
  Target: LAMA2; (-) strand; PAM type: NRG; PAM sequence: GGG
agggaaacctccttagatat

SEQ ID NO: 86860 - DNA, 20 bp, Artificial Sequence
  Description of Artificial Sequence: Synthetic oligonucleotide
  Target: LAMA2; (-) strand; PAM type: NRG; PAM sequence: TGG
gagggaaacctccttagata

SEQ ID NO: 86861 - DNA, 20 bp, Artificial Sequence
  Description of Artificial Sequence: Synthetic oligonucleotide
  Target: LAMA2; (-) strand; PAM type: NRG; PAM sequence: TAG
actgttgagggaaacctcct

SEQ ID NO: 86862 - DNA, 20 bp, Artificial Sequence
  Description of Artificial Sequence: Synthetic oligonucleotide
  Target: LAMA2; (-) strand; PAM type: NRG; PAM sequence: GGG
agttatttttcaactgttga

SEQ ID NO: 86863 - DNA, 20 bp, Artificial Sequence
  Description of Artificial Sequence: Synthetic oligonucleotide
  Target: LAMA2; (-) strand; PAM type: NRG; PAM sequence: AGG
cagttatttttcaactgttg

SEQ ID NO: 86864 - DNA, 20 bp, Artificial Sequence
  Description of Artificial Sequence: Synthetic oligonucleotide
  Target: LAMA2; (-) strand; PAM type: NRG; PAM sequence: GAG
gcagttatttttcaactgtt

SEQ ID NO: 86865 - DNA, 20 bp, Artificial Sequence
  Description of Artificial Sequence: Synthetic oligonucleotide
  Target: LAMA2; (-) strand; PAM type: NRG; PAM sequence: CAG
ggatggcaaagcagtatctg

SEQ ID NO: 86866 - DNA, 20 bp, Artificial Sequence
  Description of Artificial Sequence: Synthetic oligonucleotide
  Target: LAMA2; (-) strand; PAM type: NRG; PAM sequence: CAG
tgtggcatgggatggcaaag

SEQ ID NO: 86867 - DNA, 20 bp, Artificial Sequence
  Description of Artificial Sequence: Synthetic oligonucleotide
  Target: LAMA2; (-) strand; PAM type: NRG; PAM sequence: AAG
ttttgtggcatgggatggca

SEQ ID NO: 86868 - DNA, 20 bp, Artificial Sequence
  Description of Artificial Sequence: Synthetic oligonucleotide
  Target: LAMA2; (-) strand; PAM type: NRG; PAM sequence: TGG
tgcatttttgtggcatggga

SEQ ID NO: 86869 - DNA, 20 bp, Artificial Sequence
  Description of Artificial Sequence: Synthetic oligonucleotide
  Target: LAMA2; (-) strand; PAM type: NRG; PAM sequence: GGG
gaaatgcatttttgtggcat

SEQ ID NO: 86870 - DNA, 20 bp, Artificial Sequence
  Description of Artificial Sequence: Synthetic oligonucleotide
  Target: LAMA2; (-) strand; PAM type: NRG; PAM sequence: TGG
agaaatgcatttttgtggca

SEQ ID NO: 86871 - DNA, 20 bp, Artificial Sequence
  Description of Artificial Sequence: Synthetic oligonucleotide
  Target: LAMA2; (-) strand; PAM type: NRG; PAM sequence: TGG
ccttcagaaatgcatttttg

SEQ ID NO: 86872 - DNA, 20 bp, Artificial Sequence
  Description of Artificial Sequence: Synthetic oligonucleotide
  Target: LAMA2; (-) strand; PAM type: NRG; PAM sequence: CAG
tatctctctgcagcatcctt

SEQ ID NO: 86873 - DNA, 20 bp, Artificial Sequence
  Description of Artificial Sequence: Synthetic oligonucleotide
  Target: LAMA2; (-) strand; PAM type: NRG; PAM sequence: CAG
aagaaatatatatctctctg

SEQ ID NO: 86874 - DNA, 20 bp, Artificial Sequence
  Description of Artificial Sequence: Synthetic oligonucleotide
  Target: LAMA2; (-) strand; PAM type: NRG; PAM sequence: AAG
aatagatatgagctgggctt

SEQ ID NO: 86875 - DNA, 20 bp, Artificial Sequence
  Description of Artificial Sequence: Synthetic oligonucleotide
  Target: LAMA2; (-) strand; PAM type: NRG; PAM sequence: GGG
ttgagaaatagatatgagct

SEQ ID NO: 86876 - DNA, 20 bp, Artificial Sequence
  Description of Artificial Sequence: Synthetic oligonucleotide
  Target: LAMA2; (-) strand; PAM type: NRG; PAM sequence: TGG
cttgagaaatagatatgagc

SEQ ID NO: 86877 - DNA, 20 bp, Artificial Sequence
  Description of Artificial Sequence: Synthetic oligonucleotide
  Target: LAMA2; (-) strand; PAM type: NRG; PAM sequence: GAG
cagccttgagaaatagatat

SEQ ID NO: 86878 - DNA, 20 bp, Artificial Sequence
  Description of Artificial Sequence: Synthetic oligonucleotide
  Target: LAMA2; (-) strand; PAM type: NRG; PAM sequence: TAG
tatcacacagccttgagaaa

SEQ ID NO: 86879 - DNA, 20 bp, Artificial Sequence
  Description of Artificial Sequence: Synthetic oligonucleotide
  Target: LAMA2; (-) strand; PAM type: NRG; PAM sequence: GAG
ctatgatatcacacagcctt

SEQ ID NO: 86880 - DNA, 20 bp, Artificial Sequence
  Description of Artificial Sequence: Synthetic oligonucleotide
  Target: LAMA2; (-) strand; PAM type: NRG; PAM sequence: CAG
attcattctatgatatcaca

SEQ ID NO: 86881 - DNA, 20 bp, Artificial Sequence
  Description of Artificial Sequence: Synthetic oligonucleotide
  Target: LAMA2; (-) strand; PAM type: NRG; PAM sequence: CAG
taagttctaaaaaattaaat

SEQ ID NO: 86882 - DNA, 20 bp, Artificial Sequence
  Description of Artificial Sequence: Synthetic oligonucleotide
  Target: LAMA2; (-) strand; PAM type: NRG; PAM sequence: AAG
tctcacagctactaaatgtt

SEQ ID NO: 86883 - DNA, 20 bp, Artificial Sequence
  Description of Artificial Sequence: Synthetic oligonucleotide
  Target: LAMA2; (-) strand; PAM type: NRG; PAM sequence: CAG
gaaatctctgtaagatctca

SEQ ID NO: 86884 - DNA, 20 bp, Artificial Sequence
  Description of Artificial Sequence: Synthetic oligonucleotide
  Target: LAMA2; (-) strand; PAM type: NRG; PAM sequence: AAG
caaggtgaagaaatctctgt

SEQ ID NO: 86885 - DNA, 20 bp, Artificial Sequence
  Description of Artificial Sequence: Synthetic oligonucleotide
  Target: LAMA2; (-) strand; PAM type: NRG; PAM sequence: AAG
gtgacaaaggatacaaggtg

SEQ ID NO: 86886 - DNA, 20 bp, Artificial Sequence
  Description of Artificial Sequence: Synthetic oligonucleotide
  Target: LAMA2; (-) strand; PAM type: NRG; PAM sequence: AGG
ataaagtgacaaaggataca

SEQ ID NO: 86887 - DNA, 20 bp, Artificial Sequence
  Description of Artificial Sequence: Synthetic oligonucleotide
  Target: LAMA2; (-) strand; PAM type: NRG; PAM sequence: AAG
gataaagtgacaaaggatac

SEQ ID NO: 86888 - DNA, 20 bp, Artificial Sequence
  Description of Artificial Sequence: Synthetic oligonucleotide
  Target: LAMA2; (-) strand; PAM type: NRG; PAM sequence: AGG
ttttatagataaagtgacaa

SEQ ID NO: 86889 - DNA, 20 bp, Artificial Sequence
  Description of Artificial Sequence: Synthetic oligonucleotide
  Target: LAMA2; (-) strand; PAM type: NRG; PAM sequence: AAG
attttatagataaagtgaca

SEQ ID NO: 86890 - DNA, 20 bp, Artificial Sequence
  Description of Artificial Sequence: Synthetic oligonucleotide
  Target: LAMA2; (-) strand; PAM type: NRG; PAM sequence: AAG
cactctccattttatagata

SEQ ID NO: 86891 - DNA, 20 bp, Artificial Sequence
  Description of Artificial Sequence: Synthetic oligonucleotide
  Target: LAMA2; (-) strand; PAM type: NRG; PAM sequence: TAG
tatttacactctccatttta

SEQ ID NO: 86892 - DNA, 20 bp, Artificial Sequence
  Description of Artificial Sequence: Synthetic oligonucleotide
  Target: LAMA2; (-) strand; PAM type: NRG; PAM sequence: TAG
atcatgataactctaagaag

SEQ ID NO: 86893 - DNA, 20 bp, Artificial Sequence
  Description of Artificial Sequence: Synthetic oligonucleotide
  Target: LAMA2; (-) strand; PAM type: NRG; PAM sequence: AAG
agaatcatgataactctaag

SEQ ID NO: 86894 - DNA, 20 bp, Artificial Sequence
  Description of Artificial Sequence: Synthetic oligonucleotide
  Target: LAMA2; (-) strand; PAM type: NRG; PAM sequence: AAG
taaagaatcatgataactct

SEQ ID NO: 86895 - DNA, 20 bp, Artificial Sequence
  Description of Artificial Sequence: Synthetic oligonucleotide
  Target: LAMA2; (-) strand; PAM type: NRG; PAM sequence: AAG
tctcatgagttattagatta

SEQ ID NO: 86896 - DNA, 20 bp, Artificial Sequence
  Description of Artificial Sequence: Synthetic oligonucleotide
  Target: LAMA2; (-) strand; PAM type: NRG; PAM sequence: TAG
tccagtgtctcatgagttat

SEQ ID NO: 86897 - DNA, 20 bp, Artificial Sequence
  Description of Artificial Sequence: Synthetic oligonucleotide
  Target: LAMA2; (-) strand; PAM type: NRG; PAM sequence: GAG
ttacatatccagtgtctcat

SEQ ID NO: 86898 - DNA, 20 bp, Artificial Sequence
  Description of Artificial Sequence: Synthetic oligonucleotide
  Target: LAMA2; (-) strand; PAM type: NRG; PAM sequence: CAG
ttcagttcctattacatatc

SEQ ID NO: 86899 - DNA, 20 bp, Artificial Sequence
  Description of Artificial Sequence: Synthetic oligonucleotide
  Target: LAMA2; (-) strand; PAM type: NRG; PAM sequence: CAG
caagggggttaagaattatt

SEQ ID NO: 86900 - DNA, 20 bp, Artificial Sequence
  Description of Artificial Sequence: Synthetic oligonucleotide
  Target: LAMA2; (-) strand; PAM type: NRG; PAM sequence: AAG
caagggaaagcaagggggtt

SEQ ID NO: 86901 - DNA, 20 bp, Artificial Sequence
  Description of Artificial Sequence: Synthetic oligonucleotide
  Target: LAMA2; (-) strand; PAM type: NRG; PAM sequence: GGG
aatgtcaagggaaagcaagg

SEQ ID NO: 86902 - DNA, 20 bp, Artificial Sequence
  Description of Artificial Sequence: Synthetic oligonucleotide
  Target: LAMA2; (-) strand; PAM type: NRG; PAM sequence: GGG
aaatgtcaagggaaagcaag

SEQ ID NO: 86903 - DNA, 20 bp, Artificial Sequence
  Description of Artificial Sequence: Synthetic oligonucleotide
  Target: LAMA2; (-) strand; PAM type: NRG; PAM sequence: GGG
gaaatgtcaagggaaagcaa

SEQ ID NO: 86904 - DNA, 20 bp, Artificial Sequence
  Description of Artificial Sequence: Synthetic oligonucleotide
  Target: LAMA2; (-) strand; PAM type: NRG; PAM sequence: AGG
ggaaatgtcaagggaaagca

SEQ ID NO: 86905 - DNA, 20 bp, Artificial Sequence
  Description of Artificial Sequence: Synthetic oligonucleotide
  Target: LAMA2; (-) strand; PAM type: NRG; PAM sequence: AAG
tggaaatgtcaagggaaagc

SEQ ID NO: 86906 - DNA, 20 bp, Artificial Sequence
  Description of Artificial Sequence: Synthetic oligonucleotide
  Target: LAMA2; (-) strand; PAM type: NRG; PAM sequence: AAG
tttctggaaatgtcaaggga

SEQ ID NO: 86907 - DNA, 20 bp, Artificial Sequence
  Description of Artificial Sequence: Synthetic oligonucleotide
  Target: LAMA2; (-) strand; PAM type: NRG; PAM sequence: GGG
ttattttctggaaatgtcaa

SEQ ID NO: 86908 - DNA, 20 bp, Artificial Sequence
  Description of Artificial Sequence: Synthetic oligonucleotide
  Target: LAMA2; (-) strand; PAM type: NRG; PAM sequence: AGG
tttattttctggaaatgtca

SEQ ID NO: 86909 - DNA, 20 bp, Artificial Sequence
  Description of Artificial Sequence: Synthetic oligonucleotide
  Target: LAMA2; (-) strand; PAM type: NRG; PAM sequence: AAG
ttttattttctggaaatgtc

SEQ ID NO: 86910 - DNA, 20 bp, Artificial Sequence
  Description of Artificial Sequence: Synthetic oligonucleotide
  Target: LAMA2; (-) strand; PAM type: NRG; PAM sequence: TGG
ctcaatcaagttttattttc

SEQ ID NO: 86911 - DNA, 20 bp, Artificial Sequence
  Description of Artificial Sequence: Synthetic oligonucleotide
  Target: LAMA2; (-) strand; PAM type: NRG; PAM sequence: AAG
ataatcttagatactcaatc

SEQ ID NO: 86912 - DNA, 20 bp, Artificial Sequence
  Description of Artificial Sequence: Synthetic oligonucleotide
  Target: LAMA2; (-) strand; PAM type: NRG; PAM sequence: TAG
tgggatctgttatataatct

SEQ ID NO: 86913 - DNA, 20 bp, Artificial Sequence
  Description of Artificial Sequence: Synthetic oligonucleotide
  Target: LAMA2; (-) strand; PAM type: NRG; PAM sequence: GGG
tcagattcacttagtctagt

SEQ ID NO: 86914 - DNA, 20 bp, Artificial Sequence
  Description of Artificial Sequence: Synthetic oligonucleotide
  Target: LAMA2; (-) strand; PAM type: NRG; PAM sequence: TGG
ctcagattcacttagtctag

SEQ ID NO: 86915 - DNA, 20 bp, Artificial Sequence
  Description of Artificial Sequence: Synthetic oligonucleotide
  Target: LAMA2; (-) strand; PAM type: NRG; PAM sequence: TAG
tccctcagattcacttagtc

SEQ ID NO: 86916 - DNA, 20 bp, Artificial Sequence
  Description of Artificial Sequence: Synthetic oligonucleotide
  Target: LAMA2; (-) strand; PAM type: NRG; PAM sequence: TAG
catcttccctcagattcact

SEQ ID NO: 86917 - DNA, 20 bp, Artificial Sequence
  Description of Artificial Sequence: Synthetic oligonucleotide
  Target: LAMA2; (-) strand; PAM type: NRG; PAM sequence: CAG
gtgacaaatacatcttccct

SEQ ID NO: 86918 - DNA, 20 bp, Artificial Sequence
  Description of Artificial Sequence: Synthetic oligonucleotide
  Target: LAMA2; (-) strand; PAM type: NRG; PAM sequence: AAG
aaaaccaaagaagagaagaa

SEQ ID NO: 86919 - DNA, 20 bp, Artificial Sequence
  Description of Artificial Sequence: Synthetic oligonucleotide
  Target: LAMA2; (-) strand; PAM type: NRG; PAM sequence: AAG
ttttaaaaaccaaagaagag

SEQ ID NO: 86920 - DNA, 20 bp, Artificial Sequence
  Description of Artificial Sequence: Synthetic oligonucleotide
  Target: LAMA2; (-) strand; PAM type: NRG; PAM sequence: GAG
actttttaaaaaccaaagaa

SEQ ID NO: 86921 - DNA, 20 bp, Artificial Sequence
  Description of Artificial Sequence: Synthetic oligonucleotide
  Target: LAMA2; (-) strand; PAM type: NRG; PAM sequence: AAG
atactttttaaaaaccaaag

SEQ ID NO: 86922 - DNA, 20 bp, Artificial Sequence
  Description of Artificial Sequence: Synthetic oligonucleotide
  Target: LAMA2; (-) strand; PAM type: NRG; PAM sequence: AAG
atgatactttttaaaaacca

SEQ ID NO: 86923 - DNA, 20 bp, Artificial Sequence
  Description of Artificial Sequence: Synthetic oligonucleotide
  Target: LAMA2; (-) strand; PAM type: NRG; PAM sequence: TAG
agtacacagaaatttgttta

SEQ ID NO: 86924 - DNA, 20 bp, Artificial Sequence
  Description of Artificial Sequence: Synthetic oligonucleotide
  Target: LAMA2; (-) strand; PAM type: NRG; PAM sequence: CAG
gttaatactggatcagtaca

SEQ ID NO: 86925 - DNA, 20 bp, Artificial Sequence
  Description of Artificial Sequence: Synthetic oligonucleotide
  Target: LAMA2; (-) strand; PAM type: NRG; PAM sequence: CAG
tttctctgttaatactggat

SEQ ID NO: 86926 - DNA, 20 bp, Artificial Sequence
  Description of Artificial Sequence: Synthetic oligonucleotide
  Target: LAMA2; (-) strand; PAM type: NRG; PAM sequence: TGG
attattttctctgttaatac

SEQ ID NO: 86927 - DNA, 20 bp, Artificial Sequence
  Description of Artificial Sequence: Synthetic oligonucleotide
  Target: LAMA2; (-) strand; PAM type: NRG; PAM sequence: CAG
ttgccttgcacagtaaggca

SEQ ID NO: 86928 - DNA, 20 bp, Artificial Sequence
  Description of Artificial Sequence: Synthetic oligonucleotide
  Target: LAMA2; (-) strand; PAM type: NRG; PAM sequence: AGG
catttttgccttgcacagta

SEQ ID NO: 86929 - DNA, 20 bp, Artificial Sequence
  Description of Artificial Sequence: Synthetic oligonucleotide
  Target: LAMA2; (-) strand; PAM type: NRG; PAM sequence: AAG
tcatttttgccttgcacagt

SEQ ID NO: 86930 - DNA, 20 bp, Artificial Sequence
  Description of Artificial Sequence: Synthetic oligonucleotide
  Target: LAMA2; (-) strand; PAM type: NRG; PAM sequence: CAG
gagctcatttttgccttgca

SEQ ID NO: 86931 - DNA, 20 bp, Artificial Sequence
  Description of Artificial Sequence: Synthetic oligonucleotide
  Target: LAMA2; (-) strand; PAM type: NRG; PAM sequence: GAG
catgactttgataatatctt

SEQ ID NO: 86932 - DNA, 20 bp, Artificial Sequence
  Description of Artificial Sequence: Synthetic oligonucleotide
  Target: LAMA2; (-) strand; PAM type: NRG; PAM sequence: TGG
tgtatgtcctagttgttttg

SEQ ID NO: 86933 - DNA, 20 bp, Artificial Sequence
  Description of Artificial Sequence: Synthetic oligonucleotide
  Target: LAMA2; (-) strand; PAM type: NRG; PAM sequence: TAG
taatcagagattgtatgtcc

SEQ ID NO: 86934 - DNA, 20 bp, Artificial Sequence
  Description of Artificial Sequence: Synthetic oligonucleotide
  Target: LAMA2; (-) strand; PAM type: NRG; PAM sequence: GAG
agactgcagttgtgtaatca

SEQ ID NO: 86935 - DNA, 20 bp, Artificial Sequence
  Description of Artificial Sequence: Synthetic oligonucleotide
  Target: LAMA2; (-) strand; PAM type: NRG; PAM sequence: CAG
atagactgcagttgtgtaat

SEQ ID NO: 86936 - DNA, 20 bp, Artificial Sequence
  Description of Artificial Sequence: Synthetic oligonucleotide
  Target: LAMA2; (-) strand; PAM type: NRG; PAM sequence: CAG
cagaatgtagctatagactg

SEQ ID NO: 86937 - DNA, 20 bp, Artificial Sequence
  Description of Artificial Sequence: Synthetic oligonucleotide
  Target: LAMA2; (-) strand; PAM type: NRG; PAM sequence: TAG
taatctgcagaatgtagcta

SEQ ID NO: 86938 - DNA, 20 bp, Artificial Sequence
  Description of Artificial Sequence: Synthetic oligonucleotide
  Target: LAMA2; (-) strand; PAM type: NRG; PAM sequence: TAG
ggtgtttaatctgcagaatg

SEQ ID NO: 86939 - DNA, 20 bp, Artificial Sequence
  Description of Artificial Sequence: Synthetic oligonucleotide
  Target: LAMA2; (-) strand; PAM type: NRG; PAM sequence: CAG
ctactgtggtgtttaatctg

SEQ ID NO: 86940 - DNA, 20 bp, Artificial Sequence
  Description of Artificial Sequence: Synthetic oligonucleotide
  Target: LAMA2; (-) strand; PAM type: NRG; PAM sequence: TGG
taaagtttccatctctactg

SEQ ID NO: 86941 - DNA, 20 bp, Artificial Sequence
  Description of Artificial Sequence: Synthetic oligonucleotide
  Target: LAMA2; (-) strand; PAM type: NRG; PAM sequence: AAG
ttcataaaatataaacaata

SEQ ID NO: 86942 - DNA, 20 bp, Artificial Sequence
  Description of Artificial Sequence: Synthetic oligonucleotide
  Target: LAMA2; (-) strand; PAM type: NRG; PAM sequence: CAG
gacataaaaacaaaagagaa

SEQ ID NO: 86943 - DNA, 20 bp, Artificial Sequence
  Description of Artificial Sequence: Synthetic oligonucleotide
  Target: LAMA2; (-) strand; PAM type: NRG; PAM sequence: GAG
aaactgacataaaaacaaaa

SEQ ID NO: 86944 - DNA, 20 bp, Artificial Sequence
  Description of Artificial Sequence: Synthetic oligonucleotide
  Target: LAMA2; (-) strand; PAM type: NRG; PAM sequence: AAG
tcaaactgacataaaaacaa

SEQ ID NO: 86945 - DNA, 20 bp, Artificial Sequence
  Description of Artificial Sequence: Synthetic oligonucleotide
  Target: LAMA2; (-) strand; PAM type: NRG; PAM sequence: AGG
aaaggcatgttttgccctca

SEQ ID NO: 86946 - DNA, 20 bp, Artificial Sequence
  Description of Artificial Sequence: Synthetic oligonucleotide
  Target: LAMA2; (-) strand; PAM type: NRG; PAM sequence: AAG
gaaaggcatgttttgccctc

SEQ ID NO: 86947 - DNA, 20 bp, Artificial Sequence
  Description of Artificial Sequence: Synthetic oligonucleotide
  Target: LAMA2; (-) strand; PAM type: NRG; PAM sequence: AGG
aggcagctctaatgtatgaa

SEQ ID NO: 86948 - DNA, 20 bp, Artificial Sequence
  Description of Artificial Sequence: Synthetic oligonucleotide
  Target: LAMA2; (-) strand; PAM type: NRG; PAM sequence: AAG
taggcagctctaatgtatga

SEQ ID NO: 86949 - DNA, 20 bp, Artificial Sequence
  Description of Artificial Sequence: Synthetic oligonucleotide
  Target: LAMA2; (-) strand; PAM type: NRG; PAM sequence: CAG
gtgccagactatgctctagg

SEQ ID NO: 86950 - DNA, 20 bp, Artificial Sequence
  Description of Artificial Sequence: Synthetic oligonucleotide
  Target: LAMA2; (-) strand; PAM type: NRG; PAM sequence: AGG
aatgtgccagactatgctct

SEQ ID NO: 86951 - DNA, 20 bp, Artificial Sequence
  Description of Artificial Sequence: Synthetic oligonucleotide
  Target: LAMA2; (-) strand; PAM type: NRG; PAM sequence: TAG
taatgtgccagactatgctc

SEQ ID NO: 86952 - DNA, 20 bp, Artificial Sequence
  Description of Artificial Sequence: Synthetic oligonucleotide
  Target: LAMA2; (-) strand; PAM type: NRG; PAM sequence: CAG
ttaatatttatataatgtgc

SEQ ID NO: 86953 - DNA, 20 bp, Artificial Sequence
  Description of Artificial Sequence: Synthetic oligonucleotide
  Target: LAMA2; (-) strand; PAM type: NRG; PAM sequence: AGG
aagaacatcagtttaattat

SEQ ID NO: 86954 - DNA, 20 bp, Artificial Sequence
  Description of Artificial Sequence: Synthetic oligonucleotide
  Target: LAMA2; (-) strand; PAM type: NRG; PAM sequence: TAG
aaagaacatcagtttaatta

SEQ ID NO: 86955 - DNA, 20 bp, Artificial Sequence
  Description of Artificial Sequence: Synthetic oligonucleotide
  Target: LAMA2; (-) strand; PAM type: NRG; PAM sequence: CAG
atcctcattccaaagaacat

SEQ ID NO: 86956 - DNA, 20 bp, Artificial Sequence
  Description of Artificial Sequence: Synthetic oligonucleotide
  Target: LAMA2; (-) strand; PAM type: NRG; PAM sequence: AAG
gtgtctccatcctcattcca

SEQ ID NO: 86957 - DNA, 20 bp, Artificial Sequence
  Description of Artificial Sequence: Synthetic oligonucleotide
  Target: LAMA2; (-) strand; PAM type: NRG; PAM sequence: CAG
aaaactagcttaaggcaatt

SEQ ID NO: 86958 - DNA, 20 bp, Artificial Sequence
  Description of Artificial Sequence: Synthetic oligonucleotide
  Target: LAMA2; (-) strand; PAM type: NRG; PAM sequence: AGG
cttattgcaaaactagctta

SEQ ID NO: 86959 - DNA, 20 bp, Artificial Sequence
  Description of Artificial Sequence: Synthetic oligonucleotide
  Target: LAMA2; (-) strand; PAM type: NRG; PAM sequence: AAG
acttattgcaaaactagctt

SEQ ID NO: 86960 - DNA, 20 bp, Artificial Sequence
  Description of Artificial Sequence: Synthetic oligonucleotide
  Target: LAMA2; (-) strand; PAM type: NRG; PAM sequence: TAG
aaatctacttattgcaaaac

SEQ ID NO: 86961 - DNA, 20 bp, Artificial Sequence
  Description of Artificial Sequence: Synthetic oligonucleotide
  Target: LAMA2; (-) strand; PAM type: NRG; PAM sequence: TAG
attcattacatattctagaa

SEQ ID NO: 86962 - DNA, 20 bp, Artificial Sequence
  Description of Artificial Sequence: Synthetic oligonucleotide
  Target: LAMA2; (-) strand; PAM type: NRG; PAM sequence: TAG
gattcattcattacatattc

SEQ ID NO: 86963 - DNA, 20 bp, Artificial Sequence
  Description of Artificial Sequence: Synthetic oligonucleotide
  Target: LAMA2; (-) strand; PAM type: NRG; PAM sequence: TAG
attaatacttacttgtaaca

SEQ ID NO: 86964 - DNA, 20 bp, Artificial Sequence
  Description of Artificial Sequence: Synthetic oligonucleotide
  Target: LAMA2; (-) strand; PAM type: NRG; PAM sequence: AAG
gattatcatataattcaagg

SEQ ID NO: 86965 - DNA, 20 bp, Artificial Sequence
  Description of Artificial Sequence: Synthetic oligonucleotide
  Target: LAMA2; (-) strand; PAM type: NRG; PAM sequence: AGG
gtagattatcatataattca

SEQ ID NO: 86966 - DNA, 20 bp, Artificial Sequence
  Description of Artificial Sequence: Synthetic oligonucleotide
  Target: LAMA2; (-) strand; PAM type: NRG; PAM sequence: AAG
tgtagattatcatataattc

SEQ ID NO: 86967 - DNA, 20 bp, Artificial Sequence
  Description of Artificial Sequence: Synthetic oligonucleotide
  Target: LAMA2; (-) strand; PAM type: NRG; PAM sequence: TAG
aaattcctttcactgtgatg

SEQ ID NO: 86968 - DNA, 20 bp, Artificial Sequence
  Description of Artificial Sequence: Synthetic oligonucleotide
  Target: LAMA2; (-) strand; PAM type: NRG; PAM sequence: TAG
ctctgtgattcaacattgac

SEQ ID NO: 86969 - DNA, 20 bp, Artificial Sequence
  Description of Artificial Sequence: Synthetic oligonucleotide
  Target: LAMA2; (-) strand; PAM type: NRG; PAM sequence: TAG
gaatgaaaatggatctcata

SEQ ID NO: 86970 - DNA, 20 bp, Artificial Sequence
  Description of Artificial Sequence: Synthetic oligonucleotide
  Target: LAMA2; (-) strand; PAM type: NRG; PAM sequence: TGG
attttctttaagaatgaaaa

SEQ ID NO: 86971 - DNA, 20 bp, Artificial Sequence
  Description of Artificial Sequence: Synthetic oligonucleotide
  Target: LAMA2; (-) strand; PAM type: NRG; PAM sequence: AAG
aagatataataattttcttt

SEQ ID NO: 86972 - DNA, 20 bp, Artificial Sequence
  Description of Artificial Sequence: Synthetic oligonucleotide
  Target: LAMA2; (-) strand; PAM type: NRG; PAM sequence: AAG
atatccaccatattaataaa

SEQ ID NO: 86973 - DNA, 20 bp, Artificial Sequence
  Description of Artificial Sequence: Synthetic oligonucleotide
  Target: LAMA2; (-) strand; PAM type: NRG; PAM sequence: GAG
agttttctttattatttact

SEQ ID NO: 86974 - DNA, 20 bp, Artificial Sequence
  Description of Artificial Sequence: Synthetic oligonucleotide
  Target: LAMA2; (-) strand; PAM type: NRG; PAM sequence: TAG
ttacaaattgcacttcatat

SEQ ID NO: 86975 - DNA, 20 bp, Artificial Sequence
  Description of Artificial Sequence: Synthetic oligonucleotide
  Target: LAMA2; (-) strand; PAM type: NRG; PAM sequence: TAG
caaaaatcatgcatcataaa

SEQ ID NO: 86976 - DNA, 20 bp, Artificial Sequence
  Description of Artificial Sequence: Synthetic oligonucleotide
  Target: LAMA2; (-) strand; PAM type: NRG; PAM sequence: AAG
ccaactattctcaagaactt

SEQ ID NO: 86977 - DNA, 20 bp, Artificial Sequence
  Description of Artificial Sequence: Synthetic oligonucleotide
  Target: LAMA2; (-) strand; PAM type: NRG; PAM sequence: AAG
aaccctttccaactattctc

SEQ ID NO: 86978 - DNA, 20 bp, Artificial Sequence
  Description of Artificial Sequence: Synthetic oligonucleotide
  Target: LAMA2; (-) strand; PAM type: NRG; PAM sequence: AGG
caaggtcttaatacatgttt

SEQ ID NO: 86979 - DNA, 20 bp, Artificial Sequence
  Description of Artificial Sequence: Synthetic oligonucleotide
  Target: LAMA2; (-) strand; PAM type: NRG; PAM sequence: TAG
acaaggtcttaatacatgtt

SEQ ID NO: 86980 - DNA, 20 bp, Artificial Sequence
  Description of Artificial Sequence: Synthetic oligonucleotide
  Target: LAMA2; (-) strand; PAM type: NRG; PAM sequence: AGG
aagatctaatttttaaaaca

SEQ ID NO: 86981 - DNA, 20 bp, Artificial Sequence
  Description of Artificial Sequence: Synthetic oligonucleotide
  Target: LAMA2; (-) strand; PAM type: NRG; PAM sequence: AAG
caagatctaatttttaaaac

SEQ ID NO: 86982 - DNA, 20 bp, Artificial Sequence
  Description of Artificial Sequence: Synthetic oligonucleotide
  Target: LAMA2; (-) strand; PAM type: NRG; PAM sequence: AAG
acagcttaccttcttgctcc

SEQ ID NO: 86983 - DNA, 20 bp, Artificial Sequence
  Description of Artificial Sequence: Synthetic oligonucleotide
  Target: LAMA2; (-) strand; PAM type: NRG; PAM sequence: CAG
attctaagaacgtaatgata

SEQ ID NO: 86984 - DNA, 20 bp, Artificial Sequence
  Description of Artificial Sequence: Synthetic oligonucleotide
  Target: LAMA2; (-) strand; PAM type: NRG; PAM sequence: AAG
cacgcccaaccctgtattct

SEQ ID NO: 86985 - DNA, 20 bp, Artificial Sequence
  Description of Artificial Sequence: Synthetic oligonucleotide
  Target: LAMA2; (-) strand; PAM type: NRG; PAM sequence: GAG
aatgctgggattacaggcat

SEQ ID NO: 86986 - DNA, 20 bp, Artificial Sequence
  Description of Artificial Sequence: Synthetic oligonucleotide
  Target: LAMA2; (-) strand; PAM type: NRG; PAM sequence: AGG
tcccaaaatgctgggattac

SEQ ID NO: 86987 - DNA, 20 bp, Artificial Sequence
  Description of Artificial Sequence: Synthetic oligonucleotide
  Target: LAMA2; (-) strand; PAM type: NRG; PAM sequence: CAG
ctcccaaaatgctgggatta

SEQ ID NO: 86988 - DNA, 20 bp, Artificial Sequence
  Description of Artificial Sequence: Synthetic oligonucleotide
  Target: LAMA2; (-) strand; PAM type: NRG; PAM sequence: GGG
cctcagcctcccaaaatgct

SEQ ID NO: 86989 - DNA, 20 bp, Artificial Sequence
  Description of Artificial Sequence: Synthetic oligonucleotide
  Target: LAMA2; (-) strand; PAM type: NRG; PAM sequence: TGG
gcctcagcctcccaaaatgc

SEQ ID NO: 86990 - DNA, 20 bp, Artificial Sequence
  Description of Artificial Sequence: Synthetic oligonucleotide
  Target: LAMA2; (-) strand; PAM type: NRG; PAM sequence: CAG
acctcgtgatccacccgcct

SEQ ID NO: 86991 - DNA, 20 bp, Artificial Sequence
  Description of Artificial Sequence: Synthetic oligonucleotide
  Target: LAMA2; (-) strand; PAM type: NRG; PAM sequence: TGG
tttcgtcatgttggccagga

SEQ ID NO: 86992 - DNA, 20 bp, Artificial Sequence
  Description of Artificial Sequence: Synthetic oligonucleotide
  Target: LAMA2; (-) strand; PAM type: NRG; PAM sequence: AGG
agggtttcgtcatgttggcc

SEQ ID NO: 86993 - DNA, 20 bp, Artificial Sequence
  Description of Artificial Sequence: Synthetic oligonucleotide
  Target: LAMA2; (-) strand; PAM type: NRG; PAM sequence: CAG
cagggtttcgtcatgttggc

SEQ ID NO: 86994 - DNA, 20 bp, Artificial Sequence
  Description of Artificial Sequence: Synthetic oligonucleotide
  Target: LAMA2; (-) strand; PAM type: NRG; PAM sequence: TGG
cagacagggtttcgtcatgt

SEQ ID NO: 86995 - DNA, 20 bp, Artificial Sequence
  Description of Artificial Sequence: Synthetic oligonucleotide
  Target: LAMA2; (-) strand; PAM type: NRG; PAM sequence: GGG
ttgtatttttagtacagaca

SEQ ID NO: 86996 - DNA, 20 bp, Artificial Sequence
  Description of Artificial Sequence: Synthetic oligonucleotide
  Target: LAMA2; (-) strand; PAM type: NRG; PAM sequence: AGG
tttgtatttttagtacagac

SEQ ID NO: 86997 - DNA, 20 bp, Artificial Sequence
  Description of Artificial Sequence: Synthetic oligonucleotide
  Target: LAMA2; (-) strand; PAM type: NRG; PAM sequence: CAG
ttttgtatttttagtacaga

SEQ ID NO: 86998 - DNA, 20 bp, Artificial Sequence
  Description of Artificial Sequence: Synthetic oligonucleotide
  Target: LAMA2; (-) strand; PAM type: NRG; PAM sequence: CAG
taatttttgtatttttagta

SEQ ID NO: 86999 - DNA, 20 bp, Artificial Sequence
  Description of Artificial Sequence: Synthetic oligonucleotide
  Target: LAMA2; (-) strand; PAM type: NRG; PAM sequence: TAG
ccaggtaatttttgtatttt

SEQ ID NO: 87000 - DNA, 20 bp, Artificial Sequence
  Description of Artificial Sequence: Synthetic oligonucleotide
  Target: LAMA2; (-) strand; PAM type: NRG; PAM sequence: AGG
aggcacacgccaccataccc

SEQ ID NO: 87001 - DNA, 20 bp, Artificial Sequence
  Description of Artificial Sequence: Synthetic oligonucleotide
  Target: LAMA2; (-) strand; PAM type: NRG; PAM sequence: CAG
caggcacacgccaccatacc

SEQ ID NO: 87002 - DNA, 20 bp, Artificial Sequence
  Description of Artificial Sequence: Synthetic oligonucleotide
  Target: LAMA2; (-) strand; PAM type: NRG; PAM sequence: AGG
tcccaagtagctgggattac

SEQ ID NO: 87003 - DNA, 20 bp, Artificial Sequence
  Description of Artificial Sequence: Synthetic oligonucleotide
  Target: LAMA2; (-) strand; PAM type: NRG; PAM sequence: CAG
ctcccaagtagctgggatta

SEQ ID NO: 87004 - DNA, 20 bp, Artificial Sequence
  Description of Artificial Sequence: Synthetic oligonucleotide
  Target: LAMA2; (-) strand; PAM type: NRG; PAM sequence: GGG
cctcagcctcccaagtagct

SEQ ID NO: 87005 - DNA, 20 bp, Artificial Sequence
  Description of Artificial Sequence: Synthetic oligonucleotide
  Target: LAMA2; (-) strand; PAM type: NRG; PAM sequence: TGG
gcctcagcctcccaagtagc

SEQ ID NO: 87006 - DNA, 20 bp, Artificial Sequence
  Description of Artificial Sequence: Synthetic oligonucleotide
  Target: LAMA2; (-) strand; PAM type: NRG; PAM sequence: TAG
tcctgcctcagcctcccaag

SEQ ID NO: 87007 - DNA, 20 bp, Artificial Sequence
  Description of Artificial Sequence: Synthetic oligonucleotide
  Target: LAMA2; (-) strand; PAM type: NRG; PAM sequence: AAG
ttctcctgcctcagcctccc

SEQ ID NO: 87008 - DNA, 20 bp, Artificial Sequence
  Description of Artificial Sequence: Synthetic oligonucleotide
  Target: LAMA2; (-) strand; PAM type: NRG; PAM sequence: CAG
ttcaagcgattctcctgcct

SEQ ID NO: 87009 - DNA, 20 bp, Artificial Sequence
  Description of Artificial Sequence: Synthetic oligonucleotide
  Target: LAMA2; (-) strand; PAM type: NRG; PAM sequence: AAG
aacctccgcctcctgggttc

SEQ ID NO: 87010 - DNA, 20 bp, Artificial Sequence
  Description of Artificial Sequence: Synthetic oligonucleotide
  Target: LAMA2; (-) strand; PAM type: NRG; PAM sequence: GGG
cactgcaacctccgcctcct

SEQ ID NO: 87011 - DNA, 20 bp, Artificial Sequence
  Description of Artificial Sequence: Synthetic oligonucleotide
  Target: LAMA2; (-) strand; PAM type: NRG; PAM sequence: TGG
tcactgcaacctccgcctcc

SEQ ID NO: 87012 - DNA, 20 bp, Artificial Sequence
  Description of Artificial Sequence: Synthetic oligonucleotide
  Target: LAMA2; (-) strand; PAM type: NRG; PAM sequence: CAG
ggagtgcagaggcacgatct

SEQ ID NO: 87013 - DNA, 20 bp, Artificial Sequence
  Description of Artificial Sequence: Synthetic oligonucleotide
  Target: LAMA2; (-) strand; PAM type: NRG; PAM sequence: AGG
gtcaccaggctggagtgcag

SEQ ID NO: 87014 - DNA, 20 bp, Artificial Sequence
  Description of Artificial Sequence: Synthetic oligonucleotide
  Target: LAMA2; (-) strand; PAM type: NRG; PAM sequence: GAG
tgtcaccaggctggagtgca

SEQ ID NO: 87015 - DNA, 20 bp, Artificial Sequence
  Description of Artificial Sequence: Synthetic oligonucleotide
  Target: LAMA2; (-) strand; PAM type: NRG; PAM sequence: CAG
tctgtcaccaggctggagtg

SEQ ID NO: 87016 - DNA, 20 bp, Artificial Sequence
  Description of Artificial Sequence: Synthetic oligonucleotide
  Target: LAMA2; (-) strand; PAM type: NRG; PAM sequence: GAG
ctcgctctgtcaccaggctg

SEQ ID NO: 87017 - DNA, 20 bp, Artificial Sequence
  Description of Artificial Sequence: Synthetic oligonucleotide
  Target: LAMA2; (-) strand; PAM type: NRG; PAM sequence: TGG
gtctcgctctgtcaccaggc

SEQ ID NO: 87018 - DNA, 20 bp, Artificial Sequence
  Description of Artificial Sequence: Synthetic oligonucleotide
  Target: LAMA2; (-) strand; PAM type: NRG; PAM sequence: AGG
tggagtctcgctctgtcacc

SEQ ID NO: 87019 - DNA, 20 bp, Artificial Sequence
  Description of Artificial Sequence: Synthetic oligonucleotide
  Target: LAMA2; (-) strand; PAM type: NRG; PAM sequence: CAG
atggagtctcgctctgtcac

SEQ ID NO: 87020 - DNA, 20 bp, Artificial Sequence
  Description of Artificial Sequence: Synthetic oligonucleotide
  Target: LAMA2; (-) strand; PAM type: NRG; PAM sequence: GAG
attattttttttttgagatg

SEQ ID NO: 87021 - DNA, 20 bp, Artificial Sequence
  Description of Artificial Sequence: Synthetic oligonucleotide
  Target: LAMA2; (-) strand; PAM type: NRG; PAM sequence: TGG
ttattattttttttttgaga

SEQ ID NO: 87022 - DNA, 20 bp, Artificial Sequence
  Description of Artificial Sequence: Synthetic oligonucleotide
  Target: LAMA2; (-) strand; PAM type: NRG; PAM sequence: GAG
attattattatttttttttt

SEQ ID NO: 87023 - DNA, 20 bp, Artificial Sequence
  Description of Artificial Sequence: Synthetic oligonucleotide
  Target: LAMA2; (-) strand; PAM type: NRG; PAM sequence: TAG
tgggtttgagattctaaaaa

SEQ ID NO: 87024 - DNA, 20 bp, Artificial Sequence
  Description of Artificial Sequence: Synthetic oligonucleotide
  Target: LAMA2; (-) strand; PAM type: NRG; PAM sequence: GAG
agaaagtaactcatgggttt

SEQ ID NO: 87025 - DNA, 20 bp, Artificial Sequence
  Description of Artificial Sequence: Synthetic oligonucleotide
  Target: LAMA2; (-) strand; PAM type: NRG; PAM sequence: GGG
tatggaagaaagtaactcat

SEQ ID NO: 87026 - DNA, 20 bp, Artificial Sequence
  Description of Artificial Sequence: Synthetic oligonucleotide
  Target: LAMA2; (-) strand; PAM type: NRG; PAM sequence: TGG
atatggaagaaagtaactca

SEQ ID NO: 87027 - DNA, 20 bp, Artificial Sequence
  Description of Artificial Sequence: Synthetic oligonucleotide
  Target: LAMA2; (-) strand; PAM type: NRG; PAM sequence: AAG
tgggacttatatatggaaga

SEQ ID NO: 87028 - DNA, 20 bp, Artificial Sequence
  Description of Artificial Sequence: Synthetic oligonucleotide
  Target: LAMA2; (-) strand; PAM type: NRG; PAM sequence: AAG
atgttgggacttatatatgg

SEQ ID NO: 87029 - DNA, 20 bp, Artificial Sequence
  Description of Artificial Sequence: Synthetic oligonucleotide
  Target: LAMA2; (-) strand; PAM type: NRG; PAM sequence: TGG
aacatgttgggacttatata

SEQ ID NO: 87030 - DNA, 20 bp, Artificial Sequence
  Description of Artificial Sequence: Synthetic oligonucleotide
  Target: LAMA2; (-) strand; PAM type: NRG; PAM sequence: GGG
ctgattatagaaaacatgtt

SEQ ID NO: 87031 - DNA, 20 bp, Artificial Sequence
  Description of Artificial Sequence: Synthetic oligonucleotide
  Target: LAMA2; (-) strand; PAM type: NRG; PAM sequence: TGG
actgattatagaaaacatgt

SEQ ID NO: 87032 - DNA, 20 bp, Artificial Sequence
  Description of Artificial Sequence: Synthetic oligonucleotide
  Target: LAMA2; (-) strand; PAM type: NRG; PAM sequence: TAG
taatagacatagactgatta

SEQ ID NO: 87033 - DNA, 20 bp, Artificial Sequence
  Description of Artificial Sequence: Synthetic oligonucleotide
  Target: LAMA2; (-) strand; PAM type: NRG; PAM sequence: TAG
aattacacatctaatagaca

SEQ ID NO: 87034 - DNA, 20 bp, Artificial Sequence
  Description of Artificial Sequence: Synthetic oligonucleotide
  Target: LAMA2; (-) strand; PAM type: NRG; PAM sequence: TAG
taatataattacacatctaa

SEQ ID NO: 87035 - DNA, 20 bp, Artificial Sequence
  Description of Artificial Sequence: Synthetic oligonucleotide
  Target: LAMA2; (-) strand; PAM type: NRG; PAM sequence: TGG
cgaagattaaccaaataatt

SEQ ID NO: 87036 - DNA, 20 bp, Artificial Sequence
  Description of Artificial Sequence: Synthetic oligonucleotide
  Target: LAMA2; (-) strand; PAM type: NRG; PAM sequence: AAG
taattgctaaaagaaattcg

SEQ ID NO: 87037 - DNA, 20 bp, Artificial Sequence
  Description of Artificial Sequence: Synthetic oligonucleotide
  Target: LAMA2; (-) strand; PAM type: NRG; PAM sequence: AAG
ggagagtatataattgctaa

SEQ ID NO: 87038 - DNA, 20 bp, Artificial Sequence
  Description of Artificial Sequence: Synthetic oligonucleotide
  Target: LAMA2; (-) strand; PAM type: NRG; PAM sequence: GAG
gctcaatctaacctggagga

SEQ ID NO: 87039 - DNA, 20 bp, Artificial Sequence
  Description of Artificial Sequence: Synthetic oligonucleotide
  Target: LAMA2; (-) strand; PAM type: NRG; PAM sequence: GAG
aagctcaatctaacctggag

SEQ ID NO: 87040 - DNA, 20 bp, Artificial Sequence
  Description of Artificial Sequence: Synthetic oligonucleotide
  Target: LAMA2; (-) strand; PAM type: NRG; PAM sequence: AGG
gaaagctcaatctaacctgg

SEQ ID NO: 87041 - DNA, 20 bp, Artificial Sequence
  Description of Artificial Sequence: Synthetic oligonucleotide
  Target: LAMA2; (-) strand; PAM type: NRG; PAM sequence: GAG
ggaaagctcaatctaacctg

SEQ ID NO: 87042 - DNA, 20 bp, Artificial Sequence
  Description of Artificial Sequence: Synthetic oligonucleotide
  Target: LAMA2; (-) strand; PAM type: NRG; PAM sequence: TGG
agggaaagctcaatctaacc

SEQ ID NO: 87043 - DNA, 20 bp, Artificial Sequence
  Description of Artificial Sequence: Synthetic oligonucleotide
  Target: LAMA2; (-) strand; PAM type: NRG; PAM sequence: AAG
atttctctgagttgaaggga

SEQ ID NO: 87044 - DNA, 20 bp, Artificial Sequence
  Description of Artificial Sequence: Synthetic oligonucleotide
  Target: LAMA2; (-) strand; PAM type: NRG; PAM sequence: GGG
actgatttctctgagttgaa

SEQ ID NO: 87045 - DNA, 20 bp, Artificial Sequence
  Description of Artificial Sequence: Synthetic oligonucleotide
  Target: LAMA2; (-) strand; PAM type: NRG; PAM sequence: AGG
cactgatttctctgagttga

SEQ ID NO: 87046 - DNA, 20 bp, Artificial Sequence
  Description of Artificial Sequence: Synthetic oligonucleotide
  Target: LAMA2; (-) strand; PAM type: NRG; PAM sequence: AAG
acactgatttctctgagttg

SEQ ID NO: 87047 - DNA, 20 bp, Artificial Sequence
  Description of Artificial Sequence: Synthetic oligonucleotide
  Target: LAMA2; (-) strand; PAM type: NRG; PAM sequence: GAG
ctgttgacactgatttctct

SEQ ID NO: 87048 - DNA, 20 bp, Artificial Sequence
  Description of Artificial Sequence: Synthetic oligonucleotide
  Target: LAMA2; (-) strand; PAM type: NRG; PAM sequence: TAG
tctggtagtcttacagaagg

SEQ ID NO: 87049 - DNA, 20 bp, Artificial Sequence
  Description of Artificial Sequence: Synthetic oligonucleotide
  Target: LAMA2; (-) strand; PAM type: NRG; PAM sequence: AGG
ctctctggtagtcttacaga

SEQ ID NO: 87050 - DNA, 20 bp, Artificial Sequence
  Description of Artificial Sequence: Synthetic oligonucleotide
  Target: LAMA2; (-) strand; PAM type: NRG; PAM sequence: AAG
gctctctggtagtcttacag

SEQ ID NO: 87051 - DNA, 20 bp, Artificial Sequence
  Description of Artificial Sequence: Synthetic oligonucleotide
  Target: LAMA2; (-) strand; PAM type: NRG; PAM sequence: CAG
atagctctctggtagtctta

SEQ ID NO: 87052 - DNA, 20 bp, Artificial Sequence
  Description of Artificial Sequence: Synthetic oligonucleotide
  Target: LAMA2; (-) strand; PAM type: NRG; PAM sequence: TAG
agtaatgcatagctctctgg

SEQ ID NO: 87053 - DNA, 20 bp, Artificial Sequence
  Description of Artificial Sequence: Synthetic oligonucleotide
  Target: LAMA2; (-) strand; PAM type: NRG; PAM sequence: TGG
cagagtaatgcatagctctc

SEQ ID NO: 87054 - DNA, 20 bp, Artificial Sequence
  Description of Artificial Sequence: Synthetic oligonucleotide
  Target: LAMA2; (-) strand; PAM type: NRG; PAM sequence: TAG
cctttgtacagagtaatgca

SEQ ID NO: 87055 - DNA, 20 bp, Artificial Sequence
  Description of Artificial Sequence: Synthetic oligonucleotide
  Target: LAMA2; (-) strand; PAM type: NRG; PAM sequence: GAG
ggagaaatatcctttgtaca

SEQ ID NO: 87056 - DNA, 20 bp, Artificial Sequence
  Description of Artificial Sequence: Synthetic oligonucleotide
  Target: LAMA2; (-) strand; PAM type: NRG; PAM sequence: CAG
taggagaaatatcctttgta

SEQ ID NO: 87057 - DNA, 20 bp, Artificial Sequence
  Description of Artificial Sequence: Synthetic oligonucleotide
  Target: LAMA2; (-) strand; PAM type: NRG; PAM sequence: GAG
attgaaagcactatttatag

SEQ ID NO: 87058 - DNA, 20 bp, Artificial Sequence
  Description of Artificial Sequence: Synthetic oligonucleotide
  Target: LAMA2; (-) strand; PAM type: NRG; PAM sequence: AGG
ctattgaaagcactatttat

SEQ ID NO: 87059 - DNA, 20 bp, Artificial Sequence
  Description of Artificial Sequence: Synthetic oligonucleotide
  Target: LAMA2; (-) strand; PAM type: NRG; PAM sequence: TAG
tctattgaaagcactattta

SEQ ID NO: 87060 - DNA, 20 bp, Artificial Sequence
  Description of Artificial Sequence: Synthetic oligonucleotide
  Target: LAMA2; (-) strand; PAM type: NRG; PAM sequence: AAG
taacagattttctctattga

SEQ ID NO: 87061 - DNA, 20 bp, Artificial Sequence
  Description of Artificial Sequence: Synthetic oligonucleotide
  Target: LAMA2; (-) strand; PAM type: NRG; PAM sequence: CAG
atttactgacaacatgataa

SEQ ID NO: 87062 - DNA, 20 bp, Artificial Sequence
  Description of Artificial Sequence: Synthetic oligonucleotide
  Target: LAMA2; (-) strand; PAM type: NRG; PAM sequence: GAG
aggaacagagtattccaaaa

SEQ ID NO: 87063 - DNA, 20 bp, Artificial Sequence
  Description of Artificial Sequence: Synthetic oligonucleotide
  Target: LAMA2; (-) strand; PAM type: NRG; PAM sequence: AAG
ataggaacagagtattccaa

SEQ ID NO: 87064 - DNA, 20 bp, Artificial Sequence
  Description of Artificial Sequence: Synthetic oligonucleotide
  Target: LAMA2; (-) strand; PAM type: NRG; PAM sequence: GAG
ctcttgttttaataggaaca

SEQ ID NO: 87065 - DNA, 20 bp, Artificial Sequence
  Description of Artificial Sequence: Synthetic oligonucleotide
  Target: LAMA2; (-) strand; PAM type: NRG; PAM sequence: CAG
agctcttgttttaataggaa

SEQ ID NO: 87066 - DNA, 20 bp, Artificial Sequence
  Description of Artificial Sequence: Synthetic oligonucleotide
  Target: LAMA2; (-) strand; PAM type: NRG; PAM sequence: AGG
gaaacagctcttgttttaat

SEQ ID NO: 87067 - DNA, 20 bp, Artificial Sequence
  Description of Artificial Sequence: Synthetic oligonucleotide
  Target: LAMA2; (-) strand; PAM type: NRG; PAM sequence: TAG
ggaaacagctcttgttttaa

SEQ ID NO: 87068 - DNA, 20 bp, Artificial Sequence
  Description of Artificial Sequence: Synthetic oligonucleotide
  Target: LAMA2; (-) strand; PAM type: NRG; PAM sequence: CAG
acttgtttcaaagaaggaaa

SEQ ID NO: 87069 - DNA, 20 bp, Artificial Sequence
  Description of Artificial Sequence: Synthetic oligonucleotide
  Target: LAMA2; (-) strand; PAM type: NRG; PAM sequence: AGG
taaataacttgtttcaaaga

SEQ ID NO: 87070 - DNA, 20 bp, Artificial Sequence
  Description of Artificial Sequence: Synthetic oligonucleotide
  Target: LAMA2; (-) strand; PAM type: NRG; PAM sequence: AAG
ataaataacttgtttcaaag

SEQ ID NO: 87071 - DNA, 20 bp, Artificial Sequence
  Description of Artificial Sequence: Synthetic oligonucleotide
  Target: LAMA2; (-) strand; PAM type: NRG; PAM sequence: AAG
aatataaataacttgtttca

SEQ ID NO: 87072 - DNA, 20 bp, Artificial Sequence
  Description of Artificial Sequence: Synthetic oligonucleotide
  Target: LAMA2; (-) strand; PAM type: NRG; PAM sequence: AGG
aaggtcttatggtttaagat

SEQ ID NO: 87073 - DNA, 20 bp, Artificial Sequence
  Description of Artificial Sequence: Synthetic oligonucleotide
  Target: LAMA2; (-) strand; PAM type: NRG; PAM sequence: TAG
aaaggtcttatggtttaaga

SEQ ID NO: 87074 - DNA, 20 bp, Artificial Sequence
  Description of Artificial Sequence: Synthetic oligonucleotide
  Target: LAMA2; (-) strand; PAM type: NRG; PAM sequence: AAG
tcaaaaaggtcttatggttt

SEQ ID NO: 87075 - DNA, 20 bp, Artificial Sequence
  Description of Artificial Sequence: Synthetic oligonucleotide
  Target: LAMA2; (-) strand; PAM type: NRG; PAM sequence: TGG
aagtattcaaaaaggtctta

SEQ ID NO: 87076 - DNA, 20 bp, Artificial Sequence
  Description of Artificial Sequence: Synthetic oligonucleotide
  Target: LAMA2; (-) strand; PAM type: NRG; PAM sequence: AGG
tgtatgtgaagtattcaaaa

SEQ ID NO: 87077 - DNA, 20 bp, Artificial Sequence
  Description of Artificial Sequence: Synthetic oligonucleotide
  Target: LAMA2; (-) strand; PAM type: NRG; PAM sequence: AAG
ctgtatgtgaagtattcaaa

SEQ ID NO: 87078 - DNA, 20 bp, Artificial Sequence
  Description of Artificial Sequence: Synthetic oligonucleotide
  Target: LAMA2; (-) strand; PAM type: NRG; PAM sequence: AAG
ttttcatttttctgtatgtg

SEQ ID NO: 87079 - DNA, 20 bp, Artificial Sequence
  Description of Artificial Sequence: Synthetic oligonucleotide
  Target: LAMA2; (-) strand; PAM type: NRG; PAM sequence: CAG
agattatatcctggggttcc

SEQ ID NO: 87080 - DNA, 20 bp, Artificial Sequence
  Description of Artificial Sequence: Synthetic oligonucleotide
  Target: LAMA2; (-) strand; PAM type: NRG; PAM sequence: GGG
ccacagtagattatatcctg

SEQ ID NO: 87081 - DNA, 20 bp, Artificial Sequence
  Description of Artificial Sequence: Synthetic oligonucleotide
  Target: LAMA2; (-) strand; PAM type: NRG; PAM sequence: GGG
tccacagtagattatatcct

SEQ ID NO: 87082 - DNA, 20 bp, Artificial Sequence
  Description of Artificial Sequence: Synthetic oligonucleotide
  Target: LAMA2; (-) strand; PAM type: NRG; PAM sequence: TGG
atccacagtagattatatcc

SEQ ID NO: 87083 - DNA, 20 bp, Artificial Sequence
  Description of Artificial Sequence: Synthetic oligonucleotide
  Target: LAMA2; (-) strand; PAM type: NRG; PAM sequence: TAG
ctatgaatgactatccacag

SEQ ID NO: 87084 - DNA, 20 bp, Artificial Sequence
  Description of Artificial Sequence: Synthetic oligonucleotide
  Target: LAMA2; (-) strand; PAM type: NRG; PAM sequence: CAG
tgtctatgaatgactatcca

SEQ ID NO: 87085 - DNA, 20 bp, Artificial Sequence
  Description of Artificial Sequence: Synthetic oligonucleotide
  Target: LAMA2; (-) strand; PAM type: NRG; PAM sequence: AGG
gtcccaagcctataaatagg

SEQ ID NO: 87086 - DNA, 20 bp, Artificial Sequence
  Description of Artificial Sequence: Synthetic oligonucleotide
  Target: LAMA2; (-) strand; PAM type: NRG; PAM sequence: GAG
tgtcccaagcctataaatag

SEQ ID NO: 87087 - DNA, 20 bp, Artificial Sequence
  Description of Artificial Sequence: Synthetic oligonucleotide
  Target: LAMA2; (-) strand; PAM type: NRG; PAM sequence: AGG
actgtcccaagcctataaat

SEQ ID NO: 87088 - DNA, 20 bp, Artificial Sequence
  Description of Artificial Sequence: Synthetic oligonucleotide
  Target: LAMA2; (-) strand; PAM type: NRG; PAM sequence: TAG
aactgtcccaagcctataaa

SEQ ID NO: 87089 - DNA, 20 bp, Artificial Sequence
  Description of Artificial Sequence: Synthetic oligonucleotide
  Target: LAMA2; (-) strand; PAM type: NRG; PAM sequence: AAG
tggagaagctgaactgtccc

SEQ ID NO: 87090 - DNA, 20 bp, Artificial Sequence
  Description of Artificial Sequence: Synthetic oligonucleotide
  Target: LAMA2; (-) strand; PAM type: NRG; PAM sequence: AAG
aaactctcttcaagttggag

SEQ ID NO: 87091 - DNA, 20 bp, Artificial Sequence
  Description of Artificial Sequence: Synthetic oligonucleotide
  Target: LAMA2; (-) strand; PAM type: NRG; PAM sequence: GAG
tcaaaactctcttcaagttg

SEQ ID NO: 87092 - DNA, 20 bp, Artificial Sequence
  Description of Artificial Sequence: Synthetic oligonucleotide
  Target: LAMA2; (-) strand; PAM type: NRG; PAM sequence: TGG
cttcaaaactctcttcaagt

SEQ ID NO: 87093 - DNA, 20 bp, Artificial Sequence
  Description of Artificial Sequence: Synthetic oligonucleotide
  Target: LAMA2; (-) strand; PAM type: NRG; PAM sequence: AAG
tgatcttcaaaactctcttc

SEQ ID NO: 87094 - DNA, 20 bp, Artificial Sequence
  Description of Artificial Sequence: Synthetic oligonucleotide
  Target: LAMA2; (-) strand; PAM type: NRG; PAM sequence: AAG
aacattttttgaaacttcac

SEQ ID NO: 87095 - DNA, 20 bp, Artificial Sequence
  Description of Artificial Sequence: Synthetic oligonucleotide
  Target: LAMA2; (-) strand; PAM type: NRG; PAM sequence: GAG
tatttttctcaaaggacttt

SEQ ID NO: 87096 - DNA, 20 bp, Artificial Sequence
  Description of Artificial Sequence: Synthetic oligonucleotide
  Target: LAMA2; (-) strand; PAM type: NRG; PAM sequence: AGG
cccaagtttatttttctcaa

SEQ ID NO: 87097 - DNA, 20 bp, Artificial Sequence
  Description of Artificial Sequence: Synthetic oligonucleotide
  Target: LAMA2; (-) strand; PAM type: NRG; PAM sequence: AAG
gcccaagtttatttttctca

SEQ ID NO: 87098 - DNA, 20 bp, Artificial Sequence
  Description of Artificial Sequence: Synthetic oligonucleotide
  Target: LAMA2; (-) strand; PAM type: NRG; PAM sequence: AAG
aaactattggctacaggccc

SEQ ID NO: 87099 - DNA, 20 bp, Artificial Sequence
  Description of Artificial Sequence: Synthetic oligonucleotide
  Target: LAMA2; (-) strand; PAM type: NRG; PAM sequence: AGG
gaatacaaactattggctac

SEQ ID NO: 87100 - DNA, 20 bp, Artificial Sequence
  Description of Artificial Sequence: Synthetic oligonucleotide
  Target: LAMA2; (-) strand; PAM type: NRG; PAM sequence: CAG
ggaatacaaactattggcta

SEQ ID NO: 87101 - DNA, 20 bp, Artificial Sequence
  Description of Artificial Sequence: Synthetic oligonucleotide
  Target: LAMA2; (-) strand; PAM type: NRG; PAM sequence: TGG
aagcctggaatacaaactat

SEQ ID NO: 87102 - DNA, 20 bp, Artificial Sequence
  Description of Artificial Sequence: Synthetic oligonucleotide
  Target: LAMA2; (-) strand; PAM type: NRG; PAM sequence: TGG
ttgaattttttttaaaagcc

SEQ ID NO: 87103 - DNA, 20 bp, Artificial Sequence
  Description of Artificial Sequence: Synthetic oligonucleotide
  Target: LAMA2; (-) strand; PAM type: NRG; PAM sequence: AAG
tgtatttgaattttttttaa

SEQ ID NO: 87104 - DNA, 20 bp, Artificial Sequence
  Description of Artificial Sequence: Synthetic oligonucleotide
  Target: LAMA2; (-) strand; PAM type: NRG; PAM sequence: TGG
aaaagatgtcatgaccccta

SEQ ID NO: 87105 - DNA, 20 bp, Artificial Sequence
  Description of Artificial Sequence: Synthetic oligonucleotide
  Target: LAMA2; (-) strand; PAM type: NRG; PAM sequence: AAG
agtttctgcacttatgttaa

SEQ ID NO: 87106 - DNA, 20 bp, Artificial Sequence
  Description of Artificial Sequence: Synthetic oligonucleotide
  Target: LAMA2; (-) strand; PAM type: NRG; PAM sequence: TAG
aagttttgattcattacaga

SEQ ID NO: 87107 - DNA, 20 bp, Artificial Sequence
  Description of Artificial Sequence: Synthetic oligonucleotide
  Target: LAMA2; (-) strand; PAM type: NRG; PAM sequence: CAG
atttaagttttgattcatta

SEQ ID NO: 87108 - DNA, 20 bp, Artificial Sequence
  Description of Artificial Sequence: Synthetic oligonucleotide
  Target: LAMA2; (-) strand; PAM type: NRG; PAM sequence: AAG
gtcttaatgtcatctgattt

SEQ ID NO: 87109 - DNA, 20 bp, Artificial Sequence
  Description of Artificial Sequence: Synthetic oligonucleotide
  Target: LAMA2; (-) strand; PAM type: NRG; PAM sequence: TGG
atctgtggtaatagcaaagc

SEQ ID NO: 87110 - DNA, 20 bp, Artificial Sequence
  Description of Artificial Sequence: Synthetic oligonucleotide
  Target: LAMA2; (-) strand; PAM type: NRG; PAM sequence: AAG
tgccatctgtggtaatagca

SEQ ID NO: 87111 - DNA, 20 bp, Artificial Sequence
  Description of Artificial Sequence: Synthetic oligonucleotide
  Target: LAMA2; (-) strand; PAM type: NRG; PAM sequence: TAG
tgtgatgccatctgtggtaa

SEQ ID NO: 87112 - DNA, 20 bp, Artificial Sequence
  Description of Artificial Sequence: Synthetic oligonucleotide
  Target: LAMA2; (-) strand; PAM type: NRG; PAM sequence: TGG
gttaattgtgatgccatctg

SEQ ID NO: 87113 - DNA, 20 bp, Artificial Sequence
  Description of Artificial Sequence: Synthetic oligonucleotide
  Target: LAMA2; (-) strand; PAM type: NRG; PAM sequence: AAG
tcacatttttgatatattaa

SEQ ID NO: 87114 - DNA, 20 bp, Artificial Sequence
  Description of Artificial Sequence: Synthetic oligonucleotide
  Target: LAMA2; (-) strand; PAM type: NRG; PAM sequence: GAG
tcaaatgactgataatatat

SEQ ID NO: 87115 - DNA, 20 bp, Artificial Sequence
  Description of Artificial Sequence: Synthetic oligonucleotide
  Target: LAMA2; (-) strand; PAM type: NRG; PAM sequence: TGG
atacactgagatgttaatgt

SEQ ID NO: 87116 - DNA, 20 bp, Artificial Sequence
  Description of Artificial Sequence: Synthetic oligonucleotide
  Target: LAMA2; (-) strand; PAM type: NRG; PAM sequence: GAG
aatcattttcacaatacact

SEQ ID NO: 87117 - DNA, 20 bp, Artificial Sequence
  Description of Artificial Sequence: Synthetic oligonucleotide
  Target: LAMA2; (-) strand; PAM type: NRG; PAM sequence: AAG
agaaattaaaagtctagaag

SEQ ID NO: 87118 - DNA, 20 bp, Artificial Sequence
  Description of Artificial Sequence: Synthetic oligonucleotide
  Target: LAMA2; (-) strand; PAM type: NRG; PAM sequence: AAG
tcaagaaattaaaagtctag

SEQ ID NO: 87119 - DNA, 20 bp, Artificial Sequence
  Description of Artificial Sequence: Synthetic oligonucleotide
  Target: LAMA2; (-) strand; PAM type: NRG; PAM sequence: TAG
ccttcaagaaattaaaagtc

SEQ ID NO: 87120 - DNA, 20 bp, Artificial Sequence
  Description of Artificial Sequence: Synthetic oligonucleotide
  Target: LAMA2; (-) strand; PAM type: NRG; PAM sequence: AAG
tccttccttcaagaaattaa

SEQ ID NO: 87121 - DNA, 20 bp, Artificial Sequence
  Description of Artificial Sequence: Synthetic oligonucleotide
  Target: LAMA2; (-) strand; PAM type: NRG; PAM sequence: AAG
taaaatgcgttccttccttc

SEQ ID NO: 87122 - DNA, 20 bp, Artificial Sequence
  Description of Artificial Sequence: Synthetic oligonucleotide
  Target: LAMA2; (-) strand; PAM type: NRG; PAM sequence: GAG
agggagggtcactacaagat

SEQ ID NO: 87123 - DNA, 20 bp, Artificial Sequence
  Description of Artificial Sequence: Synthetic oligonucleotide
  Target: LAMA2; (-) strand; PAM type: NRG; PAM sequence: AAG
tgtacagggagggtcactac

SEQ ID NO: 87124 - DNA, 20 bp, Artificial Sequence
  Description of Artificial Sequence: Synthetic oligonucleotide
  Target: LAMA2; (-) strand; PAM type: NRG; PAM sequence: GGG
tcaggcaacatgtacaggga

SEQ ID NO: 87125 - DNA, 20 bp, Artificial Sequence
  Description of Artificial Sequence: Synthetic oligonucleotide
  Target: LAMA2; (-) strand; PAM type: NRG; PAM sequence: AGG
ctcaggcaacatgtacaggg

SEQ ID NO: 87126 - DNA, 20 bp, Artificial Sequence
  Description of Artificial Sequence: Synthetic oligonucleotide
  Target: LAMA2; (-) strand; PAM type: NRG; PAM sequence: GAG
tctcaggcaacatgtacagg

SEQ ID NO: 87127 - DNA, 20 bp, Artificial Sequence
  Description of Artificial Sequence: Synthetic oligonucleotide
  Target: LAMA2; (-) strand; PAM type: NRG; PAM sequence: GGG
tgtctcaggcaacatgtaca

SEQ ID NO: 87128 - DNA, 20 bp, Artificial Sequence
  Description of Artificial Sequence: Synthetic oligonucleotide
  Target: LAMA2; (-) strand; PAM type: NRG; PAM sequence: AGG
atgtctcaggcaacatgtac

SEQ ID NO: 87129 - DNA, 20 bp, Artificial Sequence
  Description of Artificial Sequence: Synthetic oligonucleotide
  Target: LAMA2; (-) strand; PAM type: NRG; PAM sequence: CAG
tatgtctcaggcaacatgta

SEQ ID NO: 87130 - DNA, 20 bp, Artificial Sequence
  Description of Artificial Sequence: Synthetic oligonucleotide
  Target: LAMA2; (-) strand; PAM type: NRG; PAM sequence: AGG
ttgaatagttattatgtctc

SEQ ID NO: 87131 - DNA, 20 bp, Artificial Sequence
  Description of Artificial Sequence: Synthetic oligonucleotide
  Target: LAMA2; (-) strand; PAM type: NRG; PAM sequence: CAG
tttgaatagttattatgtct

SEQ ID NO: 87132 - DNA, 20 bp, Artificial Sequence
  Description of Artificial Sequence: Synthetic oligonucleotide
  Target: LAMA2; (-) strand; PAM type: NRG; PAM sequence: TAG
atactgtaaacatttttgaa

SEQ ID NO: 87133 - DNA, 20 bp, Artificial Sequence
  Description of Artificial Sequence: Synthetic oligonucleotide
  Target: LAMA2; (-) strand; PAM type: NRG; PAM sequence: AAG
tatatcaagctttttaaacc

SEQ ID NO: 87134 - DNA, 20 bp, Artificial Sequence
  Description of Artificial Sequence: Synthetic oligonucleotide
  Target: LAMA2; (-) strand; PAM type: NRG; PAM sequence: AAG
agtatgtttcattgtatatc

SEQ ID NO: 87135 - DNA, 20 bp, Artificial Sequence
  Description of Artificial Sequence: Synthetic oligonucleotide
  Target: LAMA2; (-) strand; PAM type: NRG; PAM sequence: AAG
aacagctttataatttgccc

SEQ ID NO: 87136 - DNA, 20 bp, Artificial Sequence
  Description of Artificial Sequence: Synthetic oligonucleotide
  Target: LAMA2; (-) strand; PAM type: NRG; PAM sequence: CAG
tattagctcattctcaggaa

SEQ ID NO: 87137 - DNA, 20 bp, Artificial Sequence
  Description of Artificial Sequence: Synthetic oligonucleotide
  Target: LAMA2; (-) strand; PAM type: NRG; PAM sequence: AGG
atatgtattagctcattctc

SEQ ID NO: 87138 - DNA, 20 bp, Artificial Sequence
  Description of Artificial Sequence: Synthetic oligonucleotide
  Target: LAMA2; (-) strand; PAM type: NRG; PAM sequence: CAG
aatatgtattagctcattct

SEQ ID NO: 87139 - DNA, 20 bp, Artificial Sequence
  Description of Artificial Sequence: Synthetic oligonucleotide
  Target: LAMA2; (-) strand; PAM type: NRG; PAM sequence: TAG
tttaacaactaaatatgtat

SEQ ID NO: 87140 - DNA, 20 bp, Artificial Sequence
  Description of Artificial Sequence: Synthetic oligonucleotide
  Target: LAMA2; (-) strand; PAM type: NRG; PAM sequence: CAG
tctaatttacattttcccct

SEQ ID NO: 87141 - DNA, 20 bp, Artificial Sequence
  Description of Artificial Sequence: Synthetic oligonucleotide
  Target: LAMA2; (-) strand; PAM type: NRG; PAM sequence: TAG
gctatcttatattgtagagg

SEQ ID NO: 87142 - DNA, 20 bp, Artificial Sequence
  Description of Artificial Sequence: Synthetic oligonucleotide
  Target: LAMA2; (-) strand; PAM type: NRG; PAM sequence: AGG
actgctatcttatattgtag

SEQ ID NO: 87143 - DNA, 20 bp, Artificial Sequence
  Description of Artificial Sequence: Synthetic oligonucleotide
  Target: LAMA2; (-) strand; PAM type: NRG; PAM sequence: GAG
tactgctatcttatattgta

SEQ ID NO: 87144 - DNA, 20 bp, Artificial Sequence
  Description of Artificial Sequence: Synthetic oligonucleotide
  Target: LAMA2; (-) strand; PAM type: NRG; PAM sequence: TAG
cctactgctatcttatattg

SEQ ID NO: 87145 - DNA, 20 bp, Artificial Sequence
  Description of Artificial Sequence: Synthetic oligonucleotide
  Target: LAMA2; (-) strand; PAM type: NRG; PAM sequence: CAG
aaaatgattattttaactta

SEQ ID NO: 87146 - DNA, 20 bp, Artificial Sequence
  Description of Artificial Sequence: Synthetic oligonucleotide
  Target: LAMA2; (-) strand; PAM type: NRG; PAM sequence: GAG
aatgaatgttactgaaaaat

SEQ ID NO: 87147 - DNA, 20 bp, Artificial Sequence
  Description of Artificial Sequence: Synthetic oligonucleotide
  Target: LAMA2; (-) strand; PAM type: NRG; PAM sequence: AGG
agaaagtacagaattgtatc

SEQ ID NO: 87148 - DNA, 20 bp, Artificial Sequence
  Description of Artificial Sequence: Synthetic oligonucleotide
  Target: LAMA2; (-) strand; PAM type: NRG; PAM sequence: CAG
cagaaagtacagaattgtat

SEQ ID NO: 87149 - DNA, 20 bp, Artificial Sequence
  Description of Artificial Sequence: Synthetic oligonucleotide
  Target: LAMA2; (-) strand; PAM type: NRG; PAM sequence: CAG
tagtcaattttcagaaagta

SEQ ID NO: 87150 - DNA, 20 bp, Artificial Sequence
  Description of Artificial Sequence: Synthetic oligonucleotide
  Target: LAMA2; (-) strand; PAM type: NRG; PAM sequence: AAG
tattatagtcaattttcaga

SEQ ID NO: 87151 - DNA, 20 bp, Artificial Sequence
  Description of Artificial Sequence: Synthetic oligonucleotide
  Target: LAMA2; (-) strand; PAM type: NRG; PAM sequence: CAG
tctttattatagtcaatttt

SEQ ID NO: 87152 - DNA, 20 bp, Artificial Sequence
  Description of Artificial Sequence: Synthetic oligonucleotide
  Target: LAMA2; (-) strand; PAM type: NRG; PAM sequence: TAG
tggccaggatttctttatta

SEQ ID NO: 87153 - DNA, 20 bp, Artificial Sequence
  Description of Artificial Sequence: Synthetic oligonucleotide
  Target: LAMA2; (-) strand; PAM type: NRG; PAM sequence: AGG
atgacaattttataatggcc

SEQ ID NO: 87154 - DNA, 20 bp, Artificial Sequence
  Description of Artificial Sequence: Synthetic oligonucleotide
  Target: LAMA2; (-) strand; PAM type: NRG; PAM sequence: CAG
gatgacaattttataatggc

SEQ ID NO: 87155 - DNA, 20 bp, Artificial Sequence
  Description of Artificial Sequence: Synthetic oligonucleotide
  Target: LAMA2; (-) strand; PAM type: NRG; PAM sequence: TGG
agtggatgacaattttataa

SEQ ID NO: 87156 - DNA, 20 bp, Artificial Sequence
  Description of Artificial Sequence: Synthetic oligonucleotide
  Target: LAMA2; (-) strand; PAM type: NRG; PAM sequence: TGG
tcatttattctacctatgag

SEQ ID NO: 87157 - DNA, 20 bp, Artificial Sequence
  Description of Artificial Sequence: Synthetic oligonucleotide
  Target: LAMA2; (-) strand; PAM type: NRG; PAM sequence: GAG
ctctcatttattctacctat

SEQ ID NO: 87158 - DNA, 20 bp, Artificial Sequence
  Description of Artificial Sequence: Synthetic oligonucleotide
  Target: LAMA2; (-) strand; PAM type: NRG; PAM sequence: TAG
atttaaatgctttctatatt

SEQ ID NO: 87159 - DNA, 20 bp, Artificial Sequence
  Description of Artificial Sequence: Synthetic oligonucleotide
  Target: LAMA2; (-) strand; PAM type: NRG; PAM sequence: CAG
atgttttagaagcacaattt

SEQ ID NO: 87160 - DNA, 20 bp, Artificial Sequence
  Description of Artificial Sequence: Synthetic oligonucleotide
  Target: LAMA2; (-) strand; PAM type: NRG; PAM sequence: AAG
acaacactgaaatgttttag

SEQ ID NO: 87161 - DNA, 20 bp, Artificial Sequence
  Description of Artificial Sequence: Synthetic oligonucleotide
  Target: LAMA2; (-) strand; PAM type: NRG; PAM sequence: TAG
tgaacaacactgaaatgttt

SEQ ID NO: 87162 - DNA, 20 bp, Artificial Sequence
  Description of Artificial Sequence: Synthetic oligonucleotide
  Target: LAMA2; (-) strand; PAM type: NRG; PAM sequence: TAG
acttttttcaatataacata

SEQ ID NO: 87163 - DNA, 20 bp, Artificial Sequence
  Description of Artificial Sequence: Synthetic oligonucleotide
  Target: LAMA2; (-) strand; PAM type: NRG; PAM sequence: AAG
ttaaacatgtatctaaattt

SEQ ID NO: 87164 - DNA, 20 bp, Artificial Sequence
  Description of Artificial Sequence: Synthetic oligonucleotide
  Target: LAMA2; (-) strand; PAM type: NRG; PAM sequence: CAG
ctgtttgatcaaaatgatta

SEQ ID NO: 87165 - DNA, 20 bp, Artificial Sequence
  Description of Artificial Sequence: Synthetic oligonucleotide
  Target: LAMA2; (-) strand; PAM type: NRG; PAM sequence: TAG
aaatattgaataataaataa

SEQ ID NO: 87166 - DNA, 20 bp, Artificial Sequence
  Description of Artificial Sequence: Synthetic oligonucleotide
  Target: LAMA2; (-) strand; PAM type: NRG; PAM sequence: AGG
ttaaggtagatgaaagtttc

SEQ ID NO: 87167 - DNA, 20 bp, Artificial Sequence
  Description of Artificial Sequence: Synthetic oligonucleotide
  Target: LAMA2; (-) strand; PAM type: NRG; PAM sequence: CAG
attaaggtagatgaaagttt

SEQ ID NO: 87168 - DNA, 20 bp, Artificial Sequence
  Description of Artificial Sequence: Synthetic oligonucleotide
  Target: LAMA2; (-) strand; PAM type: NRG; PAM sequence: AAG
accatcattaaggtagatga

SEQ ID NO: 87169 - DNA, 20 bp, Artificial Sequence
  Description of Artificial Sequence: Synthetic oligonucleotide
  Target: LAMA2; (-) strand; PAM type: NRG; PAM sequence: TAG
tcacaataccatcattaagg

SEQ ID NO: 87170 - DNA, 20 bp, Artificial Sequence
  Description of Artificial Sequence: Synthetic oligonucleotide
  Target: LAMA2; (-) strand; PAM type: NRG; PAM sequence: AGG
ttatcacaataccatcatta

SEQ ID NO: 87171 - DNA, 20 bp, Artificial Sequence
  Description of Artificial Sequence: Synthetic oligonucleotide
  Target: LAMA2; (-) strand; PAM type: NRG; PAM sequence: AAG
tttatcacaataccatcatt

SEQ ID NO: 87172 - DNA, 20 bp, Artificial Sequence
  Description of Artificial Sequence: Synthetic oligonucleotide
  Target: LAMA2; (-) strand; PAM type: NRG; PAM sequence: GGG
ggcaaatcttggtgatacat

SEQ ID NO: 87173 - DNA, 20 bp, Artificial Sequence
  Description of Artificial Sequence: Synthetic oligonucleotide
  Target: LAMA2; (-) strand; PAM type: NRG; PAM sequence: TGG
tggcaaatcttggtgataca

SEQ ID NO: 87174 - DNA, 20 bp, Artificial Sequence
  Description of Artificial Sequence: Synthetic oligonucleotide
  Target: LAMA2; (-) strand; PAM type: NRG; PAM sequence: TGG
taaaaagaattggcaaatct

SEQ ID NO: 87175 - DNA, 20 bp, Artificial Sequence
  Description of Artificial Sequence: Synthetic oligonucleotide
  Target: LAMA2; (-) strand; PAM type: NRG; PAM sequence: TGG
ctttaaggaataaaaagaat

SEQ ID NO: 87176 - DNA, 20 bp, Artificial Sequence
  Description of Artificial Sequence: Synthetic oligonucleotide
  Target: LAMA2; (-) strand; PAM type: NRG; PAM sequence: AAG
gatattctttaaggaataaa

SEQ ID NO: 87177 - DNA, 20 bp, Artificial Sequence
  Description of Artificial Sequence: Synthetic oligonucleotide
  Target: LAMA2; (-) strand; PAM type: NRG; PAM sequence: AGG
aaattgtcagatattcttta

SEQ ID NO: 87178 - DNA, 20 bp, Artificial Sequence
  Description of Artificial Sequence: Synthetic oligonucleotide
  Target: LAMA2; (-) strand; PAM type: NRG; PAM sequence: AAG
caaattgtcagatattcttt

SEQ ID NO: 87179 - DNA, 20 bp, Artificial Sequence
  Description of Artificial Sequence: Synthetic oligonucleotide
  Target: LAMA2; (-) strand; PAM type: NRG; PAM sequence: CAG
tatacaaaccagcaaattgt

SEQ ID NO: 87180 - DNA, 20 bp, Artificial Sequence
  Description of Artificial Sequence: Synthetic oligonucleotide
  Target: LAMA2; (-) strand; PAM type: NRG; PAM sequence: CAG
taactcaaacttatacaaac

SEQ ID NO: 87181 - DNA, 20 bp, Artificial Sequence
  Description of Artificial Sequence: Synthetic oligonucleotide
  Target: LAMA2; (-) strand; PAM type: NRG; PAM sequence: CGG
tatactgcaggacattatta

SEQ ID NO: 87182 - DNA, 20 bp, Artificial Sequence
  Description of Artificial Sequence: Synthetic oligonucleotide
  Target: LAMA2; (-) strand; PAM type: NRG; PAM sequence: AGG
tattttgacatatatactgc

SEQ ID NO: 87183 - DNA, 20 bp, Artificial Sequence
  Description of Artificial Sequence: Synthetic oligonucleotide
  Target: LAMA2; (-) strand; PAM type: NRG; PAM sequence: CAG
gtattttgacatatatactg

SEQ ID NO: 87184 - DNA, 20 bp, Artificial Sequence
  Description of Artificial Sequence: Synthetic oligonucleotide
  Target: LAMA2; (-) strand; PAM type: NRG; PAM sequence: GAG
tcttggagactgctatttta

SEQ ID NO: 87185 - DNA, 20 bp, Artificial Sequence
  Description of Artificial Sequence: Synthetic oligonucleotide
  Target: LAMA2; (-) strand; PAM type: NRG; PAM sequence: TAG
gttcttggagactgctattt

SEQ ID NO: 87186 - DNA, 20 bp, Artificial Sequence
  Description of Artificial Sequence: Synthetic oligonucleotide
  Target: LAMA2; (-) strand; PAM type: NRG; PAM sequence: GAG
acatacttcctgggttcttg

SEQ ID NO: 87187 - DNA, 20 bp, Artificial Sequence
  Description of Artificial Sequence: Synthetic oligonucleotide
  Target: LAMA2; (-) strand; PAM type: NRG; PAM sequence: TGG
tcacatacttcctgggttct

SEQ ID NO: 87188 - DNA, 20 bp, Artificial Sequence
  Description of Artificial Sequence: Synthetic oligonucleotide
  Target: LAMA2; (-) strand; PAM type: NRG; PAM sequence: GGG
ctatggatcacatacttcct

SEQ ID NO: 87189 - DNA, 20 bp, Artificial Sequence
  Description of Artificial Sequence: Synthetic oligonucleotide
  Target: LAMA2; (-) strand; PAM type: NRG; PAM sequence: TGG
cctatggatcacatacttcc

SEQ ID NO: 87190 - DNA, 20 bp, Artificial Sequence
  Description of Artificial Sequence: Synthetic oligonucleotide
  Target: LAMA2; (-) strand; PAM type: NRG; PAM sequence: TGG
ataaaatatgtacactccta

SEQ ID NO: 87191 - DNA, 20 bp, Artificial Sequence
  Description of Artificial Sequence: Synthetic oligonucleotide
  Target: LAMA2; (-) strand; PAM type: NRG; PAM sequence: AAG
agtgtctgtcttatttttta

SEQ ID NO: 87192 - DNA, 20 bp, Artificial Sequence
  Description of Artificial Sequence: Synthetic oligonucleotide
  Target: LAMA2; (-) strand; PAM type: NRG; PAM sequence: AAG
cataaatgtcttcttttgag

SEQ ID NO: 87193 - DNA, 20 bp, Artificial Sequence
  Description of Artificial Sequence: Synthetic oligonucleotide
  Target: LAMA2; (-) strand; PAM type: NRG; PAM sequence: GAG
ctgcataaatgtcttctttt

SEQ ID NO: 87194 - DNA, 20 bp, Artificial Sequence
  Description of Artificial Sequence: Synthetic oligonucleotide
  Target: LAMA2; (-) strand; PAM type: NRG; PAM sequence: TGG
gcattttttcatgtgttttt

SEQ ID NO: 87195 - DNA, 20 bp, Artificial Sequence
  Description of Artificial Sequence: Synthetic oligonucleotide
  Target: LAMA2; (-) strand; PAM type: NRG; PAM sequence: GAG
ctctgatggccagtgatggt

SEQ ID NO: 87196 - DNA, 20 bp, Artificial Sequence
  Description of Artificial Sequence: Synthetic oligonucleotide
  Target: LAMA2; (-) strand; PAM type: NRG; PAM sequence: TGG
atttctctgatggccagtga

SEQ ID NO: 87197 - DNA, 20 bp, Artificial Sequence
  Description of Artificial Sequence: Synthetic oligonucleotide
  Target: LAMA2; (-) strand; PAM type: NRG; PAM sequence: CAG
atttgcatttctctgatggc

SEQ ID NO: 87198 - DNA, 20 bp, Artificial Sequence
  Description of Artificial Sequence: Synthetic oligonucleotide
  Target: LAMA2; (-) strand; PAM type: NRG; PAM sequence: TGG
tttgatttgcatttctctga

SEQ ID NO: 87199 - DNA, 20 bp, Artificial Sequence
  Description of Artificial Sequence: Synthetic oligonucleotide
  Target: LAMA2; (-) strand; PAM type: NRG; PAM sequence: TGG
tgtgagatggtatctcattg

SEQ ID NO: 87200 - DNA, 20 bp, Artificial Sequence
  Description of Artificial Sequence: Synthetic oligonucleotide
  Target: LAMA2; (-) strand; PAM type: NRG; PAM sequence: TGG
ccattctaattggtgtgaga

SEQ ID NO: 87201 - DNA, 20 bp, Artificial Sequence
  Description of Artificial Sequence: Synthetic oligonucleotide
  Target: LAMA2; (-) strand; PAM type: NRG; PAM sequence: GAG
actgccattctaattggtgt

SEQ ID NO: 87202 - DNA, 20 bp, Artificial Sequence
  Description of Artificial Sequence: Synthetic oligonucleotide
  Target: LAMA2; (-) strand; PAM type: NRG; PAM sequence: TGG
ttaatgactgccattctaat

SEQ ID NO: 87203 - DNA, 20 bp, Artificial Sequence
  Description of Artificial Sequence: Synthetic oligonucleotide
  Target: LAMA2; (-) strand; PAM type: NRG; PAM sequence: CAG
ctatttctccacatcctctc

SEQ ID NO: 87204 - DNA, 20 bp, Artificial Sequence
  Description of Artificial Sequence: Synthetic oligonucleotide
  Target: LAMA2; (-) strand; PAM type: NRG; PAM sequence: AAG
cagtcccaccaacagtgtaa

SEQ ID NO: 87205 - DNA, 20 bp, Artificial Sequence
  Description of Artificial Sequence: Synthetic oligonucleotide
  Target: LAMA2; (-) strand; PAM type: NRG; PAM sequence: CAG
ctagtttacagtcccaccaa

SEQ ID NO: 87206 - DNA, 20 bp, Artificial Sequence
  Description of Artificial Sequence: Synthetic oligonucleotide
  Target: LAMA2; (-) strand; PAM type: NRG; PAM sequence: CAG
acaatggttaaactagttta

SEQ ID NO: 87207 - DNA, 20 bp, Artificial Sequence
  Description of Artificial Sequence: Synthetic oligonucleotide
  Target: LAMA2; (-) strand; PAM type: NRG; PAM sequence: TAG
gacttccacaatggttaaac

SEQ ID NO: 87208 - DNA, 20 bp, Artificial Sequence
  Description of Artificial Sequence: Synthetic oligonucleotide
  Target: LAMA2; (-) strand; PAM type: NRG; PAM sequence: TGG
caccacactgacttccacaa

SEQ ID NO: 87209 - DNA, 20 bp, Artificial Sequence
  Description of Artificial Sequence: Synthetic oligonucleotide
  Target: LAMA2; (-) strand; PAM type: NRG; PAM sequence: AGG
tttcaagttctagatccctg

SEQ ID NO: 87210 - DNA, 20 bp, Artificial Sequence
  Description of Artificial Sequence: Synthetic oligonucleotide
  Target: LAMA2; (-) strand; PAM type: NRG; PAM sequence: GAG
atttcaagttctagatccct

SEQ ID NO: 87211 - DNA, 20 bp, Artificial Sequence
  Description of Artificial Sequence: Synthetic oligonucleotide
  Target: LAMA2; (-) strand; PAM type: NRG; PAM sequence: TAG
tcaaatggtatttcaagttc

SEQ ID NO: 87212 - DNA, 20 bp, Artificial Sequence
  Description of Artificial Sequence: Synthetic oligonucleotide
  Target: LAMA2; (-) strand; PAM type: NRG; PAM sequence: AAG
gctgggtcaaatggtatttc

SEQ ID NO: 87213 - DNA, 20 bp, Artificial Sequence
  Description of Artificial Sequence: Synthetic oligonucleotide
  Target: LAMA2; (-) strand; PAM type: NRG; PAM sequence: TGG
aatgggatggctgggtcaaa

SEQ ID NO: 87214 - DNA, 20 bp, Artificial Sequence
  Description of Artificial Sequence: Synthetic oligonucleotide
  Target: LAMA2; (-) strand; PAM type: NRG; PAM sequence: GGG
tacccagtaatgggatggct

SEQ ID NO: 87215 - DNA, 20 bp, Artificial Sequence
  Description of Artificial Sequence: Synthetic oligonucleotide
  Target: LAMA2; (-) strand; PAM type: NRG; PAM sequence: TGG
atacccagtaatgggatggc

SEQ ID NO: 87216 - DNA, 20 bp, Artificial Sequence
  Description of Artificial Sequence: Synthetic oligonucleotide
  Target: LAMA2; (-) strand; PAM type: NRG; PAM sequence: TGG
gtacatacccagtaatggga

SEQ ID NO: 87217 - DNA, 20 bp, Artificial Sequence
  Description of Artificial Sequence: Synthetic oligonucleotide
  Target: LAMA2; (-) strand; PAM type: NRG; PAM sequence: GGG
ttgggtacatacccagtaat

SEQ ID NO: 87218 - DNA, 20 bp, Artificial Sequence
  Description of Artificial Sequence: Synthetic oligonucleotide
  Target: LAMA2; (-) strand; PAM type: NRG; PAM sequence: TGG
tttgggtacatacccagtaa

SEQ ID NO: 87219 - DNA, 20 bp, Artificial Sequence
  Description of Artificial Sequence: Synthetic oligonucleotide
  Target: LAMA2; (-) strand; PAM type: NRG; PAM sequence: CAG
tagtcctttgggtacatacc

SEQ ID NO: 87220 - DNA, 20 bp, Artificial Sequence
  Description of Artificial Sequence: Synthetic oligonucleotide
  Target: LAMA2; (-) strand; PAM type: NRG; PAM sequence: GGG
agcatgatttatagtccttt

SEQ ID NO: 87221 - DNA, 20 bp, Artificial Sequence
  Description of Artificial Sequence: Synthetic oligonucleotide
  Target: LAMA2; (-) strand; PAM type: NRG; PAM sequence: TGG
cagcatgatttatagtcctt

SEQ ID NO: 87222 - DNA, 20 bp, Artificial Sequence
  Description of Artificial Sequence: Synthetic oligonucleotide
  Target: LAMA2; (-) strand; PAM type: NRG; PAM sequence: TAG
ctttatagcagcatgattta

SEQ ID NO: 87223 - DNA, 20 bp, Artificial Sequence
  Description of Artificial Sequence: Synthetic oligonucleotide
  Target: LAMA2; (-) strand; PAM type: NRG; PAM sequence: CAG
gtgtgcatgtgtctttatag

SEQ ID NO: 87224 - DNA, 20 bp, Artificial Sequence
  Description of Artificial Sequence: Synthetic oligonucleotide
  Target: LAMA2; (-) strand; PAM type: NRG; PAM sequence: TAG
tacgtgtgcatgtgtcttta

SEQ ID NO: 87225 - DNA, 20 bp, Artificial Sequence
  Description of Artificial Sequence: Synthetic oligonucleotide
  Target: LAMA2; (-) strand; PAM type: NRG; PAM sequence: TAG
caagtctttgctattgtgaa

SEQ ID NO: 87226 - DNA, 20 bp, Artificial Sequence
  Description of Artificial Sequence: Synthetic oligonucleotide
  Target: LAMA2; (-) strand; PAM type: NRG; PAM sequence: AAG
tggacatttgggttggttcc

SEQ ID NO: 87227 - DNA, 20 bp, Artificial Sequence
  Description of Artificial Sequence: Synthetic oligonucleotide
  Target: LAMA2; (-) strand; PAM type: NRG; PAM sequence: TGG
tcattgttggacatttgggt

SEQ ID NO: 87228 - DNA, 20 bp, Artificial Sequence
  Description of Artificial Sequence: Synthetic oligonucleotide
  Target: LAMA2; (-) strand; PAM type: NRG; PAM sequence: GGG
tctatcattgttggacattt

SEQ ID NO: 87229 - DNA, 20 bp, Artificial Sequence
  Description of Artificial Sequence: Synthetic oligonucleotide
  Target: LAMA2; (-) strand; PAM type: NRG; PAM sequence: TGG
gtctatcattgttggacatt

SEQ ID NO: 87230 - DNA, 20 bp, Artificial Sequence
  Description of Artificial Sequence: Synthetic oligonucleotide
  Target: LAMA2; (-) strand; PAM type: NRG; PAM sequence: TGG
ttaatccagtctatcattgt

SEQ ID NO: 87231 - DNA, 20 bp, Artificial Sequence
  Description of Artificial Sequence: Synthetic oligonucleotide
  Target: LAMA2; (-) strand; PAM type: NRG; PAM sequence: CAG
tgtgccacattttcttaatc

SEQ ID NO: 87232 - DNA, 20 bp, Artificial Sequence
  Description of Artificial Sequence: Synthetic oligonucleotide
  Target: LAMA2; (-) strand; PAM type: NRG; PAM sequence: TGG
tatggctgcatagtattcca

SEQ ID NO: 87233 - DNA, 20 bp, Artificial Sequence
  Description of Artificial Sequence: Synthetic oligonucleotide
  Target: LAMA2; (-) strand; PAM type: NRG; PAM sequence: TAG
catcattttttatggctgca

SEQ ID NO: 87234 - DNA, 20 bp, Artificial Sequence
  Description of Artificial Sequence: Synthetic oligonucleotide
  Target: LAMA2; (-) strand; PAM type: NRG; PAM sequence: TGG
catgaactcatcatttttta

SEQ ID NO: 87235 - DNA, 20 bp, Artificial Sequence
  Description of Artificial Sequence: Synthetic oligonucleotide
  Target: LAMA2; (-) strand; PAM type: NRG; PAM sequence: AGG
tttcatccatgtccctacaa

SEQ ID NO: 87236 - DNA, 20 bp, Artificial Sequence
  Description of Artificial Sequence: Synthetic oligonucleotide
  Target: LAMA2; (-) strand; PAM type: NRG; PAM sequence: AAG
atttcatccatgtccctaca

SEQ ID NO: 87237 - DNA, 20 bp, Artificial Sequence
  Description of Artificial Sequence: Synthetic oligonucleotide
  Target: LAMA2; (-) strand; PAM type: NRG; PAM sequence: GAG
tgtccttgtgatagtttact

SEQ ID NO: 87238 - DNA, 20 bp, Artificial Sequence
  Description of Artificial Sequence: Synthetic oligonucleotide
  Target: LAMA2; (-) strand; PAM type: NRG; PAM sequence: TAG
ttgtttttttgtccttgtga

SEQ ID NO: 87239 - DNA, 20 bp, Artificial Sequence
  Description of Artificial Sequence: Synthetic oligonucleotide
  Target: LAMA2; (-) strand; PAM type: NRG; PAM sequence: TGG
cacctatgagtgagaacatg

SEQ ID NO: 87240 - DNA, 20 bp, Artificial Sequence
  Description of Artificial Sequence: Synthetic oligonucleotide
  Target: LAMA2; (-) strand; PAM type: NRG; PAM sequence: GAG
ttcaattcccacctatgagt

SEQ ID NO: 87241 - DNA, 20 bp, Artificial Sequence
  Description of Artificial Sequence: Synthetic oligonucleotide
  Target: LAMA2; (-) strand; PAM type: NRG; PAM sequence: GAG
attgttcaattcccacctat

SEQ ID NO: 87242 - DNA, 20 bp, Artificial Sequence
  Description of Artificial Sequence: Synthetic oligonucleotide
  Target: LAMA2; (-) strand; PAM type: NRG; PAM sequence: GAG
ccaccccacaacagtcccca

SEQ ID NO: 87243 - DNA, 20 bp, Artificial Sequence
  Description of Artificial Sequence: Synthetic oligonucleotide
  Target: LAMA2; (-) strand; PAM type: NRG; PAM sequence: CAG
ccccaccccacaacagtccc

SEQ ID NO: 87244 - DNA, 20 bp, Artificial Sequence
  Description of Artificial Sequence: Synthetic oligonucleotide
  Target: LAMA2; (-) strand; PAM type: NRG; PAM sequence: CAG
ccctcccccccaccccacaa

SEQ ID NO: 87245 - DNA, 20 bp, Artificial Sequence
  Description of Artificial Sequence: Synthetic oligonucleotide
  Target: LAMA2; (-) strand; PAM type: NRG; PAM sequence: TAG
gcacccattaactcgtcatt

SEQ ID NO: 87246 - DNA, 20 bp, Artificial Sequence
  Description of Artificial Sequence: Synthetic oligonucleotide
  Target: LAMA2; (-) strand; PAM type: NRG; PAM sequence: TGG
tatgtatacatgtgccatgc

SEQ ID NO: 87247 - DNA, 20 bp, Artificial Sequence
  Description of Artificial Sequence: Synthetic oligonucleotide
  Target: LAMA2; (-) strand; PAM type: NRG; PAM sequence: TAG
catgtgcaccatgtgccagt

SEQ ID NO: 87248 - DNA, 20 bp, Artificial Sequence
  Description of Artificial Sequence: Synthetic oligonucleotide
  Target: LAMA2; (-) strand; PAM type: NRG; PAM sequence: CAG
ggtacatgtgcaccatgtgc

SEQ ID NO: 87249 - DNA, 20 bp, Artificial Sequence
  Description of Artificial Sequence: Synthetic oligonucleotide
  Target: LAMA2; (-) strand; PAM type: NRG; PAM sequence: GGG
ttattatactttaagtttta

SEQ ID NO: 87250 - DNA, 20 bp, Artificial Sequence
  Description of Artificial Sequence: Synthetic oligonucleotide
  Target: LAMA2; (-) strand; PAM type: NRG; PAM sequence: AGG
attattatactttaagtttt

SEQ ID NO: 87251 - DNA, 20 bp, Artificial Sequence
  Description of Artificial Sequence: Synthetic oligonucleotide
  Target: LAMA2; (-) strand; PAM type: NRG; PAM sequence: TAG
tattattatactttaagttt

SEQ ID NO: 87252 - DNA, 20 bp, Artificial Sequence
  Description of Artificial Sequence: Synthetic oligonucleotide
  Target: LAMA2; (-) strand; PAM type: NRG; PAM sequence: AAG
ttttattattattatacttt

SEQ ID NO: 87253 - DNA, 20 bp, Artificial Sequence
  Description of Artificial Sequence: Synthetic oligonucleotide
  Target: LAMA2; (-) strand; PAM type: NRG; PAM sequence: TGG
tacgatgaacttttttttaa

SEQ ID NO: 87254 - DNA, 20 bp, Artificial Sequence
  Description of Artificial Sequence: Synthetic oligonucleotide
  Target: LAMA2; (-) strand; PAM type: NRG; PAM sequence: CAG
tactccaccagggagcagcc

SEQ ID NO: 87255 - DNA, 20 bp, Artificial Sequence
  Description of Artificial Sequence: Synthetic oligonucleotide
  Target: LAMA2; (-) strand; PAM type: NRG; PAM sequence: CAG
gctggtactccaccagggag

SEQ ID NO: 87256 - DNA, 20 bp, Artificial Sequence
  Description of Artificial Sequence: Synthetic oligonucleotide
  Target: LAMA2; (-) strand; PAM type: NRG; PAM sequence: GAG
tgagctggtactccaccagg

SEQ ID NO: 87257 - DNA, 20 bp, Artificial Sequence
  Description of Artificial Sequence: Synthetic oligonucleotide
  Target: LAMA2; (-) strand; PAM type: NRG; PAM sequence: GGG
cttgagctggtactccacca

SEQ ID NO: 87258 - DNA, 20 bp, Artificial Sequence
  Description of Artificial Sequence: Synthetic oligonucleotide
  Target: LAMA2; (-) strand; PAM type: NRG; PAM sequence: AGG
tcttgagctggtactccacc

SEQ ID NO: 87259 - DNA, 20 bp, Artificial Sequence
  Description of Artificial Sequence: Synthetic oligonucleotide
  Target: LAMA2; (-) strand; PAM type: NRG; PAM sequence: CAG
atcttgagctggtactccac

SEQ ID NO: 87260 - DNA, 20 bp, Artificial Sequence
  Description of Artificial Sequence: Synthetic oligonucleotide
  Target: LAMA2; (-) strand; PAM type: NRG; PAM sequence: TGG
ttcctcaaaacatcttgagc

SEQ ID NO: 87261 - DNA, 20 bp, Artificial Sequence
  Description of Artificial Sequence: Synthetic oligonucleotide
  Target: LAMA2; (-) strand; PAM type: NRG; PAM sequence: GAG
ttttttcctcaaaacatctt

SEQ ID NO: 87262 - DNA, 20 bp, Artificial Sequence
  Description of Artificial Sequence: Synthetic oligonucleotide
  Target: LAMA2; (-) strand; PAM type: NRG; PAM sequence: TGG
ccactataaatcctcccact

SEQ ID NO: 87263 - DNA, 20 bp, Artificial Sequence
  Description of Artificial Sequence: Synthetic oligonucleotide
  Target: LAMA2; (-) strand; PAM type: NRG; PAM sequence: AAG
atatgtctaaatcaatgaac

SEQ ID NO: 87264 - DNA, 20 bp, Artificial Sequence
  Description of Artificial Sequence: Synthetic oligonucleotide
  Target: LAMA2; (-) strand; PAM type: NRG; PAM sequence: TAG
atataatctgaaagccaact

SEQ ID NO: 87265 - DNA, 20 bp, Artificial Sequence
  Description of Artificial Sequence: Synthetic oligonucleotide
  Target: LAMA2; (-) strand; PAM type: NRG; PAM sequence: AAG
aatatggtcatataatctga

SEQ ID NO: 87266 - DNA, 20 bp, Artificial Sequence
  Description of Artificial Sequence: Synthetic oligonucleotide
  Target: LAMA2; (-) strand; PAM type: NRG; PAM sequence: TGG
gcttcatttagttaaaaata

SEQ ID NO: 87267 - DNA, 20 bp, Artificial Sequence
  Description of Artificial Sequence: Synthetic oligonucleotide
  Target: LAMA2; (-) strand; PAM type: NRG; PAM sequence: TAG
ttattcagcaaagcttcatt

SEQ ID NO: 87268 - DNA, 20 bp, Artificial Sequence
  Description of Artificial Sequence: Synthetic oligonucleotide
  Target: LAMA2; (-) strand; PAM type: NRG; PAM sequence: AAG
agtcatgtatttattcagca

SEQ ID NO: 87269 - DNA, 20 bp, Artificial Sequence
  Description of Artificial Sequence: Synthetic oligonucleotide
  Target: LAMA2; (-) strand; PAM type: NRG; PAM sequence: CAG
tattaagtcatgtatttatt

SEQ ID NO: 87270 - DNA, 20 bp, Artificial Sequence
  Description of Artificial Sequence: Synthetic oligonucleotide
  Target: LAMA2; (-) strand; PAM type: NRG; PAM sequence: AAG
gttttttgaaggaatatatt

SEQ ID NO: 87271 - DNA, 20 bp, Artificial Sequence
  Description of Artificial Sequence: Synthetic oligonucleotide
  Target: LAMA2; (-) strand; PAM type: NRG; PAM sequence: AGG
tttcactatatgttttttga

SEQ ID NO: 87272 - DNA, 20 bp, Artificial Sequence
  Description of Artificial Sequence: Synthetic oligonucleotide
  Target: LAMA2; (-) strand; PAM type: NRG; PAM sequence: AAG
atttcactatatgttttttg

SEQ ID NO: 87273 - DNA, 20 bp, Artificial Sequence
  Description of Artificial Sequence: Synthetic oligonucleotide
  Target: LAMA2; (-) strand; PAM type: NRG; PAM sequence: TAG
gctcattgcttatctttgtg

SEQ ID NO: 87274 - DNA, 20 bp, Artificial Sequence
  Description of Artificial Sequence: Synthetic oligonucleotide
  Target: LAMA2; (-) strand; PAM type: NRG; PAM sequence: TAG
ccaagagcagtggtaagcac

SEQ ID NO: 87275 - DNA, 20 bp, Artificial Sequence
  Description of Artificial Sequence: Synthetic oligonucleotide
  Target: LAMA2; (-) strand; PAM type: NRG; PAM sequence: AAG
ctcttaccaagagcagtggt

SEQ ID NO: 87276 - DNA, 20 bp, Artificial Sequence
  Description of Artificial Sequence: Synthetic oligonucleotide
  Target: LAMA2; (-) strand; PAM type: NRG; PAM sequence: TGG
aaagctcttaccaagagcag

SEQ ID NO: 87277 - DNA, 20 bp, Artificial Sequence
  Description of Artificial Sequence: Synthetic oligonucleotide
  Target: LAMA2; (-) strand; PAM type: NRG; PAM sequence: CAG
aggaaagctcttaccaagag

SEQ ID NO: 87278 - DNA, 20 bp, Artificial Sequence
  Description of Artificial Sequence: Synthetic oligonucleotide
  Target: LAMA2; (-) strand; PAM type: NRG; PAM sequence: GAG
tgaaggaaagctcttaccaa

SEQ ID NO: 87279 - DNA, 20 bp, Artificial Sequence
  Description of Artificial Sequence: Synthetic oligonucleotide
  Target: LAMA2; (-) strand; PAM type: NRG; PAM sequence: AAG
cctgaaggaaagctcttacc

SEQ ID NO: 87280 - DNA, 20 bp, Artificial Sequence
  Description of Artificial Sequence: Synthetic oligonucleotide
  Target: LAMA2; (-) strand; PAM type: NRG; PAM sequence: AAG
ctcattttgtgcctgaagga

SEQ ID NO: 87281 - DNA, 20 bp, Artificial Sequence
  Description of Artificial Sequence: Synthetic oligonucleotide
  Target: LAMA2; (-) strand; PAM type: NRG; PAM sequence: AGG
ttatctcattttgtgcctga

SEQ ID NO: 87282 - DNA, 20 bp, Artificial Sequence
  Description of Artificial Sequence: Synthetic oligonucleotide
  Target: LAMA2; (-) strand; PAM type: NRG; PAM sequence: AAG
tttatctcattttgtgcctg

SEQ ID NO: 87283 - DNA, 20 bp, Artificial Sequence
  Description of Artificial Sequence: Synthetic oligonucleotide
  Target: LAMA2; (-) strand; PAM type: NRG; PAM sequence: CAG
cttgttgaccaattttcatc

SEQ ID NO: 87284 - DNA, 20 bp, Artificial Sequence
  Description of Artificial Sequence: Synthetic oligonucleotide
  Target: LAMA2; (-) strand; PAM type: NRG; PAM sequence: CAG
taaaaactgcttttgcaagg

SEQ ID NO: 87285 - DNA, 20 bp, Artificial Sequence
  Description of Artificial Sequence: Synthetic oligonucleotide
  Target: LAMA2; (-) strand; PAM type: NRG; PAM sequence: AGG
taataaaaactgcttttgca

SEQ ID NO: 87286 - DNA, 20 bp, Artificial Sequence
  Description of Artificial Sequence: Synthetic oligonucleotide
  Target: LAMA2; (-) strand; PAM type: NRG; PAM sequence: AAG
ataataaaaactgcttttgc

SEQ ID NO: 87287 - DNA, 20 bp, Artificial Sequence
  Description of Artificial Sequence: Synthetic oligonucleotide
  Target: LAMA2; (-) strand; PAM type: NRG; PAM sequence: TGG
ctgaataactgctttcaaaa

SEQ ID NO: 87288 - DNA, 20 bp, Artificial Sequence
  Description of Artificial Sequence: Synthetic oligonucleotide
  Target: LAMA2; (-) strand; PAM type: NRG; PAM sequence: TAG
agctacaaatcatatactga

SEQ ID NO: 87289 - DNA, 20 bp, Artificial Sequence
  Description of Artificial Sequence: Synthetic oligonucleotide
  Target: LAMA2; (-) strand; PAM type: NRG; PAM sequence: GAG
tgatagaccaacaataattt

SEQ ID NO: 87290 - DNA, 20 bp, Artificial Sequence
  Description of Artificial Sequence: Synthetic oligonucleotide
  Target: LAMA2; (-) strand; PAM type: NRG; PAM sequence: TAG
aaaatagtatttgtgattga

SEQ ID NO: 87291 - DNA, 20 bp, Artificial Sequence
  Description of Artificial Sequence: Synthetic oligonucleotide
  Target: LAMA2; (-) strand; PAM type: NRG; PAM sequence: TAG
tagctatattatgcagaaaa

SEQ ID NO: 87292 - DNA, 20 bp, Artificial Sequence
  Description of Artificial Sequence: Synthetic oligonucleotide
  Target: LAMA2; (-) strand; PAM type: NRG; PAM sequence: CAG
tattttctagctatattatg

SEQ ID NO: 87293 - DNA, 20 bp, Artificial Sequence
  Description of Artificial Sequence: Synthetic oligonucleotide
  Target: LAMA2; (-) strand; PAM type: NRG; PAM sequence: TAG
agttagataattatattttc

SEQ ID NO: 87294 - DNA, 20 bp, Artificial Sequence
  Description of Artificial Sequence: Synthetic oligonucleotide
  Target: LAMA2; (-) strand; PAM type: NRG; PAM sequence: TAG
agaagactttaaaaataagt

SEQ ID NO: 87295 - DNA, 20 bp, Artificial Sequence
  Description of Artificial Sequence: Synthetic oligonucleotide
  Target: LAMA2; (-) strand; PAM type: NRG; PAM sequence: AAG
gtttagaagactttaaaaat

SEQ ID NO: 87296 - DNA, 20 bp, Artificial Sequence
  Description of Artificial Sequence: Synthetic oligonucleotide
  Target: LAMA2; (-) strand; PAM type: NRG; PAM sequence: AAG
cactgaaacttcatgtttag

SEQ ID NO: 87297 - DNA, 20 bp, Artificial Sequence
  Description of Artificial Sequence: Synthetic oligonucleotide
  Target: LAMA2; (-) strand; PAM type: NRG; PAM sequence: TAG
gctcactgaaacttcatgtt

SEQ ID NO: 87298 - DNA, 20 bp, Artificial Sequence
  Description of Artificial Sequence: Synthetic oligonucleotide
  Target: LAMA2; (-) strand; PAM type: NRG; PAM sequence: AAG
atatttaacaaaaagcttca

SEQ ID NO: 87299 - DNA, 20 bp, Artificial Sequence
  Description of Artificial Sequence: Synthetic oligonucleotide
  Target: LAMA2; (-) strand; PAM type: NRG; PAM sequence: AAG
attttaacatatttaacaaa

SEQ ID NO: 87300 - DNA, 20 bp, Artificial Sequence
  Description of Artificial Sequence: Synthetic oligonucleotide
  Target: LAMA2; (-) strand; PAM type: NRG; PAM sequence: AAG
ataattggaaactatttgga

SEQ ID NO: 87301 - DNA, 20 bp, Artificial Sequence
  Description of Artificial Sequence: Synthetic oligonucleotide
  Target: LAMA2; (-) strand; PAM type: NRG; PAM sequence: TGG
ggttataattggaaactatt

SEQ ID NO: 87302 - DNA, 20 bp, Artificial Sequence
  Description of Artificial Sequence: Synthetic oligonucleotide
  Target: LAMA2; (-) strand; PAM type: NRG; PAM sequence: TGG
tgatgctaattggttataat

SEQ ID NO: 87303 - DNA, 20 bp, Artificial Sequence
  Description of Artificial Sequence: Synthetic oligonucleotide
  Target: LAMA2; (-) strand; PAM type: NRG; PAM sequence: TGG
ataaattttctgatgctaat

SEQ ID NO: 87304 - DNA, 20 bp, Artificial Sequence
  Description of Artificial Sequence: Synthetic oligonucleotide
  Target: LAMA2; (-) strand; PAM type: NRG; PAM sequence: TGG
attaggttcttggtgaaatt

SEQ ID NO: 87305 - DNA, 20 bp, Artificial Sequence
  Description of Artificial Sequence: Synthetic oligonucleotide
  Target: LAMA2; (-) strand; PAM type: NRG; PAM sequence: TGG
tctctcacaaattaggttct

SEQ ID NO: 87306 - DNA, 20 bp, Artificial Sequence
  Description of Artificial Sequence: Synthetic oligonucleotide
  Target: LAMA2; (-) strand; PAM type: NRG; PAM sequence: AGG
tttcaattctctcacaaatt

SEQ ID NO: 87307 - DNA, 20 bp, Artificial Sequence
  Description of Artificial Sequence: Synthetic oligonucleotide
  Target: LAMA2; (-) strand; PAM type: NRG; PAM sequence: TAG
ttttcaattctctcacaaat

SEQ ID NO: 87308 - DNA, 20 bp, Artificial Sequence
  Description of Artificial Sequence: Synthetic oligonucleotide
  Target: LAMA2; (-) strand; PAM type: NRG; PAM sequence: TGG
tggctgagcatactaaatta

SEQ ID NO: 87309 - DNA, 20 bp, Artificial Sequence
  Description of Artificial Sequence: Synthetic oligonucleotide
  Target: LAMA2; (-) strand; PAM type: NRG; PAM sequence: GAG
taagcattacatcagtggct

SEQ ID NO: 87310 - DNA, 20 bp, Artificial Sequence
  Description of Artificial Sequence: Synthetic oligonucleotide
  Target: LAMA2; (-) strand; PAM type: NRG; PAM sequence: TGG
cattataagcattacatcag

SEQ ID NO: 87311 - DNA, 20 bp, Artificial Sequence
  Description of Artificial Sequence: Synthetic oligonucleotide
  Target: LAMA2; (-) strand; PAM type: NRG; PAM sequence: CAG
tcccattataagcattacat

SEQ ID NO: 87312 - DNA, 20 bp, Artificial Sequence
  Description of Artificial Sequence: Synthetic oligonucleotide
  Target: LAMA2; (-) strand; PAM type: NRG; PAM sequence: AAG
aaatacacaggtcccattat

SEQ ID NO: 87313 - DNA, 20 bp, Artificial Sequence
  Description of Artificial Sequence: Synthetic oligonucleotide
  Target: LAMA2; (-) strand; PAM type: NRG; PAM sequence: AGG
agcacagacaaaaaatacac

SEQ ID NO: 87314 - DNA, 20 bp, Artificial Sequence
  Description of Artificial Sequence: Synthetic oligonucleotide
  Target: LAMA2; (-) strand; PAM type: NRG; PAM sequence: CAG
cagcacagacaaaaaataca

SEQ ID NO: 87315 - DNA, 20 bp, Artificial Sequence
  Description of Artificial Sequence: Synthetic oligonucleotide
  Target: LAMA2; (-) strand; PAM type: NRG; PAM sequence: CAG
agctgaaaagagatacagca

SEQ ID NO: 87316 - DNA, 20 bp, Artificial Sequence
  Description of Artificial Sequence: Synthetic oligonucleotide
  Target: LAMA2; (-) strand; PAM type: NRG; PAM sequence: CAG
ttcacagctgaaaagagata

SEQ ID NO: 87317 - DNA, 20 bp, Artificial Sequence
  Description of Artificial Sequence: Synthetic oligonucleotide
  Target: LAMA2; (-) strand; PAM type: NRG; PAM sequence: GAG
atagttttcacagctgaaaa

SEQ ID NO: 87318 - DNA, 20 bp, Artificial Sequence
  Description of Artificial Sequence: Synthetic oligonucleotide
  Target: LAMA2; (-) strand; PAM type: NRG; PAM sequence: AAG
taatagttttcacagctgaa

SEQ ID NO: 87319 - DNA, 20 bp, Artificial Sequence
  Description of Artificial Sequence: Synthetic oligonucleotide
  Target: LAMA2; (-) strand; PAM type: NRG; PAM sequence: CAG
cttagtaataatagttttca

SEQ ID NO: 87320 - DNA, 20 bp, Artificial Sequence
  Description of Artificial Sequence: Synthetic oligonucleotide
  Target: LAMA2; (-) strand; PAM type: NRG; PAM sequence: TAG
gttttaatacttagtaataa

SEQ ID NO: 87321 - DNA, 20 bp, Artificial Sequence
  Description of Artificial Sequence: Synthetic oligonucleotide
  Target: LAMA2; (-) strand; PAM type: NRG; PAM sequence: TAG
cctcagtttgttttaatact

SEQ ID NO: 87322 - DNA, 20 bp, Artificial Sequence
  Description of Artificial Sequence: Synthetic oligonucleotide
  Target: LAMA2; (-) strand; PAM type: NRG; PAM sequence: CAG
gagccaccgtgccttgccct

SEQ ID NO: 87323 - DNA, 20 bp, Artificial Sequence
  Description of Artificial Sequence: Synthetic oligonucleotide
  Target: LAMA2; (-) strand; PAM type: NRG; PAM sequence: GAG
agtgctgggaatacgggcat

SEQ ID NO: 87324 - DNA, 20 bp, Artificial Sequence
  Description of Artificial Sequence: Synthetic oligonucleotide
  Target: LAMA2; (-) strand; PAM type: NRG; PAM sequence: GGG
tcccacagtgctgggaatac

SEQ ID NO: 87325 - DNA, 20 bp, Artificial Sequence
  Description of Artificial Sequence: Synthetic oligonucleotide
  Target: LAMA2; (-) strand; PAM type: NRG; PAM sequence: CGG
ctcccacagtgctgggaata

SEQ ID NO: 87326 - DNA, 20 bp, Artificial Sequence
  Description of Artificial Sequence: Synthetic oligonucleotide
  Target: LAMA2; (-) strand; PAM type: NRG; PAM sequence: GGG
cctcggcctcccacagtgct

SEQ ID NO: 87327 - DNA, 20 bp, Artificial Sequence
  Description of Artificial Sequence: Synthetic oligonucleotide
  Target: LAMA2; (-) strand; PAM type: NRG; PAM sequence: TGG
tcctcggcctcccacagtgc

SEQ ID NO: 87328 - DNA, 20 bp, Artificial Sequence
  Description of Artificial Sequence: Synthetic oligonucleotide
  Target: LAMA2; (-) strand; PAM type: NRG; PAM sequence: CAG
ccaccctcctcggcctccca

SEQ ID NO: 87329 - DNA, 20 bp, Artificial Sequence
  Description of Artificial Sequence: Synthetic oligonucleotide
  Target: LAMA2; (-) strand; PAM type: NRG; PAM sequence: CGG
ctgaagtgatccaccctcct

SEQ ID NO: 87330 - DNA, 20 bp, Artificial Sequence
  Description of Artificial Sequence: Synthetic oligonucleotide
  Target: LAMA2; (-) strand; PAM type: NRG; PAM sequence: AAG
ggtcttgaactcctgatctg

SEQ ID NO: 87331 - DNA, 20 bp, Artificial Sequence
  Description of Artificial Sequence: Synthetic oligonucleotide
  Target: LAMA2; (-) strand; PAM type: NRG; PAM sequence: TGG
tttcaccgcgttggcaaggc

SEQ ID NO: 87332 - DNA, 20 bp, Artificial Sequence
  Description of Artificial Sequence: Synthetic oligonucleotide
  Target: LAMA2; (-) strand; PAM type: NRG; PAM sequence: AGG
agggtttcaccgcgttggca

SEQ ID NO: 87333 - DNA, 20 bp, Artificial Sequence
  Description of Artificial Sequence: Synthetic oligonucleotide
  Target: LAMA2; (-) strand; PAM type: NRG; PAM sequence: AAG
cagggtttcaccgcgttggc

SEQ ID NO: 87334 - DNA, 20 bp, Artificial Sequence
  Description of Artificial Sequence: Synthetic oligonucleotide
  Target: LAMA2; (-) strand; PAM type: NRG; PAM sequence: TGG
gagacagggtttcaccgcgt

SEQ ID NO: 87335 - DNA, 20 bp, Artificial Sequence
  Description of Artificial Sequence: Synthetic oligonucleotide
  Target: LAMA2; (-) strand; PAM type: NRG; PAM sequence: GGG
ttgtatttttagtagagaca

SEQ ID NO: 87336 - DNA, 20 bp, Artificial Sequence
  Description of Artificial Sequence: Synthetic oligonucleotide
  Target: LAMA2; (-) strand; PAM type: NRG; PAM sequence: AGG
tttgtatttttagtagagac

SEQ ID NO: 87337 - DNA, 20 bp, Artificial Sequence
  Description of Artificial Sequence: Synthetic oligonucleotide
  Target: LAMA2; (-) strand; PAM type: NRG; PAM sequence: CAG
ttttgtatttttagtagaga

SEQ ID NO: 87338 - DNA, 20 bp, Artificial Sequence
  Description of Artificial Sequence: Synthetic oligonucleotide
  Target: LAMA2; (-) strand; PAM type: NRG; PAM sequence: GAG
taatttttgtatttttagta

SEQ ID NO: 87339 - DNA, 20 bp, Artificial Sequence
  Description of Artificial Sequence: Synthetic oligonucleotide
  Target: LAMA2; (-) strand; PAM type: NRG; PAM sequence: TAG
gctaatttttgtatttttag

SEQ ID NO: 87340 - DNA, 20 bp, Artificial Sequence
  Description of Artificial Sequence: Synthetic oligonucleotide
  Target: LAMA2; (-) strand; PAM type: NRG; PAM sequence: TAG
ccggctaatttttgtatttt

SEQ ID NO: 87341 - DNA, 20 bp, Artificial Sequence
  Description of Artificial Sequence: Synthetic oligonucleotide
  Target: LAMA2; (-) strand; PAM type: NRG; PAM sequence: CGG
caggcatgtgccaccatgcc

SEQ ID NO: 87342 - DNA, 20 bp, Artificial Sequence
  Description of Artificial Sequence: Synthetic oligonucleotide
  Target: LAMA2; (-) strand; PAM type: NRG; PAM sequence: AGG
tcacgagtagctgggattac

SEQ ID NO: 87343 - DNA, 20 bp, Artificial Sequence
  Description of Artificial Sequence: Synthetic oligonucleotide
  Target: LAMA2; (-) strand; PAM type: NRG; PAM sequence: CAG
ctcacgagtagctgggatta

SEQ ID NO: 87344 - DNA, 20 bp, Artificial Sequence
  Description of Artificial Sequence: Synthetic oligonucleotide
  Target: LAMA2; (-) strand; PAM type: NRG; PAM sequence: GGG
cctcagcctcacgagtagct

SEQ ID NO: 87345 - DNA, 20 bp, Artificial Sequence
  Description of Artificial Sequence: Synthetic oligonucleotide
  Target: LAMA2; (-) strand; PAM type: NRG; PAM sequence: TGG
gcctcagcctcacgagtagc

SEQ ID NO: 87346 - DNA, 20 bp, Artificial Sequence
  Description of Artificial Sequence: Synthetic oligonucleotide
  Target: LAMA2; (-) strand; PAM type: NRG; PAM sequence: TAG
tcctgcctcagcctcacgag

SEQ ID NO: 87347 - DNA, 20 bp, Artificial Sequence
  Description of Artificial Sequence: Synthetic oligonucleotide
  Target: LAMA2; (-) strand; PAM type: NRG; PAM sequence: GAG
ttctcctgcctcagcctcac

SEQ ID NO: 87348 - DNA, 20 bp, Artificial Sequence
  Description of Artificial Sequence: Synthetic oligonucleotide
  Target: LAMA2; (-) strand; PAM type: NRG; PAM sequence: CAG
ttcaagcgattctcctgcct

SEQ ID NO: 87349 - DNA, 20 bp, Artificial Sequence
  Description of Artificial Sequence: Synthetic oligonucleotide
  Target: LAMA2; (-) strand; PAM type: NRG; PAM sequence: AAG
acctcttgtctcccaggttc

SEQ ID NO: 87350 - DNA, 20 bp, Artificial Sequence
  Description of Artificial Sequence: Synthetic oligonucleotide
  Target: LAMA2; (-) strand; PAM type: NRG; PAM sequence: AGG
actgcaacctcttgtctccc

SEQ ID NO: 87351 - DNA, 20 bp, Artificial Sequence
  Description of Artificial Sequence: Synthetic oligonucleotide
  Target: LAMA2; (-) strand; PAM type: NRG; PAM sequence: CAG
cactgcaacctcttgtctcc

SEQ ID NO: 87352 - DNA, 20 bp, Artificial Sequence
  Description of Artificial Sequence: Synthetic oligonucleotide
  Target: LAMA2; (-) strand; PAM type: NRG; PAM sequence: TGG
ggagtgcagtggtgtgatct

SEQ ID NO: 87353 - DNA, 20 bp, Artificial Sequence
  Description of Artificial Sequence: Synthetic oligonucleotide
  Target: LAMA2; (-) strand; PAM type: NRG; PAM sequence: TGG
tctcccaggctggagtgcag

SEQ ID NO: 87354 - DNA, 20 bp, Artificial Sequence
  Description of Artificial Sequence: Synthetic oligonucleotide
  Target: LAMA2; (-) strand; PAM type: NRG; PAM sequence: CAG
ctgtctcccaggctggagtg

SEQ ID NO: 87355 - DNA, 20 bp, Artificial Sequence
  Description of Artificial Sequence: Synthetic oligonucleotide
  Target: LAMA2; (-) strand; PAM type: NRG; PAM sequence: GAG
ttgctctgtctcccaggctg

SEQ ID NO: 87356 - DNA, 20 bp, Artificial Sequence
  Description of Artificial Sequence: Synthetic oligonucleotide
  Target: LAMA2; (-) strand; PAM type: NRG; PAM sequence: TGG
tcttgctctgtctcccaggc

SEQ ID NO: 87357 - DNA, 20 bp, Artificial Sequence
  Description of Artificial Sequence: Synthetic oligonucleotide
  Target: LAMA2; (-) strand; PAM type: NRG; PAM sequence: AGG
ggagtcttgctctgtctccc

SEQ ID NO: 87358 - DNA, 20 bp, Artificial Sequence
  Description of Artificial Sequence: Synthetic oligonucleotide
  Target: LAMA2; (-) strand; PAM type: NRG; PAM sequence: CAG
tggagtcttgctctgtctcc

SEQ ID NO: 87359 - DNA, 20 bp, Artificial Sequence
  Description of Artificial Sequence: Synthetic oligonucleotide
  Target: LAMA2; (-) strand; PAM type: NRG; PAM sequence: GAG
tttattttttttttgagatg

SEQ ID NO: 87360 - DNA, 20 bp, Artificial Sequence
  Description of Artificial Sequence: Synthetic oligonucleotide
  Target: LAMA2; (-) strand; PAM type: NRG; PAM sequence: TGG
tttttattttttttttgaga

SEQ ID NO: 87361 - DNA, 20 bp, Artificial Sequence
  Description of Artificial Sequence: Synthetic oligonucleotide
  Target: LAMA2; (-) strand; PAM type: NRG; PAM sequence: GAG
ttaatttttatttttttttt

SEQ ID NO: 87362 - DNA, 20 bp, Artificial Sequence
  Description of Artificial Sequence: Synthetic oligonucleotide
  Target: LAMA2; (-) strand; PAM type: NRG; PAM sequence: AGG
gtaggtccgtttctaggttc

SEQ ID NO: 87363 - DNA, 20 bp, Artificial Sequence
  Description of Artificial Sequence: Synthetic oligonucleotide
  Target: LAMA2; (-) strand; PAM type: NRG; PAM sequence: CAG
tgtaggtccgtttctaggtt

SEQ ID NO: 87364 - DNA, 20 bp, Artificial Sequence
  Description of Artificial Sequence: Synthetic oligonucleotide
  Target: LAMA2; (-) strand; PAM type: NRG; PAM sequence: AGG
acatttgtaggtccgtttct

SEQ ID NO: 87365 - DNA, 20 bp, Artificial Sequence
  Description of Artificial Sequence: Synthetic oligonucleotide
  Target: LAMA2; (-) strand; PAM type: NRG; PAM sequence: TAG
gacatttgtaggtccgtttc

SEQ ID NO: 87366 - DNA, 20 bp, Artificial Sequence
  Description of Artificial Sequence: Synthetic oligonucleotide
  Target: LAMA2; (-) strand; PAM type: NRG; PAM sequence: AGG
tactaagtattgacatttgt

SEQ ID NO: 87367 - DNA, 20 bp, Artificial Sequence
  Description of Artificial Sequence: Synthetic oligonucleotide
  Target: LAMA2; (-) strand; PAM type: NRG; PAM sequence: TAG
ttactaagtattgacatttg

SEQ ID NO: 87368 - DNA, 20 bp, Artificial Sequence
  Description of Artificial Sequence: Synthetic oligonucleotide
  Target: LAMA2; (-) strand; PAM type: NRG; PAM sequence: AAG
taataattaaaaatattact

SEQ ID NO: 87369 - DNA, 20 bp, Artificial Sequence
  Description of Artificial Sequence: Synthetic oligonucleotide
  Target: LAMA2; (-) strand; PAM type: NRG; PAM sequence: TGG
tttcttatttttggaaatct

SEQ ID NO: 87370 - DNA, 20 bp, Artificial Sequence
  Description of Artificial Sequence: Synthetic oligonucleotide
  Target: LAMA2; (-) strand; PAM type: NRG; PAM sequence: TGG
aattatgcttttcttatttt

SEQ ID NO: 87371 - DNA, 20 bp, Artificial Sequence
  Description of Artificial Sequence: Synthetic oligonucleotide
  Target: LAMA2; (-) strand; PAM type: NRG; PAM sequence: CAG
aaaaaaaaaaaaaaagaaac

SEQ ID NO: 87372 - DNA, 20 bp, Artificial Sequence
  Description of Artificial Sequence: Synthetic oligonucleotide
  Target: LAMA2; (-) strand; PAM type: NRG; PAM sequence: AAG
ccaaatgaaaaaaaaaaaaa

SEQ ID NO: 87373 - DNA, 20 bp, Artificial Sequence
  Description of Artificial Sequence: Synthetic oligonucleotide
  Target: LAMA2; (-) strand; PAM type: NRG; PAM sequence: AAG
tttacatatgcttgatacta

SEQ ID NO: 87374 - DNA, 20 bp, Artificial Sequence
  Description of Artificial Sequence: Synthetic oligonucleotide
  Target: LAMA2; (-) strand; PAM type: NRG; PAM sequence: GAG
gcctttccttattattttat

SEQ ID NO: 87375 - DNA, 20 bp, Artificial Sequence
  Description of Artificial Sequence: Synthetic oligonucleotide
  Target: LAMA2; (-) strand; PAM type: NRG; PAM sequence: TGG
ttttggtctatcaggcagtt

SEQ ID NO: 87376 - DNA, 20 bp, Artificial Sequence
  Description of Artificial Sequence: Synthetic oligonucleotide
  Target: LAMA2; (-) strand; PAM type: NRG; PAM sequence: CAG
tttttttttggtctatcagg

SEQ ID NO: 87377 - DNA, 20 bp, Artificial Sequence
  Description of Artificial Sequence: Synthetic oligonucleotide
  Target: LAMA2; (-) strand; PAM type: NRG; PAM sequence: AGG
ttttttttttttggtctatc

SEQ ID NO: 87378 - DNA, 20 bp, Artificial Sequence
  Description of Artificial Sequence: Synthetic oligonucleotide
  Target: LAMA2; (-) strand; PAM type: NRG; PAM sequence: CAG
tttttttttttttggtctat

SEQ ID NO: 87379 - DNA, 20 bp, Artificial Sequence
  Description of Artificial Sequence: Synthetic oligonucleotide
  Target: LAMA2; (-) strand; PAM type: NRG; PAM sequence: TGG
attgttgatttttttttttt

SEQ ID NO: 87380 - DNA, 20 bp, Artificial Sequence
  Description of Artificial Sequence: Synthetic oligonucleotide
  Target: LAMA2; (-) strand; PAM type: NRG; PAM sequence: TAG
aagatccttccatatgtttt

SEQ ID NO: 87381 - DNA, 20 bp, Artificial Sequence
  Description of Artificial Sequence: Synthetic oligonucleotide
  Target: LAMA2; (-) strand; PAM type: NRG; PAM sequence: AAG
tcaatattgctataagactc

SEQ ID NO: 87382 - DNA, 20 bp, Artificial Sequence
  Description of Artificial Sequence: Synthetic oligonucleotide
  Target: LAMA2; (-) strand; PAM type: NRG; PAM sequence: AAG
ttgctcatcaatattgctat

SEQ ID NO: 87383 - DNA, 20 bp, Artificial Sequence
  Description of Artificial Sequence: Synthetic oligonucleotide
  Target: LAMA2; (-) strand; PAM type: NRG; PAM sequence: GAG
gccaataaattgagtataaa

SEQ ID NO: 87384 - DNA, 20 bp, Artificial Sequence
  Description of Artificial Sequence: Synthetic oligonucleotide
  Target: LAMA2; (-) strand; PAM type: NRG; PAM sequence: AAG
ttgccaataaattgagtata

SEQ ID NO: 87385 - DNA, 20 bp, Artificial Sequence
  Description of Artificial Sequence: Synthetic oligonucleotide
  Target: LAMA2; (-) strand; PAM type: NRG; PAM sequence: GAG
ttaattattgccaataaatt

SEQ ID NO: 87386 - DNA, 20 bp, Artificial Sequence
  Description of Artificial Sequence: Synthetic oligonucleotide
  Target: LAMA2; (-) strand; PAM type: NRG; PAM sequence: TAG
aatacttttcaatatttctg

SEQ ID NO: 87387 - DNA, 20 bp, Artificial Sequence
  Description of Artificial Sequence: Synthetic oligonucleotide
  Target: LAMA2; (-) strand; PAM type: NRG; PAM sequence: TGG
ttagcactatataagaaatc

SEQ ID NO: 87388 - DNA, 20 bp, Artificial Sequence
  Description of Artificial Sequence: Synthetic oligonucleotide
  Target: LAMA2; (-) strand; PAM type: NRG; PAM sequence: AAG
aatttatattagcactatat

SEQ ID NO: 87389 - DNA, 20 bp, Artificial Sequence
  Description of Artificial Sequence: Synthetic oligonucleotide
  Target: LAMA2; (-) strand; PAM type: NRG; PAM sequence: TAG
agtggttaaccaatttatat

SEQ ID NO: 87390 - DNA, 20 bp, Artificial Sequence
  Description of Artificial Sequence: Synthetic oligonucleotide
  Target: LAMA2; (-) strand; PAM type: NRG; PAM sequence: TGG
ctttaaaagataatgtcaag

SEQ ID NO: 87391 - DNA, 20 bp, Artificial Sequence
  Description of Artificial Sequence: Synthetic oligonucleotide
  Target: LAMA2; (-) strand; PAM type: NRG; PAM sequence: AAG
aaactttaaaagataatgtc

SEQ ID NO: 87392 - DNA, 20 bp, Artificial Sequence
  Description of Artificial Sequence: Synthetic oligonucleotide
  Target: LAMA2; (-) strand; PAM type: NRG; PAM sequence: AAG
gtgtgaatattaaactttaa

SEQ ID NO: 87393 - DNA, 20 bp, Artificial Sequence
  Description of Artificial Sequence: Synthetic oligonucleotide
  Target: LAMA2; (-) strand; PAM type: NRG; PAM sequence: GGG
tagaaaattgttgggtcata

SEQ ID NO: 87394 - DNA, 20 bp, Artificial Sequence
  Description of Artificial Sequence: Synthetic oligonucleotide
  Target: LAMA2; (-) strand; PAM type: NRG; PAM sequence: AGG
ctagaaaattgttgggtcat

SEQ ID NO: 87395 - DNA, 20 bp, Artificial Sequence
  Description of Artificial Sequence: Synthetic oligonucleotide
  Target: LAMA2; (-) strand; PAM type: NRG; PAM sequence: TAG
tctagaaaattgttgggtca

SEQ ID NO: 87396 - DNA, 20 bp, Artificial Sequence
  Description of Artificial Sequence: Synthetic oligonucleotide
  Target: LAMA2; (-) strand; PAM type: NRG; PAM sequence: GGG
tatacatctagaaaattgtt

SEQ ID NO: 87397 - DNA, 20 bp, Artificial Sequence
  Description of Artificial Sequence: Synthetic oligonucleotide
  Target: LAMA2; (-) strand; PAM type: NRG; PAM sequence: TGG
atatacatctagaaaattgt

SEQ ID NO: 87398 - DNA, 20 bp, Artificial Sequence
  Description of Artificial Sequence: Synthetic oligonucleotide
  Target: LAMA2; (-) strand; PAM type: NRG; PAM sequence: TAG
tttcctttagtatatacatc

SEQ ID NO: 87399 - DNA, 20 bp, Artificial Sequence
  Description of Artificial Sequence: Synthetic oligonucleotide
  Target: LAMA2; (-) strand; PAM type: NRG; PAM sequence: TAG
acaaatgtaataatttcctt

SEQ ID NO: 87400 - DNA, 20 bp, Artificial Sequence
  Description of Artificial Sequence: Synthetic oligonucleotide
  Target: LAMA2; (-) strand; PAM type: NRG; PAM sequence: GGG
acacttttatgtgtttatct

SEQ ID NO: 87401 - DNA, 20 bp, Artificial Sequence
  Description of Artificial Sequence: Synthetic oligonucleotide
  Target: LAMA2; (-) strand; PAM type: NRG; PAM sequence: TGG
aacacttttatgtgtttatc

SEQ ID NO: 87402 - DNA, 20 bp, Artificial Sequence
  Description of Artificial Sequence: Synthetic oligonucleotide
  Target: LAMA2; (-) strand; PAM type: NRG; PAM sequence: CAG
tcggctcttcttaatataaa

SEQ ID NO: 87403 - DNA, 20 bp, Artificial Sequence
  Description of Artificial Sequence: Synthetic oligonucleotide
  Target: LAMA2; (-) strand; PAM type: NRG; PAM sequence: CGG
tctggataggcatctgctgt

SEQ ID NO: 87404 - DNA, 20 bp, Artificial Sequence
  Description of Artificial Sequence: Synthetic oligonucleotide
  Target: LAMA2; (-) strand; PAM type: NRG; PAM sequence: AGG
caatttgtttacctctggat

SEQ ID NO: 87405 - DNA, 20 bp, Artificial Sequence
  Description of Artificial Sequence: Synthetic oligonucleotide
  Target: LAMA2; (-) strand; PAM type: NRG; PAM sequence: TAG
acaatttgtttacctctgga

SEQ ID NO: 87406 - DNA, 20 bp, Artificial Sequence
  Description of Artificial Sequence: Synthetic oligonucleotide
  Target: LAMA2; (-) strand; PAM type: NRG; PAM sequence: TGG
tattacaatttgtttacctc

SEQ ID NO: 87407 - DNA, 20 bp, Artificial Sequence
  Description of Artificial Sequence: Synthetic oligonucleotide
  Target: LAMA2; (-) strand; PAM type: NRG; PAM sequence: CAG
ttcattgcaacaagttattc

SEQ ID NO: 87408 - DNA, 20 bp, Artificial Sequence
  Description of Artificial Sequence: Synthetic oligonucleotide
  Target: LAMA2; (-) strand; PAM type: NRG; PAM sequence: AAG
tcatttattttcattgcaac

SEQ ID NO: 87409 - DNA, 20 bp, Artificial Sequence
  Description of Artificial Sequence: Synthetic oligonucleotide
  Target: LAMA2; (-) strand; PAM type: NRG; PAM sequence: TAG
catattatcacgtatacctg

SEQ ID NO: 87410 - DNA, 20 bp, Artificial Sequence
  Description of Artificial Sequence: Synthetic oligonucleotide
  Target: LAMA2; (-) strand; PAM type: NRG; PAM sequence: AAG
tcatctgagaacctatcact

SEQ ID NO: 87411 - DNA, 20 bp, Artificial Sequence
  Description of Artificial Sequence: Synthetic oligonucleotide
  Target: LAMA2; (-) strand; PAM type: NRG; PAM sequence: GAG
ccatcatgctgtgatcatct

SEQ ID NO: 87412 - DNA, 20 bp, Artificial Sequence
  Description of Artificial Sequence: Synthetic oligonucleotide
  Target: LAMA2; (-) strand; PAM type: NRG; PAM sequence: AAG
caaaaatgttattgcttata

SEQ ID NO: 87413 - DNA, 20 bp, Artificial Sequence
  Description of Artificial Sequence: Synthetic oligonucleotide
  Target: LAMA2; (-) strand; PAM type: NRG; PAM sequence: CAG
catttttaaaaagataattt

SEQ ID NO: 87414 - DNA, 20 bp, Artificial Sequence
  Description of Artificial Sequence: Synthetic oligonucleotide
  Target: LAMA2; (-) strand; PAM type: NRG; PAM sequence: AAG
tattttcttacatttttaaa

SEQ ID NO: 87415 - DNA, 20 bp, Artificial Sequence
  Description of Artificial Sequence: Synthetic oligonucleotide
  Target: LAMA2; (-) strand; PAM type: NRG; PAM sequence: CAG
ctcaccaccccgttaccctg

SEQ ID NO: 87416 - DNA, 20 bp, Artificial Sequence
  Description of Artificial Sequence: Synthetic oligonucleotide
  Target: LAMA2; (-) strand; PAM type: NRG; PAM sequence: GAG
caacccaagaagttgaacat

SEQ ID NO: 87417 - DNA, 20 bp, Artificial Sequence
  Description of Artificial Sequence: Synthetic oligonucleotide
  Target: LAMA2; (-) strand; PAM type: NRG; PAM sequence: AAG
agccaactacccaacccaag

SEQ ID NO: 87418 - DNA, 20 bp, Artificial Sequence
  Description of Artificial Sequence: Synthetic oligonucleotide
  Target: LAMA2; (-) strand; PAM type: NRG; PAM sequence: AAG
aaaagccaactacccaaccc

SEQ ID NO: 87419 - DNA, 20 bp, Artificial Sequence
  Description of Artificial Sequence: Synthetic oligonucleotide
  Target: LAMA2; (-) strand; PAM type: NRG; PAM sequence: AAG
tattactttgttagtgataa

SEQ ID NO: 87420 - DNA, 20 bp, Artificial Sequence
  Description of Artificial Sequence: Synthetic oligonucleotide
  Target: LAMA2; (-) strand; PAM type: NRG; PAM sequence: TAG
tccctggcttattactttgt

SEQ ID NO: 87421 - DNA, 20 bp, Artificial Sequence
  Description of Artificial Sequence: Synthetic oligonucleotide
  Target: LAMA2; (-) strand; PAM type: NRG; PAM sequence: TGG
catttacccattgtattccc

SEQ ID NO: 87422 - DNA, 20 bp, Artificial Sequence
  Description of Artificial Sequence: Synthetic oligonucleotide
  Target: LAMA2; (-) strand; PAM type: NRG; PAM sequence: TGG
ttatgatatactatcatcat

SEQ ID NO: 87423 - DNA, 20 bp, Artificial Sequence
  Description of Artificial Sequence: Synthetic oligonucleotide
  Target: LAMA2; (-) strand; PAM type: NRG; PAM sequence: AAG
aattccattttaaagatgag

SEQ ID NO: 87424 - DNA, 20 bp, Artificial Sequence
  Description of Artificial Sequence: Synthetic oligonucleotide
  Target: LAMA2; (-) strand; PAM type: NRG; PAM sequence: GAG
actaattccattttaaagat

SEQ ID NO: 87425 - DNA, 20 bp, Artificial Sequence
  Description of Artificial Sequence: Synthetic oligonucleotide
  Target: LAMA2; (-) strand; PAM type: NRG; PAM sequence: AAG
ctcctactaattccatttta

SEQ ID NO: 87426 - DNA, 20 bp, Artificial Sequence
  Description of Artificial Sequence: Synthetic oligonucleotide
  Target: LAMA2; (-) strand; PAM type: NRG; PAM sequence: AAG
cataacaaccctaggaagct

SEQ ID NO: 87427 - DNA, 20 bp, Artificial Sequence
  Description of Artificial Sequence: Synthetic oligonucleotide
  Target: LAMA2; (-) strand; PAM type: NRG; PAM sequence: AAG
accttcataacaaccctagg

SEQ ID NO: 87428 - DNA, 20 bp, Artificial Sequence
  Description of Artificial Sequence: Synthetic oligonucleotide
  Target: LAMA2; (-) strand; PAM type: NRG; PAM sequence: AGG
tcaaccttcataacaaccct

SEQ ID NO: 87429 - DNA, 20 bp, Artificial Sequence
  Description of Artificial Sequence: Synthetic oligonucleotide
  Target: LAMA2; (-) strand; PAM type: NRG; PAM sequence: TAG
ttcaaccttcataacaaccc

SEQ ID NO: 87430 - DNA, 20 bp, Artificial Sequence
  Description of Artificial Sequence: Synthetic oligonucleotide
  Target: LAMA2; (-) strand; PAM type: NRG; PAM sequence: AAG
tatgtaccaggcattattct

SEQ ID NO: 87431 - DNA, 20 bp, Artificial Sequence
  Description of Artificial Sequence: Synthetic oligonucleotide
  Target: LAMA2; (-) strand; PAM type: NRG; PAM sequence: AGG
aaaaaaaaatgctatgtacc

SEQ ID NO: 87432 - DNA, 20 bp, Artificial Sequence
  Description of Artificial Sequence: Synthetic oligonucleotide
  Target: LAMA2; (-) strand; PAM type: NRG; PAM sequence: CAG
aaaaaaaaaatgctatgtac

SEQ ID NO: 87433 - DNA, 20 bp, Artificial Sequence
  Description of Artificial Sequence: Synthetic oligonucleotide
  Target: LAMA2; (-) strand; PAM type: NRG; PAM sequence: TAG
cacattgtgcacatgtaccc

SEQ ID NO: 87434 - DNA, 20 bp, Artificial Sequence
  Description of Artificial Sequence: Synthetic oligonucleotide
  Target: LAMA2; (-) strand; PAM type: NRG; PAM sequence: TGG
atggatgcagcacaccaaca

SEQ ID NO: 87435 - DNA, 20 bp, Artificial Sequence
  Description of Artificial Sequence: Synthetic oligonucleotide
  Target: LAMA2; (-) strand; PAM type: NRG; PAM sequence: CAG
aaataacgagttaatggatg

SEQ ID NO: 87436 - DNA, 20 bp, Artificial Sequence
  Description of Artificial Sequence: Synthetic oligonucleotide
  Target: LAMA2; (-) strand; PAM type: NRG; PAM sequence: TGG
taacgtaaataacgagttaa

SEQ ID NO: 87437 - DNA, 20 bp, Artificial Sequence
  Description of Artificial Sequence: Synthetic oligonucleotide
  Target: LAMA2; (-) strand; PAM type: NRG; PAM sequence: GAG
atatacctaacgtaaataac

SEQ ID NO: 87438 - DNA, 20 bp, Artificial Sequence
  Description of Artificial Sequence: Synthetic oligonucleotide
  Target: LAMA2; (-) strand; PAM type: NRG; PAM sequence: GAG
ggggggagggatagcattag

SEQ ID NO: 87439 - DNA, 20 bp, Artificial Sequence
  Description of Artificial Sequence: Synthetic oligonucleotide
  Target: LAMA2; (-) strand; PAM type: NRG; PAM sequence: AGG
gaggggggagggatagcatt

SEQ ID NO: 87440 - DNA, 20 bp, Artificial Sequence
  Description of Artificial Sequence: Synthetic oligonucleotide
  Target: LAMA2; (-) strand; PAM type: NRG; PAM sequence: TAG
ggaggggggagggatagcat

SEQ ID NO: 87441 - DNA, 20 bp, Artificial Sequence
  Description of Artificial Sequence: Synthetic oligonucleotide
  Target: LAMA2; (-) strand; PAM type: NRG; PAM sequence: TAG
gtggggggaggggggaggga

SEQ ID NO: 87442 - DNA, 20 bp, Artificial Sequence
  Description of Artificial Sequence: Synthetic oligonucleotide
  Target: LAMA2; (-) strand; PAM type: NRG; PAM sequence: GGG
tagggtggggggagggggga

SEQ ID NO: 87443 - DNA, 20 bp, Artificial Sequence
  Description of Artificial Sequence: Synthetic oligonucleotide
  Target: LAMA2; (-) strand; PAM type: NRG; PAM sequence: AGG
gtagggtggggggagggggg

SEQ ID NO: 87444 - DNA, 20 bp, Artificial Sequence
  Description of Artificial Sequence: Synthetic oligonucleotide
  Target: LAMA2; (-) strand; PAM type: NRG; PAM sequence: GAG
cgtagggtggggggaggggg

SEQ ID NO: 87445 - DNA, 20 bp, Artificial Sequence
  Description of Artificial Sequence: Synthetic oligonucleotide
  Target: LAMA2; (-) strand; PAM type: NRG; PAM sequence: GGG
gtcgtagggtggggggaggg

SEQ ID NO: 87446 - DNA, 20 bp, Artificial Sequence
  Description of Artificial Sequence: Synthetic oligonucleotide
  Target: LAMA2; (-) strand; PAM type: NRG; PAM sequence: GGG
tgtcgtagggtggggggagg

SEQ ID NO: 87447 - DNA, 20 bp, Artificial Sequence
  Description of Artificial Sequence: Synthetic oligonucleotide
  Target: LAMA2; (-) strand; PAM type: NRG; PAM sequence: GGG
ctgtcgtagggtggggggag

SEQ ID NO: 87448 - DNA, 20 bp, Artificial Sequence
  Description of Artificial Sequence: Synthetic oligonucleotide
  Target: LAMA2; (-) strand; PAM type: NRG; PAM sequence: GGG
cctgtcgtagggtgggggga

SEQ ID NO: 87449 - DNA, 20 bp, Artificial Sequence
  Description of Artificial Sequence: Synthetic oligonucleotide
  Target: LAMA2; (-) strand; PAM type: NRG; PAM sequence: AGG
gcctgtcgtagggtgggggg

SEQ ID NO: 87450 - DNA, 20 bp, Artificial Sequence
  Description of Artificial Sequence: Synthetic oligonucleotide
  Target: LAMA2; (-) strand; PAM type: NRG; PAM sequence: GAG
ggcctgtcgtagggtggggg

SEQ ID NO: 87451 - DNA, 20 bp, Artificial Sequence
  Description of Artificial Sequence: Synthetic oligonucleotide
  Target: LAMA2; (-) strand; PAM type: NRG; PAM sequence: GGG
ggggcctgtcgtagggtggg

SEQ ID NO: 87452 - DNA, 20 bp, Artificial Sequence
  Description of Artificial Sequence: Synthetic oligonucleotide
  Target: LAMA2; (-) strand; PAM type: NRG; PAM sequence: GGG
cggggcctgtcgtagggtgg

SEQ ID NO: 87453 - DNA, 20 bp, Artificial Sequence
  Description of Artificial Sequence: Synthetic oligonucleotide
  Target: LAMA2; (-) strand; PAM type: NRG; PAM sequence: GGG
ccggggcctgtcgtagggtg

SEQ ID NO: 87454 - DNA, 20 bp, Artificial Sequence
  Description of Artificial Sequence: Synthetic oligonucleotide
  Target: LAMA2; (-) strand; PAM type: NRG; PAM sequence: GGG
accggggcctgtcgtagggt

SEQ ID NO: 87455 - DNA, 20 bp, Artificial Sequence
  Description of Artificial Sequence: Synthetic oligonucleotide
  Target: LAMA2; (-) strand; PAM type: NRG; PAM sequence: TGG
caccggggcctgtcgtaggg

SEQ ID NO: 87456 - DNA, 20 bp, Artificial Sequence
  Description of Artificial Sequence: Synthetic oligonucleotide
  Target: LAMA2; (-) strand; PAM type: NRG; PAM sequence: GGG
acacaccggggcctgtcgta

SEQ ID NO: 87457 - DNA, 20 bp, Artificial Sequence
  Description of Artificial Sequence: Synthetic oligonucleotide
  Target: LAMA2; (-) strand; PAM type: NRG; PAM sequence: AGG
cacacaccggggcctgtcgt

SEQ ID NO: 87458 - DNA, 20 bp, Artificial Sequence
  Description of Artificial Sequence: Synthetic oligonucleotide
  Target: LAMA2; (-) strand; PAM type: NRG; PAM sequence: TAG
tcacacaccggggcctgtcg

SEQ ID NO: 87459 - DNA, 20 bp, Artificial Sequence
  Description of Artificial Sequence: Synthetic oligonucleotide
  Target: LAMA2; (-) strand; PAM type: NRG; PAM sequence: GGG
aaggggaacatcacacaccg

SEQ ID NO: 87460 - DNA, 20 bp, Artificial Sequence
  Description of Artificial Sequence: Synthetic oligonucleotide
  Target: LAMA2; (-) strand; PAM type: NRG; PAM sequence: GGG
gaaggggaacatcacacacc

SEQ ID NO: 87461 - DNA, 20 bp, Artificial Sequence
  Description of Artificial Sequence: Synthetic oligonucleotide
  Target: LAMA2; (-) strand; PAM type: NRG; PAM sequence: CGG
ggaaggggaacatcacacac

SEQ ID NO: 87462 - DNA, 20 bp, Artificial Sequence
  Description of Artificial Sequence: Synthetic oligonucleotide
  Target: LAMA2; (-) strand; PAM type: NRG; PAM sequence: GGG
aaacacttggacacaggaag

SEQ ID NO: 87463 - DNA, 20 bp, Artificial Sequence
  Description of Artificial Sequence: Synthetic oligonucleotide
  Target: LAMA2; (-) strand; PAM type: NRG; PAM sequence: GGG
aaaacacttggacacaggaa

SEQ ID NO: 87464 - DNA, 20 bp, Artificial Sequence
  Description of Artificial Sequence: Synthetic oligonucleotide
  Target: LAMA2; (-) strand; PAM type: NRG; PAM sequence: AGG
gaaaacacttggacacagga

SEQ ID NO: 87465 - DNA, 20 bp, Artificial Sequence
  Description of Artificial Sequence: Synthetic oligonucleotide
  Target: LAMA2; (-) strand; PAM type: NRG; PAM sequence: AAG
tgaaaacacttggacacagg

SEQ ID NO: 87466 - DNA, 20 bp, Artificial Sequence
  Description of Artificial Sequence: Synthetic oligonucleotide
  Target: LAMA2; (-) strand; PAM type: NRG; PAM sequence: AGG
caatgaaaacacttggacac

SEQ ID NO: 87467 - DNA, 20 bp, Artificial Sequence
  Description of Artificial Sequence: Synthetic oligonucleotide
  Target: LAMA2; (-) strand; PAM type: NRG; PAM sequence: CAG
acaatgaaaacacttggaca

SEQ ID NO: 87468 - DNA, 20 bp, Artificial Sequence
  Description of Artificial Sequence: Synthetic oligonucleotide
  Target: LAMA2; (-) strand; PAM type: NRG; PAM sequence: TGG
aactgaacaatgaaaacact

SEQ ID NO: 87469 - DNA, 20 bp, Artificial Sequence
  Description of Artificial Sequence: Synthetic oligonucleotide
  Target: LAMA2; (-) strand; PAM type: NRG; PAM sequence: GGG
gcatattctcactcataggt

SEQ ID NO: 87470 - DNA, 20 bp, Artificial Sequence
  Description of Artificial Sequence: Synthetic oligonucleotide
  Target: LAMA2; (-) strand; PAM type: NRG; PAM sequence: TGG
cgcatattctcactcatagg

SEQ ID NO: 87471 - DNA, 20 bp, Artificial Sequence
  Description of Artificial Sequence: Synthetic oligonucleotide
  Target: LAMA2; (-) strand; PAM type: NRG; PAM sequence: AGG
catcgcatattctcactcat

SEQ ID NO: 87472 - DNA, 20 bp, Artificial Sequence
  Description of Artificial Sequence: Synthetic oligonucleotide
  Target: LAMA2; (-) strand; PAM type: NRG; PAM sequence: TAG
acatcgcatattctcactca

SEQ ID NO: 87473 - DNA, 20 bp, Artificial Sequence
  Description of Artificial Sequence: Synthetic oligonucleotide
  Target: LAMA2; (-) strand; PAM type: NRG; PAM sequence: AGG
attctcagcaaactatcaca

SEQ ID NO: 87474 - DNA, 20 bp, Artificial Sequence
  Description of Artificial Sequence: Synthetic oligonucleotide
  Target: LAMA2; (-) strand; PAM type: NRG; PAM sequence: AAG
cattctcagcaaactatcac

SEQ ID NO: 87475 - DNA, 20 bp, Artificial Sequence
  Description of Artificial Sequence: Synthetic oligonucleotide
  Target: LAMA2; (-) strand; PAM type: NRG; PAM sequence: CAG
aagctagaaaccatcattct

SEQ ID NO: 87476 - DNA, 20 bp, Artificial Sequence
  Description of Artificial Sequence: Synthetic oligonucleotide
  Target: LAMA2; (-) strand; PAM type: NRG; PAM sequence: TAG
tgtagggacatggatgaagc

SEQ ID NO: 87477 - DNA, 20 bp, Artificial Sequence
  Description of Artificial Sequence: Synthetic oligonucleotide
  Target: LAMA2; (-) strand; PAM type: NRG; PAM sequence: AAG
cctttgtagggacatggatg

SEQ ID NO: 87478 - DNA, 20 bp, Artificial Sequence
  Description of Artificial Sequence: Synthetic oligonucleotide
  Target: LAMA2; (-) strand; PAM type: NRG; PAM sequence: TGG
tcacgtcctttgtagggaca

SEQ ID NO: 87479 - DNA, 20 bp, Artificial Sequence
  Description of Artificial Sequence: Synthetic oligonucleotide
  Target: LAMA2; (-) strand; PAM type: NRG; PAM sequence: GGG
atgagttcacgtcctttgta

SEQ ID NO: 87480 - DNA, 20 bp, Artificial Sequence
  Description of Artificial Sequence: Synthetic oligonucleotide
  Target: LAMA2; (-) strand; PAM type: NRG; PAM sequence: AGG
gatgagttcacgtcctttgt

SEQ ID NO: 87481 - DNA, 20 bp, Artificial Sequence
  Description of Artificial Sequence: Synthetic oligonucleotide
  Target: LAMA2; (-) strand; PAM type: NRG; PAM sequence: TAG
ggatgagttcacgtcctttg

SEQ ID NO: 87482 - DNA, 20 bp, Artificial Sequence
  Description of Artificial Sequence: Synthetic oligonucleotide
  Target: LAMA2; (-) strand; PAM type: NRG; PAM sequence: GAG
atgcagccataaaaaaggat

SEQ ID NO: 87483 - DNA, 20 bp, Artificial Sequence
  Description of Artificial Sequence: Synthetic oligonucleotide
  Target: LAMA2; (-) strand; PAM type: NRG; PAM sequence: AGG
atactatgcagccataaaaa

SEQ ID NO: 87484 - DNA, 20 bp, Artificial Sequence
  Description of Artificial Sequence: Synthetic oligonucleotide
  Target: LAMA2; (-) strand; PAM type: NRG; PAM sequence: AAG
aatactatgcagccataaaa

SEQ ID NO: 87485 - DNA, 20 bp, Artificial Sequence
  Description of Artificial Sequence: Synthetic oligonucleotide
  Target: LAMA2; (-) strand; PAM type: NRG; PAM sequence: CAG
atacaccatggaatactatg

SEQ ID NO: 87486 - DNA, 20 bp, Artificial Sequence
  Description of Artificial Sequence: Synthetic oligonucleotide
  Target: LAMA2; (-) strand; PAM type: NRG; PAM sequence: TGG
aatgtggcatgtatacacca

SEQ ID NO: 87487 - DNA, 20 bp, Artificial Sequence
  Description of Artificial Sequence: Synthetic oligonucleotide
  Target: LAMA2; (-) strand; PAM type: NRG; PAM sequence: TGG
tagactggattaagaaaatg

SEQ ID NO: 87488 - DNA, 20 bp, Artificial Sequence
  Description of Artificial Sequence: Synthetic oligonucleotide
  Target: LAMA2; (-) strand; PAM type: NRG; PAM sequence: AAG
catcaatgatagactggatt

SEQ ID NO: 87489 - DNA, 20 bp, Artificial Sequence
  Description of Artificial Sequence: Synthetic oligonucleotide
  Target: LAMA2; (-) strand; PAM type: NRG; PAM sequence: TGG
aatgtccatcaatgatagac

SEQ ID NO: 87490 - DNA, 20 bp, Artificial Sequence
  Description of Artificial Sequence: Synthetic oligonucleotide
  Target: LAMA2; (-) strand; PAM type: NRG; PAM sequence: TAG
acccaaatgtccatcaatga

SEQ ID NO: 87491 - DNA, 20 bp, Artificial Sequence
  Description of Artificial Sequence: Synthetic oligonucleotide
  Target: LAMA2; (-) strand; PAM type: NRG; PAM sequence: TGG
tattcataatagcaaagact

SEQ ID NO: 87492 - DNA, 20 bp, Artificial Sequence
  Description of Artificial Sequence: Synthetic oligonucleotide
  Target: LAMA2; (-) strand; PAM type: NRG; PAM sequence: AAG
cggcactattcataatagca

SEQ ID NO: 87493 - DNA, 20 bp, Artificial Sequence
  Description of Artificial Sequence: Synthetic oligonucleotide
  Target: LAMA2; (-) strand; PAM type: NRG; PAM sequence: TAG
tattgcggcactattcataa

SEQ ID NO: 87494 - DNA, 20 bp, Artificial Sequence
  Description of Artificial Sequence: Synthetic oligonucleotide
  Target: LAMA2; (-) strand; PAM type: NRG; PAM sequence: CGG
atgcacatgtatgtttattg

SEQ ID NO: 87495 - DNA, 20 bp, Artificial Sequence
  Description of Artificial Sequence: Synthetic oligonucleotide
  Target: LAMA2; (-) strand; PAM type: NRG; PAM sequence: AAG
ttataaatcatgctgctata

SEQ ID NO: 87496 - DNA, 20 bp, Artificial Sequence
  Description of Artificial Sequence: Synthetic oligonucleotide
  Target: LAMA2; (-) strand; PAM type: NRG; PAM sequence: AGG
attactgggtatatacccaa

SEQ ID NO: 87497 - DNA, 20 bp, Artificial Sequence
  Description of Artificial Sequence: Synthetic oligonucleotide
  Target: LAMA2; (-) strand; PAM type: NRG; PAM sequence: AAG
cattactgggtatataccca

SEQ ID NO: 87498 - DNA, 20 bp, Artificial Sequence
  Description of Artificial Sequence: Synthetic oligonucleotide
  Target: LAMA2; (-) strand; PAM type: NRG; PAM sequence: GGG
gacccagtcatcccattact

SEQ ID NO: 87499 - DNA, 20 bp, Artificial Sequence
  Description of Artificial Sequence: Synthetic oligonucleotide
  Target: LAMA2; (-) strand; PAM type: NRG; PAM sequence: TGG
tgacccagtcatcccattac

SEQ ID NO: 87500 - DNA, 20 bp, Artificial Sequence
  Description of Artificial Sequence: Synthetic oligonucleotide
  Target: LAMA2; (-) strand; PAM type: NRG; PAM sequence: CAG
actagaaataccatttgacc

SEQ ID NO: 87501 - DNA, 20 bp, Artificial Sequence
  Description of Artificial Sequence: Synthetic oligonucleotide
  Target: LAMA2; (-) strand; PAM type: NRG; PAM sequence: TAG
attcctcaaggatctagaac

SEQ ID NO: 87502 - DNA, 20 bp, Artificial Sequence
  Description of Artificial Sequence: Synthetic oligonucleotide
  Target: LAMA2; (-) strand; PAM type: NRG; PAM sequence: TAG
ggggcgattcctcaaggatc

SEQ ID NO: 87503 - DNA, 20 bp, Artificial Sequence
  Description of Artificial Sequence: Synthetic oligonucleotide
  Target: LAMA2; (-) strand; PAM type: NRG; PAM sequence: AGG
gacagtggggcgattcctca

SEQ ID NO: 87504 - DNA, 20 bp, Artificial Sequence
  Description of Artificial Sequence: Synthetic oligonucleotide
  Target: LAMA2; (-) strand; PAM type: NRG; PAM sequence: AAG
agacagtggggcgattcctc

SEQ ID NO: 87505 - DNA, 20 bp, Artificial Sequence
  Description of Artificial Sequence: Synthetic oligonucleotide
  Target: LAMA2; (-) strand; PAM type: NRG; PAM sequence: GGG
aaccattgtggaagacagtg

SEQ ID NO: 87506 - DNA, 20 bp, Artificial Sequence
  Description of Artificial Sequence: Synthetic oligonucleotide
  Target: LAMA2; (-) strand; PAM type: NRG; PAM sequence: GGG
caaccattgtggaagacagt

SEQ ID NO: 87507 - DNA, 20 bp, Artificial Sequence
  Description of Artificial Sequence: Synthetic oligonucleotide
  Target: LAMA2; (-) strand; PAM type: NRG; PAM sequence: TGG
tcaaccattgtggaagacag

SEQ ID NO: 87508 - DNA, 20 bp, Artificial Sequence
  Description of Artificial Sequence: Synthetic oligonucleotide
  Target: LAMA2; (-) strand; PAM type: NRG; PAM sequence: CAG
agttcaaccattgtggaaga

SEQ ID NO: 87509 - DNA, 20 bp, Artificial Sequence
  Description of Artificial Sequence: Synthetic oligonucleotide
  Target: LAMA2; (-) strand; PAM type: NRG; PAM sequence: AAG
aactagttcaaccattgtgg

SEQ ID NO: 87510 - DNA, 20 bp, Artificial Sequence
  Description of Artificial Sequence: Synthetic oligonucleotide
  Target: LAMA2; (-) strand; PAM type: NRG; PAM sequence: TGG
gtaaactagttcaaccattg

SEQ ID NO: 87511 - DNA, 20 bp, Artificial Sequence
  Description of Artificial Sequence: Synthetic oligonucleotide
  Target: LAMA2; (-) strand; PAM type: NRG; PAM sequence: TAG
ctgttggtgggattgtaaac

SEQ ID NO: 87512 - DNA, 20 bp, Artificial Sequence
  Description of Artificial Sequence: Synthetic oligonucleotide
  Target: LAMA2; (-) strand; PAM type: NRG; PAM sequence: GGG
aacacttttacactgttggt

SEQ ID NO: 87513 - DNA, 20 bp, Artificial Sequence
  Description of Artificial Sequence: Synthetic oligonucleotide
  Target: LAMA2; (-) strand; PAM type: NRG; PAM sequence: TGG
gaacacttttacactgttgg

SEQ ID NO: 87514 - DNA, 20 bp, Artificial Sequence
  Description of Artificial Sequence: Synthetic oligonucleotide
  Target: LAMA2; (-) strand; PAM type: NRG; PAM sequence: TGG
taggaacacttttacactgt

SEQ ID NO: 87515 - DNA, 20 bp, Artificial Sequence
  Description of Artificial Sequence: Synthetic oligonucleotide
  Target: LAMA2; (-) strand; PAM type: NRG; PAM sequence: AGG
tggagaggatgtggagaaat

SEQ ID NO: 87516 - DNA, 20 bp, Artificial Sequence
  Description of Artificial Sequence: Synthetic oligonucleotide
  Target: LAMA2; (-) strand; PAM type: NRG; PAM sequence: TAG
ctggagaggatgtggagaaa

SEQ ID NO: 87517 - DNA, 20 bp, Artificial Sequence
  Description of Artificial Sequence: Synthetic oligonucleotide
  Target: LAMA2; (-) strand; PAM type: NRG; PAM sequence: GAG
caggtgctggagaggatgtg

SEQ ID NO: 87518 - DNA, 20 bp, Artificial Sequence
  Description of Artificial Sequence: Synthetic oligonucleotide
  Target: LAMA2; (-) strand; PAM type: NRG; PAM sequence: TGG
aacaggtgctggagaggatg

SEQ ID NO: 87519 - DNA, 20 bp, Artificial Sequence
  Description of Artificial Sequence: Synthetic oligonucleotide
  Target: LAMA2; (-) strand; PAM type: NRG; PAM sequence: AGG
ggaaacaacaggtgctggag

SEQ ID NO: 87520 - DNA, 20 bp, Artificial Sequence
  Description of Artificial Sequence: Synthetic oligonucleotide
  Target: LAMA2; (-) strand; PAM type: NRG; PAM sequence: GAG
tggaaacaacaggtgctgga

SEQ ID NO: 87521 - DNA, 20 bp, Artificial Sequence
  Description of Artificial Sequence: Synthetic oligonucleotide
  Target: LAMA2; (-) strand; PAM type: NRG; PAM sequence: GAG
tctggaaacaacaggtgctg

SEQ ID NO: 87522 - DNA, 20 bp, Artificial Sequence
  Description of Artificial Sequence: Synthetic oligonucleotide
  Target: LAMA2; (-) strand; PAM type: NRG; PAM sequence: TGG
agtctggaaacaacaggtgc

SEQ ID NO: 87523 - DNA, 20 bp, Artificial Sequence
  Description of Artificial Sequence: Synthetic oligonucleotide
  Target: LAMA2; (-) strand; PAM type: NRG; PAM sequence: AGG
ttaaaaagtctggaaacaac

SEQ ID NO: 87524 - DNA, 20 bp, Artificial Sequence
  Description of Artificial Sequence: Synthetic oligonucleotide
  Target: LAMA2; (-) strand; PAM type: NRG; PAM sequence: CAG
attaaaaagtctggaaacaa

SEQ ID NO: 87525 - DNA, 20 bp, Artificial Sequence
  Description of Artificial Sequence: Synthetic oligonucleotide
  Target: LAMA2; (-) strand; PAM type: NRG; PAM sequence: TGG
ctggtgatcattaaaaagtc

SEQ ID NO: 87526 - DNA, 20 bp, Artificial Sequence
  Description of Artificial Sequence: Synthetic oligonucleotide
  Target: LAMA2; (-) strand; PAM type: NRG; PAM sequence: AAG
ttagactggtgatcattaaa

SEQ ID NO: 87527 - DNA, 20 bp, Artificial Sequence
  Description of Artificial Sequence: Synthetic oligonucleotide
  Target: LAMA2; (-) strand; PAM type: NRG; PAM sequence: TGG
ccatcctacaccagttagac

SEQ ID NO: 87528 - DNA, 20 bp, Artificial Sequence
  Description of Artificial Sequence: Synthetic oligonucleotide
  Target: LAMA2; (-) strand; PAM type: NRG; PAM sequence: TAG
agataccatcctacaccagt

SEQ ID NO: 87529 - DNA, 20 bp, Artificial Sequence
  Description of Artificial Sequence: Synthetic oligonucleotide
  Target: LAMA2; (-) strand; PAM type: NRG; PAM sequence: CAG
aatgagataccatcctacac

SEQ ID NO: 87530 - DNA, 20 bp, Artificial Sequence
  Description of Artificial Sequence: Synthetic oligonucleotide
  Target: LAMA2; (-) strand; PAM type: NRG; PAM sequence: GAG
atgcaaatcaaaaccacaat

SEQ ID NO: 87531 - DNA, 20 bp, Artificial Sequence
  Description of Artificial Sequence: Synthetic oligonucleotide
  Target: LAMA2; (-) strand; PAM type: NRG; PAM sequence: GAG
ctcatcatcactggccatca

SEQ ID NO: 87532 - DNA, 20 bp, Artificial Sequence
  Description of Artificial Sequence: Synthetic oligonucleotide
  Target: LAMA2; (-) strand; PAM type: NRG; PAM sequence: CAG
tgctcatcatcactggccat

SEQ ID NO: 87533 - DNA, 20 bp, Artificial Sequence
  Description of Artificial Sequence: Synthetic oligonucleotide
  Target: LAMA2; (-) strand; PAM type: NRG; PAM sequence: TGG
gaaaaaatgctcatcatcac

SEQ ID NO: 87534 - DNA, 20 bp, Artificial Sequence
  Description of Artificial Sequence: Synthetic oligonucleotide
  Target: LAMA2; (-) strand; PAM type: NRG; PAM sequence: CAG
gaagacactgatgcagccag

SEQ ID NO: 87535 - DNA, 20 bp, Artificial Sequence
  Description of Artificial Sequence: Synthetic oligonucleotide
  Target: LAMA2; (-) strand; PAM type: NRG; PAM sequence: CAG
aaagaagacactgatgcagc

SEQ ID NO: 87536 - DNA, 20 bp, Artificial Sequence
  Description of Artificial Sequence: Synthetic oligonucleotide
  Target: LAMA2; (-) strand; PAM type: NRG; PAM sequence: CAG
ctcaaaagaagacactgatg

SEQ ID NO: 87537 - DNA, 20 bp, Artificial Sequence
  Description of Artificial Sequence: Synthetic oligonucleotide
  Target: LAMA2; (-) strand; PAM type: NRG; PAM sequence: AAG
gaacagacacttctcaaaag

SEQ ID NO: 87538 - DNA, 20 bp, Artificial Sequence
  Description of Artificial Sequence: Synthetic oligonucleotide
  Target: LAMA2; (-) strand; PAM type: NRG; PAM sequence: AAG
tatgaacagacacttctcaa

SEQ ID NO: 87539 - DNA, 20 bp, Artificial Sequence
  Description of Artificial Sequence: Synthetic oligonucleotide
  Target: LAMA2; (-) strand; PAM type: NRG; PAM sequence: CAG
aattgggcaaaggatatgaa

SEQ ID NO: 87540 - DNA, 20 bp, Artificial Sequence
  Description of Artificial Sequence: Synthetic oligonucleotide
  Target: LAMA2; (-) strand; PAM type: NRG; PAM sequence: AGG
accccatcaaaattgggcaa

SEQ ID NO: 87541 - DNA, 20 bp, Artificial Sequence
  Description of Artificial Sequence: Synthetic oligonucleotide
  Target: LAMA2; (-) strand; PAM type: NRG; PAM sequence: AAG
aaccccatcaaaattgggca

SEQ ID NO: 87542 - DNA, 20 bp, Artificial Sequence
  Description of Artificial Sequence: Synthetic oligonucleotide
  Target: LAMA2; (-) strand; PAM type: NRG; PAM sequence: GGG
caaataaccccatcaaaatt

SEQ ID NO: 87543 - DNA, 20 bp, Artificial Sequence
  Description of Artificial Sequence: Synthetic oligonucleotide
  Target: LAMA2; (-) strand; PAM type: NRG; PAM sequence: TGG
acaaataaccccatcaaaat

SEQ ID NO: 87544 - DNA, 20 bp, Artificial Sequence
  Description of Artificial Sequence: Synthetic oligonucleotide
  Target: LAMA2; (-) strand; PAM type: NRG; PAM sequence: AAG
aagaactcaaacaaacttac

SEQ ID NO: 87545 - DNA, 20 bp, Artificial Sequence
  Description of Artificial Sequence: Synthetic oligonucleotide
  Target: LAMA2; (-) strand; PAM type: NRG; PAM sequence: AAG
gctaatatccagaatctaca

SEQ ID NO: 87546 - DNA, 20 bp, Artificial Sequence
  Description of Artificial Sequence: Synthetic oligonucleotide
  Target: LAMA2; (-) strand; PAM type: NRG; PAM sequence: CAG
tctgacaaagggctaatatc

SEQ ID NO: 87547 - DNA, 20 bp, Artificial Sequence
  Description of Artificial Sequence: Synthetic oligonucleotide
  Target: LAMA2; (-) strand; PAM type: NRG; PAM sequence: GGG
caatctactcatctgacaaa

SEQ ID NO: 87548 - DNA, 20 bp, Artificial Sequence
  Description of Artificial Sequence: Synthetic oligonucleotide
  Target: LAMA2; (-) strand; PAM type: NRG; PAM sequence: AGG
gcaatctactcatctgacaa

SEQ ID NO: 87549 - DNA, 20 bp, Artificial Sequence
  Description of Artificial Sequence: Synthetic oligonucleotide
  Target: LAMA2; (-) strand; PAM type: NRG; PAM sequence: AAG
tgcaatctactcatctgaca

SEQ ID NO: 87550 - DNA, 20 bp, Artificial Sequence
  Description of Artificial Sequence: Synthetic oligonucleotide
  Target: LAMA2; (-) strand; PAM type: NRG; PAM sequence: AAG
ggcaacctacagaatgggag

SEQ ID NO: 87551 - DNA, 20 bp, Artificial Sequence
  Description of Artificial Sequence: Synthetic oligonucleotide
  Target: LAMA2; (-) strand; PAM type: NRG; PAM sequence: GAG
acaggcaacctacagaatgg

SEQ ID NO: 87552 - DNA, 20 bp, Artificial Sequence
  Description of Artificial Sequence: Synthetic oligonucleotide
  Target: LAMA2; (-) strand; PAM type: NRG; PAM sequence: GGG
gaacaggcaacctacagaat

SEQ ID NO: 87553 - DNA, 20 bp, Artificial Sequence
  Description of Artificial Sequence: Synthetic oligonucleotide
  Target: LAMA2; (-) strand; PAM type: NRG; PAM sequence: TGG
tgaacaggcaacctacagaa

SEQ ID NO: 87554 - DNA, 20 bp, Artificial Sequence
  Description of Artificial Sequence: Synthetic oligonucleotide
  Target: LAMA2; (-) strand; PAM type: NRG; PAM sequence: CAG
cagagtgaacaggcaaccta

SEQ ID NO: 87555 - DNA, 20 bp, Artificial Sequence
  Description of Artificial Sequence: Synthetic oligonucleotide
  Target: LAMA2; (-) strand; PAM type: NRG; PAM sequence: AGG
aaactaccatcagagtgaac

SEQ ID NO: 87556 - DNA, 20 bp, Artificial Sequence
  Description of Artificial Sequence: Synthetic oligonucleotide
  Target: LAMA2; (-) strand; PAM type: NRG; PAM sequence: CAG
gaaactaccatcagagtgaa

SEQ ID NO: 87557 - DNA, 20 bp, Artificial Sequence
  Description of Artificial Sequence: Synthetic oligonucleotide
  Target: LAMA2; (-) strand; PAM type: NRG; PAM sequence: GAG
agcaaaagaaactaccatca

SEQ ID NO: 87558 - DNA, 20 bp, Artificial Sequence
  Description of Artificial Sequence: Synthetic oligonucleotide
  Target: LAMA2; (-) strand; PAM type: NRG; PAM sequence: CAG
acagcaaaagaaactaccat

SEQ ID NO: 87559 - DNA, 20 bp, Artificial Sequence
  Description of Artificial Sequence: Synthetic oligonucleotide
  Target: LAMA2; (-) strand; PAM type: NRG; PAM sequence: AAG
aaagagcttctgcacagcaa

SEQ ID NO: 87560 - DNA, 20 bp, Artificial Sequence
  Description of Artificial Sequence: Synthetic oligonucleotide
  Target: LAMA2; (-) strand; PAM type: NRG; PAM sequence: CAG
taaactaaagagcttctgca

SEQ ID NO: 87561 - DNA, 20 bp, Artificial Sequence
  Description of Artificial Sequence: Synthetic oligonucleotide
  Target: LAMA2; (-) strand; PAM type: NRG; PAM sequence: GAG
tgggatctaattaaactaaa

SEQ ID NO: 87562 - DNA, 20 bp, Artificial Sequence
  Description of Artificial Sequence: Synthetic oligonucleotide
  Target: LAMA2; (-) strand; PAM type: NRG; PAM sequence: AAG
aatgggatctaattaaacta

SEQ ID NO: 87563 - DNA, 20 bp, Artificial Sequence
  Description of Artificial Sequence: Synthetic oligonucleotide
  Target: LAMA2; (-) strand; PAM type: NRG; PAM sequence: GGG
aaaagccaaagttgacaaat

SEQ ID NO: 87564 - DNA, 20 bp, Artificial Sequence
  Description of Artificial Sequence: Synthetic oligonucleotide
  Target: LAMA2; (-) strand; PAM type: NRG; PAM sequence: TGG
caaaagccaaagttgacaaa

SEQ ID NO: 87565 - DNA, 20 bp, Artificial Sequence
  Description of Artificial Sequence: Synthetic oligonucleotide
  Target: LAMA2; (-) strand; PAM type: NRG; PAM sequence: AAG
agcaagggcaacaaaagcca

SEQ ID NO: 87566 - DNA, 20 bp, Artificial Sequence
  Description of Artificial Sequence: Synthetic oligonucleotide
  Target: LAMA2; (-) strand; PAM type: NRG; PAM sequence: AAG
acgaaaagcaagggcaacaa

SEQ ID NO: 87567 - DNA, 20 bp, Artificial Sequence
  Description of Artificial Sequence: Synthetic oligonucleotide
  Target: LAMA2; (-) strand; PAM type: NRG; PAM sequence: GGG
gtctaaaacacgaaaagcaa

SEQ ID NO: 87568 - DNA, 20 bp, Artificial Sequence
  Description of Artificial Sequence: Synthetic oligonucleotide
  Target: LAMA2; (-) strand; PAM type: NRG; PAM sequence: AGG
tgtctaaaacacgaaaagca

SEQ ID NO: 87569 - DNA, 20 bp, Artificial Sequence
  Description of Artificial Sequence: Synthetic oligonucleotide
  Target: LAMA2; (-) strand; PAM type: NRG; PAM sequence: AAG
ttgtctaaaacacgaaaagc

SEQ ID NO: 87570 - DNA, 20 bp, Artificial Sequence
  Description of Artificial Sequence: Synthetic oligonucleotide
  Target: LAMA2; (-) strand; PAM type: NRG; PAM sequence: AAG
ctttttgtctaaaacacgaa

SEQ ID NO: 87571 - DNA, 20 bp, Artificial Sequence
  Description of Artificial Sequence: Synthetic oligonucleotide
  Target: LAMA2; (-) strand; PAM type: NRG; PAM sequence: AGG
tgaggacataggcatgggta

SEQ ID NO: 87572 - DNA, 20 bp, Artificial Sequence
  Description of Artificial Sequence: Synthetic oligonucleotide
  Target: LAMA2; (-) strand; PAM type: NRG; PAM sequence: AAG
ttgaggacataggcatgggt

SEQ ID NO: 87573 - DNA, 20 bp, Artificial Sequence
  Description of Artificial Sequence: Synthetic oligonucleotide
  Target: LAMA2; (-) strand; PAM type: NRG; PAM sequence: GGG
accattgaggacataggcat

SEQ ID NO: 87574 - DNA, 20 bp, Artificial Sequence
  Description of Artificial Sequence: Synthetic oligonucleotide
  Target: LAMA2; (-) strand; PAM type: NRG; PAM sequence: TGG
taccattgaggacataggca

SEQ ID NO: 87575 - DNA, 20 bp, Artificial Sequence
  Description of Artificial Sequence: Synthetic oligonucleotide
  Target: LAMA2; (-) strand; PAM type: NRG; PAM sequence: AGG
ggcaataccattgaggacat

SEQ ID NO: 87576 - DNA, 20 bp, Artificial Sequence
  Description of Artificial Sequence: Synthetic oligonucleotide
  Target: LAMA2; (-) strand; PAM type: NRG; PAM sequence: TAG
aggcaataccattgaggaca

SEQ ID NO: 87577 - DNA, 20 bp, Artificial Sequence
  Description of Artificial Sequence: Synthetic oligonucleotide
  Target: LAMA2; (-) strand; PAM type: NRG; PAM sequence: AGG
aaacctaggcaataccattg

SEQ ID NO: 87578 - DNA, 20 bp, Artificial Sequence
  Description of Artificial Sequence: Synthetic oligonucleotide
  Target: LAMA2; (-) strand; PAM type: NRG; PAM sequence: GAG
aaaacctaggcaataccatt

SEQ ID NO: 87579 - DNA, 20 bp, Artificial Sequence
  Description of Artificial Sequence: Synthetic oligonucleotide
  Target: LAMA2; (-) strand; PAM type: NRG; PAM sequence: AGG
aaaaccctagaagaaaacct

SEQ ID NO: 87580 - DNA, 20 bp, Artificial Sequence
  Description of Artificial Sequence: Synthetic oligonucleotide
  Target: LAMA2; (-) strand; PAM type: NRG; PAM sequence: TAG
aaaaaccctagaagaaaacc

SEQ ID NO: 87581 - DNA, 20 bp, Artificial Sequence
  Description of Artificial Sequence: Synthetic oligonucleotide
  Target: LAMA2; (-) strand; PAM type: NRG; PAM sequence: AAG
taaaaccataaaaaccctag

SEQ ID NO: 87582 - DNA, 20 bp, Artificial Sequence
  Description of Artificial Sequence: Synthetic oligonucleotide
  Target: LAMA2; (-) strand; PAM type: NRG; PAM sequence: TAG
acataaaaccataaaaaccc

SEQ ID NO: 87583 - DNA, 20 bp, Artificial Sequence
  Description of Artificial Sequence: Synthetic oligonucleotide
  Target: LAMA2; (-) strand; PAM type: NRG; PAM sequence: TAG
tggattaaagacttaaatgt

SEQ ID NO: 87584 - DNA, 20 bp, Artificial Sequence
  Description of Artificial Sequence: Synthetic oligonucleotide
  Target: LAMA2; (-) strand; PAM type: NRG; PAM sequence: AAG
aattaattcaagatggatta

SEQ ID NO: 87585 - DNA, 20 bp, Artificial Sequence
  Description of Artificial Sequence: Synthetic oligonucleotide
  Target: LAMA2; (-) strand; PAM type: NRG; PAM sequence: TGG
atacaaaaattaattcaaga

SEQ ID NO: 87586 - DNA, 20 bp, Artificial Sequence
  Description of Artificial Sequence: Synthetic oligonucleotide
  Target: LAMA2; (-) strand; PAM type: NRG; PAM sequence: AAG
ccttatacaaaaattaattc

SEQ ID NO: 87587 - DNA, 20 bp, Artificial Sequence
  Description of Artificial Sequence: Synthetic oligonucleotide
  Target: LAMA2; (-) strand; PAM type: NRG; PAM sequence: TGG
catatgtagaaagctgaaac

SEQ ID NO: 87588 - DNA, 20 bp, Artificial Sequence
  Description of Artificial Sequence: Synthetic oligonucleotide
  Target: LAMA2; (-) strand; PAM type: NRG; PAM sequence: AAG
actggctagccatatgtaga

SEQ ID NO: 87589 - DNA, 20 bp, Artificial Sequence
  Description of Artificial Sequence: Synthetic oligonucleotide
  Target: LAMA2; (-) strand; PAM type: NRG; PAM sequence: TAG
gaaaactggctagccatatg

SEQ ID NO: 87590 - DNA, 20 bp, Artificial Sequence
  Description of Artificial Sequence: Synthetic oligonucleotide
  Target: LAMA2; (-) strand; PAM type: NRG; PAM sequence: TAG
atggtgctgggaaaactggc

SEQ ID NO: 87591 - DNA, 20 bp, Artificial Sequence
  Description of Artificial Sequence: Synthetic oligonucleotide
  Target: LAMA2; (-) strand; PAM type: NRG; PAM sequence: TGG
ataaatggtgctgggaaaac

SEQ ID NO: 87592 - DNA, 20 bp, Artificial Sequence
  Description of Artificial Sequence: Synthetic oligonucleotide
  Target: LAMA2; (-) strand; PAM type: NRG; PAM sequence: GGG
cctatttaataaatggtgct

SEQ ID NO: 87593 - DNA, 20 bp, Artificial Sequence
  Description of Artificial Sequence: Synthetic oligonucleotide
  Target: LAMA2; (-) strand; PAM type: NRG; PAM sequence: TGG
ccctatttaataaatggtgc

SEQ ID NO: 87594 - DNA, 20 bp, Artificial Sequence
  Description of Artificial Sequence: Synthetic oligonucleotide
  Target: LAMA2; (-) strand; PAM type: NRG; PAM sequence: TGG
tggattccctatttaataaa

SEQ ID NO: 87595 - DNA, 20 bp, Artificial Sequence
  Description of Artificial Sequence: Synthetic oligonucleotide
  Target: LAMA2; (-) strand; PAM type: NRG; PAM sequence: TGG
caaaaacaagcaatggggaa

SEQ ID NO: 87596 - DNA, 20 bp, Artificial Sequence
  Description of Artificial Sequence: Synthetic oligonucleotide
  Target: LAMA2; (-) strand; PAM type: NRG; PAM sequence: GGG
cctgacaaaaacaagcaatg

SEQ ID NO: 87597 - DNA, 20 bp, Artificial Sequence
  Description of Artificial Sequence: Synthetic oligonucleotide
  Target: LAMA2; (-) strand; PAM type: NRG; PAM sequence: GGG
acctgacaaaaacaagcaat

SEQ ID NO: 87598 - DNA, 20 bp, Artificial Sequence
  Description of Artificial Sequence: Synthetic oligonucleotide
  Target: LAMA2; (-) strand; PAM type: NRG; PAM sequence: TGG
aacctgacaaaaacaagcaa

SEQ ID NO: 87599 - DNA, 20 bp, Artificial Sequence
  Description of Artificial Sequence: Synthetic oligonucleotide
  Target: LAMA2; (-) strand; PAM type: NRG; PAM sequence: AAG
ttgacaaacctgacaaaaac

SEQ ID NO: 87600 - DNA, 20 bp, Artificial Sequence
  Description of Artificial Sequence: Synthetic oligonucleotide
  Target: LAMA2; (-) strand; PAM type: NRG; PAM sequence: CAG
atggaacagaatagagccct

SEQ ID NO: 87601 - DNA, 20 bp, Artificial Sequence
  Description of Artificial Sequence: Synthetic oligonucleotide
  Target: LAMA2; (-) strand; PAM type: NRG; PAM sequence: GAG
tagatcaatggaacagaata

SEQ ID NO: 87602 - DNA, 20 bp, Artificial Sequence
  Description of Artificial Sequence: Synthetic oligonucleotide
  Target: LAMA2; (-) strand; PAM type: NRG; PAM sequence: TAG
tgtagatcaatggaacagaa

SEQ ID NO: 87603 - DNA, 20 bp, Artificial Sequence
  Description of Artificial Sequence: Synthetic oligonucleotide
  Target: LAMA2; (-) strand; PAM type: NRG; PAM sequence: CAG
agagatgtagatcaatggaa

SEQ ID NO: 87604 - DNA, 20 bp, Artificial Sequence
  Description of Artificial Sequence: Synthetic oligonucleotide
  Target: LAMA2; (-) strand; PAM type: NRG; PAM sequence: TGG
aaaagagagatgtagatcaa

SEQ ID NO: 87605 - DNA, 20 bp, Artificial Sequence
  Description of Artificial Sequence: Synthetic oligonucleotide
  Target: LAMA2; (-) strand; PAM type: NRG; PAM sequence: TAG
ctggtaccaaaagagagatg

SEQ ID NO: 87606 - DNA, 20 bp, Artificial Sequence
  Description of Artificial Sequence: Synthetic oligonucleotide
  Target: LAMA2; (-) strand; PAM type: NRG; PAM sequence: GAG
atggtactggtaccaaaaga

SEQ ID NO: 87607 - DNA, 20 bp, Artificial Sequence
  Description of Artificial Sequence: Synthetic oligonucleotide
  Target: LAMA2; (-) strand; PAM type: NRG; PAM sequence: GAG
gcatggtactggtaccaaaa

SEQ ID NO: 87608 - DNA, 20 bp, Artificial Sequence
  Description of Artificial Sequence: Synthetic oligonucleotide
  Target: LAMA2; (-) strand; PAM type: NRG; PAM sequence: AAG
cagcatggtactggtaccaa

SEQ ID NO: 87609 - DNA, 20 bp, Artificial Sequence
  Description of Artificial Sequence: Synthetic oligonucleotide
  Target: LAMA2; (-) strand; PAM type: NRG; PAM sequence: TGG
taaccaaaacagcatggtac

SEQ ID NO: 87610 - DNA, 20 bp, Artificial Sequence
  Description of Artificial Sequence: Synthetic oligonucleotide
  Target: LAMA2; (-) strand; PAM type: NRG; PAM sequence: TGG
ctacagtaaccaaaacagca

SEQ ID NO: 87611 - DNA, 20 bp, Artificial Sequence
  Description of Artificial Sequence: Synthetic oligonucleotide
  Target: LAMA2; (-) strand; PAM type: NRG; PAM sequence: CAG
caaggctacagtaaccaaaa

SEQ ID NO: 87612 - DNA, 20 bp, Artificial Sequence
  Description of Artificial Sequence: Synthetic oligonucleotide
  Target: LAMA2; (-) strand; PAM type: NRG; PAM sequence: CAG
caaactatactacaaggcta

SEQ ID NO: 87613 - DNA, 20 bp, Artificial Sequence
  Description of Artificial Sequence: Synthetic oligonucleotide
  Target: LAMA2; (-) strand; PAM type: NRG; PAM sequence: AGG
tgacttcaaactatactaca

SEQ ID NO: 87614 - DNA, 20 bp, Artificial Sequence
  Description of Artificial Sequence: Synthetic oligonucleotide
  Target: LAMA2; (-) strand; PAM type: NRG; PAM sequence: AAG
ctgacttcaaactatactac

SEQ ID NO: 87615 - DNA, 20 bp, Artificial Sequence
  Description of Artificial Sequence: Synthetic oligonucleotide
  Target: LAMA2; (-) strand; PAM type: NRG; PAM sequence: AGG
agccaaaagaacaaagctgg

SEQ ID NO: 87616 - DNA, 20 bp, Artificial Sequence
  Description of Artificial Sequence: Synthetic oligonucleotide
  Target: LAMA2; (-) strand; PAM type: NRG; PAM sequence: GAG
aagccaaaagaacaaagctg

SEQ ID NO: 87617 - DNA, 20 bp, Artificial Sequence
  Description of Artificial Sequence: Synthetic oligonucleotide
  Target: LAMA2; (-) strand; PAM type: NRG; PAM sequence: TGG
ctaagccaaaagaacaaagc

SEQ ID NO: 87618 - DNA, 20 bp, Artificial Sequence
  Description of Artificial Sequence: Synthetic oligonucleotide
  Target: LAMA2; (-) strand; PAM type: NRG; PAM sequence: AAG
aatcctaagccaaaagaaca

SEQ ID NO: 87619 - DNA, 20 bp, Artificial Sequence
  Description of Artificial Sequence: Synthetic oligonucleotide
  Target: LAMA2; (-) strand; PAM type: NRG; PAM sequence: AAG
ccaagtcaatcctaagccaa

SEQ ID NO: 87620 - DNA, 20 bp, Artificial Sequence
  Description of Artificial Sequence: Synthetic oligonucleotide
  Target: LAMA2; (-) strand; PAM type: NRG; PAM sequence: AAG
cacattcccaagtcaatcct

SEQ ID NO: 87621 - DNA, 20 bp, Artificial Sequence
  Description of Artificial Sequence: Synthetic oligonucleotide
  Target: LAMA2; (-) strand; PAM type: NRG; PAM sequence: AAG
aaaaaagagcccacattccc

SEQ ID NO: 87622 - DNA, 20 bp, Artificial Sequence
  Description of Artificial Sequence: Synthetic oligonucleotide
  Target: LAMA2; (-) strand; PAM type: NRG; PAM sequence: GAG
gttcatatggaaccaaaaaa

SEQ ID NO: 87623 - DNA, 20 bp, Artificial Sequence
  Description of Artificial Sequence: Synthetic oligonucleotide
  Target: LAMA2; (-) strand; PAM type: NRG; PAM sequence: AAG
aagttcatatggaaccaaaa

SEQ ID NO: 87624 - DNA, 20 bp, Artificial Sequence
  Description of Artificial Sequence: Synthetic oligonucleotide
  Target: LAMA2; (-) strand; PAM type: NRG; PAM sequence: TGG
aaactactttaaagttcata

SEQ ID NO: 87625 - DNA, 20 bp, Artificial Sequence
  Description of Artificial Sequence: Synthetic oligonucleotide
  Target: LAMA2; (-) strand; PAM type: NRG; PAM sequence: AAG
ttggaaaaaaaactacttta

SEQ ID NO: 87626 - DNA, 20 bp, Artificial Sequence
  Description of Artificial Sequence: Synthetic oligonucleotide
  Target: LAMA2; (-) strand; PAM type: NRG; PAM sequence: TGG
agtgactttcttcacagaat

SEQ ID NO: 87627 - DNA, 20 bp, Artificial Sequence
  Description of Artificial Sequence: Synthetic oligonucleotide
  Target: LAMA2; (-) strand; PAM type: NRG; PAM sequence: CAG
gctaccagtgactttcttca

SEQ ID NO: 87628 - DNA, 20 bp, Artificial Sequence
  Description of Artificial Sequence: Synthetic oligonucleotide
  Target: LAMA2; (-) strand; PAM type: NRG; PAM sequence: CAG
tgccatccctatcaagctac

SEQ ID NO: 87629 - DNA, 20 bp, Artificial Sequence
  Description of Artificial Sequence: Synthetic oligonucleotide
  Target: LAMA2; (-) strand; PAM type: NRG; PAM sequence: AAG
gattcaatgccatccctatc

SEQ ID NO: 87630 - DNA, 20 bp, Artificial Sequence
  Description of Artificial Sequence: Synthetic oligonucleotide
  Target: LAMA2; (-) strand; PAM type: NRG; PAM sequence: TAG
atactgcccaaggtaattca

SEQ ID NO: 87631 - DNA, 20 bp, Artificial Sequence
  Description of Artificial Sequence: Synthetic oligonucleotide
  Target: LAMA2; (-) strand; PAM type: NRG; PAM sequence: AGG
gaaaatggccatactgccca

SEQ ID NO: 87632 - DNA, 20 bp, Artificial Sequence
  Description of Artificial Sequence: Synthetic oligonucleotide
  Target: LAMA2; (-) strand; PAM type: NRG; PAM sequence: AAG
tgaaaatggccatactgccc

SEQ ID NO: 87633 - DNA, 20 bp, Artificial Sequence
  Description of Artificial Sequence: Synthetic oligonucleotide
  Target: LAMA2; (-) strand; PAM type: NRG; PAM sequence: TGG
aagaatcaatatcgtgaaaa

SEQ ID NO: 87634 - DNA, 20 bp, Artificial Sequence
  Description of Artificial Sequence: Synthetic oligonucleotide
  Target: LAMA2; (-) strand; PAM type: NRG; PAM sequence: AAG
attccatgcttatggatagg

SEQ ID NO: 87635 - DNA, 20 bp, Artificial Sequence
  Description of Artificial Sequence: Synthetic oligonucleotide
  Target: LAMA2; (-) strand; PAM type: NRG; PAM sequence: AGG
aacattccatgcttatggat

SEQ ID NO: 87636 - DNA, 20 bp, Artificial Sequence
  Description of Artificial Sequence: Synthetic oligonucleotide
  Target: LAMA2; (-) strand; PAM type: NRG; PAM sequence: TAG
gaacattccatgcttatgga

SEQ ID NO: 87637 - DNA, 20 bp, Artificial Sequence
  Description of Artificial Sequence: Synthetic oligonucleotide
  Target: LAMA2; (-) strand; PAM type: NRG; PAM sequence: TGG
ggaagaacattccatgctta

SEQ ID NO: 87638 - DNA, 20 bp, Artificial Sequence
  Description of Artificial Sequence: Synthetic oligonucleotide
  Target: LAMA2; (-) strand; PAM type: NRG; PAM sequence: AAG
aagaggacacaaacaaatgg

SEQ ID NO: 87639 - DNA, 20 bp, Artificial Sequence
  Description of Artificial Sequence: Synthetic oligonucleotide
  Target: LAMA2; (-) strand; PAM type: NRG; PAM sequence: TGG
taaaagaggacacaaacaaa

SEQ ID NO: 87640 - DNA, 20 bp, Artificial Sequence
  Description of Artificial Sequence: Synthetic oligonucleotide
  Target: LAMA2; (-) strand; PAM type: NRG; PAM sequence: AGG
actgctcaacaaaataaaag

SEQ ID NO: 87641 - DNA, 20 bp, Artificial Sequence
  Description of Artificial Sequence: Synthetic oligonucleotide
  Target: LAMA2; (-) strand; PAM type: NRG; PAM sequence: GAG
tactgctcaacaaaataaaa

SEQ ID NO: 87642 - DNA, 20 bp, Artificial Sequence
  Description of Artificial Sequence: Synthetic oligonucleotide
  Target: LAMA2; (-) strand; PAM type: NRG; PAM sequence: AAG
attactgctcaacaaaataa

SEQ ID NO: 87643 - DNA, 20 bp, Artificial Sequence
  Description of Artificial Sequence: Synthetic oligonucleotide
  Target: LAMA2; (-) strand; PAM type: NRG; PAM sequence: GAG
atgtgaaggacctcttcaag

SEQ ID NO: 87644 - DNA, 20 bp, Artificial Sequence
  Description of Artificial Sequence: Synthetic oligonucleotide
  Target: LAMA2; (-) strand; PAM type: NRG; PAM sequence: AGG
ggatgtgaaggacctcttca

SEQ ID NO: 87645 - DNA, 20 bp, Artificial Sequence
  Description of Artificial Sequence: Synthetic oligonucleotide
  Target: LAMA2; (-) strand; PAM type: NRG; PAM sequence: AAG
gggatgtgaaggacctcttc

SEQ ID NO: 87646 - DNA, 20 bp, Artificial Sequence
  Description of Artificial Sequence: Synthetic oligonucleotide
  Target: LAMA2; (-) strand; PAM type: NRG; PAM sequence: AGG
ccaacttacaagggatgtga

SEQ ID NO: 87647 - DNA, 20 bp, Artificial Sequence
  Description of Artificial Sequence: Synthetic oligonucleotide
  Target: LAMA2; (-) strand; PAM type: NRG; PAM sequence: AAG
tccaacttacaagggatgtg

SEQ ID NO: 87648 - DNA, 20 bp, Artificial Sequence
  Description of Artificial Sequence: Synthetic oligonucleotide
  Target: LAMA2; (-) strand; PAM type: NRG; PAM sequence: GGG
cctaggaatccaacttacaa

SEQ ID NO: 87649 - DNA, 20 bp, Artificial Sequence
  Description of Artificial Sequence: Synthetic oligonucleotide
  Target: LAMA2; (-) strand; PAM type: NRG; PAM sequence: AGG
acctaggaatccaacttaca

SEQ ID NO: 87650 - DNA, 20 bp, Artificial Sequence
  Description of Artificial Sequence: Synthetic oligonucleotide
  Target: LAMA2; (-) strand; PAM type: NRG; PAM sequence: AAG
tacctaggaatccaacttac

SEQ ID NO: 87651 - DNA, 20 bp, Artificial Sequence
  Description of Artificial Sequence: Synthetic oligonucleotide
  Target: LAMA2; (-) strand; PAM type: NRG; PAM sequence: AGG
tcaaagagaataaaatacct

SEQ ID NO: 87652 - DNA, 20 bp, Artificial Sequence
  Description of Artificial Sequence: Synthetic oligonucleotide
  Target: LAMA2; (-) strand; PAM type: NRG; PAM sequence: TAG
ttcaaagagaataaaatacc

SEQ ID NO: 87653 - DNA, 20 bp, Artificial Sequence
  Description of Artificial Sequence: Synthetic oligonucleotide
  Target: LAMA2; (-) strand; PAM type: NRG; PAM sequence: GAG
ctattcacaattgcttcaaa

SEQ ID NO: 87654 - DNA, 20 bp, Artificial Sequence
  Description of Artificial Sequence: Synthetic oligonucleotide
  Target: LAMA2; (-) strand; PAM type: NRG; PAM sequence: AAG
tcctattcacaattgcttca

SEQ ID NO: 87655 - DNA, 20 bp, Artificial Sequence
  Description of Artificial Sequence: Synthetic oligonucleotide
  Target: LAMA2; (-) strand; PAM type: NRG; PAM sequence: GAG
caatcagagagccaaatcat

SEQ ID NO: 87656 - DNA, 20 bp, Artificial Sequence
  Description of Artificial Sequence: Synthetic oligonucleotide
  Target: LAMA2; (-) strand; PAM type: NRG; PAM sequence: GAG
actaacaacagacaatcaga

SEQ ID NO: 87657 - DNA, 20 bp, Artificial Sequence
  Description of Artificial Sequence: Synthetic oligonucleotide
  Target: LAMA2; (-) strand; PAM type: NRG; PAM sequence: GAG
acactaacaacagacaatca

SEQ ID NO: 87658 - DNA, 20 bp, Artificial Sequence
  Description of Artificial Sequence: Synthetic oligonucleotide
  Target: LAMA2; (-) strand; PAM type: NRG; PAM sequence: CAG
atacactaacaacagacaat

SEQ ID NO: 87659 - DNA, 20 bp, Artificial Sequence
  Description of Artificial Sequence: Synthetic oligonucleotide
  Target: LAMA2; (-) strand; PAM type: NRG; PAM sequence: CAG
gcattcttatacactaacaa

SEQ ID NO: 87660 - DNA, 20 bp, Artificial Sequence
  Description of Artificial Sequence: Synthetic oligonucleotide
  Target: LAMA2; (-) strand; PAM type: NRG; PAM sequence: AAG
aatcaatgtagaaaaatcac

SEQ ID NO: 87661 - DNA, 20 bp, Artificial Sequence
  Description of Artificial Sequence: Synthetic oligonucleotide
  Target: LAMA2; (-) strand; PAM type: NRG; PAM sequence: TAG
ctcaggatacaaaatcaatg

SEQ ID NO: 87662 - DNA, 20 bp, Artificial Sequence
  Description of Artificial Sequence: Synthetic oligonucleotide
  Target: LAMA2; (-) strand; PAM type: NRG; PAM sequence: AGG
agcaacttcaccaaagtctc

SEQ ID NO: 87663 - DNA, 20 bp, Artificial Sequence
  Description of Artificial Sequence: Synthetic oligonucleotide
  Target: LAMA2; (-) strand; PAM type: NRG; PAM sequence: CAG
aagcaacttcaccaaagtct

SEQ ID NO: 87664 - DNA, 20 bp, Artificial Sequence
  Description of Artificial Sequence: Synthetic oligonucleotide
  Target: LAMA2; (-) strand; PAM type: NRG; PAM sequence: AAG
gctgataagcaacttcacca

SEQ ID NO: 87665 - DNA, 20 bp, Artificial Sequence
  Description of Artificial Sequence: Synthetic oligonucleotide
  Target: LAMA2; (-) strand; PAM type: NRG; PAM sequence: AAG
caaaatctcctaaagctgat

SEQ ID NO: 87666 - DNA, 20 bp, Artificial Sequence
  Description of Artificial Sequence: Synthetic oligonucleotide
  Target: LAMA2; (-) strand; PAM type: NRG; PAM sequence: AAG
tctcagcccaaaatctccta

SEQ ID NO: 87667 - DNA, 20 bp, Artificial Sequence
  Description of Artificial Sequence: Synthetic oligonucleotide
  Target: LAMA2; (-) strand; PAM type: NRG; PAM sequence: CAG
tttagaaaaccccattgtct

SEQ ID NO: 87668 - DNA, 20 bp, Artificial Sequence
  Description of Artificial Sequence: Synthetic oligonucleotide
  Target: LAMA2; (-) strand; PAM type: NRG; PAM sequence: TAG
agatgacataattgtatatt

SEQ ID NO: 87669 - DNA, 20 bp, Artificial Sequence
  Description of Artificial Sequence: Synthetic oligonucleotide
  Target: LAMA2; (-) strand; PAM type: NRG; PAM sequence: CAG
agtcaaattgtccctgtttg

SEQ ID NO: 87670 - DNA, 20 bp, Artificial Sequence
  Description of Artificial Sequence: Synthetic oligonucleotide
  Target: LAMA2; (-) strand; PAM type: NRG; PAM sequence: TAG
tatttaattaggaaaagagg

SEQ ID NO: 87671 - DNA, 20 bp, Artificial Sequence
  Description of Artificial Sequence: Synthetic oligonucleotide
  Target: LAMA2; (-) strand; PAM type: NRG; PAM sequence: AGG
gggtatttaattaggaaaag

SEQ ID NO: 87672 - DNA, 20 bp, Artificial Sequence
  Description of Artificial Sequence: Synthetic oligonucleotide
  Target: LAMA2; (-) strand; PAM type: NRG; PAM sequence: GAG
agggtatttaattaggaaaa

SEQ ID NO: 87673 - DNA, 20 bp, Artificial Sequence
  Description of Artificial Sequence: Synthetic oligonucleotide
  Target: LAMA2; (-) strand; PAM type: NRG; PAM sequence: AAG
gaagggtatttaattaggaa

SEQ ID NO: 87674 - DNA, 20 bp, Artificial Sequence
  Description of Artificial Sequence: Synthetic oligonucleotide
  Target: LAMA2; (-) strand; PAM type: NRG; PAM sequence: AGG
gtaatgaagggtatttaatt

SEQ ID NO: 87675 - DNA, 20 bp, Artificial Sequence
  Description of Artificial Sequence: Synthetic oligonucleotide
  Target: LAMA2; (-) strand; PAM type: NRG; PAM sequence: TAG
agtaatgaagggtatttaat

SEQ ID NO: 87676 - DNA, 20 bp, Artificial Sequence
  Description of Artificial Sequence: Synthetic oligonucleotide
  Target: LAMA2; (-) strand; PAM type: NRG; PAM sequence: GGG
aggcaggagaaagtaatgaa

SEQ ID NO: 87677 - DNA, 20 bp, Artificial Sequence
  Description of Artificial Sequence: Synthetic oligonucleotide
  Target: LAMA2; (-) strand; PAM type: NRG; PAM sequence: AGG
caggcaggagaaagtaatga

SEQ ID NO: 87678 - DNA, 20 bp, Artificial Sequence
  Description of Artificial Sequence: Synthetic oligonucleotide
  Target: LAMA2; (-) strand; PAM type: NRG; PAM sequence: AAG
tcaggcaggagaaagtaatg

SEQ ID NO: 87679 - DNA, 20 bp, Artificial Sequence
  Description of Artificial Sequence: Synthetic oligonucleotide
  Target: LAMA2; (-) strand; PAM type: NRG; PAM sequence: AAG
cagggcaatcaggcaggaga

SEQ ID NO: 87680 - DNA, 20 bp, Artificial Sequence
  Description of Artificial Sequence: Synthetic oligonucleotide
  Target: LAMA2; (-) strand; PAM type: NRG; PAM sequence: GAG
tggccagggcaatcaggcag

SEQ ID NO: 87681 - DNA, 20 bp, Artificial Sequence
  Description of Artificial Sequence: Synthetic oligonucleotide
  Target: LAMA2; (-) strand; PAM type: NRG; PAM sequence: AGG
tctggccagggcaatcaggc

SEQ ID NO: 87682 - DNA, 20 bp, Artificial Sequence
  Description of Artificial Sequence: Synthetic oligonucleotide
  Target: LAMA2; (-) strand; PAM type: NRG; PAM sequence: CAG
ttctggccagggcaatcagg

SEQ ID NO: 87683 - DNA, 20 bp, Artificial Sequence
  Description of Artificial Sequence: Synthetic oligonucleotide
  Target: LAMA2; (-) strand; PAM type: NRG; PAM sequence: AGG
aagttctggccagggcaatc

SEQ ID NO: 87684 - DNA, 20 bp, Artificial Sequence
  Description of Artificial Sequence: Synthetic oligonucleotide
  Target: LAMA2; (-) strand; PAM type: NRG; PAM sequence: CAG
gaagttctggccagggcaat

SEQ ID NO: 87685 - DNA, 20 bp, Artificial Sequence
  Description of Artificial Sequence: Synthetic oligonucleotide
  Target: LAMA2; (-) strand; PAM type: NRG; PAM sequence: GGG
agtgttggaagttctggcca

SEQ ID NO: 87686 - DNA, 20 bp, Artificial Sequence
  Description of Artificial Sequence: Synthetic oligonucleotide
  Target: LAMA2; (-) strand; PAM type: NRG; PAM sequence: AGG
tagtgttggaagttctggcc

SEQ ID NO: 87687 - DNA, 20 bp, Artificial Sequence
  Description of Artificial Sequence: Synthetic oligonucleotide
  Target: LAMA2; (-) strand; PAM type: NRG; PAM sequence: CAG
atagtgttggaagttctggc

SEQ ID NO: 87688 - DNA, 20 bp, Artificial Sequence
  Description of Artificial Sequence: Synthetic oligonucleotide
  Target: LAMA2; (-) strand; PAM type: NRG; PAM sequence: TGG
caacatagtgttggaagttc

SEQ ID NO: 87689 - DNA, 20 bp, Artificial Sequence
  Description of Artificial Sequence: Synthetic oligonucleotide
  Target: LAMA2; (-) strand; PAM type: NRG; PAM sequence: AAG
cctattcaacatagtgttgg

SEQ ID NO: 87690 - DNA, 20 bp, Artificial Sequence
  Description of Artificial Sequence: Synthetic oligonucleotide
  Target: LAMA2; (-) strand; PAM type: NRG; PAM sequence: TGG
actcctattcaacatagtgt

SEQ ID NO: 87691 - DNA, 20 bp, Artificial Sequence
  Description of Artificial Sequence: Synthetic oligonucleotide
  Target: LAMA2; (-) strand; PAM type: NRG; PAM sequence: TAG
ctcaccactcctattcaaca

SEQ ID NO: 87692 - DNA, 20 bp, Artificial Sequence
  Description of Artificial Sequence: Synthetic oligonucleotide
  Target: LAMA2; (-) strand; PAM type: NRG; PAM sequence: GGG
ttgaaaactggcacaagaca

SEQ ID NO: 87693 - DNA, 20 bp, Artificial Sequence
  Description of Artificial Sequence: Synthetic oligonucleotide
  Target: LAMA2; (-) strand; PAM type: NRG; PAM sequence: AGG
tttgaaaactggcacaagac

SEQ ID NO: 87694 - DNA, 20 bp, Artificial Sequence
  Description of Artificial Sequence: Synthetic oligonucleotide
  Target: LAMA2; (-) strand; PAM type: NRG; PAM sequence: CAG
ctttgaaaactggcacaaga

SEQ ID NO: 87695 - DNA, 20 bp, Artificial Sequence
  Description of Artificial Sequence: Synthetic oligonucleotide
  Target: LAMA2; (-) strand; PAM type: NRG; PAM sequence: AAG
ttccctttgaaaactggcac

SEQ ID NO: 87696 - DNA, 20 bp, Artificial Sequence
  Description of Artificial Sequence: Synthetic oligonucleotide
  Target: LAMA2; (-) strand; PAM type: NRG; PAM sequence: TGG
gaagcattccctttgaaaac

SEQ ID NO: 87697 - DNA, 20 bp, Artificial Sequence
  Description of Artificial Sequence: Synthetic oligonucleotide
  Target: LAMA2; (-) strand; PAM type: NRG; PAM sequence: AAG
actgaatgggcaaaaactgg

SEQ ID NO: 87698 - DNA, 20 bp, Artificial Sequence
  Description of Artificial Sequence: Synthetic oligonucleotide
  Target: LAMA2; (-) strand; PAM type: NRG; PAM sequence: TGG
catactgaatgggcaaaaac

SEQ ID NO: 87699 - DNA, 20 bp, Artificial Sequence
  Description of Artificial Sequence: Synthetic oligonucleotide
  Target: LAMA2; (-) strand; PAM type: NRG; PAM sequence: GGG
cagccaatatcatactgaat

SEQ ID NO: 87700 - DNA, 20 bp, Artificial Sequence
  Description of Artificial Sequence: Synthetic oligonucleotide
  Target: LAMA2; (-) strand; PAM type: NRG; PAM sequence: TGG
acagccaatatcatactgaa

SEQ ID NO: 87701 - DNA, 20 bp, Artificial Sequence
  Description of Artificial Sequence: Synthetic oligonucleotide
  Target: LAMA2; (-) strand; PAM type: NRG; PAM sequence: CAG
agctatctatgacaaaccca

SEQ ID NO: 87702 - DNA, 20 bp, Artificial Sequence
  Description of Artificial Sequence: Synthetic oligonucleotide
  Target: LAMA2; (-) strand; PAM type: NRG; PAM sequence: GAG
gatgtatctcaaaataataa

SEQ ID NO: 87703 - DNA, 20 bp, Artificial Sequence
  Description of Artificial Sequence: Synthetic oligonucleotide
  Target: LAMA2; (-) strand; PAM type: NRG; PAM sequence: AAG
gggatgtatctcaaaataat

SEQ ID NO: 87704 - DNA, 20 bp, Artificial Sequence
  Description of Artificial Sequence: Synthetic oligonucleotide
  Target: LAMA2; (-) strand; PAM type: NRG; PAM sequence: GGG
tcaataaattaggtattgat

SEQ ID NO: 87705 - DNA, 20 bp, Artificial Sequence
  Description of Artificial Sequence: Synthetic oligonucleotide
  Target: LAMA2; (-) strand; PAM type: NRG; PAM sequence: TGG
ctcaataaattaggtattga

SEQ ID NO: 87706 - DNA, 20 bp, Artificial Sequence
  Description of Artificial Sequence: Synthetic oligonucleotide
  Target: LAMA2; (-) strand; PAM type: NRG; PAM sequence: AGG
ccaaaaactctcaataaatt

SEQ ID NO: 87707 - DNA, 20 bp, Artificial Sequence
  Description of Artificial Sequence: Synthetic oligonucleotide
  Target: LAMA2; (-) strand; PAM type: NRG; PAM sequence: TAG
gccaaaaactctcaataaat

SEQ ID NO: 87708 - DNA, 20 bp, Artificial Sequence
  Description of Artificial Sequence: Synthetic oligonucleotide
  Target: LAMA2; (-) strand; PAM type: NRG; PAM sequence: CAG
aggcctttgacaaaattcaa

SEQ ID NO: 87709 - DNA, 20 bp, Artificial Sequence
  Description of Artificial Sequence: Synthetic oligonucleotide
  Target: LAMA2; (-) strand; PAM type: NRG; PAM sequence: AGG
tatctcaataaatgcagaaa

SEQ ID NO: 87710 - DNA, 20 bp, Artificial Sequence
  Description of Artificial Sequence: Synthetic oligonucleotide
  Target: LAMA2; (-) strand; PAM type: NRG; PAM sequence: AAG
ttatctcaataaatgcagaa

SEQ ID NO: 87711 - DNA, 20 bp, Artificial Sequence
  Description of Artificial Sequence: Synthetic oligonucleotide
  Target: LAMA2; (-) strand; PAM type: NRG; PAM sequence: CAG
catgattatctcaataaatg

SEQ ID NO: 87712 - DNA, 20 bp, Artificial Sequence
  Description of Artificial Sequence: Synthetic oligonucleotide
  Target: LAMA2; (-) strand; PAM type: NRG; PAM sequence: CAG
acaaatcaataaacgtaatc

SEQ ID NO: 87713 - DNA, 20 bp, Artificial Sequence
  Description of Artificial Sequence: Synthetic oligonucleotide
  Target: LAMA2; (-) strand; PAM type: NRG; PAM sequence: TGG
tcatccacgggatgcaaggc

SEQ ID NO: 87714 - DNA, 20 bp, Artificial Sequence
  Description of Artificial Sequence: Synthetic oligonucleotide
  Target: LAMA2; (-) strand; PAM type: NRG; PAM sequence: AGG
ggcttcatccacgggatgca

SEQ ID NO: 87715 - DNA, 20 bp, Artificial Sequence
  Description of Artificial Sequence: Synthetic oligonucleotide
  Target: LAMA2; (-) strand; PAM type: NRG; PAM sequence: AAG
gggcttcatccacgggatgc

SEQ ID NO: 87716 - DNA, 20 bp, Artificial Sequence
  Description of Artificial Sequence: Synthetic oligonucleotide
  Target: LAMA2; (-) strand; PAM type: NRG; PAM sequence: GGG
atcaagtgggcttcatccac

SEQ ID NO: 87717 - DNA, 20 bp, Artificial Sequence
  Description of Artificial Sequence: Synthetic oligonucleotide
  Target: LAMA2; (-) strand; PAM type: NRG; PAM sequence: CGG
gatcaagtgggcttcatcca

SEQ ID NO: 87718 - DNA, 20 bp, Artificial Sequence
  Description of Artificial Sequence: Synthetic oligonucleotide
  Target: LAMA2; (-) strand; PAM type: NRG; PAM sequence: GGG
cttatccaccacgatcaagt

SEQ ID NO: 87719 - DNA, 20 bp, Artificial Sequence
  Description of Artificial Sequence: Synthetic oligonucleotide
  Target: LAMA2; (-) strand; PAM type: NRG; PAM sequence: TGG
gcttatccaccacgatcaag

SEQ ID NO: 87720 - DNA, 20 bp, Artificial Sequence
  Description of Artificial Sequence: Synthetic oligonucleotide
  Target: LAMA2; (-) strand; PAM type: NRG; PAM sequence: AAG
aaagcttatccaccacgatc

SEQ ID NO: 87721 - DNA, 20 bp, Artificial Sequence
  Description of Artificial Sequence: Synthetic oligonucleotide
  Target: LAMA2; (-) strand; PAM type: NRG; PAM sequence: AAG
gaatgcagcagcacatcaaa

SEQ ID NO: 87722 - DNA, 20 bp, Artificial Sequence
  Description of Artificial Sequence: Synthetic oligonucleotide
  Target: LAMA2; (-) strand; PAM type: NRG; PAM sequence: CAG
taatggcaaactgaatgcag

SEQ ID NO: 87723 - DNA, 20 bp, Artificial Sequence
  Description of Artificial Sequence: Synthetic oligonucleotide
  Target: LAMA2; (-) strand; PAM type: NRG; PAM sequence: CAG
aaataatggcaaactgaatg

SEQ ID NO: 87724 - DNA, 20 bp, Artificial Sequence
  Description of Artificial Sequence: Synthetic oligonucleotide
  Target: LAMA2; (-) strand; PAM type: NRG; PAM sequence: TGG
aaaaatcctcaataaaataa

SEQ ID NO: 87725 - DNA, 20 bp, Artificial Sequence
  Description of Artificial Sequence: Synthetic oligonucleotide
  Target: LAMA2; (-) strand; PAM type: NRG; PAM sequence: GAG
ggcagagacacaacaaaaaa

SEQ ID NO: 87726 - DNA, 20 bp, Artificial Sequence
  Description of Artificial Sequence: Synthetic oligonucleotide
  Target: LAMA2; (-) strand; PAM type: NRG; PAM sequence: AAG
ctggcagagacacaacaaaa

SEQ ID NO: 87727 - DNA, 20 bp, Artificial Sequence
  Description of Artificial Sequence: Synthetic oligonucleotide
  Target: LAMA2; (-) strand; PAM type: NRG; PAM sequence: GAG
cctgatacaaaagcctggca

SEQ ID NO: 87728 - DNA, 20 bp, Artificial Sequence
  Description of Artificial Sequence: Synthetic oligonucleotide
  Target: LAMA2; (-) strand; PAM type: NRG; PAM sequence: CAG
ctcctgatacaaaagcctgg

SEQ ID NO: 87729 - DNA, 20 bp, Artificial Sequence
  Description of Artificial Sequence: Synthetic oligonucleotide
  Target: LAMA2; (-) strand; PAM type: NRG; PAM sequence: TGG
atcctcctgatacaaaagcc

SEQ ID NO: 87730 - DNA, 20 bp, Artificial Sequence
  Description of Artificial Sequence: Synthetic oligonucleotide
  Target: LAMA2; (-) strand; PAM type: NRG; PAM sequence: AAG
ccagcatcctcctgatacaa

SEQ ID NO: 87731 - DNA, 20 bp, Artificial Sequence
  Description of Artificial Sequence: Synthetic oligonucleotide
  Target: LAMA2; (-) strand; PAM type: NRG; PAM sequence: CAG
tctaactcatttgatgaggc

SEQ ID NO: 87732 - DNA, 20 bp, Artificial Sequence
  Description of Artificial Sequence: Synthetic oligonucleotide
  Target: LAMA2; (-) strand; PAM type: NRG; PAM sequence: AGG
cctctctaactcatttgatg

SEQ ID NO: 87733 - DNA, 20 bp, Artificial Sequence
  Description of Artificial Sequence: Synthetic oligonucleotide
  Target: LAMA2; (-) strand; PAM type: NRG; PAM sequence: GAG
tcctctctaactcatttgat

SEQ ID NO: 87734 - DNA, 20 bp, Artificial Sequence
  Description of Artificial Sequence: Synthetic oligonucleotide
  Target: LAMA2; (-) strand; PAM type: NRG; PAM sequence: GGG
ttccaatcaatagaaaaaga

SEQ ID NO: 87735 - DNA, 20 bp, Artificial Sequence
  Description of Artificial Sequence: Synthetic oligonucleotide
  Target: LAMA2; (-) strand; PAM type: NRG; PAM sequence: AGG
attccaatcaatagaaaaag

SEQ ID NO: 87736 - DNA, 20 bp, Artificial Sequence
  Description of Artificial Sequence: Synthetic oligonucleotide
  Target: LAMA2; (-) strand; PAM type: NRG; PAM sequence: GAG
tattccaatcaatagaaaaa

SEQ ID NO: 87737 - DNA, 20 bp, Artificial Sequence
  Description of Artificial Sequence: Synthetic oligonucleotide
  Target: LAMA2; (-) strand; PAM type: NRG; PAM sequence: AAG
actattccaatcaatagaaa

SEQ ID NO: 87738 - DNA, 20 bp, Artificial Sequence
  Description of Artificial Sequence: Synthetic oligonucleotide
  Target: LAMA2; (-) strand; PAM type: NRG; PAM sequence: TAG
tctgaaactattccaatcaa

SEQ ID NO: 87739 - DNA, 20 bp, Artificial Sequence
  Description of Artificial Sequence: Synthetic oligonucleotide
  Target: LAMA2; (-) strand; PAM type: NRG; PAM sequence: TGG
ccagaggtacaaggaggagg

SEQ ID NO: 87740 - DNA, 20 bp, Artificial Sequence
  Description of Artificial Sequence: Synthetic oligonucleotide
  Target: LAMA2; (-) strand; PAM type: NRG; PAM sequence: AGG
ctaccagaggtacaaggagg

SEQ ID NO: 87741 - DNA, 20 bp, Artificial Sequence
  Description of Artificial Sequence: Synthetic oligonucleotide
  Target: LAMA2; (-) strand; PAM type: NRG; PAM sequence: GAG
tctaccagaggtacaaggag

SEQ ID NO: 87742 - DNA, 20 bp, Artificial Sequence
  Description of Artificial Sequence: Synthetic oligonucleotide
  Target: LAMA2; (-) strand; PAM type: NRG; PAM sequence: AGG
attctaccagaggtacaagg

SEQ ID NO: 87743 - DNA, 20 bp, Artificial Sequence
  Description of Artificial Sequence: Synthetic oligonucleotide
  Target: LAMA2; (-) strand; PAM type: NRG; PAM sequence: GAG
aattctaccagaggtacaag

SEQ ID NO: 87744 - DNA, 20 bp, Artificial Sequence
  Description of Artificial Sequence: Synthetic oligonucleotide
  Target: LAMA2; (-) strand; PAM type: NRG; PAM sequence: AGG
cgaattctaccagaggtaca

SEQ ID NO: 87745 - DNA, 20 bp, Artificial Sequence
  Description of Artificial Sequence: Synthetic oligonucleotide
  Target: LAMA2; (-) strand; PAM type: NRG; PAM sequence: AAG
ccgaattctaccagaggtac

SEQ ID NO: 87746 - DNA, 20 bp, Artificial Sequence
  Description of Artificial Sequence: Synthetic oligonucleotide
  Target: LAMA2; (-) strand; PAM type: NRG; PAM sequence: AGG
tcacagccgaattctaccag

SEQ ID NO: 87747 - DNA, 20 bp, Artificial Sequence
  Description of Artificial Sequence: Synthetic oligonucleotide
  Target: LAMA2; (-) strand; PAM type: NRG; PAM sequence: GAG
ttcacagccgaattctacca

SEQ ID NO: 87748 - DNA, 20 bp, Artificial Sequence
  Description of Artificial Sequence: Synthetic oligonucleotide
  Target: LAMA2; (-) strand; PAM type: NRG; PAM sequence: CAG
gattcacagccgaattctac

SEQ ID NO: 87749 - DNA, 20 bp, Artificial Sequence
  Description of Artificial Sequence: Synthetic oligonucleotide
  Target: LAMA2; (-) strand; PAM type: NRG; PAM sequence: CAG
tccaggaccagatggattca

SEQ ID NO: 87750 - DNA, 20 bp, Artificial Sequence
  Description of Artificial Sequence: Synthetic oligonucleotide
  Target: LAMA2; (-) strand; PAM type: NRG; PAM sequence: TGG
aaaaaaagtccaggaccaga

SEQ ID NO: 87751 - DNA, 20 bp, Artificial Sequence
  Description of Artificial Sequence: Synthetic oligonucleotide
  Target: LAMA2; (-) strand; PAM type: NRG; PAM sequence: CAG
aaccaaaaaaagtccaggac

SEQ ID NO: 87752 - DNA, 20 bp, Artificial Sequence
  Description of Artificial Sequence: Synthetic oligonucleotide
  Target: LAMA2; (-) strand; PAM type: NRG; PAM sequence: AGG
ctaccaaccaaaaaaagtcc

SEQ ID NO: 87753 - DNA, 20 bp, Artificial Sequence
  Description of Artificial Sequence: Synthetic oligonucleotide
  Target: LAMA2; (-) strand; PAM type: NRG; PAM sequence: CAG
cctaccaaccaaaaaaagtc

SEQ ID NO: 87754 - DNA, 20 bp, Artificial Sequence
  Description of Artificial Sequence: Synthetic oligonucleotide
  Target: LAMA2; (-) strand; PAM type: NRG; PAM sequence: AAG
aatagcctaccaaccaaaaa

SEQ ID NO: 87755 - DNA, 20 bp, Artificial Sequence
  Description of Artificial Sequence: Synthetic oligonucleotide
  Target: LAMA2; (-) strand; PAM type: NRG; PAM sequence: TAG
gaaattgaggcaataattaa

SEQ ID NO: 87756 - DNA, 20 bp, Artificial Sequence
  Description of Artificial Sequence: Synthetic oligonucleotide
  Target: LAMA2; (-) strand; PAM type: NRG; PAM sequence: AGG
aataacaggctctgaaattg

SEQ ID NO: 87757 - DNA, 20 bp, Artificial Sequence
  Description of Artificial Sequence: Synthetic oligonucleotide
  Target: LAMA2; (-) strand; PAM type: NRG; PAM sequence: GAG
caataacaggctctgaaatt

SEQ ID NO: 87758 - DNA, 20 bp, Artificial Sequence
  Description of Artificial Sequence: Synthetic oligonucleotide
  Target: LAMA2; (-) strand; PAM type: NRG; PAM sequence: AGG
tctctgaatagaccaataac

SEQ ID NO: 87759 - DNA, 20 bp, Artificial Sequence
  Description of Artificial Sequence: Synthetic oligonucleotide
  Target: LAMA2; (-) strand; PAM type: NRG; PAM sequence: CAG
atctctgaatagaccaataa

SEQ ID NO: 87760 - DNA, 20 bp, Artificial Sequence
  Description of Artificial Sequence: Synthetic oligonucleotide
  Target: LAMA2; (-) strand; PAM type: NRG; PAM sequence: TAG
gaagaagttgaatctctgaa

SEQ ID NO: 87761 - DNA, 20 bp, Artificial Sequence
  Description of Artificial Sequence: Synthetic oligonucleotide
  Target: LAMA2; (-) strand; PAM type: NRG; PAM sequence: AAG
cccaatactaaacaaggaag

SEQ ID NO: 87762 - DNA, 20 bp, Artificial Sequence
  Description of Artificial Sequence: Synthetic oligonucleotide
  Target: LAMA2; (-) strand; PAM type: NRG; PAM sequence: AAG
cctcccaatactaaacaagg

SEQ ID NO: 87763 - DNA, 20 bp, Artificial Sequence
  Description of Artificial Sequence: Synthetic oligonucleotide
  Target: LAMA2; (-) strand; PAM type: NRG; PAM sequence: AGG
caccctcccaatactaaaca

SEQ ID NO: 87764 - DNA, 20 bp, Artificial Sequence
  Description of Artificial Sequence: Synthetic oligonucleotide
  Target: LAMA2; (-) strand; PAM type: NRG; PAM sequence: AAG
acaccctcccaatactaaac

SEQ ID NO: 87765 - DNA, 20 bp, Artificial Sequence
  Description of Artificial Sequence: Synthetic oligonucleotide
  Target: LAMA2; (-) strand; PAM type: NRG; PAM sequence: TGG
tgaagaaatggatagattcc

SEQ ID NO: 87766 - DNA, 20 bp, Artificial Sequence
  Description of Artificial Sequence: Synthetic oligonucleotide
  Target: LAMA2; (-) strand; PAM type: NRG; PAM sequence: TAG
gaaaatcttgaagaaatgga

SEQ ID NO: 87767 - DNA, 20 bp, Artificial Sequence
  Description of Artificial Sequence: Synthetic oligonucleotide
  Target: LAMA2; (-) strand; PAM type: NRG; PAM sequence: TGG
actagaaaatcttgaagaaa

SEQ ID NO: 87768 - DNA, 20 bp, Artificial Sequence
  Description of Artificial Sequence: Synthetic oligonucleotide
  Target: LAMA2; (-) strand; PAM type: NRG; PAM sequence: AAG
aaataaactagaaaatcttg

SEQ ID NO: 87769 - DNA, 20 bp, Artificial Sequence
  Description of Artificial Sequence: Synthetic oligonucleotide
  Target: LAMA2; (-) strand; PAM type: NRG; PAM sequence: TAG
acacctctatgcaaataaac

SEQ ID NO: 87770 - DNA, 20 bp, Artificial Sequence
  Description of Artificial Sequence: Synthetic oligonucleotide
  Target: LAMA2; (-) strand; PAM type: NRG; PAM sequence: GAG
agaaatacaaactaccatca

SEQ ID NO: 87771 - DNA, 20 bp, Artificial Sequence
  Description of Artificial Sequence: Synthetic oligonucleotide
  Target: LAMA2; (-) strand; PAM type: NRG; PAM sequence: CAG
acagaaatacaaactaccat

SEQ ID NO: 87772 - DNA, 20 bp, Artificial Sequence
  Description of Artificial Sequence: Synthetic oligonucleotide
  Target: LAMA2; (-) strand; PAM type: NRG; PAM sequence: CAG
ggatatcaccaccgatccca

SEQ ID NO: 87773 - DNA, 20 bp, Artificial Sequence
  Description of Artificial Sequence: Synthetic oligonucleotide
  Target: LAMA2; (-) strand; PAM type: NRG; PAM sequence: GGG
tgcaataaaaaatgataaag

SEQ ID NO: 87774 - DNA, 20 bp, Artificial Sequence
  Description of Artificial Sequence: Synthetic oligonucleotide
  Target: LAMA2; (-) strand; PAM type: NRG; PAM sequence: GGG
atgcaataaaaaatgataaa

SEQ ID NO: 87775 - DNA, 20 bp, Artificial Sequence
  Description of Artificial Sequence: Synthetic oligonucleotide
  Target: LAMA2; (-) strand; PAM type: NRG; PAM sequence: AGG
gatgcaataaaaaatgataa

SEQ ID NO: 87776 - DNA, 20 bp, Artificial Sequence
  Description of Artificial Sequence: Synthetic oligonucleotide
  Target: LAMA2; (-) strand; PAM type: NRG; PAM sequence: AAG
agatgcaataaaaaatgata

SEQ ID NO: 87777 - DNA, 20 bp, Artificial Sequence
  Description of Artificial Sequence: Synthetic oligonucleotide
  Target: LAMA2; (-) strand; PAM type: NRG; PAM sequence: TAG
gaaaagagagaagaatcaaa

SEQ ID NO: 87778 - DNA, 20 bp, Artificial Sequence
  Description of Artificial Sequence: Synthetic oligonucleotide
  Target: LAMA2; (-) strand; PAM type: NRG; PAM sequence: AAG
taataaagaagaaaagagag

SEQ ID NO: 87779 - DNA, 20 bp, Artificial Sequence
  Description of Artificial Sequence: Synthetic oligonucleotide
  Target: LAMA2; (-) strand; PAM type: NRG; PAM sequence: GAG
gactaataaagaagaaaaga

SEQ ID NO: 87780 - DNA, 20 bp, Artificial Sequence
  Description of Artificial Sequence: Synthetic oligonucleotide
  Target: LAMA2; (-) strand; PAM type: NRG; PAM sequence: GAG
aagactaataaagaagaaaa

SEQ ID NO: 87781 - DNA, 20 bp, Artificial Sequence
  Description of Artificial Sequence: Synthetic oligonucleotide
  Target: LAMA2; (-) strand; PAM type: NRG; PAM sequence: AAG
gcaagactaataaagaagaa

SEQ ID NO: 87782 - DNA, 20 bp, Artificial Sequence
  Description of Artificial Sequence: Synthetic oligonucleotide
  Target: LAMA2; (-) strand; PAM type: NRG; PAM sequence: AAG
tgctagcaagactaataaag

SEQ ID NO: 87783 - DNA, 20 bp, Artificial Sequence
  Description of Artificial Sequence: Synthetic oligonucleotide
  Target: LAMA2; (-) strand; PAM type: NRG; PAM sequence: AAG
gactgctagcaagactaata

SEQ ID NO: 87784 - DNA, 20 bp, Artificial Sequence
  Description of Artificial Sequence: Synthetic oligonucleotide
  Target: LAMA2; (-) strand; PAM type: NRG; PAM sequence: AAG
aaaattgatagactgctagc

SEQ ID NO: 87785 - DNA, 20 bp, Artificial Sequence
  Description of Artificial Sequence: Synthetic oligonucleotide
  Target: LAMA2; (-) strand; PAM type: NRG; PAM sequence: TAG
caacaaaattgatagactgc

SEQ ID NO: 87786 - DNA, 20 bp, Artificial Sequence
  Description of Artificial Sequence: Synthetic oligonucleotide
  Target: LAMA2; (-) strand; PAM type: NRG; PAM sequence: TAG
gaaaagatcaacaaaattga

SEQ ID NO: 87787 - DNA, 20 bp, Artificial Sequence
  Description of Artificial Sequence: Synthetic oligonucleotide
  Target: LAMA2; (-) strand; PAM type: NRG; PAM sequence: AAG
ccaggagatgattttttgaa

SEQ ID NO: 87788 - DNA, 20 bp, Artificial Sequence
  Description of Artificial Sequence: Synthetic oligonucleotide
  Target: LAMA2; (-) strand; PAM type: NRG; PAM sequence: GAG
caacaaatcagtgaatccag

SEQ ID NO: 87789 - DNA, 20 bp, Artificial Sequence
  Description of Artificial Sequence: Synthetic oligonucleotide
  Target: LAMA2; (-) strand; PAM type: NRG; PAM sequence: AGG
ttcaacaaatcagtgaatcc

SEQ ID NO: 87790 - DNA, 20 bp, Artificial Sequence
  Description of Artificial Sequence: Synthetic oligonucleotide
  Target: LAMA2; (-) strand; PAM type: NRG; PAM sequence: CAG
cttcaacaaatcagtgaatc

SEQ ID NO: 87791 - DNA, 20 bp, Artificial Sequence
  Description of Artificial Sequence: Synthetic oligonucleotide
  Target: LAMA2; (-) strand; PAM type: NRG; PAM sequence: CAG
caaaaaacccttcaacaaat

SEQ ID NO: 87792 - DNA, 20 bp, Artificial Sequence
  Description of Artificial Sequence: Synthetic oligonucleotide
  Target: LAMA2; (-) strand; PAM type: NRG; PAM sequence: GAG
gagcagaactgaaggagata

SEQ ID NO: 87793 - DNA, 20 bp, Artificial Sequence
  Description of Artificial Sequence: Synthetic oligonucleotide
  Target: LAMA2; (-) strand; PAM type: NRG; PAM sequence: TAG
cagagcagaactgaaggaga

SEQ ID NO: 87794 - DNA, 20 bp, Artificial Sequence
  Description of Artificial Sequence: Synthetic oligonucleotide
  Target: LAMA2; (-) strand; PAM type: NRG; PAM sequence: GAG
agatcagagcagaactgaag

SEQ ID NO: 87795 - DNA, 20 bp, Artificial Sequence
  Description of Artificial Sequence: Synthetic oligonucleotide
  Target: LAMA2; (-) strand; PAM type: NRG; PAM sequence: AGG
taagatcagagcagaactga

SEQ ID NO: 87796 - DNA, 20 bp, Artificial Sequence
  Description of Artificial Sequence: Synthetic oligonucleotide
  Target: LAMA2; (-) strand; PAM type: NRG; PAM sequence: AAG
ctaagatcagagcagaactg

SEQ ID NO: 87797 - DNA, 20 bp, Artificial Sequence
  Description of Artificial Sequence: Synthetic oligonucleotide
  Target: LAMA2; (-) strand; PAM type: NRG; PAM sequence: CAG
agaaataactaagatcagag

SEQ ID NO: 87798 - DNA, 20 bp, Artificial Sequence
  Description of Artificial Sequence: Synthetic oligonucleotide
  Target: LAMA2; (-) strand; PAM type: NRG; PAM sequence: GAG
gcaagaaataactaagatca

SEQ ID NO: 87799 - DNA, 20 bp, Artificial Sequence
  Description of Artificial Sequence: Synthetic oligonucleotide
  Target: LAMA2; (-) strand; PAM type: NRG; PAM sequence: CAG
aggcaagaaataactaagat

SEQ ID NO: 87800 - DNA, 20 bp, Artificial Sequence
  Description of Artificial Sequence: Synthetic oligonucleotide
  Target: LAMA2; (-) strand; PAM type: NRG; PAM sequence: AAG
gcagaaggcaagaaataact

SEQ ID NO: 87801 - DNA, 20 bp, Artificial Sequence
  Description of Artificial Sequence: Synthetic oligonucleotide
  Target: LAMA2; (-) strand; PAM type: NRG; PAM sequence: AAG
ctcaaaagctagcagaaggc

SEQ ID NO: 87802 - DNA, 20 bp, Artificial Sequence
  Description of Artificial Sequence: Synthetic oligonucleotide
  Target: LAMA2; (-) strand; PAM type: NRG; PAM sequence: AGG
cacactcaaaagctagcaga

SEQ ID NO: 87803 - DNA, 20 bp, Artificial Sequence
  Description of Artificial Sequence: Synthetic oligonucleotide
  Target: LAMA2; (-) strand; PAM type: NRG; PAM sequence: AAG
acacactcaaaagctagcag

SEQ ID NO: 87804 - DNA, 20 bp, Artificial Sequence
  Description of Artificial Sequence: Synthetic oligonucleotide
  Target: LAMA2; (-) strand; PAM type: NRG; PAM sequence: CAG
caaacacactcaaaagctag

SEQ ID NO: 87805 - DNA, 20 bp, Artificial Sequence
  Description of Artificial Sequence: Synthetic oligonucleotide
  Target: LAMA2; (-) strand; PAM type: NRG; PAM sequence: TAG
gagcaaacacactcaaaagc

SEQ ID NO: 87806 - DNA, 20 bp, Artificial Sequence
  Description of Artificial Sequence: Synthetic oligonucleotide
  Target: LAMA2; (-) strand; PAM type: NRG; PAM sequence: AAG
gcaagagcaaacacactcaa

SEQ ID NO: 87807 - DNA, 20 bp, Artificial Sequence
  Description of Artificial Sequence: Synthetic oligonucleotide
  Target: LAMA2; (-) strand; PAM type: NRG; PAM sequence: GAG
taaaagaactagagaagcaa

SEQ ID NO: 87808 - DNA, 20 bp, Artificial Sequence
  Description of Artificial Sequence: Synthetic oligonucleotide
  Target: LAMA2; (-) strand; PAM type: NRG; PAM sequence: AAG
attaaaagaactagagaagc

SEQ ID NO: 87809 - DNA, 20 bp, Artificial Sequence
  Description of Artificial Sequence: Synthetic oligonucleotide
  Target: LAMA2; (-) strand; PAM type: NRG; PAM sequence: AAG
cacaattaaaagaactagag

SEQ ID NO: 87810 - DNA, 20 bp, Artificial Sequence
  Description of Artificial Sequence: Synthetic oligonucleotide
  Target: LAMA2; (-) strand; PAM type: NRG; PAM sequence: GAG
catcacaattaaaagaacta

SEQ ID NO: 87811 - DNA, 20 bp, Artificial Sequence
  Description of Artificial Sequence: Synthetic oligonucleotide
  Target: LAMA2; (-) strand; PAM type: NRG; PAM sequence: TAG
aacatcacaattaaaagaac

SEQ ID NO: 87812 - DNA, 20 bp, Artificial Sequence
  Description of Artificial Sequence: Synthetic oligonucleotide
  Target: LAMA2; (-) strand; PAM type: NRG; PAM sequence: AAG
caccctaacatcacaattaa

SEQ ID NO: 87813 - DNA, 20 bp, Artificial Sequence
  Description of Artificial Sequence: Synthetic oligonucleotide
  Target: LAMA2; (-) strand; PAM type: NRG; PAM sequence: AAG
gcccacaagagaaagcagga

SEQ ID NO: 87814 - DNA, 20 bp, Artificial Sequence
  Description of Artificial Sequence: Synthetic oligonucleotide
  Target: LAMA2; (-) strand; PAM type: NRG; PAM sequence: AGG
aaatgcccacaagagaaagc

SEQ ID NO: 87815 - DNA, 20 bp, Artificial Sequence
  Description of Artificial Sequence: Synthetic oligonucleotide
  Target: LAMA2; (-) strand; PAM type: NRG; PAM sequence: CAG
taaatgcccacaagagaaag

SEQ ID NO: 87816 - DNA, 20 bp, Artificial Sequence
  Description of Artificial Sequence: Synthetic oligonucleotide
  Target: LAMA2; (-) strand; PAM type: NRG; PAM sequence: AAG
cactaaatgcccacaagaga

SEQ ID NO: 87817 - DNA, 20 bp, Artificial Sequence
  Description of Artificial Sequence: Synthetic oligonucleotide
  Target: LAMA2; (-) strand; PAM type: NRG; PAM sequence: GAG
atagcactaaatgcccacaa

SEQ ID NO: 87818 - DNA, 20 bp, Artificial Sequence
  Description of Artificial Sequence: Synthetic oligonucleotide
  Target: LAMA2; (-) strand; PAM type: NRG; PAM sequence: AAG
ttatagcactaaatgcccac

SEQ ID NO: 87819 - DNA, 20 bp, Artificial Sequence
  Description of Artificial Sequence: Synthetic oligonucleotide
  Target: LAMA2; (-) strand; PAM type: NRG; PAM sequence: TAG
agtgtgtagagggaaattta

SEQ ID NO: 87820 - DNA, 20 bp, Artificial Sequence
  Description of Artificial Sequence: Synthetic oligonucleotide
  Target: LAMA2; (-) strand; PAM type: NRG; PAM sequence: GGG
catttaaagcagtgtgtaga

SEQ ID NO: 87821 - DNA, 20 bp, Artificial Sequence
  Description of Artificial Sequence: Synthetic oligonucleotide
  Target: LAMA2; (-) strand; PAM type: NRG; PAM sequence: AGG
acatttaaagcagtgtgtag

SEQ ID NO: 87822 - DNA, 20 bp, Artificial Sequence
  Description of Artificial Sequence: Synthetic oligonucleotide
  Target: LAMA2; (-) strand; PAM type: NRG; PAM sequence: GAG
cacatttaaagcagtgtgta

SEQ ID NO: 87823 - DNA, 20 bp, Artificial Sequence
  Description of Artificial Sequence: Synthetic oligonucleotide
  Target: LAMA2; (-) strand; PAM type: NRG; PAM sequence: TAG
gacacatttaaagcagtgtg

SEQ ID NO: 87824 - DNA, 20 bp, Artificial Sequence
  Description of Artificial Sequence: Synthetic oligonucleotide
  Target: LAMA2; (-) strand; PAM type: NRG; PAM sequence: CAG
tctctgggacacatttaaag

SEQ ID NO: 87825 - DNA, 20 bp, Artificial Sequence
  Description of Artificial Sequence: Synthetic oligonucleotide
  Target: LAMA2; (-) strand; PAM type: NRG; PAM sequence: AAG
gaatctctgggacacattta

SEQ ID NO: 87826 - DNA, 20 bp, Artificial Sequence
  Description of Artificial Sequence: Synthetic oligonucleotide
  Target: LAMA2; (-) strand; PAM type: NRG; PAM sequence: GGG
tacaacataccagaatctct

SEQ ID NO: 87827 - DNA, 20 bp, Artificial Sequence
  Description of Artificial Sequence: Synthetic oligonucleotide
  Target: LAMA2; (-) strand; PAM type: NRG; PAM sequence: TGG
atacaacataccagaatctc

SEQ ID NO: 87828 - DNA, 20 bp, Artificial Sequence
  Description of Artificial Sequence: Synthetic oligonucleotide
  Target: LAMA2; (-) strand; PAM type: NRG; PAM sequence: CAG
agaacaaagatacaacatac

SEQ ID NO: 87829 - DNA, 20 bp, Artificial Sequence
  Description of Artificial Sequence: Synthetic oligonucleotide
  Target: LAMA2; (-) strand; PAM type: NRG; PAM sequence: AAG
ctttgaaactaatgagaaca

SEQ ID NO: 87830 - DNA, 20 bp, Artificial Sequence
  Description of Artificial Sequence: Synthetic oligonucleotide
  Target: LAMA2; (-) strand; PAM type: NRG; PAM sequence: GAG
agatgttctttgaaactaat

SEQ ID NO: 87831 - DNA, 20 bp, Artificial Sequence
  Description of Artificial Sequence: Synthetic oligonucleotide
  Target: LAMA2; (-) strand; PAM type: NRG; PAM sequence: AAG
acgaaatgaaggctggaata

SEQ ID NO: 87832 - DNA, 20 bp, Artificial Sequence
  Description of Artificial Sequence: Synthetic oligonucleotide
  Target: LAMA2; (-) strand; PAM type: NRG; PAM sequence: TGG
gtatataacgaaatgaaggc

SEQ ID NO: 87833 - DNA, 20 bp, Artificial Sequence
  Description of Artificial Sequence: Synthetic oligonucleotide
  Target: LAMA2; (-) strand; PAM type: NRG; PAM sequence: AGG
ctgggtatataacgaaatga

SEQ ID NO: 87834 - DNA, 20 bp, Artificial Sequence
  Description of Artificial Sequence: Synthetic oligonucleotide
  Target: LAMA2; (-) strand; PAM type: NRG; PAM sequence: AAG
actgggtatataacgaaatg

SEQ ID NO: 87835 - DNA, 20 bp, Artificial Sequence
  Description of Artificial Sequence: Synthetic oligonucleotide
  Target: LAMA2; (-) strand; PAM type: NRG; PAM sequence: GGG
cctgttcctgaatgactact

SEQ ID NO: 87836 - DNA, 20 bp, Artificial Sequence
  Description of Artificial Sequence: Synthetic oligonucleotide
  Target: LAMA2; (-) strand; PAM type: NRG; PAM sequence: TGG
acctgttcctgaatgactac

SEQ ID NO: 87837 - DNA, 20 bp, Artificial Sequence
  Description of Artificial Sequence: Synthetic oligonucleotide
  Target: LAMA2; (-) strand; PAM type: NRG; PAM sequence: TGG
ctgaaaacggctcaactaca

SEQ ID NO: 87838 - DNA, 20 bp, Artificial Sequence
  Description of Artificial Sequence: Synthetic oligonucleotide
  Target: LAMA2; (-) strand; PAM type: NRG; PAM sequence: CGG
attaagaaactcactgaaaa

SEQ ID NO: 87839 - DNA, 20 bp, Artificial Sequence
  Description of Artificial Sequence: Synthetic oligonucleotide
  Target: LAMA2; (-) strand; PAM type: NRG; PAM sequence: AAG
tcaaactagaactcaggatt

SEQ ID NO: 87840 - DNA, 20 bp, Artificial Sequence
  Description of Artificial Sequence: Synthetic oligonucleotide
  Target: LAMA2; (-) strand; PAM type: NRG; PAM sequence: AGG
gtgcaatcaaactagaactc

SEQ ID NO: 87841 - DNA, 20 bp, Artificial Sequence
  Description of Artificial Sequence: Synthetic oligonucleotide
  Target: LAMA2; (-) strand; PAM type: NRG; PAM sequence: CAG
agtgcaatcaaactagaact

SEQ ID NO: 87842 - DNA, 20 bp, Artificial Sequence
  Description of Artificial Sequence: Synthetic oligonucleotide
  Target: LAMA2; (-) strand; PAM type: NRG; PAM sequence: TAG
agaccacagtgcaatcaaac

SEQ ID NO: 87843 - DNA, 20 bp, Artificial Sequence
  Description of Artificial Sequence: Synthetic oligonucleotide
  Target: LAMA2; (-) strand; PAM type: NRG; PAM sequence: CAG
acaaactgtctctcagacca

SEQ ID NO: 87844 - DNA, 20 bp, Artificial Sequence
  Description of Artificial Sequence: Synthetic oligonucleotide
  Target: LAMA2; (-) strand; PAM type: NRG; PAM sequence: CAG
aattataacaaactgtctct

SEQ ID NO: 87845 - DNA, 20 bp, Artificial Sequence
  Description of Artificial Sequence: Synthetic oligonucleotide
  Target: LAMA2; (-) strand; PAM type: NRG; PAM sequence: CAG
cctcagcaaatgtaaaagat

SEQ ID NO: 87846 - DNA, 20 bp, Artificial Sequence
  Description of Artificial Sequence: Synthetic oligonucleotide
  Target: LAMA2; (-) strand; PAM type: NRG; PAM sequence: AAG
gcactcctcagcaaatgtaa

SEQ ID NO: 87847 - DNA, 20 bp, Artificial Sequence
  Description of Artificial Sequence: Synthetic oligonucleotide
  Target: LAMA2; (-) strand; PAM type: NRG; PAM sequence: CAG
gttggaagtaaagcactcct

SEQ ID NO: 87848 - DNA, 20 bp, Artificial Sequence
  Description of Artificial Sequence: Synthetic oligonucleotide
  Target: LAMA2; (-) strand; PAM type: NRG; PAM sequence: AAG
tgaccacatagttggaagta

SEQ ID NO: 87849 - DNA, 20 bp, Artificial Sequence
  Description of Artificial Sequence: Synthetic oligonucleotide
  Target: LAMA2; (-) strand; PAM type: NRG; PAM sequence: AAG
aaaattgaccacatagttgg

SEQ ID NO: 87850 - DNA, 20 bp, Artificial Sequence
  Description of Artificial Sequence: Synthetic oligonucleotide
  Target: LAMA2; (-) strand; PAM type: NRG; PAM sequence: TGG
tccaaaattgaccacatagt

SEQ ID NO: 87851 - DNA, 20 bp, Artificial Sequence
  Description of Artificial Sequence: Synthetic oligonucleotide
  Target: LAMA2; (-) strand; PAM type: NRG; PAM sequence: TAG
ttattccaaaattgaccaca

SEQ ID NO: 87852 - DNA, 20 bp, Artificial Sequence
  Description of Artificial Sequence: Synthetic oligonucleotide
  Target: LAMA2; (-) strand; PAM type: NRG; PAM sequence: CAG
aacagaatatacattctgct

SEQ ID NO: 87853 - DNA, 20 bp, Artificial Sequence
  Description of Artificial Sequence: Synthetic oligonucleotide
  Target: LAMA2; (-) strand; PAM type: NRG; PAM sequence: CAG
aactctccaccccaaatcaa

SEQ ID NO: 87854 - DNA, 20 bp, Artificial Sequence
  Description of Artificial Sequence: Synthetic oligonucleotide
  Target: LAMA2; (-) strand; PAM type: NRG; PAM sequence: CAG
gtggacctaatagacatttg

SEQ ID NO: 87855 - DNA, 20 bp, Artificial Sequence
  Description of Artificial Sequence: Synthetic oligonucleotide
  Target: LAMA2; (-) strand; PAM type: NRG; PAM sequence: TAG
tctgcaccaagtggacctaa

SEQ ID NO: 87856 - DNA, 20 bp, Artificial Sequence
  Description of Artificial Sequence: Synthetic oligonucleotide
  Target: LAMA2; (-) strand; PAM type: NRG; PAM sequence: TGG
gaactcagctctgcaccaag

SEQ ID NO: 87857 - DNA, 20 bp, Artificial Sequence
  Description of Artificial Sequence: Synthetic oligonucleotide
  Target: LAMA2; (-) strand; PAM type: NRG; PAM sequence: AAG
attgaactcagctctgcacc

SEQ ID NO: 87858 - DNA, 20 bp, Artificial Sequence
  Description of Artificial Sequence: Synthetic oligonucleotide
  Target: LAMA2; (-) strand; PAM type: NRG; PAM sequence: CAG
ggatatccaggaattgaact

SEQ ID NO: 87859 - DNA, 20 bp, Artificial Sequence
  Description of Artificial Sequence: Synthetic oligonucleotide
  Target: LAMA2; (-) strand; PAM type: NRG; PAM sequence: AGG
gaaaggtaacaaggatatcc

SEQ ID NO: 87860 - DNA, 20 bp, Artificial Sequence
  Description of Artificial Sequence: Synthetic oligonucleotide
  Target: LAMA2; (-) strand; PAM type: NRG; PAM sequence: CAG
agaaaggtaacaaggatatc

SEQ ID NO: 87861 - DNA, 20 bp, Artificial Sequence
  Description of Artificial Sequence: Synthetic oligonucleotide
  Target: LAMA2; (-) strand; PAM type: NRG; PAM sequence: AGG
aacgagacagaaaggtaaca

SEQ ID NO: 87862 - DNA, 20 bp, Artificial Sequence
  Description of Artificial Sequence: Synthetic oligonucleotide
  Target: LAMA2; (-) strand; PAM type: NRG; PAM sequence: AAG
caacgagacagaaaggtaac

SEQ ID NO: 87863 - DNA, 20 bp, Artificial Sequence
  Description of Artificial Sequence: Synthetic oligonucleotide
  Target: LAMA2; (-) strand; PAM type: NRG; PAM sequence: AGG
gacagatcaacgagacagaa

SEQ ID NO: 87864 - DNA, 20 bp, Artificial Sequence
  Description of Artificial Sequence: Synthetic oligonucleotide
  Target: LAMA2; (-) strand; PAM type: NRG; PAM sequence: AAG
agacagatcaacgagacaga

SEQ ID NO: 87865 - DNA, 20 bp, Artificial Sequence
  Description of Artificial Sequence: Synthetic oligonucleotide
  Target: LAMA2; (-) strand; PAM type: NRG; PAM sequence: CAG
cattagacagatcaacgaga

SEQ ID NO: 87866 - DNA, 20 bp, Artificial Sequence
  Description of Artificial Sequence: Synthetic oligonucleotide
  Target: LAMA2; (-) strand; PAM type: NRG; PAM sequence: GAG
tcaacattagacagatcaac

SEQ ID NO: 87867 - DNA, 20 bp, Artificial Sequence
  Description of Artificial Sequence: Synthetic oligonucleotide
  Target: LAMA2; (-) strand; PAM type: NRG; PAM sequence: CAG
accccactgtcaacattaga

SEQ ID NO: 87868 - DNA, 20 bp, Artificial Sequence
  Description of Artificial Sequence: Synthetic oligonucleotide
  Target: LAMA2; (-) strand; PAM type: NRG; PAM sequence: TAG
taacaccccactgtcaacat

SEQ ID NO: 87869 - DNA, 20 bp, Artificial Sequence
  Description of Artificial Sequence: Synthetic oligonucleotide
  Target: LAMA2; (-) strand; PAM type: NRG; PAM sequence: GAG
ctcccacacaataataatgg

SEQ ID NO: 87870 - DNA, 20 bp, Artificial Sequence
  Description of Artificial Sequence: Synthetic oligonucleotide
  Target: LAMA2; (-) strand; PAM type: NRG; PAM sequence: GGG
gactcccacacaataataat

SEQ ID NO: 87871 - DNA, 20 bp, Artificial Sequence
  Description of Artificial Sequence: Synthetic oligonucleotide
  Target: LAMA2; (-) strand; PAM type: NRG; PAM sequence: TGG
agactcccacacaataataa

SEQ ID NO: 87872 - DNA, 20 bp, Artificial Sequence
  Description of Artificial Sequence: Synthetic oligonucleotide
  Target: LAMA2; (-) strand; PAM type: NRG; PAM sequence: TAG
tagagacctacaaagagact

SEQ ID NO: 87873 - DNA, 20 bp, Artificial Sequence
  Description of Artificial Sequence: Synthetic oligonucleotide
  Target: LAMA2; (-) strand; PAM type: NRG; PAM sequence: GAG
agtccttagagacctacaaa

SEQ ID NO: 87874 - DNA, 20 bp, Artificial Sequence
  Description of Artificial Sequence: Synthetic oligonucleotide
  Target: LAMA2; (-) strand; PAM type: NRG; PAM sequence: AAG
caagtccttagagacctaca

SEQ ID NO: 87875 - DNA, 20 bp, Artificial Sequence
  Description of Artificial Sequence: Synthetic oligonucleotide
  Target: LAMA2; (-) strand; PAM type: NRG; PAM sequence: GAG
attcataaagcaagtcctta

SEQ ID NO: 87876 - DNA, 20 bp, Artificial Sequence
  Description of Artificial Sequence: Synthetic oligonucleotide
  Target: LAMA2; (-) strand; PAM type: NRG; PAM sequence: TAG
agattcataaagcaagtcct

SEQ ID NO: 87877 - DNA, 20 bp, Artificial Sequence
  Description of Artificial Sequence: Synthetic oligonucleotide
  Target: LAMA2; (-) strand; PAM type: NRG; PAM sequence: AAG
agcactcagattcataaagc

SEQ ID NO: 87878 - DNA, 20 bp, Artificial Sequence
  Description of Artificial Sequence: Synthetic oligonucleotide
  Target: LAMA2; (-) strand; PAM type: NRG; PAM sequence: AAG
caggagcactcagattcata

SEQ ID NO: 87879 - DNA, 20 bp, Artificial Sequence
  Description of Artificial Sequence: Synthetic oligonucleotide
  Target: LAMA2; (-) strand; PAM type: NRG; PAM sequence: CAG
gcacccaatacaggagcact

SEQ ID NO: 87880 - DNA, 20 bp, Artificial Sequence
  Description of Artificial Sequence: Synthetic oligonucleotide
  Target: LAMA2; (-) strand; PAM type: NRG; PAM sequence: GAG
tatatatgcacccaatacag

SEQ ID NO: 87881 - DNA, 20 bp, Artificial Sequence
  Description of Artificial Sequence: Synthetic oligonucleotide
  Target: LAMA2; (-) strand; PAM type: NRG; PAM sequence: AGG
aatatatatgcacccaatac

SEQ ID NO: 87882 - DNA, 20 bp, Artificial Sequence
  Description of Artificial Sequence: Synthetic oligonucleotide
  Target: LAMA2; (-) strand; PAM type: NRG; PAM sequence: CAG
aaatatatatgcacccaata

SEQ ID NO: 87883 - DNA, 20 bp, Artificial Sequence
  Description of Artificial Sequence: Synthetic oligonucleotide
  Target: LAMA2; (-) strand; PAM type: NRG; PAM sequence: GAG
agggatcaattcaacaagaa

SEQ ID NO: 87884 - DNA, 20 bp, Artificial Sequence
  Description of Artificial Sequence: Synthetic oligonucleotide
  Target: LAMA2; (-) strand; PAM type: NRG; PAM sequence: AAG
aaagggatcaattcaacaag

SEQ ID NO: 87885 - DNA, 20 bp, Artificial Sequence
  Description of Artificial Sequence: Synthetic oligonucleotide
  Target: LAMA2; (-) strand; PAM type: NRG; PAM sequence: AAG
ggtaaagggatcaattcaac

SEQ ID NO: 87886 - DNA, 20 bp, Artificial Sequence
  Description of Artificial Sequence: Synthetic oligonucleotide
  Target: LAMA2; (-) strand; PAM type: NRG; PAM sequence: GGG
ggccattacataatggtaaa

SEQ ID NO: 87887 - DNA, 20 bp, Artificial Sequence
  Description of Artificial Sequence: Synthetic oligonucleotide
  Target: LAMA2; (-) strand; PAM type: NRG; PAM sequence: AGG
aggccattacataatggtaa

SEQ ID NO: 87888 - DNA, 20 bp, Artificial Sequence
  Description of Artificial Sequence: Synthetic oligonucleotide
  Target: LAMA2; (-) strand; PAM type: NRG; PAM sequence: AAG
aaggccattacataatggta

SEQ ID NO: 87889 - DNA, 20 bp, Artificial Sequence
  Description of Artificial Sequence: Synthetic oligonucleotide
  Target: LAMA2; (-) strand; PAM type: NRG; PAM sequence: TGG
caaagaaggccattacataa

SEQ ID NO: 87890 - DNA, 20 bp, Artificial Sequence
  Description of Artificial Sequence: Synthetic oligonucleotide
  Target: LAMA2; (-) strand; PAM type: NRG; PAM sequence: AGG
aagatcaaaagagacaaaga

SEQ ID NO: 87891 - DNA, 20 bp, Artificial Sequence
  Description of Artificial Sequence: Synthetic oligonucleotide
  Target: LAMA2; (-) strand; PAM type: NRG; PAM sequence: AAG
aaagatcaaaagagacaaag

SEQ ID NO: 87892 - DNA, 20 bp, Artificial Sequence
  Description of Artificial Sequence: Synthetic oligonucleotide
  Target: LAMA2; (-) strand; PAM type: NRG; PAM sequence: AAG
aacaaagatcaaaagagaca

SEQ ID NO: 87893 - DNA, 20 bp, Artificial Sequence
  Description of Artificial Sequence: Synthetic oligonucleotide
  Target: LAMA2; (-) strand; PAM type: NRG; PAM sequence: GAG
taaaccaacaaagatcaaaa

SEQ ID NO: 87894 - DNA, 20 bp, Artificial Sequence
  Description of Artificial Sequence: Synthetic oligonucleotide
  Target: LAMA2; (-) strand; PAM type: NRG; PAM sequence: AAG
attaaaccaacaaagatcaa

SEQ ID NO: 87895 - DNA, 20 bp, Artificial Sequence
  Description of Artificial Sequence: Synthetic oligonucleotide
  Target: LAMA2; (-) strand; PAM type: NRG; PAM sequence: AAG
aaacagacattaaaccaaca

SEQ ID NO: 87896 - DNA, 20 bp, Artificial Sequence
  Description of Artificial Sequence: Synthetic oligonucleotide
  Target: LAMA2; (-) strand; PAM type: NRG; PAM sequence: CAG
aaacctagtctctgataaaa

SEQ ID NO: 87897 - DNA, 20 bp, Artificial Sequence
  Description of Artificial Sequence: Synthetic oligonucleotide
  Target: LAMA2; (-) strand; PAM type: NRG; PAM sequence: TAG
aaaggcaggggttgcaaacc

SEQ ID NO: 87898 - DNA, 20 bp, Artificial Sequence
  Description of Artificial Sequence: Synthetic oligonucleotide
  Target: LAMA2; (-) strand; PAM type: NRG; PAM sequence: GGG
tagaaaacaaaaaaaggcag

SEQ ID NO: 87899 - DNA, 20 bp, Artificial Sequence
  Description of Artificial Sequence: Synthetic oligonucleotide
  Target: LAMA2; (-) strand; PAM type: NRG; PAM sequence: GGG
atagaaaacaaaaaaaggca

SEQ ID NO: 87900 - DNA, 20 bp, Artificial Sequence
  Description of Artificial Sequence: Synthetic oligonucleotide
  Target: LAMA2; (-) strand; PAM type: NRG; PAM sequence: AGG
aatagaaaacaaaaaaaggc

SEQ ID NO: 87901 - DNA, 20 bp, Artificial Sequence
  Description of Artificial Sequence: Synthetic oligonucleotide
  Target: LAMA2; (-) strand; PAM type: NRG; PAM sequence: CAG
aaatagaaaacaaaaaaagg

SEQ ID NO: 87902 - DNA, 20 bp, Artificial Sequence
  Description of Artificial Sequence: Synthetic oligonucleotide
  Target: LAMA2; (-) strand; PAM type: NRG; PAM sequence: AGG
aggaaatagaaaacaaaaaa

SEQ ID NO: 87903 - DNA, 20 bp, Artificial Sequence
  Description of Artificial Sequence: Synthetic oligonucleotide
  Target: LAMA2; (-) strand; PAM type: NRG; PAM sequence: AAG
aaggaaatagaaaacaaaaa

SEQ ID NO: 87904 - DNA, 20 bp, Artificial Sequence
  Description of Artificial Sequence: Synthetic oligonucleotide
  Target: LAMA2; (-) strand; PAM type: NRG; PAM sequence: TAG
aggaagatctaccaaggaaa

SEQ ID NO: 87905 - DNA, 20 bp, Artificial Sequence
  Description of Artificial Sequence: Synthetic oligonucleotide
  Target: LAMA2; (-) strand; PAM type: NRG; PAM sequence: AGG
ggatggaggaagatctacca

SEQ ID NO: 87906 - DNA, 20 bp, Artificial Sequence
  Description of Artificial Sequence: Synthetic oligonucleotide
  Target: LAMA2; (-) strand; PAM type: NRG; PAM sequence: AAG
gggatggaggaagatctacc

SEQ ID NO: 87907 - DNA, 20 bp, Artificial Sequence
  Description of Artificial Sequence: Synthetic oligonucleotide
  Target: LAMA2; (-) strand; PAM type: NRG; PAM sequence: AAG
tcaaaataaagggatggagg

SEQ ID NO: 87908 - DNA, 20 bp, Artificial Sequence
  Description of Artificial Sequence: Synthetic oligonucleotide
  Target: LAMA2; (-) strand; PAM type: NRG; PAM sequence: AGG
ggctcaaaataaagggatgg

SEQ ID NO: 87909 - DNA, 20 bp, Artificial Sequence
  Description of Artificial Sequence: Synthetic oligonucleotide
  Target: LAMA2; (-) strand; PAM type: NRG; PAM sequence: GAG
aggctcaaaataaagggatg

SEQ ID NO: 87910 - DNA, 20 bp, Artificial Sequence
  Description of Artificial Sequence: Synthetic oligonucleotide
  Target: LAMA2; (-) strand; PAM type: NRG; PAM sequence: TGG
acaggctcaaaataaaggga

SEQ ID NO: 87911 - DNA, 20 bp, Artificial Sequence
  Description of Artificial Sequence: Synthetic oligonucleotide
  Target: LAMA2; (-) strand; PAM type: NRG; PAM sequence: GGG
acacacaggctcaaaataaa

SEQ ID NO: 87912 - DNA, 20 bp, Artificial Sequence
  Description of Artificial Sequence: Synthetic oligonucleotide
  Target: LAMA2; (-) strand; PAM type: NRG; PAM sequence: AGG
cacacacaggctcaaaataa

SEQ ID NO: 87913 - DNA, 20 bp, Artificial Sequence
  Description of Artificial Sequence: Synthetic oligonucleotide
  Target: LAMA2; (-) strand; PAM type: NRG; PAM sequence: AAG
acacacacaggctcaaaata

SEQ ID NO: 87914 - DNA, 20 bp, Artificial Sequence
  Description of Artificial Sequence: Synthetic oligonucleotide
  Target: LAMA2; (-) strand; PAM type: NRG; PAM sequence: AGG
tcatgtgcagagacacacac

SEQ ID NO: 87915 - DNA, 20 bp, Artificial Sequence
  Description of Artificial Sequence: Synthetic oligonucleotide
  Target: LAMA2; (-) strand; PAM type: NRG; PAM sequence: CAG
ctcatgtgcagagacacaca

SEQ ID NO: 87916 - DNA, 20 bp, Artificial Sequence
  Description of Artificial Sequence: Synthetic oligonucleotide
  Target: LAMA2; (-) strand; PAM type: NRG; PAM sequence: GAG
agagacccatctcatgtgca

SEQ ID NO: 87917 - DNA, 20 bp, Artificial Sequence
  Description of Artificial Sequence: Synthetic oligonucleotide
  Target: LAMA2; (-) strand; PAM type: NRG; PAM sequence: CAG
caagagacccatctcatgtg

SEQ ID NO: 87918 - DNA, 20 bp, Artificial Sequence
  Description of Artificial Sequence: Synthetic oligonucleotide
  Target: LAMA2; (-) strand; PAM type: NRG; PAM sequence: GAG
catcagtgtgctgtattcaa

SEQ ID NO: 87919 - DNA, 20 bp, Artificial Sequence
  Description of Artificial Sequence: Synthetic oligonucleotide
  Target: LAMA2; (-) strand; PAM type: NRG; PAM sequence: AAG
cccatcagtgtgctgtattc

SEQ ID NO: 87920 - DNA, 20 bp, Artificial Sequence
  Description of Artificial Sequence: Synthetic oligonucleotide
  Target: LAMA2; (-) strand; PAM type: NRG; PAM sequence: CAG
gataaagactcaagacccat

SEQ ID NO: 87921 - DNA, 20 bp, Artificial Sequence
  Description of Artificial Sequence: Synthetic oligonucleotide
  Target: LAMA2; (-) strand; PAM type: NRG; PAM sequence: AAG
ggcaaattggataaagactc

SEQ ID NO: 87922 - DNA, 20 bp, Artificial Sequence
  Description of Artificial Sequence: Synthetic oligonucleotide
  Target: LAMA2; (-) strand; PAM type: NRG; PAM sequence: AAG
acagactggcaaattggata

SEQ ID NO: 87923 - DNA, 20 bp, Artificial Sequence
  Description of Artificial Sequence: Synthetic oligonucleotide
  Target: LAMA2; (-) strand; PAM type: NRG; PAM sequence: TGG
aaagacacagactggcaaat

SEQ ID NO: 87924 - DNA, 20 bp, Artificial Sequence
  Description of Artificial Sequence: Synthetic oligonucleotide
  Target: LAMA2; (-) strand; PAM type: NRG; PAM sequence: TGG
tctaattaaaagacacagac

SEQ ID NO: 87925 - DNA, 20 bp, Artificial Sequence
  Description of Artificial Sequence: Synthetic oligonucleotide
  Target: LAMA2; (-) strand; PAM type: NRG; PAM sequence: CAG
aatgctctaattaaaagaca

SEQ ID NO: 87926 - DNA, 20 bp, Artificial Sequence
  Description of Artificial Sequence: Synthetic oligonucleotide
  Target: LAMA2; (-) strand; PAM type: NRG; PAM sequence: AAG
gggctaaatgctctaattaa

SEQ ID NO: 87927 - DNA, 20 bp, Artificial Sequence
  Description of Artificial Sequence: Synthetic oligonucleotide
  Target: LAMA2; (-) strand; PAM type: NRG; PAM sequence: GGG
tattaaccttaaacgtaaat

SEQ ID NO: 87928 - DNA, 20 bp, Artificial Sequence
  Description of Artificial Sequence: Synthetic oligonucleotide
  Target: LAMA2; (-) strand; PAM type: NRG; PAM sequence: TGG
atattaaccttaaacgtaaa

SEQ ID NO: 87929 - DNA, 20 bp, Artificial Sequence
  Description of Artificial Sequence: Synthetic oligonucleotide
  Target: LAMA2; (-) strand; PAM type: NRG; PAM sequence: AGG
ccagctaacatcataatgac

SEQ ID NO: 87930 - DNA, 20 bp, Artificial Sequence
  Description of Artificial Sequence: Synthetic oligonucleotide
  Target: LAMA2; (-) strand; PAM type: NRG; PAM sequence: CAG
accagctaacatcataatga

SEQ ID NO: 87931 - DNA, 20 bp, Artificial Sequence
  Description of Artificial Sequence: Synthetic oligonucleotide
  Target: LAMA2; (-) strand; PAM type: NRG; PAM sequence: CAG
caactaacgagcaaaataac

SEQ ID NO: 87932 - DNA, 20 bp, Artificial Sequence
  Description of Artificial Sequence: Synthetic oligonucleotide
  Target: LAMA2; (-) strand; PAM type: NRG; PAM sequence: GAG
aagaaactgaaacaactaac

SEQ ID NO: 87933 - DNA, 20 bp, Artificial Sequence
  Description of Artificial Sequence: Synthetic oligonucleotide
  Target: LAMA2; (-) strand; PAM type: NRG; PAM sequence: AAG
taaagaccatcgatgctagg

SEQ ID NO: 87934 - DNA, 20 bp, Artificial Sequence
  Description of Artificial Sequence: Synthetic oligonucleotide
  Target: LAMA2; (-) strand; PAM type: NRG; PAM sequence: AGG
ttgtaaagaccatcgatgct

SEQ ID NO: 87935 - DNA, 20 bp, Artificial Sequence
  Description of Artificial Sequence: Synthetic oligonucleotide
  Target: LAMA2; (-) strand; PAM type: NRG; PAM sequence: TAG
attgtaaagaccatcgatgc

SEQ ID NO: 87936 - DNA, 20 bp, Artificial Sequence
  Description of Artificial Sequence: Synthetic oligonucleotide
  Target: LAMA2; (-) strand; PAM type: NRG; PAM sequence: AAG
caaaaacatgccaaattgta

SEQ ID NO: 87937 - DNA, 20 bp, Artificial Sequence
  Description of Artificial Sequence: Synthetic oligonucleotide
  Target: LAMA2; (-) strand; PAM type: NRG; PAM sequence: CAG
tggaaaggaacaaccagtac

SEQ ID NO: 87938 - DNA, 20 bp, Artificial Sequence
  Description of Artificial Sequence: Synthetic oligonucleotide
  Target: LAMA2; (-) strand; PAM type: NRG; PAM sequence: CAG
taaacatggaaaggaacaac

SEQ ID NO: 87939 - DNA, 20 bp, Artificial Sequence
  Description of Artificial Sequence: Synthetic oligonucleotide
  Target: LAMA2; (-) strand; PAM type: NRG; PAM sequence: AGG
aggaagtgctaaacatggaa

SEQ ID NO: 87940 - DNA, 20 bp, Artificial Sequence
  Description of Artificial Sequence: Synthetic oligonucleotide
  Target: LAMA2; (-) strand; PAM type: NRG; PAM sequence: AAG
aaggaagtgctaaacatgga

SEQ ID NO: 87941 - DNA, 20 bp, Artificial Sequence
  Description of Artificial Sequence: Synthetic oligonucleotide
  Target: LAMA2; (-) strand; PAM type: NRG; PAM sequence: TGG
cctgaaggaagtgctaaaca

SEQ ID NO: 87942 - DNA, 20 bp, Artificial Sequence
  Description of Artificial Sequence: Synthetic oligonucleotide
  Target: LAMA2; (-) strand; PAM type: NRG; PAM sequence: AAG
cctaaaagagctcctgaagg

SEQ ID NO: 87943 - DNA, 20 bp, Artificial Sequence
  Description of Artificial Sequence: Synthetic oligonucleotide
  Target: LAMA2; (-) strand; PAM type: NRG; PAM sequence: AGG
tgccctaaaagagctcctga

SEQ ID NO: 87944 - DNA, 20 bp, Artificial Sequence
  Description of Artificial Sequence: Synthetic oligonucleotide
  Target: LAMA2; (-) strand; PAM type: NRG; PAM sequence: AAG
ctgccctaaaagagctcctg

SEQ ID NO: 87945 - DNA, 20 bp, Artificial Sequence
  Description of Artificial Sequence: Synthetic oligonucleotide
  Target: LAMA2; (-) strand; PAM type: NRG; PAM sequence: GAG
ccaccaggcctgccctaaaa

SEQ ID NO: 87946 - DNA, 20 bp, Artificial Sequence
  Description of Artificial Sequence: Synthetic oligonucleotide
  Target: LAMA2; (-) strand; PAM type: NRG; PAM sequence: AAG
caccaccaggcctgccctaa

SEQ ID NO: 87947 - DNA, 20 bp, Artificial Sequence
  Description of Artificial Sequence: Synthetic oligonucleotide
  Target: LAMA2; (-) strand; PAM type: NRG; PAM sequence: AGG
tgagagattttgtcaccacc

SEQ ID NO: 87948 - DNA, 20 bp, Artificial Sequence
  Description of Artificial Sequence: Synthetic oligonucleotide
  Target: LAMA2; (-) strand; PAM type: NRG; PAM sequence: CAG
ctgagagattttgtcaccac

SEQ ID NO: 87949 - DNA, 20 bp, Artificial Sequence
  Description of Artificial Sequence: Synthetic oligonucleotide
  Target: LAMA2; (-) strand; PAM type: NRG; PAM sequence: GAG
tacagacaagcaaatgctga

SEQ ID NO: 87950 - DNA, 20 bp, Artificial Sequence
  Description of Artificial Sequence: Synthetic oligonucleotide
  Target: LAMA2; (-) strand; PAM type: NRG; PAM sequence: GAG
tttacagacaagcaaatgct

SEQ ID NO: 87951 - DNA, 20 bp, Artificial Sequence
  Description of Artificial Sequence: Synthetic oligonucleotide
  Target: LAMA2; (-) strand; PAM type: NRG; PAM sequence: AAG
aaataaaatactttacagac

SEQ ID NO: 87952 - DNA, 20 bp, Artificial Sequence
  Description of Artificial Sequence: Synthetic oligonucleotide
  Target: LAMA2; (-) strand; PAM type: NRG; PAM sequence: CAG
aggagaaataaaatacttta

SEQ ID NO: 87953 - DNA, 20 bp, Artificial Sequence
  Description of Artificial Sequence: Synthetic oligonucleotide
  Target: LAMA2; (-) strand; PAM type: NRG; PAM sequence: GAG
actaagcttcataagtgaag

SEQ ID NO: 87954 - DNA, 20 bp, Artificial Sequence
  Description of Artificial Sequence: Synthetic oligonucleotide
  Target: LAMA2; (-) strand; PAM type: NRG; PAM sequence: AGG
aaactaagcttcataagtga

SEQ ID NO: 87955 - DNA, 20 bp, Artificial Sequence
  Description of Artificial Sequence: Synthetic oligonucleotide
  Target: LAMA2; (-) strand; PAM type: NRG; PAM sequence: AAG
caaactaagcttcataagtg

SEQ ID NO: 87956 - DNA, 20 bp, Artificial Sequence
  Description of Artificial Sequence: Synthetic oligonucleotide
  Target: LAMA2; (-) strand; PAM type: NRG; PAM sequence: AAG
ccagccaaactaagcttcat

SEQ ID NO: 87957 - DNA, 20 bp, Artificial Sequence
  Description of Artificial Sequence: Synthetic oligonucleotide
  Target: LAMA2; (-) strand; PAM type: NRG; PAM sequence: AAG
atttcatatccagccaaact

SEQ ID NO: 87958 - DNA, 20 bp, Artificial Sequence
  Description of Artificial Sequence: Synthetic oligonucleotide
  Target: LAMA2; (-) strand; PAM type: NRG; PAM sequence: CAG
tcaacccagaatttcatatc

SEQ ID NO: 87959 - DNA, 20 bp, Artificial Sequence
  Description of Artificial Sequence: Synthetic oligonucleotide
  Target: LAMA2; (-) strand; PAM type: NRG; PAM sequence: CAG
aaagaaaagaattttcaacc

SEQ ID NO: 87960 - DNA, 20 bp, Artificial Sequence
  Description of Artificial Sequence: Synthetic oligonucleotide
  Target: LAMA2; (-) strand; PAM type: NRG; PAM sequence: AAG
tattcaacattcttaaagaa

SEQ ID NO: 87961 - DNA, 20 bp, Artificial Sequence
  Description of Artificial Sequence: Synthetic oligonucleotide
  Target: LAMA2; (-) strand; PAM type: NRG; PAM sequence: AAG
gccaatattcaacattctta

SEQ ID NO: 87962 - DNA, 20 bp, Artificial Sequence
  Description of Artificial Sequence: Synthetic oligonucleotide
  Target: LAMA2; (-) strand; PAM type: NRG; PAM sequence: GGG
tacaagccggaagagagtgg

SEQ ID NO: 87963 - DNA, 20 bp, Artificial Sequence
  Description of Artificial Sequence: Synthetic oligonucleotide
  Target: LAMA2; (-) strand; PAM type: NRG; PAM sequence: GGG
ctacaagccggaagagagtg

SEQ ID NO: 87964 - DNA, 20 bp, Artificial Sequence
  Description of Artificial Sequence: Synthetic oligonucleotide
  Target: LAMA2; (-) strand; PAM type: NRG; PAM sequence: GGG
tctacaagccggaagagagt

SEQ ID NO: 87965 - DNA, 20 bp, Artificial Sequence
  Description of Artificial Sequence: Synthetic oligonucleotide
  Target: LAMA2; (-) strand; PAM type: NRG; PAM sequence: TGG
ctctacaagccggaagagag

SEQ ID NO: 87966 - DNA, 20 bp, Artificial Sequence
  Description of Artificial Sequence: Synthetic oligonucleotide
  Target: LAMA2; (-) strand; PAM type: NRG; PAM sequence: GAG
aaactctacaagccggaaga

SEQ ID NO: 87967 - DNA, 20 bp, Artificial Sequence
  Description of Artificial Sequence: Synthetic oligonucleotide
  Target: LAMA2; (-) strand; PAM type: NRG; PAM sequence: GAG
agaaactctacaagccggaa

SEQ ID NO: 87968 - DNA, 20 bp, Artificial Sequence
  Description of Artificial Sequence: Synthetic oligonucleotide
  Target: LAMA2; (-) strand; PAM type: NRG; PAM sequence: AAG
gcagaaactctacaagccgg

SEQ ID NO: 87969 - DNA, 20 bp, Artificial Sequence
  Description of Artificial Sequence: Synthetic oligonucleotide
  Target: LAMA2; (-) strand; PAM type: NRG; PAM sequence: CGG
tcggcagaaactctacaagc

SEQ ID NO: 87970 - DNA, 20 bp, Artificial Sequence
  Description of Artificial Sequence: Synthetic oligonucleotide
  Target: LAMA2; (-) strand; PAM type: NRG; PAM sequence: AAG
tcgctcggcagaaactctac

SEQ ID NO: 87971 - DNA, 20 bp, Artificial Sequence
  Description of Artificial Sequence: Synthetic oligonucleotide
  Target: LAMA2; (-) strand; PAM type: NRG; PAM sequence: CAG
actaacagcagatcgctcgg

SEQ ID NO: 87972 - DNA, 20 bp, Artificial Sequence
  Description of Artificial Sequence: Synthetic oligonucleotide
  Target: LAMA2; (-) strand; PAM type: NRG; PAM sequence: CGG
cagactaacagcagatcgct

SEQ ID NO: 87973 - DNA, 20 bp, Artificial Sequence
  Description of Artificial Sequence: Synthetic oligonucleotide
  Target: LAMA2; (-) strand; PAM type: NRG; PAM sequence: CAG
gaagcccatcagactaacag

SEQ ID NO: 87974 - DNA, 20 bp, Artificial Sequence
  Description of Artificial Sequence: Synthetic oligonucleotide
  Target: LAMA2; (-) strand; PAM type: NRG; PAM sequence: CAG
agggaagcccatcagactaa

SEQ ID NO: 87975 - DNA, 20 bp, Artificial Sequence
  Description of Artificial Sequence: Synthetic oligonucleotide
  Target: LAMA2; (-) strand; PAM type: NRG; PAM sequence: CAG
accctcaaagggaagcccat

SEQ ID NO: 87976 - DNA, 20 bp, Artificial Sequence
  Description of Artificial Sequence: Synthetic oligonucleotide
  Target: LAMA2; (-) strand; PAM type: NRG; PAM sequence: AAG
gtcgggttaccctcaaaggg

SEQ ID NO: 87977 - DNA, 20 bp, Artificial Sequence
  Description of Artificial Sequence: Synthetic oligonucleotide
  Target: LAMA2; (-) strand; PAM type: NRG; PAM sequence: GGG
aaggtcgggttaccctcaaa

SEQ ID NO: 87978 - DNA, 20 bp, Artificial Sequence
  Description of Artificial Sequence: Synthetic oligonucleotide
  Target: LAMA2; (-) strand; PAM type: NRG; PAM sequence: AGG
aaaggtcgggttaccctcaa

SEQ ID NO: 87979 - DNA, 20 bp, Artificial Sequence
  Description of Artificial Sequence: Synthetic oligonucleotide
  Target: LAMA2; (-) strand; PAM type: NRG; PAM sequence: AAG
gaaaggtcgggttaccctca

SEQ ID NO: 87980 - DNA, 20 bp, Artificial Sequence
  Description of Artificial Sequence: Synthetic oligonucleotide
  Target: LAMA2; (-) strand; PAM type: NRG; PAM sequence: GGG
ggcagccagagagaaaggtc

SEQ ID NO: 87981 - DNA, 20 bp, Artificial Sequence
  Description of Artificial Sequence: Synthetic oligonucleotide
  Target: LAMA2; (-) strand; PAM type: NRG; PAM sequence: CGG
gggcagccagagagaaaggt

SEQ ID NO: 87982 - DNA, 20 bp, Artificial Sequence
  Description of Artificial Sequence: Synthetic oligonucleotide
  Target: LAMA2; (-) strand; PAM type: NRG; PAM sequence: AGG
ttaagggcagccagagagaa

SEQ ID NO: 87983 - DNA, 20 bp, Artificial Sequence
  Description of Artificial Sequence: Synthetic oligonucleotide
  Target: LAMA2; (-) strand; PAM type: NRG; PAM sequence: AAG
gttaagggcagccagagaga

SEQ ID NO: 87984 - DNA, 20 bp, Artificial Sequence
  Description of Artificial Sequence: Synthetic oligonucleotide
  Target: LAMA2; (-) strand; PAM type: NRG; PAM sequence: GAG
aaatgttaagggcagccaga

SEQ ID NO: 87985 - DNA, 20 bp, Artificial Sequence
  Description of Artificial Sequence: Synthetic oligonucleotide
  Target: LAMA2; (-) strand; PAM type: NRG; PAM sequence: GAG
aaaaatgttaagggcagcca

SEQ ID NO: 87986 - DNA, 20 bp, Artificial Sequence
  Description of Artificial Sequence: Synthetic oligonucleotide
  Target: LAMA2; (-) strand; PAM type: NRG; PAM sequence: CAG
gaaaaaatgttaagggcagc

SEQ ID NO: 87987 - DNA, 20 bp, Artificial Sequence
  Description of Artificial Sequence: Synthetic oligonucleotide
  Target: LAMA2; (-) strand; PAM type: NRG; PAM sequence: CAG
gaaggaaaaaatgttaaggg

SEQ ID NO: 87988 - DNA, 20 bp, Artificial Sequence
  Description of Artificial Sequence: Synthetic oligonucleotide
  Target: LAMA2; (-) strand; PAM type: NRG; PAM sequence: GGG
aatgaaggaaaaaatgttaa

SEQ ID NO: 87989 - DNA, 20 bp, Artificial Sequence
  Description of Artificial Sequence: Synthetic oligonucleotide
  Target: LAMA2; (-) strand; PAM type: NRG; PAM sequence: AGG
aaatgaaggaaaaaatgtta

SEQ ID NO: 87990 - DNA, 20 bp, Artificial Sequence
  Description of Artificial Sequence: Synthetic oligonucleotide
  Target: LAMA2; (-) strand; PAM type: NRG; PAM sequence: AAG
gaaatgaaggaaaaaatgtt

SEQ ID NO: 87991 - DNA, 20 bp, Artificial Sequence
  Description of Artificial Sequence: Synthetic oligonucleotide
  Target: LAMA2; (-) strand; PAM type: NRG; PAM sequence: AGG
attcaccaaagttgaaatga

SEQ ID NO: 87992 - DNA, 20 bp, Artificial Sequence
  Description of Artificial Sequence: Synthetic oligonucleotide
  Target: LAMA2; (-) strand; PAM type: NRG; PAM sequence: AAG
gattcaccaaagttgaaatg

SEQ ID NO: 87993 - DNA, 20 bp, Artificial Sequence
  Description of Artificial Sequence: Synthetic oligonucleotide
  Target: LAMA2; (-) strand; PAM type: NRG; PAM sequence: AAG
cataattgtcagattcacca

SEQ ID NO: 87994 - DNA, 20 bp, Artificial Sequence
  Description of Artificial Sequence: Synthetic oligonucleotide
  Target: LAMA2; (-) strand; PAM type: NRG; PAM sequence: CAG
acttcaagacacataattgt

SEQ ID NO: 87995 - DNA, 20 bp, Artificial Sequence
  Description of Artificial Sequence: Synthetic oligonucleotide
  Target: LAMA2; (-) strand; PAM type: NRG; PAM sequence: AAG
tcctcgagaagagcaacttc

SEQ ID NO: 87996 - DNA, 20 bp, Artificial Sequence
  Description of Artificial Sequence: Synthetic oligonucleotide
  Target: LAMA2; (-) strand; PAM type: NRG; PAM sequence: GAG
acaaagatactcctcgagaa

SEQ ID NO: 87997 - DNA, 20 bp, Artificial Sequence
  Description of Artificial Sequence: Synthetic oligonucleotide
  Target: LAMA2; (-) strand; PAM type: NRG; PAM sequence: AAG
ccacaaagatactcctcgag

SEQ ID NO: 87998 - DNA, 20 bp, Artificial Sequence
  Description of Artificial Sequence: Synthetic oligonucleotide
  Target: LAMA2; (-) strand; PAM type: NRG; PAM sequence: GAG
atgccacaaagatactcctc

SEQ ID NO: 87999 - DNA, 20 bp, Artificial Sequence
  Description of Artificial Sequence: Synthetic oligonucleotide
  Target: LAMA2; (-) strand; PAM type: NRG; PAM sequence: AAG
gaaacacagagaatgccaca

SEQ ID NO: 88000 - DNA, 20 bp, Artificial Sequence
  Description of Artificial Sequence: Synthetic oligonucleotide
  Target: LAMA2; (-) strand; PAM type: NRG; PAM sequence: GAG
attcaaattcaggaaacaca

SEQ ID NO: 88001 - DNA, 20 bp, Artificial Sequence
  Description of Artificial Sequence: Synthetic oligonucleotide
  Target: LAMA2; (-) strand; PAM type: NRG; PAM sequence: CAG
acattcaaattcaggaaaca

SEQ ID NO: 88002 - DNA, 20 bp, Artificial Sequence
  Description of Artificial Sequence: Synthetic oligonucleotide
  Target: LAMA2; (-) strand; PAM type: NRG; PAM sequence: AGG
gcaggccaacattcaaattc

SEQ ID NO: 88003 - DNA, 20 bp, Artificial Sequence
  Description of Artificial Sequence: Synthetic oligonucleotide
  Target: LAMA2; (-) strand; PAM type: NRG; PAM sequence: CAG
ggcaggccaacattcaaatt

SEQ ID NO: 88004 - DNA, 20 bp, Artificial Sequence
  Description of Artificial Sequence: Synthetic oligonucleotide
  Target: LAMA2; (-) strand; PAM type: NRG; PAM sequence: AGG
cttccccaacctagcaaggc

SEQ ID NO: 88005 - DNA, 20 bp, Artificial Sequence
  Description of Artificial Sequence: Synthetic oligonucleotide
  Target: LAMA2; (-) strand; PAM type: NRG; PAM sequence: CAG
acttccccaacctagcaagg

SEQ ID NO: 88006 - DNA, 20 bp, Artificial Sequence
  Description of Artificial Sequence: Synthetic oligonucleotide
  Target: LAMA2; (-) strand; PAM type: NRG; PAM sequence: AGG
agaacttccccaacctagca

SEQ ID NO: 88007 - DNA, 20 bp, Artificial Sequence
  Description of Artificial Sequence: Synthetic oligonucleotide
  Target: LAMA2; (-) strand; PAM type: NRG; PAM sequence: AAG
gagaacttccccaacctagc

SEQ ID NO: 88008 - DNA, 20 bp, Artificial Sequence
  Description of Artificial Sequence: Synthetic oligonucleotide
  Target: LAMA2; (-) strand; PAM type: NRG; PAM sequence: TAG
ccaggagaacttccccaacc

SEQ ID NO: 88009 - DNA, 20 bp, Artificial Sequence
  Description of Artificial Sequence: Synthetic oligonucleotide
  Target: LAMA2; (-) strand; PAM type: NRG; PAM sequence: GAG
ttctgcaggatattatccag

SEQ ID NO: 88010 - DNA, 20 bp, Artificial Sequence
  Description of Artificial Sequence: Synthetic oligonucleotide
  Target: LAMA2; (-) strand; PAM type: NRG; PAM sequence: AGG
cattctgcaggatattatcc

SEQ ID NO: 88011 - DNA, 20 bp, Artificial Sequence
  Description of Artificial Sequence: Synthetic oligonucleotide
  Target: LAMA2; (-) strand; PAM type: NRG; PAM sequence: CAG
acattctgcaggatattatc

SEQ ID NO: 88012 - DNA, 20 bp, Artificial Sequence
  Description of Artificial Sequence: Synthetic oligonucleotide
  Target: LAMA2; (-) strand; PAM type: NRG; PAM sequence: AGG
caagttggaaaacattctgc

SEQ ID NO: 88013 - DNA, 20 bp, Artificial Sequence
  Description of Artificial Sequence: Synthetic oligonucleotide
  Target: LAMA2; (-) strand; PAM type: NRG; PAM sequence: CAG
ccaagttggaaaacattctg

SEQ ID NO: 88014 - DNA, 20 bp, Artificial Sequence
  Description of Artificial Sequence: Synthetic oligonucleotide
  Target: LAMA2; (-) strand; PAM type: NRG; PAM sequence: TGG
cggggagaatggaaccaagt

SEQ ID NO: 88015 - DNA, 20 bp, Artificial Sequence
  Description of Artificial Sequence: Synthetic oligonucleotide
  Target: LAMA2; (-) strand; PAM type: NRG; PAM sequence: AAG
gtggcggggagaatggaacc

SEQ ID NO: 88016 - DNA, 20 bp, Artificial Sequence
  Description of Artificial Sequence: Synthetic oligonucleotide
  Target: LAMA2; (-) strand; PAM type: NRG; PAM sequence: TGG
catgaaagtggcggggagaa

SEQ ID NO: 88017 - DNA, 20 bp, Artificial Sequence
  Description of Artificial Sequence: Synthetic oligonucleotide
  Target: LAMA2; (-) strand; PAM type: NRG; PAM sequence: GAG
gggtacatgaaagtggcggg

SEQ ID NO: 88018 - DNA, 20 bp, Artificial Sequence
  Description of Artificial Sequence: Synthetic oligonucleotide
  Target: LAMA2; (-) strand; PAM type: NRG; PAM sequence: GGG
ttgggtacatgaaagtggcg

SEQ ID NO: 88019 - DNA, 20 bp, Artificial Sequence
  Description of Artificial Sequence: Synthetic oligonucleotide
  Target: LAMA2; (-) strand; PAM type: NRG; PAM sequence: GGG
attgggtacatgaaagtggc

SEQ ID NO: 88020 - DNA, 20 bp, Artificial Sequence
  Description of Artificial Sequence: Synthetic oligonucleotide
  Target: LAMA2; (-) strand; PAM type: NRG; PAM sequence: CGG
gattgggtacatgaaagtgg

SEQ ID NO: 88021 - DNA, 20 bp, Artificial Sequence
  Description of Artificial Sequence: Synthetic oligonucleotide
  Target: LAMA2; (-) strand; PAM type: NRG; PAM sequence: TGG
cctgattgggtacatgaaag

SEQ ID NO: 88022 - DNA, 20 bp, Artificial Sequence
  Description of Artificial Sequence: Synthetic oligonucleotide
  Target: LAMA2; (-) strand; PAM type: NRG; PAM sequence: AAG
atgcctgattgggtacatga

SEQ ID NO: 88023 - DNA, 20 bp, Artificial Sequence
  Description of Artificial Sequence: Synthetic oligonucleotide
  Target: LAMA2; (-) strand; PAM type: NRG; PAM sequence: GGG
gaccaaatctatgcctgatt

SEQ ID NO: 88024 - DNA, 20 bp, Artificial Sequence
  Description of Artificial Sequence: Synthetic oligonucleotide
  Target: LAMA2; (-) strand; PAM type: NRG; PAM sequence: TGG
agaccaaatctatgcctgat

SEQ ID NO: 88025 - DNA, 20 bp, Artificial Sequence
  Description of Artificial Sequence: Synthetic oligonucleotide
  Target: LAMA2; (-) strand; PAM type: NRG; PAM sequence: AAG
gaaatatgggactatgtgaa

SEQ ID NO: 88026 - DNA, 20 bp, Artificial Sequence
  Description of Artificial Sequence: Synthetic oligonucleotide
  Target: LAMA2; (-) strand; PAM type: NRG; PAM sequence: GGG
acaaagcctccaagaaatat

SEQ ID NO: 88027 - DNA, 20 bp, Artificial Sequence
  Description of Artificial Sequence: Synthetic oligonucleotide
  Target: LAMA2; (-) strand; PAM type: NRG; PAM sequence: TGG
aacaaagcctccaagaaata

SEQ ID NO: 88028 - DNA, 20 bp, Artificial Sequence
  Description of Artificial Sequence: Synthetic oligonucleotide
  Target: LAMA2; (-) strand; PAM type: NRG; PAM sequence: AAG
aggaaacgaacaaagcctcc

SEQ ID NO: 88029 - DNA, 20 bp, Artificial Sequence
  Description of Artificial Sequence: Synthetic oligonucleotide
  Target: LAMA2; (-) strand; PAM type: NRG; PAM sequence: AAG
agagtaaaaggaaacgaaca

SEQ ID NO: 88030 - DNA, 20 bp, Artificial Sequence
  Description of Artificial Sequence: Synthetic oligonucleotide
  Target: LAMA2; (-) strand; PAM type: NRG; PAM sequence: AGG
tttagagaaaaaagagtaaa

SEQ ID NO: 88031 - DNA, 20 bp, Artificial Sequence
  Description of Artificial Sequence: Synthetic oligonucleotide
  Target: LAMA2; (-) strand; PAM type: NRG; PAM sequence: AAG
gtttagagaaaaaagagtaa

SEQ ID NO: 88032 - DNA, 20 bp, Artificial Sequence
  Description of Artificial Sequence: Synthetic oligonucleotide
  Target: LAMA2; (-) strand; PAM type: NRG; PAM sequence: GAG
agagaagtttagagaaaaaa

SEQ ID NO: 88033 - DNA, 20 bp, Artificial Sequence
  Description of Artificial Sequence: Synthetic oligonucleotide
  Target: LAMA2; (-) strand; PAM type: NRG; PAM sequence: AAG
gaagagaagtttagagaaaa

SEQ ID NO: 88034 - DNA, 20 bp, Artificial Sequence
  Description of Artificial Sequence: Synthetic oligonucleotide
  Target: LAMA2; (-) strand; PAM type: NRG; PAM sequence: GAG
gaagtgagaagagaagttta

SEQ ID NO: 88035 - DNA, 20 bp, Artificial Sequence
  Description of Artificial Sequence: Synthetic oligonucleotide
  Target: LAMA2; (-) strand; PAM type: NRG; PAM sequence: TAG
atgaagtgagaagagaagtt

SEQ ID NO: 88036 - DNA, 20 bp, Artificial Sequence
  Description of Artificial Sequence: Synthetic oligonucleotide
  Target: LAMA2; (-) strand; PAM type: NRG; PAM sequence: AAG
atgaaatgaagtgagaagag

SEQ ID NO: 88037 - DNA, 20 bp, Artificial Sequence
  Description of Artificial Sequence: Synthetic oligonucleotide
  Target: LAMA2; (-) strand; PAM type: NRG; PAM sequence: GAG
tgaatgaaatgaagtgagaa

SEQ ID NO: 88038 - DNA, 20 bp, Artificial Sequence
  Description of Artificial Sequence: Synthetic oligonucleotide
  Target: LAMA2; (-) strand; PAM type: NRG; PAM sequence: AAG
aatgaatgaaatgaagtgag

SEQ ID NO: 88039 - DNA, 20 bp, Artificial Sequence
  Description of Artificial Sequence: Synthetic oligonucleotide
  Target: LAMA2; (-) strand; PAM type: NRG; PAM sequence: GAG
tcaaatgaatgaaatgaagt

SEQ ID NO: 88040 - DNA, 20 bp, Artificial Sequence
  Description of Artificial Sequence: Synthetic oligonucleotide
  Target: LAMA2; (-) strand; PAM type: NRG; PAM sequence: AAG
aagatcaaatgaatgaaatg

SEQ ID NO: 88041 - DNA, 20 bp, Artificial Sequence
  Description of Artificial Sequence: Synthetic oligonucleotide
  Target: LAMA2; (-) strand; PAM type: NRG; PAM sequence: AAG
agaaagggtatcagtgattg

SEQ ID NO: 88042 - DNA, 20 bp, Artificial Sequence
  Description of Artificial Sequence: Synthetic oligonucleotide
  Target: LAMA2; (-) strand; PAM type: NRG; PAM sequence: CAG
tcaactggaagaaagggtat

SEQ ID NO: 88043 - DNA, 20 bp, Artificial Sequence
  Description of Artificial Sequence: Synthetic oligonucleotide
  Target: LAMA2; (-) strand; PAM type: NRG; PAM sequence: GGG
attcgatcaactggaagaaa

SEQ ID NO: 88044 - DNA, 20 bp, Artificial Sequence
  Description of Artificial Sequence: Synthetic oligonucleotide
  Target: LAMA2; (-) strand; PAM type: NRG; PAM sequence: AGG
gattcgatcaactggaagaa

SEQ ID NO: 88045 - DNA, 20 bp, Artificial Sequence
  Description of Artificial Sequence: Synthetic oligonucleotide
  Target: LAMA2; (-) strand; PAM type: NRG; PAM sequence: AAG
tgattcgatcaactggaaga

SEQ ID NO: 88046 - DNA, 20 bp, Artificial Sequence
  Description of Artificial Sequence: Synthetic oligonucleotide
  Target: LAMA2; (-) strand; PAM type: NRG; PAM sequence: AAG
gagctgattcgatcaactgg

SEQ ID NO: 88047 - DNA, 20 bp, Artificial Sequence
  Description of Artificial Sequence: Synthetic oligonucleotide
  Target: LAMA2; (-) strand; PAM type: NRG; PAM sequence: TGG
caggagctgattcgatcaac

SEQ ID NO: 88048 - DNA, 20 bp, Artificial Sequence
  Description of Artificial Sequence: Synthetic oligonucleotide
  Target: LAMA2; (-) strand; PAM type: NRG; PAM sequence: GAG
gacaaatgcacaagcctcag

SEQ ID NO: 88049 - DNA, 20 bp, Artificial Sequence
  Description of Artificial Sequence: Synthetic oligonucleotide
  Target: LAMA2; (-) strand; PAM type: NRG; PAM sequence: AGG
ctgacaaatgcacaagcctc

SEQ ID NO: 88050 - DNA, 20 bp, Artificial Sequence
  Description of Artificial Sequence: Synthetic oligonucleotide
  Target: LAMA2; (-) strand; PAM type: NRG; PAM sequence: CAG
cctgacaaatgcacaagcct

SEQ ID NO: 88051 - DNA, 20 bp, Artificial Sequence
  Description of Artificial Sequence: Synthetic oligonucleotide
  Target: LAMA2; (-) strand; PAM type: NRG; PAM sequence: AAG
gaagtacctgacaaatgcac

SEQ ID NO: 88052 - DNA, 20 bp, Artificial Sequence
  Description of Artificial Sequence: Synthetic oligonucleotide
  Target: LAMA2; (-) strand; PAM type: NRG; PAM sequence: AAG
gctgaaaactatggcacgag

SEQ ID NO: 88053 - DNA, 20 bp, Artificial Sequence
  Description of Artificial Sequence: Synthetic oligonucleotide
  Target: LAMA2; (-) strand; PAM type: NRG; PAM sequence: GAG
ggagctgaaaactatggcac

SEQ ID NO: 88054 - DNA, 20 bp, Artificial Sequence
  Description of Artificial Sequence: Synthetic oligonucleotide
  Target: LAMA2; (-) strand; PAM type: NRG; PAM sequence: TGG
cctgatggagctgaaaacta

SEQ ID NO: 88055 - DNA, 20 bp, Artificial Sequence
  Description of Artificial Sequence: Synthetic oligonucleotide
  Target: LAMA2; (-) strand; PAM type: NRG; PAM sequence: GAG
agtccttaaatgacctgatg

SEQ ID NO: 88056 - DNA, 20 bp, Artificial Sequence
  Description of Artificial Sequence: Synthetic oligonucleotide
  Target: LAMA2; (-) strand; PAM type: NRG; PAM sequence: TGG
gaagtccttaaatgacctga

SEQ ID NO: 88057 - DNA, 20 bp, Artificial Sequence
  Description of Artificial Sequence: Synthetic oligonucleotide
  Target: LAMA2; (-) strand; PAM type: NRG; PAM sequence: AAG
ctagaataaccagtgtagag

SEQ ID NO: 88058 - DNA, 20 bp, Artificial Sequence
  Description of Artificial Sequence: Synthetic oligonucleotide
  Target: LAMA2; (-) strand; PAM type: NRG; PAM sequence: GAG
tacctagaataaccagtgta

SEQ ID NO: 88059 - DNA, 20 bp, Artificial Sequence
  Description of Artificial Sequence: Synthetic oligonucleotide
  Target: LAMA2; (-) strand; PAM type: NRG; PAM sequence: TAG
gctacctagaataaccagtg

SEQ ID NO: 88060 - DNA, 20 bp, Artificial Sequence
  Description of Artificial Sequence: Synthetic oligonucleotide
  Target: LAMA2; (-) strand; PAM type: NRG; PAM sequence: CAG
aaatggctacctagaataac

SEQ ID NO: 88061 - DNA, 20 bp, Artificial Sequence
  Description of Artificial Sequence: Synthetic oligonucleotide
  Target: LAMA2; (-) strand; PAM type: NRG; PAM sequence: TAG
agataggacaaatggctacc

SEQ ID NO: 88062 - DNA, 20 bp, Artificial Sequence
  Description of Artificial Sequence: Synthetic oligonucleotide
  Target: LAMA2; (-) strand; PAM type: NRG; PAM sequence: TGG
ttgaaaaaagataggacaaa

SEQ ID NO: 88063 - DNA, 20 bp, Artificial Sequence
  Description of Artificial Sequence: Synthetic oligonucleotide
  Target: LAMA2; (-) strand; PAM type: NRG; PAM sequence: AGG
taaaaaccttgaaaaaagat

SEQ ID NO: 88064 - DNA, 20 bp, Artificial Sequence
  Description of Artificial Sequence: Synthetic oligonucleotide
  Target: LAMA2; (-) strand; PAM type: NRG; PAM sequence: TAG
ctaaaaaccttgaaaaaaga

SEQ ID NO: 88065 - DNA, 20 bp, Artificial Sequence
  Description of Artificial Sequence: Synthetic oligonucleotide
  Target: LAMA2; (-) strand; PAM type: NRG; PAM sequence: AAG
gaagctaaaaaccttgaaaa

SEQ ID NO: 88066 - DNA, 20 bp, Artificial Sequence
  Description of Artificial Sequence: Synthetic oligonucleotide
  Target: LAMA2; (-) strand; PAM type: NRG; PAM sequence: AAG
agttcgaacccatcacaaag

SEQ ID NO: 88067 - DNA, 20 bp, Artificial Sequence
  Description of Artificial Sequence: Synthetic oligonucleotide
  Target: LAMA2; (-) strand; PAM type: NRG; PAM sequence: AAG
ggaagttcgaacccatcaca

SEQ ID NO: 88068 - DNA, 20 bp, Artificial Sequence
  Description of Artificial Sequence: Synthetic oligonucleotide
  Target: LAMA2; (-) strand; PAM type: NRG; PAM sequence: AAG
cttctctgagctaaaggagg

SEQ ID NO: 88069 - DNA, 20 bp, Artificial Sequence
  Description of Artificial Sequence: Synthetic oligonucleotide
  Target: LAMA2; (-) strand; PAM type: NRG; PAM sequence: AGG
aaacttctctgagctaaagg

SEQ ID NO: 88070 - DNA, 20 bp, Artificial Sequence
  Description of Artificial Sequence: Synthetic oligonucleotide
  Target: LAMA2; (-) strand; PAM type: NRG; PAM sequence: GAG
caaacttctctgagctaaag

SEQ ID NO: 88071 - DNA, 20 bp, Artificial Sequence
  Description of Artificial Sequence: Synthetic oligonucleotide
  Target: LAMA2; (-) strand; PAM type: NRG; PAM sequence: AGG
atcaaacttctctgagctaa

SEQ ID NO: 88072 - DNA, 20 bp, Artificial Sequence
  Description of Artificial Sequence: Synthetic oligonucleotide
  Target: LAMA2; (-) strand; PAM type: NRG; PAM sequence: AAG
gatcaaacttctctgagcta

SEQ ID NO: 88073 - DNA, 20 bp, Artificial Sequence
  Description of Artificial Sequence: Synthetic oligonucleotide
  Target: LAMA2; (-) strand; PAM type: NRG; PAM sequence: GAG
tcagacgatcaaacttctct

SEQ ID NO: 88074 - DNA, 20 bp, Artificial Sequence
  Description of Artificial Sequence: Synthetic oligonucleotide
  Target: LAMA2; (-) strand; PAM type: NRG; PAM sequence: CAG
gagttgagagaagaaggctt

SEQ ID NO: 88075 - DNA, 20 bp, Artificial Sequence
  Description of Artificial Sequence: Synthetic oligonucleotide
  Target: LAMA2; (-) strand; PAM type: NRG; PAM sequence: AGG
tttgaggagttgagagaaga

SEQ ID NO: 88076 - DNA, 20 bp, Artificial Sequence
  Description of Artificial Sequence: Synthetic oligonucleotide
  Target: LAMA2; (-) strand; PAM type: NRG; PAM sequence: AAG
ctttgaggagttgagagaag

SEQ ID NO: 88077 - DNA, 20 bp, Artificial Sequence
  Description of Artificial Sequence: Synthetic oligonucleotide
  Target: LAMA2; (-) strand; PAM type: NRG; PAM sequence: AAG
tgactttgaggagttgagag

SEQ ID NO: 88078 - DNA, 20 bp, Artificial Sequence
  Description of Artificial Sequence: Synthetic oligonucleotide
  Target: LAMA2; (-) strand; PAM type: NRG; PAM sequence: GAG
gaatgactttgaggagttga

SEQ ID NO: 88079 - DNA, 20 bp, Artificial Sequence
  Description of Artificial Sequence: Synthetic oligonucleotide
  Target: LAMA2; (-) strand; PAM type: NRG; PAM sequence: GAG
gagaatgactttgaggagtt

SEQ ID NO: 88080 - DNA, 20 bp, Artificial Sequence
  Description of Artificial Sequence: Synthetic oligonucleotide
  Target: LAMA2; (-) strand; PAM type: NRG; PAM sequence: GAG
ggatggagaatgactttgag

SEQ ID NO: 88081 - DNA, 20 bp, Artificial Sequence
  Description of Artificial Sequence: Synthetic oligonucleotide
  Target: LAMA2; (-) strand; PAM type: NRG; PAM sequence: AGG
ctggatggagaatgactttg

SEQ ID NO: 88082 - DNA, 20 bp, Artificial Sequence
  Description of Artificial Sequence: Synthetic oligonucleotide
  Target: LAMA2; (-) strand; PAM type: NRG; PAM sequence: GAG
gctggatggagaatgacttt

SEQ ID NO: 88083 - DNA, 20 bp, Artificial Sequence
  Description of Artificial Sequence: Synthetic oligonucleotide
  Target: LAMA2; (-) strand; PAM type: NRG; PAM sequence: GAG
caatggaacaaagctggatg

SEQ ID NO: 88084 - DNA, 20 bp, Artificial Sequence
  Description of Artificial Sequence: Synthetic oligonucleotide
  Target: LAMA2; (-) strand; PAM type: NRG; PAM sequence: TGG
agcaatggaacaaagctgga

SEQ ID NO: 88085 - DNA, 20 bp, Artificial Sequence
  Description of Artificial Sequence: Synthetic oligonucleotide
  Target: LAMA2; (-) strand; PAM type: NRG; PAM sequence: TGG
tgccagcaatggaacaaagc

SEQ ID NO: 88086 - DNA, 20 bp, Artificial Sequence
  Description of Artificial Sequence: Synthetic oligonucleotide
  Target: LAMA2; (-) strand; PAM type: NRG; PAM sequence: AAG
tccttgccagcaatggaaca

SEQ ID NO: 88087 - DNA, 20 bp, Artificial Sequence
  Description of Artificial Sequence: Synthetic oligonucleotide
  Target: LAMA2; (-) strand; PAM type: NRG; PAM sequence: TGG
atgaagctccttgccagcaa

SEQ ID NO: 88088 - DNA, 20 bp, Artificial Sequence
  Description of Artificial Sequence: Synthetic oligonucleotide
  Target: LAMA2; (-) strand; PAM type: NRG; PAM sequence: CAG
aaaggaatgaagctccttgc

SEQ ID NO: 88089 - DNA, 20 bp, Artificial Sequence
  Description of Artificial Sequence: Synthetic oligonucleotide
  Target: LAMA2; (-) strand; PAM type: NRG; PAM sequence: AAG
tctcctcctccaaaggaatg

SEQ ID NO: 88090 - DNA, 20 bp, Artificial Sequence
  Description of Artificial Sequence: Synthetic oligonucleotide
  Target: LAMA2; (-) strand; PAM type: NRG; PAM sequence: AGG
gagcgcctctcctcctccaa

SEQ ID NO: 88091 - DNA, 20 bp, Artificial Sequence
  Description of Artificial Sequence: Synthetic oligonucleotide
  Target: LAMA2; (-) strand; PAM type: NRG; PAM sequence: AAG
agagcgcctctcctcctcca

SEQ ID NO: 88092 - DNA, 20 bp, Artificial Sequence
  Description of Artificial Sequence: Synthetic oligonucleotide
  Target: LAMA2; (-) strand; PAM type: NRG; PAM sequence: GAG
gctgaaaactctaaaaatca

SEQ ID NO: 88093 - DNA, 20 bp, Artificial Sequence
  Description of Artificial Sequence: Synthetic oligonucleotide
  Target: LAMA2; (-) strand; PAM type: NRG; PAM sequence: CAG
aagctgaaaactctaaaaat

SEQ ID NO: 88094 - DNA, 20 bp, Artificial Sequence
  Description of Artificial Sequence: Synthetic oligonucleotide
  Target: LAMA2; (-) strand; PAM type: NRG; PAM sequence: AAG
ggggaaaaaacagagcagag

SEQ ID NO: 88095 - DNA, 20 bp, Artificial Sequence
  Description of Artificial Sequence: Synthetic oligonucleotide
  Target: LAMA2; (-) strand; PAM type: NRG; PAM sequence: GAG
gatggggaaaaaacagagca

SEQ ID NO: 88096 - DNA, 20 bp, Artificial Sequence
  Description of Artificial Sequence: Synthetic oligonucleotide
  Target: LAMA2; (-) strand; PAM type: NRG; PAM sequence: CAG
aagatggggaaaaaacagag

SEQ ID NO: 88097 - DNA, 20 bp, Artificial Sequence
  Description of Artificial Sequence: Synthetic oligonucleotide
  Target: LAMA2; (-) strand; PAM type: NRG; PAM sequence: GAG
acaaagatggggaaaaaaca

SEQ ID NO: 88098 - DNA, 20 bp, Artificial Sequence
  Description of Artificial Sequence: Synthetic oligonucleotide
  Target: LAMA2; (-) strand; PAM type: NRG; PAM sequence: CAG
ccacaaagatggggaaaaaa

SEQ ID NO: 88099 - DNA, 20 bp, Artificial Sequence
  Description of Artificial Sequence: Synthetic oligonucleotide
  Target: LAMA2; (-) strand; PAM type: NRG; PAM sequence: GGG
tagataaaaccacaaagatg

SEQ ID NO: 88100 - DNA, 20 bp, Artificial Sequence
  Description of Artificial Sequence: Synthetic oligonucleotide
  Target: LAMA2; (-) strand; PAM type: NRG; PAM sequence: GGG
gtagataaaaccacaaagat

SEQ ID NO: 88101 - DNA, 20 bp, Artificial Sequence
  Description of Artificial Sequence: Synthetic oligonucleotide
  Target: LAMA2; (-) strand; PAM type: NRG; PAM sequence: TGG
ggtagataaaaccacaaaga

SEQ ID NO: 88102 - DNA, 20 bp, Artificial Sequence
  Description of Artificial Sequence: Synthetic oligonucleotide
  Target: LAMA2; (-) strand; PAM type: NRG; PAM sequence: AAG
caaaggtagataaaaccaca

SEQ ID NO: 88103 - DNA, 20 bp, Artificial Sequence
  Description of Artificial Sequence: Synthetic oligonucleotide
  Target: LAMA2; (-) strand; PAM type: NRG; PAM sequence: TAG
tcatcatcaaagaccaaagg

SEQ ID NO: 88104 - DNA, 20 bp, Artificial Sequence
  Description of Artificial Sequence: Synthetic oligonucleotide
  Target: LAMA2; (-) strand; PAM type: NRG; PAM sequence: AGG
acatcatcatcaaagaccaa

SEQ ID NO: 88105 - DNA, 20 bp, Artificial Sequence
  Description of Artificial Sequence: Synthetic oligonucleotide
  Target: LAMA2; (-) strand; PAM type: NRG; PAM sequence: AAG
tacatcatcatcaaagacca

SEQ ID NO: 88106 - DNA, 20 bp, Artificial Sequence
  Description of Artificial Sequence: Synthetic oligonucleotide
  Target: LAMA2; (-) strand; PAM type: NRG; PAM sequence: AAG
ccatccgtacatcatcatca

SEQ ID NO: 88107 - DNA, 20 bp, Artificial Sequence
  Description of Artificial Sequence: Synthetic oligonucleotide
  Target: LAMA2; (-) strand; PAM type: NRG; PAM sequence: AGG
aggaaaactaacaaatagaa

SEQ ID NO: 88108 - DNA, 20 bp, Artificial Sequence
  Description of Artificial Sequence: Synthetic oligonucleotide
  Target: LAMA2; (-) strand; PAM type: NRG; PAM sequence: AAG
aaggaaaactaacaaataga

SEQ ID NO: 88109 - DNA, 20 bp, Artificial Sequence
  Description of Artificial Sequence: Synthetic oligonucleotide
  Target: LAMA2; (-) strand; PAM type: NRG; PAM sequence: TAG
taagaaggaaaactaacaaa

SEQ ID NO: 88110 - DNA, 20 bp, Artificial Sequence
  Description of Artificial Sequence: Synthetic oligonucleotide
  Target: LAMA2; (-) strand; PAM type: NRG; PAM sequence: AGG
tgagggtcctgactgtaaga

SEQ ID NO: 88111 - DNA, 20 bp, Artificial Sequence
  Description of Artificial Sequence: Synthetic oligonucleotide
  Target: LAMA2; (-) strand; PAM type: NRG; PAM sequence: AAG
ctgagggtcctgactgtaag

SEQ ID NO: 88112 - DNA, 20 bp, Artificial Sequence
  Description of Artificial Sequence: Synthetic oligonucleotide
  Target: LAMA2; (-) strand; PAM type: NRG; PAM sequence: AAG
cagctgagggtcctgactgt

SEQ ID NO: 88113 - DNA, 20 bp, Artificial Sequence
  Description of Artificial Sequence: Synthetic oligonucleotide
  Target: LAMA2; (-) strand; PAM type: NRG; PAM sequence: GGG
tccaacagacctgcagctga

SEQ ID NO: 88114 - DNA, 20 bp, Artificial Sequence
  Description of Artificial Sequence: Synthetic oligonucleotide
  Target: LAMA2; (-) strand; PAM type: NRG; PAM sequence: AGG
ctccaacagacctgcagctg

SEQ ID NO: 88115 - DNA, 20 bp, Artificial Sequence
  Description of Artificial Sequence: Synthetic oligonucleotide
  Target: LAMA2; (-) strand; PAM type: NRG; PAM sequence: GAG
actccaacagacctgcagct

SEQ ID NO: 88116 - DNA, 20 bp, Artificial Sequence
  Description of Artificial Sequence: Synthetic oligonucleotide
  Target: LAMA2; (-) strand; PAM type: NRG; PAM sequence: CAG
agcaaactccaacagacctg

SEQ ID NO: 88117 - DNA, 20 bp, Artificial Sequence
  Description of Artificial Sequence: Synthetic oligonucleotide
  Target: LAMA2; (-) strand; PAM type: NRG; PAM sequence: CAG
ggacctccagcaaactccaa

SEQ ID NO: 88118 - DNA, 20 bp, Artificial Sequence
  Description of Artificial Sequence: Synthetic oligonucleotide
  Target: LAMA2; (-) strand; PAM type: NRG; PAM sequence: CAG
cagggtctggagtggacctc

SEQ ID NO: 88119 - DNA, 20 bp, Artificial Sequence
  Description of Artificial Sequence: Synthetic oligonucleotide
  Target: LAMA2; (-) strand; PAM type: NRG; PAM sequence: TGG
caggcaaacagggtctggag

SEQ ID NO: 88120 - DNA, 20 bp, Artificial Sequence
  Description of Artificial Sequence: Synthetic oligonucleotide
  Target: LAMA2; (-) strand; PAM type: NRG; PAM sequence: GAG
acccaggcaaacagggtctg

SEQ ID NO: 88121 - DNA, 20 bp, Artificial Sequence
  Description of Artificial Sequence: Synthetic oligonucleotide
  Target: LAMA2; (-) strand; PAM type: NRG; PAM sequence: TGG
atacccaggcaaacagggtc

SEQ ID NO: 88122 - DNA, 20 bp, Artificial Sequence
  Description of Artificial Sequence: Synthetic oligonucleotide
  Target: LAMA2; (-) strand; PAM type: NRG; PAM sequence: GGG
tgctgatacccaggcaaaca

SEQ ID NO: 88123 - DNA, 20 bp, Artificial Sequence
  Description of Artificial Sequence: Synthetic oligonucleotide
  Target: LAMA2; (-) strand; PAM type: NRG; PAM sequence: AGG
ctgctgatacccaggcaaac

SEQ ID NO: 88124 - DNA, 20 bp, Artificial Sequence
  Description of Artificial Sequence: Synthetic oligonucleotide
  Target: LAMA2; (-) strand; PAM type: NRG; PAM sequence: CAG
gctgctgatacccaggcaaa

SEQ ID NO: 88125 - DNA, 20 bp, Artificial Sequence
  Description of Artificial Sequence: Synthetic oligonucleotide
  Target: LAMA2; (-) strand; PAM type: NRG; PAM sequence: AGG
agcctccgctgctgataccc

SEQ ID NO: 88126 - DNA, 20 bp, Artificial Sequence
  Description of Artificial Sequence: Synthetic oligonucleotide
  Target: LAMA2; (-) strand; PAM type: NRG; PAM sequence: CAG
cagcctccgctgctgatacc

SEQ ID NO: 88127 - DNA, 20 bp, Artificial Sequence
  Description of Artificial Sequence: Synthetic oligonucleotide
  Target: LAMA2; (-) strand; PAM type: NRG; PAM sequence: CAG
cagcaatatctgctgttctg

SEQ ID NO: 88128 - DNA, 20 bp, Artificial Sequence
  Description of Artificial Sequence: Synthetic oligonucleotide
  Target: LAMA2; (-) strand; PAM type: NRG; PAM sequence: CAG
aggcggcaacatttgctgtt

SEQ ID NO: 88129 - DNA, 20 bp, Artificial Sequence
  Description of Artificial Sequence: Synthetic oligonucleotide
  Target: LAMA2; (-) strand; PAM type: NRG; PAM sequence: CGG
cttccagaggaacgatcagg

SEQ ID NO: 88130 - DNA, 20 bp, Artificial Sequence
  Description of Artificial Sequence: Synthetic oligonucleotide
  Target: LAMA2; (-) strand; PAM type: NRG; PAM sequence: AGG
aagcttccagaggaacgatc

SEQ ID NO: 88131 - DNA, 20 bp, Artificial Sequence
  Description of Artificial Sequence: Synthetic oligonucleotide
  Target: LAMA2; (-) strand; PAM type: NRG; PAM sequence: CAG
gaagcttccagaggaacgat

SEQ ID NO: 88132 - DNA, 20 bp, Artificial Sequence
  Description of Artificial Sequence: Synthetic oligonucleotide
  Target: LAMA2; (-) strand; PAM type: NRG; PAM sequence: AGG
ctctgagacgaagcttccag

SEQ ID NO: 88133 - DNA, 20 bp, Artificial Sequence
  Description of Artificial Sequence: Synthetic oligonucleotide
  Target: LAMA2; (-) strand; PAM type: NRG; PAM sequence: GAG
cctctgagacgaagcttcca

SEQ ID NO: 88134 - DNA, 20 bp, Artificial Sequence
  Description of Artificial Sequence: Synthetic oligonucleotide
  Target: LAMA2; (-) strand; PAM type: NRG; PAM sequence: CAG
cccctctgagacgaagcttc

SEQ ID NO: 88135 - DNA, 20 bp, Artificial Sequence
  Description of Artificial Sequence: Synthetic oligonucleotide
  Target: LAMA2; (-) strand; PAM type: NRG; PAM sequence: AAG
ccgagtacccctctgagacg

SEQ ID NO: 88136 - DNA, 20 bp, Artificial Sequence
  Description of Artificial Sequence: Synthetic oligonucleotide
  Target: LAMA2; (-) strand; PAM type: NRG; PAM sequence: GAG
acacggccgagtacccctct

SEQ ID NO: 88137 - DNA, 20 bp, Artificial Sequence
  Description of Artificial Sequence: Synthetic oligonucleotide
  Target: LAMA2; (-) strand; PAM type: NRG; PAM sequence: GAG
gactgacatcccacacggcc

SEQ ID NO: 88138 - DNA, 20 bp, Artificial Sequence
  Description of Artificial Sequence: Synthetic oligonucleotide
  Target: LAMA2; (-) strand; PAM type: NRG; PAM sequence: CGG
gggcagactgacatcccaca

SEQ ID NO: 88139 - DNA, 20 bp, Artificial Sequence
  Description of Artificial Sequence: Synthetic oligonucleotide
  Target: LAMA2; (-) strand; PAM type: NRG; PAM sequence: CAG
gaggcaccacccagtagggg

SEQ ID NO: 88140 - DNA, 20 bp, Artificial Sequence
  Description of Artificial Sequence: Synthetic oligonucleotide
  Target: LAMA2; (-) strand; PAM type: NRG; PAM sequence: GGG
tgtgaggcaccacccagtag

SEQ ID NO: 88141 - DNA, 20 bp, Artificial Sequence
  Description of Artificial Sequence: Synthetic oligonucleotide
  Target: LAMA2; (-) strand; PAM type: NRG; PAM sequence: GGG
ctgtgaggcaccacccagta

SEQ ID NO: 88142 - DNA, 20 bp, Artificial Sequence
  Description of Artificial Sequence: Synthetic oligonucleotide
  Target: LAMA2; (-) strand; PAM type: NRG; PAM sequence: AGG
actgtgaggcaccacccagt

SEQ ID NO: 88143 - DNA, 20 bp, Artificial Sequence
  Description of Artificial Sequence: Synthetic oligonucleotide
  Target: LAMA2; (-) strand; PAM type: NRG; PAM sequence: TAG
aactgtgaggcaccacccag

SEQ ID NO: 88144 - DNA, 20 bp, Artificial Sequence
  Description of Artificial Sequence: Synthetic oligonucleotide
  Target: LAMA2; (-) strand; PAM type: NRG; PAM sequence: CAG
cctaactgtgaggcaccacc

SEQ ID NO: 88145 - DNA, 20 bp, Artificial Sequence
  Description of Artificial Sequence: Synthetic oligonucleotide
  Target: LAMA2; (-) strand; PAM type: NRG; PAM sequence: AGG
ccctgaatagcctaactgtg

SEQ ID NO: 88146 - DNA, 20 bp, Artificial Sequence
  Description of Artificial Sequence: Synthetic oligonucleotide
  Target: LAMA2; (-) strand; PAM type: NRG; PAM sequence: GAG
gccctgaatagcctaactgt

SEQ ID NO: 88147 - DNA, 20 bp, Artificial Sequence
  Description of Artificial Sequence: Synthetic oligonucleotide
  Target: LAMA2; (-) strand; PAM type: NRG; PAM sequence: TAG
gtggatccctgagccctgaa

SEQ ID NO: 88148 - DNA, 20 bp, Artificial Sequence
  Description of Artificial Sequence: Synthetic oligonucleotide
  Target: LAMA2; (-) strand; PAM type: NRG; PAM sequence: GAG
gcctcctcaagtggatccct

SEQ ID NO: 88149 - DNA, 20 bp, Artificial Sequence
  Description of Artificial Sequence: Synthetic oligonucleotide
  Target: LAMA2; (-) strand; PAM type: NRG; PAM sequence: TGG
gaacagactgcctcctcaag

SEQ ID NO: 88150 - DNA, 20 bp, Artificial Sequence
  Description of Artificial Sequence: Synthetic oligonucleotide
  Target: LAMA2; (-) strand; PAM type: NRG; PAM sequence: AAG
aatgaacagactgcctcctc

SEQ ID NO: 88151 - DNA, 20 bp, Artificial Sequence
  Description of Artificial Sequence: Synthetic oligonucleotide
  Target: LAMA2; (-) strand; PAM type: NRG; PAM sequence: CAG
gtttgagatctgagaatgaa

SEQ ID NO: 88152 - DNA, 20 bp, Artificial Sequence
  Description of Artificial Sequence: Synthetic oligonucleotide
  Target: LAMA2; (-) strand; PAM type: NRG; PAM sequence: GAG
cagcatggagtttgagatct

SEQ ID NO: 88153 - DNA, 20 bp, Artificial Sequence
  Description of Artificial Sequence: Synthetic oligonucleotide
  Target: LAMA2; (-) strand; PAM type: NRG; PAM sequence: GAG
gttctcccagcatggagttt

SEQ ID NO: 88154 - DNA, 20 bp, Artificial Sequence
  Description of Artificial Sequence: Synthetic oligonucleotide
  Target: LAMA2; (-) strand; PAM type: NRG; PAM sequence: GAG
gtagtggttctcccagcatg

SEQ ID NO: 88155 - DNA, 20 bp, Artificial Sequence
  Description of Artificial Sequence: Synthetic oligonucleotide
  Target: LAMA2; (-) strand; PAM type: NRG; PAM sequence: TGG
gagtagtggttctcccagca

SEQ ID NO: 88156 - DNA, 20 bp, Artificial Sequence
  Description of Artificial Sequence: Synthetic oligonucleotide
  Target: LAMA2; (-) strand; PAM type: NRG; PAM sequence: CAG
gaagagagtagtggttctcc

SEQ ID NO: 88157 - DNA, 20 bp, Artificial Sequence
  Description of Artificial Sequence: Synthetic oligonucleotide
  Target: LAMA2; (-) strand; PAM type: NRG; PAM sequence: TGG
gacagctttgaagagagtag

SEQ ID NO: 88158 - DNA, 20 bp, Artificial Sequence
  Description of Artificial Sequence: Synthetic oligonucleotide
  Target: LAMA2; (-) strand; PAM type: NRG; PAM sequence: TAG
tctgacagctttgaagagag

SEQ ID NO: 88159 - DNA, 20 bp, Artificial Sequence
  Description of Artificial Sequence: Synthetic oligonucleotide
  Target: LAMA2; (-) strand; PAM type: NRG; PAM sequence: GAG
ctgtctgacagctttgaaga

SEQ ID NO: 88160 - DNA, 20 bp, Artificial Sequence
  Description of Artificial Sequence: Synthetic oligonucleotide
  Target: LAMA2; (-) strand; PAM type: NRG; PAM sequence: GAG
ccctgtctgacagctttgaa

SEQ ID NO: 88161 - DNA, 20 bp, Artificial Sequence
  Description of Artificial Sequence: Synthetic oligonucleotide
  Target: LAMA2; (-) strand; PAM type: NRG; PAM sequence: AAG
gtccctgtctgacagctttg

SEQ ID NO: 88162 - DNA, 20 bp, Artificial Sequence
  Description of Artificial Sequence: Synthetic oligonucleotide
  Target: LAMA2; (-) strand; PAM type: NRG; PAM sequence: CAG
acttaaatgtccctgtctga

SEQ ID NO: 88163 - DNA, 20 bp, Artificial Sequence
  Description of Artificial Sequence: Synthetic oligonucleotide
  Target: LAMA2; (-) strand; PAM type: NRG; PAM sequence: CAG
aaagacagcagaaacctctg

SEQ ID NO: 88164 - DNA, 20 bp, Artificial Sequence
  Description of Artificial Sequence: Synthetic oligonucleotide
  Target: LAMA2; (-) strand; PAM type: NRG; PAM sequence: CAG
catagccgaacaaaagacag

SEQ ID NO: 88165 - DNA, 20 bp, Artificial Sequence
  Description of Artificial Sequence: Synthetic oligonucleotide
  Target: LAMA2; (-) strand; PAM type: NRG; PAM sequence: CAG
ggacatagccgaacaaaaga

SEQ ID NO: 88166 - DNA, 20 bp, Artificial Sequence
  Description of Artificial Sequence: Synthetic oligonucleotide
  Target: LAMA2; (-) strand; PAM type: NRG; PAM sequence: AAG
agtaggacatagccgaacaa

SEQ ID NO: 88167 - DNA, 20 bp, Artificial Sequence
  Description of Artificial Sequence: Synthetic oligonucleotide
  Target: LAMA2; (-) strand; PAM type: NRG; PAM sequence: TAG
ccacctctgggagtaggaca

SEQ ID NO: 88168 - DNA, 20 bp, Artificial Sequence
  Description of Artificial Sequence: Synthetic oligonucleotide
  Target: LAMA2; (-) strand; PAM type: NRG; PAM sequence: AGG
tagactccacctctgggagt

SEQ ID NO: 88169 - DNA, 20 bp, Artificial Sequence
  Description of Artificial Sequence: Synthetic oligonucleotide
  Target: LAMA2; (-) strand; PAM type: NRG; PAM sequence: TAG
gtagactccacctctgggag

SEQ ID NO: 88170 - DNA, 20 bp, Artificial Sequence
  Description of Artificial Sequence: Synthetic oligonucleotide
  Target: LAMA2; (-) strand; PAM type: NRG; PAM sequence: GAG
tctgtagactccacctctgg

SEQ ID NO: 88171 - DNA, 20 bp, Artificial Sequence
  Description of Artificial Sequence: Synthetic oligonucleotide
  Target: LAMA2; (-) strand; PAM type: NRG; PAM sequence: GGG
cctctgtagactccacctct

SEQ ID NO: 88172 - DNA, 20 bp, Artificial Sequence
  Description of Artificial Sequence: Synthetic oligonucleotide
  Target: LAMA2; (-) strand; PAM type: NRG; PAM sequence: TGG
gcctctgtagactccacctc

SEQ ID NO: 88173 - DNA, 20 bp, Artificial Sequence
  Description of Artificial Sequence: Synthetic oligonucleotide
  Target: LAMA2; (-) strand; PAM type: NRG; PAM sequence: TAG
aggatgcctgcctgcctctg

SEQ ID NO: 88174 - DNA, 20 bp, Artificial Sequence
  Description of Artificial Sequence: Synthetic oligonucleotide
  Target: LAMA2; (-) strand; PAM type: NRG; PAM sequence: AGG
gtgaagcccactgcagctca

SEQ ID NO: 88175 - DNA, 20 bp, Artificial Sequence
  Description of Artificial Sequence: Synthetic oligonucleotide
  Target: LAMA2; (-) strand; PAM type: NRG; PAM sequence: AAG
ggtgaagcccactgcagctc

SEQ ID NO: 88176 - DNA, 20 bp, Artificial Sequence
  Description of Artificial Sequence: Synthetic oligonucleotide
  Target: LAMA2; (-) strand; PAM type: NRG; PAM sequence: CAG
gaactgggtgaagcccactg

SEQ ID NO: 88177 - DNA, 20 bp, Artificial Sequence
  Description of Artificial Sequence: Synthetic oligonucleotide
  Target: LAMA2; (-) strand; PAM type: NRG; PAM sequence: AAG
tgggaagcttgaactgggtg

SEQ ID NO: 88178 - DNA, 20 bp, Artificial Sequence
  Description of Artificial Sequence: Synthetic oligonucleotide
  Target: LAMA2; (-) strand; PAM type: NRG; PAM sequence: GGG
gtggctgggaagcttgaact

SEQ ID NO: 88179 - DNA, 20 bp, Artificial Sequence
  Description of Artificial Sequence: Synthetic oligonucleotide
  Target: LAMA2; (-) strand; PAM type: NRG; PAM sequence: TGG
tgtggctgggaagcttgaac

SEQ ID NO: 88180 - DNA, 20 bp, Artificial Sequence
  Description of Artificial Sequence: Synthetic oligonucleotide
  Target: LAMA2; (-) strand; PAM type: NRG; PAM sequence: AAG
gcaaacaaactgtggctggg

SEQ ID NO: 88181 - DNA, 20 bp, Artificial Sequence
  Description of Artificial Sequence: Synthetic oligonucleotide
  Target: LAMA2; (-) strand; PAM type: NRG; PAM sequence: GGG
taggcaaacaaactgtggct

SEQ ID NO: 88182 - DNA, 20 bp, Artificial Sequence
  Description of Artificial Sequence: Synthetic oligonucleotide
  Target: LAMA2; (-) strand; PAM type: NRG; PAM sequence: TGG
gtaggcaaacaaactgtggc

SEQ ID NO: 88183 - DNA, 20 bp, Artificial Sequence
  Description of Artificial Sequence: Synthetic oligonucleotide
  Target: LAMA2; (-) strand; PAM type: NRG; PAM sequence: TGG
ttgagtaggcaaacaaactg

SEQ ID NO: 88184 - DNA, 20 bp, Artificial Sequence
  Description of Artificial Sequence: Synthetic oligonucleotide
  Target: LAMA2; (-) strand; PAM type: NRG; PAM sequence: AGG
gccattgccgaggcttgagt

SEQ ID NO: 88185 - DNA, 20 bp, Artificial Sequence
  Description of Artificial Sequence: Synthetic oligonucleotide
  Target: LAMA2; (-) strand; PAM type: NRG; PAM sequence: TAG
cgccattgccgaggcttgag

SEQ ID NO: 88186 - DNA, 20 bp, Artificial Sequence
  Description of Artificial Sequence: Synthetic oligonucleotide
  Target: LAMA2; (-) strand; PAM type: NRG; PAM sequence: GAG
gcccgccattgccgaggctt

SEQ ID NO: 88187 - DNA, 20 bp, Artificial Sequence
  Description of Artificial Sequence: Synthetic oligonucleotide
  Target: LAMA2; (-) strand; PAM type: NRG; PAM sequence: AGG
aggggcgcccgccattgccg

SEQ ID NO: 88188 - DNA, 20 bp, Artificial Sequence
  Description of Artificial Sequence: Synthetic oligonucleotide
  Target: LAMA2; (-) strand; PAM type: NRG; PAM sequence: GAG
gaggggcgcccgccattgcc

SEQ ID NO: 88189 - DNA, 20 bp, Artificial Sequence
  Description of Artificial Sequence: Synthetic oligonucleotide
  Target: LAMA2; (-) strand; PAM type: NRG; PAM sequence: GGG
tggcagcaaggttgggagag

SEQ ID NO: 88190 - DNA, 20 bp, Artificial Sequence
  Description of Artificial Sequence: Synthetic oligonucleotide
  Target: LAMA2; (-) strand; PAM type: NRG; PAM sequence: GGG
gtggcagcaaggttgggaga

SEQ ID NO: 88191 - DNA, 20 bp, Artificial Sequence
  Description of Artificial Sequence: Synthetic oligonucleotide
  Target: LAMA2; (-) strand; PAM type: NRG; PAM sequence: AGG
ggtggcagcaaggttgggag

SEQ ID NO: 88192 - DNA, 20 bp, Artificial Sequence
  Description of Artificial Sequence: Synthetic oligonucleotide
  Target: LAMA2; (-) strand; PAM type: NRG; PAM sequence: GAG
aggtggcagcaaggttggga

SEQ ID NO: 88193 - DNA, 20 bp, Artificial Sequence
  Description of Artificial Sequence: Synthetic oligonucleotide
  Target: LAMA2; (-) strand; PAM type: NRG; PAM sequence: GAG
caaggtggcagcaaggttgg

SEQ ID NO: 88194 - DNA, 20 bp, Artificial Sequence
  Description of Artificial Sequence: Synthetic oligonucleotide
  Target: LAMA2; (-) strand; PAM type: NRG; PAM sequence: GGG
tgcaaggtggcagcaaggtt

SEQ ID NO: 88195 - DNA, 20 bp, Artificial Sequence
  Description of Artificial Sequence: Synthetic oligonucleotide
  Target: LAMA2; (-) strand; PAM type: NRG; PAM sequence: TGG
ctgcaaggtggcagcaaggt

SEQ ID NO: 88196 - DNA, 20 bp, Artificial Sequence
  Description of Artificial Sequence: Synthetic oligonucleotide
  Target: LAMA2; (-) strand; PAM type: NRG; PAM sequence: AGG
tgaactgcaaggtggcagca

SEQ ID NO: 88197 - DNA, 20 bp, Artificial Sequence
  Description of Artificial Sequence: Synthetic oligonucleotide
  Target: LAMA2; (-) strand; PAM type: NRG; PAM sequence: AAG
ctgaactgcaaggtggcagc

SEQ ID NO: 88198 - DNA, 20 bp, Artificial Sequence
  Description of Artificial Sequence: Synthetic oligonucleotide
  Target: LAMA2; (-) strand; PAM type: NRG; PAM sequence: CAG
gagactgaactgcaaggtgg

SEQ ID NO: 88199 - DNA, 20 bp, Artificial Sequence
  Description of Artificial Sequence: Synthetic oligonucleotide
  Target: LAMA2; (-) strand; PAM type: NRG; PAM sequence: TGG
tctgagactgaactgcaagg

SEQ ID NO: 88200 - DNA, 20 bp, Artificial Sequence
  Description of Artificial Sequence: Synthetic oligonucleotide
  Target: LAMA2; (-) strand; PAM type: NRG; PAM sequence: AGG
cagtctgagactgaactgca

SEQ ID NO: 88201 - DNA, 20 bp, Artificial Sequence
  Description of Artificial Sequence: Synthetic oligonucleotide
  Target: LAMA2; (-) strand; PAM type: NRG; PAM sequence: AAG
gcagtctgagactgaactgc

SEQ ID NO: 88202 - DNA, 20 bp, Artificial Sequence
  Description of Artificial Sequence: Synthetic oligonucleotide
  Target: LAMA2; (-) strand; PAM type: NRG; PAM sequence: GAG
cattgctagcccagcagtct

SEQ ID NO: 88203 - DNA, 20 bp, Artificial Sequence
  Description of Artificial Sequence: Synthetic oligonucleotide
  Target: LAMA2; (-) strand; PAM type: NRG; PAM sequence: CAG
cttgttcattgctagcccag

SEQ ID NO: 88204 - DNA, 20 bp, Artificial Sequence
  Description of Artificial Sequence: Synthetic oligonucleotide
  Target: LAMA2; (-) strand; PAM type: NRG; PAM sequence: CAG
agccttgttcattgctagcc

SEQ ID NO: 88205 - DNA, 20 bp, Artificial Sequence
  Description of Artificial Sequence: Synthetic oligonucleotide
  Target: LAMA2; (-) strand; PAM type: NRG; PAM sequence: TAG
tacggagccttgttcattgc

SEQ ID NO: 88206 - DNA, 20 bp, Artificial Sequence
  Description of Artificial Sequence: Synthetic oligonucleotide
  Target: LAMA2; (-) strand; PAM type: NRG; PAM sequence: GAG
cggagggtcccatgcctacg

SEQ ID NO: 88207 - DNA, 20 bp, Artificial Sequence
  Description of Artificial Sequence: Synthetic oligonucleotide
  Target: LAMA2; (-) strand; PAM type: NRG; PAM sequence: CGG
ctcggagggtcccatgccta

SEQ ID NO: 88208 - DNA, 20 bp, Artificial Sequence
  Description of Artificial Sequence: Synthetic oligonucleotide
  Target: LAMA2; (-) strand; PAM type: NRG; PAM sequence: GGG
tatcccacacctggctcgga

SEQ ID NO: 88209 - DNA, 20 bp, Artificial Sequence
  Description of Artificial Sequence: Synthetic oligonucleotide
  Target: LAMA2; (-) strand; PAM type: NRG; PAM sequence: AGG
atatcccacacctggctcgg

SEQ ID NO: 88210 - DNA, 20 bp, Artificial Sequence
  Description of Artificial Sequence: Synthetic oligonucleotide
  Target: LAMA2; (-) strand; PAM type: NRG; PAM sequence: GAG
tatatcccacacctggctcg

SEQ ID NO: 88211 - DNA, 20 bp, Artificial Sequence
  Description of Artificial Sequence: Synthetic oligonucleotide
  Target: LAMA2; (-) strand; PAM type: NRG; PAM sequence: CGG
attatatcccacacctggct

SEQ ID NO: 88212 - DNA, 20 bp, Artificial Sequence
  Description of Artificial Sequence: Synthetic oligonucleotide
  Target: LAMA2; (-) strand; PAM type: NRG; PAM sequence: TGG
aggagattatatcccacacc

SEQ ID NO: 88213 - DNA, 20 bp, Artificial Sequence
  Description of Artificial Sequence: Synthetic oligonucleotide
  Target: LAMA2; (-) strand; PAM type: NRG; PAM sequence: GAG
cttagcaaacggcacaccag

SEQ ID NO: 88214 - DNA, 20 bp, Artificial Sequence
  Description of Artificial Sequence: Synthetic oligonucleotide
  Target: LAMA2; (-) strand; PAM type: NRG; PAM sequence: AGG
gtcttagcaaacggcacacc

SEQ ID NO: 88215 - DNA, 20 bp, Artificial Sequence
  Description of Artificial Sequence: Synthetic oligonucleotide
  Target: LAMA2; (-) strand; PAM type: NRG; PAM sequence: CAG
ggtcttagcaaacggcacac

SEQ ID NO: 88216 - DNA, 20 bp, Artificial Sequence
  Description of Artificial Sequence: Synthetic oligonucleotide
  Target: LAMA2; (-) strand; PAM type: NRG; PAM sequence: CGG
tttccaatggtcttagcaaa

SEQ ID NO: 88217 - DNA, 20 bp, Artificial Sequence
  Description of Artificial Sequence: Synthetic oligonucleotide
  Target: LAMA2; (-) strand; PAM type: NRG; PAM sequence: TAG
ccacgcttttccaatggtct

SEQ ID NO: 88218 - DNA, 20 bp, Artificial Sequence
  Description of Artificial Sequence: Synthetic oligonucleotide
  Target: LAMA2; (-) strand; PAM type: NRG; PAM sequence: TGG
ctaataccacgcttttccaa

SEQ ID NO: 88219 - DNA, 20 bp, Artificial Sequence
  Description of Artificial Sequence: Synthetic oligonucleotide
  Target: LAMA2; (-) strand; PAM type: NRG; PAM sequence: GGG
cagacggcacctggaaaatc

SEQ ID NO: 88220 - DNA, 20 bp, Artificial Sequence
  Description of Artificial Sequence: Synthetic oligonucleotide
  Target: LAMA2; (-) strand; PAM type: NRG; PAM sequence: CGG
acagacggcacctggaaaat

SEQ ID NO: 88221 - DNA, 20 bp, Artificial Sequence
  Description of Artificial Sequence: Synthetic oligonucleotide
  Target: LAMA2; (-) strand; PAM type: NRG; PAM sequence: TGG
aagctgtgacagacggcacc

SEQ ID NO: 88222 - DNA, 20 bp, Artificial Sequence
  Description of Artificial Sequence: Synthetic oligonucleotide
  Target: LAMA2; (-) strand; PAM type: NRG; PAM sequence: CGG
ccaagggaagctgtgacaga

SEQ ID NO: 88223 - DNA, 20 bp, Artificial Sequence
  Description of Artificial Sequence: Synthetic oligonucleotide
  Target: LAMA2; (-) strand; PAM type: NRG; PAM sequence: CAG
ctagccaagggaagctgtga

SEQ ID NO: 88224 - DNA, 20 bp, Artificial Sequence
  Description of Artificial Sequence: Synthetic oligonucleotide
  Target: LAMA2; (-) strand; PAM type: NRG; PAM sequence: AAG
ttccctttcctagccaaggg

SEQ ID NO: 88225 - DNA, 20 bp, Artificial Sequence
  Description of Artificial Sequence: Synthetic oligonucleotide
  Target: LAMA2; (-) strand; PAM type: NRG; PAM sequence: GGG
aaattccctttcctagccaa

SEQ ID NO: 88226 - DNA, 20 bp, Artificial Sequence
  Description of Artificial Sequence: Synthetic oligonucleotide
  Target: LAMA2; (-) strand; PAM type: NRG; PAM sequence: AGG
gaaattccctttcctagcca

SEQ ID NO: 88227 - DNA, 20 bp, Artificial Sequence
  Description of Artificial Sequence: Synthetic oligonucleotide
  Target: LAMA2; (-) strand; PAM type: NRG; PAM sequence: AAG
ggaaattccctttcctagcc

SEQ ID NO: 88228 - DNA, 20 bp, Artificial Sequence
  Description of Artificial Sequence: Synthetic oligonucleotide
  Target: LAMA2; (-) strand; PAM type: NRG; PAM sequence: TAG
ggtcaggaaattccctttcc

SEQ ID NO: 88229 - DNA, 20 bp, Artificial Sequence
  Description of Artificial Sequence: Synthetic oligonucleotide
  Target: LAMA2; (-) strand; PAM type: NRG; PAM sequence: AGG
cccgggaagcacaaggggtc

SEQ ID NO: 88230 - DNA, 20 bp, Artificial Sequence
  Description of Artificial Sequence: Synthetic oligonucleotide
  Target: LAMA2; (-) strand; PAM type: NRG; PAM sequence: CAG
acccgggaagcacaaggggt

SEQ ID NO: 88231 - DNA, 20 bp, Artificial Sequence
  Description of Artificial Sequence: Synthetic oligonucleotide
  Target: LAMA2; (-) strand; PAM type: NRG; PAM sequence: GGG
cctcacccgggaagcacaag

SEQ ID NO: 88232 - DNA, 20 bp, Artificial Sequence
  Description of Artificial Sequence: Synthetic oligonucleotide
  Target: LAMA2; (-) strand; PAM type: NRG; PAM sequence: GGG
acctcacccgggaagcacaa

SEQ ID NO: 88233 - DNA, 20 bp, Artificial Sequence
  Description of Artificial Sequence: Synthetic oligonucleotide
  Target: LAMA2; (-) strand; PAM type: NRG; PAM sequence: AGG
cacctcacccgggaagcaca

SEQ ID NO: 88234 - DNA, 20 bp, Artificial Sequence
  Description of Artificial Sequence: Synthetic oligonucleotide
  Target: LAMA2; (-) strand; PAM type: NRG; PAM sequence: AAG
tcacctcacccgggaagcac

SEQ ID NO: 88235 - DNA, 20 bp, Artificial Sequence
  Description of Artificial Sequence: Synthetic oligonucleotide
  Target: LAMA2; (-) strand; PAM type: NRG; PAM sequence: AAG
gaggcatcacctcacccggg

SEQ ID NO: 88236 - DNA, 20 bp, Artificial Sequence
  Description of Artificial Sequence: Synthetic oligonucleotide
  Target: LAMA2; (-) strand; PAM type: NRG; PAM sequence: GGG
ggcgaggcatcacctcaccc

SEQ ID NO: 88237 - DNA, 20 bp, Artificial Sequence
  Description of Artificial Sequence: Synthetic oligonucleotide
  Target: LAMA2; (-) strand; PAM type: NRG; PAM sequence: CGG
gggcgaggcatcacctcacc

SEQ ID NO: 88238 - DNA, 20 bp, Artificial Sequence
  Description of Artificial Sequence: Synthetic oligonucleotide
  Target: LAMA2; (-) strand; PAM type: NRG; PAM sequence: AGG
gtgtcagccaaagcagggcg

SEQ ID NO: 88239 - DNA, 20 bp, Artificial Sequence
  Description of Artificial Sequence: Synthetic oligonucleotide
  Target: LAMA2; (-) strand; PAM type: NRG; PAM sequence: GAG
agtgtcagccaaagcagggc

SEQ ID NO: 88240 - DNA, 20 bp, Artificial Sequence
  Description of Artificial Sequence: Synthetic oligonucleotide
  Target: LAMA2; (-) strand; PAM type: NRG; PAM sequence: GGG
atcaagtgtcagccaaagca

SEQ ID NO: 88241 - DNA, 20 bp, Artificial Sequence
  Description of Artificial Sequence: Synthetic oligonucleotide
  Target: LAMA2; (-) strand; PAM type: NRG; PAM sequence: AGG
catcaagtgtcagccaaagc

SEQ ID NO: 88242 - DNA, 20 bp, Artificial Sequence
  Description of Artificial Sequence: Synthetic oligonucleotide
  Target: LAMA2; (-) strand; PAM type: NRG; PAM sequence: CAG
ccatcaagtgtcagccaaag

SEQ ID NO: 88243 - DNA, 20 bp, Artificial Sequence
  Description of Artificial Sequence: Synthetic oligonucleotide
  Target: LAMA2; (-) strand; PAM type: NRG; PAM sequence: AAG
agcccatcaagtgtcagcca

SEQ ID NO: 88244 - DNA, 20 bp, Artificial Sequence
  Description of Artificial Sequence: Synthetic oligonucleotide
  Target: LAMA2; (-) strand; PAM type: NRG; PAM sequence: CAG
ggttgcagcccatcaagtgt

SEQ ID NO: 88245 - DNA, 20 bp, Artificial Sequence
  Description of Artificial Sequence: Synthetic oligonucleotide
  Target: LAMA2; (-) strand; PAM type: NRG; PAM sequence: AAG
gacagtggttgcagcccatc

SEQ ID NO: 88246 - DNA, 20 bp, Artificial Sequence
  Description of Artificial Sequence: Synthetic oligonucleotide
  Target: LAMA2; (-) strand; PAM type: NRG; PAM sequence: CAG
tgggtgcaggacagtggttg

SEQ ID NO: 88247 - DNA, 20 bp, Artificial Sequence
  Description of Artificial Sequence: Synthetic oligonucleotide
  Target: LAMA2; (-) strand; PAM type: NRG; PAM sequence: TGG
tgacagtgggtgcaggacag

SEQ ID NO: 88248 - DNA, 20 bp, Artificial Sequence
  Description of Artificial Sequence: Synthetic oligonucleotide
  Target: LAMA2; (-) strand; PAM type: NRG; PAM sequence: CAG
gtctgacagtgggtgcagga

SEQ ID NO: 88249 - DNA, 20 bp, Artificial Sequence
  Description of Artificial Sequence: Synthetic oligonucleotide
  Target: LAMA2; (-) strand; PAM type: NRG; PAM sequence: AGG
gcttgtctgacagtgggtgc

SEQ ID NO: 88250 - DNA, 20 bp, Artificial Sequence
  Description of Artificial Sequence: Synthetic oligonucleotide
  Target: LAMA2; (-) strand; PAM type: NRG; PAM sequence: CAG
ggcttgtctgacagtgggtg

SEQ ID NO: 88251 - DNA, 20 bp, Artificial Sequence
  Description of Artificial Sequence: Synthetic oligonucleotide
  Target: LAMA2; (-) strand; PAM type: NRG; PAM sequence: GGG
actggggcttgtctgacagt

SEQ ID NO: 88252 - DNA, 20 bp, Artificial Sequence
  Description of Artificial Sequence: Synthetic oligonucleotide
  Target: LAMA2; (-) strand; PAM type: NRG; PAM sequence: TGG
cactggggcttgtctgacag

SEQ ID NO: 88253 - DNA, 20 bp, Artificial Sequence
  Description of Artificial Sequence: Synthetic oligonucleotide
  Target: LAMA2; (-) strand; PAM type: NRG; PAM sequence: CAG
cctcactggggcttgtctga

SEQ ID NO: 88254 - DNA, 20 bp, Artificial Sequence
  Description of Artificial Sequence: Synthetic oligonucleotide
  Target: LAMA2; (-) strand; PAM type: NRG; PAM sequence: GGG
gtaccaggttcacctcactg

SEQ ID NO: 88255 - DNA, 20 bp, Artificial Sequence
  Description of Artificial Sequence: Synthetic oligonucleotide
  Target: LAMA2; (-) strand; PAM type: NRG; PAM sequence: GGG
ggtaccaggttcacctcact

SEQ ID NO: 88256 - DNA, 20 bp, Artificial Sequence
  Description of Artificial Sequence: Synthetic oligonucleotide
  Target: LAMA2; (-) strand; PAM type: NRG; PAM sequence: TGG
aggtaccaggttcacctcac

SEQ ID NO: 88257 - DNA, 20 bp, Artificial Sequence
  Description of Artificial Sequence: Synthetic oligonucleotide
  Target: LAMA2; (-) strand; PAM type: NRG; PAM sequence: AGG
acatttccaattgaggtacc

SEQ ID NO: 88258 - DNA, 20 bp, Artificial Sequence
  Description of Artificial Sequence: Synthetic oligonucleotide
  Target: LAMA2; (-) strand; PAM type: NRG; PAM sequence: CAG
cacatttccaattgaggtac

SEQ ID NO: 88259 - DNA, 20 bp, Artificial Sequence
  Description of Artificial Sequence: Synthetic oligonucleotide
  Target: LAMA2; (-) strand; PAM type: NRG; PAM sequence: AGG
gacttccacatttccaattg

SEQ ID NO: 88260 - DNA, 20 bp, Artificial Sequence
  Description of Artificial Sequence: Synthetic oligonucleotide
  Target: LAMA2; (-) strand; PAM type: NRG; PAM sequence: GAG
tgacttccacatttccaatt

SEQ ID NO: 88261 - DNA, 20 bp, Artificial Sequence
  Description of Artificial Sequence: Synthetic oligonucleotide
  Target: LAMA2; (-) strand; PAM type: NRG; PAM sequence: GGG
gcatgagcgacacagaatat

SEQ ID NO: 88262 - DNA, 20 bp, Artificial Sequence
  Description of Artificial Sequence: Synthetic oligonucleotide
  Target: LAMA2; (-) strand; PAM type: NRG; PAM sequence: TGG
agcatgagcgacacagaata

SEQ ID NO: 88263 - DNA, 20 bp, Artificial Sequence
  Description of Artificial Sequence: Synthetic oligonucleotide
  Target: LAMA2; (-) strand; PAM type: NRG; PAM sequence: CAG
agctcccagcatgagcgaca

SEQ ID NO: 88264 - DNA, 20 bp, Artificial Sequence
  Description of Artificial Sequence: Synthetic oligonucleotide
  Target: LAMA2; (-) strand; PAM type: NRG; PAM sequence: GAG
cagtctacagctcccagcat

SEQ ID NO: 88265 - DNA, 20 bp, Artificial Sequence
  Description of Artificial Sequence: Synthetic oligonucleotide
  Target: LAMA2; (-) strand; PAM type: NRG; PAM sequence: CAG
cagctccagtctacagctcc

SEQ ID NO: 88266 - DNA, 20 bp, Artificial Sequence
  Description of Artificial Sequence: Synthetic oligonucleotide
  Target: LAMA2; (-) strand; PAM type: NRG; PAM sequence: CAG
ataggaacagctccagtcta

SEQ ID NO: 88267 - DNA, 20 bp, Artificial Sequence
  Description of Artificial Sequence: Synthetic oligonucleotide
  Target: LAMA2; (-) strand; PAM type: NRG; PAM sequence: CAG
aattggaataggaacagctc

SEQ ID NO: 88268 - DNA, 20 bp, Artificial Sequence
  Description of Artificial Sequence: Synthetic oligonucleotide
  Target: LAMA2; (-) strand; PAM type: NRG; PAM sequence: CAG
cagtataattggaataggaa

SEQ ID NO: 88269 - DNA, 20 bp, Artificial Sequence
  Description of Artificial Sequence: Synthetic oligonucleotide
  Target: LAMA2; (-) strand; PAM type: NRG; PAM sequence: AGG
gaaaccagtataattggaat

SEQ ID NO: 88270 - DNA, 20 bp, Artificial Sequence
  Description of Artificial Sequence: Synthetic oligonucleotide
  Target: LAMA2; (-) strand; PAM type: NRG; PAM sequence: TAG
agaaaccagtataattggaa

SEQ ID NO: 88271 - DNA, 20 bp, Artificial Sequence
  Description of Artificial Sequence: Synthetic oligonucleotide
  Target: LAMA2; (-) strand; PAM type: NRG; PAM sequence: TGG
tttttagaaaccagtataat

SEQ ID NO: 88272 - DNA, 20 bp, Artificial Sequence
  Description of Artificial Sequence: Synthetic oligonucleotide
  Target: LAMA2; (-) strand; PAM type: NRG; PAM sequence: CAG
ttacaatcttttttagaaac

SEQ ID NO: 88273 - DNA, 20 bp, Artificial Sequence
  Description of Artificial Sequence: Synthetic oligonucleotide
  Target: LAMA2; (-) strand; PAM type: NRG; PAM sequence: TAG
caatatattacaatcttttt

SEQ ID NO: 88274 - DNA, 20 bp, Artificial Sequence
  Description of Artificial Sequence: Synthetic oligonucleotide
  Target: LAMA2; (-) strand; PAM type: NRG; PAM sequence: GAG
aaataagtaatttgaagtat

SEQ ID NO: 88275 - DNA, 20 bp, Artificial Sequence
  Description of Artificial Sequence: Synthetic oligonucleotide
  Target: LAMA2; (-) strand; PAM type: NRG; PAM sequence: AAG
aaatgtaaataagtaatttg

SEQ ID NO: 88276 - DNA, 20 bp, Artificial Sequence
  Description of Artificial Sequence: Synthetic oligonucleotide
  Target: LAMA2; (-) strand; PAM type: NRG; PAM sequence: AAG
tatattattaaaatgtaaat

SEQ ID NO: 88277 - DNA, 20 bp, Artificial Sequence
  Description of Artificial Sequence: Synthetic oligonucleotide
  Target: LAMA2; (-) strand; PAM type: NRG; PAM sequence: TAG
gtatatatgctctctctttc

SEQ ID NO: 88278 - DNA, 20 bp, Artificial Sequence
  Description of Artificial Sequence: Synthetic oligonucleotide
  Target: LAMA2; (-) strand; PAM type: NRG; PAM sequence: GGG
tataattaaaaatgccttca

SEQ ID NO: 88279 - DNA, 20 bp, Artificial Sequence
  Description of Artificial Sequence: Synthetic oligonucleotide
  Target: LAMA2; (-) strand; PAM type: NRG; PAM sequence: AGG
ttataattaaaaatgccttc

SEQ ID NO: 88280 - DNA, 20 bp, Artificial Sequence
  Description of Artificial Sequence: Synthetic oligonucleotide
  Target: LAMA2; (-) strand; PAM type: NRG; PAM sequence: CAG
attataattaaaaatgcctt

SEQ ID NO: 88281 - DNA, 20 bp, Artificial Sequence
  Description of Artificial Sequence: Synthetic oligonucleotide
  Target: LAMA2; (-) strand; PAM type: NRG; PAM sequence: TGG
gaacaggagtctttagagtt

SEQ ID NO: 88282 - DNA, 20 bp, Artificial Sequence
  Description of Artificial Sequence: Synthetic oligonucleotide
  Target: LAMA2; (-) strand; PAM type: NRG; PAM sequence: GAG
acctagaacaggagtcttta

SEQ ID NO: 88283 - DNA, 20 bp, Artificial Sequence
  Description of Artificial Sequence: Synthetic oligonucleotide
  Target: LAMA2; (-) strand; PAM type: NRG; PAM sequence: TAG
ttacctagaacaggagtctt

SEQ ID NO: 88284 - DNA, 20 bp, Artificial Sequence
  Description of Artificial Sequence: Synthetic oligonucleotide
  Target: LAMA2; (-) strand; PAM type: NRG; PAM sequence: GAG
taatcaattacctagaacag

SEQ ID NO: 88285 - DNA, 20 bp, Artificial Sequence
  Description of Artificial Sequence: Synthetic oligonucleotide
  Target: LAMA2; (-) strand; PAM type: NRG; PAM sequence: AGG
actaatcaattacctagaac

SEQ ID NO: 88286 - DNA, 20 bp, Artificial Sequence
  Description of Artificial Sequence: Synthetic oligonucleotide
  Target: LAMA2; (-) strand; PAM type: NRG; PAM sequence: CAG
gactaatcaattacctagaa

SEQ ID NO: 88287 - DNA, 20 bp, Artificial Sequence
  Description of Artificial Sequence: Synthetic oligonucleotide
  Target: LAMA2; (-) strand; PAM type: NRG; PAM sequence: TAG
tactggactaatcaattacc

SEQ ID NO: 88288 - DNA, 20 bp, Artificial Sequence
  Description of Artificial Sequence: Synthetic oligonucleotide
  Target: LAMA2; (-) strand; PAM type: NRG; PAM sequence: TGG
tttcttatgcctacatttac

SEQ ID NO: 88289 - DNA, 20 bp, Artificial Sequence
  Description of Artificial Sequence: Synthetic oligonucleotide
  Target: LAMA2; (-) strand; PAM type: NRG; PAM sequence: AAG
aaaggtgttattgtgcatga

SEQ ID NO: 88290 - DNA, 20 bp, Artificial Sequence
  Description of Artificial Sequence: Synthetic oligonucleotide
  Target: LAMA2; (-) strand; PAM type: NRG; PAM sequence: AGG
ttagagccacagctggagaa

SEQ ID NO: 88291 - DNA, 20 bp, Artificial Sequence
  Description of Artificial Sequence: Synthetic oligonucleotide
  Target: LAMA2; (-) strand; PAM type: NRG; PAM sequence: AAG
gttagagccacagctggaga

SEQ ID NO: 88292 - DNA, 20 bp, Artificial Sequence
  Description of Artificial Sequence: Synthetic oligonucleotide
  Target: LAMA2; (-) strand; PAM type: NRG; PAM sequence: GAG
gacagttagagccacagctg

SEQ ID NO: 88293 - DNA, 20 bp, Artificial Sequence
  Description of Artificial Sequence: Synthetic oligonucleotide
  Target: LAMA2; (-) strand; PAM type: NRG; PAM sequence: TGG
aggacagttagagccacagc

SEQ ID NO: 88294 - DNA, 20 bp, Artificial Sequence
  Description of Artificial Sequence: Synthetic oligonucleotide
  Target: LAMA2; (-) strand; PAM type: NRG; PAM sequence: CAG
catcaggacagttagagcca

SEQ ID NO: 88295 - DNA, 20 bp, Artificial Sequence
  Description of Artificial Sequence: Synthetic oligonucleotide
  Target: LAMA2; (-) strand; PAM type: NRG; PAM sequence: GAG
agaatccatcaggacagtta

SEQ ID NO: 88296 - DNA, 20 bp, Artificial Sequence
  Description of Artificial Sequence: Synthetic oligonucleotide
  Target: LAMA2; (-) strand; PAM type: NRG; PAM sequence: TAG
aaagaatccatcaggacagt

SEQ ID NO: 88297 - DNA, 20 bp, Artificial Sequence
  Description of Artificial Sequence: Synthetic oligonucleotide
  Target: LAMA2; (-) strand; PAM type: NRG; PAM sequence: CAG
cagtaaagaatccatcagga

SEQ ID NO: 88298 - DNA, 20 bp, Artificial Sequence
  Description of Artificial Sequence: Synthetic oligonucleotide
  Target: LAMA2; (-) strand; PAM type: NRG; PAM sequence: AGG
agagcagtaaagaatccatc

SEQ ID NO: 88299 - DNA, 20 bp, Artificial Sequence
  Description of Artificial Sequence: Synthetic oligonucleotide
  Target: LAMA2; (-) strand; PAM type: NRG; PAM sequence: CAG
gagagcagtaaagaatccat

SEQ ID NO: 88300 - DNA, 20 bp, Artificial Sequence
  Description of Artificial Sequence: Synthetic oligonucleotide
  Target: LAMA2; (-) strand; PAM type: NRG; PAM sequence: AAG
tggattagctgagagcagta

SEQ ID NO: 88301 - DNA, 20 bp, Artificial Sequence
  Description of Artificial Sequence: Synthetic oligonucleotide
  Target: LAMA2; (-) strand; PAM type: NRG; PAM sequence: CAG
tataatggattagctgagag

SEQ ID NO: 88302 - DNA, 20 bp, Artificial Sequence
  Description of Artificial Sequence: Synthetic oligonucleotide
  Target: LAMA2; (-) strand; PAM type: NRG; PAM sequence: GAG
ccatataatggattagctga

SEQ ID NO: 88303 - DNA, 20 bp, Artificial Sequence
  Description of Artificial Sequence: Synthetic oligonucleotide
  Target: LAMA2; (-) strand; PAM type: NRG; PAM sequence: GAG
aaccatataatggattagct

SEQ ID NO: 88304 - DNA, 20 bp, Artificial Sequence
  Description of Artificial Sequence: Synthetic oligonucleotide
  Target: LAMA2; (-) strand; PAM type: NRG; PAM sequence: TAG
tctaaaaccatataatggat

SEQ ID NO: 88305 - DNA, 20 bp, Artificial Sequence
  Description of Artificial Sequence: Synthetic oligonucleotide
  Target: LAMA2; (-) strand; PAM type: NRG; PAM sequence: TGG
ggatgtctaaaaccatataa

SEQ ID NO: 88306 - DNA, 20 bp, Artificial Sequence
  Description of Artificial Sequence: Synthetic oligonucleotide
  Target: LAMA2; (-) strand; PAM type: NRG; PAM sequence: TGG
attcctttcagtgtctatcc

SEQ ID NO: 88307 - DNA, 20 bp, Artificial Sequence
  Description of Artificial Sequence: Synthetic oligonucleotide
  Target: LAMA2; (-) strand; PAM type: NRG; PAM sequence: CAG
tttgtaatagttattccttt

SEQ ID NO: 88308 - DNA, 20 bp, Artificial Sequence
  Description of Artificial Sequence: Synthetic oligonucleotide
  Target: LAMA2; (-) strand; PAM type: NRG; PAM sequence: TAG
tcttaaaattacttttgtaa

SEQ ID NO: 88309 - DNA, 20 bp, Artificial Sequence
  Description of Artificial Sequence: Synthetic oligonucleotide
  Target: LAMA2; (-) strand; PAM type: NRG; PAM sequence: CAG
tgaatacataagaggagcat

SEQ ID NO: 88310 - DNA, 20 bp, Artificial Sequence
  Description of Artificial Sequence: Synthetic oligonucleotide
  Target: LAMA2; (-) strand; PAM type: NRG; PAM sequence: GAG
acacaatgaatacataagag

SEQ ID NO: 88311 - DNA, 20 bp, Artificial Sequence
  Description of Artificial Sequence: Synthetic oligonucleotide
  Target: LAMA2; (-) strand; PAM type: NRG; PAM sequence: AGG
acacacaatgaatacataag

SEQ ID NO: 88312 - DNA, 20 bp, Artificial Sequence
  Description of Artificial Sequence: Synthetic oligonucleotide
  Target: LAMA2; (-) strand; PAM type: NRG; PAM sequence: GAG
tacacacaatgaatacataa

SEQ ID NO: 88313 - DNA, 20 bp, Artificial Sequence
  Description of Artificial Sequence: Synthetic oligonucleotide
  Target: LAMA2; (-) strand; PAM type: NRG; PAM sequence: AAG
catacacacaatgaatacat

SEQ ID NO: 88314 - DNA, 20 bp, Artificial Sequence
  Description of Artificial Sequence: Synthetic oligonucleotide
  Target: LAMA2; (-) strand; PAM type: NRG; PAM sequence: AGG
tcaaatcatcaagtatatgc

SEQ ID NO: 88315 - DNA, 20 bp, Artificial Sequence
  Description of Artificial Sequence: Synthetic oligonucleotide
  Target: LAMA2; (-) strand; PAM type: NRG; PAM sequence: CAG
atcaaatcatcaagtatatg

SEQ ID NO: 88316 - DNA, 20 bp, Artificial Sequence
  Description of Artificial Sequence: Synthetic oligonucleotide
  Target: LAMA2; (-) strand; PAM type: NRG; PAM sequence: AAG
aaaccaccaatcaaatcatc

SEQ ID NO: 88317 - DNA, 20 bp, Artificial Sequence
  Description of Artificial Sequence: Synthetic oligonucleotide
  Target: LAMA2; (-) strand; PAM type: NRG; PAM sequence: TGG
ttctggcaagttaatataac

SEQ ID NO: 88318 - DNA, 20 bp, Artificial Sequence
  Description of Artificial Sequence: Synthetic oligonucleotide
  Target: LAMA2; (-) strand; PAM type: NRG; PAM sequence: AAG
gaaactagaaagtttctggc

SEQ ID NO: 88319 - DNA, 20 bp, Artificial Sequence
  Description of Artificial Sequence: Synthetic oligonucleotide
  Target: LAMA2; (-) strand; PAM type: NRG; PAM sequence: TGG
tttggaaactagaaagtttc

SEQ ID NO: 88320 - DNA, 20 bp, Artificial Sequence
  Description of Artificial Sequence: Synthetic oligonucleotide
  Target: LAMA2; (-) strand; PAM type: NRG; PAM sequence: AAG
ttcactgtttggaaactaga

SEQ ID NO: 88321 - DNA, 20 bp, Artificial Sequence
  Description of Artificial Sequence: Synthetic oligonucleotide
  Target: LAMA2; (-) strand; PAM type: NRG; PAM sequence: TAG
tgtattcactgtttggaaac

SEQ ID NO: 88322 - DNA, 20 bp, Artificial Sequence
  Description of Artificial Sequence: Synthetic oligonucleotide
  Target: LAMA2; (-) strand; PAM type: NRG; PAM sequence: TGG
tctaagttgtattcactgtt

SEQ ID NO: 88323 - DNA, 20 bp, Artificial Sequence
  Description of Artificial Sequence: Synthetic oligonucleotide
  Target: LAMA2; (-) strand; PAM type: NRG; PAM sequence: AAG
atgtaagcttcatgaggtct

SEQ ID NO: 88324 - DNA, 20 bp, Artificial Sequence
  Description of Artificial Sequence: Synthetic oligonucleotide
  Target: LAMA2; (-) strand; PAM type: NRG; PAM sequence: AGG
actagaatgtaagcttcatg

SEQ ID NO: 88325 - DNA, 20 bp, Artificial Sequence
  Description of Artificial Sequence: Synthetic oligonucleotide
  Target: LAMA2; (-) strand; PAM type: NRG; PAM sequence: GAG
aactagaatgtaagcttcat

SEQ ID NO: 88326 - DNA, 20 bp, Artificial Sequence
  Description of Artificial Sequence: Synthetic oligonucleotide
  Target: LAMA2; (-) strand; PAM type: NRG; PAM sequence: AAG
ctctcttctaactagaatgt

SEQ ID NO: 88327 - DNA, 20 bp, Artificial Sequence
  Description of Artificial Sequence: Synthetic oligonucleotide
  Target: LAMA2; (-) strand; PAM type: NRG; PAM sequence: TAG
ttaatattctctcttctaac

SEQ ID NO: 88328 - DNA, 20 bp, Artificial Sequence
  Description of Artificial Sequence: Synthetic oligonucleotide
  Target: LAMA2; (-) strand; PAM type: NRG; PAM sequence: AGG
caaccactatcatccttcct

SEQ ID NO: 88329 - DNA, 20 bp, Artificial Sequence
  Description of Artificial Sequence: Synthetic oligonucleotide
  Target: LAMA2; (-) strand; PAM type: NRG; PAM sequence: TAG
tcaaccactatcatccttcc

SEQ ID NO: 88330 - DNA, 20 bp, Artificial Sequence
  Description of Artificial Sequence: Synthetic oligonucleotide
  Target: LAMA2; (-) strand; PAM type: NRG; PAM sequence: AAG
taatattctatataaaatta

SEQ ID NO: 88331 - DNA, 20 bp, Artificial Sequence
  Description of Artificial Sequence: Synthetic oligonucleotide
  Target: LAMA2; (-) strand; PAM type: NRG; PAM sequence: CAG
aactttttcctagtcacctt

SEQ ID NO: 88332 - DNA, 20 bp, Artificial Sequence
  Description of Artificial Sequence: Synthetic oligonucleotide
  Target: LAMA2; (-) strand; PAM type: NRG; PAM sequence: TAG
atacccacataactttttcc

SEQ ID NO: 88333 - DNA, 20 bp, Artificial Sequence
  Description of Artificial Sequence: Synthetic oligonucleotide
  Target: LAMA2; (-) strand; PAM type: NRG; PAM sequence: CAG
gtcctaagatgctcttgctc

SEQ ID NO: 88334 - DNA, 20 bp, Artificial Sequence
  Description of Artificial Sequence: Synthetic oligonucleotide
  Target: LAMA2; (-) strand; PAM type: NRG; PAM sequence: AAG
acttactttctctttgtcct

SEQ ID NO: 88335 - DNA, 20 bp, Artificial Sequence
  Description of Artificial Sequence: Synthetic oligonucleotide
  Target: LAMA2; (-) strand; PAM type: NRG; PAM sequence: GGG
ccagccacattcatatctta

SEQ ID NO: 88336 - DNA, 20 bp, Artificial Sequence
  Description of Artificial Sequence: Synthetic oligonucleotide
  Target: LAMA2; (-) strand; PAM type: NRG; PAM sequence: AGG
gccagccacattcatatctt

SEQ ID NO: 88337 - DNA, 20 bp, Artificial Sequence
  Description of Artificial Sequence: Synthetic oligonucleotide
  Target: LAMA2; (-) strand; PAM type: NRG; PAM sequence: TAG
tgccagccacattcatatct

SEQ ID NO: 88338 - DNA, 20 bp, Artificial Sequence
  Description of Artificial Sequence: Synthetic oligonucleotide
  Target: LAMA2; (-) strand; PAM type: NRG; PAM sequence: CAG
ttgagggtctttgaacatgc

SEQ ID NO: 88339 - DNA, 20 bp, Artificial Sequence
  Description of Artificial Sequence: Synthetic oligonucleotide
  Target: LAMA2; (-) strand; PAM type: NRG; PAM sequence: GGG
cactcttaccccatccttga

SEQ ID NO: 88340 - DNA, 20 bp, Artificial Sequence
  Description of Artificial Sequence: Synthetic oligonucleotide
  Target: LAMA2; (-) strand; PAM type: NRG; PAM sequence: AGG
ccactcttaccccatccttg

SEQ ID NO: 88341 - DNA, 20 bp, Artificial Sequence
  Description of Artificial Sequence: Synthetic oligonucleotide
  Target: LAMA2; (-) strand; PAM type: NRG; PAM sequence: GAG
cccactcttaccccatcctt

SEQ ID NO: 88342 - DNA, 20 bp, Artificial Sequence
  Description of Artificial Sequence: Synthetic oligonucleotide
  Target: LAMA2; (-) strand; PAM type: NRG; PAM sequence: AAG
acattaactacagtgtgcca

SEQ ID NO: 88343 - DNA, 20 bp, Artificial Sequence
  Description of Artificial Sequence: Synthetic oligonucleotide
  Target: LAMA2; (-) strand; PAM type: NRG; PAM sequence: CAG
aaatgtgaagacattaacta

SEQ ID NO: 88344 - DNA, 20 bp, Artificial Sequence
  Description of Artificial Sequence: Synthetic oligonucleotide
  Target: LAMA2; (-) strand; PAM type: NRG; PAM sequence: AAG
tgcattgcaagaaaaatgtg

SEQ ID NO: 88345 - DNA, 20 bp, Artificial Sequence
  Description of Artificial Sequence: Synthetic oligonucleotide
  Target: LAMA2; (-) strand; PAM type: NRG; PAM sequence: AAG
tgtgtttctcattgcattgc

SEQ ID NO: 88346 - DNA, 20 bp, Artificial Sequence
  Description of Artificial Sequence: Synthetic oligonucleotide
  Target: LAMA2; (-) strand; PAM type: NRG; PAM sequence: CAG
aaccctattaaaacataact

SEQ ID NO: 88347 - DNA, 20 bp, Artificial Sequence
  Description of Artificial Sequence: Synthetic oligonucleotide
  Target: LAMA2; (-) strand; PAM type: NRG; PAM sequence: AAG
cctcattcaaccaactctca

SEQ ID NO: 88348 - DNA, 20 bp, Artificial Sequence
  Description of Artificial Sequence: Synthetic oligonucleotide
  Target: LAMA2; (-) strand; PAM type: NRG; PAM sequence: TGG
tgaatgccaagtctcttaac

SEQ ID NO: 88349 - DNA, 20 bp, Artificial Sequence
  Description of Artificial Sequence: Synthetic oligonucleotide
  Target: LAMA2; (-) strand; PAM type: NRG; PAM sequence: AAG
ctaatgactggatgaatgcc

SEQ ID NO: 88350 - DNA, 20 bp, Artificial Sequence
  Description of Artificial Sequence: Synthetic oligonucleotide
  Target: LAMA2; (-) strand; PAM type: NRG; PAM sequence: TGG
aagacttcacagctaatgac

SEQ ID NO: 88351 - DNA, 20 bp, Artificial Sequence
  Description of Artificial Sequence: Synthetic oligonucleotide
  Target: LAMA2; (-) strand; PAM type: NRG; PAM sequence: CAG
cactgtggtccaagacttca

SEQ ID NO: 88352 - DNA, 20 bp, Artificial Sequence
  Description of Artificial Sequence: Synthetic oligonucleotide
  Target: LAMA2; (-) strand; PAM type: NRG; PAM sequence: AAG
caccattatcactgtggtcc

SEQ ID NO: 88353 - DNA, 20 bp, Artificial Sequence
  Description of Artificial Sequence: Synthetic oligonucleotide
  Target: LAMA2; (-) strand; PAM type: NRG; PAM sequence: TGG
cattttcaccattatcactg

SEQ ID NO: 88354 - DNA, 20 bp, Artificial Sequence
  Description of Artificial Sequence: Synthetic oligonucleotide
  Target: LAMA2; (-) strand; PAM type: NRG; PAM sequence: TGG
cattaccttcaaaatgtatc

SEQ ID NO: 88355 - DNA, 20 bp, Artificial Sequence
  Description of Artificial Sequence: Synthetic oligonucleotide
  Target: LAMA2; (-) strand; PAM type: NRG; PAM sequence: CAG
aaactattagcatatctttt

SEQ ID NO: 88356 - DNA, 20 bp, Artificial Sequence
  Description of Artificial Sequence: Synthetic oligonucleotide
  Target: LAMA2; (-) strand; PAM type: NRG; PAM sequence: TAG
atgttccacagccaaactat

SEQ ID NO: 88357 - DNA, 20 bp, Artificial Sequence
  Description of Artificial Sequence: Synthetic oligonucleotide
  Target: LAMA2; (-) strand; PAM type: NRG; PAM sequence: CAG
cctctttctttcatgttcca

SEQ ID NO: 88358 - DNA, 20 bp, Artificial Sequence
  Description of Artificial Sequence: Synthetic oligonucleotide
  Target: LAMA2; (-) strand; PAM type: NRG; PAM sequence: GGG
agttgctcaggtccatagtt

SEQ ID NO: 88359 - DNA, 20 bp, Artificial Sequence
  Description of Artificial Sequence: Synthetic oligonucleotide
  Target: LAMA2; (-) strand; PAM type: NRG; PAM sequence: TGG
tagttgctcaggtccatagt

SEQ ID NO: 88360 - DNA, 20 bp, Artificial Sequence
  Description of Artificial Sequence: Synthetic oligonucleotide
  Target: LAMA2; (-) strand; PAM type: NRG; PAM sequence: TAG
cttttagttgctcaggtcca

SEQ ID NO: 88361 - DNA, 20 bp, Artificial Sequence
  Description of Artificial Sequence: Synthetic oligonucleotide
  Target: LAMA2; (-) strand; PAM type: NRG; PAM sequence: AGG
gacaagtcttttagttgctc

SEQ ID NO: 88362 - DNA, 20 bp, Artificial Sequence
  Description of Artificial Sequence: Synthetic oligonucleotide
  Target: LAMA2; (-) strand; PAM type: NRG; PAM sequence: CAG
tgacaagtcttttagttgct

SEQ ID NO: 88363 - DNA, 20 bp, Artificial Sequence
  Description of Artificial Sequence: Synthetic oligonucleotide
  Target: LAMA2; (-) strand; PAM type: NRG; PAM sequence: TAG
taaatcaatgacaagtcttt

SEQ ID NO: 88364 - DNA, 20 bp, Artificial Sequence
  Description of Artificial Sequence: Synthetic oligonucleotide
  Target: LAMA2; (-) strand; PAM type: NRG; PAM sequence: AAG
tccccatctaaatcaatgac

SEQ ID NO: 88365 - DNA, 20 bp, Artificial Sequence
  Description of Artificial Sequence: Synthetic oligonucleotide
  Target: LAMA2; (-) strand; PAM type: NRG; PAM sequence: CAG
taaaaaatttgtttttacca

SEQ ID NO: 88366 - DNA, 20 bp, Artificial Sequence
  Description of Artificial Sequence: Synthetic oligonucleotide
  Target: LAMA2; (-) strand; PAM type: NRG; PAM sequence: GAG
tttatataattagctaagct

SEQ ID NO: 88367 - DNA, 20 bp, Artificial Sequence
  Description of Artificial Sequence: Synthetic oligonucleotide
  Target: LAMA2; (-) strand; PAM type: NRG; PAM sequence: AAG
ctaactttatataattagct

SEQ ID NO: 88368 - DNA, 20 bp, Artificial Sequence
  Description of Artificial Sequence: Synthetic oligonucleotide
  Target: LAMA2; (-) strand; PAM type: NRG; PAM sequence: TAG
catctctaactttatataat

SEQ ID NO: 88369 - DNA, 20 bp, Artificial Sequence
  Description of Artificial Sequence: Synthetic oligonucleotide
  Target: LAMA2; (-) strand; PAM type: NRG; PAM sequence: AGG
tttacacctcgatatataat

SEQ ID NO: 88370 - DNA, 20 bp, Artificial Sequence
  Description of Artificial Sequence: Synthetic oligonucleotide
  Target: LAMA2; (-) strand; PAM type: NRG; PAM sequence: TAG
atttacacctcgatatataa

SEQ ID NO: 88371 - DNA, 20 bp, Artificial Sequence
  Description of Artificial Sequence: Synthetic oligonucleotide
  Target: LAMA2; (-) strand; PAM type: NRG; PAM sequence: TAG
tgaacttcagacttgtatac

SEQ ID NO: 88372 - DNA, 20 bp, Artificial Sequence
  Description of Artificial Sequence: Synthetic oligonucleotide
  Target: LAMA2; (-) strand; PAM type: NRG; PAM sequence: CAG
gttcctgacccaatgaactt

SEQ ID NO: 88373 - DNA, 20 bp, Artificial Sequence
  Description of Artificial Sequence: Synthetic oligonucleotide
  Target: LAMA2; (-) strand; PAM type: NRG; PAM sequence: CAG
aacattttacatcttcagtt

SEQ ID NO: 88374 - DNA, 20 bp, Artificial Sequence
  Description of Artificial Sequence: Synthetic oligonucleotide
  Target: LAMA2; (-) strand; PAM type: NRG; PAM sequence: CAG
attcaaacattttacatctt

SEQ ID NO: 88375 - DNA, 20 bp, Artificial Sequence
  Description of Artificial Sequence: Synthetic oligonucleotide
  Target: LAMA2; (-) strand; PAM type: NRG; PAM sequence: TGG
cttctggtttaaatgacata

SEQ ID NO: 88376 - DNA, 20 bp, Artificial Sequence
  Description of Artificial Sequence: Synthetic oligonucleotide
  Target: LAMA2; (-) strand; PAM type: NRG; PAM sequence: TGG
ggttatcacatctagtcttc

SEQ ID NO: 88377 - DNA, 20 bp, Artificial Sequence
  Description of Artificial Sequence: Synthetic oligonucleotide
  Target: LAMA2; (-) strand; PAM type: NRG; PAM sequence: TAG
attttcttggttatcacatc

SEQ ID NO: 88378 - DNA, 20 bp, Artificial Sequence
  Description of Artificial Sequence: Synthetic oligonucleotide
  Target: LAMA2; (-) strand; PAM type: NRG; PAM sequence: TGG
tgtctcgttattcattttct

SEQ ID NO: 88379 - DNA, 20 bp, Artificial Sequence
  Description of Artificial Sequence: Synthetic oligonucleotide
  Target: LAMA2; (-) strand; PAM type: NRG; PAM sequence: TAG
gtgctatagggcccaatcct

SEQ ID NO: 88380 - DNA, 20 bp, Artificial Sequence
  Description of Artificial Sequence: Synthetic oligonucleotide
  Target: LAMA2; (-) strand; PAM type: NRG; PAM sequence: GGG
ctaaatgttggggtgctata

SEQ ID NO: 88381 - DNA, 20 bp, Artificial Sequence
  Description of Artificial Sequence: Synthetic oligonucleotide
  Target: LAMA2; (-) strand; PAM type: NRG; PAM sequence: AGG
tctaaatgttggggtgctat

SEQ ID NO: 88382 - DNA, 20 bp, Artificial Sequence
  Description of Artificial Sequence: Synthetic oligonucleotide
  Target: LAMA2; (-) strand; PAM type: NRG; PAM sequence: TAG
ctctaaatgttggggtgcta

SEQ ID NO: 88383 - DNA, 20 bp, Artificial Sequence
  Description of Artificial Sequence: Synthetic oligonucleotide
  Target: LAMA2; (-) strand; PAM type: NRG; PAM sequence: GGG
ttcctaacctctaaatgttg

SEQ ID NO: 88384 - DNA, 20 bp, Artificial Sequence
  Description of Artificial Sequence: Synthetic oligonucleotide
  Target: LAMA2; (-) strand; PAM type: NRG; PAM sequence: GGG
tttcctaacctctaaatgtt

SEQ ID NO: 88385 - DNA, 20 bp, Artificial Sequence
  Description of Artificial Sequence: Synthetic oligonucleotide
  Target: LAMA2; (-) strand; PAM type: NRG; PAM sequence: TGG
gtttcctaacctctaaatgt

SEQ ID NO: 88386 - DNA, 20 bp, Artificial Sequence
  Description of Artificial Sequence: Synthetic oligonucleotide
  Target: LAMA2; (-) strand; PAM type: NRG; PAM sequence: CAG
tctcctttctagttcgtcct

SEQ ID NO: 88387 - DNA, 20 bp, Artificial Sequence
  Description of Artificial Sequence: Synthetic oligonucleotide
  Target: LAMA2; (-) strand; PAM type: NRG; PAM sequence: TAG
ctgattcttagtctcctttc

SEQ ID NO: 88388 - DNA, 20 bp, Artificial Sequence
  Description of Artificial Sequence: Synthetic oligonucleotide
  Target: LAMA2; (-) strand; PAM type: NRG; PAM sequence: TAG
cttttttggtcactgattct

SEQ ID NO: 88389 - DNA, 20 bp, Artificial Sequence
  Description of Artificial Sequence: Synthetic oligonucleotide
  Target: LAMA2; (-) strand; PAM type: NRG; PAM sequence: TGG
tggttttccttctacttttt

SEQ ID NO: 88390 - DNA, 20 bp, Artificial Sequence
  Description of Artificial Sequence: Synthetic oligonucleotide
  Target: LAMA2; (-) strand; PAM type: NRG; PAM sequence: TGG
ctttcaatacatgacttctg

SEQ ID NO: 88391 - DNA, 20 bp, Artificial Sequence
  Description of Artificial Sequence: Synthetic oligonucleotide
  Target: LAMA2; (-) strand; PAM type: NRG; PAM sequence: AAG
cccatcaacagtatctgaca

SEQ ID NO: 88392 - DNA, 20 bp, Artificial Sequence
  Description of Artificial Sequence: Synthetic oligonucleotide
  Target: LAMA2; (-) strand; PAM type: NRG; PAM sequence: CAG
taccttatttggcccatcaa

SEQ ID NO: 88393 - DNA, 20 bp, Artificial Sequence
  Description of Artificial Sequence: Synthetic oligonucleotide
  Target: LAMA2; (-) strand; PAM type: NRG; PAM sequence: TGG
ttctcatttcttaccttatt

SEQ ID NO: 88394 - DNA, 20 bp, Artificial Sequence
  Description of Artificial Sequence: Synthetic oligonucleotide
  Target: LAMA2; (-) strand; PAM type: NRG; PAM sequence: TGG
gaatgcattgctatatccaa

SEQ ID NO: 88395 - DNA, 20 bp, Artificial Sequence
  Description of Artificial Sequence: Synthetic oligonucleotide
  Target: LAMA2; (-) strand; PAM type: NRG; PAM sequence: TGG
aatactcttctcaaggtcat

SEQ ID NO: 88396 - DNA, 20 bp, Artificial Sequence
  Description of Artificial Sequence: Synthetic oligonucleotide
  Target: LAMA2; (-) strand; PAM type: NRG; PAM sequence: AGG
ccactgaaatactcttctca

SEQ ID NO: 88397 - DNA, 20 bp, Artificial Sequence
  Description of Artificial Sequence: Synthetic oligonucleotide
  Target: LAMA2; (-) strand; PAM type: NRG; PAM sequence: AAG
tccactgaaatactcttctc

SEQ ID NO: 88398 - DNA, 20 bp, Artificial Sequence
  Description of Artificial Sequence: Synthetic oligonucleotide
  Target: LAMA2; (-) strand; PAM type: NRG; PAM sequence: TAG
attctctcttaaatccactc

SEQ ID NO: 88399 - DNA, 20 bp, Artificial Sequence
  Description of Artificial Sequence: Synthetic oligonucleotide
  Target: LAMA2; (-) strand; PAM type: NRG; PAM sequence: AAG
ttttctttctagaaaaagac

SEQ ID NO: 88400 - DNA, 20 bp, Artificial Sequence
  Description of Artificial Sequence: Synthetic oligonucleotide
  Target: LAMA2; (-) strand; PAM type: NRG; PAM sequence: AAG
ccttattttctttctagaaa

SEQ ID NO: 88401 - DNA, 20 bp, Artificial Sequence
  Description of Artificial Sequence: Synthetic oligonucleotide
  Target: LAMA2; (-) strand; PAM type: NRG; PAM sequence: TAG
ctatgcccttattttctttc

SEQ ID NO: 88402 - DNA, 20 bp, Artificial Sequence
  Description of Artificial Sequence: Synthetic oligonucleotide
  Target: LAMA2; (-) strand; PAM type: NRG; PAM sequence: AAG
caccattccacatcccataa

SEQ ID NO: 88403 - DNA, 20 bp, Artificial Sequence
  Description of Artificial Sequence: Synthetic oligonucleotide
  Target: LAMA2; (-) strand; PAM type: NRG; PAM sequence: CAG
gaagagacttccacatgtcc

SEQ ID NO: 88404 - DNA, 20 bp, Artificial Sequence
  Description of Artificial Sequence: Synthetic oligonucleotide
  Target: LAMA2; (-) strand; PAM type: NRG; PAM sequence: GAG
gaatatacagaccaatagaa

SEQ ID NO: 88405 - DNA, 20 bp, Artificial Sequence
  Description of Artificial Sequence: Synthetic oligonucleotide
  Target: LAMA2; (-) strand; PAM type: NRG; PAM sequence: AAG
aagaatatacagaccaatag

SEQ ID NO: 88406 - DNA, 20 bp, Artificial Sequence
  Description of Artificial Sequence: Synthetic oligonucleotide
  Target: LAMA2; (-) strand; PAM type: NRG; PAM sequence: TAG
tctaagaatatacagaccaa

SEQ ID NO: 88407 - DNA, 20 bp, Artificial Sequence
  Description of Artificial Sequence: Synthetic oligonucleotide
  Target: LAMA2; (-) strand; PAM type: NRG; PAM sequence: CAG
ttctattttctaagaatata

SEQ ID NO: 88408 - DNA, 20 bp, Artificial Sequence
  Description of Artificial Sequence: Synthetic oligonucleotide
  Target: LAMA2; (-) strand; PAM type: NRG; PAM sequence: AAG
tcaattattttctattttct

SEQ ID NO: 88409 - DNA, 20 bp, Artificial Sequence
  Description of Artificial Sequence: Synthetic oligonucleotide
  Target: LAMA2; (-) strand; PAM type: NRG; PAM sequence: CAG
ctcttttctccttgaatctt

SEQ ID NO: 88410 - DNA, 20 bp, Artificial Sequence
  Description of Artificial Sequence: Synthetic oligonucleotide
  Target: LAMA2; (-) strand; PAM type: NRG; PAM sequence: TGG
catgttctttgctatgttcc

SEQ ID NO: 88411 - DNA, 20 bp, Artificial Sequence
  Description of Artificial Sequence: Synthetic oligonucleotide
  Target: LAMA2; (-) strand; PAM type: NRG; PAM sequence: TGG
catagatccctaatgctgtc

SEQ ID NO: 88412 - DNA, 20 bp, Artificial Sequence
  Description of Artificial Sequence: Synthetic oligonucleotide
  Target: LAMA2; (-) strand; PAM type: NRG; PAM sequence: TAG
tcatgattactaaactcaca

SEQ ID NO: 88413 - DNA, 20 bp, Artificial Sequence
  Description of Artificial Sequence: Synthetic oligonucleotide
  Target: LAMA2; (-) strand; PAM type: NRG; PAM sequence: TAG
gatacatctgaagaaactca

SEQ ID NO: 88414 - DNA, 20 bp, Artificial Sequence
  Description of Artificial Sequence: Synthetic oligonucleotide
  Target: LAMA2; (-) strand; PAM type: NRG; PAM sequence: AAG
tgctgagctggatacatctg

SEQ ID NO: 88415 - DNA, 20 bp, Artificial Sequence
  Description of Artificial Sequence: Synthetic oligonucleotide
  Target: LAMA2; (-) strand; PAM type: NRG; PAM sequence: TGG
tgtacctgcaactgctgagc

SEQ ID NO: 88416 - DNA, 20 bp, Artificial Sequence
  Description of Artificial Sequence: Synthetic oligonucleotide
  Target: LAMA2; (-) strand; PAM type: NRG; PAM sequence: GAG
tctctgtacctgcaactgct

SEQ ID NO: 88417 - DNA, 20 bp, Artificial Sequence
  Description of Artificial Sequence: Synthetic oligonucleotide
  Target: LAMA2; (-) strand; PAM type: NRG; PAM sequence: CAG
acttggcttaaccacaacgt

SEQ ID NO: 88418 - DNA, 20 bp, Artificial Sequence
  Description of Artificial Sequence: Synthetic oligonucleotide
  Target: LAMA2; (-) strand; PAM type: NRG; PAM sequence: TGG
ctagttttactgtattcact

SEQ ID NO: 88419 - DNA, 20 bp, Artificial Sequence
  Description of Artificial Sequence: Synthetic oligonucleotide
  Target: LAMA2; (-) strand; PAM type: NRG; PAM sequence: TAG
tggtcaattattttaatctc

SEQ ID NO: 88420 - DNA, 20 bp, Artificial Sequence
  Description of Artificial Sequence: Synthetic oligonucleotide
  Target: LAMA2; (-) strand; PAM type: NRG; PAM sequence: TGG
catcactgtcttagattcca

SEQ ID NO: 88421 - DNA, 20 bp, Artificial Sequence
  Description of Artificial Sequence: Synthetic oligonucleotide
  Target: LAMA2; (-) strand; PAM type: NRG; PAM sequence: TAG
agggtttctcatcactgtct

SEQ ID NO: 88422 - DNA, 20 bp, Artificial Sequence
  Description of Artificial Sequence: Synthetic oligonucleotide
  Target: LAMA2; (-) strand; PAM type: NRG; PAM sequence: GGG
gggaaatcgctgtagcttga

SEQ ID NO: 88423 - DNA, 20 bp, Artificial Sequence
  Description of Artificial Sequence: Synthetic oligonucleotide
  Target: LAMA2; (-) strand; PAM type: NRG; PAM sequence: AGG
tgggaaatcgctgtagcttg

SEQ ID NO: 88424 - DNA, 20 bp, Artificial Sequence
  Description of Artificial Sequence: Synthetic oligonucleotide
  Target: LAMA2; (-) strand; PAM type: NRG; PAM sequence: GAG
atgggaaatcgctgtagctt

SEQ ID NO: 88425 - DNA, 20 bp, Artificial Sequence
  Description of Artificial Sequence: Synthetic oligonucleotide
  Target: LAMA2; (-) strand; PAM type: NRG; PAM sequence: TAG
gagacaatgggaaatcgctg

SEQ ID NO: 88426 - DNA, 20 bp, Artificial Sequence
  Description of Artificial Sequence: Synthetic oligonucleotide
  Target: LAMA2; (-) strand; PAM type: NRG; PAM sequence: GGG
atagcatttagggagacaat

SEQ ID NO: 88427 - DNA, 20 bp, Artificial Sequence
  Description of Artificial Sequence: Synthetic oligonucleotide
  Target: LAMA2; (-) strand; PAM type: NRG; PAM sequence: TGG
aatagcatttagggagacaa

SEQ ID NO: 88428 - DNA, 20 bp, Artificial Sequence
  Description of Artificial Sequence: Synthetic oligonucleotide
  Target: LAMA2; (-) strand; PAM type: NRG; PAM sequence: GAG
cagtactaatagcatttagg

SEQ ID NO: 88429 - DNA, 20 bp, Artificial Sequence
  Description of Artificial Sequence: Synthetic oligonucleotide
  Target: LAMA2; (-) strand; PAM type: NRG; PAM sequence: GGG
tacagtactaatagcattta

SEQ ID NO: 88430 - DNA, 20 bp, Artificial Sequence
  Description of Artificial Sequence: Synthetic oligonucleotide
  Target: LAMA2; (-) strand; PAM type: NRG; PAM sequence: AGG
ctacagtactaatagcattt

SEQ ID NO: 88431 - DNA, 20 bp, Artificial Sequence
  Description of Artificial Sequence: Synthetic oligonucleotide
  Target: LAMA2; (-) strand; PAM type: NRG; PAM sequence: TAG
gctacagtactaatagcatt

SEQ ID NO: 88432 - DNA, 20 bp, Artificial Sequence
  Description of Artificial Sequence: Synthetic oligonucleotide
  Target: LAMA2; (-) strand; PAM type: NRG; PAM sequence: TAG
tgtcttggctacagtactaa

SEQ ID NO: 88433 - DNA, 20 bp, Artificial Sequence
  Description of Artificial Sequence: Synthetic oligonucleotide
  Target: LAMA2; (-) strand; PAM type: NRG; PAM sequence: CAG
agaaagacttgtcttggcta

SEQ ID NO: 88434 - DNA, 20 bp, Artificial Sequence
  Description of Artificial Sequence: Synthetic oligonucleotide
  Target: LAMA2; (-) strand; PAM type: NRG; PAM sequence: TGG
tataaaagaaagacttgtct

SEQ ID NO: 88435 - DNA, 20 bp, Artificial Sequence
  Description of Artificial Sequence: Synthetic oligonucleotide
  Target: LAMA2; (-) strand; PAM type: NRG; PAM sequence: AAG
ttgtatagtcctataaaaga

SEQ ID NO: 88436 - DNA, 20 bp, Artificial Sequence
  Description of Artificial Sequence: Synthetic oligonucleotide
  Target: LAMA2; (-) strand; PAM type: NRG; PAM sequence: AAG
ggccttgtatagtcctataa

SEQ ID NO: 88437 - DNA, 20 bp, Artificial Sequence
  Description of Artificial Sequence: Synthetic oligonucleotide
  Target: LAMA2; (-) strand; PAM type: NRG; PAM sequence: TAG
atatcctctaaggccttgta

SEQ ID NO: 88438 - DNA, 20 bp, Artificial Sequence
  Description of Artificial Sequence: Synthetic oligonucleotide
  Target: LAMA2; (-) strand; PAM type: NRG; PAM sequence: AGG
aggatactaaatatcctcta

SEQ ID NO: 88439 - DNA, 20 bp, Artificial Sequence
  Description of Artificial Sequence: Synthetic oligonucleotide
  Target: LAMA2; (-) strand; PAM type: NRG; PAM sequence: AAG
aaggatactaaatatcctct

SEQ ID NO: 88440 - DNA, 20 bp, Artificial Sequence
  Description of Artificial Sequence: Synthetic oligonucleotide
  Target: LAMA2; (-) strand; PAM type: NRG; PAM sequence: AGG
tacctttatcctttaggcca

SEQ ID NO: 88441 - DNA, 20 bp, Artificial Sequence
  Description of Artificial Sequence: Synthetic oligonucleotide
  Target: LAMA2; (-) strand; PAM type: NRG; PAM sequence: AAG
ttacctttatcctttaggcc

SEQ ID NO: 88442 - DNA, 20 bp, Artificial Sequence
  Description of Artificial Sequence: Synthetic oligonucleotide
  Target: LAMA2; (-) strand; PAM type: NRG; PAM sequence: AGG
ccactttacctttatccttt

SEQ ID NO: 88443 - DNA, 20 bp, Artificial Sequence
  Description of Artificial Sequence: Synthetic oligonucleotide
  Target: LAMA2; (-) strand; PAM type: NRG; PAM sequence: TAG
accactttacctttatcctt

SEQ ID NO: 88444 - DNA, 20 bp, Artificial Sequence
  Description of Artificial Sequence: Synthetic oligonucleotide
  Target: LAMA2; (-) strand; PAM type: NRG; PAM sequence: CAG
tgctactgatatttagtgta

SEQ ID NO: 88445 - DNA, 20 bp, Artificial Sequence
  Description of Artificial Sequence: Synthetic oligonucleotide
  Target: LAMA2; (-) strand; PAM type: NRG; PAM sequence: TAG
ggcaaagtgctactgatatt

SEQ ID NO: 88446 - DNA, 20 bp, Artificial Sequence
  Description of Artificial Sequence: Synthetic oligonucleotide
  Target: LAMA2; (-) strand; PAM type: NRG; PAM sequence: AAG
tgttcctttaatttgtggca

SEQ ID NO: 88447 - DNA, 20 bp, Artificial Sequence
  Description of Artificial Sequence: Synthetic oligonucleotide
  Target: LAMA2; (-) strand; PAM type: NRG; PAM sequence: TGG
tatactgttcctttaatttg

SEQ ID NO: 88448 - DNA, 20 bp, Artificial Sequence
  Description of Artificial Sequence: Synthetic oligonucleotide
  Target: LAMA2; (-) strand; PAM type: NRG; PAM sequence: AGG
atggagttaaagcactgtca

SEQ ID NO: 88449 - DNA, 20 bp, Artificial Sequence
  Description of Artificial Sequence: Synthetic oligonucleotide
  Target: LAMA2; (-) strand; PAM type: NRG; PAM sequence: AAG
aatggagttaaagcactgtc

SEQ ID NO: 88450 - DNA, 20 bp, Artificial Sequence
  Description of Artificial Sequence: Synthetic oligonucleotide
  Target: LAMA2; (-) strand; PAM type: NRG; PAM sequence: AAG
aaggaaatgcaatggagtta

SEQ ID NO: 88451 - DNA, 20 bp, Artificial Sequence
  Description of Artificial Sequence: Synthetic oligonucleotide
  Target: LAMA2; (-) strand; PAM type: NRG; PAM sequence: GAG
aaaaagaaggaaatgcaatg

SEQ ID NO: 88452 - DNA, 20 bp, Artificial Sequence
  Description of Artificial Sequence: Synthetic oligonucleotide
  Target: LAMA2; (-) strand; PAM type: NRG; PAM sequence: TGG
taaaaaagaaggaaatgcaa

SEQ ID NO: 88453 - DNA, 20 bp, Artificial Sequence
  Description of Artificial Sequence: Synthetic oligonucleotide
  Target: LAMA2; (-) strand; PAM type: NRG; PAM sequence: AGG
aaattccattctaaaaaaga

SEQ ID NO: 88454 - DNA, 20 bp, Artificial Sequence
  Description of Artificial Sequence: Synthetic oligonucleotide
  Target: LAMA2; (-) strand; PAM type: NRG; PAM sequence: AAG
aaaattccattctaaaaaag

SEQ ID NO: 88455 - DNA, 20 bp, Artificial Sequence
  Description of Artificial Sequence: Synthetic oligonucleotide
  Target: LAMA2; (-) strand; PAM type: NRG; PAM sequence: AAG
aaaaaaattccattctaaaa

SEQ ID NO: 88456 - DNA, 20 bp, Artificial Sequence
  Description of Artificial Sequence: Synthetic oligonucleotide
  Target: LAMA2; (-) strand; PAM type: NRG; PAM sequence: TAG
gccttgctttggggaacata

SEQ ID NO: 88457 - DNA, 20 bp, Artificial Sequence
  Description of Artificial Sequence: Synthetic oligonucleotide
  Target: LAMA2; (-) strand; PAM type: NRG; PAM sequence: GGG
tataaactagccttgctttg

SEQ ID NO: 88458 - DNA, 20 bp, Artificial Sequence
  Description of Artificial Sequence: Synthetic oligonucleotide
  Target: LAMA2; (-) strand; PAM type: NRG; PAM sequence: GGG
atataaactagccttgcttt

SEQ ID NO: 88459 - DNA, 20 bp, Artificial Sequence
  Description of Artificial Sequence: Synthetic oligonucleotide
  Target: LAMA2; (-) strand; PAM type: NRG; PAM sequence: TGG
tatataaactagccttgctt

SEQ ID NO: 88460 - DNA, 20 bp, Artificial Sequence
  Description of Artificial Sequence: Synthetic oligonucleotide
  Target: LAMA2; (-) strand; PAM type: NRG; PAM sequence: TAG
taatttaatgttatataaac

SEQ ID NO: 88461 - DNA, 20 bp, Artificial Sequence
  Description of Artificial Sequence: Synthetic oligonucleotide
  Target: LAMA2; (-) strand; PAM type: NRG; PAM sequence: AAG
attaatttttgcatttgcat

SEQ ID NO: 88462 - DNA, 20 bp, Artificial Sequence
  Description of Artificial Sequence: Synthetic oligonucleotide
  Target: LAMA2; (-) strand; PAM type: NRG; PAM sequence: CAG
agatataataaatagatgtt

SEQ ID NO: 88463 - DNA, 20 bp, Artificial Sequence
  Description of Artificial Sequence: Synthetic oligonucleotide
  Target: LAMA2; (-) strand; PAM type: NRG; PAM sequence: TAG
tttgtgctagatataataaa

SEQ ID NO: 88464 - DNA, 20 bp, Artificial Sequence
  Description of Artificial Sequence: Synthetic oligonucleotide
  Target: LAMA2; (-) strand; PAM type: NRG; PAM sequence: TAG
tttgtttctatgttttgtgc

SEQ ID NO: 88465 - DNA, 20 bp, Artificial Sequence
  Description of Artificial Sequence: Synthetic oligonucleotide
  Target: LAMA2; (-) strand; PAM type: NRG; PAM sequence: AAG
caattcctatgtgttcagta

SEQ ID NO: 88466 - DNA, 20 bp, Artificial Sequence
  Description of Artificial Sequence: Synthetic oligonucleotide
  Target: LAMA2; (-) strand; PAM type: NRG; PAM sequence: CAG
ggtagcaattcctatgtgtt

SEQ ID NO: 88467 - DNA, 20 bp, Artificial Sequence
  Description of Artificial Sequence: Synthetic oligonucleotide
  Target: LAMA2; (-) strand; PAM type: NRG; PAM sequence: TAG
gcaactatttaaacgattgg

SEQ ID NO: 88468 - DNA, 20 bp, Artificial Sequence
  Description of Artificial Sequence: Synthetic oligonucleotide
  Target: LAMA2; (-) strand; PAM type: NRG; PAM sequence: TGG
aaggcaactatttaaacgat

SEQ ID NO: 88469 - DNA, 20 bp, Artificial Sequence
  Description of Artificial Sequence: Synthetic oligonucleotide
  Target: LAMA2; (-) strand; PAM type: NRG; PAM sequence: AGG
tactatttgtctaagaaata

SEQ ID NO: 88470 - DNA, 20 bp, Artificial Sequence
  Description of Artificial Sequence: Synthetic oligonucleotide
  Target: LAMA2; (-) strand; PAM type: NRG; PAM sequence: AAG
ttactatttgtctaagaaat

SEQ ID NO: 88471 - DNA, 20 bp, Artificial Sequence
  Description of Artificial Sequence: Synthetic oligonucleotide
  Target: LAMA2; (-) strand; PAM type: NRG; PAM sequence: AAG
atttcagttactatttgtct

SEQ ID NO: 88472 - DNA, 20 bp, Artificial Sequence
  Description of Artificial Sequence: Synthetic oligonucleotide
  Target: LAMA2; (-) strand; PAM type: NRG; PAM sequence: CAG
catgaatgctccatacattt

SEQ ID NO: 88473 - DNA, 20 bp, Artificial Sequence
  Description of Artificial Sequence: Synthetic oligonucleotide
  Target: LAMA2; (-) strand; PAM type: NRG; PAM sequence: AGG
aaaacaattaactctgcgcc

SEQ ID NO: 88474 - DNA, 20 bp, Artificial Sequence
  Description of Artificial Sequence: Synthetic oligonucleotide
  Target: LAMA2; (-) strand; PAM type: NRG; PAM sequence: CAG
caaaacaattaactctgcgc

SEQ ID NO: 88475 - DNA, 20 bp, Artificial Sequence
  Description of Artificial Sequence: Synthetic oligonucleotide
  Target: LAMA2; (-) strand; PAM type: NRG; PAM sequence: AGG
aaaatcaaatcagataatgc

SEQ ID NO: 88476 - DNA, 20 bp, Artificial Sequence
  Description of Artificial Sequence: Synthetic oligonucleotide
  Target: LAMA2; (-) strand; PAM type: NRG; PAM sequence: CAG
gaaaatcaaatcagataatg

SEQ ID NO: 88477 - DNA, 20 bp, Artificial Sequence
  Description of Artificial Sequence: Synthetic oligonucleotide
  Target: LAMA2; (-) strand; PAM type: NRG; PAM sequence: CAG
gcactgtgggaaaatcaaat

SEQ ID NO: 88478 - DNA, 20 bp, Artificial Sequence
  Description of Artificial Sequence: Synthetic oligonucleotide
  Target: LAMA2; (-) strand; PAM type: NRG; PAM sequence: GGG
ttcatacttcatggcactgt

SEQ ID NO: 88479 - DNA, 20 bp, Artificial Sequence
  Description of Artificial Sequence: Synthetic oligonucleotide
  Target: LAMA2; (-) strand; PAM type: NRG; PAM sequence: TGG
attcatacttcatggcactg

SEQ ID NO: 88480 - DNA, 20 bp, Artificial Sequence
  Description of Artificial Sequence: Synthetic oligonucleotide
  Target: LAMA2; (-) strand; PAM type: NRG; PAM sequence: TGG
taatgataattcatacttca

SEQ ID NO: 88481 - DNA, 20 bp, Artificial Sequence
  Description of Artificial Sequence: Synthetic oligonucleotide
  Target: LAMA2; (-) strand; PAM type: NRG; PAM sequence: TAG
ttatactgtttactatataa

SEQ ID NO: 88482 - DNA, 20 bp, Artificial Sequence
  Description of Artificial Sequence: Synthetic oligonucleotide
  Target: LAMA2; (-) strand; PAM type: NRG; PAM sequence: TAG
tttttccattctccaagtca

SEQ ID NO: 88483 - DNA, 20 bp, Artificial Sequence
  Description of Artificial Sequence: Synthetic oligonucleotide
  Target: LAMA2; (-) strand; PAM type: NRG; PAM sequence: AAG
aaaacatttttccattctcc

SEQ ID NO: 88484 - DNA, 20 bp, Artificial Sequence
  Description of Artificial Sequence: Synthetic oligonucleotide
  Target: LAMA2; (-) strand; PAM type: NRG; PAM sequence: CAG
atggaagggaagtgaacaac

SEQ ID NO: 88485 - DNA, 20 bp, Artificial Sequence
  Description of Artificial Sequence: Synthetic oligonucleotide
  Target: LAMA2; (-) strand; PAM type: NRG; PAM sequence: AAG
tgtcaacatgaatggaaggg

SEQ ID NO: 88486 - DNA, 20 bp, Artificial Sequence
  Description of Artificial Sequence: Synthetic oligonucleotide
  Target: LAMA2; (-) strand; PAM type: NRG; PAM sequence: GGG
caatgtcaacatgaatggaa

SEQ ID NO: 88487 - DNA, 20 bp, Artificial Sequence
  Description of Artificial Sequence: Synthetic oligonucleotide
  Target: LAMA2; (-) strand; PAM type: NRG; PAM sequence: AGG
tcaatgtcaacatgaatgga

SEQ ID NO: 88488 - DNA, 20 bp, Artificial Sequence
  Description of Artificial Sequence: Synthetic oligonucleotide
  Target: LAMA2; (-) strand; PAM type: NRG; PAM sequence: AAG
ttcaatgtcaacatgaatgg

SEQ ID NO: 88489 - DNA, 20 bp, Artificial Sequence
  Description of Artificial Sequence: Synthetic oligonucleotide
  Target: LAMA2; (-) strand; PAM type: NRG; PAM sequence: TGG
caattcaatgtcaacatgaa

SEQ ID NO: 88490 - DNA, 20 bp, Artificial Sequence
  Description of Artificial Sequence: Synthetic oligonucleotide
  Target: LAMA2; (-) strand; PAM type: NRG; PAM sequence: TAG
acagtgctgccttagcagcc

SEQ ID NO: 88491 - DNA, 20 bp, Artificial Sequence
  Description of Artificial Sequence: Synthetic oligonucleotide
  Target: LAMA2; (-) strand; PAM type: NRG; PAM sequence: CAG
ttctgacagtgctgccttag

SEQ ID NO: 88492 - DNA, 20 bp, Artificial Sequence
  Description of Artificial Sequence: Synthetic oligonucleotide
  Target: LAMA2; (-) strand; PAM type: NRG; PAM sequence: TAG
ggcttctgacagtgctgcct

SEQ ID NO: 88493 - DNA, 20 bp, Artificial Sequence
  Description of Artificial Sequence: Synthetic oligonucleotide
  Target: LAMA2; (-) strand; PAM type: NRG; PAM sequence: CAG
agaaaaaacgtggcttctga

SEQ ID NO: 88494 - DNA, 20 bp, Artificial Sequence
  Description of Artificial Sequence: Synthetic oligonucleotide
  Target: LAMA2; (-) strand; PAM type: NRG; PAM sequence: TGG
gtgtatgcctagaaaaaacg

SEQ ID NO: 88495 - DNA, 20 bp, Artificial Sequence
  Description of Artificial Sequence: Synthetic oligonucleotide
  Target: LAMA2; (-) strand; PAM type: NRG; PAM sequence: TAG
gaataaagtgtgtgtatgcc

SEQ ID NO: 88496 - DNA, 20 bp, Artificial Sequence
  Description of Artificial Sequence: Synthetic oligonucleotide
  Target: LAMA2; (-) strand; PAM type: NRG; PAM sequence: AAG
aactaaaggacaaaggaata

SEQ ID NO: 88497 - DNA, 20 bp, Artificial Sequence
  Description of Artificial Sequence: Synthetic oligonucleotide
  Target: LAMA2; (-) strand; PAM type: NRG; PAM sequence: AGG
tttaaggaactaaaggacaa

SEQ ID NO: 88498 - DNA, 20 bp, Artificial Sequence
  Description of Artificial Sequence: Synthetic oligonucleotide
  Target: LAMA2; (-) strand; PAM type: NRG; PAM sequence: AAG
gtttaaggaactaaaggaca

SEQ ID NO: 88499 - DNA, 20 bp, Artificial Sequence
  Description of Artificial Sequence: Synthetic oligonucleotide
  Target: LAMA2; (-) strand; PAM type: NRG; PAM sequence: AGG
tgggtagtttaaggaactaa

SEQ ID NO: 88500 - DNA, 20 bp, Artificial Sequence
  Description of Artificial Sequence: Synthetic oligonucleotide
  Target: LAMA2; (-) strand; PAM type: NRG; PAM sequence: AAG
atgggtagtttaaggaacta

SEQ ID NO: 88501 - DNA, 20 bp, Artificial Sequence
  Description of Artificial Sequence: Synthetic oligonucleotide
  Target: LAMA2; (-) strand; PAM type: NRG; PAM sequence: AGG
gaaagtgcatgggtagttta

SEQ ID NO: 88502 - DNA, 20 bp, Artificial Sequence
  Description of Artificial Sequence: Synthetic oligonucleotide
  Target: LAMA2; (-) strand; PAM type: NRG; PAM sequence: AAG
ggaaagtgcatgggtagttt

SEQ ID NO: 88503 - DNA, 20 bp, Artificial Sequence
  Description of Artificial Sequence: Synthetic oligonucleotide
  Target: LAMA2; (-) strand; PAM type: NRG; PAM sequence: TAG
agaggaggaaagtgcatggg

SEQ ID NO: 88504 - DNA, 20 bp, Artificial Sequence
  Description of Artificial Sequence: Synthetic oligonucleotide
  Target: LAMA2; (-) strand; PAM type: NRG; PAM sequence: GGG
gaaagaggaggaaagtgcat

SEQ ID NO: 88505 - DNA, 20 bp, Artificial Sequence
  Description of Artificial Sequence: Synthetic oligonucleotide
  Target: LAMA2; (-) strand; PAM type: NRG; PAM sequence: TGG
agaaagaggaggaaagtgca

SEQ ID NO: 88506 - DNA, 20 bp, Artificial Sequence
  Description of Artificial Sequence: Synthetic oligonucleotide
  Target: LAMA2; (-) strand; PAM type: NRG; PAM sequence: AAG
tgtaaaaagaaagaggagga

SEQ ID NO: 88507 - DNA, 20 bp, Artificial Sequence
  Description of Artificial Sequence: Synthetic oligonucleotide
  Target: LAMA2; (-) strand; PAM type: NRG; PAM sequence: AGG
tcaatgtaaaaagaaagagg

SEQ ID NO: 88508 - DNA, 20 bp, Artificial Sequence
  Description of Artificial Sequence: Synthetic oligonucleotide
  Target: LAMA2; (-) strand; PAM type: NRG; PAM sequence: GAG
atcaatgtaaaaagaaagag

SEQ ID NO: 88509 - DNA, 20 bp, Artificial Sequence
  Description of Artificial Sequence: Synthetic oligonucleotide
  Target: LAMA2; (-) strand; PAM type: NRG; PAM sequence: AGG
tcatcaatgtaaaaagaaag

SEQ ID NO: 88510 - DNA, 20 bp, Artificial Sequence
  Description of Artificial Sequence: Synthetic oligonucleotide
  Target: LAMA2; (-) strand; PAM type: NRG; PAM sequence: GAG
atcatcaatgtaaaaagaaa

SEQ ID NO: 88511 - DNA, 20 bp, Artificial Sequence
  Description of Artificial Sequence: Synthetic oligonucleotide
  Target: LAMA2; (-) strand; PAM type: NRG; PAM sequence: AAG
taatcatcaatgtaaaaaga

SEQ ID NO: 88512 - DNA, 20 bp, Artificial Sequence
  Description of Artificial Sequence: Synthetic oligonucleotide
  Target: LAMA2; (-) strand; PAM type: NRG; PAM sequence: AAG
attttaatcatcaatgtaaa

SEQ ID NO: 88513 - DNA, 20 bp, Artificial Sequence
  Description of Artificial Sequence: Synthetic oligonucleotide
  Target: LAMA2; (-) strand; PAM type: NRG; PAM sequence: AGG
gtttttatttaaaaaaattc

SEQ ID NO: 88514 - DNA, 20 bp, Artificial Sequence
  Description of Artificial Sequence: Synthetic oligonucleotide
  Target: LAMA2; (-) strand; PAM type: NRG; PAM sequence: CAG
ggtttttatttaaaaaaatt

SEQ ID NO: 88515 - DNA, 20 bp, Artificial Sequence
  Description of Artificial Sequence: Synthetic oligonucleotide
  Target: LAMA2; (-) strand; PAM type: NRG; PAM sequence: TGG
taaataataaaaaacttagt

SEQ ID NO: 88516 - DNA, 20 bp, Artificial Sequence
  Description of Artificial Sequence: Synthetic oligonucleotide
  Target: LAMA2; (-) strand; PAM type: NRG; PAM sequence: TAG
ataataaataataaaaaact

SEQ ID NO: 88517 - DNA, 20 bp, Artificial Sequence
  Description of Artificial Sequence: Synthetic oligonucleotide
  Target: LAMA2; (-) strand; PAM type: NRG; PAM sequence: GGG
gcactaaatgatattttgga

SEQ ID NO: 88518 - DNA, 20 bp, Artificial Sequence
  Description of Artificial Sequence: Synthetic oligonucleotide
  Target: LAMA2; (-) strand; PAM type: NRG; PAM sequence: AGG
tgcactaaatgatattttgg

SEQ ID NO: 88519 - DNA, 20 bp, Artificial Sequence
  Description of Artificial Sequence: Synthetic oligonucleotide
  Target: LAMA2; (-) strand; PAM type: NRG; PAM sequence: GAG
atgcactaaatgatattttg

SEQ ID NO: 88520 - DNA, 20 bp, Artificial Sequence
  Description of Artificial Sequence: Synthetic oligonucleotide
  Target: LAMA2; (-) strand; PAM type: NRG; PAM sequence: TGG
agatgcactaaatgatattt

SEQ ID NO: 88521 - DNA, 20 bp, Artificial Sequence
  Description of Artificial Sequence: Synthetic oligonucleotide
  Target: LAMA2; (-) strand; PAM type: NRG; PAM sequence: AAG
agttaaattgttttatgtct

SEQ ID NO: 88522 - DNA, 20 bp, Artificial Sequence
  Description of Artificial Sequence: Synthetic oligonucleotide
  Target: LAMA2; (-) strand; PAM type: NRG; PAM sequence: CAG
agctggacattttcttcaag

SEQ ID NO: 88523 - DNA, 20 bp, Artificial Sequence
  Description of Artificial Sequence: Synthetic oligonucleotide
  Target: LAMA2; (-) strand; PAM type: NRG; PAM sequence: AAG
agaagctggacattttcttc

SEQ ID NO: 88524 - DNA, 20 bp, Artificial Sequence
  Description of Artificial Sequence: Synthetic oligonucleotide
  Target: LAMA2; (-) strand; PAM type: NRG; PAM sequence: TGG
tggcatgccatttcagaagc

SEQ ID NO: 88525 - DNA, 20 bp, Artificial Sequence
  Description of Artificial Sequence: Synthetic oligonucleotide
  Target: LAMA2; (-) strand; PAM type: NRG; PAM sequence: AAG
ctaatggcatgccatttcag

SEQ ID NO: 88526 - DNA, 20 bp, Artificial Sequence
  Description of Artificial Sequence: Synthetic oligonucleotide
  Target: LAMA2; (-) strand; PAM type: NRG; PAM sequence: CAG
tatctaatggcatgccattt

SEQ ID NO: 88527 - DNA, 20 bp, Artificial Sequence
  Description of Artificial Sequence: Synthetic oligonucleotide
  Target: LAMA2; (-) strand; PAM type: NRG; PAM sequence: TGG
caaatgtcactaatatctaa

SEQ ID NO: 88528 - DNA, 20 bp, Artificial Sequence
  Description of Artificial Sequence: Synthetic oligonucleotide
  Target: LAMA2; (-) strand; PAM type: NRG; PAM sequence: AAG
tagtaactacatagaggttg

SEQ ID NO: 88529 - DNA, 20 bp, Artificial Sequence
  Description of Artificial Sequence: Synthetic oligonucleotide
  Target: LAMA2; (-) strand; PAM type: NRG; PAM sequence: AGG
tattgatagtaactacatag

SEQ ID NO: 88530 - DNA, 20 bp, Artificial Sequence
  Description of Artificial Sequence: Synthetic oligonucleotide
  Target: LAMA2; (-) strand; PAM type: NRG; PAM sequence: GAG
atattgatagtaactacata

SEQ ID NO: 88531 - DNA, 20 bp, Artificial Sequence
  Description of Artificial Sequence: Synthetic oligonucleotide
  Target: LAMA2; (-) strand; PAM type: NRG; PAM sequence: TAG
ctatattgatagtaactaca

SEQ ID NO: 88532 - DNA, 20 bp, Artificial Sequence
  Description of Artificial Sequence: Synthetic oligonucleotide
  Target: LAMA2; (-) strand; PAM type: NRG; PAM sequence: TAG
atattgcatggctatattga

SEQ ID NO: 88533 - DNA, 20 bp, Artificial Sequence
  Description of Artificial Sequence: Synthetic oligonucleotide
  Target: LAMA2; (-) strand; PAM type: NRG; PAM sequence: TGG
ggaactccatatatattgca

SEQ ID NO: 88534 - DNA, 20 bp, Artificial Sequence
  Description of Artificial Sequence: Synthetic oligonucleotide
  Target: LAMA2; (-) strand; PAM type: NRG; PAM sequence: TGG
attactttttgaaaggtatt

SEQ ID NO: 88535 - DNA, 20 bp, Artificial Sequence
  Description of Artificial Sequence: Synthetic oligonucleotide
  Target: LAMA2; (-) strand; PAM type: NRG; PAM sequence: AGG
tatcaacattactttttgaa

SEQ ID NO: 88536 - DNA, 20 bp, Artificial Sequence
  Description of Artificial Sequence: Synthetic oligonucleotide
  Target: LAMA2; (-) strand; PAM type: NRG; PAM sequence: AAG
gtatcaacattactttttga

SEQ ID NO: 88537 - DNA, 20 bp, Artificial Sequence
  Description of Artificial Sequence: Synthetic oligonucleotide
  Target: LAMA2; (-) strand; PAM type: NRG; PAM sequence: AAG
agtttcaatcaaaaggacat

SEQ ID NO: 88538 - DNA, 20 bp, Artificial Sequence
  Description of Artificial Sequence: Synthetic oligonucleotide
  Target: LAMA2; (-) strand; PAM type: NRG; PAM sequence: AGG
ataatgcagtttcaatcaaa

SEQ ID NO: 88539 - DNA, 20 bp, Artificial Sequence
  Description of Artificial Sequence: Synthetic oligonucleotide
  Target: LAMA2; (-) strand; PAM type: NRG; PAM sequence: AAG
tataatgcagtttcaatcaa

SEQ ID NO: 88540 - DNA, 20 bp, Artificial Sequence
  Description of Artificial Sequence: Synthetic oligonucleotide
  Target: LAMA2; (-) strand; PAM type: NRG; PAM sequence: CAG
ggaaagaacttcgtataatg

SEQ ID NO: 88541 - DNA, 20 bp, Artificial Sequence
  Description of Artificial Sequence: Synthetic oligonucleotide
  Target: LAMA2; (-) strand; PAM type: NRG; PAM sequence: AAG
aggttattgtgctgaaagga

SEQ ID NO: 88542 - DNA, 20 bp, Artificial Sequence
  Description of Artificial Sequence: Synthetic oligonucleotide
  Target: LAMA2; (-) strand; PAM type: NRG; PAM sequence: AGG
tttcaggttattgtgctgaa

SEQ ID NO: 88543 - DNA, 20 bp, Artificial Sequence
  Description of Artificial Sequence: Synthetic oligonucleotide
  Target: LAMA2; (-) strand; PAM type: NRG; PAM sequence: AAG
ttttcaggttattgtgctga

SEQ ID NO: 88544 - DNA, 20 bp, Artificial Sequence
  Description of Artificial Sequence: Synthetic oligonucleotide
  Target: LAMA2; (-) strand; PAM type: NRG; PAM sequence: AGG
aatagacagctatatttttc

SEQ ID NO: 88545 - DNA, 20 bp, Artificial Sequence
  Description of Artificial Sequence: Synthetic oligonucleotide
  Target: LAMA2; (-) strand; PAM type: NRG; PAM sequence: CAG
aaatagacagctatattttt

SEQ ID NO: 88546 - DNA, 20 bp, Artificial Sequence
  Description of Artificial Sequence: Synthetic oligonucleotide
  Target: LAMA2; (-) strand; PAM type: NRG; PAM sequence: CAG
aaatgtcttctttaaataga

SEQ ID NO: 88547 - DNA, 20 bp, Artificial Sequence
  Description of Artificial Sequence: Synthetic oligonucleotide
  Target: LAMA2; (-) strand; PAM type: NRG; PAM sequence: TAG
aagaaaatgtcttctttaaa

SEQ ID NO: 88548 - DNA, 20 bp, Artificial Sequence
  Description of Artificial Sequence: Synthetic oligonucleotide
  Target: LAMA2; (-) strand; PAM type: NRG; PAM sequence: AAG
atgataatattctgccaaac

SEQ ID NO: 88549 - DNA, 20 bp, Artificial Sequence
  Description of Artificial Sequence: Synthetic oligonucleotide
  Target: LAMA2; (-) strand; PAM type: NRG; PAM sequence: AGG
agcacatatcgacacaaatt

SEQ ID NO: 88550 - DNA, 20 bp, Artificial Sequence
  Description of Artificial Sequence: Synthetic oligonucleotide
  Target: LAMA2; (-) strand; PAM type: NRG; PAM sequence: TAG
tagcacatatcgacacaaat

SEQ ID NO: 88551 - DNA, 20 bp, Artificial Sequence
  Description of Artificial Sequence: Synthetic oligonucleotide
  Target: LAMA2; (-) strand; PAM type: NRG; PAM sequence: TAG
taaagtgagttttctaagcc

SEQ ID NO: 88552 - DNA, 20 bp, Artificial Sequence
  Description of Artificial Sequence: Synthetic oligonucleotide
  Target: LAMA2; (-) strand; PAM type: NRG; PAM sequence: AAG
aaacttaaagtgagttttct

SEQ ID NO: 88553 - DNA, 20 bp, Artificial Sequence
  Description of Artificial Sequence: Synthetic oligonucleotide
  Target: LAMA2; (-) strand; PAM type: NRG; PAM sequence: GAG
aatttagtaaaacttaaagt

SEQ ID NO: 88554 - DNA, 20 bp, Artificial Sequence
  Description of Artificial Sequence: Synthetic oligonucleotide
  Target: LAMA2; (-) strand; PAM type: NRG; PAM sequence: AAG
aataaatttagtaaaactta

SEQ ID NO: 88555 - DNA, 20 bp, Artificial Sequence
  Description of Artificial Sequence: Synthetic oligonucleotide
  Target: LAMA2; (-) strand; PAM type: NRG; PAM sequence: TAG
gttaaactccaaaataaatt

SEQ ID NO: 88556 - DNA, 20 bp, Artificial Sequence
  Description of Artificial Sequence: Synthetic oligonucleotide
  Target: LAMA2; (-) strand; PAM type: NRG; PAM sequence: GAG
ataaatcatgtcaaaagtaa

SEQ ID NO: 88557 - DNA, 20 bp, Artificial Sequence
  Description of Artificial Sequence: Synthetic oligonucleotide
  Target: LAMA2; (-) strand; PAM type: NRG; PAM sequence: AAG
atataaatcatgtcaaaagt

SEQ ID NO: 88558 - DNA, 20 bp, Artificial Sequence
  Description of Artificial Sequence: Synthetic oligonucleotide
  Target: LAMA2; (-) strand; PAM type: NRG; PAM sequence: AAG
tagaatataaatcatgtcaa

SEQ ID NO: 88559 - DNA, 20 bp, Artificial Sequence
  Description of Artificial Sequence: Synthetic oligonucleotide
  Target: LAMA2; (-) strand; PAM type: NRG; PAM sequence: TAG
ggaagaagctgagatctcct

SEQ ID NO: 88560 - DNA, 20 bp, Artificial Sequence
  Description of Artificial Sequence: Synthetic oligonucleotide
  Target: LAMA2; (-) strand; PAM type: NRG; PAM sequence: GAG
catttaagcaggaagaagct

SEQ ID NO: 88561 - DNA, 20 bp, Artificial Sequence
  Description of Artificial Sequence: Synthetic oligonucleotide
  Target: LAMA2; (-) strand; PAM type: NRG; PAM sequence: AAG
aatgtcatttaagcaggaag

SEQ ID NO: 88562 - DNA, 20 bp, Artificial Sequence
  Description of Artificial Sequence: Synthetic oligonucleotide
  Target: LAMA2; (-) strand; PAM type: NRG; PAM sequence: AAG
tgtaatgtcatttaagcagg

SEQ ID NO: 88563 - DNA, 20 bp, Artificial Sequence
  Description of Artificial Sequence: Synthetic oligonucleotide
  Target: LAMA2; (-) strand; PAM type: NRG; PAM sequence: AGG
ctatgtaatgtcatttaagc

SEQ ID NO: 88564 - DNA, 20 bp, Artificial Sequence
  Description of Artificial Sequence: Synthetic oligonucleotide
  Target: LAMA2; (-) strand; PAM type: NRG; PAM sequence: CAG
tctatgtaatgtcatttaag

SEQ ID NO: 88565 - DNA, 20 bp, Artificial Sequence
  Description of Artificial Sequence: Synthetic oligonucleotide
  Target: LAMA2; (-) strand; PAM type: NRG; PAM sequence: AAG
ctatctatgtaatgtcattt

SEQ ID NO: 88566 - DNA, 20 bp, Artificial Sequence
  Description of Artificial Sequence: Synthetic oligonucleotide
  Target: LAMA2; (-) strand; PAM type: NRG; PAM sequence: AAG
ctggcagacactgctataat

SEQ ID NO: 88567 - DNA, 20 bp, Artificial Sequence
  Description of Artificial Sequence: Synthetic oligonucleotide
  Target: LAMA2; (-) strand; PAM type: NRG; PAM sequence: CAG
caacaggactgcagccctgg

SEQ ID NO: 88568 - DNA, 20 bp, Artificial Sequence
  Description of Artificial Sequence: Synthetic oligonucleotide
  Target: LAMA2; (-) strand; PAM type: NRG; PAM sequence: TGG
taacaacaggactgcagccc

SEQ ID NO: 88569 - DNA, 20 bp, Artificial Sequence
  Description of Artificial Sequence: Synthetic oligonucleotide
  Target: LAMA2; (-) strand; PAM type: NRG; PAM sequence: CAG
gccttctaacaacaggactg

SEQ ID NO: 88570 - DNA, 20 bp, Artificial Sequence
  Description of Artificial Sequence: Synthetic oligonucleotide
  Target: LAMA2; (-) strand; PAM type: NRG; PAM sequence: AGG
tctgacagccttctaacaac

SEQ ID NO: 88571 - DNA, 20 bp, Artificial Sequence
  Description of Artificial Sequence: Synthetic oligonucleotide
  Target: LAMA2; (-) strand; PAM type: NRG; PAM sequence: CAG
ttctgacagccttctaacaa

SEQ ID NO: 88572 - DNA, 20 bp, Artificial Sequence
  Description of Artificial Sequence: Synthetic oligonucleotide
  Target: LAMA2; (-) strand; PAM type: NRG; PAM sequence: CAG
gcttacatttaaaattctga

SEQ ID NO: 88573 - DNA, 20 bp, Artificial Sequence
  Description of Artificial Sequence: Synthetic oligonucleotide
  Target: LAMA2; (-) strand; PAM type: NRG; PAM sequence: AGG
ttataacacctgggaaagga

SEQ ID NO: 88574 - DNA, 20 bp, Artificial Sequence
  Description of Artificial Sequence: Synthetic oligonucleotide
  Target: LAMA2; (-) strand; PAM type: NRG; PAM sequence: AAG
attataacacctgggaaagg

SEQ ID NO: 88575 - DNA, 20 bp, Artificial Sequence
  Description of Artificial Sequence: Synthetic oligonucleotide
  Target: LAMA2; (-) strand; PAM type: NRG; PAM sequence: AGG
taaattataacacctgggaa

SEQ ID NO: 88576 - DNA, 20 bp, Artificial Sequence
  Description of Artificial Sequence: Synthetic oligonucleotide
  Target: LAMA2; (-) strand; PAM type: NRG; PAM sequence: AAG
ttaaattataacacctggga

SEQ ID NO: 88577 - DNA, 20 bp, Artificial Sequence
  Description of Artificial Sequence: Synthetic oligonucleotide
  Target: LAMA2; (-) strand; PAM type: NRG; PAM sequence: GGG
aagattaaattataacacct

SEQ ID NO: 88578 - DNA, 20 bp, Artificial Sequence
  Description of Artificial Sequence: Synthetic oligonucleotide
  Target: LAMA2; (-) strand; PAM type: NRG; PAM sequence: TGG
gaagattaaattataacacc

SEQ ID NO: 88579 - DNA, 20 bp, Artificial Sequence
  Description of Artificial Sequence: Synthetic oligonucleotide
  Target: LAMA2; (-) strand; PAM type: NRG; PAM sequence: AAG
cagaaattaataggagttag

SEQ ID NO: 88580 - DNA, 20 bp, Artificial Sequence
  Description of Artificial Sequence: Synthetic oligonucleotide
  Target: LAMA2; (-) strand; PAM type: NRG; PAM sequence: TAG
cttcagaaattaataggagt

SEQ ID NO: 88581 - DNA, 20 bp, Artificial Sequence
  Description of Artificial Sequence: Synthetic oligonucleotide
  Target: LAMA2; (-) strand; PAM type: NRG; PAM sequence: GAG
cagtcttcagaaattaatag

SEQ ID NO: 88582 - DNA, 20 bp, Artificial Sequence
  Description of Artificial Sequence: Synthetic oligonucleotide
  Target: LAMA2; (-) strand; PAM type: NRG; PAM sequence: AGG
cacagtcttcagaaattaat

SEQ ID NO: 88583 - DNA, 20 bp, Artificial Sequence
  Description of Artificial Sequence: Synthetic oligonucleotide
  Target: LAMA2; (-) strand; PAM type: NRG; PAM sequence: TAG
ccacagtcttcagaaattaa

SEQ ID NO: 88584 - DNA, 20 bp, Artificial Sequence
  Description of Artificial Sequence: Synthetic oligonucleotide
  Target: LAMA2; (-) strand; PAM type: NRG; PAM sequence: CAG
taggatggccccacagtctt

SEQ ID NO: 88585 - DNA, 20 bp, Artificial Sequence
  Description of Artificial Sequence: Synthetic oligonucleotide
  Target: LAMA2; (-) strand; PAM type: NRG; PAM sequence: CAG
taagatataggatggcccca

SEQ ID NO: 88586 - DNA, 20 bp, Artificial Sequence
  Description of Artificial Sequence: Synthetic oligonucleotide
  Target: LAMA2; (-) strand; PAM type: NRG; PAM sequence: TGG
ttttgttctaagatatagga

SEQ ID NO: 88587 - DNA, 20 bp, Artificial Sequence
  Description of Artificial Sequence: Synthetic oligonucleotide
  Target: LAMA2; (-) strand; PAM type: NRG; PAM sequence: AGG
tatattttgttctaagatat

SEQ ID NO: 88588 - DNA, 20 bp, Artificial Sequence
  Description of Artificial Sequence: Synthetic oligonucleotide
  Target: LAMA2; (-) strand; PAM type: NRG; PAM sequence: TAG
ctatattttgttctaagata

SEQ ID NO: 88589 - DNA, 20 bp, Artificial Sequence
  Description of Artificial Sequence: Synthetic oligonucleotide
  Target: LAMA2; (-) strand; PAM type: NRG; PAM sequence: AAG
acgtatctatattttgttct

SEQ ID NO: 88590 - DNA, 20 bp, Artificial Sequence
  Description of Artificial Sequence: Synthetic oligonucleotide
  Target: LAMA2; (-) strand; PAM type: NRG; PAM sequence: AGG
taaatatggagaaaaaaatc

SEQ ID NO: 88591 - DNA, 20 bp, Artificial Sequence
  Description of Artificial Sequence: Synthetic oligonucleotide
  Target: LAMA2; (-) strand; PAM type: NRG; PAM sequence: CAG
gtaaatatggagaaaaaaat

SEQ ID NO: 88592 - DNA, 20 bp, Artificial Sequence
  Description of Artificial Sequence: Synthetic oligonucleotide
  Target: LAMA2; (-) strand; PAM type: NRG; PAM sequence: GAG
tttgggggaaggtaaatatg

SEQ ID NO: 88593 - DNA, 20 bp, Artificial Sequence
  Description of Artificial Sequence: Synthetic oligonucleotide
  Target: LAMA2; (-) strand; PAM type: NRG; PAM sequence: TGG
catttgggggaaggtaaata

SEQ ID NO: 88594 - DNA, 20 bp, Artificial Sequence
  Description of Artificial Sequence: Synthetic oligonucleotide
  Target: LAMA2; (-) strand; PAM type: NRG; PAM sequence: AGG
aaattaaaacatttggggga

SEQ ID NO: 88595 - DNA, 20 bp, Artificial Sequence
  Description of Artificial Sequence: Synthetic oligonucleotide
  Target: LAMA2; (-) strand; PAM type: NRG; PAM sequence: AAG
aaaattaaaacatttggggg

SEQ ID NO: 88596 - DNA, 20 bp, Artificial Sequence
  Description of Artificial Sequence: Synthetic oligonucleotide
  Target: LAMA2; (-) strand; PAM type: NRG; PAM sequence: GGG
aataaaattaaaacatttgg

SEQ ID NO: 88597 - DNA, 20 bp, Artificial Sequence
  Description of Artificial Sequence: Synthetic oligonucleotide
  Target: LAMA2; (-) strand; PAM type: NRG; PAM sequence: GGG
taataaaattaaaacatttg

SEQ ID NO: 88598 - DNA, 20 bp, Artificial Sequence
  Description of Artificial Sequence: Synthetic oligonucleotide
  Target: LAMA2; (-) strand; PAM type: NRG; PAM sequence: GGG
ataataaaattaaaacattt

SEQ ID NO: 88599 - DNA, 20 bp, Artificial Sequence
  Description of Artificial Sequence: Synthetic oligonucleotide
  Target: LAMA2; (-) strand; PAM type: NRG; PAM sequence: TGG
aataataaaattaaaacatt

SEQ ID NO: 88600 - DNA, 20 bp, Artificial Sequence
  Description of Artificial Sequence: Synthetic oligonucleotide
  Target: LAMA2; (-) strand; PAM type: NRG; PAM sequence: CAG
tacctgagggattcactagc

SEQ ID NO: 88601 - DNA, 20 bp, Artificial Sequence
  Description of Artificial Sequence: Synthetic oligonucleotide
  Target: LAMA2; (-) strand; PAM type: NRG; PAM sequence: TAG
gaaatacctgagggattcac

SEQ ID NO: 88602 - DNA, 20 bp, Artificial Sequence
  Description of Artificial Sequence: Synthetic oligonucleotide
  Target: LAMA2; (-) strand; PAM type: NRG; PAM sequence: GGG
caatataaagaaatacctga

SEQ ID NO: 88603 - DNA, 20 bp, Artificial Sequence
  Description of Artificial Sequence: Synthetic oligonucleotide
  Target: LAMA2; (-) strand; PAM type: NRG; PAM sequence: AGG
tcaatataaagaaatacctg

SEQ ID NO: 88604 - DNA, 20 bp, Artificial Sequence
  Description of Artificial Sequence: Synthetic oligonucleotide
  Target: LAMA2; (-) strand; PAM type: NRG; PAM sequence: GAG
gtcaatataaagaaatacct

SEQ ID NO: 88605 - DNA, 20 bp, Artificial Sequence
  Description of Artificial Sequence: Synthetic oligonucleotide
  Target: LAMA2; (-) strand; PAM type: NRG; PAM sequence: AAG
catacaaatcagtcaatata

SEQ ID NO: 88606 - DNA, 20 bp, Artificial Sequence
  Description of Artificial Sequence: Synthetic oligonucleotide
  Target: LAMA2; (-) strand; PAM type: NRG; PAM sequence: CAG
ttagcctacaacatacaaat

SEQ ID NO: 88607 - DNA, 20 bp, Artificial Sequence
  Description of Artificial Sequence: Synthetic oligonucleotide
  Target: LAMA2; (-) strand; PAM type: NRG; PAM sequence: TAG
tcttggaggagggcattatt

SEQ ID NO: 88608 - DNA, 20 bp, Artificial Sequence
  Description of Artificial Sequence: Synthetic oligonucleotide
  Target: LAMA2; (-) strand; PAM type: NRG; PAM sequence: GGG
gctatgggtatcttggagga

SEQ ID NO: 88609 - DNA, 20 bp, Artificial Sequence
  Description of Artificial Sequence: Synthetic oligonucleotide
  Target: LAMA2; (-) strand; PAM type: NRG; PAM sequence: AGG
agctatgggtatcttggagg

SEQ ID NO: 88610 - DNA, 20 bp, Artificial Sequence
  Description of Artificial Sequence: Synthetic oligonucleotide
  Target: LAMA2; (-) strand; PAM type: NRG; PAM sequence: GAG
cagctatgggtatcttggag

SEQ ID NO: 88611 - DNA, 20 bp, Artificial Sequence
  Description of Artificial Sequence: Synthetic oligonucleotide
  Target: LAMA2; (-) strand; PAM type: NRG; PAM sequence: AGG
ttcagctatgggtatcttgg

SEQ ID NO: 88612 - DNA, 20 bp, Artificial Sequence
  Description of Artificial Sequence: Synthetic oligonucleotide
  Target: LAMA2; (-) strand; PAM type: NRG; PAM sequence: GAG
attcagctatgggtatcttg

SEQ ID NO: 88613 - DNA, 20 bp, Artificial Sequence
  Description of Artificial Sequence: Synthetic oligonucleotide
  Target: LAMA2; (-) strand; PAM type: NRG; PAM sequence: TGG
aaattcagctatgggtatct

SEQ ID NO: 88614 - DNA, 20 bp, Artificial Sequence
  Description of Artificial Sequence: Synthetic oligonucleotide
  Target: LAMA2; (-) strand; PAM type: NRG; PAM sequence: GGG
ggttctggaaattcagctat

SEQ ID NO: 88615 - DNA, 20 bp, Artificial Sequence
  Description of Artificial Sequence: Synthetic oligonucleotide
  Target: LAMA2; (-) strand; PAM type: NRG; PAM sequence: TGG
aggttctggaaattcagcta

SEQ ID NO: 88616 - DNA, 20 bp, Artificial Sequence
  Description of Artificial Sequence: Synthetic oligonucleotide
  Target: LAMA2; (-) strand; PAM type: NRG; PAM sequence: CAG
atttacaggttctggaaatt

SEQ ID NO: 88617 - DNA, 20 bp, Artificial Sequence
  Description of Artificial Sequence: Synthetic oligonucleotide
  Target: LAMA2; (-) strand; PAM type: NRG; PAM sequence: TGG
gggaacatatttacaggttc

SEQ ID NO: 88618 - DNA, 20 bp, Artificial Sequence
  Description of Artificial Sequence: Synthetic oligonucleotide
  Target: LAMA2; (-) strand; PAM type: NRG; PAM sequence: AGG
gtaagagggaacatatttac

SEQ ID NO: 88619 - DNA, 20 bp, Artificial Sequence
  Description of Artificial Sequence: Synthetic oligonucleotide
  Target: LAMA2; (-) strand; PAM type: NRG; PAM sequence: CAG
tgtaagagggaacatattta

SEQ ID NO: 88620 - DNA, 20 bp, Artificial Sequence
  Description of Artificial Sequence: Synthetic oligonucleotide
  Target: LAMA2; (-) strand; PAM type: NRG; PAM sequence: GGG
gtcccttttgccatgtaaga

SEQ ID NO: 88621 - DNA, 20 bp, Artificial Sequence
  Description of Artificial Sequence: Synthetic oligonucleotide
  Target: LAMA2; (-) strand; PAM type: NRG; PAM sequence: AGG
agtcccttttgccatgtaag

SEQ ID NO: 88622 - DNA, 20 bp, Artificial Sequence
  Description of Artificial Sequence: Synthetic oligonucleotide
  Target: LAMA2; (-) strand; PAM type: NRG; PAM sequence: GAG
aagtcccttttgccatgtaa

SEQ ID NO: 88623 - DNA, 20 bp, Artificial Sequence
  Description of Artificial Sequence: Synthetic oligonucleotide
  Target: LAMA2; (-) strand; PAM type: NRG; PAM sequence: AAG
caaagtcccttttgccatgt

SEQ ID NO: 88624 - DNA, 20 bp, Artificial Sequence
  Description of Artificial Sequence: Synthetic oligonucleotide
  Target: LAMA2; (-) strand; PAM type: NRG; PAM sequence: AAG
taaacttagtcacatttgca

SEQ ID NO: 88625 - DNA, 20 bp, Artificial Sequence
  Description of Artificial Sequence: Synthetic oligonucleotide
  Target: LAMA2; (-) strand; PAM type: NRG; PAM sequence: TAG
caccttaaggttcttaaact

SEQ ID NO: 88626 - DNA, 20 bp, Artificial Sequence
  Description of Artificial Sequence: Synthetic oligonucleotide
  Target: LAMA2; (-) strand; PAM type: NRG; PAM sequence: AGG
aggatcatcttcccacctta

SEQ ID NO: 88627 - DNA, 20 bp, Artificial Sequence
  Description of Artificial Sequence: Synthetic oligonucleotide
  Target: LAMA2; (-) strand; PAM type: NRG; PAM sequence: AAG
caggatcatcttcccacctt

SEQ ID NO: 88628 - DNA, 20 bp, Artificial Sequence
  Description of Artificial Sequence: Synthetic oligonucleotide
  Target: LAMA2; (-) strand; PAM type: NRG; PAM sequence: AGG
tcggtccacctggataacgc

SEQ ID NO: 88629 - DNA, 20 bp, Artificial Sequence
  Description of Artificial Sequence: Synthetic oligonucleotide
  Target: LAMA2; (-) strand; PAM type: NRG; PAM sequence: CAG
ttcggtccacctggataacg

SEQ ID NO: 88630 - DNA, 20 bp, Artificial Sequence
  Description of Artificial Sequence: Synthetic oligonucleotide
  Target: LAMA2; (-) strand; PAM type: NRG; PAM sequence: TGG
gtgactggattcggtccacc

SEQ ID NO: 88631 - DNA, 20 bp, Artificial Sequence
  Description of Artificial Sequence: Synthetic oligonucleotide
  Target: LAMA2; (-) strand; PAM type: NRG; PAM sequence: CGG
aggtctcatgtgactggatt

SEQ ID NO: 88632 - DNA, 20 bp, Artificial Sequence
  Description of Artificial Sequence: Synthetic oligonucleotide
  Target: LAMA2; (-) strand; PAM type: NRG; PAM sequence: TGG
cttttaaggtctcatgtgac

SEQ ID NO: 88633 - DNA, 20 bp, Artificial Sequence
  Description of Artificial Sequence: Synthetic oligonucleotide
  Target: LAMA2; (-) strand; PAM type: NRG; PAM sequence: AGG
gaccccctcttctactttta

SEQ ID NO: 88634 - DNA, 20 bp, Artificial Sequence
  Description of Artificial Sequence: Synthetic oligonucleotide
  Target: LAMA2; (-) strand; PAM type: NRG; PAM sequence: AAG
tgaccccctcttctactttt

SEQ ID NO: 88635 - DNA, 20 bp, Artificial Sequence
  Description of Artificial Sequence: Synthetic oligonucleotide
  Target: LAMA2; (-) strand; PAM type: NRG; PAM sequence: CAG
ggactctccatctttaaagc

SEQ ID NO: 88636 - DNA, 20 bp, Artificial Sequence
  Description of Artificial Sequence: Synthetic oligonucleotide
  Target: LAMA2; (-) strand; PAM type: NRG; PAM sequence: AAG
caagggactctccatcttta

SEQ ID NO: 88637 - DNA, 20 bp, Artificial Sequence
  Description of Artificial Sequence: Synthetic oligonucleotide
  Target: LAMA2; (-) strand; PAM type: NRG; PAM sequence: GGG
attcacattccttggttcaa

SEQ ID NO: 88638 - DNA, 20 bp, Artificial Sequence
  Description of Artificial Sequence: Synthetic oligonucleotide
  Target: LAMA2; (-) strand; PAM type: NRG; PAM sequence: AGG
cattcacattccttggttca

SEQ ID NO: 88639 - DNA, 20 bp, Artificial Sequence
  Description of Artificial Sequence: Synthetic oligonucleotide
  Target: LAMA2; (-) strand; PAM type: NRG; PAM sequence: AAG
tcattcacattccttggttc

SEQ ID NO: 88640 - DNA, 20 bp, Artificial Sequence
  Description of Artificial Sequence: Synthetic oligonucleotide
  Target: LAMA2; (-) strand; PAM type: NRG; PAM sequence: TGG
tagaggtcattcacattcct

SEQ ID NO: 88641 - DNA, 20 bp, Artificial Sequence
  Description of Artificial Sequence: Synthetic oligonucleotide
  Target: LAMA2; (-) strand; PAM type: NRG; PAM sequence: AGG
tgctcttttccaggttctag

SEQ ID NO: 88642 - DNA, 20 bp, Artificial Sequence
  Description of Artificial Sequence: Synthetic oligonucleotide
  Target: LAMA2; (-) strand; PAM type: NRG; PAM sequence: GAG
atgctcttttccaggttcta

SEQ ID NO: 88643 - DNA, 20 bp, Artificial Sequence
  Description of Artificial Sequence: Synthetic oligonucleotide
  Target: LAMA2; (-) strand; PAM type: NRG; PAM sequence: TAG
caatgctcttttccaggttc

SEQ ID NO: 88644 - DNA, 20 bp, Artificial Sequence
  Description of Artificial Sequence: Synthetic oligonucleotide
  Target: LAMA2; (-) strand; PAM type: NRG; PAM sequence: AGG
gtcagccaatgctcttttcc

SEQ ID NO: 88645 - DNA, 20 bp, Artificial Sequence
  Description of Artificial Sequence: Synthetic oligonucleotide
  Target: LAMA2; (-) strand; PAM type: NRG; PAM sequence: CAG
tgtcagccaatgctcttttc

SEQ ID NO: 88646 - DNA, 20 bp, Artificial Sequence
  Description of Artificial Sequence: Synthetic oligonucleotide
  Target: LAMA2; (-) strand; PAM type: NRG; PAM sequence: CAG
cccatttccttgctgtttgt

SEQ ID NO: 88647 - DNA, 20 bp, Artificial Sequence
  Description of Artificial Sequence: Synthetic oligonucleotide
  Target: LAMA2; (-) strand; PAM type: NRG; PAM sequence: AGG
ttcttgtggttgtggaactg

SEQ ID NO: 88648 - DNA, 20 bp, Artificial Sequence
  Description of Artificial Sequence: Synthetic oligonucleotide
  Target: LAMA2; (-) strand; PAM type: NRG; PAM sequence: GAG
tttcttgtggttgtggaact

SEQ ID NO: 88649 - DNA, 20 bp, Artificial Sequence
  Description of Artificial Sequence: Synthetic oligonucleotide
  Target: LAMA2; (-) strand; PAM type: NRG; PAM sequence: TGG
gaattcatttcttgtggttg

SEQ ID NO: 88650 - DNA, 20 bp, Artificial Sequence
  Description of Artificial Sequence: Synthetic oligonucleotide
  Target: LAMA2; (-) strand; PAM type: NRG; PAM sequence: TGG
ttggcagaattcatttcttg

SEQ ID NO: 88651 - DNA, 20 bp, Artificial Sequence
  Description of Artificial Sequence: Synthetic oligonucleotide
  Target: LAMA2; (-) strand; PAM type: NRG; PAM sequence: CAG
ttgttcattcaggttgttgg

SEQ ID NO: 88652 - DNA, 20 bp, Artificial Sequence
  Description of Artificial Sequence: Synthetic oligonucleotide
  Target: LAMA2; (-) strand; PAM type: NRG; PAM sequence: TGG
tccttgttcattcaggttgt

SEQ ID NO: 88653 - DNA, 20 bp, Artificial Sequence
  Description of Artificial Sequence: Synthetic oligonucleotide
  Target: LAMA2; (-) strand; PAM type: NRG; PAM sequence: AGG
atctatctccttgttcattc

SEQ ID NO: 88654 - DNA, 20 bp, Artificial Sequence
  Description of Artificial Sequence: Synthetic oligonucleotide
  Target: LAMA2; (-) strand; PAM type: NRG; PAM sequence: CAG
aatctatctccttgttcatt

SEQ ID NO: 88655 - DNA, 20 bp, Artificial Sequence
  Description of Artificial Sequence: Synthetic oligonucleotide
  Target: LAMA2; (-) strand; PAM type: NRG; PAM sequence: GAG
cctttctggtggctctagag

SEQ ID NO: 88656 - DNA, 20 bp, Artificial Sequence
  Description of Artificial Sequence: Synthetic oligonucleotide
  Target: LAMA2; (-) strand; PAM type: NRG; PAM sequence: AGG
ttcctttctggtggctctag

SEQ ID NO: 88657 - DNA, 20 bp, Artificial Sequence
  Description of Artificial Sequence: Synthetic oligonucleotide
  Target: LAMA2; (-) strand; PAM type: NRG; PAM sequence: GAG
attcctttctggtggctcta

SEQ ID NO: 88658 - DNA, 20 bp, Artificial Sequence
  Description of Artificial Sequence: Synthetic oligonucleotide
  Target: LAMA2; (-) strand; PAM type: NRG; PAM sequence: TAG
acattcctttctggtggctc

SEQ ID NO: 88659 - DNA, 20 bp, Artificial Sequence
  Description of Artificial Sequence: Synthetic oligonucleotide
  Target: LAMA2; (-) strand; PAM type: NRG; PAM sequence: TGG
atggatacattcctttctgg

SEQ ID NO: 88660 - DNA, 20 bp, Artificial Sequence
  Description of Artificial Sequence: Synthetic oligonucleotide
  Target: LAMA2; (-) strand; PAM type: NRG; PAM sequence: TGG
ggcatggatacattcctttc

SEQ ID NO: 88661 - DNA, 20 bp, Artificial Sequence
  Description of Artificial Sequence: Synthetic oligonucleotide
  Target: LAMA2; (-) strand; PAM type: NRG; PAM sequence: TGG
ctaaaatgatggtgtcggca

SEQ ID NO: 88662 - DNA, 20 bp, Artificial Sequence
  Description of Artificial Sequence: Synthetic oligonucleotide
  Target: LAMA2; (-) strand; PAM type: NRG; PAM sequence: CGG
aatgactaaaatgatggtgt

SEQ ID NO: 88663 - DNA, 20 bp, Artificial Sequence
  Description of Artificial Sequence: Synthetic oligonucleotide
  Target: LAMA2; (-) strand; PAM type: NRG; PAM sequence: TGG
agctaaaatgactaaaatga

SEQ ID NO: 88664 - DNA, 20 bp, Artificial Sequence
  Description of Artificial Sequence: Synthetic oligonucleotide
  Target: LAMA2; (-) strand; PAM type: NRG; PAM sequence: TAG
attccaatatgggtctcctt

SEQ ID NO: 88665 - DNA, 20 bp, Artificial Sequence
  Description of Artificial Sequence: Synthetic oligonucleotide
  Target: LAMA2; (-) strand; PAM type: NRG; PAM sequence: GGG
gtaggcgaatattccaatat

SEQ ID NO: 88666 - DNA, 20 bp, Artificial Sequence
  Description of Artificial Sequence: Synthetic oligonucleotide
  Target: LAMA2; (-) strand; PAM type: NRG; PAM sequence: TGG
tgtaggcgaatattccaata

SEQ ID NO: 88667 - DNA, 20 bp, Artificial Sequence
  Description of Artificial Sequence: Synthetic oligonucleotide
  Target: LAMA2; (-) strand; PAM type: NRG; PAM sequence: AGG
ttgttggaatacagttctgt

SEQ ID NO: 88668 - DNA, 20 bp, Artificial Sequence
  Description of Artificial Sequence: Synthetic oligonucleotide
  Target: LAMA2; (-) strand; PAM type: NRG; PAM sequence: TAG
cttgttggaatacagttctg

SEQ ID NO: 88669 - DNA, 20 bp, Artificial Sequence
  Description of Artificial Sequence: Synthetic oligonucleotide
  Target: LAMA2; (-) strand; PAM type: NRG; PAM sequence: CAG
tatgcatccttgttggaata

SEQ ID NO: 88670 - DNA, 20 bp, Artificial Sequence
  Description of Artificial Sequence: Synthetic oligonucleotide
  Target: LAMA2; (-) strand; PAM type: NRG; PAM sequence: TGG
tccaacatatgcatccttgt

SEQ ID NO: 88671 - DNA, 20 bp, Artificial Sequence
  Description of Artificial Sequence: Synthetic oligonucleotide
  Target: LAMA2; (-) strand; PAM type: NRG; PAM sequence: AGG
atattatctcatggttctgt

SEQ ID NO: 88672 - DNA, 20 bp, Artificial Sequence
  Description of Artificial Sequence: Synthetic oligonucleotide
  Target: LAMA2; (-) strand; PAM type: NRG; PAM sequence: TAG
tatattatctcatggttctg

SEQ ID NO: 88673 - DNA, 20 bp, Artificial Sequence
  Description of Artificial Sequence: Synthetic oligonucleotide
  Target: LAMA2; (-) strand; PAM type: NRG; PAM sequence: TGG
aacacaaatatattatctca

SEQ ID NO: 88674 - DNA, 20 bp, Artificial Sequence
  Description of Artificial Sequence: Synthetic oligonucleotide
  Target: LAMA2; (-) strand; PAM type: NRG; PAM sequence: AAG
gtaacaaacttagcaattga

SEQ ID NO: 88675 - DNA, 20 bp, Artificial Sequence
  Description of Artificial Sequence: Synthetic oligonucleotide
  Target: LAMA2; (-) strand; PAM type: NRG; PAM sequence: TAG
tattgctaccgtaacaaact

SEQ ID NO: 88676 - DNA, 20 bp, Artificial Sequence
  Description of Artificial Sequence: Synthetic oligonucleotide
  Target: LAMA2; (-) strand; PAM type: NRG; PAM sequence: TAG
gggtcaactgtacattgcat

SEQ ID NO: 88677 - DNA, 20 bp, Artificial Sequence
  Description of Artificial Sequence: Synthetic oligonucleotide
  Target: LAMA2; (-) strand; PAM type: NRG; PAM sequence: GGG
ctaatccctgcattgtgcaa

SEQ ID NO: 88678 - DNA, 20 bp, Artificial Sequence
  Description of Artificial Sequence: Synthetic oligonucleotide
  Target: LAMA2; (-) strand; PAM type: NRG; PAM sequence: AGG
cctaatccctgcattgtgca

SEQ ID NO: 88679 - DNA, 20 bp, Artificial Sequence
  Description of Artificial Sequence: Synthetic oligonucleotide
  Target: LAMA2; (-) strand; PAM type: NRG; PAM sequence: AAG
ccctaatccctgcattgtgc

SEQ ID NO: 88680 - DNA, 20 bp, Artificial Sequence
  Description of Artificial Sequence: Synthetic oligonucleotide
  Target: LAMA2; (-) strand; PAM type: NRG; PAM sequence: CAG
attttcaactgtgtagaggt

SEQ ID NO: 88681 - DNA, 20 bp, Artificial Sequence
  Description of Artificial Sequence: Synthetic oligonucleotide
  Target: LAMA2; (-) strand; PAM type: NRG; PAM sequence: AGG
acaaattttcaactgtgtag

SEQ ID NO: 88682 - DNA, 20 bp, Artificial Sequence
  Description of Artificial Sequence: Synthetic oligonucleotide
  Target: LAMA2; (-) strand; PAM type: NRG; PAM sequence: GAG
aacaaattttcaactgtgta

SEQ ID NO: 88683 - DNA, 20 bp, Artificial Sequence
  Description of Artificial Sequence: Synthetic oligonucleotide
  Target: LAMA2; (-) strand; PAM type: NRG; PAM sequence: TAG
taaacaaattttcaactgtg

SEQ ID NO: 88684 - DNA, 20 bp, Artificial Sequence
  Description of Artificial Sequence: Synthetic oligonucleotide
  Target: LAMA2; (-) strand; PAM type: NRG; PAM sequence: GAG
ttagtagttatgtttttagg

SEQ ID NO: 88685 - DNA, 20 bp, Artificial Sequence
  Description of Artificial Sequence: Synthetic oligonucleotide
  Target: LAMA2; (-) strand; PAM type: NRG; PAM sequence: GGG
tcttagtagttatgttttta

SEQ ID NO: 88686 - DNA, 20 bp, Artificial Sequence
  Description of Artificial Sequence: Synthetic oligonucleotide
  Target: LAMA2; (-) strand; PAM type: NRG; PAM sequence: AGG
ctcttagtagttatgttttt

SEQ ID NO: 88687 - DNA, 20 bp, Artificial Sequence
  Description of Artificial Sequence: Synthetic oligonucleotide
  Target: LAMA2; (-) strand; PAM type: NRG; PAM sequence: TAG
actcttagtagttatgtttt

SEQ ID NO: 88688 - DNA, 20 bp, Artificial Sequence
  Description of Artificial Sequence: Synthetic oligonucleotide
  Target: LAMA2; (-) strand; PAM type: NRG; PAM sequence: TAG
gttcaacagtagactcttag

SEQ ID NO: 88689 - DNA, 20 bp, Artificial Sequence
  Description of Artificial Sequence: Synthetic oligonucleotide
  Target: LAMA2; (-) strand; PAM type: NRG; PAM sequence: TAG
tctgttcaacagtagactct

SEQ ID NO: 88690 - DNA, 20 bp, Artificial Sequence
  Description of Artificial Sequence: Synthetic oligonucleotide
  Target: LAMA2; (-) strand; PAM type: NRG; PAM sequence: TAG
gtaaggcttctgttcaacag

SEQ ID NO: 88691 - DNA, 20 bp, Artificial Sequence
  Description of Artificial Sequence: Synthetic oligonucleotide
  Target: LAMA2; (-) strand; PAM type: NRG; PAM sequence: CAG
tcagtaaggcttctgttcaa

SEQ ID NO: 88692 - DNA, 20 bp, Artificial Sequence
  Description of Artificial Sequence: Synthetic oligonucleotide
  Target: LAMA2; (-) strand; PAM type: NRG; PAM sequence: AGG
aattgcttatgttatcagta

SEQ ID NO: 88693 - DNA, 20 bp, Artificial Sequence
  Description of Artificial Sequence: Synthetic oligonucleotide
  Target: LAMA2; (-) strand; PAM type: NRG; PAM sequence: AAG
aaattgcttatgttatcagt

SEQ ID NO: 88694 - DNA, 20 bp, Artificial Sequence
  Description of Artificial Sequence: Synthetic oligonucleotide
  Target: LAMA2; (-) strand; PAM type: NRG; PAM sequence: CAG
taataaattgcttatgttat

SEQ ID NO: 88695 - DNA, 20 bp, Artificial Sequence
  Description of Artificial Sequence: Synthetic oligonucleotide
  Target: LAMA2; (-) strand; PAM type: NRG; PAM sequence: CAG
cacactttattataagaata

SEQ ID NO: 88696 - DNA, 20 bp, Artificial Sequence
  Description of Artificial Sequence: Synthetic oligonucleotide
  Target: LAMA2; (-) strand; PAM type: NRG; PAM sequence: AAG
tctctaacacactttattat

SEQ ID NO: 88697 - DNA, 20 bp, Artificial Sequence
  Description of Artificial Sequence: Synthetic oligonucleotide
  Target: LAMA2; (-) strand; PAM type: NRG; PAM sequence: TAG
tatcttccttatgattttct

SEQ ID NO: 88698 - DNA, 20 bp, Artificial Sequence
  Description of Artificial Sequence: Synthetic oligonucleotide
  Target: LAMA2; (-) strand; PAM type: NRG; PAM sequence: AAG
tgatgcagatgaagaccttt

SEQ ID NO: 88699 - DNA, 20 bp, Artificial Sequence
  Description of Artificial Sequence: Synthetic oligonucleotide
  Target: LAMA2; (-) strand; PAM type: NRG; PAM sequence: AAG
acatgaagatgatgcagatg

SEQ ID NO: 88700 - DNA, 20 bp, Artificial Sequence
  Description of Artificial Sequence: Synthetic oligonucleotide
  Target: LAMA2; (-) strand; PAM type: NRG; PAM sequence: CAG
ttttcaacatgaagatgatg

SEQ ID NO: 88701 - DNA, 20 bp, Artificial Sequence
  Description of Artificial Sequence: Synthetic oligonucleotide
  Target: LAMA2; (-) strand; PAM type: NRG; PAM sequence: AAG
tccttagccttttcaacatg

SEQ ID NO: 88702 - DNA, 20 bp, Artificial Sequence
  Description of Artificial Sequence: Synthetic oligonucleotide
  Target: LAMA2; (-) strand; PAM type: NRG; PAM sequence: TAG
ctcctcttcttcctcctcct

SEQ ID NO: 88703 - DNA, 20 bp, Artificial Sequence
  Description of Artificial Sequence: Synthetic oligonucleotide
  Target: LAMA2; (-) strand; PAM type: NRG; PAM sequence: AAG
tctgcctcccctgagacagc

SEQ ID NO: 88704 - DNA, 20 bp, Artificial Sequence
  Description of Artificial Sequence: Synthetic oligonucleotide
  Target: LAMA2; (-) strand; PAM type: NRG; PAM sequence: CAG
tgtctctgcctcccctgaga

SEQ ID NO: 88705 - DNA, 20 bp, Artificial Sequence
  Description of Artificial Sequence: Synthetic oligonucleotide
  Target: LAMA2; (-) strand; PAM type: NRG; PAM sequence: GAG
cttctgtctctgcctcccct

SEQ ID NO: 88706 - DNA, 20 bp, Artificial Sequence
  Description of Artificial Sequence: Synthetic oligonucleotide
  Target: LAMA2; (-) strand; PAM type: NRG; PAM sequence: CGG
aagtccggtccatttatacg

SEQ ID NO: 88707 - DNA, 20 bp, Artificial Sequence
  Description of Artificial Sequence: Synthetic oligonucleotide
  Target: LAMA2; (-) strand; PAM type: NRG; PAM sequence: CGG
aggtttgaactgtgcaagtc

SEQ ID NO: 88708 - DNA, 20 bp, Artificial Sequence
  Description of Artificial Sequence: Synthetic oligonucleotide
  Target: LAMA2; (-) strand; PAM type: NRG; PAM sequence: AAG
aacacaggtttgaactgtgc

SEQ ID NO: 88709 - DNA, 20 bp, Artificial Sequence
  Description of Artificial Sequence: Synthetic oligonucleotide
  Target: LAMA2; (-) strand; PAM type: NRG; PAM sequence: AGG
agttgacacctgaacaacac

SEQ ID NO: 88710 - DNA, 20 bp, Artificial Sequence
  Description of Artificial Sequence: Synthetic oligonucleotide
  Target: LAMA2; (-) strand; PAM type: NRG; PAM sequence: CAG
cagttgacacctgaacaaca

SEQ ID NO: 88711 - DNA, 20 bp, Artificial Sequence
  Description of Artificial Sequence: Synthetic oligonucleotide
  Target: LAMA2; (-) strand; PAM type: NRG; PAM sequence: CAG
aagaagaaagccttcatata

SEQ ID NO: 88712 - DNA, 20 bp, Artificial Sequence
  Description of Artificial Sequence: Synthetic oligonucleotide
  Target: LAMA2; (-) strand; PAM type: NRG; PAM sequence: AAG
tcctttctgtttaaagaaga

SEQ ID NO: 88713 - DNA, 20 bp, Artificial Sequence
  Description of Artificial Sequence: Synthetic oligonucleotide
  Target: LAMA2; (-) strand; PAM type: NRG; PAM sequence: AAG
tacttcctttctgtttaaag

SEQ ID NO: 88714 - DNA, 20 bp, Artificial Sequence
  Description of Artificial Sequence: Synthetic oligonucleotide
  Target: LAMA2; (-) strand; PAM type: NRG; PAM sequence: AAG
aaatacttcctttctgttta

SEQ ID NO: 88715 - DNA, 20 bp, Artificial Sequence
  Description of Artificial Sequence: Synthetic oligonucleotide
  Target: LAMA2; (-) strand; PAM type: NRG; PAM sequence: GGG
cattgctttctccaaatctt

SEQ ID NO: 88716 - DNA, 20 bp, Artificial Sequence
  Description of Artificial Sequence: Synthetic oligonucleotide
  Target: LAMA2; (-) strand; PAM type: NRG; PAM sequence: TGG
ccattgctttctccaaatct

SEQ ID NO: 88717 - DNA, 20 bp, Artificial Sequence
  Description of Artificial Sequence: Synthetic oligonucleotide
  Target: LAMA2; (-) strand; PAM type: NRG; PAM sequence: AGG
tgaaggggaaaaggaaaaaa

SEQ ID NO: 88718 - DNA, 20 bp, Artificial Sequence
  Description of Artificial Sequence: Synthetic oligonucleotide
  Target: LAMA2; (-) strand; PAM type: NRG; PAM sequence: AAG
gtgaaggggaaaaggaaaaa

SEQ ID NO: 88719 - DNA, 20 bp, Artificial Sequence
  Description of Artificial Sequence: Synthetic oligonucleotide
  Target: LAMA2; (-) strand; PAM type: NRG; PAM sequence: AGG
gacccttagtgaaggggaaa

SEQ ID NO: 88720 - DNA, 20 bp, Artificial Sequence
  Description of Artificial Sequence: Synthetic oligonucleotide
  Target: LAMA2; (-) strand; PAM type: NRG; PAM sequence: AAG
agacccttagtgaaggggaa

SEQ ID NO: 88721 - DNA, 20 bp, Artificial Sequence
  Description of Artificial Sequence: Synthetic oligonucleotide
  Target: LAMA2; (-) strand; PAM type: NRG; PAM sequence: GGG
tttcaagacccttagtgaag

SEQ ID NO: 88722 - DNA, 20 bp, Artificial Sequence
  Description of Artificial Sequence: Synthetic oligonucleotide
  Target: LAMA2; (-) strand; PAM type: NRG; PAM sequence: GGG
ttttcaagacccttagtgaa

SEQ ID NO: 88723 - DNA, 20 bp, Artificial Sequence
  Description of Artificial Sequence: Synthetic oligonucleotide
  Target: LAMA2; (-) strand; PAM type: NRG; PAM sequence: AGG
tttttcaagacccttagtga

SEQ ID NO: 88724 - DNA, 20 bp, Artificial Sequence
  Description of Artificial Sequence: Synthetic oligonucleotide
  Target: LAMA2; (-) strand; PAM type: NRG; PAM sequence: AAG
gtttttcaagacccttagtg

SEQ ID NO: 88725 - DNA, 20 bp, Artificial Sequence
  Description of Artificial Sequence: Synthetic oligonucleotide
  Target: LAMA2; (-) strand; PAM type: NRG; PAM sequence: TAG
gaccagtttttcaagaccct

SEQ ID NO: 88726 - DNA, 20 bp, Artificial Sequence
  Description of Artificial Sequence: Synthetic oligonucleotide
  Target: LAMA2; (-) strand; PAM type: NRG; PAM sequence: AAG
gagtttcagaccagtttttc

SEQ ID NO: 88727 - DNA, 20 bp, Artificial Sequence
  Description of Artificial Sequence: Synthetic oligonucleotide
  Target: LAMA2; (-) strand; PAM type: NRG; PAM sequence: CAG
actggagcggagtttcagac

SEQ ID NO: 88728 - DNA, 20 bp, Artificial Sequence
  Description of Artificial Sequence: Synthetic oligonucleotide
  Target: LAMA2; (-) strand; PAM type: NRG; PAM sequence: CAG
gctctactggagcggagttt

SEQ ID NO: 88729 - DNA, 20 bp, Artificial Sequence
  Description of Artificial Sequence: Synthetic oligonucleotide
  Target: LAMA2; (-) strand; PAM type: NRG; PAM sequence: GAG
ctttttgctctactggagcg

SEQ ID NO: 88730 - DNA, 20 bp, Artificial Sequence
  Description of Artificial Sequence: Synthetic oligonucleotide
  Target: LAMA2; (-) strand; PAM type: NRG; PAM sequence: CGG
ttctttttgctctactggag

SEQ ID NO: 88731 - DNA, 20 bp, Artificial Sequence
  Description of Artificial Sequence: Synthetic oligonucleotide
  Target: LAMA2; (-) strand; PAM type: NRG; PAM sequence: GAG
ttcttctttttgctctactg

SEQ ID NO: 88732 - DNA, 20 bp, Artificial Sequence
  Description of Artificial Sequence: Synthetic oligonucleotide
  Target: LAMA2; (-) strand; PAM type: NRG; PAM sequence: TGG
agttcttctttttgctctac

SEQ ID NO: 88733 - DNA, 20 bp, Artificial Sequence
  Description of Artificial Sequence: Synthetic oligonucleotide
  Target: LAMA2; (-) strand; PAM type: NRG; PAM sequence: CAG
aaaaatatcttcttaacttt

SEQ ID NO: 88734 - DNA, 20 bp, Artificial Sequence
  Description of Artificial Sequence: Synthetic oligonucleotide
  Target: LAMA2; (-) strand; PAM type: NRG; PAM sequence: GAG
tggtcagatgcggaaaaaaa

SEQ ID NO: 88735 - DNA, 20 bp, Artificial Sequence
  Description of Artificial Sequence: Synthetic oligonucleotide
  Target: LAMA2; (-) strand; PAM type: NRG; PAM sequence: AAG
cttggtcagatgcggaaaaa

SEQ ID NO: 88736 - DNA, 20 bp, Artificial Sequence
  Description of Artificial Sequence: Synthetic oligonucleotide
  Target: LAMA2; (-) strand; PAM type: NRG; PAM sequence: CGG
agcctgcccttggtcagatg

SEQ ID NO: 88737 - DNA, 20 bp, Artificial Sequence
  Description of Artificial Sequence: Synthetic oligonucleotide
  Target: LAMA2; (-) strand; PAM type: NRG; PAM sequence: CAG
atatcaagcctgcccttggt

SEQ ID NO: 88738 - DNA, 20 bp, Artificial Sequence
  Description of Artificial Sequence: Synthetic oligonucleotide
  Target: LAMA2; (-) strand; PAM type: NRG; PAM sequence: TGG
caggatatcaagcctgccct

SEQ ID NO: 88739 - DNA, 20 bp, Artificial Sequence
  Description of Artificial Sequence: Synthetic oligonucleotide
  Target: LAMA2; (-) strand; PAM type: NRG; PAM sequence: AAG
ctcttaaccttcaggatatc

SEQ ID NO: 88740 - DNA, 20 bp, Artificial Sequence
  Description of Artificial Sequence: Synthetic oligonucleotide
  Target: LAMA2; (-) strand; PAM type: NRG; PAM sequence: AGG
caaagccgctcttaaccttc

SEQ ID NO: 88741 - DNA, 20 bp, Artificial Sequence
  Description of Artificial Sequence: Synthetic oligonucleotide
  Target: LAMA2; (-) strand; PAM type: NRG; PAM sequence: CAG
gcaaagccgctcttaacctt

SEQ ID NO: 88742 - DNA, 20 bp, Artificial Sequence
  Description of Artificial Sequence: Synthetic oligonucleotide
  Target: LAMA2; (-) strand; PAM type: NRG; PAM sequence: AAG
tgagaactttgcttcaggca

SEQ ID NO: 88743 - DNA, 20 bp, Artificial Sequence
  Description of Artificial Sequence: Synthetic oligonucleotide
  Target: LAMA2; (-) strand; PAM type: NRG; PAM sequence: AGG
catagtgagaactttgcttc

SEQ ID NO: 88744 - DNA, 20 bp, Artificial Sequence
  Description of Artificial Sequence: Synthetic oligonucleotide
  Target: LAMA2; (-) strand; PAM type: NRG; PAM sequence: CAG
ccatagtgagaactttgctt

SEQ ID NO: 88745 - DNA, 20 bp, Artificial Sequence
  Description of Artificial Sequence: Synthetic oligonucleotide
  Target: LAMA2; (-) strand; PAM type: NRG; PAM sequence: GAG
cggctgcaacttcccatagt

SEQ ID NO: 88746 - DNA, 20 bp, Artificial Sequence
  Description of Artificial Sequence: Synthetic oligonucleotide
  Target: LAMA2; (-) strand; PAM type: NRG; PAM sequence: TAG
tactcggctgcaacttccca

SEQ ID NO: 88747 - DNA, 20 bp, Artificial Sequence
  Description of Artificial Sequence: Synthetic oligonucleotide
  Target: LAMA2; (-) strand; PAM type: NRG; PAM sequence: CGG
caagataactcttcactact

SEQ ID NO: 88748 - DNA, 20 bp, Artificial Sequence
  Description of Artificial Sequence: Synthetic oligonucleotide
  Target: LAMA2; (-) strand; PAM type: NRG; PAM sequence: AAG
atttgttccggcctcccatc

SEQ ID NO: 88749 - DNA, 20 bp, Artificial Sequence
  Description of Artificial Sequence: Synthetic oligonucleotide
  Target: LAMA2; (-) strand; PAM type: NRG; PAM sequence: CGG
tctccaaagcaaatttgttc

SEQ ID NO: 88750 - DNA, 20 bp, Artificial Sequence
  Description of Artificial Sequence: Synthetic oligonucleotide
  Target: LAMA2; (-) strand; PAM type: NRG; PAM sequence: AAG
tagttccctttacgtctcca

SEQ ID NO: 88751 - DNA, 20 bp, Artificial Sequence
  Description of Artificial Sequence: Synthetic oligonucleotide
  Target: LAMA2; (-) strand; PAM type: NRG; PAM sequence: TAG
agtccagtaagaatagttct

SEQ ID NO: 88752 - DNA, 20 bp, Artificial Sequence
  Description of Artificial Sequence: Synthetic oligonucleotide
  Target: LAMA2; (-) strand; PAM type: NRG; PAM sequence: TAG
atattggagtccagtaagaa

SEQ ID NO: 88753 - DNA, 20 bp, Artificial Sequence
  Description of Artificial Sequence: Synthetic oligonucleotide
  Target: LAMA2; (-) strand; PAM type: NRG; PAM sequence: AAG
gtctcatattggagtccagt

SEQ ID NO: 88754 - DNA, 20 bp, Artificial Sequence
  Description of Artificial Sequence: Synthetic oligonucleotide
  Target: LAMA2; (-) strand; PAM type: NRG; PAM sequence: CAG
taaagtctcatattggagtc

SEQ ID NO: 88755 - DNA, 20 bp, Artificial Sequence
  Description of Artificial Sequence: Synthetic oligonucleotide
  Target: LAMA2; (-) strand; PAM type: NRG; PAM sequence: GAG
agaaataaagtctcatattg

SEQ ID NO: 88756 - DNA, 20 bp, Artificial Sequence
  Description of Artificial Sequence: Synthetic oligonucleotide
  Target: LAMA2; (-) strand; PAM type: NRG; PAM sequence: TGG
atagaaataaagtctcatat

SEQ ID NO: 88757 - DNA, 20 bp, Artificial Sequence
  Description of Artificial Sequence: Synthetic oligonucleotide
  Target: LAMA2; (-) strand; PAM type: NRG; PAM sequence: AAG
caaaccaatggatagaaata

SEQ ID NO: 88758 - DNA, 20 bp, Artificial Sequence
  Description of Artificial Sequence: Synthetic oligonucleotide
  Target: LAMA2; (-) strand; PAM type: NRG; PAM sequence: TAG
aggccttgcaaaccaatgga

SEQ ID NO: 88759 - DNA, 20 bp, Artificial Sequence
  Description of Artificial Sequence: Synthetic oligonucleotide
  Target: LAMA2; (-) strand; PAM type: NRG; PAM sequence: TGG
ctccaggccttgcaaaccaa

SEQ ID NO: 88760 - DNA, 20 bp, Artificial Sequence
  Description of Artificial Sequence: Synthetic oligonucleotide
  Target: LAMA2; (-) strand; PAM type: NRG; PAM sequence: AGG
tatctaatgcatatatctcc

SEQ ID NO: 88761 - DNA, 20 bp, Artificial Sequence
  Description of Artificial Sequence: Synthetic oligonucleotide
  Target: LAMA2; (-) strand; PAM type: NRG; PAM sequence: CAG
ttatctaatgcatatatctc

SEQ ID NO: 88762 - DNA, 20 bp, Artificial Sequence
  Description of Artificial Sequence: Synthetic oligonucleotide
  Target: LAMA2; (-) strand; PAM type: NRG; PAM sequence: CAG
ggcttttctaattacaaata

SEQ ID NO: 88763 - DNA, 20 bp, Artificial Sequence
  Description of Artificial Sequence: Synthetic oligonucleotide
  Target: LAMA2; (-) strand; PAM type: NRG; PAM sequence: AGG
atttggacattaattactgg

SEQ ID NO: 88764 - DNA, 20 bp, Artificial Sequence
  Description of Artificial Sequence: Synthetic oligonucleotide
  Target: LAMA2; (-) strand; PAM type: NRG; PAM sequence: GAG
tatttggacattaattactg

SEQ ID NO: 88765 - DNA, 20 bp, Artificial Sequence
  Description of Artificial Sequence: Synthetic oligonucleotide
  Target: LAMA2; (-) strand; PAM type: NRG; PAM sequence: TGG
catatttggacattaattac

SEQ ID NO: 88766 - DNA, 20 bp, Artificial Sequence
  Description of Artificial Sequence: Synthetic oligonucleotide
  Target: LAMA2; (-) strand; PAM type: NRG; PAM sequence: TGG
atttaaattggttgcatatt

SEQ ID NO: 88767 - DNA, 20 bp, Artificial Sequence
  Description of Artificial Sequence: Synthetic oligonucleotide
  Target: LAMA2; (-) strand; PAM type: NRG; PAM sequence: TGG
tatgtagacatcatttaaat

SEQ ID NO: 88768 - DNA, 20 bp, Artificial Sequence
  Description of Artificial Sequence: Synthetic oligonucleotide
  Target: LAMA2; (-) strand; PAM type: NRG; PAM sequence: TAG
catctatgtgtggtattatg

SEQ ID NO: 88769 - DNA, 20 bp, Artificial Sequence
  Description of Artificial Sequence: Synthetic oligonucleotide
  Target: LAMA2; (-) strand; PAM type: NRG; PAM sequence: TGG
tttggattttcatctatgtg

SEQ ID NO: 88770 - DNA, 20 bp, Artificial Sequence
  Description of Artificial Sequence: Synthetic oligonucleotide
  Target: LAMA2; (-) strand; PAM type: NRG; PAM sequence: TGG
ataatgaatgtttgactttt

SEQ ID NO: 88771 - DNA, 20 bp, Artificial Sequence
  Description of Artificial Sequence: Synthetic oligonucleotide
  Target: LAMA2; (-) strand; PAM type: NRG; PAM sequence: AAG
tataacaacaactagattgg

SEQ ID NO: 88772 - DNA, 20 bp, Artificial Sequence
  Description of Artificial Sequence: Synthetic oligonucleotide
  Target: LAMA2; (-) strand; PAM type: NRG; PAM sequence: TGG
ctatataacaacaactagat

SEQ ID NO: 88773 - DNA, 20 bp, Artificial Sequence
  Description of Artificial Sequence: Synthetic oligonucleotide
  Target: LAMA2; (-) strand; PAM type: NRG; PAM sequence: TAG
ggcttctatataacaacaac

SEQ ID NO: 88774 - DNA, 20 bp, Artificial Sequence
  Description of Artificial Sequence: Synthetic oligonucleotide
  Target: LAMA2; (-) strand; PAM type: NRG; PAM sequence: GGG
aaaatggggtgccctctgag

SEQ ID NO: 88775 - DNA, 20 bp, Artificial Sequence
  Description of Artificial Sequence: Synthetic oligonucleotide
  Target: LAMA2; (-) strand; PAM type: NRG; PAM sequence: GGG
caaaatggggtgccctctga

SEQ ID NO: 88776 - DNA, 20 bp, Artificial Sequence
  Description of Artificial Sequence: Synthetic oligonucleotide
  Target: LAMA2; (-) strand; PAM type: NRG; PAM sequence: AGG
gcaaaatggggtgccctctg

SEQ ID NO: 88777 - DNA, 20 bp, Artificial Sequence
  Description of Artificial Sequence: Synthetic oligonucleotide
  Target: LAMA2; (-) strand; PAM type: NRG; PAM sequence: GAG
agcaaaatggggtgccctct

SEQ ID NO: 88778 - DNA, 20 bp, Artificial Sequence
  Description of Artificial Sequence: Synthetic oligonucleotide
  Target: LAMA2; (-) strand; PAM type: NRG; PAM sequence: GGG
tcaagaaattcagcaaaatg

SEQ ID NO: 88779 - DNA, 20 bp, Artificial Sequence
  Description of Artificial Sequence: Synthetic oligonucleotide
  Target: LAMA2; (-) strand; PAM type: NRG; PAM sequence: GGG
ctcaagaaattcagcaaaat

SEQ ID NO: 88780 - DNA, 20 bp, Artificial Sequence
  Description of Artificial Sequence: Synthetic oligonucleotide
  Target: LAMA2; (-) strand; PAM type: NRG; PAM sequence: TGG
actcaagaaattcagcaaaa

SEQ ID NO: 88781 - DNA, 20 bp, Artificial Sequence
  Description of Artificial Sequence: Synthetic oligonucleotide
  Target: LAMA2; (-) strand; PAM type: NRG; PAM sequence: CAG
agtaaaaaactcaagaaatt

SEQ ID NO: 88782 - DNA, 20 bp, Artificial Sequence
  Description of Artificial Sequence: Synthetic oligonucleotide
  Target: LAMA2; (-) strand; PAM type: NRG; PAM sequence: AAG
gtgatataagtaaaaaactc

SEQ ID NO: 88783 - DNA, 20 bp, Artificial Sequence
  Description of Artificial Sequence: Synthetic oligonucleotide
  Target: LAMA2; (-) strand; PAM type: NRG; PAM sequence: AAG
acatcctgattctgtgatat

SEQ ID NO: 88784 - DNA, 20 bp, Artificial Sequence
  Description of Artificial Sequence: Synthetic oligonucleotide
  Target: LAMA2; (-) strand; PAM type: NRG; PAM sequence: AAG
agataacatgtatatggtag

SEQ ID NO: 88785 - DNA, 20 bp, Artificial Sequence
  Description of Artificial Sequence: Synthetic oligonucleotide
  Target: LAMA2; (-) strand; PAM type: NRG; PAM sequence: TAG
ccaagataacatgtatatgg

SEQ ID NO: 88786 - DNA, 20 bp, Artificial Sequence
  Description of Artificial Sequence: Synthetic oligonucleotide
  Target: LAMA2; (-) strand; PAM type: NRG; PAM sequence: TGG
attccaagataacatgtata

SEQ ID NO: 88787 - DNA, 20 bp, Artificial Sequence
  Description of Artificial Sequence: Synthetic oligonucleotide
  Target: LAMA2; (-) strand; PAM type: NRG; PAM sequence: AAG
tatgaaaaaattccaattcc

SEQ ID NO: 88788 - DNA, 20 bp, Artificial Sequence
  Description of Artificial Sequence: Synthetic oligonucleotide
  Target: LAMA2; (-) strand; PAM type: NRG; PAM sequence: TGG
ttaaactgtatttatgctaa

SEQ ID NO: 88789 - DNA, 20 bp, Artificial Sequence
  Description of Artificial Sequence: Synthetic oligonucleotide
  Target: LAMA2; (-) strand; PAM type: NRG; PAM sequence: CAG
aaaatgcagttttgattttg

SEQ ID NO: 88790 - DNA, 20 bp, Artificial Sequence
  Description of Artificial Sequence: Synthetic oligonucleotide
  Target: LAMA2; (-) strand; PAM type: NRG; PAM sequence: CAG
tggcttacatttcaaaaatg

SEQ ID NO: 88791 - DNA, 20 bp, Artificial Sequence
  Description of Artificial Sequence: Synthetic oligonucleotide
  Target: LAMA2; (-) strand; PAM type: NRG; PAM sequence: TGG
ttgacttactagcatcaata

SEQ ID NO: 88792 - DNA, 20 bp, Artificial Sequence
  Description of Artificial Sequence: Synthetic oligonucleotide
  Target: LAMA2; (-) strand; PAM type: NRG; PAM sequence: TAG
taatgagcatattgacttac

SEQ ID NO: 88793 - DNA, 20 bp, Artificial Sequence
  Description of Artificial Sequence: Synthetic oligonucleotide
  Target: LAMA2; (-) strand; PAM type: NRG; PAM sequence: GAG
gtacatacacaattgataat

SEQ ID NO: 88794 - DNA, 20 bp, Artificial Sequence
  Description of Artificial Sequence: Synthetic oligonucleotide
  Target: LAMA2; (-) strand; PAM type: NRG; PAM sequence: AAG
aaattttctaaataacataa

SEQ ID NO: 88795 - DNA, 20 bp, Artificial Sequence
  Description of Artificial Sequence: Synthetic oligonucleotide
  Target: LAMA2; (-) strand; PAM type: NRG; PAM sequence: TGG
ccccctgttatattcctagg

SEQ ID NO: 88796 - DNA, 20 bp, Artificial Sequence
  Description of Artificial Sequence: Synthetic oligonucleotide
  Target: LAMA2; (-) strand; PAM type: NRG; PAM sequence: AGG
atgccccctgttatattcct

SEQ ID NO: 88797 - DNA, 20 bp, Artificial Sequence
  Description of Artificial Sequence: Synthetic oligonucleotide
  Target: LAMA2; (-) strand; PAM type: NRG; PAM sequence: TAG
tatgccccctgttatattcc

SEQ ID NO: 88798 - DNA, 20 bp, Artificial Sequence
  Description of Artificial Sequence: Synthetic oligonucleotide
  Target: LAMA2; (-) strand; PAM type: NRG; PAM sequence: GAG
tctagtttcataaagacaca

SEQ ID NO: 88799 - DNA, 20 bp, Artificial Sequence
  Description of Artificial Sequence: Synthetic oligonucleotide
  Target: LAMA2; (-) strand; PAM type: NRG; PAM sequence: CAG
tatctagtttcataaagaca

SEQ ID NO: 88800 - DNA, 20 bp, Artificial Sequence
  Description of Artificial Sequence: Synthetic oligonucleotide
  Target: LAMA2; (-) strand; PAM type: NRG; PAM sequence: AAG
ttgctttatctagtttcata

SEQ ID NO: 88801 - DNA, 20 bp, Artificial Sequence
  Description of Artificial Sequence: Synthetic oligonucleotide
  Target: LAMA2; (-) strand; PAM type: NRG; PAM sequence: TAG
agatttttctttgctttatc

SEQ ID NO: 88802 - DNA, 20 bp, Artificial Sequence
  Description of Artificial Sequence: Synthetic oligonucleotide
  Target: LAMA2; (-) strand; PAM type: NRG; PAM sequence: CAG
gaaactggctgagtaattga

SEQ ID NO: 88803 - DNA, 20 bp, Artificial Sequence
  Description of Artificial Sequence: Synthetic oligonucleotide
  Target: LAMA2; (-) strand; PAM type: NRG; PAM sequence: GAG
ctactaagatgaaactggct

SEQ ID NO: 88804 - DNA, 20 bp, Artificial Sequence
  Description of Artificial Sequence: Synthetic oligonucleotide
  Target: LAMA2; (-) strand; PAM type: NRG; PAM sequence: TGG
gtaggctactaagatgaaac

SEQ ID NO: 88805 - DNA, 20 bp, Artificial Sequence
  Description of Artificial Sequence: Synthetic oligonucleotide
  Target: LAMA2; (-) strand; PAM type: NRG; PAM sequence: AAG
tcaatttacagtaggctact

SEQ ID NO: 88806 - DNA, 20 bp, Artificial Sequence
  Description of Artificial Sequence: Synthetic oligonucleotide
  Target: LAMA2; (-) strand; PAM type: NRG; PAM sequence: AGG
catagacctcaatttacagt

SEQ ID NO: 88807 - DNA, 20 bp, Artificial Sequence
  Description of Artificial Sequence: Synthetic oligonucleotide
  Target: LAMA2; (-) strand; PAM type: NRG; PAM sequence: TAG
acatagacctcaatttacag

SEQ ID NO: 88808 - DNA, 20 bp, Artificial Sequence
  Description of Artificial Sequence: Synthetic oligonucleotide
  Target: LAMA2; (-) strand; PAM type: NRG; PAM sequence: CAG
aaaacatagacctcaattta

SEQ ID NO: 88809 - DNA, 20 bp, Artificial Sequence
  Description of Artificial Sequence: Synthetic oligonucleotide
  Target: LAMA2; (-) strand; PAM type: NRG; PAM sequence: TAG
atttcattcactcaaaaaca

SEQ ID NO: 88810 - DNA, 20 bp, Artificial Sequence
  Description of Artificial Sequence: Synthetic oligonucleotide
  Target: LAMA2; (-) strand; PAM type: NRG; PAM sequence: TAG
acctggtgaacttaatttac

SEQ ID NO: 88811 - DNA, 20 bp, Artificial Sequence
  Description of Artificial Sequence: Synthetic oligonucleotide
  Target: LAMA2; (-) strand; PAM type: NRG; PAM sequence: TGG
aaataaactagaataagacc

SEQ ID NO: 88812 - DNA, 20 bp, Artificial Sequence
  Description of Artificial Sequence: Synthetic oligonucleotide
  Target: LAMA2; (-) strand; PAM type: NRG; PAM sequence: AAG
catctaaaataaactagaat

SEQ ID NO: 88813 - DNA, 20 bp, Artificial Sequence
  Description of Artificial Sequence: Synthetic oligonucleotide
  Target: LAMA2; (-) strand; PAM type: NRG; PAM sequence: TAG
catttccatctaaaataaac

SEQ ID NO: 88814 - DNA, 20 bp, Artificial Sequence
  Description of Artificial Sequence: Synthetic oligonucleotide
  Target: LAMA2; (-) strand; PAM type: NRG; PAM sequence: AAG
aacatttcagaaatatgtgt

SEQ ID NO: 88815 - DNA, 20 bp, Artificial Sequence
  Description of Artificial Sequence: Synthetic oligonucleotide
  Target: LAMA2; (-) strand; PAM type: NRG; PAM sequence: CAG
aaattatcttcttaacattt

SEQ ID NO: 88816 - DNA, 20 bp, Artificial Sequence
  Description of Artificial Sequence: Synthetic oligonucleotide
  Target: LAMA2; (-) strand; PAM type: NRG; PAM sequence: AGG
ggcaaactaagttcttgtac

SEQ ID NO: 88817 - DNA, 20 bp, Artificial Sequence
  Description of Artificial Sequence: Synthetic oligonucleotide
  Target: LAMA2; (-) strand; PAM type: NRG; PAM sequence: CAG
aggcaaactaagttcttgta

SEQ ID NO: 88818 - DNA, 20 bp, Artificial Sequence
  Description of Artificial Sequence: Synthetic oligonucleotide
  Target: LAMA2; (-) strand; PAM type: NRG; PAM sequence: AAG
tttgctcagataggcaaact

SEQ ID NO: 88819 - DNA, 20 bp, Artificial Sequence
  Description of Artificial Sequence: Synthetic oligonucleotide
  Target: LAMA2; (-) strand; PAM type: NRG; PAM sequence: AGG
aatgtaaaatttgctcagat

SEQ ID NO: 88820 - DNA, 20 bp, Artificial Sequence
  Description of Artificial Sequence: Synthetic oligonucleotide
  Target: LAMA2; (-) strand; PAM type: NRG; PAM sequence: TAG
gaatgtaaaatttgctcaga

SEQ ID NO: 88821 - DNA, 20 bp, Artificial Sequence
  Description of Artificial Sequence: Synthetic oligonucleotide
  Target: LAMA2; (-) strand; PAM type: NRG; PAM sequence: CAG
tagtgaatgtaaaatttgct

SEQ ID NO: 88822 - DNA, 20 bp, Artificial Sequence
  Description of Artificial Sequence: Synthetic oligonucleotide
  Target: LAMA2; (-) strand; PAM type: NRG; PAM sequence: TAG
tctttcacatgggcattcac

SEQ ID NO: 88823 - DNA, 20 bp, Artificial Sequence
  Description of Artificial Sequence: Synthetic oligonucleotide
  Target: LAMA2; (-) strand; PAM type: NRG; PAM sequence: GGG
ttcctgcttgtctttcacat

SEQ ID NO: 88824 - DNA, 20 bp, Artificial Sequence
  Description of Artificial Sequence: Synthetic oligonucleotide
  Target: LAMA2; (-) strand; PAM type: NRG; PAM sequence: TGG
tttcctgcttgtctttcaca

SEQ ID NO: 88825 - DNA, 20 bp, Artificial Sequence
  Description of Artificial Sequence: Synthetic oligonucleotide
  Target: LAMA2; (-) strand; PAM type: NRG; PAM sequence: AAG
ctaagccccttggcccctgg

SEQ ID NO: 88826 - DNA, 20 bp, Artificial Sequence
  Description of Artificial Sequence: Synthetic oligonucleotide
  Target: LAMA2; (-) strand; PAM type: NRG; PAM sequence: TGG
gttctaagccccttggcccc

SEQ ID NO: 88827 - DNA, 20 bp, Artificial Sequence
  Description of Artificial Sequence: Synthetic oligonucleotide
  Target: LAMA2; (-) strand; PAM type: NRG; PAM sequence: TGG
tcagttggttctaagcccct

SEQ ID NO: 88828 - DNA, 20 bp, Artificial Sequence
  Description of Artificial Sequence: Synthetic oligonucleotide
  Target: LAMA2; (-) strand; PAM type: NRG; PAM sequence: AAG
gtaccagttcagttggttct

SEQ ID NO: 88829 - DNA, 20 bp, Artificial Sequence
  Description of Artificial Sequence: Synthetic oligonucleotide
  Target: LAMA2; (-) strand; PAM type: NRG; PAM sequence: TGG
ttattttgtaccagttcagt

SEQ ID NO: 88830 - DNA, 20 bp, Artificial Sequence
  Description of Artificial Sequence: Synthetic oligonucleotide
  Target: LAMA2; (-) strand; PAM type: NRG; PAM sequence: CAG
atgtttattttgtaccagtt

SEQ ID NO: 88831 - DNA, 20 bp, Artificial Sequence
  Description of Artificial Sequence: Synthetic oligonucleotide
  Target: LAMA2; (-) strand; PAM type: NRG; PAM sequence: CAG
acctaatgtttattttgtac

SEQ ID NO: 88832 - DNA, 20 bp, Artificial Sequence
  Description of Artificial Sequence: Synthetic oligonucleotide
  Target: LAMA2; (-) strand; PAM type: NRG; PAM sequence: GAG
agtagcatagtaattggtaa

SEQ ID NO: 88833 - DNA, 20 bp, Artificial Sequence
  Description of Artificial Sequence: Synthetic oligonucleotide
  Target: LAMA2; (-) strand; PAM type: NRG; PAM sequence: AAG
ctagtagcatagtaattggt

SEQ ID NO: 88834 - DNA, 20 bp, Artificial Sequence
  Description of Artificial Sequence: Synthetic oligonucleotide
  Target: LAMA2; (-) strand; PAM type: NRG; PAM sequence: TGG
tattctagtagcatagtaat

SEQ ID NO: 88835 - DNA, 20 bp, Artificial Sequence
  Description of Artificial Sequence: Synthetic oligonucleotide
  Target: LAMA2; (-) strand; PAM type: NRG; PAM sequence: TAG
aattggatattctagtagca

SEQ ID NO: 88836 - DNA, 20 bp, Artificial Sequence
  Description of Artificial Sequence: Synthetic oligonucleotide
  Target: LAMA2; (-) strand; PAM type: NRG; PAM sequence: TAG
agcaaaattggatattctag

SEQ ID NO: 88837 - DNA, 20 bp, Artificial Sequence
  Description of Artificial Sequence: Synthetic oligonucleotide
  Target: LAMA2; (-) strand; PAM type: NRG; PAM sequence: TAG
aaaagcaaaattggatattc

SEQ ID NO: 88838 - DNA, 20 bp, Artificial Sequence
  Description of Artificial Sequence: Synthetic oligonucleotide
  Target: LAMA2; (-) strand; PAM type: NRG; PAM sequence: TGG
aggcttggtaaaagcaaaat

SEQ ID NO: 88839 - DNA, 20 bp, Artificial Sequence
  Description of Artificial Sequence: Synthetic oligonucleotide
  Target: LAMA2; (-) strand; PAM type: NRG; PAM sequence: AAG
ttttcactaaggcttggtaa

SEQ ID NO: 88840 - DNA, 20 bp, Artificial Sequence
  Description of Artificial Sequence: Synthetic oligonucleotide
  Target: LAMA2; (-) strand; PAM type: NRG; PAM sequence: TGG
attcacttttcactaaggct

SEQ ID NO: 88841 - DNA, 20 bp, Artificial Sequence
  Description of Artificial Sequence: Synthetic oligonucleotide
  Target: LAMA2; (-) strand; PAM type: NRG; PAM sequence: AGG
aattcattcacttttcacta

SEQ ID NO: 88842 - DNA, 20 bp, Artificial Sequence
  Description of Artificial Sequence: Synthetic oligonucleotide
  Target: LAMA2; (-) strand; PAM type: NRG; PAM sequence: AAG
gaattcattcacttttcact

SEQ ID NO: 88843 - DNA, 20 bp, Artificial Sequence
  Description of Artificial Sequence: Synthetic oligonucleotide
  Target: LAMA2; (-) strand; PAM type: NRG; PAM sequence: TAG
gtgtctttgagtcttcttgt

SEQ ID NO: 88844 - DNA, 20 bp, Artificial Sequence
  Description of Artificial Sequence: Synthetic oligonucleotide
  Target: LAMA2; (-) strand; PAM type: NRG; PAM sequence: GAG
gggggagcaccagtgtcttt

SEQ ID NO: 88845 - DNA, 20 bp, Artificial Sequence
  Description of Artificial Sequence: Synthetic oligonucleotide
  Target: LAMA2; (-) strand; PAM type: NRG; PAM sequence: CAG
gggagacacagggggagcac

SEQ ID NO: 88846 - DNA, 20 bp, Artificial Sequence
  Description of Artificial Sequence: Synthetic oligonucleotide
  Target: LAMA2; (-) strand; PAM type: NRG; PAM sequence: GAG
agtgaagggagacacagggg

SEQ ID NO: 88847 - DNA, 20 bp, Artificial Sequence
  Description of Artificial Sequence: Synthetic oligonucleotide
  Target: LAMA2; (-) strand; PAM type: NRG; PAM sequence: GGG
taagtgaagggagacacagg

SEQ ID NO: 88848 - DNA, 20 bp, Artificial Sequence
  Description of Artificial Sequence: Synthetic oligonucleotide
  Target: LAMA2; (-) strand; PAM type: NRG; PAM sequence: GGG
ataagtgaagggagacacag

SEQ ID NO: 88849 - DNA, 20 bp, Artificial Sequence
  Description of Artificial Sequence: Synthetic oligonucleotide
  Target: LAMA2; (-) strand; PAM type: NRG; PAM sequence: GGG
aataagtgaagggagacaca

SEQ ID NO: 88850 - DNA, 20 bp, Artificial Sequence
  Description of Artificial Sequence: Synthetic oligonucleotide
  Target: LAMA2; (-) strand; PAM type: NRG; PAM sequence: AGG
gaataagtgaagggagacac

SEQ ID NO: 88851 - DNA, 20 bp, Artificial Sequence
  Description of Artificial Sequence: Synthetic oligonucleotide
  Target: LAMA2; (-) strand; PAM type: NRG; PAM sequence: CAG
agaataagtgaagggagaca

SEQ ID NO: 88852 - DNA, 20 bp, Artificial Sequence
  Description of Artificial Sequence: Synthetic oligonucleotide
  Target: LAMA2; (-) strand; PAM type: NRG; PAM sequence: GAG
ccatgcagaataagtgaagg

SEQ ID NO: 88853 - DNA, 20 bp, Artificial Sequence
  Description of Artificial Sequence: Synthetic oligonucleotide
  Target: LAMA2; (-) strand; PAM type: NRG; PAM sequence: GGG
gaccatgcagaataagtgaa

SEQ ID NO: 88854 - DNA, 20 bp, Artificial Sequence
  Description of Artificial Sequence: Synthetic oligonucleotide
  Target: LAMA2; (-) strand; PAM type: NRG; PAM sequence: AGG
tgaccatgcagaataagtga

SEQ ID NO: 88855 - DNA, 20 bp, Artificial Sequence
  Description of Artificial Sequence: Synthetic oligonucleotide
  Target: LAMA2; (-) strand; PAM type: NRG; PAM sequence: AAG
ctgaccatgcagaataagtg

SEQ ID NO: 88856 - DNA, 20 bp, Artificial Sequence
  Description of Artificial Sequence: Synthetic oligonucleotide
  Target: LAMA2; (-) strand; PAM type: NRG; PAM sequence: AAG
aggtgctgaccatgcagaat

SEQ ID NO: 88857 - DNA, 20 bp, Artificial Sequence
  Description of Artificial Sequence: Synthetic oligonucleotide
  Target: LAMA2; (-) strand; PAM type: NRG; PAM sequence: CAG
ttgaagaggtgctgaccatg

SEQ ID NO: 88858 - DNA, 20 bp, Artificial Sequence
  Description of Artificial Sequence: Synthetic oligonucleotide
  Target: LAMA2; (-) strand; PAM type: NRG; PAM sequence: AGG
ttattattggtcttttgaag

SEQ ID NO: 88859 - DNA, 20 bp, Artificial Sequence
  Description of Artificial Sequence: Synthetic oligonucleotide
  Target: LAMA2; (-) strand; PAM type: NRG; PAM sequence: GAG
attattattggtcttttgaa

SEQ ID NO: 88860 - DNA, 20 bp, Artificial Sequence
  Description of Artificial Sequence: Synthetic oligonucleotide
  Target: LAMA2; (-) strand; PAM type: NRG; PAM sequence: AAG
ccattattattggtcttttg

SEQ ID NO: 88861 - DNA, 20 bp, Artificial Sequence
  Description of Artificial Sequence: Synthetic oligonucleotide
  Target: LAMA2; (-) strand; PAM type: NRG; PAM sequence: TGG
ttgtaggggaccattattat

SEQ ID NO: 88862 - DNA, 20 bp, Artificial Sequence
  Description of Artificial Sequence: Synthetic oligonucleotide
  Target: LAMA2; (-) strand; PAM type: NRG; PAM sequence: GGG
caattgtatacttcttgtag

SEQ ID NO: 88863 - DNA, 20 bp, Artificial Sequence
  Description of Artificial Sequence: Synthetic oligonucleotide
  Target: LAMA2; (-) strand; PAM type: NRG; PAM sequence: GGG
gcaattgtatacttcttgta

SEQ ID NO: 88864 - DNA, 20 bp, Artificial Sequence
  Description of Artificial Sequence: Synthetic oligonucleotide
  Target: LAMA2; (-) strand; PAM type: NRG; PAM sequence: AGG
agcaattgtatacttcttgt

SEQ ID NO: 88865 - DNA, 20 bp, Artificial Sequence
  Description of Artificial Sequence: Synthetic oligonucleotide
  Target: LAMA2; (-) strand; PAM type: NRG; PAM sequence: TAG
gagcaattgtatacttcttg

SEQ ID NO: 88866 - DNA, 20 bp, Artificial Sequence
  Description of Artificial Sequence: Synthetic oligonucleotide
  Target: LAMA2; (-) strand; PAM type: NRG; PAM sequence: GAG
catatgctttcacatcagag

SEQ ID NO: 88867 - DNA, 20 bp, Artificial Sequence
  Description of Artificial Sequence: Synthetic oligonucleotide
  Target: LAMA2; (-) strand; PAM type: NRG; PAM sequence: AGG
ttcatatgctttcacatcag

SEQ ID NO: 88868 - DNA, 20 bp, Artificial Sequence
  Description of Artificial Sequence: Synthetic oligonucleotide
  Target: LAMA2; (-) strand; PAM type: NRG; PAM sequence: GAG
cttcatatgctttcacatca

SEQ ID NO: 88869 - DNA, 20 bp, Artificial Sequence
  Description of Artificial Sequence: Synthetic oligonucleotide
  Target: LAMA2; (-) strand; PAM type: NRG; PAM sequence: CAG
ttcttcatatgctttcacat

SEQ ID NO: 88870 - DNA, 20 bp, Artificial Sequence
  Description of Artificial Sequence: Synthetic oligonucleotide
  Target: LAMA2; (-) strand; PAM type: NRG; PAM sequence: TGG
tgcaaatatttatgcagctt

SEQ ID NO: 88871 - DNA, 20 bp, Artificial Sequence
  Description of Artificial Sequence: Synthetic oligonucleotide
  Target: LAMA2; (-) strand; PAM type: NRG; PAM sequence: CAG
aaggggtgcaaatatttatg

SEQ ID NO: 88872 - DNA, 20 bp, Artificial Sequence
  Description of Artificial Sequence: Synthetic oligonucleotide
  Target: LAMA2; (-) strand; PAM type: NRG; PAM sequence: GGG
actttctcatactctcaaag

SEQ ID NO: 88873 - DNA, 20 bp, Artificial Sequence
  Description of Artificial Sequence: Synthetic oligonucleotide
  Target: LAMA2; (-) strand; PAM type: NRG; PAM sequence: GGG
cactttctcatactctcaaa

SEQ ID NO: 88874 - DNA, 20 bp, Artificial Sequence
  Description of Artificial Sequence: Synthetic oligonucleotide
  Target: LAMA2; (-) strand; PAM type: NRG; PAM sequence: AGG
acactttctcatactctcaa

SEQ ID NO: 88875 - DNA, 20 bp, Artificial Sequence
  Description of Artificial Sequence: Synthetic oligonucleotide
  Target: LAMA2; (-) strand; PAM type: NRG; PAM sequence: AAG
cacactttctcatactctca

SEQ ID NO: 88876 - DNA, 20 bp, Artificial Sequence
  Description of Artificial Sequence: Synthetic oligonucleotide
  Target: LAMA2; (-) strand; PAM type: NRG; PAM sequence: AAG
gagttcaaagtgggccatga

SEQ ID NO: 88877 - DNA, 20 bp, Artificial Sequence
  Description of Artificial Sequence: Synthetic oligonucleotide
  Target: LAMA2; (-) strand; PAM type: NRG; PAM sequence: GGG
tcctgctaagagttcaaagt

SEQ ID NO: 88878 - DNA, 20 bp, Artificial Sequence
  Description of Artificial Sequence: Synthetic oligonucleotide
  Target: LAMA2; (-) strand; PAM type: NRG; PAM sequence: TGG
ttcctgctaagagttcaaag

SEQ ID NO: 88879 - DNA, 20 bp, Artificial Sequence
  Description of Artificial Sequence: Synthetic oligonucleotide
  Target: LAMA2; (-) strand; PAM type: NRG; PAM sequence: AAG
aagttcctgctaagagttca

SEQ ID NO: 88880 - DNA, 20 bp, Artificial Sequence
  Description of Artificial Sequence: Synthetic oligonucleotide
  Target: LAMA2; (-) strand; PAM type: NRG; PAM sequence: GAG
cattccaaagttcctgctaa

SEQ ID NO: 88881 - DNA, 20 bp, Artificial Sequence
  Description of Artificial Sequence: Synthetic oligonucleotide
  Target: LAMA2; (-) strand; PAM type: NRG; PAM sequence: AAG
gacattccaaagttcctgct

SEQ ID NO: 88882 - DNA, 20 bp, Artificial Sequence
  Description of Artificial Sequence: Synthetic oligonucleotide
  Target: LAMA2; (-) strand; PAM type: NRG; PAM sequence: AAG
cagaccctcaggacattcca

SEQ ID NO: 88883 - DNA, 20 bp, Artificial Sequence
  Description of Artificial Sequence: Synthetic oligonucleotide
  Target: LAMA2; (-) strand; PAM type: NRG; PAM sequence: AGG
acaaaggcagacagaccctc

SEQ ID NO: 88884 - DNA, 20 bp, Artificial Sequence
  Description of Artificial Sequence: Synthetic oligonucleotide
  Target: LAMA2; (-) strand; PAM type: NRG; PAM sequence: CAG
tacaaaggcagacagaccct

SEQ ID NO: 88885 - DNA, 20 bp, Artificial Sequence
  Description of Artificial Sequence: Synthetic oligonucleotide
  Target: LAMA2; (-) strand; PAM type: NRG; PAM sequence: CAG
tcctgccatacaaaggcaga

SEQ ID NO: 88886 - DNA, 20 bp, Artificial Sequence
  Description of Artificial Sequence: Synthetic oligonucleotide
  Target: LAMA2; (-) strand; PAM type: NRG; PAM sequence: CAG
gagttcctgccatacaaagg

SEQ ID NO: 88887 - DNA, 20 bp, Artificial Sequence
  Description of Artificial Sequence: Synthetic oligonucleotide
  Target: LAMA2; (-) strand; PAM type: NRG; PAM sequence: AGG
acagagttcctgccatacaa

SEQ ID NO: 88888 - DNA, 20 bp, Artificial Sequence
  Description of Artificial Sequence: Synthetic oligonucleotide
  Target: LAMA2; (-) strand; PAM type: NRG; PAM sequence: AAG
aacagagttcctgccataca

SEQ ID NO: 88889 - DNA, 20 bp, Artificial Sequence
  Description of Artificial Sequence: Synthetic oligonucleotide
  Target: LAMA2; (-) strand; PAM type: NRG; PAM sequence: GAG
tactattttctaagaaaaca

SEQ ID NO: 88890 - DNA, 20 bp, Artificial Sequence
  Description of Artificial Sequence: Synthetic oligonucleotide
  Target: LAMA2; (-) strand; PAM type: NRG; PAM sequence: CAG
tttactattttctaagaaaa

SEQ ID NO: 88891 - DNA, 20 bp, Artificial Sequence
  Description of Artificial Sequence: Synthetic oligonucleotide
  Target: LAMA2; (-) strand; PAM type: NRG; PAM sequence: AAG
actgttctttactattttct

SEQ ID NO: 88892 - DNA, 20 bp, Artificial Sequence
  Description of Artificial Sequence: Synthetic oligonucleotide
  Target: LAMA2; (-) strand; PAM type: NRG; PAM sequence: GAG
aggtaccctttagaacaaag

SEQ ID NO: 88893 - DNA, 20 bp, Artificial Sequence
  Description of Artificial Sequence: Synthetic oligonucleotide
  Target: LAMA2; (-) strand; PAM type: NRG; PAM sequence: AGG
ataggtaccctttagaacaa

SEQ ID NO: 88894 - DNA, 20 bp, Artificial Sequence
  Description of Artificial Sequence: Synthetic oligonucleotide
  Target: LAMA2; (-) strand; PAM type: NRG; PAM sequence: AAG
tataggtaccctttagaaca

SEQ ID NO: 88895 - DNA, 20 bp, Artificial Sequence
  Description of Artificial Sequence: Synthetic oligonucleotide
  Target: LAMA2; (-) strand; PAM type: NRG; PAM sequence: TAG
cataaactataggtaccctt

SEQ ID NO: 88896 - DNA, 20 bp, Artificial Sequence
  Description of Artificial Sequence: Synthetic oligonucleotide
  Target: LAMA2; (-) strand; PAM type: NRG; PAM sequence: AGG
ccccaattcccataaactat

SEQ ID NO: 88897 - DNA, 20 bp, Artificial Sequence
  Description of Artificial Sequence: Synthetic oligonucleotide
  Target: LAMA2; (-) strand; PAM type: NRG; PAM sequence: TAG
tccccaattcccataaacta

SEQ ID NO: 88898 - DNA, 20 bp, Artificial Sequence
  Description of Artificial Sequence: Synthetic oligonucleotide
  Target: LAMA2; (-) strand; PAM type: NRG; PAM sequence: AAG
gcgttggtgatttttctact

SEQ ID NO: 88899 - DNA, 20 bp, Artificial Sequence
  Description of Artificial Sequence: Synthetic oligonucleotide
  Target: LAMA2; (-) strand; PAM type: NRG; PAM sequence: TGG
tatgagaaacatgagagcgt

SEQ ID NO: 88900 - DNA, 20 bp, Artificial Sequence
  Description of Artificial Sequence: Synthetic oligonucleotide
  Target: LAMA2; (-) strand; PAM type: NRG; PAM sequence: GAG
attttttatgagaaacatga

SEQ ID NO: 88901 - DNA, 20 bp, Artificial Sequence
  Description of Artificial Sequence: Synthetic oligonucleotide
  Target: LAMA2; (-) strand; PAM type: NRG; PAM sequence: GAG
gcattttttatgagaaacat

SEQ ID NO: 88902 - DNA, 20 bp, Artificial Sequence
  Description of Artificial Sequence: Synthetic oligonucleotide
  Target: LAMA2; (-) strand; PAM type: NRG; PAM sequence: GAG
taaagctgagcattttttat

SEQ ID NO: 88903 - DNA, 20 bp, Artificial Sequence
  Description of Artificial Sequence: Synthetic oligonucleotide
  Target: LAMA2; (-) strand; PAM type: NRG; PAM sequence: GAG
caaagtttccaaataaagct

SEQ ID NO: 88904 - DNA, 20 bp, Artificial Sequence
  Description of Artificial Sequence: Synthetic oligonucleotide
  Target: LAMA2; (-) strand; PAM type: NRG; PAM sequence: AAG
atggccaaagtttccaaata

SEQ ID NO: 88905 - DNA, 20 bp, Artificial Sequence
  Description of Artificial Sequence: Synthetic oligonucleotide
  Target: LAMA2; (-) strand; PAM type: NRG; PAM sequence: AAG
gaaaaagaaaacaatggcca

SEQ ID NO: 88906 - DNA, 20 bp, Artificial Sequence
  Description of Artificial Sequence: Synthetic oligonucleotide
  Target: LAMA2; (-) strand; PAM type: NRG; PAM sequence: TGG
aaagaagaaaaagaaaacaa

SEQ ID NO: 88907 - DNA, 20 bp, Artificial Sequence
  Description of Artificial Sequence: Synthetic oligonucleotide
  Target: LAMA2; (-) strand; PAM type: NRG; PAM sequence: AAG
ggagaagaagaaagaagaaa

SEQ ID NO: 88908 - DNA, 20 bp, Artificial Sequence
  Description of Artificial Sequence: Synthetic oligonucleotide
  Target: LAMA2; (-) strand; PAM type: NRG; PAM sequence: AAG
gaggaaggagaagaagaaag

SEQ ID NO: 88909 - DNA, 20 bp, Artificial Sequence
  Description of Artificial Sequence: Synthetic oligonucleotide
  Target: LAMA2; (-) strand; PAM type: NRG; PAM sequence: AAG
aaagaggaaggagaagaaga

SEQ ID NO: 88910 - DNA, 20 bp, Artificial Sequence
  Description of Artificial Sequence: Synthetic oligonucleotide
  Target: LAMA2; (-) strand; PAM type: NRG; PAM sequence: AAG
cccaaaagaggaaggagaag

SEQ ID NO: 88911 - DNA, 20 bp, Artificial Sequence
  Description of Artificial Sequence: Synthetic oligonucleotide
  Target: LAMA2; (-) strand; PAM type: NRG; PAM sequence: AAG
taacccaaaagaggaaggag

SEQ ID NO: 88912 - DNA, 20 bp, Artificial Sequence
  Description of Artificial Sequence: Synthetic oligonucleotide
  Target: LAMA2; (-) strand; PAM type: NRG; PAM sequence: GAG
ttttaacccaaaagaggaag

SEQ ID NO: 88913 - DNA, 20 bp, Artificial Sequence
  Description of Artificial Sequence: Synthetic oligonucleotide
  Target: LAMA2; (-) strand; PAM type: NRG; PAM sequence: AGG
ctttttaacccaaaagagga

SEQ ID NO: 88914 - DNA, 20 bp, Artificial Sequence
  Description of Artificial Sequence: Synthetic oligonucleotide
  Target: LAMA2; (-) strand; PAM type: NRG; PAM sequence: AAG
cctttttaacccaaaagagg

SEQ ID NO: 88915 - DNA, 20 bp, Artificial Sequence
  Description of Artificial Sequence: Synthetic oligonucleotide
  Target: LAMA2; (-) strand; PAM type: NRG; PAM sequence: AGG
tggcctttttaacccaaaag

SEQ ID NO: 88916 - DNA, 20 bp, Artificial Sequence
  Description of Artificial Sequence: Synthetic oligonucleotide
  Target: LAMA2; (-) strand; PAM type: NRG; PAM sequence: GAG
gtggcctttttaacccaaaa

SEQ ID NO: 88917 - DNA, 20 bp, Artificial Sequence
  Description of Artificial Sequence: Synthetic oligonucleotide
  Target: LAMA2; (-) strand; PAM type: NRG; PAM sequence: AAG
ctgtggcctttttaacccaa

SEQ ID NO: 88918 - DNA, 20 bp, Artificial Sequence
  Description of Artificial Sequence: Synthetic oligonucleotide
  Target: LAMA2; (-) strand; PAM type: NRG; PAM sequence: TGG
catataagtaggtcagactg

SEQ ID NO: 88919 - DNA, 20 bp, Artificial Sequence
  Description of Artificial Sequence: Synthetic oligonucleotide
  Target: LAMA2; (-) strand; PAM type: NRG; PAM sequence: CAG
catcacacatataagtaggt

SEQ ID NO: 88920 - DNA, 20 bp, Artificial Sequence
  Description of Artificial Sequence: Synthetic oligonucleotide
  Target: LAMA2; (-) strand; PAM type: NRG; PAM sequence: AGG
atttcatcacacatataagt

SEQ ID NO: 88921 - DNA, 20 bp, Artificial Sequence
  Description of Artificial Sequence: Synthetic oligonucleotide
  Target: LAMA2; (-) strand; PAM type: NRG; PAM sequence: TAG
catttcatcacacatataag

SEQ ID NO: 88922 - DNA, 20 bp, Artificial Sequence
  Description of Artificial Sequence: Synthetic oligonucleotide
  Target: LAMA2; (-) strand; PAM type: NRG; PAM sequence: AAG
gcacatttcatcacacatat

SEQ ID NO: 88923 - DNA, 20 bp, Artificial Sequence
  Description of Artificial Sequence: Synthetic oligonucleotide
  Target: LAMA2; (-) strand; PAM type: NRG; PAM sequence: GAG
tagaataaatagccttggca

SEQ ID NO: 88924 - DNA, 20 bp, Artificial Sequence
  Description of Artificial Sequence: Synthetic oligonucleotide
  Target: LAMA2; (-) strand; PAM type: NRG; PAM sequence: CAG
attagaataaatagccttgg

SEQ ID NO: 88925 - DNA, 20 bp, Artificial Sequence
  Description of Artificial Sequence: Synthetic oligonucleotide
  Target: LAMA2; (-) strand; PAM type: NRG; PAM sequence: TGG
atcattagaataaatagcct

SEQ ID NO: 88926 - DNA, 20 bp, Artificial Sequence
  Description of Artificial Sequence: Synthetic oligonucleotide
  Target: LAMA2; (-) strand; PAM type: NRG; PAM sequence: TAG
agataaatcattagaataaa

SEQ ID NO: 88927 - DNA, 20 bp, Artificial Sequence
  Description of Artificial Sequence: Synthetic oligonucleotide
  Target: LAMA2; (-) strand; PAM type: NRG; PAM sequence: TAG
atcttgagtagataaatcat

SEQ ID NO: 88928 - DNA, 20 bp, Artificial Sequence
  Description of Artificial Sequence: Synthetic oligonucleotide
  Target: LAMA2; (-) strand; PAM type: NRG; PAM sequence: TAG
ttatttctttttatcttgag

SEQ ID NO: 88929 - DNA, 20 bp, Artificial Sequence
  Description of Artificial Sequence: Synthetic oligonucleotide
  Target: LAMA2; (-) strand; PAM type: NRG; PAM sequence: GAG
actttatttctttttatctt

SEQ ID NO: 88930 - DNA, 20 bp, Artificial Sequence
  Description of Artificial Sequence: Synthetic oligonucleotide
  Target: LAMA2; (-) strand; PAM type: NRG; PAM sequence: CAG
aagtacattgcacagtattt

SEQ ID NO: 88931 - DNA, 20 bp, Artificial Sequence
  Description of Artificial Sequence: Synthetic oligonucleotide
  Target: LAMA2; (-) strand; PAM type: NRG; PAM sequence: CAG
tttcaagtaagtacattgca

SEQ ID NO: 88932 - DNA, 20 bp, Artificial Sequence
  Description of Artificial Sequence: Synthetic oligonucleotide
  Target: LAMA2; (-) strand; PAM type: NRG; PAM sequence: AAG
agaacttactgctttcaagt

SEQ ID NO: 88933 - DNA, 20 bp, Artificial Sequence
  Description of Artificial Sequence: Synthetic oligonucleotide
  Target: LAMA2; (-) strand; PAM type: NRG; PAM sequence: AAG
catgagaacttactgctttc

SEQ ID NO: 88934 - DNA, 20 bp, Artificial Sequence
  Description of Artificial Sequence: Synthetic oligonucleotide
  Target: LAMA2; (-) strand; PAM type: NRG; PAM sequence: GAG
atagggaaattttctaacat

SEQ ID NO: 88935 - DNA, 20 bp, Artificial Sequence
  Description of Artificial Sequence: Synthetic oligonucleotide
  Target: LAMA2; (-) strand; PAM type: NRG; PAM sequence: GGG
tcaagatttcttgcttaata

SEQ ID NO: 88936 - DNA, 20 bp, Artificial Sequence
  Description of Artificial Sequence: Synthetic oligonucleotide
  Target: LAMA2; (-) strand; PAM type: NRG; PAM sequence: AGG
ttcaagatttcttgcttaat

SEQ ID NO: 88937 - DNA, 20 bp, Artificial Sequence
  Description of Artificial Sequence: Synthetic oligonucleotide
  Target: LAMA2; (-) strand; PAM type: NRG; PAM sequence: TAG
gttcaagatttcttgcttaa

SEQ ID NO: 88938 - DNA, 20 bp, Artificial Sequence
  Description of Artificial Sequence: Synthetic oligonucleotide
  Target: LAMA2; (-) strand; PAM type: NRG; PAM sequence: AAG
atgactttaatgaagtgttc

SEQ ID NO: 88939 - DNA, 20 bp, Artificial Sequence
  Description of Artificial Sequence: Synthetic oligonucleotide
  Target: LAMA2; (-) strand; PAM type: NRG; PAM sequence: AAG
cagatcatatgactttaatg

SEQ ID NO: 88940 - DNA, 20 bp, Artificial Sequence
  Description of Artificial Sequence: Synthetic oligonucleotide
  Target: LAMA2; (-) strand; PAM type: NRG; PAM sequence: CAG
acttaaatgataataaaaat

SEQ ID NO: 88941 - DNA, 20 bp, Artificial Sequence
  Description of Artificial Sequence: Synthetic oligonucleotide
  Target: LAMA2; (-) strand; PAM type: NRG; PAM sequence: TAG
agttttataattgacacatt

SEQ ID NO: 88942 - DNA, 20 bp, Artificial Sequence
  Description of Artificial Sequence: Synthetic oligonucleotide
  Target: LAMA2; (-) strand; PAM type: NRG; PAM sequence: CAG
ttggaggctatacatatgta

SEQ ID NO: 88943 - DNA, 20 bp, Artificial Sequence
  Description of Artificial Sequence: Synthetic oligonucleotide
  Target: LAMA2; (-) strand; PAM type: NRG; PAM sequence: AGG
taatgtttaacacattttgg

SEQ ID NO: 88944 - DNA, 20 bp, Artificial Sequence
  Description of Artificial Sequence: Synthetic oligonucleotide
  Target: LAMA2; (-) strand; PAM type: NRG; PAM sequence: GAG
ctaatgtttaacacattttg

SEQ ID NO: 88945 - DNA, 20 bp, Artificial Sequence
  Description of Artificial Sequence: Synthetic oligonucleotide
  Target: LAMA2; (-) strand; PAM type: NRG; PAM sequence: TGG
aactaatgtttaacacattt

SEQ ID NO: 88946 - DNA, 20 bp, Artificial Sequence
  Description of Artificial Sequence: Synthetic oligonucleotide
  Target: LAMA2; (-) strand; PAM type: NRG; PAM sequence: GAG
ttactgtgttacagtatttt

SEQ ID NO: 88947 - DNA, 20 bp, Artificial Sequence
  Description of Artificial Sequence: Synthetic oligonucleotide
  Target: LAMA2; (-) strand; PAM type: NRG; PAM sequence: CAG
ttgctcattttactgtgtta

SEQ ID NO: 88948 - DNA, 20 bp, Artificial Sequence
  Description of Artificial Sequence: Synthetic oligonucleotide
  Target: LAMA2; (-) strand; PAM type: NRG; PAM sequence: CAG
tttacctcggtgaacattaa

SEQ ID NO: 88949 - DNA, 20 bp, Artificial Sequence
  Description of Artificial Sequence: Synthetic oligonucleotide
  Target: LAMA2; (-) strand; PAM type: NRG; PAM sequence: CGG
tttggacaaattatttacct

SEQ ID NO: 88950 - DNA, 20 bp, Artificial Sequence
  Description of Artificial Sequence: Synthetic oligonucleotide
  Target: LAMA2; (-) strand; PAM type: NRG; PAM sequence: TGG
atctcacagaaatagaactt

SEQ ID NO: 88951 - DNA, 20 bp, Artificial Sequence
  Description of Artificial Sequence: Synthetic oligonucleotide
  Target: LAMA2; (-) strand; PAM type: NRG; PAM sequence: TAG
agttgagtatctcacagaaa

SEQ ID NO: 88952 - DNA, 20 bp, Artificial Sequence
  Description of Artificial Sequence: Synthetic oligonucleotide
  Target: LAMA2; (-) strand; PAM type: NRG; PAM sequence: CAG
tgtctcagttgagtatctca

SEQ ID NO: 88953 - DNA, 20 bp, Artificial Sequence
  Description of Artificial Sequence: Synthetic oligonucleotide
  Target: LAMA2; (-) strand; PAM type: NRG; PAM sequence: GAG
gctgagattatgtctcagtt

SEQ ID NO: 88954 - DNA, 20 bp, Artificial Sequence
  Description of Artificial Sequence: Synthetic oligonucleotide
  Target: LAMA2; (-) strand; PAM type: NRG; PAM sequence: CAG
aaaaagctgagattatgtct

SEQ ID NO: 88955 - DNA, 20 bp, Artificial Sequence
  Description of Artificial Sequence: Synthetic oligonucleotide
  Target: LAMA2; (-) strand; PAM type: NRG; PAM sequence: GAG
atatgaaagtgaaaaaagct

SEQ ID NO: 88956 - DNA, 20 bp, Artificial Sequence
  Description of Artificial Sequence: Synthetic oligonucleotide
  Target: LAMA2; (-) strand; PAM type: NRG; PAM sequence: AAG
atagaatatgaaagtgaaaa

SEQ ID NO: 88957 - DNA, 20 bp, Artificial Sequence
  Description of Artificial Sequence: Synthetic oligonucleotide
  Target: LAMA2; (-) strand; PAM type: NRG; PAM sequence: AAG
aaccaaaatatagaatatga

SEQ ID NO: 88958 - DNA, 20 bp, Artificial Sequence
  Description of Artificial Sequence: Synthetic oligonucleotide
  Target: LAMA2; (-) strand; PAM type: NRG; PAM sequence: TAG
acaaaatgaaaaccaaaata

SEQ ID NO: 88959 - DNA, 20 bp, Artificial Sequence
  Description of Artificial Sequence: Synthetic oligonucleotide
  Target: LAMA2; (-) strand; PAM type: NRG; PAM sequence: AAG
tttaaaaatacttgtttctt

SEQ ID NO: 88960 - DNA, 20 bp, Artificial Sequence
  Description of Artificial Sequence: Synthetic oligonucleotide
  Target: LAMA2; (-) strand; PAM type: NRG; PAM sequence: CAG
ttagccagcactgccgaaac

SEQ ID NO: 88961 - DNA, 20 bp, Artificial Sequence
  Description of Artificial Sequence: Synthetic oligonucleotide
  Target: LAMA2; (-) strand; PAM type: NRG; PAM sequence: CAG
agggagttctgagcattagc

SEQ ID NO: 88962 - DNA, 20 bp, Artificial Sequence
  Description of Artificial Sequence: Synthetic oligonucleotide
  Target: LAMA2; (-) strand; PAM type: NRG; PAM sequence: TAG
gggaagggagttctgagcat

SEQ ID NO: 88963 - DNA, 20 bp, Artificial Sequence
  Description of Artificial Sequence: Synthetic oligonucleotide
  Target: LAMA2; (-) strand; PAM type: NRG; PAM sequence: GAG
aaacaagggaagggagttct

SEQ ID NO: 88964 - DNA, 20 bp, Artificial Sequence
  Description of Artificial Sequence: Synthetic oligonucleotide
  Target: LAMA2; (-) strand; PAM type: NRG; PAM sequence: GAG
ttgaagaaaacaagggaagg

SEQ ID NO: 88965 - DNA, 20 bp, Artificial Sequence
  Description of Artificial Sequence: Synthetic oligonucleotide
  Target: LAMA2; (-) strand; PAM type: NRG; PAM sequence: GGG
cattgaagaaaacaagggaa

SEQ ID NO: 88966 - DNA, 20 bp, Artificial Sequence
  Description of Artificial Sequence: Synthetic oligonucleotide
  Target: LAMA2; (-) strand; PAM type: NRG; PAM sequence: AGG
acattgaagaaaacaaggga

SEQ ID NO: 88967 - DNA, 20 bp, Artificial Sequence
  Description of Artificial Sequence: Synthetic oligonucleotide
  Target: LAMA2; (-) strand; PAM type: NRG; PAM sequence: AAG
gacattgaagaaaacaaggg

SEQ ID NO: 88968 - DNA, 20 bp, Artificial Sequence
  Description of Artificial Sequence: Synthetic oligonucleotide
  Target: LAMA2; (-) strand; PAM type: NRG; PAM sequence: GGG
ggtgacattgaagaaaacaa

SEQ ID NO: 88969 - DNA, 20 bp, Artificial Sequence
  Description of Artificial Sequence: Synthetic oligonucleotide
  Target: LAMA2; (-) strand; PAM type: NRG; PAM sequence: AGG
gggtgacattgaagaaaaca

SEQ ID NO: 88970 - DNA, 20 bp, Artificial Sequence
  Description of Artificial Sequence: Synthetic oligonucleotide
  Target: LAMA2; (-) strand; PAM type: NRG; PAM sequence: AAG
agggtgacattgaagaaaac

SEQ ID NO: 88971 - DNA, 20 bp, Artificial Sequence
  Description of Artificial Sequence: Synthetic oligonucleotide
  Target: LAMA2; (-) strand; PAM type: NRG; PAM sequence: AAG
tttatagaagggtgacattg

SEQ ID NO: 88972 - DNA, 20 bp, Artificial Sequence
  Description of Artificial Sequence: Synthetic oligonucleotide
  Target: LAMA2; (-) strand; PAM type: NRG; PAM sequence: GGG
attcagaggtttttatagaa

SEQ ID NO: 88973 - DNA, 20 bp, Artificial Sequence
  Description of Artificial Sequence: Synthetic oligonucleotide
  Target: LAMA2; (-) strand; PAM type: NRG; PAM sequence: AGG
tattcagaggtttttataga

SEQ ID NO: 88974 - DNA, 20 bp, Artificial Sequence
  Description of Artificial Sequence: Synthetic oligonucleotide
  Target: LAMA2; (-) strand; PAM type: NRG; PAM sequence: AAG
atattcagaggtttttatag

SEQ ID NO: 88975 - DNA, 20 bp, Artificial Sequence
  Description of Artificial Sequence: Synthetic oligonucleotide
  Target: LAMA2; (-) strand; PAM type: NRG; PAM sequence: TAG
cagatattcagaggttttta

SEQ ID NO: 88976 - DNA, 20 bp, Artificial Sequence
  Description of Artificial Sequence: Synthetic oligonucleotide
  Target: LAMA2; (-) strand; PAM type: NRG; PAM sequence: AGG
aaacgtattcagatattcag

SEQ ID NO: 88977 - DNA, 20 bp, Artificial Sequence
  Description of Artificial Sequence: Synthetic oligonucleotide
  Target: LAMA2; (-) strand; PAM type: NRG; PAM sequence: GAG
aaaacgtattcagatattca

SEQ ID NO: 88978 - DNA, 20 bp, Artificial Sequence
  Description of Artificial Sequence: Synthetic oligonucleotide
  Target: LAMA2; (-) strand; PAM type: NRG; PAM sequence: CAG
ttaaaacgtattcagatatt

SEQ ID NO: 88979 - DNA, 20 bp, Artificial Sequence
  Description of Artificial Sequence: Synthetic oligonucleotide
  Target: LAMA2; (-) strand; PAM type: NRG; PAM sequence: CAG
gggtgctcttaaaacgtatt

SEQ ID NO: 88980 - DNA, 20 bp, Artificial Sequence
  Description of Artificial Sequence: Synthetic oligonucleotide
  Target: LAMA2; (-) strand; PAM type: NRG; PAM sequence: GGG
agcaaaaagtgttttataag

SEQ ID NO: 88981 - DNA, 20 bp, Artificial Sequence
  Description of Artificial Sequence: Synthetic oligonucleotide
  Target: LAMA2; (-) strand; PAM type: NRG; PAM sequence: GGG
aagcaaaaagtgttttataa

SEQ ID NO: 88982 - DNA, 20 bp, Artificial Sequence
  Description of Artificial Sequence: Synthetic oligonucleotide
  Target: LAMA2; (-) strand; PAM type: NRG; PAM sequence: AGG
aaagcaaaaagtgttttata

SEQ ID NO: 88983 - DNA, 20 bp, Artificial Sequence
  Description of Artificial Sequence: Synthetic oligonucleotide
  Target: LAMA2; (-) strand; PAM type: NRG; PAM sequence: AAG
caaagcaaaaagtgttttat

SEQ ID NO: 88984 - DNA, 20 bp, Artificial Sequence
  Description of Artificial Sequence: Synthetic oligonucleotide
  Target: LAMA2; (-) strand; PAM type: NRG; PAM sequence: AAG
atgaaacataacaaagcaaa

SEQ ID NO: 88985 - DNA, 20 bp, Artificial Sequence
  Description of Artificial Sequence: Synthetic oligonucleotide
  Target: LAMA2; (-) strand; PAM type: NRG; PAM sequence: AAG
ctgcaaaatgaaacataaca

SEQ ID NO: 88986 - DNA, 20 bp, Artificial Sequence
  Description of Artificial Sequence: Synthetic oligonucleotide
  Target: LAMA2; (-) strand; PAM type: NRG; PAM sequence: TGG
aggtgaaatatttgtgactt

SEQ ID NO: 88987 - DNA, 20 bp, Artificial Sequence
  Description of Artificial Sequence: Synthetic oligonucleotide
  Target: LAMA2; (-) strand; PAM type: NRG; PAM sequence: AGG
ctacctggaatatctgaatg

SEQ ID NO: 88988 - DNA, 20 bp, Artificial Sequence
  Description of Artificial Sequence: Synthetic oligonucleotide
  Target: LAMA2; (-) strand; PAM type: NRG; PAM sequence: GAG
actacctggaatatctgaat

SEQ ID NO: 88989 - DNA, 20 bp, Artificial Sequence
  Description of Artificial Sequence: Synthetic oligonucleotide
  Target: LAMA2; (-) strand; PAM type: NRG; PAM sequence: TGG
aaaatatcagccttactacc

SEQ ID NO: 88990 - DNA, 20 bp, Artificial Sequence
  Description of Artificial Sequence: Synthetic oligonucleotide
  Target: LAMA2; (-) strand; PAM type: NRG; PAM sequence: CAG
gaaatgactcataaaaatat

SEQ ID NO: 88991 - DNA, 20 bp, Artificial Sequence
  Description of Artificial Sequence: Synthetic oligonucleotide
  Target: LAMA2; (-) strand; PAM type: NRG; PAM sequence: CAG
tattcttaaattaattttgt

SEQ ID NO: 88992 - DNA, 20 bp, Artificial Sequence
  Description of Artificial Sequence: Synthetic oligonucleotide
  Target: LAMA2; (-) strand; PAM type: NRG; PAM sequence: AAG
aaatagggaaaataagagtt

SEQ ID NO: 88993 - DNA, 20 bp, Artificial Sequence
  Description of Artificial Sequence: Synthetic oligonucleotide
  Target: LAMA2; (-) strand; PAM type: NRG; PAM sequence: GAG
aatagaaatagggaaaataa

SEQ ID NO: 88994 - DNA, 20 bp, Artificial Sequence
  Description of Artificial Sequence: Synthetic oligonucleotide
  Target: LAMA2; (-) strand; PAM type: NRG; PAM sequence: AAG
agaatagaaatagggaaaat

SEQ ID NO: 88995 - DNA, 20 bp, Artificial Sequence
  Description of Artificial Sequence: Synthetic oligonucleotide
  Target: LAMA2; (-) strand; PAM type: NRG; PAM sequence: GGG
aacatggaagaatagaaata

SEQ ID NO: 88996 - DNA, 20 bp, Artificial Sequence
  Description of Artificial Sequence: Synthetic oligonucleotide
  Target: LAMA2; (-) strand; PAM type: NRG; PAM sequence: AGG
aaacatggaagaatagaaat

SEQ ID NO: 88997 - DNA, 20 bp, Artificial Sequence
  Description of Artificial Sequence: Synthetic oligonucleotide
  Target: LAMA2; (-) strand; PAM type: NRG; PAM sequence: TAG
aaaacatggaagaatagaaa

SEQ ID NO: 88998 - DNA, 20 bp, Artificial Sequence
  Description of Artificial Sequence: Synthetic oligonucleotide
  Target: LAMA2; (-) strand; PAM type: NRG; PAM sequence: TAG
tctattaaaacatggaagaa

SEQ ID NO: 88999 - DNA, 20 bp, Artificial Sequence
  Description of Artificial Sequence: Synthetic oligonucleotide
  Target: LAMA2; (-) strand; PAM type: NRG; PAM sequence: AAG
attaatctattaaaacatgg

SEQ ID NO: 89000 - DNA, 20 bp, Artificial Sequence
  Description of Artificial Sequence: Synthetic oligonucleotide
  Target: LAMA2; (-) strand; PAM type: NRG; PAM sequence: TGG
tatattaatctattaaaaca

SEQ ID NO: 89001 - DNA, 20 bp, Artificial Sequence
  Description of Artificial Sequence: Synthetic oligonucleotide
  Target: LAMA2; (-) strand; PAM type: NRG; PAM sequence: GAG
gcatgtacatatatacacat

SEQ ID NO: 89002 - DNA, 20 bp, Artificial Sequence
  Description of Artificial Sequence: Synthetic oligonucleotide
  Target: LAMA2; (-) strand; PAM type: NRG; PAM sequence: GAG
atatatacttatatgtgtgt

SEQ ID NO: 89003 - DNA, 20 bp, Artificial Sequence
  Description of Artificial Sequence: Synthetic oligonucleotide
  Target: LAMA2; (-) strand; PAM type: NRG; PAM sequence: AGG
gtttccacttgtataagatg

SEQ ID NO: 89004 - DNA, 20 bp, Artificial Sequence
  Description of Artificial Sequence: Synthetic oligonucleotide
  Target: LAMA2; (-) strand; PAM type: NRG; PAM sequence: GAG
tgtttccacttgtataagat

SEQ ID NO: 89005 - DNA, 20 bp, Artificial Sequence
  Description of Artificial Sequence: Synthetic oligonucleotide
  Target: LAMA2; (-) strand; PAM type: NRG; PAM sequence: AAG
tagtatgtttccacttgtat

SEQ ID NO: 89006 - DNA, 20 bp, Artificial Sequence
  Description of Artificial Sequence: Synthetic oligonucleotide
  Target: LAMA2; (-) strand; PAM type: NRG; PAM sequence: TAG
ctgtgctcttataatgtgta

SEQ ID NO: 89007 - DNA, 20 bp, Artificial Sequence
  Description of Artificial Sequence: Synthetic oligonucleotide
  Target: LAMA2; (-) strand; PAM type: NRG; PAM sequence: TGG
aatgaagaaactatccaata

SEQ ID NO: 89008 - DNA, 20 bp, Artificial Sequence
  Description of Artificial Sequence: Synthetic oligonucleotide
  Target: LAMA2; (-) strand; PAM type: NRG; PAM sequence: AAG
atatacttacacatataatg

SEQ ID NO: 89009 - DNA, 20 bp, Artificial Sequence
  Description of Artificial Sequence: Synthetic oligonucleotide
  Target: LAMA2; (-) strand; PAM type: NRG; PAM sequence: TAG
ttcaatgaaatacacaatca

SEQ ID NO: 89010 - DNA, 20 bp, Artificial Sequence
  Description of Artificial Sequence: Synthetic oligonucleotide
  Target: LAMA2; (-) strand; PAM type: NRG; PAM sequence: GAG
gctgattgctgaacacgttt

SEQ ID NO: 89011 - DNA, 20 bp, Artificial Sequence
  Description of Artificial Sequence: Synthetic oligonucleotide
  Target: LAMA2; (-) strand; PAM type: NRG; PAM sequence: GAG
accttcacagtctagtacta

SEQ ID NO: 89012 - DNA, 20 bp, Artificial Sequence
  Description of Artificial Sequence: Synthetic oligonucleotide
  Target: LAMA2; (-) strand; PAM type: NRG; PAM sequence: TAG
gaaccttcacagtctagtac

SEQ ID NO: 89013 - DNA, 20 bp, Artificial Sequence
  Description of Artificial Sequence: Synthetic oligonucleotide
  Target: LAMA2; (-) strand; PAM type: NRG; PAM sequence: TAG
ggatttgaaccttcacagtc

SEQ ID NO: 89014 - DNA, 20 bp, Artificial Sequence
  Description of Artificial Sequence: Synthetic oligonucleotide
  Target: LAMA2; (-) strand; PAM type: NRG; PAM sequence: CAG
aagcaggatttgaaccttca

SEQ ID NO: 89015 - DNA, 20 bp, Artificial Sequence
  Description of Artificial Sequence: Synthetic oligonucleotide
  Target: LAMA2; (-) strand; PAM type: NRG; PAM sequence: AGG
agatggcaggtggtgaaagc

SEQ ID NO: 89016 - DNA, 20 bp, Artificial Sequence
  Description of Artificial Sequence: Synthetic oligonucleotide
  Target: LAMA2; (-) strand; PAM type: NRG; PAM sequence: CAG
aagatggcaggtggtgaaag

SEQ ID NO: 89017 - DNA, 20 bp, Artificial Sequence
  Description of Artificial Sequence: Synthetic oligonucleotide
  Target: LAMA2; (-) strand; PAM type: NRG; PAM sequence: AAG
acaaagatggcaggtggtga

SEQ ID NO: 89018 - DNA, 20 bp, Artificial Sequence
  Description of Artificial Sequence: Synthetic oligonucleotide
  Target: LAMA2; (-) strand; PAM type: NRG; PAM sequence: TGG
aaggttacaaagatggcagg

SEQ ID NO: 89019 - DNA, 20 bp, Artificial Sequence
  Description of Artificial Sequence: Synthetic oligonucleotide
  Target: LAMA2; (-) strand; PAM type: NRG; PAM sequence: AGG
ttcaaggttacaaagatggc

SEQ ID NO: 89020 - DNA, 20 bp, Artificial Sequence
  Description of Artificial Sequence: Synthetic oligonucleotide
  Target: LAMA2; (-) strand; PAM type: NRG; PAM sequence: CAG
gttcaaggttacaaagatgg

SEQ ID NO: 89021 - DNA, 20 bp, Artificial Sequence
  Description of Artificial Sequence: Synthetic oligonucleotide
  Target: LAMA2; (-) strand; PAM type: NRG; PAM sequence: TGG
cttgttcaaggttacaaaga

SEQ ID NO: 89022 - DNA, 20 bp, Artificial Sequence
  Description of Artificial Sequence: Synthetic oligonucleotide
  Target: LAMA2; (-) strand; PAM type: NRG; PAM sequence: AAG
ataacttgttcaaggttaca

SEQ ID NO: 89023 - DNA, 20 bp, Artificial Sequence
  Description of Artificial Sequence: Synthetic oligonucleotide
  Target: LAMA2; (-) strand; PAM type: NRG; PAM sequence: AGG
gtacttacataacttgttca

SEQ ID NO: 89024 - DNA, 20 bp, Artificial Sequence
  Description of Artificial Sequence: Synthetic oligonucleotide
  Target: LAMA2; (-) strand; PAM type: NRG; PAM sequence: AAG
agtacttacataacttgttc

SEQ ID NO: 89025 - DNA, 20 bp, Artificial Sequence
  Description of Artificial Sequence: Synthetic oligonucleotide
  Target: LAMA2; (-) strand; PAM type: NRG; PAM sequence: GAG
gatgagggaattgaagcatt

SEQ ID NO: 89026 - DNA, 20 bp, Artificial Sequence
  Description of Artificial Sequence: Synthetic oligonucleotide
  Target: LAMA2; (-) strand; PAM type: NRG; PAM sequence: AAG
ttttaaagatgagggaattg

SEQ ID NO: 89027 - DNA, 20 bp, Artificial Sequence
  Description of Artificial Sequence: Synthetic oligonucleotide
  Target: LAMA2; (-) strand; PAM type: NRG; PAM sequence: GGG
tacattgattttaaagatga

SEQ ID NO: 89028 - DNA, 20 bp, Artificial Sequence
  Description of Artificial Sequence: Synthetic oligonucleotide
  Target: LAMA2; (-) strand; PAM type: NRG; PAM sequence: AGG
ttacattgattttaaagatg

SEQ ID NO: 89029 - DNA, 20 bp, Artificial Sequence
  Description of Artificial Sequence: Synthetic oligonucleotide
  Target: LAMA2; (-) strand; PAM type: NRG; PAM sequence: GAG
gttacattgattttaaagat

SEQ ID NO: 89030 - DNA, 20 bp, Artificial Sequence
  Description of Artificial Sequence: Synthetic oligonucleotide
  Target: LAMA2; (-) strand; PAM type: NRG; PAM sequence: AAG
taactgttacattgatttta

SEQ ID NO: 89031 - DNA, 20 bp, Artificial Sequence
  Description of Artificial Sequence: Synthetic oligonucleotide
  Target: LAMA2; (-) strand; PAM type: NRG; PAM sequence: AAG
cacacacaaccttatgtggt

SEQ ID NO: 89032 - DNA, 20 bp, Artificial Sequence
  Description of Artificial Sequence: Synthetic oligonucleotide
  Target: LAMA2; (-) strand; PAM type: NRG; PAM sequence: TGG
acaccacacacaaccttatg

SEQ ID NO: 89033 - DNA, 20 bp, Artificial Sequence
  Description of Artificial Sequence: Synthetic oligonucleotide
  Target: LAMA2; (-) strand; PAM type: NRG; PAM sequence: TGG
agcactctacaatgtggctt

SEQ ID NO: 89034 - DNA, 20 bp, Artificial Sequence
  Description of Artificial Sequence: Synthetic oligonucleotide
  Target: LAMA2; (-) strand; PAM type: NRG; PAM sequence: TGG
gtgctaagcactctacaatg

SEQ ID NO: 89035 - DNA, 20 bp, Artificial Sequence
  Description of Artificial Sequence: Synthetic oligonucleotide
  Target: LAMA2; (-) strand; PAM type: NRG; PAM sequence: AAG
cattatgctttgcaagtgct

SEQ ID NO: 89036 - DNA, 20 bp, Artificial Sequence
  Description of Artificial Sequence: Synthetic oligonucleotide
  Target: LAMA2; (-) strand; PAM type: NRG; PAM sequence: AAG
acactgacattatgctttgc

SEQ ID NO: 89037 - DNA, 20 bp, Artificial Sequence
  Description of Artificial Sequence: Synthetic oligonucleotide
  Target: LAMA2; (-) strand; PAM type: NRG; PAM sequence: TGG
aaacatgttaaaaatgatga

SEQ ID NO: 89038 - DNA, 20 bp, Artificial Sequence
  Description of Artificial Sequence: Synthetic oligonucleotide
  Target: LAMA2; (-) strand; PAM type: NRG; PAM sequence: GGG
gtccgtacgtccatcaatag

SEQ ID NO: 89039 - DNA, 20 bp, Artificial Sequence
  Description of Artificial Sequence: Synthetic oligonucleotide
  Target: LAMA2; (-) strand; PAM type: NRG; PAM sequence: GGG
tgtccgtacgtccatcaata

SEQ ID NO: 89040 - DNA, 20 bp, Artificial Sequence
  Description of Artificial Sequence: Synthetic oligonucleotide
  Target: LAMA2; (-) strand; PAM type: NRG; PAM sequence: AGG
atgtccgtacgtccatcaat

SEQ ID NO: 89041 - DNA, 20 bp, Artificial Sequence
  Description of Artificial Sequence: Synthetic oligonucleotide
  Target: LAMA2; (-) strand; PAM type: NRG; PAM sequence: TAG
aatgtccgtacgtccatcaa

SEQ ID NO: 89042 - DNA, 20 bp, Artificial Sequence
  Description of Artificial Sequence: Synthetic oligonucleotide
  Target: LAMA2; (-) strand; PAM type: NRG; PAM sequence: TAG
acaatgtataacaacgtttg

SEQ ID NO: 89043 - DNA, 20 bp, Artificial Sequence
  Description of Artificial Sequence: Synthetic oligonucleotide
  Target: LAMA2; (-) strand; PAM type: NRG; PAM sequence: CAG
aacaacaacaacaacaacaa

SEQ ID NO: 89044 - DNA, 20 bp, Artificial Sequence
  Description of Artificial Sequence: Synthetic oligonucleotide
  Target: LAMA2; (-) strand; PAM type: NRG; PAM sequence: AAG
tccagcctgggtgatagagc

SEQ ID NO: 89045 - DNA, 20 bp, Artificial Sequence
  Description of Artificial Sequence: Synthetic oligonucleotide
  Target: LAMA2; (-) strand; PAM type: NRG; PAM sequence: GAG
gcactccagcctgggtgata

SEQ ID NO: 89046 - DNA, 20 bp, Artificial Sequence
  Description of Artificial Sequence: Synthetic oligonucleotide
  Target: LAMA2; (-) strand; PAM type: NRG; PAM sequence: TAG
ctgcactccagcctgggtga

SEQ ID NO: 89047 - DNA, 20 bp, Artificial Sequence
  Description of Artificial Sequence: Synthetic oligonucleotide
  Target: LAMA2; (-) strand; PAM type: NRG; PAM sequence: GGG
acaccactgcactccagcct

SEQ ID NO: 89048 - DNA, 20 bp, Artificial Sequence
  Description of Artificial Sequence: Synthetic oligonucleotide
  Target: LAMA2; (-) strand; PAM type: NRG; PAM sequence: TGG
cacaccactgcactccagcc

SEQ ID NO: 89049 - DNA, 20 bp, Artificial Sequence
  Description of Artificial Sequence: Synthetic oligonucleotide
  Target: LAMA2; (-) strand; PAM type: NRG; PAM sequence: CAG
gagatcacaccactgcactc

SEQ ID NO: 89050 - DNA, 20 bp, Artificial Sequence
  Description of Artificial Sequence: Synthetic oligonucleotide
  Target: LAMA2; (-) strand; PAM type: NRG; PAM sequence: GAG
ggtggaggttgcagtgagcc

SEQ ID NO: 89051 - DNA, 20 bp, Artificial Sequence
  Description of Artificial Sequence: Synthetic oligonucleotide
  Target: LAMA2; (-) strand; PAM type: NRG; PAM sequence: GAG
cgggaggtggaggttgcagt

SEQ ID NO: 89052 - DNA, 20 bp, Artificial Sequence
  Description of Artificial Sequence: Synthetic oligonucleotide
  Target: LAMA2; (-) strand; PAM type: NRG; PAM sequence: CAG
aacccgggaggtggaggttg

SEQ ID NO: 89053 - DNA, 20 bp, Artificial Sequence
  Description of Artificial Sequence: Synthetic oligonucleotide
  Target: LAMA2; (-) strand; PAM type: NRG; PAM sequence: AGG
cacttgaacccgggaggtgg

SEQ ID NO: 89054 - DNA, 20 bp, Artificial Sequence
  Description of Artificial Sequence: Synthetic oligonucleotide
  Target: LAMA2; (-) strand; PAM type: NRG; PAM sequence: GAG
tcacttgaacccgggaggtg

SEQ ID NO: 89055 - DNA, 20 bp, Artificial Sequence
  Description of Artificial Sequence: Synthetic oligonucleotide
  Target: LAMA2; (-) strand; PAM type: NRG; PAM sequence: TGG
aatcacttgaacccgggagg

SEQ ID NO: 89056 - DNA, 20 bp, Artificial Sequence
  Description of Artificial Sequence: Synthetic oligonucleotide
  Target: LAMA2; (-) strand; PAM type: NRG; PAM sequence: AGG
gagaatcacttgaacccggg

SEQ ID NO: 89057 - DNA, 20 bp, Artificial Sequence
  Description of Artificial Sequence: Synthetic oligonucleotide
  Target: LAMA2; (-) strand; PAM type: NRG; PAM sequence: GAG
agagaatcacttgaacccgg

SEQ ID NO: 89058 - DNA, 20 bp, Artificial Sequence
  Description of Artificial Sequence: Synthetic oligonucleotide
  Target: LAMA2; (-) strand; PAM type: NRG; PAM sequence: GGG
gcagagaatcacttgaaccc

SEQ ID NO: 89059 - DNA, 20 bp, Artificial Sequence
  Description of Artificial Sequence: Synthetic oligonucleotide
  Target: LAMA2; (-) strand; PAM type: NRG; PAM sequence: CGG
ggcagagaatcacttgaacc

SEQ ID NO: 89060 - DNA, 20 bp, Artificial Sequence
  Description of Artificial Sequence: Synthetic oligonucleotide
  Target: LAMA2; (-) strand; PAM type: NRG; PAM sequence: GAG
ctactcgggaggctgaggca

SEQ ID NO: 89061 - DNA, 20 bp, Artificial Sequence
  Description of Artificial Sequence: Synthetic oligonucleotide
  Target: LAMA2; (-) strand; PAM type: NRG; PAM sequence: CAG
agctactcgggaggctgagg

SEQ ID NO: 89062 - DNA, 20 bp, Artificial Sequence
  Description of Artificial Sequence: Synthetic oligonucleotide
  Target: LAMA2; (-) strand; PAM type: NRG; PAM sequence: AGG
cccagctactcgggaggctg

SEQ ID NO: 89063 - DNA, 20 bp, Artificial Sequence
  Description of Artificial Sequence: Synthetic oligonucleotide
  Target: LAMA2; (-) strand; PAM type: NRG; PAM sequence: GAG
tcccagctactcgggaggct

SEQ ID NO: 89064 - DNA, 20 bp, Artificial Sequence
  Description of Artificial Sequence: Synthetic oligonucleotide
  Target: LAMA2; (-) strand; PAM type: NRG; PAM sequence: AGG
tgtaatcccagctactcggg

SEQ ID NO: 89065 - DNA, 20 bp, Artificial Sequence
  Description of Artificial Sequence: Synthetic oligonucleotide
  Target: LAMA2; (-) strand; PAM type: NRG; PAM sequence: GAG
ctgtaatcccagctactcgg

SEQ ID NO: 89066 - DNA, 20 bp, Artificial Sequence
  Description of Artificial Sequence: Synthetic oligonucleotide
  Target: LAMA2; (-) strand; PAM type: NRG; PAM sequence: GGG
acctgtaatcccagctactc

SEQ ID NO: 89067 - DNA, 20 bp, Artificial Sequence
  Description of Artificial Sequence: Synthetic oligonucleotide
  Target: LAMA2; (-) strand; PAM type: NRG; PAM sequence: CGG
cacctgtaatcccagctact

SEQ ID NO: 89068 - DNA, 20 bp, Artificial Sequence
  Description of Artificial Sequence: Synthetic oligonucleotide
  Target: LAMA2; (-) strand; PAM type: NRG; PAM sequence: CAG
gtggcaagcacctgtaatcc

SEQ ID NO: 89069 - DNA, 20 bp, Artificial Sequence
  Description of Artificial Sequence: Synthetic oligonucleotide
  Target: LAMA2; (-) strand; PAM type: NRG; PAM sequence: AAG
aattagctgggcatggtggc

SEQ ID NO: 89070 - DNA, 20 bp, Artificial Sequence
  Description of Artificial Sequence: Synthetic oligonucleotide
  Target: LAMA2; (-) strand; PAM type: NRG; PAM sequence: TGG
caaaaattagctgggcatgg

SEQ ID NO: 89071 - DNA, 20 bp, Artificial Sequence
  Description of Artificial Sequence: Synthetic oligonucleotide
  Target: LAMA2; (-) strand; PAM type: NRG; PAM sequence: TGG
atacaaaaattagctgggca

SEQ ID NO: 89072 - DNA, 20 bp, Artificial Sequence
  Description of Artificial Sequence: Synthetic oligonucleotide
  Target: LAMA2; (-) strand; PAM type: NRG; PAM sequence: GGG
taaaaatacaaaaattagct

SEQ ID NO: 89073 - DNA, 20 bp, Artificial Sequence
  Description of Artificial Sequence: Synthetic oligonucleotide
  Target: LAMA2; (-) strand; PAM type: NRG; PAM sequence: TGG
ctaaaaatacaaaaattagc

SEQ ID NO: 89074 - DNA, 20 bp, Artificial Sequence
  Description of Artificial Sequence: Synthetic oligonucleotide
  Target: LAMA2; (-) strand; PAM type: NRG; PAM sequence: TAG
tctactaaaaatacaaaaat

SEQ ID NO: 89075 - DNA, 20 bp, Artificial Sequence
  Description of Artificial Sequence: Synthetic oligonucleotide
  Target: LAMA2; (-) strand; PAM type: NRG; PAM sequence: TGG
caagaccagcctggccaaga

SEQ ID NO: 89076 - DNA, 20 bp, Artificial Sequence
  Description of Artificial Sequence: Synthetic oligonucleotide
  Target: LAMA2; (-) strand; PAM type: NRG; PAM sequence: AAG
agttcaagaccagcctggcc

SEQ ID NO: 89077 - DNA, 20 bp, Artificial Sequence
  Description of Artificial Sequence: Synthetic oligonucleotide
  Target: LAMA2; (-) strand; PAM type: NRG; PAM sequence: TGG
tcaggagttcaagaccagcc

SEQ ID NO: 89078 - DNA, 20 bp, Artificial Sequence
  Description of Artificial Sequence: Synthetic oligonucleotide
  Target: LAMA2; (-) strand; PAM type: NRG; PAM sequence: CAG
tgagttcaggagttcaagac

SEQ ID NO: 89079 - DNA, 20 bp, Artificial Sequence
  Description of Artificial Sequence: Synthetic oligonucleotide
  Target: LAMA2; (-) strand; PAM type: NRG; PAM sequence: AAG
actcatgagttcaggagttc

SEQ ID NO: 89080 - DNA, 20 bp, Artificial Sequence
  Description of Artificial Sequence: Synthetic oligonucleotide
  Target: LAMA2; (-) strand; PAM type: NRG; PAM sequence: GAG
agggtgactcatgagttcag

SEQ ID NO: 89081 - DNA, 20 bp, Artificial Sequence
  Description of Artificial Sequence: Synthetic oligonucleotide
  Target: LAMA2; (-) strand; PAM type: NRG; PAM sequence: AGG
gaagggtgactcatgagttc

SEQ ID NO: 89082 - DNA, 20 bp, Artificial Sequence
  Description of Artificial Sequence: Synthetic oligonucleotide
  Target: LAMA2; (-) strand; PAM type: NRG; PAM sequence: CAG
agaagggtgactcatgagtt

SEQ ID NO: 89083 - DNA, 20 bp, Artificial Sequence
  Description of Artificial Sequence: Synthetic oligonucleotide
  Target: LAMA2; (-) strand; PAM type: NRG; PAM sequence: GAG
ggctgagaagggtgactcat

SEQ ID NO: 89084 - DNA, 20 bp, Artificial Sequence
  Description of Artificial Sequence: Synthetic oligonucleotide
  Target: LAMA2; (-) strand; PAM type: NRG; PAM sequence: GGG
gcactttgggaggctgagaa

SEQ ID NO: 89085 - DNA, 20 bp, Artificial Sequence
  Description of Artificial Sequence: Synthetic oligonucleotide
  Target: LAMA2; (-) strand; PAM type: NRG; PAM sequence: AGG
agcactttgggaggctgaga

SEQ ID NO: 89086 - DNA, 20 bp, Artificial Sequence
  Description of Artificial Sequence: Synthetic oligonucleotide
  Target: LAMA2; (-) strand; PAM type: NRG; PAM sequence: AAG
cagcactttgggaggctgag

SEQ ID NO: 89087 - DNA, 20 bp, Artificial Sequence
  Description of Artificial Sequence: Synthetic oligonucleotide
  Target: LAMA2; (-) strand; PAM type: NRG; PAM sequence: GAG
tcccagcactttgggaggct

SEQ ID NO: 89088 - DNA, 20 bp, Artificial Sequence
  Description of Artificial Sequence: Synthetic oligonucleotide
  Target: LAMA2; (-) strand; PAM type: NRG; PAM sequence: AGG
tgcaatcccagcactttggg

SEQ ID NO: 89089 - DNA, 20 bp, Artificial Sequence
  Description of Artificial Sequence: Synthetic oligonucleotide
  Target: LAMA2; (-) strand; PAM type: NRG; PAM sequence: GAG
ttgcaatcccagcactttgg

SEQ ID NO: 89090 - DNA, 20 bp, Artificial Sequence
  Description of Artificial Sequence: Synthetic oligonucleotide
  Target: LAMA2; (-) strand; PAM type: NRG; PAM sequence: GGG
gcttgcaatcccagcacttt

SEQ ID NO: 89091 - DNA, 20 bp, Artificial Sequence
  Description of Artificial Sequence: Synthetic oligonucleotide
  Target: LAMA2; (-) strand; PAM type: NRG; PAM sequence: TGG
cgcttgcaatcccagcactt

SEQ ID NO: 89092 - DNA, 20 bp, Artificial Sequence
  Description of Artificial Sequence: Synthetic oligonucleotide
  Target: LAMA2; (-) strand; PAM type: NRG; PAM sequence: CAG
ctgaaacacgcttgcaatcc

SEQ ID NO: 89093 - DNA, 20 bp, Artificial Sequence
  Description of Artificial Sequence: Synthetic oligonucleotide
  Target: LAMA2; (-) strand; PAM type: NRG; PAM sequence: TGG
gtgagaaacagctgggcaca

SEQ ID NO: 89094 - DNA, 20 bp, Artificial Sequence
  Description of Artificial Sequence: Synthetic oligonucleotide
  Target: LAMA2; (-) strand; PAM type: NRG; PAM sequence: GGG
ggtgcatgtgagaaacagct

SEQ ID NO: 89095 - DNA, 20 bp, Artificial Sequence
  Description of Artificial Sequence: Synthetic oligonucleotide
  Target: LAMA2; (-) strand; PAM type: NRG; PAM sequence: TGG
gggtgcatgtgagaaacagc

SEQ ID NO: 89096 - DNA, 20 bp, Artificial Sequence
  Description of Artificial Sequence: Synthetic oligonucleotide
  Target: LAMA2; (-) strand; PAM type: NRG; PAM sequence: CAG
ataagggtgcatgtgagaaa

SEQ ID NO: 89097 - DNA, 20 bp, Artificial Sequence
  Description of Artificial Sequence: Synthetic oligonucleotide
  Target: LAMA2; (-) strand; PAM type: NRG; PAM sequence: GAG
acagttataagggtgcatgt

SEQ ID NO: 89098 - DNA, 20 bp, Artificial Sequence
  Description of Artificial Sequence: Synthetic oligonucleotide
  Target: LAMA2; (-) strand; PAM type: NRG; PAM sequence: GGG
gatttatcccacagttataa

SEQ ID NO: 89099 - DNA, 20 bp, Artificial Sequence
  Description of Artificial Sequence: Synthetic oligonucleotide
  Target: LAMA2; (-) strand; PAM type: NRG; PAM sequence: AGG
agatttatcccacagttata

SEQ ID NO: 89100 - DNA, 20 bp, Artificial Sequence
  Description of Artificial Sequence: Synthetic oligonucleotide
  Target: LAMA2; (-) strand; PAM type: NRG; PAM sequence: AAG
gagatttatcccacagttat

SEQ ID NO: 89101 - DNA, 20 bp, Artificial Sequence
  Description of Artificial Sequence: Synthetic oligonucleotide
  Target: LAMA2; (-) strand; PAM type: NRG; PAM sequence: CAG
accttcagagatttatccca

SEQ ID NO: 89102 - DNA, 20 bp, Artificial Sequence
  Description of Artificial Sequence: Synthetic oligonucleotide
  Target: LAMA2; (-) strand; PAM type: NRG; PAM sequence: GAG
acatagcagtttcaccttca

SEQ ID NO: 89103 - DNA, 20 bp, Artificial Sequence
  Description of Artificial Sequence: Synthetic oligonucleotide
  Target: LAMA2; (-) strand; PAM type: NRG; PAM sequence: CAG
tgacatagcagtttcacctt

SEQ ID NO: 89104 - DNA, 20 bp, Artificial Sequence
  Description of Artificial Sequence: Synthetic oligonucleotide
  Target: LAMA2; (-) strand; PAM type: NRG; PAM sequence: CAG
gcatatatactttgacatag

SEQ ID NO: 89105 - DNA, 20 bp, Artificial Sequence
  Description of Artificial Sequence: Synthetic oligonucleotide
  Target: LAMA2; (-) strand; PAM type: NRG; PAM sequence: TAG
aatgcatatatactttgaca

SEQ ID NO: 89106 - DNA, 20 bp, Artificial Sequence
  Description of Artificial Sequence: Synthetic oligonucleotide
  Target: LAMA2; (-) strand; PAM type: NRG; PAM sequence: TGG
taaaatatatgggttcaatt

SEQ ID NO: 89107 - DNA, 20 bp, Artificial Sequence
  Description of Artificial Sequence: Synthetic oligonucleotide
  Target: LAMA2; (-) strand; PAM type: NRG; PAM sequence: GGG
gtagcatgtctaaaatatat

SEQ ID NO: 89108 - DNA, 20 bp, Artificial Sequence
  Description of Artificial Sequence: Synthetic oligonucleotide
  Target: LAMA2; (-) strand; PAM type: NRG; PAM sequence: TGG
ggtagcatgtctaaaatata

SEQ ID NO: 89109 - DNA, 20 bp, Artificial Sequence
  Description of Artificial Sequence: Synthetic oligonucleotide
  Target: LAMA2; (-) strand; PAM type: NRG; PAM sequence: TAG
gtactctcatgcattggtgg

SEQ ID NO: 89110 - DNA, 20 bp, Artificial Sequence
  Description of Artificial Sequence: Synthetic oligonucleotide
  Target: LAMA2; (-) strand; PAM type: NRG; PAM sequence: TGG
caagtactctcatgcattgg

SEQ ID NO: 89111 - DNA, 20 bp, Artificial Sequence
  Description of Artificial Sequence: Synthetic oligonucleotide
  Target: LAMA2; (-) strand; PAM type: NRG; PAM sequence: TGG
aaacaagtactctcatgcat

SEQ ID NO: 89112 - DNA, 20 bp, Artificial Sequence
  Description of Artificial Sequence: Synthetic oligonucleotide
  Target: LAMA2; (-) strand; PAM type: NRG; PAM sequence: AAG
agagaggggtttagggaaac

SEQ ID NO: 89113 - DNA, 20 bp, Artificial Sequence
  Description of Artificial Sequence: Synthetic oligonucleotide
  Target: LAMA2; (-) strand; PAM type: NRG; PAM sequence: GGG
ctctattagagaggggttta

SEQ ID NO: 89114 - DNA, 20 bp, Artificial Sequence
  Description of Artificial Sequence: Synthetic oligonucleotide
  Target: LAMA2; (-) strand; PAM type: NRG; PAM sequence: AGG
actctattagagaggggttt

SEQ ID NO: 89115 - DNA, 20 bp, Artificial Sequence
  Description of Artificial Sequence: Synthetic oligonucleotide
  Target: LAMA2; (-) strand; PAM type: NRG; PAM sequence: TAG
tactctattagagaggggtt

SEQ ID NO: 89116 - DNA, 20 bp, Artificial Sequence
  Description of Artificial Sequence: Synthetic oligonucleotide
  Target: LAMA2; (-) strand; PAM type: NRG; PAM sequence: GGG
taatatactctattagagag

SEQ ID NO: 89117 - DNA, 20 bp, Artificial Sequence
  Description of Artificial Sequence: Synthetic oligonucleotide
  Target: LAMA2; (-) strand; PAM type: NRG; PAM sequence: GGG
ataatatactctattagaga

SEQ ID NO: 89118 - DNA, 20 bp, Artificial Sequence
  Description of Artificial Sequence: Synthetic oligonucleotide
  Target: LAMA2; (-) strand; PAM type: NRG; PAM sequence: AGG
gataatatactctattagag

SEQ ID NO: 89119 - DNA, 20 bp, Artificial Sequence
  Description of Artificial Sequence: Synthetic oligonucleotide
  Target: LAMA2; (-) strand; PAM type: NRG; PAM sequence: GAG
tgataatatactctattaga

SEQ ID NO: 89120 - DNA, 20 bp, Artificial Sequence
  Description of Artificial Sequence: Synthetic oligonucleotide
  Target: LAMA2; (-) strand; PAM type: NRG; PAM sequence: GAG
tttgataatatactctatta

SEQ ID NO: 89121 - DNA, 20 bp, Artificial Sequence
  Description of Artificial Sequence: Synthetic oligonucleotide
  Target: LAMA2; (-) strand; PAM type: NRG; PAM sequence: TAG
agtttgataatatactctat

SEQ ID NO: 89122 - DNA, 20 bp, Artificial Sequence
  Description of Artificial Sequence: Synthetic oligonucleotide
  Target: LAMA2; (-) strand; PAM type: NRG; PAM sequence: AAG
ttggattgccaaagacccaa

SEQ ID NO: 89123 - DNA, 20 bp, Artificial Sequence
  Description of Artificial Sequence: Synthetic oligonucleotide
  Target: LAMA2; (-) strand; PAM type: NRG; PAM sequence: AAG
tttcacccattggattgcca

SEQ ID NO: 89124 - DNA, 20 bp, Artificial Sequence
  Description of Artificial Sequence: Synthetic oligonucleotide
  Target: LAMA2; (-) strand; PAM type: NRG; PAM sequence: TGG
aaatgtcatttttcacccat

SEQ ID NO: 89125 - DNA, 20 bp, Artificial Sequence
  Description of Artificial Sequence: Synthetic oligonucleotide
  Target: LAMA2; (-) strand; PAM type: NRG; PAM sequence: CAG
caggcgtgagccaccacacc

SEQ ID NO: 89126 - DNA, 20 bp, Artificial Sequence
  Description of Artificial Sequence: Synthetic oligonucleotide
  Target: LAMA2; (-) strand; PAM type: NRG; PAM sequence: GAG
agtggtgagattacaggcgt

SEQ ID NO: 89127 - DNA, 20 bp, Artificial Sequence
  Description of Artificial Sequence: Synthetic oligonucleotide
  Target: LAMA2; (-) strand; PAM type: NRG; PAM sequence: AGG
tcccaaagtggtgagattac

SEQ ID NO: 89128 - DNA, 20 bp, Artificial Sequence
  Description of Artificial Sequence: Synthetic oligonucleotide
  Target: LAMA2; (-) strand; PAM type: NRG; PAM sequence: CAG
ctcccaaagtggtgagatta

SEQ ID NO: 89129 - DNA, 20 bp, Artificial Sequence
  Description of Artificial Sequence: Synthetic oligonucleotide
  Target: LAMA2; (-) strand; PAM type: NRG; PAM sequence: GAG
cctcagcctcccaaagtggt

SEQ ID NO: 89130 - DNA, 20 bp, Artificial Sequence
  Description of Artificial Sequence: Synthetic oligonucleotide
  Target: LAMA2; (-) strand; PAM type: NRG; PAM sequence: TGG
cctgcctcagcctcccaaag

SEQ ID NO: 89131 - DNA, 20 bp, Artificial Sequence
  Description of Artificial Sequence: Synthetic oligonucleotide
  Target: LAMA2; (-) strand; PAM type: NRG; PAM sequence: AAG
tcgcctgcctcagcctccca

SEQ ID NO: 89132 - DNA, 20 bp, Artificial Sequence
  Description of Artificial Sequence: Synthetic oligonucleotide
  Target: LAMA2; (-) strand; PAM type: NRG; PAM sequence: CAG
cctcagggattcgcctgcct

SEQ ID NO: 89133 - DNA, 20 bp, Artificial Sequence
  Description of Artificial Sequence: Synthetic oligonucleotide
  Target: LAMA2; (-) strand; PAM type: NRG; PAM sequence: GGG
gtctcgaactcatggcctca

SEQ ID NO: 89134 - DNA, 20 bp, Artificial Sequence
  Description of Artificial Sequence: Synthetic oligonucleotide
  Target: LAMA2; (-) strand; PAM type: NRG; PAM sequence: AGG
ggtctcgaactcatggcctc

SEQ ID NO: 89135 - DNA, 20 bp, Artificial Sequence
  Description of Artificial Sequence: Synthetic oligonucleotide
  Target: LAMA2; (-) strand; PAM type: NRG; PAM sequence: CAG
aggtctcgaactcatggcct

SEQ ID NO: 89136 - DNA, 20 bp, Artificial Sequence
  Description of Artificial Sequence: Synthetic oligonucleotide
  Target: LAMA2; (-) strand; PAM type: NRG; PAM sequence: TGG
ccaggcaggtctcgaactca

SEQ ID NO: 89137 - DNA, 20 bp, Artificial Sequence
  Description of Artificial Sequence: Synthetic oligonucleotide
  Target: LAMA2; (-) strand; PAM type: NRG; PAM sequence: AGG
tttcaccatgttggccaggc

SEQ ID NO: 89138 - DNA, 20 bp, Artificial Sequence
  Description of Artificial Sequence: Synthetic oligonucleotide
  Target: LAMA2; (-) strand; PAM type: NRG; PAM sequence: CAG
gtttcaccatgttggccagg

SEQ ID NO: 89139 - DNA, 20 bp, Artificial Sequence
  Description of Artificial Sequence: Synthetic oligonucleotide
  Target: LAMA2; (-) strand; PAM type: NRG; PAM sequence: AGG
agggtttcaccatgttggcc

SEQ ID NO: 89140 - DNA, 20 bp, Artificial Sequence
  Description of Artificial Sequence: Synthetic oligonucleotide
  Target: LAMA2; (-) strand; PAM type: NRG; PAM sequence: CAG
cagggtttcaccatgttggc

SEQ ID NO: 89141 - DNA, 20 bp, Artificial Sequence
  Description of Artificial Sequence: Synthetic oligonucleotide
  Target: LAMA2; (-) strand; PAM type: NRG; PAM sequence: TGG
aacacagggtttcaccatgt

SEQ ID NO: 89142 - DNA, 20 bp, Artificial Sequence
  Description of Artificial Sequence: Synthetic oligonucleotide
  Target: LAMA2; (-) strand; PAM type: NRG; PAM sequence: GGG
ttgtatttttagtaaacaca

SEQ ID NO: 89143 - DNA, 20 bp, Artificial Sequence
  Description of Artificial Sequence: Synthetic oligonucleotide
  Target: LAMA2; (-) strand; PAM type: NRG; PAM sequence: AGG
tttgtatttttagtaaacac

SEQ ID NO: 89144 - DNA, 20 bp, Artificial Sequence
  Description of Artificial Sequence: Synthetic oligonucleotide
  Target: LAMA2; (-) strand; PAM type: NRG; PAM sequence: CAG
ttttgtatttttagtaaaca

SEQ ID NO: 89145 - DNA, 20 bp, Artificial Sequence
  Description of Artificial Sequence: Synthetic oligonucleotide
  Target: LAMA2; (-) strand; PAM type: NRG; PAM sequence: TAG
tttttttttttttgtatttt

SEQ ID NO: 89146 - DNA, 20 bp, Artificial Sequence
  Description of Artificial Sequence: Synthetic oligonucleotide
  Target: LAMA2; (-) strand; PAM type: NRG; PAM sequence: TGG
taggtgtgcaccaccatgcc

SEQ ID NO: 89147 - DNA, 20 bp, Artificial Sequence
  Description of Artificial Sequence: Synthetic oligonucleotide
  Target: LAMA2; (-) strand; PAM type: NRG; PAM sequence: AGG
tcccaagtagctggaattat

SEQ ID NO: 89148 - DNA, 20 bp, Artificial Sequence
  Description of Artificial Sequence: Synthetic oligonucleotide
  Target: LAMA2; (-) strand; PAM type: NRG; PAM sequence: TAG
ctcccaagtagctggaatta

SEQ ID NO: 89149 - DNA, 20 bp, Artificial Sequence
  Description of Artificial Sequence: Synthetic oligonucleotide
  Target: LAMA2; (-) strand; PAM type: NRG; PAM sequence: TGG
gcctcagcctcccaagtagc

SEQ ID NO: 89150 - DNA, 20 bp, Artificial Sequence
  Description of Artificial Sequence: Synthetic oligonucleotide
  Target: LAMA2; (-) strand; PAM type: NRG; PAM sequence: TAG
tcatgcctcagcctcccaag

SEQ ID NO: 89151 - DNA, 20 bp, Artificial Sequence
  Description of Artificial Sequence: Synthetic oligonucleotide
  Target: LAMA2; (-) strand; PAM type: NRG; PAM sequence: AAG
ttctcatgcctcagcctccc

SEQ ID NO: 89152 - DNA, 20 bp, Artificial Sequence
  Description of Artificial Sequence: Synthetic oligonucleotide
  Target: LAMA2; (-) strand; PAM type: NRG; PAM sequence: CAG
attaagtgattctcatgcct

SEQ ID NO: 89153 - DNA, 20 bp, Artificial Sequence
  Description of Artificial Sequence: Synthetic oligonucleotide
  Target: LAMA2; (-) strand; PAM type: NRG; PAM sequence: AAG
tctcccaggttcaagcaatt

SEQ ID NO: 89154 - DNA, 20 bp, Artificial Sequence
  Description of Artificial Sequence: Synthetic oligonucleotide
  Target: LAMA2; (-) strand; PAM type: NRG; PAM sequence: AAG
aacctctgtctcccaggttc

SEQ ID NO: 89155 - DNA, 20 bp, Artificial Sequence
  Description of Artificial Sequence: Synthetic oligonucleotide
  Target: LAMA2; (-) strand; PAM type: NRG; PAM sequence: AGG
cactgcaacctctgtctccc

SEQ ID NO: 89156 - DNA, 20 bp, Artificial Sequence
  Description of Artificial Sequence: Synthetic oligonucleotide
  Target: LAMA2; (-) strand; PAM type: NRG; PAM sequence: CAG
tcactgcaacctctgtctcc

SEQ ID NO: 89157 - DNA, 20 bp, Artificial Sequence
  Description of Artificial Sequence: Synthetic oligonucleotide
  Target: LAMA2; (-) strand; PAM type: NRG; PAM sequence: TGG
ggagtgcaatggcactatct

SEQ ID NO: 89158 - DNA, 20 bp, Artificial Sequence
  Description of Artificial Sequence: Synthetic oligonucleotide
  Target: LAMA2; (-) strand; PAM type: NRG; PAM sequence: TGG
ttgcccagtctggagtgcaa

SEQ ID NO: 89159 - DNA, 20 bp, Artificial Sequence
  Description of Artificial Sequence: Synthetic oligonucleotide
  Target: LAMA2; (-) strand; PAM type: NRG; PAM sequence: GAG
ttgctctgttgcccagtctg

SEQ ID NO: 89160 - DNA, 20 bp, Artificial Sequence
  Description of Artificial Sequence: Synthetic oligonucleotide
  Target: LAMA2; (-) strand; PAM type: NRG; PAM sequence: TGG
tcttgctctgttgcccagtc

SEQ ID NO: 89161 - DNA, 20 bp, Artificial Sequence
  Description of Artificial Sequence: Synthetic oligonucleotide
  Target: LAMA2; (-) strand; PAM type: NRG; PAM sequence: CAG
tggagtcttgctctgttgcc

SEQ ID NO: 89162 - DNA, 20 bp, Artificial Sequence
  Description of Artificial Sequence: Synthetic oligonucleotide
  Target: LAMA2; (-) strand; PAM type: NRG; PAM sequence: GAG
ctttttttttttttgagatg

SEQ ID NO: 89163 - DNA, 20 bp, Artificial Sequence
  Description of Artificial Sequence: Synthetic oligonucleotide
  Target: LAMA2; (-) strand; PAM type: NRG; PAM sequence: TGG
tcctttttttttttttgaga

SEQ ID NO: 89164 - DNA, 20 bp, Artificial Sequence
  Description of Artificial Sequence: Synthetic oligonucleotide
  Target: LAMA2; (-) strand; PAM type: NRG; PAM sequence: GAG
ctcttccttttttttttttt

SEQ ID NO: 89165 - DNA, 20 bp, Artificial Sequence
  Description of Artificial Sequence: Synthetic oligonucleotide
  Target: LAMA2; (-) strand; PAM type: NRG; PAM sequence: TGG
ttagattttaaatgcttgtg

SEQ ID NO: 89166 - DNA, 20 bp, Artificial Sequence
  Description of Artificial Sequence: Synthetic oligonucleotide
  Target: LAMA2; (-) strand; PAM type: NRG; PAM sequence: TAG
ttcagaatagatttttgaat

SEQ ID NO: 89167 - DNA, 20 bp, Artificial Sequence
  Description of Artificial Sequence: Synthetic oligonucleotide
  Target: LAMA2; (-) strand; PAM type: NRG; PAM sequence: TAG
gggattcagtaagttcagaa

SEQ ID NO: 89168 - DNA, 20 bp, Artificial Sequence
  Description of Artificial Sequence: Synthetic oligonucleotide
  Target: LAMA2; (-) strand; PAM type: NRG; PAM sequence: CAG
ttcttgggattcagtaagtt

SEQ ID NO: 89169 - DNA, 20 bp, Artificial Sequence
  Description of Artificial Sequence: Synthetic oligonucleotide
  Target: LAMA2; (-) strand; PAM type: NRG; PAM sequence: AAG
aattattcttgggattcagt

SEQ ID NO: 89170 - DNA, 20 bp, Artificial Sequence
  Description of Artificial Sequence: Synthetic oligonucleotide
  Target: LAMA2; (-) strand; PAM type: NRG; PAM sequence: CAG
tcctaattattcttgggatt

SEQ ID NO: 89171 - DNA, 20 bp, Artificial Sequence
  Description of Artificial Sequence: Synthetic oligonucleotide
  Target: LAMA2; (-) strand; PAM type: NRG; PAM sequence: GGG
ttcctctcctaattattctt

SEQ ID NO: 89172 - DNA, 20 bp, Artificial Sequence
  Description of Artificial Sequence: Synthetic oligonucleotide
  Target: LAMA2; (-) strand; PAM type: NRG; PAM sequence: TGG
tttcctctcctaattattct

SEQ ID NO: 89173 - DNA, 20 bp, Artificial Sequence
  Description of Artificial Sequence: Synthetic oligonucleotide
  Target: LAMA2; (-) strand; PAM type: NRG; PAM sequence: TAG
gttctatagtaacaggcaga

SEQ ID NO: 89174 - DNA, 20 bp, Artificial Sequence
  Description of Artificial Sequence: Synthetic oligonucleotide
  Target: LAMA2; (-) strand; PAM type: NRG; PAM sequence: CAG
tcatgttctatagtaacagg

SEQ ID NO: 89175 - DNA, 20 bp, Artificial Sequence
  Description of Artificial Sequence: Synthetic oligonucleotide
  Target: LAMA2; (-) strand; PAM type: NRG; PAM sequence: AGG
tcttcatgttctatagtaac

SEQ ID NO: 89176 - DNA, 20 bp, Artificial Sequence
  Description of Artificial Sequence: Synthetic oligonucleotide
  Target: LAMA2; (-) strand; PAM type: NRG; PAM sequence: CAG
ttcttcatgttctatagtaa

SEQ ID NO: 89177 - DNA, 20 bp, Artificial Sequence
  Description of Artificial Sequence: Synthetic oligonucleotide
  Target: LAMA2; (-) strand; PAM type: NRG; PAM sequence: TAG
aacccattcttcatgttcta

SEQ ID NO: 89178 - DNA, 20 bp, Artificial Sequence
  Description of Artificial Sequence: Synthetic oligonucleotide
  Target: LAMA2; (-) strand; PAM type: NRG; PAM sequence: CAG
agaaattcataagaggaaca

SEQ ID NO: 89179 - DNA, 20 bp, Artificial Sequence
  Description of Artificial Sequence: Synthetic oligonucleotide
  Target: LAMA2; (-) strand; PAM type: NRG; PAM sequence: AGG
tttaaaaagaaattcataag

SEQ ID NO: 89180 - DNA, 20 bp, Artificial Sequence
  Description of Artificial Sequence: Synthetic oligonucleotide
  Target: LAMA2; (-) strand; PAM type: NRG; PAM sequence: GAG
ttttaaaaagaaattcataa

SEQ ID NO: 89181 - DNA, 20 bp, Artificial Sequence
  Description of Artificial Sequence: Synthetic oligonucleotide
  Target: LAMA2; (-) strand; PAM type: NRG; PAM sequence: AAG
ggttttaaaaagaaattcat

SEQ ID NO: 89182 - DNA, 20 bp, Artificial Sequence
  Description of Artificial Sequence: Synthetic oligonucleotide
  Target: LAMA2; (-) strand; PAM type: NRG; PAM sequence: AAG
ctactttgaagggttttaaa

SEQ ID NO: 89183 - DNA, 20 bp, Artificial Sequence
  Description of Artificial Sequence: Synthetic oligonucleotide
  Target: LAMA2; (-) strand; PAM type: NRG; PAM sequence: GGG
atgaaaatacctactttgaa

SEQ ID NO: 89184 - DNA, 20 bp, Artificial Sequence
  Description of Artificial Sequence: Synthetic oligonucleotide
  Target: LAMA2; (-) strand; PAM type: NRG; PAM sequence: AGG
catgaaaatacctactttga

SEQ ID NO: 89185 - DNA, 20 bp, Artificial Sequence
  Description of Artificial Sequence: Synthetic oligonucleotide
  Target: LAMA2; (-) strand; PAM type: NRG; PAM sequence: AAG
gcatgaaaatacctactttg

SEQ ID NO: 89186 - DNA, 20 bp, Artificial Sequence
  Description of Artificial Sequence: Synthetic oligonucleotide
  Target: LAMA2; (-) strand; PAM type: NRG; PAM sequence: GGG
acgttatgttatgtctaaaa

SEQ ID NO: 89187 - DNA, 20 bp, Artificial Sequence
  Description of Artificial Sequence: Synthetic oligonucleotide
  Target: LAMA2; (-) strand; PAM type: NRG; PAM sequence: AGG
tacgttatgttatgtctaaa

SEQ ID NO: 89188 - DNA, 20 bp, Artificial Sequence
  Description of Artificial Sequence: Synthetic oligonucleotide
  Target: LAMA2; (-) strand; PAM type: NRG; PAM sequence: AAG
atacgttatgttatgtctaa

SEQ ID NO: 89189 - DNA, 20 bp, Artificial Sequence
  Description of Artificial Sequence: Synthetic oligonucleotide
  Target: LAMA2; (-) strand; PAM type: NRG; PAM sequence: GGG
tatatttgctgtgtgatttt

SEQ ID NO: 89190 - DNA, 20 bp, Artificial Sequence
  Description of Artificial Sequence: Synthetic oligonucleotide
  Target: LAMA2; (-) strand; PAM type: NRG; PAM sequence: TGG
atatatttgctgtgtgattt

SEQ ID NO: 89191 - DNA, 20 bp, Artificial Sequence
  Description of Artificial Sequence: Synthetic oligonucleotide
  Target: LAMA2; (-) strand; PAM type: NRG; PAM sequence: TAG
acttacccactttctaattg

SEQ ID NO: 89192 - DNA, 20 bp, Artificial Sequence
  Description of Artificial Sequence: Synthetic oligonucleotide
  Target: LAMA2; (-) strand; PAM type: NRG; PAM sequence: GAG
aaaagtatatgtttaagaat

SEQ ID NO: 89193 - DNA, 20 bp, Artificial Sequence
  Description of Artificial Sequence: Synthetic oligonucleotide
  Target: LAMA2; (-) strand; PAM type: NRG; PAM sequence: AAG
taatgcaaaagtatatgttt

SEQ ID NO: 89194 - DNA, 20 bp, Artificial Sequence
  Description of Artificial Sequence: Synthetic oligonucleotide
  Target: LAMA2; (-) strand; PAM type: NRG; PAM sequence: AAG
ttcatgtgactataatgcaa

SEQ ID NO: 89195 - DNA, 20 bp, Artificial Sequence
  Description of Artificial Sequence: Synthetic oligonucleotide
  Target: LAMA2; (-) strand; PAM type: NRG; PAM sequence: TGG
acacacatgaacacgctcag

SEQ ID NO: 89196 - DNA, 20 bp, Artificial Sequence
  Description of Artificial Sequence: Synthetic oligonucleotide
  Target: LAMA2; (-) strand; PAM type: NRG; PAM sequence: CAG
cacacacacatgaacacgct

SEQ ID NO: 89197 - DNA, 20 bp, Artificial Sequence
  Description of Artificial Sequence: Synthetic oligonucleotide
  Target: LAMA2; (-) strand; PAM type: NRG; PAM sequence: GGG
caagacaaactctcactctt

SEQ ID NO: 89198 - DNA, 20 bp, Artificial Sequence
  Description of Artificial Sequence: Synthetic oligonucleotide
  Target: LAMA2; (-) strand; PAM type: NRG; PAM sequence: TGG
tcaagacaaactctcactct

SEQ ID NO: 89199 - DNA, 20 bp, Artificial Sequence
  Description of Artificial Sequence: Synthetic oligonucleotide
  Target: LAMA2; (-) strand; PAM type: NRG; PAM sequence: AAG
ccttttaaacacttctcctc

SEQ ID NO: 89200 - DNA, 20 bp, Artificial Sequence
  Description of Artificial Sequence: Synthetic oligonucleotide
  Target: LAMA2; (-) strand; PAM type: NRG; PAM sequence: TAG
ctgttactttggtgatacta

SEQ ID NO: 89201 - DNA, 20 bp, Artificial Sequence
  Description of Artificial Sequence: Synthetic oligonucleotide
  Target: LAMA2; (-) strand; PAM type: NRG; PAM sequence: TGG
tcaagttcacactgttactt

SEQ ID NO: 89202 - DNA, 20 bp, Artificial Sequence
  Description of Artificial Sequence: Synthetic oligonucleotide
  Target: LAMA2; (-) strand; PAM type: NRG; PAM sequence: AAG
tctaagaggttaaattgttc

SEQ ID NO: 89203 - DNA, 20 bp, Artificial Sequence
  Description of Artificial Sequence: Synthetic oligonucleotide
  Target: LAMA2; (-) strand; PAM type: NRG; PAM sequence: AGG
ggagcaatcgtggctctaag

SEQ ID NO: 89204 - DNA, 20 bp, Artificial Sequence
  Description of Artificial Sequence: Synthetic oligonucleotide
  Target: LAMA2; (-) strand; PAM type: NRG; PAM sequence: GAG
tggagcaatcgtggctctaa

SEQ ID NO: 89205 - DNA, 20 bp, Artificial Sequence
  Description of Artificial Sequence: Synthetic oligonucleotide
  Target: LAMA2; (-) strand; PAM type: NRG; PAM sequence: AAG
gatggagcaatcgtggctct

SEQ ID NO: 89206 - DNA, 20 bp, Artificial Sequence
  Description of Artificial Sequence: Synthetic oligonucleotide
  Target: LAMA2; (-) strand; PAM type: NRG; PAM sequence: TGG
ttgtatagatggagcaatcg

SEQ ID NO: 89207 - DNA, 20 bp, Artificial Sequence
  Description of Artificial Sequence: Synthetic oligonucleotide
  Target: LAMA2; (-) strand; PAM type: NRG; PAM sequence: GAG
attattctattgtatagatg

SEQ ID NO: 89208 - DNA, 20 bp, Artificial Sequence
  Description of Artificial Sequence: Synthetic oligonucleotide
  Target: LAMA2; (-) strand; PAM type: NRG; PAM sequence: TGG
ttattattctattgtataga

SEQ ID NO: 89209 - DNA, 20 bp, Artificial Sequence
  Description of Artificial Sequence: Synthetic oligonucleotide
  Target: LAMA2; (-) strand; PAM type: NRG; PAM sequence: TAG
attattattattctattgta

SEQ ID NO: 89210 - DNA, 20 bp, Artificial Sequence
  Description of Artificial Sequence: Synthetic oligonucleotide
  Target: LAMA2; (-) strand; PAM type: NRG; PAM sequence: AGG
ctccggaaattgtataatgt

SEQ ID NO: 89211 - DNA, 20 bp, Artificial Sequence
  Description of Artificial Sequence: Synthetic oligonucleotide
  Target: LAMA2; (-) strand; PAM type: NRG; PAM sequence: TAG
tctccggaaattgtataatg

SEQ ID NO: 89212 - DNA, 20 bp, Artificial Sequence
  Description of Artificial Sequence: Synthetic oligonucleotide
  Target: LAMA2; (-) strand; PAM type: NRG; PAM sequence: CGG
ctttatcctcatttaatctc

SEQ ID NO: 89213 - DNA, 20 bp, Artificial Sequence
  Description of Artificial Sequence: Synthetic oligonucleotide
  Target: LAMA2; (-) strand; PAM type: NRG; PAM sequence: AAG
atggaactttagaatttcaa

SEQ ID NO: 89214 - DNA, 20 bp, Artificial Sequence
  Description of Artificial Sequence: Synthetic oligonucleotide
  Target: LAMA2; (-) strand; PAM type: NRG; PAM sequence: TAG
ctaacattttcatggaactt

SEQ ID NO: 89215 - DNA, 20 bp, Artificial Sequence
  Description of Artificial Sequence: Synthetic oligonucleotide
  Target: LAMA2; (-) strand; PAM type: NRG; PAM sequence: TGG
aatcaaagctaacattttca

SEQ ID NO: 89216 - DNA, 20 bp, Artificial Sequence
  Description of Artificial Sequence: Synthetic oligonucleotide
  Target: LAMA2; (-) strand; PAM type: NRG; PAM sequence: AAG
tgctgaaccatatgtaatca

SEQ ID NO: 89217 - DNA, 20 bp, Artificial Sequence
  Description of Artificial Sequence: Synthetic oligonucleotide
  Target: LAMA2; (-) strand; PAM type: NRG; PAM sequence: GAG
ggtagatctcaaaaaataag

SEQ ID NO: 89218 - DNA, 20 bp, Artificial Sequence
  Description of Artificial Sequence: Synthetic oligonucleotide
  Target: LAMA2; (-) strand; PAM type: NRG; PAM sequence: AGG
aaggtagatctcaaaaaata

SEQ ID NO: 89219 - DNA, 20 bp, Artificial Sequence
  Description of Artificial Sequence: Synthetic oligonucleotide
  Target: LAMA2; (-) strand; PAM type: NRG; PAM sequence: AAG
aaaggtagatctcaaaaaat

SEQ ID NO: 89220 - DNA, 20 bp, Artificial Sequence
  Description of Artificial Sequence: Synthetic oligonucleotide
  Target: LAMA2; (-) strand; PAM type: NRG; PAM sequence: TAG
gataatacaaaaaaaaaagg

SEQ ID NO: 89221 - DNA, 20 bp, Artificial Sequence
  Description of Artificial Sequence: Synthetic oligonucleotide
  Target: LAMA2; (-) strand; PAM type: NRG; PAM sequence: AGG
acagataatacaaaaaaaaa

SEQ ID NO: 89222 - DNA, 20 bp, Artificial Sequence
  Description of Artificial Sequence: Synthetic oligonucleotide
  Target: LAMA2; (-) strand; PAM type: NRG; PAM sequence: AAG
tacagataatacaaaaaaaa

SEQ ID NO: 89223 - DNA, 20 bp, Artificial Sequence
  Description of Artificial Sequence: Synthetic oligonucleotide
  Target: LAMA2; (-) strand; PAM type: NRG; PAM sequence: CAG
tatgttattttagcaagcta

SEQ ID NO: 89224 - DNA, 20 bp, Artificial Sequence
  Description of Artificial Sequence: Synthetic oligonucleotide
  Target: LAMA2; (-) strand; PAM type: NRG; PAM sequence: AAG
atctggtatgttattttagc

SEQ ID NO: 89225 - DNA, 20 bp, Artificial Sequence
  Description of Artificial Sequence: Synthetic oligonucleotide
  Target: LAMA2; (-) strand; PAM type: NRG; PAM sequence: TAG
aaacatctggtatgttattt

SEQ ID NO: 89226 - DNA, 20 bp, Artificial Sequence
  Description of Artificial Sequence: Synthetic oligonucleotide
  Target: LAMA2; (-) strand; PAM type: NRG; PAM sequence: TGG
aatttgaaaacaaaaacatc

SEQ ID NO: 89227 - DNA, 20 bp, Artificial Sequence
  Description of Artificial Sequence: Synthetic oligonucleotide
  Target: LAMA2; (-) strand; PAM type: NRG; PAM sequence: TGG
ggcaacaaatcagtatgatc

SEQ ID NO: 89228 - DNA, 20 bp, Artificial Sequence
  Description of Artificial Sequence: Synthetic oligonucleotide
  Target: LAMA2; (-) strand; PAM type: NRG; PAM sequence: CAG
actataccatggcaacaaat

SEQ ID NO: 89229 - DNA, 20 bp, Artificial Sequence
  Description of Artificial Sequence: Synthetic oligonucleotide
  Target: LAMA2; (-) strand; PAM type: NRG; PAM sequence: TGG
attctctgactactatacca

SEQ ID NO: 89230 - DNA, 20 bp, Artificial Sequence
  Description of Artificial Sequence: Synthetic oligonucleotide
  Target: LAMA2; (-) strand; PAM type: NRG; PAM sequence: AAG
atattgtaactgcccagagc

SEQ ID NO: 89231 - DNA, 20 bp, Artificial Sequence
  Description of Artificial Sequence: Synthetic oligonucleotide
  Target: LAMA2; (-) strand; PAM type: NRG; PAM sequence: GAG
caaaatattgtaactgccca

SEQ ID NO: 89232 - DNA, 20 bp, Artificial Sequence
  Description of Artificial Sequence: Synthetic oligonucleotide
  Target: LAMA2; (-) strand; PAM type: NRG; PAM sequence: CAG
tccaaaatattgtaactgcc

SEQ ID NO: 89233 - DNA, 20 bp, Artificial Sequence
  Description of Artificial Sequence: Synthetic oligonucleotide
  Target: LAMA2; (-) strand; PAM type: NRG; PAM sequence: CAG
tgtaaatgtaaacaagttag

SEQ ID NO: 89234 - DNA, 20 bp, Artificial Sequence
  Description of Artificial Sequence: Synthetic oligonucleotide
  Target: LAMA2; (-) strand; PAM type: NRG; PAM sequence: TAG
ttttgtaaatgtaaacaagt

SEQ ID NO: 89235 - DNA, 20 bp, Artificial Sequence
  Description of Artificial Sequence: Synthetic oligonucleotide
  Target: LAMA2; (-) strand; PAM type: NRG; PAM sequence: AAG
gacattttgtaaatgtaaac

SEQ ID NO: 89236 - DNA, 20 bp, Artificial Sequence
  Description of Artificial Sequence: Synthetic oligonucleotide
  Target: LAMA2; (-) strand; PAM type: NRG; PAM sequence: TAG
ttcaattgaataatctagaa

SEQ ID NO: 89237 - DNA, 20 bp, Artificial Sequence
  Description of Artificial Sequence: Synthetic oligonucleotide
  Target: LAMA2; (-) strand; PAM type: NRG; PAM sequence: TAG
gatgattcaattgaataatc

SEQ ID NO: 89238 - DNA, 20 bp, Artificial Sequence
  Description of Artificial Sequence: Synthetic oligonucleotide
  Target: LAMA2; (-) strand; PAM type: NRG; PAM sequence: TAG
atataacagtaactacctca

SEQ ID NO: 89239 - DNA, 20 bp, Artificial Sequence
  Description of Artificial Sequence: Synthetic oligonucleotide
  Target: LAMA2; (-) strand; PAM type: NRG; PAM sequence: CAG
gggaaatcaaaacaatataa

SEQ ID NO: 89240 - DNA, 20 bp, Artificial Sequence
  Description of Artificial Sequence: Synthetic oligonucleotide
  Target: LAMA2; (-) strand; PAM type: NRG; PAM sequence: GGG
tttgtgtcaagtctccatca

SEQ ID NO: 89241 - DNA, 20 bp, Artificial Sequence
  Description of Artificial Sequence: Synthetic oligonucleotide
  Target: LAMA2; (-) strand; PAM type: NRG; PAM sequence: AGG
ctttgtgtcaagtctccatc

SEQ ID NO: 89242 - DNA, 20 bp, Artificial Sequence
  Description of Artificial Sequence: Synthetic oligonucleotide
  Target: LAMA2; (-) strand; PAM type: NRG; PAM sequence: CAG
tctttgtgtcaagtctccat

SEQ ID NO: 89243 - DNA, 20 bp, Artificial Sequence
  Description of Artificial Sequence: Synthetic oligonucleotide
  Target: LAMA2; (-) strand; PAM type: NRG; PAM sequence: AAG
acttagtctctctttgtgtc

SEQ ID NO: 89244 - DNA, 20 bp, Artificial Sequence
  Description of Artificial Sequence: Synthetic oligonucleotide
  Target: LAMA2; (-) strand; PAM type: NRG; PAM sequence: TAG
tgtgacaggagtgaattact

SEQ ID NO: 89245 - DNA, 20 bp, Artificial Sequence
  Description of Artificial Sequence: Synthetic oligonucleotide
  Target: LAMA2; (-) strand; PAM type: NRG; PAM sequence: GAG
tttttagctgtgtgtgacag

SEQ ID NO: 89246 - DNA, 20 bp, Artificial Sequence
  Description of Artificial Sequence: Synthetic oligonucleotide
  Target: LAMA2; (-) strand; PAM type: NRG; PAM sequence: AGG
actttttagctgtgtgtgac

SEQ ID NO: 89247 - DNA, 20 bp, Artificial Sequence
  Description of Artificial Sequence: Synthetic oligonucleotide
  Target: LAMA2; (-) strand; PAM type: NRG; PAM sequence: CAG
cactttttagctgtgtgtga

SEQ ID NO: 89248 - DNA, 20 bp, Artificial Sequence
  Description of Artificial Sequence: Synthetic oligonucleotide
  Target: LAMA2; (-) strand; PAM type: NRG; PAM sequence: TAG
cactcagctctgccactttt

SEQ ID NO: 89249 - DNA, 20 bp, Artificial Sequence
  Description of Artificial Sequence: Synthetic oligonucleotide
  Target: LAMA2; (-) strand; PAM type: NRG; PAM sequence: CAG
actacctggggcaaaacact

SEQ ID NO: 89250 - DNA, 20 bp, Artificial Sequence
  Description of Artificial Sequence: Synthetic oligonucleotide
  Target: LAMA2; (-) strand; PAM type: NRG; PAM sequence: GGG
ttctagaactggactacctg

SEQ ID NO: 89251 - DNA, 20 bp, Artificial Sequence
  Description of Artificial Sequence: Synthetic oligonucleotide
  Target: LAMA2; (-) strand; PAM type: NRG; PAM sequence: GGG
gttctagaactggactacct

SEQ ID NO: 89252 - DNA, 20 bp, Artificial Sequence
  Description of Artificial Sequence: Synthetic oligonucleotide
  Target: LAMA2; (-) strand; PAM type: NRG; PAM sequence: TGG
agttctagaactggactacc

SEQ ID NO: 89253 - DNA, 20 bp, Artificial Sequence
  Description of Artificial Sequence: Synthetic oligonucleotide
  Target: LAMA2; (-) strand; PAM type: NRG; PAM sequence: TGG
aaagagtacagttctagaac

SEQ ID NO: 89254 - DNA, 20 bp, Artificial Sequence
  Description of Artificial Sequence: Synthetic oligonucleotide
  Target: LAMA2; (-) strand; PAM type: NRG; PAM sequence: TAG
agtggaaaagagtacagttc

SEQ ID NO: 89255 - DNA, 20 bp, Artificial Sequence
  Description of Artificial Sequence: Synthetic oligonucleotide
  Target: LAMA2; (-) strand; PAM type: NRG; PAM sequence: CAG
tagcatagtggaaaagagta

SEQ ID NO: 89256 - DNA, 20 bp, Artificial Sequence
  Description of Artificial Sequence: Synthetic oligonucleotide
  Target: LAMA2; (-) strand; PAM type: NRG; PAM sequence: GAG
tggtatagcatagtggaaaa

SEQ ID NO: 89257 - DNA, 20 bp, Artificial Sequence
  Description of Artificial Sequence: Synthetic oligonucleotide
  Target: LAMA2; (-) strand; PAM type: NRG; PAM sequence: AAG
gatggtatagcatagtggaa

SEQ ID NO: 89258 - DNA, 20 bp, Artificial Sequence
  Description of Artificial Sequence: Synthetic oligonucleotide
  Target: LAMA2; (-) strand; PAM type: NRG; PAM sequence: TGG
aggaagatggtatagcatag

SEQ ID NO: 89259 - DNA, 20 bp, Artificial Sequence
  Description of Artificial Sequence: Synthetic oligonucleotide
  Target: LAMA2; (-) strand; PAM type: NRG; PAM sequence: TAG
attaggaagatggtatagca

SEQ ID NO: 89260 - DNA, 20 bp, Artificial Sequence
  Description of Artificial Sequence: Synthetic oligonucleotide
  Target: LAMA2; (-) strand; PAM type: NRG; PAM sequence: TAG
atagtattaggaagatggta

SEQ ID NO: 89261 - DNA, 20 bp, Artificial Sequence
  Description of Artificial Sequence: Synthetic oligonucleotide
  Target: LAMA2; (-) strand; PAM type: NRG; PAM sequence: TGG
tacagatagtattaggaaga

SEQ ID NO: 89262 - DNA, 20 bp, Artificial Sequence
  Description of Artificial Sequence: Synthetic oligonucleotide
  Target: LAMA2; (-) strand; PAM type: NRG; PAM sequence: AAG
cttgtacagatagtattagg

SEQ ID NO: 89263 - DNA, 20 bp, Artificial Sequence
  Description of Artificial Sequence: Synthetic oligonucleotide
  Target: LAMA2; (-) strand; PAM type: NRG; PAM sequence: AGG
tttcttgtacagatagtatt

SEQ ID NO: 89264 - DNA, 20 bp, Artificial Sequence
  Description of Artificial Sequence: Synthetic oligonucleotide
  Target: LAMA2; (-) strand; PAM type: NRG; PAM sequence: TAG
atttcttgtacagatagtat

SEQ ID NO: 89265 - DNA, 20 bp, Artificial Sequence
  Description of Artificial Sequence: Synthetic oligonucleotide
  Target: LAMA2; (-) strand; PAM type: NRG; PAM sequence: TAG
gagaaaatttcttgtacaga

SEQ ID NO: 89266 - DNA, 20 bp, Artificial Sequence
  Description of Artificial Sequence: Synthetic oligonucleotide
  Target: LAMA2; (-) strand; PAM type: NRG; PAM sequence: CAG
ttaggagaaaatttcttgta

SEQ ID NO: 89267 - DNA, 20 bp, Artificial Sequence
  Description of Artificial Sequence: Synthetic oligonucleotide
  Target: LAMA2; (-) strand; PAM type: NRG; PAM sequence: GAG
acagcaatacatttcattag

SEQ ID NO: 89268 - DNA, 20 bp, Artificial Sequence
  Description of Artificial Sequence: Synthetic oligonucleotide
  Target: LAMA2; (-) strand; PAM type: NRG; PAM sequence: AGG
gtacagcaatacatttcatt

SEQ ID NO: 89269 - DNA, 20 bp, Artificial Sequence
  Description of Artificial Sequence: Synthetic oligonucleotide
  Target: LAMA2; (-) strand; PAM type: NRG; PAM sequence: TAG
ggtacagcaatacatttcat

SEQ ID NO: 89270 - DNA, 20 bp, Artificial Sequence
  Description of Artificial Sequence: Synthetic oligonucleotide
  Target: LAMA2; (-) strand; PAM type: NRG; PAM sequence: CAG
gctaaagcttatatagggta

SEQ ID NO: 89271 - DNA, 20 bp, Artificial Sequence
  Description of Artificial Sequence: Synthetic oligonucleotide
  Target: LAMA2; (-) strand; PAM type: NRG; PAM sequence: GGG
ttagagctaaagcttatata

SEQ ID NO: 89272 - DNA, 20 bp, Artificial Sequence
  Description of Artificial Sequence: Synthetic oligonucleotide
  Target: LAMA2; (-) strand; PAM type: NRG; PAM sequence: AGG
tttagagctaaagcttatat

SEQ ID NO: 89273 - DNA, 20 bp, Artificial Sequence
  Description of Artificial Sequence: Synthetic oligonucleotide
  Target: LAMA2; (-) strand; PAM type: NRG; PAM sequence: TAG
ttttagagctaaagcttata

SEQ ID NO: 89274 - DNA, 20 bp, Artificial Sequence
  Description of Artificial Sequence: Synthetic oligonucleotide
  Target: LAMA2; (-) strand; PAM type: NRG; PAM sequence: AAG
gctctgcaattttagagcta

SEQ ID NO: 89275 - DNA, 20 bp, Artificial Sequence
  Description of Artificial Sequence: Synthetic oligonucleotide
  Target: LAMA2; (-) strand; PAM type: NRG; PAM sequence: GAG
cttcctgctctgcaatttta

SEQ ID NO: 89276 - DNA, 20 bp, Artificial Sequence
  Description of Artificial Sequence: Synthetic oligonucleotide
  Target: LAMA2; (-) strand; PAM type: NRG; PAM sequence: TAG
tgcttcctgctctgcaattt

SEQ ID NO: 89277 - DNA, 20 bp, Artificial Sequence
  Description of Artificial Sequence: Synthetic oligonucleotide
  Target: LAMA2; (-) strand; PAM type: NRG; PAM sequence: TAG
tagggtaatagaatagcaat

SEQ ID NO: 89278 - DNA, 20 bp, Artificial Sequence
  Description of Artificial Sequence: Synthetic oligonucleotide
  Target: LAMA2; (-) strand; PAM type: NRG; PAM sequence: TAG
tctattgtagggtaatagaa

SEQ ID NO: 89279 - DNA, 20 bp, Artificial Sequence
  Description of Artificial Sequence: Synthetic oligonucleotide
  Target: LAMA2; (-) strand; PAM type: NRG; PAM sequence: TAG
aaatttctattgtagggtaa

SEQ ID NO: 89280 - DNA, 20 bp, Artificial Sequence
  Description of Artificial Sequence: Synthetic oligonucleotide
  Target: LAMA2; (-) strand; PAM type: NRG; PAM sequence: GGG
ccactgaaatttctattgta

SEQ ID NO: 89281 - DNA, 20 bp, Artificial Sequence
  Description of Artificial Sequence: Synthetic oligonucleotide
  Target: LAMA2; (-) strand; PAM type: NRG; PAM sequence: AGG
tccactgaaatttctattgt

SEQ ID NO: 89282 - DNA, 20 bp, Artificial Sequence
  Description of Artificial Sequence: Synthetic oligonucleotide
  Target: LAMA2; (-) strand; PAM type: NRG; PAM sequence: TAG
gtccactgaaatttctattg

SEQ ID NO: 89283 - DNA, 20 bp, Artificial Sequence
  Description of Artificial Sequence: Synthetic oligonucleotide
  Target: LAMA2; (-) strand; PAM type: NRG; PAM sequence: TAG
ggttatttaaatattagagt

SEQ ID NO: 89284 - DNA, 20 bp, Artificial Sequence
  Description of Artificial Sequence: Synthetic oligonucleotide
  Target: LAMA2; (-) strand; PAM type: NRG; PAM sequence: GAG
agtgggttatttaaatatta

SEQ ID NO: 89285 - DNA, 20 bp, Artificial Sequence
  Description of Artificial Sequence: Synthetic oligonucleotide
  Target: LAMA2; (-) strand; PAM type: NRG; PAM sequence: TAG
acagtgggttatttaaatat

SEQ ID NO: 89286 - DNA, 20 bp, Artificial Sequence
  Description of Artificial Sequence: Synthetic oligonucleotide
  Target: LAMA2; (-) strand; PAM type: NRG; PAM sequence: GGG
catgccagtttattaacagt

SEQ ID NO: 89287 - DNA, 20 bp, Artificial Sequence
  Description of Artificial Sequence: Synthetic oligonucleotide
  Target: LAMA2; (-) strand; PAM type: NRG; PAM sequence: TGG
ccatgccagtttattaacag

SEQ ID NO: 89288 - DNA, 20 bp, Artificial Sequence
  Description of Artificial Sequence: Synthetic oligonucleotide
  Target: LAMA2; (-) strand; PAM type: NRG; PAM sequence: CAG
gcaccatgccagtttattaa

SEQ ID NO: 89289 - DNA, 20 bp, Artificial Sequence
  Description of Artificial Sequence: Synthetic oligonucleotide
  Target: LAMA2; (-) strand; PAM type: NRG; PAM sequence: CAG
aacatgcaattgcaccatgc

SEQ ID NO: 89290 - DNA, 20 bp, Artificial Sequence
  Description of Artificial Sequence: Synthetic oligonucleotide
  Target: LAMA2; (-) strand; PAM type: NRG; PAM sequence: GGG
ggactagatctgatctcact

SEQ ID NO: 89291 - DNA, 20 bp, Artificial Sequence
  Description of Artificial Sequence: Synthetic oligonucleotide
  Target: LAMA2; (-) strand; PAM type: NRG; PAM sequence: TGG
tggactagatctgatctcac

SEQ ID NO: 89292 - DNA, 20 bp, Artificial Sequence
  Description of Artificial Sequence: Synthetic oligonucleotide
  Target: LAMA2; (-) strand; PAM type: NRG; PAM sequence: TAG
tatctgctgagacattggac

SEQ ID NO: 89293 - DNA, 20 bp, Artificial Sequence
  Description of Artificial Sequence: Synthetic oligonucleotide
  Target: LAMA2; (-) strand; PAM type: NRG; PAM sequence: TGG
tcctatatctgctgagacat

SEQ ID NO: 89294 - DNA, 20 bp, Artificial Sequence
  Description of Artificial Sequence: Synthetic oligonucleotide
  Target: LAMA2; (-) strand; PAM type: NRG; PAM sequence: GAG
aaggaattcctatatctgct

SEQ ID NO: 89295 - DNA, 20 bp, Artificial Sequence
  Description of Artificial Sequence: Synthetic oligonucleotide
  Target: LAMA2; (-) strand; PAM type: NRG; PAM sequence: AGG
cctgtctggggtgatagaaa

SEQ ID NO: 89296 - DNA, 20 bp, Artificial Sequence
  Description of Artificial Sequence: Synthetic oligonucleotide
  Target: LAMA2; (-) strand; PAM type: NRG; PAM sequence: AAG
acctgtctggggtgatagaa

SEQ ID NO: 89297 - DNA, 20 bp, Artificial Sequence
  Description of Artificial Sequence: Synthetic oligonucleotide
  Target: LAMA2; (-) strand; PAM type: NRG; PAM sequence: TAG
gatccacctgtctggggtga

SEQ ID NO: 89298 - DNA, 20 bp, Artificial Sequence
  Description of Artificial Sequence: Synthetic oligonucleotide
  Target: LAMA2; (-) strand; PAM type: NRG; PAM sequence: GGG
agtagagatccacctgtctg

SEQ ID NO: 89299 - DNA, 20 bp, Artificial Sequence
  Description of Artificial Sequence: Synthetic oligonucleotide
  Target: LAMA2; (-) strand; PAM type: NRG; PAM sequence: GGG
gagtagagatccacctgtct

SEQ ID NO: 89300 - DNA, 20 bp, Artificial Sequence
  Description of Artificial Sequence: Synthetic oligonucleotide
  Target: LAMA2; (-) strand; PAM type: NRG; PAM sequence: TGG
tgagtagagatccacctgtc

SEQ ID NO: 89301 - DNA, 20 bp, Artificial Sequence
  Description of Artificial Sequence: Synthetic oligonucleotide
  Target: LAMA2; (-) strand; PAM type: NRG; PAM sequence: GAG
tctctgaagatacatgagta

SEQ ID NO: 89302 - DNA, 20 bp, Artificial Sequence
  Description of Artificial Sequence: Synthetic oligonucleotide
  Target: LAMA2; (-) strand; PAM type: NRG; PAM sequence: TAG
tttctctgaagatacatgag

SEQ ID NO: 89303 - DNA, 20 bp, Artificial Sequence
  Description of Artificial Sequence: Synthetic oligonucleotide
  Target: LAMA2; (-) strand; PAM type: NRG; PAM sequence: GAG
ccatttctctgaagatacat

SEQ ID NO: 89304 - DNA, 20 bp, Artificial Sequence
  Description of Artificial Sequence: Synthetic oligonucleotide
  Target: LAMA2; (-) strand; PAM type: NRG; PAM sequence: AAG
gtagggtatccatttctctg

SEQ ID NO: 89305 - DNA, 20 bp, Artificial Sequence
  Description of Artificial Sequence: Synthetic oligonucleotide
  Target: LAMA2; (-) strand; PAM type: NRG; PAM sequence: GGG
atggaatgtgctgctttgta

SEQ ID NO: 89306 - DNA, 20 bp, Artificial Sequence
  Description of Artificial Sequence: Synthetic oligonucleotide
  Target: LAMA2; (-) strand; PAM type: NRG; PAM sequence: AGG
aatggaatgtgctgctttgt

SEQ ID NO: 89307 - DNA, 20 bp, Artificial Sequence
  Description of Artificial Sequence: Synthetic oligonucleotide
  Target: LAMA2; (-) strand; PAM type: NRG; PAM sequence: TAG
aaatggaatgtgctgctttg

SEQ ID NO: 89308 - DNA, 20 bp, Artificial Sequence
  Description of Artificial Sequence: Synthetic oligonucleotide
  Target: LAMA2; (-) strand; PAM type: NRG; PAM sequence: TGG
atatctagagctgttgaaaa

SEQ ID NO: 89309 - DNA, 20 bp, Artificial Sequence
  Description of Artificial Sequence: Synthetic oligonucleotide
  Target: LAMA2; (-) strand; PAM type: NRG; PAM sequence: GAG
aataaataaaataatatcta

SEQ ID NO: 89310 - DNA, 20 bp, Artificial Sequence
  Description of Artificial Sequence: Synthetic oligonucleotide
  Target: LAMA2; (-) strand; PAM type: NRG; PAM sequence: TAG
taaataaataaaataatatc

SEQ ID NO: 89311 - DNA, 20 bp, Artificial Sequence
  Description of Artificial Sequence: Synthetic oligonucleotide
  Target: LAMA2; (-) strand; PAM type: NRG; PAM sequence: CAG
gaccagcttggacaacacag

SEQ ID NO: 89312 - DNA, 20 bp, Artificial Sequence
  Description of Artificial Sequence: Synthetic oligonucleotide
  Target: LAMA2; (-) strand; PAM type: NRG; PAM sequence: CAG
tgagaccagcttggacaaca

SEQ ID NO: 89313 - DNA, 20 bp, Artificial Sequence
  Description of Artificial Sequence: Synthetic oligonucleotide
  Target: LAMA2; (-) strand; PAM type: NRG; PAM sequence: TGG
ccaggggtttgagaccagct

SEQ ID NO: 89314 - DNA, 20 bp, Artificial Sequence
  Description of Artificial Sequence: Synthetic oligonucleotide
  Target: LAMA2; (-) strand; PAM type: NRG; PAM sequence: CAG
tgagcccaggggtttgagac

SEQ ID NO: 89315 - DNA, 20 bp, Artificial Sequence
  Description of Artificial Sequence: Synthetic oligonucleotide
  Target: LAMA2; (-) strand; PAM type: NRG; PAM sequence: GAG
ttgcttgagcccaggggttt

SEQ ID NO: 89316 - DNA, 20 bp, Artificial Sequence
  Description of Artificial Sequence: Synthetic oligonucleotide
  Target: LAMA2; (-) strand; PAM type: NRG; PAM sequence: GGG
ggaggattgcttgagcccag

SEQ ID NO: 89317 - DNA, 20 bp, Artificial Sequence
  Description of Artificial Sequence: Synthetic oligonucleotide
  Target: LAMA2; (-) strand; PAM type: NRG; PAM sequence: GGG
aggaggattgcttgagccca

SEQ ID NO: 89318 - DNA, 20 bp, Artificial Sequence
  Description of Artificial Sequence: Synthetic oligonucleotide
  Target: LAMA2; (-) strand; PAM type: NRG; PAM sequence: AGG
caggaggattgcttgagccc

SEQ ID NO: 89319 - DNA, 20 bp, Artificial Sequence
  Description of Artificial Sequence: Synthetic oligonucleotide
  Target: LAMA2; (-) strand; PAM type: NRG; PAM sequence: CAG
gcaggaggattgcttgagcc

SEQ ID NO: 89320 - DNA, 20 bp, Artificial Sequence
  Description of Artificial Sequence: Synthetic oligonucleotide
  Target: LAMA2; (-) strand; PAM type: NRG; PAM sequence: GAG
ctgaggcaggaggattgctt

SEQ ID NO: 89321 - DNA, 20 bp, Artificial Sequence
  Description of Artificial Sequence: Synthetic oligonucleotide
  Target: LAMA2; (-) strand; PAM type: NRG; PAM sequence: AGG
acttgggaggctgaggcagg

SEQ ID NO: 89322 - DNA, 20 bp, Artificial Sequence
  Description of Artificial Sequence: Synthetic oligonucleotide
  Target: LAMA2; (-) strand; PAM type: NRG; PAM sequence: GAG
tacttgggaggctgaggcag

SEQ ID NO: 89323 - DNA, 20 bp, Artificial Sequence
  Description of Artificial Sequence: Synthetic oligonucleotide
  Target: LAMA2; (-) strand; PAM type: NRG; PAM sequence: AGG
gctacttgggaggctgaggc

SEQ ID NO: 89324 - DNA, 20 bp, Artificial Sequence
  Description of Artificial Sequence: Synthetic oligonucleotide
  Target: LAMA2; (-) strand; PAM type: NRG; PAM sequence: CAG
agctacttgggaggctgagg

SEQ ID NO: 89325 - DNA, 20 bp, Artificial Sequence
  Description of Artificial Sequence: Synthetic oligonucleotide
  Target: LAMA2; (-) strand; PAM type: NRG; PAM sequence: AGG
tccagctacttgggaggctg

SEQ ID NO: 89326 - DNA, 20 bp, Artificial Sequence
  Description of Artificial Sequence: Synthetic oligonucleotide
  Target: LAMA2; (-) strand; PAM type: NRG; PAM sequence: GAG
ttccagctacttgggaggct

SEQ ID NO: 89327 - DNA, 20 bp, Artificial Sequence
  Description of Artificial Sequence: Synthetic oligonucleotide
  Target: LAMA2; (-) strand; PAM type: NRG; PAM sequence: AGG
tataattccagctacttggg

SEQ ID NO: 89328 - DNA, 20 bp, Artificial Sequence
  Description of Artificial Sequence: Synthetic oligonucleotide
  Target: LAMA2; (-) strand; PAM type: NRG; PAM sequence: GAG
ctataattccagctacttgg

SEQ ID NO: 89329 - DNA, 20 bp, Artificial Sequence
  Description of Artificial Sequence: Synthetic oligonucleotide
  Target: LAMA2; (-) strand; PAM type: NRG; PAM sequence: GGG
aactataattccagctactt

SEQ ID NO: 89330 - DNA, 20 bp, Artificial Sequence
  Description of Artificial Sequence: Synthetic oligonucleotide
  Target: LAMA2; (-) strand; PAM type: NRG; PAM sequence: TGG
caactataattccagctact

SEQ ID NO: 89331 - DNA, 20 bp, Artificial Sequence
  Description of Artificial Sequence: Synthetic oligonucleotide
  Target: LAMA2; (-) strand; PAM type: NRG; PAM sequence: CAG
gtggcacacaactataattc

SEQ ID NO: 89332 - DNA, 20 bp, Artificial Sequence
  Description of Artificial Sequence: Synthetic oligonucleotide
  Target: LAMA2; (-) strand; PAM type: NRG; PAM sequence: TGG
aaatctggagctagatgcag

SEQ ID NO: 89333 - DNA, 20 bp, Artificial Sequence
  Description of Artificial Sequence: Synthetic oligonucleotide
  Target: LAMA2; (-) strand; PAM type: NRG; PAM sequence: CAG
ctaaaatctggagctagatg

SEQ ID NO: 89334 - DNA, 20 bp, Artificial Sequence
  Description of Artificial Sequence: Synthetic oligonucleotide
  Target: LAMA2; (-) strand; PAM type: NRG; PAM sequence: TAG
taacttctaaaatctggagc

SEQ ID NO: 89335 - DNA, 20 bp, Artificial Sequence
  Description of Artificial Sequence: Synthetic oligonucleotide
  Target: LAMA2; (-) strand; PAM type: NRG; PAM sequence: GAG
gaattaacttctaaaatctg

SEQ ID NO: 89336 - DNA, 20 bp, Artificial Sequence
  Description of Artificial Sequence: Synthetic oligonucleotide
  Target: LAMA2; (-) strand; PAM type: NRG; PAM sequence: TGG
aagaattaacttctaaaatc

SEQ ID NO: 89337 - DNA, 20 bp, Artificial Sequence
  Description of Artificial Sequence: Synthetic oligonucleotide
  Target: LAMA2; (-) strand; PAM type: NRG; PAM sequence: AAG
ccctccagaaaaccctgtgt

SEQ ID NO: 89338 - DNA, 20 bp, Artificial Sequence
  Description of Artificial Sequence: Synthetic oligonucleotide
  Target: LAMA2; (-) strand; PAM type: NRG; PAM sequence: CAG
tcctattagttctgtccctc

SEQ ID NO: 89339 - DNA, 20 bp, Artificial Sequence
  Description of Artificial Sequence: Synthetic oligonucleotide
  Target: LAMA2; (-) strand; PAM type: NRG; PAM sequence: TAG
catatatacatcaatcctat

SEQ ID NO: 89340 - DNA, 20 bp, Artificial Sequence
  Description of Artificial Sequence: Synthetic oligonucleotide
  Target: LAMA2; (-) strand; PAM type: NRG; PAM sequence: GAG
acttcaccttgtgatcatgt

SEQ ID NO: 89341 - DNA, 20 bp, Artificial Sequence
  Description of Artificial Sequence: Synthetic oligonucleotide
  Target: LAMA2; (-) strand; PAM type: NRG; PAM sequence: GGG
gcttgcagatggcctattgt

SEQ ID NO: 89342 - DNA, 20 bp, Artificial Sequence
  Description of Artificial Sequence: Synthetic oligonucleotide
  Target: LAMA2; (-) strand; PAM type: NRG; PAM sequence: TGG
agcttgcagatggcctattg

SEQ ID NO: 89343 - DNA, 20 bp, Artificial Sequence
  Description of Artificial Sequence: Synthetic oligonucleotide
  Target: LAMA2; (-) strand; PAM type: NRG; PAM sequence: TGG
cttgctactcagcttgcaga

SEQ ID NO: 89344 - DNA, 20 bp, Artificial Sequence
  Description of Artificial Sequence: Synthetic oligonucleotide
  Target: LAMA2; (-) strand; PAM type: NRG; PAM sequence: CAG
ctttcttgctactcagcttg

SEQ ID NO: 89345 - DNA, 20 bp, Artificial Sequence
  Description of Artificial Sequence: Synthetic oligonucleotide
  Target: LAMA2; (-) strand; PAM type: NRG; PAM sequence: CAG
gaactggctttcttgctact

SEQ ID NO: 89346 - DNA, 20 bp, Artificial Sequence
  Description of Artificial Sequence: Synthetic oligonucleotide
  Target: LAMA2; (-) strand; PAM type: NRG; PAM sequence: TGG
tgaggttctgggaatcgaac

SEQ ID NO: 89347 - DNA, 20 bp, Artificial Sequence
  Description of Artificial Sequence: Synthetic oligonucleotide
  Target: LAMA2; (-) strand; PAM type: NRG; PAM sequence: GGG
ttccctaattttgaggttct

SEQ ID NO: 89348 - DNA, 20 bp, Artificial Sequence
  Description of Artificial Sequence: Synthetic oligonucleotide
  Target: LAMA2; (-) strand; PAM type: NRG; PAM sequence: TGG
cttccctaattttgaggttc

SEQ ID NO: 89349 - DNA, 20 bp, Artificial Sequence
  Description of Artificial Sequence: Synthetic oligonucleotide
  Target: LAMA2; (-) strand; PAM type: NRG; PAM sequence: AGG
cgctggcttccctaattttg

SEQ ID NO: 89350 - DNA, 20 bp, Artificial Sequence
  Description of Artificial Sequence: Synthetic oligonucleotide
  Target: LAMA2; (-) strand; PAM type: NRG; PAM sequence: GAG
ccgctggcttccctaatttt

SEQ ID NO: 89351 - DNA, 20 bp, Artificial Sequence
  Description of Artificial Sequence: Synthetic oligonucleotide
  Target: LAMA2; (-) strand; PAM type: NRG; PAM sequence: TGG
cagactgaaggctgcaccgc

SEQ ID NO: 89352 - DNA, 20 bp, Artificial Sequence
  Description of Artificial Sequence: Synthetic oligonucleotide
  Target: LAMA2; (-) strand; PAM type: NRG; PAM sequence: AGG
ggccttcggccacagactga

SEQ ID NO: 89353 - DNA, 20 bp, Artificial Sequence
  Description of Artificial Sequence: Synthetic oligonucleotide
  Target: LAMA2; (-) strand; PAM type: NRG; PAM sequence: AAG
gggccttcggccacagactg

SEQ ID NO: 89354 - DNA, 20 bp, Artificial Sequence
  Description of Artificial Sequence: Synthetic oligonucleotide
  Target: LAMA2; (-) strand; PAM type: NRG; PAM sequence: CAG
ggctctcgggccttcggcca

SEQ ID NO: 89355 - DNA, 20 bp, Artificial Sequence
  Description of Artificial Sequence: Synthetic oligonucleotide
  Target: LAMA2; (-) strand; PAM type: NRG; PAM sequence: CGG
gccacgggctctcgggcctt

SEQ ID NO: 89356 - DNA, 20 bp, Artificial Sequence
  Description of Artificial Sequence: Synthetic oligonucleotide
  Target: LAMA2; (-) strand; PAM type: NRG; PAM sequence: GGG
gtaatttgccacgggctctc

SEQ ID NO: 89357 - DNA, 20 bp, Artificial Sequence
  Description of Artificial Sequence: Synthetic oligonucleotide
  Target: LAMA2; (-) strand; PAM type: NRG; PAM sequence: CGG
agtaatttgccacgggctct

SEQ ID NO: 89358 - DNA, 20 bp, Artificial Sequence
  Description of Artificial Sequence: Synthetic oligonucleotide
  Target: LAMA2; (-) strand; PAM type: NRG; PAM sequence: GGG
ttacaccagtaatttgccac

SEQ ID NO: 89359 - DNA, 20 bp, Artificial Sequence
  Description of Artificial Sequence: Synthetic oligonucleotide
  Target: LAMA2; (-) strand; PAM type: NRG; PAM sequence: CGG
cttacaccagtaatttgcca

SEQ ID NO: 89360 - DNA, 20 bp, Artificial Sequence
  Description of Artificial Sequence: Synthetic oligonucleotide
  Target: LAMA2; (-) strand; PAM type: NRG; PAM sequence: CAG
ttggacccttgcacttacac

SEQ ID NO: 89361 - DNA, 20 bp, Artificial Sequence
  Description of Artificial Sequence: Synthetic oligonucleotide
  Target: LAMA2; (-) strand; PAM type: NRG; PAM sequence: TGG
attccaagtttttcagcttt

SEQ ID NO: 89362 - DNA, 20 bp, Artificial Sequence
  Description of Artificial Sequence: Synthetic oligonucleotide
  Target: LAMA2; (-) strand; PAM type: NRG; PAM sequence: CAG
acatcagattccaagttttt

SEQ ID NO: 89363 - DNA, 20 bp, Artificial Sequence
  Description of Artificial Sequence: Synthetic oligonucleotide
  Target: LAMA2; (-) strand; PAM type: NRG; PAM sequence: AAG
gcccttgaacatcagattcc

SEQ ID NO: 89364 - DNA, 20 bp, Artificial Sequence
  Description of Artificial Sequence: Synthetic oligonucleotide
  Target: LAMA2; (-) strand; PAM type: NRG; PAM sequence: CAG
tgcttcctgcccttgaacat

SEQ ID NO: 89365 - DNA, 20 bp, Artificial Sequence
  Description of Artificial Sequence: Synthetic oligonucleotide
  Target: LAMA2; (-) strand; PAM type: NRG; PAM sequence: CGG
tcttcatctttctcctatgc

SEQ ID NO: 89366 - DNA, 20 bp, Artificial Sequence
  Description of Artificial Sequence: Synthetic oligonucleotide
  Target: LAMA2; (-) strand; PAM type: NRG; PAM sequence: TAG
tctagaattgcgcagtcttc

SEQ ID NO: 89367 - DNA, 20 bp, Artificial Sequence
  Description of Artificial Sequence: Synthetic oligonucleotide
  Target: LAMA2; (-) strand; PAM type: NRG; PAM sequence: CAG
gtggaaggtctagaattgcg

SEQ ID NO: 89368 - DNA, 20 bp, Artificial Sequence
  Description of Artificial Sequence: Synthetic oligonucleotide
  Target: LAMA2; (-) strand; PAM type: NRG; PAM sequence: TAG
gcaggagaacgtggaaggtc

SEQ ID NO: 89369 - DNA, 20 bp, Artificial Sequence
  Description of Artificial Sequence: Synthetic oligonucleotide
  Target: LAMA2; (-) strand; PAM type: NRG; PAM sequence: AGG
agcaggcaggagaacgtgga

SEQ ID NO: 89370 - DNA, 20 bp, Artificial Sequence
  Description of Artificial Sequence: Synthetic oligonucleotide
  Target: LAMA2; (-) strand; PAM type: NRG; PAM sequence: AAG
aagcaggcaggagaacgtgg

SEQ ID NO: 89371 - DNA, 20 bp, Artificial Sequence
  Description of Artificial Sequence: Synthetic oligonucleotide
  Target: LAMA2; (-) strand; PAM type: NRG; PAM sequence: TGG
ataaagcaggcaggagaacg

SEQ ID NO: 89372 - DNA, 20 bp, Artificial Sequence
  Description of Artificial Sequence: Synthetic oligonucleotide
  Target: LAMA2; (-) strand; PAM type: NRG; PAM sequence: GAG
ggctaggataaagcaggcag

SEQ ID NO: 89373 - DNA, 20 bp, Artificial Sequence
  Description of Artificial Sequence: Synthetic oligonucleotide
  Target: LAMA2; (-) strand; PAM type: NRG; PAM sequence: AGG
gtggctaggataaagcaggc

SEQ ID NO: 89374 - DNA, 20 bp, Artificial Sequence
  Description of Artificial Sequence: Synthetic oligonucleotide
  Target: LAMA2; (-) strand; PAM type: NRG; PAM sequence: CAG
cgtggctaggataaagcagg

SEQ ID NO: 89375 - DNA, 20 bp, Artificial Sequence
  Description of Artificial Sequence: Synthetic oligonucleotide
  Target: LAMA2; (-) strand; PAM type: NRG; PAM sequence: AGG
cagcgtggctaggataaagc

SEQ ID NO: 89376 - DNA, 20 bp, Artificial Sequence
  Description of Artificial Sequence: Synthetic oligonucleotide
  Target: LAMA2; (-) strand; PAM type: NRG; PAM sequence: CAG
ccagcgtggctaggataaag

SEQ ID NO: 89377 - DNA, 20 bp, Artificial Sequence
  Description of Artificial Sequence: Synthetic oligonucleotide
  Target: LAMA2; (-) strand; PAM type: NRG; PAM sequence: AAG
ctgccagcgtggctaggata

SEQ ID NO: 89378 - DNA, 20 bp, Artificial Sequence
  Description of Artificial Sequence: Synthetic oligonucleotide
  Target: LAMA2; (-) strand; PAM type: NRG; PAM sequence: AGG
aatcagctgccagcgtggct

SEQ ID NO: 89379 - DNA, 20 bp, Artificial Sequence
  Description of Artificial Sequence: Synthetic oligonucleotide
  Target: LAMA2; (-) strand; PAM type: NRG; PAM sequence: TAG
taatcagctgccagcgtggc

SEQ ID NO: 89380 - DNA, 20 bp, Artificial Sequence
  Description of Artificial Sequence: Synthetic oligonucleotide
  Target: LAMA2; (-) strand; PAM type: NRG; PAM sequence: TGG
catttaatcagctgccagcg

SEQ ID NO: 89381 - DNA, 20 bp, Artificial Sequence
  Description of Artificial Sequence: Synthetic oligonucleotide
  Target: LAMA2; (-) strand; PAM type: NRG; PAM sequence: CAG
ggcaccatttaatcagctgc

SEQ ID NO: 89382 - DNA, 20 bp, Artificial Sequence
  Description of Artificial Sequence: Synthetic oligonucleotide
  Target: LAMA2; (-) strand; PAM type: NRG; PAM sequence: CAG
ctgggtaggcaccatttaat

SEQ ID NO: 89383 - DNA, 20 bp, Artificial Sequence
  Description of Artificial Sequence: Synthetic oligonucleotide
  Target: LAMA2; (-) strand; PAM type: NRG; PAM sequence: AGG
gaaccaccctcattctgggt

SEQ ID NO: 89384 - DNA, 20 bp, Artificial Sequence
  Description of Artificial Sequence: Synthetic oligonucleotide
  Target: LAMA2; (-) strand; PAM type: NRG; PAM sequence: TAG
agaaccaccctcattctggg

SEQ ID NO: 89385 - DNA, 20 bp, Artificial Sequence
  Description of Artificial Sequence: Synthetic oligonucleotide
  Target: LAMA2; (-) strand; PAM type: NRG; PAM sequence: GGG
gacagaaccaccctcattct

SEQ ID NO: 89386 - DNA, 20 bp, Artificial Sequence
  Description of Artificial Sequence: Synthetic oligonucleotide
  Target: LAMA2; (-) strand; PAM type: NRG; PAM sequence: TGG
agacagaaccaccctcattc

SEQ ID NO: 89387 - DNA, 20 bp, Artificial Sequence
  Description of Artificial Sequence: Synthetic oligonucleotide
  Target: LAMA2; (-) strand; PAM type: NRG; PAM sequence: CAG
agtcagagggctgggaaaga

SEQ ID NO: 89388 - DNA, 20 bp, Artificial Sequence
  Description of Artificial Sequence: Synthetic oligonucleotide
  Target: LAMA2; (-) strand; PAM type: NRG; PAM sequence: AAG
tttgagtcagagggctggga

SEQ ID NO: 89389 - DNA, 20 bp, Artificial Sequence
  Description of Artificial Sequence: Synthetic oligonucleotide
  Target: LAMA2; (-) strand; PAM type: NRG; PAM sequence: GGG
aacatttgagtcagagggct

SEQ ID NO: 89390 - DNA, 20 bp, Artificial Sequence
  Description of Artificial Sequence: Synthetic oligonucleotide
  Target: LAMA2; (-) strand; PAM type: NRG; PAM sequence: TGG
taacatttgagtcagagggc

SEQ ID NO: 89391 - DNA, 20 bp, Artificial Sequence
  Description of Artificial Sequence: Synthetic oligonucleotide
  Target: LAMA2; (-) strand; PAM type: NRG; PAM sequence: GGG
agattaacatttgagtcaga

SEQ ID NO: 89392 - DNA, 20 bp, Artificial Sequence
  Description of Artificial Sequence: Synthetic oligonucleotide
  Target: LAMA2; (-) strand; PAM type: NRG; PAM sequence: AGG
gagattaacatttgagtcag

SEQ ID NO: 89393 - DNA, 20 bp, Artificial Sequence
  Description of Artificial Sequence: Synthetic oligonucleotide
  Target: LAMA2; (-) strand; PAM type: NRG; PAM sequence: GAG
ggagattaacatttgagtca

SEQ ID NO: 89394 - DNA, 20 bp, Artificial Sequence
  Description of Artificial Sequence: Synthetic oligonucleotide
  Target: LAMA2; (-) strand; PAM type: NRG; PAM sequence: CAG
aaggagattaacatttgagt

SEQ ID NO: 89395 - DNA, 20 bp, Artificial Sequence
  Description of Artificial Sequence: Synthetic oligonucleotide
  Target: LAMA2; (-) strand; PAM type: NRG; PAM sequence: GAG
gccaaaggagattaacattt

SEQ ID NO: 89396 - DNA, 20 bp, Artificial Sequence
  Description of Artificial Sequence: Synthetic oligonucleotide
  Target: LAMA2; (-) strand; PAM type: NRG; PAM sequence: GAG
ctgtgagggtgttgccaaag

SEQ ID NO: 89397 - DNA, 20 bp, Artificial Sequence
  Description of Artificial Sequence: Synthetic oligonucleotide
  Target: LAMA2; (-) strand; PAM type: NRG; PAM sequence: AGG
gtctgtgagggtgttgccaa

SEQ ID NO: 89398 - DNA, 20 bp, Artificial Sequence
  Description of Artificial Sequence: Synthetic oligonucleotide
  Target: LAMA2; (-) strand; PAM type: NRG; PAM sequence: AAG
tgtctgtgagggtgttgcca

SEQ ID NO: 89399 - DNA, 20 bp, Artificial Sequence
  Description of Artificial Sequence: Synthetic oligonucleotide
  Target: LAMA2; (-) strand; PAM type: NRG; PAM sequence: GGG
gtacctgagtgtgtctgtga

SEQ ID NO: 89400 - DNA, 20 bp, Artificial Sequence
  Description of Artificial Sequence: Synthetic oligonucleotide
  Target: LAMA2; (-) strand; PAM type: NRG; PAM sequence: AGG
tgtacctgagtgtgtctgtg

SEQ ID NO: 89401 - DNA, 20 bp, Artificial Sequence
  Description of Artificial Sequence: Synthetic oligonucleotide
  Target: LAMA2; (-) strand; PAM type: NRG; PAM sequence: GAG
ttgtacctgagtgtgtctgt

SEQ ID NO: 89402 - DNA, 20 bp, Artificial Sequence
  Description of Artificial Sequence: Synthetic oligonucleotide
  Target: LAMA2; (-) strand; PAM type: NRG; PAM sequence: GAG
gtatgcaaagtattgtacct

SEQ ID NO: 89403 - DNA, 20 bp, Artificial Sequence
  Description of Artificial Sequence: Synthetic oligonucleotide
  Target: LAMA2; (-) strand; PAM type: NRG; PAM sequence: AAG
ctacttgactgaagtatgca

SEQ ID NO: 89404 - DNA, 20 bp, Artificial Sequence
  Description of Artificial Sequence: Synthetic oligonucleotide
  Target: LAMA2; (-) strand; PAM type: NRG; PAM sequence: AAG
attgactgtctacttgactg

SEQ ID NO: 89405 - DNA, 20 bp, Artificial Sequence
  Description of Artificial Sequence: Synthetic oligonucleotide
  Target: LAMA2; (-) strand; PAM type: NRG; PAM sequence: TGG
tgagaaagcgttggagaatg

SEQ ID NO: 89406 - DNA, 20 bp, Artificial Sequence
  Description of Artificial Sequence: Synthetic oligonucleotide
  Target: LAMA2; (-) strand; PAM type: NRG; PAM sequence: GAG
acctgtatgagaaagcgttg

SEQ ID NO: 89407 - DNA, 20 bp, Artificial Sequence
  Description of Artificial Sequence: Synthetic oligonucleotide
  Target: LAMA2; (-) strand; PAM type: NRG; PAM sequence: TGG
gaacctgtatgagaaagcgt

SEQ ID NO: 89408 - DNA, 20 bp, Artificial Sequence
  Description of Artificial Sequence: Synthetic oligonucleotide
  Target: LAMA2; (-) strand; PAM type: NRG; PAM sequence: AAG
gaaatagaacctgtatgaga

SEQ ID NO: 89409 - DNA, 20 bp, Artificial Sequence
  Description of Artificial Sequence: Synthetic oligonucleotide
  Target: LAMA2; (-) strand; PAM type: NRG; PAM sequence: GAG
tggagaaatagaacctgtat

SEQ ID NO: 89410 - DNA, 20 bp, Artificial Sequence
  Description of Artificial Sequence: Synthetic oligonucleotide
  Target: LAMA2; (-) strand; PAM type: NRG; PAM sequence: TAG
cactgttcatagtggagaaa

SEQ ID NO: 89411 - DNA, 20 bp, Artificial Sequence
  Description of Artificial Sequence: Synthetic oligonucleotide
  Target: LAMA2; (-) strand; PAM type: NRG; PAM sequence: GAG
aaatctcactgttcatagtg

SEQ ID NO: 89412 - DNA, 20 bp, Artificial Sequence
  Description of Artificial Sequence: Synthetic oligonucleotide
  Target: LAMA2; (-) strand; PAM type: NRG; PAM sequence: TGG
aaaaatctcactgttcatag

SEQ ID NO: 89413 - DNA, 20 bp, Artificial Sequence
  Description of Artificial Sequence: Synthetic oligonucleotide
  Target: LAMA2; (-) strand; PAM type: NRG; PAM sequence: TAG
aaaaaaaatctcactgttca

SEQ ID NO: 89414 - DNA, 20 bp, Artificial Sequence
  Description of Artificial Sequence: Synthetic oligonucleotide
  Target: LAMA2; (-) strand; PAM type: NRG; PAM sequence: CAG
tgaaggcctatcaagtatac

SEQ ID NO: 89415 - DNA, 20 bp, Artificial Sequence
  Description of Artificial Sequence: Synthetic oligonucleotide
  Target: LAMA2; (-) strand; PAM type: NRG; PAM sequence: AAG
ggaacatttgaaggcctatc

SEQ ID NO: 89416 - DNA, 20 bp, Artificial Sequence
  Description of Artificial Sequence: Synthetic oligonucleotide
  Target: LAMA2; (-) strand; PAM type: NRG; PAM sequence: AGG
tgttttcttggaacatttga

SEQ ID NO: 89417 - DNA, 20 bp, Artificial Sequence
  Description of Artificial Sequence: Synthetic oligonucleotide
  Target: LAMA2; (-) strand; PAM type: NRG; PAM sequence: AAG
ttgttttcttggaacatttg

SEQ ID NO: 89418 - DNA, 20 bp, Artificial Sequence
  Description of Artificial Sequence: Synthetic oligonucleotide
  Target: LAMA2; (-) strand; PAM type: NRG; PAM sequence: TGG
gaaaagcatgattgttttct

SEQ ID NO: 89419 - DNA, 20 bp, Artificial Sequence
  Description of Artificial Sequence: Synthetic oligonucleotide
  Target: LAMA2; (-) strand; PAM type: NRG; PAM sequence: AAG
aaaaagagaagacttaggaa

SEQ ID NO: 89420 - DNA, 20 bp, Artificial Sequence
  Description of Artificial Sequence: Synthetic oligonucleotide
  Target: LAMA2; (-) strand; PAM type: NRG; PAM sequence: AGG
tatttaaaaagagaagactt

SEQ ID NO: 89421 - DNA, 20 bp, Artificial Sequence
  Description of Artificial Sequence: Synthetic oligonucleotide
  Target: LAMA2; (-) strand; PAM type: NRG; PAM sequence: TAG
gtatttaaaaagagaagact

SEQ ID NO: 89422 - DNA, 20 bp, Artificial Sequence
  Description of Artificial Sequence: Synthetic oligonucleotide
  Target: LAMA2; (-) strand; PAM type: NRG; PAM sequence: AAG
atgggagtatttaaaaagag

SEQ ID NO: 89423 - DNA, 20 bp, Artificial Sequence
  Description of Artificial Sequence: Synthetic oligonucleotide
  Target: LAMA2; (-) strand; PAM type: NRG; PAM sequence: GAG
gtaatgggagtatttaaaaa

SEQ ID NO: 89424 - DNA, 20 bp, Artificial Sequence
  Description of Artificial Sequence: Synthetic oligonucleotide
  Target: LAMA2; (-) strand; PAM type: NRG; PAM sequence: AAG
aggtaatgggagtatttaaa

SEQ ID NO: 89425 - DNA, 20 bp, Artificial Sequence
  Description of Artificial Sequence: Synthetic oligonucleotide
  Target: LAMA2; (-) strand; PAM type: NRG; PAM sequence: GAG
aaggtttggaaaggtaatgg

SEQ ID NO: 89426 - DNA, 20 bp, Artificial Sequence
  Description of Artificial Sequence: Synthetic oligonucleotide
  Target: LAMA2; (-) strand; PAM type: NRG; PAM sequence: GGG
aaaaggtttggaaaggtaat

SEQ ID NO: 89427 - DNA, 20 bp, Artificial Sequence
  Description of Artificial Sequence: Synthetic oligonucleotide
  Target: LAMA2; (-) strand; PAM type: NRG; PAM sequence: TGG
caaaaggtttggaaaggtaa

SEQ ID NO: 89428 - DNA, 20 bp, Artificial Sequence
  Description of Artificial Sequence: Synthetic oligonucleotide
  Target: LAMA2; (-) strand; PAM type: NRG; PAM sequence: AGG
gctgaacaaaaggtttggaa

SEQ ID NO: 89429 - DNA, 20 bp, Artificial Sequence
  Description of Artificial Sequence: Synthetic oligonucleotide
  Target: LAMA2; (-) strand; PAM type: NRG; PAM sequence: AAG
agctgaacaaaaggtttgga

SEQ ID NO: 89430 - DNA, 20 bp, Artificial Sequence
  Description of Artificial Sequence: Synthetic oligonucleotide
  Target: LAMA2; (-) strand; PAM type: NRG; PAM sequence: TGG
caacagctgaacaaaaggtt

SEQ ID NO: 89431 - DNA, 20 bp, Artificial Sequence
  Description of Artificial Sequence: Synthetic oligonucleotide
  Target: LAMA2; (-) strand; PAM type: NRG; PAM sequence: AGG
ggtcccaacagctgaacaaa

SEQ ID NO: 89432 - DNA, 20 bp, Artificial Sequence
  Description of Artificial Sequence: Synthetic oligonucleotide
  Target: LAMA2; (-) strand; PAM type: NRG; PAM sequence: AAG
tggtcccaacagctgaacaa

SEQ ID NO: 89433 - DNA, 20 bp, Artificial Sequence
  Description of Artificial Sequence: Synthetic oligonucleotide
  Target: LAMA2; (-) strand; PAM type: NRG; PAM sequence: CAG
caggatgttgatggtcccaa

SEQ ID NO: 89434 - DNA, 20 bp, Artificial Sequence
  Description of Artificial Sequence: Synthetic oligonucleotide
  Target: LAMA2; (-) strand; PAM type: NRG; PAM sequence: TGG
aggtgtgaccaggatgttga

SEQ ID NO: 89435 - DNA, 20 bp, Artificial Sequence
  Description of Artificial Sequence: Synthetic oligonucleotide
  Target: LAMA2; (-) strand; PAM type: NRG; PAM sequence: AGG
tcatccatagaggtgtgacc

SEQ ID NO: 89436 - DNA, 20 bp, Artificial Sequence
  Description of Artificial Sequence: Synthetic oligonucleotide
  Target: LAMA2; (-) strand; PAM type: NRG; PAM sequence: CAG
ttcatccatagaggtgtgac

SEQ ID NO: 89437 - DNA, 20 bp, Artificial Sequence
  Description of Artificial Sequence: Synthetic oligonucleotide
  Target: LAMA2; (-) strand; PAM type: NRG; PAM sequence: AGG
aaattagacttcatccatag

SEQ ID NO: 89438 - DNA, 20 bp, Artificial Sequence
  Description of Artificial Sequence: Synthetic oligonucleotide
  Target: LAMA2; (-) strand; PAM type: NRG; PAM sequence: GAG
caaattagacttcatccata

SEQ ID NO: 89439 - DNA, 20 bp, Artificial Sequence
  Description of Artificial Sequence: Synthetic oligonucleotide
  Target: LAMA2; (-) strand; PAM type: NRG; PAM sequence: TAG
gacaaattagacttcatcca

SEQ ID NO: 89440 - DNA, 20 bp, Artificial Sequence
  Description of Artificial Sequence: Synthetic oligonucleotide
  Target: LAMA2; (-) strand; PAM type: NRG; PAM sequence: TAG
taagagagtagttgacaaat

SEQ ID NO: 89441 - DNA, 20 bp, Artificial Sequence
  Description of Artificial Sequence: Synthetic oligonucleotide
  Target: LAMA2; (-) strand; PAM type: NRG; PAM sequence: TAG
gacaccaccatttaagagag

SEQ ID NO: 89442 - DNA, 20 bp, Artificial Sequence
  Description of Artificial Sequence: Synthetic oligonucleotide
  Target: LAMA2; (-) strand; PAM type: NRG; PAM sequence: GAG
catgacaccaccatttaaga

SEQ ID NO: 89443 - DNA, 20 bp, Artificial Sequence
  Description of Artificial Sequence: Synthetic oligonucleotide
  Target: LAMA2; (-) strand; PAM type: NRG; PAM sequence: GAG
ttcatgacaccaccatttaa

SEQ ID NO: 89444 - DNA, 20 bp, Artificial Sequence
  Description of Artificial Sequence: Synthetic oligonucleotide
  Target: LAMA2; (-) strand; PAM type: NRG; PAM sequence: AAG
aattcatgacaccaccattt

SEQ ID NO: 89445 - DNA, 20 bp, Artificial Sequence
  Description of Artificial Sequence: Synthetic oligonucleotide
  Target: LAMA2; (-) strand; PAM type: NRG; PAM sequence: GAG
agctagtcagagcacatcca

SEQ ID NO: 89446 - DNA, 20 bp, Artificial Sequence
  Description of Artificial Sequence: Synthetic oligonucleotide
  Target: LAMA2; (-) strand; PAM type: NRG; PAM sequence: CAG
atagctagtcagagcacatc

SEQ ID NO: 89447 - DNA, 20 bp, Artificial Sequence
  Description of Artificial Sequence: Synthetic oligonucleotide
  Target: LAMA2; (-) strand; PAM type: NRG; PAM sequence: GAG
ggagcagtcatagctagtca

SEQ ID NO: 89448 - DNA, 20 bp, Artificial Sequence
  Description of Artificial Sequence: Synthetic oligonucleotide
  Target: LAMA2; (-) strand; PAM type: NRG; PAM sequence: CAG
caggagcagtcatagctagt

SEQ ID NO: 89449 - DNA, 20 bp, Artificial Sequence
  Description of Artificial Sequence: Synthetic oligonucleotide
  Target: LAMA2; (-) strand; PAM type: NRG; PAM sequence: TAG
gatccaggagcagtcatagc

SEQ ID NO: 89450 - DNA, 20 bp, Artificial Sequence
  Description of Artificial Sequence: Synthetic oligonucleotide
  Target: LAMA2; (-) strand; PAM type: NRG; PAM sequence: TAG
cggcgatccaggagcagtca

SEQ ID NO: 89451 - DNA, 20 bp, Artificial Sequence
  Description of Artificial Sequence: Synthetic oligonucleotide
  Target: LAMA2; (-) strand; PAM type: NRG; PAM sequence: CAG
aggaaacggcgatccaggag

SEQ ID NO: 89452 - DNA, 20 bp, Artificial Sequence
  Description of Artificial Sequence: Synthetic oligonucleotide
  Target: LAMA2; (-) strand; PAM type: NRG; PAM sequence: GAG
taaaggaaacggcgatccag

SEQ ID NO: 89453 - DNA, 20 bp, Artificial Sequence
  Description of Artificial Sequence: Synthetic oligonucleotide
  Target: LAMA2; (-) strand; PAM type: NRG; PAM sequence: AGG
attaaaggaaacggcgatcc

SEQ ID NO: 89454 - DNA, 20 bp, Artificial Sequence
  Description of Artificial Sequence: Synthetic oligonucleotide
  Target: LAMA2; (-) strand; PAM type: NRG; PAM sequence: CAG
gattaaaggaaacggcgatc

SEQ ID NO: 89455 - DNA, 20 bp, Artificial Sequence
  Description of Artificial Sequence: Synthetic oligonucleotide
  Target: LAMA2; (-) strand; PAM type: NRG; PAM sequence: CGG
agtgtatagattaaaggaaa

SEQ ID NO: 89456 - DNA, 20 bp, Artificial Sequence
  Description of Artificial Sequence: Synthetic oligonucleotide
  Target: LAMA2; (-) strand; PAM type: NRG; PAM sequence: AGG
acacatagtgtatagattaa

SEQ ID NO: 89457 - DNA, 20 bp, Artificial Sequence
  Description of Artificial Sequence: Synthetic oligonucleotide
  Target: LAMA2; (-) strand; PAM type: NRG; PAM sequence: AAG
gacacatagtgtatagatta

SEQ ID NO: 89458 - DNA, 20 bp, Artificial Sequence
  Description of Artificial Sequence: Synthetic oligonucleotide
  Target: LAMA2; (-) strand; PAM type: NRG; PAM sequence: TAG
ttaggaagacacatagtgta

SEQ ID NO: 89459 - DNA, 20 bp, Artificial Sequence
  Description of Artificial Sequence: Synthetic oligonucleotide
  Target: LAMA2; (-) strand; PAM type: NRG; PAM sequence: TAG
ctctgtattaggaagacaca

SEQ ID NO: 89460 - DNA, 20 bp, Artificial Sequence
  Description of Artificial Sequence: Synthetic oligonucleotide
  Target: LAMA2; (-) strand; PAM type: NRG; PAM sequence: AAG
aacatactctctgtattagg

SEQ ID NO: 89461 - DNA, 20 bp, Artificial Sequence
  Description of Artificial Sequence: Synthetic oligonucleotide
  Target: LAMA2; (-) strand; PAM type: NRG; PAM sequence: AGG
aacaacatactctctgtatt

SEQ ID NO: 89462 - DNA, 20 bp, Artificial Sequence
  Description of Artificial Sequence: Synthetic oligonucleotide
  Target: LAMA2; (-) strand; PAM type: NRG; PAM sequence: TAG
aaacaacatactctctgtat

SEQ ID NO: 89463 - DNA, 20 bp, Artificial Sequence
  Description of Artificial Sequence: Synthetic oligonucleotide
  Target: LAMA2; (-) strand; PAM type: NRG; PAM sequence: AGG
ttcaatttgttatgatatat

SEQ ID NO: 89464 - DNA, 20 bp, Artificial Sequence
  Description of Artificial Sequence: Synthetic oligonucleotide
  Target: LAMA2; (-) strand; PAM type: NRG; PAM sequence: TAG
tttcaatttgttatgatata

SEQ ID NO: 89465 - DNA, 20 bp, Artificial Sequence
  Description of Artificial Sequence: Synthetic oligonucleotide
  Target: LAMA2; (-) strand; PAM type: NRG; PAM sequence: AAG
cctagtaatatatactttat

SEQ ID NO: 89466 - DNA, 20 bp, Artificial Sequence
  Description of Artificial Sequence: Synthetic oligonucleotide
  Target: LAMA2; (-) strand; PAM type: NRG; PAM sequence: TAG
atagtgtaaattctagcacc

SEQ ID NO: 89467 - DNA, 20 bp, Artificial Sequence
  Description of Artificial Sequence: Synthetic oligonucleotide
  Target: LAMA2; (-) strand; PAM type: NRG; PAM sequence: TAG
taggataatagtgtaaattc

SEQ ID NO: 89468 - DNA, 20 bp, Artificial Sequence
  Description of Artificial Sequence: Synthetic oligonucleotide
  Target: LAMA2; (-) strand; PAM type: NRG; PAM sequence: TAG
gcttctgtatattaggataa

SEQ ID NO: 89469 - DNA, 20 bp, Artificial Sequence
  Description of Artificial Sequence: Synthetic oligonucleotide
  Target: LAMA2; (-) strand; PAM type: NRG; PAM sequence: AGG
tttcccagcttctgtatatt

SEQ ID NO: 89470 - DNA, 20 bp, Artificial Sequence
  Description of Artificial Sequence: Synthetic oligonucleotide
  Target: LAMA2; (-) strand; PAM type: NRG; PAM sequence: TAG
ttttcccagcttctgtatat

SEQ ID NO: 89471 - DNA, 20 bp, Artificial Sequence
  Description of Artificial Sequence: Synthetic oligonucleotide
  Target: LAMA2; (-) strand; PAM type: NRG; PAM sequence: CAG
ctctatggcattacttttcc

SEQ ID NO: 89472 - DNA, 20 bp, Artificial Sequence
  Description of Artificial Sequence: Synthetic oligonucleotide
  Target: LAMA2; (-) strand; PAM type: NRG; PAM sequence: TGG
acacacataaatcaactcta

SEQ ID NO: 89473 - DNA, 20 bp, Artificial Sequence
  Description of Artificial Sequence: Synthetic oligonucleotide
  Target: LAMA2; (-) strand; PAM type: NRG; PAM sequence: TAG
aaatcaatatttaagtcact

SEQ ID NO: 89474 - DNA, 20 bp, Artificial Sequence
  Description of Artificial Sequence: Synthetic oligonucleotide
  Target: LAMA2; (-) strand; PAM type: NRG; PAM sequence: AAG
aaggagaaaaatcaatattt

SEQ ID NO: 89475 - DNA, 20 bp, Artificial Sequence
  Description of Artificial Sequence: Synthetic oligonucleotide
  Target: LAMA2; (-) strand; PAM type: NRG; PAM sequence: GAG
agtttgatctgcagttgaag

SEQ ID NO: 89476 - DNA, 20 bp, Artificial Sequence
  Description of Artificial Sequence: Synthetic oligonucleotide
  Target: LAMA2; (-) strand; PAM type: NRG; PAM sequence: AGG
gaagtttgatctgcagttga

SEQ ID NO: 89477 - DNA, 20 bp, Artificial Sequence
  Description of Artificial Sequence: Synthetic oligonucleotide
  Target: LAMA2; (-) strand; PAM type: NRG; PAM sequence: AAG
ggaagtttgatctgcagttg

SEQ ID NO: 89478 - DNA, 20 bp, Artificial Sequence
  Description of Artificial Sequence: Synthetic oligonucleotide
  Target: LAMA2; (-) strand; PAM type: NRG; PAM sequence: CAG
tgtttgggaagtttgatctg

SEQ ID NO: 89479 - DNA, 20 bp, Artificial Sequence
  Description of Artificial Sequence: Synthetic oligonucleotide
  Target: LAMA2; (-) strand; PAM type: NRG; PAM sequence: AAG
aggaagctttagtgtttggg

SEQ ID NO: 89480 - DNA, 20 bp, Artificial Sequence
  Description of Artificial Sequence: Synthetic oligonucleotide
  Target: LAMA2; (-) strand; PAM type: NRG; PAM sequence: GGG
ataaggaagctttagtgttt

SEQ ID NO: 89481 - DNA, 20 bp, Artificial Sequence
  Description of Artificial Sequence: Synthetic oligonucleotide
  Target: LAMA2; (-) strand; PAM type: NRG; PAM sequence: TGG
aataaggaagctttagtgtt

SEQ ID NO: 89482 - DNA, 20 bp, Artificial Sequence
  Description of Artificial Sequence: Synthetic oligonucleotide
  Target: LAMA2; (-) strand; PAM type: NRG; PAM sequence: TAG
gttttaaaataaggaagctt

SEQ ID NO: 89483 - DNA, 20 bp, Artificial Sequence
  Description of Artificial Sequence: Synthetic oligonucleotide
  Target: LAMA2; (-) strand; PAM type: NRG; PAM sequence: AAG
gcatttgttttaaaataagg

SEQ ID NO: 89484 - DNA, 20 bp, Artificial Sequence
  Description of Artificial Sequence: Synthetic oligonucleotide
  Target: LAMA2; (-) strand; PAM type: NRG; PAM sequence: AGG
aatgcatttgttttaaaata

SEQ ID NO: 89485 - DNA, 20 bp, Artificial Sequence
  Description of Artificial Sequence: Synthetic oligonucleotide
  Target: LAMA2; (-) strand; PAM type: NRG; PAM sequence: AAG
aaatgcatttgttttaaaat

SEQ ID NO: 89486 - DNA, 20 bp, Artificial Sequence
  Description of Artificial Sequence: Synthetic oligonucleotide
  Target: LAMA2; (-) strand; PAM type: NRG; PAM sequence: TGG
aagcttactgtactgcagac

SEQ ID NO: 89487 - DNA, 20 bp, Artificial Sequence
  Description of Artificial Sequence: Synthetic oligonucleotide
  Target: LAMA2; (-) strand; PAM type: NRG; PAM sequence: CAG
ataaaaagcttactgtactg

SEQ ID NO: 89488 - DNA, 20 bp, Artificial Sequence
  Description of Artificial Sequence: Synthetic oligonucleotide
  Target: LAMA2; (-) strand; PAM type: NRG; PAM sequence: AAG
gatttgagcttacctataaa

SEQ ID NO: 89489 - DNA, 20 bp, Artificial Sequence
  Description of Artificial Sequence: Synthetic oligonucleotide
  Target: LAMA2; (-) strand; PAM type: NRG; PAM sequence: GAG
tttgagcttttctgtgattt

SEQ ID NO: 89490 - DNA, 20 bp, Artificial Sequence
  Description of Artificial Sequence: Synthetic oligonucleotide
  Target: LAMA2; (-) strand; PAM type: NRG; PAM sequence: GAG
taaaggagatgtatctattt

SEQ ID NO: 89491 - DNA, 20 bp, Artificial Sequence
  Description of Artificial Sequence: Synthetic oligonucleotide
  Target: LAMA2; (-) strand; PAM type: NRG; PAM sequence: GAG
gtcctaaaaataggctaaag

SEQ ID NO: 89492 - DNA, 20 bp, Artificial Sequence
  Description of Artificial Sequence: Synthetic oligonucleotide
  Target: LAMA2; (-) strand; PAM type: NRG; PAM sequence: AGG
cagtcctaaaaataggctaa

SEQ ID NO: 89493 - DNA, 20 bp, Artificial Sequence
  Description of Artificial Sequence: Synthetic oligonucleotide
  Target: LAMA2; (-) strand; PAM type: NRG; PAM sequence: AAG
tcagtcctaaaaataggcta

SEQ ID NO: 89494 - DNA, 20 bp, Artificial Sequence
  Description of Artificial Sequence: Synthetic oligonucleotide
  Target: LAMA2; (-) strand; PAM type: NRG; PAM sequence: AGG
gctttatcagtcctaaaaat

SEQ ID NO: 89495 - DNA, 20 bp, Artificial Sequence
  Description of Artificial Sequence: Synthetic oligonucleotide
  Target: LAMA2; (-) strand; PAM type: NRG; PAM sequence: TAG
agctttatcagtcctaaaaa

SEQ ID NO: 89496 - DNA, 20 bp, Artificial Sequence
  Description of Artificial Sequence: Synthetic oligonucleotide
  Target: LAMA2; (-) strand; PAM type: NRG; PAM sequence: CAG
ttctctgttcttagctttat

SEQ ID NO: 89497 - DNA, 20 bp, Artificial Sequence
  Description of Artificial Sequence: Synthetic oligonucleotide
  Target: LAMA2; (-) strand; PAM type: NRG; PAM sequence: TAG
tttattggtttctctgttct

SEQ ID NO: 89498 - DNA, 20 bp, Artificial Sequence
  Description of Artificial Sequence: Synthetic oligonucleotide
  Target: LAMA2; (-) strand; PAM type: NRG; PAM sequence: TGG
tcattaaaatatgtctttat

SEQ ID NO: 89499 - DNA, 20 bp, Artificial Sequence
  Description of Artificial Sequence: Synthetic oligonucleotide
  Target: LAMA2; (-) strand; PAM type: NRG; PAM sequence: GAG
ataaatttgtactaccccat

SEQ ID NO: 89500 - DNA, 20 bp, Artificial Sequence
  Description of Artificial Sequence: Synthetic oligonucleotide
  Target: LAMA2; (-) strand; PAM type: NRG; PAM sequence: GGG
tagagaaggcataaaaaact

SEQ ID NO: 89501 - DNA, 20 bp, Artificial Sequence
  Description of Artificial Sequence: Synthetic oligonucleotide
  Target: LAMA2; (-) strand; PAM type: NRG; PAM sequence: TGG
atagagaaggcataaaaaac

SEQ ID NO: 89502 - DNA, 20 bp, Artificial Sequence
  Description of Artificial Sequence: Synthetic oligonucleotide
  Target: LAMA2; (-) strand; PAM type: NRG; PAM sequence: AGG
caatgtattacacatagaga

SEQ ID NO: 89503 - DNA, 20 bp, Artificial Sequence
  Description of Artificial Sequence: Synthetic oligonucleotide
  Target: LAMA2; (-) strand; PAM type: NRG; PAM sequence: AAG
tcaatgtattacacatagag

SEQ ID NO: 89504 - DNA, 20 bp, Artificial Sequence
  Description of Artificial Sequence: Synthetic oligonucleotide
  Target: LAMA2; (-) strand; PAM type: NRG; PAM sequence: GAG
acttcaatgtattacacata

SEQ ID NO: 89505 - DNA, 20 bp, Artificial Sequence
  Description of Artificial Sequence: Synthetic oligonucleotide
  Target: LAMA2; (-) strand; PAM type: NRG; PAM sequence: TAG
tcacttcaatgtattacaca

SEQ ID NO: 89506 - DNA, 20 bp, Artificial Sequence
  Description of Artificial Sequence: Synthetic oligonucleotide
  Target: LAMA2; (-) strand; PAM type: NRG; PAM sequence: AAG
atagatagtagatcttgcat

SEQ ID NO: 89507 - DNA, 20 bp, Artificial Sequence
  Description of Artificial Sequence: Synthetic oligonucleotide
  Target: LAMA2; (-) strand; PAM type: NRG; PAM sequence: TAG
cataagcatcttatagatag

SEQ ID NO: 89508 - DNA, 20 bp, Artificial Sequence
  Description of Artificial Sequence: Synthetic oligonucleotide
  Target: LAMA2; (-) strand; PAM type: NRG; PAM sequence: TAG
ttgcataagcatcttataga

SEQ ID NO: 89509 - DNA, 20 bp, Artificial Sequence
  Description of Artificial Sequence: Synthetic oligonucleotide
  Target: LAMA2; (-) strand; PAM type: NRG; PAM sequence: TAG
aattttgcataagcatctta

SEQ ID NO: 89510 - DNA, 20 bp, Artificial Sequence
  Description of Artificial Sequence: Synthetic oligonucleotide
  Target: LAMA2; (-) strand; PAM type: NRG; PAM sequence: AAG
ttccctatggaattttgcat

SEQ ID NO: 89511 - DNA, 20 bp, Artificial Sequence
  Description of Artificial Sequence: Synthetic oligonucleotide
  Target: LAMA2; (-) strand; PAM type: NRG; PAM sequence: TGG
cacgtcttaatgtttcccta

SEQ ID NO: 89512 - DNA, 20 bp, Artificial Sequence
  Description of Artificial Sequence: Synthetic oligonucleotide
  Target: LAMA2; (-) strand; PAM type: NRG; PAM sequence: CAG
atcatagtgatggcccaatt

SEQ ID NO: 89513 - DNA, 20 bp, Artificial Sequence
  Description of Artificial Sequence: Synthetic oligonucleotide
  Target: LAMA2; (-) strand; PAM type: NRG; PAM sequence: TGG
ttggggagagatcatagtga

SEQ ID NO: 89514 - DNA, 20 bp, Artificial Sequence
  Description of Artificial Sequence: Synthetic oligonucleotide
  Target: LAMA2; (-) strand; PAM type: NRG; PAM sequence: TAG
cacgttttggggagagatca

SEQ ID NO: 89515 - DNA, 20 bp, Artificial Sequence
  Description of Artificial Sequence: Synthetic oligonucleotide
  Target: LAMA2; (-) strand; PAM type: NRG; PAM sequence: GAG
aaaatcccacgttttgggga

SEQ ID NO: 89516 - DNA, 20 bp, Artificial Sequence
  Description of Artificial Sequence: Synthetic oligonucleotide
  Target: LAMA2; (-) strand; PAM type: NRG; PAM sequence: GAG
tgaaaatcccacgttttggg

SEQ ID NO: 89517 - DNA, 20 bp, Artificial Sequence
  Description of Artificial Sequence: Synthetic oligonucleotide
  Target: LAMA2; (-) strand; PAM type: NRG; PAM sequence: GGG
cttgaaaatcccacgttttg

SEQ ID NO: 89518 - DNA, 20 bp, Artificial Sequence
  Description of Artificial Sequence: Synthetic oligonucleotide
  Target: LAMA2; (-) strand; PAM type: NRG; PAM sequence: GGG
acttgaaaatcccacgtttt

SEQ ID NO: 89519 - DNA, 20 bp, Artificial Sequence
  Description of Artificial Sequence: Synthetic oligonucleotide
  Target: LAMA2; (-) strand; PAM type: NRG; PAM sequence: TGG
cacttgaaaatcccacgttt

SEQ ID NO: 89520 - DNA, 20 bp, Artificial Sequence
  Description of Artificial Sequence: Synthetic oligonucleotide
  Target: LAMA2; (-) strand; PAM type: NRG; PAM sequence: TGG
atttcacactaaaaacctag

SEQ ID NO: 89521 - DNA, 20 bp, Artificial Sequence
  Description of Artificial Sequence: Synthetic oligonucleotide
  Target: LAMA2; (-) strand; PAM type: NRG; PAM sequence: TAG
aacatttcacactaaaaacc

SEQ ID NO: 89522 - DNA, 20 bp, Artificial Sequence
  Description of Artificial Sequence: Synthetic oligonucleotide
  Target: LAMA2; (-) strand; PAM type: NRG; PAM sequence: TAG
tcatactgttttaataagta

SEQ ID NO: 89523 - DNA, 20 bp, Artificial Sequence
  Description of Artificial Sequence: Synthetic oligonucleotide
  Target: LAMA2; (-) strand; PAM type: NRG; PAM sequence: AAG
tgttgtcatactgttttaat

SEQ ID NO: 89524 - DNA, 20 bp, Artificial Sequence
  Description of Artificial Sequence: Synthetic oligonucleotide
  Target: LAMA2; (-) strand; PAM type: NRG; PAM sequence: TAG
aaaactccccacttggtacc

SEQ ID NO: 89525 - DNA, 20 bp, Artificial Sequence
  Description of Artificial Sequence: Synthetic oligonucleotide
  Target: LAMA2; (-) strand; PAM type: NRG; PAM sequence: TGG
taaacataaaactccccact

SEQ ID NO: 89526 - DNA, 20 bp, Artificial Sequence
  Description of Artificial Sequence: Synthetic oligonucleotide
  Target: LAMA2; (-) strand; PAM type: NRG; PAM sequence: GAG
gtttgctcttaggatgaaat

SEQ ID NO: 89527 - DNA, 20 bp, Artificial Sequence
  Description of Artificial Sequence: Synthetic oligonucleotide
  Target: LAMA2; (-) strand; PAM type: NRG; PAM sequence: AGG
tacctccgaagtttgctctt

SEQ ID NO: 89528 - DNA, 20 bp, Artificial Sequence
  Description of Artificial Sequence: Synthetic oligonucleotide
  Target: LAMA2; (-) strand; PAM type: NRG; PAM sequence: TAG
ctacctccgaagtttgctct

SEQ ID NO: 89529 - DNA, 20 bp, Artificial Sequence
  Description of Artificial Sequence: Synthetic oligonucleotide
  Target: LAMA2; (-) strand; PAM type: NRG; PAM sequence: AAG
acgaatcacacctacctccg

SEQ ID NO: 89530 - DNA, 20 bp, Artificial Sequence
  Description of Artificial Sequence: Synthetic oligonucleotide
  Target: LAMA2; (-) strand; PAM type: NRG; PAM sequence: GAG
cagtgaattttcactaaaat

SEQ ID NO: 89531 - DNA, 20 bp, Artificial Sequence
  Description of Artificial Sequence: Synthetic oligonucleotide
  Target: LAMA2; (-) strand; PAM type: NRG; PAM sequence: CAG
taattttgctttcagagcat

SEQ ID NO: 89532 - DNA, 20 bp, Artificial Sequence
  Description of Artificial Sequence: Synthetic oligonucleotide
  Target: LAMA2; (-) strand; PAM type: NRG; PAM sequence: GAG
gaaagttaattttgctttca

SEQ ID NO: 89533 - DNA, 20 bp, Artificial Sequence
  Description of Artificial Sequence: Synthetic oligonucleotide
  Target: LAMA2; (-) strand; PAM type: NRG; PAM sequence: CAG
gggaaagttaattttgcttt

SEQ ID NO: 89534 - DNA, 20 bp, Artificial Sequence
  Description of Artificial Sequence: Synthetic oligonucleotide
  Target: LAMA2; (-) strand; PAM type: NRG; PAM sequence: AAG
gcactacaaggcccttggga

SEQ ID NO: 89535 - DNA, 20 bp, Artificial Sequence
  Description of Artificial Sequence: Synthetic oligonucleotide
  Target: LAMA2; (-) strand; PAM type: NRG; PAM sequence: GGG
ttaagcactacaaggccctt

SEQ ID NO: 89536 - DNA, 20 bp, Artificial Sequence
  Description of Artificial Sequence: Synthetic oligonucleotide
  Target: LAMA2; (-) strand; PAM type: NRG; PAM sequence: TGG
tttaagcactacaaggccct

SEQ ID NO: 89537 - DNA, 20 bp, Artificial Sequence
  Description of Artificial Sequence: Synthetic oligonucleotide
  Target: LAMA2; (-) strand; PAM type: NRG; PAM sequence: AGG
ttctgcctttaagcactaca

SEQ ID NO: 89538 - DNA, 20 bp, Artificial Sequence
  Description of Artificial Sequence: Synthetic oligonucleotide
  Target: LAMA2; (-) strand; PAM type: NRG; PAM sequence: AAG
attctgcctttaagcactac

SEQ ID NO: 89539 - DNA, 20 bp, Artificial Sequence
  Description of Artificial Sequence: Synthetic oligonucleotide
  Target: LAMA2; (-) strand; PAM type: NRG; PAM sequence: AAG
tggattttgattctgccttt

SEQ ID NO: 89540 - DNA, 20 bp, Artificial Sequence
  Description of Artificial Sequence: Synthetic oligonucleotide
  Target: LAMA2; (-) strand; PAM type: NRG; PAM sequence: TGG
agattttccagagctggttg

SEQ ID NO: 89541 - DNA, 20 bp, Artificial Sequence
  Description of Artificial Sequence: Synthetic oligonucleotide
  Target: LAMA2; (-) strand; PAM type: NRG; PAM sequence: TGG
ttctggagattttccagagc

SEQ ID NO: 89542 - DNA, 20 bp, Artificial Sequence
  Description of Artificial Sequence: Synthetic oligonucleotide
  Target: LAMA2; (-) strand; PAM type: NRG; PAM sequence: GAG
tcatttctggagattttcca

SEQ ID NO: 89543 - DNA, 20 bp, Artificial Sequence
  Description of Artificial Sequence: Synthetic oligonucleotide
  Target: LAMA2; (-) strand; PAM type: NRG; PAM sequence: CAG
gctcatttctggagattttc

SEQ ID NO: 89544 - DNA, 20 bp, Artificial Sequence
  Description of Artificial Sequence: Synthetic oligonucleotide
  Target: LAMA2; (-) strand; PAM type: NRG; PAM sequence: GAG
aaaaattaagctcatttctg

SEQ ID NO: 89545 - DNA, 20 bp, Artificial Sequence
  Description of Artificial Sequence: Synthetic oligonucleotide
  Target: LAMA2; (-) strand; PAM type: NRG; PAM sequence: TGG
caaaaaattaagctcatttc

SEQ ID NO: 89546 - DNA, 20 bp, Artificial Sequence
  Description of Artificial Sequence: Synthetic oligonucleotide
  Target: LAMA2; (-) strand; PAM type: NRG; PAM sequence: AAG
tataaatcacacaaaaaatt

SEQ ID NO: 89547 - DNA, 20 bp, Artificial Sequence
  Description of Artificial Sequence: Synthetic oligonucleotide
  Target: LAMA2; (-) strand; PAM type: NRG; PAM sequence: GAG
tgacatgtctgttaatattg

SEQ ID NO: 89548 - DNA, 20 bp, Artificial Sequence
  Description of Artificial Sequence: Synthetic oligonucleotide
  Target: LAMA2; (-) strand; PAM type: NRG; PAM sequence: TGG
tttgacatgtctgttaatat

SEQ ID NO: 89549 - DNA, 20 bp, Artificial Sequence
  Description of Artificial Sequence: Synthetic oligonucleotide
  Target: LAMA2; (-) strand; PAM type: NRG; PAM sequence: TAG
aaacaggtaaagggttgtgt

SEQ ID NO: 89550 - DNA, 20 bp, Artificial Sequence
  Description of Artificial Sequence: Synthetic oligonucleotide
  Target: LAMA2; (-) strand; PAM type: NRG; PAM sequence: GGG
ttccaaaataaacaggtaaa

SEQ ID NO: 89551 - DNA, 20 bp, Artificial Sequence
  Description of Artificial Sequence: Synthetic oligonucleotide
  Target: LAMA2; (-) strand; PAM type: NRG; PAM sequence: AGG
cttccaaaataaacaggtaa

SEQ ID NO: 89552 - DNA, 20 bp, Artificial Sequence
  Description of Artificial Sequence: Synthetic oligonucleotide
  Target: LAMA2; (-) strand; PAM type: NRG; PAM sequence: AAG
tcttccaaaataaacaggta

SEQ ID NO: 89553 - DNA, 20 bp, Artificial Sequence
  Description of Artificial Sequence: Synthetic oligonucleotide
  Target: LAMA2; (-) strand; PAM type: NRG; PAM sequence: AGG
tgtcttcttccaaaataaac

SEQ ID NO: 89554 - DNA, 20 bp, Artificial Sequence
  Description of Artificial Sequence: Synthetic oligonucleotide
  Target: LAMA2; (-) strand; PAM type: NRG; PAM sequence: CAG
gtgtcttcttccaaaataaa

SEQ ID NO: 89555 - DNA, 20 bp, Artificial Sequence
  Description of Artificial Sequence: Synthetic oligonucleotide
  Target: LAMA2; (-) strand; PAM type: NRG; PAM sequence: AAG
agggtaataaaatacatttt

SEQ ID NO: 89556 - DNA, 20 bp, Artificial Sequence
  Description of Artificial Sequence: Synthetic oligonucleotide
  Target: LAMA2; (-) strand; PAM type: NRG; PAM sequence: GGG
actccagaggagaatcaaca

SEQ ID NO: 89557 - DNA, 20 bp, Artificial Sequence
  Description of Artificial Sequence: Synthetic oligonucleotide
  Target: LAMA2; (-) strand; PAM type: NRG; PAM sequence: AGG
cactccagaggagaatcaac

SEQ ID NO: 89558 - DNA, 20 bp, Artificial Sequence
  Description of Artificial Sequence: Synthetic oligonucleotide
  Target: LAMA2; (-) strand; PAM type: NRG; PAM sequence: CAG
acactccagaggagaatcaa

SEQ ID NO: 89559 - DNA, 20 bp, Artificial Sequence
  Description of Artificial Sequence: Synthetic oligonucleotide
  Target: LAMA2; (-) strand; PAM type: NRG; PAM sequence: GAG
tactaagtcacactccagag

SEQ ID NO: 89560 - DNA, 20 bp, Artificial Sequence
  Description of Artificial Sequence: Synthetic oligonucleotide
  Target: LAMA2; (-) strand; PAM type: NRG; PAM sequence: AGG
gatactaagtcacactccag

SEQ ID NO: 89561 - DNA, 20 bp, Artificial Sequence
  Description of Artificial Sequence: Synthetic oligonucleotide
  Target: LAMA2; (-) strand; PAM type: NRG; PAM sequence: GAG
ggatactaagtcacactcca

SEQ ID NO: 89562 - DNA, 20 bp, Artificial Sequence
  Description of Artificial Sequence: Synthetic oligonucleotide
  Target: LAMA2; (-) strand; PAM type: NRG; PAM sequence: CAG
atggatactaagtcacactc

SEQ ID NO: 89563 - DNA, 20 bp, Artificial Sequence
  Description of Artificial Sequence: Synthetic oligonucleotide
  Target: LAMA2; (-) strand; PAM type: NRG; PAM sequence: AAG
ccaaaggtgcaatggatact

SEQ ID NO: 89564 - DNA, 20 bp, Artificial Sequence
  Description of Artificial Sequence: Synthetic oligonucleotide
  Target: LAMA2; (-) strand; PAM type: NRG; PAM sequence: TGG
taagaatcccaaaggtgcaa

SEQ ID NO: 89565 - DNA, 20 bp, Artificial Sequence
  Description of Artificial Sequence: Synthetic oligonucleotide
  Target: LAMA2; (-) strand; PAM type: NRG; PAM sequence: AGG
ttagaagataagaatcccaa

SEQ ID NO: 89566 - DNA, 20 bp, Artificial Sequence
  Description of Artificial Sequence: Synthetic oligonucleotide
  Target: LAMA2; (-) strand; PAM type: NRG; PAM sequence: AAG
tttagaagataagaatccca

SEQ ID NO: 89567 - DNA, 20 bp, Artificial Sequence
  Description of Artificial Sequence: Synthetic oligonucleotide
  Target: LAMA2; (-) strand; PAM type: NRG; PAM sequence: AAG
ggttgtgaattttagaagat

SEQ ID NO: 89568 - DNA, 20 bp, Artificial Sequence
  Description of Artificial Sequence: Synthetic oligonucleotide
  Target: LAMA2; (-) strand; PAM type: NRG; PAM sequence: AAG
aaagtggttgtgaattttag

SEQ ID NO: 89569 - DNA, 20 bp, Artificial Sequence
  Description of Artificial Sequence: Synthetic oligonucleotide
  Target: LAMA2; (-) strand; PAM type: NRG; PAM sequence: TAG
tagaaagtggttgtgaattt

SEQ ID NO: 89570 - DNA, 20 bp, Artificial Sequence
  Description of Artificial Sequence: Synthetic oligonucleotide
  Target: LAMA2; (-) strand; PAM type: NRG; PAM sequence: TGG
tttcttacagcagtagaaag

SEQ ID NO: 89571 - DNA, 20 bp, Artificial Sequence
  Description of Artificial Sequence: Synthetic oligonucleotide
  Target: LAMA2; (-) strand; PAM type: NRG; PAM sequence: AAG
ttctttcttacagcagtaga

SEQ ID NO: 89572 - DNA, 20 bp, Artificial Sequence
  Description of Artificial Sequence: Synthetic oligonucleotide
  Target: LAMA2; (-) strand; PAM type: NRG; PAM sequence: TAG
gtgattctttcttacagcag

SEQ ID NO: 89573 - DNA, 20 bp, Artificial Sequence
  Description of Artificial Sequence: Synthetic oligonucleotide
  Target: LAMA2; (-) strand; PAM type: NRG; PAM sequence: CAG
caggtgattctttcttacag

SEQ ID NO: 89574 - DNA, 20 bp, Artificial Sequence
  Description of Artificial Sequence: Synthetic oligonucleotide
  Target: LAMA2; (-) strand; PAM type: NRG; PAM sequence: CAG
ctgcaggtgattctttctta

SEQ ID NO: 89575 - DNA, 20 bp, Artificial Sequence
  Description of Artificial Sequence: Synthetic oligonucleotide
  Target: LAMA2; (-) strand; PAM type: NRG; PAM sequence: AGG
ccctcattcgtgaactctgc

SEQ ID NO: 89576 - DNA, 20 bp, Artificial Sequence
  Description of Artificial Sequence: Synthetic oligonucleotide
  Target: LAMA2; (-) strand; PAM type: NRG; PAM sequence: CAG
tccctcattcgtgaactctg

SEQ ID NO: 89577 - DNA, 20 bp, Artificial Sequence
  Description of Artificial Sequence: Synthetic oligonucleotide
  Target: LAMA2; (-) strand; PAM type: NRG; PAM sequence: TGG
tattttgatgtgatgccaag

SEQ ID NO: 89578 - DNA, 20 bp, Artificial Sequence
  Description of Artificial Sequence: Synthetic oligonucleotide
  Target: LAMA2; (-) strand; PAM type: NRG; PAM sequence: AAG
tactattttgatgtgatgcc

SEQ ID NO: 89579 - DNA, 20 bp, Artificial Sequence
  Description of Artificial Sequence: Synthetic oligonucleotide
  Target: LAMA2; (-) strand; PAM type: NRG; PAM sequence: TGG
agaagccagaacaccaacct

SEQ ID NO: 89580 - DNA, 20 bp, Artificial Sequence
  Description of Artificial Sequence: Synthetic oligonucleotide
  Target: LAMA2; (-) strand; PAM type: NRG; PAM sequence: CAG
tttcccagaaaagcagaagc

SEQ ID NO: 89581 - DNA, 20 bp, Artificial Sequence
  Description of Artificial Sequence: Synthetic oligonucleotide
  Target: LAMA2; (-) strand; PAM type: NRG; PAM sequence: AAG
cgtatttcccagaaaagcag

SEQ ID NO: 89582 - DNA, 20 bp, Artificial Sequence
  Description of Artificial Sequence: Synthetic oligonucleotide
  Target: LAMA2; (-) strand; PAM type: NRG; PAM sequence: CAG
caacgtatttcccagaaaag

SEQ ID NO: 89583 - DNA, 20 bp, Artificial Sequence
  Description of Artificial Sequence: Synthetic oligonucleotide
  Target: LAMA2; (-) strand; PAM type: NRG; PAM sequence: AAG
agacaacgtatttcccagaa

SEQ ID NO: 89584 - DNA, 20 bp, Artificial Sequence
  Description of Artificial Sequence: Synthetic oligonucleotide
  Target: LAMA2; (-) strand; PAM type: NRG; PAM sequence: CAG
atagcagacaacgtatttcc

SEQ ID NO: 89585 - DNA, 20 bp, Artificial Sequence
  Description of Artificial Sequence: Synthetic oligonucleotide
  Target: LAMA2; (-) strand; PAM type: NRG; PAM sequence: CAG
tggagggcattttgaaatag

SEQ ID NO: 89586 - DNA, 20 bp, Artificial Sequence
  Description of Artificial Sequence: Synthetic oligonucleotide
  Target: LAMA2; (-) strand; PAM type: NRG; PAM sequence: TAG
agatggagggcattttgaaa

SEQ ID NO: 89587 - DNA, 20 bp, Artificial Sequence
  Description of Artificial Sequence: Synthetic oligonucleotide
  Target: LAMA2; (-) strand; PAM type: NRG; PAM sequence: GGG
ggttacattattcagatgga

SEQ ID NO: 89588 - DNA, 20 bp, Artificial Sequence
  Description of Artificial Sequence: Synthetic oligonucleotide
  Target: LAMA2; (-) strand; PAM type: NRG; PAM sequence: AGG
aggttacattattcagatgg

SEQ ID NO: 89589 - DNA, 20 bp, Artificial Sequence
  Description of Artificial Sequence: Synthetic oligonucleotide
  Target: LAMA2; (-) strand; PAM type: NRG; PAM sequence: GAG
caggttacattattcagatg

SEQ ID NO: 89590 - DNA, 20 bp, Artificial Sequence
  Description of Artificial Sequence: Synthetic oligonucleotide
  Target: LAMA2; (-) strand; PAM type: NRG; PAM sequence: TGG
ttcaggttacattattcaga

SEQ ID NO: 89591 - DNA, 20 bp, Artificial Sequence
  Description of Artificial Sequence: Synthetic oligonucleotide
  Target: LAMA2; (-) strand; PAM type: NRG; PAM sequence: CAG
gaatttcaggttacattatt

SEQ ID NO: 89592 - DNA, 20 bp, Artificial Sequence
  Description of Artificial Sequence: Synthetic oligonucleotide
  Target: LAMA2; (-) strand; PAM type: NRG; PAM sequence: AGG
atatgagttgaatgaatttc

SEQ ID NO: 89593 - DNA, 20 bp, Artificial Sequence
  Description of Artificial Sequence: Synthetic oligonucleotide
  Target: LAMA2; (-) strand; PAM type: NRG; PAM sequence: CAG
aatatgagttgaatgaattt

SEQ ID NO: 89594 - DNA, 20 bp, Artificial Sequence
  Description of Artificial Sequence: Synthetic oligonucleotide
  Target: LAMA2; (-) strand; PAM type: NRG; PAM sequence: GAG
tggcctaaagtgctaaatat

SEQ ID NO: 89595 - DNA, 20 bp, Artificial Sequence
  Description of Artificial Sequence: Synthetic oligonucleotide
  Target: LAMA2; (-) strand; PAM type: NRG; PAM sequence: AAG
acaaccctggatatggccta

SEQ ID NO: 89596 - DNA, 20 bp, Artificial Sequence
  Description of Artificial Sequence: Synthetic oligonucleotide
  Target: LAMA2; (-) strand; PAM type: NRG; PAM sequence: TGG
accttccacaaccctggata

SEQ ID NO: 89597 - DNA, 20 bp, Artificial Sequence
  Description of Artificial Sequence: Synthetic oligonucleotide
  Target: LAMA2; (-) strand; PAM type: NRG; PAM sequence: TGG
acgtacaccttccacaaccc

SEQ ID NO: 89598 - DNA, 20 bp, Artificial Sequence
  Description of Artificial Sequence: Synthetic oligonucleotide
  Target: LAMA2; (-) strand; PAM type: NRG; PAM sequence: AGG
gagttctcatcttgccttgt

SEQ ID NO: 89599 - DNA, 20 bp, Artificial Sequence
  Description of Artificial Sequence: Synthetic oligonucleotide
  Target: LAMA2; (-) strand; PAM type: NRG; PAM sequence: TAG
agagttctcatcttgccttg

SEQ ID NO: 89600 - DNA, 20 bp, Artificial Sequence
  Description of Artificial Sequence: Synthetic oligonucleotide
  Target: LAMA2; (-) strand; PAM type: NRG; PAM sequence: GAG
aatagaaagtatagaaaaca

SEQ ID NO: 89601 - DNA, 20 bp, Artificial Sequence
  Description of Artificial Sequence: Synthetic oligonucleotide
  Target: LAMA2; (-) strand; PAM type: NRG; PAM sequence: CAG
acaatagaaagtatagaaaa

SEQ ID NO: 89602 - DNA, 20 bp, Artificial Sequence
  Description of Artificial Sequence: Synthetic oligonucleotide
  Target: LAMA2; (-) strand; PAM type: NRG; PAM sequence: TAG
gggaggaacaatagaaagta

SEQ ID NO: 89603 - DNA, 20 bp, Artificial Sequence
  Description of Artificial Sequence: Synthetic oligonucleotide
  Target: LAMA2; (-) strand; PAM type: NRG; PAM sequence: AAG
gcaaagggaggaacaataga

SEQ ID NO: 89604 - DNA, 20 bp, Artificial Sequence
  Description of Artificial Sequence: Synthetic oligonucleotide
  Target: LAMA2; (-) strand; PAM type: NRG; PAM sequence: TAG
tgttgcaaagggaggaacaa

SEQ ID NO: 89605 - DNA, 20 bp, Artificial Sequence
  Description of Artificial Sequence: Synthetic oligonucleotide
  Target: LAMA2; (-) strand; PAM type: NRG; PAM sequence: AGG
tctacttctgttgcaaaggg

SEQ ID NO: 89606 - DNA, 20 bp, Artificial Sequence
  Description of Artificial Sequence: Synthetic oligonucleotide
  Target: LAMA2; (-) strand; PAM type: NRG; PAM sequence: GAG
ttctacttctgttgcaaagg

SEQ ID NO: 89607 - DNA, 20 bp, Artificial Sequence
  Description of Artificial Sequence: Synthetic oligonucleotide
  Target: LAMA2; (-) strand; PAM type: NRG; PAM sequence: GGG
ctttctacttctgttgcaaa

SEQ ID NO: 89608 - DNA, 20 bp, Artificial Sequence
  Description of Artificial Sequence: Synthetic oligonucleotide
  Target: LAMA2; (-) strand; PAM type: NRG; PAM sequence: AGG
cctttctacttctgttgcaa

SEQ ID NO: 89609 - DNA, 20 bp, Artificial Sequence
  Description of Artificial Sequence: Synthetic oligonucleotide
  Target: LAMA2; (-) strand; PAM type: NRG; PAM sequence: AAG
ccctttctacttctgttgca

SEQ ID NO: 89610 - DNA, 20 bp, Artificial Sequence
  Description of Artificial Sequence: Synthetic oligonucleotide
  Target: LAMA2; (-) strand; PAM type: NRG; PAM sequence: TGG
gacagtagatggctatggta

SEQ ID NO: 89611 - DNA, 20 bp, Artificial Sequence
  Description of Artificial Sequence: Synthetic oligonucleotide
  Target: LAMA2; (-) strand; PAM type: NRG; PAM sequence: TGG
tgttggacagtagatggcta

SEQ ID NO: 89612 - DNA, 20 bp, Artificial Sequence
  Description of Artificial Sequence: Synthetic oligonucleotide
  Target: LAMA2; (-) strand; PAM type: NRG; PAM sequence: TGG
tcatcatgttggacagtaga

SEQ ID NO: 89613 - DNA, 20 bp, Artificial Sequence
  Description of Artificial Sequence: Synthetic oligonucleotide
  Target: LAMA2; (-) strand; PAM type: NRG; PAM sequence: TAG
atattcatcatgttggacag

SEQ ID NO: 89614 - DNA, 20 bp, Artificial Sequence
  Description of Artificial Sequence: Synthetic oligonucleotide
  Target: LAMA2; (-) strand; PAM type: NRG; PAM sequence: CAG
aggatattcatcatgttgga

SEQ ID NO: 89615 - DNA, 20 bp, Artificial Sequence
  Description of Artificial Sequence: Synthetic oligonucleotide
  Target: LAMA2; (-) strand; PAM type: NRG; PAM sequence: TGG
tttaaggatattcatcatgt

SEQ ID NO: 89616 - DNA, 20 bp, Artificial Sequence
  Description of Artificial Sequence: Synthetic oligonucleotide
  Target: LAMA2; (-) strand; PAM type: NRG; PAM sequence: AGG
gcttaaagattttgtcttta

SEQ ID NO: 89617 - DNA, 20 bp, Artificial Sequence
  Description of Artificial Sequence: Synthetic oligonucleotide
  Target: LAMA2; (-) strand; PAM type: NRG; PAM sequence: AAG
tgcttaaagattttgtcttt

SEQ ID NO: 89618 - DNA, 20 bp, Artificial Sequence
  Description of Artificial Sequence: Synthetic oligonucleotide
  Target: LAMA2; (-) strand; PAM type: NRG; PAM sequence: AAG
aacctttcacttactgctta

SEQ ID NO: 89619 - DNA, 20 bp, Artificial Sequence
  Description of Artificial Sequence: Synthetic oligonucleotide
  Target: LAMA2; (-) strand; PAM type: NRG; PAM sequence: TAG
ttctttttaaatgagaattg

SEQ ID NO: 89620 - DNA, 20 bp, Artificial Sequence
  Description of Artificial Sequence: Synthetic oligonucleotide
  Target: LAMA2; (-) strand; PAM type: NRG; PAM sequence: GAG
atgcaattttctttttaaat

SEQ ID NO: 89621 - DNA, 20 bp, Artificial Sequence
  Description of Artificial Sequence: Synthetic oligonucleotide
  Target: LAMA2; (-) strand; PAM type: NRG; PAM sequence: CAG
tttatgtaacaaagagatat

SEQ ID NO: 89622 - DNA, 20 bp, Artificial Sequence
  Description of Artificial Sequence: Synthetic oligonucleotide
  Target: LAMA2; (-) strand; PAM type: NRG; PAM sequence: GAG
tggaaaatttatgtaacaaa

SEQ ID NO: 89623 - DNA, 20 bp, Artificial Sequence
  Description of Artificial Sequence: Synthetic oligonucleotide
  Target: LAMA2; (-) strand; PAM type: NRG; PAM sequence: AAG
tgtggaaaatttatgtaaca

SEQ ID NO: 89624 - DNA, 20 bp, Artificial Sequence
  Description of Artificial Sequence: Synthetic oligonucleotide
  Target: LAMA2; (-) strand; PAM type: NRG; PAM sequence: TGG
aagaaaatgtataatccttg

SEQ ID NO: 89625 - DNA, 20 bp, Artificial Sequence
  Description of Artificial Sequence: Synthetic oligonucleotide
  Target: LAMA2; (-) strand; PAM type: NRG; PAM sequence: AAG
atagataacaaatgaataaa

SEQ ID NO: 89626 - DNA, 20 bp, Artificial Sequence
  Description of Artificial Sequence: Synthetic oligonucleotide
  Target: LAMA2; (-) strand; PAM type: NRG; PAM sequence: TAG
acaggcttgctattgtcaaa

SEQ ID NO: 89627 - DNA, 20 bp, Artificial Sequence
  Description of Artificial Sequence: Synthetic oligonucleotide
  Target: LAMA2; (-) strand; PAM type: NRG; PAM sequence: AGG
cctttaagctaaagagaaac

SEQ ID NO: 89628 - DNA, 20 bp, Artificial Sequence
  Description of Artificial Sequence: Synthetic oligonucleotide
  Target: LAMA2; (-) strand; PAM type: NRG; PAM sequence: CAG
tcctttaagctaaagagaaa

SEQ ID NO: 89629 - DNA, 20 bp, Artificial Sequence
  Description of Artificial Sequence: Synthetic oligonucleotide
  Target: LAMA2; (-) strand; PAM type: NRG; PAM sequence: GAG
ccaagttcctttaagctaaa

SEQ ID NO: 89630 - DNA, 20 bp, Artificial Sequence
  Description of Artificial Sequence: Synthetic oligonucleotide
  Target: LAMA2; (-) strand; PAM type: NRG; PAM sequence: AAG
atccaagttcctttaagcta

SEQ ID NO: 89631 - DNA, 20 bp, Artificial Sequence
  Description of Artificial Sequence: Synthetic oligonucleotide
  Target: LAMA2; (-) strand; PAM type: NRG; PAM sequence: AAG
attttaatccaagttccttt

SEQ ID NO: 89632 - DNA, 20 bp, Artificial Sequence
  Description of Artificial Sequence: Synthetic oligonucleotide
  Target: LAMA2; (-) strand; PAM type: NRG; PAM sequence: AAG
aacagaaaaaattttaatcc

SEQ ID NO: 89633 - DNA, 20 bp, Artificial Sequence
  Description of Artificial Sequence: Synthetic oligonucleotide
  Target: LAMA2; (-) strand; PAM type: NRG; PAM sequence: CAG
atcaatgctgattaaaataa

SEQ ID NO: 89634 - DNA, 20 bp, Artificial Sequence
  Description of Artificial Sequence: Synthetic oligonucleotide
  Target: LAMA2; (-) strand; PAM type: NRG; PAM sequence: AAG
gtctctgccaagaaaacaaa

SEQ ID NO: 89635 - DNA, 20 bp, Artificial Sequence
  Description of Artificial Sequence: Synthetic oligonucleotide
  Target: LAMA2; (-) strand; PAM type: NRG; PAM sequence: AAG
attttttcaaggtctctgcc

SEQ ID NO: 89636 - DNA, 20 bp, Artificial Sequence
  Description of Artificial Sequence: Synthetic oligonucleotide
  Target: LAMA2; (-) strand; PAM type: NRG; PAM sequence: AGG
tagggttcaaaattttttca

SEQ ID NO: 89637 - DNA, 20 bp, Artificial Sequence
  Description of Artificial Sequence: Synthetic oligonucleotide
  Target: LAMA2; (-) strand; PAM type: NRG; PAM sequence: AAG
ctagggttcaaaattttttc

SEQ ID NO: 89638 - DNA, 20 bp, Artificial Sequence
  Description of Artificial Sequence: Synthetic oligonucleotide
  Target: LAMA2; (-) strand; PAM type: NRG; PAM sequence: GGG
cagagatttcttattgacta

SEQ ID NO: 89639 - DNA, 20 bp, Artificial Sequence
  Description of Artificial Sequence: Synthetic oligonucleotide
  Target: LAMA2; (-) strand; PAM type: NRG; PAM sequence: AGG
acagagatttcttattgact

SEQ ID NO: 89640 - DNA, 20 bp, Artificial Sequence
  Description of Artificial Sequence: Synthetic oligonucleotide
  Target: LAMA2; (-) strand; PAM type: NRG; PAM sequence: TAG
tacagagatttcttattgac

SEQ ID NO: 89641 - DNA, 20 bp, Artificial Sequence
  Description of Artificial Sequence: Synthetic oligonucleotide
  Target: LAMA2; (-) strand; PAM type: NRG; PAM sequence: GAG
tatagttttatattaataca

SEQ ID NO: 89642 - DNA, 20 bp, Artificial Sequence
  Description of Artificial Sequence: Synthetic oligonucleotide
  Target: LAMA2; (-) strand; PAM type: NRG; PAM sequence: CAG
gttatagttttatattaata

SEQ ID NO: 89643 - DNA, 20 bp, Artificial Sequence
  Description of Artificial Sequence: Synthetic oligonucleotide
  Target: LAMA2; (-) strand; PAM type: NRG; PAM sequence: TAG
atcaaataaaccataagtta

SEQ ID NO: 89644 - DNA, 20 bp, Artificial Sequence
  Description of Artificial Sequence: Synthetic oligonucleotide
  Target: LAMA2; (-) strand; PAM type: NRG; PAM sequence: AAG
gatctaatcaaataaaccat

SEQ ID NO: 89645 - DNA, 20 bp, Artificial Sequence
  Description of Artificial Sequence: Synthetic oligonucleotide
  Target: LAMA2; (-) strand; PAM type: NRG; PAM sequence: CAG
ttaatttgtgtgtaaatatt

SEQ ID NO: 89646 - DNA, 20 bp, Artificial Sequence
  Description of Artificial Sequence: Synthetic oligonucleotide
  Target: LAMA2; (-) strand; PAM type: NRG; PAM sequence: TAG
ttagcacttttactatgggc

SEQ ID NO: 89647 - DNA, 20 bp, Artificial Sequence
  Description of Artificial Sequence: Synthetic oligonucleotide
  Target: LAMA2; (-) strand; PAM type: NRG; PAM sequence: GGG
tccattagcacttttactat

SEQ ID NO: 89648 - DNA, 20 bp, Artificial Sequence
  Description of Artificial Sequence: Synthetic oligonucleotide
  Target: LAMA2; (-) strand; PAM type: NRG; PAM sequence: TGG
ttccattagcacttttacta

SEQ ID NO: 89649 - DNA, 20 bp, Artificial Sequence
  Description of Artificial Sequence: Synthetic oligonucleotide
  Target: LAMA2; (-) strand; PAM type: NRG; PAM sequence: TAG
gtttggatgaaacattccat

SEQ ID NO: 89650 - DNA, 20 bp, Artificial Sequence
  Description of Artificial Sequence: Synthetic oligonucleotide
  Target: LAMA2; (-) strand; PAM type: NRG; PAM sequence: TGG
tccatttactaacttatgtt

SEQ ID NO: 89651 - DNA, 20 bp, Artificial Sequence
  Description of Artificial Sequence: Synthetic oligonucleotide
  Target: LAMA2; (-) strand; PAM type: NRG; PAM sequence: CAG
caaaaacagggtctttgcaa

SEQ ID NO: 89652 - DNA, 20 bp, Artificial Sequence
  Description of Artificial Sequence: Synthetic oligonucleotide
  Target: LAMA2; (-) strand; PAM type: NRG; PAM sequence: GGG
taggcccagacccaaaaaca

SEQ ID NO: 89653 - DNA, 20 bp, Artificial Sequence
  Description of Artificial Sequence: Synthetic oligonucleotide
  Target: LAMA2; (-) strand; PAM type: NRG; PAM sequence: AGG
ttaggcccagacccaaaaac

SEQ ID NO: 89654 - DNA, 20 bp, Artificial Sequence
  Description of Artificial Sequence: Synthetic oligonucleotide
  Target: LAMA2; (-) strand; PAM type: NRG; PAM sequence: CAG
gttaggcccagacccaaaaa

SEQ ID NO: 89655 - DNA, 20 bp, Artificial Sequence
  Description of Artificial Sequence: Synthetic oligonucleotide
  Target: LAMA2; (-) strand; PAM type: NRG; PAM sequence: CAG
gtgcttcgtgctgttaggcc

SEQ ID NO: 89656 - DNA, 20 bp, Artificial Sequence
  Description of Artificial Sequence: Synthetic oligonucleotide
  Target: LAMA2; (-) strand; PAM type: NRG; PAM sequence: AGG
ctgaagtgcttcgtgctgtt

SEQ ID NO: 89657 - DNA, 20 bp, Artificial Sequence
  Description of Artificial Sequence: Synthetic oligonucleotide
  Target: LAMA2; (-) strand; PAM type: NRG; PAM sequence: TAG
tctgaagtgcttcgtgctgt

SEQ ID NO: 89658 - DNA, 20 bp, Artificial Sequence
  Description of Artificial Sequence: Synthetic oligonucleotide
  Target: LAMA2; (-) strand; PAM type: NRG; PAM sequence: AAG
ggtagtggtgaaattctctg

SEQ ID NO: 89659 - DNA, 20 bp, Artificial Sequence
  Description of Artificial Sequence: Synthetic oligonucleotide
  Target: LAMA2; (-) strand; PAM type: NRG; PAM sequence: TGG
cagatgtgagtaaatggtag

SEQ ID NO: 89660 - DNA, 20 bp, Artificial Sequence
  Description of Artificial Sequence: Synthetic oligonucleotide
  Target: LAMA2; (-) strand; PAM type: NRG; PAM sequence: TAG
caacagatgtgagtaaatgg

SEQ ID NO: 89661 - DNA, 20 bp, Artificial Sequence
  Description of Artificial Sequence: Synthetic oligonucleotide
  Target: LAMA2; (-) strand; PAM type: NRG; PAM sequence: TGG
tctcaacagatgtgagtaaa

SEQ ID NO: 89662 - DNA, 20 bp, Artificial Sequence
  Description of Artificial Sequence: Synthetic oligonucleotide
  Target: LAMA2; (-) strand; PAM type: NRG; PAM sequence: GAG
agtacaatctcaacagatgt

SEQ ID NO: 89663 - DNA, 20 bp, Artificial Sequence
  Description of Artificial Sequence: Synthetic oligonucleotide
  Target: LAMA2; (-) strand; PAM type: NRG; PAM sequence: CAG
ttgaaatagtacaatctcaa

SEQ ID NO: 89664 - DNA, 20 bp, Artificial Sequence
  Description of Artificial Sequence: Synthetic oligonucleotide
  Target: LAMA2; (-) strand; PAM type: NRG; PAM sequence: TAG
gatcaaatcttgagttgaaa

SEQ ID NO: 89665 - DNA, 20 bp, Artificial Sequence
  Description of Artificial Sequence: Synthetic oligonucleotide
  Target: LAMA2; (-) strand; PAM type: NRG; PAM sequence: GAG
acatacactgatcaaatctt

SEQ ID NO: 89666 - DNA, 20 bp, Artificial Sequence
  Description of Artificial Sequence: Synthetic oligonucleotide
  Target: LAMA2; (-) strand; PAM type: NRG; PAM sequence: TAG
ttcctttaagttttctgact

SEQ ID NO: 89667 - DNA, 20 bp, Artificial Sequence
  Description of Artificial Sequence: Synthetic oligonucleotide
  Target: LAMA2; (-) strand; PAM type: NRG; PAM sequence: AAG
gagtatttaatgtttccttt

SEQ ID NO: 89668 - DNA, 20 bp, Artificial Sequence
  Description of Artificial Sequence: Synthetic oligonucleotide
  Target: LAMA2; (-) strand; PAM type: NRG; PAM sequence: GAG
caacattccatataggaaat

SEQ ID NO: 89669 - DNA, 20 bp, Artificial Sequence
  Description of Artificial Sequence: Synthetic oligonucleotide
  Target: LAMA2; (-) strand; PAM type: NRG; PAM sequence: AGG
agaaaggcaacattccatat

SEQ ID NO: 89670 - DNA, 20 bp, Artificial Sequence
  Description of Artificial Sequence: Synthetic oligonucleotide
  Target: LAMA2; (-) strand; PAM type: NRG; PAM sequence: TAG
tagaaaggcaacattccata

SEQ ID NO: 89671 - DNA, 20 bp, Artificial Sequence
  Description of Artificial Sequence: Synthetic oligonucleotide
  Target: LAMA2; (-) strand; PAM type: NRG; PAM sequence: AGG
agaagatgatgtgcttagaa

SEQ ID NO: 89672 - DNA, 20 bp, Artificial Sequence
  Description of Artificial Sequence: Synthetic oligonucleotide
  Target: LAMA2; (-) strand; PAM type: NRG; PAM sequence: AAG
aagaagatgatgtgcttaga

SEQ ID NO: 89673 - DNA, 20 bp, Artificial Sequence
  Description of Artificial Sequence: Synthetic oligonucleotide
  Target: LAMA2; (-) strand; PAM type: NRG; PAM sequence: TAG
atagaagaagatgatgtgct

SEQ ID NO: 89674 - DNA, 20 bp, Artificial Sequence
  Description of Artificial Sequence: Synthetic oligonucleotide
  Target: LAMA2; (-) strand; PAM type: NRG; PAM sequence: AAG
tgcaaaacatcacatagaag

SEQ ID NO: 89675 - DNA, 20 bp, Artificial Sequence
  Description of Artificial Sequence: Synthetic oligonucleotide
  Target: LAMA2; (-) strand; PAM type: NRG; PAM sequence: AAG
atttgcaaaacatcacatag

SEQ ID NO: 89676 - DNA, 20 bp, Artificial Sequence
  Description of Artificial Sequence: Synthetic oligonucleotide
  Target: LAMA2; (-) strand; PAM type: NRG; PAM sequence: TAG
tagatttgcaaaacatcaca

SEQ ID NO: 89677 - DNA, 20 bp, Artificial Sequence
  Description of Artificial Sequence: Synthetic oligonucleotide
  Target: LAMA2; (-) strand; PAM type: NRG; PAM sequence: TAG
aaatataaatctcctatgaa

SEQ ID NO: 89678 - DNA, 20 bp, Artificial Sequence
  Description of Artificial Sequence: Synthetic oligonucleotide
  Target: LAMA2; (-) strand; PAM type: NRG; PAM sequence: GAG
tccccaacacagatccattt

SEQ ID NO: 89679 - DNA, 20 bp, Artificial Sequence
  Description of Artificial Sequence: Synthetic oligonucleotide
  Target: LAMA2; (-) strand; PAM type: NRG; PAM sequence: CAG
tcacgtatctttccccaaca

SEQ ID NO: 89680 - DNA, 20 bp, Artificial Sequence
  Description of Artificial Sequence: Synthetic oligonucleotide
  Target: LAMA2; (-) strand; PAM type: NRG; PAM sequence: TAG
aaattttaaaacaaatggat

SEQ ID NO: 89681 - DNA, 20 bp, Artificial Sequence
  Description of Artificial Sequence: Synthetic oligonucleotide
  Target: LAMA2; (-) strand; PAM type: NRG; PAM sequence: TGG
agacaaaattttaaaacaaa

SEQ ID NO: 89682 - DNA, 20 bp, Artificial Sequence
  Description of Artificial Sequence: Synthetic oligonucleotide
  Target: LAMA2; (-) strand; PAM type: NRG; PAM sequence: CAG
gtccaacaaaatgtggtagg

SEQ ID NO: 89683 - DNA, 20 bp, Artificial Sequence
  Description of Artificial Sequence: Synthetic oligonucleotide
  Target: LAMA2; (-) strand; PAM type: NRG; PAM sequence: AGG
gaagtccaacaaaatgtggt

SEQ ID NO: 89684 - DNA, 20 bp, Artificial Sequence
  Description of Artificial Sequence: Synthetic oligonucleotide
  Target: LAMA2; (-) strand; PAM type: NRG; PAM sequence: TAG
agaagtccaacaaaatgtgg

SEQ ID NO: 89685 - DNA, 20 bp, Artificial Sequence
  Description of Artificial Sequence: Synthetic oligonucleotide
  Target: LAMA2; (-) strand; PAM type: NRG; PAM sequence: TGG
acaagaagtccaacaaaatg

SEQ ID NO: 89686 - DNA, 20 bp, Artificial Sequence
  Description of Artificial Sequence: Synthetic oligonucleotide
  Target: LAMA2; (-) strand; PAM type: NRG; PAM sequence: AAG
aggagttctcatataacaag

SEQ ID NO: 89687 - DNA, 20 bp, Artificial Sequence
  Description of Artificial Sequence: Synthetic oligonucleotide
  Target: LAMA2; (-) strand; PAM type: NRG; PAM sequence: AAG
attaggagttctcatataac

SEQ ID NO: 89688 - DNA, 20 bp, Artificial Sequence
  Description of Artificial Sequence: Synthetic oligonucleotide
  Target: LAMA2; (-) strand; PAM type: NRG; PAM sequence: GAG
attgaaaaccagacaattag

SEQ ID NO: 89689 - DNA, 20 bp, Artificial Sequence
  Description of Artificial Sequence: Synthetic oligonucleotide
  Target: LAMA2; (-) strand; PAM type: NRG; PAM sequence: AGG
caattgaaaaccagacaatt

SEQ ID NO: 89690 - DNA, 20 bp, Artificial Sequence
  Description of Artificial Sequence: Synthetic oligonucleotide
  Target: LAMA2; (-) strand; PAM type: NRG; PAM sequence: TAG
gcaattgaaaaccagacaat

SEQ ID NO: 89691 - DNA, 20 bp, Artificial Sequence
  Description of Artificial Sequence: Synthetic oligonucleotide
  Target: LAMA2; (-) strand; PAM type: NRG; PAM sequence: CAG
ttttggctgcaattgaaaac

SEQ ID NO: 89692 - DNA, 20 bp, Artificial Sequence
  Description of Artificial Sequence: Synthetic oligonucleotide
  Target: LAMA2; (-) strand; PAM type: NRG; PAM sequence: TGG
tgatcaggtaagaatgcttt

SEQ ID NO: 89693 - DNA, 20 bp, Artificial Sequence
  Description of Artificial Sequence: Synthetic oligonucleotide
  Target: LAMA2; (-) strand; PAM type: NRG; PAM sequence: AAG
tttgaagagtttgatcaggt

SEQ ID NO: 89694 - DNA, 20 bp, Artificial Sequence
  Description of Artificial Sequence: Synthetic oligonucleotide
  Target: LAMA2; (-) strand; PAM type: NRG; PAM sequence: AGG
agaatttgaagagtttgatc

SEQ ID NO: 89695 - DNA, 20 bp, Artificial Sequence
  Description of Artificial Sequence: Synthetic oligonucleotide
  Target: LAMA2; (-) strand; PAM type: NRG; PAM sequence: CAG
tagaatttgaagagtttgat

SEQ ID NO: 89696 - DNA, 20 bp, Artificial Sequence
  Description of Artificial Sequence: Synthetic oligonucleotide
  Target: LAMA2; (-) strand; PAM type: NRG; PAM sequence: GAG
caaagtaaatagaatttgaa

SEQ ID NO: 89697 - DNA, 20 bp, Artificial Sequence
  Description of Artificial Sequence: Synthetic oligonucleotide
  Target: LAMA2; (-) strand; PAM type: NRG; PAM sequence: AAG
ttcaaagtaaatagaatttg

SEQ ID NO: 89698 - DNA, 20 bp, Artificial Sequence
  Description of Artificial Sequence: Synthetic oligonucleotide
  Target: LAMA2; (-) strand; PAM type: NRG; PAM sequence: TAG
cagctataattcaaagtaaa

SEQ ID NO: 89699 - DNA, 20 bp, Artificial Sequence
  Description of Artificial Sequence: Synthetic oligonucleotide
  Target: LAMA2; (-) strand; PAM type: NRG; PAM sequence: AAG
atgtactcagctataattca

SEQ ID NO: 89700 - DNA, 20 bp, Artificial Sequence
  Description of Artificial Sequence: Synthetic oligonucleotide
  Target: LAMA2; (-) strand; PAM type: NRG; PAM sequence: CAG
aattatactttccatgtact

SEQ ID NO: 89701 - DNA, 20 bp, Artificial Sequence
  Description of Artificial Sequence: Synthetic oligonucleotide
  Target: LAMA2; (-) strand; PAM type: NRG; PAM sequence: AGG
gtctgctgtgtaacaaagta

SEQ ID NO: 89702 - DNA, 20 bp, Artificial Sequence
  Description of Artificial Sequence: Synthetic oligonucleotide
  Target: LAMA2; (-) strand; PAM type: NRG; PAM sequence: AAG
tgtctgctgtgtaacaaagt

SEQ ID NO: 89703 - DNA, 20 bp, Artificial Sequence
  Description of Artificial Sequence: Synthetic oligonucleotide
  Target: LAMA2; (-) strand; PAM type: NRG; PAM sequence: AAG
gttttgtctgctgtgtaaca

SEQ ID NO: 89704 - DNA, 20 bp, Artificial Sequence
  Description of Artificial Sequence: Synthetic oligonucleotide
  Target: LAMA2; (-) strand; PAM type: NRG; PAM sequence: GAG
gaatagcactgacctatctt

SEQ ID NO: 89705 - DNA, 20 bp, Artificial Sequence
  Description of Artificial Sequence: Synthetic oligonucleotide
  Target: LAMA2; (-) strand; PAM type: NRG; PAM sequence: TAG
aaaatgtttattcactggaa

SEQ ID NO: 89706 - DNA, 20 bp, Artificial Sequence
  Description of Artificial Sequence: Synthetic oligonucleotide
  Target: LAMA2; (-) strand; PAM type: NRG; PAM sequence: TGG
ttgttaaaatgtttattcac

SEQ ID NO: 89707 - DNA, 20 bp, Artificial Sequence
  Description of Artificial Sequence: Synthetic oligonucleotide
  Target: LAMA2; (-) strand; PAM type: NRG; PAM sequence: AGG
ggcatatagagaggaatgag

SEQ ID NO: 89708 - DNA, 20 bp, Artificial Sequence
  Description of Artificial Sequence: Synthetic oligonucleotide
  Target: LAMA2; (-) strand; PAM type: NRG; PAM sequence: GAG
aggcatatagagaggaatga

SEQ ID NO: 89709 - DNA, 20 bp, Artificial Sequence
  Description of Artificial Sequence: Synthetic oligonucleotide
  Target: LAMA2; (-) strand; PAM type: NRG; PAM sequence: GAG
aaaggcatatagagaggaat

SEQ ID NO: 89710 - DNA, 20 bp, Artificial Sequence
  Description of Artificial Sequence: Synthetic oligonucleotide
  Target: LAMA2; (-) strand; PAM type: NRG; PAM sequence: AGG
actgtgaaaggcatatagag

SEQ ID NO: 89711 - DNA, 20 bp, Artificial Sequence
  Description of Artificial Sequence: Synthetic oligonucleotide
  Target: LAMA2; (-) strand; PAM type: NRG; PAM sequence: GAG
aactgtgaaaggcatataga

SEQ ID NO: 89712 - DNA, 20 bp, Artificial Sequence
  Description of Artificial Sequence: Synthetic oligonucleotide
  Target: LAMA2; (-) strand; PAM type: NRG; PAM sequence: GAG
gtaactgtgaaaggcatata

SEQ ID NO: 89713 - DNA, 20 bp, Artificial Sequence
  Description of Artificial Sequence: Synthetic oligonucleotide
  Target: LAMA2; (-) strand; PAM type: NRG; PAM sequence: TAG
gagtaactgtgaaaggcata

SEQ ID NO: 89714 - DNA, 20 bp, Artificial Sequence
  Description of Artificial Sequence: Synthetic oligonucleotide
  Target: LAMA2; (-) strand; PAM type: NRG; PAM sequence: AGG
ggaaaaagagtaactgtgaa

SEQ ID NO: 89715 - DNA, 20 bp, Artificial Sequence
  Description of Artificial Sequence: Synthetic oligonucleotide
  Target: LAMA2; (-) strand; PAM type: NRG; PAM sequence: AAG
gggaaaaagagtaactgtga

SEQ ID NO: 89716 - DNA, 20 bp, Artificial Sequence
  Description of Artificial Sequence: Synthetic oligonucleotide
  Target: LAMA2; (-) strand; PAM type: NRG; PAM sequence: GAG
ttgattggcaaggggaaaaa

SEQ ID NO: 89717 - DNA, 20 bp, Artificial Sequence
  Description of Artificial Sequence: Synthetic oligonucleotide
  Target: LAMA2; (-) strand; PAM type: NRG; PAM sequence: AAG
ttttgattggcaaggggaaa

SEQ ID NO: 89718 - DNA, 20 bp, Artificial Sequence
  Description of Artificial Sequence: Synthetic oligonucleotide
  Target: LAMA2; (-) strand; PAM type: NRG; PAM sequence: GGG
atagtgttttgattggcaag

SEQ ID NO: 89719 - DNA, 20 bp, Artificial Sequence
  Description of Artificial Sequence: Synthetic oligonucleotide
  Target: LAMA2; (-) strand; PAM type: NRG; PAM sequence: GGG
tatagtgttttgattggcaa

SEQ ID NO: 89720 - DNA, 20 bp, Artificial Sequence
  Description of Artificial Sequence: Synthetic oligonucleotide
  Target: LAMA2; (-) strand; PAM type: NRG; PAM sequence: AGG
ttatagtgttttgattggca

SEQ ID NO: 89721 - DNA, 20 bp, Artificial Sequence
  Description of Artificial Sequence: Synthetic oligonucleotide
  Target: LAMA2; (-) strand; PAM type: NRG; PAM sequence: AAG
attatagtgttttgattggc

SEQ ID NO: 89722 - DNA, 20 bp, Artificial Sequence
  Description of Artificial Sequence: Synthetic oligonucleotide
  Target: LAMA2; (-) strand; PAM type: NRG; PAM sequence: TGG
attcattatagtgttttgat

SEQ ID NO: 89723 - DNA, 20 bp, Artificial Sequence
  Description of Artificial Sequence: Synthetic oligonucleotide
  Target: LAMA2; (-) strand; PAM type: NRG; PAM sequence: TAG
aggccaagagatattcatta

SEQ ID NO: 89724 - DNA, 20 bp, Artificial Sequence
  Description of Artificial Sequence: Synthetic oligonucleotide
  Target: LAMA2; (-) strand; PAM type: NRG; PAM sequence: GAG
tttcttatcgttaaggccaa

SEQ ID NO: 89725 - DNA, 20 bp, Artificial Sequence
  Description of Artificial Sequence: Synthetic oligonucleotide
  Target: LAMA2; (-) strand; PAM type: NRG; PAM sequence: AAG
tgtttcttatcgttaaggcc

SEQ ID NO: 89726 - DNA, 20 bp, Artificial Sequence
  Description of Artificial Sequence: Synthetic oligonucleotide
  Target: LAMA2; (-) strand; PAM type: NRG; PAM sequence: AGG
tacagtgtttcttatcgtta

SEQ ID NO: 89727 - DNA, 20 bp, Artificial Sequence
  Description of Artificial Sequence: Synthetic oligonucleotide
  Target: LAMA2; (-) strand; PAM type: NRG; PAM sequence: AAG
atacagtgtttcttatcgtt

SEQ ID NO: 89728 - DNA, 20 bp, Artificial Sequence
  Description of Artificial Sequence: Synthetic oligonucleotide
  Target: LAMA2; (-) strand; PAM type: NRG; PAM sequence: CAG
gcctagacaatatttatata

SEQ ID NO: 89729 - DNA, 20 bp, Artificial Sequence
  Description of Artificial Sequence: Synthetic oligonucleotide
  Target: LAMA2; (-) strand; PAM type: NRG; PAM sequence: TAG
cattctcataaaatacagcc

SEQ ID NO: 89730 - DNA, 20 bp, Artificial Sequence
  Description of Artificial Sequence: Synthetic oligonucleotide
  Target: LAMA2; (-) strand; PAM type: NRG; PAM sequence: CAG
ctccacattctcataaaata

SEQ ID NO: 89731 - DNA, 20 bp, Artificial Sequence
  Description of Artificial Sequence: Synthetic oligonucleotide
  Target: LAMA2; (-) strand; PAM type: NRG; PAM sequence: AGG
tcagcccgtccactgctcac

SEQ ID NO: 89732 - DNA, 20 bp, Artificial Sequence
  Description of Artificial Sequence: Synthetic oligonucleotide
  Target: LAMA2; (-) strand; PAM type: NRG; PAM sequence: CAG
ctcagcccgtccactgctca

SEQ ID NO: 89733 - DNA, 20 bp, Artificial Sequence
  Description of Artificial Sequence: Synthetic oligonucleotide
  Target: LAMA2; (-) strand; PAM type: NRG; PAM sequence: CAG
ttatcagtgtcctagaagct

SEQ ID NO: 89734 - DNA, 20 bp, Artificial Sequence
  Description of Artificial Sequence: Synthetic oligonucleotide
  Target: LAMA2; (-) strand; PAM type: NRG; PAM sequence: AAG
attgcttatcagtgtcctag

SEQ ID NO: 89735 - DNA, 20 bp, Artificial Sequence
  Description of Artificial Sequence: Synthetic oligonucleotide
  Target: LAMA2; (-) strand; PAM type: NRG; PAM sequence: TAG
ctgattgcttatcagtgtcc

SEQ ID NO: 89736 - DNA, 20 bp, Artificial Sequence
  Description of Artificial Sequence: Synthetic oligonucleotide
  Target: LAMA2; (-) strand; PAM type: NRG; PAM sequence: CAG
aactaacactgattgcttat

SEQ ID NO: 89737 - DNA, 20 bp, Artificial Sequence
  Description of Artificial Sequence: Synthetic oligonucleotide
  Target: LAMA2; (-) strand; PAM type: NRG; PAM sequence: AAG
accaccagagatactgcctc

SEQ ID NO: 89738 - DNA, 20 bp, Artificial Sequence
  Description of Artificial Sequence: Synthetic oligonucleotide
  Target: LAMA2; (-) strand; PAM type: NRG; PAM sequence: GAG
agttctggaacagaccacca

SEQ ID NO: 89739 - DNA, 20 bp, Artificial Sequence
  Description of Artificial Sequence: Synthetic oligonucleotide
  Target: LAMA2; (-) strand; PAM type: NRG; PAM sequence: CAG
atagttctggaacagaccac

SEQ ID NO: 89740 - DNA, 20 bp, Artificial Sequence
  Description of Artificial Sequence: Synthetic oligonucleotide
  Target: LAMA2; (-) strand; PAM type: NRG; PAM sequence: CAG
tcaaggacatagttctggaa

SEQ ID NO: 89741 - DNA, 20 bp, Artificial Sequence
  Description of Artificial Sequence: Synthetic oligonucleotide
  Target: LAMA2; (-) strand; PAM type: NRG; PAM sequence: TGG
cagagtcaaggacatagttc

SEQ ID NO: 89742 - DNA, 20 bp, Artificial Sequence
  Description of Artificial Sequence: Synthetic oligonucleotide
  Target: LAMA2; (-) strand; PAM type: NRG; PAM sequence: TAG
atgtgacagagtcaaggaca

SEQ ID NO: 89743 - DNA, 20 bp, Artificial Sequence
  Description of Artificial Sequence: Synthetic oligonucleotide
  Target: LAMA2; (-) strand; PAM type: NRG; PAM sequence: AGG
gtatgaatgtgacagagtca

SEQ ID NO: 89744 - DNA, 20 bp, Artificial Sequence
  Description of Artificial Sequence: Synthetic oligonucleotide
  Target: LAMA2; (-) strand; PAM type: NRG; PAM sequence: AAG
agtatgaatgtgacagagtc

SEQ ID NO: 89745 - DNA, 20 bp, Artificial Sequence
  Description of Artificial Sequence: Synthetic oligonucleotide
  Target: LAMA2; (-) strand; PAM type: NRG; PAM sequence: GAG
tgaaaagtatgaatgtgaca

SEQ ID NO: 89746 - DNA, 20 bp, Artificial Sequence
  Description of Artificial Sequence: Synthetic oligonucleotide
  Target: LAMA2; (-) strand; PAM type: NRG; PAM sequence: CAG
gatgaaaagtatgaatgtga

SEQ ID NO: 89747 - DNA, 20 bp, Artificial Sequence
  Description of Artificial Sequence: Synthetic oligonucleotide
  Target: LAMA2; (-) strand; PAM type: NRG; PAM sequence: AAG
gtataaaaagtagtgatgaa

SEQ ID NO: 89748 - DNA, 20 bp, Artificial Sequence
  Description of Artificial Sequence: Synthetic oligonucleotide
  Target: LAMA2; (-) strand; PAM type: NRG; PAM sequence: TAG
aattgcagaagtataaaaag

SEQ ID NO: 89749 - DNA, 20 bp, Artificial Sequence
  Description of Artificial Sequence: Synthetic oligonucleotide
  Target: LAMA2; (-) strand; PAM type: NRG; PAM sequence: AAG
ctaaattgcagaagtataaa

SEQ ID NO: 89750 - DNA, 20 bp, Artificial Sequence
  Description of Artificial Sequence: Synthetic oligonucleotide
  Target: LAMA2; (-) strand; PAM type: NRG; PAM sequence: AAG
ttgggtgacctaaattgcag

SEQ ID NO: 89751 - DNA, 20 bp, Artificial Sequence
  Description of Artificial Sequence: Synthetic oligonucleotide
  Target: LAMA2; (-) strand; PAM type: NRG; PAM sequence: CAG
gtattgggtgacctaaattg

SEQ ID NO: 89752 - DNA, 20 bp, Artificial Sequence
  Description of Artificial Sequence: Synthetic oligonucleotide
  Target: LAMA2; (-) strand; PAM type: NRG; PAM sequence: GGG
ctgataagataacctgtatt

SEQ ID NO: 89753 - DNA, 20 bp, Artificial Sequence
  Description of Artificial Sequence: Synthetic oligonucleotide
  Target: LAMA2; (-) strand; PAM type: NRG; PAM sequence: TGG
cctgataagataacctgtat

SEQ ID NO: 89754 - DNA, 20 bp, Artificial Sequence
  Description of Artificial Sequence: Synthetic oligonucleotide
  Target: LAMA2; (-) strand; PAM type: NRG; PAM sequence: AAG
tacaatcagtttaacctgat

SEQ ID NO: 89755 - DNA, 20 bp, Artificial Sequence
  Description of Artificial Sequence: Synthetic oligonucleotide
  Target: LAMA2; (-) strand; PAM type: NRG; PAM sequence: CAG
ttcaatgtgaccactacaat

SEQ ID NO: 89756 - DNA, 20 bp, Artificial Sequence
  Description of Artificial Sequence: Synthetic oligonucleotide
  Target: LAMA2; (-) strand; PAM type: NRG; PAM sequence: GGG
ttgggaaaagtcctgaattt

SEQ ID NO: 89757 - DNA, 20 bp, Artificial Sequence
  Description of Artificial Sequence: Synthetic oligonucleotide
  Target: LAMA2; (-) strand; PAM type: NRG; PAM sequence: TGG
gttgggaaaagtcctgaatt

SEQ ID NO: 89758 - DNA, 20 bp, Artificial Sequence
  Description of Artificial Sequence: Synthetic oligonucleotide
  Target: LAMA2; (-) strand; PAM type: NRG; PAM sequence: AAG
taattagaactggttgggaa

SEQ ID NO: 89759 - DNA, 20 bp, Artificial Sequence
  Description of Artificial Sequence: Synthetic oligonucleotide
  Target: LAMA2; (-) strand; PAM type: NRG; PAM sequence: GGG
tgcattaattagaactggtt

SEQ ID NO: 89760 - DNA, 20 bp, Artificial Sequence
  Description of Artificial Sequence: Synthetic oligonucleotide
  Target: LAMA2; (-) strand; PAM type: NRG; PAM sequence: TGG
gtgcattaattagaactggt

SEQ ID NO: 89761 - DNA, 20 bp, Artificial Sequence
  Description of Artificial Sequence: Synthetic oligonucleotide
  Target: LAMA2; (-) strand; PAM type: NRG; PAM sequence: TGG
acacgtgcattaattagaac

SEQ ID NO: 89762 - DNA, 20 bp, Artificial Sequence
  Description of Artificial Sequence: Synthetic oligonucleotide
  Target: LAMA2; (-) strand; PAM type: NRG; PAM sequence: TAG
cctttcacacgtgcattaat

SEQ ID NO: 89763 - DNA, 20 bp, Artificial Sequence
  Description of Artificial Sequence: Synthetic oligonucleotide
  Target: LAMA2; (-) strand; PAM type: NRG; PAM sequence: TAG
tagccattagactgttttga

SEQ ID NO: 89764 - DNA, 20 bp, Artificial Sequence
  Description of Artificial Sequence: Synthetic oligonucleotide
  Target: LAMA2; (-) strand; PAM type: NRG; PAM sequence: TAG
ctttttcttcttgtagccat

SEQ ID NO: 89765 - DNA, 20 bp, Artificial Sequence
  Description of Artificial Sequence: Synthetic oligonucleotide
  Target: LAMA2; (-) strand; PAM type: NRG; PAM sequence: TAG
ttcttttctttttcttcttg

SEQ ID NO: 89766 - DNA, 20 bp, Artificial Sequence
  Description of Artificial Sequence: Synthetic oligonucleotide
  Target: LAMA2; (-) strand; PAM type: NRG; PAM sequence: TAG
cctgttacccatcttctcct

SEQ ID NO: 89767 - DNA, 20 bp, Artificial Sequence
  Description of Artificial Sequence: Synthetic oligonucleotide
  Target: LAMA2; (-) strand; PAM type: NRG; PAM sequence: AGG
gatataaataaaaaacctcg

SEQ ID NO: 89768 - DNA, 20 bp, Artificial Sequence
  Description of Artificial Sequence: Synthetic oligonucleotide
  Target: LAMA2; (-) strand; PAM type: NRG; PAM sequence: GAG
ggatataaataaaaaacctc

SEQ ID NO: 89769 - DNA, 20 bp, Artificial Sequence
  Description of Artificial Sequence: Synthetic oligonucleotide
  Target: LAMA2; (-) strand; PAM type: NRG; PAM sequence: GGG
aactgagttatgcagtccag

SEQ ID NO: 89770 - DNA, 20 bp, Artificial Sequence
  Description of Artificial Sequence: Synthetic oligonucleotide
  Target: LAMA2; (-) strand; PAM type: NRG; PAM sequence: GGG
aaactgagttatgcagtcca

SEQ ID NO: 89771 - DNA, 20 bp, Artificial Sequence
  Description of Artificial Sequence: Synthetic oligonucleotide
  Target: LAMA2; (-) strand; PAM type: NRG; PAM sequence: AGG
taaactgagttatgcagtcc

SEQ ID NO: 89772 - DNA, 20 bp, Artificial Sequence
  Description of Artificial Sequence: Synthetic oligonucleotide
  Target: LAMA2; (-) strand; PAM type: NRG; PAM sequence: CAG
ataaactgagttatgcagtc

SEQ ID NO: 89773 - DNA, 20 bp, Artificial Sequence
  Description of Artificial Sequence: Synthetic oligonucleotide
  Target: LAMA2; (-) strand; PAM type: NRG; PAM sequence: CAG
agggaataaactgagttatg

SEQ ID NO: 89774 - DNA, 20 bp, Artificial Sequence
  Description of Artificial Sequence: Synthetic oligonucleotide
  Target: LAMA2; (-) strand; PAM type: NRG; PAM sequence: GAG
ggtttagaagggaataaact

SEQ ID NO: 89775 - DNA, 20 bp, Artificial Sequence
  Description of Artificial Sequence: Synthetic oligonucleotide
  Target: LAMA2; (-) strand; PAM type: NRG; PAM sequence: GGG
ctagaaaagttggtttagaa

SEQ ID NO: 89776 - DNA, 20 bp, Artificial Sequence
  Description of Artificial Sequence: Synthetic oligonucleotide
  Target: LAMA2; (-) strand; PAM type: NRG; PAM sequence: AGG
tctagaaaagttggtttaga

SEQ ID NO: 89777 - DNA, 20 bp, Artificial Sequence
  Description of Artificial Sequence: Synthetic oligonucleotide
  Target: LAMA2; (-) strand; PAM type: NRG; PAM sequence: AAG
ttctagaaaagttggtttag

SEQ ID NO: 89778 - DNA, 20 bp, Artificial Sequence
  Description of Artificial Sequence: Synthetic oligonucleotide
  Target: LAMA2; (-) strand; PAM type: NRG; PAM sequence: TAG
acattctagaaaagttggtt

SEQ ID NO: 89779 - DNA, 20 bp, Artificial Sequence
  Description of Artificial Sequence: Synthetic oligonucleotide
  Target: LAMA2; (-) strand; PAM type: NRG; PAM sequence: TGG
acaacacattctagaaaagt

SEQ ID NO: 89780 - DNA, 20 bp, Artificial Sequence
  Description of Artificial Sequence: Synthetic oligonucleotide
  Target: LAMA2; (-) strand; PAM type: NRG; PAM sequence: AAG
agagacaacacattctagaa

SEQ ID NO: 89781 - DNA, 20 bp, Artificial Sequence
  Description of Artificial Sequence: Synthetic oligonucleotide
  Target: LAMA2; (-) strand; PAM type: NRG; PAM sequence: TAG
cgaacagagacaacacattc

SEQ ID NO: 89782 - DNA, 20 bp, Artificial Sequence
  Description of Artificial Sequence: Synthetic oligonucleotide
  Target: LAMA2; (-) strand; PAM type: NRG; PAM sequence: GAG
agagttgtaggtgtcgaaca

SEQ ID NO: 89783 - DNA, 20 bp, Artificial Sequence
  Description of Artificial Sequence: Synthetic oligonucleotide
  Target: LAMA2; (-) strand; PAM type: NRG; PAM sequence: CAG
ccagagttgtaggtgtcgaa

SEQ ID NO: 89784 - DNA, 20 bp, Artificial Sequence
  Description of Artificial Sequence: Synthetic oligonucleotide
  Target: LAMA2; (-) strand; PAM type: NRG; PAM sequence: AGG
agaaaatgaaccagagttgt

SEQ ID NO: 89785 - DNA, 20 bp, Artificial Sequence
  Description of Artificial Sequence: Synthetic oligonucleotide
  Target: LAMA2; (-) strand; PAM type: NRG; PAM sequence: TAG
tagaaaatgaaccagagttg

SEQ ID NO: 89786 - DNA, 20 bp, Artificial Sequence
  Description of Artificial Sequence: Synthetic oligonucleotide
  Target: LAMA2; (-) strand; PAM type: NRG; PAM sequence: GAG
aatgcatagaaaatgaacca

SEQ ID NO: 89787 - DNA, 20 bp, Artificial Sequence
  Description of Artificial Sequence: Synthetic oligonucleotide
  Target: LAMA2; (-) strand; PAM type: NRG; PAM sequence: CAG
ttaatgcatagaaaatgaac

SEQ ID NO: 89788 - DNA, 20 bp, Artificial Sequence
  Description of Artificial Sequence: Synthetic oligonucleotide
  Target: LAMA2; (-) strand; PAM type: NRG; PAM sequence: TAG
gttacatcatccttaatgca

SEQ ID NO: 89789 - DNA, 20 bp, Artificial Sequence
  Description of Artificial Sequence: Synthetic oligonucleotide
  Target: LAMA2; (-) strand; PAM type: NRG; PAM sequence: AAG
aatttacatgagaggtttta

SEQ ID NO: 89790 - DNA, 20 bp, Artificial Sequence
  Description of Artificial Sequence: Synthetic oligonucleotide
  Target: LAMA2; (-) strand; PAM type: NRG; PAM sequence: AGG
acaggcagaatttacatgag

SEQ ID NO: 89791 - DNA, 20 bp, Artificial Sequence
  Description of Artificial Sequence: Synthetic oligonucleotide
  Target: LAMA2; (-) strand; PAM type: NRG; PAM sequence: GAG
aacaggcagaatttacatga

SEQ ID NO: 89792 - DNA, 20 bp, Artificial Sequence
  Description of Artificial Sequence: Synthetic oligonucleotide
  Target: LAMA2; (-) strand; PAM type: NRG; PAM sequence: GAG
aaaacaggcagaatttacat

SEQ ID NO: 89793 - DNA, 20 bp, Artificial Sequence
  Description of Artificial Sequence: Synthetic oligonucleotide
  Target: LAMA2; (-) strand; PAM type: NRG; PAM sequence: CAG
ttgtagaattagaaaacagg

SEQ ID NO: 89794 - DNA, 20 bp, Artificial Sequence
  Description of Artificial Sequence: Synthetic oligonucleotide
  Target: LAMA2; (-) strand; PAM type: NRG; PAM sequence: AGG
ggattgtagaattagaaaac

SEQ ID NO: 89795 - DNA, 20 bp, Artificial Sequence
  Description of Artificial Sequence: Synthetic oligonucleotide
  Target: LAMA2; (-) strand; PAM type: NRG; PAM sequence: CAG
aggattgtagaattagaaaa

SEQ ID NO: 89796 - DNA, 20 bp, Artificial Sequence
  Description of Artificial Sequence: Synthetic oligonucleotide
  Target: LAMA2; (-) strand; PAM type: NRG; PAM sequence: TAG
aaacaagaggattgtagaat

SEQ ID NO: 89797 - DNA, 20 bp, Artificial Sequence
  Description of Artificial Sequence: Synthetic oligonucleotide
  Target: LAMA2; (-) strand; PAM type: NRG; PAM sequence: TAG
gaacataaacaagaggattg

SEQ ID NO: 89798 - DNA, 20 bp, Artificial Sequence
  Description of Artificial Sequence: Synthetic oligonucleotide
  Target: LAMA2; (-) strand; PAM type: NRG; PAM sequence: AGG
tagaatagaacataaacaag

SEQ ID NO: 89799 - DNA, 20 bp, Artificial Sequence
  Description of Artificial Sequence: Synthetic oligonucleotide
  Target: LAMA2; (-) strand; PAM type: NRG; PAM sequence: GAG
ttagaatagaacataaacaa

SEQ ID NO: 89800 - DNA, 20 bp, Artificial Sequence
  Description of Artificial Sequence: Synthetic oligonucleotide
  Target: LAMA2; (-) strand; PAM type: NRG; PAM sequence: AAG
tattagaatagaacataaac

SEQ ID NO: 89801 - DNA, 20 bp, Artificial Sequence
  Description of Artificial Sequence: Synthetic oligonucleotide
  Target: LAMA2; (-) strand; PAM type: NRG; PAM sequence: TAG
aagctcgataattattagaa

SEQ ID NO: 89802 - DNA, 20 bp, Artificial Sequence
  Description of Artificial Sequence: Synthetic oligonucleotide
  Target: LAMA2; (-) strand; PAM type: NRG; PAM sequence: TAG
tttaaaagctcgataattat

SEQ ID NO: 89803 - DNA, 20 bp, Artificial Sequence
  Description of Artificial Sequence: Synthetic oligonucleotide
  Target: LAMA2; (-) strand; PAM type: NRG; PAM sequence: AAG
aacagatttctcttctttaa

SEQ ID NO: 89804 - DNA, 20 bp, Artificial Sequence
  Description of Artificial Sequence: Synthetic oligonucleotide
  Target: LAMA2; (-) strand; PAM type: NRG; PAM sequence: CAG
gtataaatttgagttaagaa

SEQ ID NO: 89805 - DNA, 20 bp, Artificial Sequence
  Description of Artificial Sequence: Synthetic oligonucleotide
  Target: LAMA2; (-) strand; PAM type: NRG; PAM sequence: AAG
tgtatgtataaatttgagtt

SEQ ID NO: 89806 - DNA, 20 bp, Artificial Sequence
  Description of Artificial Sequence: Synthetic oligonucleotide
  Target: LAMA2; (-) strand; PAM type: NRG; PAM sequence: GAG
ttcagtgtatgtataaattt

SEQ ID NO: 89807 - DNA, 20 bp, Artificial Sequence
  Description of Artificial Sequence: Synthetic oligonucleotide
  Target: LAMA2; (-) strand; PAM type: NRG; PAM sequence: CAG
caaggttttgttatttcctt

SEQ ID NO: 89808 - DNA, 20 bp, Artificial Sequence
  Description of Artificial Sequence: Synthetic oligonucleotide
  Target: LAMA2; (-) strand; PAM type: NRG; PAM sequence: AGG
agaaacagtgttttacttca

SEQ ID NO: 89809 - DNA, 20 bp, Artificial Sequence
  Description of Artificial Sequence: Synthetic oligonucleotide
  Target: LAMA2; (-) strand; PAM type: NRG; PAM sequence: AAG
tagaaacagtgttttacttc

SEQ ID NO: 89810 - DNA, 20 bp, Artificial Sequence
  Description of Artificial Sequence: Synthetic oligonucleotide
  Target: LAMA2; (-) strand; PAM type: NRG; PAM sequence: CAG
gctctcttttatcatagaaa

SEQ ID NO: 89811 - DNA, 20 bp, Artificial Sequence
  Description of Artificial Sequence: Synthetic oligonucleotide
  Target: LAMA2; (-) strand; PAM type: NRG; PAM sequence: TAG
tgtagagctctcttttatca

SEQ ID NO: 89812 - DNA, 20 bp, Artificial Sequence
  Description of Artificial Sequence: Synthetic oligonucleotide
  Target: LAMA2; (-) strand; PAM type: NRG; PAM sequence: GAG
tattcatgcatctatttgta

SEQ ID NO: 89813 - DNA, 20 bp, Artificial Sequence
  Description of Artificial Sequence: Synthetic oligonucleotide
  Target: LAMA2; (-) strand; PAM type: NRG; PAM sequence: TAG
tttattcatgcatctatttg

SEQ ID NO: 89814 - DNA, 20 bp, Artificial Sequence
  Description of Artificial Sequence: Synthetic oligonucleotide
  Target: LAMA2; (-) strand; PAM type: NRG; PAM sequence: AAG
aaaaggtatccctcccatag

SEQ ID NO: 89815 - DNA, 20 bp, Artificial Sequence
  Description of Artificial Sequence: Synthetic oligonucleotide
  Target: LAMA2; (-) strand; PAM type: NRG; PAM sequence: TAG
ctgaaaaggtatccctccca

SEQ ID NO: 89816 - DNA, 20 bp, Artificial Sequence
  Description of Artificial Sequence: Synthetic oligonucleotide
  Target: LAMA2; (-) strand; PAM type: NRG; PAM sequence: AGG
gcgagccttaaactctgaaa

SEQ ID NO: 89817 - DNA, 20 bp, Artificial Sequence
  Description of Artificial Sequence: Synthetic oligonucleotide
  Target: LAMA2; (-) strand; PAM type: NRG; PAM sequence: AAG
cgcgagccttaaactctgaa

SEQ ID NO: 89818 - DNA, 20 bp, Artificial Sequence
  Description of Artificial Sequence: Synthetic oligonucleotide
  Target: LAMA2; (-) strand; PAM type: NRG; PAM sequence: GAG
tcttagatcccaaagcccgc

SEQ ID NO: 89819 - DNA, 20 bp, Artificial Sequence
  Description of Artificial Sequence: Synthetic oligonucleotide
  Target: LAMA2; (-) strand; PAM type: NRG; PAM sequence: AAG
attcatcttcttagatccca

SEQ ID NO: 89820 - DNA, 20 bp, Artificial Sequence
  Description of Artificial Sequence: Synthetic oligonucleotide
  Target: LAMA2; (-) strand; PAM type: NRG; PAM sequence: TAG
gggcaagcgattcatcttct

SEQ ID NO: 89821 - DNA, 20 bp, Artificial Sequence
  Description of Artificial Sequence: Synthetic oligonucleotide
  Target: LAMA2; (-) strand; PAM type: NRG; PAM sequence: AAG
tttaggatcacaaacagggc

SEQ ID NO: 89822 - DNA, 20 bp, Artificial Sequence
  Description of Artificial Sequence: Synthetic oligonucleotide
  Target: LAMA2; (-) strand; PAM type: NRG; PAM sequence: GGG
tccatttaggatcacaaaca

SEQ ID NO: 89823 - DNA, 20 bp, Artificial Sequence
  Description of Artificial Sequence: Synthetic oligonucleotide
  Target: LAMA2; (-) strand; PAM type: NRG; PAM sequence: AGG
ttccatttaggatcacaaac

SEQ ID NO: 89824 - DNA, 20 bp, Artificial Sequence
  Description of Artificial Sequence: Synthetic oligonucleotide
  Target: LAMA2; (-) strand; PAM type: NRG; PAM sequence: CAG
tttccatttaggatcacaaa

SEQ ID NO: 89825 - DNA, 20 bp, Artificial Sequence
  Description of Artificial Sequence: Synthetic oligonucleotide
  Target: LAMA2; (-) strand; PAM type: NRG; PAM sequence: AGG
atatctgtcaatttccattt

SEQ ID NO: 89826 - DNA, 20 bp, Artificial Sequence
  Description of Artificial Sequence: Synthetic oligonucleotide
  Target: LAMA2; (-) strand; PAM type: NRG; PAM sequence: TAG
catatctgtcaatttccatt

SEQ ID NO: 89827 - DNA, 20 bp, Artificial Sequence
  Description of Artificial Sequence: Synthetic oligonucleotide
  Target: LAMA2; (-) strand; PAM type: NRG; PAM sequence: AGG
aaggctttataatactgagc

SEQ ID NO: 89828 - DNA, 20 bp, Artificial Sequence
  Description of Artificial Sequence: Synthetic oligonucleotide
  Target: LAMA2; (-) strand; PAM type: NRG; PAM sequence: CAG
aaaggctttataatactgag

SEQ ID NO: 89829 - DNA, 20 bp, Artificial Sequence
  Description of Artificial Sequence: Synthetic oligonucleotide
  Target: LAMA2; (-) strand; PAM type: NRG; PAM sequence: GAG
gaaaaaggctttataatact

SEQ ID NO: 89830 - DNA, 20 bp, Artificial Sequence
  Description of Artificial Sequence: Synthetic oligonucleotide
  Target: LAMA2; (-) strand; PAM type: NRG; PAM sequence: AGG
acaaaaatcaaatgagaaaa

SEQ ID NO: 89831 - DNA, 20 bp, Artificial Sequence
  Description of Artificial Sequence: Synthetic oligonucleotide
  Target: LAMA2; (-) strand; PAM type: NRG; PAM sequence: AAG
cacaaaaatcaaatgagaaa

SEQ ID NO: 89832 - DNA, 20 bp, Artificial Sequence
  Description of Artificial Sequence: Synthetic oligonucleotide
  Target: LAMA2; (-) strand; PAM type: NRG; PAM sequence: GAG
gggatacacaaaaatcaaat

SEQ ID NO: 89833 - DNA, 20 bp, Artificial Sequence
  Description of Artificial Sequence: Synthetic oligonucleotide
  Target: LAMA2; (-) strand; PAM type: NRG; PAM sequence: GGG
ccagagcaaatatttcagga

SEQ ID NO: 89834 - DNA, 20 bp, Artificial Sequence
  Description of Artificial Sequence: Synthetic oligonucleotide
  Target: LAMA2; (-) strand; PAM type: NRG; PAM sequence: AGG
accagagcaaatatttcagg

SEQ ID NO: 89835 - DNA, 20 bp, Artificial Sequence
  Description of Artificial Sequence: Synthetic oligonucleotide
  Target: LAMA2; (-) strand; PAM type: NRG; PAM sequence: GAG
taccagagcaaatatttcag

SEQ ID NO: 89836 - DNA, 20 bp, Artificial Sequence
  Description of Artificial Sequence: Synthetic oligonucleotide
  Target: LAMA2; (-) strand; PAM type: NRG; PAM sequence: AGG
cttaccagagcaaatatttc

SEQ ID NO: 89837 - DNA, 20 bp, Artificial Sequence
  Description of Artificial Sequence: Synthetic oligonucleotide
  Target: LAMA2; (-) strand; PAM type: NRG; PAM sequence: CAG
gcttaccagagcaaatattt

SEQ ID NO: 89838 - DNA, 20 bp, Artificial Sequence
  Description of Artificial Sequence: Synthetic oligonucleotide
  Target: LAMA2; (-) strand; PAM type: NRG; PAM sequence: GAG
atatttgcttttgcttacca

SEQ ID NO: 89839 - DNA, 20 bp, Artificial Sequence
  Description of Artificial Sequence: Synthetic oligonucleotide
  Target: LAMA2; (-) strand; PAM type: NRG; PAM sequence: CAG
taatatttgcttttgcttac

SEQ ID NO: 89840 - DNA, 20 bp, Artificial Sequence
  Description of Artificial Sequence: Synthetic oligonucleotide
  Target: LAMA2; (-) strand; PAM type: NRG; PAM sequence: GAG
cactgttatttcactaaatg

SEQ ID NO: 89841 - DNA, 20 bp, Artificial Sequence
  Description of Artificial Sequence: Synthetic oligonucleotide
  Target: LAMA2; (-) strand; PAM type: NRG; PAM sequence: TGG
atcactgttatttcactaaa

SEQ ID NO: 89842 - DNA, 20 bp, Artificial Sequence
  Description of Artificial Sequence: Synthetic oligonucleotide
  Target: LAMA2; (-) strand; PAM type: NRG; PAM sequence: CAG
aacatttggttctctgatgt

SEQ ID NO: 89843 - DNA, 20 bp, Artificial Sequence
  Description of Artificial Sequence: Synthetic oligonucleotide
  Target: LAMA2; (-) strand; PAM type: NRG; PAM sequence: TGG
tgaaataagcctggaacatt

SEQ ID NO: 89844 - DNA, 20 bp, Artificial Sequence
  Description of Artificial Sequence: Synthetic oligonucleotide
  Target: LAMA2; (-) strand; PAM type: NRG; PAM sequence: TGG
tccttttcatgaaataagcc

SEQ ID NO: 89845 - DNA, 20 bp, Artificial Sequence
  Description of Artificial Sequence: Synthetic oligonucleotide
  Target: LAMA2; (-) strand; PAM type: NRG; PAM sequence: AAG
ggaaatccttttcatgaaat

SEQ ID NO: 89846 - DNA, 20 bp, Artificial Sequence
  Description of Artificial Sequence: Synthetic oligonucleotide
  Target: LAMA2; (-) strand; PAM type: NRG; PAM sequence: AGG
tgaggataatgtttctggag

SEQ ID NO: 89847 - DNA, 20 bp, Artificial Sequence
  Description of Artificial Sequence: Synthetic oligonucleotide
  Target: LAMA2; (-) strand; PAM type: NRG; PAM sequence: GAG
ttgaggataatgtttctgga

SEQ ID NO: 89848 - DNA, 20 bp, Artificial Sequence
  Description of Artificial Sequence: Synthetic oligonucleotide
  Target: LAMA2; (-) strand; PAM type: NRG; PAM sequence: GAG
tattgaggataatgtttctg

SEQ ID NO: 89849 - DNA, 20 bp, Artificial Sequence
  Description of Artificial Sequence: Synthetic oligonucleotide
  Target: LAMA2; (-) strand; PAM type: NRG; PAM sequence: TGG
cctattgaggataatgtttc

SEQ ID NO: 89850 - DNA, 20 bp, Artificial Sequence
  Description of Artificial Sequence: Synthetic oligonucleotide
  Target: LAMA2; (-) strand; PAM type: NRG; PAM sequence: AGG
aaggatgggataacctattg

SEQ ID NO: 89851 - DNA, 20 bp, Artificial Sequence
  Description of Artificial Sequence: Synthetic oligonucleotide
  Target: LAMA2; (-) strand; PAM type: NRG; PAM sequence: GAG
gaaggatgggataacctatt

SEQ ID NO: 89852 - DNA, 20 bp, Artificial Sequence
  Description of Artificial Sequence: Synthetic oligonucleotide
  Target: LAMA2; (-) strand; PAM type: NRG; PAM sequence: GGG
tgaattgaggaatgaaggat

SEQ ID NO: 89853 - DNA, 20 bp, Artificial Sequence
  Description of Artificial Sequence: Synthetic oligonucleotide
  Target: LAMA2; (-) strand; PAM type: NRG; PAM sequence: TGG
atgaattgaggaatgaagga

SEQ ID NO: 89854 - DNA, 20 bp, Artificial Sequence
  Description of Artificial Sequence: Synthetic oligonucleotide
  Target: LAMA2; (-) strand; PAM type: NRG; PAM sequence: AGG
aaatatgaattgaggaatga

SEQ ID NO: 89855 - DNA, 20 bp, Artificial Sequence
  Description of Artificial Sequence: Synthetic oligonucleotide
  Target: LAMA2; (-) strand; PAM type: NRG; PAM sequence: AAG
gaaatatgaattgaggaatg

SEQ ID NO: 89856 - DNA, 20 bp, Artificial Sequence
  Description of Artificial Sequence: Synthetic oligonucleotide
  Target: LAMA2; (-) strand; PAM type: NRG; PAM sequence: AGG
atctcaagaaatatgaattg

SEQ ID NO: 89857 - DNA, 20 bp, Artificial Sequence
  Description of Artificial Sequence: Synthetic oligonucleotide
  Target: LAMA2; (-) strand; PAM type: NRG; PAM sequence: GAG
aatctcaagaaatatgaatt

SEQ ID NO: 89858 - DNA, 20 bp, Artificial Sequence
  Description of Artificial Sequence: Synthetic oligonucleotide
  Target: LAMA2; (-) strand; PAM type: NRG; PAM sequence: AAG
tttttttccctctcaatctc

SEQ ID NO: 89859 - DNA, 20 bp, Artificial Sequence
  Description of Artificial Sequence: Synthetic oligonucleotide
  Target: LAMA2; (-) strand; PAM type: NRG; PAM sequence: TGG
gcagtaggctacttgtggtc

SEQ ID NO: 89860 - DNA, 20 bp, Artificial Sequence
  Description of Artificial Sequence: Synthetic oligonucleotide
  Target: LAMA2; (-) strand; PAM type: NRG; PAM sequence: TGG
atttagcagtaggctacttg

SEQ ID NO: 89861 - DNA, 20 bp, Artificial Sequence
  Description of Artificial Sequence: Synthetic oligonucleotide
  Target: LAMA2; (-) strand; PAM type: NRG; PAM sequence: AGG
tcataaaagaatttagcagt

SEQ ID NO: 89862 - DNA, 20 bp, Artificial Sequence
  Description of Artificial Sequence: Synthetic oligonucleotide
  Target: LAMA2; (-) strand; PAM type: NRG; PAM sequence: TAG
ttcataaaagaatttagcag

SEQ ID NO: 89863 - DNA, 20 bp, Artificial Sequence
  Description of Artificial Sequence: Synthetic oligonucleotide
  Target: LAMA2; (-) strand; PAM type: NRG; PAM sequence: CAG
agcttcataaaagaatttag

SEQ ID NO: 89864 - DNA, 20 bp, Artificial Sequence
  Description of Artificial Sequence: Synthetic oligonucleotide
  Target: LAMA2; (-) strand; PAM type: NRG; PAM sequence: TAG
ctaagcttcataaaagaatt

SEQ ID NO: 89865 - DNA, 20 bp, Artificial Sequence
  Description of Artificial Sequence: Synthetic oligonucleotide
  Target: LAMA2; (-) strand; PAM type: NRG; PAM sequence: AAG
cataaaactaagcttcataa

SEQ ID NO: 89866 - DNA, 20 bp, Artificial Sequence
  Description of Artificial Sequence: Synthetic oligonucleotide
  Target: LAMA2; (-) strand; PAM type: NRG; PAM sequence: AAG
aaaaggtaattcataaaact

SEQ ID NO: 89867 - DNA, 20 bp, Artificial Sequence
  Description of Artificial Sequence: Synthetic oligonucleotide
  Target: LAMA2; (-) strand; PAM type: NRG; PAM sequence: AGG
catgactggagaaggctaaa

SEQ ID NO: 89868 - DNA, 20 bp, Artificial Sequence
  Description of Artificial Sequence: Synthetic oligonucleotide
  Target: LAMA2; (-) strand; PAM type: NRG; PAM sequence: AAG
acatgactggagaaggctaa

SEQ ID NO: 89869 - DNA, 20 bp, Artificial Sequence
  Description of Artificial Sequence: Synthetic oligonucleotide
  Target: LAMA2; (-) strand; PAM type: NRG; PAM sequence: AGG
ttttcccacatgactggaga

SEQ ID NO: 89870 - DNA, 20 bp, Artificial Sequence
  Description of Artificial Sequence: Synthetic oligonucleotide
  Target: LAMA2; (-) strand; PAM type: NRG; PAM sequence: AAG
gttttcccacatgactggag

SEQ ID NO: 89871 - DNA, 20 bp, Artificial Sequence
  Description of Artificial Sequence: Synthetic oligonucleotide
  Target: LAMA2; (-) strand; PAM type: NRG; PAM sequence: GAG
aaagttttcccacatgactg

SEQ ID NO: 89872 - DNA, 20 bp, Artificial Sequence
  Description of Artificial Sequence: Synthetic oligonucleotide
  Target: LAMA2; (-) strand; PAM type: NRG; PAM sequence: TGG
ggaaagttttcccacatgac

SEQ ID NO: 89873 - DNA, 20 bp, Artificial Sequence
  Description of Artificial Sequence: Synthetic oligonucleotide
  Target: LAMA2; (-) strand; PAM type: NRG; PAM sequence: AAG
aaagatttaatgaggcagga

SEQ ID NO: 89874 - DNA, 20 bp, Artificial Sequence
  Description of Artificial Sequence: Synthetic oligonucleotide
  Target: LAMA2; (-) strand; PAM type: NRG; PAM sequence: AGG
cattaaagatttaatgaggc

SEQ ID NO: 89875 - DNA, 20 bp, Artificial Sequence
  Description of Artificial Sequence: Synthetic oligonucleotide
  Target: LAMA2; (-) strand; PAM type: NRG; PAM sequence: CAG
gcattaaagatttaatgagg

SEQ ID NO: 89876 - DNA, 20 bp, Artificial Sequence
  Description of Artificial Sequence: Synthetic oligonucleotide
  Target: LAMA2; (-) strand; PAM type: NRG; PAM sequence: AGG
attgcattaaagatttaatg

SEQ ID NO: 89877 - DNA, 20 bp, Artificial Sequence
  Description of Artificial Sequence: Synthetic oligonucleotide
  Target: LAMA2; (-) strand; PAM type: NRG; PAM sequence: GAG
cattgcattaaagatttaat

SEQ ID NO: 89878 - DNA, 20 bp, Artificial Sequence
  Description of Artificial Sequence: Synthetic oligonucleotide
  Target: LAMA2; (-) strand; PAM type: NRG; PAM sequence: AAG
gcatggtgcacattgcatta

SEQ ID NO: 89879 - DNA, 20 bp, Artificial Sequence
  Description of Artificial Sequence: Synthetic oligonucleotide
  Target: LAMA2; (-) strand; PAM type: NRG; PAM sequence: TGG
aaataacaatacagtgtgca

SEQ ID NO: 89880 - DNA, 20 bp, Artificial Sequence
  Description of Artificial Sequence: Synthetic oligonucleotide
  Target: LAMA2; (-) strand; PAM type: NRG; PAM sequence: CAG
taatgtcacaaataacaata

SEQ ID NO: 89881 - DNA, 20 bp, Artificial Sequence
  Description of Artificial Sequence: Synthetic oligonucleotide
  Target: LAMA2; (-) strand; PAM type: NRG; PAM sequence: TAG
cttgtttgcaagtaatatta

SEQ ID NO: 89882 - DNA, 20 bp, Artificial Sequence
  Description of Artificial Sequence: Synthetic oligonucleotide
  Target: LAMA2; (-) strand; PAM type: NRG; PAM sequence: AAG
ggaaaaaccagcttgtttgc

SEQ ID NO: 89883 - DNA, 20 bp, Artificial Sequence
  Description of Artificial Sequence: Synthetic oligonucleotide
  Target: LAMA2; (-) strand; PAM type: NRG; PAM sequence: CAG
ctaccttcagggggaaaaac

SEQ ID NO: 89884 - DNA, 20 bp, Artificial Sequence
  Description of Artificial Sequence: Synthetic oligonucleotide
  Target: LAMA2; (-) strand; PAM type: NRG; PAM sequence: GGG
gttttaattctaccttcagg

SEQ ID NO: 89885 - DNA, 20 bp, Artificial Sequence
  Description of Artificial Sequence: Synthetic oligonucleotide
  Target: LAMA2; (-) strand; PAM type: NRG; PAM sequence: GGG
tgttttaattctaccttcag

SEQ ID NO: 89886 - DNA, 20 bp, Artificial Sequence
  Description of Artificial Sequence: Synthetic oligonucleotide
  Target: LAMA2; (-) strand; PAM type: NRG; PAM sequence: GGG
ctgttttaattctaccttca

SEQ ID NO: 89887 - DNA, 20 bp, Artificial Sequence
  Description of Artificial Sequence: Synthetic oligonucleotide
  Target: LAMA2; (-) strand; PAM type: NRG; PAM sequence: AGG
cctgttttaattctaccttc

SEQ ID NO: 89888 - DNA, 20 bp, Artificial Sequence
  Description of Artificial Sequence: Synthetic oligonucleotide
  Target: LAMA2; (-) strand; PAM type: NRG; PAM sequence: CAG
acctgttttaattctacctt

SEQ ID NO: 89889 - DNA, 20 bp, Artificial Sequence
  Description of Artificial Sequence: Synthetic oligonucleotide
  Target: LAMA2; (-) strand; PAM type: NRG; PAM sequence: GAG
cacaagtagctgtttcccat

SEQ ID NO: 89890 - DNA, 20 bp, Artificial Sequence
  Description of Artificial Sequence: Synthetic oligonucleotide
  Target: LAMA2; (-) strand; PAM type: NRG; PAM sequence: TAG
taagaaaagaagaacacaag

SEQ ID NO: 89891 - DNA, 20 bp, Artificial Sequence
  Description of Artificial Sequence: Synthetic oligonucleotide
  Target: LAMA2; (-) strand; PAM type: NRG; PAM sequence: AAG
cattaagaaaagaagaacac

SEQ ID NO: 89892 - DNA, 20 bp, Artificial Sequence
  Description of Artificial Sequence: Synthetic oligonucleotide
  Target: LAMA2; (-) strand; PAM type: NRG; PAM sequence: AAG
cttcaccccattaagaaaag

SEQ ID NO: 89893 - DNA, 20 bp, Artificial Sequence
  Description of Artificial Sequence: Synthetic oligonucleotide
  Target: LAMA2; (-) strand; PAM type: NRG; PAM sequence: AAG
cagcttcaccccattaagaa

SEQ ID NO: 89894 - DNA, 20 bp, Artificial Sequence
  Description of Artificial Sequence: Synthetic oligonucleotide
  Target: LAMA2; (-) strand; PAM type: NRG; PAM sequence: AAG
ttcttcagcttcaccccatt

SEQ ID NO: 89895 - DNA, 20 bp, Artificial Sequence
  Description of Artificial Sequence: Synthetic oligonucleotide
  Target: LAMA2; (-) strand; PAM type: NRG; PAM sequence: CAG
ccattcactttcctgttctt

SEQ ID NO: 89896 - DNA, 20 bp, Artificial Sequence
  Description of Artificial Sequence: Synthetic oligonucleotide
  Target: LAMA2; (-) strand; PAM type: NRG; PAM sequence: AAG
cctggagatggttctaggct

SEQ ID NO: 89897 - DNA, 20 bp, Artificial Sequence
  Description of Artificial Sequence: Synthetic oligonucleotide
  Target: LAMA2; (-) strand; PAM type: NRG; PAM sequence: AGG
ccattcctggagatggttct

SEQ ID NO: 89898 - DNA, 20 bp, Artificial Sequence
  Description of Artificial Sequence: Synthetic oligonucleotide
  Target: LAMA2; (-) strand; PAM type: NRG; PAM sequence: TAG
tccattcctggagatggttc

SEQ ID NO: 89899 - DNA, 20 bp, Artificial Sequence
  Description of Artificial Sequence: Synthetic oligonucleotide
  Target: LAMA2; (-) strand; PAM type: NRG; PAM sequence: TGG
tttacctccattcctggaga

SEQ ID NO: 89900 - DNA, 20 bp, Artificial Sequence
  Description of Artificial Sequence: Synthetic oligonucleotide
  Target: LAMA2; (-) strand; PAM type: NRG; PAM sequence: GAG
aaaatttacctccattcctg

SEQ ID NO: 89901 - DNA, 20 bp, Artificial Sequence
  Description of Artificial Sequence: Synthetic oligonucleotide
  Target: LAMA2; (-) strand; PAM type: NRG; PAM sequence: TGG
aaaaaatttacctccattcc

SEQ ID NO: 89902 - DNA, 20 bp, Artificial Sequence
  Description of Artificial Sequence: Synthetic oligonucleotide
  Target: LAMA2; (-) strand; PAM type: NRG; PAM sequence: AGG
tcaaattgagaaggcactgc

SEQ ID NO: 89903 - DNA, 20 bp, Artificial Sequence
  Description of Artificial Sequence: Synthetic oligonucleotide
  Target: LAMA2; (-) strand; PAM type: NRG; PAM sequence: CAG
atcaaattgagaaggcactg

SEQ ID NO: 89904 - DNA, 20 bp, Artificial Sequence
  Description of Artificial Sequence: Synthetic oligonucleotide
  Target: LAMA2; (-) strand; PAM type: NRG; PAM sequence: AGG
attcagatatcaaattgaga

SEQ ID NO: 89905 - DNA, 20 bp, Artificial Sequence
  Description of Artificial Sequence: Synthetic oligonucleotide
  Target: LAMA2; (-) strand; PAM type: NRG; PAM sequence: AAG
gattcagatatcaaattgag

SEQ ID NO: 89906 - DNA, 20 bp, Artificial Sequence
  Description of Artificial Sequence: Synthetic oligonucleotide
  Target: LAMA2; (-) strand; PAM type: NRG; PAM sequence: GAG
ggagattcagatatcaaatt

SEQ ID NO: 89907 - DNA, 20 bp, Artificial Sequence
  Description of Artificial Sequence: Synthetic oligonucleotide
  Target: LAMA2; (-) strand; PAM type: NRG; PAM sequence: CAG
aaattctcttcagggagatt

SEQ ID NO: 89908 - DNA, 20 bp, Artificial Sequence
  Description of Artificial Sequence: Synthetic oligonucleotide
  Target: LAMA2; (-) strand; PAM type: NRG; PAM sequence: GAG
taaggcaaattctcttcagg

SEQ ID NO: 89909 - DNA, 20 bp, Artificial Sequence
  Description of Artificial Sequence: Synthetic oligonucleotide
  Target: LAMA2; (-) strand; PAM type: NRG; PAM sequence: GGG
actaaggcaaattctcttca

SEQ ID NO: 89910 - DNA, 20 bp, Artificial Sequence
  Description of Artificial Sequence: Synthetic oligonucleotide
  Target: LAMA2; (-) strand; PAM type: NRG; PAM sequence: AGG
tactaaggcaaattctcttc

SEQ ID NO: 89911 - DNA, 20 bp, Artificial Sequence
  Description of Artificial Sequence: Synthetic oligonucleotide
  Target: LAMA2; (-) strand; PAM type: NRG; PAM sequence: CAG
ctactaaggcaaattctctt

SEQ ID NO: 89912 - DNA, 20 bp, Artificial Sequence
  Description of Artificial Sequence: Synthetic oligonucleotide
  Target: LAMA2; (-) strand; PAM type: NRG; PAM sequence: AGG
ctctttctccatatctacta

SEQ ID NO: 89913 - DNA, 20 bp, Artificial Sequence
  Description of Artificial Sequence: Synthetic oligonucleotide
  Target: LAMA2; (-) strand; PAM type: NRG; PAM sequence: AAG
cctctttctccatatctact

SEQ ID NO: 89914 - DNA, 20 bp, Artificial Sequence
  Description of Artificial Sequence: Synthetic oligonucleotide
  Target: LAMA2; (-) strand; PAM type: NRG; PAM sequence: TGG
cataagggtctccaaaggct

SEQ ID NO: 89915 - DNA, 20 bp, Artificial Sequence
  Description of Artificial Sequence: Synthetic oligonucleotide
  Target: LAMA2; (-) strand; PAM type: NRG; PAM sequence: AGG
catttcataagggtctccaa

SEQ ID NO: 89916 - DNA, 20 bp, Artificial Sequence
  Description of Artificial Sequence: Synthetic oligonucleotide
  Target: LAMA2; (-) strand; PAM type: NRG; PAM sequence: AAG
ccatttcataagggtctcca

SEQ ID NO: 89917 - DNA, 20 bp, Artificial Sequence
  Description of Artificial Sequence: Synthetic oligonucleotide
  Target: LAMA2; (-) strand; PAM type: NRG; PAM sequence: GGG
cggttcattccatttcataa

SEQ ID NO: 89918 - DNA, 20 bp, Artificial Sequence
  Description of Artificial Sequence: Synthetic oligonucleotide
  Target: LAMA2; (-) strand; PAM type: NRG; PAM sequence: AGG
gcggttcattccatttcata

SEQ ID NO: 89919 - DNA, 20 bp, Artificial Sequence
  Description of Artificial Sequence: Synthetic oligonucleotide
  Target: LAMA2; (-) strand; PAM type: NRG; PAM sequence: AAG
agcggttcattccatttcat

SEQ ID NO: 89920 - DNA, 20 bp, Artificial Sequence
  Description of Artificial Sequence: Synthetic oligonucleotide
  Target: LAMA2; (-) strand; PAM type: NRG; PAM sequence: CGG
gaaagtgaatttagtgagag

SEQ ID NO: 89921 - DNA, 20 bp, Artificial Sequence
  Description of Artificial Sequence: Synthetic oligonucleotide
  Target: LAMA2; (-) strand; PAM type: NRG; PAM sequence: GAG
agagaaagtgaatttagtga

SEQ ID NO: 89922 - DNA, 20 bp, Artificial Sequence
  Description of Artificial Sequence: Synthetic oligonucleotide
  Target: LAMA2; (-) strand; PAM type: NRG; PAM sequence: GAG
aaagagaaagtgaatttagt

SEQ ID NO: 89923 - DNA, 20 bp, Artificial Sequence
  Description of Artificial Sequence: Synthetic oligonucleotide
  Target: LAMA2; (-) strand; PAM type: NRG; PAM sequence: TAG
atacaaagagaaagtgaatt

SEQ ID NO: 89924 - DNA, 20 bp, Artificial Sequence
  Description of Artificial Sequence: Synthetic oligonucleotide
  Target: LAMA2; (-) strand; PAM type: NRG; PAM sequence: AAG
ctcttttcaatacaaagaga

SEQ ID NO: 89925 - DNA, 20 bp, Artificial Sequence
  Description of Artificial Sequence: Synthetic oligonucleotide
  Target: LAMA2; (-) strand; PAM type: NRG; PAM sequence: GAG
atatctcttttcaatacaaa

SEQ ID NO: 89926 - DNA, 20 bp, Artificial Sequence
  Description of Artificial Sequence: Synthetic oligonucleotide
  Target: LAMA2; (-) strand; PAM type: NRG; PAM sequence: AAG
ttatatctcttttcaataca

SEQ ID NO: 89927 - DNA, 20 bp, Artificial Sequence
  Description of Artificial Sequence: Synthetic oligonucleotide
  Target: LAMA2; (-) strand; PAM type: NRG; PAM sequence: GGG
ggattcgactatatttacta

SEQ ID NO: 89928 - DNA, 20 bp, Artificial Sequence
  Description of Artificial Sequence: Synthetic oligonucleotide
  Target: LAMA2; (-) strand; PAM type: NRG; PAM sequence: AGG
tggattcgactatatttact

SEQ ID NO: 89929 - DNA, 20 bp, Artificial Sequence
  Description of Artificial Sequence: Synthetic oligonucleotide
  Target: LAMA2; (-) strand; PAM type: NRG; PAM sequence: TAG
atggattcgactatatttac

SEQ ID NO: 89930 - DNA, 20 bp, Artificial Sequence
  Description of Artificial Sequence: Synthetic oligonucleotide
  Target: LAMA2; (-) strand; PAM type: NRG; PAM sequence: TGG
gcaattcttatattactgga

SEQ ID NO: 89931 - DNA, 20 bp, Artificial Sequence
  Description of Artificial Sequence: Synthetic oligonucleotide
  Target: LAMA2; (-) strand; PAM type: NRG; PAM sequence: TGG
tgaggcaattcttatattac

SEQ ID NO: 89932 - DNA, 20 bp, Artificial Sequence
  Description of Artificial Sequence: Synthetic oligonucleotide
  Target: LAMA2; (-) strand; PAM type: NRG; PAM sequence: AGG
tgcaattttagttcactttg

SEQ ID NO: 89933 - DNA, 20 bp, Artificial Sequence
  Description of Artificial Sequence: Synthetic oligonucleotide
  Target: LAMA2; (-) strand; PAM type: NRG; PAM sequence: GAG
gtgcaattttagttcacttt

SEQ ID NO: 89934 - DNA, 20 bp, Artificial Sequence
  Description of Artificial Sequence: Synthetic oligonucleotide
  Target: LAMA2; (-) strand; PAM type: NRG; PAM sequence: TAG
ggtaggagtaagtgcaattt

SEQ ID NO: 89935 - DNA, 20 bp, Artificial Sequence
  Description of Artificial Sequence: Synthetic oligonucleotide
  Target: LAMA2; (-) strand; PAM type: NRG; PAM sequence: AAG
ggttttccacaggtaggagt

SEQ ID NO: 89936 - DNA, 20 bp, Artificial Sequence
  Description of Artificial Sequence: Synthetic oligonucleotide
  Target: LAMA2; (-) strand; PAM type: NRG; PAM sequence: GAG
atatggttttccacaggtag

SEQ ID NO: 89937 - DNA, 20 bp, Artificial Sequence
  Description of Artificial Sequence: Synthetic oligonucleotide
  Target: LAMA2; (-) strand; PAM type: NRG; PAM sequence: AGG
aaatatggttttccacaggt

SEQ ID NO: 89938 - DNA, 20 bp, Artificial Sequence
  Description of Artificial Sequence: Synthetic oligonucleotide
  Target: LAMA2; (-) strand; PAM type: NRG; PAM sequence: TAG
gaaatatggttttccacagg

SEQ ID NO: 89939 - DNA, 20 bp, Artificial Sequence
  Description of Artificial Sequence: Synthetic oligonucleotide
  Target: LAMA2; (-) strand; PAM type: NRG; PAM sequence: AGG
agagaaatatggttttccac

SEQ ID NO: 89940 - DNA, 20 bp, Artificial Sequence
  Description of Artificial Sequence: Synthetic oligonucleotide
  Target: LAMA2; (-) strand; PAM type: NRG; PAM sequence: CAG
tagagaaatatggttttcca

SEQ ID NO: 89941 - DNA, 20 bp, Artificial Sequence
  Description of Artificial Sequence: Synthetic oligonucleotide
  Target: LAMA2; (-) strand; PAM type: NRG; PAM sequence: TGG
ttctcttggctagagaaata

SEQ ID NO: 89942 - DNA, 20 bp, Artificial Sequence
  Description of Artificial Sequence: Synthetic oligonucleotide
  Target: LAMA2; (-) strand; PAM type: NRG; PAM sequence: GAG
tgtcattgttctcttggcta

SEQ ID NO: 89943 - DNA, 20 bp, Artificial Sequence
  Description of Artificial Sequence: Synthetic oligonucleotide
  Target: LAMA2; (-) strand; PAM type: NRG; PAM sequence: TAG
tctgtcattgttctcttggc

SEQ ID NO: 89944 - DNA, 20 bp, Artificial Sequence
  Description of Artificial Sequence: Synthetic oligonucleotide
  Target: LAMA2; (-) strand; PAM type: NRG; PAM sequence: TGG
ctaatctgtcattgttctct

SEQ ID NO: 89945 - DNA, 20 bp, Artificial Sequence
  Description of Artificial Sequence: Synthetic oligonucleotide
  Target: LAMA2; (-) strand; PAM type: NRG; PAM sequence: AGG
ttcattttctcctgctattt

SEQ ID NO: 89946 - DNA, 20 bp, Artificial Sequence
  Description of Artificial Sequence: Synthetic oligonucleotide
  Target: LAMA2; (-) strand; PAM type: NRG; PAM sequence: TAG
tttcattttctcctgctatt

SEQ ID NO: 89947 - DNA, 20 bp, Artificial Sequence
  Description of Artificial Sequence: Synthetic oligonucleotide
  Target: LAMA2; (-) strand; PAM type: NRG; PAM sequence: TAG
agcactgtgtgttcagccaa

SEQ ID NO: 89948 - DNA, 20 bp, Artificial Sequence
  Description of Artificial Sequence: Synthetic oligonucleotide
  Target: LAMA2; (-) strand; PAM type: NRG; PAM sequence: CAG
tttacagagcactgtgtgtt

SEQ ID NO: 89949 - DNA, 20 bp, Artificial Sequence
  Description of Artificial Sequence: Synthetic oligonucleotide
  Target: LAMA2; (-) strand; PAM type: NRG; PAM sequence: GAG
ttgatttctctgattttaca

SEQ ID NO: 89950 - DNA, 20 bp, Artificial Sequence
  Description of Artificial Sequence: Synthetic oligonucleotide
  Target: LAMA2; (-) strand; PAM type: NRG; PAM sequence: CAG
tattgatttctctgatttta

SEQ ID NO: 89951 - DNA, 20 bp, Artificial Sequence
  Description of Artificial Sequence: Synthetic oligonucleotide
  Target: LAMA2; (-) strand; PAM type: NRG; PAM sequence: GGG
tttcaaattagttcattttg

SEQ ID NO: 89952 - DNA, 20 bp, Artificial Sequence
  Description of Artificial Sequence: Synthetic oligonucleotide
  Target: LAMA2; (-) strand; PAM type: NRG; PAM sequence: GGG
ctttcaaattagttcatttt

SEQ ID NO: 89953 - DNA, 20 bp, Artificial Sequence
  Description of Artificial Sequence: Synthetic oligonucleotide
  Target: LAMA2; (-) strand; PAM type: NRG; PAM sequence: TGG
actttcaaattagttcattt

SEQ ID NO: 89954 - DNA, 20 bp, Artificial Sequence
  Description of Artificial Sequence: Synthetic oligonucleotide
  Target: LAMA2; (-) strand; PAM type: NRG; PAM sequence: TAG
catctttgagactttcaaat

SEQ ID NO: 89955 - DNA, 20 bp, Artificial Sequence
  Description of Artificial Sequence: Synthetic oligonucleotide
  Target: LAMA2; (-) strand; PAM type: NRG; PAM sequence: GAG
tcataaaattgaacatcttt

SEQ ID NO: 89956 - DNA, 20 bp, Artificial Sequence
  Description of Artificial Sequence: Synthetic oligonucleotide
  Target: LAMA2; (-) strand; PAM type: NRG; PAM sequence: GAG
gactcatttattaattttac

SEQ ID NO: 89957 - DNA, 20 bp, Artificial Sequence
  Description of Artificial Sequence: Synthetic oligonucleotide
  Target: LAMA2; (-) strand; PAM type: NRG; PAM sequence: CAG
ttccacatttttggactttg

SEQ ID NO: 89958 - DNA, 20 bp, Artificial Sequence
  Description of Artificial Sequence: Synthetic oligonucleotide
  Target: LAMA2; (-) strand; PAM type: NRG; PAM sequence: TGG
actgtaattttccacatttt

SEQ ID NO: 89959 - DNA, 20 bp, Artificial Sequence
  Description of Artificial Sequence: Synthetic oligonucleotide
  Target: LAMA2; (-) strand; PAM type: NRG; PAM sequence: AAG
aaaatataagtggtcttggt

SEQ ID NO: 89960 - DNA, 20 bp, Artificial Sequence
  Description of Artificial Sequence: Synthetic oligonucleotide
  Target: LAMA2; (-) strand; PAM type: NRG; PAM sequence: TGG
taacaaaatataagtggtct

SEQ ID NO: 89961 - DNA, 20 bp, Artificial Sequence
  Description of Artificial Sequence: Synthetic oligonucleotide
  Target: LAMA2; (-) strand; PAM type: NRG; PAM sequence: TGG
aaattctaacaaaatataag

SEQ ID NO: 89962 - DNA, 20 bp, Artificial Sequence
  Description of Artificial Sequence: Synthetic oligonucleotide
  Target: LAMA2; (-) strand; PAM type: NRG; PAM sequence: AAG
gaaaaattctaacaaaatat

SEQ ID NO: 89963 - DNA, 20 bp, Artificial Sequence
  Description of Artificial Sequence: Synthetic oligonucleotide
  Target: LAMA2; (-) strand; PAM type: NRG; PAM sequence: GAG
actaaaagattccaaacagg

SEQ ID NO: 89964 - DNA, 20 bp, Artificial Sequence
  Description of Artificial Sequence: Synthetic oligonucleotide
  Target: LAMA2; (-) strand; PAM type: NRG; PAM sequence: GGG
gaactaaaagattccaaaca

SEQ ID NO: 89965 - DNA, 20 bp, Artificial Sequence
  Description of Artificial Sequence: Synthetic oligonucleotide
  Target: LAMA2; (-) strand; PAM type: NRG; PAM sequence: AGG
ggaactaaaagattccaaac

SEQ ID NO: 89966 - DNA, 20 bp, Artificial Sequence
  Description of Artificial Sequence: Synthetic oligonucleotide
  Target: LAMA2; (-) strand; PAM type: NRG; PAM sequence: CAG
gggaactaaaagattccaaa

SEQ ID NO: 89967 - DNA, 20 bp, Artificial Sequence
  Description of Artificial Sequence: Synthetic oligonucleotide
  Target: LAMA2; (-) strand; PAM type: NRG; PAM sequence: AAG
acagtaaataagggaactaa

SEQ ID NO: 89968 - DNA, 20 bp, Artificial Sequence
  Description of Artificial Sequence: Synthetic oligonucleotide
  Target: LAMA2; (-) strand; PAM type: NRG; PAM sequence: GGG
gtggcaaccacagtaaataa

SEQ ID NO: 89969 - DNA, 20 bp, Artificial Sequence
  Description of Artificial Sequence: Synthetic oligonucleotide
  Target: LAMA2; (-) strand; PAM type: NRG; PAM sequence: AGG
agtggcaaccacagtaaata

SEQ ID NO: 89970 - DNA, 20 bp, Artificial Sequence
  Description of Artificial Sequence: Synthetic oligonucleotide
  Target: LAMA2; (-) strand; PAM type: NRG; PAM sequence: AAG
cagtggcaaccacagtaaat

SEQ ID NO: 89971 - DNA, 20 bp, Artificial Sequence
  Description of Artificial Sequence: Synthetic oligonucleotide
  Target: LAMA2; (-) strand; PAM type: NRG; PAM sequence: CAG
tgcagagtcagtggcaacca

SEQ ID NO: 89972 - DNA, 20 bp, Artificial Sequence
  Description of Artificial Sequence: Synthetic oligonucleotide
  Target: LAMA2; (-) strand; PAM type: NRG; PAM sequence: TGG
aaagcctgatgcagagtcag

SEQ ID NO: 89973 - DNA, 20 bp, Artificial Sequence
  Description of Artificial Sequence: Synthetic oligonucleotide
  Target: LAMA2; (-) strand; PAM type: NRG; PAM sequence: CAG
tccaaagcctgatgcagagt

SEQ ID NO: 89974 - DNA, 20 bp, Artificial Sequence
  Description of Artificial Sequence: Synthetic oligonucleotide
  Target: LAMA2; (-) strand; PAM type: NRG; PAM sequence: GAG
tatttccaaagcctgatgca

SEQ ID NO: 89975 - DNA, 20 bp, Artificial Sequence
  Description of Artificial Sequence: Synthetic oligonucleotide
  Target: LAMA2; (-) strand; PAM type: NRG; PAM sequence: CAG
gatatttccaaagcctgatg

SEQ ID NO: 89976 - DNA, 20 bp, Artificial Sequence
  Description of Artificial Sequence: Synthetic oligonucleotide
  Target: LAMA2; (-) strand; PAM type: NRG; PAM sequence: AAG
gttttttagtgatatttcca

SEQ ID NO: 89977 - DNA, 20 bp, Artificial Sequence
  Description of Artificial Sequence: Synthetic oligonucleotide
  Target: LAMA2; (-) strand; PAM type: NRG; PAM sequence: TAG
ctaaagaaaaaacagttttt

SEQ ID NO: 89978 - DNA, 20 bp, Artificial Sequence
  Description of Artificial Sequence: Synthetic oligonucleotide
  Target: LAMA2; (-) strand; PAM type: NRG; PAM sequence: CAG
taagaagactaaagaaaaaa

SEQ ID NO: 89979 - DNA, 20 bp, Artificial Sequence
  Description of Artificial Sequence: Synthetic oligonucleotide
  Target: LAMA2; (-) strand; PAM type: NRG; PAM sequence: AAG
tttgactagtaagaagacta

SEQ ID NO: 89980 - DNA, 20 bp, Artificial Sequence
  Description of Artificial Sequence: Synthetic oligonucleotide
  Target: LAMA2; (-) strand; PAM type: NRG; PAM sequence: AAG
gctgatatttgactagtaag

SEQ ID NO: 89981 - DNA, 20 bp, Artificial Sequence
  Description of Artificial Sequence: Synthetic oligonucleotide
  Target: LAMA2; (-) strand; PAM type: NRG; PAM sequence: AAG
ttagctgatatttgactagt

SEQ ID NO: 89982 - DNA, 20 bp, Artificial Sequence
  Description of Artificial Sequence: Synthetic oligonucleotide
  Target: LAMA2; (-) strand; PAM type: NRG; PAM sequence: TAG
ttgtttagctgatatttgac

SEQ ID NO: 89983 - DNA, 20 bp, Artificial Sequence
  Description of Artificial Sequence: Synthetic oligonucleotide
  Target: LAMA2; (-) strand; PAM type: NRG; PAM sequence: TAG
acttattttctttgtttgtt

SEQ ID NO: 89984 - DNA, 20 bp, Artificial Sequence
  Description of Artificial Sequence: Synthetic oligonucleotide
  Target: LAMA2; (-) strand; PAM type: NRG; PAM sequence: TAG
tgccagaattctcattctta

SEQ ID NO: 89985 - DNA, 20 bp, Artificial Sequence
  Description of Artificial Sequence: Synthetic oligonucleotide
  Target: LAMA2; (-) strand; PAM type: NRG; PAM sequence: CAG
ttaaaaatgaattttcctgc

SEQ ID NO: 89986 - DNA, 20 bp, Artificial Sequence
  Description of Artificial Sequence: Synthetic oligonucleotide
  Target: LAMA2; (-) strand; PAM type: NRG; PAM sequence: TGG
tatttatccattctgttact

SEQ ID NO: 89987 - DNA, 20 bp, Artificial Sequence
  Description of Artificial Sequence: Synthetic oligonucleotide
  Target: LAMA2; (-) strand; PAM type: NRG; PAM sequence: TAG
atgtctgggtatgtctgatc

SEQ ID NO: 89988 - DNA, 20 bp, Artificial Sequence
  Description of Artificial Sequence: Synthetic oligonucleotide
  Target: LAMA2; (-) strand; PAM type: NRG; PAM sequence: GGG
attctgaactgagaatgtct

SEQ ID NO: 89989 - DNA, 20 bp, Artificial Sequence
  Description of Artificial Sequence: Synthetic oligonucleotide
  Target: LAMA2; (-) strand; PAM type: NRG; PAM sequence: TGG
cattctgaactgagaatgtc

SEQ ID NO: 89990 - DNA, 20 bp, Artificial Sequence
  Description of Artificial Sequence: Synthetic oligonucleotide
  Target: LAMA2; (-) strand; PAM type: NRG; PAM sequence: GAG
cgctatgaacattctgaact

SEQ ID NO: 89991 - DNA, 20 bp, Artificial Sequence
  Description of Artificial Sequence: Synthetic oligonucleotide
  Target: LAMA2; (-) strand; PAM type: NRG; PAM sequence: AGG
cttatttctgttggtcaagg

SEQ ID NO: 89992 - DNA, 20 bp, Artificial Sequence
  Description of Artificial Sequence: Synthetic oligonucleotide
  Target: LAMA2; (-) strand; PAM type: NRG; PAM sequence: GAG
gcttatttctgttggtcaag

SEQ ID NO: 89993 - DNA, 20 bp, Artificial Sequence
  Description of Artificial Sequence: Synthetic oligonucleotide
  Target: LAMA2; (-) strand; PAM type: NRG; PAM sequence: AGG
tggcttatttctgttggtca

SEQ ID NO: 89994 - DNA, 20 bp, Artificial Sequence
  Description of Artificial Sequence: Synthetic oligonucleotide
  Target: LAMA2; (-) strand; PAM type: NRG; PAM sequence: AAG
gtggcttatttctgttggtc

SEQ ID NO: 89995 - DNA, 20 bp, Artificial Sequence
  Description of Artificial Sequence: Synthetic oligonucleotide
  Target: LAMA2; (-) strand; PAM type: NRG; PAM sequence: TGG
gaactgtggcttatttctgt

SEQ ID NO: 89996 - DNA, 20 bp, Artificial Sequence
  Description of Artificial Sequence: Synthetic oligonucleotide
  Target: LAMA2; (-) strand; PAM type: NRG; PAM sequence: TGG
ctacttaagaaatagaactg

SEQ ID NO: 89997 - DNA, 20 bp, Artificial Sequence
  Description of Artificial Sequence: Synthetic oligonucleotide
  Target: LAMA2; (-) strand; PAM type: NRG; PAM sequence: TAG
ggcactaactacttaagaaa

SEQ ID NO: 89998 - DNA, 20 bp, Artificial Sequence
  Description of Artificial Sequence: Synthetic oligonucleotide
  Target: LAMA2; (-) strand; PAM type: NRG; PAM sequence: AAG
ttgtttggcactaactactt

SEQ ID NO: 89999 - DNA, 20 bp, Artificial Sequence
  Description of Artificial Sequence: Synthetic oligonucleotide
  Target: LAMA2; (-) strand; PAM type: NRG; PAM sequence: TGG
tgaatatttattaagttgtt

SEQ ID NO: 90000 - DNA, 20 bp, Artificial Sequence
  Description of Artificial Sequence: Synthetic oligonucleotide
  Target: LAMA2; (-) strand; PAM type: NRG; PAM sequence: AAG
ttaaaacatgaatatttatt

SEQ ID NO: 90001 - DNA, 20 bp, Artificial Sequence
  Description of Artificial Sequence: Synthetic oligonucleotide
  Target: LAMA2; (-) strand; PAM type: NRG; PAM sequence: AGG
tttctttttaaacaattgct

SEQ ID NO: 90002 - DNA, 20 bp, Artificial Sequence
  Description of Artificial Sequence: Synthetic oligonucleotide
  Target: LAMA2; (-) strand; PAM type: NRG; PAM sequence: TAG
ttttctttttaaacaattgc

SEQ ID NO: 90003 - DNA, 20 bp, Artificial Sequence
  Description of Artificial Sequence: Synthetic oligonucleotide
  Target: LAMA2; (-) strand; PAM type: NRG; PAM sequence: TGG
atcccatcagtaagtgattc

SEQ ID NO: 90004 - DNA, 20 bp, Artificial Sequence
  Description of Artificial Sequence: Synthetic oligonucleotide
  Target: LAMA2; (-) strand; PAM type: NRG; PAM sequence: AAG
aggtaccacatcccatcagt

SEQ ID NO: 90005 - DNA, 20 bp, Artificial Sequence
  Description of Artificial Sequence: Synthetic oligonucleotide
  Target: LAMA2; (-) strand; PAM type: NRG; PAM sequence: CAG
ccaaaggtaccacatcccat

SEQ ID NO: 90006 - DNA, 20 bp, Artificial Sequence
  Description of Artificial Sequence: Synthetic oligonucleotide
  Target: LAMA2; (-) strand; PAM type: NRG; PAM sequence: AGG
gaaggtatatactaccccaa

SEQ ID NO: 90007 - DNA, 20 bp, Artificial Sequence
  Description of Artificial Sequence: Synthetic oligonucleotide
  Target: LAMA2; (-) strand; PAM type: NRG; PAM sequence: AAG
agaaggtatatactacccca

SEQ ID NO: 90008 - DNA, 20 bp, Artificial Sequence
  Description of Artificial Sequence: Synthetic oligonucleotide
  Target: LAMA2; (-) strand; PAM type: NRG; PAM sequence: AGG
tctgatactcaagtttgaga

SEQ ID NO: 90009 - DNA, 20 bp, Artificial Sequence
  Description of Artificial Sequence: Synthetic oligonucleotide
  Target: LAMA2; (-) strand; PAM type: NRG; PAM sequence: AAG
atctgatactcaagtttgag

SEQ ID NO: 90010 - DNA, 20 bp, Artificial Sequence
  Description of Artificial Sequence: Synthetic oligonucleotide
  Target: LAMA2; (-) strand; PAM type: NRG; PAM sequence: GAG
ccaatctgatactcaagttt

SEQ ID NO: 90011 - DNA, 20 bp, Artificial Sequence
  Description of Artificial Sequence: Synthetic oligonucleotide
  Target: LAMA2; (-) strand; PAM type: NRG; PAM sequence: AAG
cattatccaatctgatactc

SEQ ID NO: 90012 - DNA, 20 bp, Artificial Sequence
  Description of Artificial Sequence: Synthetic oligonucleotide
  Target: LAMA2; (-) strand; PAM type: NRG; PAM sequence: TAG
tgtggaaaaggaaataagga

SEQ ID NO: 90013 - DNA, 20 bp, Artificial Sequence
  Description of Artificial Sequence: Synthetic oligonucleotide
  Target: LAMA2; (-) strand; PAM type: NRG; PAM sequence: AGG
tcaatgtggaaaaggaaata

SEQ ID NO: 90014 - DNA, 20 bp, Artificial Sequence
  Description of Artificial Sequence: Synthetic oligonucleotide
  Target: LAMA2; (-) strand; PAM type: NRG; PAM sequence: AAG
gtcaatgtggaaaaggaaat

SEQ ID NO: 90015 - DNA, 20 bp, Artificial Sequence
  Description of Artificial Sequence: Synthetic oligonucleotide
  Target: LAMA2; (-) strand; PAM type: NRG; PAM sequence: AGG
cacaaaagtcaatgtggaaa

SEQ ID NO: 90016 - DNA, 20 bp, Artificial Sequence
  Description of Artificial Sequence: Synthetic oligonucleotide
  Target: LAMA2; (-) strand; PAM type: NRG; PAM sequence: AAG
gcacaaaagtcaatgtggaa

SEQ ID NO: 90017 - DNA, 20 bp, Artificial Sequence
  Description of Artificial Sequence: Synthetic oligonucleotide
  Target: LAMA2; (-) strand; PAM type: NRG; PAM sequence: TGG
gaactgcacaaaagtcaatg

SEQ ID NO: 90018 - DNA, 20 bp, Artificial Sequence
  Description of Artificial Sequence: Synthetic oligonucleotide
  Target: LAMA2; (-) strand; PAM type: NRG; PAM sequence: AAG
taaaagcaagaactgcacaa

SEQ ID NO: 90019 - DNA, 20 bp, Artificial Sequence
  Description of Artificial Sequence: Synthetic oligonucleotide
  Target: LAMA2; (-) strand; PAM type: NRG; PAM sequence: AAG
aagagactgtaattaaaagc

SEQ ID NO: 90020 - DNA, 20 bp, Artificial Sequence
  Description of Artificial Sequence: Synthetic oligonucleotide
  Target: LAMA2; (-) strand; PAM type: NRG; PAM sequence: AAG
tcagaagagactgtaattaa

SEQ ID NO: 90021 - DNA, 20 bp, Artificial Sequence
  Description of Artificial Sequence: Synthetic oligonucleotide
  Target: LAMA2; (-) strand; PAM type: NRG; PAM sequence: GAG
attaagaaaggttttcagaa

SEQ ID NO: 90022 - DNA, 20 bp, Artificial Sequence
  Description of Artificial Sequence: Synthetic oligonucleotide
  Target: LAMA2; (-) strand; PAM type: NRG; PAM sequence: AAG
ttattaagaaaggttttcag

SEQ ID NO: 90023 - DNA, 20 bp, Artificial Sequence
  Description of Artificial Sequence: Synthetic oligonucleotide
  Target: LAMA2; (-) strand; PAM type: NRG; PAM sequence: CAG
tctttattaagaaaggtttt

SEQ ID NO: 90024 - DNA, 20 bp, Artificial Sequence
  Description of Artificial Sequence: Synthetic oligonucleotide
  Target: LAMA2; (-) strand; PAM type: NRG; PAM sequence: AGG
ctttatatctttattaagaa

SEQ ID NO: 90025 - DNA, 20 bp, Artificial Sequence
  Description of Artificial Sequence: Synthetic oligonucleotide
  Target: LAMA2; (-) strand; PAM type: NRG; PAM sequence: AAG
actttatatctttattaaga

SEQ ID NO: 90026 - DNA, 20 bp, Artificial Sequence
  Description of Artificial Sequence: Synthetic oligonucleotide
  Target: LAMA2; (-) strand; PAM type: NRG; PAM sequence: AAG
ggccactttatatctttatt

SEQ ID NO: 90027 - DNA, 20 bp, Artificial Sequence
  Description of Artificial Sequence: Synthetic oligonucleotide
  Target: LAMA2; (-) strand; PAM type: NRG; PAM sequence: AGG
tttctgcttacttgtacttt

SEQ ID NO: 90028 - DNA, 20 bp, Artificial Sequence
  Description of Artificial Sequence: Synthetic oligonucleotide
  Target: LAMA2; (-) strand; PAM type: NRG; PAM sequence: TAG
gtttctgcttacttgtactt

SEQ ID NO: 90029 - DNA, 20 bp, Artificial Sequence
  Description of Artificial Sequence: Synthetic oligonucleotide
  Target: LAMA2; (-) strand; PAM type: NRG; PAM sequence: GAG
aagaatgttctcaacatttt

SEQ ID NO: 90030 - DNA, 20 bp, Artificial Sequence
  Description of Artificial Sequence: Synthetic oligonucleotide
  Target: LAMA2; (-) strand; PAM type: NRG; PAM sequence: AAG
gaacatgctatattccactt

SEQ ID NO: 90031 - DNA, 20 bp, Artificial Sequence
  Description of Artificial Sequence: Synthetic oligonucleotide
  Target: LAMA2; (-) strand; PAM type: NRG; PAM sequence: TAG
tggttcacaagttgaaacct

SEQ ID NO: 90032 - DNA, 20 bp, Artificial Sequence
  Description of Artificial Sequence: Synthetic oligonucleotide
  Target: LAMA2; (-) strand; PAM type: NRG; PAM sequence: AAG
actaattcaaggtggttcac

SEQ ID NO: 90033 - DNA, 20 bp, Artificial Sequence
  Description of Artificial Sequence: Synthetic oligonucleotide
  Target: LAMA2; (-) strand; PAM type: NRG; PAM sequence: TGG
ctgcaataactaattcaagg

SEQ ID NO: 90034 - DNA, 20 bp, Artificial Sequence
  Description of Artificial Sequence: Synthetic oligonucleotide
  Target: LAMA2; (-) strand; PAM type: NRG; PAM sequence: AGG
gcactgcaataactaattca

SEQ ID NO: 90035 - DNA, 20 bp, Artificial Sequence
  Description of Artificial Sequence: Synthetic oligonucleotide
  Target: LAMA2; (-) strand; PAM type: NRG; PAM sequence: AAG
ggcactgcaataactaattc

SEQ ID NO: 90036 - DNA, 20 bp, Artificial Sequence
  Description of Artificial Sequence: Synthetic oligonucleotide
  Target: LAMA2; (-) strand; PAM type: NRG; PAM sequence: GGG
agcaatactaaatatctgtt

SEQ ID NO: 90037 - DNA, 20 bp, Artificial Sequence
  Description of Artificial Sequence: Synthetic oligonucleotide
  Target: LAMA2; (-) strand; PAM type: NRG; PAM sequence: TGG
cagcaatactaaatatctgt

SEQ ID NO: 90038 - DNA, 20 bp, Artificial Sequence
  Description of Artificial Sequence: Synthetic oligonucleotide
  Target: LAMA2; (-) strand; PAM type: NRG; PAM sequence: CAG
gtaaacatttgaaggacaca

SEQ ID NO: 90039 - DNA, 20 bp, Artificial Sequence
  Description of Artificial Sequence: Synthetic oligonucleotide
  Target: LAMA2; (-) strand; PAM type: NRG; PAM sequence: AGG
ggaatattgtaaacatttga

SEQ ID NO: 90040 - DNA, 20 bp, Artificial Sequence
  Description of Artificial Sequence: Synthetic oligonucleotide
  Target: LAMA2; (-) strand; PAM type: NRG; PAM sequence: AAG
tggaatattgtaaacatttg

SEQ ID NO: 90041 - DNA, 20 bp, Artificial Sequence
  Description of Artificial Sequence: Synthetic oligonucleotide
  Target: LAMA2; (-) strand; PAM type: NRG; PAM sequence: TGG
gtgaactcacaaaggcacag

SEQ ID NO: 90042 - DNA, 20 bp, Artificial Sequence
  Description of Artificial Sequence: Synthetic oligonucleotide
  Target: LAMA2; (-) strand; PAM type: NRG; PAM sequence: CAG
gcagtgaactcacaaaggca

SEQ ID NO: 90043 - DNA, 20 bp, Artificial Sequence
  Description of Artificial Sequence: Synthetic oligonucleotide
  Target: LAMA2; (-) strand; PAM type: NRG; PAM sequence: AGG
gtgctgcagtgaactcacaa

SEQ ID NO: 90044 - DNA, 20 bp, Artificial Sequence
  Description of Artificial Sequence: Synthetic oligonucleotide
  Target: LAMA2; (-) strand; PAM type: NRG; PAM sequence: AAG
ggtgctgcagtgaactcaca

SEQ ID NO: 90045 - DNA, 20 bp, Artificial Sequence
  Description of Artificial Sequence: Synthetic oligonucleotide
  Target: LAMA2; (-) strand; PAM type: NRG; PAM sequence: CAG
agaggtgccccagggtgctg

SEQ ID NO: 90046 - DNA, 20 bp, Artificial Sequence
  Description of Artificial Sequence: Synthetic oligonucleotide
  Target: LAMA2; (-) strand; PAM type: NRG; PAM sequence: GGG
ctgtgtgtagaggtgcccca

SEQ ID NO: 90047 - DNA, 20 bp, Artificial Sequence
  Description of Artificial Sequence: Synthetic oligonucleotide
  Target: LAMA2; (-) strand; PAM type: NRG; PAM sequence: AGG
actgtgtgtagaggtgcccc

SEQ ID NO: 90048 - DNA, 20 bp, Artificial Sequence
  Description of Artificial Sequence: Synthetic oligonucleotide
  Target: LAMA2; (-) strand; PAM type: NRG; PAM sequence: CAG
aactgtgtgtagaggtgccc

SEQ ID NO: 90049 - DNA, 20 bp, Artificial Sequence
  Description of Artificial Sequence: Synthetic oligonucleotide
  Target: LAMA2; (-) strand; PAM type: NRG; PAM sequence: AGG
tgttcacaaactgtgtgtag

SEQ ID NO: 90050 - DNA, 20 bp, Artificial Sequence
  Description of Artificial Sequence: Synthetic oligonucleotide
  Target: LAMA2; (-) strand; PAM type: NRG; PAM sequence: GAG
gtgttcacaaactgtgtgta

SEQ ID NO: 90051 - DNA, 20 bp, Artificial Sequence
  Description of Artificial Sequence: Synthetic oligonucleotide
  Target: LAMA2; (-) strand; PAM type: NRG; PAM sequence: TAG
ctgtgttcacaaactgtgtg

SEQ ID NO: 90052 - DNA, 20 bp, Artificial Sequence
  Description of Artificial Sequence: Synthetic oligonucleotide
  Target: LAMA2; (-) strand; PAM type: NRG; PAM sequence: AGG
cgtgtagtttcaatgcctct

SEQ ID NO: 90053 - DNA, 20 bp, Artificial Sequence
  Description of Artificial Sequence: Synthetic oligonucleotide
  Target: LAMA2; (-) strand; PAM type: NRG; PAM sequence: TAG
ccgtgtagtttcaatgcctc

SEQ ID NO: 90054 - DNA, 20 bp, Artificial Sequence
  Description of Artificial Sequence: Synthetic oligonucleotide
  Target: LAMA2; (-) strand; PAM type: NRG; PAM sequence: TAG
acgtcattcaagtttccgtg

SEQ ID NO: 90055 - DNA, 20 bp, Artificial Sequence
  Description of Artificial Sequence: Synthetic oligonucleotide
  Target: LAMA2; (-) strand; PAM type: NRG; PAM sequence: AAG
tgggatccctaacgtcattc

SEQ ID NO: 90056 - DNA, 20 bp, Artificial Sequence
  Description of Artificial Sequence: Synthetic oligonucleotide
  Target: LAMA2; (-) strand; PAM type: NRG; PAM sequence: GGG
gaagattccccagtggctct

SEQ ID NO: 90057 - DNA, 20 bp, Artificial Sequence
  Description of Artificial Sequence: Synthetic oligonucleotide
  Target: LAMA2; (-) strand; PAM type: NRG; PAM sequence: TGG
tgaagattccccagtggctc

SEQ ID NO: 90058 - DNA, 20 bp, Artificial Sequence
  Description of Artificial Sequence: Synthetic oligonucleotide
  Target: LAMA2; (-) strand; PAM type: NRG; PAM sequence: TGG
ccctaatgaagattccccag

SEQ ID NO: 90059 - DNA, 20 bp, Artificial Sequence
  Description of Artificial Sequence: Synthetic oligonucleotide
  Target: LAMA2; (-) strand; PAM type: NRG; PAM sequence: CAG
cttccctaatgaagattccc

SEQ ID NO: 90060 - DNA, 20 bp, Artificial Sequence
  Description of Artificial Sequence: Synthetic oligonucleotide
  Target: LAMA2; (-) strand; PAM type: NRG; PAM sequence: AAG
gttgttgcacttccctaatg

SEQ ID NO: 90061 - DNA, 20 bp, Artificial Sequence
  Description of Artificial Sequence: Synthetic oligonucleotide
  Target: LAMA2; (-) strand; PAM type: NRG; PAM sequence: GAG
tttgatagggaaagtttaat

SEQ ID NO: 90062 - DNA, 20 bp, Artificial Sequence
  Description of Artificial Sequence: Synthetic oligonucleotide
  Target: LAMA2; (-) strand; PAM type: NRG; PAM sequence: AAG
ttcagtttttttgataggga

SEQ ID NO: 90063 - DNA, 20 bp, Artificial Sequence
  Description of Artificial Sequence: Synthetic oligonucleotide
  Target: LAMA2; (-) strand; PAM type: NRG; PAM sequence: GGG
tgacttcagtttttttgata

SEQ ID NO: 90064 - DNA, 20 bp, Artificial Sequence
  Description of Artificial Sequence: Synthetic oligonucleotide
  Target: LAMA2; (-) strand; PAM type: NRG; PAM sequence: AGG
ctgacttcagtttttttgat

SEQ ID NO: 90065 - DNA, 20 bp, Artificial Sequence
  Description of Artificial Sequence: Synthetic oligonucleotide
  Target: LAMA2; (-) strand; PAM type: NRG; PAM sequence: TAG
tctgacttcagtttttttga

SEQ ID NO: 90066 - DNA, 20 bp, Artificial Sequence
  Description of Artificial Sequence: Synthetic oligonucleotide
  Target: LAMA2; (-) strand; PAM type: NRG; PAM sequence: CAG
tgaattcatctctctgactt

SEQ ID NO: 90067 - DNA, 20 bp, Artificial Sequence
  Description of Artificial Sequence: Synthetic oligonucleotide
  Target: LAMA2; (-) strand; PAM type: NRG; PAM sequence: AAG
ttaccaagtaggttctcatc

SEQ ID NO: 90068 - DNA, 20 bp, Artificial Sequence
  Description of Artificial Sequence: Synthetic oligonucleotide
  Target: LAMA2; (-) strand; PAM type: NRG; PAM sequence: AGG
cttcaaatccattaccaagt

SEQ ID NO: 90069 - DNA, 20 bp, Artificial Sequence
  Description of Artificial Sequence: Synthetic oligonucleotide
  Target: LAMA2; (-) strand; PAM type: NRG; PAM sequence: TAG
ccttcaaatccattaccaag

SEQ ID NO: 90070 - DNA, 20 bp, Artificial Sequence
  Description of Artificial Sequence: Synthetic oligonucleotide
  Target: LAMA2; (-) strand; PAM type: NRG; PAM sequence: AAG
tctccttcaaatccattacc

SEQ ID NO: 90071 - DNA, 20 bp, Artificial Sequence
  Description of Artificial Sequence: Synthetic oligonucleotide
  Target: LAMA2; (-) strand; PAM type: NRG; PAM sequence: CAG
gcactctcttagaatccctt

SEQ ID NO: 90072 - DNA, 20 bp, Artificial Sequence
  Description of Artificial Sequence: Synthetic oligonucleotide
  Target: LAMA2; (-) strand; PAM type: NRG; PAM sequence: TAG
ccctcgcttctgcactctct

SEQ ID NO: 90073 - DNA, 20 bp, Artificial Sequence
  Description of Artificial Sequence: Synthetic oligonucleotide
  Target: LAMA2; (-) strand; PAM type: NRG; PAM sequence: AGG
tgtccactcctccatgttcc

SEQ ID NO: 90074 - DNA, 20 bp, Artificial Sequence
  Description of Artificial Sequence: Synthetic oligonucleotide
  Target: LAMA2; (-) strand; PAM type: NRG; PAM sequence: CAG
ctgtccactcctccatgttc

SEQ ID NO: 90075 - DNA, 20 bp, Artificial Sequence
  Description of Artificial Sequence: Synthetic oligonucleotide
  Target: LAMA2; (-) strand; PAM type: NRG; PAM sequence: AAG
ctttcctcttgctttagata

SEQ ID NO: 90076 - DNA, 20 bp, Artificial Sequence
  Description of Artificial Sequence: Synthetic oligonucleotide
  Target: LAMA2; (-) strand; PAM type: NRG; PAM sequence: TAG
gttgccctttcctcttgctt

SEQ ID NO: 90077 - DNA, 20 bp, Artificial Sequence
  Description of Artificial Sequence: Synthetic oligonucleotide
  Target: LAMA2; (-) strand; PAM type: NRG; PAM sequence: GAG
aaaagctttgagaatattct

SEQ ID NO: 90078 - DNA, 20 bp, Artificial Sequence
  Description of Artificial Sequence: Synthetic oligonucleotide
  Target: LAMA2; (-) strand; PAM type: NRG; PAM sequence: GAG
ttattcagggaaaaagcttt

SEQ ID NO: 90079 - DNA, 20 bp, Artificial Sequence
  Description of Artificial Sequence: Synthetic oligonucleotide
  Target: LAMA2; (-) strand; PAM type: NRG; PAM sequence: AAG
gatgctattattcagggaaa

SEQ ID NO: 90080 - DNA, 20 bp, Artificial Sequence
  Description of Artificial Sequence: Synthetic oligonucleotide
  Target: LAMA2; (-) strand; PAM type: NRG; PAM sequence: GGG
ctgaaggatgctattattca

SEQ ID NO: 90081 - DNA, 20 bp, Artificial Sequence
  Description of Artificial Sequence: Synthetic oligonucleotide
  Target: LAMA2; (-) strand; PAM type: NRG; PAM sequence: AGG
tctgaaggatgctattattc

SEQ ID NO: 90082 - DNA, 20 bp, Artificial Sequence
  Description of Artificial Sequence: Synthetic oligonucleotide
  Target: LAMA2; (-) strand; PAM type: NRG; PAM sequence: CAG
ttctgaaggatgctattatt

SEQ ID NO: 90083 - DNA, 20 bp, Artificial Sequence
  Description of Artificial Sequence: Synthetic oligonucleotide
  Target: LAMA2; (-) strand; PAM type: NRG; PAM sequence: AGG
ttacaagacttcttttctga

SEQ ID NO: 90084 - DNA, 20 bp, Artificial Sequence
  Description of Artificial Sequence: Synthetic oligonucleotide
  Target: LAMA2; (-) strand; PAM type: NRG; PAM sequence: AAG
gttacaagacttcttttctg

SEQ ID NO: 90085 - DNA, 20 bp, Artificial Sequence
  Description of Artificial Sequence: Synthetic oligonucleotide
  Target: LAMA2; (-) strand; PAM type: NRG; PAM sequence: AAG
ctttgcaatgagtcagttac

SEQ ID NO: 90086 - DNA, 20 bp, Artificial Sequence
  Description of Artificial Sequence: Synthetic oligonucleotide
  Target: LAMA2; (-) strand; PAM type: NRG; PAM sequence: CAG
taagagactttgcaatgagt

SEQ ID NO: 90087 - DNA, 20 bp, Artificial Sequence
  Description of Artificial Sequence: Synthetic oligonucleotide
  Target: LAMA2; (-) strand; PAM type: NRG; PAM sequence: GAG
tgtgtaagagactttgcaat

SEQ ID NO: 90088 - DNA, 20 bp, Artificial Sequence
  Description of Artificial Sequence: Synthetic oligonucleotide
  Target: LAMA2; (-) strand; PAM type: NRG; PAM sequence: GAG
gagtacataccattgtgtaa

SEQ ID NO: 90089 - DNA, 20 bp, Artificial Sequence
  Description of Artificial Sequence: Synthetic oligonucleotide
  Target: LAMA2; (-) strand; PAM type: NRG; PAM sequence: AAG
aagagtacataccattgtgt

SEQ ID NO: 90090 - DNA, 20 bp, Artificial Sequence
  Description of Artificial Sequence: Synthetic oligonucleotide
  Target: LAMA2; (-) strand; PAM type: NRG; PAM sequence: GAG
ccagttgtgtcttccccaaa

SEQ ID NO: 90091 - DNA, 20 bp, Artificial Sequence
  Description of Artificial Sequence: Synthetic oligonucleotide
  Target: LAMA2; (-) strand; PAM type: NRG; PAM sequence: AAG
ttccagttgtgtcttcccca

SEQ ID NO: 90092 - DNA, 20 bp, Artificial Sequence
  Description of Artificial Sequence: Synthetic oligonucleotide
  Target: LAMA2; (-) strand; PAM type: NRG; PAM sequence: CAG
gcttttcctggtgttgtttc

SEQ ID NO: 90093 - DNA, 20 bp, Artificial Sequence
  Description of Artificial Sequence: Synthetic oligonucleotide
  Target: LAMA2; (-) strand; PAM type: NRG; PAM sequence: TGG
ctgtaaaatcaagcttttcc

SEQ ID NO: 90094 - DNA, 20 bp, Artificial Sequence
  Description of Artificial Sequence: Synthetic oligonucleotide
  Target: LAMA2; (-) strand; PAM type: NRG; PAM sequence: AAG
tttccataagctgtaaaatc

SEQ ID NO: 90095 - DNA, 20 bp, Artificial Sequence
  Description of Artificial Sequence: Synthetic oligonucleotide
  Target: LAMA2; (-) strand; PAM type: NRG; PAM sequence: AAG
caactccacaatctttccat

SEQ ID NO: 90096 - DNA, 20 bp, Artificial Sequence
  Description of Artificial Sequence: Synthetic oligonucleotide
  Target: LAMA2; (-) strand; PAM type: NRG; PAM sequence: AGG
aatttagaggatgcacccct

SEQ ID NO: 90097 - DNA, 20 bp, Artificial Sequence
  Description of Artificial Sequence: Synthetic oligonucleotide
  Target: LAMA2; (-) strand; PAM type: NRG; PAM sequence: TAG
caatttagaggatgcacccc

SEQ ID NO: 90098 - DNA, 20 bp, Artificial Sequence
  Description of Artificial Sequence: Synthetic oligonucleotide
  Target: LAMA2; (-) strand; PAM type: NRG; PAM sequence: AGG
gatatcactctgcaatttag

SEQ ID NO: 90099 - DNA, 20 bp, Artificial Sequence
  Description of Artificial Sequence: Synthetic oligonucleotide
  Target: LAMA2; (-) strand; PAM type: NRG; PAM sequence: GAG
agatatcactctgcaattta

SEQ ID NO: 90100 - DNA, 20 bp, Artificial Sequence
  Description of Artificial Sequence: Synthetic oligonucleotide
  Target: LAMA2; (-) strand; PAM type: NRG; PAM sequence: TAG
taagatatcactctgcaatt

SEQ ID NO: 90101 - DNA, 20 bp, Artificial Sequence
  Description of Artificial Sequence: Synthetic oligonucleotide
  Target: LAMA2; (-) strand; PAM type: NRG; PAM sequence: AAG
aattcttaaaaggattgctt

SEQ ID NO: 90102 - DNA, 20 bp, Artificial Sequence
  Description of Artificial Sequence: Synthetic oligonucleotide
  Target: LAMA2; (-) strand; PAM type: NRG; PAM sequence: AGG
gctcttaagtaattcttaaa

SEQ ID NO: 90103 - DNA, 20 bp, Artificial Sequence
  Description of Artificial Sequence: Synthetic oligonucleotide
  Target: LAMA2; (-) strand; PAM type: NRG; PAM sequence: AAG
ggctcttaagtaattcttaa

SEQ ID NO: 90104 - DNA, 20 bp, Artificial Sequence
  Description of Artificial Sequence: Synthetic oligonucleotide
  Target: LAMA2; (-) strand; PAM type: NRG; PAM sequence: AAG
gccaccacgctcaggctctt

SEQ ID NO: 90105 - DNA, 20 bp, Artificial Sequence
  Description of Artificial Sequence: Synthetic oligonucleotide
  Target: LAMA2; (-) strand; PAM type: NRG; PAM sequence: AGG
aggtgtgagccaccacgctc

SEQ ID NO: 90106 - DNA, 20 bp, Artificial Sequence
  Description of Artificial Sequence: Synthetic oligonucleotide
  Target: LAMA2; (-) strand; PAM type: NRG; PAM sequence: CAG
caggtgtgagccaccacgct

SEQ ID NO: 90107 - DNA, 20 bp, Artificial Sequence
  Description of Artificial Sequence: Synthetic oligonucleotide
  Target: LAMA2; (-) strand; PAM type: NRG; PAM sequence: GAG
agtgctgggattacaggtgt

SEQ ID NO: 90108 - DNA, 20 bp, Artificial Sequence
  Description of Artificial Sequence: Synthetic oligonucleotide
  Target: LAMA2; (-) strand; PAM type: NRG; PAM sequence: AGG
tcccaaagtgctgggattac

SEQ ID NO: 90109 - DNA, 20 bp, Artificial Sequence
  Description of Artificial Sequence: Synthetic oligonucleotide
  Target: LAMA2; (-) strand; PAM type: NRG; PAM sequence: CAG
ctcccaaagtgctgggatta

SEQ ID NO: 90110 - DNA, 20 bp, Artificial Sequence
  Description of Artificial Sequence: Synthetic oligonucleotide
  Target: LAMA2; (-) strand; PAM type: NRG; PAM sequence: GGG
cctccgtctcccaaagtgct

SEQ ID NO: 90111 - DNA, 20 bp, Artificial Sequence
  Description of Artificial Sequence: Synthetic oligonucleotide
  Target: LAMA2; (-) strand; PAM type: NRG; PAM sequence: TGG
acctccgtctcccaaagtgc

SEQ ID NO: 90112 - DNA, 20 bp, Artificial Sequence
  Description of Artificial Sequence: Synthetic oligonucleotide
  Target: LAMA2; (-) strand; PAM type: NRG; PAM sequence: AAG
ctactcacctccgtctccca

SEQ ID NO: 90113 - DNA, 20 bp, Artificial Sequence
  Description of Artificial Sequence: Synthetic oligonucleotide
  Target: LAMA2; (-) strand; PAM type: NRG; PAM sequence: AAG
ggtcttgaactcctaacctc

SEQ ID NO: 90114 - DNA, 20 bp, Artificial Sequence
  Description of Artificial Sequence: Synthetic oligonucleotide
  Target: LAMA2; (-) strand; PAM type: NRG; PAM sequence: TGG
tttcgccatgttggccaggc

SEQ ID NO: 90115 - DNA, 20 bp, Artificial Sequence
  Description of Artificial Sequence: Synthetic oligonucleotide
  Target: LAMA2; (-) strand; PAM type: NRG; PAM sequence: AGG
gggatttcgccatgttggcc

SEQ ID NO: 90116 - DNA, 20 bp, Artificial Sequence
  Description of Artificial Sequence: Synthetic oligonucleotide
  Target: LAMA2; (-) strand; PAM type: NRG; PAM sequence: CAG
tgggatttcgccatgttggc

SEQ ID NO: 90117 - DNA, 20 bp, Artificial Sequence
  Description of Artificial Sequence: Synthetic oligonucleotide
  Target: LAMA2; (-) strand; PAM type: NRG; PAM sequence: TGG
gagatgggatttcgccatgt

SEQ ID NO: 90118 - DNA, 20 bp, Artificial Sequence
  Description of Artificial Sequence: Synthetic oligonucleotide
  Target: LAMA2; (-) strand; PAM type: NRG; PAM sequence: GGG
tttgtattttttgtagagat

SEQ ID NO: 90119 - DNA, 20 bp, Artificial Sequence
  Description of Artificial Sequence: Synthetic oligonucleotide
  Target: LAMA2; (-) strand; PAM type: NRG; PAM sequence: TGG
ttttgtattttttgtagaga

SEQ ID NO: 90120 - DNA, 20 bp, Artificial Sequence
  Description of Artificial Sequence: Synthetic oligonucleotide
  Target: LAMA2; (-) strand; PAM type: NRG; PAM sequence: GAG
aattttttgtattttttgta

SEQ ID NO: 90121 - DNA, 20 bp, Artificial Sequence
  Description of Artificial Sequence: Synthetic oligonucleotide
  Target: LAMA2; (-) strand; PAM type: NRG; PAM sequence: TAG
ataattttttgtattttttg

SEQ ID NO: 90122 - DNA, 20 bp, Artificial Sequence
  Description of Artificial Sequence: Synthetic oligonucleotide
  Target: LAMA2; (-) strand; PAM type: NRG; PAM sequence: AGG
tcccgagtatctgggactac

SEQ ID NO: 90123 - DNA, 20 bp, Artificial Sequence
  Description of Artificial Sequence: Synthetic oligonucleotide
  Target: LAMA2; (-) strand; PAM type: NRG; PAM sequence: CAG
ctcccgagtatctgggacta

SEQ ID NO: 90124 - DNA, 20 bp, Artificial Sequence
  Description of Artificial Sequence: Synthetic oligonucleotide
  Target: LAMA2; (-) strand; PAM type: NRG; PAM sequence: GGG
cctcagcctcccgagtatct

SEQ ID NO: 90125 - DNA, 20 bp, Artificial Sequence
  Description of Artificial Sequence: Synthetic oligonucleotide
  Target: LAMA2; (-) strand; PAM type: NRG; PAM sequence: TGG
gcctcagcctcccgagtatc

SEQ ID NO: 90126 - DNA, 20 bp, Artificial Sequence
  Description of Artificial Sequence: Synthetic oligonucleotide
  Target: LAMA2; (-) strand; PAM type: NRG; PAM sequence: GAG
ttcttgtgcctcagcctccc

SEQ ID NO: 90127 - DNA, 20 bp, Artificial Sequence
  Description of Artificial Sequence: Synthetic oligonucleotide
  Target: LAMA2; (-) strand; PAM type: NRG; PAM sequence: CAG
cttaagcagttcttgtgcct

SEQ ID NO: 90128 - DNA, 20 bp, Artificial Sequence
  Description of Artificial Sequence: Synthetic oligonucleotide
  Target: LAMA2; (-) strand; PAM type: NRG; PAM sequence: CAG
ctcctcctcccaggcttaag

SEQ ID NO: 90129 - DNA, 20 bp, Artificial Sequence
  Description of Artificial Sequence: Synthetic oligonucleotide
  Target: LAMA2; (-) strand; PAM type: NRG; PAM sequence: AAG
aacctcctcctcccaggctt

SEQ ID NO: 90130 - DNA, 20 bp, Artificial Sequence
  Description of Artificial Sequence: Synthetic oligonucleotide
  Target: LAMA2; (-) strand; PAM type: NRG; PAM sequence: AGG
cactgcaacctcctcctccc

SEQ ID NO: 90131 - DNA, 20 bp, Artificial Sequence
  Description of Artificial Sequence: Synthetic oligonucleotide
  Target: LAMA2; (-) strand; PAM type: NRG; PAM sequence: CAG
tcactgcaacctcctcctcc

SEQ ID NO: 90132 - DNA, 20 bp, Artificial Sequence
  Description of Artificial Sequence: Synthetic oligonucleotide
  Target: LAMA2; (-) strand; PAM type: NRG; PAM sequence: TAG
gatgtggagtggcaccatct

SEQ ID NO: 90133 - DNA, 20 bp, Artificial Sequence
  Description of Artificial Sequence: Synthetic oligonucleotide
  Target: LAMA2; (-) strand; PAM type: NRG; PAM sequence: TGG
tcattcaggctgatgtggag

SEQ ID NO: 90134 - DNA, 20 bp, Artificial Sequence
  Description of Artificial Sequence: Synthetic oligonucleotide
  Target: LAMA2; (-) strand; PAM type: NRG; PAM sequence: GAG
ctgtcattcaggctgatgtg

SEQ ID NO: 90135 - DNA, 20 bp, Artificial Sequence
  Description of Artificial Sequence: Synthetic oligonucleotide
  Target: LAMA2; (-) strand; PAM type: NRG; PAM sequence: TGG
ctctgtcattcaggctgatg

SEQ ID NO: 90136 - DNA, 20 bp, Artificial Sequence
  Description of Artificial Sequence: Synthetic oligonucleotide
  Target: LAMA2; (-) strand; PAM type: NRG; PAM sequence: AGG
agagtcttgctctgtcattc

SEQ ID NO: 90137 - DNA, 20 bp, Artificial Sequence
  Description of Artificial Sequence: Synthetic oligonucleotide
  Target: LAMA2; (-) strand; PAM type: NRG; PAM sequence: CAG
tagagtcttgctctgtcatt

SEQ ID NO: 90138 - DNA, 20 bp, Artificial Sequence
  Description of Artificial Sequence: Synthetic oligonucleotide
  Target: LAMA2; (-) strand; PAM type: NRG; PAM sequence: GAG
tttctttattttttgaccta

SEQ ID NO: 90139 - DNA, 20 bp, Artificial Sequence
  Description of Artificial Sequence: Synthetic oligonucleotide
  Target: LAMA2; (-) strand; PAM type: NRG; PAM sequence: TAG
tctttctttattttttgacc

SEQ ID NO: 90140 - DNA, 20 bp, Artificial Sequence
  Description of Artificial Sequence: Synthetic oligonucleotide
  Target: LAMA2; (-) strand; PAM type: NRG; PAM sequence: AAG
agttagtcaagtacttactt

SEQ ID NO: 90141 - DNA, 20 bp, Artificial Sequence
  Description of Artificial Sequence: Synthetic oligonucleotide
  Target: LAMA2; (-) strand; PAM type: NRG; PAM sequence: AAG
atttatataaccagttagtc

SEQ ID NO: 90142 - DNA, 20 bp, Artificial Sequence
  Description of Artificial Sequence: Synthetic oligonucleotide
  Target: LAMA2; (-) strand; PAM type: NRG; PAM sequence: TAG
atcacatttatataaccagt

SEQ ID NO: 90143 - DNA, 20 bp, Artificial Sequence
  Description of Artificial Sequence: Synthetic oligonucleotide
  Target: LAMA2; (-) strand; PAM type: NRG; PAM sequence: CAG
tatgatcacatttatataac

SEQ ID NO: 90144 - DNA, 20 bp, Artificial Sequence
  Description of Artificial Sequence: Synthetic oligonucleotide
  Target: LAMA2; (-) strand; PAM type: NRG; PAM sequence: AGG
gtctttttcatttaccctaa

SEQ ID NO: 90145 - DNA, 20 bp, Artificial Sequence
  Description of Artificial Sequence: Synthetic oligonucleotide
  Target: LAMA2; (-) strand; PAM type: NRG; PAM sequence: AAG
tgtctttttcatttacccta

SEQ ID NO: 90146 - DNA, 20 bp, Artificial Sequence
  Description of Artificial Sequence: Synthetic oligonucleotide
  Target: LAMA2; (-) strand; PAM type: NRG; PAM sequence: TAG
gttacccatttacacaatat

SEQ ID NO: 90147 - DNA, 20 bp, Artificial Sequence
  Description of Artificial Sequence: Synthetic oligonucleotide
  Target: LAMA2; (-) strand; PAM type: NRG; PAM sequence: CAG
gatgtttttttcccaagcca

SEQ ID NO: 90148 - DNA, 20 bp, Artificial Sequence
  Description of Artificial Sequence: Synthetic oligonucleotide
  Target: LAMA2; (-) strand; PAM type: NRG; PAM sequence: AAG
ttactagatgtttttttccc

SEQ ID NO: 90149 - DNA, 20 bp, Artificial Sequence
  Description of Artificial Sequence: Synthetic oligonucleotide
  Target: LAMA2; (-) strand; PAM type: NRG; PAM sequence: TAG
aattttcaggatactgttac

SEQ ID NO: 90150 - DNA, 20 bp, Artificial Sequence
  Description of Artificial Sequence: Synthetic oligonucleotide
  Target: LAMA2; (-) strand; PAM type: NRG; PAM sequence: AGG
ggaccatttaaacaattttc

SEQ ID NO: 90151 - DNA, 20 bp, Artificial Sequence
  Description of Artificial Sequence: Synthetic oligonucleotide
  Target: LAMA2; (-) strand; PAM type: NRG; PAM sequence: CAG
cggaccatttaaacaatttt

SEQ ID NO: 90152 - DNA, 20 bp, Artificial Sequence
  Description of Artificial Sequence: Synthetic oligonucleotide
  Target: LAMA2; (-) strand; PAM type: NRG; PAM sequence: CGG
catttaagttgtgtgaaaca

SEQ ID NO: 90153 - DNA, 20 bp, Artificial Sequence
  Description of Artificial Sequence: Synthetic oligonucleotide
  Target: LAMA2; (-) strand; PAM type: NRG; PAM sequence: AAG
aagctgttttacttccattt

SEQ ID NO: 90154 - DNA, 20 bp, Artificial Sequence
  Description of Artificial Sequence: Synthetic oligonucleotide
  Target: LAMA2; (-) strand; PAM type: NRG; PAM sequence: AAG
cctgaaaattgtcatgagcg

SEQ ID NO: 90155 - DNA, 20 bp, Artificial Sequence
  Description of Artificial Sequence: Synthetic oligonucleotide
  Target: LAMA2; (-) strand; PAM type: NRG; PAM sequence: GAG
aattgcctgaaaattgtcat

SEQ ID NO: 90156 - DNA, 20 bp, Artificial Sequence
  Description of Artificial Sequence: Synthetic oligonucleotide
  Target: LAMA2; (-) strand; PAM type: NRG; PAM sequence: TAG
ataatagtaaaacattgttt

SEQ ID NO: 90157 - DNA, 20 bp, Artificial Sequence
  Description of Artificial Sequence: Synthetic oligonucleotide
  Target: LAMA2; (-) strand; PAM type: NRG; PAM sequence: TAG
gctaataataatagcgataa

SEQ ID NO: 90158 - DNA, 20 bp, Artificial Sequence
  Description of Artificial Sequence: Synthetic oligonucleotide
  Target: LAMA2; (-) strand; PAM type: NRG; PAM sequence: TAG
ctgctgagggctaataataa

SEQ ID NO: 90159 - DNA, 20 bp, Artificial Sequence
  Description of Artificial Sequence: Synthetic oligonucleotide
  Target: LAMA2; (-) strand; PAM type: NRG; PAM sequence: GGG
aatttaccctattctgctga

SEQ ID NO: 90160 - DNA, 20 bp, Artificial Sequence
  Description of Artificial Sequence: Synthetic oligonucleotide
  Target: LAMA2; (-) strand; PAM type: NRG; PAM sequence: AGG
taatttaccctattctgctg

SEQ ID NO: 90161 - DNA, 20 bp, Artificial Sequence
  Description of Artificial Sequence: Synthetic oligonucleotide
  Target: LAMA2; (-) strand; PAM type: NRG; PAM sequence: GAG
ataatttaccctattctgct

SEQ ID NO: 90162 - DNA, 20 bp, Artificial Sequence
  Description of Artificial Sequence: Synthetic oligonucleotide
  Target: LAMA2; (-) strand; PAM type: NRG; PAM sequence: TAG
ataaaacatgaactaaggaa

SEQ ID NO: 90163 - DNA, 20 bp, Artificial Sequence
  Description of Artificial Sequence: Synthetic oligonucleotide
  Target: LAMA2; (-) strand; PAM type: NRG; PAM sequence: AGG
ataatataaaacatgaacta

SEQ ID NO: 90164 - DNA, 20 bp, Artificial Sequence
  Description of Artificial Sequence: Synthetic oligonucleotide
  Target: LAMA2; (-) strand; PAM type: NRG; PAM sequence: AAG
gataatataaaacatgaact

SEQ ID NO: 90165 - DNA, 20 bp, Artificial Sequence
  Description of Artificial Sequence: Synthetic oligonucleotide
  Target: LAMA2; (-) strand; PAM type: NRG; PAM sequence: CAG
taggggctcctcatgcaggt

SEQ ID NO: 90166 - DNA, 20 bp, Artificial Sequence
  Description of Artificial Sequence: Synthetic oligonucleotide
  Target: LAMA2; (-) strand; PAM type: NRG; PAM sequence: AGG
aaaataggggctcctcatgc

SEQ ID NO: 90167 - DNA, 20 bp, Artificial Sequence
  Description of Artificial Sequence: Synthetic oligonucleotide
  Target: LAMA2; (-) strand; PAM type: NRG; PAM sequence: CAG
aaaaataggggctcctcatg

SEQ ID NO: 90168 - DNA, 20 bp, Artificial Sequence
  Description of Artificial Sequence: Synthetic oligonucleotide
  Target: LAMA2; (-) strand; PAM type: NRG; PAM sequence: GGG
ataaatacgcagaaaaatag

SEQ ID NO: 90169 - DNA, 20 bp, Artificial Sequence
  Description of Artificial Sequence: Synthetic oligonucleotide
  Target: LAMA2; (-) strand; PAM type: NRG; PAM sequence: GGG
aataaatacgcagaaaaata

SEQ ID NO: 90170 - DNA, 20 bp, Artificial Sequence
  Description of Artificial Sequence: Synthetic oligonucleotide
  Target: LAMA2; (-) strand; PAM type: NRG; PAM sequence: AGG
aaataaatacgcagaaaaat

SEQ ID NO: 90171 - DNA, 20 bp, Artificial Sequence
  Description of Artificial Sequence: Synthetic oligonucleotide
  Target: LAMA2; (-) strand; PAM type: NRG; PAM sequence: TAG
caaataaatacgcagaaaaa

SEQ ID NO: 90172 - DNA, 20 bp, Artificial Sequence
  Description of Artificial Sequence: Synthetic oligonucleotide
  Target: LAMA2; (-) strand; PAM type: NRG; PAM sequence: CAG
aagaggaacaaataaatacg

SEQ ID NO: 90173 - DNA, 20 bp, Artificial Sequence
  Description of Artificial Sequence: Synthetic oligonucleotide
  Target: LAMA2; (-) strand; PAM type: NRG; PAM sequence: AGG
gaggtgggaagggggaaaag

SEQ ID NO: 90174 - DNA, 20 bp, Artificial Sequence
  Description of Artificial Sequence: Synthetic oligonucleotide
  Target: LAMA2; (-) strand; PAM type: NRG; PAM sequence: GAG
agaggtgggaagggggaaaa

SEQ ID NO: 90175 - DNA, 20 bp, Artificial Sequence
  Description of Artificial Sequence: Synthetic oligonucleotide
  Target: LAMA2; (-) strand; PAM type: NRG; PAM sequence: AAG
ttagaggtgggaagggggaa

SEQ ID NO: 90176 - DNA, 20 bp, Artificial Sequence
  Description of Artificial Sequence: Synthetic oligonucleotide
  Target: LAMA2; (-) strand; PAM type: NRG; PAM sequence: GGG
aggaattagaggtgggaagg

SEQ ID NO: 90177 - DNA, 20 bp, Artificial Sequence
  Description of Artificial Sequence: Synthetic oligonucleotide
  Target: LAMA2; (-) strand; PAM type: NRG; PAM sequence: GGG
gaggaattagaggtgggaag

SEQ ID NO: 90178 - DNA, 20 bp, Artificial Sequence
  Description of Artificial Sequence: Synthetic oligonucleotide
  Target: LAMA2; (-) strand; PAM type: NRG; PAM sequence: GGG
agaggaattagaggtgggaa

SEQ ID NO: 90179 - DNA, 20 bp, Artificial Sequence
  Description of Artificial Sequence: Synthetic oligonucleotide
  Target: LAMA2; (-) strand; PAM type: NRG; PAM sequence: AGG
gagaggaattagaggtggga

SEQ ID NO: 90180 - DNA, 20 bp, Artificial Sequence
  Description of Artificial Sequence: Synthetic oligonucleotide
  Target: LAMA2; (-) strand; PAM type: NRG; PAM sequence: AAG
agagaggaattagaggtggg

SEQ ID NO: 90181 - DNA, 20 bp, Artificial Sequence
  Description of Artificial Sequence: Synthetic oligonucleotide
  Target: LAMA2; (-) strand; PAM type: NRG; PAM sequence: GGG
atgagagaggaattagaggt

SEQ ID NO: 90182 - DNA, 20 bp, Artificial Sequence
  Description of Artificial Sequence: Synthetic oligonucleotide
  Target: LAMA2; (-) strand; PAM type: NRG; PAM sequence: TGG
tatgagagaggaattagagg

SEQ ID NO: 90183 - DNA, 20 bp, Artificial Sequence
  Description of Artificial Sequence: Synthetic oligonucleotide
  Target: LAMA2; (-) strand; PAM type: NRG; PAM sequence: AGG
tactatgagagaggaattag

SEQ ID NO: 90184 - DNA, 20 bp, Artificial Sequence
  Description of Artificial Sequence: Synthetic oligonucleotide
  Target: LAMA2; (-) strand; PAM type: NRG; PAM sequence: GAG
atactatgagagaggaatta

SEQ ID NO: 90185 - DNA, 20 bp, Artificial Sequence
  Description of Artificial Sequence: Synthetic oligonucleotide
  Target: LAMA2; (-) strand; PAM type: NRG; PAM sequence: TAG
aaatactatgagagaggaat

SEQ ID NO: 90186 - DNA, 20 bp, Artificial Sequence
  Description of Artificial Sequence: Synthetic oligonucleotide
  Target: LAMA2; (-) strand; PAM type: NRG; PAM sequence: AGG
aaactaaaatactatgagag

SEQ ID NO: 90187 - DNA, 20 bp, Artificial Sequence
  Description of Artificial Sequence: Synthetic oligonucleotide
  Target: LAMA2; (-) strand; PAM type: NRG; PAM sequence: GAG
taaactaaaatactatgaga

SEQ ID NO: 90188 - DNA, 20 bp, Artificial Sequence
  Description of Artificial Sequence: Synthetic oligonucleotide
  Target: LAMA2; (-) strand; PAM type: NRG; PAM sequence: GAG
cataaactaaaatactatga

SEQ ID NO: 90189 - DNA, 20 bp, Artificial Sequence
  Description of Artificial Sequence: Synthetic oligonucleotide
  Target: LAMA2; (-) strand; PAM type: NRG; PAM sequence: GAG
gacataaactaaaatactat

SEQ ID NO: 90190 - DNA, 20 bp, Artificial Sequence
  Description of Artificial Sequence: Synthetic oligonucleotide
  Target: LAMA2; (-) strand; PAM type: NRG; PAM sequence: GGG
cctgtatagcccgggagttg

SEQ ID NO: 90191 - DNA, 20 bp, Artificial Sequence
  Description of Artificial Sequence: Synthetic oligonucleotide
  Target: LAMA2; (-) strand; PAM type: NRG; PAM sequence: GGG
acctgtatagcccgggagtt

SEQ ID NO: 90192 - DNA, 20 bp, Artificial Sequence
  Description of Artificial Sequence: Synthetic oligonucleotide
  Target: LAMA2; (-) strand; PAM type: NRG; PAM sequence: TGG
gacctgtatagcccgggagt

SEQ ID NO: 90193 - DNA, 20 bp, Artificial Sequence
  Description of Artificial Sequence: Synthetic oligonucleotide
  Target: LAMA2; (-) strand; PAM type: NRG; PAM sequence: GAG
cacagacctgtatagcccgg

SEQ ID NO: 90194 - DNA, 20 bp, Artificial Sequence
  Description of Artificial Sequence: Synthetic oligonucleotide
  Target: LAMA2; (-) strand; PAM type: NRG; PAM sequence: GGG
gccacagacctgtatagccc

SEQ ID NO: 90195 - DNA, 20 bp, Artificial Sequence
  Description of Artificial Sequence: Synthetic oligonucleotide
  Target: LAMA2; (-) strand; PAM type: NRG; PAM sequence: CGG
ggccacagacctgtatagcc

SEQ ID NO: 90196 - DNA, 20 bp, Artificial Sequence
  Description of Artificial Sequence: Synthetic oligonucleotide
  Target: LAMA2; (-) strand; PAM type: NRG; PAM sequence: TAG
taacaggccacagacctgta

SEQ ID NO: 90197 - DNA, 20 bp, Artificial Sequence
  Description of Artificial Sequence: Synthetic oligonucleotide
  Target: LAMA2; (-) strand; PAM type: NRG; PAM sequence: CAG
gcccaattcttaacaggcca

SEQ ID NO: 90198 - DNA, 20 bp, Artificial Sequence
  Description of Artificial Sequence: Synthetic oligonucleotide
  Target: LAMA2; (-) strand; PAM type: NRG; PAM sequence: AGG
tgtgccgcccaattcttaac

SEQ ID NO: 90199 - DNA, 20 bp, Artificial Sequence
  Description of Artificial Sequence: Synthetic oligonucleotide
  Target: LAMA2; (-) strand; PAM type: NRG; PAM sequence: CAG
ttgtgccgcccaattcttaa

SEQ ID NO: 90200 - DNA, 20 bp, Artificial Sequence
  Description of Artificial Sequence: Synthetic oligonucleotide
  Target: LAMA2; (-) strand; PAM type: NRG; PAM sequence: CAG
gacaggcggtagagctcagg

SEQ ID NO: 90201 - DNA, 20 bp, Artificial Sequence
  Description of Artificial Sequence: Synthetic oligonucleotide
  Target: LAMA2; (-) strand; PAM type: NRG; PAM sequence: AGG
tctgacaggcggtagagctc

SEQ ID NO: 90202 - DNA, 20 bp, Artificial Sequence
  Description of Artificial Sequence: Synthetic oligonucleotide
  Target: LAMA2; (-) strand; PAM type: NRG; PAM sequence: CAG
atctgacaggcggtagagct

SEQ ID NO: 90203 - DNA, 20 bp, Artificial Sequence
  Description of Artificial Sequence: Synthetic oligonucleotide
  Target: LAMA2; (-) strand; PAM type: NRG; PAM sequence: GAG
cgctgatctgacaggcggta

SEQ ID NO: 90204 - DNA, 20 bp, Artificial Sequence
  Description of Artificial Sequence: Synthetic oligonucleotide
  Target: LAMA2; (-) strand; PAM type: NRG; PAM sequence: TAG
accgctgatctgacaggcgg

SEQ ID NO: 90205 - DNA, 20 bp, Artificial Sequence
  Description of Artificial Sequence: Synthetic oligonucleotide
  Target: LAMA2; (-) strand; PAM type: NRG; PAM sequence: CGG
accaccgctgatctgacagg

SEQ ID NO: 90206 - DNA, 20 bp, Artificial Sequence
  Description of Artificial Sequence: Synthetic oligonucleotide
  Target: LAMA2; (-) strand; PAM type: NRG; PAM sequence: AGG
aataccaccgctgatctgac

SEQ ID NO: 90207 - DNA, 20 bp, Artificial Sequence
  Description of Artificial Sequence: Synthetic oligonucleotide
  Target: LAMA2; (-) strand; PAM type: NRG; PAM sequence: CAG
taataccaccgctgatctga

SEQ ID NO: 90208 - DNA, 20 bp, Artificial Sequence
  Description of Artificial Sequence: Synthetic oligonucleotide
  Target: LAMA2; (-) strand; PAM type: NRG; PAM sequence: GAG
aataaggttcctgctcctgt

SEQ ID NO: 90209 - DNA, 20 bp, Artificial Sequence
  Description of Artificial Sequence: Synthetic oligonucleotide
  Target: LAMA2; (-) strand; PAM type: NRG; PAM sequence: AGG
cgcatgcgcagttcacaata

SEQ ID NO: 90210 - DNA, 20 bp, Artificial Sequence
  Description of Artificial Sequence: Synthetic oligonucleotide
  Target: LAMA2; (-) strand; PAM type: NRG; PAM sequence: AAG
tcgcatgcgcagttcacaat

SEQ ID NO: 90211 - DNA, 20 bp, Artificial Sequence
  Description of Artificial Sequence: Synthetic oligonucleotide
  Target: LAMA2; (-) strand; PAM type: NRG; PAM sequence: CAG
gcctagatccctcgcatgcg

SEQ ID NO: 90212 - DNA, 20 bp, Artificial Sequence
  Description of Artificial Sequence: Synthetic oligonucleotide
  Target: LAMA2; (-) strand; PAM type: NRG; PAM sequence: TAG
ctcataaggagcgtgcagcc

SEQ ID NO: 90213 - DNA, 20 bp, Artificial Sequence
  Description of Artificial Sequence: Synthetic oligonucleotide
  Target: LAMA2; (-) strand; PAM type: NRG; PAM sequence: CAG
agattctcataaggagcgtg

SEQ ID NO: 90214 - DNA, 20 bp, Artificial Sequence
  Description of Artificial Sequence: Synthetic oligonucleotide
  Target: LAMA2; (-) strand; PAM type: NRG; PAM sequence: GAG
gggcattagattctcataag

SEQ ID NO: 90215 - DNA, 20 bp, Artificial Sequence
  Description of Artificial Sequence: Synthetic oligonucleotide
  Target: LAMA2; (-) strand; PAM type: NRG; PAM sequence: AGG
tcgggcattagattctcata

SEQ ID NO: 90216 - DNA, 20 bp, Artificial Sequence
  Description of Artificial Sequence: Synthetic oligonucleotide
  Target: LAMA2; (-) strand; PAM type: NRG; PAM sequence: AAG
atcgggcattagattctcat

SEQ ID NO: 90217 - DNA, 20 bp, Artificial Sequence
  Description of Artificial Sequence: Synthetic oligonucleotide
  Target: LAMA2; (-) strand; PAM type: NRG; PAM sequence: TAG
cacatcagatcatcgggcat

SEQ ID NO: 90218 - DNA, 20 bp, Artificial Sequence
  Description of Artificial Sequence: Synthetic oligonucleotide
  Target: LAMA2; (-) strand; PAM type: NRG; PAM sequence: GGG
ctgttccacatcagatcatc

SEQ ID NO: 90219 - DNA, 20 bp, Artificial Sequence
  Description of Artificial Sequence: Synthetic oligonucleotide
  Target: LAMA2; (-) strand; PAM type: NRG; PAM sequence: CGG
actgttccacatcagatcat

SEQ ID NO: 90220 - DNA, 20 bp, Artificial Sequence
  Description of Artificial Sequence: Synthetic oligonucleotide
  Target: LAMA2; (-) strand; PAM type: NRG; PAM sequence: CAG
gggataaaactgttccacat

SEQ ID NO: 90221 - DNA, 20 bp, Artificial Sequence
  Description of Artificial Sequence: Synthetic oligonucleotide
  Target: LAMA2; (-) strand; PAM type: NRG; PAM sequence: GGG
ggacacagaggaggggtttt

SEQ ID NO: 90222 - DNA, 20 bp, Artificial Sequence
  Description of Artificial Sequence: Synthetic oligonucleotide
  Target: LAMA2; (-) strand; PAM type: NRG; PAM sequence: TGG
tggacacagaggaggggttt

SEQ ID NO: 90223 - DNA, 20 bp, Artificial Sequence
  Description of Artificial Sequence: Synthetic oligonucleotide
  Target: LAMA2; (-) strand; PAM type: NRG; PAM sequence: GGG
tttccatggacacagaggag

SEQ ID NO: 90224 - DNA, 20 bp, Artificial Sequence
  Description of Artificial Sequence: Synthetic oligonucleotide
  Target: LAMA2; (-) strand; PAM type: NRG; PAM sequence: GGG
ttttccatggacacagagga

SEQ ID NO: 90225 - DNA, 20 bp, Artificial Sequence
  Description of Artificial Sequence: Synthetic oligonucleotide
  Target: LAMA2; (-) strand; PAM type: NRG; PAM sequence: AGG
tttttccatggacacagagg

SEQ ID NO: 90226 - DNA, 20 bp, Artificial Sequence
  Description of Artificial Sequence: Synthetic oligonucleotide
  Target: LAMA2; (-) strand; PAM type: NRG; PAM sequence: GAG
atttttccatggacacagag

SEQ ID NO: 90227 - DNA, 20 bp, Artificial Sequence
  Description of Artificial Sequence: Synthetic oligonucleotide
  Target: LAMA2; (-) strand; PAM type: NRG; PAM sequence: AGG
caatttttccatggacacag

SEQ ID NO: 90228 - DNA, 20 bp, Artificial Sequence
  Description of Artificial Sequence: Synthetic oligonucleotide
  Target: LAMA2; (-) strand; PAM type: NRG; PAM sequence: GAG
acaatttttccatggacaca

SEQ ID NO: 90229 - DNA, 20 bp, Artificial Sequence
  Description of Artificial Sequence: Synthetic oligonucleotide
  Target: LAMA2; (-) strand; PAM type: NRG; PAM sequence: CAG
agacaatttttccatggaca

SEQ ID NO: 90230 - DNA, 20 bp, Artificial Sequence
  Description of Artificial Sequence: Synthetic oligonucleotide
  Target: LAMA2; (-) strand; PAM type: NRG; PAM sequence: TGG
cgtggaagacaatttttcca

SEQ ID NO: 90231 - DNA, 20 bp, Artificial Sequence
  Description of Artificial Sequence: Synthetic oligonucleotide
  Target: LAMA2; (-) strand; PAM type: NRG; PAM sequence: AAG
atcaggcatgggtttcgtgg

SEQ ID NO: 90232 - DNA, 20 bp, Artificial Sequence
  Description of Artificial Sequence: Synthetic oligonucleotide
  Target: LAMA2; (-) strand; PAM type: NRG; PAM sequence: TGG
ggcatcaggcatgggtttcg

SEQ ID NO: 90233 - DNA, 20 bp, Artificial Sequence
  Description of Artificial Sequence: Synthetic oligonucleotide
  Target: LAMA2; (-) strand; PAM type: NRG; PAM sequence: GGG
acctttttggcatcaggcat

SEQ ID NO: 90234 - DNA, 20 bp, Artificial Sequence
  Description of Artificial Sequence: Synthetic oligonucleotide
  Target: LAMA2; (-) strand; PAM type: NRG; PAM sequence: TGG
cacctttttggcatcaggca

SEQ ID NO: 90235 - DNA, 20 bp, Artificial Sequence
  Description of Artificial Sequence: Synthetic oligonucleotide
  Target: LAMA2; (-) strand; PAM type: NRG; PAM sequence: AGG
ctccccacctttttggcatc

SEQ ID NO: 90236 - DNA, 20 bp, Artificial Sequence
  Description of Artificial Sequence: Synthetic oligonucleotide
  Target: LAMA2; (-) strand; PAM type: NRG; PAM sequence: CAG
actccccacctttttggcat

SEQ ID NO: 90237 - DNA, 20 bp, Artificial Sequence
  Description of Artificial Sequence: Synthetic oligonucleotide
  Target: LAMA2; (-) strand; PAM type: NRG; PAM sequence: TGG
tgcagcactccccacctttt

SEQ ID NO: 90238 - DNA, 20 bp, Artificial Sequence
  Description of Artificial Sequence: Synthetic oligonucleotide
  Target: LAMA2; (-) strand; PAM type: NRG; PAM sequence: CAG
tcacatataatggaaacttg

SEQ ID NO: 90239 - DNA, 20 bp, Artificial Sequence
  Description of Artificial Sequence: Synthetic oligonucleotide
  Target: LAMA2; (-) strand; PAM type: NRG; PAM sequence: TGG
tataataaagtcacatataa

SEQ ID NO: 90240 - DNA, 20 bp, Artificial Sequence
  Description of Artificial Sequence: Synthetic oligonucleotide
  Target: LAMA2; (-) strand; PAM type: NRG; PAM sequence: AAG
tttcatacctatttataata

SEQ ID NO: 90241 - DNA, 20 bp, Artificial Sequence
  Description of Artificial Sequence: Synthetic oligonucleotide
  Target: LAMA2; (-) strand; PAM type: NRG; PAM sequence: AAG
gactatagatgaagtagaaa

SEQ ID NO: 90242 - DNA, 20 bp, Artificial Sequence
  Description of Artificial Sequence: Synthetic oligonucleotide
  Target: LAMA2; (-) strand; PAM type: NRG; PAM sequence: TAG
tgttacgactatagatgaag

SEQ ID NO: 90243 - DNA, 20 bp, Artificial Sequence
  Description of Artificial Sequence: Synthetic oligonucleotide
  Target: LAMA2; (-) strand; PAM type: NRG; PAM sequence: AAG
agctgttacgactatagatg

SEQ ID NO: 90244 - DNA, 20 bp, Artificial Sequence
  Description of Artificial Sequence: Synthetic oligonucleotide
  Target: LAMA2; (-) strand; PAM type: NRG; PAM sequence: TAG
tgtcaaagctgttacgacta

SEQ ID NO: 90245 - DNA, 20 bp, Artificial Sequence
  Description of Artificial Sequence: Synthetic oligonucleotide
  Target: LAMA2; (-) strand; PAM type: NRG; PAM sequence: AAG
tgtgtataatttgaatgtca

SEQ ID NO: 90246 - DNA, 20 bp, Artificial Sequence
  Description of Artificial Sequence: Synthetic oligonucleotide
  Target: LAMA2; (-) strand; PAM type: NRG; PAM sequence: AAG
tttgtcaataaaaagagtca

SEQ ID NO: 90247 - DNA, 20 bp, Artificial Sequence
  Description of Artificial Sequence: Synthetic oligonucleotide
  Target: LAMA2; (-) strand; PAM type: NRG; PAM sequence: GAG
ttccattttgtcaataaaaa

SEQ ID NO: 90248 - DNA, 20 bp, Artificial Sequence
  Description of Artificial Sequence: Synthetic oligonucleotide
  Target: LAMA2; (-) strand; PAM type: NRG; PAM sequence: AAG
ttttccattttgtcaataaa

SEQ ID NO: 90249 - DNA, 20 bp, Artificial Sequence
  Description of Artificial Sequence: Synthetic oligonucleotide
  Target: LAMA2; (-) strand; PAM type: NRG; PAM sequence: AGG
ataaaatacattttgaatta

SEQ ID NO: 90250 - DNA, 20 bp, Artificial Sequence
  Description of Artificial Sequence: Synthetic oligonucleotide
  Target: LAMA2; (-) strand; PAM type: NRG; PAM sequence: AAG
aataaaatacattttgaatt

SEQ ID NO: 90251 - DNA, 20 bp, Artificial Sequence
  Description of Artificial Sequence: Synthetic oligonucleotide
  Target: LAMA2; (-) strand; PAM type: NRG; PAM sequence: AAG
tatggcttctctaaaaagga

SEQ ID NO: 90252 - DNA, 20 bp, Artificial Sequence
  Description of Artificial Sequence: Synthetic oligonucleotide
  Target: LAMA2; (-) strand; PAM type: NRG; PAM sequence: AGG
tgaatatggcttctctaaaa

SEQ ID NO: 90253 - DNA, 20 bp, Artificial Sequence
  Description of Artificial Sequence: Synthetic oligonucleotide
  Target: LAMA2; (-) strand; PAM type: NRG; PAM sequence: AAG
ttgaatatggcttctctaaa

SEQ ID NO: 90254 - DNA, 20 bp, Artificial Sequence
  Description of Artificial Sequence: Synthetic oligonucleotide
  Target: LAMA2; (-) strand; PAM type: NRG; PAM sequence: TGG
catgctatttttcttgaata

SEQ ID NO: 90255 - DNA, 20 bp, Artificial Sequence
  Description of Artificial Sequence: Synthetic oligonucleotide
  Target: LAMA2; (-) strand; PAM type: NRG; PAM sequence: GAG
ctataatgttccaaaatttt

SEQ ID NO: 90256 - DNA, 20 bp, Artificial Sequence
  Description of Artificial Sequence: Synthetic oligonucleotide
  Target: LAMA2; (-) strand; PAM type: NRG; PAM sequence: AGG
tgggaagaatattgggacat

SEQ ID NO: 90257 - DNA, 20 bp, Artificial Sequence
  Description of Artificial Sequence: Synthetic oligonucleotide
  Target: LAMA2; (-) strand; PAM type: NRG; PAM sequence: TAG
ttgggaagaatattgggaca

SEQ ID NO: 90258 - DNA, 20 bp, Artificial Sequence
  Description of Artificial Sequence: Synthetic oligonucleotide
  Target: LAMA2; (-) strand; PAM type: NRG; PAM sequence: GGG
ggaggtttgggaagaatatt

SEQ ID NO: 90259 - DNA, 20 bp, Artificial Sequence
  Description of Artificial Sequence: Synthetic oligonucleotide
  Target: LAMA2; (-) strand; PAM type: NRG; PAM sequence: TGG
aggaggtttgggaagaatat

SEQ ID NO: 90260 - DNA, 20 bp, Artificial Sequence
  Description of Artificial Sequence: Synthetic oligonucleotide
  Target: LAMA2; (-) strand; PAM type: NRG; PAM sequence: AAG
cgtttgaaaggaggtttggg

SEQ ID NO: 90261 - DNA, 20 bp, Artificial Sequence
  Description of Artificial Sequence: Synthetic oligonucleotide
  Target: LAMA2; (-) strand; PAM type: NRG; PAM sequence: GGG
atacgtttgaaaggaggttt

SEQ ID NO: 90262 - DNA, 20 bp, Artificial Sequence
  Description of Artificial Sequence: Synthetic oligonucleotide
  Target: LAMA2; (-) strand; PAM type: NRG; PAM sequence: TGG
aatacgtttgaaaggaggtt

SEQ ID NO: 90263 - DNA, 20 bp, Artificial Sequence
  Description of Artificial Sequence: Synthetic oligonucleotide
  Target: LAMA2; (-) strand; PAM type: NRG; PAM sequence: AGG
taataaatacgtttgaaagg

SEQ ID NO: 90264 - DNA, 20 bp, Artificial Sequence
  Description of Artificial Sequence: Synthetic oligonucleotide
  Target: LAMA2; (-) strand; PAM type: NRG; PAM sequence: GAG
ttaataaatacgtttgaaag

SEQ ID NO: 90265 - DNA, 20 bp, Artificial Sequence
  Description of Artificial Sequence: Synthetic oligonucleotide
  Target: LAMA2; (-) strand; PAM type: NRG; PAM sequence: AGG
aattaataaatacgtttgaa

SEQ ID NO: 90266 - DNA, 20 bp, Artificial Sequence
  Description of Artificial Sequence: Synthetic oligonucleotide
  Target: LAMA2; (-) strand; PAM type: NRG; PAM sequence: AAG
aaattaataaatacgtttga

SEQ ID NO: 90267 - DNA, 20 bp, Artificial Sequence
  Description of Artificial Sequence: Synthetic oligonucleotide
  Target: LAMA2; (-) strand; PAM type: NRG; PAM sequence: TAG
caaacaaggactgaactatt

SEQ ID NO: 90268 - DNA, 20 bp, Artificial Sequence
  Description of Artificial Sequence: Synthetic oligonucleotide
  Target: LAMA2; (-) strand; PAM type: NRG; PAM sequence: AGG
tgttgtatatatttcaaaca

SEQ ID NO: 90269 - DNA, 20 bp, Artificial Sequence
  Description of Artificial Sequence: Synthetic oligonucleotide
  Target: LAMA2; (-) strand; PAM type: NRG; PAM sequence: AAG
atgttgtatatatttcaaac

SEQ ID NO: 90270 - DNA, 20 bp, Artificial Sequence
  Description of Artificial Sequence: Synthetic oligonucleotide
  Target: LAMA2; (-) strand; PAM type: NRG; PAM sequence: AAG
tagaaaggcaggagaaaaaa

SEQ ID NO: 90271 - DNA, 20 bp, Artificial Sequence
  Description of Artificial Sequence: Synthetic oligonucleotide
  Target: LAMA2; (-) strand; PAM type: NRG; PAM sequence: GAG
aaaggattctagaaaggcag

SEQ ID NO: 90272 - DNA, 20 bp, Artificial Sequence
  Description of Artificial Sequence: Synthetic oligonucleotide
  Target: LAMA2; (-) strand; PAM type: NRG; PAM sequence: AGG
taaaaggattctagaaaggc

SEQ ID NO: 90273 - DNA, 20 bp, Artificial Sequence
  Description of Artificial Sequence: Synthetic oligonucleotide
  Target: LAMA2; (-) strand; PAM type: NRG; PAM sequence: CAG
ataaaaggattctagaaagg

SEQ ID NO: 90274 - DNA, 20 bp, Artificial Sequence
  Description of Artificial Sequence: Synthetic oligonucleotide
  Target: LAMA2; (-) strand; PAM type: NRG; PAM sequence: AGG
tcaataaaaggattctagaa

SEQ ID NO: 90275 - DNA, 20 bp, Artificial Sequence
  Description of Artificial Sequence: Synthetic oligonucleotide
  Target: LAMA2; (-) strand; PAM type: NRG; PAM sequence: AAG
ctcaataaaaggattctaga

SEQ ID NO: 90276 - DNA, 20 bp, Artificial Sequence
  Description of Artificial Sequence: Synthetic oligonucleotide
  Target: LAMA2; (-) strand; PAM type: NRG; PAM sequence: TAG
ttttctcaataaaaggattc

SEQ ID NO: 90277 - DNA, 20 bp, Artificial Sequence
  Description of Artificial Sequence: Synthetic oligonucleotide
  Target: LAMA2; (-) strand; PAM type: NRG; PAM sequence: AGG
ctacacattttctcaataaa

SEQ ID NO: 90278 - DNA, 20 bp, Artificial Sequence
  Description of Artificial Sequence: Synthetic oligonucleotide
  Target: LAMA2; (-) strand; PAM type: NRG; PAM sequence: AAG
gctacacattttctcaataa

SEQ ID NO: 90279 - DNA, 20 bp, Artificial Sequence
  Description of Artificial Sequence: Synthetic oligonucleotide
  Target: LAMA2; (-) strand; PAM type: NRG; PAM sequence: CAG
cacagcatgcttcttcagat

SEQ ID NO: 90280 - DNA, 20 bp, Artificial Sequence
  Description of Artificial Sequence: Synthetic oligonucleotide
  Target: LAMA2; (-) strand; PAM type: NRG; PAM sequence: CAG
tttcacacagcatgcttctt

SEQ ID NO: 90281 - DNA, 20 bp, Artificial Sequence
  Description of Artificial Sequence: Synthetic oligonucleotide
  Target: LAMA2; (-) strand; PAM type: NRG; PAM sequence: CAG
taaacattcaaaatttcaca

SEQ ID NO: 90282 - DNA, 20 bp, Artificial Sequence
  Description of Artificial Sequence: Synthetic oligonucleotide
  Target: LAMA2; (-) strand; PAM type: NRG; PAM sequence: AAG
ggaagattttaggttctatt

SEQ ID NO: 90283 - DNA, 20 bp, Artificial Sequence
  Description of Artificial Sequence: Synthetic oligonucleotide
  Target: LAMA2; (-) strand; PAM type: NRG; PAM sequence: AGG
gaacctatgtggaagatttt

SEQ ID NO: 90284 - DNA, 20 bp, Artificial Sequence
  Description of Artificial Sequence: Synthetic oligonucleotide
  Target: LAMA2; (-) strand; PAM type: NRG; PAM sequence: TAG
tgaacctatgtggaagattt

SEQ ID NO: 90285 - DNA, 20 bp, Artificial Sequence
  Description of Artificial Sequence: Synthetic oligonucleotide
  Target: LAMA2; (-) strand; PAM type: NRG; PAM sequence: AAG
tgaggggtgaacctatgtgg

SEQ ID NO: 90286 - DNA, 20 bp, Artificial Sequence
  Description of Artificial Sequence: Synthetic oligonucleotide
  Target: LAMA2; (-) strand; PAM type: NRG; PAM sequence: TGG
taatgaggggtgaacctatg

SEQ ID NO: 90287 - DNA, 20 bp, Artificial Sequence
  Description of Artificial Sequence: Synthetic oligonucleotide
  Target: LAMA2; (-) strand; PAM type: NRG; PAM sequence: GGG
gcattattgtgagtaatgag

SEQ ID NO: 90288 - DNA, 20 bp, Artificial Sequence
  Description of Artificial Sequence: Synthetic oligonucleotide
  Target: LAMA2; (-) strand; PAM type: NRG; PAM sequence: GGG
ggcattattgtgagtaatga

SEQ ID NO: 90289 - DNA, 20 bp, Artificial Sequence
  Description of Artificial Sequence: Synthetic oligonucleotide
  Target: LAMA2; (-) strand; PAM type: NRG; PAM sequence: AGG
tggcattattgtgagtaatg

SEQ ID NO: 90290 - DNA, 20 bp, Artificial Sequence
  Description of Artificial Sequence: Synthetic oligonucleotide
  Target: LAMA2; (-) strand; PAM type: NRG; PAM sequence: GAG
ttggcattattgtgagtaat

SEQ ID NO: 90291 - DNA, 20 bp, Artificial Sequence
  Description of Artificial Sequence: Synthetic oligonucleotide
  Target: LAMA2; (-) strand; PAM type: NRG; PAM sequence: GAG
acagcacttggcattattgt

SEQ ID NO: 90292 - DNA, 20 bp, Artificial Sequence
  Description of Artificial Sequence: Synthetic oligonucleotide
  Target: LAMA2; (-) strand; PAM type: NRG; PAM sequence: TGG
tctgcctggactacagcact

SEQ ID NO: 90293 - DNA, 20 bp, Artificial Sequence
  Description of Artificial Sequence: Synthetic oligonucleotide
  Target: LAMA2; (-) strand; PAM type: NRG; PAM sequence: CAG
ataaatatctgcctggacta

SEQ ID NO: 90294 - DNA, 20 bp, Artificial Sequence
  Description of Artificial Sequence: Synthetic oligonucleotide
  Target: LAMA2; (-) strand; PAM type: NRG; PAM sequence: TGG
taaaataataaatatctgcc

SEQ ID NO: 90295 - DNA, 20 bp, Artificial Sequence
  Description of Artificial Sequence: Synthetic oligonucleotide
  Target: LAMA2; (-) strand; PAM type: NRG; PAM sequence: TGG
tcccctaatccactgagaaa

SEQ ID NO: 90296 - DNA, 20 bp, Artificial Sequence
  Description of Artificial Sequence: Synthetic oligonucleotide
  Target: LAMA2; (-) strand; PAM type: NRG; PAM sequence: GAG
tctgattcccctaatccact

SEQ ID NO: 90297 - DNA, 20 bp, Artificial Sequence
  Description of Artificial Sequence: Synthetic oligonucleotide
  Target: LAMA2; (-) strand; PAM type: NRG; PAM sequence: CAG
ctctataaggaacttaaatt

SEQ ID NO: 90298 - DNA, 20 bp, Artificial Sequence
  Description of Artificial Sequence: Synthetic oligonucleotide
  Target: LAMA2; (-) strand; PAM type: NRG; PAM sequence: AGG
tcattacatggggctctata

SEQ ID NO: 90299 - DNA, 20 bp, Artificial Sequence
  Description of Artificial Sequence: Synthetic oligonucleotide
  Target: LAMA2; (-) strand; PAM type: NRG; PAM sequence: AAG
ctcattacatggggctctat

SEQ ID NO: 90300 - DNA, 20 bp, Artificial Sequence
  Description of Artificial Sequence: Synthetic oligonucleotide
  Target: LAMA2; (-) strand; PAM type: NRG; PAM sequence: GGG
ttctaagagctcattacatg

SEQ ID NO: 90301 - DNA, 20 bp, Artificial Sequence
  Description of Artificial Sequence: Synthetic oligonucleotide
  Target: LAMA2; (-) strand; PAM type: NRG; PAM sequence: GGG
cttctaagagctcattacat

SEQ ID NO: 90302 - DNA, 20 bp, Artificial Sequence
  Description of Artificial Sequence: Synthetic oligonucleotide
  Target: LAMA2; (-) strand; PAM type: NRG; PAM sequence: TGG
tcttctaagagctcattaca

SEQ ID NO: 90303 - DNA, 20 bp, Artificial Sequence
  Description of Artificial Sequence: Synthetic oligonucleotide
  Target: LAMA2; (-) strand; PAM type: NRG; PAM sequence: GAG
agctctgcaatgtcttctaa

SEQ ID NO: 90304 - DNA, 20 bp, Artificial Sequence
  Description of Artificial Sequence: Synthetic oligonucleotide
  Target: LAMA2; (-) strand; PAM type: NRG; PAM sequence: AAG
gcagctctgcaatgtcttct

SEQ ID NO: 90305 - DNA, 20 bp, Artificial Sequence
  Description of Artificial Sequence: Synthetic oligonucleotide
  Target: LAMA2; (-) strand; PAM type: NRG; PAM sequence: CAG
ttaaacaggattttaaattg

SEQ ID NO: 90306 - DNA, 20 bp, Artificial Sequence
  Description of Artificial Sequence: Synthetic oligonucleotide
  Target: LAMA2; (-) strand; PAM type: NRG; PAM sequence: AGG
ctcgctacggctgattaaac

SEQ ID NO: 90307 - DNA, 20 bp, Artificial Sequence
  Description of Artificial Sequence: Synthetic oligonucleotide
  Target: LAMA2; (-) strand; PAM type: NRG; PAM sequence: CAG
gctcgctacggctgattaaa

SEQ ID NO: 90308 - DNA, 20 bp, Artificial Sequence
  Description of Artificial Sequence: Synthetic oligonucleotide
  Target: LAMA2; (-) strand; PAM type: NRG; PAM sequence: CGG
gaatggcacatagctcgcta

SEQ ID NO: 90309 - DNA, 20 bp, Artificial Sequence
  Description of Artificial Sequence: Synthetic oligonucleotide
  Target: LAMA2; (-) strand; PAM type: NRG; PAM sequence: TAG
gttccacagagaatggcaca

SEQ ID NO: 90310 - DNA, 20 bp, Artificial Sequence
  Description of Artificial Sequence: Synthetic oligonucleotide
  Target: LAMA2; (-) strand; PAM type: NRG; PAM sequence: TGG
tcttagtgttccacagagaa

SEQ ID NO: 90311 - DNA, 20 bp, Artificial Sequence
  Description of Artificial Sequence: Synthetic oligonucleotide
  Target: LAMA2; (-) strand; PAM type: NRG; PAM sequence: GAG
attcctcttagtgttccaca

SEQ ID NO: 90312 - DNA, 20 bp, Artificial Sequence
  Description of Artificial Sequence: Synthetic oligonucleotide
  Target: LAMA2; (-) strand; PAM type: NRG; PAM sequence: CAG
tgattcctcttagtgttcca

SEQ ID NO: 90313 - DNA, 20 bp, Artificial Sequence
  Description of Artificial Sequence: Synthetic oligonucleotide
  Target: LAMA2; (-) strand; PAM type: NRG; PAM sequence: TAG
ggaagaaccctgattcctct

SEQ ID NO: 90314 - DNA, 20 bp, Artificial Sequence
  Description of Artificial Sequence: Synthetic oligonucleotide
  Target: LAMA2; (-) strand; PAM type: NRG; PAM sequence: AAG
aatgtactggatggaggagg

SEQ ID NO: 90315 - DNA, 20 bp, Artificial Sequence
  Description of Artificial Sequence: Synthetic oligonucleotide
  Target: LAMA2; (-) strand; PAM type: NRG; PAM sequence: AGG
gggaatgtactggatggagg

SEQ ID NO: 90316 - DNA, 20 bp, Artificial Sequence
  Description of Artificial Sequence: Synthetic oligonucleotide
  Target: LAMA2; (-) strand; PAM type: NRG; PAM sequence: GAG
tgggaatgtactggatggag

SEQ ID NO: 90317 - DNA, 20 bp, Artificial Sequence
  Description of Artificial Sequence: Synthetic oligonucleotide
  Target: LAMA2; (-) strand; PAM type: NRG; PAM sequence: AGG
gttgggaatgtactggatgg

SEQ ID NO: 90318 - DNA, 20 bp, Artificial Sequence
  Description of Artificial Sequence: Synthetic oligonucleotide
  Target: LAMA2; (-) strand; PAM type: NRG; PAM sequence: GAG
ggttgggaatgtactggatg

SEQ ID NO: 90319 - DNA, 20 bp, Artificial Sequence
  Description of Artificial Sequence: Synthetic oligonucleotide
  Target: LAMA2; (-) strand; PAM type: NRG; PAM sequence: TGG
ctggttgggaatgtactgga

SEQ ID NO: 90320 - DNA, 20 bp, Artificial Sequence
  Description of Artificial Sequence: Synthetic oligonucleotide
  Target: LAMA2; (-) strand; PAM type: NRG; PAM sequence: TGG
attcctggttgggaatgtac

SEQ ID NO: 90321 - DNA, 20 bp, Artificial Sequence
  Description of Artificial Sequence: Synthetic oligonucleotide
  Target: LAMA2; (-) strand; PAM type: NRG; PAM sequence: GGG
ccagacagcaattcctggtt

SEQ ID NO: 90322 - DNA, 20 bp, Artificial Sequence
  Description of Artificial Sequence: Synthetic oligonucleotide
  Target: LAMA2; (-) strand; PAM type: NRG; PAM sequence: TGG
accagacagcaattcctggt

SEQ ID NO: 90323 - DNA, 20 bp, Artificial Sequence
  Description of Artificial Sequence: Synthetic oligonucleotide
  Target: LAMA2; (-) strand; PAM type: NRG; PAM sequence: TGG
cctgaccagacagcaattcc

SEQ ID NO: 90324 - DNA, 20 bp, Artificial Sequence
  Description of Artificial Sequence: Synthetic oligonucleotide
  Target: LAMA2; (-) strand; PAM type: NRG; PAM sequence: CAG
cacgtccaaccctgaccaga

SEQ ID NO: 90325 - DNA, 20 bp, Artificial Sequence
  Description of Artificial Sequence: Synthetic oligonucleotide
  Target: LAMA2; (-) strand; PAM type: NRG; PAM sequence: CAG
ctttcacgtccaaccctgac

SEQ ID NO: 90326 - DNA, 20 bp, Artificial Sequence
  Description of Artificial Sequence: Synthetic oligonucleotide
  Target: LAMA2; (-) strand; PAM type: NRG; PAM sequence: TGG
ttcgcagggttggctctcta

SEQ ID NO: 90327 - DNA, 20 bp, Artificial Sequence
  Description of Artificial Sequence: Synthetic oligonucleotide
  Target: LAMA2; (-) strand; PAM type: NRG; PAM sequence: TGG
gagacttggcttcgcagggt

SEQ ID NO: 90328 - DNA, 20 bp, Artificial Sequence
  Description of Artificial Sequence: Synthetic oligonucleotide
  Target: LAMA2; (-) strand; PAM type: NRG; PAM sequence: GGG
tgcagagacttggcttcgca

SEQ ID NO: 90329 - DNA, 20 bp, Artificial Sequence
  Description of Artificial Sequence: Synthetic oligonucleotide
  Target: LAMA2; (-) strand; PAM type: NRG; PAM sequence: AGG
atgcagagacttggcttcgc

SEQ ID NO: 90330 - DNA, 20 bp, Artificial Sequence
  Description of Artificial Sequence: Synthetic oligonucleotide
  Target: LAMA2; (-) strand; PAM type: NRG; PAM sequence: CAG
catgcagagacttggcttcg

SEQ ID NO: 90331 - DNA, 20 bp, Artificial Sequence
  Description of Artificial Sequence: Synthetic oligonucleotide
  Target: LAMA2; (-) strand; PAM type: NRG; PAM sequence: TGG
tgtgctgacatgcagagact

SEQ ID NO: 90332 - DNA, 20 bp, Artificial Sequence
  Description of Artificial Sequence: Synthetic oligonucleotide
  Target: LAMA2; (-) strand; PAM type: NRG; PAM sequence: GAG
ttgctctgtgctgacatgca

SEQ ID NO: 90333 - DNA, 20 bp, Artificial Sequence
  Description of Artificial Sequence: Synthetic oligonucleotide
  Target: LAMA2; (-) strand; PAM type: NRG; PAM sequence: CAG
gcttgctctgtgctgacatg

SEQ ID NO: 90334 - DNA, 20 bp, Artificial Sequence
  Description of Artificial Sequence: Synthetic oligonucleotide
  Target: LAMA2; (-) strand; PAM type: NRG; PAM sequence: AAG
atagagatattcataaaaca

SEQ ID NO: 90335 - DNA, 20 bp, Artificial Sequence
  Description of Artificial Sequence: Synthetic oligonucleotide
  Target: LAMA2; (-) strand; PAM type: NRG; PAM sequence: GAG
ccactccagcactgtaaata

SEQ ID NO: 90336 - DNA, 20 bp, Artificial Sequence
  Description of Artificial Sequence: Synthetic oligonucleotide
  Target: LAMA2; (-) strand; PAM type: NRG; PAM sequence: TAG
ttccactccagcactgtaaa

SEQ ID NO: 90337 - DNA, 20 bp, Artificial Sequence
  Description of Artificial Sequence: Synthetic oligonucleotide
  Target: LAMA2; (-) strand; PAM type: NRG; PAM sequence: CAG
ctttttttaaaattccactc

SEQ ID NO: 90338 - DNA, 20 bp, Artificial Sequence
  Description of Artificial Sequence: Synthetic oligonucleotide
  Target: LAMA2; (-) strand; PAM type: NRG; PAM sequence: CAG
aaaattgaagctgtgagtga

SEQ ID NO: 90339 - DNA, 20 bp, Artificial Sequence
  Description of Artificial Sequence: Synthetic oligonucleotide
  Target: LAMA2; (-) strand; PAM type: NRG; PAM sequence: GAG
ggaatcaaaattgaagctgt

SEQ ID NO: 90340 - DNA, 20 bp, Artificial Sequence
  Description of Artificial Sequence: Synthetic oligonucleotide
  Target: LAMA2; (-) strand; PAM type: NRG; PAM sequence: AAG
taggacaggaatcaaaattg

SEQ ID NO: 90341 - DNA, 20 bp, Artificial Sequence
  Description of Artificial Sequence: Synthetic oligonucleotide
  Target: LAMA2; (-) strand; PAM type: NRG; PAM sequence: AGG
agcaagatcatttataggac

SEQ ID NO: 90342 - DNA, 20 bp, Artificial Sequence
  Description of Artificial Sequence: Synthetic oligonucleotide
  Target: LAMA2; (-) strand; PAM type: NRG; PAM sequence: CAG
aagcaagatcatttatagga

SEQ ID NO: 90343 - DNA, 20 bp, Artificial Sequence
  Description of Artificial Sequence: Synthetic oligonucleotide
  Target: LAMA2; (-) strand; PAM type: NRG; PAM sequence: AGG
aggaaagcaagatcatttat

SEQ ID NO: 90344 - DNA, 20 bp, Artificial Sequence
  Description of Artificial Sequence: Synthetic oligonucleotide
  Target: LAMA2; (-) strand; PAM type: NRG; PAM sequence: TAG
taggaaagcaagatcattta

SEQ ID NO: 90345 - DNA, 20 bp, Artificial Sequence
  Description of Artificial Sequence: Synthetic oligonucleotide
  Target: LAMA2; (-) strand; PAM type: NRG; PAM sequence: AAG
tcagaaaaaaataggaaagc

SEQ ID NO: 90346 - DNA, 20 bp, Artificial Sequence
  Description of Artificial Sequence: Synthetic oligonucleotide
  Target: LAMA2; (-) strand; PAM type: NRG; PAM sequence: AAG
aaattcagaaaaaaatagga

SEQ ID NO: 90347 - DNA, 20 bp, Artificial Sequence
  Description of Artificial Sequence: Synthetic oligonucleotide
  Target: LAMA2; (-) strand; PAM type: NRG; PAM sequence: AGG
gtagaaattcagaaaaaaat

SEQ ID NO: 90348 - DNA, 20 bp, Artificial Sequence
  Description of Artificial Sequence: Synthetic oligonucleotide
  Target: LAMA2; (-) strand; PAM type: NRG; PAM sequence: TAG
tgtagaaattcagaaaaaaa

SEQ ID NO: 90349 - DNA, 20 bp, Artificial Sequence
  Description of Artificial Sequence: Synthetic oligonucleotide
  Target: LAMA2; (-) strand; PAM type: NRG; PAM sequence: CAG
acagtcaccttgtagaaatt

SEQ ID NO: 90350 - DNA, 20 bp, Artificial Sequence
  Description of Artificial Sequence: Synthetic oligonucleotide
  Target: LAMA2; (-) strand; PAM type: NRG; PAM sequence: TAG
tgacattgacagtcaccttg

SEQ ID NO: 90351 - DNA, 20 bp, Artificial Sequence
  Description of Artificial Sequence: Synthetic oligonucleotide
  Target: LAMA2; (-) strand; PAM type: NRG; PAM sequence: CAG
tttacattttctgacattga

SEQ ID NO: 90352 - DNA, 20 bp, Artificial Sequence
  Description of Artificial Sequence: Synthetic oligonucleotide
  Target: LAMA2; (-) strand; PAM type: NRG; PAM sequence: AGG
ccccatgcaatgtacacttg

SEQ ID NO: 90353 - DNA, 20 bp, Artificial Sequence
  Description of Artificial Sequence: Synthetic oligonucleotide
  Target: LAMA2; (-) strand; PAM type: NRG; PAM sequence: GAG
gccccatgcaatgtacactt

SEQ ID NO: 90354 - DNA, 20 bp, Artificial Sequence
  Description of Artificial Sequence: Synthetic oligonucleotide
  Target: LAMA2; (-) strand; PAM type: NRG; PAM sequence: AAG
ttctttctaatatacatgcc

SEQ ID NO: 90355 - DNA, 20 bp, Artificial Sequence
  Description of Artificial Sequence: Synthetic oligonucleotide
  Target: LAMA2; (-) strand; PAM type: NRG; PAM sequence: AAG
aatattatcctcttttcatt

SEQ ID NO: 90356 - DNA, 20 bp, Artificial Sequence
  Description of Artificial Sequence: Synthetic oligonucleotide
  Target: LAMA2; (-) strand; PAM type: NRG; PAM sequence: TAG
tctgtgcaattaaataggct

SEQ ID NO: 90357 - DNA, 20 bp, Artificial Sequence
  Description of Artificial Sequence: Synthetic oligonucleotide
  Target: LAMA2; (-) strand; PAM type: NRG; PAM sequence: AGG
tttcctctgtgcaattaaat

SEQ ID NO: 90358 - DNA, 20 bp, Artificial Sequence
  Description of Artificial Sequence: Synthetic oligonucleotide
  Target: LAMA2; (-) strand; PAM type: NRG; PAM sequence: TAG
ctttcctctgtgcaattaaa

SEQ ID NO: 90359 - DNA, 20 bp, Artificial Sequence
  Description of Artificial Sequence: Synthetic oligonucleotide
  Target: LAMA2; (-) strand; PAM type: NRG; PAM sequence: AGG
tcaaacaaaacaggcaaaga

SEQ ID NO: 90360 - DNA, 20 bp, Artificial Sequence
  Description of Artificial Sequence: Synthetic oligonucleotide
  Target: LAMA2; (-) strand; PAM type: NRG; PAM sequence: AAG
ttcaaacaaaacaggcaaag

SEQ ID NO: 90361 - DNA, 20 bp, Artificial Sequence
  Description of Artificial Sequence: Synthetic oligonucleotide
  Target: LAMA2; (-) strand; PAM type: NRG; PAM sequence: AAG
aaattcaaacaaaacaggca

SEQ ID NO: 90362 - DNA, 20 bp, Artificial Sequence
  Description of Artificial Sequence: Synthetic oligonucleotide
  Target: LAMA2; (-) strand; PAM type: NRG; PAM sequence: AGG
tattaaaattcaaacaaaac

SEQ ID NO: 90363 - DNA, 20 bp, Artificial Sequence
  Description of Artificial Sequence: Synthetic oligonucleotide
  Target: LAMA2; (-) strand; PAM type: NRG; PAM sequence: CAG
atattaaaattcaaacaaaa

SEQ ID NO: 90364 - DNA, 20 bp, Artificial Sequence
  Description of Artificial Sequence: Synthetic oligonucleotide
  Target: LAMA2; (-) strand; PAM type: NRG; PAM sequence: CAG
aaagaaaaacaaaaggttag

SEQ ID NO: 90365 - DNA, 20 bp, Artificial Sequence
  Description of Artificial Sequence: Synthetic oligonucleotide
  Target: LAMA2; (-) strand; PAM type: NRG; PAM sequence: TAG
gtcaaagaaaaacaaaaggt

SEQ ID NO: 90366 - DNA, 20 bp, Artificial Sequence
  Description of Artificial Sequence: Synthetic oligonucleotide
  Target: LAMA2; (-) strand; PAM type: NRG; PAM sequence: AGG
attggtcaaagaaaaacaaa

SEQ ID NO: 90367 - DNA, 20 bp, Artificial Sequence
  Description of Artificial Sequence: Synthetic oligonucleotide
  Target: LAMA2; (-) strand; PAM type: NRG; PAM sequence: AAG
tattggtcaaagaaaaacaa

SEQ ID NO: 90368 - DNA, 20 bp, Artificial Sequence
  Description of Artificial Sequence: Synthetic oligonucleotide
  Target: LAMA2; (-) strand; PAM type: NRG; PAM sequence: AAG
ctgagaaatgttattggtca

SEQ ID NO: 90369 - DNA, 20 bp, Artificial Sequence
  Description of Artificial Sequence: Synthetic oligonucleotide
  Target: LAMA2; (-) strand; PAM type: NRG; PAM sequence: TGG
actaagctgagaaatgttat

SEQ ID NO: 90370 - DNA, 20 bp, Artificial Sequence
  Description of Artificial Sequence: Synthetic oligonucleotide
  Target: LAMA2; (-) strand; PAM type: NRG; PAM sequence: GAG
catagcccatacactaagct

SEQ ID NO: 90371 - DNA, 20 bp, Artificial Sequence
  Description of Artificial Sequence: Synthetic oligonucleotide
  Target: LAMA2; (-) strand; PAM type: NRG; PAM sequence: AAG
ctttacatagcccatacact

SEQ ID NO: 90372 - DNA, 20 bp, Artificial Sequence
  Description of Artificial Sequence: Synthetic oligonucleotide
  Target: LAMA2; (-) strand; PAM type: NRG; PAM sequence: TAG
catttgacaggcactttaca

SEQ ID NO: 90373 - DNA, 20 bp, Artificial Sequence
  Description of Artificial Sequence: Synthetic oligonucleotide
  Target: LAMA2; (-) strand; PAM type: NRG; PAM sequence: AGG
aagacatccctccatttgac

SEQ ID NO: 90374 - DNA, 20 bp, Artificial Sequence
  Description of Artificial Sequence: Synthetic oligonucleotide
  Target: LAMA2; (-) strand; PAM type: NRG; PAM sequence: CAG
aaagacatccctccatttga

SEQ ID NO: 90375 - DNA, 20 bp, Artificial Sequence
  Description of Artificial Sequence: Synthetic oligonucleotide
  Target: LAMA2; (-) strand; PAM type: NRG; PAM sequence: AAG
gagtctggattctttcaaca

SEQ ID NO: 90376 - DNA, 20 bp, Artificial Sequence
  Description of Artificial Sequence: Synthetic oligonucleotide
  Target: LAMA2; (-) strand; PAM type: NRG; PAM sequence: TGG
tcactcactttctgtgagtc

SEQ ID NO: 90377 - DNA, 20 bp, Artificial Sequence
  Description of Artificial Sequence: Synthetic oligonucleotide
  Target: LAMA2; (-) strand; PAM type: NRG; PAM sequence: GAG
gaaagtcactcactttctgt

SEQ ID NO: 90378 - DNA, 20 bp, Artificial Sequence
  Description of Artificial Sequence: Synthetic oligonucleotide
  Target: LAMA2; (-) strand; PAM type: NRG; PAM sequence: AAG
gttctaaccatctgaccaga

SEQ ID NO: 90379 - DNA, 20 bp, Artificial Sequence
  Description of Artificial Sequence: Synthetic oligonucleotide
  Target: LAMA2; (-) strand; PAM type: NRG; PAM sequence: CAG
gagagttctaaccatctgac

SEQ ID NO: 90380 - DNA, 20 bp, Artificial Sequence
  Description of Artificial Sequence: Synthetic oligonucleotide
  Target: LAMA2; (-) strand; PAM type: NRG; PAM sequence: GAG
gatctttgtcaaaattggga

SEQ ID NO: 90381 - DNA, 20 bp, Artificial Sequence
  Description of Artificial Sequence: Synthetic oligonucleotide
  Target: LAMA2; (-) strand; PAM type: NRG; PAM sequence: GAG
acgatctttgtcaaaattgg

SEQ ID NO: 90382 - DNA, 20 bp, Artificial Sequence
  Description of Artificial Sequence: Synthetic oligonucleotide
  Target: LAMA2; (-) strand; PAM type: NRG; PAM sequence: GGG
gaacgatctttgtcaaaatt

SEQ ID NO: 90383 - DNA, 20 bp, Artificial Sequence
  Description of Artificial Sequence: Synthetic oligonucleotide
  Target: LAMA2; (-) strand; PAM type: NRG; PAM sequence: TGG
agaacgatctttgtcaaaat

SEQ ID NO: 90384 - DNA, 20 bp, Artificial Sequence
  Description of Artificial Sequence: Synthetic oligonucleotide
  Target: LAMA2; (-) strand; PAM type: NRG; PAM sequence: GAG
agctttacaaatcccaaaca

SEQ ID NO: 90385 - DNA, 20 bp, Artificial Sequence
  Description of Artificial Sequence: Synthetic oligonucleotide
  Target: LAMA2; (-) strand; PAM type: NRG; PAM sequence: CAG
tgagctttacaaatcccaaa

SEQ ID NO: 90386 - DNA, 20 bp, Artificial Sequence
  Description of Artificial Sequence: Synthetic oligonucleotide
  Target: LAMA2; (-) strand; PAM type: NRG; PAM sequence: GAG
atcatcttagtctacagttt

SEQ ID NO: 90387 - DNA, 20 bp, Artificial Sequence
  Description of Artificial Sequence: Synthetic oligonucleotide
  Target: LAMA2; (-) strand; PAM type: NRG; PAM sequence: CAG
cctgtcatcatcttagtcta

SEQ ID NO: 90388 - DNA, 20 bp, Artificial Sequence
  Description of Artificial Sequence: Synthetic oligonucleotide
  Target: LAMA2; (-) strand; PAM type: NRG; PAM sequence: TAG
agatcctcctgtcatcatct

SEQ ID NO: 90389 - DNA, 20 bp, Artificial Sequence
  Description of Artificial Sequence: Synthetic oligonucleotide
  Target: LAMA2; (-) strand; PAM type: NRG; PAM sequence: CAG
agttccatgaagccaaacag

SEQ ID NO: 90390 - DNA, 20 bp, Artificial Sequence
  Description of Artificial Sequence: Synthetic oligonucleotide
  Target: LAMA2; (-) strand; PAM type: NRG; PAM sequence: CAG
ttaagttccatgaagccaaa

SEQ ID NO: 90391 - DNA, 20 bp, Artificial Sequence
  Description of Artificial Sequence: Synthetic oligonucleotide
  Target: LAMA2; (-) strand; PAM type: NRG; PAM sequence: AAG
gaaataggttaagttccatg

SEQ ID NO: 90392 - DNA, 20 bp, Artificial Sequence
  Description of Artificial Sequence: Synthetic oligonucleotide
  Target: LAMA2; (-) strand; PAM type: NRG; PAM sequence: AAG
caggcttgctgaaataggtt

SEQ ID NO: 90393 - DNA, 20 bp, Artificial Sequence
  Description of Artificial Sequence: Synthetic oligonucleotide
  Target: LAMA2; (-) strand; PAM type: NRG; PAM sequence: AGG
tattgcaggcttgctgaaat

SEQ ID NO: 90394 - DNA, 20 bp, Artificial Sequence
  Description of Artificial Sequence: Synthetic oligonucleotide
  Target: LAMA2; (-) strand; PAM type: NRG; PAM sequence: TAG
gtattgcaggcttgctgaaa

SEQ ID NO: 90395 - DNA, 20 bp, Artificial Sequence
  Description of Artificial Sequence: Synthetic oligonucleotide
  Target: LAMA2; (-) strand; PAM type: NRG; PAM sequence: AGG
attattttccccagtattgc

SEQ ID NO: 90396 - DNA, 20 bp, Artificial Sequence
  Description of Artificial Sequence: Synthetic oligonucleotide
  Target: LAMA2; (-) strand; PAM type: NRG; PAM sequence: CAG
tattattttccccagtattg

SEQ ID NO: 90397 - DNA, 20 bp, Artificial Sequence
  Description of Artificial Sequence: Synthetic oligonucleotide
  Target: LAMA2; (-) strand; PAM type: NRG; PAM sequence: CAG
aatatatgtattattttccc

SEQ ID NO: 90398 - DNA, 20 bp, Artificial Sequence
  Description of Artificial Sequence: Synthetic oligonucleotide
  Target: LAMA2; (-) strand; PAM type: NRG; PAM sequence: AAG
gaaccttacccatcaactgc

SEQ ID NO: 90399 - DNA, 20 bp, Artificial Sequence
  Description of Artificial Sequence: Synthetic oligonucleotide
  Target: LAMA2; (-) strand; PAM type: NRG; PAM sequence: GAG
aatgataggcatttatttag

SEQ ID NO: 90400 - DNA, 20 bp, Artificial Sequence
  Description of Artificial Sequence: Synthetic oligonucleotide
  Target: LAMA2; (-) strand; PAM type: NRG; PAM sequence: AGG
ggaatgataggcatttattt

SEQ ID NO: 90401 - DNA, 20 bp, Artificial Sequence
  Description of Artificial Sequence: Synthetic oligonucleotide
  Target: LAMA2; (-) strand; PAM type: NRG; PAM sequence: TAG
gggaatgataggcatttatt

SEQ ID NO: 90402 - DNA, 20 bp, Artificial Sequence
  Description of Artificial Sequence: Synthetic oligonucleotide
  Target: LAMA2; (-) strand; PAM type: NRG; PAM sequence: AGG
gagtacggagtgggaatgat

SEQ ID NO: 90403 - DNA, 20 bp, Artificial Sequence
  Description of Artificial Sequence: Synthetic oligonucleotide
  Target: LAMA2; (-) strand; PAM type: NRG; PAM sequence: TAG
ggagtacggagtgggaatga

SEQ ID NO: 90404 - DNA, 20 bp, Artificial Sequence
  Description of Artificial Sequence: Synthetic oligonucleotide
  Target: LAMA2; (-) strand; PAM type: NRG; PAM sequence: GGG
aaatcactggagtacggagt

SEQ ID NO: 90405 - DNA, 20 bp, Artificial Sequence
  Description of Artificial Sequence: Synthetic oligonucleotide
  Target: LAMA2; (-) strand; PAM type: NRG; PAM sequence: TGG
gaaatcactggagtacggag

SEQ ID NO: 90406 - DNA, 20 bp, Artificial Sequence
  Description of Artificial Sequence: Synthetic oligonucleotide
  Target: LAMA2; (-) strand; PAM type: NRG; PAM sequence: GAG
gcagaaatcactggagtacg

SEQ ID NO: 90407 - DNA, 20 bp, Artificial Sequence
  Description of Artificial Sequence: Synthetic oligonucleotide
  Target: LAMA2; (-) strand; PAM type: NRG; PAM sequence: CGG
acgcagaaatcactggagta

SEQ ID NO: 90408 - DNA, 20 bp, Artificial Sequence
  Description of Artificial Sequence: Synthetic oligonucleotide
  Target: LAMA2; (-) strand; PAM type: NRG; PAM sequence: GAG
gcaagacgcagaaatcactg

SEQ ID NO: 90409 - DNA, 20 bp, Artificial Sequence
  Description of Artificial Sequence: Synthetic oligonucleotide
  Target: LAMA2; (-) strand; PAM type: NRG; PAM sequence: TGG
ttgcaagacgcagaaatcac

SEQ ID NO: 90410 - DNA, 20 bp, Artificial Sequence
  Description of Artificial Sequence: Synthetic oligonucleotide
  Target: LAMA2; (-) strand; PAM type: NRG; PAM sequence: CAG
agggcagtatttgcaagacg

SEQ ID NO: 90411 - DNA, 20 bp, Artificial Sequence
  Description of Artificial Sequence: Synthetic oligonucleotide
  Target: LAMA2; (-) strand; PAM type: NRG; PAM sequence: AAG
ttctatagggcagtatttgc

SEQ ID NO: 90412 - DNA, 20 bp, Artificial Sequence
  Description of Artificial Sequence: Synthetic oligonucleotide
  Target: LAMA2; (-) strand; PAM type: NRG; PAM sequence: CAG
aattttattgttctataggg

SEQ ID NO: 90413 - DNA, 20 bp, Artificial Sequence
  Description of Artificial Sequence: Synthetic oligonucleotide
  Target: LAMA2; (-) strand; PAM type: NRG; PAM sequence: GGG
acgaattttattgttctata

SEQ ID NO: 90414 - DNA, 20 bp, Artificial Sequence
  Description of Artificial Sequence: Synthetic oligonucleotide
  Target: LAMA2; (-) strand; PAM type: NRG; PAM sequence: AGG
tacgaattttattgttctat

SEQ ID NO: 90415 - DNA, 20 bp, Artificial Sequence
  Description of Artificial Sequence: Synthetic oligonucleotide
  Target: LAMA2; (-) strand; PAM type: NRG; PAM sequence: TAG
atacgaattttattgttcta

SEQ ID NO: 90416 - DNA, 20 bp, Artificial Sequence
  Description of Artificial Sequence: Synthetic oligonucleotide
  Target: LAMA2; (-) strand; PAM type: NRG; PAM sequence: GGG
atcattacgggataggagat

SEQ ID NO: 90417 - DNA, 20 bp, Artificial Sequence
  Description of Artificial Sequence: Synthetic oligonucleotide
  Target: LAMA2; (-) strand; PAM type: NRG; PAM sequence: TGG
aatcattacgggataggaga

SEQ ID NO: 90418 - DNA, 20 bp, Artificial Sequence
  Description of Artificial Sequence: Synthetic oligonucleotide
  Target: LAMA2; (-) strand; PAM type: NRG; PAM sequence: GAG
gcataatcattacgggatag

SEQ ID NO: 90419 - DNA, 20 bp, Artificial Sequence
  Description of Artificial Sequence: Synthetic oligonucleotide
  Target: LAMA2; (-) strand; PAM type: NRG; PAM sequence: AGG
atgcataatcattacgggat

SEQ ID NO: 90420 - DNA, 20 bp, Artificial Sequence
  Description of Artificial Sequence: Synthetic oligonucleotide
  Target: LAMA2; (-) strand; PAM type: NRG; PAM sequence: TAG
gatgcataatcattacggga

SEQ ID NO: 90421 - DNA, 20 bp, Artificial Sequence
  Description of Artificial Sequence: Synthetic oligonucleotide
  Target: LAMA2; (-) strand; PAM type: NRG; PAM sequence: GGG
agaagatgcataatcattac

SEQ ID NO: 90422 - DNA, 20 bp, Artificial Sequence
  Description of Artificial Sequence: Synthetic oligonucleotide
  Target: LAMA2; (-) strand; PAM type: NRG; PAM sequence: CGG
cagaagatgcataatcatta

SEQ ID NO: 90423 - DNA, 20 bp, Artificial Sequence
  Description of Artificial Sequence: Synthetic oligonucleotide
  Target: LAMA2; (-) strand; PAM type: NRG; PAM sequence: AAG
tgctgggagctacaagacag

SEQ ID NO: 90424 - DNA, 20 bp, Artificial Sequence
  Description of Artificial Sequence: Synthetic oligonucleotide
  Target: LAMA2; (-) strand; PAM type: NRG; PAM sequence: CAG
tactgctgggagctacaaga

SEQ ID NO: 90425 - DNA, 20 bp, Artificial Sequence
  Description of Artificial Sequence: Synthetic oligonucleotide
  Target: LAMA2; (-) strand; PAM type: NRG; PAM sequence: AAG
ctcctactgctgggagctac

SEQ ID NO: 90426 - DNA, 20 bp, Artificial Sequence
  Description of Artificial Sequence: Synthetic oligonucleotide
  Target: LAMA2; (-) strand; PAM type: NRG; PAM sequence: GAG
aactgtcctcctactgctgg

SEQ ID NO: 90427 - DNA, 20 bp, Artificial Sequence
  Description of Artificial Sequence: Synthetic oligonucleotide
  Target: LAMA2; (-) strand; PAM type: NRG; PAM sequence: GGG
tcaactgtcctcctactgct

SEQ ID NO: 90428 - DNA, 20 bp, Artificial Sequence
  Description of Artificial Sequence: Synthetic oligonucleotide
  Target: LAMA2; (-) strand; PAM type: NRG; PAM sequence: TGG
gtcaactgtcctcctactgc

SEQ ID NO: 90429 - DNA, 20 bp, Artificial Sequence
  Description of Artificial Sequence: Synthetic oligonucleotide
  Target: LAMA2; (-) strand; PAM type: NRG; PAM sequence: TGG
ttcttcaaggtcatatgata

SEQ ID NO: 90430 - DNA, 20 bp, Artificial Sequence
  Description of Artificial Sequence: Synthetic oligonucleotide
  Target: LAMA2; (-) strand; PAM type: NRG; PAM sequence: AGG
tatcttcttcctcttcttca

SEQ ID NO: 90431 - DNA, 20 bp, Artificial Sequence
  Description of Artificial Sequence: Synthetic oligonucleotide
  Target: LAMA2; (-) strand; PAM type: NRG; PAM sequence: AAG
gtatcttcttcctcttcttc

SEQ ID NO: 90432 - DNA, 20 bp, Artificial Sequence
  Description of Artificial Sequence: Synthetic oligonucleotide
  Target: LAMA2; (-) strand; PAM type: NRG; PAM sequence: GAG
tctaagataatcataagctg

SEQ ID NO: 90433 - DNA, 20 bp, Artificial Sequence
  Description of Artificial Sequence: Synthetic oligonucleotide
  Target: LAMA2; (-) strand; PAM type: NRG; PAM sequence: TGG
cctctaagataatcataagc

SEQ ID NO: 90434 - DNA, 20 bp, Artificial Sequence
  Description of Artificial Sequence: Synthetic oligonucleotide
  Target: LAMA2; (-) strand; PAM type: NRG; PAM sequence: AAG
tctacctctaagataatcat

SEQ ID NO: 90435 - DNA, 20 bp, Artificial Sequence
  Description of Artificial Sequence: Synthetic oligonucleotide
  Target: LAMA2; (-) strand; PAM type: NRG; PAM sequence: AAG
gctctcagtactctacctct

SEQ ID NO: 90436 - DNA, 20 bp, Artificial Sequence
  Description of Artificial Sequence: Synthetic oligonucleotide
  Target: LAMA2; (-) strand; PAM type: NRG; PAM sequence: CAG
aacacgggtgaacatgctct

SEQ ID NO: 90437 - DNA, 20 bp, Artificial Sequence
  Description of Artificial Sequence: Synthetic oligonucleotide
  Target: LAMA2; (-) strand; PAM type: NRG; PAM sequence: GGG
gtaacatcaggaagtaacac

SEQ ID NO: 90438 - DNA, 20 bp, Artificial Sequence
  Description of Artificial Sequence: Synthetic oligonucleotide
  Target: LAMA2; (-) strand; PAM type: NRG; PAM sequence: CGG
agtaacatcaggaagtaaca

SEQ ID NO: 90439 - DNA, 20 bp, Artificial Sequence
  Description of Artificial Sequence: Synthetic oligonucleotide
  Target: LAMA2; (-) strand; PAM type: NRG; PAM sequence: AAG
taaccttaagtaacatcagg

SEQ ID NO: 90440 - DNA, 20 bp, Artificial Sequence
  Description of Artificial Sequence: Synthetic oligonucleotide
  Target: LAMA2; (-) strand; PAM type: NRG; PAM sequence: AGG
tggtaaccttaagtaacatc

SEQ ID NO: 90441 - DNA, 20 bp, Artificial Sequence
  Description of Artificial Sequence: Synthetic oligonucleotide
  Target: LAMA2; (-) strand; PAM type: NRG; PAM sequence: CAG
ctggtaaccttaagtaacat

SEQ ID NO: 90442 - DNA, 20 bp, Artificial Sequence
  Description of Artificial Sequence: Synthetic oligonucleotide
  Target: LAMA2; (-) strand; PAM type: NRG; PAM sequence: AAG
aatacagtactggtaacctt

SEQ ID NO: 90443 - DNA, 20 bp, Artificial Sequence
  Description of Artificial Sequence: Synthetic oligonucleotide
  Target: LAMA2; (-) strand; PAM type: NRG; PAM sequence: TGG
gcaggtaaaaaatacagtac

SEQ ID NO: 90444 - DNA, 20 bp, Artificial Sequence
  Description of Artificial Sequence: Synthetic oligonucleotide
  Target: LAMA2; (-) strand; PAM type: NRG; PAM sequence: CAG
aaccaggcaggtaaaaaata

SEQ ID NO: 90445 - DNA, 20 bp, Artificial Sequence
  Description of Artificial Sequence: Synthetic oligonucleotide
  Target: LAMA2; (-) strand; PAM type: NRG; PAM sequence: AGG
aagtcagtgtcaaaccaggc

SEQ ID NO: 90446 - DNA, 20 bp, Artificial Sequence
  Description of Artificial Sequence: Synthetic oligonucleotide
  Target: LAMA2; (-) strand; PAM type: NRG; PAM sequence: CAG
taagtcagtgtcaaaccagg

SEQ ID NO: 90447 - DNA, 20 bp, Artificial Sequence
  Description of Artificial Sequence: Synthetic oligonucleotide
  Target: LAMA2; (-) strand; PAM type: NRG; PAM sequence: AGG
ctgtaagtcagtgtcaaacc

SEQ ID NO: 90448 - DNA, 20 bp, Artificial Sequence
  Description of Artificial Sequence: Synthetic oligonucleotide
  Target: LAMA2; (-) strand; PAM type: NRG; PAM sequence: CAG
cctgtaagtcagtgtcaaac

SEQ ID NO: 90449 - DNA, 20 bp, Artificial Sequence
  Description of Artificial Sequence: Synthetic oligonucleotide
  Target: LAMA2; (-) strand; PAM type: NRG; PAM sequence: CAG
tttttagtagtcctgtaagt

SEQ ID NO: 90450 - DNA, 20 bp, Artificial Sequence
  Description of Artificial Sequence: Synthetic oligonucleotide
  Target: LAMA2; (-) strand; PAM type: NRG; PAM sequence: AAG
tttttttttagtagtcctgt

SEQ ID NO: 90451 - DNA, 20 bp, Artificial Sequence
  Description of Artificial Sequence: Synthetic oligonucleotide
  Target: LAMA2; (-) strand; PAM type: NRG; PAM sequence: TAG
taaggtatatttttttttag

SEQ ID NO: 90452 - DNA, 20 bp, Artificial Sequence
  Description of Artificial Sequence: Synthetic oligonucleotide
  Target: LAMA2; (-) strand; PAM type: NRG; PAM sequence: TAG
tcctaaggtatatttttttt

SEQ ID NO: 90453 - DNA, 20 bp, Artificial Sequence
  Description of Artificial Sequence: Synthetic oligonucleotide
  Target: LAMA2; (-) strand; PAM type: NRG; PAM sequence: AGG
agtggcacaaaaatctccta

SEQ ID NO: 90454 - DNA, 20 bp, Artificial Sequence
  Description of Artificial Sequence: Synthetic oligonucleotide
  Target: LAMA2; (-) strand; PAM type: NRG; PAM sequence: AAG
gagtggcacaaaaatctcct

SEQ ID NO: 90455 - DNA, 20 bp, Artificial Sequence
  Description of Artificial Sequence: Synthetic oligonucleotide
  Target: LAMA2; (-) strand; PAM type: NRG; PAM sequence: TGG
ctcagagtgaaacaaaagag

SEQ ID NO: 90456 - DNA, 20 bp, Artificial Sequence
  Description of Artificial Sequence: Synthetic oligonucleotide
  Target: LAMA2; (-) strand; PAM type: NRG; PAM sequence: GAG
tgtctcagagtgaaacaaaa

SEQ ID NO: 90457 - DNA, 20 bp, Artificial Sequence
  Description of Artificial Sequence: Synthetic oligonucleotide
  Target: LAMA2; (-) strand; PAM type: NRG; PAM sequence: AAG
tatgtctcagagtgaaacaa

SEQ ID NO: 90458 - DNA, 20 bp, Artificial Sequence
  Description of Artificial Sequence: Synthetic oligonucleotide
  Target: LAMA2; (-) strand; PAM type: NRG; PAM sequence: GAG
aatcttctagatatgtctca

SEQ ID NO: 90459 - DNA, 20 bp, Artificial Sequence
  Description of Artificial Sequence: Synthetic oligonucleotide
  Target: LAMA2; (-) strand; PAM type: NRG; PAM sequence: CAG
tcaatcttctagatatgtct

SEQ ID NO: 90460 - DNA, 20 bp, Artificial Sequence
  Description of Artificial Sequence: Synthetic oligonucleotide
  Target: LAMA2; (-) strand; PAM type: NRG; PAM sequence: TAG
aacaaatatactcaatcttc

SEQ ID NO: 90461 - DNA, 20 bp, Artificial Sequence
  Description of Artificial Sequence: Synthetic oligonucleotide
  Target: LAMA2; (-) strand; PAM type: NRG; PAM sequence: AAG
ttaatttcaagtctggtcta

SEQ ID NO: 90462 - DNA, 20 bp, Artificial Sequence
  Description of Artificial Sequence: Synthetic oligonucleotide
  Target: LAMA2; (-) strand; PAM type: NRG; PAM sequence: TGG
ttgaaatttaatttcaagtc

SEQ ID NO: 90463 - DNA, 20 bp, Artificial Sequence
  Description of Artificial Sequence: Synthetic oligonucleotide
  Target: LAMA2; (-) strand; PAM type: NRG; PAM sequence: AAG
tatgtttgaaatttaatttc

SEQ ID NO: 90464 - DNA, 20 bp, Artificial Sequence
  Description of Artificial Sequence: Synthetic oligonucleotide
  Target: LAMA2; (-) strand; PAM type: NRG; PAM sequence: TGG
atatttaaattttggaaata

SEQ ID NO: 90465 - DNA, 20 bp, Artificial Sequence
  Description of Artificial Sequence: Synthetic oligonucleotide
  Target: LAMA2; (-) strand; PAM type: NRG; PAM sequence: TGG
ctttcataatatttaaattt

SEQ ID NO: 90466 - DNA, 20 bp, Artificial Sequence
  Description of Artificial Sequence: Synthetic oligonucleotide
  Target: LAMA2; (-) strand; PAM type: NRG; PAM sequence: TAG
aaaaacacaaccatgtaaat

SEQ ID NO: 90467 - DNA, 20 bp, Artificial Sequence
  Description of Artificial Sequence: Synthetic oligonucleotide
  Target: LAMA2; (-) strand; PAM type: NRG; PAM sequence: AGG
atctggaagcaagagaaaac

SEQ ID NO: 90468 - DNA, 20 bp, Artificial Sequence
  Description of Artificial Sequence: Synthetic oligonucleotide
  Target: LAMA2; (-) strand; PAM type: NRG; PAM sequence: CAG
tatctggaagcaagagaaaa

SEQ ID NO: 90469 - DNA, 20 bp, Artificial Sequence
  Description of Artificial Sequence: Synthetic oligonucleotide
  Target: LAMA2; (-) strand; PAM type: NRG; PAM sequence: GAG
taaaatctatctggaagcaa

SEQ ID NO: 90470 - DNA, 20 bp, Artificial Sequence
  Description of Artificial Sequence: Synthetic oligonucleotide
  Target: LAMA2; (-) strand; PAM type: NRG; PAM sequence: AAG
aataaaatctatctggaagc

SEQ ID NO: 90471 - DNA, 20 bp, Artificial Sequence
  Description of Artificial Sequence: Synthetic oligonucleotide
  Target: LAMA2; (-) strand; PAM type: NRG; PAM sequence: AAG
agacaataaaatctatctgg

SEQ ID NO: 90472 - DNA, 20 bp, Artificial Sequence
  Description of Artificial Sequence: Synthetic oligonucleotide
  Target: LAMA2; (-) strand; PAM type: NRG; PAM sequence: TGG
agtagacaataaaatctatc

SEQ ID NO: 90473 - DNA, 20 bp, Artificial Sequence
  Description of Artificial Sequence: Synthetic oligonucleotide
  Target: LAMA2; (-) strand; PAM type: NRG; PAM sequence: TAG
atctaatataaacaagggag

SEQ ID NO: 90474 - DNA, 20 bp, Artificial Sequence
  Description of Artificial Sequence: Synthetic oligonucleotide
  Target: LAMA2; (-) strand; PAM type: NRG; PAM sequence: GAG
tttatctaatataaacaagg

SEQ ID NO: 90475 - DNA, 20 bp, Artificial Sequence
  Description of Artificial Sequence: Synthetic oligonucleotide
  Target: LAMA2; (-) strand; PAM type: NRG; PAM sequence: GGG
attttatctaatataaacaa

SEQ ID NO: 90476 - DNA, 20 bp, Artificial Sequence
  Description of Artificial Sequence: Synthetic oligonucleotide
  Target: LAMA2; (-) strand; PAM type: NRG; PAM sequence: AGG
tattttatctaatataaaca

SEQ ID NO: 90477 - DNA, 20 bp, Artificial Sequence
  Description of Artificial Sequence: Synthetic oligonucleotide
  Target: LAMA2; (-) strand; PAM type: NRG; PAM sequence: AAG
ttattttatctaatataaac

SEQ ID NO: 90478 - DNA, 20 bp, Artificial Sequence
  Description of Artificial Sequence: Synthetic oligonucleotide
  Target: LAMA2; (-) strand; PAM type: NRG; PAM sequence: AAG
ttaactatagctaaataaac

SEQ ID NO: 90479 - DNA, 20 bp, Artificial Sequence
  Description of Artificial Sequence: Synthetic oligonucleotide
  Target: LAMA2; (-) strand; PAM type: NRG; PAM sequence: TAG
ctgaagtcaagatttaacta

SEQ ID NO: 90480 - DNA, 20 bp, Artificial Sequence
  Description of Artificial Sequence: Synthetic oligonucleotide
  Target: LAMA2; (-) strand; PAM type: NRG; PAM sequence: AAG
taaaacaggattctgaagtc

SEQ ID NO: 90481 - DNA, 20 bp, Artificial Sequence
  Description of Artificial Sequence: Synthetic oligonucleotide
  Target: LAMA2; (-) strand; PAM type: NRG; PAM sequence: AAG
ttacctaaaacaggattctg

SEQ ID NO: 90482 - DNA, 20 bp, Artificial Sequence
  Description of Artificial Sequence: Synthetic oligonucleotide
  Target: LAMA2; (-) strand; PAM type: NRG; PAM sequence: AGG
gtacctttcttacctaaaac

SEQ ID NO: 90483 - DNA, 20 bp, Artificial Sequence
  Description of Artificial Sequence: Synthetic oligonucleotide
  Target: LAMA2; (-) strand; PAM type: NRG; PAM sequence: CAG
tgtacctttcttacctaaaa

SEQ ID NO: 90484 - DNA, 20 bp, Artificial Sequence
  Description of Artificial Sequence: Synthetic oligonucleotide
  Target: LAMA2; (-) strand; PAM type: NRG; PAM sequence: CAG
ggcccttcaaatcttgaaag

SEQ ID NO: 90485 - DNA, 20 bp, Artificial Sequence
  Description of Artificial Sequence: Synthetic oligonucleotide
  Target: LAMA2; (-) strand; PAM type: NRG; PAM sequence: AAG
tatggcccttcaaatcttga

SEQ ID NO: 90486 - DNA, 20 bp, Artificial Sequence
  Description of Artificial Sequence: Synthetic oligonucleotide
  Target: LAMA2; (-) strand; PAM type: NRG; PAM sequence: TGG
gagcattttgaagttgccta

SEQ ID NO: 90487 - DNA, 20 bp, Artificial Sequence
  Description of Artificial Sequence: Synthetic oligonucleotide
  Target: LAMA2; (-) strand; PAM type: NRG; PAM sequence: AAG
ttcaggctttgagcattttg

SEQ ID NO: 90488 - DNA, 20 bp, Artificial Sequence
  Description of Artificial Sequence: Synthetic oligonucleotide
  Target: LAMA2; (-) strand; PAM type: NRG; PAM sequence: GAG
ctaaggaaacttcaggcttt

SEQ ID NO: 90489 - DNA, 20 bp, Artificial Sequence
  Description of Artificial Sequence: Synthetic oligonucleotide
  Target: LAMA2; (-) strand; PAM type: NRG; PAM sequence: AGG
agagcctctaaggaaacttc

SEQ ID NO: 90490 - DNA, 20 bp, Artificial Sequence
  Description of Artificial Sequence: Synthetic oligonucleotide
  Target: LAMA2; (-) strand; PAM type: NRG; PAM sequence: CAG
gagagcctctaaggaaactt

SEQ ID NO: 90491 - DNA, 20 bp, Artificial Sequence
  Description of Artificial Sequence: Synthetic oligonucleotide
  Target: LAMA2; (-) strand; PAM type: NRG; PAM sequence: AGG
agggtggcagagagcctcta

SEQ ID NO: 90492 - DNA, 20 bp, Artificial Sequence
  Description of Artificial Sequence: Synthetic oligonucleotide
  Target: LAMA2; (-) strand; PAM type: NRG; PAM sequence: AAG
aagggtggcagagagcctct

SEQ ID NO: 90493 - DNA, 20 bp, Artificial Sequence
  Description of Artificial Sequence: Synthetic oligonucleotide
  Target: LAMA2; (-) strand; PAM type: NRG; PAM sequence: GAG
tgataagaaagggtggcaga

SEQ ID NO: 90494 - DNA, 20 bp, Artificial Sequence
  Description of Artificial Sequence: Synthetic oligonucleotide
  Target: LAMA2; (-) strand; PAM type: NRG; PAM sequence: GAG
tatgataagaaagggtggca

SEQ ID NO: 90495 - DNA, 20 bp, Artificial Sequence
  Description of Artificial Sequence: Synthetic oligonucleotide
  Target: LAMA2; (-) strand; PAM type: NRG; PAM sequence: CAG
gatatgataagaaagggtgg

SEQ ID NO: 90496 - DNA, 20 bp, Artificial Sequence
  Description of Artificial Sequence: Synthetic oligonucleotide
  Target: LAMA2; (-) strand; PAM type: NRG; PAM sequence: TGG
atggatatgataagaaaggg

SEQ ID NO: 90497 - DNA, 20 bp, Artificial Sequence
  Description of Artificial Sequence: Synthetic oligonucleotide
  Target: LAMA2; (-) strand; PAM type: NRG; PAM sequence: GGG
agaatggatatgataagaaa

SEQ ID NO: 90498 - DNA, 20 bp, Artificial Sequence
  Description of Artificial Sequence: Synthetic oligonucleotide
  Target: LAMA2; (-) strand; PAM type: NRG; PAM sequence: AGG
aagaatggatatgataagaa

SEQ ID NO: 90499 - DNA, 20 bp, Artificial Sequence
  Description of Artificial Sequence: Synthetic oligonucleotide
  Target: LAMA2; (-) strand; PAM type: NRG; PAM sequence: AAG
aaagaatggatatgataaga

SEQ ID NO: 90500 - DNA, 20 bp, Artificial Sequence
  Description of Artificial Sequence: Synthetic oligonucleotide
  Target: LAMA2; (-) strand; PAM type: NRG; PAM sequence: AAG
ttggaaagaatggatatgat

SEQ ID NO: 90501 - DNA, 20 bp, Artificial Sequence
  Description of Artificial Sequence: Synthetic oligonucleotide
  Target: LAMA2; (-) strand; PAM type: NRG; PAM sequence: TGG
agatacattattggaaagaa

SEQ ID NO: 90502 - DNA, 20 bp, Artificial Sequence
  Description of Artificial Sequence: Synthetic oligonucleotide
  Target: LAMA2; (-) strand; PAM type: NRG; PAM sequence: AAG
ggaggagatacattattgga

SEQ ID NO: 90503 - DNA, 20 bp, Artificial Sequence
  Description of Artificial Sequence: Synthetic oligonucleotide
  Target: LAMA2; (-) strand; PAM type: NRG; PAM sequence: TGG
aaggggaggagatacattat

SEQ ID NO: 90504 - DNA, 20 bp, Artificial Sequence
  Description of Artificial Sequence: Synthetic oligonucleotide
  Target: LAMA2; (-) strand; PAM type: NRG; PAM sequence: GAG
cgtatcagtgtcaaggggag

SEQ ID NO: 90505 - DNA, 20 bp, Artificial Sequence
  Description of Artificial Sequence: Synthetic oligonucleotide
  Target: LAMA2; (-) strand; PAM type: NRG; PAM sequence: AGG
tacgtatcagtgtcaagggg

SEQ ID NO: 90506 - DNA, 20 bp, Artificial Sequence
  Description of Artificial Sequence: Synthetic oligonucleotide
  Target: LAMA2; (-) strand; PAM type: NRG; PAM sequence: GAG
atacgtatcagtgtcaaggg

SEQ ID NO: 90507 - DNA, 20 bp, Artificial Sequence
  Description of Artificial Sequence: Synthetic oligonucleotide
  Target: LAMA2; (-) strand; PAM type: NRG; PAM sequence: GGG
gaatacgtatcagtgtcaag

SEQ ID NO: 90508 - DNA, 20 bp, Artificial Sequence
  Description of Artificial Sequence: Synthetic oligonucleotide
  Target: LAMA2; (-) strand; PAM type: NRG; PAM sequence: GGG
tgaatacgtatcagtgtcaa

SEQ ID NO: 90509 - DNA, 20 bp, Artificial Sequence
  Description of Artificial Sequence: Synthetic oligonucleotide
  Target: LAMA2; (-) strand; PAM type: NRG; PAM sequence: AGG
ctgaatacgtatcagtgtca

SEQ ID NO: 90510 - DNA, 20 bp, Artificial Sequence
  Description of Artificial Sequence: Synthetic oligonucleotide
  Target: LAMA2; (-) strand; PAM type: NRG; PAM sequence: AAG
tctgaatacgtatcagtgtc

SEQ ID NO: 90511 - DNA, 20 bp, Artificial Sequence
  Description of Artificial Sequence: Synthetic oligonucleotide
  Target: LAMA2; (-) strand; PAM type: NRG; PAM sequence: CAG
gtgtgcctctgaatacgtat

SEQ ID NO: 90512 - DNA, 20 bp, Artificial Sequence
  Description of Artificial Sequence: Synthetic oligonucleotide
  Target: LAMA2; (-) strand; PAM type: NRG; PAM sequence: TGG
taaattaacatctacccatt

SEQ ID NO: 90513 - DNA, 20 bp, Artificial Sequence
  Description of Artificial Sequence: Synthetic oligonucleotide
  Target: LAMA2; (-) strand; PAM type: NRG; PAM sequence: TGG
agacaggaaacaacagagcc

SEQ ID NO: 90514 - DNA, 20 bp, Artificial Sequence
  Description of Artificial Sequence: Synthetic oligonucleotide
  Target: LAMA2; (-) strand; PAM type: NRG; PAM sequence: GAG
tttcaagacaggaaacaaca

SEQ ID NO: 90515 - DNA, 20 bp, Artificial Sequence
  Description of Artificial Sequence: Synthetic oligonucleotide
  Target: LAMA2; (-) strand; PAM type: NRG; PAM sequence: CAG
agtttcaagacaggaaacaa

SEQ ID NO: 90516 - DNA, 20 bp, Artificial Sequence
  Description of Artificial Sequence: Synthetic oligonucleotide
  Target: LAMA2; (-) strand; PAM type: NRG; PAM sequence: AGG
atgcatgaaagtttcaagac

SEQ ID NO: 90517 - DNA, 20 bp, Artificial Sequence
  Description of Artificial Sequence: Synthetic oligonucleotide
  Target: LAMA2; (-) strand; PAM type: NRG; PAM sequence: CAG
catgcatgaaagtttcaaga

SEQ ID NO: 90518 - DNA, 20 bp, Artificial Sequence
  Description of Artificial Sequence: Synthetic oligonucleotide
  Target: LAMA2; (-) strand; PAM type: NRG; PAM sequence: AAG
ttcacatgcatgaaagtttc

SEQ ID NO: 90519 - DNA, 20 bp, Artificial Sequence
  Description of Artificial Sequence: Synthetic oligonucleotide
  Target: LAMA2; (-) strand; PAM type: NRG; PAM sequence: AAG
tcatagattcacatgcatga

SEQ ID NO: 90520 - DNA, 20 bp, Artificial Sequence
  Description of Artificial Sequence: Synthetic oligonucleotide
  Target: LAMA2; (-) strand; PAM type: NRG; PAM sequence: TAG
aagaatttttcattttgtca

SEQ ID NO: 90521 - DNA, 20 bp, Artificial Sequence
  Description of Artificial Sequence: Synthetic oligonucleotide
  Target: LAMA2; (-) strand; PAM type: NRG; PAM sequence: AAG
gaaaatgtccattttgagaa

SEQ ID NO: 90522 - DNA, 20 bp, Artificial Sequence
  Description of Artificial Sequence: Synthetic oligonucleotide
  Target: LAMA2; (-) strand; PAM type: NRG; PAM sequence: GAG
tactggaaaatgtccatttt

SEQ ID NO: 90523 - DNA, 20 bp, Artificial Sequence
  Description of Artificial Sequence: Synthetic oligonucleotide
  Target: LAMA2; (-) strand; PAM type: NRG; PAM sequence: TGG
cagaccacttcatccaatac

SEQ ID NO: 90524 - DNA, 20 bp, Artificial Sequence
  Description of Artificial Sequence: Synthetic oligonucleotide
  Target: LAMA2; (-) strand; PAM type: NRG; PAM sequence: CAG
agagacagaaagagagagag

SEQ ID NO: 90525 - DNA, 20 bp, Artificial Sequence
  Description of Artificial Sequence: Synthetic oligonucleotide
  Target: LAMA2; (-) strand; PAM type: NRG; PAM sequence: GAG
gagagagacagaaagagaga

SEQ ID NO: 90526 - DNA, 20 bp, Artificial Sequence
  Description of Artificial Sequence: Synthetic oligonucleotide
  Target: LAMA2; (-) strand; PAM type: NRG; PAM sequence: GAG
aagagagagacagaaagaga

SEQ ID NO: 90527 - DNA, 20 bp, Artificial Sequence
  Description of Artificial Sequence: Synthetic oligonucleotide
  Target: LAMA2; (-) strand; PAM type: NRG; PAM sequence: GAG
gaaagagagagacagaaaga

SEQ ID NO: 90528 - DNA, 20 bp, Artificial Sequence
  Description of Artificial Sequence: Synthetic oligonucleotide
  Target: LAMA2; (-) strand; PAM type: NRG; PAM sequence: GAG
gagaaagagagagacagaaa

SEQ ID NO: 90529 - DNA, 20 bp, Artificial Sequence
  Description of Artificial Sequence: Synthetic oligonucleotide
  Target: LAMA2; (-) strand; PAM type: NRG; PAM sequence: AAG
gagagaaagagagagacaga

SEQ ID NO: 90530 - DNA, 20 bp, Artificial Sequence
  Description of Artificial Sequence: Synthetic oligonucleotide
  Target: LAMA2; (-) strand; PAM type: NRG; PAM sequence: CAG
gagagagagaaagagagaga

SEQ ID NO: 90531 - DNA, 20 bp, Artificial Sequence
  Description of Artificial Sequence: Synthetic oligonucleotide
  Target: LAMA2; (-) strand; PAM type: NRG; PAM sequence: GAG
cagagagagagagaaagaga

SEQ ID NO: 90532 - DNA, 20 bp, Artificial Sequence
  Description of Artificial Sequence: Synthetic oligonucleotide
  Target: LAMA2; (-) strand; PAM type: NRG; PAM sequence: GAG
gacagagagagagagaaaga

SEQ ID NO: 90533 - DNA, 20 bp, Artificial Sequence
  Description of Artificial Sequence: Synthetic oligonucleotide
  Target: LAMA2; (-) strand; PAM type: NRG; PAM sequence: GAG
gagacagagagagagagaaa

SEQ ID NO: 90534 - DNA, 20 bp, Artificial Sequence
  Description of Artificial Sequence: Synthetic oligonucleotide
  Target: LAMA2; (-) strand; PAM type: NRG; PAM sequence: AAG
gagagacagagagagagaga

SEQ ID NO: 90535 - DNA, 20 bp, Artificial Sequence
  Description of Artificial Sequence: Synthetic oligonucleotide
  Target: LAMA2; (-) strand; PAM type: NRG; PAM sequence: GAG
aagagagagacagagagaga

SEQ ID NO: 90536 - DNA, 20 bp, Artificial Sequence
  Description of Artificial Sequence: Synthetic oligonucleotide
  Target: LAMA2; (-) strand; PAM type: NRG; PAM sequence: GAG
gaaagagagagacagagaga

SEQ ID NO: 90537 - DNA, 20 bp, Artificial Sequence
  Description of Artificial Sequence: Synthetic oligonucleotide
  Target: LAMA2; (-) strand; PAM type: NRG; PAM sequence: GAG
gagaaagagagagacagaga

SEQ ID NO: 90538 - DNA, 20 bp, Artificial Sequence
  Description of Artificial Sequence: Synthetic oligonucleotide
  Target: LAMA2; (-) strand; PAM type: NRG; PAM sequence: GAG
gagagaaagagagagacaga

SEQ ID NO: 90539 - DNA, 20 bp, Artificial Sequence
  Description of Artificial Sequence: Synthetic oligonucleotide
  Target: LAMA2; (-) strand; PAM type: NRG; PAM sequence: GAG
gagagagaaagagagagaca

SEQ ID NO: 90540 - DNA, 20 bp, Artificial Sequence
  Description of Artificial Sequence: Synthetic oligonucleotide
  Target: LAMA2; (-) strand; PAM type: NRG; PAM sequence: CAG
gagagagagaaagagagaga

SEQ ID NO: 90541 - DNA, 20 bp, Artificial Sequence
  Description of Artificial Sequence: Synthetic oligonucleotide
  Target: LAMA2; (-) strand; PAM type: NRG; PAM sequence: GAG
gagagagagagagaaagaga

SEQ ID NO: 90542 - DNA, 20 bp, Artificial Sequence
  Description of Artificial Sequence: Synthetic oligonucleotide
  Target: LAMA2; (-) strand; PAM type: NRG; PAM sequence: GAG
gagagagagagagagaaaga

SEQ ID NO: 90543 - DNA, 20 bp, Artificial Sequence
  Description of Artificial Sequence: Synthetic oligonucleotide
  Target: LAMA2; (-) strand; PAM type: NRG; PAM sequence: GAG
gagagagagagagagagaaa

SEQ ID NO: 90544 - DNA, 20 bp, Artificial Sequence
  Description of Artificial Sequence: Synthetic oligonucleotide
  Target: LAMA2; (-) strand; PAM type: NRG; PAM sequence: AAG
gagagagagagagagagaga

SEQ ID NO: 90545 - DNA, 20 bp, Artificial Sequence
  Description of Artificial Sequence: Synthetic oligonucleotide
  Target: LAMA2; (-) strand; PAM type: NRG; PAM sequence: GAG
gagagagagagagagagaga

SEQ ID NO: 90546 - DNA, 20 bp, Artificial Sequence
  Description of Artificial Sequence: Synthetic oligonucleotide
  Target: LAMA2; (-) strand; PAM type: NRG; PAM sequence: GAG
gagagagagagagagagaga

SEQ ID NO: 90547 - DNA, 20 bp, Artificial Sequence
  Description of Artificial Sequence: Synthetic oligonucleotide
  Target: LAMA2; (-) strand; PAM type: NRG; PAM sequence: GAG
gagagagagagagagagaga

SEQ ID NO: 90548 - DNA, 20 bp, Artificial Sequence
  Description of Artificial Sequence: Synthetic oligonucleotide
  Target: LAMA2; (-) strand; PAM type: NRG; PAM sequence: GAG
gagagagagagagagagaga

SEQ ID NO: 90549 - DNA, 20 bp, Artificial Sequence
  Description of Artificial Sequence: Synthetic oligonucleotide
  Target: LAMA2; (-) strand; PAM type: NRG; PAM sequence: GAG
gagagagagagagagagaga

SEQ ID NO: 90550 - DNA, 20 bp, Artificial Sequence
  Description of Artificial Sequence: Synthetic oligonucleotide
  Target: LAMA2; (-) strand; PAM type: NRG; PAM sequence: GAG
gagagagagagagagagaga

SEQ ID NO: 90551 - DNA, 20 bp, Artificial Sequence
  Description of Artificial Sequence: Synthetic oligonucleotide
  Target: LAMA2; (-) strand; PAM type: NRG; PAM sequence: GAG
gagagagagagagagagaga

SEQ ID NO: 90552 - DNA, 20 bp, Artificial Sequence
  Description of Artificial Sequence: Synthetic oligonucleotide
  Target: LAMA2; (-) strand; PAM type: NRG; PAM sequence: GAG
tagagagagagagagagaga

SEQ ID NO: 90553 - DNA, 20 bp, Artificial Sequence
  Description of Artificial Sequence: Synthetic oligonucleotide
  Target: LAMA2; (-) strand; PAM type: NRG; PAM sequence: GAG
tatagagagagagagagaga

SEQ ID NO: 90554 - DNA, 20 bp, Artificial Sequence
  Description of Artificial Sequence: Synthetic oligonucleotide
  Target: LAMA2; (-) strand; PAM type: NRG; PAM sequence: GAG
tatatagagagagagagaga

SEQ ID NO: 90555 - DNA, 20 bp, Artificial Sequence
  Description of Artificial Sequence: Synthetic oligonucleotide
  Target: LAMA2; (-) strand; PAM type: NRG; PAM sequence: GAG
tatatatagagagagagaga

SEQ ID NO: 90556 - DNA, 20 bp, Artificial Sequence
  Description of Artificial Sequence: Synthetic oligonucleotide
  Target: LAMA2; (-) strand; PAM type: NRG; PAM sequence: GAG
tatatatatagagagagaga

SEQ ID NO: 90557 - DNA, 20 bp, Artificial Sequence
  Description of Artificial Sequence: Synthetic oligonucleotide
  Target: LAMA2; (-) strand; PAM type: NRG; PAM sequence: GAG
tatatatatatagagagaga

SEQ ID NO: 90558 - DNA, 20 bp, Artificial Sequence
  Description of Artificial Sequence: Synthetic oligonucleotide
  Target: LAMA2; (-) strand; PAM type: NRG; PAM sequence: GAG
tatatatatatatagagaga

SEQ ID NO: 90559 - DNA, 20 bp, Artificial Sequence
  Description of Artificial Sequence: Synthetic oligonucleotide
  Target: LAMA2; (-) strand; PAM type: NRG; PAM sequence: GAG
tatatatatatatatagaga

SEQ ID NO: 90560 - DNA, 20 bp, Artificial Sequence
  Description of Artificial Sequence: Synthetic oligonucleotide
  Target: LAMA2; (-) strand; PAM type: NRG; PAM sequence: GAG
tatatatatatatatataga

SEQ ID NO: 90561 - DNA, 20 bp, Artificial Sequence
  Description of Artificial Sequence: Synthetic oligonucleotide
  Target: LAMA2; (-) strand; PAM type: NRG; PAM sequence: GAG
tatatatatatatatatata

SEQ ID NO: 90562 - DNA, 20 bp, Artificial Sequence
  Description of Artificial Sequence: Synthetic oligonucleotide
  Target: LAMA2; (-) strand; PAM type: NRG; PAM sequence: TAG
tatatatatatatatatata

SEQ ID NO: 90563 - DNA, 20 bp, Artificial Sequence
  Description of Artificial Sequence: Synthetic oligonucleotide
  Target: LAMA2; (-) strand; PAM type: NRG; PAM sequence: TAG
ggaattccaaagtatacatc

SEQ ID NO: 90564 - DNA, 20 bp, Artificial Sequence
  Description of Artificial Sequence: Synthetic oligonucleotide
  Target: LAMA2; (-) strand; PAM type: NRG; PAM sequence: AAG
ttcaccttaaaggaattcca

SEQ ID NO: 90565 - DNA, 20 bp, Artificial Sequence
  Description of Artificial Sequence: Synthetic oligonucleotide
  Target: LAMA2; (-) strand; PAM type: NRG; PAM sequence: AGG
gagaactcttttcaccttaa

SEQ ID NO: 90566 - DNA, 20 bp, Artificial Sequence
  Description of Artificial Sequence: Synthetic oligonucleotide
  Target: LAMA2; (-) strand; PAM type: NRG; PAM sequence: AAG
agagaactcttttcacctta

SEQ ID NO: 90567 - DNA, 20 bp, Artificial Sequence
  Description of Artificial Sequence: Synthetic oligonucleotide
  Target: LAMA2; (-) strand; PAM type: NRG; PAM sequence: GAG
cactcaacactttacattta

SEQ ID NO: 90568 - DNA, 20 bp, Artificial Sequence
  Description of Artificial Sequence: Synthetic oligonucleotide
  Target: LAMA2; (-) strand; PAM type: NRG; PAM sequence: TAG
ttcactcaacactttacatt

SEQ ID NO: 90569 - DNA, 20 bp, Artificial Sequence
  Description of Artificial Sequence: Synthetic oligonucleotide
  Target: LAMA2; (-) strand; PAM type: NRG; PAM sequence: TAG
ttaggtaatccttcttgtct

SEQ ID NO: 90570 - DNA, 20 bp, Artificial Sequence
  Description of Artificial Sequence: Synthetic oligonucleotide
  Target: LAMA2; (-) strand; PAM type: NRG; PAM sequence: AGG
ttgaatgacctatgacactt

SEQ ID NO: 90571 - DNA, 20 bp, Artificial Sequence
  Description of Artificial Sequence: Synthetic oligonucleotide
  Target: LAMA2; (-) strand; PAM type: NRG; PAM sequence: TAG
attgaatgacctatgacact

SEQ ID NO: 90572 - DNA, 20 bp, Artificial Sequence
  Description of Artificial Sequence: Synthetic oligonucleotide
  Target: LAMA2; (-) strand; PAM type: NRG; PAM sequence: GAG
ataggacaatggcatctaag

SEQ ID NO: 90573 - DNA, 20 bp, Artificial Sequence
  Description of Artificial Sequence: Synthetic oligonucleotide
  Target: LAMA2; (-) strand; PAM type: NRG; PAM sequence: AGG
aaataggacaatggcatcta

SEQ ID NO: 90574 - DNA, 20 bp, Artificial Sequence
  Description of Artificial Sequence: Synthetic oligonucleotide
  Target: LAMA2; (-) strand; PAM type: NRG; PAM sequence: AAG
aaaataggacaatggcatct

SEQ ID NO: 90575 - DNA, 20 bp, Artificial Sequence
  Description of Artificial Sequence: Synthetic oligonucleotide
  Target: LAMA2; (-) strand; PAM type: NRG; PAM sequence: TGG
taattctcaaaataggacaa

SEQ ID NO: 90576 - DNA, 20 bp, Artificial Sequence
  Description of Artificial Sequence: Synthetic oligonucleotide
  Target: LAMA2; (-) strand; PAM type: NRG; PAM sequence: AGG
tgcagtctaattctcaaaat

SEQ ID NO: 90577 - DNA, 20 bp, Artificial Sequence
  Description of Artificial Sequence: Synthetic oligonucleotide
  Target: LAMA2; (-) strand; PAM type: NRG; PAM sequence: TAG
ctgcagtctaattctcaaaa

SEQ ID NO: 90578 - DNA, 20 bp, Artificial Sequence
  Description of Artificial Sequence: Synthetic oligonucleotide
  Target: LAMA2; (-) strand; PAM type: NRG; PAM sequence: CAG
acaaacaacaaaaaagactg

SEQ ID NO: 90579 - DNA, 20 bp, Artificial Sequence
  Description of Artificial Sequence: Synthetic oligonucleotide
  Target: LAMA2; (-) strand; PAM type: NRG; PAM sequence: AAG
ggaaaaaacaaacaacaaaa

SEQ ID NO: 90580 - DNA, 20 bp, Artificial Sequence
  Description of Artificial Sequence: Synthetic oligonucleotide
  Target: LAMA2; (-) strand; PAM type: NRG; PAM sequence: GGG
tttaaaggaacttactacat

SEQ ID NO: 90581 - DNA, 20 bp, Artificial Sequence
  Description of Artificial Sequence: Synthetic oligonucleotide
  Target: LAMA2; (-) strand; PAM type: NRG; PAM sequence: TGG
ttttaaaggaacttactaca

SEQ ID NO: 90582 - DNA, 20 bp, Artificial Sequence
  Description of Artificial Sequence: Synthetic oligonucleotide
  Target: LAMA2; (-) strand; PAM type: NRG; PAM sequence: AGG
gaattaagctattattttaa

SEQ ID NO: 90583 - DNA, 20 bp, Artificial Sequence
  Description of Artificial Sequence: Synthetic oligonucleotide
  Target: LAMA2; (-) strand; PAM type: NRG; PAM sequence: AAG
tgaattaagctattatttta

SEQ ID NO: 90584 - DNA, 20 bp, Artificial Sequence
  Description of Artificial Sequence: Synthetic oligonucleotide
  Target: LAMA2; (-) strand; PAM type: NRG; PAM sequence: AAG
aagaaacttaaaactgaatt

SEQ ID NO: 90585 - DNA, 20 bp, Artificial Sequence
  Description of Artificial Sequence: Synthetic oligonucleotide
  Target: LAMA2; (-) strand; PAM type: NRG; PAM sequence: AAG
gttgtgtagaacaataggga

SEQ ID NO: 90586 - DNA, 20 bp, Artificial Sequence
  Description of Artificial Sequence: Synthetic oligonucleotide
  Target: LAMA2; (-) strand; PAM type: NRG; PAM sequence: GGG
gtgggttgtgtagaacaata

SEQ ID NO: 90587 - DNA, 20 bp, Artificial Sequence
  Description of Artificial Sequence: Synthetic oligonucleotide
  Target: LAMA2; (-) strand; PAM type: NRG; PAM sequence: AGG
tgtgggttgtgtagaacaat

SEQ ID NO: 90588 - DNA, 20 bp, Artificial Sequence
  Description of Artificial Sequence: Synthetic oligonucleotide
  Target: LAMA2; (-) strand; PAM type: NRG; PAM sequence: TAG
atgtgggttgtgtagaacaa

SEQ ID NO: 90589 - DNA, 20 bp, Artificial Sequence
  Description of Artificial Sequence: Synthetic oligonucleotide
  Target: LAMA2; (-) strand; PAM type: NRG; PAM sequence: TAG
gtagatggatgtgggttgtg

SEQ ID NO: 90590 - DNA, 20 bp, Artificial Sequence
  Description of Artificial Sequence: Synthetic oligonucleotide
  Target: LAMA2; (-) strand; PAM type: NRG; PAM sequence: GGG
ttcaaactgtagatggatgt

SEQ ID NO: 90591 - DNA, 20 bp, Artificial Sequence
  Description of Artificial Sequence: Synthetic oligonucleotide
  Target: LAMA2; (-) strand; PAM type: NRG; PAM sequence: TGG
tttcaaactgtagatggatg

SEQ ID NO: 90592 - DNA, 20 bp, Artificial Sequence
  Description of Artificial Sequence: Synthetic oligonucleotide
  Target: LAMA2; (-) strand; PAM type: NRG; PAM sequence: TGG
tacatatttcaaactgtaga

SEQ ID NO: 90593 - DNA, 20 bp, Artificial Sequence
  Description of Artificial Sequence: Synthetic oligonucleotide
  Target: LAMA2; (-) strand; PAM type: NRG; PAM sequence: TAG
aagttacatatttcaaactg

SEQ ID NO: 90594 - DNA, 20 bp, Artificial Sequence
  Description of Artificial Sequence: Synthetic oligonucleotide
  Target: LAMA2; (-) strand; PAM type: NRG; PAM sequence: AAG
gaattgaaaaaagtgcacga

SEQ ID NO: 90595 - DNA, 20 bp, Artificial Sequence
  Description of Artificial Sequence: Synthetic oligonucleotide
  Target: LAMA2; (-) strand; PAM type: NRG; PAM sequence: AAG
caaacaccttgaattgaaaa

SEQ ID NO: 90596 - DNA, 20 bp, Artificial Sequence
  Description of Artificial Sequence: Synthetic oligonucleotide
  Target: LAMA2; (-) strand; PAM type: NRG; PAM sequence: TAG
ttccctgttaactaaaataa

SEQ ID NO: 90597 - DNA, 20 bp, Artificial Sequence
  Description of Artificial Sequence: Synthetic oligonucleotide
  Target: LAMA2; (-) strand; PAM type: NRG; PAM sequence: TAG
ttcttggtttggcatgacct

SEQ ID NO: 90598 - DNA, 20 bp, Artificial Sequence
  Description of Artificial Sequence: Synthetic oligonucleotide
  Target: LAMA2; (-) strand; PAM type: NRG; PAM sequence: TGG
gaagcatatgcttcttggtt

SEQ ID NO: 90599 - DNA, 20 bp, Artificial Sequence
  Description of Artificial Sequence: Synthetic oligonucleotide
  Target: LAMA2; (-) strand; PAM type: NRG; PAM sequence: TGG
attatgaagcatatgcttct

SEQ ID NO: 90600 - DNA, 20 bp, Artificial Sequence
  Description of Artificial Sequence: Synthetic oligonucleotide
  Target: LAMA2; (-) strand; PAM type: NRG; PAM sequence: AAG
ccttagccaaatgcattatg

SEQ ID NO: 90601 - DNA, 20 bp, Artificial Sequence
  Description of Artificial Sequence: Synthetic oligonucleotide
  Target: LAMA2; (-) strand; PAM type: NRG; PAM sequence: TAG
tgcaatttcaatattagcct

SEQ ID NO: 90602 - DNA, 20 bp, Artificial Sequence
  Description of Artificial Sequence: Synthetic oligonucleotide
  Target: LAMA2; (-) strand; PAM type: NRG; PAM sequence: TAG
aggcaatgcaatttcaatat

SEQ ID NO: 90603 - DNA, 20 bp, Artificial Sequence
  Description of Artificial Sequence: Synthetic oligonucleotide
  Target: LAMA2; (-) strand; PAM type: NRG; PAM sequence: AGG
ttgtggtatacatgaaggga

SEQ ID NO: 90604 - DNA, 20 bp, Artificial Sequence
  Description of Artificial Sequence: Synthetic oligonucleotide
  Target: LAMA2; (-) strand; PAM type: NRG; PAM sequence: AAG
tttgtggtatacatgaaggg

SEQ ID NO: 90605 - DNA, 20 bp, Artificial Sequence
  Description of Artificial Sequence: Synthetic oligonucleotide
  Target: LAMA2; (-) strand; PAM type: NRG; PAM sequence: GGG
atatttgtggtatacatgaa

SEQ ID NO: 90606 - DNA, 20 bp, Artificial Sequence
  Description of Artificial Sequence: Synthetic oligonucleotide
  Target: LAMA2; (-) strand; PAM type: NRG; PAM sequence: AGG
tatatttgtggtatacatga

SEQ ID NO: 90607 - DNA, 20 bp, Artificial Sequence
  Description of Artificial Sequence: Synthetic oligonucleotide
  Target: LAMA2; (-) strand; PAM type: NRG; PAM sequence: AAG
atatatttgtggtatacatg

SEQ ID NO: 90608 - DNA, 20 bp, Artificial Sequence
  Description of Artificial Sequence: Synthetic oligonucleotide
  Target: LAMA2; (-) strand; PAM type: NRG; PAM sequence: TGG
tcattcagggaatatatttg

SEQ ID NO: 90609 - DNA, 20 bp, Artificial Sequence
  Description of Artificial Sequence: Synthetic oligonucleotide
  Target: LAMA2; (-) strand; PAM type: NRG; PAM sequence: GGG
ttggctttccctgtcattca

SEQ ID NO: 90610 - DNA, 20 bp, Artificial Sequence
  Description of Artificial Sequence: Synthetic oligonucleotide
  Target: LAMA2; (-) strand; PAM type: NRG; PAM sequence: AGG
gttggctttccctgtcattc

SEQ ID NO: 90611 - DNA, 20 bp, Artificial Sequence
  Description of Artificial Sequence: Synthetic oligonucleotide
  Target: LAMA2; (-) strand; PAM type: NRG; PAM sequence: CAG
ggttggctttccctgtcatt

SEQ ID NO: 90612 - DNA, 20 bp, Artificial Sequence
  Description of Artificial Sequence: Synthetic oligonucleotide
  Target: LAMA2; (-) strand; PAM type: NRG; PAM sequence: TGG
gtagacttttattttcaggt

SEQ ID NO: 90613 - DNA, 20 bp, Artificial Sequence
  Description of Artificial Sequence: Synthetic oligonucleotide
  Target: LAMA2; (-) strand; PAM type: NRG; PAM sequence: AGG
cttagtagacttttattttc

SEQ ID NO: 90614 - DNA, 20 bp, Artificial Sequence
  Description of Artificial Sequence: Synthetic oligonucleotide
  Target: LAMA2; (-) strand; PAM type: NRG; PAM sequence: CAG
ccttagtagacttttatttt

SEQ ID NO: 90615 - DNA, 20 bp, Artificial Sequence
  Description of Artificial Sequence: Synthetic oligonucleotide
  Target: LAMA2; (-) strand; PAM type: NRG; PAM sequence: TAG
gccaccacacccggccttag

SEQ ID NO: 90616 - DNA, 20 bp, Artificial Sequence
  Description of Artificial Sequence: Synthetic oligonucleotide
  Target: LAMA2; (-) strand; PAM type: NRG; PAM sequence: TAG
tgagccaccacacccggcct

SEQ ID NO: 90617 - DNA, 20 bp, Artificial Sequence
  Description of Artificial Sequence: Synthetic oligonucleotide
  Target: LAMA2; (-) strand; PAM type: NRG; PAM sequence: CGG
cagacatgagccaccacacc

SEQ ID NO: 90618 - DNA, 20 bp, Artificial Sequence
  Description of Artificial Sequence: Synthetic oligonucleotide
  Target: LAMA2; (-) strand; PAM type: NRG; PAM sequence: GAG
agtgctaggattacagacat

SEQ ID NO: 90619 - DNA, 20 bp, Artificial Sequence
  Description of Artificial Sequence: Synthetic oligonucleotide
  Target: LAMA2; (-) strand; PAM type: NRG; PAM sequence: CAG
ctcccaaagtgctaggatta

SEQ ID NO: 90620 - DNA, 20 bp, Artificial Sequence
  Description of Artificial Sequence: Synthetic oligonucleotide
  Target: LAMA2; (-) strand; PAM type: NRG; PAM sequence: AGG
cctcagcctcccaaagtgct

SEQ ID NO: 90621 - DNA, 20 bp, Artificial Sequence
  Description of Artificial Sequence: Synthetic oligonucleotide
  Target: LAMA2; (-) strand; PAM type: NRG; PAM sequence: TAG
gcctcagcctcccaaagtgc

SEQ ID NO: 90622 - DNA, 20 bp, Artificial Sequence
  Description of Artificial Sequence: Synthetic oligonucleotide
  Target: LAMA2; (-) strand; PAM type: NRG; PAM sequence: AAG
ccacctgcctcagcctccca

SEQ ID NO: 90623 - DNA, 20 bp, Artificial Sequence
  Description of Artificial Sequence: Synthetic oligonucleotide
  Target: LAMA2; (-) strand; PAM type: NRG; PAM sequence: CAG
atcaggtgatccacctgcct

SEQ ID NO: 90624 - DNA, 20 bp, Artificial Sequence
  Description of Artificial Sequence: Synthetic oligonucleotide
  Target: LAMA2; (-) strand; PAM type: NRG; PAM sequence: AGG
ggtctcaaactcctgacatc

SEQ ID NO: 90625 - DNA, 20 bp, Artificial Sequence
  Description of Artificial Sequence: Synthetic oligonucleotide
  Target: LAMA2; (-) strand; PAM type: NRG; PAM sequence: CAG
tggtctcaaactcctgacat

SEQ ID NO: 90626 - DNA, 20 bp, Artificial Sequence
  Description of Artificial Sequence: Synthetic oligonucleotide
  Target: LAMA2; (-) strand; PAM type: NRG; PAM sequence: TGG
ttttgccatgttggccagtc

SEQ ID NO: 90627 - DNA, 20 bp, Artificial Sequence
  Description of Artificial Sequence: Synthetic oligonucleotide
  Target: LAMA2; (-) strand; PAM type: NRG; PAM sequence: CAG
gggggttttgccatgttggc

SEQ ID NO: 90628 - DNA, 20 bp, Artificial Sequence
  Description of Artificial Sequence: Synthetic oligonucleotide
  Target: LAMA2; (-) strand; PAM type: NRG; PAM sequence: TGG
aggcgggggttttgccatgt

SEQ ID NO: 90629 - DNA, 20 bp, Artificial Sequence
  Description of Artificial Sequence: Synthetic oligonucleotide
  Target: LAMA2; (-) strand; PAM type: NRG; PAM sequence: GGG
tgcatttgtagaagaggcgg

SEQ ID NO: 90630 - DNA, 20 bp, Artificial Sequence
  Description of Artificial Sequence: Synthetic oligonucleotide
  Target: LAMA2; (-) strand; PAM type: NRG; PAM sequence: GGG
ttgcatttgtagaagaggcg

SEQ ID NO: 90631 - DNA, 20 bp, Artificial Sequence
  Description of Artificial Sequence: Synthetic oligonucleotide
  Target: LAMA2; (-) strand; PAM type: NRG; PAM sequence: GGG
tttgcatttgtagaagaggc

SEQ ID NO: 90632 - DNA, 20 bp, Artificial Sequence
  Description of Artificial Sequence: Synthetic oligonucleotide
  Target: LAMA2; (-) strand; PAM type: NRG; PAM sequence: CGG
ttttgcatttgtagaagagg

SEQ ID NO: 90633 - DNA, 20 bp, Artificial Sequence
  Description of Artificial Sequence: Synthetic oligonucleotide
  Target: LAMA2; (-) strand; PAM type: NRG; PAM sequence: AGG
attttttgcatttgtagaag

SEQ ID NO: 90634 - DNA, 20 bp, Artificial Sequence
  Description of Artificial Sequence: Synthetic oligonucleotide
  Target: LAMA2; (-) strand; PAM type: NRG; PAM sequence: GAG
aattttttgcatttgtagaa

SEQ ID NO: 90635 - DNA, 20 bp, Artificial Sequence
  Description of Artificial Sequence: Synthetic oligonucleotide
  Target: LAMA2; (-) strand; PAM type: NRG; PAM sequence: AAG
ctaattttttgcatttgtag

SEQ ID NO: 90636 - DNA, 20 bp, Artificial Sequence
  Description of Artificial Sequence: Synthetic oligonucleotide
  Target: LAMA2; (-) strand; PAM type: NRG; PAM sequence: TAG
tggctaattttttgcatttg

SEQ ID NO: 90637 - DNA, 20 bp, Artificial Sequence
  Description of Artificial Sequence: Synthetic oligonucleotide
  Target: LAMA2; (-) strand; PAM type: NRG; PAM sequence: TGG
caggcgcctgccaccaagcc

SEQ ID NO: 90638 - DNA, 20 bp, Artificial Sequence
  Description of Artificial Sequence: Synthetic oligonucleotide
  Target: LAMA2; (-) strand; PAM type: NRG; PAM sequence: AAG
gattacaggcgcctgccacc

SEQ ID NO: 90639 - DNA, 20 bp, Artificial Sequence
  Description of Artificial Sequence: Synthetic oligonucleotide
  Target: LAMA2; (-) strand; PAM type: NRG; PAM sequence: AGG
tccataatagctgagattac

SEQ ID NO: 90640 - DNA, 20 bp, Artificial Sequence
  Description of Artificial Sequence: Synthetic oligonucleotide
  Target: LAMA2; (-) strand; PAM type: NRG; PAM sequence: CAG
ctccataatagctgagatta

SEQ ID NO: 90641 - DNA, 20 bp, Artificial Sequence
  Description of Artificial Sequence: Synthetic oligonucleotide
  Target: LAMA2; (-) strand; PAM type: NRG; PAM sequence: GAG
cctcagcctccataatagct

SEQ ID NO: 90642 - DNA, 20 bp, Artificial Sequence
  Description of Artificial Sequence: Synthetic oligonucleotide
  Target: LAMA2; (-) strand; PAM type: NRG; PAM sequence: TAG
tcatgcctcagcctccataa

SEQ ID NO: 90643 - DNA, 20 bp, Artificial Sequence
  Description of Artificial Sequence: Synthetic oligonucleotide
  Target: LAMA2; (-) strand; PAM type: NRG; PAM sequence: CAG
ttcaagcgattctcatgcct

SEQ ID NO: 90644 - DNA, 20 bp, Artificial Sequence
  Description of Artificial Sequence: Synthetic oligonucleotide
  Target: LAMA2; (-) strand; PAM type: NRG; PAM sequence: AAG
cacctgtgcctcccaggttc

SEQ ID NO: 90645 - DNA, 20 bp, Artificial Sequence
  Description of Artificial Sequence: Synthetic oligonucleotide
  Target: LAMA2; (-) strand; PAM type: NRG; PAM sequence: AGG
cgctgccacctgtgcctccc

SEQ ID NO: 90646 - DNA, 20 bp, Artificial Sequence
  Description of Artificial Sequence: Synthetic oligonucleotide
  Target: LAMA2; (-) strand; PAM type: NRG; PAM sequence: CAG
tcgctgccacctgtgcctcc

SEQ ID NO: 90647 - DNA, 20 bp, Artificial Sequence
  Description of Artificial Sequence: Synthetic oligonucleotide
  Target: LAMA2; (-) strand; PAM type: NRG; PAM sequence: CGG
ggagtgcaacggcgcgatct

SEQ ID NO: 90648 - DNA, 20 bp, Artificial Sequence
  Description of Artificial Sequence: Synthetic oligonucleotide
  Target: LAMA2; (-) strand; PAM type: NRG; PAM sequence: CGG
tcccccaggctggagtgcaa

SEQ ID NO: 90649 - DNA, 20 bp, Artificial Sequence
  Description of Artificial Sequence: Synthetic oligonucleotide
  Target: LAMA2; (-) strand; PAM type: NRG; PAM sequence: GAG
tcgctctatcccccaggctg

SEQ ID NO: 90650 - DNA, 20 bp, Artificial Sequence
  Description of Artificial Sequence: Synthetic oligonucleotide
  Target: LAMA2; (-) strand; PAM type: NRG; PAM sequence: TGG
tctcgctctatcccccaggc

SEQ ID NO: 90651 - DNA, 20 bp, Artificial Sequence
  Description of Artificial Sequence: Synthetic oligonucleotide
  Target: LAMA2; (-) strand; PAM type: NRG; PAM sequence: AGG
agagtctcgctctatccccc

SEQ ID NO: 90652 - DNA, 20 bp, Artificial Sequence
  Description of Artificial Sequence: Synthetic oligonucleotide
  Target: LAMA2; (-) strand; PAM type: NRG; PAM sequence: CAG
cagagtctcgctctatcccc

SEQ ID NO: 90653 - DNA, 20 bp, Artificial Sequence
  Description of Artificial Sequence: Synthetic oligonucleotide
  Target: LAMA2; (-) strand; PAM type: NRG; PAM sequence: GAG
tttatttttttttggagaca

SEQ ID NO: 90654 - DNA, 20 bp, Artificial Sequence
  Description of Artificial Sequence: Synthetic oligonucleotide
  Target: LAMA2; (-) strand; PAM type: NRG; PAM sequence: CAG
tatttatttttttttggaga

SEQ ID NO: 90655 - DNA, 20 bp, Artificial Sequence
  Description of Artificial Sequence: Synthetic oligonucleotide
  Target: LAMA2; (-) strand; PAM type: NRG; PAM sequence: GAG
tatttatttatttttttttg

SEQ ID NO: 90656 - DNA, 20 bp, Artificial Sequence
  Description of Artificial Sequence: Synthetic oligonucleotide
  Target: LAMA2; (-) strand; PAM type: NRG; PAM sequence: TGG
tttatttatttatttttttt

SEQ ID NO: 90657 - DNA, 20 bp, Artificial Sequence
  Description of Artificial Sequence: Synthetic oligonucleotide
  Target: LAMA2; (-) strand; PAM type: NRG; PAM sequence: TAG
tttgtatcctccaccctcaa

SEQ ID NO: 90658 - DNA, 20 bp, Artificial Sequence
  Description of Artificial Sequence: Synthetic oligonucleotide
  Target: LAMA2; (-) strand; PAM type: NRG; PAM sequence: AAG
aaactgaaaagagggtacaa

SEQ ID NO: 90659 - DNA, 20 bp, Artificial Sequence
  Description of Artificial Sequence: Synthetic oligonucleotide
  Target: LAMA2; (-) strand; PAM type: NRG; PAM sequence: GGG
aaagagtaaaactgaaaaga

SEQ ID NO: 90660 - DNA, 20 bp, Artificial Sequence
  Description of Artificial Sequence: Synthetic oligonucleotide
  Target: LAMA2; (-) strand; PAM type: NRG; PAM sequence: AGG
aaaagagtaaaactgaaaag

SEQ ID NO: 90661 - DNA, 20 bp, Artificial Sequence
  Description of Artificial Sequence: Synthetic oligonucleotide
  Target: LAMA2; (-) strand; PAM type: NRG; PAM sequence: GAG
aaaaagagtaaaactgaaaa

SEQ ID NO: 90662 - DNA, 20 bp, Artificial Sequence
  Description of Artificial Sequence: Synthetic oligonucleotide
  Target: LAMA2; (-) strand; PAM type: NRG; PAM sequence: AAG
taaaaaagagtaaaactgaa

SEQ ID NO: 90663 - DNA, 20 bp, Artificial Sequence
  Description of Artificial Sequence: Synthetic oligonucleotide
  Target: LAMA2; (-) strand; PAM type: NRG; PAM sequence: GAG
gaaaaaaaagaaataaaaaa

SEQ ID NO: 90664 - DNA, 20 bp, Artificial Sequence
  Description of Artificial Sequence: Synthetic oligonucleotide
  Target: LAMA2; (-) strand; PAM type: NRG; PAM sequence: AAG
gggaaaaaaaagaaataaaa

SEQ ID NO: 90665 - DNA, 20 bp, Artificial Sequence
  Description of Artificial Sequence: Synthetic oligonucleotide
  Target: LAMA2; (-) strand; PAM type: NRG; PAM sequence: AAG
taccctaaagggggaaaaaa

SEQ ID NO: 90666 - DNA, 20 bp, Artificial Sequence
  Description of Artificial Sequence: Synthetic oligonucleotide
  Target: LAMA2; (-) strand; PAM type: NRG; PAM sequence: GGG
tcaagtcattaccctaaagg

SEQ ID NO: 90667 - DNA, 20 bp, Artificial Sequence
  Description of Artificial Sequence: Synthetic oligonucleotide
  Target: LAMA2; (-) strand; PAM type: NRG; PAM sequence: GGG
ctcaagtcattaccctaaag

SEQ ID NO: 90668 - DNA, 20 bp, Artificial Sequence
  Description of Artificial Sequence: Synthetic oligonucleotide
  Target: LAMA2; (-) strand; PAM type: NRG; PAM sequence: GGG
gctcaagtcattaccctaaa

SEQ ID NO: 90669 - DNA, 20 bp, Artificial Sequence
  Description of Artificial Sequence: Synthetic oligonucleotide
  Target: LAMA2; (-) strand; PAM type: NRG; PAM sequence: AGG
tgctcaagtcattaccctaa

SEQ ID NO: 90670 - DNA, 20 bp, Artificial Sequence
  Description of Artificial Sequence: Synthetic oligonucleotide
  Target: LAMA2; (-) strand; PAM type: NRG; PAM sequence: AAG
atgctcaagtcattacccta

SEQ ID NO: 90671 - DNA, 20 bp, Artificial Sequence
  Description of Artificial Sequence: Synthetic oligonucleotide
  Target: LAMA2; (-) strand; PAM type: NRG; PAM sequence: AAG
cttgggctgtgctgatgctc

SEQ ID NO: 90672 - DNA, 20 bp, Artificial Sequence
  Description of Artificial Sequence: Synthetic oligonucleotide
  Target: LAMA2; (-) strand; PAM type: NRG; PAM sequence: GGG
gtgcaggtacacctcatctt

SEQ ID NO: 90673 - DNA, 20 bp, Artificial Sequence
  Description of Artificial Sequence: Synthetic oligonucleotide
  Target: LAMA2; (-) strand; PAM type: NRG; PAM sequence: TGG
ggtgcaggtacacctcatct

SEQ ID NO: 90674 - DNA, 20 bp, Artificial Sequence
  Description of Artificial Sequence: Synthetic oligonucleotide
  Target: LAMA2; (-) strand; PAM type: NRG; PAM sequence: AGG
tatgttcttcagatgggtgc

SEQ ID NO: 90675 - DNA, 20 bp, Artificial Sequence
  Description of Artificial Sequence: Synthetic oligonucleotide
  Target: LAMA2; (-) strand; PAM type: NRG; PAM sequence: CAG
gtatgttcttcagatgggtg

SEQ ID NO: 90676 - DNA, 20 bp, Artificial Sequence
  Description of Artificial Sequence: Synthetic oligonucleotide
  Target: LAMA2; (-) strand; PAM type: NRG; PAM sequence: GGG
cattagtatgttcttcagat

SEQ ID NO: 90677 - DNA, 20 bp, Artificial Sequence
  Description of Artificial Sequence: Synthetic oligonucleotide
  Target: LAMA2; (-) strand; PAM type: NRG; PAM sequence: TGG
acattagtatgttcttcaga

SEQ ID NO: 90678 - DNA, 20 bp, Artificial Sequence
  Description of Artificial Sequence: Synthetic oligonucleotide
  Target: LAMA2; (-) strand; PAM type: NRG; PAM sequence: CAG
caatacattagtatgttctt

SEQ ID NO: 90679 - DNA, 20 bp, Artificial Sequence
  Description of Artificial Sequence: Synthetic oligonucleotide
  Target: LAMA2; (-) strand; PAM type: NRG; PAM sequence: TAG
ttctttaagtaacaatacat

SEQ ID NO: 90680 - DNA, 20 bp, Artificial Sequence
  Description of Artificial Sequence: Synthetic oligonucleotide
  Target: LAMA2; (-) strand; PAM type: NRG; PAM sequence: AAG
atggtaaatgattcttcttt

SEQ ID NO: 90681 - DNA, 20 bp, Artificial Sequence
  Description of Artificial Sequence: Synthetic oligonucleotide
  Target: LAMA2; (-) strand; PAM type: NRG; PAM sequence: TGG
tggaaaatgtgtgccatgta

SEQ ID NO: 90682 - DNA, 20 bp, Artificial Sequence
  Description of Artificial Sequence: Synthetic oligonucleotide
  Target: LAMA2; (-) strand; PAM type: NRG; PAM sequence: TGG
ataaattcctttctacggac

SEQ ID NO: 90683 - DNA, 20 bp, Artificial Sequence
  Description of Artificial Sequence: Synthetic oligonucleotide
  Target: LAMA2; (-) strand; PAM type: NRG; PAM sequence: CGG
ctgtcataaattcctttcta

SEQ ID NO: 90684 - DNA, 20 bp, Artificial Sequence
  Description of Artificial Sequence: Synthetic oligonucleotide
  Target: LAMA2; (-) strand; PAM type: NRG; PAM sequence: AAG
aggactctcttcaaattcgc

SEQ ID NO: 90685 - DNA, 20 bp, Artificial Sequence
  Description of Artificial Sequence: Synthetic oligonucleotide
  Target: LAMA2; (-) strand; PAM type: NRG; PAM sequence: AGG
agctgtatgtgatttgtagg

SEQ ID NO: 90686 - DNA, 20 bp, Artificial Sequence
  Description of Artificial Sequence: Synthetic oligonucleotide
  Target: LAMA2; (-) strand; PAM type: NRG; PAM sequence: GAG
aagctgtatgtgatttgtag

SEQ ID NO: 90687 - DNA, 20 bp, Artificial Sequence
  Description of Artificial Sequence: Synthetic oligonucleotide
  Target: LAMA2; (-) strand; PAM type: NRG; PAM sequence: AGG
caaagctgtatgtgatttgt

SEQ ID NO: 90688 - DNA, 20 bp, Artificial Sequence
  Description of Artificial Sequence: Synthetic oligonucleotide
  Target: LAMA2; (-) strand; PAM type: NRG; PAM sequence: TAG
ccaaagctgtatgtgatttg

SEQ ID NO: 90689 - DNA, 20 bp, Artificial Sequence
  Description of Artificial Sequence: Synthetic oligonucleotide
  Target: LAMA2; (-) strand; PAM type: NRG; PAM sequence: AAG
tgaagatggcatccatccca

SEQ ID NO: 90690 - DNA, 20 bp, Artificial Sequence
  Description of Artificial Sequence: Synthetic oligonucleotide
  Target: LAMA2; (-) strand; PAM type: NRG; PAM sequence: TGG
ttcttgattttacctgaaga

SEQ ID NO: 90691 - DNA, 20 bp, Artificial Sequence
  Description of Artificial Sequence: Synthetic oligonucleotide
  Target: LAMA2; (-) strand; PAM type: NRG; PAM sequence: AAG
gcagttcttgattttacctg

SEQ ID NO: 90692 - DNA, 20 bp, Artificial Sequence
  Description of Artificial Sequence: Synthetic oligonucleotide
  Target: LAMA2; (-) strand; PAM type: NRG; PAM sequence: CAG
atgtgtgaacgttggagctg

SEQ ID NO: 90693 - DNA, 20 bp, Artificial Sequence
  Description of Artificial Sequence: Synthetic oligonucleotide
  Target: LAMA2; (-) strand; PAM type: NRG; PAM sequence: GAG
aagtaaatgtgtgaacgttg

SEQ ID NO: 90694 - DNA, 20 bp, Artificial Sequence
  Description of Artificial Sequence: Synthetic oligonucleotide
  Target: LAMA2; (-) strand; PAM type: NRG; PAM sequence: TGG
caaagtaaatgtgtgaacgt

SEQ ID NO: 90695 - DNA, 20 bp, Artificial Sequence
  Description of Artificial Sequence: Synthetic oligonucleotide
  Target: LAMA2; (-) strand; PAM type: NRG; PAM sequence: AAG
gctcctgcaccttggcccca

SEQ ID NO: 90696 - DNA, 20 bp, Artificial Sequence
  Description of Artificial Sequence: Synthetic oligonucleotide
  Target: LAMA2; (-) strand; PAM type: NRG; PAM sequence: TGG
ctggggcggctcctgcacct

SEQ ID NO: 90697 - DNA, 20 bp, Artificial Sequence
  Description of Artificial Sequence: Synthetic oligonucleotide
  Target: LAMA2; (-) strand; PAM type: NRG; PAM sequence: CGG
taaaaaattcactcctgggg

SEQ ID NO: 90698 - DNA, 20 bp, Artificial Sequence
  Description of Artificial Sequence: Synthetic oligonucleotide
  Target: LAMA2; (-) strand; PAM type: NRG; PAM sequence: GGG
ccttaaaaaattcactcctg

SEQ ID NO: 90699 - DNA, 20 bp, Artificial Sequence
  Description of Artificial Sequence: Synthetic oligonucleotide
  Target: LAMA2; (-) strand; PAM type: NRG; PAM sequence: GGG
gccttaaaaaattcactcct

SEQ ID NO: 90700 - DNA, 20 bp, Artificial Sequence
  Description of Artificial Sequence: Synthetic oligonucleotide
  Target: LAMA2; (-) strand; PAM type: NRG; PAM sequence: TGG
tgccttaaaaaattcactcc

SEQ ID NO: 90701 - DNA, 20 bp, Artificial Sequence
  Description of Artificial Sequence: Synthetic oligonucleotide
  Target: LAMA2; (-) strand; PAM type: NRG; PAM sequence: AGG
ctttgaagacagcaaatcct

SEQ ID NO: 90702 - DNA, 20 bp, Artificial Sequence
  Description of Artificial Sequence: Synthetic oligonucleotide
  Target: LAMA2; (-) strand; PAM type: NRG; PAM sequence: TAG
tctttgaagacagcaaatcc

SEQ ID NO: 90703 - DNA, 20 bp, Artificial Sequence
  Description of Artificial Sequence: Synthetic oligonucleotide
  Target: LAMA2; (-) strand; PAM type: NRG; PAM sequence: CAG
tcttatctgctctttgaaga

SEQ ID NO: 90704 - DNA, 20 bp, Artificial Sequence
  Description of Artificial Sequence: Synthetic oligonucleotide
  Target: LAMA2; (-) strand; PAM type: NRG; PAM sequence: AAG
ccgttcttatctgctctttg

SEQ ID NO: 90705 - DNA, 20 bp, Artificial Sequence
  Description of Artificial Sequence: Synthetic oligonucleotide
  Target: LAMA2; (-) strand; PAM type: NRG; PAM sequence: GGG
aaaaatctttcagaaaacta

SEQ ID NO: 90706 - DNA, 20 bp, Artificial Sequence
  Description of Artificial Sequence: Synthetic oligonucleotide
  Target: LAMA2; (-) strand; PAM type: NRG; PAM sequence: AGG
gaaaaatctttcagaaaact

SEQ ID NO: 90707 - DNA, 20 bp, Artificial Sequence
  Description of Artificial Sequence: Synthetic oligonucleotide
  Target: LAMA2; (-) strand; PAM type: NRG; PAM sequence: TAG
agaaaaatctttcagaaaac

SEQ ID NO: 90708 - DNA, 20 bp, Artificial Sequence
  Description of Artificial Sequence: Synthetic oligonucleotide
  Target: LAMA2; (-) strand; PAM type: NRG; PAM sequence: CAG
ggtttaagagaaaaatcttt

SEQ ID NO: 90709 - DNA, 20 bp, Artificial Sequence
  Description of Artificial Sequence: Synthetic oligonucleotide
  Target: LAMA2; (-) strand; PAM type: NRG; PAM sequence: GAG
ttaaaactgtaaaggtttaa

SEQ ID NO: 90710 - DNA, 20 bp, Artificial Sequence
  Description of Artificial Sequence: Synthetic oligonucleotide
  Target: LAMA2; (-) strand; PAM type: NRG; PAM sequence: AAG
atttaaaactgtaaaggttt

SEQ ID NO: 90711 - DNA, 20 bp, Artificial Sequence
  Description of Artificial Sequence: Synthetic oligonucleotide
  Target: LAMA2; (-) strand; PAM type: NRG; PAM sequence: AGG
ctgcatatttaaaactgtaa

SEQ ID NO: 90712 - DNA, 20 bp, Artificial Sequence
  Description of Artificial Sequence: Synthetic oligonucleotide
  Target: LAMA2; (-) strand; PAM type: NRG; PAM sequence: AAG
tctgcatatttaaaactgta

SEQ ID NO: 90713 - DNA, 20 bp, Artificial Sequence
  Description of Artificial Sequence: Synthetic oligonucleotide
  Target: LAMA2; (-) strand; PAM type: NRG; PAM sequence: GAG
catcaataataataaaaacc

SEQ ID NO: 90714 - DNA, 20 bp, Artificial Sequence
  Description of Artificial Sequence: Synthetic oligonucleotide
  Target: LAMA2; (-) strand; PAM type: NRG; PAM sequence: AAG
acatgttctgacaattgtga

SEQ ID NO: 90715 - DNA, 20 bp, Artificial Sequence
  Description of Artificial Sequence: Synthetic oligonucleotide
  Target: LAMA2; (-) strand; PAM type: NRG; PAM sequence: AGG
aatataacatttctcaatat

SEQ ID NO: 90716 - DNA, 20 bp, Artificial Sequence
  Description of Artificial Sequence: Synthetic oligonucleotide
  Target: LAMA2; (-) strand; PAM type: NRG; PAM sequence: TAG
caatataacatttctcaata

SEQ ID NO: 90717 - DNA, 20 bp, Artificial Sequence
  Description of Artificial Sequence: Synthetic oligonucleotide
  Target: LAMA2; (-) strand; PAM type: NRG; PAM sequence: GAG
cgctatgagccatcataaag

SEQ ID NO: 90718 - DNA, 20 bp, Artificial Sequence
  Description of Artificial Sequence: Synthetic oligonucleotide
  Target: LAMA2; (-) strand; PAM type: NRG; PAM sequence: AGG
cacgctatgagccatcataa

SEQ ID NO: 90719 - DNA, 20 bp, Artificial Sequence
  Description of Artificial Sequence: Synthetic oligonucleotide
  Target: LAMA2; (-) strand; PAM type: NRG; PAM sequence: AAG
ccacgctatgagccatcata

SEQ ID NO: 90720 - DNA, 20 bp, Artificial Sequence
  Description of Artificial Sequence: Synthetic oligonucleotide
  Target: LAMA2; (-) strand; PAM type: NRG; PAM sequence: GAG
tttttagcttcccacgctat

SEQ ID NO: 90721 - DNA, 20 bp, Artificial Sequence
  Description of Artificial Sequence: Synthetic oligonucleotide
  Target: LAMA2; (-) strand; PAM type: NRG; PAM sequence: TAG
ccctggaatttatatctttt

SEQ ID NO: 90722 - DNA, 20 bp, Artificial Sequence
  Description of Artificial Sequence: Synthetic oligonucleotide
  Target: LAMA2; (-) strand; PAM type: NRG; PAM sequence: TGG
ctttccaaataggggtgccc

SEQ ID NO: 90723 - DNA, 20 bp, Artificial Sequence
  Description of Artificial Sequence: Synthetic oligonucleotide
  Target: LAMA2; (-) strand; PAM type: NRG; PAM sequence: GGG
aaaaaccactttccaaatag

SEQ ID NO: 90724 - DNA, 20 bp, Artificial Sequence
  Description of Artificial Sequence: Synthetic oligonucleotide
  Target: LAMA2; (-) strand; PAM type: NRG; PAM sequence: GGG
taaaaaccactttccaaata

SEQ ID NO: 90725 - DNA, 20 bp, Artificial Sequence
  Description of Artificial Sequence: Synthetic oligonucleotide
  Target: LAMA2; (-) strand; PAM type: NRG; PAM sequence: AGG
ttaaaaaccactttccaaat

SEQ ID NO: 90726 - DNA, 20 bp, Artificial Sequence
  Description of Artificial Sequence: Synthetic oligonucleotide
  Target: LAMA2; (-) strand; PAM type: NRG; PAM sequence: TAG
tttaaaaaccactttccaaa

SEQ ID NO: 90727 - DNA, 20 bp, Artificial Sequence
  Description of Artificial Sequence: Synthetic oligonucleotide
  Target: LAMA2; (-) strand; PAM type: NRG; PAM sequence: AGG
actagttaacaactactgga

SEQ ID NO: 90728 - DNA, 20 bp, Artificial Sequence
  Description of Artificial Sequence: Synthetic oligonucleotide
  Target: LAMA2; (-) strand; PAM type: NRG; PAM sequence: AAG
aactagttaacaactactgg

SEQ ID NO: 90729 - DNA, 20 bp, Artificial Sequence
  Description of Artificial Sequence: Synthetic oligonucleotide
  Target: LAMA2; (-) strand; PAM type: NRG; PAM sequence: TGG
agaaactagttaacaactac

SEQ ID NO: 90730 - DNA, 20 bp, Artificial Sequence
  Description of Artificial Sequence: Synthetic oligonucleotide
  Target: LAMA2; (-) strand; PAM type: NRG; PAM sequence: TAG
tatactattaagccagaaac

SEQ ID NO: 90731 - DNA, 20 bp, Artificial Sequence
  Description of Artificial Sequence: Synthetic oligonucleotide
  Target: LAMA2; (-) strand; PAM type: NRG; PAM sequence: CAG
caatctatatactattaagc

SEQ ID NO: 90732 - DNA, 20 bp, Artificial Sequence
  Description of Artificial Sequence: Synthetic oligonucleotide
  Target: LAMA2; (-) strand; PAM type: NRG; PAM sequence: AAG
attacaatctatatactatt

SEQ ID NO: 90733 - DNA, 20 bp, Artificial Sequence
  Description of Artificial Sequence: Synthetic oligonucleotide
  Target: LAMA2; (-) strand; PAM type: NRG; PAM sequence: AAG
tgggtggtcacttaaatgaa

SEQ ID NO: 90734 - DNA, 20 bp, Artificial Sequence
  Description of Artificial Sequence: Synthetic oligonucleotide
  Target: LAMA2; (-) strand; PAM type: NRG; PAM sequence: TGG
gtgttttatagtgagatggg

SEQ ID NO: 90735 - DNA, 20 bp, Artificial Sequence
  Description of Artificial Sequence: Synthetic oligonucleotide
  Target: LAMA2; (-) strand; PAM type: NRG; PAM sequence: GGG
aaagtgttttatagtgagat

SEQ ID NO: 90736 - DNA, 20 bp, Artificial Sequence
  Description of Artificial Sequence: Synthetic oligonucleotide
  Target: LAMA2; (-) strand; PAM type: NRG; PAM sequence: TGG
taaagtgttttatagtgaga

SEQ ID NO: 90737 - DNA, 20 bp, Artificial Sequence
  Description of Artificial Sequence: Synthetic oligonucleotide
  Target: LAMA2; (-) strand; PAM type: NRG; PAM sequence: GAG
gtcttaaagtgttttatagt

SEQ ID NO: 90738 - DNA, 20 bp, Artificial Sequence
  Description of Artificial Sequence: Synthetic oligonucleotide
  Target: LAMA2; (-) strand; PAM type: NRG; PAM sequence: TAG
tatagtcttaaagtgtttta

SEQ ID NO: 90739 - DNA, 20 bp, Artificial Sequence
  Description of Artificial Sequence: Synthetic oligonucleotide
  Target: LAMA2; (-) strand; PAM type: NRG; PAM sequence: AAG
atatggctgttatagtctta

SEQ ID NO: 90740 - DNA, 20 bp, Artificial Sequence
  Description of Artificial Sequence: Synthetic oligonucleotide
  Target: LAMA2; (-) strand; PAM type: NRG; PAM sequence: TAG
tttataccatatggctgtta

SEQ ID NO: 90741 - DNA, 20 bp, Artificial Sequence
  Description of Artificial Sequence: Synthetic oligonucleotide
  Target: LAMA2; (-) strand; PAM type: NRG; PAM sequence: TGG
attctttcctttataccata

SEQ ID NO: 90742 - DNA, 20 bp, Artificial Sequence
  Description of Artificial Sequence: Synthetic oligonucleotide
  Target: LAMA2; (-) strand; PAM type: NRG; PAM sequence: AAG
ttctattcagtttggctcca

SEQ ID NO: 90743 - DNA, 20 bp, Artificial Sequence
  Description of Artificial Sequence: Synthetic oligonucleotide
  Target: LAMA2; (-) strand; PAM type: NRG; PAM sequence: TGG
tattgaatttctattcagtt

SEQ ID NO: 90744 - DNA, 20 bp, Artificial Sequence
  Description of Artificial Sequence: Synthetic oligonucleotide
  Target: LAMA2; (-) strand; PAM type: NRG; PAM sequence: CAG
aagcttattgaatttctatt

SEQ ID NO: 90745 - DNA, 20 bp, Artificial Sequence
  Description of Artificial Sequence: Synthetic oligonucleotide
  Target: LAMA2; (-) strand; PAM type: NRG; PAM sequence: AAG
cacacataaaataagcaata

SEQ ID NO: 90746 - DNA, 20 bp, Artificial Sequence
  Description of Artificial Sequence: Synthetic oligonucleotide
  Target: LAMA2; (-) strand; PAM type: NRG; PAM sequence: AAG
ccaaaggtcacacataaaat

SEQ ID NO: 90747 - DNA, 20 bp, Artificial Sequence
  Description of Artificial Sequence: Synthetic oligonucleotide
  Target: LAMA2; (-) strand; PAM type: NRG; PAM sequence: AGG
aaggcttaatcacttgccaa

SEQ ID NO: 90748 - DNA, 20 bp, Artificial Sequence
  Description of Artificial Sequence: Synthetic oligonucleotide
  Target: LAMA2; (-) strand; PAM type: NRG; PAM sequence: AAG
caaggcttaatcacttgcca

SEQ ID NO: 90749 - DNA, 20 bp, Artificial Sequence
  Description of Artificial Sequence: Synthetic oligonucleotide
  Target: LAMA2; (-) strand; PAM type: NRG; PAM sequence: AGG
ctgaaaagaaacgttcctca

SEQ ID NO: 90750 - DNA, 20 bp, Artificial Sequence
  Description of Artificial Sequence: Synthetic oligonucleotide
  Target: LAMA2; (-) strand; PAM type: NRG; PAM sequence: AAG
actgaaaagaaacgttcctc

SEQ ID NO: 90751 - DNA, 20 bp, Artificial Sequence
  Description of Artificial Sequence: Synthetic oligonucleotide
  Target: LAMA2; (-) strand; PAM type: NRG; PAM sequence: AAG
tatatccactttacactgaa

SEQ ID NO: 90752 - DNA, 20 bp, Artificial Sequence
  Description of Artificial Sequence: Synthetic oligonucleotide
  Target: LAMA2; (-) strand; PAM type: NRG; PAM sequence: AGG
taacaaagaccctgaaaagt

SEQ ID NO: 90753 - DNA, 20 bp, Artificial Sequence
  Description of Artificial Sequence: Synthetic oligonucleotide
  Target: LAMA2; (-) strand; PAM type: NRG; PAM sequence: TAG
ttaacaaagaccctgaaaag

SEQ ID NO: 90754 - DNA, 20 bp, Artificial Sequence
  Description of Artificial Sequence: Synthetic oligonucleotide
  Target: LAMA2; (-) strand; PAM type: NRG; PAM sequence: AAG
atgttaacaaagaccctgaa

SEQ ID NO: 90755 - DNA, 20 bp, Artificial Sequence
  Description of Artificial Sequence: Synthetic oligonucleotide
  Target: LAMA2; (-) strand; PAM type: NRG; PAM sequence: AAG
gatcacatatcatgttaaca

SEQ ID NO: 90756 - DNA, 20 bp, Artificial Sequence
  Description of Artificial Sequence: Synthetic oligonucleotide
  Target: LAMA2; (-) strand; PAM type: NRG; PAM sequence: GAG
ctgaaagtgttctaggtgat

SEQ ID NO: 90757 - DNA, 20 bp, Artificial Sequence
  Description of Artificial Sequence: Synthetic oligonucleotide
  Target: LAMA2; (-) strand; PAM type: NRG; PAM sequence: AGG
aaaaaaactgaaagtgttct

SEQ ID NO: 90758 - DNA, 20 bp, Artificial Sequence
  Description of Artificial Sequence: Synthetic oligonucleotide
  Target: LAMA2; (-) strand; PAM type: NRG; PAM sequence: TAG
gaaaaaaactgaaagtgttc

SEQ ID NO: 90759 - DNA, 20 bp, Artificial Sequence
  Description of Artificial Sequence: Synthetic oligonucleotide
  Target: LAMA2; (-) strand; PAM type: NRG; PAM sequence: AAG
gagaacaagaaaaaaactga

SEQ ID NO: 90760 - DNA, 20 bp, Artificial Sequence
  Description of Artificial Sequence: Synthetic oligonucleotide
  Target: LAMA2; (-) strand; PAM type: NRG; PAM sequence: AAG
aaaaagggggcggggagaac

SEQ ID NO: 90761 - DNA, 20 bp, Artificial Sequence
  Description of Artificial Sequence: Synthetic oligonucleotide
  Target: LAMA2; (-) strand; PAM type: NRG; PAM sequence: GAG
ttttaaaaaaagggggcggg

SEQ ID NO: 90762 - DNA, 20 bp, Artificial Sequence
  Description of Artificial Sequence: Synthetic oligonucleotide
  Target: LAMA2; (-) strand; PAM type: NRG; PAM sequence: GGG
tcttttaaaaaaagggggcg

SEQ ID NO: 90763 - DNA, 20 bp, Artificial Sequence
  Description of Artificial Sequence: Synthetic oligonucleotide
  Target: LAMA2; (-) strand; PAM type: NRG; PAM sequence: GGG
ctcttttaaaaaaagggggc

SEQ ID NO: 90764 - DNA, 20 bp, Artificial Sequence
  Description of Artificial Sequence: Synthetic oligonucleotide
  Target: LAMA2; (-) strand; PAM type: NRG; PAM sequence: CGG
actcttttaaaaaaaggggg

SEQ ID NO: 90765 - DNA, 20 bp, Artificial Sequence
  Description of Artificial Sequence: Synthetic oligonucleotide
  Target: LAMA2; (-) strand; PAM type: NRG; PAM sequence: GGG
ttcactcttttaaaaaaagg

SEQ ID NO: 90766 - DNA, 20 bp, Artificial Sequence
  Description of Artificial Sequence: Synthetic oligonucleotide
  Target: LAMA2; (-) strand; PAM type: NRG; PAM sequence: GGG
gttcactcttttaaaaaaag

SEQ ID NO: 90767 - DNA, 20 bp, Artificial Sequence
  Description of Artificial Sequence: Synthetic oligonucleotide
  Target: LAMA2; (-) strand; PAM type: NRG; PAM sequence: GGG
agttcactcttttaaaaaaa

SEQ ID NO: 90768 - DNA, 20 bp, Artificial Sequence
  Description of Artificial Sequence: Synthetic oligonucleotide
  Target: LAMA2; (-) strand; PAM type: NRG; PAM sequence: AGG
tagttcactcttttaaaaaa

SEQ ID NO: 90769 - DNA, 20 bp, Artificial Sequence
  Description of Artificial Sequence: Synthetic oligonucleotide
  Target: LAMA2; (-) strand; PAM type: NRG; PAM sequence: AAG
gtagttcactcttttaaaaa

SEQ ID NO: 90770 - DNA, 20 bp, Artificial Sequence
  Description of Artificial Sequence: Synthetic oligonucleotide
  Target: LAMA2; (-) strand; PAM type: NRG; PAM sequence: TAG
catatttggttcaagtcagg

SEQ ID NO: 90771 - DNA, 20 bp, Artificial Sequence
  Description of Artificial Sequence: Synthetic oligonucleotide
  Target: LAMA2; (-) strand; PAM type: NRG; PAM sequence: AGG
gagcatatttggttcaagtc

SEQ ID NO: 90772 - DNA, 20 bp, Artificial Sequence
  Description of Artificial Sequence: Synthetic oligonucleotide
  Target: LAMA2; (-) strand; PAM type: NRG; PAM sequence: CAG
cgagcatatttggttcaagt

SEQ ID NO: 90773 - DNA, 20 bp, Artificial Sequence
  Description of Artificial Sequence: Synthetic oligonucleotide
  Target: LAMA2; (-) strand; PAM type: NRG; PAM sequence: AAG
gacccgagcatatttggttc

SEQ ID NO: 90774 - DNA, 20 bp, Artificial Sequence
  Description of Artificial Sequence: Synthetic oligonucleotide
  Target: LAMA2; (-) strand; PAM type: NRG; PAM sequence: TGG
taatcagacccgagcatatt

SEQ ID NO: 90775 - DNA, 20 bp, Artificial Sequence
  Description of Artificial Sequence: Synthetic oligonucleotide
  Target: LAMA2; (-) strand; PAM type: NRG; PAM sequence: GAG
tacagcagttaatcagaccc

SEQ ID NO: 90776 - DNA, 20 bp, Artificial Sequence
  Description of Artificial Sequence: Synthetic oligonucleotide
  Target: LAMA2; (-) strand; PAM type: NRG; PAM sequence: CAG
gccgccttacagcagttaat

SEQ ID NO: 90777 - DNA, 20 bp, Artificial Sequence
  Description of Artificial Sequence: Synthetic oligonucleotide
  Target: LAMA2; (-) strand; PAM type: NRG; PAM sequence: CAG
aaaacaaagccgccttacag

SEQ ID NO: 90778 - DNA, 20 bp, Artificial Sequence
  Description of Artificial Sequence: Synthetic oligonucleotide
  Target: LAMA2; (-) strand; PAM type: NRG; PAM sequence: CAG
aaaaaaacaaagccgcctta

SEQ ID NO: 90779 - DNA, 20 bp, Artificial Sequence
  Description of Artificial Sequence: Synthetic oligonucleotide
  Target: LAMA2; (-) strand; PAM type: NRG; PAM sequence: AAG
ttttaaaaataaaaaaaaca

SEQ ID NO: 90780 - DNA, 20 bp, Artificial Sequence
  Description of Artificial Sequence: Synthetic oligonucleotide
  Target: LAMA2; (-) strand; PAM type: NRG; PAM sequence: CAG
agttgaagttaaaattctgt

SEQ ID NO: 90781 - DNA, 20 bp, Artificial Sequence
  Description of Artificial Sequence: Synthetic oligonucleotide
  Target: LAMA2; (-) strand; PAM type: NRG; PAM sequence: AAG
agctcattcagacacagttg

SEQ ID NO: 90782 - DNA, 20 bp, Artificial Sequence
  Description of Artificial Sequence: Synthetic oligonucleotide
  Target: LAMA2; (-) strand; PAM type: NRG; PAM sequence: CAG
gtaaagagctcattcagaca

SEQ ID NO: 90783 - DNA, 20 bp, Artificial Sequence
  Description of Artificial Sequence: Synthetic oligonucleotide
  Target: LAMA2; (-) strand; PAM type: NRG; PAM sequence: CAG
agaagcgtaaagagctcatt

SEQ ID NO: 90784 - DNA, 20 bp, Artificial Sequence
  Description of Artificial Sequence: Synthetic oligonucleotide
  Target: LAMA2; (-) strand; PAM type: NRG; PAM sequence: GAG
tagaaaacgagaagcgtaaa

SEQ ID NO: 90785 - DNA, 20 bp, Artificial Sequence
  Description of Artificial Sequence: Synthetic oligonucleotide
  Target: LAMA2; (-) strand; PAM type: NRG; PAM sequence: AAG
agtagaaaacgagaagcgta

SEQ ID NO: 90786 - DNA, 20 bp, Artificial Sequence
  Description of Artificial Sequence: Synthetic oligonucleotide
  Target: LAMA2; (-) strand; PAM type: NRG; PAM sequence: AAG
ttattagagtagaaaacgag

SEQ ID NO: 90787 - DNA, 20 bp, Artificial Sequence
  Description of Artificial Sequence: Synthetic oligonucleotide
  Target: LAMA2; (-) strand; PAM type: NRG; PAM sequence: GAG
ttattattagagtagaaaac

SEQ ID NO: 90788 - DNA, 20 bp, Artificial Sequence
  Description of Artificial Sequence: Synthetic oligonucleotide
  Target: LAMA2; (-) strand; PAM type: NRG; PAM sequence: TAG
tgtgttatttattattagag

SEQ ID NO: 90789 - DNA, 20 bp, Artificial Sequence
  Description of Artificial Sequence: Synthetic oligonucleotide
  Target: LAMA2; (-) strand; PAM type: NRG; PAM sequence: GAG
ccttgtgttatttattatta

SEQ ID NO: 90790 - DNA, 20 bp, Artificial Sequence
  Description of Artificial Sequence: Synthetic oligonucleotide
  Target: LAMA2; (-) strand; PAM type: NRG; PAM sequence: TAG
caccttgtgttatttattat

SEQ ID NO: 90791 - DNA, 20 bp, Artificial Sequence
  Description of Artificial Sequence: Synthetic oligonucleotide
  Target: LAMA2; (-) strand; PAM type: NRG; PAM sequence: AAG
acttaacctgatttagaagg

SEQ ID NO: 90792 - DNA, 20 bp, Artificial Sequence
  Description of Artificial Sequence: Synthetic oligonucleotide
  Target: LAMA2; (-) strand; PAM type: NRG; PAM sequence: AGG
ctaacttaacctgatttaga

SEQ ID NO: 90793 - DNA, 20 bp, Artificial Sequence
  Description of Artificial Sequence: Synthetic oligonucleotide
  Target: LAMA2; (-) strand; PAM type: NRG; PAM sequence: AAG
tctaacttaacctgatttag

SEQ ID NO: 90794 - DNA, 20 bp, Artificial Sequence
  Description of Artificial Sequence: Synthetic oligonucleotide
  Target: LAMA2; (-) strand; PAM type: NRG; PAM sequence: TAG
atgtctaacttaacctgatt

SEQ ID NO: 90795 - DNA, 20 bp, Artificial Sequence
  Description of Artificial Sequence: Synthetic oligonucleotide
  Target: LAMA2; (-) strand; PAM type: NRG; PAM sequence: GGG
tataccgggttgtcaggctg

SEQ ID NO: 90796 - DNA, 20 bp, Artificial Sequence
  Description of Artificial Sequence: Synthetic oligonucleotide
  Target: LAMA2; (-) strand; PAM type: NRG; PAM sequence: GGG
gtataccgggttgtcaggct

SEQ ID NO: 90797 - DNA, 20 bp, Artificial Sequence
  Description of Artificial Sequence: Synthetic oligonucleotide
  Target: LAMA2; (-) strand; PAM type: NRG; PAM sequence: TGG
ggtataccgggttgtcaggc

SEQ ID NO: 90798 - DNA, 20 bp, Artificial Sequence
  Description of Artificial Sequence: Synthetic oligonucleotide
  Target: LAMA2; (-) strand; PAM type: NRG; PAM sequence: AGG
taaaggtataccgggttgtc

SEQ ID NO: 90799 - DNA, 20 bp, Artificial Sequence
  Description of Artificial Sequence: Synthetic oligonucleotide
  Target: LAMA2; (-) strand; PAM type: NRG; PAM sequence: CAG
ttaaaggtataccgggttgt

SEQ ID NO: 90800 - DNA, 20 bp, Artificial Sequence
  Description of Artificial Sequence: Synthetic oligonucleotide
  Target: LAMA2; (-) strand; PAM type: NRG; PAM sequence: GGG
gctttcattaaaggtatacc

SEQ ID NO: 90801 - DNA, 20 bp, Artificial Sequence
  Description of Artificial Sequence: Synthetic oligonucleotide
  Target: LAMA2; (-) strand; PAM type: NRG; PAM sequence: CGG
tgctttcattaaaggtatac

SEQ ID NO: 90802 - DNA, 20 bp, Artificial Sequence
  Description of Artificial Sequence: Synthetic oligonucleotide
  Target: LAMA2; (-) strand; PAM type: NRG; PAM sequence: AGG
ggagacattgctttcattaa

SEQ ID NO: 90803 - DNA, 20 bp, Artificial Sequence
  Description of Artificial Sequence: Synthetic oligonucleotide
  Target: LAMA2; (-) strand; PAM type: NRG; PAM sequence: AAG
tggagacattgctttcatta

SEQ ID NO: 90804 - DNA, 20 bp, Artificial Sequence
  Description of Artificial Sequence: Synthetic oligonucleotide
  Target: LAMA2; (-) strand; PAM type: NRG; PAM sequence: GAG
caataaaaactccaatattg

SEQ ID NO: 90805 - DNA, 20 bp, Artificial Sequence
  Description of Artificial Sequence: Synthetic oligonucleotide
  Target: LAMA2; (-) strand; PAM type: NRG; PAM sequence: TGG
agcaataaaaactccaatat

SEQ ID NO: 90806 - DNA, 20 bp, Artificial Sequence
  Description of Artificial Sequence: Synthetic oligonucleotide
  Target: LAMA2; (-) strand; PAM type: NRG; PAM sequence: CAG
gaggtgagaggtggtggtgt

SEQ ID NO: 90807 - DNA, 20 bp, Artificial Sequence
  Description of Artificial Sequence: Synthetic oligonucleotide
  Target: LAMA2; (-) strand; PAM type: NRG; PAM sequence: TGG
gacagggaggtgagaggtgg

SEQ ID NO: 90808 - DNA, 20 bp, Artificial Sequence
  Description of Artificial Sequence: Synthetic oligonucleotide
  Target: LAMA2; (-) strand; PAM type: NRG; PAM sequence: TGG
agggacagggaggtgagagg

SEQ ID NO: 90809 - DNA, 20 bp, Artificial Sequence
  Description of Artificial Sequence: Synthetic oligonucleotide
  Target: LAMA2; (-) strand; PAM type: NRG; PAM sequence: AGG
atgagggacagggaggtgag

SEQ ID NO: 90810 - DNA, 20 bp, Artificial Sequence
  Description of Artificial Sequence: Synthetic oligonucleotide
  Target: LAMA2; (-) strand; PAM type: NRG; PAM sequence: GAG
gatgagggacagggaggtga

SEQ ID NO: 90811 - DNA, 20 bp, Artificial Sequence
  Description of Artificial Sequence: Synthetic oligonucleotide
  Target: LAMA2; (-) strand; PAM type: NRG; PAM sequence: GAG
atgatgagggacagggaggt

SEQ ID NO: 90812 - DNA, 20 bp, Artificial Sequence
  Description of Artificial Sequence: Synthetic oligonucleotide
  Target: LAMA2; (-) strand; PAM type: NRG; PAM sequence: AGG
ggaaatgatgagggacaggg

SEQ ID NO: 90813 - DNA, 20 bp, Artificial Sequence
  Description of Artificial Sequence: Synthetic oligonucleotide
  Target: LAMA2; (-) strand; PAM type: NRG; PAM sequence: GAG
gggaaatgatgagggacagg

SEQ ID NO: 90814 - DNA, 20 bp, Artificial Sequence
  Description of Artificial Sequence: Synthetic oligonucleotide
  Target: LAMA2; (-) strand; PAM type: NRG; PAM sequence: GGG
cagggaaatgatgagggaca

SEQ ID NO: 90815 - DNA, 20 bp, Artificial Sequence
  Description of Artificial Sequence: Synthetic oligonucleotide
  Target: LAMA2; (-) strand; PAM type: NRG; PAM sequence: AGG
acagggaaatgatgagggac

SEQ ID NO: 90816 - DNA, 20 bp, Artificial Sequence
  Description of Artificial Sequence: Synthetic oligonucleotide
  Target: LAMA2; (-) strand; PAM type: NRG; PAM sequence: CAG
cacagggaaatgatgaggga

SEQ ID NO: 90817 - DNA, 20 bp, Artificial Sequence
  Description of Artificial Sequence: Synthetic oligonucleotide
  Target: LAMA2; (-) strand; PAM type: NRG; PAM sequence: GGG
gcagcacagggaaatgatga

SEQ ID NO: 90818 - DNA, 20 bp, Artificial Sequence
  Description of Artificial Sequence: Synthetic oligonucleotide
  Target: LAMA2; (-) strand; PAM type: NRG; PAM sequence: AGG
ggcagcacagggaaatgatg

SEQ ID NO: 90819 - DNA, 20 bp, Artificial Sequence
  Description of Artificial Sequence: Synthetic oligonucleotide
  Target: LAMA2; (-) strand; PAM type: NRG; PAM sequence: GAG
aggcagcacagggaaatgat

SEQ ID NO: 90820 - DNA, 20 bp, Artificial Sequence
  Description of Artificial Sequence: Synthetic oligonucleotide
  Target: LAMA2; (-) strand; PAM type: NRG; PAM sequence: GGG
aaggcaaactaggcagcaca

SEQ ID NO: 90821 - DNA, 20 bp, Artificial Sequence
  Description of Artificial Sequence: Synthetic oligonucleotide
  Target: LAMA2; (-) strand; PAM type: NRG; PAM sequence: AGG
aaaggcaaactaggcagcac

SEQ ID NO: 90822 - DNA, 20 bp, Artificial Sequence
  Description of Artificial Sequence: Synthetic oligonucleotide
  Target: LAMA2; (-) strand; PAM type: NRG; PAM sequence: CAG
gaaaggcaaactaggcagca

SEQ ID NO: 90823 - DNA, 20 bp, Artificial Sequence
  Description of Artificial Sequence: Synthetic oligonucleotide
  Target: LAMA2; (-) strand; PAM type: NRG; PAM sequence: CAG
ccagtgaaaggcaaactagg

SEQ ID NO: 90824 - DNA, 20 bp, Artificial Sequence
  Description of Artificial Sequence: Synthetic oligonucleotide
  Target: LAMA2; (-) strand; PAM type: NRG; PAM sequence: AGG
ttaccagtgaaaggcaaact

SEQ ID NO: 90825 - DNA, 20 bp, Artificial Sequence
  Description of Artificial Sequence: Synthetic oligonucleotide
  Target: LAMA2; (-) strand; PAM type: NRG; PAM sequence: TAG
attaccagtgaaaggcaaac

SEQ ID NO: 90826 - DNA, 20 bp, Artificial Sequence
  Description of Artificial Sequence: Synthetic oligonucleotide
  Target: LAMA2; (-) strand; PAM type: NRG; PAM sequence: AGG
gttgaaatattaccagtgaa

SEQ ID NO: 90827 - DNA, 20 bp, Artificial Sequence
  Description of Artificial Sequence: Synthetic oligonucleotide
  Target: LAMA2; (-) strand; PAM type: NRG; PAM sequence: AAG
agttgaaatattaccagtga

SEQ ID NO: 90828 - DNA, 20 bp, Artificial Sequence
  Description of Artificial Sequence: Synthetic oligonucleotide
  Target: LAMA2; (-) strand; PAM type: NRG; PAM sequence: CAG
agactaagttgaaatattac

SEQ ID NO: 90829 - DNA, 20 bp, Artificial Sequence
  Description of Artificial Sequence: Synthetic oligonucleotide
  Target: LAMA2; (-) strand; PAM type: NRG; PAM sequence: AAG
atggtaatgatgattagact

SEQ ID NO: 90830 - DNA, 20 bp, Artificial Sequence
  Description of Artificial Sequence: Synthetic oligonucleotide
  Target: LAMA2; (-) strand; PAM type: NRG; PAM sequence: TAG
tgggaaatggtaatgatgat

SEQ ID NO: 90831 - DNA, 20 bp, Artificial Sequence
  Description of Artificial Sequence: Synthetic oligonucleotide
  Target: LAMA2; (-) strand; PAM type: NRG; PAM sequence: TGG
cagttctctcctttgggaaa

SEQ ID NO: 90832 - DNA, 20 bp, Artificial Sequence
  Description of Artificial Sequence: Synthetic oligonucleotide
  Target: LAMA2; (-) strand; PAM type: NRG; PAM sequence: GGG
attctgcagttctctccttt

SEQ ID NO: 90833 - DNA, 20 bp, Artificial Sequence
  Description of Artificial Sequence: Synthetic oligonucleotide
  Target: LAMA2; (-) strand; PAM type: NRG; PAM sequence: TGG
gattctgcagttctctcctt

SEQ ID NO: 90834 - DNA, 20 bp, Artificial Sequence
  Description of Artificial Sequence: Synthetic oligonucleotide
  Target: LAMA2; (-) strand; PAM type: NRG; PAM sequence: CAG
tggttctgtttatgattctg

SEQ ID NO: 90835 - DNA, 20 bp, Artificial Sequence
  Description of Artificial Sequence: Synthetic oligonucleotide
  Target: LAMA2; (-) strand; PAM type: NRG; PAM sequence: TGG
agaggtacattgtttggcaa

SEQ ID NO: 90836 - DNA, 20 bp, Artificial Sequence
  Description of Artificial Sequence: Synthetic oligonucleotide
  Target: LAMA2; (-) strand; PAM type: NRG; PAM sequence: TGG
tgcaaaagaggtacattgtt

SEQ ID NO: 90837 - DNA, 20 bp, Artificial Sequence
  Description of Artificial Sequence: Synthetic oligonucleotide
  Target: LAMA2; (-) strand; PAM type: NRG; PAM sequence: AGG
aagaattgcctatgcaaaag

SEQ ID NO: 90838 - DNA, 20 bp, Artificial Sequence
  Description of Artificial Sequence: Synthetic oligonucleotide
  Target: LAMA2; (-) strand; PAM type: NRG; PAM sequence: GAG
gaagaattgcctatgcaaaa

SEQ ID NO: 90839 - DNA, 20 bp, Artificial Sequence
  Description of Artificial Sequence: Synthetic oligonucleotide
  Target: LAMA2; (-) strand; PAM type: NRG; PAM sequence: AAG
tagaagaattgcctatgcaa

SEQ ID NO: 90840 - DNA, 20 bp, Artificial Sequence
  Description of Artificial Sequence: Synthetic oligonucleotide
  Target: LAMA2; (-) strand; PAM type: NRG; PAM sequence: AAG
cattttaacccagcttctag

SEQ ID NO: 90841 - DNA, 20 bp, Artificial Sequence
  Description of Artificial Sequence: Synthetic oligonucleotide
  Target: LAMA2; (-) strand; PAM type: NRG; PAM sequence: TAG
tggcattttaacccagcttc

SEQ ID NO: 90842 - DNA, 20 bp, Artificial Sequence
  Description of Artificial Sequence: Synthetic oligonucleotide
  Target: LAMA2; (-) strand; PAM type: NRG; PAM sequence: CAG
atctccatggcattttaacc

SEQ ID NO: 90843 - DNA, 20 bp, Artificial Sequence
  Description of Artificial Sequence: Synthetic oligonucleotide
  Target: LAMA2; (-) strand; PAM type: NRG; PAM sequence: TGG
agtgctgcttctcatctcca

SEQ ID NO: 90844 - DNA, 20 bp, Artificial Sequence
  Description of Artificial Sequence: Synthetic oligonucleotide
  Target: LAMA2; (-) strand; PAM type: NRG; PAM sequence: AAG
gaaaaacataattaattcct

SEQ ID NO: 90845 - DNA, 20 bp, Artificial Sequence
  Description of Artificial Sequence: Synthetic oligonucleotide
  Target: LAMA2; (-) strand; PAM type: NRG; PAM sequence: AGG
tcattcattttgaaagctgg

SEQ ID NO: 90846 - DNA, 20 bp, Artificial Sequence
  Description of Artificial Sequence: Synthetic oligonucleotide
  Target: LAMA2; (-) strand; PAM type: NRG; PAM sequence: GAG
gtcattcattttgaaagctg

SEQ ID NO: 90847 - DNA, 20 bp, Artificial Sequence
  Description of Artificial Sequence: Synthetic oligonucleotide
  Target: LAMA2; (-) strand; PAM type: NRG; PAM sequence: TGG
ttgtcattcattttgaaagc

SEQ ID NO: 90848 - DNA, 20 bp, Artificial Sequence
  Description of Artificial Sequence: Synthetic oligonucleotide
  Target: LAMA2; (-) strand; PAM type: NRG; PAM sequence: AAG
ttggttgtcattcattttga

SEQ ID NO: 90849 - DNA, 20 bp, Artificial Sequence
  Description of Artificial Sequence: Synthetic oligonucleotide
  Target: LAMA2; (-) strand; PAM type: NRG; PAM sequence: TGG
agacactttttttgtcaatt

SEQ ID NO: 90850 - DNA, 20 bp, Artificial Sequence
  Description of Artificial Sequence: Synthetic oligonucleotide
  Target: LAMA2; (-) strand; PAM type: NRG; PAM sequence: CAG
acaaaaatatataagccccc

SEQ ID NO: 90851 - DNA, 20 bp, Artificial Sequence
  Description of Artificial Sequence: Synthetic oligonucleotide
  Target: LAMA2; (-) strand; PAM type: NRG; PAM sequence: AAG
caatgctgacaaaaatatat

SEQ ID NO: 90852 - DNA, 20 bp, Artificial Sequence
  Description of Artificial Sequence: Synthetic oligonucleotide
  Target: LAMA2; (-) strand; PAM type: NRG; PAM sequence: AAG
tttgtattaactagcctgaa

SEQ ID NO: 90853 - DNA, 20 bp, Artificial Sequence
  Description of Artificial Sequence: Synthetic oligonucleotide
  Target: LAMA2; (-) strand; PAM type: NRG; PAM sequence: TAG
ggaaatgtctttgtattaac

SEQ ID NO: 90854 - DNA, 20 bp, Artificial Sequence
  Description of Artificial Sequence: Synthetic oligonucleotide
  Target: LAMA2; (-) strand; PAM type: NRG; PAM sequence: GGG
actgtccaacataaatcagg

SEQ ID NO: 90855 - DNA, 20 bp, Artificial Sequence
  Description of Artificial Sequence: Synthetic oligonucleotide
  Target: LAMA2; (-) strand; PAM type: NRG; PAM sequence: GGG
aactgtccaacataaatcag

SEQ ID NO: 90856 - DNA, 20 bp, Artificial Sequence
  Description of Artificial Sequence: Synthetic oligonucleotide
  Target: LAMA2; (-) strand; PAM type: NRG; PAM sequence: GGG
aaactgtccaacataaatca

SEQ ID NO: 90857 - DNA, 20 bp, Artificial Sequence
  Description of Artificial Sequence: Synthetic oligonucleotide
  Target: LAMA2; (-) strand; PAM type: NRG; PAM sequence: AGG
gaaactgtccaacataaatc

SEQ ID NO: 90858 - DNA, 20 bp, Artificial Sequence
  Description of Artificial Sequence: Synthetic oligonucleotide
  Target: LAMA2; (-) strand; PAM type: NRG; PAM sequence: CAG
tgaaactgtccaacataaat

SEQ ID NO: 90859 - DNA, 20 bp, Artificial Sequence
  Description of Artificial Sequence: Synthetic oligonucleotide
  Target: LAMA2; (-) strand; PAM type: NRG; PAM sequence: TAG
accagtgattttaagacggg

SEQ ID NO: 90860 - DNA, 20 bp, Artificial Sequence
  Description of Artificial Sequence: Synthetic oligonucleotide
  Target: LAMA2; (-) strand; PAM type: NRG; PAM sequence: GGG
gaaaccagtgattttaagac

SEQ ID NO: 90861 - DNA, 20 bp, Artificial Sequence
  Description of Artificial Sequence: Synthetic oligonucleotide
  Target: LAMA2; (-) strand; PAM type: NRG; PAM sequence: CGG
tgaaaccagtgattttaaga

SEQ ID NO: 90862 - DNA, 20 bp, Artificial Sequence
  Description of Artificial Sequence: Synthetic oligonucleotide
  Target: LAMA2; (-) strand; PAM type: NRG; PAM sequence: AAG
caaatgaaaccagtgatttt

SEQ ID NO: 90863 - DNA, 20 bp, Artificial Sequence
  Description of Artificial Sequence: Synthetic oligonucleotide
  Target: LAMA2; (-) strand; PAM type: NRG; PAM sequence: CAG
cagaagactgcaaatgaaac

SEQ ID NO: 90864 - DNA, 20 bp, Artificial Sequence
  Description of Artificial Sequence: Synthetic oligonucleotide
  Target: LAMA2; (-) strand; PAM type: NRG; PAM sequence: AAG
cctgtatggcgaaacctcag

SEQ ID NO: 90865 - DNA, 20 bp, Artificial Sequence
  Description of Artificial Sequence: Synthetic oligonucleotide
  Target: LAMA2; (-) strand; PAM type: NRG; PAM sequence: CAG
cctcctgtatggcgaaacct

SEQ ID NO: 90866 - DNA, 20 bp, Artificial Sequence
  Description of Artificial Sequence: Synthetic oligonucleotide
  Target: LAMA2; (-) strand; PAM type: NRG; PAM sequence: TGG
gtgaatgcattcctcctgta

SEQ ID NO: 90867 - DNA, 20 bp, Artificial Sequence
  Description of Artificial Sequence: Synthetic oligonucleotide
  Target: LAMA2; (-) strand; PAM type: NRG; PAM sequence: GAG
agctcttgtgtcatttcaca

SEQ ID NO: 90868 - DNA, 20 bp, Artificial Sequence
  Description of Artificial Sequence: Synthetic oligonucleotide
  Target: LAMA2; (-) strand; PAM type: NRG; PAM sequence: CAG
ttagctcttgtgtcatttca

SEQ ID NO: 90869 - DNA, 20 bp, Artificial Sequence
  Description of Artificial Sequence: Synthetic oligonucleotide
  Target: LAMA2; (-) strand; PAM type: NRG; PAM sequence: TAG
aagtagccacctacttggat

SEQ ID NO: 90870 - DNA, 20 bp, Artificial Sequence
  Description of Artificial Sequence: Synthetic oligonucleotide
  Target: LAMA2; (-) strand; PAM type: NRG; PAM sequence: TGG
acagaaagtagccacctact

SEQ ID NO: 90871 - DNA, 20 bp, Artificial Sequence
  Description of Artificial Sequence: Synthetic oligonucleotide
  Target: LAMA2; (-) strand; PAM type: NRG; PAM sequence: TAG
gtaatgtaggtgacagaaag

SEQ ID NO: 90872 - DNA, 20 bp, Artificial Sequence
  Description of Artificial Sequence: Synthetic oligonucleotide
  Target: LAMA2; (-) strand; PAM type: NRG; PAM sequence: AAG
taggtaatgtaggtgacaga

SEQ ID NO: 90873 - DNA, 20 bp, Artificial Sequence
  Description of Artificial Sequence: Synthetic oligonucleotide
  Target: LAMA2; (-) strand; PAM type: NRG; PAM sequence: CAG
gctttaggtaatgtaggtga

SEQ ID NO: 90874 - DNA, 20 bp, Artificial Sequence
  Description of Artificial Sequence: Synthetic oligonucleotide
  Target: LAMA2; (-) strand; PAM type: NRG; PAM sequence: AGG
cacagtgctttaggtaatgt

SEQ ID NO: 90875 - DNA, 20 bp, Artificial Sequence
  Description of Artificial Sequence: Synthetic oligonucleotide
  Target: LAMA2; (-) strand; PAM type: NRG; PAM sequence: TAG
ccacagtgctttaggtaatg

SEQ ID NO: 90876 - DNA, 20 bp, Artificial Sequence
  Description of Artificial Sequence: Synthetic oligonucleotide
  Target: LAMA2; (-) strand; PAM type: NRG; PAM sequence: AGG
ttattgaaccacagtgcttt

SEQ ID NO: 90877 - DNA, 20 bp, Artificial Sequence
  Description of Artificial Sequence: Synthetic oligonucleotide
  Target: LAMA2; (-) strand; PAM type: NRG; PAM sequence: TAG
cttattgaaccacagtgctt

SEQ ID NO: 90878 - DNA, 20 bp, Artificial Sequence
  Description of Artificial Sequence: Synthetic oligonucleotide
  Target: LAMA2; (-) strand; PAM type: NRG; PAM sequence: CAG
ggcttttacttattgaacca

SEQ ID NO: 90879 - DNA, 20 bp, Artificial Sequence
  Description of Artificial Sequence: Synthetic oligonucleotide
  Target: LAMA2; (-) strand; PAM type: NRG; PAM sequence: TGG
aggagtttcaaatttgacat

SEQ ID NO: 90880 - DNA, 20 bp, Artificial Sequence
  Description of Artificial Sequence: Synthetic oligonucleotide
  Target: LAMA2; (-) strand; PAM type: NRG; PAM sequence: GAG
cagctcacctgagtgggtag

SEQ ID NO: 90881 - DNA, 20 bp, Artificial Sequence
  Description of Artificial Sequence: Synthetic oligonucleotide
  Target: LAMA2; (-) strand; PAM type: NRG; PAM sequence: AGG
ttcagctcacctgagtgggt

SEQ ID NO: 90882 - DNA, 20 bp, Artificial Sequence
  Description of Artificial Sequence: Synthetic oligonucleotide
  Target: LAMA2; (-) strand; PAM type: NRG; PAM sequence: TAG
tttcagctcacctgagtggg

SEQ ID NO: 90883 - DNA, 20 bp, Artificial Sequence
  Description of Artificial Sequence: Synthetic oligonucleotide
  Target: LAMA2; (-) strand; PAM type: NRG; PAM sequence: GGG
gactttcagctcacctgagt

SEQ ID NO: 90884 - DNA, 20 bp, Artificial Sequence
  Description of Artificial Sequence: Synthetic oligonucleotide
  Target: LAMA2; (-) strand; PAM type: NRG; PAM sequence: TGG
cgactttcagctcacctgag

SEQ ID NO: 90885 - DNA, 20 bp, Artificial Sequence
  Description of Artificial Sequence: Synthetic oligonucleotide
  Target: LAMA2; (-) strand; PAM type: NRG; PAM sequence: GAG
tgccgactttcagctcacct

SEQ ID NO: 90886 - DNA, 20 bp, Artificial Sequence
  Description of Artificial Sequence: Synthetic oligonucleotide
  Target: LAMA2; (-) strand; PAM type: NRG; PAM sequence: CAG
tccagattcatgccgacttt

SEQ ID NO: 90887 - DNA, 20 bp, Artificial Sequence
  Description of Artificial Sequence: Synthetic oligonucleotide
  Target: LAMA2; (-) strand; PAM type: NRG; PAM sequence: CAG
acaagcttactgactgactc

SEQ ID NO: 90888 - DNA, 20 bp, Artificial Sequence
  Description of Artificial Sequence: Synthetic oligonucleotide
  Target: LAMA2; (-) strand; PAM type: NRG; PAM sequence: AAG
gatcaaagataaaatataac

SEQ ID NO: 90889 - DNA, 20 bp, Artificial Sequence
  Description of Artificial Sequence: Synthetic oligonucleotide
  Target: LAMA2; (-) strand; PAM type: NRG; PAM sequence: AAG
ctcaatctactagtagatca

SEQ ID NO: 90890 - DNA, 20 bp, Artificial Sequence
  Description of Artificial Sequence: Synthetic oligonucleotide
  Target: LAMA2; (-) strand; PAM type: NRG; PAM sequence: TAG
aatatgactcaatctactag

SEQ ID NO: 90891 - DNA, 20 bp, Artificial Sequence
  Description of Artificial Sequence: Synthetic oligonucleotide
  Target: LAMA2; (-) strand; PAM type: NRG; PAM sequence: TAG
acaaatatgactcaatctac

SEQ ID NO: 90892 - DNA, 20 bp, Artificial Sequence
  Description of Artificial Sequence: Synthetic oligonucleotide
  Target: LAMA2; (-) strand; PAM type: NRG; PAM sequence: AAG
agacaagttgaaatcaattc

SEQ ID NO: 90893 - DNA, 20 bp, Artificial Sequence
  Description of Artificial Sequence: Synthetic oligonucleotide
  Target: LAMA2; (-) strand; PAM type: NRG; PAM sequence: AAG
gaaagcctactgtgcaagac

SEQ ID NO: 90894 - DNA, 20 bp, Artificial Sequence
  Description of Artificial Sequence: Synthetic oligonucleotide
  Target: LAMA2; (-) strand; PAM type: NRG; PAM sequence: AAG
aagtcgaaagcctactgtgc

SEQ ID NO: 90895 - DNA, 20 bp, Artificial Sequence
  Description of Artificial Sequence: Synthetic oligonucleotide
  Target: LAMA2; (-) strand; PAM type: NRG; PAM sequence: AAG
caaacagtataccaagtcga

SEQ ID NO: 90896 - DNA, 20 bp, Artificial Sequence
  Description of Artificial Sequence: Synthetic oligonucleotide
  Target: LAMA2; (-) strand; PAM type: NRG; PAM sequence: AAG
ttgtacacaaacagtatacc

SEQ ID NO: 90897 - DNA, 20 bp, Artificial Sequence
  Description of Artificial Sequence: Synthetic oligonucleotide
  Target: LAMA2; (-) strand; PAM type: NRG; PAM sequence: CAG
tacttgtgcttgtacacaaa

SEQ ID NO: 90898 - DNA, 20 bp, Artificial Sequence
  Description of Artificial Sequence: Synthetic oligonucleotide
  Target: LAMA2; (-) strand; PAM type: NRG; PAM sequence: GAG
tctgaatatgaatttttgtt

SEQ ID NO: 90899 - DNA, 20 bp, Artificial Sequence
  Description of Artificial Sequence: Synthetic oligonucleotide
  Target: LAMA2; (-) strand; PAM type: NRG; PAM sequence: AAG
gaagtaaatccactgtaaat

SEQ ID NO: 90900 - DNA, 20 bp, Artificial Sequence
  Description of Artificial Sequence: Synthetic oligonucleotide
  Target: LAMA2; (-) strand; PAM type: NRG; PAM sequence: AAG
tgctgaaagaactgccatgg

SEQ ID NO: 90901 - DNA, 20 bp, Artificial Sequence
  Description of Artificial Sequence: Synthetic oligonucleotide
  Target: LAMA2; (-) strand; PAM type: NRG; PAM sequence: TGG
atttgctgaaagaactgcca

SEQ ID NO: 90902 - DNA, 20 bp, Artificial Sequence
  Description of Artificial Sequence: Synthetic oligonucleotide
  Target: LAMA2; (-) strand; PAM type: NRG; PAM sequence: AAG
aacctaagcccatttgctga

SEQ ID NO: 90903 - DNA, 20 bp, Artificial Sequence
  Description of Artificial Sequence: Synthetic oligonucleotide
  Target: LAMA2; (-) strand; PAM type: NRG; PAM sequence: AAG
ataactaactggaggaacct

SEQ ID NO: 90904 - DNA, 20 bp, Artificial Sequence
  Description of Artificial Sequence: Synthetic oligonucleotide
  Target: LAMA2; (-) strand; PAM type: NRG; PAM sequence: AGG
ctaatcatataactaactgg

SEQ ID NO: 90905 - DNA, 20 bp, Artificial Sequence
  Description of Artificial Sequence: Synthetic oligonucleotide
  Target: LAMA2; (-) strand; PAM type: NRG; PAM sequence: GAG
tctaatcatataactaactg

SEQ ID NO: 90906 - DNA, 20 bp, Artificial Sequence
  Description of Artificial Sequence: Synthetic oligonucleotide
  Target: LAMA2; (-) strand; PAM type: NRG; PAM sequence: TGG
catctaatcatataactaac

SEQ ID NO: 90907 - DNA, 20 bp, Artificial Sequence
  Description of Artificial Sequence: Synthetic oligonucleotide
  Target: LAMA2; (-) strand; PAM type: NRG; PAM sequence: CAG
aaaattcttgacccgcagtc

SEQ ID NO: 90908 - DNA, 20 bp, Artificial Sequence
  Description of Artificial Sequence: Synthetic oligonucleotide
  Target: LAMA2; (-) strand; PAM type: NRG; PAM sequence: CAG
aagtcaaaattcttgacccg

SEQ ID NO: 90909 - DNA, 20 bp, Artificial Sequence
  Description of Artificial Sequence: Synthetic oligonucleotide
  Target: LAMA2; (-) strand; PAM type: NRG; PAM sequence: AAG
aatagctgagttgaaaacaa

SEQ ID NO: 90910 - DNA, 20 bp, Artificial Sequence
  Description of Artificial Sequence: Synthetic oligonucleotide
  Target: LAMA2; (-) strand; PAM type: NRG; PAM sequence: GAG
tttacaactattaaatagct

SEQ ID NO: 90911 - DNA, 20 bp, Artificial Sequence
  Description of Artificial Sequence: Synthetic oligonucleotide
  Target: LAMA2; (-) strand; PAM type: NRG; PAM sequence: TAG
ttatgtttacaactattaaa

SEQ ID NO: 90912 - DNA, 20 bp, Artificial Sequence
  Description of Artificial Sequence: Synthetic oligonucleotide
  Target: LAMA2; (-) strand; PAM type: NRG; PAM sequence: AAG
attgaagtccaaagaggtca

SEQ ID NO: 90913 - DNA, 20 bp, Artificial Sequence
  Description of Artificial Sequence: Synthetic oligonucleotide
  Target: LAMA2; (-) strand; PAM type: NRG; PAM sequence: AGG
gaagtgattgaagtccaaag

SEQ ID NO: 90914 - DNA, 20 bp, Artificial Sequence
  Description of Artificial Sequence: Synthetic oligonucleotide
  Target: LAMA2; (-) strand; PAM type: NRG; PAM sequence: GAG
tgaagtgattgaagtccaaa

SEQ ID NO: 90915 - DNA, 20 bp, Artificial Sequence
  Description of Artificial Sequence: Synthetic oligonucleotide
  Target: LAMA2; (-) strand; PAM type: NRG; PAM sequence: AAG
gatgaagtgattgaagtcca

SEQ ID NO: 90916 - DNA, 20 bp, Artificial Sequence
  Description of Artificial Sequence: Synthetic oligonucleotide
  Target: LAMA2; (-) strand; PAM type: NRG; PAM sequence: AAG
ttttacagatgaagtgattg

SEQ ID NO: 90917 - DNA, 20 bp, Artificial Sequence
  Description of Artificial Sequence: Synthetic oligonucleotide
  Target: LAMA2; (-) strand; PAM type: NRG; PAM sequence: AAG
tcctccttattttacagatg

SEQ ID NO: 90918 - DNA, 20 bp, Artificial Sequence
  Description of Artificial Sequence: Synthetic oligonucleotide
  Target: LAMA2; (-) strand; PAM type: NRG; PAM sequence: CAG
ttgtcctcctccttatttta

SEQ ID NO: 90919 - DNA, 20 bp, Artificial Sequence
  Description of Artificial Sequence: Synthetic oligonucleotide
  Target: LAMA2; (-) strand; PAM type: NRG; PAM sequence: GAG
gtgactttttgaagctggca

SEQ ID NO: 90920 - DNA, 20 bp, Artificial Sequence
  Description of Artificial Sequence: Synthetic oligonucleotide
  Target: LAMA2; (-) strand; PAM type: NRG; PAM sequence: CAG
cggtgactttttgaagctgg

SEQ ID NO: 90921 - DNA, 20 bp, Artificial Sequence
  Description of Artificial Sequence: Synthetic oligonucleotide
  Target: LAMA2; (-) strand; PAM type: NRG; PAM sequence: TGG
ttgcggtgactttttgaagc

SEQ ID NO: 90922 - DNA, 20 bp, Artificial Sequence
  Description of Artificial Sequence: Synthetic oligonucleotide
  Target: LAMA2; (-) strand; PAM type: NRG; PAM sequence: AAG
attcttgcggtgactttttg

SEQ ID NO: 90923 - DNA, 20 bp, Artificial Sequence
  Description of Artificial Sequence: Synthetic oligonucleotide
  Target: LAMA2; (-) strand; PAM type: NRG; PAM sequence: CGG
gctctctaattcaattcttg

SEQ ID NO: 90924 - DNA, 20 bp, Artificial Sequence
  Description of Artificial Sequence: Synthetic oligonucleotide
  Target: LAMA2; (-) strand; PAM type: NRG; PAM sequence: CAG
ccactagccaagtgcttttg

SEQ ID NO: 90925 - DNA, 20 bp, Artificial Sequence
  Description of Artificial Sequence: Synthetic oligonucleotide
  Target: LAMA2; (-) strand; PAM type: NRG; PAM sequence: AAG
gtgctgggttaccactagcc

SEQ ID NO: 90926 - DNA, 20 bp, Artificial Sequence
  Description of Artificial Sequence: Synthetic oligonucleotide
  Target: LAMA2; (-) strand; PAM type: NRG; PAM sequence: TAG
tttgtgtgctgggttaccac

SEQ ID NO: 90927 - DNA, 20 bp, Artificial Sequence
  Description of Artificial Sequence: Synthetic oligonucleotide
  Target: LAMA2; (-) strand; PAM type: NRG; PAM sequence: GGG
atgcttcatatttgtgtgct

SEQ ID NO: 90928 - DNA, 20 bp, Artificial Sequence
  Description of Artificial Sequence: Synthetic oligonucleotide
  Target: LAMA2; (-) strand; PAM type: NRG; PAM sequence: TGG
aatgcttcatatttgtgtgc

SEQ ID NO: 90929 - DNA, 20 bp, Artificial Sequence
  Description of Artificial Sequence: Synthetic oligonucleotide
  Target: LAMA2; (-) strand; PAM type: NRG; PAM sequence: TAG
ttgggatgaagtagataaga

SEQ ID NO: 90930 - DNA, 20 bp, Artificial Sequence
  Description of Artificial Sequence: Synthetic oligonucleotide
  Target: LAMA2; (-) strand; PAM type: NRG; PAM sequence: AAG
tcctttgggatgaagtagat

SEQ ID NO: 90931 - DNA, 20 bp, Artificial Sequence
  Description of Artificial Sequence: Synthetic oligonucleotide
  Target: LAMA2; (-) strand; PAM type: NRG; PAM sequence: TAG
tgtgatcctttgggatgaag

SEQ ID NO: 90932 - DNA, 20 bp, Artificial Sequence
  Description of Artificial Sequence: Synthetic oligonucleotide
  Target: LAMA2; (-) strand; PAM type: NRG; PAM sequence: AAG
aaatgtgatcctttgggatg

SEQ ID NO: 90933 - DNA, 20 bp, Artificial Sequence
  Description of Artificial Sequence: Synthetic oligonucleotide
  Target: LAMA2; (-) strand; PAM type: NRG; PAM sequence: GGG
tggagaaaatgtgatccttt

SEQ ID NO: 90934 - DNA, 20 bp, Artificial Sequence
  Description of Artificial Sequence: Synthetic oligonucleotide
  Target: LAMA2; (-) strand; PAM type: NRG; PAM sequence: TGG
ttggagaaaatgtgatcctt

SEQ ID NO: 90935 - DNA, 20 bp, Artificial Sequence
  Description of Artificial Sequence: Synthetic oligonucleotide
  Target: LAMA2; (-) strand; PAM type: NRG; PAM sequence: GAG
ctaagtcttaatggtatttg

SEQ ID NO: 90936 - DNA, 20 bp, Artificial Sequence
  Description of Artificial Sequence: Synthetic oligonucleotide
  Target: LAMA2; (-) strand; PAM type: NRG; PAM sequence: TGG
ctctaagtcttaatggtatt

SEQ ID NO: 90937 - DNA, 20 bp, Artificial Sequence
  Description of Artificial Sequence: Synthetic oligonucleotide
  Target: LAMA2; (-) strand; PAM type: NRG; PAM sequence: TGG
tagaggtctctaagtcttaa

SEQ ID NO: 90938 - DNA, 20 bp, Artificial Sequence
  Description of Artificial Sequence: Synthetic oligonucleotide
  Target: LAMA2; (-) strand; PAM type: NRG; PAM sequence: AAG
gcctttctttagaggtctct

SEQ ID NO: 90939 - DNA, 20 bp, Artificial Sequence
  Description of Artificial Sequence: Synthetic oligonucleotide
  Target: LAMA2; (-) strand; PAM type: NRG; PAM sequence: AGG
cagtatgtgcctttctttag

SEQ ID NO: 90940 - DNA, 20 bp, Artificial Sequence
  Description of Artificial Sequence: Synthetic oligonucleotide
  Target: LAMA2; (-) strand; PAM type: NRG; PAM sequence: GAG
ccagtatgtgcctttcttta

SEQ ID NO: 90941 - DNA, 20 bp, Artificial Sequence
  Description of Artificial Sequence: Synthetic oligonucleotide
  Target: LAMA2; (-) strand; PAM type: NRG; PAM sequence: TAG
tgccagtatgtgcctttctt

SEQ ID NO: 90942 - DNA, 20 bp, Artificial Sequence
  Description of Artificial Sequence: Synthetic oligonucleotide
  Target: LAMA2; (-) strand; PAM type: NRG; PAM sequence: CAG
tgtcatatgtatggaaatgc

SEQ ID NO: 90943 - DNA, 20 bp, Artificial Sequence
  Description of Artificial Sequence: Synthetic oligonucleotide
  Target: LAMA2; (-) strand; PAM type: NRG; PAM sequence: TGG
agtaagaactgtcatatgta

SEQ ID NO: 90944 - DNA, 20 bp, Artificial Sequence
  Description of Artificial Sequence: Synthetic oligonucleotide
  Target: LAMA2; (-) strand; PAM type: NRG; PAM sequence: AAG
ttctggataaaaatgatagt

SEQ ID NO: 90945 - DNA, 20 bp, Artificial Sequence
  Description of Artificial Sequence: Synthetic oligonucleotide
  Target: LAMA2; (-) strand; PAM type: NRG; PAM sequence: TAG
agcattctggataaaaatga

SEQ ID NO: 90946 - DNA, 20 bp, Artificial Sequence
  Description of Artificial Sequence: Synthetic oligonucleotide
  Target: LAMA2; (-) strand; PAM type: NRG; PAM sequence: TGG
tctaatgggtctcagcattc

SEQ ID NO: 90947 - DNA, 20 bp, Artificial Sequence
  Description of Artificial Sequence: Synthetic oligonucleotide
  Target: LAMA2; (-) strand; PAM type: NRG; PAM sequence: CAG
taattttatctaatgggtct

SEQ ID NO: 90948 - DNA, 20 bp, Artificial Sequence
  Description of Artificial Sequence: Synthetic oligonucleotide
  Target: LAMA2; (-) strand; PAM type: NRG; PAM sequence: GGG
ataaattaattttatctaat

SEQ ID NO: 90949 - DNA, 20 bp, Artificial Sequence
  Description of Artificial Sequence: Synthetic oligonucleotide
  Target: LAMA2; (-) strand; PAM type: NRG; PAM sequence: TGG
aataaattaattttatctaa

SEQ ID NO: 90950 - DNA, 20 bp, Artificial Sequence
  Description of Artificial Sequence: Synthetic oligonucleotide
  Target: LAMA2; (-) strand; PAM type: NRG; PAM sequence: AAG
ttcctagtgaagacagcgag

SEQ ID NO: 90951 - DNA, 20 bp, Artificial Sequence
  Description of Artificial Sequence: Synthetic oligonucleotide
  Target: LAMA2; (-) strand; PAM type: NRG; PAM sequence: GAG
atcttcctagtgaagacagc

SEQ ID NO: 90952 - DNA, 20 bp, Artificial Sequence
  Description of Artificial Sequence: Synthetic oligonucleotide
  Target: LAMA2; (-) strand; PAM type: NRG; PAM sequence: CAG
cttcatcttcctagtgaaga

SEQ ID NO: 90953 - DNA, 20 bp, Artificial Sequence
  Description of Artificial Sequence: Synthetic oligonucleotide
  Target: LAMA2; (-) strand; PAM type: NRG; PAM sequence: AAG
gtgccttcatcttcctagtg

SEQ ID NO: 90954 - DNA, 20 bp, Artificial Sequence
  Description of Artificial Sequence: Synthetic oligonucleotide
  Target: LAMA2; (-) strand; PAM type: NRG; PAM sequence: TAG
tacttgtgccttcatcttcc

SEQ ID NO: 90955 - DNA, 20 bp, Artificial Sequence
  Description of Artificial Sequence: Synthetic oligonucleotide
  Target: LAMA2; (-) strand; PAM type: NRG; PAM sequence: GAG
attcttaaaagaagaatgaa

SEQ ID NO: 90956 - DNA, 20 bp, Artificial Sequence
  Description of Artificial Sequence: Synthetic oligonucleotide
  Target: LAMA2; (-) strand; PAM type: NRG; PAM sequence: AAG
atattcttaaaagaagaatg

SEQ ID NO: 90957 - DNA, 20 bp, Artificial Sequence
  Description of Artificial Sequence: Synthetic oligonucleotide
  Target: LAMA2; (-) strand; PAM type: NRG; PAM sequence: AAG
ttctcttatattcttaaaag

SEQ ID NO: 90958 - DNA, 20 bp, Artificial Sequence
  Description of Artificial Sequence: Synthetic oligonucleotide
  Target: LAMA2; (-) strand; PAM type: NRG; PAM sequence: AAG
gatttctcttatattcttaa

SEQ ID NO: 90959 - DNA, 20 bp, Artificial Sequence
  Description of Artificial Sequence: Synthetic oligonucleotide
  Target: LAMA2; (-) strand; PAM type: NRG; PAM sequence: AGG
gaaagatgcacagttcagtt

SEQ ID NO: 90960 - DNA, 20 bp, Artificial Sequence
  Description of Artificial Sequence: Synthetic oligonucleotide
  Target: LAMA2; (-) strand; PAM type: NRG; PAM sequence: TAG
tgaaagatgcacagttcagt

SEQ ID NO: 90961 - DNA, 20 bp, Artificial Sequence
  Description of Artificial Sequence: Synthetic oligonucleotide
  Target: LAMA2; (-) strand; PAM type: NRG; PAM sequence: CAG
aaggtgaaagatgcacagtt

SEQ ID NO: 90962 - DNA, 20 bp, Artificial Sequence
  Description of Artificial Sequence: Synthetic oligonucleotide
  Target: LAMA2; (-) strand; PAM type: NRG; PAM sequence: CAG
atttaaaggtgaaagatgca

SEQ ID NO: 90963 - DNA, 20 bp, Artificial Sequence
  Description of Artificial Sequence: Synthetic oligonucleotide
  Target: LAMA2; (-) strand; PAM type: NRG; PAM sequence: AAG
cttggataatttaaaggtga

SEQ ID NO: 90964 - DNA, 20 bp, Artificial Sequence
  Description of Artificial Sequence: Synthetic oligonucleotide
  Target: LAMA2; (-) strand; PAM type: NRG; PAM sequence: AGG
ccaagtcttggataatttaa

SEQ ID NO: 90965 - DNA, 20 bp, Artificial Sequence
  Description of Artificial Sequence: Synthetic oligonucleotide
  Target: LAMA2; (-) strand; PAM type: NRG; PAM sequence: AAG
tccaagtcttggataattta

SEQ ID NO: 90966 - DNA, 20 bp, Artificial Sequence
  Description of Artificial Sequence: Synthetic oligonucleotide
  Target: LAMA2; (-) strand; PAM type: NRG; PAM sequence: TGG
atgttactaaatccaagtct

SEQ ID NO: 90967 - DNA, 20 bp, Artificial Sequence
  Description of Artificial Sequence: Synthetic oligonucleotide
  Target: LAMA2; (-) strand; PAM type: NRG; PAM sequence: AAG
ccaaggatgttactaaatcc

SEQ ID NO: 90968 - DNA, 20 bp, Artificial Sequence
  Description of Artificial Sequence: Synthetic oligonucleotide
  Target: LAMA2; (-) strand; PAM type: NRG; PAM sequence: AGG
ctttcttgatttaaagacca

SEQ ID NO: 90969 - DNA, 20 bp, Artificial Sequence
  Description of Artificial Sequence: Synthetic oligonucleotide
  Target: LAMA2; (-) strand; PAM type: NRG; PAM sequence: AAG
cctttcttgatttaaagacc

SEQ ID NO: 90970 - DNA, 20 bp, Artificial Sequence
  Description of Artificial Sequence: Synthetic oligonucleotide
  Target: LAMA2; (-) strand; PAM type: NRG; PAM sequence: AAG
taaaagcctttcttgattta

SEQ ID NO: 90971 - DNA, 20 bp, Artificial Sequence
  Description of Artificial Sequence: Synthetic oligonucleotide
  Target: LAMA2; (-) strand; PAM type: NRG; PAM sequence: AAG
ctaatataggtgcttcataa

SEQ ID NO: 90972 - DNA, 20 bp, Artificial Sequence
  Description of Artificial Sequence: Synthetic oligonucleotide
  Target: LAMA2; (-) strand; PAM type: NRG; PAM sequence: AGG
cagagttctatatctaatat

SEQ ID NO: 90973 - DNA, 20 bp, Artificial Sequence
  Description of Artificial Sequence: Synthetic oligonucleotide
  Target: LAMA2; (-) strand; PAM type: NRG; PAM sequence: TAG
gcagagttctatatctaata

SEQ ID NO: 90974 - DNA, 20 bp, Artificial Sequence
  Description of Artificial Sequence: Synthetic oligonucleotide
  Target: LAMA2; (-) strand; PAM type: NRG; PAM sequence: GAG
aggaaaatacactttgtgca

SEQ ID NO: 90975 - DNA, 20 bp, Artificial Sequence
  Description of Artificial Sequence: Synthetic oligonucleotide
  Target: LAMA2; (-) strand; PAM type: NRG; PAM sequence: CAG
agaggaaaatacactttgtg

SEQ ID NO: 90976 - DNA, 20 bp, Artificial Sequence
  Description of Artificial Sequence: Synthetic oligonucleotide
  Target: LAMA2; (-) strand; PAM type: NRG; PAM sequence: AGG
aatgtctactgtaaagttag

SEQ ID NO: 90977 - DNA, 20 bp, Artificial Sequence
  Description of Artificial Sequence: Synthetic oligonucleotide
  Target: LAMA2; (-) strand; PAM type: NRG; PAM sequence: GAG
taatgtctactgtaaagtta

SEQ ID NO: 90978 - DNA, 20 bp, Artificial Sequence
  Description of Artificial Sequence: Synthetic oligonucleotide
  Target: LAMA2; (-) strand; PAM type: NRG; PAM sequence: TAG
actaatgtctactgtaaagt

SEQ ID NO: 90979 - DNA, 20 bp, Artificial Sequence
  Description of Artificial Sequence: Synthetic oligonucleotide
  Target: LAMA2; (-) strand; PAM type: NRG; PAM sequence: AAG
ctctactaatgtctactgta

SEQ ID NO: 90980 - DNA, 20 bp, Artificial Sequence
  Description of Artificial Sequence: Synthetic oligonucleotide
  Target: LAMA2; (-) strand; PAM type: NRG; PAM sequence: TGG
tatagatgagattggaaatt

SEQ ID NO: 90981 - DNA, 20 bp, Artificial Sequence
  Description of Artificial Sequence: Synthetic oligonucleotide
  Target: LAMA2; (-) strand; PAM type: NRG; PAM sequence: TGG
atatcccctatagatgagat

SEQ ID NO: 90982 - DNA, 20 bp, Artificial Sequence
  Description of Artificial Sequence: Synthetic oligonucleotide
  Target: LAMA2; (-) strand; PAM type: NRG; PAM sequence: GAG
atgcaatatcccctatagat

SEQ ID NO: 90983 - DNA, 20 bp, Artificial Sequence
  Description of Artificial Sequence: Synthetic oligonucleotide
  Target: LAMA2; (-) strand; PAM type: NRG; PAM sequence: TAG
gagaaatgcaatatccccta

SEQ ID NO: 90984 - DNA, 20 bp, Artificial Sequence
  Description of Artificial Sequence: Synthetic oligonucleotide
  Target: LAMA2; (-) strand; PAM type: NRG; PAM sequence: GAG
acatctaccctccaggatta

SEQ ID NO: 90985 - DNA, 20 bp, Artificial Sequence
  Description of Artificial Sequence: Synthetic oligonucleotide
  Target: LAMA2; (-) strand; PAM type: NRG; PAM sequence: TAG
acacatctaccctccaggat

SEQ ID NO: 90986 - DNA, 20 bp, Artificial Sequence
  Description of Artificial Sequence: Synthetic oligonucleotide
  Target: LAMA2; (-) strand; PAM type: NRG; PAM sequence: AGG
atgtgacacatctaccctcc

SEQ ID NO: 90987 - DNA, 20 bp, Artificial Sequence
  Description of Artificial Sequence: Synthetic oligonucleotide
  Target: LAMA2; (-) strand; PAM type: NRG; PAM sequence: CAG
catgtgacacatctaccctc

SEQ ID NO: 90988 - DNA, 20 bp, Artificial Sequence
  Description of Artificial Sequence: Synthetic oligonucleotide
  Target: LAMA2; (-) strand; PAM type: NRG; PAM sequence: AAG
cacatttcattggctaaacc

SEQ ID NO: 90989 - DNA, 20 bp, Artificial Sequence
  Description of Artificial Sequence: Synthetic oligonucleotide
  Target: LAMA2; (-) strand; PAM type: NRG; PAM sequence: TGG
tcatttctaccacatttcat

SEQ ID NO: 90990 - DNA, 20 bp, Artificial Sequence
  Description of Artificial Sequence: Synthetic oligonucleotide
  Target: LAMA2; (-) strand; PAM type: NRG; PAM sequence: AGG
ggaaattcaatgtttacctc

SEQ ID NO: 90991 - DNA, 20 bp, Artificial Sequence
  Description of Artificial Sequence: Synthetic oligonucleotide
  Target: LAMA2; (-) strand; PAM type: NRG; PAM sequence: CAG
tggaaattcaatgtttacct

SEQ ID NO: 90992 - DNA, 20 bp, Artificial Sequence
  Description of Artificial Sequence: Synthetic oligonucleotide
  Target: LAMA2; (-) strand; PAM type: NRG; PAM sequence: TGG
agctgcagagagtctcacat

SEQ ID NO: 90993 - DNA, 20 bp, Artificial Sequence
  Description of Artificial Sequence: Synthetic oligonucleotide
  Target: LAMA2; (-) strand; PAM type: NRG; PAM sequence: GAG
attgctgagtaagctgcaga

SEQ ID NO: 90994 - DNA, 20 bp, Artificial Sequence
  Description of Artificial Sequence: Synthetic oligonucleotide
  Target: LAMA2; (-) strand; PAM type: NRG; PAM sequence: GAG
tgattgctgagtaagctgca

SEQ ID NO: 90995 - DNA, 20 bp, Artificial Sequence
  Description of Artificial Sequence: Synthetic oligonucleotide
  Target: LAMA2; (-) strand; PAM type: NRG; PAM sequence: CAG
tctgattgctgagtaagctg

SEQ ID NO: 90996 - DNA, 20 bp, Artificial Sequence
  Description of Artificial Sequence: Synthetic oligonucleotide
  Target: LAMA2; (-) strand; PAM type: NRG; PAM sequence: AAG
taatcttctgattgctgagt

SEQ ID NO: 90997 - DNA, 20 bp, Artificial Sequence
  Description of Artificial Sequence: Synthetic oligonucleotide
  Target: LAMA2; (-) strand; PAM type: NRG; PAM sequence: GAG
tttttaatcttctgattgct

SEQ ID NO: 90998 - DNA, 20 bp, Artificial Sequence
  Description of Artificial Sequence: Synthetic oligonucleotide
  Target: LAMA2; (-) strand; PAM type: NRG; PAM sequence: AGG
gagccaccgtgcccggcccc

SEQ ID NO: 90999 - DNA, 20 bp, Artificial Sequence
  Description of Artificial Sequence: Synthetic oligonucleotide
  Target: LAMA2; (-) strand; PAM type: NRG; PAM sequence: CAG
tgagccaccgtgcccggccc

SEQ ID NO: 91000 - DNA, 20 bp, Artificial Sequence
  Description of Artificial Sequence: Synthetic oligonucleotide
  Target: LAMA2; (-) strand; PAM type: NRG; PAM sequence: CGG
caggcatgagccaccgtgcc

SEQ ID NO: 91001 - DNA, 20 bp, Artificial Sequence
  Description of Artificial Sequence: Synthetic oligonucleotide
  Target: LAMA2; (-) strand; PAM type: NRG; PAM sequence: GAG
attgctgggattacaggcat

SEQ ID NO: 91002 - DNA, 20 bp, Artificial Sequence
  Description of Artificial Sequence: Synthetic oligonucleotide
  Target: LAMA2; (-) strand; PAM type: NRG; PAM sequence: AGG
tcccaaattgctgggattac

SEQ ID NO: 91003 - DNA, 20 bp, Artificial Sequence
  Description of Artificial Sequence: Synthetic oligonucleotide
  Target: LAMA2; (-) strand; PAM type: NRG; PAM sequence: CAG
ctcccaaattgctgggatta

SEQ ID NO: 91004 - DNA, 20 bp, Artificial Sequence
  Description of Artificial Sequence: Synthetic oligonucleotide
  Target: LAMA2; (-) strand; PAM type: NRG; PAM sequence: GGG
cctcagcctcccaaattgct

SEQ ID NO: 91005 - DNA, 20 bp, Artificial Sequence
  Description of Artificial Sequence: Synthetic oligonucleotide
  Target: LAMA2; (-) strand; PAM type: NRG; PAM sequence: TGG
gcctcagcctcccaaattgc

SEQ ID NO: 91006 - DNA, 20 bp, Artificial Sequence
  Description of Artificial Sequence: Synthetic oligonucleotide
  Target: LAMA2; (-) strand; PAM type: NRG; PAM sequence: CAG
acctcgtgatctgcctgcct

SEQ ID NO: 91007 - DNA, 20 bp, Artificial Sequence
  Description of Artificial Sequence: Synthetic oligonucleotide
  Target: LAMA2; (-) strand; PAM type: NRG; PAM sequence: TGG
tttcaccatgttggtcaggc

SEQ ID NO: 91008 - DNA, 20 bp, Artificial Sequence
  Description of Artificial Sequence: Synthetic oligonucleotide
  Target: LAMA2; (-) strand; PAM type: NRG; PAM sequence: AGG
ggggtttcaccatgttggtc

SEQ ID NO: 91009 - DNA, 20 bp, Artificial Sequence
  Description of Artificial Sequence: Synthetic oligonucleotide
  Target: LAMA2; (-) strand; PAM type: NRG; PAM sequence: CAG
tggggtttcaccatgttggt

SEQ ID NO: 91010 - DNA, 20 bp, Artificial Sequence
  Description of Artificial Sequence: Synthetic oligonucleotide
  Target: LAMA2; (-) strand; PAM type: NRG; PAM sequence: TGG
gagatggggtttcaccatgt

SEQ ID NO: 91011 - DNA, 20 bp, Artificial Sequence
  Description of Artificial Sequence: Synthetic oligonucleotide
  Target: LAMA2; (-) strand; PAM type: NRG; PAM sequence: GGG
tggtatttttagtagagatg

SEQ ID NO: 91012 - DNA, 20 bp, Artificial Sequence
  Description of Artificial Sequence: Synthetic oligonucleotide
  Target: LAMA2; (-) strand; PAM type: NRG; PAM sequence: GGG
ttggtatttttagtagagat

SEQ ID NO: 91013 - DNA, 20 bp, Artificial Sequence
  Description of Artificial Sequence: Synthetic oligonucleotide
  Target: LAMA2; (-) strand; PAM type: NRG; PAM sequence: TGG
tttggtatttttagtagaga

SEQ ID NO: 91014 - DNA, 20 bp, Artificial Sequence
  Description of Artificial Sequence: Synthetic oligonucleotide
  Target: LAMA2; (-) strand; PAM type: NRG; PAM sequence: GAG
taattttggtatttttagta

SEQ ID NO: 91015 - DNA, 20 bp, Artificial Sequence
  Description of Artificial Sequence: Synthetic oligonucleotide
  Target: LAMA2; (-) strand; PAM type: NRG; PAM sequence: TAG
gctaattttggtatttttag

SEQ ID NO: 91016 - DNA, 20 bp, Artificial Sequence
  Description of Artificial Sequence: Synthetic oligonucleotide
  Target: LAMA2; (-) strand; PAM type: NRG; PAM sequence: TAG
ctggctaattttggtatttt

SEQ ID NO: 91017 - DNA, 20 bp, Artificial Sequence
  Description of Artificial Sequence: Synthetic oligonucleotide
  Target: LAMA2; (-) strand; PAM type: NRG; PAM sequence: TGG
ccaccatgtctggctaattt

SEQ ID NO: 91018 - DNA, 20 bp, Artificial Sequence
  Description of Artificial Sequence: Synthetic oligonucleotide
  Target: LAMA2; (-) strand; PAM type: NRG; PAM sequence: TGG
ctgacacgtgccaccatgtc

SEQ ID NO: 91019 - DNA, 20 bp, Artificial Sequence
  Description of Artificial Sequence: Synthetic oligonucleotide
  Target: LAMA2; (-) strand; PAM type: NRG; PAM sequence: GGG
cctcagcctcctgagtagct

SEQ ID NO: 91020 - DNA, 20 bp, Artificial Sequence
  Description of Artificial Sequence: Synthetic oligonucleotide
  Target: LAMA2; (-) strand; PAM type: NRG; PAM sequence: TGG
gcctcagcctcctgagtagc

SEQ ID NO: 91021 - DNA, 20 bp, Artificial Sequence
  Description of Artificial Sequence: Synthetic oligonucleotide
  Target: LAMA2; (-) strand; PAM type: NRG; PAM sequence: TAG
tactgcctcagcctcctgag

SEQ ID NO: 91022 - DNA, 20 bp, Artificial Sequence
  Description of Artificial Sequence: Synthetic oligonucleotide
  Target: LAMA2; (-) strand; PAM type: NRG; PAM sequence: GAG
ttctactgcctcagcctcct

SEQ ID NO: 91023 - DNA, 20 bp, Artificial Sequence
  Description of Artificial Sequence: Synthetic oligonucleotide
  Target: LAMA2; (-) strand; PAM type: NRG; PAM sequence: CAG
ttcaagtgattctactgcct

SEQ ID NO: 91024 - DNA, 20 bp, Artificial Sequence
  Description of Artificial Sequence: Synthetic oligonucleotide
  Target: LAMA2; (-) strand; PAM type: NRG; PAM sequence: AAG
aacctccacatcccgggttc

SEQ ID NO: 91025 - DNA, 20 bp, Artificial Sequence
  Description of Artificial Sequence: Synthetic oligonucleotide
  Target: LAMA2; (-) strand; PAM type: NRG; PAM sequence: GGG
cactgcaacctccacatccc

SEQ ID NO: 91026 - DNA, 20 bp, Artificial Sequence
  Description of Artificial Sequence: Synthetic oligonucleotide
  Target: LAMA2; (-) strand; PAM type: NRG; PAM sequence: CGG
tcactgcaacctccacatcc

SEQ ID NO: 91027 - DNA, 20 bp, Artificial Sequence
  Description of Artificial Sequence: Synthetic oligonucleotide
  Target: LAMA2; (-) strand; PAM type: NRG; PAM sequence: CGG
ggagtgcaatggcgcgatct

SEQ ID NO: 91028 - DNA, 20 bp, Artificial Sequence
  Description of Artificial Sequence: Synthetic oligonucleotide
  Target: LAMA2; (-) strand; PAM type: NRG; PAM sequence: TGG
tcacccaggctggagtgcaa

SEQ ID NO: 91029 - DNA, 20 bp, Artificial Sequence
  Description of Artificial Sequence: Synthetic oligonucleotide
  Target: LAMA2; (-) strand; PAM type: NRG; PAM sequence: GAG
tccctctgtcacccaggctg

SEQ ID NO: 91030 - DNA, 20 bp, Artificial Sequence
  Description of Artificial Sequence: Synthetic oligonucleotide
  Target: LAMA2; (-) strand; PAM type: NRG; PAM sequence: TGG
tctccctctgtcacccaggc

SEQ ID NO: 91031 - DNA, 20 bp, Artificial Sequence
  Description of Artificial Sequence: Synthetic oligonucleotide
  Target: LAMA2; (-) strand; PAM type: NRG; PAM sequence: AGG
agagtctccctctgtcaccc

SEQ ID NO: 91032 - DNA, 20 bp, Artificial Sequence
  Description of Artificial Sequence: Synthetic oligonucleotide
  Target: LAMA2; (-) strand; PAM type: NRG; PAM sequence: CAG
cagagtctccctctgtcacc

SEQ ID NO: 91033 - DNA, 20 bp, Artificial Sequence
  Description of Artificial Sequence: Synthetic oligonucleotide
  Target: LAMA2; (-) strand; PAM type: NRG; PAM sequence: GAG
ttttttttttttttgagaca

SEQ ID NO: 91034 - DNA, 20 bp, Artificial Sequence
  Description of Artificial Sequence: Synthetic oligonucleotide
  Target: LAMA2; (-) strand; PAM type: NRG; PAM sequence: CAG
ttttttttttttttttgaga

SEQ ID NO: 91035 - DNA, 20 bp, Artificial Sequence
  Description of Artificial Sequence: Synthetic oligonucleotide
  Target: LAMA2; (-) strand; PAM type: NRG; PAM sequence: GAG
tttttttttttttttttttt

SEQ ID NO: 91036 - DNA, 20 bp, Artificial Sequence
  Description of Artificial Sequence: Synthetic oligonucleotide
  Target: LAMA2; (-) strand; PAM type: NRG; PAM sequence: AGG
gtgtgctaaatcagtattcc

SEQ ID NO: 91037 - DNA, 20 bp, Artificial Sequence
  Description of Artificial Sequence: Synthetic oligonucleotide
  Target: LAMA2; (-) strand; PAM type: NRG; PAM sequence: CAG
tgtgtgctaaatcagtattc

SEQ ID NO: 91038 - DNA, 20 bp, Artificial Sequence
  Description of Artificial Sequence: Synthetic oligonucleotide
  Target: LAMA2; (-) strand; PAM type: NRG; PAM sequence: CAG
ctgacctctgtgtgctaaat

SEQ ID NO: 91039 - DNA, 20 bp, Artificial Sequence
  Description of Artificial Sequence: Synthetic oligonucleotide
  Target: LAMA2; (-) strand; PAM type: NRG; PAM sequence: CAG
ggcctgggtgactgttaggg

SEQ ID NO: 91040 - DNA, 20 bp, Artificial Sequence
  Description of Artificial Sequence: Synthetic oligonucleotide
  Target: LAMA2; (-) strand; PAM type: NRG; PAM sequence: GGG
acaggcctgggtgactgtta

SEQ ID NO: 91041 - DNA, 20 bp, Artificial Sequence
  Description of Artificial Sequence: Synthetic oligonucleotide
  Target: LAMA2; (-) strand; PAM type: NRG; PAM sequence: AGG
tacaggcctgggtgactgtt

SEQ ID NO: 91042 - DNA, 20 bp, Artificial Sequence
  Description of Artificial Sequence: Synthetic oligonucleotide
  Target: LAMA2; (-) strand; PAM type: NRG; PAM sequence: TAG
ctacaggcctgggtgactgt

SEQ ID NO: 91043 - DNA, 20 bp, Artificial Sequence
  Description of Artificial Sequence: Synthetic oligonucleotide
  Target: LAMA2; (-) strand; PAM type: NRG; PAM sequence: GGG
gtaaaatcctctacaggcct

SEQ ID NO: 91044 - DNA, 20 bp, Artificial Sequence
  Description of Artificial Sequence: Synthetic oligonucleotide
  Target: LAMA2; (-) strand; PAM type: NRG; PAM sequence: TGG
tgtaaaatcctctacaggcc

SEQ ID NO: 91045 - DNA, 20 bp, Artificial Sequence
  Description of Artificial Sequence: Synthetic oligonucleotide
  Target: LAMA2; (-) strand; PAM type: NRG; PAM sequence: AGG
actcatgtaaaatcctctac

SEQ ID NO: 91046 - DNA, 20 bp, Artificial Sequence
  Description of Artificial Sequence: Synthetic oligonucleotide
  Target: LAMA2; (-) strand; PAM type: NRG; PAM sequence: CAG
tactcatgtaaaatcctcta

SEQ ID NO: 91047 - DNA, 20 bp, Artificial Sequence
  Description of Artificial Sequence: Synthetic oligonucleotide
  Target: LAMA2; (-) strand; PAM type: NRG; PAM sequence: AGG
aatggcttaacagaaaacaa

SEQ ID NO: 91048 - DNA, 20 bp, Artificial Sequence
  Description of Artificial Sequence: Synthetic oligonucleotide
  Target: LAMA2; (-) strand; PAM type: NRG; PAM sequence: AAG
caatggcttaacagaaaaca

SEQ ID NO: 91049 - DNA, 20 bp, Artificial Sequence
  Description of Artificial Sequence: Synthetic oligonucleotide
  Target: LAMA2; (-) strand; PAM type: NRG; PAM sequence: CAG
ccaaaatctcaatggcttaa

SEQ ID NO: 91050 - DNA, 20 bp, Artificial Sequence
  Description of Artificial Sequence: Synthetic oligonucleotide
  Target: LAMA2; (-) strand; PAM type: NRG; PAM sequence: TGG
taacaactccaaaatctcaa

SEQ ID NO: 91051 - DNA, 20 bp, Artificial Sequence
  Description of Artificial Sequence: Synthetic oligonucleotide
  Target: LAMA2; (-) strand; PAM type: NRG; PAM sequence: TGG
cgatggactcggttatgctg

SEQ ID NO: 91052 - DNA, 20 bp, Artificial Sequence
  Description of Artificial Sequence: Synthetic oligonucleotide
  Target: LAMA2; (-) strand; PAM type: NRG; PAM sequence: CGG
tgatgaagtcacgatggact

SEQ ID NO: 91053 - DNA, 20 bp, Artificial Sequence
  Description of Artificial Sequence: Synthetic oligonucleotide
  Target: LAMA2; (-) strand; PAM type: NRG; PAM sequence: TGG
atatcgtgatgaagtcacga

SEQ ID NO: 91054 - DNA, 20 bp, Artificial Sequence
  Description of Artificial Sequence: Synthetic oligonucleotide
  Target: LAMA2; (-) strand; PAM type: NRG; PAM sequence: AAG
tcatgagttatatcgtgatg

SEQ ID NO: 91055 - DNA, 20 bp, Artificial Sequence
  Description of Artificial Sequence: Synthetic oligonucleotide
  Target: LAMA2; (-) strand; PAM type: NRG; PAM sequence: GAG
tattttcaagcaatactcat

SEQ ID NO: 91056 - DNA, 20 bp, Artificial Sequence
  Description of Artificial Sequence: Synthetic oligonucleotide
  Target: LAMA2; (-) strand; PAM type: NRG; PAM sequence: AAG
aagattctgtatttattttc

SEQ ID NO: 91057 - DNA, 20 bp, Artificial Sequence
  Description of Artificial Sequence: Synthetic oligonucleotide
  Target: LAMA2; (-) strand; PAM type: NRG; PAM sequence: AAG
taaaaatatcttgccttgaa

SEQ ID NO: 91058 - DNA, 20 bp, Artificial Sequence
  Description of Artificial Sequence: Synthetic oligonucleotide
  Target: LAMA2; (-) strand; PAM type: NRG; PAM sequence: AAG
aaccgcaaaatttacactaa

SEQ ID NO: 91059 - DNA, 20 bp, Artificial Sequence
  Description of Artificial Sequence: Synthetic oligonucleotide
  Target: LAMA2; (-) strand; PAM type: NRG; PAM sequence: TAG
tgtttacaaaggaatttttc

SEQ ID NO: 91060 - DNA, 20 bp, Artificial Sequence
  Description of Artificial Sequence: Synthetic oligonucleotide
  Target: LAMA2; (-) strand; PAM type: NRG; PAM sequence: AGG
aaagactcctttgtttacaa

SEQ ID NO: 91061 - DNA, 20 bp, Artificial Sequence
  Description of Artificial Sequence: Synthetic oligonucleotide
  Target: LAMA2; (-) strand; PAM type: NRG; PAM sequence: AAG
caaagactcctttgtttaca

SEQ ID NO: 91062 - DNA, 20 bp, Artificial Sequence
  Description of Artificial Sequence: Synthetic oligonucleotide
  Target: LAMA2; (-) strand; PAM type: NRG; PAM sequence: AAG
tactatttctatgattatca

SEQ ID NO: 91063 - DNA, 20 bp, Artificial Sequence
  Description of Artificial Sequence: Synthetic oligonucleotide
  Target: LAMA2; (-) strand; PAM type: NRG; PAM sequence: AGG
tcattaacttcagaaggcag

SEQ ID NO: 91064 - DNA, 20 bp, Artificial Sequence
  Description of Artificial Sequence: Synthetic oligonucleotide
  Target: LAMA2; (-) strand; PAM type: NRG; PAM sequence: GAG
atcattaacttcagaaggca

SEQ ID NO: 91065 - DNA, 20 bp, Artificial Sequence
  Description of Artificial Sequence: Synthetic oligonucleotide
  Target: LAMA2; (-) strand; PAM type: NRG; PAM sequence: CAG
aaatcattaacttcagaagg

SEQ ID NO: 91066 - DNA, 20 bp, Artificial Sequence
  Description of Artificial Sequence: Synthetic oligonucleotide
  Target: LAMA2; (-) strand; PAM type: NRG; PAM sequence: AGG
cccaaatcattaacttcaga

SEQ ID NO: 91067 - DNA, 20 bp, Artificial Sequence
  Description of Artificial Sequence: Synthetic oligonucleotide
  Target: LAMA2; (-) strand; PAM type: NRG; PAM sequence: AAG
acccaaatcattaacttcag

SEQ ID NO: 91068 - DNA, 20 bp, Artificial Sequence
  Description of Artificial Sequence: Synthetic oligonucleotide
  Target: LAMA2; (-) strand; PAM type: NRG; PAM sequence: CAG
gttacccaaatcattaactt

SEQ ID NO: 91069 - DNA, 20 bp, Artificial Sequence
  Description of Artificial Sequence: Synthetic oligonucleotide
  Target: LAMA2; (-) strand; PAM type: NRG; PAM sequence: TAG
agtaaaatgtcttcaaaatg

SEQ ID NO: 91070 - DNA, 20 bp, Artificial Sequence
  Description of Artificial Sequence: Synthetic oligonucleotide
  Target: LAMA2; (-) strand; PAM type: NRG; PAM sequence: CAG
tttttaagtcctagtgttat

SEQ ID NO: 91071 - DNA, 20 bp, Artificial Sequence
  Description of Artificial Sequence: Synthetic oligonucleotide
  Target: LAMA2; (-) strand; PAM type: NRG; PAM sequence: TAG
gcaaaaatctttttaagtcc

SEQ ID NO: 91072 - DNA, 20 bp, Artificial Sequence
  Description of Artificial Sequence: Synthetic oligonucleotide
  Target: LAMA2; (-) strand; PAM type: NRG; PAM sequence: AAG
tgagctgcaaaaatcttttt

SEQ ID NO: 91073 - DNA, 20 bp, Artificial Sequence
  Description of Artificial Sequence: Synthetic oligonucleotide
  Target: LAMA2; (-) strand; PAM type: NRG; PAM sequence: GAG
ccaatggccggatgccaagt

SEQ ID NO: 91074 - DNA, 20 bp, Artificial Sequence
  Description of Artificial Sequence: Synthetic oligonucleotide
  Target: LAMA2; (-) strand; PAM type: NRG; PAM sequence: AAG
cttaccaatggccggatgcc

SEQ ID NO: 91075 - DNA, 20 bp, Artificial Sequence
  Description of Artificial Sequence: Synthetic oligonucleotide
  Target: LAMA2; (-) strand; PAM type: NRG; PAM sequence: CGG
ctgcacctcttaccaatggc

SEQ ID NO: 91076 - DNA, 20 bp, Artificial Sequence
  Description of Artificial Sequence: Synthetic oligonucleotide
  Target: LAMA2; (-) strand; PAM type: NRG; PAM sequence: TGG
ttggctgcacctcttaccaa

SEQ ID NO: 91077 - DNA, 20 bp, Artificial Sequence
  Description of Artificial Sequence: Synthetic oligonucleotide
  Target: LAMA2; (-) strand; PAM type: NRG; PAM sequence: TGG
ggaaacgtagggtaaaatgt

SEQ ID NO: 91078 - DNA, 20 bp, Artificial Sequence
  Description of Artificial Sequence: Synthetic oligonucleotide
  Target: LAMA2; (-) strand; PAM type: NRG; PAM sequence: GGG
gataatgggaaggaaacgta

SEQ ID NO: 91079 - DNA, 20 bp, Artificial Sequence
  Description of Artificial Sequence: Synthetic oligonucleotide
  Target: LAMA2; (-) strand; PAM type: NRG; PAM sequence: AGG
agataatgggaaggaaacgt

SEQ ID NO: 91080 - DNA, 20 bp, Artificial Sequence
  Description of Artificial Sequence: Synthetic oligonucleotide
  Target: LAMA2; (-) strand; PAM type: NRG; PAM sequence: TAG
aagataatgggaaggaaacg

SEQ ID NO: 91081 - DNA, 20 bp, Artificial Sequence
  Description of Artificial Sequence: Synthetic oligonucleotide
  Target: LAMA2; (-) strand; PAM type: NRG; PAM sequence: AGG
ggtagtcaaagataatggga

SEQ ID NO: 91082 - DNA, 20 bp, Artificial Sequence
  Description of Artificial Sequence: Synthetic oligonucleotide
  Target: LAMA2; (-) strand; PAM type: NRG; PAM sequence: AAG
aggtagtcaaagataatggg

SEQ ID NO: 91083 - DNA, 20 bp, Artificial Sequence
  Description of Artificial Sequence: Synthetic oligonucleotide
  Target: LAMA2; (-) strand; PAM type: NRG; PAM sequence: GGG
gggaggtagtcaaagataat

SEQ ID NO: 91084 - DNA, 20 bp, Artificial Sequence
  Description of Artificial Sequence: Synthetic oligonucleotide
  Target: LAMA2; (-) strand; PAM type: NRG; PAM sequence: TGG
tgggaggtagtcaaagataa

SEQ ID NO: 91085 - DNA, 20 bp, Artificial Sequence
  Description of Artificial Sequence: Synthetic oligonucleotide
  Target: LAMA2; (-) strand; PAM type: NRG; PAM sequence: AAG
atagcattgggaggtagtca

SEQ ID NO: 91086 - DNA, 20 bp, Artificial Sequence
  Description of Artificial Sequence: Synthetic oligonucleotide
  Target: LAMA2; (-) strand; PAM type: NRG; PAM sequence: TAG
tatggaatagcattgggagg

SEQ ID NO: 91087 - DNA, 20 bp, Artificial Sequence
  Description of Artificial Sequence: Synthetic oligonucleotide
  Target: LAMA2; (-) strand; PAM type: NRG; PAM sequence: AGG
acttatggaatagcattggg

SEQ ID NO: 91088 - DNA, 20 bp, Artificial Sequence
  Description of Artificial Sequence: Synthetic oligonucleotide
  Target: LAMA2; (-) strand; PAM type: NRG; PAM sequence: GAG
cacttatggaatagcattgg

SEQ ID NO: 91089 - DNA, 20 bp, Artificial Sequence
  Description of Artificial Sequence: Synthetic oligonucleotide
  Target: LAMA2; (-) strand; PAM type: NRG; PAM sequence: GGG
aacacttatggaatagcatt

SEQ ID NO: 91090 - DNA, 20 bp, Artificial Sequence
  Description of Artificial Sequence: Synthetic oligonucleotide
  Target: LAMA2; (-) strand; PAM type: NRG; PAM sequence: TGG
caacacttatggaatagcat

SEQ ID NO: 91091 - DNA, 20 bp, Artificial Sequence
  Description of Artificial Sequence: Synthetic oligonucleotide
  Target: LAMA2; (-) strand; PAM type: NRG; PAM sequence: TAG
cgaatccaacacttatggaa

SEQ ID NO: 91092 - DNA, 20 bp, Artificial Sequence
  Description of Artificial Sequence: Synthetic oligonucleotide
  Target: LAMA2; (-) strand; PAM type: NRG; PAM sequence: TGG
ctgaacgaatccaacactta

SEQ ID NO: 91093 - DNA, 20 bp, Artificial Sequence
  Description of Artificial Sequence: Synthetic oligonucleotide
  Target: LAMA2; (-) strand; PAM type: NRG; PAM sequence: CAG
aggtgctcagtaaatatttg

SEQ ID NO: 91094 - DNA, 20 bp, Artificial Sequence
  Description of Artificial Sequence: Synthetic oligonucleotide
  Target: LAMA2; (-) strand; PAM type: NRG; PAM sequence: CAG
agataatcatggaaggtgct

SEQ ID NO: 91095 - DNA, 20 bp, Artificial Sequence
  Description of Artificial Sequence: Synthetic oligonucleotide
  Target: LAMA2; (-) strand; PAM type: NRG; PAM sequence: AGG
tttacagagataatcatgga

SEQ ID NO: 91096 - DNA, 20 bp, Artificial Sequence
  Description of Artificial Sequence: Synthetic oligonucleotide
  Target: LAMA2; (-) strand; PAM type: NRG; PAM sequence: AAG
atttacagagataatcatgg

SEQ ID NO: 91097 - DNA, 20 bp, Artificial Sequence
  Description of Artificial Sequence: Synthetic oligonucleotide
  Target: LAMA2; (-) strand; PAM type: NRG; PAM sequence: TGG
gagatttacagagataatca

SEQ ID NO: 91098 - DNA, 20 bp, Artificial Sequence
  Description of Artificial Sequence: Synthetic oligonucleotide
  Target: LAMA2; (-) strand; PAM type: NRG; PAM sequence: GAG
aagaggaactgagatttaca

SEQ ID NO: 91099 - DNA, 20 bp, Artificial Sequence
  Description of Artificial Sequence: Synthetic oligonucleotide
  Target: LAMA2; (-) strand; PAM type: NRG; PAM sequence: CAG
acaagaggaactgagattta

SEQ ID NO: 91100 - DNA, 20 bp, Artificial Sequence
  Description of Artificial Sequence: Synthetic oligonucleotide
  Target: LAMA2; (-) strand; PAM type: NRG; PAM sequence: GAG
cattgtatacaagaggaact

SEQ ID NO: 91101 - DNA, 20 bp, Artificial Sequence
  Description of Artificial Sequence: Synthetic oligonucleotide
  Target: LAMA2; (-) strand; PAM type: NRG; PAM sequence: AGG
tttctgccattgtatacaag

SEQ ID NO: 91102 - DNA, 20 bp, Artificial Sequence
  Description of Artificial Sequence: Synthetic oligonucleotide
  Target: LAMA2; (-) strand; PAM type: NRG; PAM sequence: GAG
gtttctgccattgtatacaa

SEQ ID NO: 91103 - DNA, 20 bp, Artificial Sequence
  Description of Artificial Sequence: Synthetic oligonucleotide
  Target: LAMA2; (-) strand; PAM type: NRG; PAM sequence: AAG
ttgtttctgccattgtatac

SEQ ID NO: 91104 - DNA, 20 bp, Artificial Sequence
  Description of Artificial Sequence: Synthetic oligonucleotide
  Target: LAMA2; (-) strand; PAM type: NRG; PAM sequence: TAG
cttaattgccaattgaaatt

SEQ ID NO: 91105 - DNA, 20 bp, Artificial Sequence
  Description of Artificial Sequence: Synthetic oligonucleotide
  Target: LAMA2; (-) strand; PAM type: NRG; PAM sequence: AGG
catatgttagatactatttc

SEQ ID NO: 91106 - DNA, 20 bp, Artificial Sequence
  Description of Artificial Sequence: Synthetic oligonucleotide
  Target: LAMA2; (-) strand; PAM type: NRG; PAM sequence: CAG
acatatgttagatactattt

SEQ ID NO: 91107 - DNA, 20 bp, Artificial Sequence
  Description of Artificial Sequence: Synthetic oligonucleotide
  Target: LAMA2; (-) strand; PAM type: NRG; PAM sequence: TAG
cattgcctcccaacatatgt

SEQ ID NO: 91108 - DNA, 20 bp, Artificial Sequence
  Description of Artificial Sequence: Synthetic oligonucleotide
  Target: LAMA2; (-) strand; PAM type: NRG; PAM sequence: AAG
caagcatgactccaaaacca

SEQ ID NO: 91109 - DNA, 20 bp, Artificial Sequence
  Description of Artificial Sequence: Synthetic oligonucleotide
  Target: LAMA2; (-) strand; PAM type: NRG; PAM sequence: AAG
tgcagcatagattcaaaccc

SEQ ID NO: 91110 - DNA, 20 bp, Artificial Sequence
  Description of Artificial Sequence: Synthetic oligonucleotide
  Target: LAMA2; (-) strand; PAM type: NRG; PAM sequence: TAG
cattagcaaagggtgcagca

SEQ ID NO: 91111 - DNA, 20 bp, Artificial Sequence
  Description of Artificial Sequence: Synthetic oligonucleotide
  Target: LAMA2; (-) strand; PAM type: NRG; PAM sequence: CAG
aataccattagcaaagggtg

SEQ ID NO: 91112 - DNA, 20 bp, Artificial Sequence
  Description of Artificial Sequence: Synthetic oligonucleotide
  Target: LAMA2; (-) strand; PAM type: NRG; PAM sequence: GGG
aacataataccattagcaaa

SEQ ID NO: 91113 - DNA, 20 bp, Artificial Sequence
  Description of Artificial Sequence: Synthetic oligonucleotide
  Target: LAMA2; (-) strand; PAM type: NRG; PAM sequence: AGG
caacataataccattagcaa

SEQ ID NO: 91114 - DNA, 20 bp, Artificial Sequence
  Description of Artificial Sequence: Synthetic oligonucleotide
  Target: LAMA2; (-) strand; PAM type: NRG; PAM sequence: AAG
ccaacataataccattagca

SEQ ID NO: 91115 - DNA, 20 bp, Artificial Sequence
  Description of Artificial Sequence: Synthetic oligonucleotide
  Target: LAMA2; (-) strand; PAM type: NRG; PAM sequence: TAG
cttgtccaacataataccat

SEQ ID NO: 91116 - DNA, 20 bp, Artificial Sequence
  Description of Artificial Sequence: Synthetic oligonucleotide
  Target: LAMA2; (-) strand; PAM type: NRG; PAM sequence: GAG
ctgaggctcagaggagtaaa

SEQ ID NO: 91117 - DNA, 20 bp, Artificial Sequence
  Description of Artificial Sequence: Synthetic oligonucleotide
  Target: LAMA2; (-) strand; PAM type: NRG; PAM sequence: AAG
atctgaggctcagaggagta

SEQ ID NO: 91118 - DNA, 20 bp, Artificial Sequence
  Description of Artificial Sequence: Synthetic oligonucleotide
  Target: LAMA2; (-) strand; PAM type: NRG; PAM sequence: GAG
gaagaatctgaggctcagag

SEQ ID NO: 91119 - DNA, 20 bp, Artificial Sequence
  Description of Artificial Sequence: Synthetic oligonucleotide
  Target: LAMA2; (-) strand; PAM type: NRG; PAM sequence: AGG
atgaagaatctgaggctcag

SEQ ID NO: 91120 - DNA, 20 bp, Artificial Sequence
  Description of Artificial Sequence: Synthetic oligonucleotide
  Target: LAMA2; (-) strand; PAM type: NRG; PAM sequence: GAG
aatgaagaatctgaggctca

SEQ ID NO: 91121 - DNA, 20 bp, Artificial Sequence
  Description of Artificial Sequence: Synthetic oligonucleotide
  Target: LAMA2; (-) strand; PAM type: NRG; PAM sequence: CAG
caaatgaagaatctgaggct

SEQ ID NO: 91122 - DNA, 20 bp, Artificial Sequence
  Description of Artificial Sequence: Synthetic oligonucleotide
  Target: LAMA2; (-) strand; PAM type: NRG; PAM sequence: AGG
atttacaaatgaagaatctg

SEQ ID NO: 91123 - DNA, 20 bp, Artificial Sequence
  Description of Artificial Sequence: Synthetic oligonucleotide
  Target: LAMA2; (-) strand; PAM type: NRG; PAM sequence: GAG
catttacaaatgaagaatct

SEQ ID NO: 91124 - DNA, 20 bp, Artificial Sequence
  Description of Artificial Sequence: Synthetic oligonucleotide
  Target: LAMA2; (-) strand; PAM type: NRG; PAM sequence: AAG
tctattcacatttacaaatg

SEQ ID NO: 91125 - DNA, 20 bp, Artificial Sequence
  Description of Artificial Sequence: Synthetic oligonucleotide
  Target: LAMA2; (-) strand; PAM type: NRG; PAM sequence: AAG
gctggaaagacatttcattt

SEQ ID NO: 91126 - DNA, 20 bp, Artificial Sequence
  Description of Artificial Sequence: Synthetic oligonucleotide
  Target: LAMA2; (-) strand; PAM type: NRG; PAM sequence: AAG
gtactatgatacaggctgga

SEQ ID NO: 91127 - DNA, 20 bp, Artificial Sequence
  Description of Artificial Sequence: Synthetic oligonucleotide
  Target: LAMA2; (-) strand; PAM type: NRG; PAM sequence: TGG
ctgtgtactatgatacaggc

SEQ ID NO: 91128 - DNA, 20 bp, Artificial Sequence
  Description of Artificial Sequence: Synthetic oligonucleotide
  Target: LAMA2; (-) strand; PAM type: NRG; PAM sequence: AGG
ttttctgtgtactatgatac

SEQ ID NO: 91129 - DNA, 20 bp, Artificial Sequence
  Description of Artificial Sequence: Synthetic oligonucleotide
  Target: LAMA2; (-) strand; PAM type: NRG; PAM sequence: CAG
attttctgtgtactatgata

SEQ ID NO: 91130 - DNA, 20 bp, Artificial Sequence
  Description of Artificial Sequence: Synthetic oligonucleotide
  Target: LAMA2; (-) strand; PAM type: NRG; PAM sequence: TAG
ctagaatgactgctttttaa

SEQ ID NO: 91131 - DNA, 20 bp, Artificial Sequence
  Description of Artificial Sequence: Synthetic oligonucleotide
  Target: LAMA2; (-) strand; PAM type: NRG; PAM sequence: TAG
tgtatccttatagcctagcc

SEQ ID NO: 91132 - DNA, 20 bp, Artificial Sequence
  Description of Artificial Sequence: Synthetic oligonucleotide
  Target: LAMA2; (-) strand; PAM type: NRG; PAM sequence: TAG
acctttgtatccttatagcc

SEQ ID NO: 91133 - DNA, 20 bp, Artificial Sequence
  Description of Artificial Sequence: Synthetic oligonucleotide
  Target: LAMA2; (-) strand; PAM type: NRG; PAM sequence: TAG
tgtccacctttgtatcctta

SEQ ID NO: 91134 - DNA, 20 bp, Artificial Sequence
  Description of Artificial Sequence: Synthetic oligonucleotide
  Target: LAMA2; (-) strand; PAM type: NRG; PAM sequence: CAG
tttatattatcataaatgta

SEQ ID NO: 91135 - DNA, 20 bp, Artificial Sequence
  Description of Artificial Sequence: Synthetic oligonucleotide
  Target: LAMA2; (-) strand; PAM type: NRG; PAM sequence: CAG
tgcttccttcttagttctac

SEQ ID NO: 91136 - DNA, 20 bp, Artificial Sequence
  Description of Artificial Sequence: Synthetic oligonucleotide
  Target: LAMA2; (-) strand; PAM type: NRG; PAM sequence: TAG
agaattcattgcttccttct

SEQ ID NO: 91137 - DNA, 20 bp, Artificial Sequence
  Description of Artificial Sequence: Synthetic oligonucleotide
  Target: LAMA2; (-) strand; PAM type: NRG; PAM sequence: AAG
agtgtattaaatgctaacac

SEQ ID NO: 91138 - DNA, 20 bp, Artificial Sequence
  Description of Artificial Sequence: Synthetic oligonucleotide
  Target: LAMA2; (-) strand; PAM type: NRG; PAM sequence: AAG
cttttgcagctatttattaa

SEQ ID NO: 91139 - DNA, 20 bp, Artificial Sequence
  Description of Artificial Sequence: Synthetic oligonucleotide
  Target: LAMA2; (-) strand; PAM type: NRG; PAM sequence: CAG
gacagaaactgatacttttg

SEQ ID NO: 91140 - DNA, 20 bp, Artificial Sequence
  Description of Artificial Sequence: Synthetic oligonucleotide
  Target: LAMA2; (-) strand; PAM type: NRG; PAM sequence: CAG
cgagtaagagcagtaactga

SEQ ID NO: 91141 - DNA, 20 bp, Artificial Sequence
  Description of Artificial Sequence: Synthetic oligonucleotide
  Target: LAMA2; (-) strand; PAM type: NRG; PAM sequence: CAG
aatcccacatcgagtaagag

SEQ ID NO: 91142 - DNA, 20 bp, Artificial Sequence
  Description of Artificial Sequence: Synthetic oligonucleotide
  Target: LAMA2; (-) strand; PAM type: NRG; PAM sequence: GAG
ttcaatcccacatcgagtaa

SEQ ID NO: 91143 - DNA, 20 bp, Artificial Sequence
  Description of Artificial Sequence: Synthetic oligonucleotide
  Target: LAMA2; (-) strand; PAM type: NRG; PAM sequence: AAG
ttttcaatcccacatcgagt

SEQ ID NO: 91144 - DNA, 20 bp, Artificial Sequence
  Description of Artificial Sequence: Synthetic oligonucleotide
  Target: LAMA2; (-) strand; PAM type: NRG; PAM sequence: GAG
aacattttcaatcccacatc

SEQ ID NO: 91145 - DNA, 20 bp, Artificial Sequence
  Description of Artificial Sequence: Synthetic oligonucleotide
  Target: LAMA2; (-) strand; PAM type: NRG; PAM sequence: AAG
gttttttatatatatatagc

SEQ ID NO: 91146 - DNA, 20 bp, Artificial Sequence
  Description of Artificial Sequence: Synthetic oligonucleotide
  Target: LAMA2; (-) strand; PAM type: NRG; PAM sequence: TAG
atttgttttttatatatata

SEQ ID NO: 91147 - DNA, 20 bp, Artificial Sequence
  Description of Artificial Sequence: Synthetic oligonucleotide
  Target: LAMA2; (-) strand; PAM type: NRG; PAM sequence: CAG
ctatattacactaaaacaac

SEQ ID NO: 91148 - DNA, 20 bp, Artificial Sequence
  Description of Artificial Sequence: Synthetic oligonucleotide
  Target: LAMA2; (-) strand; PAM type: NRG; PAM sequence: AAG
actacatttcccaccagagt

SEQ ID NO: 91149 - DNA, 20 bp, Artificial Sequence
  Description of Artificial Sequence: Synthetic oligonucleotide
  Target: LAMA2; (-) strand; PAM type: NRG; PAM sequence: GAG
ttttactacatttcccacca

SEQ ID NO: 91150 - DNA, 20 bp, Artificial Sequence
  Description of Artificial Sequence: Synthetic oligonucleotide
  Target: LAMA2; (-) strand; PAM type: NRG; PAM sequence: CAG
tgttttactacatttcccac

SEQ ID NO: 91151 - DNA, 20 bp, Artificial Sequence
  Description of Artificial Sequence: Synthetic oligonucleotide
  Target: LAMA2; (-) strand; PAM type: NRG; PAM sequence: AAG
gttgtcttggtgctgcctta

SEQ ID NO: 91152 - DNA, 20 bp, Artificial Sequence
  Description of Artificial Sequence: Synthetic oligonucleotide
  Target: LAMA2; (-) strand; PAM type: NRG; PAM sequence: TGG
ctatttcagaaacgttgtct

SEQ ID NO: 91153 - DNA, 20 bp, Artificial Sequence
  Description of Artificial Sequence: Synthetic oligonucleotide
  Target: LAMA2; (-) strand; PAM type: NRG; PAM sequence: CAG
gaataatattggaactattt

SEQ ID NO: 91154 - DNA, 20 bp, Artificial Sequence
  Description of Artificial Sequence: Synthetic oligonucleotide
  Target: LAMA2; (-) strand; PAM type: NRG; PAM sequence: TGG
caagccactatgaataatat

SEQ ID NO: 91155 - DNA, 20 bp, Artificial Sequence
  Description of Artificial Sequence: Synthetic oligonucleotide
  Target: LAMA2; (-) strand; PAM type: NRG; PAM sequence: AAG
gagagaggacataattatac

SEQ ID NO: 91156 - DNA, 20 bp, Artificial Sequence
  Description of Artificial Sequence: Synthetic oligonucleotide
  Target: LAMA2; (-) strand; PAM type: NRG; PAM sequence: AGG
aagatgatggatgaagagag

SEQ ID NO: 91157 - DNA, 20 bp, Artificial Sequence
  Description of Artificial Sequence: Synthetic oligonucleotide
  Target: LAMA2; (-) strand; PAM type: NRG; PAM sequence: GAG
aaagatgatggatgaagaga

SEQ ID NO: 91158 - DNA, 20 bp, Artificial Sequence
  Description of Artificial Sequence: Synthetic oligonucleotide
  Target: LAMA2; (-) strand; PAM type: NRG; PAM sequence: GAG
gaaaagatgatggatgaaga

SEQ ID NO: 91159 - DNA, 20 bp, Artificial Sequence
  Description of Artificial Sequence: Synthetic oligonucleotide
  Target: LAMA2; (-) strand; PAM type: NRG; PAM sequence: GAG
cagaaaagatgatggatgaa

SEQ ID NO: 91160 - DNA, 20 bp, Artificial Sequence
  Description of Artificial Sequence: Synthetic oligonucleotide
  Target: LAMA2; (-) strand; PAM type: NRG; PAM sequence: AAG
tacagaaaagatgatggatg

SEQ ID NO: 91161 - DNA, 20 bp, Artificial Sequence
  Description of Artificial Sequence: Synthetic oligonucleotide
  Target: LAMA2; (-) strand; PAM type: NRG; PAM sequence: TGG
tgaaaatacagaaaagatga

SEQ ID NO: 91162 - DNA, 20 bp, Artificial Sequence
  Description of Artificial Sequence: Synthetic oligonucleotide
  Target: LAMA2; (-) strand; PAM type: NRG; PAM sequence: AAG
tatgccttgaaaatacagaa

SEQ ID NO: 91163 - DNA, 20 bp, Artificial Sequence
  Description of Artificial Sequence: Synthetic oligonucleotide
  Target: LAMA2; (-) strand; PAM type: NRG; PAM sequence: CAG
atttttatgccttgaaaata

SEQ ID NO: 91164 - DNA, 20 bp, Artificial Sequence
  Description of Artificial Sequence: Synthetic oligonucleotide
  Target: LAMA2; (-) strand; PAM type: NRG; PAM sequence: TAG
gtcaactaagtcaaatgctt

SEQ ID NO: 91165 - DNA, 20 bp, Artificial Sequence
  Description of Artificial Sequence: Synthetic oligonucleotide
  Target: LAMA2; (-) strand; PAM type: NRG; PAM sequence: AAG
ctatcaaagaattgtcaact

SEQ ID NO: 91166 - DNA, 20 bp, Artificial Sequence
  Description of Artificial Sequence: Synthetic oligonucleotide
  Target: LAMA2; (-) strand; PAM type: NRG; PAM sequence: AAG
tagagatgcatgagctatca

SEQ ID NO: 91167 - DNA, 20 bp, Artificial Sequence
  Description of Artificial Sequence: Synthetic oligonucleotide
  Target: LAMA2; (-) strand; PAM type: NRG; PAM sequence: GAG
actaaattttagagatgcat

SEQ ID NO: 91168 - DNA, 20 bp, Artificial Sequence
  Description of Artificial Sequence: Synthetic oligonucleotide
  Target: LAMA2; (-) strand; PAM type: NRG; PAM sequence: GAG
taatatagtactaaatttta

SEQ ID NO: 91169 - DNA, 20 bp, Artificial Sequence
  Description of Artificial Sequence: Synthetic oligonucleotide
  Target: LAMA2; (-) strand; PAM type: NRG; PAM sequence: TAG
aataatatagtactaaattt

SEQ ID NO: 91170 - DNA, 20 bp, Artificial Sequence
  Description of Artificial Sequence: Synthetic oligonucleotide
  Target: LAMA2; (-) strand; PAM type: NRG; PAM sequence: TAG
acataatgttggcaataata

SEQ ID NO: 91171 - DNA, 20 bp, Artificial Sequence
  Description of Artificial Sequence: Synthetic oligonucleotide
  Target: LAMA2; (-) strand; PAM type: NRG; PAM sequence: TGG
ttcatttaaatacataatgt

SEQ ID NO: 91172 - DNA, 20 bp, Artificial Sequence
  Description of Artificial Sequence: Synthetic oligonucleotide
  Target: LAMA2; (-) strand; PAM type: NRG; PAM sequence: AAG
atggtcattctcttgatatc

SEQ ID NO: 91173 - DNA, 20 bp, Artificial Sequence
  Description of Artificial Sequence: Synthetic oligonucleotide
  Target: LAMA2; (-) strand; PAM type: NRG; PAM sequence: TGG
tttttttttccccttcagta

SEQ ID NO: 91174 - DNA, 20 bp, Artificial Sequence
  Description of Artificial Sequence: Synthetic oligonucleotide
  Target: LAMA2; (-) strand; PAM type: NRG; PAM sequence: CAG
gtttatttttttttcccctt

SEQ ID NO: 91175 - DNA, 20 bp, Artificial Sequence
  Description of Artificial Sequence: Synthetic oligonucleotide
  Target: LAMA2; (-) strand; PAM type: NRG; PAM sequence: CAG
gttactcatgaagaaggctg

SEQ ID NO: 91176 - DNA, 20 bp, Artificial Sequence
  Description of Artificial Sequence: Synthetic oligonucleotide
  Target: LAMA2; (-) strand; PAM type: NRG; PAM sequence: AGG
tcaagtgttactcatgaaga

SEQ ID NO: 91177 - DNA, 20 bp, Artificial Sequence
  Description of Artificial Sequence: Synthetic oligonucleotide
  Target: LAMA2; (-) strand; PAM type: NRG; PAM sequence: AAG
ttcaagtgttactcatgaag

SEQ ID NO: 91178 - DNA, 20 bp, Artificial Sequence
  Description of Artificial Sequence: Synthetic oligonucleotide
  Target: LAMA2; (-) strand; PAM type: NRG; PAM sequence: AAG
agtttcaagtgttactcatg

SEQ ID NO: 91179 - DNA, 20 bp, Artificial Sequence
  Description of Artificial Sequence: Synthetic oligonucleotide
  Target: LAMA2; (-) strand; PAM type: NRG; PAM sequence: AAG
ttaatgtgtttaacagtttc

SEQ ID NO: 91180 - DNA, 20 bp, Artificial Sequence
  Description of Artificial Sequence: Synthetic oligonucleotide
  Target: LAMA2; (-) strand; PAM type: NRG; PAM sequence: CAG
tgggattttaatgtgtttaa

SEQ ID NO: 91181 - DNA, 20 bp, Artificial Sequence
  Description of Artificial Sequence: Synthetic oligonucleotide
  Target: LAMA2; (-) strand; PAM type: NRG; PAM sequence: GGG
ggttctgctatttgttaaat

SEQ ID NO: 91182 - DNA, 20 bp, Artificial Sequence
  Description of Artificial Sequence: Synthetic oligonucleotide
  Target: LAMA2; (-) strand; PAM type: NRG; PAM sequence: TGG
aggttctgctatttgttaaa

SEQ ID NO: 91183 - DNA, 20 bp, Artificial Sequence
  Description of Artificial Sequence: Synthetic oligonucleotide
  Target: LAMA2; (-) strand; PAM type: NRG; PAM sequence: AGG
gagcaatcccaatgttcatt

SEQ ID NO: 91184 - DNA, 20 bp, Artificial Sequence
  Description of Artificial Sequence: Synthetic oligonucleotide
  Target: LAMA2; (-) strand; PAM type: NRG; PAM sequence: TAG
tgagcaatcccaatgttcat

SEQ ID NO: 91185 - DNA, 20 bp, Artificial Sequence
  Description of Artificial Sequence: Synthetic oligonucleotide
  Target: LAMA2; (-) strand; PAM type: NRG; PAM sequence: GAG
attccacattagtactcact

SEQ ID NO: 91186 - DNA, 20 bp, Artificial Sequence
  Description of Artificial Sequence: Synthetic oligonucleotide
  Target: LAMA2; (-) strand; PAM type: NRG; PAM sequence: TAG
ttcccagtaatattccacat

SEQ ID NO: 91187 - DNA, 20 bp, Artificial Sequence
  Description of Artificial Sequence: Synthetic oligonucleotide
  Target: LAMA2; (-) strand; PAM type: NRG; PAM sequence: CAG
caacactcaaacatctttcc

SEQ ID NO: 91188 - DNA, 20 bp, Artificial Sequence
  Description of Artificial Sequence: Synthetic oligonucleotide
  Target: LAMA2; (-) strand; PAM type: NRG; PAM sequence: GAG
gtgtaaccattctgagctat

SEQ ID NO: 91189 - DNA, 20 bp, Artificial Sequence
  Description of Artificial Sequence: Synthetic oligonucleotide
  Target: LAMA2; (-) strand; PAM type: NRG; PAM sequence: GAG
ttaatctgtgtaaccattct

SEQ ID NO: 91190 - DNA, 20 bp, Artificial Sequence
  Description of Artificial Sequence: Synthetic oligonucleotide
  Target: LAMA2; (-) strand; PAM type: NRG; PAM sequence: CAG
ttcatttgtcttttgaacaa

SEQ ID NO: 91191 - DNA, 20 bp, Artificial Sequence
  Description of Artificial Sequence: Synthetic oligonucleotide
  Target: LAMA2; (-) strand; PAM type: NRG; PAM sequence: CAG
tacaaaaacaaaaatatttt

SEQ ID NO: 91192 - DNA, 20 bp, Artificial Sequence
  Description of Artificial Sequence: Synthetic oligonucleotide
  Target: LAMA2; (-) strand; PAM type: NRG; PAM sequence: AAG
tttaagaaacagttttaaaa

SEQ ID NO: 91193 - DNA, 20 bp, Artificial Sequence
  Description of Artificial Sequence: Synthetic oligonucleotide
  Target: LAMA2; (-) strand; PAM type: NRG; PAM sequence: CAG
cagttgactactttaagaaa

SEQ ID NO: 91194 - DNA, 20 bp, Artificial Sequence
  Description of Artificial Sequence: Synthetic oligonucleotide
  Target: LAMA2; (-) strand; PAM type: NRG; PAM sequence: AAG
aatgagcagttgactacttt

SEQ ID NO: 91195 - DNA, 20 bp, Artificial Sequence
  Description of Artificial Sequence: Synthetic oligonucleotide
  Target: LAMA2; (-) strand; PAM type: NRG; PAM sequence: CAG
tttcaaaatagaagaatgag

SEQ ID NO: 91196 - DNA, 20 bp, Artificial Sequence
  Description of Artificial Sequence: Synthetic oligonucleotide
  Target: LAMA2; (-) strand; PAM type: NRG; PAM sequence: GAG
aaatttcaaaatagaagaat

SEQ ID NO: 91197 - DNA, 20 bp, Artificial Sequence
  Description of Artificial Sequence: Synthetic oligonucleotide
  Target: LAMA2; (-) strand; PAM type: NRG; PAM sequence: AAG
ttctggaaatttcaaaatag

SEQ ID NO: 91198 - DNA, 20 bp, Artificial Sequence
  Description of Artificial Sequence: Synthetic oligonucleotide
  Target: LAMA2; (-) strand; PAM type: NRG; PAM sequence: TAG
gagttctggaaatttcaaaa

SEQ ID NO: 91199 - DNA, 20 bp, Artificial Sequence
  Description of Artificial Sequence: Synthetic oligonucleotide
  Target: LAMA2; (-) strand; PAM type: NRG; PAM sequence: TGG
aaaacttaaacaaagagttc

SEQ ID NO: 91200 - DNA, 20 bp, Artificial Sequence
  Description of Artificial Sequence: Synthetic oligonucleotide
  Target: LAMA2; (-) strand; PAM type: NRG; PAM sequence: GAG
acatgcaaaacttaaacaaa

SEQ ID NO: 91201 - DNA, 20 bp, Artificial Sequence
  Description of Artificial Sequence: Synthetic oligonucleotide
  Target: LAMA2; (-) strand; PAM type: NRG; PAM sequence: AAG
tgacatgcaaaacttaaaca

SEQ ID NO: 91202 - DNA, 20 bp, Artificial Sequence
  Description of Artificial Sequence: Synthetic oligonucleotide
  Target: LAMA2; (-) strand; PAM type: NRG; PAM sequence: AAG
actgtatctagatacagtcc

SEQ ID NO: 91203 - DNA, 20 bp, Artificial Sequence
  Description of Artificial Sequence: Synthetic oligonucleotide
  Target: LAMA2; (-) strand; PAM type: NRG; PAM sequence: CAG
tgattaactgtatctagata

SEQ ID NO: 91204 - DNA, 20 bp, Artificial Sequence
  Description of Artificial Sequence: Synthetic oligonucleotide
  Target: LAMA2; (-) strand; PAM type: NRG; PAM sequence: TAG
gcagattgattaactgtatc

SEQ ID NO: 91205 - DNA, 20 bp, Artificial Sequence
  Description of Artificial Sequence: Synthetic oligonucleotide
  Target: LAMA2; (-) strand; PAM type: NRG; PAM sequence: CAG
caccacaatttactaaacag

SEQ ID NO: 91206 - DNA, 20 bp, Artificial Sequence
  Description of Artificial Sequence: Synthetic oligonucleotide
  Target: LAMA2; (-) strand; PAM type: NRG; PAM sequence: CAG
gatcaccacaatttactaaa

SEQ ID NO: 91207 - DNA, 20 bp, Artificial Sequence
  Description of Artificial Sequence: Synthetic oligonucleotide
  Target: LAMA2; (-) strand; PAM type: NRG; PAM sequence: TAG
actagttgattatcatacaa

SEQ ID NO: 91208 - DNA, 20 bp, Artificial Sequence
  Description of Artificial Sequence: Synthetic oligonucleotide
  Target: LAMA2; (-) strand; PAM type: NRG; PAM sequence: TAG
tgatttcatggttgatacac

SEQ ID NO: 91209 - DNA, 20 bp, Artificial Sequence
  Description of Artificial Sequence: Synthetic oligonucleotide
  Target: LAMA2; (-) strand; PAM type: NRG; PAM sequence: TGG
ttcagaattagatgatttca

SEQ ID NO: 91210 - DNA, 20 bp, Artificial Sequence
  Description of Artificial Sequence: Synthetic oligonucleotide
  Target: LAMA2; (-) strand; PAM type: NRG; PAM sequence: TAG
gatccttttaatttcagaat

SEQ ID NO: 91211 - DNA, 20 bp, Artificial Sequence
  Description of Artificial Sequence: Synthetic oligonucleotide
  Target: LAMA2; (-) strand; PAM type: NRG; PAM sequence: CAG
aattctgatccttttaattt

SEQ ID NO: 91212 - DNA, 20 bp, Artificial Sequence
  Description of Artificial Sequence: Synthetic oligonucleotide
  Target: LAMA2; (-) strand; PAM type: NRG; PAM sequence: TGG
atctaactgcctggaattaa

SEQ ID NO: 91213 - DNA, 20 bp, Artificial Sequence
  Description of Artificial Sequence: Synthetic oligonucleotide
  Target: LAMA2; (-) strand; PAM type: NRG; PAM sequence: TGG
tattgtgaaatctaactgcc

SEQ ID NO: 91214 - DNA, 20 bp, Artificial Sequence
  Description of Artificial Sequence: Synthetic oligonucleotide
  Target: LAMA2; (-) strand; PAM type: NRG; PAM sequence: CAG
tagaacttgaggccagagac

SEQ ID NO: 91215 - DNA, 20 bp, Artificial Sequence
  Description of Artificial Sequence: Synthetic oligonucleotide
  Target: LAMA2; (-) strand; PAM type: NRG; PAM sequence: GAG
atcattagaacttgaggcca

SEQ ID NO: 91216 - DNA, 20 bp, Artificial Sequence
  Description of Artificial Sequence: Synthetic oligonucleotide
  Target: LAMA2; (-) strand; PAM type: NRG; PAM sequence: CAG
ttatcattagaacttgaggc

SEQ ID NO: 91217 - DNA, 20 bp, Artificial Sequence
  Description of Artificial Sequence: Synthetic oligonucleotide
  Target: LAMA2; (-) strand; PAM type: NRG; PAM sequence: AGG
actgttatcattagaacttg

SEQ ID NO: 91218 - DNA, 20 bp, Artificial Sequence
  Description of Artificial Sequence: Synthetic oligonucleotide
  Target: LAMA2; (-) strand; PAM type: NRG; PAM sequence: GAG
aactgttatcattagaactt

SEQ ID NO: 91219 - DNA, 20 bp, Artificial Sequence
  Description of Artificial Sequence: Synthetic oligonucleotide
  Target: LAMA2; (-) strand; PAM type: NRG; PAM sequence: TAG
taaatggaaactgttatcat

SEQ ID NO: 91220 - DNA, 20 bp, Artificial Sequence
  Description of Artificial Sequence: Synthetic oligonucleotide
  Target: LAMA2; (-) strand; PAM type: NRG; PAM sequence: TGG
gatttgacatagaagataaa

SEQ ID NO: 91221 - DNA, 20 bp, Artificial Sequence
  Description of Artificial Sequence: Synthetic oligonucleotide
  Target: LAMA2; (-) strand; PAM type: NRG; PAM sequence: AAG
acttgtttgatttgacatag

SEQ ID NO: 91222 - DNA, 20 bp, Artificial Sequence
  Description of Artificial Sequence: Synthetic oligonucleotide
  Target: LAMA2; (-) strand; PAM type: NRG; PAM sequence: TAG
attacttgtttgatttgaca

SEQ ID NO: 91223 - DNA, 20 bp, Artificial Sequence
  Description of Artificial Sequence: Synthetic oligonucleotide
  Target: LAMA2; (-) strand; PAM type: NRG; PAM sequence: AAG
gaataaaatcagaaaagtaa

SEQ ID NO: 91224 - DNA, 20 bp, Artificial Sequence
  Description of Artificial Sequence: Synthetic oligonucleotide
  Target: LAMA2; (-) strand; PAM type: NRG; PAM sequence: AAG
tcagatgaataaaatcagaa

SEQ ID NO: 91225 - DNA, 20 bp, Artificial Sequence
  Description of Artificial Sequence: Synthetic oligonucleotide
  Target: LAMA2; (-) strand; PAM type: NRG; PAM sequence: CAG
acatttcagatgaataaaat

SEQ ID NO: 91226 - DNA, 20 bp, Artificial Sequence
  Description of Artificial Sequence: Synthetic oligonucleotide
  Target: LAMA2; (-) strand; PAM type: NRG; PAM sequence: CAG
aaagactactagccacattt

SEQ ID NO: 91227 - DNA, 20 bp, Artificial Sequence
  Description of Artificial Sequence: Synthetic oligonucleotide
  Target: LAMA2; (-) strand; PAM type: NRG; PAM sequence: TAG
aaggatacaataaagactac

SEQ ID NO: 91228 - DNA, 20 bp, Artificial Sequence
  Description of Artificial Sequence: Synthetic oligonucleotide
  Target: LAMA2; (-) strand; PAM type: NRG; PAM sequence: AAG
ccatggcaaaggatacaata

SEQ ID NO: 91229 - DNA, 20 bp, Artificial Sequence
  Description of Artificial Sequence: Synthetic oligonucleotide
  Target: LAMA2; (-) strand; PAM type: NRG; PAM sequence: AGG
actaacaaactccatggcaa

SEQ ID NO: 91230 - DNA, 20 bp, Artificial Sequence
  Description of Artificial Sequence: Synthetic oligonucleotide
  Target: LAMA2; (-) strand; PAM type: NRG; PAM sequence: AAG
gactaacaaactccatggca

SEQ ID NO: 91231 - DNA, 20 bp, Artificial Sequence
  Description of Artificial Sequence: Synthetic oligonucleotide
  Target: LAMA2; (-) strand; PAM type: NRG; PAM sequence: TGG
acaatgactaacaaactcca

SEQ ID NO: 91232 - DNA, 20 bp, Artificial Sequence
  Description of Artificial Sequence: Synthetic oligonucleotide
  Target: LAMA2; (-) strand; PAM type: NRG; PAM sequence: CAG
atgaatagatgaatggaaaa

SEQ ID NO: 91233 - DNA, 20 bp, Artificial Sequence
  Description of Artificial Sequence: Synthetic oligonucleotide
  Target: LAMA2; (-) strand; PAM type: NRG; PAM sequence: TGG
ataataaatgaatagatgaa

SEQ ID NO: 91234 - DNA, 20 bp, Artificial Sequence
  Description of Artificial Sequence: Synthetic oligonucleotide
  Target: LAMA2; (-) strand; PAM type: NRG; PAM sequence: TAG
atacttaaataataaatgaa

SEQ ID NO: 91235 - DNA, 20 bp, Artificial Sequence
  Description of Artificial Sequence: Synthetic oligonucleotide
  Target: LAMA2; (-) strand; PAM type: NRG; PAM sequence: AAG
agacagataaatgtatacaa

SEQ ID NO: 91236 - DNA, 20 bp, Artificial Sequence
  Description of Artificial Sequence: Synthetic oligonucleotide
  Target: LAMA2; (-) strand; PAM type: NRG; PAM sequence: CAG
tggacggatgggtagataga

SEQ ID NO: 91237 - DNA, 20 bp, Artificial Sequence
  Description of Artificial Sequence: Synthetic oligonucleotide
  Target: LAMA2; (-) strand; PAM type: NRG; PAM sequence: TAG
tgggtggacggatgggtaga

SEQ ID NO: 91238 - DNA, 20 bp, Artificial Sequence
  Description of Artificial Sequence: Synthetic oligonucleotide
  Target: LAMA2; (-) strand; PAM type: NRG; PAM sequence: TAG
tggatgggtggacggatggg

SEQ ID NO: 91239 - DNA, 20 bp, Artificial Sequence
  Description of Artificial Sequence: Synthetic oligonucleotide
  Target: LAMA2; (-) strand; PAM type: NRG; PAM sequence: GGG
ggatggatgggtggacggat

SEQ ID NO: 91240 - DNA, 20 bp, Artificial Sequence
  Description of Artificial Sequence: Synthetic oligonucleotide
  Target: LAMA2; (-) strand; PAM type: NRG; PAM sequence: TGG
tggatggatgggtggacgga

SEQ ID NO: 91241 - DNA, 20 bp, Artificial Sequence
  Description of Artificial Sequence: Synthetic oligonucleotide
  Target: LAMA2; (-) strand; PAM type: NRG; PAM sequence: CGG
tggatggatggatgggtgga

SEQ ID NO: 91242 - DNA, 20 bp, Artificial Sequence
  Description of Artificial Sequence: Synthetic oligonucleotide
  Target: LAMA2; (-) strand; PAM type: NRG; PAM sequence: TGG
tggatggatggatggatggg

SEQ ID NO: 91243 - DNA, 20 bp, Artificial Sequence
  Description of Artificial Sequence: Synthetic oligonucleotide
  Target: LAMA2; (-) strand; PAM type: NRG; PAM sequence: GGG
gaatggatggatggatggat

SEQ ID NO: 91244 - DNA, 20 bp, Artificial Sequence
  Description of Artificial Sequence: Synthetic oligonucleotide
  Target: LAMA2; (-) strand; PAM type: NRG; PAM sequence: TGG
tgaatggatggatggatgga

SEQ ID NO: 91245 - DNA, 20 bp, Artificial Sequence
  Description of Artificial Sequence: Synthetic oligonucleotide
  Target: LAMA2; (-) strand; PAM type: NRG; PAM sequence: TGG
ttgatgaatggatggatgga

SEQ ID NO: 91246 - DNA, 20 bp, Artificial Sequence
  Description of Artificial Sequence: Synthetic oligonucleotide
  Target: LAMA2; (-) strand; PAM type: NRG; PAM sequence: TGG
tgaattgatgaatggatgga

SEQ ID NO: 91247 - DNA, 20 bp, Artificial Sequence
  Description of Artificial Sequence: Synthetic oligonucleotide
  Target: LAMA2; (-) strand; PAM type: NRG; PAM sequence: TGG
tgggtgaattgatgaatgga

SEQ ID NO: 91248 - DNA, 20 bp, Artificial Sequence
  Description of Artificial Sequence: Synthetic oligonucleotide
  Target: LAMA2; (-) strand; PAM type: NRG; PAM sequence: TGG
cgaatgggtgaattgatgaa

SEQ ID NO: 91249 - DNA, 20 bp, Artificial Sequence
  Description of Artificial Sequence: Synthetic oligonucleotide
  Target: LAMA2; (-) strand; PAM type: NRG; PAM sequence: GGG
tcagtagacttttgtcgaat

SEQ ID NO: 91250 - DNA, 20 bp, Artificial Sequence
  Description of Artificial Sequence: Synthetic oligonucleotide
  Target: LAMA2; (-) strand; PAM type: NRG; PAM sequence: TGG
ttcagtagacttttgtcgaa

SEQ ID NO: 91251 - DNA, 20 bp, Artificial Sequence
  Description of Artificial Sequence: Synthetic oligonucleotide
  Target: LAMA2; (-) strand; PAM type: NRG; PAM sequence: TAG
ccatacatgttcatgttcag

SEQ ID NO: 91252 - DNA, 20 bp, Artificial Sequence
  Description of Artificial Sequence: Synthetic oligonucleotide
  Target: LAMA2; (-) strand; PAM type: NRG; PAM sequence: CAG
tctccatacatgttcatgtt

SEQ ID NO: 91253 - DNA, 20 bp, Artificial Sequence
  Description of Artificial Sequence: Synthetic oligonucleotide
  Target: LAMA2; (-) strand; PAM type: NRG; PAM sequence: AGG
atcttgccatctatatatgc

SEQ ID NO: 91254 - DNA, 20 bp, Artificial Sequence
  Description of Artificial Sequence: Synthetic oligonucleotide
  Target: LAMA2; (-) strand; PAM type: NRG; PAM sequence: CAG
tatcttgccatctatatatg

SEQ ID NO: 91255 - DNA, 20 bp, Artificial Sequence
  Description of Artificial Sequence: Synthetic oligonucleotide
  Target: LAMA2; (-) strand; PAM type: NRG; PAM sequence: CAG
tatgggctactccttgagaa

SEQ ID NO: 91256 - DNA, 20 bp, Artificial Sequence
  Description of Artificial Sequence: Synthetic oligonucleotide
  Target: LAMA2; (-) strand; PAM type: NRG; PAM sequence: GAG
gagcttatgggctactcctt

SEQ ID NO: 91257 - DNA, 20 bp, Artificial Sequence
  Description of Artificial Sequence: Synthetic oligonucleotide
  Target: LAMA2; (-) strand; PAM type: NRG; PAM sequence: GGG
ttatgttggcatgagcttat

SEQ ID NO: 91258 - DNA, 20 bp, Artificial Sequence
  Description of Artificial Sequence: Synthetic oligonucleotide
  Target: LAMA2; (-) strand; PAM type: NRG; PAM sequence: TGG
cttatgttggcatgagctta

SEQ ID NO: 91259 - DNA, 20 bp, Artificial Sequence
  Description of Artificial Sequence: Synthetic oligonucleotide
  Target: LAMA2; (-) strand; PAM type: NRG; PAM sequence: GAG
gccagtacttatgttggcat

SEQ ID NO: 91260 - DNA, 20 bp, Artificial Sequence
  Description of Artificial Sequence: Synthetic oligonucleotide
  Target: LAMA2; (-) strand; PAM type: NRG; PAM sequence: TGG
actaaagccagtacttatgt

SEQ ID NO: 91261 - DNA, 20 bp, Artificial Sequence
  Description of Artificial Sequence: Synthetic oligonucleotide
  Target: LAMA2; (-) strand; PAM type: NRG; PAM sequence: CAG
ttttgaagagttactaaagc

SEQ ID NO: 91262 - DNA, 20 bp, Artificial Sequence
  Description of Artificial Sequence: Synthetic oligonucleotide
  Target: LAMA2; (-) strand; PAM type: NRG; PAM sequence: AAG
ggggttttgaagagttacta

SEQ ID NO: 91263 - DNA, 20 bp, Artificial Sequence
  Description of Artificial Sequence: Synthetic oligonucleotide
  Target: LAMA2; (-) strand; PAM type: NRG; PAM sequence: GAG
taacacaacggggttttgaa

SEQ ID NO: 91264 - DNA, 20 bp, Artificial Sequence
  Description of Artificial Sequence: Synthetic oligonucleotide
  Target: LAMA2; (-) strand; PAM type: NRG; PAM sequence: AAG
cttaacacaacggggttttg

SEQ ID NO: 91265 - DNA, 20 bp, Artificial Sequence
  Description of Artificial Sequence: Synthetic oligonucleotide
  Target: LAMA2; (-) strand; PAM type: NRG; PAM sequence: GGG
taagtctccttaacacaacg

SEQ ID NO: 91266 - DNA, 20 bp, Artificial Sequence
  Description of Artificial Sequence: Synthetic oligonucleotide
  Target: LAMA2; (-) strand; PAM type: NRG; PAM sequence: GGG
ataagtctccttaacacaac

SEQ ID NO: 91267 - DNA, 20 bp, Artificial Sequence
  Description of Artificial Sequence: Synthetic oligonucleotide
  Target: LAMA2; (-) strand; PAM type: NRG; PAM sequence: CGG
gataagtctccttaacacaa

SEQ ID NO: 91268 - DNA, 20 bp, Artificial Sequence
  Description of Artificial Sequence: Synthetic oligonucleotide
  Target: LAMA2; (-) strand; PAM type: NRG; PAM sequence: AAG
acagaatttctgggcctgat

SEQ ID NO: 91269 - DNA, 20 bp, Artificial Sequence
  Description of Artificial Sequence: Synthetic oligonucleotide
  Target: LAMA2; (-) strand; PAM type: NRG; PAM sequence: GGG
tatctagaaacagaatttct

SEQ ID NO: 91270 - DNA, 20 bp, Artificial Sequence
  Description of Artificial Sequence: Synthetic oligonucleotide
  Target: LAMA2; (-) strand; PAM type: NRG; PAM sequence: TGG
atatctagaaacagaatttc

SEQ ID NO: 91271 - DNA, 20 bp, Artificial Sequence
  Description of Artificial Sequence: Synthetic oligonucleotide
  Target: LAMA2; (-) strand; PAM type: NRG; PAM sequence: CAG
tttggatatatatctagaaa

SEQ ID NO: 91272 - DNA, 20 bp, Artificial Sequence
  Description of Artificial Sequence: Synthetic oligonucleotide
  Target: LAMA2; (-) strand; PAM type: NRG; PAM sequence: TAG
agttcttttggatatatatc

SEQ ID NO: 91273 - DNA, 20 bp, Artificial Sequence
  Description of Artificial Sequence: Synthetic oligonucleotide
  Target: LAMA2; (-) strand; PAM type: NRG; PAM sequence: TGG
atacctattttcagttcttt

SEQ ID NO: 91274 - DNA, 20 bp, Artificial Sequence
  Description of Artificial Sequence: Synthetic oligonucleotide
  Target: LAMA2; (-) strand; PAM type: NRG; PAM sequence: CAG
gaacacataatacctatttt

SEQ ID NO: 91275 - DNA, 20 bp, Artificial Sequence
  Description of Artificial Sequence: Synthetic oligonucleotide
  Target: LAMA2; (-) strand; PAM type: NRG; PAM sequence: GAG
tttggattgtttctaccttc

SEQ ID NO: 91276 - DNA, 20 bp, Artificial Sequence
  Description of Artificial Sequence: Synthetic oligonucleotide
  Target: LAMA2; (-) strand; PAM type: NRG; PAM sequence: TGG
ttcatcagttgatgaatatt

SEQ ID NO: 91277 - DNA, 20 bp, Artificial Sequence
  Description of Artificial Sequence: Synthetic oligonucleotide
  Target: LAMA2; (-) strand; PAM type: NRG; PAM sequence: CAG
cattttgtttattcattcat

SEQ ID NO: 91278 - DNA, 20 bp, Artificial Sequence
  Description of Artificial Sequence: Synthetic oligonucleotide
  Target: LAMA2; (-) strand; PAM type: NRG; PAM sequence: CAG
aacttcattgcagcatgtat

SEQ ID NO: 91279 - DNA, 20 bp, Artificial Sequence
  Description of Artificial Sequence: Synthetic oligonucleotide
  Target: LAMA2; (-) strand; PAM type: NRG; PAM sequence: CAG
tattctagataacttcattg

SEQ ID NO: 91280 - DNA, 20 bp, Artificial Sequence
  Description of Artificial Sequence: Synthetic oligonucleotide
  Target: LAMA2; (-) strand; PAM type: NRG; PAM sequence: TAG
tgctatgaagttacctattc

SEQ ID NO: 91281 - DNA, 20 bp, Artificial Sequence
  Description of Artificial Sequence: Synthetic oligonucleotide
  Target: LAMA2; (-) strand; PAM type: NRG; PAM sequence: AAG
aatctgcttttgttgctatg

SEQ ID NO: 91282 - DNA, 20 bp, Artificial Sequence
  Description of Artificial Sequence: Synthetic oligonucleotide
  Target: LAMA2; (-) strand; PAM type: NRG; PAM sequence: CAG
aaaacccagaatccattagg

SEQ ID NO: 91283 - DNA, 20 bp, Artificial Sequence
  Description of Artificial Sequence: Synthetic oligonucleotide
  Target: LAMA2; (-) strand; PAM type: NRG; PAM sequence: AGG
aagaaaacccagaatccatt

SEQ ID NO: 91284 - DNA, 20 bp, Artificial Sequence
  Description of Artificial Sequence: Synthetic oligonucleotide
  Target: LAMA2; (-) strand; PAM type: NRG; PAM sequence: TAG
aaagaaaacccagaatccat

SEQ ID NO: 91285 - DNA, 20 bp, Artificial Sequence
  Description of Artificial Sequence: Synthetic oligonucleotide
  Target: LAMA2; (-) strand; PAM type: NRG; PAM sequence: CAG
tatcagcccaaaagaaaacc

SEQ ID NO: 91286 - DNA, 20 bp, Artificial Sequence
  Description of Artificial Sequence: Synthetic oligonucleotide
  Target: LAMA2; (-) strand; PAM type: NRG; PAM sequence: AAG
aagacattttatcagcccaa

SEQ ID NO: 91287 - DNA, 20 bp, Artificial Sequence
  Description of Artificial Sequence: Synthetic oligonucleotide
  Target: LAMA2; (-) strand; PAM type: NRG; PAM sequence: CAG
ctaattctaagacattttat

SEQ ID NO: 91288 - DNA, 20 bp, Artificial Sequence
  Description of Artificial Sequence: Synthetic oligonucleotide
  Target: LAMA2; (-) strand; PAM type: NRG; PAM sequence: AAG
tacgacatatatctaattct

SEQ ID NO: 91289 - DNA, 20 bp, Artificial Sequence
  Description of Artificial Sequence: Synthetic oligonucleotide
  Target: LAMA2; (-) strand; PAM type: NRG; PAM sequence: TAG
aattgtacaattctgtgatt

SEQ ID NO: 91290 - DNA, 20 bp, Artificial Sequence
  Description of Artificial Sequence: Synthetic oligonucleotide
  Target: LAMA2; (-) strand; PAM type: NRG; PAM sequence: AGG
ggaactttgacatttggggt

SEQ ID NO: 91291 - DNA, 20 bp, Artificial Sequence
  Description of Artificial Sequence: Synthetic oligonucleotide
  Target: LAMA2; (-) strand; PAM type: NRG; PAM sequence: TAG
aggaactttgacatttgggg

SEQ ID NO: 91292 - DNA, 20 bp, Artificial Sequence
  Description of Artificial Sequence: Synthetic oligonucleotide
  Target: LAMA2; (-) strand; PAM type: NRG; PAM sequence: GGG
gagaggaactttgacatttg

SEQ ID NO: 91293 - DNA, 20 bp, Artificial Sequence
  Description of Artificial Sequence: Synthetic oligonucleotide
  Target: LAMA2; (-) strand; PAM type: NRG; PAM sequence: GGG
agagaggaactttgacattt

SEQ ID NO: 91294 - DNA, 20 bp, Artificial Sequence
  Description of Artificial Sequence: Synthetic oligonucleotide
  Target: LAMA2; (-) strand; PAM type: NRG; PAM sequence: TGG
tagagaggaactttgacatt

SEQ ID NO: 91295 - DNA, 20 bp, Artificial Sequence
  Description of Artificial Sequence: Synthetic oligonucleotide
  Target: LAMA2; (-) strand; PAM type: NRG; PAM sequence: AGG
atttcaagttgtacatagag

SEQ ID NO: 91296 - DNA, 20 bp, Artificial Sequence
  Description of Artificial Sequence: Synthetic oligonucleotide
  Target: LAMA2; (-) strand; PAM type: NRG; PAM sequence: GAG
catttcaagttgtacataga

SEQ ID NO: 91297 - DNA, 20 bp, Artificial Sequence
  Description of Artificial Sequence: Synthetic oligonucleotide
  Target: LAMA2; (-) strand; PAM type: NRG; PAM sequence: GAG
agcatttcaagttgtacata

SEQ ID NO: 91298 - DNA, 20 bp, Artificial Sequence
  Description of Artificial Sequence: Synthetic oligonucleotide
  Target: LAMA2; (-) strand; PAM type: NRG; PAM sequence: TAG
taagcatttcaagttgtaca

SEQ ID NO: 91299 - DNA, 20 bp, Artificial Sequence
  Description of Artificial Sequence: Synthetic oligonucleotide
  Target: LAMA2; (-) strand; PAM type: NRG; PAM sequence: AAG
catataaaattaagcatttc

SEQ ID NO: 91300 - DNA, 20 bp, Artificial Sequence
  Description of Artificial Sequence: Synthetic oligonucleotide
  Target: LAMA2; (-) strand; PAM type: NRG; PAM sequence: AAG
aattcacatcatataaaatt

SEQ ID NO: 91301 - DNA, 20 bp, Artificial Sequence
  Description of Artificial Sequence: Synthetic oligonucleotide
  Target: LAMA2; (-) strand; PAM type: NRG; PAM sequence: TAG
tacttttcttgtcattagtt

SEQ ID NO: 91302 - DNA, 20 bp, Artificial Sequence
  Description of Artificial Sequence: Synthetic oligonucleotide
  Target: LAMA2; (-) strand; PAM type: NRG; PAM sequence: TAG
gcatttacttttcttgtcat

SEQ ID NO: 91303 - DNA, 20 bp, Artificial Sequence
  Description of Artificial Sequence: Synthetic oligonucleotide
  Target: LAMA2; (-) strand; PAM type: NRG; PAM sequence: AGG
aatgaaaaatgcagtgtcac

SEQ ID NO: 91304 - DNA, 20 bp, Artificial Sequence
  Description of Artificial Sequence: Synthetic oligonucleotide
  Target: LAMA2; (-) strand; PAM type: NRG; PAM sequence: CAG
caatgaaaaatgcagtgtca

SEQ ID NO: 91305 - DNA, 20 bp, Artificial Sequence
  Description of Artificial Sequence: Synthetic oligonucleotide
  Target: LAMA2; (-) strand; PAM type: NRG; PAM sequence: CAG
aaccctgtcaatgaaaaatg

SEQ ID NO: 91306 - DNA, 20 bp, Artificial Sequence
  Description of Artificial Sequence: Synthetic oligonucleotide
  Target: LAMA2; (-) strand; PAM type: NRG; PAM sequence: AGG
gcttttttcccccctcactg

SEQ ID NO: 91307 - DNA, 20 bp, Artificial Sequence
  Description of Artificial Sequence: Synthetic oligonucleotide
  Target: LAMA2; (-) strand; PAM type: NRG; PAM sequence: GAG
tgcttttttcccccctcact

SEQ ID NO: 91308 - DNA, 20 bp, Artificial Sequence
  Description of Artificial Sequence: Synthetic oligonucleotide
  Target: LAMA2; (-) strand; PAM type: NRG; PAM sequence: AGG
atcactgtcctatagtgttt

SEQ ID NO: 91309 - DNA, 20 bp, Artificial Sequence
  Description of Artificial Sequence: Synthetic oligonucleotide
  Target: LAMA2; (-) strand; PAM type: NRG; PAM sequence: TAG
tatcactgtcctatagtgtt

SEQ ID NO: 91310 - DNA, 20 bp, Artificial Sequence
  Description of Artificial Sequence: Synthetic oligonucleotide
  Target: LAMA2; (-) strand; PAM type: NRG; PAM sequence: TAG
aggcaaatatcactgtccta

SEQ ID NO: 91311 - DNA, 20 bp, Artificial Sequence
  Description of Artificial Sequence: Synthetic oligonucleotide
  Target: LAMA2; (-) strand; PAM type: NRG; PAM sequence: AGG
ctggtagaaggttctagatt

SEQ ID NO: 91312 - DNA, 20 bp, Artificial Sequence
  Description of Artificial Sequence: Synthetic oligonucleotide
  Target: LAMA2; (-) strand; PAM type: NRG; PAM sequence: TAG
cctggtagaaggttctagat

SEQ ID NO: 91313 - DNA, 20 bp, Artificial Sequence
  Description of Artificial Sequence: Synthetic oligonucleotide
  Target: LAMA2; (-) strand; PAM type: NRG; PAM sequence: TAG
gacaacctggtagaaggttc

SEQ ID NO: 91314 - DNA, 20 bp, Artificial Sequence
  Description of Artificial Sequence: Synthetic oligonucleotide
  Target: LAMA2; (-) strand; PAM type: NRG; PAM sequence: AGG
atcttggacaacctggtaga

SEQ ID NO: 91315 - DNA, 20 bp, Artificial Sequence
  Description of Artificial Sequence: Synthetic oligonucleotide
  Target: LAMA2; (-) strand; PAM type: NRG; PAM sequence: AAG
catcttggacaacctggtag

SEQ ID NO: 91316 - DNA, 20 bp, Artificial Sequence
  Description of Artificial Sequence: Synthetic oligonucleotide
  Target: LAMA2; (-) strand; PAM type: NRG; PAM sequence: TAG
gcacatcttggacaacctgg

SEQ ID NO: 91317 - DNA, 20 bp, Artificial Sequence
  Description of Artificial Sequence: Synthetic oligonucleotide
  Target: LAMA2; (-) strand; PAM type: NRG; PAM sequence: TGG
ggggcacatcttggacaacc

SEQ ID NO: 91318 - DNA, 20 bp, Artificial Sequence
  Description of Artificial Sequence: Synthetic oligonucleotide
  Target: LAMA2; (-) strand; PAM type: NRG; PAM sequence: TGG
tattctctaggggcacatct

SEQ ID NO: 91319 - DNA, 20 bp, Artificial Sequence
  Description of Artificial Sequence: Synthetic oligonucleotide
  Target: LAMA2; (-) strand; PAM type: NRG; PAM sequence: GGG
ttgagtgctatattctctag

SEQ ID NO: 91320 - DNA, 20 bp, Artificial Sequence
  Description of Artificial Sequence: Synthetic oligonucleotide
  Target: LAMA2; (-) strand; PAM type: NRG; PAM sequence: GGG
attgagtgctatattctcta

SEQ ID NO: 91321 - DNA, 20 bp, Artificial Sequence
  Description of Artificial Sequence: Synthetic oligonucleotide
  Target: LAMA2; (-) strand; PAM type: NRG; PAM sequence: AGG
aattgagtgctatattctct

SEQ ID NO: 91322 - DNA, 20 bp, Artificial Sequence
  Description of Artificial Sequence: Synthetic oligonucleotide
  Target: LAMA2; (-) strand; PAM type: NRG; PAM sequence: TAG
taattgagtgctatattctc

SEQ ID NO: 91323 - DNA, 20 bp, Artificial Sequence
  Description of Artificial Sequence: Synthetic oligonucleotide
  Target: LAMA2; (-) strand; PAM type: NRG; PAM sequence: GAG
ctcatccaacactattaatt

SEQ ID NO: 91324 - DNA, 20 bp, Artificial Sequence
  Description of Artificial Sequence: Synthetic oligonucleotide
  Target: LAMA2; (-) strand; PAM type: NRG; PAM sequence: AGG
gatggcaccctctaaacaca

SEQ ID NO: 91325 - DNA, 20 bp, Artificial Sequence
  Description of Artificial Sequence: Synthetic oligonucleotide
  Target: LAMA2; (-) strand; PAM type: NRG; PAM sequence: AAG
agatggcaccctctaaacac

SEQ ID NO: 91326 - DNA, 20 bp, Artificial Sequence
  Description of Artificial Sequence: Synthetic oligonucleotide
  Target: LAMA2; (-) strand; PAM type: NRG; PAM sequence: TGG
cctggctgctgagtgccaga

SEQ ID NO: 91327 - DNA, 20 bp, Artificial Sequence
  Description of Artificial Sequence: Synthetic oligonucleotide
  Target: LAMA2; (-) strand; PAM type: NRG; PAM sequence: CAG
tcatcctggctgctgagtgc

SEQ ID NO: 91328 - DNA, 20 bp, Artificial Sequence
  Description of Artificial Sequence: Synthetic oligonucleotide
  Target: LAMA2; (-) strand; PAM type: NRG; PAM sequence: GAG
atggaatcatcctggctgct

SEQ ID NO: 91329 - DNA, 20 bp, Artificial Sequence
  Description of Artificial Sequence: Synthetic oligonucleotide
  Target: LAMA2; (-) strand; PAM type: NRG; PAM sequence: TGG
gcagttggatggaatcatcc

SEQ ID NO: 91330 - DNA, 20 bp, Artificial Sequence
  Description of Artificial Sequence: Synthetic oligonucleotide
  Target: LAMA2; (-) strand; PAM type: NRG; PAM sequence: TGG
accagatataggcagttgga

SEQ ID NO: 91331 - DNA, 20 bp, Artificial Sequence
  Description of Artificial Sequence: Synthetic oligonucleotide
  Target: LAMA2; (-) strand; PAM type: NRG; PAM sequence: TGG
aatcaccagatataggcagt

SEQ ID NO: 91332 - DNA, 20 bp, Artificial Sequence
  Description of Artificial Sequence: Synthetic oligonucleotide
  Target: LAMA2; (-) strand; PAM type: NRG; PAM sequence: CAG
ctgaaatcaccagatatagg

SEQ ID NO: 91333 - DNA, 20 bp, Artificial Sequence
  Description of Artificial Sequence: Synthetic oligonucleotide
  Target: LAMA2; (-) strand; PAM type: NRG; PAM sequence: AGG
accctgaaatcaccagatat

SEQ ID NO: 91334 - DNA, 20 bp, Artificial Sequence
  Description of Artificial Sequence: Synthetic oligonucleotide
  Target: LAMA2; (-) strand; PAM type: NRG; PAM sequence: TAG
aaccctgaaatcaccagata

SEQ ID NO: 91335 - DNA, 20 bp, Artificial Sequence
  Description of Artificial Sequence: Synthetic oligonucleotide
  Target: LAMA2; (-) strand; PAM type: NRG; PAM sequence: CAG
gaaattaaccctgaaatcac

SEQ ID NO: 91336 - DNA, 20 bp, Artificial Sequence
  Description of Artificial Sequence: Synthetic oligonucleotide
  Target: LAMA2; (-) strand; PAM type: NRG; PAM sequence: AGG
atatgatcaggaagcagaaa

SEQ ID NO: 91337 - DNA, 20 bp, Artificial Sequence
  Description of Artificial Sequence: Synthetic oligonucleotide
  Target: LAMA2; (-) strand; PAM type: NRG; PAM sequence: AAG
tatatgatcaggaagcagaa

SEQ ID NO: 91338 - DNA, 20 bp, Artificial Sequence
  Description of Artificial Sequence: Synthetic oligonucleotide
  Target: LAMA2; (-) strand; PAM type: NRG; PAM sequence: CAG
gctcatatatgatcaggaag

SEQ ID NO: 91339 - DNA, 20 bp, Artificial Sequence
  Description of Artificial Sequence: Synthetic oligonucleotide
  Target: LAMA2; (-) strand; PAM type: NRG; PAM sequence: AAG
tgagctcatatatgatcagg

SEQ ID NO: 91340 - DNA, 20 bp, Artificial Sequence
  Description of Artificial Sequence: Synthetic oligonucleotide
  Target: LAMA2; (-) strand; PAM type: NRG; PAM sequence: AGG
gtatgagctcatatatgatc

SEQ ID NO: 91341 - DNA, 20 bp, Artificial Sequence
  Description of Artificial Sequence: Synthetic oligonucleotide
  Target: LAMA2; (-) strand; PAM type: NRG; PAM sequence: CAG
tgtatgagctcatatatgat

SEQ ID NO: 91342 - DNA, 20 bp, Artificial Sequence
  Description of Artificial Sequence: Synthetic oligonucleotide
  Target: LAMA2; (-) strand; PAM type: NRG; PAM sequence: GAG
cagtacttttgaatatgtat

SEQ ID NO: 91343 - DNA, 20 bp, Artificial Sequence
  Description of Artificial Sequence: Synthetic oligonucleotide
  Target: LAMA2; (-) strand; PAM type: NRG; PAM sequence: CAG
tgctaatcctagacacttga

SEQ ID NO: 91344 - DNA, 20 bp, Artificial Sequence
  Description of Artificial Sequence: Synthetic oligonucleotide
  Target: LAMA2; (-) strand; PAM type: NRG; PAM sequence: TAG
tacccccactttgctaatcc

SEQ ID NO: 91345 - DNA, 20 bp, Artificial Sequence
  Description of Artificial Sequence: Synthetic oligonucleotide
  Target: LAMA2; (-) strand; PAM type: NRG; PAM sequence: TAG
aattgtaagcttttcagcaa

SEQ ID NO: 91346 - DNA, 20 bp, Artificial Sequence
  Description of Artificial Sequence: Synthetic oligonucleotide
  Target: LAMA2; (-) strand; PAM type: NRG; PAM sequence: CAG
tatccaaattgtaagctttt

SEQ ID NO: 91347 - DNA, 20 bp, Artificial Sequence
  Description of Artificial Sequence: Synthetic oligonucleotide
  Target: LAMA2; (-) strand; PAM type: NRG; PAM sequence: AAG
atgatctttatccaaattgt

SEQ ID NO: 91348 - DNA, 20 bp, Artificial Sequence
  Description of Artificial Sequence: Synthetic oligonucleotide
  Target: LAMA2; (-) strand; PAM type: NRG; PAM sequence: AAG
aggtgtaaacatatcttcaa

SEQ ID NO: 91349 - DNA, 20 bp, Artificial Sequence
  Description of Artificial Sequence: Synthetic oligonucleotide
  Target: LAMA2; (-) strand; PAM type: NRG; PAM sequence: AGG
aagctaaaaggctcattaca

SEQ ID NO: 91350 - DNA, 20 bp, Artificial Sequence
  Description of Artificial Sequence: Synthetic oligonucleotide
  Target: LAMA2; (-) strand; PAM type: NRG; PAM sequence: AAG
aaagctaaaaggctcattac

SEQ ID NO: 91351 - DNA, 20 bp, Artificial Sequence
  Description of Artificial Sequence: Synthetic oligonucleotide
  Target: LAMA2; (-) strand; PAM type: NRG; PAM sequence: AGG
agccagagagcaaagctaaa

SEQ ID NO: 91352 - DNA, 20 bp, Artificial Sequence
  Description of Artificial Sequence: Synthetic oligonucleotide
  Target: LAMA2; (-) strand; PAM type: NRG; PAM sequence: AAG
aagccagagagcaaagctaa

SEQ ID NO: 91353 - DNA, 20 bp, Artificial Sequence
  Description of Artificial Sequence: Synthetic oligonucleotide
  Target: LAMA2; (-) strand; PAM type: NRG; PAM sequence: AAG
gggaatcaagccagagagca

SEQ ID NO: 91354 - DNA, 20 bp, Artificial Sequence
  Description of Artificial Sequence: Synthetic oligonucleotide
  Target: LAMA2; (-) strand; PAM type: NRG; PAM sequence: GAG
aatttgggaatcaagccaga

SEQ ID NO: 91355 - DNA, 20 bp, Artificial Sequence
  Description of Artificial Sequence: Synthetic oligonucleotide
  Target: LAMA2; (-) strand; PAM type: NRG; PAM sequence: GAG
ggaatttgggaatcaagcca

SEQ ID NO: 91356 - DNA, 20 bp, Artificial Sequence
  Description of Artificial Sequence: Synthetic oligonucleotide
  Target: LAMA2; (-) strand; PAM type: NRG; PAM sequence: CAG
tgggaatttgggaatcaagc

SEQ ID NO: 91357 - DNA, 20 bp, Artificial Sequence
  Description of Artificial Sequence: Synthetic oligonucleotide
  Target: LAMA2; (-) strand; PAM type: NRG; PAM sequence: AAG
atgctgggaatttgggaatc

SEQ ID NO: 91358 - DNA, 20 bp, Artificial Sequence
  Description of Artificial Sequence: Synthetic oligonucleotide
  Target: LAMA2; (-) strand; PAM type: NRG; PAM sequence: GGG
ggaatcaatgctgggaattt

SEQ ID NO: 91359 - DNA, 20 bp, Artificial Sequence
  Description of Artificial Sequence: Synthetic oligonucleotide
  Target: LAMA2; (-) strand; PAM type: NRG; PAM sequence: TGG
gggaatcaatgctgggaatt

SEQ ID NO: 91360 - DNA, 20 bp, Artificial Sequence
  Description of Artificial Sequence: Synthetic oligonucleotide
  Target: LAMA2; (-) strand; PAM type: NRG; PAM sequence: GGG
tagatttgggaatcaatgct

SEQ ID NO: 91361 - DNA, 20 bp, Artificial Sequence
  Description of Artificial Sequence: Synthetic oligonucleotide
  Target: LAMA2; (-) strand; PAM type: NRG; PAM sequence: TGG
ttagatttgggaatcaatgc

SEQ ID NO: 91362 - DNA, 20 bp, Artificial Sequence
  Description of Artificial Sequence: Synthetic oligonucleotide
  Target: LAMA2; (-) strand; PAM type: NRG; PAM sequence: GGG
ccaaataacttgttagattt

SEQ ID NO: 91363 - DNA, 20 bp, Artificial Sequence
  Description of Artificial Sequence: Synthetic oligonucleotide
  Target: LAMA2; (-) strand; PAM type: NRG; PAM sequence: TGG
accaaataacttgttagatt

SEQ ID NO: 91364 - DNA, 20 bp, Artificial Sequence
  Description of Artificial Sequence: Synthetic oligonucleotide
  Target: LAMA2; (-) strand; PAM type: NRG; PAM sequence: TAG
acaattaccaaataacttgt

SEQ ID NO: 91365 - DNA, 20 bp, Artificial Sequence
  Description of Artificial Sequence: Synthetic oligonucleotide
  Target: LAMA2; (-) strand; PAM type: NRG; PAM sequence: CAG
gatggtagatttttgttgat

SEQ ID NO: 91366 - DNA, 20 bp, Artificial Sequence
  Description of Artificial Sequence: Synthetic oligonucleotide
  Target: LAMA2; (-) strand; PAM type: NRG; PAM sequence: TAG
tcctttctcaggagtgatgg

SEQ ID NO: 91367 - DNA, 20 bp, Artificial Sequence
  Description of Artificial Sequence: Synthetic oligonucleotide
  Target: LAMA2; (-) strand; PAM type: NRG; PAM sequence: TGG
agttcctttctcaggagtga

SEQ ID NO: 91368 - DNA, 20 bp, Artificial Sequence
  Description of Artificial Sequence: Synthetic oligonucleotide
  Target: LAMA2; (-) strand; PAM type: NRG; PAM sequence: GAG
tttttcagttcctttctcag

SEQ ID NO: 91369 - DNA, 20 bp, Artificial Sequence
  Description of Artificial Sequence: Synthetic oligonucleotide
  Target: LAMA2; (-) strand; PAM type: NRG; PAM sequence: AGG
catttttcagttcctttctc

SEQ ID NO: 91370 - DNA, 20 bp, Artificial Sequence
  Description of Artificial Sequence: Synthetic oligonucleotide
  Target: LAMA2; (-) strand; PAM type: NRG; PAM sequence: CAG
gcatttttcagttcctttct

SEQ ID NO: 91371 - DNA, 20 bp, Artificial Sequence
  Description of Artificial Sequence: Synthetic oligonucleotide
  Target: LAMA2; (-) strand; PAM type: NRG; PAM sequence: CAG
tcgctatggcctgcattttt

SEQ ID NO: 91372 - DNA, 20 bp, Artificial Sequence
  Description of Artificial Sequence: Synthetic oligonucleotide
  Target: LAMA2; (-) strand; PAM type: NRG; PAM sequence: TGG
gaagcaactgattctcgcta

SEQ ID NO: 91373 - DNA, 20 bp, Artificial Sequence
  Description of Artificial Sequence: Synthetic oligonucleotide
  Target: LAMA2; (-) strand; PAM type: NRG; PAM sequence: AAG
atcttgtaaccataagaaag

SEQ ID NO: 91374 - DNA, 20 bp, Artificial Sequence
  Description of Artificial Sequence: Synthetic oligonucleotide
  Target: LAMA2; (-) strand; PAM type: NRG; PAM sequence: AAG
ggcatcttgtaaccataaga

SEQ ID NO: 91375 - DNA, 20 bp, Artificial Sequence
  Description of Artificial Sequence: Synthetic oligonucleotide
  Target: LAMA2; (-) strand; PAM type: NRG; PAM sequence: AAG
atatggcatcttgtaaccat

SEQ ID NO: 91376 - DNA, 20 bp, Artificial Sequence
  Description of Artificial Sequence: Synthetic oligonucleotide
  Target: LAMA2; (-) strand; PAM type: NRG; PAM sequence: TGG
acattttatagcatatgata

SEQ ID NO: 91377 - DNA, 20 bp, Artificial Sequence
  Description of Artificial Sequence: Synthetic oligonucleotide
  Target: LAMA2; (-) strand; PAM type: NRG; PAM sequence: TAG
aattaccgatagacatttta

SEQ ID NO: 91378 - DNA, 20 bp, Artificial Sequence
  Description of Artificial Sequence: Synthetic oligonucleotide
  Target: LAMA2; (-) strand; PAM type: NRG; PAM sequence: TAG
acagttttaaaaattaccga

SEQ ID NO: 91379 - DNA, 20 bp, Artificial Sequence
  Description of Artificial Sequence: Synthetic oligonucleotide
  Target: LAMA2; (-) strand; PAM type: NRG; PAM sequence: CAG
ctattgactcataataatca

SEQ ID NO: 91380 - DNA, 20 bp, Artificial Sequence
  Description of Artificial Sequence: Synthetic oligonucleotide
  Target: LAMA2; (-) strand; PAM type: NRG; PAM sequence: GAG
aaattttaaataaactctaa

SEQ ID NO: 91381 - DNA, 20 bp, Artificial Sequence
  Description of Artificial Sequence: Synthetic oligonucleotide
  Target: LAMA2; (-) strand; PAM type: NRG; PAM sequence: AAG
ataaattttaaataaactct

SEQ ID NO: 91382 - DNA, 20 bp, Artificial Sequence
  Description of Artificial Sequence: Synthetic oligonucleotide
  Target: LAMA2; (-) strand; PAM type: NRG; PAM sequence: TAG
tttgtatctccaaatcattt

SEQ ID NO: 91383 - DNA, 20 bp, Artificial Sequence
  Description of Artificial Sequence: Synthetic oligonucleotide
  Target: LAMA2; (-) strand; PAM type: NRG; PAM sequence: AAG
aaattactacaaaacattac

SEQ ID NO: 91384 - DNA, 20 bp, Artificial Sequence
  Description of Artificial Sequence: Synthetic oligonucleotide
  Target: LAMA2; (-) strand; PAM type: NRG; PAM sequence: TAG
agtaggttattatgaaatac

SEQ ID NO: 91385 - DNA, 20 bp, Artificial Sequence
  Description of Artificial Sequence: Synthetic oligonucleotide
  Target: LAMA2; (-) strand; PAM type: NRG; PAM sequence: AGG
tataatatgtaacacacagt

SEQ ID NO: 91386 - DNA, 20 bp, Artificial Sequence
  Description of Artificial Sequence: Synthetic oligonucleotide
  Target: LAMA2; (-) strand; PAM type: NRG; PAM sequence: TAG
gtataatatgtaacacacag

SEQ ID NO: 91387 - DNA, 20 bp, Artificial Sequence
  Description of Artificial Sequence: Synthetic oligonucleotide
  Target: LAMA2; (-) strand; PAM type: NRG; PAM sequence: CAG
ttggtataatatgtaacaca

SEQ ID NO: 91388 - DNA, 20 bp, Artificial Sequence
  Description of Artificial Sequence: Synthetic oligonucleotide
  Target: LAMA2; (-) strand; PAM type: NRG; PAM sequence: TGG
ggaaatgaatataaacttct

SEQ ID NO: 91389 - DNA, 20 bp, Artificial Sequence
  Description of Artificial Sequence: Synthetic oligonucleotide
  Target: LAMA2; (-) strand; PAM type: NRG; PAM sequence: AGG
caccatgagcttgatttaaa

SEQ ID NO: 91390 - DNA, 20 bp, Artificial Sequence
  Description of Artificial Sequence: Synthetic oligonucleotide
  Target: LAMA2; (-) strand; PAM type: NRG; PAM sequence: AAG
acaccatgagcttgatttaa

SEQ ID NO: 91391 - DNA, 20 bp, Artificial Sequence
  Description of Artificial Sequence: Synthetic oligonucleotide
  Target: LAMA2; (-) strand; PAM type: NRG; PAM sequence: GAG
tataatagtccatacaccat

SEQ ID NO: 91392 - DNA, 20 bp, Artificial Sequence
  Description of Artificial Sequence: Synthetic oligonucleotide
  Target: LAMA2; (-) strand; PAM type: NRG; PAM sequence: TAG
atacaatggagataatataa

SEQ ID NO: 91393 - DNA, 20 bp, Artificial Sequence
  Description of Artificial Sequence: Synthetic oligonucleotide
  Target: LAMA2; (-) strand; PAM type: NRG; PAM sequence: GAG
attttttcttctatacaatg

SEQ ID NO: 91394 - DNA, 20 bp, Artificial Sequence
  Description of Artificial Sequence: Synthetic oligonucleotide
  Target: LAMA2; (-) strand; PAM type: NRG; PAM sequence: TGG
caattttttcttctatacaa

SEQ ID NO: 91395 - DNA, 20 bp, Artificial Sequence
  Description of Artificial Sequence: Synthetic oligonucleotide
  Target: LAMA2; (-) strand; PAM type: NRG; PAM sequence: AGG
gaaaataacttattctttct

SEQ ID NO: 91396 - DNA, 20 bp, Artificial Sequence
  Description of Artificial Sequence: Synthetic oligonucleotide
  Target: LAMA2; (-) strand; PAM type: NRG; PAM sequence: TAG
agaaaataacttattctttc

SEQ ID NO: 91397 - DNA, 20 bp, Artificial Sequence
  Description of Artificial Sequence: Synthetic oligonucleotide
  Target: LAMA2; (-) strand; PAM type: NRG; PAM sequence: AAG
ttaccagccttgtggcctag

SEQ ID NO: 91398 - DNA, 20 bp, Artificial Sequence
  Description of Artificial Sequence: Synthetic oligonucleotide
  Target: LAMA2; (-) strand; PAM type: NRG; PAM sequence: TAG
tatttaccagccttgtggcc

SEQ ID NO: 91399 - DNA, 20 bp, Artificial Sequence
  Description of Artificial Sequence: Synthetic oligonucleotide
  Target: LAMA2; (-) strand; PAM type: NRG; PAM sequence: TGG
tctgatatttaccagccttg

SEQ ID NO: 91400 - DNA, 20 bp, Artificial Sequence
  Description of Artificial Sequence: Synthetic oligonucleotide
  Target: LAMA2; (-) strand; PAM type: NRG; PAM sequence: CAG
atcctgtctctgatatttac

SEQ ID NO: 91401 - DNA, 20 bp, Artificial Sequence
  Description of Artificial Sequence: Synthetic oligonucleotide
  Target: LAMA2; (-) strand; PAM type: NRG; PAM sequence: AAG
ttttgtgagtcaaatagacc

SEQ ID NO: 91402 - DNA, 20 bp, Artificial Sequence
  Description of Artificial Sequence: Synthetic oligonucleotide
  Target: LAMA2; (-) strand; PAM type: NRG; PAM sequence: TAG
atacagttttgtgagtcaaa

SEQ ID NO: 91403 - DNA, 20 bp, Artificial Sequence
  Description of Artificial Sequence: Synthetic oligonucleotide
  Target: LAMA2; (-) strand; PAM type: NRG; PAM sequence: GAG
tattaagaatacagttttgt

SEQ ID NO: 91404 - DNA, 20 bp, Artificial Sequence
  Description of Artificial Sequence: Synthetic oligonucleotide
  Target: LAMA2; (-) strand; PAM type: NRG; PAM sequence: CAG
aagcttaattattaagaata

SEQ ID NO: 91405 - DNA, 20 bp, Artificial Sequence
  Description of Artificial Sequence: Synthetic oligonucleotide
  Target: LAMA2; (-) strand; PAM type: NRG; PAM sequence: AAG
atcttaaaagcttaattatt

SEQ ID NO: 91406 - DNA, 20 bp, Artificial Sequence
  Description of Artificial Sequence: Synthetic oligonucleotide
  Target: LAMA2; (-) strand; PAM type: NRG; PAM sequence: AAG
tgtgtaaaaggacatcttaa

SEQ ID NO: 91407 - DNA, 20 bp, Artificial Sequence
  Description of Artificial Sequence: Synthetic oligonucleotide
  Target: LAMA2; (-) strand; PAM type: NRG; PAM sequence: AGG
ttttcctatttttgtgtaaa

SEQ ID NO: 91408 - DNA, 20 bp, Artificial Sequence
  Description of Artificial Sequence: Synthetic oligonucleotide
  Target: LAMA2; (-) strand; PAM type: NRG; PAM sequence: AAG
cttttcctatttttgtgtaa

SEQ ID NO: 91409 - DNA, 20 bp, Artificial Sequence
  Description of Artificial Sequence: Synthetic oligonucleotide
  Target: LAMA2; (-) strand; PAM type: NRG; PAM sequence: TGG
acattttaaataaatgttat

SEQ ID NO: 91410 - DNA, 20 bp, Artificial Sequence
  Description of Artificial Sequence: Synthetic oligonucleotide
  Target: LAMA2; (-) strand; PAM type: NRG; PAM sequence: TGG
ggtttggccaaatggaaaat

SEQ ID NO: 91411 - DNA, 20 bp, Artificial Sequence
  Description of Artificial Sequence: Synthetic oligonucleotide
  Target: LAMA2; (-) strand; PAM type: NRG; PAM sequence: TGG
gaaaagctggtttggccaaa

SEQ ID NO: 91412 - DNA, 20 bp, Artificial Sequence
  Description of Artificial Sequence: Synthetic oligonucleotide
  Target: LAMA2; (-) strand; PAM type: NRG; PAM sequence: TGG
attttagagaaaagctggtt

SEQ ID NO: 91413 - DNA, 20 bp, Artificial Sequence
  Description of Artificial Sequence: Synthetic oligonucleotide
  Target: LAMA2; (-) strand; PAM type: NRG; PAM sequence: TGG
tcattattttagagaaaagc

SEQ ID NO: 91414 - DNA, 20 bp, Artificial Sequence
  Description of Artificial Sequence: Synthetic oligonucleotide
  Target: LAMA2; (-) strand; PAM type: NRG; PAM sequence: AAG
taactcattattttagagaa

SEQ ID NO: 91415 - DNA, 20 bp, Artificial Sequence
  Description of Artificial Sequence: Synthetic oligonucleotide
  Target: LAMA2; (-) strand; PAM type: NRG; PAM sequence: GAG
tggcataactcattatttta

SEQ ID NO: 91416 - DNA, 20 bp, Artificial Sequence
  Description of Artificial Sequence: Synthetic oligonucleotide
  Target: LAMA2; (-) strand; PAM type: NRG; PAM sequence: TAG
tttggcataactcattattt

SEQ ID NO: 91417 - DNA, 20 bp, Artificial Sequence
  Description of Artificial Sequence: Synthetic oligonucleotide
  Target: LAMA2; (-) strand; PAM type: NRG; PAM sequence: TGG
gtgattttagcagagtgatt

SEQ ID NO: 91418 - DNA, 20 bp, Artificial Sequence
  Description of Artificial Sequence: Synthetic oligonucleotide
  Target: LAMA2; (-) strand; PAM type: NRG; PAM sequence: GAG
acaatctggtgattttagca

SEQ ID NO: 91419 - DNA, 20 bp, Artificial Sequence
  Description of Artificial Sequence: Synthetic oligonucleotide
  Target: LAMA2; (-) strand; PAM type: NRG; PAM sequence: CAG
gtacaatctggtgattttag

SEQ ID NO: 91420 - DNA, 20 bp, Artificial Sequence
  Description of Artificial Sequence: Synthetic oligonucleotide
  Target: LAMA2; (-) strand; PAM type: NRG; PAM sequence: TAG
tttgtacaatctggtgattt

SEQ ID NO: 91421 - DNA, 20 bp, Artificial Sequence
  Description of Artificial Sequence: Synthetic oligonucleotide
  Target: LAMA2; (-) strand; PAM type: NRG; PAM sequence: TGG
attggtacttttgtacaatc

SEQ ID NO: 91422 - DNA, 20 bp, Artificial Sequence
  Description of Artificial Sequence: Synthetic oligonucleotide
  Target: LAMA2; (-) strand; PAM type: NRG; PAM sequence: TGG
atctatggccttcattttat

SEQ ID NO: 91423 - DNA, 20 bp, Artificial Sequence
  Description of Artificial Sequence: Synthetic oligonucleotide
  Target: LAMA2; (-) strand; PAM type: NRG; PAM sequence: TGG
tccattgttctctgtatcta

SEQ ID NO: 91424 - DNA, 20 bp, Artificial Sequence
  Description of Artificial Sequence: Synthetic oligonucleotide
  Target: LAMA2; (-) strand; PAM type: NRG; PAM sequence: TGG
tgatctctggaatttgtttt

SEQ ID NO: 91425 - DNA, 20 bp, Artificial Sequence
  Description of Artificial Sequence: Synthetic oligonucleotide
  Target: LAMA2; (-) strand; PAM type: NRG; PAM sequence: TGG
gactgacttagaatgatctc

SEQ ID NO: 91426 - DNA, 20 bp, Artificial Sequence
  Description of Artificial Sequence: Synthetic oligonucleotide
  Target: LAMA2; (-) strand; PAM type: NRG; PAM sequence: TAG
aagtgctcagttgactgact

SEQ ID NO: 91427 - DNA, 20 bp, Artificial Sequence
  Description of Artificial Sequence: Synthetic oligonucleotide
  Target: LAMA2; (-) strand; PAM type: NRG; PAM sequence: CAG
ctaaactttctcaaagtgct

SEQ ID NO: 91428 - DNA, 20 bp, Artificial Sequence
  Description of Artificial Sequence: Synthetic oligonucleotide
  Target: LAMA2; (-) strand; PAM type: NRG; PAM sequence: AAG
gtataagctaaactttctca

SEQ ID NO: 91429 - DNA, 20 bp, Artificial Sequence
  Description of Artificial Sequence: Synthetic oligonucleotide
  Target: LAMA2; (-) strand; PAM type: NRG; PAM sequence: AAG
tgcttgtttgtagttggtat

SEQ ID NO: 91430 - DNA, 20 bp, Artificial Sequence
  Description of Artificial Sequence: Synthetic oligonucleotide
  Target: LAMA2; (-) strand; PAM type: NRG; PAM sequence: TGG
taaatctgcttgtttgtagt

SEQ ID NO: 91431 - DNA, 20 bp, Artificial Sequence
  Description of Artificial Sequence: Synthetic oligonucleotide
  Target: LAMA2; (-) strand; PAM type: NRG; PAM sequence: TAG
gagataaatctgcttgtttg

SEQ ID NO: 91432 - DNA, 20 bp, Artificial Sequence
  Description of Artificial Sequence: Synthetic oligonucleotide
  Target: LAMA2; (-) strand; PAM type: NRG; PAM sequence: GAG
attttgttttctttttctta

SEQ ID NO: 91433 - DNA, 20 bp, Artificial Sequence
  Description of Artificial Sequence: Synthetic oligonucleotide
  Target: LAMA2; (-) strand; PAM type: NRG; PAM sequence: TAG
caattttgttttctttttct

SEQ ID NO: 91434 - DNA, 20 bp, Artificial Sequence
  Description of Artificial Sequence: Synthetic oligonucleotide
  Target: LAMA2; (-) strand; PAM type: NRG; PAM sequence: TGG
ttttaaattgaaataaaaga

SEQ ID NO: 91435 - DNA, 20 bp, Artificial Sequence
  Description of Artificial Sequence: Synthetic oligonucleotide
  Target: LAMA2; (-) strand; PAM type: NRG; PAM sequence: AAG
tagcttttaaattgaaataa

SEQ ID NO: 91436 - DNA, 20 bp, Artificial Sequence
  Description of Artificial Sequence: Synthetic oligonucleotide
  Target: LAMA2; (-) strand; PAM type: NRG; PAM sequence: TAG
gcaatattaatattccatct

SEQ ID NO: 91437 - DNA, 20 bp, Artificial Sequence
  Description of Artificial Sequence: Synthetic oligonucleotide
  Target: LAMA2; (-) strand; PAM type: NRG; PAM sequence: AGG
taaacaaggaaagcagaagt

SEQ ID NO: 91438 - DNA, 20 bp, Artificial Sequence
  Description of Artificial Sequence: Synthetic oligonucleotide
  Target: LAMA2; (-) strand; PAM type: NRG; PAM sequence: TAG
ttaaacaaggaaagcagaag

SEQ ID NO: 91439 - DNA, 20 bp, Artificial Sequence
  Description of Artificial Sequence: Synthetic oligonucleotide
  Target: LAMA2; (-) strand; PAM type: NRG; PAM sequence: AAG
tgcttaaacaaggaaagcag

SEQ ID NO: 91440 - DNA, 20 bp, Artificial Sequence
  Description of Artificial Sequence: Synthetic oligonucleotide
  Target: LAMA2; (-) strand; PAM type: NRG; PAM sequence: CAG
tagtgcttaaacaaggaaag

SEQ ID NO: 91441 - DNA, 20 bp, Artificial Sequence
  Description of Artificial Sequence: Synthetic oligonucleotide
  Target: LAMA2; (-) strand; PAM type: NRG; PAM sequence: AAG
ttttagtgcttaaacaagga

SEQ ID NO: 91442 - DNA, 20 bp, Artificial Sequence
  Description of Artificial Sequence: Synthetic oligonucleotide
  Target: LAMA2; (-) strand; PAM type: NRG; PAM sequence: AGG
tttcttttagtgcttaaaca

SEQ ID NO: 91443 - DNA, 20 bp, Artificial Sequence
  Description of Artificial Sequence: Synthetic oligonucleotide
  Target: LAMA2; (-) strand; PAM type: NRG; PAM sequence: AAG
atttcttttagtgcttaaac

SEQ ID NO: 91444 - DNA, 20 bp, Artificial Sequence
  Description of Artificial Sequence: Synthetic oligonucleotide
  Target: LAMA2; (-) strand; PAM type: NRG; PAM sequence: TAG
aatgactgcttgatttcttt

SEQ ID NO: 91445 - DNA, 20 bp, Artificial Sequence
  Description of Artificial Sequence: Synthetic oligonucleotide
  Target: LAMA2; (-) strand; PAM type: NRG; PAM sequence: AAG
agttaaagggtcttttaaaa

SEQ ID NO: 91446 - DNA, 20 bp, Artificial Sequence
  Description of Artificial Sequence: Synthetic oligonucleotide
  Target: LAMA2; (-) strand; PAM type: NRG; PAM sequence: GGG
tttaaaatcatatagttaaa

SEQ ID NO: 91447 - DNA, 20 bp, Artificial Sequence
  Description of Artificial Sequence: Synthetic oligonucleotide
  Target: LAMA2; (-) strand; PAM type: NRG; PAM sequence: AGG
ttttaaaatcatatagttaa

SEQ ID NO: 91448 - DNA, 20 bp, Artificial Sequence
  Description of Artificial Sequence: Synthetic oligonucleotide
  Target: LAMA2; (-) strand; PAM type: NRG; PAM sequence: AAG
tttttaaaatcatatagtta

SEQ ID NO: 91449 - DNA, 20 bp, Artificial Sequence
  Description of Artificial Sequence: Synthetic oligonucleotide
  Target: LAMA2; (-) strand; PAM type: NRG; PAM sequence: TAG
cagacatttttaaaatcata

SEQ ID NO: 91450 - DNA, 20 bp, Artificial Sequence
  Description of Artificial Sequence: Synthetic oligonucleotide
  Target: LAMA2; (-) strand; PAM type: NRG; PAM sequence: CAG
tgattttcattttttggaga

SEQ ID NO: 91451 - DNA, 20 bp, Artificial Sequence
  Description of Artificial Sequence: Synthetic oligonucleotide
  Target: LAMA2; (-) strand; PAM type: NRG; PAM sequence: GAG
gttttgattttcattttttg

SEQ ID NO: 91452 - DNA, 20 bp, Artificial Sequence
  Description of Artificial Sequence: Synthetic oligonucleotide
  Target: LAMA2; (-) strand; PAM type: NRG; PAM sequence: TGG
gtgttttgattttcattttt

SEQ ID NO: 91453 - DNA, 20 bp, Artificial Sequence
  Description of Artificial Sequence: Synthetic oligonucleotide
  Target: LAMA2; (-) strand; PAM type: NRG; PAM sequence: TGG
cttcctcgtctcttggctct

SEQ ID NO: 91454 - DNA, 20 bp, Artificial Sequence
  Description of Artificial Sequence: Synthetic oligonucleotide
  Target: LAMA2; (-) strand; PAM type: NRG; PAM sequence: TGG
gaatgttcttcctcgtctct

SEQ ID NO: 91455 - DNA, 20 bp, Artificial Sequence
  Description of Artificial Sequence: Synthetic oligonucleotide
  Target: LAMA2; (-) strand; PAM type: NRG; PAM sequence: GAG
tccaaatgctgaaaagatat

SEQ ID NO: 91456 - DNA, 20 bp, Artificial Sequence
  Description of Artificial Sequence: Synthetic oligonucleotide
  Target: LAMA2; (-) strand; PAM type: NRG; PAM sequence: AAG
caccacctccaaatgctgaa

SEQ ID NO: 91457 - DNA, 20 bp, Artificial Sequence
  Description of Artificial Sequence: Synthetic oligonucleotide
  Target: LAMA2; (-) strand; PAM type: NRG; PAM sequence: AAG
ggtcaagttggctcagtcta

SEQ ID NO: 91458 - DNA, 20 bp, Artificial Sequence
  Description of Artificial Sequence: Synthetic oligonucleotide
  Target: LAMA2; (-) strand; PAM type: NRG; PAM sequence: CAG
catattaggtcaagttggct

SEQ ID NO: 91459 - DNA, 20 bp, Artificial Sequence
  Description of Artificial Sequence: Synthetic oligonucleotide
  Target: LAMA2; (-) strand; PAM type: NRG; PAM sequence: TGG
tttgtcatattaggtcaagt

SEQ ID NO: 91460 - DNA, 20 bp, Artificial Sequence
  Description of Artificial Sequence: Synthetic oligonucleotide
  Target: LAMA2; (-) strand; PAM type: NRG; PAM sequence: AAG
gtcctttgtcatattaggtc

SEQ ID NO: 91461 - DNA, 20 bp, Artificial Sequence
  Description of Artificial Sequence: Synthetic oligonucleotide
  Target: LAMA2; (-) strand; PAM type: NRG; PAM sequence: AGG
ctctggtcctttgtcatatt

SEQ ID NO: 91462 - DNA, 20 bp, Artificial Sequence
  Description of Artificial Sequence: Synthetic oligonucleotide
  Target: LAMA2; (-) strand; PAM type: NRG; PAM sequence: TAG
gctctggtcctttgtcatat

SEQ ID NO: 91463 - DNA, 20 bp, Artificial Sequence
  Description of Artificial Sequence: Synthetic oligonucleotide
  Target: LAMA2; (-) strand; PAM type: NRG; PAM sequence: TGG
aataccataaccaaaagctc

SEQ ID NO: 91464 - DNA, 20 bp, Artificial Sequence
  Description of Artificial Sequence: Synthetic oligonucleotide
  Target: LAMA2; (-) strand; PAM type: NRG; PAM sequence: AAG
ctgatgaataccataaccaa

SEQ ID NO: 91465 - DNA, 20 bp, Artificial Sequence
  Description of Artificial Sequence: Synthetic oligonucleotide
  Target: LAMA2; (-) strand; PAM type: NRG; PAM sequence: AAG
attatgcatgctgagaaagg

SEQ ID NO: 91466 - DNA, 20 bp, Artificial Sequence
  Description of Artificial Sequence: Synthetic oligonucleotide
  Target: LAMA2; (-) strand; PAM type: NRG; PAM sequence: AGG
ccaattatgcatgctgagaa

SEQ ID NO: 91467 - DNA, 20 bp, Artificial Sequence
  Description of Artificial Sequence: Synthetic oligonucleotide
  Target: LAMA2; (-) strand; PAM type: NRG; PAM sequence: AAG
gccaattatgcatgctgaga

SEQ ID NO: 91468 - DNA, 20 bp, Artificial Sequence
  Description of Artificial Sequence: Synthetic oligonucleotide
  Target: LAMA2; (-) strand; PAM type: NRG; PAM sequence: GAG
ataagccaattatgcatgct

SEQ ID NO: 91469 - DNA, 20 bp, Artificial Sequence
  Description of Artificial Sequence: Synthetic oligonucleotide
  Target: LAMA2; (-) strand; PAM type: NRG; PAM sequence: AAG
agcaacaatgacataaatat

SEQ ID NO: 91470 - DNA, 20 bp, Artificial Sequence
  Description of Artificial Sequence: Synthetic oligonucleotide
  Target: LAMA2; (-) strand; PAM type: NRG; PAM sequence: CAG
atacagctgtaggaatcgta

SEQ ID NO: 91471 - DNA, 20 bp, Artificial Sequence
  Description of Artificial Sequence: Synthetic oligonucleotide
  Target: LAMA2; (-) strand; PAM type: NRG; PAM sequence: AGG
cttaggtattatacagctgt

SEQ ID NO: 91472 - DNA, 20 bp, Artificial Sequence
  Description of Artificial Sequence: Synthetic oligonucleotide
  Target: LAMA2; (-) strand; PAM type: NRG; PAM sequence: TAG
tcttaggtattatacagctg

SEQ ID NO: 91473 - DNA, 20 bp, Artificial Sequence
  Description of Artificial Sequence: Synthetic oligonucleotide
  Target: LAMA2; (-) strand; PAM type: NRG; PAM sequence: CAG
taaagttcttaggtattata

SEQ ID NO: 91474 - DNA, 20 bp, Artificial Sequence
  Description of Artificial Sequence: Synthetic oligonucleotide
  Target: LAMA2; (-) strand; PAM type: NRG; PAM sequence: AGG
ggtgaataagtaaagttctt

SEQ ID NO: 91475 - DNA, 20 bp, Artificial Sequence
  Description of Artificial Sequence: Synthetic oligonucleotide
  Target: LAMA2; (-) strand; PAM type: NRG; PAM sequence: TAG
tggtgaataagtaaagttct

SEQ ID NO: 91476 - DNA, 20 bp, Artificial Sequence
  Description of Artificial Sequence: Synthetic oligonucleotide
  Target: LAMA2; (-) strand; PAM type: NRG; PAM sequence: AAG
aaagagatggtgaataagta

SEQ ID NO: 91477 - DNA, 20 bp, Artificial Sequence
  Description of Artificial Sequence: Synthetic oligonucleotide
  Target: LAMA2; (-) strand; PAM type: NRG; PAM sequence: AAG
ggaaaaaagagatggtgaat

SEQ ID NO: 91478 - DNA, 20 bp, Artificial Sequence
  Description of Artificial Sequence: Synthetic oligonucleotide
  Target: LAMA2; (-) strand; PAM type: NRG; PAM sequence: TGG
atggcagaggaaaaaagaga

SEQ ID NO: 91479 - DNA, 20 bp, Artificial Sequence
  Description of Artificial Sequence: Synthetic oligonucleotide
  Target: LAMA2; (-) strand; PAM type: NRG; PAM sequence: GAG
acctatggcagaggaaaaaa

SEQ ID NO: 91480 - DNA, 20 bp, Artificial Sequence
  Description of Artificial Sequence: Synthetic oligonucleotide
  Target: LAMA2; (-) strand; PAM type: NRG; PAM sequence: AAG
caacctatggcagaggaaaa

SEQ ID NO: 91481 - DNA, 20 bp, Artificial Sequence
  Description of Artificial Sequence: Synthetic oligonucleotide
  Target: LAMA2; (-) strand; PAM type: NRG; PAM sequence: AGG
cagagctcaacctatggcag

SEQ ID NO: 91482 - DNA, 20 bp, Artificial Sequence
  Description of Artificial Sequence: Synthetic oligonucleotide
  Target: LAMA2; (-) strand; PAM type: NRG; PAM sequence: GAG
acagagctcaacctatggca

SEQ ID NO: 91483 - DNA, 20 bp, Artificial Sequence
  Description of Artificial Sequence: Synthetic oligonucleotide
  Target: LAMA2; (-) strand; PAM type: NRG; PAM sequence: CAG
taacagagctcaacctatgg

SEQ ID NO: 91484 - DNA, 20 bp, Artificial Sequence
  Description of Artificial Sequence: Synthetic oligonucleotide
  Target: LAMA2; (-) strand; PAM type: NRG; PAM sequence: TGG
ggttaacagagctcaaccta

SEQ ID NO: 91485 - DNA, 20 bp, Artificial Sequence
  Description of Artificial Sequence: Synthetic oligonucleotide
  Target: LAMA2; (-) strand; PAM type: NRG; PAM sequence: GAG
cagcggattcaaggttaaca

SEQ ID NO: 91486 - DNA, 20 bp, Artificial Sequence
  Description of Artificial Sequence: Synthetic oligonucleotide
  Target: LAMA2; (-) strand; PAM type: NRG; PAM sequence: CAG
gacagcggattcaaggttaa

SEQ ID NO: 91487 - DNA, 20 bp, Artificial Sequence
  Description of Artificial Sequence: Synthetic oligonucleotide
  Target: LAMA2; (-) strand; PAM type: NRG; PAM sequence: AGG
gataggagacagcggattca

SEQ ID NO: 91488 - DNA, 20 bp, Artificial Sequence
  Description of Artificial Sequence: Synthetic oligonucleotide
  Target: LAMA2; (-) strand; PAM type: NRG; PAM sequence: AAG
ggataggagacagcggattc

SEQ ID NO: 91489 - DNA, 20 bp, Artificial Sequence
  Description of Artificial Sequence: Synthetic oligonucleotide
  Target: LAMA2; (-) strand; PAM type: NRG; PAM sequence: CGG
atcagtaggataggagacag

SEQ ID NO: 91490 - DNA, 20 bp, Artificial Sequence
  Description of Artificial Sequence: Synthetic oligonucleotide
  Target: LAMA2; (-) strand; PAM type: NRG; PAM sequence: CAG
tccatcagtaggataggaga

SEQ ID NO: 91491 - DNA, 20 bp, Artificial Sequence
  Description of Artificial Sequence: Synthetic oligonucleotide
  Target: LAMA2; (-) strand; PAM type: NRG; PAM sequence: GAG
tgcttccatcagtaggatag

SEQ ID NO: 91492 - DNA, 20 bp, Artificial Sequence
  Description of Artificial Sequence: Synthetic oligonucleotide
  Target: LAMA2; (-) strand; PAM type: NRG; PAM sequence: AGG
aatgcttccatcagtaggat

SEQ ID NO: 91493 - DNA, 20 bp, Artificial Sequence
  Description of Artificial Sequence: Synthetic oligonucleotide
  Target: LAMA2; (-) strand; PAM type: NRG; PAM sequence: TAG
caatgcttccatcagtagga

SEQ ID NO: 91494 - DNA, 20 bp, Artificial Sequence
  Description of Artificial Sequence: Synthetic oligonucleotide
  Target: LAMA2; (-) strand; PAM type: NRG; PAM sequence: AGG
gctgcaatgcttccatcagt

SEQ ID NO: 91495 - DNA, 20 bp, Artificial Sequence
  Description of Artificial Sequence: Synthetic oligonucleotide
  Target: LAMA2; (-) strand; PAM type: NRG; PAM sequence: TAG
tgctgcaatgcttccatcag

SEQ ID NO: 91496 - DNA, 20 bp, Artificial Sequence
  Description of Artificial Sequence: Synthetic oligonucleotide
  Target: LAMA2; (-) strand; PAM type: NRG; PAM sequence: CAG
agctgctgcaatgcttccat

SEQ ID NO: 91497 - DNA, 20 bp, Artificial Sequence
  Description of Artificial Sequence: Synthetic oligonucleotide
  Target: LAMA2; (-) strand; PAM type: NRG; PAM sequence: CAG
tgggcactgacacacttcta

SEQ ID NO: 91498 - DNA, 20 bp, Artificial Sequence
  Description of Artificial Sequence: Synthetic oligonucleotide
  Target: LAMA2; (-) strand; PAM type: NRG; PAM sequence: GGG
aggagccagtataccctggt

SEQ ID NO: 91499 - DNA, 20 bp, Artificial Sequence
  Description of Artificial Sequence: Synthetic oligonucleotide
  Target: LAMA2; (-) strand; PAM type: NRG; PAM sequence: TGG
gaggagccagtataccctgg

SEQ ID NO: 91500 - DNA, 20 bp, Artificial Sequence
  Description of Artificial Sequence: Synthetic oligonucleotide
  Target: LAMA2; (-) strand; PAM type: NRG; PAM sequence: TGG
caagaggagccagtataccc

SEQ ID NO: 91501 - DNA, 20 bp, Artificial Sequence
  Description of Artificial Sequence: Synthetic oligonucleotide
  Target: LAMA2; (-) strand; PAM type: NRG; PAM sequence: CAG
gcttacttcacaagaggagc

SEQ ID NO: 91502 - DNA, 20 bp, Artificial Sequence
  Description of Artificial Sequence: Synthetic oligonucleotide
  Target: LAMA2; (-) strand; PAM type: NRG; PAM sequence: GAG
gcaagcttacttcacaagag

SEQ ID NO: 91503 - DNA, 20 bp, Artificial Sequence
  Description of Artificial Sequence: Synthetic oligonucleotide
  Target: LAMA2; (-) strand; PAM type: NRG; PAM sequence: AGG
ttgcaagcttacttcacaag

SEQ ID NO: 91504 - DNA, 20 bp, Artificial Sequence
  Description of Artificial Sequence: Synthetic oligonucleotide
  Target: LAMA2; (-) strand; PAM type: NRG; PAM sequence: GAG
cttgcaagcttacttcacaa

SEQ ID NO: 91505 - DNA, 20 bp, Artificial Sequence
  Description of Artificial Sequence: Synthetic oligonucleotide
  Target: LAMA2; (-) strand; PAM type: NRG; PAM sequence: AAG
ttcttgcaagcttacttcac

SEQ ID NO: 91506 - DNA, 20 bp, Artificial Sequence
  Description of Artificial Sequence: Synthetic oligonucleotide
  Target: LAMA2; (-) strand; PAM type: NRG; PAM sequence: AAG
cactaaggatacattcttgc

SEQ ID NO: 91507 - DNA, 20 bp, Artificial Sequence
  Description of Artificial Sequence: Synthetic oligonucleotide
  Target: LAMA2; (-) strand; PAM type: NRG; PAM sequence: AGG
agggaactttgaaagcacta

SEQ ID NO: 91508 - DNA, 20 bp, Artificial Sequence
  Description of Artificial Sequence: Synthetic oligonucleotide
  Target: LAMA2; (-) strand; PAM type: NRG; PAM sequence: AAG
gagggaactttgaaagcact

SEQ ID NO: 91509 - DNA, 20 bp, Artificial Sequence
  Description of Artificial Sequence: Synthetic oligonucleotide
  Target: LAMA2; (-) strand; PAM type: NRG; PAM sequence: AAG
caatgttgagggaactttga

SEQ ID NO: 91510 - DNA, 20 bp, Artificial Sequence
  Description of Artificial Sequence: Synthetic oligonucleotide
  Target: LAMA2; (-) strand; PAM type: NRG; PAM sequence: GGG
gttattgaaagcaatgttga

SEQ ID NO: 91511 - DNA, 20 bp, Artificial Sequence
  Description of Artificial Sequence: Synthetic oligonucleotide
  Target: LAMA2; (-) strand; PAM type: NRG; PAM sequence: AGG
ggttattgaaagcaatgttg

SEQ ID NO: 91512 - DNA, 20 bp, Artificial Sequence
  Description of Artificial Sequence: Synthetic oligonucleotide
  Target: LAMA2; (-) strand; PAM type: NRG; PAM sequence: GAG
aggttattgaaagcaatgtt

SEQ ID NO: 91513 - DNA, 20 bp, Artificial Sequence
  Description of Artificial Sequence: Synthetic oligonucleotide
  Target: LAMA2; (-) strand; PAM type: NRG; PAM sequence: AAG
ttattagaataggttattga

SEQ ID NO: 91514 - DNA, 20 bp, Artificial Sequence
  Description of Artificial Sequence: Synthetic oligonucleotide
  Target: LAMA2; (-) strand; PAM type: NRG; PAM sequence: AGG
aaaacagctcttattagaat

SEQ ID NO: 91515 - DNA, 20 bp, Artificial Sequence
  Description of Artificial Sequence: Synthetic oligonucleotide
  Target: LAMA2; (-) strand; PAM type: NRG; PAM sequence: TAG
aaaaacagctcttattagaa

SEQ ID NO: 91516 - DNA, 20 bp, Artificial Sequence
  Description of Artificial Sequence: Synthetic oligonucleotide
  Target: LAMA2; (-) strand; PAM type: NRG; PAM sequence: TAG
agaaaaaaaacagctcttat

SEQ ID NO: 91517 - DNA, 20 bp, Artificial Sequence
  Description of Artificial Sequence: Synthetic oligonucleotide
  Target: LAMA2; (-) strand; PAM type: NRG; PAM sequence: CAG
aattattgatagaaaaaaaa

SEQ ID NO: 91518 - DNA, 20 bp, Artificial Sequence
  Description of Artificial Sequence: Synthetic oligonucleotide
  Target: LAMA2; (-) strand; PAM type: NRG; PAM sequence: TAG
attatttgtgtaattattga

SEQ ID NO: 91519 - DNA, 20 bp, Artificial Sequence
  Description of Artificial Sequence: Synthetic oligonucleotide
  Target: LAMA2; (-) strand; PAM type: NRG; PAM sequence: AAG
gatattcaagttttgttttt

SEQ ID NO: 91520 - DNA, 20 bp, Artificial Sequence
  Description of Artificial Sequence: Synthetic oligonucleotide
  Target: LAMA2; (-) strand; PAM type: NRG; PAM sequence: AAG
acagcttttggtagatattc

SEQ ID NO: 91521 - DNA, 20 bp, Artificial Sequence
  Description of Artificial Sequence: Synthetic oligonucleotide
  Target: LAMA2; (-) strand; PAM type: NRG; PAM sequence: TAG
ttgaaagccacagcttttgg

SEQ ID NO: 91522 - DNA, 20 bp, Artificial Sequence
  Description of Artificial Sequence: Synthetic oligonucleotide
  Target: LAMA2; (-) strand; PAM type: NRG; PAM sequence: TGG
taattgaaagccacagcttt

SEQ ID NO: 91523 - DNA, 20 bp, Artificial Sequence
  Description of Artificial Sequence: Synthetic oligonucleotide
  Target: LAMA2; (-) strand; PAM type: NRG; PAM sequence: CAG
aatactctaattgaaagcca

SEQ ID NO: 91524 - DNA, 20 bp, Artificial Sequence
  Description of Artificial Sequence: Synthetic oligonucleotide
  Target: LAMA2; (-) strand; PAM type: NRG; PAM sequence: AAG
gtggttaatactctaattga

SEQ ID NO: 91525 - DNA, 20 bp, Artificial Sequence
  Description of Artificial Sequence: Synthetic oligonucleotide
  Target: LAMA2; (-) strand; PAM type: NRG; PAM sequence: TGG
agttacaaaatgaaattatg

SEQ ID NO: 91526 - DNA, 20 bp, Artificial Sequence
  Description of Artificial Sequence: Synthetic oligonucleotide
  Target: LAMA2; (-) strand; PAM type: NRG; PAM sequence: GAG
caaaatatctcagagagaaa

SEQ ID NO: 91527 - DNA, 20 bp, Artificial Sequence
  Description of Artificial Sequence: Synthetic oligonucleotide
  Target: LAMA2; (-) strand; PAM type: NRG; PAM sequence: AAG
ggcaaaatatctcagagaga

SEQ ID NO: 91528 - DNA, 20 bp, Artificial Sequence
  Description of Artificial Sequence: Synthetic oligonucleotide
  Target: LAMA2; (-) strand; PAM type: NRG; PAM sequence: GAG
tataggcaaaatatctcaga

SEQ ID NO: 91529 - DNA, 20 bp, Artificial Sequence
  Description of Artificial Sequence: Synthetic oligonucleotide
  Target: LAMA2; (-) strand; PAM type: NRG; PAM sequence: GAG
gttataggcaaaatatctca

SEQ ID NO: 91530 - DNA, 20 bp, Artificial Sequence
  Description of Artificial Sequence: Synthetic oligonucleotide
  Target: LAMA2; (-) strand; PAM type: NRG; PAM sequence: CAG
cagttataggcaaaatatct

SEQ ID NO: 91531 - DNA, 20 bp, Artificial Sequence
  Description of Artificial Sequence: Synthetic oligonucleotide
  Target: LAMA2; (-) strand; PAM type: NRG; PAM sequence: AGG
aacatcagattttcagttat

SEQ ID NO: 91532 - DNA, 20 bp, Artificial Sequence
  Description of Artificial Sequence: Synthetic oligonucleotide
  Target: LAMA2; (-) strand; PAM type: NRG; PAM sequence: TAG
aaacatcagattttcagtta

SEQ ID NO: 91533 - DNA, 20 bp, Artificial Sequence
  Description of Artificial Sequence: Synthetic oligonucleotide
  Target: LAMA2; (-) strand; PAM type: NRG; PAM sequence: CAG
agacagaaacatcagatttt

SEQ ID NO: 91534 - DNA, 20 bp, Artificial Sequence
  Description of Artificial Sequence: Synthetic oligonucleotide
  Target: LAMA2; (-) strand; PAM type: NRG; PAM sequence: CAG
tgtagcaaagacagaaacat

SEQ ID NO: 91535 - DNA, 20 bp, Artificial Sequence
  Description of Artificial Sequence: Synthetic oligonucleotide
  Target: LAMA2; (-) strand; PAM type: NRG; PAM sequence: CAG
gatcaaatatgtagcaaaga

SEQ ID NO: 91536 - DNA, 20 bp, Artificial Sequence
  Description of Artificial Sequence: Synthetic oligonucleotide
  Target: LAMA2; (-) strand; PAM type: NRG; PAM sequence: AAG
aatagatcaaatatgtagca

SEQ ID NO: 91537 - DNA, 20 bp, Artificial Sequence
  Description of Artificial Sequence: Synthetic oligonucleotide
  Target: LAMA2; (-) strand; PAM type: NRG; PAM sequence: TAG
catacaatagatcaaatatg

SEQ ID NO: 91538 - DNA, 20 bp, Artificial Sequence
  Description of Artificial Sequence: Synthetic oligonucleotide
  Target: LAMA2; (-) strand; PAM type: NRG; PAM sequence: TAG
tgctaccatccagcatacaa

SEQ ID NO: 91539 - DNA, 20 bp, Artificial Sequence
  Description of Artificial Sequence: Synthetic oligonucleotide
  Target: LAMA2; (-) strand; PAM type: NRG; PAM sequence: CAG
agtgctattctgctaccatc

SEQ ID NO: 91540 - DNA, 20 bp, Artificial Sequence
  Description of Artificial Sequence: Synthetic oligonucleotide
  Target: LAMA2; (-) strand; PAM type: NRG; PAM sequence: AAG
aatgaagagaaaatattttg

SEQ ID NO: 91541 - DNA, 20 bp, Artificial Sequence
  Description of Artificial Sequence: Synthetic oligonucleotide
  Target: LAMA2; (-) strand; PAM type: NRG; PAM sequence: GAG
aacattatgatgaaaatgaa

SEQ ID NO: 91542 - DNA, 20 bp, Artificial Sequence
  Description of Artificial Sequence: Synthetic oligonucleotide
  Target: LAMA2; (-) strand; PAM type: NRG; PAM sequence: AAG
ataacattatgatgaaaatg

SEQ ID NO: 91543 - DNA, 20 bp, Artificial Sequence
  Description of Artificial Sequence: Synthetic oligonucleotide
  Target: LAMA2; (-) strand; PAM type: NRG; PAM sequence: TGG
aaaaatagagtgctaaattt

SEQ ID NO: 91544 - DNA, 20 bp, Artificial Sequence
  Description of Artificial Sequence: Synthetic oligonucleotide
  Target: LAMA2; (-) strand; PAM type: NRG; PAM sequence: GAG
agaaaagtaaaaaaaaaata

SEQ ID NO: 91545 - DNA, 20 bp, Artificial Sequence
  Description of Artificial Sequence: Synthetic oligonucleotide
  Target: LAMA2; (-) strand; PAM type: NRG; PAM sequence: TAG
agagaaaagtaaaaaaaaaa

SEQ ID NO: 91546 - DNA, 20 bp, Artificial Sequence
  Description of Artificial Sequence: Synthetic oligonucleotide
  Target: LAMA2; (-) strand; PAM type: NRG; PAM sequence: AAG
agaattaaaaaatgagagaa

SEQ ID NO: 91547 - DNA, 20 bp, Artificial Sequence
  Description of Artificial Sequence: Synthetic oligonucleotide
  Target: LAMA2; (-) strand; PAM type: NRG; PAM sequence: GAG
gatacagaattaaaaaatga

SEQ ID NO: 91548 - DNA, 20 bp, Artificial Sequence
  Description of Artificial Sequence: Synthetic oligonucleotide
  Target: LAMA2; (-) strand; PAM type: NRG; PAM sequence: GAG
gtgatacagaattaaaaaat

SEQ ID NO: 91549 - DNA, 20 bp, Artificial Sequence
  Description of Artificial Sequence: Synthetic oligonucleotide
  Target: LAMA2; (-) strand; PAM type: NRG; PAM sequence: CAG
agtagaggaaaagtgtgata

SEQ ID NO: 91550 - DNA, 20 bp, Artificial Sequence
  Description of Artificial Sequence: Synthetic oligonucleotide
  Target: LAMA2; (-) strand; PAM type: NRG; PAM sequence: AAG
ttagaaatgaagtagaggaa

SEQ ID NO: 91551 - DNA, 20 bp, Artificial Sequence
  Description of Artificial Sequence: Synthetic oligonucleotide
  Target: LAMA2; (-) strand; PAM type: NRG; PAM sequence: AGG
tattcttagaaatgaagtag

SEQ ID NO: 91552 - DNA, 20 bp, Artificial Sequence
  Description of Artificial Sequence: Synthetic oligonucleotide
  Target: LAMA2; (-) strand; PAM type: NRG; PAM sequence: GAG
gtattcttagaaatgaagta

SEQ ID NO: 91553 - DNA, 20 bp, Artificial Sequence
  Description of Artificial Sequence: Synthetic oligonucleotide
  Target: LAMA2; (-) strand; PAM type: NRG; PAM sequence: TAG
ttgtattcttagaaatgaag

SEQ ID NO: 91554 - DNA, 20 bp, Artificial Sequence
  Description of Artificial Sequence: Synthetic oligonucleotide
  Target: LAMA2; (-) strand; PAM type: NRG; PAM sequence: AAG
tggttgtattcttagaaatg

SEQ ID NO: 91555 - DNA, 20 bp, Artificial Sequence
  Description of Artificial Sequence: Synthetic oligonucleotide
  Target: LAMA2; (-) strand; PAM type: NRG; PAM sequence: TAG
ttgtgatttggttgtattct

SEQ ID NO: 91556 - DNA, 20 bp, Artificial Sequence
  Description of Artificial Sequence: Synthetic oligonucleotide
  Target: LAMA2; (-) strand; PAM type: NRG; PAM sequence: TGG
tgcttcagatgattgtgatt

SEQ ID NO: 91557 - DNA, 20 bp, Artificial Sequence
  Description of Artificial Sequence: Synthetic oligonucleotide
  Target: LAMA2; (-) strand; PAM type: NRG; PAM sequence: CAG
attctgaagattatatgctt

SEQ ID NO: 91558 - DNA, 20 bp, Artificial Sequence
  Description of Artificial Sequence: Synthetic oligonucleotide
  Target: LAMA2; (-) strand; PAM type: NRG; PAM sequence: AAG
attatattcttgacattctg

SEQ ID NO: 91559 - DNA, 20 bp, Artificial Sequence
  Description of Artificial Sequence: Synthetic oligonucleotide
  Target: LAMA2; (-) strand; PAM type: NRG; PAM sequence: AGG
gtaggcagttttctatatca

SEQ ID NO: 91560 - DNA, 20 bp, Artificial Sequence
  Description of Artificial Sequence: Synthetic oligonucleotide
  Target: LAMA2; (-) strand; PAM type: NRG; PAM sequence: AAG
tgtaggcagttttctatatc

SEQ ID NO: 91561 - DNA, 20 bp, Artificial Sequence
  Description of Artificial Sequence: Synthetic oligonucleotide
  Target: LAMA2; (-) strand; PAM type: NRG; PAM sequence: CAG
acaaatcaaagacctgtagg

SEQ ID NO: 91562 - DNA, 20 bp, Artificial Sequence
  Description of Artificial Sequence: Synthetic oligonucleotide
  Target: LAMA2; (-) strand; PAM type: NRG; PAM sequence: AGG
taaacaaatcaaagacctgt

SEQ ID NO: 91563 - DNA, 20 bp, Artificial Sequence
  Description of Artificial Sequence: Synthetic oligonucleotide
  Target: LAMA2; (-) strand; PAM type: NRG; PAM sequence: TAG
ctaaacaaatcaaagacctg

SEQ ID NO: 91564 - DNA, 20 bp, Artificial Sequence
  Description of Artificial Sequence: Synthetic oligonucleotide
  Target: LAMA2; (-) strand; PAM type: NRG; PAM sequence: AAG
attaggtgctaaacaaatca

SEQ ID NO: 91565 - DNA, 20 bp, Artificial Sequence
  Description of Artificial Sequence: Synthetic oligonucleotide
  Target: LAMA2; (-) strand; PAM type: NRG; PAM sequence: AGG
caataaatatctcaaacatt

SEQ ID NO: 91566 - DNA, 20 bp, Artificial Sequence
  Description of Artificial Sequence: Synthetic oligonucleotide
  Target: LAMA2; (-) strand; PAM type: NRG; PAM sequence: TAG
acaataaatatctcaaacat

SEQ ID NO: 91567 - DNA, 20 bp, Artificial Sequence
  Description of Artificial Sequence: Synthetic oligonucleotide
  Target: LAMA2; (-) strand; PAM type: NRG; PAM sequence: GAG
tattataaatctaggatatt

SEQ ID NO: 91568 - DNA, 20 bp, Artificial Sequence
  Description of Artificial Sequence: Synthetic oligonucleotide
  Target: LAMA2; (-) strand; PAM type: NRG; PAM sequence: AGG
attaatcttattataaatct

SEQ ID NO: 91569 - DNA, 20 bp, Artificial Sequence
  Description of Artificial Sequence: Synthetic oligonucleotide
  Target: LAMA2; (-) strand; PAM type: NRG; PAM sequence: TAG
cattaatcttattataaatc

SEQ ID NO: 91570 - DNA, 20 bp, Artificial Sequence
  Description of Artificial Sequence: Synthetic oligonucleotide
  Target: LAMA2; (-) strand; PAM type: NRG; PAM sequence: AAG
gacacactgcggtattaagt

SEQ ID NO: 91571 - DNA, 20 bp, Artificial Sequence
  Description of Artificial Sequence: Synthetic oligonucleotide
  Target: LAMA2; (-) strand; PAM type: NRG; PAM sequence: AAG
ggatgacacactgcggtatt

SEQ ID NO: 91572 - DNA, 20 bp, Artificial Sequence
  Description of Artificial Sequence: Synthetic oligonucleotide
  Target: LAMA2; (-) strand; PAM type: NRG; PAM sequence: CGG
taccttaggatgacacactg

SEQ ID NO: 91573 - DNA, 20 bp, Artificial Sequence
  Description of Artificial Sequence: Synthetic oligonucleotide
  Target: LAMA2; (-) strand; PAM type: NRG; PAM sequence: AGG
caaataaaaattgttacctt

SEQ ID NO: 91574 - DNA, 20 bp, Artificial Sequence
  Description of Artificial Sequence: Synthetic oligonucleotide
  Target: LAMA2; (-) strand; PAM type: NRG; PAM sequence: TAG
gcaaataaaaattgttacct

SEQ ID NO: 91575 - DNA, 20 bp, Artificial Sequence
  Description of Artificial Sequence: Synthetic oligonucleotide
  Target: LAMA2; (-) strand; PAM type: NRG; PAM sequence: AAG
gtgtaaaagaaaatacacag

SEQ ID NO: 91576 - DNA, 20 bp, Artificial Sequence
  Description of Artificial Sequence: Synthetic oligonucleotide
  Target: LAMA2; (-) strand; PAM type: NRG; PAM sequence: CAG
tctgtgtaaaagaaaataca

SEQ ID NO: 91577 - DNA, 20 bp, Artificial Sequence
  Description of Artificial Sequence: Synthetic oligonucleotide
  Target: LAMA2; (-) strand; PAM type: NRG; PAM sequence: AAG
cacaccagttttctgtgtaa

SEQ ID NO: 91578 - DNA, 20 bp, Artificial Sequence
  Description of Artificial Sequence: Synthetic oligonucleotide
  Target: LAMA2; (-) strand; PAM type: NRG; PAM sequence: CAG
aagtaaaaccagtttcacac

SEQ ID NO: 91579 - DNA, 20 bp, Artificial Sequence
  Description of Artificial Sequence: Synthetic oligonucleotide
  Target: LAMA2; (-) strand; PAM type: NRG; PAM sequence: CAG
gaccaggtttcaagtaaaac

SEQ ID NO: 91580 - DNA, 20 bp, Artificial Sequence
  Description of Artificial Sequence: Synthetic oligonucleotide
  Target: LAMA2; (-) strand; PAM type: NRG; PAM sequence: AAG
acattttttgaccaggtttc

SEQ ID NO: 91581 - DNA, 20 bp, Artificial Sequence
  Description of Artificial Sequence: Synthetic oligonucleotide
  Target: LAMA2; (-) strand; PAM type: NRG; PAM sequence: AGG
agtgttcacattttttgacc

SEQ ID NO: 91582 - DNA, 20 bp, Artificial Sequence
  Description of Artificial Sequence: Synthetic oligonucleotide
  Target: LAMA2; (-) strand; PAM type: NRG; PAM sequence: CAG
tagtgttcacattttttgac

SEQ ID NO: 91583 - DNA, 20 bp, Artificial Sequence
  Description of Artificial Sequence: Synthetic oligonucleotide
  Target: LAMA2; (-) strand; PAM type: NRG; PAM sequence: TAG
catgcgctctgtcaaggaaa

SEQ ID NO: 91584 - DNA, 20 bp, Artificial Sequence
  Description of Artificial Sequence: Synthetic oligonucleotide
  Target: LAMA2; (-) strand; PAM type: NRG; PAM sequence: AGG
gctagccatgcgctctgtca

SEQ ID NO: 91585 - DNA, 20 bp, Artificial Sequence
  Description of Artificial Sequence: Synthetic oligonucleotide
  Target: LAMA2; (-) strand; PAM type: NRG; PAM sequence: AAG
tgctagccatgcgctctgtc

SEQ ID NO: 91586 - DNA, 20 bp, Artificial Sequence
  Description of Artificial Sequence: Synthetic oligonucleotide
  Target: LAMA2; (-) strand; PAM type: NRG; PAM sequence: TAG
ctaagctcctatttatctgc

SEQ ID NO: 91587 - DNA, 20 bp, Artificial Sequence
  Description of Artificial Sequence: Synthetic oligonucleotide
  Target: LAMA2; (-) strand; PAM type: NRG; PAM sequence: AAG
ggcaccattttaaagaaact

SEQ ID NO: 91588 - DNA, 20 bp, Artificial Sequence
  Description of Artificial Sequence: Synthetic oligonucleotide
  Target: LAMA2; (-) strand; PAM type: NRG; PAM sequence: AAG
tccttaaaggcaccatttta

SEQ ID NO: 91589 - DNA, 20 bp, Artificial Sequence
  Description of Artificial Sequence: Synthetic oligonucleotide
  Target: LAMA2; (-) strand; PAM type: NRG; PAM sequence: AGG
acactcaaatgattccttaa

SEQ ID NO: 91590 - DNA, 20 bp, Artificial Sequence
  Description of Artificial Sequence: Synthetic oligonucleotide
  Target: LAMA2; (-) strand; PAM type: NRG; PAM sequence: AAG
tacactcaaatgattcctta

SEQ ID NO: 91591 - DNA, 20 bp, Artificial Sequence
  Description of Artificial Sequence: Synthetic oligonucleotide
  Target: LAMA2; (-) strand; PAM type: NRG; PAM sequence: CAG
tgttctgaagtggaacatct

SEQ ID NO: 91592 - DNA, 20 bp, Artificial Sequence
  Description of Artificial Sequence: Synthetic oligonucleotide
  Target: LAMA2; (-) strand; PAM type: NRG; PAM sequence: TGG
aatgaggtagtgttctgaag

SEQ ID NO: 91593 - DNA, 20 bp, Artificial Sequence
  Description of Artificial Sequence: Synthetic oligonucleotide
  Target: LAMA2; (-) strand; PAM type: NRG; PAM sequence: AAG
cataatgaggtagtgttctg

SEQ ID NO: 91594 - DNA, 20 bp, Artificial Sequence
  Description of Artificial Sequence: Synthetic oligonucleotide
  Target: LAMA2; (-) strand; PAM type: NRG; PAM sequence: TAG
ctataaatggcataatgagg

SEQ ID NO: 91595 - DNA, 20 bp, Artificial Sequence
  Description of Artificial Sequence: Synthetic oligonucleotide
  Target: LAMA2; (-) strand; PAM type: NRG; PAM sequence: AGG
tttctataaatggcataatg

SEQ ID NO: 91596 - DNA, 20 bp, Artificial Sequence
  Description of Artificial Sequence: Synthetic oligonucleotide
  Target: LAMA2; (-) strand; PAM type: NRG; PAM sequence: GAG
atttctataaatggcataat

SEQ ID NO: 91597 - DNA, 20 bp, Artificial Sequence
  Description of Artificial Sequence: Synthetic oligonucleotide
  Target: LAMA2; (-) strand; PAM type: NRG; PAM sequence: TGG
gcctagagtatttctataaa

SEQ ID NO: 91598 - DNA, 20 bp, Artificial Sequence
  Description of Artificial Sequence: Synthetic oligonucleotide
  Target: LAMA2; (-) strand; PAM type: NRG; PAM sequence: GAG
aactgacaaagcaatgccta

SEQ ID NO: 91599 - DNA, 20 bp, Artificial Sequence
  Description of Artificial Sequence: Synthetic oligonucleotide
  Target: LAMA2; (-) strand; PAM type: NRG; PAM sequence: TAG
agaactgacaaagcaatgcc

SEQ ID NO: 91600 - DNA, 20 bp, Artificial Sequence
  Description of Artificial Sequence: Synthetic oligonucleotide
  Target: LAMA2; (-) strand; PAM type: NRG; PAM sequence: AAG
aaagtacgagagaactgaca

SEQ ID NO: 91601 - DNA, 20 bp, Artificial Sequence
  Description of Artificial Sequence: Synthetic oligonucleotide
  Target: LAMA2; (-) strand; PAM type: NRG; PAM sequence: GAG
gcattattttaaaagtacga

SEQ ID NO: 91602 - DNA, 20 bp, Artificial Sequence
  Description of Artificial Sequence: Synthetic oligonucleotide
  Target: LAMA2; (-) strand; PAM type: NRG; PAM sequence: GAG
atgcattattttaaaagtac

SEQ ID NO: 91603 - DNA, 20 bp, Artificial Sequence
  Description of Artificial Sequence: Synthetic oligonucleotide
  Target: LAMA2; (-) strand; PAM type: NRG; PAM sequence: AAG
agatgtatgcattattttaa

SEQ ID NO: 91604 - DNA, 20 bp, Artificial Sequence
  Description of Artificial Sequence: Synthetic oligonucleotide
  Target: LAMA2; (-) strand; PAM type: NRG; PAM sequence: TAG
atgactataatgcgtatctc

SEQ ID NO: 91605 - DNA, 20 bp, Artificial Sequence
  Description of Artificial Sequence: Synthetic oligonucleotide
  Target: LAMA2; (-) strand; PAM type: NRG; PAM sequence: CAG
gagctcagttaaaggaaaca

SEQ ID NO: 91606 - DNA, 20 bp, Artificial Sequence
  Description of Artificial Sequence: Synthetic oligonucleotide
  Target: LAMA2; (-) strand; PAM type: NRG; PAM sequence: AGG
gtgaatctgagctcagttaa

SEQ ID NO: 91607 - DNA, 20 bp, Artificial Sequence
  Description of Artificial Sequence: Synthetic oligonucleotide
  Target: LAMA2; (-) strand; PAM type: NRG; PAM sequence: AAG
ggtgaatctgagctcagtta

SEQ ID NO: 91608 - DNA, 20 bp, Artificial Sequence
  Description of Artificial Sequence: Synthetic oligonucleotide
  Target: LAMA2; (-) strand; PAM type: NRG; PAM sequence: CAG
tagaaaggtgaatctgagct

SEQ ID NO: 91609 - DNA, 20 bp, Artificial Sequence
  Description of Artificial Sequence: Synthetic oligonucleotide
  Target: LAMA2; (-) strand; PAM type: NRG; PAM sequence: GAG
atttctagaaaggtgaatct

SEQ ID NO: 91610 - DNA, 20 bp, Artificial Sequence
  Description of Artificial Sequence: Synthetic oligonucleotide
  Target: LAMA2; (-) strand; PAM type: NRG; PAM sequence: AGG
atctagttttatttctagaa

SEQ ID NO: 91611 - DNA, 20 bp, Artificial Sequence
  Description of Artificial Sequence: Synthetic oligonucleotide
  Target: LAMA2; (-) strand; PAM type: NRG; PAM sequence: AAG
tatctagttttatttctaga

SEQ ID NO: 91612 - DNA, 20 bp, Artificial Sequence
  Description of Artificial Sequence: Synthetic oligonucleotide
  Target: LAMA2; (-) strand; PAM type: NRG; PAM sequence: TAG
gttatatctagttttatttc

SEQ ID NO: 91613 - DNA, 20 bp, Artificial Sequence
  Description of Artificial Sequence: Synthetic oligonucleotide
  Target: LAMA2; (-) strand; PAM type: NRG; PAM sequence: TAG
gtacttctataagttatatc

SEQ ID NO: 91614 - DNA, 20 bp, Artificial Sequence
  Description of Artificial Sequence: Synthetic oligonucleotide
  Target: LAMA2; (-) strand; PAM type: NRG; PAM sequence: AAG
ggaaaagcaagtacttctat

SEQ ID NO: 91615 - DNA, 20 bp, Artificial Sequence
  Description of Artificial Sequence: Synthetic oligonucleotide
  Target: LAMA2; (-) strand; PAM type: NRG; PAM sequence: AAG
tacatgaattttggaaaagc

SEQ ID NO: 91616 - DNA, 20 bp, Artificial Sequence
  Description of Artificial Sequence: Synthetic oligonucleotide
  Target: LAMA2; (-) strand; PAM type: NRG; PAM sequence: AAG
catctacatgaattttggaa

SEQ ID NO: 91617 - DNA, 20 bp, Artificial Sequence
  Description of Artificial Sequence: Synthetic oligonucleotide
  Target: LAMA2; (-) strand; PAM type: NRG; PAM sequence: TGG
tctctcatctacatgaattt

SEQ ID NO: 91618 - DNA, 20 bp, Artificial Sequence
  Description of Artificial Sequence: Synthetic oligonucleotide
  Target: LAMA2; (-) strand; PAM type: NRG; PAM sequence: TAG
aaatcaaatttgggttgaca

SEQ ID NO: 91619 - DNA, 20 bp, Artificial Sequence
  Description of Artificial Sequence: Synthetic oligonucleotide
  Target: LAMA2; (-) strand; PAM type: NRG; PAM sequence: GGG
ttatatgtaaaatcaaattt

SEQ ID NO: 91620 - DNA, 20 bp, Artificial Sequence
  Description of Artificial Sequence: Synthetic oligonucleotide
  Target: LAMA2; (-) strand; PAM type: NRG; PAM sequence: TGG
tttatatgtaaaatcaaatt

SEQ ID NO: 91621 - DNA, 20 bp, Artificial Sequence
  Description of Artificial Sequence: Synthetic oligonucleotide
  Target: LAMA2; (-) strand; PAM type: NRG; PAM sequence: AGG
agtttggaatcaagagcaaa

SEQ ID NO: 91622 - DNA, 20 bp, Artificial Sequence
  Description of Artificial Sequence: Synthetic oligonucleotide
  Target: LAMA2; (-) strand; PAM type: NRG; PAM sequence: AAG
tagtttggaatcaagagcaa

SEQ ID NO: 91623 - DNA, 20 bp, Artificial Sequence
  Description of Artificial Sequence: Synthetic oligonucleotide
  Target: LAMA2; (-) strand; PAM type: NRG; PAM sequence: GAG
ttcaaatagtttggaatcaa

SEQ ID NO: 91624 - DNA, 20 bp, Artificial Sequence
  Description of Artificial Sequence: Synthetic oligonucleotide
  Target: LAMA2; (-) strand; PAM type: NRG; PAM sequence: AAG
agttcaaatagtttggaatc

SEQ ID NO: 91625 - DNA, 20 bp, Artificial Sequence
  Description of Artificial Sequence: Synthetic oligonucleotide
  Target: LAMA2; (-) strand; PAM type: NRG; PAM sequence: TGG
tcttaaaagttcaaatagtt

SEQ ID NO: 91626 - DNA, 20 bp, Artificial Sequence
  Description of Artificial Sequence: Synthetic oligonucleotide
  Target: LAMA2; (-) strand; PAM type: NRG; PAM sequence: TAG
gaggatcttaaaagttcaaa

SEQ ID NO: 91627 - DNA, 20 bp, Artificial Sequence
  Description of Artificial Sequence: Synthetic oligonucleotide
  Target: LAMA2; (-) strand; PAM type: NRG; PAM sequence: AAG
caattgagagaggatcttaa

SEQ ID NO: 91628 - DNA, 20 bp, Artificial Sequence
  Description of Artificial Sequence: Synthetic oligonucleotide
  Target: LAMA2; (-) strand; PAM type: NRG; PAM sequence: AGG
tttattatgccaattgagag

SEQ ID NO: 91629 - DNA, 20 bp, Artificial Sequence
  Description of Artificial Sequence: Synthetic oligonucleotide
  Target: LAMA2; (-) strand; PAM type: NRG; PAM sequence: GAG
atttattatgccaattgaga

SEQ ID NO: 91630 - DNA, 20 bp, Artificial Sequence
  Description of Artificial Sequence: Synthetic oligonucleotide
  Target: LAMA2; (-) strand; PAM type: NRG; PAM sequence: GAG
ttatttattatgccaattga

SEQ ID NO: 91631 - DNA, 20 bp, Artificial Sequence
  Description of Artificial Sequence: Synthetic oligonucleotide
  Target: LAMA2; (-) strand; PAM type: NRG; PAM sequence: GAG
agttatttattatgccaatt

SEQ ID NO: 91632 - DNA, 20 bp, Artificial Sequence
  Description of Artificial Sequence: Synthetic oligonucleotide
  Target: LAMA2; (-) strand; PAM type: NRG; PAM sequence: AAG
cttaaaacaagagtagaatt

SEQ ID NO: 91633 - DNA, 20 bp, Artificial Sequence
  Description of Artificial Sequence: Synthetic oligonucleotide
  Target: LAMA2; (-) strand; PAM type: NRG; PAM sequence: TAG
aacaagccttaaaacaagag

SEQ ID NO: 91634 - DNA, 20 bp, Artificial Sequence
  Description of Artificial Sequence: Synthetic oligonucleotide
  Target: LAMA2; (-) strand; PAM type: NRG; PAM sequence: GAG
ggaaacaagccttaaaacaa

SEQ ID NO: 91635 - DNA, 20 bp, Artificial Sequence
  Description of Artificial Sequence: Synthetic oligonucleotide
  Target: LAMA2; (-) strand; PAM type: NRG; PAM sequence: AAG
gtggaaacaagccttaaaac

SEQ ID NO: 91636 - DNA, 20 bp, Artificial Sequence
  Description of Artificial Sequence: Synthetic oligonucleotide
  Target: LAMA2; (-) strand; PAM type: NRG; PAM sequence: AAG
agaacaaagtatgtggaaac

SEQ ID NO: 91637 - DNA, 20 bp, Artificial Sequence
  Description of Artificial Sequence: Synthetic oligonucleotide
  Target: LAMA2; (-) strand; PAM type: NRG; PAM sequence: TGG
aaggatgagaacaaagtatg

SEQ ID NO: 91638 - DNA, 20 bp, Artificial Sequence
  Description of Artificial Sequence: Synthetic oligonucleotide
  Target: LAMA2; (-) strand; PAM type: NRG; PAM sequence: AAG
taatgcaaaggatgagaaca

SEQ ID NO: 91639 - DNA, 20 bp, Artificial Sequence
  Description of Artificial Sequence: Synthetic oligonucleotide
  Target: LAMA2; (-) strand; PAM type: NRG; PAM sequence: GAG
taaaagataatgcaaaggat

SEQ ID NO: 91640 - DNA, 20 bp, Artificial Sequence
  Description of Artificial Sequence: Synthetic oligonucleotide
  Target: LAMA2; (-) strand; PAM type: NRG; PAM sequence: AGG
ttgtataaaagataatgcaa

SEQ ID NO: 91641 - DNA, 20 bp, Artificial Sequence
  Description of Artificial Sequence: Synthetic oligonucleotide
  Target: LAMA2; (-) strand; PAM type: NRG; PAM sequence: AAG
tttgtataaaagataatgca

SEQ ID NO: 91642 - DNA, 20 bp, Artificial Sequence
  Description of Artificial Sequence: Synthetic oligonucleotide
  Target: LAMA2; (-) strand; PAM type: NRG; PAM sequence: AAG
ggcacttagaatttgtataa

SEQ ID NO: 91643 - DNA, 20 bp, Artificial Sequence
  Description of Artificial Sequence: Synthetic oligonucleotide
  Target: LAMA2; (-) strand; PAM type: NRG; PAM sequence: TAG
ttttatattcagtgggcact

SEQ ID NO: 91644 - DNA, 20 bp, Artificial Sequence
  Description of Artificial Sequence: Synthetic oligonucleotide
  Target: LAMA2; (-) strand; PAM type: NRG; PAM sequence: GGG
caagtaattttatattcagt

SEQ ID NO: 91645 - DNA, 20 bp, Artificial Sequence
  Description of Artificial Sequence: Synthetic oligonucleotide
  Target: LAMA2; (-) strand; PAM type: NRG; PAM sequence: TGG
tcaagtaattttatattcag

SEQ ID NO: 91646 - DNA, 20 bp, Artificial Sequence
  Description of Artificial Sequence: Synthetic oligonucleotide
  Target: LAMA2; (-) strand; PAM type: NRG; PAM sequence: CAG
tattcaagtaattttatatt

SEQ ID NO: 91647 - DNA, 20 bp, Artificial Sequence
  Description of Artificial Sequence: Synthetic oligonucleotide
  Target: LAMA2; (-) strand; PAM type: NRG; PAM sequence: AAG
attaagcaattgtaatattc

SEQ ID NO: 91648 - DNA, 20 bp, Artificial Sequence
  Description of Artificial Sequence: Synthetic oligonucleotide
  Target: LAMA2; (-) strand; PAM type: NRG; PAM sequence: AAG
gactaaaagcatagccaatt

SEQ ID NO: 91649 - DNA, 20 bp, Artificial Sequence
  Description of Artificial Sequence: Synthetic oligonucleotide
  Target: LAMA2; (-) strand; PAM type: NRG; PAM sequence: TAG
gaaggaagagactaaaagca

SEQ ID NO: 91650 - DNA, 20 bp, Artificial Sequence
  Description of Artificial Sequence: Synthetic oligonucleotide
  Target: LAMA2; (-) strand; PAM type: NRG; PAM sequence: AAG
ggagagaaggaagagactaa

SEQ ID NO: 91651 - DNA, 20 bp, Artificial Sequence
  Description of Artificial Sequence: Synthetic oligonucleotide
  Target: LAMA2; (-) strand; PAM type: NRG; PAM sequence: GAG
tttttgaaggagagaaggaa

SEQ ID NO: 91652 - DNA, 20 bp, Artificial Sequence
  Description of Artificial Sequence: Synthetic oligonucleotide
  Target: LAMA2; (-) strand; PAM type: NRG; PAM sequence: AAG
tatttttgaaggagagaagg

SEQ ID NO: 91653 - DNA, 20 bp, Artificial Sequence
  Description of Artificial Sequence: Synthetic oligonucleotide
  Target: LAMA2; (-) strand; PAM type: NRG; PAM sequence: AGG
aaatatttttgaaggagaga

SEQ ID NO: 91654 - DNA, 20 bp, Artificial Sequence
  Description of Artificial Sequence: Synthetic oligonucleotide
  Target: LAMA2; (-) strand; PAM type: NRG; PAM sequence: AAG
aaaatatttttgaaggagag

SEQ ID NO: 91655 - DNA, 20 bp, Artificial Sequence
  Description of Artificial Sequence: Synthetic oligonucleotide
  Target: LAMA2; (-) strand; PAM type: NRG; PAM sequence: GAG
ttgaaaatatttttgaagga

SEQ ID NO: 91656 - DNA, 20 bp, Artificial Sequence
  Description of Artificial Sequence: Synthetic oligonucleotide
  Target: LAMA2; (-) strand; PAM type: NRG; PAM sequence: GAG
tattgaaaatatttttgaag

SEQ ID NO: 91657 - DNA, 20 bp, Artificial Sequence
  Description of Artificial Sequence: Synthetic oligonucleotide
  Target: LAMA2; (-) strand; PAM type: NRG; PAM sequence: AGG
tgtattgaaaatatttttga

SEQ ID NO: 91658 - DNA, 20 bp, Artificial Sequence
  Description of Artificial Sequence: Synthetic oligonucleotide
  Target: LAMA2; (-) strand; PAM type: NRG; PAM sequence: AAG
atgtattgaaaatatttttg

SEQ ID NO: 91659 - DNA, 20 bp, Artificial Sequence
  Description of Artificial Sequence: Synthetic oligonucleotide
  Target: LAMA2; (-) strand; PAM type: NRG; PAM sequence: TAG
cagaatttatcaaacatatc

SEQ ID NO: 91660 - DNA, 20 bp, Artificial Sequence
  Description of Artificial Sequence: Synthetic oligonucleotide
  Target: LAMA2; (-) strand; PAM type: NRG; PAM sequence: CAG
aatttatacaggtaaattta

SEQ ID NO: 91661 - DNA, 20 bp, Artificial Sequence
  Description of Artificial Sequence: Synthetic oligonucleotide
  Target: LAMA2; (-) strand; PAM type: NRG; PAM sequence: AGG
tacttattaataatttatac

SEQ ID NO: 91662 - DNA, 20 bp, Artificial Sequence
  Description of Artificial Sequence: Synthetic oligonucleotide
  Target: LAMA2; (-) strand; PAM type: NRG; PAM sequence: CAG
gtacttattaataatttata

SEQ ID NO: 91663 - DNA, 20 bp, Artificial Sequence
  Description of Artificial Sequence: Synthetic oligonucleotide
  Target: LAMA2; (-) strand; PAM type: NRG; PAM sequence: GGG
ctccctaaacagataggaca

SEQ ID NO: 91664 - DNA, 20 bp, Artificial Sequence
  Description of Artificial Sequence: Synthetic oligonucleotide
  Target: LAMA2; (-) strand; PAM type: NRG; PAM sequence: AGG
tctccctaaacagataggac

SEQ ID NO: 91665 - DNA, 20 bp, Artificial Sequence
  Description of Artificial Sequence: Synthetic oligonucleotide
  Target: LAMA2; (-) strand; PAM type: NRG; PAM sequence: CAG
gtctccctaaacagatagga

SEQ ID NO: 91666 - DNA, 20 bp, Artificial Sequence
  Description of Artificial Sequence: Synthetic oligonucleotide
  Target: LAMA2; (-) strand; PAM type: NRG; PAM sequence: AGG
tattgtctccctaaacagat

SEQ ID NO: 91667 - DNA, 20 bp, Artificial Sequence
  Description of Artificial Sequence: Synthetic oligonucleotide
  Target: LAMA2; (-) strand; PAM type: NRG; PAM sequence: TAG
ttattgtctccctaaacaga

SEQ ID NO: 91668 - DNA, 20 bp, Artificial Sequence
  Description of Artificial Sequence: Synthetic oligonucleotide
  Target: LAMA2; (-) strand; PAM type: NRG; PAM sequence: CAG
atatttattgtctccctaaa

SEQ ID NO: 91669 - DNA, 20 bp, Artificial Sequence
  Description of Artificial Sequence: Synthetic oligonucleotide
  Target: LAMA2; (-) strand; PAM type: NRG; PAM sequence: TAG
tgctgagatcccatttttca

SEQ ID NO: 91670 - DNA, 20 bp, Artificial Sequence
  Description of Artificial Sequence: Synthetic oligonucleotide
  Target: LAMA2; (-) strand; PAM type: NRG; PAM sequence: GAG
tcccttaattatacagtgct

SEQ ID NO: 91671 - DNA, 20 bp, Artificial Sequence
  Description of Artificial Sequence: Synthetic oligonucleotide
  Target: LAMA2; (-) strand; PAM type: NRG; PAM sequence: CAG
atacctctcccttaattata

SEQ ID NO: 91672 - DNA, 20 bp, Artificial Sequence
  Description of Artificial Sequence: Synthetic oligonucleotide
  Target: LAMA2; (-) strand; PAM type: NRG; PAM sequence: TAG
attattgcatgtatgttctg

SEQ ID NO: 91673 - DNA, 20 bp, Artificial Sequence
  Description of Artificial Sequence: Synthetic oligonucleotide
  Target: LAMA2; (-) strand; PAM type: NRG; PAM sequence: TAG
tgcatctctctccactgcag

SEQ ID NO: 91674 - DNA, 20 bp, Artificial Sequence
  Description of Artificial Sequence: Synthetic oligonucleotide
  Target: LAMA2; (-) strand; PAM type: NRG; PAM sequence: CAG
ctttgcatctctctccactg

SEQ ID NO: 91675 - DNA, 20 bp, Artificial Sequence
  Description of Artificial Sequence: Synthetic oligonucleotide
  Target: LAMA2; (-) strand; PAM type: NRG; PAM sequence: AGG
atttaagatttctccactcc

SEQ ID NO: 91676 - DNA, 20 bp, Artificial Sequence
  Description of Artificial Sequence: Synthetic oligonucleotide
  Target: LAMA2; (-) strand; PAM type: NRG; PAM sequence: CAG
aatttaagatttctccactc

SEQ ID NO: 91677 - DNA, 20 bp, Artificial Sequence
  Description of Artificial Sequence: Synthetic oligonucleotide
  Target: LAMA2; (-) strand; PAM type: NRG; PAM sequence: AAG
cattatttagcatccaattt

SEQ ID NO: 91678 - DNA, 20 bp, Artificial Sequence
  Description of Artificial Sequence: Synthetic oligonucleotide
  Target: LAMA2; (-) strand; PAM type: NRG; PAM sequence: TAG
atctatctgttaccattatt

SEQ ID NO: 91679 - DNA, 20 bp, Artificial Sequence
  Description of Artificial Sequence: Synthetic oligonucleotide
  Target: LAMA2; (-) strand; PAM type: NRG; PAM sequence: AAG
tattgtgtgacagatacagg

SEQ ID NO: 91680 - DNA, 20 bp, Artificial Sequence
  Description of Artificial Sequence: Synthetic oligonucleotide
  Target: LAMA2; (-) strand; PAM type: NRG; PAM sequence: AGG
aattattgtgtgacagatac

SEQ ID NO: 91681 - DNA, 20 bp, Artificial Sequence
  Description of Artificial Sequence: Synthetic oligonucleotide
  Target: LAMA2; (-) strand; PAM type: NRG; PAM sequence: CAG
caattattgtgtgacagata

SEQ ID NO: 91682 - DNA, 20 bp, Artificial Sequence
  Description of Artificial Sequence: Synthetic oligonucleotide
  Target: LAMA2; (-) strand; PAM type: NRG; PAM sequence: CAG
atcaaacaattattgtgtga

SEQ ID NO: 91683 - DNA, 20 bp, Artificial Sequence
  Description of Artificial Sequence: Synthetic oligonucleotide
  Target: LAMA2; (-) strand; PAM type: NRG; PAM sequence: AAG
aagttcttttatggattaca

SEQ ID NO: 91684 - DNA, 20 bp, Artificial Sequence
  Description of Artificial Sequence: Synthetic oligonucleotide
  Target: LAMA2; (-) strand; PAM type: NRG; PAM sequence: TGG
gattcaattaagttctttta

SEQ ID NO: 91685 - DNA, 20 bp, Artificial Sequence
  Description of Artificial Sequence: Synthetic oligonucleotide
  Target: LAMA2; (-) strand; PAM type: NRG; PAM sequence: AAG
cattgtctcttgattcaatt

SEQ ID NO: 91686 - DNA, 20 bp, Artificial Sequence
  Description of Artificial Sequence: Synthetic oligonucleotide
  Target: LAMA2; (-) strand; PAM type: NRG; PAM sequence: AAG
gaagtcagagagaaaatcca

SEQ ID NO: 91687 - DNA, 20 bp, Artificial Sequence
  Description of Artificial Sequence: Synthetic oligonucleotide
  Target: LAMA2; (-) strand; PAM type: NRG; PAM sequence: GAG
gaagaaatgaagaagtcaga

SEQ ID NO: 91688 - DNA, 20 bp, Artificial Sequence
  Description of Artificial Sequence: Synthetic oligonucleotide
  Target: LAMA2; (-) strand; PAM type: NRG; PAM sequence: GAG
tagaagaaatgaagaagtca

SEQ ID NO: 91689 - DNA, 20 bp, Artificial Sequence
  Description of Artificial Sequence: Synthetic oligonucleotide
  Target: LAMA2; (-) strand; PAM type: NRG; PAM sequence: CAG
agtagaagaaatgaagaagt

SEQ ID NO: 91690 - DNA, 20 bp, Artificial Sequence
  Description of Artificial Sequence: Synthetic oligonucleotide
  Target: LAMA2; (-) strand; PAM type: NRG; PAM sequence: AAG
agagagtagaagaaatgaag

SEQ ID NO: 91691 - DNA, 20 bp, Artificial Sequence
  Description of Artificial Sequence: Synthetic oligonucleotide
  Target: LAMA2; (-) strand; PAM type: NRG; PAM sequence: AAG
tttagagagtagaagaaatg

SEQ ID NO: 91692 - DNA, 20 bp, Artificial Sequence
  Description of Artificial Sequence: Synthetic oligonucleotide
  Target: LAMA2; (-) strand; PAM type: NRG; PAM sequence: AAG
aaatgaattttagagagtag

SEQ ID NO: 91693 - DNA, 20 bp, Artificial Sequence
  Description of Artificial Sequence: Synthetic oligonucleotide
  Target: LAMA2; (-) strand; PAM type: NRG; PAM sequence: TAG
aaaaaatgaattttagagag

SEQ ID NO: 91694 - DNA, 20 bp, Artificial Sequence
  Description of Artificial Sequence: Synthetic oligonucleotide
  Target: LAMA2; (-) strand; PAM type: NRG; PAM sequence: GAG
aggaaaaaatgaattttaga

SEQ ID NO: 91695 - DNA, 20 bp, Artificial Sequence
  Description of Artificial Sequence: Synthetic oligonucleotide
  Target: LAMA2; (-) strand; PAM type: NRG; PAM sequence: GAG
taaggaaaaaatgaatttta

SEQ ID NO: 91696 - DNA, 20 bp, Artificial Sequence
  Description of Artificial Sequence: Synthetic oligonucleotide
  Target: LAMA2; (-) strand; PAM type: NRG; PAM sequence: TAG
gataaggaaaaaatgaattt

SEQ ID NO: 91697 - DNA, 20 bp, Artificial Sequence
  Description of Artificial Sequence: Synthetic oligonucleotide
  Target: LAMA2; (-) strand; PAM type: NRG; PAM sequence: AGG
agggacagaaagttttgata

SEQ ID NO: 91698 - DNA, 20 bp, Artificial Sequence
  Description of Artificial Sequence: Synthetic oligonucleotide
  Target: LAMA2; (-) strand; PAM type: NRG; PAM sequence: AAG
tagggacagaaagttttgat

SEQ ID NO: 91699 - DNA, 20 bp, Artificial Sequence
  Description of Artificial Sequence: Synthetic oligonucleotide
  Target: LAMA2; (-) strand; PAM type: NRG; PAM sequence: AAG
atagtgaatttagggacaga

SEQ ID NO: 91700 - DNA, 20 bp, Artificial Sequence
  Description of Artificial Sequence: Synthetic oligonucleotide
  Target: LAMA2; (-) strand; PAM type: NRG; PAM sequence: CAG
aataatagtgaatttaggga

SEQ ID NO: 91701 - DNA, 20 bp, Artificial Sequence
  Description of Artificial Sequence: Synthetic oligonucleotide
  Target: LAMA2; (-) strand; PAM type: NRG; PAM sequence: GGG
actgaataatagtgaattta

SEQ ID NO: 91702 - DNA, 20 bp, Artificial Sequence
  Description of Artificial Sequence: Synthetic oligonucleotide
  Target: LAMA2; (-) strand; PAM type: NRG; PAM sequence: AGG
gactgaataatagtgaattt

SEQ ID NO: 91703 - DNA, 20 bp, Artificial Sequence
  Description of Artificial Sequence: Synthetic oligonucleotide
  Target: LAMA2; (-) strand; PAM type: NRG; PAM sequence: TAG
ggactgaataatagtgaatt

SEQ ID NO: 91704 - DNA, 20 bp, Artificial Sequence
  Description of Artificial Sequence: Synthetic oligonucleotide
  Target: LAMA2; (-) strand; PAM type: NRG; PAM sequence: TAG
gaaaggataggactgaataa

SEQ ID NO: 91705 - DNA, 20 bp, Artificial Sequence
  Description of Artificial Sequence: Synthetic oligonucleotide
  Target: LAMA2; (-) strand; PAM type: NRG; PAM sequence: AGG
aaatgaaataatgaaaggat

SEQ ID NO: 91706 - DNA, 20 bp, Artificial Sequence
  Description of Artificial Sequence: Synthetic oligonucleotide
  Target: LAMA2; (-) strand; PAM type: NRG; PAM sequence: TAG
caaatgaaataatgaaagga

SEQ ID NO: 91707 - DNA, 20 bp, Artificial Sequence
  Description of Artificial Sequence: Synthetic oligonucleotide
  Target: LAMA2; (-) strand; PAM type: NRG; PAM sequence: AGG
aaagcaaatgaaataatgaa

SEQ ID NO: 91708 - DNA, 20 bp, Artificial Sequence
  Description of Artificial Sequence: Synthetic oligonucleotide
  Target: LAMA2; (-) strand; PAM type: NRG; PAM sequence: AAG
aaaagcaaatgaaataatga

SEQ ID NO: 91709 - DNA, 20 bp, Artificial Sequence
  Description of Artificial Sequence: Synthetic oligonucleotide
  Target: LAMA2; (-) strand; PAM type: NRG; PAM sequence: AAG
acaaactacacttaattgaa

SEQ ID NO: 91710 - DNA, 20 bp, Artificial Sequence
  Description of Artificial Sequence: Synthetic oligonucleotide
  Target: LAMA2; (-) strand; PAM type: NRG; PAM sequence: TGG
gataacaaggctagaatgac

SEQ ID NO: 91711 - DNA, 20 bp, Artificial Sequence
  Description of Artificial Sequence: Synthetic oligonucleotide
  Target: LAMA2; (-) strand; PAM type: NRG; PAM sequence: TAG
gatattagtgataacaaggc

SEQ ID NO: 91712 - DNA, 20 bp, Artificial Sequence
  Description of Artificial Sequence: Synthetic oligonucleotide
  Target: LAMA2; (-) strand; PAM type: NRG; PAM sequence: AGG
ccaggatattagtgataaca

SEQ ID NO: 91713 - DNA, 20 bp, Artificial Sequence
  Description of Artificial Sequence: Synthetic oligonucleotide
  Target: LAMA2; (-) strand; PAM type: NRG; PAM sequence: AAG
cccaggatattagtgataac

SEQ ID NO: 91714 - DNA, 20 bp, Artificial Sequence
  Description of Artificial Sequence: Synthetic oligonucleotide
  Target: LAMA2; (-) strand; PAM type: NRG; PAM sequence: TAG
tttaagggatcccaggatat

SEQ ID NO: 91715 - DNA, 20 bp, Artificial Sequence
  Description of Artificial Sequence: Synthetic oligonucleotide
  Target: LAMA2; (-) strand; PAM type: NRG; PAM sequence: AGG
ctcagcttttaagggatccc

SEQ ID NO: 91716 - DNA, 20 bp, Artificial Sequence
  Description of Artificial Sequence: Synthetic oligonucleotide
  Target: LAMA2; (-) strand; PAM type: NRG; PAM sequence: CAG
actcagcttttaagggatcc

SEQ ID NO: 91717 - DNA, 20 bp, Artificial Sequence
  Description of Artificial Sequence: Synthetic oligonucleotide
  Target: LAMA2; (-) strand; PAM type: NRG; PAM sequence: GGG
ggcgtttactcagcttttaa

SEQ ID NO: 91718 - DNA, 20 bp, Artificial Sequence
  Description of Artificial Sequence: Synthetic oligonucleotide
  Target: LAMA2; (-) strand; PAM type: NRG; PAM sequence: AGG
tggcgtttactcagctttta

SEQ ID NO: 91719 - DNA, 20 bp, Artificial Sequence
  Description of Artificial Sequence: Synthetic oligonucleotide
  Target: LAMA2; (-) strand; PAM type: NRG; PAM sequence: AAG
ttggcgtttactcagctttt

SEQ ID NO: 91720 - DNA, 20 bp, Artificial Sequence
  Description of Artificial Sequence: Synthetic oligonucleotide
  Target: LAMA2; (-) strand; PAM type: NRG; PAM sequence: CAG
aatggtctttggcgtttact

SEQ ID NO: 91721 - DNA, 20 bp, Artificial Sequence
  Description of Artificial Sequence: Synthetic oligonucleotide
  Target: LAMA2; (-) strand; PAM type: NRG; PAM sequence: TGG
attaagacattaatggtctt

SEQ ID NO: 91722 - DNA, 20 bp, Artificial Sequence
  Description of Artificial Sequence: Synthetic oligonucleotide
  Target: LAMA2; (-) strand; PAM type: NRG; PAM sequence: TGG
agctggaattaagacattaa

SEQ ID NO: 91723 - DNA, 20 bp, Artificial Sequence
  Description of Artificial Sequence: Synthetic oligonucleotide
  Target: LAMA2; (-) strand; PAM type: NRG; PAM sequence: AAG
gttctcagcaagctggaatt

SEQ ID NO: 91724 - DNA, 20 bp, Artificial Sequence
  Description of Artificial Sequence: Synthetic oligonucleotide
  Target: LAMA2; (-) strand; PAM type: NRG; PAM sequence: TGG
gccagaggttctcagcaagc

SEQ ID NO: 91725 - DNA, 20 bp, Artificial Sequence
  Description of Artificial Sequence: Synthetic oligonucleotide
  Target: LAMA2; (-) strand; PAM type: NRG; PAM sequence: AAG
tttggccagaggttctcagc

SEQ ID NO: 91726 - DNA, 20 bp, Artificial Sequence
  Description of Artificial Sequence: Synthetic oligonucleotide
  Target: LAMA2; (-) strand; PAM type: NRG; PAM sequence: CAG
cttttttggccagaggttct

SEQ ID NO: 91727 - DNA, 20 bp, Artificial Sequence
  Description of Artificial Sequence: Synthetic oligonucleotide
  Target: LAMA2; (-) strand; PAM type: NRG; PAM sequence: AGG
tttgatccttttttggccag

SEQ ID NO: 91728 - DNA, 20 bp, Artificial Sequence
  Description of Artificial Sequence: Synthetic oligonucleotide
  Target: LAMA2; (-) strand; PAM type: NRG; PAM sequence: GAG
atttgatccttttttggcca

SEQ ID NO: 91729 - DNA, 20 bp, Artificial Sequence
  Description of Artificial Sequence: Synthetic oligonucleotide
  Target: LAMA2; (-) strand; PAM type: NRG; PAM sequence: CAG
tcatttgatccttttttggc

SEQ ID NO: 91730 - DNA, 20 bp, Artificial Sequence
  Description of Artificial Sequence: Synthetic oligonucleotide
  Target: LAMA2; (-) strand; PAM type: NRG; PAM sequence: TGG
ggagtcatttgatccttttt

SEQ ID NO: 91731 - DNA, 20 bp, Artificial Sequence
  Description of Artificial Sequence: Synthetic oligonucleotide
  Target: LAMA2; (-) strand; PAM type: NRG; PAM sequence: GAG
aaaagagaatgtctacaatg

SEQ ID NO: 91732 - DNA, 20 bp, Artificial Sequence
  Description of Artificial Sequence: Synthetic oligonucleotide
  Target: LAMA2; (-) strand; PAM type: NRG; PAM sequence: TGG
gtaaaagagaatgtctacaa

SEQ ID NO: 91733 - DNA, 20 bp, Artificial Sequence
  Description of Artificial Sequence: Synthetic oligonucleotide
  Target: LAMA2; (-) strand; PAM type: NRG; PAM sequence: GAG
tggccccaaatgaagtaaaa

SEQ ID NO: 91734 - DNA, 20 bp, Artificial Sequence
  Description of Artificial Sequence: Synthetic oligonucleotide
  Target: LAMA2; (-) strand; PAM type: NRG; PAM sequence: AAG
tatggccccaaatgaagtaa

SEQ ID NO: 91735 - DNA, 20 bp, Artificial Sequence
  Description of Artificial Sequence: Synthetic oligonucleotide
  Target: LAMA2; (-) strand; PAM type: NRG; PAM sequence: AAG
caacactatggccccaaatg

SEQ ID NO: 91736 - DNA, 20 bp, Artificial Sequence
  Description of Artificial Sequence: Synthetic oligonucleotide
  Target: LAMA2; (-) strand; PAM type: NRG; PAM sequence: TGG
aagatcctgaatcaacacta

SEQ ID NO: 91737 - DNA, 20 bp, Artificial Sequence
  Description of Artificial Sequence: Synthetic oligonucleotide
  Target: LAMA2; (-) strand; PAM type: NRG; PAM sequence: AAG
gtcaagtagaaatgagaaaa

SEQ ID NO: 91738 - DNA, 20 bp, Artificial Sequence
  Description of Artificial Sequence: Synthetic oligonucleotide
  Target: LAMA2; (-) strand; PAM type: NRG; PAM sequence: GAG
acaagaagtcaagtagaaat

SEQ ID NO: 91739 - DNA, 20 bp, Artificial Sequence
  Description of Artificial Sequence: Synthetic oligonucleotide
  Target: LAMA2; (-) strand; PAM type: NRG; PAM sequence: TAG
acacttcacaagaagtcaag

SEQ ID NO: 91740 - DNA, 20 bp, Artificial Sequence
  Description of Artificial Sequence: Synthetic oligonucleotide
  Target: LAMA2; (-) strand; PAM type: NRG; PAM sequence: AAG
agaacacttcacaagaagtc

SEQ ID NO: 91741 - DNA, 20 bp, Artificial Sequence
  Description of Artificial Sequence: Synthetic oligonucleotide
  Target: LAMA2; (-) strand; PAM type: NRG; PAM sequence: AAG
actgcagaacacttcacaag

SEQ ID NO: 91742 - DNA, 20 bp, Artificial Sequence
  Description of Artificial Sequence: Synthetic oligonucleotide
  Target: LAMA2; (-) strand; PAM type: NRG; PAM sequence: AAG
ttaactgcagaacacttcac

SEQ ID NO: 91743 - DNA, 20 bp, Artificial Sequence
  Description of Artificial Sequence: Synthetic oligonucleotide
  Target: LAMA2; (-) strand; PAM type: NRG; PAM sequence: CAG
atttttgaaagatttaactg

SEQ ID NO: 91744 - DNA, 20 bp, Artificial Sequence
  Description of Artificial Sequence: Synthetic oligonucleotide
  Target: LAMA2; (-) strand; PAM type: NRG; PAM sequence: AAG
gaaagtaagaaaatttttga

SEQ ID NO: 91745 - DNA, 20 bp, Artificial Sequence
  Description of Artificial Sequence: Synthetic oligonucleotide
  Target: LAMA2; (-) strand; PAM type: NRG; PAM sequence: AAG
gatgacagcactatgaaagt

SEQ ID NO: 91746 - DNA, 20 bp, Artificial Sequence
  Description of Artificial Sequence: Synthetic oligonucleotide
  Target: LAMA2; (-) strand; PAM type: NRG; PAM sequence: AAG
ctatgatgacagcactatga

SEQ ID NO: 91747 - DNA, 20 bp, Artificial Sequence
  Description of Artificial Sequence: Synthetic oligonucleotide
  Target: LAMA2; (-) strand; PAM type: NRG; PAM sequence: CAG
tcaagtgaaatctatgatga

SEQ ID NO: 91748 - DNA, 20 bp, Artificial Sequence
  Description of Artificial Sequence: Synthetic oligonucleotide
  Target: LAMA2; (-) strand; PAM type: NRG; PAM sequence: AAG
tatcccctgtctcatctgtc

SEQ ID NO: 91749 - DNA, 20 bp, Artificial Sequence
  Description of Artificial Sequence: Synthetic oligonucleotide
  Target: LAMA2; (-) strand; PAM type: NRG; PAM sequence: TAG
ttgcataacactctttttaa

SEQ ID NO: 91750 - DNA, 20 bp, Artificial Sequence
  Description of Artificial Sequence: Synthetic oligonucleotide
  Target: LAMA2; (-) strand; PAM type: NRG; PAM sequence: GAG
atttcatggaagaagaaact

SEQ ID NO: 91751 - DNA, 20 bp, Artificial Sequence
  Description of Artificial Sequence: Synthetic oligonucleotide
  Target: LAMA2; (-) strand; PAM type: NRG; PAM sequence: AAG
ttattttcatttcatggaag

SEQ ID NO: 91752 - DNA, 20 bp, Artificial Sequence
  Description of Artificial Sequence: Synthetic oligonucleotide
  Target: LAMA2; (-) strand; PAM type: NRG; PAM sequence: AAG
atattattttcatttcatgg

SEQ ID NO: 91753 - DNA, 20 bp, Artificial Sequence
  Description of Artificial Sequence: Synthetic oligonucleotide
  Target: LAMA2; (-) strand; PAM type: NRG; PAM sequence: TGG
ttaatattattttcatttca

SEQ ID NO: 91754 - DNA, 20 bp, Artificial Sequence
  Description of Artificial Sequence: Synthetic oligonucleotide
  Target: LAMA2; (-) strand; PAM type: NRG; PAM sequence: TGG
aaacaaacaattctatgagg

SEQ ID NO: 91755 - DNA, 20 bp, Artificial Sequence
  Description of Artificial Sequence: Synthetic oligonucleotide
  Target: LAMA2; (-) strand; PAM type: NRG; PAM sequence: AGG
aacaaacaaacaattctatg

SEQ ID NO: 91756 - DNA, 20 bp, Artificial Sequence
  Description of Artificial Sequence: Synthetic oligonucleotide
  Target: LAMA2; (-) strand; PAM type: NRG; PAM sequence: GAG
gaacaaacaaacaattctat

SEQ ID NO: 91757 - DNA, 20 bp, Artificial Sequence
  Description of Artificial Sequence: Synthetic oligonucleotide
  Target: LAMA2; (-) strand; PAM type: NRG; PAM sequence: AAG
aatactagtcagctaaatga

SEQ ID NO: 91758 - DNA, 20 bp, Artificial Sequence
  Description of Artificial Sequence: Synthetic oligonucleotide
  Target: LAMA2; (-) strand; PAM type: NRG; PAM sequence: CAG
cacgctcatcaaatactagt

SEQ ID NO: 91759 - DNA, 20 bp, Artificial Sequence
  Description of Artificial Sequence: Synthetic oligonucleotide
  Target: LAMA2; (-) strand; PAM type: NRG; PAM sequence: TAG
aatacacgctcatcaaatac

SEQ ID NO: 91760 - DNA, 20 bp, Artificial Sequence
  Description of Artificial Sequence: Synthetic oligonucleotide
  Target: LAMA2; (-) strand; PAM type: NRG; PAM sequence: GGG
ggcactattttccctgtgta

SEQ ID NO: 91761 - DNA, 20 bp, Artificial Sequence
  Description of Artificial Sequence: Synthetic oligonucleotide
  Target: LAMA2; (-) strand; PAM type: NRG; PAM sequence: AGG
tggcactattttccctgtgt

SEQ ID NO: 91762 - DNA, 20 bp, Artificial Sequence
  Description of Artificial Sequence: Synthetic oligonucleotide
  Target: LAMA2; (-) strand; PAM type: NRG; PAM sequence: TAG
atggcactattttccctgtg

SEQ ID NO: 91763 - DNA, 20 bp, Artificial Sequence
  Description of Artificial Sequence: Synthetic oligonucleotide
  Target: LAMA2; (-) strand; PAM type: NRG; PAM sequence: TGG
gacaatatctgtattgttaa

SEQ ID NO: 91764 - DNA, 20 bp, Artificial Sequence
  Description of Artificial Sequence: Synthetic oligonucleotide
  Target: LAMA2; (-) strand; PAM type: NRG; PAM sequence: GGG
gtgcaacgtccttggggaca

SEQ ID NO: 91765 - DNA, 20 bp, Artificial Sequence
  Description of Artificial Sequence: Synthetic oligonucleotide
  Target: LAMA2; (-) strand; PAM type: NRG; PAM sequence: AGG
agtgcaacgtccttggggac

SEQ ID NO: 91766 - DNA, 20 bp, Artificial Sequence
  Description of Artificial Sequence: Synthetic oligonucleotide
  Target: LAMA2; (-) strand; PAM type: NRG; PAM sequence: CAG
cagtgcaacgtccttgggga

SEQ ID NO: 91767 - DNA, 20 bp, Artificial Sequence
  Description of Artificial Sequence: Synthetic oligonucleotide
  Target: LAMA2; (-) strand; PAM type: NRG; PAM sequence: GGG
cactcagtgcaacgtccttg

SEQ ID NO: 91768 - DNA, 20 bp, Artificial Sequence
  Description of Artificial Sequence: Synthetic oligonucleotide
  Target: LAMA2; (-) strand; PAM type: NRG; PAM sequence: GGG
ccactcagtgcaacgtcctt

SEQ ID NO: 91769 - DNA, 20 bp, Artificial Sequence
  Description of Artificial Sequence: Synthetic oligonucleotide
  Target: LAMA2; (-) strand; PAM type: NRG; PAM sequence: TGG
accactcagtgcaacgtcct

SEQ ID NO: 91770 - DNA, 20 bp, Artificial Sequence
  Description of Artificial Sequence: Synthetic oligonucleotide
  Target: LAMA2; (-) strand; PAM type: NRG; PAM sequence: CAG
atatcgttaatgccaccact

SEQ ID NO: 91771 - DNA, 20 bp, Artificial Sequence
  Description of Artificial Sequence: Synthetic oligonucleotide
  Target: LAMA2; (-) strand; PAM type: NRG; PAM sequence: TGG
gtttatttctatttgctttc

SEQ ID NO: 91772 - DNA, 20 bp, Artificial Sequence
  Description of Artificial Sequence: Synthetic oligonucleotide
  Target: LAMA2; (-) strand; PAM type: NRG; PAM sequence: TAG
caccctgtttatttccttca

SEQ ID NO: 91773 - DNA, 20 bp, Artificial Sequence
  Description of Artificial Sequence: Synthetic oligonucleotide
  Target: LAMA2; (-) strand; PAM type: NRG; PAM sequence: TAG
cacttgcagtaactttatca

SEQ ID NO: 91774 - DNA, 20 bp, Artificial Sequence
  Description of Artificial Sequence: Synthetic oligonucleotide
  Target: LAMA2; (-) strand; PAM type: NRG; PAM sequence: CAG
aaccttcatacaaccacttg

SEQ ID NO: 91775 - DNA, 20 bp, Artificial Sequence
  Description of Artificial Sequence: Synthetic oligonucleotide
  Target: LAMA2; (-) strand; PAM type: NRG; PAM sequence: TAG
cctgacaaacttttacaaag

SEQ ID NO: 91776 - DNA, 20 bp, Artificial Sequence
  Description of Artificial Sequence: Synthetic oligonucleotide
  Target: LAMA2; (-) strand; PAM type: NRG; PAM sequence: AAG
tttcctgacaaacttttaca

SEQ ID NO: 91777 - DNA, 20 bp, Artificial Sequence
  Description of Artificial Sequence: Synthetic oligonucleotide
  Target: LAMA2; (-) strand; PAM type: NRG; PAM sequence: AAG
ttagctgtcaccacctcagg

SEQ ID NO: 91778 - DNA, 20 bp, Artificial Sequence
  Description of Artificial Sequence: Synthetic oligonucleotide
  Target: LAMA2; (-) strand; PAM type: NRG; PAM sequence: AGG
gatttagctgtcaccacctc

SEQ ID NO: 91779 - DNA, 20 bp, Artificial Sequence
  Description of Artificial Sequence: Synthetic oligonucleotide
  Target: LAMA2; (-) strand; PAM type: NRG; PAM sequence: CAG
cgatttagctgtcaccacct

SEQ ID NO: 91780 - DNA, 20 bp, Artificial Sequence
  Description of Artificial Sequence: Synthetic oligonucleotide
  Target: LAMA2; (-) strand; PAM type: NRG; PAM sequence: TAG
tcattcttcaacactcgatt

SEQ ID NO: 91781 - DNA, 20 bp, Artificial Sequence
  Description of Artificial Sequence: Synthetic oligonucleotide
  Target: LAMA2; (-) strand; PAM type: NRG; PAM sequence: TGG
tatgctgcttccttagcagc

SEQ ID NO: 91782 - DNA, 20 bp, Artificial Sequence
  Description of Artificial Sequence: Synthetic oligonucleotide
  Target: LAMA2; (-) strand; PAM type: NRG; PAM sequence: CAG
gatctatgctgcttccttag

SEQ ID NO: 91783 - DNA, 20 bp, Artificial Sequence
  Description of Artificial Sequence: Synthetic oligonucleotide
  Target: LAMA2; (-) strand; PAM type: NRG; PAM sequence: TAG
cacgatctatgctgcttcct

SEQ ID NO: 91784 - DNA, 20 bp, Artificial Sequence
  Description of Artificial Sequence: Synthetic oligonucleotide
  Target: LAMA2; (-) strand; PAM type: NRG; PAM sequence: CAG
ctccttctttccagtcctta

SEQ ID NO: 91785 - DNA, 20 bp, Artificial Sequence
  Description of Artificial Sequence: Synthetic oligonucleotide
  Target: LAMA2; (-) strand; PAM type: NRG; PAM sequence: CAG
ccagccacgctccttctttc

SEQ ID NO: 91786 - DNA, 20 bp, Artificial Sequence
  Description of Artificial Sequence: Synthetic oligonucleotide
  Target: LAMA2; (-) strand; PAM type: NRG; PAM sequence: CAG
tccccttgcttacaaggctc

SEQ ID NO: 91787 - DNA, 20 bp, Artificial Sequence
  Description of Artificial Sequence: Synthetic oligonucleotide
  Target: LAMA2; (-) strand; PAM type: NRG; PAM sequence: AGG
cacttttccccttgcttaca

SEQ ID NO: 91788 - DNA, 20 bp, Artificial Sequence
  Description of Artificial Sequence: Synthetic oligonucleotide
  Target: LAMA2; (-) strand; PAM type: NRG; PAM sequence: AAG
ccacttttccccttgcttac

SEQ ID NO: 91789 - DNA, 20 bp, Artificial Sequence
  Description of Artificial Sequence: Synthetic oligonucleotide
  Target: LAMA2; (-) strand; PAM type: NRG; PAM sequence: TGG
catatgtgcaaatctcctca

SEQ ID NO: 91790 - DNA, 20 bp, Artificial Sequence
  Description of Artificial Sequence: Synthetic oligonucleotide
  Target: LAMA2; (-) strand; PAM type: NRG; PAM sequence: GAG
gtaatgatgttccatgccat

SEQ ID NO: 91791 - DNA, 20 bp, Artificial Sequence
  Description of Artificial Sequence: Synthetic oligonucleotide
  Target: LAMA2; (-) strand; PAM type: NRG; PAM sequence: AGG
tactccactactctgctgaa

SEQ ID NO: 91792 - DNA, 20 bp, Artificial Sequence
  Description of Artificial Sequence: Synthetic oligonucleotide
  Target: LAMA2; (-) strand; PAM type: NRG; PAM sequence: AAG
ctactccactactctgctga

SEQ ID NO: 91793 - DNA, 20 bp, Artificial Sequence
  Description of Artificial Sequence: Synthetic oligonucleotide
  Target: LAMA2; (-) strand; PAM type: NRG; PAM sequence: CAG
caaaacccaaaaatgtaaat

SEQ ID NO: 91794 - DNA, 20 bp, Artificial Sequence
  Description of Artificial Sequence: Synthetic oligonucleotide
  Target: LAMA2; (-) strand; PAM type: NRG; PAM sequence: AAG
tccagcctaggtgacagagc

SEQ ID NO: 91795 - DNA, 20 bp, Artificial Sequence
  Description of Artificial Sequence: Synthetic oligonucleotide
  Target: LAMA2; (-) strand; PAM type: NRG; PAM sequence: GAG
gcactccagcctaggtgaca

SEQ ID NO: 91796 - DNA, 20 bp, Artificial Sequence
  Description of Artificial Sequence: Synthetic oligonucleotide
  Target: LAMA2; (-) strand; PAM type: NRG; PAM sequence: CAG
ctgcactccagcctaggtga

SEQ ID NO: 91797 - DNA, 20 bp, Artificial Sequence
  Description of Artificial Sequence: Synthetic oligonucleotide
  Target: LAMA2; (-) strand; PAM type: NRG; PAM sequence: AGG
gcatcactgcactccagcct

SEQ ID NO: 91798 - DNA, 20 bp, Artificial Sequence
  Description of Artificial Sequence: Synthetic oligonucleotide
  Target: LAMA2; (-) strand; PAM type: NRG; PAM sequence: TAG
agcatcactgcactccagcc

SEQ ID NO: 91799 - DNA, 20 bp, Artificial Sequence
  Description of Artificial Sequence: Synthetic oligonucleotide
  Target: LAMA2; (-) strand; PAM type: NRG; PAM sequence: CAG
atgacagcatcactgcactc

SEQ ID NO: 91800 - DNA, 20 bp, Artificial Sequence
  Description of Artificial Sequence: Synthetic oligonucleotide
  Target: LAMA2; (-) strand; PAM type: NRG; PAM sequence: CAG
gaggctgcagcaagctatga

SEQ ID NO: 91801 - DNA, 20 bp, Artificial Sequence
  Description of Artificial Sequence: Synthetic oligonucleotide
  Target: LAMA2; (-) strand; PAM type: NRG; PAM sequence: AAG
caggagtttgaggctgcagc

SEQ ID NO: 91802 - DNA, 20 bp, Artificial Sequence
  Description of Artificial Sequence: Synthetic oligonucleotide
  Target: LAMA2; (-) strand; PAM type: NRG; PAM sequence: CAG
agctcaggagtttgaggctg

SEQ ID NO: 91803 - DNA, 20 bp, Artificial Sequence
  Description of Artificial Sequence: Synthetic oligonucleotide
  Target: LAMA2; (-) strand; PAM type: NRG; PAM sequence: AGG
cacttgagctcaggagtttg

SEQ ID NO: 91804 - DNA, 20 bp, Artificial Sequence
  Description of Artificial Sequence: Synthetic oligonucleotide
  Target: LAMA2; (-) strand; PAM type: NRG; PAM sequence: GAG
tcacttgagctcaggagttt

SEQ ID NO: 91805 - DNA, 20 bp, Artificial Sequence
  Description of Artificial Sequence: Synthetic oligonucleotide
  Target: LAMA2; (-) strand; PAM type: NRG; PAM sequence: GAG
ggaggatcacttgagctcag

SEQ ID NO: 91806 - DNA, 20 bp, Artificial Sequence
  Description of Artificial Sequence: Synthetic oligonucleotide
  Target: LAMA2; (-) strand; PAM type: NRG; PAM sequence: AGG
caggaggatcacttgagctc

SEQ ID NO: 91807 - DNA, 20 bp, Artificial Sequence
  Description of Artificial Sequence: Synthetic oligonucleotide
  Target: LAMA2; (-) strand; PAM type: NRG; PAM sequence: CAG
gcaggaggatcacttgagct

SEQ ID NO: 91808 - DNA, 20 bp, Artificial Sequence
  Description of Artificial Sequence: Synthetic oligonucleotide
  Target: LAMA2; (-) strand; PAM type: NRG; PAM sequence: GAG
ctgaggcaggaggatcactt

SEQ ID NO: 91809 - DNA, 20 bp, Artificial Sequence
  Description of Artificial Sequence: Synthetic oligonucleotide
  Target: LAMA2; (-) strand; PAM type: NRG; PAM sequence: AGG
actcaggaggctgaggcagg

SEQ ID NO: 91810 - DNA, 20 bp, Artificial Sequence
  Description of Artificial Sequence: Synthetic oligonucleotide
  Target: LAMA2; (-) strand; PAM type: NRG; PAM sequence: GAG
tactcaggaggctgaggcag

SEQ ID NO: 91811 - DNA, 20 bp, Artificial Sequence
  Description of Artificial Sequence: Synthetic oligonucleotide
  Target: LAMA2; (-) strand; PAM type: NRG; PAM sequence: AGG
gctactcaggaggctgaggc

SEQ ID NO: 91812 - DNA, 20 bp, Artificial Sequence
  Description of Artificial Sequence: Synthetic oligonucleotide
  Target: LAMA2; (-) strand; PAM type: NRG; PAM sequence: CAG
agctactcaggaggctgagg

SEQ ID NO: 91813 - DNA, 20 bp, Artificial Sequence
  Description of Artificial Sequence: Synthetic oligonucleotide
  Target: LAMA2; (-) strand; PAM type: NRG; PAM sequence: AGG
cccagctactcaggaggctg

SEQ ID NO: 91814 - DNA, 20 bp, Artificial Sequence
  Description of Artificial Sequence: Synthetic oligonucleotide
  Target: LAMA2; (-) strand; PAM type: NRG; PAM sequence: GAG
tcccagctactcaggaggct

SEQ ID NO: 91815 - DNA, 20 bp, Artificial Sequence
  Description of Artificial Sequence: Synthetic oligonucleotide
  Target: LAMA2; (-) strand; PAM type: NRG; PAM sequence: AGG
tgtagtcccagctactcagg

SEQ ID NO: 91816 - DNA, 20 bp, Artificial Sequence
  Description of Artificial Sequence: Synthetic oligonucleotide
  Target: LAMA2; (-) strand; PAM type: NRG; PAM sequence: GAG
ctgtagtcccagctactcag

SEQ ID NO: 91817 - DNA, 20 bp, Artificial Sequence
  Description of Artificial Sequence: Synthetic oligonucleotide
  Target: LAMA2; (-) strand; PAM type: NRG; PAM sequence: AGG
acctgtagtcccagctactc

SEQ ID NO: 91818 - DNA, 20 bp, Artificial Sequence
  Description of Artificial Sequence: Synthetic oligonucleotide
  Target: LAMA2; (-) strand; PAM type: NRG; PAM sequence: CAG
cacctgtagtcccagctact

SEQ ID NO: 91819 - DNA, 20 bp, Artificial Sequence
  Description of Artificial Sequence: Synthetic oligonucleotide
  Target: LAMA2; (-) strand; PAM type: NRG; PAM sequence: CAG
gtggtatacacctgtagtcc

SEQ ID NO: 91820 - DNA, 20 bp, Artificial Sequence
  Description of Artificial Sequence: Synthetic oligonucleotide
  Target: LAMA2; (-) strand; PAM type: NRG; PAM sequence: TAG
ggcatggtggtatacacctg

SEQ ID NO: 91821 - DNA, 20 bp, Artificial Sequence
  Description of Artificial Sequence: Synthetic oligonucleotide
  Target: LAMA2; (-) strand; PAM type: NRG; PAM sequence: TGG
aaaaaaatagctgggcatgg

SEQ ID NO: 91822 - DNA, 20 bp, Artificial Sequence
  Description of Artificial Sequence: Synthetic oligonucleotide
  Target: LAMA2; (-) strand; PAM type: NRG; PAM sequence: TGG
caaaaaaaaatagctgggca

SEQ ID NO: 91823 - DNA, 20 bp, Artificial Sequence
  Description of Artificial Sequence: Synthetic oligonucleotide
  Target: LAMA2; (-) strand; PAM type: NRG; PAM sequence: GGG
acaaacaaaaaaaaatagct

SEQ ID NO: 91824 - DNA, 20 bp, Artificial Sequence
  Description of Artificial Sequence: Synthetic oligonucleotide
  Target: LAMA2; (-) strand; PAM type: NRG; PAM sequence: TGG
aacaaacaaaaaaaaatagc

SEQ ID NO: 91825 - DNA, 20 bp, Artificial Sequence
  Description of Artificial Sequence: Synthetic oligonucleotide
  Target: LAMA2; (-) strand; PAM type: NRG; PAM sequence: TAG
ttaaaacaaacaaaaaaaaa

SEQ ID NO: 91826 - DNA, 20 bp, Artificial Sequence
  Description of Artificial Sequence: Synthetic oligonucleotide
  Target: LAMA2; (-) strand; PAM type: NRG; PAM sequence: GAG
atcagcctgtgcaacatatt

SEQ ID NO: 91827 - DNA, 20 bp, Artificial Sequence
  Description of Artificial Sequence: Synthetic oligonucleotide
  Target: LAMA2; (-) strand; PAM type: NRG; PAM sequence: CAG
tgagctcaggagttcgagat

SEQ ID NO: 91828 - DNA, 20 bp, Artificial Sequence
  Description of Artificial Sequence: Synthetic oligonucleotide
  Target: LAMA2; (-) strand; PAM type: NRG; PAM sequence: GAG
ttgcttgagctcaggagttc

SEQ ID NO: 91829 - DNA, 20 bp, Artificial Sequence
  Description of Artificial Sequence: Synthetic oligonucleotide
  Target: LAMA2; (-) strand; PAM type: NRG; PAM sequence: GAG
ggaggattgcttgagctcag

SEQ ID NO: 91830 - DNA, 20 bp, Artificial Sequence
  Description of Artificial Sequence: Synthetic oligonucleotide
  Target: LAMA2; (-) strand; PAM type: NRG; PAM sequence: AGG
tgggaggattgcttgagctc

SEQ ID NO: 91831 - DNA, 20 bp, Artificial Sequence
  Description of Artificial Sequence: Synthetic oligonucleotide
  Target: LAMA2; (-) strand; PAM type: NRG; PAM sequence: CAG
gtgggaggattgcttgagct

SEQ ID NO: 91832 - DNA, 20 bp, Artificial Sequence
  Description of Artificial Sequence: Synthetic oligonucleotide
  Target: LAMA2; (-) strand; PAM type: NRG; PAM sequence: GAG
ctgaggtgggaggattgctt

SEQ ID NO: 91833 - DNA, 20 bp, Artificial Sequence
  Description of Artificial Sequence: Synthetic oligonucleotide
  Target: LAMA2; (-) strand; PAM type: NRG; PAM sequence: AGG
ctttgggaggctgaggtggg

SEQ ID NO: 91834 - DNA, 20 bp, Artificial Sequence
  Description of Artificial Sequence: Synthetic oligonucleotide
  Target: LAMA2; (-) strand; PAM type: NRG; PAM sequence: GAG
actttgggaggctgaggtgg

SEQ ID NO: 91835 - DNA, 20 bp, Artificial Sequence
  Description of Artificial Sequence: Synthetic oligonucleotide
  Target: LAMA2; (-) strand; PAM type: NRG; PAM sequence: GGG
gaactttgggaggctgaggt

SEQ ID NO: 91836 - DNA, 20 bp, Artificial Sequence
  Description of Artificial Sequence: Synthetic oligonucleotide
  Target: LAMA2; (-) strand; PAM type: NRG; PAM sequence: TGG
agaactttgggaggctgagg

SEQ ID NO: 91837 - DNA, 20 bp, Artificial Sequence
  Description of Artificial Sequence: Synthetic oligonucleotide
  Target: LAMA2; (-) strand; PAM type: NRG; PAM sequence: AGG
cccagaactttgggaggctg

SEQ ID NO: 91838 - DNA, 20 bp, Artificial Sequence
  Description of Artificial Sequence: Synthetic oligonucleotide
  Target: LAMA2; (-) strand; PAM type: NRG; PAM sequence: GAG
ccccagaactttgggaggct

SEQ ID NO: 91839 - DNA, 20 bp, Artificial Sequence
  Description of Artificial Sequence: Synthetic oligonucleotide
  Target: LAMA2; (-) strand; PAM type: NRG; PAM sequence: AGG
tgtaaccccagaactttggg

SEQ ID NO: 91840 - DNA, 20 bp, Artificial Sequence
  Description of Artificial Sequence: Synthetic oligonucleotide
  Target: LAMA2; (-) strand; PAM type: NRG; PAM sequence: GAG
ctgtaaccccagaactttgg

SEQ ID NO: 91841 - DNA, 20 bp, Artificial Sequence
  Description of Artificial Sequence: Synthetic oligonucleotide
  Target: LAMA2; (-) strand; PAM type: NRG; PAM sequence: GGG
gcctgtaaccccagaacttt

SEQ ID NO: 91842 - DNA, 20 bp, Artificial Sequence
  Description of Artificial Sequence: Synthetic oligonucleotide
  Target: LAMA2; (-) strand; PAM type: NRG; PAM sequence: TGG
tgcctgtaaccccagaactt

SEQ ID NO: 91843 - DNA, 20 bp, Artificial Sequence
  Description of Artificial Sequence: Synthetic oligonucleotide
  Target: LAMA2; (-) strand; PAM type: NRG; PAM sequence: CAG
ttggcccatgcctgtaaccc

SEQ ID NO: 91844 - DNA, 20 bp, Artificial Sequence
  Description of Artificial Sequence: Synthetic oligonucleotide
  Target: LAMA2; (-) strand; PAM type: NRG; PAM sequence: TGG
gtaactcaggctgggtgcgt

SEQ ID NO: 91845 - DNA, 20 bp, Artificial Sequence
  Description of Artificial Sequence: Synthetic oligonucleotide
  Target: LAMA2; (-) strand; PAM type: NRG; PAM sequence: GGG
aaaaaaatgtaactcaggct

SEQ ID NO: 91846 - DNA, 20 bp, Artificial Sequence
  Description of Artificial Sequence: Synthetic oligonucleotide
  Target: LAMA2; (-) strand; PAM type: NRG; PAM sequence: TGG
caaaaaaatgtaactcaggc

SEQ ID NO: 91847 - DNA, 20 bp, Artificial Sequence
  Description of Artificial Sequence: Synthetic oligonucleotide
  Target: LAMA2; (-) strand; PAM type: NRG; PAM sequence: AGG
tcttcaaaaaaatgtaactc

SEQ ID NO: 91848 - DNA, 20 bp, Artificial Sequence
  Description of Artificial Sequence: Synthetic oligonucleotide
  Target: LAMA2; (-) strand; PAM type: NRG; PAM sequence: CAG
ttcttcaaaaaaatgtaact

SEQ ID NO: 91849 - DNA, 20 bp, Artificial Sequence
  Description of Artificial Sequence: Synthetic oligonucleotide
  Target: LAMA2; (-) strand; PAM type: NRG; PAM sequence: TAG
aagacacattcttcctactg

SEQ ID NO: 91850 - DNA, 20 bp, Artificial Sequence
  Description of Artificial Sequence: Synthetic oligonucleotide
  Target: LAMA2; (-) strand; PAM type: NRG; PAM sequence: AAG
cctattattcatgccctcct

SEQ ID NO: 91851 - DNA, 20 bp, Artificial Sequence
  Description of Artificial Sequence: Synthetic oligonucleotide
  Target: LAMA2; (-) strand; PAM type: NRG; PAM sequence: CAG
attccctgccatgatcctaa

SEQ ID NO: 91852 - DNA, 20 bp, Artificial Sequence
  Description of Artificial Sequence: Synthetic oligonucleotide
  Target: LAMA2; (-) strand; PAM type: NRG; PAM sequence: TAG
ttctactatcaaaatatata

SEQ ID NO: 91853 - DNA, 20 bp, Artificial Sequence
  Description of Artificial Sequence: Synthetic oligonucleotide
  Target: LAMA2; (-) strand; PAM type: NRG; PAM sequence: AAG
acatacagtctcgaatcagt

SEQ ID NO: 91854 - DNA, 20 bp, Artificial Sequence
  Description of Artificial Sequence: Synthetic oligonucleotide
  Target: LAMA2; (-) strand; PAM type: NRG; PAM sequence: CAG
cctgacatacagtctcgaat

SEQ ID NO: 91855 - DNA, 20 bp, Artificial Sequence
  Description of Artificial Sequence: Synthetic oligonucleotide
  Target: LAMA2; (-) strand; PAM type: NRG; PAM sequence: CAG
ttaatctctcccctgacata

SEQ ID NO: 91856 - DNA, 20 bp, Artificial Sequence
  Description of Artificial Sequence: Synthetic oligonucleotide
  Target: LAMA2; (-) strand; PAM type: NRG; PAM sequence: TGG
aactgatcaatcattcaaac

SEQ ID NO: 91857 - DNA, 20 bp, Artificial Sequence
  Description of Artificial Sequence: Synthetic oligonucleotide
  Target: LAMA2; (-) strand; PAM type: NRG; PAM sequence: CAG
acaccaactattcctcagct

SEQ ID NO: 91858 - DNA, 20 bp, Artificial Sequence
  Description of Artificial Sequence: Synthetic oligonucleotide
  Target: LAMA2; (-) strand; PAM type: NRG; PAM sequence: CAG
cacacacaccaactattcct

SEQ ID NO: 91859 - DNA, 20 bp, Artificial Sequence
  Description of Artificial Sequence: Synthetic oligonucleotide
  Target: LAMA2; (-) strand; PAM type: NRG; PAM sequence: TGG
aaaatttctaaactggacta

SEQ ID NO: 91860 - DNA, 20 bp, Artificial Sequence
  Description of Artificial Sequence: Synthetic oligonucleotide
  Target: LAMA2; (-) strand; PAM type: NRG; PAM sequence: TGG
caaatcgaaaatttctaaac

SEQ ID NO: 91861 - DNA, 20 bp, Artificial Sequence
  Description of Artificial Sequence: Synthetic oligonucleotide
  Target: LAMA2; (-) strand; PAM type: NRG; PAM sequence: CAG
acattgacatttacacttca

SEQ ID NO: 91862 - DNA, 20 bp, Artificial Sequence
  Description of Artificial Sequence: Synthetic oligonucleotide
  Target: LAMA2; (-) strand; PAM type: NRG; PAM sequence: AAG
cagacagacatgctgaattt

SEQ ID NO: 91863 - DNA, 20 bp, Artificial Sequence
  Description of Artificial Sequence: Synthetic oligonucleotide
  Target: LAMA2; (-) strand; PAM type: NRG; PAM sequence: CAG
aaacatatctctagaccaga

SEQ ID NO: 91864 - DNA, 20 bp, Artificial Sequence
  Description of Artificial Sequence: Synthetic oligonucleotide
  Target: LAMA2; (-) strand; PAM type: NRG; PAM sequence: CAG
ccaaaaacatatctctagac

SEQ ID NO: 91865 - DNA, 20 bp, Artificial Sequence
  Description of Artificial Sequence: Synthetic oligonucleotide
  Target: LAMA2; (-) strand; PAM type: NRG; PAM sequence: TAG
gccttccaaaaacatatctc

SEQ ID NO: 91866 - DNA, 20 bp, Artificial Sequence
  Description of Artificial Sequence: Synthetic oligonucleotide
  Target: LAMA2; (-) strand; PAM type: NRG; PAM sequence: TAG
ggtaattttattcagttcca

SEQ ID NO: 91867 - DNA, 20 bp, Artificial Sequence
  Description of Artificial Sequence: Synthetic oligonucleotide
  Target: LAMA2; (-) strand; PAM type: NRG; PAM sequence: CAG
ttctcctgggtaattttatt

SEQ ID NO: 91868 - DNA, 20 bp, Artificial Sequence
  Description of Artificial Sequence: Synthetic oligonucleotide
  Target: LAMA2; (-) strand; PAM type: NRG; PAM sequence: GGG
aatcaattgcactttctcct

SEQ ID NO: 91869 - DNA, 20 bp, Artificial Sequence
  Description of Artificial Sequence: Synthetic oligonucleotide
  Target: LAMA2; (-) strand; PAM type: NRG; PAM sequence: TGG
aaatcaattgcactttctcc

SEQ ID NO: 91870 - DNA, 20 bp, Artificial Sequence
  Description of Artificial Sequence: Synthetic oligonucleotide
  Target: LAMA2; (-) strand; PAM type: NRG; PAM sequence: GGG
agctcctcagggcttgggct

SEQ ID NO: 91871 - DNA, 20 bp, Artificial Sequence
  Description of Artificial Sequence: Synthetic oligonucleotide
  Target: LAMA2; (-) strand; PAM type: NRG; PAM sequence: TGG
gagctcctcagggcttgggc

SEQ ID NO: 91872 - DNA, 20 bp, Artificial Sequence
  Description of Artificial Sequence: Synthetic oligonucleotide
  Target: LAMA2; (-) strand; PAM type: NRG; PAM sequence: GGG
tcaggagctcctcagggctt

SEQ ID NO: 91873 - DNA, 20 bp, Artificial Sequence
  Description of Artificial Sequence: Synthetic oligonucleotide
  Target: LAMA2; (-) strand; PAM type: NRG; PAM sequence: TGG
gtcaggagctcctcagggct

SEQ ID NO: 91874 - DNA, 20 bp, Artificial Sequence
  Description of Artificial Sequence: Synthetic oligonucleotide
  Target: LAMA2; (-) strand; PAM type: NRG; PAM sequence: GGG
ttaacgtcaggagctcctca

SEQ ID NO: 91875 - DNA, 20 bp, Artificial Sequence
  Description of Artificial Sequence: Synthetic oligonucleotide
  Target: LAMA2; (-) strand; PAM type: NRG; PAM sequence: AGG
cttaacgtcaggagctcctc

SEQ ID NO: 91876 - DNA, 20 bp, Artificial Sequence
  Description of Artificial Sequence: Synthetic oligonucleotide
  Target: LAMA2; (-) strand; PAM type: NRG; PAM sequence: CAG
tcttaacgtcaggagctcct

SEQ ID NO: 91877 - DNA, 20 bp, Artificial Sequence
  Description of Artificial Sequence: Synthetic oligonucleotide
  Target: LAMA2; (-) strand; PAM type: NRG; PAM sequence: GAG
accctgcttcttaacgtcag

SEQ ID NO: 91878 - DNA, 20 bp, Artificial Sequence
  Description of Artificial Sequence: Synthetic oligonucleotide
  Target: LAMA2; (-) strand; PAM type: NRG; PAM sequence: AGG
tgaccctgcttcttaacgtc

SEQ ID NO: 91879 - DNA, 20 bp, Artificial Sequence
  Description of Artificial Sequence: Synthetic oligonucleotide
  Target: LAMA2; (-) strand; PAM type: NRG; PAM sequence: CAG
ttgaccctgcttcttaacgt

SEQ ID NO: 91880 - DNA, 20 bp, Artificial Sequence
  Description of Artificial Sequence: Synthetic oligonucleotide
  Target: LAMA2; (-) strand; PAM type: NRG; PAM sequence: TAG
catcacacttcccaaatttc

SEQ ID NO: 91881 - DNA, 20 bp, Artificial Sequence
  Description of Artificial Sequence: Synthetic oligonucleotide
  Target: LAMA2; (-) strand; PAM type: NRG; PAM sequence: TAG
cctttcatcagccttgggcc

SEQ ID NO: 91882 - DNA, 20 bp, Artificial Sequence
  Description of Artificial Sequence: Synthetic oligonucleotide
  Target: LAMA2; (-) strand; PAM type: NRG; PAM sequence: GGG
tccaacctttcatcagcctt

SEQ ID NO: 91883 - DNA, 20 bp, Artificial Sequence
  Description of Artificial Sequence: Synthetic oligonucleotide
  Target: LAMA2; (-) strand; PAM type: NRG; PAM sequence: TGG
atccaacctttcatcagcct

SEQ ID NO: 91884 - DNA, 20 bp, Artificial Sequence
  Description of Artificial Sequence: Synthetic oligonucleotide
  Target: LAMA2; (-) strand; PAM type: NRG; PAM sequence: CAG
cattttatccaacctttcat

SEQ ID NO: 91885 - DNA, 20 bp, Artificial Sequence
  Description of Artificial Sequence: Synthetic oligonucleotide
  Target: LAMA2; (-) strand; PAM type: NRG; PAM sequence: TGG
ttccatgcagccaaattcga

SEQ ID NO: 91886 - DNA, 20 bp, Artificial Sequence
  Description of Artificial Sequence: Synthetic oligonucleotide
  Target: LAMA2; (-) strand; PAM type: NRG; PAM sequence: CAG
ccttgtcaccaaattccatg

SEQ ID NO: 91887 - DNA, 20 bp, Artificial Sequence
  Description of Artificial Sequence: Synthetic oligonucleotide
  Target: LAMA2; (-) strand; PAM type: NRG; PAM sequence: AAG
tcagtaacactactcttaac

SEQ ID NO: 91888 - DNA, 20 bp, Artificial Sequence
  Description of Artificial Sequence: Synthetic oligonucleotide
  Target: LAMA2; (-) strand; PAM type: NRG; PAM sequence: CAG
gtcatctatgtttttctttt

SEQ ID NO: 91889 - DNA, 20 bp, Artificial Sequence
  Description of Artificial Sequence: Synthetic oligonucleotide
  Target: LAMA2; (-) strand; PAM type: NRG; PAM sequence: TAG
ttagcctcatataacttttc

SEQ ID NO: 91890 - DNA, 20 bp, Artificial Sequence
  Description of Artificial Sequence: Synthetic oligonucleotide
  Target: LAMA2; (-) strand; PAM type: NRG; PAM sequence: TAG
aaatgacaaaactgtcctct

SEQ ID NO: 91891 - DNA, 20 bp, Artificial Sequence
  Description of Artificial Sequence: Synthetic oligonucleotide
  Target: LAMA2; (-) strand; PAM type: NRG; PAM sequence: TAG
cagcacaaaaaaatatgatc

SEQ ID NO: 91892 - DNA, 20 bp, Artificial Sequence
  Description of Artificial Sequence: Synthetic oligonucleotide
  Target: LAMA2; (-) strand; PAM type: NRG; PAM sequence: CAG
ttctactgggtcattactat

SEQ ID NO: 91893 - DNA, 20 bp, Artificial Sequence
  Description of Artificial Sequence: Synthetic oligonucleotide
  Target: LAMA2; (-) strand; PAM type: NRG; PAM sequence: GGG
taataactttcccttctact

SEQ ID NO: 91894 - DNA, 20 bp, Artificial Sequence
  Description of Artificial Sequence: Synthetic oligonucleotide
  Target: LAMA2; (-) strand; PAM type: NRG; PAM sequence: TGG
gtaataactttcccttctac

SEQ ID NO: 91895 - DNA, 20 bp, Artificial Sequence
  Description of Artificial Sequence: Synthetic oligonucleotide
  Target: LAMA2; (-) strand; PAM type: NRG; PAM sequence: TAG
attcactctctctgatggat

SEQ ID NO: 91896 - DNA, 20 bp, Artificial Sequence
  Description of Artificial Sequence: Synthetic oligonucleotide
  Target: LAMA2; (-) strand; PAM type: NRG; PAM sequence: TGG
tcaatattcactctctctga

SEQ ID NO: 91897 - DNA, 20 bp, Artificial Sequence
  Description of Artificial Sequence: Synthetic oligonucleotide
  Target: LAMA2; (-) strand; PAM type: NRG; PAM sequence: CAG
ctccacttgtcatctgattc

SEQ ID NO: 91898 - DNA, 20 bp, Artificial Sequence
  Description of Artificial Sequence: Synthetic oligonucleotide
  Target: LAMA2; (-) strand; PAM type: NRG; PAM sequence: AAG
atgtggggtccttcctccta

SEQ ID NO: 91899 - DNA, 20 bp, Artificial Sequence
  Description of Artificial Sequence: Synthetic oligonucleotide
  Target: LAMA2; (-) strand; PAM type: NRG; PAM sequence: GGG
caagtgatgtggggaatgtg

SEQ ID NO: 91900 - DNA, 20 bp, Artificial Sequence
  Description of Artificial Sequence: Synthetic oligonucleotide
  Target: LAMA2; (-) strand; PAM type: NRG; PAM sequence: GGG
acaagtgatgtggggaatgt

SEQ ID NO: 91901 - DNA, 20 bp, Artificial Sequence
  Description of Artificial Sequence: Synthetic oligonucleotide
  Target: LAMA2; (-) strand; PAM type: NRG; PAM sequence: TGG
aacaagtgatgtggggaatg

SEQ ID NO: 91902 - DNA, 20 bp, Artificial Sequence
  Description of Artificial Sequence: Synthetic oligonucleotide
  Target: LAMA2; (-) strand; PAM type: NRG; PAM sequence: GGG
cattccaaacaagtgatgtg

SEQ ID NO: 91903 - DNA, 20 bp, Artificial Sequence
  Description of Artificial Sequence: Synthetic oligonucleotide
  Target: LAMA2; (-) strand; PAM type: NRG; PAM sequence: GGG
ccattccaaacaagtgatgt

SEQ ID NO: 91904 - DNA, 20 bp, Artificial Sequence
  Description of Artificial Sequence: Synthetic oligonucleotide
  Target: LAMA2; (-) strand; PAM type: NRG; PAM sequence: TGG
cccattccaaacaagtgatg

SEQ ID NO: 91905 - DNA, 20 bp, Artificial Sequence
  Description of Artificial Sequence: Synthetic oligonucleotide
  Target: LAMA2; (-) strand; PAM type: NRG; PAM sequence: AAG
gccatattcccattccaaac

SEQ ID NO: 91906 - DNA, 20 bp, Artificial Sequence
  Description of Artificial Sequence: Synthetic oligonucleotide
  Target: LAMA2; (-) strand; PAM type: NRG; PAM sequence: AAG
actaacaagtccagagatct

SEQ ID NO: 91907 - DNA, 20 bp, Artificial Sequence
  Description of Artificial Sequence: Synthetic oligonucleotide
  Target: LAMA2; (-) strand; PAM type: NRG; PAM sequence: GAG
cctttgcactaacaagtcca

SEQ ID NO: 91908 - DNA, 20 bp, Artificial Sequence
  Description of Artificial Sequence: Synthetic oligonucleotide
  Target: LAMA2; (-) strand; PAM type: NRG; PAM sequence: CAG
tgcctttgcactaacaagtc

SEQ ID NO: 91909 - DNA, 20 bp, Artificial Sequence
  Description of Artificial Sequence: Synthetic oligonucleotide
  Target: LAMA2; (-) strand; PAM type: NRG; PAM sequence: AAG
aaagctgcctttgcactaac

SEQ ID NO: 91910 - DNA, 20 bp, Artificial Sequence
  Description of Artificial Sequence: Synthetic oligonucleotide
  Target: LAMA2; (-) strand; PAM type: NRG; PAM sequence: AAG
ttactcacagaaaaaaatta

SEQ ID NO: 91911 - DNA, 20 bp, Artificial Sequence
  Description of Artificial Sequence: Synthetic oligonucleotide
  Target: LAMA2; (-) strand; PAM type: NRG; PAM sequence: CAG
tgattttaacttattactca

SEQ ID NO: 91912 - DNA, 20 bp, Artificial Sequence
  Description of Artificial Sequence: Synthetic oligonucleotide
  Target: LAMA2; (-) strand; PAM type: NRG; PAM sequence: CAG
ccttacacctctcttttagc

SEQ ID NO: 91913 - DNA, 20 bp, Artificial Sequence
  Description of Artificial Sequence: Synthetic oligonucleotide
  Target: LAMA2; (-) strand; PAM type: NRG; PAM sequence: TAG
aactccttacacctctcttt

SEQ ID NO: 91914 - DNA, 20 bp, Artificial Sequence
  Description of Artificial Sequence: Synthetic oligonucleotide
  Target: LAMA2; (-) strand; PAM type: NRG; PAM sequence: CAG
gttttaatactctgcaaatg

SEQ ID NO: 91915 - DNA, 20 bp, Artificial Sequence
  Description of Artificial Sequence: Synthetic oligonucleotide
  Target: LAMA2; (-) strand; PAM type: NRG; PAM sequence: AAG
ttcatgaagttttccttaat

SEQ ID NO: 91916 - DNA, 20 bp, Artificial Sequence
  Description of Artificial Sequence: Synthetic oligonucleotide
  Target: LAMA2; (-) strand; PAM type: NRG; PAM sequence: AAG
ttttcagacagatattcatg

SEQ ID NO: 91917 - DNA, 20 bp, Artificial Sequence
  Description of Artificial Sequence: Synthetic oligonucleotide
  Target: LAMA2; (-) strand; PAM type: NRG; PAM sequence: CAG
actaatctactgttttcaga

SEQ ID NO: 91918 - DNA, 20 bp, Artificial Sequence
  Description of Artificial Sequence: Synthetic oligonucleotide
  Target: LAMA2; (-) strand; PAM type: NRG; PAM sequence: CAG
gagaactaatctactgtttt

SEQ ID NO: 91919 - DNA, 20 bp, Artificial Sequence
  Description of Artificial Sequence: Synthetic oligonucleotide
  Target: LAMA2; (-) strand; PAM type: NRG; PAM sequence: GAG
aaggatgttgagaaaaggga

SEQ ID NO: 91920 - DNA, 20 bp, Artificial Sequence
  Description of Artificial Sequence: Synthetic oligonucleotide
  Target: LAMA2; (-) strand; PAM type: NRG; PAM sequence: GAG
ttaaggatgttgagaaaagg

SEQ ID NO: 91921 - DNA, 20 bp, Artificial Sequence
  Description of Artificial Sequence: Synthetic oligonucleotide
  Target: LAMA2; (-) strand; PAM type: NRG; PAM sequence: GGG
aattaaggatgttgagaaaa

SEQ ID NO: 91922 - DNA, 20 bp, Artificial Sequence
  Description of Artificial Sequence: Synthetic oligonucleotide
  Target: LAMA2; (-) strand; PAM type: NRG; PAM sequence: AGG
aaattaaggatgttgagaaa

SEQ ID NO: 91923 - DNA, 20 bp, Artificial Sequence
  Description of Artificial Sequence: Synthetic oligonucleotide
  Target: LAMA2; (-) strand; PAM type: NRG; PAM sequence: AAG
gaaattaaggatgttgagaa

SEQ ID NO: 91924 - DNA, 20 bp, Artificial Sequence
  Description of Artificial Sequence: Synthetic oligonucleotide
  Target: LAMA2; (-) strand; PAM type: NRG; PAM sequence: GAG
gggtagaaattaaggatgtt

SEQ ID NO: 91925 - DNA, 20 bp, Artificial Sequence
  Description of Artificial Sequence: Synthetic oligonucleotide
  Target: LAMA2; (-) strand; PAM type: NRG; PAM sequence: AGG
tcataagggggtagaaatta

SEQ ID NO: 91926 - DNA, 20 bp, Artificial Sequence
  Description of Artificial Sequence: Synthetic oligonucleotide
  Target: LAMA2; (-) strand; PAM type: NRG; PAM sequence: AAG
ttcataagggggtagaaatt

SEQ ID NO: 91927 - DNA, 20 bp, Artificial Sequence
  Description of Artificial Sequence: Synthetic oligonucleotide
  Target: LAMA2; (-) strand; PAM type: NRG; PAM sequence: TAG
gctacatattcataaggggg

SEQ ID NO: 91928 - DNA, 20 bp, Artificial Sequence
  Description of Artificial Sequence: Synthetic oligonucleotide
  Target: LAMA2; (-) strand; PAM type: NRG; PAM sequence: GGG
gaagctacatattcataagg

SEQ ID NO: 91929 - DNA, 20 bp, Artificial Sequence
  Description of Artificial Sequence: Synthetic oligonucleotide
  Target: LAMA2; (-) strand; PAM type: NRG; PAM sequence: GGG
tgaagctacatattcataag

SEQ ID NO: 91930 - DNA, 20 bp, Artificial Sequence
  Description of Artificial Sequence: Synthetic oligonucleotide
  Target: LAMA2; (-) strand; PAM type: NRG; PAM sequence: GGG
gtgaagctacatattcataa

SEQ ID NO: 91931 - DNA, 20 bp, Artificial Sequence
  Description of Artificial Sequence: Synthetic oligonucleotide
  Target: LAMA2; (-) strand; PAM type: NRG; PAM sequence: AGG
ggtgaagctacatattcata

SEQ ID NO: 91932 - DNA, 20 bp, Artificial Sequence
  Description of Artificial Sequence: Synthetic oligonucleotide
  Target: LAMA2; (-) strand; PAM type: NRG; PAM sequence: AAG
tggtgaagctacatattcat

SEQ ID NO: 91933 - DNA, 20 bp, Artificial Sequence
  Description of Artificial Sequence: Synthetic oligonucleotide
  Target: LAMA2; (-) strand; PAM type: NRG; PAM sequence: AAG
tacatttttaaaagctggtg

SEQ ID NO: 91934 - DNA, 20 bp, Artificial Sequence
  Description of Artificial Sequence: Synthetic oligonucleotide
  Target: LAMA2; (-) strand; PAM type: NRG; PAM sequence: TGG
taatatacatttttaaaagc

SEQ ID NO: 91935 - DNA, 20 bp, Artificial Sequence
  Description of Artificial Sequence: Synthetic oligonucleotide
  Target: LAMA2; (-) strand; PAM type: NRG; PAM sequence: AAG
tctgtaatatacatttttaa

SEQ ID NO: 91936 - DNA, 20 bp, Artificial Sequence
  Description of Artificial Sequence: Synthetic oligonucleotide
  Target: LAMA2; (-) strand; PAM type: NRG; PAM sequence: AAG
cctccctagattcattatag

SEQ ID NO: 91937 - DNA, 20 bp, Artificial Sequence
  Description of Artificial Sequence: Synthetic oligonucleotide
  Target: LAMA2; (-) strand; PAM type: NRG; PAM sequence: TAG
ttgcctccctagattcatta

SEQ ID NO: 91938 - DNA, 20 bp, Artificial Sequence
  Description of Artificial Sequence: Synthetic oligonucleotide
  Target: LAMA2; (-) strand; PAM type: NRG; PAM sequence: TAG
cattacattttttgcctccc

SEQ ID NO: 91939 - DNA, 20 bp, Artificial Sequence
  Description of Artificial Sequence: Synthetic oligonucleotide
  Target: LAMA2; (-) strand; PAM type: NRG; PAM sequence: CAG
ccccaccctccgacaggccc

SEQ ID NO: 91940 - DNA, 20 bp, Artificial Sequence
  Description of Artificial Sequence: Synthetic oligonucleotide
  Target: LAMA2; (-) strand; PAM type: NRG; PAM sequence: AGG
ctagccccccaccctccgac

SEQ ID NO: 91941 - DNA, 20 bp, Artificial Sequence
  Description of Artificial Sequence: Synthetic oligonucleotide
  Target: LAMA2; (-) strand; PAM type: NRG; PAM sequence: CAG
cctagccccccaccctccga

SEQ ID NO: 91942 - DNA, 20 bp, Artificial Sequence
  Description of Artificial Sequence: Synthetic oligonucleotide
  Target: LAMA2; (-) strand; PAM type: NRG; PAM sequence: TAG
tcctaatgctatccttcccc

SEQ ID NO: 91943 - DNA, 20 bp, Artificial Sequence
  Description of Artificial Sequence: Synthetic oligonucleotide
  Target: LAMA2; (-) strand; PAM type: NRG; PAM sequence: TAG
catcaacccatcatctacat

SEQ ID NO: 91944 - DNA, 20 bp, Artificial Sequence
  Description of Artificial Sequence: Synthetic oligonucleotide
  Target: LAMA2; (-) strand; PAM type: NRG; PAM sequence: TGG
taggtatacacgtgccatgg

SEQ ID NO: 91945 - DNA, 20 bp, Artificial Sequence
  Description of Artificial Sequence: Synthetic oligonucleotide
  Target: LAMA2; (-) strand; PAM type: NRG; PAM sequence: TGG
acataggtatacacgtgcca

SEQ ID NO: 91946 - DNA, 20 bp, Artificial Sequence
  Description of Artificial Sequence: Synthetic oligonucleotide
  Target: LAMA2; (-) strand; PAM type: NRG; PAM sequence: AGG
aacgtgcaggtttgttacat

SEQ ID NO: 91947 - DNA, 20 bp, Artificial Sequence
  Description of Artificial Sequence: Synthetic oligonucleotide
  Target: LAMA2; (-) strand; PAM type: NRG; PAM sequence: TAG
gaacgtgcaggtttgttaca

SEQ ID NO: 91948 - DNA, 20 bp, Artificial Sequence
  Description of Artificial Sequence: Synthetic oligonucleotide
  Target: LAMA2; (-) strand; PAM type: NRG; PAM sequence: AGG
gatacatgtgcagaacgtgc

SEQ ID NO: 91949 - DNA, 20 bp, Artificial Sequence
  Description of Artificial Sequence: Synthetic oligonucleotide
  Target: LAMA2; (-) strand; PAM type: NRG; PAM sequence: CAG
ggatacatgtgcagaacgtg

SEQ ID NO: 91950 - DNA, 20 bp, Artificial Sequence
  Description of Artificial Sequence: Synthetic oligonucleotide
  Target: LAMA2; (-) strand; PAM type: NRG; PAM sequence: CAG
taagttctgggatacatgtg

SEQ ID NO: 91951 - DNA, 20 bp, Artificial Sequence
  Description of Artificial Sequence: Synthetic oligonucleotide
  Target: LAMA2; (-) strand; PAM type: NRG; PAM sequence: GGG
attattatactttaagttct

SEQ ID NO: 91952 - DNA, 20 bp, Artificial Sequence
  Description of Artificial Sequence: Synthetic oligonucleotide
  Target: LAMA2; (-) strand; PAM type: NRG; PAM sequence: TGG
tattattatactttaagttc

SEQ ID NO: 91953 - DNA, 20 bp, Artificial Sequence
  Description of Artificial Sequence: Synthetic oligonucleotide
  Target: LAMA2; (-) strand; PAM type: NRG; PAM sequence: AAG
caaaattattattatacttt

SEQ ID NO: 91954 - DNA, 20 bp, Artificial Sequence
  Description of Artificial Sequence: Synthetic oligonucleotide
  Target: LAMA2; (-) strand; PAM type: NRG; PAM sequence: AAG
aatttgaacagtaccaaaaa

SEQ ID NO: 91955 - DNA, 20 bp, Artificial Sequence
  Description of Artificial Sequence: Synthetic oligonucleotide
  Target: LAMA2; (-) strand; PAM type: NRG; PAM sequence: CAG
aactttccccttaatttgaa

SEQ ID NO: 91956 - DNA, 20 bp, Artificial Sequence
  Description of Artificial Sequence: Synthetic oligonucleotide
  Target: LAMA2; (-) strand; PAM type: NRG; PAM sequence: AGG
tccttctgcctcaggatatg

SEQ ID NO: 91957 - DNA, 20 bp, Artificial Sequence
  Description of Artificial Sequence: Synthetic oligonucleotide
  Target: LAMA2; (-) strand; PAM type: NRG; PAM sequence: GAG
ttccttctgcctcaggatat

SEQ ID NO: 91958 - DNA, 20 bp, Artificial Sequence
  Description of Artificial Sequence: Synthetic oligonucleotide
  Target: LAMA2; (-) strand; PAM type: NRG; PAM sequence: AGG
ggaaatgttccttctgcctc

SEQ ID NO: 91959 - DNA, 20 bp, Artificial Sequence
  Description of Artificial Sequence: Synthetic oligonucleotide
  Target: LAMA2; (-) strand; PAM type: NRG; PAM sequence: CAG
tggaaatgttccttctgcct

SEQ ID NO: 91960 - DNA, 20 bp, Artificial Sequence
  Description of Artificial Sequence: Synthetic oligonucleotide
  Target: LAMA2; (-) strand; PAM type: NRG; PAM sequence: TGG
tagaattgtgttatgctccg

SEQ ID NO: 91961 - DNA, 20 bp, Artificial Sequence
  Description of Artificial Sequence: Synthetic oligonucleotide
  Target: LAMA2; (-) strand; PAM type: NRG; PAM sequence: TAG
cactgaagtaataaaggata

SEQ ID NO: 91962 - DNA, 20 bp, Artificial Sequence
  Description of Artificial Sequence: Synthetic oligonucleotide
  Target: LAMA2; (-) strand; PAM type: NRG; PAM sequence: AGG
agaaaccactgaagtaataa

SEQ ID NO: 91963 - DNA, 20 bp, Artificial Sequence
  Description of Artificial Sequence: Synthetic oligonucleotide
  Target: LAMA2; (-) strand; PAM type: NRG; PAM sequence: AAG
gagaaaccactgaagtaata

SEQ ID NO: 91964 - DNA, 20 bp, Artificial Sequence
  Description of Artificial Sequence: Synthetic oligonucleotide
  Target: LAMA2; (-) strand; PAM type: NRG; PAM sequence: AAG
aaacagaagagaaaccactg

SEQ ID NO: 91965 - DNA, 20 bp, Artificial Sequence
  Description of Artificial Sequence: Synthetic oligonucleotide
  Target: LAMA2; (-) strand; PAM type: NRG; PAM sequence: GAG
agttgaaaaagaaaacagaa

SEQ ID NO: 91966 - DNA, 20 bp, Artificial Sequence
  Description of Artificial Sequence: Synthetic oligonucleotide
  Target: LAMA2; (-) strand; PAM type: NRG; PAM sequence: AAG
ccagttgaaaaagaaaacag

SEQ ID NO: 91967 - DNA, 20 bp, Artificial Sequence
  Description of Artificial Sequence: Synthetic oligonucleotide
  Target: LAMA2; (-) strand; PAM type: NRG; PAM sequence: CAG
tttccagttgaaaaagaaaa

SEQ ID NO: 91968 - DNA, 20 bp, Artificial Sequence
  Description of Artificial Sequence: Synthetic oligonucleotide
  Target: LAMA2; (-) strand; PAM type: NRG; PAM sequence: AAG
cccttcttttccagttgaaa

SEQ ID NO: 91969 - DNA, 20 bp, Artificial Sequence
  Description of Artificial Sequence: Synthetic oligonucleotide
  Target: LAMA2; (-) strand; PAM type: NRG; PAM sequence: CAG
catgaaaagcccttcttttc

SEQ ID NO: 91970 - DNA, 20 bp, Artificial Sequence
  Description of Artificial Sequence: Synthetic oligonucleotide
  Target: LAMA2; (-) strand; PAM type: NRG; PAM sequence: AAG
acaacatcatatatcatgaa

SEQ ID NO: 91971 - DNA, 20 bp, Artificial Sequence
  Description of Artificial Sequence: Synthetic oligonucleotide
  Target: LAMA2; (-) strand; PAM type: NRG; PAM sequence: GAG
tactatatttctggatggtc

SEQ ID NO: 91972 - DNA, 20 bp, Artificial Sequence
  Description of Artificial Sequence: Synthetic oligonucleotide
  Target: LAMA2; (-) strand; PAM type: NRG; PAM sequence: TGG
ttatttactatatttctgga

SEQ ID NO: 91973 - DNA, 20 bp, Artificial Sequence
  Description of Artificial Sequence: Synthetic oligonucleotide
  Target: LAMA2; (-) strand; PAM type: NRG; PAM sequence: TGG
tgggttatttactatatttc

SEQ ID NO: 91974 - DNA, 20 bp, Artificial Sequence
  Description of Artificial Sequence: Synthetic oligonucleotide
  Target: LAMA2; (-) strand; PAM type: NRG; PAM sequence: GGG
ccagtgaaattgcatcttgt

SEQ ID NO: 91975 - DNA, 20 bp, Artificial Sequence
  Description of Artificial Sequence: Synthetic oligonucleotide
  Target: LAMA2; (-) strand; PAM type: NRG; PAM sequence: TGG
tccagtgaaattgcatcttg

SEQ ID NO: 91976 - DNA, 20 bp, Artificial Sequence
  Description of Artificial Sequence: Synthetic oligonucleotide
  Target: LAMA2; (-) strand; PAM type: NRG; PAM sequence: CAG
aagagcttatgatcaccctc

SEQ ID NO: 91977 - DNA, 20 bp, Artificial Sequence
  Description of Artificial Sequence: Synthetic oligonucleotide
  Target: LAMA2; (-) strand; PAM type: NRG; PAM sequence: GAG
caaatactgctgccctctaa

SEQ ID NO: 91978 - DNA, 20 bp, Artificial Sequence
  Description of Artificial Sequence: Synthetic oligonucleotide
  Target: LAMA2; (-) strand; PAM type: NRG; PAM sequence: AAG
ggcaaatactgctgccctct

SEQ ID NO: 91979 - DNA, 20 bp, Artificial Sequence
  Description of Artificial Sequence: Synthetic oligonucleotide
  Target: LAMA2; (-) strand; PAM type: NRG; PAM sequence: AGG
tgagatgcaaaataagcatg

SEQ ID NO: 91980 - DNA, 20 bp, Artificial Sequence
  Description of Artificial Sequence: Synthetic oligonucleotide
  Target: LAMA2; (-) strand; PAM type: NRG; PAM sequence: GAG
atgagatgcaaaataagcat

SEQ ID NO: 91981 - DNA, 20 bp, Artificial Sequence
  Description of Artificial Sequence: Synthetic oligonucleotide
  Target: LAMA2; (-) strand; PAM type: NRG; PAM sequence: AAG
aaatggatgagatgcaaaat

SEQ ID NO: 91982 - DNA, 20 bp, Artificial Sequence
  Description of Artificial Sequence: Synthetic oligonucleotide
  Target: LAMA2; (-) strand; PAM type: NRG; PAM sequence: GAG
gggattactacaaaatggat

SEQ ID NO: 91983 - DNA, 20 bp, Artificial Sequence
  Description of Artificial Sequence: Synthetic oligonucleotide
  Target: LAMA2; (-) strand; PAM type: NRG; PAM sequence: TGG
ctgtggggattactacaaaa

SEQ ID NO: 91984 - DNA, 20 bp, Artificial Sequence
  Description of Artificial Sequence: Synthetic oligonucleotide
  Target: LAMA2; (-) strand; PAM type: NRG; PAM sequence: GGG
aattaagttttccatctgtg

SEQ ID NO: 91985 - DNA, 20 bp, Artificial Sequence
  Description of Artificial Sequence: Synthetic oligonucleotide
  Target: LAMA2; (-) strand; PAM type: NRG; PAM sequence: GGG
taattaagttttccatctgt

SEQ ID NO: 91986 - DNA, 20 bp, Artificial Sequence
  Description of Artificial Sequence: Synthetic oligonucleotide
  Target: LAMA2; (-) strand; PAM type: NRG; PAM sequence: TGG
ttaattaagttttccatctg

SEQ ID NO: 91987 - DNA, 20 bp, Artificial Sequence
  Description of Artificial Sequence: Synthetic oligonucleotide
  Target: LAMA2; (-) strand; PAM type: NRG; PAM sequence: AAG
gttccccatcatccttaatt

SEQ ID NO: 91988 - DNA, 20 bp, Artificial Sequence
  Description of Artificial Sequence: Synthetic oligonucleotide
  Target: LAMA2; (-) strand; PAM type: NRG; PAM sequence: AAG
cctgtgtcagtgcctgctct

SEQ ID NO: 91989 - DNA, 20 bp, Artificial Sequence
  Description of Artificial Sequence: Synthetic oligonucleotide
  Target: LAMA2; (-) strand; PAM type: NRG; PAM sequence: CAG
tagtcttagattccctgtgt

SEQ ID NO: 91990 - DNA, 20 bp, Artificial Sequence
  Description of Artificial Sequence: Synthetic oligonucleotide
  Target: LAMA2; (-) strand; PAM type: NRG; PAM sequence: TAG
aaaacagggtattttagtct

SEQ ID NO: 91991 - DNA, 20 bp, Artificial Sequence
  Description of Artificial Sequence: Synthetic oligonucleotide
  Target: LAMA2; (-) strand; PAM type: NRG; PAM sequence: TAG
ctgattaaaacagggtattt

SEQ ID NO: 91992 - DNA, 20 bp, Artificial Sequence
  Description of Artificial Sequence: Synthetic oligonucleotide
  Target: LAMA2; (-) strand; PAM type: NRG; PAM sequence: GGG
actgaattctgattaaaaca

SEQ ID NO: 91993 - DNA, 20 bp, Artificial Sequence
  Description of Artificial Sequence: Synthetic oligonucleotide
  Target: LAMA2; (-) strand; PAM type: NRG; PAM sequence: AGG
aactgaattctgattaaaac

SEQ ID NO: 91994 - DNA, 20 bp, Artificial Sequence
  Description of Artificial Sequence: Synthetic oligonucleotide
  Target: LAMA2; (-) strand; PAM type: NRG; PAM sequence: CAG
aaactgaattctgattaaaa

SEQ ID NO: 91995 - DNA, 20 bp, Artificial Sequence
  Description of Artificial Sequence: Synthetic oligonucleotide
  Target: LAMA2; (-) strand; PAM type: NRG; PAM sequence: TGG
attcttgatagcttatttta

SEQ ID NO: 91996 - DNA, 20 bp, Artificial Sequence
  Description of Artificial Sequence: Synthetic oligonucleotide
  Target: LAMA2; (-) strand; PAM type: NRG; PAM sequence: TAG
tttatttctcacattcttga

SEQ ID NO: 91997 - DNA, 20 bp, Artificial Sequence
  Description of Artificial Sequence: Synthetic oligonucleotide
  Target: LAMA2; (-) strand; PAM type: NRG; PAM sequence: AAG
ctttctcaaatttacacaaa

SEQ ID NO: 91998 - DNA, 20 bp, Artificial Sequence
  Description of Artificial Sequence: Synthetic oligonucleotide
  Target: LAMA2; (-) strand; PAM type: NRG; PAM sequence: CAG
cttatatttgaccacataca

SEQ ID NO: 91999 - DNA, 20 bp, Artificial Sequence
  Description of Artificial Sequence: Synthetic oligonucleotide
  Target: LAMA2; (-) strand; PAM type: NRG; PAM sequence: CAG
gacatgatttggaagaaagg

SEQ ID NO: 92000 - DNA, 20 bp, Artificial Sequence
  Description of Artificial Sequence: Synthetic oligonucleotide
  Target: LAMA2; (-) strand; PAM type: NRG; PAM sequence: AGG
tttgacatgatttggaagaa

SEQ ID NO: 92001 - DNA, 20 bp, Artificial Sequence
  Description of Artificial Sequence: Synthetic oligonucleotide
  Target: LAMA2; (-) strand; PAM type: NRG; PAM sequence: AAG
ctttgacatgatttggaaga

SEQ ID NO: 92002 - DNA, 20 bp, Artificial Sequence
  Description of Artificial Sequence: Synthetic oligonucleotide
  Target: LAMA2; (-) strand; PAM type: NRG; PAM sequence: AAG
aaatctttgacatgatttgg

SEQ ID NO: 92003 - DNA, 20 bp, Artificial Sequence
  Description of Artificial Sequence: Synthetic oligonucleotide
  Target: LAMA2; (-) strand; PAM type: NRG; PAM sequence: TGG
agaaaatctttgacatgatt

SEQ ID NO: 92004 - DNA, 20 bp, Artificial Sequence
  Description of Artificial Sequence: Synthetic oligonucleotide
  Target: LAMA2; (-) strand; PAM type: NRG; PAM sequence: CAG
gcccttaacgtcatcatttc

SEQ ID NO: 92005 - DNA, 20 bp, Artificial Sequence
  Description of Artificial Sequence: Synthetic oligonucleotide
  Target: LAMA2; (-) strand; PAM type: NRG; PAM sequence: TGG
cccaagcaattttgattctc

SEQ ID NO: 92006 - DNA, 20 bp, Artificial Sequence
  Description of Artificial Sequence: Synthetic oligonucleotide
  Target: LAMA2; (-) strand; PAM type: NRG; PAM sequence: AAG
agagtacccgatgtcatccc

SEQ ID NO: 92007 - DNA, 20 bp, Artificial Sequence
  Description of Artificial Sequence: Synthetic oligonucleotide
  Target: LAMA2; (-) strand; PAM type: NRG; PAM sequence: GAG
catatagtcttagcctaaga

SEQ ID NO: 92008 - DNA, 20 bp, Artificial Sequence
  Description of Artificial Sequence: Synthetic oligonucleotide
  Target: LAMA2; (-) strand; PAM type: NRG; PAM sequence: GAG
atcatatagtcttagcctaa

SEQ ID NO: 92009 - DNA, 20 bp, Artificial Sequence
  Description of Artificial Sequence: Synthetic oligonucleotide
  Target: LAMA2; (-) strand; PAM type: NRG; PAM sequence: AAG
tcatcatatagtcttagcct

SEQ ID NO: 92010 - DNA, 20 bp, Artificial Sequence
  Description of Artificial Sequence: Synthetic oligonucleotide
  Target: LAMA2; (-) strand; PAM type: NRG; PAM sequence: TAG
aaggactcatcatatagtct

SEQ ID NO: 92011 - DNA, 20 bp, Artificial Sequence
  Description of Artificial Sequence: Synthetic oligonucleotide
  Target: LAMA2; (-) strand; PAM type: NRG; PAM sequence: TAG
atataaaaggactcatcata

SEQ ID NO: 92012 - DNA, 20 bp, Artificial Sequence
  Description of Artificial Sequence: Synthetic oligonucleotide
  Target: LAMA2; (-) strand; PAM type: NRG; PAM sequence: AGG
aaaaaggcagctgatataaa

SEQ ID NO: 92013 - DNA, 20 bp, Artificial Sequence
  Description of Artificial Sequence: Synthetic oligonucleotide
  Target: LAMA2; (-) strand; PAM type: NRG; PAM sequence: AAG
aaaaaaggcagctgatataa

SEQ ID NO: 92014 - DNA, 20 bp, Artificial Sequence
  Description of Artificial Sequence: Synthetic oligonucleotide
  Target: LAMA2; (-) strand; PAM type: NRG; PAM sequence: CAG
aaaaagtactgtaaaaaagg

SEQ ID NO: 92015 - DNA, 20 bp, Artificial Sequence
  Description of Artificial Sequence: Synthetic oligonucleotide
  Target: LAMA2; (-) strand; PAM type: NRG; PAM sequence: AGG
aagaaaaagtactgtaaaaa

SEQ ID NO: 92016 - DNA, 20 bp, Artificial Sequence
  Description of Artificial Sequence: Synthetic oligonucleotide
  Target: LAMA2; (-) strand; PAM type: NRG; PAM sequence: AAG
gaagaaaaagtactgtaaaa

SEQ ID NO: 92017 - DNA, 20 bp, Artificial Sequence
  Description of Artificial Sequence: Synthetic oligonucleotide
  Target: LAMA2; (-) strand; PAM type: NRG; PAM sequence: AAG
agacaggaaagtagaagaaa

SEQ ID NO: 92018 - DNA, 20 bp, Artificial Sequence
  Description of Artificial Sequence: Synthetic oligonucleotide
  Target: LAMA2; (-) strand; PAM type: NRG; PAM sequence: AAG
aagcacagacaggaaagtag

SEQ ID NO: 92019 - DNA, 20 bp, Artificial Sequence
  Description of Artificial Sequence: Synthetic oligonucleotide
  Target: LAMA2; (-) strand; PAM type: NRG; PAM sequence: TAG
aaaaagcacagacaggaaag

SEQ ID NO: 92020 - DNA, 20 bp, Artificial Sequence
  Description of Artificial Sequence: Synthetic oligonucleotide
  Target: LAMA2; (-) strand; PAM type: NRG; PAM sequence: AAG
agaaaaaagcacagacagga

SEQ ID NO: 92021 - DNA, 20 bp, Artificial Sequence
  Description of Artificial Sequence: Synthetic oligonucleotide
  Target: LAMA2; (-) strand; PAM type: NRG; PAM sequence: AGG
tcaaagaaaaaagcacagac

SEQ ID NO: 92022 - DNA, 20 bp, Artificial Sequence
  Description of Artificial Sequence: Synthetic oligonucleotide
  Target: LAMA2; (-) strand; PAM type: NRG; PAM sequence: CAG
ctcaaagaaaaaagcacaga

SEQ ID NO: 92023 - DNA, 20 bp, Artificial Sequence
  Description of Artificial Sequence: Synthetic oligonucleotide
  Target: LAMA2; (-) strand; PAM type: NRG; PAM sequence: CAG
cagtctcaaagaaaaaagca

SEQ ID NO: 92024 - DNA, 20 bp, Artificial Sequence
  Description of Artificial Sequence: Synthetic oligonucleotide
  Target: LAMA2; (-) strand; PAM type: NRG; PAM sequence: AAG
tgtgacagtctcaaagaaaa

SEQ ID NO: 92025 - DNA, 20 bp, Artificial Sequence
  Description of Artificial Sequence: Synthetic oligonucleotide
  Target: LAMA2; (-) strand; PAM type: NRG; PAM sequence: AAG
attgaaatgtgacagtctca

SEQ ID NO: 92026 - DNA, 20 bp, Artificial Sequence
  Description of Artificial Sequence: Synthetic oligonucleotide
  Target: LAMA2; (-) strand; PAM type: NRG; PAM sequence: CAG
tataaagaattgaaatgtga

SEQ ID NO: 92027 - DNA, 20 bp, Artificial Sequence
  Description of Artificial Sequence: Synthetic oligonucleotide
  Target: LAMA2; (-) strand; PAM type: NRG; PAM sequence: AAG
taaaataaagcagagatata

SEQ ID NO: 92028 - DNA, 20 bp, Artificial Sequence
  Description of Artificial Sequence: Synthetic oligonucleotide
  Target: LAMA2; (-) strand; PAM type: NRG; PAM sequence: GAG
tgaaatggtaaaataaagca

SEQ ID NO: 92029 - DNA, 20 bp, Artificial Sequence
  Description of Artificial Sequence: Synthetic oligonucleotide
  Target: LAMA2; (-) strand; PAM type: NRG; PAM sequence: CAG
tctgaaatggtaaaataaag

SEQ ID NO: 92030 - DNA, 20 bp, Artificial Sequence
  Description of Artificial Sequence: Synthetic oligonucleotide
  Target: LAMA2; (-) strand; PAM type: NRG; PAM sequence: AAG
tcttctgaaatggtaaaata

SEQ ID NO: 92031 - DNA, 20 bp, Artificial Sequence
  Description of Artificial Sequence: Synthetic oligonucleotide
  Target: LAMA2; (-) strand; PAM type: NRG; PAM sequence: TGG
gcttggtgtttcttctgaaa

SEQ ID NO: 92032 - DNA, 20 bp, Artificial Sequence
  Description of Artificial Sequence: Synthetic oligonucleotide
  Target: LAMA2; (-) strand; PAM type: NRG; PAM sequence: TGG
gattagaggaagcattagct

SEQ ID NO: 92033 - DNA, 20 bp, Artificial Sequence
  Description of Artificial Sequence: Synthetic oligonucleotide
  Target: LAMA2; (-) strand; PAM type: NRG; PAM sequence: TAG
tatgagattagaggaagcat

SEQ ID NO: 92034 - DNA, 20 bp, Artificial Sequence
  Description of Artificial Sequence: Synthetic oligonucleotide
  Target: LAMA2; (-) strand; PAM type: NRG; PAM sequence: AAG
ggcaggtatgagattagagg

SEQ ID NO: 92035 - DNA, 20 bp, Artificial Sequence
  Description of Artificial Sequence: Synthetic oligonucleotide
  Target: LAMA2; (-) strand; PAM type: NRG; PAM sequence: AGG
attggcaggtatgagattag

SEQ ID NO: 92036 - DNA, 20 bp, Artificial Sequence
  Description of Artificial Sequence: Synthetic oligonucleotide
  Target: LAMA2; (-) strand; PAM type: NRG; PAM sequence: GAG
tattggcaggtatgagatta

SEQ ID NO: 92037 - DNA, 20 bp, Artificial Sequence
  Description of Artificial Sequence: Synthetic oligonucleotide
  Target: LAMA2; (-) strand; PAM type: NRG; PAM sequence: TAG
gttattggcaggtatgagat

SEQ ID NO: 92038 - DNA, 20 bp, Artificial Sequence
  Description of Artificial Sequence: Synthetic oligonucleotide
  Target: LAMA2; (-) strand; PAM type: NRG; PAM sequence: GAG
ttagtgttattggcaggtat

SEQ ID NO: 92039 - DNA, 20 bp, Artificial Sequence
  Description of Artificial Sequence: Synthetic oligonucleotide
  Target: LAMA2; (-) strand; PAM type: NRG; PAM sequence: AGG
ctgaccttagtgttattggc

SEQ ID NO: 92040 - DNA, 20 bp, Artificial Sequence
  Description of Artificial Sequence: Synthetic oligonucleotide
  Target: LAMA2; (-) strand; PAM type: NRG; PAM sequence: CAG
actgaccttagtgttattgg

SEQ ID NO: 92041 - DNA, 20 bp, Artificial Sequence
  Description of Artificial Sequence: Synthetic oligonucleotide
  Target: LAMA2; (-) strand; PAM type: NRG; PAM sequence: TGG
tgcactgaccttagtgttat

SEQ ID NO: 92042 - DNA, 20 bp, Artificial Sequence
  Description of Artificial Sequence: Synthetic oligonucleotide
  Target: LAMA2; (-) strand; PAM type: NRG; PAM sequence: TAG
ctggggctttgcactgacct

SEQ ID NO: 92043 - DNA, 20 bp, Artificial Sequence
  Description of Artificial Sequence: Synthetic oligonucleotide
  Target: LAMA2; (-) strand; PAM type: NRG; PAM sequence: GGG
agctattcctcctgacactg

SEQ ID NO: 92044 - DNA, 20 bp, Artificial Sequence
  Description of Artificial Sequence: Synthetic oligonucleotide
  Target: LAMA2; (-) strand; PAM type: NRG; PAM sequence: GGG
gagctattcctcctgacact

SEQ ID NO: 92045 - DNA, 20 bp, Artificial Sequence
  Description of Artificial Sequence: Synthetic oligonucleotide
  Target: LAMA2; (-) strand; PAM type: NRG; PAM sequence: TGG
agagctattcctcctgacac

SEQ ID NO: 92046 - DNA, 20 bp, Artificial Sequence
  Description of Artificial Sequence: Synthetic oligonucleotide
  Target: LAMA2; (-) strand; PAM type: NRG; PAM sequence: GAG
attattgaaacattgcaaca

SEQ ID NO: 92047 - DNA, 20 bp, Artificial Sequence
  Description of Artificial Sequence: Synthetic oligonucleotide
  Target: LAMA2; (-) strand; PAM type: NRG; PAM sequence: CAG
ccattattgaaacattgcaa

SEQ ID NO: 92048 - DNA, 20 bp, Artificial Sequence
  Description of Artificial Sequence: Synthetic oligonucleotide
  Target: LAMA2; (-) strand; PAM type: NRG; PAM sequence: AAG
ctcatcaaatgtgcttgtca

SEQ ID NO: 92049 - DNA, 20 bp, Artificial Sequence
  Description of Artificial Sequence: Synthetic oligonucleotide
  Target: LAMA2; (-) strand; PAM type: NRG; PAM sequence: AGG
gataacagaaaataacaggt

SEQ ID NO: 92050 - DNA, 20 bp, Artificial Sequence
  Description of Artificial Sequence: Synthetic oligonucleotide
  Target: LAMA2; (-) strand; PAM type: NRG; PAM sequence: TAG
tgataacagaaaataacagg

SEQ ID NO: 92051 - DNA, 20 bp, Artificial Sequence
  Description of Artificial Sequence: Synthetic oligonucleotide
  Target: LAMA2; (-) strand; PAM type: NRG; PAM sequence: AGG
ttctgataacagaaaataac

SEQ ID NO: 92052 - DNA, 20 bp, Artificial Sequence
  Description of Artificial Sequence: Synthetic oligonucleotide
  Target: LAMA2; (-) strand; PAM type: NRG; PAM sequence: CAG
tttctgataacagaaaataa

SEQ ID NO: 92053 - DNA, 20 bp, Artificial Sequence
  Description of Artificial Sequence: Synthetic oligonucleotide
  Target: LAMA2; (-) strand; PAM type: NRG; PAM sequence: CAG
ttgtgtttgttttctgataa

SEQ ID NO: 92054 - DNA, 20 bp, Artificial Sequence
  Description of Artificial Sequence: Synthetic oligonucleotide
  Target: LAMA2; (-) strand; PAM type: NRG; PAM sequence: AGG
tcttggagattaaaacaaaa

SEQ ID NO: 92055 - DNA, 20 bp, Artificial Sequence
  Description of Artificial Sequence: Synthetic oligonucleotide
  Target: LAMA2; (-) strand; PAM type: NRG; PAM sequence: AAG
gtcttggagattaaaacaaa

SEQ ID NO: 92056 - DNA, 20 bp, Artificial Sequence
  Description of Artificial Sequence: Synthetic oligonucleotide
  Target: LAMA2; (-) strand; PAM type: NRG; PAM sequence: GAG
taaggctttagtcagtcttg

SEQ ID NO: 92057 - DNA, 20 bp, Artificial Sequence
  Description of Artificial Sequence: Synthetic oligonucleotide
  Target: LAMA2; (-) strand; PAM type: NRG; PAM sequence: TGG
gataaggctttagtcagtct

SEQ ID NO: 92058 - DNA, 20 bp, Artificial Sequence
  Description of Artificial Sequence: Synthetic oligonucleotide
  Target: LAMA2; (-) strand; PAM type: NRG; PAM sequence: CAG
gagaaagataaggctttagt

SEQ ID NO: 92059 - DNA, 20 bp, Artificial Sequence
  Description of Artificial Sequence: Synthetic oligonucleotide
  Target: LAMA2; (-) strand; PAM type: NRG; PAM sequence: TAG
ctgagagaaagataaggctt

SEQ ID NO: 92060 - DNA, 20 bp, Artificial Sequence
  Description of Artificial Sequence: Synthetic oligonucleotide
  Target: LAMA2; (-) strand; PAM type: NRG; PAM sequence: AGG
acaagactgagagaaagata

SEQ ID NO: 92061 - DNA, 20 bp, Artificial Sequence
  Description of Artificial Sequence: Synthetic oligonucleotide
  Target: LAMA2; (-) strand; PAM type: NRG; PAM sequence: AAG
aacaagactgagagaaagat

SEQ ID NO: 92062 - DNA, 20 bp, Artificial Sequence
  Description of Artificial Sequence: Synthetic oligonucleotide
  Target: LAMA2; (-) strand; PAM type: NRG; PAM sequence: AAG
aggccaacaagactgagaga

SEQ ID NO: 92063 - DNA, 20 bp, Artificial Sequence
  Description of Artificial Sequence: Synthetic oligonucleotide
  Target: LAMA2; (-) strand; PAM type: NRG; PAM sequence: GAG
gcctaggccaacaagactga

SEQ ID NO: 92064 - DNA, 20 bp, Artificial Sequence
  Description of Artificial Sequence: Synthetic oligonucleotide
  Target: LAMA2; (-) strand; PAM type: NRG; PAM sequence: GAG
gtgcctaggccaacaagact

SEQ ID NO: 92065 - DNA, 20 bp, Artificial Sequence
  Description of Artificial Sequence: Synthetic oligonucleotide
  Target: LAMA2; (-) strand; PAM type: NRG; PAM sequence: AAG
tcgcctgtgcctaggccaac

SEQ ID NO: 92066 - DNA, 20 bp, Artificial Sequence
  Description of Artificial Sequence: Synthetic oligonucleotide
  Target: LAMA2; (-) strand; PAM type: NRG; PAM sequence: AGG
ccgttaactcgcctgtgcct

SEQ ID NO: 92067 - DNA, 20 bp, Artificial Sequence
  Description of Artificial Sequence: Synthetic oligonucleotide
  Target: LAMA2; (-) strand; PAM type: NRG; PAM sequence: TAG
gccgttaactcgcctgtgcc

SEQ ID NO: 92068 - DNA, 20 bp, Artificial Sequence
  Description of Artificial Sequence: Synthetic oligonucleotide
  Target: LAMA2; (-) strand; PAM type: NRG; PAM sequence: TAG
ctcacagatgccaccaaaaa

SEQ ID NO: 92069 - DNA, 20 bp, Artificial Sequence
  Description of Artificial Sequence: Synthetic oligonucleotide
  Target: LAMA2; (-) strand; PAM type: NRG; PAM sequence: CAG
caaagcactgacatggctca

SEQ ID NO: 92070 - DNA, 20 bp, Artificial Sequence
  Description of Artificial Sequence: Synthetic oligonucleotide
  Target: LAMA2; (-) strand; PAM type: NRG; PAM sequence: TGG
gcatgaccaaagcactgaca

SEQ ID NO: 92071 - DNA, 20 bp, Artificial Sequence
  Description of Artificial Sequence: Synthetic oligonucleotide
  Target: LAMA2; (-) strand; PAM type: NRG; PAM sequence: AAG
cacaggactccgcatgacca

SEQ ID NO: 92072 - DNA, 20 bp, Artificial Sequence
  Description of Artificial Sequence: Synthetic oligonucleotide
  Target: LAMA2; (-) strand; PAM type: NRG; PAM sequence: AGG
ttctccagtgacgtcatcac

SEQ ID NO: 92073 - DNA, 20 bp, Artificial Sequence
  Description of Artificial Sequence: Synthetic oligonucleotide
  Target: LAMA2; (-) strand; PAM type: NRG; PAM sequence: CAG
attctccagtgacgtcatca

SEQ ID NO: 92074 - DNA, 20 bp, Artificial Sequence
  Description of Artificial Sequence: Synthetic oligonucleotide
  Target: LAMA2; (-) strand; PAM type: NRG; PAM sequence: CAG
agcacttaccaggcattctc

SEQ ID NO: 92075 - DNA, 20 bp, Artificial Sequence
  Description of Artificial Sequence: Synthetic oligonucleotide
  Target: LAMA2; (-) strand; PAM type: NRG; PAM sequence: AGG
caaagaagagagcacttacc

SEQ ID NO: 92076 - DNA, 20 bp, Artificial Sequence
  Description of Artificial Sequence: Synthetic oligonucleotide
  Target: LAMA2; (-) strand; PAM type: NRG; PAM sequence: CAG
ccaaagaagagagcacttac

SEQ ID NO: 92077 - DNA, 20 bp, Artificial Sequence
  Description of Artificial Sequence: Synthetic oligonucleotide
  Target: LAMA2; (-) strand; PAM type: NRG; PAM sequence: GAG
atcagcatccccaaagaaga

SEQ ID NO: 92078 - DNA, 20 bp, Artificial Sequence
  Description of Artificial Sequence: Synthetic oligonucleotide
  Target: LAMA2; (-) strand; PAM type: NRG; PAM sequence: GAG
caatcagcatccccaaagaa

SEQ ID NO: 92079 - DNA, 20 bp, Artificial Sequence
  Description of Artificial Sequence: Synthetic oligonucleotide
  Target: LAMA2; (-) strand; PAM type: NRG; PAM sequence: AAG
gtcaatcagcatccccaaag

SEQ ID NO: 92080 - DNA, 20 bp, Artificial Sequence
  Description of Artificial Sequence: Synthetic oligonucleotide
  Target: LAMA2; (-) strand; PAM type: NRG; PAM sequence: AAG
cttgtcaatcagcatcccca

SEQ ID NO: 92081 - DNA, 20 bp, Artificial Sequence
  Description of Artificial Sequence: Synthetic oligonucleotide
  Target: LAMA2; (-) strand; PAM type: NRG; PAM sequence: CAG
gtgatttcagccttgtcaat

SEQ ID NO: 92082 - DNA, 20 bp, Artificial Sequence
  Description of Artificial Sequence: Synthetic oligonucleotide
  Target: LAMA2; (-) strand; PAM type: NRG; PAM sequence: CAG
agcatctgtcgaggtgattt

SEQ ID NO: 92083 - DNA, 20 bp, Artificial Sequence
  Description of Artificial Sequence: Synthetic oligonucleotide
  Target: LAMA2; (-) strand; PAM type: NRG; PAM sequence: AGG
ctgaattgtagcatctgtcg

SEQ ID NO: 92084 - DNA, 20 bp, Artificial Sequence
  Description of Artificial Sequence: Synthetic oligonucleotide
  Target: LAMA2; (-) strand; PAM type: NRG; PAM sequence: GAG
gctgaattgtagcatctgtc

SEQ ID NO: 92085 - DNA, 20 bp, Artificial Sequence
  Description of Artificial Sequence: Synthetic oligonucleotide
  Target: LAMA2; (-) strand; PAM type: NRG; PAM sequence: TAG
ccagggtagtagctgaattg

SEQ ID NO: 92086 - DNA, 20 bp, Artificial Sequence
  Description of Artificial Sequence: Synthetic oligonucleotide
  Target: LAMA2; (-) strand; PAM type: NRG; PAM sequence: TAG
gtttaaggtccccagggtag

SEQ ID NO: 92087 - DNA, 20 bp, Artificial Sequence
  Description of Artificial Sequence: Synthetic oligonucleotide
  Target: LAMA2; (-) strand; PAM type: NRG; PAM sequence: TAG
agtgtttaaggtccccaggg

SEQ ID NO: 92088 - DNA, 20 bp, Artificial Sequence
  Description of Artificial Sequence: Synthetic oligonucleotide
  Target: LAMA2; (-) strand; PAM type: NRG; PAM sequence: GGG
tcaagtgtttaaggtcccca

SEQ ID NO: 92089 - DNA, 20 bp, Artificial Sequence
  Description of Artificial Sequence: Synthetic oligonucleotide
  Target: LAMA2; (-) strand; PAM type: NRG; PAM sequence: AGG
ctcaagtgtttaaggtcccc

SEQ ID NO: 92090 - DNA, 20 bp, Artificial Sequence
  Description of Artificial Sequence: Synthetic oligonucleotide
  Target: LAMA2; (-) strand; PAM type: NRG; PAM sequence: CAG
actcaagtgtttaaggtccc

SEQ ID NO: 92091 - DNA, 20 bp, Artificial Sequence
  Description of Artificial Sequence: Synthetic oligonucleotide
  Target: LAMA2; (-) strand; PAM type: NRG; PAM sequence: AGG
cttcttgactcaagtgttta

SEQ ID NO: 92092 - DNA, 20 bp, Artificial Sequence
  Description of Artificial Sequence: Synthetic oligonucleotide
  Target: LAMA2; (-) strand; PAM type: NRG; PAM sequence: AAG
acttcttgactcaagtgttt

SEQ ID NO: 92093 - DNA, 20 bp, Artificial Sequence
  Description of Artificial Sequence: Synthetic oligonucleotide
  Target: LAMA2; (-) strand; PAM type: NRG; PAM sequence: AAG
gtcaaagcacttcttgactc

SEQ ID NO: 92094 - DNA, 20 bp, Artificial Sequence
  Description of Artificial Sequence: Synthetic oligonucleotide
  Target: LAMA2; (-) strand; PAM type: NRG; PAM sequence: AAG
caatacaaagatctttgtca

SEQ ID NO: 92095 - DNA, 20 bp, Artificial Sequence
  Description of Artificial Sequence: Synthetic oligonucleotide
  Target: LAMA2; (-) strand; PAM type: NRG; PAM sequence: AAG
ttccaattcagttcaataca

SEQ ID NO: 92096 - DNA, 20 bp, Artificial Sequence
  Description of Artificial Sequence: Synthetic oligonucleotide
  Target: LAMA2; (-) strand; PAM type: NRG; PAM sequence: CAG
gagcattctcagttccaatt

SEQ ID NO: 92097 - DNA, 20 bp, Artificial Sequence
  Description of Artificial Sequence: Synthetic oligonucleotide
  Target: LAMA2; (-) strand; PAM type: NRG; PAM sequence: CAG
cacatatgaaagagcattct

SEQ ID NO: 92098 - DNA, 20 bp, Artificial Sequence
  Description of Artificial Sequence: Synthetic oligonucleotide
  Target: LAMA2; (-) strand; PAM type: NRG; PAM sequence: GAG
tagggagatcacatatgaaa

SEQ ID NO: 92099 - DNA, 20 bp, Artificial Sequence
  Description of Artificial Sequence: Synthetic oligonucleotide
  Target: LAMA2; (-) strand; PAM type: NRG; PAM sequence: AAG
attagggagatcacatatga

SEQ ID NO: 92100 - DNA, 20 bp, Artificial Sequence
  Description of Artificial Sequence: Synthetic oligonucleotide
  Target: LAMA2; (-) strand; PAM type: NRG; PAM sequence: GAG
acttcctcatattcattagg

SEQ ID NO: 92101 - DNA, 20 bp, Artificial Sequence
  Description of Artificial Sequence: Synthetic oligonucleotide
  Target: LAMA2; (-) strand; PAM type: NRG; PAM sequence: GGG
acacttcctcatattcatta

SEQ ID NO: 92102 - DNA, 20 bp, Artificial Sequence
  Description of Artificial Sequence: Synthetic oligonucleotide
  Target: LAMA2; (-) strand; PAM type: NRG; PAM sequence: AGG
aacacttcctcatattcatt

SEQ ID NO: 92103 - DNA, 20 bp, Artificial Sequence
  Description of Artificial Sequence: Synthetic oligonucleotide
  Target: LAMA2; (-) strand; PAM type: NRG; PAM sequence: TAG
aaacacttcctcatattcat

SEQ ID NO: 92104 - DNA, 20 bp, Artificial Sequence
  Description of Artificial Sequence: Synthetic oligonucleotide
  Target: LAMA2; (-) strand; PAM type: NRG; PAM sequence: AAG
gtagttatacttccaatcag

SEQ ID NO: 92105 - DNA, 20 bp, Artificial Sequence
  Description of Artificial Sequence: Synthetic oligonucleotide
  Target: LAMA2; (-) strand; PAM type: NRG; PAM sequence: CAG
atggtagttatacttccaat

SEQ ID NO: 92106 - DNA, 20 bp, Artificial Sequence
  Description of Artificial Sequence: Synthetic oligonucleotide
  Target: LAMA2; (-) strand; PAM type: NRG; PAM sequence: TAG
gaaaccatatatattcatgg

SEQ ID NO: 92107 - DNA, 20 bp, Artificial Sequence
  Description of Artificial Sequence: Synthetic oligonucleotide
  Target: LAMA2; (-) strand; PAM type: NRG; PAM sequence: TGG
agtgaaaccatatatattca

SEQ ID NO: 92108 - DNA, 20 bp, Artificial Sequence
  Description of Artificial Sequence: Synthetic oligonucleotide
  Target: LAMA2; (-) strand; PAM type: NRG; PAM sequence: AAG
tttcatagatttatggaaga

SEQ ID NO: 92109 - DNA, 20 bp, Artificial Sequence
  Description of Artificial Sequence: Synthetic oligonucleotide
  Target: LAMA2; (-) strand; PAM type: NRG; PAM sequence: AAG
tacttttcatagatttatgg

SEQ ID NO: 92110 - DNA, 20 bp, Artificial Sequence
  Description of Artificial Sequence: Synthetic oligonucleotide
  Target: LAMA2; (-) strand; PAM type: NRG; PAM sequence: TGG
ctgtacttttcatagattta

SEQ ID NO: 92111 - DNA, 20 bp, Artificial Sequence
  Description of Artificial Sequence: Synthetic oligonucleotide
  Target: LAMA2; (-) strand; PAM type: NRG; PAM sequence: TAG
aaagtacactgtacttttca

SEQ ID NO: 92112 - DNA, 20 bp, Artificial Sequence
  Description of Artificial Sequence: Synthetic oligonucleotide
  Target: LAMA2; (-) strand; PAM type: NRG; PAM sequence: AAG
taaattattttctattttaa

SEQ ID NO: 92113 - DNA, 20 bp, Artificial Sequence
  Description of Artificial Sequence: Synthetic oligonucleotide
  Target: LAMA2; (-) strand; PAM type: NRG; PAM sequence: GGG
tttacacttttcatattatg

SEQ ID NO: 92114 - DNA, 20 bp, Artificial Sequence
  Description of Artificial Sequence: Synthetic oligonucleotide
  Target: LAMA2; (-) strand; PAM type: NRG; PAM sequence: GGG
ttttacacttttcatattat

SEQ ID NO: 92115 - DNA, 20 bp, Artificial Sequence
  Description of Artificial Sequence: Synthetic oligonucleotide
  Target: LAMA2; (-) strand; PAM type: NRG; PAM sequence: TGG
attttacacttttcatatta

SEQ ID NO: 92116 - DNA, 20 bp, Artificial Sequence
  Description of Artificial Sequence: Synthetic oligonucleotide
  Target: LAMA2; (-) strand; PAM type: NRG; PAM sequence: AGG
cttaattatgtttactataa

SEQ ID NO: 92117 - DNA, 20 bp, Artificial Sequence
  Description of Artificial Sequence: Synthetic oligonucleotide
  Target: LAMA2; (-) strand; PAM type: NRG; PAM sequence: AAG
acttaattatgtttactata

SEQ ID NO: 92118 - DNA, 20 bp, Artificial Sequence
  Description of Artificial Sequence: Synthetic oligonucleotide
  Target: LAMA2; (-) strand; PAM type: NRG; PAM sequence: AAG
atgttttcattttcaacatg

SEQ ID NO: 92119 - DNA, 20 bp, Artificial Sequence
  Description of Artificial Sequence: Synthetic oligonucleotide
  Target: LAMA2; (-) strand; PAM type: NRG; PAM sequence: TAG
acattttaaataaaaatatg

SEQ ID NO: 92120 - DNA, 20 bp, Artificial Sequence
  Description of Artificial Sequence: Synthetic oligonucleotide
  Target: LAMA2; (-) strand; PAM type: NRG; PAM sequence: TAG
tacaaatgacactatgcatt

SEQ ID NO: 92121 - DNA, 20 bp, Artificial Sequence
  Description of Artificial Sequence: Synthetic oligonucleotide
  Target: LAMA2; (-) strand; PAM type: NRG; PAM sequence: TGG
ttgcaaaggagaagcagctc

SEQ ID NO: 92122 - DNA, 20 bp, Artificial Sequence
  Description of Artificial Sequence: Synthetic oligonucleotide
  Target: LAMA2; (-) strand; PAM type: NRG; PAM sequence: CAG
acttaattgcaaaggagaag

SEQ ID NO: 92123 - DNA, 20 bp, Artificial Sequence
  Description of Artificial Sequence: Synthetic oligonucleotide
  Target: LAMA2; (-) strand; PAM type: NRG; PAM sequence: AAG
tagacttaattgcaaaggag

SEQ ID NO: 92124 - DNA, 20 bp, Artificial Sequence
  Description of Artificial Sequence: Synthetic oligonucleotide
  Target: LAMA2; (-) strand; PAM type: NRG; PAM sequence: GAG
gcttagacttaattgcaaag

SEQ ID NO: 92125 - DNA, 20 bp, Artificial Sequence
  Description of Artificial Sequence: Synthetic oligonucleotide
  Target: LAMA2; (-) strand; PAM type: NRG; PAM sequence: AGG
aagcttagacttaattgcaa

SEQ ID NO: 92126 - DNA, 20 bp, Artificial Sequence
  Description of Artificial Sequence: Synthetic oligonucleotide
  Target: LAMA2; (-) strand; PAM type: NRG; PAM sequence: AAG
aaagcttagacttaattgca

SEQ ID NO: 92127 - DNA, 20 bp, Artificial Sequence
  Description of Artificial Sequence: Synthetic oligonucleotide
  Target: LAMA2; (-) strand; PAM type: NRG; PAM sequence: TAG
cctattttctggttaaagct

SEQ ID NO: 92128 - DNA, 20 bp, Artificial Sequence
  Description of Artificial Sequence: Synthetic oligonucleotide
  Target: LAMA2; (-) strand; PAM type: NRG; PAM sequence: AAG
taaagcctattttctggtta

SEQ ID NO: 92129 - DNA, 20 bp, Artificial Sequence
  Description of Artificial Sequence: Synthetic oligonucleotide
  Target: LAMA2; (-) strand; PAM type: NRG; PAM sequence: TGG
actttgtaaagcctattttc

SEQ ID NO: 92130 - DNA, 20 bp, Artificial Sequence
  Description of Artificial Sequence: Synthetic oligonucleotide
  Target: LAMA2; (-) strand; PAM type: NRG; PAM sequence: AAG
aaagtgctttgcactttgta

SEQ ID NO: 92131 - DNA, 20 bp, Artificial Sequence
  Description of Artificial Sequence: Synthetic oligonucleotide
  Target: LAMA2; (-) strand; PAM type: NRG; PAM sequence: AAG
aggtttcttagcaggatgga

SEQ ID NO: 92132 - DNA, 20 bp, Artificial Sequence
  Description of Artificial Sequence: Synthetic oligonucleotide
  Target: LAMA2; (-) strand; PAM type: NRG; PAM sequence: TGG
cctaaggtttcttagcagga

SEQ ID NO: 92133 - DNA, 20 bp, Artificial Sequence
  Description of Artificial Sequence: Synthetic oligonucleotide
  Target: LAMA2; (-) strand; PAM type: NRG; PAM sequence: AGG
caatcctaaggtttcttagc

SEQ ID NO: 92134 - DNA, 20 bp, Artificial Sequence
  Description of Artificial Sequence: Synthetic oligonucleotide
  Target: LAMA2; (-) strand; PAM type: NRG; PAM sequence: CAG
ccaatcctaaggtttcttag

SEQ ID NO: 92135 - DNA, 20 bp, Artificial Sequence
  Description of Artificial Sequence: Synthetic oligonucleotide
  Target: LAMA2; (-) strand; PAM type: NRG; PAM sequence: TAG
tctccaatcctaaggtttct

SEQ ID NO: 92136 - DNA, 20 bp, Artificial Sequence
  Description of Artificial Sequence: Synthetic oligonucleotide
  Target: LAMA2; (-) strand; PAM type: NRG; PAM sequence: AGG
agtgtaattctccaatccta

SEQ ID NO: 92137 - DNA, 20 bp, Artificial Sequence
  Description of Artificial Sequence: Synthetic oligonucleotide
  Target: LAMA2; (-) strand; PAM type: NRG; PAM sequence: AAG
cagtgtaattctccaatcct

SEQ ID NO: 92138 - DNA, 20 bp, Artificial Sequence
  Description of Artificial Sequence: Synthetic oligonucleotide
  Target: LAMA2; (-) strand; PAM type: NRG; PAM sequence: CAG
gttaatcagaatggtctatt

SEQ ID NO: 92139 - DNA, 20 bp, Artificial Sequence
  Description of Artificial Sequence: Synthetic oligonucleotide
  Target: LAMA2; (-) strand; PAM type: NRG; PAM sequence: TGG
tgcccttgagttaatcagaa

SEQ ID NO: 92140 - DNA, 20 bp, Artificial Sequence
  Description of Artificial Sequence: Synthetic oligonucleotide
  Target: LAMA2; (-) strand; PAM type: NRG; PAM sequence: CAG
taatgtgcccttgagttaat

SEQ ID NO: 92141 - DNA, 20 bp, Artificial Sequence
  Description of Artificial Sequence: Synthetic oligonucleotide
  Target: LAMA2; (-) strand; PAM type: NRG; PAM sequence: GAG
tataaaactaatgtgccctt

SEQ ID NO: 92142 - DNA, 20 bp, Artificial Sequence
  Description of Artificial Sequence: Synthetic oligonucleotide
  Target: LAMA2; (-) strand; PAM type: NRG; PAM sequence: CAG
tttcaagcttcatgccatgt

SEQ ID NO: 92143 - DNA, 20 bp, Artificial Sequence
  Description of Artificial Sequence: Synthetic oligonucleotide
  Target: LAMA2; (-) strand; PAM type: NRG; PAM sequence: AAG
gaaaggagaagtgttgtttc

SEQ ID NO: 92144 - DNA, 20 bp, Artificial Sequence
  Description of Artificial Sequence: Synthetic oligonucleotide
  Target: LAMA2; (-) strand; PAM type: NRG; PAM sequence: AAG
tgcaagactaatgaaaggag

SEQ ID NO: 92145 - DNA, 20 bp, Artificial Sequence
  Description of Artificial Sequence: Synthetic oligonucleotide
  Target: LAMA2; (-) strand; PAM type: NRG; PAM sequence: GAG
ttctgcaagactaatgaaag

SEQ ID NO: 92146 - DNA, 20 bp, Artificial Sequence
  Description of Artificial Sequence: Synthetic oligonucleotide
  Target: LAMA2; (-) strand; PAM type: NRG; PAM sequence: AGG
gtttctgcaagactaatgaa

SEQ ID NO: 92147 - DNA, 20 bp, Artificial Sequence
  Description of Artificial Sequence: Synthetic oligonucleotide
  Target: LAMA2; (-) strand; PAM type: NRG; PAM sequence: AAG
tgtttctgcaagactaatga

SEQ ID NO: 92148 - DNA, 20 bp, Artificial Sequence
  Description of Artificial Sequence: Synthetic oligonucleotide
  Target: LAMA2; (-) strand; PAM type: NRG; PAM sequence: AAG
attttaaattgtgtttctgc

SEQ ID NO: 92149 - DNA, 20 bp, Artificial Sequence
  Description of Artificial Sequence: Synthetic oligonucleotide
  Target: LAMA2; (-) strand; PAM type: NRG; PAM sequence: TGG
agtataatatcctccttaat

SEQ ID NO: 92150 - DNA, 20 bp, Artificial Sequence
  Description of Artificial Sequence: Synthetic oligonucleotide
  Target: LAMA2; (-) strand; PAM type: NRG; PAM sequence: GAG
taaattcttcagggaaatga

SEQ ID NO: 92151 - DNA, 20 bp, Artificial Sequence
  Description of Artificial Sequence: Synthetic oligonucleotide
  Target: LAMA2; (-) strand; PAM type: NRG; PAM sequence: GAG
cttaaattcttcagggaaat

SEQ ID NO: 92152 - DNA, 20 bp, Artificial Sequence
  Description of Artificial Sequence: Synthetic oligonucleotide
  Target: LAMA2; (-) strand; PAM type: NRG; PAM sequence: GGG
aatccgccttaaattcttca

SEQ ID NO: 92153 - DNA, 20 bp, Artificial Sequence
  Description of Artificial Sequence: Synthetic oligonucleotide
  Target: LAMA2; (-) strand; PAM type: NRG; PAM sequence: AGG
gaatccgccttaaattcttc

SEQ ID NO: 92154 - DNA, 20 bp, Artificial Sequence
  Description of Artificial Sequence: Synthetic oligonucleotide
  Target: LAMA2; (-) strand; PAM type: NRG; PAM sequence: CAG
agaatccgccttaaattctt

SEQ ID NO: 92155 - DNA, 20 bp, Artificial Sequence
  Description of Artificial Sequence: Synthetic oligonucleotide
  Target: LAMA2; (-) strand; PAM type: NRG; PAM sequence: CAG
acattaagaattacaggtaa

SEQ ID NO: 92156 - DNA, 20 bp, Artificial Sequence
  Description of Artificial Sequence: Synthetic oligonucleotide
  Target: LAMA2; (-) strand; PAM type: NRG; PAM sequence: AGG
gatagaacattaagaattac

SEQ ID NO: 92157 - DNA, 20 bp, Artificial Sequence
  Description of Artificial Sequence: Synthetic oligonucleotide
  Target: LAMA2; (-) strand; PAM type: NRG; PAM sequence: CAG
agatagaacattaagaatta

SEQ ID NO: 92158 - DNA, 20 bp, Artificial Sequence
  Description of Artificial Sequence: Synthetic oligonucleotide
  Target: LAMA2; (-) strand; PAM type: NRG; PAM sequence: AAG
caagagaaagatagaacatt

SEQ ID NO: 92159 - DNA, 20 bp, Artificial Sequence
  Description of Artificial Sequence: Synthetic oligonucleotide
  Target: LAMA2; (-) strand; PAM type: NRG; PAM sequence: TAG
gaaaatgagcaagagaaaga

SEQ ID NO: 92160 - DNA, 20 bp, Artificial Sequence
  Description of Artificial Sequence: Synthetic oligonucleotide
  Target: LAMA2; (-) strand; PAM type: NRG; PAM sequence: AAG
gggggaaaatgagcaagaga

SEQ ID NO: 92161 - DNA, 20 bp, Artificial Sequence
  Description of Artificial Sequence: Synthetic oligonucleotide
  Target: LAMA2; (-) strand; PAM type: NRG; PAM sequence: GAG
aaatgggggaaaatgagcaa

SEQ ID NO: 92162 - DNA, 20 bp, Artificial Sequence
  Description of Artificial Sequence: Synthetic oligonucleotide
  Target: LAMA2; (-) strand; PAM type: NRG; PAM sequence: AAG
agaaatgggggaaaatgagc

SEQ ID NO: 92163 - DNA, 20 bp, Artificial Sequence
  Description of Artificial Sequence: Synthetic oligonucleotide
  Target: LAMA2; (-) strand; PAM type: NRG; PAM sequence: GAG
gaagagaaatgggggaaaat

SEQ ID NO: 92164 - DNA, 20 bp, Artificial Sequence
  Description of Artificial Sequence: Synthetic oligonucleotide
  Target: LAMA2; (-) strand; PAM type: NRG; PAM sequence: GGG
tttaagtagaagagaaatgg

SEQ ID NO: 92165 - DNA, 20 bp, Artificial Sequence
  Description of Artificial Sequence: Synthetic oligonucleotide
  Target: LAMA2; (-) strand; PAM type: NRG; PAM sequence: GGG
ttttaagtagaagagaaatg

SEQ ID NO: 92166 - DNA, 20 bp, Artificial Sequence
  Description of Artificial Sequence: Synthetic oligonucleotide
  Target: LAMA2; (-) strand; PAM type: NRG; PAM sequence: GGG
cttttaagtagaagagaaat

SEQ ID NO: 92167 - DNA, 20 bp, Artificial Sequence
  Description of Artificial Sequence: Synthetic oligonucleotide
  Target: LAMA2; (-) strand; PAM type: NRG; PAM sequence: TGG
gcttttaagtagaagagaaa

SEQ ID NO: 92168 - DNA, 20 bp, Artificial Sequence
  Description of Artificial Sequence: Synthetic oligonucleotide
  Target: LAMA2; (-) strand; PAM type: NRG; PAM sequence: GAG
ccagaagcttttaagtagaa

SEQ ID NO: 92169 - DNA, 20 bp, Artificial Sequence
  Description of Artificial Sequence: Synthetic oligonucleotide
  Target: LAMA2; (-) strand; PAM type: NRG; PAM sequence: AAG
tcccagaagcttttaagtag

SEQ ID NO: 92170 - DNA, 20 bp, Artificial Sequence
  Description of Artificial Sequence: Synthetic oligonucleotide
  Target: LAMA2; (-) strand; PAM type: NRG; PAM sequence: TAG
ttttcccagaagcttttaag

SEQ ID NO: 92171 - DNA, 20 bp, Artificial Sequence
  Description of Artificial Sequence: Synthetic oligonucleotide
  Target: LAMA2; (-) strand; PAM type: NRG; PAM sequence: AAG
gatttttcccagaagctttt

SEQ ID NO: 92172 - DNA, 20 bp, Artificial Sequence
  Description of Artificial Sequence: Synthetic oligonucleotide
  Target: LAMA2; (-) strand; PAM type: NRG; PAM sequence: AAG
tcattttggatttttcccag

SEQ ID NO: 92173 - DNA, 20 bp, Artificial Sequence
  Description of Artificial Sequence: Synthetic oligonucleotide
  Target: LAMA2; (-) strand; PAM type: NRG; PAM sequence: CAG
ttttcattttggatttttcc

SEQ ID NO: 92174 - DNA, 20 bp, Artificial Sequence
  Description of Artificial Sequence: Synthetic oligonucleotide
  Target: LAMA2; (-) strand; PAM type: NRG; PAM sequence: TGG
aaagccctgaattttcattt

SEQ ID NO: 92175 - DNA, 20 bp, Artificial Sequence
  Description of Artificial Sequence: Synthetic oligonucleotide
  Target: LAMA2; (-) strand; PAM type: NRG; PAM sequence: AAG
gccaaattacactgaaacaa

SEQ ID NO: 92176 - DNA, 20 bp, Artificial Sequence
  Description of Artificial Sequence: Synthetic oligonucleotide
  Target: LAMA2; (-) strand; PAM type: NRG; PAM sequence: GAG
ttatatagagaaaagggaaa

SEQ ID NO: 92177 - DNA, 20 bp, Artificial Sequence
  Description of Artificial Sequence: Synthetic oligonucleotide
  Target: LAMA2; (-) strand; PAM type: NRG; PAM sequence: AAG
tcttatatagagaaaaggga

SEQ ID NO: 92178 - DNA, 20 bp, Artificial Sequence
  Description of Artificial Sequence: Synthetic oligonucleotide
  Target: LAMA2; (-) strand; PAM type: NRG; PAM sequence: GGG
aaaatcttatatagagaaaa

SEQ ID NO: 92179 - DNA, 20 bp, Artificial Sequence
  Description of Artificial Sequence: Synthetic oligonucleotide
  Target: LAMA2; (-) strand; PAM type: NRG; PAM sequence: AGG
caaaatcttatatagagaaa

SEQ ID NO: 92180 - DNA, 20 bp, Artificial Sequence
  Description of Artificial Sequence: Synthetic oligonucleotide
  Target: LAMA2; (-) strand; PAM type: NRG; PAM sequence: AAG
acaaaatcttatatagagaa

SEQ ID NO: 92181 - DNA, 20 bp, Artificial Sequence
  Description of Artificial Sequence: Synthetic oligonucleotide
  Target: LAMA2; (-) strand; PAM type: NRG; PAM sequence: GAG
attaaacaaaatcttatata

SEQ ID NO: 92182 - DNA, 20 bp, Artificial Sequence
  Description of Artificial Sequence: Synthetic oligonucleotide
  Target: LAMA2; (-) strand; PAM type: NRG; PAM sequence: TAG
caattaaacaaaatcttata

SEQ ID NO: 92183 - DNA, 20 bp, Artificial Sequence
  Description of Artificial Sequence: Synthetic oligonucleotide
  Target: LAMA2; (-) strand; PAM type: NRG; PAM sequence: AGG
atccactgatccacaaatta

SEQ ID NO: 92184 - DNA, 20 bp, Artificial Sequence
  Description of Artificial Sequence: Synthetic oligonucleotide
  Target: LAMA2; (-) strand; PAM type: NRG; PAM sequence: AAG
aatccactgatccacaaatt

SEQ ID NO: 92185 - DNA, 20 bp, Artificial Sequence
  Description of Artificial Sequence: Synthetic oligonucleotide
  Target: LAMA2; (-) strand; PAM type: NRG; PAM sequence: TAG
taattaaaatgaaaatcact

SEQ ID NO: 92186 - DNA, 20 bp, Artificial Sequence
  Description of Artificial Sequence: Synthetic oligonucleotide
  Target: LAMA2; (-) strand; PAM type: NRG; PAM sequence: TGG
agtacattttaaaagactta

SEQ ID NO: 92187 - DNA, 20 bp, Artificial Sequence
  Description of Artificial Sequence: Synthetic oligonucleotide
  Target: LAMA2; (-) strand; PAM type: NRG; PAM sequence: AAG
tttcccaaagtacattttaa

SEQ ID NO: 92188 - DNA, 20 bp, Artificial Sequence
  Description of Artificial Sequence: Synthetic oligonucleotide
  Target: LAMA2; (-) strand; PAM type: NRG; PAM sequence: AAG
gtaacccaatatttttccca

SEQ ID NO: 92189 - DNA, 20 bp, Artificial Sequence
  Description of Artificial Sequence: Synthetic oligonucleotide
  Target: LAMA2; (-) strand; PAM type: NRG; PAM sequence: AGG
catgttagtgaagtgtttaa

SEQ ID NO: 92190 - DNA, 20 bp, Artificial Sequence
  Description of Artificial Sequence: Synthetic oligonucleotide
  Target: LAMA2; (-) strand; PAM type: NRG; PAM sequence: AAG
gcatgttagtgaagtgttta

SEQ ID NO: 92191 - DNA, 20 bp, Artificial Sequence
  Description of Artificial Sequence: Synthetic oligonucleotide
  Target: LAMA2; (-) strand; PAM type: NRG; PAM sequence: AAG
tttcctactgcatgttagtg

SEQ ID NO: 92192 - DNA, 20 bp, Artificial Sequence
  Description of Artificial Sequence: Synthetic oligonucleotide
  Target: LAMA2; (-) strand; PAM type: NRG; PAM sequence: TAG
tattatttcctactgcatgt

SEQ ID NO: 92193 - DNA, 20 bp, Artificial Sequence
  Description of Artificial Sequence: Synthetic oligonucleotide
  Target: LAMA2; (-) strand; PAM type: NRG; PAM sequence: GAG
ttccatgtcagttttgggct

SEQ ID NO: 92194 - DNA, 20 bp, Artificial Sequence
  Description of Artificial Sequence: Synthetic oligonucleotide
  Target: LAMA2; (-) strand; PAM type: NRG; PAM sequence: GGG
aacaattccatgtcagtttt

SEQ ID NO: 92195 - DNA, 20 bp, Artificial Sequence
  Description of Artificial Sequence: Synthetic oligonucleotide
  Target: LAMA2; (-) strand; PAM type: NRG; PAM sequence: TGG
aaacaattccatgtcagttt

SEQ ID NO: 92196 - DNA, 20 bp, Artificial Sequence
  Description of Artificial Sequence: Synthetic oligonucleotide
  Target: LAMA2; (-) strand; PAM type: NRG; PAM sequence: CAG
taagtaaaacaattccatgt

SEQ ID NO: 92197 - DNA, 20 bp, Artificial Sequence
  Description of Artificial Sequence: Synthetic oligonucleotide
  Target: LAMA2; (-) strand; PAM type: NRG; PAM sequence: AAG
tatttttgtcttcttagggt

SEQ ID NO: 92198 - DNA, 20 bp, Artificial Sequence
  Description of Artificial Sequence: Synthetic oligonucleotide
  Target: LAMA2; (-) strand; PAM type: NRG; PAM sequence: GGG
tacttatttttgtcttctta

SEQ ID NO: 92199 - DNA, 20 bp, Artificial Sequence
  Description of Artificial Sequence: Synthetic oligonucleotide
  Target: LAMA2; (-) strand; PAM type: NRG; PAM sequence: AGG
atacttatttttgtcttctt

SEQ ID NO: 92200 - DNA, 20 bp, Artificial Sequence
  Description of Artificial Sequence: Synthetic oligonucleotide
  Target: LAMA2; (-) strand; PAM type: NRG; PAM sequence: TAG
catacttatttttgtcttct

SEQ ID NO: 92201 - DNA, 20 bp, Artificial Sequence
  Description of Artificial Sequence: Synthetic oligonucleotide
  Target: LAMA2; (-) strand; PAM type: NRG; PAM sequence: TGG
tatatggaacatcatgagtt

SEQ ID NO: 92202 - DNA, 20 bp, Artificial Sequence
  Description of Artificial Sequence: Synthetic oligonucleotide
  Target: LAMA2; (-) strand; PAM type: NRG; PAM sequence: GAG
atgactatatggaacatcat

SEQ ID NO: 92203 - DNA, 20 bp, Artificial Sequence
  Description of Artificial Sequence: Synthetic oligonucleotide
  Target: LAMA2; (-) strand; PAM type: NRG; PAM sequence: TGG
attcatgaaatatgactata

SEQ ID NO: 92204 - DNA, 20 bp, Artificial Sequence
  Description of Artificial Sequence: Synthetic oligonucleotide
  Target: LAMA2; (-) strand; PAM type: NRG; PAM sequence: CAG
tgctttcatcctaatgaatt

SEQ ID NO: 92205 - DNA, 20 bp, Artificial Sequence
  Description of Artificial Sequence: Synthetic oligonucleotide
  Target: LAMA2; (-) strand; PAM type: NRG; PAM sequence: TGG
agaaatatcacatcaacaaa

SEQ ID NO: 92206 - DNA, 20 bp, Artificial Sequence
  Description of Artificial Sequence: Synthetic oligonucleotide
  Target: LAMA2; (-) strand; PAM type: NRG; PAM sequence: TAG
ttaaaaaaggcttctagttt

SEQ ID NO: 92207 - DNA, 20 bp, Artificial Sequence
  Description of Artificial Sequence: Synthetic oligonucleotide
  Target: LAMA2; (-) strand; PAM type: NRG; PAM sequence: TAG
tattagttaaaaaaggcttc

SEQ ID NO: 92208 - DNA, 20 bp, Artificial Sequence
  Description of Artificial Sequence: Synthetic oligonucleotide
  Target: LAMA2; (-) strand; PAM type: NRG; PAM sequence: AGG
actgttttattagttaaaaa

SEQ ID NO: 92209 - DNA, 20 bp, Artificial Sequence
  Description of Artificial Sequence: Synthetic oligonucleotide
  Target: LAMA2; (-) strand; PAM type: NRG; PAM sequence: AAG
cactgttttattagttaaaa

SEQ ID NO: 92210 - DNA, 20 bp, Artificial Sequence
  Description of Artificial Sequence: Synthetic oligonucleotide
  Target: LAMA2; (-) strand; PAM type: NRG; PAM sequence: TAG
gctgaatgacactgttttat

SEQ ID NO: 92211 - DNA, 20 bp, Artificial Sequence
  Description of Artificial Sequence: Synthetic oligonucleotide
  Target: LAMA2; (-) strand; PAM type: NRG; PAM sequence: GGG
taaactaggcatcattagta

SEQ ID NO: 92212 - DNA, 20 bp, Artificial Sequence
  Description of Artificial Sequence: Synthetic oligonucleotide
  Target: LAMA2; (-) strand; PAM type: NRG; PAM sequence: AGG
gtaaactaggcatcattagt

SEQ ID NO: 92213 - DNA, 20 bp, Artificial Sequence
  Description of Artificial Sequence: Synthetic oligonucleotide
  Target: LAMA2; (-) strand; PAM type: NRG; PAM sequence: TAG
agtaaactaggcatcattag

SEQ ID NO: 92214 - DNA, 20 bp, Artificial Sequence
  Description of Artificial Sequence: Synthetic oligonucleotide
  Target: LAMA2; (-) strand; PAM type: NRG; PAM sequence: TAG
atcagtaaactaggcatcat

SEQ ID NO: 92215 - DNA, 20 bp, Artificial Sequence
  Description of Artificial Sequence: Synthetic oligonucleotide
  Target: LAMA2; (-) strand; PAM type: NRG; PAM sequence: AGG
tgaaacaaaatcagtaaact

SEQ ID NO: 92216 - DNA, 20 bp, Artificial Sequence
  Description of Artificial Sequence: Synthetic oligonucleotide
  Target: LAMA2; (-) strand; PAM type: NRG; PAM sequence: TAG
atgaaacaaaatcagtaaac

SEQ ID NO: 92217 - DNA, 20 bp, Artificial Sequence
  Description of Artificial Sequence: Synthetic oligonucleotide
  Target: LAMA2; (-) strand; PAM type: NRG; PAM sequence: CAG
ccctgttcatgaaacaaaat

SEQ ID NO: 92218 - DNA, 20 bp, Artificial Sequence
  Description of Artificial Sequence: Synthetic oligonucleotide
  Target: LAMA2; (-) strand; PAM type: NRG; PAM sequence: GAG
gatcgctctgttatttgaag

SEQ ID NO: 92219 - DNA, 20 bp, Artificial Sequence
  Description of Artificial Sequence: Synthetic oligonucleotide
  Target: LAMA2; (-) strand; PAM type: NRG; PAM sequence: AGG
aagatcgctctgttatttga

SEQ ID NO: 92220 - DNA, 20 bp, Artificial Sequence
  Description of Artificial Sequence: Synthetic oligonucleotide
  Target: LAMA2; (-) strand; PAM type: NRG; PAM sequence: AAG
caagatcgctctgttatttg

SEQ ID NO: 92221 - DNA, 20 bp, Artificial Sequence
  Description of Artificial Sequence: Synthetic oligonucleotide
  Target: LAMA2; (-) strand; PAM type: NRG; PAM sequence: AAG
aagatgtccactgtttcctc

SEQ ID NO: 92222 - DNA, 20 bp, Artificial Sequence
  Description of Artificial Sequence: Synthetic oligonucleotide
  Target: LAMA2; (-) strand; PAM type: NRG; PAM sequence: AAG
cagattctgtctttatcatc

SEQ ID NO: 92223 - DNA, 20 bp, Artificial Sequence
  Description of Artificial Sequence: Synthetic oligonucleotide
  Target: LAMA2; (-) strand; PAM type: NRG; PAM sequence: CAG
atggaaaattcaggaaacac

SEQ ID NO: 92224 - DNA, 20 bp, Artificial Sequence
  Description of Artificial Sequence: Synthetic oligonucleotide
  Target: LAMA2; (-) strand; PAM type: NRG; PAM sequence: AGG
ctagctatgatggaaaattc

SEQ ID NO: 92225 - DNA, 20 bp, Artificial Sequence
  Description of Artificial Sequence: Synthetic oligonucleotide
  Target: LAMA2; (-) strand; PAM type: NRG; PAM sequence: CAG
actagctatgatggaaaatt

SEQ ID NO: 92226 - DNA, 20 bp, Artificial Sequence
  Description of Artificial Sequence: Synthetic oligonucleotide
  Target: LAMA2; (-) strand; PAM type: NRG; PAM sequence: TGG
cacctatttactagctatga

SEQ ID NO: 92227 - DNA, 20 bp, Artificial Sequence
  Description of Artificial Sequence: Synthetic oligonucleotide
  Target: LAMA2; (-) strand; PAM type: NRG; PAM sequence: TAG
ctacatgatcacctatttac

SEQ ID NO: 92228 - DNA, 20 bp, Artificial Sequence
  Description of Artificial Sequence: Synthetic oligonucleotide
  Target: LAMA2; (-) strand; PAM type: NRG; PAM sequence: CAG
gagaaagggcacttgaaagt

SEQ ID NO: 92229 - DNA, 20 bp, Artificial Sequence
  Description of Artificial Sequence: Synthetic oligonucleotide
  Target: LAMA2; (-) strand; PAM type: NRG; PAM sequence: AAG
tttggagaaagggcacttga

SEQ ID NO: 92230 - DNA, 20 bp, Artificial Sequence
  Description of Artificial Sequence: Synthetic oligonucleotide
  Target: LAMA2; (-) strand; PAM type: NRG; PAM sequence: GGG
tcaatacaattttggagaaa

SEQ ID NO: 92231 - DNA, 20 bp, Artificial Sequence
  Description of Artificial Sequence: Synthetic oligonucleotide
  Target: LAMA2; (-) strand; PAM type: NRG; PAM sequence: AGG
atcaatacaattttggagaa

SEQ ID NO: 92232 - DNA, 20 bp, Artificial Sequence
  Description of Artificial Sequence: Synthetic oligonucleotide
  Target: LAMA2; (-) strand; PAM type: NRG; PAM sequence: AAG
tatcaatacaattttggaga

SEQ ID NO: 92233 - DNA, 20 bp, Artificial Sequence
  Description of Artificial Sequence: Synthetic oligonucleotide
  Target: LAMA2; (-) strand; PAM type: NRG; PAM sequence: GAG
tagttatcaatacaattttg

SEQ ID NO: 92234 - DNA, 20 bp, Artificial Sequence
  Description of Artificial Sequence: Synthetic oligonucleotide
  Target: LAMA2; (-) strand; PAM type: NRG; PAM sequence: TGG
cttagttatcaatacaattt

SEQ ID NO: 92235 - DNA, 20 bp, Artificial Sequence
  Description of Artificial Sequence: Synthetic oligonucleotide
  Target: LAMA2; (-) strand; PAM type: NRG; PAM sequence: TAG
caaaatggaatatcagcact

SEQ ID NO: 92236 - DNA, 20 bp, Artificial Sequence
  Description of Artificial Sequence: Synthetic oligonucleotide
  Target: LAMA2; (-) strand; PAM type: NRG; PAM sequence: CAG
atatactcaaaatggaatat

SEQ ID NO: 92237 - DNA, 20 bp, Artificial Sequence
  Description of Artificial Sequence: Synthetic oligonucleotide
  Target: LAMA2; (-) strand; PAM type: NRG; PAM sequence: TGG
cagaacccatatactcaaaa

SEQ ID NO: 92238 - DNA, 20 bp, Artificial Sequence
  Description of Artificial Sequence: Synthetic oligonucleotide
  Target: LAMA2; (-) strand; PAM type: NRG; PAM sequence: CAG
ctcctctttgtgtattgtat

SEQ ID NO: 92239 - DNA, 20 bp, Artificial Sequence
  Description of Artificial Sequence: Synthetic oligonucleotide
  Target: LAMA2; (-) strand; PAM type: NRG; PAM sequence: GAG
acagtaagaatgcccttgat

SEQ ID NO: 92240 - DNA, 20 bp, Artificial Sequence
  Description of Artificial Sequence: Synthetic oligonucleotide
  Target: LAMA2; (-) strand; PAM type: NRG; PAM sequence: AAG
tgcagggtcagctgaacagt

SEQ ID NO: 92241 - DNA, 20 bp, Artificial Sequence
  Description of Artificial Sequence: Synthetic oligonucleotide
  Target: LAMA2; (-) strand; PAM type: NRG; PAM sequence: CAG
aaaatgcagggtcagctgaa

SEQ ID NO: 92242 - DNA, 20 bp, Artificial Sequence
  Description of Artificial Sequence: Synthetic oligonucleotide
  Target: LAMA2; (-) strand; PAM type: NRG; PAM sequence: CAG
aagaagctaaaatgcagggt

SEQ ID NO: 92243 - DNA, 20 bp, Artificial Sequence
  Description of Artificial Sequence: Synthetic oligonucleotide
  Target: LAMA2; (-) strand; PAM type: NRG; PAM sequence: GGG
aaacaagaagctaaaatgca

SEQ ID NO: 92244 - DNA, 20 bp, Artificial Sequence
  Description of Artificial Sequence: Synthetic oligonucleotide
  Target: LAMA2; (-) strand; PAM type: NRG; PAM sequence: AGG
taaacaagaagctaaaatgc

SEQ ID NO: 92245 - DNA, 20 bp, Artificial Sequence
  Description of Artificial Sequence: Synthetic oligonucleotide
  Target: LAMA2; (-) strand; PAM type: NRG; PAM sequence: CAG
ataaacaagaagctaaaatg

SEQ ID NO: 92246 - DNA, 20 bp, Artificial Sequence
  Description of Artificial Sequence: Synthetic oligonucleotide
  Target: LAMA2; (-) strand; PAM type: NRG; PAM sequence: AAG
aaccatgaaaaataaacaag

SEQ ID NO: 92247 - DNA, 20 bp, Artificial Sequence
  Description of Artificial Sequence: Synthetic oligonucleotide
  Target: LAMA2; (-) strand; PAM type: NRG; PAM sequence: AAG
taaaaccatgaaaaataaac

SEQ ID NO: 92248 - DNA, 20 bp, Artificial Sequence
  Description of Artificial Sequence: Synthetic oligonucleotide
  Target: LAMA2; (-) strand; PAM type: NRG; PAM sequence: GGG
aaaccatgctacttaatgct

SEQ ID NO: 92249 - DNA, 20 bp, Artificial Sequence
  Description of Artificial Sequence: Synthetic oligonucleotide
  Target: LAMA2; (-) strand; PAM type: NRG; PAM sequence: TGG
aaaaccatgctacttaatgc

SEQ ID NO: 92250 - DNA, 20 bp, Artificial Sequence
  Description of Artificial Sequence: Synthetic oligonucleotide
  Target: LAMA2; (-) strand; PAM type: NRG; PAM sequence: AAG
atcaaattttaaagcaagtt

SEQ ID NO: 92251 - DNA, 20 bp, Artificial Sequence
  Description of Artificial Sequence: Synthetic oligonucleotide
  Target: LAMA2; (-) strand; PAM type: NRG; PAM sequence: AAG
ttataatcaaattttaaagc

SEQ ID NO: 92252 - DNA, 20 bp, Artificial Sequence
  Description of Artificial Sequence: Synthetic oligonucleotide
  Target: LAMA2; (-) strand; PAM type: NRG; PAM sequence: AAG
taatttataatcaaatttta

SEQ ID NO: 92253 - DNA, 20 bp, Artificial Sequence
  Description of Artificial Sequence: Synthetic oligonucleotide
  Target: LAMA2; (-) strand; PAM type: NRG; PAM sequence: CAG
ctggtgccaaaaatattttt

SEQ ID NO: 92254 - DNA, 20 bp, Artificial Sequence
  Description of Artificial Sequence: Synthetic oligonucleotide
  Target: LAMA2; (-) strand; PAM type: NRG; PAM sequence: TGG
cagaagtttagattttgttc

SEQ ID NO: 92255 - DNA, 20 bp, Artificial Sequence
  Description of Artificial Sequence: Synthetic oligonucleotide
  Target: LAMA2; (-) strand; PAM type: NRG; PAM sequence: TAG
cctacactattgcagaagtt

SEQ ID NO: 92256 - DNA, 20 bp, Artificial Sequence
  Description of Artificial Sequence: Synthetic oligonucleotide
  Target: LAMA2; (-) strand; PAM type: NRG; PAM sequence: AAG
atagacctacactattgcag

SEQ ID NO: 92257 - DNA, 20 bp, Artificial Sequence
  Description of Artificial Sequence: Synthetic oligonucleotide
  Target: LAMA2; (-) strand; PAM type: NRG; PAM sequence: CAG
aatatagacctacactattg

SEQ ID NO: 92258 - DNA, 20 bp, Artificial Sequence
  Description of Artificial Sequence: Synthetic oligonucleotide
  Target: LAMA2; (-) strand; PAM type: NRG; PAM sequence: TAG
gttaaaatgtcttttaaata

SEQ ID NO: 92259 - DNA, 20 bp, Artificial Sequence
  Description of Artificial Sequence: Synthetic oligonucleotide
  Target: LAMA2; (-) strand; PAM type: NRG; PAM sequence: GAG
gcttacttcaaatggacttt

SEQ ID NO: 92260 - DNA, 20 bp, Artificial Sequence
  Description of Artificial Sequence: Synthetic oligonucleotide
  Target: LAMA2; (-) strand; PAM type: NRG; PAM sequence: TGG
acttcctggcttacttcaaa

SEQ ID NO: 92261 - DNA, 20 bp, Artificial Sequence
  Description of Artificial Sequence: Synthetic oligonucleotide
  Target: LAMA2; (-) strand; PAM type: NRG; PAM sequence: TGG
atgtgacattgaatacttcc

SEQ ID NO: 92262 - DNA, 20 bp, Artificial Sequence
  Description of Artificial Sequence: Synthetic oligonucleotide
  Target: LAMA2; (-) strand; PAM type: NRG; PAM sequence: AAG
caagaactatgagaagaagc

SEQ ID NO: 92263 - DNA, 20 bp, Artificial Sequence
  Description of Artificial Sequence: Synthetic oligonucleotide
  Target: LAMA2; (-) strand; PAM type: NRG; PAM sequence: AAG
accacaagaactatgagaag

SEQ ID NO: 92264 - DNA, 20 bp, Artificial Sequence
  Description of Artificial Sequence: Synthetic oligonucleotide
  Target: LAMA2; (-) strand; PAM type: NRG; PAM sequence: AAG
cataccacaagaactatgag

SEQ ID NO: 92265 - DNA, 20 bp, Artificial Sequence
  Description of Artificial Sequence: Synthetic oligonucleotide
  Target: LAMA2; (-) strand; PAM type: NRG; PAM sequence: GAG
ttacataccacaagaactat

SEQ ID NO: 92266 - DNA, 20 bp, Artificial Sequence
  Description of Artificial Sequence: Synthetic oligonucleotide
  Target: LAMA2; (-) strand; PAM type: NRG; PAM sequence: AAG
ttgctcacattacataccac

SEQ ID NO: 92267 - DNA, 20 bp, Artificial Sequence
  Description of Artificial Sequence: Synthetic oligonucleotide
  Target: LAMA2; (-) strand; PAM type: NRG; PAM sequence: AAG
ttacaggtgtcctgttacga

SEQ ID NO: 92268 - DNA, 20 bp, Artificial Sequence
  Description of Artificial Sequence: Synthetic oligonucleotide
  Target: LAMA2; (-) strand; PAM type: NRG; PAM sequence: AGG
gatggattggttatttttac

SEQ ID NO: 92269 - DNA, 20 bp, Artificial Sequence
  Description of Artificial Sequence: Synthetic oligonucleotide
  Target: LAMA2; (-) strand; PAM type: NRG; PAM sequence: CAG
tgatggattggttattttta

SEQ ID NO: 92270 - DNA, 20 bp, Artificial Sequence
  Description of Artificial Sequence: Synthetic oligonucleotide
  Target: LAMA2; (-) strand; PAM type: NRG; PAM sequence: TGG
gaagcttcactctgatggat

SEQ ID NO: 92271 - DNA, 20 bp, Artificial Sequence
  Description of Artificial Sequence: Synthetic oligonucleotide
  Target: LAMA2; (-) strand; PAM type: NRG; PAM sequence: TGG
agatggaagcttcactctga

SEQ ID NO: 92272 - DNA, 20 bp, Artificial Sequence
  Description of Artificial Sequence: Synthetic oligonucleotide
  Target: LAMA2; (-) strand; PAM type: NRG; PAM sequence: AAG
taaaaaaaaaaaaaagatgg

SEQ ID NO: 92273 - DNA, 20 bp, Artificial Sequence
  Description of Artificial Sequence: Synthetic oligonucleotide
  Target: LAMA2; (-) strand; PAM type: NRG; PAM sequence: TGG
aaataaaaaaaaaaaaaaga

SEQ ID NO: 92274 - DNA, 20 bp, Artificial Sequence
  Description of Artificial Sequence: Synthetic oligonucleotide
  Target: LAMA2; (-) strand; PAM type: NRG; PAM sequence: AAG
atggaaataaaaaaaaaaaa

SEQ ID NO: 92275 - DNA, 20 bp, Artificial Sequence
  Description of Artificial Sequence: Synthetic oligonucleotide
  Target: LAMA2; (-) strand; PAM type: NRG; PAM sequence: TGG
gcatcagacaacctatataa

SEQ ID NO: 92276 - DNA, 20 bp, Artificial Sequence
  Description of Artificial Sequence: Synthetic oligonucleotide
  Target: LAMA2; (-) strand; PAM type: NRG; PAM sequence: CAG
tggaaaccagaaaactgcat

SEQ ID NO: 92277 - DNA, 20 bp, Artificial Sequence
  Description of Artificial Sequence: Synthetic oligonucleotide
  Target: LAMA2; (-) strand; PAM type: NRG; PAM sequence: CAG
agtatttttgtagtggaaac

SEQ ID NO: 92278 - DNA, 20 bp, Artificial Sequence
  Description of Artificial Sequence: Synthetic oligonucleotide
  Target: LAMA2; (-) strand; PAM type: NRG; PAM sequence: TGG
aaactcaagtatttttgtag

SEQ ID NO: 92279 - DNA, 20 bp, Artificial Sequence
  Description of Artificial Sequence: Synthetic oligonucleotide
  Target: LAMA2; (-) strand; PAM type: NRG; PAM sequence: TAG
ttaaaactcaagtatttttg

SEQ ID NO: 92280 - DNA, 20 bp, Artificial Sequence
  Description of Artificial Sequence: Synthetic oligonucleotide
  Target: LAMA2; (-) strand; PAM type: NRG; PAM sequence: AAG
taaaaatcatcttaaaactc

SEQ ID NO: 92281 - DNA, 20 bp, Artificial Sequence
  Description of Artificial Sequence: Synthetic oligonucleotide
  Target: LAMA2; (-) strand; PAM type: NRG; PAM sequence: TAG
tttaaaagacaaataacatg

SEQ ID NO: 92282 - DNA, 20 bp, Artificial Sequence
  Description of Artificial Sequence: Synthetic oligonucleotide
  Target: LAMA2; (-) strand; PAM type: NRG; PAM sequence: AAG
atttccaattattgatttaa

SEQ ID NO: 92283 - DNA, 20 bp, Artificial Sequence
  Description of Artificial Sequence: Synthetic oligonucleotide
  Target: LAMA2; (-) strand; PAM type: NRG; PAM sequence: GGG
aaaatcttgcataattgaga

SEQ ID NO: 92284 - DNA, 20 bp, Artificial Sequence
  Description of Artificial Sequence: Synthetic oligonucleotide
  Target: LAMA2; (-) strand; PAM type: NRG; PAM sequence: AGG
gaaaatcttgcataattgag

SEQ ID NO: 92285 - DNA, 20 bp, Artificial Sequence
  Description of Artificial Sequence: Synthetic oligonucleotide
  Target: LAMA2; (-) strand; PAM type: NRG; PAM sequence: GAG
tgaaaatcttgcataattga

SEQ ID NO: 92286 - DNA, 20 bp, Artificial Sequence
  Description of Artificial Sequence: Synthetic oligonucleotide
  Target: LAMA2; (-) strand; PAM type: NRG; PAM sequence: GAG
actgaaaatcttgcataatt

SEQ ID NO: 92287 - DNA, 20 bp, Artificial Sequence
  Description of Artificial Sequence: Synthetic oligonucleotide
  Target: LAMA2; (-) strand; PAM type: NRG; PAM sequence: TGG
tgccttaaacatgttgaaaa

SEQ ID NO: 92288 - DNA, 20 bp, Artificial Sequence
  Description of Artificial Sequence: Synthetic oligonucleotide
  Target: LAMA2; (-) strand; PAM type: NRG; PAM sequence: GGG
ttatgtcttcaaatacttaa

SEQ ID NO: 92289 - DNA, 20 bp, Artificial Sequence
  Description of Artificial Sequence: Synthetic oligonucleotide
  Target: LAMA2; (-) strand; PAM type: NRG; PAM sequence: AGG
attatgtcttcaaatactta

SEQ ID NO: 92290 - DNA, 20 bp, Artificial Sequence
  Description of Artificial Sequence: Synthetic oligonucleotide
  Target: LAMA2; (-) strand; PAM type: NRG; PAM sequence: AAG
aattatgtcttcaaatactt

SEQ ID NO: 92291 - DNA, 20 bp, Artificial Sequence
  Description of Artificial Sequence: Synthetic oligonucleotide
  Target: LAMA2; (-) strand; PAM type: NRG; PAM sequence: AAG
gctaaactaagctattactg

SEQ ID NO: 92292 - DNA, 20 bp, Artificial Sequence
  Description of Artificial Sequence: Synthetic oligonucleotide
  Target: LAMA2; (-) strand; PAM type: NRG; PAM sequence: AAG
tttttaagtttagctaaact

SEQ ID NO: 92293 - DNA, 20 bp, Artificial Sequence
  Description of Artificial Sequence: Synthetic oligonucleotide
  Target: LAMA2; (-) strand; PAM type: NRG; PAM sequence: TAG
ttcctttcaatttttaagtt

SEQ ID NO: 92294 - DNA, 20 bp, Artificial Sequence
  Description of Artificial Sequence: Synthetic oligonucleotide
  Target: LAMA2; (-) strand; PAM type: NRG; PAM sequence: AAG
tttacttcctttcaattttt

SEQ ID NO: 92295 - DNA, 20 bp, Artificial Sequence
  Description of Artificial Sequence: Synthetic oligonucleotide
  Target: LAMA2; (-) strand; PAM type: NRG; PAM sequence: AAG
aacatggatccatttgaaga

SEQ ID NO: 92296 - DNA, 20 bp, Artificial Sequence
  Description of Artificial Sequence: Synthetic oligonucleotide
  Target: LAMA2; (-) strand; PAM type: NRG; PAM sequence: AAG
gcaaaacatggatccatttg

SEQ ID NO: 92297 - DNA, 20 bp, Artificial Sequence
  Description of Artificial Sequence: Synthetic oligonucleotide
  Target: LAMA2; (-) strand; PAM type: NRG; PAM sequence: TGG
gggatttaatgtgcaaaaca

SEQ ID NO: 92298 - DNA, 20 bp, Artificial Sequence
  Description of Artificial Sequence: Synthetic oligonucleotide
  Target: LAMA2; (-) strand; PAM type: NRG; PAM sequence: GGG
ccttaataatgcagtatatt

SEQ ID NO: 92299 - DNA, 20 bp, Artificial Sequence
  Description of Artificial Sequence: Synthetic oligonucleotide
  Target: LAMA2; (-) strand; PAM type: NRG; PAM sequence: TGG
gccttaataatgcagtatat

SEQ ID NO: 92300 - DNA, 20 bp, Artificial Sequence
  Description of Artificial Sequence: Synthetic oligonucleotide
  Target: LAMA2; (-) strand; PAM type: NRG; PAM sequence: CAG
gaatagttgccttaataatg

SEQ ID NO: 92301 - DNA, 20 bp, Artificial Sequence
  Description of Artificial Sequence: Synthetic oligonucleotide
  Target: LAMA2; (-) strand; PAM type: NRG; PAM sequence: TAG
aaggtcagcttcactatgaa

SEQ ID NO: 92302 - DNA, 20 bp, Artificial Sequence
  Description of Artificial Sequence: Synthetic oligonucleotide
  Target: LAMA2; (-) strand; PAM type: NRG; PAM sequence: CAG
ttaaaagatagcattaaggt

SEQ ID NO: 92303 - DNA, 20 bp, Artificial Sequence
  Description of Artificial Sequence: Synthetic oligonucleotide
  Target: LAMA2; (-) strand; PAM type: NRG; PAM sequence: AGG
ctttttaaaagatagcatta

SEQ ID NO: 92304 - DNA, 20 bp, Artificial Sequence
  Description of Artificial Sequence: Synthetic oligonucleotide
  Target: LAMA2; (-) strand; PAM type: NRG; PAM sequence: AAG
actttttaaaagatagcatt

SEQ ID NO: 92305 - DNA, 20 bp, Artificial Sequence
  Description of Artificial Sequence: Synthetic oligonucleotide
  Target: LAMA2; (-) strand; PAM type: NRG; PAM sequence: TAG
taacaaaactttttaaaaga

SEQ ID NO: 92306 - DNA, 20 bp, Artificial Sequence
  Description of Artificial Sequence: Synthetic oligonucleotide
  Target: LAMA2; (-) strand; PAM type: NRG; PAM sequence: AAG
tttttaacaaaactttttaa

SEQ ID NO: 92307 - DNA, 20 bp, Artificial Sequence
  Description of Artificial Sequence: Synthetic oligonucleotide
  Target: LAMA2; (-) strand; PAM type: NRG; PAM sequence: AAG
ttgaaaacaggcttttctct

SEQ ID NO: 92308 - DNA, 20 bp, Artificial Sequence
  Description of Artificial Sequence: Synthetic oligonucleotide
  Target: LAMA2; (-) strand; PAM type: NRG; PAM sequence: AGG
aactggtgatatttgaaaac

SEQ ID NO: 92309 - DNA, 20 bp, Artificial Sequence
  Description of Artificial Sequence: Synthetic oligonucleotide
  Target: LAMA2; (-) strand; PAM type: NRG; PAM sequence: CAG
taactggtgatatttgaaaa

SEQ ID NO: 92310 - DNA, 20 bp, Artificial Sequence
  Description of Artificial Sequence: Synthetic oligonucleotide
  Target: LAMA2; (-) strand; PAM type: NRG; PAM sequence: TGG
atatgtatttctgtagtaac

SEQ ID NO: 92311 - DNA, 20 bp, Artificial Sequence
  Description of Artificial Sequence: Synthetic oligonucleotide
  Target: LAMA2; (-) strand; PAM type: NRG; PAM sequence: TAG
aatgtggatatgtatttctg

SEQ ID NO: 92312 - DNA, 20 bp, Artificial Sequence
  Description of Artificial Sequence: Synthetic oligonucleotide
  Target: LAMA2; (-) strand; PAM type: NRG; PAM sequence: TGG
ccaatttcatcaactaaatg

SEQ ID NO: 92313 - DNA, 20 bp, Artificial Sequence
  Description of Artificial Sequence: Synthetic oligonucleotide
  Target: LAMA2; (-) strand; PAM type: NRG; PAM sequence: GAG
ttgactcataattaaacatg

SEQ ID NO: 92314 - DNA, 20 bp, Artificial Sequence
  Description of Artificial Sequence: Synthetic oligonucleotide
  Target: LAMA2; (-) strand; PAM type: NRG; PAM sequence: TGG
gcttgactcataattaaaca

SEQ ID NO: 92315 - DNA, 20 bp, Artificial Sequence
  Description of Artificial Sequence: Synthetic oligonucleotide
  Target: LAMA2; (-) strand; PAM type: NRG; PAM sequence: AAG
tactgtattacatctgtgag

SEQ ID NO: 92316 - DNA, 20 bp, Artificial Sequence
  Description of Artificial Sequence: Synthetic oligonucleotide
  Target: LAMA2; (-) strand; PAM type: NRG; PAM sequence: GAG
cactactgtattacatctgt

SEQ ID NO: 92317 - DNA, 20 bp, Artificial Sequence
  Description of Artificial Sequence: Synthetic oligonucleotide
  Target: LAMA2; (-) strand; PAM type: NRG; PAM sequence: TGG
ctcagtggactctgatggtt

SEQ ID NO: 92318 - DNA, 20 bp, Artificial Sequence
  Description of Artificial Sequence: Synthetic oligonucleotide
  Target: LAMA2; (-) strand; PAM type: NRG; PAM sequence: TGG
ttggcctcagtggactctga

SEQ ID NO: 92319 - DNA, 20 bp, Artificial Sequence
  Description of Artificial Sequence: Synthetic oligonucleotide
  Target: LAMA2; (-) strand; PAM type: NRG; PAM sequence: TGG
gacatgaattttggcctcag

SEQ ID NO: 92320 - DNA, 20 bp, Artificial Sequence
  Description of Artificial Sequence: Synthetic oligonucleotide
  Target: LAMA2; (-) strand; PAM type: NRG; PAM sequence: CAG
tcagacatgaattttggcct

SEQ ID NO: 92321 - DNA, 20 bp, Artificial Sequence
  Description of Artificial Sequence: Synthetic oligonucleotide
  Target: LAMA2; (-) strand; PAM type: NRG; PAM sequence: TGG
cttagctcagacatgaattt

SEQ ID NO: 92322 - DNA, 20 bp, Artificial Sequence
  Description of Artificial Sequence: Synthetic oligonucleotide
  Target: LAMA2; (-) strand; PAM type: NRG; PAM sequence: CAG
ggggctatggcctcttagct

SEQ ID NO: 92323 - DNA, 20 bp, Artificial Sequence
  Description of Artificial Sequence: Synthetic oligonucleotide
  Target: LAMA2; (-) strand; PAM type: NRG; PAM sequence: TAG
cctccggggctatggcctct

SEQ ID NO: 92324 - DNA, 20 bp, Artificial Sequence
  Description of Artificial Sequence: Synthetic oligonucleotide
  Target: LAMA2; (-) strand; PAM type: NRG; PAM sequence: TGG
atagaaatcctccggggcta

SEQ ID NO: 92325 - DNA, 20 bp, Artificial Sequence
  Description of Artificial Sequence: Synthetic oligonucleotide
  Target: LAMA2; (-) strand; PAM type: NRG; PAM sequence: GGG
ctaatcatagaaatcctccg

SEQ ID NO: 92326 - DNA, 20 bp, Artificial Sequence
  Description of Artificial Sequence: Synthetic oligonucleotide
  Target: LAMA2; (-) strand; PAM type: NRG; PAM sequence: GGG
gctaatcatagaaatcctcc

SEQ ID NO: 92327 - DNA, 20 bp, Artificial Sequence
  Description of Artificial Sequence: Synthetic oligonucleotide
  Target: LAMA2; (-) strand; PAM type: NRG; PAM sequence: CGG
ggctaatcatagaaatcctc

SEQ ID NO: 92328 - DNA, 20 bp, Artificial Sequence
  Description of Artificial Sequence: Synthetic oligonucleotide
  Target: LAMA2; (-) strand; PAM type: NRG; PAM sequence: TAG
atgggaactgtggctaatca

SEQ ID NO: 92329 - DNA, 20 bp, Artificial Sequence
  Description of Artificial Sequence: Synthetic oligonucleotide
  Target: LAMA2; (-) strand; PAM type: NRG; PAM sequence: TGG
tgctgatttaatgggaactg

SEQ ID NO: 92330 - DNA, 20 bp, Artificial Sequence
  Description of Artificial Sequence: Synthetic oligonucleotide
  Target: LAMA2; (-) strand; PAM type: NRG; PAM sequence: GGG
cttgaaattgctgatttaat

SEQ ID NO: 92331 - DNA, 20 bp, Artificial Sequence
  Description of Artificial Sequence: Synthetic oligonucleotide
  Target: LAMA2; (-) strand; PAM type: NRG; PAM sequence: TGG
gcttgaaattgctgatttaa

SEQ ID NO: 92332 - DNA, 20 bp, Artificial Sequence
  Description of Artificial Sequence: Synthetic oligonucleotide
  Target: LAMA2; (-) strand; PAM type: NRG; PAM sequence: CAG
ctaggtaaaaatcaattgtt

SEQ ID NO: 92333 - DNA, 20 bp, Artificial Sequence
  Description of Artificial Sequence: Synthetic oligonucleotide
  Target: LAMA2; (-) strand; PAM type: NRG; PAM sequence: AGG
tggaaattgtagctgattct

SEQ ID NO: 92334 - DNA, 20 bp, Artificial Sequence
  Description of Artificial Sequence: Synthetic oligonucleotide
  Target: LAMA2; (-) strand; PAM type: NRG; PAM sequence: TAG
atggaaattgtagctgattc

SEQ ID NO: 92335 - DNA, 20 bp, Artificial Sequence
  Description of Artificial Sequence: Synthetic oligonucleotide
  Target: LAMA2; (-) strand; PAM type: NRG; PAM sequence: TAG
catatgtttaatggaaattg

SEQ ID NO: 92336 - DNA, 20 bp, Artificial Sequence
  Description of Artificial Sequence: Synthetic oligonucleotide
  Target: LAMA2; (-) strand; PAM type: NRG; PAM sequence: TGG
cactaataacatatgtttaa

SEQ ID NO: 92337 - DNA, 20 bp, Artificial Sequence
  Description of Artificial Sequence: Synthetic oligonucleotide
  Target: LAMA2; (-) strand; PAM type: NRG; PAM sequence: GAG
tgtgtgtgtgtgtagtcata

SEQ ID NO: 92338 - DNA, 20 bp, Artificial Sequence
  Description of Artificial Sequence: Synthetic oligonucleotide
  Target: LAMA2; (-) strand; PAM type: NRG; PAM sequence: TAG
tgtgtgtgtgtgtgtagtca

SEQ ID NO: 92339 - DNA, 20 bp, Artificial Sequence
  Description of Artificial Sequence: Synthetic oligonucleotide
  Target: LAMA2; (-) strand; PAM type: NRG; PAM sequence: TAG
tgtgtgtgtgtgtgtgtgtg

SEQ ID NO: 92340 - DNA, 20 bp, Artificial Sequence
  Description of Artificial Sequence: Synthetic oligonucleotide
  Target: LAMA2; (-) strand; PAM type: NRG; PAM sequence: AAG
attttttctttattttcctt

SEQ ID NO: 92341 - DNA, 20 bp, Artificial Sequence
  Description of Artificial Sequence: Synthetic oligonucleotide
  Target: LAMA2; (-) strand; PAM type: NRG; PAM sequence: AAG
agcatatgcatacttacaaa

SEQ ID NO: 92342 - DNA, 20 bp, Artificial Sequence
  Description of Artificial Sequence: Synthetic oligonucleotide
  Target: LAMA2; (-) strand; PAM type: NRG; PAM sequence: CAG
tataaacaacacagtagttt

SEQ ID NO: 92343 - DNA, 20 bp, Artificial Sequence
  Description of Artificial Sequence: Synthetic oligonucleotide
  Target: LAMA2; (-) strand; PAM type: NRG; PAM sequence: TAG
ctagcttataaacaacacag

SEQ ID NO: 92344 - DNA, 20 bp, Artificial Sequence
  Description of Artificial Sequence: Synthetic oligonucleotide
  Target: LAMA2; (-) strand; PAM type: NRG; PAM sequence: CAG
tatctagcttataaacaaca

SEQ ID NO: 92345 - DNA, 20 bp, Artificial Sequence
  Description of Artificial Sequence: Synthetic oligonucleotide
  Target: LAMA2; (-) strand; PAM type: NRG; PAM sequence: TAG
ttgaaagttaatttaatatc

SEQ ID NO: 92346 - DNA, 20 bp, Artificial Sequence
  Description of Artificial Sequence: Synthetic oligonucleotide
  Target: LAMA2; (-) strand; PAM type: NRG; PAM sequence: AAG
cagcagagaaatagcattga

SEQ ID NO: 92347 - DNA, 20 bp, Artificial Sequence
  Description of Artificial Sequence: Synthetic oligonucleotide
  Target: LAMA2; (-) strand; PAM type: NRG; PAM sequence: TAG
tcaattttacagcagagaaa

SEQ ID NO: 92348 - DNA, 20 bp, Artificial Sequence
  Description of Artificial Sequence: Synthetic oligonucleotide
  Target: LAMA2; (-) strand; PAM type: NRG; PAM sequence: GAG
aaatggtcaattttacagca

SEQ ID NO: 92349 - DNA, 20 bp, Artificial Sequence
  Description of Artificial Sequence: Synthetic oligonucleotide
  Target: LAMA2; (-) strand; PAM type: NRG; PAM sequence: CAG
ttaaatggtcaattttacag

SEQ ID NO: 92350 - DNA, 20 bp, Artificial Sequence
  Description of Artificial Sequence: Synthetic oligonucleotide
  Target: LAMA2; (-) strand; PAM type: NRG; PAM sequence: CAG
atgttaaatggtcaatttta

SEQ ID NO: 92351 - DNA, 20 bp, Artificial Sequence
  Description of Artificial Sequence: Synthetic oligonucleotide
  Target: LAMA2; (-) strand; PAM type: NRG; PAM sequence: TGG
aataatttttccatgttaaa

SEQ ID NO: 92352 - DNA, 20 bp, Artificial Sequence
  Description of Artificial Sequence: Synthetic oligonucleotide
  Target: LAMA2; (-) strand; PAM type: NRG; PAM sequence: AAG
ttagtctgctccctgccagc

SEQ ID NO: 92353 - DNA, 20 bp, Artificial Sequence
  Description of Artificial Sequence: Synthetic oligonucleotide
  Target: LAMA2; (-) strand; PAM type: NRG; PAM sequence: CAG
gtcattagtctgctccctgc

SEQ ID NO: 92354 - DNA, 20 bp, Artificial Sequence
  Description of Artificial Sequence: Synthetic oligonucleotide
  Target: LAMA2; (-) strand; PAM type: NRG; PAM sequence: TAG
aaataggtctacgaagtcat

SEQ ID NO: 92355 - DNA, 20 bp, Artificial Sequence
  Description of Artificial Sequence: Synthetic oligonucleotide
  Target: LAMA2; (-) strand; PAM type: NRG; PAM sequence: AAG
ttgccaaaaataggtctacg

SEQ ID NO: 92356 - DNA, 20 bp, Artificial Sequence
  Description of Artificial Sequence: Synthetic oligonucleotide
  Target: LAMA2; (-) strand; PAM type: NRG; PAM sequence: AGG
atcaacatgttgccaaaaat

SEQ ID NO: 92357 - DNA, 20 bp, Artificial Sequence
  Description of Artificial Sequence: Synthetic oligonucleotide
  Target: LAMA2; (-) strand; PAM type: NRG; PAM sequence: TAG
gatcaacatgttgccaaaaa

SEQ ID NO: 92358 - DNA, 20 bp, Artificial Sequence
  Description of Artificial Sequence: Synthetic oligonucleotide
  Target: LAMA2; (-) strand; PAM type: NRG; PAM sequence: GGG
agtttattattttggtgtca

SEQ ID NO: 92359 - DNA, 20 bp, Artificial Sequence
  Description of Artificial Sequence: Synthetic oligonucleotide
  Target: LAMA2; (-) strand; PAM type: NRG; PAM sequence: AGG
gagtttattattttggtgtc

SEQ ID NO: 92360 - DNA, 20 bp, Artificial Sequence
  Description of Artificial Sequence: Synthetic oligonucleotide
  Target: LAMA2; (-) strand; PAM type: NRG; PAM sequence: CAG
agagtttattattttggtgt

SEQ ID NO: 92361 - DNA, 20 bp, Artificial Sequence
  Description of Artificial Sequence: Synthetic oligonucleotide
  Target: LAMA2; (-) strand; PAM type: NRG; PAM sequence: TGG
agcatcagagtttattattt

SEQ ID NO: 92362 - DNA, 20 bp, Artificial Sequence
  Description of Artificial Sequence: Synthetic oligonucleotide
  Target: LAMA2; (-) strand; PAM type: NRG; PAM sequence: GAG
tgagaaagaaatgagcatca

SEQ ID NO: 92363 - DNA, 20 bp, Artificial Sequence
  Description of Artificial Sequence: Synthetic oligonucleotide
  Target: LAMA2; (-) strand; PAM type: NRG; PAM sequence: CAG
tctgagaaagaaatgagcat

SEQ ID NO: 92364 - DNA, 20 bp, Artificial Sequence
  Description of Artificial Sequence: Synthetic oligonucleotide
  Target: LAMA2; (-) strand; PAM type: NRG; PAM sequence: GAG
tacagttctgagaaagaaat

SEQ ID NO: 92365 - DNA, 20 bp, Artificial Sequence
  Description of Artificial Sequence: Synthetic oligonucleotide
  Target: LAMA2; (-) strand; PAM type: NRG; PAM sequence: AAG
tgatccttacagttctgaga

SEQ ID NO: 92366 - DNA, 20 bp, Artificial Sequence
  Description of Artificial Sequence: Synthetic oligonucleotide
  Target: LAMA2; (-) strand; PAM type: NRG; PAM sequence: GAG
tgtgtgatccttacagttct

SEQ ID NO: 92367 - DNA, 20 bp, Artificial Sequence
  Description of Artificial Sequence: Synthetic oligonucleotide
  Target: LAMA2; (-) strand; PAM type: NRG; PAM sequence: CAG
ggccacctgtgtgatcctta

SEQ ID NO: 92368 - DNA, 20 bp, Artificial Sequence
  Description of Artificial Sequence: Synthetic oligonucleotide
  Target: LAMA2; (-) strand; PAM type: NRG; PAM sequence: GGG
gaagacatttatcacaatat

SEQ ID NO: 92369 - DNA, 20 bp, Artificial Sequence
  Description of Artificial Sequence: Synthetic oligonucleotide
  Target: LAMA2; (-) strand; PAM type: NRG; PAM sequence: TGG
ggaagacatttatcacaata

SEQ ID NO: 92370 - DNA, 20 bp, Artificial Sequence
  Description of Artificial Sequence: Synthetic oligonucleotide
  Target: LAMA2; (-) strand; PAM type: NRG; PAM sequence: AAG
ggctcgccatagaaaccagg

SEQ ID NO: 92371 - DNA, 20 bp, Artificial Sequence
  Description of Artificial Sequence: Synthetic oligonucleotide
  Target: LAMA2; (-) strand; PAM type: NRG; PAM sequence: AGG
gtaggctcgccatagaaacc

SEQ ID NO: 92372 - DNA, 20 bp, Artificial Sequence
  Description of Artificial Sequence: Synthetic oligonucleotide
  Target: LAMA2; (-) strand; PAM type: NRG; PAM sequence: CAG
agtaggctcgccatagaaac

SEQ ID NO: 92373 - DNA, 20 bp, Artificial Sequence
  Description of Artificial Sequence: Synthetic oligonucleotide
  Target: LAMA2; (-) strand; PAM type: NRG; PAM sequence: TAG
ttcctttagtaggctcgcca

SEQ ID NO: 92374 - DNA, 20 bp, Artificial Sequence
  Description of Artificial Sequence: Synthetic oligonucleotide
  Target: LAMA2; (-) strand; PAM type: NRG; PAM sequence: AGG
tcttcagaggttcctttagt

SEQ ID NO: 92375 - DNA, 20 bp, Artificial Sequence
  Description of Artificial Sequence: Synthetic oligonucleotide
  Target: LAMA2; (-) strand; PAM type: NRG; PAM sequence: TAG
gtcttcagaggttcctttag

SEQ ID NO: 92376 - DNA, 20 bp, Artificial Sequence
  Description of Artificial Sequence: Synthetic oligonucleotide
  Target: LAMA2; (-) strand; PAM type: NRG; PAM sequence: TAG
acagtcttcagaggttcctt

SEQ ID NO: 92377 - DNA, 20 bp, Artificial Sequence
  Description of Artificial Sequence: Synthetic oligonucleotide
  Target: LAMA2; (-) strand; PAM type: NRG; PAM sequence: AGG
acagggttgacagtcttcag

SEQ ID NO: 92378 - DNA, 20 bp, Artificial Sequence
  Description of Artificial Sequence: Synthetic oligonucleotide
  Target: LAMA2; (-) strand; PAM type: NRG; PAM sequence: GAG
cacagggttgacagtcttca

SEQ ID NO: 92379 - DNA, 20 bp, Artificial Sequence
  Description of Artificial Sequence: Synthetic oligonucleotide
  Target: LAMA2; (-) strand; PAM type: NRG; PAM sequence: CAG
ggcacagggttgacagtctt

SEQ ID NO: 92380 - DNA, 20 bp, Artificial Sequence
  Description of Artificial Sequence: Synthetic oligonucleotide
  Target: LAMA2; (-) strand; PAM type: NRG; PAM sequence: CAG
gtggacaggcacagggttga

SEQ ID NO: 92381 - DNA, 20 bp, Artificial Sequence
  Description of Artificial Sequence: Synthetic oligonucleotide
  Target: LAMA2; (-) strand; PAM type: NRG; PAM sequence: GGG
atattgagtggacaggcaca

SEQ ID NO: 92382 - DNA, 20 bp, Artificial Sequence
  Description of Artificial Sequence: Synthetic oligonucleotide
  Target: LAMA2; (-) strand; PAM type: NRG; PAM sequence: AGG
gatattgagtggacaggcac

SEQ ID NO: 92383 - DNA, 20 bp, Artificial Sequence
  Description of Artificial Sequence: Synthetic oligonucleotide
  Target: LAMA2; (-) strand; PAM type: NRG; PAM sequence: CAG
ggatattgagtggacaggca

SEQ ID NO: 92384 - DNA, 20 bp, Artificial Sequence
  Description of Artificial Sequence: Synthetic oligonucleotide
  Target: LAMA2; (-) strand; PAM type: NRG; PAM sequence: AGG
ggatgggatattgagtggac

SEQ ID NO: 92385 - DNA, 20 bp, Artificial Sequence
  Description of Artificial Sequence: Synthetic oligonucleotide
  Target: LAMA2; (-) strand; PAM type: NRG; PAM sequence: CAG
tggatgggatattgagtgga

SEQ ID NO: 92386 - DNA, 20 bp, Artificial Sequence
  Description of Artificial Sequence: Synthetic oligonucleotide
  Target: LAMA2; (-) strand; PAM type: NRG; PAM sequence: TGG
ttattggatgggatattgag

SEQ ID NO: 92387 - DNA, 20 bp, Artificial Sequence
  Description of Artificial Sequence: Synthetic oligonucleotide
  Target: LAMA2; (-) strand; PAM type: NRG; PAM sequence: GAG
tacttattggatgggatatt

SEQ ID NO: 92388 - DNA, 20 bp, Artificial Sequence
  Description of Artificial Sequence: Synthetic oligonucleotide
  Target: LAMA2; (-) strand; PAM type: NRG; PAM sequence: GGG
ttgttacttacttattggat

SEQ ID NO: 92389 - DNA, 20 bp, Artificial Sequence
  Description of Artificial Sequence: Synthetic oligonucleotide
  Target: LAMA2; (-) strand; PAM type: NRG; PAM sequence: TGG
tttgttacttacttattgga

SEQ ID NO: 92390 - DNA, 20 bp, Artificial Sequence
  Description of Artificial Sequence: Synthetic oligonucleotide
  Target: LAMA2; (-) strand; PAM type: NRG; PAM sequence: TGG
taagtttgttacttacttat

SEQ ID NO: 92391 - DNA, 20 bp, Artificial Sequence
  Description of Artificial Sequence: Synthetic oligonucleotide
  Target: LAMA2; (-) strand; PAM type: NRG; PAM sequence: AAG
gctgagcttattcatggggt

SEQ ID NO: 92392 - DNA, 20 bp, Artificial Sequence
  Description of Artificial Sequence: Synthetic oligonucleotide
  Target: LAMA2; (-) strand; PAM type: NRG; PAM sequence: GGG
ggatgctgagcttattcatg

SEQ ID NO: 92393 - DNA, 20 bp, Artificial Sequence
  Description of Artificial Sequence: Synthetic oligonucleotide
  Target: LAMA2; (-) strand; PAM type: NRG; PAM sequence: GGG
tggatgctgagcttattcat

SEQ ID NO: 92394 - DNA, 20 bp, Artificial Sequence
  Description of Artificial Sequence: Synthetic oligonucleotide
  Target: LAMA2; (-) strand; PAM type: NRG; PAM sequence: TGG
atggatgctgagcttattca

SEQ ID NO: 92395 - DNA, 20 bp, Artificial Sequence
  Description of Artificial Sequence: Synthetic oligonucleotide
  Target: LAMA2; (-) strand; PAM type: NRG; PAM sequence: GAG
tacttgcagaaatggatgct

SEQ ID NO: 92396 - DNA, 20 bp, Artificial Sequence
  Description of Artificial Sequence: Synthetic oligonucleotide
  Target: LAMA2; (-) strand; PAM type: NRG; PAM sequence: TGG
gaaaagtgtacttgcagaaa

SEQ ID NO: 92397 - DNA, 20 bp, Artificial Sequence
  Description of Artificial Sequence: Synthetic oligonucleotide
  Target: LAMA2; (-) strand; PAM type: NRG; PAM sequence: CAG
tgctatgaaaagtgtacttg

SEQ ID NO: 92398 - DNA, 20 bp, Artificial Sequence
  Description of Artificial Sequence: Synthetic oligonucleotide
  Target: LAMA2; (-) strand; PAM type: NRG; PAM sequence: AAG
aagtgtatatttgctatgaa

SEQ ID NO: 92399 - DNA, 20 bp, Artificial Sequence
  Description of Artificial Sequence: Synthetic oligonucleotide
  Target: LAMA2; (-) strand; PAM type: NRG; PAM sequence: AAG
tatttacatgggataaaagg

SEQ ID NO: 92400 - DNA, 20 bp, Artificial Sequence
  Description of Artificial Sequence: Synthetic oligonucleotide
  Target: LAMA2; (-) strand; PAM type: NRG; PAM sequence: AGG
atttatttacatgggataaa

SEQ ID NO: 92401 - DNA, 20 bp, Artificial Sequence
  Description of Artificial Sequence: Synthetic oligonucleotide
  Target: LAMA2; (-) strand; PAM type: NRG; PAM sequence: AAG
tatttatttacatgggataa

SEQ ID NO: 92402 - DNA, 20 bp, Artificial Sequence
  Description of Artificial Sequence: Synthetic oligonucleotide
  Target: LAMA2; (-) strand; PAM type: NRG; PAM sequence: GGG
tgtttattatttatttacat

SEQ ID NO: 92403 - DNA, 20 bp, Artificial Sequence
  Description of Artificial Sequence: Synthetic oligonucleotide
  Target: LAMA2; (-) strand; PAM type: NRG; PAM sequence: TGG
gtgtttattatttatttaca

SEQ ID NO: 92404 - DNA, 20 bp, Artificial Sequence
  Description of Artificial Sequence: Synthetic oligonucleotide
  Target: LAMA2; (-) strand; PAM type: NRG; PAM sequence: AGG
ctcatagttttaaatatctt

SEQ ID NO: 92405 - DNA, 20 bp, Artificial Sequence
  Description of Artificial Sequence: Synthetic oligonucleotide
  Target: LAMA2; (-) strand; PAM type: NRG; PAM sequence: TAG
cctcatagttttaaatatct

SEQ ID NO: 92406 - DNA, 20 bp, Artificial Sequence
  Description of Artificial Sequence: Synthetic oligonucleotide
  Target: LAMA2; (-) strand; PAM type: NRG; PAM sequence: TAG
caaattcttagaaatcctca

SEQ ID NO: 92407 - DNA, 20 bp, Artificial Sequence
  Description of Artificial Sequence: Synthetic oligonucleotide
  Target: LAMA2; (-) strand; PAM type: NRG; PAM sequence: TAG
ctaaaaaaattacaaattct

SEQ ID NO: 92408 - DNA, 20 bp, Artificial Sequence
  Description of Artificial Sequence: Synthetic oligonucleotide
  Target: LAMA2; (-) strand; PAM type: NRG; PAM sequence: GAG
aaattaaatcaccaaaacta

SEQ ID NO: 92409 - DNA, 20 bp, Artificial Sequence
  Description of Artificial Sequence: Synthetic oligonucleotide
  Target: LAMA2; (-) strand; PAM type: NRG; PAM sequence: TAG
agaaattaaatcaccaaaac

SEQ ID NO: 92410 - DNA, 20 bp, Artificial Sequence
  Description of Artificial Sequence: Synthetic oligonucleotide
  Target: LAMA2; (-) strand; PAM type: NRG; PAM sequence: TAG
ttctatttgagttctactct

SEQ ID NO: 92411 - DNA, 20 bp, Artificial Sequence
  Description of Artificial Sequence: Synthetic oligonucleotide
  Target: LAMA2; (-) strand; PAM type: NRG; PAM sequence: GAG
ttggtgtagaaattctattt

SEQ ID NO: 92412 - DNA, 20 bp, Artificial Sequence
  Description of Artificial Sequence: Synthetic oligonucleotide
  Target: LAMA2; (-) strand; PAM type: NRG; PAM sequence: TAG
tatgttctttggaattggtg

SEQ ID NO: 92413 - DNA, 20 bp, Artificial Sequence
  Description of Artificial Sequence: Synthetic oligonucleotide
  Target: LAMA2; (-) strand; PAM type: NRG; PAM sequence: TGG
atatttatgttctttggaat

SEQ ID NO: 92414 - DNA, 20 bp, Artificial Sequence
  Description of Artificial Sequence: Synthetic oligonucleotide
  Target: LAMA2; (-) strand; PAM type: NRG; PAM sequence: TGG
tataaaatatttatgttctt

SEQ ID NO: 92415 - DNA, 20 bp, Artificial Sequence
  Description of Artificial Sequence: Synthetic oligonucleotide
  Target: LAMA2; (-) strand; PAM type: NRG; PAM sequence: AGG
atgggtatgtgtctgtgtgt

SEQ ID NO: 92416 - DNA, 20 bp, Artificial Sequence
  Description of Artificial Sequence: Synthetic oligonucleotide
  Target: LAMA2; (-) strand; PAM type: NRG; PAM sequence: TAG
gatgggtatgtgtctgtgtg

SEQ ID NO: 92417 - DNA, 20 bp, Artificial Sequence
  Description of Artificial Sequence: Synthetic oligonucleotide
  Target: LAMA2; (-) strand; PAM type: NRG; PAM sequence: GGG
ttttattaaggtatgaagat

SEQ ID NO: 92418 - DNA, 20 bp, Artificial Sequence
  Description of Artificial Sequence: Synthetic oligonucleotide
  Target: LAMA2; (-) strand; PAM type: NRG; PAM sequence: TGG
cttttattaaggtatgaaga

SEQ ID NO: 92419 - DNA, 20 bp, Artificial Sequence
  Description of Artificial Sequence: Synthetic oligonucleotide
  Target: LAMA2; (-) strand; PAM type: NRG; PAM sequence: AAG
tatccttttattaaggtatg

SEQ ID NO: 92420 - DNA, 20 bp, Artificial Sequence
  Description of Artificial Sequence: Synthetic oligonucleotide
  Target: LAMA2; (-) strand; PAM type: NRG; PAM sequence: AGG
gtatttatatccttttatta

SEQ ID NO: 92421 - DNA, 20 bp, Artificial Sequence
  Description of Artificial Sequence: Synthetic oligonucleotide
  Target: LAMA2; (-) strand; PAM type: NRG; PAM sequence: AAG
tgtatttatatccttttatt

SEQ ID NO: 92422 - DNA, 20 bp, Artificial Sequence
  Description of Artificial Sequence: Synthetic oligonucleotide
  Target: LAMA2; (-) strand; PAM type: NRG; PAM sequence: TAG
tgtatgggtagaacccaaat

SEQ ID NO: 92423 - DNA, 20 bp, Artificial Sequence
  Description of Artificial Sequence: Synthetic oligonucleotide
  Target: LAMA2; (-) strand; PAM type: NRG; PAM sequence: TAG
acaaaaaaatagtgtatggg

SEQ ID NO: 92424 - DNA, 20 bp, Artificial Sequence
  Description of Artificial Sequence: Synthetic oligonucleotide
  Target: LAMA2; (-) strand; PAM type: NRG; PAM sequence: GGG
ttcacaaaaaaatagtgtat

SEQ ID NO: 92425 - DNA, 20 bp, Artificial Sequence
  Description of Artificial Sequence: Synthetic oligonucleotide
  Target: LAMA2; (-) strand; PAM type: NRG; PAM sequence: TGG
attcacaaaaaaatagtgta

SEQ ID NO: 92426 - DNA, 20 bp, Artificial Sequence
  Description of Artificial Sequence: Synthetic oligonucleotide
  Target: LAMA2; (-) strand; PAM type: NRG; PAM sequence: TAG
gcccaagattcacaaaaaaa

SEQ ID NO: 92427 - DNA, 20 bp, Artificial Sequence
  Description of Artificial Sequence: Synthetic oligonucleotide
  Target: LAMA2; (-) strand; PAM type: NRG; PAM sequence: AAG
gagaggtttacgacttgccc

SEQ ID NO: 92428 - DNA, 20 bp, Artificial Sequence
  Description of Artificial Sequence: Synthetic oligonucleotide
  Target: LAMA2; (-) strand; PAM type: NRG; PAM sequence: AGG
ccttcattttactttttgag

SEQ ID NO: 92429 - DNA, 20 bp, Artificial Sequence
  Description of Artificial Sequence: Synthetic oligonucleotide
  Target: LAMA2; (-) strand; PAM type: NRG; PAM sequence: GAG
cccttcattttactttttga

SEQ ID NO: 92430 - DNA, 20 bp, Artificial Sequence
  Description of Artificial Sequence: Synthetic oligonucleotide
  Target: LAMA2; (-) strand; PAM type: NRG; PAM sequence: GAG
gtcccttcattttacttttt

SEQ ID NO: 92431 - DNA, 20 bp, Artificial Sequence
  Description of Artificial Sequence: Synthetic oligonucleotide
  Target: LAMA2; (-) strand; PAM type: NRG; PAM sequence: CAG
tacttaaaagtcagttaaat

SEQ ID NO: 92432 - DNA, 20 bp, Artificial Sequence
  Description of Artificial Sequence: Synthetic oligonucleotide
  Target: LAMA2; (-) strand; PAM type: NRG; PAM sequence: CAG
tagaatgggtacttaaaagt

SEQ ID NO: 92433 - DNA, 20 bp, Artificial Sequence
  Description of Artificial Sequence: Synthetic oligonucleotide
  Target: LAMA2; (-) strand; PAM type: NRG; PAM sequence: AAG
gggatagaatgggtacttaa

SEQ ID NO: 92434 - DNA, 20 bp, Artificial Sequence
  Description of Artificial Sequence: Synthetic oligonucleotide
  Target: LAMA2; (-) strand; PAM type: NRG; PAM sequence: GGG
ctaaaaagaagggatagaat

SEQ ID NO: 92435 - DNA, 20 bp, Artificial Sequence
  Description of Artificial Sequence: Synthetic oligonucleotide
  Target: LAMA2; (-) strand; PAM type: NRG; PAM sequence: TGG
tctaaaaagaagggatagaa

SEQ ID NO: 92436 - DNA, 20 bp, Artificial Sequence
  Description of Artificial Sequence: Synthetic oligonucleotide
  Target: LAMA2; (-) strand; PAM type: NRG; PAM sequence: TAG
atttttctaaaaagaaggga

SEQ ID NO: 92437 - DNA, 20 bp, Artificial Sequence
  Description of Artificial Sequence: Synthetic oligonucleotide
  Target: LAMA2; (-) strand; PAM type: NRG; PAM sequence: GGG
acgaatttttctaaaaagaa

SEQ ID NO: 92438 - DNA, 20 bp, Artificial Sequence
  Description of Artificial Sequence: Synthetic oligonucleotide
  Target: LAMA2; (-) strand; PAM type: NRG; PAM sequence: AGG
aacgaatttttctaaaaaga

SEQ ID NO: 92439 - DNA, 20 bp, Artificial Sequence
  Description of Artificial Sequence: Synthetic oligonucleotide
  Target: LAMA2; (-) strand; PAM type: NRG; PAM sequence: AAG
caacgaatttttctaaaaag

SEQ ID NO: 92440 - DNA, 20 bp, Artificial Sequence
  Description of Artificial Sequence: Synthetic oligonucleotide
  Target: LAMA2; (-) strand; PAM type: NRG; PAM sequence: AAG
gaacaacgaatttttctaaa

SEQ ID NO: 92441 - DNA, 20 bp, Artificial Sequence
  Description of Artificial Sequence: Synthetic oligonucleotide
  Target: LAMA2; (-) strand; PAM type: NRG; PAM sequence: AGG
ctctaagaggtggttgttct

SEQ ID NO: 92442 - DNA, 20 bp, Artificial Sequence
  Description of Artificial Sequence: Synthetic oligonucleotide
  Target: LAMA2; (-) strand; PAM type: NRG; PAM sequence: TAG
gctctaagaggtggttgttc

SEQ ID NO: 92443 - DNA, 20 bp, Artificial Sequence
  Description of Artificial Sequence: Synthetic oligonucleotide
  Target: LAMA2; (-) strand; PAM type: NRG; PAM sequence: TGG
tttaaatctgctctaagagg

SEQ ID NO: 92444 - DNA, 20 bp, Artificial Sequence
  Description of Artificial Sequence: Synthetic oligonucleotide
  Target: LAMA2; (-) strand; PAM type: NRG; PAM sequence: AGG
ttttttaaatctgctctaag

SEQ ID NO: 92445 - DNA, 20 bp, Artificial Sequence
  Description of Artificial Sequence: Synthetic oligonucleotide
  Target: LAMA2; (-) strand; PAM type: NRG; PAM sequence: GAG
tttttttaaatctgctctaa

SEQ ID NO: 92446 - DNA, 20 bp, Artificial Sequence
  Description of Artificial Sequence: Synthetic oligonucleotide
  Target: LAMA2; (-) strand; PAM type: NRG; PAM sequence: AAG
tgtttttttaaatctgctct

SEQ ID NO: 92447 - DNA, 20 bp, Artificial Sequence
  Description of Artificial Sequence: Synthetic oligonucleotide
  Target: LAMA2; (-) strand; PAM type: NRG; PAM sequence: AAG
ggtaaggaaatgaggaagtc

SEQ ID NO: 92448 - DNA, 20 bp, Artificial Sequence
  Description of Artificial Sequence: Synthetic oligonucleotide
  Target: LAMA2; (-) strand; PAM type: NRG; PAM sequence: AAG
taaaaggtaaggaaatgagg

SEQ ID NO: 92449 - DNA, 20 bp, Artificial Sequence
  Description of Artificial Sequence: Synthetic oligonucleotide
  Target: LAMA2; (-) strand; PAM type: NRG; PAM sequence: AGG
ctctaaaaggtaaggaaatg

SEQ ID NO: 92450 - DNA, 20 bp, Artificial Sequence
  Description of Artificial Sequence: Synthetic oligonucleotide
  Target: LAMA2; (-) strand; PAM type: NRG; PAM sequence: GAG
cctctaaaaggtaaggaaat

SEQ ID NO: 92451 - DNA, 20 bp, Artificial Sequence
  Description of Artificial Sequence: Synthetic oligonucleotide
  Target: LAMA2; (-) strand; PAM type: NRG; PAM sequence: AGG
tagcattcctctaaaaggta

SEQ ID NO: 92452 - DNA, 20 bp, Artificial Sequence
  Description of Artificial Sequence: Synthetic oligonucleotide
  Target: LAMA2; (-) strand; PAM type: NRG; PAM sequence: AAG
atagcattcctctaaaaggt

SEQ ID NO: 92453 - DNA, 20 bp, Artificial Sequence
  Description of Artificial Sequence: Synthetic oligonucleotide
  Target: LAMA2; (-) strand; PAM type: NRG; PAM sequence: AGG
ggatatagcattcctctaaa

SEQ ID NO: 92454 - DNA, 20 bp, Artificial Sequence
  Description of Artificial Sequence: Synthetic oligonucleotide
  Target: LAMA2; (-) strand; PAM type: NRG; PAM sequence: AAG
tggatatagcattcctctaa

SEQ ID NO: 92455 - DNA, 20 bp, Artificial Sequence
  Description of Artificial Sequence: Synthetic oligonucleotide
  Target: LAMA2; (-) strand; PAM type: NRG; PAM sequence: TAG
tgaattcaagcagctggata

SEQ ID NO: 92456 - DNA, 20 bp, Artificial Sequence
  Description of Artificial Sequence: Synthetic oligonucleotide
  Target: LAMA2; (-) strand; PAM type: NRG; PAM sequence: TGG
ggaatgtgaattcaagcagc

SEQ ID NO: 92457 - DNA, 20 bp, Artificial Sequence
  Description of Artificial Sequence: Synthetic oligonucleotide
  Target: LAMA2; (-) strand; PAM type: NRG; PAM sequence: CAG
tgagggaatgtgaattcaag

SEQ ID NO: 92458 - DNA, 20 bp, Artificial Sequence
  Description of Artificial Sequence: Synthetic oligonucleotide
  Target: LAMA2; (-) strand; PAM type: NRG; PAM sequence: AAG
ccctgagggaatgtgaattc

SEQ ID NO: 92459 - DNA, 20 bp, Artificial Sequence
  Description of Artificial Sequence: Synthetic oligonucleotide
  Target: LAMA2; (-) strand; PAM type: NRG; PAM sequence: GGG
actgagagaggctgccctga

SEQ ID NO: 92460 - DNA, 20 bp, Artificial Sequence
  Description of Artificial Sequence: Synthetic oligonucleotide
  Target: LAMA2; (-) strand; PAM type: NRG; PAM sequence: AGG
tactgagagaggctgccctg

SEQ ID NO: 92461 - DNA, 20 bp, Artificial Sequence
  Description of Artificial Sequence: Synthetic oligonucleotide
  Target: LAMA2; (-) strand; PAM type: NRG; PAM sequence: GAG
ttactgagagaggctgccct

SEQ ID NO: 92462 - DNA, 20 bp, Artificial Sequence
  Description of Artificial Sequence: Synthetic oligonucleotide
  Target: LAMA2; (-) strand; PAM type: NRG; PAM sequence: AGG
gcttagctgtttactgagag

SEQ ID NO: 92463 - DNA, 20 bp, Artificial Sequence
  Description of Artificial Sequence: Synthetic oligonucleotide
  Target: LAMA2; (-) strand; PAM type: NRG; PAM sequence: GAG
tgcttagctgtttactgaga

SEQ ID NO: 92464 - DNA, 20 bp, Artificial Sequence
  Description of Artificial Sequence: Synthetic oligonucleotide
  Target: LAMA2; (-) strand; PAM type: NRG; PAM sequence: GAG
tgtgcttagctgtttactga

SEQ ID NO: 92465 - DNA, 20 bp, Artificial Sequence
  Description of Artificial Sequence: Synthetic oligonucleotide
  Target: LAMA2; (-) strand; PAM type: NRG; PAM sequence: GAG
ggtgtgcttagctgtttact

SEQ ID NO: 92466 - DNA, 20 bp, Artificial Sequence
  Description of Artificial Sequence: Synthetic oligonucleotide
  Target: LAMA2; (-) strand; PAM type: NRG; PAM sequence: TAG
atttttggttggggtgtgct

SEQ ID NO: 92467 - DNA, 20 bp, Artificial Sequence
  Description of Artificial Sequence: Synthetic oligonucleotide
  Target: LAMA2; (-) strand; PAM type: NRG; PAM sequence: GGG
caaaacaacatttttggttg

SEQ ID NO: 92468 - DNA, 20 bp, Artificial Sequence
  Description of Artificial Sequence: Synthetic oligonucleotide
  Target: LAMA2; (-) strand; PAM type: NRG; PAM sequence: GGG
acaaaacaacatttttggtt

SEQ ID NO: 92469 - DNA, 20 bp, Artificial Sequence
  Description of Artificial Sequence: Synthetic oligonucleotide
  Target: LAMA2; (-) strand; PAM type: NRG; PAM sequence: TGG
aacaaaacaacatttttggt

SEQ ID NO: 92470 - DNA, 20 bp, Artificial Sequence
  Description of Artificial Sequence: Synthetic oligonucleotide
  Target: LAMA2; (-) strand; PAM type: NRG; PAM sequence: TGG
taaaaacaaaacaacatttt

SEQ ID NO: 92471 - DNA, 20 bp, Artificial Sequence
  Description of Artificial Sequence: Synthetic oligonucleotide
  Target: LAMA2; (-) strand; PAM type: NRG; PAM sequence: AAG
aaaaaaaaaaaaaaaaaaaa

SEQ ID NO: 92472 - DNA, 20 bp, Artificial Sequence
  Description of Artificial Sequence: Synthetic oligonucleotide
  Target: LAMA2; (-) strand; PAM type: NRG; PAM sequence: GAG
tctagcctgggcaacagagc

SEQ ID NO: 92473 - DNA, 20 bp, Artificial Sequence
  Description of Artificial Sequence: Synthetic oligonucleotide
  Target: LAMA2; (-) strand; PAM type: NRG; PAM sequence: GAG
gcactctagcctgggcaaca

SEQ ID NO: 92474 - DNA, 20 bp, Artificial Sequence
  Description of Artificial Sequence: Synthetic oligonucleotide
  Target: LAMA2; (-) strand; PAM type: NRG; PAM sequence: CAG
ctgcactctagcctgggcaa

SEQ ID NO: 92475 - DNA, 20 bp, Artificial Sequence
  Description of Artificial Sequence: Synthetic oligonucleotide
  Target: LAMA2; (-) strand; PAM type: NRG; PAM sequence: GGG
gcaccactgcactctagcct

SEQ ID NO: 92476 - DNA, 20 bp, Artificial Sequence
  Description of Artificial Sequence: Synthetic oligonucleotide
  Target: LAMA2; (-) strand; PAM type: NRG; PAM sequence: TGG
tgcaccactgcactctagcc

SEQ ID NO: 92477 - DNA, 20 bp, Artificial Sequence
  Description of Artificial Sequence: Synthetic oligonucleotide
  Target: LAMA2; (-) strand; PAM type: NRG; PAM sequence: TAG
aagattgcaccactgcactc

SEQ ID NO: 92478 - DNA, 20 bp, Artificial Sequence
  Description of Artificial Sequence: Synthetic oligonucleotide
  Target: LAMA2; (-) strand; PAM type: NRG; PAM sequence: AAG
ggcagagcttgcagtgagcc

SEQ ID NO: 92479 - DNA, 20 bp, Artificial Sequence
  Description of Artificial Sequence: Synthetic oligonucleotide
  Target: LAMA2; (-) strand; PAM type: NRG; PAM sequence: GAG
cgggaggcagagcttgcagt

SEQ ID NO: 92480 - DNA, 20 bp, Artificial Sequence
  Description of Artificial Sequence: Synthetic oligonucleotide
  Target: LAMA2; (-) strand; PAM type: NRG; PAM sequence: CAG
aacccgggaggcagagcttg

SEQ ID NO: 92481 - DNA, 20 bp, Artificial Sequence
  Description of Artificial Sequence: Synthetic oligonucleotide
  Target: LAMA2; (-) strand; PAM type: NRG; PAM sequence: GAG
tggcttgaacccgggaggca

SEQ ID NO: 92482 - DNA, 20 bp, Artificial Sequence
  Description of Artificial Sequence: Synthetic oligonucleotide
  Target: LAMA2; (-) strand; PAM type: NRG; PAM sequence: CAG
aatggcttgaacccgggagg

SEQ ID NO: 92483 - DNA, 20 bp, Artificial Sequence
  Description of Artificial Sequence: Synthetic oligonucleotide
  Target: LAMA2; (-) strand; PAM type: NRG; PAM sequence: AGG
gagaatggcttgaacccggg

SEQ ID NO: 92484 - DNA, 20 bp, Artificial Sequence
  Description of Artificial Sequence: Synthetic oligonucleotide
  Target: LAMA2; (-) strand; PAM type: NRG; PAM sequence: GAG
ggagaatggcttgaacccgg

SEQ ID NO: 92485 - DNA, 20 bp, Artificial Sequence
  Description of Artificial Sequence: Synthetic oligonucleotide
  Target: LAMA2; (-) strand; PAM type: NRG; PAM sequence: GGG
caggagaatggcttgaaccc

SEQ ID NO: 92486 - DNA, 20 bp, Artificial Sequence
  Description of Artificial Sequence: Synthetic oligonucleotide
  Target: LAMA2; (-) strand; PAM type: NRG; PAM sequence: CGG
gcaggagaatggcttgaacc

SEQ ID NO: 92487 - DNA, 20 bp, Artificial Sequence
  Description of Artificial Sequence: Synthetic oligonucleotide
  Target: LAMA2; (-) strand; PAM type: NRG; PAM sequence: TGG
gtccagctgaggcaggagaa

SEQ ID NO: 92488 - DNA, 20 bp, Artificial Sequence
  Description of Artificial Sequence: Synthetic oligonucleotide
  Target: LAMA2; (-) strand; PAM type: NRG; PAM sequence: GAG
ctgtagtccagctgaggcag

SEQ ID NO: 92489 - DNA, 20 bp, Artificial Sequence
  Description of Artificial Sequence: Synthetic oligonucleotide
  Target: LAMA2; (-) strand; PAM type: NRG; PAM sequence: AGG
gcctgtagtccagctgaggc

SEQ ID NO: 92490 - DNA, 20 bp, Artificial Sequence
  Description of Artificial Sequence: Synthetic oligonucleotide
  Target: LAMA2; (-) strand; PAM type: NRG; PAM sequence: CAG
agcctgtagtccagctgagg

SEQ ID NO: 92491 - DNA, 20 bp, Artificial Sequence
  Description of Artificial Sequence: Synthetic oligonucleotide
  Target: LAMA2; (-) strand; PAM type: NRG; PAM sequence: AGG
cacagcctgtagtccagctg

SEQ ID NO: 92492 - DNA, 20 bp, Artificial Sequence
  Description of Artificial Sequence: Synthetic oligonucleotide
  Target: LAMA2; (-) strand; PAM type: NRG; PAM sequence: GAG
acacagcctgtagtccagct

SEQ ID NO: 92493 - DNA, 20 bp, Artificial Sequence
  Description of Artificial Sequence: Synthetic oligonucleotide
  Target: LAMA2; (-) strand; PAM type: NRG; PAM sequence: CAG
attcaacacagcctgtagtc

SEQ ID NO: 92494 - DNA, 20 bp, Artificial Sequence
  Description of Artificial Sequence: Synthetic oligonucleotide
  Target: LAMA2; (-) strand; PAM type: NRG; PAM sequence: TAG
tttttattcaacacagcctg

SEQ ID NO: 92495 - DNA, 20 bp, Artificial Sequence
  Description of Artificial Sequence: Synthetic oligonucleotide
  Target: LAMA2; (-) strand; PAM type: NRG; PAM sequence: CAG
ttgttgatttttattcaaca

SEQ ID NO: 92496 - DNA, 20 bp, Artificial Sequence
  Description of Artificial Sequence: Synthetic oligonucleotide
  Target: LAMA2; (-) strand; PAM type: NRG; PAM sequence: GAG
agttatttataatcactttt

SEQ ID NO: 92497 - DNA, 20 bp, Artificial Sequence
  Description of Artificial Sequence: Synthetic oligonucleotide
  Target: LAMA2; (-) strand; PAM type: NRG; PAM sequence: TAG
tttccttttatttaaaagta

SEQ ID NO: 92498 - DNA, 20 bp, Artificial Sequence
  Description of Artificial Sequence: Synthetic oligonucleotide
  Target: LAMA2; (-) strand; PAM type: NRG; PAM sequence: AAG
aataatttccttttatttaa

SEQ ID NO: 92499 - DNA, 20 bp, Artificial Sequence
  Description of Artificial Sequence: Synthetic oligonucleotide
  Target: LAMA2; (-) strand; PAM type: NRG; PAM sequence: CAG
tcacctttaagagagttctt

SEQ ID NO: 92500 - DNA, 20 bp, Artificial Sequence
  Description of Artificial Sequence: Synthetic oligonucleotide
  Target: LAMA2; (-) strand; PAM type: NRG; PAM sequence: GAG
cactaagctcacctttaaga

SEQ ID NO: 92501 - DNA, 20 bp, Artificial Sequence
  Description of Artificial Sequence: Synthetic oligonucleotide
  Target: LAMA2; (-) strand; PAM type: NRG; PAM sequence: GAG
agcactaagctcacctttaa

SEQ ID NO: 92502 - DNA, 20 bp, Artificial Sequence
  Description of Artificial Sequence: Synthetic oligonucleotide
  Target: LAMA2; (-) strand; PAM type: NRG; PAM sequence: AAG
taagcactaagctcaccttt

SEQ ID NO: 92503 - DNA, 20 bp, Artificial Sequence
  Description of Artificial Sequence: Synthetic oligonucleotide
  Target: LAMA2; (-) strand; PAM type: NRG; PAM sequence: AAG
tatgaaccttattaagcact

SEQ ID NO: 92504 - DNA, 20 bp, Artificial Sequence
  Description of Artificial Sequence: Synthetic oligonucleotide
  Target: LAMA2; (-) strand; PAM type: NRG; PAM sequence: AAG
aatacgatatgaaccttatt

SEQ ID NO: 92505 - DNA, 20 bp, Artificial Sequence
  Description of Artificial Sequence: Synthetic oligonucleotide
  Target: LAMA2; (-) strand; PAM type: NRG; PAM sequence: AAG
agtgcctagagatagctgga

SEQ ID NO: 92506 - DNA, 20 bp, Artificial Sequence
  Description of Artificial Sequence: Synthetic oligonucleotide
  Target: LAMA2; (-) strand; PAM type: NRG; PAM sequence: TGG
tcacagtgcctagagatagc

SEQ ID NO: 92507 - DNA, 20 bp, Artificial Sequence
  Description of Artificial Sequence: Synthetic oligonucleotide
  Target: LAMA2; (-) strand; PAM type: NRG; PAM sequence: TAG
gttgtcacagtgcctagaga

SEQ ID NO: 92508 - DNA, 20 bp, Artificial Sequence
  Description of Artificial Sequence: Synthetic oligonucleotide
  Target: LAMA2; (-) strand; PAM type: NRG; PAM sequence: GAG
cagtgttgtcacagtgccta

SEQ ID NO: 92509 - DNA, 20 bp, Artificial Sequence
  Description of Artificial Sequence: Synthetic oligonucleotide
  Target: LAMA2; (-) strand; PAM type: NRG; PAM sequence: TAG
gtcagtgttgtcacagtgcc

SEQ ID NO: 92510 - DNA, 20 bp, Artificial Sequence
  Description of Artificial Sequence: Synthetic oligonucleotide
  Target: LAMA2; (-) strand; PAM type: NRG; PAM sequence: CAG
ttgctctgtcagtgttgtca

SEQ ID NO: 92511 - DNA, 20 bp, Artificial Sequence
  Description of Artificial Sequence: Synthetic oligonucleotide
  Target: LAMA2; (-) strand; PAM type: NRG; PAM sequence: CAG
attgaaaatttttgctctgt

SEQ ID NO: 92512 - DNA, 20 bp, Artificial Sequence
  Description of Artificial Sequence: Synthetic oligonucleotide
  Target: LAMA2; (-) strand; PAM type: NRG; PAM sequence: AAG
tagctgacagatttccctta

SEQ ID NO: 92513 - DNA, 20 bp, Artificial Sequence
  Description of Artificial Sequence: Synthetic oligonucleotide
  Target: LAMA2; (-) strand; PAM type: NRG; PAM sequence: CAG
cattaaaagactatagctga

SEQ ID NO: 92514 - DNA, 20 bp, Artificial Sequence
  Description of Artificial Sequence: Synthetic oligonucleotide
  Target: LAMA2; (-) strand; PAM type: NRG; PAM sequence: TAG
atctacacattaaaagacta

SEQ ID NO: 92515 - DNA, 20 bp, Artificial Sequence
  Description of Artificial Sequence: Synthetic oligonucleotide
  Target: LAMA2; (-) strand; PAM type: NRG; PAM sequence: AAG
tgatcacatctacacattaa

SEQ ID NO: 92516 - DNA, 20 bp, Artificial Sequence
  Description of Artificial Sequence: Synthetic oligonucleotide
  Target: LAMA2; (-) strand; PAM type: NRG; PAM sequence: AAG
gcattctgggtaagagtttg

SEQ ID NO: 92517 - DNA, 20 bp, Artificial Sequence
  Description of Artificial Sequence: Synthetic oligonucleotide
  Target: LAMA2; (-) strand; PAM type: NRG; PAM sequence: GAG
attaggcgcattctgggtaa

SEQ ID NO: 92518 - DNA, 20 bp, Artificial Sequence
  Description of Artificial Sequence: Synthetic oligonucleotide
  Target: LAMA2; (-) strand; PAM type: NRG; PAM sequence: AAG
taattaggcgcattctgggt

SEQ ID NO: 92519 - DNA, 20 bp, Artificial Sequence
  Description of Artificial Sequence: Synthetic oligonucleotide
  Target: LAMA2; (-) strand; PAM type: NRG; PAM sequence: GGG
attttaattaggcgcattct

SEQ ID NO: 92520 - DNA, 20 bp, Artificial Sequence
  Description of Artificial Sequence: Synthetic oligonucleotide
  Target: LAMA2; (-) strand; PAM type: NRG; PAM sequence: TGG
cattttaattaggcgcattc

SEQ ID NO: 92521 - DNA, 20 bp, Artificial Sequence
  Description of Artificial Sequence: Synthetic oligonucleotide
  Target: LAMA2; (-) strand; PAM type: NRG; PAM sequence: AGG
aacaaaagaccattttaatt

SEQ ID NO: 92522 - DNA, 20 bp, Artificial Sequence
  Description of Artificial Sequence: Synthetic oligonucleotide
  Target: LAMA2; (-) strand; PAM type: NRG; PAM sequence: TAG
taacaaaagaccattttaat

SEQ ID NO: 92523 - DNA, 20 bp, Artificial Sequence
  Description of Artificial Sequence: Synthetic oligonucleotide
  Target: LAMA2; (-) strand; PAM type: NRG; PAM sequence: AAG
gtattcattgaatctaacaa

SEQ ID NO: 92524 - DNA, 20 bp, Artificial Sequence
  Description of Artificial Sequence: Synthetic oligonucleotide
  Target: LAMA2; (-) strand; PAM type: NRG; PAM sequence: TAG
atctcaaagtctttagctta

SEQ ID NO: 92525 - DNA, 20 bp, Artificial Sequence
  Description of Artificial Sequence: Synthetic oligonucleotide
  Target: LAMA2; (-) strand; PAM type: NRG; PAM sequence: TAG
tagaattatctcaaagtctt

SEQ ID NO: 92526 - DNA, 20 bp, Artificial Sequence
  Description of Artificial Sequence: Synthetic oligonucleotide
  Target: LAMA2; (-) strand; PAM type: NRG; PAM sequence: AAG
ttaatgttagaattatctca

SEQ ID NO: 92527 - DNA, 20 bp, Artificial Sequence
  Description of Artificial Sequence: Synthetic oligonucleotide
  Target: LAMA2; (-) strand; PAM type: NRG; PAM sequence: TAG
agaacatttaaacttaatgt

SEQ ID NO: 92528 - DNA, 20 bp, Artificial Sequence
  Description of Artificial Sequence: Synthetic oligonucleotide
  Target: LAMA2; (-) strand; PAM type: NRG; PAM sequence: GAG
gtaggaagcacagtttcaag

SEQ ID NO: 92529 - DNA, 20 bp, Artificial Sequence
  Description of Artificial Sequence: Synthetic oligonucleotide
  Target: LAMA2; (-) strand; PAM type: NRG; PAM sequence: AGG
cagtaggaagcacagtttca

SEQ ID NO: 92530 - DNA, 20 bp, Artificial Sequence
  Description of Artificial Sequence: Synthetic oligonucleotide
  Target: LAMA2; (-) strand; PAM type: NRG; PAM sequence: AAG
acagtaggaagcacagtttc

SEQ ID NO: 92531 - DNA, 20 bp, Artificial Sequence
  Description of Artificial Sequence: Synthetic oligonucleotide
  Target: LAMA2; (-) strand; PAM type: NRG; PAM sequence: CAG
tggattaacagtaggaagca

SEQ ID NO: 92532 - DNA, 20 bp, Artificial Sequence
  Description of Artificial Sequence: Synthetic oligonucleotide
  Target: LAMA2; (-) strand; PAM type: NRG; PAM sequence: AAG
tcatgtggattaacagtagg

SEQ ID NO: 92533 - DNA, 20 bp, Artificial Sequence
  Description of Artificial Sequence: Synthetic oligonucleotide
  Target: LAMA2; (-) strand; PAM type: NRG; PAM sequence: AGG
atttcatgtggattaacagt

SEQ ID NO: 92534 - DNA, 20 bp, Artificial Sequence
  Description of Artificial Sequence: Synthetic oligonucleotide
  Target: LAMA2; (-) strand; PAM type: NRG; PAM sequence: TAG
catttcatgtggattaacag

SEQ ID NO: 92535 - DNA, 20 bp, Artificial Sequence
  Description of Artificial Sequence: Synthetic oligonucleotide
  Target: LAMA2; (-) strand; PAM type: NRG; PAM sequence: CAG
aagcatttcatgtggattaa

SEQ ID NO: 92536 - DNA, 20 bp, Artificial Sequence
  Description of Artificial Sequence: Synthetic oligonucleotide
  Target: LAMA2; (-) strand; PAM type: NRG; PAM sequence: TGG
gggaggataagcatttcatg

SEQ ID NO: 92537 - DNA, 20 bp, Artificial Sequence
  Description of Artificial Sequence: Synthetic oligonucleotide
  Target: LAMA2; (-) strand; PAM type: NRG; PAM sequence: AAG
aagaaggtcattgggaggat

SEQ ID NO: 92538 - DNA, 20 bp, Artificial Sequence
  Description of Artificial Sequence: Synthetic oligonucleotide
  Target: LAMA2; (-) strand; PAM type: NRG; PAM sequence: AGG
gagtaaagaaggtcattggg

SEQ ID NO: 92539 - DNA, 20 bp, Artificial Sequence
  Description of Artificial Sequence: Synthetic oligonucleotide
  Target: LAMA2; (-) strand; PAM type: NRG; PAM sequence: GAG
tgagtaaagaaggtcattgg

SEQ ID NO: 92540 - DNA, 20 bp, Artificial Sequence
  Description of Artificial Sequence: Synthetic oligonucleotide
  Target: LAMA2; (-) strand; PAM type: NRG; PAM sequence: GGG
tctgagtaaagaaggtcatt

SEQ ID NO: 92541 - DNA, 20 bp, Artificial Sequence
  Description of Artificial Sequence: Synthetic oligonucleotide
  Target: LAMA2; (-) strand; PAM type: NRG; PAM sequence: TGG
ttctgagtaaagaaggtcat

SEQ ID NO: 92542 - DNA, 20 bp, Artificial Sequence
  Description of Artificial Sequence: Synthetic oligonucleotide
  Target: LAMA2; (-) strand; PAM type: NRG; PAM sequence: AGG
taaaaaattctgagtaaaga

SEQ ID NO: 92543 - DNA, 20 bp, Artificial Sequence
  Description of Artificial Sequence: Synthetic oligonucleotide
  Target: LAMA2; (-) strand; PAM type: NRG; PAM sequence: AAG
gtaaaaaattctgagtaaag

SEQ ID NO: 92544 - DNA, 20 bp, Artificial Sequence
  Description of Artificial Sequence: Synthetic oligonucleotide
  Target: LAMA2; (-) strand; PAM type: NRG; PAM sequence: AAG
aaggtaaaaaattctgagta

SEQ ID NO: 92545 - DNA, 20 bp, Artificial Sequence
  Description of Artificial Sequence: Synthetic oligonucleotide
  Target: LAMA2; (-) strand; PAM type: NRG; PAM sequence: GAG
tgagtaaggtaaaaaattct

SEQ ID NO: 92546 - DNA, 20 bp, Artificial Sequence
  Description of Artificial Sequence: Synthetic oligonucleotide
  Target: LAMA2; (-) strand; PAM type: NRG; PAM sequence: AGG
tcttttccaaacaatgagta

SEQ ID NO: 92547 - DNA, 20 bp, Artificial Sequence
  Description of Artificial Sequence: Synthetic oligonucleotide
  Target: LAMA2; (-) strand; PAM type: NRG; PAM sequence: AAG
ttcttttccaaacaatgagt

SEQ ID NO: 92548 - DNA, 20 bp, Artificial Sequence
  Description of Artificial Sequence: Synthetic oligonucleotide
  Target: LAMA2; (-) strand; PAM type: NRG; PAM sequence: GAG
tctcttcttttccaaacaat

SEQ ID NO: 92549 - DNA, 20 bp, Artificial Sequence
  Description of Artificial Sequence: Synthetic oligonucleotide
  Target: LAMA2; (-) strand; PAM type: NRG; PAM sequence: TAG
agtctgcttttattaaatag

SEQ ID NO: 92550 - DNA, 20 bp, Artificial Sequence
  Description of Artificial Sequence: Synthetic oligonucleotide
  Target: LAMA2; (-) strand; PAM type: NRG; PAM sequence: TAG
agtagtctgcttttattaaa

SEQ ID NO: 92551 - DNA, 20 bp, Artificial Sequence
  Description of Artificial Sequence: Synthetic oligonucleotide
  Target: LAMA2; (-) strand; PAM type: NRG; PAM sequence: TAG
gtgtttggcctagaatatag

SEQ ID NO: 92552 - DNA, 20 bp, Artificial Sequence
  Description of Artificial Sequence: Synthetic oligonucleotide
  Target: LAMA2; (-) strand; PAM type: NRG; PAM sequence: TAG
acagtgtttggcctagaata

SEQ ID NO: 92553 - DNA, 20 bp, Artificial Sequence
  Description of Artificial Sequence: Synthetic oligonucleotide
  Target: LAMA2; (-) strand; PAM type: NRG; PAM sequence: TAG
accaaatacagtgtttggcc

SEQ ID NO: 92554 - DNA, 20 bp, Artificial Sequence
  Description of Artificial Sequence: Synthetic oligonucleotide
  Target: LAMA2; (-) strand; PAM type: NRG; PAM sequence: TGG
ataataccaaatacagtgtt

SEQ ID NO: 92555 - DNA, 20 bp, Artificial Sequence
  Description of Artificial Sequence: Synthetic oligonucleotide
  Target: LAMA2; (-) strand; PAM type: NRG; PAM sequence: CAG
aggtgaaataataccaaata

SEQ ID NO: 92556 - DNA, 20 bp, Artificial Sequence
  Description of Artificial Sequence: Synthetic oligonucleotide
  Target: LAMA2; (-) strand; PAM type: NRG; PAM sequence: AGG
ccttactgagttatagttga

SEQ ID NO: 92557 - DNA, 20 bp, Artificial Sequence
  Description of Artificial Sequence: Synthetic oligonucleotide
  Target: LAMA2; (-) strand; PAM type: NRG; PAM sequence: AAG
accttactgagttatagttg

SEQ ID NO: 92558 - DNA, 20 bp, Artificial Sequence
  Description of Artificial Sequence: Synthetic oligonucleotide
  Target: LAMA2; (-) strand; PAM type: NRG; PAM sequence: TAG
atatctaccttactgagtta

SEQ ID NO: 92559 - DNA, 20 bp, Artificial Sequence
  Description of Artificial Sequence: Synthetic oligonucleotide
  Target: LAMA2; (-) strand; PAM type: NRG; PAM sequence: GAG
ataataatatctaccttact

SEQ ID NO: 92560 - DNA, 20 bp, Artificial Sequence
  Description of Artificial Sequence: Synthetic oligonucleotide
  Target: LAMA2; (-) strand; PAM type: NRG; PAM sequence: AGG
atttcttaatctatacaatg

SEQ ID NO: 92561 - DNA, 20 bp, Artificial Sequence
  Description of Artificial Sequence: Synthetic oligonucleotide
  Target: LAMA2; (-) strand; PAM type: NRG; PAM sequence: GAG
catttcttaatctatacaat

SEQ ID NO: 92562 - DNA, 20 bp, Artificial Sequence
  Description of Artificial Sequence: Synthetic oligonucleotide
  Target: LAMA2; (-) strand; PAM type: NRG; PAM sequence: TGG
taatgccatttttctactaa

SEQ ID NO: 92563 - DNA, 20 bp, Artificial Sequence
  Description of Artificial Sequence: Synthetic oligonucleotide
  Target: LAMA2; (-) strand; PAM type: NRG; PAM sequence: TGG
aaagagtctggctccagaat

SEQ ID NO: 92564 - DNA, 20 bp, Artificial Sequence
  Description of Artificial Sequence: Synthetic oligonucleotide
  Target: LAMA2; (-) strand; PAM type: NRG; PAM sequence: CAG
taaaccaaagagtctggctc

SEQ ID NO: 92565 - DNA, 20 bp, Artificial Sequence
  Description of Artificial Sequence: Synthetic oligonucleotide
  Target: LAMA2; (-) strand; PAM type: NRG; PAM sequence: TGG
agcatttaaaccaaagagtc

SEQ ID NO: 92566 - DNA, 20 bp, Artificial Sequence
  Description of Artificial Sequence: Synthetic oligonucleotide
  Target: LAMA2; (-) strand; PAM type: NRG; PAM sequence: GAG
aacccagcatttaaaccaaa

SEQ ID NO: 92567 - DNA, 20 bp, Artificial Sequence
  Description of Artificial Sequence: Synthetic oligonucleotide
  Target: LAMA2; (-) strand; PAM type: NRG; PAM sequence: AAG
ggaacccagcatttaaacca

SEQ ID NO: 92568 - DNA, 20 bp, Artificial Sequence
  Description of Artificial Sequence: Synthetic oligonucleotide
  Target: LAMA2; (-) strand; PAM type: NRG; PAM sequence: CAG
cagctggaaagtatggaacc

SEQ ID NO: 92569 - DNA, 20 bp, Artificial Sequence
  Description of Artificial Sequence: Synthetic oligonucleotide
  Target: LAMA2; (-) strand; PAM type: NRG; PAM sequence: TGG
agtggcacagctggaaagta

SEQ ID NO: 92570 - DNA, 20 bp, Artificial Sequence
  Description of Artificial Sequence: Synthetic oligonucleotide
  Target: LAMA2; (-) strand; PAM type: NRG; PAM sequence: AAG
cctaaagtggcacagctgga

SEQ ID NO: 92571 - DNA, 20 bp, Artificial Sequence
  Description of Artificial Sequence: Synthetic oligonucleotide
  Target: LAMA2; (-) strand; PAM type: NRG; PAM sequence: TGG
cttgcctaaagtggcacagc

SEQ ID NO: 92572 - DNA, 20 bp, Artificial Sequence
  Description of Artificial Sequence: Synthetic oligonucleotide
  Target: LAMA2; (-) strand; PAM type: NRG; PAM sequence: CAG
gtgacttgcctaaagtggca

SEQ ID NO: 92573 - DNA, 20 bp, Artificial Sequence
  Description of Artificial Sequence: Synthetic oligonucleotide
  Target: LAMA2; (-) strand; PAM type: NRG; PAM sequence: TGG
tttcagtgacttgcctaaag

SEQ ID NO: 92574 - DNA, 20 bp, Artificial Sequence
  Description of Artificial Sequence: Synthetic oligonucleotide
  Target: LAMA2; (-) strand; PAM type: NRG; PAM sequence: AAG
gagtttcagtgacttgccta

SEQ ID NO: 92575 - DNA, 20 bp, Artificial Sequence
  Description of Artificial Sequence: Synthetic oligonucleotide
  Target: LAMA2; (-) strand; PAM type: NRG; PAM sequence: CAG
aattgaggcacagagagttt

SEQ ID NO: 92576 - DNA, 20 bp, Artificial Sequence
  Description of Artificial Sequence: Synthetic oligonucleotide
  Target: LAMA2; (-) strand; PAM type: NRG; PAM sequence: GAG
tgacaaaattgaggcacaga

SEQ ID NO: 92577 - DNA, 20 bp, Artificial Sequence
  Description of Artificial Sequence: Synthetic oligonucleotide
  Target: LAMA2; (-) strand; PAM type: NRG; PAM sequence: GAG
gatgacaaaattgaggcaca

SEQ ID NO: 92578 - DNA, 20 bp, Artificial Sequence
  Description of Artificial Sequence: Synthetic oligonucleotide
  Target: LAMA2; (-) strand; PAM type: NRG; PAM sequence: CAG
atgatgacaaaattgaggca

SEQ ID NO: 92579 - DNA, 20 bp, Artificial Sequence
  Description of Artificial Sequence: Synthetic oligonucleotide
  Target: LAMA2; (-) strand; PAM type: NRG; PAM sequence: AGG
aactaatgatgacaaaattg

SEQ ID NO: 92580 - DNA, 20 bp, Artificial Sequence
  Description of Artificial Sequence: Synthetic oligonucleotide
  Target: LAMA2; (-) strand; PAM type: NRG; PAM sequence: GAG
taactaatgatgacaaaatt

SEQ ID NO: 92581 - DNA, 20 bp, Artificial Sequence
  Description of Artificial Sequence: Synthetic oligonucleotide
  Target: LAMA2; (-) strand; PAM type: NRG; PAM sequence: GAG
ttcccacatcaaccctatga

SEQ ID NO: 92582 - DNA, 20 bp, Artificial Sequence
  Description of Artificial Sequence: Synthetic oligonucleotide
  Target: LAMA2; (-) strand; PAM type: NRG; PAM sequence: GAG
ctttcccacatcaaccctat

SEQ ID NO: 92583 - DNA, 20 bp, Artificial Sequence
  Description of Artificial Sequence: Synthetic oligonucleotide
  Target: LAMA2; (-) strand; PAM type: NRG; PAM sequence: TGG
atatccagtcacagtttagg

SEQ ID NO: 92584 - DNA, 20 bp, Artificial Sequence
  Description of Artificial Sequence: Synthetic oligonucleotide
  Target: LAMA2; (-) strand; PAM type: NRG; PAM sequence: AGG
atcatatccagtcacagttt

SEQ ID NO: 92585 - DNA, 20 bp, Artificial Sequence
  Description of Artificial Sequence: Synthetic oligonucleotide
  Target: LAMA2; (-) strand; PAM type: NRG; PAM sequence: TAG
catcatatccagtcacagtt

SEQ ID NO: 92586 - DNA, 20 bp, Artificial Sequence
  Description of Artificial Sequence: Synthetic oligonucleotide
  Target: LAMA2; (-) strand; PAM type: NRG; PAM sequence: CAG
gggttcatcatatccagtca

SEQ ID NO: 92587 - DNA, 20 bp, Artificial Sequence
  Description of Artificial Sequence: Synthetic oligonucleotide
  Target: LAMA2; (-) strand; PAM type: NRG; PAM sequence: CAG
tagattgggttcatcatatc

SEQ ID NO: 92588 - DNA, 20 bp, Artificial Sequence
  Description of Artificial Sequence: Synthetic oligonucleotide
  Target: LAMA2; (-) strand; PAM type: NRG; PAM sequence: GGG
taacaatcagctcttagatt

SEQ ID NO: 92589 - DNA, 20 bp, Artificial Sequence
  Description of Artificial Sequence: Synthetic oligonucleotide
  Target: LAMA2; (-) strand; PAM type: NRG; PAM sequence: TGG
ataacaatcagctcttagat

SEQ ID NO: 92590 - DNA, 20 bp, Artificial Sequence
  Description of Artificial Sequence: Synthetic oligonucleotide
  Target: LAMA2; (-) strand; PAM type: NRG; PAM sequence: TAG
ggttaataacaatcagctct

SEQ ID NO: 92591 - DNA, 20 bp, Artificial Sequence
  Description of Artificial Sequence: Synthetic oligonucleotide
  Target: LAMA2; (-) strand; PAM type: NRG; PAM sequence: CAG
ctgagcaggttaataacaat

SEQ ID NO: 92592 - DNA, 20 bp, Artificial Sequence
  Description of Artificial Sequence: Synthetic oligonucleotide
  Target: LAMA2; (-) strand; PAM type: NRG; PAM sequence: AGG
aatactttatgactctgagc

SEQ ID NO: 92593 - DNA, 20 bp, Artificial Sequence
  Description of Artificial Sequence: Synthetic oligonucleotide
  Target: LAMA2; (-) strand; PAM type: NRG; PAM sequence: CAG
taatactttatgactctgag

SEQ ID NO: 92594 - DNA, 20 bp, Artificial Sequence
  Description of Artificial Sequence: Synthetic oligonucleotide
  Target: LAMA2; (-) strand; PAM type: NRG; PAM sequence: GAG
ctttaatactttatgactct

SEQ ID NO: 92595 - DNA, 20 bp, Artificial Sequence
  Description of Artificial Sequence: Synthetic oligonucleotide
  Target: LAMA2; (-) strand; PAM type: NRG; PAM sequence: TGG
gtagagatttggaaagcaca

SEQ ID NO: 92596 - DNA, 20 bp, Artificial Sequence
  Description of Artificial Sequence: Synthetic oligonucleotide
  Target: LAMA2; (-) strand; PAM type: NRG; PAM sequence: AAG
gtagaccgtagagatttgga

SEQ ID NO: 92597 - DNA, 20 bp, Artificial Sequence
  Description of Artificial Sequence: Synthetic oligonucleotide
  Target: LAMA2; (-) strand; PAM type: NRG; PAM sequence: TGG
cattgtagaccgtagagatt

SEQ ID NO: 92598 - DNA, 20 bp, Artificial Sequence
  Description of Artificial Sequence: Synthetic oligonucleotide
  Target: LAMA2; (-) strand; PAM type: NRG; PAM sequence: GAG
agtcttcattgtagaccgta

SEQ ID NO: 92599 - DNA, 20 bp, Artificial Sequence
  Description of Artificial Sequence: Synthetic oligonucleotide
  Target: LAMA2; (-) strand; PAM type: NRG; PAM sequence: TAG
gaagtcttcattgtagaccg

SEQ ID NO: 92600 - DNA, 20 bp, Artificial Sequence
  Description of Artificial Sequence: Synthetic oligonucleotide
  Target: LAMA2; (-) strand; PAM type: NRG; PAM sequence: TAG
ttttaaagaagtcttcattg

SEQ ID NO: 92601 - DNA, 20 bp, Artificial Sequence
  Description of Artificial Sequence: Synthetic oligonucleotide
  Target: LAMA2; (-) strand; PAM type: NRG; PAM sequence: AAG
gtgtgtatttttttttaaag

SEQ ID NO: 92602 - DNA, 20 bp, Artificial Sequence
  Description of Artificial Sequence: Synthetic oligonucleotide
  Target: LAMA2; (-) strand; PAM type: NRG; PAM sequence: AAG
gcagtgtgtattttttttta

SEQ ID NO: 92603 - DNA, 20 bp, Artificial Sequence
  Description of Artificial Sequence: Synthetic oligonucleotide
  Target: LAMA2; (-) strand; PAM type: NRG; PAM sequence: CAG
tagtgttatcacttaaaatg

SEQ ID NO: 92604 - DNA, 20 bp, Artificial Sequence
  Description of Artificial Sequence: Synthetic oligonucleotide
  Target: LAMA2; (-) strand; PAM type: NRG; PAM sequence: TAG
aatgaattaattactgcttt

SEQ ID NO: 92605 - DNA, 20 bp, Artificial Sequence
  Description of Artificial Sequence: Synthetic oligonucleotide
  Target: LAMA2; (-) strand; PAM type: NRG; PAM sequence: TAG
ttattttctcaaaaccttgc

SEQ ID NO: 92606 - DNA, 20 bp, Artificial Sequence
  Description of Artificial Sequence: Synthetic oligonucleotide
  Target: LAMA2; (-) strand; PAM type: NRG; PAM sequence: AGG
taacaggctatagatggttg

SEQ ID NO: 92607 - DNA, 20 bp, Artificial Sequence
  Description of Artificial Sequence: Synthetic oligonucleotide
  Target: LAMA2; (-) strand; PAM type: NRG; PAM sequence: GAG
ctaacaggctatagatggtt

SEQ ID NO: 92608 - DNA, 20 bp, Artificial Sequence
  Description of Artificial Sequence: Synthetic oligonucleotide
  Target: LAMA2; (-) strand; PAM type: NRG; PAM sequence: TGG
ggttcctaacaggctataga

SEQ ID NO: 92609 - DNA, 20 bp, Artificial Sequence
  Description of Artificial Sequence: Synthetic oligonucleotide
  Target: LAMA2; (-) strand; PAM type: NRG; PAM sequence: TAG
gcccggttcctaacaggcta

SEQ ID NO: 92610 - DNA, 20 bp, Artificial Sequence
  Description of Artificial Sequence: Synthetic oligonucleotide
  Target: LAMA2; (-) strand; PAM type: NRG; PAM sequence: AGG
taggcagcccggttcctaac

SEQ ID NO: 92611 - DNA, 20 bp, Artificial Sequence
  Description of Artificial Sequence: Synthetic oligonucleotide
  Target: LAMA2; (-) strand; PAM type: NRG; PAM sequence: CAG
ctaggcagcccggttcctaa

SEQ ID NO: 92612 - DNA, 20 bp, Artificial Sequence
  Description of Artificial Sequence: Synthetic oligonucleotide
  Target: LAMA2; (-) strand; PAM type: NRG; PAM sequence: CGG
tcacttcctgctaggcagcc

SEQ ID NO: 92613 - DNA, 20 bp, Artificial Sequence
  Description of Artificial Sequence: Synthetic oligonucleotide
  Target: LAMA2; (-) strand; PAM type: NRG; PAM sequence: CAG
accactcacttcctgctagg

SEQ ID NO: 92614 - DNA, 20 bp, Artificial Sequence
  Description of Artificial Sequence: Synthetic oligonucleotide
  Target: LAMA2; (-) strand; PAM type: NRG; PAM sequence: AGG
ccaaccactcacttcctgct

SEQ ID NO: 92615 - DNA, 20 bp, Artificial Sequence
  Description of Artificial Sequence: Synthetic oligonucleotide
  Target: LAMA2; (-) strand; PAM type: NRG; PAM sequence: TAG
gccaaccactcacttcctgc

SEQ ID NO: 92616 - DNA, 20 bp, Artificial Sequence
  Description of Artificial Sequence: Synthetic oligonucleotide
  Target: LAMA2; (-) strand; PAM type: NRG; PAM sequence: TGG
gttaggaggctgagctcagg

SEQ ID NO: 92617 - DNA, 20 bp, Artificial Sequence
  Description of Artificial Sequence: Synthetic oligonucleotide
  Target: LAMA2; (-) strand; PAM type: NRG; PAM sequence: AGG
tctgttaggaggctgagctc

SEQ ID NO: 92618 - DNA, 20 bp, Artificial Sequence
  Description of Artificial Sequence: Synthetic oligonucleotide
  Target: LAMA2; (-) strand; PAM type: NRG; PAM sequence: CAG
atctgttaggaggctgagct

SEQ ID NO: 92619 - DNA, 20 bp, Artificial Sequence
  Description of Artificial Sequence: Synthetic oligonucleotide
  Target: LAMA2; (-) strand; PAM type: NRG; PAM sequence: GAG
gcctgatctgttaggaggct

SEQ ID NO: 92620 - DNA, 20 bp, Artificial Sequence
  Description of Artificial Sequence: Synthetic oligonucleotide
  Target: LAMA2; (-) strand; PAM type: NRG; PAM sequence: AGG
tgcctgcctgatctgttagg

SEQ ID NO: 92621 - DNA, 20 bp, Artificial Sequence
  Description of Artificial Sequence: Synthetic oligonucleotide
  Target: LAMA2; (-) strand; PAM type: NRG; PAM sequence: GAG
atgcctgcctgatctgttag

SEQ ID NO: 92622 - DNA, 20 bp, Artificial Sequence
  Description of Artificial Sequence: Synthetic oligonucleotide
  Target: LAMA2; (-) strand; PAM type: NRG; PAM sequence: AGG
taatgcctgcctgatctgtt

SEQ ID NO: 92623 - DNA, 20 bp, Artificial Sequence
  Description of Artificial Sequence: Synthetic oligonucleotide
  Target: LAMA2; (-) strand; PAM type: NRG; PAM sequence: TAG
ctaatgcctgcctgatctgt

SEQ ID NO: 92624 - DNA, 20 bp, Artificial Sequence
  Description of Artificial Sequence: Synthetic oligonucleotide
  Target: LAMA2; (-) strand; PAM type: NRG; PAM sequence: GAG
aatagggtttgagcttctat

SEQ ID NO: 92625 - DNA, 20 bp, Artificial Sequence
  Description of Artificial Sequence: Synthetic oligonucleotide
  Target: LAMA2; (-) strand; PAM type: NRG; PAM sequence: GAG
tgcagttcgcaatagggttt

SEQ ID NO: 92626 - DNA, 20 bp, Artificial Sequence
  Description of Artificial Sequence: Synthetic oligonucleotide
  Target: LAMA2; (-) strand; PAM type: NRG; PAM sequence: GGG
cgcaggtgcagttcgcaata

SEQ ID NO: 92627 - DNA, 20 bp, Artificial Sequence
  Description of Artificial Sequence: Synthetic oligonucleotide
  Target: LAMA2; (-) strand; PAM type: NRG; PAM sequence: AGG
tcgcaggtgcagttcgcaat

SEQ ID NO: 92628 - DNA, 20 bp, Artificial Sequence
  Description of Artificial Sequence: Synthetic oligonucleotide
  Target: LAMA2; (-) strand; PAM type: NRG; PAM sequence: TAG
ctcgcaggtgcagttcgcaa

SEQ ID NO: 92629 - DNA, 20 bp, Artificial Sequence
  Description of Artificial Sequence: Synthetic oligonucleotide
  Target: LAMA2; (-) strand; PAM type: NRG; PAM sequence: CAG
agctagatccctcgcaggtg

SEQ ID NO: 92630 - DNA, 20 bp, Artificial Sequence
  Description of Artificial Sequence: Synthetic oligonucleotide
  Target: LAMA2; (-) strand; PAM type: NRG; PAM sequence: AGG
atacaagctagatccctcgc

SEQ ID NO: 92631 - DNA, 20 bp, Artificial Sequence
  Description of Artificial Sequence: Synthetic oligonucleotide
  Target: LAMA2; (-) strand; PAM type: NRG; PAM sequence: CAG
catacaagctagatccctcg

SEQ ID NO: 92632 - DNA, 20 bp, Artificial Sequence
  Description of Artificial Sequence: Synthetic oligonucleotide
  Target: LAMA2; (-) strand; PAM type: NRG; PAM sequence: TAG
ctcataaggagcatacaagc

SEQ ID NO: 92633 - DNA, 20 bp, Artificial Sequence
  Description of Artificial Sequence: Synthetic oligonucleotide
  Target: LAMA2; (-) strand; PAM type: NRG; PAM sequence: AAG
gactctcataaggagcatac

SEQ ID NO: 92634 - DNA, 20 bp, Artificial Sequence
  Description of Artificial Sequence: Synthetic oligonucleotide
  Target: LAMA2; (-) strand; PAM type: NRG; PAM sequence: GAG
atcagttagactctcataag

SEQ ID NO: 92635 - DNA, 20 bp, Artificial Sequence
  Description of Artificial Sequence: Synthetic oligonucleotide
  Target: LAMA2; (-) strand; PAM type: NRG; PAM sequence: AGG
gcatcagttagactctcata

SEQ ID NO: 92636 - DNA, 20 bp, Artificial Sequence
  Description of Artificial Sequence: Synthetic oligonucleotide
  Target: LAMA2; (-) strand; PAM type: NRG; PAM sequence: AAG
ggcatcagttagactctcat

SEQ ID NO: 92637 - DNA, 20 bp, Artificial Sequence
  Description of Artificial Sequence: Synthetic oligonucleotide
  Target: LAMA2; (-) strand; PAM type: NRG; PAM sequence: TAG
tcagatcatcaggcatcagt

SEQ ID NO: 92638 - DNA, 20 bp, Artificial Sequence
  Description of Artificial Sequence: Synthetic oligonucleotide
  Target: LAMA2; (-) strand; PAM type: NRG; PAM sequence: CAG
cacgtcagatcatcaggcat

SEQ ID NO: 92639 - DNA, 20 bp, Artificial Sequence
  Description of Artificial Sequence: Synthetic oligonucleotide
  Target: LAMA2; (-) strand; PAM type: NRG; PAM sequence: AGG
ctgttccacgtcagatcatc

SEQ ID NO: 92640 - DNA, 20 bp, Artificial Sequence
  Description of Artificial Sequence: Synthetic oligonucleotide
  Target: LAMA2; (-) strand; PAM type: NRG; PAM sequence: CAG
actgttccacgtcagatcat

SEQ ID NO: 92641 - DNA, 20 bp, Artificial Sequence
  Description of Artificial Sequence: Synthetic oligonucleotide
  Target: LAMA2; (-) strand; PAM type: NRG; PAM sequence: CAG
gggataaaactgttccacgt

SEQ ID NO: 92642 - DNA, 20 bp, Artificial Sequence
  Description of Artificial Sequence: Synthetic oligonucleotide
  Target: LAMA2; (-) strand; PAM type: NRG; PAM sequence: GGG
cagatgcaggggaggagttt

SEQ ID NO: 92643 - DNA, 20 bp, Artificial Sequence
  Description of Artificial Sequence: Synthetic oligonucleotide
  Target: LAMA2; (-) strand; PAM type: NRG; PAM sequence: TGG
acagatgcaggggaggagtt

SEQ ID NO: 92644 - DNA, 20 bp, Artificial Sequence
  Description of Artificial Sequence: Synthetic oligonucleotide
  Target: LAMA2; (-) strand; PAM type: NRG; PAM sequence: GAG
tttccacagatgcaggggag

SEQ ID NO: 92645 - DNA, 20 bp, Artificial Sequence
  Description of Artificial Sequence: Synthetic oligonucleotide
  Target: LAMA2; (-) strand; PAM type: NRG; PAM sequence: AGG
tttttccacagatgcagggg

SEQ ID NO: 92646 - DNA, 20 bp, Artificial Sequence
  Description of Artificial Sequence: Synthetic oligonucleotide
  Target: LAMA2; (-) strand; PAM type: NRG; PAM sequence: GAG
atttttccacagatgcaggg

SEQ ID NO: 92647 - DNA, 20 bp, Artificial Sequence
  Description of Artificial Sequence: Synthetic oligonucleotide
  Target: LAMA2; (-) strand; PAM type: NRG; PAM sequence: GGG
caatttttccacagatgcag

SEQ ID NO: 92648 - DNA, 20 bp, Artificial Sequence
  Description of Artificial Sequence: Synthetic oligonucleotide
  Target: LAMA2; (-) strand; PAM type: NRG; PAM sequence: GGG
acaatttttccacagatgca

SEQ ID NO: 92649 - DNA, 20 bp, Artificial Sequence
  Description of Artificial Sequence: Synthetic oligonucleotide
  Target: LAMA2; (-) strand; PAM type: NRG; PAM sequence: AGG
gacaatttttccacagatgc

SEQ ID NO: 92650 - DNA, 20 bp, Artificial Sequence
  Description of Artificial Sequence: Synthetic oligonucleotide
  Target: LAMA2; (-) strand; PAM type: NRG; PAM sequence: CAG
agacaatttttccacagatg

SEQ ID NO: 92651 - DNA, 20 bp, Artificial Sequence
  Description of Artificial Sequence: Synthetic oligonucleotide
  Target: LAMA2; (-) strand; PAM type: NRG; PAM sequence: CAG
tgttggagacaatttttcca

SEQ ID NO: 92652 - DNA, 20 bp, Artificial Sequence
  Description of Artificial Sequence: Synthetic oligonucleotide
  Target: LAMA2; (-) strand; PAM type: NRG; PAM sequence: GAG
accaggtacttcttttgttg

SEQ ID NO: 92653 - DNA, 20 bp, Artificial Sequence
  Description of Artificial Sequence: Synthetic oligonucleotide
  Target: LAMA2; (-) strand; PAM type: NRG; PAM sequence: TGG
gcaccaggtacttcttttgt

SEQ ID NO: 92654 - DNA, 20 bp, Artificial Sequence
  Description of Artificial Sequence: Synthetic oligonucleotide
  Target: LAMA2; (-) strand; PAM type: NRG; PAM sequence: AGG
tccccaaaatttttggcacc

SEQ ID NO: 92655 - DNA, 20 bp, Artificial Sequence
  Description of Artificial Sequence: Synthetic oligonucleotide
  Target: LAMA2; (-) strand; PAM type: NRG; PAM sequence: CAG
gtccccaaaatttttggcac

SEQ ID NO: 92656 - DNA, 20 bp, Artificial Sequence
  Description of Artificial Sequence: Synthetic oligonucleotide
  Target: LAMA2; (-) strand; PAM type: NRG; PAM sequence: TGG
ccagtggtccccaaaatttt

SEQ ID NO: 92657 - DNA, 20 bp, Artificial Sequence
  Description of Artificial Sequence: Synthetic oligonucleotide
  Target: LAMA2; (-) strand; PAM type: NRG; PAM sequence: TGG
cactaacatacattaaccag

SEQ ID NO: 92658 - DNA, 20 bp, Artificial Sequence
  Description of Artificial Sequence: Synthetic oligonucleotide
  Target: LAMA2; (-) strand; PAM type: NRG; PAM sequence: CAG
gatcactaacatacattaac

SEQ ID NO: 92659 - DNA, 20 bp, Artificial Sequence
  Description of Artificial Sequence: Synthetic oligonucleotide
  Target: LAMA2; (-) strand; PAM type: NRG; PAM sequence: TGG
caggctcatgccttaggccc

SEQ ID NO: 92660 - DNA, 20 bp, Artificial Sequence
  Description of Artificial Sequence: Synthetic oligonucleotide
  Target: LAMA2; (-) strand; PAM type: NRG; PAM sequence: AGG
cccattcaggctcatgcctt

SEQ ID NO: 92661 - DNA, 20 bp, Artificial Sequence
  Description of Artificial Sequence: Synthetic oligonucleotide
  Target: LAMA2; (-) strand; PAM type: NRG; PAM sequence: TAG
gcccattcaggctcatgcct

SEQ ID NO: 92662 - DNA, 20 bp, Artificial Sequence
  Description of Artificial Sequence: Synthetic oligonucleotide
  Target: LAMA2; (-) strand; PAM type: NRG; PAM sequence: AGG
cttcagttttgagcccattc

SEQ ID NO: 92663 - DNA, 20 bp, Artificial Sequence
  Description of Artificial Sequence: Synthetic oligonucleotide
  Target: LAMA2; (-) strand; PAM type: NRG; PAM sequence: CAG
tcttcagttttgagcccatt

SEQ ID NO: 92664 - DNA, 20 bp, Artificial Sequence
  Description of Artificial Sequence: Synthetic oligonucleotide
  Target: LAMA2; (-) strand; PAM type: NRG; PAM sequence: GAG
gttaaagaatcttcagtttt

SEQ ID NO: 92665 - DNA, 20 bp, Artificial Sequence
  Description of Artificial Sequence: Synthetic oligonucleotide
  Target: LAMA2; (-) strand; PAM type: NRG; PAM sequence: CAG
cttggttgttaaagaatctt

SEQ ID NO: 92666 - DNA, 20 bp, Artificial Sequence
  Description of Artificial Sequence: Synthetic oligonucleotide
  Target: LAMA2; (-) strand; PAM type: NRG; PAM sequence: AAG
tctaacatccttggttgtta

SEQ ID NO: 92667 - DNA, 20 bp, Artificial Sequence
  Description of Artificial Sequence: Synthetic oligonucleotide
  Target: LAMA2; (-) strand; PAM type: NRG; PAM sequence: TGG
ttcctcttctctaacatcct

SEQ ID NO: 92668 - DNA, 20 bp, Artificial Sequence
  Description of Artificial Sequence: Synthetic oligonucleotide
  Target: LAMA2; (-) strand; PAM type: NRG; PAM sequence: AGG
tatagtaattattttccaac

SEQ ID NO: 92669 - DNA, 20 bp, Artificial Sequence
  Description of Artificial Sequence: Synthetic oligonucleotide
  Target: LAMA2; (-) strand; PAM type: NRG; PAM sequence: CAG
ctatagtaattattttccaa

SEQ ID NO: 92670 - DNA, 20 bp, Artificial Sequence
  Description of Artificial Sequence: Synthetic oligonucleotide
  Target: LAMA2; (-) strand; PAM type: NRG; PAM sequence: TAG
atatttcatttgttctccta

SEQ ID NO: 92671 - DNA, 20 bp, Artificial Sequence
  Description of Artificial Sequence: Synthetic oligonucleotide
  Target: LAMA2; (-) strand; PAM type: NRG; PAM sequence: AGG
tgagtagcctttaattatga

SEQ ID NO: 92672 - DNA, 20 bp, Artificial Sequence
  Description of Artificial Sequence: Synthetic oligonucleotide
  Target: LAMA2; (-) strand; PAM type: NRG; PAM sequence: AAG
ttgagtagcctttaattatg

SEQ ID NO: 92673 - DNA, 20 bp, Artificial Sequence
  Description of Artificial Sequence: Synthetic oligonucleotide
  Target: LAMA2; (-) strand; PAM type: NRG; PAM sequence: TAG
atgactatcataggcttgag

SEQ ID NO: 92674 - DNA, 20 bp, Artificial Sequence
  Description of Artificial Sequence: Synthetic oligonucleotide
  Target: LAMA2; (-) strand; PAM type: NRG; PAM sequence: GAG
gttatgactatcataggctt

SEQ ID NO: 92675 - DNA, 20 bp, Artificial Sequence
  Description of Artificial Sequence: Synthetic oligonucleotide
  Target: LAMA2; (-) strand; PAM type: NRG; PAM sequence: AGG
tgtcatgttatgactatcat

SEQ ID NO: 92676 - DNA, 20 bp, Artificial Sequence
  Description of Artificial Sequence: Synthetic oligonucleotide
  Target: LAMA2; (-) strand; PAM type: NRG; PAM sequence: TAG
gtgtcatgttatgactatca

SEQ ID NO: 92677 - DNA, 20 bp, Artificial Sequence
  Description of Artificial Sequence: Synthetic oligonucleotide
  Target: LAMA2; (-) strand; PAM type: NRG; PAM sequence: AGG
tcgcatatataccaaagtgc

SEQ ID NO: 92678 - DNA, 20 bp, Artificial Sequence
  Description of Artificial Sequence: Synthetic oligonucleotide
  Target: LAMA2; (-) strand; PAM type: NRG; PAM sequence: CAG
ttcgcatatataccaaagtg

SEQ ID NO: 92679 - DNA, 20 bp, Artificial Sequence
  Description of Artificial Sequence: Synthetic oligonucleotide
  Target: LAMA2; (-) strand; PAM type: NRG; PAM sequence: AAG
aacccttcgcatatatacca

SEQ ID NO: 92680 - DNA, 20 bp, Artificial Sequence
  Description of Artificial Sequence: Synthetic oligonucleotide
  Target: LAMA2; (-) strand; PAM type: NRG; PAM sequence: GGG
aaacaagtaggtcttccatt

SEQ ID NO: 92681 - DNA, 20 bp, Artificial Sequence
  Description of Artificial Sequence: Synthetic oligonucleotide
  Target: LAMA2; (-) strand; PAM type: NRG; PAM sequence: TGG
caaacaagtaggtcttccat

SEQ ID NO: 92682 - DNA, 20 bp, Artificial Sequence
  Description of Artificial Sequence: Synthetic oligonucleotide
  Target: LAMA2; (-) strand; PAM type: NRG; PAM sequence: AGG
ttcagccatggcaaacaagt

SEQ ID NO: 92683 - DNA, 20 bp, Artificial Sequence
  Description of Artificial Sequence: Synthetic oligonucleotide
  Target: LAMA2; (-) strand; PAM type: NRG; PAM sequence: TAG
attcagccatggcaaacaag

SEQ ID NO: 92684 - DNA, 20 bp, Artificial Sequence
  Description of Artificial Sequence: Synthetic oligonucleotide
  Target: LAMA2; (-) strand; PAM type: NRG; PAM sequence: AAG
gccattcagccatggcaaac

SEQ ID NO: 92685 - DNA, 20 bp, Artificial Sequence
  Description of Artificial Sequence: Synthetic oligonucleotide
  Target: LAMA2; (-) strand; PAM type: NRG; PAM sequence: TGG
aagagaatgccattcagcca

SEQ ID NO: 92686 - DNA, 20 bp, Artificial Sequence
  Description of Artificial Sequence: Synthetic oligonucleotide
  Target: LAMA2; (-) strand; PAM type: NRG; PAM sequence: CAG
atggttaagagaatgccatt

SEQ ID NO: 92687 - DNA, 20 bp, Artificial Sequence
  Description of Artificial Sequence: Synthetic oligonucleotide
  Target: LAMA2; (-) strand; PAM type: NRG; PAM sequence: GAG
atgtaaatgaagatggttaa

SEQ ID NO: 92688 - DNA, 20 bp, Artificial Sequence
  Description of Artificial Sequence: Synthetic oligonucleotide
  Target: LAMA2; (-) strand; PAM type: NRG; PAM sequence: AAG
tcatgtaaatgaagatggtt

SEQ ID NO: 92689 - DNA, 20 bp, Artificial Sequence
  Description of Artificial Sequence: Synthetic oligonucleotide
  Target: LAMA2; (-) strand; PAM type: NRG; PAM sequence: TGG
gagtttcatgtaaatgaaga

SEQ ID NO: 92690 - DNA, 20 bp, Artificial Sequence
  Description of Artificial Sequence: Synthetic oligonucleotide
  Target: LAMA2; (-) strand; PAM type: NRG; PAM sequence: AAG
caatgagtttcatgtaaatg

SEQ ID NO: 92691 - DNA, 20 bp, Artificial Sequence
  Description of Artificial Sequence: Synthetic oligonucleotide
  Target: LAMA2; (-) strand; PAM type: NRG; PAM sequence: GAG
gcaagttagtcgtgaacaat

SEQ ID NO: 92692 - DNA, 20 bp, Artificial Sequence
  Description of Artificial Sequence: Synthetic oligonucleotide
  Target: LAMA2; (-) strand; PAM type: NRG; PAM sequence: TAG
tgctttcctcaaatgcaagt

SEQ ID NO: 92693 - DNA, 20 bp, Artificial Sequence
  Description of Artificial Sequence: Synthetic oligonucleotide
  Target: LAMA2; (-) strand; PAM type: NRG; PAM sequence: AAG
cttctgctttcctcaaatgc

SEQ ID NO: 92694 - DNA, 20 bp, Artificial Sequence
  Description of Artificial Sequence: Synthetic oligonucleotide
  Target: LAMA2; (-) strand; PAM type: NRG; PAM sequence: CAG
ggagatgcaatacgagtggc

SEQ ID NO: 92695 - DNA, 20 bp, Artificial Sequence
  Description of Artificial Sequence: Synthetic oligonucleotide
  Target: LAMA2; (-) strand; PAM type: NRG; PAM sequence: TGG
agaaggagatgcaatacgag

SEQ ID NO: 92696 - DNA, 20 bp, Artificial Sequence
  Description of Artificial Sequence: Synthetic oligonucleotide
  Target: LAMA2; (-) strand; PAM type: NRG; PAM sequence: GAG
ctgagaaggagatgcaatac

SEQ ID NO: 92697 - DNA, 20 bp, Artificial Sequence
  Description of Artificial Sequence: Synthetic oligonucleotide
  Target: LAMA2; (-) strand; PAM type: NRG; PAM sequence: GAG
atgacatcttggctgagaag

SEQ ID NO: 92698 - DNA, 20 bp, Artificial Sequence
  Description of Artificial Sequence: Synthetic oligonucleotide
  Target: LAMA2; (-) strand; PAM type: NRG; PAM sequence: AGG
tcatgacatcttggctgaga

SEQ ID NO: 92699 - DNA, 20 bp, Artificial Sequence
  Description of Artificial Sequence: Synthetic oligonucleotide
  Target: LAMA2; (-) strand; PAM type: NRG; PAM sequence: AAG
ctcatgacatcttggctgag

SEQ ID NO: 92700 - DNA, 20 bp, Artificial Sequence
  Description of Artificial Sequence: Synthetic oligonucleotide
  Target: LAMA2; (-) strand; PAM type: NRG; PAM sequence: GAG
atgctcatgacatcttggct

SEQ ID NO: 92701 - DNA, 20 bp, Artificial Sequence
  Description of Artificial Sequence: Synthetic oligonucleotide
  Target: LAMA2; (-) strand; PAM type: NRG; PAM sequence: TGG
tgctaatgctcatgacatct

SEQ ID NO: 92702 - DNA, 20 bp, Artificial Sequence
  Description of Artificial Sequence: Synthetic oligonucleotide
  Target: LAMA2; (-) strand; PAM type: NRG; PAM sequence: TGG
cagctctgctggattgatag

SEQ ID NO: 92703 - DNA, 20 bp, Artificial Sequence
  Description of Artificial Sequence: Synthetic oligonucleotide
  Target: LAMA2; (-) strand; PAM type: NRG; PAM sequence: TAG
agccagctctgctggattga

SEQ ID NO: 92704 - DNA, 20 bp, Artificial Sequence
  Description of Artificial Sequence: Synthetic oligonucleotide
  Target: LAMA2; (-) strand; PAM type: NRG; PAM sequence: TGG
caatgggcagccagctctgc

SEQ ID NO: 92705 - DNA, 20 bp, Artificial Sequence
  Description of Artificial Sequence: Synthetic oligonucleotide
  Target: LAMA2; (-) strand; PAM type: NRG; PAM sequence: CAG
cacatgatgcaatgggcagc

SEQ ID NO: 92706 - DNA, 20 bp, Artificial Sequence
  Description of Artificial Sequence: Synthetic oligonucleotide
  Target: LAMA2; (-) strand; PAM type: NRG; PAM sequence: CAG
aattcacatgatgcaatggg

SEQ ID NO: 92707 - DNA, 20 bp, Artificial Sequence
  Description of Artificial Sequence: Synthetic oligonucleotide
  Target: LAMA2; (-) strand; PAM type: NRG; PAM sequence: GGG
tggaattcacatgatgcaat

SEQ ID NO: 92708 - DNA, 20 bp, Artificial Sequence
  Description of Artificial Sequence: Synthetic oligonucleotide
  Target: LAMA2; (-) strand; PAM type: NRG; PAM sequence: TGG
ctggaattcacatgatgcaa

SEQ ID NO: 92709 - DNA, 20 bp, Artificial Sequence
  Description of Artificial Sequence: Synthetic oligonucleotide
  Target: LAMA2; (-) strand; PAM type: NRG; PAM sequence: TGG
aattctaatatgtattcagc

SEQ ID NO: 92710 - DNA, 20 bp, Artificial Sequence
  Description of Artificial Sequence: Synthetic oligonucleotide
  Target: LAMA2; (-) strand; PAM type: NRG; PAM sequence: CAG
atataattctaatatgtatt

SEQ ID NO: 92711 - DNA, 20 bp, Artificial Sequence
  Description of Artificial Sequence: Synthetic oligonucleotide
  Target: LAMA2; (-) strand; PAM type: NRG; PAM sequence: GGG
gacttgagggtaaatccata

SEQ ID NO: 92712 - DNA, 20 bp, Artificial Sequence
  Description of Artificial Sequence: Synthetic oligonucleotide
  Target: LAMA2; (-) strand; PAM type: NRG; PAM sequence: AGG
agacttgagggtaaatccat

SEQ ID NO: 92713 - DNA, 20 bp, Artificial Sequence
  Description of Artificial Sequence: Synthetic oligonucleotide
  Target: LAMA2; (-) strand; PAM type: NRG; PAM sequence: TAG
cagacttgagggtaaatcca

SEQ ID NO: 92714 - DNA, 20 bp, Artificial Sequence
  Description of Artificial Sequence: Synthetic oligonucleotide
  Target: LAMA2; (-) strand; PAM type: NRG; PAM sequence: GGG
gtaatgttggtcagacttga

SEQ ID NO: 92715 - DNA, 20 bp, Artificial Sequence
  Description of Artificial Sequence: Synthetic oligonucleotide
  Target: LAMA2; (-) strand; PAM type: NRG; PAM sequence: AGG
agtaatgttggtcagacttg

SEQ ID NO: 92716 - DNA, 20 bp, Artificial Sequence
  Description of Artificial Sequence: Synthetic oligonucleotide
  Target: LAMA2; (-) strand; PAM type: NRG; PAM sequence: GAG
tagtaatgttggtcagactt

SEQ ID NO: 92717 - DNA, 20 bp, Artificial Sequence
  Description of Artificial Sequence: Synthetic oligonucleotide
  Target: LAMA2; (-) strand; PAM type: NRG; PAM sequence: CAG
gcatttatagtaatgttggt

SEQ ID NO: 92718 - DNA, 20 bp, Artificial Sequence
  Description of Artificial Sequence: Synthetic oligonucleotide
  Target: LAMA2; (-) strand; PAM type: NRG; PAM sequence: TGG
ctctgcatttatagtaatgt

SEQ ID NO: 92719 - DNA, 20 bp, Artificial Sequence
  Description of Artificial Sequence: Synthetic oligonucleotide
  Target: LAMA2; (-) strand; PAM type: NRG; PAM sequence: TAG
taatgtttcctctgcattta

SEQ ID NO: 92720 - DNA, 20 bp, Artificial Sequence
  Description of Artificial Sequence: Synthetic oligonucleotide
  Target: LAMA2; (-) strand; PAM type: NRG; PAM sequence: AAG
atgaatgcctataattatcc

SEQ ID NO: 92721 - DNA, 20 bp, Artificial Sequence
  Description of Artificial Sequence: Synthetic oligonucleotide
  Target: LAMA2; (-) strand; PAM type: NRG; PAM sequence: GGG
acaaataaagagacaacaat

SEQ ID NO: 92722 - DNA, 20 bp, Artificial Sequence
  Description of Artificial Sequence: Synthetic oligonucleotide
  Target: LAMA2; (-) strand; PAM type: NRG; PAM sequence: TGG
aacaaataaagagacaacaa

SEQ ID NO: 92723 - DNA, 20 bp, Artificial Sequence
  Description of Artificial Sequence: Synthetic oligonucleotide
  Target: LAMA2; (-) strand; PAM type: NRG; PAM sequence: GAG
gtaaatgcacaacaaataaa

SEQ ID NO: 92724 - DNA, 20 bp, Artificial Sequence
  Description of Artificial Sequence: Synthetic oligonucleotide
  Target: LAMA2; (-) strand; PAM type: NRG; PAM sequence: AAG
aagtaaatgcacaacaaata

SEQ ID NO: 92725 - DNA, 20 bp, Artificial Sequence
  Description of Artificial Sequence: Synthetic oligonucleotide
  Target: LAMA2; (-) strand; PAM type: NRG; PAM sequence: AAG
acaattagaacccattatcc

SEQ ID NO: 92726 - DNA, 20 bp, Artificial Sequence
  Description of Artificial Sequence: Synthetic oligonucleotide
  Target: LAMA2; (-) strand; PAM type: NRG; PAM sequence: TAG
tctttttcaggaacaacaat

SEQ ID NO: 92727 - DNA, 20 bp, Artificial Sequence
  Description of Artificial Sequence: Synthetic oligonucleotide
  Target: LAMA2; (-) strand; PAM type: NRG; PAM sequence: AGG
gcagactttctttctttttc

SEQ ID NO: 92728 - DNA, 20 bp, Artificial Sequence
  Description of Artificial Sequence: Synthetic oligonucleotide
  Target: LAMA2; (-) strand; PAM type: NRG; PAM sequence: CAG
tgcagactttctttcttttt

SEQ ID NO: 92729 - DNA, 20 bp, Artificial Sequence
  Description of Artificial Sequence: Synthetic oligonucleotide
  Target: LAMA2; (-) strand; PAM type: NRG; PAM sequence: CAG
ggattgtgttttaatgcttg

SEQ ID NO: 92730 - DNA, 20 bp, Artificial Sequence
  Description of Artificial Sequence: Synthetic oligonucleotide
  Target: LAMA2; (-) strand; PAM type: NRG; PAM sequence: TGG
cccaatccctttggcactga

SEQ ID NO: 92731 - DNA, 20 bp, Artificial Sequence
  Description of Artificial Sequence: Synthetic oligonucleotide
  Target: LAMA2; (-) strand; PAM type: NRG; PAM sequence: TGG
cactggaaacccaatccctt

SEQ ID NO: 92732 - DNA, 20 bp, Artificial Sequence
  Description of Artificial Sequence: Synthetic oligonucleotide
  Target: LAMA2; (-) strand; PAM type: NRG; PAM sequence: TGG
gaaataatattattggacac

SEQ ID NO: 92733 - DNA, 20 bp, Artificial Sequence
  Description of Artificial Sequence: Synthetic oligonucleotide
  Target: LAMA2; (-) strand; PAM type: NRG; PAM sequence: TGG
cttttaggaaataatattat

SEQ ID NO: 92734 - DNA, 20 bp, Artificial Sequence
  Description of Artificial Sequence: Synthetic oligonucleotide
  Target: LAMA2; (-) strand; PAM type: NRG; PAM sequence: AGG
aattagaatatacatctttt

SEQ ID NO: 92735 - DNA, 20 bp, Artificial Sequence
  Description of Artificial Sequence: Synthetic oligonucleotide
  Target: LAMA2; (-) strand; PAM type: NRG; PAM sequence: TAG
aaattagaatatacatcttt

SEQ ID NO: 92736 - DNA, 20 bp, Artificial Sequence
  Description of Artificial Sequence: Synthetic oligonucleotide
  Target: LAMA2; (-) strand; PAM type: NRG; PAM sequence: TAG
tcaacgtaattataccaaat

SEQ ID NO: 92737 - DNA, 20 bp, Artificial Sequence
  Description of Artificial Sequence: Synthetic oligonucleotide
  Target: LAMA2; (-) strand; PAM type: NRG; PAM sequence: AGG
tatatgcatttttaaaaatc

SEQ ID NO: 92738 - DNA, 20 bp, Artificial Sequence
  Description of Artificial Sequence: Synthetic oligonucleotide
  Target: LAMA2; (-) strand; PAM type: NRG; PAM sequence: CAG
ttatatgcatttttaaaaat

SEQ ID NO: 92739 - DNA, 20 bp, Artificial Sequence
  Description of Artificial Sequence: Synthetic oligonucleotide
  Target: LAMA2; (-) strand; PAM type: NRG; PAM sequence: TGG
cattaaatacttggtgttac

SEQ ID NO: 92740 - DNA, 20 bp, Artificial Sequence
  Description of Artificial Sequence: Synthetic oligonucleotide
  Target: LAMA2; (-) strand; PAM type: NRG; PAM sequence: TGG
tgaaagaatcattaaatact

SEQ ID NO: 92741 - DNA, 20 bp, Artificial Sequence
  Description of Artificial Sequence: Synthetic oligonucleotide
  Target: LAMA2; (-) strand; PAM type: NRG; PAM sequence: AAG
tgaaaacattttgaaaatga

SEQ ID NO: 92742 - DNA, 20 bp, Artificial Sequence
  Description of Artificial Sequence: Synthetic oligonucleotide
  Target: LAMA2; (-) strand; PAM type: NRG; PAM sequence: AAG
aattattaattgcttactct

SEQ ID NO: 92743 - DNA, 20 bp, Artificial Sequence
  Description of Artificial Sequence: Synthetic oligonucleotide
  Target: LAMA2; (-) strand; PAM type: NRG; PAM sequence: TGG
tatattaatatttgataatt

SEQ ID NO: 92744 - DNA, 20 bp, Artificial Sequence
  Description of Artificial Sequence: Synthetic oligonucleotide
  Target: LAMA2; (-) strand; PAM type: NRG; PAM sequence: TAG
ctagaagtaaaattattatt

SEQ ID NO: 92745 - DNA, 20 bp, Artificial Sequence
  Description of Artificial Sequence: Synthetic oligonucleotide
  Target: LAMA2; (-) strand; PAM type: NRG; PAM sequence: AAG
agtcccaattctactgctag

SEQ ID NO: 92746 - DNA, 20 bp, Artificial Sequence
  Description of Artificial Sequence: Synthetic oligonucleotide
  Target: LAMA2; (-) strand; PAM type: NRG; PAM sequence: TAG
tctagtcccaattctactgc

SEQ ID NO: 92747 - DNA, 20 bp, Artificial Sequence
  Description of Artificial Sequence: Synthetic oligonucleotide
  Target: LAMA2; (-) strand; PAM type: NRG; PAM sequence: TAG
tttaaaataaattgctattc

SEQ ID NO: 92748 - DNA, 20 bp, Artificial Sequence
  Description of Artificial Sequence: Synthetic oligonucleotide
  Target: LAMA2; (-) strand; PAM type: NRG; PAM sequence: TGG
taaaataccacattgaaagc

SEQ ID NO: 92749 - DNA, 20 bp, Artificial Sequence
  Description of Artificial Sequence: Synthetic oligonucleotide
  Target: LAMA2; (-) strand; PAM type: NRG; PAM sequence: AAG
ttgttaaaataccacattga

SEQ ID NO: 92750 - DNA, 20 bp, Artificial Sequence
  Description of Artificial Sequence: Synthetic oligonucleotide
  Target: LAMA2; (-) strand; PAM type: NRG; PAM sequence: AAG
acttctaggatttataaact

SEQ ID NO: 92751 - DNA, 20 bp, Artificial Sequence
  Description of Artificial Sequence: Synthetic oligonucleotide
  Target: LAMA2; (-) strand; PAM type: NRG; PAM sequence: AGG
aaccctctcacaaaacttct

SEQ ID NO: 92752 - DNA, 20 bp, Artificial Sequence
  Description of Artificial Sequence: Synthetic oligonucleotide
  Target: LAMA2; (-) strand; PAM type: NRG; PAM sequence: TAG
taaccctctcacaaaacttc

SEQ ID NO: 92753 - DNA, 20 bp, Artificial Sequence
  Description of Artificial Sequence: Synthetic oligonucleotide
  Target: LAMA2; (-) strand; PAM type: NRG; PAM sequence: AAG
taaaattgttttaaatgtaa

SEQ ID NO: 92754 - DNA, 20 bp, Artificial Sequence
  Description of Artificial Sequence: Synthetic oligonucleotide
  Target: LAMA2; (-) strand; PAM type: NRG; PAM sequence: TAG
actaaaccatgataattttc

SEQ ID NO: 92755 - DNA, 20 bp, Artificial Sequence
  Description of Artificial Sequence: Synthetic oligonucleotide
  Target: LAMA2; (-) strand; PAM type: NRG; PAM sequence: CAG
aaaatggatttttctcatca

SEQ ID NO: 92756 - DNA, 20 bp, Artificial Sequence
  Description of Artificial Sequence: Synthetic oligonucleotide
  Target: LAMA2; (-) strand; PAM type: NRG; PAM sequence: TGG
ttcaggttgttagatgaaaa

SEQ ID NO: 92757 - DNA, 20 bp, Artificial Sequence
  Description of Artificial Sequence: Synthetic oligonucleotide
  Target: LAMA2; (-) strand; PAM type: NRG; PAM sequence: TAG
ttttaaacatttcaggttgt

SEQ ID NO: 92758 - DNA, 20 bp, Artificial Sequence
  Description of Artificial Sequence: Synthetic oligonucleotide
  Target: LAMA2; (-) strand; PAM type: NRG; PAM sequence: AGG
attttttttttaaacatttc

SEQ ID NO: 92759 - DNA, 20 bp, Artificial Sequence
  Description of Artificial Sequence: Synthetic oligonucleotide
  Target: LAMA2; (-) strand; PAM type: NRG; PAM sequence: CAG
gattttttttttaaacattt

SEQ ID NO: 92760 - DNA, 20 bp, Artificial Sequence
  Description of Artificial Sequence: Synthetic oligonucleotide
  Target: LAMA2; (-) strand; PAM type: NRG; PAM sequence: TAG
aggtcattaagtgtcttgtt

SEQ ID NO: 92761 - DNA, 20 bp, Artificial Sequence
  Description of Artificial Sequence: Synthetic oligonucleotide
  Target: LAMA2; (-) strand; PAM type: NRG; PAM sequence: AAG
gatagtttccctaggtcatt

SEQ ID NO: 92762 - DNA, 20 bp, Artificial Sequence
  Description of Artificial Sequence: Synthetic oligonucleotide
  Target: LAMA2; (-) strand; PAM type: NRG; PAM sequence: AGG
ttaaaaaggatagtttccct

SEQ ID NO: 92763 - DNA, 20 bp, Artificial Sequence
  Description of Artificial Sequence: Synthetic oligonucleotide
  Target: LAMA2; (-) strand; PAM type: NRG; PAM sequence: TAG
tttaaaaaggatagtttccc

SEQ ID NO: 92764 - DNA, 20 bp, Artificial Sequence
  Description of Artificial Sequence: Synthetic oligonucleotide
  Target: LAMA2; (-) strand; PAM type: NRG; PAM sequence: TAG
taaaatatttttaaaaagga

SEQ ID NO: 92765 - DNA, 20 bp, Artificial Sequence
  Description of Artificial Sequence: Synthetic oligonucleotide
  Target: LAMA2; (-) strand; PAM type: NRG; PAM sequence: AGG
tttataaaatatttttaaaa

SEQ ID NO: 92766 - DNA, 20 bp, Artificial Sequence
  Description of Artificial Sequence: Synthetic oligonucleotide
  Target: LAMA2; (-) strand; PAM type: NRG; PAM sequence: AAG
ttttataaaatatttttaaa

SEQ ID NO: 92767 - DNA, 20 bp, Artificial Sequence
  Description of Artificial Sequence: Synthetic oligonucleotide
  Target: LAMA2; (-) strand; PAM type: NRG; PAM sequence: CAG
gtttctagctcacattataa

SEQ ID NO: 92768 - DNA, 20 bp, Artificial Sequence
  Description of Artificial Sequence: Synthetic oligonucleotide
  Target: LAMA2; (-) strand; PAM type: NRG; PAM sequence: TAG
aattcatatctcagagtttc

SEQ ID NO: 92769 - DNA, 20 bp, Artificial Sequence
  Description of Artificial Sequence: Synthetic oligonucleotide
  Target: LAMA2; (-) strand; PAM type: NRG; PAM sequence: GAG
aatattcaattcatatctca

SEQ ID NO: 92770 - DNA, 20 bp, Artificial Sequence
  Description of Artificial Sequence: Synthetic oligonucleotide
  Target: LAMA2; (-) strand; PAM type: NRG; PAM sequence: CAG
caaatattcaattcatatct

SEQ ID NO: 92771 - DNA, 20 bp, Artificial Sequence
  Description of Artificial Sequence: Synthetic oligonucleotide
  Target: LAMA2; (-) strand; PAM type: NRG; PAM sequence: AGG
gaaattaaaatctcgtcttc

SEQ ID NO: 92772 - DNA, 20 bp, Artificial Sequence
  Description of Artificial Sequence: Synthetic oligonucleotide
  Target: LAMA2; (-) strand; PAM type: NRG; PAM sequence: CAG
ggaaattaaaatctcgtctt

SEQ ID NO: 92773 - DNA, 20 bp, Artificial Sequence
  Description of Artificial Sequence: Synthetic oligonucleotide
  Target: LAMA2; (-) strand; PAM type: NRG; PAM sequence: TGG
ttttttctctgaataacctg

SEQ ID NO: 92774 - DNA, 20 bp, Artificial Sequence
  Description of Artificial Sequence: Synthetic oligonucleotide
  Target: LAMA2; (-) strand; PAM type: NRG; PAM sequence: TAG
atgaaggttgcgtcaacctt

SEQ ID NO: 92775 - DNA, 20 bp, Artificial Sequence
  Description of Artificial Sequence: Synthetic oligonucleotide
  Target: LAMA2; (-) strand; PAM type: NRG; PAM sequence: AGG
aagctttagacttcccatga

SEQ ID NO: 92776 - DNA, 20 bp, Artificial Sequence
  Description of Artificial Sequence: Synthetic oligonucleotide
  Target: LAMA2; (-) strand; PAM type: NRG; PAM sequence: AAG
taagctttagacttcccatg

SEQ ID NO: 92777 - DNA, 20 bp, Artificial Sequence
  Description of Artificial Sequence: Synthetic oligonucleotide
  Target: LAMA2; (-) strand; PAM type: NRG; PAM sequence: TAG
gtaaaactatcactaagctt

SEQ ID NO: 92778 - DNA, 20 bp, Artificial Sequence
  Description of Artificial Sequence: Synthetic oligonucleotide
  Target: LAMA2; (-) strand; PAM type: NRG; PAM sequence: AAG
accaaggtaaaactatcact

SEQ ID NO: 92779 - DNA, 20 bp, Artificial Sequence
  Description of Artificial Sequence: Synthetic oligonucleotide
  Target: LAMA2; (-) strand; PAM type: NRG; PAM sequence: AGG
attaaatagataaatcacca

SEQ ID NO: 92780 - DNA, 20 bp, Artificial Sequence
  Description of Artificial Sequence: Synthetic oligonucleotide
  Target: LAMA2; (-) strand; PAM type: NRG; PAM sequence: AAG
gattaaatagataaatcacc

SEQ ID NO: 92781 - DNA, 20 bp, Artificial Sequence
  Description of Artificial Sequence: Synthetic oligonucleotide
  Target: LAMA2; (-) strand; PAM type: NRG; PAM sequence: TAG
atttatgaccagggattaaa

SEQ ID NO: 92782 - DNA, 20 bp, Artificial Sequence
  Description of Artificial Sequence: Synthetic oligonucleotide
  Target: LAMA2; (-) strand; PAM type: NRG; PAM sequence: GGG
atctataagatttatgacca

SEQ ID NO: 92783 - DNA, 20 bp, Artificial Sequence
  Description of Artificial Sequence: Synthetic oligonucleotide
  Target: LAMA2; (-) strand; PAM type: NRG; PAM sequence: AGG
gatctataagatttatgacc

SEQ ID NO: 92784 - DNA, 20 bp, Artificial Sequence
  Description of Artificial Sequence: Synthetic oligonucleotide
  Target: LAMA2; (-) strand; PAM type: NRG; PAM sequence: CAG
tgatctataagatttatgac

SEQ ID NO: 92785 - DNA, 20 bp, Artificial Sequence
  Description of Artificial Sequence: Synthetic oligonucleotide
  Target: LAMA2; (-) strand; PAM type: NRG; PAM sequence: AAG
ccaaaatgcttgtgatctat

SEQ ID NO: 92786 - DNA, 20 bp, Artificial Sequence
  Description of Artificial Sequence: Synthetic oligonucleotide
  Target: LAMA2; (-) strand; PAM type: NRG; PAM sequence: GAG
aatattatctaagaaatttg

SEQ ID NO: 92787 - DNA, 20 bp, Artificial Sequence
  Description of Artificial Sequence: Synthetic oligonucleotide
  Target: LAMA2; (-) strand; PAM type: NRG; PAM sequence: TGG
gcaatattatctaagaaatt

SEQ ID NO: 92788 - DNA, 20 bp, Artificial Sequence
  Description of Artificial Sequence: Synthetic oligonucleotide
  Target: LAMA2; (-) strand; PAM type: NRG; PAM sequence: AAG
tttatttagcaatattatct

SEQ ID NO: 92789 - DNA, 20 bp, Artificial Sequence
  Description of Artificial Sequence: Synthetic oligonucleotide
  Target: LAMA2; (-) strand; PAM type: NRG; PAM sequence: TAG
tcttacatatttgatttatt

SEQ ID NO: 92790 - DNA, 20 bp, Artificial Sequence
  Description of Artificial Sequence: Synthetic oligonucleotide
  Target: LAMA2; (-) strand; PAM type: NRG; PAM sequence: AAG
atcaccataaatagttgatg

SEQ ID NO: 92791 - DNA, 20 bp, Artificial Sequence
  Description of Artificial Sequence: Synthetic oligonucleotide
  Target: LAMA2; (-) strand; PAM type: NRG; PAM sequence: TAG
agcatagtgatcaccataaa

SEQ ID NO: 92792 - DNA, 20 bp, Artificial Sequence
  Description of Artificial Sequence: Synthetic oligonucleotide
  Target: LAMA2; (-) strand; PAM type: NRG; PAM sequence: TAG
caagatgagaaggccaagca

SEQ ID NO: 92793 - DNA, 20 bp, Artificial Sequence
  Description of Artificial Sequence: Synthetic oligonucleotide
  Target: LAMA2; (-) strand; PAM type: NRG; PAM sequence: AAG
atcaacaagatgagaaggcc

SEQ ID NO: 92794 - DNA, 20 bp, Artificial Sequence
  Description of Artificial Sequence: Synthetic oligonucleotide
  Target: LAMA2; (-) strand; PAM type: NRG; PAM sequence: AGG
tatacatcaacaagatgaga

SEQ ID NO: 92795 - DNA, 20 bp, Artificial Sequence
  Description of Artificial Sequence: Synthetic oligonucleotide
  Target: LAMA2; (-) strand; PAM type: NRG; PAM sequence: AAG
atatacatcaacaagatgag

SEQ ID NO: 92796 - DNA, 20 bp, Artificial Sequence
  Description of Artificial Sequence: Synthetic oligonucleotide
  Target: LAMA2; (-) strand; PAM type: NRG; PAM sequence: GAG
aatatatacatcaacaagat

SEQ ID NO: 92797 - DNA, 20 bp, Artificial Sequence
  Description of Artificial Sequence: Synthetic oligonucleotide
  Target: LAMA2; (-) strand; PAM type: NRG; PAM sequence: AAG
gctagaatatatacatcaac

SEQ ID NO: 92798 - DNA, 20 bp, Artificial Sequence
  Description of Artificial Sequence: Synthetic oligonucleotide
  Target: LAMA2; (-) strand; PAM type: NRG; PAM sequence: TAG
gcctagttacaacctatagc

SEQ ID NO: 92799 - DNA, 20 bp, Artificial Sequence
  Description of Artificial Sequence: Synthetic oligonucleotide
  Target: LAMA2; (-) strand; PAM type: NRG; PAM sequence: TAG
tactgcctagttacaaccta

SEQ ID NO: 92800 - DNA, 20 bp, Artificial Sequence
  Description of Artificial Sequence: Synthetic oligonucleotide
  Target: LAMA2; (-) strand; PAM type: NRG; PAM sequence: TAG
tccagataacttttactgcc

SEQ ID NO: 92801 - DNA, 20 bp, Artificial Sequence
  Description of Artificial Sequence: Synthetic oligonucleotide
  Target: LAMA2; (-) strand; PAM type: NRG; PAM sequence: CAG
cattgttatttgcttctctc

SEQ ID NO: 92802 - DNA, 20 bp, Artificial Sequence
  Description of Artificial Sequence: Synthetic oligonucleotide
  Target: LAMA2; (-) strand; PAM type: NRG; PAM sequence: TAG
aagaatataaacattcgaaa

SEQ ID NO: 92803 - DNA, 20 bp, Artificial Sequence
  Description of Artificial Sequence: Synthetic oligonucleotide
  Target: LAMA2; (-) strand; PAM type: NRG; PAM sequence: AAG
ctatgtgatgccagaaatta

SEQ ID NO: 92804 - DNA, 20 bp, Artificial Sequence
  Description of Artificial Sequence: Synthetic oligonucleotide
  Target: LAMA2; (-) strand; PAM type: NRG; PAM sequence: CAG
acctataagctatgtgatgc

SEQ ID NO: 92805 - DNA, 20 bp, Artificial Sequence
  Description of Artificial Sequence: Synthetic oligonucleotide
  Target: LAMA2; (-) strand; PAM type: NRG; PAM sequence: AAG
tcatattttatttaacctat

SEQ ID NO: 92806 - DNA, 20 bp, Artificial Sequence
  Description of Artificial Sequence: Synthetic oligonucleotide
  Target: LAMA2; (-) strand; PAM type: NRG; PAM sequence: GAG
atcctaagtattcaaaggca

SEQ ID NO: 92807 - DNA, 20 bp, Artificial Sequence
  Description of Artificial Sequence: Synthetic oligonucleotide
  Target: LAMA2; (-) strand; PAM type: NRG; PAM sequence: CAG
acatcctaagtattcaaagg

SEQ ID NO: 92808 - DNA, 20 bp, Artificial Sequence
  Description of Artificial Sequence: Synthetic oligonucleotide
  Target: LAMA2; (-) strand; PAM type: NRG; PAM sequence: AGG
aacacatcctaagtattcaa

SEQ ID NO: 92809 - DNA, 20 bp, Artificial Sequence
  Description of Artificial Sequence: Synthetic oligonucleotide
  Target: LAMA2; (-) strand; PAM type: NRG; PAM sequence: AAG
aaacacatcctaagtattca

SEQ ID NO: 92810 - DNA, 20 bp, Artificial Sequence
  Description of Artificial Sequence: Synthetic oligonucleotide
  Target: LAMA2; (-) strand; PAM type: NRG; PAM sequence: AAG
tatatattcaaacacatcct

SEQ ID NO: 92811 - DNA, 20 bp, Artificial Sequence
  Description of Artificial Sequence: Synthetic oligonucleotide
  Target: LAMA2; (-) strand; PAM type: NRG; PAM sequence: CAG
attgaggtcctatctctgtc

SEQ ID NO: 92812 - DNA, 20 bp, Artificial Sequence
  Description of Artificial Sequence: Synthetic oligonucleotide
  Target: LAMA2; (-) strand; PAM type: NRG; PAM sequence: AGG
ttagtagatagaacttattg

SEQ ID NO: 92813 - DNA, 20 bp, Artificial Sequence
  Description of Artificial Sequence: Synthetic oligonucleotide
  Target: LAMA2; (-) strand; PAM type: NRG; PAM sequence: GAG
attagtagatagaacttatt

SEQ ID NO: 92814 - DNA, 20 bp, Artificial Sequence
  Description of Artificial Sequence: Synthetic oligonucleotide
  Target: LAMA2; (-) strand; PAM type: NRG; PAM sequence: TAG
tttacagtgatattagtaga

SEQ ID NO: 92815 - DNA, 20 bp, Artificial Sequence
  Description of Artificial Sequence: Synthetic oligonucleotide
  Target: LAMA2; (-) strand; PAM type: NRG; PAM sequence: TAG
agtatttacagtgatattag

SEQ ID NO: 92816 - DNA, 20 bp, Artificial Sequence
  Description of Artificial Sequence: Synthetic oligonucleotide
  Target: LAMA2; (-) strand; PAM type: NRG; PAM sequence: TAG
agtagtatttacagtgatat

SEQ ID NO: 92817 - DNA, 20 bp, Artificial Sequence
  Description of Artificial Sequence: Synthetic oligonucleotide
  Target: LAMA2; (-) strand; PAM type: NRG; PAM sequence: CAG
acacaaaccagtagtattta

SEQ ID NO: 92818 - DNA, 20 bp, Artificial Sequence
  Description of Artificial Sequence: Synthetic oligonucleotide
  Target: LAMA2; (-) strand; PAM type: NRG; PAM sequence: TAG
tcctgacccacacaaaccag

SEQ ID NO: 92819 - DNA, 20 bp, Artificial Sequence
  Description of Artificial Sequence: Synthetic oligonucleotide
  Target: LAMA2; (-) strand; PAM type: NRG; PAM sequence: CAG
cattcctgacccacacaaac

SEQ ID NO: 92820 - DNA, 20 bp, Artificial Sequence
  Description of Artificial Sequence: Synthetic oligonucleotide
  Target: LAMA2; (-) strand; PAM type: NRG; PAM sequence: CAG
tctttcaaaaacttaaattt

SEQ ID NO: 92821 - DNA, 20 bp, Artificial Sequence
  Description of Artificial Sequence: Synthetic oligonucleotide
  Target: LAMA2; (-) strand; PAM type: NRG; PAM sequence: GAG
ccaaaggtcaactcaaattt

SEQ ID NO: 92822 - DNA, 20 bp, Artificial Sequence
  Description of Artificial Sequence: Synthetic oligonucleotide
  Target: LAMA2; (-) strand; PAM type: NRG; PAM sequence: AGG
gatctcttgagtgagcccaa

SEQ ID NO: 92823 - DNA, 20 bp, Artificial Sequence
  Description of Artificial Sequence: Synthetic oligonucleotide
  Target: LAMA2; (-) strand; PAM type: NRG; PAM sequence: AAG
tgatctcttgagtgagccca

SEQ ID NO: 92824 - DNA, 20 bp, Artificial Sequence
  Description of Artificial Sequence: Synthetic oligonucleotide
  Target: LAMA2; (-) strand; PAM type: NRG; PAM sequence: GAG
ttcaatatgatctcttgagt

SEQ ID NO: 92825 - DNA, 20 bp, Artificial Sequence
  Description of Artificial Sequence: Synthetic oligonucleotide
  Target: LAMA2; (-) strand; PAM type: NRG; PAM sequence: GAG
tgcattcaatatgatctctt

SEQ ID NO: 92826 - DNA, 20 bp, Artificial Sequence
  Description of Artificial Sequence: Synthetic oligonucleotide
  Target: LAMA2; (-) strand; PAM type: NRG; PAM sequence: TGG
cttaaatttacctattgtct

SEQ ID NO: 92827 - DNA, 20 bp, Artificial Sequence
  Description of Artificial Sequence: Synthetic oligonucleotide
  Target: LAMA2; (-) strand; PAM type: NRG; PAM sequence: TGG
tctcaattttctagagaata

SEQ ID NO: 92828 - DNA, 20 bp, Artificial Sequence
  Description of Artificial Sequence: Synthetic oligonucleotide
  Target: LAMA2; (-) strand; PAM type: NRG; PAM sequence: GAG
agagcattctcaattttcta

SEQ ID NO: 92829 - DNA, 20 bp, Artificial Sequence
  Description of Artificial Sequence: Synthetic oligonucleotide
  Target: LAMA2; (-) strand; PAM type: NRG; PAM sequence: TAG
ctagagcattctcaattttc

SEQ ID NO: 92830 - DNA, 20 bp, Artificial Sequence
  Description of Artificial Sequence: Synthetic oligonucleotide
  Target: LAMA2; (-) strand; PAM type: NRG; PAM sequence: GAG
aaagagcactaaaacatcta

SEQ ID NO: 92831 - DNA, 20 bp, Artificial Sequence
  Description of Artificial Sequence: Synthetic oligonucleotide
  Target: LAMA2; (-) strand; PAM type: NRG; PAM sequence: TAG
ggaaagagcactaaaacatc

SEQ ID NO: 92832 - DNA, 20 bp, Artificial Sequence
  Description of Artificial Sequence: Synthetic oligonucleotide
  Target: LAMA2; (-) strand; PAM type: NRG; PAM sequence: GAG
ataaaacaatgtgtaggaaa

SEQ ID NO: 92833 - DNA, 20 bp, Artificial Sequence
  Description of Artificial Sequence: Synthetic oligonucleotide
  Target: LAMA2; (-) strand; PAM type: NRG; PAM sequence: AAG
acataaaacaatgtgtagga

SEQ ID NO: 92834 - DNA, 20 bp, Artificial Sequence
  Description of Artificial Sequence: Synthetic oligonucleotide
  Target: LAMA2; (-) strand; PAM type: NRG; PAM sequence: AGG
gtgcacataaaacaatgtgt

SEQ ID NO: 92835 - DNA, 20 bp, Artificial Sequence
  Description of Artificial Sequence: Synthetic oligonucleotide
  Target: LAMA2; (-) strand; PAM type: NRG; PAM sequence: TAG
tgtgcacataaaacaatgtg

SEQ ID NO: 92836 - DNA, 20 bp, Artificial Sequence
  Description of Artificial Sequence: Synthetic oligonucleotide
  Target: LAMA2; (-) strand; PAM type: NRG; PAM sequence: AAG
ctttggcatatggaaccagg

SEQ ID NO: 92837 - DNA, 20 bp, Artificial Sequence
  Description of Artificial Sequence: Synthetic oligonucleotide
  Target: LAMA2; (-) strand; PAM type: NRG; PAM sequence: AGG
ttcctttggcatatggaacc

SEQ ID NO: 92838 - DNA, 20 bp, Artificial Sequence
  Description of Artificial Sequence: Synthetic oligonucleotide
  Target: LAMA2; (-) strand; PAM type: NRG; PAM sequence: CAG
tttcctttggcatatggaac

SEQ ID NO: 92839 - DNA, 20 bp, Artificial Sequence
  Description of Artificial Sequence: Synthetic oligonucleotide
  Target: LAMA2; (-) strand; PAM type: NRG; PAM sequence: TGG
tagttttttcctttggcata

SEQ ID NO: 92840 - DNA, 20 bp, Artificial Sequence
  Description of Artificial Sequence: Synthetic oligonucleotide
  Target: LAMA2; (-) strand; PAM type: NRG; PAM sequence: TGG
tgaactttagttttttcctt

SEQ ID NO: 92841 - DNA, 20 bp, Artificial Sequence
  Description of Artificial Sequence: Synthetic oligonucleotide
  Target: LAMA2; (-) strand; PAM type: NRG; PAM sequence: TAG
cacttaatttctctgaactt

SEQ ID NO: 92842 - DNA, 20 bp, Artificial Sequence
  Description of Artificial Sequence: Synthetic oligonucleotide
  Target: LAMA2; (-) strand; PAM type: NRG; PAM sequence: AGG
aagctgtataatcactatca

SEQ ID NO: 92843 - DNA, 20 bp, Artificial Sequence
  Description of Artificial Sequence: Synthetic oligonucleotide
  Target: LAMA2; (-) strand; PAM type: NRG; PAM sequence: AAG
caagctgtataatcactatc

SEQ ID NO: 92844 - DNA, 20 bp, Artificial Sequence
  Description of Artificial Sequence: Synthetic oligonucleotide
  Target: LAMA2; (-) strand; PAM type: NRG; PAM sequence: AAG
atattggttctgccacaagc

SEQ ID NO: 92845 - DNA, 20 bp, Artificial Sequence
  Description of Artificial Sequence: Synthetic oligonucleotide
  Target: LAMA2; (-) strand; PAM type: NRG; PAM sequence: AAG
tccaatattggttctgccac

SEQ ID NO: 92846 - DNA, 20 bp, Artificial Sequence
  Description of Artificial Sequence: Synthetic oligonucleotide
  Target: LAMA2; (-) strand; PAM type: NRG; PAM sequence: TGG
aaatatatgagttccaatat

SEQ ID NO: 92847 - DNA, 20 bp, Artificial Sequence
  Description of Artificial Sequence: Synthetic oligonucleotide
  Target: LAMA2; (-) strand; PAM type: NRG; PAM sequence: GAG
agaggtgagtcaaaatatat

SEQ ID NO: 92848 - DNA, 20 bp, Artificial Sequence
  Description of Artificial Sequence: Synthetic oligonucleotide
  Target: LAMA2; (-) strand; PAM type: NRG; PAM sequence: GAG
tggaagaagcacagagaggt

SEQ ID NO: 92849 - DNA, 20 bp, Artificial Sequence
  Description of Artificial Sequence: Synthetic oligonucleotide
  Target: LAMA2; (-) strand; PAM type: NRG; PAM sequence: AGG
ccattggaagaagcacagag

SEQ ID NO: 92850 - DNA, 20 bp, Artificial Sequence
  Description of Artificial Sequence: Synthetic oligonucleotide
  Target: LAMA2; (-) strand; PAM type: NRG; PAM sequence: GAG
cccattggaagaagcacaga

SEQ ID NO: 92851 - DNA, 20 bp, Artificial Sequence
  Description of Artificial Sequence: Synthetic oligonucleotide
  Target: LAMA2; (-) strand; PAM type: NRG; PAM sequence: GAG
gccccattggaagaagcaca

SEQ ID NO: 92852 - DNA, 20 bp, Artificial Sequence
  Description of Artificial Sequence: Synthetic oligonucleotide
  Target: LAMA2; (-) strand; PAM type: NRG; PAM sequence: CAG
tagccccattggaagaagca

SEQ ID NO: 92853 - DNA, 20 bp, Artificial Sequence
  Description of Artificial Sequence: Synthetic oligonucleotide
  Target: LAMA2; (-) strand; PAM type: NRG; PAM sequence: AAG
tactgtagccccattggaag

SEQ ID NO: 92854 - DNA, 20 bp, Artificial Sequence
  Description of Artificial Sequence: Synthetic oligonucleotide
  Target: LAMA2; (-) strand; PAM type: NRG; PAM sequence: AAG
tattactgtagccccattgg

SEQ ID NO: 92855 - DNA, 20 bp, Artificial Sequence
  Description of Artificial Sequence: Synthetic oligonucleotide
  Target: LAMA2; (-) strand; PAM type: NRG; PAM sequence: TGG
ttctattactgtagccccat

SEQ ID NO: 92856 - DNA, 20 bp, Artificial Sequence
  Description of Artificial Sequence: Synthetic oligonucleotide
  Target: LAMA2; (-) strand; PAM type: NRG; PAM sequence: TAG
tgtaattgtttctattactg

SEQ ID NO: 92857 - DNA, 20 bp, Artificial Sequence
  Description of Artificial Sequence: Synthetic oligonucleotide
  Target: LAMA2; (-) strand; PAM type: NRG; PAM sequence: CAG
atttttacagtgaacattta

SEQ ID NO: 92858 - DNA, 20 bp, Artificial Sequence
  Description of Artificial Sequence: Synthetic oligonucleotide
  Target: LAMA2; (-) strand; PAM type: NRG; PAM sequence: CAG
tgaagatttactgattttta

SEQ ID NO: 92859 - DNA, 20 bp, Artificial Sequence
  Description of Artificial Sequence: Synthetic oligonucleotide
  Target: LAMA2; (-) strand; PAM type: NRG; PAM sequence: AAG
ataactcttgccaaacagtg

SEQ ID NO: 92860 - DNA, 20 bp, Artificial Sequence
  Description of Artificial Sequence: Synthetic oligonucleotide
  Target: LAMA2; (-) strand; PAM type: NRG; PAM sequence: CAG
ttaacataactcttgccaaa

SEQ ID NO: 92861 - DNA, 20 bp, Artificial Sequence
  Description of Artificial Sequence: Synthetic oligonucleotide
  Target: LAMA2; (-) strand; PAM type: NRG; PAM sequence: TAG
ttaatataactgtaactatg

SEQ ID NO: 92862 - DNA, 20 bp, Artificial Sequence
  Description of Artificial Sequence: Synthetic oligonucleotide
  Target: LAMA2; (-) strand; PAM type: NRG; PAM sequence: TAG
tctagtcccttatattaaca

SEQ ID NO: 92863 - DNA, 20 bp, Artificial Sequence
  Description of Artificial Sequence: Synthetic oligonucleotide
  Target: LAMA2; (-) strand; PAM type: NRG; PAM sequence: TAG
gcagttttctcatcctgctc

SEQ ID NO: 92864 - DNA, 20 bp, Artificial Sequence
  Description of Artificial Sequence: Synthetic oligonucleotide
  Target: LAMA2; (-) strand; PAM type: NRG; PAM sequence: CAG
tagttaaagaattaaatctg

SEQ ID NO: 92865 - DNA, 20 bp, Artificial Sequence
  Description of Artificial Sequence: Synthetic oligonucleotide
  Target: LAMA2; (-) strand; PAM type: NRG; PAM sequence: AAG
aggtatttagttaatagtta

SEQ ID NO: 92866 - DNA, 20 bp, Artificial Sequence
  Description of Artificial Sequence: Synthetic oligonucleotide
  Target: LAMA2; (-) strand; PAM type: NRG; PAM sequence: TAG
cgtgaaaggtatttagttaa

SEQ ID NO: 92867 - DNA, 20 bp, Artificial Sequence
  Description of Artificial Sequence: Synthetic oligonucleotide
  Target: LAMA2; (-) strand; PAM type: NRG; PAM sequence: TAG
gatttaacgtgaaaggtatt

SEQ ID NO: 92868 - DNA, 20 bp, Artificial Sequence
  Description of Artificial Sequence: Synthetic oligonucleotide
  Target: LAMA2; (-) strand; PAM type: NRG; PAM sequence: AGG
atatgttgatttaacgtgaa

SEQ ID NO: 92869 - DNA, 20 bp, Artificial Sequence
  Description of Artificial Sequence: Synthetic oligonucleotide
  Target: LAMA2; (-) strand; PAM type: NRG; PAM sequence: AAG
gatatgttgatttaacgtga

SEQ ID NO: 92870 - DNA, 20 bp, Artificial Sequence
  Description of Artificial Sequence: Synthetic oligonucleotide
  Target: LAMA2; (-) strand; PAM type: NRG; PAM sequence: AAG
tacaaatttttaaacaaaat

SEQ ID NO: 92871 - DNA, 20 bp, Artificial Sequence
  Description of Artificial Sequence: Synthetic oligonucleotide
  Target: LAMA2; (-) strand; PAM type: NRG; PAM sequence: TAG
catattgccataataaatta

SEQ ID NO: 92872 - DNA, 20 bp, Artificial Sequence
  Description of Artificial Sequence: Synthetic oligonucleotide
  Target: LAMA2; (-) strand; PAM type: NRG; PAM sequence: AAG
tttatactgaaaaagtatga

SEQ ID NO: 92873 - DNA, 20 bp, Artificial Sequence
  Description of Artificial Sequence: Synthetic oligonucleotide
  Target: LAMA2; (-) strand; PAM type: NRG; PAM sequence: AAG
taaacccttttatactgaaa

SEQ ID NO: 92874 - DNA, 20 bp, Artificial Sequence
  Description of Artificial Sequence: Synthetic oligonucleotide
  Target: LAMA2; (-) strand; PAM type: NRG; PAM sequence: TGG
ctgtttcccattctgcaaaa

SEQ ID NO: 92875 - DNA, 20 bp, Artificial Sequence
  Description of Artificial Sequence: Synthetic oligonucleotide
  Target: LAMA2; (-) strand; PAM type: NRG; PAM sequence: AAG
ttagacttgatttattttct

SEQ ID NO: 92876 - DNA, 20 bp, Artificial Sequence
  Description of Artificial Sequence: Synthetic oligonucleotide
  Target: LAMA2; (-) strand; PAM type: NRG; PAM sequence: TAG
ccacaattgcatttcttaat

SEQ ID NO: 92877 - DNA, 20 bp, Artificial Sequence
  Description of Artificial Sequence: Synthetic oligonucleotide
  Target: LAMA2; (-) strand; PAM type: NRG; PAM sequence: AAG
ttatttctttaattaccttt

SEQ ID NO: 92878 - DNA, 20 bp, Artificial Sequence
  Description of Artificial Sequence: Synthetic oligonucleotide
  Target: LAMA2; (-) strand; PAM type: NRG; PAM sequence: AAG
ttattctcaggagaatcatt

SEQ ID NO: 92879 - DNA, 20 bp, Artificial Sequence
  Description of Artificial Sequence: Synthetic oligonucleotide
  Target: LAMA2; (-) strand; PAM type: NRG; PAM sequence: GAG
tctctcctacttattctcag

SEQ ID NO: 92880 - DNA, 20 bp, Artificial Sequence
  Description of Artificial Sequence: Synthetic oligonucleotide
  Target: LAMA2; (-) strand; PAM type: NRG; PAM sequence: AGG
gatctctcctacttattctc

SEQ ID NO: 92881 - DNA, 20 bp, Artificial Sequence
  Description of Artificial Sequence: Synthetic oligonucleotide
  Target: LAMA2; (-) strand; PAM type: NRG; PAM sequence: CAG
tgatctctcctacttattct

SEQ ID NO: 92882 - DNA, 20 bp, Artificial Sequence
  Description of Artificial Sequence: Synthetic oligonucleotide
  Target: LAMA2; (-) strand; PAM type: NRG; PAM sequence: CAG
tttctaagtattttcttctt

SEQ ID NO: 92883 - DNA, 20 bp, Artificial Sequence
  Description of Artificial Sequence: Synthetic oligonucleotide
  Target: LAMA2; (-) strand; PAM type: NRG; PAM sequence: AAG
cataaatttctgaagtttct

SEQ ID NO: 92884 - DNA, 20 bp, Artificial Sequence
  Description of Artificial Sequence: Synthetic oligonucleotide
  Target: LAMA2; (-) strand; PAM type: NRG; PAM sequence: AAG
gttagcgtcataaatttctg

SEQ ID NO: 92885 - DNA, 20 bp, Artificial Sequence
  Description of Artificial Sequence: Synthetic oligonucleotide
  Target: LAMA2; (-) strand; PAM type: NRG; PAM sequence: TAG
ttacttcatgattttggtgt

SEQ ID NO: 92886 - DNA, 20 bp, Artificial Sequence
  Description of Artificial Sequence: Synthetic oligonucleotide
  Target: LAMA2; (-) strand; PAM type: NRG; PAM sequence: TGG
attcatttacttcatgattt

SEQ ID NO: 92887 - DNA, 20 bp, Artificial Sequence
  Description of Artificial Sequence: Synthetic oligonucleotide
  Target: LAMA2; (-) strand; PAM type: NRG; PAM sequence: AAG
actgagaggaagaggagaaa

SEQ ID NO: 92888 - DNA, 20 bp, Artificial Sequence
  Description of Artificial Sequence: Synthetic oligonucleotide
  Target: LAMA2; (-) strand; PAM type: NRG; PAM sequence: GAG
gcagggactgagaggaagag

SEQ ID NO: 92889 - DNA, 20 bp, Artificial Sequence
  Description of Artificial Sequence: Synthetic oligonucleotide
  Target: LAMA2; (-) strand; PAM type: NRG; PAM sequence: AGG
gggcagggactgagaggaag

SEQ ID NO: 92890 - DNA, 20 bp, Artificial Sequence
  Description of Artificial Sequence: Synthetic oligonucleotide
  Target: LAMA2; (-) strand; PAM type: NRG; PAM sequence: GAG
ggggcagggactgagaggaa

SEQ ID NO: 92891 - DNA, 20 bp, Artificial Sequence
  Description of Artificial Sequence: Synthetic oligonucleotide
  Target: LAMA2; (-) strand; PAM type: NRG; PAM sequence: AAG
aaggggcagggactgagagg

SEQ ID NO: 92892 - DNA, 20 bp, Artificial Sequence
  Description of Artificial Sequence: Synthetic oligonucleotide
  Target: LAMA2; (-) strand; PAM type: NRG; PAM sequence: AGG
gaaaaggggcagggactgag

SEQ ID NO: 92893 - DNA, 20 bp, Artificial Sequence
  Description of Artificial Sequence: Synthetic oligonucleotide
  Target: LAMA2; (-) strand; PAM type: NRG; PAM sequence: GAG
tgaaaaggggcagggactga

SEQ ID NO: 92894 - DNA, 20 bp, Artificial Sequence
  Description of Artificial Sequence: Synthetic oligonucleotide
  Target: LAMA2; (-) strand; PAM type: NRG; PAM sequence: GAG
actgaaaaggggcagggact

SEQ ID NO: 92895 - DNA, 20 bp, Artificial Sequence
  Description of Artificial Sequence: Synthetic oligonucleotide
  Target: LAMA2; (-) strand; PAM type: NRG; PAM sequence: GGG
cacataactgaaaaggggca

SEQ ID NO: 92896 - DNA, 20 bp, Artificial Sequence
  Description of Artificial Sequence: Synthetic oligonucleotide
  Target: LAMA2; (-) strand; PAM type: NRG; PAM sequence: AGG
acacataactgaaaaggggc

SEQ ID NO: 92897 - DNA, 20 bp, Artificial Sequence
  Description of Artificial Sequence: Synthetic oligonucleotide
  Target: LAMA2; (-) strand; PAM type: NRG; PAM sequence: CAG
cacacataactgaaaagggg

SEQ ID NO: 92898 - DNA, 20 bp, Artificial Sequence
  Description of Artificial Sequence: Synthetic oligonucleotide
  Target: LAMA2; (-) strand; PAM type: NRG; PAM sequence: GGG
attcacacataactgaaaag

SEQ ID NO: 92899 - DNA, 20 bp, Artificial Sequence
  Description of Artificial Sequence: Synthetic oligonucleotide
  Target: LAMA2; (-) strand; PAM type: NRG; PAM sequence: GGG
tattcacacataactgaaaa

SEQ ID NO: 92900 - DNA, 20 bp, Artificial Sequence
  Description of Artificial Sequence: Synthetic oligonucleotide
  Target: LAMA2; (-) strand; PAM type: NRG; PAM sequence: AGG
atattcacacataactgaaa

SEQ ID NO: 92901 - DNA, 20 bp, Artificial Sequence
  Description of Artificial Sequence: Synthetic oligonucleotide
  Target: LAMA2; (-) strand; PAM type: NRG; PAM sequence: AAG
aatattcacacataactgaa

SEQ ID NO: 92902 - DNA, 20 bp, Artificial Sequence
  Description of Artificial Sequence: Synthetic oligonucleotide
  Target: LAMA2; (-) strand; PAM type: NRG; PAM sequence: GAG
aagctggagatgagggtaat

SEQ ID NO: 92903 - DNA, 20 bp, Artificial Sequence
  Description of Artificial Sequence: Synthetic oligonucleotide
  Target: LAMA2; (-) strand; PAM type: NRG; PAM sequence: GGG
agtggagaagctggagatga

SEQ ID NO: 92904 - DNA, 20 bp, Artificial Sequence
  Description of Artificial Sequence: Synthetic oligonucleotide
  Target: LAMA2; (-) strand; PAM type: NRG; PAM sequence: AGG
cagtggagaagctggagatg

SEQ ID NO: 92905 - DNA, 20 bp, Artificial Sequence
  Description of Artificial Sequence: Synthetic oligonucleotide
  Target: LAMA2; (-) strand; PAM type: NRG; PAM sequence: GAG
tcagtggagaagctggagat

SEQ ID NO: 92906 - DNA, 20 bp, Artificial Sequence
  Description of Artificial Sequence: Synthetic oligonucleotide
  Target: LAMA2; (-) strand; PAM type: NRG; PAM sequence: GAG
caatgtcagtggagaagctg

SEQ ID NO: 92907 - DNA, 20 bp, Artificial Sequence
  Description of Artificial Sequence: Synthetic oligonucleotide
  Target: LAMA2; (-) strand; PAM type: NRG; PAM sequence: TGG
cacaatgtcagtggagaagc

SEQ ID NO: 92908 - DNA, 20 bp, Artificial Sequence
  Description of Artificial Sequence: Synthetic oligonucleotide
  Target: LAMA2; (-) strand; PAM type: NRG; PAM sequence: AAG
gctacacaatgtcagtggag

SEQ ID NO: 92909 - DNA, 20 bp, Artificial Sequence
  Description of Artificial Sequence: Synthetic oligonucleotide
  Target: LAMA2; (-) strand; PAM type: NRG; PAM sequence: GAG
gtggctacacaatgtcagtg

SEQ ID NO: 92910 - DNA, 20 bp, Artificial Sequence
  Description of Artificial Sequence: Synthetic oligonucleotide
  Target: LAMA2; (-) strand; PAM type: NRG; PAM sequence: TGG
gagtggctacacaatgtcag

SEQ ID NO: 92911 - DNA, 20 bp, Artificial Sequence
  Description of Artificial Sequence: Synthetic oligonucleotide
  Target: LAMA2; (-) strand; PAM type: NRG; PAM sequence: CAG
tttgagtggctacacaatgt

SEQ ID NO: 92912 - DNA, 20 bp, Artificial Sequence
  Description of Artificial Sequence: Synthetic oligonucleotide
  Target: LAMA2; (-) strand; PAM type: NRG; PAM sequence: TGG
ataagagaaaccattttgag

SEQ ID NO: 92913 - DNA, 20 bp, Artificial Sequence
  Description of Artificial Sequence: Synthetic oligonucleotide
  Target: LAMA2; (-) strand; PAM type: NRG; PAM sequence: GAG
aggataagagaaaccatttt

SEQ ID NO: 92914 - DNA, 20 bp, Artificial Sequence
  Description of Artificial Sequence: Synthetic oligonucleotide
  Target: LAMA2; (-) strand; PAM type: NRG; PAM sequence: GAG
tgaacagttgggtaggataa

SEQ ID NO: 92915 - DNA, 20 bp, Artificial Sequence
  Description of Artificial Sequence: Synthetic oligonucleotide
  Target: LAMA2; (-) strand; PAM type: NRG; PAM sequence: AAG
cttgaacagttgggtaggat

SEQ ID NO: 92916 - DNA, 20 bp, Artificial Sequence
  Description of Artificial Sequence: Synthetic oligonucleotide
  Target: LAMA2; (-) strand; PAM type: NRG; PAM sequence: AGG
attatcttgaacagttgggt

SEQ ID NO: 92917 - DNA, 20 bp, Artificial Sequence
  Description of Artificial Sequence: Synthetic oligonucleotide
  Target: LAMA2; (-) strand; PAM type: NRG; PAM sequence: TAG
tattatcttgaacagttggg

SEQ ID NO: 92918 - DNA, 20 bp, Artificial Sequence
  Description of Artificial Sequence: Synthetic oligonucleotide
  Target: LAMA2; (-) strand; PAM type: NRG; PAM sequence: GGG
aattattatcttgaacagtt

SEQ ID NO: 92919 - DNA, 20 bp, Artificial Sequence
  Description of Artificial Sequence: Synthetic oligonucleotide
  Target: LAMA2; (-) strand; PAM type: NRG; PAM sequence: TGG
taattattatcttgaacagt

SEQ ID NO: 92920 - DNA, 20 bp, Artificial Sequence
  Description of Artificial Sequence: Synthetic oligonucleotide
  Target: LAMA2; (-) strand; PAM type: NRG; PAM sequence: CAG
caactaattattatcttgaa

SEQ ID NO: 92921 - DNA, 20 bp, Artificial Sequence
  Description of Artificial Sequence: Synthetic oligonucleotide
  Target: LAMA2; (-) strand; PAM type: NRG; PAM sequence: AGG
tgcatacacaacaggggatc

SEQ ID NO: 92922 - DNA, 20 bp, Artificial Sequence
  Description of Artificial Sequence: Synthetic oligonucleotide
  Target: LAMA2; (-) strand; PAM type: NRG; PAM sequence: CAG
ttgcatacacaacaggggat

SEQ ID NO: 92923 - DNA, 20 bp, Artificial Sequence
  Description of Artificial Sequence: Synthetic oligonucleotide
  Target: LAMA2; (-) strand; PAM type: NRG; PAM sequence: GGG
tgtatttgcatacacaacag

SEQ ID NO: 92924 - DNA, 20 bp, Artificial Sequence
  Description of Artificial Sequence: Synthetic oligonucleotide
  Target: LAMA2; (-) strand; PAM type: NRG; PAM sequence: GGG
ctgtatttgcatacacaaca

SEQ ID NO: 92925 - DNA, 20 bp, Artificial Sequence
  Description of Artificial Sequence: Synthetic oligonucleotide
  Target: LAMA2; (-) strand; PAM type: NRG; PAM sequence: AGG
tctgtatttgcatacacaac

SEQ ID NO: 92926 - DNA, 20 bp, Artificial Sequence
  Description of Artificial Sequence: Synthetic oligonucleotide
  Target: LAMA2; (-) strand; PAM type: NRG; PAM sequence: CAG
ttctgtatttgcatacacaa

SEQ ID NO: 92927 - DNA, 20 bp, Artificial Sequence
  Description of Artificial Sequence: Synthetic oligonucleotide
  Target: LAMA2; (-) strand; PAM type: NRG; PAM sequence: GGG
tcattagggttagaaaatca

SEQ ID NO: 92928 - DNA, 20 bp, Artificial Sequence
  Description of Artificial Sequence: Synthetic oligonucleotide
  Target: LAMA2; (-) strand; PAM type: NRG; PAM sequence: AGG
atcattagggttagaaaatc

SEQ ID NO: 92929 - DNA, 20 bp, Artificial Sequence
  Description of Artificial Sequence: Synthetic oligonucleotide
  Target: LAMA2; (-) strand; PAM type: NRG; PAM sequence: CAG
catcattagggttagaaaat

SEQ ID NO: 92930 - DNA, 20 bp, Artificial Sequence
  Description of Artificial Sequence: Synthetic oligonucleotide
  Target: LAMA2; (-) strand; PAM type: NRG; PAM sequence: TAG
aaaacttccatcattagggt

SEQ ID NO: 92931 - DNA, 20 bp, Artificial Sequence
  Description of Artificial Sequence: Synthetic oligonucleotide
  Target: LAMA2; (-) strand; PAM type: NRG; PAM sequence: GGG
aattaaaacttccatcatta

SEQ ID NO: 92932 - DNA, 20 bp, Artificial Sequence
  Description of Artificial Sequence: Synthetic oligonucleotide
  Target: LAMA2; (-) strand; PAM type: NRG; PAM sequence: AGG
aaattaaaacttccatcatt

SEQ ID NO: 92933 - DNA, 20 bp, Artificial Sequence
  Description of Artificial Sequence: Synthetic oligonucleotide
  Target: LAMA2; (-) strand; PAM type: NRG; PAM sequence: TAG
aaaattaaaacttccatcat

SEQ ID NO: 92934 - DNA, 20 bp, Artificial Sequence
  Description of Artificial Sequence: Synthetic oligonucleotide
  Target: LAMA2; (-) strand; PAM type: NRG; PAM sequence: GGG
acaagcactcctttaatcat

SEQ ID NO: 92935 - DNA, 20 bp, Artificial Sequence
  Description of Artificial Sequence: Synthetic oligonucleotide
  Target: LAMA2; (-) strand; PAM type: NRG; PAM sequence: TGG
aacaagcactcctttaatca

SEQ ID NO: 92936 - DNA, 20 bp, Artificial Sequence
  Description of Artificial Sequence: Synthetic oligonucleotide
  Target: LAMA2; (-) strand; PAM type: NRG; PAM sequence: AAG
gattgtatgtgatataaaac

SEQ ID NO: 92937 - DNA, 20 bp, Artificial Sequence
  Description of Artificial Sequence: Synthetic oligonucleotide
  Target: LAMA2; (-) strand; PAM type: NRG; PAM sequence: GGG
aatataatgaattgcttctt

SEQ ID NO: 92938 - DNA, 20 bp, Artificial Sequence
  Description of Artificial Sequence: Synthetic oligonucleotide
  Target: LAMA2; (-) strand; PAM type: NRG; PAM sequence: TGG
aaatataatgaattgcttct

SEQ ID NO: 92939 - DNA, 20 bp, Artificial Sequence
  Description of Artificial Sequence: Synthetic oligonucleotide
  Target: LAMA2; (-) strand; PAM type: NRG; PAM sequence: GAG
cacatattaagtcaatgtgt

SEQ ID NO: 92940 - DNA, 20 bp, Artificial Sequence
  Description of Artificial Sequence: Synthetic oligonucleotide
  Target: LAMA2; (-) strand; PAM type: NRG; PAM sequence: AAG
aataaaattaaacacatatt

SEQ ID NO: 92941 - DNA, 20 bp, Artificial Sequence
  Description of Artificial Sequence: Synthetic oligonucleotide
  Target: LAMA2; (-) strand; PAM type: NRG; PAM sequence: GAG
acgttaaatgctcccacaga

SEQ ID NO: 92942 - DNA, 20 bp, Artificial Sequence
  Description of Artificial Sequence: Synthetic oligonucleotide
  Target: LAMA2; (-) strand; PAM type: NRG; PAM sequence: GAG
taacgttaaatgctcccaca

SEQ ID NO: 92943 - DNA, 20 bp, Artificial Sequence
  Description of Artificial Sequence: Synthetic oligonucleotide
  Target: LAMA2; (-) strand; PAM type: NRG; PAM sequence: CAG
tctaacgttaaatgctccca

SEQ ID NO: 92944 - DNA, 20 bp, Artificial Sequence
  Description of Artificial Sequence: Synthetic oligonucleotide
  Target: LAMA2; (-) strand; PAM type: NRG; PAM sequence: CAG
cttctgtgggtcctgaaatt

SEQ ID NO: 92945 - DNA, 20 bp, Artificial Sequence
  Description of Artificial Sequence: Synthetic oligonucleotide
  Target: LAMA2; (-) strand; PAM type: NRG; PAM sequence: GGG
tcttctgtgggtccttctgt

SEQ ID NO: 92946 - DNA, 20 bp, Artificial Sequence
  Description of Artificial Sequence: Synthetic oligonucleotide
  Target: LAMA2; (-) strand; PAM type: NRG; PAM sequence: TGG
ttcttctgtgggtccttctg

SEQ ID NO: 92947 - DNA, 20 bp, Artificial Sequence
  Description of Artificial Sequence: Synthetic oligonucleotide
  Target: LAMA2; (-) strand; PAM type: NRG; PAM sequence: GGG
attagggaaacttcttctgt

SEQ ID NO: 92948 - DNA, 20 bp, Artificial Sequence
  Description of Artificial Sequence: Synthetic oligonucleotide
  Target: LAMA2; (-) strand; PAM type: NRG; PAM sequence: TGG
cattagggaaacttcttctg

SEQ ID NO: 92949 - DNA, 20 bp, Artificial Sequence
  Description of Artificial Sequence: Synthetic oligonucleotide
  Target: LAMA2; (-) strand; PAM type: NRG; PAM sequence: GGG
ttcctgattatcagacatta

SEQ ID NO: 92950 - DNA, 20 bp, Artificial Sequence
  Description of Artificial Sequence: Synthetic oligonucleotide
  Target: LAMA2; (-) strand; PAM type: NRG; PAM sequence: AGG
attcctgattatcagacatt

SEQ ID NO: 92951 - DNA, 20 bp, Artificial Sequence
  Description of Artificial Sequence: Synthetic oligonucleotide
  Target: LAMA2; (-) strand; PAM type: NRG; PAM sequence: TAG
aattcctgattatcagacat

SEQ ID NO: 92952 - DNA, 20 bp, Artificial Sequence
  Description of Artificial Sequence: Synthetic oligonucleotide
  Target: LAMA2; (-) strand; PAM type: NRG; PAM sequence: CAG
gctcaacaattcctgattat

SEQ ID NO: 92953 - DNA, 20 bp, Artificial Sequence
  Description of Artificial Sequence: Synthetic oligonucleotide
  Target: LAMA2; (-) strand; PAM type: NRG; PAM sequence: AAG
gcaaaacaattgctcaatag

SEQ ID NO: 92954 - DNA, 20 bp, Artificial Sequence
  Description of Artificial Sequence: Synthetic oligonucleotide
  Target: LAMA2; (-) strand; PAM type: NRG; PAM sequence: TAG
aaagcaaaacaattgctcaa

SEQ ID NO: 92955 - DNA, 20 bp, Artificial Sequence
  Description of Artificial Sequence: Synthetic oligonucleotide
  Target: LAMA2; (-) strand; PAM type: NRG; PAM sequence: AAG
tcagagcagccagaagccaa

SEQ ID NO: 92956 - DNA, 20 bp, Artificial Sequence
  Description of Artificial Sequence: Synthetic oligonucleotide
  Target: LAMA2; (-) strand; PAM type: NRG; PAM sequence: AAG
aaatgattcagagcagccag

SEQ ID NO: 92957 - DNA, 20 bp, Artificial Sequence
  Description of Artificial Sequence: Synthetic oligonucleotide
  Target: LAMA2; (-) strand; PAM type: NRG; PAM sequence: CAG
ggtaaatgattcagagcagc

SEQ ID NO: 92958 - DNA, 20 bp, Artificial Sequence
  Description of Artificial Sequence: Synthetic oligonucleotide
  Target: LAMA2; (-) strand; PAM type: NRG; PAM sequence: CAG
aacaggtaaatgattcagag

SEQ ID NO: 92959 - DNA, 20 bp, Artificial Sequence
  Description of Artificial Sequence: Synthetic oligonucleotide
  Target: LAMA2; (-) strand; PAM type: NRG; PAM sequence: GAG
atcaacaggtaaatgattca

SEQ ID NO: 92960 - DNA, 20 bp, Artificial Sequence
  Description of Artificial Sequence: Synthetic oligonucleotide
  Target: LAMA2; (-) strand; PAM type: NRG; PAM sequence: CAG
caatcaacaggtaaatgatt

SEQ ID NO: 92961 - DNA, 20 bp, Artificial Sequence
  Description of Artificial Sequence: Synthetic oligonucleotide
  Target: LAMA2; (-) strand; PAM type: NRG; PAM sequence: AGG
tgcaaaagggaacaatcaac

SEQ ID NO: 92962 - DNA, 20 bp, Artificial Sequence
  Description of Artificial Sequence: Synthetic oligonucleotide
  Target: LAMA2; (-) strand; PAM type: NRG; PAM sequence: CAG
atgcaaaagggaacaatcaa

SEQ ID NO: 92963 - DNA, 20 bp, Artificial Sequence
  Description of Artificial Sequence: Synthetic oligonucleotide
  Target: LAMA2; (-) strand; PAM type: NRG; PAM sequence: GGG
ttttcacagctaatgcaaaa

SEQ ID NO: 92964 - DNA, 20 bp, Artificial Sequence
  Description of Artificial Sequence: Synthetic oligonucleotide
  Target: LAMA2; (-) strand; PAM type: NRG; PAM sequence: AGG
tttttcacagctaatgcaaa

SEQ ID NO: 92965 - DNA, 20 bp, Artificial Sequence
  Description of Artificial Sequence: Synthetic oligonucleotide
  Target: LAMA2; (-) strand; PAM type: NRG; PAM sequence: AAG
gtttttcacagctaatgcaa

SEQ ID NO: 92966 - DNA, 20 bp, Artificial Sequence
  Description of Artificial Sequence: Synthetic oligonucleotide
  Target: LAMA2; (-) strand; PAM type: NRG; PAM sequence: CAG
tttggctttgaggtttttca

SEQ ID NO: 92967 - DNA, 20 bp, Artificial Sequence
  Description of Artificial Sequence: Synthetic oligonucleotide
  Target: LAMA2; (-) strand; PAM type: NRG; PAM sequence: AGG
tggatcaacatttggctttg

SEQ ID NO: 92968 - DNA, 20 bp, Artificial Sequence
  Description of Artificial Sequence: Synthetic oligonucleotide
  Target: LAMA2; (-) strand; PAM type: NRG; PAM sequence: GAG
gtggatcaacatttggcttt

SEQ ID NO: 92969 - DNA, 20 bp, Artificial Sequence
  Description of Artificial Sequence: Synthetic oligonucleotide
  Target: LAMA2; (-) strand; PAM type: NRG; PAM sequence: TGG
gataagggtggatcaacatt

SEQ ID NO: 92970 - DNA, 20 bp, Artificial Sequence
  Description of Artificial Sequence: Synthetic oligonucleotide
  Target: LAMA2; (-) strand; PAM type: NRG; PAM sequence: TGG
atatgttcatttgataaggg

SEQ ID NO: 92971 - DNA, 20 bp, Artificial Sequence
  Description of Artificial Sequence: Synthetic oligonucleotide
  Target: LAMA2; (-) strand; PAM type: NRG; PAM sequence: GGG
aacatatgttcatttgataa

SEQ ID NO: 92972 - DNA, 20 bp, Artificial Sequence
  Description of Artificial Sequence: Synthetic oligonucleotide
  Target: LAMA2; (-) strand; PAM type: NRG; PAM sequence: AGG
taacatatgttcatttgata

SEQ ID NO: 92973 - DNA, 20 bp, Artificial Sequence
  Description of Artificial Sequence: Synthetic oligonucleotide
  Target: LAMA2; (-) strand; PAM type: NRG; PAM sequence: AAG
ataacatatgttcatttgat

SEQ ID NO: 92974 - DNA, 20 bp, Artificial Sequence
  Description of Artificial Sequence: Synthetic oligonucleotide
  Target: LAMA2; (-) strand; PAM type: NRG; PAM sequence: TAG
gataaacttaagggtgtatt

SEQ ID NO: 92975 - DNA, 20 bp, Artificial Sequence
  Description of Artificial Sequence: Synthetic oligonucleotide
  Target: LAMA2; (-) strand; PAM type: NRG; PAM sequence: GGG
taaaaaaaagataaacttaa

SEQ ID NO: 92976 - DNA, 20 bp, Artificial Sequence
  Description of Artificial Sequence: Synthetic oligonucleotide
  Target: LAMA2; (-) strand; PAM type: NRG; PAM sequence: AGG
ctaaaaaaaagataaactta

SEQ ID NO: 92977 - DNA, 20 bp, Artificial Sequence
  Description of Artificial Sequence: Synthetic oligonucleotide
  Target: LAMA2; (-) strand; PAM type: NRG; PAM sequence: AAG
actaaaaaaaagataaactt

SEQ ID NO: 92978 - DNA, 20 bp, Artificial Sequence
  Description of Artificial Sequence: Synthetic oligonucleotide
  Target: LAMA2; (-) strand; PAM type: NRG; PAM sequence: AAG
gagaaaaaaatactaaaaaa

SEQ ID NO: 92979 - DNA, 20 bp, Artificial Sequence
  Description of Artificial Sequence: Synthetic oligonucleotide
  Target: LAMA2; (-) strand; PAM type: NRG; PAM sequence: GAG
aagaataaagcaaggttaaa

SEQ ID NO: 92980 - DNA, 20 bp, Artificial Sequence
  Description of Artificial Sequence: Synthetic oligonucleotide
  Target: LAMA2; (-) strand; PAM type: NRG; PAM sequence: AAG
ttaagaataaagcaaggtta

SEQ ID NO: 92981 - DNA, 20 bp, Artificial Sequence
  Description of Artificial Sequence: Synthetic oligonucleotide
  Target: LAMA2; (-) strand; PAM type: NRG; PAM sequence: AGG
tgtgcattaagaataaagca

SEQ ID NO: 92982 - DNA, 20 bp, Artificial Sequence
  Description of Artificial Sequence: Synthetic oligonucleotide
  Target: LAMA2; (-) strand; PAM type: NRG; PAM sequence: AAG
atgtgcattaagaataaagc

SEQ ID NO: 92983 - DNA, 20 bp, Artificial Sequence
  Description of Artificial Sequence: Synthetic oligonucleotide
  Target: LAMA2; (-) strand; PAM type: NRG; PAM sequence: AAG
aaatatgtgcattaagaata

SEQ ID NO: 92984 - DNA, 20 bp, Artificial Sequence
  Description of Artificial Sequence: Synthetic oligonucleotide
  Target: LAMA2; (-) strand; PAM type: NRG; PAM sequence: AAG
tctgtcaaaatatgtgcatt

SEQ ID NO: 92985 - DNA, 20 bp, Artificial Sequence
  Description of Artificial Sequence: Synthetic oligonucleotide
  Target: LAMA2; (-) strand; PAM type: NRG; PAM sequence: AAG
acaattaaccttgttctaaa

SEQ ID NO: 92986 - DNA, 20 bp, Artificial Sequence
  Description of Artificial Sequence: Synthetic oligonucleotide
  Target: LAMA2; (-) strand; PAM type: NRG; PAM sequence: GAG
tgtatgtgaatgcatacata

SEQ ID NO: 92987 - DNA, 20 bp, Artificial Sequence
  Description of Artificial Sequence: Synthetic oligonucleotide
  Target: LAMA2; (-) strand; PAM type: NRG; PAM sequence: TAG
tatgtatgtgaatgcataca

SEQ ID NO: 92988 - DNA, 20 bp, Artificial Sequence
  Description of Artificial Sequence: Synthetic oligonucleotide
  Target: LAMA2; (-) strand; PAM type: NRG; PAM sequence: AAG
tatttttataatctacttat

SEQ ID NO: 92989 - DNA, 20 bp, Artificial Sequence
  Description of Artificial Sequence: Synthetic oligonucleotide
  Target: LAMA2; (-) strand; PAM type: NRG; PAM sequence: TGG
atgaaaataatccctcttaa

SEQ ID NO: 92990 - DNA, 20 bp, Artificial Sequence
  Description of Artificial Sequence: Synthetic oligonucleotide
  Target: LAMA2; (-) strand; PAM type: NRG; PAM sequence: TGG
tgggataaccaataaaaagc

SEQ ID NO: 92991 - DNA, 20 bp, Artificial Sequence
  Description of Artificial Sequence: Synthetic oligonucleotide
  Target: LAMA2; (-) strand; PAM type: NRG; PAM sequence: AAG
ttattgggataaccaataaa

SEQ ID NO: 92992 - DNA, 20 bp, Artificial Sequence
  Description of Artificial Sequence: Synthetic oligonucleotide
  Target: LAMA2; (-) strand; PAM type: NRG; PAM sequence: GGG
gaggaggggaagctgttatt

SEQ ID NO: 92993 - DNA, 20 bp, Artificial Sequence
  Description of Artificial Sequence: Synthetic oligonucleotide
  Target: LAMA2; (-) strand; PAM type: NRG; PAM sequence: TGG
ggaggaggggaagctgttat

SEQ ID NO: 92994 - DNA, 20 bp, Artificial Sequence
  Description of Artificial Sequence: Synthetic oligonucleotide
  Target: LAMA2; (-) strand; PAM type: NRG; PAM sequence: AAG
cacaaataggggaggagggg

SEQ ID NO: 92995 - DNA, 20 bp, Artificial Sequence
  Description of Artificial Sequence: Synthetic oligonucleotide
  Target: LAMA2; (-) strand; PAM type: NRG; PAM sequence: GGG
ttccacaaataggggaggag

SEQ ID NO: 92996 - DNA, 20 bp, Artificial Sequence
  Description of Artificial Sequence: Synthetic oligonucleotide
  Target: LAMA2; (-) strand; PAM type: NRG; PAM sequence: GGG
tttccacaaataggggagga

SEQ ID NO: 92997 - DNA, 20 bp, Artificial Sequence
  Description of Artificial Sequence: Synthetic oligonucleotide
  Target: LAMA2; (-) strand; PAM type: NRG; PAM sequence: AGG
ttttccacaaataggggagg

SEQ ID NO: 92998 - DNA, 20 bp, Artificial Sequence
  Description of Artificial Sequence: Synthetic oligonucleotide
  Target: LAMA2; (-) strand; PAM type: NRG; PAM sequence: GAG
attttccacaaataggggag

SEQ ID NO: 92999 - DNA, 20 bp, Artificial Sequence
  Description of Artificial Sequence: Synthetic oligonucleotide
  Target: LAMA2; (-) strand; PAM type: NRG; PAM sequence: AGG
gcattttccacaaatagggg

SEQ ID NO: 93000 - DNA, 20 bp, Artificial Sequence
  Description of Artificial Sequence: Synthetic oligonucleotide
  Target: LAMA2; (-) strand; PAM type: NRG; PAM sequence: GAG
ggcattttccacaaataggg

SEQ ID NO: 93001 - DNA, 20 bp, Artificial Sequence
  Description of Artificial Sequence: Synthetic oligonucleotide
  Target: LAMA2; (-) strand; PAM type: NRG; PAM sequence: GGG
cgggcattttccacaaatag

SEQ ID NO: 93002 - DNA, 20 bp, Artificial Sequence
  Description of Artificial Sequence: Synthetic oligonucleotide
  Target: LAMA2; (-) strand; PAM type: NRG; PAM sequence: GGG
gcgggcattttccacaaata

SEQ ID NO: 93003 - DNA, 20 bp, Artificial Sequence
  Description of Artificial Sequence: Synthetic oligonucleotide
  Target: LAMA2; (-) strand; PAM type: NRG; PAM sequence: AGG
agcgggcattttccacaaat

SEQ ID NO: 93004 - DNA, 20 bp, Artificial Sequence
  Description of Artificial Sequence: Synthetic oligonucleotide
  Target: LAMA2; (-) strand; PAM type: NRG; PAM sequence: TAG
cagcgggcattttccacaaa

SEQ ID NO: 93005 - DNA, 20 bp, Artificial Sequence
  Description of Artificial Sequence: Synthetic oligonucleotide
  Target: LAMA2; (-) strand; PAM type: NRG; PAM sequence: GGG
acaagaaagccaagagcagc

SEQ ID NO: 93006 - DNA, 20 bp, Artificial Sequence
  Description of Artificial Sequence: Synthetic oligonucleotide
  Target: LAMA2; (-) strand; PAM type: NRG; PAM sequence: CGG
cacaagaaagccaagagcag

SEQ ID NO: 93007 - DNA, 20 bp, Artificial Sequence
  Description of Artificial Sequence: Synthetic oligonucleotide
  Target: LAMA2; (-) strand; PAM type: NRG; PAM sequence: CAG
aaacacaagaaagccaagag

SEQ ID NO: 93008 - DNA, 20 bp, Artificial Sequence
  Description of Artificial Sequence: Synthetic oligonucleotide
  Target: LAMA2; (-) strand; PAM type: NRG; PAM sequence: GAG
aggaaacacaagaaagccaa

SEQ ID NO: 93009 - DNA, 20 bp, Artificial Sequence
  Description of Artificial Sequence: Synthetic oligonucleotide
  Target: LAMA2; (-) strand; PAM type: NRG; PAM sequence: AAG
acaggaaacacaagaaagcc

SEQ ID NO: 93010 - DNA, 20 bp, Artificial Sequence
  Description of Artificial Sequence: Synthetic oligonucleotide
  Target: LAMA2; (-) strand; PAM type: NRG; PAM sequence: AAG
acgccacaggaaacacaaga

SEQ ID NO: 93011 - DNA, 20 bp, Artificial Sequence
  Description of Artificial Sequence: Synthetic oligonucleotide
  Target: LAMA2; (-) strand; PAM type: NRG; PAM sequence: AAG
aaccacgccacaggaaacac

SEQ ID NO: 93012 - DNA, 20 bp, Artificial Sequence
  Description of Artificial Sequence: Synthetic oligonucleotide
  Target: LAMA2; (-) strand; PAM type: NRG; PAM sequence: AGG
gattatccaaaccacgccac

SEQ ID NO: 93013 - DNA, 20 bp, Artificial Sequence
  Description of Artificial Sequence: Synthetic oligonucleotide
  Target: LAMA2; (-) strand; PAM type: NRG; PAM sequence: CAG
ggattatccaaaccacgcca

SEQ ID NO: 93014 - DNA, 20 bp, Artificial Sequence
  Description of Artificial Sequence: Synthetic oligonucleotide
  Target: LAMA2; (-) strand; PAM type: NRG; PAM sequence: CGG
gcagaaaatgttcttcatcc

SEQ ID NO: 93015 - DNA, 20 bp, Artificial Sequence
  Description of Artificial Sequence: Synthetic oligonucleotide
  Target: LAMA2; (-) strand; PAM type: NRG; PAM sequence: CAG
tttggctagctccacaccag

SEQ ID NO: 93016 - DNA, 20 bp, Artificial Sequence
  Description of Artificial Sequence: Synthetic oligonucleotide
  Target: LAMA2; (-) strand; PAM type: NRG; PAM sequence: CAG
ctatttggctagctccacac

SEQ ID NO: 93017 - DNA, 20 bp, Artificial Sequence
  Description of Artificial Sequence: Synthetic oligonucleotide
  Target: LAMA2; (-) strand; PAM type: NRG; PAM sequence: TAG
gtcatttaactctatttggc

SEQ ID NO: 93018 - DNA, 20 bp, Artificial Sequence
  Description of Artificial Sequence: Synthetic oligonucleotide
  Target: LAMA2; (-) strand; PAM type: NRG; PAM sequence: TGG
ttatgtcatttaactctatt

SEQ ID NO: 93019 - DNA, 20 bp, Artificial Sequence
  Description of Artificial Sequence: Synthetic oligonucleotide
  Target: LAMA2; (-) strand; PAM type: NRG; PAM sequence: AAG
cattgacctcaagtgattcc

SEQ ID NO: 93020 - DNA, 20 bp, Artificial Sequence
  Description of Artificial Sequence: Synthetic oligonucleotide
  Target: LAMA2; (-) strand; PAM type: NRG; PAM sequence: AAG
gtgagatcatcattgacctc

SEQ ID NO: 93021 - DNA, 20 bp, Artificial Sequence
  Description of Artificial Sequence: Synthetic oligonucleotide
  Target: LAMA2; (-) strand; PAM type: NRG; PAM sequence: GAG
tgacacaaagaggaaattgt

SEQ ID NO: 93022 - DNA, 20 bp, Artificial Sequence
  Description of Artificial Sequence: Synthetic oligonucleotide
  Target: LAMA2; (-) strand; PAM type: NRG; PAM sequence: AGG
aattgttccgtgacacaaag

SEQ ID NO: 93023 - DNA, 20 bp, Artificial Sequence
  Description of Artificial Sequence: Synthetic oligonucleotide
  Target: LAMA2; (-) strand; PAM type: NRG; PAM sequence: GAG
taattgttccgtgacacaaa

SEQ ID NO: 93024 - DNA, 20 bp, Artificial Sequence
  Description of Artificial Sequence: Synthetic oligonucleotide
  Target: LAMA2; (-) strand; PAM type: NRG; PAM sequence: AAG
gctaattgttccgtgacaca

SEQ ID NO: 93025 - DNA, 20 bp, Artificial Sequence
  Description of Artificial Sequence: Synthetic oligonucleotide
  Target: LAMA2; (-) strand; PAM type: NRG; PAM sequence: AAG
ctaattttggccaagacatg

SEQ ID NO: 93026 - DNA, 20 bp, Artificial Sequence
  Description of Artificial Sequence: Synthetic oligonucleotide
  Target: LAMA2; (-) strand; PAM type: NRG; PAM sequence: AAG
acttagcactaattttggcc

SEQ ID NO: 93027 - DNA, 20 bp, Artificial Sequence
  Description of Artificial Sequence: Synthetic oligonucleotide
  Target: LAMA2; (-) strand; PAM type: NRG; PAM sequence: TGG
cagtcacttagcactaattt

SEQ ID NO: 93028 - DNA, 20 bp, Artificial Sequence
  Description of Artificial Sequence: Synthetic oligonucleotide
  Target: LAMA2; (-) strand; PAM type: NRG; PAM sequence: TAG
ccttggcaaatgcagtcact

SEQ ID NO: 93029 - DNA, 20 bp, Artificial Sequence
  Description of Artificial Sequence: Synthetic oligonucleotide
  Target: LAMA2; (-) strand; PAM type: NRG; PAM sequence: CAG
agaatttgccttggcaaatg

SEQ ID NO: 93030 - DNA, 20 bp, Artificial Sequence
  Description of Artificial Sequence: Synthetic oligonucleotide
  Target: LAMA2; (-) strand; PAM type: NRG; PAM sequence: TGG
aacatctacagaatttgcct

SEQ ID NO: 93031 - DNA, 20 bp, Artificial Sequence
  Description of Artificial Sequence: Synthetic oligonucleotide
  Target: LAMA2; (-) strand; PAM type: NRG; PAM sequence: CAG
tgcacaataaaaaacatcta

SEQ ID NO: 93032 - DNA, 20 bp, Artificial Sequence
  Description of Artificial Sequence: Synthetic oligonucleotide
  Target: LAMA2; (-) strand; PAM type: NRG; PAM sequence: GAG
aacaaaaataaaattagagt

SEQ ID NO: 93033 - DNA, 20 bp, Artificial Sequence
  Description of Artificial Sequence: Synthetic oligonucleotide
  Target: LAMA2; (-) strand; PAM type: NRG; PAM sequence: GAG
caacaacaaaaataaaatta

SEQ ID NO: 93034 - DNA, 20 bp, Artificial Sequence
  Description of Artificial Sequence: Synthetic oligonucleotide
  Target: LAMA2; (-) strand; PAM type: NRG; PAM sequence: TAG
ttcaacaacaaaaataaaat

SEQ ID NO: 93035 - DNA, 20 bp, Artificial Sequence
  Description of Artificial Sequence: Synthetic oligonucleotide
  Target: LAMA2; (-) strand; PAM type: NRG; PAM sequence: TGG
gttacagctatggcagaaga

SEQ ID NO: 93036 - DNA, 20 bp, Artificial Sequence
  Description of Artificial Sequence: Synthetic oligonucleotide
  Target: LAMA2; (-) strand; PAM type: NRG; PAM sequence: AAG
tgcagttacagctatggcag

SEQ ID NO: 93037 - DNA, 20 bp, Artificial Sequence
  Description of Artificial Sequence: Synthetic oligonucleotide
  Target: LAMA2; (-) strand; PAM type: NRG; PAM sequence: CAG
aattgcagttacagctatgg

SEQ ID NO: 93038 - DNA, 20 bp, Artificial Sequence
  Description of Artificial Sequence: Synthetic oligonucleotide
  Target: LAMA2; (-) strand; PAM type: NRG; PAM sequence: TGG
tgtaattgcagttacagcta

SEQ ID NO: 93039 - DNA, 20 bp, Artificial Sequence
  Description of Artificial Sequence: Synthetic oligonucleotide
  Target: LAMA2; (-) strand; PAM type: NRG; PAM sequence: CAG
tattgctgtaattgcagtta

SEQ ID NO: 93040 - DNA, 20 bp, Artificial Sequence
  Description of Artificial Sequence: Synthetic oligonucleotide
  Target: LAMA2; (-) strand; PAM type: NRG; PAM sequence: CAG
ctctcttattgctgtaattg

SEQ ID NO: 93041 - DNA, 20 bp, Artificial Sequence
  Description of Artificial Sequence: Synthetic oligonucleotide
  Target: LAMA2; (-) strand; PAM type: NRG; PAM sequence: AAG
tctttcaacaacataaactg

SEQ ID NO: 93042 - DNA, 20 bp, Artificial Sequence
  Description of Artificial Sequence: Synthetic oligonucleotide
  Target: LAMA2; (-) strand; PAM type: NRG; PAM sequence: TAG
agtttaagtttctagtaata

SEQ ID NO: 93043 - DNA, 20 bp, Artificial Sequence
  Description of Artificial Sequence: Synthetic oligonucleotide
  Target: LAMA2; (-) strand; PAM type: NRG; PAM sequence: TAG
attaagtaagtttaagtttc

SEQ ID NO: 93044 - DNA, 20 bp, Artificial Sequence
  Description of Artificial Sequence: Synthetic oligonucleotide
  Target: LAMA2; (-) strand; PAM type: NRG; PAM sequence: AAG
ggtaagaattaagtaagttt

SEQ ID NO: 93045 - DNA, 20 bp, Artificial Sequence
  Description of Artificial Sequence: Synthetic oligonucleotide
  Target: LAMA2; (-) strand; PAM type: NRG; PAM sequence: AAG
cctactggtaagaattaagt

SEQ ID NO: 93046 - DNA, 20 bp, Artificial Sequence
  Description of Artificial Sequence: Synthetic oligonucleotide
  Target: LAMA2; (-) strand; PAM type: NRG; PAM sequence: AAG
gaaacctactggtaagaatt

SEQ ID NO: 93047 - DNA, 20 bp, Artificial Sequence
  Description of Artificial Sequence: Synthetic oligonucleotide
  Target: LAMA2; (-) strand; PAM type: NRG; PAM sequence: AAG
tgtcattgaaacctactggt

SEQ ID NO: 93048 - DNA, 20 bp, Artificial Sequence
  Description of Artificial Sequence: Synthetic oligonucleotide
  Target: LAMA2; (-) strand; PAM type: NRG; PAM sequence: TGG
caattgtcattgaaacctac

SEQ ID NO: 93049 - DNA, 20 bp, Artificial Sequence
  Description of Artificial Sequence: Synthetic oligonucleotide
  Target: LAMA2; (-) strand; PAM type: NRG; PAM sequence: TAG
tagtatgggatctaggactt

SEQ ID NO: 93050 - DNA, 20 bp, Artificial Sequence
  Description of Artificial Sequence: Synthetic oligonucleotide
  Target: LAMA2; (-) strand; PAM type: NRG; PAM sequence: AGG
gagaatttagtatgggatct

SEQ ID NO: 93051 - DNA, 20 bp, Artificial Sequence
  Description of Artificial Sequence: Synthetic oligonucleotide
  Target: LAMA2; (-) strand; PAM type: NRG; PAM sequence: TAG
ggagaatttagtatgggatc

SEQ ID NO: 93052 - DNA, 20 bp, Artificial Sequence
  Description of Artificial Sequence: Synthetic oligonucleotide
  Target: LAMA2; (-) strand; PAM type: NRG; PAM sequence: GGG
tttccaggagaatttagtat

SEQ ID NO: 93053 - DNA, 20 bp, Artificial Sequence
  Description of Artificial Sequence: Synthetic oligonucleotide
  Target: LAMA2; (-) strand; PAM type: NRG; PAM sequence: TGG
atttccaggagaatttagta

SEQ ID NO: 93054 - DNA, 20 bp, Artificial Sequence
  Description of Artificial Sequence: Synthetic oligonucleotide
  Target: LAMA2; (-) strand; PAM type: NRG; PAM sequence: TAG
acaaaatttccaggagaatt

SEQ ID NO: 93055 - DNA, 20 bp, Artificial Sequence
  Description of Artificial Sequence: Synthetic oligonucleotide
  Target: LAMA2; (-) strand; PAM type: NRG; PAM sequence: GAG
gtcatatacaaaatttccag

SEQ ID NO: 93056 - DNA, 20 bp, Artificial Sequence
  Description of Artificial Sequence: Synthetic oligonucleotide
  Target: LAMA2; (-) strand; PAM type: NRG; PAM sequence: AGG
aggtcatatacaaaatttcc

SEQ ID NO: 93057 - DNA, 20 bp, Artificial Sequence
  Description of Artificial Sequence: Synthetic oligonucleotide
  Target: LAMA2; (-) strand; PAM type: NRG; PAM sequence: CAG
aaggtcatatacaaaatttc

SEQ ID NO: 93058 - DNA, 20 bp, Artificial Sequence
  Description of Artificial Sequence: Synthetic oligonucleotide
  Target: LAMA2; (-) strand; PAM type: NRG; PAM sequence: AGG
ggcacagtttttcttaacca

SEQ ID NO: 93059 - DNA, 20 bp, Artificial Sequence
  Description of Artificial Sequence: Synthetic oligonucleotide
  Target: LAMA2; (-) strand; PAM type: NRG; PAM sequence: AAG
aggcacagtttttcttaacc

SEQ ID NO: 93060 - DNA, 20 bp, Artificial Sequence
  Description of Artificial Sequence: Synthetic oligonucleotide
  Target: LAMA2; (-) strand; PAM type: NRG; PAM sequence: CAG
tgagctggttagggcaggca

SEQ ID NO: 93061 - DNA, 20 bp, Artificial Sequence
  Description of Artificial Sequence: Synthetic oligonucleotide
  Target: LAMA2; (-) strand; PAM type: NRG; PAM sequence: AGG
tcctatgagctggttagggc

SEQ ID NO: 93062 - DNA, 20 bp, Artificial Sequence
  Description of Artificial Sequence: Synthetic oligonucleotide
  Target: LAMA2; (-) strand; PAM type: NRG; PAM sequence: CAG
atcctatgagctggttaggg

SEQ ID NO: 93063 - DNA, 20 bp, Artificial Sequence
  Description of Artificial Sequence: Synthetic oligonucleotide
  Target: LAMA2; (-) strand; PAM type: NRG; PAM sequence: GGG
aaaatcctatgagctggtta

SEQ ID NO: 93064 - DNA, 20 bp, Artificial Sequence
  Description of Artificial Sequence: Synthetic oligonucleotide
  Target: LAMA2; (-) strand; PAM type: NRG; PAM sequence: AGG
caaaatcctatgagctggtt

SEQ ID NO: 93065 - DNA, 20 bp, Artificial Sequence
  Description of Artificial Sequence: Synthetic oligonucleotide
  Target: LAMA2; (-) strand; PAM type: NRG; PAM sequence: TAG
acaaaatcctatgagctggt

SEQ ID NO: 93066 - DNA, 20 bp, Artificial Sequence
  Description of Artificial Sequence: Synthetic oligonucleotide
  Target: LAMA2; (-) strand; PAM type: NRG; PAM sequence: TGG
tttcacaaaatcctatgagc

SEQ ID NO: 93067 - DNA, 20 bp, Artificial Sequence
  Description of Artificial Sequence: Synthetic oligonucleotide
  Target: LAMA2; (-) strand; PAM type: NRG; PAM sequence: GAG
acattttcacaaaatcctat

SEQ ID NO: 93068 - DNA, 20 bp, Artificial Sequence
  Description of Artificial Sequence: Synthetic oligonucleotide
  Target: LAMA2; (-) strand; PAM type: NRG; PAM sequence: CAG
ttgactagctccttacagtt

SEQ ID NO: 93069 - DNA, 20 bp, Artificial Sequence
  Description of Artificial Sequence: Synthetic oligonucleotide
  Target: LAMA2; (-) strand; PAM type: NRG; PAM sequence: CAG
taaatttgactagctcctta

SEQ ID NO: 93070 - DNA, 20 bp, Artificial Sequence
  Description of Artificial Sequence: Synthetic oligonucleotide
  Target: LAMA2; (-) strand; PAM type: NRG; PAM sequence: TAG
aaaaatatgttaaatttgac

SEQ ID NO: 93071 - DNA, 20 bp, Artificial Sequence
  Description of Artificial Sequence: Synthetic oligonucleotide
  Target: LAMA2; (-) strand; PAM type: NRG; PAM sequence: AGG
actttttcgagaaaaaaatt

SEQ ID NO: 93072 - DNA, 20 bp, Artificial Sequence
  Description of Artificial Sequence: Synthetic oligonucleotide
  Target: LAMA2; (-) strand; PAM type: NRG; PAM sequence: TAG
cactttttcgagaaaaaaat

SEQ ID NO: 93073 - DNA, 20 bp, Artificial Sequence
  Description of Artificial Sequence: Synthetic oligonucleotide
  Target: LAMA2; (-) strand; PAM type: NRG; PAM sequence: GAG
acaaaaatcaacactttttc

SEQ ID NO: 93074 - DNA, 20 bp, Artificial Sequence
  Description of Artificial Sequence: Synthetic oligonucleotide
  Target: LAMA2; (-) strand; PAM type: NRG; PAM sequence: AGG
ttaaaaccaacataagtaaa

SEQ ID NO: 93075 - DNA, 20 bp, Artificial Sequence
  Description of Artificial Sequence: Synthetic oligonucleotide
  Target: LAMA2; (-) strand; PAM type: NRG; PAM sequence: AAG
gttaaaaccaacataagtaa

SEQ ID NO: 93076 - DNA, 20 bp, Artificial Sequence
  Description of Artificial Sequence: Synthetic oligonucleotide
  Target: LAMA2; (-) strand; PAM type: NRG; PAM sequence: AAG
atgtcagttaaaaccaacat

SEQ ID NO: 93077 - DNA, 20 bp, Artificial Sequence
  Description of Artificial Sequence: Synthetic oligonucleotide
  Target: LAMA2; (-) strand; PAM type: NRG; PAM sequence: CAG
tcttaaatacactcacatgt

SEQ ID NO: 93078 - DNA, 20 bp, Artificial Sequence
  Description of Artificial Sequence: Synthetic oligonucleotide
  Target: LAMA2; (-) strand; PAM type: NRG; PAM sequence: CAG
gctattcataaaatagattt

SEQ ID NO: 93079 - DNA, 20 bp, Artificial Sequence
  Description of Artificial Sequence: Synthetic oligonucleotide
  Target: LAMA2; (-) strand; PAM type: NRG; PAM sequence: TAG
ctttaaagctattcataaaa

SEQ ID NO: 93080 - DNA, 20 bp, Artificial Sequence
  Description of Artificial Sequence: Synthetic oligonucleotide
  Target: LAMA2; (-) strand; PAM type: NRG; PAM sequence: AAG
cacctggccttgacacttta

SEQ ID NO: 93081 - DNA, 20 bp, Artificial Sequence
  Description of Artificial Sequence: Synthetic oligonucleotide
  Target: LAMA2; (-) strand; PAM type: NRG; PAM sequence: TGG
caggcatgagccattgcacc

SEQ ID NO: 93082 - DNA, 20 bp, Artificial Sequence
  Description of Artificial Sequence: Synthetic oligonucleotide
  Target: LAMA2; (-) strand; PAM type: NRG; PAM sequence: GAG
agtgctaggattacaggcat

SEQ ID NO: 93083 - DNA, 20 bp, Artificial Sequence
  Description of Artificial Sequence: Synthetic oligonucleotide
  Target: LAMA2; (-) strand; PAM type: NRG; PAM sequence: AGG
tcccaaagtgctaggattac

SEQ ID NO: 93084 - DNA, 20 bp, Artificial Sequence
  Description of Artificial Sequence: Synthetic oligonucleotide
  Target: LAMA2; (-) strand; PAM type: NRG; PAM sequence: CAG
ctcccaaagtgctaggatta

SEQ ID NO: 93085 - DNA, 20 bp, Artificial Sequence
  Description of Artificial Sequence: Synthetic oligonucleotide
  Target: LAMA2; (-) strand; PAM type: NRG; PAM sequence: AGG
ccttggcctcccaaagtgct

SEQ ID NO: 93086 - DNA, 20 bp, Artificial Sequence
  Description of Artificial Sequence: Synthetic oligonucleotide
  Target: LAMA2; (-) strand; PAM type: NRG; PAM sequence: TAG
gccttggcctcccaaagtgc

SEQ ID NO: 93087 - DNA, 20 bp, Artificial Sequence
  Description of Artificial Sequence: Synthetic oligonucleotide
  Target: LAMA2; (-) strand; PAM type: NRG; PAM sequence: AAG
ccacctgccttggcctccca

SEQ ID NO: 93088 - DNA, 20 bp, Artificial Sequence
  Description of Artificial Sequence: Synthetic oligonucleotide
  Target: LAMA2; (-) strand; PAM type: NRG; PAM sequence: TGG
ctcaagtgatccacctgcct

SEQ ID NO: 93089 - DNA, 20 bp, Artificial Sequence
  Description of Artificial Sequence: Synthetic oligonucleotide
  Target: LAMA2; (-) strand; PAM type: NRG; PAM sequence: AAG
ggtcttgaactcctgacctc

SEQ ID NO: 93090 - DNA, 20 bp, Artificial Sequence
  Description of Artificial Sequence: Synthetic oligonucleotide
  Target: LAMA2; (-) strand; PAM type: NRG; PAM sequence: TGG
tctcaccatattggccgggc

SEQ ID NO: 93091 - DNA, 20 bp, Artificial Sequence
  Description of Artificial Sequence: Synthetic oligonucleotide
  Target: LAMA2; (-) strand; PAM type: NRG; PAM sequence: GGG
ggggtctcaccatattggcc

SEQ ID NO: 93092 - DNA, 20 bp, Artificial Sequence
  Description of Artificial Sequence: Synthetic oligonucleotide
  Target: LAMA2; (-) strand; PAM type: NRG; PAM sequence: CGG
tggggtctcaccatattggc

SEQ ID NO: 93093 - DNA, 20 bp, Artificial Sequence
  Description of Artificial Sequence: Synthetic oligonucleotide
  Target: LAMA2; (-) strand; PAM type: NRG; PAM sequence: TGG
gaaatggggtctcaccatat

SEQ ID NO: 93094 - DNA, 20 bp, Artificial Sequence
  Description of Artificial Sequence: Synthetic oligonucleotide
  Target: LAMA2; (-) strand; PAM type: NRG; PAM sequence: GGG
ttgtatttttagtagaaatg

SEQ ID NO: 93095 - DNA, 20 bp, Artificial Sequence
  Description of Artificial Sequence: Synthetic oligonucleotide
  Target: LAMA2; (-) strand; PAM type: NRG; PAM sequence: GGG
tttgtatttttagtagaaat

SEQ ID NO: 93096 - DNA, 20 bp, Artificial Sequence
  Description of Artificial Sequence: Synthetic oligonucleotide
  Target: LAMA2; (-) strand; PAM type: NRG; PAM sequence: TGG
ttttgtatttttagtagaaa

SEQ ID NO: 93097 - DNA, 20 bp, Artificial Sequence
  Description of Artificial Sequence: Synthetic oligonucleotide
  Target: LAMA2; (-) strand; PAM type: NRG; PAM sequence: TAG
gcccatttttgtatttttag

SEQ ID NO: 93098 - DNA, 20 bp, Artificial Sequence
  Description of Artificial Sequence: Synthetic oligonucleotide
  Target: LAMA2; (-) strand; PAM type: NRG; PAM sequence: TAG
ctggcccatttttgtatttt

SEQ ID NO: 93099 - DNA, 20 bp, Artificial Sequence
  Description of Artificial Sequence: Synthetic oligonucleotide
  Target: LAMA2; (-) strand; PAM type: NRG; PAM sequence: TGG
caggcaggtgctaccaggcc

SEQ ID NO: 93100 - DNA, 20 bp, Artificial Sequence
  Description of Artificial Sequence: Synthetic oligonucleotide
  Target: LAMA2; (-) strand; PAM type: NRG; PAM sequence: AGG
gattgcaggcaggtgctacc

SEQ ID NO: 93101 - DNA, 20 bp, Artificial Sequence
  Description of Artificial Sequence: Synthetic oligonucleotide
  Target: LAMA2; (-) strand; PAM type: NRG; PAM sequence: CAG
ggattgcaggcaggtgctac

SEQ ID NO: 93102 - DNA, 20 bp, Artificial Sequence
  Description of Artificial Sequence: Synthetic oligonucleotide
  Target: LAMA2; (-) strand; PAM type: NRG; PAM sequence: AGG
gagtagctgggattgcaggc

SEQ ID NO: 93103 - DNA, 20 bp, Artificial Sequence
  Description of Artificial Sequence: Synthetic oligonucleotide
  Target: LAMA2; (-) strand; PAM type: NRG; PAM sequence: CAG
tgagtagctgggattgcagg

SEQ ID NO: 93104 - DNA, 20 bp, Artificial Sequence
  Description of Artificial Sequence: Synthetic oligonucleotide
  Target: LAMA2; (-) strand; PAM type: NRG; PAM sequence: AGG
tcctgagtagctgggattgc

SEQ ID NO: 93105 - DNA, 20 bp, Artificial Sequence
  Description of Artificial Sequence: Synthetic oligonucleotide
  Target: LAMA2; (-) strand; PAM type: NRG; PAM sequence: CAG
ctcctgagtagctgggattg

SEQ ID NO: 93106 - DNA, 20 bp, Artificial Sequence
  Description of Artificial Sequence: Synthetic oligonucleotide
  Target: LAMA2; (-) strand; PAM type: NRG; PAM sequence: GGG
tctcagcctcctgagtagct

SEQ ID NO: 93107 - DNA, 20 bp, Artificial Sequence
  Description of Artificial Sequence: Synthetic oligonucleotide
  Target: LAMA2; (-) strand; PAM type: NRG; PAM sequence: TGG
gtctcagcctcctgagtagc

SEQ ID NO: 93108 - DNA, 20 bp, Artificial Sequence
  Description of Artificial Sequence: Synthetic oligonucleotide
  Target: LAMA2; (-) strand; PAM type: NRG; PAM sequence: TAG
tagtgtctcagcctcctgag

SEQ ID NO: 93109 - DNA, 20 bp, Artificial Sequence
  Description of Artificial Sequence: Synthetic oligonucleotide
  Target: LAMA2; (-) strand; PAM type: NRG; PAM sequence: GAG
ttctagtgtctcagcctcct

SEQ ID NO: 93110 - DNA, 20 bp, Artificial Sequence
  Description of Artificial Sequence: Synthetic oligonucleotide
  Target: LAMA2; (-) strand; PAM type: NRG; PAM sequence: CAG
ttcaagcgattctagtgtct

SEQ ID NO: 93111 - DNA, 20 bp, Artificial Sequence
  Description of Artificial Sequence: Synthetic oligonucleotide
  Target: LAMA2; (-) strand; PAM type: NRG; PAM sequence: TAG
ctactgggttcaagcgattc

SEQ ID NO: 93112 - DNA, 20 bp, Artificial Sequence
  Description of Artificial Sequence: Synthetic oligonucleotide
  Target: LAMA2; (-) strand; PAM type: NRG; PAM sequence: AAG
aacccctgcctactgggttc

SEQ ID NO: 93113 - DNA, 20 bp, Artificial Sequence
  Description of Artificial Sequence: Synthetic oligonucleotide
  Target: LAMA2; (-) strand; PAM type: NRG; PAM sequence: GGG
cactgaaacccctgcctact

SEQ ID NO: 93114 - DNA, 20 bp, Artificial Sequence
  Description of Artificial Sequence: Synthetic oligonucleotide
  Target: LAMA2; (-) strand; PAM type: NRG; PAM sequence: TGG
tcactgaaacccctgcctac

SEQ ID NO: 93115 - DNA, 20 bp, Artificial Sequence
  Description of Artificial Sequence: Synthetic oligonucleotide
  Target: LAMA2; (-) strand; PAM type: NRG; PAM sequence: TGG
ggagtgcagtggtgcaatct

SEQ ID NO: 93116 - DNA, 20 bp, Artificial Sequence
  Description of Artificial Sequence: Synthetic oligonucleotide
  Target: LAMA2; (-) strand; PAM type: NRG; PAM sequence: TGG
ttgcccagactggagtgcag

SEQ ID NO: 93117 - DNA, 20 bp, Artificial Sequence
  Description of Artificial Sequence: Synthetic oligonucleotide
  Target: LAMA2; (-) strand; PAM type: NRG; PAM sequence: CAG
ctgttgcccagactggagtg

SEQ ID NO: 93118 - DNA, 20 bp, Artificial Sequence
  Description of Artificial Sequence: Synthetic oligonucleotide
  Target: LAMA2; (-) strand; PAM type: NRG; PAM sequence: GAG
ttgctctgttgcccagactg

SEQ ID NO: 93119 - DNA, 20 bp, Artificial Sequence
  Description of Artificial Sequence: Synthetic oligonucleotide
  Target: LAMA2; (-) strand; PAM type: NRG; PAM sequence: TGG
tcttgctctgttgcccagac

SEQ ID NO: 93120 - DNA, 20 bp, Artificial Sequence
  Description of Artificial Sequence: Synthetic oligonucleotide
  Target: LAMA2; (-) strand; PAM type: NRG; PAM sequence: CAG
cagagtcttgctctgttgcc

SEQ ID NO: 93121 - DNA, 20 bp, Artificial Sequence
  Description of Artificial Sequence: Synthetic oligonucleotide
  Target: LAMA2; (-) strand; PAM type: NRG; PAM sequence: GAG
attttattttatttgagaca

SEQ ID NO: 93122 - DNA, 20 bp, Artificial Sequence
  Description of Artificial Sequence: Synthetic oligonucleotide
  Target: LAMA2; (-) strand; PAM type: NRG; PAM sequence: CAG
ttattttattttatttgaga

SEQ ID NO: 93123 - DNA, 20 bp, Artificial Sequence
  Description of Artificial Sequence: Synthetic oligonucleotide
  Target: LAMA2; (-) strand; PAM type: NRG; PAM sequence: GAG
tattttattttattttattt

SEQ ID NO: 93124 - DNA, 20 bp, Artificial Sequence
  Description of Artificial Sequence: Synthetic oligonucleotide
  Target: LAMA2; (-) strand; PAM type: NRG; PAM sequence: AGG
cttgtcaatggtggttgaca

SEQ ID NO: 93125 - DNA, 20 bp, Artificial Sequence
  Description of Artificial Sequence: Synthetic oligonucleotide
  Target: LAMA2; (-) strand; PAM type: NRG; PAM sequence: AAG
tcttgtcaatggtggttgac

SEQ ID NO: 93126 - DNA, 20 bp, Artificial Sequence
  Description of Artificial Sequence: Synthetic oligonucleotide
  Target: LAMA2; (-) strand; PAM type: NRG; PAM sequence: TGG
atcataactcttgtcaatgg

SEQ ID NO: 93127 - DNA, 20 bp, Artificial Sequence
  Description of Artificial Sequence: Synthetic oligonucleotide
  Target: LAMA2; (-) strand; PAM type: NRG; PAM sequence: TGG
tttatcataactcttgtcaa

SEQ ID NO: 93128 - DNA, 20 bp, Artificial Sequence
  Description of Artificial Sequence: Synthetic oligonucleotide
  Target: LAMA2; (-) strand; PAM type: NRG; PAM sequence: CAG
tgttttttataatcctaaat

SEQ ID NO: 93129 - DNA, 20 bp, Artificial Sequence
  Description of Artificial Sequence: Synthetic oligonucleotide
  Target: LAMA2; (-) strand; PAM type: NRG; PAM sequence: AAG
tgtgggactacactgattga

SEQ ID NO: 93130 - DNA, 20 bp, Artificial Sequence
  Description of Artificial Sequence: Synthetic oligonucleotide
  Target: LAMA2; (-) strand; PAM type: NRG; PAM sequence: GGG
actgggtttcccacctctgt

SEQ ID NO: 93131 - DNA, 20 bp, Artificial Sequence
  Description of Artificial Sequence: Synthetic oligonucleotide
  Target: LAMA2; (-) strand; PAM type: NRG; PAM sequence: TGG
cactgggtttcccacctctg

SEQ ID NO: 93132 - DNA, 20 bp, Artificial Sequence
  Description of Artificial Sequence: Synthetic oligonucleotide
  Target: LAMA2; (-) strand; PAM type: NRG; PAM sequence: GGG
tgactccaaccagaagcact

SEQ ID NO: 93133 - DNA, 20 bp, Artificial Sequence
  Description of Artificial Sequence: Synthetic oligonucleotide
  Target: LAMA2; (-) strand; PAM type: NRG; PAM sequence: TGG
ctgactccaaccagaagcac

SEQ ID NO: 93134 - DNA, 20 bp, Artificial Sequence
  Description of Artificial Sequence: Synthetic oligonucleotide
  Target: LAMA2; (-) strand; PAM type: NRG; PAM sequence: AAG
gagaaactgactccaaccag

SEQ ID NO: 93135 - DNA, 20 bp, Artificial Sequence
  Description of Artificial Sequence: Synthetic oligonucleotide
  Target: LAMA2; (-) strand; PAM type: NRG; PAM sequence: CAG
actgagaaactgactccaac

SEQ ID NO: 93136 - DNA, 20 bp, Artificial Sequence
  Description of Artificial Sequence: Synthetic oligonucleotide
  Target: LAMA2; (-) strand; PAM type: NRG; PAM sequence: GAG
taactatctcatcatctact

SEQ ID NO: 93137 - DNA, 20 bp, Artificial Sequence
  Description of Artificial Sequence: Synthetic oligonucleotide
  Target: LAMA2; (-) strand; PAM type: NRG; PAM sequence: TGG
tatatgtcttctttgaaaat

SEQ ID NO: 93138 - DNA, 20 bp, Artificial Sequence
  Description of Artificial Sequence: Synthetic oligonucleotide
  Target: LAMA2; (-) strand; PAM type: NRG; PAM sequence: TAG
aagtgagaactgcatctctg

SEQ ID NO: 93139 - DNA, 20 bp, Artificial Sequence
  Description of Artificial Sequence: Synthetic oligonucleotide
  Target: LAMA2; (-) strand; PAM type: NRG; PAM sequence: GAG
ctgttttcagacataaaagt

SEQ ID NO: 93140 - DNA, 20 bp, Artificial Sequence
  Description of Artificial Sequence: Synthetic oligonucleotide
  Target: LAMA2; (-) strand; PAM type: NRG; PAM sequence: AAG
gttactgttttcagacataa

SEQ ID NO: 93141 - DNA, 20 bp, Artificial Sequence
  Description of Artificial Sequence: Synthetic oligonucleotide
  Target: LAMA2; (-) strand; PAM type: NRG; PAM sequence: CAG
tgatttgctgttactgtttt

SEQ ID NO: 93142 - DNA, 20 bp, Artificial Sequence
  Description of Artificial Sequence: Synthetic oligonucleotide
  Target: LAMA2; (-) strand; PAM type: NRG; PAM sequence: CGG
gatttcctctcatccacatc

SEQ ID NO: 93143 - DNA, 20 bp, Artificial Sequence
  Description of Artificial Sequence: Synthetic oligonucleotide
  Target: LAMA2; (-) strand; PAM type: NRG; PAM sequence: AGG
ttaaaataaaataaaaaaaa

SEQ ID NO: 93144 - DNA, 20 bp, Artificial Sequence
  Description of Artificial Sequence: Synthetic oligonucleotide
  Target: LAMA2; (-) strand; PAM type: NRG; PAM sequence: AAG
gttaaaataaaataaaaaaa

SEQ ID NO: 93145 - DNA, 20 bp, Artificial Sequence
  Description of Artificial Sequence: Synthetic oligonucleotide
  Target: LAMA2; (-) strand; PAM type: NRG; PAM sequence: AGG
tgattgcactgaagatgcac

SEQ ID NO: 93146 - DNA, 20 bp, Artificial Sequence
  Description of Artificial Sequence: Synthetic oligonucleotide
  Target: LAMA2; (-) strand; PAM type: NRG; PAM sequence: CAG
gtgattgcactgaagatgca

SEQ ID NO: 93147 - DNA, 20 bp, Artificial Sequence
  Description of Artificial Sequence: Synthetic oligonucleotide
  Target: LAMA2; (-) strand; PAM type: NRG; PAM sequence: AAG
acgggattgtgattgcactg

SEQ ID NO: 93148 - DNA, 20 bp, Artificial Sequence
  Description of Artificial Sequence: Synthetic oligonucleotide
  Target: LAMA2; (-) strand; PAM type: NRG; PAM sequence: GGG
ctatgggtgattttcttgac

SEQ ID NO: 93149 - DNA, 20 bp, Artificial Sequence
  Description of Artificial Sequence: Synthetic oligonucleotide
  Target: LAMA2; (-) strand; PAM type: NRG; PAM sequence: CGG
actatgggtgattttcttga

SEQ ID NO: 93150 - DNA, 20 bp, Artificial Sequence
  Description of Artificial Sequence: Synthetic oligonucleotide
  Target: LAMA2; (-) strand; PAM type: NRG; PAM sequence: GGG
acccaaagacagttcactat

SEQ ID NO: 93151 - DNA, 20 bp, Artificial Sequence
  Description of Artificial Sequence: Synthetic oligonucleotide
  Target: LAMA2; (-) strand; PAM type: NRG; PAM sequence: TGG
gacccaaagacagttcacta

SEQ ID NO: 93152 - DNA, 20 bp, Artificial Sequence
  Description of Artificial Sequence: Synthetic oligonucleotide
  Target: LAMA2; (-) strand; PAM type: NRG; PAM sequence: CAG
tgctacgcatgacccaaaga

SEQ ID NO: 93153 - DNA, 20 bp, Artificial Sequence
  Description of Artificial Sequence: Synthetic oligonucleotide
  Target: LAMA2; (-) strand; PAM type: NRG; PAM sequence: AAG
actttgctacgcatgaccca

SEQ ID NO: 93154 - DNA, 20 bp, Artificial Sequence
  Description of Artificial Sequence: Synthetic oligonucleotide
  Target: LAMA2; (-) strand; PAM type: NRG; PAM sequence: AAG
gtaaagaatctccttttata

SEQ ID NO: 93155 - DNA, 20 bp, Artificial Sequence
  Description of Artificial Sequence: Synthetic oligonucleotide
  Target: LAMA2; (-) strand; PAM type: NRG; PAM sequence: AAG
cagcgtgtgcactgcgagta

SEQ ID NO: 93156 - DNA, 20 bp, Artificial Sequence
  Description of Artificial Sequence: Synthetic oligonucleotide
  Target: LAMA2; (-) strand; PAM type: NRG; PAM sequence: GAG
atacccagcgtgtgcactgc

SEQ ID NO: 93157 - DNA, 20 bp, Artificial Sequence
  Description of Artificial Sequence: Synthetic oligonucleotide
  Target: LAMA2; (-) strand; PAM type: NRG; PAM sequence: CAG
aacagcagacaagacatacc

SEQ ID NO: 93158 - DNA, 20 bp, Artificial Sequence
  Description of Artificial Sequence: Synthetic oligonucleotide
  Target: LAMA2; (-) strand; PAM type: NRG; PAM sequence: AAG
agctgtgatgaacagcagac

SEQ ID NO: 93159 - DNA, 20 bp, Artificial Sequence
  Description of Artificial Sequence: Synthetic oligonucleotide
  Target: LAMA2; (-) strand; PAM type: NRG; PAM sequence: CAG
ctggtagctgtgatgaacag

SEQ ID NO: 93160 - DNA, 20 bp, Artificial Sequence
  Description of Artificial Sequence: Synthetic oligonucleotide
  Target: LAMA2; (-) strand; PAM type: NRG; PAM sequence: CAG
gttctggtagctgtgatgaa

SEQ ID NO: 93161 - DNA, 20 bp, Artificial Sequence
  Description of Artificial Sequence: Synthetic oligonucleotide
  Target: LAMA2; (-) strand; PAM type: NRG; PAM sequence: TAG
tccacattaaggagttctgg

SEQ ID NO: 93162 - DNA, 20 bp, Artificial Sequence
  Description of Artificial Sequence: Synthetic oligonucleotide
  Target: LAMA2; (-) strand; PAM type: NRG; PAM sequence: TGG
gattccacattaaggagttc

SEQ ID NO: 93163 - DNA, 20 bp, Artificial Sequence
  Description of Artificial Sequence: Synthetic oligonucleotide
  Target: LAMA2; (-) strand; PAM type: NRG; PAM sequence: GAG
atcaaagattccacattaag

SEQ ID NO: 93164 - DNA, 20 bp, Artificial Sequence
  Description of Artificial Sequence: Synthetic oligonucleotide
  Target: LAMA2; (-) strand; PAM type: NRG; PAM sequence: AGG
ggatcaaagattccacatta

SEQ ID NO: 93165 - DNA, 20 bp, Artificial Sequence
  Description of Artificial Sequence: Synthetic oligonucleotide
  Target: LAMA2; (-) strand; PAM type: NRG; PAM sequence: AAG
tggatcaaagattccacatt

SEQ ID NO: 93166 - DNA, 20 bp, Artificial Sequence
  Description of Artificial Sequence: Synthetic oligonucleotide
  Target: LAMA2; (-) strand; PAM type: NRG; PAM sequence: AAG
tataaatattatctggatca

SEQ ID NO: 93167 - DNA, 20 bp, Artificial Sequence
  Description of Artificial Sequence: Synthetic oligonucleotide
  Target: LAMA2; (-) strand; PAM type: NRG; PAM sequence: TGG
ttgaatttataaatattatc

SEQ ID NO: 93168 - DNA, 20 bp, Artificial Sequence
  Description of Artificial Sequence: Synthetic oligonucleotide
  Target: LAMA2; (-) strand; PAM type: NRG; PAM sequence: GGG
aaggagataaaggctggtct

SEQ ID NO: 93169 - DNA, 20 bp, Artificial Sequence
  Description of Artificial Sequence: Synthetic oligonucleotide
  Target: LAMA2; (-) strand; PAM type: NRG; PAM sequence: TGG
caaggagataaaggctggtc

SEQ ID NO: 93170 - DNA, 20 bp, Artificial Sequence
  Description of Artificial Sequence: Synthetic oligonucleotide
  Target: LAMA2; (-) strand; PAM type: NRG; PAM sequence: TGG
tgggtcaaggagataaaggc

SEQ ID NO: 93171 - DNA, 20 bp, Artificial Sequence
  Description of Artificial Sequence: Synthetic oligonucleotide
  Target: LAMA2; (-) strand; PAM type: NRG; PAM sequence: AGG
ctgctgggtcaaggagataa

SEQ ID NO: 93172 - DNA, 20 bp, Artificial Sequence
  Description of Artificial Sequence: Synthetic oligonucleotide
  Target: LAMA2; (-) strand; PAM type: NRG; PAM sequence: AAG
tctgctgggtcaaggagata

SEQ ID NO: 93173 - DNA, 20 bp, Artificial Sequence
  Description of Artificial Sequence: Synthetic oligonucleotide
  Target: LAMA2; (-) strand; PAM type: NRG; PAM sequence: GAG
aatgaatctgctgggtcaag

SEQ ID NO: 93174 - DNA, 20 bp, Artificial Sequence
  Description of Artificial Sequence: Synthetic oligonucleotide
  Target: LAMA2; (-) strand; PAM type: NRG; PAM sequence: AGG
taaatgaatctgctgggtca

SEQ ID NO: 93175 - DNA, 20 bp, Artificial Sequence
  Description of Artificial Sequence: Synthetic oligonucleotide
  Target: LAMA2; (-) strand; PAM type: NRG; PAM sequence: AAG
ctaaatgaatctgctgggtc

SEQ ID NO: 93176 - DNA, 20 bp, Artificial Sequence
  Description of Artificial Sequence: Synthetic oligonucleotide
  Target: LAMA2; (-) strand; PAM type: NRG; PAM sequence: GGG
aaagtctaaatgaatctgct

SEQ ID NO: 93177 - DNA, 20 bp, Artificial Sequence
  Description of Artificial Sequence: Synthetic oligonucleotide
  Target: LAMA2; (-) strand; PAM type: NRG; PAM sequence: TGG
gaaagtctaaatgaatctgc

SEQ ID NO: 93178 - DNA, 20 bp, Artificial Sequence
  Description of Artificial Sequence: Synthetic oligonucleotide
  Target: LAMA2; (-) strand; PAM type: NRG; PAM sequence: AAG
aaacatttcaactcagtgga

SEQ ID NO: 93179 - DNA, 20 bp, Artificial Sequence
  Description of Artificial Sequence: Synthetic oligonucleotide
  Target: LAMA2; (-) strand; PAM type: NRG; PAM sequence: TGG
ttttaaacatttcaactcag

SEQ ID NO: 93180 - DNA, 20 bp, Artificial Sequence
  Description of Artificial Sequence: Synthetic oligonucleotide
  Target: LAMA2; (-) strand; PAM type: NRG; PAM sequence: CAG
tcattttaaacatttcaact

SEQ ID NO: 93181 - DNA, 20 bp, Artificial Sequence
  Description of Artificial Sequence: Synthetic oligonucleotide
  Target: LAMA2; (-) strand; PAM type: NRG; PAM sequence: AAG
gcaaggtattaggaccaggt

SEQ ID NO: 93182 - DNA, 20 bp, Artificial Sequence
  Description of Artificial Sequence: Synthetic oligonucleotide
  Target: LAMA2; (-) strand; PAM type: NRG; PAM sequence: AGG
actagcaaggtattaggacc

SEQ ID NO: 93183 - DNA, 20 bp, Artificial Sequence
  Description of Artificial Sequence: Synthetic oligonucleotide
  Target: LAMA2; (-) strand; PAM type: NRG; PAM sequence: CAG
tactagcaaggtattaggac

SEQ ID NO: 93184 - DNA, 20 bp, Artificial Sequence
  Description of Artificial Sequence: Synthetic oligonucleotide
  Target: LAMA2; (-) strand; PAM type: NRG; PAM sequence: AGG
tgggatactagcaaggtatt

SEQ ID NO: 93185 - DNA, 20 bp, Artificial Sequence
  Description of Artificial Sequence: Synthetic oligonucleotide
  Target: LAMA2; (-) strand; PAM type: NRG; PAM sequence: TAG
ttgggatactagcaaggtat

SEQ ID NO: 93186 - DNA, 20 bp, Artificial Sequence
  Description of Artificial Sequence: Synthetic oligonucleotide
  Target: LAMA2; (-) strand; PAM type: NRG; PAM sequence: AGG
ctatttttgggatactagca

SEQ ID NO: 93187 - DNA, 20 bp, Artificial Sequence
  Description of Artificial Sequence: Synthetic oligonucleotide
  Target: LAMA2; (-) strand; PAM type: NRG; PAM sequence: AAG
cctatttttgggatactagc

SEQ ID NO: 93188 - DNA, 20 bp, Artificial Sequence
  Description of Artificial Sequence: Synthetic oligonucleotide
  Target: LAMA2; (-) strand; PAM type: NRG; PAM sequence: TAG
tcttcctatttttgggatac

SEQ ID NO: 93189 - DNA, 20 bp, Artificial Sequence
  Description of Artificial Sequence: Synthetic oligonucleotide
  Target: LAMA2; (-) strand; PAM type: NRG; PAM sequence: GGG
taatagttcttcctattttt

SEQ ID NO: 93190 - DNA, 20 bp, Artificial Sequence
  Description of Artificial Sequence: Synthetic oligonucleotide
  Target: LAMA2; (-) strand; PAM type: NRG; PAM sequence: TGG
ttaatagttcttcctatttt

SEQ ID NO: 93191 - DNA, 20 bp, Artificial Sequence
  Description of Artificial Sequence: Synthetic oligonucleotide
  Target: LAMA2; (-) strand; PAM type: NRG; PAM sequence: TAG
gtagttctgtaaagatttaa

SEQ ID NO: 93192 - DNA, 20 bp, Artificial Sequence
  Description of Artificial Sequence: Synthetic oligonucleotide
  Target: LAMA2; (-) strand; PAM type: NRG; PAM sequence: AAG
taactcagggtagttctgta

SEQ ID NO: 93193 - DNA, 20 bp, Artificial Sequence
  Description of Artificial Sequence: Synthetic oligonucleotide
  Target: LAMA2; (-) strand; PAM type: NRG; PAM sequence: TAG
ttctctggcttaactcaggg

SEQ ID NO: 93194 - DNA, 20 bp, Artificial Sequence
  Description of Artificial Sequence: Synthetic oligonucleotide
  Target: LAMA2; (-) strand; PAM type: NRG; PAM sequence: GGG
tatttctctggcttaactca

SEQ ID NO: 93195 - DNA, 20 bp, Artificial Sequence
  Description of Artificial Sequence: Synthetic oligonucleotide
  Target: LAMA2; (-) strand; PAM type: NRG; PAM sequence: AGG
gtatttctctggcttaactc

SEQ ID NO: 93196 - DNA, 20 bp, Artificial Sequence
  Description of Artificial Sequence: Synthetic oligonucleotide
  Target: LAMA2; (-) strand; PAM type: NRG; PAM sequence: CAG
agtatttctctggcttaact

SEQ ID NO: 93197 - DNA, 20 bp, Artificial Sequence
  Description of Artificial Sequence: Synthetic oligonucleotide
  Target: LAMA2; (-) strand; PAM type: NRG; PAM sequence: TGG
atttctgaatagtatttctc

SEQ ID NO: 93198 - DNA, 20 bp, Artificial Sequence
  Description of Artificial Sequence: Synthetic oligonucleotide
  Target: LAMA2; (-) strand; PAM type: NRG; PAM sequence: TAG
tcatgaacactatttctgaa

SEQ ID NO: 93199 - DNA, 20 bp, Artificial Sequence
  Description of Artificial Sequence: Synthetic oligonucleotide
  Target: LAMA2; (-) strand; PAM type: NRG; PAM sequence: CAG
ttcttaactttggtgcagat

SEQ ID NO: 93200 - DNA, 20 bp, Artificial Sequence
  Description of Artificial Sequence: Synthetic oligonucleotide
  Target: LAMA2; (-) strand; PAM type: NRG; PAM sequence: CAG
atactttcttaactttggtg

SEQ ID NO: 93201 - DNA, 20 bp, Artificial Sequence
  Description of Artificial Sequence: Synthetic oligonucleotide
  Target: LAMA2; (-) strand; PAM type: NRG; PAM sequence: TGG
ttgaaatactttcttaactt

SEQ ID NO: 93202 - DNA, 20 bp, Artificial Sequence
  Description of Artificial Sequence: Synthetic oligonucleotide
  Target: LAMA2; (-) strand; PAM type: NRG; PAM sequence: AAG
aacaacaaattaaacattcc

SEQ ID NO: 93203 - DNA, 20 bp, Artificial Sequence
  Description of Artificial Sequence: Synthetic oligonucleotide
  Target: LAMA2; (-) strand; PAM type: NRG; PAM sequence: AAG
cttgatggctaaatgaatta

SEQ ID NO: 93204 - DNA, 20 bp, Artificial Sequence
  Description of Artificial Sequence: Synthetic oligonucleotide
  Target: LAMA2; (-) strand; PAM type: NRG; PAM sequence: TGG
ttcaatagagacttgcttga

SEQ ID NO: 93205 - DNA, 20 bp, Artificial Sequence
  Description of Artificial Sequence: Synthetic oligonucleotide
  Target: LAMA2; (-) strand; PAM type: NRG; PAM sequence: GAG
tatgacagggcaattcaata

SEQ ID NO: 93206 - DNA, 20 bp, Artificial Sequence
  Description of Artificial Sequence: Synthetic oligonucleotide
  Target: LAMA2; (-) strand; PAM type: NRG; PAM sequence: TAG
tatatgacagggcaattcaa

SEQ ID NO: 93207 - DNA, 20 bp, Artificial Sequence
  Description of Artificial Sequence: Synthetic oligonucleotide
  Target: LAMA2; (-) strand; PAM type: NRG; PAM sequence: GGG
gttttctattatatatgaca

SEQ ID NO: 93208 - DNA, 20 bp, Artificial Sequence
  Description of Artificial Sequence: Synthetic oligonucleotide
  Target: LAMA2; (-) strand; PAM type: NRG; PAM sequence: AGG
tgttttctattatatatgac

SEQ ID NO: 93209 - DNA, 20 bp, Artificial Sequence
  Description of Artificial Sequence: Synthetic oligonucleotide
  Target: LAMA2; (-) strand; PAM type: NRG; PAM sequence: CAG
ttgttttctattatatatga

SEQ ID NO: 93210 - DNA, 20 bp, Artificial Sequence
  Description of Artificial Sequence: Synthetic oligonucleotide
  Target: LAMA2; (-) strand; PAM type: NRG; PAM sequence: TAG
cttattatgttttccctaag

SEQ ID NO: 93211 - DNA, 20 bp, Artificial Sequence
  Description of Artificial Sequence: Synthetic oligonucleotide
  Target: LAMA2; (-) strand; PAM type: NRG; PAM sequence: AAG
tctcttattatgttttccct

SEQ ID NO: 93212 - DNA, 20 bp, Artificial Sequence
  Description of Artificial Sequence: Synthetic oligonucleotide
  Target: LAMA2; (-) strand; PAM type: NRG; PAM sequence: GGG
tgttgcgctaccgttttaaa

SEQ ID NO: 93213 - DNA, 20 bp, Artificial Sequence
  Description of Artificial Sequence: Synthetic oligonucleotide
  Target: LAMA2; (-) strand; PAM type: NRG; PAM sequence: AGG
ctgttgcgctaccgttttaa

SEQ ID NO: 93214 - DNA, 20 bp, Artificial Sequence
  Description of Artificial Sequence: Synthetic oligonucleotide
  Target: LAMA2; (-) strand; PAM type: NRG; PAM sequence: AAG
tctgttgcgctaccgtttta

SEQ ID NO: 93215 - DNA, 20 bp, Artificial Sequence
  Description of Artificial Sequence: Synthetic oligonucleotide
  Target: LAMA2; (-) strand; PAM type: NRG; PAM sequence: AGG
caaccattttgaattctgta

SEQ ID NO: 93216 - DNA, 20 bp, Artificial Sequence
  Description of Artificial Sequence: Synthetic oligonucleotide
  Target: LAMA2; (-) strand; PAM type: NRG; PAM sequence: AAG
tcaaccattttgaattctgt

SEQ ID NO: 93217 - DNA, 20 bp, Artificial Sequence
  Description of Artificial Sequence: Synthetic oligonucleotide
  Target: LAMA2; (-) strand; PAM type: NRG; PAM sequence: GGG
ttctcgactggctctctgaa

SEQ ID NO: 93218 - DNA, 20 bp, Artificial Sequence
  Description of Artificial Sequence: Synthetic oligonucleotide
  Target: LAMA2; (-) strand; PAM type: NRG; PAM sequence: AGG
gttctcgactggctctctga

SEQ ID NO: 93219 - DNA, 20 bp, Artificial Sequence
  Description of Artificial Sequence: Synthetic oligonucleotide
  Target: LAMA2; (-) strand; PAM type: NRG; PAM sequence: AAG
cgttctcgactggctctctg

SEQ ID NO: 93220 - DNA, 20 bp, Artificial Sequence
  Description of Artificial Sequence: Synthetic oligonucleotide
  Target: LAMA2; (-) strand; PAM type: NRG; PAM sequence: TGG
cacggtaatgcgttctcgac

SEQ ID NO: 93221 - DNA, 20 bp, Artificial Sequence
  Description of Artificial Sequence: Synthetic oligonucleotide
  Target: LAMA2; (-) strand; PAM type: NRG; PAM sequence: CGG
cctaccccaagattgacaca

SEQ ID NO: 93222 - DNA, 20 bp, Artificial Sequence
  Description of Artificial Sequence: Synthetic oligonucleotide
  Target: LAMA2; (-) strand; PAM type: NRG; PAM sequence: AAG
catacatgaacccctacccc

SEQ ID NO: 93223 - DNA, 20 bp, Artificial Sequence
  Description of Artificial Sequence: Synthetic oligonucleotide
  Target: LAMA2; (-) strand; PAM type: NRG; PAM sequence: AGG
atgcttctttgccttgtgag

SEQ ID NO: 93224 - DNA, 20 bp, Artificial Sequence
  Description of Artificial Sequence: Synthetic oligonucleotide
  Target: LAMA2; (-) strand; PAM type: NRG; PAM sequence: GAG
catgcttctttgccttgtga

SEQ ID NO: 93225 - DNA, 20 bp, Artificial Sequence
  Description of Artificial Sequence: Synthetic oligonucleotide
  Target: LAMA2; (-) strand; PAM type: NRG; PAM sequence: GAG
gccatgcttctttgccttgt

SEQ ID NO: 93226 - DNA, 20 bp, Artificial Sequence
  Description of Artificial Sequence: Synthetic oligonucleotide
  Target: LAMA2; (-) strand; PAM type: NRG; PAM sequence: CAG
ttcagcaacatgtttcactc

SEQ ID NO: 93227 - DNA, 20 bp, Artificial Sequence
  Description of Artificial Sequence: Synthetic oligonucleotide
  Target: LAMA2; (-) strand; PAM type: NRG; PAM sequence: CAG
caggtgctagctttagcttt

SEQ ID NO: 93228 - DNA, 20 bp, Artificial Sequence
  Description of Artificial Sequence: Synthetic oligonucleotide
  Target: LAMA2; (-) strand; PAM type: NRG; PAM sequence: TAG
gagaactcaggtgctagctt

SEQ ID NO: 93229 - DNA, 20 bp, Artificial Sequence
  Description of Artificial Sequence: Synthetic oligonucleotide
  Target: LAMA2; (-) strand; PAM type: NRG; PAM sequence: TAG
ccaacagagaactcaggtgc

SEQ ID NO: 93230 - DNA, 20 bp, Artificial Sequence
  Description of Artificial Sequence: Synthetic oligonucleotide
  Target: LAMA2; (-) strand; PAM type: NRG; PAM sequence: AGG
gaagaaccaacagagaactc

SEQ ID NO: 93231 - DNA, 20 bp, Artificial Sequence
  Description of Artificial Sequence: Synthetic oligonucleotide
  Target: LAMA2; (-) strand; PAM type: NRG; PAM sequence: CAG
tgaagaaccaacagagaact

SEQ ID NO: 93232 - DNA, 20 bp, Artificial Sequence
  Description of Artificial Sequence: Synthetic oligonucleotide
  Target: LAMA2; (-) strand; PAM type: NRG; PAM sequence: GAG
caccagatgaagaaccaaca

SEQ ID NO: 93233 - DNA, 20 bp, Artificial Sequence
  Description of Artificial Sequence: Synthetic oligonucleotide
  Target: LAMA2; (-) strand; PAM type: NRG; PAM sequence: CAG
aacaccagatgaagaaccaa

SEQ ID NO: 93234 - DNA, 20 bp, Artificial Sequence
  Description of Artificial Sequence: Synthetic oligonucleotide
  Target: LAMA2; (-) strand; PAM type: NRG; PAM sequence: AAG
atagagctgaacaccagatg

SEQ ID NO: 93235 - DNA, 20 bp, Artificial Sequence
  Description of Artificial Sequence: Synthetic oligonucleotide
  Target: LAMA2; (-) strand; PAM type: NRG; PAM sequence: CAG
gaagcaatagagctgaacac

SEQ ID NO: 93236 - DNA, 20 bp, Artificial Sequence
  Description of Artificial Sequence: Synthetic oligonucleotide
  Target: LAMA2; (-) strand; PAM type: NRG; PAM sequence: GAG
aatttgggtctgaagcaata

SEQ ID NO: 93237 - DNA, 20 bp, Artificial Sequence
  Description of Artificial Sequence: Synthetic oligonucleotide
  Target: LAMA2; (-) strand; PAM type: NRG; PAM sequence: TAG
ctaatttgggtctgaagcaa

SEQ ID NO: 93238 - DNA, 20 bp, Artificial Sequence
  Description of Artificial Sequence: Synthetic oligonucleotide
  Target: LAMA2; (-) strand; PAM type: NRG; PAM sequence: AAG
atatttctaatttgggtctg

SEQ ID NO: 93239 - DNA, 20 bp, Artificial Sequence
  Description of Artificial Sequence: Synthetic oligonucleotide
  Target: LAMA2; (-) strand; PAM type: NRG; PAM sequence: GGG
tttgcacatatttctaattt

SEQ ID NO: 93240 - DNA, 20 bp, Artificial Sequence
  Description of Artificial Sequence: Synthetic oligonucleotide
  Target: LAMA2; (-) strand; PAM type: NRG; PAM sequence: TGG
ctttgcacatatttctaatt

SEQ ID NO: 93241 - DNA, 20 bp, Artificial Sequence
  Description of Artificial Sequence: Synthetic oligonucleotide
  Target: LAMA2; (-) strand; PAM type: NRG; PAM sequence: TGG
ccttgccatctcataccctc

SEQ ID NO: 93242 - DNA, 20 bp, Artificial Sequence
  Description of Artificial Sequence: Synthetic oligonucleotide
  Target: LAMA2; (-) strand; PAM type: NRG; PAM sequence: AAG
tcataaacctaaccaaacaa

SEQ ID NO: 93243 - DNA, 20 bp, Artificial Sequence
  Description of Artificial Sequence: Synthetic oligonucleotide
  Target: LAMA2; (-) strand; PAM type: NRG; PAM sequence: AAG
gaaagctttcagaagagatc

SEQ ID NO: 93244 - DNA, 20 bp, Artificial Sequence
  Description of Artificial Sequence: Synthetic oligonucleotide
  Target: LAMA2; (-) strand; PAM type: NRG; PAM sequence: GAG
cctcaggaaagctttcagaa

SEQ ID NO: 93245 - DNA, 20 bp, Artificial Sequence
  Description of Artificial Sequence: Synthetic oligonucleotide
  Target: LAMA2; (-) strand; PAM type: NRG; PAM sequence: AAG
atcctcaggaaagctttcag

SEQ ID NO: 93246 - DNA, 20 bp, Artificial Sequence
  Description of Artificial Sequence: Synthetic oligonucleotide
  Target: LAMA2; (-) strand; PAM type: NRG; PAM sequence: CAG
ggaatcctcaggaaagcttt

SEQ ID NO: 93247 - DNA, 20 bp, Artificial Sequence
  Description of Artificial Sequence: Synthetic oligonucleotide
  Target: LAMA2; (-) strand; PAM type: NRG; PAM sequence: AAG
cactgatggaatcctcagga

SEQ ID NO: 93248 - DNA, 20 bp, Artificial Sequence
  Description of Artificial Sequence: Synthetic oligonucleotide
  Target: LAMA2; (-) strand; PAM type: NRG; PAM sequence: AGG
ctcacactgatggaatcctc

SEQ ID NO: 93249 - DNA, 20 bp, Artificial Sequence
  Description of Artificial Sequence: Synthetic oligonucleotide
  Target: LAMA2; (-) strand; PAM type: NRG; PAM sequence: CAG
cctcacactgatggaatcct

SEQ ID NO: 93250 - DNA, 20 bp, Artificial Sequence
  Description of Artificial Sequence: Synthetic oligonucleotide
  Target: LAMA2; (-) strand; PAM type: NRG; PAM sequence: TGG
caggtatgccctcacactga

SEQ ID NO: 93251 - DNA, 20 bp, Artificial Sequence
  Description of Artificial Sequence: Synthetic oligonucleotide
  Target: LAMA2; (-) strand; PAM type: NRG; PAM sequence: AGG
tgcggcatgtgcttccttgc

SEQ ID NO: 93252 - DNA, 20 bp, Artificial Sequence
  Description of Artificial Sequence: Synthetic oligonucleotide
  Target: LAMA2; (-) strand; PAM type: NRG; PAM sequence: CAG
ctgcggcatgtgcttccttg

SEQ ID NO: 93253 - DNA, 20 bp, Artificial Sequence
  Description of Artificial Sequence: Synthetic oligonucleotide
  Target: LAMA2; (-) strand; PAM type: NRG; PAM sequence: CGG
gcgtgcctgtgtgcaggctg

SEQ ID NO: 93254 - DNA, 20 bp, Artificial Sequence
  Description of Artificial Sequence: Synthetic oligonucleotide
  Target: LAMA2; (-) strand; PAM type: NRG; PAM sequence: AGG
agtggggcgtgcctgtgtgc

SEQ ID NO: 93255 - DNA, 20 bp, Artificial Sequence
  Description of Artificial Sequence: Synthetic oligonucleotide
  Target: LAMA2; (-) strand; PAM type: NRG; PAM sequence: CAG
tagtggggcgtgcctgtgtg

SEQ ID NO: 93256 - DNA, 20 bp, Artificial Sequence
  Description of Artificial Sequence: Synthetic oligonucleotide
  Target: LAMA2; (-) strand; PAM type: NRG; PAM sequence: GGG
cttcagctactgccatagtg

SEQ ID NO: 93257 - DNA, 20 bp, Artificial Sequence
  Description of Artificial Sequence: Synthetic oligonucleotide
  Target: LAMA2; (-) strand; PAM type: NRG; PAM sequence: GGG
tcttcagctactgccatagt

SEQ ID NO: 93258 - DNA, 20 bp, Artificial Sequence
  Description of Artificial Sequence: Synthetic oligonucleotide
  Target: LAMA2; (-) strand; PAM type: NRG; PAM sequence: TGG
ttcttcagctactgccatag

SEQ ID NO: 93259 - DNA, 20 bp, Artificial Sequence
  Description of Artificial Sequence: Synthetic oligonucleotide
  Target: LAMA2; (-) strand; PAM type: NRG; PAM sequence: TAG
tccttcttcagctactgcca

SEQ ID NO: 93260 - DNA, 20 bp, Artificial Sequence
  Description of Artificial Sequence: Synthetic oligonucleotide
  Target: LAMA2; (-) strand; PAM type: NRG; PAM sequence: CAG
ggtggcagtgcttccttctt

SEQ ID NO: 93261 - DNA, 20 bp, Artificial Sequence
  Description of Artificial Sequence: Synthetic oligonucleotide
  Target: LAMA2; (-) strand; PAM type: NRG; PAM sequence: CAG
gtatgtggtagtggtggtgg

SEQ ID NO: 93262 - DNA, 20 bp, Artificial Sequence
  Description of Artificial Sequence: Synthetic oligonucleotide
  Target: LAMA2; (-) strand; PAM type: NRG; PAM sequence: TGG
tcagtatgtggtagtggtgg

SEQ ID NO: 93263 - DNA, 20 bp, Artificial Sequence
  Description of Artificial Sequence: Synthetic oligonucleotide
  Target: LAMA2; (-) strand; PAM type: NRG; PAM sequence: TGG
atctcagtatgtggtagtgg

SEQ ID NO: 93264 - DNA, 20 bp, Artificial Sequence
  Description of Artificial Sequence: Synthetic oligonucleotide
  Target: LAMA2; (-) strand; PAM type: NRG; PAM sequence: TGG
gaaatctcagtatgtggtag

SEQ ID NO: 93265 - DNA, 20 bp, Artificial Sequence
  Description of Artificial Sequence: Synthetic oligonucleotide
  Target: LAMA2; (-) strand; PAM type: NRG; PAM sequence: TAG
ttggaaatctcagtatgtgg

SEQ ID NO: 93266 - DNA, 20 bp, Artificial Sequence
  Description of Artificial Sequence: Synthetic oligonucleotide
  Target: LAMA2; (-) strand; PAM type: NRG; PAM sequence: TGG
attttggaaatctcagtatg

SEQ ID NO: 93267 - DNA, 20 bp, Artificial Sequence
  Description of Artificial Sequence: Synthetic oligonucleotide
  Target: LAMA2; (-) strand; PAM type: NRG; PAM sequence: CAG
gttagtgattttggaaatct

SEQ ID NO: 93268 - DNA, 20 bp, Artificial Sequence
  Description of Artificial Sequence: Synthetic oligonucleotide
  Target: LAMA2; (-) strand; PAM type: NRG; PAM sequence: TGG
gagaaatttgttagtgattt

SEQ ID NO: 93269 - DNA, 20 bp, Artificial Sequence
  Description of Artificial Sequence: Synthetic oligonucleotide
  Target: LAMA2; (-) strand; PAM type: NRG; PAM sequence: TAG
agcagcctggagaaatttgt

SEQ ID NO: 93270 - DNA, 20 bp, Artificial Sequence
  Description of Artificial Sequence: Synthetic oligonucleotide
  Target: LAMA2; (-) strand; PAM type: NRG; PAM sequence: GAG
tctgaatttgaagcagcctg

SEQ ID NO: 93271 - DNA, 20 bp, Artificial Sequence
  Description of Artificial Sequence: Synthetic oligonucleotide
  Target: LAMA2; (-) strand; PAM type: NRG; PAM sequence: TGG
cctctgaatttgaagcagcc

SEQ ID NO: 93272 - DNA, 20 bp, Artificial Sequence
  Description of Artificial Sequence: Synthetic oligonucleotide
  Target: LAMA2; (-) strand; PAM type: NRG; PAM sequence: CAG
aaatccctctgaatttgaag

SEQ ID NO: 93273 - DNA, 20 bp, Artificial Sequence
  Description of Artificial Sequence: Synthetic oligonucleotide
  Target: LAMA2; (-) strand; PAM type: NRG; PAM sequence: AAG
gccaaatccctctgaatttg

SEQ ID NO: 93274 - DNA, 20 bp, Artificial Sequence
  Description of Artificial Sequence: Synthetic oligonucleotide
  Target: LAMA2; (-) strand; PAM type: NRG; PAM sequence: TAG
gcctcacatactttcttctg

SEQ ID NO: 93275 - DNA, 20 bp, Artificial Sequence
  Description of Artificial Sequence: Synthetic oligonucleotide
  Target: LAMA2; (-) strand; PAM type: NRG; PAM sequence: CAG
ctccaggcctggcacatatg

SEQ ID NO: 93276 - DNA, 20 bp, Artificial Sequence
  Description of Artificial Sequence: Synthetic oligonucleotide
  Target: LAMA2; (-) strand; PAM type: NRG; PAM sequence: TGG
tttagaaattcctccaggcc

SEQ ID NO: 93277 - DNA, 20 bp, Artificial Sequence
  Description of Artificial Sequence: Synthetic oligonucleotide
  Target: LAMA2; (-) strand; PAM type: NRG; PAM sequence: AGG
tgctttttagaaattcctcc

SEQ ID NO: 93278 - DNA, 20 bp, Artificial Sequence
  Description of Artificial Sequence: Synthetic oligonucleotide
  Target: LAMA2; (-) strand; PAM type: NRG; PAM sequence: CAG
ctgctttttagaaattcctc

SEQ ID NO: 93279 - DNA, 20 bp, Artificial Sequence
  Description of Artificial Sequence: Synthetic oligonucleotide
  Target: LAMA2; (-) strand; PAM type: NRG; PAM sequence: TAG
ggaaatgtatagctgctttt

SEQ ID NO: 93280 - DNA, 20 bp, Artificial Sequence
  Description of Artificial Sequence: Synthetic oligonucleotide
  Target: LAMA2; (-) strand; PAM type: NRG; PAM sequence: TAG
cagtaacaagtggaaatgta

SEQ ID NO: 93281 - DNA, 20 bp, Artificial Sequence
  Description of Artificial Sequence: Synthetic oligonucleotide
  Target: LAMA2; (-) strand; PAM type: NRG; PAM sequence: TGG
tagtgatcatcagtaacaag

SEQ ID NO: 93282 - DNA, 20 bp, Artificial Sequence
  Description of Artificial Sequence: Synthetic oligonucleotide
  Target: LAMA2; (-) strand; PAM type: NRG; PAM sequence: AAG
gagtagtgatcatcagtaac

SEQ ID NO: 93283 - DNA, 20 bp, Artificial Sequence
  Description of Artificial Sequence: Synthetic oligonucleotide
  Target: LAMA2; (-) strand; PAM type: NRG; PAM sequence: CAG
ctgctctgagtagtgatcat

SEQ ID NO: 93284 - DNA, 20 bp, Artificial Sequence
  Description of Artificial Sequence: Synthetic oligonucleotide
  Target: LAMA2; (-) strand; PAM type: NRG; PAM sequence: TAG
tgactttcgactgctctgag

SEQ ID NO: 93285 - DNA, 20 bp, Artificial Sequence
  Description of Artificial Sequence: Synthetic oligonucleotide
  Target: LAMA2; (-) strand; PAM type: NRG; PAM sequence: GAG
aactgactttcgactgctct

SEQ ID NO: 93286 - DNA, 20 bp, Artificial Sequence
  Description of Artificial Sequence: Synthetic oligonucleotide
  Target: LAMA2; (-) strand; PAM type: NRG; PAM sequence: CAG
gaatatagcccagtggagag

SEQ ID NO: 93287 - DNA, 20 bp, Artificial Sequence
  Description of Artificial Sequence: Synthetic oligonucleotide
  Target: LAMA2; (-) strand; PAM type: NRG; PAM sequence: GAG
cgtgaatatagcccagtgga

SEQ ID NO: 93288 - DNA, 20 bp, Artificial Sequence
  Description of Artificial Sequence: Synthetic oligonucleotide
  Target: LAMA2; (-) strand; PAM type: NRG; PAM sequence: GAG
gacgtgaatatagcccagtg

SEQ ID NO: 93289 - DNA, 20 bp, Artificial Sequence
  Description of Artificial Sequence: Synthetic oligonucleotide
  Target: LAMA2; (-) strand; PAM type: NRG; PAM sequence: TGG
cagacgtgaatatagcccag

SEQ ID NO: 93290 - DNA, 20 bp, Artificial Sequence
  Description of Artificial Sequence: Synthetic oligonucleotide
  Target: LAMA2; (-) strand; PAM type: NRG; PAM sequence: CAG
ctgcagacgtgaatatagcc

SEQ ID NO: 93291 - DNA, 20 bp, Artificial Sequence
  Description of Artificial Sequence: Synthetic oligonucleotide
  Target: LAMA2; (-) strand; PAM type: NRG; PAM sequence: TAG
tatttctgcagacgtgaata

SEQ ID NO: 93292 - DNA, 20 bp, Artificial Sequence
  Description of Artificial Sequence: Synthetic oligonucleotide
  Target: LAMA2; (-) strand; PAM type: NRG; PAM sequence: CAG
aaatgacattgctatttctg

SEQ ID NO: 93293 - DNA, 20 bp, Artificial Sequence
  Description of Artificial Sequence: Synthetic oligonucleotide
  Target: LAMA2; (-) strand; PAM type: NRG; PAM sequence: AGG
gattagggtctggccaatgg

SEQ ID NO: 93294 - DNA, 20 bp, Artificial Sequence
  Description of Artificial Sequence: Synthetic oligonucleotide
  Target: LAMA2; (-) strand; PAM type: NRG; PAM sequence: GAG
agattagggtctggccaatg

SEQ ID NO: 93295 - DNA, 20 bp, Artificial Sequence
  Description of Artificial Sequence: Synthetic oligonucleotide
  Target: LAMA2; (-) strand; PAM type: NRG; PAM sequence: TGG
agagattagggtctggccaa

SEQ ID NO: 93296 - DNA, 20 bp, Artificial Sequence
  Description of Artificial Sequence: Synthetic oligonucleotide
  Target: LAMA2; (-) strand; PAM type: NRG; PAM sequence: TGG
cagagacagagattagggtc

SEQ ID NO: 93297 - DNA, 20 bp, Artificial Sequence
  Description of Artificial Sequence: Synthetic oligonucleotide
  Target: LAMA2; (-) strand; PAM type: NRG; PAM sequence: GGG
caccccagagacagagatta

SEQ ID NO: 93298 - DNA, 20 bp, Artificial Sequence
  Description of Artificial Sequence: Synthetic oligonucleotide
  Target: LAMA2; (-) strand; PAM type: NRG; PAM sequence: AGG
tcaccccagagacagagatt

SEQ ID NO: 93299 - DNA, 20 bp, Artificial Sequence
  Description of Artificial Sequence: Synthetic oligonucleotide
  Target: LAMA2; (-) strand; PAM type: NRG; PAM sequence: TAG
ctcaccccagagacagagat

SEQ ID NO: 93300 - DNA, 20 bp, Artificial Sequence
  Description of Artificial Sequence: Synthetic oligonucleotide
  Target: LAMA2; (-) strand; PAM type: NRG; PAM sequence: GAG
tcattctcaccccagagaca

SEQ ID NO: 93301 - DNA, 20 bp, Artificial Sequence
  Description of Artificial Sequence: Synthetic oligonucleotide
  Target: LAMA2; (-) strand; PAM type: NRG; PAM sequence: CAG
ggtcattctcaccccagaga

SEQ ID NO: 93302 - DNA, 20 bp, Artificial Sequence
  Description of Artificial Sequence: Synthetic oligonucleotide
  Target: LAMA2; (-) strand; PAM type: NRG; PAM sequence: GAG
ggctggtcattctcacccca

SEQ ID NO: 93303 - DNA, 20 bp, Artificial Sequence
  Description of Artificial Sequence: Synthetic oligonucleotide
  Target: LAMA2; (-) strand; PAM type: NRG; PAM sequence: CAG
caggctggtcattctcaccc

SEQ ID NO: 93304 - DNA, 20 bp, Artificial Sequence
  Description of Artificial Sequence: Synthetic oligonucleotide
  Target: LAMA2; (-) strand; PAM type: NRG; PAM sequence: TGG
tctgacaaaagagtacaggc

SEQ ID NO: 93305 - DNA, 20 bp, Artificial Sequence
  Description of Artificial Sequence: Synthetic oligonucleotide
  Target: LAMA2; (-) strand; PAM type: NRG; PAM sequence: AGG
ctgctctgacaaaagagtac

SEQ ID NO: 93306 - DNA, 20 bp, Artificial Sequence
  Description of Artificial Sequence: Synthetic oligonucleotide
  Target: LAMA2; (-) strand; PAM type: NRG; PAM sequence: CAG
actgctctgacaaaagagta

SEQ ID NO: 93307 - DNA, 20 bp, Artificial Sequence
  Description of Artificial Sequence: Synthetic oligonucleotide
  Target: LAMA2; (-) strand; PAM type: NRG; PAM sequence: GAG
ccactactgctctgacaaaa

SEQ ID NO: 93308 - DNA, 20 bp, Artificial Sequence
  Description of Artificial Sequence: Synthetic oligonucleotide
  Target: LAMA2; (-) strand; PAM type: NRG; PAM sequence: AAG
ctccactactgctctgacaa

SEQ ID NO: 93309 - DNA, 20 bp, Artificial Sequence
  Description of Artificial Sequence: Synthetic oligonucleotide
  Target: LAMA2; (-) strand; PAM type: NRG; PAM sequence: TAG
aaggacatacacaaagtcat

SEQ ID NO: 93310 - DNA, 20 bp, Artificial Sequence
  Description of Artificial Sequence: Synthetic oligonucleotide
  Target: LAMA2; (-) strand; PAM type: NRG; PAM sequence: AAG
aaggaagaaggacatacaca

SEQ ID NO: 93311 - DNA, 20 bp, Artificial Sequence
  Description of Artificial Sequence: Synthetic oligonucleotide
  Target: LAMA2; (-) strand; PAM type: NRG; PAM sequence: AGG
gaaaacagggacaaggaaga

SEQ ID NO: 93312 - DNA, 20 bp, Artificial Sequence
  Description of Artificial Sequence: Synthetic oligonucleotide
  Target: LAMA2; (-) strand; PAM type: NRG; PAM sequence: AAG
ggaaaacagggacaaggaag

SEQ ID NO: 93313 - DNA, 20 bp, Artificial Sequence
  Description of Artificial Sequence: Synthetic oligonucleotide
  Target: LAMA2; (-) strand; PAM type: NRG; PAM sequence: AAG
tgcggaaaacagggacaagg

SEQ ID NO: 93314 - DNA, 20 bp, Artificial Sequence
  Description of Artificial Sequence: Synthetic oligonucleotide
  Target: LAMA2; (-) strand; PAM type: NRG; PAM sequence: AGG
tgttgcggaaaacagggaca

SEQ ID NO: 93315 - DNA, 20 bp, Artificial Sequence
  Description of Artificial Sequence: Synthetic oligonucleotide
  Target: LAMA2; (-) strand; PAM type: NRG; PAM sequence: AAG
ttgttgcggaaaacagggac

SEQ ID NO: 93316 - DNA, 20 bp, Artificial Sequence
  Description of Artificial Sequence: Synthetic oligonucleotide
  Target: LAMA2; (-) strand; PAM type: NRG; PAM sequence: GGG
tgatgttgttgcggaaaaca

SEQ ID NO: 93317 - DNA, 20 bp, Artificial Sequence
  Description of Artificial Sequence: Synthetic oligonucleotide
  Target: LAMA2; (-) strand; PAM type: NRG; PAM sequence: AGG
ttgatgttgttgcggaaaac

SEQ ID NO: 93318 - DNA, 20 bp, Artificial Sequence
  Description of Artificial Sequence: Synthetic oligonucleotide
  Target: LAMA2; (-) strand; PAM type: NRG; PAM sequence: CAG
gttgatgttgttgcggaaaa

SEQ ID NO: 93319 - DNA, 20 bp, Artificial Sequence
  Description of Artificial Sequence: Synthetic oligonucleotide
  Target: LAMA2; (-) strand; PAM type: NRG; PAM sequence: CGG
aagctatgttgatgttgttg

SEQ ID NO: 93320 - DNA, 20 bp, Artificial Sequence
  Description of Artificial Sequence: Synthetic oligonucleotide
  Target: LAMA2; (-) strand; PAM type: NRG; PAM sequence: AAG
ctaaatggcacgttgggcta

SEQ ID NO: 93321 - DNA, 20 bp, Artificial Sequence
  Description of Artificial Sequence: Synthetic oligonucleotide
  Target: LAMA2; (-) strand; PAM type: NRG; PAM sequence: GGG
tccggtctaaatggcacgtt

SEQ ID NO: 93322 - DNA, 20 bp, Artificial Sequence
  Description of Artificial Sequence: Synthetic oligonucleotide
  Target: LAMA2; (-) strand; PAM type: NRG; PAM sequence: TGG
ctccggtctaaatggcacgt

SEQ ID NO: 93323 - DNA, 20 bp, Artificial Sequence
  Description of Artificial Sequence: Synthetic oligonucleotide
  Target: LAMA2; (-) strand; PAM type: NRG; PAM sequence: TGG
atccaagactccggtctaaa

SEQ ID NO: 93324 - DNA, 20 bp, Artificial Sequence
  Description of Artificial Sequence: Synthetic oligonucleotide
  Target: LAMA2; (-) strand; PAM type: NRG; PAM sequence: CGG
cacagatcaatccaagactc

SEQ ID NO: 93325 - DNA, 20 bp, Artificial Sequence
  Description of Artificial Sequence: Synthetic oligonucleotide
  Target: LAMA2; (-) strand; PAM type: NRG; PAM sequence: AAG
catccatcacagatcaatcc

SEQ ID NO: 93326 - DNA, 20 bp, Artificial Sequence
  Description of Artificial Sequence: Synthetic oligonucleotide
  Target: LAMA2; (-) strand; PAM type: NRG; PAM sequence: CAG
acccgacagggcatccatca

SEQ ID NO: 93327 - DNA, 20 bp, Artificial Sequence
  Description of Artificial Sequence: Synthetic oligonucleotide
  Target: LAMA2; (-) strand; PAM type: NRG; PAM sequence: GGG
gtggtcctgtgtacccgaca

SEQ ID NO: 93328 - DNA, 20 bp, Artificial Sequence
  Description of Artificial Sequence: Synthetic oligonucleotide
  Target: LAMA2; (-) strand; PAM type: NRG; PAM sequence: AGG
cgtggtcctgtgtacccgac

SEQ ID NO: 93329 - DNA, 20 bp, Artificial Sequence
  Description of Artificial Sequence: Synthetic oligonucleotide
  Target: LAMA2; (-) strand; PAM type: NRG; PAM sequence: CAG
gcgtggtcctgtgtacccga

SEQ ID NO: 93330 - DNA, 20 bp, Artificial Sequence
  Description of Artificial Sequence: Synthetic oligonucleotide
  Target: LAMA2; (-) strand; PAM type: NRG; PAM sequence: TGG
tactcttacctctcacagcg

SEQ ID NO: 93331 - DNA, 20 bp, Artificial Sequence
  Description of Artificial Sequence: Synthetic oligonucleotide
  Target: LAMA2; (-) strand; PAM type: NRG; PAM sequence: CAG
tagtatactcttacctctca

SEQ ID NO: 93332 - DNA, 20 bp, Artificial Sequence
  Description of Artificial Sequence: Synthetic oligonucleotide
  Target: LAMA2; (-) strand; PAM type: NRG; PAM sequence: TAG
aatcattttgcaagacagtg

SEQ ID NO: 93333 - DNA, 20 bp, Artificial Sequence
  Description of Artificial Sequence: Synthetic oligonucleotide
  Target: LAMA2; (-) strand; PAM type: NRG; PAM sequence: CAG
gtagaaatcattttgcaaga

SEQ ID NO: 93334 - DNA, 20 bp, Artificial Sequence
  Description of Artificial Sequence: Synthetic oligonucleotide
  Target: LAMA2; (-) strand; PAM type: NRG; PAM sequence: AAG
caaggtagaaatcattttgc

SEQ ID NO: 93335 - DNA, 20 bp, Artificial Sequence
  Description of Artificial Sequence: Synthetic oligonucleotide
  Target: LAMA2; (-) strand; PAM type: NRG; PAM sequence: TAG
cggttttataactcccaagg

SEQ ID NO: 93336 - DNA, 20 bp, Artificial Sequence
  Description of Artificial Sequence: Synthetic oligonucleotide
  Target: LAMA2; (-) strand; PAM type: NRG; PAM sequence: AGG
ctgcggttttataactccca

SEQ ID NO: 93337 - DNA, 20 bp, Artificial Sequence
  Description of Artificial Sequence: Synthetic oligonucleotide
  Target: LAMA2; (-) strand; PAM type: NRG; PAM sequence: AAG
tctgcggttttataactccc

SEQ ID NO: 93338 - DNA, 20 bp, Artificial Sequence
  Description of Artificial Sequence: Synthetic oligonucleotide
  Target: LAMA2; (-) strand; PAM type: NRG; PAM sequence: CGG
gcaaaggatgattgtatctg

SEQ ID NO: 93339 - DNA, 20 bp, Artificial Sequence
  Description of Artificial Sequence: Synthetic oligonucleotide
  Target: LAMA2; (-) strand; PAM type: NRG; PAM sequence: AGG
ttctccaaaggatgatgcaa

SEQ ID NO: 93340 - DNA, 20 bp, Artificial Sequence
  Description of Artificial Sequence: Synthetic oligonucleotide
  Target: LAMA2; (-) strand; PAM type: NRG; PAM sequence: AAG
tttctccaaaggatgatgca

SEQ ID NO: 93341 - DNA, 20 bp, Artificial Sequence
  Description of Artificial Sequence: Synthetic oligonucleotide
  Target: LAMA2; (-) strand; PAM type: NRG; PAM sequence: AGG
gtgtggccttttttctccaa

SEQ ID NO: 93342 - DNA, 20 bp, Artificial Sequence
  Description of Artificial Sequence: Synthetic oligonucleotide
  Target: LAMA2; (-) strand; PAM type: NRG; PAM sequence: AAG
agtgtggccttttttctcca

SEQ ID NO: 93343 - DNA, 20 bp, Artificial Sequence
  Description of Artificial Sequence: Synthetic oligonucleotide
  Target: LAMA2; (-) strand; PAM type: NRG; PAM sequence: TGG
ttatttcacctcattgagtg

SEQ ID NO: 93344 - DNA, 20 bp, Artificial Sequence
  Description of Artificial Sequence: Synthetic oligonucleotide
  Target: LAMA2; (-) strand; PAM type: NRG; PAM sequence: GAG
aaactttatttcacctcatt

SEQ ID NO: 93345 - DNA, 20 bp, Artificial Sequence
  Description of Artificial Sequence: Synthetic oligonucleotide
  Target: LAMA2; (-) strand; PAM type: NRG; PAM sequence: GAG
atttgtttgacaagtgcgtt

SEQ ID NO: 93346 - DNA, 20 bp, Artificial Sequence
  Description of Artificial Sequence: Synthetic oligonucleotide
  Target: LAMA2; (-) strand; PAM type: NRG; PAM sequence: AAG
atataatgcatttgtttgac

SEQ ID NO: 93347 - DNA, 20 bp, Artificial Sequence
  Description of Artificial Sequence: Synthetic oligonucleotide
  Target: LAMA2; (-) strand; PAM type: NRG; PAM sequence: AAG
tgagtgaatgaagatttatg

SEQ ID NO: 93348 - DNA, 20 bp, Artificial Sequence
  Description of Artificial Sequence: Synthetic oligonucleotide
  Target: LAMA2; (-) strand; PAM type: NRG; PAM sequence: AAG
agatattctctgagtgaatg

SEQ ID NO: 93349 - DNA, 20 bp, Artificial Sequence
  Description of Artificial Sequence: Synthetic oligonucleotide
  Target: LAMA2; (-) strand; PAM type: NRG; PAM sequence: GAG
acattaatcagatattctct

SEQ ID NO: 93350 - DNA, 20 bp, Artificial Sequence
  Description of Artificial Sequence: Synthetic oligonucleotide
  Target: LAMA2; (-) strand; PAM type: NRG; PAM sequence: CAG
tttaagattaaaacattaat

SEQ ID NO: 93351 - DNA, 20 bp, Artificial Sequence
  Description of Artificial Sequence: Synthetic oligonucleotide
  Target: LAMA2; (-) strand; PAM type: NRG; PAM sequence: AAG
taggttaatacttaaccttt

SEQ ID NO: 93352 - DNA, 20 bp, Artificial Sequence
  Description of Artificial Sequence: Synthetic oligonucleotide
  Target: LAMA2; (-) strand; PAM type: NRG; PAM sequence: AGG
atgctttctacaaagattgt

SEQ ID NO: 93353 - DNA, 20 bp, Artificial Sequence
  Description of Artificial Sequence: Synthetic oligonucleotide
  Target: LAMA2; (-) strand; PAM type: NRG; PAM sequence: TAG
aatgctttctacaaagattg

SEQ ID NO: 93354 - DNA, 20 bp, Artificial Sequence
  Description of Artificial Sequence: Synthetic oligonucleotide
  Target: LAMA2; (-) strand; PAM type: NRG; PAM sequence: AAG
cttgagcaatgctttctaca

SEQ ID NO: 93355 - DNA, 20 bp, Artificial Sequence
  Description of Artificial Sequence: Synthetic oligonucleotide
  Target: LAMA2; (-) strand; PAM type: NRG; PAM sequence: GAG
aagtgcatgactttccactt

SEQ ID NO: 93356 - DNA, 20 bp, Artificial Sequence
  Description of Artificial Sequence: Synthetic oligonucleotide
  Target: LAMA2; (-) strand; PAM type: NRG; PAM sequence: AAG
agacagtaagataaatctta

SEQ ID NO: 93357 - DNA, 20 bp, Artificial Sequence
  Description of Artificial Sequence: Synthetic oligonucleotide
  Target: LAMA2; (-) strand; PAM type: NRG; PAM sequence: AAG
atggtgcctacacagacagt

SEQ ID NO: 93358 - DNA, 20 bp, Artificial Sequence
  Description of Artificial Sequence: Synthetic oligonucleotide
  Target: LAMA2; (-) strand; PAM type: NRG; PAM sequence: CAG
ataaatggtgcctacacaga

SEQ ID NO: 93359 - DNA, 20 bp, Artificial Sequence
  Description of Artificial Sequence: Synthetic oligonucleotide
  Target: LAMA2; (-) strand; PAM type: NRG; PAM sequence: CAG
aaaaataaatggtgcctaca

SEQ ID NO: 93360 - DNA, 20 bp, Artificial Sequence
  Description of Artificial Sequence: Synthetic oligonucleotide
  Target: LAMA2; (-) strand; PAM type: NRG; PAM sequence: TGG
agctaattatgaaaaataaa

SEQ ID NO: 93361 - DNA, 20 bp, Artificial Sequence
  Description of Artificial Sequence: Synthetic oligonucleotide
  Target: LAMA2; (-) strand; PAM type: NRG; PAM sequence: AAG
agctacattttaaggacaaa

SEQ ID NO: 93362 - DNA, 20 bp, Artificial Sequence
  Description of Artificial Sequence: Synthetic oligonucleotide
  Target: LAMA2; (-) strand; PAM type: NRG; PAM sequence: AGG
tgcatttaagctacatttta

SEQ ID NO: 93363 - DNA, 20 bp, Artificial Sequence
  Description of Artificial Sequence: Synthetic oligonucleotide
  Target: LAMA2; (-) strand; PAM type: NRG; PAM sequence: AAG
atgcatttaagctacatttt

SEQ ID NO: 93364 - DNA, 20 bp, Artificial Sequence
  Description of Artificial Sequence: Synthetic oligonucleotide
  Target: LAMA2; (-) strand; PAM type: NRG; PAM sequence: AAG
gaactatgaactatgcattt

SEQ ID NO: 93365 - DNA, 20 bp, Artificial Sequence
  Description of Artificial Sequence: Synthetic oligonucleotide
  Target: LAMA2; (-) strand; PAM type: NRG; PAM sequence: AAG
tctattttcaagtatattta

SEQ ID NO: 93366 - DNA, 20 bp, Artificial Sequence
  Description of Artificial Sequence: Synthetic oligonucleotide
  Target: LAMA2; (-) strand; PAM type: NRG; PAM sequence: AAG
tacattttgtttctattttc

SEQ ID NO: 93367 - DNA, 20 bp, Artificial Sequence
  Description of Artificial Sequence: Synthetic oligonucleotide
  Target: LAMA2; (-) strand; PAM type: NRG; PAM sequence: AGG
ggtttaggagcaattagaag

SEQ ID NO: 93368 - DNA, 20 bp, Artificial Sequence
  Description of Artificial Sequence: Synthetic oligonucleotide
  Target: LAMA2; (-) strand; PAM type: NRG; PAM sequence: GAG
tggtttaggagcaattagaa

SEQ ID NO: 93369 - DNA, 20 bp, Artificial Sequence
  Description of Artificial Sequence: Synthetic oligonucleotide
  Target: LAMA2; (-) strand; PAM type: NRG; PAM sequence: AAG
actggtttaggagcaattag

SEQ ID NO: 93370 - DNA, 20 bp, Artificial Sequence
  Description of Artificial Sequence: Synthetic oligonucleotide
  Target: LAMA2; (-) strand; PAM type: NRG; PAM sequence: TAG
aatactggtttaggagcaat

SEQ ID NO: 93371 - DNA, 20 bp, Artificial Sequence
  Description of Artificial Sequence: Synthetic oligonucleotide
  Target: LAMA2; (-) strand; PAM type: NRG; PAM sequence: GAG
gaattaaaatactggtttag

SEQ ID NO: 93372 - DNA, 20 bp, Artificial Sequence
  Description of Artificial Sequence: Synthetic oligonucleotide
  Target: LAMA2; (-) strand; PAM type: NRG; PAM sequence: AGG
aggaattaaaatactggttt

SEQ ID NO: 93373 - DNA, 20 bp, Artificial Sequence
  Description of Artificial Sequence: Synthetic oligonucleotide
  Target: LAMA2; (-) strand; PAM type: NRG; PAM sequence: TAG
caggaattaaaatactggtt

SEQ ID NO: 93374 - DNA, 20 bp, Artificial Sequence
  Description of Artificial Sequence: Synthetic oligonucleotide
  Target: LAMA2; (-) strand; PAM type: NRG; PAM sequence: TGG
atcaacaggaattaaaatac

SEQ ID NO: 93375 - DNA, 20 bp, Artificial Sequence
  Description of Artificial Sequence: Synthetic oligonucleotide
  Target: LAMA2; (-) strand; PAM type: NRG; PAM sequence: AGG
agcaacccagtaaaatcaac

SEQ ID NO: 93376 - DNA, 20 bp, Artificial Sequence
  Description of Artificial Sequence: Synthetic oligonucleotide
  Target: LAMA2; (-) strand; PAM type: NRG; PAM sequence: CAG
aagcaacccagtaaaatcaa

SEQ ID NO: 93377 - DNA, 20 bp, Artificial Sequence
  Description of Artificial Sequence: Synthetic oligonucleotide
  Target: LAMA2; (-) strand; PAM type: NRG; PAM sequence: CAG
gtttctgctgcaaagcaacc

SEQ ID NO: 93378 - DNA, 20 bp, Artificial Sequence
  Description of Artificial Sequence: Synthetic oligonucleotide
  Target: LAMA2; (-) strand; PAM type: NRG; PAM sequence: AAG
atactcttgtttctgctgca

SEQ ID NO: 93379 - DNA, 20 bp, Artificial Sequence
  Description of Artificial Sequence: Synthetic oligonucleotide
  Target: LAMA2; (-) strand; PAM type: NRG; PAM sequence: AGG
ttcttcaaaaacatttcaga

SEQ ID NO: 93380 - DNA, 20 bp, Artificial Sequence
  Description of Artificial Sequence: Synthetic oligonucleotide
  Target: LAMA2; (-) strand; PAM type: NRG; PAM sequence: AAG
tttcttcaaaaacatttcag

SEQ ID NO: 93381 - DNA, 20 bp, Artificial Sequence
  Description of Artificial Sequence: Synthetic oligonucleotide
  Target: LAMA2; (-) strand; PAM type: NRG; PAM sequence: CAG
ttatttcttcaaaaacattt

SEQ ID NO: 93382 - DNA, 20 bp, Artificial Sequence
  Description of Artificial Sequence: Synthetic oligonucleotide
  Target: LAMA2; (-) strand; PAM type: NRG; PAM sequence: AAG
tgctgaggctgaatatatag

SEQ ID NO: 93383 - DNA, 20 bp, Artificial Sequence
  Description of Artificial Sequence: Synthetic oligonucleotide
  Target: LAMA2; (-) strand; PAM type: NRG; PAM sequence: TAG
ttatgctgaggctgaatata

SEQ ID NO: 93384 - DNA, 20 bp, Artificial Sequence
  Description of Artificial Sequence: Synthetic oligonucleotide
  Target: LAMA2; (-) strand; PAM type: NRG; PAM sequence: AGG
tttgtatcacttttatgctg

SEQ ID NO: 93385 - DNA, 20 bp, Artificial Sequence
  Description of Artificial Sequence: Synthetic oligonucleotide
  Target: LAMA2; (-) strand; PAM type: NRG; PAM sequence: GAG
gtttgtatcacttttatgct

SEQ ID NO: 93386 - DNA, 20 bp, Artificial Sequence
  Description of Artificial Sequence: Synthetic oligonucleotide
  Target: LAMA2; (-) strand; PAM type: NRG; PAM sequence: AAG
tggcaatgatgtcaaggggg

SEQ ID NO: 93387 - DNA, 20 bp, Artificial Sequence
  Description of Artificial Sequence: Synthetic oligonucleotide
  Target: LAMA2; (-) strand; PAM type: NRG; PAM sequence: GGG
ttttggcaatgatgtcaagg

SEQ ID NO: 93388 - DNA, 20 bp, Artificial Sequence
  Description of Artificial Sequence: Synthetic oligonucleotide
  Target: LAMA2; (-) strand; PAM type: NRG; PAM sequence: GGG
tttttggcaatgatgtcaag

SEQ ID NO: 93389 - DNA, 20 bp, Artificial Sequence
  Description of Artificial Sequence: Synthetic oligonucleotide
  Target: LAMA2; (-) strand; PAM type: NRG; PAM sequence: GGG
gtttttggcaatgatgtcaa

SEQ ID NO: 93390 - DNA, 20 bp, Artificial Sequence
  Description of Artificial Sequence: Synthetic oligonucleotide
  Target: LAMA2; (-) strand; PAM type: NRG; PAM sequence: AGG
tgtttttggcaatgatgtca

SEQ ID NO: 93391 - DNA, 20 bp, Artificial Sequence
  Description of Artificial Sequence: Synthetic oligonucleotide
  Target: LAMA2; (-) strand; PAM type: NRG; PAM sequence: AAG
ttgtttttggcaatgatgtc

SEQ ID NO: 93392 - DNA, 20 bp, Artificial Sequence
  Description of Artificial Sequence: Synthetic oligonucleotide
  Target: LAMA2; (-) strand; PAM type: NRG; PAM sequence: TGG
cagagggaggtttttgtttt

SEQ ID NO: 93393 - DNA, 20 bp, Artificial Sequence
  Description of Artificial Sequence: Synthetic oligonucleotide
  Target: LAMA2; (-) strand; PAM type: NRG; PAM sequence: AGG
ccagtgctgaaaccagaggg

SEQ ID NO: 93394 - DNA, 20 bp, Artificial Sequence
  Description of Artificial Sequence: Synthetic oligonucleotide
  Target: LAMA2; (-) strand; PAM type: NRG; PAM sequence: GAG
tccagtgctgaaaccagagg

SEQ ID NO: 93395 - DNA, 20 bp, Artificial Sequence
  Description of Artificial Sequence: Synthetic oligonucleotide
  Target: LAMA2; (-) strand; PAM type: NRG; PAM sequence: GGG
tttccagtgctgaaaccaga

SEQ ID NO: 93396 - DNA, 20 bp, Artificial Sequence
  Description of Artificial Sequence: Synthetic oligonucleotide
  Target: LAMA2; (-) strand; PAM type: NRG; PAM sequence: AGG
atttccagtgctgaaaccag

SEQ ID NO: 93397 - DNA, 20 bp, Artificial Sequence
  Description of Artificial Sequence: Synthetic oligonucleotide
  Target: LAMA2; (-) strand; PAM type: NRG; PAM sequence: GAG
tatttccagtgctgaaacca

SEQ ID NO: 93398 - DNA, 20 bp, Artificial Sequence
  Description of Artificial Sequence: Synthetic oligonucleotide
  Target: LAMA2; (-) strand; PAM type: NRG; PAM sequence: CAG
actatttccagtgctgaaac

SEQ ID NO: 93399 - DNA, 20 bp, Artificial Sequence
  Description of Artificial Sequence: Synthetic oligonucleotide
  Target: LAMA2; (-) strand; PAM type: NRG; PAM sequence: CAG
gtggcagcagggactatttc

SEQ ID NO: 93400 - DNA, 20 bp, Artificial Sequence
  Description of Artificial Sequence: Synthetic oligonucleotide
  Target: LAMA2; (-) strand; PAM type: NRG; PAM sequence: GGG
tcccaggaagggtggcagca

SEQ ID NO: 93401 - DNA, 20 bp, Artificial Sequence
  Description of Artificial Sequence: Synthetic oligonucleotide
  Target: LAMA2; (-) strand; PAM type: NRG; PAM sequence: AGG
ctcccaggaagggtggcagc

SEQ ID NO: 93402 - DNA, 20 bp, Artificial Sequence
  Description of Artificial Sequence: Synthetic oligonucleotide
  Target: LAMA2; (-) strand; PAM type: NRG; PAM sequence: CAG
cctcccaggaagggtggcag

SEQ ID NO: 93403 - DNA, 20 bp, Artificial Sequence
  Description of Artificial Sequence: Synthetic oligonucleotide
  Target: LAMA2; (-) strand; PAM type: NRG; PAM sequence: CAG
ctccctcccaggaagggtgg

SEQ ID NO: 93404 - DNA, 20 bp, Artificial Sequence
  Description of Artificial Sequence: Synthetic oligonucleotide
  Target: LAMA2; (-) strand; PAM type: NRG; PAM sequence: TGG
cccctccctcccaggaaggg

SEQ ID NO: 93405 - DNA, 20 bp, Artificial Sequence
  Description of Artificial Sequence: Synthetic oligonucleotide
  Target: LAMA2; (-) strand; PAM type: NRG; PAM sequence: GGG
gcacccctccctcccaggaa

SEQ ID NO: 93406 - DNA, 20 bp, Artificial Sequence
  Description of Artificial Sequence: Synthetic oligonucleotide
  Target: LAMA2; (-) strand; PAM type: NRG; PAM sequence: AGG
tgcacccctccctcccagga

SEQ ID NO: 93407 - DNA, 20 bp, Artificial Sequence
  Description of Artificial Sequence: Synthetic oligonucleotide
  Target: LAMA2; (-) strand; PAM type: NRG; PAM sequence: AAG
ttgcacccctccctcccagg

SEQ ID NO: 93408 - DNA, 20 bp, Artificial Sequence
  Description of Artificial Sequence: Synthetic oligonucleotide
  Target: LAMA2; (-) strand; PAM type: NRG; PAM sequence: AGG
cctttgcacccctccctccc

SEQ ID NO: 93409 - DNA, 20 bp, Artificial Sequence
  Description of Artificial Sequence: Synthetic oligonucleotide
  Target: LAMA2; (-) strand; PAM type: NRG; PAM sequence: CAG
tcctttgcacccctccctcc

SEQ ID NO: 93410 - DNA, 20 bp, Artificial Sequence
  Description of Artificial Sequence: Synthetic oligonucleotide
  Target: LAMA2; (-) strand; PAM type: NRG; PAM sequence: AGG
cagtgatgatgagtgaaagt

SEQ ID NO: 93411 - DNA, 20 bp, Artificial Sequence
  Description of Artificial Sequence: Synthetic oligonucleotide
  Target: LAMA2; (-) strand; PAM type: NRG; PAM sequence: TAG
tcagtgatgatgagtgaaag

SEQ ID NO: 93412 - DNA, 20 bp, Artificial Sequence
  Description of Artificial Sequence: Synthetic oligonucleotide
  Target: LAMA2; (-) strand; PAM type: NRG; PAM sequence: AAG
gcctcagtgatgatgagtga

SEQ ID NO: 93413 - DNA, 20 bp, Artificial Sequence
  Description of Artificial Sequence: Synthetic oligonucleotide
  Target: LAMA2; (-) strand; PAM type: NRG; PAM sequence: GAG
gggttagcctcagtgatgat

SEQ ID NO: 93414 - DNA, 20 bp, Artificial Sequence
  Description of Artificial Sequence: Synthetic oligonucleotide
  Target: LAMA2; (-) strand; PAM type: NRG; PAM sequence: CAG
gccctcttcagggttagcct

SEQ ID NO: 93415 - DNA, 20 bp, Artificial Sequence
  Description of Artificial Sequence: Synthetic oligonucleotide
  Target: LAMA2; (-) strand; PAM type: NRG; PAM sequence: TAG
gaaacagccctcttcagggt

SEQ ID NO: 93416 - DNA, 20 bp, Artificial Sequence
  Description of Artificial Sequence: Synthetic oligonucleotide
  Target: LAMA2; (-) strand; PAM type: NRG; PAM sequence: GGG
ggcagaaacagccctcttca

SEQ ID NO: 93417 - DNA, 20 bp, Artificial Sequence
  Description of Artificial Sequence: Synthetic oligonucleotide
  Target: LAMA2; (-) strand; PAM type: NRG; PAM sequence: AGG
gggcagaaacagccctcttc

SEQ ID NO: 93418 - DNA, 20 bp, Artificial Sequence
  Description of Artificial Sequence: Synthetic oligonucleotide
  Target: LAMA2; (-) strand; PAM type: NRG; PAM sequence: CAG
cgggcagaaacagccctctt

SEQ ID NO: 93419 - DNA, 20 bp, Artificial Sequence
  Description of Artificial Sequence: Synthetic oligonucleotide
  Target: LAMA2; (-) strand; PAM type: NRG; PAM sequence: CAG
caggaaaagacgggcagaaa

SEQ ID NO: 93420 - DNA, 20 bp, Artificial Sequence
  Description of Artificial Sequence: Synthetic oligonucleotide
  Target: LAMA2; (-) strand; PAM type: NRG; PAM sequence: CAG
agatgacaggaaaagacggg

SEQ ID NO: 93421 - DNA, 20 bp, Artificial Sequence
  Description of Artificial Sequence: Synthetic oligonucleotide
  Target: LAMA2; (-) strand; PAM type: NRG; PAM sequence: GGG
ccaagatgacaggaaaagac

SEQ ID NO: 93422 - DNA, 20 bp, Artificial Sequence
  Description of Artificial Sequence: Synthetic oligonucleotide
  Target: LAMA2; (-) strand; PAM type: NRG; PAM sequence: CGG
gccaagatgacaggaaaaga

SEQ ID NO: 93423 - DNA, 20 bp, Artificial Sequence
  Description of Artificial Sequence: Synthetic oligonucleotide
  Target: LAMA2; (-) strand; PAM type: NRG; PAM sequence: AAG
agctgccaagatgacaggaa

SEQ ID NO: 93424 - DNA, 20 bp, Artificial Sequence
  Description of Artificial Sequence: Synthetic oligonucleotide
  Target: LAMA2; (-) strand; PAM type: NRG; PAM sequence: AGG
gtgatagctgccaagatgac

SEQ ID NO: 93425 - DNA, 20 bp, Artificial Sequence
  Description of Artificial Sequence: Synthetic oligonucleotide
  Target: LAMA2; (-) strand; PAM type: NRG; PAM sequence: CAG
ggtgatagctgccaagatga

SEQ ID NO: 93426 - DNA, 20 bp, Artificial Sequence
  Description of Artificial Sequence: Synthetic oligonucleotide
  Target: LAMA2; (-) strand; PAM type: NRG; PAM sequence: AAG
aaacaggggtgatagctgcc

SEQ ID NO: 93427 - DNA, 20 bp, Artificial Sequence
  Description of Artificial Sequence: Synthetic oligonucleotide
  Target: LAMA2; (-) strand; PAM type: NRG; PAM sequence: TAG
cctggttgaaacaggggtga

SEQ ID NO: 93428 - DNA, 20 bp, Artificial Sequence
  Description of Artificial Sequence: Synthetic oligonucleotide
  Target: LAMA2; (-) strand; PAM type: NRG; PAM sequence: GGG
atgcatcctggttgaaacag

SEQ ID NO: 93429 - DNA, 20 bp, Artificial Sequence
  Description of Artificial Sequence: Synthetic oligonucleotide
  Target: LAMA2; (-) strand; PAM type: NRG; PAM sequence: GGG
tatgcatcctggttgaaaca

SEQ ID NO: 93430 - DNA, 20 bp, Artificial Sequence
  Description of Artificial Sequence: Synthetic oligonucleotide
  Target: LAMA2; (-) strand; PAM type: NRG; PAM sequence: AGG
ttatgcatcctggttgaaac

SEQ ID NO: 93431 - DNA, 20 bp, Artificial Sequence
  Description of Artificial Sequence: Synthetic oligonucleotide
  Target: LAMA2; (-) strand; PAM type: NRG; PAM sequence: CAG
tttatgcatcctggttgaaa

SEQ ID NO: 93432 - DNA, 20 bp, Artificial Sequence
  Description of Artificial Sequence: Synthetic oligonucleotide
  Target: LAMA2; (-) strand; PAM type: NRG; PAM sequence: TGG
ttcattaattttatgcatcc

SEQ ID NO: 93433 - DNA, 20 bp, Artificial Sequence
  Description of Artificial Sequence: Synthetic oligonucleotide
  Target: LAMA2; (-) strand; PAM type: NRG; PAM sequence: AGG
ctaaattctctctgggtgat

SEQ ID NO: 93434 - DNA, 20 bp, Artificial Sequence
  Description of Artificial Sequence: Synthetic oligonucleotide
  Target: LAMA2; (-) strand; PAM type: NRG; PAM sequence: TAG
gctaaattctctctgggtga

SEQ ID NO: 93435 - DNA, 20 bp, Artificial Sequence
  Description of Artificial Sequence: Synthetic oligonucleotide
  Target: LAMA2; (-) strand; PAM type: NRG; PAM sequence: GGG
ttgctagctaaattctctct

SEQ ID NO: 93436 - DNA, 20 bp, Artificial Sequence
  Description of Artificial Sequence: Synthetic oligonucleotide
  Target: LAMA2; (-) strand; PAM type: NRG; PAM sequence: TGG
gttgctagctaaattctctc

SEQ ID NO: 93437 - DNA, 20 bp, Artificial Sequence
  Description of Artificial Sequence: Synthetic oligonucleotide
  Target: LAMA2; (-) strand; PAM type: NRG; PAM sequence: TAG
gtccacagactgctagttgc

SEQ ID NO: 93438 - DNA, 20 bp, Artificial Sequence
  Description of Artificial Sequence: Synthetic oligonucleotide
  Target: LAMA2; (-) strand; PAM type: NRG; PAM sequence: TAG
gcactttgtccacagactgc

SEQ ID NO: 93439 - DNA, 20 bp, Artificial Sequence
  Description of Artificial Sequence: Synthetic oligonucleotide
  Target: LAMA2; (-) strand; PAM type: NRG; PAM sequence: CAG
tgtcattggcactttgtcca

SEQ ID NO: 93440 - DNA, 20 bp, Artificial Sequence
  Description of Artificial Sequence: Synthetic oligonucleotide
  Target: LAMA2; (-) strand; PAM type: NRG; PAM sequence: TGG
ttgctgctaggaactgtcat

SEQ ID NO: 93441 - DNA, 20 bp, Artificial Sequence
  Description of Artificial Sequence: Synthetic oligonucleotide
  Target: LAMA2; (-) strand; PAM type: NRG; PAM sequence: AGG
aaatagtacttgttgctgct

SEQ ID NO: 93442 - DNA, 20 bp, Artificial Sequence
  Description of Artificial Sequence: Synthetic oligonucleotide
  Target: LAMA2; (-) strand; PAM type: NRG; PAM sequence: TAG
caaatagtacttgttgctgc

SEQ ID NO: 93443 - DNA, 20 bp, Artificial Sequence
  Description of Artificial Sequence: Synthetic oligonucleotide
  Target: LAMA2; (-) strand; PAM type: NRG; PAM sequence: TAG
gatgcttccatactcacaaa

SEQ ID NO: 93444 - DNA, 20 bp, Artificial Sequence
  Description of Artificial Sequence: Synthetic oligonucleotide
  Target: LAMA2; (-) strand; PAM type: NRG; PAM sequence: CAG
tttctttcattcctaattta

SEQ ID NO: 93445 - DNA, 20 bp, Artificial Sequence
  Description of Artificial Sequence: Synthetic oligonucleotide
  Target: LAMA2; (-) strand; PAM type: NRG; PAM sequence: TAG
cacacacaattaaagatatc

SEQ ID NO: 93446 - DNA, 20 bp, Artificial Sequence
  Description of Artificial Sequence: Synthetic oligonucleotide
  Target: LAMA2; (-) strand; PAM type: NRG; PAM sequence: AAG
cagacacacacacacaatta

SEQ ID NO: 93447 - DNA, 20 bp, Artificial Sequence
  Description of Artificial Sequence: Synthetic oligonucleotide
  Target: LAMA2; (-) strand; PAM type: NRG; PAM sequence: CAG
cctttctttaaacacacaca

SEQ ID NO: 93448 - DNA, 20 bp, Artificial Sequence
  Description of Artificial Sequence: Synthetic oligonucleotide
  Target: LAMA2; (-) strand; PAM type: NRG; PAM sequence: AAG
atatgttctcctattatagt

SEQ ID NO: 93449 - DNA, 20 bp, Artificial Sequence
  Description of Artificial Sequence: Synthetic oligonucleotide
  Target: LAMA2; (-) strand; PAM type: NRG; PAM sequence: TAG
aatgatatgttctcctatta

SEQ ID NO: 93450 - DNA, 20 bp, Artificial Sequence
  Description of Artificial Sequence: Synthetic oligonucleotide
  Target: LAMA2; (-) strand; PAM type: NRG; PAM sequence: TGG
cacttgatgtaaatctgtct

SEQ ID NO: 93451 - DNA, 20 bp, Artificial Sequence
  Description of Artificial Sequence: Synthetic oligonucleotide
  Target: LAMA2; (-) strand; PAM type: NRG; PAM sequence: AGG
tgtagtgaactggggggttt

SEQ ID NO: 93452 - DNA, 20 bp, Artificial Sequence
  Description of Artificial Sequence: Synthetic oligonucleotide
  Target: LAMA2; (-) strand; PAM type: NRG; PAM sequence: TAG
ctgtagtgaactggggggtt

SEQ ID NO: 93453 - DNA, 20 bp, Artificial Sequence
  Description of Artificial Sequence: Synthetic oligonucleotide
  Target: LAMA2; (-) strand; PAM type: NRG; PAM sequence: GGG
gttgcctgtagtgaactggg

SEQ ID NO: 93454 - DNA, 20 bp, Artificial Sequence
  Description of Artificial Sequence: Synthetic oligonucleotide
  Target: LAMA2; (-) strand; PAM type: NRG; PAM sequence: GGG
ggttgcctgtagtgaactgg

SEQ ID NO: 93455 - DNA, 20 bp, Artificial Sequence
  Description of Artificial Sequence: Synthetic oligonucleotide
  Target: LAMA2; (-) strand; PAM type: NRG; PAM sequence: GGG
aggttgcctgtagtgaactg

SEQ ID NO: 93456 - DNA, 20 bp, Artificial Sequence
  Description of Artificial Sequence: Synthetic oligonucleotide
  Target: LAMA2; (-) strand; PAM type: NRG; PAM sequence: GGG
aaggttgcctgtagtgaact

SEQ ID NO: 93457 - DNA, 20 bp, Artificial Sequence
  Description of Artificial Sequence: Synthetic oligonucleotide
  Target: LAMA2; (-) strand; PAM type: NRG; PAM sequence: TGG
aaaggttgcctgtagtgaac

SEQ ID NO: 93458 - DNA, 20 bp, Artificial Sequence
  Description of Artificial Sequence: Synthetic oligonucleotide
  Target: LAMA2; (-) strand; PAM type: NRG; PAM sequence: TAG
tgctaaaaaaaggttgcctg

SEQ ID NO: 93459 - DNA, 20 bp, Artificial Sequence
  Description of Artificial Sequence: Synthetic oligonucleotide
  Target: LAMA2; (-) strand; PAM type: NRG; PAM sequence: AGG
attttccagttgctaaaaaa

SEQ ID NO: 93460 - DNA, 20 bp, Artificial Sequence
  Description of Artificial Sequence: Synthetic oligonucleotide
  Target: LAMA2; (-) strand; PAM type: NRG; PAM sequence: AAG
cattttccagttgctaaaaa

SEQ ID NO: 93461 - DNA, 20 bp, Artificial Sequence
  Description of Artificial Sequence: Synthetic oligonucleotide
  Target: LAMA2; (-) strand; PAM type: NRG; PAM sequence: CAG
acagagcagctgtcattttc

SEQ ID NO: 93462 - DNA, 20 bp, Artificial Sequence
  Description of Artificial Sequence: Synthetic oligonucleotide
  Target: LAMA2; (-) strand; PAM type: NRG; PAM sequence: CAG
aatagccttgtatgacagag

SEQ ID NO: 93463 - DNA, 20 bp, Artificial Sequence
  Description of Artificial Sequence: Synthetic oligonucleotide
  Target: LAMA2; (-) strand; PAM type: NRG; PAM sequence: GAG
tttaatagccttgtatgaca

SEQ ID NO: 93464 - DNA, 20 bp, Artificial Sequence
  Description of Artificial Sequence: Synthetic oligonucleotide
  Target: LAMA2; (-) strand; PAM type: NRG; PAM sequence: CAG
gatttaatagccttgtatga

SEQ ID NO: 93465 - DNA, 20 bp, Artificial Sequence
  Description of Artificial Sequence: Synthetic oligonucleotide
  Target: LAMA2; (-) strand; PAM type: NRG; PAM sequence: TAG
acctagataagtggatttaa

SEQ ID NO: 93466 - DNA, 20 bp, Artificial Sequence
  Description of Artificial Sequence: Synthetic oligonucleotide
  Target: LAMA2; (-) strand; PAM type: NRG; PAM sequence: TGG
attatgctcacctagataag

SEQ ID NO: 93467 - DNA, 20 bp, Artificial Sequence
  Description of Artificial Sequence: Synthetic oligonucleotide
  Target: LAMA2; (-) strand; PAM type: NRG; PAM sequence: AAG
gagattatgctcacctagat

SEQ ID NO: 93468 - DNA, 20 bp, Artificial Sequence
  Description of Artificial Sequence: Synthetic oligonucleotide
  Target: LAMA2; (-) strand; PAM type: NRG; PAM sequence: TAG
catcagagattatgctcacc

SEQ ID NO: 93469 - DNA, 20 bp, Artificial Sequence
  Description of Artificial Sequence: Synthetic oligonucleotide
  Target: LAMA2; (-) strand; PAM type: NRG; PAM sequence: GAG
aaagcaatataagtacatca

SEQ ID NO: 93470 - DNA, 20 bp, Artificial Sequence
  Description of Artificial Sequence: Synthetic oligonucleotide
  Target: LAMA2; (-) strand; PAM type: NRG; PAM sequence: CAG
gcaaagcaatataagtacat

SEQ ID NO: 93471 - DNA, 20 bp, Artificial Sequence
  Description of Artificial Sequence: Synthetic oligonucleotide
  Target: LAMA2; (-) strand; PAM type: NRG; PAM sequence: AAG
tacataaagcaaagcaatat

SEQ ID NO: 93472 - DNA, 20 bp, Artificial Sequence
  Description of Artificial Sequence: Synthetic oligonucleotide
  Target: LAMA2; (-) strand; PAM type: NRG; PAM sequence: AAG
ggagtatagtacataaagca

SEQ ID NO: 93473 - DNA, 20 bp, Artificial Sequence
  Description of Artificial Sequence: Synthetic oligonucleotide
  Target: LAMA2; (-) strand; PAM type: NRG; PAM sequence: AAG
tatagggagtatagtacata

SEQ ID NO: 93474 - DNA, 20 bp, Artificial Sequence
  Description of Artificial Sequence: Synthetic oligonucleotide
  Target: LAMA2; (-) strand; PAM type: NRG; PAM sequence: TAG
tctaacatgtatagggagta

SEQ ID NO: 93475 - DNA, 20 bp, Artificial Sequence
  Description of Artificial Sequence: Synthetic oligonucleotide
  Target: LAMA2; (-) strand; PAM type: NRG; PAM sequence: GAG
tattgtctaacatgtatagg

SEQ ID NO: 93476 - DNA, 20 bp, Artificial Sequence
  Description of Artificial Sequence: Synthetic oligonucleotide
  Target: LAMA2; (-) strand; PAM type: NRG; PAM sequence: GGG
actattgtctaacatgtata

SEQ ID NO: 93477 - DNA, 20 bp, Artificial Sequence
  Description of Artificial Sequence: Synthetic oligonucleotide
  Target: LAMA2; (-) strand; PAM type: NRG; PAM sequence: AGG
aactattgtctaacatgtat

SEQ ID NO: 93478 - DNA, 20 bp, Artificial Sequence
  Description of Artificial Sequence: Synthetic oligonucleotide
  Target: LAMA2; (-) strand; PAM type: NRG; PAM sequence: TAG
aaactattgtctaacatgta

SEQ ID NO: 93479 - DNA, 20 bp, Artificial Sequence
  Description of Artificial Sequence: Synthetic oligonucleotide
  Target: LAMA2; (-) strand; PAM type: NRG; PAM sequence: CAG
gttttaaattatagatggtt

SEQ ID NO: 93480 - DNA, 20 bp, Artificial Sequence
  Description of Artificial Sequence: Synthetic oligonucleotide
  Target: LAMA2; (-) strand; PAM type: NRG; PAM sequence: TGG
gtagggttttaaattataga

SEQ ID NO: 93481 - DNA, 20 bp, Artificial Sequence
  Description of Artificial Sequence: Synthetic oligonucleotide
  Target: LAMA2; (-) strand; PAM type: NRG; PAM sequence: TAG
aaatgtagggttttaaatta

SEQ ID NO: 93482 - DNA, 20 bp, Artificial Sequence
  Description of Artificial Sequence: Synthetic oligonucleotide
  Target: LAMA2; (-) strand; PAM type: NRG; PAM sequence: GGG
tgtttgttaaataaaatgta

SEQ ID NO: 93483 - DNA, 20 bp, Artificial Sequence
  Description of Artificial Sequence: Synthetic oligonucleotide
  Target: LAMA2; (-) strand; PAM type: NRG; PAM sequence: AGG
atgtttgttaaataaaatgt

SEQ ID NO: 93484 - DNA, 20 bp, Artificial Sequence
  Description of Artificial Sequence: Synthetic oligonucleotide
  Target: LAMA2; (-) strand; PAM type: NRG; PAM sequence: TAG
gatgtttgttaaataaaatg

SEQ ID NO: 93485 - DNA, 20 bp, Artificial Sequence
  Description of Artificial Sequence: Synthetic oligonucleotide
  Target: LAMA2; (-) strand; PAM type: NRG; PAM sequence: CAG
agcacatggtagttgctaaa

SEQ ID NO: 93486 - DNA, 20 bp, Artificial Sequence
  Description of Artificial Sequence: Synthetic oligonucleotide
  Target: LAMA2; (-) strand; PAM type: NRG; PAM sequence: TAG
gccttgtacccagcacatgg

SEQ ID NO: 93487 - DNA, 20 bp, Artificial Sequence
  Description of Artificial Sequence: Synthetic oligonucleotide
  Target: LAMA2; (-) strand; PAM type: NRG; PAM sequence: TGG
ctagccttgtacccagcaca

SEQ ID NO: 93488 - DNA, 20 bp, Artificial Sequence
  Description of Artificial Sequence: Synthetic oligonucleotide
  Target: LAMA2; (-) strand; PAM type: NRG; PAM sequence: CAG
ccaatgtctagccttgtacc

SEQ ID NO: 93489 - DNA, 20 bp, Artificial Sequence
  Description of Artificial Sequence: Synthetic oligonucleotide
  Target: LAMA2; (-) strand; PAM type: NRG; PAM sequence: TAG
atctatttatatccaatgtc

SEQ ID NO: 93490 - DNA, 20 bp, Artificial Sequence
  Description of Artificial Sequence: Synthetic oligonucleotide
  Target: LAMA2; (-) strand; PAM type: NRG; PAM sequence: GGG
gaggtgctgagggcaaggat

SEQ ID NO: 93491 - DNA, 20 bp, Artificial Sequence
  Description of Artificial Sequence: Synthetic oligonucleotide
  Target: LAMA2; (-) strand; PAM type: NRG; PAM sequence: TGG
tgaggtgctgagggcaagga

SEQ ID NO: 93492 - DNA, 20 bp, Artificial Sequence
  Description of Artificial Sequence: Synthetic oligonucleotide
  Target: LAMA2; (-) strand; PAM type: NRG; PAM sequence: AGG
gatgtgaggtgctgagggca

SEQ ID NO: 93493 - DNA, 20 bp, Artificial Sequence
  Description of Artificial Sequence: Synthetic oligonucleotide
  Target: LAMA2; (-) strand; PAM type: NRG; PAM sequence: AAG
agatgtgaggtgctgagggc

SEQ ID NO: 93494 - DNA, 20 bp, Artificial Sequence
  Description of Artificial Sequence: Synthetic oligonucleotide
  Target: LAMA2; (-) strand; PAM type: NRG; PAM sequence: GGG
agaaagatgtgaggtgctga

SEQ ID NO: 93495 - DNA, 20 bp, Artificial Sequence
  Description of Artificial Sequence: Synthetic oligonucleotide
  Target: LAMA2; (-) strand; PAM type: NRG; PAM sequence: AGG
aagaaagatgtgaggtgctg

SEQ ID NO: 93496 - DNA, 20 bp, Artificial Sequence
  Description of Artificial Sequence: Synthetic oligonucleotide
  Target: LAMA2; (-) strand; PAM type: NRG; PAM sequence: GAG
aaagaaagatgtgaggtgct

SEQ ID NO: 93497 - DNA, 20 bp, Artificial Sequence
  Description of Artificial Sequence: Synthetic oligonucleotide
  Target: LAMA2; (-) strand; PAM type: NRG; PAM sequence: AGG
ttgcattaaagaaagatgtg

SEQ ID NO: 93498 - DNA, 20 bp, Artificial Sequence
  Description of Artificial Sequence: Synthetic oligonucleotide
  Target: LAMA2; (-) strand; PAM type: NRG; PAM sequence: GAG
cttgcattaaagaaagatgt

SEQ ID NO: 93499 - DNA, 20 bp, Artificial Sequence
  Description of Artificial Sequence: Synthetic oligonucleotide
  Target: LAMA2; (-) strand; PAM type: NRG; PAM sequence: AAG
atcctcacttgcattaaaga

SEQ ID NO: 93500 - DNA, 20 bp, Artificial Sequence
  Description of Artificial Sequence: Synthetic oligonucleotide
  Target: LAMA2; (-) strand; PAM type: NRG; PAM sequence: AAG
aaccatcctcacttgcatta

SEQ ID NO: 93501 - DNA, 20 bp, Artificial Sequence
  Description of Artificial Sequence: Synthetic oligonucleotide
  Target: LAMA2; (-) strand; PAM type: NRG; PAM sequence: AAG
tggaattctcccaagaatac

SEQ ID NO: 93502 - DNA, 20 bp, Artificial Sequence
  Description of Artificial Sequence: Synthetic oligonucleotide
  Target: LAMA2; (-) strand; PAM type: NRG; PAM sequence: AAG
tattcaaatggaattctccc

SEQ ID NO: 93503 - DNA, 20 bp, Artificial Sequence
  Description of Artificial Sequence: Synthetic oligonucleotide
  Target: LAMA2; (-) strand; PAM type: NRG; PAM sequence: TGG
ggtgatttttactattcaaa

SEQ ID NO: 93504 - DNA, 20 bp, Artificial Sequence
  Description of Artificial Sequence: Synthetic oligonucleotide
  Target: LAMA2; (-) strand; PAM type: NRG; PAM sequence: TGG
ctgtcaggtatttctctcct

SEQ ID NO: 93505 - DNA, 20 bp, Artificial Sequence
  Description of Artificial Sequence: Synthetic oligonucleotide
  Target: LAMA2; (-) strand; PAM type: NRG; PAM sequence: AGG
aggaaatcatactttctgtc

SEQ ID NO: 93506 - DNA, 20 bp, Artificial Sequence
  Description of Artificial Sequence: Synthetic oligonucleotide
  Target: LAMA2; (-) strand; PAM type: NRG; PAM sequence: CAG
caggaaatcatactttctgt

SEQ ID NO: 93507 - DNA, 20 bp, Artificial Sequence
  Description of Artificial Sequence: Synthetic oligonucleotide
  Target: LAMA2; (-) strand; PAM type: NRG; PAM sequence: AGG
gattaatacagattttagac

SEQ ID NO: 93508 - DNA, 20 bp, Artificial Sequence
  Description of Artificial Sequence: Synthetic oligonucleotide
  Target: LAMA2; (-) strand; PAM type: NRG; PAM sequence: CAG
agattaatacagattttaga

SEQ ID NO: 93509 - DNA, 20 bp, Artificial Sequence
  Description of Artificial Sequence: Synthetic oligonucleotide
  Target: LAMA2; (-) strand; PAM type: NRG; PAM sequence: TAG
aatcagattaatacagattt

SEQ ID NO: 93510 - DNA, 20 bp, Artificial Sequence
  Description of Artificial Sequence: Synthetic oligonucleotide
  Target: LAMA2; (-) strand; PAM type: NRG; PAM sequence: CAG
tcttctgaatcagattaata

SEQ ID NO: 93511 - DNA, 20 bp, Artificial Sequence
  Description of Artificial Sequence: Synthetic oligonucleotide
  Target: LAMA2; (-) strand; PAM type: NRG; PAM sequence: CAG
catgttgccatcttctgaat

SEQ ID NO: 93512 - DNA, 20 bp, Artificial Sequence
  Description of Artificial Sequence: Synthetic oligonucleotide
  Target: LAMA2; (-) strand; PAM type: NRG; PAM sequence: GAG
ctgtggaaaaacttgagctg

SEQ ID NO: 93513 - DNA, 20 bp, Artificial Sequence
  Description of Artificial Sequence: Synthetic oligonucleotide
  Target: LAMA2; (-) strand; PAM type: NRG; PAM sequence: TGG
aactgtggaaaaacttgagc

SEQ ID NO: 93514 - DNA, 20 bp, Artificial Sequence
  Description of Artificial Sequence: Synthetic oligonucleotide
  Target: LAMA2; (-) strand; PAM type: NRG; PAM sequence: GAG
tatcaactgtggaaaaactt

SEQ ID NO: 93515 - DNA, 20 bp, Artificial Sequence
  Description of Artificial Sequence: Synthetic oligonucleotide
  Target: LAMA2; (-) strand; PAM type: NRG; PAM sequence: TGG
gaaaaatatggtatcaactg

SEQ ID NO: 93516 - DNA, 20 bp, Artificial Sequence
  Description of Artificial Sequence: Synthetic oligonucleotide
  Target: LAMA2; (-) strand; PAM type: NRG; PAM sequence: TGG
aaattctggctagaaaaata

SEQ ID NO: 93517 - DNA, 20 bp, Artificial Sequence
  Description of Artificial Sequence: Synthetic oligonucleotide
  Target: LAMA2; (-) strand; PAM type: NRG; PAM sequence: TAG
accctaatctaaattctggc

SEQ ID NO: 93518 - DNA, 20 bp, Artificial Sequence
  Description of Artificial Sequence: Synthetic oligonucleotide
  Target: LAMA2; (-) strand; PAM type: NRG; PAM sequence: TGG
gaaaaccctaatctaaattc

SEQ ID NO: 93519 - DNA, 20 bp, Artificial Sequence
  Description of Artificial Sequence: Synthetic oligonucleotide
  Target: LAMA2; (-) strand; PAM type: NRG; PAM sequence: TGG
ttataaatcttaaatattcc

SEQ ID NO: 93520 - DNA, 20 bp, Artificial Sequence
  Description of Artificial Sequence: Synthetic oligonucleotide
  Target: LAMA2; (-) strand; PAM type: NRG; PAM sequence: TGG
atctatctaaggtgttcttt

SEQ ID NO: 93521 - DNA, 20 bp, Artificial Sequence
  Description of Artificial Sequence: Synthetic oligonucleotide
  Target: LAMA2; (-) strand; PAM type: NRG; PAM sequence: AGG
tcatattttagatctatcta

SEQ ID NO: 93522 - DNA, 20 bp, Artificial Sequence
  Description of Artificial Sequence: Synthetic oligonucleotide
  Target: LAMA2; (-) strand; PAM type: NRG; PAM sequence: AAG
ctcatattttagatctatct

SEQ ID NO: 93523 - DNA, 20 bp, Artificial Sequence
  Description of Artificial Sequence: Synthetic oligonucleotide
  Target: LAMA2; (-) strand; PAM type: NRG; PAM sequence: TAG
aaaatgtttccctcatattt

SEQ ID NO: 93524 - DNA, 20 bp, Artificial Sequence
  Description of Artificial Sequence: Synthetic oligonucleotide
  Target: LAMA2; (-) strand; PAM type: NRG; PAM sequence: AGG
tccctctcttctacttcaac

SEQ ID NO: 93525 - DNA, 20 bp, Artificial Sequence
  Description of Artificial Sequence: Synthetic oligonucleotide
  Target: LAMA2; (-) strand; PAM type: NRG; PAM sequence: CAG
ttccctctcttctacttcaa

SEQ ID NO: 93526 - DNA, 20 bp, Artificial Sequence
  Description of Artificial Sequence: Synthetic oligonucleotide
  Target: LAMA2; (-) strand; PAM type: NRG; PAM sequence: CAG
tacaagatttttaatgcaac

SEQ ID NO: 93527 - DNA, 20 bp, Artificial Sequence
  Description of Artificial Sequence: Synthetic oligonucleotide
  Target: LAMA2; (-) strand; PAM type: NRG; PAM sequence: AAG
tacagaatggttttgattac

SEQ ID NO: 93528 - DNA, 20 bp, Artificial Sequence
  Description of Artificial Sequence: Synthetic oligonucleotide
  Target: LAMA2; (-) strand; PAM type: NRG; PAM sequence: TGG
cacacaaatcacttacagaa

SEQ ID NO: 93529 - DNA, 20 bp, Artificial Sequence
  Description of Artificial Sequence: Synthetic oligonucleotide
  Target: LAMA2; (-) strand; PAM type: NRG; PAM sequence: CAG
ctgatcacacaaatcactta

SEQ ID NO: 93530 - DNA, 20 bp, Artificial Sequence
  Description of Artificial Sequence: Synthetic oligonucleotide
  Target: LAMA2; (-) strand; PAM type: NRG; PAM sequence: AAG
cttatttagatgatgtgcat

SEQ ID NO: 93531 - DNA, 20 bp, Artificial Sequence
  Description of Artificial Sequence: Synthetic oligonucleotide
  Target: LAMA2; (-) strand; PAM type: NRG; PAM sequence: TAG
ttttaaattctggtcttatt

SEQ ID NO: 93532 - DNA, 20 bp, Artificial Sequence
  Description of Artificial Sequence: Synthetic oligonucleotide
  Target: LAMA2; (-) strand; PAM type: NRG; PAM sequence: TGG
ttgatttagtttttaaattc

SEQ ID NO: 93533 - DNA, 20 bp, Artificial Sequence
  Description of Artificial Sequence: Synthetic oligonucleotide
  Target: LAMA2; (-) strand; PAM type: NRG; PAM sequence: TAG
caatttgggaaatgttgatt

SEQ ID NO: 93534 - DNA, 20 bp, Artificial Sequence
  Description of Artificial Sequence: Synthetic oligonucleotide
  Target: LAMA2; (-) strand; PAM type: NRG; PAM sequence: GGG
tccaggaacatctacaattt

SEQ ID NO: 93535 - DNA, 20 bp, Artificial Sequence
  Description of Artificial Sequence: Synthetic oligonucleotide
  Target: LAMA2; (-) strand; PAM type: NRG; PAM sequence: TGG
ttccaggaacatctacaatt

SEQ ID NO: 93536 - DNA, 20 bp, Artificial Sequence
  Description of Artificial Sequence: Synthetic oligonucleotide
  Target: LAMA2; (-) strand; PAM type: NRG; PAM sequence: AGG
atcacagaattctttattcc

SEQ ID NO: 93537 - DNA, 20 bp, Artificial Sequence
  Description of Artificial Sequence: Synthetic oligonucleotide
  Target: LAMA2; (-) strand; PAM type: NRG; PAM sequence: CAG
gatcacagaattctttattc

SEQ ID NO: 93538 - DNA, 20 bp, Artificial Sequence
  Description of Artificial Sequence: Synthetic oligonucleotide
  Target: LAMA2; (-) strand; PAM type: NRG; PAM sequence: CAG
ttcccaaactcatgtgatca

SEQ ID NO: 93539 - DNA, 20 bp, Artificial Sequence
  Description of Artificial Sequence: Synthetic oligonucleotide
  Target: LAMA2; (-) strand; PAM type: NRG; PAM sequence: TGG
cagaacttttaacatgcaaa

SEQ ID NO: 93540 - DNA, 20 bp, Artificial Sequence
  Description of Artificial Sequence: Synthetic oligonucleotide
  Target: LAMA2; (-) strand; PAM type: NRG; PAM sequence: CAG
ttacacactgtaggacatgc

SEQ ID NO: 93541 - DNA, 20 bp, Artificial Sequence
  Description of Artificial Sequence: Synthetic oligonucleotide
  Target: LAMA2; (-) strand; PAM type: NRG; PAM sequence: AGG
atttcttaattacacactgt

SEQ ID NO: 93542 - DNA, 20 bp, Artificial Sequence
  Description of Artificial Sequence: Synthetic oligonucleotide
  Target: LAMA2; (-) strand; PAM type: NRG; PAM sequence: TAG
gatttcttaattacacactg

SEQ ID NO: 93543 - DNA, 20 bp, Artificial Sequence
  Description of Artificial Sequence: Synthetic oligonucleotide
  Target: LAMA2; (-) strand; PAM type: NRG; PAM sequence: CAG
gctgagctaaacaaattgaa

SEQ ID NO: 93544 - DNA, 20 bp, Artificial Sequence
  Description of Artificial Sequence: Synthetic oligonucleotide
  Target: LAMA2; (-) strand; PAM type: NRG; PAM sequence: GAG
acataagtttaggaaatgct

SEQ ID NO: 93545 - DNA, 20 bp, Artificial Sequence
  Description of Artificial Sequence: Synthetic oligonucleotide
  Target: LAMA2; (-) strand; PAM type: NRG; PAM sequence: AGG
gtttatggccacataagttt

SEQ ID NO: 93546 - DNA, 20 bp, Artificial Sequence
  Description of Artificial Sequence: Synthetic oligonucleotide
  Target: LAMA2; (-) strand; PAM type: NRG; PAM sequence: TAG
ggtttatggccacataagtt

SEQ ID NO: 93547 - DNA, 20 bp, Artificial Sequence
  Description of Artificial Sequence: Synthetic oligonucleotide
  Target: LAMA2; (-) strand; PAM type: NRG; PAM sequence: AAG
cagagggtttatggccacat

SEQ ID NO: 93548 - DNA, 20 bp, Artificial Sequence
  Description of Artificial Sequence: Synthetic oligonucleotide
  Target: LAMA2; (-) strand; PAM type: NRG; PAM sequence: TGG
tagttaaagcagagggttta

SEQ ID NO: 93549 - DNA, 20 bp, Artificial Sequence
  Description of Artificial Sequence: Synthetic oligonucleotide
  Target: LAMA2; (-) strand; PAM type: NRG; PAM sequence: GGG
tgctatatagttaaagcaga

SEQ ID NO: 93550 - DNA, 20 bp, Artificial Sequence
  Description of Artificial Sequence: Synthetic oligonucleotide
  Target: LAMA2; (-) strand; PAM type: NRG; PAM sequence: AGG
ttgctatatagttaaagcag

SEQ ID NO: 93551 - DNA, 20 bp, Artificial Sequence
  Description of Artificial Sequence: Synthetic oligonucleotide
  Target: LAMA2; (-) strand; PAM type: NRG; PAM sequence: GAG
cttgctatatagttaaagca

SEQ ID NO: 93552 - DNA, 20 bp, Artificial Sequence
  Description of Artificial Sequence: Synthetic oligonucleotide
  Target: LAMA2; (-) strand; PAM type: NRG; PAM sequence: CAG
ttcttgctatatagttaaag

SEQ ID NO: 93553 - DNA, 20 bp, Artificial Sequence
  Description of Artificial Sequence: Synthetic oligonucleotide
  Target: LAMA2; (-) strand; PAM type: NRG; PAM sequence: AAG
atattcttgctatatagtta

SEQ ID NO: 93554 - DNA, 20 bp, Artificial Sequence
  Description of Artificial Sequence: Synthetic oligonucleotide
  Target: LAMA2; (-) strand; PAM type: NRG; PAM sequence: TAG
tgagatatattcttgctata

SEQ ID NO: 93555 - DNA, 20 bp, Artificial Sequence
  Description of Artificial Sequence: Synthetic oligonucleotide
  Target: LAMA2; (-) strand; PAM type: NRG; PAM sequence: GAG
tcccacctgagctgtagtct

SEQ ID NO: 93556 - DNA, 20 bp, Artificial Sequence
  Description of Artificial Sequence: Synthetic oligonucleotide
  Target: LAMA2; (-) strand; PAM type: NRG; PAM sequence: TAG
ctcttgtcccacctgagctg

SEQ ID NO: 93557 - DNA, 20 bp, Artificial Sequence
  Description of Artificial Sequence: Synthetic oligonucleotide
  Target: LAMA2; (-) strand; PAM type: NRG; PAM sequence: GAG
ttataactcttgtcccacct

SEQ ID NO: 93558 - DNA, 20 bp, Artificial Sequence
  Description of Artificial Sequence: Synthetic oligonucleotide
  Target: LAMA2; (-) strand; PAM type: NRG; PAM sequence: AAG
aaattgtgataaagactata

SEQ ID NO: 93559 - DNA, 20 bp, Artificial Sequence
  Description of Artificial Sequence: Synthetic oligonucleotide
  Target: LAMA2; (-) strand; PAM type: NRG; PAM sequence: AAG
atagaaattaaattgtgata

SEQ ID NO: 93560 - DNA, 20 bp, Artificial Sequence
  Description of Artificial Sequence: Synthetic oligonucleotide
  Target: LAMA2; (-) strand; PAM type: NRG; PAM sequence: TAG
tagagaaaggggtctcaaaa

SEQ ID NO: 93561 - DNA, 20 bp, Artificial Sequence
  Description of Artificial Sequence: Synthetic oligonucleotide
  Target: LAMA2; (-) strand; PAM type: NRG; PAM sequence: GGG
gttcccacatatagagaaag

SEQ ID NO: 93562 - DNA, 20 bp, Artificial Sequence
  Description of Artificial Sequence: Synthetic oligonucleotide
  Target: LAMA2; (-) strand; PAM type: NRG; PAM sequence: GGG
agttcccacatatagagaaa

SEQ ID NO: 93563 - DNA, 20 bp, Artificial Sequence
  Description of Artificial Sequence: Synthetic oligonucleotide
  Target: LAMA2; (-) strand; PAM type: NRG; PAM sequence: AGG
cagttcccacatatagagaa

SEQ ID NO: 93564 - DNA, 20 bp, Artificial Sequence
  Description of Artificial Sequence: Synthetic oligonucleotide
  Target: LAMA2; (-) strand; PAM type: NRG; PAM sequence: AAG
acagttcccacatatagaga

SEQ ID NO: 93565 - DNA, 20 bp, Artificial Sequence
  Description of Artificial Sequence: Synthetic oligonucleotide
  Target: LAMA2; (-) strand; PAM type: NRG; PAM sequence: GAG
cctcacagttcccacatata

SEQ ID NO: 93566 - DNA, 20 bp, Artificial Sequence
  Description of Artificial Sequence: Synthetic oligonucleotide
  Target: LAMA2; (-) strand; PAM type: NRG; PAM sequence: TAG
gacctcacagttcccacata

SEQ ID NO: 93567 - DNA, 20 bp, Artificial Sequence
  Description of Artificial Sequence: Synthetic oligonucleotide
  Target: LAMA2; (-) strand; PAM type: NRG; PAM sequence: CAG
attatgtttctaagacctca

SEQ ID NO: 93568 - DNA, 20 bp, Artificial Sequence
  Description of Artificial Sequence: Synthetic oligonucleotide
  Target: LAMA2; (-) strand; PAM type: NRG; PAM sequence: AAG
tgggctcagattatgtttct

SEQ ID NO: 93569 - DNA, 20 bp, Artificial Sequence
  Description of Artificial Sequence: Synthetic oligonucleotide
  Target: LAMA2; (-) strand; PAM type: NRG; PAM sequence: CAG
aaaacaacttgaaatgggct

SEQ ID NO: 93570 - DNA, 20 bp, Artificial Sequence
  Description of Artificial Sequence: Synthetic oligonucleotide
  Target: LAMA2; (-) strand; PAM type: NRG; PAM sequence: GGG
agaagaaaacaacttgaaat

SEQ ID NO: 93571 - DNA, 20 bp, Artificial Sequence
  Description of Artificial Sequence: Synthetic oligonucleotide
  Target: LAMA2; (-) strand; PAM type: NRG; PAM sequence: TGG
gagaagaaaacaacttgaaa

SEQ ID NO: 93572 - DNA, 20 bp, Artificial Sequence
  Description of Artificial Sequence: Synthetic oligonucleotide
  Target: LAMA2; (-) strand; PAM type: NRG; PAM sequence: AAG
ttctagctgggagagaggag

SEQ ID NO: 93573 - DNA, 20 bp, Artificial Sequence
  Description of Artificial Sequence: Synthetic oligonucleotide
  Target: LAMA2; (-) strand; PAM type: NRG; PAM sequence: GAG
tgattctagctgggagagag

SEQ ID NO: 93574 - DNA, 20 bp, Artificial Sequence
  Description of Artificial Sequence: Synthetic oligonucleotide
  Target: LAMA2; (-) strand; PAM type: NRG; PAM sequence: AGG
tttgattctagctgggagag

SEQ ID NO: 93575 - DNA, 20 bp, Artificial Sequence
  Description of Artificial Sequence: Synthetic oligonucleotide
  Target: LAMA2; (-) strand; PAM type: NRG; PAM sequence: GAG
ctttgattctagctgggaga

SEQ ID NO: 93576 - DNA, 20 bp, Artificial Sequence
  Description of Artificial Sequence: Synthetic oligonucleotide
  Target: LAMA2; (-) strand; PAM type: NRG; PAM sequence: GAG
aactttgattctagctggga

SEQ ID NO: 93577 - DNA, 20 bp, Artificial Sequence
  Description of Artificial Sequence: Synthetic oligonucleotide
  Target: LAMA2; (-) strand; PAM type: NRG; PAM sequence: GAG
agaactttgattctagctgg

SEQ ID NO: 93578 - DNA, 20 bp, Artificial Sequence
  Description of Artificial Sequence: Synthetic oligonucleotide
  Target: LAMA2; (-) strand; PAM type: NRG; PAM sequence: GGG
atagaactttgattctagct

SEQ ID NO: 93579 - DNA, 20 bp, Artificial Sequence
  Description of Artificial Sequence: Synthetic oligonucleotide
  Target: LAMA2; (-) strand; PAM type: NRG; PAM sequence: TGG
aatagaactttgattctagc

SEQ ID NO: 93580 - DNA, 20 bp, Artificial Sequence
  Description of Artificial Sequence: Synthetic oligonucleotide
  Target: LAMA2; (-) strand; PAM type: NRG; PAM sequence: TAG
gcttaatagaactttgattc

SEQ ID NO: 93581 - DNA, 20 bp, Artificial Sequence
  Description of Artificial Sequence: Synthetic oligonucleotide
  Target: LAMA2; (-) strand; PAM type: NRG; PAM sequence: TAG
ttggtactaggtaagcttaa

SEQ ID NO: 93582 - DNA, 20 bp, Artificial Sequence
  Description of Artificial Sequence: Synthetic oligonucleotide
  Target: LAMA2; (-) strand; PAM type: NRG; PAM sequence: AAG
taaggcctttggtactaggt

SEQ ID NO: 93583 - DNA, 20 bp, Artificial Sequence
  Description of Artificial Sequence: Synthetic oligonucleotide
  Target: LAMA2; (-) strand; PAM type: NRG; PAM sequence: AGG
catataaggcctttggtact

SEQ ID NO: 93584 - DNA, 20 bp, Artificial Sequence
  Description of Artificial Sequence: Synthetic oligonucleotide
  Target: LAMA2; (-) strand; PAM type: NRG; PAM sequence: TAG
gcatataaggcctttggtac

SEQ ID NO: 93585 - DNA, 20 bp, Artificial Sequence
  Description of Artificial Sequence: Synthetic oligonucleotide
  Target: LAMA2; (-) strand; PAM type: NRG; PAM sequence: TGG
acccttgcatataaggcctt

SEQ ID NO: 93586 - DNA, 20 bp, Artificial Sequence
  Description of Artificial Sequence: Synthetic oligonucleotide
  Target: LAMA2; (-) strand; PAM type: NRG; PAM sequence: AGG
cccctctacccttgcatata

SEQ ID NO: 93587 - DNA, 20 bp, Artificial Sequence
  Description of Artificial Sequence: Synthetic oligonucleotide
  Target: LAMA2; (-) strand; PAM type: NRG; PAM sequence: AAG
tcccctctacccttgcatat

SEQ ID NO: 93588 - DNA, 20 bp, Artificial Sequence
  Description of Artificial Sequence: Synthetic oligonucleotide
  Target: LAMA2; (-) strand; PAM type: NRG; PAM sequence: CAG
ccttgctcaacatatacaca

SEQ ID NO: 93589 - DNA, 20 bp, Artificial Sequence
  Description of Artificial Sequence: Synthetic oligonucleotide
  Target: LAMA2; (-) strand; PAM type: NRG; PAM sequence: TGG
gtgaaatactcagtactggc

SEQ ID NO: 93590 - DNA, 20 bp, Artificial Sequence
  Description of Artificial Sequence: Synthetic oligonucleotide
  Target: LAMA2; (-) strand; PAM type: NRG; PAM sequence: TGG
ttgggtgaaatactcagtac

SEQ ID NO: 93591 - DNA, 20 bp, Artificial Sequence
  Description of Artificial Sequence: Synthetic oligonucleotide
  Target: LAMA2; (-) strand; PAM type: NRG; PAM sequence: CAG
acatgcttgggtgaaatact

SEQ ID NO: 93592 - DNA, 20 bp, Artificial Sequence
  Description of Artificial Sequence: Synthetic oligonucleotide
  Target: LAMA2; (-) strand; PAM type: NRG; PAM sequence: GGG
aggtcagcagaaacatgctt

SEQ ID NO: 93593 - DNA, 20 bp, Artificial Sequence
  Description of Artificial Sequence: Synthetic oligonucleotide
  Target: LAMA2; (-) strand; PAM type: NRG; PAM sequence: TGG
taggtcagcagaaacatgct

SEQ ID NO: 93594 - DNA, 20 bp, Artificial Sequence
  Description of Artificial Sequence: Synthetic oligonucleotide
  Target: LAMA2; (-) strand; PAM type: NRG; PAM sequence: CAG
gagaaaaagggataggtcag

SEQ ID NO: 93595 - DNA, 20 bp, Artificial Sequence
  Description of Artificial Sequence: Synthetic oligonucleotide
  Target: LAMA2; (-) strand; PAM type: NRG; PAM sequence: CAG
acggagaaaaagggataggt

SEQ ID NO: 93596 - DNA, 20 bp, Artificial Sequence
  Description of Artificial Sequence: Synthetic oligonucleotide
  Target: LAMA2; (-) strand; PAM type: NRG; PAM sequence: AGG
gaggacggagaaaaagggat

SEQ ID NO: 93597 - DNA, 20 bp, Artificial Sequence
  Description of Artificial Sequence: Synthetic oligonucleotide
  Target: LAMA2; (-) strand; PAM type: NRG; PAM sequence: TAG
ggaggacggagaaaaaggga

SEQ ID NO: 93598 - DNA, 20 bp, Artificial Sequence
  Description of Artificial Sequence: Synthetic oligonucleotide
  Target: LAMA2; (-) strand; PAM type: NRG; PAM sequence: GGG
attaggaggacggagaaaaa

SEQ ID NO: 93599 - DNA, 20 bp, Artificial Sequence
  Description of Artificial Sequence: Synthetic oligonucleotide
  Target: LAMA2; (-) strand; PAM type: NRG; PAM sequence: AGG
aattaggaggacggagaaaa

SEQ ID NO: 93600 - DNA, 20 bp, Artificial Sequence
  Description of Artificial Sequence: Synthetic oligonucleotide
  Target: LAMA2; (-) strand; PAM type: NRG; PAM sequence: AAG
taattaggaggacggagaaa

SEQ ID NO: 93601 - DNA, 20 bp, Artificial Sequence
  Description of Artificial Sequence: Synthetic oligonucleotide
  Target: LAMA2; (-) strand; PAM type: NRG; PAM sequence: GAG
gaaaggtaattaggaggacg

SEQ ID NO: 93602 - DNA, 20 bp, Artificial Sequence
  Description of Artificial Sequence: Synthetic oligonucleotide
  Target: LAMA2; (-) strand; PAM type: NRG; PAM sequence: CGG
aggaaaggtaattaggagga

SEQ ID NO: 93603 - DNA, 20 bp, Artificial Sequence
  Description of Artificial Sequence: Synthetic oligonucleotide
  Target: LAMA2; (-) strand; PAM type: NRG; PAM sequence: AGG
tgaaaggaaaggtaattagg

SEQ ID NO: 93604 - DNA, 20 bp, Artificial Sequence
  Description of Artificial Sequence: Synthetic oligonucleotide
  Target: LAMA2; (-) strand; PAM type: NRG; PAM sequence: GAG
ctgaaaggaaaggtaattag

SEQ ID NO: 93605 - DNA, 20 bp, Artificial Sequence
  Description of Artificial Sequence: Synthetic oligonucleotide
  Target: LAMA2; (-) strand; PAM type: NRG; PAM sequence: AGG
acctgaaaggaaaggtaatt

SEQ ID NO: 93606 - DNA, 20 bp, Artificial Sequence
  Description of Artificial Sequence: Synthetic oligonucleotide
  Target: LAMA2; (-) strand; PAM type: NRG; PAM sequence: TAG
gacctgaaaggaaaggtaat

SEQ ID NO: 93607 - DNA, 20 bp, Artificial Sequence
  Description of Artificial Sequence: Synthetic oligonucleotide
  Target: LAMA2; (-) strand; PAM type: NRG; PAM sequence: AGG
ctttctagacctgaaaggaa

SEQ ID NO: 93608 - DNA, 20 bp, Artificial Sequence
  Description of Artificial Sequence: Synthetic oligonucleotide
  Target: LAMA2; (-) strand; PAM type: NRG; PAM sequence: AAG
actttctagacctgaaagga

SEQ ID NO: 93609 - DNA, 20 bp, Artificial Sequence
  Description of Artificial Sequence: Synthetic oligonucleotide
  Target: LAMA2; (-) strand; PAM type: NRG; PAM sequence: AGG
agagactttctagacctgaa

SEQ ID NO: 93610 - DNA, 20 bp, Artificial Sequence
  Description of Artificial Sequence: Synthetic oligonucleotide
  Target: LAMA2; (-) strand; PAM type: NRG; PAM sequence: AAG
gagagactttctagacctga

SEQ ID NO: 93611 - DNA, 20 bp, Artificial Sequence
  Description of Artificial Sequence: Synthetic oligonucleotide
  Target: LAMA2; (-) strand; PAM type: NRG; PAM sequence: TAG
aaagtagttgagagactttc

SEQ ID NO: 93612 - DNA, 20 bp, Artificial Sequence
  Description of Artificial Sequence: Synthetic oligonucleotide
  Target: LAMA2; (-) strand; PAM type: NRG; PAM sequence: GAG
aatggaatgaaagtagttga

SEQ ID NO: 93613 - DNA, 20 bp, Artificial Sequence
  Description of Artificial Sequence: Synthetic oligonucleotide
  Target: LAMA2; (-) strand; PAM type: NRG; PAM sequence: GAG
agaatggaatgaaagtagtt

SEQ ID NO: 93614 - DNA, 20 bp, Artificial Sequence
  Description of Artificial Sequence: Synthetic oligonucleotide
  Target: LAMA2; (-) strand; PAM type: NRG; PAM sequence: TAG
ctctaagaatggaatgaaag

SEQ ID NO: 93615 - DNA, 20 bp, Artificial Sequence
  Description of Artificial Sequence: Synthetic oligonucleotide
  Target: LAMA2; (-) strand; PAM type: NRG; PAM sequence: AAG
tgcctctaagaatggaatga

SEQ ID NO: 93616 - DNA, 20 bp, Artificial Sequence
  Description of Artificial Sequence: Synthetic oligonucleotide
  Target: LAMA2; (-) strand; PAM type: NRG; PAM sequence: TGG
gattcctgtgcctctaagaa

SEQ ID NO: 93617 - DNA, 20 bp, Artificial Sequence
  Description of Artificial Sequence: Synthetic oligonucleotide
  Target: LAMA2; (-) strand; PAM type: NRG; PAM sequence: AAG
tgaatgattcctgtgcctct

SEQ ID NO: 93618 - DNA, 20 bp, Artificial Sequence
  Description of Artificial Sequence: Synthetic oligonucleotide
  Target: LAMA2; (-) strand; PAM type: NRG; PAM sequence: AAG
gtcttagcatggaatgaaag

SEQ ID NO: 93619 - DNA, 20 bp, Artificial Sequence
  Description of Artificial Sequence: Synthetic oligonucleotide
  Target: LAMA2; (-) strand; PAM type: NRG; PAM sequence: AAG
tgggtcttagcatggaatga

SEQ ID NO: 93620 - DNA, 20 bp, Artificial Sequence
  Description of Artificial Sequence: Synthetic oligonucleotide
  Target: LAMA2; (-) strand; PAM type: NRG; PAM sequence: TGG
gatgttggtgggtcttagca

SEQ ID NO: 93621 - DNA, 20 bp, Artificial Sequence
  Description of Artificial Sequence: Synthetic oligonucleotide
  Target: LAMA2; (-) strand; PAM type: NRG; PAM sequence: TAG
gtagagatgttggtgggtct

SEQ ID NO: 93622 - DNA, 20 bp, Artificial Sequence
  Description of Artificial Sequence: Synthetic oligonucleotide
  Target: LAMA2; (-) strand; PAM type: NRG; PAM sequence: GGG
atgatggtagagatgttggt

SEQ ID NO: 93623 - DNA, 20 bp, Artificial Sequence
  Description of Artificial Sequence: Synthetic oligonucleotide
  Target: LAMA2; (-) strand; PAM type: NRG; PAM sequence: TGG
gatgatggtagagatgttgg

SEQ ID NO: 93624 - DNA, 20 bp, Artificial Sequence
  Description of Artificial Sequence: Synthetic oligonucleotide
  Target: LAMA2; (-) strand; PAM type: NRG; PAM sequence: TGG
aatgatgatggtagagatgt

SEQ ID NO: 93625 - DNA, 20 bp, Artificial Sequence
  Description of Artificial Sequence: Synthetic oligonucleotide
  Target: LAMA2; (-) strand; PAM type: NRG; PAM sequence: GAG
atggaaaaatgatgatggta

SEQ ID NO: 93626 - DNA, 20 bp, Artificial Sequence
  Description of Artificial Sequence: Synthetic oligonucleotide
  Target: LAMA2; (-) strand; PAM type: NRG; PAM sequence: TAG
agatggaaaaatgatgatgg

SEQ ID NO: 93627 - DNA, 20 bp, Artificial Sequence
  Description of Artificial Sequence: Synthetic oligonucleotide
  Target: LAMA2; (-) strand; PAM type: NRG; PAM sequence: TGG
ggcagatggaaaaatgatga

SEQ ID NO: 93628 - DNA, 20 bp, Artificial Sequence
  Description of Artificial Sequence: Synthetic oligonucleotide
  Target: LAMA2; (-) strand; PAM type: NRG; PAM sequence: TGG
gatggatttggaaaggcaga

SEQ ID NO: 93629 - DNA, 20 bp, Artificial Sequence
  Description of Artificial Sequence: Synthetic oligonucleotide
  Target: LAMA2; (-) strand; PAM type: NRG; PAM sequence: CAG
atgggatggatttggaaagg

SEQ ID NO: 93630 - DNA, 20 bp, Artificial Sequence
  Description of Artificial Sequence: Synthetic oligonucleotide
  Target: LAMA2; (-) strand; PAM type: NRG; PAM sequence: AGG
aaaatgggatggatttggaa

SEQ ID NO: 93631 - DNA, 20 bp, Artificial Sequence
  Description of Artificial Sequence: Synthetic oligonucleotide
  Target: LAMA2; (-) strand; PAM type: NRG; PAM sequence: AAG
gaaaatgggatggatttgga

SEQ ID NO: 93632 - DNA, 20 bp, Artificial Sequence
  Description of Artificial Sequence: Synthetic oligonucleotide
  Target: LAMA2; (-) strand; PAM type: NRG; PAM sequence: TGG
aatagaaaatgggatggatt

SEQ ID NO: 93633 - DNA, 20 bp, Artificial Sequence
  Description of Artificial Sequence: Synthetic oligonucleotide
  Target: LAMA2; (-) strand; PAM type: NRG; PAM sequence: TGG
ttttcaaatagaaaatggga

SEQ ID NO: 93634 - DNA, 20 bp, Artificial Sequence
  Description of Artificial Sequence: Synthetic oligonucleotide
  Target: LAMA2; (-) strand; PAM type: NRG; PAM sequence: GGG
tcctttttcaaatagaaaat

SEQ ID NO: 93635 - DNA, 20 bp, Artificial Sequence
  Description of Artificial Sequence: Synthetic oligonucleotide
  Target: LAMA2; (-) strand; PAM type: NRG; PAM sequence: TGG
atcctttttcaaatagaaaa

SEQ ID NO: 93636 - DNA, 20 bp, Artificial Sequence
  Description of Artificial Sequence: Synthetic oligonucleotide
  Target: LAMA2; (-) strand; PAM type: NRG; PAM sequence: TAG
gtagctcatcctttttcaaa

SEQ ID NO: 93637 - DNA, 20 bp, Artificial Sequence
  Description of Artificial Sequence: Synthetic oligonucleotide
  Target: LAMA2; (-) strand; PAM type: NRG; PAM sequence: TAG
agccaccagttccacaaatg

SEQ ID NO: 93638 - DNA, 20 bp, Artificial Sequence
  Description of Artificial Sequence: Synthetic oligonucleotide
  Target: LAMA2; (-) strand; PAM type: NRG; PAM sequence: CAG
ccccgagctctgaaagccac

SEQ ID NO: 93639 - DNA, 20 bp, Artificial Sequence
  Description of Artificial Sequence: Synthetic oligonucleotide
  Target: LAMA2; (-) strand; PAM type: NRG; PAM sequence: AAG
tgccagaccccgagctctga

SEQ ID NO: 93640 - DNA, 20 bp, Artificial Sequence
  Description of Artificial Sequence: Synthetic oligonucleotide
  Target: LAMA2; (-) strand; PAM type: NRG; PAM sequence: GAG
ataggaatctgccagacccc

SEQ ID NO: 93641 - DNA, 20 bp, Artificial Sequence
  Description of Artificial Sequence: Synthetic oligonucleotide
  Target: LAMA2; (-) strand; PAM type: NRG; PAM sequence: CAG
gcagagacataggaatctgc

SEQ ID NO: 93642 - DNA, 20 bp, Artificial Sequence
  Description of Artificial Sequence: Synthetic oligonucleotide
  Target: LAMA2; (-) strand; PAM type: NRG; PAM sequence: AGG
agggcaaaaggcagagacat

SEQ ID NO: 93643 - DNA, 20 bp, Artificial Sequence
  Description of Artificial Sequence: Synthetic oligonucleotide
  Target: LAMA2; (-) strand; PAM type: NRG; PAM sequence: TAG
cagggcaaaaggcagagaca

SEQ ID NO: 93644 - DNA, 20 bp, Artificial Sequence
  Description of Artificial Sequence: Synthetic oligonucleotide
  Target: LAMA2; (-) strand; PAM type: NRG; PAM sequence: GAG
atttgacagggcaaaaggca

SEQ ID NO: 93645 - DNA, 20 bp, Artificial Sequence
  Description of Artificial Sequence: Synthetic oligonucleotide
  Target: LAMA2; (-) strand; PAM type: NRG; PAM sequence: CAG
ggatttgacagggcaaaagg

SEQ ID NO: 93646 - DNA, 20 bp, Artificial Sequence
  Description of Artificial Sequence: Synthetic oligonucleotide
  Target: LAMA2; (-) strand; PAM type: NRG; PAM sequence: AGG
aagggatttgacagggcaaa

SEQ ID NO: 93647 - DNA, 20 bp, Artificial Sequence
  Description of Artificial Sequence: Synthetic oligonucleotide
  Target: LAMA2; (-) strand; PAM type: NRG; PAM sequence: AAG
gaagggatttgacagggcaa

SEQ ID NO: 93648 - DNA, 20 bp, Artificial Sequence
  Description of Artificial Sequence: Synthetic oligonucleotide
  Target: LAMA2; (-) strand; PAM type: NRG; PAM sequence: GGG
ttgaatgaagggatttgaca

SEQ ID NO: 93649 - DNA, 20 bp, Artificial Sequence
  Description of Artificial Sequence: Synthetic oligonucleotide
  Target: LAMA2; (-) strand; PAM type: NRG; PAM sequence: AGG
tttgaatgaagggatttgac

SEQ ID NO: 93650 - DNA, 20 bp, Artificial Sequence
  Description of Artificial Sequence: Synthetic oligonucleotide
  Target: LAMA2; (-) strand; PAM type: NRG; PAM sequence: CAG
gtttgaatgaagggatttga

SEQ ID NO: 93651 - DNA, 20 bp, Artificial Sequence
  Description of Artificial Sequence: Synthetic oligonucleotide
  Target: LAMA2; (-) strand; PAM type: NRG; PAM sequence: GGG
gtgctacatgtttgaatgaa

SEQ ID NO: 93652 - DNA, 20 bp, Artificial Sequence
  Description of Artificial Sequence: Synthetic oligonucleotide
  Target: LAMA2; (-) strand; PAM type: NRG; PAM sequence: AGG
tgtgctacatgtttgaatga

SEQ ID NO: 93653 - DNA, 20 bp, Artificial Sequence
  Description of Artificial Sequence: Synthetic oligonucleotide
  Target: LAMA2; (-) strand; PAM type: NRG; PAM sequence: AAG
ttgtgctacatgtttgaatg

SEQ ID NO: 93654 - DNA, 20 bp, Artificial Sequence
  Description of Artificial Sequence: Synthetic oligonucleotide
  Target: LAMA2; (-) strand; PAM type: NRG; PAM sequence: AGG
ccccctcgattcaagaagca

SEQ ID NO: 93655 - DNA, 20 bp, Artificial Sequence
  Description of Artificial Sequence: Synthetic oligonucleotide
  Target: LAMA2; (-) strand; PAM type: NRG; PAM sequence: AAG
accccctcgattcaagaagc

SEQ ID NO: 93656 - DNA, 20 bp, Artificial Sequence
  Description of Artificial Sequence: Synthetic oligonucleotide
  Target: LAMA2; (-) strand; PAM type: NRG; PAM sequence: AAG
cttcaccccctcgattcaag

SEQ ID NO: 93657 - DNA, 20 bp, Artificial Sequence
  Description of Artificial Sequence: Synthetic oligonucleotide
  Target: LAMA2; (-) strand; PAM type: NRG; PAM sequence: AAG
tctcttcaccccctcgattc

SEQ ID NO: 93658 - DNA, 20 bp, Artificial Sequence
  Description of Artificial Sequence: Synthetic oligonucleotide
  Target: LAMA2; (-) strand; PAM type: NRG; PAM sequence: TGG
atgttttgttgtatcttgtt

SEQ ID NO: 93659 - DNA, 20 bp, Artificial Sequence
  Description of Artificial Sequence: Synthetic oligonucleotide
  Target: LAMA2; (-) strand; PAM type: NRG; PAM sequence: CAG
aactagtgttcaacttgtga

SEQ ID NO: 93660 - DNA, 20 bp, Artificial Sequence
  Description of Artificial Sequence: Synthetic oligonucleotide
  Target: LAMA2; (-) strand; PAM type: NRG; PAM sequence: TAG
aatgttttccaagctgtaac

SEQ ID NO: 93661 - DNA, 20 bp, Artificial Sequence
  Description of Artificial Sequence: Synthetic oligonucleotide
  Target: LAMA2; (-) strand; PAM type: NRG; PAM sequence: AAG
gccctaagtgaatgttttcc

SEQ ID NO: 93662 - DNA, 20 bp, Artificial Sequence
  Description of Artificial Sequence: Synthetic oligonucleotide
  Target: LAMA2; (-) strand; PAM type: NRG; PAM sequence: AAG
aatagtggtgttttggccct

SEQ ID NO: 93663 - DNA, 20 bp, Artificial Sequence
  Description of Artificial Sequence: Synthetic oligonucleotide
  Target: LAMA2; (-) strand; PAM type: NRG; PAM sequence: TGG
cctcaaaaatagtggtgttt

SEQ ID NO: 93664 - DNA, 20 bp, Artificial Sequence
  Description of Artificial Sequence: Synthetic oligonucleotide
  Target: LAMA2; (-) strand; PAM type: NRG; PAM sequence: TGG
cagtgatacctcaaaaatag

SEQ ID NO: 93665 - DNA, 20 bp, Artificial Sequence
  Description of Artificial Sequence: Synthetic oligonucleotide
  Target: LAMA2; (-) strand; PAM type: NRG; PAM sequence: TAG
aagcagtgatacctcaaaaa

SEQ ID NO: 93666 - DNA, 20 bp, Artificial Sequence
  Description of Artificial Sequence: Synthetic oligonucleotide
  Target: LAMA2; (-) strand; PAM type: NRG; PAM sequence: CAG
taaatcattccccagcaaag

SEQ ID NO: 93667 - DNA, 20 bp, Artificial Sequence
  Description of Artificial Sequence: Synthetic oligonucleotide
  Target: LAMA2; (-) strand; PAM type: NRG; PAM sequence: AAG
gtttaaatcattccccagca

SEQ ID NO: 93668 - DNA, 20 bp, Artificial Sequence
  Description of Artificial Sequence: Synthetic oligonucleotide
  Target: LAMA2; (-) strand; PAM type: NRG; PAM sequence: CAG
cctttgtttaaatcattccc

SEQ ID NO: 93669 - DNA, 20 bp, Artificial Sequence
  Description of Artificial Sequence: Synthetic oligonucleotide
  Target: LAMA2; (-) strand; PAM type: NRG; PAM sequence: AGG
aaagtctagaatcttagcaa

SEQ ID NO: 93670 - DNA, 20 bp, Artificial Sequence
  Description of Artificial Sequence: Synthetic oligonucleotide
  Target: LAMA2; (-) strand; PAM type: NRG; PAM sequence: AAG
aaaagtctagaatcttagca

SEQ ID NO: 93671 - DNA, 20 bp, Artificial Sequence
  Description of Artificial Sequence: Synthetic oligonucleotide
  Target: LAMA2; (-) strand; PAM type: NRG; PAM sequence: TAG
atgataaaagtctagaatct

SEQ ID NO: 93672 - DNA, 20 bp, Artificial Sequence
  Description of Artificial Sequence: Synthetic oligonucleotide
  Target: LAMA2; (-) strand; PAM type: NRG; PAM sequence: TAG
ttgtccagatgataaaagtc

SEQ ID NO: 93673 - DNA, 20 bp, Artificial Sequence
  Description of Artificial Sequence: Synthetic oligonucleotide
  Target: LAMA2; (-) strand; PAM type: NRG; PAM sequence: AAG
tcctcttgtccagatgataa

SEQ ID NO: 93674 - DNA, 20 bp, Artificial Sequence
  Description of Artificial Sequence: Synthetic oligonucleotide
  Target: LAMA2; (-) strand; PAM type: NRG; PAM sequence: CAG
atttttgttctcctcttgtc

SEQ ID NO: 93675 - DNA, 20 bp, Artificial Sequence
  Description of Artificial Sequence: Synthetic oligonucleotide
  Target: LAMA2; (-) strand; PAM type: NRG; PAM sequence: AAG
ttaatctcttttagcccttc

SEQ ID NO: 93676 - DNA, 20 bp, Artificial Sequence
  Description of Artificial Sequence: Synthetic oligonucleotide
  Target: LAMA2; (-) strand; PAM type: NRG; PAM sequence: TAG
attgcttacttaatctcttt

SEQ ID NO: 93677 - DNA, 20 bp, Artificial Sequence
  Description of Artificial Sequence: Synthetic oligonucleotide
  Target: LAMA2; (-) strand; PAM type: NRG; PAM sequence: CAG
ttgactcacttttagctcaa

SEQ ID NO: 93678 - DNA, 20 bp, Artificial Sequence
  Description of Artificial Sequence: Synthetic oligonucleotide
  Target: LAMA2; (-) strand; PAM type: NRG; PAM sequence: TAG
ctcagcatttgactcacttt

SEQ ID NO: 93679 - DNA, 20 bp, Artificial Sequence
  Description of Artificial Sequence: Synthetic oligonucleotide
  Target: LAMA2; (-) strand; PAM type: NRG; PAM sequence: CAG
tccgatcaggcaggtatcct

SEQ ID NO: 93680 - DNA, 20 bp, Artificial Sequence
  Description of Artificial Sequence: Synthetic oligonucleotide
  Target: LAMA2; (-) strand; PAM type: NRG; PAM sequence: AGG
aacttagtgtccgatcaggc

SEQ ID NO: 93681 - DNA, 20 bp, Artificial Sequence
  Description of Artificial Sequence: Synthetic oligonucleotide
  Target: LAMA2; (-) strand; PAM type: NRG; PAM sequence: CAG
taacttagtgtccgatcagg

SEQ ID NO: 93682 - DNA, 20 bp, Artificial Sequence
  Description of Artificial Sequence: Synthetic oligonucleotide
  Target: LAMA2; (-) strand; PAM type: NRG; PAM sequence: AGG
aagtaacttagtgtccgatc

SEQ ID NO: 93683 - DNA, 20 bp, Artificial Sequence
  Description of Artificial Sequence: Synthetic oligonucleotide
  Target: LAMA2; (-) strand; PAM type: NRG; PAM sequence: CAG
aaagtaacttagtgtccgat

SEQ ID NO: 93684 - DNA, 20 bp, Artificial Sequence
  Description of Artificial Sequence: Synthetic oligonucleotide
  Target: LAMA2; (-) strand; PAM type: NRG; PAM sequence: TAG
aacttattctgaaagtaact

SEQ ID NO: 93685 - DNA, 20 bp, Artificial Sequence
  Description of Artificial Sequence: Synthetic oligonucleotide
  Target: LAMA2; (-) strand; PAM type: NRG; PAM sequence: AAG
aggttacaaacttattctga

SEQ ID NO: 93686 - DNA, 20 bp, Artificial Sequence
  Description of Artificial Sequence: Synthetic oligonucleotide
  Target: LAMA2; (-) strand; PAM type: NRG; PAM sequence: AGG
taatgtatgacatgttgctg

SEQ ID NO: 93687 - DNA, 20 bp, Artificial Sequence
  Description of Artificial Sequence: Synthetic oligonucleotide
  Target: LAMA2; (-) strand; PAM type: NRG; PAM sequence: GAG
ataatgtatgacatgttgct

SEQ ID NO: 93688 - DNA, 20 bp, Artificial Sequence
  Description of Artificial Sequence: Synthetic oligonucleotide
  Target: LAMA2; (-) strand; PAM type: NRG; PAM sequence: CAG
tgttgtcctatagaatccac

SEQ ID NO: 93689 - DNA, 20 bp, Artificial Sequence
  Description of Artificial Sequence: Synthetic oligonucleotide
  Target: LAMA2; (-) strand; PAM type: NRG; PAM sequence: TAG
ttaagtttcatgttgtccta

SEQ ID NO: 93690 - DNA, 20 bp, Artificial Sequence
  Description of Artificial Sequence: Synthetic oligonucleotide
  Target: LAMA2; (-) strand; PAM type: NRG; PAM sequence: AAG
agaagtctatgtatcccatt

SEQ ID NO: 93691 - DNA, 20 bp, Artificial Sequence
  Description of Artificial Sequence: Synthetic oligonucleotide
  Target: LAMA2; (-) strand; PAM type: NRG; PAM sequence: AAG
gggagcggggagggcttaag

SEQ ID NO: 93692 - DNA, 20 bp, Artificial Sequence
  Description of Artificial Sequence: Synthetic oligonucleotide
  Target: LAMA2; (-) strand; PAM type: NRG; PAM sequence: AAG
ctggggagcggggagggctt

SEQ ID NO: 93693 - DNA, 20 bp, Artificial Sequence
  Description of Artificial Sequence: Synthetic oligonucleotide
  Target: LAMA2; (-) strand; PAM type: NRG; PAM sequence: GGG
tgccagctggggagcgggga

SEQ ID NO: 93694 - DNA, 20 bp, Artificial Sequence
  Description of Artificial Sequence: Synthetic oligonucleotide
  Target: LAMA2; (-) strand; PAM type: NRG; PAM sequence: AGG
ttgccagctggggagcgggg

SEQ ID NO: 93695 - DNA, 20 bp, Artificial Sequence
  Description of Artificial Sequence: Synthetic oligonucleotide
  Target: LAMA2; (-) strand; PAM type: NRG; PAM sequence: GAG
tttgccagctggggagcggg

SEQ ID NO: 93696 - DNA, 20 bp, Artificial Sequence
  Description of Artificial Sequence: Synthetic oligonucleotide
  Target: LAMA2; (-) strand; PAM type: NRG; PAM sequence: GGG
aatttgccagctggggagcg

SEQ ID NO: 93697 - DNA, 20 bp, Artificial Sequence
  Description of Artificial Sequence: Synthetic oligonucleotide
  Target: LAMA2; (-) strand; PAM type: NRG; PAM sequence: GGG
aaatttgccagctggggagc

SEQ ID NO: 93698 - DNA, 20 bp, Artificial Sequence
  Description of Artificial Sequence: Synthetic oligonucleotide
  Target: LAMA2; (-) strand; PAM type: NRG; PAM sequence: CGG
aaaatttgccagctggggag

SEQ ID NO: 93699 - DNA, 20 bp, Artificial Sequence
  Description of Artificial Sequence: Synthetic oligonucleotide
  Target: LAMA2; (-) strand; PAM type: NRG; PAM sequence: GAG
ttaaaaatttgccagctggg

SEQ ID NO: 93700 - DNA, 20 bp, Artificial Sequence
  Description of Artificial Sequence: Synthetic oligonucleotide
  Target: LAMA2; (-) strand; PAM type: NRG; PAM sequence: GGG
tgttaaaaatttgccagctg

SEQ ID NO: 93701 - DNA, 20 bp, Artificial Sequence
  Description of Artificial Sequence: Synthetic oligonucleotide
  Target: LAMA2; (-) strand; PAM type: NRG; PAM sequence: GGG
ttgttaaaaatttgccagct

SEQ ID NO: 93702 - DNA, 20 bp, Artificial Sequence
  Description of Artificial Sequence: Synthetic oligonucleotide
  Target: LAMA2; (-) strand; PAM type: NRG; PAM sequence: TGG
gttgttaaaaatttgccagc

SEQ ID NO: 93703 - DNA, 20 bp, Artificial Sequence
  Description of Artificial Sequence: Synthetic oligonucleotide
  Target: LAMA2; (-) strand; PAM type: NRG; PAM sequence: CAG
agaagttgttaaaaatttgc

SEQ ID NO: 93704 - DNA, 20 bp, Artificial Sequence
  Description of Artificial Sequence: Synthetic oligonucleotide
  Target: LAMA2; (-) strand; PAM type: NRG; PAM sequence: AAG
ctctctcatcacttaaggag

SEQ ID NO: 93705 - DNA, 20 bp, Artificial Sequence
  Description of Artificial Sequence: Synthetic oligonucleotide
  Target: LAMA2; (-) strand; PAM type: NRG; PAM sequence: GAG
cccctctctcatcacttaag

SEQ ID NO: 93706 - DNA, 20 bp, Artificial Sequence
  Description of Artificial Sequence: Synthetic oligonucleotide
  Target: LAMA2; (-) strand; PAM type: NRG; PAM sequence: AGG
gacccctctctcatcactta

SEQ ID NO: 93707 - DNA, 20 bp, Artificial Sequence
  Description of Artificial Sequence: Synthetic oligonucleotide
  Target: LAMA2; (-) strand; PAM type: NRG; PAM sequence: AAG
tgacccctctctcatcactt

SEQ ID NO: 93708 - DNA, 20 bp, Artificial Sequence
  Description of Artificial Sequence: Synthetic oligonucleotide
  Target: LAMA2; (-) strand; PAM type: NRG; PAM sequence: TGG
ggcaattgtgagattagtcc

SEQ ID NO: 93709 - DNA, 20 bp, Artificial Sequence
  Description of Artificial Sequence: Synthetic oligonucleotide
  Target: LAMA2; (-) strand; PAM type: NRG; PAM sequence: TAG
ttcagtggcaattgtgagat

SEQ ID NO: 93710 - DNA, 20 bp, Artificial Sequence
  Description of Artificial Sequence: Synthetic oligonucleotide
  Target: LAMA2; (-) strand; PAM type: NRG; PAM sequence: GAG
acattttcagtggcaattgt

SEQ ID NO: 93711 - DNA, 20 bp, Artificial Sequence
  Description of Artificial Sequence: Synthetic oligonucleotide
  Target: LAMA2; (-) strand; PAM type: NRG; PAM sequence: TGG
aacaccttccacattttcag

SEQ ID NO: 93712 - DNA, 20 bp, Artificial Sequence
  Description of Artificial Sequence: Synthetic oligonucleotide
  Target: LAMA2; (-) strand; PAM type: NRG; PAM sequence: CAG
tcaaacaccttccacatttt

SEQ ID NO: 93713 - DNA, 20 bp, Artificial Sequence
  Description of Artificial Sequence: Synthetic oligonucleotide
  Target: LAMA2; (-) strand; PAM type: NRG; PAM sequence: TAG
ttttcaaaatattaagcaat

SEQ ID NO: 93714 - DNA, 20 bp, Artificial Sequence
  Description of Artificial Sequence: Synthetic oligonucleotide
  Target: LAMA2; (-) strand; PAM type: NRG; PAM sequence: AAG
agatgaattttcaaaatatt

SEQ ID NO: 93715 - DNA, 20 bp, Artificial Sequence
  Description of Artificial Sequence: Synthetic oligonucleotide
  Target: LAMA2; (-) strand; PAM type: NRG; PAM sequence: TAG
gaatcttgaggataaaactg

SEQ ID NO: 93716 - DNA, 20 bp, Artificial Sequence
  Description of Artificial Sequence: Synthetic oligonucleotide
  Target: LAMA2; (-) strand; PAM type: NRG; PAM sequence: AGG
gatatctagtatgaatcttg

SEQ ID NO: 93717 - DNA, 20 bp, Artificial Sequence
  Description of Artificial Sequence: Synthetic oligonucleotide
  Target: LAMA2; (-) strand; PAM type: NRG; PAM sequence: GAG
tgatatctagtatgaatctt

SEQ ID NO: 93718 - DNA, 20 bp, Artificial Sequence
  Description of Artificial Sequence: Synthetic oligonucleotide
  Target: LAMA2; (-) strand; PAM type: NRG; PAM sequence: TAG
aaaggaatttctttgatatc

SEQ ID NO: 93719 - DNA, 20 bp, Artificial Sequence
  Description of Artificial Sequence: Synthetic oligonucleotide
  Target: LAMA2; (-) strand; PAM type: NRG; PAM sequence: AGG
ctgaaatttaagatacaaaa

SEQ ID NO: 93720 - DNA, 20 bp, Artificial Sequence
  Description of Artificial Sequence: Synthetic oligonucleotide
  Target: LAMA2; (-) strand; PAM type: NRG; PAM sequence: AAG
actgaaatttaagatacaaa

SEQ ID NO: 93721 - DNA, 20 bp, Artificial Sequence
  Description of Artificial Sequence: Synthetic oligonucleotide
  Target: LAMA2; (-) strand; PAM type: NRG; PAM sequence: AAG
ggattttggaactgaaattt

SEQ ID NO: 93722 - DNA, 20 bp, Artificial Sequence
  Description of Artificial Sequence: Synthetic oligonucleotide
  Target: LAMA2; (-) strand; PAM type: NRG; PAM sequence: TGG
acaaaatctaaatgggattt

SEQ ID NO: 93723 - DNA, 20 bp, Artificial Sequence
  Description of Artificial Sequence: Synthetic oligonucleotide
  Target: LAMA2; (-) strand; PAM type: NRG; PAM sequence: GGG
gaagcagacaaaatctaaat

SEQ ID NO: 93724 - DNA, 20 bp, Artificial Sequence
  Description of Artificial Sequence: Synthetic oligonucleotide
  Target: LAMA2; (-) strand; PAM type: NRG; PAM sequence: TGG
tgaagcagacaaaatctaaa

SEQ ID NO: 93725 - DNA, 20 bp, Artificial Sequence
  Description of Artificial Sequence: Synthetic oligonucleotide
  Target: LAMA2; (-) strand; PAM type: NRG; PAM sequence: CAG
cgaattcagacattctgaag

SEQ ID NO: 93726 - DNA, 20 bp, Artificial Sequence
  Description of Artificial Sequence: Synthetic oligonucleotide
  Target: LAMA2; (-) strand; PAM type: NRG; PAM sequence: AAG
attcgaattcagacattctg

SEQ ID NO: 93727 - DNA, 20 bp, Artificial Sequence
  Description of Artificial Sequence: Synthetic oligonucleotide
  Target: LAMA2; (-) strand; PAM type: NRG; PAM sequence: CAG
gattagacttgattcgaatt

SEQ ID NO: 93728 - DNA, 20 bp, Artificial Sequence
  Description of Artificial Sequence: Synthetic oligonucleotide
  Target: LAMA2; (-) strand; PAM type: NRG; PAM sequence: TAG
atagtaagcagaggggtgat

SEQ ID NO: 93729 - DNA, 20 bp, Artificial Sequence
  Description of Artificial Sequence: Synthetic oligonucleotide
  Target: LAMA2; (-) strand; PAM type: NRG; PAM sequence: GGG
catgagcatagtaagcagag

SEQ ID NO: 93730 - DNA, 20 bp, Artificial Sequence
  Description of Artificial Sequence: Synthetic oligonucleotide
  Target: LAMA2; (-) strand; PAM type: NRG; PAM sequence: GGG
ccatgagcatagtaagcaga

SEQ ID NO: 93731 - DNA, 20 bp, Artificial Sequence
  Description of Artificial Sequence: Synthetic oligonucleotide
  Target: LAMA2; (-) strand; PAM type: NRG; PAM sequence: AGG
cccatgagcatagtaagcag

SEQ ID NO: 93732 - DNA, 20 bp, Artificial Sequence
  Description of Artificial Sequence: Synthetic oligonucleotide
  Target: LAMA2; (-) strand; PAM type: NRG; PAM sequence: GAG
tcccatgagcatagtaagca

SEQ ID NO: 93733 - DNA, 20 bp, Artificial Sequence
  Description of Artificial Sequence: Synthetic oligonucleotide
  Target: LAMA2; (-) strand; PAM type: NRG; PAM sequence: CAG
ggtcccatgagcatagtaag

SEQ ID NO: 93734 - DNA, 20 bp, Artificial Sequence
  Description of Artificial Sequence: Synthetic oligonucleotide
  Target: LAMA2; (-) strand; PAM type: NRG; PAM sequence: AAG
gaaggtcccatgagcatagt

SEQ ID NO: 93735 - DNA, 20 bp, Artificial Sequence
  Description of Artificial Sequence: Synthetic oligonucleotide
  Target: LAMA2; (-) strand; PAM type: NRG; PAM sequence: TAG
aatagaaggtcccatgagca

SEQ ID NO: 93736 - DNA, 20 bp, Artificial Sequence
  Description of Artificial Sequence: Synthetic oligonucleotide
  Target: LAMA2; (-) strand; PAM type: NRG; PAM sequence: GAG
aagtgaatagaaggtcccat

SEQ ID NO: 93737 - DNA, 20 bp, Artificial Sequence
  Description of Artificial Sequence: Synthetic oligonucleotide
  Target: LAMA2; (-) strand; PAM type: NRG; PAM sequence: AGG
gagactcacaagtgaataga

SEQ ID NO: 93738 - DNA, 20 bp, Artificial Sequence
  Description of Artificial Sequence: Synthetic oligonucleotide
  Target: LAMA2; (-) strand; PAM type: NRG; PAM sequence: AAG
ggagactcacaagtgaatag

SEQ ID NO: 93739 - DNA, 20 bp, Artificial Sequence
  Description of Artificial Sequence: Synthetic oligonucleotide
  Target: LAMA2; (-) strand; PAM type: NRG; PAM sequence: TAG
caaggagactcacaagtgaa

SEQ ID NO: 93740 - DNA, 20 bp, Artificial Sequence
  Description of Artificial Sequence: Synthetic oligonucleotide
  Target: LAMA2; (-) strand; PAM type: NRG; PAM sequence: AAG
aaaggcacaaggagactcac

SEQ ID NO: 93741 - DNA, 20 bp, Artificial Sequence
  Description of Artificial Sequence: Synthetic oligonucleotide
  Target: LAMA2; (-) strand; PAM type: NRG; PAM sequence: GAG
tcaggacccaaaggcacaag

SEQ ID NO: 93742 - DNA, 20 bp, Artificial Sequence
  Description of Artificial Sequence: Synthetic oligonucleotide
  Target: LAMA2; (-) strand; PAM type: NRG; PAM sequence: AGG
attcaggacccaaaggcaca

SEQ ID NO: 93743 - DNA, 20 bp, Artificial Sequence
  Description of Artificial Sequence: Synthetic oligonucleotide
  Target: LAMA2; (-) strand; PAM type: NRG; PAM sequence: AAG
cattcaggacccaaaggcac

SEQ ID NO: 93744 - DNA, 20 bp, Artificial Sequence
  Description of Artificial Sequence: Synthetic oligonucleotide
  Target: LAMA2; (-) strand; PAM type: NRG; PAM sequence: AGG
gctctgcattcaggacccaa

SEQ ID NO: 93745 - DNA, 20 bp, Artificial Sequence
  Description of Artificial Sequence: Synthetic oligonucleotide
  Target: LAMA2; (-) strand; PAM type: NRG; PAM sequence: AAG
tgctctgcattcaggaccca

SEQ ID NO: 93746 - DNA, 20 bp, Artificial Sequence
  Description of Artificial Sequence: Synthetic oligonucleotide
  Target: LAMA2; (-) strand; PAM type: NRG; PAM sequence: AGG
gtagcccatgctctgcattc

SEQ ID NO: 93747 - DNA, 20 bp, Artificial Sequence
  Description of Artificial Sequence: Synthetic oligonucleotide
  Target: LAMA2; (-) strand; PAM type: NRG; PAM sequence: CAG
tgtagcccatgctctgcatt

SEQ ID NO: 93748 - DNA, 20 bp, Artificial Sequence
  Description of Artificial Sequence: Synthetic oligonucleotide
  Target: LAMA2; (-) strand; PAM type: NRG; PAM sequence: TAG
cccctcctctgttatttctg

SEQ ID NO: 93749 - DNA, 20 bp, Artificial Sequence
  Description of Artificial Sequence: Synthetic oligonucleotide
  Target: LAMA2; (-) strand; PAM type: NRG; PAM sequence: AGG
ttgctaacagtactacaggt

SEQ ID NO: 93750 - DNA, 20 bp, Artificial Sequence
  Description of Artificial Sequence: Synthetic oligonucleotide
  Target: LAMA2; (-) strand; PAM type: NRG; PAM sequence: TAG
tttgctaacagtactacagg

SEQ ID NO: 93751 - DNA, 20 bp, Artificial Sequence
  Description of Artificial Sequence: Synthetic oligonucleotide
  Target: LAMA2; (-) strand; PAM type: NRG; PAM sequence: AGG
aattttgctaacagtactac

SEQ ID NO: 93752 - DNA, 20 bp, Artificial Sequence
  Description of Artificial Sequence: Synthetic oligonucleotide
  Target: LAMA2; (-) strand; PAM type: NRG; PAM sequence: CAG
caattttgctaacagtacta

SEQ ID NO: 93753 - DNA, 20 bp, Artificial Sequence
  Description of Artificial Sequence: Synthetic oligonucleotide
  Target: LAMA2; (-) strand; PAM type: NRG; PAM sequence: CAG
tggagtcacaattttgctaa

SEQ ID NO: 93754 - DNA, 20 bp, Artificial Sequence
  Description of Artificial Sequence: Synthetic oligonucleotide
  Target: LAMA2; (-) strand; PAM type: NRG; PAM sequence: GAG
gcctcttgacacctcaactg

SEQ ID NO: 93755 - DNA, 20 bp, Artificial Sequence
  Description of Artificial Sequence: Synthetic oligonucleotide
  Target: LAMA2; (-) strand; PAM type: NRG; PAM sequence: TGG
tggcctcttgacacctcaac

SEQ ID NO: 93756 - DNA, 20 bp, Artificial Sequence
  Description of Artificial Sequence: Synthetic oligonucleotide
  Target: LAMA2; (-) strand; PAM type: NRG; PAM sequence: TGG
actgcacaaccacatatgag

SEQ ID NO: 93757 - DNA, 20 bp, Artificial Sequence
  Description of Artificial Sequence: Synthetic oligonucleotide
  Target: LAMA2; (-) strand; PAM type: NRG; PAM sequence: GAG
caaactgcacaaccacatat

SEQ ID NO: 93758 - DNA, 20 bp, Artificial Sequence
  Description of Artificial Sequence: Synthetic oligonucleotide
  Target: LAMA2; (-) strand; PAM type: NRG; PAM sequence: CAG
cttccctgagtgcctttgtg

SEQ ID NO: 93759 - DNA, 20 bp, Artificial Sequence
  Description of Artificial Sequence: Synthetic oligonucleotide
  Target: LAMA2; (-) strand; PAM type: NRG; PAM sequence: GAG
cctcaatcttccccttccct

SEQ ID NO: 93760 - DNA, 20 bp, Artificial Sequence
  Description of Artificial Sequence: Synthetic oligonucleotide
  Target: LAMA2; (-) strand; PAM type: NRG; PAM sequence: AAG
gaagagggtaaactggattc

SEQ ID NO: 93761 - DNA, 20 bp, Artificial Sequence
  Description of Artificial Sequence: Synthetic oligonucleotide
  Target: LAMA2; (-) strand; PAM type: NRG; PAM sequence: TGG
tggaaaagaagagggtaaac

SEQ ID NO: 93762 - DNA, 20 bp, Artificial Sequence
  Description of Artificial Sequence: Synthetic oligonucleotide
  Target: LAMA2; (-) strand; PAM type: NRG; PAM sequence: GGG
ggacttcatggaaaagaaga

SEQ ID NO: 93763 - DNA, 20 bp, Artificial Sequence
  Description of Artificial Sequence: Synthetic oligonucleotide
  Target: LAMA2; (-) strand; PAM type: NRG; PAM sequence: AGG
gggacttcatggaaaagaag

SEQ ID NO: 93764 - DNA, 20 bp, Artificial Sequence
  Description of Artificial Sequence: Synthetic oligonucleotide
  Target: LAMA2; (-) strand; PAM type: NRG; PAM sequence: GAG
agggacttcatggaaaagaa

SEQ ID NO: 93765 - DNA, 20 bp, Artificial Sequence
  Description of Artificial Sequence: Synthetic oligonucleotide
  Target: LAMA2; (-) strand; PAM type: NRG; PAM sequence: AAG
ccagggacttcatggaaaag

SEQ ID NO: 93766 - DNA, 20 bp, Artificial Sequence
  Description of Artificial Sequence: Synthetic oligonucleotide
  Target: LAMA2; (-) strand; PAM type: NRG; PAM sequence: AAG
cacccagggacttcatggaa

SEQ ID NO: 93767 - DNA, 20 bp, Artificial Sequence
  Description of Artificial Sequence: Synthetic oligonucleotide
  Target: LAMA2; (-) strand; PAM type: NRG; PAM sequence: TGG
ctagacacccagggacttca

SEQ ID NO: 93768 - DNA, 20 bp, Artificial Sequence
  Description of Artificial Sequence: Synthetic oligonucleotide
  Target: LAMA2; (-) strand; PAM type: NRG; PAM sequence: GGG
gtaaacagactagacaccca

SEQ ID NO: 93769 - DNA, 20 bp, Artificial Sequence
  Description of Artificial Sequence: Synthetic oligonucleotide
  Target: LAMA2; (-) strand; PAM type: NRG; PAM sequence: AGG
agtaaacagactagacaccc

SEQ ID NO: 93770 - DNA, 20 bp, Artificial Sequence
  Description of Artificial Sequence: Synthetic oligonucleotide
  Target: LAMA2; (-) strand; PAM type: NRG; PAM sequence: CAG
aagtaaacagactagacacc

SEQ ID NO: 93771 - DNA, 20 bp, Artificial Sequence
  Description of Artificial Sequence: Synthetic oligonucleotide
  Target: LAMA2; (-) strand; PAM type: NRG; PAM sequence: TAG
tgcagaaaaagtaaacagac

SEQ ID NO: 93772 - DNA, 20 bp, Artificial Sequence
  Description of Artificial Sequence: Synthetic oligonucleotide
  Target: LAMA2; (-) strand; PAM type: NRG; PAM sequence: CAG
acatatgcagaaaaagtaaa

SEQ ID NO: 93773 - DNA, 20 bp, Artificial Sequence
  Description of Artificial Sequence: Synthetic oligonucleotide
  Target: LAMA2; (-) strand; PAM type: NRG; PAM sequence: AAG
tttctagacatatgcagaaa

SEQ ID NO: 93774 - DNA, 20 bp, Artificial Sequence
  Description of Artificial Sequence: Synthetic oligonucleotide
  Target: LAMA2; (-) strand; PAM type: NRG; PAM sequence: CAG
ttgtcctttctagacatatg

SEQ ID NO: 93775 - DNA, 20 bp, Artificial Sequence
  Description of Artificial Sequence: Synthetic oligonucleotide
  Target: LAMA2; (-) strand; PAM type: NRG; PAM sequence: TAG
ttggaagaaattgtcctttc

SEQ ID NO: 93776 - DNA, 20 bp, Artificial Sequence
  Description of Artificial Sequence: Synthetic oligonucleotide
  Target: LAMA2; (-) strand; PAM type: NRG; PAM sequence: AAG
tggtgccttttacaagttgg

SEQ ID NO: 93777 - DNA, 20 bp, Artificial Sequence
  Description of Artificial Sequence: Synthetic oligonucleotide
  Target: LAMA2; (-) strand; PAM type: NRG; PAM sequence: TGG
acatggtgccttttacaagt

SEQ ID NO: 93778 - DNA, 20 bp, Artificial Sequence
  Description of Artificial Sequence: Synthetic oligonucleotide
  Target: LAMA2; (-) strand; PAM type: NRG; PAM sequence: AAG
gctcacatggtgccttttac

SEQ ID NO: 93779 - DNA, 20 bp, Artificial Sequence
  Description of Artificial Sequence: Synthetic oligonucleotide
  Target: LAMA2; (-) strand; PAM type: NRG; PAM sequence: TGG
agggtgtttccctgctcaca

SEQ ID NO: 93780 - DNA, 20 bp, Artificial Sequence
  Description of Artificial Sequence: Synthetic oligonucleotide
  Target: LAMA2; (-) strand; PAM type: NRG; PAM sequence: GGG
cataatcagcaaaagactga

SEQ ID NO: 93781 - DNA, 20 bp, Artificial Sequence
  Description of Artificial Sequence: Synthetic oligonucleotide
  Target: LAMA2; (-) strand; PAM type: NRG; PAM sequence: AGG
acataatcagcaaaagactg

SEQ ID NO: 93782 - DNA, 20 bp, Artificial Sequence
  Description of Artificial Sequence: Synthetic oligonucleotide
  Target: LAMA2; (-) strand; PAM type: NRG; PAM sequence: GAG
gacataatcagcaaaagact

SEQ ID NO: 93783 - DNA, 20 bp, Artificial Sequence
  Description of Artificial Sequence: Synthetic oligonucleotide
  Target: LAMA2; (-) strand; PAM type: NRG; PAM sequence: AAG
ccatttgacataatcagcaa

SEQ ID NO: 93784 - DNA, 20 bp, Artificial Sequence
  Description of Artificial Sequence: Synthetic oligonucleotide
  Target: LAMA2; (-) strand; PAM type: NRG; PAM sequence: CAG
ttcctcccatttgacataat

SEQ ID NO: 93785 - DNA, 20 bp, Artificial Sequence
  Description of Artificial Sequence: Synthetic oligonucleotide
  Target: LAMA2; (-) strand; PAM type: NRG; PAM sequence: TGG
ggctgctgtataaagaggcg

SEQ ID NO: 93786 - DNA, 20 bp, Artificial Sequence
  Description of Artificial Sequence: Synthetic oligonucleotide
  Target: LAMA2; (-) strand; PAM type: NRG; PAM sequence: AGG
agggtggctgctgtataaag

SEQ ID NO: 93787 - DNA, 20 bp, Artificial Sequence
  Description of Artificial Sequence: Synthetic oligonucleotide
  Target: LAMA2; (-) strand; PAM type: NRG; PAM sequence: GAG
gagggtggctgctgtataaa

SEQ ID NO: 93788 - DNA, 20 bp, Artificial Sequence
  Description of Artificial Sequence: Synthetic oligonucleotide
  Target: LAMA2; (-) strand; PAM type: NRG; PAM sequence: AAG
aagagggtggctgctgtata

SEQ ID NO: 93789 - DNA, 20 bp, Artificial Sequence
  Description of Artificial Sequence: Synthetic oligonucleotide
  Target: LAMA2; (-) strand; PAM type: NRG; PAM sequence: TGG
ggcaaaggcacagaagaggg

SEQ ID NO: 93790 - DNA, 20 bp, Artificial Sequence
  Description of Artificial Sequence: Synthetic oligonucleotide
  Target: LAMA2; (-) strand; PAM type: NRG; PAM sequence: GGG
attggcaaaggcacagaaga

SEQ ID NO: 93791 - DNA, 20 bp, Artificial Sequence
  Description of Artificial Sequence: Synthetic oligonucleotide
  Target: LAMA2; (-) strand; PAM type: NRG; PAM sequence: AGG
tattggcaaaggcacagaag

SEQ ID NO: 93792 - DNA, 20 bp, Artificial Sequence
  Description of Artificial Sequence: Synthetic oligonucleotide
  Target: LAMA2; (-) strand; PAM type: NRG; PAM sequence: GAG
gtattggcaaaggcacagaa

SEQ ID NO: 93793 - DNA, 20 bp, Artificial Sequence
  Description of Artificial Sequence: Synthetic oligonucleotide
  Target: LAMA2; (-) strand; PAM type: NRG; PAM sequence: AAG
cagtattggcaaaggcacag

SEQ ID NO: 93794 - DNA, 20 bp, Artificial Sequence
  Description of Artificial Sequence: Synthetic oligonucleotide
  Target: LAMA2; (-) strand; PAM type: NRG; PAM sequence: CAG
gaacagtattggcaaaggca

SEQ ID NO: 93795 - DNA, 20 bp, Artificial Sequence
  Description of Artificial Sequence: Synthetic oligonucleotide
  Target: LAMA2; (-) strand; PAM type: NRG; PAM sequence: AGG
agagggaacagtattggcaa

SEQ ID NO: 93796 - DNA, 20 bp, Artificial Sequence
  Description of Artificial Sequence: Synthetic oligonucleotide
  Target: LAMA2; (-) strand; PAM type: NRG; PAM sequence: AAG
cagagggaacagtattggca

SEQ ID NO: 93797 - DNA, 20 bp, Artificial Sequence
  Description of Artificial Sequence: Synthetic oligonucleotide
  Target: LAMA2; (-) strand; PAM type: NRG; PAM sequence: TGG
ccaggcagagggaacagtat

SEQ ID NO: 93798 - DNA, 20 bp, Artificial Sequence
  Description of Artificial Sequence: Synthetic oligonucleotide
  Target: LAMA2; (-) strand; PAM type: NRG; PAM sequence: CAG
aatcttccaggcagagggaa

SEQ ID NO: 93799 - DNA, 20 bp, Artificial Sequence
  Description of Artificial Sequence: Synthetic oligonucleotide
  Target: LAMA2; (-) strand; PAM type: NRG; PAM sequence: GGG
gctgcaatcttccaggcaga

SEQ ID NO: 93800 - DNA, 20 bp, Artificial Sequence
  Description of Artificial Sequence: Synthetic oligonucleotide
  Target: LAMA2; (-) strand; PAM type: NRG; PAM sequence: AGG
ggctgcaatcttccaggcag

SEQ ID NO: 93801 - DNA, 20 bp, Artificial Sequence
  Description of Artificial Sequence: Synthetic oligonucleotide
  Target: LAMA2; (-) strand; PAM type: NRG; PAM sequence: GAG
gggctgcaatcttccaggca

SEQ ID NO: 93802 - DNA, 20 bp, Artificial Sequence
  Description of Artificial Sequence: Synthetic oligonucleotide
  Target: LAMA2; (-) strand; PAM type: NRG; PAM sequence: CAG
aagggctgcaatcttccagg

SEQ ID NO: 93803 - DNA, 20 bp, Artificial Sequence
  Description of Artificial Sequence: Synthetic oligonucleotide
  Target: LAMA2; (-) strand; PAM type: NRG; PAM sequence: AGG
tgaaagggctgcaatcttcc

SEQ ID NO: 93804 - DNA, 20 bp, Artificial Sequence
  Description of Artificial Sequence: Synthetic oligonucleotide
  Target: LAMA2; (-) strand; PAM type: NRG; PAM sequence: CAG
gtgaaagggctgcaatcttc

SEQ ID NO: 93805 - DNA, 20 bp, Artificial Sequence
  Description of Artificial Sequence: Synthetic oligonucleotide
  Target: LAMA2; (-) strand; PAM type: NRG; PAM sequence: GGG
tctcggatggaggagtgaaa

SEQ ID NO: 93806 - DNA, 20 bp, Artificial Sequence
  Description of Artificial Sequence: Synthetic oligonucleotide
  Target: LAMA2; (-) strand; PAM type: NRG; PAM sequence: AGG
gtctcggatggaggagtgaa

SEQ ID NO: 93807 - DNA, 20 bp, Artificial Sequence
  Description of Artificial Sequence: Synthetic oligonucleotide
  Target: LAMA2; (-) strand; PAM type: NRG; PAM sequence: AAG
agtctcggatggaggagtga

SEQ ID NO: 93808 - DNA, 20 bp, Artificial Sequence
  Description of Artificial Sequence: Synthetic oligonucleotide
  Target: LAMA2; (-) strand; PAM type: NRG; PAM sequence: GAG
ttagttagtctcggatggag

SEQ ID NO: 93809 - DNA, 20 bp, Artificial Sequence
  Description of Artificial Sequence: Synthetic oligonucleotide
  Target: LAMA2; (-) strand; PAM type: NRG; PAM sequence: AGG
gattagttagtctcggatgg

SEQ ID NO: 93810 - DNA, 20 bp, Artificial Sequence
  Description of Artificial Sequence: Synthetic oligonucleotide
  Target: LAMA2; (-) strand; PAM type: NRG; PAM sequence: GAG
ggattagttagtctcggatg

SEQ ID NO: 93811 - DNA, 20 bp, Artificial Sequence
  Description of Artificial Sequence: Synthetic oligonucleotide
  Target: LAMA2; (-) strand; PAM type: NRG; PAM sequence: TGG
agggattagttagtctcgga

SEQ ID NO: 93812 - DNA, 20 bp, Artificial Sequence
  Description of Artificial Sequence: Synthetic oligonucleotide
  Target: LAMA2; (-) strand; PAM type: NRG; PAM sequence: CGG
gaacagggattagttagtct

SEQ ID NO: 93813 - DNA, 20 bp, Artificial Sequence
  Description of Artificial Sequence: Synthetic oligonucleotide
  Target: LAMA2; (-) strand; PAM type: NRG; PAM sequence: TAG
ggagctgaacagggattagt

SEQ ID NO: 93814 - DNA, 20 bp, Artificial Sequence
  Description of Artificial Sequence: Synthetic oligonucleotide
  Target: LAMA2; (-) strand; PAM type: NRG; PAM sequence: TAG
tttgggagctgaacagggat

SEQ ID NO: 93815 - DNA, 20 bp, Artificial Sequence
  Description of Artificial Sequence: Synthetic oligonucleotide
  Target: LAMA2; (-) strand; PAM type: NRG; PAM sequence: GGG
tgacttttgggagctgaaca

SEQ ID NO: 93816 - DNA, 20 bp, Artificial Sequence
  Description of Artificial Sequence: Synthetic oligonucleotide
  Target: LAMA2; (-) strand; PAM type: NRG; PAM sequence: AGG
ctgacttttgggagctgaac

SEQ ID NO: 93817 - DNA, 20 bp, Artificial Sequence
  Description of Artificial Sequence: Synthetic oligonucleotide
  Target: LAMA2; (-) strand; PAM type: NRG; PAM sequence: CAG
gctgacttttgggagctgaa

SEQ ID NO: 93818 - DNA, 20 bp, Artificial Sequence
  Description of Artificial Sequence: Synthetic oligonucleotide
  Target: LAMA2; (-) strand; PAM type: NRG; PAM sequence: GAG
atgatagtgctgacttttgg

SEQ ID NO: 93819 - DNA, 20 bp, Artificial Sequence
  Description of Artificial Sequence: Synthetic oligonucleotide
  Target: LAMA2; (-) strand; PAM type: NRG; PAM sequence: GGG
ggatgatagtgctgactttt

SEQ ID NO: 93820 - DNA, 20 bp, Artificial Sequence
  Description of Artificial Sequence: Synthetic oligonucleotide
  Target: LAMA2; (-) strand; PAM type: NRG; PAM sequence: TGG
aggatgatagtgctgacttt

SEQ ID NO: 93821 - DNA, 20 bp, Artificial Sequence
  Description of Artificial Sequence: Synthetic oligonucleotide
  Target: LAMA2; (-) strand; PAM type: NRG; PAM sequence: TAG
caaggacattttcaggatga

SEQ ID NO: 93822 - DNA, 20 bp, Artificial Sequence
  Description of Artificial Sequence: Synthetic oligonucleotide
  Target: LAMA2; (-) strand; PAM type: NRG; PAM sequence: AGG
gcccaatcaaggacattttc

SEQ ID NO: 93823 - DNA, 20 bp, Artificial Sequence
  Description of Artificial Sequence: Synthetic oligonucleotide
  Target: LAMA2; (-) strand; PAM type: NRG; PAM sequence: CAG
ggcccaatcaaggacatttt

SEQ ID NO: 93824 - DNA, 20 bp, Artificial Sequence
  Description of Artificial Sequence: Synthetic oligonucleotide
  Target: LAMA2; (-) strand; PAM type: NRG; PAM sequence: AGG
actcagattaggcccaatca

SEQ ID NO: 93825 - DNA, 20 bp, Artificial Sequence
  Description of Artificial Sequence: Synthetic oligonucleotide
  Target: LAMA2; (-) strand; PAM type: NRG; PAM sequence: AAG
aactcagattaggcccaatc

SEQ ID NO: 93826 - DNA, 20 bp, Artificial Sequence
  Description of Artificial Sequence: Synthetic oligonucleotide
  Target: LAMA2; (-) strand; PAM type: NRG; PAM sequence: AGG
aagggcaaccaactcagatt

SEQ ID NO: 93827 - DNA, 20 bp, Artificial Sequence
  Description of Artificial Sequence: Synthetic oligonucleotide
  Target: LAMA2; (-) strand; PAM type: NRG; PAM sequence: TAG
aaagggcaaccaactcagat

SEQ ID NO: 93828 - DNA, 20 bp, Artificial Sequence
  Description of Artificial Sequence: Synthetic oligonucleotide
  Target: LAMA2; (-) strand; PAM type: NRG; PAM sequence: CAG
acacaaaagggcaaccaact

SEQ ID NO: 93829 - DNA, 20 bp, Artificial Sequence
  Description of Artificial Sequence: Synthetic oligonucleotide
  Target: LAMA2; (-) strand; PAM type: NRG; PAM sequence: GGG
tattatggcagcacacaaaa

SEQ ID NO: 93830 - DNA, 20 bp, Artificial Sequence
  Description of Artificial Sequence: Synthetic oligonucleotide
  Target: LAMA2; (-) strand; PAM type: NRG; PAM sequence: AGG
ctattatggcagcacacaaa

SEQ ID NO: 93831 - DNA, 20 bp, Artificial Sequence
  Description of Artificial Sequence: Synthetic oligonucleotide
  Target: LAMA2; (-) strand; PAM type: NRG; PAM sequence: AAG
gctattatggcagcacacaa

SEQ ID NO: 93832 - DNA, 20 bp, Artificial Sequence
  Description of Artificial Sequence: Synthetic oligonucleotide
  Target: LAMA2; (-) strand; PAM type: NRG; PAM sequence: CAG
atatgcaaatgctattatgg

SEQ ID NO: 93833 - DNA, 20 bp, Artificial Sequence
  Description of Artificial Sequence: Synthetic oligonucleotide
  Target: LAMA2; (-) strand; PAM type: NRG; PAM sequence: TGG
gagatatgcaaatgctatta

SEQ ID NO: 93834 - DNA, 20 bp, Artificial Sequence
  Description of Artificial Sequence: Synthetic oligonucleotide
  Target: LAMA2; (-) strand; PAM type: NRG; PAM sequence: GAG
acgtagcagtagaacaactg

SEQ ID NO: 93835 - DNA, 20 bp, Artificial Sequence
  Description of Artificial Sequence: Synthetic oligonucleotide
  Target: LAMA2; (-) strand; PAM type: NRG; PAM sequence: TGG
aaacgtagcagtagaacaac

SEQ ID NO: 93836 - DNA, 20 bp, Artificial Sequence
  Description of Artificial Sequence: Synthetic oligonucleotide
  Target: LAMA2; (-) strand; PAM type: NRG; PAM sequence: TAG
cacattttaaaacgtagcag

SEQ ID NO: 93837 - DNA, 20 bp, Artificial Sequence
  Description of Artificial Sequence: Synthetic oligonucleotide
  Target: LAMA2; (-) strand; PAM type: NRG; PAM sequence: CAG
acacacattttaaaacgtag

SEQ ID NO: 93838 - DNA, 20 bp, Artificial Sequence
  Description of Artificial Sequence: Synthetic oligonucleotide
  Target: LAMA2; (-) strand; PAM type: NRG; PAM sequence: TAG
tgaacacacattttaaaacg

SEQ ID NO: 93839 - DNA, 20 bp, Artificial Sequence
  Description of Artificial Sequence: Synthetic oligonucleotide
  Target: LAMA2; (-) strand; PAM type: NRG; PAM sequence: GAG
tcttcacactacagtccatg

SEQ ID NO: 93840 - DNA, 20 bp, Artificial Sequence
  Description of Artificial Sequence: Synthetic oligonucleotide
  Target: LAMA2; (-) strand; PAM type: NRG; PAM sequence: TGG
agtcttcacactacagtcca

SEQ ID NO: 93841 - DNA, 20 bp, Artificial Sequence
  Description of Artificial Sequence: Synthetic oligonucleotide
  Target: LAMA2; (-) strand; PAM type: NRG; PAM sequence: CAG
aaggtacagtcttcacacta

SEQ ID NO: 93842 - DNA, 20 bp, Artificial Sequence
  Description of Artificial Sequence: Synthetic oligonucleotide
  Target: LAMA2; (-) strand; PAM type: NRG; PAM sequence: CAG
gtactaatacaaataaggta

SEQ ID NO: 93843 - DNA, 20 bp, Artificial Sequence
  Description of Artificial Sequence: Synthetic oligonucleotide
  Target: LAMA2; (-) strand; PAM type: NRG; PAM sequence: AGG
acacggtactaatacaaata

SEQ ID NO: 93844 - DNA, 20 bp, Artificial Sequence
  Description of Artificial Sequence: Synthetic oligonucleotide
  Target: LAMA2; (-) strand; PAM type: NRG; PAM sequence: AAG
tacacggtactaatacaaat

SEQ ID NO: 93845 - DNA, 20 bp, Artificial Sequence
  Description of Artificial Sequence: Synthetic oligonucleotide
  Target: LAMA2; (-) strand; PAM type: NRG; PAM sequence: CGG
atcagctgagcacttttaca

SEQ ID NO: 93846 - DNA, 20 bp, Artificial Sequence
  Description of Artificial Sequence: Synthetic oligonucleotide
  Target: LAMA2; (-) strand; PAM type: NRG; PAM sequence: GAG
cccattaaaaaaaatcagct

SEQ ID NO: 93847 - DNA, 20 bp, Artificial Sequence
  Description of Artificial Sequence: Synthetic oligonucleotide
  Target: LAMA2; (-) strand; PAM type: NRG; PAM sequence: CAG
cccaacccattaaaaaaaat

SEQ ID NO: 93848 - DNA, 20 bp, Artificial Sequence
  Description of Artificial Sequence: Synthetic oligonucleotide
  Target: LAMA2; (-) strand; PAM type: NRG; PAM sequence: TGG
caagcaaattagaaaagctc

SEQ ID NO: 93849 - DNA, 20 bp, Artificial Sequence
  Description of Artificial Sequence: Synthetic oligonucleotide
  Target: LAMA2; (-) strand; PAM type: NRG; PAM sequence: AAG
tctagccaagcaaattagaa

SEQ ID NO: 93850 - DNA, 20 bp, Artificial Sequence
  Description of Artificial Sequence: Synthetic oligonucleotide
  Target: LAMA2; (-) strand; PAM type: NRG; PAM sequence: TAG
cttaatctagccaagcaaat

SEQ ID NO: 93851 - DNA, 20 bp, Artificial Sequence
  Description of Artificial Sequence: Synthetic oligonucleotide
  Target: LAMA2; (-) strand; PAM type: NRG; PAM sequence: AAG
aatgctggcttaatctagcc

SEQ ID NO: 93852 - DNA, 20 bp, Artificial Sequence
  Description of Artificial Sequence: Synthetic oligonucleotide
  Target: LAMA2; (-) strand; PAM type: NRG; PAM sequence: TAG
aatataatgctggcttaatc

SEQ ID NO: 93853 - DNA, 20 bp, Artificial Sequence
  Description of Artificial Sequence: Synthetic oligonucleotide
  Target: LAMA2; (-) strand; PAM type: NRG; PAM sequence: TGG
acaatgaaacaatataatgc

SEQ ID NO: 93854 - DNA, 20 bp, Artificial Sequence
  Description of Artificial Sequence: Synthetic oligonucleotide
  Target: LAMA2; (-) strand; PAM type: NRG; PAM sequence: CGG
gcaacttttggctaaaatca

SEQ ID NO: 93855 - DNA, 20 bp, Artificial Sequence
  Description of Artificial Sequence: Synthetic oligonucleotide
  Target: LAMA2; (-) strand; PAM type: NRG; PAM sequence: TGG
atcattttttcagcaacttt

SEQ ID NO: 93856 - DNA, 20 bp, Artificial Sequence
  Description of Artificial Sequence: Synthetic oligonucleotide
  Target: LAMA2; (-) strand; PAM type: NRG; PAM sequence: CAG
attctgccccatcatttttt

SEQ ID NO: 93857 - DNA, 20 bp, Artificial Sequence
  Description of Artificial Sequence: Synthetic oligonucleotide
  Target: LAMA2; (-) strand; PAM type: NRG; PAM sequence: GAG
aagaaagcaaccacactgat

SEQ ID NO: 93858 - DNA, 20 bp, Artificial Sequence
  Description of Artificial Sequence: Synthetic oligonucleotide
  Target: LAMA2; (-) strand; PAM type: NRG; PAM sequence: AAG
gacaagcaacaatgagaaga

SEQ ID NO: 93859 - DNA, 20 bp, Artificial Sequence
  Description of Artificial Sequence: Synthetic oligonucleotide
  Target: LAMA2; (-) strand; PAM type: NRG; PAM sequence: AAG
tgcagacaagcaacaatgag

SEQ ID NO: 93860 - DNA, 20 bp, Artificial Sequence
  Description of Artificial Sequence: Synthetic oligonucleotide
  Target: LAMA2; (-) strand; PAM type: NRG; PAM sequence: GAG
acgtgcagacaagcaacaat

SEQ ID NO: 93861 - DNA, 20 bp, Artificial Sequence
  Description of Artificial Sequence: Synthetic oligonucleotide
  Target: LAMA2; (-) strand; PAM type: NRG; PAM sequence: AAG
aaaagagcggacgtgcagac

SEQ ID NO: 93862 - DNA, 20 bp, Artificial Sequence
  Description of Artificial Sequence: Synthetic oligonucleotide
  Target: LAMA2; (-) strand; PAM type: NRG; PAM sequence: CAG
gtagaaaaagagcggacgtg

SEQ ID NO: 93863 - DNA, 20 bp, Artificial Sequence
  Description of Artificial Sequence: Synthetic oligonucleotide
  Target: LAMA2; (-) strand; PAM type: NRG; PAM sequence: CGG
agggagaggtagaaaaagag

SEQ ID NO: 93864 - DNA, 20 bp, Artificial Sequence
  Description of Artificial Sequence: Synthetic oligonucleotide
  Target: LAMA2; (-) strand; PAM type: NRG; PAM sequence: GAG
gagagggagaggtagaaaaa

SEQ ID NO: 93865 - DNA, 20 bp, Artificial Sequence
  Description of Artificial Sequence: Synthetic oligonucleotide
  Target: LAMA2; (-) strand; PAM type: NRG; PAM sequence: AAG
gagagagggagaggtagaaa

SEQ ID NO: 93866 - DNA, 20 bp, Artificial Sequence
  Description of Artificial Sequence: Synthetic oligonucleotide
  Target: LAMA2; (-) strand; PAM type: NRG; PAM sequence: TAG
ggaagagagagagggagagg

SEQ ID NO: 93867 - DNA, 20 bp, Artificial Sequence
  Description of Artificial Sequence: Synthetic oligonucleotide
  Target: LAMA2; (-) strand; PAM type: NRG; PAM sequence: AGG
agaggaagagagagagggag

SEQ ID NO: 93868 - DNA, 20 bp, Artificial Sequence
  Description of Artificial Sequence: Synthetic oligonucleotide
  Target: LAMA2; (-) strand; PAM type: NRG; PAM sequence: GAG
gagaggaagagagagaggga

SEQ ID NO: 93869 - DNA, 20 bp, Artificial Sequence
  Description of Artificial Sequence: Synthetic oligonucleotide
  Target: LAMA2; (-) strand; PAM type: NRG; PAM sequence: GAG
gagagaggaagagagagagg

SEQ ID NO: 93870 - DNA, 20 bp, Artificial Sequence
  Description of Artificial Sequence: Synthetic oligonucleotide
  Target: LAMA2; (-) strand; PAM type: NRG; PAM sequence: GGG
gggagagaggaagagagaga

SEQ ID NO: 93871 - DNA, 20 bp, Artificial Sequence
  Description of Artificial Sequence: Synthetic oligonucleotide
  Target: LAMA2; (-) strand; PAM type: NRG; PAM sequence: AGG
agggagagaggaagagagag

SEQ ID NO: 93872 - DNA, 20 bp, Artificial Sequence
  Description of Artificial Sequence: Synthetic oligonucleotide
  Target: LAMA2; (-) strand; PAM type: NRG; PAM sequence: GAG
gagggagagaggaagagaga

SEQ ID NO: 93873 - DNA, 20 bp, Artificial Sequence
  Description of Artificial Sequence: Synthetic oligonucleotide
  Target: LAMA2; (-) strand; PAM type: NRG; PAM sequence: GAG
gggagggagagaggaagaga

SEQ ID NO: 93874 - DNA, 20 bp, Artificial Sequence
  Description of Artificial Sequence: Synthetic oligonucleotide
  Target: LAMA2; (-) strand; PAM type: NRG; PAM sequence: GAG
gagggagggagagaggaaga

SEQ ID NO: 93875 - DNA, 20 bp, Artificial Sequence
  Description of Artificial Sequence: Synthetic oligonucleotide
  Target: LAMA2; (-) strand; PAM type: NRG; PAM sequence: GAG
gggagggagggagagaggaa

SEQ ID NO: 93876 - DNA, 20 bp, Artificial Sequence
  Description of Artificial Sequence: Synthetic oligonucleotide
  Target: LAMA2; (-) strand; PAM type: NRG; PAM sequence: AAG
gagggagggagggagagagg

SEQ ID NO: 93877 - DNA, 20 bp, Artificial Sequence
  Description of Artificial Sequence: Synthetic oligonucleotide
  Target: LAMA2; (-) strand; PAM type: NRG; PAM sequence: AGG
ttagagggagggagggagag

SEQ ID NO: 93878 - DNA, 20 bp, Artificial Sequence
  Description of Artificial Sequence: Synthetic oligonucleotide
  Target: LAMA2; (-) strand; PAM type: NRG; PAM sequence: GAG
gttagagggagggagggaga

SEQ ID NO: 93879 - DNA, 20 bp, Artificial Sequence
  Description of Artificial Sequence: Synthetic oligonucleotide
  Target: LAMA2; (-) strand; PAM type: NRG; PAM sequence: GAG
atgttagagggagggaggga

SEQ ID NO: 93880 - DNA, 20 bp, Artificial Sequence
  Description of Artificial Sequence: Synthetic oligonucleotide
  Target: LAMA2; (-) strand; PAM type: NRG; PAM sequence: GAG
caatgttagagggagggagg

SEQ ID NO: 93881 - DNA, 20 bp, Artificial Sequence
  Description of Artificial Sequence: Synthetic oligonucleotide
  Target: LAMA2; (-) strand; PAM type: NRG; PAM sequence: GGG
aacaatgttagagggaggga

SEQ ID NO: 93882 - DNA, 20 bp, Artificial Sequence
  Description of Artificial Sequence: Synthetic oligonucleotide
  Target: LAMA2; (-) strand; PAM type: NRG; PAM sequence: AGG
gaacaatgttagagggaggg

SEQ ID NO: 93883 - DNA, 20 bp, Artificial Sequence
  Description of Artificial Sequence: Synthetic oligonucleotide
  Target: LAMA2; (-) strand; PAM type: NRG; PAM sequence: GAG
ggaacaatgttagagggagg

SEQ ID NO: 93884 - DNA, 20 bp, Artificial Sequence
  Description of Artificial Sequence: Synthetic oligonucleotide
  Target: LAMA2; (-) strand; PAM type: NRG; PAM sequence: GGG
taggaacaatgttagaggga

SEQ ID NO: 93885 - DNA, 20 bp, Artificial Sequence
  Description of Artificial Sequence: Synthetic oligonucleotide
  Target: LAMA2; (-) strand; PAM type: NRG; PAM sequence: AGG
ttaggaacaatgttagaggg

SEQ ID NO: 93886 - DNA, 20 bp, Artificial Sequence
  Description of Artificial Sequence: Synthetic oligonucleotide
  Target: LAMA2; (-) strand; PAM type: NRG; PAM sequence: GAG
tttaggaacaatgttagagg

SEQ ID NO: 93887 - DNA, 20 bp, Artificial Sequence
  Description of Artificial Sequence: Synthetic oligonucleotide
  Target: LAMA2; (-) strand; PAM type: NRG; PAM sequence: GGG
aatttaggaacaatgttaga

SEQ ID NO: 93888 - DNA, 20 bp, Artificial Sequence
  Description of Artificial Sequence: Synthetic oligonucleotide
  Target: LAMA2; (-) strand; PAM type: NRG; PAM sequence: AGG
taatttaggaacaatgttag

SEQ ID NO: 93889 - DNA, 20 bp, Artificial Sequence
  Description of Artificial Sequence: Synthetic oligonucleotide
  Target: LAMA2; (-) strand; PAM type: NRG; PAM sequence: GAG
ataatttaggaacaatgtta

SEQ ID NO: 93890 - DNA, 20 bp, Artificial Sequence
  Description of Artificial Sequence: Synthetic oligonucleotide
  Target: LAMA2; (-) strand; PAM type: NRG; PAM sequence: TAG
tgataatttaggaacaatgt

SEQ ID NO: 93891 - DNA, 20 bp, Artificial Sequence
  Description of Artificial Sequence: Synthetic oligonucleotide
  Target: LAMA2; (-) strand; PAM type: NRG; PAM sequence: AGG
cttgctgctattgataattt

SEQ ID NO: 93892 - DNA, 20 bp, Artificial Sequence
  Description of Artificial Sequence: Synthetic oligonucleotide
  Target: LAMA2; (-) strand; PAM type: NRG; PAM sequence: TAG
acttgctgctattgataatt

SEQ ID NO: 93893 - DNA, 20 bp, Artificial Sequence
  Description of Artificial Sequence: Synthetic oligonucleotide
  Target: LAMA2; (-) strand; PAM type: NRG; PAM sequence: CAG
aagactccagataacacatg

SEQ ID NO: 93894 - DNA, 20 bp, Artificial Sequence
  Description of Artificial Sequence: Synthetic oligonucleotide
  Target: LAMA2; (-) strand; PAM type: NRG; PAM sequence: CAG
tttaaatgtaaataagactc

SEQ ID NO: 93895 - DNA, 20 bp, Artificial Sequence
  Description of Artificial Sequence: Synthetic oligonucleotide
  Target: LAMA2; (-) strand; PAM type: NRG; PAM sequence: AAG
agggccgtttaaatgtaaat

SEQ ID NO: 93896 - DNA, 20 bp, Artificial Sequence
  Description of Artificial Sequence: Synthetic oligonucleotide
  Target: LAMA2; (-) strand; PAM type: NRG; PAM sequence: GGG
aattgcaatattttgaaaaa

SEQ ID NO: 93897 - DNA, 20 bp, Artificial Sequence
  Description of Artificial Sequence: Synthetic oligonucleotide
  Target: LAMA2; (-) strand; PAM type: NRG; PAM sequence: AGG
aaattgcaatattttgaaaa

SEQ ID NO: 93898 - DNA, 20 bp, Artificial Sequence
  Description of Artificial Sequence: Synthetic oligonucleotide
  Target: LAMA2; (-) strand; PAM type: NRG; PAM sequence: AAG
caaattgcaatattttgaaa

SEQ ID NO: 93899 - DNA, 20 bp, Artificial Sequence
  Description of Artificial Sequence: Synthetic oligonucleotide
  Target: LAMA2; (-) strand; PAM type: NRG; PAM sequence: AGG
cggatatcttgacataacaa

SEQ ID NO: 93900 - DNA, 20 bp, Artificial Sequence
  Description of Artificial Sequence: Synthetic oligonucleotide
  Target: LAMA2; (-) strand; PAM type: NRG; PAM sequence: AAG
acggatatcttgacataaca

SEQ ID NO: 93901 - DNA, 20 bp, Artificial Sequence
  Description of Artificial Sequence: Synthetic oligonucleotide
  Target: LAMA2; (-) strand; PAM type: NRG; PAM sequence: CGG
aatgaatgccttgctagaaa

SEQ ID NO: 93902 - DNA, 20 bp, Artificial Sequence
  Description of Artificial Sequence: Synthetic oligonucleotide
  Target: LAMA2; (-) strand; PAM type: NRG; PAM sequence: TAG
ttatcgaatgaatgccttgc

SEQ ID NO: 93903 - DNA, 20 bp, Artificial Sequence
  Description of Artificial Sequence: Synthetic oligonucleotide
  Target: LAMA2; (-) strand; PAM type: NRG; PAM sequence: TAG
aatgagtgcatttttaaaaa

SEQ ID NO: 93904 - DNA, 20 bp, Artificial Sequence
  Description of Artificial Sequence: Synthetic oligonucleotide
  Target: LAMA2; (-) strand; PAM type: NRG; PAM sequence: GAG
tttcatatgcaaggcagaat

SEQ ID NO: 93905 - DNA, 20 bp, Artificial Sequence
  Description of Artificial Sequence: Synthetic oligonucleotide
  Target: LAMA2; (-) strand; PAM type: NRG; PAM sequence: CAG
tctcattttcatatgcaagg

SEQ ID NO: 93906 - DNA, 20 bp, Artificial Sequence
  Description of Artificial Sequence: Synthetic oligonucleotide
  Target: LAMA2; (-) strand; PAM type: NRG; PAM sequence: AGG
ccctctcattttcatatgca

SEQ ID NO: 93907 - DNA, 20 bp, Artificial Sequence
  Description of Artificial Sequence: Synthetic oligonucleotide
  Target: LAMA2; (-) strand; PAM type: NRG; PAM sequence: AAG
gccctctcattttcatatgc

SEQ ID NO: 93908 - DNA, 20 bp, Artificial Sequence
  Description of Artificial Sequence: Synthetic oligonucleotide
  Target: LAMA2; (-) strand; PAM type: NRG; PAM sequence: AAG
taattgtaatgtgaaatgtc

SEQ ID NO: 93909 - DNA, 20 bp, Artificial Sequence
  Description of Artificial Sequence: Synthetic oligonucleotide
  Target: LAMA2; (-) strand; PAM type: NRG; PAM sequence: TGG
tagtttaaatcacagtcctt

SEQ ID NO: 93910 - DNA, 20 bp, Artificial Sequence
  Description of Artificial Sequence: Synthetic oligonucleotide
  Target: LAMA2; (-) strand; PAM type: NRG; PAM sequence: CAG
attaaaattagtttaaatca

SEQ ID NO: 93911 - DNA, 20 bp, Artificial Sequence
  Description of Artificial Sequence: Synthetic oligonucleotide
  Target: LAMA2; (-) strand; PAM type: NRG; PAM sequence: TAG
tggattcacctaattaaaat

SEQ ID NO: 93912 - DNA, 20 bp, Artificial Sequence
  Description of Artificial Sequence: Synthetic oligonucleotide
  Target: LAMA2; (-) strand; PAM type: NRG; PAM sequence: TGG
gtgttagagtctgatcaagt

SEQ ID NO: 93913 - DNA, 20 bp, Artificial Sequence
  Description of Artificial Sequence: Synthetic oligonucleotide
  Target: LAMA2; (-) strand; PAM type: NRG; PAM sequence: AAG
tagtgtgttagagtctgatc

SEQ ID NO: 93914 - DNA, 20 bp, Artificial Sequence
  Description of Artificial Sequence: Synthetic oligonucleotide
  Target: LAMA2; (-) strand; PAM type: NRG; PAM sequence: GAG
ttaataaaaatagtgtgtta

SEQ ID NO: 93915 - DNA, 20 bp, Artificial Sequence
  Description of Artificial Sequence: Synthetic oligonucleotide
  Target: LAMA2; (-) strand; PAM type: NRG; PAM sequence: TAG
tattaataaaaatagtgtgt

SEQ ID NO: 93916 - DNA, 20 bp, Artificial Sequence
  Description of Artificial Sequence: Synthetic oligonucleotide
  Target: LAMA2; (-) strand; PAM type: NRG; PAM sequence: TAG
ataacttttattaataaaaa

SEQ ID NO: 93917 - DNA, 20 bp, Artificial Sequence
  Description of Artificial Sequence: Synthetic oligonucleotide
  Target: LAMA2; (-) strand; PAM type: NRG; PAM sequence: GAG
aaaaagtaatttgagggtca

SEQ ID NO: 93918 - DNA, 20 bp, Artificial Sequence
  Description of Artificial Sequence: Synthetic oligonucleotide
  Target: LAMA2; (-) strand; PAM type: NRG; PAM sequence: CAG
ttaaaaagtaatttgagggt

SEQ ID NO: 93919 - DNA, 20 bp, Artificial Sequence
  Description of Artificial Sequence: Synthetic oligonucleotide
  Target: LAMA2; (-) strand; PAM type: NRG; PAM sequence: GGG
ggaattaaaaagtaatttga

SEQ ID NO: 93920 - DNA, 20 bp, Artificial Sequence
  Description of Artificial Sequence: Synthetic oligonucleotide
  Target: LAMA2; (-) strand; PAM type: NRG; PAM sequence: AGG
aggaattaaaaagtaatttg

SEQ ID NO: 93921 - DNA, 20 bp, Artificial Sequence
  Description of Artificial Sequence: Synthetic oligonucleotide
  Target: LAMA2; (-) strand; PAM type: NRG; PAM sequence: GAG
taggaattaaaaagtaattt

SEQ ID NO: 93922 - DNA, 20 bp, Artificial Sequence
  Description of Artificial Sequence: Synthetic oligonucleotide
  Target: LAMA2; (-) strand; PAM type: NRG; PAM sequence: AAG
gtgttccgttaggaattaaa

SEQ ID NO: 93923 - DNA, 20 bp, Artificial Sequence
  Description of Artificial Sequence: Synthetic oligonucleotide
  Target: LAMA2; (-) strand; PAM type: NRG; PAM sequence: AGG
atttctgaaggtgttccgtt

SEQ ID NO: 93924 - DNA, 20 bp, Artificial Sequence
  Description of Artificial Sequence: Synthetic oligonucleotide
  Target: LAMA2; (-) strand; PAM type: NRG; PAM sequence: TAG
gatttctgaaggtgttccgt

SEQ ID NO: 93925 - DNA, 20 bp, Artificial Sequence
  Description of Artificial Sequence: Synthetic oligonucleotide
  Target: LAMA2; (-) strand; PAM type: NRG; PAM sequence: AGG
acagtattagagatttctga

SEQ ID NO: 93926 - DNA, 20 bp, Artificial Sequence
  Description of Artificial Sequence: Synthetic oligonucleotide
  Target: LAMA2; (-) strand; PAM type: NRG; PAM sequence: AAG
aacagtattagagatttctg

SEQ ID NO: 93927 - DNA, 20 bp, Artificial Sequence
  Description of Artificial Sequence: Synthetic oligonucleotide
  Target: LAMA2; (-) strand; PAM type: NRG; PAM sequence: GAG
ctatacagagaacagtatta

SEQ ID NO: 93928 - DNA, 20 bp, Artificial Sequence
  Description of Artificial Sequence: Synthetic oligonucleotide
  Target: LAMA2; (-) strand; PAM type: NRG; PAM sequence: TAG
ttctatacagagaacagtat

SEQ ID NO: 93929 - DNA, 20 bp, Artificial Sequence
  Description of Artificial Sequence: Synthetic oligonucleotide
  Target: LAMA2; (-) strand; PAM type: NRG; PAM sequence: CAG
gtgtgtttctatacagagaa

SEQ ID NO: 93930 - DNA, 20 bp, Artificial Sequence
  Description of Artificial Sequence: Synthetic oligonucleotide
  Target: LAMA2; (-) strand; PAM type: NRG; PAM sequence: GAG
tgggtgtgtgtttctataca

SEQ ID NO: 93931 - DNA, 20 bp, Artificial Sequence
  Description of Artificial Sequence: Synthetic oligonucleotide
  Target: LAMA2; (-) strand; PAM type: NRG; PAM sequence: CAG
tatgggtgtgtgtttctata

SEQ ID NO: 93932 - DNA, 20 bp, Artificial Sequence
  Description of Artificial Sequence: Synthetic oligonucleotide
  Target: LAMA2; (-) strand; PAM type: NRG; PAM sequence: GGG
tcagcacattactggtgtat

SEQ ID NO: 93933 - DNA, 20 bp, Artificial Sequence
  Description of Artificial Sequence: Synthetic oligonucleotide
  Target: LAMA2; (-) strand; PAM type: NRG; PAM sequence: TGG
ttcagcacattactggtgta

SEQ ID NO: 93934 - DNA, 20 bp, Artificial Sequence
  Description of Artificial Sequence: Synthetic oligonucleotide
  Target: LAMA2; (-) strand; PAM type: NRG; PAM sequence: TGG
gcaacacttcagcacattac

SEQ ID NO: 93935 - DNA, 20 bp, Artificial Sequence
  Description of Artificial Sequence: Synthetic oligonucleotide
  Target: LAMA2; (-) strand; PAM type: NRG; PAM sequence: CAG
gactattttctgcaacactt

SEQ ID NO: 93936 - DNA, 20 bp, Artificial Sequence
  Description of Artificial Sequence: Synthetic oligonucleotide
  Target: LAMA2; (-) strand; PAM type: NRG; PAM sequence: GGG
tatgccatgttactgaaagt

SEQ ID NO: 93937 - DNA, 20 bp, Artificial Sequence
  Description of Artificial Sequence: Synthetic oligonucleotide
  Target: LAMA2; (-) strand; PAM type: NRG; PAM sequence: TGG
atatgccatgttactgaaag

SEQ ID NO: 93938 - DNA, 20 bp, Artificial Sequence
  Description of Artificial Sequence: Synthetic oligonucleotide
  Target: LAMA2; (-) strand; PAM type: NRG; PAM sequence: AAG
ttcatatgccatgttactga

SEQ ID NO: 93939 - DNA, 20 bp, Artificial Sequence
  Description of Artificial Sequence: Synthetic oligonucleotide
  Target: LAMA2; (-) strand; PAM type: NRG; PAM sequence: TAG
aaatttgtgaatatacgtga

SEQ ID NO: 93940 - DNA, 20 bp, Artificial Sequence
  Description of Artificial Sequence: Synthetic oligonucleotide
  Target: LAMA2; (-) strand; PAM type: NRG; PAM sequence: AGG
tttttcttgcaggacgtgta

SEQ ID NO: 93941 - DNA, 20 bp, Artificial Sequence
  Description of Artificial Sequence: Synthetic oligonucleotide
  Target: LAMA2; (-) strand; PAM type: NRG; PAM sequence: AAG
ttttttcttgcaggacgtgt

SEQ ID NO: 93942 - DNA, 20 bp, Artificial Sequence
  Description of Artificial Sequence: Synthetic oligonucleotide
  Target: LAMA2; (-) strand; PAM type: NRG; PAM sequence: AGG
ttttatttattttttcttgc

SEQ ID NO: 93943 - DNA, 20 bp, Artificial Sequence
  Description of Artificial Sequence: Synthetic oligonucleotide
  Target: LAMA2; (-) strand; PAM type: NRG; PAM sequence: CAG
cttttatttattttttcttg

SEQ ID NO: 93944 - DNA, 20 bp, Artificial Sequence
  Description of Artificial Sequence: Synthetic oligonucleotide
  Target: LAMA2; (-) strand; PAM type: NRG; PAM sequence: AAG
attaaatagaataactaaag

SEQ ID NO: 93945 - DNA, 20 bp, Artificial Sequence
  Description of Artificial Sequence: Synthetic oligonucleotide
  Target: LAMA2; (-) strand; PAM type: NRG; PAM sequence: AAG
ataattaaatagaataacta

SEQ ID NO: 93946 - DNA, 20 bp, Artificial Sequence
  Description of Artificial Sequence: Synthetic oligonucleotide
  Target: LAMA2; (-) strand; PAM type: NRG; PAM sequence: TAG
ggaaaataactataattaaa

SEQ ID NO: 93947 - DNA, 20 bp, Artificial Sequence
  Description of Artificial Sequence: Synthetic oligonucleotide
  Target: LAMA2; (-) strand; PAM type: NRG; PAM sequence: AGG
ataaaaaaactcatttcagg

SEQ ID NO: 93948 - DNA, 20 bp, Artificial Sequence
  Description of Artificial Sequence: Synthetic oligonucleotide
  Target: LAMA2; (-) strand; PAM type: NRG; PAM sequence: GAG
aataaaaaaactcatttcag

SEQ ID NO: 93949 - DNA, 20 bp, Artificial Sequence
  Description of Artificial Sequence: Synthetic oligonucleotide
  Target: LAMA2; (-) strand; PAM type: NRG; PAM sequence: AGG
ataataaaaaaactcatttc

SEQ ID NO: 93950 - DNA, 20 bp, Artificial Sequence
  Description of Artificial Sequence: Synthetic oligonucleotide
  Target: LAMA2; (-) strand; PAM type: NRG; PAM sequence: CAG
cataataaaaaaactcattt

SEQ ID NO: 93951 - DNA, 20 bp, Artificial Sequence
  Description of Artificial Sequence: Synthetic oligonucleotide
  Target: LAMA2; (-) strand; PAM type: NRG; PAM sequence: AAG
taacttagatagcaattaat

SEQ ID NO: 93952 - DNA, 20 bp, Artificial Sequence
  Description of Artificial Sequence: Synthetic oligonucleotide
  Target: LAMA2; (-) strand; PAM type: NRG; PAM sequence: TAG
ggaatttttcttaacttaga

SEQ ID NO: 93953 - DNA, 20 bp, Artificial Sequence
  Description of Artificial Sequence: Synthetic oligonucleotide
  Target: LAMA2; (-) strand; PAM type: NRG; PAM sequence: TAG
tctgggaatttttcttaact

SEQ ID NO: 93954 - DNA, 20 bp, Artificial Sequence
  Description of Artificial Sequence: Synthetic oligonucleotide
  Target: LAMA2; (-) strand; PAM type: NRG; PAM sequence: GGG
agctttatataacgagatct

SEQ ID NO: 93955 - DNA, 20 bp, Artificial Sequence
  Description of Artificial Sequence: Synthetic oligonucleotide
  Target: LAMA2; (-) strand; PAM type: NRG; PAM sequence: TGG
tagctttatataacgagatc

SEQ ID NO: 93956 - DNA, 20 bp, Artificial Sequence
  Description of Artificial Sequence: Synthetic oligonucleotide
  Target: LAMA2; (-) strand; PAM type: NRG; PAM sequence: GAG
gagagatagctttatataac

SEQ ID NO: 93957 - DNA, 20 bp, Artificial Sequence
  Description of Artificial Sequence: Synthetic oligonucleotide
  Target: LAMA2; (-) strand; PAM type: NRG; PAM sequence: TAG
gttactgccctttggagaga

SEQ ID NO: 93958 - DNA, 20 bp, Artificial Sequence
  Description of Artificial Sequence: Synthetic oligonucleotide
  Target: LAMA2; (-) strand; PAM type: NRG; PAM sequence: GAG
atgagttactgccctttgga

SEQ ID NO: 93959 - DNA, 20 bp, Artificial Sequence
  Description of Artificial Sequence: Synthetic oligonucleotide
  Target: LAMA2; (-) strand; PAM type: NRG; PAM sequence: GAG
agatgagttactgccctttg

SEQ ID NO: 93960 - DNA, 20 bp, Artificial Sequence
  Description of Artificial Sequence: Synthetic oligonucleotide
  Target: LAMA2; (-) strand; PAM type: NRG; PAM sequence: TGG
caagatgagttactgccctt

SEQ ID NO: 93961 - DNA, 20 bp, Artificial Sequence
  Description of Artificial Sequence: Synthetic oligonucleotide
  Target: LAMA2; (-) strand; PAM type: NRG; PAM sequence: GAG
cagctcactttcctcaagat

SEQ ID NO: 93962 - DNA, 20 bp, Artificial Sequence
  Description of Artificial Sequence: Synthetic oligonucleotide
  Target: LAMA2; (-) strand; PAM type: NRG; PAM sequence: AAG
attttcagctcactttcctc

SEQ ID NO: 93963 - DNA, 20 bp, Artificial Sequence
  Description of Artificial Sequence: Synthetic oligonucleotide
  Target: LAMA2; (-) strand; PAM type: NRG; PAM sequence: CAG
aaacgaaaacctattatttt

SEQ ID NO: 93964 - DNA, 20 bp, Artificial Sequence
  Description of Artificial Sequence: Synthetic oligonucleotide
  Target: LAMA2; (-) strand; PAM type: NRG; PAM sequence: CAG
atatacaatgatcattatca

SEQ ID NO: 93965 - DNA, 20 bp, Artificial Sequence
  Description of Artificial Sequence: Synthetic oligonucleotide
  Target: LAMA2; (-) strand; PAM type: NRG; PAM sequence: AGG
gactttgtgccactggaata

SEQ ID NO: 93966 - DNA, 20 bp, Artificial Sequence
  Description of Artificial Sequence: Synthetic oligonucleotide
  Target: LAMA2; (-) strand; PAM type: NRG; PAM sequence: AAG
tgactttgtgccactggaat

SEQ ID NO: 93967 - DNA, 20 bp, Artificial Sequence
  Description of Artificial Sequence: Synthetic oligonucleotide
  Target: LAMA2; (-) strand; PAM type: NRG; PAM sequence: TGG
agagagtgactttgtgccac

SEQ ID NO: 93968 - DNA, 20 bp, Artificial Sequence
  Description of Artificial Sequence: Synthetic oligonucleotide
  Target: LAMA2; (-) strand; PAM type: NRG; PAM sequence: GAG
cattttgtttaccactaaga

SEQ ID NO: 93969 - DNA, 20 bp, Artificial Sequence
  Description of Artificial Sequence: Synthetic oligonucleotide
  Target: LAMA2; (-) strand; PAM type: NRG; PAM sequence: GAG
ctcattttgtttaccactaa

SEQ ID NO: 93970 - DNA, 20 bp, Artificial Sequence
  Description of Artificial Sequence: Synthetic oligonucleotide
  Target: LAMA2; (-) strand; PAM type: NRG; PAM sequence: AAG
atctcattttgtttaccact

SEQ ID NO: 93971 - DNA, 20 bp, Artificial Sequence
  Description of Artificial Sequence: Synthetic oligonucleotide
  Target: LAMA2; (-) strand; PAM type: NRG; PAM sequence: GAG
cttgtcttatttaatattca

SEQ ID NO: 93972 - DNA, 20 bp, Artificial Sequence
  Description of Artificial Sequence: Synthetic oligonucleotide
  Target: LAMA2; (-) strand; PAM type: NRG; PAM sequence: CAG
ttcttgtcttatttaatatt

SEQ ID NO: 93973 - DNA, 20 bp, Artificial Sequence
  Description of Artificial Sequence: Synthetic oligonucleotide
  Target: LAMA2; (-) strand; PAM type: NRG; PAM sequence: GAG
catttgataaagataagaag

SEQ ID NO: 93974 - DNA, 20 bp, Artificial Sequence
  Description of Artificial Sequence: Synthetic oligonucleotide
  Target: LAMA2; (-) strand; PAM type: NRG; PAM sequence: AGG
ggcatttgataaagataaga

SEQ ID NO: 93975 - DNA, 20 bp, Artificial Sequence
  Description of Artificial Sequence: Synthetic oligonucleotide
  Target: LAMA2; (-) strand; PAM type: NRG; PAM sequence: AAG
aggcatttgataaagataag

SEQ ID NO: 93976 - DNA, 20 bp, Artificial Sequence
  Description of Artificial Sequence: Synthetic oligonucleotide
  Target: LAMA2; (-) strand; PAM type: NRG; PAM sequence: AAG
gagaggcatttgataaagat

SEQ ID NO: 93977 - DNA, 20 bp, Artificial Sequence
  Description of Artificial Sequence: Synthetic oligonucleotide
  Target: LAMA2; (-) strand; PAM type: NRG; PAM sequence: AAG
ttcaagagaggcatttgata

SEQ ID NO: 93978 - DNA, 20 bp, Artificial Sequence
  Description of Artificial Sequence: Synthetic oligonucleotide
  Target: LAMA2; (-) strand; PAM type: NRG; PAM sequence: AGG
ccccaaaatcccttcaagag

SEQ ID NO: 93979 - DNA, 20 bp, Artificial Sequence
  Description of Artificial Sequence: Synthetic oligonucleotide
  Target: LAMA2; (-) strand; PAM type: NRG; PAM sequence: GAG
cccccaaaatcccttcaaga

SEQ ID NO: 93980 - DNA, 20 bp, Artificial Sequence
  Description of Artificial Sequence: Synthetic oligonucleotide
  Target: LAMA2; (-) strand; PAM type: NRG; PAM sequence: GAG
ttcccccaaaatcccttcaa

SEQ ID NO: 93981 - DNA, 20 bp, Artificial Sequence
  Description of Artificial Sequence: Synthetic oligonucleotide
  Target: LAMA2; (-) strand; PAM type: NRG; PAM sequence: AAG
aattcccccaaaatcccttc

SEQ ID NO: 93982 - DNA, 20 bp, Artificial Sequence
  Description of Artificial Sequence: Synthetic oligonucleotide
  Target: LAMA2; (-) strand; PAM type: NRG; PAM sequence: GAG
taaaatatgcaataaaattt

SEQ ID NO: 93983 - DNA, 20 bp, Artificial Sequence
  Description of Artificial Sequence: Synthetic oligonucleotide
  Target: LAMA2; (-) strand; PAM type: NRG; PAM sequence: CAG
tagaagaatattgccaacca

SEQ ID NO: 93984 - DNA, 20 bp, Artificial Sequence
  Description of Artificial Sequence: Synthetic oligonucleotide
  Target: LAMA2; (-) strand; PAM type: NRG; PAM sequence: AAG
gttgtataaatactgcttag

SEQ ID NO: 93985 - DNA, 20 bp, Artificial Sequence
  Description of Artificial Sequence: Synthetic oligonucleotide
  Target: LAMA2; (-) strand; PAM type: NRG; PAM sequence: TAG
tgagttgtataaatactgct

SEQ ID NO: 93986 - DNA, 20 bp, Artificial Sequence
  Description of Artificial Sequence: Synthetic oligonucleotide
  Target: LAMA2; (-) strand; PAM type: NRG; PAM sequence: GAG
aaaagattttatacacttat

SEQ ID NO: 93987 - DNA, 20 bp, Artificial Sequence
  Description of Artificial Sequence: Synthetic oligonucleotide
  Target: LAMA2; (-) strand; PAM type: NRG; PAM sequence: AAG
gaaattacttatattcacaa

SEQ ID NO: 93988 - DNA, 20 bp, Artificial Sequence
  Description of Artificial Sequence: Synthetic oligonucleotide
  Target: LAMA2; (-) strand; PAM type: NRG; PAM sequence: TAG
tacttaggtactataattca

SEQ ID NO: 93989 - DNA, 20 bp, Artificial Sequence
  Description of Artificial Sequence: Synthetic oligonucleotide
  Target: LAMA2; (-) strand; PAM type: NRG; PAM sequence: AGG
tagaaaatgtataggtactt

SEQ ID NO: 93990 - DNA, 20 bp, Artificial Sequence
  Description of Artificial Sequence: Synthetic oligonucleotide
  Target: LAMA2; (-) strand; PAM type: NRG; PAM sequence: TAG
ctagaaaatgtataggtact

SEQ ID NO: 93991 - DNA, 20 bp, Artificial Sequence
  Description of Artificial Sequence: Synthetic oligonucleotide
  Target: LAMA2; (-) strand; PAM type: NRG; PAM sequence: AGG
aagttttctagaaaatgtat

SEQ ID NO: 93992 - DNA, 20 bp, Artificial Sequence
  Description of Artificial Sequence: Synthetic oligonucleotide
  Target: LAMA2; (-) strand; PAM type: NRG; PAM sequence: TAG
taagttttctagaaaatgta

SEQ ID NO: 93993 - DNA, 20 bp, Artificial Sequence
  Description of Artificial Sequence: Synthetic oligonucleotide
  Target: LAMA2; (-) strand; PAM type: NRG; PAM sequence: TAG
attgatgattctaagttttc

SEQ ID NO: 93994 - DNA, 20 bp, Artificial Sequence
  Description of Artificial Sequence: Synthetic oligonucleotide
  Target: LAMA2; (-) strand; PAM type: NRG; PAM sequence: AAG
gcagatacattgatgattct

SEQ ID NO: 93995 - DNA, 20 bp, Artificial Sequence
  Description of Artificial Sequence: Synthetic oligonucleotide
  Target: LAMA2; (-) strand; PAM type: NRG; PAM sequence: CAG
gcagagccattaatttggtg

SEQ ID NO: 93996 - DNA, 20 bp, Artificial Sequence
  Description of Artificial Sequence: Synthetic oligonucleotide
  Target: LAMA2; (-) strand; PAM type: NRG; PAM sequence: TGG
ctggggcagagccattaatt

SEQ ID NO: 93997 - DNA, 20 bp, Artificial Sequence
  Description of Artificial Sequence: Synthetic oligonucleotide
  Target: LAMA2; (-) strand; PAM type: NRG; PAM sequence: GAG
caaatcccaattctggggca

SEQ ID NO: 93998 - DNA, 20 bp, Artificial Sequence
  Description of Artificial Sequence: Synthetic oligonucleotide
  Target: LAMA2; (-) strand; PAM type: NRG; PAM sequence: CAG
aacaaatcccaattctgggg

SEQ ID NO: 93999 - DNA, 20 bp, Artificial Sequence
  Description of Artificial Sequence: Synthetic oligonucleotide
  Target: LAMA2; (-) strand; PAM type: NRG; PAM sequence: GGG
tttaacaaatcccaattctg

SEQ ID NO: 94000 - DNA, 20 bp, Artificial Sequence
  Description of Artificial Sequence: Synthetic oligonucleotide
  Target: LAMA2; (-) strand; PAM type: NRG; PAM sequence: GGG
ctttaacaaatcccaattct

SEQ ID NO: 94001 - DNA, 20 bp, Artificial Sequence
  Description of Artificial Sequence: Synthetic oligonucleotide
  Target: LAMA2; (-) strand; PAM type: NRG; PAM sequence: TGG
actttaacaaatcccaattc

SEQ ID NO: 94002 - DNA, 20 bp, Artificial Sequence
  Description of Artificial Sequence: Synthetic oligonucleotide
  Target: LAMA2; (-) strand; PAM type: NRG; PAM sequence: GAG
aatccagtacattatattga

SEQ ID NO: 94003 - DNA, 20 bp, Artificial Sequence
  Description of Artificial Sequence: Synthetic oligonucleotide
  Target: LAMA2; (-) strand; PAM type: NRG; PAM sequence: GAG
taaatccagtacattatatt

SEQ ID NO: 94004 - DNA, 20 bp, Artificial Sequence
  Description of Artificial Sequence: Synthetic oligonucleotide
  Target: LAMA2; (-) strand; PAM type: NRG; PAM sequence: CAG
aaataaaaatggtttaaatc

SEQ ID NO: 94005 - DNA, 20 bp, Artificial Sequence
  Description of Artificial Sequence: Synthetic oligonucleotide
  Target: LAMA2; (-) strand; PAM type: NRG; PAM sequence: TGG
tctaccatttgaaataaaaa

SEQ ID NO: 94006 - DNA, 20 bp, Artificial Sequence
  Description of Artificial Sequence: Synthetic oligonucleotide
  Target: LAMA2; (-) strand; PAM type: NRG; PAM sequence: AGG
tgcagtcattatttagagaa

SEQ ID NO: 94007 - DNA, 20 bp, Artificial Sequence
  Description of Artificial Sequence: Synthetic oligonucleotide
  Target: LAMA2; (-) strand; PAM type: NRG; PAM sequence: AAG
atgcagtcattatttagaga

SEQ ID NO: 94008 - DNA, 20 bp, Artificial Sequence
  Description of Artificial Sequence: Synthetic oligonucleotide
  Target: LAMA2; (-) strand; PAM type: NRG; PAM sequence: GAG
agatatgcagtcattattta

SEQ ID NO: 94009 - DNA, 20 bp, Artificial Sequence
  Description of Artificial Sequence: Synthetic oligonucleotide
  Target: LAMA2; (-) strand; PAM type: NRG; PAM sequence: TAG
acagatatgcagtcattatt

SEQ ID NO: 94010 - DNA, 20 bp, Artificial Sequence
  Description of Artificial Sequence: Synthetic oligonucleotide
  Target: LAMA2; (-) strand; PAM type: NRG; PAM sequence: CAG
ctcatctactcacagatatg

SEQ ID NO: 94011 - DNA, 20 bp, Artificial Sequence
  Description of Artificial Sequence: Synthetic oligonucleotide
  Target: LAMA2; (-) strand; PAM type: NRG; PAM sequence: CAG
cttttatgctcatctactca

SEQ ID NO: 94012 - DNA, 20 bp, Artificial Sequence
  Description of Artificial Sequence: Synthetic oligonucleotide
  Target: LAMA2; (-) strand; PAM type: NRG; PAM sequence: TAG
ggagaatataatttcctcag

SEQ ID NO: 94013 - DNA, 20 bp, Artificial Sequence
  Description of Artificial Sequence: Synthetic oligonucleotide
  Target: LAMA2; (-) strand; PAM type: NRG; PAM sequence: CAG
gtgggagaatataatttcct

SEQ ID NO: 94014 - DNA, 20 bp, Artificial Sequence
  Description of Artificial Sequence: Synthetic oligonucleotide
  Target: LAMA2; (-) strand; PAM type: NRG; PAM sequence: GAG
ggggatcaaaaacaatgtgg

SEQ ID NO: 94015 - DNA, 20 bp, Artificial Sequence
  Description of Artificial Sequence: Synthetic oligonucleotide
  Target: LAMA2; (-) strand; PAM type: NRG; PAM sequence: GGG
aaggggatcaaaaacaatgt

SEQ ID NO: 94016 - DNA, 20 bp, Artificial Sequence
  Description of Artificial Sequence: Synthetic oligonucleotide
  Target: LAMA2; (-) strand; PAM type: NRG; PAM sequence: TGG
gaaggggatcaaaaacaatg

SEQ ID NO: 94017 - DNA, 20 bp, Artificial Sequence
  Description of Artificial Sequence: Synthetic oligonucleotide
  Target: LAMA2; (-) strand; PAM type: NRG; PAM sequence: GGG
agcaagtgtcaaaattgaag

SEQ ID NO: 94018 - DNA, 20 bp, Artificial Sequence
  Description of Artificial Sequence: Synthetic oligonucleotide
  Target: LAMA2; (-) strand; PAM type: NRG; PAM sequence: GGG
cagcaagtgtcaaaattgaa

SEQ ID NO: 94019 - DNA, 20 bp, Artificial Sequence
  Description of Artificial Sequence: Synthetic oligonucleotide
  Target: LAMA2; (-) strand; PAM type: NRG; PAM sequence: AGG
gcagcaagtgtcaaaattga

SEQ ID NO: 94020 - DNA, 20 bp, Artificial Sequence
  Description of Artificial Sequence: Synthetic oligonucleotide
  Target: LAMA2; (-) strand; PAM type: NRG; PAM sequence: AAG
tgcagcaagtgtcaaaattg

SEQ ID NO: 94021 - DNA, 20 bp, Artificial Sequence
  Description of Artificial Sequence: Synthetic oligonucleotide
  Target: LAMA2; (-) strand; PAM type: NRG; PAM sequence: AAG
aagataaagtcttttgcagc

SEQ ID NO: 94022 - DNA, 20 bp, Artificial Sequence
  Description of Artificial Sequence: Synthetic oligonucleotide
  Target: LAMA2; (-) strand; PAM type: NRG; PAM sequence: CAG
taccaagataaagtcttttg

SEQ ID NO: 94023 - DNA, 20 bp, Artificial Sequence
  Description of Artificial Sequence: Synthetic oligonucleotide
  Target: LAMA2; (-) strand; PAM type: NRG; PAM sequence: AAG
tttgccatcttaccaagata

SEQ ID NO: 94024 - DNA, 20 bp, Artificial Sequence
  Description of Artificial Sequence: Synthetic oligonucleotide
  Target: LAMA2; (-) strand; PAM type: NRG; PAM sequence: AAG
gttatctttgccatcttacc

SEQ ID NO: 94025 - DNA, 20 bp, Artificial Sequence
  Description of Artificial Sequence: Synthetic oligonucleotide
  Target: LAMA2; (-) strand; PAM type: NRG; PAM sequence: TAG
tctgaatcttatggtcaggc

SEQ ID NO: 94026 - DNA, 20 bp, Artificial Sequence
  Description of Artificial Sequence: Synthetic oligonucleotide
  Target: LAMA2; (-) strand; PAM type: NRG; PAM sequence: AGG
ggcatctgaatcttatggtc

SEQ ID NO: 94027 - DNA, 20 bp, Artificial Sequence
  Description of Artificial Sequence: Synthetic oligonucleotide
  Target: LAMA2; (-) strand; PAM type: NRG; PAM sequence: CAG
gggcatctgaatcttatggt

SEQ ID NO: 94028 - DNA, 20 bp, Artificial Sequence
  Description of Artificial Sequence: Synthetic oligonucleotide
  Target: LAMA2; (-) strand; PAM type: NRG; PAM sequence: TGG
aacagggcatctgaatctta

SEQ ID NO: 94029 - DNA, 20 bp, Artificial Sequence
  Description of Artificial Sequence: Synthetic oligonucleotide
  Target: LAMA2; (-) strand; PAM type: NRG; PAM sequence: GGG
gccaaaggagaaacagaaca

SEQ ID NO: 94030 - DNA, 20 bp, Artificial Sequence
  Description of Artificial Sequence: Synthetic oligonucleotide
  Target: LAMA2; (-) strand; PAM type: NRG; PAM sequence: AGG
tgccaaaggagaaacagaac

SEQ ID NO: 94031 - DNA, 20 bp, Artificial Sequence
  Description of Artificial Sequence: Synthetic oligonucleotide
  Target: LAMA2; (-) strand; PAM type: NRG; PAM sequence: CAG
ttgccaaaggagaaacagaa

SEQ ID NO: 94032 - DNA, 20 bp, Artificial Sequence
  Description of Artificial Sequence: Synthetic oligonucleotide
  Target: LAMA2; (-) strand; PAM type: NRG; PAM sequence: CAG
cacatttgccaaaggagaaa

SEQ ID NO: 94033 - DNA, 20 bp, Artificial Sequence
  Description of Artificial Sequence: Synthetic oligonucleotide
  Target: LAMA2; (-) strand; PAM type: NRG; PAM sequence: GAG
ctaagccacatttgccaaag

SEQ ID NO: 94034 - DNA, 20 bp, Artificial Sequence
  Description of Artificial Sequence: Synthetic oligonucleotide
  Target: LAMA2; (-) strand; PAM type: NRG; PAM sequence: AGG
tactaagccacatttgccaa

SEQ ID NO: 94035 - DNA, 20 bp, Artificial Sequence
  Description of Artificial Sequence: Synthetic oligonucleotide
  Target: LAMA2; (-) strand; PAM type: NRG; PAM sequence: AAG
atactaagccacatttgcca

SEQ ID NO: 94036 - DNA, 20 bp, Artificial Sequence
  Description of Artificial Sequence: Synthetic oligonucleotide
  Target: LAMA2; (-) strand; PAM type: NRG; PAM sequence: AAG
atttgctcacactttatact

SEQ ID NO: 94037 - DNA, 20 bp, Artificial Sequence
  Description of Artificial Sequence: Synthetic oligonucleotide
  Target: LAMA2; (-) strand; PAM type: NRG; PAM sequence: CAG
tgcagaaacgtccttatagg

SEQ ID NO: 94038 - DNA, 20 bp, Artificial Sequence
  Description of Artificial Sequence: Synthetic oligonucleotide
  Target: LAMA2; (-) strand; PAM type: NRG; PAM sequence: AGG
gtgtgcagaaacgtccttat

SEQ ID NO: 94039 - DNA, 20 bp, Artificial Sequence
  Description of Artificial Sequence: Synthetic oligonucleotide
  Target: LAMA2; (-) strand; PAM type: NRG; PAM sequence: TAG
ggtgtgcagaaacgtcctta

SEQ ID NO: 94040 - DNA, 20 bp, Artificial Sequence
  Description of Artificial Sequence: Synthetic oligonucleotide
  Target: LAMA2; (-) strand; PAM type: NRG; PAM sequence: CAG
aacttactgctacaggtgtg

SEQ ID NO: 94041 - DNA, 20 bp, Artificial Sequence
  Description of Artificial Sequence: Synthetic oligonucleotide
  Target: LAMA2; (-) strand; PAM type: NRG; PAM sequence: AGG
aaaatgcaacttactgctac

SEQ ID NO: 94042 - DNA, 20 bp, Artificial Sequence
  Description of Artificial Sequence: Synthetic oligonucleotide
  Target: LAMA2; (-) strand; PAM type: NRG; PAM sequence: CAG
taaaatgcaacttactgcta

SEQ ID NO: 94043 - DNA, 20 bp, Artificial Sequence
  Description of Artificial Sequence: Synthetic oligonucleotide
  Target: LAMA2; (-) strand; PAM type: NRG; PAM sequence: CAG
aagatttttaaaaacgatag

SEQ ID NO: 94044 - DNA, 20 bp, Artificial Sequence
  Description of Artificial Sequence: Synthetic oligonucleotide
  Target: LAMA2; (-) strand; PAM type: NRG; PAM sequence: TAG
aagaagatttttaaaaacga

SEQ ID NO: 94045 - DNA, 20 bp, Artificial Sequence
  Description of Artificial Sequence: Synthetic oligonucleotide
  Target: LAMA2; (-) strand; PAM type: NRG; PAM sequence: AAG
gtttatagggcatggcaaag

SEQ ID NO: 94046 - DNA, 20 bp, Artificial Sequence
  Description of Artificial Sequence: Synthetic oligonucleotide
  Target: LAMA2; (-) strand; PAM type: NRG; PAM sequence: AAG
tttgtttatagggcatggca

SEQ ID NO: 94047 - DNA, 20 bp, Artificial Sequence
  Description of Artificial Sequence: Synthetic oligonucleotide
  Target: LAMA2; (-) strand; PAM type: NRG; PAM sequence: TGG
aaaagtttgtttatagggca

SEQ ID NO: 94048 - DNA, 20 bp, Artificial Sequence
  Description of Artificial Sequence: Synthetic oligonucleotide
  Target: LAMA2; (-) strand; PAM type: NRG; PAM sequence: GGG
aaaacaaaagtttgtttata

SEQ ID NO: 94049 - DNA, 20 bp, Artificial Sequence
  Description of Artificial Sequence: Synthetic oligonucleotide
  Target: LAMA2; (-) strand; PAM type: NRG; PAM sequence: AGG
aaaaacaaaagtttgtttat

SEQ ID NO: 94050 - DNA, 20 bp, Artificial Sequence
  Description of Artificial Sequence: Synthetic oligonucleotide
  Target: LAMA2; (-) strand; PAM type: NRG; PAM sequence: TAG
gaaaaacaaaagtttgttta

SEQ ID NO: 94051 - DNA, 20 bp, Artificial Sequence
  Description of Artificial Sequence: Synthetic oligonucleotide
  Target: LAMA2; (-) strand; PAM type: NRG; PAM sequence: AAG
ttatattattggaaaaacaa

SEQ ID NO: 94052 - DNA, 20 bp, Artificial Sequence
  Description of Artificial Sequence: Synthetic oligonucleotide
  Target: LAMA2; (-) strand; PAM type: NRG; PAM sequence: TGG
tatataatatattatattat

SEQ ID NO: 94053 - DNA, 20 bp, Artificial Sequence
  Description of Artificial Sequence: Synthetic oligonucleotide
  Target: LAMA2; (-) strand; PAM type: NRG; PAM sequence: AGG
caactctattagcaaactcc

SEQ ID NO: 94054 - DNA, 20 bp, Artificial Sequence
  Description of Artificial Sequence: Synthetic oligonucleotide
  Target: LAMA2; (-) strand; PAM type: NRG; PAM sequence: CAG
ccaactctattagcaaactc

SEQ ID NO: 94055 - DNA, 20 bp, Artificial Sequence
  Description of Artificial Sequence: Synthetic oligonucleotide
  Target: LAMA2; (-) strand; PAM type: NRG; PAM sequence: TAG
actgtgcctgccaactctat

SEQ ID NO: 94056 - DNA, 20 bp, Artificial Sequence
  Description of Artificial Sequence: Synthetic oligonucleotide
  Target: LAMA2; (-) strand; PAM type: NRG; PAM sequence: AGG
tattataggaatatgccata

SEQ ID NO: 94057 - DNA, 20 bp, Artificial Sequence
  Description of Artificial Sequence: Synthetic oligonucleotide
  Target: LAMA2; (-) strand; PAM type: NRG; PAM sequence: AAG
atattataggaatatgccat

SEQ ID NO: 94058 - DNA, 20 bp, Artificial Sequence
  Description of Artificial Sequence: Synthetic oligonucleotide
  Target: LAMA2; (-) strand; PAM type: NRG; PAM sequence: AGG
aaagcatgcctgcatattat

SEQ ID NO: 94059 - DNA, 20 bp, Artificial Sequence
  Description of Artificial Sequence: Synthetic oligonucleotide
  Target: LAMA2; (-) strand; PAM type: NRG; PAM sequence: TAG
gaaagcatgcctgcatatta

SEQ ID NO: 94060 - DNA, 20 bp, Artificial Sequence
  Description of Artificial Sequence: Synthetic oligonucleotide
  Target: LAMA2; (-) strand; PAM type: NRG; PAM sequence: AAG
tactaaagggaagtctgaga

SEQ ID NO: 94061 - DNA, 20 bp, Artificial Sequence
  Description of Artificial Sequence: Synthetic oligonucleotide
  Target: LAMA2; (-) strand; PAM type: NRG; PAM sequence: GAG
gctttactaaagggaagtct

SEQ ID NO: 94062 - DNA, 20 bp, Artificial Sequence
  Description of Artificial Sequence: Synthetic oligonucleotide
  Target: LAMA2; (-) strand; PAM type: NRG; PAM sequence: AAG
ttgaaggctttactaaaggg

SEQ ID NO: 94063 - DNA, 20 bp, Artificial Sequence
  Description of Artificial Sequence: Synthetic oligonucleotide
  Target: LAMA2; (-) strand; PAM type: NRG; PAM sequence: GGG
tcattgaaggctttactaaa

SEQ ID NO: 94064 - DNA, 20 bp, Artificial Sequence
  Description of Artificial Sequence: Synthetic oligonucleotide
  Target: LAMA2; (-) strand; PAM type: NRG; PAM sequence: AGG
ttcattgaaggctttactaa

SEQ ID NO: 94065 - DNA, 20 bp, Artificial Sequence
  Description of Artificial Sequence: Synthetic oligonucleotide
  Target: LAMA2; (-) strand; PAM type: NRG; PAM sequence: AAG
tttcattgaaggctttacta

SEQ ID NO: 94066 - DNA, 20 bp, Artificial Sequence
  Description of Artificial Sequence: Synthetic oligonucleotide
  Target: LAMA2; (-) strand; PAM type: NRG; PAM sequence: AGG
cagaggcaaattttcattga

SEQ ID NO: 94067 - DNA, 20 bp, Artificial Sequence
  Description of Artificial Sequence: Synthetic oligonucleotide
  Target: LAMA2; (-) strand; PAM type: NRG; PAM sequence: AAG
tcagaggcaaattttcattg

SEQ ID NO: 94068 - DNA, 20 bp, Artificial Sequence
  Description of Artificial Sequence: Synthetic oligonucleotide
  Target: LAMA2; (-) strand; PAM type: NRG; PAM sequence: AGG
gtatttgcatatgaattcag

SEQ ID NO: 94069 - DNA, 20 bp, Artificial Sequence
  Description of Artificial Sequence: Synthetic oligonucleotide
  Target: LAMA2; (-) strand; PAM type: NRG; PAM sequence: GAG
tgtatttgcatatgaattca

SEQ ID NO: 94070 - DNA, 20 bp, Artificial Sequence
  Description of Artificial Sequence: Synthetic oligonucleotide
  Target: LAMA2; (-) strand; PAM type: NRG; PAM sequence: CAG
tatgtatttgcatatgaatt

SEQ ID NO: 94071 - DNA, 20 bp, Artificial Sequence
  Description of Artificial Sequence: Synthetic oligonucleotide
  Target: LAMA2; (-) strand; PAM type: NRG; PAM sequence: GGG
attaattggatgggagctgt

SEQ ID NO: 94072 - DNA, 20 bp, Artificial Sequence
  Description of Artificial Sequence: Synthetic oligonucleotide
  Target: LAMA2; (-) strand; PAM type: NRG; PAM sequence: TGG
tattaattggatgggagctg

SEQ ID NO: 94073 - DNA, 20 bp, Artificial Sequence
  Description of Artificial Sequence: Synthetic oligonucleotide
  Target: LAMA2; (-) strand; PAM type: NRG; PAM sequence: GAG
gattcttattaattggatgg

SEQ ID NO: 94074 - DNA, 20 bp, Artificial Sequence
  Description of Artificial Sequence: Synthetic oligonucleotide
  Target: LAMA2; (-) strand; PAM type: NRG; PAM sequence: GGG
aagattcttattaattggat

SEQ ID NO: 94075 - DNA, 20 bp, Artificial Sequence
  Description of Artificial Sequence: Synthetic oligonucleotide
  Target: LAMA2; (-) strand; PAM type: NRG; PAM sequence: TGG
gaagattcttattaattgga

SEQ ID NO: 94076 - DNA, 20 bp, Artificial Sequence
  Description of Artificial Sequence: Synthetic oligonucleotide
  Target: LAMA2; (-) strand; PAM type: NRG; PAM sequence: TGG
ctcagaagattcttattaat

SEQ ID NO: 94077 - DNA, 20 bp, Artificial Sequence
  Description of Artificial Sequence: Synthetic oligonucleotide
  Target: LAMA2; (-) strand; PAM type: NRG; PAM sequence: AAG
aactagaaactgtgactcag

SEQ ID NO: 94078 - DNA, 20 bp, Artificial Sequence
  Description of Artificial Sequence: Synthetic oligonucleotide
  Target: LAMA2; (-) strand; PAM type: NRG; PAM sequence: CAG
attaactagaaactgtgact

SEQ ID NO: 94079 - DNA, 20 bp, Artificial Sequence
  Description of Artificial Sequence: Synthetic oligonucleotide
  Target: LAMA2; (-) strand; PAM type: NRG; PAM sequence: TAG
agagttcagaatttattaac

SEQ ID NO: 94080 - DNA, 20 bp, Artificial Sequence
  Description of Artificial Sequence: Synthetic oligonucleotide
  Target: LAMA2; (-) strand; PAM type: NRG; PAM sequence: CAG
gaaattcagtaataagagtt

SEQ ID NO: 94081 - DNA, 20 bp, Artificial Sequence
  Description of Artificial Sequence: Synthetic oligonucleotide
  Target: LAMA2; (-) strand; PAM type: NRG; PAM sequence: GAG
gcaaggaaattcagtaataa

SEQ ID NO: 94082 - DNA, 20 bp, Artificial Sequence
  Description of Artificial Sequence: Synthetic oligonucleotide
  Target: LAMA2; (-) strand; PAM type: NRG; PAM sequence: AAG
tcgcaaggaaattcagtaat

SEQ ID NO: 94083 - DNA, 20 bp, Artificial Sequence
  Description of Artificial Sequence: Synthetic oligonucleotide
  Target: LAMA2; (-) strand; PAM type: NRG; PAM sequence: CAG
aacaggctcgcaaggaaatt

SEQ ID NO: 94084 - DNA, 20 bp, Artificial Sequence
  Description of Artificial Sequence: Synthetic oligonucleotide
  Target: LAMA2; (-) strand; PAM type: NRG; PAM sequence: AGG
tatgaggaaacaggctcgca

SEQ ID NO: 94085 - DNA, 20 bp, Artificial Sequence
  Description of Artificial Sequence: Synthetic oligonucleotide
  Target: LAMA2; (-) strand; PAM type: NRG; PAM sequence: AAG
ttatgaggaaacaggctcgc

SEQ ID NO: 94086 - DNA, 20 bp, Artificial Sequence
  Description of Artificial Sequence: Synthetic oligonucleotide
  Target: LAMA2; (-) strand; PAM type: NRG; PAM sequence: AGG
agaacttgttatgaggaaac

SEQ ID NO: 94087 - DNA, 20 bp, Artificial Sequence
  Description of Artificial Sequence: Synthetic oligonucleotide
  Target: LAMA2; (-) strand; PAM type: NRG; PAM sequence: CAG
cagaacttgttatgaggaaa

SEQ ID NO: 94088 - DNA, 20 bp, Artificial Sequence
  Description of Artificial Sequence: Synthetic oligonucleotide
  Target: LAMA2; (-) strand; PAM type: NRG; PAM sequence: AGG
tgcagccagaacttgttatg

SEQ ID NO: 94089 - DNA, 20 bp, Artificial Sequence
  Description of Artificial Sequence: Synthetic oligonucleotide
  Target: LAMA2; (-) strand; PAM type: NRG; PAM sequence: GAG
ttgcagccagaacttgttat

SEQ ID NO: 94090 - DNA, 20 bp, Artificial Sequence
  Description of Artificial Sequence: Synthetic oligonucleotide
  Target: LAMA2; (-) strand; PAM type: NRG; PAM sequence: CAG
ttttttgttgttgttgcagc

SEQ ID NO: 94091 - DNA, 20 bp, Artificial Sequence
  Description of Artificial Sequence: Synthetic oligonucleotide
  Target: LAMA2; (-) strand; PAM type: NRG; PAM sequence: CAG
cacattttttgttgttgttg

SEQ ID NO: 94092 - DNA, 20 bp, Artificial Sequence
  Description of Artificial Sequence: Synthetic oligonucleotide
  Target: LAMA2; (-) strand; PAM type: NRG; PAM sequence: AGG
attttctctacaaatatgta

SEQ ID NO: 94093 - DNA, 20 bp, Artificial Sequence
  Description of Artificial Sequence: Synthetic oligonucleotide
  Target: LAMA2; (-) strand; PAM type: NRG; PAM sequence: AAG
tattttctctacaaatatgt

SEQ ID NO: 94094 - DNA, 20 bp, Artificial Sequence
  Description of Artificial Sequence: Synthetic oligonucleotide
  Target: LAMA2; (-) strand; PAM type: NRG; PAM sequence: TGG
tcatatgtctctactccaat

SEQ ID NO: 94095 - DNA, 20 bp, Artificial Sequence
  Description of Artificial Sequence: Synthetic oligonucleotide
  Target: LAMA2; (-) strand; PAM type: NRG; PAM sequence: TAG
tccatgttggaaagcctttg

SEQ ID NO: 94096 - DNA, 20 bp, Artificial Sequence
  Description of Artificial Sequence: Synthetic oligonucleotide
  Target: LAMA2; (-) strand; PAM type: NRG; PAM sequence: AAG
gaatccaggtccatgttgga

SEQ ID NO: 94097 - DNA, 20 bp, Artificial Sequence
  Description of Artificial Sequence: Synthetic oligonucleotide
  Target: LAMA2; (-) strand; PAM type: NRG; PAM sequence: TGG
ggaggaatccaggtccatgt

SEQ ID NO: 94098 - DNA, 20 bp, Artificial Sequence
  Description of Artificial Sequence: Synthetic oligonucleotide
  Target: LAMA2; (-) strand; PAM type: NRG; PAM sequence: AGG
ctggcactctggaggaatcc

SEQ ID NO: 94099 - DNA, 20 bp, Artificial Sequence
  Description of Artificial Sequence: Synthetic oligonucleotide
  Target: LAMA2; (-) strand; PAM type: NRG; PAM sequence: CAG
gctggcactctggaggaatc

SEQ ID NO: 94100 - DNA, 20 bp, Artificial Sequence
  Description of Artificial Sequence: Synthetic oligonucleotide
  Target: LAMA2; (-) strand; PAM type: NRG; PAM sequence: AGG
atctgctgctggcactctgg

SEQ ID NO: 94101 - DNA, 20 bp, Artificial Sequence
  Description of Artificial Sequence: Synthetic oligonucleotide
  Target: LAMA2; (-) strand; PAM type: NRG; PAM sequence: GAG
aatctgctgctggcactctg

SEQ ID NO: 94102 - DNA, 20 bp, Artificial Sequence
  Description of Artificial Sequence: Synthetic oligonucleotide
  Target: LAMA2; (-) strand; PAM type: NRG; PAM sequence: TGG
agaatctgctgctggcactc

SEQ ID NO: 94103 - DNA, 20 bp, Artificial Sequence
  Description of Artificial Sequence: Synthetic oligonucleotide
  Target: LAMA2; (-) strand; PAM type: NRG; PAM sequence: TGG
gcataataagaatctgctgc

SEQ ID NO: 94104 - DNA, 20 bp, Artificial Sequence
  Description of Artificial Sequence: Synthetic oligonucleotide
  Target: LAMA2; (-) strand; PAM type: NRG; PAM sequence: AAG
aaatgagaccaaagcataat

SEQ ID NO: 94105 - DNA, 20 bp, Artificial Sequence
  Description of Artificial Sequence: Synthetic oligonucleotide
  Target: LAMA2; (-) strand; PAM type: NRG; PAM sequence: AAG
tggcactgaaaatgagacca

SEQ ID NO: 94106 - DNA, 20 bp, Artificial Sequence
  Description of Artificial Sequence: Synthetic oligonucleotide
  Target: LAMA2; (-) strand; PAM type: NRG; PAM sequence: GAG
ttgtcactggcactgaaaat

SEQ ID NO: 94107 - DNA, 20 bp, Artificial Sequence
  Description of Artificial Sequence: Synthetic oligonucleotide
  Target: LAMA2; (-) strand; PAM type: NRG; PAM sequence: TGG
aaaatatataatcttgtcac

SEQ ID NO: 94108 - DNA, 20 bp, Artificial Sequence
  Description of Artificial Sequence: Synthetic oligonucleotide
  Target: LAMA2; (-) strand; PAM type: NRG; PAM sequence: CAG
gcccactagtaattagattt

SEQ ID NO: 94109 - DNA, 20 bp, Artificial Sequence
  Description of Artificial Sequence: Synthetic oligonucleotide
  Target: LAMA2; (-) strand; PAM type: NRG; PAM sequence: TAG
cctgccagcccactagtaat

SEQ ID NO: 94110 - DNA, 20 bp, Artificial Sequence
  Description of Artificial Sequence: Synthetic oligonucleotide
  Target: LAMA2; (-) strand; PAM type: NRG; PAM sequence: TAG
atgatatcctgccagcccac

SEQ ID NO: 94111 - DNA, 20 bp, Artificial Sequence
  Description of Artificial Sequence: Synthetic oligonucleotide
  Target: LAMA2; (-) strand; PAM type: NRG; PAM sequence: CAG
gatacaagatgatatcctgc

SEQ ID NO: 94112 - DNA, 20 bp, Artificial Sequence
  Description of Artificial Sequence: Synthetic oligonucleotide
  Target: LAMA2; (-) strand; PAM type: NRG; PAM sequence: AAG
tacaactgcagtgtagatac

SEQ ID NO: 94113 - DNA, 20 bp, Artificial Sequence
  Description of Artificial Sequence: Synthetic oligonucleotide
  Target: LAMA2; (-) strand; PAM type: NRG; PAM sequence: TAG
gtttttctacaactgcagtg

SEQ ID NO: 94114 - DNA, 20 bp, Artificial Sequence
  Description of Artificial Sequence: Synthetic oligonucleotide
  Target: LAMA2; (-) strand; PAM type: NRG; PAM sequence: CAG
aaaatgtttttctacaactg

SEQ ID NO: 94115 - DNA, 20 bp, Artificial Sequence
  Description of Artificial Sequence: Synthetic oligonucleotide
  Target: LAMA2; (-) strand; PAM type: NRG; PAM sequence: AAG
ggatgatggattttcctttt

SEQ ID NO: 94116 - DNA, 20 bp, Artificial Sequence
  Description of Artificial Sequence: Synthetic oligonucleotide
  Target: LAMA2; (-) strand; PAM type: NRG; PAM sequence: TGG
ctccccttctcccaggatga

SEQ ID NO: 94117 - DNA, 20 bp, Artificial Sequence
  Description of Artificial Sequence: Synthetic oligonucleotide
  Target: LAMA2; (-) strand; PAM type: NRG; PAM sequence: AGG
tttcattctccccttctccc

SEQ ID NO: 94118 - DNA, 20 bp, Artificial Sequence
  Description of Artificial Sequence: Synthetic oligonucleotide
  Target: LAMA2; (-) strand; PAM type: NRG; PAM sequence: CAG
ttttcattctccccttctcc

SEQ ID NO: 94119 - DNA, 20 bp, Artificial Sequence
  Description of Artificial Sequence: Synthetic oligonucleotide
  Target: LAMA2; (-) strand; PAM type: NRG; PAM sequence: GGG
ctttggggggacctcagttg

SEQ ID NO: 94120 - DNA, 20 bp, Artificial Sequence
  Description of Artificial Sequence: Synthetic oligonucleotide
  Target: LAMA2; (-) strand; PAM type: NRG; PAM sequence: GGG
cctttggggggacctcagtt

SEQ ID NO: 94121 - DNA, 20 bp, Artificial Sequence
  Description of Artificial Sequence: Synthetic oligonucleotide
  Target: LAMA2; (-) strand; PAM type: NRG; PAM sequence: TGG
gcctttggggggacctcagt

SEQ ID NO: 94122 - DNA, 20 bp, Artificial Sequence
  Description of Artificial Sequence: Synthetic oligonucleotide
  Target: LAMA2; (-) strand; PAM type: NRG; PAM sequence: CAG
gtgagcctttggggggacct

SEQ ID NO: 94123 - DNA, 20 bp, Artificial Sequence
  Description of Artificial Sequence: Synthetic oligonucleotide
  Target: LAMA2; (-) strand; PAM type: NRG; PAM sequence: GGG
ttcatcagtgagcctttggg

SEQ ID NO: 94124 - DNA, 20 bp, Artificial Sequence
  Description of Artificial Sequence: Synthetic oligonucleotide
  Target: LAMA2; (-) strand; PAM type: NRG; PAM sequence: GGG
tttcatcagtgagcctttgg

SEQ ID NO: 94125 - DNA, 20 bp, Artificial Sequence
  Description of Artificial Sequence: Synthetic oligonucleotide
  Target: LAMA2; (-) strand; PAM type: NRG; PAM sequence: GGG
atttcatcagtgagcctttg

SEQ ID NO: 94126 - DNA, 20 bp, Artificial Sequence
  Description of Artificial Sequence: Synthetic oligonucleotide
  Target: LAMA2; (-) strand; PAM type: NRG; PAM sequence: GGG
aatttcatcagtgagccttt

SEQ ID NO: 94127 - DNA, 20 bp, Artificial Sequence
  Description of Artificial Sequence: Synthetic oligonucleotide
  Target: LAMA2; (-) strand; PAM type: NRG; PAM sequence: TGG
aaatttcatcagtgagcctt

SEQ ID NO: 94128 - DNA, 20 bp, Artificial Sequence
  Description of Artificial Sequence: Synthetic oligonucleotide
  Target: LAMA2; (-) strand; PAM type: NRG; PAM sequence: GAG
aggcaagaaatttcatcagt

SEQ ID NO: 94129 - DNA, 20 bp, Artificial Sequence
  Description of Artificial Sequence: Synthetic oligonucleotide
  Target: LAMA2; (-) strand; PAM type: NRG; PAM sequence: CAG
cctaaggcaagaaatttcat

SEQ ID NO: 94130 - DNA, 20 bp, Artificial Sequence
  Description of Artificial Sequence: Synthetic oligonucleotide
  Target: LAMA2; (-) strand; PAM type: NRG; PAM sequence: AAG
gccttctgcacacctaaggc

SEQ ID NO: 94131 - DNA, 20 bp, Artificial Sequence
  Description of Artificial Sequence: Synthetic oligonucleotide
  Target: LAMA2; (-) strand; PAM type: NRG; PAM sequence: AGG
aatagccttctgcacaccta

SEQ ID NO: 94132 - DNA, 20 bp, Artificial Sequence
  Description of Artificial Sequence: Synthetic oligonucleotide
  Target: LAMA2; (-) strand; PAM type: NRG; PAM sequence: AAG
aaatagccttctgcacacct

SEQ ID NO: 94133 - DNA, 20 bp, Artificial Sequence
  Description of Artificial Sequence: Synthetic oligonucleotide
  Target: LAMA2; (-) strand; PAM type: NRG; PAM sequence: TAG
gtacagagggttgtccaaaa

SEQ ID NO: 94134 - DNA, 20 bp, Artificial Sequence
  Description of Artificial Sequence: Synthetic oligonucleotide
  Target: LAMA2; (-) strand; PAM type: NRG; PAM sequence: GGG
catgatcctccaggtacaga

SEQ ID NO: 94135 - DNA, 20 bp, Artificial Sequence
  Description of Artificial Sequence: Synthetic oligonucleotide
  Target: LAMA2; (-) strand; PAM type: NRG; PAM sequence: AGG
acatgatcctccaggtacag

SEQ ID NO: 94136 - DNA, 20 bp, Artificial Sequence
  Description of Artificial Sequence: Synthetic oligonucleotide
  Target: LAMA2; (-) strand; PAM type: NRG; PAM sequence: GAG
gacatgatcctccaggtaca

SEQ ID NO: 94137 - DNA, 20 bp, Artificial Sequence
  Description of Artificial Sequence: Synthetic oligonucleotide
  Target: LAMA2; (-) strand; PAM type: NRG; PAM sequence: CAG
ctgacatgatcctccaggta

SEQ ID NO: 94138 - DNA, 20 bp, Artificial Sequence
  Description of Artificial Sequence: Synthetic oligonucleotide
  Target: LAMA2; (-) strand; PAM type: NRG; PAM sequence: AGG
catggctgacatgatcctcc

SEQ ID NO: 94139 - DNA, 20 bp, Artificial Sequence
  Description of Artificial Sequence: Synthetic oligonucleotide
  Target: LAMA2; (-) strand; PAM type: NRG; PAM sequence: CAG
gcatggctgacatgatcctc

SEQ ID NO: 94140 - DNA, 20 bp, Artificial Sequence
  Description of Artificial Sequence: Synthetic oligonucleotide
  Target: LAMA2; (-) strand; PAM type: NRG; PAM sequence: TGG
aggttgtcattgcattggca

SEQ ID NO: 94141 - DNA, 20 bp, Artificial Sequence
  Description of Artificial Sequence: Synthetic oligonucleotide
  Target: LAMA2; (-) strand; PAM type: NRG; PAM sequence: TGG
agtcaaggttgtcattgcat

SEQ ID NO: 94142 - DNA, 20 bp, Artificial Sequence
  Description of Artificial Sequence: Synthetic oligonucleotide
  Target: LAMA2; (-) strand; PAM type: NRG; PAM sequence: AGG
tgccagggatggagaagtca

SEQ ID NO: 94143 - DNA, 20 bp, Artificial Sequence
  Description of Artificial Sequence: Synthetic oligonucleotide
  Target: LAMA2; (-) strand; PAM type: NRG; PAM sequence: AAG
ctgccagggatggagaagtc

SEQ ID NO: 94144 - DNA, 20 bp, Artificial Sequence
  Description of Artificial Sequence: Synthetic oligonucleotide
  Target: LAMA2; (-) strand; PAM type: NRG; PAM sequence: AAG
cacagctgccagggatggag

SEQ ID NO: 94145 - DNA, 20 bp, Artificial Sequence
  Description of Artificial Sequence: Synthetic oligonucleotide
  Target: LAMA2; (-) strand; PAM type: NRG; PAM sequence: GAG
tgtcacagctgccagggatg

SEQ ID NO: 94146 - DNA, 20 bp, Artificial Sequence
  Description of Artificial Sequence: Synthetic oligonucleotide
  Target: LAMA2; (-) strand; PAM type: NRG; PAM sequence: TGG
gctgtcacagctgccaggga

SEQ ID NO: 94147 - DNA, 20 bp, Artificial Sequence
  Description of Artificial Sequence: Synthetic oligonucleotide
  Target: LAMA2; (-) strand; PAM type: NRG; PAM sequence: GGG
acaagctgtcacagctgcca

SEQ ID NO: 94148 - DNA, 20 bp, Artificial Sequence
  Description of Artificial Sequence: Synthetic oligonucleotide
  Target: LAMA2; (-) strand; PAM type: NRG; PAM sequence: AGG
gacaagctgtcacagctgcc

SEQ ID NO: 94149 - DNA, 20 bp, Artificial Sequence
  Description of Artificial Sequence: Synthetic oligonucleotide
  Target: LAMA2; (-) strand; PAM type: NRG; PAM sequence: CAG
agacaagctgtcacagctgc

SEQ ID NO: 94150 - DNA, 20 bp, Artificial Sequence
  Description of Artificial Sequence: Synthetic oligonucleotide
  Target: LAMA2; (-) strand; PAM type: NRG; PAM sequence: CAG
aggagccagacaagctgtca

SEQ ID NO: 94151 - DNA, 20 bp, Artificial Sequence
  Description of Artificial Sequence: Synthetic oligonucleotide
  Target: LAMA2; (-) strand; PAM type: NRG; PAM sequence: AAG
atatcagacaggagccagac

SEQ ID NO: 94152 - DNA, 20 bp, Artificial Sequence
  Description of Artificial Sequence: Synthetic oligonucleotide
  Target: LAMA2; (-) strand; PAM type: NRG; PAM sequence: CAG
tttacatatcagacaggagc

SEQ ID NO: 94153 - DNA, 20 bp, Artificial Sequence
  Description of Artificial Sequence: Synthetic oligonucleotide
  Target: LAMA2; (-) strand; PAM type: NRG; PAM sequence: GAG
ctggtttacatatcagacag

SEQ ID NO: 94154 - DNA, 20 bp, Artificial Sequence
  Description of Artificial Sequence: Synthetic oligonucleotide
  Target: LAMA2; (-) strand; PAM type: NRG; PAM sequence: AGG
acctggtttacatatcagac

SEQ ID NO: 94155 - DNA, 20 bp, Artificial Sequence
  Description of Artificial Sequence: Synthetic oligonucleotide
  Target: LAMA2; (-) strand; PAM type: NRG; PAM sequence: CAG
tacctggtttacatatcaga

SEQ ID NO: 94156 - DNA, 20 bp, Artificial Sequence
  Description of Artificial Sequence: Synthetic oligonucleotide
  Target: LAMA2; (-) strand; PAM type: NRG; PAM sequence: CAG
gttgtacctggtttacatat

SEQ ID NO: 94157 - DNA, 20 bp, Artificial Sequence
  Description of Artificial Sequence: Synthetic oligonucleotide
  Target: LAMA2; (-) strand; PAM type: NRG; PAM sequence: TGG
cagtaccggcctgttgtacc

SEQ ID NO: 94158 - DNA, 20 bp, Artificial Sequence
  Description of Artificial Sequence: Synthetic oligonucleotide
  Target: LAMA2; (-) strand; PAM type: NRG; PAM sequence: CGG
cagcacagagctcacagtac

SEQ ID NO: 94159 - DNA, 20 bp, Artificial Sequence
  Description of Artificial Sequence: Synthetic oligonucleotide
  Target: LAMA2; (-) strand; PAM type: NRG; PAM sequence: CAG
atccatcagcacagagctca

SEQ ID NO: 94160 - DNA, 20 bp, Artificial Sequence
  Description of Artificial Sequence: Synthetic oligonucleotide
  Target: LAMA2; (-) strand; PAM type: NRG; PAM sequence: GAG
ccaaaatatccatcagcaca

SEQ ID NO: 94161 - DNA, 20 bp, Artificial Sequence
  Description of Artificial Sequence: Synthetic oligonucleotide
  Target: LAMA2; (-) strand; PAM type: NRG; PAM sequence: CAG
ctccaaaatatccatcagca

SEQ ID NO: 94162 - DNA, 20 bp, Artificial Sequence
  Description of Artificial Sequence: Synthetic oligonucleotide
  Target: LAMA2; (-) strand; PAM type: NRG; PAM sequence: CAG
tgcatctccaaaatatccat

SEQ ID NO: 94163 - DNA, 20 bp, Artificial Sequence
  Description of Artificial Sequence: Synthetic oligonucleotide
  Target: LAMA2; (-) strand; PAM type: NRG; PAM sequence: CAG
tagttcaggacttacgctga

SEQ ID NO: 94164 - DNA, 20 bp, Artificial Sequence
  Description of Artificial Sequence: Synthetic oligonucleotide
  Target: LAMA2; (-) strand; PAM type: NRG; PAM sequence: AGG
gtcaggggcatcaatagttc

SEQ ID NO: 94165 - DNA, 20 bp, Artificial Sequence
  Description of Artificial Sequence: Synthetic oligonucleotide
  Target: LAMA2; (-) strand; PAM type: NRG; PAM sequence: CAG
tgtcaggggcatcaatagtt

SEQ ID NO: 94166 - DNA, 20 bp, Artificial Sequence
  Description of Artificial Sequence: Synthetic oligonucleotide
  Target: LAMA2; (-) strand; PAM type: NRG; PAM sequence: TAG
aattctgtcaggggcatcaa

SEQ ID NO: 94167 - DNA, 20 bp, Artificial Sequence
  Description of Artificial Sequence: Synthetic oligonucleotide
  Target: LAMA2; (-) strand; PAM type: NRG; PAM sequence: GGG
caatacatcaattctgtcag

SEQ ID NO: 94168 - DNA, 20 bp, Artificial Sequence
  Description of Artificial Sequence: Synthetic oligonucleotide
  Target: LAMA2; (-) strand; PAM type: NRG; PAM sequence: GGG
acaatacatcaattctgtca

SEQ ID NO: 94169 - DNA, 20 bp, Artificial Sequence
  Description of Artificial Sequence: Synthetic oligonucleotide
  Target: LAMA2; (-) strand; PAM type: NRG; PAM sequence: AGG
tacaatacatcaattctgtc

SEQ ID NO: 94170 - DNA, 20 bp, Artificial Sequence
  Description of Artificial Sequence: Synthetic oligonucleotide
  Target: LAMA2; (-) strand; PAM type: NRG; PAM sequence: CAG
gtacaatacatcaattctgt

SEQ ID NO: 94171 - DNA, 20 bp, Artificial Sequence
  Description of Artificial Sequence: Synthetic oligonucleotide
  Target: LAMA2; (-) strand; PAM type: NRG; PAM sequence: AGG
agaactcatcagctactttg

SEQ ID NO: 94172 - DNA, 20 bp, Artificial Sequence
  Description of Artificial Sequence: Synthetic oligonucleotide
  Target: LAMA2; (-) strand; PAM type: NRG; PAM sequence: GAG
aagaactcatcagctacttt

SEQ ID NO: 94173 - DNA, 20 bp, Artificial Sequence
  Description of Artificial Sequence: Synthetic oligonucleotide
  Target: LAMA2; (-) strand; PAM type: NRG; PAM sequence: CAG
atccacactcaagaactcat

SEQ ID NO: 94174 - DNA, 20 bp, Artificial Sequence
  Description of Artificial Sequence: Synthetic oligonucleotide
  Target: LAMA2; (-) strand; PAM type: NRG; PAM sequence: AAG
ctactcttcaatccacactc

SEQ ID NO: 94175 - DNA, 20 bp, Artificial Sequence
  Description of Artificial Sequence: Synthetic oligonucleotide
  Target: LAMA2; (-) strand; PAM type: NRG; PAM sequence: CAG
aggaaatgttctggaatatg

SEQ ID NO: 94176 - DNA, 20 bp, Artificial Sequence
  Description of Artificial Sequence: Synthetic oligonucleotide
  Target: LAMA2; (-) strand; PAM type: NRG; PAM sequence: TGG
gttagtacaaggaaatgttc

SEQ ID NO: 94177 - DNA, 20 bp, Artificial Sequence
  Description of Artificial Sequence: Synthetic oligonucleotide
  Target: LAMA2; (-) strand; PAM type: NRG; PAM sequence: AGG
ttactctattagttagtaca

SEQ ID NO: 94178 - DNA, 20 bp, Artificial Sequence
  Description of Artificial Sequence: Synthetic oligonucleotide
  Target: LAMA2; (-) strand; PAM type: NRG; PAM sequence: AAG
tttactctattagttagtac

SEQ ID NO: 94179 - DNA, 20 bp, Artificial Sequence
  Description of Artificial Sequence: Synthetic oligonucleotide
  Target: LAMA2; (-) strand; PAM type: NRG; PAM sequence: TAG
aaggtatttactctattagt

SEQ ID NO: 94180 - DNA, 20 bp, Artificial Sequence
  Description of Artificial Sequence: Synthetic oligonucleotide
  Target: LAMA2; (-) strand; PAM type: NRG; PAM sequence: TAG
tttaaaggtatttactctat

SEQ ID NO: 94181 - DNA, 20 bp, Artificial Sequence
  Description of Artificial Sequence: Synthetic oligonucleotide
  Target: LAMA2; (-) strand; PAM type: NRG; PAM sequence: AGG
caataccacagcaattttaa

SEQ ID NO: 94182 - DNA, 20 bp, Artificial Sequence
  Description of Artificial Sequence: Synthetic oligonucleotide
  Target: LAMA2; (-) strand; PAM type: NRG; PAM sequence: AAG
tcaataccacagcaatttta

SEQ ID NO: 94183 - DNA, 20 bp, Artificial Sequence
  Description of Artificial Sequence: Synthetic oligonucleotide
  Target: LAMA2; (-) strand; PAM type: NRG; PAM sequence: CAG
acagtgatgcttcaatacca

SEQ ID NO: 94184 - DNA, 20 bp, Artificial Sequence
  Description of Artificial Sequence: Synthetic oligonucleotide
  Target: LAMA2; (-) strand; PAM type: NRG; PAM sequence: CAG
catgtttatcatttggaaaa

SEQ ID NO: 94185 - DNA, 20 bp, Artificial Sequence
  Description of Artificial Sequence: Synthetic oligonucleotide
  Target: LAMA2; (-) strand; PAM type: NRG; PAM sequence: TGG
ataaaaacatgtttatcatt

SEQ ID NO: 94186 - DNA, 20 bp, Artificial Sequence
  Description of Artificial Sequence: Synthetic oligonucleotide
  Target: LAMA2; (-) strand; PAM type: NRG; PAM sequence: AAG
ttctttcctgctgtggacat

SEQ ID NO: 94187 - DNA, 20 bp, Artificial Sequence
  Description of Artificial Sequence: Synthetic oligonucleotide
  Target: LAMA2; (-) strand; PAM type: NRG; PAM sequence: TGG
caaattcttctttcctgctg

SEQ ID NO: 94188 - DNA, 20 bp, Artificial Sequence
  Description of Artificial Sequence: Synthetic oligonucleotide
  Target: LAMA2; (-) strand; PAM type: NRG; PAM sequence: TGG
gagataaaaaaatggataca

SEQ ID NO: 94189 - DNA, 20 bp, Artificial Sequence
  Description of Artificial Sequence: Synthetic oligonucleotide
  Target: LAMA2; (-) strand; PAM type: NRG; PAM sequence: TGG
ttagaattgagataaaaaaa

SEQ ID NO: 94190 - DNA, 20 bp, Artificial Sequence
  Description of Artificial Sequence: Synthetic oligonucleotide
  Target: LAMA2; (-) strand; PAM type: NRG; PAM sequence: GAG
taaagcaagtgattagaatt

SEQ ID NO: 94191 - DNA, 20 bp, Artificial Sequence
  Description of Artificial Sequence: Synthetic oligonucleotide
  Target: LAMA2; (-) strand; PAM type: NRG; PAM sequence: TAG
aattatttaaagcaagtgat

SEQ ID NO: 94192 - DNA, 20 bp, Artificial Sequence
  Description of Artificial Sequence: Synthetic oligonucleotide
  Target: LAMA2; (-) strand; PAM type: NRG; PAM sequence: AAG
cagaaaaaattatttaaagc

SEQ ID NO: 94193 - DNA, 20 bp, Artificial Sequence
  Description of Artificial Sequence: Synthetic oligonucleotide
  Target: LAMA2; (-) strand; PAM type: NRG; PAM sequence: AAG
tgggcagaaaaaattattta

SEQ ID NO: 94194 - DNA, 20 bp, Artificial Sequence
  Description of Artificial Sequence: Synthetic oligonucleotide
  Target: LAMA2; (-) strand; PAM type: NRG; PAM sequence: CAG
tactactgaaatatcatggg

SEQ ID NO: 94195 - DNA, 20 bp, Artificial Sequence
  Description of Artificial Sequence: Synthetic oligonucleotide
  Target: LAMA2; (-) strand; PAM type: NRG; PAM sequence: GGG
ggctactactgaaatatcat

SEQ ID NO: 94196 - DNA, 20 bp, Artificial Sequence
  Description of Artificial Sequence: Synthetic oligonucleotide
  Target: LAMA2; (-) strand; PAM type: NRG; PAM sequence: TGG
tggctactactgaaatatca

SEQ ID NO: 94197 - DNA, 20 bp, Artificial Sequence
  Description of Artificial Sequence: Synthetic oligonucleotide
  Target: LAMA2; (-) strand; PAM type: NRG; PAM sequence: TGG
aactgattaacaccttctga

SEQ ID NO: 94198 - DNA, 20 bp, Artificial Sequence
  Description of Artificial Sequence: Synthetic oligonucleotide
  Target: LAMA2; (-) strand; PAM type: NRG; PAM sequence: AAG
actgtaaagttaacatatga

SEQ ID NO: 94199 - DNA, 20 bp, Artificial Sequence
  Description of Artificial Sequence: Synthetic oligonucleotide
  Target: LAMA2; (-) strand; PAM type: NRG; PAM sequence: AAG
ttacaaaatacgacactgta

SEQ ID NO: 94200 - DNA, 20 bp, Artificial Sequence
  Description of Artificial Sequence: Synthetic oligonucleotide
  Target: LAMA2; (-) strand; PAM type: NRG; PAM sequence: CAG
cctgtgtgcgaaaatattgg

SEQ ID NO: 94201 - DNA, 20 bp, Artificial Sequence
  Description of Artificial Sequence: Synthetic oligonucleotide
  Target: LAMA2; (-) strand; PAM type: NRG; PAM sequence: TGG
atgcctgtgtgcgaaaatat

SEQ ID NO: 94202 - DNA, 20 bp, Artificial Sequence
  Description of Artificial Sequence: Synthetic oligonucleotide
  Target: LAMA2; (-) strand; PAM type: NRG; PAM sequence: AGG
actattatgaaactaaaatg

SEQ ID NO: 94203 - DNA, 20 bp, Artificial Sequence
  Description of Artificial Sequence: Synthetic oligonucleotide
  Target: LAMA2; (-) strand; PAM type: NRG; PAM sequence: GAG
gactattatgaaactaaaat

SEQ ID NO: 94204 - DNA, 20 bp, Artificial Sequence
  Description of Artificial Sequence: Synthetic oligonucleotide
  Target: LAMA2; (-) strand; PAM type: NRG; PAM sequence: TAG
ctgaaagagcattctagaaa

SEQ ID NO: 94205 - DNA, 20 bp, Artificial Sequence
  Description of Artificial Sequence: Synthetic oligonucleotide
  Target: LAMA2; (-) strand; PAM type: NRG; PAM sequence: TAG
aaaacactgaaagagcattc

SEQ ID NO: 94206 - DNA, 20 bp, Artificial Sequence
  Description of Artificial Sequence: Synthetic oligonucleotide
  Target: LAMA2; (-) strand; PAM type: NRG; PAM sequence: GAG
gtggaaggaaaacactgaaa

SEQ ID NO: 94207 - DNA, 20 bp, Artificial Sequence
  Description of Artificial Sequence: Synthetic oligonucleotide
  Target: LAMA2; (-) strand; PAM type: NRG; PAM sequence: AAG
ttgtggaaggaaaacactga

SEQ ID NO: 94208 - DNA, 20 bp, Artificial Sequence
  Description of Artificial Sequence: Synthetic oligonucleotide
  Target: LAMA2; (-) strand; PAM type: NRG; PAM sequence: AGG
agagtagctaattttgtgga

SEQ ID NO: 94209 - DNA, 20 bp, Artificial Sequence
  Description of Artificial Sequence: Synthetic oligonucleotide
  Target: LAMA2; (-) strand; PAM type: NRG; PAM sequence: AAG
tagagtagctaattttgtgg

SEQ ID NO: 94210 - DNA, 20 bp, Artificial Sequence
  Description of Artificial Sequence: Synthetic oligonucleotide
  Target: LAMA2; (-) strand; PAM type: NRG; PAM sequence: TGG
ccctagagtagctaattttg

SEQ ID NO: 94211 - DNA, 20 bp, Artificial Sequence
  Description of Artificial Sequence: Synthetic oligonucleotide
  Target: LAMA2; (-) strand; PAM type: NRG; PAM sequence: TAG
atatggatgaagccctagag

SEQ ID NO: 94212 - DNA, 20 bp, Artificial Sequence
  Description of Artificial Sequence: Synthetic oligonucleotide
  Target: LAMA2; (-) strand; PAM type: NRG; PAM sequence: GAG
ctaatatggatgaagcccta

SEQ ID NO: 94213 - DNA, 20 bp, Artificial Sequence
  Description of Artificial Sequence: Synthetic oligonucleotide
  Target: LAMA2; (-) strand; PAM type: NRG; PAM sequence: TAG
tactaatatggatgaagccc

SEQ ID NO: 94214 - DNA, 20 bp, Artificial Sequence
  Description of Artificial Sequence: Synthetic oligonucleotide
  Target: LAMA2; (-) strand; PAM type: NRG; PAM sequence: AAG
gtattatactaatatggatg

SEQ ID NO: 94215 - DNA, 20 bp, Artificial Sequence
  Description of Artificial Sequence: Synthetic oligonucleotide
  Target: LAMA2; (-) strand; PAM type: NRG; PAM sequence: TGG
agaaatgtattatactaata

SEQ ID NO: 94216 - DNA, 20 bp, Artificial Sequence
  Description of Artificial Sequence: Synthetic oligonucleotide
  Target: LAMA2; (-) strand; PAM type: NRG; PAM sequence: GAG
agcaaaaaaggtaaagaggg

SEQ ID NO: 94217 - DNA, 20 bp, Artificial Sequence
  Description of Artificial Sequence: Synthetic oligonucleotide
  Target: LAMA2; (-) strand; PAM type: NRG; PAM sequence: GGG
acagcaaaaaaggtaaagag

SEQ ID NO: 94218 - DNA, 20 bp, Artificial Sequence
  Description of Artificial Sequence: Synthetic oligonucleotide
  Target: LAMA2; (-) strand; PAM type: NRG; PAM sequence: GGG
tacagcaaaaaaggtaaaga

SEQ ID NO: 94219 - DNA, 20 bp, Artificial Sequence
  Description of Artificial Sequence: Synthetic oligonucleotide
  Target: LAMA2; (-) strand; PAM type: NRG; PAM sequence: AGG
atacagcaaaaaaggtaaag

SEQ ID NO: 94220 - DNA, 20 bp, Artificial Sequence
  Description of Artificial Sequence: Synthetic oligonucleotide
  Target: LAMA2; (-) strand; PAM type: NRG; PAM sequence: GAG
aatacagcaaaaaaggtaaa

SEQ ID NO: 94221 - DNA, 20 bp, Artificial Sequence
  Description of Artificial Sequence: Synthetic oligonucleotide
  Target: LAMA2; (-) strand; PAM type: NRG; PAM sequence: AAG
ttaatacagcaaaaaaggta

SEQ ID NO: 94222 - DNA, 20 bp, Artificial Sequence
  Description of Artificial Sequence: Synthetic oligonucleotide
  Target: LAMA2; (-) strand; PAM type: NRG; PAM sequence: AGG
tagtattaatacagcaaaaa

SEQ ID NO: 94223 - DNA, 20 bp, Artificial Sequence
  Description of Artificial Sequence: Synthetic oligonucleotide
  Target: LAMA2; (-) strand; PAM type: NRG; PAM sequence: AAG
gtagtattaatacagcaaaa

SEQ ID NO: 94224 - DNA, 20 bp, Artificial Sequence
  Description of Artificial Sequence: Synthetic oligonucleotide
  Target: LAMA2; (-) strand; PAM type: NRG; PAM sequence: CAG
aattctatgtagtattaata

SEQ ID NO: 94225 - DNA, 20 bp, Artificial Sequence
  Description of Artificial Sequence: Synthetic oligonucleotide
  Target: LAMA2; (-) strand; PAM type: NRG; PAM sequence: TAG
aaggatttggaaattctatg

SEQ ID NO: 94226 - DNA, 20 bp, Artificial Sequence
  Description of Artificial Sequence: Synthetic oligonucleotide
  Target: LAMA2; (-) strand; PAM type: NRG; PAM sequence: TGG
tcccactgacattaaggatt

SEQ ID NO: 94227 - DNA, 20 bp, Artificial Sequence
  Description of Artificial Sequence: Synthetic oligonucleotide
  Target: LAMA2; (-) strand; PAM type: NRG; PAM sequence: AGG
ttctaatcccactgacatta

SEQ ID NO: 94228 - DNA, 20 bp, Artificial Sequence
  Description of Artificial Sequence: Synthetic oligonucleotide
  Target: LAMA2; (-) strand; PAM type: NRG; PAM sequence: AAG
attctaatcccactgacatt

SEQ ID NO: 94229 - DNA, 20 bp, Artificial Sequence
  Description of Artificial Sequence: Synthetic oligonucleotide
  Target: LAMA2; (-) strand; PAM type: NRG; PAM sequence: AAG
tccatttgatcttctgcaac

SEQ ID NO: 94230 - DNA, 20 bp, Artificial Sequence
  Description of Artificial Sequence: Synthetic oligonucleotide
  Target: LAMA2; (-) strand; PAM type: NRG; PAM sequence: TGG
tgatggccaaatgctaacat

SEQ ID NO: 94231 - DNA, 20 bp, Artificial Sequence
  Description of Artificial Sequence: Synthetic oligonucleotide
  Target: LAMA2; (-) strand; PAM type: NRG; PAM sequence: TGG
atagtaaatgaagctgatga

SEQ ID NO: 94232 - DNA, 20 bp, Artificial Sequence
  Description of Artificial Sequence: Synthetic oligonucleotide
  Target: LAMA2; (-) strand; PAM type: NRG; PAM sequence: AAG
aaacattatgatagtaaatg

SEQ ID NO: 94233 - DNA, 20 bp, Artificial Sequence
  Description of Artificial Sequence: Synthetic oligonucleotide
  Target: LAMA2; (-) strand; PAM type: NRG; PAM sequence: TAG
actctgcttaaacattatga

SEQ ID NO: 94234 - DNA, 20 bp, Artificial Sequence
  Description of Artificial Sequence: Synthetic oligonucleotide
  Target: LAMA2; (-) strand; PAM type: NRG; PAM sequence: TGG
acagaaatgaatggataggc

SEQ ID NO: 94235 - DNA, 20 bp, Artificial Sequence
  Description of Artificial Sequence: Synthetic oligonucleotide
  Target: LAMA2; (-) strand; PAM type: NRG; PAM sequence: AGG
tttgacagaaatgaatggat

SEQ ID NO: 94236 - DNA, 20 bp, Artificial Sequence
  Description of Artificial Sequence: Synthetic oligonucleotide
  Target: LAMA2; (-) strand; PAM type: NRG; PAM sequence: TAG
atttgacagaaatgaatgga

SEQ ID NO: 94237 - DNA, 20 bp, Artificial Sequence
  Description of Artificial Sequence: Synthetic oligonucleotide
  Target: LAMA2; (-) strand; PAM type: NRG; PAM sequence: TGG
ataaatttgacagaaatgaa

SEQ ID NO: 94238 - DNA, 20 bp, Artificial Sequence
  Description of Artificial Sequence: Synthetic oligonucleotide
  Target: LAMA2; (-) strand; PAM type: NRG; PAM sequence: CAG
agtctctcacataaatttga

SEQ ID NO: 94239 - DNA, 20 bp, Artificial Sequence
  Description of Artificial Sequence: Synthetic oligonucleotide
  Target: LAMA2; (-) strand; PAM type: NRG; PAM sequence: GAG
acccacctgaataattggaa

SEQ ID NO: 94240 - DNA, 20 bp, Artificial Sequence
  Description of Artificial Sequence: Synthetic oligonucleotide
  Target: LAMA2; (-) strand; PAM type: NRG; PAM sequence: AAG
ggacccacctgaataattgg

SEQ ID NO: 94241 - DNA, 20 bp, Artificial Sequence
  Description of Artificial Sequence: Synthetic oligonucleotide
  Target: LAMA2; (-) strand; PAM type: NRG; PAM sequence: TGG
ctgggacccacctgaataat

SEQ ID NO: 94242 - DNA, 20 bp, Artificial Sequence
  Description of Artificial Sequence: Synthetic oligonucleotide
  Target: LAMA2; (-) strand; PAM type: NRG; PAM sequence: GGG
tctataattctgcatgtcct

SEQ ID NO: 94243 - DNA, 20 bp, Artificial Sequence
  Description of Artificial Sequence: Synthetic oligonucleotide
  Target: LAMA2; (-) strand; PAM type: NRG; PAM sequence: TGG
ttctataattctgcatgtcc

SEQ ID NO: 94244 - DNA, 20 bp, Artificial Sequence
  Description of Artificial Sequence: Synthetic oligonucleotide
  Target: LAMA2; (-) strand; PAM type: NRG; PAM sequence: TGG
ataataggctacatttacag

SEQ ID NO: 94245 - DNA, 20 bp, Artificial Sequence
  Description of Artificial Sequence: Synthetic oligonucleotide
  Target: LAMA2; (-) strand; PAM type: NRG; PAM sequence: CAG
ttgataataggctacattta

SEQ ID NO: 94246 - DNA, 20 bp, Artificial Sequence
  Description of Artificial Sequence: Synthetic oligonucleotide
  Target: LAMA2; (-) strand; PAM type: NRG; PAM sequence: AGG
cttacagtagagttgataat

SEQ ID NO: 94247 - DNA, 20 bp, Artificial Sequence
  Description of Artificial Sequence: Synthetic oligonucleotide
  Target: LAMA2; (-) strand; PAM type: NRG; PAM sequence: TAG
gcttacagtagagttgataa

SEQ ID NO: 94248 - DNA, 20 bp, Artificial Sequence
  Description of Artificial Sequence: Synthetic oligonucleotide
  Target: LAMA2; (-) strand; PAM type: NRG; PAM sequence: GAG
ggtctttggtgcttacagta

SEQ ID NO: 94249 - DNA, 20 bp, Artificial Sequence
  Description of Artificial Sequence: Synthetic oligonucleotide
  Target: LAMA2; (-) strand; PAM type: NRG; PAM sequence: TAG
tgggtctttggtgcttacag

SEQ ID NO: 94250 - DNA, 20 bp, Artificial Sequence
  Description of Artificial Sequence: Synthetic oligonucleotide
  Target: LAMA2; (-) strand; PAM type: NRG; PAM sequence: CAG
tactgggtctttggtgctta

SEQ ID NO: 94251 - DNA, 20 bp, Artificial Sequence
  Description of Artificial Sequence: Synthetic oligonucleotide
  Target: LAMA2; (-) strand; PAM type: NRG; PAM sequence: TGG
agggtaccctactgggtctt

SEQ ID NO: 94252 - DNA, 20 bp, Artificial Sequence
  Description of Artificial Sequence: Synthetic oligonucleotide
  Target: LAMA2; (-) strand; PAM type: NRG; PAM sequence: GGG
atgaaatagggtaccctact

SEQ ID NO: 94253 - DNA, 20 bp, Artificial Sequence
  Description of Artificial Sequence: Synthetic oligonucleotide
  Target: LAMA2; (-) strand; PAM type: NRG; PAM sequence: TGG
aatgaaatagggtaccctac

SEQ ID NO: 94254 - DNA, 20 bp, Artificial Sequence
  Description of Artificial Sequence: Synthetic oligonucleotide
  Target: LAMA2; (-) strand; PAM type: NRG; PAM sequence: GGG
acacatttcttaatgaaata

SEQ ID NO: 94255 - DNA, 20 bp, Artificial Sequence
  Description of Artificial Sequence: Synthetic oligonucleotide
  Target: LAMA2; (-) strand; PAM type: NRG; PAM sequence: AGG
gacacatttcttaatgaaat

SEQ ID NO: 94256 - DNA, 20 bp, Artificial Sequence
  Description of Artificial Sequence: Synthetic oligonucleotide
  Target: LAMA2; (-) strand; PAM type: NRG; PAM sequence: TAG
agacacatttcttaatgaaa

SEQ ID NO: 94257 - DNA, 20 bp, Artificial Sequence
  Description of Artificial Sequence: Synthetic oligonucleotide
  Target: LAMA2; (-) strand; PAM type: NRG; PAM sequence: GAG
cttctaaacctgtgatgaga

SEQ ID NO: 94258 - DNA, 20 bp, Artificial Sequence
  Description of Artificial Sequence: Synthetic oligonucleotide
  Target: LAMA2; (-) strand; PAM type: NRG; PAM sequence: GAG
atcttctaaacctgtgatga

SEQ ID NO: 94259 - DNA, 20 bp, Artificial Sequence
  Description of Artificial Sequence: Synthetic oligonucleotide
  Target: LAMA2; (-) strand; PAM type: NRG; PAM sequence: GAG
tcatcttctaaacctgtgat

SEQ ID NO: 94260 - DNA, 20 bp, Artificial Sequence
  Description of Artificial Sequence: Synthetic oligonucleotide
  Target: LAMA2; (-) strand; PAM type: NRG; PAM sequence: TAG
attattaaataacaaaaagc

SEQ ID NO: 94261 - DNA, 20 bp, Artificial Sequence
  Description of Artificial Sequence: Synthetic oligonucleotide
  Target: LAMA2; (-) strand; PAM type: NRG; PAM sequence: AAG
tatcattattaaataacaaa

SEQ ID NO: 94262 - DNA, 20 bp, Artificial Sequence
  Description of Artificial Sequence: Synthetic oligonucleotide
  Target: LAMA2; (-) strand; PAM type: NRG; PAM sequence: TGG
agttggtccagaaagtgatt

SEQ ID NO: 94263 - DNA, 20 bp, Artificial Sequence
  Description of Artificial Sequence: Synthetic oligonucleotide
  Target: LAMA2; (-) strand; PAM type: NRG; PAM sequence: AAG
cagctgccagttggtccaga

SEQ ID NO: 94264 - DNA, 20 bp, Artificial Sequence
  Description of Artificial Sequence: Synthetic oligonucleotide
  Target: LAMA2; (-) strand; PAM type: NRG; PAM sequence: CAG
ttaacagctgccagttggtc

SEQ ID NO: 94265 - DNA, 20 bp, Artificial Sequence
  Description of Artificial Sequence: Synthetic oligonucleotide
  Target: LAMA2; (-) strand; PAM type: NRG; PAM sequence: TGG
ttatattaacagctgccagt

SEQ ID NO: 94266 - DNA, 20 bp, Artificial Sequence
  Description of Artificial Sequence: Synthetic oligonucleotide
  Target: LAMA2; (-) strand; PAM type: NRG; PAM sequence: CAG
caggttatattaacagctgc

SEQ ID NO: 94267 - DNA, 20 bp, Artificial Sequence
  Description of Artificial Sequence: Synthetic oligonucleotide
  Target: LAMA2; (-) strand; PAM type: NRG; PAM sequence: CAG
caatttacaggttatattaa

SEQ ID NO: 94268 - DNA, 20 bp, Artificial Sequence
  Description of Artificial Sequence: Synthetic oligonucleotide
  Target: LAMA2; (-) strand; PAM type: NRG; PAM sequence: AGG
ttaaaaaaagatcaatttac

SEQ ID NO: 94269 - DNA, 20 bp, Artificial Sequence
  Description of Artificial Sequence: Synthetic oligonucleotide
  Target: LAMA2; (-) strand; PAM type: NRG; PAM sequence: CAG
tttaaaaaaagatcaattta

SEQ ID NO: 94270 - DNA, 20 bp, Artificial Sequence
  Description of Artificial Sequence: Synthetic oligonucleotide
  Target: LAMA2; (-) strand; PAM type: NRG; PAM sequence: AAG
tggaaattttgctttaaaaa

SEQ ID NO: 94271 - DNA, 20 bp, Artificial Sequence
  Description of Artificial Sequence: Synthetic oligonucleotide
  Target: LAMA2; (-) strand; PAM type: NRG; PAM sequence: TGG
gtttaaaggcactgagctgt

SEQ ID NO: 94272 - DNA, 20 bp, Artificial Sequence
  Description of Artificial Sequence: Synthetic oligonucleotide
  Target: LAMA2; (-) strand; PAM type: NRG; PAM sequence: GAG
atccagtgtttaaaggcact

SEQ ID NO: 94273 - DNA, 20 bp, Artificial Sequence
  Description of Artificial Sequence: Synthetic oligonucleotide
  Target: LAMA2; (-) strand; PAM type: NRG; PAM sequence: AGG
gtcaggaatccagtgtttaa

SEQ ID NO: 94274 - DNA, 20 bp, Artificial Sequence
  Description of Artificial Sequence: Synthetic oligonucleotide
  Target: LAMA2; (-) strand; PAM type: NRG; PAM sequence: AAG
tgtcaggaatccagtgttta

SEQ ID NO: 94275 - DNA, 20 bp, Artificial Sequence
  Description of Artificial Sequence: Synthetic oligonucleotide
  Target: LAMA2; (-) strand; PAM type: NRG; PAM sequence: CAG
ttatacatttgtcaggaatc

SEQ ID NO: 94276 - DNA, 20 bp, Artificial Sequence
  Description of Artificial Sequence: Synthetic oligonucleotide
  Target: LAMA2; (-) strand; PAM type: NRG; PAM sequence: AGG
tatgattttatacatttgtc

SEQ ID NO: 94277 - DNA, 20 bp, Artificial Sequence
  Description of Artificial Sequence: Synthetic oligonucleotide
  Target: LAMA2; (-) strand; PAM type: NRG; PAM sequence: CAG
ctatgattttatacatttgt

SEQ ID NO: 94278 - DNA, 20 bp, Artificial Sequence
  Description of Artificial Sequence: Synthetic oligonucleotide
  Target: LAMA2; (-) strand; PAM type: NRG; PAM sequence: AGG
tgggaaaggaagaatttctt

SEQ ID NO: 94279 - DNA, 20 bp, Artificial Sequence
  Description of Artificial Sequence: Synthetic oligonucleotide
  Target: LAMA2; (-) strand; PAM type: NRG; PAM sequence: TAG
gtgggaaaggaagaatttct

SEQ ID NO: 94280 - DNA, 20 bp, Artificial Sequence
  Description of Artificial Sequence: Synthetic oligonucleotide
  Target: LAMA2; (-) strand; PAM type: NRG; PAM sequence: AAG
tagatgatctgtgggaaagg

SEQ ID NO: 94281 - DNA, 20 bp, Artificial Sequence
  Description of Artificial Sequence: Synthetic oligonucleotide
  Target: LAMA2; (-) strand; PAM type: NRG; PAM sequence: AGG
tcctagatgatctgtgggaa

SEQ ID NO: 94282 - DNA, 20 bp, Artificial Sequence
  Description of Artificial Sequence: Synthetic oligonucleotide
  Target: LAMA2; (-) strand; PAM type: NRG; PAM sequence: AAG
atcctagatgatctgtggga

SEQ ID NO: 94283 - DNA, 20 bp, Artificial Sequence
  Description of Artificial Sequence: Synthetic oligonucleotide
  Target: LAMA2; (-) strand; PAM type: NRG; PAM sequence: GGG
gtagatcctagatgatctgt

SEQ ID NO: 94284 - DNA, 20 bp, Artificial Sequence
  Description of Artificial Sequence: Synthetic oligonucleotide
  Target: LAMA2; (-) strand; PAM type: NRG; PAM sequence: TGG
tgtagatcctagatgatctg

SEQ ID NO: 94285 - DNA, 20 bp, Artificial Sequence
  Description of Artificial Sequence: Synthetic oligonucleotide
  Target: LAMA2; (-) strand; PAM type: NRG; PAM sequence: TAG
cagctagaaaatgtagatcc

SEQ ID NO: 94286 - DNA, 20 bp, Artificial Sequence
  Description of Artificial Sequence: Synthetic oligonucleotide
  Target: LAMA2; (-) strand; PAM type: NRG; PAM sequence: TAG
gagcacacagctagaaaatg

SEQ ID NO: 94287 - DNA, 20 bp, Artificial Sequence
  Description of Artificial Sequence: Synthetic oligonucleotide
  Target: LAMA2; (-) strand; PAM type: NRG; PAM sequence: TAG
cttgctcaggagcacacagc

SEQ ID NO: 94288 - DNA, 20 bp, Artificial Sequence
  Description of Artificial Sequence: Synthetic oligonucleotide
  Target: LAMA2; (-) strand; PAM type: NRG; PAM sequence: CAG
atatcttgctcaggagcaca

SEQ ID NO: 94289 - DNA, 20 bp, Artificial Sequence
  Description of Artificial Sequence: Synthetic oligonucleotide
  Target: LAMA2; (-) strand; PAM type: NRG; PAM sequence: GAG
aggtcaaatatcttgctcag

SEQ ID NO: 94290 - DNA, 20 bp, Artificial Sequence
  Description of Artificial Sequence: Synthetic oligonucleotide
  Target: LAMA2; (-) strand; PAM type: NRG; PAM sequence: AGG
ggaggtcaaatatcttgctc

SEQ ID NO: 94291 - DNA, 20 bp, Artificial Sequence
  Description of Artificial Sequence: Synthetic oligonucleotide
  Target: LAMA2; (-) strand; PAM type: NRG; PAM sequence: CAG
aggaggtcaaatatcttgct

SEQ ID NO: 94292 - DNA, 20 bp, Artificial Sequence
  Description of Artificial Sequence: Synthetic oligonucleotide
  Target: LAMA2; (-) strand; PAM type: NRG; PAM sequence: AGG
tagaaaactgtgtctcaagg

SEQ ID NO: 94293 - DNA, 20 bp, Artificial Sequence
  Description of Artificial Sequence: Synthetic oligonucleotide
  Target: LAMA2; (-) strand; PAM type: NRG; PAM sequence: GAG
ctagaaaactgtgtctcaag

SEQ ID NO: 94294 - DNA, 20 bp, Artificial Sequence
  Description of Artificial Sequence: Synthetic oligonucleotide
  Target: LAMA2; (-) strand; PAM type: NRG; PAM sequence: AGG
gactagaaaactgtgtctca

SEQ ID NO: 94295 - DNA, 20 bp, Artificial Sequence
  Description of Artificial Sequence: Synthetic oligonucleotide
  Target: LAMA2; (-) strand; PAM type: NRG; PAM sequence: AAG
agactagaaaactgtgtctc

SEQ ID NO: 94296 - DNA, 20 bp, Artificial Sequence
  Description of Artificial Sequence: Synthetic oligonucleotide
  Target: LAMA2; (-) strand; PAM type: NRG; PAM sequence: TAG
tcatgactctctttgtagac

SEQ ID NO: 94297 - DNA, 20 bp, Artificial Sequence
  Description of Artificial Sequence: Synthetic oligonucleotide
  Target: LAMA2; (-) strand; PAM type: NRG; PAM sequence: TAG
aaaattcatgactctctttg

SEQ ID NO: 94298 - DNA, 20 bp, Artificial Sequence
  Description of Artificial Sequence: Synthetic oligonucleotide
  Target: LAMA2; (-) strand; PAM type: NRG; PAM sequence: CAG
gccaaatcctttagtcccca

SEQ ID NO: 94299 - DNA, 20 bp, Artificial Sequence
  Description of Artificial Sequence: Synthetic oligonucleotide
  Target: LAMA2; (-) strand; PAM type: NRG; PAM sequence: TAG
cctctatgtgccaaatcctt

SEQ ID NO: 94300 - DNA, 20 bp, Artificial Sequence
  Description of Artificial Sequence: Synthetic oligonucleotide
  Target: LAMA2; (-) strand; PAM type: NRG; PAM sequence: TGG
tccaggacttgggaactcac

SEQ ID NO: 94301 - DNA, 20 bp, Artificial Sequence
  Description of Artificial Sequence: Synthetic oligonucleotide
  Target: LAMA2; (-) strand; PAM type: NRG; PAM sequence: GGG
tgtgagcatctccaggactt

SEQ ID NO: 94302 - DNA, 20 bp, Artificial Sequence
  Description of Artificial Sequence: Synthetic oligonucleotide
  Target: LAMA2; (-) strand; PAM type: NRG; PAM sequence: TGG
gtgtgagcatctccaggact

SEQ ID NO: 94303 - DNA, 20 bp, Artificial Sequence
  Description of Artificial Sequence: Synthetic oligonucleotide
  Target: LAMA2; (-) strand; PAM type: NRG; PAM sequence: AGG
taccatgtgtgagcatctcc

SEQ ID NO: 94304 - DNA, 20 bp, Artificial Sequence
  Description of Artificial Sequence: Synthetic oligonucleotide
  Target: LAMA2; (-) strand; PAM type: NRG; PAM sequence: CAG
ctaccatgtgtgagcatctc

SEQ ID NO: 94305 - DNA, 20 bp, Artificial Sequence
  Description of Artificial Sequence: Synthetic oligonucleotide
  Target: LAMA2; (-) strand; PAM type: NRG; PAM sequence: GAG
caaagacagctaccatgtgt

SEQ ID NO: 94306 - DNA, 20 bp, Artificial Sequence
  Description of Artificial Sequence: Synthetic oligonucleotide
  Target: LAMA2; (-) strand; PAM type: NRG; PAM sequence: CAG
atgagcactgctaccaaaga

SEQ ID NO: 94307 - DNA, 20 bp, Artificial Sequence
  Description of Artificial Sequence: Synthetic oligonucleotide
  Target: LAMA2; (-) strand; PAM type: NRG; PAM sequence: AAG
tactatgagcactgctacca

SEQ ID NO: 94308 - DNA, 20 bp, Artificial Sequence
  Description of Artificial Sequence: Synthetic oligonucleotide
  Target: LAMA2; (-) strand; PAM type: NRG; PAM sequence: GAG
ctgatatgcacagctactat

SEQ ID NO: 94309 - DNA, 20 bp, Artificial Sequence
  Description of Artificial Sequence: Synthetic oligonucleotide
  Target: LAMA2; (-) strand; PAM type: NRG; PAM sequence: CAG
tggtgaacaactgatatgca

SEQ ID NO: 94310 - DNA, 20 bp, Artificial Sequence
  Description of Artificial Sequence: Synthetic oligonucleotide
  Target: LAMA2; (-) strand; PAM type: NRG; PAM sequence: TGG
aacttagccttagaattcac

SEQ ID NO: 94311 - DNA, 20 bp, Artificial Sequence
  Description of Artificial Sequence: Synthetic oligonucleotide
  Target: LAMA2; (-) strand; PAM type: NRG; PAM sequence: TAG
gtaaatgactaacttagcct

SEQ ID NO: 94312 - DNA, 20 bp, Artificial Sequence
  Description of Artificial Sequence: Synthetic oligonucleotide
  Target: LAMA2; (-) strand; PAM type: NRG; PAM sequence: TAG
atgtcagtaaatgactaact

SEQ ID NO: 94313 - DNA, 20 bp, Artificial Sequence
  Description of Artificial Sequence: Synthetic oligonucleotide
  Target: LAMA2; (-) strand; PAM type: NRG; PAM sequence: CAG
tggaagacaggataaaatgt

SEQ ID NO: 94314 - DNA, 20 bp, Artificial Sequence
  Description of Artificial Sequence: Synthetic oligonucleotide
  Target: LAMA2; (-) strand; PAM type: NRG; PAM sequence: AGG
ggtgggggttattggaagac

SEQ ID NO: 94315 - DNA, 20 bp, Artificial Sequence
  Description of Artificial Sequence: Synthetic oligonucleotide
  Target: LAMA2; (-) strand; PAM type: NRG; PAM sequence: CAG
gggtgggggttattggaaga

SEQ ID NO: 94316 - DNA, 20 bp, Artificial Sequence
  Description of Artificial Sequence: Synthetic oligonucleotide
  Target: LAMA2; (-) strand; PAM type: NRG; PAM sequence: AAG
atgggggtgggggttattgg

SEQ ID NO: 94317 - DNA, 20 bp, Artificial Sequence
  Description of Artificial Sequence: Synthetic oligonucleotide
  Target: LAMA2; (-) strand; PAM type: NRG; PAM sequence: TGG
tttatgggggtgggggttat

SEQ ID NO: 94318 - DNA, 20 bp, Artificial Sequence
  Description of Artificial Sequence: Synthetic oligonucleotide
  Target: LAMA2; (-) strand; PAM type: NRG; PAM sequence: GGG
ccctaactttatgggggtgg

SEQ ID NO: 94319 - DNA, 20 bp, Artificial Sequence
  Description of Artificial Sequence: Synthetic oligonucleotide
  Target: LAMA2; (-) strand; PAM type: NRG; PAM sequence: GGG
tccctaactttatgggggtg

SEQ ID NO: 94320 - DNA, 20 bp, Artificial Sequence
  Description of Artificial Sequence: Synthetic oligonucleotide
  Target: LAMA2; (-) strand; PAM type: NRG; PAM sequence: GGG
atccctaactttatgggggt

SEQ ID NO: 94321 - DNA, 20 bp, Artificial Sequence
  Description of Artificial Sequence: Synthetic oligonucleotide
  Target: LAMA2; (-) strand; PAM type: NRG; PAM sequence: TGG
tatccctaactttatggggg

SEQ ID NO: 94322 - DNA, 20 bp, Artificial Sequence
  Description of Artificial Sequence: Synthetic oligonucleotide
  Target: LAMA2; (-) strand; PAM type: NRG; PAM sequence: GGG
taatatccctaactttatgg

SEQ ID NO: 94323 - DNA, 20 bp, Artificial Sequence
  Description of Artificial Sequence: Synthetic oligonucleotide
  Target: LAMA2; (-) strand; PAM type: NRG; PAM sequence: GGG
ataatatccctaactttatg

SEQ ID NO: 94324 - DNA, 20 bp, Artificial Sequence
  Description of Artificial Sequence: Synthetic oligonucleotide
  Target: LAMA2; (-) strand; PAM type: NRG; PAM sequence: GGG
aataatatccctaactttat

SEQ ID NO: 94325 - DNA, 20 bp, Artificial Sequence
  Description of Artificial Sequence: Synthetic oligonucleotide
  Target: LAMA2; (-) strand; PAM type: NRG; PAM sequence: TGG
gaataatatccctaacttta

SEQ ID NO: 94326 - DNA, 20 bp, Artificial Sequence
  Description of Artificial Sequence: Synthetic oligonucleotide
  Target: LAMA2; (-) strand; PAM type: NRG; PAM sequence: TGG
aattaccataataaaattag

SEQ ID NO: 94327 - DNA, 20 bp, Artificial Sequence
  Description of Artificial Sequence: Synthetic oligonucleotide
  Target: LAMA2; (-) strand; PAM type: NRG; PAM sequence: TAG
ataaattaccataataaaat

SEQ ID NO: 94328 - DNA, 20 bp, Artificial Sequence
  Description of Artificial Sequence: Synthetic oligonucleotide
  Target: LAMA2; (-) strand; PAM type: NRG; PAM sequence: TGG
gttcttaagacttcatgcca

SEQ ID NO: 94329 - DNA, 20 bp, Artificial Sequence
  Description of Artificial Sequence: Synthetic oligonucleotide
  Target: LAMA2; (-) strand; PAM type: NRG; PAM sequence: AAG
acattcttttttatgttctt

SEQ ID NO: 94330 - DNA, 20 bp, Artificial Sequence
  Description of Artificial Sequence: Synthetic oligonucleotide
  Target: LAMA2; (-) strand; PAM type: NRG; PAM sequence: TGG
agtagtatgaaaactggtaa

SEQ ID NO: 94331 - DNA, 20 bp, Artificial Sequence
  Description of Artificial Sequence: Synthetic oligonucleotide
  Target: LAMA2; (-) strand; PAM type: NRG; PAM sequence: TGG
acggcaagtagtatgaaaac

SEQ ID NO: 94332 - DNA, 20 bp, Artificial Sequence
  Description of Artificial Sequence: Synthetic oligonucleotide
  Target: LAMA2; (-) strand; PAM type: NRG; PAM sequence: TAG
acatctatactcacggcaag

SEQ ID NO: 94333 - DNA, 20 bp, Artificial Sequence
  Description of Artificial Sequence: Synthetic oligonucleotide
  Target: LAMA2; (-) strand; PAM type: NRG; PAM sequence: AAG
atcacatctatactcacggc

SEQ ID NO: 94334 - DNA, 20 bp, Artificial Sequence
  Description of Artificial Sequence: Synthetic oligonucleotide
  Target: LAMA2; (-) strand; PAM type: NRG; PAM sequence: CGG
tataatcacatctatactca

SEQ ID NO: 94335 - DNA, 20 bp, Artificial Sequence
  Description of Artificial Sequence: Synthetic oligonucleotide
  Target: LAMA2; (-) strand; PAM type: NRG; PAM sequence: GAG
aattgtgattatatggcaaa

SEQ ID NO: 94336 - DNA, 20 bp, Artificial Sequence
  Description of Artificial Sequence: Synthetic oligonucleotide
  Target: LAMA2; (-) strand; PAM type: NRG; PAM sequence: AAG
ttaattgtgattatatggca

SEQ ID NO: 94337 - DNA, 20 bp, Artificial Sequence
  Description of Artificial Sequence: Synthetic oligonucleotide
  Target: LAMA2; (-) strand; PAM type: NRG; PAM sequence: TGG
tacttttaattgtgattata

SEQ ID NO: 94338 - DNA, 20 bp, Artificial Sequence
  Description of Artificial Sequence: Synthetic oligonucleotide
  Target: LAMA2; (-) strand; PAM type: NRG; PAM sequence: AAG
ccatgaaaaattataaaaat

SEQ ID NO: 94339 - DNA, 20 bp, Artificial Sequence
  Description of Artificial Sequence: Synthetic oligonucleotide
  Target: LAMA2; (-) strand; PAM type: NRG; PAM sequence: AAG
gttttaccacttatgcatag

SEQ ID NO: 94340 - DNA, 20 bp, Artificial Sequence
  Description of Artificial Sequence: Synthetic oligonucleotide
  Target: LAMA2; (-) strand; PAM type: NRG; PAM sequence: TAG
gaggttttaccacttatgca

SEQ ID NO: 94341 - DNA, 20 bp, Artificial Sequence
  Description of Artificial Sequence: Synthetic oligonucleotide
  Target: LAMA2; (-) strand; PAM type: NRG; PAM sequence: AGG
ccaggaactttctttccttg

SEQ ID NO: 94342 - DNA, 20 bp, Artificial Sequence
  Description of Artificial Sequence: Synthetic oligonucleotide
  Target: LAMA2; (-) strand; PAM type: NRG; PAM sequence: GAG
tccaggaactttctttcctt

SEQ ID NO: 94343 - DNA, 20 bp, Artificial Sequence
  Description of Artificial Sequence: Synthetic oligonucleotide
  Target: LAMA2; (-) strand; PAM type: NRG; PAM sequence: AGG
aaccaaaataatgtatttcc

SEQ ID NO: 94344 - DNA, 20 bp, Artificial Sequence
  Description of Artificial Sequence: Synthetic oligonucleotide
  Target: LAMA2; (-) strand; PAM type: NRG; PAM sequence: CAG
taaccaaaataatgtatttc

SEQ ID NO: 94345 - DNA, 20 bp, Artificial Sequence
  Description of Artificial Sequence: Synthetic oligonucleotide
  Target: LAMA2; (-) strand; PAM type: NRG; PAM sequence: AGG
cttttcttgaacaaatctat

SEQ ID NO: 94346 - DNA, 20 bp, Artificial Sequence
  Description of Artificial Sequence: Synthetic oligonucleotide
  Target: LAMA2; (-) strand; PAM type: NRG; PAM sequence: TAG
acttttcttgaacaaatcta

SEQ ID NO: 94347 - DNA, 20 bp, Artificial Sequence
  Description of Artificial Sequence: Synthetic oligonucleotide
  Target: LAMA2; (-) strand; PAM type: NRG; PAM sequence: TGG
caaaatatatttctttgtag

SEQ ID NO: 94348 - DNA, 20 bp, Artificial Sequence
  Description of Artificial Sequence: Synthetic oligonucleotide
  Target: LAMA2; (-) strand; PAM type: NRG; PAM sequence: TAG
atgcaaaatatatttctttg

SEQ ID NO: 94349 - DNA, 20 bp, Artificial Sequence
  Description of Artificial Sequence: Synthetic oligonucleotide
  Target: LAMA2; (-) strand; PAM type: NRG; PAM sequence: TGG
ttgctaaagtgtcattttaa

SEQ ID NO: 94350 - DNA, 20 bp, Artificial Sequence
  Description of Artificial Sequence: Synthetic oligonucleotide
  Target: LAMA2; (-) strand; PAM type: NRG; PAM sequence: AAG
agcagtataaagttttgcta

SEQ ID NO: 94351 - DNA, 20 bp, Artificial Sequence
  Description of Artificial Sequence: Synthetic oligonucleotide
  Target: LAMA2; (-) strand; PAM type: NRG; PAM sequence: AAG
aaaaacaacaaagcagtata

SEQ ID NO: 94352 - DNA, 20 bp, Artificial Sequence
  Description of Artificial Sequence: Synthetic oligonucleotide
  Target: LAMA2; (-) strand; PAM type: NRG; PAM sequence: CAG
ttatcgtaaaaacaacaaag

SEQ ID NO: 94353 - DNA, 20 bp, Artificial Sequence
  Description of Artificial Sequence: Synthetic oligonucleotide
  Target: LAMA2; (-) strand; PAM type: NRG; PAM sequence: AAG
atgttatcgtaaaaacaaca

SEQ ID NO: 94354 - DNA, 20 bp, Artificial Sequence
  Description of Artificial Sequence: Synthetic oligonucleotide
  Target: LAMA2; (-) strand; PAM type: NRG; PAM sequence: TGG
taaatttaccataaatatga

SEQ ID NO: 94355 - DNA, 20 bp, Artificial Sequence
  Description of Artificial Sequence: Synthetic oligonucleotide
  Target: LAMA2; (-) strand; PAM type: NRG; PAM sequence: GAG
ttaggagtcactttttcttg

SEQ ID NO: 94356 - DNA, 20 bp, Artificial Sequence
  Description of Artificial Sequence: Synthetic oligonucleotide
  Target: LAMA2; (-) strand; PAM type: NRG; PAM sequence: TGG
ctttaggagtcactttttct

SEQ ID NO: 94357 - DNA, 20 bp, Artificial Sequence
  Description of Artificial Sequence: Synthetic oligonucleotide
  Target: LAMA2; (-) strand; PAM type: NRG; PAM sequence: GAG
tcaaattatttagactttag

SEQ ID NO: 94358 - DNA, 20 bp, Artificial Sequence
  Description of Artificial Sequence: Synthetic oligonucleotide
  Target: LAMA2; (-) strand; PAM type: NRG; PAM sequence: AGG
tatcaaattatttagacttt

SEQ ID NO: 94359 - DNA, 20 bp, Artificial Sequence
  Description of Artificial Sequence: Synthetic oligonucleotide
  Target: LAMA2; (-) strand; PAM type: NRG; PAM sequence: TAG
atatcaaattatttagactt

SEQ ID NO: 94360 - DNA, 20 bp, Artificial Sequence
  Description of Artificial Sequence: Synthetic oligonucleotide
  Target: LAMA2; (-) strand; PAM type: NRG; PAM sequence: TAG
ttttaaaatatcaaattatt

SEQ ID NO: 94361 - DNA, 20 bp, Artificial Sequence
  Description of Artificial Sequence: Synthetic oligonucleotide
  Target: LAMA2; (-) strand; PAM type: NRG; PAM sequence: AAG
atacttttattattttatga

SEQ ID NO: 94362 - DNA, 20 bp, Artificial Sequence
  Description of Artificial Sequence: Synthetic oligonucleotide
  Target: LAMA2; (-) strand; PAM type: NRG; PAM sequence: AGG
tatagctgaaatacaaggaa

SEQ ID NO: 94363 - DNA, 20 bp, Artificial Sequence
  Description of Artificial Sequence: Synthetic oligonucleotide
  Target: LAMA2; (-) strand; PAM type: NRG; PAM sequence: AAG
ctatagctgaaatacaagga

SEQ ID NO: 94364 - DNA, 20 bp, Artificial Sequence
  Description of Artificial Sequence: Synthetic oligonucleotide
  Target: LAMA2; (-) strand; PAM type: NRG; PAM sequence: AGG
tagtctatagctgaaataca

SEQ ID NO: 94365 - DNA, 20 bp, Artificial Sequence
  Description of Artificial Sequence: Synthetic oligonucleotide
  Target: LAMA2; (-) strand; PAM type: NRG; PAM sequence: AAG
atagtctatagctgaaatac

SEQ ID NO: 94366 - DNA, 20 bp, Artificial Sequence
  Description of Artificial Sequence: Synthetic oligonucleotide
  Target: LAMA2; (-) strand; PAM type: NRG; PAM sequence: TAG
aagagcctacggatagtcta

SEQ ID NO: 94367 - DNA, 20 bp, Artificial Sequence
  Description of Artificial Sequence: Synthetic oligonucleotide
  Target: LAMA2; (-) strand; PAM type: NRG; PAM sequence: TAG
aaactgaaagagcctacgga

SEQ ID NO: 94368 - DNA, 20 bp, Artificial Sequence
  Description of Artificial Sequence: Synthetic oligonucleotide
  Target: LAMA2; (-) strand; PAM type: NRG; PAM sequence: CGG
tgagaaactgaaagagccta

SEQ ID NO: 94369 - DNA, 20 bp, Artificial Sequence
  Description of Artificial Sequence: Synthetic oligonucleotide
  Target: LAMA2; (-) strand; PAM type: NRG; PAM sequence: GAG
gggccattgagaaactgaaa

SEQ ID NO: 94370 - DNA, 20 bp, Artificial Sequence
  Description of Artificial Sequence: Synthetic oligonucleotide
  Target: LAMA2; (-) strand; PAM type: NRG; PAM sequence: AAG
aagggccattgagaaactga

SEQ ID NO: 94371 - DNA, 20 bp, Artificial Sequence
  Description of Artificial Sequence: Synthetic oligonucleotide
  Target: LAMA2; (-) strand; PAM type: NRG; PAM sequence: GAG
atactagagtaagggccatt

SEQ ID NO: 94372 - DNA, 20 bp, Artificial Sequence
  Description of Artificial Sequence: Synthetic oligonucleotide
  Target: LAMA2; (-) strand; PAM type: NRG; PAM sequence: GGG
ccaaggggatactagagtaa

SEQ ID NO: 94373 - DNA, 20 bp, Artificial Sequence
  Description of Artificial Sequence: Synthetic oligonucleotide
  Target: LAMA2; (-) strand; PAM type: NRG; PAM sequence: AGG
gccaaggggatactagagta

SEQ ID NO: 94374 - DNA, 20 bp, Artificial Sequence
  Description of Artificial Sequence: Synthetic oligonucleotide
  Target: LAMA2; (-) strand; PAM type: NRG; PAM sequence: AAG
tgccaaggggatactagagt

SEQ ID NO: 94375 - DNA, 20 bp, Artificial Sequence
  Description of Artificial Sequence: Synthetic oligonucleotide
  Target: LAMA2; (-) strand; PAM type: NRG; PAM sequence: GAG
tgtctgccaaggggatacta

SEQ ID NO: 94376 - DNA, 20 bp, Artificial Sequence
  Description of Artificial Sequence: Synthetic oligonucleotide
  Target: LAMA2; (-) strand; PAM type: NRG; PAM sequence: TAG
agtgtctgccaaggggatac

SEQ ID NO: 94377 - DNA, 20 bp, Artificial Sequence
  Description of Artificial Sequence: Synthetic oligonucleotide
  Target: LAMA2; (-) strand; PAM type: NRG; PAM sequence: GGG
tgtcttcagtgtctgccaag

SEQ ID NO: 94378 - DNA, 20 bp, Artificial Sequence
  Description of Artificial Sequence: Synthetic oligonucleotide
  Target: LAMA2; (-) strand; PAM type: NRG; PAM sequence: GGG
ttgtcttcagtgtctgccaa

SEQ ID NO: 94379 - DNA, 20 bp, Artificial Sequence
  Description of Artificial Sequence: Synthetic oligonucleotide
  Target: LAMA2; (-) strand; PAM type: NRG; PAM sequence: AGG
tttgtcttcagtgtctgcca

SEQ ID NO: 94380 - DNA, 20 bp, Artificial Sequence
  Description of Artificial Sequence: Synthetic oligonucleotide
  Target: LAMA2; (-) strand; PAM type: NRG; PAM sequence: AAG
gtttgtcttcagtgtctgcc

SEQ ID NO: 94381 - DNA, 20 bp, Artificial Sequence
  Description of Artificial Sequence: Synthetic oligonucleotide
  Target: LAMA2; (-) strand; PAM type: NRG; PAM sequence: CAG
cttccagcaaagtttgtctt

SEQ ID NO: 94382 - DNA, 20 bp, Artificial Sequence
  Description of Artificial Sequence: Synthetic oligonucleotide
  Target: LAMA2; (-) strand; PAM type: NRG; PAM sequence: AAG
gcttaatttatcttccagca

SEQ ID NO: 94383 - DNA, 20 bp, Artificial Sequence
  Description of Artificial Sequence: Synthetic oligonucleotide
  Target: LAMA2; (-) strand; PAM type: NRG; PAM sequence: CAG
aaactgcttaatttatcttc

SEQ ID NO: 94384 - DNA, 20 bp, Artificial Sequence
  Description of Artificial Sequence: Synthetic oligonucleotide
  Target: LAMA2; (-) strand; PAM type: NRG; PAM sequence: AAG
acaaacaaataaacaaacaa

SEQ ID NO: 94385 - DNA, 20 bp, Artificial Sequence
  Description of Artificial Sequence: Synthetic oligonucleotide
  Target: LAMA2; (-) strand; PAM type: NRG; PAM sequence: AGG
tattttattctcctggctct

SEQ ID NO: 94386 - DNA, 20 bp, Artificial Sequence
  Description of Artificial Sequence: Synthetic oligonucleotide
  Target: LAMA2; (-) strand; PAM type: NRG; PAM sequence: TAG
atattttattctcctggctc

SEQ ID NO: 94387 - DNA, 20 bp, Artificial Sequence
  Description of Artificial Sequence: Synthetic oligonucleotide
  Target: LAMA2; (-) strand; PAM type: NRG; PAM sequence: TGG
atgctaatattttattctcc

SEQ ID NO: 94388 - DNA, 20 bp, Artificial Sequence
  Description of Artificial Sequence: Synthetic oligonucleotide
  Target: LAMA2; (-) strand; PAM type: NRG; PAM sequence: CAG
gctataaacaggtactctat

SEQ ID NO: 94389 - DNA, 20 bp, Artificial Sequence
  Description of Artificial Sequence: Synthetic oligonucleotide
  Target: LAMA2; (-) strand; PAM type: NRG; PAM sequence: AGG
cctaaaattaagctataaac

SEQ ID NO: 94390 - DNA, 20 bp, Artificial Sequence
  Description of Artificial Sequence: Synthetic oligonucleotide
  Target: LAMA2; (-) strand; PAM type: NRG; PAM sequence: CAG
acctaaaattaagctataaa

SEQ ID NO: 94391 - DNA, 20 bp, Artificial Sequence
  Description of Artificial Sequence: Synthetic oligonucleotide
  Target: LAMA2; (-) strand; PAM type: NRG; PAM sequence: AAG
tttgaacacaacctaaaatt

SEQ ID NO: 94392 - DNA, 20 bp, Artificial Sequence
  Description of Artificial Sequence: Synthetic oligonucleotide
  Target: LAMA2; (-) strand; PAM type: NRG; PAM sequence: TAG
atgggaatttaggctactca

SEQ ID NO: 94393 - DNA, 20 bp, Artificial Sequence
  Description of Artificial Sequence: Synthetic oligonucleotide
  Target: LAMA2; (-) strand; PAM type: NRG; PAM sequence: AGG
aggagatgacatgggaattt

SEQ ID NO: 94394 - DNA, 20 bp, Artificial Sequence
  Description of Artificial Sequence: Synthetic oligonucleotide
  Target: LAMA2; (-) strand; PAM type: NRG; PAM sequence: TAG
gaggagatgacatgggaatt

SEQ ID NO: 94395 - DNA, 20 bp, Artificial Sequence
  Description of Artificial Sequence: Synthetic oligonucleotide
  Target: LAMA2; (-) strand; PAM type: NRG; PAM sequence: GGG
atacaaggaggagatgacat

SEQ ID NO: 94396 - DNA, 20 bp, Artificial Sequence
  Description of Artificial Sequence: Synthetic oligonucleotide
  Target: LAMA2; (-) strand; PAM type: NRG; PAM sequence: TGG
aatacaaggaggagatgaca

SEQ ID NO: 94397 - DNA, 20 bp, Artificial Sequence
  Description of Artificial Sequence: Synthetic oligonucleotide
  Target: LAMA2; (-) strand; PAM type: NRG; PAM sequence: GAG
cagaataaaaatacaaggag

SEQ ID NO: 94398 - DNA, 20 bp, Artificial Sequence
  Description of Artificial Sequence: Synthetic oligonucleotide
  Target: LAMA2; (-) strand; PAM type: NRG; PAM sequence: AGG
atcagaataaaaatacaagg

SEQ ID NO: 94399 - DNA, 20 bp, Artificial Sequence
  Description of Artificial Sequence: Synthetic oligonucleotide
  Target: LAMA2; (-) strand; PAM type: NRG; PAM sequence: GAG
tatcagaataaaaatacaag

SEQ ID NO: 94400 - DNA, 20 bp, Artificial Sequence
  Description of Artificial Sequence: Synthetic oligonucleotide
  Target: LAMA2; (-) strand; PAM type: NRG; PAM sequence: AGG
tatatcagaataaaaataca

SEQ ID NO: 94401 - DNA, 20 bp, Artificial Sequence
  Description of Artificial Sequence: Synthetic oligonucleotide
  Target: LAMA2; (-) strand; PAM type: NRG; PAM sequence: AAG
ttatatcagaataaaaatac

SEQ ID NO: 94402 - DNA, 20 bp, Artificial Sequence
  Description of Artificial Sequence: Synthetic oligonucleotide
  Target: LAMA2; (-) strand; PAM type: NRG; PAM sequence: CAG
acatataattgcatttatat

SEQ ID NO: 94403 - DNA, 20 bp, Artificial Sequence
  Description of Artificial Sequence: Synthetic oligonucleotide
  Target: LAMA2; (-) strand; PAM type: NRG; PAM sequence: TGG
tatgtaccctatatttttaa

SEQ ID NO: 94404 - DNA, 20 bp, Artificial Sequence
  Description of Artificial Sequence: Synthetic oligonucleotide
  Target: LAMA2; (-) strand; PAM type: NRG; PAM sequence: TAG
tgaccttttcacaaatagaa

SEQ ID NO: 94405 - DNA, 20 bp, Artificial Sequence
  Description of Artificial Sequence: Synthetic oligonucleotide
  Target: LAMA2; (-) strand; PAM type: NRG; PAM sequence: TAG
ttaagtgaccttttcacaaa

SEQ ID NO: 94406 - DNA, 20 bp, Artificial Sequence
  Description of Artificial Sequence: Synthetic oligonucleotide
  Target: LAMA2; (-) strand; PAM type: NRG; PAM sequence: AAG
agtaaatcagtctaaagctt

SEQ ID NO: 94407 - DNA, 20 bp, Artificial Sequence
  Description of Artificial Sequence: Synthetic oligonucleotide
  Target: LAMA2; (-) strand; PAM type: NRG; PAM sequence: AAG
acgtagagtaaatcagtcta

SEQ ID NO: 94408 - DNA, 20 bp, Artificial Sequence
  Description of Artificial Sequence: Synthetic oligonucleotide
  Target: LAMA2; (-) strand; PAM type: NRG; PAM sequence: CAG
ttctaaaacgtagagtaaat

SEQ ID NO: 94409 - DNA, 20 bp, Artificial Sequence
  Description of Artificial Sequence: Synthetic oligonucleotide
  Target: LAMA2; (-) strand; PAM type: NRG; PAM sequence: GAG
tgaggttattctaaaacgta

SEQ ID NO: 94410 - DNA, 20 bp, Artificial Sequence
  Description of Artificial Sequence: Synthetic oligonucleotide
  Target: LAMA2; (-) strand; PAM type: NRG; PAM sequence: TAG
tctgaggttattctaaaacg

SEQ ID NO: 94411 - DNA, 20 bp, Artificial Sequence
  Description of Artificial Sequence: Synthetic oligonucleotide
  Target: LAMA2; (-) strand; PAM type: NRG; PAM sequence: AGG
ctttgttataaagctgtctg

SEQ ID NO: 94412 - DNA, 20 bp, Artificial Sequence
  Description of Artificial Sequence: Synthetic oligonucleotide
  Target: LAMA2; (-) strand; PAM type: NRG; PAM sequence: GAG
gctttgttataaagctgtct

SEQ ID NO: 94413 - DNA, 20 bp, Artificial Sequence
  Description of Artificial Sequence: Synthetic oligonucleotide
  Target: LAMA2; (-) strand; PAM type: NRG; PAM sequence: AAG
gtcttttttgctttgttata

SEQ ID NO: 94414 - DNA, 20 bp, Artificial Sequence
  Description of Artificial Sequence: Synthetic oligonucleotide
  Target: LAMA2; (-) strand; PAM type: NRG; PAM sequence: AAG
atacaaaacatatttcattt

SEQ ID NO: 94415 - DNA, 20 bp, Artificial Sequence
  Description of Artificial Sequence: Synthetic oligonucleotide
  Target: LAMA2; (-) strand; PAM type: NRG; PAM sequence: CAG
taagaatcacttttatttta

SEQ ID NO: 94416 - DNA, 20 bp, Artificial Sequence
  Description of Artificial Sequence: Synthetic oligonucleotide
  Target: LAMA2; (-) strand; PAM type: NRG; PAM sequence: AAG
actatagcattataacattt

SEQ ID NO: 94417 - DNA, 20 bp, Artificial Sequence
  Description of Artificial Sequence: Synthetic oligonucleotide
  Target: LAMA2; (-) strand; PAM type: NRG; PAM sequence: TAG
tttcaagtatcttaagacta

SEQ ID NO: 94418 - DNA, 20 bp, Artificial Sequence
  Description of Artificial Sequence: Synthetic oligonucleotide
  Target: LAMA2; (-) strand; PAM type: NRG; PAM sequence: AAG
aacatcatttcaagtatctt

SEQ ID NO: 94419 - DNA, 20 bp, Artificial Sequence
  Description of Artificial Sequence: Synthetic oligonucleotide
  Target: LAMA2; (-) strand; PAM type: NRG; PAM sequence: AAG
gacaacaaaaacatcatttc

SEQ ID NO: 94420 - DNA, 20 bp, Artificial Sequence
  Description of Artificial Sequence: Synthetic oligonucleotide
  Target: LAMA2; (-) strand; PAM type: NRG; PAM sequence: AAG
tttaagattcagaagtttaa

SEQ ID NO: 94421 - DNA, 20 bp, Artificial Sequence
  Description of Artificial Sequence: Synthetic oligonucleotide
  Target: LAMA2; (-) strand; PAM type: NRG; PAM sequence: AAG
atgccttttttaagattcag

SEQ ID NO: 94422 - DNA, 20 bp, Artificial Sequence
  Description of Artificial Sequence: Synthetic oligonucleotide
  Target: LAMA2; (-) strand; PAM type: NRG; PAM sequence: CAG
tttatgccttttttaagatt

SEQ ID NO: 94423 - DNA, 20 bp, Artificial Sequence
  Description of Artificial Sequence: Synthetic oligonucleotide
  Target: LAMA2; (-) strand; PAM type: NRG; PAM sequence: AAG
gaaatatttatgcctttttt

SEQ ID NO: 94424 - DNA, 20 bp, Artificial Sequence
  Description of Artificial Sequence: Synthetic oligonucleotide
  Target: LAMA2; (-) strand; PAM type: NRG; PAM sequence: AGG
taagtttaaaaaatggtttg

SEQ ID NO: 94425 - DNA, 20 bp, Artificial Sequence
  Description of Artificial Sequence: Synthetic oligonucleotide
  Target: LAMA2; (-) strand; PAM type: NRG; PAM sequence: GAG
ttaagtttaaaaaatggttt

SEQ ID NO: 94426 - DNA, 20 bp, Artificial Sequence
  Description of Artificial Sequence: Synthetic oligonucleotide
  Target: LAMA2; (-) strand; PAM type: NRG; PAM sequence: TGG
tttgtgttaagtttaaaaaa

SEQ ID NO: 94427 - DNA, 20 bp, Artificial Sequence
  Description of Artificial Sequence: Synthetic oligonucleotide
  Target: LAMA2; (-) strand; PAM type: NRG; PAM sequence: AAG
ctgtgtgccggttttgtgtt

SEQ ID NO: 94428 - DNA, 20 bp, Artificial Sequence
  Description of Artificial Sequence: Synthetic oligonucleotide
  Target: LAMA2; (-) strand; PAM type: NRG; PAM sequence: CGG
tttaatgatttactgtgtgc

SEQ ID NO: 94429 - DNA, 20 bp, Artificial Sequence
  Description of Artificial Sequence: Synthetic oligonucleotide
  Target: LAMA2; (-) strand; PAM type: NRG; PAM sequence: TAG
ttaatctagaaaaatttagt

SEQ ID NO: 94430 - DNA, 20 bp, Artificial Sequence
  Description of Artificial Sequence: Synthetic oligonucleotide
  Target: LAMA2; (-) strand; PAM type: NRG; PAM sequence: TAG
actattaatctagaaaaatt

SEQ ID NO: 94431 - DNA, 20 bp, Artificial Sequence
  Description of Artificial Sequence: Synthetic oligonucleotide
  Target: LAMA2; (-) strand; PAM type: NRG; PAM sequence: TAG
ttttaatgttactattaatc

SEQ ID NO: 94432 - DNA, 20 bp, Artificial Sequence
  Description of Artificial Sequence: Synthetic oligonucleotide
  Target: LAMA2; (-) strand; PAM type: NRG; PAM sequence: TGG
ttcaaaattaatagcacccc

SEQ ID NO: 94433 - DNA, 20 bp, Artificial Sequence
  Description of Artificial Sequence: Synthetic oligonucleotide
  Target: LAMA2; (-) strand; PAM type: NRG; PAM sequence: TAG
tgaggaattttcaaaattaa

SEQ ID NO: 94434 - DNA, 20 bp, Artificial Sequence
  Description of Artificial Sequence: Synthetic oligonucleotide
  Target: LAMA2; (-) strand; PAM type: NRG; PAM sequence: AGG
ttagaactaaaataattttg

SEQ ID NO: 94435 - DNA, 20 bp, Artificial Sequence
  Description of Artificial Sequence: Synthetic oligonucleotide
  Target: LAMA2; (-) strand; PAM type: NRG; PAM sequence: GAG
tttagaactaaaataatttt

SEQ ID NO: 94436 - DNA, 20 bp, Artificial Sequence
  Description of Artificial Sequence: Synthetic oligonucleotide
  Target: LAMA2; (-) strand; PAM type: NRG; PAM sequence: TAG
taagtaatgcatactgactt

SEQ ID NO: 94437 - DNA, 20 bp, Artificial Sequence
  Description of Artificial Sequence: Synthetic oligonucleotide
  Target: LAMA2; (-) strand; PAM type: NRG; PAM sequence: AAG
aaatactattatcccattgt

SEQ ID NO: 94438 - DNA, 20 bp, Artificial Sequence
  Description of Artificial Sequence: Synthetic oligonucleotide
  Target: LAMA2; (-) strand; PAM type: NRG; PAM sequence: GGG
agttctttacagatacatca

SEQ ID NO: 94439 - DNA, 20 bp, Artificial Sequence
  Description of Artificial Sequence: Synthetic oligonucleotide
  Target: LAMA2; (-) strand; PAM type: NRG; PAM sequence: AGG
tagttctttacagatacatc

SEQ ID NO: 94440 - DNA, 20 bp, Artificial Sequence
  Description of Artificial Sequence: Synthetic oligonucleotide
  Target: LAMA2; (-) strand; PAM type: NRG; PAM sequence: CAG
ttagttctttacagatacat

SEQ ID NO: 94441 - DNA, 20 bp, Artificial Sequence
  Description of Artificial Sequence: Synthetic oligonucleotide
  Target: LAMA2; (-) strand; PAM type: NRG; PAM sequence: CAG
aacgctgttttagttcttta

SEQ ID NO: 94442 - DNA, 20 bp, Artificial Sequence
  Description of Artificial Sequence: Synthetic oligonucleotide
  Target: LAMA2; (-) strand; PAM type: NRG; PAM sequence: TAG
ctcaaggtgtaacgctgttt

SEQ ID NO: 94443 - DNA, 20 bp, Artificial Sequence
  Description of Artificial Sequence: Synthetic oligonucleotide
  Target: LAMA2; (-) strand; PAM type: NRG; PAM sequence: AGG
aacttggagttcttgactca

SEQ ID NO: 94444 - DNA, 20 bp, Artificial Sequence
  Description of Artificial Sequence: Synthetic oligonucleotide
  Target: LAMA2; (-) strand; PAM type: NRG; PAM sequence: AAG
gaacttggagttcttgactc

SEQ ID NO: 94445 - DNA, 20 bp, Artificial Sequence
  Description of Artificial Sequence: Synthetic oligonucleotide
  Target: LAMA2; (-) strand; PAM type: NRG; PAM sequence: GAG
cagaacgtgacaggaacttg

SEQ ID NO: 94446 - DNA, 20 bp, Artificial Sequence
  Description of Artificial Sequence: Synthetic oligonucleotide
  Target: LAMA2; (-) strand; PAM type: NRG; PAM sequence: TGG
tccagaacgtgacaggaact

SEQ ID NO: 94447 - DNA, 20 bp, Artificial Sequence
  Description of Artificial Sequence: Synthetic oligonucleotide
  Target: LAMA2; (-) strand; PAM type: NRG; PAM sequence: AGG
aggtgagtccagaacgtgac

SEQ ID NO: 94448 - DNA, 20 bp, Artificial Sequence
  Description of Artificial Sequence: Synthetic oligonucleotide
  Target: LAMA2; (-) strand; PAM type: NRG; PAM sequence: CAG
taggtgagtccagaacgtga

SEQ ID NO: 94449 - DNA, 20 bp, Artificial Sequence
  Description of Artificial Sequence: Synthetic oligonucleotide
  Target: LAMA2; (-) strand; PAM type: NRG; PAM sequence: CAG
ctgtgtcatataggtgagtc

SEQ ID NO: 94450 - DNA, 20 bp, Artificial Sequence
  Description of Artificial Sequence: Synthetic oligonucleotide
  Target: LAMA2; (-) strand; PAM type: NRG; PAM sequence: GAG
gcctgctgtgtcatataggt

SEQ ID NO: 94451 - DNA, 20 bp, Artificial Sequence
  Description of Artificial Sequence: Synthetic oligonucleotide
  Target: LAMA2; (-) strand; PAM type: NRG; PAM sequence: AGG
acatgcctgctgtgtcatat

SEQ ID NO: 94452 - DNA, 20 bp, Artificial Sequence
  Description of Artificial Sequence: Synthetic oligonucleotide
  Target: LAMA2; (-) strand; PAM type: NRG; PAM sequence: TAG
cacatgcctgctgtgtcata

SEQ ID NO: 94453 - DNA, 20 bp, Artificial Sequence
  Description of Artificial Sequence: Synthetic oligonucleotide
  Target: LAMA2; (-) strand; PAM type: NRG; PAM sequence: AAG
aaagaagccatagcttatac

SEQ ID NO: 94454 - DNA, 20 bp, Artificial Sequence
  Description of Artificial Sequence: Synthetic oligonucleotide
  Target: LAMA2; (-) strand; PAM type: NRG; PAM sequence: TAG
actgaaattcaaagaagcca

SEQ ID NO: 94455 - DNA, 20 bp, Artificial Sequence
  Description of Artificial Sequence: Synthetic oligonucleotide
  Target: LAMA2; (-) strand; PAM type: NRG; PAM sequence: AAG
gaagacactgaaattcaaag

SEQ ID NO: 94456 - DNA, 20 bp, Artificial Sequence
  Description of Artificial Sequence: Synthetic oligonucleotide
  Target: LAMA2; (-) strand; PAM type: NRG; PAM sequence: AAG
catgaagacactgaaattca

SEQ ID NO: 94457 - DNA, 20 bp, Artificial Sequence
  Description of Artificial Sequence: Synthetic oligonucleotide
  Target: LAMA2; (-) strand; PAM type: NRG; PAM sequence: AAG
tcattccaattttgagcatg

SEQ ID NO: 94458 - DNA, 20 bp, Artificial Sequence
  Description of Artificial Sequence: Synthetic oligonucleotide
  Target: LAMA2; (-) strand; PAM type: NRG; PAM sequence: GAG
atcatcatcattccaatttt

SEQ ID NO: 94459 - DNA, 20 bp, Artificial Sequence
  Description of Artificial Sequence: Synthetic oligonucleotide
  Target: LAMA2; (-) strand; PAM type: NRG; PAM sequence: TGG
aaaggctttagcatcatgtc

SEQ ID NO: 94460 - DNA, 20 bp, Artificial Sequence
  Description of Artificial Sequence: Synthetic oligonucleotide
  Target: LAMA2; (-) strand; PAM type: NRG; PAM sequence: TAG
gataattcacataaaggctt

SEQ ID NO: 94461 - DNA, 20 bp, Artificial Sequence
  Description of Artificial Sequence: Synthetic oligonucleotide
  Target: LAMA2; (-) strand; PAM type: NRG; PAM sequence: AGG
tgtagggataattcacataa

SEQ ID NO: 94462 - DNA, 20 bp, Artificial Sequence
  Description of Artificial Sequence: Synthetic oligonucleotide
  Target: LAMA2; (-) strand; PAM type: NRG; PAM sequence: AAG
ctgtagggataattcacata

SEQ ID NO: 94463 - DNA, 20 bp, Artificial Sequence
  Description of Artificial Sequence: Synthetic oligonucleotide
  Target: LAMA2; (-) strand; PAM type: NRG; PAM sequence: GGG
taacaactctacaagctgta

SEQ ID NO: 94464 - DNA, 20 bp, Artificial Sequence
  Description of Artificial Sequence: Synthetic oligonucleotide
  Target: LAMA2; (-) strand; PAM type: NRG; PAM sequence: AGG
ataacaactctacaagctgt

SEQ ID NO: 94465 - DNA, 20 bp, Artificial Sequence
  Description of Artificial Sequence: Synthetic oligonucleotide
  Target: LAMA2; (-) strand; PAM type: NRG; PAM sequence: TAG
tataacaactctacaagctg

SEQ ID NO: 94466 - DNA, 20 bp, Artificial Sequence
  Description of Artificial Sequence: Synthetic oligonucleotide
  Target: LAMA2; (-) strand; PAM type: NRG; PAM sequence: AAG
aatccctataacaactctac

SEQ ID NO: 94467 - DNA, 20 bp, Artificial Sequence
  Description of Artificial Sequence: Synthetic oligonucleotide
  Target: LAMA2; (-) strand; PAM type: NRG; PAM sequence: AGG
gatttgttaagtgccctgtt

SEQ ID NO: 94468 - DNA, 20 bp, Artificial Sequence
  Description of Artificial Sequence: Synthetic oligonucleotide
  Target: LAMA2; (-) strand; PAM type: NRG; PAM sequence: TAG
tgatttgttaagtgccctgt

SEQ ID NO: 94469 - DNA, 20 bp, Artificial Sequence
  Description of Artificial Sequence: Synthetic oligonucleotide
  Target: LAMA2; (-) strand; PAM type: NRG; PAM sequence: AAG
agaatgttttctgatttgtt

SEQ ID NO: 94470 - DNA, 20 bp, Artificial Sequence
  Description of Artificial Sequence: Synthetic oligonucleotide
  Target: LAMA2; (-) strand; PAM type: NRG; PAM sequence: CAG
tggacgcctaagttcagtaa

SEQ ID NO: 94471 - DNA, 20 bp, Artificial Sequence
  Description of Artificial Sequence: Synthetic oligonucleotide
  Target: LAMA2; (-) strand; PAM type: NRG; PAM sequence: CAG
gtaacatggacgcctaagtt

SEQ ID NO: 94472 - DNA, 20 bp, Artificial Sequence
  Description of Artificial Sequence: Synthetic oligonucleotide
  Target: LAMA2; (-) strand; PAM type: NRG; PAM sequence: AAG
acatggtaacatggacgcct

SEQ ID NO: 94473 - DNA, 20 bp, Artificial Sequence
  Description of Artificial Sequence: Synthetic oligonucleotide
  Target: LAMA2; (-) strand; PAM type: NRG; PAM sequence: TGG
atataccccacatggtaaca

SEQ ID NO: 94474 - DNA, 20 bp, Artificial Sequence
  Description of Artificial Sequence: Synthetic oligonucleotide
  Target: LAMA2; (-) strand; PAM type: NRG; PAM sequence: TGG
aaataataatataccccaca

SEQ ID NO: 94475 - DNA, 20 bp, Artificial Sequence
  Description of Artificial Sequence: Synthetic oligonucleotide
  Target: LAMA2; (-) strand; PAM type: NRG; PAM sequence: AGG
aactttctaatagtcttaat

SEQ ID NO: 94476 - DNA, 20 bp, Artificial Sequence
  Description of Artificial Sequence: Synthetic oligonucleotide
  Target: LAMA2; (-) strand; PAM type: NRG; PAM sequence: TAG
aaactttctaatagtcttaa

SEQ ID NO: 94477 - DNA, 20 bp, Artificial Sequence
  Description of Artificial Sequence: Synthetic oligonucleotide
  Target: LAMA2; (-) strand; PAM type: NRG; PAM sequence: TAG
tgatcaggaaaactttctaa

SEQ ID NO: 94478 - DNA, 20 bp, Artificial Sequence
  Description of Artificial Sequence: Synthetic oligonucleotide
  Target: LAMA2; (-) strand; PAM type: NRG; PAM sequence: AGG
gagaagagagacctgtgatc

SEQ ID NO: 94479 - DNA, 20 bp, Artificial Sequence
  Description of Artificial Sequence: Synthetic oligonucleotide
  Target: LAMA2; (-) strand; PAM type: NRG; PAM sequence: CAG
agagaagagagacctgtgat

SEQ ID NO: 94480 - DNA, 20 bp, Artificial Sequence
  Description of Artificial Sequence: Synthetic oligonucleotide
  Target: LAMA2; (-) strand; PAM type: NRG; PAM sequence: GAG
gacaggctgcaaagagaaga

SEQ ID NO: 94481 - DNA, 20 bp, Artificial Sequence
  Description of Artificial Sequence: Synthetic oligonucleotide
  Target: LAMA2; (-) strand; PAM type: NRG; PAM sequence: GAG
gcgacaggctgcaaagagaa

SEQ ID NO: 94482 - DNA, 20 bp, Artificial Sequence
  Description of Artificial Sequence: Synthetic oligonucleotide
  Target: LAMA2; (-) strand; PAM type: NRG; PAM sequence: AAG
cagcgacaggctgcaaagag

SEQ ID NO: 94483 - DNA, 20 bp, Artificial Sequence
  Description of Artificial Sequence: Synthetic oligonucleotide
  Target: LAMA2; (-) strand; PAM type: NRG; PAM sequence: GAG
ttacagcgacaggctgcaaa

SEQ ID NO: 94484 - DNA, 20 bp, Artificial Sequence
  Description of Artificial Sequence: Synthetic oligonucleotide
  Target: LAMA2; (-) strand; PAM type: NRG; PAM sequence: AAG
cattacagcgacaggctgca

SEQ ID NO: 94485 - DNA, 20 bp, Artificial Sequence
  Description of Artificial Sequence: Synthetic oligonucleotide
  Target: LAMA2; (-) strand; PAM type: NRG; PAM sequence: AGG
gccaccggcattacagcgac

SEQ ID NO: 94486 - DNA, 20 bp, Artificial Sequence
  Description of Artificial Sequence: Synthetic oligonucleotide
  Target: LAMA2; (-) strand; PAM type: NRG; PAM sequence: CAG
agccaccggcattacagcga

SEQ ID NO: 94487 - DNA, 20 bp, Artificial Sequence
  Description of Artificial Sequence: Synthetic oligonucleotide
  Target: LAMA2; (-) strand; PAM type: NRG; PAM sequence: CAG
agaaagagccaccggcatta

SEQ ID NO: 94488 - DNA, 20 bp, Artificial Sequence
  Description of Artificial Sequence: Synthetic oligonucleotide
  Target: LAMA2; (-) strand; PAM type: NRG; PAM sequence: CGG
aacctcagagaaagagccac

SEQ ID NO: 94489 - DNA, 20 bp, Artificial Sequence
  Description of Artificial Sequence: Synthetic oligonucleotide
  Target: LAMA2; (-) strand; PAM type: NRG; PAM sequence: GAG
tgtggcaaacctcagagaaa

SEQ ID NO: 94490 - DNA, 20 bp, Artificial Sequence
  Description of Artificial Sequence: Synthetic oligonucleotide
  Target: LAMA2; (-) strand; PAM type: NRG; PAM sequence: AAG
actgtggcaaacctcagaga

SEQ ID NO: 94491 - DNA, 20 bp, Artificial Sequence
  Description of Artificial Sequence: Synthetic oligonucleotide
  Target: LAMA2; (-) strand; PAM type: NRG; PAM sequence: GAG
tttgactgtggcaaacctca

SEQ ID NO: 94492 - DNA, 20 bp, Artificial Sequence
  Description of Artificial Sequence: Synthetic oligonucleotide
  Target: LAMA2; (-) strand; PAM type: NRG; PAM sequence: CAG
agtttgactgtggcaaacct

SEQ ID NO: 94493 - DNA, 20 bp, Artificial Sequence
  Description of Artificial Sequence: Synthetic oligonucleotide
  Target: LAMA2; (-) strand; PAM type: NRG; PAM sequence: TGG
cacactgtccagtttgactg

SEQ ID NO: 94494 - DNA, 20 bp, Artificial Sequence
  Description of Artificial Sequence: Synthetic oligonucleotide
  Target: LAMA2; (-) strand; PAM type: NRG; PAM sequence: CAG
ggctctgcactcacactgtc

SEQ ID NO: 94495 - DNA, 20 bp, Artificial Sequence
  Description of Artificial Sequence: Synthetic oligonucleotide
  Target: LAMA2; (-) strand; PAM type: NRG; PAM sequence: TGG
acatctctgaccctgaacgt

SEQ ID NO: 94496 - DNA, 20 bp, Artificial Sequence
  Description of Artificial Sequence: Synthetic oligonucleotide
  Target: LAMA2; (-) strand; PAM type: NRG; PAM sequence: CAG
ggagaaagtaatttatgggt

SEQ ID NO: 94497 - DNA, 20 bp, Artificial Sequence
  Description of Artificial Sequence: Synthetic oligonucleotide
  Target: LAMA2; (-) strand; PAM type: NRG; PAM sequence: GGG
gtaaggagaaagtaatttat

SEQ ID NO: 94498 - DNA, 20 bp, Artificial Sequence
  Description of Artificial Sequence: Synthetic oligonucleotide
  Target: LAMA2; (-) strand; PAM type: NRG; PAM sequence: TGG
tgtaaggagaaagtaattta

SEQ ID NO: 94499 - DNA, 20 bp, Artificial Sequence
  Description of Artificial Sequence: Synthetic oligonucleotide
  Target: LAMA2; (-) strand; PAM type: NRG; PAM sequence: AAG
agtgaaaatctgtaaggaga

SEQ ID NO: 94500 - DNA, 20 bp, Artificial Sequence
  Description of Artificial Sequence: Synthetic oligonucleotide
  Target: LAMA2; (-) strand; PAM type: NRG; PAM sequence: GAG
agccagtgaaaatctgtaag

SEQ ID NO: 94501 - DNA, 20 bp, Artificial Sequence
  Description of Artificial Sequence: Synthetic oligonucleotide
  Target: LAMA2; (-) strand; PAM type: NRG; PAM sequence: AGG
aaagccagtgaaaatctgta

SEQ ID NO: 94502 - DNA, 20 bp, Artificial Sequence
  Description of Artificial Sequence: Synthetic oligonucleotide
  Target: LAMA2; (-) strand; PAM type: NRG; PAM sequence: AAG
aaaagccagtgaaaatctgt

SEQ ID NO: 94503 - DNA, 20 bp, Artificial Sequence
  Description of Artificial Sequence: Synthetic oligonucleotide
  Target: LAMA2; (-) strand; PAM type: NRG; PAM sequence: CAG
caaaacatgtcatgaaaagc

SEQ ID NO: 94504 - DNA, 20 bp, Artificial Sequence
  Description of Artificial Sequence: Synthetic oligonucleotide
  Target: LAMA2; (-) strand; PAM type: NRG; PAM sequence: AAG
tatacaaaacatgtcatgaa

SEQ ID NO: 94505 - DNA, 20 bp, Artificial Sequence
  Description of Artificial Sequence: Synthetic oligonucleotide
  Target: LAMA2; (-) strand; PAM type: NRG; PAM sequence: AGG
accttccttttaatatacga

SEQ ID NO: 94506 - DNA, 20 bp, Artificial Sequence
  Description of Artificial Sequence: Synthetic oligonucleotide
  Target: LAMA2; (-) strand; PAM type: NRG; PAM sequence: AAG
aaccttccttttaatatacg

SEQ ID NO: 94507 - DNA, 20 bp, Artificial Sequence
  Description of Artificial Sequence: Synthetic oligonucleotide
  Target: LAMA2; (-) strand; PAM type: NRG; PAM sequence: TAG
agtcatttcaattgtagaat

SEQ ID NO: 94508 - DNA, 20 bp, Artificial Sequence
  Description of Artificial Sequence: Synthetic oligonucleotide
  Target: LAMA2; (-) strand; PAM type: NRG; PAM sequence: TAG
gatcacagtcatttcaattg

SEQ ID NO: 94509 - DNA, 20 bp, Artificial Sequence
  Description of Artificial Sequence: Synthetic oligonucleotide
  Target: LAMA2; (-) strand; PAM type: NRG; PAM sequence: CAG
aaaaaacttttcactgatca

SEQ ID NO: 94510 - DNA, 20 bp, Artificial Sequence
  Description of Artificial Sequence: Synthetic oligonucleotide
  Target: LAMA2; (-) strand; PAM type: NRG; PAM sequence: TAG
atgtacaatgaattttgttc

SEQ ID NO: 94511 - DNA, 20 bp, Artificial Sequence
  Description of Artificial Sequence: Synthetic oligonucleotide
  Target: LAMA2; (-) strand; PAM type: NRG; PAM sequence: TGG
aaaaaatgtttaaggtcaaa

SEQ ID NO: 94512 - DNA, 20 bp, Artificial Sequence
  Description of Artificial Sequence: Synthetic oligonucleotide
  Target: LAMA2; (-) strand; PAM type: NRG; PAM sequence: AGG
ctgccaaaaaaaaatgttta

SEQ ID NO: 94513 - DNA, 20 bp, Artificial Sequence
  Description of Artificial Sequence: Synthetic oligonucleotide
  Target: LAMA2; (-) strand; PAM type: NRG; PAM sequence: AAG
actgccaaaaaaaaatgttt

SEQ ID NO: 94514 - DNA, 20 bp, Artificial Sequence
  Description of Artificial Sequence: Synthetic oligonucleotide
  Target: LAMA2; (-) strand; PAM type: NRG; PAM sequence: AAG
tttcagaaatgtctgaatta

SEQ ID NO: 94515 - DNA, 20 bp, Artificial Sequence
  Description of Artificial Sequence: Synthetic oligonucleotide
  Target: LAMA2; (-) strand; PAM type: NRG; PAM sequence: CAG
aattcgcctgctatttgttt

SEQ ID NO: 94516 - DNA, 20 bp, Artificial Sequence
  Description of Artificial Sequence: Synthetic oligonucleotide
  Target: LAMA2; (-) strand; PAM type: NRG; PAM sequence: AAG
aaagagtatctccacagatt

SEQ ID NO: 94517 - DNA, 20 bp, Artificial Sequence
  Description of Artificial Sequence: Synthetic oligonucleotide
  Target: LAMA2; (-) strand; PAM type: NRG; PAM sequence: CAG
caaaggaaagagtatctcca

SEQ ID NO: 94518 - DNA, 20 bp, Artificial Sequence
  Description of Artificial Sequence: Synthetic oligonucleotide
  Target: LAMA2; (-) strand; PAM type: NRG; PAM sequence: GAG
aaatgtaaaggcaaaggaaa

SEQ ID NO: 94519 - DNA, 20 bp, Artificial Sequence
  Description of Artificial Sequence: Synthetic oligonucleotide
  Target: LAMA2; (-) strand; PAM type: NRG; PAM sequence: AAG
aaaaatgtaaaggcaaagga

SEQ ID NO: 94520 - DNA, 20 bp, Artificial Sequence
  Description of Artificial Sequence: Synthetic oligonucleotide
  Target: LAMA2; (-) strand; PAM type: NRG; PAM sequence: AGG
tgccaaaaatgtaaaggcaa

SEQ ID NO: 94521 - DNA, 20 bp, Artificial Sequence
  Description of Artificial Sequence: Synthetic oligonucleotide
  Target: LAMA2; (-) strand; PAM type: NRG; PAM sequence: AAG
ctgccaaaaatgtaaaggca

SEQ ID NO: 94522 - DNA, 20 bp, Artificial Sequence
  Description of Artificial Sequence: Synthetic oligonucleotide
  Target: LAMA2; (-) strand; PAM type: NRG; PAM sequence: AGG
ttattctgccaaaaatgtaa

SEQ ID NO: 94523 - DNA, 20 bp, Artificial Sequence
  Description of Artificial Sequence: Synthetic oligonucleotide
  Target: LAMA2; (-) strand; PAM type: NRG; PAM sequence: AAG
tttattctgccaaaaatgta

SEQ ID NO: 94524 - DNA, 20 bp, Artificial Sequence
  Description of Artificial Sequence: Synthetic oligonucleotide
  Target: LAMA2; (-) strand; PAM type: NRG; PAM sequence: GAG
gccaccgcgcccagccccaa

SEQ ID NO: 94525 - DNA, 20 bp, Artificial Sequence
  Description of Artificial Sequence: Synthetic oligonucleotide
  Target: LAMA2; (-) strand; PAM type: NRG; PAM sequence: AAG
gagccaccgcgcccagcccc

SEQ ID NO: 94526 - DNA, 20 bp, Artificial Sequence
  Description of Artificial Sequence: Synthetic oligonucleotide
  Target: LAMA2; (-) strand; PAM type: NRG; PAM sequence: CAG
caggcatgagccaccgcgcc

SEQ ID NO: 94527 - DNA, 20 bp, Artificial Sequence
  Description of Artificial Sequence: Synthetic oligonucleotide
  Target: LAMA2; (-) strand; PAM type: NRG; PAM sequence: GAG
agtgctgggattacaggcat

SEQ ID NO: 94528 - DNA, 20 bp, Artificial Sequence
  Description of Artificial Sequence: Synthetic oligonucleotide
  Target: LAMA2; (-) strand; PAM type: NRG; PAM sequence: AGG
tcccaaagtgctgggattac

SEQ ID NO: 94529 - DNA, 20 bp, Artificial Sequence
  Description of Artificial Sequence: Synthetic oligonucleotide
  Target: LAMA2; (-) strand; PAM type: NRG; PAM sequence: CAG
ctcccaaagtgctgggatta

SEQ ID NO: 94530 - DNA, 20 bp, Artificial Sequence
  Description of Artificial Sequence: Synthetic oligonucleotide
  Target: LAMA2; (-) strand; PAM type: NRG; PAM sequence: GGG
ccttggcctcccaaagtgct

SEQ ID NO: 94531 - DNA, 20 bp, Artificial Sequence
  Description of Artificial Sequence: Synthetic oligonucleotide
  Target: LAMA2; (-) strand; PAM type: NRG; PAM sequence: TGG
gccttggcctcccaaagtgc

SEQ ID NO: 94532 - DNA, 20 bp, Artificial Sequence
  Description of Artificial Sequence: Synthetic oligonucleotide
  Target: LAMA2; (-) strand; PAM type: NRG; PAM sequence: AAG
ccacctgccttggcctccca

SEQ ID NO: 94533 - DNA, 20 bp, Artificial Sequence
  Description of Artificial Sequence: Synthetic oligonucleotide
  Target: LAMA2; (-) strand; PAM type: NRG; PAM sequence: TGG
acctcgtgatccacctgcct

SEQ ID NO: 94534 - DNA, 20 bp, Artificial Sequence
  Description of Artificial Sequence: Synthetic oligonucleotide
  Target: LAMA2; (-) strand; PAM type: NRG; PAM sequence: AGG
ggtgtttcaccatcttggcc

SEQ ID NO: 94535 - DNA, 20 bp, Artificial Sequence
  Description of Artificial Sequence: Synthetic oligonucleotide
  Target: LAMA2; (-) strand; PAM type: NRG; PAM sequence: CAG
tggtgtttcaccatcttggc

SEQ ID NO: 94536 - DNA, 20 bp, Artificial Sequence
  Description of Artificial Sequence: Synthetic oligonucleotide
  Target: LAMA2; (-) strand; PAM type: NRG; PAM sequence: TGG
gagatggtgtttcaccatct

SEQ ID NO: 94537 - DNA, 20 bp, Artificial Sequence
  Description of Artificial Sequence: Synthetic oligonucleotide
  Target: LAMA2; (-) strand; PAM type: NRG; PAM sequence: TGG
tttgtagtttttagcagaga

SEQ ID NO: 94538 - DNA, 20 bp, Artificial Sequence
  Description of Artificial Sequence: Synthetic oligonucleotide
  Target: LAMA2; (-) strand; PAM type: NRG; PAM sequence: GAG
gatttttgtagtttttagca

SEQ ID NO: 94539 - DNA, 20 bp, Artificial Sequence
  Description of Artificial Sequence: Synthetic oligonucleotide
  Target: LAMA2; (-) strand; PAM type: NRG; PAM sequence: CAG
ctgatttttgtagtttttag

SEQ ID NO: 94540 - DNA, 20 bp, Artificial Sequence
  Description of Artificial Sequence: Synthetic oligonucleotide
  Target: LAMA2; (-) strand; PAM type: NRG; PAM sequence: TAG
tggctgatttttgtagtttt

SEQ ID NO: 94541 - DNA, 20 bp, Artificial Sequence
  Description of Artificial Sequence: Synthetic oligonucleotide
  Target: LAMA2; (-) strand; PAM type: NRG; PAM sequence: TAG
ccgtgcctggctgatttttg

SEQ ID NO: 94542 - DNA, 20 bp, Artificial Sequence
  Description of Artificial Sequence: Synthetic oligonucleotide
  Target: LAMA2; (-) strand; PAM type: NRG; PAM sequence: TGG
caggcacctgccaccgtgcc

SEQ ID NO: 94543 - DNA, 20 bp, Artificial Sequence
  Description of Artificial Sequence: Synthetic oligonucleotide
  Target: LAMA2; (-) strand; PAM type: NRG; PAM sequence: AGG
tcctgagtagctgggattac

SEQ ID NO: 94544 - DNA, 20 bp, Artificial Sequence
  Description of Artificial Sequence: Synthetic oligonucleotide
  Target: LAMA2; (-) strand; PAM type: NRG; PAM sequence: CAG
ctcctgagtagctgggatta

SEQ ID NO: 94545 - DNA, 20 bp, Artificial Sequence
  Description of Artificial Sequence: Synthetic oligonucleotide
  Target: LAMA2; (-) strand; PAM type: NRG; PAM sequence: GGG
cctcagcctcctgagtagct

SEQ ID NO: 94546 - DNA, 20 bp, Artificial Sequence
  Description of Artificial Sequence: Synthetic oligonucleotide
  Target: LAMA2; (-) strand; PAM type: NRG; PAM sequence: TGG
gcctcagcctcctgagtagc

SEQ ID NO: 94547 - DNA, 20 bp, Artificial Sequence
  Description of Artificial Sequence: Synthetic oligonucleotide
  Target: LAMA2; (-) strand; PAM type: NRG; PAM sequence: TAG
tcccgcctcagcctcctgag

SEQ ID NO: 94548 - DNA, 20 bp, Artificial Sequence
  Description of Artificial Sequence: Synthetic oligonucleotide
  Target: LAMA2; (-) strand; PAM type: NRG; PAM sequence: GAG
ttctcccgcctcagcctcct

SEQ ID NO: 94549 - DNA, 20 bp, Artificial Sequence
  Description of Artificial Sequence: Synthetic oligonucleotide
  Target: LAMA2; (-) strand; PAM type: NRG; PAM sequence: CAG
ttcaagcgattctcccgcct

SEQ ID NO: 94550 - DNA, 20 bp, Artificial Sequence
  Description of Artificial Sequence: Synthetic oligonucleotide
  Target: LAMA2; (-) strand; PAM type: NRG; PAM sequence: AAG
aacctctgccacccaggttc

SEQ ID NO: 94551 - DNA, 20 bp, Artificial Sequence
  Description of Artificial Sequence: Synthetic oligonucleotide
  Target: LAMA2; (-) strand; PAM type: NRG; PAM sequence: AGG
cactgcaacctctgccaccc

SEQ ID NO: 94552 - DNA, 20 bp, Artificial Sequence
  Description of Artificial Sequence: Synthetic oligonucleotide
  Target: LAMA2; (-) strand; PAM type: NRG; PAM sequence: CAG
tcactgcaacctctgccacc

SEQ ID NO: 94553 - DNA, 20 bp, Artificial Sequence
  Description of Artificial Sequence: Synthetic oligonucleotide
  Target: LAMA2; (-) strand; PAM type: NRG; PAM sequence: CGG
ggagtgcagtggcactatct

SEQ ID NO: 94554 - DNA, 20 bp, Artificial Sequence
  Description of Artificial Sequence: Synthetic oligonucleotide
  Target: LAMA2; (-) strand; PAM type: NRG; PAM sequence: TGG
tcgcccaggctggagtgcag

SEQ ID NO: 94555 - DNA, 20 bp, Artificial Sequence
  Description of Artificial Sequence: Synthetic oligonucleotide
  Target: LAMA2; (-) strand; PAM type: NRG; PAM sequence: CAG
cggtcgcccaggctggagtg

SEQ ID NO: 94556 - DNA, 20 bp, Artificial Sequence
  Description of Artificial Sequence: Synthetic oligonucleotide
  Target: LAMA2; (-) strand; PAM type: NRG; PAM sequence: GAG
tcactcggtcgcccaggctg

SEQ ID NO: 94557 - DNA, 20 bp, Artificial Sequence
  Description of Artificial Sequence: Synthetic oligonucleotide
  Target: LAMA2; (-) strand; PAM type: NRG; PAM sequence: TGG
tctcactcggtcgcccaggc

SEQ ID NO: 94558 - DNA, 20 bp, Artificial Sequence
  Description of Artificial Sequence: Synthetic oligonucleotide
  Target: LAMA2; (-) strand; PAM type: NRG; PAM sequence: AGG
ggagtctcactcggtcgccc

SEQ ID NO: 94559 - DNA, 20 bp, Artificial Sequence
  Description of Artificial Sequence: Synthetic oligonucleotide
  Target: LAMA2; (-) strand; PAM type: NRG; PAM sequence: CAG
tggagtctcactcggtcgcc

SEQ ID NO: 94560 - DNA, 20 bp, Artificial Sequence
  Description of Artificial Sequence: Synthetic oligonucleotide
  Target: LAMA2; (-) strand; PAM type: NRG; PAM sequence: CGG
ttttgagatggagtctcact

SEQ ID NO: 94561 - DNA, 20 bp, Artificial Sequence
  Description of Artificial Sequence: Synthetic oligonucleotide
  Target: LAMA2; (-) strand; PAM type: NRG; PAM sequence: GAG
ttgttttgttttttgagatg

SEQ ID NO: 94562 - DNA, 20 bp, Artificial Sequence
  Description of Artificial Sequence: Synthetic oligonucleotide
  Target: LAMA2; (-) strand; PAM type: NRG; PAM sequence: TGG
gtttgttttgttttttgaga

SEQ ID NO: 94563 - DNA, 20 bp, Artificial Sequence
  Description of Artificial Sequence: Synthetic oligonucleotide
  Target: LAMA2; (-) strand; PAM type: NRG; PAM sequence: GAG
tttggtttgttttgtttttt

SEQ ID NO: 94564 - DNA, 20 bp, Artificial Sequence
  Description of Artificial Sequence: Synthetic oligonucleotide
  Target: LAMA2; (-) strand; PAM type: NRG; PAM sequence: TGG
aagcaaagggagtaacattt

SEQ ID NO: 94565 - DNA, 20 bp, Artificial Sequence
  Description of Artificial Sequence: Synthetic oligonucleotide
  Target: LAMA2; (-) strand; PAM type: NRG; PAM sequence: GAG
tgtttgctaaaaagcaaagg

SEQ ID NO: 94566 - DNA, 20 bp, Artificial Sequence
  Description of Artificial Sequence: Synthetic oligonucleotide
  Target: LAMA2; (-) strand; PAM type: NRG; PAM sequence: GGG
ggtgtttgctaaaaagcaaa

SEQ ID NO: 94567 - DNA, 20 bp, Artificial Sequence
  Description of Artificial Sequence: Synthetic oligonucleotide
  Target: LAMA2; (-) strand; PAM type: NRG; PAM sequence: AGG
aggtgtttgctaaaaagcaa

SEQ ID NO: 94568 - DNA, 20 bp, Artificial Sequence
  Description of Artificial Sequence: Synthetic oligonucleotide
  Target: LAMA2; (-) strand; PAM type: NRG; PAM sequence: AAG
aaggtgtttgctaaaaagca

SEQ ID NO: 94569 - DNA, 20 bp, Artificial Sequence
  Description of Artificial Sequence: Synthetic oligonucleotide
  Target: LAMA2; (-) strand; PAM type: NRG; PAM sequence: AAG
agaagaaggtgtttgctaaa

SEQ ID NO: 94570 - DNA, 20 bp, Artificial Sequence
  Description of Artificial Sequence: Synthetic oligonucleotide
  Target: LAMA2; (-) strand; PAM type: NRG; PAM sequence: AGG
taaatgatggaactagaaga

SEQ ID NO: 94571 - DNA, 20 bp, Artificial Sequence
  Description of Artificial Sequence: Synthetic oligonucleotide
  Target: LAMA2; (-) strand; PAM type: NRG; PAM sequence: AAG
ttaaatgatggaactagaag

SEQ ID NO: 94572 - DNA, 20 bp, Artificial Sequence
  Description of Artificial Sequence: Synthetic oligonucleotide
  Target: LAMA2; (-) strand; PAM type: NRG; PAM sequence: AAG
cttttaaatgatggaactag

SEQ ID NO: 94573 - DNA, 20 bp, Artificial Sequence
  Description of Artificial Sequence: Synthetic oligonucleotide
  Target: LAMA2; (-) strand; PAM type: NRG; PAM sequence: TAG
tagcttttaaatgatggaac

SEQ ID NO: 94574 - DNA, 20 bp, Artificial Sequence
  Description of Artificial Sequence: Synthetic oligonucleotide
  Target: LAMA2; (-) strand; PAM type: NRG; PAM sequence: TGG
aggaagtagcttttaaatga

SEQ ID NO: 94575 - DNA, 20 bp, Artificial Sequence
  Description of Artificial Sequence: Synthetic oligonucleotide
  Target: LAMA2; (-) strand; PAM type: NRG; PAM sequence: TAG
ggtagactgctcacaggaag

SEQ ID NO: 94576 - DNA, 20 bp, Artificial Sequence
  Description of Artificial Sequence: Synthetic oligonucleotide
  Target: LAMA2; (-) strand; PAM type: NRG; PAM sequence: AAG
ttaggtagactgctcacagg

SEQ ID NO: 94577 - DNA, 20 bp, Artificial Sequence
  Description of Artificial Sequence: Synthetic oligonucleotide
  Target: LAMA2; (-) strand; PAM type: NRG; PAM sequence: AGG
ccattaggtagactgctcac

SEQ ID NO: 94578 - DNA, 20 bp, Artificial Sequence
  Description of Artificial Sequence: Synthetic oligonucleotide
  Target: LAMA2; (-) strand; PAM type: NRG; PAM sequence: CAG
tccattaggtagactgctca

SEQ ID NO: 94579 - DNA, 20 bp, Artificial Sequence
  Description of Artificial Sequence: Synthetic oligonucleotide
  Target: LAMA2; (-) strand; PAM type: NRG; PAM sequence: TAG
ctactgaaacttccattagg

SEQ ID NO: 94580 - DNA, 20 bp, Artificial Sequence
  Description of Artificial Sequence: Synthetic oligonucleotide
  Target: LAMA2; (-) strand; PAM type: NRG; PAM sequence: AGG
tctctactgaaacttccatt

SEQ ID NO: 94581 - DNA, 20 bp, Artificial Sequence
  Description of Artificial Sequence: Synthetic oligonucleotide
  Target: LAMA2; (-) strand; PAM type: NRG; PAM sequence: TAG
ttctctactgaaacttccat

SEQ ID NO: 94582 - DNA, 20 bp, Artificial Sequence
  Description of Artificial Sequence: Synthetic oligonucleotide
  Target: LAMA2; (-) strand; PAM type: NRG; PAM sequence: TAG
tttaattgaatattttgttt

SEQ ID NO: 94583 - DNA, 20 bp, Artificial Sequence
  Description of Artificial Sequence: Synthetic oligonucleotide
  Target: LAMA2; (-) strand; PAM type: NRG; PAM sequence: GAG
aatcggtatgttcagggact

SEQ ID NO: 94584 - DNA, 20 bp, Artificial Sequence
  Description of Artificial Sequence: Synthetic oligonucleotide
  Target: LAMA2; (-) strand; PAM type: NRG; PAM sequence: GGG
cagggcaatcggtatgttca

SEQ ID NO: 94585 - DNA, 20 bp, Artificial Sequence
  Description of Artificial Sequence: Synthetic oligonucleotide
  Target: LAMA2; (-) strand; PAM type: NRG; PAM sequence: AGG
gcagggcaatcggtatgttc

SEQ ID NO: 94586 - DNA, 20 bp, Artificial Sequence
  Description of Artificial Sequence: Synthetic oligonucleotide
  Target: LAMA2; (-) strand; PAM type: NRG; PAM sequence: CAG
agcagggcaatcggtatgtt

SEQ ID NO: 94587 - DNA, 20 bp, Artificial Sequence
  Description of Artificial Sequence: Synthetic oligonucleotide
  Target: LAMA2; (-) strand; PAM type: NRG; PAM sequence: CGG
catactgaaagcagggcaat

SEQ ID NO: 94588 - DNA, 20 bp, Artificial Sequence
  Description of Artificial Sequence: Synthetic oligonucleotide
  Target: LAMA2; (-) strand; PAM type: NRG; PAM sequence: GGG
tgcttgccatactgaaagca

SEQ ID NO: 94589 - DNA, 20 bp, Artificial Sequence
  Description of Artificial Sequence: Synthetic oligonucleotide
  Target: LAMA2; (-) strand; PAM type: NRG; PAM sequence: AGG
ttgcttgccatactgaaagc

SEQ ID NO: 94590 - DNA, 20 bp, Artificial Sequence
  Description of Artificial Sequence: Synthetic oligonucleotide
  Target: LAMA2; (-) strand; PAM type: NRG; PAM sequence: CAG
gttgcttgccatactgaaag

SEQ ID NO: 94591 - DNA, 20 bp, Artificial Sequence
  Description of Artificial Sequence: Synthetic oligonucleotide
  Target: LAMA2; (-) strand; PAM type: NRG; PAM sequence: AAG
gaagttgcttgccatactga

SEQ ID NO: 94592 - DNA, 20 bp, Artificial Sequence
  Description of Artificial Sequence: Synthetic oligonucleotide
  Target: LAMA2; (-) strand; PAM type: NRG; PAM sequence: AAG
caccctcatggaggaatctg

SEQ ID NO: 94593 - DNA, 20 bp, Artificial Sequence
  Description of Artificial Sequence: Synthetic oligonucleotide
  Target: LAMA2; (-) strand; PAM type: NRG; PAM sequence: AGG
aaatctgtccaccctcatgg

SEQ ID NO: 94594 - DNA, 20 bp, Artificial Sequence
  Description of Artificial Sequence: Synthetic oligonucleotide
  Target: LAMA2; (-) strand; PAM type: NRG; PAM sequence: GAG
caaatctgtccaccctcatg

SEQ ID NO: 94595 - DNA, 20 bp, Artificial Sequence
  Description of Artificial Sequence: Synthetic oligonucleotide
  Target: LAMA2; (-) strand; PAM type: NRG; PAM sequence: TGG
agcaaatctgtccaccctca

SEQ ID NO: 94596 - DNA, 20 bp, Artificial Sequence
  Description of Artificial Sequence: Synthetic oligonucleotide
  Target: LAMA2; (-) strand; PAM type: NRG; PAM sequence: GAG
gtatttttgtgaaagcgcta

SEQ ID NO: 94597 - DNA, 20 bp, Artificial Sequence
  Description of Artificial Sequence: Synthetic oligonucleotide
  Target: LAMA2; (-) strand; PAM type: NRG; PAM sequence: TAG
atgtatttttgtgaaagcgc

SEQ ID NO: 94598 - DNA, 20 bp, Artificial Sequence
  Description of Artificial Sequence: Synthetic oligonucleotide
  Target: LAMA2; (-) strand; PAM type: NRG; PAM sequence: AAG
aatacaatgtatttttgtga

SEQ ID NO: 94599 - DNA, 20 bp, Artificial Sequence
  Description of Artificial Sequence: Synthetic oligonucleotide
  Target: LAMA2; (-) strand; PAM type: NRG; PAM sequence: TAG
gagaaatgcttgcttctgct

SEQ ID NO: 94600 - DNA, 20 bp, Artificial Sequence
  Description of Artificial Sequence: Synthetic oligonucleotide
  Target: LAMA2; (-) strand; PAM type: NRG; PAM sequence: GAG
gtaaggccagtttgacatcg

SEQ ID NO: 94601 - DNA, 20 bp, Artificial Sequence
  Description of Artificial Sequence: Synthetic oligonucleotide
  Target: LAMA2; (-) strand; PAM type: NRG; PAM sequence: CGG
cagtaaggccagtttgacat

SEQ ID NO: 94602 - DNA, 20 bp, Artificial Sequence
  Description of Artificial Sequence: Synthetic oligonucleotide
  Target: LAMA2; (-) strand; PAM type: NRG; PAM sequence: CAG
caaacttcctacagtaaggc

SEQ ID NO: 94603 - DNA, 20 bp, Artificial Sequence
  Description of Artificial Sequence: Synthetic oligonucleotide
  Target: LAMA2; (-) strand; PAM type: NRG; PAM sequence: AGG
ttttcaaacttcctacagta

SEQ ID NO: 94604 - DNA, 20 bp, Artificial Sequence
  Description of Artificial Sequence: Synthetic oligonucleotide
  Target: LAMA2; (-) strand; PAM type: NRG; PAM sequence: AAG
attttcaaacttcctacagt

SEQ ID NO: 94605 - DNA, 20 bp, Artificial Sequence
  Description of Artificial Sequence: Synthetic oligonucleotide
  Target: LAMA2; (-) strand; PAM type: NRG; PAM sequence: CAG
tgatattttcaaacttccta

SEQ ID NO: 94606 - DNA, 20 bp, Artificial Sequence
  Description of Artificial Sequence: Synthetic oligonucleotide
  Target: LAMA2; (-) strand; PAM type: NRG; PAM sequence: CAG
tattattcaagagacagaag

SEQ ID NO: 94607 - DNA, 20 bp, Artificial Sequence
  Description of Artificial Sequence: Synthetic oligonucleotide
  Target: LAMA2; (-) strand; PAM type: NRG; PAM sequence: AAG
tgatattattcaagagacag

SEQ ID NO: 94608 - DNA, 20 bp, Artificial Sequence
  Description of Artificial Sequence: Synthetic oligonucleotide
  Target: LAMA2; (-) strand; PAM type: NRG; PAM sequence: CAG
caatgatattattcaagaga

SEQ ID NO: 94609 - DNA, 20 bp, Artificial Sequence
  Description of Artificial Sequence: Synthetic oligonucleotide
  Target: LAMA2; (-) strand; PAM type: NRG; PAM sequence: GAG
agagcaatgatattattcaa

SEQ ID NO: 94610 - DNA, 20 bp, Artificial Sequence
  Description of Artificial Sequence: Synthetic oligonucleotide
  Target: LAMA2; (-) strand; PAM type: NRG; PAM sequence: AAG
acagagcaatgatattattc

SEQ ID NO: 94611 - DNA, 20 bp, Artificial Sequence
  Description of Artificial Sequence: Synthetic oligonucleotide
  Target: LAMA2; (-) strand; PAM type: NRG; PAM sequence: GAG
aataaaataaaaacaaaaca

SEQ ID NO: 94612 - DNA, 20 bp, Artificial Sequence
  Description of Artificial Sequence: Synthetic oligonucleotide
  Target: LAMA2; (-) strand; PAM type: NRG; PAM sequence: CAG
aaaataaaataaaaacaaaa

SEQ ID NO: 94613 - DNA, 20 bp, Artificial Sequence
  Description of Artificial Sequence: Synthetic oligonucleotide
  Target: LAMA2; (-) strand; PAM type: NRG; PAM sequence: GGG
tctggatcccgccacatatt

SEQ ID NO: 94614 - DNA, 20 bp, Artificial Sequence
  Description of Artificial Sequence: Synthetic oligonucleotide
  Target: LAMA2; (-) strand; PAM type: NRG; PAM sequence: TGG
ctctggatcccgccacatat

SEQ ID NO: 94615 - DNA, 20 bp, Artificial Sequence
  Description of Artificial Sequence: Synthetic oligonucleotide
  Target: LAMA2; (-) strand; PAM type: NRG; PAM sequence: TGG
agcacacagaatcgcttctc

SEQ ID NO: 94616 - DNA, 20 bp, Artificial Sequence
  Description of Artificial Sequence: Synthetic oligonucleotide
  Target: LAMA2; (-) strand; PAM type: NRG; PAM sequence: CAG
gatcgcagtcacatagcaca

SEQ ID NO: 94617 - DNA, 20 bp, Artificial Sequence
  Description of Artificial Sequence: Synthetic oligonucleotide
  Target: LAMA2; (-) strand; PAM type: NRG; PAM sequence: TAG
ccaacgggatcgcagtcaca

SEQ ID NO: 94618 - DNA, 20 bp, Artificial Sequence
  Description of Artificial Sequence: Synthetic oligonucleotide
  Target: LAMA2; (-) strand; PAM type: NRG; PAM sequence: CAG
acacagagccaacgggatcg

SEQ ID NO: 94619 - DNA, 20 bp, Artificial Sequence
  Description of Artificial Sequence: Synthetic oligonucleotide
  Target: LAMA2; (-) strand; PAM type: NRG; PAM sequence: GGG
tgcggtgacacagagccaac

SEQ ID NO: 94620 - DNA, 20 bp, Artificial Sequence
  Description of Artificial Sequence: Synthetic oligonucleotide
  Target: LAMA2; (-) strand; PAM type: NRG; PAM sequence: CGG
ttgcggtgacacagagccaa

SEQ ID NO: 94621 - DNA, 20 bp, Artificial Sequence
  Description of Artificial Sequence: Synthetic oligonucleotide
  Target: LAMA2; (-) strand; PAM type: NRG; PAM sequence: GAG
tatcacattgcggtgacaca

SEQ ID NO: 94622 - DNA, 20 bp, Artificial Sequence
  Description of Artificial Sequence: Synthetic oligonucleotide
  Target: LAMA2; (-) strand; PAM type: NRG; PAM sequence: CAG
aatatcacattgcggtgaca

SEQ ID NO: 94623 - DNA, 20 bp, Artificial Sequence
  Description of Artificial Sequence: Synthetic oligonucleotide
  Target: LAMA2; (-) strand; PAM type: NRG; PAM sequence: CGG
cttcctgtaatatcacattg

SEQ ID NO: 94624 - DNA, 20 bp, Artificial Sequence
  Description of Artificial Sequence: Synthetic oligonucleotide
  Target: LAMA2; (-) strand; PAM type: NRG; PAM sequence: CAG
tccctacgaagcctgattta

SEQ ID NO: 94625 - DNA, 20 bp, Artificial Sequence
  Description of Artificial Sequence: Synthetic oligonucleotide
  Target: LAMA2; (-) strand; PAM type: NRG; PAM sequence: AAG
ggttgcactgtttccctacg

SEQ ID NO: 94626 - DNA, 20 bp, Artificial Sequence
  Description of Artificial Sequence: Synthetic oligonucleotide
  Target: LAMA2; (-) strand; PAM type: NRG; PAM sequence: AGG
gttggtgcacctgcctgccg

SEQ ID NO: 94627 - DNA, 20 bp, Artificial Sequence
  Description of Artificial Sequence: Synthetic oligonucleotide
  Target: LAMA2; (-) strand; PAM type: NRG; PAM sequence: GAG
tgttggtgcacctgcctgcc

SEQ ID NO: 94628 - DNA, 20 bp, Artificial Sequence
  Description of Artificial Sequence: Synthetic oligonucleotide
  Target: LAMA2; (-) strand; PAM type: NRG; PAM sequence: TGG
tccgcggctgctcctcctgt

SEQ ID NO: 94629 - DNA, 20 bp, Artificial Sequence
  Description of Artificial Sequence: Synthetic oligonucleotide
  Target: LAMA2; (-) strand; PAM type: NRG; PAM sequence: CGG
agcacccgttgcgctctccg

SEQ ID NO: 94630 - DNA, 20 bp, Artificial Sequence
  Description of Artificial Sequence: Synthetic oligonucleotide
  Target: LAMA2; (-) strand; PAM type: NRG; PAM sequence: CAG
gcccacctctgaggagaacc

SEQ ID NO: 94631 - DNA, 20 bp, Artificial Sequence
  Description of Artificial Sequence: Synthetic oligonucleotide
  Target: LAMA2; (-) strand; PAM type: NRG; PAM sequence: GAG
gccgatagcccacctctgag

SEQ ID NO: 94632 - DNA, 20 bp, Artificial Sequence
  Description of Artificial Sequence: Synthetic oligonucleotide
  Target: LAMA2; (-) strand; PAM type: NRG; PAM sequence: AGG
ctgccgatagcccacctctg

SEQ ID NO: 94633 - DNA, 20 bp, Artificial Sequence
  Description of Artificial Sequence: Synthetic oligonucleotide
  Target: LAMA2; (-) strand; PAM type: NRG; PAM sequence: GAG
gctgccgatagcccacctct

SEQ ID NO: 94634 - DNA, 20 bp, Artificial Sequence
  Description of Artificial Sequence: Synthetic oligonucleotide
  Target: LAMA2; (-) strand; PAM type: NRG; PAM sequence: TAG
gcacccgctggagctgccga

SEQ ID NO: 94635 - DNA, 20 bp, Artificial Sequence
  Description of Artificial Sequence: Synthetic oligonucleotide
  Target: LAMA2; (-) strand; PAM type: NRG; PAM sequence: GAG
ctccccgagggcacccgctg

SEQ ID NO: 94636 - DNA, 20 bp, Artificial Sequence
  Description of Artificial Sequence: Synthetic oligonucleotide
  Target: LAMA2; (-) strand; PAM type: NRG; PAM sequence: TGG
ggctccccgagggcacccgc

SEQ ID NO: 94637 - DNA, 20 bp, Artificial Sequence
  Description of Artificial Sequence: Synthetic oligonucleotide
  Target: LAMA2; (-) strand; PAM type: NRG; PAM sequence: GGG
gggcccgataggctccccga

SEQ ID NO: 94638 - DNA, 20 bp, Artificial Sequence
  Description of Artificial Sequence: Synthetic oligonucleotide
  Target: LAMA2; (-) strand; PAM type: NRG; PAM sequence: AGG
ggggcccgataggctccccg

SEQ ID NO: 94639 - DNA, 20 bp, Artificial Sequence
  Description of Artificial Sequence: Synthetic oligonucleotide
  Target: LAMA2; (-) strand; PAM type: NRG; PAM sequence: GAG
tggggcccgataggctcccc

SEQ ID NO: 94640 - DNA, 20 bp, Artificial Sequence
  Description of Artificial Sequence: Synthetic oligonucleotide
  Target: LAMA2; (-) strand; PAM type: NRG; PAM sequence: AGG
taccggagctggggcccgat

SEQ ID NO: 94641 - DNA, 20 bp, Artificial Sequence
  Description of Artificial Sequence: Synthetic oligonucleotide
  Target: LAMA2; (-) strand; PAM type: NRG; PAM sequence: TAG
ttaccggagctggggcccga

SEQ ID NO: 94642 - DNA, 20 bp, Artificial Sequence
  Description of Artificial Sequence: Synthetic oligonucleotide
  Target: LAMA2; (-) strand; PAM type: NRG; PAM sequence: GGG
ctctgggattaccggagctg

SEQ ID NO: 94643 - DNA, 20 bp, Artificial Sequence
  Description of Artificial Sequence: Synthetic oligonucleotide
  Target: LAMA2; (-) strand; PAM type: NRG; PAM sequence: GGG
cctctgggattaccggagct

SEQ ID NO: 94644 - DNA, 20 bp, Artificial Sequence
  Description of Artificial Sequence: Synthetic oligonucleotide
  Target: LAMA2; (-) strand; PAM type: NRG; PAM sequence: TGG
gcctctgggattaccggagc

SEQ ID NO: 94645 - DNA, 20 bp, Artificial Sequence
  Description of Artificial Sequence: Synthetic oligonucleotide
  Target: LAMA2; (-) strand; PAM type: NRG; PAM sequence: GAG
cagcgcctctgggattaccg

SEQ ID NO: 94646 - DNA, 20 bp, Artificial Sequence
  Description of Artificial Sequence: Synthetic oligonucleotide
  Target: LAMA2; (-) strand; PAM type: NRG; PAM sequence: CGG
tgcagcgcctctgggattac

SEQ ID NO: 94647 - DNA, 20 bp, Artificial Sequence
  Description of Artificial Sequence: Synthetic oligonucleotide
  Target: LAMA2; (-) strand; PAM type: NRG; PAM sequence: GGG
atgagccatgcagcgcctct

SEQ ID NO: 94648 - DNA, 20 bp, Artificial Sequence
  Description of Artificial Sequence: Synthetic oligonucleotide
  Target: LAMA2; (-) strand; PAM type: NRG; PAM sequence: TGG
catgagccatgcagcgcctc

SEQ ID NO: 94649 - DNA, 20 bp, Artificial Sequence
  Description of Artificial Sequence: Synthetic oligonucleotide
  Target: LAMA2; (-) strand; PAM type: NRG; PAM sequence: CAG
atgcagaggcatgagccatg

SEQ ID NO: 94650 - DNA, 20 bp, Artificial Sequence
  Description of Artificial Sequence: Synthetic oligonucleotide
  Target: LAMA2; (-) strand; PAM type: NRG; PAM sequence: GAG
aacacaacatgcagaggcat

SEQ ID NO: 94651 - DNA, 20 bp, Artificial Sequence
  Description of Artificial Sequence: Synthetic oligonucleotide
  Target: LAMA2; (-) strand; PAM type: NRG; PAM sequence: AGG
acacagaacacaacatgcag

SEQ ID NO: 94652 - DNA, 20 bp, Artificial Sequence
  Description of Artificial Sequence: Synthetic oligonucleotide
  Target: LAMA2; (-) strand; PAM type: NRG; PAM sequence: GAG
cacacagaacacaacatgca

SEQ ID NO: 94653 - DNA, 20 bp, Artificial Sequence
  Description of Artificial Sequence: Synthetic oligonucleotide
  Target: LAMA2; (-) strand; PAM type: NRG; PAM sequence: CAG
agcacacagaacacaacatg

SEQ ID NO: 94654 - DNA, 20 bp, Artificial Sequence
  Description of Artificial Sequence: Synthetic oligonucleotide
  Target: LAMA2; (-) strand; PAM type: NRG; PAM sequence: CAG
ggaacttcagccacagcaca

SEQ ID NO: 94655 - DNA, 20 bp, Artificial Sequence
  Description of Artificial Sequence: Synthetic oligonucleotide
  Target: LAMA2; (-) strand; PAM type: NRG; PAM sequence: CAG
ccaccagggaacttcagcca

SEQ ID NO: 94656 - DNA, 20 bp, Artificial Sequence
  Description of Artificial Sequence: Synthetic oligonucleotide
  Target: LAMA2; (-) strand; PAM type: NRG; PAM sequence: CAG
aaaatgccaccagggaactt

SEQ ID NO: 94657 - DNA, 20 bp, Artificial Sequence
  Description of Artificial Sequence: Synthetic oligonucleotide
  Target: LAMA2; (-) strand; PAM type: NRG; PAM sequence: GGG
tatttggtaaaatgccacca

SEQ ID NO: 94658 - DNA, 20 bp, Artificial Sequence
  Description of Artificial Sequence: Synthetic oligonucleotide
  Target: LAMA2; (-) strand; PAM type: NRG; PAM sequence: AGG
ttatttggtaaaatgccacc

SEQ ID NO: 94659 - DNA, 20 bp, Artificial Sequence
  Description of Artificial Sequence: Synthetic oligonucleotide
  Target: LAMA2; (-) strand; PAM type: NRG; PAM sequence: CAG
gttatttggtaaaatgccac

SEQ ID NO: 94660 - DNA, 20 bp, Artificial Sequence
  Description of Artificial Sequence: Synthetic oligonucleotide
  Target: LAMA2; (-) strand; PAM type: NRG; PAM sequence: TGG
cacacttagcaactgttatt

SEQ ID NO: 94661 - DNA, 20 bp, Artificial Sequence
  Description of Artificial Sequence: Synthetic oligonucleotide
  Target: LAMA2; (-) strand; PAM type: NRG; PAM sequence: TAG
gcatttgcaatttgcacact

SEQ ID NO: 94662 - DNA, 20 bp, Artificial Sequence
  Description of Artificial Sequence: Synthetic oligonucleotide
  Target: LAMA2; (-) strand; PAM type: NRG; PAM sequence: AGG
aaaagggcaagggttcaatt

SEQ ID NO: 94663 - DNA, 20 bp, Artificial Sequence
  Description of Artificial Sequence: Synthetic oligonucleotide
  Target: LAMA2; (-) strand; PAM type: NRG; PAM sequence: TAG
taaaagggcaagggttcaat

SEQ ID NO: 94664 - DNA, 20 bp, Artificial Sequence
  Description of Artificial Sequence: Synthetic oligonucleotide
  Target: LAMA2; (-) strand; PAM type: NRG; PAM sequence: GGG
ggttatttttaaaagggcaa

SEQ ID NO: 94665 - DNA, 20 bp, Artificial Sequence
  Description of Artificial Sequence: Synthetic oligonucleotide
  Target: LAMA2; (-) strand; PAM type: NRG; PAM sequence: AGG
tggttatttttaaaagggca

SEQ ID NO: 94666 - DNA, 20 bp, Artificial Sequence
  Description of Artificial Sequence: Synthetic oligonucleotide
  Target: LAMA2; (-) strand; PAM type: NRG; PAM sequence: AAG
atggttatttttaaaagggc

SEQ ID NO: 94667 - DNA, 20 bp, Artificial Sequence
  Description of Artificial Sequence: Synthetic oligonucleotide
  Target: LAMA2; (-) strand; PAM type: NRG; PAM sequence: GGG
acggatggttatttttaaaa

SEQ ID NO: 94668 - DNA, 20 bp, Artificial Sequence
  Description of Artificial Sequence: Synthetic oligonucleotide
  Target: LAMA2; (-) strand; PAM type: NRG; PAM sequence: AGG
tacggatggttatttttaaa

SEQ ID NO: 94669 - DNA, 20 bp, Artificial Sequence
  Description of Artificial Sequence: Synthetic oligonucleotide
  Target: LAMA2; (-) strand; PAM type: NRG; PAM sequence: AAG
atacggatggttatttttaa

SEQ ID NO: 94670 - DNA, 20 bp, Artificial Sequence
  Description of Artificial Sequence: Synthetic oligonucleotide
  Target: LAMA2; (-) strand; PAM type: NRG; PAM sequence: TGG
tgctttttaaagcatacgga

SEQ ID NO: 94671 - DNA, 20 bp, Artificial Sequence
  Description of Artificial Sequence: Synthetic oligonucleotide
  Target: LAMA2; (-) strand; PAM type: NRG; PAM sequence: CGG
aatatgctttttaaagcata

SEQ ID NO: 94672 - DNA, 20 bp, Artificial Sequence
  Description of Artificial Sequence: Synthetic oligonucleotide
  Target: LAMA2; (-) strand; PAM type: NRG; PAM sequence: AAG
gaacttgaatatgcttttta

SEQ ID NO: 94673 - DNA, 20 bp, Artificial Sequence
  Description of Artificial Sequence: Synthetic oligonucleotide
  Target: LAMA2; (-) strand; PAM type: NRG; PAM sequence: AAG
ttgaaagtttggttaattga

SEQ ID NO: 94674 - DNA, 20 bp, Artificial Sequence
  Description of Artificial Sequence: Synthetic oligonucleotide
  Target: LAMA2; (-) strand; PAM type: NRG; PAM sequence: TGG
ttcatggttaattgaaagtt

SEQ ID NO: 94675 - DNA, 20 bp, Artificial Sequence
  Description of Artificial Sequence: Synthetic oligonucleotide
  Target: LAMA2; (-) strand; PAM type: NRG; PAM sequence: AAG
acatattcatggttaattga

SEQ ID NO: 94676 - DNA, 20 bp, Artificial Sequence
  Description of Artificial Sequence: Synthetic oligonucleotide
  Target: LAMA2; (-) strand; PAM type: NRG; PAM sequence: TGG
atttgatttccacatattca

SEQ ID NO: 94677 - DNA, 20 bp, Artificial Sequence
  Description of Artificial Sequence: Synthetic oligonucleotide
  Target: LAMA2; (-) strand; PAM type: NRG; PAM sequence: TAG
agattataggttctctcaag

SEQ ID NO: 94678 - DNA, 20 bp, Artificial Sequence
  Description of Artificial Sequence: Synthetic oligonucleotide
  Target: LAMA2; (-) strand; PAM type: NRG; PAM sequence: AAG
ctaagattataggttctctc

SEQ ID NO: 94679 - DNA, 20 bp, Artificial Sequence
  Description of Artificial Sequence: Synthetic oligonucleotide
  Target: LAMA2; (-) strand; PAM type: NRG; PAM sequence: AGG
tcttccatttctaagattat

SEQ ID NO: 94680 - DNA, 20 bp, Artificial Sequence
  Description of Artificial Sequence: Synthetic oligonucleotide
  Target: LAMA2; (-) strand; PAM type: NRG; PAM sequence: TAG
ctcttccatttctaagatta

SEQ ID NO: 94681 - DNA, 20 bp, Artificial Sequence
  Description of Artificial Sequence: Synthetic oligonucleotide
  Target: LAMA2; (-) strand; PAM type: NRG; PAM sequence: AAG
ctgaagtctcttccatttct

SEQ ID NO: 94682 - DNA, 20 bp, Artificial Sequence
  Description of Artificial Sequence: Synthetic oligonucleotide
  Target: LAMA2; (-) strand; PAM type: NRG; PAM sequence: AAG
ctttccccaaaggttgcctg

SEQ ID NO: 94683 - DNA, 20 bp, Artificial Sequence
  Description of Artificial Sequence: Synthetic oligonucleotide
  Target: LAMA2; (-) strand; PAM type: NRG; PAM sequence: AGG
ttaaagttagctttccccaa

SEQ ID NO: 94684 - DNA, 20 bp, Artificial Sequence
  Description of Artificial Sequence: Synthetic oligonucleotide
  Target: LAMA2; (-) strand; PAM type: NRG; PAM sequence: AAG
attaaagttagctttcccca

SEQ ID NO: 94685 - DNA, 20 bp, Artificial Sequence
  Description of Artificial Sequence: Synthetic oligonucleotide
  Target: LAMA2; (-) strand; PAM type: NRG; PAM sequence: TAG
atttgttcatttattaaagt

SEQ ID NO: 94686 - DNA, 20 bp, Artificial Sequence
  Description of Artificial Sequence: Synthetic oligonucleotide
  Target: LAMA2; (-) strand; PAM type: NRG; PAM sequence: AAG
cttcatttgttcatttatta

SEQ ID NO: 94687 - DNA, 20 bp, Artificial Sequence
  Description of Artificial Sequence: Synthetic oligonucleotide
  Target: LAMA2; (-) strand; PAM type: NRG; PAM sequence: TAG
ggacaaatcaatttctctgc

SEQ ID NO: 94688 - DNA, 20 bp, Artificial Sequence
  Description of Artificial Sequence: Synthetic oligonucleotide
  Target: LAMA2; (-) strand; PAM type: NRG; PAM sequence: TGG
ataaatgggctgagttttct

SEQ ID NO: 94689 - DNA, 20 bp, Artificial Sequence
  Description of Artificial Sequence: Synthetic oligonucleotide
  Target: LAMA2; (-) strand; PAM type: NRG; PAM sequence: GAG
aaatgcctgataaatgggct

SEQ ID NO: 94690 - DNA, 20 bp, Artificial Sequence
  Description of Artificial Sequence: Synthetic oligonucleotide
  Target: LAMA2; (-) strand; PAM type: NRG; PAM sequence: GGG
tgatgaaatgcctgataaat

SEQ ID NO: 94691 - DNA, 20 bp, Artificial Sequence
  Description of Artificial Sequence: Synthetic oligonucleotide
  Target: LAMA2; (-) strand; PAM type: NRG; PAM sequence: TGG
atgatgaaatgcctgataaa

SEQ ID NO: 94692 - DNA, 20 bp, Artificial Sequence
  Description of Artificial Sequence: Synthetic oligonucleotide
  Target: LAMA2; (-) strand; PAM type: NRG; PAM sequence: TGG
acacataagcacaattgatg

SEQ ID NO: 94693 - DNA, 20 bp, Artificial Sequence
  Description of Artificial Sequence: Synthetic oligonucleotide
  Target: LAMA2; (-) strand; PAM type: NRG; PAM sequence: AAG
cttgcatttgttgtacacat

SEQ ID NO: 94694 - DNA, 20 bp, Artificial Sequence
  Description of Artificial Sequence: Synthetic oligonucleotide
  Target: LAMA2; (-) strand; PAM type: NRG; PAM sequence: TAG
tttgggtatttgtccattta

SEQ ID NO: 94695 - DNA, 20 bp, Artificial Sequence
  Description of Artificial Sequence: Synthetic oligonucleotide
  Target: LAMA2; (-) strand; PAM type: NRG; PAM sequence: GGG
gaaacaactttccccgtttt

SEQ ID NO: 94696 - DNA, 20 bp, Artificial Sequence
  Description of Artificial Sequence: Synthetic oligonucleotide
  Target: LAMA2; (-) strand; PAM type: NRG; PAM sequence: TGG
agaaacaactttccccgttt

SEQ ID NO: 94697 - DNA, 20 bp, Artificial Sequence
  Description of Artificial Sequence: Synthetic oligonucleotide
  Target: LAMA2; (-) strand; PAM type: NRG; PAM sequence: TAG
gagaaccacacttttgtaat

SEQ ID NO: 94698 - DNA, 20 bp, Artificial Sequence
  Description of Artificial Sequence: Synthetic oligonucleotide
  Target: LAMA2; (-) strand; PAM type: NRG; PAM sequence: GAG
tttgttttgtcctgtgatat

SEQ ID NO: 94699 - DNA, 20 bp, Artificial Sequence
  Description of Artificial Sequence: Synthetic oligonucleotide
  Target: LAMA2; (-) strand; PAM type: NRG; PAM sequence: CAG
tccctctcttccttcttccc

SEQ ID NO: 94700 - DNA, 20 bp, Artificial Sequence
  Description of Artificial Sequence: Synthetic oligonucleotide
  Target: LAMA2; (-) strand; PAM type: NRG; PAM sequence: GGG
actcttctgcagctcagcct

SEQ ID NO: 94701 - DNA, 20 bp, Artificial Sequence
  Description of Artificial Sequence: Synthetic oligonucleotide
  Target: LAMA2; (-) strand; PAM type: NRG; PAM sequence: TGG
tactcttctgcagctcagcc

SEQ ID NO: 94702 - DNA, 20 bp, Artificial Sequence
  Description of Artificial Sequence: Synthetic oligonucleotide
  Target: LAMA2; (-) strand; PAM type: NRG; PAM sequence: CAG
tctcctactcttctgcagct

SEQ ID NO: 94703 - DNA, 20 bp, Artificial Sequence
  Description of Artificial Sequence: Synthetic oligonucleotide
  Target: LAMA2; (-) strand; PAM type: NRG; PAM sequence: CAG
tcttgtctcctactcttctg

SEQ ID NO: 94704 - DNA, 20 bp, Artificial Sequence
  Description of Artificial Sequence: Synthetic oligonucleotide
  Target: LAMA2; (-) strand; PAM type: NRG; PAM sequence: AAG
ggtcctgactctatactggt

SEQ ID NO: 94705 - DNA, 20 bp, Artificial Sequence
  Description of Artificial Sequence: Synthetic oligonucleotide
  Target: LAMA2; (-) strand; PAM type: NRG; PAM sequence: TGG
tacaggtcctgactctatac

SEQ ID NO: 94706 - DNA, 20 bp, Artificial Sequence
  Description of Artificial Sequence: Synthetic oligonucleotide
  Target: LAMA2; (-) strand; PAM type: NRG; PAM sequence: AGG
ccctatcctcaattctctac

SEQ ID NO: 94707 - DNA, 20 bp, Artificial Sequence
  Description of Artificial Sequence: Synthetic oligonucleotide
  Target: LAMA2; (-) strand; PAM type: NRG; PAM sequence: CAG
gccctatcctcaattctcta

SEQ ID NO: 94708 - DNA, 20 bp, Artificial Sequence
  Description of Artificial Sequence: Synthetic oligonucleotide
  Target: LAMA2; (-) strand; PAM type: NRG; PAM sequence: AAG
aaaatgtgtgataatgagcc

SEQ ID NO: 94709 - DNA, 20 bp, Artificial Sequence
  Description of Artificial Sequence: Synthetic oligonucleotide
  Target: LAMA2; (-) strand; PAM type: NRG; PAM sequence: GAG
tttaaaaaatgtgtgataat

SEQ ID NO: 94710 - DNA, 20 bp, Artificial Sequence
  Description of Artificial Sequence: Synthetic oligonucleotide
  Target: LAMA2; (-) strand; PAM type: NRG; PAM sequence: CAG
ggccaggatttgatctaagg

SEQ ID NO: 94711 - DNA, 20 bp, Artificial Sequence
  Description of Artificial Sequence: Synthetic oligonucleotide
  Target: LAMA2; (-) strand; PAM type: NRG; PAM sequence: AGG
tgaggccaggatttgatcta

SEQ ID NO: 94712 - DNA, 20 bp, Artificial Sequence
  Description of Artificial Sequence: Synthetic oligonucleotide
  Target: LAMA2; (-) strand; PAM type: NRG; PAM sequence: AAG
atgaggccaggatttgatct

SEQ ID NO: 94713 - DNA, 20 bp, Artificial Sequence
  Description of Artificial Sequence: Synthetic oligonucleotide
  Target: LAMA2; (-) strand; PAM type: NRG; PAM sequence: AGG
agctaggaagtaatgaggcc

SEQ ID NO: 94714 - DNA, 20 bp, Artificial Sequence
  Description of Artificial Sequence: Synthetic oligonucleotide
  Target: LAMA2; (-) strand; PAM type: NRG; PAM sequence: CAG
tagctaggaagtaatgaggc

SEQ ID NO: 94715 - DNA, 20 bp, Artificial Sequence
  Description of Artificial Sequence: Synthetic oligonucleotide
  Target: LAMA2; (-) strand; PAM type: NRG; PAM sequence: AGG
tttatagctaggaagtaatg

SEQ ID NO: 94716 - DNA, 20 bp, Artificial Sequence
  Description of Artificial Sequence: Synthetic oligonucleotide
  Target: LAMA2; (-) strand; PAM type: NRG; PAM sequence: GAG
atttatagctaggaagtaat

SEQ ID NO: 94717 - DNA, 20 bp, Artificial Sequence
  Description of Artificial Sequence: Synthetic oligonucleotide
  Target: LAMA2; (-) strand; PAM type: NRG; PAM sequence: AAG
tcaaggaatttatagctagg

SEQ ID NO: 94718 - DNA, 20 bp, Artificial Sequence
  Description of Artificial Sequence: Synthetic oligonucleotide
  Target: LAMA2; (-) strand; PAM type: NRG; PAM sequence: AGG
gattcaaggaatttatagct

SEQ ID NO: 94719 - DNA, 20 bp, Artificial Sequence
  Description of Artificial Sequence: Synthetic oligonucleotide
  Target: LAMA2; (-) strand; PAM type: NRG; PAM sequence: TAG
agattcaaggaatttatagc

SEQ ID NO: 94720 - DNA, 20 bp, Artificial Sequence
  Description of Artificial Sequence: Synthetic oligonucleotide
  Target: LAMA2; (-) strand; PAM type: NRG; PAM sequence: TAG
agaaagattcaaggaattta

SEQ ID NO: 94721 - DNA, 20 bp, Artificial Sequence
  Description of Artificial Sequence: Synthetic oligonucleotide
  Target: LAMA2; (-) strand; PAM type: NRG; PAM sequence: AGG
ctgaattacagaaagattca

SEQ ID NO: 94722 - DNA, 20 bp, Artificial Sequence
  Description of Artificial Sequence: Synthetic oligonucleotide
  Target: LAMA2; (-) strand; PAM type: NRG; PAM sequence: AAG
gctgaattacagaaagattc

SEQ ID NO: 94723 - DNA, 20 bp, Artificial Sequence
  Description of Artificial Sequence: Synthetic oligonucleotide
  Target: LAMA2; (-) strand; PAM type: NRG; PAM sequence: AAG
tgaagaagctgaattacaga

SEQ ID NO: 94724 - DNA, 20 bp, Artificial Sequence
  Description of Artificial Sequence: Synthetic oligonucleotide
  Target: LAMA2; (-) strand; PAM type: NRG; PAM sequence: CAG
cagatgaagaagctgaatta

SEQ ID NO: 94725 - DNA, 20 bp, Artificial Sequence
  Description of Artificial Sequence: Synthetic oligonucleotide
  Target: LAMA2; (-) strand; PAM type: NRG; PAM sequence: AAG
ggatcttactacagatgaag

SEQ ID NO: 94726 - DNA, 20 bp, Artificial Sequence
  Description of Artificial Sequence: Synthetic oligonucleotide
  Target: LAMA2; (-) strand; PAM type: NRG; PAM sequence: AAG
agtggatcttactacagatg

SEQ ID NO: 94727 - DNA, 20 bp, Artificial Sequence
  Description of Artificial Sequence: Synthetic oligonucleotide
  Target: LAMA2; (-) strand; PAM type: NRG; PAM sequence: CAG
ctctgaagtggatcttacta

SEQ ID NO: 94728 - DNA, 20 bp, Artificial Sequence
  Description of Artificial Sequence: Synthetic oligonucleotide
  Target: LAMA2; (-) strand; PAM type: NRG; PAM sequence: TGG
cagacataaaccctctgaag

SEQ ID NO: 94729 - DNA, 20 bp, Artificial Sequence
  Description of Artificial Sequence: Synthetic oligonucleotide
  Target: LAMA2; (-) strand; PAM type: NRG; PAM sequence: AAG
aagcagacataaaccctctg

SEQ ID NO: 94730 - DNA, 20 bp, Artificial Sequence
  Description of Artificial Sequence: Synthetic oligonucleotide
  Target: LAMA2; (-) strand; PAM type: NRG; PAM sequence: CAG
tgcttcttggagtacgtaag

SEQ ID NO: 94731 - DNA, 20 bp, Artificial Sequence
  Description of Artificial Sequence: Synthetic oligonucleotide
  Target: LAMA2; (-) strand; PAM type: NRG; PAM sequence: AAG
atttgcttcttggagtacgt

SEQ ID NO: 94732 - DNA, 20 bp, Artificial Sequence
  Description of Artificial Sequence: Synthetic oligonucleotide
  Target: LAMA2; (-) strand; PAM type: NRG; PAM sequence: GAG
ctcttggcatttgcttcttg

SEQ ID NO: 94733 - DNA, 20 bp, Artificial Sequence
  Description of Artificial Sequence: Synthetic oligonucleotide
  Target: LAMA2; (-) strand; PAM type: NRG; PAM sequence: TGG
acctcttggcatttgcttct

SEQ ID NO: 94734 - DNA, 20 bp, Artificial Sequence
  Description of Artificial Sequence: Synthetic oligonucleotide
  Target: LAMA2; (-) strand; PAM type: NRG; PAM sequence: TGG
ctttcccccaggaaacctct

SEQ ID NO: 94735 - DNA, 20 bp, Artificial Sequence
  Description of Artificial Sequence: Synthetic oligonucleotide
  Target: LAMA2; (-) strand; PAM type: NRG; PAM sequence: AGG
gcttcgttggcctttccccc

SEQ ID NO: 94736 - DNA, 20 bp, Artificial Sequence
  Description of Artificial Sequence: Synthetic oligonucleotide
  Target: LAMA2; (-) strand; PAM type: NRG; PAM sequence: CAG
tgcttcgttggcctttcccc

SEQ ID NO: 94737 - DNA, 20 bp, Artificial Sequence
  Description of Artificial Sequence: Synthetic oligonucleotide
  Target: LAMA2; (-) strand; PAM type: NRG; PAM sequence: TGG
tctcccacttcatgcttcgt

SEQ ID NO: 94738 - DNA, 20 bp, Artificial Sequence
  Description of Artificial Sequence: Synthetic oligonucleotide
  Target: LAMA2; (-) strand; PAM type: NRG; PAM sequence: AGG
cagaaccccattgcagcaga

SEQ ID NO: 94739 - DNA, 20 bp, Artificial Sequence
  Description of Artificial Sequence: Synthetic oligonucleotide
  Target: LAMA2; (-) strand; PAM type: NRG; PAM sequence: AAG
tcagaaccccattgcagcag

SEQ ID NO: 94740 - DNA, 20 bp, Artificial Sequence
  Description of Artificial Sequence: Synthetic oligonucleotide
  Target: LAMA2; (-) strand; PAM type: NRG; PAM sequence: CAG
gagtcagaaccccattgcag

SEQ ID NO: 94741 - DNA, 20 bp, Artificial Sequence
  Description of Artificial Sequence: Synthetic oligonucleotide
  Target: LAMA2; (-) strand; PAM type: NRG; PAM sequence: CAG
cgggagtcagaaccccattg

SEQ ID NO: 94742 - DNA, 20 bp, Artificial Sequence
  Description of Artificial Sequence: Synthetic oligonucleotide
  Target: LAMA2; (-) strand; PAM type: NRG; PAM sequence: CAG
ttctgtgttttcccgggagt

SEQ ID NO: 94743 - DNA, 20 bp, Artificial Sequence
  Description of Artificial Sequence: Synthetic oligonucleotide
  Target: LAMA2; (-) strand; PAM type: NRG; PAM sequence: GAG
ttctttctgtgttttcccgg

SEQ ID NO: 94744 - DNA, 20 bp, Artificial Sequence
  Description of Artificial Sequence: Synthetic oligonucleotide
  Target: LAMA2; (-) strand; PAM type: NRG; PAM sequence: GGG
ctttctttctgtgttttccc

SEQ ID NO: 94745 - DNA, 20 bp, Artificial Sequence
  Description of Artificial Sequence: Synthetic oligonucleotide
  Target: LAMA2; (-) strand; PAM type: NRG; PAM sequence: CGG
tctttctttctgtgttttcc

SEQ ID NO: 94746 - DNA, 20 bp, Artificial Sequence
  Description of Artificial Sequence: Synthetic oligonucleotide
  Target: LAMA2; (-) strand; PAM type: NRG; PAM sequence: CAG
caaacaaggcttttcctacc

SEQ ID NO: 94747 - DNA, 20 bp, Artificial Sequence
  Description of Artificial Sequence: Synthetic oligonucleotide
  Target: LAMA2; (-) strand; PAM type: NRG; PAM sequence: AGG
ttgacaaaatgcaccaaaca

SEQ ID NO: 94748 - DNA, 20 bp, Artificial Sequence
  Description of Artificial Sequence: Synthetic oligonucleotide
  Target: LAMA2; (-) strand; PAM type: NRG; PAM sequence: AAG
tttgacaaaatgcaccaaac

SEQ ID NO: 94749 - DNA, 20 bp, Artificial Sequence
  Description of Artificial Sequence: Synthetic oligonucleotide
  Target: LAMA2; (-) strand; PAM type: NRG; PAM sequence: AAG
attggcttggccaagaattt

SEQ ID NO: 94750 - DNA, 20 bp, Artificial Sequence
  Description of Artificial Sequence: Synthetic oligonucleotide
  Target: LAMA2; (-) strand; PAM type: NRG; PAM sequence: AAG
tatatcccattggcttggcc

SEQ ID NO: 94751 - DNA, 20 bp, Artificial Sequence
  Description of Artificial Sequence: Synthetic oligonucleotide
  Target: LAMA2; (-) strand; PAM type: NRG; PAM sequence: TGG
ttgggtatatcccattggct

SEQ ID NO: 94752 - DNA, 20 bp, Artificial Sequence
  Description of Artificial Sequence: Synthetic oligonucleotide
  Target: LAMA2; (-) strand; PAM type: NRG; PAM sequence: TGG
tttgcttgggtatatcccat

SEQ ID NO: 94753 - DNA, 20 bp, Artificial Sequence
  Description of Artificial Sequence: Synthetic oligonucleotide
  Target: LAMA2; (-) strand; PAM type: NRG; PAM sequence: GGG
ttagtgggtaaaatttgctt

SEQ ID NO: 94754 - DNA, 20 bp, Artificial Sequence
  Description of Artificial Sequence: Synthetic oligonucleotide
  Target: LAMA2; (-) strand; PAM type: NRG; PAM sequence: TGG
tttagtgggtaaaatttgct

SEQ ID NO: 94755 - DNA, 20 bp, Artificial Sequence
  Description of Artificial Sequence: Synthetic oligonucleotide
  Target: LAMA2; (-) strand; PAM type: NRG; PAM sequence: GGG
caattcaggattcctttagt

SEQ ID NO: 94756 - DNA, 20 bp, Artificial Sequence
  Description of Artificial Sequence: Synthetic oligonucleotide
  Target: LAMA2; (-) strand; PAM type: NRG; PAM sequence: TGG
ccaattcaggattcctttag

SEQ ID NO: 94757 - DNA, 20 bp, Artificial Sequence
  Description of Artificial Sequence: Synthetic oligonucleotide
  Target: LAMA2; (-) strand; PAM type: NRG; PAM sequence: TAG
tgaccaattcaggattcctt

SEQ ID NO: 94758 - DNA, 20 bp, Artificial Sequence
  Description of Artificial Sequence: Synthetic oligonucleotide
  Target: LAMA2; (-) strand; PAM type: NRG; PAM sequence: AGG
agaacctccctgaccaattc

SEQ ID NO: 94759 - DNA, 20 bp, Artificial Sequence
  Description of Artificial Sequence: Synthetic oligonucleotide
  Target: LAMA2; (-) strand; PAM type: NRG; PAM sequence: CAG
tagaacctccctgaccaatt

SEQ ID NO: 94760 - DNA, 20 bp, Artificial Sequence
  Description of Artificial Sequence: Synthetic oligonucleotide
  Target: LAMA2; (-) strand; PAM type: NRG; PAM sequence: TAG
ggctgattactgtaagatac

SEQ ID NO: 94761 - DNA, 20 bp, Artificial Sequence
  Description of Artificial Sequence: Synthetic oligonucleotide
  Target: LAMA2; (-) strand; PAM type: NRG; PAM sequence: AAG
tctctcaggctgattactgt

SEQ ID NO: 94762 - DNA, 20 bp, Artificial Sequence
  Description of Artificial Sequence: Synthetic oligonucleotide
  Target: LAMA2; (-) strand; PAM type: NRG; PAM sequence: AGG
cacaagagtatccttctctc

SEQ ID NO: 94763 - DNA, 20 bp, Artificial Sequence
  Description of Artificial Sequence: Synthetic oligonucleotide
  Target: LAMA2; (-) strand; PAM type: NRG; PAM sequence: CAG
ccacaagagtatccttctct

SEQ ID NO: 94764 - DNA, 20 bp, Artificial Sequence
  Description of Artificial Sequence: Synthetic oligonucleotide
  Target: LAMA2; (-) strand; PAM type: NRG; PAM sequence: GAG
attaagatgagcttccacaa

SEQ ID NO: 94765 - DNA, 20 bp, Artificial Sequence
  Description of Artificial Sequence: Synthetic oligonucleotide
  Target: LAMA2; (-) strand; PAM type: NRG; PAM sequence: AAG
gaattaagatgagcttccac

SEQ ID NO: 94766 - DNA, 20 bp, Artificial Sequence
  Description of Artificial Sequence: Synthetic oligonucleotide
  Target: LAMA2; (-) strand; PAM type: NRG; PAM sequence: GAG
cactctgaatgaattaagat

SEQ ID NO: 94767 - DNA, 20 bp, Artificial Sequence
  Description of Artificial Sequence: Synthetic oligonucleotide
  Target: LAMA2; (-) strand; PAM type: NRG; PAM sequence: AAG
tatagcactctgaatgaatt

SEQ ID NO: 94768 - DNA, 20 bp, Artificial Sequence
  Description of Artificial Sequence: Synthetic oligonucleotide
  Target: LAMA2; (-) strand; PAM type: NRG; PAM sequence: TAG
tagtctatgttatgctctta

SEQ ID NO: 94769 - DNA, 20 bp, Artificial Sequence
  Description of Artificial Sequence: Synthetic oligonucleotide
  Target: LAMA2; (-) strand; PAM type: NRG; PAM sequence: TAG
tccattgtttacatgccact

SEQ ID NO: 94770 - DNA, 20 bp, Artificial Sequence
  Description of Artificial Sequence: Synthetic oligonucleotide
  Target: LAMA2; (-) strand; PAM type: NRG; PAM sequence: GAG
ttcccagcctctagaatcgt

SEQ ID NO: 94771 - DNA, 20 bp, Artificial Sequence
  Description of Artificial Sequence: Synthetic oligonucleotide
  Target: LAMA2; (-) strand; PAM type: NRG; PAM sequence: TAG
atcttgtacttcccagcctc

SEQ ID NO: 94772 - DNA, 20 bp, Artificial Sequence
  Description of Artificial Sequence: Synthetic oligonucleotide
  Target: LAMA2; (-) strand; PAM type: NRG; PAM sequence: CAG
cacctggatcttgtacttcc

SEQ ID NO: 94773 - DNA, 20 bp, Artificial Sequence
  Description of Artificial Sequence: Synthetic oligonucleotide
  Target: LAMA2; (-) strand; PAM type: NRG; PAM sequence: TGG
ataggaaatctgccagcacc

SEQ ID NO: 94774 - DNA, 20 bp, Artificial Sequence
  Description of Artificial Sequence: Synthetic oligonucleotide
  Target: LAMA2; (-) strand; PAM type: NRG; PAM sequence: CAG
tcactagataggaaatctgc

SEQ ID NO: 94775 - DNA, 20 bp, Artificial Sequence
  Description of Artificial Sequence: Synthetic oligonucleotide
  Target: LAMA2; (-) strand; PAM type: NRG; PAM sequence: AGG
aaagagggccctcactagat

SEQ ID NO: 94776 - DNA, 20 bp, Artificial Sequence
  Description of Artificial Sequence: Synthetic oligonucleotide
  Target: LAMA2; (-) strand; PAM type: NRG; PAM sequence: TAG
gaaagagggccctcactaga

SEQ ID NO: 94777 - DNA, 20 bp, Artificial Sequence
  Description of Artificial Sequence: Synthetic oligonucleotide
  Target: LAMA2; (-) strand; PAM type: NRG; PAM sequence: TAG
tagagaaagagggccctcac

SEQ ID NO: 94778 - DNA, 20 bp, Artificial Sequence
  Description of Artificial Sequence: Synthetic oligonucleotide
  Target: LAMA2; (-) strand; PAM type: NRG; PAM sequence: GGG
aatgactgtctagagaaaga

SEQ ID NO: 94779 - DNA, 20 bp, Artificial Sequence
  Description of Artificial Sequence: Synthetic oligonucleotide
  Target: LAMA2; (-) strand; PAM type: NRG; PAM sequence: AGG
aaatgactgtctagagaaag

SEQ ID NO: 94780 - DNA, 20 bp, Artificial Sequence
  Description of Artificial Sequence: Synthetic oligonucleotide
  Target: LAMA2; (-) strand; PAM type: NRG; PAM sequence: GAG
taaatgactgtctagagaaa

SEQ ID NO: 94781 - DNA, 20 bp, Artificial Sequence
  Description of Artificial Sequence: Synthetic oligonucleotide
  Target: LAMA2; (-) strand; PAM type: NRG; PAM sequence: AAG
ggtaaatgactgtctagaga

SEQ ID NO: 94782 - DNA, 20 bp, Artificial Sequence
  Description of Artificial Sequence: Synthetic oligonucleotide
  Target: LAMA2; (-) strand; PAM type: NRG; PAM sequence: GAG
agtgggtaaatgactgtcta

SEQ ID NO: 94783 - DNA, 20 bp, Artificial Sequence
  Description of Artificial Sequence: Synthetic oligonucleotide
  Target: LAMA2; (-) strand; PAM type: NRG; PAM sequence: TAG
ccagtgggtaaatgactgtc

SEQ ID NO: 94784 - DNA, 20 bp, Artificial Sequence
  Description of Artificial Sequence: Synthetic oligonucleotide
  Target: LAMA2; (-) strand; PAM type: NRG; PAM sequence: GGG
cccccaagtgaggttccagt

SEQ ID NO: 94785 - DNA, 20 bp, Artificial Sequence
  Description of Artificial Sequence: Synthetic oligonucleotide
  Target: LAMA2; (-) strand; PAM type: NRG; PAM sequence: TGG
tcccccaagtgaggttccag

SEQ ID NO: 94786 - DNA, 20 bp, Artificial Sequence
  Description of Artificial Sequence: Synthetic oligonucleotide
  Target: LAMA2; (-) strand; PAM type: NRG; PAM sequence: CAG
tcctcccccaagtgaggttc

SEQ ID NO: 94787 - DNA, 20 bp, Artificial Sequence
  Description of Artificial Sequence: Synthetic oligonucleotide
  Target: LAMA2; (-) strand; PAM type: NRG; PAM sequence: AGG
agagtttcctcccccaagtg

SEQ ID NO: 94788 - DNA, 20 bp, Artificial Sequence
  Description of Artificial Sequence: Synthetic oligonucleotide
  Target: LAMA2; (-) strand; PAM type: NRG; PAM sequence: GAG
gagagtttcctcccccaagt

SEQ ID NO: 94789 - DNA, 20 bp, Artificial Sequence
  Description of Artificial Sequence: Synthetic oligonucleotide
  Target: LAMA2; (-) strand; PAM type: NRG; PAM sequence: AAG
ctcagagagtttcctccccc

SEQ ID NO: 94790 - DNA, 20 bp, Artificial Sequence
  Description of Artificial Sequence: Synthetic oligonucleotide
  Target: LAMA2; (-) strand; PAM type: NRG; PAM sequence: GAG
cttataaaagaggcctcaga

SEQ ID NO: 94791 - DNA, 20 bp, Artificial Sequence
  Description of Artificial Sequence: Synthetic oligonucleotide
  Target: LAMA2; (-) strand; PAM type: NRG; PAM sequence: GAG
cacttataaaagaggcctca

SEQ ID NO: 94792 - DNA, 20 bp, Artificial Sequence
  Description of Artificial Sequence: Synthetic oligonucleotide
  Target: LAMA2; (-) strand; PAM type: NRG; PAM sequence: CAG
tgcacttataaaagaggcct

SEQ ID NO: 94793 - DNA, 20 bp, Artificial Sequence
  Description of Artificial Sequence: Synthetic oligonucleotide
  Target: LAMA2; (-) strand; PAM type: NRG; PAM sequence: AGG
gatcactgcacttataaaag

SEQ ID NO: 94794 - DNA, 20 bp, Artificial Sequence
  Description of Artificial Sequence: Synthetic oligonucleotide
  Target: LAMA2; (-) strand; PAM type: NRG; PAM sequence: GAG
ggatcactgcacttataaaa

SEQ ID NO: 94795 - DNA, 20 bp, Artificial Sequence
  Description of Artificial Sequence: Synthetic oligonucleotide
  Target: LAMA2; (-) strand; PAM type: NRG; PAM sequence: AAG
tgggatcactgcacttataa

SEQ ID NO: 94796 - DNA, 20 bp, Artificial Sequence
  Description of Artificial Sequence: Synthetic oligonucleotide
  Target: LAMA2; (-) strand; PAM type: NRG; PAM sequence: GGG
agaatggagctctcatgaat

SEQ ID NO: 94797 - DNA, 20 bp, Artificial Sequence
  Description of Artificial Sequence: Synthetic oligonucleotide
  Target: LAMA2; (-) strand; PAM type: NRG; PAM sequence: TGG
gagaatggagctctcatgaa

SEQ ID NO: 94798 - DNA, 20 bp, Artificial Sequence
  Description of Artificial Sequence: Synthetic oligonucleotide
  Target: LAMA2; (-) strand; PAM type: NRG; PAM sequence: GAG
gtgattaggtcatgagaatg

SEQ ID NO: 94799 - DNA, 20 bp, Artificial Sequence
  Description of Artificial Sequence: Synthetic oligonucleotide
  Target: LAMA2; (-) strand; PAM type: NRG; PAM sequence: TGG
aggtgattaggtcatgagaa

SEQ ID NO: 94800 - DNA, 20 bp, Artificial Sequence
  Description of Artificial Sequence: Synthetic oligonucleotide
  Target: LAMA2; (-) strand; PAM type: NRG; PAM sequence: GAG
ttgggaggtgattaggtcat

SEQ ID NO: 94801 - DNA, 20 bp, Artificial Sequence
  Description of Artificial Sequence: Synthetic oligonucleotide
  Target: LAMA2; (-) strand; PAM type: NRG; PAM sequence: AGG
ggggcctttgggaggtgatt

SEQ ID NO: 94802 - DNA, 20 bp, Artificial Sequence
  Description of Artificial Sequence: Synthetic oligonucleotide
  Target: LAMA2; (-) strand; PAM type: NRG; PAM sequence: TAG
tggggcctttgggaggtgat

SEQ ID NO: 94803 - DNA, 20 bp, Artificial Sequence
  Description of Artificial Sequence: Synthetic oligonucleotide
  Target: LAMA2; (-) strand; PAM type: NRG; PAM sequence: AGG
caggaggtggggcctttggg

SEQ ID NO: 94804 - DNA, 20 bp, Artificial Sequence
  Description of Artificial Sequence: Synthetic oligonucleotide
  Target: LAMA2; (-) strand; PAM type: NRG; PAM sequence: GAG
acaggaggtggggcctttgg

SEQ ID NO: 94805 - DNA, 20 bp, Artificial Sequence
  Description of Artificial Sequence: Synthetic oligonucleotide
  Target: LAMA2; (-) strand; PAM type: NRG; PAM sequence: GGG
agacaggaggtggggccttt

SEQ ID NO: 94806 - DNA, 20 bp, Artificial Sequence
  Description of Artificial Sequence: Synthetic oligonucleotide
  Target: LAMA2; (-) strand; PAM type: NRG; PAM sequence: TGG
tagacaggaggtggggcctt

SEQ ID NO: 94807 - DNA, 20 bp, Artificial Sequence
  Description of Artificial Sequence: Synthetic oligonucleotide
  Target: LAMA2; (-) strand; PAM type: NRG; PAM sequence: GGG
ggtggtatagacaggaggtg

SEQ ID NO: 94808 - DNA, 20 bp, Artificial Sequence
  Description of Artificial Sequence: Synthetic oligonucleotide
  Target: LAMA2; (-) strand; PAM type: NRG; PAM sequence: GGG
tggtggtatagacaggaggt

SEQ ID NO: 94809 - DNA, 20 bp, Artificial Sequence
  Description of Artificial Sequence: Synthetic oligonucleotide
  Target: LAMA2; (-) strand; PAM type: NRG; PAM sequence: TGG
gtggtggtatagacaggagg

SEQ ID NO: 94810 - DNA, 20 bp, Artificial Sequence
  Description of Artificial Sequence: Synthetic oligonucleotide
  Target: LAMA2; (-) strand; PAM type: NRG; PAM sequence: AGG
aaggtggtggtatagacagg

SEQ ID NO: 94811 - DNA, 20 bp, Artificial Sequence
  Description of Artificial Sequence: Synthetic oligonucleotide
  Target: LAMA2; (-) strand; PAM type: NRG; PAM sequence: GAG
caaggtggtggtatagacag

SEQ ID NO: 94812 - DNA, 20 bp, Artificial Sequence
  Description of Artificial Sequence: Synthetic oligonucleotide
  Target: LAMA2; (-) strand; PAM type: NRG; PAM sequence: AGG
ctcaaggtggtggtatagac

SEQ ID NO: 94813 - DNA, 20 bp, Artificial Sequence
  Description of Artificial Sequence: Synthetic oligonucleotide
  Target: LAMA2; (-) strand; PAM type: NRG; PAM sequence: CAG
cctcaaggtggtggtataga

SEQ ID NO: 94814 - DNA, 20 bp, Artificial Sequence
  Description of Artificial Sequence: Synthetic oligonucleotide
  Target: LAMA2; (-) strand; PAM type: NRG; PAM sequence: TAG
taaccctcaaggtggtggta

SEQ ID NO: 94815 - DNA, 20 bp, Artificial Sequence
  Description of Artificial Sequence: Synthetic oligonucleotide
  Target: LAMA2; (-) strand; PAM type: NRG; PAM sequence: TGG
aatcttaaccctcaaggtgg

SEQ ID NO: 94816 - DNA, 20 bp, Artificial Sequence
  Description of Artificial Sequence: Synthetic oligonucleotide
  Target: LAMA2; (-) strand; PAM type: NRG; PAM sequence: TGG
agaaatcttaaccctcaagg

SEQ ID NO: 94817 - DNA, 20 bp, Artificial Sequence
  Description of Artificial Sequence: Synthetic oligonucleotide
  Target: LAMA2; (-) strand; PAM type: NRG; PAM sequence: AGG
tgtagaaatcttaaccctca

SEQ ID NO: 94818 - DNA, 20 bp, Artificial Sequence
  Description of Artificial Sequence: Synthetic oligonucleotide
  Target: LAMA2; (-) strand; PAM type: NRG; PAM sequence: AAG
atgtagaaatcttaaccctc

SEQ ID NO: 94819 - DNA, 20 bp, Artificial Sequence
  Description of Artificial Sequence: Synthetic oligonucleotide
  Target: LAMA2; (-) strand; PAM type: NRG; PAM sequence: TAG
tgtcccccaaaattcatatg

SEQ ID NO: 94820 - DNA, 20 bp, Artificial Sequence
  Description of Artificial Sequence: Synthetic oligonucleotide
  Target: LAMA2; (-) strand; PAM type: NRG; PAM sequence: TGG
ccatcagaggtgctctgtaa

SEQ ID NO: 94821 - DNA, 20 bp, Artificial Sequence
  Description of Artificial Sequence: Synthetic oligonucleotide
  Target: LAMA2; (-) strand; PAM type: NRG; PAM sequence: AGG
ttgtcttttggacccatcag

SEQ ID NO: 94822 - DNA, 20 bp, Artificial Sequence
  Description of Artificial Sequence: Synthetic oligonucleotide
  Target: LAMA2; (-) strand; PAM type: NRG; PAM sequence: GAG
cttgtcttttggacccatca

SEQ ID NO: 94823 - DNA, 20 bp, Artificial Sequence
  Description of Artificial Sequence: Synthetic oligonucleotide
  Target: LAMA2; (-) strand; PAM type: NRG; PAM sequence: CAG
ttcttgtcttttggacccat

SEQ ID NO: 94824 - DNA, 20 bp, Artificial Sequence
  Description of Artificial Sequence: Synthetic oligonucleotide
  Target: LAMA2; (-) strand; PAM type: NRG; PAM sequence: TGG
gcctccagtttcttgtcttt

SEQ ID NO: 94825 - DNA, 20 bp, Artificial Sequence
  Description of Artificial Sequence: Synthetic oligonucleotide
  Target: LAMA2; (-) strand; PAM type: NRG; PAM sequence: CAG
ttttactgactgaaagcctc

SEQ ID NO: 94826 - DNA, 20 bp, Artificial Sequence
  Description of Artificial Sequence: Synthetic oligonucleotide
  Target: LAMA2; (-) strand; PAM type: NRG; PAM sequence: AAG
tgtggaattttactgactga

SEQ ID NO: 94827 - DNA, 20 bp, Artificial Sequence
  Description of Artificial Sequence: Synthetic oligonucleotide
  Target: LAMA2; (-) strand; PAM type: NRG; PAM sequence: TGG
ctgcaagacaacctacagtg

SEQ ID NO: 94828 - DNA, 20 bp, Artificial Sequence
  Description of Artificial Sequence: Synthetic oligonucleotide
  Target: LAMA2; (-) strand; PAM type: NRG; PAM sequence: CAG
tctacctgcaagacaaccta

SEQ ID NO: 94829 - DNA, 20 bp, Artificial Sequence
  Description of Artificial Sequence: Synthetic oligonucleotide
  Target: LAMA2; (-) strand; PAM type: NRG; PAM sequence: AAG
gcctcatccgatctacctgc

SEQ ID NO: 94830 - DNA, 20 bp, Artificial Sequence
  Description of Artificial Sequence: Synthetic oligonucleotide
  Target: LAMA2; (-) strand; PAM type: NRG; PAM sequence: AGG
ctaccctgagacagccttgg

SEQ ID NO: 94831 - DNA, 20 bp, Artificial Sequence
  Description of Artificial Sequence: Synthetic oligonucleotide
  Target: LAMA2; (-) strand; PAM type: NRG; PAM sequence: GAG
gctaccctgagacagccttg

SEQ ID NO: 94832 - DNA, 20 bp, Artificial Sequence
  Description of Artificial Sequence: Synthetic oligonucleotide
  Target: LAMA2; (-) strand; PAM type: NRG; PAM sequence: TGG
ctgctaccctgagacagcct

SEQ ID NO: 94833 - DNA, 20 bp, Artificial Sequence
  Description of Artificial Sequence: Synthetic oligonucleotide
  Target: LAMA2; (-) strand; PAM type: NRG; PAM sequence: CAG
ttctcactgctaccctgaga

SEQ ID NO: 94834 - DNA, 20 bp, Artificial Sequence
  Description of Artificial Sequence: Synthetic oligonucleotide
  Target: LAMA2; (-) strand; PAM type: NRG; PAM sequence: GAG
actgttctcactgctaccct

SEQ ID NO: 94835 - DNA, 20 bp, Artificial Sequence
  Description of Artificial Sequence: Synthetic oligonucleotide
  Target: LAMA2; (-) strand; PAM type: NRG; PAM sequence: AGG
tggtaataataatagtaatc

SEQ ID NO: 94836 - DNA, 20 bp, Artificial Sequence
  Description of Artificial Sequence: Synthetic oligonucleotide
  Target: LAMA2; (-) strand; PAM type: NRG; PAM sequence: CAG
ttggtaataataatagtaat

SEQ ID NO: 94837 - DNA, 20 bp, Artificial Sequence
  Description of Artificial Sequence: Synthetic oligonucleotide
  Target: LAMA2; (-) strand; PAM type: NRG; PAM sequence: TAG
aacaacattggtaataataa

SEQ ID NO: 94838 - DNA, 20 bp, Artificial Sequence
  Description of Artificial Sequence: Synthetic oligonucleotide
  Target: LAMA2; (-) strand; PAM type: NRG; PAM sequence: TGG
atttcttcatttaacaacat

SEQ ID NO: 94839 - DNA, 20 bp, Artificial Sequence
  Description of Artificial Sequence: Synthetic oligonucleotide
  Target: LAMA2; (-) strand; PAM type: NRG; PAM sequence: CAG
tatttaggagacattttaat

SEQ ID NO: 94840 - DNA, 20 bp, Artificial Sequence
  Description of Artificial Sequence: Synthetic oligonucleotide
  Target: LAMA2; (-) strand; PAM type: NRG; PAM sequence: GAG
tctgctaaatttatatttag

SEQ ID NO: 94841 - DNA, 20 bp, Artificial Sequence
  Description of Artificial Sequence: Synthetic oligonucleotide
  Target: LAMA2; (-) strand; PAM type: NRG; PAM sequence: AGG
tttctgctaaatttatattt

SEQ ID NO: 94842 - DNA, 20 bp, Artificial Sequence
  Description of Artificial Sequence: Synthetic oligonucleotide
  Target: LAMA2; (-) strand; PAM type: NRG; PAM sequence: TAG
ctttctgctaaatttatatt

SEQ ID NO: 94843 - DNA, 20 bp, Artificial Sequence
  Description of Artificial Sequence: Synthetic oligonucleotide
  Target: LAMA2; (-) strand; PAM type: NRG; PAM sequence: GGG
atagtactgtaagatatgta

SEQ ID NO: 94844 - DNA, 20 bp, Artificial Sequence
  Description of Artificial Sequence: Synthetic oligonucleotide
  Target: LAMA2; (-) strand; PAM type: NRG; PAM sequence: AGG
aatagtactgtaagatatgt

SEQ ID NO: 94845 - DNA, 20 bp, Artificial Sequence
  Description of Artificial Sequence: Synthetic oligonucleotide
  Target: LAMA2; (-) strand; PAM type: NRG; PAM sequence: TAG
caatagtactgtaagatatg

SEQ ID NO: 94846 - DNA, 20 bp, Artificial Sequence
  Description of Artificial Sequence: Synthetic oligonucleotide
  Target: LAMA2; (-) strand; PAM type: NRG; PAM sequence: AAG
gcttcatacaatagtactgt

SEQ ID NO: 94847 - DNA, 20 bp, Artificial Sequence
  Description of Artificial Sequence: Synthetic oligonucleotide
  Target: LAMA2; (-) strand; PAM type: NRG; PAM sequence: TAG
caaaaccctgcttcatacaa

SEQ ID NO: 94848 - DNA, 20 bp, Artificial Sequence
  Description of Artificial Sequence: Synthetic oligonucleotide
  Target: LAMA2; (-) strand; PAM type: NRG; PAM sequence: GGG
gcagaggaaaaaatagtctc

SEQ ID NO: 94849 - DNA, 20 bp, Artificial Sequence
  Description of Artificial Sequence: Synthetic oligonucleotide
  Target: LAMA2; (-) strand; PAM type: NRG; PAM sequence: CGG
tgcagaggaaaaaatagtct

SEQ ID NO: 94850 - DNA, 20 bp, Artificial Sequence
  Description of Artificial Sequence: Synthetic oligonucleotide
  Target: LAMA2; (-) strand; PAM type: NRG; PAM sequence: TAG
tactgctgcagaggaaaaaa

SEQ ID NO: 94851 - DNA, 20 bp, Artificial Sequence
  Description of Artificial Sequence: Synthetic oligonucleotide
  Target: LAMA2; (-) strand; PAM type: NRG; PAM sequence: AGG
tctcacacatactgctgcag

SEQ ID NO: 94852 - DNA, 20 bp, Artificial Sequence
  Description of Artificial Sequence: Synthetic oligonucleotide
  Target: LAMA2; (-) strand; PAM type: NRG; PAM sequence: GAG
ctctcacacatactgctgca

SEQ ID NO: 94853 - DNA, 20 bp, Artificial Sequence
  Description of Artificial Sequence: Synthetic oligonucleotide
  Target: LAMA2; (-) strand; PAM type: NRG; PAM sequence: CAG
agctctcacacatactgctg

SEQ ID NO: 94854 - DNA, 20 bp, Artificial Sequence
  Description of Artificial Sequence: Synthetic oligonucleotide
  Target: LAMA2; (-) strand; PAM type: NRG; PAM sequence: CAG
ggctccagagtctgagctct

SEQ ID NO: 94855 - DNA, 20 bp, Artificial Sequence
  Description of Artificial Sequence: Synthetic oligonucleotide
  Target: LAMA2; (-) strand; PAM type: NRG; PAM sequence: GAG
ctaggttggctccagagtct

SEQ ID NO: 94856 - DNA, 20 bp, Artificial Sequence
  Description of Artificial Sequence: Synthetic oligonucleotide
  Target: LAMA2; (-) strand; PAM type: NRG; PAM sequence: GAG
gatcagctaggttggctcca

SEQ ID NO: 94857 - DNA, 20 bp, Artificial Sequence
  Description of Artificial Sequence: Synthetic oligonucleotide
  Target: LAMA2; (-) strand; PAM type: NRG; PAM sequence: CAG
cagatcagctaggttggctc

SEQ ID NO: 94858 - DNA, 20 bp, Artificial Sequence
  Description of Artificial Sequence: Synthetic oligonucleotide
  Target: LAMA2; (-) strand; PAM type: NRG; PAM sequence: TGG
agattccagatcagctaggt

SEQ ID NO: 94859 - DNA, 20 bp, Artificial Sequence
  Description of Artificial Sequence: Synthetic oligonucleotide
  Target: LAMA2; (-) strand; PAM type: NRG; PAM sequence: AGG
gtcaagattccagatcagct

SEQ ID NO: 94860 - DNA, 20 bp, Artificial Sequence
  Description of Artificial Sequence: Synthetic oligonucleotide
  Target: LAMA2; (-) strand; PAM type: NRG; PAM sequence: TAG
agtcaagattccagatcagc

SEQ ID NO: 94861 - DNA, 20 bp, Artificial Sequence
  Description of Artificial Sequence: Synthetic oligonucleotide
  Target: LAMA2; (-) strand; PAM type: NRG; PAM sequence: CAG
gtggagtcaagattccagat

SEQ ID NO: 94862 - DNA, 20 bp, Artificial Sequence
  Description of Artificial Sequence: Synthetic oligonucleotide
  Target: LAMA2; (-) strand; PAM type: NRG; PAM sequence: CAG
caattgtggagtcaagattc

SEQ ID NO: 94863 - DNA, 20 bp, Artificial Sequence
  Description of Artificial Sequence: Synthetic oligonucleotide
  Target: LAMA2; (-) strand; PAM type: NRG; PAM sequence: AAG
agctaaccaattgtggagtc

SEQ ID NO: 94864 - DNA, 20 bp, Artificial Sequence
  Description of Artificial Sequence: Synthetic oligonucleotide
  Target: LAMA2; (-) strand; PAM type: NRG; PAM sequence: GAG
tcatgagctaaccaattgtg

SEQ ID NO: 94865 - DNA, 20 bp, Artificial Sequence
  Description of Artificial Sequence: Synthetic oligonucleotide
  Target: LAMA2; (-) strand; PAM type: NRG; PAM sequence: TGG
ggtcatgagctaaccaattg

SEQ ID NO: 94866 - DNA, 20 bp, Artificial Sequence
  Description of Artificial Sequence: Synthetic oligonucleotide
  Target: LAMA2; (-) strand; PAM type: NRG; PAM sequence: GAG
agtaagttgcctaaggtcat

SEQ ID NO: 94867 - DNA, 20 bp, Artificial Sequence
  Description of Artificial Sequence: Synthetic oligonucleotide
  Target: LAMA2; (-) strand; PAM type: NRG; PAM sequence: AGG
aaggttaagtaagttgccta

SEQ ID NO: 94868 - DNA, 20 bp, Artificial Sequence
  Description of Artificial Sequence: Synthetic oligonucleotide
  Target: LAMA2; (-) strand; PAM type: NRG; PAM sequence: AAG
aaaggttaagtaagttgcct

SEQ ID NO: 94869 - DNA, 20 bp, Artificial Sequence
  Description of Artificial Sequence: Synthetic oligonucleotide
  Target: LAMA2; (-) strand; PAM type: NRG; PAM sequence: AAG
gaggcacagaaaggttaagt

SEQ ID NO: 94870 - DNA, 20 bp, Artificial Sequence
  Description of Artificial Sequence: Synthetic oligonucleotide
  Target: LAMA2; (-) strand; PAM type: NRG; PAM sequence: AAG
aactgaggcacagaaaggtt

SEQ ID NO: 94871 - DNA, 20 bp, Artificial Sequence
  Description of Artificial Sequence: Synthetic oligonucleotide
  Target: LAMA2; (-) strand; PAM type: NRG; PAM sequence: AGG
ggtgaaactgaggcacagaa

SEQ ID NO: 94872 - DNA, 20 bp, Artificial Sequence
  Description of Artificial Sequence: Synthetic oligonucleotide
  Target: LAMA2; (-) strand; PAM type: NRG; PAM sequence: AAG
tggtgaaactgaggcacaga

SEQ ID NO: 94873 - DNA, 20 bp, Artificial Sequence
  Description of Artificial Sequence: Synthetic oligonucleotide
  Target: LAMA2; (-) strand; PAM type: NRG; PAM sequence: CAG
tgagtggtgaaactgaggca

SEQ ID NO: 94874 - DNA, 20 bp, Artificial Sequence
  Description of Artificial Sequence: Synthetic oligonucleotide
  Target: LAMA2; (-) strand; PAM type: NRG; PAM sequence: AGG
tttattgagtggtgaaactg

SEQ ID NO: 94875 - DNA, 20 bp, Artificial Sequence
  Description of Artificial Sequence: Synthetic oligonucleotide
  Target: LAMA2; (-) strand; PAM type: NRG; PAM sequence: GAG
ttttattgagtggtgaaact

SEQ ID NO: 94876 - DNA, 20 bp, Artificial Sequence
  Description of Artificial Sequence: Synthetic oligonucleotide
  Target: LAMA2; (-) strand; PAM type: NRG; PAM sequence: TGG
ctcaccacttttttattgag

SEQ ID NO: 94877 - DNA, 20 bp, Artificial Sequence
  Description of Artificial Sequence: Synthetic oligonucleotide
  Target: LAMA2; (-) strand; PAM type: NRG; PAM sequence: GAG
attctcaccacttttttatt

SEQ ID NO: 94878 - DNA, 20 bp, Artificial Sequence
  Description of Artificial Sequence: Synthetic oligonucleotide
  Target: LAMA2; (-) strand; PAM type: NRG; PAM sequence: GAG
ctcaggacaaccctggcaga

SEQ ID NO: 94879 - DNA, 20 bp, Artificial Sequence
  Description of Artificial Sequence: Synthetic oligonucleotide
  Target: LAMA2; (-) strand; PAM type: NRG; PAM sequence: GAG
tcctcaggacaaccctggca

SEQ ID NO: 94880 - DNA, 20 bp, Artificial Sequence
  Description of Artificial Sequence: Synthetic oligonucleotide
  Target: LAMA2; (-) strand; PAM type: NRG; PAM sequence: CAG
actcctcaggacaaccctgg

SEQ ID NO: 94881 - DNA, 20 bp, Artificial Sequence
  Description of Artificial Sequence: Synthetic oligonucleotide
  Target: LAMA2; (-) strand; PAM type: NRG; PAM sequence: TGG
tttactcctcaggacaaccc

SEQ ID NO: 94882 - DNA, 20 bp, Artificial Sequence
  Description of Artificial Sequence: Synthetic oligonucleotide
  Target: LAMA2; (-) strand; PAM type: NRG; PAM sequence: AGG
tatgtactcatttactcctc

SEQ ID NO: 94883 - DNA, 20 bp, Artificial Sequence
  Description of Artificial Sequence: Synthetic oligonucleotide
  Target: LAMA2; (-) strand; PAM type: NRG; PAM sequence: CAG
atatgtactcatttactcct

SEQ ID NO: 94884 - DNA, 20 bp, Artificial Sequence
  Description of Artificial Sequence: Synthetic oligonucleotide
  Target: LAMA2; (-) strand; PAM type: NRG; PAM sequence: AAG
tattgtgcttcctttttgca

SEQ ID NO: 94885 - DNA, 20 bp, Artificial Sequence
  Description of Artificial Sequence: Synthetic oligonucleotide
  Target: LAMA2; (-) strand; PAM type: NRG; PAM sequence: TAG
tctctcggggtaataagaac

SEQ ID NO: 94886 - DNA, 20 bp, Artificial Sequence
  Description of Artificial Sequence: Synthetic oligonucleotide
  Target: LAMA2; (-) strand; PAM type: NRG; PAM sequence: AAG
tgtgtctctctcggggtaat

SEQ ID NO: 94887 - DNA, 20 bp, Artificial Sequence
  Description of Artificial Sequence: Synthetic oligonucleotide
  Target: LAMA2; (-) strand; PAM type: NRG; PAM sequence: GGG
ccataaatgtgtctctctcg

SEQ ID NO: 94888 - DNA, 20 bp, Artificial Sequence
  Description of Artificial Sequence: Synthetic oligonucleotide
  Target: LAMA2; (-) strand; PAM type: NRG; PAM sequence: GGG
cccataaatgtgtctctctc

SEQ ID NO: 94889 - DNA, 20 bp, Artificial Sequence
  Description of Artificial Sequence: Synthetic oligonucleotide
  Target: LAMA2; (-) strand; PAM type: NRG; PAM sequence: CGG
tcccataaatgtgtctctct

SEQ ID NO: 94890 - DNA, 20 bp, Artificial Sequence
  Description of Artificial Sequence: Synthetic oligonucleotide
  Target: LAMA2; (-) strand; PAM type: NRG; PAM sequence: AGG
gacccagtgagaaactgtat

SEQ ID NO: 94891 - DNA, 20 bp, Artificial Sequence
  Description of Artificial Sequence: Synthetic oligonucleotide
  Target: LAMA2; (-) strand; PAM type: NRG; PAM sequence: TAG
agacccagtgagaaactgta

SEQ ID NO: 94892 - DNA, 20 bp, Artificial Sequence
  Description of Artificial Sequence: Synthetic oligonucleotide
  Target: LAMA2; (-) strand; PAM type: NRG; PAM sequence: GAG
agtggctatccagacccagt

SEQ ID NO: 94893 - DNA, 20 bp, Artificial Sequence
  Description of Artificial Sequence: Synthetic oligonucleotide
  Target: LAMA2; (-) strand; PAM type: NRG; PAM sequence: CAG
agagagtggctatccagacc

SEQ ID NO: 94894 - DNA, 20 bp, Artificial Sequence
  Description of Artificial Sequence: Synthetic oligonucleotide
  Target: LAMA2; (-) strand; PAM type: NRG; PAM sequence: CAG
tatgggagagagtggctatc

SEQ ID NO: 94895 - DNA, 20 bp, Artificial Sequence
  Description of Artificial Sequence: Synthetic oligonucleotide
  Target: LAMA2; (-) strand; PAM type: NRG; PAM sequence: TGG
aaaataaatatgggagagag

SEQ ID NO: 94896 - DNA, 20 bp, Artificial Sequence
  Description of Artificial Sequence: Synthetic oligonucleotide
  Target: LAMA2; (-) strand; PAM type: NRG; PAM sequence: GAG
ggtaaaataaatatgggaga

SEQ ID NO: 94897 - DNA, 20 bp, Artificial Sequence
  Description of Artificial Sequence: Synthetic oligonucleotide
  Target: LAMA2; (-) strand; PAM type: NRG; PAM sequence: GAG
gaggtaaaataaatatggga

SEQ ID NO: 94898 - DNA, 20 bp, Artificial Sequence
  Description of Artificial Sequence: Synthetic oligonucleotide
  Target: LAMA2; (-) strand; PAM type: NRG; PAM sequence: GAG
atgaggtaaaataaatatgg

SEQ ID NO: 94899 - DNA, 20 bp, Artificial Sequence
  Description of Artificial Sequence: Synthetic oligonucleotide
  Target: LAMA2; (-) strand; PAM type: NRG; PAM sequence: GGG
taatgaggtaaaataaatat

SEQ ID NO: 94900 - DNA, 20 bp, Artificial Sequence
  Description of Artificial Sequence: Synthetic oligonucleotide
  Target: LAMA2; (-) strand; PAM type: NRG; PAM sequence: TGG
ttaatgaggtaaaataaata

SEQ ID NO: 94901 - DNA, 20 bp, Artificial Sequence
  Description of Artificial Sequence: Synthetic oligonucleotide
  Target: LAMA2; (-) strand; PAM type: NRG; PAM sequence: AGG
gtcagtaattgagattaatg

SEQ ID NO: 94902 - DNA, 20 bp, Artificial Sequence
  Description of Artificial Sequence: Synthetic oligonucleotide
  Target: LAMA2; (-) strand; PAM type: NRG; PAM sequence: GAG
ggtcagtaattgagattaat

SEQ ID NO: 94903 - DNA, 20 bp, Artificial Sequence
  Description of Artificial Sequence: Synthetic oligonucleotide
  Target: LAMA2; (-) strand; PAM type: NRG; PAM sequence: GAG
gacattcatggtcagtaatt

SEQ ID NO: 94904 - DNA, 20 bp, Artificial Sequence
  Description of Artificial Sequence: Synthetic oligonucleotide
  Target: LAMA2; (-) strand; PAM type: NRG; PAM sequence: CAG
aaggagcagacattcatggt

SEQ ID NO: 94905 - DNA, 20 bp, Artificial Sequence
  Description of Artificial Sequence: Synthetic oligonucleotide
  Target: LAMA2; (-) strand; PAM type: NRG; PAM sequence: TGG
acttaaggagcagacattca

SEQ ID NO: 94906 - DNA, 20 bp, Artificial Sequence
  Description of Artificial Sequence: Synthetic oligonucleotide
  Target: LAMA2; (-) strand; PAM type: NRG; PAM sequence: CAG
tagtaaacaaacttaaggag

SEQ ID NO: 94907 - DNA, 20 bp, Artificial Sequence
  Description of Artificial Sequence: Synthetic oligonucleotide
  Target: LAMA2; (-) strand; PAM type: NRG; PAM sequence: GAG
cactagtaaacaaacttaag

SEQ ID NO: 94908 - DNA, 20 bp, Artificial Sequence
  Description of Artificial Sequence: Synthetic oligonucleotide
  Target: LAMA2; (-) strand; PAM type: NRG; PAM sequence: AGG
cccactagtaaacaaactta

SEQ ID NO: 94909 - DNA, 20 bp, Artificial Sequence
  Description of Artificial Sequence: Synthetic oligonucleotide
  Target: LAMA2; (-) strand; PAM type: NRG; PAM sequence: AAG
ccccactagtaaacaaactt

SEQ ID NO: 94910 - DNA, 20 bp, Artificial Sequence
  Description of Artificial Sequence: Synthetic oligonucleotide
  Target: LAMA2; (-) strand; PAM type: NRG; PAM sequence: TAG
aaggctaaagaaaaccccac

SEQ ID NO: 94911 - DNA, 20 bp, Artificial Sequence
  Description of Artificial Sequence: Synthetic oligonucleotide
  Target: LAMA2; (-) strand; PAM type: NRG; PAM sequence: AAG
aaaatttgtttcaaaggcta

SEQ ID NO: 94912 - DNA, 20 bp, Artificial Sequence
  Description of Artificial Sequence: Synthetic oligonucleotide
  Target: LAMA2; (-) strand; PAM type: NRG; PAM sequence: AGG
tgttcaaaaatttgtttcaa

SEQ ID NO: 94913 - DNA, 20 bp, Artificial Sequence
  Description of Artificial Sequence: Synthetic oligonucleotide
  Target: LAMA2; (-) strand; PAM type: NRG; PAM sequence: AAG
ttgttcaaaaatttgtttca

SEQ ID NO: 94914 - DNA, 20 bp, Artificial Sequence
  Description of Artificial Sequence: Synthetic oligonucleotide
  Target: LAMA2; (-) strand; PAM type: NRG; PAM sequence: CAG
aaataaatactaccaaattt

SEQ ID NO: 94915 - DNA, 20 bp, Artificial Sequence
  Description of Artificial Sequence: Synthetic oligonucleotide
  Target: LAMA2; (-) strand; PAM type: NRG; PAM sequence: TAG
tagctttaaaggctaagttg

SEQ ID NO: 94916 - DNA, 20 bp, Artificial Sequence
  Description of Artificial Sequence: Synthetic oligonucleotide
  Target: LAMA2; (-) strand; PAM type: NRG; PAM sequence: AAG
ataatgtagctttaaaggct

SEQ ID NO: 94917 - DNA, 20 bp, Artificial Sequence
  Description of Artificial Sequence: Synthetic oligonucleotide
  Target: LAMA2; (-) strand; PAM type: NRG; PAM sequence: AGG
tttaaataatgtagctttaa

SEQ ID NO: 94918 - DNA, 20 bp, Artificial Sequence
  Description of Artificial Sequence: Synthetic oligonucleotide
  Target: LAMA2; (-) strand; PAM type: NRG; PAM sequence: AAG
atttaaataatgtagcttta

SEQ ID NO: 94919 - DNA, 20 bp, Artificial Sequence
  Description of Artificial Sequence: Synthetic oligonucleotide
  Target: LAMA2; (-) strand; PAM type: NRG; PAM sequence: TAG
tttcaaatatttaaataatg

SEQ ID NO: 94920 - DNA, 20 bp, Artificial Sequence
  Description of Artificial Sequence: Synthetic oligonucleotide
  Target: LAMA2; (-) strand; PAM type: NRG; PAM sequence: CGG
aggaaatatacaagaagaaa

SEQ ID NO: 94921 - DNA, 20 bp, Artificial Sequence
  Description of Artificial Sequence: Synthetic oligonucleotide
  Target: LAMA2; (-) strand; PAM type: NRG; PAM sequence: AAG
tatgtaaggaaatatacaag

SEQ ID NO: 94922 - DNA, 20 bp, Artificial Sequence
  Description of Artificial Sequence: Synthetic oligonucleotide
  Target: LAMA2; (-) strand; PAM type: NRG; PAM sequence: AAG
gattatgtaaggaaatatac

SEQ ID NO: 94923 - DNA, 20 bp, Artificial Sequence
  Description of Artificial Sequence: Synthetic oligonucleotide
  Target: LAMA2; (-) strand; PAM type: NRG; PAM sequence: AGG
attccaaagtcgattatgta

SEQ ID NO: 94924 - DNA, 20 bp, Artificial Sequence
  Description of Artificial Sequence: Synthetic oligonucleotide
  Target: LAMA2; (-) strand; PAM type: NRG; PAM sequence: AAG
aattccaaagtcgattatgt

SEQ ID NO: 94925 - DNA, 20 bp, Artificial Sequence
  Description of Artificial Sequence: Synthetic oligonucleotide
  Target: LAMA2; (-) strand; PAM type: NRG; PAM sequence: AAG
ctatcattttaaaaattcca

SEQ ID NO: 94926 - DNA, 20 bp, Artificial Sequence
  Description of Artificial Sequence: Synthetic oligonucleotide
  Target: LAMA2; (-) strand; PAM type: NRG; PAM sequence: TAG
tcaaatgagattccaaatta

SEQ ID NO: 94927 - DNA, 20 bp, Artificial Sequence
  Description of Artificial Sequence: Synthetic oligonucleotide
  Target: LAMA2; (-) strand; PAM type: NRG; PAM sequence: GAG
aaatcaatcaaatatcaaat

SEQ ID NO: 94928 - DNA, 20 bp, Artificial Sequence
  Description of Artificial Sequence: Synthetic oligonucleotide
  Target: LAMA2; (-) strand; PAM type: NRG; PAM sequence: GGG
tattgatttactcattaaag

SEQ ID NO: 94929 - DNA, 20 bp, Artificial Sequence
  Description of Artificial Sequence: Synthetic oligonucleotide
  Target: LAMA2; (-) strand; PAM type: NRG; PAM sequence: GGG
atattgatttactcattaaa

SEQ ID NO: 94930 - DNA, 20 bp, Artificial Sequence
  Description of Artificial Sequence: Synthetic oligonucleotide
  Target: LAMA2; (-) strand; PAM type: NRG; PAM sequence: AGG
catattgatttactcattaa

SEQ ID NO: 94931 - DNA, 20 bp, Artificial Sequence
  Description of Artificial Sequence: Synthetic oligonucleotide
  Target: LAMA2; (-) strand; PAM type: NRG; PAM sequence: AAG
tcatattgatttactcatta

SEQ ID NO: 94932 - DNA, 20 bp, Artificial Sequence
  Description of Artificial Sequence: Synthetic oligonucleotide
  Target: LAMA2; (-) strand; PAM type: NRG; PAM sequence: CAG
ctttgtattcatctttattt

SEQ ID NO: 94933 - DNA, 20 bp, Artificial Sequence
  Description of Artificial Sequence: Synthetic oligonucleotide
  Target: LAMA2; (-) strand; PAM type: NRG; PAM sequence: TAG
attgaaaaatatctgagtca

SEQ ID NO: 94934 - DNA, 20 bp, Artificial Sequence
  Description of Artificial Sequence: Synthetic oligonucleotide
  Target: LAMA2; (-) strand; PAM type: NRG; PAM sequence: GAG
aacggtattgaaaaatatct

SEQ ID NO: 94935 - DNA, 20 bp, Artificial Sequence
  Description of Artificial Sequence: Synthetic oligonucleotide
  Target: LAMA2; (-) strand; PAM type: NRG; PAM sequence: CGG
ctaaacataatatattaaaa

SEQ ID NO: 94936 - DNA, 20 bp, Artificial Sequence
  Description of Artificial Sequence: Synthetic oligonucleotide
  Target: LAMA2; (-) strand; PAM type: NRG; PAM sequence: AAG
aacagaaatacatagacaaa

SEQ ID NO: 94937 - DNA, 20 bp, Artificial Sequence
  Description of Artificial Sequence: Synthetic oligonucleotide
  Target: LAMA2; (-) strand; PAM type: NRG; PAM sequence: TAG
caaacagaaacagaaataca

SEQ ID NO: 94938 - DNA, 20 bp, Artificial Sequence
  Description of Artificial Sequence: Synthetic oligonucleotide
  Target: LAMA2; (-) strand; PAM type: NRG; PAM sequence: CAG
accagacacacaaacagaaa

SEQ ID NO: 94939 - DNA, 20 bp, Artificial Sequence
  Description of Artificial Sequence: Synthetic oligonucleotide
  Target: LAMA2; (-) strand; PAM type: NRG; PAM sequence: CAG
cataccaccagacacacaaa

SEQ ID NO: 94940 - DNA, 20 bp, Artificial Sequence
  Description of Artificial Sequence: Synthetic oligonucleotide
  Target: LAMA2; (-) strand; PAM type: NRG; PAM sequence: CAG
caattacatacccataccac

SEQ ID NO: 94941 - DNA, 20 bp, Artificial Sequence
  Description of Artificial Sequence: Synthetic oligonucleotide
  Target: LAMA2; (-) strand; PAM type: NRG; PAM sequence: TAG
gcttaggatatagcatgaaa

SEQ ID NO: 94942 - DNA, 20 bp, Artificial Sequence
  Description of Artificial Sequence: Synthetic oligonucleotide
  Target: LAMA2; (-) strand; PAM type: NRG; PAM sequence: TAG
atataaatatgcttaggata

SEQ ID NO: 94943 - DNA, 20 bp, Artificial Sequence
  Description of Artificial Sequence: Synthetic oligonucleotide
  Target: LAMA2; (-) strand; PAM type: NRG; PAM sequence: AGG
ttaatgatataaatatgctt

SEQ ID NO: 94944 - DNA, 20 bp, Artificial Sequence
  Description of Artificial Sequence: Synthetic oligonucleotide
  Target: LAMA2; (-) strand; PAM type: NRG; PAM sequence: TAG
tttaatgatataaatatgct

SEQ ID NO: 94945 - DNA, 20 bp, Artificial Sequence
  Description of Artificial Sequence: Synthetic oligonucleotide
  Target: LAMA2; (-) strand; PAM type: NRG; PAM sequence: CAG
attaaaatcctgttttgaag

SEQ ID NO: 94946 - DNA, 20 bp, Artificial Sequence
  Description of Artificial Sequence: Synthetic oligonucleotide
  Target: LAMA2; (-) strand; PAM type: NRG; PAM sequence: AAG
agaattaaaatcctgttttg

SEQ ID NO: 94947 - DNA, 20 bp, Artificial Sequence
  Description of Artificial Sequence: Synthetic oligonucleotide
  Target: LAMA2; (-) strand; PAM type: NRG; PAM sequence: AAG
cacattatgaaataatatgc

SEQ ID NO: 94948 - DNA, 20 bp, Artificial Sequence
  Description of Artificial Sequence: Synthetic oligonucleotide
  Target: LAMA2; (-) strand; PAM type: NRG; PAM sequence: AGG
atcatggtgaataactatgc

SEQ ID NO: 94949 - DNA, 20 bp, Artificial Sequence
  Description of Artificial Sequence: Synthetic oligonucleotide
  Target: LAMA2; (-) strand; PAM type: NRG; PAM sequence: CAG
tatcatggtgaataactatg

SEQ ID NO: 94950 - DNA, 20 bp, Artificial Sequence
  Description of Artificial Sequence: Synthetic oligonucleotide
  Target: LAMA2; (-) strand; PAM type: NRG; PAM sequence: TGG
tattacaatattatttatca

SEQ ID NO: 94951 - DNA, 20 bp, Artificial Sequence
  Description of Artificial Sequence: Synthetic oligonucleotide
  Target: LAMA2; (-) strand; PAM type: NRG; PAM sequence: AAG
ttggaatattattaaagcaa

SEQ ID NO: 94952 - DNA, 20 bp, Artificial Sequence
  Description of Artificial Sequence: Synthetic oligonucleotide
  Target: LAMA2; (-) strand; PAM type: NRG; PAM sequence: AAG
cagaaattggaatattatta

SEQ ID NO: 94953 - DNA, 20 bp, Artificial Sequence
  Description of Artificial Sequence: Synthetic oligonucleotide
  Target: LAMA2; (-) strand; PAM type: NRG; PAM sequence: TGG
ttagagaaataatcagaaat

SEQ ID NO: 94954 - DNA, 20 bp, Artificial Sequence
  Description of Artificial Sequence: Synthetic oligonucleotide
  Target: LAMA2; (-) strand; PAM type: NRG; PAM sequence: CAG
acctggcttagagaaataat

SEQ ID NO: 94955 - DNA, 20 bp, Artificial Sequence
  Description of Artificial Sequence: Synthetic oligonucleotide
  Target: LAMA2; (-) strand; PAM type: NRG; PAM sequence: GAG
aattttagatacctggctta

SEQ ID NO: 94956 - DNA, 20 bp, Artificial Sequence
  Description of Artificial Sequence: Synthetic oligonucleotide
  Target: LAMA2; (-) strand; PAM type: NRG; PAM sequence: TAG
aaaattttagatacctggct

SEQ ID NO: 94957 - DNA, 20 bp, Artificial Sequence
  Description of Artificial Sequence: Synthetic oligonucleotide
  Target: LAMA2; (-) strand; PAM type: NRG; PAM sequence: TGG
catgtaaaattttagatacc

SEQ ID NO: 94958 - DNA, 20 bp, Artificial Sequence
  Description of Artificial Sequence: Synthetic oligonucleotide
  Target: LAMA2; (-) strand; PAM type: NRG; PAM sequence: TAG
aagaaattcatgtaaaattt

SEQ ID NO: 94959 - DNA, 20 bp, Artificial Sequence
  Description of Artificial Sequence: Synthetic oligonucleotide
  Target: LAMA2; (-) strand; PAM type: NRG; PAM sequence: AAG
tataatatcattattagtaa

SEQ ID NO: 94960 - DNA, 20 bp, Artificial Sequence
  Description of Artificial Sequence: Synthetic oligonucleotide
  Target: LAMA2; (-) strand; PAM type: NRG; PAM sequence: TAG
taaccatataatatcattat

SEQ ID NO: 94961 - DNA, 20 bp, Artificial Sequence
  Description of Artificial Sequence: Synthetic oligonucleotide
  Target: LAMA2; (-) strand; PAM type: NRG; PAM sequence: CAG
aaagcatgtaacagttccaa

SEQ ID NO: 94962 - DNA, 20 bp, Artificial Sequence
  Description of Artificial Sequence: Synthetic oligonucleotide
  Target: LAMA2; (-) strand; PAM type: NRG; PAM sequence: CAG
ttaaagaaaaaagcatgtaa

SEQ ID NO: 94963 - DNA, 20 bp, Artificial Sequence
  Description of Artificial Sequence: Synthetic oligonucleotide
  Target: LAMA2; (-) strand; PAM type: NRG; PAM sequence: AAG
tggtatatgattaaagaaaa

SEQ ID NO: 94964 - DNA, 20 bp, Artificial Sequence
  Description of Artificial Sequence: Synthetic oligonucleotide
  Target: LAMA2; (-) strand; PAM type: NRG; PAM sequence: AAG
cagattgtggtatatgatta

SEQ ID NO: 94965 - DNA, 20 bp, Artificial Sequence
  Description of Artificial Sequence: Synthetic oligonucleotide
  Target: LAMA2; (-) strand; PAM type: NRG; PAM sequence: TGG
tctagttctaattcagattg

SEQ ID NO: 94966 - DNA, 20 bp, Artificial Sequence
  Description of Artificial Sequence: Synthetic oligonucleotide
  Target: LAMA2; (-) strand; PAM type: NRG; PAM sequence: CAG
ttttatttctagttctaatt

SEQ ID NO: 94967 - DNA, 20 bp, Artificial Sequence
  Description of Artificial Sequence: Synthetic oligonucleotide
  Target: LAMA2; (-) strand; PAM type: NRG; PAM sequence: TAG
gttggttttatttttatttc

SEQ ID NO: 94968 - DNA, 20 bp, Artificial Sequence
  Description of Artificial Sequence: Synthetic oligonucleotide
  Target: LAMA2; (-) strand; PAM type: NRG; PAM sequence: TGG
ctcatctttacatttactgt

SEQ ID NO: 94969 - DNA, 20 bp, Artificial Sequence
  Description of Artificial Sequence: Synthetic oligonucleotide
  Target: LAMA2; (-) strand; PAM type: NRG; PAM sequence: GAG
aaatgtaaaatgggttgact

SEQ ID NO: 94970 - DNA, 20 bp, Artificial Sequence
  Description of Artificial Sequence: Synthetic oligonucleotide
  Target: LAMA2; (-) strand; PAM type: NRG; PAM sequence: GGG
ttatttttaaaatgtaaaat

SEQ ID NO: 94971 - DNA, 20 bp, Artificial Sequence
  Description of Artificial Sequence: Synthetic oligonucleotide
  Target: LAMA2; (-) strand; PAM type: NRG; PAM sequence: TGG
tttatttttaaaatgtaaaa

SEQ ID NO: 94972 - DNA, 20 bp, Artificial Sequence
  Description of Artificial Sequence: Synthetic oligonucleotide
  Target: LAMA2; (-) strand; PAM type: NRG; PAM sequence: TAG
aaaatgaccgtagctaagaa

SEQ ID NO: 94973 - DNA, 20 bp, Artificial Sequence
  Description of Artificial Sequence: Synthetic oligonucleotide
  Target: LAMA2; (-) strand; PAM type: NRG; PAM sequence: AAG
tttttaaaatgaccgtagct

SEQ ID NO: 94974 - DNA, 20 bp, Artificial Sequence
  Description of Artificial Sequence: Synthetic oligonucleotide
  Target: LAMA2; (-) strand; PAM type: NRG; PAM sequence: TAG
ttagatttttaaaatgaccg

SEQ ID NO: 94975 - DNA, 20 bp, Artificial Sequence
  Description of Artificial Sequence: Synthetic oligonucleotide
  Target: LAMA2; (-) strand; PAM type: NRG; PAM sequence: TAG
agtgaaatcacactgaaaat

SEQ ID NO: 94976 - DNA, 20 bp, Artificial Sequence
  Description of Artificial Sequence: Synthetic oligonucleotide
  Target: LAMA2; (-) strand; PAM type: NRG; PAM sequence: AAG
gttttaaaaataagttataa

SEQ ID NO: 94977 - DNA, 20 bp, Artificial Sequence
  Description of Artificial Sequence: Synthetic oligonucleotide
  Target: LAMA2; (-) strand; PAM type: NRG; PAM sequence: AAG
ttgttagtagttttaaaaat

SEQ ID NO: 94978 - DNA, 20 bp, Artificial Sequence
  Description of Artificial Sequence: Synthetic oligonucleotide
  Target: LAMA2; (-) strand; PAM type: NRG; PAM sequence: TAG
attttagatattattgttag

SEQ ID NO: 94979 - DNA, 20 bp, Artificial Sequence
  Description of Artificial Sequence: Synthetic oligonucleotide
  Target: LAMA2; (-) strand; PAM type: NRG; PAM sequence: TAG
tatattttagatattattgt

SEQ ID NO: 94980 - DNA, 20 bp, Artificial Sequence
  Description of Artificial Sequence: Synthetic oligonucleotide
  Target: LAMA2; (-) strand; PAM type: NRG; PAM sequence: TAG
ataagcctcattatatattt

SEQ ID NO: 94981 - DNA, 20 bp, Artificial Sequence
  Description of Artificial Sequence: Synthetic oligonucleotide
  Target: LAMA2; (-) strand; PAM type: NRG; PAM sequence: AAG
ccacccaaagagaaattaat

SEQ ID NO: 94982 - DNA, 20 bp, Artificial Sequence
  Description of Artificial Sequence: Synthetic oligonucleotide
  Target: LAMA2; (-) strand; PAM type: NRG; PAM sequence: GAG
cttaacgtgagccacccaaa

SEQ ID NO: 94983 - DNA, 20 bp, Artificial Sequence
  Description of Artificial Sequence: Synthetic oligonucleotide
  Target: LAMA2; (-) strand; PAM type: NRG; PAM sequence: AAG
cacttaacgtgagccaccca

SEQ ID NO: 94984 - DNA, 20 bp, Artificial Sequence
  Description of Artificial Sequence: Synthetic oligonucleotide
  Target: LAMA2; (-) strand; PAM type: NRG; PAM sequence: GAG
aaaatcttgccacttaacgt

SEQ ID NO: 94985 - DNA, 20 bp, Artificial Sequence
  Description of Artificial Sequence: Synthetic oligonucleotide
  Target: LAMA2; (-) strand; PAM type: NRG; PAM sequence: TGG
tagacttaataattgcttct

SEQ ID NO: 94986 - DNA, 20 bp, Artificial Sequence
  Description of Artificial Sequence: Synthetic oligonucleotide
  Target: LAMA2; (-) strand; PAM type: NRG; PAM sequence: TAG
taattcttattttggaaaat

SEQ ID NO: 94987 - DNA, 20 bp, Artificial Sequence
  Description of Artificial Sequence: Synthetic oligonucleotide
  Target: LAMA2; (-) strand; PAM type: NRG; PAM sequence: TGG
tgtaaaaataattcttattt

SEQ ID NO: 94988 - DNA, 20 bp, Artificial Sequence
  Description of Artificial Sequence: Synthetic oligonucleotide
  Target: LAMA2; (-) strand; PAM type: NRG; PAM sequence: CGG
ttaatctggaaaattattct

SEQ ID NO: 94989 - DNA, 20 bp, Artificial Sequence
  Description of Artificial Sequence: Synthetic oligonucleotide
  Target: LAMA2; (-) strand; PAM type: NRG; PAM sequence: TGG
attattatgatattttaatc

SEQ ID NO: 94990 - DNA, 20 bp, Artificial Sequence
  Description of Artificial Sequence: Synthetic oligonucleotide
  Target: LAMA2; (-) strand; PAM type: NRG; PAM sequence: AAG
ggttattttttaaaaatata

SEQ ID NO: 94991 - DNA, 20 bp, Artificial Sequence
  Description of Artificial Sequence: Synthetic oligonucleotide
  Target: LAMA2; (-) strand; PAM type: NRG; PAM sequence: GGG
atcctgcttaaaatacttca

SEQ ID NO: 94992 - DNA, 20 bp, Artificial Sequence
  Description of Artificial Sequence: Synthetic oligonucleotide
  Target: LAMA2; (-) strand; PAM type: NRG; PAM sequence: AGG
tatcctgcttaaaatacttc

SEQ ID NO: 94993 - DNA, 20 bp, Artificial Sequence
  Description of Artificial Sequence: Synthetic oligonucleotide
  Target: LAMA2; (-) strand; PAM type: NRG; PAM sequence: CAG
ctatcctgcttaaaatactt

SEQ ID NO: 94994 - DNA, 20 bp, Artificial Sequence
  Description of Artificial Sequence: Synthetic oligonucleotide
  Target: LAMA2; (-) strand; PAM type: NRG; PAM sequence: CAG
gattaaaaaatcactccgag

SEQ ID NO: 94995 - DNA, 20 bp, Artificial Sequence
  Description of Artificial Sequence: Synthetic oligonucleotide
  Target: LAMA2; (-) strand; PAM type: NRG; PAM sequence: GAG
atggattaaaaaatcactcc

SEQ ID NO: 94996 - DNA, 20 bp, Artificial Sequence
  Description of Artificial Sequence: Synthetic oligonucleotide
  Target: LAMA2; (-) strand; PAM type: NRG; PAM sequence: TGG
gaaacgttagaaaatgctga

SEQ ID NO: 94997 - DNA, 20 bp, Artificial Sequence
  Description of Artificial Sequence: Synthetic oligonucleotide
  Target: LAMA2; (-) strand; PAM type: NRG; PAM sequence: TAG
tcaggcttaaaatgaaacgt

SEQ ID NO: 94998 - DNA, 20 bp, Artificial Sequence
  Description of Artificial Sequence: Synthetic oligonucleotide
  Target: LAMA2; (-) strand; PAM type: NRG; PAM sequence: AGG
ttcttgaaatgcatgttatc

SEQ ID NO: 94999 - DNA, 20 bp, Artificial Sequence
  Description of Artificial Sequence: Synthetic oligonucleotide
  Target: LAMA2; (-) strand; PAM type: NRG; PAM sequence: CAG
tttcttgaaatgcatgttat

SEQ ID NO: 95000 - DNA, 20 bp, Artificial Sequence
  Description of Artificial Sequence: Synthetic oligonucleotide
  Target: LAMA2; (-) strand; PAM type: NRG; PAM sequence: CGG
caagtttgcattaccagctt

SEQ ID NO: 95001 - DNA, 20 bp, Artificial Sequence
  Description of Artificial Sequence: Synthetic oligonucleotide
  Target: LAMA2; (-) strand; PAM type: NRG; PAM sequence: CAG
tacggtcaagtttgcattac

SEQ ID NO: 95002 - DNA, 20 bp, Artificial Sequence
  Description of Artificial Sequence: Synthetic oligonucleotide
  Target: LAMA2; (-) strand; PAM type: NRG; PAM sequence: AAG
acaaatcatcttttacggtc

SEQ ID NO: 95003 - DNA, 20 bp, Artificial Sequence
  Description of Artificial Sequence: Synthetic oligonucleotide
  Target: LAMA2; (-) strand; PAM type: NRG; PAM sequence: CGG
ctataacaaatcatctttta

SEQ ID NO: 95004 - DNA, 20 bp, Artificial Sequence
  Description of Artificial Sequence: Synthetic oligonucleotide
  Target: LAMA2; (-) strand; PAM type: NRG; PAM sequence: GAG
gtaaactttcattctctgat

SEQ ID NO: 95005 - DNA, 20 bp, Artificial Sequence
  Description of Artificial Sequence: Synthetic oligonucleotide
  Target: LAMA2; (-) strand; PAM type: NRG; PAM sequence: AAG
attaaagcaccagatcaggt

SEQ ID NO: 95006 - DNA, 20 bp, Artificial Sequence
  Description of Artificial Sequence: Synthetic oligonucleotide
  Target: LAMA2; (-) strand; PAM type: NRG; PAM sequence: AGG
acgtattaaagcaccagatc

SEQ ID NO: 95007 - DNA, 20 bp, Artificial Sequence
  Description of Artificial Sequence: Synthetic oligonucleotide
  Target: LAMA2; (-) strand; PAM type: NRG; PAM sequence: CAG
cacgtattaaagcaccagat

SEQ ID NO: 95008 - DNA, 20 bp, Artificial Sequence
  Description of Artificial Sequence: Synthetic oligonucleotide
  Target: LAMA2; (-) strand; PAM type: NRG; PAM sequence: CAG
gagaacacgtattaaagcac

SEQ ID NO: 95009 - DNA, 20 bp, Artificial Sequence
  Description of Artificial Sequence: Synthetic oligonucleotide
  Target: LAMA2; (-) strand; PAM type: NRG; PAM sequence: AAG
attagtgagaacacgtatta

SEQ ID NO: 95010 - DNA, 20 bp, Artificial Sequence
  Description of Artificial Sequence: Synthetic oligonucleotide
  Target: LAMA2; (-) strand; PAM type: NRG; PAM sequence: GAG
aacaattgaaattgattagt

SEQ ID NO: 95011 - DNA, 20 bp, Artificial Sequence
  Description of Artificial Sequence: Synthetic oligonucleotide
  Target: LAMA2; (-) strand; PAM type: NRG; PAM sequence: TAG
ttctaacaattgaaattgat

SEQ ID NO: 95012 - DNA, 20 bp, Artificial Sequence
  Description of Artificial Sequence: Synthetic oligonucleotide
  Target: LAMA2; (-) strand; PAM type: NRG; PAM sequence: AGG
caacaaacatttgatttctt

SEQ ID NO: 95013 - DNA, 20 bp, Artificial Sequence
  Description of Artificial Sequence: Synthetic oligonucleotide
  Target: LAMA2; (-) strand; PAM type: NRG; PAM sequence: TAG
tcaacaaacatttgatttct

SEQ ID NO: 95014 - DNA, 20 bp, Artificial Sequence
  Description of Artificial Sequence: Synthetic oligonucleotide
  Target: LAMA2; (-) strand; PAM type: NRG; PAM sequence: TGG
gcttacactgatcaaataat

SEQ ID NO: 95015 - DNA, 20 bp, Artificial Sequence
  Description of Artificial Sequence: Synthetic oligonucleotide
  Target: LAMA2; (-) strand; PAM type: NRG; PAM sequence: AGG
acattataaatataattttc

SEQ ID NO: 95016 - DNA, 20 bp, Artificial Sequence
  Description of Artificial Sequence: Synthetic oligonucleotide
  Target: LAMA2; (-) strand; PAM type: NRG; PAM sequence: CAG
cacattataaatataatttt

SEQ ID NO: 95017 - DNA, 20 bp, Artificial Sequence
  Description of Artificial Sequence: Synthetic oligonucleotide
  Target: LAMA2; (-) strand; PAM type: NRG; PAM sequence: TAG
aatacttttaatcattgcta

SEQ ID NO: 95018 - DNA, 20 bp, Artificial Sequence
  Description of Artificial Sequence: Synthetic oligonucleotide
  Target: LAMA2; (-) strand; PAM type: NRG; PAM sequence: TAG
ctttttgccctaatatttga

SEQ ID NO: 95019 - DNA, 20 bp, Artificial Sequence
  Description of Artificial Sequence: Synthetic oligonucleotide
  Target: LAMA2; (-) strand; PAM type: NRG; PAM sequence: AAG
cattattgaccagcagccta

SEQ ID NO: 95020 - DNA, 20 bp, Artificial Sequence
  Description of Artificial Sequence: Synthetic oligonucleotide
  Target: LAMA2; (-) strand; PAM type: NRG; PAM sequence: CAG
ctttcaacattattgaccag

SEQ ID NO: 95021 - DNA, 20 bp, Artificial Sequence
  Description of Artificial Sequence: Synthetic oligonucleotide
  Target: LAMA2; (-) strand; PAM type: NRG; PAM sequence: CAG
atactttcaacattattgac

SEQ ID NO: 95022 - DNA, 20 bp, Artificial Sequence
  Description of Artificial Sequence: Synthetic oligonucleotide
  Target: LAMA2; (-) strand; PAM type: NRG; PAM sequence: TGG
cagatctatggactcctact

SEQ ID NO: 95023 - DNA, 20 bp, Artificial Sequence
  Description of Artificial Sequence: Synthetic oligonucleotide
  Target: LAMA2; (-) strand; PAM type: NRG; PAM sequence: TGG
attgattactttcagatcta

SEQ ID NO: 95024 - DNA, 20 bp, Artificial Sequence
  Description of Artificial Sequence: Synthetic oligonucleotide
  Target: LAMA2; (-) strand; PAM type: NRG; PAM sequence: CAG
taatctgaattgattacttt

SEQ ID NO: 95025 - DNA, 20 bp, Artificial Sequence
  Description of Artificial Sequence: Synthetic oligonucleotide
  Target: LAMA2; (-) strand; PAM type: NRG; PAM sequence: TAG
aaattttacttcttcatttt

SEQ ID NO: 95026 - DNA, 20 bp, Artificial Sequence
  Description of Artificial Sequence: Synthetic oligonucleotide
  Target: LAMA2; (-) strand; PAM type: NRG; PAM sequence: TAG
ggacctataggtggtatttc

SEQ ID NO: 95027 - DNA, 20 bp, Artificial Sequence
  Description of Artificial Sequence: Synthetic oligonucleotide
  Target: LAMA2; (-) strand; PAM type: NRG; PAM sequence: TGG
atatggaaaggacctatagg

SEQ ID NO: 95028 - DNA, 20 bp, Artificial Sequence
  Description of Artificial Sequence: Synthetic oligonucleotide
  Target: LAMA2; (-) strand; PAM type: NRG; PAM sequence: AGG
gcaatatggaaaggacctat

SEQ ID NO: 95029 - DNA, 20 bp, Artificial Sequence
  Description of Artificial Sequence: Synthetic oligonucleotide
  Target: LAMA2; (-) strand; PAM type: NRG; PAM sequence: TAG
agcaatatggaaaggaccta

SEQ ID NO: 95030 - DNA, 20 bp, Artificial Sequence
  Description of Artificial Sequence: Synthetic oligonucleotide
  Target: LAMA2; (-) strand; PAM type: NRG; PAM sequence: AGG
atttcaatagcaatatggaa

SEQ ID NO: 95031 - DNA, 20 bp, Artificial Sequence
  Description of Artificial Sequence: Synthetic oligonucleotide
  Target: LAMA2; (-) strand; PAM type: NRG; PAM sequence: AAG
gatttcaatagcaatatgga

SEQ ID NO: 95032 - DNA, 20 bp, Artificial Sequence
  Description of Artificial Sequence: Synthetic oligonucleotide
  Target: LAMA2; (-) strand; PAM type: NRG; PAM sequence: TGG
tcaagatttcaatagcaata

SEQ ID NO: 95033 - DNA, 20 bp, Artificial Sequence
  Description of Artificial Sequence: Synthetic oligonucleotide
  Target: LAMA2; (-) strand; PAM type: NRG; PAM sequence: TAG
agtacttctcaagatttcaa

SEQ ID NO: 95034 - DNA, 20 bp, Artificial Sequence
  Description of Artificial Sequence: Synthetic oligonucleotide
  Target: LAMA2; (-) strand; PAM type: NRG; PAM sequence: AAG
agcctgtcccagtacttctc

SEQ ID NO: 95035 - DNA, 20 bp, Artificial Sequence
  Description of Artificial Sequence: Synthetic oligonucleotide
  Target: LAMA2; (-) strand; PAM type: NRG; PAM sequence: CAG
gtattttcaccagcctgtcc

SEQ ID NO: 95036 - DNA, 20 bp, Artificial Sequence
  Description of Artificial Sequence: Synthetic oligonucleotide
  Target: LAMA2; (-) strand; PAM type: NRG; PAM sequence: CAG
actgtctgttgtattttcac

SEQ ID NO: 95037 - DNA, 20 bp, Artificial Sequence
  Description of Artificial Sequence: Synthetic oligonucleotide
  Target: LAMA2; (-) strand; PAM type: NRG; PAM sequence: AGG
tcaaaattaactgcagaatt

SEQ ID NO: 95038 - DNA, 20 bp, Artificial Sequence
  Description of Artificial Sequence: Synthetic oligonucleotide
  Target: LAMA2; (-) strand; PAM type: NRG; PAM sequence: TAG
atcaaaattaactgcagaat

SEQ ID NO: 95039 - DNA, 20 bp, Artificial Sequence
  Description of Artificial Sequence: Synthetic oligonucleotide
  Target: LAMA2; (-) strand; PAM type: NRG; PAM sequence: CAG
aattttatcaaaattaactg

SEQ ID NO: 95040 - DNA, 20 bp, Artificial Sequence
  Description of Artificial Sequence: Synthetic oligonucleotide
  Target: LAMA2; (-) strand; PAM type: NRG; PAM sequence: AAG
tctatgatatccaaagagaa

SEQ ID NO: 95041 - DNA, 20 bp, Artificial Sequence
  Description of Artificial Sequence: Synthetic oligonucleotide
  Target: LAMA2; (-) strand; PAM type: NRG; PAM sequence: GAG
ccttttctatgatatccaaa

SEQ ID NO: 95042 - DNA, 20 bp, Artificial Sequence
  Description of Artificial Sequence: Synthetic oligonucleotide
  Target: LAMA2; (-) strand; PAM type: NRG; PAM sequence: AAG
gaccttttctatgatatcca

SEQ ID NO: 95043 - DNA, 20 bp, Artificial Sequence
  Description of Artificial Sequence: Synthetic oligonucleotide
  Target: LAMA2; (-) strand; PAM type: NRG; PAM sequence: TGG
tgggttttcattcaatcaaa

SEQ ID NO: 95044 - DNA, 20 bp, Artificial Sequence
  Description of Artificial Sequence: Synthetic oligonucleotide
  Target: LAMA2; (-) strand; PAM type: NRG; PAM sequence: GGG
tcactgatgttatgacaatt

SEQ ID NO: 95045 - DNA, 20 bp, Artificial Sequence
  Description of Artificial Sequence: Synthetic oligonucleotide
  Target: LAMA2; (-) strand; PAM type: NRG; PAM sequence: TGG
ctcactgatgttatgacaat

SEQ ID NO: 95046 - DNA, 20 bp, Artificial Sequence
  Description of Artificial Sequence: Synthetic oligonucleotide
  Target: LAMA2; (-) strand; PAM type: NRG; PAM sequence: AGG
agaggaacttaggagttatc

SEQ ID NO: 95047 - DNA, 20 bp, Artificial Sequence
  Description of Artificial Sequence: Synthetic oligonucleotide
  Target: LAMA2; (-) strand; PAM type: NRG; PAM sequence: CAG
cagaggaacttaggagttat

SEQ ID NO: 95048 - DNA, 20 bp, Artificial Sequence
  Description of Artificial Sequence: Synthetic oligonucleotide
  Target: LAMA2; (-) strand; PAM type: NRG; PAM sequence: GAG
gtgggaacagaggaacttag

SEQ ID NO: 95049 - DNA, 20 bp, Artificial Sequence
  Description of Artificial Sequence: Synthetic oligonucleotide
  Target: LAMA2; (-) strand; PAM type: NRG; PAM sequence: AGG
aggtgggaacagaggaactt

SEQ ID NO: 95050 - DNA, 20 bp, Artificial Sequence
  Description of Artificial Sequence: Synthetic oligonucleotide
  Target: LAMA2; (-) strand; PAM type: NRG; PAM sequence: TAG
caggtgggaacagaggaact

SEQ ID NO: 95051 - DNA, 20 bp, Artificial Sequence
  Description of Artificial Sequence: Synthetic oligonucleotide
  Target: LAMA2; (-) strand; PAM type: NRG; PAM sequence: AGG
caaagatcaggtgggaacag

SEQ ID NO: 95052 - DNA, 20 bp, Artificial Sequence
  Description of Artificial Sequence: Synthetic oligonucleotide
  Target: LAMA2; (-) strand; PAM type: NRG; PAM sequence: GAG
ccaaagatcaggtgggaaca

SEQ ID NO: 95053 - DNA, 20 bp, Artificial Sequence
  Description of Artificial Sequence: Synthetic oligonucleotide
  Target: LAMA2; (-) strand; PAM type: NRG; PAM sequence: CAG
taccaaagatcaggtgggaa

SEQ ID NO: 95054 - DNA, 20 bp, Artificial Sequence
  Description of Artificial Sequence: Synthetic oligonucleotide
  Target: LAMA2; (-) strand; PAM type: NRG; PAM sequence: GGG
cacaataccaaagatcaggt

SEQ ID NO: 95055 - DNA, 20 bp, Artificial Sequence
  Description of Artificial Sequence: Synthetic oligonucleotide
  Target: LAMA2; (-) strand; PAM type: NRG; PAM sequence: TGG
gcacaataccaaagatcagg

SEQ ID NO: 95056 - DNA, 20 bp, Artificial Sequence
  Description of Artificial Sequence: Synthetic oligonucleotide
  Target: LAMA2; (-) strand; PAM type: NRG; PAM sequence: AGG
gatgcacaataccaaagatc

SEQ ID NO: 95057 - DNA, 20 bp, Artificial Sequence
  Description of Artificial Sequence: Synthetic oligonucleotide
  Target: LAMA2; (-) strand; PAM type: NRG; PAM sequence: CAG
agatgcacaataccaaagat

SEQ ID NO: 95058 - DNA, 20 bp, Artificial Sequence
  Description of Artificial Sequence: Synthetic oligonucleotide
  Target: LAMA2; (-) strand; PAM type: NRG; PAM sequence: AAG
aagcaagatgcacaatacca

SEQ ID NO: 95059 - DNA, 20 bp, Artificial Sequence
  Description of Artificial Sequence: Synthetic oligonucleotide
  Target: LAMA2; (-) strand; PAM type: NRG; PAM sequence: AAG
cagttaactcgaagtgaagc

SEQ ID NO: 95060 - DNA, 20 bp, Artificial Sequence
  Description of Artificial Sequence: Synthetic oligonucleotide
  Target: LAMA2; (-) strand; PAM type: NRG; PAM sequence: AAG
aaatcagttaactcgaagtg

SEQ ID NO: 95061 - DNA, 20 bp, Artificial Sequence
  Description of Artificial Sequence: Synthetic oligonucleotide
  Target: LAMA2; (-) strand; PAM type: NRG; PAM sequence: AAG
aatttaaatcagttaactcg

SEQ ID NO: 95062 - DNA, 20 bp, Artificial Sequence
  Description of Artificial Sequence: Synthetic oligonucleotide
  Target: LAMA2; (-) strand; PAM type: NRG; PAM sequence: CAG
gagaaaaattaaatttaaat

SEQ ID NO: 95063 - DNA, 20 bp, Artificial Sequence
  Description of Artificial Sequence: Synthetic oligonucleotide
  Target: LAMA2; (-) strand; PAM type: NRG; PAM sequence: GAG
agcctggcaatggaagagga

SEQ ID NO: 95064 - DNA, 20 bp, Artificial Sequence
  Description of Artificial Sequence: Synthetic oligonucleotide
  Target: LAMA2; (-) strand; PAM type: NRG; PAM sequence: GAG
ccagcctggcaatggaagag

SEQ ID NO: 95065 - DNA, 20 bp, Artificial Sequence
  Description of Artificial Sequence: Synthetic oligonucleotide
  Target: LAMA2; (-) strand; PAM type: NRG; PAM sequence: AGG
tcccagcctggcaatggaag

SEQ ID NO: 95066 - DNA, 20 bp, Artificial Sequence
  Description of Artificial Sequence: Synthetic oligonucleotide
  Target: LAMA2; (-) strand; PAM type: NRG; PAM sequence: GAG
gtcccagcctggcaatggaa

SEQ ID NO: 95067 - DNA, 20 bp, Artificial Sequence
  Description of Artificial Sequence: Synthetic oligonucleotide
  Target: LAMA2; (-) strand; PAM type: NRG; PAM sequence: AAG
aggtcccagcctggcaatgg

SEQ ID NO: 95068 - DNA, 20 bp, Artificial Sequence
  Description of Artificial Sequence: Synthetic oligonucleotide
  Target: LAMA2; (-) strand; PAM type: NRG; PAM sequence: TGG
caaaggtcccagcctggcaa

SEQ ID NO: 95069 - DNA, 20 bp, Artificial Sequence
  Description of Artificial Sequence: Synthetic oligonucleotide
  Target: LAMA2; (-) strand; PAM type: NRG; PAM sequence: TGG
gtaggccaaaggtcccagcc

SEQ ID NO: 95070 - DNA, 20 bp, Artificial Sequence
  Description of Artificial Sequence: Synthetic oligonucleotide
  Target: LAMA2; (-) strand; PAM type: NRG; PAM sequence: CAG
tgattgtaggccaaaggtcc

SEQ ID NO: 95071 - DNA, 20 bp, Artificial Sequence
  Description of Artificial Sequence: Synthetic oligonucleotide
  Target: LAMA2; (-) strand; PAM type: NRG; PAM sequence: AGG
ccttgctgattgtaggccaa

SEQ ID NO: 95072 - DNA, 20 bp, Artificial Sequence
  Description of Artificial Sequence: Synthetic oligonucleotide
  Target: LAMA2; (-) strand; PAM type: NRG; PAM sequence: AAG
cccttgctgattgtaggcca

SEQ ID NO: 95073 - DNA, 20 bp, Artificial Sequence
  Description of Artificial Sequence: Synthetic oligonucleotide
  Target: LAMA2; (-) strand; PAM type: NRG; PAM sequence: AGG
cacagccccttgctgattgt

SEQ ID NO: 95074 - DNA, 20 bp, Artificial Sequence
  Description of Artificial Sequence: Synthetic oligonucleotide
  Target: LAMA2; (-) strand; PAM type: NRG; PAM sequence: TAG
acacagccccttgctgattg

SEQ ID NO: 95075 - DNA, 20 bp, Artificial Sequence
  Description of Artificial Sequence: Synthetic oligonucleotide
  Target: LAMA2; (-) strand; PAM type: NRG; PAM sequence: CAG
aattgcagttgcagggaaca

SEQ ID NO: 95076 - DNA, 20 bp, Artificial Sequence
  Description of Artificial Sequence: Synthetic oligonucleotide
  Target: LAMA2; (-) strand; PAM type: NRG; PAM sequence: GGG
ccaaaagaattgcagttgca

SEQ ID NO: 95077 - DNA, 20 bp, Artificial Sequence
  Description of Artificial Sequence: Synthetic oligonucleotide
  Target: LAMA2; (-) strand; PAM type: NRG; PAM sequence: AGG
cccaaaagaattgcagttgc

SEQ ID NO: 95078 - DNA, 20 bp, Artificial Sequence
  Description of Artificial Sequence: Synthetic oligonucleotide
  Target: LAMA2; (-) strand; PAM type: NRG; PAM sequence: CAG
acccaaaagaattgcagttg

SEQ ID NO: 95079 - DNA, 20 bp, Artificial Sequence
  Description of Artificial Sequence: Synthetic oligonucleotide
  Target: LAMA2; (-) strand; PAM type: NRG; PAM sequence: CAG
acttagacccaaaagaattg

SEQ ID NO: 95080 - DNA, 20 bp, Artificial Sequence
  Description of Artificial Sequence: Synthetic oligonucleotide
  Target: LAMA2; (-) strand; PAM type: NRG; PAM sequence: AAG
gtcgaatgacttagacccaa

SEQ ID NO: 95081 - DNA, 20 bp, Artificial Sequence
  Description of Artificial Sequence: Synthetic oligonucleotide
  Target: LAMA2; (-) strand; PAM type: NRG; PAM sequence: TAG
ctcttcacagtcgaatgact

SEQ ID NO: 95082 - DNA, 20 bp, Artificial Sequence
  Description of Artificial Sequence: Synthetic oligonucleotide
  Target: LAMA2; (-) strand; PAM type: NRG; PAM sequence: CAG
aacattgtccactctcttca

SEQ ID NO: 95083 - DNA, 20 bp, Artificial Sequence
  Description of Artificial Sequence: Synthetic oligonucleotide
  Target: LAMA2; (-) strand; PAM type: NRG; PAM sequence: TGG
tcttccctgtgactccaggt

SEQ ID NO: 95084 - DNA, 20 bp, Artificial Sequence
  Description of Artificial Sequence: Synthetic oligonucleotide
  Target: LAMA2; (-) strand; PAM type: NRG; PAM sequence: AGG
catttcttccctgtgactcc

SEQ ID NO: 95085 - DNA, 20 bp, Artificial Sequence
  Description of Artificial Sequence: Synthetic oligonucleotide
  Target: LAMA2; (-) strand; PAM type: NRG; PAM sequence: CAG
acatttcttccctgtgactc

SEQ ID NO: 95086 - DNA, 20 bp, Artificial Sequence
  Description of Artificial Sequence: Synthetic oligonucleotide
  Target: LAMA2; (-) strand; PAM type: NRG; PAM sequence: CGG
tgaaatagccgtgggcacag

SEQ ID NO: 95087 - DNA, 20 bp, Artificial Sequence
  Description of Artificial Sequence: Synthetic oligonucleotide
  Target: LAMA2; (-) strand; PAM type: NRG; PAM sequence: CAG
agttgaaatagccgtgggca

SEQ ID NO: 95088 - DNA, 20 bp, Artificial Sequence
  Description of Artificial Sequence: Synthetic oligonucleotide
  Target: LAMA2; (-) strand; PAM type: NRG; PAM sequence: GGG
ttggaagttgaaatagccgt

SEQ ID NO: 95089 - DNA, 20 bp, Artificial Sequence
  Description of Artificial Sequence: Synthetic oligonucleotide
  Target: LAMA2; (-) strand; PAM type: NRG; PAM sequence: TGG
cttggaagttgaaatagccg

SEQ ID NO: 95090 - DNA, 20 bp, Artificial Sequence
  Description of Artificial Sequence: Synthetic oligonucleotide
  Target: LAMA2; (-) strand; PAM type: NRG; PAM sequence: TAG
ctccttcttggaagttgaaa

SEQ ID NO: 95091 - DNA, 20 bp, Artificial Sequence
  Description of Artificial Sequence: Synthetic oligonucleotide
  Target: LAMA2; (-) strand; PAM type: NRG; PAM sequence: AAG
ctgtgcagcctccttcttgg

SEQ ID NO: 95092 - DNA, 20 bp, Artificial Sequence
  Description of Artificial Sequence: Synthetic oligonucleotide
  Target: LAMA2; (-) strand; PAM type: NRG; PAM sequence: TGG
gacctgtgcagcctccttct

SEQ ID NO: 95093 - DNA, 20 bp, Artificial Sequence
  Description of Artificial Sequence: Synthetic oligonucleotide
  Target: LAMA2; (-) strand; PAM type: NRG; PAM sequence: CAG
gtcatatttacagacctgtg

SEQ ID NO: 95094 - DNA, 20 bp, Artificial Sequence
  Description of Artificial Sequence: Synthetic oligonucleotide
  Target: LAMA2; (-) strand; PAM type: NRG; PAM sequence: CAG
taggacttaagtcatattta

SEQ ID NO: 95095 - DNA, 20 bp, Artificial Sequence
  Description of Artificial Sequence: Synthetic oligonucleotide
  Target: LAMA2; (-) strand; PAM type: NRG; PAM sequence: AAG
agagtgaatatgtaggactt

SEQ ID NO: 95096 - DNA, 20 bp, Artificial Sequence
  Description of Artificial Sequence: Synthetic oligonucleotide
  Target: LAMA2; (-) strand; PAM type: NRG; PAM sequence: AGG
aactatcagagtgaatatgt

SEQ ID NO: 95097 - DNA, 20 bp, Artificial Sequence
  Description of Artificial Sequence: Synthetic oligonucleotide
  Target: LAMA2; (-) strand; PAM type: NRG; PAM sequence: TAG
aaactatcagagtgaatatg

SEQ ID NO: 95098 - DNA, 20 bp, Artificial Sequence
  Description of Artificial Sequence: Synthetic oligonucleotide
  Target: LAMA2; (-) strand; PAM type: NRG; PAM sequence: GAG
gtcagaccctaaaactatca

SEQ ID NO: 95099 - DNA, 20 bp, Artificial Sequence
  Description of Artificial Sequence: Synthetic oligonucleotide
  Target: LAMA2; (-) strand; PAM type: NRG; PAM sequence: CAG
aagtcagaccctaaaactat

SEQ ID NO: 95100 - DNA, 20 bp, Artificial Sequence
  Description of Artificial Sequence: Synthetic oligonucleotide
  Target: LAMA2; (-) strand; PAM type: NRG; PAM sequence: CAG
gaacaaactgttacagaagt

SEQ ID NO: 95101 - DNA, 20 bp, Artificial Sequence
  Description of Artificial Sequence: Synthetic oligonucleotide
  Target: LAMA2; (-) strand; PAM type: NRG; PAM sequence: AAG
aaaagaacaaactgttacag

SEQ ID NO: 95102 - DNA, 20 bp, Artificial Sequence
  Description of Artificial Sequence: Synthetic oligonucleotide
  Target: LAMA2; (-) strand; PAM type: NRG; PAM sequence: CAG
tttaaaagaacaaactgtta

SEQ ID NO: 95103 - DNA, 20 bp, Artificial Sequence
  Description of Artificial Sequence: Synthetic oligonucleotide
  Target: LAMA2; (-) strand; PAM type: NRG; PAM sequence: AAG
tcaatctgtgcttcctttaa

SEQ ID NO: 95104 - DNA, 20 bp, Artificial Sequence
  Description of Artificial Sequence: Synthetic oligonucleotide
  Target: LAMA2; (-) strand; PAM type: NRG; PAM sequence: TAG
ttaagtaacgtaaaaataag

SEQ ID NO: 95105 - DNA, 20 bp, Artificial Sequence
  Description of Artificial Sequence: Synthetic oligonucleotide
  Target: LAMA2; (-) strand; PAM type: NRG; PAM sequence: AAG
tttttaagtaacgtaaaaat

SEQ ID NO: 95106 - DNA, 20 bp, Artificial Sequence
  Description of Artificial Sequence: Synthetic oligonucleotide
  Target: LAMA2; (-) strand; PAM type: NRG; PAM sequence: AAG
tgacatgtatttcatttttt

SEQ ID NO: 95107 - DNA, 20 bp, Artificial Sequence
  Description of Artificial Sequence: Synthetic oligonucleotide
  Target: LAMA2; (-) strand; PAM type: NRG; PAM sequence: CAG
cttgcacacagttattaagg

SEQ ID NO: 95108 - DNA, 20 bp, Artificial Sequence
  Description of Artificial Sequence: Synthetic oligonucleotide
  Target: LAMA2; (-) strand; PAM type: NRG; PAM sequence: AGG
gtacttgcacacagttatta

SEQ ID NO: 95109 - DNA, 20 bp, Artificial Sequence
  Description of Artificial Sequence: Synthetic oligonucleotide
  Target: LAMA2; (-) strand; PAM type: NRG; PAM sequence: AAG
agtacttgcacacagttatt

SEQ ID NO: 95110 - DNA, 20 bp, Artificial Sequence
  Description of Artificial Sequence: Synthetic oligonucleotide
  Target: LAMA2; (-) strand; PAM type: NRG; PAM sequence: CAG
ttttactgagtacttgcaca

SEQ ID NO: 95111 - DNA, 20 bp, Artificial Sequence
  Description of Artificial Sequence: Synthetic oligonucleotide
  Target: LAMA2; (-) strand; PAM type: NRG; PAM sequence: GAG
agcatctgctgatttttact

SEQ ID NO: 95112 - DNA, 20 bp, Artificial Sequence
  Description of Artificial Sequence: Synthetic oligonucleotide
  Target: LAMA2; (-) strand; PAM type: NRG; PAM sequence: GAG
agggagggacacaaccaaac

SEQ ID NO: 95113 - DNA, 20 bp, Artificial Sequence
  Description of Artificial Sequence: Synthetic oligonucleotide
  Target: LAMA2; (-) strand; PAM type: NRG; PAM sequence: GGG
atcaaagtcacagacaggga

SEQ ID NO: 95114 - DNA, 20 bp, Artificial Sequence
  Description of Artificial Sequence: Synthetic oligonucleotide
  Target: LAMA2; (-) strand; PAM type: NRG; PAM sequence: AGG
aatcaaagtcacagacaggg

SEQ ID NO: 95115 - DNA, 20 bp, Artificial Sequence
  Description of Artificial Sequence: Synthetic oligonucleotide
  Target: LAMA2; (-) strand; PAM type: NRG; PAM sequence: GAG
gaatcaaagtcacagacagg

SEQ ID NO: 95116 - DNA, 20 bp, Artificial Sequence
  Description of Artificial Sequence: Synthetic oligonucleotide
  Target: LAMA2; (-) strand; PAM type: NRG; PAM sequence: GGG
ctgaatcaaagtcacagaca

SEQ ID NO: 95117 - DNA, 20 bp, Artificial Sequence
  Description of Artificial Sequence: Synthetic oligonucleotide
  Target: LAMA2; (-) strand; PAM type: NRG; PAM sequence: AGG
gctgaatcaaagtcacagac

SEQ ID NO: 95118 - DNA, 20 bp, Artificial Sequence
  Description of Artificial Sequence: Synthetic oligonucleotide
  Target: LAMA2; (-) strand; PAM type: NRG; PAM sequence: CAG
ggctgaatcaaagtcacaga

SEQ ID NO: 95119 - DNA, 20 bp, Artificial Sequence
  Description of Artificial Sequence: Synthetic oligonucleotide
  Target: LAMA2; (-) strand; PAM type: NRG; PAM sequence: CAG
gactggctgaatcaaagtca

SEQ ID NO: 95120 - DNA, 20 bp, Artificial Sequence
  Description of Artificial Sequence: Synthetic oligonucleotide
  Target: LAMA2; (-) strand; PAM type: NRG; PAM sequence: AAG
ttgagtgactggctgaatca

SEQ ID NO: 95121 - DNA, 20 bp, Artificial Sequence
  Description of Artificial Sequence: Synthetic oligonucleotide
  Target: LAMA2; (-) strand; PAM type: NRG; PAM sequence: TGG
cgtagcagtgtttgagtgac

SEQ ID NO: 95122 - DNA, 20 bp, Artificial Sequence
  Description of Artificial Sequence: Synthetic oligonucleotide
  Target: LAMA2; (-) strand; PAM type: NRG; PAM sequence: GAG
ttcaagccgtagcagtgttt

SEQ ID NO: 95123 - DNA, 20 bp, Artificial Sequence
  Description of Artificial Sequence: Synthetic oligonucleotide
  Target: LAMA2; (-) strand; PAM type: NRG; PAM sequence: CAG
atttaactttcaagccgtag

SEQ ID NO: 95124 - DNA, 20 bp, Artificial Sequence
  Description of Artificial Sequence: Synthetic oligonucleotide
  Target: LAMA2; (-) strand; PAM type: NRG; PAM sequence: TAG
aacatttaactttcaagccg

SEQ ID NO: 95125 - DNA, 20 bp, Artificial Sequence
  Description of Artificial Sequence: Synthetic oligonucleotide
  Target: LAMA2; (-) strand; PAM type: NRG; PAM sequence: AAG
aaatcgaacatttaactttc

SEQ ID NO: 95126 - DNA, 20 bp, Artificial Sequence
  Description of Artificial Sequence: Synthetic oligonucleotide
  Target: LAMA2; (-) strand; PAM type: NRG; PAM sequence: CAG
aactaagataagactggtac

SEQ ID NO: 95127 - DNA, 20 bp, Artificial Sequence
  Description of Artificial Sequence: Synthetic oligonucleotide
  Target: LAMA2; (-) strand; PAM type: NRG; PAM sequence: TGG
agcttaaactaagataagac

SEQ ID NO: 95128 - DNA, 20 bp, Artificial Sequence
  Description of Artificial Sequence: Synthetic oligonucleotide
  Target: LAMA2; (-) strand; PAM type: NRG; PAM sequence: AAG
gtttgagcttaaactaagat

SEQ ID NO: 95129 - DNA, 20 bp, Artificial Sequence
  Description of Artificial Sequence: Synthetic oligonucleotide
  Target: LAMA2; (-) strand; PAM type: NRG; PAM sequence: AAG
gtggggtttgagcttaaact

SEQ ID NO: 95130 - DNA, 20 bp, Artificial Sequence
  Description of Artificial Sequence: Synthetic oligonucleotide
  Target: LAMA2; (-) strand; PAM type: NRG; PAM sequence: GAG
aatgcattggcgtggggttt

SEQ ID NO: 95131 - DNA, 20 bp, Artificial Sequence
  Description of Artificial Sequence: Synthetic oligonucleotide
  Target: LAMA2; (-) strand; PAM type: NRG; PAM sequence: GGG
agttgaaatgcattggcgtg

SEQ ID NO: 95132 - DNA, 20 bp, Artificial Sequence
  Description of Artificial Sequence: Synthetic oligonucleotide
  Target: LAMA2; (-) strand; PAM type: NRG; PAM sequence: GGG
aagttgaaatgcattggcgt

SEQ ID NO: 95133 - DNA, 20 bp, Artificial Sequence
  Description of Artificial Sequence: Synthetic oligonucleotide
  Target: LAMA2; (-) strand; PAM type: NRG; PAM sequence: TGG
aaagttgaaatgcattggcg

SEQ ID NO: 95134 - DNA, 20 bp, Artificial Sequence
  Description of Artificial Sequence: Synthetic oligonucleotide
  Target: LAMA2; (-) strand; PAM type: NRG; PAM sequence: TGG
aagggaaagttgaaatgcat

SEQ ID NO: 95135 - DNA, 20 bp, Artificial Sequence
  Description of Artificial Sequence: Synthetic oligonucleotide
  Target: LAMA2; (-) strand; PAM type: NRG; PAM sequence: AAG
tttgcaataggaaaaaggga

SEQ ID NO: 95136 - DNA, 20 bp, Artificial Sequence
  Description of Artificial Sequence: Synthetic oligonucleotide
  Target: LAMA2; (-) strand; PAM type: NRG; PAM sequence: GGG
caattttgcaataggaaaaa

SEQ ID NO: 95137 - DNA, 20 bp, Artificial Sequence
  Description of Artificial Sequence: Synthetic oligonucleotide
  Target: LAMA2; (-) strand; PAM type: NRG; PAM sequence: AGG
ccaattttgcaataggaaaa

SEQ ID NO: 95138 - DNA, 20 bp, Artificial Sequence
  Description of Artificial Sequence: Synthetic oligonucleotide
  Target: LAMA2; (-) strand; PAM type: NRG; PAM sequence: AAG
accaattttgcaataggaaa

SEQ ID NO: 95139 - DNA, 20 bp, Artificial Sequence
  Description of Artificial Sequence: Synthetic oligonucleotide
  Target: LAMA2; (-) strand; PAM type: NRG; PAM sequence: AGG
ccggataccaattttgcaat

SEQ ID NO: 95140 - DNA, 20 bp, Artificial Sequence
  Description of Artificial Sequence: Synthetic oligonucleotide
  Target: LAMA2; (-) strand; PAM type: NRG; PAM sequence: TAG
tccggataccaattttgcaa

SEQ ID NO: 95141 - DNA, 20 bp, Artificial Sequence
  Description of Artificial Sequence: Synthetic oligonucleotide
  Target: LAMA2; (-) strand; PAM type: NRG; PAM sequence: CGG
caccttgacttttcttgatc

SEQ ID NO: 95142 - DNA, 20 bp, Artificial Sequence
  Description of Artificial Sequence: Synthetic oligonucleotide
  Target: LAMA2; (-) strand; PAM type: NRG; PAM sequence: AGG
aaagatgtttttggggtacc

SEQ ID NO: 95143 - DNA, 20 bp, Artificial Sequence
  Description of Artificial Sequence: Synthetic oligonucleotide
  Target: LAMA2; (-) strand; PAM type: NRG; PAM sequence: CAG
aaaagatgtttttggggtac

SEQ ID NO: 95144 - DNA, 20 bp, Artificial Sequence
  Description of Artificial Sequence: Synthetic oligonucleotide
  Target: LAMA2; (-) strand; PAM type: NRG; PAM sequence: GGG
tagatgaaaagatgtttttg

SEQ ID NO: 95145 - DNA, 20 bp, Artificial Sequence
  Description of Artificial Sequence: Synthetic oligonucleotide
  Target: LAMA2; (-) strand; PAM type: NRG; PAM sequence: GGG
gtagatgaaaagatgttttt

SEQ ID NO: 95146 - DNA, 20 bp, Artificial Sequence
  Description of Artificial Sequence: Synthetic oligonucleotide
  Target: LAMA2; (-) strand; PAM type: NRG; PAM sequence: TGG
agtagatgaaaagatgtttt

SEQ ID NO: 95147 - DNA, 20 bp, Artificial Sequence
  Description of Artificial Sequence: Synthetic oligonucleotide
  Target: LAMA2; (-) strand; PAM type: NRG; PAM sequence: AAG
ggcagccaaaagtagatgaa

SEQ ID NO: 95148 - DNA, 20 bp, Artificial Sequence
  Description of Artificial Sequence: Synthetic oligonucleotide
  Target: LAMA2; (-) strand; PAM type: NRG; PAM sequence: TAG
gttttcaaggcagccaaaag

SEQ ID NO: 95149 - DNA, 20 bp, Artificial Sequence
  Description of Artificial Sequence: Synthetic oligonucleotide
  Target: LAMA2; (-) strand; PAM type: NRG; PAM sequence: AAG
atagttttcaaggcagccaa

SEQ ID NO: 95150 - DNA, 20 bp, Artificial Sequence
  Description of Artificial Sequence: Synthetic oligonucleotide
  Target: LAMA2; (-) strand; PAM type: NRG; PAM sequence: CAG
gaacatcatagttttcaagg

SEQ ID NO: 95151 - DNA, 20 bp, Artificial Sequence
  Description of Artificial Sequence: Synthetic oligonucleotide
  Target: LAMA2; (-) strand; PAM type: NRG; PAM sequence: AGG
ttagaacatcatagttttca

SEQ ID NO: 95152 - DNA, 20 bp, Artificial Sequence
  Description of Artificial Sequence: Synthetic oligonucleotide
  Target: LAMA2; (-) strand; PAM type: NRG; PAM sequence: AAG
cttagaacatcatagttttc

SEQ ID NO: 95153 - DNA, 20 bp, Artificial Sequence
  Description of Artificial Sequence: Synthetic oligonucleotide
  Target: LAMA2; (-) strand; PAM type: NRG; PAM sequence: TAG
atttctctcttagaacatca

SEQ ID NO: 95154 - DNA, 20 bp, Artificial Sequence
  Description of Artificial Sequence: Synthetic oligonucleotide
  Target: LAMA2; (-) strand; PAM type: NRG; PAM sequence: TAG
gagccaacctatttctctct

SEQ ID NO: 95155 - DNA, 20 bp, Artificial Sequence
  Description of Artificial Sequence: Synthetic oligonucleotide
  Target: LAMA2; (-) strand; PAM type: NRG; PAM sequence: GAG
tttgatgaactaaatatcta

SEQ ID NO: 95156 - DNA, 20 bp, Artificial Sequence
  Description of Artificial Sequence: Synthetic oligonucleotide
  Target: LAMA2; (-) strand; PAM type: NRG; PAM sequence: TAG
tttttgatgaactaaatatc

SEQ ID NO: 95157 - DNA, 20 bp, Artificial Sequence
  Description of Artificial Sequence: Synthetic oligonucleotide
  Target: LAMA2; (-) strand; PAM type: NRG; PAM sequence: TAG
ctgcttgagggaatcatggt

SEQ ID NO: 95158 - DNA, 20 bp, Artificial Sequence
  Description of Artificial Sequence: Synthetic oligonucleotide
  Target: LAMA2; (-) strand; PAM type: NRG; PAM sequence: TGG
aatactgcttgagggaatca

SEQ ID NO: 95159 - DNA, 20 bp, Artificial Sequence
  Description of Artificial Sequence: Synthetic oligonucleotide
  Target: LAMA2; (-) strand; PAM type: NRG; PAM sequence: GGG
tgtataagaatactgcttga

SEQ ID NO: 95160 - DNA, 20 bp, Artificial Sequence
  Description of Artificial Sequence: Synthetic oligonucleotide
  Target: LAMA2; (-) strand; PAM type: NRG; PAM sequence: AGG
atgtataagaatactgcttg

SEQ ID NO: 95161 - DNA, 20 bp, Artificial Sequence
  Description of Artificial Sequence: Synthetic oligonucleotide
  Target: LAMA2; (-) strand; PAM type: NRG; PAM sequence: GAG
gatgtataagaatactgctt

SEQ ID NO: 95162 - DNA, 20 bp, Artificial Sequence
  Description of Artificial Sequence: Synthetic oligonucleotide
  Target: LAMA2; (-) strand; PAM type: NRG; PAM sequence: AAG
aaggctgtggctggatgtat

SEQ ID NO: 95163 - DNA, 20 bp, Artificial Sequence
  Description of Artificial Sequence: Synthetic oligonucleotide
  Target: LAMA2; (-) strand; PAM type: NRG; PAM sequence: TGG
atttgggtgaaggctgtggc

SEQ ID NO: 95164 - DNA, 20 bp, Artificial Sequence
  Description of Artificial Sequence: Synthetic oligonucleotide
  Target: LAMA2; (-) strand; PAM type: NRG; PAM sequence: TGG
catgatttgggtgaaggctg

SEQ ID NO: 95165 - DNA, 20 bp, Artificial Sequence
  Description of Artificial Sequence: Synthetic oligonucleotide
  Target: LAMA2; (-) strand; PAM type: NRG; PAM sequence: AGG
ttagctcatgatttgggtga

SEQ ID NO: 95166 - DNA, 20 bp, Artificial Sequence
  Description of Artificial Sequence: Synthetic oligonucleotide
  Target: LAMA2; (-) strand; PAM type: NRG; PAM sequence: AAG
cttagctcatgatttgggtg

SEQ ID NO: 95167 - DNA, 20 bp, Artificial Sequence
  Description of Artificial Sequence: Synthetic oligonucleotide
  Target: LAMA2; (-) strand; PAM type: NRG; PAM sequence: GGG
attttcttagctcatgattt

SEQ ID NO: 95168 - DNA, 20 bp, Artificial Sequence
  Description of Artificial Sequence: Synthetic oligonucleotide
  Target: LAMA2; (-) strand; PAM type: NRG; PAM sequence: TGG
tattttcttagctcatgatt

SEQ ID NO: 95169 - DNA, 20 bp, Artificial Sequence
  Description of Artificial Sequence: Synthetic oligonucleotide
  Target: LAMA2; (-) strand; PAM type: NRG; PAM sequence: TAG
aatgctaagtgatattttct

SEQ ID NO: 95170 - DNA, 20 bp, Artificial Sequence
  Description of Artificial Sequence: Synthetic oligonucleotide
  Target: LAMA2; (-) strand; PAM type: NRG; PAM sequence: AAG
actttcatctgcagaatgct

SEQ ID NO: 95171 - DNA, 20 bp, Artificial Sequence
  Description of Artificial Sequence: Synthetic oligonucleotide
  Target: LAMA2; (-) strand; PAM type: NRG; PAM sequence: CAG
tcactctttactttcatctg

SEQ ID NO: 95172 - DNA, 20 bp, Artificial Sequence
  Description of Artificial Sequence: Synthetic oligonucleotide
  Target: LAMA2; (-) strand; PAM type: NRG; PAM sequence: AGG
aattagcagcatataaatca

SEQ ID NO: 95173 - DNA, 20 bp, Artificial Sequence
  Description of Artificial Sequence: Synthetic oligonucleotide
  Target: LAMA2; (-) strand; PAM type: NRG; PAM sequence: AAG
aaattagcagcatataaatc

SEQ ID NO: 95174 - DNA, 20 bp, Artificial Sequence
  Description of Artificial Sequence: Synthetic oligonucleotide
  Target: LAMA2; (-) strand; PAM type: NRG; PAM sequence: CAG
aagggtcagttcgaaattag

SEQ ID NO: 95175 - DNA, 20 bp, Artificial Sequence
  Description of Artificial Sequence: Synthetic oligonucleotide
  Target: LAMA2; (-) strand; PAM type: NRG; PAM sequence: TAG
aataagggtcagttcgaaat

SEQ ID NO: 95176 - DNA, 20 bp, Artificial Sequence
  Description of Artificial Sequence: Synthetic oligonucleotide
  Target: LAMA2; (-) strand; PAM type: NRG; PAM sequence: CAG
gtgattgttggaataagggt

SEQ ID NO: 95177 - DNA, 20 bp, Artificial Sequence
  Description of Artificial Sequence: Synthetic oligonucleotide
  Target: LAMA2; (-) strand; PAM type: NRG; PAM sequence: GGG
actagtgattgttggaataa

SEQ ID NO: 95178 - DNA, 20 bp, Artificial Sequence
  Description of Artificial Sequence: Synthetic oligonucleotide
  Target: LAMA2; (-) strand; PAM type: NRG; PAM sequence: AGG
aactagtgattgttggaata

SEQ ID NO: 95179 - DNA, 20 bp, Artificial Sequence
  Description of Artificial Sequence: Synthetic oligonucleotide
  Target: LAMA2; (-) strand; PAM type: NRG; PAM sequence: AAG
aaactagtgattgttggaat

SEQ ID NO: 95180 - DNA, 20 bp, Artificial Sequence
  Description of Artificial Sequence: Synthetic oligonucleotide
  Target: LAMA2; (-) strand; PAM type: NRG; PAM sequence: TGG
atattcaaactagtgattgt

SEQ ID NO: 95181 - DNA, 20 bp, Artificial Sequence
  Description of Artificial Sequence: Synthetic oligonucleotide
  Target: LAMA2; (-) strand; PAM type: NRG; PAM sequence: TAG
aacaaaggtaatattcaaac

SEQ ID NO: 95182 - DNA, 20 bp, Artificial Sequence
  Description of Artificial Sequence: Synthetic oligonucleotide
  Target: LAMA2; (-) strand; PAM type: NRG; PAM sequence: AGG
tccatgacattagtaaacaa

SEQ ID NO: 95183 - DNA, 20 bp, Artificial Sequence
  Description of Artificial Sequence: Synthetic oligonucleotide
  Target: LAMA2; (-) strand; PAM type: NRG; PAM sequence: AAG
atccatgacattagtaaaca

SEQ ID NO: 95184 - DNA, 20 bp, Artificial Sequence
  Description of Artificial Sequence: Synthetic oligonucleotide
  Target: LAMA2; (-) strand; PAM type: NRG; PAM sequence: TAG
ccaggttgaatccatgacat

SEQ ID NO: 95185 - DNA, 20 bp, Artificial Sequence
  Description of Artificial Sequence: Synthetic oligonucleotide
  Target: LAMA2; (-) strand; PAM type: NRG; PAM sequence: AGG
agagtatgtgagcattatcc

SEQ ID NO: 95186 - DNA, 20 bp, Artificial Sequence
  Description of Artificial Sequence: Synthetic oligonucleotide
  Target: LAMA2; (-) strand; PAM type: NRG; PAM sequence: CAG
gagagtatgtgagcattatc

SEQ ID NO: 95187 - DNA, 20 bp, Artificial Sequence
  Description of Artificial Sequence: Synthetic oligonucleotide
  Target: LAMA2; (-) strand; PAM type: NRG; PAM sequence: GAG
ccatggtgctgagagtatgt

SEQ ID NO: 95188 - DNA, 20 bp, Artificial Sequence
  Description of Artificial Sequence: Synthetic oligonucleotide
  Target: LAMA2; (-) strand; PAM type: NRG; PAM sequence: GAG
aaatcttaccatggtgctga

SEQ ID NO: 95189 - DNA, 20 bp, Artificial Sequence
  Description of Artificial Sequence: Synthetic oligonucleotide
  Target: LAMA2; (-) strand; PAM type: NRG; PAM sequence: GAG
taaaatcttaccatggtgct

SEQ ID NO: 95190 - DNA, 20 bp, Artificial Sequence
  Description of Artificial Sequence: Synthetic oligonucleotide
  Target: LAMA2; (-) strand; PAM type: NRG; PAM sequence: TGG
aatgttttaaaatcttacca

SEQ ID NO: 95191 - DNA, 20 bp, Artificial Sequence
  Description of Artificial Sequence: Synthetic oligonucleotide
  Target: LAMA2; (-) strand; PAM type: NRG; PAM sequence: CAG
cctacttaaatttgccacaa

SEQ ID NO: 95192 - DNA, 20 bp, Artificial Sequence
  Description of Artificial Sequence: Synthetic oligonucleotide
  Target: LAMA2; (-) strand; PAM type: NRG; PAM sequence: TAG
aaagatattggttctttaaa

SEQ ID NO: 95193 - DNA, 20 bp, Artificial Sequence
  Description of Artificial Sequence: Synthetic oligonucleotide
  Target: LAMA2; (-) strand; PAM type: NRG; PAM sequence: TGG
ggagaatgtctgaaagatat

SEQ ID NO: 95194 - DNA, 20 bp, Artificial Sequence
  Description of Artificial Sequence: Synthetic oligonucleotide
  Target: LAMA2; (-) strand; PAM type: NRG; PAM sequence: AAG
aagtgctggagaatgtctga

SEQ ID NO: 95195 - DNA, 20 bp, Artificial Sequence
  Description of Artificial Sequence: Synthetic oligonucleotide
  Target: LAMA2; (-) strand; PAM type: NRG; PAM sequence: GAG
tccacatatctaaagtgctg

SEQ ID NO: 95196 - DNA, 20 bp, Artificial Sequence
  Description of Artificial Sequence: Synthetic oligonucleotide
  Target: LAMA2; (-) strand; PAM type: NRG; PAM sequence: TGG
aatccacatatctaaagtgc

SEQ ID NO: 95197 - DNA, 20 bp, Artificial Sequence
  Description of Artificial Sequence: Synthetic oligonucleotide
  Target: LAMA2; (-) strand; PAM type: NRG; PAM sequence: AAG
tggtaaaatccacatatcta

SEQ ID NO: 95198 - DNA, 20 bp, Artificial Sequence
  Description of Artificial Sequence: Synthetic oligonucleotide
  Target: LAMA2; (-) strand; PAM type: NRG; PAM sequence: TGG
acttatcatggcttaattta

SEQ ID NO: 95199 - DNA, 20 bp, Artificial Sequence
  Description of Artificial Sequence: Synthetic oligonucleotide
  Target: LAMA2; (-) strand; PAM type: NRG; PAM sequence: TGG
tcaattagaataacttatca

SEQ ID NO: 95200 - DNA, 20 bp, Artificial Sequence
  Description of Artificial Sequence: Synthetic oligonucleotide
  Target: LAMA2; (-) strand; PAM type: NRG; PAM sequence: TAG
aattagaataacttatcaat

SEQ ID NO: 95201 - DNA, 20 bp, Artificial Sequence
  Description of Artificial Sequence: Synthetic oligonucleotide
  Target: LAMA2; (-) strand; PAM type: NRG; PAM sequence: TAG
atttagaataacttatcaat

SEQ ID NO: 95202 - DNA, 20 bp, Artificial Sequence
  Description of Artificial Sequence: Synthetic oligonucleotide
  Target: LAMA2; (-) strand; PAM type: NRG; PAM sequence: TAG
acaattataaacttatcatt

SEQ ID NO: 95203 - DNA, 20 bp, Artificial Sequence
  Description of Artificial Sequence: Synthetic oligonucleotide
  Target: LAMA2; (-) strand; PAM type: NRG; PAM sequence: AGG
agagatatacagattcttag

SEQ ID NO: 95204 - DNA, 20 bp, Artificial Sequence
  Description of Artificial Sequence: Synthetic oligonucleotide
  Target: LAMA2; (-) strand; PAM type: NRG; PAM sequence: GAG
tagagatatacagattctta

SEQ ID NO: 95205 - DNA, 20 bp, Artificial Sequence
  Description of Artificial Sequence: Synthetic oligonucleotide
  Target: LAMA2; (-) strand; PAM type: NRG; PAM sequence: TAG
cttagagatatacagattct

SEQ ID NO: 95206 - DNA, 20 bp, Artificial Sequence
  Description of Artificial Sequence: Synthetic oligonucleotide
  Target: LAMA2; (-) strand; PAM type: NRG; PAM sequence: CAG
gatattggcttagagatata

SEQ ID NO: 95207 - DNA, 20 bp, Artificial Sequence
  Description of Artificial Sequence: Synthetic oligonucleotide
  Target: LAMA2; (-) strand; PAM type: NRG; PAM sequence: GAG
gttatacagatattggctta

SEQ ID NO: 95208 - DNA, 20 bp, Artificial Sequence
  Description of Artificial Sequence: Synthetic oligonucleotide
  Target: LAMA2; (-) strand; PAM type: NRG; PAM sequence: TAG
aagttatacagatattggct

SEQ ID NO: 95209 - DNA, 20 bp, Artificial Sequence
  Description of Artificial Sequence: Synthetic oligonucleotide
  Target: LAMA2; (-) strand; PAM type: NRG; PAM sequence: TGG
tttttaagttatacagatat

SEQ ID NO: 95210 - DNA, 20 bp, Artificial Sequence
  Description of Artificial Sequence: Synthetic oligonucleotide
  Target: LAMA2; (-) strand; PAM type: NRG; PAM sequence: CAG
tttataatttttaagttata

SEQ ID NO: 95211 - DNA, 20 bp, Artificial Sequence
  Description of Artificial Sequence: Synthetic oligonucleotide
  Target: LAMA2; (-) strand; PAM type: NRG; PAM sequence: AAG
aatacagctttataattttt

SEQ ID NO: 95212 - DNA, 20 bp, Artificial Sequence
  Description of Artificial Sequence: Synthetic oligonucleotide
  Target: LAMA2; (-) strand; PAM type: NRG; PAM sequence: CAG
acagagtatattttaaaata

SEQ ID NO: 95213 - DNA, 20 bp, Artificial Sequence
  Description of Artificial Sequence: Synthetic oligonucleotide
  Target: LAMA2; (-) strand; PAM type: NRG; PAM sequence: GAG
agctttggatttaaagaaca

SEQ ID NO: 95214 - DNA, 20 bp, Artificial Sequence
  Description of Artificial Sequence: Synthetic oligonucleotide
  Target: LAMA2; (-) strand; PAM type: NRG; PAM sequence: CAG
tgagctttggatttaaagaa

SEQ ID NO: 95215 - DNA, 20 bp, Artificial Sequence
  Description of Artificial Sequence: Synthetic oligonucleotide
  Target: LAMA2; (-) strand; PAM type: NRG; PAM sequence: AAG
gtcagtgagctttggattta

SEQ ID NO: 95216 - DNA, 20 bp, Artificial Sequence
  Description of Artificial Sequence: Synthetic oligonucleotide
  Target: LAMA2; (-) strand; PAM type: NRG; PAM sequence: TGG
gtaaaaatgtcagtgagctt

SEQ ID NO: 95217 - DNA, 20 bp, Artificial Sequence
  Description of Artificial Sequence: Synthetic oligonucleotide
  Target: LAMA2; (-) strand; PAM type: NRG; PAM sequence: GAG
tattaagtaaaaatgtcagt

SEQ ID NO: 95218 - DNA, 20 bp, Artificial Sequence
  Description of Artificial Sequence: Synthetic oligonucleotide
  Target: LAMA2; (-) strand; PAM type: NRG; PAM sequence: CAG
ttcatattaagtaaaaatgt

SEQ ID NO: 95219 - DNA, 20 bp, Artificial Sequence
  Description of Artificial Sequence: Synthetic oligonucleotide
  Target: LAMA2; (-) strand; PAM type: NRG; PAM sequence: AAG
ctacctcattaattcatatt

SEQ ID NO: 95220 - DNA, 20 bp, Artificial Sequence
  Description of Artificial Sequence: Synthetic oligonucleotide
  Target: LAMA2; (-) strand; PAM type: NRG; PAM sequence: TGG
ataatttaaaataatattct

SEQ ID NO: 95221 - DNA, 20 bp, Artificial Sequence
  Description of Artificial Sequence: Synthetic oligonucleotide
  Target: LAMA2; (-) strand; PAM type: NRG; PAM sequence: AGG
ctttgggccagaatgctagt

SEQ ID NO: 95222 - DNA, 20 bp, Artificial Sequence
  Description of Artificial Sequence: Synthetic oligonucleotide
  Target: LAMA2; (-) strand; PAM type: NRG; PAM sequence: TAG
tctttgggccagaatgctag

SEQ ID NO: 95223 - DNA, 20 bp, Artificial Sequence
  Description of Artificial Sequence: Synthetic oligonucleotide
  Target: LAMA2; (-) strand; PAM type: NRG; PAM sequence: TAG
gtttctttgggccagaatgc

SEQ ID NO: 95224 - DNA, 20 bp, Artificial Sequence
  Description of Artificial Sequence: Synthetic oligonucleotide
  Target: LAMA2; (-) strand; PAM type: NRG; PAM sequence: CAG
tctatggtgtttctttgggc

SEQ ID NO: 95225 - DNA, 20 bp, Artificial Sequence
  Description of Artificial Sequence: Synthetic oligonucleotide
  Target: LAMA2; (-) strand; PAM type: NRG; PAM sequence: GGG
tttttctatggtgtttcttt

SEQ ID NO: 95226 - DNA, 20 bp, Artificial Sequence
  Description of Artificial Sequence: Synthetic oligonucleotide
  Target: LAMA2; (-) strand; PAM type: NRG; PAM sequence: TGG
ttttttctatggtgtttctt

SEQ ID NO: 95227 - DNA, 20 bp, Artificial Sequence
  Description of Artificial Sequence: Synthetic oligonucleotide
  Target: LAMA2; (-) strand; PAM type: NRG; PAM sequence: TGG
tttgtgcttttttttttcta

SEQ ID NO: 95228 - DNA, 20 bp, Artificial Sequence
  Description of Artificial Sequence: Synthetic oligonucleotide
  Target: LAMA2; (-) strand; PAM type: NRG; PAM sequence: CAG
ttttgtgcaagtcatgtcct

SEQ ID NO: 95229 - DNA, 20 bp, Artificial Sequence
  Description of Artificial Sequence: Synthetic oligonucleotide
  Target: LAMA2; (-) strand; PAM type: NRG; PAM sequence: AAG
aaatccaggctattttgtgc

SEQ ID NO: 95230 - DNA, 20 bp, Artificial Sequence
  Description of Artificial Sequence: Synthetic oligonucleotide
  Target: LAMA2; (-) strand; PAM type: NRG; PAM sequence: AGG
ggagccatttagacaaatcc

SEQ ID NO: 95231 - DNA, 20 bp, Artificial Sequence
  Description of Artificial Sequence: Synthetic oligonucleotide
  Target: LAMA2; (-) strand; PAM type: NRG; PAM sequence: CAG
aggagccatttagacaaatc

SEQ ID NO: 95232 - DNA, 20 bp, Artificial Sequence
  Description of Artificial Sequence: Synthetic oligonucleotide
  Target: LAMA2; (-) strand; PAM type: NRG; PAM sequence: TAG
tagttactgaaggagccatt

SEQ ID NO: 95233 - DNA, 20 bp, Artificial Sequence
  Description of Artificial Sequence: Synthetic oligonucleotide
  Target: LAMA2; (-) strand; PAM type: NRG; PAM sequence: GAG
cccagaactagttactgaag

SEQ ID NO: 95234 - DNA, 20 bp, Artificial Sequence
  Description of Artificial Sequence: Synthetic oligonucleotide
  Target: LAMA2; (-) strand; PAM type: NRG; PAM sequence: AGG
gtcccagaactagttactga

SEQ ID NO: 95235 - DNA, 20 bp, Artificial Sequence
  Description of Artificial Sequence: Synthetic oligonucleotide
  Target: LAMA2; (-) strand; PAM type: NRG; PAM sequence: AAG
ggtcccagaactagttactg

SEQ ID NO: 95236 - DNA, 20 bp, Artificial Sequence
  Description of Artificial Sequence: Synthetic oligonucleotide
  Target: LAMA2; (-) strand; PAM type: NRG; PAM sequence: TAG
ctcagtcaaggtcccagaac

SEQ ID NO: 95237 - DNA, 20 bp, Artificial Sequence
  Description of Artificial Sequence: Synthetic oligonucleotide
  Target: LAMA2; (-) strand; PAM type: NRG; PAM sequence: CAG
aaattactcagtcaaggtcc

SEQ ID NO: 95238 - DNA, 20 bp, Artificial Sequence
  Description of Artificial Sequence: Synthetic oligonucleotide
  Target: LAMA2; (-) strand; PAM type: NRG; PAM sequence: AGG
gaaacaaaattactcagtca

SEQ ID NO: 95239 - DNA, 20 bp, Artificial Sequence
  Description of Artificial Sequence: Synthetic oligonucleotide
  Target: LAMA2; (-) strand; PAM type: NRG; PAM sequence: AAG
tgaaacaaaattactcagtc

SEQ ID NO: 95240 - DNA, 20 bp, Artificial Sequence
  Description of Artificial Sequence: Synthetic oligonucleotide
  Target: LAMA2; (-) strand; PAM type: NRG; PAM sequence: CAG
gaaaatgaaacaaaattact

SEQ ID NO: 95241 - DNA, 20 bp, Artificial Sequence
  Description of Artificial Sequence: Synthetic oligonucleotide
  Target: LAMA2; (-) strand; PAM type: NRG; PAM sequence: TGG
taatagatgaattttgcaga

SEQ ID NO: 95242 - DNA, 20 bp, Artificial Sequence
  Description of Artificial Sequence: Synthetic oligonucleotide
  Target: LAMA2; (-) strand; PAM type: NRG; PAM sequence: CAG
aatttaatagatgaattttg

SEQ ID NO: 95243 - DNA, 20 bp, Artificial Sequence
  Description of Artificial Sequence: Synthetic oligonucleotide
  Target: LAMA2; (-) strand; PAM type: NRG; PAM sequence: TAG
ctattattatcttaatttaa

SEQ ID NO: 95244 - DNA, 20 bp, Artificial Sequence
  Description of Artificial Sequence: Synthetic oligonucleotide
  Target: LAMA2; (-) strand; PAM type: NRG; PAM sequence: TAG
gtaacaaaaaccatgtgtgg

SEQ ID NO: 95245 - DNA, 20 bp, Artificial Sequence
  Description of Artificial Sequence: Synthetic oligonucleotide
  Target: LAMA2; (-) strand; PAM type: NRG; PAM sequence: TGG
attgtaacaaaaaccatgtg

SEQ ID NO: 95246 - DNA, 20 bp, Artificial Sequence
  Description of Artificial Sequence: Synthetic oligonucleotide
  Target: LAMA2; (-) strand; PAM type: NRG; PAM sequence: TAG
gcattactctaaatatttta

SEQ ID NO: 95247 - DNA, 20 bp, Artificial Sequence
  Description of Artificial Sequence: Synthetic oligonucleotide
  Target: LAMA2; (-) strand; PAM type: NRG; PAM sequence: AGG
ttccatagcacttacatgct

SEQ ID NO: 95248 - DNA, 20 bp, Artificial Sequence
  Description of Artificial Sequence: Synthetic oligonucleotide
  Target: LAMA2; (-) strand; PAM type: NRG; PAM sequence: TAG
cttccatagcacttacatgc

SEQ ID NO: 95249 - DNA, 20 bp, Artificial Sequence
  Description of Artificial Sequence: Synthetic oligonucleotide
  Target: LAMA2; (-) strand; PAM type: NRG; PAM sequence: TAG
aataatgataaatgcttcca

SEQ ID NO: 95250 - DNA, 20 bp, Artificial Sequence
  Description of Artificial Sequence: Synthetic oligonucleotide
  Target: LAMA2; (-) strand; PAM type: NRG; PAM sequence: AAG
cacaattaataaaactaata

SEQ ID NO: 95251 - DNA, 20 bp, Artificial Sequence
  Description of Artificial Sequence: Synthetic oligonucleotide
  Target: LAMA2; (-) strand; PAM type: NRG; PAM sequence: AAG
tagctagttttcctgtgcca

SEQ ID NO: 95252 - DNA, 20 bp, Artificial Sequence
  Description of Artificial Sequence: Synthetic oligonucleotide
  Target: LAMA2; (-) strand; PAM type: NRG; PAM sequence: TAG
agaaaacctgagtaattagc

SEQ ID NO: 95253 - DNA, 20 bp, Artificial Sequence
  Description of Artificial Sequence: Synthetic oligonucleotide
  Target: LAMA2; (-) strand; PAM type: NRG; PAM sequence: TAG
agaaagaaaacctgagtaat

SEQ ID NO: 95254 - DNA, 20 bp, Artificial Sequence
  Description of Artificial Sequence: Synthetic oligonucleotide
  Target: LAMA2; (-) strand; PAM type: NRG; PAM sequence: GAG
actaaatagaaagaaaacct

SEQ ID NO: 95255 - DNA, 20 bp, Artificial Sequence
  Description of Artificial Sequence: Synthetic oligonucleotide
  Target: LAMA2; (-) strand; PAM type: NRG; PAM sequence: AAG
gaatcataacactaaataga

SEQ ID NO: 95256 - DNA, 20 bp, Artificial Sequence
  Description of Artificial Sequence: Synthetic oligonucleotide
  Target: LAMA2; (-) strand; PAM type: NRG; PAM sequence: TAG
agcggaatcataacactaaa

SEQ ID NO: 95257 - DNA, 20 bp, Artificial Sequence
  Description of Artificial Sequence: Synthetic oligonucleotide
  Target: LAMA2; (-) strand; PAM type: NRG; PAM sequence: CGG
tatcttaagtagttcttcag

SEQ ID NO: 95258 - DNA, 20 bp, Artificial Sequence
  Description of Artificial Sequence: Synthetic oligonucleotide
  Target: LAMA2; (-) strand; PAM type: NRG; PAM sequence: CAG
aattatcttaagtagttctt

SEQ ID NO: 95259 - DNA, 20 bp, Artificial Sequence
  Description of Artificial Sequence: Synthetic oligonucleotide
  Target: LAMA2; (-) strand; PAM type: NRG; PAM sequence: TAG
caaatagaaattatcttaag

SEQ ID NO: 95260 - DNA, 20 bp, Artificial Sequence
  Description of Artificial Sequence: Synthetic oligonucleotide
  Target: LAMA2; (-) strand; PAM type: NRG; PAM sequence: AAG
ttgcaaatagaaattatctt

SEQ ID NO: 95261 - DNA, 20 bp, Artificial Sequence
  Description of Artificial Sequence: Synthetic oligonucleotide
  Target: LAMA2; (-) strand; PAM type: NRG; PAM sequence: TAG
tgcaaatcattacttgcaaa

SEQ ID NO: 95262 - DNA, 20 bp, Artificial Sequence
  Description of Artificial Sequence: Synthetic oligonucleotide
  Target: LAMA2; (-) strand; PAM type: NRG; PAM sequence: CAG
tgctaaaaaatgtcatggga

SEQ ID NO: 95263 - DNA, 20 bp, Artificial Sequence
  Description of Artificial Sequence: Synthetic oligonucleotide
  Target: LAMA2; (-) strand; PAM type: NRG; PAM sequence: GGG
tatatgctaaaaaatgtcat

SEQ ID NO: 95264 - DNA, 20 bp, Artificial Sequence
  Description of Artificial Sequence: Synthetic oligonucleotide
  Target: LAMA2; (-) strand; PAM type: NRG; PAM sequence: TGG
ttatatgctaaaaaatgtca

SEQ ID NO: 95265 - DNA, 20 bp, Artificial Sequence
  Description of Artificial Sequence: Synthetic oligonucleotide
  Target: LAMA2; (-) strand; PAM type: NRG; PAM sequence: TAG
tccttcattaagaagaaaaa

SEQ ID NO: 95266 - DNA, 20 bp, Artificial Sequence
  Description of Artificial Sequence: Synthetic oligonucleotide
  Target: LAMA2; (-) strand; PAM type: NRG; PAM sequence: AAG
tagatgtgtccttcattaag

SEQ ID NO: 95267 - DNA, 20 bp, Artificial Sequence
  Description of Artificial Sequence: Synthetic oligonucleotide
  Target: LAMA2; (-) strand; PAM type: NRG; PAM sequence: AAG
ttttagatgtgtccttcatt

SEQ ID NO: 95268 - DNA, 20 bp, Artificial Sequence
  Description of Artificial Sequence: Synthetic oligonucleotide
  Target: LAMA2; (-) strand; PAM type: NRG; PAM sequence: TAG
ttaagccaaatgatttattt

SEQ ID NO: 95269 - DNA, 20 bp, Artificial Sequence
  Description of Artificial Sequence: Synthetic oligonucleotide
  Target: LAMA2; (-) strand; PAM type: NRG; PAM sequence: AAG
ttactgttgttgctaatttt

SEQ ID NO: 95270 - DNA, 20 bp, Artificial Sequence
  Description of Artificial Sequence: Synthetic oligonucleotide
  Target: LAMA2; (-) strand; PAM type: NRG; PAM sequence: TGG
aatgttagtcattgctgttt

SEQ ID NO: 95271 - DNA, 20 bp, Artificial Sequence
  Description of Artificial Sequence: Synthetic oligonucleotide
  Target: LAMA2; (-) strand; PAM type: NRG; PAM sequence: TAG
agtaaacactaaataaatgt

SEQ ID NO: 95272 - DNA, 20 bp, Artificial Sequence
  Description of Artificial Sequence: Synthetic oligonucleotide
  Target: LAMA2; (-) strand; PAM type: NRG; PAM sequence: GAG
ttagaaaaatactttacacc

SEQ ID NO: 95273 - DNA, 20 bp, Artificial Sequence
  Description of Artificial Sequence: Synthetic oligonucleotide
  Target: LAMA2; (-) strand; PAM type: NRG; PAM sequence: TAG
caccagctgtggaaggtgtt

SEQ ID NO: 95274 - DNA, 20 bp, Artificial Sequence
  Description of Artificial Sequence: Synthetic oligonucleotide
  Target: LAMA2; (-) strand; PAM type: NRG; PAM sequence: AGG
cattacacaccagctgtgga

SEQ ID NO: 95275 - DNA, 20 bp, Artificial Sequence
  Description of Artificial Sequence: Synthetic oligonucleotide
  Target: LAMA2; (-) strand; PAM type: NRG; PAM sequence: AAG
gcattacacaccagctgtgg

SEQ ID NO: 95276 - DNA, 20 bp, Artificial Sequence
  Description of Artificial Sequence: Synthetic oligonucleotide
  Target: LAMA2; (-) strand; PAM type: NRG; PAM sequence: TGG
acagcattacacaccagctg

SEQ ID NO: 95277 - DNA, 20 bp, Artificial Sequence
  Description of Artificial Sequence: Synthetic oligonucleotide
  Target: LAMA2; (-) strand; PAM type: NRG; PAM sequence: CAG
ttgctcacagcattacacac

SEQ ID NO: 95278 - DNA, 20 bp, Artificial Sequence
  Description of Artificial Sequence: Synthetic oligonucleotide
  Target: LAMA2; (-) strand; PAM type: NRG; PAM sequence: CAG
atgacaatattcattgctca

SEQ ID NO: 95279 - DNA, 20 bp, Artificial Sequence
  Description of Artificial Sequence: Synthetic oligonucleotide
  Target: LAMA2; (-) strand; PAM type: NRG; PAM sequence: TAG
tcattttcactgaatatatt

SEQ ID NO: 95280 - DNA, 20 bp, Artificial Sequence
  Description of Artificial Sequence: Synthetic oligonucleotide
  Target: LAMA2; (-) strand; PAM type: NRG; PAM sequence: TGG
gttatgagtaaacttttaat

SEQ ID NO: 95281 - DNA, 20 bp, Artificial Sequence
  Description of Artificial Sequence: Synthetic oligonucleotide
  Target: LAMA2; (-) strand; PAM type: NRG; PAM sequence: GAG
aaatggaagactaatgttat

SEQ ID NO: 95282 - DNA, 20 bp, Artificial Sequence
  Description of Artificial Sequence: Synthetic oligonucleotide
  Target: LAMA2; (-) strand; PAM type: NRG; PAM sequence: AAG
aaatacttgaattcaaatgg

SEQ ID NO: 95283 - DNA, 20 bp, Artificial Sequence
  Description of Artificial Sequence: Synthetic oligonucleotide
  Target: LAMA2; (-) strand; PAM type: NRG; PAM sequence: TGG
cccaaatacttgaattcaaa

SEQ ID NO: 95284 - DNA, 20 bp, Artificial Sequence
  Description of Artificial Sequence: Synthetic oligonucleotide
  Target: LAMA2; (-) strand; PAM type: NRG; PAM sequence: AAG
caaagaaatgtaagtgaggg

SEQ ID NO: 95285 - DNA, 20 bp, Artificial Sequence
  Description of Artificial Sequence: Synthetic oligonucleotide
  Target: LAMA2; (-) strand; PAM type: NRG; PAM sequence: GGG
tgtcaaagaaatgtaagtga

SEQ ID NO: 95286 - DNA, 20 bp, Artificial Sequence
  Description of Artificial Sequence: Synthetic oligonucleotide
  Target: LAMA2; (-) strand; PAM type: NRG; PAM sequence: AGG
atgtcaaagaaatgtaagtg

SEQ ID NO: 95287 - DNA, 20 bp, Artificial Sequence
  Description of Artificial Sequence: Synthetic oligonucleotide
  Target: LAMA2; (-) strand; PAM type: NRG; PAM sequence: GAG
catgtcaaagaaatgtaagt

SEQ ID NO: 95288 - DNA, 20 bp, Artificial Sequence
  Description of Artificial Sequence: Synthetic oligonucleotide
  Target: LAMA2; (-) strand; PAM type: NRG; PAM sequence: AAG
gtttcatgtcaaagaaatgt

SEQ ID NO: 95289 - DNA, 20 bp, Artificial Sequence
  Description of Artificial Sequence: Synthetic oligonucleotide
  Target: LAMA2; (-) strand; PAM type: NRG; PAM sequence: AAG
tagtgcagcgtttcatgtca

SEQ ID NO: 95290 - DNA, 20 bp, Artificial Sequence
  Description of Artificial Sequence: Synthetic oligonucleotide
  Target: LAMA2; (-) strand; PAM type: NRG; PAM sequence: CAG
tactaagaatatttctagtg

SEQ ID NO: 95291 - DNA, 20 bp, Artificial Sequence
  Description of Artificial Sequence: Synthetic oligonucleotide
  Target: LAMA2; (-) strand; PAM type: NRG; PAM sequence: TAG
ccagctactaagaatatttc

SEQ ID NO: 95292 - DNA, 20 bp, Artificial Sequence
  Description of Artificial Sequence: Synthetic oligonucleotide
  Target: LAMA2; (-) strand; PAM type: NRG; PAM sequence: AAG
cggcagttgacccagctact

SEQ ID NO: 95293 - DNA, 20 bp, Artificial Sequence
  Description of Artificial Sequence: Synthetic oligonucleotide
  Target: LAMA2; (-) strand; PAM type: NRG; PAM sequence: CAG
ccacatagcggcagttgacc

SEQ ID NO: 95294 - DNA, 20 bp, Artificial Sequence
  Description of Artificial Sequence: Synthetic oligonucleotide
  Target: LAMA2; (-) strand; PAM type: NRG; PAM sequence: CAG
gaatgcatgccacatagcgg

SEQ ID NO: 95295 - DNA, 20 bp, Artificial Sequence
  Description of Artificial Sequence: Synthetic oligonucleotide
  Target: LAMA2; (-) strand; PAM type: NRG; PAM sequence: CGG
aaggaatgcatgccacatag

SEQ ID NO: 95296 - DNA, 20 bp, Artificial Sequence
  Description of Artificial Sequence: Synthetic oligonucleotide
  Target: LAMA2; (-) strand; PAM type: NRG; PAM sequence: TAG
gacaaggaatgcatgccaca

SEQ ID NO: 95297 - DNA, 20 bp, Artificial Sequence
  Description of Artificial Sequence: Synthetic oligonucleotide
  Target: LAMA2; (-) strand; PAM type: NRG; PAM sequence: AGG
cttcaaagccatccaagaca

SEQ ID NO: 95298 - DNA, 20 bp, Artificial Sequence
  Description of Artificial Sequence: Synthetic oligonucleotide
  Target: LAMA2; (-) strand; PAM type: NRG; PAM sequence: AAG
tcttcaaagccatccaagac

SEQ ID NO: 95299 - DNA, 20 bp, Artificial Sequence
  Description of Artificial Sequence: Synthetic oligonucleotide
  Target: LAMA2; (-) strand; PAM type: NRG; PAM sequence: AAG
gaatatcttcaaagccatcc

SEQ ID NO: 95300 - DNA, 20 bp, Artificial Sequence
  Description of Artificial Sequence: Synthetic oligonucleotide
  Target: LAMA2; (-) strand; PAM type: NRG; PAM sequence: AAG
aatgtttgagaatatcttca

SEQ ID NO: 95301 - DNA, 20 bp, Artificial Sequence
  Description of Artificial Sequence: Synthetic oligonucleotide
  Target: LAMA2; (-) strand; PAM type: NRG; PAM sequence: GAG
agattgcaaaaataatgttt

SEQ ID NO: 95302 - DNA, 20 bp, Artificial Sequence
  Description of Artificial Sequence: Synthetic oligonucleotide
  Target: LAMA2; (-) strand; PAM type: NRG; PAM sequence: AAG
ctaccttttgtactttttca

SEQ ID NO: 95303 - DNA, 20 bp, Artificial Sequence
  Description of Artificial Sequence: Synthetic oligonucleotide
  Target: LAMA2; (-) strand; PAM type: NRG; PAM sequence: AAG
tgcaatattcaaagggtaca

SEQ ID NO: 95304 - DNA, 20 bp, Artificial Sequence
  Description of Artificial Sequence: Synthetic oligonucleotide
  Target: LAMA2; (-) strand; PAM type: NRG; PAM sequence: GGG
gctatcatgcaatattcaaa

SEQ ID NO: 95305 - DNA, 20 bp, Artificial Sequence
  Description of Artificial Sequence: Synthetic oligonucleotide
  Target: LAMA2; (-) strand; PAM type: NRG; PAM sequence: AGG
tgctatcatgcaatattcaa

SEQ ID NO: 95306 - DNA, 20 bp, Artificial Sequence
  Description of Artificial Sequence: Synthetic oligonucleotide
  Target: LAMA2; (-) strand; PAM type: NRG; PAM sequence: AAG
ttgctatcatgcaatattca

SEQ ID NO: 95307 - DNA, 20 bp, Artificial Sequence
  Description of Artificial Sequence: Synthetic oligonucleotide
  Target: LAMA2; (-) strand; PAM type: NRG; PAM sequence: TAG
taccacctgacttttttcta

SEQ ID NO: 95308 - DNA, 20 bp, Artificial Sequence
  Description of Artificial Sequence: Synthetic oligonucleotide
  Target: LAMA2; (-) strand; PAM type: NRG; PAM sequence: AAG
atggacactgtttatatata

SEQ ID NO: 95309 - DNA, 20 bp, Artificial Sequence
  Description of Artificial Sequence: Synthetic oligonucleotide
  Target: LAMA2; (-) strand; PAM type: NRG; PAM sequence: TGG
actttaaaatggttgaatta

SEQ ID NO: 95310 - DNA, 20 bp, Artificial Sequence
  Description of Artificial Sequence: Synthetic oligonucleotide
  Target: LAMA2; (-) strand; PAM type: NRG; PAM sequence: TGG
attttgcaaatactttaaaa

SEQ ID NO: 95311 - DNA, 20 bp, Artificial Sequence
  Description of Artificial Sequence: Synthetic oligonucleotide
  Target: LAMA2; (-) strand; PAM type: NRG; PAM sequence: CAG
atagttagaaacgcacacaa

SEQ ID NO: 95312 - DNA, 20 bp, Artificial Sequence
  Description of Artificial Sequence: Synthetic oligonucleotide
  Target: LAMA2; (-) strand; PAM type: NRG; PAM sequence: TAG
cggtacatcatgtatatagt

SEQ ID NO: 95313 - DNA, 20 bp, Artificial Sequence
  Description of Artificial Sequence: Synthetic oligonucleotide
  Target: LAMA2; (-) strand; PAM type: NRG; PAM sequence: TAG
aattcggtacatcatgtata

SEQ ID NO: 95314 - DNA, 20 bp, Artificial Sequence
  Description of Artificial Sequence: Synthetic oligonucleotide
  Target: LAMA2; (-) strand; PAM type: NRG; PAM sequence: CGG
cttaataagcttcttaaatt

SEQ ID NO: 95315 - DNA, 20 bp, Artificial Sequence
  Description of Artificial Sequence: Synthetic oligonucleotide
  Target: LAMA2; (-) strand; PAM type: NRG; PAM sequence: AAG
taaaaaccaataagcttaat

SEQ ID NO: 95316 - DNA, 20 bp, Artificial Sequence
  Description of Artificial Sequence: Synthetic oligonucleotide
  Target: LAMA2; (-) strand; PAM type: NRG; PAM sequence: AAG
gatctgcagtaaaaaccaat

SEQ ID NO: 95317 - DNA, 20 bp, Artificial Sequence
  Description of Artificial Sequence: Synthetic oligonucleotide
  Target: LAMA2; (-) strand; PAM type: NRG; PAM sequence: CAG
tccttgatgagcccgatctg

SEQ ID NO: 95318 - DNA, 20 bp, Artificial Sequence
  Description of Artificial Sequence: Synthetic oligonucleotide
  Target: LAMA2; (-) strand; PAM type: NRG; PAM sequence: GAG
cggattagtttttccttgat

SEQ ID NO: 95319 - DNA, 20 bp, Artificial Sequence
  Description of Artificial Sequence: Synthetic oligonucleotide
  Target: LAMA2; (-) strand; PAM type: NRG; PAM sequence: TAG
tttgtttatgctgtacggat

SEQ ID NO: 95320 - DNA, 20 bp, Artificial Sequence
  Description of Artificial Sequence: Synthetic oligonucleotide
  Target: LAMA2; (-) strand; PAM type: NRG; PAM sequence: CGG
tctaatttgtttatgctgta

SEQ ID NO: 95321 - DNA, 20 bp, Artificial Sequence
  Description of Artificial Sequence: Synthetic oligonucleotide
  Target: LAMA2; (-) strand; PAM type: NRG; PAM sequence: AAG
tttgtttgtatatttatttt

SEQ ID NO: 95322 - DNA, 20 bp, Artificial Sequence
  Description of Artificial Sequence: Synthetic oligonucleotide
  Target: LAMA2; (-) strand; PAM type: NRG; PAM sequence: AAG
ccttatattcgggtactaca

SEQ ID NO: 95323 - DNA, 20 bp, Artificial Sequence
  Description of Artificial Sequence: Synthetic oligonucleotide
  Target: LAMA2; (-) strand; PAM type: NRG; PAM sequence: GGG
aactgtaacaccttatattc

SEQ ID NO: 95324 - DNA, 20 bp, Artificial Sequence
  Description of Artificial Sequence: Synthetic oligonucleotide
  Target: LAMA2; (-) strand; PAM type: NRG; PAM sequence: CGG
taactgtaacaccttatatt

SEQ ID NO: 95325 - DNA, 20 bp, Artificial Sequence
  Description of Artificial Sequence: Synthetic oligonucleotide
  Target: LAMA2; (-) strand; PAM type: NRG; PAM sequence: CAG
aaggaaagaattggtgttat

SEQ ID NO: 95326 - DNA, 20 bp, Artificial Sequence
  Description of Artificial Sequence: Synthetic oligonucleotide
  Target: LAMA2; (-) strand; PAM type: NRG; PAM sequence: TGG
agtttaagaaaggaaagaat

SEQ ID NO: 95327 - DNA, 20 bp, Artificial Sequence
  Description of Artificial Sequence: Synthetic oligonucleotide
  Target: LAMA2; (-) strand; PAM type: NRG; PAM sequence: AAG
ctatgaagtttaagaaagga

SEQ ID NO: 95328 - DNA, 20 bp, Artificial Sequence
  Description of Artificial Sequence: Synthetic oligonucleotide
  Target: LAMA2; (-) strand; PAM type: NRG; PAM sequence: AGG
tttcctatgaagtttaagaa

SEQ ID NO: 95329 - DNA, 20 bp, Artificial Sequence
  Description of Artificial Sequence: Synthetic oligonucleotide
  Target: LAMA2; (-) strand; PAM type: NRG; PAM sequence: AAG
ctttcctatgaagtttaaga

SEQ ID NO: 95330 - DNA, 20 bp, Artificial Sequence
  Description of Artificial Sequence: Synthetic oligonucleotide
  Target: LAMA2; (-) strand; PAM type: NRG; PAM sequence: AAG
ttagctttcctatgaagttt

SEQ ID NO: 95331 - DNA, 20 bp, Artificial Sequence
  Description of Artificial Sequence: Synthetic oligonucleotide
  Target: LAMA2; (-) strand; PAM type: NRG; PAM sequence: AAG
gtatttttagctttcctatg

SEQ ID NO: 95332 - DNA, 20 bp, Artificial Sequence
  Description of Artificial Sequence: Synthetic oligonucleotide
  Target: LAMA2; (-) strand; PAM type: NRG; PAM sequence: TAG
ttcaaaagttaaagtatttt

SEQ ID NO: 95333 - DNA, 20 bp, Artificial Sequence
  Description of Artificial Sequence: Synthetic oligonucleotide
  Target: LAMA2; (-) strand; PAM type: NRG; PAM sequence: AAG
tttattaatttcaaaagtta

SEQ ID NO: 95334 - DNA, 20 bp, Artificial Sequence
  Description of Artificial Sequence: Synthetic oligonucleotide
  Target: LAMA2; (-) strand; PAM type: NRG; PAM sequence: AAG
atttcatttattaatttcaa

SEQ ID NO: 95335 - DNA, 20 bp, Artificial Sequence
  Description of Artificial Sequence: Synthetic oligonucleotide
  Target: LAMA2; (-) strand; PAM type: NRG; PAM sequence: AAG
aggagctgttcaataaatat

SEQ ID NO: 95336 - DNA, 20 bp, Artificial Sequence
  Description of Artificial Sequence: Synthetic oligonucleotide
  Target: LAMA2; (-) strand; PAM type: NRG; PAM sequence: GAG
gtacaatgtatttcagaaag

SEQ ID NO: 95337 - DNA, 20 bp, Artificial Sequence
  Description of Artificial Sequence: Synthetic oligonucleotide
  Target: LAMA2; (-) strand; PAM type: NRG; PAM sequence: AGG
tagtacaatgtatttcagaa

SEQ ID NO: 95338 - DNA, 20 bp, Artificial Sequence
  Description of Artificial Sequence: Synthetic oligonucleotide
  Target: LAMA2; (-) strand; PAM type: NRG; PAM sequence: AAG
atagtacaatgtatttcaga

SEQ ID NO: 95339 - DNA, 20 bp, Artificial Sequence
  Description of Artificial Sequence: Synthetic oligonucleotide
  Target: LAMA2; (-) strand; PAM type: NRG; PAM sequence: CAG
tattatagtacaatgtattt

SEQ ID NO: 95340 - DNA, 20 bp, Artificial Sequence
  Description of Artificial Sequence: Synthetic oligonucleotide
  Target: LAMA2; (-) strand; PAM type: NRG; PAM sequence: TAG
ttcattcatcttttatatta

SEQ ID NO: 95341 - DNA, 20 bp, Artificial Sequence
  Description of Artificial Sequence: Synthetic oligonucleotide
  Target: LAMA2; (-) strand; PAM type: NRG; PAM sequence: TGG
gttctacacttaaggatatt

SEQ ID NO: 95342 - DNA, 20 bp, Artificial Sequence
  Description of Artificial Sequence: Synthetic oligonucleotide
  Target: LAMA2; (-) strand; PAM type: NRG; PAM sequence: AGG
tcttttcagttctacactta

SEQ ID NO: 95343 - DNA, 20 bp, Artificial Sequence
  Description of Artificial Sequence: Synthetic oligonucleotide
  Target: LAMA2; (-) strand; PAM type: NRG; PAM sequence: AAG
ttcttttcagttctacactt

SEQ ID NO: 95344 - DNA, 20 bp, Artificial Sequence
  Description of Artificial Sequence: Synthetic oligonucleotide
  Target: LAMA2; (-) strand; PAM type: NRG; PAM sequence: CAG
ggtttgtcttattttctttt

SEQ ID NO: 95345 - DNA, 20 bp, Artificial Sequence
  Description of Artificial Sequence: Synthetic oligonucleotide
  Target: LAMA2; (-) strand; PAM type: NRG; PAM sequence: TGG
tgttgagttttatattgtgt

SEQ ID NO: 95346 - DNA, 20 bp, Artificial Sequence
  Description of Artificial Sequence: Synthetic oligonucleotide
  Target: LAMA2; (-) strand; PAM type: NRG; PAM sequence: GAG
aaaatttgacacaaagtgtt

SEQ ID NO: 95347 - DNA, 20 bp, Artificial Sequence
  Description of Artificial Sequence: Synthetic oligonucleotide
  Target: LAMA2; (-) strand; PAM type: NRG; PAM sequence: AAG
aatagtaaaaatttgacaca

SEQ ID NO: 95348 - DNA, 20 bp, Artificial Sequence
  Description of Artificial Sequence: Synthetic oligonucleotide
  Target: LAMA2; (-) strand; PAM type: NRG; PAM sequence: TAG
aaaacaaagaaggggaaaaa

SEQ ID NO: 95349 - DNA, 20 bp, Artificial Sequence
  Description of Artificial Sequence: Synthetic oligonucleotide
  Target: LAMA2; (-) strand; PAM type: NRG; PAM sequence: GGG
taagagggaaaacaaagaag

SEQ ID NO: 95350 - DNA, 20 bp, Artificial Sequence
  Description of Artificial Sequence: Synthetic oligonucleotide
  Target: LAMA2; (-) strand; PAM type: NRG; PAM sequence: GGG
ataagagggaaaacaaagaa

SEQ ID NO: 95351 - DNA, 20 bp, Artificial Sequence
  Description of Artificial Sequence: Synthetic oligonucleotide
  Target: LAMA2; (-) strand; PAM type: NRG; PAM sequence: AGG
tataagagggaaaacaaaga

SEQ ID NO: 95352 - DNA, 20 bp, Artificial Sequence
  Description of Artificial Sequence: Synthetic oligonucleotide
  Target: LAMA2; (-) strand; PAM type: NRG; PAM sequence: AAG
gtataagagggaaaacaaag

SEQ ID NO: 95353 - DNA, 20 bp, Artificial Sequence
  Description of Artificial Sequence: Synthetic oligonucleotide
  Target: LAMA2; (-) strand; PAM type: NRG; PAM sequence: AAG
ccggtataagagggaaaaca

SEQ ID NO: 95354 - DNA, 20 bp, Artificial Sequence
  Description of Artificial Sequence: Synthetic oligonucleotide
  Target: LAMA2; (-) strand; PAM type: NRG; PAM sequence: GGG
caagcttcaccggtataaga

SEQ ID NO: 95355 - DNA, 20 bp, Artificial Sequence
  Description of Artificial Sequence: Synthetic oligonucleotide
  Target: LAMA2; (-) strand; PAM type: NRG; PAM sequence: AGG
acaagcttcaccggtataag

SEQ ID NO: 95356 - DNA, 20 bp, Artificial Sequence
  Description of Artificial Sequence: Synthetic oligonucleotide
  Target: LAMA2; (-) strand; PAM type: NRG; PAM sequence: GAG
cacaagcttcaccggtataa

SEQ ID NO: 95357 - DNA, 20 bp, Artificial Sequence
  Description of Artificial Sequence: Synthetic oligonucleotide
  Target: LAMA2; (-) strand; PAM type: NRG; PAM sequence: AAG
ttcacaagcttcaccggtat

SEQ ID NO: 95358 - DNA, 20 bp, Artificial Sequence
  Description of Artificial Sequence: Synthetic oligonucleotide
  Target: LAMA2; (-) strand; PAM type: NRG; PAM sequence: CGG
agaacattcacaagcttcac

SEQ ID NO: 95359 - DNA, 20 bp, Artificial Sequence
  Description of Artificial Sequence: Synthetic oligonucleotide
  Target: LAMA2; (-) strand; PAM type: NRG; PAM sequence: AAG
acccagatgagaacattcac

SEQ ID NO: 95360 - DNA, 20 bp, Artificial Sequence
  Description of Artificial Sequence: Synthetic oligonucleotide
  Target: LAMA2; (-) strand; PAM type: NRG; PAM sequence: GAG
gtcacaattattacccagat

SEQ ID NO: 95361 - DNA, 20 bp, Artificial Sequence
  Description of Artificial Sequence: Synthetic oligonucleotide
  Target: LAMA2; (-) strand; PAM type: NRG; PAM sequence: CAG
tttgggtcacaattattacc

SEQ ID NO: 95362 - DNA, 20 bp, Artificial Sequence
  Description of Artificial Sequence: Synthetic oligonucleotide
  Target: LAMA2; (-) strand; PAM type: NRG; PAM sequence: GGG
aaatgcatcgcccagtcttt

SEQ ID NO: 95363 - DNA, 20 bp, Artificial Sequence
  Description of Artificial Sequence: Synthetic oligonucleotide
  Target: LAMA2; (-) strand; PAM type: NRG; PAM sequence: TGG
caaatgcatcgcccagtctt

SEQ ID NO: 95364 - DNA, 20 bp, Artificial Sequence
  Description of Artificial Sequence: Synthetic oligonucleotide
  Target: LAMA2; (-) strand; PAM type: NRG; PAM sequence: CAG
gggagggcaaatgcatcgcc

SEQ ID NO: 95365 - DNA, 20 bp, Artificial Sequence
  Description of Artificial Sequence: Synthetic oligonucleotide
  Target: LAMA2; (-) strand; PAM type: NRG; PAM sequence: GGG
tctctccaatggtattggga

SEQ ID NO: 95366 - DNA, 20 bp, Artificial Sequence
  Description of Artificial Sequence: Synthetic oligonucleotide
  Target: LAMA2; (-) strand; PAM type: NRG; PAM sequence: AGG
ttctctccaatggtattggg

SEQ ID NO: 95367 - DNA, 20 bp, Artificial Sequence
  Description of Artificial Sequence: Synthetic oligonucleotide
  Target: LAMA2; (-) strand; PAM type: NRG; PAM sequence: GAG
tttctctccaatggtattgg

SEQ ID NO: 95368 - DNA, 20 bp, Artificial Sequence
  Description of Artificial Sequence: Synthetic oligonucleotide
  Target: LAMA2; (-) strand; PAM type: NRG; PAM sequence: GGG
catttctctccaatggtatt

SEQ ID NO: 95369 - DNA, 20 bp, Artificial Sequence
  Description of Artificial Sequence: Synthetic oligonucleotide
  Target: LAMA2; (-) strand; PAM type: NRG; PAM sequence: TGG
acatttctctccaatggtat

SEQ ID NO: 95370 - DNA, 20 bp, Artificial Sequence
  Description of Artificial Sequence: Synthetic oligonucleotide
  Target: LAMA2; (-) strand; PAM type: NRG; PAM sequence: TGG
tttagaacatttctctccaa

SEQ ID NO: 95371 - DNA, 20 bp, Artificial Sequence
  Description of Artificial Sequence: Synthetic oligonucleotide
  Target: LAMA2; (-) strand; PAM type: NRG; PAM sequence: TAG
ccaggtattgggtgcacatt

SEQ ID NO: 95372 - DNA, 20 bp, Artificial Sequence
  Description of Artificial Sequence: Synthetic oligonucleotide
  Target: LAMA2; (-) strand; PAM type: NRG; PAM sequence: GGG
atgctgtggccccaggtatt

SEQ ID NO: 95373 - DNA, 20 bp, Artificial Sequence
  Description of Artificial Sequence: Synthetic oligonucleotide
  Target: LAMA2; (-) strand; PAM type: NRG; PAM sequence: TGG
aatgctgtggccccaggtat

SEQ ID NO: 95374 - DNA, 20 bp, Artificial Sequence
  Description of Artificial Sequence: Synthetic oligonucleotide
  Target: LAMA2; (-) strand; PAM type: NRG; PAM sequence: AGG
agtggtaatgctgtggcccc

SEQ ID NO: 95375 - DNA, 20 bp, Artificial Sequence
  Description of Artificial Sequence: Synthetic oligonucleotide
  Target: LAMA2; (-) strand; PAM type: NRG; PAM sequence: CAG
cagtggtaatgctgtggccc

SEQ ID NO: 95376 - DNA, 20 bp, Artificial Sequence
  Description of Artificial Sequence: Synthetic oligonucleotide
  Target: LAMA2; (-) strand; PAM type: NRG; PAM sequence: TGG
tacaaccagtggtaatgctg

SEQ ID NO: 95377 - DNA, 20 bp, Artificial Sequence
  Description of Artificial Sequence: Synthetic oligonucleotide
  Target: LAMA2; (-) strand; PAM type: NRG; PAM sequence: TGG
ttcactcaccttacaaccag

SEQ ID NO: 95378 - DNA, 20 bp, Artificial Sequence
  Description of Artificial Sequence: Synthetic oligonucleotide
  Target: LAMA2; (-) strand; PAM type: NRG; PAM sequence: CAG
tggttcactcaccttacaac

SEQ ID NO: 95379 - DNA, 20 bp, Artificial Sequence
  Description of Artificial Sequence: Synthetic oligonucleotide
  Target: LAMA2; (-) strand; PAM type: NRG; PAM sequence: TGG
aaattatcagagcaaaaaag

SEQ ID NO: 95380 - DNA, 20 bp, Artificial Sequence
  Description of Artificial Sequence: Synthetic oligonucleotide
  Target: LAMA2; (-) strand; PAM type: NRG; PAM sequence: AAG
aaaaaattatcagagcaaaa

SEQ ID NO: 95381 - DNA, 20 bp, Artificial Sequence
  Description of Artificial Sequence: Synthetic oligonucleotide
  Target: LAMA2; (-) strand; PAM type: NRG; PAM sequence: GAG
atctctccaaaaaattatca

SEQ ID NO: 95382 - DNA, 20 bp, Artificial Sequence
  Description of Artificial Sequence: Synthetic oligonucleotide
  Target: LAMA2; (-) strand; PAM type: NRG; PAM sequence: CAG
aaatctctccaaaaaattat

SEQ ID NO: 95383 - DNA, 20 bp, Artificial Sequence
  Description of Artificial Sequence: Synthetic oligonucleotide
  Target: LAMA2; (-) strand; PAM type: NRG; PAM sequence: GAG
ttttgaaatgcccaattaca

SEQ ID NO: 95384 - DNA, 20 bp, Artificial Sequence
  Description of Artificial Sequence: Synthetic oligonucleotide
  Target: LAMA2; (-) strand; PAM type: NRG; PAM sequence: CAG
aattttgaaatgcccaatta

SEQ ID NO: 95385 - DNA, 20 bp, Artificial Sequence
  Description of Artificial Sequence: Synthetic oligonucleotide
  Target: LAMA2; (-) strand; PAM type: NRG; PAM sequence: TAG
taatatctgtaatcacatta

SEQ ID NO: 95386 - DNA, 20 bp, Artificial Sequence
  Description of Artificial Sequence: Synthetic oligonucleotide
  Target: LAMA2; (-) strand; PAM type: NRG; PAM sequence: AAG
ctttcctacaagtaaactgt

SEQ ID NO: 95387 - DNA, 20 bp, Artificial Sequence
  Description of Artificial Sequence: Synthetic oligonucleotide
  Target: LAMA2; (-) strand; PAM type: NRG; PAM sequence: AAG
tacttcatcatctttcctac

SEQ ID NO: 95388 - DNA, 20 bp, Artificial Sequence
  Description of Artificial Sequence: Synthetic oligonucleotide
  Target: LAMA2; (-) strand; PAM type: NRG; PAM sequence: CAG
tcttgtagatttcaagtgtt

SEQ ID NO: 95389 - DNA, 20 bp, Artificial Sequence
  Description of Artificial Sequence: Synthetic oligonucleotide
  Target: LAMA2; (-) strand; PAM type: NRG; PAM sequence: AAG
ttacccctcttgtagatttc

SEQ ID NO: 95390 - DNA, 20 bp, Artificial Sequence
  Description of Artificial Sequence: Synthetic oligonucleotide
  Target: LAMA2; (-) strand; PAM type: NRG; PAM sequence: TAG
tgttctttttacccctcttg

SEQ ID NO: 95391 - DNA, 20 bp, Artificial Sequence
  Description of Artificial Sequence: Synthetic oligonucleotide
  Target: LAMA2; (-) strand; PAM type: NRG; PAM sequence: CAG
gctcttttctggtattatta

SEQ ID NO: 95392 - DNA, 20 bp, Artificial Sequence
  Description of Artificial Sequence: Synthetic oligonucleotide
  Target: LAMA2; (-) strand; PAM type: NRG; PAM sequence: TGG
atgaggttatagctcttttc

SEQ ID NO: 95393 - DNA, 20 bp, Artificial Sequence
  Description of Artificial Sequence: Synthetic oligonucleotide
  Target: LAMA2; (-) strand; PAM type: NRG; PAM sequence: TAG
tgtgcctaggtatgaggtta

SEQ ID NO: 95394 - DNA, 20 bp, Artificial Sequence
  Description of Artificial Sequence: Synthetic oligonucleotide
  Target: LAMA2; (-) strand; PAM type: NRG; PAM sequence: AGG
tgtccttgtgcctaggtatg

SEQ ID NO: 95395 - DNA, 20 bp, Artificial Sequence
  Description of Artificial Sequence: Synthetic oligonucleotide
  Target: LAMA2; (-) strand; PAM type: NRG; PAM sequence: GAG
atgtccttgtgcctaggtat

SEQ ID NO: 95396 - DNA, 20 bp, Artificial Sequence
  Description of Artificial Sequence: Synthetic oligonucleotide
  Target: LAMA2; (-) strand; PAM type: NRG; PAM sequence: AGG
acatgtatgtccttgtgcct

SEQ ID NO: 95397 - DNA, 20 bp, Artificial Sequence
  Description of Artificial Sequence: Synthetic oligonucleotide
  Target: LAMA2; (-) strand; PAM type: NRG; PAM sequence: TAG
cacatgtatgtccttgtgcc

SEQ ID NO: 95398 - DNA, 20 bp, Artificial Sequence
  Description of Artificial Sequence: Synthetic oligonucleotide
  Target: LAMA2; (-) strand; PAM type: NRG; PAM sequence: TAG
tagatttttggaaaattaat

SEQ ID NO: 95399 - DNA, 20 bp, Artificial Sequence
  Description of Artificial Sequence: Synthetic oligonucleotide
  Target: LAMA2; (-) strand; PAM type: NRG; PAM sequence: TGG
gggcaatttctatagatttt

SEQ ID NO: 95400 - DNA, 20 bp, Artificial Sequence
  Description of Artificial Sequence: Synthetic oligonucleotide
  Target: LAMA2; (-) strand; PAM type: NRG; PAM sequence: TAG
taattcaggggcaatttcta

SEQ ID NO: 95401 - DNA, 20 bp, Artificial Sequence
  Description of Artificial Sequence: Synthetic oligonucleotide
  Target: LAMA2; (-) strand; PAM type: NRG; PAM sequence: GGG
aaaacctagtcataattcag

SEQ ID NO: 95402 - DNA, 20 bp, Artificial Sequence
  Description of Artificial Sequence: Synthetic oligonucleotide
  Target: LAMA2; (-) strand; PAM type: NRG; PAM sequence: GGG
taaaacctagtcataattca

SEQ ID NO: 95403 - DNA, 20 bp, Artificial Sequence
  Description of Artificial Sequence: Synthetic oligonucleotide
  Target: LAMA2; (-) strand; PAM type: NRG; PAM sequence: AGG
ctaaaacctagtcataattc

SEQ ID NO: 95404 - DNA, 20 bp, Artificial Sequence
  Description of Artificial Sequence: Synthetic oligonucleotide
  Target: LAMA2; (-) strand; PAM type: NRG; PAM sequence: CAG
cctaaaacctagtcataatt

SEQ ID NO: 95405 - DNA, 20 bp, Artificial Sequence
  Description of Artificial Sequence: Synthetic oligonucleotide
  Target: LAMA2; (-) strand; PAM type: NRG; PAM sequence: TAG
acttcctgaaacctaaaacc

SEQ ID NO: 95406 - DNA, 20 bp, Artificial Sequence
  Description of Artificial Sequence: Synthetic oligonucleotide
  Target: LAMA2; (-) strand; PAM type: NRG; PAM sequence: CAG
atgttgttaaaatgactctt

SEQ ID NO: 95407 - DNA, 20 bp, Artificial Sequence
  Description of Artificial Sequence: Synthetic oligonucleotide
  Target: LAMA2; (-) strand; PAM type: NRG; PAM sequence: AAG
ggaaaaaatgattattttcc

SEQ ID NO: 95408 - DNA, 20 bp, Artificial Sequence
  Description of Artificial Sequence: Synthetic oligonucleotide
  Target: LAMA2; (-) strand; PAM type: NRG; PAM sequence: GGG
aatttctatggtctaccaat

SEQ ID NO: 95409 - DNA, 20 bp, Artificial Sequence
  Description of Artificial Sequence: Synthetic oligonucleotide
  Target: LAMA2; (-) strand; PAM type: NRG; PAM sequence: TGG
caatttctatggtctaccaa

SEQ ID NO: 95410 - DNA, 20 bp, Artificial Sequence
  Description of Artificial Sequence: Synthetic oligonucleotide
  Target: LAMA2; (-) strand; PAM type: NRG; PAM sequence: TGG
tctggccatgtcaatttcta

SEQ ID NO: 95411 - DNA, 20 bp, Artificial Sequence
  Description of Artificial Sequence: Synthetic oligonucleotide
  Target: LAMA2; (-) strand; PAM type: NRG; PAM sequence: TGG
gatctctctgaacatgactc

SEQ ID NO: 95412 - DNA, 20 bp, Artificial Sequence
  Description of Artificial Sequence: Synthetic oligonucleotide
  Target: LAMA2; (-) strand; PAM type: NRG; PAM sequence: TAG
ccatccctgctgatgctaga

SEQ ID NO: 95413 - DNA, 20 bp, Artificial Sequence
  Description of Artificial Sequence: Synthetic oligonucleotide
  Target: LAMA2; (-) strand; PAM type: NRG; PAM sequence: TAG
gttaccatccctgctgatgc

SEQ ID NO: 95414 - DNA, 20 bp, Artificial Sequence
  Description of Artificial Sequence: Synthetic oligonucleotide
  Target: LAMA2; (-) strand; PAM type: NRG; PAM sequence: CAG
tcttattaatatttcttcaa

SEQ ID NO: 95415 - DNA, 20 bp, Artificial Sequence
  Description of Artificial Sequence: Synthetic oligonucleotide
  Target: LAMA2; (-) strand; PAM type: NRG; PAM sequence: TGG
attgactgggtccaggcttt

SEQ ID NO: 95416 - DNA, 20 bp, Artificial Sequence
  Description of Artificial Sequence: Synthetic oligonucleotide
  Target: LAMA2; (-) strand; PAM type: NRG; PAM sequence: AGG
gacgctcattgactgggtcc

SEQ ID NO: 95417 - DNA, 20 bp, Artificial Sequence
  Description of Artificial Sequence: Synthetic oligonucleotide
  Target: LAMA2; (-) strand; PAM type: NRG; PAM sequence: CAG
tgacgctcattgactgggtc

SEQ ID NO: 95418 - DNA, 20 bp, Artificial Sequence
  Description of Artificial Sequence: Synthetic oligonucleotide
  Target: LAMA2; (-) strand; PAM type: NRG; PAM sequence: GGG
ttcactgacgctcattgact

SEQ ID NO: 95419 - DNA, 20 bp, Artificial Sequence
  Description of Artificial Sequence: Synthetic oligonucleotide
  Target: LAMA2; (-) strand; PAM type: NRG; PAM sequence: TGG
cttcactgacgctcattgac

SEQ ID NO: 95420 - DNA, 20 bp, Artificial Sequence
  Description of Artificial Sequence: Synthetic oligonucleotide
  Target: LAMA2; (-) strand; PAM type: NRG; PAM sequence: GAG
tcaccaggctgtatcagcct

SEQ ID NO: 95421 - DNA, 20 bp, Artificial Sequence
  Description of Artificial Sequence: Synthetic oligonucleotide
  Target: LAMA2; (-) strand; PAM type: NRG; PAM sequence: CAG
atgaattcaccaggctgtat

SEQ ID NO: 95422 - DNA, 20 bp, Artificial Sequence
  Description of Artificial Sequence: Synthetic oligonucleotide
  Target: LAMA2; (-) strand; PAM type: NRG; PAM sequence: AGG
cccaaatcaatgaattcacc

SEQ ID NO: 95423 - DNA, 20 bp, Artificial Sequence
  Description of Artificial Sequence: Synthetic oligonucleotide
  Target: LAMA2; (-) strand; PAM type: NRG; PAM sequence: CAG
ccccaaatcaatgaattcac

SEQ ID NO: 95424 - DNA, 20 bp, Artificial Sequence
  Description of Artificial Sequence: Synthetic oligonucleotide
  Target: LAMA2; (-) strand; PAM type: NRG; PAM sequence: AAG
caaaacctaggagtcatcct

SEQ ID NO: 95425 - DNA, 20 bp, Artificial Sequence
  Description of Artificial Sequence: Synthetic oligonucleotide
  Target: LAMA2; (-) strand; PAM type: NRG; PAM sequence: GAG
cattgcaaagcaaaacctag

SEQ ID NO: 95426 - DNA, 20 bp, Artificial Sequence
  Description of Artificial Sequence: Synthetic oligonucleotide
  Target: LAMA2; (-) strand; PAM type: NRG; PAM sequence: AGG
tccattgcaaagcaaaacct

SEQ ID NO: 95427 - DNA, 20 bp, Artificial Sequence
  Description of Artificial Sequence: Synthetic oligonucleotide
  Target: LAMA2; (-) strand; PAM type: NRG; PAM sequence: TAG
ctccattgcaaagcaaaacc

SEQ ID NO: 95428 - DNA, 20 bp, Artificial Sequence
  Description of Artificial Sequence: Synthetic oligonucleotide
  Target: LAMA2; (-) strand; PAM type: NRG; PAM sequence: AAG
ttatcatctactccattgca

SEQ ID NO: 95429 - DNA, 20 bp, Artificial Sequence
  Description of Artificial Sequence: Synthetic oligonucleotide
  Target: LAMA2; (-) strand; PAM type: NRG; PAM sequence: TGG
ataattcctatagctgcaca

SEQ ID NO: 95430 - DNA, 20 bp, Artificial Sequence
  Description of Artificial Sequence: Synthetic oligonucleotide
  Target: LAMA2; (-) strand; PAM type: NRG; PAM sequence: TAG
tcctcctcctataattccta

SEQ ID NO: 95431 - DNA, 20 bp, Artificial Sequence
  Description of Artificial Sequence: Synthetic oligonucleotide
  Target: LAMA2; (-) strand; PAM type: NRG; PAM sequence: AAG
aaaaagctgataaaaatgca

SEQ ID NO: 95432 - DNA, 20 bp, Artificial Sequence
  Description of Artificial Sequence: Synthetic oligonucleotide
  Target: LAMA2; (-) strand; PAM type: NRG; PAM sequence: AAG
ttttattaatacctcacaaa

SEQ ID NO: 95433 - DNA, 20 bp, Artificial Sequence
  Description of Artificial Sequence: Synthetic oligonucleotide
  Target: LAMA2; (-) strand; PAM type: NRG; PAM sequence: GGG
taaaattcattactataaat

SEQ ID NO: 95434 - DNA, 20 bp, Artificial Sequence
  Description of Artificial Sequence: Synthetic oligonucleotide
  Target: LAMA2; (-) strand; PAM type: NRG; PAM sequence: TGG
ttaaaattcattactataaa

SEQ ID NO: 95435 - DNA, 20 bp, Artificial Sequence
  Description of Artificial Sequence: Synthetic oligonucleotide
  Target: LAMA2; (-) strand; PAM type: NRG; PAM sequence: TGG
gattacaccactgtaatcat

SEQ ID NO: 95436 - DNA, 20 bp, Artificial Sequence
  Description of Artificial Sequence: Synthetic oligonucleotide
  Target: LAMA2; (-) strand; PAM type: NRG; PAM sequence: GGG
ttcactgcaatggggcacaa

SEQ ID NO: 95437 - DNA, 20 bp, Artificial Sequence
  Description of Artificial Sequence: Synthetic oligonucleotide
  Target: LAMA2; (-) strand; PAM type: NRG; PAM sequence: AGG
cttcactgcaatggggcaca

SEQ ID NO: 95438 - DNA, 20 bp, Artificial Sequence
  Description of Artificial Sequence: Synthetic oligonucleotide
  Target: LAMA2; (-) strand; PAM type: NRG; PAM sequence: AAG
acttcactgcaatggggcac

SEQ ID NO: 95439 - DNA, 20 bp, Artificial Sequence
  Description of Artificial Sequence: Synthetic oligonucleotide
  Target: LAMA2; (-) strand; PAM type: NRG; PAM sequence: GGG
atggggacttcactgcaatg

SEQ ID NO: 95440 - DNA, 20 bp, Artificial Sequence
  Description of Artificial Sequence: Synthetic oligonucleotide
  Target: LAMA2; (-) strand; PAM type: NRG; PAM sequence: GGG
gatggggacttcactgcaat

SEQ ID NO: 95441 - DNA, 20 bp, Artificial Sequence
  Description of Artificial Sequence: Synthetic oligonucleotide
  Target: LAMA2; (-) strand; PAM type: NRG; PAM sequence: TGG
tgatggggacttcactgcaa

SEQ ID NO: 95442 - DNA, 20 bp, Artificial Sequence
  Description of Artificial Sequence: Synthetic oligonucleotide
  Target: LAMA2; (-) strand; PAM type: NRG; PAM sequence: GGG
taggcacatggggggtgatg

SEQ ID NO: 95443 - DNA, 20 bp, Artificial Sequence
  Description of Artificial Sequence: Synthetic oligonucleotide
  Target: LAMA2; (-) strand; PAM type: NRG; PAM sequence: GGG
gtaggcacatggggggtgat

SEQ ID NO: 95444 - DNA, 20 bp, Artificial Sequence
  Description of Artificial Sequence: Synthetic oligonucleotide
  Target: LAMA2; (-) strand; PAM type: NRG; PAM sequence: TGG
agtaggcacatggggggtga

SEQ ID NO: 95445 - DNA, 20 bp, Artificial Sequence
  Description of Artificial Sequence: Synthetic oligonucleotide
  Target: LAMA2; (-) strand; PAM type: NRG; PAM sequence: GGG
caaaacagtaggcacatggg

SEQ ID NO: 95446 - DNA, 20 bp, Artificial Sequence
  Description of Artificial Sequence: Synthetic oligonucleotide
  Target: LAMA2; (-) strand; PAM type: NRG; PAM sequence: GGG
gcaaaacagtaggcacatgg

SEQ ID NO: 95447 - DNA, 20 bp, Artificial Sequence
  Description of Artificial Sequence: Synthetic oligonucleotide
  Target: LAMA2; (-) strand; PAM type: NRG; PAM sequence: GGG
ggcaaaacagtaggcacatg

SEQ ID NO: 95448 - DNA, 20 bp, Artificial Sequence
  Description of Artificial Sequence: Synthetic oligonucleotide
  Target: LAMA2; (-) strand; PAM type: NRG; PAM sequence: GGG
aggcaaaacagtaggcacat

SEQ ID NO: 95449 - DNA, 20 bp, Artificial Sequence
  Description of Artificial Sequence: Synthetic oligonucleotide
  Target: LAMA2; (-) strand; PAM type: NRG; PAM sequence: TGG
aaggcaaaacagtaggcaca

SEQ ID NO: 95450 - DNA, 20 bp, Artificial Sequence
  Description of Artificial Sequence: Synthetic oligonucleotide
  Target: LAMA2; (-) strand; PAM type: NRG; PAM sequence: AGG
atgctagaaggcaaaacagt

SEQ ID NO: 95451 - DNA, 20 bp, Artificial Sequence
  Description of Artificial Sequence: Synthetic oligonucleotide
  Target: LAMA2; (-) strand; PAM type: NRG; PAM sequence: TAG
aatgctagaaggcaaaacag

SEQ ID NO: 95452 - DNA, 20 bp, Artificial Sequence
  Description of Artificial Sequence: Synthetic oligonucleotide
  Target: LAMA2; (-) strand; PAM type: NRG; PAM sequence: CAG
tataatgctagaaggcaaaa

SEQ ID NO: 95453 - DNA, 20 bp, Artificial Sequence
  Description of Artificial Sequence: Synthetic oligonucleotide
  Target: LAMA2; (-) strand; PAM type: NRG; PAM sequence: AGG
tggaaaattataatgctaga

SEQ ID NO: 95454 - DNA, 20 bp, Artificial Sequence
  Description of Artificial Sequence: Synthetic oligonucleotide
  Target: LAMA2; (-) strand; PAM type: NRG; PAM sequence: AAG
ttggaaaattataatgctag

SEQ ID NO: 95455 - DNA, 20 bp, Artificial Sequence
  Description of Artificial Sequence: Synthetic oligonucleotide
  Target: LAMA2; (-) strand; PAM type: NRG; PAM sequence: TAG
aaattggaaaattataatgc

SEQ ID NO: 95456 - DNA, 20 bp, Artificial Sequence
  Description of Artificial Sequence: Synthetic oligonucleotide
  Target: LAMA2; (-) strand; PAM type: NRG; PAM sequence: TGG
ttttcagaagttgtagaaat

SEQ ID NO: 95457 - DNA, 20 bp, Artificial Sequence
  Description of Artificial Sequence: Synthetic oligonucleotide
  Target: LAMA2; (-) strand; PAM type: NRG; PAM sequence: TAG
attctatttttcagaagttg

SEQ ID NO: 95458 - DNA, 20 bp, Artificial Sequence
  Description of Artificial Sequence: Synthetic oligonucleotide
  Target: LAMA2; (-) strand; PAM type: NRG; PAM sequence: AAG
actacgattctatttttcag

SEQ ID NO: 95459 - DNA, 20 bp, Artificial Sequence
  Description of Artificial Sequence: Synthetic oligonucleotide
  Target: LAMA2; (-) strand; PAM type: NRG; PAM sequence: CAG
cagactacgattctattttt

SEQ ID NO: 95460 - DNA, 20 bp, Artificial Sequence
  Description of Artificial Sequence: Synthetic oligonucleotide
  Target: LAMA2; (-) strand; PAM type: NRG; PAM sequence: CAG
caaaccccccctcaaaaaaa

SEQ ID NO: 95461 - DNA, 20 bp, Artificial Sequence
  Description of Artificial Sequence: Synthetic oligonucleotide
  Target: LAMA2; (-) strand; PAM type: NRG; PAM sequence: AAG
caagtgaaggaagccaaaca

SEQ ID NO: 95462 - DNA, 20 bp, Artificial Sequence
  Description of Artificial Sequence: Synthetic oligonucleotide
  Target: LAMA2; (-) strand; PAM type: NRG; PAM sequence: AAG
aacgtaacaccaagtgaagg

SEQ ID NO: 95463 - DNA, 20 bp, Artificial Sequence
  Description of Artificial Sequence: Synthetic oligonucleotide
  Target: LAMA2; (-) strand; PAM type: NRG; PAM sequence: AGG
aaaaacgtaacaccaagtga

SEQ ID NO: 95464 - DNA, 20 bp, Artificial Sequence
  Description of Artificial Sequence: Synthetic oligonucleotide
  Target: LAMA2; (-) strand; PAM type: NRG; PAM sequence: AAG
caaaaacgtaacaccaagtg

SEQ ID NO: 95465 - DNA, 20 bp, Artificial Sequence
  Description of Artificial Sequence: Synthetic oligonucleotide
  Target: LAMA2; (-) strand; PAM type: NRG; PAM sequence: AAG
aattacaaaaacgtaacacc

SEQ ID NO: 95466 - DNA, 20 bp, Artificial Sequence
  Description of Artificial Sequence: Synthetic oligonucleotide
  Target: LAMA2; (-) strand; PAM type: NRG; PAM sequence: TGG
tgctgatacatgcaacaata

SEQ ID NO: 95467 - DNA, 20 bp, Artificial Sequence
  Description of Artificial Sequence: Synthetic oligonucleotide
  Target: LAMA2; (-) strand; PAM type: NRG; PAM sequence: TAG
gaatattattaagcaatttt

SEQ ID NO: 95468 - DNA, 20 bp, Artificial Sequence
  Description of Artificial Sequence: Synthetic oligonucleotide
  Target: LAMA2; (-) strand; PAM type: NRG; PAM sequence: AAG
tacacaaatggaatattatt

SEQ ID NO: 95469 - DNA, 20 bp, Artificial Sequence
  Description of Artificial Sequence: Synthetic oligonucleotide
  Target: LAMA2; (-) strand; PAM type: NRG; PAM sequence: TGG
gtcactgtacattacacaaa

SEQ ID NO: 95470 - DNA, 20 bp, Artificial Sequence
  Description of Artificial Sequence: Synthetic oligonucleotide
  Target: LAMA2; (-) strand; PAM type: NRG; PAM sequence: AAG
taaatggtaaacaggtaagc

SEQ ID NO: 95471 - DNA, 20 bp, Artificial Sequence
  Description of Artificial Sequence: Synthetic oligonucleotide
  Target: LAMA2; (-) strand; PAM type: NRG; PAM sequence: AAG
ccattaaatggtaaacaggt

SEQ ID NO: 95472 - DNA, 20 bp, Artificial Sequence
  Description of Artificial Sequence: Synthetic oligonucleotide
  Target: LAMA2; (-) strand; PAM type: NRG; PAM sequence: AGG
acacccattaaatggtaaac

SEQ ID NO: 95473 - DNA, 20 bp, Artificial Sequence
  Description of Artificial Sequence: Synthetic oligonucleotide
  Target: LAMA2; (-) strand; PAM type: NRG; PAM sequence: CAG
aacacccattaaatggtaaa

SEQ ID NO: 95474 - DNA, 20 bp, Artificial Sequence
  Description of Artificial Sequence: Synthetic oligonucleotide
  Target: LAMA2; (-) strand; PAM type: NRG; PAM sequence: TGG
tgacccaaacacccattaaa

SEQ ID NO: 95475 - DNA, 20 bp, Artificial Sequence
  Description of Artificial Sequence: Synthetic oligonucleotide
  Target: LAMA2; (-) strand; PAM type: NRG; PAM sequence: TAG
gcaaaattgtaaccccaaac

SEQ ID NO: 95476 - DNA, 20 bp, Artificial Sequence
  Description of Artificial Sequence: Synthetic oligonucleotide
  Target: LAMA2; (-) strand; PAM type: NRG; PAM sequence: CAG
gacttgtatgctaatgttca

SEQ ID NO: 95477 - DNA, 20 bp, Artificial Sequence
  Description of Artificial Sequence: Synthetic oligonucleotide
  Target: LAMA2; (-) strand; PAM type: NRG; PAM sequence: GAG
agtgttcttaagaaaaaaaa

SEQ ID NO: 95478 - DNA, 20 bp, Artificial Sequence
  Description of Artificial Sequence: Synthetic oligonucleotide
  Target: LAMA2; (-) strand; PAM type: NRG; PAM sequence: AAG
ggagtgttcttaagaaaaaa

SEQ ID NO: 95479 - DNA, 20 bp, Artificial Sequence
  Description of Artificial Sequence: Synthetic oligonucleotide
  Target: LAMA2; (-) strand; PAM type: NRG; PAM sequence: AAG
caaagatgtggagtgttctt

SEQ ID NO: 95480 - DNA, 20 bp, Artificial Sequence
  Description of Artificial Sequence: Synthetic oligonucleotide
  Target: LAMA2; (-) strand; PAM type: NRG; PAM sequence: GAG
caagagttggcaaagatgtg

SEQ ID NO: 95481 - DNA, 20 bp, Artificial Sequence
  Description of Artificial Sequence: Synthetic oligonucleotide
  Target: LAMA2; (-) strand; PAM type: NRG; PAM sequence: TGG
tccaagagttggcaaagatg

SEQ ID NO: 95482 - DNA, 20 bp, Artificial Sequence
  Description of Artificial Sequence: Synthetic oligonucleotide
  Target: LAMA2; (-) strand; PAM type: NRG; PAM sequence: AAG
taaaagtccaagagttggca

SEQ ID NO: 95483 - DNA, 20 bp, Artificial Sequence
  Description of Artificial Sequence: Synthetic oligonucleotide
  Target: LAMA2; (-) strand; PAM type: NRG; PAM sequence: TGG
agggttaaaagtccaagagt

SEQ ID NO: 95484 - DNA, 20 bp, Artificial Sequence
  Description of Artificial Sequence: Synthetic oligonucleotide
  Target: LAMA2; (-) strand; PAM type: NRG; PAM sequence: GAG
aaaaagggttaaaagtccaa

SEQ ID NO: 95485 - DNA, 20 bp, Artificial Sequence
  Description of Artificial Sequence: Synthetic oligonucleotide
  Target: LAMA2; (-) strand; PAM type: NRG; PAM sequence: AAG
taaaaaagggttaaaagtcc

SEQ ID NO: 95486 - DNA, 20 bp, Artificial Sequence
  Description of Artificial Sequence: Synthetic oligonucleotide
  Target: LAMA2; (-) strand; PAM type: NRG; PAM sequence: AAG
taaaattaaaaaagggttaa

SEQ ID NO: 95487 - DNA, 20 bp, Artificial Sequence
  Description of Artificial Sequence: Synthetic oligonucleotide
  Target: LAMA2; (-) strand; PAM type: NRG; PAM sequence: GGG
gaattcttaaaattaaaaaa

SEQ ID NO: 95488 - DNA, 20 bp, Artificial Sequence
  Description of Artificial Sequence: Synthetic oligonucleotide
  Target: LAMA2; (-) strand; PAM type: NRG; PAM sequence: AGG
agaattcttaaaattaaaaa

SEQ ID NO: 95489 - DNA, 20 bp, Artificial Sequence
  Description of Artificial Sequence: Synthetic oligonucleotide
  Target: LAMA2; (-) strand; PAM type: NRG; PAM sequence: AAG
cagaattcttaaaattaaaa

SEQ ID NO: 95490 - DNA, 20 bp, Artificial Sequence
  Description of Artificial Sequence: Synthetic oligonucleotide
  Target: LAMA2; (-) strand; PAM type: NRG; PAM sequence: CAG
caagagaaatacacatgcat

SEQ ID NO: 95491 - DNA, 20 bp, Artificial Sequence
  Description of Artificial Sequence: Synthetic oligonucleotide
  Target: LAMA2; (-) strand; PAM type: NRG; PAM sequence: GAG
cattaaataaatgcaaacaa

SEQ ID NO: 95492 - DNA, 20 bp, Artificial Sequence
  Description of Artificial Sequence: Synthetic oligonucleotide
  Target: LAMA2; (-) strand; PAM type: NRG; PAM sequence: AAG
ggcattaaataaatgcaaac

SEQ ID NO: 95493 - DNA, 20 bp, Artificial Sequence
  Description of Artificial Sequence: Synthetic oligonucleotide
  Target: LAMA2; (-) strand; PAM type: NRG; PAM sequence: GGG
aaaggattcccaacattact

SEQ ID NO: 95494 - DNA, 20 bp, Artificial Sequence
  Description of Artificial Sequence: Synthetic oligonucleotide
  Target: LAMA2; (-) strand; PAM type: NRG; PAM sequence: TGG
gaaaggattcccaacattac

SEQ ID NO: 95495 - DNA, 20 bp, Artificial Sequence
  Description of Artificial Sequence: Synthetic oligonucleotide
  Target: LAMA2; (-) strand; PAM type: NRG; PAM sequence: AGG
atgacaaataaataaatgaa

SEQ ID NO: 95496 - DNA, 20 bp, Artificial Sequence
  Description of Artificial Sequence: Synthetic oligonucleotide
  Target: LAMA2; (-) strand; PAM type: NRG; PAM sequence: AAG
aatgacaaataaataaatga

SEQ ID NO: 95497 - DNA, 20 bp, Artificial Sequence
  Description of Artificial Sequence: Synthetic oligonucleotide
  Target: LAMA2; (-) strand; PAM type: NRG; PAM sequence: AAG
gctttgtaaacacttcaaaa

SEQ ID NO: 95498 - DNA, 20 bp, Artificial Sequence
  Description of Artificial Sequence: Synthetic oligonucleotide
  Target: LAMA2; (-) strand; PAM type: NRG; PAM sequence: AAG
ctcaaaatagaaatgggcat

SEQ ID NO: 95499 - DNA, 20 bp, Artificial Sequence
  Description of Artificial Sequence: Synthetic oligonucleotide
  Target: LAMA2; (-) strand; PAM type: NRG; PAM sequence: GGG
aaacaactcaaaatagaaat

SEQ ID NO: 95500 - DNA, 20 bp, Artificial Sequence
  Description of Artificial Sequence: Synthetic oligonucleotide
  Target: LAMA2; (-) strand; PAM type: NRG; PAM sequence: TGG
caaacaactcaaaatagaaa

SEQ ID NO: 95501 - DNA, 20 bp, Artificial Sequence
  Description of Artificial Sequence: Synthetic oligonucleotide
  Target: LAMA2; (-) strand; PAM type: NRG; PAM sequence: TAG
aggaaacaaacaactcaaaa

SEQ ID NO: 95502 - DNA, 20 bp, Artificial Sequence
  Description of Artificial Sequence: Synthetic oligonucleotide
  Target: LAMA2; (-) strand; PAM type: NRG; PAM sequence: AGG
atccttgcaatgcattacta

SEQ ID NO: 95503 - DNA, 20 bp, Artificial Sequence
  Description of Artificial Sequence: Synthetic oligonucleotide
  Target: LAMA2; (-) strand; PAM type: NRG; PAM sequence: AAG
aatccttgcaatgcattact

SEQ ID NO: 95504 - DNA, 20 bp, Artificial Sequence
  Description of Artificial Sequence: Synthetic oligonucleotide
  Target: LAMA2; (-) strand; PAM type: NRG; PAM sequence: CAG
tacgttaaagaacatgtatc

SEQ ID NO: 95505 - DNA, 20 bp, Artificial Sequence
  Description of Artificial Sequence: Synthetic oligonucleotide
  Target: LAMA2; (-) strand; PAM type: NRG; PAM sequence: AAG
gcaagctttaacatacgtta

SEQ ID NO: 95506 - DNA, 20 bp, Artificial Sequence
  Description of Artificial Sequence: Synthetic oligonucleotide
  Target: LAMA2; (-) strand; PAM type: NRG; PAM sequence: AAG
aagcaatctatatgaaaagc

SEQ ID NO: 95507 - DNA, 20 bp, Artificial Sequence
  Description of Artificial Sequence: Synthetic oligonucleotide
  Target: LAMA2; (-) strand; PAM type: NRG; PAM sequence: AAG
taaaaagcaatctatatgaa

SEQ ID NO: 95508 - DNA, 20 bp, Artificial Sequence
  Description of Artificial Sequence: Synthetic oligonucleotide
  Target: LAMA2; (-) strand; PAM type: NRG; PAM sequence: AAG
agatgatgaaactaggtaaa

SEQ ID NO: 95509 - DNA, 20 bp, Artificial Sequence
  Description of Artificial Sequence: Synthetic oligonucleotide
  Target: LAMA2; (-) strand; PAM type: NRG; PAM sequence: AGG
aaagattagatgatgaaact

SEQ ID NO: 95510 - DNA, 20 bp, Artificial Sequence
  Description of Artificial Sequence: Synthetic oligonucleotide
  Target: LAMA2; (-) strand; PAM type: NRG; PAM sequence: TAG
taaagattagatgatgaaac

SEQ ID NO: 95511 - DNA, 20 bp, Artificial Sequence
  Description of Artificial Sequence: Synthetic oligonucleotide
  Target: LAMA2; (-) strand; PAM type: NRG; PAM sequence: TAG
aagctagtgtttataaagat

SEQ ID NO: 95512 - DNA, 20 bp, Artificial Sequence
  Description of Artificial Sequence: Synthetic oligonucleotide
  Target: LAMA2; (-) strand; PAM type: NRG; PAM sequence: AAG
ataataagctagtgtttata

SEQ ID NO: 95513 - DNA, 20 bp, Artificial Sequence
  Description of Artificial Sequence: Synthetic oligonucleotide
  Target: LAMA2; (-) strand; PAM type: NRG; PAM sequence: TAG
agaagaaaaagataataagc

SEQ ID NO: 95514 - DNA, 20 bp, Artificial Sequence
  Description of Artificial Sequence: Synthetic oligonucleotide
  Target: LAMA2; (-) strand; PAM type: NRG; PAM sequence: AAG
ctatagaagaaaaagataat

SEQ ID NO: 95515 - DNA, 20 bp, Artificial Sequence
  Description of Artificial Sequence: Synthetic oligonucleotide
  Target: LAMA2; (-) strand; PAM type: NRG; PAM sequence: AAG
agtatggactatagaagaaa

SEQ ID NO: 95516 - DNA, 20 bp, Artificial Sequence
  Description of Artificial Sequence: Synthetic oligonucleotide
  Target: LAMA2; (-) strand; PAM type: NRG; PAM sequence: AAG
ataaaaagtatggactatag

SEQ ID NO: 95517 - DNA, 20 bp, Artificial Sequence
  Description of Artificial Sequence: Synthetic oligonucleotide
  Target: LAMA2; (-) strand; PAM type: NRG; PAM sequence: TAG
aacataaaaagtatggacta

SEQ ID NO: 95518 - DNA, 20 bp, Artificial Sequence
  Description of Artificial Sequence: Synthetic oligonucleotide
  Target: LAMA2; (-) strand; PAM type: NRG; PAM sequence: TGG
tgggtagaacataaaaagta

SEQ ID NO: 95519 - DNA, 20 bp, Artificial Sequence
  Description of Artificial Sequence: Synthetic oligonucleotide
  Target: LAMA2; (-) strand; PAM type: NRG; PAM sequence: AAG
tttcttgggtagaacataaa

SEQ ID NO: 95520 - DNA, 20 bp, Artificial Sequence
  Description of Artificial Sequence: Synthetic oligonucleotide
  Target: LAMA2; (-) strand; PAM type: NRG; PAM sequence: TAG
tggaccttgtctttcttggg

SEQ ID NO: 95521 - DNA, 20 bp, Artificial Sequence
  Description of Artificial Sequence: Synthetic oligonucleotide
  Target: LAMA2; (-) strand; PAM type: NRG; PAM sequence: GGG
ctttggaccttgtctttctt

SEQ ID NO: 95522 - DNA, 20 bp, Artificial Sequence
  Description of Artificial Sequence: Synthetic oligonucleotide
  Target: LAMA2; (-) strand; PAM type: NRG; PAM sequence: TGG
tctttggaccttgtctttct

SEQ ID NO: 95523 - DNA, 20 bp, Artificial Sequence
  Description of Artificial Sequence: Synthetic oligonucleotide
  Target: LAMA2; (-) strand; PAM type: NRG; PAM sequence: TGG
aaacatgggagagaaatctt

SEQ ID NO: 95524 - DNA, 20 bp, Artificial Sequence
  Description of Artificial Sequence: Synthetic oligonucleotide
  Target: LAMA2; (-) strand; PAM type: NRG; PAM sequence: GAG
ttcttgaagaaaacatggga

SEQ ID NO: 95525 - DNA, 20 bp, Artificial Sequence
  Description of Artificial Sequence: Synthetic oligonucleotide
  Target: LAMA2; (-) strand; PAM type: NRG; PAM sequence: GAG
acttcttgaagaaaacatgg

SEQ ID NO: 95526 - DNA, 20 bp, Artificial Sequence
  Description of Artificial Sequence: Synthetic oligonucleotide
  Target: LAMA2; (-) strand; PAM type: NRG; PAM sequence: GGG
aaacttcttgaagaaaacat

SEQ ID NO: 95527 - DNA, 20 bp, Artificial Sequence
  Description of Artificial Sequence: Synthetic oligonucleotide
  Target: LAMA2; (-) strand; PAM type: NRG; PAM sequence: TGG
aaaacttcttgaagaaaaca

SEQ ID NO: 95528 - DNA, 20 bp, Artificial Sequence
  Description of Artificial Sequence: Synthetic oligonucleotide
  Target: LAMA2; (-) strand; PAM type: NRG; PAM sequence: AAG
taaaactctaaaacttcttg

SEQ ID NO: 95529 - DNA, 20 bp, Artificial Sequence
  Description of Artificial Sequence: Synthetic oligonucleotide
  Target: LAMA2; (-) strand; PAM type: NRG; PAM sequence: GAG
gaatccaaacctacatttaa

SEQ ID NO: 95530 - DNA, 20 bp, Artificial Sequence
  Description of Artificial Sequence: Synthetic oligonucleotide
  Target: LAMA2; (-) strand; PAM type: NRG; PAM sequence: AAG
tggaatccaaacctacattt

SEQ ID NO: 95531 - DNA, 20 bp, Artificial Sequence
  Description of Artificial Sequence: Synthetic oligonucleotide
  Target: LAMA2; (-) strand; PAM type: NRG; PAM sequence: TGG
agaaaaattaatattcaaaa

SEQ ID NO: 95532 - DNA, 20 bp, Artificial Sequence
  Description of Artificial Sequence: Synthetic oligonucleotide
  Target: LAMA2; (-) strand; PAM type: NRG; PAM sequence: TAG
tctgaccattacctgatata

SEQ ID NO: 95533 - DNA, 20 bp, Artificial Sequence
  Description of Artificial Sequence: Synthetic oligonucleotide
  Target: LAMA2; (-) strand; PAM type: NRG; PAM sequence: GAG
attgggtatccataaaaagt

SEQ ID NO: 95534 - DNA, 20 bp, Artificial Sequence
  Description of Artificial Sequence: Synthetic oligonucleotide
  Target: LAMA2; (-) strand; PAM type: NRG; PAM sequence: AAG
aaaaattgggtatccataaa

SEQ ID NO: 95535 - DNA, 20 bp, Artificial Sequence
  Description of Artificial Sequence: Synthetic oligonucleotide
  Target: LAMA2; (-) strand; PAM type: NRG; PAM sequence: GGG
caaataatgtttgaaaaatt

SEQ ID NO: 95536 - DNA, 20 bp, Artificial Sequence
  Description of Artificial Sequence: Synthetic oligonucleotide
  Target: LAMA2; (-) strand; PAM type: NRG; PAM sequence: TGG
acaaataatgtttgaaaaat

SEQ ID NO: 95537 - DNA, 20 bp, Artificial Sequence
  Description of Artificial Sequence: Synthetic oligonucleotide
  Target: LAMA2; (-) strand; PAM type: NRG; PAM sequence: TAG
taattcaatgggaaaaagga

SEQ ID NO: 95538 - DNA, 20 bp, Artificial Sequence
  Description of Artificial Sequence: Synthetic oligonucleotide
  Target: LAMA2; (-) strand; PAM type: NRG; PAM sequence: AGG
aaagtaattcaatgggaaaa

SEQ ID NO: 95539 - DNA, 20 bp, Artificial Sequence
  Description of Artificial Sequence: Synthetic oligonucleotide
  Target: LAMA2; (-) strand; PAM type: NRG; PAM sequence: AAG
caaagtaattcaatgggaaa

SEQ ID NO: 95540 - DNA, 20 bp, Artificial Sequence
  Description of Artificial Sequence: Synthetic oligonucleotide
  Target: LAMA2; (-) strand; PAM type: NRG; PAM sequence: GGG
aggagtcaaagtaattcaat

SEQ ID NO: 95541 - DNA, 20 bp, Artificial Sequence
  Description of Artificial Sequence: Synthetic oligonucleotide
  Target: LAMA2; (-) strand; PAM type: NRG; PAM sequence: TGG
aaggagtcaaagtaattcaa

SEQ ID NO: 95542 - DNA, 20 bp, Artificial Sequence
  Description of Artificial Sequence: Synthetic oligonucleotide
  Target: LAMA2; (-) strand; PAM type: NRG; PAM sequence: AAG
agattttgacaaaggagtca

SEQ ID NO: 95543 - DNA, 20 bp, Artificial Sequence
  Description of Artificial Sequence: Synthetic oligonucleotide
  Target: LAMA2; (-) strand; PAM type: NRG; PAM sequence: GAG
gttgatagattttgacaaag

SEQ ID NO: 95544 - DNA, 20 bp, Artificial Sequence
  Description of Artificial Sequence: Synthetic oligonucleotide
  Target: LAMA2; (-) strand; PAM type: NRG; PAM sequence: AGG
tagttgatagattttgacaa

SEQ ID NO: 95545 - DNA, 20 bp, Artificial Sequence
  Description of Artificial Sequence: Synthetic oligonucleotide
  Target: LAMA2; (-) strand; PAM type: NRG; PAM sequence: AAG
atagttgatagattttgaca

SEQ ID NO: 95546 - DNA, 20 bp, Artificial Sequence
  Description of Artificial Sequence: Synthetic oligonucleotide
  Target: LAMA2; (-) strand; PAM type: NRG; PAM sequence: TAG
ataaacatatatatagttga

SEQ ID NO: 95547 - DNA, 20 bp, Artificial Sequence
  Description of Artificial Sequence: Synthetic oligonucleotide
  Target: LAMA2; (-) strand; PAM type: NRG; PAM sequence: TAG
gaaatgcataaacatatata

SEQ ID NO: 95548 - DNA, 20 bp, Artificial Sequence
  Description of Artificial Sequence: Synthetic oligonucleotide
  Target: LAMA2; (-) strand; PAM type: NRG; PAM sequence: CAG
cggtgaagcagaaaagagtc

SEQ ID NO: 95549 - DNA, 20 bp, Artificial Sequence
  Description of Artificial Sequence: Synthetic oligonucleotide
  Target: LAMA2; (-) strand; PAM type: NRG; PAM sequence: GAG
tagatcggtgaagcagaaaa

SEQ ID NO: 95550 - DNA, 20 bp, Artificial Sequence
  Description of Artificial Sequence: Synthetic oligonucleotide
  Target: LAMA2; (-) strand; PAM type: NRG; PAM sequence: AAG
aatagatcggtgaagcagaa

SEQ ID NO: 95551 - DNA, 20 bp, Artificial Sequence
  Description of Artificial Sequence: Synthetic oligonucleotide
  Target: LAMA2; (-) strand; PAM type: NRG; PAM sequence: CAG
ataagaatagatcggtgaag

SEQ ID NO: 95552 - DNA, 20 bp, Artificial Sequence
  Description of Artificial Sequence: Synthetic oligonucleotide
  Target: LAMA2; (-) strand; PAM type: NRG; PAM sequence: AAG
aacataagaatagatcggtg

SEQ ID NO: 95553 - DNA, 20 bp, Artificial Sequence
  Description of Artificial Sequence: Synthetic oligonucleotide
  Target: LAMA2; (-) strand; PAM type: NRG; PAM sequence: CGG
gtattaacataagaatagat

SEQ ID NO: 95554 - DNA, 20 bp, Artificial Sequence
  Description of Artificial Sequence: Synthetic oligonucleotide
  Target: LAMA2; (-) strand; PAM type: NRG; PAM sequence: TAG
aactagtattaacataagaa

SEQ ID NO: 95555 - DNA, 20 bp, Artificial Sequence
  Description of Artificial Sequence: Synthetic oligonucleotide
  Target: LAMA2; (-) strand; PAM type: NRG; PAM sequence: AAG
atattaactagtattaacat

SEQ ID NO: 95556 - DNA, 20 bp, Artificial Sequence
  Description of Artificial Sequence: Synthetic oligonucleotide
  Target: LAMA2; (-) strand; PAM type: NRG; PAM sequence: TAG
acaataattaacatattaac

SEQ ID NO: 95557 - DNA, 20 bp, Artificial Sequence
  Description of Artificial Sequence: Synthetic oligonucleotide
  Target: LAMA2; (-) strand; PAM type: NRG; PAM sequence: AAG
tgattttatgacttgctgga

SEQ ID NO: 95558 - DNA, 20 bp, Artificial Sequence
  Description of Artificial Sequence: Synthetic oligonucleotide
  Target: LAMA2; (-) strand; PAM type: NRG; PAM sequence: TGG
tacctgattttatgacttgc

SEQ ID NO: 95559 - DNA, 20 bp, Artificial Sequence
  Description of Artificial Sequence: Synthetic oligonucleotide
  Target: LAMA2; (-) strand; PAM type: NRG; PAM sequence: AGG
ggaaacgatgaatgaggttg

SEQ ID NO: 95560 - DNA, 20 bp, Artificial Sequence
  Description of Artificial Sequence: Synthetic oligonucleotide
  Target: LAMA2; (-) strand; PAM type: NRG; PAM sequence: GAG
tggaaacgatgaatgaggtt

SEQ ID NO: 95561 - DNA, 20 bp, Artificial Sequence
  Description of Artificial Sequence: Synthetic oligonucleotide
  Target: LAMA2; (-) strand; PAM type: NRG; PAM sequence: AGG
ggtattggaaacgatgaatg

SEQ ID NO: 95562 - DNA, 20 bp, Artificial Sequence
  Description of Artificial Sequence: Synthetic oligonucleotide
  Target: LAMA2; (-) strand; PAM type: NRG; PAM sequence: GAG
aggtattggaaacgatgaat

SEQ ID NO: 95563 - DNA, 20 bp, Artificial Sequence
  Description of Artificial Sequence: Synthetic oligonucleotide
  Target: LAMA2; (-) strand; PAM type: NRG; PAM sequence: TGG
ctaaagtactcaaaaggtat

SEQ ID NO: 95564 - DNA, 20 bp, Artificial Sequence
  Description of Artificial Sequence: Synthetic oligonucleotide
  Target: LAMA2; (-) strand; PAM type: NRG; PAM sequence: AGG
aaggagctaaagtactcaaa

SEQ ID NO: 95565 - DNA, 20 bp, Artificial Sequence
  Description of Artificial Sequence: Synthetic oligonucleotide
  Target: LAMA2; (-) strand; PAM type: NRG; PAM sequence: AAG
aaaggagctaaagtactcaa

SEQ ID NO: 95566 - DNA, 20 bp, Artificial Sequence
  Description of Artificial Sequence: Synthetic oligonucleotide
  Target: LAMA2; (-) strand; PAM type: NRG; PAM sequence: AAG
gtggaaatgtaaaggagcta

SEQ ID NO: 95567 - DNA, 20 bp, Artificial Sequence
  Description of Artificial Sequence: Synthetic oligonucleotide
  Target: LAMA2; (-) strand; PAM type: NRG; PAM sequence: GAG
agttatgtggaaatgtaaag

SEQ ID NO: 95568 - DNA, 20 bp, Artificial Sequence
  Description of Artificial Sequence: Synthetic oligonucleotide
  Target: LAMA2; (-) strand; PAM type: NRG; PAM sequence: AGG
aaagttatgtggaaatgtaa

SEQ ID NO: 95569 - DNA, 20 bp, Artificial Sequence
  Description of Artificial Sequence: Synthetic oligonucleotide
  Target: LAMA2; (-) strand; PAM type: NRG; PAM sequence: AAG
aaaagttatgtggaaatgta

SEQ ID NO: 95570 - DNA, 20 bp, Artificial Sequence
  Description of Artificial Sequence: Synthetic oligonucleotide
  Target: LAMA2; (-) strand; PAM type: NRG; PAM sequence: TGG
tgctaaatttaaaagttatg

SEQ ID NO: 95571 - DNA, 20 bp, Artificial Sequence
  Description of Artificial Sequence: Synthetic oligonucleotide
  Target: LAMA2; (-) strand; PAM type: NRG; PAM sequence: AAG
aattgacatgctaaatttaa

SEQ ID NO: 95572 - DNA, 20 bp, Artificial Sequence
  Description of Artificial Sequence: Synthetic oligonucleotide
  Target: LAMA2; (-) strand; PAM type: NRG; PAM sequence: AAG
tcctagcaggctttttggta

SEQ ID NO: 95573 - DNA, 20 bp, Artificial Sequence
  Description of Artificial Sequence: Synthetic oligonucleotide
  Target: LAMA2; (-) strand; PAM type: NRG; PAM sequence: TGG
ccaaatcctagcaggctttt

SEQ ID NO: 95574 - DNA, 20 bp, Artificial Sequence
  Description of Artificial Sequence: Synthetic oligonucleotide
  Target: LAMA2; (-) strand; PAM type: NRG; PAM sequence: AGG
aatttcagccaaatcctagc

SEQ ID NO: 95575 - DNA, 20 bp, Artificial Sequence
  Description of Artificial Sequence: Synthetic oligonucleotide
  Target: LAMA2; (-) strand; PAM type: NRG; PAM sequence: CAG
taatttcagccaaatcctag

SEQ ID NO: 95576 - DNA, 20 bp, Artificial Sequence
  Description of Artificial Sequence: Synthetic oligonucleotide
  Target: LAMA2; (-) strand; PAM type: NRG; PAM sequence: TAG
atataatttcagccaaatcc

SEQ ID NO: 95577 - DNA, 20 bp, Artificial Sequence
  Description of Artificial Sequence: Synthetic oligonucleotide
  Target: LAMA2; (-) strand; PAM type: NRG; PAM sequence: CAG
ctatcaattcaatataattt

SEQ ID NO: 95578 - DNA, 20 bp, Artificial Sequence
  Description of Artificial Sequence: Synthetic oligonucleotide
  Target: LAMA2; (-) strand; PAM type: NRG; PAM sequence: AAG
ctgggatatctaatactttt

SEQ ID NO: 95579 - DNA, 20 bp, Artificial Sequence
  Description of Artificial Sequence: Synthetic oligonucleotide
  Target: LAMA2; (-) strand; PAM type: NRG; PAM sequence: GGG
ttatgccatgttcatacact

SEQ ID NO: 95580 - DNA, 20 bp, Artificial Sequence
  Description of Artificial Sequence: Synthetic oligonucleotide
  Target: LAMA2; (-) strand; PAM type: NRG; PAM sequence: TGG
gttatgccatgttcatacac

SEQ ID NO: 95581 - DNA, 20 bp, Artificial Sequence
  Description of Artificial Sequence: Synthetic oligonucleotide
  Target: LAMA2; (-) strand; PAM type: NRG; PAM sequence: GAG
taacaacctaaaaaaatgca

SEQ ID NO: 95582 - DNA, 20 bp, Artificial Sequence
  Description of Artificial Sequence: Synthetic oligonucleotide
  Target: LAMA2; (-) strand; PAM type: NRG; PAM sequence: CAG
tataacaacctaaaaaaatg

SEQ ID NO: 95583 - DNA, 20 bp, Artificial Sequence
  Description of Artificial Sequence: Synthetic oligonucleotide
  Target: LAMA2; (-) strand; PAM type: NRG; PAM sequence: GAG
caaaaactacaaacatttct

SEQ ID NO: 95584 - DNA, 20 bp, Artificial Sequence
  Description of Artificial Sequence: Synthetic oligonucleotide
  Target: LAMA2; (-) strand; PAM type: NRG; PAM sequence: AAG
catttaacaatatatatgca

SEQ ID NO: 95585 - DNA, 20 bp, Artificial Sequence
  Description of Artificial Sequence: Synthetic oligonucleotide
  Target: LAMA2; (-) strand; PAM type: NRG; PAM sequence: CGG
ttttgataaaaaatatgaaa

SEQ ID NO: 95586 - DNA, 20 bp, Artificial Sequence
  Description of Artificial Sequence: Synthetic oligonucleotide
  Target: LAMA2; (-) strand; PAM type: NRG; PAM sequence: CAG
tttaaaactgaaatggaaca

SEQ ID NO: 95587 - DNA, 20 bp, Artificial Sequence
  Description of Artificial Sequence: Synthetic oligonucleotide
  Target: LAMA2; (-) strand; PAM type: NRG; PAM sequence: TGG
caagcaatttaaaactgaaa

SEQ ID NO: 95588 - DNA, 20 bp, Artificial Sequence
  Description of Artificial Sequence: Synthetic oligonucleotide
  Target: LAMA2; (-) strand; PAM type: NRG; PAM sequence: AAG
tatttttctattctagtaac

SEQ ID NO: 95589 - DNA, 20 bp, Artificial Sequence
  Description of Artificial Sequence: Synthetic oligonucleotide
  Target: LAMA2; (-) strand; PAM type: NRG; PAM sequence: TAG
ataattgtatttttctattc

SEQ ID NO: 95590 - DNA, 20 bp, Artificial Sequence
  Description of Artificial Sequence: Synthetic oligonucleotide
  Target: LAMA2; (-) strand; PAM type: NRG; PAM sequence: AGG
gattacagtatagaaggata

SEQ ID NO: 95591 - DNA, 20 bp, Artificial Sequence
  Description of Artificial Sequence: Synthetic oligonucleotide
  Target: LAMA2; (-) strand; PAM type: NRG; PAM sequence: AAG
agattacagtatagaaggat

SEQ ID NO: 95592 - DNA, 20 bp, Artificial Sequence
  Description of Artificial Sequence: Synthetic oligonucleotide
  Target: LAMA2; (-) strand; PAM type: NRG; PAM sequence: AGG
tagcaagattacagtataga

SEQ ID NO: 95593 - DNA, 20 bp, Artificial Sequence
  Description of Artificial Sequence: Synthetic oligonucleotide
  Target: LAMA2; (-) strand; PAM type: NRG; PAM sequence: AAG
ttagcaagattacagtatag

SEQ ID NO: 95594 - DNA, 20 bp, Artificial Sequence
  Description of Artificial Sequence: Synthetic oligonucleotide
  Target: LAMA2; (-) strand; PAM type: NRG; PAM sequence: TAG
agtttagcaagattacagta

SEQ ID NO: 95595 - DNA, 20 bp, Artificial Sequence
  Description of Artificial Sequence: Synthetic oligonucleotide
  Target: LAMA2; (-) strand; PAM type: NRG; PAM sequence: CAG
taataagtttagcaagatta

SEQ ID NO: 95596 - DNA, 20 bp, Artificial Sequence
  Description of Artificial Sequence: Synthetic oligonucleotide
  Target: LAMA2; (-) strand; PAM type: NRG; PAM sequence: AAG
ctagaactaataagtttagc

SEQ ID NO: 95597 - DNA, 20 bp, Artificial Sequence
  Description of Artificial Sequence: Synthetic oligonucleotide
  Target: LAMA2; (-) strand; PAM type: NRG; PAM sequence: TAG
gaaactagaactaataagtt

SEQ ID NO: 95598 - DNA, 20 bp, Artificial Sequence
  Description of Artificial Sequence: Synthetic oligonucleotide
  Target: LAMA2; (-) strand; PAM type: NRG; PAM sequence: AAG
aaaaagaaactagaactaat

SEQ ID NO: 95599 - DNA, 20 bp, Artificial Sequence
  Description of Artificial Sequence: Synthetic oligonucleotide
  Target: LAMA2; (-) strand; PAM type: NRG; PAM sequence: TAG
taaatggaccaaaaagaaac

SEQ ID NO: 95600 - DNA, 20 bp, Artificial Sequence
  Description of Artificial Sequence: Synthetic oligonucleotide
  Target: LAMA2; (-) strand; PAM type: NRG; PAM sequence: AAG
atctcactaaatggaccaaa

SEQ ID NO: 95601 - DNA, 20 bp, Artificial Sequence
  Description of Artificial Sequence: Synthetic oligonucleotide
  Target: LAMA2; (-) strand; PAM type: NRG; PAM sequence: TGG
tacaagaaaatctcactaaa

SEQ ID NO: 95602 - DNA, 20 bp, Artificial Sequence
  Description of Artificial Sequence: Synthetic oligonucleotide
  Target: LAMA2; (-) strand; PAM type: NRG; PAM sequence: AAG
cagatgacatgattatctac

SEQ ID NO: 95603 - DNA, 20 bp, Artificial Sequence
  Description of Artificial Sequence: Synthetic oligonucleotide
  Target: LAMA2; (-) strand; PAM type: NRG; PAM sequence: CAG
aggaagtaaatctctctttg

SEQ ID NO: 95604 - DNA, 20 bp, Artificial Sequence
  Description of Artificial Sequence: Synthetic oligonucleotide
  Target: LAMA2; (-) strand; PAM type: NRG; PAM sequence: AAG
agttacacagattagaaagg

SEQ ID NO: 95605 - DNA, 20 bp, Artificial Sequence
  Description of Artificial Sequence: Synthetic oligonucleotide
  Target: LAMA2; (-) strand; PAM type: NRG; PAM sequence: AGG
agaagttacacagattagaa

SEQ ID NO: 95606 - DNA, 20 bp, Artificial Sequence
  Description of Artificial Sequence: Synthetic oligonucleotide
  Target: LAMA2; (-) strand; PAM type: NRG; PAM sequence: AAG
cagaagttacacagattaga

SEQ ID NO: 95607 - DNA, 20 bp, Artificial Sequence
  Description of Artificial Sequence: Synthetic oligonucleotide
  Target: LAMA2; (-) strand; PAM type: NRG; PAM sequence: TAG
gccacagaagttacacagat

SEQ ID NO: 95608 - DNA, 20 bp, Artificial Sequence
  Description of Artificial Sequence: Synthetic oligonucleotide
  Target: LAMA2; (-) strand; PAM type: NRG; PAM sequence: CAG
aaaatgccacagaagttaca

SEQ ID NO: 95609 - DNA, 20 bp, Artificial Sequence
  Description of Artificial Sequence: Synthetic oligonucleotide
  Target: LAMA2; (-) strand; PAM type: NRG; PAM sequence: AAG
aggacaagaaaatgccacag

SEQ ID NO: 95610 - DNA, 20 bp, Artificial Sequence
  Description of Artificial Sequence: Synthetic oligonucleotide
  Target: LAMA2; (-) strand; PAM type: NRG; PAM sequence: CAG
aataggacaagaaaatgcca

SEQ ID NO: 95611 - DNA, 20 bp, Artificial Sequence
  Description of Artificial Sequence: Synthetic oligonucleotide
  Target: LAMA2; (-) strand; PAM type: NRG; PAM sequence: AAG
atagtttactacaataggac

SEQ ID NO: 95612 - DNA, 20 bp, Artificial Sequence
  Description of Artificial Sequence: Synthetic oligonucleotide
  Target: LAMA2; (-) strand; PAM type: NRG; PAM sequence: AGG
agtcaatagtttactacaat

SEQ ID NO: 95613 - DNA, 20 bp, Artificial Sequence
  Description of Artificial Sequence: Synthetic oligonucleotide
  Target: LAMA2; (-) strand; PAM type: NRG; PAM sequence: TAG
tagtcaatagtttactacaa

SEQ ID NO: 95614 - DNA, 20 bp, Artificial Sequence
  Description of Artificial Sequence: Synthetic oligonucleotide
  Target: LAMA2; (-) strand; PAM type: NRG; PAM sequence: TAG
cttccaccacttctagtcaa

SEQ ID NO: 95615 - DNA, 20 bp, Artificial Sequence
  Description of Artificial Sequence: Synthetic oligonucleotide
  Target: LAMA2; (-) strand; PAM type: NRG; PAM sequence: TAG
atatttgcttccaccacttc

SEQ ID NO: 95616 - DNA, 20 bp, Artificial Sequence
  Description of Artificial Sequence: Synthetic oligonucleotide
  Target: LAMA2; (-) strand; PAM type: NRG; PAM sequence: AGG
ttaaactaaggaacaaggca

SEQ ID NO: 95617 - DNA, 20 bp, Artificial Sequence
  Description of Artificial Sequence: Synthetic oligonucleotide
  Target: LAMA2; (-) strand; PAM type: NRG; PAM sequence: AAG
cttaaactaaggaacaaggc

SEQ ID NO: 95618 - DNA, 20 bp, Artificial Sequence
  Description of Artificial Sequence: Synthetic oligonucleotide
  Target: LAMA2; (-) strand; PAM type: NRG; PAM sequence: AGG
tccacttaaactaaggaaca

SEQ ID NO: 95619 - DNA, 20 bp, Artificial Sequence
  Description of Artificial Sequence: Synthetic oligonucleotide
  Target: LAMA2; (-) strand; PAM type: NRG; PAM sequence: AAG
ttccacttaaactaaggaac

SEQ ID NO: 95620 - DNA, 20 bp, Artificial Sequence
  Description of Artificial Sequence: Synthetic oligonucleotide
  Target: LAMA2; (-) strand; PAM type: NRG; PAM sequence: AGG
aatgctttccacttaaacta

SEQ ID NO: 95621 - DNA, 20 bp, Artificial Sequence
  Description of Artificial Sequence: Synthetic oligonucleotide
  Target: LAMA2; (-) strand; PAM type: NRG; PAM sequence: AAG
caatgctttccacttaaact

SEQ ID NO: 95622 - DNA, 20 bp, Artificial Sequence
  Description of Artificial Sequence: Synthetic oligonucleotide
  Target: LAMA2; (-) strand; PAM type: NRG; PAM sequence: AAG
aacatcattttcaattataa

SEQ ID NO: 95623 - DNA, 20 bp, Artificial Sequence
  Description of Artificial Sequence: Synthetic oligonucleotide
  Target: LAMA2; (-) strand; PAM type: NRG; PAM sequence: TAG
aagcacctacaggtaaaata

SEQ ID NO: 95624 - DNA, 20 bp, Artificial Sequence
  Description of Artificial Sequence: Synthetic oligonucleotide
  Target: LAMA2; (-) strand; PAM type: NRG; PAM sequence: AGG
aaacaataaaaagcacctac

SEQ ID NO: 95625 - DNA, 20 bp, Artificial Sequence
  Description of Artificial Sequence: Synthetic oligonucleotide
  Target: LAMA2; (-) strand; PAM type: NRG; PAM sequence: CAG
aaaacaataaaaagcaccta

SEQ ID NO: 95626 - DNA, 20 bp, Artificial Sequence
  Description of Artificial Sequence: Synthetic oligonucleotide
  Target: LAMA2; (-) strand; PAM type: NRG; PAM sequence: AAG
ggcatcctcaaaacaataaa

SEQ ID NO: 95627 - DNA, 20 bp, Artificial Sequence
  Description of Artificial Sequence: Synthetic oligonucleotide
  Target: LAMA2; (-) strand; PAM type: NRG; PAM sequence: GGG
agcaaactaaaaacacgagg

SEQ ID NO: 95628 - DNA, 20 bp, Artificial Sequence
  Description of Artificial Sequence: Synthetic oligonucleotide
  Target: LAMA2; (-) strand; PAM type: NRG; PAM sequence: GGG
tagcaaactaaaaacacgag

SEQ ID NO: 95629 - DNA, 20 bp, Artificial Sequence
  Description of Artificial Sequence: Synthetic oligonucleotide
  Target: LAMA2; (-) strand; PAM type: NRG; PAM sequence: GGG
ttagcaaactaaaaacacga

SEQ ID NO: 95630 - DNA, 20 bp, Artificial Sequence
  Description of Artificial Sequence: Synthetic oligonucleotide
  Target: LAMA2; (-) strand; PAM type: NRG; PAM sequence: AGG
cttagcaaactaaaaacacg

SEQ ID NO: 95631 - DNA, 20 bp, Artificial Sequence
  Description of Artificial Sequence: Synthetic oligonucleotide
  Target: LAMA2; (-) strand; PAM type: NRG; PAM sequence: GAG
tcttagcaaactaaaaacac

SEQ ID NO: 95632 - DNA, 20 bp, Artificial Sequence
  Description of Artificial Sequence: Synthetic oligonucleotide
  Target: LAMA2; (-) strand; PAM type: NRG; PAM sequence: TAG
atattcttgataaaagctct

SEQ ID NO: 95633 - DNA, 20 bp, Artificial Sequence
  Description of Artificial Sequence: Synthetic oligonucleotide
  Target: LAMA2; (-) strand; PAM type: NRG; PAM sequence: AAG
tgaacacatattcttgataa

SEQ ID NO: 95634 - DNA, 20 bp, Artificial Sequence
  Description of Artificial Sequence: Synthetic oligonucleotide
  Target: LAMA2; (-) strand; PAM type: NRG; PAM sequence: AAG
tcatctcaatagatgcagaa

SEQ ID NO: 95635 - DNA, 20 bp, Artificial Sequence
  Description of Artificial Sequence: Synthetic oligonucleotide
  Target: LAMA2; (-) strand; PAM type: NRG; PAM sequence: CAG
tatggtcatctcaatagatg

SEQ ID NO: 95636 - DNA, 20 bp, Artificial Sequence
  Description of Artificial Sequence: Synthetic oligonucleotide
  Target: LAMA2; (-) strand; PAM type: NRG; PAM sequence: TAG
atatcatatggtcatctcaa

SEQ ID NO: 95637 - DNA, 20 bp, Artificial Sequence
  Description of Artificial Sequence: Synthetic oligonucleotide
  Target: LAMA2; (-) strand; PAM type: NRG; PAM sequence: TGG
gcttaaaaagaaatatcata

SEQ ID NO: 95638 - DNA, 20 bp, Artificial Sequence
  Description of Artificial Sequence: Synthetic oligonucleotide
  Target: LAMA2; (-) strand; PAM type: NRG; PAM sequence: AAG
tgtcatattaacagcttaaa

SEQ ID NO: 95639 - DNA, 20 bp, Artificial Sequence
  Description of Artificial Sequence: Synthetic oligonucleotide
  Target: LAMA2; (-) strand; PAM type: NRG; PAM sequence: CAG
agtataatctgtcatattaa

SEQ ID NO: 95640 - DNA, 20 bp, Artificial Sequence
  Description of Artificial Sequence: Synthetic oligonucleotide
  Target: LAMA2; (-) strand; PAM type: NRG; PAM sequence: CAG
ttgatatgttgaaaatcaat

SEQ ID NO: 95641 - DNA, 20 bp, Artificial Sequence
  Description of Artificial Sequence: Synthetic oligonucleotide
  Target: LAMA2; (-) strand; PAM type: NRG; PAM sequence: TGG
taatctgaggattgtaagac

SEQ ID NO: 95642 - DNA, 20 bp, Artificial Sequence
  Description of Artificial Sequence: Synthetic oligonucleotide
  Target: LAMA2; (-) strand; PAM type: NRG; PAM sequence: AAG
aggattaatctgaggattgt

SEQ ID NO: 95643 - DNA, 20 bp, Artificial Sequence
  Description of Artificial Sequence: Synthetic oligonucleotide
  Target: LAMA2; (-) strand; PAM type: NRG; PAM sequence: AGG
ggccaagcaggattaatctg

SEQ ID NO: 95644 - DNA, 20 bp, Artificial Sequence
  Description of Artificial Sequence: Synthetic oligonucleotide
  Target: LAMA2; (-) strand; PAM type: NRG; PAM sequence: GAG
tggccaagcaggattaatct

SEQ ID NO: 95645 - DNA, 20 bp, Artificial Sequence
  Description of Artificial Sequence: Synthetic oligonucleotide
  Target: LAMA2; (-) strand; PAM type: NRG; PAM sequence: AGG
gataatccccatggccaagc

SEQ ID NO: 95646 - DNA, 20 bp, Artificial Sequence
  Description of Artificial Sequence: Synthetic oligonucleotide
  Target: LAMA2; (-) strand; PAM type: NRG; PAM sequence: CAG
ggataatccccatggccaag

SEQ ID NO: 95647 - DNA, 20 bp, Artificial Sequence
  Description of Artificial Sequence: Synthetic oligonucleotide
  Target: LAMA2; (-) strand; PAM type: NRG; PAM sequence: AAG
aaaggataatccccatggcc

SEQ ID NO: 95648 - DNA, 20 bp, Artificial Sequence
  Description of Artificial Sequence: Synthetic oligonucleotide
  Target: LAMA2; (-) strand; PAM type: NRG; PAM sequence: TGG
ttttaaaaggataatcccca

SEQ ID NO: 95649 - DNA, 20 bp, Artificial Sequence
  Description of Artificial Sequence: Synthetic oligonucleotide
  Target: LAMA2; (-) strand; PAM type: NRG; PAM sequence: AGG
ggattcaacataattttaaa

SEQ ID NO: 95650 - DNA, 20 bp, Artificial Sequence
  Description of Artificial Sequence: Synthetic oligonucleotide
  Target: LAMA2; (-) strand; PAM type: NRG; PAM sequence: AAG
aggattcaacataattttaa

SEQ ID NO: 95651 - DNA, 20 bp, Artificial Sequence
  Description of Artificial Sequence: Synthetic oligonucleotide
  Target: LAMA2; (-) strand; PAM type: NRG; PAM sequence: AGG
ttaagaaaatgctagcaaac

SEQ ID NO: 95652 - DNA, 20 bp, Artificial Sequence
  Description of Artificial Sequence: Synthetic oligonucleotide
  Target: LAMA2; (-) strand; PAM type: NRG; PAM sequence: CAG
attaagaaaatgctagcaaa

SEQ ID NO: 95653 - DNA, 20 bp, Artificial Sequence
  Description of Artificial Sequence: Synthetic oligonucleotide
  Target: LAMA2; (-) strand; PAM type: NRG; PAM sequence: TAG
caaaatcattaagaaaatgc

SEQ ID NO: 95654 - DNA, 20 bp, Artificial Sequence
  Description of Artificial Sequence: Synthetic oligonucleotide
  Target: LAMA2; (-) strand; PAM type: NRG; PAM sequence: AAG
aacgtagatccaaaatcatt

SEQ ID NO: 95655 - DNA, 20 bp, Artificial Sequence
  Description of Artificial Sequence: Synthetic oligonucleotide
  Target: LAMA2; (-) strand; PAM type: NRG; PAM sequence: TAG
accaatatttcttataaacg

SEQ ID NO: 95656 - DNA, 20 bp, Artificial Sequence
  Description of Artificial Sequence: Synthetic oligonucleotide
  Target: LAMA2; (-) strand; PAM type: NRG; PAM sequence: AAG
gacaacgctacaagaaaaat

SEQ ID NO: 95657 - DNA, 20 bp, Artificial Sequence
  Description of Artificial Sequence: Synthetic oligonucleotide
  Target: LAMA2; (-) strand; PAM type: NRG; PAM sequence: AAG
catcccgacgacaacgctac

SEQ ID NO: 95658 - DNA, 20 bp, Artificial Sequence
  Description of Artificial Sequence: Synthetic oligonucleotide
  Target: LAMA2; (-) strand; PAM type: NRG; PAM sequence: CAG
aatccatttcatgaagcttg

SEQ ID NO: 95659 - DNA, 20 bp, Artificial Sequence
  Description of Artificial Sequence: Synthetic oligonucleotide
  Target: LAMA2; (-) strand; PAM type: NRG; PAM sequence: AAG
acttctgaatccatttcatg

SEQ ID NO: 95660 - DNA, 20 bp, Artificial Sequence
  Description of Artificial Sequence: Synthetic oligonucleotide
  Target: LAMA2; (-) strand; PAM type: NRG; PAM sequence: GGG
gcttttataaattatgagga

SEQ ID NO: 95661 - DNA, 20 bp, Artificial Sequence
  Description of Artificial Sequence: Synthetic oligonucleotide
  Target: LAMA2; (-) strand; PAM type: NRG; PAM sequence: AGG
cgcttttataaattatgagg

SEQ ID NO: 95662 - DNA, 20 bp, Artificial Sequence
  Description of Artificial Sequence: Synthetic oligonucleotide
  Target: LAMA2; (-) strand; PAM type: NRG; PAM sequence: GAG
acgcttttataaattatgag

SEQ ID NO: 95663 - DNA, 20 bp, Artificial Sequence
  Description of Artificial Sequence: Synthetic oligonucleotide
  Target: LAMA2; (-) strand; PAM type: NRG; PAM sequence: AGG
aaacgcttttataaattatg

SEQ ID NO: 95664 - DNA, 20 bp, Artificial Sequence
  Description of Artificial Sequence: Synthetic oligonucleotide
  Target: LAMA2; (-) strand; PAM type: NRG; PAM sequence: GAG
aaaacgcttttataaattat

SEQ ID NO: 95665 - DNA, 20 bp, Artificial Sequence
  Description of Artificial Sequence: Synthetic oligonucleotide
  Target: LAMA2; (-) strand; PAM type: NRG; PAM sequence: AAG
tgagcttttgggttcctcta

SEQ ID NO: 95666 - DNA, 20 bp, Artificial Sequence
  Description of Artificial Sequence: Synthetic oligonucleotide
  Target: LAMA2; (-) strand; PAM type: NRG; PAM sequence: GGG
ttttcaaatagtgagctttt

SEQ ID NO: 95667 - DNA, 20 bp, Artificial Sequence
  Description of Artificial Sequence: Synthetic oligonucleotide
  Target: LAMA2; (-) strand; PAM type: NRG; PAM sequence: TGG
cttttcaaatagtgagcttt

SEQ ID NO: 95668 - DNA, 20 bp, Artificial Sequence
  Description of Artificial Sequence: Synthetic oligonucleotide
  Target: LAMA2; (-) strand; PAM type: NRG; PAM sequence: GAG
tactgatcttttcaaatagt

SEQ ID NO: 95669 - DNA, 20 bp, Artificial Sequence
  Description of Artificial Sequence: Synthetic oligonucleotide
  Target: LAMA2; (-) strand; PAM type: NRG; PAM sequence: TAG
actttactgatcttttcaaa

SEQ ID NO: 95670 - DNA, 20 bp, Artificial Sequence
  Description of Artificial Sequence: Synthetic oligonucleotide
  Target: LAMA2; (-) strand; PAM type: NRG; PAM sequence: TAG
tttttcttgattaacctttc

SEQ ID NO: 95671 - DNA, 20 bp, Artificial Sequence
  Description of Artificial Sequence: Synthetic oligonucleotide
  Target: LAMA2; (-) strand; PAM type: NRG; PAM sequence: TAG
cttaatgtctataggatcta

SEQ ID NO: 95672 - DNA, 20 bp, Artificial Sequence
  Description of Artificial Sequence: Synthetic oligonucleotide
  Target: LAMA2; (-) strand; PAM type: NRG; PAM sequence: AGG
attattatcttaatgtctat

SEQ ID NO: 95673 - DNA, 20 bp, Artificial Sequence
  Description of Artificial Sequence: Synthetic oligonucleotide
  Target: LAMA2; (-) strand; PAM type: NRG; PAM sequence: TAG
tattattatcttaatgtcta

SEQ ID NO: 95674 - DNA, 20 bp, Artificial Sequence
  Description of Artificial Sequence: Synthetic oligonucleotide
  Target: LAMA2; (-) strand; PAM type: NRG; PAM sequence: AGG
tgcaagttatcacatttatt

SEQ ID NO: 95675 - DNA, 20 bp, Artificial Sequence
  Description of Artificial Sequence: Synthetic oligonucleotide
  Target: LAMA2; (-) strand; PAM type: NRG; PAM sequence: TAG
atgcaagttatcacatttat

SEQ ID NO: 95676 - DNA, 20 bp, Artificial Sequence
  Description of Artificial Sequence: Synthetic oligonucleotide
  Target: LAMA2; (-) strand; PAM type: NRG; PAM sequence: AAG
aaggaatgttcttttcatgc

SEQ ID NO: 95677 - DNA, 20 bp, Artificial Sequence
  Description of Artificial Sequence: Synthetic oligonucleotide
  Target: LAMA2; (-) strand; PAM type: NRG; PAM sequence: AGG
aactcaaagtaagcaaaaga

SEQ ID NO: 95678 - DNA, 20 bp, Artificial Sequence
  Description of Artificial Sequence: Synthetic oligonucleotide
  Target: LAMA2; (-) strand; PAM type: NRG; PAM sequence: AAG
aaactcaaagtaagcaaaag

SEQ ID NO: 95679 - DNA, 20 bp, Artificial Sequence
  Description of Artificial Sequence: Synthetic oligonucleotide
  Target: LAMA2; (-) strand; PAM type: NRG; PAM sequence: AAG
attaaactcaaagtaagcaa

SEQ ID NO: 95680 - DNA, 20 bp, Artificial Sequence
  Description of Artificial Sequence: Synthetic oligonucleotide
  Target: LAMA2; (-) strand; PAM type: NRG; PAM sequence: AAG
gagaaaattaaactcaaagt

SEQ ID NO: 95681 - DNA, 20 bp, Artificial Sequence
  Description of Artificial Sequence: Synthetic oligonucleotide
  Target: LAMA2; (-) strand; PAM type: NRG; PAM sequence: AAG
acaagagaaaattaaactca

SEQ ID NO: 95682 - DNA, 20 bp, Artificial Sequence
  Description of Artificial Sequence: Synthetic oligonucleotide
  Target: LAMA2; (-) strand; PAM type: NRG; PAM sequence: GAG
caaaaaaacttggaacacaa

SEQ ID NO: 95683 - DNA, 20 bp, Artificial Sequence
  Description of Artificial Sequence: Synthetic oligonucleotide
  Target: LAMA2; (-) strand; PAM type: NRG; PAM sequence: AAG
aacaaaaaaacttggaacac

SEQ ID NO: 95684 - DNA, 20 bp, Artificial Sequence
  Description of Artificial Sequence: Synthetic oligonucleotide
  Target: LAMA2; (-) strand; PAM type: NRG; PAM sequence: TGG
aaacaaaaaacaaaaaaact

SEQ ID NO: 95685 - DNA, 20 bp, Artificial Sequence
  Description of Artificial Sequence: Synthetic oligonucleotide
  Target: LAMA2; (-) strand; PAM type: NRG; PAM sequence: AAG
tcgagcctgggggtcagagc

SEQ ID NO: 95686 - DNA, 20 bp, Artificial Sequence
  Description of Artificial Sequence: Synthetic oligonucleotide
  Target: LAMA2; (-) strand; PAM type: NRG; PAM sequence: GAG
gcactcgagcctgggggtca

SEQ ID NO: 95687 - DNA, 20 bp, Artificial Sequence
  Description of Artificial Sequence: Synthetic oligonucleotide
  Target: LAMA2; (-) strand; PAM type: NRG; PAM sequence: CAG
ctgcactcgagcctgggggt

SEQ ID NO: 95688 - DNA, 20 bp, Artificial Sequence
  Description of Artificial Sequence: Synthetic oligonucleotide
  Target: LAMA2; (-) strand; PAM type: NRG; PAM sequence: GGG
gccactgcactcgagcctgg

SEQ ID NO: 95689 - DNA, 20 bp, Artificial Sequence
  Description of Artificial Sequence: Synthetic oligonucleotide
  Target: LAMA2; (-) strand; PAM type: NRG; PAM sequence: GGG
tgccactgcactcgagcctg

SEQ ID NO: 95690 - DNA, 20 bp, Artificial Sequence
  Description of Artificial Sequence: Synthetic oligonucleotide
  Target: LAMA2; (-) strand; PAM type: NRG; PAM sequence: GGG
ctgccactgcactcgagcct

SEQ ID NO: 95691 - DNA, 20 bp, Artificial Sequence
  Description of Artificial Sequence: Synthetic oligonucleotide
  Target: LAMA2; (-) strand; PAM type: NRG; PAM sequence: TGG
tctgccactgcactcgagcc

SEQ ID NO: 95692 - DNA, 20 bp, Artificial Sequence
  Description of Artificial Sequence: Synthetic oligonucleotide
  Target: LAMA2; (-) strand; PAM type: NRG; PAM sequence: GAG
caagatctgccactgcactc

SEQ ID NO: 95693 - DNA, 20 bp, Artificial Sequence
  Description of Artificial Sequence: Synthetic oligonucleotide
  Target: LAMA2; (-) strand; PAM type: NRG; PAM sequence: AAG
ggcggagctggcagtgagcc

SEQ ID NO: 95694 - DNA, 20 bp, Artificial Sequence
  Description of Artificial Sequence: Synthetic oligonucleotide
  Target: LAMA2; (-) strand; PAM type: NRG; PAM sequence: GAG
cgggaggcggagctggcagt

SEQ ID NO: 95695 - DNA, 20 bp, Artificial Sequence
  Description of Artificial Sequence: Synthetic oligonucleotide
  Target: LAMA2; (-) strand; PAM type: NRG; PAM sequence: CAG
aacccgggaggcggagctgg

SEQ ID NO: 95696 - DNA, 20 bp, Artificial Sequence
  Description of Artificial Sequence: Synthetic oligonucleotide
  Target: LAMA2; (-) strand; PAM type: NRG; PAM sequence: TGG
gtgaacccgggaggcggagc

SEQ ID NO: 95697 - DNA, 20 bp, Artificial Sequence
  Description of Artificial Sequence: Synthetic oligonucleotide
  Target: LAMA2; (-) strand; PAM type: NRG; PAM sequence: GAG
tggcgtgaacccgggaggcg

SEQ ID NO: 95698 - DNA, 20 bp, Artificial Sequence
  Description of Artificial Sequence: Synthetic oligonucleotide
  Target: LAMA2; (-) strand; PAM type: NRG; PAM sequence: CGG
aatggcgtgaacccgggagg

SEQ ID NO: 95699 - DNA, 20 bp, Artificial Sequence
  Description of Artificial Sequence: Synthetic oligonucleotide
  Target: LAMA2; (-) strand; PAM type: NRG; PAM sequence: AGG
gagaatggcgtgaacccggg

SEQ ID NO: 95700 - DNA, 20 bp, Artificial Sequence
  Description of Artificial Sequence: Synthetic oligonucleotide
  Target: LAMA2; (-) strand; PAM type: NRG; PAM sequence: GAG
ggagaatggcgtgaacccgg

SEQ ID NO: 95701 - DNA, 20 bp, Artificial Sequence
  Description of Artificial Sequence: Synthetic oligonucleotide
  Target: LAMA2; (-) strand; PAM type: NRG; PAM sequence: GGG
caggagaatggcgtgaaccc

SEQ ID NO: 95702 - DNA, 20 bp, Artificial Sequence
  Description of Artificial Sequence: Synthetic oligonucleotide
  Target: LAMA2; (-) strand; PAM type: NRG; PAM sequence: CGG
gcaggagaatggcgtgaacc

SEQ ID NO: 95703 - DNA, 20 bp, Artificial Sequence
  Description of Artificial Sequence: Synthetic oligonucleotide
  Target: LAMA2; (-) strand; PAM type: NRG; PAM sequence: TGG
aggaggctgaggcaggagaa

SEQ ID NO: 95704 - DNA, 20 bp, Artificial Sequence
  Description of Artificial Sequence: Synthetic oligonucleotide
  Target: LAMA2; (-) strand; PAM type: NRG; PAM sequence: GAG
tactcaggaggctgaggcag

SEQ ID NO: 95705 - DNA, 20 bp, Artificial Sequence
  Description of Artificial Sequence: Synthetic oligonucleotide
  Target: LAMA2; (-) strand; PAM type: NRG; PAM sequence: AGG
gctactcaggaggctgaggc

SEQ ID NO: 95706 - DNA, 20 bp, Artificial Sequence
  Description of Artificial Sequence: Synthetic oligonucleotide
  Target: LAMA2; (-) strand; PAM type: NRG; PAM sequence: CAG
agctactcaggaggctgagg

SEQ ID NO: 95707 - DNA, 20 bp, Artificial Sequence
  Description of Artificial Sequence: Synthetic oligonucleotide
  Target: LAMA2; (-) strand; PAM type: NRG; PAM sequence: AGG
cccagctactcaggaggctg

SEQ ID NO: 95708 - DNA, 20 bp, Artificial Sequence
  Description of Artificial Sequence: Synthetic oligonucleotide
  Target: LAMA2; (-) strand; PAM type: NRG; PAM sequence: GAG
tcccagctactcaggaggct

SEQ ID NO: 95709 - DNA, 20 bp, Artificial Sequence
  Description of Artificial Sequence: Synthetic oligonucleotide
  Target: LAMA2; (-) strand; PAM type: NRG; PAM sequence: AGG
tgtagtcccagctactcagg

SEQ ID NO: 95710 - DNA, 20 bp, Artificial Sequence
  Description of Artificial Sequence: Synthetic oligonucleotide
  Target: LAMA2; (-) strand; PAM type: NRG; PAM sequence: GAG
ctgtagtcccagctactcag

SEQ ID NO: 95711 - DNA, 20 bp, Artificial Sequence
  Description of Artificial Sequence: Synthetic oligonucleotide
  Target: LAMA2; (-) strand; PAM type: NRG; PAM sequence: AGG
acctgtagtcccagctactc

SEQ ID NO: 95712 - DNA, 20 bp, Artificial Sequence
  Description of Artificial Sequence: Synthetic oligonucleotide
  Target: LAMA2; (-) strand; PAM type: NRG; PAM sequence: CAG
cacctgtagtcccagctact

SEQ ID NO: 95713 - DNA, 20 bp, Artificial Sequence
  Description of Artificial Sequence: Synthetic oligonucleotide
  Target: LAMA2; (-) strand; PAM type: NRG; PAM sequence: CAG
gtggcgggcacctgtagtcc

SEQ ID NO: 95714 - DNA, 20 bp, Artificial Sequence
  Description of Artificial Sequence: Synthetic oligonucleotide
  Target: LAMA2; (-) strand; PAM type: NRG; PAM sequence: TAG
ggcgtagtggcgggcacctg

SEQ ID NO: 95715 - DNA, 20 bp, Artificial Sequence
  Description of Artificial Sequence: Synthetic oligonucleotide
  Target: LAMA2; (-) strand; PAM type: NRG; PAM sequence: GGG
aattagccgggcgtagtggc

SEQ ID NO: 95716 - DNA, 20 bp, Artificial Sequence
  Description of Artificial Sequence: Synthetic oligonucleotide
  Target: LAMA2; (-) strand; PAM type: NRG; PAM sequence: CGG
aaattagccgggcgtagtgg

SEQ ID NO: 95717 - DNA, 20 bp, Artificial Sequence
  Description of Artificial Sequence: Synthetic oligonucleotide
  Target: LAMA2; (-) strand; PAM type: NRG; PAM sequence: TGG
aaaaaattagccgggcgtag

SEQ ID NO: 95718 - DNA, 20 bp, Artificial Sequence
  Description of Artificial Sequence: Synthetic oligonucleotide
  Target: LAMA2; (-) strand; PAM type: NRG; PAM sequence: TAG
tacaaaaaattagccgggcg

SEQ ID NO: 95719 - DNA, 20 bp, Artificial Sequence
  Description of Artificial Sequence: Synthetic oligonucleotide
  Target: LAMA2; (-) strand; PAM type: NRG; PAM sequence: GGG
aaaaatacaaaaaattagcc

SEQ ID NO: 95720 - DNA, 20 bp, Artificial Sequence
  Description of Artificial Sequence: Synthetic oligonucleotide
  Target: LAMA2; (-) strand; PAM type: NRG; PAM sequence: CGG
taaaaatacaaaaaattagc

SEQ ID NO: 95721 - DNA, 20 bp, Artificial Sequence
  Description of Artificial Sequence: Synthetic oligonucleotide
  Target: LAMA2; (-) strand; PAM type: NRG; PAM sequence: TAG
ctactaaaaatacaaaaaat

SEQ ID NO: 95722 - DNA, 20 bp, Artificial Sequence
  Description of Artificial Sequence: Synthetic oligonucleotide
  Target: LAMA2; (-) strand; PAM type: NRG; PAM sequence: CGG
cgagaccatcctggctaacg

SEQ ID NO: 95723 - DNA, 20 bp, Artificial Sequence
  Description of Artificial Sequence: Synthetic oligonucleotide
  Target: LAMA2; (-) strand; PAM type: NRG; PAM sequence: TGG
tcaggagatcgagaccatcc

SEQ ID NO: 95724 - DNA, 20 bp, Artificial Sequence
  Description of Artificial Sequence: Synthetic oligonucleotide
  Target: LAMA2; (-) strand; PAM type: NRG; PAM sequence: GAG
gatcacgaggtcaggagatc

SEQ ID NO: 95725 - DNA, 20 bp, Artificial Sequence
  Description of Artificial Sequence: Synthetic oligonucleotide
  Target: LAMA2; (-) strand; PAM type: NRG; PAM sequence: GAG
ctggcggatcacgaggtcag

SEQ ID NO: 95726 - DNA, 20 bp, Artificial Sequence
  Description of Artificial Sequence: Synthetic oligonucleotide
  Target: LAMA2; (-) strand; PAM type: NRG; PAM sequence: AGG
ggctggcggatcacgaggtc

SEQ ID NO: 95727 - DNA, 20 bp, Artificial Sequence
  Description of Artificial Sequence: Synthetic oligonucleotide
  Target: LAMA2; (-) strand; PAM type: NRG; PAM sequence: CAG
aggctggcggatcacgaggt

SEQ ID NO: 95728 - DNA, 20 bp, Artificial Sequence
  Description of Artificial Sequence: Synthetic oligonucleotide
  Target: LAMA2; (-) strand; PAM type: NRG; PAM sequence: AGG
gctgaggctggcggatcacg

SEQ ID NO: 95729 - DNA, 20 bp, Artificial Sequence
  Description of Artificial Sequence: Synthetic oligonucleotide
  Target: LAMA2; (-) strand; PAM type: NRG; PAM sequence: GAG
ggctgaggctggcggatcac

SEQ ID NO: 95730 - DNA, 20 bp, Artificial Sequence
  Description of Artificial Sequence: Synthetic oligonucleotide
  Target: LAMA2; (-) strand; PAM type: NRG; PAM sequence: CGG
ttttgggaggctgaggctgg

SEQ ID NO: 95731 - DNA, 20 bp, Artificial Sequence
  Description of Artificial Sequence: Synthetic oligonucleotide
  Target: LAMA2; (-) strand; PAM type: NRG; PAM sequence: TGG
gcattttgggaggctgaggc

SEQ ID NO: 95732 - DNA, 20 bp, Artificial Sequence
  Description of Artificial Sequence: Synthetic oligonucleotide
  Target: LAMA2; (-) strand; PAM type: NRG; PAM sequence: AGG
cctagcattttgggaggctg

SEQ ID NO: 95733 - DNA, 20 bp, Artificial Sequence
  Description of Artificial Sequence: Synthetic oligonucleotide
  Target: LAMA2; (-) strand; PAM type: NRG; PAM sequence: GAG
tcctagcattttgggaggct

SEQ ID NO: 95734 - DNA, 20 bp, Artificial Sequence
  Description of Artificial Sequence: Synthetic oligonucleotide
  Target: LAMA2; (-) strand; PAM type: NRG; PAM sequence: AGG
tgtaatcctagcattttggg

SEQ ID NO: 95735 - DNA, 20 bp, Artificial Sequence
  Description of Artificial Sequence: Synthetic oligonucleotide
  Target: LAMA2; (-) strand; PAM type: NRG; PAM sequence: GAG
ctgtaatcctagcattttgg

SEQ ID NO: 95736 - DNA, 20 bp, Artificial Sequence
  Description of Artificial Sequence: Synthetic oligonucleotide
  Target: LAMA2; (-) strand; PAM type: NRG; PAM sequence: GGG
gcctgtaatcctagcatttt

SEQ ID NO: 95737 - DNA, 20 bp, Artificial Sequence
  Description of Artificial Sequence: Synthetic oligonucleotide
  Target: LAMA2; (-) strand; PAM type: NRG; PAM sequence: TGG
cgcctgtaatcctagcattt

SEQ ID NO: 95738 - DNA, 20 bp, Artificial Sequence
  Description of Artificial Sequence: Synthetic oligonucleotide
  Target: LAMA2; (-) strand; PAM type: NRG; PAM sequence: TAG
gtggctcacgcctgtaatcc

SEQ ID NO: 95739 - DNA, 20 bp, Artificial Sequence
  Description of Artificial Sequence: Synthetic oligonucleotide
  Target: LAMA2; (-) strand; PAM type: NRG; PAM sequence: TGG
acacaattggccgggcacgg

SEQ ID NO: 95740 - DNA, 20 bp, Artificial Sequence
  Description of Artificial Sequence: Synthetic oligonucleotide
  Target: LAMA2; (-) strand; PAM type: NRG; PAM sequence: CGG
ggaacacaattggccgggca

SEQ ID NO: 95741 - DNA, 20 bp, Artificial Sequence
  Description of Artificial Sequence: Synthetic oligonucleotide
  Target: LAMA2; (-) strand; PAM type: NRG; PAM sequence: GGG
aacttggaacacaattggcc

SEQ ID NO: 95742 - DNA, 20 bp, Artificial Sequence
  Description of Artificial Sequence: Synthetic oligonucleotide
  Target: LAMA2; (-) strand; PAM type: NRG; PAM sequence: CGG
aaacttggaacacaattggc

SEQ ID NO: 95743 - DNA, 20 bp, Artificial Sequence
  Description of Artificial Sequence: Synthetic oligonucleotide
  Target: LAMA2; (-) strand; PAM type: NRG; PAM sequence: TGG
taagaaacttggaacacaat

SEQ ID NO: 95744 - DNA, 20 bp, Artificial Sequence
  Description of Artificial Sequence: Synthetic oligonucleotide
  Target: LAMA2; (-) strand; PAM type: NRG; PAM sequence: TGG
aggtttcaccttaagaaact

SEQ ID NO: 95745 - DNA, 20 bp, Artificial Sequence
  Description of Artificial Sequence: Synthetic oligonucleotide
  Target: LAMA2; (-) strand; PAM type: NRG; PAM sequence: AAG
atgatctaaggtttcacctt

SEQ ID NO: 95746 - DNA, 20 bp, Artificial Sequence
  Description of Artificial Sequence: Synthetic oligonucleotide
  Target: LAMA2; (-) strand; PAM type: NRG; PAM sequence: AGG
gattacaaatcaatgatcta

SEQ ID NO: 95747 - DNA, 20 bp, Artificial Sequence
  Description of Artificial Sequence: Synthetic oligonucleotide
  Target: LAMA2; (-) strand; PAM type: NRG; PAM sequence: AAG
ggattacaaatcaatgatct

SEQ ID NO: 95748 - DNA, 20 bp, Artificial Sequence
  Description of Artificial Sequence: Synthetic oligonucleotide
  Target: LAMA2; (-) strand; PAM type: NRG; PAM sequence: AGG
aatgcccatattagagaaaa

SEQ ID NO: 95749 - DNA, 20 bp, Artificial Sequence
  Description of Artificial Sequence: Synthetic oligonucleotide
  Target: LAMA2; (-) strand; PAM type: NRG; PAM sequence: AAG
aaatgcccatattagagaaa

SEQ ID NO: 95750 - DNA, 20 bp, Artificial Sequence
  Description of Artificial Sequence: Synthetic oligonucleotide
  Target: LAMA2; (-) strand; PAM type: NRG; PAM sequence: GAG
tgtatcaaatgcccatatta

SEQ ID NO: 95751 - DNA, 20 bp, Artificial Sequence
  Description of Artificial Sequence: Synthetic oligonucleotide
  Target: LAMA2; (-) strand; PAM type: NRG; PAM sequence: TAG
aatgtatcaaatgcccatat

SEQ ID NO: 95752 - DNA, 20 bp, Artificial Sequence
  Description of Artificial Sequence: Synthetic oligonucleotide
  Target: LAMA2; (-) strand; PAM type: NRG; PAM sequence: TGG
agtgcaaacaaagtagtttc

SEQ ID NO: 95753 - DNA, 20 bp, Artificial Sequence
  Description of Artificial Sequence: Synthetic oligonucleotide
  Target: LAMA2; (-) strand; PAM type: NRG; PAM sequence: TAG
tatgtggagtgcaaacaaag

SEQ ID NO: 95754 - DNA, 20 bp, Artificial Sequence
  Description of Artificial Sequence: Synthetic oligonucleotide
  Target: LAMA2; (-) strand; PAM type: NRG; PAM sequence: AAG
aaatatgtggagtgcaaaca

SEQ ID NO: 95755 - DNA, 20 bp, Artificial Sequence
  Description of Artificial Sequence: Synthetic oligonucleotide
  Target: LAMA2; (-) strand; PAM type: NRG; PAM sequence: GAG
acagcatatcaaaatatgtg

SEQ ID NO: 95756 - DNA, 20 bp, Artificial Sequence
  Description of Artificial Sequence: Synthetic oligonucleotide
  Target: LAMA2; (-) strand; PAM type: NRG; PAM sequence: TGG
acacagcatatcaaaatatg

SEQ ID NO: 95757 - DNA, 20 bp, Artificial Sequence
  Description of Artificial Sequence: Synthetic oligonucleotide
  Target: LAMA2; (-) strand; PAM type: NRG; PAM sequence: CAG
accaagtgaaaattaaaaca

SEQ ID NO: 95758 - DNA, 20 bp, Artificial Sequence
  Description of Artificial Sequence: Synthetic oligonucleotide
  Target: LAMA2; (-) strand; PAM type: NRG; PAM sequence: AAG
attaaagattatattaaacc

SEQ ID NO: 95759 - DNA, 20 bp, Artificial Sequence
  Description of Artificial Sequence: Synthetic oligonucleotide
  Target: LAMA2; (-) strand; PAM type: NRG; PAM sequence: AAG
attatccccaaaataaatta

SEQ ID NO: 95760 - DNA, 20 bp, Artificial Sequence
  Description of Artificial Sequence: Synthetic oligonucleotide
  Target: LAMA2; (-) strand; PAM type: NRG; PAM sequence: TAG
ttgaaaattccccaaatatt

SEQ ID NO: 95761 - DNA, 20 bp, Artificial Sequence
  Description of Artificial Sequence: Synthetic oligonucleotide
  Target: LAMA2; (-) strand; PAM type: NRG; PAM sequence: CAG
attaaactagatactagtaa

SEQ ID NO: 95762 - DNA, 20 bp, Artificial Sequence
  Description of Artificial Sequence: Synthetic oligonucleotide
  Target: LAMA2; (-) strand; PAM type: NRG; PAM sequence: TAG
tttagaattaaactagatac

SEQ ID NO: 95763 - DNA, 20 bp, Artificial Sequence
  Description of Artificial Sequence: Synthetic oligonucleotide
  Target: LAMA2; (-) strand; PAM type: NRG; PAM sequence: TAG
agaacaatttagaattaaac

SEQ ID NO: 95764 - DNA, 20 bp, Artificial Sequence
  Description of Artificial Sequence: Synthetic oligonucleotide
  Target: LAMA2; (-) strand; PAM type: NRG; PAM sequence: TAG
attatgttctcagaacaatt

SEQ ID NO: 95765 - DNA, 20 bp, Artificial Sequence
  Description of Artificial Sequence: Synthetic oligonucleotide
  Target: LAMA2; (-) strand; PAM type: NRG; PAM sequence: CAG
aataatgcagattatgttct

SEQ ID NO: 95766 - DNA, 20 bp, Artificial Sequence
  Description of Artificial Sequence: Synthetic oligonucleotide
  Target: LAMA2; (-) strand; PAM type: NRG; PAM sequence: CAG
tcaaaaggtctgaaataatg

SEQ ID NO: 95767 - DNA, 20 bp, Artificial Sequence
  Description of Artificial Sequence: Synthetic oligonucleotide
  Target: LAMA2; (-) strand; PAM type: NRG; PAM sequence: AGG
aaatctcaataattttcaaa

SEQ ID NO: 95768 - DNA, 20 bp, Artificial Sequence
  Description of Artificial Sequence: Synthetic oligonucleotide
  Target: LAMA2; (-) strand; PAM type: NRG; PAM sequence: AAG
caaatctcaataattttcaa

SEQ ID NO: 95769 - DNA, 20 bp, Artificial Sequence
  Description of Artificial Sequence: Synthetic oligonucleotide
  Target: LAMA2; (-) strand; PAM type: NRG; PAM sequence: GGG
aacaaactgaacactattcc

SEQ ID NO: 95770 - DNA, 20 bp, Artificial Sequence
  Description of Artificial Sequence: Synthetic oligonucleotide
  Target: LAMA2; (-) strand; PAM type: NRG; PAM sequence: CGG
aaacaaactgaacactattc

SEQ ID NO: 95771 - DNA, 20 bp, Artificial Sequence
  Description of Artificial Sequence: Synthetic oligonucleotide
  Target: LAMA2; (-) strand; PAM type: NRG; PAM sequence: AAG
ccagaatacacattattttc

SEQ ID NO: 95772 - DNA, 20 bp, Artificial Sequence
  Description of Artificial Sequence: Synthetic oligonucleotide
  Target: LAMA2; (-) strand; PAM type: NRG; PAM sequence: CAG
aagttttcatccaacaactc

SEQ ID NO: 95773 - DNA, 20 bp, Artificial Sequence
  Description of Artificial Sequence: Synthetic oligonucleotide
  Target: LAMA2; (-) strand; PAM type: NRG; PAM sequence: AAG
aggataattgacctatatag

SEQ ID NO: 95774 - DNA, 20 bp, Artificial Sequence
  Description of Artificial Sequence: Synthetic oligonucleotide
  Target: LAMA2; (-) strand; PAM type: NRG; PAM sequence: TAG
ttaaggataattgacctata

SEQ ID NO: 95775 - DNA, 20 bp, Artificial Sequence
  Description of Artificial Sequence: Synthetic oligonucleotide
  Target: LAMA2; (-) strand; PAM type: NRG; PAM sequence: AGG
tgtagatctaaaaaccgtta

SEQ ID NO: 95776 - DNA, 20 bp, Artificial Sequence
  Description of Artificial Sequence: Synthetic oligonucleotide
  Target: LAMA2; (-) strand; PAM type: NRG; PAM sequence: AAG
atgtagatctaaaaaccgtt

SEQ ID NO: 95777 - DNA, 20 bp, Artificial Sequence
  Description of Artificial Sequence: Synthetic oligonucleotide
  Target: LAMA2; (-) strand; PAM type: NRG; PAM sequence: TAG
tcagtaactgagagaacatg

SEQ ID NO: 95778 - DNA, 20 bp, Artificial Sequence
  Description of Artificial Sequence: Synthetic oligonucleotide
  Target: LAMA2; (-) strand; PAM type: NRG; PAM sequence: GAG
ccaacactctcagtaactga

SEQ ID NO: 95779 - DNA, 20 bp, Artificial Sequence
  Description of Artificial Sequence: Synthetic oligonucleotide
  Target: LAMA2; (-) strand; PAM type: NRG; PAM sequence: GAG
gtccaacactctcagtaact

SEQ ID NO: 95780 - DNA, 20 bp, Artificial Sequence
  Description of Artificial Sequence: Synthetic oligonucleotide
  Target: LAMA2; (-) strand; PAM type: NRG; PAM sequence: CAG
aagttatagtccaacactct

SEQ ID NO: 95781 - DNA, 20 bp, Artificial Sequence
  Description of Artificial Sequence: Synthetic oligonucleotide
  Target: LAMA2; (-) strand; PAM type: NRG; PAM sequence: TAG
agaagaaacggacaaagtta

SEQ ID NO: 95782 - DNA, 20 bp, Artificial Sequence
  Description of Artificial Sequence: Synthetic oligonucleotide
  Target: LAMA2; (-) strand; PAM type: NRG; PAM sequence: AAG
agtgaaagaagaaacggaca

SEQ ID NO: 95783 - DNA, 20 bp, Artificial Sequence
  Description of Artificial Sequence: Synthetic oligonucleotide
  Target: LAMA2; (-) strand; PAM type: NRG; PAM sequence: CGG
gagagaagtgaaagaagaaa

SEQ ID NO: 95784 - DNA, 20 bp, Artificial Sequence
  Description of Artificial Sequence: Synthetic oligonucleotide
  Target: LAMA2; (-) strand; PAM type: NRG; PAM sequence: AAG
aaacctgagagaagtgaaag

SEQ ID NO: 95785 - DNA, 20 bp, Artificial Sequence
  Description of Artificial Sequence: Synthetic oligonucleotide
  Target: LAMA2; (-) strand; PAM type: NRG; PAM sequence: AAG
ataaaacctgagagaagtga

SEQ ID NO: 95786 - DNA, 20 bp, Artificial Sequence
  Description of Artificial Sequence: Synthetic oligonucleotide
  Target: LAMA2; (-) strand; PAM type: NRG; PAM sequence: AAG
atgtgaataaaacctgagag

SEQ ID NO: 95787 - DNA, 20 bp, Artificial Sequence
  Description of Artificial Sequence: Synthetic oligonucleotide
  Target: LAMA2; (-) strand; PAM type: NRG; PAM sequence: GAG
tacatgtgaataaaacctga

SEQ ID NO: 95788 - DNA, 20 bp, Artificial Sequence
  Description of Artificial Sequence: Synthetic oligonucleotide
  Target: LAMA2; (-) strand; PAM type: NRG; PAM sequence: GAG
aatacatgtgaataaaacct

SEQ ID NO: 95789 - DNA, 20 bp, Artificial Sequence
  Description of Artificial Sequence: Synthetic oligonucleotide
  Target: LAMA2; (-) strand; PAM type: NRG; PAM sequence: TAG
atcctaaatgttcatgcacc

SEQ ID NO: 95790 - DNA, 20 bp, Artificial Sequence
  Description of Artificial Sequence: Synthetic oligonucleotide
  Target: LAMA2; (-) strand; PAM type: NRG; PAM sequence: TAG
accaacttttcaaaaagaca

SEQ ID NO: 95791 - DNA, 20 bp, Artificial Sequence
  Description of Artificial Sequence: Synthetic oligonucleotide
  Target: LAMA2; (-) strand; PAM type: NRG; PAM sequence: AAG
aaaggcaccaacttttcaaa

SEQ ID NO: 95792 - DNA, 20 bp, Artificial Sequence
  Description of Artificial Sequence: Synthetic oligonucleotide
  Target: LAMA2; (-) strand; PAM type: NRG; PAM sequence: AGG
agacatttcacaatgtcaaa

SEQ ID NO: 95793 - DNA, 20 bp, Artificial Sequence
  Description of Artificial Sequence: Synthetic oligonucleotide
  Target: LAMA2; (-) strand; PAM type: NRG; PAM sequence: AAG
gagacatttcacaatgtcaa

SEQ ID NO: 95794 - DNA, 20 bp, Artificial Sequence
  Description of Artificial Sequence: Synthetic oligonucleotide
  Target: LAMA2; (-) strand; PAM type: NRG; PAM sequence: GAG
aatgttactaggaataaaga

SEQ ID NO: 95795 - DNA, 20 bp, Artificial Sequence
  Description of Artificial Sequence: Synthetic oligonucleotide
  Target: LAMA2; (-) strand; PAM type: NRG; PAM sequence: GAG
ggaatgttactaggaataaa

SEQ ID NO: 95796 - DNA, 20 bp, Artificial Sequence
  Description of Artificial Sequence: Synthetic oligonucleotide
  Target: LAMA2; (-) strand; PAM type: NRG; PAM sequence: AAG
aaggaatgttactaggaata

SEQ ID NO: 95797 - DNA, 20 bp, Artificial Sequence
  Description of Artificial Sequence: Synthetic oligonucleotide
  Target: LAMA2; (-) strand; PAM type: NRG; PAM sequence: AGG
tctgaacaaggaatgttact

SEQ ID NO: 95798 - DNA, 20 bp, Artificial Sequence
  Description of Artificial Sequence: Synthetic oligonucleotide
  Target: LAMA2; (-) strand; PAM type: NRG; PAM sequence: TAG
ttctgaacaaggaatgttac

SEQ ID NO: 95799 - DNA, 20 bp, Artificial Sequence
  Description of Artificial Sequence: Synthetic oligonucleotide
  Target: LAMA2; (-) strand; PAM type: NRG; PAM sequence: AGG
aaaaagtacacttctgaaca

SEQ ID NO: 95800 - DNA, 20 bp, Artificial Sequence
  Description of Artificial Sequence: Synthetic oligonucleotide
  Target: LAMA2; (-) strand; PAM type: NRG; PAM sequence: AAG
gaaaaagtacacttctgaac

SEQ ID NO: 95801 - DNA, 20 bp, Artificial Sequence
  Description of Artificial Sequence: Synthetic oligonucleotide
  Target: LAMA2; (-) strand; PAM type: NRG; PAM sequence: AAG
agctatataaatatcagaaa

SEQ ID NO: 95802 - DNA, 20 bp, Artificial Sequence
  Description of Artificial Sequence: Synthetic oligonucleotide
  Target: LAMA2; (-) strand; PAM type: NRG; PAM sequence: CAG
tgcaatagctatataaatat

SEQ ID NO: 95803 - DNA, 20 bp, Artificial Sequence
  Description of Artificial Sequence: Synthetic oligonucleotide
  Target: LAMA2; (-) strand; PAM type: NRG; PAM sequence: TAG
cattaaaaagaaagttgcaa

SEQ ID NO: 95804 - DNA, 20 bp, Artificial Sequence
  Description of Artificial Sequence: Synthetic oligonucleotide
  Target: LAMA2; (-) strand; PAM type: NRG; PAM sequence: AAG
cacaaacaccattaaaaaga

SEQ ID NO: 95805 - DNA, 20 bp, Artificial Sequence
  Description of Artificial Sequence: Synthetic oligonucleotide
  Target: LAMA2; (-) strand; PAM type: NRG; PAM sequence: AAG
accacacaaacaccattaaa

SEQ ID NO: 95806 - DNA, 20 bp, Artificial Sequence
  Description of Artificial Sequence: Synthetic oligonucleotide
  Target: LAMA2; (-) strand; PAM type: NRG; PAM sequence: TGG
aagggagatgaaatagatga

SEQ ID NO: 95807 - DNA, 20 bp, Artificial Sequence
  Description of Artificial Sequence: Synthetic oligonucleotide
  Target: LAMA2; (-) strand; PAM type: NRG; PAM sequence: TAG
tactaaaaagggagatgaaa

SEQ ID NO: 95808 - DNA, 20 bp, Artificial Sequence
  Description of Artificial Sequence: Synthetic oligonucleotide
  Target: LAMA2; (-) strand; PAM type: NRG; PAM sequence: GAG
acattaaaatactaaaaagg

SEQ ID NO: 95809 - DNA, 20 bp, Artificial Sequence
  Description of Artificial Sequence: Synthetic oligonucleotide
  Target: LAMA2; (-) strand; PAM type: NRG; PAM sequence: GGG
acacattaaaatactaaaaa

SEQ ID NO: 95810 - DNA, 20 bp, Artificial Sequence
  Description of Artificial Sequence: Synthetic oligonucleotide
  Target: LAMA2; (-) strand; PAM type: NRG; PAM sequence: AGG
cacacattaaaatactaaaa

SEQ ID NO: 95811 - DNA, 20 bp, Artificial Sequence
  Description of Artificial Sequence: Synthetic oligonucleotide
  Target: LAMA2; (-) strand; PAM type: NRG; PAM sequence: AAG
gcacacattaaaatactaaa

SEQ ID NO: 95812 - DNA, 20 bp, Artificial Sequence
  Description of Artificial Sequence: Synthetic oligonucleotide
  Target: LAMA2; (-) strand; PAM type: NRG; PAM sequence: AGG
tctcagaataaaaaaaaaaa

SEQ ID NO: 95813 - DNA, 20 bp, Artificial Sequence
  Description of Artificial Sequence: Synthetic oligonucleotide
  Target: LAMA2; (-) strand; PAM type: NRG; PAM sequence: AAG
gtctcagaataaaaaaaaaa

SEQ ID NO: 95814 - DNA, 20 bp, Artificial Sequence
  Description of Artificial Sequence: Synthetic oligonucleotide
  Target: LAMA2; (-) strand; PAM type: NRG; PAM sequence: CAG
aatggagtaagaccctgtct

SEQ ID NO: 95815 - DNA, 20 bp, Artificial Sequence
  Description of Artificial Sequence: Synthetic oligonucleotide
  Target: LAMA2; (-) strand; PAM type: NRG; PAM sequence: AAG
tctagcctgggcaatggagt

SEQ ID NO: 95816 - DNA, 20 bp, Artificial Sequence
  Description of Artificial Sequence: Synthetic oligonucleotide
  Target: LAMA2; (-) strand; PAM type: NRG; PAM sequence: GAG
gcactctagcctgggcaatg

SEQ ID NO: 95817 - DNA, 20 bp, Artificial Sequence
  Description of Artificial Sequence: Synthetic oligonucleotide
  Target: LAMA2; (-) strand; PAM type: NRG; PAM sequence: TGG
ctgcactctagcctgggcaa

SEQ ID NO: 95818 - DNA, 20 bp, Artificial Sequence
  Description of Artificial Sequence: Synthetic oligonucleotide
  Target: LAMA2; (-) strand; PAM type: NRG; PAM sequence: GGG
acaccactgcactctagcct

SEQ ID NO: 95819 - DNA, 20 bp, Artificial Sequence
  Description of Artificial Sequence: Synthetic oligonucleotide
  Target: LAMA2; (-) strand; PAM type: NRG; PAM sequence: TGG
cacaccactgcactctagcc

SEQ ID NO: 95820 - DNA, 20 bp, Artificial Sequence
  Description of Artificial Sequence: Synthetic oligonucleotide
  Target: LAMA2; (-) strand; PAM type: NRG; PAM sequence: TAG
gagatcacaccactgcactc

SEQ ID NO: 95821 - DNA, 20 bp, Artificial Sequence
  Description of Artificial Sequence: Synthetic oligonucleotide
  Target: LAMA2; (-) strand; PAM type: NRG; PAM sequence: GAG
ggtggagggtgcagtgagct

SEQ ID NO: 95822 - DNA, 20 bp, Artificial Sequence
  Description of Artificial Sequence: Synthetic oligonucleotide
  Target: LAMA2; (-) strand; PAM type: NRG; PAM sequence: GAG
cagaaggtggagggtgcagt

SEQ ID NO: 95823 - DNA, 20 bp, Artificial Sequence
  Description of Artificial Sequence: Synthetic oligonucleotide
  Target: LAMA2; (-) strand; PAM type: NRG; PAM sequence: CAG
agcccagaaggtggagggtg

SEQ ID NO: 95824 - DNA, 20 bp, Artificial Sequence
  Description of Artificial Sequence: Synthetic oligonucleotide
  Target: LAMA2; (-) strand; PAM type: NRG; PAM sequence: GGG
tcttgagcccagaaggtgga

SEQ ID NO: 95825 - DNA, 20 bp, Artificial Sequence
  Description of Artificial Sequence: Synthetic oligonucleotide
  Target: LAMA2; (-) strand; PAM type: NRG; PAM sequence: AGG
ttcttgagcccagaaggtgg

SEQ ID NO: 95826 - DNA, 20 bp, Artificial Sequence
  Description of Artificial Sequence: Synthetic oligonucleotide
  Target: LAMA2; (-) strand; PAM type: NRG; PAM sequence: GAG
tttcttgagcccagaaggtg

SEQ ID NO: 95827 - DNA, 20 bp, Artificial Sequence
  Description of Artificial Sequence: Synthetic oligonucleotide
  Target: LAMA2; (-) strand; PAM type: NRG; PAM sequence: TGG
gatttcttgagcccagaagg

SEQ ID NO: 95828 - DNA, 20 bp, Artificial Sequence
  Description of Artificial Sequence: Synthetic oligonucleotide
  Target: LAMA2; (-) strand; PAM type: NRG; PAM sequence: AGG
gaggatttcttgagcccaga

SEQ ID NO: 95829 - DNA, 20 bp, Artificial Sequence
  Description of Artificial Sequence: Synthetic oligonucleotide
  Target: LAMA2; (-) strand; PAM type: NRG; PAM sequence: AAG
agaggatttcttgagcccag

SEQ ID NO: 95830 - DNA, 20 bp, Artificial Sequence
  Description of Artificial Sequence: Synthetic oligonucleotide
  Target: LAMA2; (-) strand; PAM type: NRG; PAM sequence: CAG
gtgagaggatttcttgagcc

SEQ ID NO: 95831 - DNA, 20 bp, Artificial Sequence
  Description of Artificial Sequence: Synthetic oligonucleotide
  Target: LAMA2; (-) strand; PAM type: NRG; PAM sequence: GAG
ctgaggtgagaggatttctt

SEQ ID NO: 95832 - DNA, 20 bp, Artificial Sequence
  Description of Artificial Sequence: Synthetic oligonucleotide
  Target: LAMA2; (-) strand; PAM type: NRG; PAM sequence: AGG
actctggaggctgaggtgag

SEQ ID NO: 95833 - DNA, 20 bp, Artificial Sequence
  Description of Artificial Sequence: Synthetic oligonucleotide
  Target: LAMA2; (-) strand; PAM type: NRG; PAM sequence: GAG
tactctggaggctgaggtga

SEQ ID NO: 95834 - DNA, 20 bp, Artificial Sequence
  Description of Artificial Sequence: Synthetic oligonucleotide
  Target: LAMA2; (-) strand; PAM type: NRG; PAM sequence: GAG
gctactctggaggctgaggt

SEQ ID NO: 95835 - DNA, 20 bp, Artificial Sequence
  Description of Artificial Sequence: Synthetic oligonucleotide
  Target: LAMA2; (-) strand; PAM type: NRG; PAM sequence: AGG
cccagctactctggaggctg

SEQ ID NO: 95836 - DNA, 20 bp, Artificial Sequence
  Description of Artificial Sequence: Synthetic oligonucleotide
  Target: LAMA2; (-) strand; PAM type: NRG; PAM sequence: GAG
tcccagctactctggaggct

SEQ ID NO: 95837 - DNA, 20 bp, Artificial Sequence
  Description of Artificial Sequence: Synthetic oligonucleotide
  Target: LAMA2; (-) strand; PAM type: NRG; PAM sequence: AGG
tgtagtcccagctactctgg

SEQ ID NO: 95838 - DNA, 20 bp, Artificial Sequence
  Description of Artificial Sequence: Synthetic oligonucleotide
  Target: LAMA2; (-) strand; PAM type: NRG; PAM sequence: GAG
ctgtagtcccagctactctg

SEQ ID NO: 95839 - DNA, 20 bp, Artificial Sequence
  Description of Artificial Sequence: Synthetic oligonucleotide
  Target: LAMA2; (-) strand; PAM type: NRG; PAM sequence: TGG
gcctgtagtcccagctactc

SEQ ID NO: 95840 - DNA, 20 bp, Artificial Sequence
  Description of Artificial Sequence: Synthetic oligonucleotide
  Target: LAMA2; (-) strand; PAM type: NRG; PAM sequence: CAG
gtggcatgcgcctgtagtcc

SEQ ID NO: 95841 - DNA, 20 bp, Artificial Sequence
  Description of Artificial Sequence: Synthetic oligonucleotide
  Target: LAMA2; (-) strand; PAM type: NRG; PAM sequence: TAG
agcatggtggcatgcgcctg

SEQ ID NO: 95842 - DNA, 20 bp, Artificial Sequence
  Description of Artificial Sequence: Synthetic oligonucleotide
  Target: LAMA2; (-) strand; PAM type: NRG; PAM sequence: TGG
taaaaattagccaagcatgg

SEQ ID NO: 95843 - DNA, 20 bp, Artificial Sequence
  Description of Artificial Sequence: Synthetic oligonucleotide
  Target: LAMA2; (-) strand; PAM type: NRG; PAM sequence: TGG
acttaaaaattagccaagca

SEQ ID NO: 95844 - DNA, 20 bp, Artificial Sequence
  Description of Artificial Sequence: Synthetic oligonucleotide
  Target: LAMA2; (-) strand; PAM type: NRG; PAM sequence: AAG
aaaaaacttaaaaattagcc

SEQ ID NO: 95845 - DNA, 20 bp, Artificial Sequence
  Description of Artificial Sequence: Synthetic oligonucleotide
  Target: LAMA2; (-) strand; PAM type: NRG; PAM sequence: TAG
tctacaaaaaacttaaaaat

SEQ ID NO: 95846 - DNA, 20 bp, Artificial Sequence
  Description of Artificial Sequence: Synthetic oligonucleotide
  Target: LAMA2; (-) strand; PAM type: NRG; PAM sequence: GAG
acaagcatgggcaatatagt

SEQ ID NO: 95847 - DNA, 20 bp, Artificial Sequence
  Description of Artificial Sequence: Synthetic oligonucleotide
  Target: LAMA2; (-) strand; PAM type: NRG; PAM sequence: TAG
tgagacaagcatgggcaata

SEQ ID NO: 95848 - DNA, 20 bp, Artificial Sequence
  Description of Artificial Sequence: Synthetic oligonucleotide
  Target: LAMA2; (-) strand; PAM type: NRG; PAM sequence: GGG
caggactttgagacaagcat

SEQ ID NO: 95849 - DNA, 20 bp, Artificial Sequence
  Description of Artificial Sequence: Synthetic oligonucleotide
  Target: LAMA2; (-) strand; PAM type: NRG; PAM sequence: TGG
acaggactttgagacaagca

SEQ ID NO: 95850 - DNA, 20 bp, Artificial Sequence
  Description of Artificial Sequence: Synthetic oligonucleotide
  Target: LAMA2; (-) strand; PAM type: NRG; PAM sequence: AAG
tgagcacaggactttgagac

SEQ ID NO: 95851 - DNA, 20 bp, Artificial Sequence
  Description of Artificial Sequence: Synthetic oligonucleotide
  Target: LAMA2; (-) strand; PAM type: NRG; PAM sequence: GAG
tcacttgagcacaggacttt

SEQ ID NO: 95852 - DNA, 20 bp, Artificial Sequence
  Description of Artificial Sequence: Synthetic oligonucleotide
  Target: LAMA2; (-) strand; PAM type: NRG; PAM sequence: AGG
ttgcaggatcacttgagcac

SEQ ID NO: 95853 - DNA, 20 bp, Artificial Sequence
  Description of Artificial Sequence: Synthetic oligonucleotide
  Target: LAMA2; (-) strand; PAM type: NRG; PAM sequence: CAG
tttgcaggatcacttgagca

SEQ ID NO: 95854 - DNA, 20 bp, Artificial Sequence
  Description of Artificial Sequence: Synthetic oligonucleotide
  Target: LAMA2; (-) strand; PAM type: NRG; PAM sequence: GAG
agaattttgcaggatcactt

SEQ ID NO: 95855 - DNA, 20 bp, Artificial Sequence
  Description of Artificial Sequence: Synthetic oligonucleotide
  Target: LAMA2; (-) strand; PAM type: NRG; PAM sequence: AGG
ctgtaatcccagaattttgc

SEQ ID NO: 95856 - DNA, 20 bp, Artificial Sequence
  Description of Artificial Sequence: Synthetic oligonucleotide
  Target: LAMA2; (-) strand; PAM type: NRG; PAM sequence: CAG
cctgtaatcccagaattttg

SEQ ID NO: 95857 - DNA, 20 bp, Artificial Sequence
  Description of Artificial Sequence: Synthetic oligonucleotide
  Target: LAMA2; (-) strand; PAM type: NRG; PAM sequence: CAG
gtggtatacacctgtaatcc

SEQ ID NO: 95858 - DNA, 20 bp, Artificial Sequence
  Description of Artificial Sequence: Synthetic oligonucleotide
  Target: LAMA2; (-) strand; PAM type: NRG; PAM sequence: TGG
acacattaagctaggcatgg

SEQ ID NO: 95859 - DNA, 20 bp, Artificial Sequence
  Description of Artificial Sequence: Synthetic oligonucleotide
  Target: LAMA2; (-) strand; PAM type: NRG; PAM sequence: TGG
cacacacattaagctaggca

SEQ ID NO: 95860 - DNA, 20 bp, Artificial Sequence
  Description of Artificial Sequence: Synthetic oligonucleotide
  Target: LAMA2; (-) strand; PAM type: NRG; PAM sequence: AGG
acacacacacacattaagct

SEQ ID NO: 95861 - DNA, 20 bp, Artificial Sequence
  Description of Artificial Sequence: Synthetic oligonucleotide
  Target: LAMA2; (-) strand; PAM type: NRG; PAM sequence: TAG
cacacacacacacattaagc

SEQ ID NO: 95862 - DNA, 20 bp, Artificial Sequence
  Description of Artificial Sequence: Synthetic oligonucleotide
  Target: LAMA2; (-) strand; PAM type: NRG; PAM sequence: AAG
ctctcacacacacacacatt

SEQ ID NO: 95863 - DNA, 20 bp, Artificial Sequence
  Description of Artificial Sequence: Synthetic oligonucleotide
  Target: LAMA2; (-) strand; PAM type: NRG; PAM sequence: AAG
ttaagattcgttgaaaaata

SEQ ID NO: 95864 - DNA, 20 bp, Artificial Sequence
  Description of Artificial Sequence: Synthetic oligonucleotide
  Target: LAMA2; (-) strand; PAM type: NRG; PAM sequence: AAG
aattaaaaggccaaattatt

SEQ ID NO: 95865 - DNA, 20 bp, Artificial Sequence
  Description of Artificial Sequence: Synthetic oligonucleotide
  Target: LAMA2; (-) strand; PAM type: NRG; PAM sequence: AGG
atttaactcctcaaattaaa

SEQ ID NO: 95866 - DNA, 20 bp, Artificial Sequence
  Description of Artificial Sequence: Synthetic oligonucleotide
  Target: LAMA2; (-) strand; PAM type: NRG; PAM sequence: AAG
gatttaactcctcaaattaa

SEQ ID NO: 95867 - DNA, 20 bp, Artificial Sequence
  Description of Artificial Sequence: Synthetic oligonucleotide
  Target: LAMA2; (-) strand; PAM type: NRG; PAM sequence: TGG
ataccaatatttacattaag

SEQ ID NO: 95868 - DNA, 20 bp, Artificial Sequence
  Description of Artificial Sequence: Synthetic oligonucleotide
  Target: LAMA2; (-) strand; PAM type: NRG; PAM sequence: AAG
atcataccaatatttacatt

SEQ ID NO: 95869 - DNA, 20 bp, Artificial Sequence
  Description of Artificial Sequence: Synthetic oligonucleotide
  Target: LAMA2; (-) strand; PAM type: NRG; PAM sequence: AGG
aaaagcaaatagcaaagtgc

SEQ ID NO: 95870 - DNA, 20 bp, Artificial Sequence
  Description of Artificial Sequence: Synthetic oligonucleotide
  Target: LAMA2; (-) strand; PAM type: NRG; PAM sequence: CAG
caaaagcaaatagcaaagtg

SEQ ID NO: 95871 - DNA, 20 bp, Artificial Sequence
  Description of Artificial Sequence: Synthetic oligonucleotide
  Target: LAMA2; (-) strand; PAM type: NRG; PAM sequence: AAG
gcaagcaaaagcaaatagca

SEQ ID NO: 95872 - DNA, 20 bp, Artificial Sequence
  Description of Artificial Sequence: Synthetic oligonucleotide
  Target: LAMA2; (-) strand; PAM type: NRG; PAM sequence: TAG
ataaggcaagcaaaagcaaa

SEQ ID NO: 95873 - DNA, 20 bp, Artificial Sequence
  Description of Artificial Sequence: Synthetic oligonucleotide
  Target: LAMA2; (-) strand; PAM type: NRG; PAM sequence: AAG
agagcagataaggcaagcaa

SEQ ID NO: 95874 - DNA, 20 bp, Artificial Sequence
  Description of Artificial Sequence: Synthetic oligonucleotide
  Target: LAMA2; (-) strand; PAM type: NRG; PAM sequence: AAG
aaggcaagagcagataaggc

SEQ ID NO: 95875 - DNA, 20 bp, Artificial Sequence
  Description of Artificial Sequence: Synthetic oligonucleotide
  Target: LAMA2; (-) strand; PAM type: NRG; PAM sequence: AGG
aaaaaaggcaagagcagata

SEQ ID NO: 95876 - DNA, 20 bp, Artificial Sequence
  Description of Artificial Sequence: Synthetic oligonucleotide
  Target: LAMA2; (-) strand; PAM type: NRG; PAM sequence: AAG
aaaaaaaggcaagagcagat

SEQ ID NO: 95877 - DNA, 20 bp, Artificial Sequence
  Description of Artificial Sequence: Synthetic oligonucleotide
  Target: LAMA2; (-) strand; PAM type: NRG; PAM sequence: CAG
ggaaaaaaaaaaggcaagag

SEQ ID NO: 95878 - DNA, 20 bp, Artificial Sequence
  Description of Artificial Sequence: Synthetic oligonucleotide
  Target: LAMA2; (-) strand; PAM type: NRG; PAM sequence: GAG
taaggaaaaaaaaaaggcaa

SEQ ID NO: 95879 - DNA, 20 bp, Artificial Sequence
  Description of Artificial Sequence: Synthetic oligonucleotide
  Target: LAMA2; (-) strand; PAM type: NRG; PAM sequence: AAG
aataaggaaaaaaaaaaggc

SEQ ID NO: 95880 - DNA, 20 bp, Artificial Sequence
  Description of Artificial Sequence: Synthetic oligonucleotide
  Target: LAMA2; (-) strand; PAM type: NRG; PAM sequence: AGG
ggacaataaggaaaaaaaaa

SEQ ID NO: 95881 - DNA, 20 bp, Artificial Sequence
  Description of Artificial Sequence: Synthetic oligonucleotide
  Target: LAMA2; (-) strand; PAM type: NRG; PAM sequence: AAG
aggacaataaggaaaaaaaa

SEQ ID NO: 95882 - DNA, 20 bp, Artificial Sequence
  Description of Artificial Sequence: Synthetic oligonucleotide
  Target: LAMA2; (-) strand; PAM type: NRG; PAM sequence: AGG
caaaagaaggcaggacaata

SEQ ID NO: 95883 - DNA, 20 bp, Artificial Sequence
  Description of Artificial Sequence: Synthetic oligonucleotide
  Target: LAMA2; (-) strand; PAM type: NRG; PAM sequence: AAG
gcaaaagaaggcaggacaat

SEQ ID NO: 95884 - DNA, 20 bp, Artificial Sequence
  Description of Artificial Sequence: Synthetic oligonucleotide
  Target: LAMA2; (-) strand; PAM type: NRG; PAM sequence: AGG
aaattaatgcaaaagaaggc

SEQ ID NO: 95885 - DNA, 20 bp, Artificial Sequence
  Description of Artificial Sequence: Synthetic oligonucleotide
  Target: LAMA2; (-) strand; PAM type: NRG; PAM sequence: CAG
caaattaatgcaaaagaagg

SEQ ID NO: 95886 - DNA, 20 bp, Artificial Sequence
  Description of Artificial Sequence: Synthetic oligonucleotide
  Target: LAMA2; (-) strand; PAM type: NRG; PAM sequence: AGG
atacaaattaatgcaaaaga

SEQ ID NO: 95887 - DNA, 20 bp, Artificial Sequence
  Description of Artificial Sequence: Synthetic oligonucleotide
  Target: LAMA2; (-) strand; PAM type: NRG; PAM sequence: AAG
tatacaaattaatgcaaaag

SEQ ID NO: 95888 - DNA, 20 bp, Artificial Sequence
  Description of Artificial Sequence: Synthetic oligonucleotide
  Target: LAMA2; (-) strand; PAM type: NRG; PAM sequence: AAG
tgttatacaaattaatgcaa

SEQ ID NO: 95889 - DNA, 20 bp, Artificial Sequence
  Description of Artificial Sequence: Synthetic oligonucleotide
  Target: LAMA2; (-) strand; PAM type: NRG; PAM sequence: AAG
aataatccaaaagtcaagag

SEQ ID NO: 95890 - DNA, 20 bp, Artificial Sequence
  Description of Artificial Sequence: Synthetic oligonucleotide
  Target: LAMA2; (-) strand; PAM type: NRG; PAM sequence: GAG
tttaataatccaaaagtcaa

SEQ ID NO: 95891 - DNA, 20 bp, Artificial Sequence
  Description of Artificial Sequence: Synthetic oligonucleotide
  Target: LAMA2; (-) strand; PAM type: NRG; PAM sequence: AAG
tatttaataatccaaaagtc

SEQ ID NO: 95892 - DNA, 20 bp, Artificial Sequence
  Description of Artificial Sequence: Synthetic oligonucleotide
  Target: LAMA2; (-) strand; PAM type: NRG; PAM sequence: AAG
aggtatatttaataatccaa

SEQ ID NO: 95893 - DNA, 20 bp, Artificial Sequence
  Description of Artificial Sequence: Synthetic oligonucleotide
  Target: LAMA2; (-) strand; PAM type: NRG; PAM sequence: AGG
accaaagaaataaaatgaat

SEQ ID NO: 95894 - DNA, 20 bp, Artificial Sequence
  Description of Artificial Sequence: Synthetic oligonucleotide
  Target: LAMA2; (-) strand; PAM type: NRG; PAM sequence: TAG
aaccaaagaaataaaatgaa

SEQ ID NO: 95895 - DNA, 20 bp, Artificial Sequence
  Description of Artificial Sequence: Synthetic oligonucleotide
  Target: LAMA2; (-) strand; PAM type: NRG; PAM sequence: AAG
tatattcctagacaaaacca

SEQ ID NO: 95896 - DNA, 20 bp, Artificial Sequence
  Description of Artificial Sequence: Synthetic oligonucleotide
  Target: LAMA2; (-) strand; PAM type: NRG; PAM sequence: TAG
aagttaaagatgtatattcc

SEQ ID NO: 95897 - DNA, 20 bp, Artificial Sequence
  Description of Artificial Sequence: Synthetic oligonucleotide
  Target: LAMA2; (-) strand; PAM type: NRG; PAM sequence: AAG
atgtacattctggaaagtta

SEQ ID NO: 95898 - DNA, 20 bp, Artificial Sequence
  Description of Artificial Sequence: Synthetic oligonucleotide
  Target: LAMA2; (-) strand; PAM type: NRG; PAM sequence: AAG
attttaatgtacattctgga

SEQ ID NO: 95899 - DNA, 20 bp, Artificial Sequence
  Description of Artificial Sequence: Synthetic oligonucleotide
  Target: LAMA2; (-) strand; PAM type: NRG; PAM sequence: TGG
tattattttaatgtacattc

SEQ ID NO: 95900 - DNA, 20 bp, Artificial Sequence
  Description of Artificial Sequence: Synthetic oligonucleotide
  Target: LAMA2; (-) strand; PAM type: NRG; PAM sequence: TGG
ttcttacgctaaatgtaaag

SEQ ID NO: 95901 - DNA, 20 bp, Artificial Sequence
  Description of Artificial Sequence: Synthetic oligonucleotide
  Target: LAMA2; (-) strand; PAM type: NRG; PAM sequence: AAG
aggttcttacgctaaatgta

SEQ ID NO: 95902 - DNA, 20 bp, Artificial Sequence
  Description of Artificial Sequence: Synthetic oligonucleotide
  Target: LAMA2; (-) strand; PAM type: NRG; PAM sequence: AGG
actggaggtttcctgttgta

SEQ ID NO: 95903 - DNA, 20 bp, Artificial Sequence
  Description of Artificial Sequence: Synthetic oligonucleotide
  Target: LAMA2; (-) strand; PAM type: NRG; PAM sequence: AAG
gactggaggtttcctgttgt

SEQ ID NO: 95904 - DNA, 20 bp, Artificial Sequence
  Description of Artificial Sequence: Synthetic oligonucleotide
  Target: LAMA2; (-) strand; PAM type: NRG; PAM sequence: AGG
aggataggaaaggggactgg

SEQ ID NO: 95905 - DNA, 20 bp, Artificial Sequence
  Description of Artificial Sequence: Synthetic oligonucleotide
  Target: LAMA2; (-) strand; PAM type: NRG; PAM sequence: GAG
aaggataggaaaggggactg

SEQ ID NO: 95906 - DNA, 20 bp, Artificial Sequence
  Description of Artificial Sequence: Synthetic oligonucleotide
  Target: LAMA2; (-) strand; PAM type: NRG; PAM sequence: TGG
caaaggataggaaaggggac

SEQ ID NO: 95907 - DNA, 20 bp, Artificial Sequence
  Description of Artificial Sequence: Synthetic oligonucleotide
  Target: LAMA2; (-) strand; PAM type: NRG; PAM sequence: GGG
tagtacaaaggataggaaag

SEQ ID NO: 95908 - DNA, 20 bp, Artificial Sequence
  Description of Artificial Sequence: Synthetic oligonucleotide
  Target: LAMA2; (-) strand; PAM type: NRG; PAM sequence: GGG
atagtacaaaggataggaaa

SEQ ID NO: 95909 - DNA, 20 bp, Artificial Sequence
  Description of Artificial Sequence: Synthetic oligonucleotide
  Target: LAMA2; (-) strand; PAM type: NRG; PAM sequence: AGG
tatagtacaaaggataggaa

SEQ ID NO: 95910 - DNA, 20 bp, Artificial Sequence
  Description of Artificial Sequence: Synthetic oligonucleotide
  Target: LAMA2; (-) strand; PAM type: NRG; PAM sequence: AAG
atatagtacaaaggatagga

SEQ ID NO: 95911 - DNA, 20 bp, Artificial Sequence
  Description of Artificial Sequence: Synthetic oligonucleotide
  Target: LAMA2; (-) strand; PAM type: NRG; PAM sequence: AGG
gacaatatagtacaaaggat

SEQ ID NO: 95912 - DNA, 20 bp, Artificial Sequence
  Description of Artificial Sequence: Synthetic oligonucleotide
  Target: LAMA2; (-) strand; PAM type: NRG; PAM sequence: TAG
tgacaatatagtacaaagga

SEQ ID NO: 95913 - DNA, 20 bp, Artificial Sequence
  Description of Artificial Sequence: Synthetic oligonucleotide
  Target: LAMA2; (-) strand; PAM type: NRG; PAM sequence: AGG
tatatgacaatatagtacaa

SEQ ID NO: 95914 - DNA, 20 bp, Artificial Sequence
  Description of Artificial Sequence: Synthetic oligonucleotide
  Target: LAMA2; (-) strand; PAM type: NRG; PAM sequence: AAG
atatatgacaatatagtaca

SEQ ID NO: 95915 - DNA, 20 bp, Artificial Sequence
  Description of Artificial Sequence: Synthetic oligonucleotide
  Target: LAMA2; (-) strand; PAM type: NRG; PAM sequence: TAG
agtaaaaatatatgacaata

SEQ ID NO: 95916 - DNA, 20 bp, Artificial Sequence
  Description of Artificial Sequence: Synthetic oligonucleotide
  Target: LAMA2; (-) strand; PAM type: NRG; PAM sequence: AAG
gtcagatgtataatatatag

SEQ ID NO: 95917 - DNA, 20 bp, Artificial Sequence
  Description of Artificial Sequence: Synthetic oligonucleotide
  Target: LAMA2; (-) strand; PAM type: NRG; PAM sequence: TAG
attgtcagatgtataatata

SEQ ID NO: 95918 - DNA, 20 bp, Artificial Sequence
  Description of Artificial Sequence: Synthetic oligonucleotide
  Target: LAMA2; (-) strand; PAM type: NRG; PAM sequence: CAG
aaatcgtaagcttatattgt

SEQ ID NO: 95919 - DNA, 20 bp, Artificial Sequence
  Description of Artificial Sequence: Synthetic oligonucleotide
  Target: LAMA2; (-) strand; PAM type: NRG; PAM sequence: AAG
actattgaaatcaaaatcgt

SEQ ID NO: 95920 - DNA, 20 bp, Artificial Sequence
  Description of Artificial Sequence: Synthetic oligonucleotide
  Target: LAMA2; (-) strand; PAM type: NRG; PAM sequence: AAG
gagaaattttcttgtttaaa

SEQ ID NO: 95921 - DNA, 20 bp, Artificial Sequence
  Description of Artificial Sequence: Synthetic oligonucleotide
  Target: LAMA2; (-) strand; PAM type: NRG; PAM sequence: GAG
acaaggaaaaagagttatag

SEQ ID NO: 95922 - DNA, 20 bp, Artificial Sequence
  Description of Artificial Sequence: Synthetic oligonucleotide
  Target: LAMA2; (-) strand; PAM type: NRG; PAM sequence: AGG
acacaaggaaaaagagttat

SEQ ID NO: 95923 - DNA, 20 bp, Artificial Sequence
  Description of Artificial Sequence: Synthetic oligonucleotide
  Target: LAMA2; (-) strand; PAM type: NRG; PAM sequence: TAG
tacacaaggaaaaagagtta

SEQ ID NO: 95924 - DNA, 20 bp, Artificial Sequence
  Description of Artificial Sequence: Synthetic oligonucleotide
  Target: LAMA2; (-) strand; PAM type: NRG; PAM sequence: GAG
ttgatatacacaaggaaaaa

SEQ ID NO: 95925 - DNA, 20 bp, Artificial Sequence
  Description of Artificial Sequence: Synthetic oligonucleotide
  Target: LAMA2; (-) strand; PAM type: NRG; PAM sequence: AAG
aattgatatacacaaggaaa

SEQ ID NO: 95926 - DNA, 20 bp, Artificial Sequence
  Description of Artificial Sequence: Synthetic oligonucleotide
  Target: LAMA2; (-) strand; PAM type: NRG; PAM sequence: AGG
cattaaaattgatatacaca

SEQ ID NO: 95927 - DNA, 20 bp, Artificial Sequence
  Description of Artificial Sequence: Synthetic oligonucleotide
  Target: LAMA2; (-) strand; PAM type: NRG; PAM sequence: AAG
gcattaaaattgatatacac

SEQ ID NO: 95928 - DNA, 20 bp, Artificial Sequence
  Description of Artificial Sequence: Synthetic oligonucleotide
  Target: LAMA2; (-) strand; PAM type: NRG; PAM sequence: AAG
aatgtacacaaaggaattta

SEQ ID NO: 95929 - DNA, 20 bp, Artificial Sequence
  Description of Artificial Sequence: Synthetic oligonucleotide
  Target: LAMA2; (-) strand; PAM type: NRG; PAM sequence: AGG
gaaaattttaatgtacacaa

SEQ ID NO: 95930 - DNA, 20 bp, Artificial Sequence
  Description of Artificial Sequence: Synthetic oligonucleotide
  Target: LAMA2; (-) strand; PAM type: NRG; PAM sequence: AAG
tgaaaattttaatgtacaca

SEQ ID NO: 95931 - DNA, 20 bp, Artificial Sequence
  Description of Artificial Sequence: Synthetic oligonucleotide
  Target: LAMA2; (-) strand; PAM type: NRG; PAM sequence: AAG
taggaagtagttaatggaag

SEQ ID NO: 95932 - DNA, 20 bp, Artificial Sequence
  Description of Artificial Sequence: Synthetic oligonucleotide
  Target: LAMA2; (-) strand; PAM type: NRG; PAM sequence: AAG
gattaggaagtagttaatgg

SEQ ID NO: 95933 - DNA, 20 bp, Artificial Sequence
  Description of Artificial Sequence: Synthetic oligonucleotide
  Target: LAMA2; (-) strand; PAM type: NRG; PAM sequence: TGG
aaagattaggaagtagttaa

SEQ ID NO: 95934 - DNA, 20 bp, Artificial Sequence
  Description of Artificial Sequence: Synthetic oligonucleotide
  Target: LAMA2; (-) strand; PAM type: NRG; PAM sequence: TAG
aaatgataaagattaggaag

SEQ ID NO: 95935 - DNA, 20 bp, Artificial Sequence
  Description of Artificial Sequence: Synthetic oligonucleotide
  Target: LAMA2; (-) strand; PAM type: NRG; PAM sequence: AAG
ataaaatgataaagattagg

SEQ ID NO: 95936 - DNA, 20 bp, Artificial Sequence
  Description of Artificial Sequence: Synthetic oligonucleotide
  Target: LAMA2; (-) strand; PAM type: NRG; PAM sequence: AGG
ggaataaaatgataaagatt

SEQ ID NO: 95937 - DNA, 20 bp, Artificial Sequence
  Description of Artificial Sequence: Synthetic oligonucleotide
  Target: LAMA2; (-) strand; PAM type: NRG; PAM sequence: TAG
aggaataaaatgataaagat

SEQ ID NO: 95938 - DNA, 20 bp, Artificial Sequence
  Description of Artificial Sequence: Synthetic oligonucleotide
  Target: LAMA2; (-) strand; PAM type: NRG; PAM sequence: AAG
acaacaggaataaaatgata

SEQ ID NO: 95939 - DNA, 20 bp, Artificial Sequence
  Description of Artificial Sequence: Synthetic oligonucleotide
  Target: LAMA2; (-) strand; PAM type: NRG; PAM sequence: AGG
gtcagcagacctgaaacaac

SEQ ID NO: 95940 - DNA, 20 bp, Artificial Sequence
  Description of Artificial Sequence: Synthetic oligonucleotide
  Target: LAMA2; (-) strand; PAM type: NRG; PAM sequence: CAG
tgtcagcagacctgaaacaa

SEQ ID NO: 95941 - DNA, 20 bp, Artificial Sequence
  Description of Artificial Sequence: Synthetic oligonucleotide
  Target: LAMA2; (-) strand; PAM type: NRG; PAM sequence: CAG
aaggaaaaaattattgtcag

SEQ ID NO: 95942 - DNA, 20 bp, Artificial Sequence
  Description of Artificial Sequence: Synthetic oligonucleotide
  Target: LAMA2; (-) strand; PAM type: NRG; PAM sequence: CAG
aaaaaggaaaaaattattgt

SEQ ID NO: 95943 - DNA, 20 bp, Artificial Sequence
  Description of Artificial Sequence: Synthetic oligonucleotide
  Target: LAMA2; (-) strand; PAM type: NRG; PAM sequence: AGG
caaaaaaaaaaaaaaaaaaa

SEQ ID NO: 95944 - DNA, 20 bp, Artificial Sequence
  Description of Artificial Sequence: Synthetic oligonucleotide
  Target: LAMA2; (-) strand; PAM type: NRG; PAM sequence: AAG
acaaaaaaaaaaaaaaaaaa

SEQ ID NO: 95945 - DNA, 20 bp, Artificial Sequence
  Description of Artificial Sequence: Synthetic oligonucleotide
  Target: LAMA2; (-) strand; PAM type: NRG; PAM sequence: TGG
aaaaaaaaaaaacacctttc

SEQ ID NO: 95946 - DNA, 20 bp, Artificial Sequence
  Description of Artificial Sequence: Synthetic oligonucleotide
  Target: LAMA2; (-) strand; PAM type: NRG; PAM sequence: CGG
atactctgcaaaaacatctt

SEQ ID NO: 95947 - DNA, 20 bp, Artificial Sequence
  Description of Artificial Sequence: Synthetic oligonucleotide
  Target: LAMA2; (-) strand; PAM type: NRG; PAM sequence: AGG
attgctgcaaaccagtattt

SEQ ID NO: 95948 - DNA, 20 bp, Artificial Sequence
  Description of Artificial Sequence: Synthetic oligonucleotide
  Target: LAMA2; (-) strand; PAM type: NRG; PAM sequence: TAG
aattgctgcaaaccagtatt

SEQ ID NO: 95949 - DNA, 20 bp, Artificial Sequence
  Description of Artificial Sequence: Synthetic oligonucleotide
  Target: LAMA2; (-) strand; PAM type: NRG; PAM sequence: CAG
ataattaaattgctgcaaac

SEQ ID NO: 95950 - DNA, 20 bp, Artificial Sequence
  Description of Artificial Sequence: Synthetic oligonucleotide
  Target: LAMA2; (-) strand; PAM type: NRG; PAM sequence: AAG
acacacaaaaagaaaacaaa

SEQ ID NO: 95951 - DNA, 20 bp, Artificial Sequence
  Description of Artificial Sequence: Synthetic oligonucleotide
  Target: LAMA2; (-) strand; PAM type: NRG; PAM sequence: AAG
ataattattaaacacacaaa

SEQ ID NO: 95952 - DNA, 20 bp, Artificial Sequence
  Description of Artificial Sequence: Synthetic oligonucleotide
  Target: LAMA2; (-) strand; PAM type: NRG; PAM sequence: CAG
ctataatcctacagggccaa

SEQ ID NO: 95953 - DNA, 20 bp, Artificial Sequence
  Description of Artificial Sequence: Synthetic oligonucleotide
  Target: LAMA2; (-) strand; PAM type: NRG; PAM sequence: GGG
atgaaaactataatcctaca

SEQ ID NO: 95954 - DNA, 20 bp, Artificial Sequence
  Description of Artificial Sequence: Synthetic oligonucleotide
  Target: LAMA2; (-) strand; PAM type: NRG; PAM sequence: AGG
gatgaaaactataatcctac

SEQ ID NO: 95955 - DNA, 20 bp, Artificial Sequence
  Description of Artificial Sequence: Synthetic oligonucleotide
  Target: LAMA2; (-) strand; PAM type: NRG; PAM sequence: CAG
tgatgaaaactataatccta

SEQ ID NO: 95956 - DNA, 20 bp, Artificial Sequence
  Description of Artificial Sequence: Synthetic oligonucleotide
  Target: LAMA2; (-) strand; PAM type: NRG; PAM sequence: TGG
aaaaatatttaaagatataa

SEQ ID NO: 95957 - DNA, 20 bp, Artificial Sequence
  Description of Artificial Sequence: Synthetic oligonucleotide
  Target: LAMA2; (-) strand; PAM type: NRG; PAM sequence: AAG
gaagaacaaaaaaatattta

SEQ ID NO: 95958 - DNA, 20 bp, Artificial Sequence
  Description of Artificial Sequence: Synthetic oligonucleotide
  Target: LAMA2; (-) strand; PAM type: NRG; PAM sequence: AAG
agaaagagacaataagaatg

SEQ ID NO: 95959 - DNA, 20 bp, Artificial Sequence
  Description of Artificial Sequence: Synthetic oligonucleotide
  Target: LAMA2; (-) strand; PAM type: NRG; PAM sequence: AAG
gatttccagaaagagacaat

SEQ ID NO: 95960 - DNA, 20 bp, Artificial Sequence
  Description of Artificial Sequence: Synthetic oligonucleotide
  Target: LAMA2; (-) strand; PAM type: NRG; PAM sequence: GAG
caaaaaatgatttccagaaa

SEQ ID NO: 95961 - DNA, 20 bp, Artificial Sequence
  Description of Artificial Sequence: Synthetic oligonucleotide
  Target: LAMA2; (-) strand; PAM type: NRG; PAM sequence: AAG
tacaaaaaatgatttccaga

SEQ ID NO: 95962 - DNA, 20 bp, Artificial Sequence
  Description of Artificial Sequence: Synthetic oligonucleotide
  Target: LAMA2; (-) strand; PAM type: NRG; PAM sequence: CAG
aacatacaaaaaatgatttc

SEQ ID NO: 95963 - DNA, 20 bp, Artificial Sequence
  Description of Artificial Sequence: Synthetic oligonucleotide
  Target: LAMA2; (-) strand; PAM type: NRG; PAM sequence: TGG
agatgggggaaaatatcaat

SEQ ID NO: 95964 - DNA, 20 bp, Artificial Sequence
  Description of Artificial Sequence: Synthetic oligonucleotide
  Target: LAMA2; (-) strand; PAM type: NRG; PAM sequence: GGG
taagaacctcagtgagatgg

SEQ ID NO: 95965 - DNA, 20 bp, Artificial Sequence
  Description of Artificial Sequence: Synthetic oligonucleotide
  Target: LAMA2; (-) strand; PAM type: NRG; PAM sequence: GGG
ataagaacctcagtgagatg

SEQ ID NO: 95966 - DNA, 20 bp, Artificial Sequence
  Description of Artificial Sequence: Synthetic oligonucleotide
  Target: LAMA2; (-) strand; PAM type: NRG; PAM sequence: GGG
aataagaacctcagtgagat

SEQ ID NO: 95967 - DNA, 20 bp, Artificial Sequence
  Description of Artificial Sequence: Synthetic oligonucleotide
  Target: LAMA2; (-) strand; PAM type: NRG; PAM sequence: TGG
aaataagaacctcagtgaga

SEQ ID NO: 95968 - DNA, 20 bp, Artificial Sequence
  Description of Artificial Sequence: Synthetic oligonucleotide
  Target: LAMA2; (-) strand; PAM type: NRG; PAM sequence: GAG
aaaaaaataagaacctcagt

SEQ ID NO: 95969 - DNA, 20 bp, Artificial Sequence
  Description of Artificial Sequence: Synthetic oligonucleotide
  Target: LAMA2; (-) strand; PAM type: NRG; PAM sequence: CAG
aattaaaaaaataagaacct

SEQ ID NO: 95970 - DNA, 20 bp, Artificial Sequence
  Description of Artificial Sequence: Synthetic oligonucleotide
  Target: LAMA2; (-) strand; PAM type: NRG; PAM sequence: AAG
acaaaaataattaaaaaaat

SEQ ID NO: 95971 - DNA, 20 bp, Artificial Sequence
  Description of Artificial Sequence: Synthetic oligonucleotide
  Target: LAMA2; (-) strand; PAM type: NRG; PAM sequence: CAG
actatcagaaataaaaaata

SEQ ID NO: 95972 - DNA, 20 bp, Artificial Sequence
  Description of Artificial Sequence: Synthetic oligonucleotide
  Target: LAMA2; (-) strand; PAM type: NRG; PAM sequence: CAG
cacttaacaatagaaactat

SEQ ID NO: 95973 - DNA, 20 bp, Artificial Sequence
  Description of Artificial Sequence: Synthetic oligonucleotide
  Target: LAMA2; (-) strand; PAM type: NRG; PAM sequence: TAG
tgactttggacacttaacaa

SEQ ID NO: 95974 - DNA, 20 bp, Artificial Sequence
  Description of Artificial Sequence: Synthetic oligonucleotide
  Target: LAMA2; (-) strand; PAM type: NRG; PAM sequence: TGG
cattaaaaaatcagtgactt

SEQ ID NO: 95975 - DNA, 20 bp, Artificial Sequence
  Description of Artificial Sequence: Synthetic oligonucleotide
  Target: LAMA2; (-) strand; PAM type: NRG; PAM sequence: CAG
gttaggctgcattaaaaaat

SEQ ID NO: 95976 - DNA, 20 bp, Artificial Sequence
  Description of Artificial Sequence: Synthetic oligonucleotide
  Target: LAMA2; (-) strand; PAM type: NRG; PAM sequence: AGG
aattggattaaaaacaggtt

SEQ ID NO: 95977 - DNA, 20 bp, Artificial Sequence
  Description of Artificial Sequence: Synthetic oligonucleotide
  Target: LAMA2; (-) strand; PAM type: NRG; PAM sequence: TAG
caattggattaaaaacaggt

SEQ ID NO: 95978 - DNA, 20 bp, Artificial Sequence
  Description of Artificial Sequence: Synthetic oligonucleotide
  Target: LAMA2; (-) strand; PAM type: NRG; PAM sequence: AGG
gactcaattggattaaaaac

SEQ ID NO: 95979 - DNA, 20 bp, Artificial Sequence
  Description of Artificial Sequence: Synthetic oligonucleotide
  Target: LAMA2; (-) strand; PAM type: NRG; PAM sequence: CAG
agactcaattggattaaaaa

SEQ ID NO: 95980 - DNA, 20 bp, Artificial Sequence
  Description of Artificial Sequence: Synthetic oligonucleotide
  Target: LAMA2; (-) strand; PAM type: NRG; PAM sequence: TGG
aaataaaaaatagactcaat

SEQ ID NO: 95981 - DNA, 20 bp, Artificial Sequence
  Description of Artificial Sequence: Synthetic oligonucleotide
  Target: LAMA2; (-) strand; PAM type: NRG; PAM sequence: TAG
acaatgtttaaaataaaaaa

SEQ ID NO: 95982 - DNA, 20 bp, Artificial Sequence
  Description of Artificial Sequence: Synthetic oligonucleotide
  Target: LAMA2; (-) strand; PAM type: NRG; PAM sequence: AAG
atgtccaaaaggaaatttaa

SEQ ID NO: 95983 - DNA, 20 bp, Artificial Sequence
  Description of Artificial Sequence: Synthetic oligonucleotide
  Target: LAMA2; (-) strand; PAM type: NRG; PAM sequence: AGG
aaagatatacaatgtccaaa

SEQ ID NO: 95984 - DNA, 20 bp, Artificial Sequence
  Description of Artificial Sequence: Synthetic oligonucleotide
  Target: LAMA2; (-) strand; PAM type: NRG; PAM sequence: AAG
aaaagatatacaatgtccaa

SEQ ID NO: 95985 - DNA, 20 bp, Artificial Sequence
  Description of Artificial Sequence: Synthetic oligonucleotide
  Target: LAMA2; (-) strand; PAM type: NRG; PAM sequence: AAG
tgagtatagtagagaaataa

SEQ ID NO: 95986 - DNA, 20 bp, Artificial Sequence
  Description of Artificial Sequence: Synthetic oligonucleotide
  Target: LAMA2; (-) strand; PAM type: NRG; PAM sequence: GAG
gaaaaaatgtgagtatagta

SEQ ID NO: 95987 - DNA, 20 bp, Artificial Sequence
  Description of Artificial Sequence: Synthetic oligonucleotide
  Target: LAMA2; (-) strand; PAM type: NRG; PAM sequence: TAG
atgaaaaaatgtgagtatag

SEQ ID NO: 95988 - DNA, 20 bp, Artificial Sequence
  Description of Artificial Sequence: Synthetic oligonucleotide
  Target: LAMA2; (-) strand; PAM type: NRG; PAM sequence: TAG
taaatgaaaaaatgtgagta

SEQ ID NO: 95989 - DNA, 20 bp, Artificial Sequence
  Description of Artificial Sequence: Synthetic oligonucleotide
  Target: LAMA2; (-) strand; PAM type: NRG; PAM sequence: GAG
aagaataaatgaaaaaatgt

SEQ ID NO: 95990 - DNA, 20 bp, Artificial Sequence
  Description of Artificial Sequence: Synthetic oligonucleotide
  Target: LAMA2; (-) strand; PAM type: NRG; PAM sequence: AAG
tttataaacattatattttc

SEQ ID NO: 95991 - DNA, 20 bp, Artificial Sequence
  Description of Artificial Sequence: Synthetic oligonucleotide
  Target: LAMA2; (-) strand; PAM type: NRG; PAM sequence: CAG
aataaaaaagatggaatttg

SEQ ID NO: 95992 - DNA, 20 bp, Artificial Sequence
  Description of Artificial Sequence: Synthetic oligonucleotide
  Target: LAMA2; (-) strand; PAM type: NRG; PAM sequence: TGG
tagtcctgcaataaaaaaga

SEQ ID NO: 95993 - DNA, 20 bp, Artificial Sequence
  Description of Artificial Sequence: Synthetic oligonucleotide
  Target: LAMA2; (-) strand; PAM type: NRG; PAM sequence: AAG
ggaatagtcctgcaataaaa

SEQ ID NO: 95994 - DNA, 20 bp, Artificial Sequence
  Description of Artificial Sequence: Synthetic oligonucleotide
  Target: LAMA2; (-) strand; PAM type: NRG; PAM sequence: TAG
gaaaagtcagtcagtaggaa

SEQ ID NO: 95995 - DNA, 20 bp, Artificial Sequence
  Description of Artificial Sequence: Synthetic oligonucleotide
  Target: LAMA2; (-) strand; PAM type: NRG; PAM sequence: AGG
caggagaaaagtcagtcagt

SEQ ID NO: 95996 - DNA, 20 bp, Artificial Sequence
  Description of Artificial Sequence: Synthetic oligonucleotide
  Target: LAMA2; (-) strand; PAM type: NRG; PAM sequence: TAG
acaggagaaaagtcagtcag

SEQ ID NO: 95997 - DNA, 20 bp, Artificial Sequence
  Description of Artificial Sequence: Synthetic oligonucleotide
  Target: LAMA2; (-) strand; PAM type: NRG; PAM sequence: CAG
gaaacaggagaaaagtcagt

SEQ ID NO: 95998 - DNA, 20 bp, Artificial Sequence
  Description of Artificial Sequence: Synthetic oligonucleotide
  Target: LAMA2; (-) strand; PAM type: NRG; PAM sequence: CAG
ctcagaaacaggagaaaagt

SEQ ID NO: 95999 - DNA, 20 bp, Artificial Sequence
  Description of Artificial Sequence: Synthetic oligonucleotide
  Target: LAMA2; (-) strand; PAM type: NRG; PAM sequence: AAG
atgactcagaaacaggagaa

SEQ ID NO: 96000 - DNA, 20 bp, Artificial Sequence
  Description of Artificial Sequence: Synthetic oligonucleotide
  Target: LAMA2; (-) strand; PAM type: NRG; PAM sequence: GAG
aaaatatgactcagaaacag

SEQ ID NO: 96001 - DNA, 20 bp, Artificial Sequence
  Description of Artificial Sequence: Synthetic oligonucleotide
  Target: LAMA2; (-) strand; PAM type: NRG; PAM sequence: AGG
agaaaatatgactcagaaac

SEQ ID NO: 96002 - DNA, 20 bp, Artificial Sequence
  Description of Artificial Sequence: Synthetic oligonucleotide
  Target: LAMA2; (-) strand; PAM type: NRG; PAM sequence: CAG
aagaaaatatgactcagaaa

SEQ ID NO: 96003 - DNA, 20 bp, Artificial Sequence
  Description of Artificial Sequence: Synthetic oligonucleotide
  Target: LAMA2; (-) strand; PAM type: NRG; PAM sequence: CAG
agaatcaagaaaatatgact

SEQ ID NO: 96004 - DNA, 20 bp, Artificial Sequence
  Description of Artificial Sequence: Synthetic oligonucleotide
  Target: LAMA2; (-) strand; PAM type: NRG; PAM sequence: AAG
tatcaggcatgtaaagaatc

SEQ ID NO: 96005 - DNA, 20 bp, Artificial Sequence
  Description of Artificial Sequence: Synthetic oligonucleotide
  Target: LAMA2; (-) strand; PAM type: NRG; PAM sequence: AAG
taaaaattatcaggcatgta

SEQ ID NO: 96006 - DNA, 20 bp, Artificial Sequence
  Description of Artificial Sequence: Synthetic oligonucleotide
  Target: LAMA2; (-) strand; PAM type: NRG; PAM sequence: AGG
gcatccaaataaaaattatc

SEQ ID NO: 96007 - DNA, 20 bp, Artificial Sequence
  Description of Artificial Sequence: Synthetic oligonucleotide
  Target: LAMA2; (-) strand; PAM type: NRG; PAM sequence: CAG
ggcatccaaataaaaattat

SEQ ID NO: 96008 - DNA, 20 bp, Artificial Sequence
  Description of Artificial Sequence: Synthetic oligonucleotide
  Target: LAMA2; (-) strand; PAM type: NRG; PAM sequence: TGG
aatgaaaagtatataatgtc

SEQ ID NO: 96009 - DNA, 20 bp, Artificial Sequence
  Description of Artificial Sequence: Synthetic oligonucleotide
  Target: LAMA2; (-) strand; PAM type: NRG; PAM sequence: AAG
atccaatacacaacaatgaa

SEQ ID NO: 96010 - DNA, 20 bp, Artificial Sequence
  Description of Artificial Sequence: Synthetic oligonucleotide
  Target: LAMA2; (-) strand; PAM type: NRG; PAM sequence: AAG
ataaagttcaacattcttta

SEQ ID NO: 96011 - DNA, 20 bp, Artificial Sequence
  Description of Artificial Sequence: Synthetic oligonucleotide
  Target: LAMA2; (-) strand; PAM type: NRG; PAM sequence: AAG
ctaaactgtttgccagcata

SEQ ID NO: 96012 - DNA, 20 bp, Artificial Sequence
  Description of Artificial Sequence: Synthetic oligonucleotide
  Target: LAMA2; (-) strand; PAM type: NRG; PAM sequence: CAG
tgactacctaaactgtttgc

SEQ ID NO: 96013 - DNA, 20 bp, Artificial Sequence
  Description of Artificial Sequence: Synthetic oligonucleotide
  Target: LAMA2; (-) strand; PAM type: NRG; PAM sequence: AAG
agcaagcttcaaaagaatcc

SEQ ID NO: 96014 - DNA, 20 bp, Artificial Sequence
  Description of Artificial Sequence: Synthetic oligonucleotide
  Target: LAMA2; (-) strand; PAM type: NRG; PAM sequence: AAG
aactcaaaagcaagcttcaa

SEQ ID NO: 96015 - DNA, 20 bp, Artificial Sequence
  Description of Artificial Sequence: Synthetic oligonucleotide
  Target: LAMA2; (-) strand; PAM type: NRG; PAM sequence: AAG
ccctaacaaaactcaaaagc

SEQ ID NO: 96016 - DNA, 20 bp, Artificial Sequence
  Description of Artificial Sequence: Synthetic oligonucleotide
  Target: LAMA2; (-) strand; PAM type: NRG; PAM sequence: AAG
ccttccctaacaaaactcaa

SEQ ID NO: 96017 - DNA, 20 bp, Artificial Sequence
  Description of Artificial Sequence: Synthetic oligonucleotide
  Target: LAMA2; (-) strand; PAM type: NRG; PAM sequence: CAG
cagcttagtagaagggcttt

SEQ ID NO: 96018 - DNA, 20 bp, Artificial Sequence
  Description of Artificial Sequence: Synthetic oligonucleotide
  Target: LAMA2; (-) strand; PAM type: NRG; PAM sequence: GGG
agtttcacagcttagtagaa

SEQ ID NO: 96019 - DNA, 20 bp, Artificial Sequence
  Description of Artificial Sequence: Synthetic oligonucleotide
  Target: LAMA2; (-) strand; PAM type: NRG; PAM sequence: AGG
aagtttcacagcttagtaga

SEQ ID NO: 96020 - DNA, 20 bp, Artificial Sequence
  Description of Artificial Sequence: Synthetic oligonucleotide
  Target: LAMA2; (-) strand; PAM type: NRG; PAM sequence: AAG
gaagtttcacagcttagtag

SEQ ID NO: 96021 - DNA, 20 bp, Artificial Sequence
  Description of Artificial Sequence: Synthetic oligonucleotide
  Target: LAMA2; (-) strand; PAM type: NRG; PAM sequence: TAG
tcagaagtttcacagcttag

SEQ ID NO: 96022 - DNA, 20 bp, Artificial Sequence
  Description of Artificial Sequence: Synthetic oligonucleotide
  Target: LAMA2; (-) strand; PAM type: NRG; PAM sequence: TAG
ttctcagaagtttcacagct

SEQ ID NO: 96023 - DNA, 20 bp, Artificial Sequence
  Description of Artificial Sequence: Synthetic oligonucleotide
  Target: LAMA2; (-) strand; PAM type: NRG; PAM sequence: CAG
tagtattctcagaagtttca

SEQ ID NO: 96024 - DNA, 20 bp, Artificial Sequence
  Description of Artificial Sequence: Synthetic oligonucleotide
  Target: LAMA2; (-) strand; PAM type: NRG; PAM sequence: AAG
caactaggtagtattctcag

SEQ ID NO: 96025 - DNA, 20 bp, Artificial Sequence
  Description of Artificial Sequence: Synthetic oligonucleotide
  Target: LAMA2; (-) strand; PAM type: NRG; PAM sequence: CAG
aaccaactaggtagtattct

SEQ ID NO: 96026 - DNA, 20 bp, Artificial Sequence
  Description of Artificial Sequence: Synthetic oligonucleotide
  Target: LAMA2; (-) strand; PAM type: NRG; PAM sequence: TAG
agacatagtaaccaactagg

SEQ ID NO: 96027 - DNA, 20 bp, Artificial Sequence
  Description of Artificial Sequence: Synthetic oligonucleotide
  Target: LAMA2; (-) strand; PAM type: NRG; PAM sequence: AGG
aagagacatagtaaccaact

SEQ ID NO: 96028 - DNA, 20 bp, Artificial Sequence
  Description of Artificial Sequence: Synthetic oligonucleotide
  Target: LAMA2; (-) strand; PAM type: NRG; PAM sequence: TAG
aaagagacatagtaaccaac

SEQ ID NO: 96029 - DNA, 20 bp, Artificial Sequence
  Description of Artificial Sequence: Synthetic oligonucleotide
  Target: LAMA2; (-) strand; PAM type: NRG; PAM sequence: TAG
acagccagagtaaagagaca

SEQ ID NO: 96030 - DNA, 20 bp, Artificial Sequence
  Description of Artificial Sequence: Synthetic oligonucleotide
  Target: LAMA2; (-) strand; PAM type: NRG; PAM sequence: GAG
ttttcaacagccagagtaaa

SEQ ID NO: 96031 - DNA, 20 bp, Artificial Sequence
  Description of Artificial Sequence: Synthetic oligonucleotide
  Target: LAMA2; (-) strand; PAM type: NRG; PAM sequence: AAG
tattttcaacagccagagta

SEQ ID NO: 96032 - DNA, 20 bp, Artificial Sequence
  Description of Artificial Sequence: Synthetic oligonucleotide
  Target: LAMA2; (-) strand; PAM type: NRG; PAM sequence: GAG
agccatattttcaacagcca

SEQ ID NO: 96033 - DNA, 20 bp, Artificial Sequence
  Description of Artificial Sequence: Synthetic oligonucleotide
  Target: LAMA2; (-) strand; PAM type: NRG; PAM sequence: CAG
taagccatattttcaacagc

SEQ ID NO: 96034 - DNA, 20 bp, Artificial Sequence
  Description of Artificial Sequence: Synthetic oligonucleotide
  Target: LAMA2; (-) strand; PAM type: NRG; PAM sequence: CAG
ggaataagccatattttcaa

SEQ ID NO: 96035 - DNA, 20 bp, Artificial Sequence
  Description of Artificial Sequence: Synthetic oligonucleotide
  Target: LAMA2; (-) strand; PAM type: NRG; PAM sequence: AAG
gcccagagaaagcttggaat

SEQ ID NO: 96036 - DNA, 20 bp, Artificial Sequence
  Description of Artificial Sequence: Synthetic oligonucleotide
  Target: LAMA2; (-) strand; PAM type: NRG; PAM sequence: TGG
cttacagcccagagaaagct

SEQ ID NO: 96037 - DNA, 20 bp, Artificial Sequence
  Description of Artificial Sequence: Synthetic oligonucleotide
  Target: LAMA2; (-) strand; PAM type: NRG; PAM sequence: AAG
aaattcttacagcccagaga

SEQ ID NO: 96038 - DNA, 20 bp, Artificial Sequence
  Description of Artificial Sequence: Synthetic oligonucleotide
  Target: LAMA2; (-) strand; PAM type: NRG; PAM sequence: GAG
gcaaaaattcttacagccca

SEQ ID NO: 96039 - DNA, 20 bp, Artificial Sequence
  Description of Artificial Sequence: Synthetic oligonucleotide
  Target: LAMA2; (-) strand; PAM type: NRG; PAM sequence: CAG
ctgcaaaaattcttacagcc

SEQ ID NO: 96040 - DNA, 20 bp, Artificial Sequence
  Description of Artificial Sequence: Synthetic oligonucleotide
  Target: LAMA2; (-) strand; PAM type: NRG; PAM sequence: CAG
ctaggctgcaaaaattctta

SEQ ID NO: 96041 - DNA, 20 bp, Artificial Sequence
  Description of Artificial Sequence: Synthetic oligonucleotide
  Target: LAMA2; (-) strand; PAM type: NRG; PAM sequence: AGG
aaatggcattggaaaaccct

SEQ ID NO: 96042 - DNA, 20 bp, Artificial Sequence
  Description of Artificial Sequence: Synthetic oligonucleotide
  Target: LAMA2; (-) strand; PAM type: NRG; PAM sequence: TAG
aaaatggcattggaaaaccc

SEQ ID NO: 96043 - DNA, 20 bp, Artificial Sequence
  Description of Artificial Sequence: Synthetic oligonucleotide
  Target: LAMA2; (-) strand; PAM type: NRG; PAM sequence: TGG
gggatgaaggaaaatggcat

SEQ ID NO: 96044 - DNA, 20 bp, Artificial Sequence
  Description of Artificial Sequence: Synthetic oligonucleotide
  Target: LAMA2; (-) strand; PAM type: NRG; PAM sequence: TGG
atgcatgggatgaaggaaaa

SEQ ID NO: 96045 - DNA, 20 bp, Artificial Sequence
  Description of Artificial Sequence: Synthetic oligonucleotide
  Target: LAMA2; (-) strand; PAM type: NRG; PAM sequence: AGG
taggtgcatgcatgggatga

SEQ ID NO: 96046 - DNA, 20 bp, Artificial Sequence
  Description of Artificial Sequence: Synthetic oligonucleotide
  Target: LAMA2; (-) strand; PAM type: NRG; PAM sequence: AAG
ataggtgcatgcatgggatg

SEQ ID NO: 96047 - DNA, 20 bp, Artificial Sequence
  Description of Artificial Sequence: Synthetic oligonucleotide
  Target: LAMA2; (-) strand; PAM type: NRG; PAM sequence: GGG
atgctgataggtgcatgcat

SEQ ID NO: 96048 - DNA, 20 bp, Artificial Sequence
  Description of Artificial Sequence: Synthetic oligonucleotide
  Target: LAMA2; (-) strand; PAM type: NRG; PAM sequence: TGG
aatgctgataggtgcatgca

SEQ ID NO: 96049 - DNA, 20 bp, Artificial Sequence
  Description of Artificial Sequence: Synthetic oligonucleotide
  Target: LAMA2; (-) strand; PAM type: NRG; PAM sequence: AGG
gtcattgactgaatgctgat

SEQ ID NO: 96050 - DNA, 20 bp, Artificial Sequence
  Description of Artificial Sequence: Synthetic oligonucleotide
  Target: LAMA2; (-) strand; PAM type: NRG; PAM sequence: TAG
agtcattgactgaatgctga

SEQ ID NO: 96051 - DNA, 20 bp, Artificial Sequence
  Description of Artificial Sequence: Synthetic oligonucleotide
  Target: LAMA2; (-) strand; PAM type: NRG; PAM sequence: GAG
atgtgcagaagcgttctctt

SEQ ID NO: 96052 - DNA, 20 bp, Artificial Sequence
  Description of Artificial Sequence: Synthetic oligonucleotide
  Target: LAMA2; (-) strand; PAM type: NRG; PAM sequence: AAG
gtaattccagagatgtgcag

SEQ ID NO: 96053 - DNA, 20 bp, Artificial Sequence
  Description of Artificial Sequence: Synthetic oligonucleotide
  Target: LAMA2; (-) strand; PAM type: NRG; PAM sequence: CAG
aaggtaattccagagatgtg

SEQ ID NO: 96054 - DNA, 20 bp, Artificial Sequence
  Description of Artificial Sequence: Synthetic oligonucleotide
  Target: LAMA2; (-) strand; PAM type: NRG; PAM sequence: GAG
tagatagaaaggtaattcca

SEQ ID NO: 96055 - DNA, 20 bp, Artificial Sequence
  Description of Artificial Sequence: Synthetic oligonucleotide
  Target: LAMA2; (-) strand; PAM type: NRG; PAM sequence: CAG
gttagatagaaaggtaattc

SEQ ID NO: 96056 - DNA, 20 bp, Artificial Sequence
  Description of Artificial Sequence: Synthetic oligonucleotide
  Target: LAMA2; (-) strand; PAM type: NRG; PAM sequence: AGG
aagaaagaagttagatagaa

SEQ ID NO: 96057 - DNA, 20 bp, Artificial Sequence
  Description of Artificial Sequence: Synthetic oligonucleotide
  Target: LAMA2; (-) strand; PAM type: NRG; PAM sequence: AAG
aaagaaagaagttagataga

SEQ ID NO: 96058 - DNA, 20 bp, Artificial Sequence
  Description of Artificial Sequence: Synthetic oligonucleotide
  Target: LAMA2; (-) strand; PAM type: NRG; PAM sequence: TAG
tcaaaaagaaagaagttaga

SEQ ID NO: 96059 - DNA, 20 bp, Artificial Sequence
  Description of Artificial Sequence: Synthetic oligonucleotide
  Target: LAMA2; (-) strand; PAM type: NRG; PAM sequence: TAG
gtgttcaaaaagaaagaagt

SEQ ID NO: 96060 - DNA, 20 bp, Artificial Sequence
  Description of Artificial Sequence: Synthetic oligonucleotide
  Target: LAMA2; (-) strand; PAM type: NRG; PAM sequence: AAG
atacgtgttcaaaaagaaag

SEQ ID NO: 96061 - DNA, 20 bp, Artificial Sequence
  Description of Artificial Sequence: Synthetic oligonucleotide
  Target: LAMA2; (-) strand; PAM type: NRG; PAM sequence: AAG
agaatacgtgttcaaaaaga

SEQ ID NO: 96062 - DNA, 20 bp, Artificial Sequence
  Description of Artificial Sequence: Synthetic oligonucleotide
  Target: LAMA2; (-) strand; PAM type: NRG; PAM sequence: AAG
aaatagaatacgtgttcaaa

SEQ ID NO: 96063 - DNA, 20 bp, Artificial Sequence
  Description of Artificial Sequence: Synthetic oligonucleotide
  Target: LAMA2; (-) strand; PAM type: NRG; PAM sequence: TAG
ctgaaacttatgatggcaaa

SEQ ID NO: 96064 - DNA, 20 bp, Artificial Sequence
  Description of Artificial Sequence: Synthetic oligonucleotide
  Target: LAMA2; (-) strand; PAM type: NRG; PAM sequence: TGG
gaggctgctgaaacttatga

SEQ ID NO: 96065 - DNA, 20 bp, Artificial Sequence
  Description of Artificial Sequence: Synthetic oligonucleotide
  Target: LAMA2; (-) strand; PAM type: NRG; PAM sequence: AGG
agtggagtttgaggaagccg

SEQ ID NO: 96066 - DNA, 20 bp, Artificial Sequence
  Description of Artificial Sequence: Synthetic oligonucleotide
  Target: LAMA2; (-) strand; PAM type: NRG; PAM sequence: GAG
gagtggagtttgaggaagcc

SEQ ID NO: 96067 - DNA, 20 bp, Artificial Sequence
  Description of Artificial Sequence: Synthetic oligonucleotide
  Target: LAMA2; (-) strand; PAM type: NRG; PAM sequence: AAG
acaaagagtggagtttgagg

SEQ ID NO: 96068 - DNA, 20 bp, Artificial Sequence
  Description of Artificial Sequence: Synthetic oligonucleotide
  Target: LAMA2; (-) strand; PAM type: NRG; PAM sequence: AGG
gagacaaagagtggagtttg

SEQ ID NO: 96069 - DNA, 20 bp, Artificial Sequence
  Description of Artificial Sequence: Synthetic oligonucleotide
  Target: LAMA2; (-) strand; PAM type: NRG; PAM sequence: GAG
agagacaaagagtggagttt

SEQ ID NO: 96070 - DNA, 20 bp, Artificial Sequence
  Description of Artificial Sequence: Synthetic oligonucleotide
  Target: LAMA2; (-) strand; PAM type: NRG; PAM sequence: GAG
gagttgagagacaaagagtg

SEQ ID NO: 96071 - DNA, 20 bp, Artificial Sequence
  Description of Artificial Sequence: Synthetic oligonucleotide
  Target: LAMA2; (-) strand; PAM type: NRG; PAM sequence: TGG
ctgagttgagagacaaagag

SEQ ID NO: 96072 - DNA, 20 bp, Artificial Sequence
  Description of Artificial Sequence: Synthetic oligonucleotide
  Target: LAMA2; (-) strand; PAM type: NRG; PAM sequence: GAG
tagctgagttgagagacaaa

SEQ ID NO: 96073 - DNA, 20 bp, Artificial Sequence
  Description of Artificial Sequence: Synthetic oligonucleotide
  Target: LAMA2; (-) strand; PAM type: NRG; PAM sequence: AAG
tatagctgagttgagagaca

SEQ ID NO: 96074 - DNA, 20 bp, Artificial Sequence
  Description of Artificial Sequence: Synthetic oligonucleotide
  Target: LAMA2; (-) strand; PAM type: NRG; PAM sequence: GAG
ccgcattatagctgagttga

SEQ ID NO: 96075 - DNA, 20 bp, Artificial Sequence
  Description of Artificial Sequence: Synthetic oligonucleotide
  Target: LAMA2; (-) strand; PAM type: NRG; PAM sequence: GAG
gcccgcattatagctgagtt

SEQ ID NO: 96076 - DNA, 20 bp, Artificial Sequence
  Description of Artificial Sequence: Synthetic oligonucleotide
  Target: LAMA2; (-) strand; PAM type: NRG; PAM sequence: GAG
ccaaagcccgcattatagct

SEQ ID NO: 96077 - DNA, 20 bp, Artificial Sequence
  Description of Artificial Sequence: Synthetic oligonucleotide
  Target: LAMA2; (-) strand; PAM type: NRG; PAM sequence: TAG
taaacccaaagcccgcatta

SEQ ID NO: 96078 - DNA, 20 bp, Artificial Sequence
  Description of Artificial Sequence: Synthetic oligonucleotide
  Target: LAMA2; (-) strand; PAM type: NRG; PAM sequence: AAG
acacagagagggtaaaccca

SEQ ID NO: 96079 - DNA, 20 bp, Artificial Sequence
  Description of Artificial Sequence: Synthetic oligonucleotide
  Target: LAMA2; (-) strand; PAM type: NRG; PAM sequence: GGG
tctaggctgcaacacagaga

SEQ ID NO: 96080 - DNA, 20 bp, Artificial Sequence
  Description of Artificial Sequence: Synthetic oligonucleotide
  Target: LAMA2; (-) strand; PAM type: NRG; PAM sequence: AGG
ttctaggctgcaacacagag

SEQ ID NO: 96081 - DNA, 20 bp, Artificial Sequence
  Description of Artificial Sequence: Synthetic oligonucleotide
  Target: LAMA2; (-) strand; PAM type: NRG; PAM sequence: GAG
tttctaggctgcaacacaga

SEQ ID NO: 96082 - DNA, 20 bp, Artificial Sequence
  Description of Artificial Sequence: Synthetic oligonucleotide
  Target: LAMA2; (-) strand; PAM type: NRG; PAM sequence: GAG
aatttctaggctgcaacaca

SEQ ID NO: 96083 - DNA, 20 bp, Artificial Sequence
  Description of Artificial Sequence: Synthetic oligonucleotide
  Target: LAMA2; (-) strand; PAM type: NRG; PAM sequence: CAG
gcaatttctaggctgcaaca

SEQ ID NO: 96084 - DNA, 20 bp, Artificial Sequence
  Description of Artificial Sequence: Synthetic oligonucleotide
  Target: LAMA2; (-) strand; PAM type: NRG; PAM sequence: AGG
agtgtacagaggcaatttct

SEQ ID NO: 96085 - DNA, 20 bp, Artificial Sequence
  Description of Artificial Sequence: Synthetic oligonucleotide
  Target: LAMA2; (-) strand; PAM type: NRG; PAM sequence: TAG
cagtgtacagaggcaatttc

SEQ ID NO: 96086 - DNA, 20 bp, Artificial Sequence
  Description of Artificial Sequence: Synthetic oligonucleotide
  Target: LAMA2; (-) strand; PAM type: NRG; PAM sequence: AGG
aaacatgaagcagtgtacag

SEQ ID NO: 96087 - DNA, 20 bp, Artificial Sequence
  Description of Artificial Sequence: Synthetic oligonucleotide
  Target: LAMA2; (-) strand; PAM type: NRG; PAM sequence: GAG
aaaacatgaagcagtgtaca

SEQ ID NO: 96088 - DNA, 20 bp, Artificial Sequence
  Description of Artificial Sequence: Synthetic oligonucleotide
  Target: LAMA2; (-) strand; PAM type: NRG; PAM sequence: CAG
aaaaaacatgaagcagtgta

SEQ ID NO: 96089 - DNA, 20 bp, Artificial Sequence
  Description of Artificial Sequence: Synthetic oligonucleotide
  Target: LAMA2; (-) strand; PAM type: NRG; PAM sequence: CAG
agaaggaaaaaaacatgaag

SEQ ID NO: 96090 - DNA, 20 bp, Artificial Sequence
  Description of Artificial Sequence: Synthetic oligonucleotide
  Target: LAMA2; (-) strand; PAM type: NRG; PAM sequence: AAG
gagagaaggaaaaaaacatg

SEQ ID NO: 96091 - DNA, 20 bp, Artificial Sequence
  Description of Artificial Sequence: Synthetic oligonucleotide
  Target: LAMA2; (-) strand; PAM type: NRG; PAM sequence: AGG
ggactgtgatttctgagaga

SEQ ID NO: 96092 - DNA, 20 bp, Artificial Sequence
  Description of Artificial Sequence: Synthetic oligonucleotide
  Target: LAMA2; (-) strand; PAM type: NRG; PAM sequence: AAG
aggactgtgatttctgagag

SEQ ID NO: 96093 - DNA, 20 bp, Artificial Sequence
  Description of Artificial Sequence: Synthetic oligonucleotide
  Target: LAMA2; (-) strand; PAM type: NRG; PAM sequence: GAG
cacaggactgtgatttctga

SEQ ID NO: 96094 - DNA, 20 bp, Artificial Sequence
  Description of Artificial Sequence: Synthetic oligonucleotide
  Target: LAMA2; (-) strand; PAM type: NRG; PAM sequence: GAG
agcacaggactgtgatttct

SEQ ID NO: 96095 - DNA, 20 bp, Artificial Sequence
  Description of Artificial Sequence: Synthetic oligonucleotide
  Target: LAMA2; (-) strand; PAM type: NRG; PAM sequence: AGG
tattgaattataggaagcac

SEQ ID NO: 96096 - DNA, 20 bp, Artificial Sequence
  Description of Artificial Sequence: Synthetic oligonucleotide
  Target: LAMA2; (-) strand; PAM type: NRG; PAM sequence: CAG
atattgaattataggaagca

SEQ ID NO: 96097 - DNA, 20 bp, Artificial Sequence
  Description of Artificial Sequence: Synthetic oligonucleotide
  Target: LAMA2; (-) strand; PAM type: NRG; PAM sequence: AAG
tttagatattgaattatagg

SEQ ID NO: 96098 - DNA, 20 bp, Artificial Sequence
  Description of Artificial Sequence: Synthetic oligonucleotide
  Target: LAMA2; (-) strand; PAM type: NRG; PAM sequence: AGG
gtttttagatattgaattat

SEQ ID NO: 96099 - DNA, 20 bp, Artificial Sequence
  Description of Artificial Sequence: Synthetic oligonucleotide
  Target: LAMA2; (-) strand; PAM type: NRG; PAM sequence: TAG
tgtttttagatattgaatta

SEQ ID NO: 96100 - DNA, 20 bp, Artificial Sequence
  Description of Artificial Sequence: Synthetic oligonucleotide
  Target: LAMA2; (-) strand; PAM type: NRG; PAM sequence: TAG
aaccaagaaacaattgtttt

SEQ ID NO: 96101 - DNA, 20 bp, Artificial Sequence
  Description of Artificial Sequence: Synthetic oligonucleotide
  Target: LAMA2; (-) strand; PAM type: NRG; PAM sequence: AAG
ctaaaataaaaatacaaacc

SEQ ID NO: 96102 - DNA, 20 bp, Artificial Sequence
  Description of Artificial Sequence: Synthetic oligonucleotide
  Target: LAMA2; (-) strand; PAM type: NRG; PAM sequence: AAG
tcttctttgttaagctgtta

SEQ ID NO: 96103 - DNA, 20 bp, Artificial Sequence
  Description of Artificial Sequence: Synthetic oligonucleotide
  Target: LAMA2; (-) strand; PAM type: NRG; PAM sequence: AAG
agtatttattcttctttgtt

SEQ ID NO: 96104 - DNA, 20 bp, Artificial Sequence
  Description of Artificial Sequence: Synthetic oligonucleotide
  Target: LAMA2; (-) strand; PAM type: NRG; PAM sequence: CAG
cagcctcttcttagttttta

SEQ ID NO: 96105 - DNA, 20 bp, Artificial Sequence
  Description of Artificial Sequence: Synthetic oligonucleotide
  Target: LAMA2; (-) strand; PAM type: NRG; PAM sequence: TAG
tcttttgaacagcctcttct

SEQ ID NO: 96106 - DNA, 20 bp, Artificial Sequence
  Description of Artificial Sequence: Synthetic oligonucleotide
  Target: LAMA2; (-) strand; PAM type: NRG; PAM sequence: CAG
aagaatattcttcttttgaa

SEQ ID NO: 96107 - DNA, 20 bp, Artificial Sequence
  Description of Artificial Sequence: Synthetic oligonucleotide
  Target: LAMA2; (-) strand; PAM type: NRG; PAM sequence: AAG
ttgtgttgcattaggcactg

SEQ ID NO: 96108 - DNA, 20 bp, Artificial Sequence
  Description of Artificial Sequence: Synthetic oligonucleotide
  Target: LAMA2; (-) strand; PAM type: NRG; PAM sequence: AGG
cttgacctttgtgttgcatt

SEQ ID NO: 96109 - DNA, 20 bp, Artificial Sequence
  Description of Artificial Sequence: Synthetic oligonucleotide
  Target: LAMA2; (-) strand; PAM type: NRG; PAM sequence: TAG
acttgacctttgtgttgcat

SEQ ID NO: 96110 - DNA, 20 bp, Artificial Sequence
  Description of Artificial Sequence: Synthetic oligonucleotide
  Target: LAMA2; (-) strand; PAM type: NRG; PAM sequence: CAG
ttcaatttaatgaacaactt

SEQ ID NO: 96111 - DNA, 20 bp, Artificial Sequence
  Description of Artificial Sequence: Synthetic oligonucleotide
  Target: LAMA2; (-) strand; PAM type: NRG; PAM sequence: TGG
cacaacccagtggaatcaat

SEQ ID NO: 96112 - DNA, 20 bp, Artificial Sequence
  Description of Artificial Sequence: Synthetic oligonucleotide
  Target: LAMA2; (-) strand; PAM type: NRG; PAM sequence: TGG
tccaatatttcacaacccag

SEQ ID NO: 96113 - DNA, 20 bp, Artificial Sequence
  Description of Artificial Sequence: Synthetic oligonucleotide
  Target: LAMA2; (-) strand; PAM type: NRG; PAM sequence: CAG
cgttccaatatttcacaacc

SEQ ID NO: 96114 - DNA, 20 bp, Artificial Sequence
  Description of Artificial Sequence: Synthetic oligonucleotide
  Target: LAMA2; (-) strand; PAM type: NRG; PAM sequence: TGG
gggtcaaacaggaccacact

SEQ ID NO: 96115 - DNA, 20 bp, Artificial Sequence
  Description of Artificial Sequence: Synthetic oligonucleotide
  Target: LAMA2; (-) strand; PAM type: NRG; PAM sequence: AGG
gtactgctatagggtcaaac

SEQ ID NO: 96116 - DNA, 20 bp, Artificial Sequence
  Description of Artificial Sequence: Synthetic oligonucleotide
  Target: LAMA2; (-) strand; PAM type: NRG; PAM sequence: CAG
ggtactgctatagggtcaaa

SEQ ID NO: 96117 - DNA, 20 bp, Artificial Sequence
  Description of Artificial Sequence: Synthetic oligonucleotide
  Target: LAMA2; (-) strand; PAM type: NRG; PAM sequence: GGG
ctctatagggtactgctata

SEQ ID NO: 96118 - DNA, 20 bp, Artificial Sequence
  Description of Artificial Sequence: Synthetic oligonucleotide
  Target: LAMA2; (-) strand; PAM type: NRG; PAM sequence: AGG
tctctatagggtactgctat

SEQ ID NO: 96119 - DNA, 20 bp, Artificial Sequence
  Description of Artificial Sequence: Synthetic oligonucleotide
  Target: LAMA2; (-) strand; PAM type: NRG; PAM sequence: TAG
atctctatagggtactgcta

SEQ ID NO: 96120 - DNA, 20 bp, Artificial Sequence
  Description of Artificial Sequence: Synthetic oligonucleotide
  Target: LAMA2; (-) strand; PAM type: NRG; PAM sequence: GGG
aaaaagtttacatctctata

SEQ ID NO: 96121 - DNA, 20 bp, Artificial Sequence
  Description of Artificial Sequence: Synthetic oligonucleotide
  Target: LAMA2; (-) strand; PAM type: NRG; PAM sequence: AGG
aaaaaagtttacatctctat

SEQ ID NO: 96122 - DNA, 20 bp, Artificial Sequence
  Description of Artificial Sequence: Synthetic oligonucleotide
  Target: LAMA2; (-) strand; PAM type: NRG; PAM sequence: TAG
aaaaaaagtttacatctcta

SEQ ID NO: 96123 - DNA, 20 bp, Artificial Sequence
  Description of Artificial Sequence: Synthetic oligonucleotide
  Target: LAMA2; (-) strand; PAM type: NRG; PAM sequence: AAG
tgctaactcagcaggaaaaa

SEQ ID NO: 96124 - DNA, 20 bp, Artificial Sequence
  Description of Artificial Sequence: Synthetic oligonucleotide
  Target: LAMA2; (-) strand; PAM type: NRG; PAM sequence: AGG
ttcatctgtgctaactcagc

SEQ ID NO: 96125 - DNA, 20 bp, Artificial Sequence
  Description of Artificial Sequence: Synthetic oligonucleotide
  Target: LAMA2; (-) strand; PAM type: NRG; PAM sequence: CAG
tttcatctgtgctaactcag

SEQ ID NO: 96126 - DNA, 20 bp, Artificial Sequence
  Description of Artificial Sequence: Synthetic oligonucleotide
  Target: LAMA2; (-) strand; PAM type: NRG; PAM sequence: CAG
ttatttcatctgtgctaact

SEQ ID NO: 96127 - DNA, 20 bp, Artificial Sequence
  Description of Artificial Sequence: Synthetic oligonucleotide
  Target: LAMA2; (-) strand; PAM type: NRG; PAM sequence: GAG
catacatgtgaaggtggtta

SEQ ID NO: 96128 - DNA, 20 bp, Artificial Sequence
  Description of Artificial Sequence: Synthetic oligonucleotide
  Target: LAMA2; (-) strand; PAM type: NRG; PAM sequence: TAG
atcatacatgtgaaggtggt

SEQ ID NO: 96129 - DNA, 20 bp, Artificial Sequence
  Description of Artificial Sequence: Synthetic oligonucleotide
  Target: LAMA2; (-) strand; PAM type: NRG; PAM sequence: TGG
ttttatcatacatgtgaagg

SEQ ID NO: 96130 - DNA, 20 bp, Artificial Sequence
  Description of Artificial Sequence: Synthetic oligonucleotide
  Target: LAMA2; (-) strand; PAM type: NRG; PAM sequence: AGG
atgttttatcatacatgtga

SEQ ID NO: 96131 - DNA, 20 bp, Artificial Sequence
  Description of Artificial Sequence: Synthetic oligonucleotide
  Target: LAMA2; (-) strand; PAM type: NRG; PAM sequence: AAG
aatgttttatcatacatgtg

SEQ ID NO: 96132 - DNA, 20 bp, Artificial Sequence
  Description of Artificial Sequence: Synthetic oligonucleotide
  Target: LAMA2; (-) strand; PAM type: NRG; PAM sequence: AGG
aggtcagcatattctagacc

SEQ ID NO: 96133 - DNA, 20 bp, Artificial Sequence
  Description of Artificial Sequence: Synthetic oligonucleotide
  Target: LAMA2; (-) strand; PAM type: NRG; PAM sequence: CAG
taggtcagcatattctagac

SEQ ID NO: 96134 - DNA, 20 bp, Artificial Sequence
  Description of Artificial Sequence: Synthetic oligonucleotide
  Target: LAMA2; (-) strand; PAM type: NRG; PAM sequence: TAG
tcctctaggtcagcatattc

SEQ ID NO: 96135 - DNA, 20 bp, Artificial Sequence
  Description of Artificial Sequence: Synthetic oligonucleotide
  Target: LAMA2; (-) strand; PAM type: NRG; PAM sequence: CAG
atgcttgttttcctctaggt

SEQ ID NO: 96136 - DNA, 20 bp, Artificial Sequence
  Description of Artificial Sequence: Synthetic oligonucleotide
  Target: LAMA2; (-) strand; PAM type: NRG; PAM sequence: AGG
caatatgcttgttttcctct

SEQ ID NO: 96137 - DNA, 20 bp, Artificial Sequence
  Description of Artificial Sequence: Synthetic oligonucleotide
  Target: LAMA2; (-) strand; PAM type: NRG; PAM sequence: TAG
tcaatatgcttgttttcctc

SEQ ID NO: 96138 - DNA, 20 bp, Artificial Sequence
  Description of Artificial Sequence: Synthetic oligonucleotide
  Target: LAMA2; (-) strand; PAM type: NRG; PAM sequence: AAG
cagacatctgaacttccttg

SEQ ID NO: 96139 - DNA, 20 bp, Artificial Sequence
  Description of Artificial Sequence: Synthetic oligonucleotide
  Target: LAMA2; (-) strand; PAM type: NRG; PAM sequence: CAG
atcacatgtctaattgaagt

SEQ ID NO: 96140 - DNA, 20 bp, Artificial Sequence
  Description of Artificial Sequence: Synthetic oligonucleotide
  Target: LAMA2; (-) strand; PAM type: NRG; PAM sequence: AAG
tctaatcacatgtctaattg

SEQ ID NO: 96141 - DNA, 20 bp, Artificial Sequence
  Description of Artificial Sequence: Synthetic oligonucleotide
  Target: LAMA2; (-) strand; PAM type: NRG; PAM sequence: CAG
agaaaaatgaatgtcctgtc

SEQ ID NO: 96142 - DNA, 20 bp, Artificial Sequence
  Description of Artificial Sequence: Synthetic oligonucleotide
  Target: LAMA2; (-) strand; PAM type: NRG; PAM sequence: TAG
cttaataatgctattgacaa

SEQ ID NO: 96143 - DNA, 20 bp, Artificial Sequence
  Description of Artificial Sequence: Synthetic oligonucleotide
  Target: LAMA2; (-) strand; PAM type: NRG; PAM sequence: TAG
ttgatttctttctaaaaatg

SEQ ID NO: 96144 - DNA, 20 bp, Artificial Sequence
  Description of Artificial Sequence: Synthetic oligonucleotide
  Target: LAMA2; (-) strand; PAM type: NRG; PAM sequence: GAG
gaacactttgaaattctgag

SEQ ID NO: 96145 - DNA, 20 bp, Artificial Sequence
  Description of Artificial Sequence: Synthetic oligonucleotide
  Target: LAMA2; (-) strand; PAM type: NRG; PAM sequence: AGG
aagaacactttgaaattctg

SEQ ID NO: 96146 - DNA, 20 bp, Artificial Sequence
  Description of Artificial Sequence: Synthetic oligonucleotide
  Target: LAMA2; (-) strand; PAM type: NRG; PAM sequence: GAG
taagaacactttgaaattct

SEQ ID NO: 96147 - DNA, 20 bp, Artificial Sequence
  Description of Artificial Sequence: Synthetic oligonucleotide
  Target: LAMA2; (-) strand; PAM type: NRG; PAM sequence: AAG
atagcattgttcatattcat

SEQ ID NO: 96148 - DNA, 20 bp, Artificial Sequence
  Description of Artificial Sequence: Synthetic oligonucleotide
  Target: LAMA2; (-) strand; PAM type: NRG; PAM sequence: TAG
aagtcagtcatagacactta

SEQ ID NO: 96149 - DNA, 20 bp, Artificial Sequence
  Description of Artificial Sequence: Synthetic oligonucleotide
  Target: LAMA2; (-) strand; PAM type: NRG; PAM sequence: TAG
gaaaatgcaaaagtcagtca

SEQ ID NO: 96150 - DNA, 20 bp, Artificial Sequence
  Description of Artificial Sequence: Synthetic oligonucleotide
  Target: LAMA2; (-) strand; PAM type: NRG; PAM sequence: CAG
gaagctgaaaatgcaaaagt

SEQ ID NO: 96151 - DNA, 20 bp, Artificial Sequence
  Description of Artificial Sequence: Synthetic oligonucleotide
  Target: LAMA2; (-) strand; PAM type: NRG; PAM sequence: AAG
atttgaagctgaaaatgcaa

SEQ ID NO: 96152 - DNA, 20 bp, Artificial Sequence
  Description of Artificial Sequence: Synthetic oligonucleotide
  Target: LAMA2; (-) strand; PAM type: NRG; PAM sequence: AAG
atggtggatgcttggatttg

SEQ ID NO: 96153 - DNA, 20 bp, Artificial Sequence
  Description of Artificial Sequence: Synthetic oligonucleotide
  Target: LAMA2; (-) strand; PAM type: NRG; PAM sequence: TGG
caagtgatatggtggatgct

SEQ ID NO: 96154 - DNA, 20 bp, Artificial Sequence
  Description of Artificial Sequence: Synthetic oligonucleotide
  Target: LAMA2; (-) strand; PAM type: NRG; PAM sequence: TGG
cctgagtccaagtgatatgg

SEQ ID NO: 96155 - DNA, 20 bp, Artificial Sequence
  Description of Artificial Sequence: Synthetic oligonucleotide
  Target: LAMA2; (-) strand; PAM type: NRG; PAM sequence: TGG
actcctgagtccaagtgata

SEQ ID NO: 96156 - DNA, 20 bp, Artificial Sequence
  Description of Artificial Sequence: Synthetic oligonucleotide
  Target: LAMA2; (-) strand; PAM type: NRG; PAM sequence: AAG
tagggcttactcctgagtcc

SEQ ID NO: 96157 - DNA, 20 bp, Artificial Sequence
  Description of Artificial Sequence: Synthetic oligonucleotide
  Target: LAMA2; (-) strand; PAM type: NRG; PAM sequence: GAG
tttccctagggcttactcct

SEQ ID NO: 96158 - DNA, 20 bp, Artificial Sequence
  Description of Artificial Sequence: Synthetic oligonucleotide
  Target: LAMA2; (-) strand; PAM type: NRG; PAM sequence: GGG
aactcttgtaagtttcccta

SEQ ID NO: 96159 - DNA, 20 bp, Artificial Sequence
  Description of Artificial Sequence: Synthetic oligonucleotide
  Target: LAMA2; (-) strand; PAM type: NRG; PAM sequence: AGG
gaactcttgtaagtttccct

SEQ ID NO: 96160 - DNA, 20 bp, Artificial Sequence
  Description of Artificial Sequence: Synthetic oligonucleotide
  Target: LAMA2; (-) strand; PAM type: NRG; PAM sequence: TAG
ggaactcttgtaagtttccc

SEQ ID NO: 96161 - DNA, 20 bp, Artificial Sequence
  Description of Artificial Sequence: Synthetic oligonucleotide
  Target: LAMA2; (-) strand; PAM type: NRG; PAM sequence: AAG
ggataaaacggaactcttgt

SEQ ID NO: 96162 - DNA, 20 bp, Artificial Sequence
  Description of Artificial Sequence: Synthetic oligonucleotide
  Target: LAMA2; (-) strand; PAM type: NRG; PAM sequence: CGG
atagcattctgtggataaaa

SEQ ID NO: 96163 - DNA, 20 bp, Artificial Sequence
  Description of Artificial Sequence: Synthetic oligonucleotide
  Target: LAMA2; (-) strand; PAM type: NRG; PAM sequence: TGG
ggctatatcatagcattctg

SEQ ID NO: 96164 - DNA, 20 bp, Artificial Sequence
  Description of Artificial Sequence: Synthetic oligonucleotide
  Target: LAMA2; (-) strand; PAM type: NRG; PAM sequence: TAG
attagagtttggctatatca

SEQ ID NO: 96165 - DNA, 20 bp, Artificial Sequence
  Description of Artificial Sequence: Synthetic oligonucleotide
  Target: LAMA2; (-) strand; PAM type: NRG; PAM sequence: TGG
tcaagagtttaattagagtt

SEQ ID NO: 96166 - DNA, 20 bp, Artificial Sequence
  Description of Artificial Sequence: Synthetic oligonucleotide
  Target: LAMA2; (-) strand; PAM type: NRG; PAM sequence: GAG
caatttcaagagtttaatta

SEQ ID NO: 96167 - DNA, 20 bp, Artificial Sequence
  Description of Artificial Sequence: Synthetic oligonucleotide
  Target: LAMA2; (-) strand; PAM type: NRG; PAM sequence: TAG
ttcaatttcaagagtttaat

SEQ ID NO: 96168 - DNA, 20 bp, Artificial Sequence
  Description of Artificial Sequence: Synthetic oligonucleotide
  Target: LAMA2; (-) strand; PAM type: NRG; PAM sequence: GAG
ggtatcaacttcaatttcaa

SEQ ID NO: 96169 - DNA, 20 bp, Artificial Sequence
  Description of Artificial Sequence: Synthetic oligonucleotide
  Target: LAMA2; (-) strand; PAM type: NRG; PAM sequence: AAG
gaggtatcaacttcaatttc

SEQ ID NO: 96170 - DNA, 20 bp, Artificial Sequence
  Description of Artificial Sequence: Synthetic oligonucleotide
  Target: LAMA2; (-) strand; PAM type: NRG; PAM sequence: AGG
tgatttatatcttgaacatg

SEQ ID NO: 96171 - DNA, 20 bp, Artificial Sequence
  Description of Artificial Sequence: Synthetic oligonucleotide
  Target: LAMA2; (-) strand; PAM type: NRG; PAM sequence: GAG
ctgatttatatcttgaacat

SEQ ID NO: 96172 - DNA, 20 bp, Artificial Sequence
  Description of Artificial Sequence: Synthetic oligonucleotide
  Target: LAMA2; (-) strand; PAM type: NRG; PAM sequence: TGG
actacgttttcatagaaact

SEQ ID NO: 96173 - DNA, 20 bp, Artificial Sequence
  Description of Artificial Sequence: Synthetic oligonucleotide
  Target: LAMA2; (-) strand; PAM type: NRG; PAM sequence: TAG
aacatataactacgttttca

SEQ ID NO: 96174 - DNA, 20 bp, Artificial Sequence
  Description of Artificial Sequence: Synthetic oligonucleotide
  Target: LAMA2; (-) strand; PAM type: NRG; PAM sequence: TAG
ctaatgatcagtaaaaatga

SEQ ID NO: 96175 - DNA, 20 bp, Artificial Sequence
  Description of Artificial Sequence: Synthetic oligonucleotide
  Target: LAMA2; (-) strand; PAM type: NRG; PAM sequence: CAG
cagagtaattatctaatgat

SEQ ID NO: 96176 - DNA, 20 bp, Artificial Sequence
  Description of Artificial Sequence: Synthetic oligonucleotide
  Target: LAMA2; (-) strand; PAM type: NRG; PAM sequence: GAG
tcagtcaactttagtcaaca

SEQ ID NO: 96177 - DNA, 20 bp, Artificial Sequence
  Description of Artificial Sequence: Synthetic oligonucleotide
  Target: LAMA2; (-) strand; PAM type: NRG; PAM sequence: CAG
attcagtcaactttagtcaa

SEQ ID NO: 96178 - DNA, 20 bp, Artificial Sequence
  Description of Artificial Sequence: Synthetic oligonucleotide
  Target: LAMA2; (-) strand; PAM type: NRG; PAM sequence: TAG
tcaaaaaattcagtcaactt

SEQ ID NO: 96179 - DNA, 20 bp, Artificial Sequence
  Description of Artificial Sequence: Synthetic oligonucleotide
  Target: LAMA2; (-) strand; PAM type: NRG; PAM sequence: CAG
tttaaagtaatcaaaaaatt

SEQ ID NO: 96180 - DNA, 20 bp, Artificial Sequence
  Description of Artificial Sequence: Synthetic oligonucleotide
  Target: LAMA2; (-) strand; PAM type: NRG; PAM sequence: AAG
gacttttgatggtgatttta

SEQ ID NO: 96181 - DNA, 20 bp, Artificial Sequence
  Description of Artificial Sequence: Synthetic oligonucleotide
  Target: LAMA2; (-) strand; PAM type: NRG; PAM sequence: TGG
tcagaagtctagacttttga

SEQ ID NO: 96182 - DNA, 20 bp, Artificial Sequence
  Description of Artificial Sequence: Synthetic oligonucleotide
  Target: LAMA2; (-) strand; PAM type: NRG; PAM sequence: TAG
tatttctcgattcagaagtc

SEQ ID NO: 96183 - DNA, 20 bp, Artificial Sequence
  Description of Artificial Sequence: Synthetic oligonucleotide
  Target: LAMA2; (-) strand; PAM type: NRG; PAM sequence: AAG
tgaagtatttctcgattcag

SEQ ID NO: 96184 - DNA, 20 bp, Artificial Sequence
  Description of Artificial Sequence: Synthetic oligonucleotide
  Target: LAMA2; (-) strand; PAM type: NRG; PAM sequence: CAG
tggtgaagtatttctcgatt

SEQ ID NO: 96185 - DNA, 20 bp, Artificial Sequence
  Description of Artificial Sequence: Synthetic oligonucleotide
  Target: LAMA2; (-) strand; PAM type: NRG; PAM sequence: AAG
tgtaattcttcataatggtg

SEQ ID NO: 96186 - DNA, 20 bp, Artificial Sequence
  Description of Artificial Sequence: Synthetic oligonucleotide
  Target: LAMA2; (-) strand; PAM type: NRG; PAM sequence: TGG
ttttttgtaattcttcataa

SEQ ID NO: 96187 - DNA, 20 bp, Artificial Sequence
  Description of Artificial Sequence: Synthetic oligonucleotide
  Target: LAMA2; (-) strand; PAM type: NRG; PAM sequence: GAG
ttgtctgatacaggctctat

SEQ ID NO: 96188 - DNA, 20 bp, Artificial Sequence
  Description of Artificial Sequence: Synthetic oligonucleotide
  Target: LAMA2; (-) strand; PAM type: NRG; PAM sequence: AGG
atgcaagaattgtctgatac

SEQ ID NO: 96189 - DNA, 20 bp, Artificial Sequence
  Description of Artificial Sequence: Synthetic oligonucleotide
  Target: LAMA2; (-) strand; PAM type: NRG; PAM sequence: CAG
aatgcaagaattgtctgata

SEQ ID NO: 96190 - DNA, 20 bp, Artificial Sequence
  Description of Artificial Sequence: Synthetic oligonucleotide
  Target: LAMA2; (-) strand; PAM type: NRG; PAM sequence: AAG
gtatttctttatagcaatgc

SEQ ID NO: 96191 - DNA, 20 bp, Artificial Sequence
  Description of Artificial Sequence: Synthetic oligonucleotide
  Target: LAMA2; (-) strand; PAM type: NRG; PAM sequence: TAG
cagtctcaggtatttcttta

SEQ ID NO: 96192 - DNA, 20 bp, Artificial Sequence
  Description of Artificial Sequence: Synthetic oligonucleotide
  Target: LAMA2; (-) strand; PAM type: NRG; PAM sequence: AGG
gttttcttataatcagtctc

SEQ ID NO: 96193 - DNA, 20 bp, Artificial Sequence
  Description of Artificial Sequence: Synthetic oligonucleotide
  Target: LAMA2; (-) strand; PAM type: NRG; PAM sequence: CAG
agttttcttataatcagtct

SEQ ID NO: 96194 - DNA, 20 bp, Artificial Sequence
  Description of Artificial Sequence: Synthetic oligonucleotide
  Target: LAMA2; (-) strand; PAM type: NRG; PAM sequence: CAG
taaaccagttttcttataat

SEQ ID NO: 96195 - DNA, 20 bp, Artificial Sequence
  Description of Artificial Sequence: Synthetic oligonucleotide
  Target: LAMA2; (-) strand; PAM type: NRG; PAM sequence: CAG
gaactgtgagcccattaaac

SEQ ID NO: 96196 - DNA, 20 bp, Artificial Sequence
  Description of Artificial Sequence: Synthetic oligonucleotide
  Target: LAMA2; (-) strand; PAM type: NRG; PAM sequence: GAG
tgtacaccctccagaactgt

SEQ ID NO: 96197 - DNA, 20 bp, Artificial Sequence
  Description of Artificial Sequence: Synthetic oligonucleotide
  Target: LAMA2; (-) strand; PAM type: NRG; PAM sequence: CAG
tatgcttcctgtacaccctc

SEQ ID NO: 96198 - DNA, 20 bp, Artificial Sequence
  Description of Artificial Sequence: Synthetic oligonucleotide
  Target: LAMA2; (-) strand; PAM type: NRG; PAM sequence: CAG
cctgaggccttcaccagaaa

SEQ ID NO: 96199 - DNA, 20 bp, Artificial Sequence
  Description of Artificial Sequence: Synthetic oligonucleotide
  Target: LAMA2; (-) strand; PAM type: NRG; PAM sequence: CAG
aagcttcctgaggccttcac

SEQ ID NO: 96200 - DNA, 20 bp, Artificial Sequence
  Description of Artificial Sequence: Synthetic oligonucleotide
  Target: LAMA2; (-) strand; PAM type: NRG; PAM sequence: AGG
tcatgactggaagcttcctg

SEQ ID NO: 96201 - DNA, 20 bp, Artificial Sequence
  Description of Artificial Sequence: Synthetic oligonucleotide
  Target: LAMA2; (-) strand; PAM type: NRG; PAM sequence: GAG
atcatgactggaagcttcct

SEQ ID NO: 96202 - DNA, 20 bp, Artificial Sequence
  Description of Artificial Sequence: Synthetic oligonucleotide
  Target: LAMA2; (-) strand; PAM type: NRG; PAM sequence: AAG
tggccttccatcatgactgg

SEQ ID NO: 96203 - DNA, 20 bp, Artificial Sequence
  Description of Artificial Sequence: Synthetic oligonucleotide
  Target: LAMA2; (-) strand; PAM type: NRG; PAM sequence: TGG
gcttggccttccatcatgac

SEQ ID NO: 96204 - DNA, 20 bp, Artificial Sequence
  Description of Artificial Sequence: Synthetic oligonucleotide
  Target: LAMA2; (-) strand; PAM type: NRG; PAM sequence: TGG
tgtggaagtctgtccttgct

SEQ ID NO: 96205 - DNA, 20 bp, Artificial Sequence
  Description of Artificial Sequence: Synthetic oligonucleotide
  Target: LAMA2; (-) strand; PAM type: NRG; PAM sequence: AAG
ctcctgatcctgccatgtgg

SEQ ID NO: 96206 - DNA, 20 bp, Artificial Sequence
  Description of Artificial Sequence: Synthetic oligonucleotide
  Target: LAMA2; (-) strand; PAM type: NRG; PAM sequence: TGG
tttctcctgatcctgccatg

SEQ ID NO: 96207 - DNA, 20 bp, Artificial Sequence
  Description of Artificial Sequence: Synthetic oligonucleotide
  Target: LAMA2; (-) strand; PAM type: NRG; PAM sequence: TGG
gatctggttgtttaaatgca

SEQ ID NO: 96208 - DNA, 20 bp, Artificial Sequence
  Description of Artificial Sequence: Synthetic oligonucleotide
  Target: LAMA2; (-) strand; PAM type: NRG; PAM sequence: TGG
gagttcctaccggcaagatc

SEQ ID NO: 96209 - DNA, 20 bp, Artificial Sequence
  Description of Artificial Sequence: Synthetic oligonucleotide
  Target: LAMA2; (-) strand; PAM type: NRG; PAM sequence: AAG
gaccatgagttcctaccggc

SEQ ID NO: 96210 - DNA, 20 bp, Artificial Sequence
  Description of Artificial Sequence: Synthetic oligonucleotide
  Target: LAMA2; (-) strand; PAM type: NRG; PAM sequence: CGG
ttgtgaccatgagttcctac

SEQ ID NO: 96211 - DNA, 20 bp, Artificial Sequence
  Description of Artificial Sequence: Synthetic oligonucleotide
  Target: LAMA2; (-) strand; PAM type: NRG; PAM sequence: GAG
ggtgctgtccttgtgaccat

SEQ ID NO: 96212 - DNA, 20 bp, Artificial Sequence
  Description of Artificial Sequence: Synthetic oligonucleotide
  Target: LAMA2; (-) strand; PAM type: NRG; PAM sequence: TGG
ggggctgatccctcagggct

SEQ ID NO: 96213 - DNA, 20 bp, Artificial Sequence
  Description of Artificial Sequence: Synthetic oligonucleotide
  Target: LAMA2; (-) strand; PAM type: NRG; PAM sequence: GGG
tcatgggggctgatccctca

SEQ ID NO: 96214 - DNA, 20 bp, Artificial Sequence
  Description of Artificial Sequence: Synthetic oligonucleotide
  Target: LAMA2; (-) strand; PAM type: NRG; PAM sequence: AGG
atcatgggggctgatccctc

SEQ ID NO: 96215 - DNA, 20 bp, Artificial Sequence
  Description of Artificial Sequence: Synthetic oligonucleotide
  Target: LAMA2; (-) strand; PAM type: NRG; PAM sequence: CAG
gatcatgggggctgatccct

SEQ ID NO: 96216 - DNA, 20 bp, Artificial Sequence
  Description of Artificial Sequence: Synthetic oligonucleotide
  Target: LAMA2; (-) strand; PAM type: NRG; PAM sequence: GGG
gggaggtgtttggatcatgg

SEQ ID NO: 96217 - DNA, 20 bp, Artificial Sequence
  Description of Artificial Sequence: Synthetic oligonucleotide
  Target: LAMA2; (-) strand; PAM type: NRG; PAM sequence: GGG
tgggaggtgtttggatcatg

SEQ ID NO: 96218 - DNA, 20 bp, Artificial Sequence
  Description of Artificial Sequence: Synthetic oligonucleotide
  Target: LAMA2; (-) strand; PAM type: NRG; PAM sequence: GGG
gtgggaggtgtttggatcat

SEQ ID NO: 96219 - DNA, 20 bp, Artificial Sequence
  Description of Artificial Sequence: Synthetic oligonucleotide
  Target: LAMA2; (-) strand; PAM type: NRG; PAM sequence: TGG
ggtgggaggtgtttggatca

SEQ ID NO: 96220 - DNA, 20 bp, Artificial Sequence
  Description of Artificial Sequence: Synthetic oligonucleotide
  Target: LAMA2; (-) strand; PAM type: NRG; PAM sequence: TGG
ggagcctggtgggaggtgtt

SEQ ID NO: 96221 - DNA, 20 bp, Artificial Sequence
  Description of Artificial Sequence: Synthetic oligonucleotide
  Target: LAMA2; (-) strand; PAM type: NRG; PAM sequence: AGG
tggaggtggagcctggtggg

SEQ ID NO: 96222 - DNA, 20 bp, Artificial Sequence
  Description of Artificial Sequence: Synthetic oligonucleotide
  Target: LAMA2; (-) strand; PAM type: NRG; PAM sequence: GAG
ttggaggtggagcctggtgg

SEQ ID NO: 96223 - DNA, 20 bp, Artificial Sequence
  Description of Artificial Sequence: Synthetic oligonucleotide
  Target: LAMA2; (-) strand; PAM type: NRG; PAM sequence: GGG
tgttggaggtggagcctggt

SEQ ID NO: 96224 - DNA, 20 bp, Artificial Sequence
  Description of Artificial Sequence: Synthetic oligonucleotide
  Target: LAMA2; (-) strand; PAM type: NRG; PAM sequence: TGG
gtgttggaggtggagcctgg

SEQ ID NO: 96225 - DNA, 20 bp, Artificial Sequence
  Description of Artificial Sequence: Synthetic oligonucleotide
  Target: LAMA2; (-) strand; PAM type: NRG; PAM sequence: TGG
ccagtgttggaggtggagcc

SEQ ID NO: 96226 - DNA, 20 bp, Artificial Sequence
  Description of Artificial Sequence: Synthetic oligonucleotide
  Target: LAMA2; (-) strand; PAM type: NRG; PAM sequence: GAG
aatccccagtgttggaggtg

SEQ ID NO: 96227 - DNA, 20 bp, Artificial Sequence
  Description of Artificial Sequence: Synthetic oligonucleotide
  Target: LAMA2; (-) strand; PAM type: NRG; PAM sequence: TGG
ataatccccagtgttggagg

SEQ ID NO: 96228 - DNA, 20 bp, Artificial Sequence
  Description of Artificial Sequence: Synthetic oligonucleotide
  Target: LAMA2; (-) strand; PAM type: NRG; PAM sequence: AGG
aatataatccccagtgttgg

SEQ ID NO: 96229 - DNA, 20 bp, Artificial Sequence
  Description of Artificial Sequence: Synthetic oligonucleotide
  Target: LAMA2; (-) strand; PAM type: NRG; PAM sequence: GAG
aaatataatccccagtgttg

SEQ ID NO: 96230 - DNA, 20 bp, Artificial Sequence
  Description of Artificial Sequence: Synthetic oligonucleotide
  Target: LAMA2; (-) strand; PAM type: NRG; PAM sequence: TGG
taaaatataatccccagtgt

SEQ ID NO: 96231 - DNA, 20 bp, Artificial Sequence
  Description of Artificial Sequence: Synthetic oligonucleotide
  Target: LAMA2; (-) strand; PAM type: NRG; PAM sequence: CAG
tcgtgttaaaatataatccc

SEQ ID NO: 96232 - DNA, 20 bp, Artificial Sequence
  Description of Artificial Sequence: Synthetic oligonucleotide
  Target: LAMA2; (-) strand; PAM type: NRG; PAM sequence: TGG
tgagaggtctctgatacagt

SEQ ID NO: 96233 - DNA, 20 bp, Artificial Sequence
  Description of Artificial Sequence: Synthetic oligonucleotide
  Target: LAMA2; (-) strand; PAM type: NRG; PAM sequence: CAG
tacttgagaggtctctgata

SEQ ID NO: 96234 - DNA, 20 bp, Artificial Sequence
  Description of Artificial Sequence: Synthetic oligonucleotide
  Target: LAMA2; (-) strand; PAM type: NRG; PAM sequence: AGG
tcataaataaattacttgag

SEQ ID NO: 96235 - DNA, 20 bp, Artificial Sequence
  Description of Artificial Sequence: Synthetic oligonucleotide
  Target: LAMA2; (-) strand; PAM type: NRG; PAM sequence: GAG
ctcataaataaattacttga

SEQ ID NO: 96236 - DNA, 20 bp, Artificial Sequence
  Description of Artificial Sequence: Synthetic oligonucleotide
  Target: LAMA2; (-) strand; PAM type: NRG; PAM sequence: GAG
tgctcataaataaattactt

SEQ ID NO: 96237 - DNA, 20 bp, Artificial Sequence
  Description of Artificial Sequence: Synthetic oligonucleotide
  Target: LAMA2; (-) strand; PAM type: NRG; PAM sequence: CAG
agtcatcccagttttaaaaa

SEQ ID NO: 96238 - DNA, 20 bp, Artificial Sequence
  Description of Artificial Sequence: Synthetic oligonucleotide
  Target: LAMA2; (-) strand; PAM type: NRG; PAM sequence: CAG
catttaaattaaagtcatcc

SEQ ID NO: 96239 - DNA, 20 bp, Artificial Sequence
  Description of Artificial Sequence: Synthetic oligonucleotide
  Target: LAMA2; (-) strand; PAM type: NRG; PAM sequence: AAG
atcactgttcatttaaatta

SEQ ID NO: 96240 - DNA, 20 bp, Artificial Sequence
  Description of Artificial Sequence: Synthetic oligonucleotide
  Target: LAMA2; (-) strand; PAM type: NRG; PAM sequence: AAG
tccatgacacaaagaaaggg

SEQ ID NO: 96241 - DNA, 20 bp, Artificial Sequence
  Description of Artificial Sequence: Synthetic oligonucleotide
  Target: LAMA2; (-) strand; PAM type: NRG; PAM sequence: GGG
ttatccatgacacaaagaaa

SEQ ID NO: 96242 - DNA, 20 bp, Artificial Sequence
  Description of Artificial Sequence: Synthetic oligonucleotide
  Target: LAMA2; (-) strand; PAM type: NRG; PAM sequence: AGG
attatccatgacacaaagaa

SEQ ID NO: 96243 - DNA, 20 bp, Artificial Sequence
  Description of Artificial Sequence: Synthetic oligonucleotide
  Target: LAMA2; (-) strand; PAM type: NRG; PAM sequence: AAG
aattatccatgacacaaaga

SEQ ID NO: 96244 - DNA, 20 bp, Artificial Sequence
  Description of Artificial Sequence: Synthetic oligonucleotide
  Target: LAMA2; (-) strand; PAM type: NRG; PAM sequence: AAG
gagaaattatccatgacaca

SEQ ID NO: 96245 - DNA, 20 bp, Artificial Sequence
  Description of Artificial Sequence: Synthetic oligonucleotide
  Target: LAMA2; (-) strand; PAM type: NRG; PAM sequence: GAG
tatgctcacaccttagcaca

SEQ ID NO: 96246 - DNA, 20 bp, Artificial Sequence
  Description of Artificial Sequence: Synthetic oligonucleotide
  Target: LAMA2; (-) strand; PAM type: NRG; PAM sequence: CAG
tgtatgctcacaccttagca

SEQ ID NO: 96247 - DNA, 20 bp, Artificial Sequence
  Description of Artificial Sequence: Synthetic oligonucleotide
  Target: LAMA2; (-) strand; PAM type: NRG; PAM sequence: TAG
tgatgtgtatgctcacacct

SEQ ID NO: 96248 - DNA, 20 bp, Artificial Sequence
  Description of Artificial Sequence: Synthetic oligonucleotide
  Target: LAMA2; (-) strand; PAM type: NRG; PAM sequence: CAG
ttcgtattctacttcaataa

SEQ ID NO: 96249 - DNA, 20 bp, Artificial Sequence
  Description of Artificial Sequence: Synthetic oligonucleotide
  Target: LAMA2; (-) strand; PAM type: NRG; PAM sequence: AGG
ccctgctagtgaaagaaggc

SEQ ID NO: 96250 - DNA, 20 bp, Artificial Sequence
  Description of Artificial Sequence: Synthetic oligonucleotide
  Target: LAMA2; (-) strand; PAM type: NRG; PAM sequence: CAG
cccctgctagtgaaagaagg

SEQ ID NO: 96251 - DNA, 20 bp, Artificial Sequence
  Description of Artificial Sequence: Synthetic oligonucleotide
  Target: LAMA2; (-) strand; PAM type: NRG; PAM sequence: AGG
attcccctgctagtgaaaga

SEQ ID NO: 96252 - DNA, 20 bp, Artificial Sequence
  Description of Artificial Sequence: Synthetic oligonucleotide
  Target: LAMA2; (-) strand; PAM type: NRG; PAM sequence: AAG
tattcccctgctagtgaaag

SEQ ID NO: 96253 - DNA, 20 bp, Artificial Sequence
  Description of Artificial Sequence: Synthetic oligonucleotide
  Target: LAMA2; (-) strand; PAM type: NRG; PAM sequence: AAG
cactattcccctgctagtga

SEQ ID NO: 96254 - DNA, 20 bp, Artificial Sequence
  Description of Artificial Sequence: Synthetic oligonucleotide
  Target: LAMA2; (-) strand; PAM type: NRG; PAM sequence: TAG
tttactcactattcccctgc

SEQ ID NO: 96255 - DNA, 20 bp, Artificial Sequence
  Description of Artificial Sequence: Synthetic oligonucleotide
  Target: LAMA2; (-) strand; PAM type: NRG; PAM sequence: GAG
gtaatatttgtttagcaata

SEQ ID NO: 96256 - DNA, 20 bp, Artificial Sequence
  Description of Artificial Sequence: Synthetic oligonucleotide
  Target: LAMA2; (-) strand; PAM type: NRG; PAM sequence: TAG
aggtaatatttgtttagcaa

SEQ ID NO: 96257 - DNA, 20 bp, Artificial Sequence
  Description of Artificial Sequence: Synthetic oligonucleotide
  Target: LAMA2; (-) strand; PAM type: NRG; PAM sequence: TAG
aaatagaggtaatatttgtt

SEQ ID NO: 96258 - DNA, 20 bp, Artificial Sequence
  Description of Artificial Sequence: Synthetic oligonucleotide
  Target: LAMA2; (-) strand; PAM type: NRG; PAM sequence: AGG
caaatttaaatcataaatag

SEQ ID NO: 96259 - DNA, 20 bp, Artificial Sequence
  Description of Artificial Sequence: Synthetic oligonucleotide
  Target: LAMA2; (-) strand; PAM type: NRG; PAM sequence: GAG
tcaaatttaaatcataaata

SEQ ID NO: 96260 - DNA, 20 bp, Artificial Sequence
  Description of Artificial Sequence: Synthetic oligonucleotide
  Target: LAMA2; (-) strand; PAM type: NRG; PAM sequence: TAG
catcaaatttaaatcataaa

SEQ ID NO: 96261 - DNA, 20 bp, Artificial Sequence
  Description of Artificial Sequence: Synthetic oligonucleotide
  Target: LAMA2; (-) strand; PAM type: NRG; PAM sequence: TGG
catgtgtttagatagcacta

SEQ ID NO: 96262 - DNA, 20 bp, Artificial Sequence
  Description of Artificial Sequence: Synthetic oligonucleotide
  Target: LAMA2; (-) strand; PAM type: NRG; PAM sequence: TAG
ccattaaccatgtgtttaga

SEQ ID NO: 96263 - DNA, 20 bp, Artificial Sequence
  Description of Artificial Sequence: Synthetic oligonucleotide
  Target: LAMA2; (-) strand; PAM type: NRG; PAM sequence: TAG
cagaccattaaccatgtgtt

SEQ ID NO: 96264 - DNA, 20 bp, Artificial Sequence
  Description of Artificial Sequence: Synthetic oligonucleotide
  Target: LAMA2; (-) strand; PAM type: NRG; PAM sequence: CAG
agttatagtggagaataaac

SEQ ID NO: 96265 - DNA, 20 bp, Artificial Sequence
  Description of Artificial Sequence: Synthetic oligonucleotide
  Target: LAMA2; (-) strand; PAM type: NRG; PAM sequence: GAG
ttattcaggaagttatagtg

SEQ ID NO: 96266 - DNA, 20 bp, Artificial Sequence
  Description of Artificial Sequence: Synthetic oligonucleotide
  Target: LAMA2; (-) strand; PAM type: NRG; PAM sequence: TGG
gtttattcaggaagttatag

SEQ ID NO: 96267 - DNA, 20 bp, Artificial Sequence
  Description of Artificial Sequence: Synthetic oligonucleotide
  Target: LAMA2; (-) strand; PAM type: NRG; PAM sequence: TAG
gaagtttattcaggaagtta

SEQ ID NO: 96268 - DNA, 20 bp, Artificial Sequence
  Description of Artificial Sequence: Synthetic oligonucleotide
  Target: LAMA2; (-) strand; PAM type: NRG; PAM sequence: AAG
aatcaggaagtttattcagg

SEQ ID NO: 96269 - DNA, 20 bp, Artificial Sequence
  Description of Artificial Sequence: Synthetic oligonucleotide
  Target: LAMA2; (-) strand; PAM type: NRG; PAM sequence: AGG
ccaaatcaggaagtttattc

SEQ ID NO: 96270 - DNA, 20 bp, Artificial Sequence
  Description of Artificial Sequence: Synthetic oligonucleotide
  Target: LAMA2; (-) strand; PAM type: NRG; PAM sequence: CAG
tccaaatcaggaagtttatt

SEQ ID NO: 96271 - DNA, 20 bp, Artificial Sequence
  Description of Artificial Sequence: Synthetic oligonucleotide
  Target: LAMA2; (-) strand; PAM type: NRG; PAM sequence: AAG
tgggacctttccaaatcagg

SEQ ID NO: 96272 - DNA, 20 bp, Artificial Sequence
  Description of Artificial Sequence: Synthetic oligonucleotide
  Target: LAMA2; (-) strand; PAM type: NRG; PAM sequence: AGG
cattgggacctttccaaatc

SEQ ID NO: 96273 - DNA, 20 bp, Artificial Sequence
  Description of Artificial Sequence: Synthetic oligonucleotide
  Target: LAMA2; (-) strand; PAM type: NRG; PAM sequence: CAG
acattgggacctttccaaat

SEQ ID NO: 96274 - DNA, 20 bp, Artificial Sequence
  Description of Artificial Sequence: Synthetic oligonucleotide
  Target: LAMA2; (-) strand; PAM type: NRG; PAM sequence: GGG
tgacagtacaaatagacatt

SEQ ID NO: 96275 - DNA, 20 bp, Artificial Sequence
  Description of Artificial Sequence: Synthetic oligonucleotide
  Target: LAMA2; (-) strand; PAM type: NRG; PAM sequence: TGG
ttgacagtacaaatagacat

SEQ ID NO: 96276 - DNA, 20 bp, Artificial Sequence
  Description of Artificial Sequence: Synthetic oligonucleotide
  Target: LAMA2; (-) strand; PAM type: NRG; PAM sequence: TAG
aaaattgttgacagtacaaa

SEQ ID NO: 96277 - DNA, 20 bp, Artificial Sequence
  Description of Artificial Sequence: Synthetic oligonucleotide
  Target: LAMA2; (-) strand; PAM type: NRG; PAM sequence: CAG
aatttttacaaaattgttga

SEQ ID NO: 96278 - DNA, 20 bp, Artificial Sequence
  Description of Artificial Sequence: Synthetic oligonucleotide
  Target: LAMA2; (-) strand; PAM type: NRG; PAM sequence: AAG
caaataattgtataaaacca

SEQ ID NO: 96279 - DNA, 20 bp, Artificial Sequence
  Description of Artificial Sequence: Synthetic oligonucleotide
  Target: LAMA2; (-) strand; PAM type: NRG; PAM sequence: AAG
ttatctttaactaaaatatg

SEQ ID NO: 96280 - DNA, 20 bp, Artificial Sequence
  Description of Artificial Sequence: Synthetic oligonucleotide
  Target: LAMA2; (-) strand; PAM type: NRG; PAM sequence: AGG
taaatttaaattatcctgtg

SEQ ID NO: 96281 - DNA, 20 bp, Artificial Sequence
  Description of Artificial Sequence: Synthetic oligonucleotide
  Target: LAMA2; (-) strand; PAM type: NRG; PAM sequence: GAG
ataaatttaaattatcctgt

SEQ ID NO: 96282 - DNA, 20 bp, Artificial Sequence
  Description of Artificial Sequence: Synthetic oligonucleotide
  Target: LAMA2; (-) strand; PAM type: NRG; PAM sequence: TAG
aggccataatcgggtattaa

SEQ ID NO: 96283 - DNA, 20 bp, Artificial Sequence
  Description of Artificial Sequence: Synthetic oligonucleotide
  Target: LAMA2; (-) strand; PAM type: NRG; PAM sequence: GGG
aaacaaaataggccataatc

SEQ ID NO: 96284 - DNA, 20 bp, Artificial Sequence
  Description of Artificial Sequence: Synthetic oligonucleotide
  Target: LAMA2; (-) strand; PAM type: NRG; PAM sequence: CGG
taaacaaaataggccataat

SEQ ID NO: 96285 - DNA, 20 bp, Artificial Sequence
  Description of Artificial Sequence: Synthetic oligonucleotide
  Target: LAMA2; (-) strand; PAM type: NRG; PAM sequence: AGG
ttaactcacttaaacaaaat

SEQ ID NO: 96286 - DNA, 20 bp, Artificial Sequence
  Description of Artificial Sequence: Synthetic oligonucleotide
  Target: LAMA2; (-) strand; PAM type: NRG; PAM sequence: TAG
attaactcacttaaacaaaa

SEQ ID NO: 96287 - DNA, 20 bp, Artificial Sequence
  Description of Artificial Sequence: Synthetic oligonucleotide
  Target: LAMA2; (-) strand; PAM type: NRG; PAM sequence: GAG
ttttctttgccaactgcttt

SEQ ID NO: 96288 - DNA, 20 bp, Artificial Sequence
  Description of Artificial Sequence: Synthetic oligonucleotide
  Target: LAMA2; (-) strand; PAM type: NRG; PAM sequence: TAG
gtcttacatattcacttaca

SEQ ID NO: 96289 - DNA, 20 bp, Artificial Sequence
  Description of Artificial Sequence: Synthetic oligonucleotide
  Target: LAMA2; (-) strand; PAM type: NRG; PAM sequence: AGG
tagaatcaaatttcaaaatt

SEQ ID NO: 96290 - DNA, 20 bp, Artificial Sequence
  Description of Artificial Sequence: Synthetic oligonucleotide
  Target: LAMA2; (-) strand; PAM type: NRG; PAM sequence: TAG
gtagaatcaaatttcaaaat

SEQ ID NO: 96291 - DNA, 20 bp, Artificial Sequence
  Description of Artificial Sequence: Synthetic oligonucleotide
  Target: LAMA2; (-) strand; PAM type: NRG; PAM sequence: TAG
aacttaaagaacatcagatg

SEQ ID NO: 96292 - DNA, 20 bp, Artificial Sequence
  Description of Artificial Sequence: Synthetic oligonucleotide
  Target: LAMA2; (-) strand; PAM type: NRG; PAM sequence: CAG
ccaagtaacttaaagaacat

SEQ ID NO: 96293 - DNA, 20 bp, Artificial Sequence
  Description of Artificial Sequence: Synthetic oligonucleotide
  Target: LAMA2; (-) strand; PAM type: NRG; PAM sequence: AAG
cctcaccgccaagtaactta

SEQ ID NO: 96294 - DNA, 20 bp, Artificial Sequence
  Description of Artificial Sequence: Synthetic oligonucleotide
  Target: LAMA2; (-) strand; PAM type: NRG; PAM sequence: AAG
aacccactaacctcaccgcc

SEQ ID NO: 96295 - DNA, 20 bp, Artificial Sequence
  Description of Artificial Sequence: Synthetic oligonucleotide
  Target: LAMA2; (-) strand; PAM type: NRG; PAM sequence: TAG
tggacaaagcttccaaggca

SEQ ID NO: 96296 - DNA, 20 bp, Artificial Sequence
  Description of Artificial Sequence: Synthetic oligonucleotide
  Target: LAMA2; (-) strand; PAM type: NRG; PAM sequence: AGG
aaatatggacaaagcttcca

SEQ ID NO: 96297 - DNA, 20 bp, Artificial Sequence
  Description of Artificial Sequence: Synthetic oligonucleotide
  Target: LAMA2; (-) strand; PAM type: NRG; PAM sequence: AAG
taaatatggacaaagcttcc

SEQ ID NO: 96298 - DNA, 20 bp, Artificial Sequence
  Description of Artificial Sequence: Synthetic oligonucleotide
  Target: LAMA2; (-) strand; PAM type: NRG; PAM sequence: AAG
gtatattataaatatggaca

SEQ ID NO: 96299 - DNA, 20 bp, Artificial Sequence
  Description of Artificial Sequence: Synthetic oligonucleotide
  Target: LAMA2; (-) strand; PAM type: NRG; PAM sequence: TGG
ttatttgtatattataaata

SEQ ID NO: 96300 - DNA, 20 bp, Artificial Sequence
  Description of Artificial Sequence: Synthetic oligonucleotide
  Target: LAMA2; (-) strand; PAM type: NRG; PAM sequence: AAG
tagaagatattttaaaccca

SEQ ID NO: 96301 - DNA, 20 bp, Artificial Sequence
  Description of Artificial Sequence: Synthetic oligonucleotide
  Target: LAMA2; (-) strand; PAM type: NRG; PAM sequence: AAG
gcaataagggcggcttctag

SEQ ID NO: 96302 - DNA, 20 bp, Artificial Sequence
  Description of Artificial Sequence: Synthetic oligonucleotide
  Target: LAMA2; (-) strand; PAM type: NRG; PAM sequence: TAG
gctgcaataagggcggcttc

SEQ ID NO: 96303 - DNA, 20 bp, Artificial Sequence
  Description of Artificial Sequence: Synthetic oligonucleotide
  Target: LAMA2; (-) strand; PAM type: NRG; PAM sequence: CGG
tagaaaggctgcaataaggg

SEQ ID NO: 96304 - DNA, 20 bp, Artificial Sequence
  Description of Artificial Sequence: Synthetic oligonucleotide
  Target: LAMA2; (-) strand; PAM type: NRG; PAM sequence: GGG
cagtagaaaggctgcaataa

SEQ ID NO: 96305 - DNA, 20 bp, Artificial Sequence
  Description of Artificial Sequence: Synthetic oligonucleotide
  Target: LAMA2; (-) strand; PAM type: NRG; PAM sequence: AGG
tcagtagaaaggctgcaata

SEQ ID NO: 96306 - DNA, 20 bp, Artificial Sequence
  Description of Artificial Sequence: Synthetic oligonucleotide
  Target: LAMA2; (-) strand; PAM type: NRG; PAM sequence: AAG
atcagtagaaaggctgcaat

SEQ ID NO: 96307 - DNA, 20 bp, Artificial Sequence
  Description of Artificial Sequence: Synthetic oligonucleotide
  Target: LAMA2; (-) strand; PAM type: NRG; PAM sequence: AGG
attattgctaatcagtagaa

SEQ ID NO: 96308 - DNA, 20 bp, Artificial Sequence
  Description of Artificial Sequence: Synthetic oligonucleotide
  Target: LAMA2; (-) strand; PAM type: NRG; PAM sequence: AAG
aattattgctaatcagtaga

SEQ ID NO: 96309 - DNA, 20 bp, Artificial Sequence
  Description of Artificial Sequence: Synthetic oligonucleotide
  Target: LAMA2; (-) strand; PAM type: NRG; PAM sequence: TAG
atctaattattgctaatcag

SEQ ID NO: 96310 - DNA, 20 bp, Artificial Sequence
  Description of Artificial Sequence: Synthetic oligonucleotide
  Target: LAMA2; (-) strand; PAM type: NRG; PAM sequence: CAG
tctatctaattattgctaat

SEQ ID NO: 96311 - DNA, 20 bp, Artificial Sequence
  Description of Artificial Sequence: Synthetic oligonucleotide
  Target: LAMA2; (-) strand; PAM type: NRG; PAM sequence: AAG
tatttcttgtctttataggt

SEQ ID NO: 96312 - DNA, 20 bp, Artificial Sequence
  Description of Artificial Sequence: Synthetic oligonucleotide
  Target: LAMA2; (-) strand; PAM type: NRG; PAM sequence: AGG
gctttatttcttgtctttat

SEQ ID NO: 96313 - DNA, 20 bp, Artificial Sequence
  Description of Artificial Sequence: Synthetic oligonucleotide
  Target: LAMA2; (-) strand; PAM type: NRG; PAM sequence: TAG
agctttatttcttgtcttta

SEQ ID NO: 96314 - DNA, 20 bp, Artificial Sequence
  Description of Artificial Sequence: Synthetic oligonucleotide
  Target: LAMA2; (-) strand; PAM type: NRG; PAM sequence: TAG
aaaaaaatgattatcaggat

SEQ ID NO: 96315 - DNA, 20 bp, Artificial Sequence
  Description of Artificial Sequence: Synthetic oligonucleotide
  Target: LAMA2; (-) strand; PAM type: NRG; PAM sequence: AGG
aaaaaaaaaaaatgattatc

SEQ ID NO: 96316 - DNA, 20 bp, Artificial Sequence
  Description of Artificial Sequence: Synthetic oligonucleotide
  Target: LAMA2; (-) strand; PAM type: NRG; PAM sequence: CAG
aaaaaaaaaaaaatgattat

SEQ ID NO: 96317 - DNA, 20 bp, Artificial Sequence
  Description of Artificial Sequence: Synthetic oligonucleotide
  Target: LAMA2; (-) strand; PAM type: NRG; PAM sequence: GAG
tccagcctgggtgacagagc

SEQ ID NO: 96318 - DNA, 20 bp, Artificial Sequence
  Description of Artificial Sequence: Synthetic oligonucleotide
  Target: LAMA2; (-) strand; PAM type: NRG; PAM sequence: GAG
gcactccagcctgggtgaca

SEQ ID NO: 96319 - DNA, 20 bp, Artificial Sequence
  Description of Artificial Sequence: Synthetic oligonucleotide
  Target: LAMA2; (-) strand; PAM type: NRG; PAM sequence: CAG
ctgcactccagcctgggtga

SEQ ID NO: 96320 - DNA, 20 bp, Artificial Sequence
  Description of Artificial Sequence: Synthetic oligonucleotide
  Target: LAMA2; (-) strand; PAM type: NRG; PAM sequence: GGG
gcgccactgcactccagcct

SEQ ID NO: 96321 - DNA, 20 bp, Artificial Sequence
  Description of Artificial Sequence: Synthetic oligonucleotide
  Target: LAMA2; (-) strand; PAM type: NRG; PAM sequence: TGG
cgcgccactgcactccagcc

SEQ ID NO: 96322 - DNA, 20 bp, Artificial Sequence
  Description of Artificial Sequence: Synthetic oligonucleotide
  Target: LAMA2; (-) strand; PAM type: NRG; PAM sequence: CAG
gagatcgcgccactgcactc

SEQ ID NO: 96323 - DNA, 20 bp, Artificial Sequence
  Description of Artificial Sequence: Synthetic oligonucleotide
  Target: LAMA2; (-) strand; PAM type: NRG; PAM sequence: GAG
ggcggagcttgcagtgagcc

SEQ ID NO: 96324 - DNA, 20 bp, Artificial Sequence
  Description of Artificial Sequence: Synthetic oligonucleotide
  Target: LAMA2; (-) strand; PAM type: NRG; PAM sequence: GAG
cgggaggcggagcttgcagt

SEQ ID NO: 96325 - DNA, 20 bp, Artificial Sequence
  Description of Artificial Sequence: Synthetic oligonucleotide
  Target: LAMA2; (-) strand; PAM type: NRG; PAM sequence: CAG
aacccgggaggcggagcttg

SEQ ID NO: 96326 - DNA, 20 bp, Artificial Sequence
  Description of Artificial Sequence: Synthetic oligonucleotide
  Target: LAMA2; (-) strand; PAM type: NRG; PAM sequence: GAG
tggcgtgaacccgggaggcg

SEQ ID NO: 96327 - DNA, 20 bp, Artificial Sequence
  Description of Artificial Sequence: Synthetic oligonucleotide
  Target: LAMA2; (-) strand; PAM type: NRG; PAM sequence: CGG
aatggcgtgaacccgggagg

SEQ ID NO: 96328 - DNA, 20 bp, Artificial Sequence
  Description of Artificial Sequence: Synthetic oligonucleotide
  Target: LAMA2; (-) strand; PAM type: NRG; PAM sequence: AGG
gagaatggcgtgaacccggg

SEQ ID NO: 96329 - DNA, 20 bp, Artificial Sequence
  Description of Artificial Sequence: Synthetic oligonucleotide
  Target: LAMA2; (-) strand; PAM type: NRG; PAM sequence: GAG
ggagaatggcgtgaacccgg

SEQ ID NO: 96330 - DNA, 20 bp, Artificial Sequence
  Description of Artificial Sequence: Synthetic oligonucleotide
  Target: LAMA2; (-) strand; PAM type: NRG; PAM sequence: GGG
caggagaatggcgtgaaccc

SEQ ID NO: 96331 - DNA, 20 bp, Artificial Sequence
  Description of Artificial Sequence: Synthetic oligonucleotide
  Target: LAMA2; (-) strand; PAM type: NRG; PAM sequence: CGG
gcaggagaatggcgtgaacc

SEQ ID NO: 96332 - DNA, 20 bp, Artificial Sequence
  Description of Artificial Sequence: Synthetic oligonucleotide
  Target: LAMA2; (-) strand; PAM type: NRG; PAM sequence: TGG
gggaggctgaggcaggagaa

SEQ ID NO: 96333 - DNA, 20 bp, Artificial Sequence
  Description of Artificial Sequence: Synthetic oligonucleotide
  Target: LAMA2; (-) strand; PAM type: NRG; PAM sequence: GAG
tactcgggaggctgaggcag

SEQ ID NO: 96334 - DNA, 20 bp, Artificial Sequence
  Description of Artificial Sequence: Synthetic oligonucleotide
  Target: LAMA2; (-) strand; PAM type: NRG; PAM sequence: AGG
gctactcgggaggctgaggc

SEQ ID NO: 96335 - DNA, 20 bp, Artificial Sequence
  Description of Artificial Sequence: Synthetic oligonucleotide
  Target: LAMA2; (-) strand; PAM type: NRG; PAM sequence: CAG
agctactcgggaggctgagg

SEQ ID NO: 96336 - DNA, 20 bp, Artificial Sequence
  Description of Artificial Sequence: Synthetic oligonucleotide
  Target: LAMA2; (-) strand; PAM type: NRG; PAM sequence: AGG
cccagctactcgggaggctg

SEQ ID NO: 96337 - DNA, 20 bp, Artificial Sequence
  Description of Artificial Sequence: Synthetic oligonucleotide
  Target: LAMA2; (-) strand; PAM type: NRG; PAM sequence: GAG
tcccagctactcgggaggct

SEQ ID NO: 96338 - DNA, 20 bp, Artificial Sequence
  Description of Artificial Sequence: Synthetic oligonucleotide
  Target: LAMA2; (-) strand; PAM type: NRG; PAM sequence: AGG
tgtagtcccagctactcggg

SEQ ID NO: 96339 - DNA, 20 bp, Artificial Sequence
  Description of Artificial Sequence: Synthetic oligonucleotide
  Target: LAMA2; (-) strand; PAM type: NRG; PAM sequence: GAG
ctgtagtcccagctactcgg

SEQ ID NO: 96340 - DNA, 20 bp, Artificial Sequence
  Description of Artificial Sequence: Synthetic oligonucleotide
  Target: LAMA2; (-) strand; PAM type: NRG; PAM sequence: GGG
gcctgtagtcccagctactc

SEQ ID NO: 96341 - DNA, 20 bp, Artificial Sequence
  Description of Artificial Sequence: Synthetic oligonucleotide
  Target: LAMA2; (-) strand; PAM type: NRG; PAM sequence: CGG
cgcctgtagtcccagctact

SEQ ID NO: 96342 - DNA, 20 bp, Artificial Sequence
  Description of Artificial Sequence: Synthetic oligonucleotide
  Target: LAMA2; (-) strand; PAM type: NRG; PAM sequence: CAG
gtagcgggcgcctgtagtcc

SEQ ID NO: 96343 - DNA, 20 bp, Artificial Sequence
  Description of Artificial Sequence: Synthetic oligonucleotide
  Target: LAMA2; (-) strand; PAM type: NRG; PAM sequence: TAG
ggcgtggtagcgggcgcctg

SEQ ID NO: 96344 - DNA, 20 bp, Artificial Sequence
  Description of Artificial Sequence: Synthetic oligonucleotide
  Target: LAMA2; (-) strand; PAM type: NRG; PAM sequence: GGG
aattagccgggcgtggtagc

SEQ ID NO: 96345 - DNA, 20 bp, Artificial Sequence
  Description of Artificial Sequence: Synthetic oligonucleotide
  Target: LAMA2; (-) strand; PAM type: NRG; PAM sequence: CGG
aaattagccgggcgtggtag

SEQ ID NO: 96346 - DNA, 20 bp, Artificial Sequence
  Description of Artificial Sequence: Synthetic oligonucleotide
  Target: LAMA2; (-) strand; PAM type: NRG; PAM sequence: TAG
aaaaaattagccgggcgtgg

SEQ ID NO: 96347 - DNA, 20 bp, Artificial Sequence
  Description of Artificial Sequence: Synthetic oligonucleotide
  Target: LAMA2; (-) strand; PAM type: NRG; PAM sequence: TGG
tacaaaaaattagccgggcg

SEQ ID NO: 96348 - DNA, 20 bp, Artificial Sequence
  Description of Artificial Sequence: Synthetic oligonucleotide
  Target: LAMA2; (-) strand; PAM type: NRG; PAM sequence: GGG
aaaaatacaaaaaattagcc

SEQ ID NO: 96349 - DNA, 20 bp, Artificial Sequence
  Description of Artificial Sequence: Synthetic oligonucleotide
  Target: LAMA2; (-) strand; PAM type: NRG; PAM sequence: CGG
taaaaatacaaaaaattagc

SEQ ID NO: 96350 - DNA, 20 bp, Artificial Sequence
  Description of Artificial Sequence: Synthetic oligonucleotide
  Target: LAMA2; (-) strand; PAM type: NRG; PAM sequence: TAG
ctactaaaaatacaaaaaat

SEQ ID NO: 96351 - DNA, 20 bp, Artificial Sequence
  Description of Artificial Sequence: Synthetic oligonucleotide
  Target: LAMA2; (-) strand; PAM type: NRG; PAM sequence: CGG
cgagaccatcctggctaaca

SEQ ID NO: 96352 - DNA, 20 bp, Artificial Sequence
  Description of Artificial Sequence: Synthetic oligonucleotide
  Target: LAMA2; (-) strand; PAM type: NRG; PAM sequence: TGG
tcaggagatcgagaccatcc

SEQ ID NO: 96353 - DNA, 20 bp, Artificial Sequence
  Description of Artificial Sequence: Synthetic oligonucleotide
  Target: LAMA2; (-) strand; PAM type: NRG; PAM sequence: GAG
gatcacgaggtcaggagatc

SEQ ID NO: 96354 - DNA, 20 bp, Artificial Sequence
  Description of Artificial Sequence: Synthetic oligonucleotide
  Target: LAMA2; (-) strand; PAM type: NRG; PAM sequence: GAG
cgggcggatcacgaggtcag

SEQ ID NO: 96355 - DNA, 20 bp, Artificial Sequence
  Description of Artificial Sequence: Synthetic oligonucleotide
  Target: LAMA2; (-) strand; PAM type: NRG; PAM sequence: AGG
ggcgggcggatcacgaggtc

SEQ ID NO: 96356 - DNA, 20 bp, Artificial Sequence
  Description of Artificial Sequence: Synthetic oligonucleotide
  Target: LAMA2; (-) strand; PAM type: NRG; PAM sequence: CAG
aggcgggcggatcacgaggt

SEQ ID NO: 96357 - DNA, 20 bp, Artificial Sequence
  Description of Artificial Sequence: Synthetic oligonucleotide
  Target: LAMA2; (-) strand; PAM type: NRG; PAM sequence: AGG
gccgaggcgggcggatcacg

SEQ ID NO: 96358 - DNA, 20 bp, Artificial Sequence
  Description of Artificial Sequence: Synthetic oligonucleotide
  Target: LAMA2; (-) strand; PAM type: NRG; PAM sequence: GAG
ggccgaggcgggcggatcac

SEQ ID NO: 96359 - DNA, 20 bp, Artificial Sequence
  Description of Artificial Sequence: Synthetic oligonucleotide
  Target: LAMA2; (-) strand; PAM type: NRG; PAM sequence: CGG
ctttgggaggccgaggcggg

SEQ ID NO: 96360 - DNA, 20 bp, Artificial Sequence
  Description of Artificial Sequence: Synthetic oligonucleotide
  Target: LAMA2; (-) strand; PAM type: NRG; PAM sequence: GGG
gcactttgggaggccgaggc

SEQ ID NO: 96361 - DNA, 20 bp, Artificial Sequence
  Description of Artificial Sequence: Synthetic oligonucleotide
  Target: LAMA2; (-) strand; PAM type: NRG; PAM sequence: CGG
agcactttgggaggccgagg

SEQ ID NO: 96362 - DNA, 20 bp, Artificial Sequence
  Description of Artificial Sequence: Synthetic oligonucleotide
  Target: LAMA2; (-) strand; PAM type: NRG; PAM sequence: AGG
cccagcactttgggaggccg

SEQ ID NO: 96363 - DNA, 20 bp, Artificial Sequence
  Description of Artificial Sequence: Synthetic oligonucleotide
  Target: LAMA2; (-) strand; PAM type: NRG; PAM sequence: GAG
tcccagcactttgggaggcc

SEQ ID NO: 96364 - DNA, 20 bp, Artificial Sequence
  Description of Artificial Sequence: Synthetic oligonucleotide
  Target: LAMA2; (-) strand; PAM type: NRG; PAM sequence: AGG
tgtaatcccagcactttggg

SEQ ID NO: 96365 - DNA, 20 bp, Artificial Sequence
  Description of Artificial Sequence: Synthetic oligonucleotide
  Target: LAMA2; (-) strand; PAM type: NRG; PAM sequence: GAG
ctgtaatcccagcactttgg

SEQ ID NO: 96366 - DNA, 20 bp, Artificial Sequence
  Description of Artificial Sequence: Synthetic oligonucleotide
  Target: LAMA2; (-) strand; PAM type: NRG; PAM sequence: GGG
gcctgtaatcccagcacttt

SEQ ID NO: 96367 - DNA, 20 bp, Artificial Sequence
  Description of Artificial Sequence: Synthetic oligonucleotide
  Target: LAMA2; (-) strand; PAM type: NRG; PAM sequence: TGG
cgcctgtaatcccagcactt

SEQ ID NO: 96368 - DNA, 20 bp, Artificial Sequence
  Description of Artificial Sequence: Synthetic oligonucleotide
  Target: LAMA2; (-) strand; PAM type: NRG; PAM sequence: CAG
gtggctcacgcctgtaatcc

SEQ ID NO: 96369 - DNA, 20 bp, Artificial Sequence
  Description of Artificial Sequence: Synthetic oligonucleotide
  Target: LAMA2; (-) strand; PAM type: NRG; PAM sequence: TGG
tgattatcggccgggcgcgg

SEQ ID NO: 96370 - DNA, 20 bp, Artificial Sequence
  Description of Artificial Sequence: Synthetic oligonucleotide
  Target: LAMA2; (-) strand; PAM type: NRG; PAM sequence: CGG
aaatgattatcggccgggcg

SEQ ID NO: 96371 - DNA, 20 bp, Artificial Sequence
  Description of Artificial Sequence: Synthetic oligonucleotide
  Target: LAMA2; (-) strand; PAM type: NRG; PAM sequence: GGG
tattaaaatgattatcggcc

SEQ ID NO: 96372 - DNA, 20 bp, Artificial Sequence
  Description of Artificial Sequence: Synthetic oligonucleotide
  Target: LAMA2; (-) strand; PAM type: NRG; PAM sequence: CGG
ttattaaaatgattatcggc

SEQ ID NO: 96373 - DNA, 20 bp, Artificial Sequence
  Description of Artificial Sequence: Synthetic oligonucleotide
  Target: LAMA2; (-) strand; PAM type: NRG; PAM sequence: CGG
tctgttattaaaatgattat

SEQ ID NO: 96374 - DNA, 20 bp, Artificial Sequence
  Description of Artificial Sequence: Synthetic oligonucleotide
  Target: LAMA2; (-) strand; PAM type: NRG; PAM sequence: CAG
tatttggttaaaaatcttcc

SEQ ID NO: 96375 - DNA, 20 bp, Artificial Sequence
  Description of Artificial Sequence: Synthetic oligonucleotide
  Target: LAMA2; (-) strand; PAM type: NRG; PAM sequence: TGG
gtctttcatgcccaaatatt

SEQ ID NO: 96376 - DNA, 20 bp, Artificial Sequence
  Description of Artificial Sequence: Synthetic oligonucleotide
  Target: LAMA2; (-) strand; PAM type: NRG; PAM sequence: CAG
attatcatttccaagatcac

SEQ ID NO: 96377 - DNA, 20 bp, Artificial Sequence
  Description of Artificial Sequence: Synthetic oligonucleotide
  Target: LAMA2; (-) strand; PAM type: NRG; PAM sequence: AAG
cttatgagattatcatttcc

SEQ ID NO: 96378 - DNA, 20 bp, Artificial Sequence
  Description of Artificial Sequence: Synthetic oligonucleotide
  Target: LAMA2; (-) strand; PAM type: NRG; PAM sequence: GAG
gctaacagtagtttgcttat

SEQ ID NO: 96379 - DNA, 20 bp, Artificial Sequence
  Description of Artificial Sequence: Synthetic oligonucleotide
  Target: LAMA2; (-) strand; PAM type: NRG; PAM sequence: TAG
gtttctgttcctgctaacag

SEQ ID NO: 96380 - DNA, 20 bp, Artificial Sequence
  Description of Artificial Sequence: Synthetic oligonucleotide
  Target: LAMA2; (-) strand; PAM type: NRG; PAM sequence: CAG
tatgtttctgttcctgctaa

SEQ ID NO: 96381 - DNA, 20 bp, Artificial Sequence
  Description of Artificial Sequence: Synthetic oligonucleotide
  Target: LAMA2; (-) strand; PAM type: NRG; PAM sequence: GAG
cttatatccaccattaccag

SEQ ID NO: 96382 - DNA, 20 bp, Artificial Sequence
  Description of Artificial Sequence: Synthetic oligonucleotide
  Target: LAMA2; (-) strand; PAM type: NRG; PAM sequence: AGG
ttcttatatccaccattacc

SEQ ID NO: 96383 - DNA, 20 bp, Artificial Sequence
  Description of Artificial Sequence: Synthetic oligonucleotide
  Target: LAMA2; (-) strand; PAM type: NRG; PAM sequence: CAG
attcttatatccaccattac

SEQ ID NO: 96384 - DNA, 20 bp, Artificial Sequence
  Description of Artificial Sequence: Synthetic oligonucleotide
  Target: LAMA2; (-) strand; PAM type: NRG; PAM sequence: CAG
tatctcacactttccctcct

SEQ ID NO: 96385 - DNA, 20 bp, Artificial Sequence
  Description of Artificial Sequence: Synthetic oligonucleotide
  Target: LAMA2; (-) strand; PAM type: NRG; PAM sequence: TGG
caaactcctagatccaagtc

SEQ ID NO: 96386 - DNA, 20 bp, Artificial Sequence
  Description of Artificial Sequence: Synthetic oligonucleotide
  Target: LAMA2; (-) strand; PAM type: NRG; PAM sequence: AAG
ctggccaaactcctagatcc

SEQ ID NO: 96387 - DNA, 20 bp, Artificial Sequence
  Description of Artificial Sequence: Synthetic oligonucleotide
  Target: LAMA2; (-) strand; PAM type: NRG; PAM sequence: TAG
atagcacctggccaaactcc

SEQ ID NO: 96388 - DNA, 20 bp, Artificial Sequence
  Description of Artificial Sequence: Synthetic oligonucleotide
  Target: LAMA2; (-) strand; PAM type: NRG; PAM sequence: TGG
aaagtcatatgcatagcacc

SEQ ID NO: 96389 - DNA, 20 bp, Artificial Sequence
  Description of Artificial Sequence: Synthetic oligonucleotide
  Target: LAMA2; (-) strand; PAM type: NRG; PAM sequence: TAG
cagtggtaaagtcatatgca

SEQ ID NO: 96390 - DNA, 20 bp, Artificial Sequence
  Description of Artificial Sequence: Synthetic oligonucleotide
  Target: LAMA2; (-) strand; PAM type: NRG; PAM sequence: AAG
agatctacagcccagtggta

SEQ ID NO: 96391 - DNA, 20 bp, Artificial Sequence
  Description of Artificial Sequence: Synthetic oligonucleotide
  Target: LAMA2; (-) strand; PAM type: NRG; PAM sequence: TGG
ttctcagatctacagcccag

SEQ ID NO: 96392 - DNA, 20 bp, Artificial Sequence
  Description of Artificial Sequence: Synthetic oligonucleotide
  Target: LAMA2; (-) strand; PAM type: NRG; PAM sequence: CAG
tccttctcagatctacagcc

SEQ ID NO: 96393 - DNA, 20 bp, Artificial Sequence
  Description of Artificial Sequence: Synthetic oligonucleotide
  Target: LAMA2; (-) strand; PAM type: NRG; PAM sequence: CAG
tattatccttctcagatcta

SEQ ID NO: 96394 - DNA, 20 bp, Artificial Sequence
  Description of Artificial Sequence: Synthetic oligonucleotide
  Target: LAMA2; (-) strand; PAM type: NRG; PAM sequence: CAG
tgctgttctattatccttct

SEQ ID NO: 96395 - DNA, 20 bp, Artificial Sequence
  Description of Artificial Sequence: Synthetic oligonucleotide
  Target: LAMA2; (-) strand; PAM type: NRG; PAM sequence: TGG
ctttgtgacttaactctttt

SEQ ID NO: 96396 - DNA, 20 bp, Artificial Sequence
  Description of Artificial Sequence: Synthetic oligonucleotide
  Target: LAMA2; (-) strand; PAM type: NRG; PAM sequence: TGG
tgtctgagtttgccaccata

SEQ ID NO: 96397 - DNA, 20 bp, Artificial Sequence
  Description of Artificial Sequence: Synthetic oligonucleotide
  Target: LAMA2; (-) strand; PAM type: NRG; PAM sequence: GAG
ggtatcacctctctctgtct

SEQ ID NO: 96398 - DNA, 20 bp, Artificial Sequence
  Description of Artificial Sequence: Synthetic oligonucleotide
  Target: LAMA2; (-) strand; PAM type: NRG; PAM sequence: GGG
gcatgacttggcattacaaa

SEQ ID NO: 96399 - DNA, 20 bp, Artificial Sequence
  Description of Artificial Sequence: Synthetic oligonucleotide
  Target: LAMA2; (-) strand; PAM type: NRG; PAM sequence: AGG
agcatgacttggcattacaa

SEQ ID NO: 96400 - DNA, 20 bp, Artificial Sequence
  Description of Artificial Sequence: Synthetic oligonucleotide
  Target: LAMA2; (-) strand; PAM type: NRG; PAM sequence: AAG
gagcatgacttggcattaca

SEQ ID NO: 96401 - DNA, 20 bp, Artificial Sequence
  Description of Artificial Sequence: Synthetic oligonucleotide
  Target: LAMA2; (-) strand; PAM type: NRG; PAM sequence: TGG
ctcccaagcagagcatgact

SEQ ID NO: 96402 - DNA, 20 bp, Artificial Sequence
  Description of Artificial Sequence: Synthetic oligonucleotide
  Target: LAMA2; (-) strand; PAM type: NRG; PAM sequence: GAG
tagtttctgtctcccaagca

SEQ ID NO: 96403 - DNA, 20 bp, Artificial Sequence
  Description of Artificial Sequence: Synthetic oligonucleotide
  Target: LAMA2; (-) strand; PAM type: NRG; PAM sequence: CAG
tgtagtttctgtctcccaag

SEQ ID NO: 96404 - DNA, 20 bp, Artificial Sequence
  Description of Artificial Sequence: Synthetic oligonucleotide
  Target: LAMA2; (-) strand; PAM type: NRG; PAM sequence: AAG
cagtgtagtttctgtctccc

SEQ ID NO: 96405 - DNA, 20 bp, Artificial Sequence
  Description of Artificial Sequence: Synthetic oligonucleotide
  Target: LAMA2; (-) strand; PAM type: NRG; PAM sequence: TAG
cactgtttaaaaaaccagtg

SEQ ID NO: 96406 - DNA, 20 bp, Artificial Sequence
  Description of Artificial Sequence: Synthetic oligonucleotide
  Target: LAMA2; (-) strand; PAM type: NRG; PAM sequence: CAG
catttcactgtttaaaaaac

SEQ ID NO: 96407 - DNA, 20 bp, Artificial Sequence
  Description of Artificial Sequence: Synthetic oligonucleotide
  Target: LAMA2; (-) strand; PAM type: NRG; PAM sequence: CAG
agtaaccaaccaccttttac

SEQ ID NO: 96408 - DNA, 20 bp, Artificial Sequence
  Description of Artificial Sequence: Synthetic oligonucleotide
  Target: LAMA2; (-) strand; PAM type: NRG; PAM sequence: TAG
agctttcttttatccttttt

SEQ ID NO: 96409 - DNA, 20 bp, Artificial Sequence
  Description of Artificial Sequence: Synthetic oligonucleotide
  Target: LAMA2; (-) strand; PAM type: NRG; PAM sequence: TAG
cctgtactcgggacacctta

SEQ ID NO: 96410 - DNA, 20 bp, Artificial Sequence
  Description of Artificial Sequence: Synthetic oligonucleotide
  Target: LAMA2; (-) strand; PAM type: NRG; PAM sequence: GGG
gctcttctgtacctgtactc

SEQ ID NO: 96411 - DNA, 20 bp, Artificial Sequence
  Description of Artificial Sequence: Synthetic oligonucleotide
  Target: LAMA2; (-) strand; PAM type: NRG; PAM sequence: CGG
tgctcttctgtacctgtact

SEQ ID NO: 96412 - DNA, 20 bp, Artificial Sequence
  Description of Artificial Sequence: Synthetic oligonucleotide
  Target: LAMA2; (-) strand; PAM type: NRG; PAM sequence: TAG
ctccctcagcctagagggag

SEQ ID NO: 96413 - DNA, 20 bp, Artificial Sequence
  Description of Artificial Sequence: Synthetic oligonucleotide
  Target: LAMA2; (-) strand; PAM type: NRG; PAM sequence: GAG
ttcctccctcagcctagagg

SEQ ID NO: 96414 - DNA, 20 bp, Artificial Sequence
  Description of Artificial Sequence: Synthetic oligonucleotide
  Target: LAMA2; (-) strand; PAM type: NRG; PAM sequence: GGG
ctttcctccctcagcctaga

SEQ ID NO: 96415 - DNA, 20 bp, Artificial Sequence
  Description of Artificial Sequence: Synthetic oligonucleotide
  Target: LAMA2; (-) strand; PAM type: NRG; PAM sequence: AGG
tctttcctccctcagcctag

SEQ ID NO: 96416 - DNA, 20 bp, Artificial Sequence
  Description of Artificial Sequence: Synthetic oligonucleotide
  Target: LAMA2; (-) strand; PAM type: NRG; PAM sequence: GAG
gtctttcctccctcagccta

SEQ ID NO: 96417 - DNA, 20 bp, Artificial Sequence
  Description of Artificial Sequence: Synthetic oligonucleotide
  Target: LAMA2; (-) strand; PAM type: NRG; PAM sequence: TAG
ctgtctttcctccctcagcc

SEQ ID NO: 96418 - DNA, 20 bp, Artificial Sequence
  Description of Artificial Sequence: Synthetic oligonucleotide
  Target: LAMA2; (-) strand; PAM type: NRG; PAM sequence: CAG
cttcactgtctttcctccct

SEQ ID NO: 96419 - DNA, 20 bp, Artificial Sequence
  Description of Artificial Sequence: Synthetic oligonucleotide
  Target: LAMA2; (-) strand; PAM type: NRG; PAM sequence: TAG
agaaggagcatgccctctct

SEQ ID NO: 96420 - DNA, 20 bp, Artificial Sequence
  Description of Artificial Sequence: Synthetic oligonucleotide
  Target: LAMA2; (-) strand; PAM type: NRG; PAM sequence: GAG
ttgctgcaagtggggagaag

SEQ ID NO: 96421 - DNA, 20 bp, Artificial Sequence
  Description of Artificial Sequence: Synthetic oligonucleotide
  Target: LAMA2; (-) strand; PAM type: NRG; PAM sequence: AGG
ctttgctgcaagtggggaga

SEQ ID NO: 96422 - DNA, 20 bp, Artificial Sequence
  Description of Artificial Sequence: Synthetic oligonucleotide
  Target: LAMA2; (-) strand; PAM type: NRG; PAM sequence: AAG
gctttgctgcaagtggggag

SEQ ID NO: 96423 - DNA, 20 bp, Artificial Sequence
  Description of Artificial Sequence: Synthetic oligonucleotide
  Target: LAMA2; (-) strand; PAM type: NRG; PAM sequence: GAG
tcagctttgctgcaagtggg

SEQ ID NO: 96424 - DNA, 20 bp, Artificial Sequence
  Description of Artificial Sequence: Synthetic oligonucleotide
  Target: LAMA2; (-) strand; PAM type: NRG; PAM sequence: GGG
cctcagctttgctgcaagtg

SEQ ID NO: 96425 - DNA, 20 bp, Artificial Sequence
  Description of Artificial Sequence: Synthetic oligonucleotide
  Target: LAMA2; (-) strand; PAM type: NRG; PAM sequence: GGG
acctcagctttgctgcaagt

SEQ ID NO: 96426 - DNA, 20 bp, Artificial Sequence
  Description of Artificial Sequence: Synthetic oligonucleotide
  Target: LAMA2; (-) strand; PAM type: NRG; PAM sequence: TGG
aacctcagctttgctgcaag

SEQ ID NO: 96427 - DNA, 20 bp, Artificial Sequence
  Description of Artificial Sequence: Synthetic oligonucleotide
  Target: LAMA2; (-) strand; PAM type: NRG; PAM sequence: AAG
ctgaacctcagctttgctgc

SEQ ID NO: 96428 - DNA, 20 bp, Artificial Sequence
  Description of Artificial Sequence: Synthetic oligonucleotide
  Target: LAMA2; (-) strand; PAM type: NRG; PAM sequence: CAG
cttgaaagatttctgaacct

SEQ ID NO: 96429 - DNA, 20 bp, Artificial Sequence
  Description of Artificial Sequence: Synthetic oligonucleotide
  Target: LAMA2; (-) strand; PAM type: NRG; PAM sequence: AAG
tgacagcaacgccctcttga

SEQ ID NO: 96430 - DNA, 20 bp, Artificial Sequence
  Description of Artificial Sequence: Synthetic oligonucleotide
  Target: LAMA2; (-) strand; PAM type: NRG; PAM sequence: CAG
taggctgtacattcctatga

SEQ ID NO: 96431 - DNA, 20 bp, Artificial Sequence
  Description of Artificial Sequence: Synthetic oligonucleotide
  Target: LAMA2; (-) strand; PAM type: NRG; PAM sequence: AGG
ggttttgtttgaccatccat

SEQ ID NO: 96432 - DNA, 20 bp, Artificial Sequence
  Description of Artificial Sequence: Synthetic oligonucleotide
  Target: LAMA2; (-) strand; PAM type: NRG; PAM sequence: TAG
tggttttgtttgaccatcca

SEQ ID NO: 96433 - DNA, 20 bp, Artificial Sequence
  Description of Artificial Sequence: Synthetic oligonucleotide
  Target: LAMA2; (-) strand; PAM type: NRG; PAM sequence: TGG
aactccgacgtgtttgtttt

SEQ ID NO: 96434 - DNA, 20 bp, Artificial Sequence
  Description of Artificial Sequence: Synthetic oligonucleotide
  Target: LAMA2; (-) strand; PAM type: NRG; PAM sequence: CAG
agaacggtgggcagcttcta

SEQ ID NO: 96435 - DNA, 20 bp, Artificial Sequence
  Description of Artificial Sequence: Synthetic oligonucleotide
  Target: LAMA2; (-) strand; PAM type: NRG; PAM sequence: CAG
tatcctccaagaacggtggg

SEQ ID NO: 96436 - DNA, 20 bp, Artificial Sequence
  Description of Artificial Sequence: Synthetic oligonucleotide
  Target: LAMA2; (-) strand; PAM type: NRG; PAM sequence: GGG
tcctatcctccaagaacggt

SEQ ID NO: 96437 - DNA, 20 bp, Artificial Sequence
  Description of Artificial Sequence: Synthetic oligonucleotide
  Target: LAMA2; (-) strand; PAM type: NRG; PAM sequence: TGG
ctcctatcctccaagaacgg

SEQ ID NO: 96438 - DNA, 20 bp, Artificial Sequence
  Description of Artificial Sequence: Synthetic oligonucleotide
  Target: LAMA2; (-) strand; PAM type: NRG; PAM sequence: CGG
gtgctcctatcctccaagaa

SEQ ID NO: 96439 - DNA, 20 bp, Artificial Sequence
  Description of Artificial Sequence: Synthetic oligonucleotide
  Target: LAMA2; (-) strand; PAM type: NRG; PAM sequence: AAG
ccagcgtgctcctatcctcc

SEQ ID NO: 96440 - DNA, 20 bp, Artificial Sequence
  Description of Artificial Sequence: Synthetic oligonucleotide
  Target: LAMA2; (-) strand; PAM type: NRG; PAM sequence: CAG
aagtcggcttctcagtagcc

SEQ ID NO: 96441 - DNA, 20 bp, Artificial Sequence
  Description of Artificial Sequence: Synthetic oligonucleotide
  Target: LAMA2; (-) strand; PAM type: NRG; PAM sequence: TAG
ccttgaagtcggcttctcag

SEQ ID NO: 96442 - DNA, 20 bp, Artificial Sequence
  Description of Artificial Sequence: Synthetic oligonucleotide
  Target: LAMA2; (-) strand; PAM type: NRG; PAM sequence: CAG
tgaccttgaagtcggcttct

SEQ ID NO: 96443 - DNA, 20 bp, Artificial Sequence
  Description of Artificial Sequence: Synthetic oligonucleotide
  Target: LAMA2; (-) strand; PAM type: NRG; PAM sequence: CGG
acacgctctgaccttgaagt

SEQ ID NO: 96444 - DNA, 20 bp, Artificial Sequence
  Description of Artificial Sequence: Synthetic oligonucleotide
  Target: LAMA2; (-) strand; PAM type: NRG; PAM sequence: AAG
gcacacacgctctgaccttg

SEQ ID NO: 96445 - DNA, 20 bp, Artificial Sequence
  Description of Artificial Sequence: Synthetic oligonucleotide
  Target: LAMA2; (-) strand; PAM type: NRG; PAM sequence: TGG
ggcacccttctgactagctt

SEQ ID NO: 96446 - DNA, 20 bp, Artificial Sequence
  Description of Artificial Sequence: Synthetic oligonucleotide
  Target: LAMA2; (-) strand; PAM type: NRG; PAM sequence: TAG
tccataggcacccttctgac

SEQ ID NO: 96447 - DNA, 20 bp, Artificial Sequence
  Description of Artificial Sequence: Synthetic oligonucleotide
  Target: LAMA2; (-) strand; PAM type: NRG; PAM sequence: AGG
agggcacattgtctctccat

SEQ ID NO: 96448 - DNA, 20 bp, Artificial Sequence
  Description of Artificial Sequence: Synthetic oligonucleotide
  Target: LAMA2; (-) strand; PAM type: NRG; PAM sequence: TAG
gagggcacattgtctctcca

SEQ ID NO: 96449 - DNA, 20 bp, Artificial Sequence
  Description of Artificial Sequence: Synthetic oligonucleotide
  Target: LAMA2; (-) strand; PAM type: NRG; PAM sequence: GGG
aggtgtgcctttagttggga

SEQ ID NO: 96450 - DNA, 20 bp, Artificial Sequence
  Description of Artificial Sequence: Synthetic oligonucleotide
  Target: LAMA2; (-) strand; PAM type: NRG; PAM sequence: AGG
caggtgtgcctttagttggg

SEQ ID NO: 96451 - DNA, 20 bp, Artificial Sequence
  Description of Artificial Sequence: Synthetic oligonucleotide
  Target: LAMA2; (-) strand; PAM type: NRG; PAM sequence: GAG
ccaggtgtgcctttagttgg

SEQ ID NO: 96452 - DNA, 20 bp, Artificial Sequence
  Description of Artificial Sequence: Synthetic oligonucleotide
  Target: LAMA2; (-) strand; PAM type: NRG; PAM sequence: GGG
tcccaggtgtgcctttagtt

SEQ ID NO: 96453 - DNA, 20 bp, Artificial Sequence
  Description of Artificial Sequence: Synthetic oligonucleotide
  Target: LAMA2; (-) strand; PAM type: NRG; PAM sequence: TGG
atcccaggtgtgcctttagt

SEQ ID NO: 96454 - DNA, 20 bp, Artificial Sequence
  Description of Artificial Sequence: Synthetic oligonucleotide
  Target: LAMA2; (-) strand; PAM type: NRG; PAM sequence: TAG
aagaatcccaggtgtgcctt

SEQ ID NO: 96455 - DNA, 20 bp, Artificial Sequence
  Description of Artificial Sequence: Synthetic oligonucleotide
  Target: LAMA2; (-) strand; PAM type: NRG; PAM sequence: AGG
agtggcccagaaagaatccc

SEQ ID NO: 96456 - DNA, 20 bp, Artificial Sequence
  Description of Artificial Sequence: Synthetic oligonucleotide
  Target: LAMA2; (-) strand; PAM type: NRG; PAM sequence: CAG
cagtggcccagaaagaatcc

SEQ ID NO: 96457 - DNA, 20 bp, Artificial Sequence
  Description of Artificial Sequence: Synthetic oligonucleotide
  Target: LAMA2; (-) strand; PAM type: NRG; PAM sequence: AAG
cgggagcccagtggcccaga

SEQ ID NO: 96458 - DNA, 20 bp, Artificial Sequence
  Description of Artificial Sequence: Synthetic oligonucleotide
  Target: LAMA2; (-) strand; PAM type: NRG; PAM sequence: CAG
agcacgggagcccagtggcc

SEQ ID NO: 96459 - DNA, 20 bp, Artificial Sequence
  Description of Artificial Sequence: Synthetic oligonucleotide
  Target: LAMA2; (-) strand; PAM type: NRG; PAM sequence: TGG
tatttagcacgggagcccag

SEQ ID NO: 96460 - DNA, 20 bp, Artificial Sequence
  Description of Artificial Sequence: Synthetic oligonucleotide
  Target: LAMA2; (-) strand; PAM type: NRG; PAM sequence: CAG
tattatttagcacgggagcc

SEQ ID NO: 96461 - DNA, 20 bp, Artificial Sequence
  Description of Artificial Sequence: Synthetic oligonucleotide
  Target: LAMA2; (-) strand; PAM type: NRG; PAM sequence: GAG
ttttgtattatttagcacgg

SEQ ID NO: 96462 - DNA, 20 bp, Artificial Sequence
  Description of Artificial Sequence: Synthetic oligonucleotide
  Target: LAMA2; (-) strand; PAM type: NRG; PAM sequence: GGG
atttttgtattatttagcac

SEQ ID NO: 96463 - DNA, 20 bp, Artificial Sequence
  Description of Artificial Sequence: Synthetic oligonucleotide
  Target: LAMA2; (-) strand; PAM type: NRG; PAM sequence: CGG
tatttttgtattatttagca

SEQ ID NO: 96464 - DNA, 20 bp, Artificial Sequence
  Description of Artificial Sequence: Synthetic oligonucleotide
  Target: LAMA2; (-) strand; PAM type: NRG; PAM sequence: TAG
atcattatttttgtattatt

SEQ ID NO: 96465 - DNA, 20 bp, Artificial Sequence
  Description of Artificial Sequence: Synthetic oligonucleotide
  Target: LAMA2; (-) strand; PAM type: NRG; PAM sequence: AAG
gctctgtctaaaaaaaaaaa

SEQ ID NO: 96466 - DNA, 20 bp, Artificial Sequence
  Description of Artificial Sequence: Synthetic oligonucleotide
  Target: LAMA2; (-) strand; PAM type: NRG; PAM sequence: AGG
ccagcctaggcgacagagca

SEQ ID NO: 96467 - DNA, 20 bp, Artificial Sequence
  Description of Artificial Sequence: Synthetic oligonucleotide
  Target: LAMA2; (-) strand; PAM type: NRG; PAM sequence: AAG
tccagcctaggcgacagagc

SEQ ID NO: 96468 - DNA, 20 bp, Artificial Sequence
  Description of Artificial Sequence: Synthetic oligonucleotide
  Target: LAMA2; (-) strand; PAM type: NRG; PAM sequence: GAG
gcactccagcctaggcgaca

SEQ ID NO: 96469 - DNA, 20 bp, Artificial Sequence
  Description of Artificial Sequence: Synthetic oligonucleotide
  Target: LAMA2; (-) strand; PAM type: NRG; PAM sequence: CAG
ctgcactccagcctaggcga

SEQ ID NO: 96470 - DNA, 20 bp, Artificial Sequence
  Description of Artificial Sequence: Synthetic oligonucleotide
  Target: LAMA2; (-) strand; PAM type: NRG; PAM sequence: AGG
gcgccactgcactccagcct

SEQ ID NO: 96471 - DNA, 20 bp, Artificial Sequence
  Description of Artificial Sequence: Synthetic oligonucleotide
  Target: LAMA2; (-) strand; PAM type: NRG; PAM sequence: TAG
cgcgccactgcactccagcc

SEQ ID NO: 96472 - DNA, 20 bp, Artificial Sequence
  Description of Artificial Sequence: Synthetic oligonucleotide
  Target: LAMA2; (-) strand; PAM type: NRG; PAM sequence: CAG
gagatcgcgccactgcactc

SEQ ID NO: 96473 - DNA, 20 bp, Artificial Sequence
  Description of Artificial Sequence: Synthetic oligonucleotide
  Target: LAMA2; (-) strand; PAM type: NRG; PAM sequence: GAG
ggtgcagcttgcagtgagcc

SEQ ID NO: 96474 - DNA, 20 bp, Artificial Sequence
  Description of Artificial Sequence: Synthetic oligonucleotide
  Target: LAMA2; (-) strand; PAM type: NRG; PAM sequence: GAG
caggaggtgcagcttgcagt

SEQ ID NO: 96475 - DNA, 20 bp, Artificial Sequence
  Description of Artificial Sequence: Synthetic oligonucleotide
  Target: LAMA2; (-) strand; PAM type: NRG; PAM sequence: CAG
aacccaggaggtgcagcttg

SEQ ID NO: 96476 - DNA, 20 bp, Artificial Sequence
  Description of Artificial Sequence: Synthetic oligonucleotide
  Target: LAMA2; (-) strand; PAM type: NRG; PAM sequence: CAG
tggcgtgaacccaggaggtg

SEQ ID NO: 96477 - DNA, 20 bp, Artificial Sequence
  Description of Artificial Sequence: Synthetic oligonucleotide
  Target: LAMA2; (-) strand; PAM type: NRG; PAM sequence: AGG
gagaatggcgtgaacccagg

SEQ ID NO: 96478 - DNA, 20 bp, Artificial Sequence
  Description of Artificial Sequence: Synthetic oligonucleotide
  Target: LAMA2; (-) strand; PAM type: NRG; PAM sequence: GAG
ggagaatggcgtgaacccag

SEQ ID NO: 96479 - DNA, 20 bp, Artificial Sequence
  Description of Artificial Sequence: Synthetic oligonucleotide
  Target: LAMA2; (-) strand; PAM type: NRG; PAM sequence: AGG
caggagaatggcgtgaaccc

SEQ ID NO: 96480 - DNA, 20 bp, Artificial Sequence
  Description of Artificial Sequence: Synthetic oligonucleotide
  Target: LAMA2; (-) strand; PAM type: NRG; PAM sequence: CAG
gcaggagaatggcgtgaacc

SEQ ID NO: 96481 - DNA, 20 bp, Artificial Sequence
  Description of Artificial Sequence: Synthetic oligonucleotide
  Target: LAMA2; (-) strand; PAM type: NRG; PAM sequence: TGG
ctgaggctgaggcaggagaa

SEQ ID NO: 96482 - DNA, 20 bp, Artificial Sequence
  Description of Artificial Sequence: Synthetic oligonucleotide
  Target: LAMA2; (-) strand; PAM type: NRG; PAM sequence: GAG
tactcctgaggctgaggcag

SEQ ID NO: 96483 - DNA, 20 bp, Artificial Sequence
  Description of Artificial Sequence: Synthetic oligonucleotide
  Target: LAMA2; (-) strand; PAM type: NRG; PAM sequence: AGG
gctactcctgaggctgaggc

SEQ ID NO: 96484 - DNA, 20 bp, Artificial Sequence
  Description of Artificial Sequence: Synthetic oligonucleotide
  Target: LAMA2; (-) strand; PAM type: NRG; PAM sequence: CAG
agctactcctgaggctgagg

SEQ ID NO: 96485 - DNA, 20 bp, Artificial Sequence
  Description of Artificial Sequence: Synthetic oligonucleotide
  Target: LAMA2; (-) strand; PAM type: NRG; PAM sequence: AGG
cccagctactcctgaggctg

SEQ ID NO: 96486 - DNA, 20 bp, Artificial Sequence
  Description of Artificial Sequence: Synthetic oligonucleotide
  Target: LAMA2; (-) strand; PAM type: NRG; PAM sequence: GAG
tcccagctactcctgaggct

SEQ ID NO: 96487 - DNA, 20 bp, Artificial Sequence
  Description of Artificial Sequence: Synthetic oligonucleotide
  Target: LAMA2; (-) strand; PAM type: NRG; PAM sequence: AGG
tgtagtcccagctactcctg

SEQ ID NO: 96488 - DNA, 20 bp, Artificial Sequence
  Description of Artificial Sequence: Synthetic oligonucleotide
  Target: LAMA2; (-) strand; PAM type: NRG; PAM sequence: GAG
ctgtagtcccagctactcct

SEQ ID NO: 96489 - DNA, 20 bp, Artificial Sequence
  Description of Artificial Sequence: Synthetic oligonucleotide
  Target: LAMA2; (-) strand; PAM type: NRG; PAM sequence: CAG
gtggcggacgcctgtagtcc

SEQ ID NO: 96490 - DNA, 20 bp, Artificial Sequence
  Description of Artificial Sequence: Synthetic oligonucleotide
  Target: LAMA2; (-) strand; PAM type: NRG; PAM sequence: TAG
ggcgtggtggcggacgcctg

SEQ ID NO: 96491 - DNA, 20 bp, Artificial Sequence
  Description of Artificial Sequence: Synthetic oligonucleotide
  Target: LAMA2; (-) strand; PAM type: NRG; PAM sequence: CGG
aaattagccgggcgtggtgg

SEQ ID NO: 96492 - DNA, 20 bp, Artificial Sequence
  Description of Artificial Sequence: Synthetic oligonucleotide
  Target: LAMA2; (-) strand; PAM type: NRG; PAM sequence: TGG
aaaaaattagccgggcgtgg

SEQ ID NO: 96493 - DNA, 20 bp, Artificial Sequence
  Description of Artificial Sequence: Synthetic oligonucleotide
  Target: LAMA2; (-) strand; PAM type: NRG; PAM sequence: TGG
cacaaaaaattagccgggcg

SEQ ID NO: 96494 - DNA, 20 bp, Artificial Sequence
  Description of Artificial Sequence: Synthetic oligonucleotide
  Target: LAMA2; (-) strand; PAM type: NRG; PAM sequence: GGG
aaaaacacaaaaaattagcc

SEQ ID NO: 96495 - DNA, 20 bp, Artificial Sequence
  Description of Artificial Sequence: Synthetic oligonucleotide
  Target: LAMA2; (-) strand; PAM type: NRG; PAM sequence: CGG
taaaaacacaaaaaattagc

SEQ ID NO: 96496 - DNA, 20 bp, Artificial Sequence
  Description of Artificial Sequence: Synthetic oligonucleotide
  Target: LAMA2; (-) strand; PAM type: NRG; PAM sequence: TAG
ctattaaaaacacaaaaaat

SEQ ID NO: 96497 - DNA, 20 bp, Artificial Sequence
  Description of Artificial Sequence: Synthetic oligonucleotide
  Target: LAMA2; (-) strand; PAM type: NRG; PAM sequence: TGG
tgagaccgtcctggctaaca

SEQ ID NO: 96498 - DNA, 20 bp, Artificial Sequence
  Description of Artificial Sequence: Synthetic oligonucleotide
  Target: LAMA2; (-) strand; PAM type: NRG; PAM sequence: TGG
tcaggagattgagaccgtcc

SEQ ID NO: 96499 - DNA, 20 bp, Artificial Sequence
  Description of Artificial Sequence: Synthetic oligonucleotide
  Target: LAMA2; (-) strand; PAM type: NRG; PAM sequence: GAG
gatcacaaggtcaggagatt

SEQ ID NO: 96500 - DNA, 20 bp, Artificial Sequence
  Description of Artificial Sequence: Synthetic oligonucleotide
  Target: LAMA2; (-) strand; PAM type: NRG; PAM sequence: GAG
agggcggatcacaaggtcag

SEQ ID NO: 96501 - DNA, 20 bp, Artificial Sequence
  Description of Artificial Sequence: Synthetic oligonucleotide
  Target: LAMA2; (-) strand; PAM type: NRG; PAM sequence: AGG
ggagggcggatcacaaggtc

SEQ ID NO: 96502 - DNA, 20 bp, Artificial Sequence
  Description of Artificial Sequence: Synthetic oligonucleotide
  Target: LAMA2; (-) strand; PAM type: NRG; PAM sequence: CAG
aggagggcggatcacaaggt

SEQ ID NO: 96503 - DNA, 20 bp, Artificial Sequence
  Description of Artificial Sequence: Synthetic oligonucleotide
  Target: LAMA2; (-) strand; PAM type: NRG; PAM sequence: AGG
gccgaggagggcggatcaca

SEQ ID NO: 96504 - DNA, 20 bp, Artificial Sequence
  Description of Artificial Sequence: Synthetic oligonucleotide
  Target: LAMA2; (-) strand; PAM type: NRG; PAM sequence: AAG
ggccgaggagggcggatcac

SEQ ID NO: 96505 - DNA, 20 bp, Artificial Sequence
  Description of Artificial Sequence: Synthetic oligonucleotide
  Target: LAMA2; (-) strand; PAM type: NRG; PAM sequence: CGG
ctttgggaggccgaggaggg

SEQ ID NO: 96506 - DNA, 20 bp, Artificial Sequence
  Description of Artificial Sequence: Synthetic oligonucleotide
  Target: LAMA2; (-) strand; PAM type: NRG; PAM sequence: GGG
gcactttgggaggccgagga

SEQ ID NO: 96507 - DNA, 20 bp, Artificial Sequence
  Description of Artificial Sequence: Synthetic oligonucleotide
  Target: LAMA2; (-) strand; PAM type: NRG; PAM sequence: AGG
agcactttgggaggccgagg

SEQ ID NO: 96508 - DNA, 20 bp, Artificial Sequence
  Description of Artificial Sequence: Synthetic oligonucleotide
  Target: LAMA2; (-) strand; PAM type: NRG; PAM sequence: GAG
cagcactttgggaggccgag

SEQ ID NO: 96509 - DNA, 20 bp, Artificial Sequence
  Description of Artificial Sequence: Synthetic oligonucleotide
  Target: LAMA2; (-) strand; PAM type: NRG; PAM sequence: AGG
cccagcactttgggaggccg

SEQ ID NO: 96510 - DNA, 20 bp, Artificial Sequence
  Description of Artificial Sequence: Synthetic oligonucleotide
  Target: LAMA2; (-) strand; PAM type: NRG; PAM sequence: GAG
tcccagcactttgggaggcc

SEQ ID NO: 96511 - DNA, 20 bp, Artificial Sequence
  Description of Artificial Sequence: Synthetic oligonucleotide
  Target: LAMA2; (-) strand; PAM type: NRG; PAM sequence: AGG
tgtaatcccagcactttggg

SEQ ID NO: 96512 - DNA, 20 bp, Artificial Sequence
  Description of Artificial Sequence: Synthetic oligonucleotide
  Target: LAMA2; (-) strand; PAM type: NRG; PAM sequence: GAG
ctgtaatcccagcactttgg

SEQ ID NO: 96513 - DNA, 20 bp, Artificial Sequence
  Description of Artificial Sequence: Synthetic oligonucleotide
  Target: LAMA2; (-) strand; PAM type: NRG; PAM sequence: GGG
gcctgtaatcccagcacttt

SEQ ID NO: 96514 - DNA, 20 bp, Artificial Sequence
  Description of Artificial Sequence: Synthetic oligonucleotide
  Target: LAMA2; (-) strand; PAM type: NRG; PAM sequence: TGG
tgcctgtaatcccagcactt

SEQ ID NO: 96515 - DNA, 20 bp, Artificial Sequence
  Description of Artificial Sequence: Synthetic oligonucleotide
  Target: LAMA2; (-) strand; PAM type: NRG; PAM sequence: CAG
gtggctcatgcctgtaatcc

SEQ ID NO: 96516 - DNA, 20 bp, Artificial Sequence
  Description of Artificial Sequence: Synthetic oligonucleotide
  Target: LAMA2; (-) strand; PAM type: NRG; PAM sequence: TGG
cttcattaggccgggcgcgg

SEQ ID NO: 96517 - DNA, 20 bp, Artificial Sequence
  Description of Artificial Sequence: Synthetic oligonucleotide
  Target: LAMA2; (-) strand; PAM type: NRG; PAM sequence: CGG
gttcttcattaggccgggcg

SEQ ID NO: 96518 - DNA, 20 bp, Artificial Sequence
  Description of Artificial Sequence: Synthetic oligonucleotide
  Target: LAMA2; (-) strand; PAM type: NRG; PAM sequence: GGG
ttctggttcttcattaggcc

SEQ ID NO: 96519 - DNA, 20 bp, Artificial Sequence
  Description of Artificial Sequence: Synthetic oligonucleotide
  Target: LAMA2; (-) strand; PAM type: NRG; PAM sequence: CGG
gttctggttcttcattaggc

SEQ ID NO: 96520 - DNA, 20 bp, Artificial Sequence
  Description of Artificial Sequence: Synthetic oligonucleotide
  Target: LAMA2; (-) strand; PAM type: NRG; PAM sequence: AGG
ctgagttctggttcttcatt

SEQ ID NO: 96521 - DNA, 20 bp, Artificial Sequence
  Description of Artificial Sequence: Synthetic oligonucleotide
  Target: LAMA2; (-) strand; PAM type: NRG; PAM sequence: TAG
gctgagttctggttcttcat

SEQ ID NO: 96522 - DNA, 20 bp, Artificial Sequence
  Description of Artificial Sequence: Synthetic oligonucleotide
  Target: LAMA2; (-) strand; PAM type: NRG; PAM sequence: TGG
cacacttccaagctgagttc

SEQ ID NO: 96523 - DNA, 20 bp, Artificial Sequence
  Description of Artificial Sequence: Synthetic oligonucleotide
  Target: LAMA2; (-) strand; PAM type: NRG; PAM sequence: GAG
gcccaccacacttccaagct

SEQ ID NO: 96524 - DNA, 20 bp, Artificial Sequence
  Description of Artificial Sequence: Synthetic oligonucleotide
  Target: LAMA2; (-) strand; PAM type: NRG; PAM sequence: AAG
tggcggcccaccacacttcc

SEQ ID NO: 96525 - DNA, 20 bp, Artificial Sequence
  Description of Artificial Sequence: Synthetic oligonucleotide
  Target: LAMA2; (-) strand; PAM type: NRG; PAM sequence: CGG
acccaataagtccataatgg

SEQ ID NO: 96526 - DNA, 20 bp, Artificial Sequence
  Description of Artificial Sequence: Synthetic oligonucleotide
  Target: LAMA2; (-) strand; PAM type: NRG; PAM sequence: TGG
aggacccaataagtccataa

SEQ ID NO: 96527 - DNA, 20 bp, Artificial Sequence
  Description of Artificial Sequence: Synthetic oligonucleotide
  Target: LAMA2; (-) strand; PAM type: NRG; PAM sequence: AAG
aggccttggaaggacccaat

SEQ ID NO: 96528 - DNA, 20 bp, Artificial Sequence
  Description of Artificial Sequence: Synthetic oligonucleotide
  Target: LAMA2; (-) strand; PAM type: NRG; PAM sequence: AGG
tagtcaatagaggccttgga

SEQ ID NO: 96529 - DNA, 20 bp, Artificial Sequence
  Description of Artificial Sequence: Synthetic oligonucleotide
  Target: LAMA2; (-) strand; PAM type: NRG; PAM sequence: AAG
ttagtcaatagaggccttgg

SEQ ID NO: 96530 - DNA, 20 bp, Artificial Sequence
  Description of Artificial Sequence: Synthetic oligonucleotide
  Target: LAMA2; (-) strand; PAM type: NRG; PAM sequence: TGG
ggcttagtcaatagaggcct

SEQ ID NO: 96531 - DNA, 20 bp, Artificial Sequence
  Description of Artificial Sequence: Synthetic oligonucleotide
  Target: LAMA2; (-) strand; PAM type: NRG; PAM sequence: AGG
atgataggcttagtcaatag

SEQ ID NO: 96532 - DNA, 20 bp, Artificial Sequence
  Description of Artificial Sequence: Synthetic oligonucleotide
  Target: LAMA2; (-) strand; PAM type: NRG; PAM sequence: GAG
aatgataggcttagtcaata

SEQ ID NO: 96533 - DNA, 20 bp, Artificial Sequence
  Description of Artificial Sequence: Synthetic oligonucleotide
  Target: LAMA2; (-) strand; PAM type: NRG; PAM sequence: TAG
agaatgataggcttagtcaa

SEQ ID NO: 96534 - DNA, 20 bp, Artificial Sequence
  Description of Artificial Sequence: Synthetic oligonucleotide
  Target: LAMA2; (-) strand; PAM type: NRG; PAM sequence: TAG
cggtggcagaatgataggct

SEQ ID NO: 96535 - DNA, 20 bp, Artificial Sequence
  Description of Artificial Sequence: Synthetic oligonucleotide
  Target: LAMA2; (-) strand; PAM type: NRG; PAM sequence: AGG
gtatccggtggcagaatgat

SEQ ID NO: 96536 - DNA, 20 bp, Artificial Sequence
  Description of Artificial Sequence: Synthetic oligonucleotide
  Target: LAMA2; (-) strand; PAM type: NRG; PAM sequence: TAG
cgtatccggtggcagaatga

SEQ ID NO: 96537 - DNA, 20 bp, Artificial Sequence
  Description of Artificial Sequence: Synthetic oligonucleotide
  Target: LAMA2; (-) strand; PAM type: NRG; PAM sequence: CAG
catttctccgtatccggtgg

SEQ ID NO: 96538 - DNA, 20 bp, Artificial Sequence
  Description of Artificial Sequence: Synthetic oligonucleotide
  Target: LAMA2; (-) strand; PAM type: NRG; PAM sequence: TGG
agacatttctccgtatccgg

SEQ ID NO: 96539 - DNA, 20 bp, Artificial Sequence
  Description of Artificial Sequence: Synthetic oligonucleotide
  Target: LAMA2; (-) strand; PAM type: NRG; PAM sequence: CGG
cgtagacatttctccgtatc

SEQ ID NO: 96540 - DNA, 20 bp, Artificial Sequence
  Description of Artificial Sequence: Synthetic oligonucleotide
  Target: LAMA2; (-) strand; PAM type: NRG; PAM sequence: TAG
gatacagtaggtagaccccg

SEQ ID NO: 96541 - DNA, 20 bp, Artificial Sequence
  Description of Artificial Sequence: Synthetic oligonucleotide
  Target: LAMA2; (-) strand; PAM type: NRG; PAM sequence: TAG
ctgctttgtgatacagtagg

SEQ ID NO: 96542 - DNA, 20 bp, Artificial Sequence
  Description of Artificial Sequence: Synthetic oligonucleotide
  Target: LAMA2; (-) strand; PAM type: NRG; PAM sequence: AGG
accctgctttgtgatacagt

SEQ ID NO: 96543 - DNA, 20 bp, Artificial Sequence
  Description of Artificial Sequence: Synthetic oligonucleotide
  Target: LAMA2; (-) strand; PAM type: NRG; PAM sequence: TAG
caccctgctttgtgatacag

SEQ ID NO: 96544 - DNA, 20 bp, Artificial Sequence
  Description of Artificial Sequence: Synthetic oligonucleotide
  Target: LAMA2; (-) strand; PAM type: NRG; PAM sequence: CAG
attcaccctgctttgtgata

SEQ ID NO: 96545 - DNA, 20 bp, Artificial Sequence
  Description of Artificial Sequence: Synthetic oligonucleotide
  Target: LAMA2; (-) strand; PAM type: NRG; PAM sequence: GAG
attatacatctactgtttct

SEQ ID NO: 96546 - DNA, 20 bp, Artificial Sequence
  Description of Artificial Sequence: Synthetic oligonucleotide
  Target: LAMA2; (-) strand; PAM type: NRG; PAM sequence: CAG
gaataagtcatttcagggac

SEQ ID NO: 96547 - DNA, 20 bp, Artificial Sequence
  Description of Artificial Sequence: Synthetic oligonucleotide
  Target: LAMA2; (-) strand; PAM type: NRG; PAM sequence: GGG
tcttggaataagtcatttca

SEQ ID NO: 96548 - DNA, 20 bp, Artificial Sequence
  Description of Artificial Sequence: Synthetic oligonucleotide
  Target: LAMA2; (-) strand; PAM type: NRG; PAM sequence: AGG
atcttggaataagtcatttc

SEQ ID NO: 96549 - DNA, 20 bp, Artificial Sequence
  Description of Artificial Sequence: Synthetic oligonucleotide
  Target: LAMA2; (-) strand; PAM type: NRG; PAM sequence: CAG
gatcttggaataagtcattt

SEQ ID NO: 96550 - DNA, 20 bp, Artificial Sequence
  Description of Artificial Sequence: Synthetic oligonucleotide
  Target: LAMA2; (-) strand; PAM type: NRG; PAM sequence: AAG
gtcatttaggatcttggaat

SEQ ID NO: 96551 - DNA, 20 bp, Artificial Sequence
  Description of Artificial Sequence: Synthetic oligonucleotide
  Target: LAMA2; (-) strand; PAM type: NRG; PAM sequence: TGG
taaaatgtcatttaggatct

SEQ ID NO: 96552 - DNA, 20 bp, Artificial Sequence
  Description of Artificial Sequence: Synthetic oligonucleotide
  Target: LAMA2; (-) strand; PAM type: NRG; PAM sequence: AGG
gaatttctaaaatgtcattt

SEQ ID NO: 96553 - DNA, 20 bp, Artificial Sequence
  Description of Artificial Sequence: Synthetic oligonucleotide
  Target: LAMA2; (-) strand; PAM type: NRG; PAM sequence: TAG
tgaatttctaaaatgtcatt

SEQ ID NO: 96554 - DNA, 20 bp, Artificial Sequence
  Description of Artificial Sequence: Synthetic oligonucleotide
  Target: LAMA2; (-) strand; PAM type: NRG; PAM sequence: AAG
tgcaatttaataaaaatgcc

SEQ ID NO: 96555 - DNA, 20 bp, Artificial Sequence
  Description of Artificial Sequence: Synthetic oligonucleotide
  Target: LAMA2; (-) strand; PAM type: NRG; PAM sequence: GAG
gtttctgctcttgatttaca

SEQ ID NO: 96556 - DNA, 20 bp, Artificial Sequence
  Description of Artificial Sequence: Synthetic oligonucleotide
  Target: LAMA2; (-) strand; PAM type: NRG; PAM sequence: CAG
aggtttctgctcttgattta

SEQ ID NO: 96557 - DNA, 20 bp, Artificial Sequence
  Description of Artificial Sequence: Synthetic oligonucleotide
  Target: LAMA2; (-) strand; PAM type: NRG; PAM sequence: AGG
gtcttacattatccttttaa

SEQ ID NO: 96558 - DNA, 20 bp, Artificial Sequence
  Description of Artificial Sequence: Synthetic oligonucleotide
  Target: LAMA2; (-) strand; PAM type: NRG; PAM sequence: AAG
tgtcttacattatcctttta

SEQ ID NO: 96559 - DNA, 20 bp, Artificial Sequence
  Description of Artificial Sequence: Synthetic oligonucleotide
  Target: LAMA2; (-) strand; PAM type: NRG; PAM sequence: AAG
cagctcctgttttacaggaa

SEQ ID NO: 96560 - DNA, 20 bp, Artificial Sequence
  Description of Artificial Sequence: Synthetic oligonucleotide
  Target: LAMA2; (-) strand; PAM type: NRG; PAM sequence: AGG
tttcacagctcctgttttac

SEQ ID NO: 96561 - DNA, 20 bp, Artificial Sequence
  Description of Artificial Sequence: Synthetic oligonucleotide
  Target: LAMA2; (-) strand; PAM type: NRG; PAM sequence: CAG
ctttcacagctcctgtttta

SEQ ID NO: 96562 - DNA, 20 bp, Artificial Sequence
  Description of Artificial Sequence: Synthetic oligonucleotide
  Target: LAMA2; (-) strand; PAM type: NRG; PAM sequence: CAG
aaattggtatcctactttca

SEQ ID NO: 96563 - DNA, 20 bp, Artificial Sequence
  Description of Artificial Sequence: Synthetic oligonucleotide
  Target: LAMA2; (-) strand; PAM type: NRG; PAM sequence: TGG
gctgtatttacctctcaaat

SEQ ID NO: 96564 - DNA, 20 bp, Artificial Sequence
  Description of Artificial Sequence: Synthetic oligonucleotide
  Target: LAMA2; (-) strand; PAM type: NRG; PAM sequence: AAG
aggatcatctataattctta

SEQ ID NO: 96565 - DNA, 20 bp, Artificial Sequence
  Description of Artificial Sequence: Synthetic oligonucleotide
  Target: LAMA2; (-) strand; PAM type: NRG; PAM sequence: AGG
attaatcaattttctttttc

SEQ ID NO: 96566 - DNA, 20 bp, Artificial Sequence
  Description of Artificial Sequence: Synthetic oligonucleotide
  Target: LAMA2; (-) strand; PAM type: NRG; PAM sequence: CAG
aattaatcaattttcttttt

SEQ ID NO: 96567 - DNA, 20 bp, Artificial Sequence
  Description of Artificial Sequence: Synthetic oligonucleotide
  Target: LAMA2; (-) strand; PAM type: NRG; PAM sequence: CAG
attcagtactgtttcttctt

SEQ ID NO: 96568 - DNA, 20 bp, Artificial Sequence
  Description of Artificial Sequence: Synthetic oligonucleotide
  Target: LAMA2; (-) strand; PAM type: NRG; PAM sequence: CAG
aacataattgtgttttgatt

SEQ ID NO: 96569 - DNA, 20 bp, Artificial Sequence
  Description of Artificial Sequence: Synthetic oligonucleotide
  Target: LAMA2; (-) strand; PAM type: NRG; PAM sequence: GGG
gaacatagttctttcagttt

SEQ ID NO: 96570 - DNA, 20 bp, Artificial Sequence
  Description of Artificial Sequence: Synthetic oligonucleotide
  Target: LAMA2; (-) strand; PAM type: NRG; PAM sequence: TGG
ggaacatagttctttcagtt

SEQ ID NO: 96571 - DNA, 20 bp, Artificial Sequence
  Description of Artificial Sequence: Synthetic oligonucleotide
  Target: LAMA2; (-) strand; PAM type: NRG; PAM sequence: CAG
ttactggaacatagttcttt

SEQ ID NO: 96572 - DNA, 20 bp, Artificial Sequence
  Description of Artificial Sequence: Synthetic oligonucleotide
  Target: LAMA2; (-) strand; PAM type: NRG; PAM sequence: TAG
tccatcaacttactggaaca

SEQ ID NO: 96573 - DNA, 20 bp, Artificial Sequence
  Description of Artificial Sequence: Synthetic oligonucleotide
  Target: LAMA2; (-) strand; PAM type: NRG; PAM sequence: TGG
ttttttttccatcaacttac

SEQ ID NO: 96574 - DNA, 20 bp, Artificial Sequence
  Description of Artificial Sequence: Synthetic oligonucleotide
  Target: LAMA2; (-) strand; PAM type: NRG; PAM sequence: GGG
gctagaattttctgaagctt

SEQ ID NO: 96575 - DNA, 20 bp, Artificial Sequence
  Description of Artificial Sequence: Synthetic oligonucleotide
  Target: LAMA2; (-) strand; PAM type: NRG; PAM sequence: TGG
tgctagaattttctgaagct

SEQ ID NO: 96576 - DNA, 20 bp, Artificial Sequence
  Description of Artificial Sequence: Synthetic oligonucleotide
  Target: LAMA2; (-) strand; PAM type: NRG; PAM sequence: AAG
atttttgctagaattttctg

SEQ ID NO: 96577 - DNA, 20 bp, Artificial Sequence
  Description of Artificial Sequence: Synthetic oligonucleotide
  Target: LAMA2; (-) strand; PAM type: NRG; PAM sequence: TAG
tacataattcatatttttgc

SEQ ID NO: 96578 - DNA, 20 bp, Artificial Sequence
  Description of Artificial Sequence: Synthetic oligonucleotide
  Target: LAMA2; (-) strand; PAM type: NRG; PAM sequence: AAG
agtaacgtttttcttcgccc

SEQ ID NO: 96579 - DNA, 20 bp, Artificial Sequence
  Description of Artificial Sequence: Synthetic oligonucleotide
  Target: LAMA2; (-) strand; PAM type: NRG; PAM sequence: TAG
ttctgatttgaggtctctgt

SEQ ID NO: 96580 - DNA, 20 bp, Artificial Sequence
  Description of Artificial Sequence: Synthetic oligonucleotide
  Target: LAMA2; (-) strand; PAM type: NRG; PAM sequence: AGG
ttgcatacaattctgatttg

SEQ ID NO: 96581 - DNA, 20 bp, Artificial Sequence
  Description of Artificial Sequence: Synthetic oligonucleotide
  Target: LAMA2; (-) strand; PAM type: NRG; PAM sequence: GAG
cttgcatacaattctgattt

SEQ ID NO: 96582 - DNA, 20 bp, Artificial Sequence
  Description of Artificial Sequence: Synthetic oligonucleotide
  Target: LAMA2; (-) strand; PAM type: NRG; PAM sequence: TGG
acatctagtatattgttttt

SEQ ID NO: 96583 - DNA, 20 bp, Artificial Sequence
  Description of Artificial Sequence: Synthetic oligonucleotide
  Target: LAMA2; (-) strand; PAM type: NRG; PAM sequence: TAG
gcttgaagagaagtaacatc

SEQ ID NO: 96584 - DNA, 20 bp, Artificial Sequence
  Description of Artificial Sequence: Synthetic oligonucleotide
  Target: LAMA2; (-) strand; PAM type: NRG; PAM sequence: AAG
tccaaggagagcttgaagag

SEQ ID NO: 96585 - DNA, 20 bp, Artificial Sequence
  Description of Artificial Sequence: Synthetic oligonucleotide
  Target: LAMA2; (-) strand; PAM type: NRG; PAM sequence: GAG
gaatccaaggagagcttgaa

SEQ ID NO: 96586 - DNA, 20 bp, Artificial Sequence
  Description of Artificial Sequence: Synthetic oligonucleotide
  Target: LAMA2; (-) strand; PAM type: NRG; PAM sequence: AAG
gggaatccaaggagagcttg

SEQ ID NO: 96587 - DNA, 20 bp, Artificial Sequence
  Description of Artificial Sequence: Synthetic oligonucleotide
  Target: LAMA2; (-) strand; PAM type: NRG; PAM sequence: GAG
agacttggggaatccaagga

SEQ ID NO: 96588 - DNA, 20 bp, Artificial Sequence
  Description of Artificial Sequence: Synthetic oligonucleotide
  Target: LAMA2; (-) strand; PAM type: NRG; PAM sequence: GAG
ctagacttggggaatccaag

SEQ ID NO: 96589 - DNA, 20 bp, Artificial Sequence
  Description of Artificial Sequence: Synthetic oligonucleotide
  Target: LAMA2; (-) strand; PAM type: NRG; PAM sequence: AGG
gactagacttggggaatcca

SEQ ID NO: 96590 - DNA, 20 bp, Artificial Sequence
  Description of Artificial Sequence: Synthetic oligonucleotide
  Target: LAMA2; (-) strand; PAM type: NRG; PAM sequence: AAG
agactagacttggggaatcc

SEQ ID NO: 96591 - DNA, 20 bp, Artificial Sequence
  Description of Artificial Sequence: Synthetic oligonucleotide
  Target: LAMA2; (-) strand; PAM type: NRG; PAM sequence: GGG
agggcatcagactagacttg

SEQ ID NO: 96592 - DNA, 20 bp, Artificial Sequence
  Description of Artificial Sequence: Synthetic oligonucleotide
  Target: LAMA2; (-) strand; PAM type: NRG; PAM sequence: GGG
aagggcatcagactagactt

SEQ ID NO: 96593 - DNA, 20 bp, Artificial Sequence
  Description of Artificial Sequence: Synthetic oligonucleotide
  Target: LAMA2; (-) strand; PAM type: NRG; PAM sequence: TGG
aaagggcatcagactagact

SEQ ID NO: 96594 - DNA, 20 bp, Artificial Sequence
  Description of Artificial Sequence: Synthetic oligonucleotide
  Target: LAMA2; (-) strand; PAM type: NRG; PAM sequence: TAG
acatacaaagggcatcagac

SEQ ID NO: 96595 - DNA, 20 bp, Artificial Sequence
  Description of Artificial Sequence: Synthetic oligonucleotide
  Target: LAMA2; (-) strand; PAM type: NRG; PAM sequence: CAG
tgtgaacatacaaagggcat

SEQ ID NO: 96596 - DNA, 20 bp, Artificial Sequence
  Description of Artificial Sequence: Synthetic oligonucleotide
  Target: LAMA2; (-) strand; PAM type: NRG; PAM sequence: GGG
atgctatgtgaacatacaaa

SEQ ID NO: 96597 - DNA, 20 bp, Artificial Sequence
  Description of Artificial Sequence: Synthetic oligonucleotide
  Target: LAMA2; (-) strand; PAM type: NRG; PAM sequence: AGG
aatgctatgtgaacatacaa

SEQ ID NO: 96598 - DNA, 20 bp, Artificial Sequence
  Description of Artificial Sequence: Synthetic oligonucleotide
  Target: LAMA2; (-) strand; PAM type: NRG; PAM sequence: AAG
aaatgctatgtgaacataca

SEQ ID NO: 96599 - DNA, 20 bp, Artificial Sequence
  Description of Artificial Sequence: Synthetic oligonucleotide
  Target: LAMA2; (-) strand; PAM type: NRG; PAM sequence: AAG
taagcattatataataggag

SEQ ID NO: 96600 - DNA, 20 bp, Artificial Sequence
  Description of Artificial Sequence: Synthetic oligonucleotide
  Target: LAMA2; (-) strand; PAM type: NRG; PAM sequence: GAG
gaataagcattatataatag

SEQ ID NO: 96601 - DNA, 20 bp, Artificial Sequence
  Description of Artificial Sequence: Synthetic oligonucleotide
  Target: LAMA2; (-) strand; PAM type: NRG; PAM sequence: AGG
tagaataagcattatataat

SEQ ID NO: 96602 - DNA, 20 bp, Artificial Sequence
  Description of Artificial Sequence: Synthetic oligonucleotide
  Target: LAMA2; (-) strand; PAM type: NRG; PAM sequence: TAG
atagaataagcattatataa

SEQ ID NO: 96603 - DNA, 20 bp, Artificial Sequence
  Description of Artificial Sequence: Synthetic oligonucleotide
  Target: LAMA2; (-) strand; PAM type: NRG; PAM sequence: AAG
ttagcataacatgatagaat

SEQ ID NO: 96604 - DNA, 20 bp, Artificial Sequence
  Description of Artificial Sequence: Synthetic oligonucleotide
  Target: LAMA2; (-) strand; PAM type: NRG; PAM sequence: TAG
aatatgttagcataacatga

SEQ ID NO: 96605 - DNA, 20 bp, Artificial Sequence
  Description of Artificial Sequence: Synthetic oligonucleotide
  Target: LAMA2; (-) strand; PAM type: NRG; PAM sequence: TAG
agggagacaagtaaatatgt

SEQ ID NO: 96606 - DNA, 20 bp, Artificial Sequence
  Description of Artificial Sequence: Synthetic oligonucleotide
  Target: LAMA2; (-) strand; PAM type: NRG; PAM sequence: AAG
acggtctagtagagggagac

SEQ ID NO: 96607 - DNA, 20 bp, Artificial Sequence
  Description of Artificial Sequence: Synthetic oligonucleotide
  Target: LAMA2; (-) strand; PAM type: NRG; PAM sequence: GAG
accttacggtctagtagagg

SEQ ID NO: 96608 - DNA, 20 bp, Artificial Sequence
  Description of Artificial Sequence: Synthetic oligonucleotide
  Target: LAMA2; (-) strand; PAM type: NRG; PAM sequence: GGG
ataccttacggtctagtaga

SEQ ID NO: 96609 - DNA, 20 bp, Artificial Sequence
  Description of Artificial Sequence: Synthetic oligonucleotide
  Target: LAMA2; (-) strand; PAM type: NRG; PAM sequence: AGG
cataccttacggtctagtag

SEQ ID NO: 96610 - DNA, 20 bp, Artificial Sequence
  Description of Artificial Sequence: Synthetic oligonucleotide
  Target: LAMA2; (-) strand; PAM type: NRG; PAM sequence: GAG
acataccttacggtctagta

SEQ ID NO: 96611 - DNA, 20 bp, Artificial Sequence
  Description of Artificial Sequence: Synthetic oligonucleotide
  Target: LAMA2; (-) strand; PAM type: NRG; PAM sequence: TAG
agacataccttacggtctag

SEQ ID NO: 96612 - DNA, 20 bp, Artificial Sequence
  Description of Artificial Sequence: Synthetic oligonucleotide
  Target: LAMA2; (-) strand; PAM type: NRG; PAM sequence: TAG
tggagacataccttacggtc

SEQ ID NO: 96613 - DNA, 20 bp, Artificial Sequence
  Description of Artificial Sequence: Synthetic oligonucleotide
  Target: LAMA2; (-) strand; PAM type: NRG; PAM sequence: CGG
ttatttggagacatacctta

SEQ ID NO: 96614 - DNA, 20 bp, Artificial Sequence
  Description of Artificial Sequence: Synthetic oligonucleotide
  Target: LAMA2; (-) strand; PAM type: NRG; PAM sequence: GAG
agcatttaaacatttatttg

SEQ ID NO: 96615 - DNA, 20 bp, Artificial Sequence
  Description of Artificial Sequence: Synthetic oligonucleotide
  Target: LAMA2; (-) strand; PAM type: NRG; PAM sequence: TGG
gtagcatttaaacatttatt

SEQ ID NO: 96616 - DNA, 20 bp, Artificial Sequence
  Description of Artificial Sequence: Synthetic oligonucleotide
  Target: LAMA2; (-) strand; PAM type: NRG; PAM sequence: TAG
accttattatctcataattg

SEQ ID NO: 96617 - DNA, 20 bp, Artificial Sequence
  Description of Artificial Sequence: Synthetic oligonucleotide
  Target: LAMA2; (-) strand; PAM type: NRG; PAM sequence: AAG
caaagattaaattttagaca

SEQ ID NO: 96618 - DNA, 20 bp, Artificial Sequence
  Description of Artificial Sequence: Synthetic oligonucleotide
  Target: LAMA2; (-) strand; PAM type: NRG; PAM sequence: TAG
ttgtctcaaagattaaattt

SEQ ID NO: 96619 - DNA, 20 bp, Artificial Sequence
  Description of Artificial Sequence: Synthetic oligonucleotide
  Target: LAMA2; (-) strand; PAM type: NRG; PAM sequence: AAG
tttccaactgctttgtctca

SEQ ID NO: 96620 - DNA, 20 bp, Artificial Sequence
  Description of Artificial Sequence: Synthetic oligonucleotide
  Target: LAMA2; (-) strand; PAM type: NRG; PAM sequence: GGG
ggtagagaggggctgggtat

SEQ ID NO: 96621 - DNA, 20 bp, Artificial Sequence
  Description of Artificial Sequence: Synthetic oligonucleotide
  Target: LAMA2; (-) strand; PAM type: NRG; PAM sequence: TGG
aggtagagaggggctgggta

SEQ ID NO: 96622 - DNA, 20 bp, Artificial Sequence
  Description of Artificial Sequence: Synthetic oligonucleotide
  Target: LAMA2; (-) strand; PAM type: NRG; PAM sequence: GGG
ttctgaggtagagaggggct

SEQ ID NO: 96623 - DNA, 20 bp, Artificial Sequence
  Description of Artificial Sequence: Synthetic oligonucleotide
  Target: LAMA2; (-) strand; PAM type: NRG; PAM sequence: TGG
tttctgaggtagagaggggc

SEQ ID NO: 96624 - DNA, 20 bp, Artificial Sequence
  Description of Artificial Sequence: Synthetic oligonucleotide
  Target: LAMA2; (-) strand; PAM type: NRG; PAM sequence: GGG
tctctttctgaggtagagag

SEQ ID NO: 96625 - DNA, 20 bp, Artificial Sequence
  Description of Artificial Sequence: Synthetic oligonucleotide
  Target: LAMA2; (-) strand; PAM type: NRG; PAM sequence: GGG
ctctctttctgaggtagaga

SEQ ID NO: 96626 - DNA, 20 bp, Artificial Sequence
  Description of Artificial Sequence: Synthetic oligonucleotide
  Target: LAMA2; (-) strand; PAM type: NRG; PAM sequence: AGG
tctctctttctgaggtagag

SEQ ID NO: 96627 - DNA, 20 bp, Artificial Sequence
  Description of Artificial Sequence: Synthetic oligonucleotide
  Target: LAMA2; (-) strand; PAM type: NRG; PAM sequence: GAG
ttctctctttctgaggtaga

SEQ ID NO: 96628 - DNA, 20 bp, Artificial Sequence
  Description of Artificial Sequence: Synthetic oligonucleotide
  Target: LAMA2; (-) strand; PAM type: NRG; PAM sequence: GAG
tcttctctctttctgaggta

SEQ ID NO: 96629 - DNA, 20 bp, Artificial Sequence
  Description of Artificial Sequence: Synthetic oligonucleotide
  Target: LAMA2; (-) strand; PAM type: NRG; PAM sequence: TAG
tgtcttctctctttctgagg

SEQ ID NO: 96630 - DNA, 20 bp, Artificial Sequence
  Description of Artificial Sequence: Synthetic oligonucleotide
  Target: LAMA2; (-) strand; PAM type: NRG; PAM sequence: AGG
atgtgtcttctctctttctg

SEQ ID NO: 96631 - DNA, 20 bp, Artificial Sequence
  Description of Artificial Sequence: Synthetic oligonucleotide
  Target: LAMA2; (-) strand; PAM type: NRG; PAM sequence: GAG
aatgtgtcttctctctttct

SEQ ID NO: 96632 - DNA, 20 bp, Artificial Sequence
  Description of Artificial Sequence: Synthetic oligonucleotide
  Target: LAMA2; (-) strand; PAM type: NRG; PAM sequence: AAG
ataatgctatgtgaattaga

SEQ ID NO: 96633 - DNA, 20 bp, Artificial Sequence
  Description of Artificial Sequence: Synthetic oligonucleotide
  Target: LAMA2; (-) strand; PAM type: NRG; PAM sequence: TAG
aaccataatgctatgtgaat

SEQ ID NO: 96634 - DNA, 20 bp, Artificial Sequence
  Description of Artificial Sequence: Synthetic oligonucleotide
  Target: LAMA2; (-) strand; PAM type: NRG; PAM sequence: CAG
tatggaaatatatgatcgtc

SEQ ID NO: 96635 - DNA, 20 bp, Artificial Sequence
  Description of Artificial Sequence: Synthetic oligonucleotide
  Target: LAMA2; (-) strand; PAM type: NRG; PAM sequence: TGG
aaaattgcttcctgcattta

SEQ ID NO: 96636 - DNA, 20 bp, Artificial Sequence
  Description of Artificial Sequence: Synthetic oligonucleotide
  Target: LAMA2; (-) strand; PAM type: NRG; PAM sequence: CAG
tttagtcacttgggaaacat

SEQ ID NO: 96637 - DNA, 20 bp, Artificial Sequence
  Description of Artificial Sequence: Synthetic oligonucleotide
  Target: LAMA2; (-) strand; PAM type: NRG; PAM sequence: GGG
ctattctagtttagtcactt

SEQ ID NO: 96638 - DNA, 20 bp, Artificial Sequence
  Description of Artificial Sequence: Synthetic oligonucleotide
  Target: LAMA2; (-) strand; PAM type: NRG; PAM sequence: TGG
actattctagtttagtcact

SEQ ID NO: 96639 - DNA, 20 bp, Artificial Sequence
  Description of Artificial Sequence: Synthetic oligonucleotide
  Target: LAMA2; (-) strand; PAM type: NRG; PAM sequence: TAG
ggctttgtactattctagtt

SEQ ID NO: 96640 - DNA, 20 bp, Artificial Sequence
  Description of Artificial Sequence: Synthetic oligonucleotide
  Target: LAMA2; (-) strand; PAM type: NRG; PAM sequence: TAG
ttataggctttgtactattc

SEQ ID NO: 96641 - DNA, 20 bp, Artificial Sequence
  Description of Artificial Sequence: Synthetic oligonucleotide
  Target: LAMA2; (-) strand; PAM type: NRG; PAM sequence: AGG
attaatcatgtatctgttat

SEQ ID NO: 96642 - DNA, 20 bp, Artificial Sequence
  Description of Artificial Sequence: Synthetic oligonucleotide
  Target: LAMA2; (-) strand; PAM type: NRG; PAM sequence: TAG
tattaatcatgtatctgtta

SEQ ID NO: 96643 - DNA, 20 bp, Artificial Sequence
  Description of Artificial Sequence: Synthetic oligonucleotide
  Target: LAMA2; (-) strand; PAM type: NRG; PAM sequence: GGG
aaccattaacacaactttat

SEQ ID NO: 96644 - DNA, 20 bp, Artificial Sequence
  Description of Artificial Sequence: Synthetic oligonucleotide
  Target: LAMA2; (-) strand; PAM type: NRG; PAM sequence: TGG
caaccattaacacaacttta

SEQ ID NO: 96645 - DNA, 20 bp, Artificial Sequence
  Description of Artificial Sequence: Synthetic oligonucleotide
  Target: LAMA2; (-) strand; PAM type: NRG; PAM sequence: CAG
gcctatagaggagataaaaa

SEQ ID NO: 96646 - DNA, 20 bp, Artificial Sequence
  Description of Artificial Sequence: Synthetic oligonucleotide
  Target: LAMA2; (-) strand; PAM type: NRG; PAM sequence: GAG
gcagttacaagcctatagag

SEQ ID NO: 96647 - DNA, 20 bp, Artificial Sequence
  Description of Artificial Sequence: Synthetic oligonucleotide
  Target: LAMA2; (-) strand; PAM type: NRG; PAM sequence: AGG
ctgcagttacaagcctatag

SEQ ID NO: 96648 - DNA, 20 bp, Artificial Sequence
  Description of Artificial Sequence: Synthetic oligonucleotide
  Target: LAMA2; (-) strand; PAM type: NRG; PAM sequence: GAG
gctgcagttacaagcctata

SEQ ID NO: 96649 - DNA, 20 bp, Artificial Sequence
  Description of Artificial Sequence: Synthetic oligonucleotide
  Target: LAMA2; (-) strand; PAM type: NRG; PAM sequence: TAG
gtgctgcagttacaagccta

SEQ ID NO: 96650 - DNA, 20 bp, Artificial Sequence
  Description of Artificial Sequence: Synthetic oligonucleotide
  Target: LAMA2; (-) strand; PAM type: NRG; PAM sequence: AAG
tcccactgtgctgcagttac

SEQ ID NO: 96651 - DNA, 20 bp, Artificial Sequence
  Description of Artificial Sequence: Synthetic oligonucleotide
  Target: LAMA2; (-) strand; PAM type: NRG; PAM sequence: CAG
ccaaggatcccactgtgctg

SEQ ID NO: 96652 - DNA, 20 bp, Artificial Sequence
  Description of Artificial Sequence: Synthetic oligonucleotide
  Target: LAMA2; (-) strand; PAM type: NRG; PAM sequence: AGG
tacattgcattggaaatcca

SEQ ID NO: 96653 - DNA, 20 bp, Artificial Sequence
  Description of Artificial Sequence: Synthetic oligonucleotide
  Target: LAMA2; (-) strand; PAM type: NRG; PAM sequence: AAG
ttacattgcattggaaatcc

SEQ ID NO: 96654 - DNA, 20 bp, Artificial Sequence
  Description of Artificial Sequence: Synthetic oligonucleotide
  Target: LAMA2; (-) strand; PAM type: NRG; PAM sequence: TGG
ggcctgtatttacattgcat

SEQ ID NO: 96655 - DNA, 20 bp, Artificial Sequence
  Description of Artificial Sequence: Synthetic oligonucleotide
  Target: LAMA2; (-) strand; PAM type: NRG; PAM sequence: TGG
attttggatgacagttgcat

SEQ ID NO: 96656 - DNA, 20 bp, Artificial Sequence
  Description of Artificial Sequence: Synthetic oligonucleotide
  Target: LAMA2; (-) strand; PAM type: NRG; PAM sequence: CAG
caccagagaattttggatga

SEQ ID NO: 96657 - DNA, 20 bp, Artificial Sequence
  Description of Artificial Sequence: Synthetic oligonucleotide
  Target: LAMA2; (-) strand; PAM type: NRG; PAM sequence: TGG
cattttgcaccagagaattt

SEQ ID NO: 96658 - DNA, 20 bp, Artificial Sequence
  Description of Artificial Sequence: Synthetic oligonucleotide
  Target: LAMA2; (-) strand; PAM type: NRG; PAM sequence: GAG
actctgtacattttgcacca

SEQ ID NO: 96659 - DNA, 20 bp, Artificial Sequence
  Description of Artificial Sequence: Synthetic oligonucleotide
  Target: LAMA2; (-) strand; PAM type: NRG; PAM sequence: CAG
gcactctgtacattttgcac

SEQ ID NO: 96660 - DNA, 20 bp, Artificial Sequence
  Description of Artificial Sequence: Synthetic oligonucleotide
  Target: LAMA2; (-) strand; PAM type: NRG; PAM sequence: CAG
gattgcagcgagggtagttc

SEQ ID NO: 96661 - DNA, 20 bp, Artificial Sequence
  Description of Artificial Sequence: Synthetic oligonucleotide
  Target: LAMA2; (-) strand; PAM type: NRG; PAM sequence: TAG
cacagagattgcagcgaggg

SEQ ID NO: 96662 - DNA, 20 bp, Artificial Sequence
  Description of Artificial Sequence: Synthetic oligonucleotide
  Target: LAMA2; (-) strand; PAM type: NRG; PAM sequence: GGG
agtcacagagattgcagcga

SEQ ID NO: 96663 - DNA, 20 bp, Artificial Sequence
  Description of Artificial Sequence: Synthetic oligonucleotide
  Target: LAMA2; (-) strand; PAM type: NRG; PAM sequence: AGG
cagtcacagagattgcagcg

SEQ ID NO: 96664 - DNA, 20 bp, Artificial Sequence
  Description of Artificial Sequence: Synthetic oligonucleotide
  Target: LAMA2; (-) strand; PAM type: NRG; PAM sequence: GAG
gcagtcacagagattgcagc

SEQ ID NO: 96665 - DNA, 20 bp, Artificial Sequence
  Description of Artificial Sequence: Synthetic oligonucleotide
  Target: LAMA2; (-) strand; PAM type: NRG; PAM sequence: CAG
ggaagcagtcacagagattg

SEQ ID NO: 96666 - DNA, 20 bp, Artificial Sequence
  Description of Artificial Sequence: Synthetic oligonucleotide
  Target: LAMA2; (-) strand; PAM type: NRG; PAM sequence: GAG
ccagggaggaagcagtcaca

SEQ ID NO: 96667 - DNA, 20 bp, Artificial Sequence
  Description of Artificial Sequence: Synthetic oligonucleotide
  Target: LAMA2; (-) strand; PAM type: NRG; PAM sequence: CAG
tcccagggaggaagcagtca

SEQ ID NO: 96668 - DNA, 20 bp, Artificial Sequence
  Description of Artificial Sequence: Synthetic oligonucleotide
  Target: LAMA2; (-) strand; PAM type: NRG; PAM sequence: CAG
catctgtcccagggaggaag

SEQ ID NO: 96669 - DNA, 20 bp, Artificial Sequence
  Description of Artificial Sequence: Synthetic oligonucleotide
  Target: LAMA2; (-) strand; PAM type: NRG; PAM sequence: AAG
tggcatctgtcccagggagg

SEQ ID NO: 96670 - DNA, 20 bp, Artificial Sequence
  Description of Artificial Sequence: Synthetic oligonucleotide
  Target: LAMA2; (-) strand; PAM type: NRG; PAM sequence: AGG
ttgtggcatctgtcccaggg

SEQ ID NO: 96671 - DNA, 20 bp, Artificial Sequence
  Description of Artificial Sequence: Synthetic oligonucleotide
  Target: LAMA2; (-) strand; PAM type: NRG; PAM sequence: GAG
gttgtggcatctgtcccagg

SEQ ID NO: 96672 - DNA, 20 bp, Artificial Sequence
  Description of Artificial Sequence: Synthetic oligonucleotide
  Target: LAMA2; (-) strand; PAM type: NRG; PAM sequence: GGG
aggttgtggcatctgtccca

SEQ ID NO: 96673 - DNA, 20 bp, Artificial Sequence
  Description of Artificial Sequence: Synthetic oligonucleotide
  Target: LAMA2; (-) strand; PAM type: NRG; PAM sequence: AGG
caggttgtggcatctgtccc

SEQ ID NO: 96674 - DNA, 20 bp, Artificial Sequence
  Description of Artificial Sequence: Synthetic oligonucleotide
  Target: LAMA2; (-) strand; PAM type: NRG; PAM sequence: CAG
acaggttgtggcatctgtcc

SEQ ID NO: 96675 - DNA, 20 bp, Artificial Sequence
  Description of Artificial Sequence: Synthetic oligonucleotide
  Target: LAMA2; (-) strand; PAM type: NRG; PAM sequence: TGG
agtctctgaatcacaggttg

SEQ ID NO: 96676 - DNA, 20 bp, Artificial Sequence
  Description of Artificial Sequence: Synthetic oligonucleotide
  Target: LAMA2; (-) strand; PAM type: NRG; PAM sequence: AGG
ttttttagtctctgaatcac

SEQ ID NO: 96677 - DNA, 20 bp, Artificial Sequence
  Description of Artificial Sequence: Synthetic oligonucleotide
  Target: LAMA2; (-) strand; PAM type: NRG; PAM sequence: CAG
attttttagtctctgaatca

SEQ ID NO: 96678 - DNA, 20 bp, Artificial Sequence
  Description of Artificial Sequence: Synthetic oligonucleotide
  Target: LAMA2; (-) strand; PAM type: NRG; PAM sequence: TAG
atcactacaggagcattttt

SEQ ID NO: 96679 - DNA, 20 bp, Artificial Sequence
  Description of Artificial Sequence: Synthetic oligonucleotide
  Target: LAMA2; (-) strand; PAM type: NRG; PAM sequence: GAG
gcccagtttgatcactacag

SEQ ID NO: 96680 - DNA, 20 bp, Artificial Sequence
  Description of Artificial Sequence: Synthetic oligonucleotide
  Target: LAMA2; (-) strand; PAM type: NRG; PAM sequence: AGG
ctgcccagtttgatcactac

SEQ ID NO: 96681 - DNA, 20 bp, Artificial Sequence
  Description of Artificial Sequence: Synthetic oligonucleotide
  Target: LAMA2; (-) strand; PAM type: NRG; PAM sequence: CAG
actgcccagtttgatcacta

SEQ ID NO: 96682 - DNA, 20 bp, Artificial Sequence
  Description of Artificial Sequence: Synthetic oligonucleotide
  Target: LAMA2; (-) strand; PAM type: NRG; PAM sequence: CAG
taccttacaagtgcactgcc

SEQ ID NO: 96683 - DNA, 20 bp, Artificial Sequence
  Description of Artificial Sequence: Synthetic oligonucleotide
  Target: LAMA2; (-) strand; PAM type: NRG; PAM sequence: AAG
gtcagcagcacataccttac

SEQ ID NO: 96684 - DNA, 20 bp, Artificial Sequence
  Description of Artificial Sequence: Synthetic oligonucleotide
  Target: LAMA2; (-) strand; PAM type: NRG; PAM sequence: CAG
tttccctagctgcatgtcag

SEQ ID NO: 96685 - DNA, 20 bp, Artificial Sequence
  Description of Artificial Sequence: Synthetic oligonucleotide
  Target: LAMA2; (-) strand; PAM type: NRG; PAM sequence: CAG
ggttttccctagctgcatgt

SEQ ID NO: 96686 - DNA, 20 bp, Artificial Sequence
  Description of Artificial Sequence: Synthetic oligonucleotide
  Target: LAMA2; (-) strand; PAM type: NRG; PAM sequence: TAG
gaattgagggaggttttccc

SEQ ID NO: 96687 - DNA, 20 bp, Artificial Sequence
  Description of Artificial Sequence: Synthetic oligonucleotide
  Target: LAMA2; (-) strand; PAM type: NRG; PAM sequence: AGG
aatggaaacagaattgaggg

SEQ ID NO: 96688 - DNA, 20 bp, Artificial Sequence
  Description of Artificial Sequence: Synthetic oligonucleotide
  Target: LAMA2; (-) strand; PAM type: NRG; PAM sequence: GAG
caatggaaacagaattgagg

SEQ ID NO: 96689 - DNA, 20 bp, Artificial Sequence
  Description of Artificial Sequence: Synthetic oligonucleotide
  Target: LAMA2; (-) strand; PAM type: NRG; PAM sequence: GGG
agcaatggaaacagaattga

SEQ ID NO: 96690 - DNA, 20 bp, Artificial Sequence
  Description of Artificial Sequence: Synthetic oligonucleotide
  Target: LAMA2; (-) strand; PAM type: NRG; PAM sequence: AGG
gagcaatggaaacagaattg

SEQ ID NO: 96691 - DNA, 20 bp, Artificial Sequence
  Description of Artificial Sequence: Synthetic oligonucleotide
  Target: LAMA2; (-) strand; PAM type: NRG; PAM sequence: GAG
tgagcaatggaaacagaatt

SEQ ID NO: 96692 - DNA, 20 bp, Artificial Sequence
  Description of Artificial Sequence: Synthetic oligonucleotide
  Target: LAMA2; (-) strand; PAM type: NRG; PAM sequence: CAG
ttaaaactgagcaatggaaa

SEQ ID NO: 96693 - DNA, 20 bp, Artificial Sequence
  Description of Artificial Sequence: Synthetic oligonucleotide
  Target: LAMA2; (-) strand; PAM type: NRG; PAM sequence: TGG
atgaagttaaaactgagcaa

SEQ ID NO: 96694 - DNA, 20 bp, Artificial Sequence
  Description of Artificial Sequence: Synthetic oligonucleotide
  Target: LAMA2; (-) strand; PAM type: NRG; PAM sequence: GAG
cactgaatgaagttaaaact

SEQ ID NO: 96695 - DNA, 20 bp, Artificial Sequence
  Description of Artificial Sequence: Synthetic oligonucleotide
  Target: LAMA2; (-) strand; PAM type: NRG; PAM sequence: AAG
ggtataacaaacactgaatg

SEQ ID NO: 96696 - DNA, 20 bp, Artificial Sequence
  Description of Artificial Sequence: Synthetic oligonucleotide
  Target: LAMA2; (-) strand; PAM type: NRG; PAM sequence: AGG
tttgtttagcttaatgaagc

SEQ ID NO: 96697 - DNA, 20 bp, Artificial Sequence
  Description of Artificial Sequence: Synthetic oligonucleotide
  Target: LAMA2; (-) strand; PAM type: NRG; PAM sequence: CAG
gtttgtttagcttaatgaag

SEQ ID NO: 96698 - DNA, 20 bp, Artificial Sequence
  Description of Artificial Sequence: Synthetic oligonucleotide
  Target: LAMA2; (-) strand; PAM type: NRG; PAM sequence: AAG
tctgtttgtttagcttaatg

SEQ ID NO: 96699 - DNA, 20 bp, Artificial Sequence
  Description of Artificial Sequence: Synthetic oligonucleotide
  Target: LAMA2; (-) strand; PAM type: NRG; PAM sequence: TAG
attttgtccatctgtttgtt

SEQ ID NO: 96700 - DNA, 20 bp, Artificial Sequence
  Description of Artificial Sequence: Synthetic oligonucleotide
  Target: LAMA2; (-) strand; PAM type: NRG; PAM sequence: GAG
aaaactccatgtctggcaat

SEQ ID NO: 96701 - DNA, 20 bp, Artificial Sequence
  Description of Artificial Sequence: Synthetic oligonucleotide
  Target: LAMA2; (-) strand; PAM type: NRG; PAM sequence: TGG
atcaatgaaaactccatgtc

SEQ ID NO: 96702 - DNA, 20 bp, Artificial Sequence
  Description of Artificial Sequence: Synthetic oligonucleotide
  Target: LAMA2; (-) strand; PAM type: NRG; PAM sequence: CGG
tctagaaaagcagtgtttat

SEQ ID NO: 96703 - DNA, 20 bp, Artificial Sequence
  Description of Artificial Sequence: Synthetic oligonucleotide
  Target: LAMA2; (-) strand; PAM type: NRG; PAM sequence: CAG
gaaaataagctctagaaaag

SEQ ID NO: 96704 - DNA, 20 bp, Artificial Sequence
  Description of Artificial Sequence: Synthetic oligonucleotide
  Target: LAMA2; (-) strand; PAM type: NRG; PAM sequence: AAG
gttgaaaataagctctagaa

SEQ ID NO: 96705 - DNA, 20 bp, Artificial Sequence
  Description of Artificial Sequence: Synthetic oligonucleotide
  Target: LAMA2; (-) strand; PAM type: NRG; PAM sequence: TAG
tttgggttgaaaataagctc

SEQ ID NO: 96706 - DNA, 20 bp, Artificial Sequence
  Description of Artificial Sequence: Synthetic oligonucleotide
  Target: LAMA2; (-) strand; PAM type: NRG; PAM sequence: AAG
ggtgggtttgggttgaaaat

SEQ ID NO: 96707 - DNA, 20 bp, Artificial Sequence
  Description of Artificial Sequence: Synthetic oligonucleotide
  Target: LAMA2; (-) strand; PAM type: NRG; PAM sequence: GGG
ctagaaaaaaaggtgggttt

SEQ ID NO: 96708 - DNA, 20 bp, Artificial Sequence
  Description of Artificial Sequence: Synthetic oligonucleotide
  Target: LAMA2; (-) strand; PAM type: NRG; PAM sequence: TGG
actagaaaaaaaggtgggtt

SEQ ID NO: 96709 - DNA, 20 bp, Artificial Sequence
  Description of Artificial Sequence: Synthetic oligonucleotide
  Target: LAMA2; (-) strand; PAM type: NRG; PAM sequence: GGG
caccaactagaaaaaaaggt

SEQ ID NO: 96710 - DNA, 20 bp, Artificial Sequence
  Description of Artificial Sequence: Synthetic oligonucleotide
  Target: LAMA2; (-) strand; PAM type: NRG; PAM sequence: TGG
ccaccaactagaaaaaaagg

SEQ ID NO: 96711 - DNA, 20 bp, Artificial Sequence
  Description of Artificial Sequence: Synthetic oligonucleotide
  Target: LAMA2; (-) strand; PAM type: NRG; PAM sequence: AGG
tctccaccaactagaaaaaa

SEQ ID NO: 96712 - DNA, 20 bp, Artificial Sequence
  Description of Artificial Sequence: Synthetic oligonucleotide
  Target: LAMA2; (-) strand; PAM type: NRG; PAM sequence: AAG
atctccaccaactagaaaaa

SEQ ID NO: 96713 - DNA, 20 bp, Artificial Sequence
  Description of Artificial Sequence: Synthetic oligonucleotide
  Target: LAMA2; (-) strand; PAM type: NRG; PAM sequence: TAG
aatagatcatctccaccaac

SEQ ID NO: 96714 - DNA, 20 bp, Artificial Sequence
  Description of Artificial Sequence: Synthetic oligonucleotide
  Target: LAMA2; (-) strand; PAM type: NRG; PAM sequence: TAG
aatcactataccattgaaaa

SEQ ID NO: 96715 - DNA, 20 bp, Artificial Sequence
  Description of Artificial Sequence: Synthetic oligonucleotide
  Target: LAMA2; (-) strand; PAM type: NRG; PAM sequence: AAG
ctcccagattgtccttatcg

SEQ ID NO: 96716 - DNA, 20 bp, Artificial Sequence
  Description of Artificial Sequence: Synthetic oligonucleotide
  Target: LAMA2; (-) strand; PAM type: NRG; PAM sequence: CAG
gtcttccctgccacccctcc

SEQ ID NO: 96717 - DNA, 20 bp, Artificial Sequence
  Description of Artificial Sequence: Synthetic oligonucleotide
  Target: LAMA2; (-) strand; PAM type: NRG; PAM sequence: AAG
ttttctctgatgatgcttaa

SEQ ID NO: 96718 - DNA, 20 bp, Artificial Sequence
  Description of Artificial Sequence: Synthetic oligonucleotide
  Target: LAMA2; (-) strand; PAM type: NRG; PAM sequence: TAG
tttttataagccttattatt

SEQ ID NO: 96719 - DNA, 20 bp, Artificial Sequence
  Description of Artificial Sequence: Synthetic oligonucleotide
  Target: LAMA2; (-) strand; PAM type: NRG; PAM sequence: AAG
tttggagaaatggtttttat

SEQ ID NO: 96720 - DNA, 20 bp, Artificial Sequence
  Description of Artificial Sequence: Synthetic oligonucleotide
  Target: LAMA2; (-) strand; PAM type: NRG; PAM sequence: TGG
cagattaatttttggagaaa

SEQ ID NO: 96721 - DNA, 20 bp, Artificial Sequence
  Description of Artificial Sequence: Synthetic oligonucleotide
  Target: LAMA2; (-) strand; PAM type: NRG; PAM sequence: GAG
cgattgcagattaatttttg

SEQ ID NO: 96722 - DNA, 20 bp, Artificial Sequence
  Description of Artificial Sequence: Synthetic oligonucleotide
  Target: LAMA2; (-) strand; PAM type: NRG; PAM sequence: TGG
agcgattgcagattaatttt

SEQ ID NO: 96723 - DNA, 20 bp, Artificial Sequence
  Description of Artificial Sequence: Synthetic oligonucleotide
  Target: LAMA2; (-) strand; PAM type: NRG; PAM sequence: CAG
tttctagtatacagcgattg

SEQ ID NO: 96724 - DNA, 20 bp, Artificial Sequence
  Description of Artificial Sequence: Synthetic oligonucleotide
  Target: LAMA2; (-) strand; PAM type: NRG; PAM sequence: CAG
taaatatattttctagtata

SEQ ID NO: 96725 - DNA, 20 bp, Artificial Sequence
  Description of Artificial Sequence: Synthetic oligonucleotide
  Target: LAMA2; (-) strand; PAM type: NRG; PAM sequence: TAG
acagcagtaaatatattttc

SEQ ID NO: 96726 - DNA, 20 bp, Artificial Sequence
  Description of Artificial Sequence: Synthetic oligonucleotide
  Target: LAMA2; (-) strand; PAM type: NRG; PAM sequence: CAG
attttactaaacttccacag

SEQ ID NO: 96727 - DNA, 20 bp, Artificial Sequence
  Description of Artificial Sequence: Synthetic oligonucleotide
  Target: LAMA2; (-) strand; PAM type: NRG; PAM sequence: CAG
gaaattttactaaacttcca

SEQ ID NO: 96728 - DNA, 20 bp, Artificial Sequence
  Description of Artificial Sequence: Synthetic oligonucleotide
  Target: LAMA2; (-) strand; PAM type: NRG; PAM sequence: CAG
atagtcactgtttgtaatga

SEQ ID NO: 96729 - DNA, 20 bp, Artificial Sequence
  Description of Artificial Sequence: Synthetic oligonucleotide
  Target: LAMA2; (-) strand; PAM type: NRG; PAM sequence: TAG
tgagggctgaaatttgcaca

SEQ ID NO: 96730 - DNA, 20 bp, Artificial Sequence
  Description of Artificial Sequence: Synthetic oligonucleotide
  Target: LAMA2; (-) strand; PAM type: NRG; PAM sequence: GGG
tcatttaaccatattaatga

SEQ ID NO: 96731 - DNA, 20 bp, Artificial Sequence
  Description of Artificial Sequence: Synthetic oligonucleotide
  Target: LAMA2; (-) strand; PAM type: NRG; PAM sequence: AGG
atcatttaaccatattaatg

SEQ ID NO: 96732 - DNA, 20 bp, Artificial Sequence
  Description of Artificial Sequence: Synthetic oligonucleotide
  Target: LAMA2; (-) strand; PAM type: NRG; PAM sequence: GAG
catcatttaaccatattaat

SEQ ID NO: 96733 - DNA, 20 bp, Artificial Sequence
  Description of Artificial Sequence: Synthetic oligonucleotide
  Target: LAMA2; (-) strand; PAM type: NRG; PAM sequence: TGG
atcctttttacctttttaat

SEQ ID NO: 96734 - DNA, 20 bp, Artificial Sequence
  Description of Artificial Sequence: Synthetic oligonucleotide
  Target: LAMA2; (-) strand; PAM type: NRG; PAM sequence: GGG
atttttcagaactatctgag

SEQ ID NO: 96735 - DNA, 20 bp, Artificial Sequence
  Description of Artificial Sequence: Synthetic oligonucleotide
  Target: LAMA2; (-) strand; PAM type: NRG; PAM sequence: GGG
gatttttcagaactatctga

SEQ ID NO: 96736 - DNA, 20 bp, Artificial Sequence
  Description of Artificial Sequence: Synthetic oligonucleotide
  Target: LAMA2; (-) strand; PAM type: NRG; PAM sequence: AGG
tgatttttcagaactatctg

SEQ ID NO: 96737 - DNA, 20 bp, Artificial Sequence
  Description of Artificial Sequence: Synthetic oligonucleotide
  Target: LAMA2; (-) strand; PAM type: NRG; PAM sequence: GAG
ttgatttttcagaactatct

SEQ ID NO: 96738 - DNA, 20 bp, Artificial Sequence
  Description of Artificial Sequence: Synthetic oligonucleotide
  Target: LAMA2; (-) strand; PAM type: NRG; PAM sequence: CAG
ttatcctggaattgattttt

SEQ ID NO: 96739 - DNA, 20 bp, Artificial Sequence
  Description of Artificial Sequence: Synthetic oligonucleotide
  Target: LAMA2; (-) strand; PAM type: NRG; PAM sequence: TGG
agtttaaactgcatttatcc

SEQ ID NO: 96740 - DNA, 20 bp, Artificial Sequence
  Description of Artificial Sequence: Synthetic oligonucleotide
  Target: LAMA2; (-) strand; PAM type: NRG; PAM sequence: CAG
ttgaaaagatacctctgaca

SEQ ID NO: 96741 - DNA, 20 bp, Artificial Sequence
  Description of Artificial Sequence: Synthetic oligonucleotide
  Target: LAMA2; (-) strand; PAM type: NRG; PAM sequence: AAG
tgcatagattttatcttgaa

SEQ ID NO: 96742 - DNA, 20 bp, Artificial Sequence
  Description of Artificial Sequence: Synthetic oligonucleotide
  Target: LAMA2; (-) strand; PAM type: NRG; PAM sequence: TAG
ttcctctgtccctttttgca

SEQ ID NO: 96743 - DNA, 20 bp, Artificial Sequence
  Description of Artificial Sequence: Synthetic oligonucleotide
  Target: LAMA2; (-) strand; PAM type: NRG; PAM sequence: CAG
ccattttaacaaccactacc

SEQ ID NO: 96744 - DNA, 20 bp, Artificial Sequence
  Description of Artificial Sequence: Synthetic oligonucleotide
  Target: LAMA2; (-) strand; PAM type: NRG; PAM sequence: AGG
gccattttcctcaattctca

SEQ ID NO: 96745 - DNA, 20 bp, Artificial Sequence
  Description of Artificial Sequence: Synthetic oligonucleotide
  Target: LAMA2; (-) strand; PAM type: NRG; PAM sequence: AAG
tgccattttcctcaattctc

SEQ ID NO: 96746 - DNA, 20 bp, Artificial Sequence
  Description of Artificial Sequence: Synthetic oligonucleotide
  Target: LAMA2; (-) strand; PAM type: NRG; PAM sequence: TAG
ttggccgaagcccttgatgg

SEQ ID NO: 96747 - DNA, 20 bp, Artificial Sequence
  Description of Artificial Sequence: Synthetic oligonucleotide
  Target: LAMA2; (-) strand; PAM type: NRG; PAM sequence: TGG
gtattggccgaagcccttga

SEQ ID NO: 96748 - DNA, 20 bp, Artificial Sequence
  Description of Artificial Sequence: Synthetic oligonucleotide
  Target: LAMA2; (-) strand; PAM type: NRG; PAM sequence: AAG
attgtactcggtattggccg

SEQ ID NO: 96749 - DNA, 20 bp, Artificial Sequence
  Description of Artificial Sequence: Synthetic oligonucleotide
  Target: LAMA2; (-) strand; PAM type: NRG; PAM sequence: TGG
tgcagcattgtactcggtat

SEQ ID NO: 96750 - DNA, 20 bp, Artificial Sequence
  Description of Artificial Sequence: Synthetic oligonucleotide
  Target: LAMA2; (-) strand; PAM type: NRG; PAM sequence: CGG
taagaatgcagcattgtact

SEQ ID NO: 96751 - DNA, 20 bp, Artificial Sequence
  Description of Artificial Sequence: Synthetic oligonucleotide
  Target: LAMA2; (-) strand; PAM type: NRG; PAM sequence: CAG
aattgcgagatataagaatg

SEQ ID NO: 96752 - DNA, 20 bp, Artificial Sequence
  Description of Artificial Sequence: Synthetic oligonucleotide
  Target: LAMA2; (-) strand; PAM type: NRG; PAM sequence: AAG
tgatcataattgcgagatat

SEQ ID NO: 96753 - DNA, 20 bp, Artificial Sequence
  Description of Artificial Sequence: Synthetic oligonucleotide
  Target: LAMA2; (-) strand; PAM type: NRG; PAM sequence: GAG
aaatatatgatcataattgc

SEQ ID NO: 96754 - DNA, 20 bp, Artificial Sequence
  Description of Artificial Sequence: Synthetic oligonucleotide
  Target: LAMA2; (-) strand; PAM type: NRG; PAM sequence: AGG
agctgtaagaaataggcagc

SEQ ID NO: 96755 - DNA, 20 bp, Artificial Sequence
  Description of Artificial Sequence: Synthetic oligonucleotide
  Target: LAMA2; (-) strand; PAM type: NRG; PAM sequence: CAG
aagctgtaagaaataggcag

SEQ ID NO: 96756 - DNA, 20 bp, Artificial Sequence
  Description of Artificial Sequence: Synthetic oligonucleotide
  Target: LAMA2; (-) strand; PAM type: NRG; PAM sequence: CAG
tgtaagctgtaagaaatagg

SEQ ID NO: 96757 - DNA, 20 bp, Artificial Sequence
  Description of Artificial Sequence: Synthetic oligonucleotide
  Target: LAMA2; (-) strand; PAM type: NRG; PAM sequence: AGG
tattgtaagctgtaagaaat

SEQ ID NO: 96758 - DNA, 20 bp, Artificial Sequence
  Description of Artificial Sequence: Synthetic oligonucleotide
  Target: LAMA2; (-) strand; PAM type: NRG; PAM sequence: TAG
ctattgtaagctgtaagaaa

SEQ ID NO: 96759 - DNA, 20 bp, Artificial Sequence
  Description of Artificial Sequence: Synthetic oligonucleotide
  Target: LAMA2; (-) strand; PAM type: NRG; PAM sequence: AAG
gtggtgctattgtaagctgt

SEQ ID NO: 96760 - DNA, 20 bp, Artificial Sequence
  Description of Artificial Sequence: Synthetic oligonucleotide
  Target: LAMA2; (-) strand; PAM type: NRG; PAM sequence: AAG
ttaaacagtggtgctattgt

SEQ ID NO: 96761 - DNA, 20 bp, Artificial Sequence
  Description of Artificial Sequence: Synthetic oligonucleotide
  Target: LAMA2; (-) strand; PAM type: NRG; PAM sequence: TGG
aaacattgagtcttaaacag

SEQ ID NO: 96762 - DNA, 20 bp, Artificial Sequence
  Description of Artificial Sequence: Synthetic oligonucleotide
  Target: LAMA2; (-) strand; PAM type: NRG; PAM sequence: CAG
taaaaacattgagtcttaaa

SEQ ID NO: 96763 - DNA, 20 bp, Artificial Sequence
  Description of Artificial Sequence: Synthetic oligonucleotide
  Target: LAMA2; (-) strand; PAM type: NRG; PAM sequence: GAG
aaaagcaacataaaaacatt

SEQ ID NO: 96764 - DNA, 20 bp, Artificial Sequence
  Description of Artificial Sequence: Synthetic oligonucleotide
  Target: LAMA2; (-) strand; PAM type: NRG; PAM sequence: AAG
aagactcatgaaaatttcaa

SEQ ID NO: 96765 - DNA, 20 bp, Artificial Sequence
  Description of Artificial Sequence: Synthetic oligonucleotide
  Target: LAMA2; (-) strand; PAM type: NRG; PAM sequence: AAG
ttctgctctgagcaatatga

SEQ ID NO: 96766 - DNA, 20 bp, Artificial Sequence
  Description of Artificial Sequence: Synthetic oligonucleotide
  Target: LAMA2; (-) strand; PAM type: NRG; PAM sequence: GAG
attttctacagttctgctct

SEQ ID NO: 96767 - DNA, 20 bp, Artificial Sequence
  Description of Artificial Sequence: Synthetic oligonucleotide
  Target: LAMA2; (-) strand; PAM type: NRG; PAM sequence: CAG
tgtaagtggtacattttcta

SEQ ID NO: 96768 - DNA, 20 bp, Artificial Sequence
  Description of Artificial Sequence: Synthetic oligonucleotide
  Target: LAMA2; (-) strand; PAM type: NRG; PAM sequence: TGG
cattgtttcttaaatgtaag

SEQ ID NO: 96769 - DNA, 20 bp, Artificial Sequence
  Description of Artificial Sequence: Synthetic oligonucleotide
  Target: LAMA2; (-) strand; PAM type: NRG; PAM sequence: AAG
gtacattgtttcttaaatgt

SEQ ID NO: 96770 - DNA, 20 bp, Artificial Sequence
  Description of Artificial Sequence: Synthetic oligonucleotide
  Target: LAMA2; (-) strand; PAM type: NRG; PAM sequence: CGG
caggcgtgagccaccacgcc

SEQ ID NO: 96771 - DNA, 20 bp, Artificial Sequence
  Description of Artificial Sequence: Synthetic oligonucleotide
  Target: LAMA2; (-) strand; PAM type: NRG; PAM sequence: GAG
agtggtgggattacaggcgt

SEQ ID NO: 96772 - DNA, 20 bp, Artificial Sequence
  Description of Artificial Sequence: Synthetic oligonucleotide
  Target: LAMA2; (-) strand; PAM type: NRG; PAM sequence: AGG
tcccaaagtggtgggattac

SEQ ID NO: 96773 - DNA, 20 bp, Artificial Sequence
  Description of Artificial Sequence: Synthetic oligonucleotide
  Target: LAMA2; (-) strand; PAM type: NRG; PAM sequence: CAG
ctcccaaagtggtgggatta

SEQ ID NO: 96774 - DNA, 20 bp, Artificial Sequence
  Description of Artificial Sequence: Synthetic oligonucleotide
  Target: LAMA2; (-) strand; PAM type: NRG; PAM sequence: GGG
cctcggcctcccaaagtggt

SEQ ID NO: 96775 - DNA, 20 bp, Artificial Sequence
  Description of Artificial Sequence: Synthetic oligonucleotide
  Target: LAMA2; (-) strand; PAM type: NRG; PAM sequence: TGG
gcctcggcctcccaaagtgg

SEQ ID NO: 96776 - DNA, 20 bp, Artificial Sequence
  Description of Artificial Sequence: Synthetic oligonucleotide
  Target: LAMA2; (-) strand; PAM type: NRG; PAM sequence: TGG
cccgcctcggcctcccaaag

SEQ ID NO: 96777 - DNA, 20 bp, Artificial Sequence
  Description of Artificial Sequence: Synthetic oligonucleotide
  Target: LAMA2; (-) strand; PAM type: NRG; PAM sequence: AAG
ccgcccgcctcggcctccca

SEQ ID NO: 96778 - DNA, 20 bp, Artificial Sequence
  Description of Artificial Sequence: Synthetic oligonucleotide
  Target: LAMA2; (-) strand; PAM type: NRG; PAM sequence: CGG
acctcgtgatccgcccgcct

SEQ ID NO: 96779 - DNA, 20 bp, Artificial Sequence
  Description of Artificial Sequence: Synthetic oligonucleotide
  Target: LAMA2; (-) strand; PAM type: NRG; PAM sequence: AGG
ggggtttcaccgtgttagcc

SEQ ID NO: 96780 - DNA, 20 bp, Artificial Sequence
  Description of Artificial Sequence: Synthetic oligonucleotide
  Target: LAMA2; (-) strand; PAM type: NRG; PAM sequence: CAG
cggggtttcaccgtgttagc

SEQ ID NO: 96781 - DNA, 20 bp, Artificial Sequence
  Description of Artificial Sequence: Synthetic oligonucleotide
  Target: LAMA2; (-) strand; PAM type: NRG; PAM sequence: TAG
gagacggggtttcaccgtgt

SEQ ID NO: 96782 - DNA, 20 bp, Artificial Sequence
  Description of Artificial Sequence: Synthetic oligonucleotide
  Target: LAMA2; (-) strand; PAM type: NRG; PAM sequence: GGG
ttgtatttttagtagagacg

SEQ ID NO: 96783 - DNA, 20 bp, Artificial Sequence
  Description of Artificial Sequence: Synthetic oligonucleotide
  Target: LAMA2; (-) strand; PAM type: NRG; PAM sequence: GGG
tttgtatttttagtagagac

SEQ ID NO: 96784 - DNA, 20 bp, Artificial Sequence
  Description of Artificial Sequence: Synthetic oligonucleotide
  Target: LAMA2; (-) strand; PAM type: NRG; PAM sequence: CGG
ttttgtatttttagtagaga

SEQ ID NO: 96785 - DNA, 20 bp, Artificial Sequence
  Description of Artificial Sequence: Synthetic oligonucleotide
  Target: LAMA2; (-) strand; PAM type: NRG; PAM sequence: GAG
taatttttgtatttttagta

SEQ ID NO: 96786 - DNA, 20 bp, Artificial Sequence
  Description of Artificial Sequence: Synthetic oligonucleotide
  Target: LAMA2; (-) strand; PAM type: NRG; PAM sequence: TAG
gctaatttttgtatttttag

SEQ ID NO: 96787 - DNA, 20 bp, Artificial Sequence
  Description of Artificial Sequence: Synthetic oligonucleotide
  Target: LAMA2; (-) strand; PAM type: NRG; PAM sequence: TAG
ccagctaatttttgtatttt

SEQ ID NO: 96788 - DNA, 20 bp, Artificial Sequence
  Description of Artificial Sequence: Synthetic oligonucleotide
  Target: LAMA2; (-) strand; PAM type: NRG; PAM sequence: CAG
caggcgcccgccaccgcgcc

SEQ ID NO: 96789 - DNA, 20 bp, Artificial Sequence
  Description of Artificial Sequence: Synthetic oligonucleotide
  Target: LAMA2; (-) strand; PAM type: NRG; PAM sequence: AGG
ttccgagtagatgggactac

SEQ ID NO: 96790 - DNA, 20 bp, Artificial Sequence
  Description of Artificial Sequence: Synthetic oligonucleotide
  Target: LAMA2; (-) strand; PAM type: NRG; PAM sequence: CAG
cttccgagtagatgggacta

SEQ ID NO: 96791 - DNA, 20 bp, Artificial Sequence
  Description of Artificial Sequence: Synthetic oligonucleotide
  Target: LAMA2; (-) strand; PAM type: NRG; PAM sequence: GGG
cctcagccttccgagtagat

SEQ ID NO: 96792 - DNA, 20 bp, Artificial Sequence
  Description of Artificial Sequence: Synthetic oligonucleotide
  Target: LAMA2; (-) strand; PAM type: NRG; PAM sequence: TGG
gcctcagccttccgagtaga

SEQ ID NO: 96793 - DNA, 20 bp, Artificial Sequence
  Description of Artificial Sequence: Synthetic oligonucleotide
  Target: LAMA2; (-) strand; PAM type: NRG; PAM sequence: TAG
tccggcctcagccttccgag

SEQ ID NO: 96794 - DNA, 20 bp, Artificial Sequence
  Description of Artificial Sequence: Synthetic oligonucleotide
  Target: LAMA2; (-) strand; PAM type: NRG; PAM sequence: GAG
ttctccggcctcagccttcc

SEQ ID NO: 96795 - DNA, 20 bp, Artificial Sequence
  Description of Artificial Sequence: Synthetic oligonucleotide
  Target: LAMA2; (-) strand; PAM type: NRG; PAM sequence: CAG
ttcacaccattctccggcct

SEQ ID NO: 96796 - DNA, 20 bp, Artificial Sequence
  Description of Artificial Sequence: Synthetic oligonucleotide
  Target: LAMA2; (-) strand; PAM type: NRG; PAM sequence: CGG
cccaggttcacaccattctc

SEQ ID NO: 96797 - DNA, 20 bp, Artificial Sequence
  Description of Artificial Sequence: Synthetic oligonucleotide
  Target: LAMA2; (-) strand; PAM type: NRG; PAM sequence: AGG
cactgcaagctccgcctccc

SEQ ID NO: 96798 - DNA, 20 bp, Artificial Sequence
  Description of Artificial Sequence: Synthetic oligonucleotide
  Target: LAMA2; (-) strand; PAM type: NRG; PAM sequence: CAG
tcactgcaagctccgcctcc

SEQ ID NO: 96799 - DNA, 20 bp, Artificial Sequence
  Description of Artificial Sequence: Synthetic oligonucleotide
  Target: LAMA2; (-) strand; PAM type: NRG; PAM sequence: AAG
gcgctatctctgctcactgc

SEQ ID NO: 96800 - DNA, 20 bp, Artificial Sequence
  Description of Artificial Sequence: Synthetic oligonucleotide
  Target: LAMA2; (-) strand; PAM type: NRG; PAM sequence: TGG
tcgcccaggccagagtgcag

SEQ ID NO: 96801 - DNA, 20 bp, Artificial Sequence
  Description of Artificial Sequence: Synthetic oligonucleotide
  Target: LAMA2; (-) strand; PAM type: NRG; PAM sequence: CAG
ctttcgcccaggccagagtg

SEQ ID NO: 96802 - DNA, 20 bp, Artificial Sequence
  Description of Artificial Sequence: Synthetic oligonucleotide
  Target: LAMA2; (-) strand; PAM type: NRG; PAM sequence: GAG
tcgctctttcgcccaggcca

SEQ ID NO: 96803 - DNA, 20 bp, Artificial Sequence
  Description of Artificial Sequence: Synthetic oligonucleotide
  Target: LAMA2; (-) strand; PAM type: NRG; PAM sequence: CAG
tctcgctctttcgcccaggc

SEQ ID NO: 96804 - DNA, 20 bp, Artificial Sequence
  Description of Artificial Sequence: Synthetic oligonucleotide
  Target: LAMA2; (-) strand; PAM type: NRG; PAM sequence: AGG
ggagtctcgctctttcgccc

SEQ ID NO: 96805 - DNA, 20 bp, Artificial Sequence
  Description of Artificial Sequence: Synthetic oligonucleotide
  Target: LAMA2; (-) strand; PAM type: NRG; PAM sequence: CAG
cggagtctcgctctttcgcc

SEQ ID NO: 96806 - DNA, 20 bp, Artificial Sequence
  Description of Artificial Sequence: Synthetic oligonucleotide
  Target: LAMA2; (-) strand; PAM type: NRG; PAM sequence: GAG
ttttttttttttttgagacg

SEQ ID NO: 96807 - DNA, 20 bp, Artificial Sequence
  Description of Artificial Sequence: Synthetic oligonucleotide
  Target: LAMA2; (-) strand; PAM type: NRG; PAM sequence: CGG
ttttttttttttttttgaga

SEQ ID NO: 96808 - DNA, 20 bp, Artificial Sequence
  Description of Artificial Sequence: Synthetic oligonucleotide
  Target: LAMA2; (-) strand; PAM type: NRG; PAM sequence: GAG
tttttttttttttttttttt

SEQ ID NO: 96809 - DNA, 20 bp, Artificial Sequence
  Description of Artificial Sequence: Synthetic oligonucleotide
  Target: LAMA2; (-) strand; PAM type: NRG; PAM sequence: AGG
ttaaatagatataagactaa

SEQ ID NO: 96810 - DNA, 20 bp, Artificial Sequence
  Description of Artificial Sequence: Synthetic oligonucleotide
  Target: LAMA2; (-) strand; PAM type: NRG; PAM sequence: AAG
tttaaatagatataagacta

SEQ ID NO: 96811 - DNA, 20 bp, Artificial Sequence
  Description of Artificial Sequence: Synthetic oligonucleotide
  Target: LAMA2; (-) strand; PAM type: NRG; PAM sequence: AAG
ctttatttttaaatagatat

SEQ ID NO: 96812 - DNA, 20 bp, Artificial Sequence
  Description of Artificial Sequence: Synthetic oligonucleotide
  Target: LAMA2; (-) strand; PAM type: NRG; PAM sequence: TAG
aaaaatgctttatttttaaa

SEQ ID NO: 96813 - DNA, 20 bp, Artificial Sequence
  Description of Artificial Sequence: Synthetic oligonucleotide
  Target: LAMA2; (-) strand; PAM type: NRG; PAM sequence: TGG
acctcattgttaggagttca

SEQ ID NO: 96814 - DNA, 20 bp, Artificial Sequence
  Description of Artificial Sequence: Synthetic oligonucleotide
  Target: LAMA2; (-) strand; PAM type: NRG; PAM sequence: GAG
gtagttaacctcattgttag

SEQ ID NO: 96815 - DNA, 20 bp, Artificial Sequence
  Description of Artificial Sequence: Synthetic oligonucleotide
  Target: LAMA2; (-) strand; PAM type: NRG; PAM sequence: AGG
atgtagttaacctcattgtt

SEQ ID NO: 96816 - DNA, 20 bp, Artificial Sequence
  Description of Artificial Sequence: Synthetic oligonucleotide
  Target: LAMA2; (-) strand; PAM type: NRG; PAM sequence: TAG
catgtagttaacctcattgt

SEQ ID NO: 96817 - DNA, 20 bp, Artificial Sequence
  Description of Artificial Sequence: Synthetic oligonucleotide
  Target: LAMA2; (-) strand; PAM type: NRG; PAM sequence: TAG
cacatctcaaatggcacatg

SEQ ID NO: 96818 - DNA, 20 bp, Artificial Sequence
  Description of Artificial Sequence: Synthetic oligonucleotide
  Target: LAMA2; (-) strand; PAM type: NRG; PAM sequence: TGG
tattagactcacatctcaaa

SEQ ID NO: 96819 - DNA, 20 bp, Artificial Sequence
  Description of Artificial Sequence: Synthetic oligonucleotide
  Target: LAMA2; (-) strand; PAM type: NRG; PAM sequence: TAG
aacagaagaacactgagtat

SEQ ID NO: 96820 - DNA, 20 bp, Artificial Sequence
  Description of Artificial Sequence: Synthetic oligonucleotide
  Target: LAMA2; (-) strand; PAM type: NRG; PAM sequence: GAG
aaacaaaacagaagaacact

SEQ ID NO: 96821 - DNA, 20 bp, Artificial Sequence
  Description of Artificial Sequence: Synthetic oligonucleotide
  Target: LAMA2; (-) strand; PAM type: NRG; PAM sequence: AAG
aaaaatttaaaacaaaacag

SEQ ID NO: 96822 - DNA, 20 bp, Artificial Sequence
  Description of Artificial Sequence: Synthetic oligonucleotide
  Target: LAMA2; (-) strand; PAM type: NRG; PAM sequence: CAG
ttaaaaaatttaaaacaaaa

SEQ ID NO: 96823 - DNA, 20 bp, Artificial Sequence
  Description of Artificial Sequence: Synthetic oligonucleotide
  Target: LAMA2; (-) strand; PAM type: NRG; PAM sequence: GAG
accctgagaatgcataacgg

SEQ ID NO: 96824 - DNA, 20 bp, Artificial Sequence
  Description of Artificial Sequence: Synthetic oligonucleotide
  Target: LAMA2; (-) strand; PAM type: NRG; PAM sequence: GGG
tcaccctgagaatgcataac

SEQ ID NO: 96825 - DNA, 20 bp, Artificial Sequence
  Description of Artificial Sequence: Synthetic oligonucleotide
  Target: LAMA2; (-) strand; PAM type: NRG; PAM sequence: CGG
atcaccctgagaatgcataa

SEQ ID NO: 96826 - DNA, 20 bp, Artificial Sequence
  Description of Artificial Sequence: Synthetic oligonucleotide
  Target: LAMA2; (-) strand; PAM type: NRG; PAM sequence: GAG
gttaggggagaaatcaccct

SEQ ID NO: 96827 - DNA, 20 bp, Artificial Sequence
  Description of Artificial Sequence: Synthetic oligonucleotide
  Target: LAMA2; (-) strand; PAM type: NRG; PAM sequence: GAG
ttataacggcaaagttaggg

SEQ ID NO: 96828 - DNA, 20 bp, Artificial Sequence
  Description of Artificial Sequence: Synthetic oligonucleotide
  Target: LAMA2; (-) strand; PAM type: NRG; PAM sequence: GGG
gtttataacggcaaagttag

SEQ ID NO: 96829 - DNA, 20 bp, Artificial Sequence
  Description of Artificial Sequence: Synthetic oligonucleotide
  Target: LAMA2; (-) strand; PAM type: NRG; PAM sequence: GGG
agtttataacggcaaagtta

SEQ ID NO: 96830 - DNA, 20 bp, Artificial Sequence
  Description of Artificial Sequence: Synthetic oligonucleotide
  Target: LAMA2; (-) strand; PAM type: NRG; PAM sequence: AGG
gagtttataacggcaaagtt

SEQ ID NO: 96831 - DNA, 20 bp, Artificial Sequence
  Description of Artificial Sequence: Synthetic oligonucleotide
  Target: LAMA2; (-) strand; PAM type: NRG; PAM sequence: TAG
agagtttataacggcaaagt

SEQ ID NO: 96832 - DNA, 20 bp, Artificial Sequence
  Description of Artificial Sequence: Synthetic oligonucleotide
  Target: LAMA2; (-) strand; PAM type: NRG; PAM sequence: AAG
cctcagagtttataacggca

SEQ ID NO: 96833 - DNA, 20 bp, Artificial Sequence
  Description of Artificial Sequence: Synthetic oligonucleotide
  Target: LAMA2; (-) strand; PAM type: NRG; PAM sequence: CGG
gagaccctcagagtttataa

SEQ ID NO: 96834 - DNA, 20 bp, Artificial Sequence
  Description of Artificial Sequence: Synthetic oligonucleotide
  Target: LAMA2; (-) strand; PAM type: NRG; PAM sequence: GAG
ggaaagacaagagaccctca

SEQ ID NO: 96835 - DNA, 20 bp, Artificial Sequence
  Description of Artificial Sequence: Synthetic oligonucleotide
  Target: LAMA2; (-) strand; PAM type: NRG; PAM sequence: CAG
gaggaaagacaagagaccct

SEQ ID NO: 96836 - DNA, 20 bp, Artificial Sequence
  Description of Artificial Sequence: Synthetic oligonucleotide
  Target: LAMA2; (-) strand; PAM type: NRG; PAM sequence: GAG
attcacctgaggaaagacaa

SEQ ID NO: 96837 - DNA, 20 bp, Artificial Sequence
  Description of Artificial Sequence: Synthetic oligonucleotide
  Target: LAMA2; (-) strand; PAM type: NRG; PAM sequence: AAG
acattcacctgaggaaagac

SEQ ID NO: 96838 - DNA, 20 bp, Artificial Sequence
  Description of Artificial Sequence: Synthetic oligonucleotide
  Target: LAMA2; (-) strand; PAM type: NRG; PAM sequence: AAG
cttccacattcacctgagga

SEQ ID NO: 96839 - DNA, 20 bp, Artificial Sequence
  Description of Artificial Sequence: Synthetic oligonucleotide
  Target: LAMA2; (-) strand; PAM type: NRG; PAM sequence: AGG
atgccttccacattcacctg

SEQ ID NO: 96840 - DNA, 20 bp, Artificial Sequence
  Description of Artificial Sequence: Synthetic oligonucleotide
  Target: LAMA2; (-) strand; PAM type: NRG; PAM sequence: GAG
gatgccttccacattcacct

SEQ ID NO: 96841 - DNA, 20 bp, Artificial Sequence
  Description of Artificial Sequence: Synthetic oligonucleotide
  Target: LAMA2; (-) strand; PAM type: NRG; PAM sequence: TGG
caggccggcatctgtcacag

SEQ ID NO: 96842 - DNA, 20 bp, Artificial Sequence
  Description of Artificial Sequence: Synthetic oligonucleotide
  Target: LAMA2; (-) strand; PAM type: NRG; PAM sequence: CAG
tgccaggccggcatctgtca

SEQ ID NO: 96843 - DNA, 20 bp, Artificial Sequence
  Description of Artificial Sequence: Synthetic oligonucleotide
  Target: LAMA2; (-) strand; PAM type: NRG; PAM sequence: CGG
cgagtccgaatttgccaggc

SEQ ID NO: 96844 - DNA, 20 bp, Artificial Sequence
  Description of Artificial Sequence: Synthetic oligonucleotide
  Target: LAMA2; (-) strand; PAM type: NRG; PAM sequence: AGG
gcatcgagtccgaatttgcc

SEQ ID NO: 96845 - DNA, 20 bp, Artificial Sequence
  Description of Artificial Sequence: Synthetic oligonucleotide
  Target: LAMA2; (-) strand; PAM type: NRG; PAM sequence: CAG
ggcatcgagtccgaatttgc

SEQ ID NO: 96846 - DNA, 20 bp, Artificial Sequence
  Description of Artificial Sequence: Synthetic oligonucleotide
  Target: LAMA2; (-) strand; PAM type: NRG; PAM sequence: GAG
ccaagtggattcttggcatc

SEQ ID NO: 96847 - DNA, 20 bp, Artificial Sequence
  Description of Artificial Sequence: Synthetic oligonucleotide
  Target: LAMA2; (-) strand; PAM type: NRG; PAM sequence: TGG
gctgcagccaagtggattct

SEQ ID NO: 96848 - DNA, 20 bp, Artificial Sequence
  Description of Artificial Sequence: Synthetic oligonucleotide
  Target: LAMA2; (-) strand; PAM type: NRG; PAM sequence: TGG
tagcagctgctgcagccaag

SEQ ID NO: 96849 - DNA, 20 bp, Artificial Sequence
  Description of Artificial Sequence: Synthetic oligonucleotide
  Target: LAMA2; (-) strand; PAM type: NRG; PAM sequence: AAG
caatagcagctgctgcagcc

SEQ ID NO: 96850 - DNA, 20 bp, Artificial Sequence
  Description of Artificial Sequence: Synthetic oligonucleotide
  Target: LAMA2; (-) strand; PAM type: NRG; PAM sequence: CAG
cgaagcaatagcagctgctg

SEQ ID NO: 96851 - DNA, 20 bp, Artificial Sequence
  Description of Artificial Sequence: Synthetic oligonucleotide
  Target: LAMA2; (-) strand; PAM type: NRG; PAM sequence: CAG
tagtagtgccgaagcaatag

SEQ ID NO: 96852 - DNA, 20 bp, Artificial Sequence
  Description of Artificial Sequence: Synthetic oligonucleotide
  Target: LAMA2; (-) strand; PAM type: NRG; PAM sequence: TAG
gggtagtagtgccgaagcaa

SEQ ID NO: 96853 - DNA, 20 bp, Artificial Sequence
  Description of Artificial Sequence: Synthetic oligonucleotide
  Target: LAMA2; (-) strand; PAM type: NRG; PAM sequence: AAG
agcactgggtagtagtgccg

SEQ ID NO: 96854 - DNA, 20 bp, Artificial Sequence
  Description of Artificial Sequence: Synthetic oligonucleotide
  Target: LAMA2; (-) strand; PAM type: NRG; PAM sequence: TAG
tgcttcagagcactgggtag

SEQ ID NO: 96855 - DNA, 20 bp, Artificial Sequence
  Description of Artificial Sequence: Synthetic oligonucleotide
  Target: LAMA2; (-) strand; PAM type: NRG; PAM sequence: TAG
ttttgcttcagagcactggg

SEQ ID NO: 96856 - DNA, 20 bp, Artificial Sequence
  Description of Artificial Sequence: Synthetic oligonucleotide
  Target: LAMA2; (-) strand; PAM type: NRG; PAM sequence: GGG
tccttttgcttcagagcact

SEQ ID NO: 96857 - DNA, 20 bp, Artificial Sequence
  Description of Artificial Sequence: Synthetic oligonucleotide
  Target: LAMA2; (-) strand; PAM type: NRG; PAM sequence: TGG
gtccttttgcttcagagcac

SEQ ID NO: 96858 - DNA, 20 bp, Artificial Sequence
  Description of Artificial Sequence: Synthetic oligonucleotide
  Target: LAMA2; (-) strand; PAM type: NRG; PAM sequence: GAG
ggatcagtccttttgcttca

SEQ ID NO: 96859 - DNA, 20 bp, Artificial Sequence
  Description of Artificial Sequence: Synthetic oligonucleotide
  Target: LAMA2; (-) strand; PAM type: NRG; PAM sequence: CAG
ccggatcagtccttttgctt

SEQ ID NO: 96860 - DNA, 20 bp, Artificial Sequence
  Description of Artificial Sequence: Synthetic oligonucleotide
  Target: LAMA2; (-) strand; PAM type: NRG; PAM sequence: CAG
ctactcacccacgtccggat

SEQ ID NO: 96861 - DNA, 20 bp, Artificial Sequence
  Description of Artificial Sequence: Synthetic oligonucleotide
  Target: LAMA2; (-) strand; PAM type: NRG; PAM sequence: CGG
gttccctactcacccacgtc

SEQ ID NO: 96862 - DNA, 20 bp, Artificial Sequence
  Description of Artificial Sequence: Synthetic oligonucleotide
  Target: LAMA2; (-) strand; PAM type: NRG; PAM sequence: CAG
tataccattacatggctcag

SEQ ID NO: 96863 - DNA, 20 bp, Artificial Sequence
  Description of Artificial Sequence: Synthetic oligonucleotide
  Target: LAMA2; (-) strand; PAM type: NRG; PAM sequence: CAG
cattataccattacatggct

SEQ ID NO: 96864 - DNA, 20 bp, Artificial Sequence
  Description of Artificial Sequence: Synthetic oligonucleotide
  Target: LAMA2; (-) strand; PAM type: NRG; PAM sequence: TGG
actaacattataccattaca

SEQ ID NO: 96865 - DNA, 20 bp, Artificial Sequence
  Description of Artificial Sequence: Synthetic oligonucleotide
  Target: LAMA2; (-) strand; PAM type: NRG; PAM sequence: AGG
cctgactaaaagacaccagc

SEQ ID NO: 96866 - DNA, 20 bp, Artificial Sequence
  Description of Artificial Sequence: Synthetic oligonucleotide
  Target: LAMA2; (-) strand; PAM type: NRG; PAM sequence: CAG
gcctgactaaaagacaccag

SEQ ID NO: 96867 - DNA, 20 bp, Artificial Sequence
  Description of Artificial Sequence: Synthetic oligonucleotide
  Target: LAMA2; (-) strand; PAM type: NRG; PAM sequence: CAG
agtgcctgactaaaagacac

SEQ ID NO: 96868 - DNA, 20 bp, Artificial Sequence
  Description of Artificial Sequence: Synthetic oligonucleotide
  Target: LAMA2; (-) strand; PAM type: NRG; PAM sequence: AAG
acccctcagtgcctgactaa

SEQ ID NO: 96869 - DNA, 20 bp, Artificial Sequence
  Description of Artificial Sequence: Synthetic oligonucleotide
  Target: LAMA2; (-) strand; PAM type: NRG; PAM sequence: CAG
tgccattttctactacccct

SEQ ID NO: 96870 - DNA, 20 bp, Artificial Sequence
  Description of Artificial Sequence: Synthetic oligonucleotide
  Target: LAMA2; (-) strand; PAM type: NRG; PAM sequence: AGG
ctaaatgttcacagaggaaa

SEQ ID NO: 96871 - DNA, 20 bp, Artificial Sequence
  Description of Artificial Sequence: Synthetic oligonucleotide
  Target: LAMA2; (-) strand; PAM type: NRG; PAM sequence: AAG
cctaaatgttcacagaggaa

SEQ ID NO: 96872 - DNA, 20 bp, Artificial Sequence
  Description of Artificial Sequence: Synthetic oligonucleotide
  Target: LAMA2; (-) strand; PAM type: NRG; PAM sequence: AGG
ctgttcctaaatgttcacag

SEQ ID NO: 96873 - DNA, 20 bp, Artificial Sequence
  Description of Artificial Sequence: Synthetic oligonucleotide
  Target: LAMA2; (-) strand; PAM type: NRG; PAM sequence: GAG
gctgttcctaaatgttcaca

SEQ ID NO: 96874 - DNA, 20 bp, Artificial Sequence
  Description of Artificial Sequence: Synthetic oligonucleotide
  Target: LAMA2; (-) strand; PAM type: NRG; PAM sequence: CAG
ttgctgttcctaaatgttca

SEQ ID NO: 96875 - DNA, 20 bp, Artificial Sequence
  Description of Artificial Sequence: Synthetic oligonucleotide
  Target: LAMA2; (-) strand; PAM type: NRG; PAM sequence: TGG
catttactccaactctctaa

SEQ ID NO: 96876 - DNA, 20 bp, Artificial Sequence
  Description of Artificial Sequence: Synthetic oligonucleotide
  Target: LAMA2; (-) strand; PAM type: NRG; PAM sequence: AGG
cttttaagaacaaataagaa

SEQ ID NO: 96877 - DNA, 20 bp, Artificial Sequence
  Description of Artificial Sequence: Synthetic oligonucleotide
  Target: LAMA2; (-) strand; PAM type: NRG; PAM sequence: AAG
acttttaagaacaaataaga

SEQ ID NO: 96878 - DNA, 20 bp, Artificial Sequence
  Description of Artificial Sequence: Synthetic oligonucleotide
  Target: LAMA2; (-) strand; PAM type: NRG; PAM sequence: AAG
aactacttttaagaacaaat

SEQ ID NO: 96879 - DNA, 20 bp, Artificial Sequence
  Description of Artificial Sequence: Synthetic oligonucleotide
  Target: LAMA2; (-) strand; PAM type: NRG; PAM sequence: AAG
tcaataagtgaactactttt

SEQ ID NO: 96880 - DNA, 20 bp, Artificial Sequence
  Description of Artificial Sequence: Synthetic oligonucleotide
  Target: LAMA2; (-) strand; PAM type: NRG; PAM sequence: AAG
gcatctatttccttatcaat

SEQ ID NO: 96881 - DNA, 20 bp, Artificial Sequence
  Description of Artificial Sequence: Synthetic oligonucleotide
  Target: LAMA2; (-) strand; PAM type: NRG; PAM sequence: TGG
caaggttcctctttttcact

SEQ ID NO: 96882 - DNA, 20 bp, Artificial Sequence
  Description of Artificial Sequence: Synthetic oligonucleotide
  Target: LAMA2; (-) strand; PAM type: NRG; PAM sequence: AGG
aacataatgcttcccggaca

SEQ ID NO: 96883 - DNA, 20 bp, Artificial Sequence
  Description of Artificial Sequence: Synthetic oligonucleotide
  Target: LAMA2; (-) strand; PAM type: NRG; PAM sequence: AAG
aaacataatgcttcccggac

SEQ ID NO: 96884 - DNA, 20 bp, Artificial Sequence
  Description of Artificial Sequence: Synthetic oligonucleotide
  Target: LAMA2; (-) strand; PAM type: NRG; PAM sequence: CGG
tctcaaaacataatgcttcc

SEQ ID NO: 96885 - DNA, 20 bp, Artificial Sequence
  Description of Artificial Sequence: Synthetic oligonucleotide
  Target: LAMA2; (-) strand; PAM type: NRG; PAM sequence: TGG
tcatatcaacattcatgctc

SEQ ID NO: 96886 - DNA, 20 bp, Artificial Sequence
  Description of Artificial Sequence: Synthetic oligonucleotide
  Target: LAMA2; (-) strand; PAM type: NRG; PAM sequence: TAG
cctggttctcattggtgtgt

SEQ ID NO: 96887 - DNA, 20 bp, Artificial Sequence
  Description of Artificial Sequence: Synthetic oligonucleotide
  Target: LAMA2; (-) strand; PAM type: NRG; PAM sequence: TGG
tgacaagtcctggttctcat

SEQ ID NO: 96888 - DNA, 20 bp, Artificial Sequence
  Description of Artificial Sequence: Synthetic oligonucleotide
  Target: LAMA2; (-) strand; PAM type: NRG; PAM sequence: TGG
aatgaatgtgtgacaagtcc

SEQ ID NO: 96889 - DNA, 20 bp, Artificial Sequence
  Description of Artificial Sequence: Synthetic oligonucleotide
  Target: LAMA2; (-) strand; PAM type: NRG; PAM sequence: AAG
ggttggaatgaatgtgtgac

SEQ ID NO: 96890 - DNA, 20 bp, Artificial Sequence
  Description of Artificial Sequence: Synthetic oligonucleotide
  Target: LAMA2; (-) strand; PAM type: NRG; PAM sequence: TGG
catgattgcctaaggttggt

SEQ ID NO: 96891 - DNA, 20 bp, Artificial Sequence
  Description of Artificial Sequence: Synthetic oligonucleotide
  Target: LAMA2; (-) strand; PAM type: NRG; PAM sequence: TGG
aaatcatgattgcctaaggt

SEQ ID NO: 96892 - DNA, 20 bp, Artificial Sequence
  Description of Artificial Sequence: Synthetic oligonucleotide
  Target: LAMA2; (-) strand; PAM type: NRG; PAM sequence: AGG
ccaaaaatcatgattgccta

SEQ ID NO: 96893 - DNA, 20 bp, Artificial Sequence
  Description of Artificial Sequence: Synthetic oligonucleotide
  Target: LAMA2; (-) strand; PAM type: NRG; PAM sequence: AAG
tccaaaaatcatgattgcct

SEQ ID NO: 96894 - DNA, 20 bp, Artificial Sequence
  Description of Artificial Sequence: Synthetic oligonucleotide
  Target: LAMA2; (-) strand; PAM type: NRG; PAM sequence: AGG
ctaaatgtagaaagagttaa

SEQ ID NO: 96895 - DNA, 20 bp, Artificial Sequence
  Description of Artificial Sequence: Synthetic oligonucleotide
  Target: LAMA2; (-) strand; PAM type: NRG; PAM sequence: AAG
tctaaatgtagaaagagtta

SEQ ID NO: 96896 - DNA, 20 bp, Artificial Sequence
  Description of Artificial Sequence: Synthetic oligonucleotide
  Target: LAMA2; (-) strand; PAM type: NRG; PAM sequence: GAG
attgaatctaaatgtagaaa

SEQ ID NO: 96897 - DNA, 20 bp, Artificial Sequence
  Description of Artificial Sequence: Synthetic oligonucleotide
  Target: LAMA2; (-) strand; PAM type: NRG; PAM sequence: AAG
aaattgaatctaaatgtaga

SEQ ID NO: 96898 - DNA, 20 bp, Artificial Sequence
  Description of Artificial Sequence: Synthetic oligonucleotide
  Target: LAMA2; (-) strand; PAM type: NRG; PAM sequence: TAG
acacaaattgaatctaaatg

SEQ ID NO: 96899 - DNA, 20 bp, Artificial Sequence
  Description of Artificial Sequence: Synthetic oligonucleotide
  Target: LAMA2; (-) strand; PAM type: NRG; PAM sequence: GAG
cacaatatctgtggacactg

SEQ ID NO: 96900 - DNA, 20 bp, Artificial Sequence
  Description of Artificial Sequence: Synthetic oligonucleotide
  Target: LAMA2; (-) strand; PAM type: NRG; PAM sequence: TGG
gccacaatatctgtggacac

SEQ ID NO: 96901 - DNA, 20 bp, Artificial Sequence
  Description of Artificial Sequence: Synthetic oligonucleotide
  Target: LAMA2; (-) strand; PAM type: NRG; PAM sequence: TGG
agtgaaagccacaatatctg

SEQ ID NO: 96902 - DNA, 20 bp, Artificial Sequence
  Description of Artificial Sequence: Synthetic oligonucleotide
  Target: LAMA2; (-) strand; PAM type: NRG; PAM sequence: AAG
ttgactaattcacatagtga

SEQ ID NO: 96903 - DNA, 20 bp, Artificial Sequence
  Description of Artificial Sequence: Synthetic oligonucleotide
  Target: LAMA2; (-) strand; PAM type: NRG; PAM sequence: TAG
atctttttgactaattcaca

SEQ ID NO: 96904 - DNA, 20 bp, Artificial Sequence
  Description of Artificial Sequence: Synthetic oligonucleotide
  Target: LAMA2; (-) strand; PAM type: NRG; PAM sequence: AGG
acgcagtgggcaagcatggc

SEQ ID NO: 96905 - DNA, 20 bp, Artificial Sequence
  Description of Artificial Sequence: Synthetic oligonucleotide
  Target: LAMA2; (-) strand; PAM type: NRG; PAM sequence: CAG
cacgcagtgggcaagcatgg

SEQ ID NO: 96906 - DNA, 20 bp, Artificial Sequence
  Description of Artificial Sequence: Synthetic oligonucleotide
  Target: LAMA2; (-) strand; PAM type: NRG; PAM sequence: TGG
tcacacgcagtgggcaagca

SEQ ID NO: 96907 - DNA, 20 bp, Artificial Sequence
  Description of Artificial Sequence: Synthetic oligonucleotide
  Target: LAMA2; (-) strand; PAM type: NRG; PAM sequence: AAG
agaactcacacgcagtgggc

SEQ ID NO: 96908 - DNA, 20 bp, Artificial Sequence
  Description of Artificial Sequence: Synthetic oligonucleotide
  Target: LAMA2; (-) strand; PAM type: NRG; PAM sequence: GGG
caacagaactcacacgcagt

SEQ ID NO: 96909 - DNA, 20 bp, Artificial Sequence
  Description of Artificial Sequence: Synthetic oligonucleotide
  Target: LAMA2; (-) strand; PAM type: NRG; PAM sequence: TGG
gcaacagaactcacacgcag

SEQ ID NO: 96910 - DNA, 20 bp, Artificial Sequence
  Description of Artificial Sequence: Synthetic oligonucleotide
  Target: LAMA2; (-) strand; PAM type: NRG; PAM sequence: CAG
caagcaacagaactcacacg

SEQ ID NO: 96911 - DNA, 20 bp, Artificial Sequence
  Description of Artificial Sequence: Synthetic oligonucleotide
  Target: LAMA2; (-) strand; PAM type: NRG; PAM sequence: CAG
gatgatgttctcacaagcaa

SEQ ID NO: 96912 - DNA, 20 bp, Artificial Sequence
  Description of Artificial Sequence: Synthetic oligonucleotide
  Target: LAMA2; (-) strand; PAM type: NRG; PAM sequence: AAG
cattctgatgatgttctcac

SEQ ID NO: 96913 - DNA, 20 bp, Artificial Sequence
  Description of Artificial Sequence: Synthetic oligonucleotide
  Target: LAMA2; (-) strand; PAM type: NRG; PAM sequence: CAG
acgaactgcatgtctatctg

SEQ ID NO: 96914 - DNA, 20 bp, Artificial Sequence
  Description of Artificial Sequence: Synthetic oligonucleotide
  Target: LAMA2; (-) strand; PAM type: NRG; PAM sequence: AAG
ttggacatttctttaaaact

SEQ ID NO: 96915 - DNA, 20 bp, Artificial Sequence
  Description of Artificial Sequence: Synthetic oligonucleotide
  Target: LAMA2; (-) strand; PAM type: NRG; PAM sequence: TGG
agaaggctgaatttacgctt

SEQ ID NO: 96916 - DNA, 20 bp, Artificial Sequence
  Description of Artificial Sequence: Synthetic oligonucleotide
  Target: LAMA2; (-) strand; PAM type: NRG; PAM sequence: AGG
aggggtcaaaatacagcaga

SEQ ID NO: 96917 - DNA, 20 bp, Artificial Sequence
  Description of Artificial Sequence: Synthetic oligonucleotide
  Target: LAMA2; (-) strand; PAM type: NRG; PAM sequence: AAG
aaggggtcaaaatacagcag

SEQ ID NO: 96918 - DNA, 20 bp, Artificial Sequence
  Description of Artificial Sequence: Synthetic oligonucleotide
  Target: LAMA2; (-) strand; PAM type: NRG; PAM sequence: CAG
tgcaaggggtcaaaatacag

SEQ ID NO: 96919 - DNA, 20 bp, Artificial Sequence
  Description of Artificial Sequence: Synthetic oligonucleotide
  Target: LAMA2; (-) strand; PAM type: NRG; PAM sequence: CAG
acctgcaaggggtcaaaata

SEQ ID NO: 96920 - DNA, 20 bp, Artificial Sequence
  Description of Artificial Sequence: Synthetic oligonucleotide
  Target: LAMA2; (-) strand; PAM type: NRG; PAM sequence: GGG
ccttcagagtcacctgcaag

SEQ ID NO: 96921 - DNA, 20 bp, Artificial Sequence
  Description of Artificial Sequence: Synthetic oligonucleotide
  Target: LAMA2; (-) strand; PAM type: NRG; PAM sequence: GGG
gccttcagagtcacctgcaa

SEQ ID NO: 96922 - DNA, 20 bp, Artificial Sequence
  Description of Artificial Sequence: Synthetic oligonucleotide
  Target: LAMA2; (-) strand; PAM type: NRG; PAM sequence: AGG
agccttcagagtcacctgca

SEQ ID NO: 96923 - DNA, 20 bp, Artificial Sequence
  Description of Artificial Sequence: Synthetic oligonucleotide
  Target: LAMA2; (-) strand; PAM type: NRG; PAM sequence: AAG
cagccttcagagtcacctgc

SEQ ID NO: 96924 - DNA, 20 bp, Artificial Sequence
  Description of Artificial Sequence: Synthetic oligonucleotide
  Target: LAMA2; (-) strand; PAM type: NRG; PAM sequence: GAG
aatggtctgctcagccttca

SEQ ID NO: 96925 - DNA, 20 bp, Artificial Sequence
  Description of Artificial Sequence: Synthetic oligonucleotide
  Target: LAMA2; (-) strand; PAM type: NRG; PAM sequence: CAG
agaatggtctgctcagcctt

SEQ ID NO: 96926 - DNA, 20 bp, Artificial Sequence
  Description of Artificial Sequence: Synthetic oligonucleotide
  Target: LAMA2; (-) strand; PAM type: NRG; PAM sequence: CAG
caggggtagaatggtctgct

SEQ ID NO: 96927 - DNA, 20 bp, Artificial Sequence
  Description of Artificial Sequence: Synthetic oligonucleotide
  Target: LAMA2; (-) strand; PAM type: NRG; PAM sequence: TGG
ctcatctaccaggggtagaa

SEQ ID NO: 96928 - DNA, 20 bp, Artificial Sequence
  Description of Artificial Sequence: Synthetic oligonucleotide
  Target: LAMA2; (-) strand; PAM type: NRG; PAM sequence: TAG
agagcctcatctaccagggg

SEQ ID NO: 96929 - DNA, 20 bp, Artificial Sequence
  Description of Artificial Sequence: Synthetic oligonucleotide
  Target: LAMA2; (-) strand; PAM type: NRG; PAM sequence: GGG
tgcagagcctcatctaccag

SEQ ID NO: 96930 - DNA, 20 bp, Artificial Sequence
  Description of Artificial Sequence: Synthetic oligonucleotide
  Target: LAMA2; (-) strand; PAM type: NRG; PAM sequence: GGG
ctgcagagcctcatctacca

SEQ ID NO: 96931 - DNA, 20 bp, Artificial Sequence
  Description of Artificial Sequence: Synthetic oligonucleotide
  Target: LAMA2; (-) strand; PAM type: NRG; PAM sequence: AGG
gctgcagagcctcatctacc

SEQ ID NO: 96932 - DNA, 20 bp, Artificial Sequence
  Description of Artificial Sequence: Synthetic oligonucleotide
  Target: LAMA2; (-) strand; PAM type: NRG; PAM sequence: CAG
tgctgcagagcctcatctac

SEQ ID NO: 96933 - DNA, 20 bp, Artificial Sequence
  Description of Artificial Sequence: Synthetic oligonucleotide
  Target: LAMA2; (-) strand; PAM type: NRG; PAM sequence: GAG
cttggtggtcgtgtgctgca

SEQ ID NO: 96934 - DNA, 20 bp, Artificial Sequence
  Description of Artificial Sequence: Synthetic oligonucleotide
  Target: LAMA2; (-) strand; PAM type: NRG; PAM sequence: CAG
cccttggtggtcgtgtgctg

SEQ ID NO: 96935 - DNA, 20 bp, Artificial Sequence
  Description of Artificial Sequence: Synthetic oligonucleotide
  Target: LAMA2; (-) strand; PAM type: NRG; PAM sequence: TGG
ttgaaaaacaatgcccttgg

SEQ ID NO: 96936 - DNA, 20 bp, Artificial Sequence
  Description of Artificial Sequence: Synthetic oligonucleotide
  Target: LAMA2; (-) strand; PAM type: NRG; PAM sequence: TGG
atgttgaaaaacaatgccct

SEQ ID NO: 96937 - DNA, 20 bp, Artificial Sequence
  Description of Artificial Sequence: Synthetic oligonucleotide
  Target: LAMA2; (-) strand; PAM type: NRG; PAM sequence: TGG
tccatgtgggcaacaatctc

SEQ ID NO: 96938 - DNA, 20 bp, Artificial Sequence
  Description of Artificial Sequence: Synthetic oligonucleotide
  Target: LAMA2; (-) strand; PAM type: NRG; PAM sequence: GGG
ttctctcatcaggtccatgt

SEQ ID NO: 96939 - DNA, 20 bp, Artificial Sequence
  Description of Artificial Sequence: Synthetic oligonucleotide
  Target: LAMA2; (-) strand; PAM type: NRG; PAM sequence: TGG
cttctctcatcaggtccatg

SEQ ID NO: 96940 - DNA, 20 bp, Artificial Sequence
  Description of Artificial Sequence: Synthetic oligonucleotide
  Target: LAMA2; (-) strand; PAM type: NRG; PAM sequence: AGG
aatggagatcttctctcatc

SEQ ID NO: 96941 - DNA, 20 bp, Artificial Sequence
  Description of Artificial Sequence: Synthetic oligonucleotide
  Target: LAMA2; (-) strand; PAM type: NRG; PAM sequence: CAG
aaatggagatcttctctcat

SEQ ID NO: 96942 - DNA, 20 bp, Artificial Sequence
  Description of Artificial Sequence: Synthetic oligonucleotide
  Target: LAMA2; (-) strand; PAM type: NRG; PAM sequence: GAG
caataaaaaggttccaaatg

SEQ ID NO: 96943 - DNA, 20 bp, Artificial Sequence
  Description of Artificial Sequence: Synthetic oligonucleotide
  Target: LAMA2; (-) strand; PAM type: NRG; PAM sequence: TGG
tccaataaaaaggttccaaa

SEQ ID NO: 96944 - DNA, 20 bp, Artificial Sequence
  Description of Artificial Sequence: Synthetic oligonucleotide
  Target: LAMA2; (-) strand; PAM type: NRG; PAM sequence: AGG
tctggaagtttccaataaaa

SEQ ID NO: 96945 - DNA, 20 bp, Artificial Sequence
  Description of Artificial Sequence: Synthetic oligonucleotide
  Target: LAMA2; (-) strand; PAM type: NRG; PAM sequence: AAG
ttctggaagtttccaataaa

SEQ ID NO: 96946 - DNA, 20 bp, Artificial Sequence
  Description of Artificial Sequence: Synthetic oligonucleotide
  Target: LAMA2; (-) strand; PAM type: NRG; PAM sequence: AAG
tttccttcaaattgttctgg

SEQ ID NO: 96947 - DNA, 20 bp, Artificial Sequence
  Description of Artificial Sequence: Synthetic oligonucleotide
  Target: LAMA2; (-) strand; PAM type: NRG; PAM sequence: TGG
ttctttccttcaaattgttc

SEQ ID NO: 96948 - DNA, 20 bp, Artificial Sequence
  Description of Artificial Sequence: Synthetic oligonucleotide
  Target: LAMA2; (-) strand; PAM type: NRG; PAM sequence: AAG
cttgttctcacttgacatta

SEQ ID NO: 96949 - DNA, 20 bp, Artificial Sequence
  Description of Artificial Sequence: Synthetic oligonucleotide
  Target: LAMA2; (-) strand; PAM type: NRG; PAM sequence: AAG
ccaaatggtgtgattctaaa

SEQ ID NO: 96950 - DNA, 20 bp, Artificial Sequence
  Description of Artificial Sequence: Synthetic oligonucleotide
  Target: LAMA2; (-) strand; PAM type: NRG; PAM sequence: TGG
gaattggataaatctccaaa

SEQ ID NO: 96951 - DNA, 20 bp, Artificial Sequence
  Description of Artificial Sequence: Synthetic oligonucleotide
  Target: LAMA2; (-) strand; PAM type: NRG; PAM sequence: TGG
taaaaagaagaatgaggaat

SEQ ID NO: 96952 - DNA, 20 bp, Artificial Sequence
  Description of Artificial Sequence: Synthetic oligonucleotide
  Target: LAMA2; (-) strand; PAM type: NRG; PAM sequence: AGG
acaaaataaaaagaagaatg

SEQ ID NO: 96953 - DNA, 20 bp, Artificial Sequence
  Description of Artificial Sequence: Synthetic oligonucleotide
  Target: LAMA2; (-) strand; PAM type: NRG; PAM sequence: GAG
gacaaaataaaaagaagaat

SEQ ID NO: 96954 - DNA, 20 bp, Artificial Sequence
  Description of Artificial Sequence: Synthetic oligonucleotide
  Target: LAMA2; (-) strand; PAM type: NRG; PAM sequence: AAG
tcaactgacaaaataaaaag

SEQ ID NO: 96955 - DNA, 20 bp, Artificial Sequence
  Description of Artificial Sequence: Synthetic oligonucleotide
  Target: LAMA2; (-) strand; PAM type: NRG; PAM sequence: AAG
ccatcaactgacaaaataaa

SEQ ID NO: 96956 - DNA, 20 bp, Artificial Sequence
  Description of Artificial Sequence: Synthetic oligonucleotide
  Target: LAMA2; (-) strand; PAM type: NRG; PAM sequence: AGG
atacttgagtttgcccccat

SEQ ID NO: 96957 - DNA, 20 bp, Artificial Sequence
  Description of Artificial Sequence: Synthetic oligonucleotide
  Target: LAMA2; (-) strand; PAM type: NRG; PAM sequence: TAG
catacttgagtttgccccca

SEQ ID NO: 96958 - DNA, 20 bp, Artificial Sequence
  Description of Artificial Sequence: Synthetic oligonucleotide
  Target: LAMA2; (-) strand; PAM type: NRG; PAM sequence: GAG
tcgaaatagattgcatactt

SEQ ID NO: 96959 - DNA, 20 bp, Artificial Sequence
  Description of Artificial Sequence: Synthetic oligonucleotide
  Target: LAMA2; (-) strand; PAM type: NRG; PAM sequence: TAG
tttcttcccgagcctcgaaa

SEQ ID NO: 96960 - DNA, 20 bp, Artificial Sequence
  Description of Artificial Sequence: Synthetic oligonucleotide
  Target: LAMA2; (-) strand; PAM type: NRG; PAM sequence: GAG
agagaaacctgtttcttccc

SEQ ID NO: 96961 - DNA, 20 bp, Artificial Sequence
  Description of Artificial Sequence: Synthetic oligonucleotide
  Target: LAMA2; (-) strand; PAM type: NRG; PAM sequence: GAG
tcacttgaggattatatgta

SEQ ID NO: 96962 - DNA, 20 bp, Artificial Sequence
  Description of Artificial Sequence: Synthetic oligonucleotide
  Target: LAMA2; (-) strand; PAM type: NRG; PAM sequence: TAG
gatcacttgaggattatatg

SEQ ID NO: 96963 - DNA, 20 bp, Artificial Sequence
  Description of Artificial Sequence: Synthetic oligonucleotide
  Target: LAMA2; (-) strand; PAM type: NRG; PAM sequence: AGG
ccacctcgaatgatcacttg

SEQ ID NO: 96964 - DNA, 20 bp, Artificial Sequence
  Description of Artificial Sequence: Synthetic oligonucleotide
  Target: LAMA2; (-) strand; PAM type: NRG; PAM sequence: GAG
cccacctcgaatgatcactt

SEQ ID NO: 96965 - DNA, 20 bp, Artificial Sequence
  Description of Artificial Sequence: Synthetic oligonucleotide
  Target: LAMA2; (-) strand; PAM type: NRG; PAM sequence: AGG
acgataattctagcatgagt

SEQ ID NO: 96966 - DNA, 20 bp, Artificial Sequence
  Description of Artificial Sequence: Synthetic oligonucleotide
  Target: LAMA2; (-) strand; PAM type: NRG; PAM sequence: TAG
gacgataattctagcatgag

SEQ ID NO: 96967 - DNA, 20 bp, Artificial Sequence
  Description of Artificial Sequence: Synthetic oligonucleotide
  Target: LAMA2; (-) strand; PAM type: NRG; PAM sequence: GAG
cctgacgataattctagcat

SEQ ID NO: 96968 - DNA, 20 bp, Artificial Sequence
  Description of Artificial Sequence: Synthetic oligonucleotide
  Target: LAMA2; (-) strand; PAM type: NRG; PAM sequence: TAG
catatgcctgacgataattc

SEQ ID NO: 96969 - DNA, 20 bp, Artificial Sequence
  Description of Artificial Sequence: Synthetic oligonucleotide
  Target: LAMA2; (-) strand; PAM type: NRG; PAM sequence: CAG
caattggccaatcagaggag

SEQ ID NO: 96970 - DNA, 20 bp, Artificial Sequence
  Description of Artificial Sequence: Synthetic oligonucleotide
  Target: LAMA2; (-) strand; PAM type: NRG; PAM sequence: GAG
tgtcaattggccaatcagag

SEQ ID NO: 96971 - DNA, 20 bp, Artificial Sequence
  Description of Artificial Sequence: Synthetic oligonucleotide
  Target: LAMA2; (-) strand; PAM type: NRG; PAM sequence: AGG
cttgtcaattggccaatcag

SEQ ID NO: 96972 - DNA, 20 bp, Artificial Sequence
  Description of Artificial Sequence: Synthetic oligonucleotide
  Target: LAMA2; (-) strand; PAM type: NRG; PAM sequence: GAG
ccttgtcaattggccaatca

SEQ ID NO: 96973 - DNA, 20 bp, Artificial Sequence
  Description of Artificial Sequence: Synthetic oligonucleotide
  Target: LAMA2; (-) strand; PAM type: NRG; PAM sequence: CAG
tgccttgtcaattggccaat

SEQ ID NO: 96974 - DNA, 20 bp, Artificial Sequence
  Description of Artificial Sequence: Synthetic oligonucleotide
  Target: LAMA2; (-) strand; PAM type: NRG; PAM sequence: TGG
caatttcatgccttgtcaat

SEQ ID NO: 96975 - DNA, 20 bp, Artificial Sequence
  Description of Artificial Sequence: Synthetic oligonucleotide
  Target: LAMA2; (-) strand; PAM type: NRG; PAM sequence: TGG
ctgaatgcaaaaccattgat

SEQ ID NO: 96976 - DNA, 20 bp, Artificial Sequence
  Description of Artificial Sequence: Synthetic oligonucleotide
  Target: LAMA2; (-) strand; PAM type: NRG; PAM sequence: GAG
attctttctgttaacaagaa

SEQ ID NO: 96977 - DNA, 20 bp, Artificial Sequence
  Description of Artificial Sequence: Synthetic oligonucleotide
  Target: LAMA2; (-) strand; PAM type: NRG; PAM sequence: AAG
ccattctttctgttaacaag

SEQ ID NO: 96978 - DNA, 20 bp, Artificial Sequence
  Description of Artificial Sequence: Synthetic oligonucleotide
  Target: LAMA2; (-) strand; PAM type: NRG; PAM sequence: AAG
tttccattctttctgttaac

SEQ ID NO: 96979 - DNA, 20 bp, Artificial Sequence
  Description of Artificial Sequence: Synthetic oligonucleotide
  Target: LAMA2; (-) strand; PAM type: NRG; PAM sequence: AGG
gtcacagttctatggactcg

SEQ ID NO: 96980 - DNA, 20 bp, Artificial Sequence
  Description of Artificial Sequence: Synthetic oligonucleotide
  Target: LAMA2; (-) strand; PAM type: NRG; PAM sequence: GAG
ggtcacagttctatggactc

SEQ ID NO: 96981 - DNA, 20 bp, Artificial Sequence
  Description of Artificial Sequence: Synthetic oligonucleotide
  Target: LAMA2; (-) strand; PAM type: NRG; PAM sequence: TGG
cttctcgggtcacagttcta

SEQ ID NO: 96982 - DNA, 20 bp, Artificial Sequence
  Description of Artificial Sequence: Synthetic oligonucleotide
  Target: LAMA2; (-) strand; PAM type: NRG; PAM sequence: CAG
caagaagtcttctcgggtca

SEQ ID NO: 96983 - DNA, 20 bp, Artificial Sequence
  Description of Artificial Sequence: Synthetic oligonucleotide
  Target: LAMA2; (-) strand; PAM type: NRG; PAM sequence: GGG
tatatccaagaagtcttctc

SEQ ID NO: 96984 - DNA, 20 bp, Artificial Sequence
  Description of Artificial Sequence: Synthetic oligonucleotide
  Target: LAMA2; (-) strand; PAM type: NRG; PAM sequence: CGG
gtatatccaagaagtcttct

SEQ ID NO: 96985 - DNA, 20 bp, Artificial Sequence
  Description of Artificial Sequence: Synthetic oligonucleotide
  Target: LAMA2; (-) strand; PAM type: NRG; PAM sequence: AAG
tatcatatagtatatccaag

SEQ ID NO: 96986 - DNA, 20 bp, Artificial Sequence
  Description of Artificial Sequence: Synthetic oligonucleotide
  Target: LAMA2; (-) strand; PAM type: NRG; PAM sequence: AAG
gaatatcatatagtatatcc

SEQ ID NO: 96987 - DNA, 20 bp, Artificial Sequence
  Description of Artificial Sequence: Synthetic oligonucleotide
  Target: LAMA2; (-) strand; PAM type: NRG; PAM sequence: TAG
agaatgtaatgaatatcata

SEQ ID NO: 96988 - DNA, 20 bp, Artificial Sequence
  Description of Artificial Sequence: Synthetic oligonucleotide
  Target: LAMA2; (-) strand; PAM type: NRG; PAM sequence: AAG
tttccataagtagctttgat

SEQ ID NO: 96989 - DNA, 20 bp, Artificial Sequence
  Description of Artificial Sequence: Synthetic oligonucleotide
  Target: LAMA2; (-) strand; PAM type: NRG; PAM sequence: TAG
tcgcatgaaatttccataag

SEQ ID NO: 96990 - DNA, 20 bp, Artificial Sequence
  Description of Artificial Sequence: Synthetic oligonucleotide
  Target: LAMA2; (-) strand; PAM type: NRG; PAM sequence: AAG
ttgtcgcatgaaatttccat

SEQ ID NO: 96991 - DNA, 20 bp, Artificial Sequence
  Description of Artificial Sequence: Synthetic oligonucleotide
  Target: LAMA2; (-) strand; PAM type: NRG; PAM sequence: GAG
agcttgaatattttctatta

SEQ ID NO: 96992 - DNA, 20 bp, Artificial Sequence
  Description of Artificial Sequence: Synthetic oligonucleotide
  Target: LAMA2; (-) strand; PAM type: NRG; PAM sequence: TAG
agagcttgaatattttctat

SEQ ID NO: 96993 - DNA, 20 bp, Artificial Sequence
  Description of Artificial Sequence: Synthetic oligonucleotide
  Target: LAMA2; (-) strand; PAM type: NRG; PAM sequence: GAG
ccttacagactctaaaataa

SEQ ID NO: 96994 - DNA, 20 bp, Artificial Sequence
  Description of Artificial Sequence: Synthetic oligonucleotide
  Target: LAMA2; (-) strand; PAM type: NRG; PAM sequence: AAG
ttccttacagactctaaaat

SEQ ID NO: 96995 - DNA, 20 bp, Artificial Sequence
  Description of Artificial Sequence: Synthetic oligonucleotide
  Target: LAMA2; (-) strand; PAM type: NRG; PAM sequence: CAG
taggtcaataaccttcctta

SEQ ID NO: 96996 - DNA, 20 bp, Artificial Sequence
  Description of Artificial Sequence: Synthetic oligonucleotide
  Target: LAMA2; (-) strand; PAM type: NRG; PAM sequence: AGG
ctttcttatctgatatctgt

SEQ ID NO: 96997 - DNA, 20 bp, Artificial Sequence
  Description of Artificial Sequence: Synthetic oligonucleotide
  Target: LAMA2; (-) strand; PAM type: NRG; PAM sequence: TAG
tctttcttatctgatatctg

SEQ ID NO: 96998 - DNA, 20 bp, Artificial Sequence
  Description of Artificial Sequence: Synthetic oligonucleotide
  Target: LAMA2; (-) strand; PAM type: NRG; PAM sequence: TGG
aggtcacagggaagcctcca

SEQ ID NO: 96999 - DNA, 20 bp, Artificial Sequence
  Description of Artificial Sequence: Synthetic oligonucleotide
  Target: LAMA2; (-) strand; PAM type: NRG; PAM sequence: AAG
gcttcttccaggtcacaggg

SEQ ID NO: 97000 - DNA, 20 bp, Artificial Sequence
  Description of Artificial Sequence: Synthetic oligonucleotide
  Target: LAMA2; (-) strand; PAM type: NRG; PAM sequence: GGG
gtagcttcttccaggtcaca

SEQ ID NO: 97001 - DNA, 20 bp, Artificial Sequence
  Description of Artificial Sequence: Synthetic oligonucleotide
  Target: LAMA2; (-) strand; PAM type: NRG; PAM sequence: AGG
agtagcttcttccaggtcac

SEQ ID NO: 97002 - DNA, 20 bp, Artificial Sequence
  Description of Artificial Sequence: Synthetic oligonucleotide
  Target: LAMA2; (-) strand; PAM type: NRG; PAM sequence: CAG
tagtagcttcttccaggtca

SEQ ID NO: 97003 - DNA, 20 bp, Artificial Sequence
  Description of Artificial Sequence: Synthetic oligonucleotide
  Target: LAMA2; (-) strand; PAM type: NRG; PAM sequence: AGG
gaatggtagtagcttcttcc

SEQ ID NO: 97004 - DNA, 20 bp, Artificial Sequence
  Description of Artificial Sequence: Synthetic oligonucleotide
  Target: LAMA2; (-) strand; PAM type: NRG; PAM sequence: CAG
tgaatggtagtagcttcttc

SEQ ID NO: 97005 - DNA, 20 bp, Artificial Sequence
  Description of Artificial Sequence: Synthetic oligonucleotide
  Target: LAMA2; (-) strand; PAM type: NRG; PAM sequence: TAG
tcttttctgatgaatggtag

SEQ ID NO: 97006 - DNA, 20 bp, Artificial Sequence
  Description of Artificial Sequence: Synthetic oligonucleotide
  Target: LAMA2; (-) strand; PAM type: NRG; PAM sequence: TAG
ttttcttttctgatgaatgg

SEQ ID NO: 97007 - DNA, 20 bp, Artificial Sequence
  Description of Artificial Sequence: Synthetic oligonucleotide
  Target: LAMA2; (-) strand; PAM type: NRG; PAM sequence: TGG
tatttttcttttctgatgaa

SEQ ID NO: 97008 - DNA, 20 bp, Artificial Sequence
  Description of Artificial Sequence: Synthetic oligonucleotide
  Target: LAMA2; (-) strand; PAM type: NRG; PAM sequence: CAG
tcttaaactcactatgtctg

SEQ ID NO: 97009 - DNA, 20 bp, Artificial Sequence
  Description of Artificial Sequence: Synthetic oligonucleotide
  Target: LAMA2; (-) strand; PAM type: NRG; PAM sequence: TGG
tgatctcttgaatttatgac

SEQ ID NO: 97010 - DNA, 20 bp, Artificial Sequence
  Description of Artificial Sequence: Synthetic oligonucleotide
  Target: LAMA2; (-) strand; PAM type: NRG; PAM sequence: CAG
agttaattttacctgatcta

SEQ ID NO: 97011 - DNA, 20 bp, Artificial Sequence
  Description of Artificial Sequence: Synthetic oligonucleotide
  Target: LAMA2; (-) strand; PAM type: NRG; PAM sequence: CAG
ataatccatttataccacaa

SEQ ID NO: 97012 - DNA, 20 bp, Artificial Sequence
  Description of Artificial Sequence: Synthetic oligonucleotide
  Target: LAMA2; (-) strand; PAM type: NRG; PAM sequence: CAG
gggtgaagaggtcactttct

SEQ ID NO: 97013 - DNA, 20 bp, Artificial Sequence
  Description of Artificial Sequence: Synthetic oligonucleotide
  Target: LAMA2; (-) strand; PAM type: NRG; PAM sequence: AGG
ggttcccctgatgggtgaag

SEQ ID NO: 97014 - DNA, 20 bp, Artificial Sequence
  Description of Artificial Sequence: Synthetic oligonucleotide
  Target: LAMA2; (-) strand; PAM type: NRG; PAM sequence: GAG
tggttcccctgatgggtgaa

SEQ ID NO: 97015 - DNA, 20 bp, Artificial Sequence
  Description of Artificial Sequence: Synthetic oligonucleotide
  Target: LAMA2; (-) strand; PAM type: NRG; PAM sequence: AAG
cctggttcccctgatgggtg

SEQ ID NO: 97016 - DNA, 20 bp, Artificial Sequence
  Description of Artificial Sequence: Synthetic oligonucleotide
  Target: LAMA2; (-) strand; PAM type: NRG; PAM sequence: GGG
ccctgcctggttcccctgat

SEQ ID NO: 97017 - DNA, 20 bp, Artificial Sequence
  Description of Artificial Sequence: Synthetic oligonucleotide
  Target: LAMA2; (-) strand; PAM type: NRG; PAM sequence: TGG
gccctgcctggttcccctga

SEQ ID NO: 97018 - DNA, 20 bp, Artificial Sequence
  Description of Artificial Sequence: Synthetic oligonucleotide
  Target: LAMA2; (-) strand; PAM type: NRG; PAM sequence: TGG
tggaccaacttggccctgcc

SEQ ID NO: 97019 - DNA, 20 bp, Artificial Sequence
  Description of Artificial Sequence: Synthetic oligonucleotide
  Target: LAMA2; (-) strand; PAM type: NRG; PAM sequence: TGG
tggaggagactggaccaact

SEQ ID NO: 97020 - DNA, 20 bp, Artificial Sequence
  Description of Artificial Sequence: Synthetic oligonucleotide
  Target: LAMA2; (-) strand; PAM type: NRG; PAM sequence: TGG
tgctcacagttggaggagac

SEQ ID NO: 97021 - DNA, 20 bp, Artificial Sequence
  Description of Artificial Sequence: Synthetic oligonucleotide
  Target: LAMA2; (-) strand; PAM type: NRG; PAM sequence: GAG
tagaatgctcacagttggag

SEQ ID NO: 97022 - DNA, 20 bp, Artificial Sequence
  Description of Artificial Sequence: Synthetic oligonucleotide
  Target: LAMA2; (-) strand; PAM type: NRG; PAM sequence: AGG
attagaatgctcacagttgg

SEQ ID NO: 97023 - DNA, 20 bp, Artificial Sequence
  Description of Artificial Sequence: Synthetic oligonucleotide
  Target: LAMA2; (-) strand; PAM type: NRG; PAM sequence: GAG
gattagaatgctcacagttg

SEQ ID NO: 97024 - DNA, 20 bp, Artificial Sequence
  Description of Artificial Sequence: Synthetic oligonucleotide
  Target: LAMA2; (-) strand; PAM type: NRG; PAM sequence: TGG
cagattagaatgctcacagt

SEQ ID NO: 97025 - DNA, 20 bp, Artificial Sequence
  Description of Artificial Sequence: Synthetic oligonucleotide
  Target: LAMA2; (-) strand; PAM type: NRG; PAM sequence: CAG
tgaacagattagaatgctca

SEQ ID NO: 97026 - DNA, 20 bp, Artificial Sequence
  Description of Artificial Sequence: Synthetic oligonucleotide
  Target: LAMA2; (-) strand; PAM type: NRG; PAM sequence: TAG
gcacactggggtgaacagat

SEQ ID NO: 97027 - DNA, 20 bp, Artificial Sequence
  Description of Artificial Sequence: Synthetic oligonucleotide
  Target: LAMA2; (-) strand; PAM type: NRG; PAM sequence: CAG
gtatggcacactggggtgaa

SEQ ID NO: 97028 - DNA, 20 bp, Artificial Sequence
  Description of Artificial Sequence: Synthetic oligonucleotide
  Target: LAMA2; (-) strand; PAM type: NRG; PAM sequence: GGG
caacattgtatggcacactg

SEQ ID NO: 97029 - DNA, 20 bp, Artificial Sequence
  Description of Artificial Sequence: Synthetic oligonucleotide
  Target: LAMA2; (-) strand; PAM type: NRG; PAM sequence: GGG
acaacattgtatggcacact

SEQ ID NO: 97030 - DNA, 20 bp, Artificial Sequence
  Description of Artificial Sequence: Synthetic oligonucleotide
  Target: LAMA2; (-) strand; PAM type: NRG; PAM sequence: TGG
gacaacattgtatggcacac

SEQ ID NO: 97031 - DNA, 20 bp, Artificial Sequence
  Description of Artificial Sequence: Synthetic oligonucleotide
  Target: LAMA2; (-) strand; PAM type: NRG; PAM sequence: TGG
gggaaaatgacaacattgta

SEQ ID NO: 97032 - DNA, 20 bp, Artificial Sequence
  Description of Artificial Sequence: Synthetic oligonucleotide
  Target: LAMA2; (-) strand; PAM type: NRG; PAM sequence: GGG
atttctcaacatgatgcata

SEQ ID NO: 97033 - DNA, 20 bp, Artificial Sequence
  Description of Artificial Sequence: Synthetic oligonucleotide
  Target: LAMA2; (-) strand; PAM type: NRG; PAM sequence: AGG
catttctcaacatgatgcat

SEQ ID NO: 97034 - DNA, 20 bp, Artificial Sequence
  Description of Artificial Sequence: Synthetic oligonucleotide
  Target: LAMA2; (-) strand; PAM type: NRG; PAM sequence: TAG
tcatttctcaacatgatgca

SEQ ID NO: 97035 - DNA, 20 bp, Artificial Sequence
  Description of Artificial Sequence: Synthetic oligonucleotide
  Target: LAMA2; (-) strand; PAM type: NRG; PAM sequence: CAG
tgatttttttcaaagtgatt

SEQ ID NO: 97036 - DNA, 20 bp, Artificial Sequence
  Description of Artificial Sequence: Synthetic oligonucleotide
  Target: LAMA2; (-) strand; PAM type: NRG; PAM sequence: AAG
gttctgtgtgatttttttca

SEQ ID NO: 97037 - DNA, 20 bp, Artificial Sequence
  Description of Artificial Sequence: Synthetic oligonucleotide
  Target: LAMA2; (-) strand; PAM type: NRG; PAM sequence: AGG
ttgaagtattcccatcatgt

SEQ ID NO: 97038 - DNA, 20 bp, Artificial Sequence
  Description of Artificial Sequence: Synthetic oligonucleotide
  Target: LAMA2; (-) strand; PAM type: NRG; PAM sequence: TAG
cttgaagtattcccatcatg

SEQ ID NO: 97039 - DNA, 20 bp, Artificial Sequence
  Description of Artificial Sequence: Synthetic oligonucleotide
  Target: LAMA2; (-) strand; PAM type: NRG; PAM sequence: AAG
aaacacggaatactcccttg

SEQ ID NO: 97040 - DNA, 20 bp, Artificial Sequence
  Description of Artificial Sequence: Synthetic oligonucleotide
  Target: LAMA2; (-) strand; PAM type: NRG; PAM sequence: CGG
attttggtcataagaaaaca

SEQ ID NO: 97041 - DNA, 20 bp, Artificial Sequence
  Description of Artificial Sequence: Synthetic oligonucleotide
  Target: LAMA2; (-) strand; PAM type: NRG; PAM sequence: AAG
agttggccaattttggtcat

SEQ ID NO: 97042 - DNA, 20 bp, Artificial Sequence
  Description of Artificial Sequence: Synthetic oligonucleotide
  Target: LAMA2; (-) strand; PAM type: NRG; PAM sequence: TGG
tcatttcagttggccaattt

SEQ ID NO: 97043 - DNA, 20 bp, Artificial Sequence
  Description of Artificial Sequence: Synthetic oligonucleotide
  Target: LAMA2; (-) strand; PAM type: NRG; PAM sequence: TGG
ccaacaagcctcatttcagt

SEQ ID NO: 97044 - DNA, 20 bp, Artificial Sequence
  Description of Artificial Sequence: Synthetic oligonucleotide
  Target: LAMA2; (-) strand; PAM type: NRG; PAM sequence: CAG
agacccaacaagcctcattt

SEQ ID NO: 97045 - DNA, 20 bp, Artificial Sequence
  Description of Artificial Sequence: Synthetic oligonucleotide
  Target: LAMA2; (-) strand; PAM type: NRG; PAM sequence: AAG
tcctaagtgtcagacccaac

SEQ ID NO: 97046 - DNA, 20 bp, Artificial Sequence
  Description of Artificial Sequence: Synthetic oligonucleotide
  Target: LAMA2; (-) strand; PAM type: NRG; PAM sequence: CAG
accagtgtggtcctaagtgt

SEQ ID NO: 97047 - DNA, 20 bp, Artificial Sequence
  Description of Artificial Sequence: Synthetic oligonucleotide
  Target: LAMA2; (-) strand; PAM type: NRG; PAM sequence: AAG
aatgttaccagtgtggtcct

SEQ ID NO: 97048 - DNA, 20 bp, Artificial Sequence
  Description of Artificial Sequence: Synthetic oligonucleotide
  Target: LAMA2; (-) strand; PAM type: NRG; PAM sequence: TGG
tatcatgaatgttaccagtg

SEQ ID NO: 97049 - DNA, 20 bp, Artificial Sequence
  Description of Artificial Sequence: Synthetic oligonucleotide
  Target: LAMA2; (-) strand; PAM type: NRG; PAM sequence: CAG
accggtatcatgaatgttac

SEQ ID NO: 97050 - DNA, 20 bp, Artificial Sequence
  Description of Artificial Sequence: Synthetic oligonucleotide
  Target: LAMA2; (-) strand; PAM type: NRG; PAM sequence: CGG
ctgccccaggacactgagac

SEQ ID NO: 97051 - DNA, 20 bp, Artificial Sequence
  Description of Artificial Sequence: Synthetic oligonucleotide
  Target: LAMA2; (-) strand; PAM type: NRG; PAM sequence: GAG
taattctgccccaggacact

SEQ ID NO: 97052 - DNA, 20 bp, Artificial Sequence
  Description of Artificial Sequence: Synthetic oligonucleotide
  Target: LAMA2; (-) strand; PAM type: NRG; PAM sequence: AGG
cttgagattaattctgcccc

SEQ ID NO: 97053 - DNA, 20 bp, Artificial Sequence
  Description of Artificial Sequence: Synthetic oligonucleotide
  Target: LAMA2; (-) strand; PAM type: NRG; PAM sequence: CAG
gcttgagattaattctgccc

SEQ ID NO: 97054 - DNA, 20 bp, Artificial Sequence
  Description of Artificial Sequence: Synthetic oligonucleotide
  Target: LAMA2; (-) strand; PAM type: NRG; PAM sequence: GAG
cattctttctttaaaagctt

SEQ ID NO: 97055 - DNA, 20 bp, Artificial Sequence
  Description of Artificial Sequence: Synthetic oligonucleotide
  Target: LAMA2; (-) strand; PAM type: NRG; PAM sequence: AAG
gtgtcacattctttctttaa

SEQ ID NO: 97056 - DNA, 20 bp, Artificial Sequence
  Description of Artificial Sequence: Synthetic oligonucleotide
  Target: LAMA2; (-) strand; PAM type: NRG; PAM sequence: GGG
tagtttacactcataatatt

SEQ ID NO: 97057 - DNA, 20 bp, Artificial Sequence
  Description of Artificial Sequence: Synthetic oligonucleotide
  Target: LAMA2; (-) strand; PAM type: NRG; PAM sequence: TGG
atagtttacactcataatat

SEQ ID NO: 97058 - DNA, 20 bp, Artificial Sequence
  Description of Artificial Sequence: Synthetic oligonucleotide
  Target: LAMA2; (-) strand; PAM type: NRG; PAM sequence: TAG
attatattcatggaaaataa

SEQ ID NO: 97059 - DNA, 20 bp, Artificial Sequence
  Description of Artificial Sequence: Synthetic oligonucleotide
  Target: LAMA2; (-) strand; PAM type: NRG; PAM sequence: TGG
tctttttacaattatattca

SEQ ID NO: 97060 - DNA, 20 bp, Artificial Sequence
  Description of Artificial Sequence: Synthetic oligonucleotide
  Target: LAMA2; (-) strand; PAM type: NRG; PAM sequence: TAG
aagtctcctggttcctctat

SEQ ID NO: 97061 - DNA, 20 bp, Artificial Sequence
  Description of Artificial Sequence: Synthetic oligonucleotide
  Target: LAMA2; (-) strand; PAM type: NRG; PAM sequence: TGG
tccatgatgtggaagtctcc

SEQ ID NO: 97062 - DNA, 20 bp, Artificial Sequence
  Description of Artificial Sequence: Synthetic oligonucleotide
  Target: LAMA2; (-) strand; PAM type: NRG; PAM sequence: AAG
catgagggtccatgatgtgg

SEQ ID NO: 97063 - DNA, 20 bp, Artificial Sequence
  Description of Artificial Sequence: Synthetic oligonucleotide
  Target: LAMA2; (-) strand; PAM type: NRG; PAM sequence: TGG
gaccatgagggtccatgatg

SEQ ID NO: 97064 - DNA, 20 bp, Artificial Sequence
  Description of Artificial Sequence: Synthetic oligonucleotide
  Target: LAMA2; (-) strand; PAM type: NRG; PAM sequence: GGG
ctcaaagaatatgaccatga

SEQ ID NO: 97065 - DNA, 20 bp, Artificial Sequence
  Description of Artificial Sequence: Synthetic oligonucleotide
  Target: LAMA2; (-) strand; PAM type: NRG; PAM sequence: AGG
actcaaagaatatgaccatg

SEQ ID NO: 97066 - DNA, 20 bp, Artificial Sequence
  Description of Artificial Sequence: Synthetic oligonucleotide
  Target: LAMA2; (-) strand; PAM type: NRG; PAM sequence: GAG
tactcaaagaatatgaccat

SEQ ID NO: 97067 - DNA, 20 bp, Artificial Sequence
  Description of Artificial Sequence: Synthetic oligonucleotide
  Target: LAMA2; (-) strand; PAM type: NRG; PAM sequence: AAG
taaggtgaaccgtctactca

SEQ ID NO: 97068 - DNA, 20 bp, Artificial Sequence
  Description of Artificial Sequence: Synthetic oligonucleotide
  Target: LAMA2; (-) strand; PAM type: NRG; PAM sequence: AGG
tcattttatcccattggata

SEQ ID NO: 97069 - DNA, 20 bp, Artificial Sequence
  Description of Artificial Sequence: Synthetic oligonucleotide
  Target: LAMA2; (-) strand; PAM type: NRG; PAM sequence: AAG
ctcattttatcccattggat

SEQ ID NO: 97070 - DNA, 20 bp, Artificial Sequence
  Description of Artificial Sequence: Synthetic oligonucleotide
  Target: LAMA2; (-) strand; PAM type: NRG; PAM sequence: TGG
gatttctcattttatcccat

SEQ ID NO: 97071 - DNA, 20 bp, Artificial Sequence
  Description of Artificial Sequence: Synthetic oligonucleotide
  Target: LAMA2; (-) strand; PAM type: NRG; PAM sequence: TGG
agttcaactttctgcctcca

SEQ ID NO: 97072 - DNA, 20 bp, Artificial Sequence
  Description of Artificial Sequence: Synthetic oligonucleotide
  Target: LAMA2; (-) strand; PAM type: NRG; PAM sequence: CAG
tgaggtctcctatatgaact

SEQ ID NO: 97073 - DNA, 20 bp, Artificial Sequence
  Description of Artificial Sequence: Synthetic oligonucleotide
  Target: LAMA2; (-) strand; PAM type: NRG; PAM sequence: AGG
ctgacatgaaagagaaattg

SEQ ID NO: 97074 - DNA, 20 bp, Artificial Sequence
  Description of Artificial Sequence: Synthetic oligonucleotide
  Target: LAMA2; (-) strand; PAM type: NRG; PAM sequence: GAG
actgacatgaaagagaaatt

SEQ ID NO: 97075 - DNA, 20 bp, Artificial Sequence
  Description of Artificial Sequence: Synthetic oligonucleotide
  Target: LAMA2; (-) strand; PAM type: NRG; PAM sequence: GAG
taacagagactgacatgaaa

SEQ ID NO: 97076 - DNA, 20 bp, Artificial Sequence
  Description of Artificial Sequence: Synthetic oligonucleotide
  Target: LAMA2; (-) strand; PAM type: NRG; PAM sequence: AAG
tgtaacagagactgacatga

SEQ ID NO: 97077 - DNA, 20 bp, Artificial Sequence
  Description of Artificial Sequence: Synthetic oligonucleotide
  Target: LAMA2; (-) strand; PAM type: NRG; PAM sequence: GAG
tattctcatagaatgtaaca

SEQ ID NO: 97078 - DNA, 20 bp, Artificial Sequence
  Description of Artificial Sequence: Synthetic oligonucleotide
  Target: LAMA2; (-) strand; PAM type: NRG; PAM sequence: CAG
tatattctcatagaatgtaa

SEQ ID NO: 97079 - DNA, 20 bp, Artificial Sequence
  Description of Artificial Sequence: Synthetic oligonucleotide
  Target: LAMA2; (-) strand; PAM type: NRG; PAM sequence: TAG
atatcgattctatattctca

SEQ ID NO: 97080 - DNA, 20 bp, Artificial Sequence
  Description of Artificial Sequence: Synthetic oligonucleotide
  Target: LAMA2; (-) strand; PAM type: NRG; PAM sequence: AAG
ggtctaataatttattatat

SEQ ID NO: 97081 - DNA, 20 bp, Artificial Sequence
  Description of Artificial Sequence: Synthetic oligonucleotide
  Target: LAMA2; (-) strand; PAM type: NRG; PAM sequence: AGG
tctgttttgctttcctaggc

SEQ ID NO: 97082 - DNA, 20 bp, Artificial Sequence
  Description of Artificial Sequence: Synthetic oligonucleotide
  Target: LAMA2; (-) strand; PAM type: NRG; PAM sequence: CAG
ttctgttttgctttcctagg

SEQ ID NO: 97083 - DNA, 20 bp, Artificial Sequence
  Description of Artificial Sequence: Synthetic oligonucleotide
  Target: LAMA2; (-) strand; PAM type: NRG; PAM sequence: AGG
tttttctgttttgctttcct

SEQ ID NO: 97084 - DNA, 20 bp, Artificial Sequence
  Description of Artificial Sequence: Synthetic oligonucleotide
  Target: LAMA2; (-) strand; PAM type: NRG; PAM sequence: TAG
atttttctgttttgctttcc

SEQ ID NO: 97085 - DNA, 20 bp, Artificial Sequence
  Description of Artificial Sequence: Synthetic oligonucleotide
  Target: LAMA2; (-) strand; PAM type: NRG; PAM sequence: GAG
attcattagttggccattga

SEQ ID NO: 97086 - DNA, 20 bp, Artificial Sequence
  Description of Artificial Sequence: Synthetic oligonucleotide
  Target: LAMA2; (-) strand; PAM type: NRG; PAM sequence: GAG
atattcattagttggccatt

SEQ ID NO: 97087 - DNA, 20 bp, Artificial Sequence
  Description of Artificial Sequence: Synthetic oligonucleotide
  Target: LAMA2; (-) strand; PAM type: NRG; PAM sequence: TGG
gtatttttatattcattagt

SEQ ID NO: 97088 - DNA, 20 bp, Artificial Sequence
  Description of Artificial Sequence: Synthetic oligonucleotide
  Target: LAMA2; (-) strand; PAM type: NRG; PAM sequence: TAG
aatagtatttttatattcat

SEQ ID NO: 97089 - DNA, 20 bp, Artificial Sequence
  Description of Artificial Sequence: Synthetic oligonucleotide
  Target: LAMA2; (-) strand; PAM type: NRG; PAM sequence: TAG
cagtataaacatttgaaaaa

SEQ ID NO: 97090 - DNA, 20 bp, Artificial Sequence
  Description of Artificial Sequence: Synthetic oligonucleotide
  Target: LAMA2; (-) strand; PAM type: NRG; PAM sequence: CAG
gctgtcttgtgtgcttattc

SEQ ID NO: 97091 - DNA, 20 bp, Artificial Sequence
  Description of Artificial Sequence: Synthetic oligonucleotide
  Target: LAMA2; (-) strand; PAM type: NRG; PAM sequence: AGG
gatcttctgcatgaaataaa

SEQ ID NO: 97092 - DNA, 20 bp, Artificial Sequence
  Description of Artificial Sequence: Synthetic oligonucleotide
  Target: LAMA2; (-) strand; PAM type: NRG; PAM sequence: AAG
ggatcttctgcatgaaataa

SEQ ID NO: 97093 - DNA, 20 bp, Artificial Sequence
  Description of Artificial Sequence: Synthetic oligonucleotide
  Target: LAMA2; (-) strand; PAM type: NRG; PAM sequence: TGG
catcaatcagaaaagcatta

SEQ ID NO: 97094 - DNA, 20 bp, Artificial Sequence
  Description of Artificial Sequence: Synthetic oligonucleotide
  Target: LAMA2; (-) strand; PAM type: NRG; PAM sequence: AAG
agtctctacatcaatcagaa

SEQ ID NO: 97095 - DNA, 20 bp, Artificial Sequence
  Description of Artificial Sequence: Synthetic oligonucleotide
  Target: LAMA2; (-) strand; PAM type: NRG; PAM sequence: CAG
ctaaaagtctctacatcaat

SEQ ID NO: 97096 - DNA, 20 bp, Artificial Sequence
  Description of Artificial Sequence: Synthetic oligonucleotide
  Target: LAMA2; (-) strand; PAM type: NRG; PAM sequence: AAG
ttaatttactcttttactaa

SEQ ID NO: 97097 - DNA, 20 bp, Artificial Sequence
  Description of Artificial Sequence: Synthetic oligonucleotide
  Target: LAMA2; (-) strand; PAM type: NRG; PAM sequence: TGG
acatatataaaagtgaattt

SEQ ID NO: 97098 - DNA, 20 bp, Artificial Sequence
  Description of Artificial Sequence: Synthetic oligonucleotide
  Target: LAMA2; (-) strand; PAM type: NRG; PAM sequence: AAG
cccaaggaatacatatataa

SEQ ID NO: 97099 - DNA, 20 bp, Artificial Sequence
  Description of Artificial Sequence: Synthetic oligonucleotide
  Target: LAMA2; (-) strand; PAM type: NRG; PAM sequence: AGG
aaatatcaaaaggaaaccca

SEQ ID NO: 97100 - DNA, 20 bp, Artificial Sequence
  Description of Artificial Sequence: Synthetic oligonucleotide
  Target: LAMA2; (-) strand; PAM type: NRG; PAM sequence: AAG
gaaatatcaaaaggaaaccc

SEQ ID NO: 97101 - DNA, 20 bp, Artificial Sequence
  Description of Artificial Sequence: Synthetic oligonucleotide
  Target: LAMA2; (-) strand; PAM type: NRG; PAM sequence: AGG
ttatagtgagaaatatcaaa

SEQ ID NO: 97102 - DNA, 20 bp, Artificial Sequence
  Description of Artificial Sequence: Synthetic oligonucleotide
  Target: LAMA2; (-) strand; PAM type: NRG; PAM sequence: AAG
gttatagtgagaaatatcaa

SEQ ID NO: 97103 - DNA, 20 bp, Artificial Sequence
  Description of Artificial Sequence: Synthetic oligonucleotide
  Target: LAMA2; (-) strand; PAM type: NRG; PAM sequence: GAG
aaataatctcctgttatagt

SEQ ID NO: 97104 - DNA, 20 bp, Artificial Sequence
  Description of Artificial Sequence: Synthetic oligonucleotide
  Target: LAMA2; (-) strand; PAM type: NRG; PAM sequence: TAG
ataaaaataatctcctgtta

SEQ ID NO: 97105 - DNA, 20 bp, Artificial Sequence
  Description of Artificial Sequence: Synthetic oligonucleotide
  Target: LAMA2; (-) strand; PAM type: NRG; PAM sequence: AAG
tatagataacagcgtttttt

SEQ ID NO: 97106 - DNA, 20 bp, Artificial Sequence
  Description of Artificial Sequence: Synthetic oligonucleotide
  Target: LAMA2; (-) strand; PAM type: NRG; PAM sequence: CAG
ataattaacagtatagataa

SEQ ID NO: 97107 - DNA, 20 bp, Artificial Sequence
  Description of Artificial Sequence: Synthetic oligonucleotide
  Target: LAMA2; (-) strand; PAM type: NRG; PAM sequence: TAG
ttctaaaataattaacagta

SEQ ID NO: 97108 - DNA, 20 bp, Artificial Sequence
  Description of Artificial Sequence: Synthetic oligonucleotide
  Target: LAMA2; (-) strand; PAM type: NRG; PAM sequence: CAG
tgatattctaaaataattaa

SEQ ID NO: 97109 - DNA, 20 bp, Artificial Sequence
  Description of Artificial Sequence: Synthetic oligonucleotide
  Target: LAMA2; (-) strand; PAM type: NRG; PAM sequence: TGG
taagacatgcaaatctgcta

SEQ ID NO: 97110 - DNA, 20 bp, Artificial Sequence
  Description of Artificial Sequence: Synthetic oligonucleotide
  Target: LAMA2; (-) strand; PAM type: NRG; PAM sequence: AAG
gaaattacctgctattttct

SEQ ID NO: 97111 - DNA, 20 bp, Artificial Sequence
  Description of Artificial Sequence: Synthetic oligonucleotide
  Target: LAMA2; (-) strand; PAM type: NRG; PAM sequence: CAG
caaactcttttactgcagta

SEQ ID NO: 97112 - DNA, 20 bp, Artificial Sequence
  Description of Artificial Sequence: Synthetic oligonucleotide
  Target: LAMA2; (-) strand; PAM type: NRG; PAM sequence: CAG
actaccaaactcttttactg

SEQ ID NO: 97113 - DNA, 20 bp, Artificial Sequence
  Description of Artificial Sequence: Synthetic oligonucleotide
  Target: LAMA2; (-) strand; PAM type: NRG; PAM sequence: AAG
tttctatcagttccactaac

SEQ ID NO: 97114 - DNA, 20 bp, Artificial Sequence
  Description of Artificial Sequence: Synthetic oligonucleotide
  Target: LAMA2; (-) strand; PAM type: NRG; PAM sequence: CAG
aatgacaatattgtttctat

SEQ ID NO: 97115 - DNA, 20 bp, Artificial Sequence
  Description of Artificial Sequence: Synthetic oligonucleotide
  Target: LAMA2; (-) strand; PAM type: NRG; PAM sequence: AAG
aagcaaagaaagtataatta

SEQ ID NO: 97116 - DNA, 20 bp, Artificial Sequence
  Description of Artificial Sequence: Synthetic oligonucleotide
  Target: LAMA2; (-) strand; PAM type: NRG; PAM sequence: AAG
tggtgtgagagaagcaaaga

SEQ ID NO: 97117 - DNA, 20 bp, Artificial Sequence
  Description of Artificial Sequence: Synthetic oligonucleotide
  Target: LAMA2; (-) strand; PAM type: NRG; PAM sequence: AAG
aaattggtgtgagagaagca

SEQ ID NO: 97118 - DNA, 20 bp, Artificial Sequence
  Description of Artificial Sequence: Synthetic oligonucleotide
  Target: LAMA2; (-) strand; PAM type: NRG; PAM sequence: AAG
aggtgaaattggtgtgagag

SEQ ID NO: 97119 - DNA, 20 bp, Artificial Sequence
  Description of Artificial Sequence: Synthetic oligonucleotide
  Target: LAMA2; (-) strand; PAM type: NRG; PAM sequence: GAG
ggaaggtgaaattggtgtga

SEQ ID NO: 97120 - DNA, 20 bp, Artificial Sequence
  Description of Artificial Sequence: Synthetic oligonucleotide
  Target: LAMA2; (-) strand; PAM type: NRG; PAM sequence: GAG
taggaaggtgaaattggtgt

SEQ ID NO: 97121 - DNA, 20 bp, Artificial Sequence
  Description of Artificial Sequence: Synthetic oligonucleotide
  Target: LAMA2; (-) strand; PAM type: NRG; PAM sequence: TGG
acagtgtaggaaggtgaaat

SEQ ID NO: 97122 - DNA, 20 bp, Artificial Sequence
  Description of Artificial Sequence: Synthetic oligonucleotide
  Target: LAMA2; (-) strand; PAM type: NRG; PAM sequence: AGG
caaagtgtcacagtgtagga

SEQ ID NO: 97123 - DNA, 20 bp, Artificial Sequence
  Description of Artificial Sequence: Synthetic oligonucleotide
  Target: LAMA2; (-) strand; PAM type: NRG; PAM sequence: AAG
acaaagtgtcacagtgtagg

SEQ ID NO: 97124 - DNA, 20 bp, Artificial Sequence
  Description of Artificial Sequence: Synthetic oligonucleotide
  Target: LAMA2; (-) strand; PAM type: NRG; PAM sequence: AGG
aagacaaagtgtcacagtgt

SEQ ID NO: 97125 - DNA, 20 bp, Artificial Sequence
  Description of Artificial Sequence: Synthetic oligonucleotide
  Target: LAMA2; (-) strand; PAM type: NRG; PAM sequence: TAG
aaagacaaagtgtcacagtg

SEQ ID NO: 97126 - DNA, 20 bp, Artificial Sequence
  Description of Artificial Sequence: Synthetic oligonucleotide
  Target: LAMA2; (-) strand; PAM type: NRG; PAM sequence: CAG
aaaaaaaagacaaagtgtca

SEQ ID NO: 97127 - DNA, 20 bp, Artificial Sequence
  Description of Artificial Sequence: Synthetic oligonucleotide
  Target: LAMA2; (-) strand; PAM type: NRG; PAM sequence: AAG
cgggaaaaaaaaaaaagaca

SEQ ID NO: 97128 - DNA, 20 bp, Artificial Sequence
  Description of Artificial Sequence: Synthetic oligonucleotide
  Target: LAMA2; (-) strand; PAM type: NRG; PAM sequence: AAG
atagggcgggaaaaaaaaaa

SEQ ID NO: 97129 - DNA, 20 bp, Artificial Sequence
  Description of Artificial Sequence: Synthetic oligonucleotide
  Target: LAMA2; (-) strand; PAM type: NRG; PAM sequence: GGG
aaaagaaaaagacatagggc

SEQ ID NO: 97130 - DNA, 20 bp, Artificial Sequence
  Description of Artificial Sequence: Synthetic oligonucleotide
  Target: LAMA2; (-) strand; PAM type: NRG; PAM sequence: CGG
caaaagaaaaagacataggg

SEQ ID NO: 97131 - DNA, 20 bp, Artificial Sequence
  Description of Artificial Sequence: Synthetic oligonucleotide
  Target: LAMA2; (-) strand; PAM type: NRG; PAM sequence: GGG
tgacaaaagaaaaagacata

SEQ ID NO: 97132 - DNA, 20 bp, Artificial Sequence
  Description of Artificial Sequence: Synthetic oligonucleotide
  Target: LAMA2; (-) strand; PAM type: NRG; PAM sequence: AGG
gtgacaaaagaaaaagacat

SEQ ID NO: 97133 - DNA, 20 bp, Artificial Sequence
  Description of Artificial Sequence: Synthetic oligonucleotide
  Target: LAMA2; (-) strand; PAM type: NRG; PAM sequence: TAG
tgtgacaaaagaaaaagaca

SEQ ID NO: 97134 - DNA, 20 bp, Artificial Sequence
  Description of Artificial Sequence: Synthetic oligonucleotide
  Target: LAMA2; (-) strand; PAM type: NRG; PAM sequence: AAG
aaacagtgtgacaaaagaaa

SEQ ID NO: 97135 - DNA, 20 bp, Artificial Sequence
  Description of Artificial Sequence: Synthetic oligonucleotide
  Target: LAMA2; (-) strand; PAM type: NRG; PAM sequence: AAG
tatgtaaaacagtgtgacaa

SEQ ID NO: 97136 - DNA, 20 bp, Artificial Sequence
  Description of Artificial Sequence: Synthetic oligonucleotide
  Target: LAMA2; (-) strand; PAM type: NRG; PAM sequence: CAG
atttggtgaggtatgtaaaa

SEQ ID NO: 97137 - DNA, 20 bp, Artificial Sequence
  Description of Artificial Sequence: Synthetic oligonucleotide
  Target: LAMA2; (-) strand; PAM type: NRG; PAM sequence: AGG
ccaaaagatctcatttggtg

SEQ ID NO: 97138 - DNA, 20 bp, Artificial Sequence
  Description of Artificial Sequence: Synthetic oligonucleotide
  Target: LAMA2; (-) strand; PAM type: NRG; PAM sequence: GAG
accaaaagatctcatttggt

SEQ ID NO: 97139 - DNA, 20 bp, Artificial Sequence
  Description of Artificial Sequence: Synthetic oligonucleotide
  Target: LAMA2; (-) strand; PAM type: NRG; PAM sequence: TGG
ttaaaccaaaagatctcatt

SEQ ID NO: 97140 - DNA, 20 bp, Artificial Sequence
  Description of Artificial Sequence: Synthetic oligonucleotide
  Target: LAMA2; (-) strand; PAM type: NRG; PAM sequence: AAG
aaaacggtcacttaaaccaa

SEQ ID NO: 97141 - DNA, 20 bp, Artificial Sequence
  Description of Artificial Sequence: Synthetic oligonucleotide
  Target: LAMA2; (-) strand; PAM type: NRG; PAM sequence: CGG
attctaaagtttcaaaaaaa

SEQ ID NO: 97142 - DNA, 20 bp, Artificial Sequence
  Description of Artificial Sequence: Synthetic oligonucleotide
  Target: LAMA2; (-) strand; PAM type: NRG; PAM sequence: AAG
attaggaaaaatgtattcta

SEQ ID NO: 97143 - DNA, 20 bp, Artificial Sequence
  Description of Artificial Sequence: Synthetic oligonucleotide
  Target: LAMA2; (-) strand; PAM type: NRG; PAM sequence: AGG
ccccagtttttactgagatt

SEQ ID NO: 97144 - DNA, 20 bp, Artificial Sequence
  Description of Artificial Sequence: Synthetic oligonucleotide
  Target: LAMA2; (-) strand; PAM type: NRG; PAM sequence: TAG
accccagtttttactgagat

SEQ ID NO: 97145 - DNA, 20 bp, Artificial Sequence
  Description of Artificial Sequence: Synthetic oligonucleotide
  Target: LAMA2; (-) strand; PAM type: NRG; PAM sequence: GAG
ctatgaccccagtttttact

SEQ ID NO: 97146 - DNA, 20 bp, Artificial Sequence
  Description of Artificial Sequence: Synthetic oligonucleotide
  Target: LAMA2; (-) strand; PAM type: NRG; PAM sequence: CAG
gcattgtgagactatgaccc

SEQ ID NO: 97147 - DNA, 20 bp, Artificial Sequence
  Description of Artificial Sequence: Synthetic oligonucleotide
  Target: LAMA2; (-) strand; PAM type: NRG; PAM sequence: GAG
ttatttgttcttagcattgt

SEQ ID NO: 97148 - DNA, 20 bp, Artificial Sequence
  Description of Artificial Sequence: Synthetic oligonucleotide
  Target: LAMA2; (-) strand; PAM type: NRG; PAM sequence: TAG
atgacagctttatttgttct

SEQ ID NO: 97149 - DNA, 20 bp, Artificial Sequence
  Description of Artificial Sequence: Synthetic oligonucleotide
  Target: LAMA2; (-) strand; PAM type: NRG; PAM sequence: CAG
acaaaatcaaatgctgatga

SEQ ID NO: 97150 - DNA, 20 bp, Artificial Sequence
  Description of Artificial Sequence: Synthetic oligonucleotide
  Target: LAMA2; (-) strand; PAM type: NRG; PAM sequence: GGG
gttattttaattactttagg

SEQ ID NO: 97151 - DNA, 20 bp, Artificial Sequence
  Description of Artificial Sequence: Synthetic oligonucleotide
  Target: LAMA2; (-) strand; PAM type: NRG; PAM sequence: GGG
ggttattttaattactttag

SEQ ID NO: 97152 - DNA, 20 bp, Artificial Sequence
  Description of Artificial Sequence: Synthetic oligonucleotide
  Target: LAMA2; (-) strand; PAM type: NRG; PAM sequence: GGG
aggttattttaattacttta

SEQ ID NO: 97153 - DNA, 20 bp, Artificial Sequence
  Description of Artificial Sequence: Synthetic oligonucleotide
  Target: LAMA2; (-) strand; PAM type: NRG; PAM sequence: AGG
aaggttattttaattacttt

SEQ ID NO: 97154 - DNA, 20 bp, Artificial Sequence
  Description of Artificial Sequence: Synthetic oligonucleotide
  Target: LAMA2; (-) strand; PAM type: NRG; PAM sequence: TAG
caaggttattttaattactt

SEQ ID NO: 97155 - DNA, 20 bp, Artificial Sequence
  Description of Artificial Sequence: Synthetic oligonucleotide
  Target: LAMA2; (-) strand; PAM type: NRG; PAM sequence: AGG
attgaataaataaagataca

SEQ ID NO: 97156 - DNA, 20 bp, Artificial Sequence
  Description of Artificial Sequence: Synthetic oligonucleotide
  Target: LAMA2; (-) strand; PAM type: NRG; PAM sequence: AAG
aattgaataaataaagatac

SEQ ID NO: 97157 - DNA, 20 bp, Artificial Sequence
  Description of Artificial Sequence: Synthetic oligonucleotide
  Target: LAMA2; (-) strand; PAM type: NRG; PAM sequence: AAG
aatttataattgaataaata

SEQ ID NO: 97158 - DNA, 20 bp, Artificial Sequence
  Description of Artificial Sequence: Synthetic oligonucleotide
  Target: LAMA2; (-) strand; PAM type: NRG; PAM sequence: GAG
ctcttaaactctctgctttt

SEQ ID NO: 97159 - DNA, 20 bp, Artificial Sequence
  Description of Artificial Sequence: Synthetic oligonucleotide
  Target: LAMA2; (-) strand; PAM type: NRG; PAM sequence: CAG
tacaaagttcaaacctcaaa

SEQ ID NO: 97160 - DNA, 20 bp, Artificial Sequence
  Description of Artificial Sequence: Synthetic oligonucleotide
  Target: LAMA2; (-) strand; PAM type: NRG; PAM sequence: AAG
cagcactgatacaatgtaca

SEQ ID NO: 97161 - DNA, 20 bp, Artificial Sequence
  Description of Artificial Sequence: Synthetic oligonucleotide
  Target: LAMA2; (-) strand; PAM type: NRG; PAM sequence: CAG
gcaaagaaaaaagataatgc

SEQ ID NO: 97162 - DNA, 20 bp, Artificial Sequence
  Description of Artificial Sequence: Synthetic oligonucleotide
  Target: LAMA2; (-) strand; PAM type: NRG; PAM sequence: AAG
ggaaacaaaagcaaagaaaa

SEQ ID NO: 97163 - DNA, 20 bp, Artificial Sequence
  Description of Artificial Sequence: Synthetic oligonucleotide
  Target: LAMA2; (-) strand; PAM type: NRG; PAM sequence: AAG
tataaaaggaaacaaaagca

SEQ ID NO: 97164 - DNA, 20 bp, Artificial Sequence
  Description of Artificial Sequence: Synthetic oligonucleotide
  Target: LAMA2; (-) strand; PAM type: NRG; PAM sequence: AAG
aactttataaaaggaaacaa

SEQ ID NO: 97165 - DNA, 20 bp, Artificial Sequence
  Description of Artificial Sequence: Synthetic oligonucleotide
  Target: LAMA2; (-) strand; PAM type: NRG; PAM sequence: AGG
cttaaattaaactttataaa

SEQ ID NO: 97166 - DNA, 20 bp, Artificial Sequence
  Description of Artificial Sequence: Synthetic oligonucleotide
  Target: LAMA2; (-) strand; PAM type: NRG; PAM sequence: AAG
ccttaaattaaactttataa

SEQ ID NO: 97167 - DNA, 20 bp, Artificial Sequence
  Description of Artificial Sequence: Synthetic oligonucleotide
  Target: LAMA2; (-) strand; PAM type: NRG; PAM sequence: AAG
aaataactactgaaatgcaa

SEQ ID NO: 97168 - DNA, 20 bp, Artificial Sequence
  Description of Artificial Sequence: Synthetic oligonucleotide
  Target: LAMA2; (-) strand; PAM type: NRG; PAM sequence: CAG
tcagggatttggccaaactc

SEQ ID NO: 97169 - DNA, 20 bp, Artificial Sequence
  Description of Artificial Sequence: Synthetic oligonucleotide
  Target: LAMA2; (-) strand; PAM type: NRG; PAM sequence: TGG
ctttgattgcatcagggatt

SEQ ID NO: 97170 - DNA, 20 bp, Artificial Sequence
  Description of Artificial Sequence: Synthetic oligonucleotide
  Target: LAMA2; (-) strand; PAM type: NRG; PAM sequence: GGG
caatggctttgattgcatca

SEQ ID NO: 97171 - DNA, 20 bp, Artificial Sequence
  Description of Artificial Sequence: Synthetic oligonucleotide
  Target: LAMA2; (-) strand; PAM type: NRG; PAM sequence: AGG
gcaatggctttgattgcatc

SEQ ID NO: 97172 - DNA, 20 bp, Artificial Sequence
  Description of Artificial Sequence: Synthetic oligonucleotide
  Target: LAMA2; (-) strand; PAM type: NRG; PAM sequence: CAG
agcaatggctttgattgcat

SEQ ID NO: 97173 - DNA, 20 bp, Artificial Sequence
  Description of Artificial Sequence: Synthetic oligonucleotide
  Target: LAMA2; (-) strand; PAM type: NRG; PAM sequence: TGG
ttcaggggattagagagcaa

SEQ ID NO: 97174 - DNA, 20 bp, Artificial Sequence
  Description of Artificial Sequence: Synthetic oligonucleotide
  Target: LAMA2; (-) strand; PAM type: NRG; PAM sequence: GAG
ttttttttcaggggattaga

SEQ ID NO: 97175 - DNA, 20 bp, Artificial Sequence
  Description of Artificial Sequence: Synthetic oligonucleotide
  Target: LAMA2; (-) strand; PAM type: NRG; PAM sequence: GAG
ttttttttttcaggggatta

SEQ ID NO: 97176 - DNA, 20 bp, Artificial Sequence
  Description of Artificial Sequence: Synthetic oligonucleotide
  Target: LAMA2; (-) strand; PAM type: NRG; PAM sequence: TAG
cattttttttttcaggggat

SEQ ID NO: 97177 - DNA, 20 bp, Artificial Sequence
  Description of Artificial Sequence: Synthetic oligonucleotide
  Target: LAMA2; (-) strand; PAM type: NRG; PAM sequence: GGG
tacaccattttttttttcag

SEQ ID NO: 97178 - DNA, 20 bp, Artificial Sequence
  Description of Artificial Sequence: Synthetic oligonucleotide
  Target: LAMA2; (-) strand; PAM type: NRG; PAM sequence: GGG
atacaccattttttttttca

SEQ ID NO: 97179 - DNA, 20 bp, Artificial Sequence
  Description of Artificial Sequence: Synthetic oligonucleotide
  Target: LAMA2; (-) strand; PAM type: NRG; PAM sequence: AGG
aatacaccattttttttttc

SEQ ID NO: 97180 - DNA, 20 bp, Artificial Sequence
  Description of Artificial Sequence: Synthetic oligonucleotide
  Target: LAMA2; (-) strand; PAM type: NRG; PAM sequence: CAG
caatacaccatttttttttt

SEQ ID NO: 97181 - DNA, 20 bp, Artificial Sequence
  Description of Artificial Sequence: Synthetic oligonucleotide
  Target: LAMA2; (-) strand; PAM type: NRG; PAM sequence: CAG
atcaagtgaagcttgaatgg

SEQ ID NO: 97182 - DNA, 20 bp, Artificial Sequence
  Description of Artificial Sequence: Synthetic oligonucleotide
  Target: LAMA2; (-) strand; PAM type: NRG; PAM sequence: TGG
caaatcaagtgaagcttgaa

SEQ ID NO: 97183 - DNA, 20 bp, Artificial Sequence
  Description of Artificial Sequence: Synthetic oligonucleotide
  Target: LAMA2; (-) strand; PAM type: NRG; PAM sequence: AAG
aagtgtttacaaatcaagtg

SEQ ID NO: 97184 - DNA, 20 bp, Artificial Sequence
  Description of Artificial Sequence: Synthetic oligonucleotide
  Target: LAMA2; (-) strand; PAM type: NRG; PAM sequence: AAG
cccgcaagtgtttacaaatc

SEQ ID NO: 97185 - DNA, 20 bp, Artificial Sequence
  Description of Artificial Sequence: Synthetic oligonucleotide
  Target: LAMA2; (-) strand; PAM type: NRG; PAM sequence: AAG
aatgcacataacagacccgc

SEQ ID NO: 97186 - DNA, 20 bp, Artificial Sequence
  Description of Artificial Sequence: Synthetic oligonucleotide
  Target: LAMA2; (-) strand; PAM type: NRG; PAM sequence: CAG
ttgcacatgaatgcacataa

SEQ ID NO: 97187 - DNA, 20 bp, Artificial Sequence
  Description of Artificial Sequence: Synthetic oligonucleotide
  Target: LAMA2; (-) strand; PAM type: NRG; PAM sequence: TGG
tttatagcccgaggagctac

SEQ ID NO: 97188 - DNA, 20 bp, Artificial Sequence
  Description of Artificial Sequence: Synthetic oligonucleotide
  Target: LAMA2; (-) strand; PAM type: NRG; PAM sequence: GAG
atggaattttatagcccgag

SEQ ID NO: 97189 - DNA, 20 bp, Artificial Sequence
  Description of Artificial Sequence: Synthetic oligonucleotide
  Target: LAMA2; (-) strand; PAM type: NRG; PAM sequence: AGG
ccatggaattttatagcccg

SEQ ID NO: 97190 - DNA, 20 bp, Artificial Sequence
  Description of Artificial Sequence: Synthetic oligonucleotide
  Target: LAMA2; (-) strand; PAM type: NRG; PAM sequence: GAG
tccatggaattttatagccc

SEQ ID NO: 97191 - DNA, 20 bp, Artificial Sequence
  Description of Artificial Sequence: Synthetic oligonucleotide
  Target: LAMA2; (-) strand; PAM type: NRG; PAM sequence: TAG
ggcatctccatggaatttta

SEQ ID NO: 97192 - DNA, 20 bp, Artificial Sequence
  Description of Artificial Sequence: Synthetic oligonucleotide
  Target: LAMA2; (-) strand; PAM type: NRG; PAM sequence: TGG
actttgcattggcatctcca

SEQ ID NO: 97193 - DNA, 20 bp, Artificial Sequence
  Description of Artificial Sequence: Synthetic oligonucleotide
  Target: LAMA2; (-) strand; PAM type: NRG; PAM sequence: TGG
gtaagaaggtaactttgcat

SEQ ID NO: 97194 - DNA, 20 bp, Artificial Sequence
  Description of Artificial Sequence: Synthetic oligonucleotide
  Target: LAMA2; (-) strand; PAM type: NRG; PAM sequence: AGG
ggctctctgtgggagtaaga

SEQ ID NO: 97195 - DNA, 20 bp, Artificial Sequence
  Description of Artificial Sequence: Synthetic oligonucleotide
  Target: LAMA2; (-) strand; PAM type: NRG; PAM sequence: AAG
gggctctctgtgggagtaag

SEQ ID NO: 97196 - DNA, 20 bp, Artificial Sequence
  Description of Artificial Sequence: Synthetic oligonucleotide
  Target: LAMA2; (-) strand; PAM type: NRG; PAM sequence: AAG
tctgggctctctgtgggagt

SEQ ID NO: 97197 - DNA, 20 bp, Artificial Sequence
  Description of Artificial Sequence: Synthetic oligonucleotide
  Target: LAMA2; (-) strand; PAM type: NRG; PAM sequence: GAG
gttctctgggctctctgtgg

SEQ ID NO: 97198 - DNA, 20 bp, Artificial Sequence
  Description of Artificial Sequence: Synthetic oligonucleotide
  Target: LAMA2; (-) strand; PAM type: NRG; PAM sequence: GGG
atgttctctgggctctctgt

SEQ ID NO: 97199 - DNA, 20 bp, Artificial Sequence
  Description of Artificial Sequence: Synthetic oligonucleotide
  Target: LAMA2; (-) strand; PAM type: NRG; PAM sequence: TGG
tatgttctctgggctctctg

SEQ ID NO: 97200 - DNA, 20 bp, Artificial Sequence
  Description of Artificial Sequence: Synthetic oligonucleotide
  Target: LAMA2; (-) strand; PAM type: NRG; PAM sequence: GGG
acttctcccttatgttctct

SEQ ID NO: 97201 - DNA, 20 bp, Artificial Sequence
  Description of Artificial Sequence: Synthetic oligonucleotide
  Target: LAMA2; (-) strand; PAM type: NRG; PAM sequence: TGG
aacttctcccttatgttctc

SEQ ID NO: 97202 - DNA, 20 bp, Artificial Sequence
  Description of Artificial Sequence: Synthetic oligonucleotide
  Target: LAMA2; (-) strand; PAM type: NRG; PAM sequence: AAG
gcaaaccactccccttctgc

SEQ ID NO: 97203 - DNA, 20 bp, Artificial Sequence
  Description of Artificial Sequence: Synthetic oligonucleotide
  Target: LAMA2; (-) strand; PAM type: NRG; PAM sequence: AAG
acacagtggtggtgagctgt

SEQ ID NO: 97204 - DNA, 20 bp, Artificial Sequence
  Description of Artificial Sequence: Synthetic oligonucleotide
  Target: LAMA2; (-) strand; PAM type: NRG; PAM sequence: GAG
taagtacacacagtggtggt

SEQ ID NO: 97205 - DNA, 20 bp, Artificial Sequence
  Description of Artificial Sequence: Synthetic oligonucleotide
  Target: LAMA2; (-) strand; PAM type: NRG; PAM sequence: TGG
cctgtaagtacacacagtgg

SEQ ID NO: 97206 - DNA, 20 bp, Artificial Sequence
  Description of Artificial Sequence: Synthetic oligonucleotide
  Target: LAMA2; (-) strand; PAM type: NRG; PAM sequence: TGG
ctccctgtaagtacacacag

SEQ ID NO: 97207 - DNA, 20 bp, Artificial Sequence
  Description of Artificial Sequence: Synthetic oligonucleotide
  Target: LAMA2; (-) strand; PAM type: NRG; PAM sequence: CAG
ctgctccctgtaagtacaca

SEQ ID NO: 97208 - DNA, 20 bp, Artificial Sequence
  Description of Artificial Sequence: Synthetic oligonucleotide
  Target: LAMA2; (-) strand; PAM type: NRG; PAM sequence: AAG
tttcactctctgctccctgt

SEQ ID NO: 97209 - DNA, 20 bp, Artificial Sequence
  Description of Artificial Sequence: Synthetic oligonucleotide
  Target: LAMA2; (-) strand; PAM type: NRG; PAM sequence: AGG
cacacattcaattaaaattc

SEQ ID NO: 97210 - DNA, 20 bp, Artificial Sequence
  Description of Artificial Sequence: Synthetic oligonucleotide
  Target: LAMA2; (-) strand; PAM type: NRG; PAM sequence: CAG
acacacattcaattaaaatt

SEQ ID NO: 97211 - DNA, 20 bp, Artificial Sequence
  Description of Artificial Sequence: Synthetic oligonucleotide
  Target: LAMA2; (-) strand; PAM type: NRG; PAM sequence: TGG
gtaatctgcactctgaagat

SEQ ID NO: 97212 - DNA, 20 bp, Artificial Sequence
  Description of Artificial Sequence: Synthetic oligonucleotide
  Target: LAMA2; (-) strand; PAM type: NRG; PAM sequence: AAG
gcattgtaatctgcactctg

SEQ ID NO: 97213 - DNA, 20 bp, Artificial Sequence
  Description of Artificial Sequence: Synthetic oligonucleotide
  Target: LAMA2; (-) strand; PAM type: NRG; PAM sequence: TAG
tatgaatgcatgttctttgc

SEQ ID NO: 97214 - DNA, 20 bp, Artificial Sequence
  Description of Artificial Sequence: Synthetic oligonucleotide
  Target: LAMA2; (-) strand; PAM type: NRG; PAM sequence: AGG
actttataacaagcataggt

SEQ ID NO: 97215 - DNA, 20 bp, Artificial Sequence
  Description of Artificial Sequence: Synthetic oligonucleotide
  Target: LAMA2; (-) strand; PAM type: NRG; PAM sequence: TAG
aactttataacaagcatagg

SEQ ID NO: 97216 - DNA, 20 bp, Artificial Sequence
  Description of Artificial Sequence: Synthetic oligonucleotide
  Target: LAMA2; (-) strand; PAM type: NRG; PAM sequence: AGG
ataaactttataacaagcat

SEQ ID NO: 97217 - DNA, 20 bp, Artificial Sequence
  Description of Artificial Sequence: Synthetic oligonucleotide
  Target: LAMA2; (-) strand; PAM type: NRG; PAM sequence: TAG
cataaactttataacaagca

SEQ ID NO: 97218 - DNA, 20 bp, Artificial Sequence
  Description of Artificial Sequence: Synthetic oligonucleotide
  Target: LAMA2; (-) strand; PAM type: NRG; PAM sequence: AAG
tgagtcataaactttataac

SEQ ID NO: 97219 - DNA, 20 bp, Artificial Sequence
  Description of Artificial Sequence: Synthetic oligonucleotide
  Target: LAMA2; (-) strand; PAM type: NRG; PAM sequence: GAG
tccaggagtttaaggagttt

SEQ ID NO: 97220 - DNA, 20 bp, Artificial Sequence
  Description of Artificial Sequence: Synthetic oligonucleotide
  Target: LAMA2; (-) strand; PAM type: NRG; PAM sequence: GAG
gttacctccaggagtttaag

SEQ ID NO: 97221 - DNA, 20 bp, Artificial Sequence
  Description of Artificial Sequence: Synthetic oligonucleotide
  Target: LAMA2; (-) strand; PAM type: NRG; PAM sequence: AGG
aagttacctccaggagttta

SEQ ID NO: 97222 - DNA, 20 bp, Artificial Sequence
  Description of Artificial Sequence: Synthetic oligonucleotide
  Target: LAMA2; (-) strand; PAM type: NRG; PAM sequence: AAG
aaagttacctccaggagttt

SEQ ID NO: 97223 - DNA, 20 bp, Artificial Sequence
  Description of Artificial Sequence: Synthetic oligonucleotide
  Target: LAMA2; (-) strand; PAM type: NRG; PAM sequence: GAG
caaataaaagttacctccag

SEQ ID NO: 97224 - DNA, 20 bp, Artificial Sequence
  Description of Artificial Sequence: Synthetic oligonucleotide
  Target: LAMA2; (-) strand; PAM type: NRG; PAM sequence: AGG
ttcaaataaaagttacctcc

SEQ ID NO: 97225 - DNA, 20 bp, Artificial Sequence
  Description of Artificial Sequence: Synthetic oligonucleotide
  Target: LAMA2; (-) strand; PAM type: NRG; PAM sequence: CAG
cttcaaataaaagttacctc

SEQ ID NO: 97226 - DNA, 20 bp, Artificial Sequence
  Description of Artificial Sequence: Synthetic oligonucleotide
  Target: LAMA2; (-) strand; PAM type: NRG; PAM sequence: AAG
aatagttttgcttcaaataa

SEQ ID NO: 97227 - DNA, 20 bp, Artificial Sequence
  Description of Artificial Sequence: Synthetic oligonucleotide
  Target: LAMA2; (-) strand; PAM type: NRG; PAM sequence: TAG
ctttaaaatgtgacaatgaa

SEQ ID NO: 97228 - DNA, 20 bp, Artificial Sequence
  Description of Artificial Sequence: Synthetic oligonucleotide
  Target: LAMA2; (-) strand; PAM type: NRG; PAM sequence: GGG
ctggtaacacaaacatgttt

SEQ ID NO: 97229 - DNA, 20 bp, Artificial Sequence
  Description of Artificial Sequence: Synthetic oligonucleotide
  Target: LAMA2; (-) strand; PAM type: NRG; PAM sequence: TGG
actggtaacacaaacatgtt

SEQ ID NO: 97230 - DNA, 20 bp, Artificial Sequence
  Description of Artificial Sequence: Synthetic oligonucleotide
  Target: LAMA2; (-) strand; PAM type: NRG; PAM sequence: TGG
ctattttatgatggactaac

SEQ ID NO: 97231 - DNA, 20 bp, Artificial Sequence
  Description of Artificial Sequence: Synthetic oligonucleotide
  Target: LAMA2; (-) strand; PAM type: NRG; PAM sequence: TGG
aaactgggactattttatga

SEQ ID NO: 97232 - DNA, 20 bp, Artificial Sequence
  Description of Artificial Sequence: Synthetic oligonucleotide
  Target: LAMA2; (-) strand; PAM type: NRG; PAM sequence: GGG
ataaatgtagtccataaact

SEQ ID NO: 97233 - DNA, 20 bp, Artificial Sequence
  Description of Artificial Sequence: Synthetic oligonucleotide
  Target: LAMA2; (-) strand; PAM type: NRG; PAM sequence: TGG
aataaatgtagtccataaac

SEQ ID NO: 97234 - DNA, 20 bp, Artificial Sequence
  Description of Artificial Sequence: Synthetic oligonucleotide
  Target: LAMA2; (-) strand; PAM type: NRG; PAM sequence: TAG
ttttcattaaaaaataaatg

SEQ ID NO: 97235 - DNA, 20 bp, Artificial Sequence
  Description of Artificial Sequence: Synthetic oligonucleotide
  Target: LAMA2; (-) strand; PAM type: NRG; PAM sequence: AAG
aaatagtcattataattgaa

SEQ ID NO: 97236 - DNA, 20 bp, Artificial Sequence
  Description of Artificial Sequence: Synthetic oligonucleotide
  Target: LAMA2; (-) strand; PAM type: NRG; PAM sequence: TAG
caccttttctgatggtgaaa

SEQ ID NO: 97237 - DNA, 20 bp, Artificial Sequence
  Description of Artificial Sequence: Synthetic oligonucleotide
  Target: LAMA2; (-) strand; PAM type: NRG; PAM sequence: TGG
acttaactcaccttttctga

SEQ ID NO: 97238 - DNA, 20 bp, Artificial Sequence
  Description of Artificial Sequence: Synthetic oligonucleotide
  Target: LAMA2; (-) strand; PAM type: NRG; PAM sequence: AAG
ctttattaaataattccttc

SEQ ID NO: 97239 - DNA, 20 bp, Artificial Sequence
  Description of Artificial Sequence: Synthetic oligonucleotide
  Target: LAMA2; (-) strand; PAM type: NRG; PAM sequence: AGG
ataatattgatttctttctg

SEQ ID NO: 97240 - DNA, 20 bp, Artificial Sequence
  Description of Artificial Sequence: Synthetic oligonucleotide
  Target: LAMA2; (-) strand; PAM type: NRG; PAM sequence: GAG
aataatattgatttctttct

SEQ ID NO: 97241 - DNA, 20 bp, Artificial Sequence
  Description of Artificial Sequence: Synthetic oligonucleotide
  Target: LAMA2; (-) strand; PAM type: NRG; PAM sequence: TAG
aggaactttagaaaaccacc

SEQ ID NO: 97242 - DNA, 20 bp, Artificial Sequence
  Description of Artificial Sequence: Synthetic oligonucleotide
  Target: LAMA2; (-) strand; PAM type: NRG; PAM sequence: TAG
gaatgacctttcaggaactt

SEQ ID NO: 97243 - DNA, 20 bp, Artificial Sequence
  Description of Artificial Sequence: Synthetic oligonucleotide
  Target: LAMA2; (-) strand; PAM type: NRG; PAM sequence: AGG
aatgctctgaatgacctttc

SEQ ID NO: 97244 - DNA, 20 bp, Artificial Sequence
  Description of Artificial Sequence: Synthetic oligonucleotide
  Target: LAMA2; (-) strand; PAM type: NRG; PAM sequence: CAG
caatgctctgaatgaccttt

SEQ ID NO: 97245 - DNA, 20 bp, Artificial Sequence
  Description of Artificial Sequence: Synthetic oligonucleotide
  Target: LAMA2; (-) strand; PAM type: NRG; PAM sequence: TGG
caattatttcgtacaggcac

SEQ ID NO: 97246 - DNA, 20 bp, Artificial Sequence
  Description of Artificial Sequence: Synthetic oligonucleotide
  Target: LAMA2; (-) strand; PAM type: NRG; PAM sequence: AGG
cccattcaattatttcgtac

SEQ ID NO: 97247 - DNA, 20 bp, Artificial Sequence
  Description of Artificial Sequence: Synthetic oligonucleotide
  Target: LAMA2; (-) strand; PAM type: NRG; PAM sequence: CAG
ccccattcaattatttcgta

SEQ ID NO: 97248 - DNA, 20 bp, Artificial Sequence
  Description of Artificial Sequence: Synthetic oligonucleotide
  Target: LAMA2; (-) strand; PAM type: NRG; PAM sequence: AGG
tcttgcaaacagacaaccca

SEQ ID NO: 97249 - DNA, 20 bp, Artificial Sequence
  Description of Artificial Sequence: Synthetic oligonucleotide
  Target: LAMA2; (-) strand; PAM type: NRG; PAM sequence: AAG
ttcttgcaaacagacaaccc

SEQ ID NO: 97250 - DNA, 20 bp, Artificial Sequence
  Description of Artificial Sequence: Synthetic oligonucleotide
  Target: LAMA2; (-) strand; PAM type: NRG; PAM sequence: CAG
gacatttatattcttgcaaa

SEQ ID NO: 97251 - DNA, 20 bp, Artificial Sequence
  Description of Artificial Sequence: Synthetic oligonucleotide
  Target: LAMA2; (-) strand; PAM type: NRG; PAM sequence: TAG
ggtagacacggccaattaat

SEQ ID NO: 97252 - DNA, 20 bp, Artificial Sequence
  Description of Artificial Sequence: Synthetic oligonucleotide
  Target: LAMA2; (-) strand; PAM type: NRG; PAM sequence: CGG
tgagtggcttcaggtagaca

SEQ ID NO: 97253 - DNA, 20 bp, Artificial Sequence
  Description of Artificial Sequence: Synthetic oligonucleotide
  Target: LAMA2; (-) strand; PAM type: NRG; PAM sequence: TAG
aaaatgtgagtggcttcagg

SEQ ID NO: 97254 - DNA, 20 bp, Artificial Sequence
  Description of Artificial Sequence: Synthetic oligonucleotide
  Target: LAMA2; (-) strand; PAM type: NRG; PAM sequence: AGG
tttaaaatgtgagtggcttc

SEQ ID NO: 97255 - DNA, 20 bp, Artificial Sequence
  Description of Artificial Sequence: Synthetic oligonucleotide
  Target: LAMA2; (-) strand; PAM type: NRG; PAM sequence: CAG
ttttaaaatgtgagtggctt

SEQ ID NO: 97256 - DNA, 20 bp, Artificial Sequence
  Description of Artificial Sequence: Synthetic oligonucleotide
  Target: LAMA2; (-) strand; PAM type: NRG; PAM sequence: TGG
cccactttttaaaatgtgag

SEQ ID NO: 97257 - DNA, 20 bp, Artificial Sequence
  Description of Artificial Sequence: Synthetic oligonucleotide
  Target: LAMA2; (-) strand; PAM type: NRG; PAM sequence: GAG
ccccccactttttaaaatgt

SEQ ID NO: 97258 - DNA, 20 bp, Artificial Sequence
  Description of Artificial Sequence: Synthetic oligonucleotide
  Target: LAMA2; (-) strand; PAM type: NRG; PAM sequence: AAG
cctgttgaaaagttattata

SEQ ID NO: 97259 - DNA, 20 bp, Artificial Sequence
  Description of Artificial Sequence: Synthetic oligonucleotide
  Target: LAMA2; (-) strand; PAM type: NRG; PAM sequence: AAG
atgtctgatatcctgttgaa

SEQ ID NO: 97260 - DNA, 20 bp, Artificial Sequence
  Description of Artificial Sequence: Synthetic oligonucleotide
  Target: LAMA2; (-) strand; PAM type: NRG; PAM sequence: TGG
tcataagaagtttagtatat

SEQ ID NO: 97261 - DNA, 20 bp, Artificial Sequence
  Description of Artificial Sequence: Synthetic oligonucleotide
  Target: LAMA2; (-) strand; PAM type: NRG; PAM sequence: TAG
cacataaatcataagaagtt

SEQ ID NO: 97262 - DNA, 20 bp, Artificial Sequence
  Description of Artificial Sequence: Synthetic oligonucleotide
  Target: LAMA2; (-) strand; PAM type: NRG; PAM sequence: AAG
atattcacataaatcataag

SEQ ID NO: 97263 - DNA, 20 bp, Artificial Sequence
  Description of Artificial Sequence: Synthetic oligonucleotide
  Target: LAMA2; (-) strand; PAM type: NRG; PAM sequence: AAG
aaaatattcacataaatcat

SEQ ID NO: 97264 - DNA, 20 bp, Artificial Sequence
  Description of Artificial Sequence: Synthetic oligonucleotide
  Target: LAMA2; (-) strand; PAM type: NRG; PAM sequence: TAG
caaatgttaagagtacatat

SEQ ID NO: 97265 - DNA, 20 bp, Artificial Sequence
  Description of Artificial Sequence: Synthetic oligonucleotide
  Target: LAMA2; (-) strand; PAM type: NRG; PAM sequence: GAG
tttgcttcctcaaatgttaa

SEQ ID NO: 97266 - DNA, 20 bp, Artificial Sequence
  Description of Artificial Sequence: Synthetic oligonucleotide
  Target: LAMA2; (-) strand; PAM type: NRG; PAM sequence: AAG
tttttgcttcctcaaatgtt

SEQ ID NO: 97267 - DNA, 20 bp, Artificial Sequence
  Description of Artificial Sequence: Synthetic oligonucleotide
  Target: LAMA2; (-) strand; PAM type: NRG; PAM sequence: GGG
tgaagctgtttaaatttctg

SEQ ID NO: 97268 - DNA, 20 bp, Artificial Sequence
  Description of Artificial Sequence: Synthetic oligonucleotide
  Target: LAMA2; (-) strand; PAM type: NRG; PAM sequence: GGG
ttgaagctgtttaaatttct

SEQ ID NO: 97269 - DNA, 20 bp, Artificial Sequence
  Description of Artificial Sequence: Synthetic oligonucleotide
  Target: LAMA2; (-) strand; PAM type: NRG; PAM sequence: TGG
tttgaagctgtttaaatttc

SEQ ID NO: 97270 - DNA, 20 bp, Artificial Sequence
  Description of Artificial Sequence: Synthetic oligonucleotide
  Target: LAMA2; (-) strand; PAM type: NRG; PAM sequence: AAG
agataattaacattgttttg

SEQ ID NO: 97271 - DNA, 20 bp, Artificial Sequence
  Description of Artificial Sequence: Synthetic oligonucleotide
  Target: LAMA2; (-) strand; PAM type: NRG; PAM sequence: AAG
agttgtgggatgattaaatc

SEQ ID NO: 97272 - DNA, 20 bp, Artificial Sequence
  Description of Artificial Sequence: Synthetic oligonucleotide
  Target: LAMA2; (-) strand; PAM type: NRG; PAM sequence: GGG
ttgatacatagataagttgt

SEQ ID NO: 97273 - DNA, 20 bp, Artificial Sequence
  Description of Artificial Sequence: Synthetic oligonucleotide
  Target: LAMA2; (-) strand; PAM type: NRG; PAM sequence: TGG
tttgatacatagataagttg

SEQ ID NO: 97274 - DNA, 20 bp, Artificial Sequence
  Description of Artificial Sequence: Synthetic oligonucleotide
  Target: LAMA2; (-) strand; PAM type: NRG; PAM sequence: AAG
tgatattttgatacatagat

SEQ ID NO: 97275 - DNA, 20 bp, Artificial Sequence
  Description of Artificial Sequence: Synthetic oligonucleotide
  Target: LAMA2; (-) strand; PAM type: NRG; PAM sequence: TAG
caatgtgatattttgataca

SEQ ID NO: 97276 - DNA, 20 bp, Artificial Sequence
  Description of Artificial Sequence: Synthetic oligonucleotide
  Target: LAMA2; (-) strand; PAM type: NRG; PAM sequence: GGG
ctaaccaccatgttgttcaa

SEQ ID NO: 97277 - DNA, 20 bp, Artificial Sequence
  Description of Artificial Sequence: Synthetic oligonucleotide
  Target: LAMA2; (-) strand; PAM type: NRG; PAM sequence: AGG
cctaaccaccatgttgttca

SEQ ID NO: 97278 - DNA, 20 bp, Artificial Sequence
  Description of Artificial Sequence: Synthetic oligonucleotide
  Target: LAMA2; (-) strand; PAM type: NRG; PAM sequence: AAG
tcctaaccaccatgttgttc

SEQ ID NO: 97279 - DNA, 20 bp, Artificial Sequence
  Description of Artificial Sequence: Synthetic oligonucleotide
  Target: LAMA2; (-) strand; PAM type: NRG; PAM sequence: GGG
atttctgactgcatgaggtg

SEQ ID NO: 97280 - DNA, 20 bp, Artificial Sequence
  Description of Artificial Sequence: Synthetic oligonucleotide
  Target: LAMA2; (-) strand; PAM type: NRG; PAM sequence: GGG
gatttctgactgcatgaggt

SEQ ID NO: 97281 - DNA, 20 bp, Artificial Sequence
  Description of Artificial Sequence: Synthetic oligonucleotide
  Target: LAMA2; (-) strand; PAM type: NRG; PAM sequence: TGG
ggatttctgactgcatgagg

SEQ ID NO: 97282 - DNA, 20 bp, Artificial Sequence
  Description of Artificial Sequence: Synthetic oligonucleotide
  Target: LAMA2; (-) strand; PAM type: NRG; PAM sequence: AGG
tgtggatttctgactgcatg

SEQ ID NO: 97283 - DNA, 20 bp, Artificial Sequence
  Description of Artificial Sequence: Synthetic oligonucleotide
  Target: LAMA2; (-) strand; PAM type: NRG; PAM sequence: GAG
atgtggatttctgactgcat

SEQ ID NO: 97284 - DNA, 20 bp, Artificial Sequence
  Description of Artificial Sequence: Synthetic oligonucleotide
  Target: LAMA2; (-) strand; PAM type: NRG; PAM sequence: TGG
aaggtatcaaaagttatatg

SEQ ID NO: 97285 - DNA, 20 bp, Artificial Sequence
  Description of Artificial Sequence: Synthetic oligonucleotide
  Target: LAMA2; (-) strand; PAM type: NRG; PAM sequence: AAG
ttaagttttgaaggtatcaa

SEQ ID NO: 97286 - DNA, 20 bp, Artificial Sequence
  Description of Artificial Sequence: Synthetic oligonucleotide
  Target: LAMA2; (-) strand; PAM type: NRG; PAM sequence: AGG
tattagtagttaagttttga

SEQ ID NO: 97287 - DNA, 20 bp, Artificial Sequence
  Description of Artificial Sequence: Synthetic oligonucleotide
  Target: LAMA2; (-) strand; PAM type: NRG; PAM sequence: AAG
ctattagtagttaagttttg

SEQ ID NO: 97288 - DNA, 20 bp, Artificial Sequence
  Description of Artificial Sequence: Synthetic oligonucleotide
  Target: LAMA2; (-) strand; PAM type: NRG; PAM sequence: AAG
acaggaggctattagtagtt

SEQ ID NO: 97289 - DNA, 20 bp, Artificial Sequence
  Description of Artificial Sequence: Synthetic oligonucleotide
  Target: LAMA2; (-) strand; PAM type: NRG; PAM sequence: TAG
gttcaacaggaggctattag

SEQ ID NO: 97290 - DNA, 20 bp, Artificial Sequence
  Description of Artificial Sequence: Synthetic oligonucleotide
  Target: LAMA2; (-) strand; PAM type: NRG; PAM sequence: TAG
tctgttcaacaggaggctat

SEQ ID NO: 97291 - DNA, 20 bp, Artificial Sequence
  Description of Artificial Sequence: Synthetic oligonucleotide
  Target: LAMA2; (-) strand; PAM type: NRG; PAM sequence: AGG
tatggcttctgttcaacagg

SEQ ID NO: 97292 - DNA, 20 bp, Artificial Sequence
  Description of Artificial Sequence: Synthetic oligonucleotide
  Target: LAMA2; (-) strand; PAM type: NRG; PAM sequence: GAG
gtatggcttctgttcaacag

SEQ ID NO: 97293 - DNA, 20 bp, Artificial Sequence
  Description of Artificial Sequence: Synthetic oligonucleotide
  Target: LAMA2; (-) strand; PAM type: NRG; PAM sequence: AGG
cagtatggcttctgttcaac

SEQ ID NO: 97294 - DNA, 20 bp, Artificial Sequence
  Description of Artificial Sequence: Synthetic oligonucleotide
  Target: LAMA2; (-) strand; PAM type: NRG; PAM sequence: CAG
tcagtatggcttctgttcaa

SEQ ID NO: 97295 - DNA, 20 bp, Artificial Sequence
  Description of Artificial Sequence: Synthetic oligonucleotide
  Target: LAMA2; (-) strand; PAM type: NRG; PAM sequence: TGG
aatctactatgttatcagta

SEQ ID NO: 97296 - DNA, 20 bp, Artificial Sequence
  Description of Artificial Sequence: Synthetic oligonucleotide
  Target: LAMA2; (-) strand; PAM type: NRG; PAM sequence: CAG
atgttaatctactatgttat

SEQ ID NO: 97297 - DNA, 20 bp, Artificial Sequence
  Description of Artificial Sequence: Synthetic oligonucleotide
  Target: LAMA2; (-) strand; PAM type: NRG; PAM sequence: AAG
tctctagctcactttattat

SEQ ID NO: 97298 - DNA, 20 bp, Artificial Sequence
  Description of Artificial Sequence: Synthetic oligonucleotide
  Target: LAMA2; (-) strand; PAM type: NRG; PAM sequence: TAG
taataacattttcttttctc

SEQ ID NO: 97299 - DNA, 20 bp, Artificial Sequence
  Description of Artificial Sequence: Synthetic oligonucleotide
  Target: LAMA2; (-) strand; PAM type: NRG; PAM sequence: CAG
caggcatgagccactgagcc

SEQ ID NO: 97300 - DNA, 20 bp, Artificial Sequence
  Description of Artificial Sequence: Synthetic oligonucleotide
  Target: LAMA2; (-) strand; PAM type: NRG; PAM sequence: GAG
gattacaggcatgagccact

SEQ ID NO: 97301 - DNA, 20 bp, Artificial Sequence
  Description of Artificial Sequence: Synthetic oligonucleotide
  Target: LAMA2; (-) strand; PAM type: NRG; PAM sequence: GAG
agtgctgggattacaggcat

SEQ ID NO: 97302 - DNA, 20 bp, Artificial Sequence
  Description of Artificial Sequence: Synthetic oligonucleotide
  Target: LAMA2; (-) strand; PAM type: NRG; PAM sequence: AGG
tcccgaagtgctgggattac

SEQ ID NO: 97303 - DNA, 20 bp, Artificial Sequence
  Description of Artificial Sequence: Synthetic oligonucleotide
  Target: LAMA2; (-) strand; PAM type: NRG; PAM sequence: CAG
ctcccgaagtgctgggatta

SEQ ID NO: 97304 - DNA, 20 bp, Artificial Sequence
  Description of Artificial Sequence: Synthetic oligonucleotide
  Target: LAMA2; (-) strand; PAM type: NRG; PAM sequence: GGG
ctttggcctcccgaagtgct

SEQ ID NO: 97305 - DNA, 20 bp, Artificial Sequence
  Description of Artificial Sequence: Synthetic oligonucleotide
  Target: LAMA2; (-) strand; PAM type: NRG; PAM sequence: TGG
gctttggcctcccgaagtgc

SEQ ID NO: 97306 - DNA, 20 bp, Artificial Sequence
  Description of Artificial Sequence: Synthetic oligonucleotide
  Target: LAMA2; (-) strand; PAM type: NRG; PAM sequence: AAG
ctgcctgctttggcctcccg

SEQ ID NO: 97307 - DNA, 20 bp, Artificial Sequence
  Description of Artificial Sequence: Synthetic oligonucleotide
  Target: LAMA2; (-) strand; PAM type: NRG; PAM sequence: TGG
ctcaagtgatctgcctgctt

SEQ ID NO: 97308 - DNA, 20 bp, Artificial Sequence
  Description of Artificial Sequence: Synthetic oligonucleotide
  Target: LAMA2; (-) strand; PAM type: NRG; PAM sequence: AAG
ggtcttgaactgttgacctc

SEQ ID NO: 97309 - DNA, 20 bp, Artificial Sequence
  Description of Artificial Sequence: Synthetic oligonucleotide
  Target: LAMA2; (-) strand; PAM type: NRG; PAM sequence: TGG
tttcatcatgttggccaggc

SEQ ID NO: 97310 - DNA, 20 bp, Artificial Sequence
  Description of Artificial Sequence: Synthetic oligonucleotide
  Target: LAMA2; (-) strand; PAM type: NRG; PAM sequence: AGG
tgggtttcatcatgttggcc

SEQ ID NO: 97311 - DNA, 20 bp, Artificial Sequence
  Description of Artificial Sequence: Synthetic oligonucleotide
  Target: LAMA2; (-) strand; PAM type: NRG; PAM sequence: CAG
ctgggtttcatcatgttggc

SEQ ID NO: 97312 - DNA, 20 bp, Artificial Sequence
  Description of Artificial Sequence: Synthetic oligonucleotide
  Target: LAMA2; (-) strand; PAM type: NRG; PAM sequence: TGG
gaaactgggtttcatcatgt

SEQ ID NO: 97313 - DNA, 20 bp, Artificial Sequence
  Description of Artificial Sequence: Synthetic oligonucleotide
  Target: LAMA2; (-) strand; PAM type: NRG; PAM sequence: GGG
ttgtatttttagtagaaact

SEQ ID NO: 97314 - DNA, 20 bp, Artificial Sequence
  Description of Artificial Sequence: Synthetic oligonucleotide
  Target: LAMA2; (-) strand; PAM type: NRG; PAM sequence: TGG
attgtatttttagtagaaac

SEQ ID NO: 97315 - DNA, 20 bp, Artificial Sequence
  Description of Artificial Sequence: Synthetic oligonucleotide
  Target: LAMA2; (-) strand; PAM type: NRG; PAM sequence: TAG
gctaattattgtatttttag

SEQ ID NO: 97316 - DNA, 20 bp, Artificial Sequence
  Description of Artificial Sequence: Synthetic oligonucleotide
  Target: LAMA2; (-) strand; PAM type: NRG; PAM sequence: TAG
ccagctaattattgtatttt

SEQ ID NO: 97317 - DNA, 20 bp, Artificial Sequence
  Description of Artificial Sequence: Synthetic oligonucleotide
  Target: LAMA2; (-) strand; PAM type: NRG; PAM sequence: CAG
caggtgtgcaacaccacgcc

SEQ ID NO: 97318 - DNA, 20 bp, Artificial Sequence
  Description of Artificial Sequence: Synthetic oligonucleotide
  Target: LAMA2; (-) strand; PAM type: NRG; PAM sequence: AGG
tcctgagtagctgggattac

SEQ ID NO: 97319 - DNA, 20 bp, Artificial Sequence
  Description of Artificial Sequence: Synthetic oligonucleotide
  Target: LAMA2; (-) strand; PAM type: NRG; PAM sequence: CAG
ctcctgagtagctgggatta

SEQ ID NO: 97320 - DNA, 20 bp, Artificial Sequence
  Description of Artificial Sequence: Synthetic oligonucleotide
  Target: LAMA2; (-) strand; PAM type: NRG; PAM sequence: GGG
cctcagcctcctgagtagct

SEQ ID NO: 97321 - DNA, 20 bp, Artificial Sequence
  Description of Artificial Sequence: Synthetic oligonucleotide
  Target: LAMA2; (-) strand; PAM type: NRG; PAM sequence: TGG
gcctcagcctcctgagtagc

SEQ ID NO: 97322 - DNA, 20 bp, Artificial Sequence
  Description of Artificial Sequence: Synthetic oligonucleotide
  Target: LAMA2; (-) strand; PAM type: NRG; PAM sequence: TAG
tcctgcctcagcctcctgag

SEQ ID NO: 97323 - DNA, 20 bp, Artificial Sequence
  Description of Artificial Sequence: Synthetic oligonucleotide
  Target: LAMA2; (-) strand; PAM type: NRG; PAM sequence: GAG
ttctcctgcctcagcctcct

SEQ ID NO: 97324 - DNA, 20 bp, Artificial Sequence
  Description of Artificial Sequence: Synthetic oligonucleotide
  Target: LAMA2; (-) strand; PAM type: NRG; PAM sequence: CAG
ttcaagtgattctcctgcct

SEQ ID NO: 97325 - DNA, 20 bp, Artificial Sequence
  Description of Artificial Sequence: Synthetic oligonucleotide
  Target: LAMA2; (-) strand; PAM type: NRG; PAM sequence: AAG
aacctccgcctaccaggttc

SEQ ID NO: 97326 - DNA, 20 bp, Artificial Sequence
  Description of Artificial Sequence: Synthetic oligonucleotide
  Target: LAMA2; (-) strand; PAM type: NRG; PAM sequence: AGG
cactacaacctccgcctacc

SEQ ID NO: 97327 - DNA, 20 bp, Artificial Sequence
  Description of Artificial Sequence: Synthetic oligonucleotide
  Target: LAMA2; (-) strand; PAM type: NRG; PAM sequence: CAG
tcactacaacctccgcctac

SEQ ID NO: 97328 - DNA, 20 bp, Artificial Sequence
  Description of Artificial Sequence: Synthetic oligonucleotide
  Target: LAMA2; (-) strand; PAM type: NRG; PAM sequence: TGG
ggagtgtagtggcataatct

SEQ ID NO: 97329 - DNA, 20 bp, Artificial Sequence
  Description of Artificial Sequence: Synthetic oligonucleotide
  Target: LAMA2; (-) strand; PAM type: NRG; PAM sequence: TGG
tcacccaggctggagtgtag

SEQ ID NO: 97330 - DNA, 20 bp, Artificial Sequence
  Description of Artificial Sequence: Synthetic oligonucleotide
  Target: LAMA2; (-) strand; PAM type: NRG; PAM sequence: TAG
ctgtcacccaggctggagtg

SEQ ID NO: 97331 - DNA, 20 bp, Artificial Sequence
  Description of Artificial Sequence: Synthetic oligonucleotide
  Target: LAMA2; (-) strand; PAM type: NRG; PAM sequence: GAG
tcactctgtcacccaggctg

SEQ ID NO: 97332 - DNA, 20 bp, Artificial Sequence
  Description of Artificial Sequence: Synthetic oligonucleotide
  Target: LAMA2; (-) strand; PAM type: NRG; PAM sequence: TGG
tctcactctgtcacccaggc

SEQ ID NO: 97333 - DNA, 20 bp, Artificial Sequence
  Description of Artificial Sequence: Synthetic oligonucleotide
  Target: LAMA2; (-) strand; PAM type: NRG; PAM sequence: AGG
agagtctcactctgtcaccc

SEQ ID NO: 97334 - DNA, 20 bp, Artificial Sequence
  Description of Artificial Sequence: Synthetic oligonucleotide
  Target: LAMA2; (-) strand; PAM type: NRG; PAM sequence: CAG
cagagtctcactctgtcacc

SEQ ID NO: 97335 - DNA, 20 bp, Artificial Sequence
  Description of Artificial Sequence: Synthetic oligonucleotide
  Target: LAMA2; (-) strand; PAM type: NRG; PAM sequence: GAG
ttatttatttatttgagaca

SEQ ID NO: 97336 - DNA, 20 bp, Artificial Sequence
  Description of Artificial Sequence: Synthetic oligonucleotide
  Target: LAMA2; (-) strand; PAM type: NRG; PAM sequence: CAG
atttatttatttatttgaga

SEQ ID NO: 97337 - DNA, 20 bp, Artificial Sequence
  Description of Artificial Sequence: Synthetic oligonucleotide
  Target: LAMA2; (-) strand; PAM type: NRG; PAM sequence: GAG
atttatttatttatttattt

SEQ ID NO: 97338 - DNA, 20 bp, Artificial Sequence
  Description of Artificial Sequence: Synthetic oligonucleotide
  Target: LAMA2; (-) strand; PAM type: NRG; PAM sequence: AAG
aaatgaagacaacgaggatg

SEQ ID NO: 97339 - DNA, 20 bp, Artificial Sequence
  Description of Artificial Sequence: Synthetic oligonucleotide
  Target: LAMA2; (-) strand; PAM type: NRG; PAM sequence: AGG
tgctcaaaatgaagacaacg

SEQ ID NO: 97340 - DNA, 20 bp, Artificial Sequence
  Description of Artificial Sequence: Synthetic oligonucleotide
  Target: LAMA2; (-) strand; PAM type: NRG; PAM sequence: GAG
ctgctcaaaatgaagacaac

SEQ ID NO: 97341 - DNA, 20 bp, Artificial Sequence
  Description of Artificial Sequence: Synthetic oligonucleotide
  Target: LAMA2; (-) strand; PAM type: NRG; PAM sequence: AAG
tctttagtctgctcaaaatg

SEQ ID NO: 97342 - DNA, 20 bp, Artificial Sequence
  Description of Artificial Sequence: Synthetic oligonucleotide
  Target: LAMA2; (-) strand; PAM type: NRG; PAM sequence: TAG
ctcttcttcctcctcctctt

SEQ ID NO: 97343 - DNA, 20 bp, Artificial Sequence
  Description of Artificial Sequence: Synthetic oligonucleotide
  Target: LAMA2; (-) strand; PAM type: NRG; PAM sequence: AGG
gtctgctacccagagatagc

SEQ ID NO: 97344 - DNA, 20 bp, Artificial Sequence
  Description of Artificial Sequence: Synthetic oligonucleotide
  Target: LAMA2; (-) strand; PAM type: NRG; PAM sequence: CAG
cgtctgctacccagagatag

SEQ ID NO: 97345 - DNA, 20 bp, Artificial Sequence
  Description of Artificial Sequence: Synthetic oligonucleotide
  Target: LAMA2; (-) strand; PAM type: NRG; PAM sequence: TAG
ccacgtctgctacccagaga

SEQ ID NO: 97346 - DNA, 20 bp, Artificial Sequence
  Description of Artificial Sequence: Synthetic oligonucleotide
  Target: LAMA2; (-) strand; PAM type: NRG; PAM sequence: GAG
tcttccacgtctgctaccca

SEQ ID NO: 97347 - DNA, 20 bp, Artificial Sequence
  Description of Artificial Sequence: Synthetic oligonucleotide
  Target: LAMA2; (-) strand; PAM type: NRG; PAM sequence: CAG
tttcttccacgtctgctacc

SEQ ID NO: 97348 - DNA, 20 bp, Artificial Sequence
  Description of Artificial Sequence: Synthetic oligonucleotide
  Target: LAMA2; (-) strand; PAM type: NRG; PAM sequence: GGG
tgcatgggttcacttgtacg

SEQ ID NO: 97349 - DNA, 20 bp, Artificial Sequence
  Description of Artificial Sequence: Synthetic oligonucleotide
  Target: LAMA2; (-) strand; PAM type: NRG; PAM sequence: GGG
ctgcatgggttcacttgtac

SEQ ID NO: 97350 - DNA, 20 bp, Artificial Sequence
  Description of Artificial Sequence: Synthetic oligonucleotide
  Target: LAMA2; (-) strand; PAM type: NRG; PAM sequence: CGG
actgcatgggttcacttgta

SEQ ID NO: 97351 - DNA, 20 bp, Artificial Sequence
  Description of Artificial Sequence: Synthetic oligonucleotide
  Target: LAMA2; (-) strand; PAM type: NRG; PAM sequence: GGG
aatatgggcttgaactgcat

SEQ ID NO: 97352 - DNA, 20 bp, Artificial Sequence
  Description of Artificial Sequence: Synthetic oligonucleotide
  Target: LAMA2; (-) strand; PAM type: NRG; PAM sequence: TGG
caatatgggcttgaactgca

SEQ ID NO: 97353 - DNA, 20 bp, Artificial Sequence
  Description of Artificial Sequence: Synthetic oligonucleotide
  Target: LAMA2; (-) strand; PAM type: NRG; PAM sequence: GGG
agttgacccttgaacaatat

SEQ ID NO: 97354 - DNA, 20 bp, Artificial Sequence
  Description of Artificial Sequence: Synthetic oligonucleotide
  Target: LAMA2; (-) strand; PAM type: NRG; PAM sequence: TGG
aagttgacccttgaacaata

SEQ ID NO: 97355 - DNA, 20 bp, Artificial Sequence
  Description of Artificial Sequence: Synthetic oligonucleotide
  Target: LAMA2; (-) strand; PAM type: NRG; PAM sequence: AAG
gacaaataataattgtacat

SEQ ID NO: 97356 - DNA, 20 bp, Artificial Sequence
  Description of Artificial Sequence: Synthetic oligonucleotide
  Target: LAMA2; (-) strand; PAM type: NRG; PAM sequence: AAG
ctcacgtttttgtcaacctc

SEQ ID NO: 97357 - DNA, 20 bp, Artificial Sequence
  Description of Artificial Sequence: Synthetic oligonucleotide
  Target: LAMA2; (-) strand; PAM type: NRG; PAM sequence: CAG
ctagtaaacaatcaatccta

SEQ ID NO: 97358 - DNA, 20 bp, Artificial Sequence
  Description of Artificial Sequence: Synthetic oligonucleotide
  Target: LAMA2; (-) strand; PAM type: NRG; PAM sequence: TAG
gacagtcagttaagatcacc

SEQ ID NO: 97359 - DNA, 20 bp, Artificial Sequence
  Description of Artificial Sequence: Synthetic oligonucleotide
  Target: LAMA2; (-) strand; PAM type: NRG; PAM sequence: AAG
gattactatgacagtcagtt

SEQ ID NO: 97360 - DNA, 20 bp, Artificial Sequence
  Description of Artificial Sequence: Synthetic oligonucleotide
  Target: LAMA2; (-) strand; PAM type: NRG; PAM sequence: CAG
acttagattactatgacagt

SEQ ID NO: 97361 - DNA, 20 bp, Artificial Sequence
  Description of Artificial Sequence: Synthetic oligonucleotide
  Target: LAMA2; (-) strand; PAM type: NRG; PAM sequence: CAG
atgtacttagattactatga

SEQ ID NO: 97362 - DNA, 20 bp, Artificial Sequence
  Description of Artificial Sequence: Synthetic oligonucleotide
  Target: LAMA2; (-) strand; PAM type: NRG; PAM sequence: TAG
agaaacagcgagaatgtact

SEQ ID NO: 97363 - DNA, 20 bp, Artificial Sequence
  Description of Artificial Sequence: Synthetic oligonucleotide
  Target: LAMA2; (-) strand; PAM type: NRG; PAM sequence: GAG
tcagaaatcctagaaacagc

SEQ ID NO: 97364 - DNA, 20 bp, Artificial Sequence
  Description of Artificial Sequence: Synthetic oligonucleotide
  Target: LAMA2; (-) strand; PAM type: NRG; PAM sequence: CAG
gatttcagaaatcctagaaa

SEQ ID NO: 97365 - DNA, 20 bp, Artificial Sequence
  Description of Artificial Sequence: Synthetic oligonucleotide
  Target: LAMA2; (-) strand; PAM type: NRG; PAM sequence: TAG
cattgagatttcagaaatcc

SEQ ID NO: 97366 - DNA, 20 bp, Artificial Sequence
  Description of Artificial Sequence: Synthetic oligonucleotide
  Target: LAMA2; (-) strand; PAM type: NRG; PAM sequence: CAG
agctacctccattgagattt

SEQ ID NO: 97367 - DNA, 20 bp, Artificial Sequence
  Description of Artificial Sequence: Synthetic oligonucleotide
  Target: LAMA2; (-) strand; PAM type: NRG; PAM sequence: GAG
cttgttcagctacctccatt

SEQ ID NO: 97368 - DNA, 20 bp, Artificial Sequence
  Description of Artificial Sequence: Synthetic oligonucleotide
  Target: LAMA2; (-) strand; PAM type: NRG; PAM sequence: CAG
tgttgttccacgtccttgtt

SEQ ID NO: 97369 - DNA, 20 bp, Artificial Sequence
  Description of Artificial Sequence: Synthetic oligonucleotide
  Target: LAMA2; (-) strand; PAM type: NRG; PAM sequence: GAG
ttcaatcaagtcagctggag

SEQ ID NO: 97370 - DNA, 20 bp, Artificial Sequence
  Description of Artificial Sequence: Synthetic oligonucleotide
  Target: LAMA2; (-) strand; PAM type: NRG; PAM sequence: AGG
ttttcaatcaagtcagctgg

SEQ ID NO: 97371 - DNA, 20 bp, Artificial Sequence
  Description of Artificial Sequence: Synthetic oligonucleotide
  Target: LAMA2; (-) strand; PAM type: NRG; PAM sequence: GAG
tttttcaatcaagtcagctg

SEQ ID NO: 97372 - DNA, 20 bp, Artificial Sequence
  Description of Artificial Sequence: Synthetic oligonucleotide
  Target: LAMA2; (-) strand; PAM type: NRG; PAM sequence: TGG
catttttcaatcaagtcagc

SEQ ID NO: 97373 - DNA, 20 bp, Artificial Sequence
  Description of Artificial Sequence: Synthetic oligonucleotide
  Target: LAMA2; (-) strand; PAM type: NRG; PAM sequence: CAG
atcacatttttcaatcaagt

SEQ ID NO: 97374 - DNA, 20 bp, Artificial Sequence
  Description of Artificial Sequence: Synthetic oligonucleotide
  Target: LAMA2; (-) strand; PAM type: NRG; PAM sequence: AAG
gacaatcacatttttcaatc

SEQ ID NO: 97375 - DNA, 20 bp, Artificial Sequence
  Description of Artificial Sequence: Synthetic oligonucleotide
  Target: LAMA2; (-) strand; PAM type: NRG; PAM sequence: GGG
gacaggccagaatagcccag

SEQ ID NO: 97376 - DNA, 20 bp, Artificial Sequence
  Description of Artificial Sequence: Synthetic oligonucleotide
  Target: LAMA2; (-) strand; PAM type: NRG; PAM sequence: GGG
ggacaggccagaatagccca

SEQ ID NO: 97377 - DNA, 20 bp, Artificial Sequence
  Description of Artificial Sequence: Synthetic oligonucleotide
  Target: LAMA2; (-) strand; PAM type: NRG; PAM sequence: AGG
aggacaggccagaatagccc

SEQ ID NO: 97378 - DNA, 20 bp, Artificial Sequence
  Description of Artificial Sequence: Synthetic oligonucleotide
  Target: LAMA2; (-) strand; PAM type: NRG; PAM sequence: CAG
caggacaggccagaatagcc

SEQ ID NO: 97379 - DNA, 20 bp, Artificial Sequence
  Description of Artificial Sequence: Synthetic oligonucleotide
  Target: LAMA2; (-) strand; PAM type: NRG; PAM sequence: TAG
cctcacaggacaggccagaa

SEQ ID NO: 97380 - DNA, 20 bp, Artificial Sequence
  Description of Artificial Sequence: Synthetic oligonucleotide
  Target: LAMA2; (-) strand; PAM type: NRG; PAM sequence: CAG
gcttacctcacaggacaggc

SEQ ID NO: 97381 - DNA, 20 bp, Artificial Sequence
  Description of Artificial Sequence: Synthetic oligonucleotide
  Target: LAMA2; (-) strand; PAM type: NRG; PAM sequence: AGG
ggtagcttacctcacaggac

SEQ ID NO: 97382 - DNA, 20 bp, Artificial Sequence
  Description of Artificial Sequence: Synthetic oligonucleotide
  Target: LAMA2; (-) strand; PAM type: NRG; PAM sequence: CAG
aggtagcttacctcacagga

SEQ ID NO: 97383 - DNA, 20 bp, Artificial Sequence
  Description of Artificial Sequence: Synthetic oligonucleotide
  Target: LAMA2; (-) strand; PAM type: NRG; PAM sequence: AGG
taggaggtagcttacctcac

SEQ ID NO: 97384 - DNA, 20 bp, Artificial Sequence
  Description of Artificial Sequence: Synthetic oligonucleotide
  Target: LAMA2; (-) strand; PAM type: NRG; PAM sequence: CAG
gtaggaggtagcttacctca

SEQ ID NO: 97385 - DNA, 20 bp, Artificial Sequence
  Description of Artificial Sequence: Synthetic oligonucleotide
  Target: LAMA2; (-) strand; PAM type: NRG; PAM sequence: TAG
ttaagcaggttagtaggagg

SEQ ID NO: 97386 - DNA, 20 bp, Artificial Sequence
  Description of Artificial Sequence: Synthetic oligonucleotide
  Target: LAMA2; (-) strand; PAM type: NRG; PAM sequence: AGG
agattaagcaggttagtagg

SEQ ID NO: 97387 - DNA, 20 bp, Artificial Sequence
  Description of Artificial Sequence: Synthetic oligonucleotide
  Target: LAMA2; (-) strand; PAM type: NRG; PAM sequence: GAG
gagattaagcaggttagtag

SEQ ID NO: 97388 - DNA, 20 bp, Artificial Sequence
  Description of Artificial Sequence: Synthetic oligonucleotide
  Target: LAMA2; (-) strand; PAM type: NRG; PAM sequence: AGG
ttgagattaagcaggttagt

SEQ ID NO: 97389 - DNA, 20 bp, Artificial Sequence
  Description of Artificial Sequence: Synthetic oligonucleotide
  Target: LAMA2; (-) strand; PAM type: NRG; PAM sequence: TAG
cttgagattaagcaggttag

SEQ ID NO: 97390 - DNA, 20 bp, Artificial Sequence
  Description of Artificial Sequence: Synthetic oligonucleotide
  Target: LAMA2; (-) strand; PAM type: NRG; PAM sequence: TAG
tgacttgagattaagcaggt

SEQ ID NO: 97391 - DNA, 20 bp, Artificial Sequence
  Description of Artificial Sequence: Synthetic oligonucleotide
  Target: LAMA2; (-) strand; PAM type: NRG; PAM sequence: AGG
gaagtgacttgagattaagc

SEQ ID NO: 97392 - DNA, 20 bp, Artificial Sequence
  Description of Artificial Sequence: Synthetic oligonucleotide
  Target: LAMA2; (-) strand; PAM type: NRG; PAM sequence: CAG
tgaagtgacttgagattaag

SEQ ID NO: 97393 - DNA, 20 bp, Artificial Sequence
  Description of Artificial Sequence: Synthetic oligonucleotide
  Target: LAMA2; (-) strand; PAM type: NRG; PAM sequence: AAG
tcctgaagtgacttgagatt

SEQ ID NO: 97394 - DNA, 20 bp, Artificial Sequence
  Description of Artificial Sequence: Synthetic oligonucleotide
  Target: LAMA2; (-) strand; PAM type: NRG; PAM sequence: GAG
tttagctcctgaagtgactt

SEQ ID NO: 97395 - DNA, 20 bp, Artificial Sequence
  Description of Artificial Sequence: Synthetic oligonucleotide
  Target: LAMA2; (-) strand; PAM type: NRG; PAM sequence: AAG
gtatttccatttagctcctg

SEQ ID NO: 97396 - DNA, 20 bp, Artificial Sequence
  Description of Artificial Sequence: Synthetic oligonucleotide
  Target: LAMA2; (-) strand; PAM type: NRG; PAM sequence: TAG
cttctgggagtatttccatt

SEQ ID NO: 97397 - DNA, 20 bp, Artificial Sequence
  Description of Artificial Sequence: Synthetic oligonucleotide
  Target: LAMA2; (-) strand; PAM type: NRG; PAM sequence: GAG
tgcagtaaaggtacttctgg

SEQ ID NO: 97398 - DNA, 20 bp, Artificial Sequence
  Description of Artificial Sequence: Synthetic oligonucleotide
  Target: LAMA2; (-) strand; PAM type: NRG; PAM sequence: GGG
tatgcagtaaaggtacttct

SEQ ID NO: 97399 - DNA, 20 bp, Artificial Sequence
  Description of Artificial Sequence: Synthetic oligonucleotide
  Target: LAMA2; (-) strand; PAM type: NRG; PAM sequence: TGG
gtatgcagtaaaggtacttc

SEQ ID NO: 97400 - DNA, 20 bp, Artificial Sequence
  Description of Artificial Sequence: Synthetic oligonucleotide
  Target: LAMA2; (-) strand; PAM type: NRG; PAM sequence: AGG
taagaatatgtatgcagtaa

SEQ ID NO: 97401 - DNA, 20 bp, Artificial Sequence
  Description of Artificial Sequence: Synthetic oligonucleotide
  Target: LAMA2; (-) strand; PAM type: NRG; PAM sequence: AAG
ttaagaatatgtatgcagta

SEQ ID NO: 97402 - DNA, 20 bp, Artificial Sequence
  Description of Artificial Sequence: Synthetic oligonucleotide
  Target: LAMA2; (-) strand; PAM type: NRG; PAM sequence: CAG
atagattaagaatatgtatg

SEQ ID NO: 97403 - DNA, 20 bp, Artificial Sequence
  Description of Artificial Sequence: Synthetic oligonucleotide
  Target: LAMA2; (-) strand; PAM type: NRG; PAM sequence: AAG
aagattaaataaaatagatt

SEQ ID NO: 97404 - DNA, 20 bp, Artificial Sequence
  Description of Artificial Sequence: Synthetic oligonucleotide
  Target: LAMA2; (-) strand; PAM type: NRG; PAM sequence: TAG
gagtggaagattaaataaaa

SEQ ID NO: 97405 - DNA, 20 bp, Artificial Sequence
  Description of Artificial Sequence: Synthetic oligonucleotide
  Target: LAMA2; (-) strand; PAM type: NRG; PAM sequence: AAG
gtgtctcacactgtgagtgg

SEQ ID NO: 97406 - DNA, 20 bp, Artificial Sequence
  Description of Artificial Sequence: Synthetic oligonucleotide
  Target: LAMA2; (-) strand; PAM type: NRG; PAM sequence: TGG
actgtgtctcacactgtgag

SEQ ID NO: 97407 - DNA, 20 bp, Artificial Sequence
  Description of Artificial Sequence: Synthetic oligonucleotide
  Target: LAMA2; (-) strand; PAM type: NRG; PAM sequence: GAG
gccactgtgtctcacactgt

SEQ ID NO: 97408 - DNA, 20 bp, Artificial Sequence
  Description of Artificial Sequence: Synthetic oligonucleotide
  Target: LAMA2; (-) strand; PAM type: NRG; PAM sequence: AGG
ttgatcaactatttcccttc

SEQ ID NO: 97409 - DNA, 20 bp, Artificial Sequence
  Description of Artificial Sequence: Synthetic oligonucleotide
  Target: LAMA2; (-) strand; PAM type: NRG; PAM sequence: CAG
tttgatcaactatttccctt

SEQ ID NO: 97410 - DNA, 20 bp, Artificial Sequence
  Description of Artificial Sequence: Synthetic oligonucleotide
  Target: LAMA2; (-) strand; PAM type: NRG; PAM sequence: AGG
atagatcagctataataaat

SEQ ID NO: 97411 - DNA, 20 bp, Artificial Sequence
  Description of Artificial Sequence: Synthetic oligonucleotide
  Target: LAMA2; (-) strand; PAM type: NRG; PAM sequence: TAG
aatagatcagctataataaa

SEQ ID NO: 97412 - DNA, 20 bp, Artificial Sequence
  Description of Artificial Sequence: Synthetic oligonucleotide
  Target: LAMA2; (-) strand; PAM type: NRG; PAM sequence: CAG
agtggtccaagaaaatagat

SEQ ID NO: 97413 - DNA, 20 bp, Artificial Sequence
  Description of Artificial Sequence: Synthetic oligonucleotide
  Target: LAMA2; (-) strand; PAM type: NRG; PAM sequence: TAG
tcagaagtggtccaagaaaa

SEQ ID NO: 97414 - DNA, 20 bp, Artificial Sequence
  Description of Artificial Sequence: Synthetic oligonucleotide
  Target: LAMA2; (-) strand; PAM type: NRG; PAM sequence: AAG
taactcttcagaagtggtcc

SEQ ID NO: 97415 - DNA, 20 bp, Artificial Sequence
  Description of Artificial Sequence: Synthetic oligonucleotide
  Target: LAMA2; (-) strand; PAM type: NRG; PAM sequence: TGG
tgtctctaactcttcagaag

SEQ ID NO: 97416 - DNA, 20 bp, Artificial Sequence
  Description of Artificial Sequence: Synthetic oligonucleotide
  Target: LAMA2; (-) strand; PAM type: NRG; PAM sequence: AAG
aaatgtctctaactcttcag

SEQ ID NO: 97417 - DNA, 20 bp, Artificial Sequence
  Description of Artificial Sequence: Synthetic oligonucleotide
  Target: LAMA2; (-) strand; PAM type: NRG; PAM sequence: CAG
tttaaatgtctctaactctt

SEQ ID NO: 97418 - DNA, 20 bp, Artificial Sequence
  Description of Artificial Sequence: Synthetic oligonucleotide
  Target: LAMA2; (-) strand; PAM type: NRG; PAM sequence: CAG
atcctatctcctaatcattg

SEQ ID NO: 97419 - DNA, 20 bp, Artificial Sequence
  Description of Artificial Sequence: Synthetic oligonucleotide
  Target: LAMA2; (-) strand; PAM type: NRG; PAM sequence: CAG
ataaaaatattttcaaaacc

SEQ ID NO: 97420 - DNA, 20 bp, Artificial Sequence
  Description of Artificial Sequence: Synthetic oligonucleotide
  Target: LAMA2; (-) strand; PAM type: NRG; PAM sequence: AAG
cagcctgctatttagtgtac

SEQ ID NO: 97421 - DNA, 20 bp, Artificial Sequence
  Description of Artificial Sequence: Synthetic oligonucleotide
  Target: LAMA2; (-) strand; PAM type: NRG; PAM sequence: TAG
aaagggaacagcctgctatt

SEQ ID NO: 97422 - DNA, 20 bp, Artificial Sequence
  Description of Artificial Sequence: Synthetic oligonucleotide
  Target: LAMA2; (-) strand; PAM type: NRG; PAM sequence: CAG
gaagcttatgttaaagggaa

SEQ ID NO: 97423 - DNA, 20 bp, Artificial Sequence
  Description of Artificial Sequence: Synthetic oligonucleotide
  Target: LAMA2; (-) strand; PAM type: NRG; PAM sequence: GGG
cctgagaagcttatgttaaa

SEQ ID NO: 97424 - DNA, 20 bp, Artificial Sequence
  Description of Artificial Sequence: Synthetic oligonucleotide
  Target: LAMA2; (-) strand; PAM type: NRG; PAM sequence: AGG
ccctgagaagcttatgttaa

SEQ ID NO: 97425 - DNA, 20 bp, Artificial Sequence
  Description of Artificial Sequence: Synthetic oligonucleotide
  Target: LAMA2; (-) strand; PAM type: NRG; PAM sequence: AAG
tccctgagaagcttatgtta

SEQ ID NO: 97426 - DNA, 20 bp, Artificial Sequence
  Description of Artificial Sequence: Synthetic oligonucleotide
  Target: LAMA2; (-) strand; PAM type: NRG; PAM sequence: AAG
caaagatatgtttccctgag

SEQ ID NO: 97427 - DNA, 20 bp, Artificial Sequence
  Description of Artificial Sequence: Synthetic oligonucleotide
  Target: LAMA2; (-) strand; PAM type: NRG; PAM sequence: GAG
gaacaaagatatgtttccct

SEQ ID NO: 97428 - DNA, 20 bp, Artificial Sequence
  Description of Artificial Sequence: Synthetic oligonucleotide
  Target: LAMA2; (-) strand; PAM type: NRG; PAM sequence: AAG
atagcagcactgttggaaca

SEQ ID NO: 97429 - DNA, 20 bp, Artificial Sequence
  Description of Artificial Sequence: Synthetic oligonucleotide
  Target: LAMA2; (-) strand; PAM type: NRG; PAM sequence: TGG
atgactcatagcagcactgt

SEQ ID NO: 97430 - DNA, 20 bp, Artificial Sequence
  Description of Artificial Sequence: Synthetic oligonucleotide
  Target: LAMA2; (-) strand; PAM type: NRG; PAM sequence: CAG
ataactgtaatgactcatag

SEQ ID NO: 97431 - DNA, 20 bp, Artificial Sequence
  Description of Artificial Sequence: Synthetic oligonucleotide
  Target: LAMA2; (-) strand; PAM type: NRG; PAM sequence: TAG
tttataactgtaatgactca

SEQ ID NO: 97432 - DNA, 20 bp, Artificial Sequence
  Description of Artificial Sequence: Synthetic oligonucleotide
  Target: LAMA2; (-) strand; PAM type: NRG; PAM sequence: TAG
taaaatgtaaaaaaaaaaga

SEQ ID NO: 97433 - DNA, 20 bp, Artificial Sequence
  Description of Artificial Sequence: Synthetic oligonucleotide
  Target: LAMA2; (-) strand; PAM type: NRG; PAM sequence: AAG
cttttaaaatgtaaaaaaaa

SEQ ID NO: 97434 - DNA, 20 bp, Artificial Sequence
  Description of Artificial Sequence: Synthetic oligonucleotide
  Target: LAMA2; (-) strand; PAM type: NRG; PAM sequence: CAG
tcagcaagtttattgaaaag

SEQ ID NO: 97435 - DNA, 20 bp, Artificial Sequence
  Description of Artificial Sequence: Synthetic oligonucleotide
  Target: LAMA2; (-) strand; PAM type: NRG; PAM sequence: AAG
atctcagcaagtttattgaa

SEQ ID NO: 97436 - DNA, 20 bp, Artificial Sequence
  Description of Artificial Sequence: Synthetic oligonucleotide
  Target: LAMA2; (-) strand; PAM type: NRG; PAM sequence: AAG
agacaagagaatatctcagc

SEQ ID NO: 97437 - DNA, 20 bp, Artificial Sequence
  Description of Artificial Sequence: Synthetic oligonucleotide
  Target: LAMA2; (-) strand; PAM type: NRG; PAM sequence: CAG
aggcagacaagagaatatct

SEQ ID NO: 97438 - DNA, 20 bp, Artificial Sequence
  Description of Artificial Sequence: Synthetic oligonucleotide
  Target: LAMA2; (-) strand; PAM type: NRG; PAM sequence: GAG
acaatcttgaaggcagacaa

SEQ ID NO: 97439 - DNA, 20 bp, Artificial Sequence
  Description of Artificial Sequence: Synthetic oligonucleotide
  Target: LAMA2; (-) strand; PAM type: NRG; PAM sequence: AAG
tgacaatcttgaaggcagac

SEQ ID NO: 97440 - DNA, 20 bp, Artificial Sequence
  Description of Artificial Sequence: Synthetic oligonucleotide
  Target: LAMA2; (-) strand; PAM type: NRG; PAM sequence: CAG
aaatttgacaatcttgaagg

SEQ ID NO: 97441 - DNA, 20 bp, Artificial Sequence
  Description of Artificial Sequence: Synthetic oligonucleotide
  Target: LAMA2; (-) strand; PAM type: NRG; PAM sequence: AGG
aagaaatttgacaatcttga

SEQ ID NO: 97442 - DNA, 20 bp, Artificial Sequence
  Description of Artificial Sequence: Synthetic oligonucleotide
  Target: LAMA2; (-) strand; PAM type: NRG; PAM sequence: AAG
taagaaatttgacaatcttg

SEQ ID NO: 97443 - DNA, 20 bp, Artificial Sequence
  Description of Artificial Sequence: Synthetic oligonucleotide
  Target: LAMA2; (-) strand; PAM type: NRG; PAM sequence: AAG
aattatagaaattagatcct

SEQ ID NO: 97444 - DNA, 20 bp, Artificial Sequence
  Description of Artificial Sequence: Synthetic oligonucleotide
  Target: LAMA2; (-) strand; PAM type: NRG; PAM sequence: TAG
tatttcacaattatagaaat

SEQ ID NO: 97445 - DNA, 20 bp, Artificial Sequence
  Description of Artificial Sequence: Synthetic oligonucleotide
  Target: LAMA2; (-) strand; PAM type: NRG; PAM sequence: TAG
ctattaatatttcacaatta

SEQ ID NO: 97446 - DNA, 20 bp, Artificial Sequence
  Description of Artificial Sequence: Synthetic oligonucleotide
  Target: LAMA2; (-) strand; PAM type: NRG; PAM sequence: AAG
ctattcattccacctccctt

SEQ ID NO: 97447 - DNA, 20 bp, Artificial Sequence
  Description of Artificial Sequence: Synthetic oligonucleotide
  Target: LAMA2; (-) strand; PAM type: NRG; PAM sequence: CAG
gtcgagattcaaacccaggc

SEQ ID NO: 97448 - DNA, 20 bp, Artificial Sequence
  Description of Artificial Sequence: Synthetic oligonucleotide
  Target: LAMA2; (-) strand; PAM type: NRG; PAM sequence: AGG
tgaagtcgagattcaaaccc

SEQ ID NO: 97449 - DNA, 20 bp, Artificial Sequence
  Description of Artificial Sequence: Synthetic oligonucleotide
  Target: LAMA2; (-) strand; PAM type: NRG; PAM sequence: CAG
gtgaagtcgagattcaaacc

SEQ ID NO: 97450 - DNA, 20 bp, Artificial Sequence
  Description of Artificial Sequence: Synthetic oligonucleotide
  Target: LAMA2; (-) strand; PAM type: NRG; PAM sequence: GAG
gcttactgtatggtgaagtc

SEQ ID NO: 97451 - DNA, 20 bp, Artificial Sequence
  Description of Artificial Sequence: Synthetic oligonucleotide
  Target: LAMA2; (-) strand; PAM type: NRG; PAM sequence: AAG
ctcaggcttactgtatggtg

SEQ ID NO: 97452 - DNA, 20 bp, Artificial Sequence
  Description of Artificial Sequence: Synthetic oligonucleotide
  Target: LAMA2; (-) strand; PAM type: NRG; PAM sequence: TGG
agggtctcaggcttactgta

SEQ ID NO: 97453 - DNA, 20 bp, Artificial Sequence
  Description of Artificial Sequence: Synthetic oligonucleotide
  Target: LAMA2; (-) strand; PAM type: NRG; PAM sequence: AGG
agcacccagtgcagggtctc

SEQ ID NO: 97454 - DNA, 20 bp, Artificial Sequence
  Description of Artificial Sequence: Synthetic oligonucleotide
  Target: LAMA2; (-) strand; PAM type: NRG; PAM sequence: CAG
tagcacccagtgcagggtct

SEQ ID NO: 97455 - DNA, 20 bp, Artificial Sequence
  Description of Artificial Sequence: Synthetic oligonucleotide
  Target: LAMA2; (-) strand; PAM type: NRG; PAM sequence: GGG
gaggtgtagcacccagtgca

SEQ ID NO: 97456 - DNA, 20 bp, Artificial Sequence
  Description of Artificial Sequence: Synthetic oligonucleotide
  Target: LAMA2; (-) strand; PAM type: NRG; PAM sequence: AGG
agaggtgtagcacccagtgc

SEQ ID NO: 97457 - DNA, 20 bp, Artificial Sequence
  Description of Artificial Sequence: Synthetic oligonucleotide
  Target: LAMA2; (-) strand; PAM type: NRG; PAM sequence: CAG
aagaggtgtagcacccagtg

SEQ ID NO: 97458 - DNA, 20 bp, Artificial Sequence
  Description of Artificial Sequence: Synthetic oligonucleotide
  Target: LAMA2; (-) strand; PAM type: NRG; PAM sequence: CAG
gcctaaagaggtgtagcacc

SEQ ID NO: 97459 - DNA, 20 bp, Artificial Sequence
  Description of Artificial Sequence: Synthetic oligonucleotide
  Target: LAMA2; (-) strand; PAM type: NRG; PAM sequence: TAG
tgctaaagcctaaagaggtg

SEQ ID NO: 97460 - DNA, 20 bp, Artificial Sequence
  Description of Artificial Sequence: Synthetic oligonucleotide
  Target: LAMA2; (-) strand; PAM type: NRG; PAM sequence: AGG
ttacctgctaaagcctaaag

SEQ ID NO: 97461 - DNA, 20 bp, Artificial Sequence
  Description of Artificial Sequence: Synthetic oligonucleotide
  Target: LAMA2; (-) strand; PAM type: NRG; PAM sequence: GAG
tttacctgctaaagcctaaa

SEQ ID NO: 97462 - DNA, 20 bp, Artificial Sequence
  Description of Artificial Sequence: Synthetic oligonucleotide
  Target: LAMA2; (-) strand; PAM type: NRG; PAM sequence: AAG
tgtttacctgctaaagccta

SEQ ID NO: 97463 - DNA, 20 bp, Artificial Sequence
  Description of Artificial Sequence: Synthetic oligonucleotide
  Target: LAMA2; (-) strand; PAM type: NRG; PAM sequence: AAG
gacttggtgtttacctgcta

SEQ ID NO: 97464 - DNA, 20 bp, Artificial Sequence
  Description of Artificial Sequence: Synthetic oligonucleotide
  Target: LAMA2; (-) strand; PAM type: NRG; PAM sequence: TGG
gtggtagttactcagggact

SEQ ID NO: 97465 - DNA, 20 bp, Artificial Sequence
  Description of Artificial Sequence: Synthetic oligonucleotide
  Target: LAMA2; (-) strand; PAM type: NRG; PAM sequence: GGG
agtgtagtggtagttactca

SEQ ID NO: 97466 - DNA, 20 bp, Artificial Sequence
  Description of Artificial Sequence: Synthetic oligonucleotide
  Target: LAMA2; (-) strand; PAM type: NRG; PAM sequence: AGG
aagtgtagtggtagttactc

SEQ ID NO: 97467 - DNA, 20 bp, Artificial Sequence
  Description of Artificial Sequence: Synthetic oligonucleotide
  Target: LAMA2; (-) strand; PAM type: NRG; PAM sequence: CAG
aaagtgtagtggtagttact

SEQ ID NO: 97468 - DNA, 20 bp, Artificial Sequence
  Description of Artificial Sequence: Synthetic oligonucleotide
  Target: LAMA2; (-) strand; PAM type: NRG; PAM sequence: TAG
gagaggtgaaagtgtagtgg

SEQ ID NO: 97469 - DNA, 20 bp, Artificial Sequence
  Description of Artificial Sequence: Synthetic oligonucleotide
  Target: LAMA2; (-) strand; PAM type: NRG; PAM sequence: TGG
cgggagaggtgaaagtgtag

SEQ ID NO: 97470 - DNA, 20 bp, Artificial Sequence
  Description of Artificial Sequence: Synthetic oligonucleotide
  Target: LAMA2; (-) strand; PAM type: NRG; PAM sequence: TAG
ctgcgggagaggtgaaagtg

SEQ ID NO: 97471 - DNA, 20 bp, Artificial Sequence
  Description of Artificial Sequence: Synthetic oligonucleotide
  Target: LAMA2; (-) strand; PAM type: NRG; PAM sequence: AAG
ggggtctgcgggagaggtga

SEQ ID NO: 97472 - DNA, 20 bp, Artificial Sequence
  Description of Artificial Sequence: Synthetic oligonucleotide
  Target: LAMA2; (-) strand; PAM type: NRG; PAM sequence: AGG
gactgtggggtctgcgggag

SEQ ID NO: 97473 - DNA, 20 bp, Artificial Sequence
  Description of Artificial Sequence: Synthetic oligonucleotide
  Target: LAMA2; (-) strand; PAM type: NRG; PAM sequence: GAG
agactgtggggtctgcggga

SEQ ID NO: 97474 - DNA, 20 bp, Artificial Sequence
  Description of Artificial Sequence: Synthetic oligonucleotide
  Target: LAMA2; (-) strand; PAM type: NRG; PAM sequence: GAG
tcagactgtggggtctgcgg

SEQ ID NO: 97475 - DNA, 20 bp, Artificial Sequence
  Description of Artificial Sequence: Synthetic oligonucleotide
  Target: LAMA2; (-) strand; PAM type: NRG; PAM sequence: GGG
cttcagactgtggggtctgc

SEQ ID NO: 97476 - DNA, 20 bp, Artificial Sequence
  Description of Artificial Sequence: Synthetic oligonucleotide
  Target: LAMA2; (-) strand; PAM type: NRG; PAM sequence: CGG
gcttcagactgtggggtctg

SEQ ID NO: 97477 - DNA, 20 bp, Artificial Sequence
  Description of Artificial Sequence: Synthetic oligonucleotide
  Target: LAMA2; (-) strand; PAM type: NRG; PAM sequence: GGG
atgccaggcttcagactgtg

SEQ ID NO: 97478 - DNA, 20 bp, Artificial Sequence
  Description of Artificial Sequence: Synthetic oligonucleotide
  Target: LAMA2; (-) strand; PAM type: NRG; PAM sequence: GGG
catgccaggcttcagactgt

SEQ ID NO: 97479 - DNA, 20 bp, Artificial Sequence
  Description of Artificial Sequence: Synthetic oligonucleotide
  Target: LAMA2; (-) strand; PAM type: NRG; PAM sequence: TGG
gcatgccaggcttcagactg

SEQ ID NO: 97480 - DNA, 20 bp, Artificial Sequence
  Description of Artificial Sequence: Synthetic oligonucleotide
  Target: LAMA2; (-) strand; PAM type: NRG; PAM sequence: CAG
gccccatgcatgccaggctt

SEQ ID NO: 97481 - DNA, 20 bp, Artificial Sequence
  Description of Artificial Sequence: Synthetic oligonucleotide
  Target: LAMA2; (-) strand; PAM type: NRG; PAM sequence: AGG
ctggaggccccatgcatgcc

SEQ ID NO: 97482 - DNA, 20 bp, Artificial Sequence
  Description of Artificial Sequence: Synthetic oligonucleotide
  Target: LAMA2; (-) strand; PAM type: NRG; PAM sequence: CAG
cctggaggccccatgcatgc

SEQ ID NO: 97483 - DNA, 20 bp, Artificial Sequence
  Description of Artificial Sequence: Synthetic oligonucleotide
  Target: LAMA2; (-) strand; PAM type: NRG; PAM sequence: AGG
tagggctggagcagtcctgg

SEQ ID NO: 97484 - DNA, 20 bp, Artificial Sequence
  Description of Artificial Sequence: Synthetic oligonucleotide
  Target: LAMA2; (-) strand; PAM type: NRG; PAM sequence: GAG
gtagggctggagcagtcctg

SEQ ID NO: 97485 - DNA, 20 bp, Artificial Sequence
  Description of Artificial Sequence: Synthetic oligonucleotide
  Target: LAMA2; (-) strand; PAM type: NRG; PAM sequence: TGG
ctgtagggctggagcagtcc

SEQ ID NO: 97486 - DNA, 20 bp, Artificial Sequence
  Description of Artificial Sequence: Synthetic oligonucleotide
  Target: LAMA2; (-) strand; PAM type: NRG; PAM sequence: CAG
tcccagctgtagggctggag

SEQ ID NO: 97487 - DNA, 20 bp, Artificial Sequence
  Description of Artificial Sequence: Synthetic oligonucleotide
  Target: LAMA2; (-) strand; PAM type: NRG; PAM sequence: GAG
gaatcccagctgtagggctg

SEQ ID NO: 97488 - DNA, 20 bp, Artificial Sequence
  Description of Artificial Sequence: Synthetic oligonucleotide
  Target: LAMA2; (-) strand; PAM type: NRG; PAM sequence: TGG
aagaatcccagctgtagggc

SEQ ID NO: 97489 - DNA, 20 bp, Artificial Sequence
  Description of Artificial Sequence: Synthetic oligonucleotide
  Target: LAMA2; (-) strand; PAM type: NRG; PAM sequence: GGG
gagaaagaatcccagctgta

SEQ ID NO: 97490 - DNA, 20 bp, Artificial Sequence
  Description of Artificial Sequence: Synthetic oligonucleotide
  Target: LAMA2; (-) strand; PAM type: NRG; PAM sequence: AGG
tgagaaagaatcccagctgt

SEQ ID NO: 97491 - DNA, 20 bp, Artificial Sequence
  Description of Artificial Sequence: Synthetic oligonucleotide
  Target: LAMA2; (-) strand; PAM type: NRG; PAM sequence: TAG
atgagaaagaatcccagctg

SEQ ID NO: 97492 - DNA, 20 bp, Artificial Sequence
  Description of Artificial Sequence: Synthetic oligonucleotide
  Target: LAMA2; (-) strand; PAM type: NRG; PAM sequence: CAG
tgactaatgagaaagaatcc

SEQ ID NO: 97493 - DNA, 20 bp, Artificial Sequence
  Description of Artificial Sequence: Synthetic oligonucleotide
  Target: LAMA2; (-) strand; PAM type: NRG; PAM sequence: AAG
agccagcctgactaatgaga

SEQ ID NO: 97494 - DNA, 20 bp, Artificial Sequence
  Description of Artificial Sequence: Synthetic oligonucleotide
  Target: LAMA2; (-) strand; PAM type: NRG; PAM sequence: GAG
caccagccagcctgactaat

SEQ ID NO: 97495 - DNA, 20 bp, Artificial Sequence
  Description of Artificial Sequence: Synthetic oligonucleotide
  Target: LAMA2; (-) strand; PAM type: NRG; PAM sequence: CAG
ggtatgctgtgagcaccagc

SEQ ID NO: 97496 - DNA, 20 bp, Artificial Sequence
  Description of Artificial Sequence: Synthetic oligonucleotide
  Target: LAMA2; (-) strand; PAM type: NRG; PAM sequence: CAG
aactggtatgctgtgagcac

SEQ ID NO: 97497 - DNA, 20 bp, Artificial Sequence
  Description of Artificial Sequence: Synthetic oligonucleotide
  Target: LAMA2; (-) strand; PAM type: NRG; PAM sequence: GAG
atatctaactggtatgctgt

SEQ ID NO: 97498 - DNA, 20 bp, Artificial Sequence
  Description of Artificial Sequence: Synthetic oligonucleotide
  Target: LAMA2; (-) strand; PAM type: NRG; PAM sequence: TGG
gagatttaataatatctaac

SEQ ID NO: 97499 - DNA, 20 bp, Artificial Sequence
  Description of Artificial Sequence: Synthetic oligonucleotide
  Target: LAMA2; (-) strand; PAM type: NRG; PAM sequence: GAG
gactcaggctgtaggtgagg

SEQ ID NO: 97500 - DNA, 20 bp, Artificial Sequence
  Description of Artificial Sequence: Synthetic oligonucleotide
  Target: LAMA2; (-) strand; PAM type: NRG; PAM sequence: GGG
aagactcaggctgtaggtga

SEQ ID NO: 97501 - DNA, 20 bp, Artificial Sequence
  Description of Artificial Sequence: Synthetic oligonucleotide
  Target: LAMA2; (-) strand; PAM type: NRG; PAM sequence: AGG
taagactcaggctgtaggtg

SEQ ID NO: 97502 - DNA, 20 bp, Artificial Sequence
  Description of Artificial Sequence: Synthetic oligonucleotide
  Target: LAMA2; (-) strand; PAM type: NRG; PAM sequence: GAG
ataagactcaggctgtaggt

SEQ ID NO: 97503 - DNA, 20 bp, Artificial Sequence
  Description of Artificial Sequence: Synthetic oligonucleotide
  Target: LAMA2; (-) strand; PAM type: NRG; PAM sequence: AGG
cttcataagactcaggctgt

SEQ ID NO: 97504 - DNA, 20 bp, Artificial Sequence
  Description of Artificial Sequence: Synthetic oligonucleotide
  Target: LAMA2; (-) strand; PAM type: NRG; PAM sequence: TAG
tcttcataagactcaggctg

SEQ ID NO: 97505 - DNA, 20 bp, Artificial Sequence
  Description of Artificial Sequence: Synthetic oligonucleotide
  Target: LAMA2; (-) strand; PAM type: NRG; PAM sequence: AGG
atttagtcttcataagactc

SEQ ID NO: 97506 - DNA, 20 bp, Artificial Sequence
  Description of Artificial Sequence: Synthetic oligonucleotide
  Target: LAMA2; (-) strand; PAM type: NRG; PAM sequence: CAG
catttagtcttcataagact

SEQ ID NO: 97507 - DNA, 20 bp, Artificial Sequence
  Description of Artificial Sequence: Synthetic oligonucleotide
  Target: LAMA2; (-) strand; PAM type: NRG; PAM sequence: AAG
acagctcatttagtcttcat

SEQ ID NO: 97508 - DNA, 20 bp, Artificial Sequence
  Description of Artificial Sequence: Synthetic oligonucleotide
  Target: LAMA2; (-) strand; PAM type: NRG; PAM sequence: TAG
cttaacattaacagctcatt

SEQ ID NO: 97509 - DNA, 20 bp, Artificial Sequence
  Description of Artificial Sequence: Synthetic oligonucleotide
  Target: LAMA2; (-) strand; PAM type: NRG; PAM sequence: CAG
tgatgaatccttaacattaa

SEQ ID NO: 97510 - DNA, 20 bp, Artificial Sequence
  Description of Artificial Sequence: Synthetic oligonucleotide
  Target: LAMA2; (-) strand; PAM type: NRG; PAM sequence: AGG
acttacatcatctacacacc

SEQ ID NO: 97511 - DNA, 20 bp, Artificial Sequence
  Description of Artificial Sequence: Synthetic oligonucleotide
  Target: LAMA2; (-) strand; PAM type: NRG; PAM sequence: CAG
aacttacatcatctacacac

SEQ ID NO: 97512 - DNA, 20 bp, Artificial Sequence
  Description of Artificial Sequence: Synthetic oligonucleotide
  Target: LAMA2; (-) strand; PAM type: NRG; PAM sequence: TAG
tcaatacatgggtatataac

SEQ ID NO: 97513 - DNA, 20 bp, Artificial Sequence
  Description of Artificial Sequence: Synthetic oligonucleotide
  Target: LAMA2; (-) strand; PAM type: NRG; PAM sequence: GGG
ttataactgaatcaatacat

SEQ ID NO: 97514 - DNA, 20 bp, Artificial Sequence
  Description of Artificial Sequence: Synthetic oligonucleotide
  Target: LAMA2; (-) strand; PAM type: NRG; PAM sequence: TGG
tttataactgaatcaataca

SEQ ID NO: 97515 - DNA, 20 bp, Artificial Sequence
  Description of Artificial Sequence: Synthetic oligonucleotide
  Target: LAMA2; (-) strand; PAM type: NRG; PAM sequence: AAG
tcaaatcctatttacaaaat

SEQ ID NO: 97516 - DNA, 20 bp, Artificial Sequence
  Description of Artificial Sequence: Synthetic oligonucleotide
  Target: LAMA2; (-) strand; PAM type: NRG; PAM sequence: TGG
gcacttcagttttgacctag

SEQ ID NO: 97517 - DNA, 20 bp, Artificial Sequence
  Description of Artificial Sequence: Synthetic oligonucleotide
  Target: LAMA2; (-) strand; PAM type: NRG; PAM sequence: TAG
gttgcacttcagttttgacc

SEQ ID NO: 97518 - DNA, 20 bp, Artificial Sequence
  Description of Artificial Sequence: Synthetic oligonucleotide
  Target: LAMA2; (-) strand; PAM type: NRG; PAM sequence: CAG
attatttttaagttgcactt

SEQ ID NO: 97519 - DNA, 20 bp, Artificial Sequence
  Description of Artificial Sequence: Synthetic oligonucleotide
  Target: LAMA2; (-) strand; PAM type: NRG; PAM sequence: AAG
aatgtatactcattattttt

SEQ ID NO: 97520 - DNA, 20 bp, Artificial Sequence
  Description of Artificial Sequence: Synthetic oligonucleotide
  Target: LAMA2; (-) strand; PAM type: NRG; PAM sequence: AAG
catgatgccatgtccctctc

SEQ ID NO: 97521 - DNA, 20 bp, Artificial Sequence
  Description of Artificial Sequence: Synthetic oligonucleotide
  Target: LAMA2; (-) strand; PAM type: NRG; PAM sequence: AGG
tccaagtagtgcagctaggt

SEQ ID NO: 97522 - DNA, 20 bp, Artificial Sequence
  Description of Artificial Sequence: Synthetic oligonucleotide
  Target: LAMA2; (-) strand; PAM type: NRG; PAM sequence: TAG
gtccaagtagtgcagctagg

SEQ ID NO: 97523 - DNA, 20 bp, Artificial Sequence
  Description of Artificial Sequence: Synthetic oligonucleotide
  Target: LAMA2; (-) strand; PAM type: NRG; PAM sequence: AGG
cctgtccaagtagtgcagct

SEQ ID NO: 97524 - DNA, 20 bp, Artificial Sequence
  Description of Artificial Sequence: Synthetic oligonucleotide
  Target: LAMA2; (-) strand; PAM type: NRG; PAM sequence: TAG
acctgtccaagtagtgcagc

SEQ ID NO: 97525 - DNA, 20 bp, Artificial Sequence
  Description of Artificial Sequence: Synthetic oligonucleotide
  Target: LAMA2; (-) strand; PAM type: NRG; PAM sequence: CAG
agtaacctgtccaagtagtg

SEQ ID NO: 97526 - DNA, 20 bp, Artificial Sequence
  Description of Artificial Sequence: Synthetic oligonucleotide
  Target: LAMA2; (-) strand; PAM type: NRG; PAM sequence: TAG
gagcaagtaacctgtccaag

SEQ ID NO: 97527 - DNA, 20 bp, Artificial Sequence
  Description of Artificial Sequence: Synthetic oligonucleotide
  Target: LAMA2; (-) strand; PAM type: NRG; PAM sequence: AAG
acagagcaagtaacctgtcc

SEQ ID NO: 97528 - DNA, 20 bp, Artificial Sequence
  Description of Artificial Sequence: Synthetic oligonucleotide
  Target: LAMA2; (-) strand; PAM type: NRG; PAM sequence: AAG
agatttagcaaaaacagagc

SEQ ID NO: 97529 - DNA, 20 bp, Artificial Sequence
  Description of Artificial Sequence: Synthetic oligonucleotide
  Target: LAMA2; (-) strand; PAM type: NRG; PAM sequence: GAG
cccaagatttagcaaaaaca

SEQ ID NO: 97530 - DNA, 20 bp, Artificial Sequence
  Description of Artificial Sequence: Synthetic oligonucleotide
  Target: LAMA2; (-) strand; PAM type: NRG; PAM sequence: CAG
aacccaagatttagcaaaaa

SEQ ID NO: 97531 - DNA, 20 bp, Artificial Sequence
  Description of Artificial Sequence: Synthetic oligonucleotide
  Target: LAMA2; (-) strand; PAM type: NRG; PAM sequence: TAG
ataggtaaaaacccaagatt

SEQ ID NO: 97532 - DNA, 20 bp, Artificial Sequence
  Description of Artificial Sequence: Synthetic oligonucleotide
  Target: LAMA2; (-) strand; PAM type: NRG; PAM sequence: AAG
ggatgtataggtaaaaaccc

SEQ ID NO: 97533 - DNA, 20 bp, Artificial Sequence
  Description of Artificial Sequence: Synthetic oligonucleotide
  Target: LAMA2; (-) strand; PAM type: NRG; PAM sequence: AGG
aatcaatccttaggatgtat

SEQ ID NO: 97534 - DNA, 20 bp, Artificial Sequence
  Description of Artificial Sequence: Synthetic oligonucleotide
  Target: LAMA2; (-) strand; PAM type: NRG; PAM sequence: TAG
aaatcaatccttaggatgta

SEQ ID NO: 97535 - DNA, 20 bp, Artificial Sequence
  Description of Artificial Sequence: Synthetic oligonucleotide
  Target: LAMA2; (-) strand; PAM type: NRG; PAM sequence: AGG
ttccatttaaatcaatcctt

SEQ ID NO: 97536 - DNA, 20 bp, Artificial Sequence
  Description of Artificial Sequence: Synthetic oligonucleotide
  Target: LAMA2; (-) strand; PAM type: NRG; PAM sequence: TAG
tttccatttaaatcaatcct

SEQ ID NO: 97537 - DNA, 20 bp, Artificial Sequence
  Description of Artificial Sequence: Synthetic oligonucleotide
  Target: LAMA2; (-) strand; PAM type: NRG; PAM sequence: GGG
atggcatgtcagtttgtaaa

SEQ ID NO: 97538 - DNA, 20 bp, Artificial Sequence
  Description of Artificial Sequence: Synthetic oligonucleotide
  Target: LAMA2; (-) strand; PAM type: NRG; PAM sequence: AGG
aatggcatgtcagtttgtaa

SEQ ID NO: 97539 - DNA, 20 bp, Artificial Sequence
  Description of Artificial Sequence: Synthetic oligonucleotide
  Target: LAMA2; (-) strand; PAM type: NRG; PAM sequence: AAG
gaatggcatgtcagtttgta

SEQ ID NO: 97540 - DNA, 20 bp, Artificial Sequence
  Description of Artificial Sequence: Synthetic oligonucleotide
  Target: LAMA2; (-) strand; PAM type: NRG; PAM sequence: CAG
aactaagctgaatggcatgt

SEQ ID NO: 97541 - DNA, 20 bp, Artificial Sequence
  Description of Artificial Sequence: Synthetic oligonucleotide
  Target: LAMA2; (-) strand; PAM type: NRG; PAM sequence: TGG
gtgatggtaactaagctgaa

SEQ ID NO: 97542 - DNA, 20 bp, Artificial Sequence
  Description of Artificial Sequence: Synthetic oligonucleotide
  Target: LAMA2; (-) strand; PAM type: NRG; PAM sequence: AAG
gaatccatgtgatggtaact

SEQ ID NO: 97543 - DNA, 20 bp, Artificial Sequence
  Description of Artificial Sequence: Synthetic oligonucleotide
  Target: LAMA2; (-) strand; PAM type: NRG; PAM sequence: TGG
actatatggaatccatgtga

SEQ ID NO: 97544 - DNA, 20 bp, Artificial Sequence
  Description of Artificial Sequence: Synthetic oligonucleotide
  Target: LAMA2; (-) strand; PAM type: NRG; PAM sequence: TGG
aactttttccttgaactata

SEQ ID NO: 97545 - DNA, 20 bp, Artificial Sequence
  Description of Artificial Sequence: Synthetic oligonucleotide
  Target: LAMA2; (-) strand; PAM type: NRG; PAM sequence: CAG
catgtgtcacaaaacagttg

SEQ ID NO: 97546 - DNA, 20 bp, Artificial Sequence
  Description of Artificial Sequence: Synthetic oligonucleotide
  Target: LAMA2; (-) strand; PAM type: NRG; PAM sequence: CAG
tttaagcatgtgtcacaaaa

SEQ ID NO: 97547 - DNA, 20 bp, Artificial Sequence
  Description of Artificial Sequence: Synthetic oligonucleotide
  Target: LAMA2; (-) strand; PAM type: NRG; PAM sequence: AAG
aaagagtagaaaatcatttt

SEQ ID NO: 97548 - DNA, 20 bp, Artificial Sequence
  Description of Artificial Sequence: Synthetic oligonucleotide
  Target: LAMA2; (-) strand; PAM type: NRG; PAM sequence: TAG
agagaagtcacaggaaagag

SEQ ID NO: 97549 - DNA, 20 bp, Artificial Sequence
  Description of Artificial Sequence: Synthetic oligonucleotide
  Target: LAMA2; (-) strand; PAM type: NRG; PAM sequence: GAG
ttcagagaagtcacaggaaa

SEQ ID NO: 97550 - DNA, 20 bp, Artificial Sequence
  Description of Artificial Sequence: Synthetic oligonucleotide
  Target: LAMA2; (-) strand; PAM type: NRG; PAM sequence: AAG
ccttcagagaagtcacagga

SEQ ID NO: 97551 - DNA, 20 bp, Artificial Sequence
  Description of Artificial Sequence: Synthetic oligonucleotide
  Target: LAMA2; (-) strand; PAM type: NRG; PAM sequence: AGG
ttgcccttcagagaagtcac

SEQ ID NO: 97552 - DNA, 20 bp, Artificial Sequence
  Description of Artificial Sequence: Synthetic oligonucleotide
  Target: LAMA2; (-) strand; PAM type: NRG; PAM sequence: CAG
attgcccttcagagaagtca

SEQ ID NO: 97553 - DNA, 20 bp, Artificial Sequence
  Description of Artificial Sequence: Synthetic oligonucleotide
  Target: LAMA2; (-) strand; PAM type: NRG; PAM sequence: AAG
ataaatattgcccttcagag

SEQ ID NO: 97554 - DNA, 20 bp, Artificial Sequence
  Description of Artificial Sequence: Synthetic oligonucleotide
  Target: LAMA2; (-) strand; PAM type: NRG; PAM sequence: GAG
taaataaatattgcccttca

SEQ ID NO: 97555 - DNA, 20 bp, Artificial Sequence
  Description of Artificial Sequence: Synthetic oligonucleotide
  Target: LAMA2; (-) strand; PAM type: NRG; PAM sequence: CAG
tgtaaataaatattgccctt

SEQ ID NO: 97556 - DNA, 20 bp, Artificial Sequence
  Description of Artificial Sequence: Synthetic oligonucleotide
  Target: LAMA2; (-) strand; PAM type: NRG; PAM sequence: TGG
gattatttattagctcaaaa

SEQ ID NO: 97557 - DNA, 20 bp, Artificial Sequence
  Description of Artificial Sequence: Synthetic oligonucleotide
  Target: LAMA2; (-) strand; PAM type: NRG; PAM sequence: TAG
tggattacttgattatttat

SEQ ID NO: 97558 - DNA, 20 bp, Artificial Sequence
  Description of Artificial Sequence: Synthetic oligonucleotide
  Target: LAMA2; (-) strand; PAM type: NRG; PAM sequence: TGG
aatacaatttaataaggaga

SEQ ID NO: 97559 - DNA, 20 bp, Artificial Sequence
  Description of Artificial Sequence: Synthetic oligonucleotide
  Target: LAMA2; (-) strand; PAM type: NRG; PAM sequence: GAG
aggaaatacaatttaataag

SEQ ID NO: 97560 - DNA, 20 bp, Artificial Sequence
  Description of Artificial Sequence: Synthetic oligonucleotide
  Target: LAMA2; (-) strand; PAM type: NRG; PAM sequence: AGG
gtaggaaatacaatttaata

SEQ ID NO: 97561 - DNA, 20 bp, Artificial Sequence
  Description of Artificial Sequence: Synthetic oligonucleotide
  Target: LAMA2; (-) strand; PAM type: NRG; PAM sequence: AAG
tgtaggaaatacaatttaat

SEQ ID NO: 97562 - DNA, 20 bp, Artificial Sequence
  Description of Artificial Sequence: Synthetic oligonucleotide
  Target: LAMA2; (-) strand; PAM type: NRG; PAM sequence: AGG
gtgtgtgtataaatagatgt

SEQ ID NO: 97563 - DNA, 20 bp, Artificial Sequence
  Description of Artificial Sequence: Synthetic oligonucleotide
  Target: LAMA2; (-) strand; PAM type: NRG; PAM sequence: TAG
agtgtgtgtataaatagatg

SEQ ID NO: 97564 - DNA, 20 bp, Artificial Sequence
  Description of Artificial Sequence: Synthetic oligonucleotide
  Target: LAMA2; (-) strand; PAM type: NRG; PAM sequence: TAG
tttactagtgtgtgtataaa

SEQ ID NO: 97565 - DNA, 20 bp, Artificial Sequence
  Description of Artificial Sequence: Synthetic oligonucleotide
  Target: LAMA2; (-) strand; PAM type: NRG; PAM sequence: TAG
gcttaccagtataagtttac

SEQ ID NO: 97566 - DNA, 20 bp, Artificial Sequence
  Description of Artificial Sequence: Synthetic oligonucleotide
  Target: LAMA2; (-) strand; PAM type: NRG; PAM sequence: AAG
taagcagtgcttaccagtat

SEQ ID NO: 97567 - DNA, 20 bp, Artificial Sequence
  Description of Artificial Sequence: Synthetic oligonucleotide
  Target: LAMA2; (-) strand; PAM type: NRG; PAM sequence: CAG
actgtataagcagtgcttac

SEQ ID NO: 97568 - DNA, 20 bp, Artificial Sequence
  Description of Artificial Sequence: Synthetic oligonucleotide
  Target: LAMA2; (-) strand; PAM type: NRG; PAM sequence: CAG
agcagtgcttactgtataag

SEQ ID NO: 97569 - DNA, 20 bp, Artificial Sequence
  Description of Artificial Sequence: Synthetic oligonucleotide
  Target: LAMA2; (-) strand; PAM type: NRG; PAM sequence: AAG
aagagcagtgcttactgtat

SEQ ID NO: 97570 - DNA, 20 bp, Artificial Sequence
  Description of Artificial Sequence: Synthetic oligonucleotide
  Target: LAMA2; (-) strand; PAM type: NRG; PAM sequence: CAG
catatgtatattggaaagag

SEQ ID NO: 97571 - DNA, 20 bp, Artificial Sequence
  Description of Artificial Sequence: Synthetic oligonucleotide
  Target: LAMA2; (-) strand; PAM type: NRG; PAM sequence: GAG
gtacatatgtatattggaaa

SEQ ID NO: 97572 - DNA, 20 bp, Artificial Sequence
  Description of Artificial Sequence: Synthetic oligonucleotide
  Target: LAMA2; (-) strand; PAM type: NRG; PAM sequence: AAG
gtgtacatatgtatattgga

SEQ ID NO: 97573 - DNA, 20 bp, Artificial Sequence
  Description of Artificial Sequence: Synthetic oligonucleotide
  Target: LAMA2; (-) strand; PAM type: NRG; PAM sequence: TGG
ctatgtgtacatatgtatat

SEQ ID NO: 97574 - DNA, 20 bp, Artificial Sequence
  Description of Artificial Sequence: Synthetic oligonucleotide
  Target: LAMA2; (-) strand; PAM type: NRG; PAM sequence: CAG
tcatatgtgccacacagtct

SEQ ID NO: 97575 - DNA, 20 bp, Artificial Sequence
  Description of Artificial Sequence: Synthetic oligonucleotide
  Target: LAMA2; (-) strand; PAM type: NRG; PAM sequence: CAG
ctcatttcatatgtgccaca

SEQ ID NO: 97576 - DNA, 20 bp, Artificial Sequence
  Description of Artificial Sequence: Synthetic oligonucleotide
  Target: LAMA2; (-) strand; PAM type: NRG; PAM sequence: AGG
atcttcaatgctcactggaa

SEQ ID NO: 97577 - DNA, 20 bp, Artificial Sequence
  Description of Artificial Sequence: Synthetic oligonucleotide
  Target: LAMA2; (-) strand; PAM type: NRG; PAM sequence: AAG
aatcttcaatgctcactgga

SEQ ID NO: 97578 - DNA, 20 bp, Artificial Sequence
  Description of Artificial Sequence: Synthetic oligonucleotide
  Target: LAMA2; (-) strand; PAM type: NRG; PAM sequence: TGG
ttaaaatcttcaatgctcac

SEQ ID NO: 97579 - DNA, 20 bp, Artificial Sequence
  Description of Artificial Sequence: Synthetic oligonucleotide
  Target: LAMA2; (-) strand; PAM type: NRG; PAM sequence: TAG
aggaaattccatctcttgtc

SEQ ID NO: 97580 - DNA, 20 bp, Artificial Sequence
  Description of Artificial Sequence: Synthetic oligonucleotide
  Target: LAMA2; (-) strand; PAM type: NRG; PAM sequence: AGG
ccaaacgctacctgggataa

SEQ ID NO: 97581 - DNA, 20 bp, Artificial Sequence
  Description of Artificial Sequence: Synthetic oligonucleotide
  Target: LAMA2; (-) strand; PAM type: NRG; PAM sequence: AAG
accaaacgctacctgggata

SEQ ID NO: 97582 - DNA, 20 bp, Artificial Sequence
  Description of Artificial Sequence: Synthetic oligonucleotide
  Target: LAMA2; (-) strand; PAM type: NRG; PAM sequence: GGG
agtaaaaccaaacgctacct

SEQ ID NO: 97583 - DNA, 20 bp, Artificial Sequence
  Description of Artificial Sequence: Synthetic oligonucleotide
  Target: LAMA2; (-) strand; PAM type: NRG; PAM sequence: TGG
aagtaaaaccaaacgctacc

SEQ ID NO: 97584 - DNA, 20 bp, Artificial Sequence
  Description of Artificial Sequence: Synthetic oligonucleotide
  Target: LAMA2; (-) strand; PAM type: NRG; PAM sequence: AAG
gatcaagtgcacacagttaa

SEQ ID NO: 97585 - DNA, 20 bp, Artificial Sequence
  Description of Artificial Sequence: Synthetic oligonucleotide
  Target: LAMA2; (-) strand; PAM type: NRG; PAM sequence: CAG
gagcattgatcaagtgcaca

SEQ ID NO: 97586 - DNA, 20 bp, Artificial Sequence
  Description of Artificial Sequence: Synthetic oligonucleotide
  Target: LAMA2; (-) strand; PAM type: NRG; PAM sequence: AAG
agcaattaagagcattgatc

SEQ ID NO: 97587 - DNA, 20 bp, Artificial Sequence
  Description of Artificial Sequence: Synthetic oligonucleotide
  Target: LAMA2; (-) strand; PAM type: NRG; PAM sequence: GAG
cgaaggtctacagcaattaa

SEQ ID NO: 97588 - DNA, 20 bp, Artificial Sequence
  Description of Artificial Sequence: Synthetic oligonucleotide
  Target: LAMA2; (-) strand; PAM type: NRG; PAM sequence: AAG
aacgaaggtctacagcaatt

SEQ ID NO: 97589 - DNA, 20 bp, Artificial Sequence
  Description of Artificial Sequence: Synthetic oligonucleotide
  Target: LAMA2; (-) strand; PAM type: NRG; PAM sequence: CAG
tatataataacgaaggtcta

SEQ ID NO: 97590 - DNA, 20 bp, Artificial Sequence
  Description of Artificial Sequence: Synthetic oligonucleotide
  Target: LAMA2; (-) strand; PAM type: NRG; PAM sequence: AGG
ggatagctatataataacga

SEQ ID NO: 97591 - DNA, 20 bp, Artificial Sequence
  Description of Artificial Sequence: Synthetic oligonucleotide
  Target: LAMA2; (-) strand; PAM type: NRG; PAM sequence: AAG
tggatagctatataataacg

SEQ ID NO: 97592 - DNA, 20 bp, Artificial Sequence
  Description of Artificial Sequence: Synthetic oligonucleotide
  Target: LAMA2; (-) strand; PAM type: NRG; PAM sequence: TAG
ctgtcattttatagattgga

SEQ ID NO: 97593 - DNA, 20 bp, Artificial Sequence
  Description of Artificial Sequence: Synthetic oligonucleotide
  Target: LAMA2; (-) strand; PAM type: NRG; PAM sequence: TGG
caatctgtcattttatagat

SEQ ID NO: 97594 - DNA, 20 bp, Artificial Sequence
  Description of Artificial Sequence: Synthetic oligonucleotide
  Target: LAMA2; (-) strand; PAM type: NRG; PAM sequence: TAG
caactcaatctgtcatttta

SEQ ID NO: 97595 - DNA, 20 bp, Artificial Sequence
  Description of Artificial Sequence: Synthetic oligonucleotide
  Target: LAMA2; (-) strand; PAM type: NRG; PAM sequence: TAG
attgcagaatcagagaattt

SEQ ID NO: 97596 - DNA, 20 bp, Artificial Sequence
  Description of Artificial Sequence: Synthetic oligonucleotide
  Target: LAMA2; (-) strand; PAM type: NRG; PAM sequence: GAG
aaaataatattgcagaatca

SEQ ID NO: 97597 - DNA, 20 bp, Artificial Sequence
  Description of Artificial Sequence: Synthetic oligonucleotide
  Target: LAMA2; (-) strand; PAM type: NRG; PAM sequence: CAG
gcaaaataatattgcagaat

SEQ ID NO: 97598 - DNA, 20 bp, Artificial Sequence
  Description of Artificial Sequence: Synthetic oligonucleotide
  Target: LAMA2; (-) strand; PAM type: NRG; PAM sequence: CAG
tctatagcaaaataatattg

SEQ ID NO: 97599 - DNA, 20 bp, Artificial Sequence
  Description of Artificial Sequence: Synthetic oligonucleotide
  Target: LAMA2; (-) strand; PAM type: NRG; PAM sequence: TAG
tacttacagaatattttcta

SEQ ID NO: 97600 - DNA, 20 bp, Artificial Sequence
  Description of Artificial Sequence: Synthetic oligonucleotide
  Target: LAMA2; (-) strand; PAM type: NRG; PAM sequence: CAG
aggtcaaccttgactactta

SEQ ID NO: 97601 - DNA, 20 bp, Artificial Sequence
  Description of Artificial Sequence: Synthetic oligonucleotide
  Target: LAMA2; (-) strand; PAM type: NRG; PAM sequence: AGG
cttctcttcaagatatctaa

SEQ ID NO: 97602 - DNA, 20 bp, Artificial Sequence
  Description of Artificial Sequence: Synthetic oligonucleotide
  Target: LAMA2; (-) strand; PAM type: NRG; PAM sequence: AAG
ccttctcttcaagatatcta

SEQ ID NO: 97603 - DNA, 20 bp, Artificial Sequence
  Description of Artificial Sequence: Synthetic oligonucleotide
  Target: LAMA2; (-) strand; PAM type: NRG; PAM sequence: AAG
gctgtaataaccttctcttc

SEQ ID NO: 97604 - DNA, 20 bp, Artificial Sequence
  Description of Artificial Sequence: Synthetic oligonucleotide
  Target: LAMA2; (-) strand; PAM type: NRG; PAM sequence: TAG
caaataaatgcagaaaaata

SEQ ID NO: 97605 - DNA, 20 bp, Artificial Sequence
  Description of Artificial Sequence: Synthetic oligonucleotide
  Target: LAMA2; (-) strand; PAM type: NRG; PAM sequence: CAG
agtattatttcaaataaatg

SEQ ID NO: 97606 - DNA, 20 bp, Artificial Sequence
  Description of Artificial Sequence: Synthetic oligonucleotide
  Target: LAMA2; (-) strand; PAM type: NRG; PAM sequence: CAG
catttttgttcacaagtgaa

SEQ ID NO: 97607 - DNA, 20 bp, Artificial Sequence
  Description of Artificial Sequence: Synthetic oligonucleotide
  Target: LAMA2; (-) strand; PAM type: NRG; PAM sequence: AAG
ctactaacatttttgttcac

SEQ ID NO: 97608 - DNA, 20 bp, Artificial Sequence
  Description of Artificial Sequence: Synthetic oligonucleotide
  Target: LAMA2; (-) strand; PAM type: NRG; PAM sequence: TGG
ttaaatccagaatggaaggt

SEQ ID NO: 97609 - DNA, 20 bp, Artificial Sequence
  Description of Artificial Sequence: Synthetic oligonucleotide
  Target: LAMA2; (-) strand; PAM type: NRG; PAM sequence: AGG
cattttaaatccagaatgga

SEQ ID NO: 97610 - DNA, 20 bp, Artificial Sequence
  Description of Artificial Sequence: Synthetic oligonucleotide
  Target: LAMA2; (-) strand; PAM type: NRG; PAM sequence: AAG
acattttaaatccagaatgg

SEQ ID NO: 97611 - DNA, 20 bp, Artificial Sequence
  Description of Artificial Sequence: Synthetic oligonucleotide
  Target: LAMA2; (-) strand; PAM type: NRG; PAM sequence: TGG
ttaacattttaaatccagaa

SEQ ID NO: 97612 - DNA, 20 bp, Artificial Sequence
  Description of Artificial Sequence: Synthetic oligonucleotide
  Target: LAMA2; (-) strand; PAM type: NRG; PAM sequence: CAG
ggtttttaacattttaaatc

SEQ ID NO: 97613 - DNA, 20 bp, Artificial Sequence
  Description of Artificial Sequence: Synthetic oligonucleotide
  Target: LAMA2; (-) strand; PAM type: NRG; PAM sequence: AGG
tctatcaatcatatgaagaa

SEQ ID NO: 97614 - DNA, 20 bp, Artificial Sequence
  Description of Artificial Sequence: Synthetic oligonucleotide
  Target: LAMA2; (-) strand; PAM type: NRG; PAM sequence: AAG
gtctatcaatcatatgaaga

SEQ ID NO: 97615 - DNA, 20 bp, Artificial Sequence
  Description of Artificial Sequence: Synthetic oligonucleotide
  Target: LAMA2; (-) strand; PAM type: NRG; PAM sequence: AAG
aaaagtctatcaatcatatg

SEQ ID NO: 97616 - DNA, 20 bp, Artificial Sequence
  Description of Artificial Sequence: Synthetic oligonucleotide
  Target: LAMA2; (-) strand; PAM type: NRG; PAM sequence: AAG
atttgaatgtactattcaaa

SEQ ID NO: 97617 - DNA, 20 bp, Artificial Sequence
  Description of Artificial Sequence: Synthetic oligonucleotide
  Target: LAMA2; (-) strand; PAM type: NRG; PAM sequence: AAG
aatgactcaaattaatggga

SEQ ID NO: 97618 - DNA, 20 bp, Artificial Sequence
  Description of Artificial Sequence: Synthetic oligonucleotide
  Target: LAMA2; (-) strand; PAM type: NRG; PAM sequence: GGG
ggaaaatgactcaaattaat

SEQ ID NO: 97619 - DNA, 20 bp, Artificial Sequence
  Description of Artificial Sequence: Synthetic oligonucleotide
  Target: LAMA2; (-) strand; PAM type: NRG; PAM sequence: TGG
tggaaaatgactcaaattaa

SEQ ID NO: 97620 - DNA, 20 bp, Artificial Sequence
  Description of Artificial Sequence: Synthetic oligonucleotide
  Target: LAMA2; (-) strand; PAM type: NRG; PAM sequence: TGG
tttacattttcatataatga

SEQ ID NO: 97621 - DNA, 20 bp, Artificial Sequence
  Description of Artificial Sequence: Synthetic oligonucleotide
  Target: LAMA2; (-) strand; PAM type: NRG; PAM sequence: TAG
tgacaatttgtacatattct

SEQ ID NO: 97622 - DNA, 20 bp, Artificial Sequence
  Description of Artificial Sequence: Synthetic oligonucleotide
  Target: LAMA2; (-) strand; PAM type: NRG; PAM sequence: CAG
ggacggtgaagccactaatg

SEQ ID NO: 97623 - DNA, 20 bp, Artificial Sequence
  Description of Artificial Sequence: Synthetic oligonucleotide
  Target: LAMA2; (-) strand; PAM type: NRG; PAM sequence: AAG
gtgaaagtcatgggacggtg

SEQ ID NO: 97624 - DNA, 20 bp, Artificial Sequence
  Description of Artificial Sequence: Synthetic oligonucleotide
  Target: LAMA2; (-) strand; PAM type: NRG; PAM sequence: CGG
cttaagtgaaagtcatggga

SEQ ID NO: 97625 - DNA, 20 bp, Artificial Sequence
  Description of Artificial Sequence: Synthetic oligonucleotide
  Target: LAMA2; (-) strand; PAM type: NRG; PAM sequence: GGG
gatgcttaagtgaaagtcat

SEQ ID NO: 97626 - DNA, 20 bp, Artificial Sequence
  Description of Artificial Sequence: Synthetic oligonucleotide
  Target: LAMA2; (-) strand; PAM type: NRG; PAM sequence: TGG
agatgcttaagtgaaagtca

SEQ ID NO: 97627 - DNA, 20 bp, Artificial Sequence
  Description of Artificial Sequence: Synthetic oligonucleotide
  Target: LAMA2; (-) strand; PAM type: NRG; PAM sequence: AAG
gtaaatagatgcttaagtga

SEQ ID NO: 97628 - DNA, 20 bp, Artificial Sequence
  Description of Artificial Sequence: Synthetic oligonucleotide
  Target: LAMA2; (-) strand; PAM type: NRG; PAM sequence: AAG
ctgtctgtaaatagatgctt

SEQ ID NO: 97629 - DNA, 20 bp, Artificial Sequence
  Description of Artificial Sequence: Synthetic oligonucleotide
  Target: LAMA2; (-) strand; PAM type: NRG; PAM sequence: TAG
ctgcaattactgtctgtaaa

SEQ ID NO: 97630 - DNA, 20 bp, Artificial Sequence
  Description of Artificial Sequence: Synthetic oligonucleotide
  Target: LAMA2; (-) strand; PAM type: NRG; PAM sequence: AAG
atctctgtaatctctctact

SEQ ID NO: 97631 - DNA, 20 bp, Artificial Sequence
  Description of Artificial Sequence: Synthetic oligonucleotide
  Target: LAMA2; (-) strand; PAM type: NRG; PAM sequence: AGG
ggtacattattatgagagat

SEQ ID NO: 97632 - DNA, 20 bp, Artificial Sequence
  Description of Artificial Sequence: Synthetic oligonucleotide
  Target: LAMA2; (-) strand; PAM type: NRG; PAM sequence: TAG
aggtacattattatgagaga

SEQ ID NO: 97633 - DNA, 20 bp, Artificial Sequence
  Description of Artificial Sequence: Synthetic oligonucleotide
  Target: LAMA2; (-) strand; PAM type: NRG; PAM sequence: GAG
cttcaggtacattattatga

SEQ ID NO: 97634 - DNA, 20 bp, Artificial Sequence
  Description of Artificial Sequence: Synthetic oligonucleotide
  Target: LAMA2; (-) strand; PAM type: NRG; PAM sequence: GAG
cacttcaggtacattattat

SEQ ID NO: 97635 - DNA, 20 bp, Artificial Sequence
  Description of Artificial Sequence: Synthetic oligonucleotide
  Target: LAMA2; (-) strand; PAM type: NRG; PAM sequence: AGG
tgggttgtggaaaacacttc

SEQ ID NO: 97636 - DNA, 20 bp, Artificial Sequence
  Description of Artificial Sequence: Synthetic oligonucleotide
  Target: LAMA2; (-) strand; PAM type: NRG; PAM sequence: CAG
atgggttgtggaaaacactt

SEQ ID NO: 97637 - DNA, 20 bp, Artificial Sequence
  Description of Artificial Sequence: Synthetic oligonucleotide
  Target: LAMA2; (-) strand; PAM type: NRG; PAM sequence: TGG
ggattagaggccatgggttg

SEQ ID NO: 97638 - DNA, 20 bp, Artificial Sequence
  Description of Artificial Sequence: Synthetic oligonucleotide
  Target: LAMA2; (-) strand; PAM type: NRG; PAM sequence: GGG
tataatggattagaggccat

SEQ ID NO: 97639 - DNA, 20 bp, Artificial Sequence
  Description of Artificial Sequence: Synthetic oligonucleotide
  Target: LAMA2; (-) strand; PAM type: NRG; PAM sequence: TGG
gtataatggattagaggcca

SEQ ID NO: 97640 - DNA, 20 bp, Artificial Sequence
  Description of Artificial Sequence: Synthetic oligonucleotide
  Target: LAMA2; (-) strand; PAM type: NRG; PAM sequence: AGG
taagaggtataatggattag

SEQ ID NO: 97641 - DNA, 20 bp, Artificial Sequence
  Description of Artificial Sequence: Synthetic oligonucleotide
  Target: LAMA2; (-) strand; PAM type: NRG; PAM sequence: GAG
ataagaggtataatggatta

SEQ ID NO: 97642 - DNA, 20 bp, Artificial Sequence
  Description of Artificial Sequence: Synthetic oligonucleotide
  Target: LAMA2; (-) strand; PAM type: NRG; PAM sequence: TAG
aaataagaggtataatggat

SEQ ID NO: 97643 - DNA, 20 bp, Artificial Sequence
  Description of Artificial Sequence: Synthetic oligonucleotide
  Target: LAMA2; (-) strand; PAM type: NRG; PAM sequence: TGG
attataaataagaggtataa

SEQ ID NO: 97644 - DNA, 20 bp, Artificial Sequence
  Description of Artificial Sequence: Synthetic oligonucleotide
  Target: LAMA2; (-) strand; PAM type: NRG; PAM sequence: AGG
caagatgaattataaataag

SEQ ID NO: 97645 - DNA, 20 bp, Artificial Sequence
  Description of Artificial Sequence: Synthetic oligonucleotide
  Target: LAMA2; (-) strand; PAM type: NRG; PAM sequence: GAG
tcaagatgaattataaataa

SEQ ID NO: 97646 - DNA, 20 bp, Artificial Sequence
  Description of Artificial Sequence: Synthetic oligonucleotide
  Target: LAMA2; (-) strand; PAM type: NRG; PAM sequence: AAG
aatcaagatgaattataaat

SEQ ID NO: 97647 - DNA, 20 bp, Artificial Sequence
  Description of Artificial Sequence: Synthetic oligonucleotide
  Target: LAMA2; (-) strand; PAM type: NRG; PAM sequence: AAG
ggtaattacacttaggaatc

SEQ ID NO: 97648 - DNA, 20 bp, Artificial Sequence
  Description of Artificial Sequence: Synthetic oligonucleotide
  Target: LAMA2; (-) strand; PAM type: NRG; PAM sequence: AGG
atgcctgggtaattacactt

SEQ ID NO: 97649 - DNA, 20 bp, Artificial Sequence
  Description of Artificial Sequence: Synthetic oligonucleotide
  Target: LAMA2; (-) strand; PAM type: NRG; PAM sequence: TAG
tatgcctgggtaattacact

SEQ ID NO: 97650 - DNA, 20 bp, Artificial Sequence
  Description of Artificial Sequence: Synthetic oligonucleotide
  Target: LAMA2; (-) strand; PAM type: NRG; PAM sequence: GGG
gatgataagattttatgcct

SEQ ID NO: 97651 - DNA, 20 bp, Artificial Sequence
  Description of Artificial Sequence: Synthetic oligonucleotide
  Target: LAMA2; (-) strand; PAM type: NRG; PAM sequence: TGG
tgatgataagattttatgcc

SEQ ID NO: 97652 - DNA, 20 bp, Artificial Sequence
  Description of Artificial Sequence: Synthetic oligonucleotide
  Target: LAMA2; (-) strand; PAM type: NRG; PAM sequence: AAG
ttagctcttgctttgatgat

SEQ ID NO: 97653 - DNA, 20 bp, Artificial Sequence
  Description of Artificial Sequence: Synthetic oligonucleotide
  Target: LAMA2; (-) strand; PAM type: NRG; PAM sequence: TAG
tattatttcaaaactgccct

SEQ ID NO: 97654 - DNA, 20 bp, Artificial Sequence
  Description of Artificial Sequence: Synthetic oligonucleotide
  Target: LAMA2; (-) strand; PAM type: NRG; PAM sequence: GGG
aaagcatatgttactggaat

SEQ ID NO: 97655 - DNA, 20 bp, Artificial Sequence
  Description of Artificial Sequence: Synthetic oligonucleotide
  Target: LAMA2; (-) strand; PAM type: NRG; PAM sequence: TGG
caaagcatatgttactggaa

SEQ ID NO: 97656 - DNA, 20 bp, Artificial Sequence
  Description of Artificial Sequence: Synthetic oligonucleotide
  Target: LAMA2; (-) strand; PAM type: NRG; PAM sequence: TGG
tgacccaaagcatatgttac

SEQ ID NO: 97657 - DNA, 20 bp, Artificial Sequence
  Description of Artificial Sequence: Synthetic oligonucleotide
  Target: LAMA2; (-) strand; PAM type: NRG; PAM sequence: AAG
ctttgtgtattcatgaccca

SEQ ID NO: 97658 - DNA, 20 bp, Artificial Sequence
  Description of Artificial Sequence: Synthetic oligonucleotide
  Target: LAMA2; (-) strand; PAM type: NRG; PAM sequence: AGG
attttgtaaaaatattgtag

SEQ ID NO: 97659 - DNA, 20 bp, Artificial Sequence
  Description of Artificial Sequence: Synthetic oligonucleotide
  Target: LAMA2; (-) strand; PAM type: NRG; PAM sequence: GAG
cattttgtaaaaatattgta

SEQ ID NO: 97660 - DNA, 20 bp, Artificial Sequence
  Description of Artificial Sequence: Synthetic oligonucleotide
  Target: LAMA2; (-) strand; PAM type: NRG; PAM sequence: TAG
tacattttgtaaaaatattg

SEQ ID NO: 97661 - DNA, 20 bp, Artificial Sequence
  Description of Artificial Sequence: Synthetic oligonucleotide
  Target: LAMA2; (-) strand; PAM type: NRG; PAM sequence: TAG
cctgtagatgcagatgtctc

SEQ ID NO: 97662 - DNA, 20 bp, Artificial Sequence
  Description of Artificial Sequence: Synthetic oligonucleotide
  Target: LAMA2; (-) strand; PAM type: NRG; PAM sequence: CAG
aataaaatagcctgtagatg

SEQ ID NO: 97663 - DNA, 20 bp, Artificial Sequence
  Description of Artificial Sequence: Synthetic oligonucleotide
  Target: LAMA2; (-) strand; PAM type: NRG; PAM sequence: TAG
acatgaaataaaatagcctg

SEQ ID NO: 97664 - DNA, 20 bp, Artificial Sequence
  Description of Artificial Sequence: Synthetic oligonucleotide
  Target: LAMA2; (-) strand; PAM type: NRG; PAM sequence: TAG
gataaaaacatgaaataaaa

SEQ ID NO: 97665 - DNA, 20 bp, Artificial Sequence
  Description of Artificial Sequence: Synthetic oligonucleotide
  Target: LAMA2; (-) strand; PAM type: NRG; PAM sequence: TGG
gtttacttgcaaccatattg

SEQ ID NO: 97666 - DNA, 20 bp, Artificial Sequence
  Description of Artificial Sequence: Synthetic oligonucleotide
  Target: LAMA2; (-) strand; PAM type: NRG; PAM sequence: CAG
tacaactggctatattttag

SEQ ID NO: 97667 - DNA, 20 bp, Artificial Sequence
  Description of Artificial Sequence: Synthetic oligonucleotide
  Target: LAMA2; (-) strand; PAM type: NRG; PAM sequence: TAG
ctttacaactggctatattt

SEQ ID NO: 97668 - DNA, 20 bp, Artificial Sequence
  Description of Artificial Sequence: Synthetic oligonucleotide
  Target: LAMA2; (-) strand; PAM type: NRG; PAM sequence: TGG
aggctaagagtctttacaac

SEQ ID NO: 97669 - DNA, 20 bp, Artificial Sequence
  Description of Artificial Sequence: Synthetic oligonucleotide
  Target: LAMA2; (-) strand; PAM type: NRG; PAM sequence: GAG
aggtaacaagcaaaggctaa

SEQ ID NO: 97670 - DNA, 20 bp, Artificial Sequence
  Description of Artificial Sequence: Synthetic oligonucleotide
  Target: LAMA2; (-) strand; PAM type: NRG; PAM sequence: AAG
gcaggtaacaagcaaaggct

SEQ ID NO: 97671 - DNA, 20 bp, Artificial Sequence
  Description of Artificial Sequence: Synthetic oligonucleotide
  Target: LAMA2; (-) strand; PAM type: NRG; PAM sequence: AGG
acagtgcaggtaacaagcaa

SEQ ID NO: 97672 - DNA, 20 bp, Artificial Sequence
  Description of Artificial Sequence: Synthetic oligonucleotide
  Target: LAMA2; (-) strand; PAM type: NRG; PAM sequence: AAG
aacagtgcaggtaacaagca

SEQ ID NO: 97673 - DNA, 20 bp, Artificial Sequence
  Description of Artificial Sequence: Synthetic oligonucleotide
  Target: LAMA2; (-) strand; PAM type: NRG; PAM sequence: AAG
gtcataacagtgcaggtaac

SEQ ID NO: 97674 - DNA, 20 bp, Artificial Sequence
  Description of Artificial Sequence: Synthetic oligonucleotide
  Target: LAMA2; (-) strand; PAM type: NRG; PAM sequence: AGG
ctgcactgtcataacagtgc

SEQ ID NO: 97675 - DNA, 20 bp, Artificial Sequence
  Description of Artificial Sequence: Synthetic oligonucleotide
  Target: LAMA2; (-) strand; PAM type: NRG; PAM sequence: CAG
cctgcactgtcataacagtg

SEQ ID NO: 97676 - DNA, 20 bp, Artificial Sequence
  Description of Artificial Sequence: Synthetic oligonucleotide
  Target: LAMA2; (-) strand; PAM type: NRG; PAM sequence: CAG
ccaggcctgcactgtcataa

SEQ ID NO: 97677 - DNA, 20 bp, Artificial Sequence
  Description of Artificial Sequence: Synthetic oligonucleotide
  Target: LAMA2; (-) strand; PAM type: NRG; PAM sequence: AGG
aactaacatttttaatgacc

SEQ ID NO: 97678 - DNA, 20 bp, Artificial Sequence
  Description of Artificial Sequence: Synthetic oligonucleotide
  Target: LAMA2; (-) strand; PAM type: NRG; PAM sequence: CAG
aaactaacatttttaatgac

SEQ ID NO: 97679 - DNA, 20 bp, Artificial Sequence
  Description of Artificial Sequence: Synthetic oligonucleotide
  Target: LAMA2; (-) strand; PAM type: NRG; PAM sequence: AGG
aatagtaaattataataatt

SEQ ID NO: 97680 - DNA, 20 bp, Artificial Sequence
  Description of Artificial Sequence: Synthetic oligonucleotide
  Target: LAMA2; (-) strand; PAM type: NRG; PAM sequence: TAG
aaatagtaaattataataat

SEQ ID NO: 97681 - DNA, 20 bp, Artificial Sequence
  Description of Artificial Sequence: Synthetic oligonucleotide
  Target: LAMA2; (-) strand; PAM type: NRG; PAM sequence: TAG
aatctggccccttctgcaaa

SEQ ID NO: 97682 - DNA, 20 bp, Artificial Sequence
  Description of Artificial Sequence: Synthetic oligonucleotide
  Target: LAMA2; (-) strand; PAM type: NRG; PAM sequence: TGG
tttgactcctgaaggtaatc

SEQ ID NO: 97683 - DNA, 20 bp, Artificial Sequence
  Description of Artificial Sequence: Synthetic oligonucleotide
  Target: LAMA2; (-) strand; PAM type: NRG; PAM sequence: AGG
gtcctttgtttgactcctga

SEQ ID NO: 97684 - DNA, 20 bp, Artificial Sequence
  Description of Artificial Sequence: Synthetic oligonucleotide
  Target: LAMA2; (-) strand; PAM type: NRG; PAM sequence: AAG
tgtcctttgtttgactcctg

SEQ ID NO: 97685 - DNA, 20 bp, Artificial Sequence
  Description of Artificial Sequence: Synthetic oligonucleotide
  Target: LAMA2; (-) strand; PAM type: NRG; PAM sequence: TGG
caagaaatctggtgaggaaa

SEQ ID NO: 97686 - DNA, 20 bp, Artificial Sequence
  Description of Artificial Sequence: Synthetic oligonucleotide
  Target: LAMA2; (-) strand; PAM type: NRG; PAM sequence: AGG
caacaccaagaaatctggtg

SEQ ID NO: 97687 - DNA, 20 bp, Artificial Sequence
  Description of Artificial Sequence: Synthetic oligonucleotide
  Target: LAMA2; (-) strand; PAM type: NRG; PAM sequence: GAG
ccaacaccaagaaatctggt

SEQ ID NO: 97688 - DNA, 20 bp, Artificial Sequence
  Description of Artificial Sequence: Synthetic oligonucleotide
  Target: LAMA2; (-) strand; PAM type: NRG; PAM sequence: TGG
ggctccaacaccaagaaatc

SEQ ID NO: 97689 - DNA, 20 bp, Artificial Sequence
  Description of Artificial Sequence: Synthetic oligonucleotide
  Target: LAMA2; (-) strand; PAM type: NRG; PAM sequence: AAG
aactcaatggctccaacacc

SEQ ID NO: 97690 - DNA, 20 bp, Artificial Sequence
  Description of Artificial Sequence: Synthetic oligonucleotide
  Target: LAMA2; (-) strand; PAM type: NRG; PAM sequence: TGG
ataaagtataacaaactcaa

SEQ ID NO: 97691 - DNA, 20 bp, Artificial Sequence
  Description of Artificial Sequence: Synthetic oligonucleotide
  Target: LAMA2; (-) strand; PAM type: NRG; PAM sequence: AAG
actcaaagacaggttaaata

SEQ ID NO: 97692 - DNA, 20 bp, Artificial Sequence
  Description of Artificial Sequence: Synthetic oligonucleotide
  Target: LAMA2; (-) strand; PAM type: NRG; PAM sequence: AGG
atttaatgtcactcaaagac

SEQ ID NO: 97693 - DNA, 20 bp, Artificial Sequence
  Description of Artificial Sequence: Synthetic oligonucleotide
  Target: LAMA2; (-) strand; PAM type: NRG; PAM sequence: CAG
tatttaatgtcactcaaaga

SEQ ID NO: 97694 - DNA, 20 bp, Artificial Sequence
  Description of Artificial Sequence: Synthetic oligonucleotide
  Target: LAMA2; (-) strand; PAM type: NRG; PAM sequence: AAG
cctatatttaatgtcactca

SEQ ID NO: 97695 - DNA, 20 bp, Artificial Sequence
  Description of Artificial Sequence: Synthetic oligonucleotide
  Target: LAMA2; (-) strand; PAM type: NRG; PAM sequence: GGG
agctcagtttaggtcagttt

SEQ ID NO: 97696 - DNA, 20 bp, Artificial Sequence
  Description of Artificial Sequence: Synthetic oligonucleotide
  Target: LAMA2; (-) strand; PAM type: NRG; PAM sequence: TGG
aagctcagtttaggtcagtt

SEQ ID NO: 97697 - DNA, 20 bp, Artificial Sequence
  Description of Artificial Sequence: Synthetic oligonucleotide
  Target: LAMA2; (-) strand; PAM type: NRG; PAM sequence: CAG
gcataaagctcagtttaggt

SEQ ID NO: 97698 - DNA, 20 bp, Artificial Sequence
  Description of Artificial Sequence: Synthetic oligonucleotide
  Target: LAMA2; (-) strand; PAM type: NRG; PAM sequence: AGG
aactgcataaagctcagttt

SEQ ID NO: 97699 - DNA, 20 bp, Artificial Sequence
  Description of Artificial Sequence: Synthetic oligonucleotide
  Target: LAMA2; (-) strand; PAM type: NRG; PAM sequence: TAG
caactgcataaagctcagtt

SEQ ID NO: 97700 - DNA, 20 bp, Artificial Sequence
  Description of Artificial Sequence: Synthetic oligonucleotide
  Target: LAMA2; (-) strand; PAM type: NRG; PAM sequence: CAG
cctttcaactgcataaagct

SEQ ID NO: 97701 - DNA, 20 bp, Artificial Sequence
  Description of Artificial Sequence: Synthetic oligonucleotide
  Target: LAMA2; (-) strand; PAM type: NRG; PAM sequence: AAG
tataacctttcaactgcata

SEQ ID NO: 97702 - DNA, 20 bp, Artificial Sequence
  Description of Artificial Sequence: Synthetic oligonucleotide
  Target: LAMA2; (-) strand; PAM type: NRG; PAM sequence: TGG
aagaaagtcataagtaagaa

SEQ ID NO: 97703 - DNA, 20 bp, Artificial Sequence
  Description of Artificial Sequence: Synthetic oligonucleotide
  Target: LAMA2; (-) strand; PAM type: NRG; PAM sequence: AAG
taagaaagaaagtcataagt

SEQ ID NO: 97704 - DNA, 20 bp, Artificial Sequence
  Description of Artificial Sequence: Synthetic oligonucleotide
  Target: LAMA2; (-) strand; PAM type: NRG; PAM sequence: AAG
tatttaagaaagaaagtcat

SEQ ID NO: 97705 - DNA, 20 bp, Artificial Sequence
  Description of Artificial Sequence: Synthetic oligonucleotide
  Target: LAMA2; (-) strand; PAM type: NRG; PAM sequence: AAG
ttttccatatttaagaaaga

SEQ ID NO: 97706 - DNA, 20 bp, Artificial Sequence
  Description of Artificial Sequence: Synthetic oligonucleotide
  Target: LAMA2; (-) strand; PAM type: NRG; PAM sequence: AAG
aatattttccatatttaaga

SEQ ID NO: 97707 - DNA, 20 bp, Artificial Sequence
  Description of Artificial Sequence: Synthetic oligonucleotide
  Target: LAMA2; (-) strand; PAM type: NRG; PAM sequence: AAG
gctgaatattttccatattt

SEQ ID NO: 97708 - DNA, 20 bp, Artificial Sequence
  Description of Artificial Sequence: Synthetic oligonucleotide
  Target: LAMA2; (-) strand; PAM type: NRG; PAM sequence: AGG
tgcagagagctgcacacgca

SEQ ID NO: 97709 - DNA, 20 bp, Artificial Sequence
  Description of Artificial Sequence: Synthetic oligonucleotide
  Target: LAMA2; (-) strand; PAM type: NRG; PAM sequence: AAG
ctgcagagagctgcacacgc

SEQ ID NO: 97710 - DNA, 20 bp, Artificial Sequence
  Description of Artificial Sequence: Synthetic oligonucleotide
  Target: LAMA2; (-) strand; PAM type: NRG; PAM sequence: GAG
gatttccgtattactgcaga

SEQ ID NO: 97711 - DNA, 20 bp, Artificial Sequence
  Description of Artificial Sequence: Synthetic oligonucleotide
  Target: LAMA2; (-) strand; PAM type: NRG; PAM sequence: GAG
ctgatttccgtattactgca

SEQ ID NO: 97712 - DNA, 20 bp, Artificial Sequence
  Description of Artificial Sequence: Synthetic oligonucleotide
  Target: LAMA2; (-) strand; PAM type: NRG; PAM sequence: CAG
ttctgatttccgtattactg

SEQ ID NO: 97713 - DNA, 20 bp, Artificial Sequence
  Description of Artificial Sequence: Synthetic oligonucleotide
  Target: LAMA2; (-) strand; PAM type: NRG; PAM sequence: GAG
aactatcaaaacatgaccta

SEQ ID NO: 97714 - DNA, 20 bp, Artificial Sequence
  Description of Artificial Sequence: Synthetic oligonucleotide
  Target: LAMA2; (-) strand; PAM type: NRG; PAM sequence: TAG
gaaactatcaaaacatgacc

SEQ ID NO: 97715 - DNA, 20 bp, Artificial Sequence
  Description of Artificial Sequence: Synthetic oligonucleotide
  Target: LAMA2; (-) strand; PAM type: NRG; PAM sequence: AAG
aatatgggaagacaggatag

SEQ ID NO: 97716 - DNA, 20 bp, Artificial Sequence
  Description of Artificial Sequence: Synthetic oligonucleotide
  Target: LAMA2; (-) strand; PAM type: NRG; PAM sequence: TAG
taaaatatgggaagacagga

SEQ ID NO: 97717 - DNA, 20 bp, Artificial Sequence
  Description of Artificial Sequence: Synthetic oligonucleotide
  Target: LAMA2; (-) strand; PAM type: NRG; PAM sequence: AGG
cttttaaaatatgggaagac

SEQ ID NO: 97718 - DNA, 20 bp, Artificial Sequence
  Description of Artificial Sequence: Synthetic oligonucleotide
  Target: LAMA2; (-) strand; PAM type: NRG; PAM sequence: CAG
ccttttaaaatatgggaaga

SEQ ID NO: 97719 - DNA, 20 bp, Artificial Sequence
  Description of Artificial Sequence: Synthetic oligonucleotide
  Target: LAMA2; (-) strand; PAM type: NRG; PAM sequence: AAG
aagcccttttaaaatatggg

SEQ ID NO: 97720 - DNA, 20 bp, Artificial Sequence
  Description of Artificial Sequence: Synthetic oligonucleotide
  Target: LAMA2; (-) strand; PAM type: NRG; PAM sequence: GGG
ctaaagcccttttaaaatat

SEQ ID NO: 97721 - DNA, 20 bp, Artificial Sequence
  Description of Artificial Sequence: Synthetic oligonucleotide
  Target: LAMA2; (-) strand; PAM type: NRG; PAM sequence: TGG
cctaaagcccttttaaaata

SEQ ID NO: 97722 - DNA, 20 bp, Artificial Sequence
  Description of Artificial Sequence: Synthetic oligonucleotide
  Target: LAMA2; (-) strand; PAM type: NRG; PAM sequence: AAG
gccattcaactgcaagccta

SEQ ID NO: 97723 - DNA, 20 bp, Artificial Sequence
  Description of Artificial Sequence: Synthetic oligonucleotide
  Target: LAMA2; (-) strand; PAM type: NRG; PAM sequence: AAG
gacaccggccattcaactgc

SEQ ID NO: 97724 - DNA, 20 bp, Artificial Sequence
  Description of Artificial Sequence: Synthetic oligonucleotide
  Target: LAMA2; (-) strand; PAM type: NRG; PAM sequence: CGG
agtggcgatccaatagacac

SEQ ID NO: 97725 - DNA, 20 bp, Artificial Sequence
  Description of Artificial Sequence: Synthetic oligonucleotide
  Target: LAMA2; (-) strand; PAM type: NRG; PAM sequence: TAG
gcttctgagtggcgatccaa

SEQ ID NO: 97726 - DNA, 20 bp, Artificial Sequence
  Description of Artificial Sequence: Synthetic oligonucleotide
  Target: LAMA2; (-) strand; PAM type: NRG; PAM sequence: TGG
cacaagggacagcttctgag

SEQ ID NO: 97727 - DNA, 20 bp, Artificial Sequence
  Description of Artificial Sequence: Synthetic oligonucleotide
  Target: LAMA2; (-) strand; PAM type: NRG; PAM sequence: GAG
agccacaagggacagcttct

SEQ ID NO: 97728 - DNA, 20 bp, Artificial Sequence
  Description of Artificial Sequence: Synthetic oligonucleotide
  Target: LAMA2; (-) strand; PAM type: NRG; PAM sequence: CAG
gttttaatagccacaaggga

SEQ ID NO: 97729 - DNA, 20 bp, Artificial Sequence
  Description of Artificial Sequence: Synthetic oligonucleotide
  Target: LAMA2; (-) strand; PAM type: NRG; PAM sequence: GGG
atcagttttaatagccacaa

SEQ ID NO: 97730 - DNA, 20 bp, Artificial Sequence
  Description of Artificial Sequence: Synthetic oligonucleotide
  Target: LAMA2; (-) strand; PAM type: NRG; PAM sequence: AGG
aatcagttttaatagccaca

SEQ ID NO: 97731 - DNA, 20 bp, Artificial Sequence
  Description of Artificial Sequence: Synthetic oligonucleotide
  Target: LAMA2; (-) strand; PAM type: NRG; PAM sequence: AAG
aaatcagttttaatagccac

SEQ ID NO: 97732 - DNA, 20 bp, Artificial Sequence
  Description of Artificial Sequence: Synthetic oligonucleotide
  Target: LAMA2; (-) strand; PAM type: NRG; PAM sequence: TAG
tttaaaaaaatcagttttaa

SEQ ID NO: 97733 - DNA, 20 bp, Artificial Sequence
  Description of Artificial Sequence: Synthetic oligonucleotide
  Target: LAMA2; (-) strand; PAM type: NRG; PAM sequence: CAG
atttggagatttaaaaaaat

SEQ ID NO: 97734 - DNA, 20 bp, Artificial Sequence
  Description of Artificial Sequence: Synthetic oligonucleotide
  Target: LAMA2; (-) strand; PAM type: NRG; PAM sequence: GAG
cgataggtataaattatttg

SEQ ID NO: 97735 - DNA, 20 bp, Artificial Sequence
  Description of Artificial Sequence: Synthetic oligonucleotide
  Target: LAMA2; (-) strand; PAM type: NRG; PAM sequence: TGG
gacgataggtataaattatt

SEQ ID NO: 97736 - DNA, 20 bp, Artificial Sequence
  Description of Artificial Sequence: Synthetic oligonucleotide
  Target: LAMA2; (-) strand; PAM type: NRG; PAM sequence: AGG
gggctttatgtgttgacgat

SEQ ID NO: 97737 - DNA, 20 bp, Artificial Sequence
  Description of Artificial Sequence: Synthetic oligonucleotide
  Target: LAMA2; (-) strand; PAM type: NRG; PAM sequence: TAG
tgggctttatgtgttgacga

SEQ ID NO: 97738 - DNA, 20 bp, Artificial Sequence
  Description of Artificial Sequence: Synthetic oligonucleotide
  Target: LAMA2; (-) strand; PAM type: NRG; PAM sequence: GGG
attttcacattttgcctttt

SEQ ID NO: 97739 - DNA, 20 bp, Artificial Sequence
  Description of Artificial Sequence: Synthetic oligonucleotide
  Target: LAMA2; (-) strand; PAM type: NRG; PAM sequence: TGG
tattttcacattttgccttt

SEQ ID NO: 97740 - DNA, 20 bp, Artificial Sequence
  Description of Artificial Sequence: Synthetic oligonucleotide
  Target: LAMA2; (-) strand; PAM type: NRG; PAM sequence: AAG
gtgtgcatatgtaagtagct

SEQ ID NO: 97741 - DNA, 20 bp, Artificial Sequence
  Description of Artificial Sequence: Synthetic oligonucleotide
  Target: LAMA2; (-) strand; PAM type: NRG; PAM sequence: TAG
tagatgtgtgcatatgtaag

SEQ ID NO: 97742 - DNA, 20 bp, Artificial Sequence
  Description of Artificial Sequence: Synthetic oligonucleotide
  Target: LAMA2; (-) strand; PAM type: NRG; PAM sequence: AAG
ggatagatgtgtgcatatgt

SEQ ID NO: 97743 - DNA, 20 bp, Artificial Sequence
  Description of Artificial Sequence: Synthetic oligonucleotide
  Target: LAMA2; (-) strand; PAM type: NRG; PAM sequence: TAG
gcaacagaagtgataaagga

SEQ ID NO: 97744 - DNA, 20 bp, Artificial Sequence
  Description of Artificial Sequence: Synthetic oligonucleotide
  Target: LAMA2; (-) strand; PAM type: NRG; PAM sequence: AGG
gtgtgcaacagaagtgataa

SEQ ID NO: 97745 - DNA, 20 bp, Artificial Sequence
  Description of Artificial Sequence: Synthetic oligonucleotide
  Target: LAMA2; (-) strand; PAM type: NRG; PAM sequence: AAG
ggtgtgcaacagaagtgata

SEQ ID NO: 97746 - DNA, 20 bp, Artificial Sequence
  Description of Artificial Sequence: Synthetic oligonucleotide
  Target: LAMA2; (-) strand; PAM type: NRG; PAM sequence: AAG
gggtctctggtgtgcaacag

SEQ ID NO: 97747 - DNA, 20 bp, Artificial Sequence
  Description of Artificial Sequence: Synthetic oligonucleotide
  Target: LAMA2; (-) strand; PAM type: NRG; PAM sequence: CAG
tttgggtctctggtgtgcaa

SEQ ID NO: 97748 - DNA, 20 bp, Artificial Sequence
  Description of Artificial Sequence: Synthetic oligonucleotide
  Target: LAMA2; (-) strand; PAM type: NRG; PAM sequence: TGG
aaacagagactttgggtctc

SEQ ID NO: 97749 - DNA, 20 bp, Artificial Sequence
  Description of Artificial Sequence: Synthetic oligonucleotide
  Target: LAMA2; (-) strand; PAM type: NRG; PAM sequence: GGG
tacatgaaaacagagacttt

SEQ ID NO: 97750 - DNA, 20 bp, Artificial Sequence
  Description of Artificial Sequence: Synthetic oligonucleotide
  Target: LAMA2; (-) strand; PAM type: NRG; PAM sequence: TGG
gtacatgaaaacagagactt

SEQ ID NO: 97751 - DNA, 20 bp, Artificial Sequence
  Description of Artificial Sequence: Synthetic oligonucleotide
  Target: LAMA2; (-) strand; PAM type: NRG; PAM sequence: GAG
cttgtctgtacatgaaaaca

SEQ ID NO: 97752 - DNA, 20 bp, Artificial Sequence
  Description of Artificial Sequence: Synthetic oligonucleotide
  Target: LAMA2; (-) strand; PAM type: NRG; PAM sequence: CAG
cacttgtctgtacatgaaaa

SEQ ID NO: 97753 - DNA, 20 bp, Artificial Sequence
  Description of Artificial Sequence: Synthetic oligonucleotide
  Target: LAMA2; (-) strand; PAM type: NRG; PAM sequence: AGG
aaagataccatgattgtttt

SEQ ID NO: 97754 - DNA, 20 bp, Artificial Sequence
  Description of Artificial Sequence: Synthetic oligonucleotide
  Target: LAMA2; (-) strand; PAM type: NRG; PAM sequence: TAG
taaagataccatgattgttt

SEQ ID NO: 97755 - DNA, 20 bp, Artificial Sequence
  Description of Artificial Sequence: Synthetic oligonucleotide
  Target: LAMA2; (-) strand; PAM type: NRG; PAM sequence: AAG
ctggaaataaactaaaaata

SEQ ID NO: 97756 - DNA, 20 bp, Artificial Sequence
  Description of Artificial Sequence: Synthetic oligonucleotide
  Target: LAMA2; (-) strand; PAM type: NRG; PAM sequence: TGG
atagttttttctatgtttgc

SEQ ID NO: 97757 - DNA, 20 bp, Artificial Sequence
  Description of Artificial Sequence: Synthetic oligonucleotide
  Target: LAMA2; (-) strand; PAM type: NRG; PAM sequence: TAG
ataggtttctctatctcaaa

SEQ ID NO: 97758 - DNA, 20 bp, Artificial Sequence
  Description of Artificial Sequence: Synthetic oligonucleotide
  Target: LAMA2; (-) strand; PAM type: NRG; PAM sequence: AGG
attgtcatacataaatcaat

SEQ ID NO: 97759 - DNA, 20 bp, Artificial Sequence
  Description of Artificial Sequence: Synthetic oligonucleotide
  Target: LAMA2; (-) strand; PAM type: NRG; PAM sequence: TAG
aattgtcatacataaatcaa

SEQ ID NO: 97760 - DNA, 20 bp, Artificial Sequence
  Description of Artificial Sequence: Synthetic oligonucleotide
  Target: LAMA2; (-) strand; PAM type: NRG; PAM sequence: AAG
tctgaggattacttgagata

SEQ ID NO: 97761 - DNA, 20 bp, Artificial Sequence
  Description of Artificial Sequence: Synthetic oligonucleotide
  Target: LAMA2; (-) strand; PAM type: NRG; PAM sequence: GAG
ggtggatctgaggattactt

SEQ ID NO: 97762 - DNA, 20 bp, Artificial Sequence
  Description of Artificial Sequence: Synthetic oligonucleotide
  Target: LAMA2; (-) strand; PAM type: NRG; PAM sequence: AGG
cttttcatagggtggatctg

SEQ ID NO: 97763 - DNA, 20 bp, Artificial Sequence
  Description of Artificial Sequence: Synthetic oligonucleotide
  Target: LAMA2; (-) strand; PAM type: NRG; PAM sequence: GAG
gcttttcatagggtggatct

SEQ ID NO: 97764 - DNA, 20 bp, Artificial Sequence
  Description of Artificial Sequence: Synthetic oligonucleotide
  Target: LAMA2; (-) strand; PAM type: NRG; PAM sequence: TGG
aggttctgcttttcataggg

SEQ ID NO: 97765 - DNA, 20 bp, Artificial Sequence
  Description of Artificial Sequence: Synthetic oligonucleotide
  Target: LAMA2; (-) strand; PAM type: NRG; PAM sequence: GGG
ggtaggttctgcttttcata

SEQ ID NO: 97766 - DNA, 20 bp, Artificial Sequence
  Description of Artificial Sequence: Synthetic oligonucleotide
  Target: LAMA2; (-) strand; PAM type: NRG; PAM sequence: AGG
tggtaggttctgcttttcat

SEQ ID NO: 97767 - DNA, 20 bp, Artificial Sequence
  Description of Artificial Sequence: Synthetic oligonucleotide
  Target: LAMA2; (-) strand; PAM type: NRG; PAM sequence: TAG
atggtaggttctgcttttca

SEQ ID NO: 97768 - DNA, 20 bp, Artificial Sequence
  Description of Artificial Sequence: Synthetic oligonucleotide
  Target: LAMA2; (-) strand; PAM type: NRG; PAM sequence: AGG
gtaagcactcaatcaatggt

SEQ ID NO: 97769 - DNA, 20 bp, Artificial Sequence
  Description of Artificial Sequence: Synthetic oligonucleotide
  Target: LAMA2; (-) strand; PAM type: NRG; PAM sequence: TAG
agtaagcactcaatcaatgg

SEQ ID NO: 97770 - DNA, 20 bp, Artificial Sequence
  Description of Artificial Sequence: Synthetic oligonucleotide
  Target: LAMA2; (-) strand; PAM type: NRG; PAM sequence: TGG
gatagtaagcactcaatcaa

SEQ ID NO: 97771 - DNA, 20 bp, Artificial Sequence
  Description of Artificial Sequence: Synthetic oligonucleotide
  Target: LAMA2; (-) strand; PAM type: NRG; PAM sequence: AAG
ggaagtgtacaggagatagt

SEQ ID NO: 97772 - DNA, 20 bp, Artificial Sequence
  Description of Artificial Sequence: Synthetic oligonucleotide
  Target: LAMA2; (-) strand; PAM type: NRG; PAM sequence: TAG
attaggaagtgtacaggaga

SEQ ID NO: 97773 - DNA, 20 bp, Artificial Sequence
  Description of Artificial Sequence: Synthetic oligonucleotide
  Target: LAMA2; (-) strand; PAM type: NRG; PAM sequence: GAG
ctgtattaggaagtgtacag

SEQ ID NO: 97774 - DNA, 20 bp, Artificial Sequence
  Description of Artificial Sequence: Synthetic oligonucleotide
  Target: LAMA2; (-) strand; PAM type: NRG; PAM sequence: AGG
aactgtattaggaagtgtac

SEQ ID NO: 97775 - DNA, 20 bp, Artificial Sequence
  Description of Artificial Sequence: Synthetic oligonucleotide
  Target: LAMA2; (-) strand; PAM type: NRG; PAM sequence: CAG
taactgtattaggaagtgta

SEQ ID NO: 97776 - DNA, 20 bp, Artificial Sequence
  Description of Artificial Sequence: Synthetic oligonucleotide
  Target: LAMA2; (-) strand; PAM type: NRG; PAM sequence: AAG
gttggtgtaactgtattagg

SEQ ID NO: 97777 - DNA, 20 bp, Artificial Sequence
  Description of Artificial Sequence: Synthetic oligonucleotide
  Target: LAMA2; (-) strand; PAM type: NRG; PAM sequence: AGG
gatgttggtgtaactgtatt

SEQ ID NO: 97778 - DNA, 20 bp, Artificial Sequence
  Description of Artificial Sequence: Synthetic oligonucleotide
  Target: LAMA2; (-) strand; PAM type: NRG; PAM sequence: TAG
tgatgttggtgtaactgtat

SEQ ID NO: 97779 - DNA, 20 bp, Artificial Sequence
  Description of Artificial Sequence: Synthetic oligonucleotide
  Target: LAMA2; (-) strand; PAM type: NRG; PAM sequence: TGG
taaattatagtcgatgatgt

SEQ ID NO: 97780 - DNA, 20 bp, Artificial Sequence
  Description of Artificial Sequence: Synthetic oligonucleotide
  Target: LAMA2; (-) strand; PAM type: NRG; PAM sequence: TAG
aaaatggggatcataaatta

SEQ ID NO: 97781 - DNA, 20 bp, Artificial Sequence
  Description of Artificial Sequence: Synthetic oligonucleotide
  Target: LAMA2; (-) strand; PAM type: NRG; PAM sequence: GGG
attctctcacccgtaaaatg

SEQ ID NO: 97782 - DNA, 20 bp, Artificial Sequence
  Description of Artificial Sequence: Synthetic oligonucleotide
  Target: LAMA2; (-) strand; PAM type: NRG; PAM sequence: GGG
aattctctcacccgtaaaat

SEQ ID NO: 97783 - DNA, 20 bp, Artificial Sequence
  Description of Artificial Sequence: Synthetic oligonucleotide
  Target: LAMA2; (-) strand; PAM type: NRG; PAM sequence: TGG
caattctctcacccgtaaaa

SEQ ID NO: 97784 - DNA, 20 bp, Artificial Sequence
  Description of Artificial Sequence: Synthetic oligonucleotide
  Target: LAMA2; (-) strand; PAM type: NRG; PAM sequence: GGG
ctgtgtaggtgtgtgatcat

SEQ ID NO: 97785 - DNA, 20 bp, Artificial Sequence
  Description of Artificial Sequence: Synthetic oligonucleotide
  Target: LAMA2; (-) strand; PAM type: NRG; PAM sequence: TGG
gctgtgtaggtgtgtgatca

SEQ ID NO: 97786 - DNA, 20 bp, Artificial Sequence
  Description of Artificial Sequence: Synthetic oligonucleotide
  Target: LAMA2; (-) strand; PAM type: NRG; PAM sequence: AGG
tgaggtttgaattgctgtgt

SEQ ID NO: 97787 - DNA, 20 bp, Artificial Sequence
  Description of Artificial Sequence: Synthetic oligonucleotide
  Target: LAMA2; (-) strand; PAM type: NRG; PAM sequence: TAG
ttgaggtttgaattgctgtg

SEQ ID NO: 97788 - DNA, 20 bp, Artificial Sequence
  Description of Artificial Sequence: Synthetic oligonucleotide
  Target: LAMA2; (-) strand; PAM type: NRG; PAM sequence: AGG
ttttggaaacagattcattg

SEQ ID NO: 97789 - DNA, 20 bp, Artificial Sequence
  Description of Artificial Sequence: Synthetic oligonucleotide
  Target: LAMA2; (-) strand; PAM type: NRG; PAM sequence: GAG
gttttggaaacagattcatt

SEQ ID NO: 97790 - DNA, 20 bp, Artificial Sequence
  Description of Artificial Sequence: Synthetic oligonucleotide
  Target: LAMA2; (-) strand; PAM type: NRG; PAM sequence: CAG
gtttacctaggttttggaaa

SEQ ID NO: 97791 - DNA, 20 bp, Artificial Sequence
  Description of Artificial Sequence: Synthetic oligonucleotide
  Target: LAMA2; (-) strand; PAM type: NRG; PAM sequence: TGG
gtacaagtttacctaggttt

SEQ ID NO: 97792 - DNA, 20 bp, Artificial Sequence
  Description of Artificial Sequence: Synthetic oligonucleotide
  Target: LAMA2; (-) strand; PAM type: NRG; PAM sequence: AGG
agttgagtacaagtttacct

SEQ ID NO: 97793 - DNA, 20 bp, Artificial Sequence
  Description of Artificial Sequence: Synthetic oligonucleotide
  Target: LAMA2; (-) strand; PAM type: NRG; PAM sequence: TAG
tagttgagtacaagtttacc

SEQ ID NO: 97794 - DNA, 20 bp, Artificial Sequence
  Description of Artificial Sequence: Synthetic oligonucleotide
  Target: LAMA2; (-) strand; PAM type: NRG; PAM sequence: AAG
ataatataatagttgagtac

SEQ ID NO: 97795 - DNA, 20 bp, Artificial Sequence
  Description of Artificial Sequence: Synthetic oligonucleotide
  Target: LAMA2; (-) strand; PAM type: NRG; PAM sequence: GAG
gactgcataatataatagtt

SEQ ID NO: 97796 - DNA, 20 bp, Artificial Sequence
  Description of Artificial Sequence: Synthetic oligonucleotide
  Target: LAMA2; (-) strand; PAM type: NRG; PAM sequence: TAG
cacatgactgcataatataa

SEQ ID NO: 97797 - DNA, 20 bp, Artificial Sequence
  Description of Artificial Sequence: Synthetic oligonucleotide
  Target: LAMA2; (-) strand; PAM type: NRG; PAM sequence: CAG
aacgtatccctgtcgttaag

SEQ ID NO: 97798 - DNA, 20 bp, Artificial Sequence
  Description of Artificial Sequence: Synthetic oligonucleotide
  Target: LAMA2; (-) strand; PAM type: NRG; PAM sequence: AAG
cagaacgtatccctgtcgtt

SEQ ID NO: 97799 - DNA, 20 bp, Artificial Sequence
  Description of Artificial Sequence: Synthetic oligonucleotide
  Target: LAMA2; (-) strand; PAM type: NRG; PAM sequence: CAG
tcacctaacgacacatttct

SEQ ID NO: 97800 - DNA, 20 bp, Artificial Sequence
  Description of Artificial Sequence: Synthetic oligonucleotide
  Target: LAMA2; (-) strand; PAM type: NRG; PAM sequence: GAG
tatgatgtttgcacaatgag

SEQ ID NO: 97801 - DNA, 20 bp, Artificial Sequence
  Description of Artificial Sequence: Synthetic oligonucleotide
  Target: LAMA2; (-) strand; PAM type: NRG; PAM sequence: AGG
tctatgatgtttgcacaatg

SEQ ID NO: 97802 - DNA, 20 bp, Artificial Sequence
  Description of Artificial Sequence: Synthetic oligonucleotide
  Target: LAMA2; (-) strand; PAM type: NRG; PAM sequence: GAG
ctctatgatgtttgcacaat

SEQ ID NO: 97803 - DNA, 20 bp, Artificial Sequence
  Description of Artificial Sequence: Synthetic oligonucleotide
  Target: LAMA2; (-) strand; PAM type: NRG; PAM sequence: AGG
tgtagtaggctacaccattt

SEQ ID NO: 97804 - DNA, 20 bp, Artificial Sequence
  Description of Artificial Sequence: Synthetic oligonucleotide
  Target: LAMA2; (-) strand; PAM type: NRG; PAM sequence: TAG
gtgtagtaggctacaccatt

SEQ ID NO: 97805 - DNA, 20 bp, Artificial Sequence
  Description of Artificial Sequence: Synthetic oligonucleotide
  Target: LAMA2; (-) strand; PAM type: NRG; PAM sequence: AGG
atgtagcctaggtgtgtagt

SEQ ID NO: 97806 - DNA, 20 bp, Artificial Sequence
  Description of Artificial Sequence: Synthetic oligonucleotide
  Target: LAMA2; (-) strand; PAM type: NRG; PAM sequence: TAG
catgtagcctaggtgtgtag

SEQ ID NO: 97807 - DNA, 20 bp, Artificial Sequence
  Description of Artificial Sequence: Synthetic oligonucleotide
  Target: LAMA2; (-) strand; PAM type: NRG; PAM sequence: TAG
tcccatgtagcctaggtgtg

SEQ ID NO: 97808 - DNA, 20 bp, Artificial Sequence
  Description of Artificial Sequence: Synthetic oligonucleotide
  Target: LAMA2; (-) strand; PAM type: NRG; PAM sequence: AGG
caggctatcccatgtagcct

SEQ ID NO: 97809 - DNA, 20 bp, Artificial Sequence
  Description of Artificial Sequence: Synthetic oligonucleotide
  Target: LAMA2; (-) strand; PAM type: NRG; PAM sequence: TAG
acaggctatcccatgtagcc

SEQ ID NO: 97810 - DNA, 20 bp, Artificial Sequence
  Description of Artificial Sequence: Synthetic oligonucleotide
  Target: LAMA2; (-) strand; PAM type: NRG; PAM sequence: TAG
gagcaacaggctatcccatg

SEQ ID NO: 97811 - DNA, 20 bp, Artificial Sequence
  Description of Artificial Sequence: Synthetic oligonucleotide
  Target: LAMA2; (-) strand; PAM type: NRG; PAM sequence: AGG
gtctgtagcctaggagcaac

SEQ ID NO: 97812 - DNA, 20 bp, Artificial Sequence
  Description of Artificial Sequence: Synthetic oligonucleotide
  Target: LAMA2; (-) strand; PAM type: NRG; PAM sequence: CAG
ggtctgtagcctaggagcaa

SEQ ID NO: 97813 - DNA, 20 bp, Artificial Sequence
  Description of Artificial Sequence: Synthetic oligonucleotide
  Target: LAMA2; (-) strand; PAM type: NRG; PAM sequence: GAG
tgtgcaggtctgtagcctag

SEQ ID NO: 97814 - DNA, 20 bp, Artificial Sequence
  Description of Artificial Sequence: Synthetic oligonucleotide
  Target: LAMA2; (-) strand; PAM type: NRG; PAM sequence: AGG
gctgtgcaggtctgtagcct

SEQ ID NO: 97815 - DNA, 20 bp, Artificial Sequence
  Description of Artificial Sequence: Synthetic oligonucleotide
  Target: LAMA2; (-) strand; PAM type: NRG; PAM sequence: TAG
tgctgtgcaggtctgtagcc

SEQ ID NO: 97816 - DNA, 20 bp, Artificial Sequence
  Description of Artificial Sequence: Synthetic oligonucleotide
  Target: LAMA2; (-) strand; PAM type: NRG; PAM sequence: TAG
taacatgctgtgcaggtctg

SEQ ID NO: 97817 - DNA, 20 bp, Artificial Sequence
  Description of Artificial Sequence: Synthetic oligonucleotide
  Target: LAMA2; (-) strand; PAM type: NRG; PAM sequence: AGG
gtaccaataacatgctgtgc

SEQ ID NO: 97818 - DNA, 20 bp, Artificial Sequence
  Description of Artificial Sequence: Synthetic oligonucleotide
  Target: LAMA2; (-) strand; PAM type: NRG; PAM sequence: CAG
agtaccaataacatgctgtg

SEQ ID NO: 97819 - DNA, 20 bp, Artificial Sequence
  Description of Artificial Sequence: Synthetic oligonucleotide
  Target: LAMA2; (-) strand; PAM type: NRG; PAM sequence: CAG
ttacaattgcctactgtatt

SEQ ID NO: 97820 - DNA, 20 bp, Artificial Sequence
  Description of Artificial Sequence: Synthetic oligonucleotide
  Target: LAMA2; (-) strand; PAM type: NRG; PAM sequence: TAG
ttgctatgtttaaatatgtt

SEQ ID NO: 97821 - DNA, 20 bp, Artificial Sequence
  Description of Artificial Sequence: Synthetic oligonucleotide
  Target: LAMA2; (-) strand; PAM type: NRG; PAM sequence: AAG
gtgtacgacagtggtcccat

SEQ ID NO: 97822 - DNA, 20 bp, Artificial Sequence
  Description of Artificial Sequence: Synthetic oligonucleotide
  Target: LAMA2; (-) strand; PAM type: NRG; PAM sequence: TGG
taggaccatgtgtacgacag

SEQ ID NO: 97823 - DNA, 20 bp, Artificial Sequence
  Description of Artificial Sequence: Synthetic oligonucleotide
  Target: LAMA2; (-) strand; PAM type: NRG; PAM sequence: CAG
tgataggaccatgtgtacga

SEQ ID NO: 97824 - DNA, 20 bp, Artificial Sequence
  Description of Artificial Sequence: Synthetic oligonucleotide
  Target: LAMA2; (-) strand; PAM type: NRG; PAM sequence: AGG
atgacattttggtcaatgat

SEQ ID NO: 97825 - DNA, 20 bp, Artificial Sequence
  Description of Artificial Sequence: Synthetic oligonucleotide
  Target: LAMA2; (-) strand; PAM type: NRG; PAM sequence: TAG
aatgacattttggtcaatga

SEQ ID NO: 97826 - DNA, 20 bp, Artificial Sequence
  Description of Artificial Sequence: Synthetic oligonucleotide
  Target: LAMA2; (-) strand; PAM type: NRG; PAM sequence: TGG
gctgctgcataatgacattt

SEQ ID NO: 97827 - DNA, 20 bp, Artificial Sequence
  Description of Artificial Sequence: Synthetic oligonucleotide
  Target: LAMA2; (-) strand; PAM type: NRG; PAM sequence: CAG
tggaatgtaggaatattgta

SEQ ID NO: 97828 - DNA, 20 bp, Artificial Sequence
  Description of Artificial Sequence: Synthetic oligonucleotide
  Target: LAMA2; (-) strand; PAM type: NRG; PAM sequence: AGG
ggtttcctcacctggaatgt

SEQ ID NO: 97829 - DNA, 20 bp, Artificial Sequence
  Description of Artificial Sequence: Synthetic oligonucleotide
  Target: LAMA2; (-) strand; PAM type: NRG; PAM sequence: TAG
tggtttcctcacctggaatg

SEQ ID NO: 97830 - DNA, 20 bp, Artificial Sequence
  Description of Artificial Sequence: Synthetic oligonucleotide
  Target: LAMA2; (-) strand; PAM type: NRG; PAM sequence: TGG
tgtgccttggtttcctcacc

SEQ ID NO: 97831 - DNA, 20 bp, Artificial Sequence
  Description of Artificial Sequence: Synthetic oligonucleotide
  Target: LAMA2; (-) strand; PAM type: NRG; PAM sequence: TGG
gttctgaatactgtgtgcct

SEQ ID NO: 97832 - DNA, 20 bp, Artificial Sequence
  Description of Artificial Sequence: Synthetic oligonucleotide
  Target: LAMA2; (-) strand; PAM type: NRG; PAM sequence: AGG
tcaccactttgtatgtagta

SEQ ID NO: 97833 - DNA, 20 bp, Artificial Sequence
  Description of Artificial Sequence: Synthetic oligonucleotide
  Target: LAMA2; (-) strand; PAM type: NRG; PAM sequence: AAG
ttcaccactttgtatgtagt

SEQ ID NO: 97834 - DNA, 20 bp, Artificial Sequence
  Description of Artificial Sequence: Synthetic oligonucleotide
  Target: LAMA2; (-) strand; PAM type: NRG; PAM sequence: TAG
ctgtttcaccactttgtatg

SEQ ID NO: 97835 - DNA, 20 bp, Artificial Sequence
  Description of Artificial Sequence: Synthetic oligonucleotide
  Target: LAMA2; (-) strand; PAM type: NRG; PAM sequence: GAG
ttttgcaatcaggcagaccc

SEQ ID NO: 97836 - DNA, 20 bp, Artificial Sequence
  Description of Artificial Sequence: Synthetic oligonucleotide
  Target: LAMA2; (-) strand; PAM type: NRG; PAM sequence: CAG
gcatggattttgcaatcagg

SEQ ID NO: 97837 - DNA, 20 bp, Artificial Sequence
  Description of Artificial Sequence: Synthetic oligonucleotide
  Target: LAMA2; (-) strand; PAM type: NRG; PAM sequence: AGG
tttgcatggattttgcaatc

SEQ ID NO: 97838 - DNA, 20 bp, Artificial Sequence
  Description of Artificial Sequence: Synthetic oligonucleotide
  Target: LAMA2; (-) strand; PAM type: NRG; PAM sequence: CAG
ctttgcatggattttgcaat

SEQ ID NO: 97839 - DNA, 20 bp, Artificial Sequence
  Description of Artificial Sequence: Synthetic oligonucleotide
  Target: LAMA2; (-) strand; PAM type: NRG; PAM sequence: TGG
ctctatcttgtatctttgca

SEQ ID NO: 97840 - DNA, 20 bp, Artificial Sequence
  Description of Artificial Sequence: Synthetic oligonucleotide
  Target: LAMA2; (-) strand; PAM type: NRG; PAM sequence: GAG
aaaaatagatgcttgtgctg

SEQ ID NO: 97841 - DNA, 20 bp, Artificial Sequence
  Description of Artificial Sequence: Synthetic oligonucleotide
  Target: LAMA2; (-) strand; PAM type: NRG; PAM sequence: TGG
ataaaaatagatgcttgtgc

SEQ ID NO: 97842 - DNA, 20 bp, Artificial Sequence
  Description of Artificial Sequence: Synthetic oligonucleotide
  Target: LAMA2; (-) strand; PAM type: NRG; PAM sequence: TAG
tcagagtttagtaataaaaa

SEQ ID NO: 97843 - DNA, 20 bp, Artificial Sequence
  Description of Artificial Sequence: Synthetic oligonucleotide
  Target: LAMA2; (-) strand; PAM type: NRG; PAM sequence: TAG
tcctttctttcttcagagtt

SEQ ID NO: 97844 - DNA, 20 bp, Artificial Sequence
  Description of Artificial Sequence: Synthetic oligonucleotide
  Target: LAMA2; (-) strand; PAM type: NRG; PAM sequence: GAG
tgcgctcctttctttcttca

SEQ ID NO: 97845 - DNA, 20 bp, Artificial Sequence
  Description of Artificial Sequence: Synthetic oligonucleotide
  Target: LAMA2; (-) strand; PAM type: NRG; PAM sequence: CAG
actgcgctcctttctttctt

SEQ ID NO: 97846 - DNA, 20 bp, Artificial Sequence
  Description of Artificial Sequence: Synthetic oligonucleotide
  Target: LAMA2; (-) strand; PAM type: NRG; PAM sequence: GGG
cctatcctatcctaggctca

SEQ ID NO: 97847 - DNA, 20 bp, Artificial Sequence
  Description of Artificial Sequence: Synthetic oligonucleotide
  Target: LAMA2; (-) strand; PAM type: NRG; PAM sequence: AGG
acctatcctatcctaggctc

SEQ ID NO: 97848 - DNA, 20 bp, Artificial Sequence
  Description of Artificial Sequence: Synthetic oligonucleotide
  Target: LAMA2; (-) strand; PAM type: NRG; PAM sequence: CAG
gacctatcctatcctaggct

SEQ ID NO: 97849 - DNA, 20 bp, Artificial Sequence
  Description of Artificial Sequence: Synthetic oligonucleotide
  Target: LAMA2; (-) strand; PAM type: NRG; PAM sequence: AGG
gtagagacctatcctatcct

SEQ ID NO: 97850 - DNA, 20 bp, Artificial Sequence
  Description of Artificial Sequence: Synthetic oligonucleotide
  Target: LAMA2; (-) strand; PAM type: NRG; PAM sequence: TAG
tgtagagacctatcctatcc

SEQ ID NO: 97851 - DNA, 20 bp, Artificial Sequence
  Description of Artificial Sequence: Synthetic oligonucleotide
  Target: LAMA2; (-) strand; PAM type: NRG; PAM sequence: GAG
agagaatgaagcagactgta

SEQ ID NO: 97852 - DNA, 20 bp, Artificial Sequence
  Description of Artificial Sequence: Synthetic oligonucleotide
  Target: LAMA2; (-) strand; PAM type: NRG; PAM sequence: TAG
ggagagaatgaagcagactg

SEQ ID NO: 97853 - DNA, 20 bp, Artificial Sequence
  Description of Artificial Sequence: Synthetic oligonucleotide
  Target: LAMA2; (-) strand; PAM type: NRG; PAM sequence: CAG
gtagagaggagagaatgaag

SEQ ID NO: 97854 - DNA, 20 bp, Artificial Sequence
  Description of Artificial Sequence: Synthetic oligonucleotide
  Target: LAMA2; (-) strand; PAM type: NRG; PAM sequence: AAG
agggtagagaggagagaatg

SEQ ID NO: 97855 - DNA, 20 bp, Artificial Sequence
  Description of Artificial Sequence: Synthetic oligonucleotide
  Target: LAMA2; (-) strand; PAM type: NRG; PAM sequence: GAG
atgtgggagggtagagagga

SEQ ID NO: 97856 - DNA, 20 bp, Artificial Sequence
  Description of Artificial Sequence: Synthetic oligonucleotide
  Target: LAMA2; (-) strand; PAM type: NRG; PAM sequence: GAG
aaatgtgggagggtagagag

SEQ ID NO: 97857 - DNA, 20 bp, Artificial Sequence
  Description of Artificial Sequence: Synthetic oligonucleotide
  Target: LAMA2; (-) strand; PAM type: NRG; PAM sequence: AGG
aaaaatgtgggagggtagag

SEQ ID NO: 97858 - DNA, 20 bp, Artificial Sequence
  Description of Artificial Sequence: Synthetic oligonucleotide
  Target: LAMA2; (-) strand; PAM type: NRG; PAM sequence: GAG
caaaaatgtgggagggtaga

SEQ ID NO: 97859 - DNA, 20 bp, Artificial Sequence
  Description of Artificial Sequence: Synthetic oligonucleotide
  Target: LAMA2; (-) strand; PAM type: NRG; PAM sequence: GAG
cacaaaaatgtgggagggta

SEQ ID NO: 97860 - DNA, 20 bp, Artificial Sequence
  Description of Artificial Sequence: Synthetic oligonucleotide
  Target: LAMA2; (-) strand; PAM type: NRG; PAM sequence: TAG
tacacaaaaatgtgggaggg

SEQ ID NO: 97861 - DNA, 20 bp, Artificial Sequence
  Description of Artificial Sequence: Synthetic oligonucleotide
  Target: LAMA2; (-) strand; PAM type: NRG; PAM sequence: GGG
atttacacaaaaatgtggga

SEQ ID NO: 97862 - DNA, 20 bp, Artificial Sequence
  Description of Artificial Sequence: Synthetic oligonucleotide
  Target: LAMA2; (-) strand; PAM type: NRG; PAM sequence: AGG
aatttacacaaaaatgtggg

SEQ ID NO: 97863 - DNA, 20 bp, Artificial Sequence
  Description of Artificial Sequence: Synthetic oligonucleotide
  Target: LAMA2; (-) strand; PAM type: NRG; PAM sequence: GAG
aaatttacacaaaaatgtgg

SEQ ID NO: 97864 - DNA, 20 bp, Artificial Sequence
  Description of Artificial Sequence: Synthetic oligonucleotide
  Target: LAMA2; (-) strand; PAM type: NRG; PAM sequence: GGG
ttaaatttacacaaaaatgt

SEQ ID NO: 97865 - DNA, 20 bp, Artificial Sequence
  Description of Artificial Sequence: Synthetic oligonucleotide
  Target: LAMA2; (-) strand; PAM type: NRG; PAM sequence: TGG
attaaatttacacaaaaatg

SEQ ID NO: 97866 - DNA, 20 bp, Artificial Sequence
  Description of Artificial Sequence: Synthetic oligonucleotide
  Target: LAMA2; (-) strand; PAM type: NRG; PAM sequence: TAG
atattgtttcatcaaaaaat

SEQ ID NO: 97867 - DNA, 20 bp, Artificial Sequence
  Description of Artificial Sequence: Synthetic oligonucleotide
  Target: LAMA2; (-) strand; PAM type: NRG; PAM sequence: TGG
cccactgttgaaattattca

SEQ ID NO: 97868 - DNA, 20 bp, Artificial Sequence
  Description of Artificial Sequence: Synthetic oligonucleotide
  Target: LAMA2; (-) strand; PAM type: NRG; PAM sequence: AAG
ctctaatttaaacttttcca

SEQ ID NO: 97869 - DNA, 20 bp, Artificial Sequence
  Description of Artificial Sequence: Synthetic oligonucleotide
  Target: LAMA2; (-) strand; PAM type: NRG; PAM sequence: GAG
aagcaaataaatactttcct

SEQ ID NO: 97870 - DNA, 20 bp, Artificial Sequence
  Description of Artificial Sequence: Synthetic oligonucleotide
  Target: LAMA2; (-) strand; PAM type: NRG; PAM sequence: AAG
cacaatggggaattaaagaa

SEQ ID NO: 97871 - DNA, 20 bp, Artificial Sequence
  Description of Artificial Sequence: Synthetic oligonucleotide
  Target: LAMA2; (-) strand; PAM type: NRG; PAM sequence: AAG
tggaacacaatggggaatta

SEQ ID NO: 97872 - DNA, 20 bp, Artificial Sequence
  Description of Artificial Sequence: Synthetic oligonucleotide
  Target: LAMA2; (-) strand; PAM type: NRG; PAM sequence: GGG
atcctttctggaacacaatg

SEQ ID NO: 97873 - DNA, 20 bp, Artificial Sequence
  Description of Artificial Sequence: Synthetic oligonucleotide
  Target: LAMA2; (-) strand; PAM type: NRG; PAM sequence: GGG
aatcctttctggaacacaat

SEQ ID NO: 97874 - DNA, 20 bp, Artificial Sequence
  Description of Artificial Sequence: Synthetic oligonucleotide
  Target: LAMA2; (-) strand; PAM type: NRG; PAM sequence: TGG
aaatcctttctggaacacaa

SEQ ID NO: 97875 - DNA, 20 bp, Artificial Sequence
  Description of Artificial Sequence: Synthetic oligonucleotide
  Target: LAMA2; (-) strand; PAM type: NRG; PAM sequence: TGG
gtcccatctaaaatcctttc

SEQ ID NO: 97876 - DNA, 20 bp, Artificial Sequence
  Description of Artificial Sequence: Synthetic oligonucleotide
  Target: LAMA2; (-) strand; PAM type: NRG; PAM sequence: GAG
aagcaaaaaagttacttttt

SEQ ID NO: 97877 - DNA, 20 bp, Artificial Sequence
  Description of Artificial Sequence: Synthetic oligonucleotide
  Target: LAMA2; (-) strand; PAM type: NRG; PAM sequence: AAG
tgttggaattggaagcaaaa

SEQ ID NO: 97878 - DNA, 20 bp, Artificial Sequence
  Description of Artificial Sequence: Synthetic oligonucleotide
  Target: LAMA2; (-) strand; PAM type: NRG; PAM sequence: AAG
aatgattatgttggaattgg

SEQ ID NO: 97879 - DNA, 20 bp, Artificial Sequence
  Description of Artificial Sequence: Synthetic oligonucleotide
  Target: LAMA2; (-) strand; PAM type: NRG; PAM sequence: TGG
gagaatgattatgttggaat

SEQ ID NO: 97880 - DNA, 20 bp, Artificial Sequence
  Description of Artificial Sequence: Synthetic oligonucleotide
  Target: LAMA2; (-) strand; PAM type: NRG; PAM sequence: TGG
gtttgtgagaatgattatgt

SEQ ID NO: 97881 - DNA, 20 bp, Artificial Sequence
  Description of Artificial Sequence: Synthetic oligonucleotide
  Target: LAMA2; (-) strand; PAM type: NRG; PAM sequence: GAG
gaactgagacaaaagtttgt

SEQ ID NO: 97882 - DNA, 20 bp, Artificial Sequence
  Description of Artificial Sequence: Synthetic oligonucleotide
  Target: LAMA2; (-) strand; PAM type: NRG; PAM sequence: AAG
ctcttggtgaactgagacaa

SEQ ID NO: 97883 - DNA, 20 bp, Artificial Sequence
  Description of Artificial Sequence: Synthetic oligonucleotide
  Target: LAMA2; (-) strand; PAM type: NRG; PAM sequence: GAG
gtttttcctcttggtgaact

SEQ ID NO: 97884 - DNA, 20 bp, Artificial Sequence
  Description of Artificial Sequence: Synthetic oligonucleotide
  Target: LAMA2; (-) strand; PAM type: NRG; PAM sequence: TGG
atattgaatgtttttcctct

SEQ ID NO: 97885 - DNA, 20 bp, Artificial Sequence
  Description of Artificial Sequence: Synthetic oligonucleotide
  Target: LAMA2; (-) strand; PAM type: NRG; PAM sequence: GGG
ttcaatttaaataattttta

SEQ ID NO: 97886 - DNA, 20 bp, Artificial Sequence
  Description of Artificial Sequence: Synthetic oligonucleotide
  Target: LAMA2; (-) strand; PAM type: NRG; PAM sequence: AGG
tttcaatttaaataattttt

SEQ ID NO: 97887 - DNA, 20 bp, Artificial Sequence
  Description of Artificial Sequence: Synthetic oligonucleotide
  Target: LAMA2; (-) strand; PAM type: NRG; PAM sequence: TAG
ctttcaatttaaataatttt

SEQ ID NO: 97888 - DNA, 20 bp, Artificial Sequence
  Description of Artificial Sequence: Synthetic oligonucleotide
  Target: LAMA2; (-) strand; PAM type: NRG; PAM sequence: CAG
gttttttttaaaaaaaaaaa

SEQ ID NO: 97889 - DNA, 20 bp, Artificial Sequence
  Description of Artificial Sequence: Synthetic oligonucleotide
  Target: LAMA2; (-) strand; PAM type: NRG; PAM sequence: TAG
gtatttgacaacgcaaagat

SEQ ID NO: 97890 - DNA, 20 bp, Artificial Sequence
  Description of Artificial Sequence: Synthetic oligonucleotide
  Target: LAMA2; (-) strand; PAM type: NRG; PAM sequence: AAG
agagagtatttgacaacgca

SEQ ID NO: 97891 - DNA, 20 bp, Artificial Sequence
  Description of Artificial Sequence: Synthetic oligonucleotide
  Target: LAMA2; (-) strand; PAM type: NRG; PAM sequence: GAG
ggtagcaaaagagagagaga

SEQ ID NO: 97892 - DNA, 20 bp, Artificial Sequence
  Description of Artificial Sequence: Synthetic oligonucleotide
  Target: LAMA2; (-) strand; PAM type: NRG; PAM sequence: GAG
gaggtagcaaaagagagaga

SEQ ID NO: 97893 - DNA, 20 bp, Artificial Sequence
  Description of Artificial Sequence: Synthetic oligonucleotide
  Target: LAMA2; (-) strand; PAM type: NRG; PAM sequence: GAG
atgaggtagcaaaagagaga

SEQ ID NO: 97894 - DNA, 20 bp, Artificial Sequence
  Description of Artificial Sequence: Synthetic oligonucleotide
  Target: LAMA2; (-) strand; PAM type: NRG; PAM sequence: GAG
ctatgaggtagcaaaagaga

SEQ ID NO: 97895 - DNA, 20 bp, Artificial Sequence
  Description of Artificial Sequence: Synthetic oligonucleotide
  Target: LAMA2; (-) strand; PAM type: NRG; PAM sequence: GAG
ttctatgaggtagcaaaaga

SEQ ID NO: 97896 - DNA, 20 bp, Artificial Sequence
  Description of Artificial Sequence: Synthetic oligonucleotide
  Target: LAMA2; (-) strand; PAM type: NRG; PAM sequence: GAG
atttctatgaggtagcaaaa

SEQ ID NO: 97897 - DNA, 20 bp, Artificial Sequence
  Description of Artificial Sequence: Synthetic oligonucleotide
  Target: LAMA2; (-) strand; PAM type: NRG; PAM sequence: AAG
aaatttctatgaggtagcaa

SEQ ID NO: 97898 - DNA, 20 bp, Artificial Sequence
  Description of Artificial Sequence: Synthetic oligonucleotide
  Target: LAMA2; (-) strand; PAM type: NRG; PAM sequence: TAG
tggattaaatttctatgagg

SEQ ID NO: 97899 - DNA, 20 bp, Artificial Sequence
  Description of Artificial Sequence: Synthetic oligonucleotide
  Target: LAMA2; (-) strand; PAM type: NRG; PAM sequence: AGG
tgatggattaaatttctatg

SEQ ID NO: 97900 - DNA, 20 bp, Artificial Sequence
  Description of Artificial Sequence: Synthetic oligonucleotide
  Target: LAMA2; (-) strand; PAM type: NRG; PAM sequence: GAG
ctgatggattaaatttctat

SEQ ID NO: 97901 - DNA, 20 bp, Artificial Sequence
  Description of Artificial Sequence: Synthetic oligonucleotide
  Target: LAMA2; (-) strand; PAM type: NRG; PAM sequence: TGG
tgatttatttcgtatcctga

SEQ ID NO: 97902 - DNA, 20 bp, Artificial Sequence
  Description of Artificial Sequence: Synthetic oligonucleotide
  Target: LAMA2; (-) strand; PAM type: NRG; PAM sequence: TAG
tcagttttaacattttagat

SEQ ID NO: 97903 - DNA, 20 bp, Artificial Sequence
  Description of Artificial Sequence: Synthetic oligonucleotide
  Target: LAMA2; (-) strand; PAM type: NRG; PAM sequence: TAG
gtctttcagttttaacattt

SEQ ID NO: 97904 - DNA, 20 bp, Artificial Sequence
  Description of Artificial Sequence: Synthetic oligonucleotide
  Target: LAMA2; (-) strand; PAM type: NRG; PAM sequence: CAG
atgacttctaaagtgtcttt

SEQ ID NO: 97905 - DNA, 20 bp, Artificial Sequence
  Description of Artificial Sequence: Synthetic oligonucleotide
  Target: LAMA2; (-) strand; PAM type: NRG; PAM sequence: AAG
gttaactcagatgacttcta

SEQ ID NO: 97906 - DNA, 20 bp, Artificial Sequence
  Description of Artificial Sequence: Synthetic oligonucleotide
  Target: LAMA2; (-) strand; PAM type: NRG; PAM sequence: CAG
cacaaatgagtaggttaact

SEQ ID NO: 97907 - DNA, 20 bp, Artificial Sequence
  Description of Artificial Sequence: Synthetic oligonucleotide
  Target: LAMA2; (-) strand; PAM type: NRG; PAM sequence: AGG
tcctcatcccacaaatgagt

SEQ ID NO: 97908 - DNA, 20 bp, Artificial Sequence
  Description of Artificial Sequence: Synthetic oligonucleotide
  Target: LAMA2; (-) strand; PAM type: NRG; PAM sequence: TAG
ttcctcatcccacaaatgag

SEQ ID NO: 97909 - DNA, 20 bp, Artificial Sequence
  Description of Artificial Sequence: Synthetic oligonucleotide
  Target: LAMA2; (-) strand; PAM type: NRG; PAM sequence: GAG
agtttcctcatcccacaaat

SEQ ID NO: 97910 - DNA, 20 bp, Artificial Sequence
  Description of Artificial Sequence: Synthetic oligonucleotide
  Target: LAMA2; (-) strand; PAM type: NRG; PAM sequence: CAG
gggcaagttactttgagacc

SEQ ID NO: 97911 - DNA, 20 bp, Artificial Sequence
  Description of Artificial Sequence: Synthetic oligonucleotide
  Target: LAMA2; (-) strand; PAM type: NRG; PAM sequence: GAG
agatatgggcaagttacttt

SEQ ID NO: 97912 - DNA, 20 bp, Artificial Sequence
  Description of Artificial Sequence: Synthetic oligonucleotide
  Target: LAMA2; (-) strand; PAM type: NRG; PAM sequence: AAG
tttgtctgagagatatgggc

SEQ ID NO: 97913 - DNA, 20 bp, Artificial Sequence
  Description of Artificial Sequence: Synthetic oligonucleotide
  Target: LAMA2; (-) strand; PAM type: NRG; PAM sequence: GGG
tagttttgtctgagagatat

SEQ ID NO: 97914 - DNA, 20 bp, Artificial Sequence
  Description of Artificial Sequence: Synthetic oligonucleotide
  Target: LAMA2; (-) strand; PAM type: NRG; PAM sequence: TGG
ttagttttgtctgagagata

SEQ ID NO: 97915 - DNA, 20 bp, Artificial Sequence
  Description of Artificial Sequence: Synthetic oligonucleotide
  Target: LAMA2; (-) strand; PAM type: NRG; PAM sequence: GAG
tttatgttagttttgtctga

SEQ ID NO: 97916 - DNA, 20 bp, Artificial Sequence
  Description of Artificial Sequence: Synthetic oligonucleotide
  Target: LAMA2; (-) strand; PAM type: NRG; PAM sequence: GAG
attttatgttagttttgtct

SEQ ID NO: 97917 - DNA, 20 bp, Artificial Sequence
  Description of Artificial Sequence: Synthetic oligonucleotide
  Target: LAMA2; (-) strand; PAM type: NRG; PAM sequence: TAG
gggaagccttgattttatgt

SEQ ID NO: 97918 - DNA, 20 bp, Artificial Sequence
  Description of Artificial Sequence: Synthetic oligonucleotide
  Target: LAMA2; (-) strand; PAM type: NRG; PAM sequence: AAG
tataaaaggaatgaataggg

SEQ ID NO: 97919 - DNA, 20 bp, Artificial Sequence
  Description of Artificial Sequence: Synthetic oligonucleotide
  Target: LAMA2; (-) strand; PAM type: NRG; PAM sequence: GGG
tactataaaaggaatgaata

SEQ ID NO: 97920 - DNA, 20 bp, Artificial Sequence
  Description of Artificial Sequence: Synthetic oligonucleotide
  Target: LAMA2; (-) strand; PAM type: NRG; PAM sequence: AGG
gtactataaaaggaatgaat

SEQ ID NO: 97921 - DNA, 20 bp, Artificial Sequence
  Description of Artificial Sequence: Synthetic oligonucleotide
  Target: LAMA2; (-) strand; PAM type: NRG; PAM sequence: TAG
ggtactataaaaggaatgaa

SEQ ID NO: 97922 - DNA, 20 bp, Artificial Sequence
  Description of Artificial Sequence: Synthetic oligonucleotide
  Target: LAMA2; (-) strand; PAM type: NRG; PAM sequence: AGG
ccactccttggtactataaa

SEQ ID NO: 97923 - DNA, 20 bp, Artificial Sequence
  Description of Artificial Sequence: Synthetic oligonucleotide
  Target: LAMA2; (-) strand; PAM type: NRG; PAM sequence: AAG
accactccttggtactataa

SEQ ID NO: 97924 - DNA, 20 bp, Artificial Sequence
  Description of Artificial Sequence: Synthetic oligonucleotide
  Target: LAMA2; (-) strand; PAM type: NRG; PAM sequence: TGG
aaaaagtgcataccactcct

SEQ ID NO: 97925 - DNA, 20 bp, Artificial Sequence
  Description of Artificial Sequence: Synthetic oligonucleotide
  Target: LAMA2; (-) strand; PAM type: NRG; PAM sequence: AAG
aaaataaataaatacataaa

SEQ ID NO: 97926 - DNA, 20 bp, Artificial Sequence
  Description of Artificial Sequence: Synthetic oligonucleotide
  Target: LAMA2; (-) strand; PAM type: NRG; PAM sequence: GAG
tccagcctgagtgacaaagc

SEQ ID NO: 97927 - DNA, 20 bp, Artificial Sequence
  Description of Artificial Sequence: Synthetic oligonucleotide
  Target: LAMA2; (-) strand; PAM type: NRG; PAM sequence: AAG
gcactccagcctgagtgaca

SEQ ID NO: 97928 - DNA, 20 bp, Artificial Sequence
  Description of Artificial Sequence: Synthetic oligonucleotide
  Target: LAMA2; (-) strand; PAM type: NRG; PAM sequence: GAG
tggccactgcactccagcct

SEQ ID NO: 97929 - DNA, 20 bp, Artificial Sequence
  Description of Artificial Sequence: Synthetic oligonucleotide
  Target: LAMA2; (-) strand; PAM type: NRG; PAM sequence: CAG
gagatctggccactgcactc

SEQ ID NO: 97930 - DNA, 20 bp, Artificial Sequence
  Description of Artificial Sequence: Synthetic oligonucleotide
  Target: LAMA2; (-) strand; PAM type: NRG; PAM sequence: TGG
ggttgcagtaagctgagatc

SEQ ID NO: 97931 - DNA, 20 bp, Artificial Sequence
  Description of Artificial Sequence: Synthetic oligonucleotide
  Target: LAMA2; (-) strand; PAM type: NRG; PAM sequence: GAG
agtggaggttgcagtaagct

SEQ ID NO: 97932 - DNA, 20 bp, Artificial Sequence
  Description of Artificial Sequence: Synthetic oligonucleotide
  Target: LAMA2; (-) strand; PAM type: NRG; PAM sequence: AAG
tgggaagtggaggttgcagt

SEQ ID NO: 97933 - DNA, 20 bp, Artificial Sequence
  Description of Artificial Sequence: Synthetic oligonucleotide
  Target: LAMA2; (-) strand; PAM type: NRG; PAM sequence: CAG
aacctgggaagtggaggttg

SEQ ID NO: 97934 - DNA, 20 bp, Artificial Sequence
  Description of Artificial Sequence: Synthetic oligonucleotide
  Target: LAMA2; (-) strand; PAM type: NRG; PAM sequence: AGG
cgcttgaacctgggaagtgg

SEQ ID NO: 97935 - DNA, 20 bp, Artificial Sequence
  Description of Artificial Sequence: Synthetic oligonucleotide
  Target: LAMA2; (-) strand; PAM type: NRG; PAM sequence: GAG
tcgcttgaacctgggaagtg

SEQ ID NO: 97936 - DNA, 20 bp, Artificial Sequence
  Description of Artificial Sequence: Synthetic oligonucleotide
  Target: LAMA2; (-) strand; PAM type: NRG; PAM sequence: TGG
catcgcttgaacctgggaag

SEQ ID NO: 97937 - DNA, 20 bp, Artificial Sequence
  Description of Artificial Sequence: Synthetic oligonucleotide
  Target: LAMA2; (-) strand; PAM type: NRG; PAM sequence: AAG
gagcatcgcttgaacctggg

SEQ ID NO: 97938 - DNA, 20 bp, Artificial Sequence
  Description of Artificial Sequence: Synthetic oligonucleotide
  Target: LAMA2; (-) strand; PAM type: NRG; PAM sequence: GGG
cacgagcatcgcttgaacct

SEQ ID NO: 97939 - DNA, 20 bp, Artificial Sequence
  Description of Artificial Sequence: Synthetic oligonucleotide
  Target: LAMA2; (-) strand; PAM type: NRG; PAM sequence: TGG
gcacgagcatcgcttgaacc

SEQ ID NO: 97940 - DNA, 20 bp, Artificial Sequence
  Description of Artificial Sequence: Synthetic oligonucleotide
  Target: LAMA2; (-) strand; PAM type: NRG; PAM sequence: GAG
tactctggaggctgaggcac

SEQ ID NO: 97941 - DNA, 20 bp, Artificial Sequence
  Description of Artificial Sequence: Synthetic oligonucleotide
  Target: LAMA2; (-) strand; PAM type: NRG; PAM sequence: AGG
cccaactactctggaggctg

SEQ ID NO: 97942 - DNA, 20 bp, Artificial Sequence
  Description of Artificial Sequence: Synthetic oligonucleotide
  Target: LAMA2; (-) strand; PAM type: NRG; PAM sequence: GAG
tcccaactactctggaggct

SEQ ID NO: 97943 - DNA, 20 bp, Artificial Sequence
  Description of Artificial Sequence: Synthetic oligonucleotide
  Target: LAMA2; (-) strand; PAM type: NRG; PAM sequence: AGG
tgtagtcccaactactctgg

SEQ ID NO: 97944 - DNA, 20 bp, Artificial Sequence
  Description of Artificial Sequence: Synthetic oligonucleotide
  Target: LAMA2; (-) strand; PAM type: NRG; PAM sequence: GAG
ctgtagtcccaactactctg

SEQ ID NO: 97945 - DNA, 20 bp, Artificial Sequence
  Description of Artificial Sequence: Synthetic oligonucleotide
  Target: LAMA2; (-) strand; PAM type: NRG; PAM sequence: TGG
gtctgtagtcccaactactc

SEQ ID NO: 97946 - DNA, 20 bp, Artificial Sequence
  Description of Artificial Sequence: Synthetic oligonucleotide
  Target: LAMA2; (-) strand; PAM type: NRG; PAM sequence: TAG
ggcgtggtgatgcgtgtctg

SEQ ID NO: 97947 - DNA, 20 bp, Artificial Sequence
  Description of Artificial Sequence: Synthetic oligonucleotide
  Target: LAMA2; (-) strand; PAM type: NRG; PAM sequence: TGG
atacaaaaattagccaggcg

SEQ ID NO: 97948 - DNA, 20 bp, Artificial Sequence
  Description of Artificial Sequence: Synthetic oligonucleotide
  Target: LAMA2; (-) strand; PAM type: NRG; PAM sequence: AGG
taaaaatacaaaaattagcc

SEQ ID NO: 97949 - DNA, 20 bp, Artificial Sequence
  Description of Artificial Sequence: Synthetic oligonucleotide
  Target: LAMA2; (-) strand; PAM type: NRG; PAM sequence: CAG
ctaaaaatacaaaaattagc

SEQ ID NO: 97950 - DNA, 20 bp, Artificial Sequence
  Description of Artificial Sequence: Synthetic oligonucleotide
  Target: LAMA2; (-) strand; PAM type: NRG; PAM sequence: TAG
ttgactaaaaatacaaaaat

SEQ ID NO: 97951 - DNA, 20 bp, Artificial Sequence
  Description of Artificial Sequence: Synthetic oligonucleotide
  Target: LAMA2; (-) strand; PAM type: NRG; PAM sequence: TGG
ccagaccagcctggccaaca

SEQ ID NO: 97952 - DNA, 20 bp, Artificial Sequence
  Description of Artificial Sequence: Synthetic oligonucleotide
  Target: LAMA2; (-) strand; PAM type: NRG; PAM sequence: TGG
tcaggagttccagaccagcc

SEQ ID NO: 97953 - DNA, 20 bp, Artificial Sequence
  Description of Artificial Sequence: Synthetic oligonucleotide
  Target: LAMA2; (-) strand; PAM type: NRG; PAM sequence: CAG
tgaggtcaggagttccagac

SEQ ID NO: 97954 - DNA, 20 bp, Artificial Sequence
  Description of Artificial Sequence: Synthetic oligonucleotide
  Target: LAMA2; (-) strand; PAM type: NRG; PAM sequence: CAG
ttacttgaggtcaggagttc

SEQ ID NO: 97955 - DNA, 20 bp, Artificial Sequence
  Description of Artificial Sequence: Synthetic oligonucleotide
  Target: LAMA2; (-) strand; PAM type: NRG; PAM sequence: GAG
gctggattacttgaggtcag

SEQ ID NO: 97956 - DNA, 20 bp, Artificial Sequence
  Description of Artificial Sequence: Synthetic oligonucleotide
  Target: LAMA2; (-) strand; PAM type: NRG; PAM sequence: AGG
tggctggattacttgaggtc

SEQ ID NO: 97957 - DNA, 20 bp, Artificial Sequence
  Description of Artificial Sequence: Synthetic oligonucleotide
  Target: LAMA2; (-) strand; PAM type: NRG; PAM sequence: CAG
gtggctggattacttgaggt

SEQ ID NO: 97958 - DNA, 20 bp, Artificial Sequence
  Description of Artificial Sequence: Synthetic oligonucleotide
  Target: LAMA2; (-) strand; PAM type: NRG; PAM sequence: AGG
tgaggtggctggattacttg

SEQ ID NO: 97959 - DNA, 20 bp, Artificial Sequence
  Description of Artificial Sequence: Synthetic oligonucleotide
  Target: LAMA2; (-) strand; PAM type: NRG; PAM sequence: GAG
ctgaggtggctggattactt

SEQ ID NO: 97960 - DNA, 20 bp, Artificial Sequence
  Description of Artificial Sequence: Synthetic oligonucleotide
  Target: LAMA2; (-) strand; PAM type: NRG; PAM sequence: TGG
ttttgggaggctgaggtggc

SEQ ID NO: 97961 - DNA, 20 bp, Artificial Sequence
  Description of Artificial Sequence: Synthetic oligonucleotide
  Target: LAMA2; (-) strand; PAM type: NRG; PAM sequence: TGG
agcattttgggaggctgagg

SEQ ID NO: 97962 - DNA, 20 bp, Artificial Sequence
  Description of Artificial Sequence: Synthetic oligonucleotide
  Target: LAMA2; (-) strand; PAM type: NRG; PAM sequence: AGG
cccagcattttgggaggctg

SEQ ID NO: 97963 - DNA, 20 bp, Artificial Sequence
  Description of Artificial Sequence: Synthetic oligonucleotide
  Target: LAMA2; (-) strand; PAM type: NRG; PAM sequence: GAG
tcccagcattttgggaggct

SEQ ID NO: 97964 - DNA, 20 bp, Artificial Sequence
  Description of Artificial Sequence: Synthetic oligonucleotide
  Target: LAMA2; (-) strand; PAM type: NRG; PAM sequence: AGG
tgtaatcccagcattttggg

SEQ ID NO: 97965 - DNA, 20 bp, Artificial Sequence
  Description of Artificial Sequence: Synthetic oligonucleotide
  Target: LAMA2; (-) strand; PAM type: NRG; PAM sequence: GAG
ctgtaatcccagcattttgg

SEQ ID NO: 97966 - DNA, 20 bp, Artificial Sequence
  Description of Artificial Sequence: Synthetic oligonucleotide
  Target: LAMA2; (-) strand; PAM type: NRG; PAM sequence: GGG
gcctgtaatcccagcatttt

SEQ ID NO: 97967 - DNA, 20 bp, Artificial Sequence
  Description of Artificial Sequence: Synthetic oligonucleotide
  Target: LAMA2; (-) strand; PAM type: NRG; PAM sequence: TGG
cgcctgtaatcccagcattt

SEQ ID NO: 97968 - DNA, 20 bp, Artificial Sequence
  Description of Artificial Sequence: Synthetic oligonucleotide
  Target: LAMA2; (-) strand; PAM type: NRG; PAM sequence: CAG
gtggctcacgcctgtaatcc

SEQ ID NO: 97969 - DNA, 20 bp, Artificial Sequence
  Description of Artificial Sequence: Synthetic oligonucleotide
  Target: LAMA2; (-) strand; PAM type: NRG; PAM sequence: TGG
atggaaaaggcgagacatgg

SEQ ID NO: 97970 - DNA, 20 bp, Artificial Sequence
  Description of Artificial Sequence: Synthetic oligonucleotide
  Target: LAMA2; (-) strand; PAM type: NRG; PAM sequence: TGG
cacatggaaaaggcgagaca

SEQ ID NO: 97971 - DNA, 20 bp, Artificial Sequence
  Description of Artificial Sequence: Synthetic oligonucleotide
  Target: LAMA2; (-) strand; PAM type: NRG; PAM sequence: GAG
aaagggcacatggaaaaggc

SEQ ID NO: 97972 - DNA, 20 bp, Artificial Sequence
  Description of Artificial Sequence: Synthetic oligonucleotide
  Target: LAMA2; (-) strand; PAM type: NRG; PAM sequence: AGG
tttaaaagggcacatggaaa

SEQ ID NO: 97973 - DNA, 20 bp, Artificial Sequence
  Description of Artificial Sequence: Synthetic oligonucleotide
  Target: LAMA2; (-) strand; PAM type: NRG; PAM sequence: AAG
atttaaaagggcacatggaa

SEQ ID NO: 97974 - DNA, 20 bp, Artificial Sequence
  Description of Artificial Sequence: Synthetic oligonucleotide
  Target: LAMA2; (-) strand; PAM type: NRG; PAM sequence: TGG
tgtgcatttaaaagggcaca

SEQ ID NO: 97975 - DNA, 20 bp, Artificial Sequence
  Description of Artificial Sequence: Synthetic oligonucleotide
  Target: LAMA2; (-) strand; PAM type: NRG; PAM sequence: GGG
gtgtatgtgtgcatttaaaa

SEQ ID NO: 97976 - DNA, 20 bp, Artificial Sequence
  Description of Artificial Sequence: Synthetic oligonucleotide
  Target: LAMA2; (-) strand; PAM type: NRG; PAM sequence: AGG
tgtgtatgtgtgcatttaaa

SEQ ID NO: 97977 - DNA, 20 bp, Artificial Sequence
  Description of Artificial Sequence: Synthetic oligonucleotide
  Target: LAMA2; (-) strand; PAM type: NRG; PAM sequence: AAG
ttgtgtatgtgtgcatttaa

SEQ ID NO: 97978 - DNA, 20 bp, Artificial Sequence
  Description of Artificial Sequence: Synthetic oligonucleotide
  Target: LAMA2; (-) strand; PAM type: NRG; PAM sequence: AAG
tagagcgcagcgtcactggc

SEQ ID NO: 97979 - DNA, 20 bp, Artificial Sequence
  Description of Artificial Sequence: Synthetic oligonucleotide
  Target: LAMA2; (-) strand; PAM type: NRG; PAM sequence: TGG
caattagagcgcagcgtcac

SEQ ID NO: 97980 - DNA, 20 bp, Artificial Sequence
  Description of Artificial Sequence: Synthetic oligonucleotide
  Target: LAMA2; (-) strand; PAM type: NRG; PAM sequence: CAG
tctaacagacaattagagcg

SEQ ID NO: 97981 - DNA, 20 bp, Artificial Sequence
  Description of Artificial Sequence: Synthetic oligonucleotide
  Target: LAMA2; (-) strand; PAM type: NRG; PAM sequence: GAG
aaaagtctaacagacaatta

SEQ ID NO: 97982 - DNA, 20 bp, Artificial Sequence
  Description of Artificial Sequence: Synthetic oligonucleotide
  Target: LAMA2; (-) strand; PAM type: NRG; PAM sequence: TAG
agaaaagtctaacagacaat

SEQ ID NO: 97983 - DNA, 20 bp, Artificial Sequence
  Description of Artificial Sequence: Synthetic oligonucleotide
  Target: LAMA2; (-) strand; PAM type: NRG; PAM sequence: CAG
aaactcttagaaaagtctaa

SEQ ID NO: 97984 - DNA, 20 bp, Artificial Sequence
  Description of Artificial Sequence: Synthetic oligonucleotide
  Target: LAMA2; (-) strand; PAM type: NRG; PAM sequence: AAG
ttgttttaaaactcttagaa

SEQ ID NO: 97985 - DNA, 20 bp, Artificial Sequence
  Description of Artificial Sequence: Synthetic oligonucleotide
  Target: LAMA2; (-) strand; PAM type: NRG; PAM sequence: TAG
cgagtttgttttaaaactct

SEQ ID NO: 97986 - DNA, 20 bp, Artificial Sequence
  Description of Artificial Sequence: Synthetic oligonucleotide
  Target: LAMA2; (-) strand; PAM type: NRG; PAM sequence: GAG
ctgggggagagttgaggccc

SEQ ID NO: 97987 - DNA, 20 bp, Artificial Sequence
  Description of Artificial Sequence: Synthetic oligonucleotide
  Target: LAMA2; (-) strand; PAM type: NRG; PAM sequence: AGG
attcctctgggggagagttg

SEQ ID NO: 97988 - DNA, 20 bp, Artificial Sequence
  Description of Artificial Sequence: Synthetic oligonucleotide
  Target: LAMA2; (-) strand; PAM type: NRG; PAM sequence: GAG
aattcctctgggggagagtt

SEQ ID NO: 97989 - DNA, 20 bp, Artificial Sequence
  Description of Artificial Sequence: Synthetic oligonucleotide
  Target: LAMA2; (-) strand; PAM type: NRG; PAM sequence: GAG
gagtcaattcctctggggga

SEQ ID NO: 97990 - DNA, 20 bp, Artificial Sequence
  Description of Artificial Sequence: Synthetic oligonucleotide
  Target: LAMA2; (-) strand; PAM type: NRG; PAM sequence: GAG
tggagtcaattcctctgggg

SEQ ID NO: 97991 - DNA, 20 bp, Artificial Sequence
  Description of Artificial Sequence: Synthetic oligonucleotide
  Target: LAMA2; (-) strand; PAM type: NRG; PAM sequence: GGG
ggtggagtcaattcctctgg

SEQ ID NO: 97992 - DNA, 20 bp, Artificial Sequence
  Description of Artificial Sequence: Synthetic oligonucleotide
  Target: LAMA2; (-) strand; PAM type: NRG; PAM sequence: GGG
aggtggagtcaattcctctg

SEQ ID NO: 97993 - DNA, 20 bp, Artificial Sequence
  Description of Artificial Sequence: Synthetic oligonucleotide
  Target: LAMA2; (-) strand; PAM type: NRG; PAM sequence: GGG
gaggtggagtcaattcctct

SEQ ID NO: 97994 - DNA, 20 bp, Artificial Sequence
  Description of Artificial Sequence: Synthetic oligonucleotide
  Target: LAMA2; (-) strand; PAM type: NRG; PAM sequence: TGG
ggaggtggagtcaattcctc

SEQ ID NO: 97995 - DNA, 20 bp, Artificial Sequence
  Description of Artificial Sequence: Synthetic oligonucleotide
  Target: LAMA2; (-) strand; PAM type: NRG; PAM sequence: GAG
gtccagccctagaggaggtg

SEQ ID NO: 97996 - DNA, 20 bp, Artificial Sequence
  Description of Artificial Sequence: Synthetic oligonucleotide
  Target: LAMA2; (-) strand; PAM type: NRG; PAM sequence: TGG
cggtccagccctagaggagg

SEQ ID NO: 97997 - DNA, 20 bp, Artificial Sequence
  Description of Artificial Sequence: Synthetic oligonucleotide
  Target: LAMA2; (-) strand; PAM type: NRG; PAM sequence: AGG
gtccggtccagccctagagg

SEQ ID NO: 97998 - DNA, 20 bp, Artificial Sequence
  Description of Artificial Sequence: Synthetic oligonucleotide
  Target: LAMA2; (-) strand; PAM type: NRG; PAM sequence: GAG
ggtccggtccagccctagag

SEQ ID NO: 97999 - DNA, 20 bp, Artificial Sequence
  Description of Artificial Sequence: Synthetic oligonucleotide
  Target: LAMA2; (-) strand; PAM type: NRG; PAM sequence: AGG
gtggtccggtccagccctag

SEQ ID NO: 98000 - DNA, 20 bp, Artificial Sequence
  Description of Artificial Sequence: Synthetic oligonucleotide
  Target: LAMA2; (-) strand; PAM type: NRG; PAM sequence: GAG
tgtggtccggtccagcccta

SEQ ID NO: 98001 - DNA, 20 bp, Artificial Sequence
  Description of Artificial Sequence: Synthetic oligonucleotide
  Target: LAMA2; (-) strand; PAM type: NRG; PAM sequence: TAG
tctgtggtccggtccagccc

SEQ ID NO: 98002 - DNA, 20 bp, Artificial Sequence
  Description of Artificial Sequence: Synthetic oligonucleotide
  Target: LAMA2; (-) strand; PAM type: NRG; PAM sequence: CAG
tgggagtctgtggtccggtc

SEQ ID NO: 98003 - DNA, 20 bp, Artificial Sequence
  Description of Artificial Sequence: Synthetic oligonucleotide
  Target: LAMA2; (-) strand; PAM type: NRG; PAM sequence: CGG
catagtgggagtctgtggtc

SEQ ID NO: 98004 - DNA, 20 bp, Artificial Sequence
  Description of Artificial Sequence: Synthetic oligonucleotide
  Target: LAMA2; (-) strand; PAM type: NRG; PAM sequence: TGG
gcgcccatagtgggagtctg

SEQ ID NO: 98005 - DNA, 20 bp, Artificial Sequence
  Description of Artificial Sequence: Synthetic oligonucleotide
  Target: LAMA2; (-) strand; PAM type: NRG; PAM sequence: GAG
tagacaagcgcccatagtgg

SEQ ID NO: 98006 - DNA, 20 bp, Artificial Sequence
  Description of Artificial Sequence: Synthetic oligonucleotide
  Target: LAMA2; (-) strand; PAM type: NRG; PAM sequence: GGG
aatagacaagcgcccatagt

SEQ ID NO: 98007 - DNA, 20 bp, Artificial Sequence
  Description of Artificial Sequence: Synthetic oligonucleotide
  Target: LAMA2; (-) strand; PAM type: NRG; PAM sequence: TGG
caatagacaagcgcccatag

SEQ ID NO: 98008 - DNA, 20 bp, Artificial Sequence
  Description of Artificial Sequence: Synthetic oligonucleotide
  Target: LAMA2; (-) strand; PAM type: NRG; PAM sequence: TAG
acacaatagacaagcgccca

SEQ ID NO: 98009 - DNA, 20 bp, Artificial Sequence
  Description of Artificial Sequence: Synthetic oligonucleotide
  Target: LAMA2; (-) strand; PAM type: NRG; PAM sequence: AAG
ggcagcctgacacaatagac

SEQ ID NO: 98010 - DNA, 20 bp, Artificial Sequence
  Description of Artificial Sequence: Synthetic oligonucleotide
  Target: LAMA2; (-) strand; PAM type: NRG; PAM sequence: TAG
cgacaggcagcctgacacaa

SEQ ID NO: 98011 - DNA, 20 bp, Artificial Sequence
  Description of Artificial Sequence: Synthetic oligonucleotide
  Target: LAMA2; (-) strand; PAM type: NRG; PAM sequence: CAG
ctgtggttttccccgacagg

SEQ ID NO: 98012 - DNA, 20 bp, Artificial Sequence
  Description of Artificial Sequence: Synthetic oligonucleotide
  Target: LAMA2; (-) strand; PAM type: NRG; PAM sequence: AGG
ttactgtggttttccccgac

SEQ ID NO: 98013 - DNA, 20 bp, Artificial Sequence
  Description of Artificial Sequence: Synthetic oligonucleotide
  Target: LAMA2; (-) strand; PAM type: NRG; PAM sequence: CAG
attactgtggttttccccga

SEQ ID NO: 98014 - DNA, 20 bp, Artificial Sequence
  Description of Artificial Sequence: Synthetic oligonucleotide
  Target: LAMA2; (-) strand; PAM type: NRG; PAM sequence: TGG
acacatttttcctattactg

SEQ ID NO: 98015 - DNA, 20 bp, Artificial Sequence
  Description of Artificial Sequence: Synthetic oligonucleotide
  Target: LAMA2; (-) strand; PAM type: NRG; PAM sequence: AAG
tgaaggcgagccctaaggtg

SEQ ID NO: 98016 - DNA, 20 bp, Artificial Sequence
  Description of Artificial Sequence: Synthetic oligonucleotide
  Target: LAMA2; (-) strand; PAM type: NRG; PAM sequence: AGG
aaatgtgaaggcgagcccta

SEQ ID NO: 98017 - DNA, 20 bp, Artificial Sequence
  Description of Artificial Sequence: Synthetic oligonucleotide
  Target: LAMA2; (-) strand; PAM type: NRG; PAM sequence: AAG
caaatgtgaaggcgagccct

SEQ ID NO: 98018 - DNA, 20 bp, Artificial Sequence
  Description of Artificial Sequence: Synthetic oligonucleotide
  Target: LAMA2; (-) strand; PAM type: NRG; PAM sequence: GAG
gtaggtccaaatgtgaaggc

SEQ ID NO: 98019 - DNA, 20 bp, Artificial Sequence
  Description of Artificial Sequence: Synthetic oligonucleotide
  Target: LAMA2; (-) strand; PAM type: NRG; PAM sequence: AGG
cgttgtaggtccaaatgtga

SEQ ID NO: 98020 - DNA, 20 bp, Artificial Sequence
  Description of Artificial Sequence: Synthetic oligonucleotide
  Target: LAMA2; (-) strand; PAM type: NRG; PAM sequence: AAG
gcgttgtaggtccaaatgtg

SEQ ID NO: 98021 - DNA, 20 bp, Artificial Sequence
  Description of Artificial Sequence: Synthetic oligonucleotide
  Target: LAMA2; (-) strand; PAM type: NRG; PAM sequence: AGG
attgtacagtttagcgttgt

SEQ ID NO: 98022 - DNA, 20 bp, Artificial Sequence
  Description of Artificial Sequence: Synthetic oligonucleotide
  Target: LAMA2; (-) strand; PAM type: NRG; PAM sequence: TAG
aattgtacagtttagcgttg

SEQ ID NO: 98023 - DNA, 20 bp, Artificial Sequence
  Description of Artificial Sequence: Synthetic oligonucleotide
  Target: LAMA2; (-) strand; PAM type: NRG; PAM sequence: TAG
catcgaggaattgtacagtt

SEQ ID NO: 98024 - DNA, 20 bp, Artificial Sequence
  Description of Artificial Sequence: Synthetic oligonucleotide
  Target: LAMA2; (-) strand; PAM type: NRG; PAM sequence: CAG
ctcctcatcgaggaattgta

SEQ ID NO: 98025 - DNA, 20 bp, Artificial Sequence
  Description of Artificial Sequence: Synthetic oligonucleotide
  Target: LAMA2; (-) strand; PAM type: NRG; PAM sequence: AGG
agaagtaatactcctcatcg

SEQ ID NO: 98026 - DNA, 20 bp, Artificial Sequence
  Description of Artificial Sequence: Synthetic oligonucleotide
  Target: LAMA2; (-) strand; PAM type: NRG; PAM sequence: GAG
aagaagtaatactcctcatc

SEQ ID NO: 98027 - DNA, 20 bp, Artificial Sequence
  Description of Artificial Sequence: Synthetic oligonucleotide
  Target: LAMA2; (-) strand; PAM type: NRG; PAM sequence: AAG
agaagaaaaagaaacacaag

SEQ ID NO: 98028 - DNA, 20 bp, Artificial Sequence
  Description of Artificial Sequence: Synthetic oligonucleotide
  Target: LAMA2; (-) strand; PAM type: NRG; PAM sequence: AAG
cttagaagaaaaagaaacac

SEQ ID NO: 98029 - DNA, 20 bp, Artificial Sequence
  Description of Artificial Sequence: Synthetic oligonucleotide
  Target: LAMA2; (-) strand; PAM type: NRG; PAM sequence: AAG
aaaataaatcttagaagaaa

SEQ ID NO: 98030 - DNA, 20 bp, Artificial Sequence
  Description of Artificial Sequence: Synthetic oligonucleotide
  Target: LAMA2; (-) strand; PAM type: NRG; PAM sequence: AAG
aagtttaaaataaatcttag

SEQ ID NO: 98031 - DNA, 20 bp, Artificial Sequence
  Description of Artificial Sequence: Synthetic oligonucleotide
  Target: LAMA2; (-) strand; PAM type: NRG; PAM sequence: TAG
caaaagtttaaaataaatct

SEQ ID NO: 98032 - DNA, 20 bp, Artificial Sequence
  Description of Artificial Sequence: Synthetic oligonucleotide
  Target: LAMA2; (-) strand; PAM type: NRG; PAM sequence: AAG
tttccttgaagctcaaacaa

SEQ ID NO: 98033 - DNA, 20 bp, Artificial Sequence
  Description of Artificial Sequence: Synthetic oligonucleotide
  Target: LAMA2; (-) strand; PAM type: NRG; PAM sequence: AAG
attgagaggaagtttccttg

SEQ ID NO: 98034 - DNA, 20 bp, Artificial Sequence
  Description of Artificial Sequence: Synthetic oligonucleotide
  Target: LAMA2; (-) strand; PAM type: NRG; PAM sequence: AAG
aaatcacacaaattgagagg

SEQ ID NO: 98035 - DNA, 20 bp, Artificial Sequence
  Description of Artificial Sequence: Synthetic oligonucleotide
  Target: LAMA2; (-) strand; PAM type: NRG; PAM sequence: AGG
aaaaaatcacacaaattgag

SEQ ID NO: 98036 - DNA, 20 bp, Artificial Sequence
  Description of Artificial Sequence: Synthetic oligonucleotide
  Target: LAMA2; (-) strand; PAM type: NRG; PAM sequence: GAG
taaaaaatcacacaaattga

SEQ ID NO: 98037 - DNA, 20 bp, Artificial Sequence
  Description of Artificial Sequence: Synthetic oligonucleotide
  Target: LAMA2; (-) strand; PAM type: NRG; PAM sequence: GAG
tgtaaaaaatcacacaaatt

SEQ ID NO: 98038 - DNA, 20 bp, Artificial Sequence
  Description of Artificial Sequence: Synthetic oligonucleotide
  Target: LAMA2; (-) strand; PAM type: NRG; PAM sequence: AAG
atctctgtaatctctctact

SEQ ID NO: 98039 - DNA, 20 bp, Artificial Sequence
  Description of Artificial Sequence: Synthetic oligonucleotide
  Target: LAMA2; (-) strand; PAM type: NRG; PAM sequence: AGG
tgtgtgttactatgagagat

SEQ ID NO: 98040 - DNA, 20 bp, Artificial Sequence
  Description of Artificial Sequence: Synthetic oligonucleotide
  Target: LAMA2; (-) strand; PAM type: NRG; PAM sequence: TAG
atgtgtgttactatgagaga

SEQ ID NO: 98041 - DNA, 20 bp, Artificial Sequence
  Description of Artificial Sequence: Synthetic oligonucleotide
  Target: LAMA2; (-) strand; PAM type: NRG; PAM sequence: GAG
atgcatgtgtgttactatga

SEQ ID NO: 98042 - DNA, 20 bp, Artificial Sequence
  Description of Artificial Sequence: Synthetic oligonucleotide
  Target: LAMA2; (-) strand; PAM type: NRG; PAM sequence: GAG
gcatgcatgtgtgttactat

SEQ ID NO: 98043 - DNA, 20 bp, Artificial Sequence
  Description of Artificial Sequence: Synthetic oligonucleotide
  Target: LAMA2; (-) strand; PAM type: NRG; PAM sequence: AGG
gtgttattgacatacttgct

SEQ ID NO: 98044 - DNA, 20 bp, Artificial Sequence
  Description of Artificial Sequence: Synthetic oligonucleotide
  Target: LAMA2; (-) strand; PAM type: NRG; PAM sequence: TAG
tgtgttattgacatacttgc

SEQ ID NO: 98045 - DNA, 20 bp, Artificial Sequence
  Description of Artificial Sequence: Synthetic oligonucleotide
  Target: LAMA2; (-) strand; PAM type: NRG; PAM sequence: TGG
aaaactggattttctgtgca

SEQ ID NO: 98046 - DNA, 20 bp, Artificial Sequence
  Description of Artificial Sequence: Synthetic oligonucleotide
  Target: LAMA2; (-) strand; PAM type: NRG; PAM sequence: TGG
agctgaccactgaataaaac

SEQ ID NO: 98047 - DNA, 20 bp, Artificial Sequence
  Description of Artificial Sequence: Synthetic oligonucleotide
  Target: LAMA2; (-) strand; PAM type: NRG; PAM sequence: AAG
ggttattccaattctttagc

SEQ ID NO: 98048 - DNA, 20 bp, Artificial Sequence
  Description of Artificial Sequence: Synthetic oligonucleotide
  Target: LAMA2; (-) strand; PAM type: NRG; PAM sequence: TAG
tgtgggttattccaattctt

SEQ ID NO: 98049 - DNA, 20 bp, Artificial Sequence
  Description of Artificial Sequence: Synthetic oligonucleotide
  Target: LAMA2; (-) strand; PAM type: NRG; PAM sequence: GGG
ttaaaagtggttcatagtgt

SEQ ID NO: 98050 - DNA, 20 bp, Artificial Sequence
  Description of Artificial Sequence: Synthetic oligonucleotide
  Target: LAMA2; (-) strand; PAM type: NRG; PAM sequence: TGG
tttaaaagtggttcatagtg

SEQ ID NO: 98051 - DNA, 20 bp, Artificial Sequence
  Description of Artificial Sequence: Synthetic oligonucleotide
  Target: LAMA2; (-) strand; PAM type: NRG; PAM sequence: TAG
atctatttaaaagtggttca

SEQ ID NO: 98052 - DNA, 20 bp, Artificial Sequence
  Description of Artificial Sequence: Synthetic oligonucleotide
  Target: LAMA2; (-) strand; PAM type: NRG; PAM sequence: TGG
aaccaagatctatttaaaag

SEQ ID NO: 98053 - DNA, 20 bp, Artificial Sequence
  Description of Artificial Sequence: Synthetic oligonucleotide
  Target: LAMA2; (-) strand; PAM type: NRG; PAM sequence: AAG
ataaaccaagatctatttaa

SEQ ID NO: 98054 - DNA, 20 bp, Artificial Sequence
  Description of Artificial Sequence: Synthetic oligonucleotide
  Target: LAMA2; (-) strand; PAM type: NRG; PAM sequence: AAG
cataactgaagaaataaacc

SEQ ID NO: 98055 - DNA, 20 bp, Artificial Sequence
  Description of Artificial Sequence: Synthetic oligonucleotide
  Target: LAMA2; (-) strand; PAM type: NRG; PAM sequence: AAG
aattagtttaagcataactg

SEQ ID NO: 98056 - DNA, 20 bp, Artificial Sequence
  Description of Artificial Sequence: Synthetic oligonucleotide
  Target: LAMA2; (-) strand; PAM type: NRG; PAM sequence: AAG
gatggttgaagaattagttt

SEQ ID NO: 98057 - DNA, 20 bp, Artificial Sequence
  Description of Artificial Sequence: Synthetic oligonucleotide
  Target: LAMA2; (-) strand; PAM type: NRG; PAM sequence: TAG
ggaaatgatggttgaagaat

SEQ ID NO: 98058 - DNA, 20 bp, Artificial Sequence
  Description of Artificial Sequence: Synthetic oligonucleotide
  Target: LAMA2; (-) strand; PAM type: NRG; PAM sequence: AAG
agtcctggaaatgatggttg

SEQ ID NO: 98059 - DNA, 20 bp, Artificial Sequence
  Description of Artificial Sequence: Synthetic oligonucleotide
  Target: LAMA2; (-) strand; PAM type: NRG; PAM sequence: TGG
tgaataagtcctggaaatga

SEQ ID NO: 98060 - DNA, 20 bp, Artificial Sequence
  Description of Artificial Sequence: Synthetic oligonucleotide
  Target: LAMA2; (-) strand; PAM type: NRG; PAM sequence: TGG
cattattattgaataagtcc

SEQ ID NO: 98061 - DNA, 20 bp, Artificial Sequence
  Description of Artificial Sequence: Synthetic oligonucleotide
  Target: LAMA2; (-) strand; PAM type: NRG; PAM sequence: AAG
ttttgccattattattgaat

SEQ ID NO: 98062 - DNA, 20 bp, Artificial Sequence
  Description of Artificial Sequence: Synthetic oligonucleotide
  Target: LAMA2; (-) strand; PAM type: NRG; PAM sequence: AGG
tacatattatttaaaaagca

SEQ ID NO: 98063 - DNA, 20 bp, Artificial Sequence
  Description of Artificial Sequence: Synthetic oligonucleotide
  Target: LAMA2; (-) strand; PAM type: NRG; PAM sequence: AAG
atacatattatttaaaaagc

SEQ ID NO: 98064 - DNA, 20 bp, Artificial Sequence
  Description of Artificial Sequence: Synthetic oligonucleotide
  Target: LAMA2; (-) strand; PAM type: NRG; PAM sequence: AAG
gtttatacatattatttaaa

SEQ ID NO: 98065 - DNA, 20 bp, Artificial Sequence
  Description of Artificial Sequence: Synthetic oligonucleotide
  Target: LAMA2; (-) strand; PAM type: NRG; PAM sequence: AAG
cataatcatataatttaata

SEQ ID NO: 98066 - DNA, 20 bp, Artificial Sequence
  Description of Artificial Sequence: Synthetic oligonucleotide
  Target: LAMA2; (-) strand; PAM type: NRG; PAM sequence: TGG
gagtcttatttgtcttatgg

SEQ ID NO: 98067 - DNA, 20 bp, Artificial Sequence
  Description of Artificial Sequence: Synthetic oligonucleotide
  Target: LAMA2; (-) strand; PAM type: NRG; PAM sequence: TGG
tttgagtcttatttgtctta

SEQ ID NO: 98068 - DNA, 20 bp, Artificial Sequence
  Description of Artificial Sequence: Synthetic oligonucleotide
  Target: LAMA2; (-) strand; PAM type: NRG; PAM sequence: GAG
aatagtattcaaactatttt

SEQ ID NO: 98069 - DNA, 20 bp, Artificial Sequence
  Description of Artificial Sequence: Synthetic oligonucleotide
  Target: LAMA2; (-) strand; PAM type: NRG; PAM sequence: TAG
caagctgataaaactgagaa

SEQ ID NO: 98070 - DNA, 20 bp, Artificial Sequence
  Description of Artificial Sequence: Synthetic oligonucleotide
  Target: LAMA2; (-) strand; PAM type: NRG; PAM sequence: GAG
ttgagcaagctgataaaact

SEQ ID NO: 98071 - DNA, 20 bp, Artificial Sequence
  Description of Artificial Sequence: Synthetic oligonucleotide
  Target: LAMA2; (-) strand; PAM type: NRG; PAM sequence: AAG
ataatgtcccaactttgagc

SEQ ID NO: 98072 - DNA, 20 bp, Artificial Sequence
  Description of Artificial Sequence: Synthetic oligonucleotide
  Target: LAMA2; (-) strand; PAM type: NRG; PAM sequence: GAG
tttaataatgtcccaacttt

SEQ ID NO: 98073 - DNA, 20 bp, Artificial Sequence
  Description of Artificial Sequence: Synthetic oligonucleotide
  Target: LAMA2; (-) strand; PAM type: NRG; PAM sequence: GAG
agcctaaaataaattctaat

SEQ ID NO: 98074 - DNA, 20 bp, Artificial Sequence
  Description of Artificial Sequence: Synthetic oligonucleotide
  Target: LAMA2; (-) strand; PAM type: NRG; PAM sequence: CAG
gagactctctgcttttatca

SEQ ID NO: 98075 - DNA, 20 bp, Artificial Sequence
  Description of Artificial Sequence: Synthetic oligonucleotide
  Target: LAMA2; (-) strand; PAM type: NRG; PAM sequence: GAG
tcaattaagcacttaatcaa

SEQ ID NO: 98076 - DNA, 20 bp, Artificial Sequence
  Description of Artificial Sequence: Synthetic oligonucleotide
  Target: LAMA2; (-) strand; PAM type: NRG; PAM sequence: AAG
cttcaattaagcacttaatc

SEQ ID NO: 98077 - DNA, 20 bp, Artificial Sequence
  Description of Artificial Sequence: Synthetic oligonucleotide
  Target: LAMA2; (-) strand; PAM type: NRG; PAM sequence: AAG
aatgcaaaagtacttcaatt

SEQ ID NO: 98078 - DNA, 20 bp, Artificial Sequence
  Description of Artificial Sequence: Synthetic oligonucleotide
  Target: LAMA2; (-) strand; PAM type: NRG; PAM sequence: AAG
ttttgatttggataatgcaa

SEQ ID NO: 98079 - DNA, 20 bp, Artificial Sequence
  Description of Artificial Sequence: Synthetic oligonucleotide
  Target: LAMA2; (-) strand; PAM type: NRG; PAM sequence: TGG
cctccttgtttattttgatt

SEQ ID NO: 98080 - DNA, 20 bp, Artificial Sequence
  Description of Artificial Sequence: Synthetic oligonucleotide
  Target: LAMA2; (-) strand; PAM type: NRG; PAM sequence: TAG
aaaagatctagcttaatagc

SEQ ID NO: 98081 - DNA, 20 bp, Artificial Sequence
  Description of Artificial Sequence: Synthetic oligonucleotide
  Target: LAMA2; (-) strand; PAM type: NRG; PAM sequence: TAG
cttaaaaagatctagcttaa

SEQ ID NO: 98082 - DNA, 20 bp, Artificial Sequence
  Description of Artificial Sequence: Synthetic oligonucleotide
  Target: LAMA2; (-) strand; PAM type: NRG; PAM sequence: TAG
agaagctccttaaaaagatc

SEQ ID NO: 98083 - DNA, 20 bp, Artificial Sequence
  Description of Artificial Sequence: Synthetic oligonucleotide
  Target: LAMA2; (-) strand; PAM type: NRG; PAM sequence: AAG
atacaaagaagctccttaaa

SEQ ID NO: 98084 - DNA, 20 bp, Artificial Sequence
  Description of Artificial Sequence: Synthetic oligonucleotide
  Target: LAMA2; (-) strand; PAM type: NRG; PAM sequence: AAG
ccagagacaaatatacaaag

SEQ ID NO: 98085 - DNA, 20 bp, Artificial Sequence
  Description of Artificial Sequence: Synthetic oligonucleotide
  Target: LAMA2; (-) strand; PAM type: NRG; PAM sequence: AAG
agtccagagacaaatataca

SEQ ID NO: 98086 - DNA, 20 bp, Artificial Sequence
  Description of Artificial Sequence: Synthetic oligonucleotide
  Target: LAMA2; (-) strand; PAM type: NRG; PAM sequence: GAG
gttctggcctagacagtcca

SEQ ID NO: 98087 - DNA, 20 bp, Artificial Sequence
  Description of Artificial Sequence: Synthetic oligonucleotide
  Target: LAMA2; (-) strand; PAM type: NRG; PAM sequence: CAG
tggttctggcctagacagtc

SEQ ID NO: 98088 - DNA, 20 bp, Artificial Sequence
  Description of Artificial Sequence: Synthetic oligonucleotide
  Target: LAMA2; (-) strand; PAM type: NRG; PAM sequence: CAG
ccctttggttctggcctaga

SEQ ID NO: 98089 - DNA, 20 bp, Artificial Sequence
  Description of Artificial Sequence: Synthetic oligonucleotide
  Target: LAMA2; (-) strand; PAM type: NRG; PAM sequence: TAG
acatccctttggttctggcc

SEQ ID NO: 98090 - DNA, 20 bp, Artificial Sequence
  Description of Artificial Sequence: Synthetic oligonucleotide
  Target: LAMA2; (-) strand; PAM type: NRG; PAM sequence: TGG
cctccacatccctttggttc

SEQ ID NO: 98091 - DNA, 20 bp, Artificial Sequence
  Description of Artificial Sequence: Synthetic oligonucleotide
  Target: LAMA2; (-) strand; PAM type: NRG; PAM sequence: TGG
ctagtacctccacatccctt

SEQ ID NO: 98092 - DNA, 20 bp, Artificial Sequence
  Description of Artificial Sequence: Synthetic oligonucleotide
  Target: LAMA2; (-) strand; PAM type: NRG; PAM sequence: TAG
atatcagattaagaactttc

SEQ ID NO: 98093 - DNA, 20 bp, Artificial Sequence
  Description of Artificial Sequence: Synthetic oligonucleotide
  Target: LAMA2; (-) strand; PAM type: NRG; PAM sequence: AAG
gccagaaaaaatatcagatt

SEQ ID NO: 98094 - DNA, 20 bp, Artificial Sequence
  Description of Artificial Sequence: Synthetic oligonucleotide
  Target: LAMA2; (-) strand; PAM type: NRG; PAM sequence: CAG
gactaagccagaaaaaatat

SEQ ID NO: 98095 - DNA, 20 bp, Artificial Sequence
  Description of Artificial Sequence: Synthetic oligonucleotide
  Target: LAMA2; (-) strand; PAM type: NRG; PAM sequence: CAG
aaagtgattgctgactaagc

SEQ ID NO: 98096 - DNA, 20 bp, Artificial Sequence
  Description of Artificial Sequence: Synthetic oligonucleotide
  Target: LAMA2; (-) strand; PAM type: NRG; PAM sequence: AAG
aagaaaagtgattgctgact

SEQ ID NO: 98097 - DNA, 20 bp, Artificial Sequence
  Description of Artificial Sequence: Synthetic oligonucleotide
  Target: LAMA2; (-) strand; PAM type: NRG; PAM sequence: AAG
tatgcccattgatgaaagaa

SEQ ID NO: 98098 - DNA, 20 bp, Artificial Sequence
  Description of Artificial Sequence: Synthetic oligonucleotide
  Target: LAMA2; (-) strand; PAM type: NRG; PAM sequence: AAG
aatcttatgcccattgatga

SEQ ID NO: 98099 - DNA, 20 bp, Artificial Sequence
  Description of Artificial Sequence: Synthetic oligonucleotide
  Target: LAMA2; (-) strand; PAM type: NRG; PAM sequence: TAG
attttaccaccttggttaag

SEQ ID NO: 98100 - DNA, 20 bp, Artificial Sequence
  Description of Artificial Sequence: Synthetic oligonucleotide
  Target: LAMA2; (-) strand; PAM type: NRG; PAM sequence: AAG
actattttaccaccttggtt

SEQ ID NO: 98101 - DNA, 20 bp, Artificial Sequence
  Description of Artificial Sequence: Synthetic oligonucleotide
  Target: LAMA2; (-) strand; PAM type: NRG; PAM sequence: TGG
aggggactattttaccacct

SEQ ID NO: 98102 - DNA, 20 bp, Artificial Sequence
  Description of Artificial Sequence: Synthetic oligonucleotide
  Target: LAMA2; (-) strand; PAM type: NRG; PAM sequence: GGG
atcccatggagaattacaag

SEQ ID NO: 98103 - DNA, 20 bp, Artificial Sequence
  Description of Artificial Sequence: Synthetic oligonucleotide
  Target: LAMA2; (-) strand; PAM type: NRG; PAM sequence: GGG
aatcccatggagaattacaa

SEQ ID NO: 98104 - DNA, 20 bp, Artificial Sequence
  Description of Artificial Sequence: Synthetic oligonucleotide
  Target: LAMA2; (-) strand; PAM type: NRG; PAM sequence: AGG
aaatcccatggagaattaca

SEQ ID NO: 98105 - DNA, 20 bp, Artificial Sequence
  Description of Artificial Sequence: Synthetic oligonucleotide
  Target: LAMA2; (-) strand; PAM type: NRG; PAM sequence: AAG
caaatcccatggagaattac

SEQ ID NO: 98106 - DNA, 20 bp, Artificial Sequence
  Description of Artificial Sequence: Synthetic oligonucleotide
  Target: LAMA2; (-) strand; PAM type: NRG; PAM sequence: GAG
tcagtttttcaaatcccatg

SEQ ID NO: 98107 - DNA, 20 bp, Artificial Sequence
  Description of Artificial Sequence: Synthetic oligonucleotide
  Target: LAMA2; (-) strand; PAM type: NRG; PAM sequence: TGG
agtcagtttttcaaatccca

SEQ ID NO: 98108 - DNA, 20 bp, Artificial Sequence
  Description of Artificial Sequence: Synthetic oligonucleotide
  Target: LAMA2; (-) strand; PAM type: NRG; PAM sequence: CAG
tatgaataaaaggtaggagt

SEQ ID NO: 98109 - DNA, 20 bp, Artificial Sequence
  Description of Artificial Sequence: Synthetic oligonucleotide
  Target: LAMA2; (-) strand; PAM type: NRG; PAM sequence: GAG
gatttatgaataaaaggtag

SEQ ID NO: 98110 - DNA, 20 bp, Artificial Sequence
  Description of Artificial Sequence: Synthetic oligonucleotide
  Target: LAMA2; (-) strand; PAM type: NRG; PAM sequence: AGG
ttgatttatgaataaaaggt

SEQ ID NO: 98111 - DNA, 20 bp, Artificial Sequence
  Description of Artificial Sequence: Synthetic oligonucleotide
  Target: LAMA2; (-) strand; PAM type: NRG; PAM sequence: TAG
cttgatttatgaataaaagg

SEQ ID NO: 98112 - DNA, 20 bp, Artificial Sequence
  Description of Artificial Sequence: Synthetic oligonucleotide
  Target: LAMA2; (-) strand; PAM type: NRG; PAM sequence: AGG
ttgcttgatttatgaataaa

SEQ ID NO: 98113 - DNA, 20 bp, Artificial Sequence
  Description of Artificial Sequence: Synthetic oligonucleotide
  Target: LAMA2; (-) strand; PAM type: NRG; PAM sequence: AAG
attgcttgatttatgaataa

SEQ ID NO: 98114 - DNA, 20 bp, Artificial Sequence
  Description of Artificial Sequence: Synthetic oligonucleotide
  Target: LAMA2; (-) strand; PAM type: NRG; PAM sequence: CAG
cctctcctcatgcatagctg

SEQ ID NO: 98115 - DNA, 20 bp, Artificial Sequence
  Description of Artificial Sequence: Synthetic oligonucleotide
  Target: LAMA2; (-) strand; PAM type: NRG; PAM sequence: TAG
ctcagtcctctcctcatgca

SEQ ID NO: 98116 - DNA, 20 bp, Artificial Sequence
  Description of Artificial Sequence: Synthetic oligonucleotide
  Target: LAMA2; (-) strand; PAM type: NRG; PAM sequence: CAG
accgtcttgtgtttcaggct

SEQ ID NO: 98117 - DNA, 20 bp, Artificial Sequence
  Description of Artificial Sequence: Synthetic oligonucleotide
  Target: LAMA2; (-) strand; PAM type: NRG; PAM sequence: AGG
tgaaaaccgtcttgtgtttc

SEQ ID NO: 98118 - DNA, 20 bp, Artificial Sequence
  Description of Artificial Sequence: Synthetic oligonucleotide
  Target: LAMA2; (-) strand; PAM type: NRG; PAM sequence: CAG
atgaaaaccgtcttgtgttt

SEQ ID NO: 98119 - DNA, 20 bp, Artificial Sequence
  Description of Artificial Sequence: Synthetic oligonucleotide
  Target: LAMA2; (-) strand; PAM type: NRG; PAM sequence: AAG
tagtccacagctctggcacg

SEQ ID NO: 98120 - DNA, 20 bp, Artificial Sequence
  Description of Artificial Sequence: Synthetic oligonucleotide
  Target: LAMA2; (-) strand; PAM type: NRG; PAM sequence: TGG
tggaaggtagtccacagctc

SEQ ID NO: 98121 - DNA, 20 bp, Artificial Sequence
  Description of Artificial Sequence: Synthetic oligonucleotide
  Target: LAMA2; (-) strand; PAM type: NRG; PAM sequence: CAG
gctttctggaaggtagtcca

SEQ ID NO: 98122 - DNA, 20 bp, Artificial Sequence
  Description of Artificial Sequence: Synthetic oligonucleotide
  Target: LAMA2; (-) strand; PAM type: NRG; PAM sequence: TAG
atctctggctttctggaagg

SEQ ID NO: 98123 - DNA, 20 bp, Artificial Sequence
  Description of Artificial Sequence: Synthetic oligonucleotide
  Target: LAMA2; (-) strand; PAM type: NRG; PAM sequence: AGG
aacatctctggctttctgga

SEQ ID NO: 98124 - DNA, 20 bp, Artificial Sequence
  Description of Artificial Sequence: Synthetic oligonucleotide
  Target: LAMA2; (-) strand; PAM type: NRG; PAM sequence: AAG
aaacatctctggctttctgg

SEQ ID NO: 98125 - DNA, 20 bp, Artificial Sequence
  Description of Artificial Sequence: Synthetic oligonucleotide
  Target: LAMA2; (-) strand; PAM type: NRG; PAM sequence: TGG
aacaaacatctctggctttc

SEQ ID NO: 98126 - DNA, 20 bp, Artificial Sequence
  Description of Artificial Sequence: Synthetic oligonucleotide
  Target: LAMA2; (-) strand; PAM type: NRG; PAM sequence: TGG
aatgtatcaacaaacatctc

SEQ ID NO: 98127 - DNA, 20 bp, Artificial Sequence
  Description of Artificial Sequence: Synthetic oligonucleotide
  Target: LAMA2; (-) strand; PAM type: NRG; PAM sequence: GGG
caagacttccatcttcattt

SEQ ID NO: 98128 - DNA, 20 bp, Artificial Sequence
  Description of Artificial Sequence: Synthetic oligonucleotide
  Target: LAMA2; (-) strand; PAM type: NRG; PAM sequence: TGG
tcaagacttccatcttcatt

SEQ ID NO: 98129 - DNA, 20 bp, Artificial Sequence
  Description of Artificial Sequence: Synthetic oligonucleotide
  Target: LAMA2; (-) strand; PAM type: NRG; PAM sequence: AAG
aagctgacatatgcaaaatc

SEQ ID NO: 98130 - DNA, 20 bp, Artificial Sequence
  Description of Artificial Sequence: Synthetic oligonucleotide
  Target: LAMA2; (-) strand; PAM type: NRG; PAM sequence: AAG
caaacagaaaacttctagtg

SEQ ID NO: 98131 - DNA, 20 bp, Artificial Sequence
  Description of Artificial Sequence: Synthetic oligonucleotide
  Target: LAMA2; (-) strand; PAM type: NRG; PAM sequence: TAG
gaaagcaaacagaaaacttc

SEQ ID NO: 98132 - DNA, 20 bp, Artificial Sequence
  Description of Artificial Sequence: Synthetic oligonucleotide
  Target: LAMA2; (-) strand; PAM type: NRG; PAM sequence: CAG
aataaaaatctgaaagcaaa

SEQ ID NO: 98133 - DNA, 20 bp, Artificial Sequence
  Description of Artificial Sequence: Synthetic oligonucleotide
  Target: LAMA2; (-) strand; PAM type: NRG; PAM sequence: AAG
tttttgcaataaaaatctga

SEQ ID NO: 98134 - DNA, 20 bp, Artificial Sequence
  Description of Artificial Sequence: Synthetic oligonucleotide
  Target: LAMA2; (-) strand; PAM type: NRG; PAM sequence: TAG
tgtacatgtcttgcgactat

SEQ ID NO: 98135 - DNA, 20 bp, Artificial Sequence
  Description of Artificial Sequence: Synthetic oligonucleotide
  Target: LAMA2; (-) strand; PAM type: NRG; PAM sequence: AAG
taagaaatccaaaataataa

SEQ ID NO: 98136 - DNA, 20 bp, Artificial Sequence
  Description of Artificial Sequence: Synthetic oligonucleotide
  Target: LAMA2; (-) strand; PAM type: NRG; PAM sequence: AAG
aatttaaagactataaaagt

SEQ ID NO: 98137 - DNA, 20 bp, Artificial Sequence
  Description of Artificial Sequence: Synthetic oligonucleotide
  Target: LAMA2; (-) strand; PAM type: NRG; PAM sequence: AAG
atataatttaaagactataa

SEQ ID NO: 98138 - DNA, 20 bp, Artificial Sequence
  Description of Artificial Sequence: Synthetic oligonucleotide
  Target: LAMA2; (-) strand; PAM type: NRG; PAM sequence: AAG
atttatactgatataattta

SEQ ID NO: 98139 - DNA, 20 bp, Artificial Sequence
  Description of Artificial Sequence: Synthetic oligonucleotide
  Target: LAMA2; (-) strand; PAM type: NRG; PAM sequence: TGG
aaactaaataaaaagtgtta

SEQ ID NO: 98140 - DNA, 20 bp, Artificial Sequence
  Description of Artificial Sequence: Synthetic oligonucleotide
  Target: LAMA2; (-) strand; PAM type: NRG; PAM sequence: AAG
acagcaaaaaactaaataaa

SEQ ID NO: 98141 - DNA, 20 bp, Artificial Sequence
  Description of Artificial Sequence: Synthetic oligonucleotide
  Target: LAMA2; (-) strand; PAM type: NRG; PAM sequence: CAG
agcaaatgtccaatgaaaca

SEQ ID NO: 98142 - DNA, 20 bp, Artificial Sequence
  Description of Artificial Sequence: Synthetic oligonucleotide
  Target: LAMA2; (-) strand; PAM type: NRG; PAM sequence: TAG
tactgtgcttgatggataac

SEQ ID NO: 98143 - DNA, 20 bp, Artificial Sequence
  Description of Artificial Sequence: Synthetic oligonucleotide
  Target: LAMA2; (-) strand; PAM type: NRG; PAM sequence: TGG
tctgcttttactgtgcttga

SEQ ID NO: 98144 - DNA, 20 bp, Artificial Sequence
  Description of Artificial Sequence: Synthetic oligonucleotide
  Target: LAMA2; (-) strand; PAM type: NRG; PAM sequence: AAG
taacattgtcatatggaata

SEQ ID NO: 98145 - DNA, 20 bp, Artificial Sequence
  Description of Artificial Sequence: Synthetic oligonucleotide
  Target: LAMA2; (-) strand; PAM type: NRG; PAM sequence: TGG
ttttaaataacattgtcata

SEQ ID NO: 98146 - DNA, 20 bp, Artificial Sequence
  Description of Artificial Sequence: Synthetic oligonucleotide
  Target: LAMA2; (-) strand; PAM type: NRG; PAM sequence: AAG
aaagagtatttttcttgaaa

SEQ ID NO: 98147 - DNA, 20 bp, Artificial Sequence
  Description of Artificial Sequence: Synthetic oligonucleotide
  Target: LAMA2; (-) strand; PAM type: NRG; PAM sequence: GAG
cagcctgaaaaagctccaaa

SEQ ID NO: 98148 - DNA, 20 bp, Artificial Sequence
  Description of Artificial Sequence: Synthetic oligonucleotide
  Target: LAMA2; (-) strand; PAM type: NRG; PAM sequence: AAG
ttcagcctgaaaaagctcca

SEQ ID NO: 98149 - DNA, 20 bp, Artificial Sequence
  Description of Artificial Sequence: Synthetic oligonucleotide
  Target: LAMA2; (-) strand; PAM type: NRG; PAM sequence: AAG
agatacaattcagcctgaaa

SEQ ID NO: 98150 - DNA, 20 bp, Artificial Sequence
  Description of Artificial Sequence: Synthetic oligonucleotide
  Target: LAMA2; (-) strand; PAM type: NRG; PAM sequence: CAG
ttttatttgtagatacaatt

SEQ ID NO: 98151 - DNA, 20 bp, Artificial Sequence
  Description of Artificial Sequence: Synthetic oligonucleotide
  Target: LAMA2; (-) strand; PAM type: NRG; PAM sequence: TAG
ccaaggaaagcttttatttg

SEQ ID NO: 98152 - DNA, 20 bp, Artificial Sequence
  Description of Artificial Sequence: Synthetic oligonucleotide
  Target: LAMA2; (-) strand; PAM type: NRG; PAM sequence: AAG
aatcagattttaaccaagga

SEQ ID NO: 98153 - DNA, 20 bp, Artificial Sequence
  Description of Artificial Sequence: Synthetic oligonucleotide
  Target: LAMA2; (-) strand; PAM type: NRG; PAM sequence: AGG
gtgtaatcagattttaacca

SEQ ID NO: 98154 - DNA, 20 bp, Artificial Sequence
  Description of Artificial Sequence: Synthetic oligonucleotide
  Target: LAMA2; (-) strand; PAM type: NRG; PAM sequence: AAG
tgtgtaatcagattttaacc

SEQ ID NO: 98155 - DNA, 20 bp, Artificial Sequence
  Description of Artificial Sequence: Synthetic oligonucleotide
  Target: LAMA2; (-) strand; PAM type: NRG; PAM sequence: CAG
gggcggcatccatgtgtaat

SEQ ID NO: 98156 - DNA, 20 bp, Artificial Sequence
  Description of Artificial Sequence: Synthetic oligonucleotide
  Target: LAMA2; (-) strand; PAM type: NRG; PAM sequence: CGG
tggtctccaaggtgttcggg

SEQ ID NO: 98157 - DNA, 20 bp, Artificial Sequence
  Description of Artificial Sequence: Synthetic oligonucleotide
  Target: LAMA2; (-) strand; PAM type: NRG; PAM sequence: GGG
tcctggtctccaaggtgttc

SEQ ID NO: 98158 - DNA, 20 bp, Artificial Sequence
  Description of Artificial Sequence: Synthetic oligonucleotide
  Target: LAMA2; (-) strand; PAM type: NRG; PAM sequence: CGG
ttcctggtctccaaggtgtt

SEQ ID NO: 98159 - DNA, 20 bp, Artificial Sequence
  Description of Artificial Sequence: Synthetic oligonucleotide
  Target: LAMA2; (-) strand; PAM type: NRG; PAM sequence: AGG
gtatttcttcctggtctcca

SEQ ID NO: 98160 - DNA, 20 bp, Artificial Sequence
  Description of Artificial Sequence: Synthetic oligonucleotide
  Target: LAMA2; (-) strand; PAM type: NRG; PAM sequence: AAG
tgtatttcttcctggtctcc

SEQ ID NO: 98161 - DNA, 20 bp, Artificial Sequence
  Description of Artificial Sequence: Synthetic oligonucleotide
  Target: LAMA2; (-) strand; PAM type: NRG; PAM sequence: TGG
acttaatgtgtatttcttcc

SEQ ID NO: 98162 - DNA, 20 bp, Artificial Sequence
  Description of Artificial Sequence: Synthetic oligonucleotide
  Target: LAMA2; (-) strand; PAM type: NRG; PAM sequence: AAG
gcaacatcacttacaaacgc

SEQ ID NO: 98163 - DNA, 20 bp, Artificial Sequence
  Description of Artificial Sequence: Synthetic oligonucleotide
  Target: LAMA2; (-) strand; PAM type: NRG; PAM sequence: GGG
ccttcccccacctgcggcag

SEQ ID NO: 98164 - DNA, 20 bp, Artificial Sequence
  Description of Artificial Sequence: Synthetic oligonucleotide
  Target: LAMA2; (-) strand; PAM type: NRG; PAM sequence: GGG
gccttcccccacctgcggca

SEQ ID NO: 98165 - DNA, 20 bp, Artificial Sequence
  Description of Artificial Sequence: Synthetic oligonucleotide
  Target: LAMA2; (-) strand; PAM type: NRG; PAM sequence: AGG
ggccttcccccacctgcggc

SEQ ID NO: 98166 - DNA, 20 bp, Artificial Sequence
  Description of Artificial Sequence: Synthetic oligonucleotide
  Target: LAMA2; (-) strand; PAM type: NRG; PAM sequence: CAG
tggccttcccccacctgcgg

SEQ ID NO: 98167 - DNA, 20 bp, Artificial Sequence
  Description of Artificial Sequence: Synthetic oligonucleotide
  Target: LAMA2; (-) strand; PAM type: NRG; PAM sequence: CGG
gactggccttcccccacctg

SEQ ID NO: 98168 - DNA, 20 bp, Artificial Sequence
  Description of Artificial Sequence: Synthetic oligonucleotide
  Target: LAMA2; (-) strand; PAM type: NRG; PAM sequence: TGG
cagtggctgcaaagacagac

SEQ ID NO: 98169 - DNA, 20 bp, Artificial Sequence
  Description of Artificial Sequence: Synthetic oligonucleotide
  Target: LAMA2; (-) strand; PAM type: NRG; PAM sequence: CAG
ctcttcagtggctgcaaaga

SEQ ID NO: 98170 - DNA, 20 bp, Artificial Sequence
  Description of Artificial Sequence: Synthetic oligonucleotide
  Target: LAMA2; (-) strand; PAM type: NRG; PAM sequence: AAG
tgagctcttcagtggctgca

SEQ ID NO: 98171 - DNA, 20 bp, Artificial Sequence
  Description of Artificial Sequence: Synthetic oligonucleotide
  Target: LAMA2; (-) strand; PAM type: NRG; PAM sequence: TGG
gcaacgcttgagctcttcag

SEQ ID NO: 98172 - DNA, 20 bp, Artificial Sequence
  Description of Artificial Sequence: Synthetic oligonucleotide
  Target: LAMA2; (-) strand; PAM type: NRG; PAM sequence: CAG
ttagcaacgcttgagctctt

SEQ ID NO: 98173 - DNA, 20 bp, Artificial Sequence
  Description of Artificial Sequence: Synthetic oligonucleotide
  Target: LAMA2; (-) strand; PAM type: NRG; PAM sequence: GAG
atactgcattagcaacgctt

SEQ ID NO: 98174 - DNA, 20 bp, Artificial Sequence
  Description of Artificial Sequence: Synthetic oligonucleotide
  Target: LAMA2; (-) strand; PAM type: NRG; PAM sequence: TAG
caaagttagaaatactgcat

SEQ ID NO: 98175 - DNA, 20 bp, Artificial Sequence
  Description of Artificial Sequence: Synthetic oligonucleotide
  Target: LAMA2; (-) strand; PAM type: NRG; PAM sequence: TAG
gccaattaggacagcaaagt

SEQ ID NO: 98176 - DNA, 20 bp, Artificial Sequence
  Description of Artificial Sequence: Synthetic oligonucleotide
  Target: LAMA2; (-) strand; PAM type: NRG; PAM sequence: AAG
ggaagccaattaggacagca

SEQ ID NO: 98177 - DNA, 20 bp, Artificial Sequence
  Description of Artificial Sequence: Synthetic oligonucleotide
  Target: LAMA2; (-) strand; PAM type: NRG; PAM sequence: CAG
gaaaaggaagccaattagga

SEQ ID NO: 98178 - DNA, 20 bp, Artificial Sequence
  Description of Artificial Sequence: Synthetic oligonucleotide
  Target: LAMA2; (-) strand; PAM type: NRG; PAM sequence: AGG
gaaagaaaaggaagccaatt

SEQ ID NO: 98179 - DNA, 20 bp, Artificial Sequence
  Description of Artificial Sequence: Synthetic oligonucleotide
  Target: LAMA2; (-) strand; PAM type: NRG; PAM sequence: TAG
tgaaagaaaaggaagccaat

SEQ ID NO: 98180 - DNA, 20 bp, Artificial Sequence
  Description of Artificial Sequence: Synthetic oligonucleotide
  Target: LAMA2; (-) strand; PAM type: NRG; PAM sequence: AAG
agcatgcctgaaagaaaagg

SEQ ID NO: 98181 - DNA, 20 bp, Artificial Sequence
  Description of Artificial Sequence: Synthetic oligonucleotide
  Target: LAMA2; (-) strand; PAM type: NRG; PAM sequence: AGG
gcaagcatgcctgaaagaaa

SEQ ID NO: 98182 - DNA, 20 bp, Artificial Sequence
  Description of Artificial Sequence: Synthetic oligonucleotide
  Target: LAMA2; (-) strand; PAM type: NRG; PAM sequence: AAG
ggcaagcatgcctgaaagaa

SEQ ID NO: 98183 - DNA, 20 bp, Artificial Sequence
  Description of Artificial Sequence: Synthetic oligonucleotide
  Target: LAMA2; (-) strand; PAM type: NRG; PAM sequence: AAG
atcccggcaagcatgcctga

SEQ ID NO: 98184 - DNA, 20 bp, Artificial Sequence
  Description of Artificial Sequence: Synthetic oligonucleotide
  Target: LAMA2; (-) strand; PAM type: NRG; PAM sequence: AAG
gcagtcgataaaatcccggc

SEQ ID NO: 98185 - DNA, 20 bp, Artificial Sequence
  Description of Artificial Sequence: Synthetic oligonucleotide
  Target: LAMA2; (-) strand; PAM type: NRG; PAM sequence: CGG
gaacgcagtcgataaaatcc

SEQ ID NO: 98186 - DNA, 20 bp, Artificial Sequence
  Description of Artificial Sequence: Synthetic oligonucleotide
  Target: LAMA2; (-) strand; PAM type: NRG; PAM sequence: CAG
cggccacctggttgagaacg

SEQ ID NO: 98187 - DNA, 20 bp, Artificial Sequence
  Description of Artificial Sequence: Synthetic oligonucleotide
  Target: LAMA2; (-) strand; PAM type: NRG; PAM sequence: GAG
aggggtgcggccacctggtt

SEQ ID NO: 98188 - DNA, 20 bp, Artificial Sequence
  Description of Artificial Sequence: Synthetic oligonucleotide
  Target: LAMA2; (-) strand; PAM type: NRG; PAM sequence: TGG
ggtccaggggtgcggccacc

SEQ ID NO: 98189 - DNA, 20 bp, Artificial Sequence
  Description of Artificial Sequence: Synthetic oligonucleotide
  Target: LAMA2; (-) strand; PAM type: NRG; PAM sequence: CGG
ccagggttggtccaggggtg

SEQ ID NO: 98190 - DNA, 20 bp, Artificial Sequence
  Description of Artificial Sequence: Synthetic oligonucleotide
  Target: LAMA2; (-) strand; PAM type: NRG; PAM sequence: GGG
ggtgcccagggttggtccag

SEQ ID NO: 98191 - DNA, 20 bp, Artificial Sequence
  Description of Artificial Sequence: Synthetic oligonucleotide
  Target: LAMA2; (-) strand; PAM type: NRG; PAM sequence: GGG
aggtgcccagggttggtcca

SEQ ID NO: 98192 - DNA, 20 bp, Artificial Sequence
  Description of Artificial Sequence: Synthetic oligonucleotide
  Target: LAMA2; (-) strand; PAM type: NRG; PAM sequence: AGG
caggtgcccagggttggtcc

SEQ ID NO: 98193 - DNA, 20 bp, Artificial Sequence
  Description of Artificial Sequence: Synthetic oligonucleotide
  Target: LAMA2; (-) strand; PAM type: NRG; PAM sequence: CAG
acaggtgcccagggttggtc

SEQ ID NO: 98194 - DNA, 20 bp, Artificial Sequence
  Description of Artificial Sequence: Synthetic oligonucleotide
  Target: LAMA2; (-) strand; PAM type: NRG; PAM sequence: TGG
ggaacacaggtgcccagggt

SEQ ID NO: 98195 - DNA, 20 bp, Artificial Sequence
  Description of Artificial Sequence: Synthetic oligonucleotide
  Target: LAMA2; (-) strand; PAM type: NRG; PAM sequence: GGG
acatggaacacaggtgccca

SEQ ID NO: 98196 - DNA, 20 bp, Artificial Sequence
  Description of Artificial Sequence: Synthetic oligonucleotide
  Target: LAMA2; (-) strand; PAM type: NRG; PAM sequence: AGG
gacatggaacacaggtgccc

SEQ ID NO: 98197 - DNA, 20 bp, Artificial Sequence
  Description of Artificial Sequence: Synthetic oligonucleotide
  Target: LAMA2; (-) strand; PAM type: NRG; PAM sequence: CAG
tgacatggaacacaggtgcc

SEQ ID NO: 98198 - DNA, 20 bp, Artificial Sequence
  Description of Artificial Sequence: Synthetic oligonucleotide
  Target: LAMA2; (-) strand; PAM type: NRG; PAM sequence: AGG
attacattgacatggaacac

SEQ ID NO: 98199 - DNA, 20 bp, Artificial Sequence
  Description of Artificial Sequence: Synthetic oligonucleotide
  Target: LAMA2; (-) strand; PAM type: NRG; PAM sequence: CAG
cattacattgacatggaaca

SEQ ID NO: 98200 - DNA, 20 bp, Artificial Sequence
  Description of Artificial Sequence: Synthetic oligonucleotide
  Target: LAMA2; (-) strand; PAM type: NRG; PAM sequence: TGG
ctgtgtccattacattgaca

SEQ ID NO: 98201 - DNA, 20 bp, Artificial Sequence
  Description of Artificial Sequence: Synthetic oligonucleotide
  Target: LAMA2; (-) strand; PAM type: NRG; PAM sequence: AGG
tcgatgtttcagggtcacac

SEQ ID NO: 98202 - DNA, 20 bp, Artificial Sequence
  Description of Artificial Sequence: Synthetic oligonucleotide
  Target: LAMA2; (-) strand; PAM type: NRG; PAM sequence: CAG
atcgatgtttcagggtcaca

SEQ ID NO: 98203 - DNA, 20 bp, Artificial Sequence
  Description of Artificial Sequence: Synthetic oligonucleotide
  Target: LAMA2; (-) strand; PAM type: NRG; PAM sequence: GGG
cctggcatatcgatgtttca

SEQ ID NO: 98204 - DNA, 20 bp, Artificial Sequence
  Description of Artificial Sequence: Synthetic oligonucleotide
  Target: LAMA2; (-) strand; PAM type: NRG; PAM sequence: AGG
acctggcatatcgatgtttc

SEQ ID NO: 98205 - DNA, 20 bp, Artificial Sequence
  Description of Artificial Sequence: Synthetic oligonucleotide
  Target: LAMA2; (-) strand; PAM type: NRG; PAM sequence: CAG
tacctggcatatcgatgttt

SEQ ID NO: 98206 - DNA, 20 bp, Artificial Sequence
  Description of Artificial Sequence: Synthetic oligonucleotide
  Target: LAMA2; (-) strand; PAM type: NRG; PAM sequence: TGG
ggaaggctcagaggactacc

SEQ ID NO: 98207 - DNA, 20 bp, Artificial Sequence
  Description of Artificial Sequence: Synthetic oligonucleotide
  Target: LAMA2; (-) strand; PAM type: NRG; PAM sequence: AGG
cttgttcaaggaaggctcag

SEQ ID NO: 98208 - DNA, 20 bp, Artificial Sequence
  Description of Artificial Sequence: Synthetic oligonucleotide
  Target: LAMA2; (-) strand; PAM type: NRG; PAM sequence: GAG
ccttgttcaaggaaggctca

SEQ ID NO: 98209 - DNA, 20 bp, Artificial Sequence
  Description of Artificial Sequence: Synthetic oligonucleotide
  Target: LAMA2; (-) strand; PAM type: NRG; PAM sequence: CAG
gaccttgttcaaggaaggct

SEQ ID NO: 98210 - DNA, 20 bp, Artificial Sequence
  Description of Artificial Sequence: Synthetic oligonucleotide
  Target: LAMA2; (-) strand; PAM type: NRG; PAM sequence: AGG
acatggaccttgttcaagga

SEQ ID NO: 98211 - DNA, 20 bp, Artificial Sequence
  Description of Artificial Sequence: Synthetic oligonucleotide
  Target: LAMA2; (-) strand; PAM type: NRG; PAM sequence: AAG
cacatggaccttgttcaagg

SEQ ID NO: 98212 - DNA, 20 bp, Artificial Sequence
  Description of Artificial Sequence: Synthetic oligonucleotide
  Target: LAMA2; (-) strand; PAM type: NRG; PAM sequence: AGG
gagcacatggaccttgttca

SEQ ID NO: 98213 - DNA, 20 bp, Artificial Sequence
  Description of Artificial Sequence: Synthetic oligonucleotide
  Target: LAMA2; (-) strand; PAM type: NRG; PAM sequence: AAG
tgagcacatggaccttgttc

SEQ ID NO: 98214 - DNA, 20 bp, Artificial Sequence
  Description of Artificial Sequence: Synthetic oligonucleotide
  Target: LAMA2; (-) strand; PAM type: NRG; PAM sequence: TGG
tgtaaagaggaatgagcaca

SEQ ID NO: 98215 - DNA, 20 bp, Artificial Sequence
  Description of Artificial Sequence: Synthetic oligonucleotide
  Target: LAMA2; (-) strand; PAM type: NRG; PAM sequence: GAG
gagcatgtgtaaagaggaat

SEQ ID NO: 98216 - DNA, 20 bp, Artificial Sequence
  Description of Artificial Sequence: Synthetic oligonucleotide
  Target: LAMA2; (-) strand; PAM type: NRG; PAM sequence: AGG
gatgctgagcatgtgtaaag

SEQ ID NO: 98217 - DNA, 20 bp, Artificial Sequence
  Description of Artificial Sequence: Synthetic oligonucleotide
  Target: LAMA2; (-) strand; PAM type: NRG; PAM sequence: GAG
agatgctgagcatgtgtaaa

SEQ ID NO: 98218 - DNA, 20 bp, Artificial Sequence
  Description of Artificial Sequence: Synthetic oligonucleotide
  Target: LAMA2; (-) strand; PAM type: NRG; PAM sequence: AAG
gcagatgctgagcatgtgta

SEQ ID NO: 98219 - DNA, 20 bp, Artificial Sequence
  Description of Artificial Sequence: Synthetic oligonucleotide
  Target: LAMA2; (-) strand; PAM type: NRG; PAM sequence: GAG
ggcctctgcatgcagatgct

SEQ ID NO: 98220 - DNA, 20 bp, Artificial Sequence
  Description of Artificial Sequence: Synthetic oligonucleotide
  Target: LAMA2; (-) strand; PAM type: NRG; PAM sequence: CAG
gtttagctggcctctgcatg

SEQ ID NO: 98221 - DNA, 20 bp, Artificial Sequence
  Description of Artificial Sequence: Synthetic oligonucleotide
  Target: LAMA2; (-) strand; PAM type: NRG; PAM sequence: TGG
gcattcccttacagtttagc

SEQ ID NO: 98222 - DNA, 20 bp, Artificial Sequence
  Description of Artificial Sequence: Synthetic oligonucleotide
  Target: LAMA2; (-) strand; PAM type: NRG; PAM sequence: TAG
agttgcattcccttacagtt

SEQ ID NO: 98223 - DNA, 20 bp, Artificial Sequence
  Description of Artificial Sequence: Synthetic oligonucleotide
  Target: LAMA2; (-) strand; PAM type: NRG; PAM sequence: CAG
cacacagttgcattccctta

SEQ ID NO: 98224 - DNA, 20 bp, Artificial Sequence
  Description of Artificial Sequence: Synthetic oligonucleotide
  Target: LAMA2; (-) strand; PAM type: NRG; PAM sequence: CAG
catattttatttcacacaca

SEQ ID NO: 98225 - DNA, 20 bp, Artificial Sequence
  Description of Artificial Sequence: Synthetic oligonucleotide
  Target: LAMA2; (-) strand; PAM type: NRG; PAM sequence: CAG
tttccttactttttaaaatg

SEQ ID NO: 98226 - DNA, 20 bp, Artificial Sequence
  Description of Artificial Sequence: Synthetic oligonucleotide
  Target: LAMA2; (-) strand; PAM type: NRG; PAM sequence: CAG
gacatgctcagtggttctcc

SEQ ID NO: 98227 - DNA, 20 bp, Artificial Sequence
  Description of Artificial Sequence: Synthetic oligonucleotide
  Target: LAMA2; (-) strand; PAM type: NRG; PAM sequence: TGG
ctatttcttgacatgctcag

SEQ ID NO: 98228 - DNA, 20 bp, Artificial Sequence
  Description of Artificial Sequence: Synthetic oligonucleotide
  Target: LAMA2; (-) strand; PAM type: NRG; PAM sequence: CAG
attctatttcttgacatgct

SEQ ID NO: 98229 - DNA, 20 bp, Artificial Sequence
  Description of Artificial Sequence: Synthetic oligonucleotide
  Target: LAMA2; (-) strand; PAM type: NRG; PAM sequence: AAG
atgtcttctggtgctcttct

SEQ ID NO: 98230 - DNA, 20 bp, Artificial Sequence
  Description of Artificial Sequence: Synthetic oligonucleotide
  Target: LAMA2; (-) strand; PAM type: NRG; PAM sequence: TGG
ttttaaataggtatgtcttc

SEQ ID NO: 98231 - DNA, 20 bp, Artificial Sequence
  Description of Artificial Sequence: Synthetic oligonucleotide
  Target: LAMA2; (-) strand; PAM type: NRG; PAM sequence: AGG
ggcacacataatttttaaat

SEQ ID NO: 98232 - DNA, 20 bp, Artificial Sequence
  Description of Artificial Sequence: Synthetic oligonucleotide
  Target: LAMA2; (-) strand; PAM type: NRG; PAM sequence: TAG
aggcacacataatttttaaa

SEQ ID NO: 98233 - DNA, 20 bp, Artificial Sequence
  Description of Artificial Sequence: Synthetic oligonucleotide
  Target: LAMA2; (-) strand; PAM type: NRG; PAM sequence: AGG
aagaaaataatcagaaaaaa

SEQ ID NO: 98234 - DNA, 20 bp, Artificial Sequence
  Description of Artificial Sequence: Synthetic oligonucleotide
  Target: LAMA2; (-) strand; PAM type: NRG; PAM sequence: AAG
taagaaaataatcagaaaaa

SEQ ID NO: 98235 - DNA, 20 bp, Artificial Sequence
  Description of Artificial Sequence: Synthetic oligonucleotide
  Target: LAMA2; (-) strand; PAM type: NRG; PAM sequence: CAG
tttatttataagaaaataat

SEQ ID NO: 98236 - DNA, 20 bp, Artificial Sequence
  Description of Artificial Sequence: Synthetic oligonucleotide
  Target: LAMA2; (-) strand; PAM type: NRG; PAM sequence: AAG
tttatagaaagtttatttat

SEQ ID NO: 98237 - DNA, 20 bp, Artificial Sequence
  Description of Artificial Sequence: Synthetic oligonucleotide
  Target: LAMA2; (-) strand; PAM type: NRG; PAM sequence: AAG
taatttccaaattttataga

SEQ ID NO: 98238 - DNA, 20 bp, Artificial Sequence
  Description of Artificial Sequence: Synthetic oligonucleotide
  Target: LAMA2; (-) strand; PAM type: NRG; PAM sequence: TAG
tctgtaatttccaaatttta

SEQ ID NO: 98239 - DNA, 20 bp, Artificial Sequence
  Description of Artificial Sequence: Synthetic oligonucleotide
  Target: LAMA2; (-) strand; PAM type: NRG; PAM sequence: GGG
aaaatgttatgttgcatttt

SEQ ID NO: 98240 - DNA, 20 bp, Artificial Sequence
  Description of Artificial Sequence: Synthetic oligonucleotide
  Target: LAMA2; (-) strand; PAM type: NRG; PAM sequence: TGG
taaaatgttatgttgcattt

SEQ ID NO: 98241 - DNA, 20 bp, Artificial Sequence
  Description of Artificial Sequence: Synthetic oligonucleotide
  Target: LAMA2; (-) strand; PAM type: NRG; PAM sequence: GGG
aaacacatgtaaaaattggt

SEQ ID NO: 98242 - DNA, 20 bp, Artificial Sequence
  Description of Artificial Sequence: Synthetic oligonucleotide
  Target: LAMA2; (-) strand; PAM type: NRG; PAM sequence: TGG
taaacacatgtaaaaattgg

SEQ ID NO: 98243 - DNA, 20 bp, Artificial Sequence
  Description of Artificial Sequence: Synthetic oligonucleotide
  Target: LAMA2; (-) strand; PAM type: NRG; PAM sequence: TGG
tcataaacacatgtaaaaat

SEQ ID NO: 98244 - DNA, 20 bp, Artificial Sequence
  Description of Artificial Sequence: Synthetic oligonucleotide
  Target: LAMA2; (-) strand; PAM type: NRG; PAM sequence: TGG
aagacataaaactgcatcca

SEQ ID NO: 98245 - DNA, 20 bp, Artificial Sequence
  Description of Artificial Sequence: Synthetic oligonucleotide
  Target: LAMA2; (-) strand; PAM type: NRG; PAM sequence: AAG
taggtaaaaatgtaaaggac

SEQ ID NO: 98246 - DNA, 20 bp, Artificial Sequence
  Description of Artificial Sequence: Synthetic oligonucleotide
  Target: LAMA2; (-) strand; PAM type: NRG; PAM sequence: AGG
catgataggtaaaaatgtaa

SEQ ID NO: 98247 - DNA, 20 bp, Artificial Sequence
  Description of Artificial Sequence: Synthetic oligonucleotide
  Target: LAMA2; (-) strand; PAM type: NRG; PAM sequence: AAG
tcatgataggtaaaaatgta

SEQ ID NO: 98248 - DNA, 20 bp, Artificial Sequence
  Description of Artificial Sequence: Synthetic oligonucleotide
  Target: LAMA2; (-) strand; PAM type: NRG; PAM sequence: AGG
acataatacaacctcatgat

SEQ ID NO: 98249 - DNA, 20 bp, Artificial Sequence
  Description of Artificial Sequence: Synthetic oligonucleotide
  Target: LAMA2; (-) strand; PAM type: NRG; PAM sequence: TAG
aacataatacaacctcatga

SEQ ID NO: 98250 - DNA, 20 bp, Artificial Sequence
  Description of Artificial Sequence: Synthetic oligonucleotide
  Target: LAMA2; (-) strand; PAM type: NRG; PAM sequence: AAG
acatccaaacaaagatcgta

SEQ ID NO: 98251 - DNA, 20 bp, Artificial Sequence
  Description of Artificial Sequence: Synthetic oligonucleotide
  Target: LAMA2; (-) strand; PAM type: NRG; PAM sequence: AAG
aattatgggacatccaaaca

SEQ ID NO: 98252 - DNA, 20 bp, Artificial Sequence
  Description of Artificial Sequence: Synthetic oligonucleotide
  Target: LAMA2; (-) strand; PAM type: NRG; PAM sequence: GGG
aagggaaatgggtaaattat

SEQ ID NO: 98253 - DNA, 20 bp, Artificial Sequence
  Description of Artificial Sequence: Synthetic oligonucleotide
  Target: LAMA2; (-) strand; PAM type: NRG; PAM sequence: TGG
taagggaaatgggtaaatta

SEQ ID NO: 98254 - DNA, 20 bp, Artificial Sequence
  Description of Artificial Sequence: Synthetic oligonucleotide
  Target: LAMA2; (-) strand; PAM type: NRG; PAM sequence: GGG
acctcaattctaagggaaat

SEQ ID NO: 98255 - DNA, 20 bp, Artificial Sequence
  Description of Artificial Sequence: Synthetic oligonucleotide
  Target: LAMA2; (-) strand; PAM type: NRG; PAM sequence: TGG
tacctcaattctaagggaaa

SEQ ID NO: 98256 - DNA, 20 bp, Artificial Sequence
  Description of Artificial Sequence: Synthetic oligonucleotide
  Target: LAMA2; (-) strand; PAM type: NRG; PAM sequence: GGG
aagagctacctcaattctaa

SEQ ID NO: 98257 - DNA, 20 bp, Artificial Sequence
  Description of Artificial Sequence: Synthetic oligonucleotide
  Target: LAMA2; (-) strand; PAM type: NRG; PAM sequence: AGG
taagagctacctcaattcta

SEQ ID NO: 98258 - DNA, 20 bp, Artificial Sequence
  Description of Artificial Sequence: Synthetic oligonucleotide
  Target: LAMA2; (-) strand; PAM type: NRG; PAM sequence: AAG
ataagagctacctcaattct

SEQ ID NO: 98259 - DNA, 20 bp, Artificial Sequence
  Description of Artificial Sequence: Synthetic oligonucleotide
  Target: LAMA2; (-) strand; PAM type: NRG; PAM sequence: GAG
gcagaaacataaaaaaataa

SEQ ID NO: 98260 - DNA, 20 bp, Artificial Sequence
  Description of Artificial Sequence: Synthetic oligonucleotide
  Target: LAMA2; (-) strand; PAM type: NRG; PAM sequence: AAG
cagcagaaacataaaaaaat

SEQ ID NO: 98261 - DNA, 20 bp, Artificial Sequence
  Description of Artificial Sequence: Synthetic oligonucleotide
  Target: LAMA2; (-) strand; PAM type: NRG; PAM sequence: CAG
tagagagtgcagggtgccag

SEQ ID NO: 98262 - DNA, 20 bp, Artificial Sequence
  Description of Artificial Sequence: Synthetic oligonucleotide
  Target: LAMA2; (-) strand; PAM type: NRG; PAM sequence: CAG
tggtagagagtgcagggtgc

SEQ ID NO: 98263 - DNA, 20 bp, Artificial Sequence
  Description of Artificial Sequence: Synthetic oligonucleotide
  Target: LAMA2; (-) strand; PAM type: NRG; PAM sequence: GGG
agatggtggtagagagtgca

SEQ ID NO: 98264 - DNA, 20 bp, Artificial Sequence
  Description of Artificial Sequence: Synthetic oligonucleotide
  Target: LAMA2; (-) strand; PAM type: NRG; PAM sequence: AGG
cagatggtggtagagagtgc

SEQ ID NO: 98265 - DNA, 20 bp, Artificial Sequence
  Description of Artificial Sequence: Synthetic oligonucleotide
  Target: LAMA2; (-) strand; PAM type: NRG; PAM sequence: CAG
gcagatggtggtagagagtg

SEQ ID NO: 98266 - DNA, 20 bp, Artificial Sequence
  Description of Artificial Sequence: Synthetic oligonucleotide
  Target: LAMA2; (-) strand; PAM type: NRG; PAM sequence: GAG
ctaatgcagatggtggtaga

SEQ ID NO: 98267 - DNA, 20 bp, Artificial Sequence
  Description of Artificial Sequence: Synthetic oligonucleotide
  Target: LAMA2; (-) strand; PAM type: NRG; PAM sequence: GAG
ttctaatgcagatggtggta

SEQ ID NO: 98268 - DNA, 20 bp, Artificial Sequence
  Description of Artificial Sequence: Synthetic oligonucleotide
  Target: LAMA2; (-) strand; PAM type: NRG; PAM sequence: TAG
tgttctaatgcagatggtgg

SEQ ID NO: 98269 - DNA, 20 bp, Artificial Sequence
  Description of Artificial Sequence: Synthetic oligonucleotide
  Target: LAMA2; (-) strand; PAM type: NRG; PAM sequence: TGG
gattgttctaatgcagatgg

SEQ ID NO: 98270 - DNA, 20 bp, Artificial Sequence
  Description of Artificial Sequence: Synthetic oligonucleotide
  Target: LAMA2; (-) strand; PAM type: NRG; PAM sequence: TGG
tctgattgttctaatgcaga

SEQ ID NO: 98271 - DNA, 20 bp, Artificial Sequence
  Description of Artificial Sequence: Synthetic oligonucleotide
  Target: LAMA2; (-) strand; PAM type: NRG; PAM sequence: CAG
ttgttctgattgttctaatg

SEQ ID NO: 98272 - DNA, 20 bp, Artificial Sequence
  Description of Artificial Sequence: Synthetic oligonucleotide
  Target: LAMA2; (-) strand; PAM type: NRG; PAM sequence: TGG
agtgactacgataaaaaggg

SEQ ID NO: 98273 - DNA, 20 bp, Artificial Sequence
  Description of Artificial Sequence: Synthetic oligonucleotide
  Target: LAMA2; (-) strand; PAM type: NRG; PAM sequence: GGG
tacagtgactacgataaaaa

SEQ ID NO: 98274 - DNA, 20 bp, Artificial Sequence
  Description of Artificial Sequence: Synthetic oligonucleotide
  Target: LAMA2; (-) strand; PAM type: NRG; PAM sequence: AGG
ttacagtgactacgataaaa

SEQ ID NO: 98275 - DNA, 20 bp, Artificial Sequence
  Description of Artificial Sequence: Synthetic oligonucleotide
  Target: LAMA2; (-) strand; PAM type: NRG; PAM sequence: AAG
cttacagtgactacgataaa

SEQ ID NO: 98276 - DNA, 20 bp, Artificial Sequence
  Description of Artificial Sequence: Synthetic oligonucleotide
  Target: LAMA2; (-) strand; PAM type: NRG; PAM sequence: CAG
ggggcaacctgaatttctta

SEQ ID NO: 98277 - DNA, 20 bp, Artificial Sequence
  Description of Artificial Sequence: Synthetic oligonucleotide
  Target: LAMA2; (-) strand; PAM type: NRG; PAM sequence: GGG
tgagggacaagtggtgacag

SEQ ID NO: 98278 - DNA, 20 bp, Artificial Sequence
  Description of Artificial Sequence: Synthetic oligonucleotide
  Target: LAMA2; (-) strand; PAM type: NRG; PAM sequence: GGG
ttgagggacaagtggtgaca

SEQ ID NO: 98279 - DNA, 20 bp, Artificial Sequence
  Description of Artificial Sequence: Synthetic oligonucleotide
  Target: LAMA2; (-) strand; PAM type: NRG; PAM sequence: AGG
cttgagggacaagtggtgac

SEQ ID NO: 98280 - DNA, 20 bp, Artificial Sequence
  Description of Artificial Sequence: Synthetic oligonucleotide
  Target: LAMA2; (-) strand; PAM type: NRG; PAM sequence: CAG
gcttgagggacaagtggtga

SEQ ID NO: 98281 - DNA, 20 bp, Artificial Sequence
  Description of Artificial Sequence: Synthetic oligonucleotide
  Target: LAMA2; (-) strand; PAM type: NRG; PAM sequence: TGG
attacagcttgagggacaag

SEQ ID NO: 98282 - DNA, 20 bp, Artificial Sequence
  Description of Artificial Sequence: Synthetic oligonucleotide
  Target: LAMA2; (-) strand; PAM type: NRG; PAM sequence: AAG
cagattacagcttgagggac

SEQ ID NO: 98283 - DNA, 20 bp, Artificial Sequence
  Description of Artificial Sequence: Synthetic oligonucleotide
  Target: LAMA2; (-) strand; PAM type: NRG; PAM sequence: GGG
gtgggcagattacagcttga

SEQ ID NO: 98284 - DNA, 20 bp, Artificial Sequence
  Description of Artificial Sequence: Synthetic oligonucleotide
  Target: LAMA2; (-) strand; PAM type: NRG; PAM sequence: AGG
tgtgggcagattacagcttg

SEQ ID NO: 98285 - DNA, 20 bp, Artificial Sequence
  Description of Artificial Sequence: Synthetic oligonucleotide
  Target: LAMA2; (-) strand; PAM type: NRG; PAM sequence: GAG
ctgtgggcagattacagctt

SEQ ID NO: 98286 - DNA, 20 bp, Artificial Sequence
  Description of Artificial Sequence: Synthetic oligonucleotide
  Target: LAMA2; (-) strand; PAM type: NRG; PAM sequence: CAG
gatgagctgtgggcagatta

SEQ ID NO: 98287 - DNA, 20 bp, Artificial Sequence
  Description of Artificial Sequence: Synthetic oligonucleotide
  Target: LAMA2; (-) strand; PAM type: NRG; PAM sequence: CAG
taacaaagatgagctgtggg

SEQ ID NO: 98288 - DNA, 20 bp, Artificial Sequence
  Description of Artificial Sequence: Synthetic oligonucleotide
  Target: LAMA2; (-) strand; PAM type: NRG; PAM sequence: GGG
gcttaacaaagatgagctgt

SEQ ID NO: 98289 - DNA, 20 bp, Artificial Sequence
  Description of Artificial Sequence: Synthetic oligonucleotide
  Target: LAMA2; (-) strand; PAM type: NRG; PAM sequence: TGG
ggcttaacaaagatgagctg

SEQ ID NO: 98290 - DNA, 20 bp, Artificial Sequence
  Description of Artificial Sequence: Synthetic oligonucleotide
  Target: LAMA2; (-) strand; PAM type: NRG; PAM sequence: GAG
gagatgggcttaacaaagat

SEQ ID NO: 98291 - DNA, 20 bp, Artificial Sequence
  Description of Artificial Sequence: Synthetic oligonucleotide
  Target: LAMA2; (-) strand; PAM type: NRG; PAM sequence: AAG
ggtgggagatgggcttaaca

SEQ ID NO: 98292 - DNA, 20 bp, Artificial Sequence
  Description of Artificial Sequence: Synthetic oligonucleotide
  Target: LAMA2; (-) strand; PAM type: NRG; PAM sequence: GGG
ggtgagcagaggtgggagat

SEQ ID NO: 98293 - DNA, 20 bp, Artificial Sequence
  Description of Artificial Sequence: Synthetic oligonucleotide
  Target: LAMA2; (-) strand; PAM type: NRG; PAM sequence: TGG
aggtgagcagaggtgggaga

SEQ ID NO: 98294 - DNA, 20 bp, Artificial Sequence
  Description of Artificial Sequence: Synthetic oligonucleotide
  Target: LAMA2; (-) strand; PAM type: NRG; PAM sequence: GAG
cagaaggtgagcagaggtgg

SEQ ID NO: 98295 - DNA, 20 bp, Artificial Sequence
  Description of Artificial Sequence: Synthetic oligonucleotide
  Target: LAMA2; (-) strand; PAM type: NRG; PAM sequence: GGG
ttcagaaggtgagcagaggt

SEQ ID NO: 98296 - DNA, 20 bp, Artificial Sequence
  Description of Artificial Sequence: Synthetic oligonucleotide
  Target: LAMA2; (-) strand; PAM type: NRG; PAM sequence: TGG
tttcagaaggtgagcagagg

SEQ ID NO: 98297 - DNA, 20 bp, Artificial Sequence
  Description of Artificial Sequence: Synthetic oligonucleotide
  Target: LAMA2; (-) strand; PAM type: NRG; PAM sequence: AGG
tggtttcagaaggtgagcag

SEQ ID NO: 98298 - DNA, 20 bp, Artificial Sequence
  Description of Artificial Sequence: Synthetic oligonucleotide
  Target: LAMA2; (-) strand; PAM type: NRG; PAM sequence: GAG
atggtttcagaaggtgagca

SEQ ID NO: 98299 - DNA, 20 bp, Artificial Sequence
  Description of Artificial Sequence: Synthetic oligonucleotide
  Target: LAMA2; (-) strand; PAM type: NRG; PAM sequence: CAG
gaatggtttcagaaggtgag

SEQ ID NO: 98300 - DNA, 20 bp, Artificial Sequence
  Description of Artificial Sequence: Synthetic oligonucleotide
  Target: LAMA2; (-) strand; PAM type: NRG; PAM sequence: GAG
gtagaatggtttcagaaggt

SEQ ID NO: 98301 - DNA, 20 bp, Artificial Sequence
  Description of Artificial Sequence: Synthetic oligonucleotide
  Target: LAMA2; (-) strand; PAM type: NRG; PAM sequence: AGG
ctcagtagaatggtttcaga

SEQ ID NO: 98302 - DNA, 20 bp, Artificial Sequence
  Description of Artificial Sequence: Synthetic oligonucleotide
  Target: LAMA2; (-) strand; PAM type: NRG; PAM sequence: AAG
gctcagtagaatggtttcag

SEQ ID NO: 98303 - DNA, 20 bp, Artificial Sequence
  Description of Artificial Sequence: Synthetic oligonucleotide
  Target: LAMA2; (-) strand; PAM type: NRG; PAM sequence: CAG
aaggctcagtagaatggttt

SEQ ID NO: 98304 - DNA, 20 bp, Artificial Sequence
  Description of Artificial Sequence: Synthetic oligonucleotide
  Target: LAMA2; (-) strand; PAM type: NRG; PAM sequence: TGG
ttccacaaggctcagtagaa

SEQ ID NO: 98305 - DNA, 20 bp, Artificial Sequence
  Description of Artificial Sequence: Synthetic oligonucleotide
  Target: LAMA2; (-) strand; PAM type: NRG; PAM sequence: TAG
atgagttccacaaggctcag

SEQ ID NO: 98306 - DNA, 20 bp, Artificial Sequence
  Description of Artificial Sequence: Synthetic oligonucleotide
  Target: LAMA2; (-) strand; PAM type: NRG; PAM sequence: CAG
accatgagttccacaaggct

SEQ ID NO: 98307 - DNA, 20 bp, Artificial Sequence
  Description of Artificial Sequence: Synthetic oligonucleotide
  Target: LAMA2; (-) strand; PAM type: NRG; PAM sequence: AGG
ttttgaccatgagttccaca

SEQ ID NO: 98308 - DNA, 20 bp, Artificial Sequence
  Description of Artificial Sequence: Synthetic oligonucleotide
  Target: LAMA2; (-) strand; PAM type: NRG; PAM sequence: AAG
gttttgaccatgagttccac

SEQ ID NO: 98309 - DNA, 20 bp, Artificial Sequence
  Description of Artificial Sequence: Synthetic oligonucleotide
  Target: LAMA2; (-) strand; PAM type: NRG; PAM sequence: GAG
attttgcctgttttgaccat

SEQ ID NO: 98310 - DNA, 20 bp, Artificial Sequence
  Description of Artificial Sequence: Synthetic oligonucleotide
  Target: LAMA2; (-) strand; PAM type: NRG; PAM sequence: GGG
gggaagaggaggattctgcg

SEQ ID NO: 98311 - DNA, 20 bp, Artificial Sequence
  Description of Artificial Sequence: Synthetic oligonucleotide
  Target: LAMA2; (-) strand; PAM type: NRG; PAM sequence: GGG
agggaagaggaggattctgc

SEQ ID NO: 98312 - DNA, 20 bp, Artificial Sequence
  Description of Artificial Sequence: Synthetic oligonucleotide
  Target: LAMA2; (-) strand; PAM type: NRG; PAM sequence: CGG
gagggaagaggaggattctg

SEQ ID NO: 98313 - DNA, 20 bp, Artificial Sequence
  Description of Artificial Sequence: Synthetic oligonucleotide
  Target: LAMA2; (-) strand; PAM type: NRG; PAM sequence: AGG
gagaacactgagggaagagg

SEQ ID NO: 98314 - DNA, 20 bp, Artificial Sequence
  Description of Artificial Sequence: Synthetic oligonucleotide
  Target: LAMA2; (-) strand; PAM type: NRG; PAM sequence: GAG
agagaacactgagggaagag

SEQ ID NO: 98315 - DNA, 20 bp, Artificial Sequence
  Description of Artificial Sequence: Synthetic oligonucleotide
  Target: LAMA2; (-) strand; PAM type: NRG; PAM sequence: AGG
gaagagaacactgagggaag

SEQ ID NO: 98316 - DNA, 20 bp, Artificial Sequence
  Description of Artificial Sequence: Synthetic oligonucleotide
  Target: LAMA2; (-) strand; PAM type: NRG; PAM sequence: GAG
tgaagagaacactgagggaa

SEQ ID NO: 98317 - DNA, 20 bp, Artificial Sequence
  Description of Artificial Sequence: Synthetic oligonucleotide
  Target: LAMA2; (-) strand; PAM type: NRG; PAM sequence: AAG
gatgaagagaacactgaggg

SEQ ID NO: 98318 - DNA, 20 bp, Artificial Sequence
  Description of Artificial Sequence: Synthetic oligonucleotide
  Target: LAMA2; (-) strand; PAM type: NRG; PAM sequence: GGG
catgatgaagagaacactga

SEQ ID NO: 98319 - DNA, 20 bp, Artificial Sequence
  Description of Artificial Sequence: Synthetic oligonucleotide
  Target: LAMA2; (-) strand; PAM type: NRG; PAM sequence: AGG
gcatgatgaagagaacactg

SEQ ID NO: 98320 - DNA, 20 bp, Artificial Sequence
  Description of Artificial Sequence: Synthetic oligonucleotide
  Target: LAMA2; (-) strand; PAM type: NRG; PAM sequence: GAG
agcatgatgaagagaacact

SEQ ID NO: 98321 - DNA, 20 bp, Artificial Sequence
  Description of Artificial Sequence: Synthetic oligonucleotide
  Target: LAMA2; (-) strand; PAM type: NRG; PAM sequence: GAG
ttcagtcagagcatgatgaa

SEQ ID NO: 98322 - DNA, 20 bp, Artificial Sequence
  Description of Artificial Sequence: Synthetic oligonucleotide
  Target: LAMA2; (-) strand; PAM type: NRG; PAM sequence: AAG
gtttcagtcagagcatgatg

SEQ ID NO: 98323 - DNA, 20 bp, Artificial Sequence
  Description of Artificial Sequence: Synthetic oligonucleotide
  Target: LAMA2; (-) strand; PAM type: NRG; PAM sequence: GAG
tgagagttgggtttcagtca

SEQ ID NO: 98324 - DNA, 20 bp, Artificial Sequence
  Description of Artificial Sequence: Synthetic oligonucleotide
  Target: LAMA2; (-) strand; PAM type: NRG; PAM sequence: CAG
agtgagagttgggtttcagt

SEQ ID NO: 98325 - DNA, 20 bp, Artificial Sequence
  Description of Artificial Sequence: Synthetic oligonucleotide
  Target: LAMA2; (-) strand; PAM type: NRG; PAM sequence: CAG
gcaaagtgagagttgggttt

SEQ ID NO: 98326 - DNA, 20 bp, Artificial Sequence
  Description of Artificial Sequence: Synthetic oligonucleotide
  Target: LAMA2; (-) strand; PAM type: NRG; PAM sequence: GGG
cagcatgcaaagtgagagtt

SEQ ID NO: 98327 - DNA, 20 bp, Artificial Sequence
  Description of Artificial Sequence: Synthetic oligonucleotide
  Target: LAMA2; (-) strand; PAM type: NRG; PAM sequence: TGG
gcagcatgcaaagtgagagt

SEQ ID NO: 98328 - DNA, 20 bp, Artificial Sequence
  Description of Artificial Sequence: Synthetic oligonucleotide
  Target: LAMA2; (-) strand; PAM type: NRG; PAM sequence: GAG
ggtagcagcatgcaaagtga

SEQ ID NO: 98329 - DNA, 20 bp, Artificial Sequence
  Description of Artificial Sequence: Synthetic oligonucleotide
  Target: LAMA2; (-) strand; PAM type: NRG; PAM sequence: GAG
ggggtagcagcatgcaaagt

SEQ ID NO: 98330 - DNA, 20 bp, Artificial Sequence
  Description of Artificial Sequence: Synthetic oligonucleotide
  Target: LAMA2; (-) strand; PAM type: NRG; PAM sequence: AAG
tgccggggtagcagcatgca

SEQ ID NO: 98331 - DNA, 20 bp, Artificial Sequence
  Description of Artificial Sequence: Synthetic oligonucleotide
  Target: LAMA2; (-) strand; PAM type: NRG; PAM sequence: CAG
taagagggctgccggggtag

SEQ ID NO: 98332 - DNA, 20 bp, Artificial Sequence
  Description of Artificial Sequence: Synthetic oligonucleotide
  Target: LAMA2; (-) strand; PAM type: NRG; PAM sequence: TAG
ccttaagagggctgccgggg

SEQ ID NO: 98333 - DNA, 20 bp, Artificial Sequence
  Description of Artificial Sequence: Synthetic oligonucleotide
  Target: LAMA2; (-) strand; PAM type: NRG; PAM sequence: GGG
actccttaagagggctgccg

SEQ ID NO: 98334 - DNA, 20 bp, Artificial Sequence
  Description of Artificial Sequence: Synthetic oligonucleotide
  Target: LAMA2; (-) strand; PAM type: NRG; PAM sequence: GGG
tactccttaagagggctgcc

SEQ ID NO: 98335 - DNA, 20 bp, Artificial Sequence
  Description of Artificial Sequence: Synthetic oligonucleotide
  Target: LAMA2; (-) strand; PAM type: NRG; PAM sequence: CGG
ctactccttaagagggctgc

SEQ ID NO: 98336 - DNA, 20 bp, Artificial Sequence
  Description of Artificial Sequence: Synthetic oligonucleotide
  Target: LAMA2; (-) strand; PAM type: NRG; PAM sequence: GGG
gtgatggctactccttaaga

SEQ ID NO: 98337 - DNA, 20 bp, Artificial Sequence
  Description of Artificial Sequence: Synthetic oligonucleotide
  Target: LAMA2; (-) strand; PAM type: NRG; PAM sequence: AGG
ggtgatggctactccttaag

SEQ ID NO: 98338 - DNA, 20 bp, Artificial Sequence
  Description of Artificial Sequence: Synthetic oligonucleotide
  Target: LAMA2; (-) strand; PAM type: NRG; PAM sequence: GAG
aggtgatggctactccttaa

SEQ ID NO: 98339 - DNA, 20 bp, Artificial Sequence
  Description of Artificial Sequence: Synthetic oligonucleotide
  Target: LAMA2; (-) strand; PAM type: NRG; PAM sequence: AAG
aaaggtgatggctactcctt

SEQ ID NO: 98340 - DNA, 20 bp, Artificial Sequence
  Description of Artificial Sequence: Synthetic oligonucleotide
  Target: LAMA2; (-) strand; PAM type: NRG; PAM sequence: TGG
aaaaaaaaacaaaaaggtga

SEQ ID NO: 98341 - DNA, 20 bp, Artificial Sequence
  Description of Artificial Sequence: Synthetic oligonucleotide
  Target: LAMA2; (-) strand; PAM type: NRG; PAM sequence: AGG
aggggaaaaaaaaaacaaaa

SEQ ID NO: 98342 - DNA, 20 bp, Artificial Sequence
  Description of Artificial Sequence: Synthetic oligonucleotide
  Target: LAMA2; (-) strand; PAM type: NRG; PAM sequence: AAG
caggggaaaaaaaaaacaaa

SEQ ID NO: 98343 - DNA, 20 bp, Artificial Sequence
  Description of Artificial Sequence: Synthetic oligonucleotide
  Target: LAMA2; (-) strand; PAM type: NRG; PAM sequence: GGG
agagtgagtcagcatctcag

SEQ ID NO: 98344 - DNA, 20 bp, Artificial Sequence
  Description of Artificial Sequence: Synthetic oligonucleotide
  Target: LAMA2; (-) strand; PAM type: NRG; PAM sequence: GGG
cagagtgagtcagcatctca

SEQ ID NO: 98345 - DNA, 20 bp, Artificial Sequence
  Description of Artificial Sequence: Synthetic oligonucleotide
  Target: LAMA2; (-) strand; PAM type: NRG; PAM sequence: AGG
acagagtgagtcagcatctc

SEQ ID NO: 98346 - DNA, 20 bp, Artificial Sequence
  Description of Artificial Sequence: Synthetic oligonucleotide
  Target: LAMA2; (-) strand; PAM type: NRG; PAM sequence: CAG
gacagagtgagtcagcatct

SEQ ID NO: 98347 - DNA, 20 bp, Artificial Sequence
  Description of Artificial Sequence: Synthetic oligonucleotide
  Target: LAMA2; (-) strand; PAM type: NRG; PAM sequence: CAG
gcctgcacgacagagtgagt

SEQ ID NO: 98348 - DNA, 20 bp, Artificial Sequence
  Description of Artificial Sequence: Synthetic oligonucleotide
  Target: LAMA2; (-) strand; PAM type: NRG; PAM sequence: GAG
tccagcctgcacgacagagt

SEQ ID NO: 98349 - DNA, 20 bp, Artificial Sequence
  Description of Artificial Sequence: Synthetic oligonucleotide
  Target: LAMA2; (-) strand; PAM type: NRG; PAM sequence: GAG
gccctccagcctgcacgaca

SEQ ID NO: 98350 - DNA, 20 bp, Artificial Sequence
  Description of Artificial Sequence: Synthetic oligonucleotide
  Target: LAMA2; (-) strand; PAM type: NRG; PAM sequence: CAG
ctgccctccagcctgcacga

SEQ ID NO: 98351 - DNA, 20 bp, Artificial Sequence
  Description of Artificial Sequence: Synthetic oligonucleotide
  Target: LAMA2; (-) strand; PAM type: NRG; PAM sequence: CAG
ccaggatcgccactgccctc

SEQ ID NO: 98352 - DNA, 20 bp, Artificial Sequence
  Description of Artificial Sequence: Synthetic oligonucleotide
  Target: LAMA2; (-) strand; PAM type: NRG; PAM sequence: AGG
gtcggaggttgcagtgagcc

SEQ ID NO: 98353 - DNA, 20 bp, Artificial Sequence
  Description of Artificial Sequence: Synthetic oligonucleotide
  Target: LAMA2; (-) strand; PAM type: NRG; PAM sequence: CAG
agtcggaggttgcagtgagc

SEQ ID NO: 98354 - DNA, 20 bp, Artificial Sequence
  Description of Artificial Sequence: Synthetic oligonucleotide
  Target: LAMA2; (-) strand; PAM type: NRG; PAM sequence: GAG
cgggagtcggaggttgcagt

SEQ ID NO: 98355 - DNA, 20 bp, Artificial Sequence
  Description of Artificial Sequence: Synthetic oligonucleotide
  Target: LAMA2; (-) strand; PAM type: NRG; PAM sequence: CAG
aacccgggagtcggaggttg

SEQ ID NO: 98356 - DNA, 20 bp, Artificial Sequence
  Description of Artificial Sequence: Synthetic oligonucleotide
  Target: LAMA2; (-) strand; PAM type: NRG; PAM sequence: AGG
cacttgaacccgggagtcgg

SEQ ID NO: 98357 - DNA, 20 bp, Artificial Sequence
  Description of Artificial Sequence: Synthetic oligonucleotide
  Target: LAMA2; (-) strand; PAM type: NRG; PAM sequence: GAG
tcacttgaacccgggagtcg

SEQ ID NO: 98358 - DNA, 20 bp, Artificial Sequence
  Description of Artificial Sequence: Synthetic oligonucleotide
  Target: LAMA2; (-) strand; PAM type: NRG; PAM sequence: CGG
aatcacttgaacccgggagt

SEQ ID NO: 98359 - DNA, 20 bp, Artificial Sequence
  Description of Artificial Sequence: Synthetic oligonucleotide
  Target: LAMA2; (-) strand; PAM type: NRG; PAM sequence: GAG
tgagaatcacttgaacccgg

SEQ ID NO: 98360 - DNA, 20 bp, Artificial Sequence
  Description of Artificial Sequence: Synthetic oligonucleotide
  Target: LAMA2; (-) strand; PAM type: NRG; PAM sequence: GGG
catgagaatcacttgaaccc

SEQ ID NO: 98361 - DNA, 20 bp, Artificial Sequence
  Description of Artificial Sequence: Synthetic oligonucleotide
  Target: LAMA2; (-) strand; PAM type: NRG; PAM sequence: CGG
gcatgagaatcacttgaacc

SEQ ID NO: 98362 - DNA, 20 bp, Artificial Sequence
  Description of Artificial Sequence: Synthetic oligonucleotide
  Target: LAMA2; (-) strand; PAM type: NRG; PAM sequence: GAG
tactcaggaggctgaggcat

SEQ ID NO: 98363 - DNA, 20 bp, Artificial Sequence
  Description of Artificial Sequence: Synthetic oligonucleotide
  Target: LAMA2; (-) strand; PAM type: NRG; PAM sequence: AGG
cccagctactcaggaggctg

SEQ ID NO: 98364 - DNA, 20 bp, Artificial Sequence
  Description of Artificial Sequence: Synthetic oligonucleotide
  Target: LAMA2; (-) strand; PAM type: NRG; PAM sequence: GAG
tcccagctactcaggaggct

SEQ ID NO: 98365 - DNA, 20 bp, Artificial Sequence
  Description of Artificial Sequence: Synthetic oligonucleotide
  Target: LAMA2; (-) strand; PAM type: NRG; PAM sequence: AGG
tgtagtcccagctactcagg

SEQ ID NO: 98366 - DNA, 20 bp, Artificial Sequence
  Description of Artificial Sequence: Synthetic oligonucleotide
  Target: LAMA2; (-) strand; PAM type: NRG; PAM sequence: GAG
ctgtagtcccagctactcag

SEQ ID NO: 98367 - DNA, 20 bp, Artificial Sequence
  Description of Artificial Sequence: Synthetic oligonucleotide
  Target: LAMA2; (-) strand; PAM type: NRG; PAM sequence: AGG
gcctgtagtcccagctactc

SEQ ID NO: 98368 - DNA, 20 bp, Artificial Sequence
  Description of Artificial Sequence: Synthetic oligonucleotide
  Target: LAMA2; (-) strand; PAM type: NRG; PAM sequence: CAG
agcctgtagtcccagctact

SEQ ID NO: 98369 - DNA, 20 bp, Artificial Sequence
  Description of Artificial Sequence: Synthetic oligonucleotide
  Target: LAMA2; (-) strand; PAM type: NRG; PAM sequence: CAG
gtggcgtgagcctgtagtcc

SEQ ID NO: 98370 - DNA, 20 bp, Artificial Sequence
  Description of Artificial Sequence: Synthetic oligonucleotide
  Target: LAMA2; (-) strand; PAM type: NRG; PAM sequence: TAG
ggtgtggtggcgtgagcctg

SEQ ID NO: 98371 - DNA, 20 bp, Artificial Sequence
  Description of Artificial Sequence: Synthetic oligonucleotide
  Target: LAMA2; (-) strand; PAM type: NRG; PAM sequence: GAG
atatccaggtgtggtggcgt

SEQ ID NO: 98372 - DNA, 20 bp, Artificial Sequence
  Description of Artificial Sequence: Synthetic oligonucleotide
  Target: LAMA2; (-) strand; PAM type: NRG; PAM sequence: TGG
aaaaaaatatccaggtgtgg

SEQ ID NO: 98373 - DNA, 20 bp, Artificial Sequence
  Description of Artificial Sequence: Synthetic oligonucleotide
  Target: LAMA2; (-) strand; PAM type: NRG; PAM sequence: TGG
ataaaaaaaatatccaggtg

SEQ ID NO: 98374 - DNA, 20 bp, Artificial Sequence
  Description of Artificial Sequence: Synthetic oligonucleotide
  Target: LAMA2; (-) strand; PAM type: NRG; PAM sequence: AGG
taaaaataaaaaaaatatcc

SEQ ID NO: 98375 - DNA, 20 bp, Artificial Sequence
  Description of Artificial Sequence: Synthetic oligonucleotide
  Target: LAMA2; (-) strand; PAM type: NRG; PAM sequence: CAG
ctaaaaataaaaaaaatatc

SEQ ID NO: 98376 - DNA, 20 bp, Artificial Sequence
  Description of Artificial Sequence: Synthetic oligonucleotide
  Target: LAMA2; (-) strand; PAM type: NRG; PAM sequence: TGG
cgagaccagcctagacaaca

SEQ ID NO: 98377 - DNA, 20 bp, Artificial Sequence
  Description of Artificial Sequence: Synthetic oligonucleotide
  Target: LAMA2; (-) strand; PAM type: NRG; PAM sequence: TAG
ttaggagttcgagaccagcc

SEQ ID NO: 98378 - DNA, 20 bp, Artificial Sequence
  Description of Artificial Sequence: Synthetic oligonucleotide
  Target: LAMA2; (-) strand; PAM type: NRG; PAM sequence: CAG
tgaggttaggagttcgagac

SEQ ID NO: 98379 - DNA, 20 bp, Artificial Sequence
  Description of Artificial Sequence: Synthetic oligonucleotide
  Target: LAMA2; (-) strand; PAM type: NRG; PAM sequence: GAG
ttacctgaggttaggagttc

SEQ ID NO: 98380 - DNA, 20 bp, Artificial Sequence
  Description of Artificial Sequence: Synthetic oligonucleotide
  Target: LAMA2; (-) strand; PAM type: NRG; PAM sequence: GAG
ggtggattacctgaggttag

SEQ ID NO: 98381 - DNA, 20 bp, Artificial Sequence
  Description of Artificial Sequence: Synthetic oligonucleotide
  Target: LAMA2; (-) strand; PAM type: NRG; PAM sequence: AGG
tgggtggattacctgaggtt

SEQ ID NO: 98382 - DNA, 20 bp, Artificial Sequence
  Description of Artificial Sequence: Synthetic oligonucleotide
  Target: LAMA2; (-) strand; PAM type: NRG; PAM sequence: TAG
gtgggtggattacctgaggt

SEQ ID NO: 98383 - DNA, 20 bp, Artificial Sequence
  Description of Artificial Sequence: Synthetic oligonucleotide
  Target: LAMA2; (-) strand; PAM type: NRG; PAM sequence: AGG
caaggtgggtggattacctg

SEQ ID NO: 98384 - DNA, 20 bp, Artificial Sequence
  Description of Artificial Sequence: Synthetic oligonucleotide
  Target: LAMA2; (-) strand; PAM type: NRG; PAM sequence: GAG
ccaaggtgggtggattacct

SEQ ID NO: 98385 - DNA, 20 bp, Artificial Sequence
  Description of Artificial Sequence: Synthetic oligonucleotide
  Target: LAMA2; (-) strand; PAM type: NRG; PAM sequence: TGG
ctttgggaggccaaggtggg

SEQ ID NO: 98386 - DNA, 20 bp, Artificial Sequence
  Description of Artificial Sequence: Synthetic oligonucleotide
  Target: LAMA2; (-) strand; PAM type: NRG; PAM sequence: GGG
gcactttgggaggccaaggt

SEQ ID NO: 98387 - DNA, 20 bp, Artificial Sequence
  Description of Artificial Sequence: Synthetic oligonucleotide
  Target: LAMA2; (-) strand; PAM type: NRG; PAM sequence: TGG
agcactttgggaggccaagg

SEQ ID NO: 98388 - DNA, 20 bp, Artificial Sequence
  Description of Artificial Sequence: Synthetic oligonucleotide
  Target: LAMA2; (-) strand; PAM type: NRG; PAM sequence: AGG
cccagcactttgggaggcca

SEQ ID NO: 98389 - DNA, 20 bp, Artificial Sequence
  Description of Artificial Sequence: Synthetic oligonucleotide
  Target: LAMA2; (-) strand; PAM type: NRG; PAM sequence: AAG
tcccagcactttgggaggcc

SEQ ID NO: 98390 - DNA, 20 bp, Artificial Sequence
  Description of Artificial Sequence: Synthetic oligonucleotide
  Target: LAMA2; (-) strand; PAM type: NRG; PAM sequence: AGG
tgtaatcccagcactttggg

SEQ ID NO: 98391 - DNA, 20 bp, Artificial Sequence
  Description of Artificial Sequence: Synthetic oligonucleotide
  Target: LAMA2; (-) strand; PAM type: NRG; PAM sequence: GAG
ctgtaatcccagcactttgg

SEQ ID NO: 98392 - DNA, 20 bp, Artificial Sequence
  Description of Artificial Sequence: Synthetic oligonucleotide
  Target: LAMA2; (-) strand; PAM type: NRG; PAM sequence: GGG
gcctgtaatcccagcacttt

SEQ ID NO: 98393 - DNA, 20 bp, Artificial Sequence
  Description of Artificial Sequence: Synthetic oligonucleotide
  Target: LAMA2; (-) strand; PAM type: NRG; PAM sequence: TGG
tgcctgtaatcccagcactt

SEQ ID NO: 98394 - DNA, 20 bp, Artificial Sequence
  Description of Artificial Sequence: Synthetic oligonucleotide
  Target: LAMA2; (-) strand; PAM type: NRG; PAM sequence: CAG
gtggctcatgcctgtaatcc

SEQ ID NO: 98395 - DNA, 20 bp, Artificial Sequence
  Description of Artificial Sequence: Synthetic oligonucleotide
  Target: LAMA2; (-) strand; PAM type: NRG; PAM sequence: TGG
gcgactgcagctgggcatgg

SEQ ID NO: 98396 - DNA, 20 bp, Artificial Sequence
  Description of Artificial Sequence: Synthetic oligonucleotide
  Target: LAMA2; (-) strand; PAM type: NRG; PAM sequence: TGG
atggcgactgcagctgggca

SEQ ID NO: 98397 - DNA, 20 bp, Artificial Sequence
  Description of Artificial Sequence: Synthetic oligonucleotide
  Target: LAMA2; (-) strand; PAM type: NRG; PAM sequence: GGG
aagtgatggcgactgcagct

SEQ ID NO: 98398 - DNA, 20 bp, Artificial Sequence
  Description of Artificial Sequence: Synthetic oligonucleotide
  Target: LAMA2; (-) strand; PAM type: NRG; PAM sequence: TGG
aaagtgatggcgactgcagc

SEQ ID NO: 98399 - DNA, 20 bp, Artificial Sequence
  Description of Artificial Sequence: Synthetic oligonucleotide
  Target: LAMA2; (-) strand; PAM type: NRG; PAM sequence: CAG
aaagaaagtgatggcgactg

SEQ ID NO: 98400 - DNA, 20 bp, Artificial Sequence
  Description of Artificial Sequence: Synthetic oligonucleotide
  Target: LAMA2; (-) strand; PAM type: NRG; PAM sequence: TGG
aagggagtgaaagaaagtga

SEQ ID NO: 98401 - DNA, 20 bp, Artificial Sequence
  Description of Artificial Sequence: Synthetic oligonucleotide
  Target: LAMA2; (-) strand; PAM type: NRG; PAM sequence: AAG
ggaatgaagggagtgaaaga

SEQ ID NO: 98402 - DNA, 20 bp, Artificial Sequence
  Description of Artificial Sequence: Synthetic oligonucleotide
  Target: LAMA2; (-) strand; PAM type: NRG; PAM sequence: AAG
caggggaatgaagggagtga

SEQ ID NO: 98403 - DNA, 20 bp, Artificial Sequence
  Description of Artificial Sequence: Synthetic oligonucleotide
  Target: LAMA2; (-) strand; PAM type: NRG; PAM sequence: GAG
cagactcaggggaatgaagg

SEQ ID NO: 98404 - DNA, 20 bp, Artificial Sequence
  Description of Artificial Sequence: Synthetic oligonucleotide
  Target: LAMA2; (-) strand; PAM type: NRG; PAM sequence: GGG
ttcagactcaggggaatgaa

SEQ ID NO: 98405 - DNA, 20 bp, Artificial Sequence
  Description of Artificial Sequence: Synthetic oligonucleotide
  Target: LAMA2; (-) strand; PAM type: NRG; PAM sequence: AGG
cttcagactcaggggaatga

SEQ ID NO: 98406 - DNA, 20 bp, Artificial Sequence
  Description of Artificial Sequence: Synthetic oligonucleotide
  Target: LAMA2; (-) strand; PAM type: NRG; PAM sequence: AAG
ccttcagactcaggggaatg

SEQ ID NO: 98407 - DNA, 20 bp, Artificial Sequence
  Description of Artificial Sequence: Synthetic oligonucleotide
  Target: LAMA2; (-) strand; PAM type: NRG; PAM sequence: GGG
gcccccaccttcagactcag

SEQ ID NO: 98408 - DNA, 20 bp, Artificial Sequence
  Description of Artificial Sequence: Synthetic oligonucleotide
  Target: LAMA2; (-) strand; PAM type: NRG; PAM sequence: GGG
tgcccccaccttcagactca

SEQ ID NO: 98409 - DNA, 20 bp, Artificial Sequence
  Description of Artificial Sequence: Synthetic oligonucleotide
  Target: LAMA2; (-) strand; PAM type: NRG; PAM sequence: AGG
ctgcccccaccttcagactc

SEQ ID NO: 98410 - DNA, 20 bp, Artificial Sequence
  Description of Artificial Sequence: Synthetic oligonucleotide
  Target: LAMA2; (-) strand; PAM type: NRG; PAM sequence: CAG
cctgcccccaccttcagact

SEQ ID NO: 98411 - DNA, 20 bp, Artificial Sequence
  Description of Artificial Sequence: Synthetic oligonucleotide
  Target: LAMA2; (-) strand; PAM type: NRG; PAM sequence: CAG
ggaaaacctgcccccacctt

SEQ ID NO: 98412 - DNA, 20 bp, Artificial Sequence
  Description of Artificial Sequence: Synthetic oligonucleotide
  Target: LAMA2; (-) strand; PAM type: NRG; PAM sequence: AGG
tgaaactggcagcgaggagc

SEQ ID NO: 98413 - DNA, 20 bp, Artificial Sequence
  Description of Artificial Sequence: Synthetic oligonucleotide
  Target: LAMA2; (-) strand; PAM type: NRG; PAM sequence: CAG
atgaaactggcagcgaggag

SEQ ID NO: 98414 - DNA, 20 bp, Artificial Sequence
  Description of Artificial Sequence: Synthetic oligonucleotide
  Target: LAMA2; (-) strand; PAM type: NRG; PAM sequence: GAG
aatatgaaactggcagcgag

SEQ ID NO: 98415 - DNA, 20 bp, Artificial Sequence
  Description of Artificial Sequence: Synthetic oligonucleotide
  Target: LAMA2; (-) strand; PAM type: NRG; PAM sequence: AGG
ataatatgaaactggcagcg

SEQ ID NO: 98416 - DNA, 20 bp, Artificial Sequence
  Description of Artificial Sequence: Synthetic oligonucleotide
  Target: LAMA2; (-) strand; PAM type: NRG; PAM sequence: GAG
gataatatgaaactggcagc

SEQ ID NO: 98417 - DNA, 20 bp, Artificial Sequence
  Description of Artificial Sequence: Synthetic oligonucleotide
  Target: LAMA2; (-) strand; PAM type: NRG; PAM sequence: CAG
gatggataatatgaaactgg

SEQ ID NO: 98418 - DNA, 20 bp, Artificial Sequence
  Description of Artificial Sequence: Synthetic oligonucleotide
  Target: LAMA2; (-) strand; PAM type: NRG; PAM sequence: TGG
gaggatggataatatgaaac

SEQ ID NO: 98419 - DNA, 20 bp, Artificial Sequence
  Description of Artificial Sequence: Synthetic oligonucleotide
  Target: LAMA2; (-) strand; PAM type: NRG; PAM sequence: TGG
gaccctgatgtagaggagga

SEQ ID NO: 98420 - DNA, 20 bp, Artificial Sequence
  Description of Artificial Sequence: Synthetic oligonucleotide
  Target: LAMA2; (-) strand; PAM type: NRG; PAM sequence: AGG
tgtggaccctgatgtagagg

SEQ ID NO: 98421 - DNA, 20 bp, Artificial Sequence
  Description of Artificial Sequence: Synthetic oligonucleotide
  Target: LAMA2; (-) strand; PAM type: NRG; PAM sequence: GAG
ttgtggaccctgatgtagag

SEQ ID NO: 98422 - DNA, 20 bp, Artificial Sequence
  Description of Artificial Sequence: Synthetic oligonucleotide
  Target: LAMA2; (-) strand; PAM type: NRG; PAM sequence: AGG
ggttgtggaccctgatgtag

SEQ ID NO: 98423 - DNA, 20 bp, Artificial Sequence
  Description of Artificial Sequence: Synthetic oligonucleotide
  Target: LAMA2; (-) strand; PAM type: NRG; PAM sequence: GAG
gggttgtggaccctgatgta

SEQ ID NO: 98424 - DNA, 20 bp, Artificial Sequence
  Description of Artificial Sequence: Synthetic oligonucleotide
  Target: LAMA2; (-) strand; PAM type: NRG; PAM sequence: TAG
aggggttgtggaccctgatg

SEQ ID NO: 98425 - DNA, 20 bp, Artificial Sequence
  Description of Artificial Sequence: Synthetic oligonucleotide
  Target: LAMA2; (-) strand; PAM type: NRG; PAM sequence: TGG
ctcctgtggcccaggggttg

SEQ ID NO: 98426 - DNA, 20 bp, Artificial Sequence
  Description of Artificial Sequence: Synthetic oligonucleotide
  Target: LAMA2; (-) strand; PAM type: NRG; PAM sequence: GGG
aatatcctcctgtggcccag

SEQ ID NO: 98427 - DNA, 20 bp, Artificial Sequence
  Description of Artificial Sequence: Synthetic oligonucleotide
  Target: LAMA2; (-) strand; PAM type: NRG; PAM sequence: GGG
caatatcctcctgtggccca

SEQ ID NO: 98428 - DNA, 20 bp, Artificial Sequence
  Description of Artificial Sequence: Synthetic oligonucleotide
  Target: LAMA2; (-) strand; PAM type: NRG; PAM sequence: AGG
ccaatatcctcctgtggccc

SEQ ID NO: 98429 - DNA, 20 bp, Artificial Sequence
  Description of Artificial Sequence: Synthetic oligonucleotide
  Target: LAMA2; (-) strand; PAM type: NRG; PAM sequence: CAG
accaatatcctcctgtggcc

SEQ ID NO: 98430 - DNA, 20 bp, Artificial Sequence
  Description of Artificial Sequence: Synthetic oligonucleotide
  Target: LAMA2; (-) strand; PAM type: NRG; PAM sequence: TGG
cacggaccaatatcctcctg

SEQ ID NO: 98431 - DNA, 20 bp, Artificial Sequence
  Description of Artificial Sequence: Synthetic oligonucleotide
  Target: LAMA2; (-) strand; PAM type: NRG; PAM sequence: CGG
gtctggtttctaaaaggcca

SEQ ID NO: 98432 - DNA, 20 bp, Artificial Sequence
  Description of Artificial Sequence: Synthetic oligonucleotide
  Target: LAMA2; (-) strand; PAM type: NRG; PAM sequence: AGG
tgtgtggtctggtttctaaa

SEQ ID NO: 98433 - DNA, 20 bp, Artificial Sequence
  Description of Artificial Sequence: Synthetic oligonucleotide
  Target: LAMA2; (-) strand; PAM type: NRG; PAM sequence: AAG
ctgtgtggtctggtttctaa

SEQ ID NO: 98434 - DNA, 20 bp, Artificial Sequence
  Description of Artificial Sequence: Synthetic oligonucleotide
  Target: LAMA2; (-) strand; PAM type: NRG; PAM sequence: TGG
ttgcctcctgctgtgtggtc

SEQ ID NO: 98435 - DNA, 20 bp, Artificial Sequence
  Description of Artificial Sequence: Synthetic oligonucleotide
  Target: LAMA2; (-) strand; PAM type: NRG; PAM sequence: TGG
gctgcttgcctcctgctgtg

SEQ ID NO: 98436 - DNA, 20 bp, Artificial Sequence
  Description of Artificial Sequence: Synthetic oligonucleotide
  Target: LAMA2; (-) strand; PAM type: NRG; PAM sequence: AAG
agcagctgtaaatgctaatg

SEQ ID NO: 98437 - DNA, 20 bp, Artificial Sequence
  Description of Artificial Sequence: Synthetic oligonucleotide
  Target: LAMA2; (-) strand; PAM type: NRG; PAM sequence: CAG
gtaataccaggaatgaggag

SEQ ID NO: 98438 - DNA, 20 bp, Artificial Sequence
  Description of Artificial Sequence: Synthetic oligonucleotide
  Target: LAMA2; (-) strand; PAM type: NRG; PAM sequence: GAG
acagtaataccaggaatgag

SEQ ID NO: 98439 - DNA, 20 bp, Artificial Sequence
  Description of Artificial Sequence: Synthetic oligonucleotide
  Target: LAMA2; (-) strand; PAM type: NRG; PAM sequence: AGG
gtacagtaataccaggaatg

SEQ ID NO: 98440 - DNA, 20 bp, Artificial Sequence
  Description of Artificial Sequence: Synthetic oligonucleotide
  Target: LAMA2; (-) strand; PAM type: NRG; PAM sequence: GAG
agtacagtaataccaggaat

SEQ ID NO: 98441 - DNA, 20 bp, Artificial Sequence
  Description of Artificial Sequence: Synthetic oligonucleotide
  Target: LAMA2; (-) strand; PAM type: NRG; PAM sequence: AGG
tcaggcagtacagtaatacc

SEQ ID NO: 98442 - DNA, 20 bp, Artificial Sequence
  Description of Artificial Sequence: Synthetic oligonucleotide
  Target: LAMA2; (-) strand; PAM type: NRG; PAM sequence: CAG
ctcaggcagtacagtaatac

SEQ ID NO: 98443 - DNA, 20 bp, Artificial Sequence
  Description of Artificial Sequence: Synthetic oligonucleotide
  Target: LAMA2; (-) strand; PAM type: NRG; PAM sequence: CAG
gaggtggagctcaggcagta

SEQ ID NO: 98444 - DNA, 20 bp, Artificial Sequence
  Description of Artificial Sequence: Synthetic oligonucleotide
  Target: LAMA2; (-) strand; PAM type: NRG; PAM sequence: CAG
gacaggaggtggagctcagg

SEQ ID NO: 98445 - DNA, 20 bp, Artificial Sequence
  Description of Artificial Sequence: Synthetic oligonucleotide
  Target: LAMA2; (-) strand; PAM type: NRG; PAM sequence: AGG
tctgacaggaggtggagctc

SEQ ID NO: 98446 - DNA, 20 bp, Artificial Sequence
  Description of Artificial Sequence: Synthetic oligonucleotide
  Target: LAMA2; (-) strand; PAM type: NRG; PAM sequence: CAG
atctgacaggaggtggagct

SEQ ID NO: 98447 - DNA, 20 bp, Artificial Sequence
  Description of Artificial Sequence: Synthetic oligonucleotide
  Target: LAMA2; (-) strand; PAM type: NRG; PAM sequence: GAG
ctctgatctgacaggaggtg

SEQ ID NO: 98448 - DNA, 20 bp, Artificial Sequence
  Description of Artificial Sequence: Synthetic oligonucleotide
  Target: LAMA2; (-) strand; PAM type: NRG; PAM sequence: TGG
gtctctgatctgacaggagg

SEQ ID NO: 98449 - DNA, 20 bp, Artificial Sequence
  Description of Artificial Sequence: Synthetic oligonucleotide
  Target: LAMA2; (-) strand; PAM type: NRG; PAM sequence: AGG
gctgtctctgatctgacagg

SEQ ID NO: 98450 - DNA, 20 bp, Artificial Sequence
  Description of Artificial Sequence: Synthetic oligonucleotide
  Target: LAMA2; (-) strand; PAM type: NRG; PAM sequence: GAG
tgctgtctctgatctgacag

SEQ ID NO: 98451 - DNA, 20 bp, Artificial Sequence
  Description of Artificial Sequence: Synthetic oligonucleotide
  Target: LAMA2; (-) strand; PAM type: NRG; PAM sequence: AGG
aatgctgtctctgatctgac

SEQ ID NO: 98452 - DNA, 20 bp, Artificial Sequence
  Description of Artificial Sequence: Synthetic oligonucleotide
  Target: LAMA2; (-) strand; PAM type: NRG; PAM sequence: CAG
taatgctgtctctgatctga

SEQ ID NO: 98453 - DNA, 20 bp, Artificial Sequence
  Description of Artificial Sequence: Synthetic oligonucleotide
  Target: LAMA2; (-) strand; PAM type: NRG; PAM sequence: GAG
aatagggtttgtgctcctat

SEQ ID NO: 98454 - DNA, 20 bp, Artificial Sequence
  Description of Artificial Sequence: Synthetic oligonucleotide
  Target: LAMA2; (-) strand; PAM type: NRG; PAM sequence: GGG
cacatgtgcagttcacaata

SEQ ID NO: 98455 - DNA, 20 bp, Artificial Sequence
  Description of Artificial Sequence: Synthetic oligonucleotide
  Target: LAMA2; (-) strand; PAM type: NRG; PAM sequence: AGG
tcacatgtgcagttcacaat

SEQ ID NO: 98456 - DNA, 20 bp, Artificial Sequence
  Description of Artificial Sequence: Synthetic oligonucleotide
  Target: LAMA2; (-) strand; PAM type: NRG; PAM sequence: TAG
ctcacatgtgcagttcacaa

SEQ ID NO: 98457 - DNA, 20 bp, Artificial Sequence
  Description of Artificial Sequence: Synthetic oligonucleotide
  Target: LAMA2; (-) strand; PAM type: NRG; PAM sequence: CAG
acctagatccctcacatgtg

SEQ ID NO: 98458 - DNA, 20 bp, Artificial Sequence
  Description of Artificial Sequence: Synthetic oligonucleotide
  Target: LAMA2; (-) strand; PAM type: NRG; PAM sequence: TAG
attctcaggagcgcacaacc

SEQ ID NO: 98459 - DNA, 20 bp, Artificial Sequence
  Description of Artificial Sequence: Synthetic oligonucleotide
  Target: LAMA2; (-) strand; PAM type: NRG; PAM sequence: GAG
atcaggcattagattctcag

SEQ ID NO: 98460 - DNA, 20 bp, Artificial Sequence
  Description of Artificial Sequence: Synthetic oligonucleotide
  Target: LAMA2; (-) strand; PAM type: NRG; PAM sequence: AGG
tcatcaggcattagattctc

SEQ ID NO: 98461 - DNA, 20 bp, Artificial Sequence
  Description of Artificial Sequence: Synthetic oligonucleotide
  Target: LAMA2; (-) strand; PAM type: NRG; PAM sequence: CAG
atcatcaggcattagattct

SEQ ID NO: 98462 - DNA, 20 bp, Artificial Sequence
  Description of Artificial Sequence: Synthetic oligonucleotide
  Target: LAMA2; (-) strand; PAM type: NRG; PAM sequence: TAG
gatcattgatcatcaggcat

SEQ ID NO: 98463 - DNA, 20 bp, Artificial Sequence
  Description of Artificial Sequence: Synthetic oligonucleotide
  Target: LAMA2; (-) strand; PAM type: NRG; PAM sequence: AGG
gtgacagatcattgatcatc

SEQ ID NO: 98464 - DNA, 20 bp, Artificial Sequence
  Description of Artificial Sequence: Synthetic oligonucleotide
  Target: LAMA2; (-) strand; PAM type: NRG; PAM sequence: CAG
agtgacagatcattgatcat

SEQ ID NO: 98465 - DNA, 20 bp, Artificial Sequence
  Description of Artificial Sequence: Synthetic oligonucleotide
  Target: LAMA2; (-) strand; PAM type: NRG; PAM sequence: CAG
ggggtgatgggagacagtga

SEQ ID NO: 98466 - DNA, 20 bp, Artificial Sequence
  Description of Artificial Sequence: Synthetic oligonucleotide
  Target: LAMA2; (-) strand; PAM type: NRG; PAM sequence: CAG
catcttggggtgatgggaga

SEQ ID NO: 98467 - DNA, 20 bp, Artificial Sequence
  Description of Artificial Sequence: Synthetic oligonucleotide
  Target: LAMA2; (-) strand; PAM type: NRG; PAM sequence: GAG
gtcccatcttggggtgatgg

SEQ ID NO: 98468 - DNA, 20 bp, Artificial Sequence
  Description of Artificial Sequence: Synthetic oligonucleotide
  Target: LAMA2; (-) strand; PAM type: NRG; PAM sequence: GGG
tagtcccatcttggggtgat

SEQ ID NO: 98469 - DNA, 20 bp, Artificial Sequence
  Description of Artificial Sequence: Synthetic oligonucleotide
  Target: LAMA2; (-) strand; PAM type: NRG; PAM sequence: TGG
atagtcccatcttggggtga

SEQ ID NO: 98470 - DNA, 20 bp, Artificial Sequence
  Description of Artificial Sequence: Synthetic oligonucleotide
  Target: LAMA2; (-) strand; PAM type: NRG; PAM sequence: GGG
aactagatagtcccatcttg

SEQ ID NO: 98471 - DNA, 20 bp, Artificial Sequence
  Description of Artificial Sequence: Synthetic oligonucleotide
  Target: LAMA2; (-) strand; PAM type: NRG; PAM sequence: GGG
caactagatagtcccatctt

SEQ ID NO: 98472 - DNA, 20 bp, Artificial Sequence
  Description of Artificial Sequence: Synthetic oligonucleotide
  Target: LAMA2; (-) strand; PAM type: NRG; PAM sequence: TGG
gcaactagatagtcccatct

SEQ ID NO: 98473 - DNA, 20 bp, Artificial Sequence
  Description of Artificial Sequence: Synthetic oligonucleotide
  Target: LAMA2; (-) strand; PAM type: NRG; PAM sequence: TAG
cttgttttcctgcaactaga

SEQ ID NO: 98474 - DNA, 20 bp, Artificial Sequence
  Description of Artificial Sequence: Synthetic oligonucleotide
  Target: LAMA2; (-) strand; PAM type: NRG; PAM sequence: TAG
taagcttgttttcctgcaac

SEQ ID NO: 98475 - DNA, 20 bp, Artificial Sequence
  Description of Artificial Sequence: Synthetic oligonucleotide
  Target: LAMA2; (-) strand; PAM type: NRG; PAM sequence: AAG
atagaatcagtggaagccct

SEQ ID NO: 98476 - DNA, 20 bp, Artificial Sequence
  Description of Artificial Sequence: Synthetic oligonucleotide
  Target: LAMA2; (-) strand; PAM type: NRG; PAM sequence: AAG
ccataacatagaatcagtgg

SEQ ID NO: 98477 - DNA, 20 bp, Artificial Sequence
  Description of Artificial Sequence: Synthetic oligonucleotide
  Target: LAMA2; (-) strand; PAM type: NRG; PAM sequence: TGG
tcaccataacatagaatcag

SEQ ID NO: 98478 - DNA, 20 bp, Artificial Sequence
  Description of Artificial Sequence: Synthetic oligonucleotide
  Target: LAMA2; (-) strand; PAM type: NRG; PAM sequence: CAG
aactcaccataacatagaat

SEQ ID NO: 98479 - DNA, 20 bp, Artificial Sequence
  Description of Artificial Sequence: Synthetic oligonucleotide
  Target: LAMA2; (-) strand; PAM type: NRG; PAM sequence: TAG
ttatacaactcaccataaca

SEQ ID NO: 98480 - DNA, 20 bp, Artificial Sequence
  Description of Artificial Sequence: Synthetic oligonucleotide
  Target: LAMA2; (-) strand; PAM type: NRG; PAM sequence: AAG
ggatggttttgtgatgatgc

SEQ ID NO: 98481 - DNA, 20 bp, Artificial Sequence
  Description of Artificial Sequence: Synthetic oligonucleotide
  Target: LAMA2; (-) strand; PAM type: NRG; PAM sequence: TGG
catggactaggattggggga

SEQ ID NO: 98482 - DNA, 20 bp, Artificial Sequence
  Description of Artificial Sequence: Synthetic oligonucleotide
  Target: LAMA2; (-) strand; PAM type: NRG; PAM sequence: GGG
tttccatggactaggattgg

SEQ ID NO: 98483 - DNA, 20 bp, Artificial Sequence
  Description of Artificial Sequence: Synthetic oligonucleotide
  Target: LAMA2; (-) strand; PAM type: NRG; PAM sequence: GGG
ttttccatggactaggattg

SEQ ID NO: 98484 - DNA, 20 bp, Artificial Sequence
  Description of Artificial Sequence: Synthetic oligonucleotide
  Target: LAMA2; (-) strand; PAM type: NRG; PAM sequence: GGG
tttttccatggactaggatt

SEQ ID NO: 98485 - DNA, 20 bp, Artificial Sequence
  Description of Artificial Sequence: Synthetic oligonucleotide
  Target: LAMA2; (-) strand; PAM type: NRG; PAM sequence: TGG
atttttccatggactaggat

SEQ ID NO: 98486 - DNA, 20 bp, Artificial Sequence
  Description of Artificial Sequence: Synthetic oligonucleotide
  Target: LAMA2; (-) strand; PAM type: NRG; PAM sequence: AGG
aggcaatttttccatggact

SEQ ID NO: 98487 - DNA, 20 bp, Artificial Sequence
  Description of Artificial Sequence: Synthetic oligonucleotide
  Target: LAMA2; (-) strand; PAM type: NRG; PAM sequence: TAG
aaggcaatttttccatggac

SEQ ID NO: 98488 - DNA, 20 bp, Artificial Sequence
  Description of Artificial Sequence: Synthetic oligonucleotide
  Target: LAMA2; (-) strand; PAM type: NRG; PAM sequence: TGG
catggaaggcaatttttcca

SEQ ID NO: 98489 - DNA, 20 bp, Artificial Sequence
  Description of Artificial Sequence: Synthetic oligonucleotide
  Target: LAMA2; (-) strand; PAM type: NRG; PAM sequence: AGG
ccagggactggtttcatgga

SEQ ID NO: 98490 - DNA, 20 bp, Artificial Sequence
  Description of Artificial Sequence: Synthetic oligonucleotide
  Target: LAMA2; (-) strand; PAM type: NRG; PAM sequence: AAG
accagggactggtttcatgg

SEQ ID NO: 98491 - DNA, 20 bp, Artificial Sequence
  Description of Artificial Sequence: Synthetic oligonucleotide
  Target: LAMA2; (-) strand; PAM type: NRG; PAM sequence: TGG
ggcaccagggactggtttca

SEQ ID NO: 98492 - DNA, 20 bp, Artificial Sequence
  Description of Artificial Sequence: Synthetic oligonucleotide
  Target: LAMA2; (-) strand; PAM type: NRG; PAM sequence: TGG
atgtttttggcaccagggac

SEQ ID NO: 98493 - DNA, 20 bp, Artificial Sequence
  Description of Artificial Sequence: Synthetic oligonucleotide
  Target: LAMA2; (-) strand; PAM type: NRG; PAM sequence: GGG
ctccaatgtttttggcacca

SEQ ID NO: 98494 - DNA, 20 bp, Artificial Sequence
  Description of Artificial Sequence: Synthetic oligonucleotide
  Target: LAMA2; (-) strand; PAM type: NRG; PAM sequence: AGG
tctccaatgtttttggcacc

SEQ ID NO: 98495 - DNA, 20 bp, Artificial Sequence
  Description of Artificial Sequence: Synthetic oligonucleotide
  Target: LAMA2; (-) strand; PAM type: NRG; PAM sequence: CAG
gtctccaatgtttttggcac

SEQ ID NO: 98496 - DNA, 20 bp, Artificial Sequence
  Description of Artificial Sequence: Synthetic oligonucleotide
  Target: LAMA2; (-) strand; PAM type: NRG; PAM sequence: TGG
agcagcgtctccaatgtttt

SEQ ID NO: 98497 - DNA, 20 bp, Artificial Sequence
  Description of Artificial Sequence: Synthetic oligonucleotide
  Target: LAMA2; (-) strand; PAM type: NRG; PAM sequence: CAG
caaagctgggtgctgtagag

SEQ ID NO: 98498 - DNA, 20 bp, Artificial Sequence
  Description of Artificial Sequence: Synthetic oligonucleotide
  Target: LAMA2; (-) strand; PAM type: NRG; PAM sequence: GAG
agtcaaagctgggtgctgta

SEQ ID NO: 98499 - DNA, 20 bp, Artificial Sequence
  Description of Artificial Sequence: Synthetic oligonucleotide
  Target: LAMA2; (-) strand; PAM type: NRG; PAM sequence: TAG
agagtcaaagctgggtgctg

SEQ ID NO: 98500 - DNA, 20 bp, Artificial Sequence
  Description of Artificial Sequence: Synthetic oligonucleotide
  Target: LAMA2; (-) strand; PAM type: NRG; PAM sequence: GGG
gaagcatgagagtcaaagct

SEQ ID NO: 98501 - DNA, 20 bp, Artificial Sequence
  Description of Artificial Sequence: Synthetic oligonucleotide
  Target: LAMA2; (-) strand; PAM type: NRG; PAM sequence: TGG
ggaagcatgagagtcaaagc

SEQ ID NO: 98502 - DNA, 20 bp, Artificial Sequence
  Description of Artificial Sequence: Synthetic oligonucleotide
  Target: LAMA2; (-) strand; PAM type: NRG; PAM sequence: AAG
agagggaagcatgagagtca

SEQ ID NO: 98503 - DNA, 20 bp, Artificial Sequence
  Description of Artificial Sequence: Synthetic oligonucleotide
  Target: LAMA2; (-) strand; PAM type: NRG; PAM sequence: GAG
gcacatagagggaagcatga

SEQ ID NO: 98504 - DNA, 20 bp, Artificial Sequence
  Description of Artificial Sequence: Synthetic oligonucleotide
  Target: LAMA2; (-) strand; PAM type: NRG; PAM sequence: GAG
gggcacatagagggaagcat

SEQ ID NO: 98505 - DNA, 20 bp, Artificial Sequence
  Description of Artificial Sequence: Synthetic oligonucleotide
  Target: LAMA2; (-) strand; PAM type: NRG; PAM sequence: AAG
gagagggggcacatagaggg

SEQ ID NO: 98506 - DNA, 20 bp, Artificial Sequence
  Description of Artificial Sequence: Synthetic oligonucleotide
  Target: LAMA2; (-) strand; PAM type: NRG; PAM sequence: GGG
atggagagggggcacataga

SEQ ID NO: 98507 - DNA, 20 bp, Artificial Sequence
  Description of Artificial Sequence: Synthetic oligonucleotide
  Target: LAMA2; (-) strand; PAM type: NRG; PAM sequence: AGG
gatggagagggggcacatag

SEQ ID NO: 98508 - DNA, 20 bp, Artificial Sequence
  Description of Artificial Sequence: Synthetic oligonucleotide
  Target: LAMA2; (-) strand; PAM type: NRG; PAM sequence: GAG
agatggagagggggcacata

SEQ ID NO: 98509 - DNA, 20 bp, Artificial Sequence
  Description of Artificial Sequence: Synthetic oligonucleotide
  Target: LAMA2; (-) strand; PAM type: NRG; PAM sequence: TAG
gcagatggagagggggcaca

SEQ ID NO: 98510 - DNA, 20 bp, Artificial Sequence
  Description of Artificial Sequence: Synthetic oligonucleotide
  Target: LAMA2; (-) strand; PAM type: NRG; PAM sequence: GGG
tcgacaagcagatggagagg

SEQ ID NO: 98511 - DNA, 20 bp, Artificial Sequence
  Description of Artificial Sequence: Synthetic oligonucleotide
  Target: LAMA2; (-) strand; PAM type: NRG; PAM sequence: GGG
ttcgacaagcagatggagag

SEQ ID NO: 98512 - DNA, 20 bp, Artificial Sequence
  Description of Artificial Sequence: Synthetic oligonucleotide
  Target: LAMA2; (-) strand; PAM type: NRG; PAM sequence: GGG
cttcgacaagcagatggaga

SEQ ID NO: 98513 - DNA, 20 bp, Artificial Sequence
  Description of Artificial Sequence: Synthetic oligonucleotide
  Target: LAMA2; (-) strand; PAM type: NRG; PAM sequence: AGG
acttcgacaagcagatggag

SEQ ID NO: 98514 - DNA, 20 bp, Artificial Sequence
  Description of Artificial Sequence: Synthetic oligonucleotide
  Target: LAMA2; (-) strand; PAM type: NRG; PAM sequence: GAG
gacttcgacaagcagatgga

SEQ ID NO: 98515 - DNA, 20 bp, Artificial Sequence
  Description of Artificial Sequence: Synthetic oligonucleotide
  Target: LAMA2; (-) strand; PAM type: NRG; PAM sequence: GAG
gtgacttcgacaagcagatg

SEQ ID NO: 98516 - DNA, 20 bp, Artificial Sequence
  Description of Artificial Sequence: Synthetic oligonucleotide
  Target: LAMA2; (-) strand; PAM type: NRG; PAM sequence: TGG
aggtgacttcgacaagcaga

SEQ ID NO: 98517 - DNA, 20 bp, Artificial Sequence
  Description of Artificial Sequence: Synthetic oligonucleotide
  Target: LAMA2; (-) strand; PAM type: NRG; PAM sequence: CAG
tagtaggtgacttcgacaag

SEQ ID NO: 98518 - DNA, 20 bp, Artificial Sequence
  Description of Artificial Sequence: Synthetic oligonucleotide
  Target: LAMA2; (-) strand; PAM type: NRG; PAM sequence: AAG
ggttagtaggtgacttcgac

SEQ ID NO: 98519 - DNA, 20 bp, Artificial Sequence
  Description of Artificial Sequence: Synthetic oligonucleotide
  Target: LAMA2; (-) strand; PAM type: NRG; PAM sequence: AGG
tggggtatttaaaggttagt

SEQ ID NO: 98520 - DNA, 20 bp, Artificial Sequence
  Description of Artificial Sequence: Synthetic oligonucleotide
  Target: LAMA2; (-) strand; PAM type: NRG; PAM sequence: TAG
gtggggtatttaaaggttag

SEQ ID NO: 98521 - DNA, 20 bp, Artificial Sequence
  Description of Artificial Sequence: Synthetic oligonucleotide
  Target: LAMA2; (-) strand; PAM type: NRG; PAM sequence: TAG
gatgtggggtatttaaaggt

SEQ ID NO: 98522 - DNA, 20 bp, Artificial Sequence
  Description of Artificial Sequence: Synthetic oligonucleotide
  Target: LAMA2; (-) strand; PAM type: NRG; PAM sequence: AGG
gaatgatgtggggtatttaa

SEQ ID NO: 98523 - DNA, 20 bp, Artificial Sequence
  Description of Artificial Sequence: Synthetic oligonucleotide
  Target: LAMA2; (-) strand; PAM type: NRG; PAM sequence: AAG
ggaatgatgtggggtattta

SEQ ID NO: 98524 - DNA, 20 bp, Artificial Sequence
  Description of Artificial Sequence: Synthetic oligonucleotide
  Target: LAMA2; (-) strand; PAM type: NRG; PAM sequence: GGG
aatcagcaaggaatgatgtg

SEQ ID NO: 98525 - DNA, 20 bp, Artificial Sequence
  Description of Artificial Sequence: Synthetic oligonucleotide
  Target: LAMA2; (-) strand; PAM type: NRG; PAM sequence: GGG
aaatcagcaaggaatgatgt

SEQ ID NO: 98526 - DNA, 20 bp, Artificial Sequence
  Description of Artificial Sequence: Synthetic oligonucleotide
  Target: LAMA2; (-) strand; PAM type: NRG; PAM sequence: TGG
aaaatcagcaaggaatgatg

SEQ ID NO: 98527 - DNA, 20 bp, Artificial Sequence
  Description of Artificial Sequence: Synthetic oligonucleotide
  Target: LAMA2; (-) strand; PAM type: NRG; PAM sequence: AGG
ttagacagggaaaatcagca

SEQ ID NO: 98528 - DNA, 20 bp, Artificial Sequence
  Description of Artificial Sequence: Synthetic oligonucleotide
  Target: LAMA2; (-) strand; PAM type: NRG; PAM sequence: AAG
attagacagggaaaatcagc

SEQ ID NO: 98529 - DNA, 20 bp, Artificial Sequence
  Description of Artificial Sequence: Synthetic oligonucleotide
  Target: LAMA2; (-) strand; PAM type: NRG; PAM sequence: CAG
gacaattagacagggaaaat

SEQ ID NO: 98530 - DNA, 20 bp, Artificial Sequence
  Description of Artificial Sequence: Synthetic oligonucleotide
  Target: LAMA2; (-) strand; PAM type: NRG; PAM sequence: GGG
gggaaaatgacaattagaca

SEQ ID NO: 98531 - DNA, 20 bp, Artificial Sequence
  Description of Artificial Sequence: Synthetic oligonucleotide
  Target: LAMA2; (-) strand; PAM type: NRG; PAM sequence: AGG
agggaaaatgacaattagac

SEQ ID NO: 98532 - DNA, 20 bp, Artificial Sequence
  Description of Artificial Sequence: Synthetic oligonucleotide
  Target: LAMA2; (-) strand; PAM type: NRG; PAM sequence: CAG
tagggaaaatgacaattaga

SEQ ID NO: 98533 - DNA, 20 bp, Artificial Sequence
  Description of Artificial Sequence: Synthetic oligonucleotide
  Target: LAMA2; (-) strand; PAM type: NRG; PAM sequence: TAG
gtgctagggaaaatgacaat

SEQ ID NO: 98534 - DNA, 20 bp, Artificial Sequence
  Description of Artificial Sequence: Synthetic oligonucleotide
  Target: LAMA2; (-) strand; PAM type: NRG; PAM sequence: GGG
tgatgacaggagtagtgcta

SEQ ID NO: 98535 - DNA, 20 bp, Artificial Sequence
  Description of Artificial Sequence: Synthetic oligonucleotide
  Target: LAMA2; (-) strand; PAM type: NRG; PAM sequence: AGG
atgatgacaggagtagtgct

SEQ ID NO: 98536 - DNA, 20 bp, Artificial Sequence
  Description of Artificial Sequence: Synthetic oligonucleotide
  Target: LAMA2; (-) strand; PAM type: NRG; PAM sequence: TAG
aatgatgacaggagtagtgc

SEQ ID NO: 98537 - DNA, 20 bp, Artificial Sequence
  Description of Artificial Sequence: Synthetic oligonucleotide
  Target: LAMA2; (-) strand; PAM type: NRG; PAM sequence: TAG
actaagaatgatgacaggag

SEQ ID NO: 98538 - DNA, 20 bp, Artificial Sequence
  Description of Artificial Sequence: Synthetic oligonucleotide
  Target: LAMA2; (-) strand; PAM type: NRG; PAM sequence: GAG
atcactaagaatgatgacag

SEQ ID NO: 98539 - DNA, 20 bp, Artificial Sequence
  Description of Artificial Sequence: Synthetic oligonucleotide
  Target: LAMA2; (-) strand; PAM type: NRG; PAM sequence: AGG
aaatcactaagaatgatgac

SEQ ID NO: 98540 - DNA, 20 bp, Artificial Sequence
  Description of Artificial Sequence: Synthetic oligonucleotide
  Target: LAMA2; (-) strand; PAM type: NRG; PAM sequence: CAG
aaaatcactaagaatgatga

SEQ ID NO: 98541 - DNA, 20 bp, Artificial Sequence
  Description of Artificial Sequence: Synthetic oligonucleotide
  Target: LAMA2; (-) strand; PAM type: NRG; PAM sequence: AAG
tcatggacattaaaatcact

SEQ ID NO: 98542 - DNA, 20 bp, Artificial Sequence
  Description of Artificial Sequence: Synthetic oligonucleotide
  Target: LAMA2; (-) strand; PAM type: NRG; PAM sequence: TGG
gtatggaagagttaagttca

SEQ ID NO: 98543 - DNA, 20 bp, Artificial Sequence
  Description of Artificial Sequence: Synthetic oligonucleotide
  Target: LAMA2; (-) strand; PAM type: NRG; PAM sequence: AAG
gtgaagagtatggaagagtt

SEQ ID NO: 98544 - DNA, 20 bp, Artificial Sequence
  Description of Artificial Sequence: Synthetic oligonucleotide
  Target: LAMA2; (-) strand; PAM type: NRG; PAM sequence: GAG
tgaaagtgaagagtatggaa

SEQ ID NO: 98545 - DNA, 20 bp, Artificial Sequence
  Description of Artificial Sequence: Synthetic oligonucleotide
  Target: LAMA2; (-) strand; PAM type: NRG; PAM sequence: AAG
actgaaagtgaagagtatgg

SEQ ID NO: 98546 - DNA, 20 bp, Artificial Sequence
  Description of Artificial Sequence: Synthetic oligonucleotide
  Target: LAMA2; (-) strand; PAM type: NRG; PAM sequence: TGG
gaaactgaaagtgaagagta

SEQ ID NO: 98547 - DNA, 20 bp, Artificial Sequence
  Description of Artificial Sequence: Synthetic oligonucleotide
  Target: LAMA2; (-) strand; PAM type: NRG; PAM sequence: GAG
cacaagaaactgaaagtgaa

SEQ ID NO: 98548 - DNA, 20 bp, Artificial Sequence
  Description of Artificial Sequence: Synthetic oligonucleotide
  Target: LAMA2; (-) strand; PAM type: NRG; PAM sequence: AAG
ggcacaagaaactgaaagtg

SEQ ID NO: 98549 - DNA, 20 bp, Artificial Sequence
  Description of Artificial Sequence: Synthetic oligonucleotide
  Target: LAMA2; (-) strand; PAM type: NRG; PAM sequence: AAG
agagaggcacaagaaactga

SEQ ID NO: 98550 - DNA, 20 bp, Artificial Sequence
  Description of Artificial Sequence: Synthetic oligonucleotide
  Target: LAMA2; (-) strand; PAM type: NRG; PAM sequence: AAG
aatggagaccagagaggcac

SEQ ID NO: 98551 - DNA, 20 bp, Artificial Sequence
  Description of Artificial Sequence: Synthetic oligonucleotide
  Target: LAMA2; (-) strand; PAM type: NRG; PAM sequence: AGG
gcttcaaatggagaccagag

SEQ ID NO: 98552 - DNA, 20 bp, Artificial Sequence
  Description of Artificial Sequence: Synthetic oligonucleotide
  Target: LAMA2; (-) strand; PAM type: NRG; PAM sequence: GAG
cgcttcaaatggagaccaga

SEQ ID NO: 98553 - DNA, 20 bp, Artificial Sequence
  Description of Artificial Sequence: Synthetic oligonucleotide
  Target: LAMA2; (-) strand; PAM type: NRG; PAM sequence: GAG
aacgcttcaaatggagacca

SEQ ID NO: 98554 - DNA, 20 bp, Artificial Sequence
  Description of Artificial Sequence: Synthetic oligonucleotide
  Target: LAMA2; (-) strand; PAM type: NRG; PAM sequence: CAG
aaaacgcttcaaatggagac

SEQ ID NO: 98555 - DNA, 20 bp, Artificial Sequence
  Description of Artificial Sequence: Synthetic oligonucleotide
  Target: LAMA2; (-) strand; PAM type: NRG; PAM sequence: GAG
acaaaaaaacgcttcaaatg

SEQ ID NO: 98556 - DNA, 20 bp, Artificial Sequence
  Description of Artificial Sequence: Synthetic oligonucleotide
  Target: LAMA2; (-) strand; PAM type: NRG; PAM sequence: TGG
caacaaaaaaacgcttcaaa

SEQ ID NO: 98557 - DNA, 20 bp, Artificial Sequence
  Description of Artificial Sequence: Synthetic oligonucleotide
  Target: LAMA2; (-) strand; PAM type: NRG; PAM sequence: GGG
ctagagagaaacgacacagt

SEQ ID NO: 98558 - DNA, 20 bp, Artificial Sequence
  Description of Artificial Sequence: Synthetic oligonucleotide
  Target: LAMA2; (-) strand; PAM type: NRG; PAM sequence: TGG
actagagagaaacgacacag

SEQ ID NO: 98559 - DNA, 20 bp, Artificial Sequence
  Description of Artificial Sequence: Synthetic oligonucleotide
  Target: LAMA2; (-) strand; PAM type: NRG; PAM sequence: CAG
tgaactagagagaaacgaca

SEQ ID NO: 98560 - DNA, 20 bp, Artificial Sequence
  Description of Artificial Sequence: Synthetic oligonucleotide
  Target: LAMA2; (-) strand; PAM type: NRG; PAM sequence: GAG
tttagaagaagtgaactaga

SEQ ID NO: 98561 - DNA, 20 bp, Artificial Sequence
  Description of Artificial Sequence: Synthetic oligonucleotide
  Target: LAMA2; (-) strand; PAM type: NRG; PAM sequence: GAG
tatttagaagaagtgaacta

SEQ ID NO: 98562 - DNA, 20 bp, Artificial Sequence
  Description of Artificial Sequence: Synthetic oligonucleotide
  Target: LAMA2; (-) strand; PAM type: NRG; PAM sequence: TAG
agtatttagaagaagtgaac

SEQ ID NO: 98563 - DNA, 20 bp, Artificial Sequence
  Description of Artificial Sequence: Synthetic oligonucleotide
  Target: LAMA2; (-) strand; PAM type: NRG; PAM sequence: AAG
gaagtggaagtatttagaag

SEQ ID NO: 98564 - DNA, 20 bp, Artificial Sequence
  Description of Artificial Sequence: Synthetic oligonucleotide
  Target: LAMA2; (-) strand; PAM type: NRG; PAM sequence: AAG
attgaagtggaagtatttag

SEQ ID NO: 98565 - DNA, 20 bp, Artificial Sequence
  Description of Artificial Sequence: Synthetic oligonucleotide
  Target: LAMA2; (-) strand; PAM type: NRG; PAM sequence: TAG
cacattgaagtggaagtatt

SEQ ID NO: 98566 - DNA, 20 bp, Artificial Sequence
  Description of Artificial Sequence: Synthetic oligonucleotide
  Target: LAMA2; (-) strand; PAM type: NRG; PAM sequence: AAG
gattacacacattgaagtgg

SEQ ID NO: 98567 - DNA, 20 bp, Artificial Sequence
  Description of Artificial Sequence: Synthetic oligonucleotide
  Target: LAMA2; (-) strand; PAM type: NRG; PAM sequence: TGG
tgagattacacacattgaag

SEQ ID NO: 98568 - DNA, 20 bp, Artificial Sequence
  Description of Artificial Sequence: Synthetic oligonucleotide
  Target: LAMA2; (-) strand; PAM type: NRG; PAM sequence: AAG
ttgtgagattacacacattg

SEQ ID NO: 98569 - DNA, 20 bp, Artificial Sequence
  Description of Artificial Sequence: Synthetic oligonucleotide
  Target: LAMA2; (-) strand; PAM type: NRG; PAM sequence: GAG
aaagtgtgtgcatcaattgt

SEQ ID NO: 98570 - DNA, 20 bp, Artificial Sequence
  Description of Artificial Sequence: Synthetic oligonucleotide
  Target: LAMA2; (-) strand; PAM type: NRG; PAM sequence: AAG
tgagataaggaacaagaaaa

SEQ ID NO: 98571 - DNA, 20 bp, Artificial Sequence
  Description of Artificial Sequence: Synthetic oligonucleotide
  Target: LAMA2; (-) strand; PAM type: NRG; PAM sequence: AAG
gaaagcatgagataaggaac

SEQ ID NO: 98572 - DNA, 20 bp, Artificial Sequence
  Description of Artificial Sequence: Synthetic oligonucleotide
  Target: LAMA2; (-) strand; PAM type: NRG; PAM sequence: AGG
tacagtgaaagcatgagata

SEQ ID NO: 98573 - DNA, 20 bp, Artificial Sequence
  Description of Artificial Sequence: Synthetic oligonucleotide
  Target: LAMA2; (-) strand; PAM type: NRG; PAM sequence: AAG
ctacagtgaaagcatgagat

SEQ ID NO: 98574 - DNA, 20 bp, Artificial Sequence
  Description of Artificial Sequence: Synthetic oligonucleotide
  Target: LAMA2; (-) strand; PAM type: NRG; PAM sequence: GAG
ggttactacagtgaaagcat

SEQ ID NO: 98575 - DNA, 20 bp, Artificial Sequence
  Description of Artificial Sequence: Synthetic oligonucleotide
  Target: LAMA2; (-) strand; PAM type: NRG; PAM sequence: AAG
taagctggttactacagtga

SEQ ID NO: 98576 - DNA, 20 bp, Artificial Sequence
  Description of Artificial Sequence: Synthetic oligonucleotide
  Target: LAMA2; (-) strand; PAM type: NRG; PAM sequence: CAG
gactattaagctggttacta

SEQ ID NO: 98577 - DNA, 20 bp, Artificial Sequence
  Description of Artificial Sequence: Synthetic oligonucleotide
  Target: LAMA2; (-) strand; PAM type: NRG; PAM sequence: TGG
aaagatcatgactattaagc

SEQ ID NO: 98578 - DNA, 20 bp, Artificial Sequence
  Description of Artificial Sequence: Synthetic oligonucleotide
  Target: LAMA2; (-) strand; PAM type: NRG; PAM sequence: AAG
aatgaaagatcatgactatt

SEQ ID NO: 98579 - DNA, 20 bp, Artificial Sequence
  Description of Artificial Sequence: Synthetic oligonucleotide
  Target: LAMA2; (-) strand; PAM type: NRG; PAM sequence: AAG
caaagcagtaataccaatga

SEQ ID NO: 98580 - DNA, 20 bp, Artificial Sequence
  Description of Artificial Sequence: Synthetic oligonucleotide
  Target: LAMA2; (-) strand; PAM type: NRG; PAM sequence: CAG
gggaaatgagcgttgcaaag

SEQ ID NO: 98581 - DNA, 20 bp, Artificial Sequence
  Description of Artificial Sequence: Synthetic oligonucleotide
  Target: LAMA2; (-) strand; PAM type: NRG; PAM sequence: AAG
ccagggaaatgagcgttgca

SEQ ID NO: 98582 - DNA, 20 bp, Artificial Sequence
  Description of Artificial Sequence: Synthetic oligonucleotide
  Target: LAMA2; (-) strand; PAM type: NRG; PAM sequence: GAG
aaaggagtagccagggaaat

SEQ ID NO: 98583 - DNA, 20 bp, Artificial Sequence
  Description of Artificial Sequence: Synthetic oligonucleotide
  Target: LAMA2; (-) strand; PAM type: NRG; PAM sequence: GGG
aataagtaaaggagtagcca

SEQ ID NO: 98584 - DNA, 20 bp, Artificial Sequence
  Description of Artificial Sequence: Synthetic oligonucleotide
  Target: LAMA2; (-) strand; PAM type: NRG; PAM sequence: AGG
aaataagtaaaggagtagcc

SEQ ID NO: 98585 - DNA, 20 bp, Artificial Sequence
  Description of Artificial Sequence: Synthetic oligonucleotide
  Target: LAMA2; (-) strand; PAM type: NRG; PAM sequence: CAG
aaaataagtaaaggagtagc

SEQ ID NO: 98586 - DNA, 20 bp, Artificial Sequence
  Description of Artificial Sequence: Synthetic oligonucleotide
  Target: LAMA2; (-) strand; PAM type: NRG; PAM sequence: TAG
gtaaaaaataagtaaaggag

SEQ ID NO: 98587 - DNA, 20 bp, Artificial Sequence
  Description of Artificial Sequence: Synthetic oligonucleotide
  Target: LAMA2; (-) strand; PAM type: NRG; PAM sequence: GAG
tgagtaaaaaataagtaaag

SEQ ID NO: 98588 - DNA, 20 bp, Artificial Sequence
  Description of Artificial Sequence: Synthetic oligonucleotide
  Target: LAMA2; (-) strand; PAM type: NRG; PAM sequence: AGG
cttgagtaaaaaataagtaa

SEQ ID NO: 98589 - DNA, 20 bp, Artificial Sequence
  Description of Artificial Sequence: Synthetic oligonucleotide
  Target: LAMA2; (-) strand; PAM type: NRG; PAM sequence: AAG
acttgagtaaaaaataagta

SEQ ID NO: 98590 - DNA, 20 bp, Artificial Sequence
  Description of Artificial Sequence: Synthetic oligonucleotide
  Target: LAMA2; (-) strand; PAM type: NRG; PAM sequence: AAG
agttcacttgagtaaaaaat

SEQ ID NO: 98591 - DNA, 20 bp, Artificial Sequence
  Description of Artificial Sequence: Synthetic oligonucleotide
  Target: LAMA2; (-) strand; PAM type: NRG; PAM sequence: GAG
cacagtgttggagttcactt

SEQ ID NO: 98592 - DNA, 20 bp, Artificial Sequence
  Description of Artificial Sequence: Synthetic oligonucleotide
  Target: LAMA2; (-) strand; PAM type: NRG; PAM sequence: GAG
gtaggattctcacagtgttg

SEQ ID NO: 98593 - DNA, 20 bp, Artificial Sequence
  Description of Artificial Sequence: Synthetic oligonucleotide
  Target: LAMA2; (-) strand; PAM type: NRG; PAM sequence: TGG
tggtaggattctcacagtgt

SEQ ID NO: 98594 - DNA, 20 bp, Artificial Sequence
  Description of Artificial Sequence: Synthetic oligonucleotide
  Target: LAMA2; (-) strand; PAM type: NRG; PAM sequence: CAG
aggagatggtaggattctca

SEQ ID NO: 98595 - DNA, 20 bp, Artificial Sequence
  Description of Artificial Sequence: Synthetic oligonucleotide
  Target: LAMA2; (-) strand; PAM type: NRG; PAM sequence: AGG
gcaggtatggaggagatggt

SEQ ID NO: 98596 - DNA, 20 bp, Artificial Sequence
  Description of Artificial Sequence: Synthetic oligonucleotide
  Target: LAMA2; (-) strand; PAM type: NRG; PAM sequence: TAG
tgcaggtatggaggagatgg

SEQ ID NO: 98597 - DNA, 20 bp, Artificial Sequence
  Description of Artificial Sequence: Synthetic oligonucleotide
  Target: LAMA2; (-) strand; PAM type: NRG; PAM sequence: TGG
aggtgcaggtatggaggaga

SEQ ID NO: 98598 - DNA, 20 bp, Artificial Sequence
  Description of Artificial Sequence: Synthetic oligonucleotide
  Target: LAMA2; (-) strand; PAM type: NRG; PAM sequence: GAG
aagaaggtgcaggtatggag

SEQ ID NO: 98599 - DNA, 20 bp, Artificial Sequence
  Description of Artificial Sequence: Synthetic oligonucleotide
  Target: LAMA2; (-) strand; PAM type: NRG; PAM sequence: AGG
aaaagaaggtgcaggtatgg

SEQ ID NO: 98600 - DNA, 20 bp, Artificial Sequence
  Description of Artificial Sequence: Synthetic oligonucleotide
  Target: LAMA2; (-) strand; PAM type: NRG; PAM sequence: GAG
aaaaagaaggtgcaggtatg

SEQ ID NO: 98601 - DNA, 20 bp, Artificial Sequence
  Description of Artificial Sequence: Synthetic oligonucleotide
  Target: LAMA2; (-) strand; PAM type: NRG; PAM sequence: TGG
aaaaaaagaaggtgcaggta

SEQ ID NO: 98602 - DNA, 20 bp, Artificial Sequence
  Description of Artificial Sequence: Synthetic oligonucleotide
  Target: LAMA2; (-) strand; PAM type: NRG; PAM sequence: AGG
caaaaaaaaaaagaaggtgc

SEQ ID NO: 98603 - DNA, 20 bp, Artificial Sequence
  Description of Artificial Sequence: Synthetic oligonucleotide
  Target: LAMA2; (-) strand; PAM type: NRG; PAM sequence: CAG
tcaaaaaaaaaaagaaggtg

SEQ ID NO: 98604 - DNA, 20 bp, Artificial Sequence
  Description of Artificial Sequence: Synthetic oligonucleotide
  Target: LAMA2; (-) strand; PAM type: NRG; PAM sequence: AGG
ccgtctcaaaaaaaaaaaga

SEQ ID NO: 98605 - DNA, 20 bp, Artificial Sequence
  Description of Artificial Sequence: Synthetic oligonucleotide
  Target: LAMA2; (-) strand; PAM type: NRG; PAM sequence: AAG
tccgtctcaaaaaaaaaaag

SEQ ID NO: 98606 - DNA, 20 bp, Artificial Sequence
  Description of Artificial Sequence: Synthetic oligonucleotide
  Target: LAMA2; (-) strand; PAM type: NRG; PAM sequence: AAG
gactccgtctcaaaaaaaaa

SEQ ID NO: 98607 - DNA, 20 bp, Artificial Sequence
  Description of Artificial Sequence: Synthetic oligonucleotide
  Target: LAMA2; (-) strand; PAM type: NRG; PAM sequence: AAG
tccagcctgggtgacagagc

SEQ ID NO: 98608 - DNA, 20 bp, Artificial Sequence
  Description of Artificial Sequence: Synthetic oligonucleotide
  Target: LAMA2; (-) strand; PAM type: NRG; PAM sequence: GAG
gcactccagcctgggtgaca

SEQ ID NO: 98609 - DNA, 20 bp, Artificial Sequence
  Description of Artificial Sequence: Synthetic oligonucleotide
  Target: LAMA2; (-) strand; PAM type: NRG; PAM sequence: CAG
ctgcactccagcctgggtga

SEQ ID NO: 98610 - DNA, 20 bp, Artificial Sequence
  Description of Artificial Sequence: Synthetic oligonucleotide
  Target: LAMA2; (-) strand; PAM type: NRG; PAM sequence: GGG
gcgtcactgcactccagcct

SEQ ID NO: 98611 - DNA, 20 bp, Artificial Sequence
  Description of Artificial Sequence: Synthetic oligonucleotide
  Target: LAMA2; (-) strand; PAM type: NRG; PAM sequence: TGG
cgcgtcactgcactccagcc

SEQ ID NO: 98612 - DNA, 20 bp, Artificial Sequence
  Description of Artificial Sequence: Synthetic oligonucleotide
  Target: LAMA2; (-) strand; PAM type: NRG; PAM sequence: CAG
gagatcgcgtcactgcactc

SEQ ID NO: 98613 - DNA, 20 bp, Artificial Sequence
  Description of Artificial Sequence: Synthetic oligonucleotide
  Target: LAMA2; (-) strand; PAM type: NRG; PAM sequence: GAG
ggcggagcttgcagtgagct

SEQ ID NO: 98614 - DNA, 20 bp, Artificial Sequence
  Description of Artificial Sequence: Synthetic oligonucleotide
  Target: LAMA2; (-) strand; PAM type: NRG; PAM sequence: GAG
tgagaggcggagcttgcagt

SEQ ID NO: 98615 - DNA, 20 bp, Artificial Sequence
  Description of Artificial Sequence: Synthetic oligonucleotide
  Target: LAMA2; (-) strand; PAM type: NRG; PAM sequence: CAG
aacctgagaggcggagcttg

SEQ ID NO: 98616 - DNA, 20 bp, Artificial Sequence
  Description of Artificial Sequence: Synthetic oligonucleotide
  Target: LAMA2; (-) strand; PAM type: NRG; PAM sequence: GAG
tggcttgaacctgagaggcg

SEQ ID NO: 98617 - DNA, 20 bp, Artificial Sequence
  Description of Artificial Sequence: Synthetic oligonucleotide
  Target: LAMA2; (-) strand; PAM type: NRG; PAM sequence: CGG
aatggcttgaacctgagagg

SEQ ID NO: 98618 - DNA, 20 bp, Artificial Sequence
  Description of Artificial Sequence: Synthetic oligonucleotide
  Target: LAMA2; (-) strand; PAM type: NRG; PAM sequence: AGG
gagaatggcttgaacctgag

SEQ ID NO: 98619 - DNA, 20 bp, Artificial Sequence
  Description of Artificial Sequence: Synthetic oligonucleotide
  Target: LAMA2; (-) strand; PAM type: NRG; PAM sequence: GAG
ggagaatggcttgaacctga

SEQ ID NO: 98620 - DNA, 20 bp, Artificial Sequence
  Description of Artificial Sequence: Synthetic oligonucleotide
  Target: LAMA2; (-) strand; PAM type: NRG; PAM sequence: GAG
caggagaatggcttgaacct

SEQ ID NO: 98621 - DNA, 20 bp, Artificial Sequence
  Description of Artificial Sequence: Synthetic oligonucleotide
  Target: LAMA2; (-) strand; PAM type: NRG; PAM sequence: TGG
aggaggctgaggcaggagaa

SEQ ID NO: 98622 - DNA, 20 bp, Artificial Sequence
  Description of Artificial Sequence: Synthetic oligonucleotide
  Target: LAMA2; (-) strand; PAM type: NRG; PAM sequence: GAG
tactcaggaggctgaggcag

SEQ ID NO: 98623 - DNA, 20 bp, Artificial Sequence
  Description of Artificial Sequence: Synthetic oligonucleotide
  Target: LAMA2; (-) strand; PAM type: NRG; PAM sequence: AGG
gctactcaggaggctgaggc

SEQ ID NO: 98624 - DNA, 20 bp, Artificial Sequence
  Description of Artificial Sequence: Synthetic oligonucleotide
  Target: LAMA2; (-) strand; PAM type: NRG; PAM sequence: CAG
agctactcaggaggctgagg

SEQ ID NO: 98625 - DNA, 20 bp, Artificial Sequence
  Description of Artificial Sequence: Synthetic oligonucleotide
  Target: LAMA2; (-) strand; PAM type: NRG; PAM sequence: AGG
tccagctactcaggaggctg

SEQ ID NO: 98626 - DNA, 20 bp, Artificial Sequence
  Description of Artificial Sequence: Synthetic oligonucleotide
  Target: LAMA2; (-) strand; PAM type: NRG; PAM sequence: GAG
ttccagctactcaggaggct

SEQ ID NO: 98627 - DNA, 20 bp, Artificial Sequence
  Description of Artificial Sequence: Synthetic oligonucleotide
  Target: LAMA2; (-) strand; PAM type: NRG; PAM sequence: AGG
tgtagttccagctactcagg

SEQ ID NO: 98628 - DNA, 20 bp, Artificial Sequence
  Description of Artificial Sequence: Synthetic oligonucleotide
  Target: LAMA2; (-) strand; PAM type: NRG; PAM sequence: GAG
ctgtagttccagctactcag

SEQ ID NO: 98629 - DNA, 20 bp, Artificial Sequence
  Description of Artificial Sequence: Synthetic oligonucleotide
  Target: LAMA2; (-) strand; PAM type: NRG; PAM sequence: AGG
acctgtagttccagctactc

SEQ ID NO: 98630 - DNA, 20 bp, Artificial Sequence
  Description of Artificial Sequence: Synthetic oligonucleotide
  Target: LAMA2; (-) strand; PAM type: NRG; PAM sequence: CAG
cacctgtagttccagctact

SEQ ID NO: 98631 - DNA, 20 bp, Artificial Sequence
  Description of Artificial Sequence: Synthetic oligonucleotide
  Target: LAMA2; (-) strand; PAM type: NRG; PAM sequence: CAG
gtggtgggcacctgtagttc

SEQ ID NO: 98632 - DNA, 20 bp, Artificial Sequence
  Description of Artificial Sequence: Synthetic oligonucleotide
  Target: LAMA2; (-) strand; PAM type: NRG; PAM sequence: TAG
ggcatggtggtgggcacctg

SEQ ID NO: 98633 - DNA, 20 bp, Artificial Sequence
  Description of Artificial Sequence: Synthetic oligonucleotide
  Target: LAMA2; (-) strand; PAM type: NRG; PAM sequence: GGG
aagaagccgggcatggtggt

SEQ ID NO: 98634 - DNA, 20 bp, Artificial Sequence
  Description of Artificial Sequence: Synthetic oligonucleotide
  Target: LAMA2; (-) strand; PAM type: NRG; PAM sequence: TGG
aaagaagccgggcatggtgg

SEQ ID NO: 98635 - DNA, 20 bp, Artificial Sequence
  Description of Artificial Sequence: Synthetic oligonucleotide
  Target: LAMA2; (-) strand; PAM type: NRG; PAM sequence: TGG
aaaaaagaagccgggcatgg

SEQ ID NO: 98636 - DNA, 20 bp, Artificial Sequence
  Description of Artificial Sequence: Synthetic oligonucleotide
  Target: LAMA2; (-) strand; PAM type: NRG; PAM sequence: TGG
acaaaaaaagaagccgggca

SEQ ID NO: 98637 - DNA, 20 bp, Artificial Sequence
  Description of Artificial Sequence: Synthetic oligonucleotide
  Target: LAMA2; (-) strand; PAM type: NRG; PAM sequence: GGG
aaaatacaaaaaaagaagcc

SEQ ID NO: 98638 - DNA, 20 bp, Artificial Sequence
  Description of Artificial Sequence: Synthetic oligonucleotide
  Target: LAMA2; (-) strand; PAM type: NRG; PAM sequence: CGG
aaaaatacaaaaaaagaagc

SEQ ID NO: 98639 - DNA, 20 bp, Artificial Sequence
  Description of Artificial Sequence: Synthetic oligonucleotide
  Target: LAMA2; (-) strand; PAM type: NRG; PAM sequence: AAG
tattaaaaatacaaaaaaag

SEQ ID NO: 98640 - DNA, 20 bp, Artificial Sequence
  Description of Artificial Sequence: Synthetic oligonucleotide
  Target: LAMA2; (-) strand; PAM type: NRG; PAM sequence: AAG
ctctattaaaaatacaaaaa

SEQ ID NO: 98641 - DNA, 20 bp, Artificial Sequence
  Description of Artificial Sequence: Synthetic oligonucleotide
  Target: LAMA2; (-) strand; PAM type: NRG; PAM sequence: CAG
cgagtccatcctggctaaca

SEQ ID NO: 98642 - DNA, 20 bp, Artificial Sequence
  Description of Artificial Sequence: Synthetic oligonucleotide
  Target: LAMA2; (-) strand; PAM type: NRG; PAM sequence: TGG
tcaggagatcgagtccatcc

SEQ ID NO: 98643 - DNA, 20 bp, Artificial Sequence
  Description of Artificial Sequence: Synthetic oligonucleotide
  Target: LAMA2; (-) strand; PAM type: NRG; PAM sequence: GAG
gatcatgaggtcaggagatc

SEQ ID NO: 98644 - DNA, 20 bp, Artificial Sequence
  Description of Artificial Sequence: Synthetic oligonucleotide
  Target: LAMA2; (-) strand; PAM type: NRG; PAM sequence: GAG
atcatggatcatgaggtcag

SEQ ID NO: 98645 - DNA, 20 bp, Artificial Sequence
  Description of Artificial Sequence: Synthetic oligonucleotide
  Target: LAMA2; (-) strand; PAM type: NRG; PAM sequence: AGG
gaatcatggatcatgaggtc

SEQ ID NO: 98646 - DNA, 20 bp, Artificial Sequence
  Description of Artificial Sequence: Synthetic oligonucleotide
  Target: LAMA2; (-) strand; PAM type: NRG; PAM sequence: CAG
cgaatcatggatcatgaggt

SEQ ID NO: 98647 - DNA, 20 bp, Artificial Sequence
  Description of Artificial Sequence: Synthetic oligonucleotide
  Target: LAMA2; (-) strand; PAM type: NRG; PAM sequence: AGG
gaggcgaatcatggatcatg

SEQ ID NO: 98648 - DNA, 20 bp, Artificial Sequence
  Description of Artificial Sequence: Synthetic oligonucleotide
  Target: LAMA2; (-) strand; PAM type: NRG; PAM sequence: GAG
ggaggcgaatcatggatcat

SEQ ID NO: 98649 - DNA, 20 bp, Artificial Sequence
  Description of Artificial Sequence: Synthetic oligonucleotide
  Target: LAMA2; (-) strand; PAM type: NRG; PAM sequence: TGG
aggccgaaggaggcgaatca

SEQ ID NO: 98650 - DNA, 20 bp, Artificial Sequence
  Description of Artificial Sequence: Synthetic oligonucleotide
  Target: LAMA2; (-) strand; PAM type: NRG; PAM sequence: AGG
gcactttgggaggccgaagg

SEQ ID NO: 98651 - DNA, 20 bp, Artificial Sequence
  Description of Artificial Sequence: Synthetic oligonucleotide
  Target: LAMA2; (-) strand; PAM type: NRG; PAM sequence: GAG
agcactttgggaggccgaag

SEQ ID NO: 98652 - DNA, 20 bp, Artificial Sequence
  Description of Artificial Sequence: Synthetic oligonucleotide
  Target: LAMA2; (-) strand; PAM type: NRG; PAM sequence: AGG
ccagcactttgggaggccga

SEQ ID NO: 98653 - DNA, 20 bp, Artificial Sequence
  Description of Artificial Sequence: Synthetic oligonucleotide
  Target: LAMA2; (-) strand; PAM type: NRG; PAM sequence: AAG
cccagcactttgggaggccg

SEQ ID NO: 98654 - DNA, 20 bp, Artificial Sequence
  Description of Artificial Sequence: Synthetic oligonucleotide
  Target: LAMA2; (-) strand; PAM type: NRG; PAM sequence: AGG
tgtagtcccagcactttggg

SEQ ID NO: 98655 - DNA, 20 bp, Artificial Sequence
  Description of Artificial Sequence: Synthetic oligonucleotide
  Target: LAMA2; (-) strand; PAM type: NRG; PAM sequence: GAG
ctgtagtcccagcactttgg

SEQ ID NO: 98656 - DNA, 20 bp, Artificial Sequence
  Description of Artificial Sequence: Synthetic oligonucleotide
  Target: LAMA2; (-) strand; PAM type: NRG; PAM sequence: GGG
gcctgtagtcccagcacttt

SEQ ID NO: 98657 - DNA, 20 bp, Artificial Sequence
  Description of Artificial Sequence: Synthetic oligonucleotide
  Target: LAMA2; (-) strand; PAM type: NRG; PAM sequence: TGG
cgcctgtagtcccagcactt

SEQ ID NO: 98658 - DNA, 20 bp, Artificial Sequence
  Description of Artificial Sequence: Synthetic oligonucleotide
  Target: LAMA2; (-) strand; PAM type: NRG; PAM sequence: CAG
gtggcttacgcctgtagtcc

SEQ ID NO: 98659 - DNA, 20 bp, Artificial Sequence
  Description of Artificial Sequence: Synthetic oligonucleotide
  Target: LAMA2; (-) strand; PAM type: NRG; PAM sequence: TAG
ggcgcagtggcttacgcctg

SEQ ID NO: 98660 - DNA, 20 bp, Artificial Sequence
  Description of Artificial Sequence: Synthetic oligonucleotide
  Target: LAMA2; (-) strand; PAM type: NRG; PAM sequence: TGG
gtgcaggtggccgggcgcag

SEQ ID NO: 98661 - DNA, 20 bp, Artificial Sequence
  Description of Artificial Sequence: Synthetic oligonucleotide
  Target: LAMA2; (-) strand; PAM type: NRG; PAM sequence: CAG
aaggtgcaggtggccgggcg

SEQ ID NO: 98662 - DNA, 20 bp, Artificial Sequence
  Description of Artificial Sequence: Synthetic oligonucleotide
  Target: LAMA2; (-) strand; PAM type: NRG; PAM sequence: GGG
cttagaaggtgcaggtggcc

SEQ ID NO: 98663 - DNA, 20 bp, Artificial Sequence
  Description of Artificial Sequence: Synthetic oligonucleotide
  Target: LAMA2; (-) strand; PAM type: NRG; PAM sequence: CGG
gcttagaaggtgcaggtggc

SEQ ID NO: 98664 - DNA, 20 bp, Artificial Sequence
  Description of Artificial Sequence: Synthetic oligonucleotide
  Target: LAMA2; (-) strand; PAM type: NRG; PAM sequence: TGG
ttcagcttagaaggtgcagg

SEQ ID NO: 98665 - DNA, 20 bp, Artificial Sequence
  Description of Artificial Sequence: Synthetic oligonucleotide
  Target: LAMA2; (-) strand; PAM type: NRG; PAM sequence: AGG
acgttcagcttagaaggtgc

SEQ ID NO: 98666 - DNA, 20 bp, Artificial Sequence
  Description of Artificial Sequence: Synthetic oligonucleotide
  Target: LAMA2; (-) strand; PAM type: NRG; PAM sequence: CAG
cacgttcagcttagaaggtg

SEQ ID NO: 98667 - DNA, 20 bp, Artificial Sequence
  Description of Artificial Sequence: Synthetic oligonucleotide
  Target: LAMA2; (-) strand; PAM type: NRG; PAM sequence: AGG
acagccacgttcagcttaga

SEQ ID NO: 98668 - DNA, 20 bp, Artificial Sequence
  Description of Artificial Sequence: Synthetic oligonucleotide
  Target: LAMA2; (-) strand; PAM type: NRG; PAM sequence: AAG
tacagccacgttcagcttag

SEQ ID NO: 98669 - DNA, 20 bp, Artificial Sequence
  Description of Artificial Sequence: Synthetic oligonucleotide
  Target: LAMA2; (-) strand; PAM type: NRG; PAM sequence: TAG
ttctacagccacgttcagct

SEQ ID NO: 98670 - DNA, 20 bp, Artificial Sequence
  Description of Artificial Sequence: Synthetic oligonucleotide
  Target: LAMA2; (-) strand; PAM type: NRG; PAM sequence: CAG
tctttttctacagccacgtt

SEQ ID NO: 98671 - DNA, 20 bp, Artificial Sequence
  Description of Artificial Sequence: Synthetic oligonucleotide
  Target: LAMA2; (-) strand; PAM type: NRG; PAM sequence: CAG
ggcacaattgtctttttcta

SEQ ID NO: 98672 - DNA, 20 bp, Artificial Sequence
  Description of Artificial Sequence: Synthetic oligonucleotide
  Target: LAMA2; (-) strand; PAM type: NRG; PAM sequence: TGG
gaatttaaggtgagattaga

SEQ ID NO: 98673 - DNA, 20 bp, Artificial Sequence
  Description of Artificial Sequence: Synthetic oligonucleotide
  Target: LAMA2; (-) strand; PAM type: NRG; PAM sequence: TAG
tcatgaatttaaggtgagat

SEQ ID NO: 98674 - DNA, 20 bp, Artificial Sequence
  Description of Artificial Sequence: Synthetic oligonucleotide
  Target: LAMA2; (-) strand; PAM type: NRG; PAM sequence: GAG
agggatcatgaatttaaggt

SEQ ID NO: 98675 - DNA, 20 bp, Artificial Sequence
  Description of Artificial Sequence: Synthetic oligonucleotide
  Target: LAMA2; (-) strand; PAM type: NRG; PAM sequence: AGG
agagagggatcatgaattta

SEQ ID NO: 98676 - DNA, 20 bp, Artificial Sequence
  Description of Artificial Sequence: Synthetic oligonucleotide
  Target: LAMA2; (-) strand; PAM type: NRG; PAM sequence: AAG
aagagagggatcatgaattt

SEQ ID NO: 98677 - DNA, 20 bp, Artificial Sequence
  Description of Artificial Sequence: Synthetic oligonucleotide
  Target: LAMA2; (-) strand; PAM type: NRG; PAM sequence: GGG
aaagggtccatttgaagaga

SEQ ID NO: 98678 - DNA, 20 bp, Artificial Sequence
  Description of Artificial Sequence: Synthetic oligonucleotide
  Target: LAMA2; (-) strand; PAM type: NRG; PAM sequence: AGG
caaagggtccatttgaagag

SEQ ID NO: 98679 - DNA, 20 bp, Artificial Sequence
  Description of Artificial Sequence: Synthetic oligonucleotide
  Target: LAMA2; (-) strand; PAM type: NRG; PAM sequence: GAG
acaaagggtccatttgaaga

SEQ ID NO: 98680 - DNA, 20 bp, Artificial Sequence
  Description of Artificial Sequence: Synthetic oligonucleotide
  Target: LAMA2; (-) strand; PAM type: NRG; PAM sequence: GAG
gcacaaagggtccatttgaa

SEQ ID NO: 98681 - DNA, 20 bp, Artificial Sequence
  Description of Artificial Sequence: Synthetic oligonucleotide
  Target: LAMA2; (-) strand; PAM type: NRG; PAM sequence: AAG
cagcacaaagggtccatttg

SEQ ID NO: 98682 - DNA, 20 bp, Artificial Sequence
  Description of Artificial Sequence: Synthetic oligonucleotide
  Target: LAMA2; (-) strand; PAM type: NRG; PAM sequence: GGG
tgattgcagagcagcacaaa

SEQ ID NO: 98683 - DNA, 20 bp, Artificial Sequence
  Description of Artificial Sequence: Synthetic oligonucleotide
  Target: LAMA2; (-) strand; PAM type: NRG; PAM sequence: AGG
atgattgcagagcagcacaa

SEQ ID NO: 98684 - DNA, 20 bp, Artificial Sequence
  Description of Artificial Sequence: Synthetic oligonucleotide
  Target: LAMA2; (-) strand; PAM type: NRG; PAM sequence: AAG
catgattgcagagcagcaca

SEQ ID NO: 98685 - DNA, 20 bp, Artificial Sequence
  Description of Artificial Sequence: Synthetic oligonucleotide
  Target: LAMA2; (-) strand; PAM type: NRG; PAM sequence: CAG
aaagtggcatgattgcagag

SEQ ID NO: 98686 - DNA, 20 bp, Artificial Sequence
  Description of Artificial Sequence: Synthetic oligonucleotide
  Target: LAMA2; (-) strand; PAM type: NRG; PAM sequence: GAG
agaaaagtggcatgattgca

SEQ ID NO: 98687 - DNA, 20 bp, Artificial Sequence
  Description of Artificial Sequence: Synthetic oligonucleotide
  Target: LAMA2; (-) strand; PAM type: NRG; PAM sequence: CAG
agagaaaagtggcatgattg

SEQ ID NO: 98688 - DNA, 20 bp, Artificial Sequence
  Description of Artificial Sequence: Synthetic oligonucleotide
  Target: LAMA2; (-) strand; PAM type: NRG; PAM sequence: TGG
gaaaaaggatgagagaaaag

SEQ ID NO: 98689 - DNA, 20 bp, Artificial Sequence
  Description of Artificial Sequence: Synthetic oligonucleotide
  Target: LAMA2; (-) strand; PAM type: NRG; PAM sequence: AAG
aaagaaaaaggatgagagaa

SEQ ID NO: 98690 - DNA, 20 bp, Artificial Sequence
  Description of Artificial Sequence: Synthetic oligonucleotide
  Target: LAMA2; (-) strand; PAM type: NRG; PAM sequence: GAG
gtggaaaagaaaaaggatga

SEQ ID NO: 98691 - DNA, 20 bp, Artificial Sequence
  Description of Artificial Sequence: Synthetic oligonucleotide
  Target: LAMA2; (-) strand; PAM type: NRG; PAM sequence: GAG
atgtggaaaagaaaaaggat

SEQ ID NO: 98692 - DNA, 20 bp, Artificial Sequence
  Description of Artificial Sequence: Synthetic oligonucleotide
  Target: LAMA2; (-) strand; PAM type: NRG; PAM sequence: AGG
taggaatgtggaaaagaaaa

SEQ ID NO: 98693 - DNA, 20 bp, Artificial Sequence
  Description of Artificial Sequence: Synthetic oligonucleotide
  Target: LAMA2; (-) strand; PAM type: NRG; PAM sequence: AAG
ctaggaatgtggaaaagaaa

SEQ ID NO: 98694 - DNA, 20 bp, Artificial Sequence
  Description of Artificial Sequence: Synthetic oligonucleotide
  Target: LAMA2; (-) strand; PAM type: NRG; PAM sequence: AAG
aatcacctaggaatgtggaa

SEQ ID NO: 98695 - DNA, 20 bp, Artificial Sequence
  Description of Artificial Sequence: Synthetic oligonucleotide
  Target: LAMA2; (-) strand; PAM type: NRG; PAM sequence: TGG
gaaataatcacctaggaatg

SEQ ID NO: 98696 - DNA, 20 bp, Artificial Sequence
  Description of Artificial Sequence: Synthetic oligonucleotide
  Target: LAMA2; (-) strand; PAM type: NRG; PAM sequence: AGG
gaggtatgaaataatcacct

SEQ ID NO: 98697 - DNA, 20 bp, Artificial Sequence
  Description of Artificial Sequence: Synthetic oligonucleotide
  Target: LAMA2; (-) strand; PAM type: NRG; PAM sequence: TAG
ggaggtatgaaataatcacc

SEQ ID NO: 98698 - DNA, 20 bp, Artificial Sequence
  Description of Artificial Sequence: Synthetic oligonucleotide
  Target: LAMA2; (-) strand; PAM type: NRG; PAM sequence: AGG
aggcttgaggatggaggggg

SEQ ID NO: 98699 - DNA, 20 bp, Artificial Sequence
  Description of Artificial Sequence: Synthetic oligonucleotide
  Target: LAMA2; (-) strand; PAM type: NRG; PAM sequence: GAG
taggcttgaggatggagggg

SEQ ID NO: 98700 - DNA, 20 bp, Artificial Sequence
  Description of Artificial Sequence: Synthetic oligonucleotide
  Target: LAMA2; (-) strand; PAM type: NRG; PAM sequence: GGG
tttaggcttgaggatggagg

SEQ ID NO: 98701 - DNA, 20 bp, Artificial Sequence
  Description of Artificial Sequence: Synthetic oligonucleotide
  Target: LAMA2; (-) strand; PAM type: NRG; PAM sequence: GGG
gtttaggcttgaggatggag

SEQ ID NO: 98702 - DNA, 20 bp, Artificial Sequence
  Description of Artificial Sequence: Synthetic oligonucleotide
  Target: LAMA2; (-) strand; PAM type: NRG; PAM sequence: GGG
ggtttaggcttgaggatgga

SEQ ID NO: 98703 - DNA, 20 bp, Artificial Sequence
  Description of Artificial Sequence: Synthetic oligonucleotide
  Target: LAMA2; (-) strand; PAM type: NRG; PAM sequence: AGG
aggtttaggcttgaggatgg

SEQ ID NO: 98704 - DNA, 20 bp, Artificial Sequence
  Description of Artificial Sequence: Synthetic oligonucleotide
  Target: LAMA2; (-) strand; PAM type: NRG; PAM sequence: GAG
gaggtttaggcttgaggatg

SEQ ID NO: 98705 - DNA, 20 bp, Artificial Sequence
  Description of Artificial Sequence: Synthetic oligonucleotide
  Target: LAMA2; (-) strand; PAM type: NRG; PAM sequence: TGG
gagaggtttaggcttgagga

SEQ ID NO: 98706 - DNA, 20 bp, Artificial Sequence
  Description of Artificial Sequence: Synthetic oligonucleotide
  Target: LAMA2; (-) strand; PAM type: NRG; PAM sequence: AGG
agaggagaggtttaggcttg

SEQ ID NO: 98707 - DNA, 20 bp, Artificial Sequence
  Description of Artificial Sequence: Synthetic oligonucleotide
  Target: LAMA2; (-) strand; PAM type: NRG; PAM sequence: GAG
gagaggagaggtttaggctt

SEQ ID NO: 98708 - DNA, 20 bp, Artificial Sequence
  Description of Artificial Sequence: Synthetic oligonucleotide
  Target: LAMA2; (-) strand; PAM type: NRG; PAM sequence: AGG
gggggtgagaggagaggttt

SEQ ID NO: 98709 - DNA, 20 bp, Artificial Sequence
  Description of Artificial Sequence: Synthetic oligonucleotide
  Target: LAMA2; (-) strand; PAM type: NRG; PAM sequence: TAG
agggggtgagaggagaggtt

SEQ ID NO: 98710 - DNA, 20 bp, Artificial Sequence
  Description of Artificial Sequence: Synthetic oligonucleotide
  Target: LAMA2; (-) strand; PAM type: NRG; PAM sequence: AGG
atgggagggggtgagaggag

SEQ ID NO: 98711 - DNA, 20 bp, Artificial Sequence
  Description of Artificial Sequence: Synthetic oligonucleotide
  Target: LAMA2; (-) strand; PAM type: NRG; PAM sequence: GAG
gatgggagggggtgagagga

SEQ ID NO: 98712 - DNA, 20 bp, Artificial Sequence
  Description of Artificial Sequence: Synthetic oligonucleotide
  Target: LAMA2; (-) strand; PAM type: NRG; PAM sequence: GAG
aggatgggagggggtgagag

SEQ ID NO: 98713 - DNA, 20 bp, Artificial Sequence
  Description of Artificial Sequence: Synthetic oligonucleotide
  Target: LAMA2; (-) strand; PAM type: NRG; PAM sequence: AGG
taaggatgggagggggtgag

SEQ ID NO: 98714 - DNA, 20 bp, Artificial Sequence
  Description of Artificial Sequence: Synthetic oligonucleotide
  Target: LAMA2; (-) strand; PAM type: NRG; PAM sequence: GAG
gtaaggatgggagggggtga

SEQ ID NO: 98715 - DNA, 20 bp, Artificial Sequence
  Description of Artificial Sequence: Synthetic oligonucleotide
  Target: LAMA2; (-) strand; PAM type: NRG; PAM sequence: GAG
gggtaaggatgggagggggt

SEQ ID NO: 98716 - DNA, 20 bp, Artificial Sequence
  Description of Artificial Sequence: Synthetic oligonucleotide
  Target: LAMA2; (-) strand; PAM type: NRG; PAM sequence: GGG
ctgagggtaaggatgggagg

SEQ ID NO: 98717 - DNA, 20 bp, Artificial Sequence
  Description of Artificial Sequence: Synthetic oligonucleotide
  Target: LAMA2; (-) strand; PAM type: NRG; PAM sequence: GGG
actgagggtaaggatgggag

SEQ ID NO: 98718 - DNA, 20 bp, Artificial Sequence
  Description of Artificial Sequence: Synthetic oligonucleotide
  Target: LAMA2; (-) strand; PAM type: NRG; PAM sequence: GGG
aactgagggtaaggatggga

SEQ ID NO: 98719 - DNA, 20 bp, Artificial Sequence
  Description of Artificial Sequence: Synthetic oligonucleotide
  Target: LAMA2; (-) strand; PAM type: NRG; PAM sequence: AGG
caactgagggtaaggatggg

SEQ ID NO: 98720 - DNA, 20 bp, Artificial Sequence
  Description of Artificial Sequence: Synthetic oligonucleotide
  Target: LAMA2; (-) strand; PAM type: NRG; PAM sequence: GAG
tcaactgagggtaaggatgg

SEQ ID NO: 98721 - DNA, 20 bp, Artificial Sequence
  Description of Artificial Sequence: Synthetic oligonucleotide
  Target: LAMA2; (-) strand; PAM type: NRG; PAM sequence: GGG
catcaactgagggtaaggat

SEQ ID NO: 98722 - DNA, 20 bp, Artificial Sequence
  Description of Artificial Sequence: Synthetic oligonucleotide
  Target: LAMA2; (-) strand; PAM type: NRG; PAM sequence: TGG
ccatcaactgagggtaagga

SEQ ID NO: 98723 - DNA, 20 bp, Artificial Sequence
  Description of Artificial Sequence: Synthetic oligonucleotide
  Target: LAMA2; (-) strand; PAM type: NRG; PAM sequence: AGG
aacaccatcaactgagggta

SEQ ID NO: 98724 - DNA, 20 bp, Artificial Sequence
  Description of Artificial Sequence: Synthetic oligonucleotide
  Target: LAMA2; (-) strand; PAM type: NRG; PAM sequence: AAG
caacaccatcaactgagggt

SEQ ID NO: 98725 - DNA, 20 bp, Artificial Sequence
  Description of Artificial Sequence: Synthetic oligonucleotide
  Target: LAMA2; (-) strand; PAM type: NRG; PAM sequence: GGG
gaggcaacaccatcaactga

SEQ ID NO: 98726 - DNA, 20 bp, Artificial Sequence
  Description of Artificial Sequence: Synthetic oligonucleotide
  Target: LAMA2; (-) strand; PAM type: NRG; PAM sequence: AGG
agaggcaacaccatcaactg

SEQ ID NO: 98727 - DNA, 20 bp, Artificial Sequence
  Description of Artificial Sequence: Synthetic oligonucleotide
  Target: LAMA2; (-) strand; PAM type: NRG; PAM sequence: GAG
aagaggcaacaccatcaact

SEQ ID NO: 98728 - DNA, 20 bp, Artificial Sequence
  Description of Artificial Sequence: Synthetic oligonucleotide
  Target: LAMA2; (-) strand; PAM type: NRG; PAM sequence: AGG
taaattctcaatgaaataag

SEQ ID NO: 98729 - DNA, 20 bp, Artificial Sequence
  Description of Artificial Sequence: Synthetic oligonucleotide
  Target: LAMA2; (-) strand; PAM type: NRG; PAM sequence: GAG
ctaaattctcaatgaaataa

SEQ ID NO: 98730 - DNA, 20 bp, Artificial Sequence
  Description of Artificial Sequence: Synthetic oligonucleotide
  Target: LAMA2; (-) strand; PAM type: NRG; PAM sequence: AAG
ttctaaattctcaatgaaat

SEQ ID NO: 98731 - DNA, 20 bp, Artificial Sequence
  Description of Artificial Sequence: Synthetic oligonucleotide
  Target: LAMA2; (-) strand; PAM type: NRG; PAM sequence: CAG
gcttgttacctctcttctga

SEQ ID NO: 98732 - DNA, 20 bp, Artificial Sequence
  Description of Artificial Sequence: Synthetic oligonucleotide
  Target: LAMA2; (-) strand; PAM type: NRG; PAM sequence: GAG
gtgggtgcatgcagtagtgg

SEQ ID NO: 98733 - DNA, 20 bp, Artificial Sequence
  Description of Artificial Sequence: Synthetic oligonucleotide
  Target: LAMA2; (-) strand; PAM type: NRG; PAM sequence: GGG
aagtgggtgcatgcagtagt

SEQ ID NO: 98734 - DNA, 20 bp, Artificial Sequence
  Description of Artificial Sequence: Synthetic oligonucleotide
  Target: LAMA2; (-) strand; PAM type: NRG; PAM sequence: TGG
aaagtgggtgcatgcagtag

SEQ ID NO: 98735 - DNA, 20 bp, Artificial Sequence
  Description of Artificial Sequence: Synthetic oligonucleotide
  Target: LAMA2; (-) strand; PAM type: NRG; PAM sequence: TAG
agaaaagtgggtgcatgcag

SEQ ID NO: 98736 - DNA, 20 bp, Artificial Sequence
  Description of Artificial Sequence: Synthetic oligonucleotide
  Target: LAMA2; (-) strand; PAM type: NRG; PAM sequence: CAG
tgcagaaaagtgggtgcatg

SEQ ID NO: 98737 - DNA, 20 bp, Artificial Sequence
  Description of Artificial Sequence: Synthetic oligonucleotide
  Target: LAMA2; (-) strand; PAM type: NRG; PAM sequence: GGG
gggcacagatgcagaaaagt

SEQ ID NO: 98738 - DNA, 20 bp, Artificial Sequence
  Description of Artificial Sequence: Synthetic oligonucleotide
  Target: LAMA2; (-) strand; PAM type: NRG; PAM sequence: TGG
tgggcacagatgcagaaaag

SEQ ID NO: 98739 - DNA, 20 bp, Artificial Sequence
  Description of Artificial Sequence: Synthetic oligonucleotide
  Target: LAMA2; (-) strand; PAM type: NRG; PAM sequence: AAG
aattgggcacagatgcagaa

SEQ ID NO: 98740 - DNA, 20 bp, Artificial Sequence
  Description of Artificial Sequence: Synthetic oligonucleotide
  Target: LAMA2; (-) strand; PAM type: NRG; PAM sequence: CAG
ataataattgggcacagatg

SEQ ID NO: 98741 - DNA, 20 bp, Artificial Sequence
  Description of Artificial Sequence: Synthetic oligonucleotide
  Target: LAMA2; (-) strand; PAM type: NRG; PAM sequence: CAG
agagtcataataattgggca

SEQ ID NO: 98742 - DNA, 20 bp, Artificial Sequence
  Description of Artificial Sequence: Synthetic oligonucleotide
  Target: LAMA2; (-) strand; PAM type: NRG; PAM sequence: GGG
agaaaagagtcataataatt

SEQ ID NO: 98743 - DNA, 20 bp, Artificial Sequence
  Description of Artificial Sequence: Synthetic oligonucleotide
  Target: LAMA2; (-) strand; PAM type: NRG; PAM sequence: TGG
tagaaaagagtcataataat

SEQ ID NO: 98744 - DNA, 20 bp, Artificial Sequence
  Description of Artificial Sequence: Synthetic oligonucleotide
  Target: LAMA2; (-) strand; PAM type: NRG; PAM sequence: GAG
tcatccaaagtaatagaaaa

SEQ ID NO: 98745 - DNA, 20 bp, Artificial Sequence
  Description of Artificial Sequence: Synthetic oligonucleotide
  Target: LAMA2; (-) strand; PAM type: NRG; PAM sequence: AAG
attcatccaaagtaatagaa

SEQ ID NO: 98746 - DNA, 20 bp, Artificial Sequence
  Description of Artificial Sequence: Synthetic oligonucleotide
  Target: LAMA2; (-) strand; PAM type: NRG; PAM sequence: TAG
gaataattcatccaaagtaa

SEQ ID NO: 98747 - DNA, 20 bp, Artificial Sequence
  Description of Artificial Sequence: Synthetic oligonucleotide
  Target: LAMA2; (-) strand; PAM type: NRG; PAM sequence: AAG
aaacaagaataattcatcca

SEQ ID NO: 98748 - DNA, 20 bp, Artificial Sequence
  Description of Artificial Sequence: Synthetic oligonucleotide
  Target: LAMA2; (-) strand; PAM type: NRG; PAM sequence: AAG
atgtgatcttttctggaaac

SEQ ID NO: 98749 - DNA, 20 bp, Artificial Sequence
  Description of Artificial Sequence: Synthetic oligonucleotide
  Target: LAMA2; (-) strand; PAM type: NRG; PAM sequence: TGG
ggggaagatgtgatcttttc

SEQ ID NO: 98750 - DNA, 20 bp, Artificial Sequence
  Description of Artificial Sequence: Synthetic oligonucleotide
  Target: LAMA2; (-) strand; PAM type: NRG; PAM sequence: AAG
agaattgagaacataggggg

SEQ ID NO: 98751 - DNA, 20 bp, Artificial Sequence
  Description of Artificial Sequence: Synthetic oligonucleotide
  Target: LAMA2; (-) strand; PAM type: NRG; PAM sequence: GGG
ggtagaattgagaacatagg

SEQ ID NO: 98752 - DNA, 20 bp, Artificial Sequence
  Description of Artificial Sequence: Synthetic oligonucleotide
  Target: LAMA2; (-) strand; PAM type: NRG; PAM sequence: GGG
gggtagaattgagaacatag

SEQ ID NO: 98753 - DNA, 20 bp, Artificial Sequence
  Description of Artificial Sequence: Synthetic oligonucleotide
  Target: LAMA2; (-) strand; PAM type: NRG; PAM sequence: GGG
ggggtagaattgagaacata

SEQ ID NO: 98754 - DNA, 20 bp, Artificial Sequence
  Description of Artificial Sequence: Synthetic oligonucleotide
  Target: LAMA2; (-) strand; PAM type: NRG; PAM sequence: AGG
aggggtagaattgagaacat

SEQ ID NO: 98755 - DNA, 20 bp, Artificial Sequence
  Description of Artificial Sequence: Synthetic oligonucleotide
  Target: LAMA2; (-) strand; PAM type: NRG; PAM sequence: TAG
gaggggtagaattgagaaca

SEQ ID NO: 98756 - DNA, 20 bp, Artificial Sequence
  Description of Artificial Sequence: Synthetic oligonucleotide
  Target: LAMA2; (-) strand; PAM type: NRG; PAM sequence: GAG
agcgggagaggggtagaatt

SEQ ID NO: 98757 - DNA, 20 bp, Artificial Sequence
  Description of Artificial Sequence: Synthetic oligonucleotide
  Target: LAMA2; (-) strand; PAM type: NRG; PAM sequence: TAG
gtcatcaagcgggagagggg

SEQ ID NO: 98758 - DNA, 20 bp, Artificial Sequence
  Description of Artificial Sequence: Synthetic oligonucleotide
  Target: LAMA2; (-) strand; PAM type: NRG; PAM sequence: GGG
gatgtcatcaagcgggagag

SEQ ID NO: 98759 - DNA, 20 bp, Artificial Sequence
  Description of Artificial Sequence: Synthetic oligonucleotide
  Target: LAMA2; (-) strand; PAM type: NRG; PAM sequence: GGG
tgatgtcatcaagcgggaga

SEQ ID NO: 98760 - DNA, 20 bp, Artificial Sequence
  Description of Artificial Sequence: Synthetic oligonucleotide
  Target: LAMA2; (-) strand; PAM type: NRG; PAM sequence: AGG
gtgatgtcatcaagcgggag

SEQ ID NO: 98761 - DNA, 20 bp, Artificial Sequence
  Description of Artificial Sequence: Synthetic oligonucleotide
  Target: LAMA2; (-) strand; PAM type: NRG; PAM sequence: GAG
agtgatgtcatcaagcggga

SEQ ID NO: 98762 - DNA, 20 bp, Artificial Sequence
  Description of Artificial Sequence: Synthetic oligonucleotide
  Target: LAMA2; (-) strand; PAM type: NRG; PAM sequence: GAG
agagtgatgtcatcaagcgg

SEQ ID NO: 98763 - DNA, 20 bp, Artificial Sequence
  Description of Artificial Sequence: Synthetic oligonucleotide
  Target: LAMA2; (-) strand; PAM type: NRG; PAM sequence: GGG
ccagagtgatgtcatcaagc

SEQ ID NO: 98764 - DNA, 20 bp, Artificial Sequence
  Description of Artificial Sequence: Synthetic oligonucleotide
  Target: LAMA2; (-) strand; PAM type: NRG; PAM sequence: CGG
gccagagtgatgtcatcaag

SEQ ID NO: 98765 - DNA, 20 bp, Artificial Sequence
  Description of Artificial Sequence: Synthetic oligonucleotide
  Target: LAMA2; (-) strand; PAM type: NRG; PAM sequence: AAG
ttagccagagtgatgtcatc

SEQ ID NO: 98766 - DNA, 20 bp, Artificial Sequence
  Description of Artificial Sequence: Synthetic oligonucleotide
  Target: LAMA2; (-) strand; PAM type: NRG; PAM sequence: GAG
gaaggaggagagattagcca

SEQ ID NO: 98767 - DNA, 20 bp, Artificial Sequence
  Description of Artificial Sequence: Synthetic oligonucleotide
  Target: LAMA2; (-) strand; PAM type: NRG; PAM sequence: CAG
aagaaggaggagagattagc

SEQ ID NO: 98768 - DNA, 20 bp, Artificial Sequence
  Description of Artificial Sequence: Synthetic oligonucleotide
  Target: LAMA2; (-) strand; PAM type: NRG; PAM sequence: TAG
atataagaaggaggagagat

SEQ ID NO: 98769 - DNA, 20 bp, Artificial Sequence
  Description of Artificial Sequence: Synthetic oligonucleotide
  Target: LAMA2; (-) strand; PAM type: NRG; PAM sequence: GAG
tgacaatataagaaggagga

SEQ ID NO: 98770 - DNA, 20 bp, Artificial Sequence
  Description of Artificial Sequence: Synthetic oligonucleotide
  Target: LAMA2; (-) strand; PAM type: NRG; PAM sequence: GAG
agtgacaatataagaaggag

SEQ ID NO: 98771 - DNA, 20 bp, Artificial Sequence
  Description of Artificial Sequence: Synthetic oligonucleotide
  Target: LAMA2; (-) strand; PAM type: NRG; PAM sequence: AGG
aaagtgacaatataagaagg

SEQ ID NO: 98772 - DNA, 20 bp, Artificial Sequence
  Description of Artificial Sequence: Synthetic oligonucleotide
  Target: LAMA2; (-) strand; PAM type: NRG; PAM sequence: GAG
aaaagtgacaatataagaag

SEQ ID NO: 98773 - DNA, 20 bp, Artificial Sequence
  Description of Artificial Sequence: Synthetic oligonucleotide
  Target: LAMA2; (-) strand; PAM type: NRG; PAM sequence: AGG
aaaaaagtgacaatataaga

SEQ ID NO: 98774 - DNA, 20 bp, Artificial Sequence
  Description of Artificial Sequence: Synthetic oligonucleotide
  Target: LAMA2; (-) strand; PAM type: NRG; PAM sequence: AAG
aaaaaaagtgacaatataag

SEQ ID NO: 98775 - DNA, 20 bp, Artificial Sequence
  Description of Artificial Sequence: Synthetic oligonucleotide
  Target: LAMA2; (-) strand; PAM type: NRG; PAM sequence: AAG
gaaaaaaaaagtgacaatat

SEQ ID NO: 98776 - DNA, 20 bp, Artificial Sequence
  Description of Artificial Sequence: Synthetic oligonucleotide
  Target: LAMA2; (-) strand; PAM type: NRG; PAM sequence: AAG
gcttttaagatggaaaaaaa

SEQ ID NO: 98777 - DNA, 20 bp, Artificial Sequence
  Description of Artificial Sequence: Synthetic oligonucleotide
  Target: LAMA2; (-) strand; PAM type: NRG; PAM sequence: TGG
gtttgtttttgcttttaaga

SEQ ID NO: 98778 - DNA, 20 bp, Artificial Sequence
  Description of Artificial Sequence: Synthetic oligonucleotide
  Target: LAMA2; (-) strand; PAM type: NRG; PAM sequence: AAG
gagagtttgtttttgctttt

SEQ ID NO: 98779 - DNA, 20 bp, Artificial Sequence
  Description of Artificial Sequence: Synthetic oligonucleotide
  Target: LAMA2; (-) strand; PAM type: NRG; PAM sequence: GAG
agaaaggaaatgagtcagga

SEQ ID NO: 98780 - DNA, 20 bp, Artificial Sequence
  Description of Artificial Sequence: Synthetic oligonucleotide
  Target: LAMA2; (-) strand; PAM type: NRG; PAM sequence: GAG
ttagaaaggaaatgagtcag

SEQ ID NO: 98781 - DNA, 20 bp, Artificial Sequence
  Description of Artificial Sequence: Synthetic oligonucleotide
  Target: LAMA2; (-) strand; PAM type: NRG; PAM sequence: AGG
acttagaaaggaaatgagtc

SEQ ID NO: 98782 - DNA, 20 bp, Artificial Sequence
  Description of Artificial Sequence: Synthetic oligonucleotide
  Target: LAMA2; (-) strand; PAM type: NRG; PAM sequence: CAG
tacttagaaaggaaatgagt

SEQ ID NO: 98783 - DNA, 20 bp, Artificial Sequence
  Description of Artificial Sequence: Synthetic oligonucleotide
  Target: LAMA2; (-) strand; PAM type: NRG; PAM sequence: GAG
tggttacttagaaaggaaat

SEQ ID NO: 98784 - DNA, 20 bp, Artificial Sequence
  Description of Artificial Sequence: Synthetic oligonucleotide
  Target: LAMA2; (-) strand; PAM type: NRG; PAM sequence: AGG
aatgaagtggttacttagaa

SEQ ID NO: 98785 - DNA, 20 bp, Artificial Sequence
  Description of Artificial Sequence: Synthetic oligonucleotide
  Target: LAMA2; (-) strand; PAM type: NRG; PAM sequence: AAG
gaatgaagtggttacttaga

SEQ ID NO: 98786 - DNA, 20 bp, Artificial Sequence
  Description of Artificial Sequence: Synthetic oligonucleotide
  Target: LAMA2; (-) strand; PAM type: NRG; PAM sequence: TAG
agaagaatgaagtggttact

SEQ ID NO: 98787 - DNA, 20 bp, Artificial Sequence
  Description of Artificial Sequence: Synthetic oligonucleotide
  Target: LAMA2; (-) strand; PAM type: NRG; PAM sequence: TGG
atggaaggagaagaatgaag

SEQ ID NO: 98788 - DNA, 20 bp, Artificial Sequence
  Description of Artificial Sequence: Synthetic oligonucleotide
  Target: LAMA2; (-) strand; PAM type: NRG; PAM sequence: AAG
tgtatggaaggagaagaatg

SEQ ID NO: 98789 - DNA, 20 bp, Artificial Sequence
  Description of Artificial Sequence: Synthetic oligonucleotide
  Target: LAMA2; (-) strand; PAM type: NRG; PAM sequence: AAG
tctccattgtatggaaggag

SEQ ID NO: 98790 - DNA, 20 bp, Artificial Sequence
  Description of Artificial Sequence: Synthetic oligonucleotide
  Target: LAMA2; (-) strand; PAM type: NRG; PAM sequence: GAG
agctctccattgtatggaag

SEQ ID NO: 98791 - DNA, 20 bp, Artificial Sequence
  Description of Artificial Sequence: Synthetic oligonucleotide
  Target: LAMA2; (-) strand; PAM type: NRG; PAM sequence: AGG
acagctctccattgtatgga

SEQ ID NO: 98792 - DNA, 20 bp, Artificial Sequence
  Description of Artificial Sequence: Synthetic oligonucleotide
  Target: LAMA2; (-) strand; PAM type: NRG; PAM sequence: AAG
gacagctctccattgtatgg

SEQ ID NO: 98793 - DNA, 20 bp, Artificial Sequence
  Description of Artificial Sequence: Synthetic oligonucleotide
  Target: LAMA2; (-) strand; PAM type: NRG; PAM sequence: TGG
atagacagctctccattgta

SEQ ID NO: 98794 - DNA, 20 bp, Artificial Sequence
  Description of Artificial Sequence: Synthetic oligonucleotide
  Target: LAMA2; (-) strand; PAM type: NRG; PAM sequence: CAG
gaaattatagacgggataga

SEQ ID NO: 98795 - DNA, 20 bp, Artificial Sequence
  Description of Artificial Sequence: Synthetic oligonucleotide
  Target: LAMA2; (-) strand; PAM type: NRG; PAM sequence: TAG
aagagaaattatagacggga

SEQ ID NO: 98796 - DNA, 20 bp, Artificial Sequence
  Description of Artificial Sequence: Synthetic oligonucleotide
  Target: LAMA2; (-) strand; PAM type: NRG; PAM sequence: GGG
gatgaagagaaattatagac

SEQ ID NO: 98797 - DNA, 20 bp, Artificial Sequence
  Description of Artificial Sequence: Synthetic oligonucleotide
  Target: LAMA2; (-) strand; PAM type: NRG; PAM sequence: CGG
ggatgaagagaaattataga

SEQ ID NO: 98798 - DNA, 20 bp, Artificial Sequence
  Description of Artificial Sequence: Synthetic oligonucleotide
  Target: LAMA2; (-) strand; PAM type: NRG; PAM sequence: TAG
gaatggatgaagagaaatta

SEQ ID NO: 98799 - DNA, 20 bp, Artificial Sequence
  Description of Artificial Sequence: Synthetic oligonucleotide
  Target: LAMA2; (-) strand; PAM type: NRG; PAM sequence: GAG
ttcaaaggagaatggatgaa

SEQ ID NO: 98800 - DNA, 20 bp, Artificial Sequence
  Description of Artificial Sequence: Synthetic oligonucleotide
  Target: LAMA2; (-) strand; PAM type: NRG; PAM sequence: AAG
aattcaaaggagaatggatg

SEQ ID NO: 98801 - DNA, 20 bp, Artificial Sequence
  Description of Artificial Sequence: Synthetic oligonucleotide
  Target: LAMA2; (-) strand; PAM type: NRG; PAM sequence: TGG
tttagtaattcaaaggagaa

SEQ ID NO: 98802 - DNA, 20 bp, Artificial Sequence
  Description of Artificial Sequence: Synthetic oligonucleotide
  Target: LAMA2; (-) strand; PAM type: NRG; PAM sequence: GAG
ctgtttttagtaattcaaag

SEQ ID NO: 98803 - DNA, 20 bp, Artificial Sequence
  Description of Artificial Sequence: Synthetic oligonucleotide
  Target: LAMA2; (-) strand; PAM type: NRG; PAM sequence: AGG
gcctgtttttagtaattcaa

SEQ ID NO: 98804 - DNA, 20 bp, Artificial Sequence
  Description of Artificial Sequence: Synthetic oligonucleotide
  Target: LAMA2; (-) strand; PAM type: NRG; PAM sequence: AAG
agcctgtttttagtaattca

SEQ ID NO: 98805 - DNA, 20 bp, Artificial Sequence
  Description of Artificial Sequence: Synthetic oligonucleotide
  Target: LAMA2; (-) strand; PAM type: NRG; PAM sequence: TAG
aggaggtgatagcctgtttt

SEQ ID NO: 98806 - DNA, 20 bp, Artificial Sequence
  Description of Artificial Sequence: Synthetic oligonucleotide
  Target: LAMA2; (-) strand; PAM type: NRG; PAM sequence: TAG
cagtatagaagaggaggtga

SEQ ID NO: 98807 - DNA, 20 bp, Artificial Sequence
  Description of Artificial Sequence: Synthetic oligonucleotide
  Target: LAMA2; (-) strand; PAM type: NRG; PAM sequence: AGG
tgaatccagtatagaagagg

SEQ ID NO: 98808 - DNA, 20 bp, Artificial Sequence
  Description of Artificial Sequence: Synthetic oligonucleotide
  Target: LAMA2; (-) strand; PAM type: NRG; PAM sequence: GAG
ttgaatccagtatagaagag

SEQ ID NO: 98809 - DNA, 20 bp, Artificial Sequence
  Description of Artificial Sequence: Synthetic oligonucleotide
  Target: LAMA2; (-) strand; PAM type: NRG; PAM sequence: AGG
cattgaatccagtatagaag

SEQ ID NO: 98810 - DNA, 20 bp, Artificial Sequence
  Description of Artificial Sequence: Synthetic oligonucleotide
  Target: LAMA2; (-) strand; PAM type: NRG; PAM sequence: GAG
ccattgaatccagtatagaa

SEQ ID NO: 98811 - DNA, 20 bp, Artificial Sequence
  Description of Artificial Sequence: Synthetic oligonucleotide
  Target: LAMA2; (-) strand; PAM type: NRG; PAM sequence: AAG
agccattgaatccagtatag

SEQ ID NO: 98812 - DNA, 20 bp, Artificial Sequence
  Description of Artificial Sequence: Synthetic oligonucleotide
  Target: LAMA2; (-) strand; PAM type: NRG; PAM sequence: TAG
attagccattgaatccagta

SEQ ID NO: 98813 - DNA, 20 bp, Artificial Sequence
  Description of Artificial Sequence: Synthetic oligonucleotide
  Target: LAMA2; (-) strand; PAM type: NRG; PAM sequence: CAG
tgtagattagccattgaatc

SEQ ID NO: 98814 - DNA, 20 bp, Artificial Sequence
  Description of Artificial Sequence: Synthetic oligonucleotide
  Target: LAMA2; (-) strand; PAM type: NRG; PAM sequence: TAG
gaacactggtggctgtagat

SEQ ID NO: 98815 - DNA, 20 bp, Artificial Sequence
  Description of Artificial Sequence: Synthetic oligonucleotide
  Target: LAMA2; (-) strand; PAM type: NRG; PAM sequence: TAG
aaggtgaacactggtggctg

SEQ ID NO: 98816 - DNA, 20 bp, Artificial Sequence
  Description of Artificial Sequence: Synthetic oligonucleotide
  Target: LAMA2; (-) strand; PAM type: NRG; PAM sequence: TGG
tatagtaaggtgaacactgg

SEQ ID NO: 98817 - DNA, 20 bp, Artificial Sequence
  Description of Artificial Sequence: Synthetic oligonucleotide
  Target: LAMA2; (-) strand; PAM type: NRG; PAM sequence: TGG
agatatagtaaggtgaacac

SEQ ID NO: 98818 - DNA, 20 bp, Artificial Sequence
  Description of Artificial Sequence: Synthetic oligonucleotide
  Target: LAMA2; (-) strand; PAM type: NRG; PAM sequence: AGG
catggctgttagatatagta

SEQ ID NO: 98819 - DNA, 20 bp, Artificial Sequence
  Description of Artificial Sequence: Synthetic oligonucleotide
  Target: LAMA2; (-) strand; PAM type: NRG; PAM sequence: AAG
acatggctgttagatatagt

SEQ ID NO: 98820 - DNA, 20 bp, Artificial Sequence
  Description of Artificial Sequence: Synthetic oligonucleotide
  Target: LAMA2; (-) strand; PAM type: NRG; PAM sequence: TAG
gcaaacatggctgttagata

SEQ ID NO: 98821 - DNA, 20 bp, Artificial Sequence
  Description of Artificial Sequence: Synthetic oligonucleotide
  Target: LAMA2; (-) strand; PAM type: NRG; PAM sequence: TAG
acagtggcaaacatggctgt

SEQ ID NO: 98822 - DNA, 20 bp, Artificial Sequence
  Description of Artificial Sequence: Synthetic oligonucleotide
  Target: LAMA2; (-) strand; PAM type: NRG; PAM sequence: TGG
gtgattcacagtggcaaaca

SEQ ID NO: 98823 - DNA, 20 bp, Artificial Sequence
  Description of Artificial Sequence: Synthetic oligonucleotide
  Target: LAMA2; (-) strand; PAM type: NRG; PAM sequence: TGG
aagaatggggtgattcacag

SEQ ID NO: 98824 - DNA, 20 bp, Artificial Sequence
  Description of Artificial Sequence: Synthetic oligonucleotide
  Target: LAMA2; (-) strand; PAM type: NRG; PAM sequence: CAG
aagaagaatggggtgattca

SEQ ID NO: 98825 - DNA, 20 bp, Artificial Sequence
  Description of Artificial Sequence: Synthetic oligonucleotide
  Target: LAMA2; (-) strand; PAM type: NRG; PAM sequence: GGG
aaagggtttcaagaagaatg

SEQ ID NO: 98826 - DNA, 20 bp, Artificial Sequence
  Description of Artificial Sequence: Synthetic oligonucleotide
  Target: LAMA2; (-) strand; PAM type: NRG; PAM sequence: GGG
caaagggtttcaagaagaat

SEQ ID NO: 98827 - DNA, 20 bp, Artificial Sequence
  Description of Artificial Sequence: Synthetic oligonucleotide
  Target: LAMA2; (-) strand; PAM type: NRG; PAM sequence: TGG
gcaaagggtttcaagaagaa

SEQ ID NO: 98828 - DNA, 20 bp, Artificial Sequence
  Description of Artificial Sequence: Synthetic oligonucleotide
  Target: LAMA2; (-) strand; PAM type: NRG; PAM sequence: AAG
attgagcaaagggtttcaag

SEQ ID NO: 98829 - DNA, 20 bp, Artificial Sequence
  Description of Artificial Sequence: Synthetic oligonucleotide
  Target: LAMA2; (-) strand; PAM type: NRG; PAM sequence: AAG
caaattgagcaaagggtttc

SEQ ID NO: 98830 - DNA, 20 bp, Artificial Sequence
  Description of Artificial Sequence: Synthetic oligonucleotide
  Target: LAMA2; (-) strand; PAM type: NRG; PAM sequence: GGG
tggaaagcaaattgagcaaa

SEQ ID NO: 98831 - DNA, 20 bp, Artificial Sequence
  Description of Artificial Sequence: Synthetic oligonucleotide
  Target: LAMA2; (-) strand; PAM type: NRG; PAM sequence: AGG
ctggaaagcaaattgagcaa

SEQ ID NO: 98832 - DNA, 20 bp, Artificial Sequence
  Description of Artificial Sequence: Synthetic oligonucleotide
  Target: LAMA2; (-) strand; PAM type: NRG; PAM sequence: AAG
gctggaaagcaaattgagca

SEQ ID NO: 98833 - DNA, 20 bp, Artificial Sequence
  Description of Artificial Sequence: Synthetic oligonucleotide
  Target: LAMA2; (-) strand; PAM type: NRG; PAM sequence: GAG
catgggctggaaagcaaatt

SEQ ID NO: 98834 - DNA, 20 bp, Artificial Sequence
  Description of Artificial Sequence: Synthetic oligonucleotide
  Target: LAMA2; (-) strand; PAM type: NRG; PAM sequence: AAG
ccagaatgccatgggctgga

SEQ ID NO: 98835 - DNA, 20 bp, Artificial Sequence
  Description of Artificial Sequence: Synthetic oligonucleotide
  Target: LAMA2; (-) strand; PAM type: NRG; PAM sequence: TGG
atctccagaatgccatgggc

SEQ ID NO: 98836 - DNA, 20 bp, Artificial Sequence
  Description of Artificial Sequence: Synthetic oligonucleotide
  Target: LAMA2; (-) strand; PAM type: NRG; PAM sequence: GGG
gaacatctccagaatgccat

SEQ ID NO: 98837 - DNA, 20 bp, Artificial Sequence
  Description of Artificial Sequence: Synthetic oligonucleotide
  Target: LAMA2; (-) strand; PAM type: NRG; PAM sequence: TGG
tgaacatctccagaatgcca

SEQ ID NO: 98838 - DNA, 20 bp, Artificial Sequence
  Description of Artificial Sequence: Synthetic oligonucleotide
  Target: LAMA2; (-) strand; PAM type: NRG; PAM sequence: CAG
ctatggaatttgaacatctc

SEQ ID NO: 98839 - DNA, 20 bp, Artificial Sequence
  Description of Artificial Sequence: Synthetic oligonucleotide
  Target: LAMA2; (-) strand; PAM type: NRG; PAM sequence: TGG
aagctgagaaggagccacta

SEQ ID NO: 98840 - DNA, 20 bp, Artificial Sequence
  Description of Artificial Sequence: Synthetic oligonucleotide
  Target: LAMA2; (-) strand; PAM type: NRG; PAM sequence: GAG
taatgaagaaagctgagaag

SEQ ID NO: 98841 - DNA, 20 bp, Artificial Sequence
  Description of Artificial Sequence: Synthetic oligonucleotide
  Target: LAMA2; (-) strand; PAM type: NRG; PAM sequence: AGG
agtaatgaagaaagctgaga

SEQ ID NO: 98842 - DNA, 20 bp, Artificial Sequence
  Description of Artificial Sequence: Synthetic oligonucleotide
  Target: LAMA2; (-) strand; PAM type: NRG; PAM sequence: AAG
gagtaatgaagaaagctgag

SEQ ID NO: 98843 - DNA, 20 bp, Artificial Sequence
  Description of Artificial Sequence: Synthetic oligonucleotide
  Target: LAMA2; (-) strand; PAM type: NRG; PAM sequence: GAG
tcagagtaatgaagaaagct

SEQ ID NO: 98844 - DNA, 20 bp, Artificial Sequence
  Description of Artificial Sequence: Synthetic oligonucleotide
  Target: LAMA2; (-) strand; PAM type: NRG; PAM sequence: AAG
agatttcagagtaatgaaga

SEQ ID NO: 98845 - DNA, 20 bp, Artificial Sequence
  Description of Artificial Sequence: Synthetic oligonucleotide
  Target: LAMA2; (-) strand; PAM type: NRG; PAM sequence: AAG
atgtagatttcagagtaatg

SEQ ID NO: 98846 - DNA, 20 bp, Artificial Sequence
  Description of Artificial Sequence: Synthetic oligonucleotide
  Target: LAMA2; (-) strand; PAM type: NRG; PAM sequence: GAG
ataccactatgtagatttca

SEQ ID NO: 98847 - DNA, 20 bp, Artificial Sequence
  Description of Artificial Sequence: Synthetic oligonucleotide
  Target: LAMA2; (-) strand; PAM type: NRG; PAM sequence: CAG
gaataccactatgtagattt

SEQ ID NO: 98848 - DNA, 20 bp, Artificial Sequence
  Description of Artificial Sequence: Synthetic oligonucleotide
  Target: LAMA2; (-) strand; PAM type: NRG; PAM sequence: TAG
gtcccaggaataccactatg

SEQ ID NO: 98849 - DNA, 20 bp, Artificial Sequence
  Description of Artificial Sequence: Synthetic oligonucleotide
  Target: LAMA2; (-) strand; PAM type: NRG; PAM sequence: AGG
tgctccaaggattgagtccc

SEQ ID NO: 98850 - DNA, 20 bp, Artificial Sequence
  Description of Artificial Sequence: Synthetic oligonucleotide
  Target: LAMA2; (-) strand; PAM type: NRG; PAM sequence: CAG
ttgctccaaggattgagtcc

SEQ ID NO: 98851 - DNA, 20 bp, Artificial Sequence
  Description of Artificial Sequence: Synthetic oligonucleotide
  Target: LAMA2; (-) strand; PAM type: NRG; PAM sequence: GAG
aacaaattgctccaaggatt

SEQ ID NO: 98852 - DNA, 20 bp, Artificial Sequence
  Description of Artificial Sequence: Synthetic oligonucleotide
  Target: LAMA2; (-) strand; PAM type: NRG; PAM sequence: AGG
tagagaaacaaattgctcca

SEQ ID NO: 98853 - DNA, 20 bp, Artificial Sequence
  Description of Artificial Sequence: Synthetic oligonucleotide
  Target: LAMA2; (-) strand; PAM type: NRG; PAM sequence: AAG
ttagagaaacaaattgctcc

SEQ ID NO: 98854 - DNA, 20 bp, Artificial Sequence
  Description of Artificial Sequence: Synthetic oligonucleotide
  Target: LAMA2; (-) strand; PAM type: NRG; PAM sequence: GAG
catctgaatgaatgtagtta

SEQ ID NO: 98855 - DNA, 20 bp, Artificial Sequence
  Description of Artificial Sequence: Synthetic oligonucleotide
  Target: LAMA2; (-) strand; PAM type: NRG; PAM sequence: TAG
accatctgaatgaatgtagt

SEQ ID NO: 98856 - DNA, 20 bp, Artificial Sequence
  Description of Artificial Sequence: Synthetic oligonucleotide
  Target: LAMA2; (-) strand; PAM type: NRG; PAM sequence: TAG
gatcaccatctgaatgaatg

SEQ ID NO: 98857 - DNA, 20 bp, Artificial Sequence
  Description of Artificial Sequence: Synthetic oligonucleotide
  Target: LAMA2; (-) strand; PAM type: NRG; PAM sequence: AAG
agaaagccacatgcctgggt

SEQ ID NO: 98858 - DNA, 20 bp, Artificial Sequence
  Description of Artificial Sequence: Synthetic oligonucleotide
  Target: LAMA2; (-) strand; PAM type: NRG; PAM sequence: GGG
gtacagaaagccacatgcct

SEQ ID NO: 98859 - DNA, 20 bp, Artificial Sequence
  Description of Artificial Sequence: Synthetic oligonucleotide
  Target: LAMA2; (-) strand; PAM type: NRG; PAM sequence: TGG
agtacagaaagccacatgcc

SEQ ID NO: 98860 - DNA, 20 bp, Artificial Sequence
  Description of Artificial Sequence: Synthetic oligonucleotide
  Target: LAMA2; (-) strand; PAM type: NRG; PAM sequence: AAG
tcaaaatatctcagtacaga

SEQ ID NO: 98861 - DNA, 20 bp, Artificial Sequence
  Description of Artificial Sequence: Synthetic oligonucleotide
  Target: LAMA2; (-) strand; PAM type: NRG; PAM sequence: CAG
aatatcaaaatatctcagta

SEQ ID NO: 98862 - DNA, 20 bp, Artificial Sequence
  Description of Artificial Sequence: Synthetic oligonucleotide
  Target: LAMA2; (-) strand; PAM type: NRG; PAM sequence: CAG
atgtcaatatcaaaatatct

SEQ ID NO: 98863 - DNA, 20 bp, Artificial Sequence
  Description of Artificial Sequence: Synthetic oligonucleotide
  Target: LAMA2; (-) strand; PAM type: NRG; PAM sequence: GGG
aacttaatagtaaatactgt

SEQ ID NO: 98864 - DNA, 20 bp, Artificial Sequence
  Description of Artificial Sequence: Synthetic oligonucleotide
  Target: LAMA2; (-) strand; PAM type: NRG; PAM sequence: TGG
aaacttaatagtaaatactg

SEQ ID NO: 98865 - DNA, 20 bp, Artificial Sequence
  Description of Artificial Sequence: Synthetic oligonucleotide
  Target: LAMA2; (-) strand; PAM type: NRG; PAM sequence: TAG
aaattaaatcataaacttaa

SEQ ID NO: 98866 - DNA, 20 bp, Artificial Sequence
  Description of Artificial Sequence: Synthetic oligonucleotide
  Target: LAMA2; (-) strand; PAM type: NRG; PAM sequence: TGG
ccccacaccatagtaatgag

SEQ ID NO: 98867 - DNA, 20 bp, Artificial Sequence
  Description of Artificial Sequence: Synthetic oligonucleotide
  Target: LAMA2; (-) strand; PAM type: NRG; PAM sequence: GAG
cctccccacaccatagtaat

SEQ ID NO: 98868 - DNA, 20 bp, Artificial Sequence
  Description of Artificial Sequence: Synthetic oligonucleotide
  Target: LAMA2; (-) strand; PAM type: NRG; PAM sequence: TAG
aaaattacctccccacacca

SEQ ID NO: 98869 - DNA, 20 bp, Artificial Sequence
  Description of Artificial Sequence: Synthetic oligonucleotide
  Target: LAMA2; (-) strand; PAM type: NRG; PAM sequence: CAG
acagtggtaatacatatctg

SEQ ID NO: 98870 - DNA, 20 bp, Artificial Sequence
  Description of Artificial Sequence: Synthetic oligonucleotide
  Target: LAMA2; (-) strand; PAM type: NRG; PAM sequence: TGG
cagtaaatgtttctttacag

SEQ ID NO: 98871 - DNA, 20 bp, Artificial Sequence
  Description of Artificial Sequence: Synthetic oligonucleotide
  Target: LAMA2; (-) strand; PAM type: NRG; PAM sequence: CAG
aatcagtaaatgtttcttta

SEQ ID NO: 98872 - DNA, 20 bp, Artificial Sequence
  Description of Artificial Sequence: Synthetic oligonucleotide
  Target: LAMA2; (-) strand; PAM type: NRG; PAM sequence: CAG
ggggaaaaggaaatattaat

SEQ ID NO: 98873 - DNA, 20 bp, Artificial Sequence
  Description of Artificial Sequence: Synthetic oligonucleotide
  Target: LAMA2; (-) strand; PAM type: NRG; PAM sequence: AGG
aataatgtatcaaggggaaa

SEQ ID NO: 98874 - DNA, 20 bp, Artificial Sequence
  Description of Artificial Sequence: Synthetic oligonucleotide
  Target: LAMA2; (-) strand; PAM type: NRG; PAM sequence: AAG
caataatgtatcaaggggaa

SEQ ID NO: 98875 - DNA, 20 bp, Artificial Sequence
  Description of Artificial Sequence: Synthetic oligonucleotide
  Target: LAMA2; (-) strand; PAM type: NRG; PAM sequence: GGG
agatacaataatgtatcaag

SEQ ID NO: 98876 - DNA, 20 bp, Artificial Sequence
  Description of Artificial Sequence: Synthetic oligonucleotide
  Target: LAMA2; (-) strand; PAM type: NRG; PAM sequence: GGG
cagatacaataatgtatcaa

SEQ ID NO: 98877 - DNA, 20 bp, Artificial Sequence
  Description of Artificial Sequence: Synthetic oligonucleotide
  Target: LAMA2; (-) strand; PAM type: NRG; PAM sequence: AGG
tcagatacaataatgtatca

SEQ ID NO: 98878 - DNA, 20 bp, Artificial Sequence
  Description of Artificial Sequence: Synthetic oligonucleotide
  Target: LAMA2; (-) strand; PAM type: NRG; PAM sequence: AAG
ttcagatacaataatgtatc

SEQ ID NO: 98879 - DNA, 20 bp, Artificial Sequence
  Description of Artificial Sequence: Synthetic oligonucleotide
  Target: LAMA2; (-) strand; PAM type: NRG; PAM sequence: CAG
gaaataaatttgtgtatgtt

SEQ ID NO: 98880 - DNA, 20 bp, Artificial Sequence
  Description of Artificial Sequence: Synthetic oligonucleotide
  Target: LAMA2; (-) strand; PAM type: NRG; PAM sequence: TGG
tactgaaacatatcttaata

SEQ ID NO: 98881 - DNA, 20 bp, Artificial Sequence
  Description of Artificial Sequence: Synthetic oligonucleotide
  Target: LAMA2; (-) strand; PAM type: NRG; PAM sequence: TGG
aaaaggtaagtaaaacaaaa

SEQ ID NO: 98882 - DNA, 20 bp, Artificial Sequence
  Description of Artificial Sequence: Synthetic oligonucleotide
  Target: LAMA2; (-) strand; PAM type: NRG; PAM sequence: AAG
tgtaataagagctaaaaggt

SEQ ID NO: 98883 - DNA, 20 bp, Artificial Sequence
  Description of Artificial Sequence: Synthetic oligonucleotide
  Target: LAMA2; (-) strand; PAM type: NRG; PAM sequence: AGG
acattgtaataagagctaaa

SEQ ID NO: 98884 - DNA, 20 bp, Artificial Sequence
  Description of Artificial Sequence: Synthetic oligonucleotide
  Target: LAMA2; (-) strand; PAM type: NRG; PAM sequence: AAG
aacattgtaataagagctaa

SEQ ID NO: 98885 - DNA, 20 bp, Artificial Sequence
  Description of Artificial Sequence: Synthetic oligonucleotide
  Target: LAMA2; (-) strand; PAM type: NRG; PAM sequence: GAG
taagcagaacattgtaataa

SEQ ID NO: 98886 - DNA, 20 bp, Artificial Sequence
  Description of Artificial Sequence: Synthetic oligonucleotide
  Target: LAMA2; (-) strand; PAM type: NRG; PAM sequence: AAG
ggtaagcagaacattgtaat

SEQ ID NO: 98887 - DNA, 20 bp, Artificial Sequence
  Description of Artificial Sequence: Synthetic oligonucleotide
  Target: LAMA2; (-) strand; PAM type: NRG; PAM sequence: CAG
taacataaaatgaaggtaag

SEQ ID NO: 98888 - DNA, 20 bp, Artificial Sequence
  Description of Artificial Sequence: Synthetic oligonucleotide
  Target: LAMA2; (-) strand; PAM type: NRG; PAM sequence: AAG
tgttaacataaaatgaaggt

SEQ ID NO: 98889 - DNA, 20 bp, Artificial Sequence
  Description of Artificial Sequence: Synthetic oligonucleotide
  Target: LAMA2; (-) strand; PAM type: NRG; PAM sequence: AGG
gatatgttaacataaaatga

SEQ ID NO: 98890 - DNA, 20 bp, Artificial Sequence
  Description of Artificial Sequence: Synthetic oligonucleotide
  Target: LAMA2; (-) strand; PAM type: NRG; PAM sequence: AAG
agatatgttaacataaaatg

SEQ ID NO: 98891 - DNA, 20 bp, Artificial Sequence
  Description of Artificial Sequence: Synthetic oligonucleotide
  Target: LAMA2; (-) strand; PAM type: NRG; PAM sequence: CAG
aaataaaggaccttgcttta

SEQ ID NO: 98892 - DNA, 20 bp, Artificial Sequence
  Description of Artificial Sequence: Synthetic oligonucleotide
  Target: LAMA2; (-) strand; PAM type: NRG; PAM sequence: AGG
ttagaagagaagagaaataa

SEQ ID NO: 98893 - DNA, 20 bp, Artificial Sequence
  Description of Artificial Sequence: Synthetic oligonucleotide
  Target: LAMA2; (-) strand; PAM type: NRG; PAM sequence: AAG
attagaagagaagagaaata

SEQ ID NO: 98894 - DNA, 20 bp, Artificial Sequence
  Description of Artificial Sequence: Synthetic oligonucleotide
  Target: LAMA2; (-) strand; PAM type: NRG; PAM sequence: GAG
tctagttaattagaagagaa

SEQ ID NO: 98895 - DNA, 20 bp, Artificial Sequence
  Description of Artificial Sequence: Synthetic oligonucleotide
  Target: LAMA2; (-) strand; PAM type: NRG; PAM sequence: AAG
catctagttaattagaagag

SEQ ID NO: 98896 - DNA, 20 bp, Artificial Sequence
  Description of Artificial Sequence: Synthetic oligonucleotide
  Target: LAMA2; (-) strand; PAM type: NRG; PAM sequence: GAG
gagcatctagttaattagaa

SEQ ID NO: 98897 - DNA, 20 bp, Artificial Sequence
  Description of Artificial Sequence: Synthetic oligonucleotide
  Target: LAMA2; (-) strand; PAM type: NRG; PAM sequence: AAG
aagagcatctagttaattag

SEQ ID NO: 98898 - DNA, 20 bp, Artificial Sequence
  Description of Artificial Sequence: Synthetic oligonucleotide
  Target: LAMA2; (-) strand; PAM type: NRG; PAM sequence: TAG
tgtaagagcatctagttaat

SEQ ID NO: 98899 - DNA, 20 bp, Artificial Sequence
  Description of Artificial Sequence: Synthetic oligonucleotide
  Target: LAMA2; (-) strand; PAM type: NRG; PAM sequence: TAG
gaagaatatgtaagagcatc

SEQ ID NO: 98900 - DNA, 20 bp, Artificial Sequence
  Description of Artificial Sequence: Synthetic oligonucleotide
  Target: LAMA2; (-) strand; PAM type: NRG; PAM sequence: GAG
tcagctggaagaatatgtaa

SEQ ID NO: 98901 - DNA, 20 bp, Artificial Sequence
  Description of Artificial Sequence: Synthetic oligonucleotide
  Target: LAMA2; (-) strand; PAM type: NRG; PAM sequence: AAG
tgtcagctggaagaatatgt

SEQ ID NO: 98902 - DNA, 20 bp, Artificial Sequence
  Description of Artificial Sequence: Synthetic oligonucleotide
  Target: LAMA2; (-) strand; PAM type: NRG; PAM sequence: AAG
tgcataaaagtgtcagctgg

SEQ ID NO: 98903 - DNA, 20 bp, Artificial Sequence
  Description of Artificial Sequence: Synthetic oligonucleotide
  Target: LAMA2; (-) strand; PAM type: NRG; PAM sequence: TGG
tagtgcataaaagtgtcagc

SEQ ID NO: 98904 - DNA, 20 bp, Artificial Sequence
  Description of Artificial Sequence: Synthetic oligonucleotide
  Target: LAMA2; (-) strand; PAM type: NRG; PAM sequence: CAG
aaaatagtgcataaaagtgt

SEQ ID NO: 98905 - DNA, 20 bp, Artificial Sequence
  Description of Artificial Sequence: Synthetic oligonucleotide
  Target: LAMA2; (-) strand; PAM type: NRG; PAM sequence: AAG
gagattaaaatagtgcataa

SEQ ID NO: 98906 - DNA, 20 bp, Artificial Sequence
  Description of Artificial Sequence: Synthetic oligonucleotide
  Target: LAMA2; (-) strand; PAM type: NRG; PAM sequence: TAG
atttgtggaagagattaaaa

SEQ ID NO: 98907 - DNA, 20 bp, Artificial Sequence
  Description of Artificial Sequence: Synthetic oligonucleotide
  Target: LAMA2; (-) strand; PAM type: NRG; PAM sequence: GAG
tgtaattaaaatttgtggaa

SEQ ID NO: 98908 - DNA, 20 bp, Artificial Sequence
  Description of Artificial Sequence: Synthetic oligonucleotide
  Target: LAMA2; (-) strand; PAM type: NRG; PAM sequence: AAG
attgtaattaaaatttgtgg

SEQ ID NO: 98909 - DNA, 20 bp, Artificial Sequence
  Description of Artificial Sequence: Synthetic oligonucleotide
  Target: LAMA2; (-) strand; PAM type: NRG; PAM sequence: TGG
ttgattgtaattaaaatttg

SEQ ID NO: 98910 - DNA, 20 bp, Artificial Sequence
  Description of Artificial Sequence: Synthetic oligonucleotide
  Target: LAMA2; (-) strand; PAM type: NRG; PAM sequence: CAG
tttaattacaatcaaaattc

SEQ ID NO: 98911 - DNA, 20 bp, Artificial Sequence
  Description of Artificial Sequence: Synthetic oligonucleotide
  Target: LAMA2; (-) strand; PAM type: NRG; PAM sequence: AGG
tatagcaattctttacaaat

SEQ ID NO: 98912 - DNA, 20 bp, Artificial Sequence
  Description of Artificial Sequence: Synthetic oligonucleotide
  Target: LAMA2; (-) strand; PAM type: NRG; PAM sequence: TAG
atatagcaattctttacaaa

SEQ ID NO: 98913 - DNA, 20 bp, Artificial Sequence
  Description of Artificial Sequence: Synthetic oligonucleotide
  Target: LAMA2; (-) strand; PAM type: NRG; PAM sequence: TAG
aagagtgactagtgtaaata

SEQ ID NO: 98914 - DNA, 20 bp, Artificial Sequence
  Description of Artificial Sequence: Synthetic oligonucleotide
  Target: LAMA2; (-) strand; PAM type: NRG; PAM sequence: TAG
tctgaagagagaagagtgac

SEQ ID NO: 98915 - DNA, 20 bp, Artificial Sequence
  Description of Artificial Sequence: Synthetic oligonucleotide
  Target: LAMA2; (-) strand; PAM type: NRG; PAM sequence: GAG
taaaatatctgaagagagaa

SEQ ID NO: 98916 - DNA, 20 bp, Artificial Sequence
  Description of Artificial Sequence: Synthetic oligonucleotide
  Target: LAMA2; (-) strand; PAM type: NRG; PAM sequence: AAG
cataaaatatctgaagagag

SEQ ID NO: 98917 - DNA, 20 bp, Artificial Sequence
  Description of Artificial Sequence: Synthetic oligonucleotide
  Target: LAMA2; (-) strand; PAM type: NRG; PAM sequence: GAG
agacataaaatatctgaaga

SEQ ID NO: 98918 - DNA, 20 bp, Artificial Sequence
  Description of Artificial Sequence: Synthetic oligonucleotide
  Target: LAMA2; (-) strand; PAM type: NRG; PAM sequence: GAG
taagacataaaatatctgaa

SEQ ID NO: 98919 - DNA, 20 bp, Artificial Sequence
  Description of Artificial Sequence: Synthetic oligonucleotide
  Target: LAMA2; (-) strand; PAM type: NRG; PAM sequence: AAG
tgtaagacataaaatatctg

SEQ ID NO: 98920 - DNA, 20 bp, Artificial Sequence
  Description of Artificial Sequence: Synthetic oligonucleotide
  Target: LAMA2; (-) strand; PAM type: NRG; PAM sequence: AAG
accttaaaacagtttactgt

SEQ ID NO: 98921 - DNA, 20 bp, Artificial Sequence
  Description of Artificial Sequence: Synthetic oligonucleotide
  Target: LAMA2; (-) strand; PAM type: NRG; PAM sequence: CAG
tgatatagacaaccttaaaa

SEQ ID NO: 98922 - DNA, 20 bp, Artificial Sequence
  Description of Artificial Sequence: Synthetic oligonucleotide
  Target: LAMA2; (-) strand; PAM type: NRG; PAM sequence: TAG
tgagaaatgcgtgcttgata

SEQ ID NO: 98923 - DNA, 20 bp, Artificial Sequence
  Description of Artificial Sequence: Synthetic oligonucleotide
  Target: LAMA2; (-) strand; PAM type: NRG; PAM sequence: GAG
catagaaagaatttttatat

SEQ ID NO: 98924 - DNA, 20 bp, Artificial Sequence
  Description of Artificial Sequence: Synthetic oligonucleotide
  Target: LAMA2; (-) strand; PAM type: NRG; PAM sequence: AAG
gaaaatgtaagatacataga

SEQ ID NO: 98925 - DNA, 20 bp, Artificial Sequence
  Description of Artificial Sequence: Synthetic oligonucleotide
  Target: LAMA2; (-) strand; PAM type: NRG; PAM sequence: TAG
aaatgaaaatgtaagataca

SEQ ID NO: 98926 - DNA, 20 bp, Artificial Sequence
  Description of Artificial Sequence: Synthetic oligonucleotide
  Target: LAMA2; (-) strand; PAM type: NRG; PAM sequence: AAG
taccattaaaatgaaaatgt

SEQ ID NO: 98927 - DNA, 20 bp, Artificial Sequence
  Description of Artificial Sequence: Synthetic oligonucleotide
  Target: LAMA2; (-) strand; PAM type: NRG; PAM sequence: AGG
ttactatgttgaaacaaaac

SEQ ID NO: 98928 - DNA, 20 bp, Artificial Sequence
  Description of Artificial Sequence: Synthetic oligonucleotide
  Target: LAMA2; (-) strand; PAM type: NRG; PAM sequence: CAG
tttactatgttgaaacaaaa

SEQ ID NO: 98929 - DNA, 20 bp, Artificial Sequence
  Description of Artificial Sequence: Synthetic oligonucleotide
  Target: LAMA2; (-) strand; PAM type: NRG; PAM sequence: TAG
gtttaccaataatgaccagt

SEQ ID NO: 98930 - DNA, 20 bp, Artificial Sequence
  Description of Artificial Sequence: Synthetic oligonucleotide
  Target: LAMA2; (-) strand; PAM type: NRG; PAM sequence: CAG
taaggtttaccaataatgac

SEQ ID NO: 98931 - DNA, 20 bp, Artificial Sequence
  Description of Artificial Sequence: Synthetic oligonucleotide
  Target: LAMA2; (-) strand; PAM type: NRG; PAM sequence: AGG
aacacctattctaatagtta

SEQ ID NO: 98932 - DNA, 20 bp, Artificial Sequence
  Description of Artificial Sequence: Synthetic oligonucleotide
  Target: LAMA2; (-) strand; PAM type: NRG; PAM sequence: AAG
aaacacctattctaatagtt

SEQ ID NO: 98933 - DNA, 20 bp, Artificial Sequence
  Description of Artificial Sequence: Synthetic oligonucleotide
  Target: LAMA2; (-) strand; PAM type: NRG; PAM sequence: TAG
tgtaaaaacacctattctaa

SEQ ID NO: 98934 - DNA, 20 bp, Artificial Sequence
  Description of Artificial Sequence: Synthetic oligonucleotide
  Target: LAMA2; (-) strand; PAM type: NRG; PAM sequence: TGG
agaactaaaataaaagttat

SEQ ID NO: 98935 - DNA, 20 bp, Artificial Sequence
  Description of Artificial Sequence: Synthetic oligonucleotide
  Target: LAMA2; (-) strand; PAM type: NRG; PAM sequence: AAG
aacttctagaactaaaataa

SEQ ID NO: 98936 - DNA, 20 bp, Artificial Sequence
  Description of Artificial Sequence: Synthetic oligonucleotide
  Target: LAMA2; (-) strand; PAM type: NRG; PAM sequence: TAG
tgaatcaactgataaacttc

SEQ ID NO: 98937 - DNA, 20 bp, Artificial Sequence
  Description of Artificial Sequence: Synthetic oligonucleotide
  Target: LAMA2; (-) strand; PAM type: NRG; PAM sequence: TGG
aaaaaaaaaaaaaaaaaaaa

SEQ ID NO: 98938 - DNA, 20 bp, Artificial Sequence
  Description of Artificial Sequence: Synthetic oligonucleotide
  Target: LAMA2; (-) strand; PAM type: NRG; PAM sequence: AAG
tctagcctgggtgacagagc

SEQ ID NO: 98939 - DNA, 20 bp, Artificial Sequence
  Description of Artificial Sequence: Synthetic oligonucleotide
  Target: LAMA2; (-) strand; PAM type: NRG; PAM sequence: GAG
gccctctagcctgggtgaca

SEQ ID NO: 98940 - DNA, 20 bp, Artificial Sequence
  Description of Artificial Sequence: Synthetic oligonucleotide
  Target: LAMA2; (-) strand; PAM type: NRG; PAM sequence: CAG
ctgccctctagcctgggtga

SEQ ID NO: 98941 - DNA, 20 bp, Artificial Sequence
  Description of Artificial Sequence: Synthetic oligonucleotide
  Target: LAMA2; (-) strand; PAM type: NRG; PAM sequence: GGG
gcaccactgccctctagcct

SEQ ID NO: 98942 - DNA, 20 bp, Artificial Sequence
  Description of Artificial Sequence: Synthetic oligonucleotide
  Target: LAMA2; (-) strand; PAM type: NRG; PAM sequence: TGG
agcaccactgccctctagcc

SEQ ID NO: 98943 - DNA, 20 bp, Artificial Sequence
  Description of Artificial Sequence: Synthetic oligonucleotide
  Target: LAMA2; (-) strand; PAM type: NRG; PAM sequence: TAG
atgatagcaccactgccctc

SEQ ID NO: 98944 - DNA, 20 bp, Artificial Sequence
  Description of Artificial Sequence: Synthetic oligonucleotide
  Target: LAMA2; (-) strand; PAM type: NRG; PAM sequence: TAG
gaggttgcagtgagccatga

SEQ ID NO: 98945 - DNA, 20 bp, Artificial Sequence
  Description of Artificial Sequence: Synthetic oligonucleotide
  Target: LAMA2; (-) strand; PAM type: NRG; PAM sequence: GAG
tgggaggtggaggttgcagt

SEQ ID NO: 98946 - DNA, 20 bp, Artificial Sequence
  Description of Artificial Sequence: Synthetic oligonucleotide
  Target: LAMA2; (-) strand; PAM type: NRG; PAM sequence: CAG
aacctgggaggtggaggttg

SEQ ID NO: 98947 - DNA, 20 bp, Artificial Sequence
  Description of Artificial Sequence: Synthetic oligonucleotide
  Target: LAMA2; (-) strand; PAM type: NRG; PAM sequence: AGG
cgcttgaacctgggaggtgg

SEQ ID NO: 98948 - DNA, 20 bp, Artificial Sequence
  Description of Artificial Sequence: Synthetic oligonucleotide
  Target: LAMA2; (-) strand; PAM type: NRG; PAM sequence: GAG
tcgcttgaacctgggaggtg

SEQ ID NO: 98949 - DNA, 20 bp, Artificial Sequence
  Description of Artificial Sequence: Synthetic oligonucleotide
  Target: LAMA2; (-) strand; PAM type: NRG; PAM sequence: TGG
aatcgcttgaacctgggagg

SEQ ID NO: 98950 - DNA, 20 bp, Artificial Sequence
  Description of Artificial Sequence: Synthetic oligonucleotide
  Target: LAMA2; (-) strand; PAM type: NRG; PAM sequence: AGG
gaaaatcgcttgaacctggg

SEQ ID NO: 98951 - DNA, 20 bp, Artificial Sequence
  Description of Artificial Sequence: Synthetic oligonucleotide
  Target: LAMA2; (-) strand; PAM type: NRG; PAM sequence: GAG
ggaaaatcgcttgaacctgg

SEQ ID NO: 98952 - DNA, 20 bp, Artificial Sequence
  Description of Artificial Sequence: Synthetic oligonucleotide
  Target: LAMA2; (-) strand; PAM type: NRG; PAM sequence: GGG
caggaaaatcgcttgaacct

SEQ ID NO: 98953 - DNA, 20 bp, Artificial Sequence
  Description of Artificial Sequence: Synthetic oligonucleotide
  Target: LAMA2; (-) strand; PAM type: NRG; PAM sequence: TGG
gcaggaaaatcgcttgaacc

SEQ ID NO: 98954 - DNA, 20 bp, Artificial Sequence
  Description of Artificial Sequence: Synthetic oligonucleotide
  Target: LAMA2; (-) strand; PAM type: NRG; PAM sequence: AGG
gctactcaggaggctgaggc

SEQ ID NO: 98955 - DNA, 20 bp, Artificial Sequence
  Description of Artificial Sequence: Synthetic oligonucleotide
  Target: LAMA2; (-) strand; PAM type: NRG; PAM sequence: CAG
agctactcaggaggctgagg

SEQ ID NO: 98956 - DNA, 20 bp, Artificial Sequence
  Description of Artificial Sequence: Synthetic oligonucleotide
  Target: LAMA2; (-) strand; PAM type: NRG; PAM sequence: AGG
cccagctactcaggaggctg

SEQ ID NO: 98957 - DNA, 20 bp, Artificial Sequence
  Description of Artificial Sequence: Synthetic oligonucleotide
  Target: LAMA2; (-) strand; PAM type: NRG; PAM sequence: GAG
tcccagctactcaggaggct

SEQ ID NO: 98958 - DNA, 20 bp, Artificial Sequence
  Description of Artificial Sequence: Synthetic oligonucleotide
  Target: LAMA2; (-) strand; PAM type: NRG; PAM sequence: AGG
tgtaatcccagctactcagg

SEQ ID NO: 98959 - DNA, 20 bp, Artificial Sequence
  Description of Artificial Sequence: Synthetic oligonucleotide
  Target: LAMA2; (-) strand; PAM type: NRG; PAM sequence: GAG
ctgtaatcccagctactcag

SEQ ID NO: 98960 - DNA, 20 bp, Artificial Sequence
  Description of Artificial Sequence: Synthetic oligonucleotide
  Target: LAMA2; (-) strand; PAM type: NRG; PAM sequence: AGG
gcctgtaatcccagctactc

SEQ ID NO: 98961 - DNA, 20 bp, Artificial Sequence
  Description of Artificial Sequence: Synthetic oligonucleotide
  Target: LAMA2; (-) strand; PAM type: NRG; PAM sequence: CAG
tgcctgtaatcccagctact

SEQ ID NO: 98962 - DNA, 20 bp, Artificial Sequence
  Description of Artificial Sequence: Synthetic oligonucleotide
  Target: LAMA2; (-) strand; PAM type: NRG; PAM sequence: CAG
gtggcaggtgcctgtaatcc

SEQ ID NO: 98963 - DNA, 20 bp, Artificial Sequence
  Description of Artificial Sequence: Synthetic oligonucleotide
  Target: LAMA2; (-) strand; PAM type: NRG; PAM sequence: AGG
aattagccagttatggtggc

SEQ ID NO: 98964 - DNA, 20 bp, Artificial Sequence
  Description of Artificial Sequence: Synthetic oligonucleotide
  Target: LAMA2; (-) strand; PAM type: NRG; PAM sequence: CAG
aaattagccagttatggtgg

SEQ ID NO: 98965 - DNA, 20 bp, Artificial Sequence
  Description of Artificial Sequence: Synthetic oligonucleotide
  Target: LAMA2; (-) strand; PAM type: NRG; PAM sequence: TGG
caaaaattagccagttatgg

SEQ ID NO: 98966 - DNA, 20 bp, Artificial Sequence
  Description of Artificial Sequence: Synthetic oligonucleotide
  Target: LAMA2; (-) strand; PAM type: NRG; PAM sequence: TGG
atgcaaaaattagccagtta

SEQ ID NO: 98967 - DNA, 20 bp, Artificial Sequence
  Description of Artificial Sequence: Synthetic oligonucleotide
  Target: LAMA2; (-) strand; PAM type: NRG; PAM sequence: CAG
actaaaatgcaaaaattagc

SEQ ID NO: 98968 - DNA, 20 bp, Artificial Sequence
  Description of Artificial Sequence: Synthetic oligonucleotide
  Target: LAMA2; (-) strand; PAM type: NRG; PAM sequence: TAG
ctctactaaaatgcaaaaat

SEQ ID NO: 98969 - DNA, 20 bp, Artificial Sequence
  Description of Artificial Sequence: Synthetic oligonucleotide
  Target: LAMA2; (-) strand; PAM type: NRG; PAM sequence: TGG
tgaaatcagcctggctaaaa

SEQ ID NO: 98970 - DNA, 20 bp, Artificial Sequence
  Description of Artificial Sequence: Synthetic oligonucleotide
  Target: LAMA2; (-) strand; PAM type: NRG; PAM sequence: TGG
tcaggagtttgaaatcagcc

SEQ ID NO: 98971 - DNA, 20 bp, Artificial Sequence
  Description of Artificial Sequence: Synthetic oligonucleotide
  Target: LAMA2; (-) strand; PAM type: NRG; PAM sequence: CAG
tgaggtcaggagtttgaaat

SEQ ID NO: 98972 - DNA, 20 bp, Artificial Sequence
  Description of Artificial Sequence: Synthetic oligonucleotide
  Target: LAMA2; (-) strand; PAM type: NRG; PAM sequence: GAG
ggcagatcacttgaggtcag

SEQ ID NO: 98973 - DNA, 20 bp, Artificial Sequence
  Description of Artificial Sequence: Synthetic oligonucleotide
  Target: LAMA2; (-) strand; PAM type: NRG; PAM sequence: AGG
caggcagatcacttgaggtc

SEQ ID NO: 98974 - DNA, 20 bp, Artificial Sequence
  Description of Artificial Sequence: Synthetic oligonucleotide
  Target: LAMA2; (-) strand; PAM type: NRG; PAM sequence: CAG
gcaggcagatcacttgaggt

SEQ ID NO: 98975 - DNA, 20 bp, Artificial Sequence
  Description of Artificial Sequence: Synthetic oligonucleotide
  Target: LAMA2; (-) strand; PAM type: NRG; PAM sequence: AGG
cgaggcaggcagatcacttg

SEQ ID NO: 98976 - DNA, 20 bp, Artificial Sequence
  Description of Artificial Sequence: Synthetic oligonucleotide
  Target: LAMA2; (-) strand; PAM type: NRG; PAM sequence: GAG
ccgaggcaggcagatcactt

SEQ ID NO: 98977 - DNA, 20 bp, Artificial Sequence
  Description of Artificial Sequence: Synthetic oligonucleotide
  Target: LAMA2; (-) strand; PAM type: NRG; PAM sequence: CAG
ctttgggaggccgaggcagg

SEQ ID NO: 98978 - DNA, 20 bp, Artificial Sequence
  Description of Artificial Sequence: Synthetic oligonucleotide
  Target: LAMA2; (-) strand; PAM type: NRG; PAM sequence: AGG
gaactttgggaggccgaggc

SEQ ID NO: 98979 - DNA, 20 bp, Artificial Sequence
  Description of Artificial Sequence: Synthetic oligonucleotide
  Target: LAMA2; (-) strand; PAM type: NRG; PAM sequence: CAG
tgaactttgggaggccgagg

SEQ ID NO: 98980 - DNA, 20 bp, Artificial Sequence
  Description of Artificial Sequence: Synthetic oligonucleotide
  Target: LAMA2; (-) strand; PAM type: NRG; PAM sequence: AGG
ccctgaactttgggaggccg

SEQ ID NO: 98981 - DNA, 20 bp, Artificial Sequence
  Description of Artificial Sequence: Synthetic oligonucleotide
  Target: LAMA2; (-) strand; PAM type: NRG; PAM sequence: GAG
tccctgaactttgggaggcc

SEQ ID NO: 98982 - DNA, 20 bp, Artificial Sequence
  Description of Artificial Sequence: Synthetic oligonucleotide
  Target: LAMA2; (-) strand; PAM type: NRG; PAM sequence: AGG
tgtaatccctgaactttggg

SEQ ID NO: 98983 - DNA, 20 bp, Artificial Sequence
  Description of Artificial Sequence: Synthetic oligonucleotide
  Target: LAMA2; (-) strand; PAM type: NRG; PAM sequence: GAG
ctgtaatccctgaactttgg

SEQ ID NO: 98984 - DNA, 20 bp, Artificial Sequence
  Description of Artificial Sequence: Synthetic oligonucleotide
  Target: LAMA2; (-) strand; PAM type: NRG; PAM sequence: GGG
gcctgtaatccctgaacttt

SEQ ID NO: 98985 - DNA, 20 bp, Artificial Sequence
  Description of Artificial Sequence: Synthetic oligonucleotide
  Target: LAMA2; (-) strand; PAM type: NRG; PAM sequence: TGG
tgcctgtaatccctgaactt

SEQ ID NO: 98986 - DNA, 20 bp, Artificial Sequence
  Description of Artificial Sequence: Synthetic oligonucleotide
  Target: LAMA2; (-) strand; PAM type: NRG; PAM sequence: TGG
gtattataggccaggtttgg

SEQ ID NO: 98987 - DNA, 20 bp, Artificial Sequence
  Description of Artificial Sequence: Synthetic oligonucleotide
  Target: LAMA2; (-) strand; PAM type: NRG; PAM sequence: TGG
atagtattataggccaggtt

SEQ ID NO: 98988 - DNA, 20 bp, Artificial Sequence
  Description of Artificial Sequence: Synthetic oligonucleotide
  Target: LAMA2; (-) strand; PAM type: NRG; PAM sequence: AGG
aaataatagtattataggcc

SEQ ID NO: 98989 - DNA, 20 bp, Artificial Sequence
  Description of Artificial Sequence: Synthetic oligonucleotide
  Target: LAMA2; (-) strand; PAM type: NRG; PAM sequence: CAG
caaataatagtattataggc

SEQ ID NO: 98990 - DNA, 20 bp, Artificial Sequence
  Description of Artificial Sequence: Synthetic oligonucleotide
  Target: LAMA2; (-) strand; PAM type: NRG; PAM sequence: AGG
tttgcaaataatagtattat

SEQ ID NO: 98991 - DNA, 20 bp, Artificial Sequence
  Description of Artificial Sequence: Synthetic oligonucleotide
  Target: LAMA2; (-) strand; PAM type: NRG; PAM sequence: TAG
atttgcaaataatagtatta

SEQ ID NO: 98992 - DNA, 20 bp, Artificial Sequence
  Description of Artificial Sequence: Synthetic oligonucleotide
  Target: LAMA2; (-) strand; PAM type: NRG; PAM sequence: TAG
attataatatttgcaaataa

SEQ ID NO: 98993 - DNA, 20 bp, Artificial Sequence
  Description of Artificial Sequence: Synthetic oligonucleotide
  Target: LAMA2; (-) strand; PAM type: NRG; PAM sequence: AAG
atatagcttttgacaagtga

SEQ ID NO: 98994 - DNA, 20 bp, Artificial Sequence
  Description of Artificial Sequence: Synthetic oligonucleotide
  Target: LAMA2; (-) strand; PAM type: NRG; PAM sequence: AAG
taacagatatagcttttgac

SEQ ID NO: 98995 - DNA, 20 bp, Artificial Sequence
  Description of Artificial Sequence: Synthetic oligonucleotide
  Target: LAMA2; (-) strand; PAM type: NRG; PAM sequence: TAG
aattattattataacagata

SEQ ID NO: 98996 - DNA, 20 bp, Artificial Sequence
  Description of Artificial Sequence: Synthetic oligonucleotide
  Target: LAMA2; (-) strand; PAM type: NRG; PAM sequence: CAG
acatgaaattattattataa

SEQ ID NO: 98997 - DNA, 20 bp, Artificial Sequence
  Description of Artificial Sequence: Synthetic oligonucleotide
  Target: LAMA2; (-) strand; PAM type: NRG; PAM sequence: GAG
tagaaagcttattattttgg

SEQ ID NO: 98998 - DNA, 20 bp, Artificial Sequence
  Description of Artificial Sequence: Synthetic oligonucleotide
  Target: LAMA2; (-) strand; PAM type: NRG; PAM sequence: GGG
aatagaaagcttattatttt

SEQ ID NO: 98999 - DNA, 20 bp, Artificial Sequence
  Description of Artificial Sequence: Synthetic oligonucleotide
  Target: LAMA2; (-) strand; PAM type: NRG; PAM sequence: TGG
aaatagaaagcttattattt

SEQ ID NO: 99000 - DNA, 20 bp, Artificial Sequence
  Description of Artificial Sequence: Synthetic oligonucleotide
  Target: LAMA2; (-) strand; PAM type: NRG; PAM sequence: AAG
aaaatcagtaataaaataga

SEQ ID NO: 99001 - DNA, 20 bp, Artificial Sequence
  Description of Artificial Sequence: Synthetic oligonucleotide
  Target: LAMA2; (-) strand; PAM type: NRG; PAM sequence: TAG
tattaaaatcagtaataaaa

SEQ ID NO: 99002 - DNA, 20 bp, Artificial Sequence
  Description of Artificial Sequence: Synthetic oligonucleotide
  Target: LAMA2; (-) strand; PAM type: NRG; PAM sequence: CAG
taaggcaatcatattaaaat

SEQ ID NO: 99003 - DNA, 20 bp, Artificial Sequence
  Description of Artificial Sequence: Synthetic oligonucleotide
  Target: LAMA2; (-) strand; PAM type: NRG; PAM sequence: AGG
acttaatggtgaaagactta

SEQ ID NO: 99004 - DNA, 20 bp, Artificial Sequence
  Description of Artificial Sequence: Synthetic oligonucleotide
  Target: LAMA2; (-) strand; PAM type: NRG; PAM sequence: AAG
tacttaatggtgaaagactt

SEQ ID NO: 99005 - DNA, 20 bp, Artificial Sequence
  Description of Artificial Sequence: Synthetic oligonucleotide
  Target: LAMA2; (-) strand; PAM type: NRG; PAM sequence: AAG
agcatcatacttaatggtga

SEQ ID NO: 99006 - DNA, 20 bp, Artificial Sequence
  Description of Artificial Sequence: Synthetic oligonucleotide
  Target: LAMA2; (-) strand; PAM type: NRG; PAM sequence: TGG
accatcagcatcatacttaa

SEQ ID NO: 99007 - DNA, 20 bp, Artificial Sequence
  Description of Artificial Sequence: Synthetic oligonucleotide
  Target: LAMA2; (-) strand; PAM type: NRG; PAM sequence: CAG
gtttttcttatactaaccat

SEQ ID NO: 99008 - DNA, 20 bp, Artificial Sequence
  Description of Artificial Sequence: Synthetic oligonucleotide
  Target: LAMA2; (-) strand; PAM type: NRG; PAM sequence: AAG
agcagttttcgtaacatgac

SEQ ID NO: 99009 - DNA, 20 bp, Artificial Sequence
  Description of Artificial Sequence: Synthetic oligonucleotide
  Target: LAMA2; (-) strand; PAM type: NRG; PAM sequence: CAG
aagaagctaggaatagaaag

SEQ ID NO: 99010 - DNA, 20 bp, Artificial Sequence
  Description of Artificial Sequence: Synthetic oligonucleotide
  Target: LAMA2; (-) strand; PAM type: NRG; PAM sequence: AAG
tttaagaagctaggaataga

SEQ ID NO: 99011 - DNA, 20 bp, Artificial Sequence
  Description of Artificial Sequence: Synthetic oligonucleotide
  Target: LAMA2; (-) strand; PAM type: NRG; PAM sequence: TAG
tatctttaagaagctaggaa

SEQ ID NO: 99012 - DNA, 20 bp, Artificial Sequence
  Description of Artificial Sequence: Synthetic oligonucleotide
  Target: LAMA2; (-) strand; PAM type: NRG; PAM sequence: AGG
gaggatatctttaagaagct

SEQ ID NO: 99013 - DNA, 20 bp, Artificial Sequence
  Description of Artificial Sequence: Synthetic oligonucleotide
  Target: LAMA2; (-) strand; PAM type: NRG; PAM sequence: TAG
agaggatatctttaagaagc

SEQ ID NO: 99014 - DNA, 20 bp, Artificial Sequence
  Description of Artificial Sequence: Synthetic oligonucleotide
  Target: LAMA2; (-) strand; PAM type: NRG; PAM sequence: AAG
tgaaagaggatatctttaag

SEQ ID NO: 99015 - DNA, 20 bp, Artificial Sequence
  Description of Artificial Sequence: Synthetic oligonucleotide
  Target: LAMA2; (-) strand; PAM type: NRG; PAM sequence: AAG
gattgaaagaggatatcttt

SEQ ID NO: 99016 - DNA, 20 bp, Artificial Sequence
  Description of Artificial Sequence: Synthetic oligonucleotide
  Target: LAMA2; (-) strand; PAM type: NRG; PAM sequence: AGG
tatcttatcctgattgaaag

SEQ ID NO: 99017 - DNA, 20 bp, Artificial Sequence
  Description of Artificial Sequence: Synthetic oligonucleotide
  Target: LAMA2; (-) strand; PAM type: NRG; PAM sequence: GAG
atatcttatcctgattgaaa

SEQ ID NO: 99018 - DNA, 20 bp, Artificial Sequence
  Description of Artificial Sequence: Synthetic oligonucleotide
  Target: LAMA2; (-) strand; PAM type: NRG; PAM sequence: AAG
aaatatcttatcctgattga

SEQ ID NO: 99019 - DNA, 20 bp, Artificial Sequence
  Description of Artificial Sequence: Synthetic oligonucleotide
  Target: LAMA2; (-) strand; PAM type: NRG; PAM sequence: GAG
ctctccacaattaagcatat

SEQ ID NO: 99020 - DNA, 20 bp, Artificial Sequence
  Description of Artificial Sequence: Synthetic oligonucleotide
  Target: LAMA2; (-) strand; PAM type: NRG; PAM sequence: AAG
ccactccactctccacaatt

SEQ ID NO: 99021 - DNA, 20 bp, Artificial Sequence
  Description of Artificial Sequence: Synthetic oligonucleotide
  Target: LAMA2; (-) strand; PAM type: NRG; PAM sequence: AGG
atcatttatggttctgttta

SEQ ID NO: 99022 - DNA, 20 bp, Artificial Sequence
  Description of Artificial Sequence: Synthetic oligonucleotide
  Target: LAMA2; (-) strand; PAM type: NRG; PAM sequence: AAG
tatcatttatggttctgttt

SEQ ID NO: 99023 - DNA, 20 bp, Artificial Sequence
  Description of Artificial Sequence: Synthetic oligonucleotide
  Target: LAMA2; (-) strand; PAM type: NRG; PAM sequence: TGG
ttagtcaataatatcattta

SEQ ID NO: 99024 - DNA, 20 bp, Artificial Sequence
  Description of Artificial Sequence: Synthetic oligonucleotide
  Target: LAMA2; (-) strand; PAM type: NRG; PAM sequence: TAG
ctaatattaagttatttatt

SEQ ID NO: 99025 - DNA, 20 bp, Artificial Sequence
  Description of Artificial Sequence: Synthetic oligonucleotide
  Target: LAMA2; (-) strand; PAM type: NRG; PAM sequence: AAG
attcatggatggctaatatt

SEQ ID NO: 99026 - DNA, 20 bp, Artificial Sequence
  Description of Artificial Sequence: Synthetic oligonucleotide
  Target: LAMA2; (-) strand; PAM type: NRG; PAM sequence: TGG
ttatttctggaattcatgga

SEQ ID NO: 99027 - DNA, 20 bp, Artificial Sequence
  Description of Artificial Sequence: Synthetic oligonucleotide
  Target: LAMA2; (-) strand; PAM type: NRG; PAM sequence: TGG
gtaattatttctggaattca

SEQ ID NO: 99028 - DNA, 20 bp, Artificial Sequence
  Description of Artificial Sequence: Synthetic oligonucleotide
  Target: LAMA2; (-) strand; PAM type: NRG; PAM sequence: TGG
agcaagatagtaattatttc

SEQ ID NO: 99029 - DNA, 20 bp, Artificial Sequence
  Description of Artificial Sequence: Synthetic oligonucleotide
  Target: LAMA2; (-) strand; PAM type: NRG; PAM sequence: TAG
aatagcatactaaagcaaga

SEQ ID NO: 99030 - DNA, 20 bp, Artificial Sequence
  Description of Artificial Sequence: Synthetic oligonucleotide
  Target: LAMA2; (-) strand; PAM type: NRG; PAM sequence: AAG
aaaaaatagcatactaaagc

SEQ ID NO: 99031 - DNA, 20 bp, Artificial Sequence
  Description of Artificial Sequence: Synthetic oligonucleotide
  Target: LAMA2; (-) strand; PAM type: NRG; PAM sequence: AAG
gatgaaaaaatagcatacta

SEQ ID NO: 99032 - DNA, 20 bp, Artificial Sequence
  Description of Artificial Sequence: Synthetic oligonucleotide
  Target: LAMA2; (-) strand; PAM type: NRG; PAM sequence: TAG
gcaagcagttgatgaaaaaa

SEQ ID NO: 99033 - DNA, 20 bp, Artificial Sequence
  Description of Artificial Sequence: Synthetic oligonucleotide
  Target: LAMA2; (-) strand; PAM type: NRG; PAM sequence: CAG
tattgaatttgtcaggcaag

SEQ ID NO: 99034 - DNA, 20 bp, Artificial Sequence
  Description of Artificial Sequence: Synthetic oligonucleotide
  Target: LAMA2; (-) strand; PAM type: NRG; PAM sequence: AAG
gcctattgaatttgtcaggc

SEQ ID NO: 99035 - DNA, 20 bp, Artificial Sequence
  Description of Artificial Sequence: Synthetic oligonucleotide
  Target: LAMA2; (-) strand; PAM type: NRG; PAM sequence: AGG
aattgcctattgaatttgtc

SEQ ID NO: 99036 - DNA, 20 bp, Artificial Sequence
  Description of Artificial Sequence: Synthetic oligonucleotide
  Target: LAMA2; (-) strand; PAM type: NRG; PAM sequence: CAG
aaattgcctattgaatttgt

SEQ ID NO: 99037 - DNA, 20 bp, Artificial Sequence
  Description of Artificial Sequence: Synthetic oligonucleotide
  Target: LAMA2; (-) strand; PAM type: NRG; PAM sequence: TAG
ttcttgcttaagaatgtgta

SEQ ID NO: 99038 - DNA, 20 bp, Artificial Sequence
  Description of Artificial Sequence: Synthetic oligonucleotide
  Target: LAMA2; (-) strand; PAM type: NRG; PAM sequence: AAG
tatacatttaattcttgctt

SEQ ID NO: 99039 - DNA, 20 bp, Artificial Sequence
  Description of Artificial Sequence: Synthetic oligonucleotide
  Target: LAMA2; (-) strand; PAM type: NRG; PAM sequence: AAG
aatgccagtgaagattgcat

SEQ ID NO: 99040 - DNA, 20 bp, Artificial Sequence
  Description of Artificial Sequence: Synthetic oligonucleotide
  Target: LAMA2; (-) strand; PAM type: NRG; PAM sequence: AAG
ctgtgctaaaaatgccagtg

SEQ ID NO: 99041 - DNA, 20 bp, Artificial Sequence
  Description of Artificial Sequence: Synthetic oligonucleotide
  Target: LAMA2; (-) strand; PAM type: NRG; PAM sequence: CAG
tataactgtgctaaaaatgc

SEQ ID NO: 99042 - DNA, 20 bp, Artificial Sequence
  Description of Artificial Sequence: Synthetic oligonucleotide
  Target: LAMA2; (-) strand; PAM type: NRG; PAM sequence: AAG
gcttctaaattaatcatata

SEQ ID NO: 99043 - DNA, 20 bp, Artificial Sequence
  Description of Artificial Sequence: Synthetic oligonucleotide
  Target: LAMA2; (-) strand; PAM type: NRG; PAM sequence: CGG
aaaagaggacagtataaaga

SEQ ID NO: 99044 - DNA, 20 bp, Artificial Sequence
  Description of Artificial Sequence: Synthetic oligonucleotide
  Target: LAMA2; (-) strand; PAM type: NRG; PAM sequence: AAG
ggtcaaaagaggacagtata

SEQ ID NO: 99045 - DNA, 20 bp, Artificial Sequence
  Description of Artificial Sequence: Synthetic oligonucleotide
  Target: LAMA2; (-) strand; PAM type: NRG; PAM sequence: CAG
gtcaattggtcaaaagagga

SEQ ID NO: 99046 - DNA, 20 bp, Artificial Sequence
  Description of Artificial Sequence: Synthetic oligonucleotide
  Target: LAMA2; (-) strand; PAM type: NRG; PAM sequence: AGG
aatagtcaattggtcaaaag

SEQ ID NO: 99047 - DNA, 20 bp, Artificial Sequence
  Description of Artificial Sequence: Synthetic oligonucleotide
  Target: LAMA2; (-) strand; PAM type: NRG; PAM sequence: GAG
taatagtcaattggtcaaaa

SEQ ID NO: 99048 - DNA, 20 bp, Artificial Sequence
  Description of Artificial Sequence: Synthetic oligonucleotide
  Target: LAMA2; (-) strand; PAM type: NRG; PAM sequence: AAG
cataatagtcaattggtcaa

SEQ ID NO: 99049 - DNA, 20 bp, Artificial Sequence
  Description of Artificial Sequence: Synthetic oligonucleotide
  Target: LAMA2; (-) strand; PAM type: NRG; PAM sequence: TGG
aaatagtcataatagtcaat

SEQ ID NO: 99050 - DNA, 20 bp, Artificial Sequence
  Description of Artificial Sequence: Synthetic oligonucleotide
  Target: LAMA2; (-) strand; PAM type: NRG; PAM sequence: TAG
gagaacaaaaatagtcataa

SEQ ID NO: 99051 - DNA, 20 bp, Artificial Sequence
  Description of Artificial Sequence: Synthetic oligonucleotide
  Target: LAMA2; (-) strand; PAM type: NRG; PAM sequence: TAG
gaattcttagagaacaaaaa

SEQ ID NO: 99052 - DNA, 20 bp, Artificial Sequence
  Description of Artificial Sequence: Synthetic oligonucleotide
  Target: LAMA2; (-) strand; PAM type: NRG; PAM sequence: GAG
acatgcttttagaattctta

SEQ ID NO: 99053 - DNA, 20 bp, Artificial Sequence
  Description of Artificial Sequence: Synthetic oligonucleotide
  Target: LAMA2; (-) strand; PAM type: NRG; PAM sequence: TAG
agacatgcttttagaattct

SEQ ID NO: 99054 - DNA, 20 bp, Artificial Sequence
  Description of Artificial Sequence: Synthetic oligonucleotide
  Target: LAMA2; (-) strand; PAM type: NRG; PAM sequence: TAG
tcagaaaatagacatgcttt

SEQ ID NO: 99055 - DNA, 20 bp, Artificial Sequence
  Description of Artificial Sequence: Synthetic oligonucleotide
  Target: LAMA2; (-) strand; PAM type: NRG; PAM sequence: TAG
tctagggattcctcagaaaa

SEQ ID NO: 99056 - DNA, 20 bp, Artificial Sequence
  Description of Artificial Sequence: Synthetic oligonucleotide
  Target: LAMA2; (-) strand; PAM type: NRG; PAM sequence: CAG
tacttcatctagggattcct

SEQ ID NO: 99057 - DNA, 20 bp, Artificial Sequence
  Description of Artificial Sequence: Synthetic oligonucleotide
  Target: LAMA2; (-) strand; PAM type: NRG; PAM sequence: GGG
tttattttttacttcatcta

SEQ ID NO: 99058 - DNA, 20 bp, Artificial Sequence
  Description of Artificial Sequence: Synthetic oligonucleotide
  Target: LAMA2; (-) strand; PAM type: NRG; PAM sequence: AGG
atttattttttacttcatct

SEQ ID NO: 99059 - DNA, 20 bp, Artificial Sequence
  Description of Artificial Sequence: Synthetic oligonucleotide
  Target: LAMA2; (-) strand; PAM type: NRG; PAM sequence: TAG
tatttattttttacttcatc

SEQ ID NO: 99060 - DNA, 20 bp, Artificial Sequence
  Description of Artificial Sequence: Synthetic oligonucleotide
  Target: LAMA2; (-) strand; PAM type: NRG; PAM sequence: AAG
cagctgtgtttgtttaatgg

SEQ ID NO: 99061 - DNA, 20 bp, Artificial Sequence
  Description of Artificial Sequence: Synthetic oligonucleotide
  Target: LAMA2; (-) strand; PAM type: NRG; PAM sequence: TGG
taccagctgtgtttgtttaa

SEQ ID NO: 99062 - DNA, 20 bp, Artificial Sequence
  Description of Artificial Sequence: Synthetic oligonucleotide
  Target: LAMA2; (-) strand; PAM type: NRG; PAM sequence: CAG
tggagcataacggtttatac

SEQ ID NO: 99063 - DNA, 20 bp, Artificial Sequence
  Description of Artificial Sequence: Synthetic oligonucleotide
  Target: LAMA2; (-) strand; PAM type: NRG; PAM sequence: CGG
tataaaaatttggagcataa

SEQ ID NO: 99064 - DNA, 20 bp, Artificial Sequence
  Description of Artificial Sequence: Synthetic oligonucleotide
  Target: LAMA2; (-) strand; PAM type: NRG; PAM sequence: GAG
aaagaaaatataaaaatttg

SEQ ID NO: 99065 - DNA, 20 bp, Artificial Sequence
  Description of Artificial Sequence: Synthetic oligonucleotide
  Target: LAMA2; (-) strand; PAM type: NRG; PAM sequence: TGG
tgaaagaaaatataaaaatt

SEQ ID NO: 99066 - DNA, 20 bp, Artificial Sequence
  Description of Artificial Sequence: Synthetic oligonucleotide
  Target: LAMA2; (-) strand; PAM type: NRG; PAM sequence: AAG
aaaagttgtgagttccatga

SEQ ID NO: 99067 - DNA, 20 bp, Artificial Sequence
  Description of Artificial Sequence: Synthetic oligonucleotide
  Target: LAMA2; (-) strand; PAM type: NRG; PAM sequence: GAG
tgcctaaattcaaaagttgt

SEQ ID NO: 99068 - DNA, 20 bp, Artificial Sequence
  Description of Artificial Sequence: Synthetic oligonucleotide
  Target: LAMA2; (-) strand; PAM type: NRG; PAM sequence: AAG
acagagttgcctaaattcaa

SEQ ID NO: 99069 - DNA, 20 bp, Artificial Sequence
  Description of Artificial Sequence: Synthetic oligonucleotide
  Target: LAMA2; (-) strand; PAM type: NRG; PAM sequence: GAG
ggccatttcaaagatgaaca

SEQ ID NO: 99070 - DNA, 20 bp, Artificial Sequence
  Description of Artificial Sequence: Synthetic oligonucleotide
  Target: LAMA2; (-) strand; PAM type: NRG; PAM sequence: CAG
gaggccatttcaaagatgaa

SEQ ID NO: 99071 - DNA, 20 bp, Artificial Sequence
  Description of Artificial Sequence: Synthetic oligonucleotide
  Target: LAMA2; (-) strand; PAM type: NRG; PAM sequence: AAG
tgcctcatgaggccatttca

SEQ ID NO: 99072 - DNA, 20 bp, Artificial Sequence
  Description of Artificial Sequence: Synthetic oligonucleotide
  Target: LAMA2; (-) strand; PAM type: NRG; PAM sequence: AGG
tatttcttatttgcctcatg

SEQ ID NO: 99073 - DNA, 20 bp, Artificial Sequence
  Description of Artificial Sequence: Synthetic oligonucleotide
  Target: LAMA2; (-) strand; PAM type: NRG; PAM sequence: GAG
ctatttcttatttgcctcat

SEQ ID NO: 99074 - DNA, 20 bp, Artificial Sequence
  Description of Artificial Sequence: Synthetic oligonucleotide
  Target: LAMA2; (-) strand; PAM type: NRG; PAM sequence: CAG
ttactgtgtgggagtaataa

SEQ ID NO: 99075 - DNA, 20 bp, Artificial Sequence
  Description of Artificial Sequence: Synthetic oligonucleotide
  Target: LAMA2; (-) strand; PAM type: NRG; PAM sequence: GAG
tttcctcacttactgtgtgg

SEQ ID NO: 99076 - DNA, 20 bp, Artificial Sequence
  Description of Artificial Sequence: Synthetic oligonucleotide
  Target: LAMA2; (-) strand; PAM type: NRG; PAM sequence: GGG
agtttcctcacttactgtgt

SEQ ID NO: 99077 - DNA, 20 bp, Artificial Sequence
  Description of Artificial Sequence: Synthetic oligonucleotide
  Target: LAMA2; (-) strand; PAM type: NRG; PAM sequence: TGG
cagtttcctcacttactgtg

SEQ ID NO: 99078 - DNA, 20 bp, Artificial Sequence
  Description of Artificial Sequence: Synthetic oligonucleotide
  Target: LAMA2; (-) strand; PAM type: NRG; PAM sequence: CAG
aaagagaaatcagtatgctt

SEQ ID NO: 99079 - DNA, 20 bp, Artificial Sequence
  Description of Artificial Sequence: Synthetic oligonucleotide
  Target: LAMA2; (-) strand; PAM type: NRG; PAM sequence: CAG
attgcacataaaagagaaat

SEQ ID NO: 99080 - DNA, 20 bp, Artificial Sequence
  Description of Artificial Sequence: Synthetic oligonucleotide
  Target: LAMA2; (-) strand; PAM type: NRG; PAM sequence: GAG
gagccatattgcacataaaa

SEQ ID NO: 99081 - DNA, 20 bp, Artificial Sequence
  Description of Artificial Sequence: Synthetic oligonucleotide
  Target: LAMA2; (-) strand; PAM type: NRG; PAM sequence: AAG
gagagccatattgcacataa

SEQ ID NO: 99082 - DNA, 20 bp, Artificial Sequence
  Description of Artificial Sequence: Synthetic oligonucleotide
  Target: LAMA2; (-) strand; PAM type: NRG; PAM sequence: GAG
tggatatgatatgaaactga

SEQ ID NO: 99083 - DNA, 20 bp, Artificial Sequence
  Description of Artificial Sequence: Synthetic oligonucleotide
  Target: LAMA2; (-) strand; PAM type: NRG; PAM sequence: GAG
aatggatatgatatgaaact

SEQ ID NO: 99084 - DNA, 20 bp, Artificial Sequence
  Description of Artificial Sequence: Synthetic oligonucleotide
  Target: LAMA2; (-) strand; PAM type: NRG; PAM sequence: TGG
gagggcattgcactgtataa

SEQ ID NO: 99085 - DNA, 20 bp, Artificial Sequence
  Description of Artificial Sequence: Synthetic oligonucleotide
  Target: LAMA2; (-) strand; PAM type: NRG; PAM sequence: GGG
tgccactataccaaggtaga

SEQ ID NO: 99086 - DNA, 20 bp, Artificial Sequence
  Description of Artificial Sequence: Synthetic oligonucleotide
  Target: LAMA2; (-) strand; PAM type: NRG; PAM sequence: AGG
ttgccactataccaaggtag

SEQ ID NO: 99087 - DNA, 20 bp, Artificial Sequence
  Description of Artificial Sequence: Synthetic oligonucleotide
  Target: LAMA2; (-) strand; PAM type: NRG; PAM sequence: GAG
cttgccactataccaaggta

SEQ ID NO: 99088 - DNA, 20 bp, Artificial Sequence
  Description of Artificial Sequence: Synthetic oligonucleotide
  Target: LAMA2; (-) strand; PAM type: NRG; PAM sequence: TAG
tgcttgccactataccaagg

SEQ ID NO: 99089 - DNA, 20 bp, Artificial Sequence
  Description of Artificial Sequence: Synthetic oligonucleotide
  Target: LAMA2; (-) strand; PAM type: NRG; PAM sequence: AGG
tcatgcttgccactatacca

SEQ ID NO: 99090 - DNA, 20 bp, Artificial Sequence
  Description of Artificial Sequence: Synthetic oligonucleotide
  Target: LAMA2; (-) strand; PAM type: NRG; PAM sequence: AAG
ttcatgcttgccactatacc

SEQ ID NO: 99091 - DNA, 20 bp, Artificial Sequence
  Description of Artificial Sequence: Synthetic oligonucleotide
  Target: LAMA2; (-) strand; PAM type: NRG; PAM sequence: GAG
atcaaggcactctgactgca

SEQ ID NO: 99092 - DNA, 20 bp, Artificial Sequence
  Description of Artificial Sequence: Synthetic oligonucleotide
  Target: LAMA2; (-) strand; PAM type: NRG; PAM sequence: CAG
gaatcaaggcactctgactg

SEQ ID NO: 99093 - DNA, 20 bp, Artificial Sequence
  Description of Artificial Sequence: Synthetic oligonucleotide
  Target: LAMA2; (-) strand; PAM type: NRG; PAM sequence: AGG
tgaagccaggatttgaatca

SEQ ID NO: 99094 - DNA, 20 bp, Artificial Sequence
  Description of Artificial Sequence: Synthetic oligonucleotide
  Target: LAMA2; (-) strand; PAM type: NRG; PAM sequence: AAG
gtgaagccaggatttgaatc

SEQ ID NO: 99095 - DNA, 20 bp, Artificial Sequence
  Description of Artificial Sequence: Synthetic oligonucleotide
  Target: LAMA2; (-) strand; PAM type: NRG; PAM sequence: AGG
taccagtaaggggtgaagcc

SEQ ID NO: 99096 - DNA, 20 bp, Artificial Sequence
  Description of Artificial Sequence: Synthetic oligonucleotide
  Target: LAMA2; (-) strand; PAM type: NRG; PAM sequence: CAG
ctaccagtaaggggtgaagc

SEQ ID NO: 99097 - DNA, 20 bp, Artificial Sequence
  Description of Artificial Sequence: Synthetic oligonucleotide
  Target: LAMA2; (-) strand; PAM type: NRG; PAM sequence: AAG
cacactaccagtaaggggtg

SEQ ID NO: 99098 - DNA, 20 bp, Artificial Sequence
  Description of Artificial Sequence: Synthetic oligonucleotide
  Target: LAMA2; (-) strand; PAM type: NRG; PAM sequence: GGG
aggctcacactaccagtaag

SEQ ID NO: 99099 - DNA, 20 bp, Artificial Sequence
  Description of Artificial Sequence: Synthetic oligonucleotide
  Target: LAMA2; (-) strand; PAM type: NRG; PAM sequence: GGG
taggctcacactaccagtaa

SEQ ID NO: 99100 - DNA, 20 bp, Artificial Sequence
  Description of Artificial Sequence: Synthetic oligonucleotide
  Target: LAMA2; (-) strand; PAM type: NRG; PAM sequence: AGG
gtaggctcacactaccagta

SEQ ID NO: 99101 - DNA, 20 bp, Artificial Sequence
  Description of Artificial Sequence: Synthetic oligonucleotide
  Target: LAMA2; (-) strand; PAM type: NRG; PAM sequence: AAG
agtaggctcacactaccagt

SEQ ID NO: 99102 - DNA, 20 bp, Artificial Sequence
  Description of Artificial Sequence: Synthetic oligonucleotide
  Target: LAMA2; (-) strand; PAM type: NRG; PAM sequence: CAG
attgagtaggctcacactac

SEQ ID NO: 99103 - DNA, 20 bp, Artificial Sequence
  Description of Artificial Sequence: Synthetic oligonucleotide
  Target: LAMA2; (-) strand; PAM type: NRG; PAM sequence: AGG
tcaggttaaataaattgagt

SEQ ID NO: 99104 - DNA, 20 bp, Artificial Sequence
  Description of Artificial Sequence: Synthetic oligonucleotide
  Target: LAMA2; (-) strand; PAM type: NRG; PAM sequence: TAG
ttcaggttaaataaattgag

SEQ ID NO: 99105 - DNA, 20 bp, Artificial Sequence
  Description of Artificial Sequence: Synthetic oligonucleotide
  Target: LAMA2; (-) strand; PAM type: NRG; PAM sequence: GAG
tcattcaggttaaataaatt

SEQ ID NO: 99106 - DNA, 20 bp, Artificial Sequence
  Description of Artificial Sequence: Synthetic oligonucleotide
  Target: LAMA2; (-) strand; PAM type: NRG; PAM sequence: AGG
aagaaactaagacctcattc

SEQ ID NO: 99107 - DNA, 20 bp, Artificial Sequence
  Description of Artificial Sequence: Synthetic oligonucleotide
  Target: LAMA2; (-) strand; PAM type: NRG; PAM sequence: CAG
gaagaaactaagacctcatt

SEQ ID NO: 99108 - DNA, 20 bp, Artificial Sequence
  Description of Artificial Sequence: Synthetic oligonucleotide
  Target: LAMA2; (-) strand; PAM type: NRG; PAM sequence: AAG
attatataaatgaagaaact

SEQ ID NO: 99109 - DNA, 20 bp, Artificial Sequence
  Description of Artificial Sequence: Synthetic oligonucleotide
  Target: LAMA2; (-) strand; PAM type: NRG; PAM sequence: AAG
ttgttttcattatataaatg

SEQ ID NO: 99110 - DNA, 20 bp, Artificial Sequence
  Description of Artificial Sequence: Synthetic oligonucleotide
  Target: LAMA2; (-) strand; PAM type: NRG; PAM sequence: TAG
ccttacaaaaactctgtgag

SEQ ID NO: 99111 - DNA, 20 bp, Artificial Sequence
  Description of Artificial Sequence: Synthetic oligonucleotide
  Target: LAMA2; (-) strand; PAM type: NRG; PAM sequence: GAG
aatccttacaaaaactctgt

SEQ ID NO: 99112 - DNA, 20 bp, Artificial Sequence
  Description of Artificial Sequence: Synthetic oligonucleotide
  Target: LAMA2; (-) strand; PAM type: NRG; PAM sequence: GAG
aatgttctaagccttttatt

SEQ ID NO: 99113 - DNA, 20 bp, Artificial Sequence
  Description of Artificial Sequence: Synthetic oligonucleotide
  Target: LAMA2; (-) strand; PAM type: NRG; PAM sequence: AAG
catgcactaagtaatgttct

SEQ ID NO: 99114 - DNA, 20 bp, Artificial Sequence
  Description of Artificial Sequence: Synthetic oligonucleotide
  Target: LAMA2; (-) strand; PAM type: NRG; PAM sequence: AAG
tatgaagcgtaccatgcact

SEQ ID NO: 99115 - DNA, 20 bp, Artificial Sequence
  Description of Artificial Sequence: Synthetic oligonucleotide
  Target: LAMA2; (-) strand; PAM type: NRG; PAM sequence: AAG
ttatcataattgcttttatg

SEQ ID NO: 99116 - DNA, 20 bp, Artificial Sequence
  Description of Artificial Sequence: Synthetic oligonucleotide
  Target: LAMA2; (-) strand; PAM type: NRG; PAM sequence: TGG
taaatggtagataatgtgta

SEQ ID NO: 99117 - DNA, 20 bp, Artificial Sequence
  Description of Artificial Sequence: Synthetic oligonucleotide
  Target: LAMA2; (-) strand; PAM type: NRG; PAM sequence: TAG
ggttcttcgactataaatgg

SEQ ID NO: 99118 - DNA, 20 bp, Artificial Sequence
  Description of Artificial Sequence: Synthetic oligonucleotide
  Target: LAMA2; (-) strand; PAM type: NRG; PAM sequence: TGG
attggttcttcgactataaa

SEQ ID NO: 99119 - DNA, 20 bp, Artificial Sequence
  Description of Artificial Sequence: Synthetic oligonucleotide
  Target: LAMA2; (-) strand; PAM type: NRG; PAM sequence: TGG
ttgattaattatcaactgat

SEQ ID NO: 99120 - DNA, 20 bp, Artificial Sequence
  Description of Artificial Sequence: Synthetic oligonucleotide
  Target: LAMA2; (-) strand; PAM type: NRG; PAM sequence: TAG
aagaaaatctagcatagcgc

SEQ ID NO: 99121 - DNA, 20 bp, Artificial Sequence
  Description of Artificial Sequence: Synthetic oligonucleotide
  Target: LAMA2; (-) strand; PAM type: NRG; PAM sequence: TAG
gacagtaagaaaatctagca

SEQ ID NO: 99122 - DNA, 20 bp, Artificial Sequence
  Description of Artificial Sequence: Synthetic oligonucleotide
  Target: LAMA2; (-) strand; PAM type: NRG; PAM sequence: TAG
actgagacagtaagaaaatc

SEQ ID NO: 99123 - DNA, 20 bp, Artificial Sequence
  Description of Artificial Sequence: Synthetic oligonucleotide
  Target: LAMA2; (-) strand; PAM type: NRG; PAM sequence: AAG
ccgaaatggactgagacagt

SEQ ID NO: 99124 - DNA, 20 bp, Artificial Sequence
  Description of Artificial Sequence: Synthetic oligonucleotide
  Target: LAMA2; (-) strand; PAM type: NRG; PAM sequence: CAG
acatccgaaatggactgaga

SEQ ID NO: 99125 - DNA, 20 bp, Artificial Sequence
  Description of Artificial Sequence: Synthetic oligonucleotide
  Target: LAMA2; (-) strand; PAM type: NRG; PAM sequence: GAG
tacaacatccgaaatggact

SEQ ID NO: 99126 - DNA, 20 bp, Artificial Sequence
  Description of Artificial Sequence: Synthetic oligonucleotide
  Target: LAMA2; (-) strand; PAM type: NRG; PAM sequence: TGG
ttttgttacaacatccgaaa

SEQ ID NO: 99127 - DNA, 20 bp, Artificial Sequence
  Description of Artificial Sequence: Synthetic oligonucleotide
  Target: LAMA2; (-) strand; PAM type: NRG; PAM sequence: CAG
tctgttatttataagctacc

SEQ ID NO: 99128 - DNA, 20 bp, Artificial Sequence
  Description of Artificial Sequence: Synthetic oligonucleotide
  Target: LAMA2; (-) strand; PAM type: NRG; PAM sequence: AAG
aataagtttctgttatttat

SEQ ID NO: 99129 - DNA, 20 bp, Artificial Sequence
  Description of Artificial Sequence: Synthetic oligonucleotide
  Target: LAMA2; (-) strand; PAM type: NRG; PAM sequence: AAG
ccttcagaactgtgggaaat

SEQ ID NO: 99130 - DNA, 20 bp, Artificial Sequence
  Description of Artificial Sequence: Synthetic oligonucleotide
  Target: LAMA2; (-) strand; PAM type: NRG; PAM sequence: GGG
ttcccagccttcagaactgt

SEQ ID NO: 99131 - DNA, 20 bp, Artificial Sequence
  Description of Artificial Sequence: Synthetic oligonucleotide
  Target: LAMA2; (-) strand; PAM type: NRG; PAM sequence: TGG
cttcccagccttcagaactg

SEQ ID NO: 99132 - DNA, 20 bp, Artificial Sequence
  Description of Artificial Sequence: Synthetic oligonucleotide
  Target: LAMA2; (-) strand; PAM type: NRG; PAM sequence: CAG
atcttggacttcccagcctt

SEQ ID NO: 99133 - DNA, 20 bp, Artificial Sequence
  Description of Artificial Sequence: Synthetic oligonucleotide
  Target: LAMA2; (-) strand; PAM type: NRG; PAM sequence: CAG
agacttgatcttggacttcc

SEQ ID NO: 99134 - DNA, 20 bp, Artificial Sequence
  Description of Artificial Sequence: Synthetic oligonucleotide
  Target: LAMA2; (-) strand; PAM type: NRG; PAM sequence: TGG
ctttgctggagacttgatct

SEQ ID NO: 99135 - DNA, 20 bp, Artificial Sequence
  Description of Artificial Sequence: Synthetic oligonucleotide
  Target: LAMA2; (-) strand; PAM type: NRG; PAM sequence: GAG
cccagacactgactttgctg

SEQ ID NO: 99136 - DNA, 20 bp, Artificial Sequence
  Description of Artificial Sequence: Synthetic oligonucleotide
  Target: LAMA2; (-) strand; PAM type: NRG; PAM sequence: TGG
tccccagacactgactttgc

SEQ ID NO: 99137 - DNA, 20 bp, Artificial Sequence
  Description of Artificial Sequence: Synthetic oligonucleotide
  Target: LAMA2; (-) strand; PAM type: NRG; PAM sequence: CAG
accaggaaagaagccttccc

SEQ ID NO: 99138 - DNA, 20 bp, Artificial Sequence
  Description of Artificial Sequence: Synthetic oligonucleotide
  Target: LAMA2; (-) strand; PAM type: NRG; PAM sequence: AAG
gtcagctatgaccaggaaag

SEQ ID NO: 99139 - DNA, 20 bp, Artificial Sequence
  Description of Artificial Sequence: Synthetic oligonucleotide
  Target: LAMA2; (-) strand; PAM type: NRG; PAM sequence: AAG
ggggtcagctatgaccagga

SEQ ID NO: 99140 - DNA, 20 bp, Artificial Sequence
  Description of Artificial Sequence: Synthetic oligonucleotide
  Target: LAMA2; (-) strand; PAM type: NRG; PAM sequence: AGG
agaaggggtcagctatgacc

SEQ ID NO: 99141 - DNA, 20 bp, Artificial Sequence
  Description of Artificial Sequence: Synthetic oligonucleotide
  Target: LAMA2; (-) strand; PAM type: NRG; PAM sequence: CAG
aagaaggggtcagctatgac

SEQ ID NO: 99142 - DNA, 20 bp, Artificial Sequence
  Description of Artificial Sequence: Synthetic oligonucleotide
  Target: LAMA2; (-) strand; PAM type: NRG; PAM sequence: CAG
aagacaaagaaagaaggggt

SEQ ID NO: 99143 - DNA, 20 bp, Artificial Sequence
  Description of Artificial Sequence: Synthetic oligonucleotide
  Target: LAMA2; (-) strand; PAM type: NRG; PAM sequence: GGG
cgtgaagacaaagaaagaag

SEQ ID NO: 99144 - DNA, 20 bp, Artificial Sequence
  Description of Artificial Sequence: Synthetic oligonucleotide
  Target: LAMA2; (-) strand; PAM type: NRG; PAM sequence: GGG
acgtgaagacaaagaaagaa

SEQ ID NO: 99145 - DNA, 20 bp, Artificial Sequence
  Description of Artificial Sequence: Synthetic oligonucleotide
  Target: LAMA2; (-) strand; PAM type: NRG; PAM sequence: AGG
cacgtgaagacaaagaaaga

SEQ ID NO: 99146 - DNA, 20 bp, Artificial Sequence
  Description of Artificial Sequence: Synthetic oligonucleotide
  Target: LAMA2; (-) strand; PAM type: NRG; PAM sequence: AAG
acacgtgaagacaaagaaag

SEQ ID NO: 99147 - DNA, 20 bp, Artificial Sequence
  Description of Artificial Sequence: Synthetic oligonucleotide
  Target: LAMA2; (-) strand; PAM type: NRG; PAM sequence: AAG
ccaacacgtgaagacaaaga

SEQ ID NO: 99148 - DNA, 20 bp, Artificial Sequence
  Description of Artificial Sequence: Synthetic oligonucleotide
  Target: LAMA2; (-) strand; PAM type: NRG; PAM sequence: AAG
ccttccaacacgtgaagaca

SEQ ID NO: 99149 - DNA, 20 bp, Artificial Sequence
  Description of Artificial Sequence: Synthetic oligonucleotide
  Target: LAMA2; (-) strand; PAM type: NRG; PAM sequence: AAG
ctagtgccttccaacacgtg

SEQ ID NO: 99150 - DNA, 20 bp, Artificial Sequence
  Description of Artificial Sequence: Synthetic oligonucleotide
  Target: LAMA2; (-) strand; PAM type: NRG; PAM sequence: TAG
agagaccccagagagctatc

SEQ ID NO: 99151 - DNA, 20 bp, Artificial Sequence
  Description of Artificial Sequence: Synthetic oligonucleotide
  Target: LAMA2; (-) strand; PAM type: NRG; PAM sequence: GAG
tttacaaaagagaccccaga

SEQ ID NO: 99152 - DNA, 20 bp, Artificial Sequence
  Description of Artificial Sequence: Synthetic oligonucleotide
  Target: LAMA2; (-) strand; PAM type: NRG; PAM sequence: GAG
cctttacaaaagagacccca

SEQ ID NO: 99153 - DNA, 20 bp, Artificial Sequence
  Description of Artificial Sequence: Synthetic oligonucleotide
  Target: LAMA2; (-) strand; PAM type: NRG; PAM sequence: CAG
ggcctttacaaaagagaccc

SEQ ID NO: 99154 - DNA, 20 bp, Artificial Sequence
  Description of Artificial Sequence: Synthetic oligonucleotide
  Target: LAMA2; (-) strand; PAM type: NRG; PAM sequence: GAG
ggattagggcctttacaaaa

SEQ ID NO: 99155 - DNA, 20 bp, Artificial Sequence
  Description of Artificial Sequence: Synthetic oligonucleotide
  Target: LAMA2; (-) strand; PAM type: NRG; PAM sequence: AAG
tgggattagggcctttacaa

SEQ ID NO: 99156 - DNA, 20 bp, Artificial Sequence
  Description of Artificial Sequence: Synthetic oligonucleotide
  Target: LAMA2; (-) strand; PAM type: NRG; PAM sequence: GGG
gagcctcatgagtgggatta

SEQ ID NO: 99157 - DNA, 20 bp, Artificial Sequence
  Description of Artificial Sequence: Synthetic oligonucleotide
  Target: LAMA2; (-) strand; PAM type: NRG; PAM sequence: AGG
ggagcctcatgagtgggatt

SEQ ID NO: 99158 - DNA, 20 bp, Artificial Sequence
  Description of Artificial Sequence: Synthetic oligonucleotide
  Target: LAMA2; (-) strand; PAM type: NRG; PAM sequence: TAG
tggagcctcatgagtgggat

SEQ ID NO: 99159 - DNA, 20 bp, Artificial Sequence
  Description of Artificial Sequence: Synthetic oligonucleotide
  Target: LAMA2; (-) strand; PAM type: NRG; PAM sequence: GGG
gaggctggagcctcatgagt

SEQ ID NO: 99160 - DNA, 20 bp, Artificial Sequence
  Description of Artificial Sequence: Synthetic oligonucleotide
  Target: LAMA2; (-) strand; PAM type: NRG; PAM sequence: TGG
tgaggctggagcctcatgag

SEQ ID NO: 99161 - DNA, 20 bp, Artificial Sequence
  Description of Artificial Sequence: Synthetic oligonucleotide
  Target: LAMA2; (-) strand; PAM type: NRG; PAM sequence: GAG
tcatgaggctggagcctcat

SEQ ID NO: 99162 - DNA, 20 bp, Artificial Sequence
  Description of Artificial Sequence: Synthetic oligonucleotide
  Target: LAMA2; (-) strand; PAM type: NRG; PAM sequence: GAG
gtgattacatcatgaggctg

SEQ ID NO: 99163 - DNA, 20 bp, Artificial Sequence
  Description of Artificial Sequence: Synthetic oligonucleotide
  Target: LAMA2; (-) strand; PAM type: NRG; PAM sequence: TGG
aggtgattacatcatgaggc

SEQ ID NO: 99164 - DNA, 20 bp, Artificial Sequence
  Description of Artificial Sequence: Synthetic oligonucleotide
  Target: LAMA2; (-) strand; PAM type: NRG; PAM sequence: AGG
tgggaggtgattacatcatg

SEQ ID NO: 99165 - DNA, 20 bp, Artificial Sequence
  Description of Artificial Sequence: Synthetic oligonucleotide
  Target: LAMA2; (-) strand; PAM type: NRG; PAM sequence: GAG
ttgggaggtgattacatcat

SEQ ID NO: 99166 - DNA, 20 bp, Artificial Sequence
  Description of Artificial Sequence: Synthetic oligonucleotide
  Target: LAMA2; (-) strand; PAM type: NRG; PAM sequence: AGG
taggagatggggcctttggg

SEQ ID NO: 99167 - DNA, 20 bp, Artificial Sequence
  Description of Artificial Sequence: Synthetic oligonucleotide
  Target: LAMA2; (-) strand; PAM type: NRG; PAM sequence: GAG
ataggagatggggcctttgg

SEQ ID NO: 99168 - DNA, 20 bp, Artificial Sequence
  Description of Artificial Sequence: Synthetic oligonucleotide
  Target: LAMA2; (-) strand; PAM type: NRG; PAM sequence: GGG
taataggagatggggccttt

SEQ ID NO: 99169 - DNA, 20 bp, Artificial Sequence
  Description of Artificial Sequence: Synthetic oligonucleotide
  Target: LAMA2; (-) strand; PAM type: NRG; PAM sequence: TGG
gtaataggagatggggcctt

SEQ ID NO: 99170 - DNA, 20 bp, Artificial Sequence
  Description of Artificial Sequence: Synthetic oligonucleotide
  Target: LAMA2; (-) strand; PAM type: NRG; PAM sequence: GGG
tgtgatagtaataggagatg

SEQ ID NO: 99171 - DNA, 20 bp, Artificial Sequence
  Description of Artificial Sequence: Synthetic oligonucleotide
  Target: LAMA2; (-) strand; PAM type: NRG; PAM sequence: GGG
gtgtgatagtaataggagat

SEQ ID NO: 99172 - DNA, 20 bp, Artificial Sequence
  Description of Artificial Sequence: Synthetic oligonucleotide
  Target: LAMA2; (-) strand; PAM type: NRG; PAM sequence: TGG
agtgtgatagtaataggaga

SEQ ID NO: 99173 - DNA, 20 bp, Artificial Sequence
  Description of Artificial Sequence: Synthetic oligonucleotide
  Target: LAMA2; (-) strand; PAM type: NRG; PAM sequence: GAG
tcccagtgtgatagtaatag

SEQ ID NO: 99174 - DNA, 20 bp, Artificial Sequence
  Description of Artificial Sequence: Synthetic oligonucleotide
  Target: LAMA2; (-) strand; PAM type: NRG; PAM sequence: AGG
tctcccagtgtgatagtaat

SEQ ID NO: 99175 - DNA, 20 bp, Artificial Sequence
  Description of Artificial Sequence: Synthetic oligonucleotide
  Target: LAMA2; (-) strand; PAM type: NRG; PAM sequence: TAG
gtctcccagtgtgatagtaa

SEQ ID NO: 99176 - DNA, 20 bp, Artificial Sequence
  Description of Artificial Sequence: Synthetic oligonucleotide
  Target: LAMA2; (-) strand; PAM type: NRG; PAM sequence: TAG
aatcctgtctcccagtgtga

SEQ ID NO: 99177 - DNA, 20 bp, Artificial Sequence
  Description of Artificial Sequence: Synthetic oligonucleotide
  Target: LAMA2; (-) strand; PAM type: NRG; PAM sequence: CAG
tatgttgaaatcctgtctcc

SEQ ID NO: 99178 - DNA, 20 bp, Artificial Sequence
  Description of Artificial Sequence: Synthetic oligonucleotide
  Target: LAMA2; (-) strand; PAM type: NRG; PAM sequence: TGG
ttgggggttaaggcttgcta

SEQ ID NO: 99179 - DNA, 20 bp, Artificial Sequence
  Description of Artificial Sequence: Synthetic oligonucleotide
  Target: LAMA2; (-) strand; PAM type: NRG; PAM sequence: AGG
tatcatcatgttgggggtta

SEQ ID NO: 99180 - DNA, 20 bp, Artificial Sequence
  Description of Artificial Sequence: Synthetic oligonucleotide
  Target: LAMA2; (-) strand; PAM type: NRG; PAM sequence: AAG
atatcatcatgttgggggtt

SEQ ID NO: 99181 - DNA, 20 bp, Artificial Sequence
  Description of Artificial Sequence: Synthetic oligonucleotide
  Target: LAMA2; (-) strand; PAM type: NRG; PAM sequence: GGG
tccaaatatcatcatgttgg

SEQ ID NO: 99182 - DNA, 20 bp, Artificial Sequence
  Description of Artificial Sequence: Synthetic oligonucleotide
  Target: LAMA2; (-) strand; PAM type: NRG; PAM sequence: GGG
ctccaaatatcatcatgttg

SEQ ID NO: 99183 - DNA, 20 bp, Artificial Sequence
  Description of Artificial Sequence: Synthetic oligonucleotide
  Target: LAMA2; (-) strand; PAM type: NRG; PAM sequence: GGG
tctccaaatatcatcatgtt

SEQ ID NO: 99184 - DNA, 20 bp, Artificial Sequence
  Description of Artificial Sequence: Synthetic oligonucleotide
  Target: LAMA2; (-) strand; PAM type: NRG; PAM sequence: TGG
atctccaaatatcatcatgt

SEQ ID NO: 99185 - DNA, 20 bp, Artificial Sequence
  Description of Artificial Sequence: Synthetic oligonucleotide
  Target: LAMA2; (-) strand; PAM type: NRG; PAM sequence: GAG
taaagaaaaacaagataagt

SEQ ID NO: 99186 - DNA, 20 bp, Artificial Sequence
  Description of Artificial Sequence: Synthetic oligonucleotide
  Target: LAMA2; (-) strand; PAM type: NRG; PAM sequence: AAG
aagataaagaaaaacaagat

SEQ ID NO: 99187 - DNA, 20 bp, Artificial Sequence
  Description of Artificial Sequence: Synthetic oligonucleotide
  Target: LAMA2; (-) strand; PAM type: NRG; PAM sequence: AAG
gtgtgaagataaagaaaaac

SEQ ID NO: 99188 - DNA, 20 bp, Artificial Sequence
  Description of Artificial Sequence: Synthetic oligonucleotide
  Target: LAMA2; (-) strand; PAM type: NRG; PAM sequence: AAG
cagggaaaggtgtgaagata

SEQ ID NO: 99189 - DNA, 20 bp, Artificial Sequence
  Description of Artificial Sequence: Synthetic oligonucleotide
  Target: LAMA2; (-) strand; PAM type: NRG; PAM sequence: AAG
tattttcagggaaaggtgtg

SEQ ID NO: 99190 - DNA, 20 bp, Artificial Sequence
  Description of Artificial Sequence: Synthetic oligonucleotide
  Target: LAMA2; (-) strand; PAM type: NRG; PAM sequence: AGG
cactttatattttcagggaa

SEQ ID NO: 99191 - DNA, 20 bp, Artificial Sequence
  Description of Artificial Sequence: Synthetic oligonucleotide
  Target: LAMA2; (-) strand; PAM type: NRG; PAM sequence: AAG
gcactttatattttcaggga

SEQ ID NO: 99192 - DNA, 20 bp, Artificial Sequence
  Description of Artificial Sequence: Synthetic oligonucleotide
  Target: LAMA2; (-) strand; PAM type: NRG; PAM sequence: GGG
ctatgcactttatattttca

SEQ ID NO: 99193 - DNA, 20 bp, Artificial Sequence
  Description of Artificial Sequence: Synthetic oligonucleotide
  Target: LAMA2; (-) strand; PAM type: NRG; PAM sequence: AGG
cctatgcactttatattttc

SEQ ID NO: 99194 - DNA, 20 bp, Artificial Sequence
  Description of Artificial Sequence: Synthetic oligonucleotide
  Target: LAMA2; (-) strand; PAM type: NRG; PAM sequence: CAG
tcctatgcactttatatttt

SEQ ID NO: 99195 - DNA, 20 bp, Artificial Sequence
  Description of Artificial Sequence: Synthetic oligonucleotide
  Target: LAMA2; (-) strand; PAM type: NRG; PAM sequence: CAG
ttagtctataaagctttcta

SEQ ID NO: 99196 - DNA, 20 bp, Artificial Sequence
  Description of Artificial Sequence: Synthetic oligonucleotide
  Target: LAMA2; (-) strand; PAM type: NRG; PAM sequence: AAG
tttaaaatatttagtctata

SEQ ID NO: 99197 - DNA, 20 bp, Artificial Sequence
  Description of Artificial Sequence: Synthetic oligonucleotide
  Target: LAMA2; (-) strand; PAM type: NRG; PAM sequence: TAG
ctgggtttctttaaaatatt

SEQ ID NO: 99198 - DNA, 20 bp, Artificial Sequence
  Description of Artificial Sequence: Synthetic oligonucleotide
  Target: LAMA2; (-) strand; PAM type: NRG; PAM sequence: GGG
gcatagttacaaggtgatct

SEQ ID NO: 99199 - DNA, 20 bp, Artificial Sequence
  Description of Artificial Sequence: Synthetic oligonucleotide
  Target: LAMA2; (-) strand; PAM type: NRG; PAM sequence: TGG
agcatagttacaaggtgatc

SEQ ID NO: 99200 - DNA, 20 bp, Artificial Sequence
  Description of Artificial Sequence: Synthetic oligonucleotide
  Target: LAMA2; (-) strand; PAM type: NRG; PAM sequence: AGG
tgatgaagagcatagttaca

SEQ ID NO: 99201 - DNA, 20 bp, Artificial Sequence
  Description of Artificial Sequence: Synthetic oligonucleotide
  Target: LAMA2; (-) strand; PAM type: NRG; PAM sequence: AAG
atgatgaagagcatagttac

SEQ ID NO: 99202 - DNA, 20 bp, Artificial Sequence
  Description of Artificial Sequence: Synthetic oligonucleotide
  Target: LAMA2; (-) strand; PAM type: NRG; PAM sequence: TAG
attaggtatgatgaagagca

SEQ ID NO: 99203 - DNA, 20 bp, Artificial Sequence
  Description of Artificial Sequence: Synthetic oligonucleotide
  Target: LAMA2; (-) strand; PAM type: NRG; PAM sequence: GAG
gtatcattaggtatgatgaa

SEQ ID NO: 99204 - DNA, 20 bp, Artificial Sequence
  Description of Artificial Sequence: Synthetic oligonucleotide
  Target: LAMA2; (-) strand; PAM type: NRG; PAM sequence: AAG
aagtatcattaggtatgatg

SEQ ID NO: 99205 - DNA, 20 bp, Artificial Sequence
  Description of Artificial Sequence: Synthetic oligonucleotide
  Target: LAMA2; (-) strand; PAM type: NRG; PAM sequence: AGG
attatcttgcaagtatcatt

SEQ ID NO: 99206 - DNA, 20 bp, Artificial Sequence
  Description of Artificial Sequence: Synthetic oligonucleotide
  Target: LAMA2; (-) strand; PAM type: NRG; PAM sequence: TAG
aattatcttgcaagtatcat

SEQ ID NO: 99207 - DNA, 20 bp, Artificial Sequence
  Description of Artificial Sequence: Synthetic oligonucleotide
  Target: LAMA2; (-) strand; PAM type: NRG; PAM sequence: AAG
tgaagcaacaattatcttgc

SEQ ID NO: 99208 - DNA, 20 bp, Artificial Sequence
  Description of Artificial Sequence: Synthetic oligonucleotide
  Target: LAMA2; (-) strand; PAM type: NRG; PAM sequence: AAG
atttattaatgcctaggatg

SEQ ID NO: 99209 - DNA, 20 bp, Artificial Sequence
  Description of Artificial Sequence: Synthetic oligonucleotide
  Target: LAMA2; (-) strand; PAM type: NRG; PAM sequence: AGG
tacaggatttattaatgcct

SEQ ID NO: 99210 - DNA, 20 bp, Artificial Sequence
  Description of Artificial Sequence: Synthetic oligonucleotide
  Target: LAMA2; (-) strand; PAM type: NRG; PAM sequence: TAG
gtacaggatttattaatgcc

SEQ ID NO: 99211 - DNA, 20 bp, Artificial Sequence
  Description of Artificial Sequence: Synthetic oligonucleotide
  Target: LAMA2; (-) strand; PAM type: NRG; PAM sequence: AGG
ataataacatgcctatgtac

SEQ ID NO: 99212 - DNA, 20 bp, Artificial Sequence
  Description of Artificial Sequence: Synthetic oligonucleotide
  Target: LAMA2; (-) strand; PAM type: NRG; PAM sequence: CAG
cataataacatgcctatgta

SEQ ID NO: 99213 - DNA, 20 bp, Artificial Sequence
  Description of Artificial Sequence: Synthetic oligonucleotide
  Target: LAMA2; (-) strand; PAM type: NRG; PAM sequence: GAG
tcttaaggagcaatgtcact

SEQ ID NO: 99214 - DNA, 20 bp, Artificial Sequence
  Description of Artificial Sequence: Synthetic oligonucleotide
  Target: LAMA2; (-) strand; PAM type: NRG; PAM sequence: GAG
aaaaaattttttttcttaag

SEQ ID NO: 99215 - DNA, 20 bp, Artificial Sequence
  Description of Artificial Sequence: Synthetic oligonucleotide
  Target: LAMA2; (-) strand; PAM type: NRG; PAM sequence: AGG
caaaaaaattttttttctta

SEQ ID NO: 99216 - DNA, 20 bp, Artificial Sequence
  Description of Artificial Sequence: Synthetic oligonucleotide
  Target: LAMA2; (-) strand; PAM type: NRG; PAM sequence: AAG
tcaaaaaaattttttttctt

SEQ ID NO: 99217 - DNA, 20 bp, Artificial Sequence
  Description of Artificial Sequence: Synthetic oligonucleotide
  Target: LAMA2; (-) strand; PAM type: NRG; PAM sequence: TAG
actcagtattacataggttt

SEQ ID NO: 99218 - DNA, 20 bp, Artificial Sequence
  Description of Artificial Sequence: Synthetic oligonucleotide
  Target: LAMA2; (-) strand; PAM type: NRG; PAM sequence: AGG
ccttggactcagtattacat

SEQ ID NO: 99219 - DNA, 20 bp, Artificial Sequence
  Description of Artificial Sequence: Synthetic oligonucleotide
  Target: LAMA2; (-) strand; PAM type: NRG; PAM sequence: TAG
cccttggactcagtattaca

SEQ ID NO: 99220 - DNA, 20 bp, Artificial Sequence
  Description of Artificial Sequence: Synthetic oligonucleotide
  Target: LAMA2; (-) strand; PAM type: NRG; PAM sequence: CAG
tcccgctatccccttggact

SEQ ID NO: 99221 - DNA, 20 bp, Artificial Sequence
  Description of Artificial Sequence: Synthetic oligonucleotide
  Target: LAMA2; (-) strand; PAM type: NRG; PAM sequence: TGG
cttacctcccgctatcccct

SEQ ID NO: 99222 - DNA, 20 bp, Artificial Sequence
  Description of Artificial Sequence: Synthetic oligonucleotide
  Target: LAMA2; (-) strand; PAM type: NRG; PAM sequence: TAG
gtgtgtgtactagttactgt

SEQ ID NO: 99223 - DNA, 20 bp, Artificial Sequence
  Description of Artificial Sequence: Synthetic oligonucleotide
  Target: LAMA2; (-) strand; PAM type: NRG; PAM sequence: TAG
tactacctatgtgtgtgtac

SEQ ID NO: 99224 - DNA, 20 bp, Artificial Sequence
  Description of Artificial Sequence: Synthetic oligonucleotide
  Target: LAMA2; (-) strand; PAM type: NRG; PAM sequence: TAG
aataatctgactacagggtg

SEQ ID NO: 99225 - DNA, 20 bp, Artificial Sequence
  Description of Artificial Sequence: Synthetic oligonucleotide
  Target: LAMA2; (-) strand; PAM type: NRG; PAM sequence: GGG
ggagaaataatctgactaca

SEQ ID NO: 99226 - DNA, 20 bp, Artificial Sequence
  Description of Artificial Sequence: Synthetic oligonucleotide
  Target: LAMA2; (-) strand; PAM type: NRG; PAM sequence: AGG
aggagaaataatctgactac

SEQ ID NO: 99227 - DNA, 20 bp, Artificial Sequence
  Description of Artificial Sequence: Synthetic oligonucleotide
  Target: LAMA2; (-) strand; PAM type: NRG; PAM sequence: CAG
taggagaaataatctgacta

SEQ ID NO: 99228 - DNA, 20 bp, Artificial Sequence
  Description of Artificial Sequence: Synthetic oligonucleotide
  Target: LAMA2; (-) strand; PAM type: NRG; PAM sequence: GAG
ccatgtgaaaaaaaaaatag

SEQ ID NO: 99229 - DNA, 20 bp, Artificial Sequence
  Description of Artificial Sequence: Synthetic oligonucleotide
  Target: LAMA2; (-) strand; PAM type: NRG; PAM sequence: AGG
tcccatgtgaaaaaaaaaat

SEQ ID NO: 99230 - DNA, 20 bp, Artificial Sequence
  Description of Artificial Sequence: Synthetic oligonucleotide
  Target: LAMA2; (-) strand; PAM type: NRG; PAM sequence: TAG
ttcccatgtgaaaaaaaaaa

SEQ ID NO: 99231 - DNA, 20 bp, Artificial Sequence
  Description of Artificial Sequence: Synthetic oligonucleotide
  Target: LAMA2; (-) strand; PAM type: NRG; PAM sequence: AAG
aaaagttgtttgagctagct

SEQ ID NO: 99232 - DNA, 20 bp, Artificial Sequence
  Description of Artificial Sequence: Synthetic oligonucleotide
  Target: LAMA2; (-) strand; PAM type: NRG; PAM sequence: TAG
ctttaaaaagttgtttgagc

SEQ ID NO: 99233 - DNA, 20 bp, Artificial Sequence
  Description of Artificial Sequence: Synthetic oligonucleotide
  Target: LAMA2; (-) strand; PAM type: NRG; PAM sequence: GAG
ttatctttaaaaagttgttt

SEQ ID NO: 99234 - DNA, 20 bp, Artificial Sequence
  Description of Artificial Sequence: Synthetic oligonucleotide
  Target: LAMA2; (-) strand; PAM type: NRG; PAM sequence: AAG
caaattattttatctttaaa

SEQ ID NO: 99235 - DNA, 20 bp, Artificial Sequence
  Description of Artificial Sequence: Synthetic oligonucleotide
  Target: LAMA2; (-) strand; PAM type: NRG; PAM sequence: GAG
ttaaaataagaattatgata

SEQ ID NO: 99236 - DNA, 20 bp, Artificial Sequence
  Description of Artificial Sequence: Synthetic oligonucleotide
  Target: LAMA2; (-) strand; PAM type: NRG; PAM sequence: TAG
ttttaaaataagaattatga

SEQ ID NO: 99237 - DNA, 20 bp, Artificial Sequence
  Description of Artificial Sequence: Synthetic oligonucleotide
  Target: LAMA2; (-) strand; PAM type: NRG; PAM sequence: AAG
tattattttctttttaaaat

SEQ ID NO: 99238 - DNA, 20 bp, Artificial Sequence
  Description of Artificial Sequence: Synthetic oligonucleotide
  Target: LAMA2; (-) strand; PAM type: NRG; PAM sequence: GAG
aacagcaatgatcagttata

SEQ ID NO: 99239 - DNA, 20 bp, Artificial Sequence
  Description of Artificial Sequence: Synthetic oligonucleotide
  Target: LAMA2; (-) strand; PAM type: NRG; PAM sequence: TAG
gcaacagcaatgatcagtta

SEQ ID NO: 99240 - DNA, 20 bp, Artificial Sequence
  Description of Artificial Sequence: Synthetic oligonucleotide
  Target: LAMA2; (-) strand; PAM type: NRG; PAM sequence: CAG
tttcaggcaacagcaatgat

SEQ ID NO: 99241 - DNA, 20 bp, Artificial Sequence
  Description of Artificial Sequence: Synthetic oligonucleotide
  Target: LAMA2; (-) strand; PAM type: NRG; PAM sequence: CAG
tggttaaatgtttcaggcaa

SEQ ID NO: 99242 - DNA, 20 bp, Artificial Sequence
  Description of Artificial Sequence: Synthetic oligonucleotide
  Target: LAMA2; (-) strand; PAM type: NRG; PAM sequence: AGG
ggtaattggttaaatgtttc

SEQ ID NO: 99243 - DNA, 20 bp, Artificial Sequence
  Description of Artificial Sequence: Synthetic oligonucleotide
  Target: LAMA2; (-) strand; PAM type: NRG; PAM sequence: CAG
aggtaattggttaaatgttt

SEQ ID NO: 99244 - DNA, 20 bp, Artificial Sequence
  Description of Artificial Sequence: Synthetic oligonucleotide
  Target: LAMA2; (-) strand; PAM type: NRG; PAM sequence: TGG
ttactgaagatagaggtaat

SEQ ID NO: 99245 - DNA, 20 bp, Artificial Sequence
  Description of Artificial Sequence: Synthetic oligonucleotide
  Target: LAMA2; (-) strand; PAM type: NRG; PAM sequence: AGG
tgtctatttactgaagatag

SEQ ID NO: 99246 - DNA, 20 bp, Artificial Sequence
  Description of Artificial Sequence: Synthetic oligonucleotide
  Target: LAMA2; (-) strand; PAM type: NRG; PAM sequence: GAG
ctgtctatttactgaagata

SEQ ID NO: 99247 - DNA, 20 bp, Artificial Sequence
  Description of Artificial Sequence: Synthetic oligonucleotide
  Target: LAMA2; (-) strand; PAM type: NRG; PAM sequence: TAG
atctgtctatttactgaaga

SEQ ID NO: 99248 - DNA, 20 bp, Artificial Sequence
  Description of Artificial Sequence: Synthetic oligonucleotide
  Target: LAMA2; (-) strand; PAM type: NRG; PAM sequence: AAG
acaaatctgtctatttactg

SEQ ID NO: 99249 - DNA, 20 bp, Artificial Sequence
  Description of Artificial Sequence: Synthetic oligonucleotide
  Target: LAMA2; (-) strand; PAM type: NRG; PAM sequence: TAG
aaacaaaaaatagtgaattc

SEQ ID NO: 99250 - DNA, 20 bp, Artificial Sequence
  Description of Artificial Sequence: Synthetic oligonucleotide
  Target: LAMA2; (-) strand; PAM type: NRG; PAM sequence: TAG
aaggtttacaaaacaaaaaa

SEQ ID NO: 99251 - DNA, 20 bp, Artificial Sequence
  Description of Artificial Sequence: Synthetic oligonucleotide
  Target: LAMA2; (-) strand; PAM type: NRG; PAM sequence: AGG
gttgttaggtagattaaata

SEQ ID NO: 99252 - DNA, 20 bp, Artificial Sequence
  Description of Artificial Sequence: Synthetic oligonucleotide
  Target: LAMA2; (-) strand; PAM type: NRG; PAM sequence: AAG
ggttgttaggtagattaaat

SEQ ID NO: 99253 - DNA, 20 bp, Artificial Sequence
  Description of Artificial Sequence: Synthetic oligonucleotide
  Target: LAMA2; (-) strand; PAM type: NRG; PAM sequence: TAG
attctggcaaggttgttagg

SEQ ID NO: 99254 - DNA, 20 bp, Artificial Sequence
  Description of Artificial Sequence: Synthetic oligonucleotide
  Target: LAMA2; (-) strand; PAM type: NRG; PAM sequence: AGG
tctattctggcaaggttgtt

SEQ ID NO: 99255 - DNA, 20 bp, Artificial Sequence
  Description of Artificial Sequence: Synthetic oligonucleotide
  Target: LAMA2; (-) strand; PAM type: NRG; PAM sequence: TAG
ctctattctggcaaggttgt

SEQ ID NO: 99256 - DNA, 20 bp, Artificial Sequence
  Description of Artificial Sequence: Synthetic oligonucleotide
  Target: LAMA2; (-) strand; PAM type: NRG; PAM sequence: AGG
taacaatctctattctggca

SEQ ID NO: 99257 - DNA, 20 bp, Artificial Sequence
  Description of Artificial Sequence: Synthetic oligonucleotide
  Target: LAMA2; (-) strand; PAM type: NRG; PAM sequence: AAG
ctaacaatctctattctggc

SEQ ID NO: 99258 - DNA, 20 bp, Artificial Sequence
  Description of Artificial Sequence: Synthetic oligonucleotide
  Target: LAMA2; (-) strand; PAM type: NRG; PAM sequence: TGG
aatgctaacaatctctattc

SEQ ID NO: 99259 - DNA, 20 bp, Artificial Sequence
  Description of Artificial Sequence: Synthetic oligonucleotide
  Target: LAMA2; (-) strand; PAM type: NRG; PAM sequence: TAG
tagcattaatttccagaact

SEQ ID NO: 99260 - DNA, 20 bp, Artificial Sequence
  Description of Artificial Sequence: Synthetic oligonucleotide
  Target: LAMA2; (-) strand; PAM type: NRG; PAM sequence: CAG
attttcttagcattaatttc

SEQ ID NO: 99261 - DNA, 20 bp, Artificial Sequence
  Description of Artificial Sequence: Synthetic oligonucleotide
  Target: LAMA2; (-) strand; PAM type: NRG; PAM sequence: TAG
ataggttgcttacattttct

SEQ ID NO: 99262 - DNA, 20 bp, Artificial Sequence
  Description of Artificial Sequence: Synthetic oligonucleotide
  Target: LAMA2; (-) strand; PAM type: NRG; PAM sequence: AGG
ctttttgttcaaggctttat

SEQ ID NO: 99263 - DNA, 20 bp, Artificial Sequence
  Description of Artificial Sequence: Synthetic oligonucleotide
  Target: LAMA2; (-) strand; PAM type: NRG; PAM sequence: TAG
actttttgttcaaggcttta

SEQ ID NO: 99264 - DNA, 20 bp, Artificial Sequence
  Description of Artificial Sequence: Synthetic oligonucleotide
  Target: LAMA2; (-) strand; PAM type: NRG; PAM sequence: AGG
cttctaatactttttgttca

SEQ ID NO: 99265 - DNA, 20 bp, Artificial Sequence
  Description of Artificial Sequence: Synthetic oligonucleotide
  Target: LAMA2; (-) strand; PAM type: NRG; PAM sequence: AAG
gcttctaatactttttgttc

SEQ ID NO: 99266 - DNA, 20 bp, Artificial Sequence
  Description of Artificial Sequence: Synthetic oligonucleotide
  Target: LAMA2; (-) strand; PAM type: NRG; PAM sequence: TGG
ctggagaacgcagtttgtgg

SEQ ID NO: 99267 - DNA, 20 bp, Artificial Sequence
  Description of Artificial Sequence: Synthetic oligonucleotide
  Target: LAMA2; (-) strand; PAM type: NRG; PAM sequence: TGG
cgtctggagaacgcagtttg

SEQ ID NO: 99268 - DNA, 20 bp, Artificial Sequence
  Description of Artificial Sequence: Synthetic oligonucleotide
  Target: LAMA2; (-) strand; PAM type: NRG; PAM sequence: CAG
ctcttgccgtctggagaacg

SEQ ID NO: 99269 - DNA, 20 bp, Artificial Sequence
  Description of Artificial Sequence: Synthetic oligonucleotide
  Target: LAMA2; (-) strand; PAM type: NRG; PAM sequence: GAG
ttacactctcttgccgtctg

SEQ ID NO: 99270 - DNA, 20 bp, Artificial Sequence
  Description of Artificial Sequence: Synthetic oligonucleotide
  Target: LAMA2; (-) strand; PAM type: NRG; PAM sequence: TGG
gtttacactctcttgccgtc

SEQ ID NO: 99271 - DNA, 20 bp, Artificial Sequence
  Description of Artificial Sequence: Synthetic oligonucleotide
  Target: LAMA2; (-) strand; PAM type: NRG; PAM sequence: GAG
aaactcatttaatcagcaga

SEQ ID NO: 99272 - DNA, 20 bp, Artificial Sequence
  Description of Artificial Sequence: Synthetic oligonucleotide
  Target: LAMA2; (-) strand; PAM type: NRG; PAM sequence: GAG
tcaaactcatttaatcagca

SEQ ID NO: 99273 - DNA, 20 bp, Artificial Sequence
  Description of Artificial Sequence: Synthetic oligonucleotide
  Target: LAMA2; (-) strand; PAM type: NRG; PAM sequence: CAG
aatcaaactcatttaatcag

SEQ ID NO: 99274 - DNA, 20 bp, Artificial Sequence
  Description of Artificial Sequence: Synthetic oligonucleotide
  Target: LAMA2; (-) strand; PAM type: NRG; PAM sequence: CAG
taaaatcaaactcatttaat

SEQ ID NO: 99275 - DNA, 20 bp, Artificial Sequence
  Description of Artificial Sequence: Synthetic oligonucleotide
  Target: LAMA2; (-) strand; PAM type: NRG; PAM sequence: GAG
ctctaagatataattcactt

SEQ ID NO: 99276 - DNA, 20 bp, Artificial Sequence
  Description of Artificial Sequence: Synthetic oligonucleotide
  Target: LAMA2; (-) strand; PAM type: NRG; PAM sequence: AAG
gcagattctgtcccgactct

SEQ ID NO: 99277 - DNA, 20 bp, Artificial Sequence
  Description of Artificial Sequence: Synthetic oligonucleotide
  Target: LAMA2; (-) strand; PAM type: NRG; PAM sequence: CAG
atgacccctagtcacttttg

SEQ ID NO: 99278 - DNA, 20 bp, Artificial Sequence
  Description of Artificial Sequence: Synthetic oligonucleotide
  Target: LAMA2; (-) strand; PAM type: NRG; PAM sequence: TAG
tgttttccatacatgacccc

SEQ ID NO: 99279 - DNA, 20 bp, Artificial Sequence
  Description of Artificial Sequence: Synthetic oligonucleotide
  Target: LAMA2; (-) strand; PAM type: NRG; PAM sequence: AAG
ttatgttctcacaatttctc

SEQ ID NO: 99280 - DNA, 20 bp, Artificial Sequence
  Description of Artificial Sequence: Synthetic oligonucleotide
  Target: LAMA2; (-) strand; PAM type: NRG; PAM sequence: AAG
tttcctttataaaacctgga

SEQ ID NO: 99281 - DNA, 20 bp, Artificial Sequence
  Description of Artificial Sequence: Synthetic oligonucleotide
  Target: LAMA2; (-) strand; PAM type: NRG; PAM sequence: TGG
ttattttcctttataaaacc

SEQ ID NO: 99282 - DNA, 20 bp, Artificial Sequence
  Description of Artificial Sequence: Synthetic oligonucleotide
  Target: LAMA2; (-) strand; PAM type: NRG; PAM sequence: CAG
gtttcactggagatgacaat

SEQ ID NO: 99283 - DNA, 20 bp, Artificial Sequence
  Description of Artificial Sequence: Synthetic oligonucleotide
  Target: LAMA2; (-) strand; PAM type: NRG; PAM sequence: GAG
gcaatacttaagtttcactg

SEQ ID NO: 99284 - DNA, 20 bp, Artificial Sequence
  Description of Artificial Sequence: Synthetic oligonucleotide
  Target: LAMA2; (-) strand; PAM type: NRG; PAM sequence: TGG
aagcaatacttaagtttcac

SEQ ID NO: 99285 - DNA, 20 bp, Artificial Sequence
  Description of Artificial Sequence: Synthetic oligonucleotide
  Target: LAMA2; (-) strand; PAM type: NRG; PAM sequence: AAG
ttgttaagtaagcaatactt

SEQ ID NO: 99286 - DNA, 20 bp, Artificial Sequence
  Description of Artificial Sequence: Synthetic oligonucleotide
  Target: LAMA2; (-) strand; PAM type: NRG; PAM sequence: AAG
ttgacagatatttgttaagt

SEQ ID NO: 99287 - DNA, 20 bp, Artificial Sequence
  Description of Artificial Sequence: Synthetic oligonucleotide
  Target: LAMA2; (-) strand; PAM type: NRG; PAM sequence: AAG
acagttgacagatatttgtt

SEQ ID NO: 99288 - DNA, 20 bp, Artificial Sequence
  Description of Artificial Sequence: Synthetic oligonucleotide
  Target: LAMA2; (-) strand; PAM type: NRG; PAM sequence: CAG
tttattttttccacagttga

SEQ ID NO: 99289 - DNA, 20 bp, Artificial Sequence
  Description of Artificial Sequence: Synthetic oligonucleotide
  Target: LAMA2; (-) strand; PAM type: NRG; PAM sequence: CAG
agcactgtttattttttcca

SEQ ID NO: 99290 - DNA, 20 bp, Artificial Sequence
  Description of Artificial Sequence: Synthetic oligonucleotide
  Target: LAMA2; (-) strand; PAM type: NRG; PAM sequence: GAG
aacctattctgattcctaat

SEQ ID NO: 99291 - DNA, 20 bp, Artificial Sequence
  Description of Artificial Sequence: Synthetic oligonucleotide
  Target: LAMA2; (-) strand; PAM type: NRG; PAM sequence: AAG
atgagccattgcctctgaca

SEQ ID NO: 99292 - DNA, 20 bp, Artificial Sequence
  Description of Artificial Sequence: Synthetic oligonucleotide
  Target: LAMA2; (-) strand; PAM type: NRG; PAM sequence: GAG
agtgctaggattacaggcat

SEQ ID NO: 99293 - DNA, 20 bp, Artificial Sequence
  Description of Artificial Sequence: Synthetic oligonucleotide
  Target: LAMA2; (-) strand; PAM type: NRG; PAM sequence: AGG
tccaaaagtgctaggattac

SEQ ID NO: 99294 - DNA, 20 bp, Artificial Sequence
  Description of Artificial Sequence: Synthetic oligonucleotide
  Target: LAMA2; (-) strand; PAM type: NRG; PAM sequence: CAG
ctccaaaagtgctaggatta

SEQ ID NO: 99295 - DNA, 20 bp, Artificial Sequence
  Description of Artificial Sequence: Synthetic oligonucleotide
  Target: LAMA2; (-) strand; PAM type: NRG; PAM sequence: AGG
tcttggcctccaaaagtgct

SEQ ID NO: 99296 - DNA, 20 bp, Artificial Sequence
  Description of Artificial Sequence: Synthetic oligonucleotide
  Target: LAMA2; (-) strand; PAM type: NRG; PAM sequence: TAG
ctcttggcctccaaaagtgc

SEQ ID NO: 99297 - DNA, 20 bp, Artificial Sequence
  Description of Artificial Sequence: Synthetic oligonucleotide
  Target: LAMA2; (-) strand; PAM type: NRG; PAM sequence: AAG
cctccgctcttggcctccaa

SEQ ID NO: 99298 - DNA, 20 bp, Artificial Sequence
  Description of Artificial Sequence: Synthetic oligonucleotide
  Target: LAMA2; (-) strand; PAM type: NRG; PAM sequence: TGG
actcctggatcctccgctct

SEQ ID NO: 99299 - DNA, 20 bp, Artificial Sequence
  Description of Artificial Sequence: Synthetic oligonucleotide
  Target: LAMA2; (-) strand; PAM type: NRG; PAM sequence: TGG
ccatgctggtctcgaactcc

SEQ ID NO: 99300 - DNA, 20 bp, Artificial Sequence
  Description of Artificial Sequence: Synthetic oligonucleotide
  Target: LAMA2; (-) strand; PAM type: NRG; PAM sequence: TGG
agggcctttgttgaccatgc

SEQ ID NO: 99301 - DNA, 20 bp, Artificial Sequence
  Description of Artificial Sequence: Synthetic oligonucleotide
  Target: LAMA2; (-) strand; PAM type: NRG; PAM sequence: GGG
tttaattttttgtagacaca

SEQ ID NO: 99302 - DNA, 20 bp, Artificial Sequence
  Description of Artificial Sequence: Synthetic oligonucleotide
  Target: LAMA2; (-) strand; PAM type: NRG; PAM sequence: AGG
ttttaattttttgtagacac

SEQ ID NO: 99303 - DNA, 20 bp, Artificial Sequence
  Description of Artificial Sequence: Synthetic oligonucleotide
  Target: LAMA2; (-) strand; PAM type: NRG; PAM sequence: CAG
tttttaattttttgtagaca

SEQ ID NO: 99304 - DNA, 20 bp, Artificial Sequence
  Description of Artificial Sequence: Synthetic oligonucleotide
  Target: LAMA2; (-) strand; PAM type: NRG; PAM sequence: TAG
ttttaatttttaattttttg

SEQ ID NO: 99305 - DNA, 20 bp, Artificial Sequence
  Description of Artificial Sequence: Synthetic oligonucleotide
  Target: LAMA2; (-) strand; PAM type: NRG; PAM sequence: TAG
tatacagtaaacctagcact

SEQ ID NO: 99306 - DNA, 20 bp, Artificial Sequence
  Description of Artificial Sequence: Synthetic oligonucleotide
  Target: LAMA2; (-) strand; PAM type: NRG; PAM sequence: TAG
tattatatatacagtaaacc

SEQ ID NO: 99307 - DNA, 20 bp, Artificial Sequence
  Description of Artificial Sequence: Synthetic oligonucleotide
  Target: LAMA2; (-) strand; PAM type: NRG; PAM sequence: CAG
gttttcagatattatatata

SEQ ID NO: 99308 - DNA, 20 bp, Artificial Sequence
  Description of Artificial Sequence: Synthetic oligonucleotide
  Target: LAMA2; (-) strand; PAM type: NRG; PAM sequence: CAG
gatttagaaaactaggtttt

SEQ ID NO: 99309 - DNA, 20 bp, Artificial Sequence
  Description of Artificial Sequence: Synthetic oligonucleotide
  Target: LAMA2; (-) strand; PAM type: NRG; PAM sequence: AGG
ttactgggatttagaaaact

SEQ ID NO: 99310 - DNA, 20 bp, Artificial Sequence
  Description of Artificial Sequence: Synthetic oligonucleotide
  Target: LAMA2; (-) strand; PAM type: NRG; PAM sequence: TAG
tttactgggatttagaaaac

SEQ ID NO: 99311 - DNA, 20 bp, Artificial Sequence
  Description of Artificial Sequence: Synthetic oligonucleotide
  Target: LAMA2; (-) strand; PAM type: NRG; PAM sequence: TAG
cttgatattttactgggatt

SEQ ID NO: 99312 - DNA, 20 bp, Artificial Sequence
  Description of Artificial Sequence: Synthetic oligonucleotide
  Target: LAMA2; (-) strand; PAM type: NRG; PAM sequence: GGG
gataaacttgatattttact

SEQ ID NO: 99313 - DNA, 20 bp, Artificial Sequence
  Description of Artificial Sequence: Synthetic oligonucleotide
  Target: LAMA2; (-) strand; PAM type: NRG; PAM sequence: TGG
tgataaacttgatattttac

SEQ ID NO: 99314 - DNA, 20 bp, Artificial Sequence
  Description of Artificial Sequence: Synthetic oligonucleotide
  Target: LAMA2; (-) strand; PAM type: NRG; PAM sequence: GAG
tattattttttgctgaattt

SEQ ID NO: 99315 - DNA, 20 bp, Artificial Sequence
  Description of Artificial Sequence: Synthetic oligonucleotide
  Target: LAMA2; (-) strand; PAM type: NRG; PAM sequence: CAG
cagttttggacacataatag

SEQ ID NO: 99316 - DNA, 20 bp, Artificial Sequence
  Description of Artificial Sequence: Synthetic oligonucleotide
  Target: LAMA2; (-) strand; PAM type: NRG; PAM sequence: TAG
acacagttttggacacataa

SEQ ID NO: 99317 - DNA, 20 bp, Artificial Sequence
  Description of Artificial Sequence: Synthetic oligonucleotide
  Target: LAMA2; (-) strand; PAM type: NRG; PAM sequence: TGG
tcctggtacatacacagttt

SEQ ID NO: 99318 - DNA, 20 bp, Artificial Sequence
  Description of Artificial Sequence: Synthetic oligonucleotide
  Target: LAMA2; (-) strand; PAM type: NRG; PAM sequence: CAG
ttttggtcctggtacataca

SEQ ID NO: 99319 - DNA, 20 bp, Artificial Sequence
  Description of Artificial Sequence: Synthetic oligonucleotide
  Target: LAMA2; (-) strand; PAM type: NRG; PAM sequence: TGG
acagtgacctgttttggtcc

SEQ ID NO: 99320 - DNA, 20 bp, Artificial Sequence
  Description of Artificial Sequence: Synthetic oligonucleotide
  Target: LAMA2; (-) strand; PAM type: NRG; PAM sequence: TGG
ctctgtacagtgacctgttt

SEQ ID NO: 99321 - DNA, 20 bp, Artificial Sequence
  Description of Artificial Sequence: Synthetic oligonucleotide
  Target: LAMA2; (-) strand; PAM type: NRG; PAM sequence: CAG
taaatgagaaaatctctgta

SEQ ID NO: 99322 - DNA, 20 bp, Artificial Sequence
  Description of Artificial Sequence: Synthetic oligonucleotide
  Target: LAMA2; (-) strand; PAM type: NRG; PAM sequence: GAG
agtttattgtaacaataaat

SEQ ID NO: 99323 - DNA, 20 bp, Artificial Sequence
  Description of Artificial Sequence: Synthetic oligonucleotide
  Target: LAMA2; (-) strand; PAM type: NRG; PAM sequence: AAG
aataatcttgtctatctcat

SEQ ID NO: 99324 - DNA, 20 bp, Artificial Sequence
  Description of Artificial Sequence: Synthetic oligonucleotide
  Target: LAMA2; (-) strand; PAM type: NRG; PAM sequence: AAG
cagttcatcaacaataaaag

SEQ ID NO: 99325 - DNA, 20 bp, Artificial Sequence
  Description of Artificial Sequence: Synthetic oligonucleotide
  Target: LAMA2; (-) strand; PAM type: NRG; PAM sequence: AAG
catcagttcatcaacaataa

SEQ ID NO: 99326 - DNA, 20 bp, Artificial Sequence
  Description of Artificial Sequence: Synthetic oligonucleotide
  Target: LAMA2; (-) strand; PAM type: NRG; PAM sequence: CAG
ttatttaatttctctagcat

SEQ ID NO: 99327 - DNA, 20 bp, Artificial Sequence
  Description of Artificial Sequence: Synthetic oligonucleotide
  Target: LAMA2; (-) strand; PAM type: NRG; PAM sequence: TAG
agcaagttatttaatttctc

SEQ ID NO: 99328 - DNA, 20 bp, Artificial Sequence
  Description of Artificial Sequence: Synthetic oligonucleotide
  Target: LAMA2; (-) strand; PAM type: NRG; PAM sequence: AAG
tgctgttttatgacttaagc

SEQ ID NO: 99329 - DNA, 20 bp, Artificial Sequence
  Description of Artificial Sequence: Synthetic oligonucleotide
  Target: LAMA2; (-) strand; PAM type: NRG; PAM sequence: AAG
cctctgctgttttatgactt

SEQ ID NO: 99330 - DNA, 20 bp, Artificial Sequence
  Description of Artificial Sequence: Synthetic oligonucleotide
  Target: LAMA2; (-) strand; PAM type: NRG; PAM sequence: TGG
cagcatttgaaacatggata

SEQ ID NO: 99331 - DNA, 20 bp, Artificial Sequence
  Description of Artificial Sequence: Synthetic oligonucleotide
  Target: LAMA2; (-) strand; PAM type: NRG; PAM sequence: TGG
acaaaccagcatttgaaaca

SEQ ID NO: 99332 - DNA, 20 bp, Artificial Sequence
  Description of Artificial Sequence: Synthetic oligonucleotide
  Target: LAMA2; (-) strand; PAM type: NRG; PAM sequence: CAG
aaacatctatttaaacaaac

SEQ ID NO: 99333 - DNA, 20 bp, Artificial Sequence
  Description of Artificial Sequence: Synthetic oligonucleotide
  Target: LAMA2; (-) strand; PAM type: NRG; PAM sequence: TAG
tgcacaaggatactatgaaa

SEQ ID NO: 99334 - DNA, 20 bp, Artificial Sequence
  Description of Artificial Sequence: Synthetic oligonucleotide
  Target: LAMA2; (-) strand; PAM type: NRG; PAM sequence: AGG
tattttcaatcttgtgcaca

SEQ ID NO: 99335 - DNA, 20 bp, Artificial Sequence
  Description of Artificial Sequence: Synthetic oligonucleotide
  Target: LAMA2; (-) strand; PAM type: NRG; PAM sequence: AAG
atattttcaatcttgtgcac

SEQ ID NO: 99336 - DNA, 20 bp, Artificial Sequence
  Description of Artificial Sequence: Synthetic oligonucleotide
  Target: LAMA2; (-) strand; PAM type: NRG; PAM sequence: TGG
cctatcagctggctaacatc

SEQ ID NO: 99337 - DNA, 20 bp, Artificial Sequence
  Description of Artificial Sequence: Synthetic oligonucleotide
  Target: LAMA2; (-) strand; PAM type: NRG; PAM sequence: TGG
atgcccatcaacctatcagc

SEQ ID NO: 99338 - DNA, 20 bp, Artificial Sequence
  Description of Artificial Sequence: Synthetic oligonucleotide
  Target: LAMA2; (-) strand; PAM type: NRG; PAM sequence: CAG
gtatatgcccatcaacctat

SEQ ID NO: 99339 - DNA, 20 bp, Artificial Sequence
  Description of Artificial Sequence: Synthetic oligonucleotide
  Target: LAMA2; (-) strand; PAM type: NRG; PAM sequence: TAG
tactctgggtcacatttttt

SEQ ID NO: 99340 - DNA, 20 bp, Artificial Sequence
  Description of Artificial Sequence: Synthetic oligonucleotide
  Target: LAMA2; (-) strand; PAM type: NRG; PAM sequence: GGG
atatcactagagtgtactct

SEQ ID NO: 99341 - DNA, 20 bp, Artificial Sequence
  Description of Artificial Sequence: Synthetic oligonucleotide
  Target: LAMA2; (-) strand; PAM type: NRG; PAM sequence: TGG
gatatcactagagtgtactc

SEQ ID NO: 99342 - DNA, 20 bp, Artificial Sequence
  Description of Artificial Sequence: Synthetic oligonucleotide
  Target: LAMA2; (-) strand; PAM type: NRG; PAM sequence: GAG
catcattggagatatcacta

SEQ ID NO: 99343 - DNA, 20 bp, Artificial Sequence
  Description of Artificial Sequence: Synthetic oligonucleotide
  Target: LAMA2; (-) strand; PAM type: NRG; PAM sequence: TAG
ctcatcattggagatatcac

SEQ ID NO: 99344 - DNA, 20 bp, Artificial Sequence
  Description of Artificial Sequence: Synthetic oligonucleotide
  Target: LAMA2; (-) strand; PAM type: NRG; PAM sequence: GAG
aagcttacgcctcatcattg

SEQ ID NO: 99345 - DNA, 20 bp, Artificial Sequence
  Description of Artificial Sequence: Synthetic oligonucleotide
  Target: LAMA2; (-) strand; PAM type: NRG; PAM sequence: TGG
caaagcttacgcctcatcat

SEQ ID NO: 99346 - DNA, 20 bp, Artificial Sequence
  Description of Artificial Sequence: Synthetic oligonucleotide
  Target: LAMA2; (-) strand; PAM type: NRG; PAM sequence: AAG
acacaacaaggtcaaataca

SEQ ID NO: 99347 - DNA, 20 bp, Artificial Sequence
  Description of Artificial Sequence: Synthetic oligonucleotide
  Target: LAMA2; (-) strand; PAM type: NRG; PAM sequence: AGG
cagatattttgaacacaaca

SEQ ID NO: 99348 - DNA, 20 bp, Artificial Sequence
  Description of Artificial Sequence: Synthetic oligonucleotide
  Target: LAMA2; (-) strand; PAM type: NRG; PAM sequence: AAG
acagatattttgaacacaac

SEQ ID NO: 99349 - DNA, 20 bp, Artificial Sequence
  Description of Artificial Sequence: Synthetic oligonucleotide
  Target: LAMA2; (-) strand; PAM type: NRG; PAM sequence: CAG
gatatcatccaaagcattta

SEQ ID NO: 99350 - DNA, 20 bp, Artificial Sequence
  Description of Artificial Sequence: Synthetic oligonucleotide
  Target: LAMA2; (-) strand; PAM type: NRG; PAM sequence: AAG
tatttgatagatatcatcca

SEQ ID NO: 99351 - DNA, 20 bp, Artificial Sequence
  Description of Artificial Sequence: Synthetic oligonucleotide
  Target: LAMA2; (-) strand; PAM type: NRG; PAM sequence: TAG
tatattatctgaatatttga

SEQ ID NO: 99352 - DNA, 20 bp, Artificial Sequence
  Description of Artificial Sequence: Synthetic oligonucleotide
  Target: LAMA2; (-) strand; PAM type: NRG; PAM sequence: CAG
aacacattagataatacttt

SEQ ID NO: 99353 - DNA, 20 bp, Artificial Sequence
  Description of Artificial Sequence: Synthetic oligonucleotide
  Target: LAMA2; (-) strand; PAM type: NRG; PAM sequence: TAG
tttcccaccatccaacacat

SEQ ID NO: 99354 - DNA, 20 bp, Artificial Sequence
  Description of Artificial Sequence: Synthetic oligonucleotide
  Target: LAMA2; (-) strand; PAM type: NRG; PAM sequence: AGG
aattcatagtatcatctgtc

SEQ ID NO: 99355 - DNA, 20 bp, Artificial Sequence
  Description of Artificial Sequence: Synthetic oligonucleotide
  Target: LAMA2; (-) strand; PAM type: NRG; PAM sequence: CAG
taattcatagtatcatctgt

SEQ ID NO: 99356 - DNA, 20 bp, Artificial Sequence
  Description of Artificial Sequence: Synthetic oligonucleotide
  Target: LAMA2; (-) strand; PAM type: NRG; PAM sequence: TAG
atcttgttaactgtaattca

SEQ ID NO: 99357 - DNA, 20 bp, Artificial Sequence
  Description of Artificial Sequence: Synthetic oligonucleotide
  Target: LAMA2; (-) strand; PAM type: NRG; PAM sequence: GAG
acaaacaagtgagcttacct

SEQ ID NO: 99358 - DNA, 20 bp, Artificial Sequence
  Description of Artificial Sequence: Synthetic oligonucleotide
  Target: LAMA2; (-) strand; PAM type: NRG; PAM sequence: GAG
acaggaatgaacaaacaagt

SEQ ID NO: 99359 - DNA, 20 bp, Artificial Sequence
  Description of Artificial Sequence: Synthetic oligonucleotide
  Target: LAMA2; (-) strand; PAM type: NRG; PAM sequence: AAG
tgccacaggaatgaacaaac

SEQ ID NO: 99360 - DNA, 20 bp, Artificial Sequence
  Description of Artificial Sequence: Synthetic oligonucleotide
  Target: LAMA2; (-) strand; PAM type: NRG; PAM sequence: AGG
acataattaacagatgccac

SEQ ID NO: 99361 - DNA, 20 bp, Artificial Sequence
  Description of Artificial Sequence: Synthetic oligonucleotide
  Target: LAMA2; (-) strand; PAM type: NRG; PAM sequence: CAG
aacataattaacagatgcca

SEQ ID NO: 99362 - DNA, 20 bp, Artificial Sequence
  Description of Artificial Sequence: Synthetic oligonucleotide
  Target: LAMA2; (-) strand; PAM type: NRG; PAM sequence: CAG
catgttggaaacataattaa

SEQ ID NO: 99363 - DNA, 20 bp, Artificial Sequence
  Description of Artificial Sequence: Synthetic oligonucleotide
  Target: LAMA2; (-) strand; PAM type: NRG; PAM sequence: TGG
taggccatagacctgcatgt

SEQ ID NO: 99364 - DNA, 20 bp, Artificial Sequence
  Description of Artificial Sequence: Synthetic oligonucleotide
  Target: LAMA2; (-) strand; PAM type: NRG; PAM sequence: TAG
ttactatctaccataggcca

SEQ ID NO: 99365 - DNA, 20 bp, Artificial Sequence
  Description of Artificial Sequence: Synthetic oligonucleotide
  Target: LAMA2; (-) strand; PAM type: NRG; PAM sequence: AGG
atattcttactatctaccat

SEQ ID NO: 99366 - DNA, 20 bp, Artificial Sequence
  Description of Artificial Sequence: Synthetic oligonucleotide
  Target: LAMA2; (-) strand; PAM type: NRG; PAM sequence: TAG
catattcttactatctacca

SEQ ID NO: 99367 - DNA, 20 bp, Artificial Sequence
  Description of Artificial Sequence: Synthetic oligonucleotide
  Target: LAMA2; (-) strand; PAM type: NRG; PAM sequence: CAG
cctagagggcaagacccatg

SEQ ID NO: 99368 - DNA, 20 bp, Artificial Sequence
  Description of Artificial Sequence: Synthetic oligonucleotide
  Target: LAMA2; (-) strand; PAM type: NRG; PAM sequence: AAG
agaataagctcctagagggc

SEQ ID NO: 99369 - DNA, 20 bp, Artificial Sequence
  Description of Artificial Sequence: Synthetic oligonucleotide
  Target: LAMA2; (-) strand; PAM type: NRG; PAM sequence: GGG
ctagagaataagctcctaga

SEQ ID NO: 99370 - DNA, 20 bp, Artificial Sequence
  Description of Artificial Sequence: Synthetic oligonucleotide
  Target: LAMA2; (-) strand; PAM type: NRG; PAM sequence: AGG
actagagaataagctcctag

SEQ ID NO: 99371 - DNA, 20 bp, Artificial Sequence
  Description of Artificial Sequence: Synthetic oligonucleotide
  Target: LAMA2; (-) strand; PAM type: NRG; PAM sequence: GAG
aactagagaataagctccta

SEQ ID NO: 99372 - DNA, 20 bp, Artificial Sequence
  Description of Artificial Sequence: Synthetic oligonucleotide
  Target: LAMA2; (-) strand; PAM type: NRG; PAM sequence: TAG
taaactagagaataagctcc

SEQ ID NO: 99373 - DNA, 20 bp, Artificial Sequence
  Description of Artificial Sequence: Synthetic oligonucleotide
  Target: LAMA2; (-) strand; PAM type: NRG; PAM sequence: AAG
tttcccctaaactagagaat

SEQ ID NO: 99374 - DNA, 20 bp, Artificial Sequence
  Description of Artificial Sequence: Synthetic oligonucleotide
  Target: LAMA2; (-) strand; PAM type: NRG; PAM sequence: GAG
ctgttctttcccctaaacta

SEQ ID NO: 99375 - DNA, 20 bp, Artificial Sequence
  Description of Artificial Sequence: Synthetic oligonucleotide
  Target: LAMA2; (-) strand; PAM type: NRG; PAM sequence: TAG
ctctgttctttcccctaaac

SEQ ID NO: 99376 - DNA, 20 bp, Artificial Sequence
  Description of Artificial Sequence: Synthetic oligonucleotide
  Target: LAMA2; (-) strand; PAM type: NRG; PAM sequence: AGG
agtgaatctgcaatcaagta

SEQ ID NO: 99377 - DNA, 20 bp, Artificial Sequence
  Description of Artificial Sequence: Synthetic oligonucleotide
  Target: LAMA2; (-) strand; PAM type: NRG; PAM sequence: AAG
tagtgaatctgcaatcaagt

SEQ ID NO: 99378 - DNA, 20 bp, Artificial Sequence
  Description of Artificial Sequence: Synthetic oligonucleotide
  Target: LAMA2; (-) strand; PAM type: NRG; PAM sequence: AAG
cacctagtgaatctgcaatc

SEQ ID NO: 99379 - DNA, 20 bp, Artificial Sequence
  Description of Artificial Sequence: Synthetic oligonucleotide
  Target: LAMA2; (-) strand; PAM type: NRG; PAM sequence: TAG
caatgccctgtgttggcacc

SEQ ID NO: 99380 - DNA, 20 bp, Artificial Sequence
  Description of Artificial Sequence: Synthetic oligonucleotide
  Target: LAMA2; (-) strand; PAM type: NRG; PAM sequence: TGG
caaatagcaatgccctgtgt

SEQ ID NO: 99381 - DNA, 20 bp, Artificial Sequence
  Description of Artificial Sequence: Synthetic oligonucleotide
  Target: LAMA2; (-) strand; PAM type: NRG; PAM sequence: TAG
tgatttggatcttatacaaa

SEQ ID NO: 99382 - DNA, 20 bp, Artificial Sequence
  Description of Artificial Sequence: Synthetic oligonucleotide
  Target: LAMA2; (-) strand; PAM type: NRG; PAM sequence: TGG
atgtacttcctcccttgatt

SEQ ID NO: 99383 - DNA, 20 bp, Artificial Sequence
  Description of Artificial Sequence: Synthetic oligonucleotide
  Target: LAMA2; (-) strand; PAM type: NRG; PAM sequence: TAG
tatagtagattataagtctc

SEQ ID NO: 99384 - DNA, 20 bp, Artificial Sequence
  Description of Artificial Sequence: Synthetic oligonucleotide
  Target: LAMA2; (-) strand; PAM type: NRG; PAM sequence: AAG
ttcaaaatatagtagattat

SEQ ID NO: 99385 - DNA, 20 bp, Artificial Sequence
  Description of Artificial Sequence: Synthetic oligonucleotide
  Target: LAMA2; (-) strand; PAM type: NRG; PAM sequence: TAG
gggtttctttcaaaatatag

SEQ ID NO: 99386 - DNA, 20 bp, Artificial Sequence
  Description of Artificial Sequence: Synthetic oligonucleotide
  Target: LAMA2; (-) strand; PAM type: NRG; PAM sequence: TAG
tcagggtttctttcaaaata

SEQ ID NO: 99387 - DNA, 20 bp, Artificial Sequence
  Description of Artificial Sequence: Synthetic oligonucleotide
  Target: LAMA2; (-) strand; PAM type: NRG; PAM sequence: GGG
acatttagcaatcttactca

SEQ ID NO: 99388 - DNA, 20 bp, Artificial Sequence
  Description of Artificial Sequence: Synthetic oligonucleotide
  Target: LAMA2; (-) strand; PAM type: NRG; PAM sequence: AGG
aacatttagcaatcttactc

SEQ ID NO: 99389 - DNA, 20 bp, Artificial Sequence
  Description of Artificial Sequence: Synthetic oligonucleotide
  Target: LAMA2; (-) strand; PAM type: NRG; PAM sequence: CAG
aaacatttagcaatcttact

SEQ ID NO: 99390 - DNA, 20 bp, Artificial Sequence
  Description of Artificial Sequence: Synthetic oligonucleotide
  Target: LAMA2; (-) strand; PAM type: NRG; PAM sequence: TAG
tttgtttcaagctaaacatt

SEQ ID NO: 99391 - DNA, 20 bp, Artificial Sequence
  Description of Artificial Sequence: Synthetic oligonucleotide
  Target: LAMA2; (-) strand; PAM type: NRG; PAM sequence: AAG
acttcctaaatctttgtttc

SEQ ID NO: 99392 - DNA, 20 bp, Artificial Sequence
  Description of Artificial Sequence: Synthetic oligonucleotide
  Target: LAMA2; (-) strand; PAM type: NRG; PAM sequence: AAG
gggaaggtcctcaaatatct

SEQ ID NO: 99393 - DNA, 20 bp, Artificial Sequence
  Description of Artificial Sequence: Synthetic oligonucleotide
  Target: LAMA2; (-) strand; PAM type: NRG; PAM sequence: AGG
taattcccttttcctaggga

SEQ ID NO: 99394 - DNA, 20 bp, Artificial Sequence
  Description of Artificial Sequence: Synthetic oligonucleotide
  Target: LAMA2; (-) strand; PAM type: NRG; PAM sequence: AAG
ctaattcccttttcctaggg

SEQ ID NO: 99395 - DNA, 20 bp, Artificial Sequence
  Description of Artificial Sequence: Synthetic oligonucleotide
  Target: LAMA2; (-) strand; PAM type: NRG; PAM sequence: GGG
agtctaattcccttttccta

SEQ ID NO: 99396 - DNA, 20 bp, Artificial Sequence
  Description of Artificial Sequence: Synthetic oligonucleotide
  Target: LAMA2; (-) strand; PAM type: NRG; PAM sequence: AGG
aagtctaattcccttttcct

SEQ ID NO: 99397 - DNA, 20 bp, Artificial Sequence
  Description of Artificial Sequence: Synthetic oligonucleotide
  Target: LAMA2; (-) strand; PAM type: NRG; PAM sequence: TAG
taagtctaattcccttttcc

SEQ ID NO: 99398 - DNA, 20 bp, Artificial Sequence
  Description of Artificial Sequence: Synthetic oligonucleotide
  Target: LAMA2; (-) strand; PAM type: NRG; PAM sequence: AAG
cttctgaagctatgaaaatt

SEQ ID NO: 99399 - DNA, 20 bp, Artificial Sequence
  Description of Artificial Sequence: Synthetic oligonucleotide
  Target: LAMA2; (-) strand; PAM type: NRG; PAM sequence: AAG
gatccaagttctgccttctg

SEQ ID NO: 99400 - DNA, 20 bp, Artificial Sequence
  Description of Artificial Sequence: Synthetic oligonucleotide
  Target: LAMA2; (-) strand; PAM type: NRG; PAM sequence: AAG
taattttcagtgagtgatcc

SEQ ID NO: 99401 - DNA, 20 bp, Artificial Sequence
  Description of Artificial Sequence: Synthetic oligonucleotide
  Target: LAMA2; (-) strand; PAM type: NRG; PAM sequence: GAG
gatgcattctaattttcagt

SEQ ID NO: 99402 - DNA, 20 bp, Artificial Sequence
  Description of Artificial Sequence: Synthetic oligonucleotide
  Target: LAMA2; (-) strand; PAM type: NRG; PAM sequence: CAG
atttgatgcattctaatttt

SEQ ID NO: 99403 - DNA, 20 bp, Artificial Sequence
  Description of Artificial Sequence: Synthetic oligonucleotide
  Target: LAMA2; (-) strand; PAM type: NRG; PAM sequence: CGG
agctgtgaagtttttcctta

SEQ ID NO: 99404 - DNA, 20 bp, Artificial Sequence
  Description of Artificial Sequence: Synthetic oligonucleotide
  Target: LAMA2; (-) strand; PAM type: NRG; PAM sequence: AAG
ttcgtcttgcataagctgtg

SEQ ID NO: 99405 - DNA, 20 bp, Artificial Sequence
  Description of Artificial Sequence: Synthetic oligonucleotide
  Target: LAMA2; (-) strand; PAM type: NRG; PAM sequence: AAG
cagcttttttcgtcttgcat

SEQ ID NO: 99406 - DNA, 20 bp, Artificial Sequence
  Description of Artificial Sequence: Synthetic oligonucleotide
  Target: LAMA2; (-) strand; PAM type: NRG; PAM sequence: CAG
atgcatgaattcttataaga

SEQ ID NO: 99407 - DNA, 20 bp, Artificial Sequence
  Description of Artificial Sequence: Synthetic oligonucleotide
  Target: LAMA2; (-) strand; PAM type: NRG; PAM sequence: AAG
ttaaatgcatgaattcttat

SEQ ID NO: 99408 - DNA, 20 bp, Artificial Sequence
  Description of Artificial Sequence: Synthetic oligonucleotide
  Target: LAMA2; (-) strand; PAM type: NRG; PAM sequence: GAG
atgccttctatactttcctt

SEQ ID NO: 99409 - DNA, 20 bp, Artificial Sequence
  Description of Artificial Sequence: Synthetic oligonucleotide
  Target: LAMA2; (-) strand; PAM type: NRG; PAM sequence: AGG
atctaaccttcttgccatac

SEQ ID NO: 99410 - DNA, 20 bp, Artificial Sequence
  Description of Artificial Sequence: Synthetic oligonucleotide
  Target: LAMA2; (-) strand; PAM type: NRG; PAM sequence: CAG
aatctaaccttcttgccata

SEQ ID NO: 99411 - DNA, 20 bp, Artificial Sequence
  Description of Artificial Sequence: Synthetic oligonucleotide
  Target: LAMA2; (-) strand; PAM type: NRG; PAM sequence: GAG
tagtatctcaggcctaaggt

SEQ ID NO: 99412 - DNA, 20 bp, Artificial Sequence
  Description of Artificial Sequence: Synthetic oligonucleotide
  Target: LAMA2; (-) strand; PAM type: NRG; PAM sequence: AGG
attatagtatctcaggccta

SEQ ID NO: 99413 - DNA, 20 bp, Artificial Sequence
  Description of Artificial Sequence: Synthetic oligonucleotide
  Target: LAMA2; (-) strand; PAM type: NRG; PAM sequence: AAG
tattatagtatctcaggcct

SEQ ID NO: 99414 - DNA, 20 bp, Artificial Sequence
  Description of Artificial Sequence: Synthetic oligonucleotide
  Target: LAMA2; (-) strand; PAM type: NRG; PAM sequence: AGG
cattaatattatagtatctc

SEQ ID NO: 99415 - DNA, 20 bp, Artificial Sequence
  Description of Artificial Sequence: Synthetic oligonucleotide
  Target: LAMA2; (-) strand; PAM type: NRG; PAM sequence: CAG
acattaatattatagtatct

SEQ ID NO: 99416 - DNA, 20 bp, Artificial Sequence
  Description of Artificial Sequence: Synthetic oligonucleotide
  Target: LAMA2; (-) strand; PAM type: NRG; PAM sequence: TAG
tgactataacattaatatta

SEQ ID NO: 99417 - DNA, 20 bp, Artificial Sequence
  Description of Artificial Sequence: Synthetic oligonucleotide
  Target: LAMA2; (-) strand; PAM type: NRG; PAM sequence: TGG
tttgcacactggaaaactgt

SEQ ID NO: 99418 - DNA, 20 bp, Artificial Sequence
  Description of Artificial Sequence: Synthetic oligonucleotide
  Target: LAMA2; (-) strand; PAM type: NRG; PAM sequence: TGG
ttaagtttttttttgcacac

SEQ ID NO: 99419 - DNA, 20 bp, Artificial Sequence
  Description of Artificial Sequence: Synthetic oligonucleotide
  Target: LAMA2; (-) strand; PAM type: NRG; PAM sequence: AAG
cagaatatattagatttgtt

SEQ ID NO: 99420 - DNA, 20 bp, Artificial Sequence
  Description of Artificial Sequence: Synthetic oligonucleotide
  Target: LAMA2; (-) strand; PAM type: NRG; PAM sequence: TAG
aataatacatcagaatatat

SEQ ID NO: 99421 - DNA, 20 bp, Artificial Sequence
  Description of Artificial Sequence: Synthetic oligonucleotide
  Target: LAMA2; (-) strand; PAM type: NRG; PAM sequence: CAG
gtatctcttcaataatacat

SEQ ID NO: 99422 - DNA, 20 bp, Artificial Sequence
  Description of Artificial Sequence: Synthetic oligonucleotide
  Target: LAMA2; (-) strand; PAM type: NRG; PAM sequence: TAG
ttctcaagagtggtatgtgc

SEQ ID NO: 99423 - DNA, 20 bp, Artificial Sequence
  Description of Artificial Sequence: Synthetic oligonucleotide
  Target: LAMA2; (-) strand; PAM type: NRG; PAM sequence: TGG
tttaattatattctcaagag

SEQ ID NO: 99424 - DNA, 20 bp, Artificial Sequence
  Description of Artificial Sequence: Synthetic oligonucleotide
  Target: LAMA2; (-) strand; PAM type: NRG; PAM sequence: GAG
aagtttaattatattctcaa

SEQ ID NO: 99425 - DNA, 20 bp, Artificial Sequence
  Description of Artificial Sequence: Synthetic oligonucleotide
  Target: LAMA2; (-) strand; PAM type: NRG; PAM sequence: AAG
agaagtttaattatattctc

SEQ ID NO: 99426 - DNA, 20 bp, Artificial Sequence
  Description of Artificial Sequence: Synthetic oligonucleotide
  Target: LAMA2; (-) strand; PAM type: NRG; PAM sequence: AAG
tattttggatgcctaatgag

SEQ ID NO: 99427 - DNA, 20 bp, Artificial Sequence
  Description of Artificial Sequence: Synthetic oligonucleotide
  Target: LAMA2; (-) strand; PAM type: NRG; PAM sequence: GAG
ctatattttggatgcctaat

SEQ ID NO: 99428 - DNA, 20 bp, Artificial Sequence
  Description of Artificial Sequence: Synthetic oligonucleotide
  Target: LAMA2; (-) strand; PAM type: NRG; PAM sequence: TGG
taggggaaattcctatattt

SEQ ID NO: 99429 - DNA, 20 bp, Artificial Sequence
  Description of Artificial Sequence: Synthetic oligonucleotide
  Target: LAMA2; (-) strand; PAM type: NRG; PAM sequence: GGG
atataaaaattagccattag

SEQ ID NO: 99430 - DNA, 20 bp, Artificial Sequence
  Description of Artificial Sequence: Synthetic oligonucleotide
  Target: LAMA2; (-) strand; PAM type: NRG; PAM sequence: GGG
tatataaaaattagccatta

SEQ ID NO: 99431 - DNA, 20 bp, Artificial Sequence
  Description of Artificial Sequence: Synthetic oligonucleotide
  Target: LAMA2; (-) strand; PAM type: NRG; PAM sequence: AGG
ttatataaaaattagccatt

SEQ ID NO: 99432 - DNA, 20 bp, Artificial Sequence
  Description of Artificial Sequence: Synthetic oligonucleotide
  Target: LAMA2; (-) strand; PAM type: NRG; PAM sequence: TAG
cttatataaaaattagccat

SEQ ID NO: 99433 - DNA, 20 bp, Artificial Sequence
  Description of Artificial Sequence: Synthetic oligonucleotide
  Target: LAMA2; (-) strand; PAM type: NRG; PAM sequence: TAG
attttttcttatataaaaat

SEQ ID NO: 99434 - DNA, 20 bp, Artificial Sequence
  Description of Artificial Sequence: Synthetic oligonucleotide
  Target: LAMA2; (-) strand; PAM type: NRG; PAM sequence: TAG
ctgctttgaaatagtgtaca

SEQ ID NO: 99435 - DNA, 20 bp, Artificial Sequence
  Description of Artificial Sequence: Synthetic oligonucleotide
  Target: LAMA2; (-) strand; PAM type: NRG; PAM sequence: TAG
cttttctgtctgctttgaaa

SEQ ID NO: 99436 - DNA, 20 bp, Artificial Sequence
  Description of Artificial Sequence: Synthetic oligonucleotide
  Target: LAMA2; (-) strand; PAM type: NRG; PAM sequence: GAG
acacacaacacataaatcag

SEQ ID NO: 99437 - DNA, 20 bp, Artificial Sequence
  Description of Artificial Sequence: Synthetic oligonucleotide
  Target: LAMA2; (-) strand; PAM type: NRG; PAM sequence: AGG
aaacacacaacacataaatc

SEQ ID NO: 99438 - DNA, 20 bp, Artificial Sequence
  Description of Artificial Sequence: Synthetic oligonucleotide
  Target: LAMA2; (-) strand; PAM type: NRG; PAM sequence: CAG
caaacacacaacacataaat

SEQ ID NO: 99439 - DNA, 20 bp, Artificial Sequence
  Description of Artificial Sequence: Synthetic oligonucleotide
  Target: LAMA2; (-) strand; PAM type: NRG; PAM sequence: AGG
ttgaatcaaatgtcctggtt

SEQ ID NO: 99440 - DNA, 20 bp, Artificial Sequence
  Description of Artificial Sequence: Synthetic oligonucleotide
  Target: LAMA2; (-) strand; PAM type: NRG; PAM sequence: TAG
attgaatcaaatgtcctggt

SEQ ID NO: 99441 - DNA, 20 bp, Artificial Sequence
  Description of Artificial Sequence: Synthetic oligonucleotide
  Target: LAMA2; (-) strand; PAM type: NRG; PAM sequence: TGG
gttaattgaatcaaatgtcc

SEQ ID NO: 99442 - DNA, 20 bp, Artificial Sequence
  Description of Artificial Sequence: Synthetic oligonucleotide
  Target: LAMA2; (-) strand; PAM type: NRG; PAM sequence: TGG
ggttgctgacatactaaact

SEQ ID NO: 99443 - DNA, 20 bp, Artificial Sequence
  Description of Artificial Sequence: Synthetic oligonucleotide
  Target: LAMA2; (-) strand; PAM type: NRG; PAM sequence: GGG
aatcttctcaatctttcaga

SEQ ID NO: 99444 - DNA, 20 bp, Artificial Sequence
  Description of Artificial Sequence: Synthetic oligonucleotide
  Target: LAMA2; (-) strand; PAM type: NRG; PAM sequence: AGG
caatcttctcaatctttcag

SEQ ID NO: 99445 - DNA, 20 bp, Artificial Sequence
  Description of Artificial Sequence: Synthetic oligonucleotide
  Target: LAMA2; (-) strand; PAM type: NRG; PAM sequence: GAG
tcaatcttctcaatctttca

SEQ ID NO: 99446 - DNA, 20 bp, Artificial Sequence
  Description of Artificial Sequence: Synthetic oligonucleotide
  Target: LAMA2; (-) strand; PAM type: NRG; PAM sequence: CAG
agtcaatcttctcaatcttt

SEQ ID NO: 99447 - DNA, 20 bp, Artificial Sequence
  Description of Artificial Sequence: Synthetic oligonucleotide
  Target: LAMA2; (-) strand; PAM type: NRG; PAM sequence: CAG
atattgtaatattctctgga

SEQ ID NO: 99448 - DNA, 20 bp, Artificial Sequence
  Description of Artificial Sequence: Synthetic oligonucleotide
  Target: LAMA2; (-) strand; PAM type: NRG; PAM sequence: TGG
gcaaatattgtaatattctc

SEQ ID NO: 99449 - DNA, 20 bp, Artificial Sequence
  Description of Artificial Sequence: Synthetic oligonucleotide
  Target: LAMA2; (-) strand; PAM type: NRG; PAM sequence: AAG
cataatttcttcaacagaga

SEQ ID NO: 99450 - DNA, 20 bp, Artificial Sequence
  Description of Artificial Sequence: Synthetic oligonucleotide
  Target: LAMA2; (-) strand; PAM type: NRG; PAM sequence: GAG
tctacataatttcttcaaca

SEQ ID NO: 99451 - DNA, 20 bp, Artificial Sequence
  Description of Artificial Sequence: Synthetic oligonucleotide
  Target: LAMA2; (-) strand; PAM type: NRG; PAM sequence: CAG
agtctacataatttcttcaa

SEQ ID NO: 99452 - DNA, 20 bp, Artificial Sequence
  Description of Artificial Sequence: Synthetic oligonucleotide
  Target: LAMA2; (-) strand; PAM type: NRG; PAM sequence: AAG
tttgtttctcttatacctgt

SEQ ID NO: 99453 - DNA, 20 bp, Artificial Sequence
  Description of Artificial Sequence: Synthetic oligonucleotide
  Target: LAMA2; (-) strand; PAM type: NRG; PAM sequence: GAG
ataatcattactaaaaataa

SEQ ID NO: 99454 - DNA, 20 bp, Artificial Sequence
  Description of Artificial Sequence: Synthetic oligonucleotide
  Target: LAMA2; (-) strand; PAM type: NRG; PAM sequence: AAG
caataatcattactaaaaat

SEQ ID NO: 99455 - DNA, 20 bp, Artificial Sequence
  Description of Artificial Sequence: Synthetic oligonucleotide
  Target: LAMA2; (-) strand; PAM type: NRG; PAM sequence: AAG
taactgaattaaaatcctta

SEQ ID NO: 99456 - DNA, 20 bp, Artificial Sequence
  Description of Artificial Sequence: Synthetic oligonucleotide
  Target: LAMA2; (-) strand; PAM type: NRG; PAM sequence: TAG
atgtaacctaaatataacat

SEQ ID NO: 99457 - DNA, 20 bp, Artificial Sequence
  Description of Artificial Sequence: Synthetic oligonucleotide
  Target: LAMA2; (-) strand; PAM type: NRG; PAM sequence: CAG
ttttcagccttttgcttttg

SEQ ID NO: 99458 - DNA, 20 bp, Artificial Sequence
  Description of Artificial Sequence: Synthetic oligonucleotide
  Target: LAMA2; (-) strand; PAM type: NRG; PAM sequence: CAG
ggatcttcaacaataatttt

SEQ ID NO: 99459 - DNA, 20 bp, Artificial Sequence
  Description of Artificial Sequence: Synthetic oligonucleotide
  Target: LAMA2; (-) strand; PAM type: NRG; PAM sequence: GGG
tgaatgtgccaaaaatacat

SEQ ID NO: 99460 - DNA, 20 bp, Artificial Sequence
  Description of Artificial Sequence: Synthetic oligonucleotide
  Target: LAMA2; (-) strand; PAM type: NRG; PAM sequence: TGG
atgaatgtgccaaaaataca

SEQ ID NO: 99461 - DNA, 20 bp, Artificial Sequence
  Description of Artificial Sequence: Synthetic oligonucleotide
  Target: LAMA2; (-) strand; PAM type: NRG; PAM sequence: GAG
ttttaagaacttattttata

SEQ ID NO: 99462 - DNA, 20 bp, Artificial Sequence
  Description of Artificial Sequence: Synthetic oligonucleotide
  Target: LAMA2; (-) strand; PAM type: NRG; PAM sequence: TAG
tgttttaagaacttatttta

SEQ ID NO: 99463 - DNA, 20 bp, Artificial Sequence
  Description of Artificial Sequence: Synthetic oligonucleotide
  Target: LAMA2; (-) strand; PAM type: NRG; PAM sequence: AAG
tgttaactggggagtgtttt

SEQ ID NO: 99464 - DNA, 20 bp, Artificial Sequence
  Description of Artificial Sequence: Synthetic oligonucleotide
  Target: LAMA2; (-) strand; PAM type: NRG; PAM sequence: GAG
atgaataagtgttaactggg

SEQ ID NO: 99465 - DNA, 20 bp, Artificial Sequence
  Description of Artificial Sequence: Synthetic oligonucleotide
  Target: LAMA2; (-) strand; PAM type: NRG; PAM sequence: GGG
tgatgaataagtgttaactg

SEQ ID NO: 99466 - DNA, 20 bp, Artificial Sequence
  Description of Artificial Sequence: Synthetic oligonucleotide
  Target: LAMA2; (-) strand; PAM type: NRG; PAM sequence: GGG
ctgatgaataagtgttaact

SEQ ID NO: 99467 - DNA, 20 bp, Artificial Sequence
  Description of Artificial Sequence: Synthetic oligonucleotide
  Target: LAMA2; (-) strand; PAM type: NRG; PAM sequence: TGG
gctgatgaataagtgttaac

SEQ ID NO: 99468 - DNA, 20 bp, Artificial Sequence
  Description of Artificial Sequence: Synthetic oligonucleotide
  Target: LAMA2; (-) strand; PAM type: NRG; PAM sequence: AAG
aaggtgtcatgctgatgaat

SEQ ID NO: 99469 - DNA, 20 bp, Artificial Sequence
  Description of Artificial Sequence: Synthetic oligonucleotide
  Target: LAMA2; (-) strand; PAM type: NRG; PAM sequence: AGG
taatttcaagtcattcagca

SEQ ID NO: 99470 - DNA, 20 bp, Artificial Sequence
  Description of Artificial Sequence: Synthetic oligonucleotide
  Target: LAMA2; (-) strand; PAM type: NRG; PAM sequence: AAG
ataatttcaagtcattcagc

SEQ ID NO: 99471 - DNA, 20 bp, Artificial Sequence
  Description of Artificial Sequence: Synthetic oligonucleotide
  Target: LAMA2; (-) strand; PAM type: NRG; PAM sequence: CAG
aattataatttcaagtcatt

SEQ ID NO: 99472 - DNA, 20 bp, Artificial Sequence
  Description of Artificial Sequence: Synthetic oligonucleotide
  Target: LAMA2; (-) strand; PAM type: NRG; PAM sequence: AAG
tatctatgaattataatttc

SEQ ID NO: 99473 - DNA, 20 bp, Artificial Sequence
  Description of Artificial Sequence: Synthetic oligonucleotide
  Target: LAMA2; (-) strand; PAM type: NRG; PAM sequence: AAG
ttatgagagataatggctcc

SEQ ID NO: 99474 - DNA, 20 bp, Artificial Sequence
  Description of Artificial Sequence: Synthetic oligonucleotide
  Target: LAMA2; (-) strand; PAM type: NRG; PAM sequence: TGG
agtagcattatgagagataa

SEQ ID NO: 99475 - DNA, 20 bp, Artificial Sequence
  Description of Artificial Sequence: Synthetic oligonucleotide
  Target: LAMA2; (-) strand; PAM type: NRG; PAM sequence: GAG
atttaacagtagcattatga

SEQ ID NO: 99476 - DNA, 20 bp, Artificial Sequence
  Description of Artificial Sequence: Synthetic oligonucleotide
  Target: LAMA2; (-) strand; PAM type: NRG; PAM sequence: GAG
atatttaacagtagcattat

SEQ ID NO: 99477 - DNA, 20 bp, Artificial Sequence
  Description of Artificial Sequence: Synthetic oligonucleotide
  Target: LAMA2; (-) strand; PAM type: NRG; PAM sequence: TAG
agccattccatatttaacag

SEQ ID NO: 99478 - DNA, 20 bp, Artificial Sequence
  Description of Artificial Sequence: Synthetic oligonucleotide
  Target: LAMA2; (-) strand; PAM type: NRG; PAM sequence: CAG
aagagccattccatatttaa

SEQ ID NO: 99479 - DNA, 20 bp, Artificial Sequence
  Description of Artificial Sequence: Synthetic oligonucleotide
  Target: LAMA2; (-) strand; PAM type: NRG; PAM sequence: GAG
accatttttaagcaataaaa

SEQ ID NO: 99480 - DNA, 20 bp, Artificial Sequence
  Description of Artificial Sequence: Synthetic oligonucleotide
  Target: LAMA2; (-) strand; PAM type: NRG; PAM sequence: AAG
ccaccatttttaagcaataa

SEQ ID NO: 99481 - DNA, 20 bp, Artificial Sequence
  Description of Artificial Sequence: Synthetic oligonucleotide
  Target: LAMA2; (-) strand; PAM type: NRG; PAM sequence: AAG
ccaaaggaaccaccattttt

SEQ ID NO: 99482 - DNA, 20 bp, Artificial Sequence
  Description of Artificial Sequence: Synthetic oligonucleotide
  Target: LAMA2; (-) strand; PAM type: NRG; PAM sequence: AGG
tcttttattcaaccatccaa

SEQ ID NO: 99483 - DNA, 20 bp, Artificial Sequence
  Description of Artificial Sequence: Synthetic oligonucleotide
  Target: LAMA2; (-) strand; PAM type: NRG; PAM sequence: AAG
ctcttttattcaaccatcca

SEQ ID NO: 99484 - DNA, 20 bp, Artificial Sequence
  Description of Artificial Sequence: Synthetic oligonucleotide
  Target: LAMA2; (-) strand; PAM type: NRG; PAM sequence: AAG
tcatattttgccattgattt

SEQ ID NO: 99485 - DNA, 20 bp, Artificial Sequence
  Description of Artificial Sequence: Synthetic oligonucleotide
  Target: LAMA2; (-) strand; PAM type: NRG; PAM sequence: GGG
ttgcagaaaagtggttagca

SEQ ID NO: 99486 - DNA, 20 bp, Artificial Sequence
  Description of Artificial Sequence: Synthetic oligonucleotide
  Target: LAMA2; (-) strand; PAM type: NRG; PAM sequence: AGG
attgcagaaaagtggttagc

SEQ ID NO: 99487 - DNA, 20 bp, Artificial Sequence
  Description of Artificial Sequence: Synthetic oligonucleotide
  Target: LAMA2; (-) strand; PAM type: NRG; PAM sequence: CAG
cattgcagaaaagtggttag

SEQ ID NO: 99488 - DNA, 20 bp, Artificial Sequence
  Description of Artificial Sequence: Synthetic oligonucleotide
  Target: LAMA2; (-) strand; PAM type: NRG; PAM sequence: TAG
tgtcattgcagaaaagtggt

SEQ ID NO: 99489 - DNA, 20 bp, Artificial Sequence
  Description of Artificial Sequence: Synthetic oligonucleotide
  Target: LAMA2; (-) strand; PAM type: NRG; PAM sequence: TGG
caagtgtcattgcagaaaag

SEQ ID NO: 99490 - DNA, 20 bp, Artificial Sequence
  Description of Artificial Sequence: Synthetic oligonucleotide
  Target: LAMA2; (-) strand; PAM type: NRG; PAM sequence: AAG
tttcaagtgtcattgcagaa

SEQ ID NO: 99491 - DNA, 20 bp, Artificial Sequence
  Description of Artificial Sequence: Synthetic oligonucleotide
  Target: LAMA2; (-) strand; PAM type: NRG; PAM sequence: CAG
ccaaatttcaagtgtcattg

SEQ ID NO: 99492 - DNA, 20 bp, Artificial Sequence
  Description of Artificial Sequence: Synthetic oligonucleotide
  Target: LAMA2; (-) strand; PAM type: NRG; PAM sequence: AAG
gatgaaaaagcccaaatttc

SEQ ID NO: 99493 - DNA, 20 bp, Artificial Sequence
  Description of Artificial Sequence: Synthetic oligonucleotide
  Target: LAMA2; (-) strand; PAM type: NRG; PAM sequence: AAG
tcaggctttttcagatgaaa

SEQ ID NO: 99494 - DNA, 20 bp, Artificial Sequence
  Description of Artificial Sequence: Synthetic oligonucleotide
  Target: LAMA2; (-) strand; PAM type: NRG; PAM sequence: CAG
tgaaactggtcaggcttttt

SEQ ID NO: 99495 - DNA, 20 bp, Artificial Sequence
  Description of Artificial Sequence: Synthetic oligonucleotide
  Target: LAMA2; (-) strand; PAM type: NRG; PAM sequence: AGG
aagtatagatgaaactggtc

SEQ ID NO: 99496 - DNA, 20 bp, Artificial Sequence
  Description of Artificial Sequence: Synthetic oligonucleotide
  Target: LAMA2; (-) strand; PAM type: NRG; PAM sequence: CAG
gaagtatagatgaaactggt

SEQ ID NO: 99497 - DNA, 20 bp, Artificial Sequence
  Description of Artificial Sequence: Synthetic oligonucleotide
  Target: LAMA2; (-) strand; PAM type: NRG; PAM sequence: TGG
ccaggaagtatagatgaaac

SEQ ID NO: 99498 - DNA, 20 bp, Artificial Sequence
  Description of Artificial Sequence: Synthetic oligonucleotide
  Target: LAMA2; (-) strand; PAM type: NRG; PAM sequence: TAG
aatgcatgttccaggaagta

SEQ ID NO: 99499 - DNA, 20 bp, Artificial Sequence
  Description of Artificial Sequence: Synthetic oligonucleotide
  Target: LAMA2; (-) strand; PAM type: NRG; PAM sequence: AAG
gaatgaatgcatgttccagg

SEQ ID NO: 99500 - DNA, 20 bp, Artificial Sequence
  Description of Artificial Sequence: Synthetic oligonucleotide
  Target: LAMA2; (-) strand; PAM type: NRG; PAM sequence: AGG
aatgaatgaatgcatgttcc

SEQ ID NO: 99501 - DNA, 20 bp, Artificial Sequence
  Description of Artificial Sequence: Synthetic oligonucleotide
  Target: LAMA2; (-) strand; PAM type: NRG; PAM sequence: CAG
gaatgaatgaatgcatgttc

SEQ ID NO: 99502 - DNA, 20 bp, Artificial Sequence
  Description of Artificial Sequence: Synthetic oligonucleotide
  Target: LAMA2; (-) strand; PAM type: NRG; PAM sequence: AGG
tttagttcatcaaacatggg

SEQ ID NO: 99503 - DNA, 20 bp, Artificial Sequence
  Description of Artificial Sequence: Synthetic oligonucleotide
  Target: LAMA2; (-) strand; PAM type: NRG; PAM sequence: GAG
ttttagttcatcaaacatgg

SEQ ID NO: 99504 - DNA, 20 bp, Artificial Sequence
  Description of Artificial Sequence: Synthetic oligonucleotide
  Target: LAMA2; (-) strand; PAM type: NRG; PAM sequence: GGG
ccttttagttcatcaaacat

SEQ ID NO: 99505 - DNA, 20 bp, Artificial Sequence
  Description of Artificial Sequence: Synthetic oligonucleotide
  Target: LAMA2; (-) strand; PAM type: NRG; PAM sequence: TGG
tccttttagttcatcaaaca

SEQ ID NO: 99506 - DNA, 20 bp, Artificial Sequence
  Description of Artificial Sequence: Synthetic oligonucleotide
  Target: LAMA2; (-) strand; PAM type: NRG; PAM sequence: TAG
actggcttaaatgctccttt

SEQ ID NO: 99507 - DNA, 20 bp, Artificial Sequence
  Description of Artificial Sequence: Synthetic oligonucleotide
  Target: LAMA2; (-) strand; PAM type: NRG; PAM sequence: TGG
attccccgatgacctaaaac

SEQ ID NO: 99508 - DNA, 20 bp, Artificial Sequence
  Description of Artificial Sequence: Synthetic oligonucleotide
  Target: LAMA2; (-) strand; PAM type: NRG; PAM sequence: GAG
ttttaaatgtcactttctct

SEQ ID NO: 99509 - DNA, 20 bp, Artificial Sequence
  Description of Artificial Sequence: Synthetic oligonucleotide
  Target: LAMA2; (-) strand; PAM type: NRG; PAM sequence: CAG
aggctagcacttattcattt

SEQ ID NO: 99510 - DNA, 20 bp, Artificial Sequence
  Description of Artificial Sequence: Synthetic oligonucleotide
  Target: LAMA2; (-) strand; PAM type: NRG; PAM sequence: TAG
ctctacagtgtatatcaggc

SEQ ID NO: 99511 - DNA, 20 bp, Artificial Sequence
  Description of Artificial Sequence: Synthetic oligonucleotide
  Target: LAMA2; (-) strand; PAM type: NRG; PAM sequence: AGG
ttagctctacagtgtatatc

SEQ ID NO: 99512 - DNA, 20 bp, Artificial Sequence
  Description of Artificial Sequence: Synthetic oligonucleotide
  Target: LAMA2; (-) strand; PAM type: NRG; PAM sequence: CAG
cttagctctacagtgtatat

SEQ ID NO: 99513 - DNA, 20 bp, Artificial Sequence
  Description of Artificial Sequence: Synthetic oligonucleotide
  Target: LAMA2; (-) strand; PAM type: NRG; PAM sequence: CAG
tttgcaaatccttagctcta

SEQ ID NO: 99514 - DNA, 20 bp, Artificial Sequence
  Description of Artificial Sequence: Synthetic oligonucleotide
  Target: LAMA2; (-) strand; PAM type: NRG; PAM sequence: TAG
acttttcatttgcaaatcct

SEQ ID NO: 99515 - DNA, 20 bp, Artificial Sequence
  Description of Artificial Sequence: Synthetic oligonucleotide
  Target: LAMA2; (-) strand; PAM type: NRG; PAM sequence: GGG
ggatactctttatcactgct

SEQ ID NO: 99516 - DNA, 20 bp, Artificial Sequence
  Description of Artificial Sequence: Synthetic oligonucleotide
  Target: LAMA2; (-) strand; PAM type: NRG; PAM sequence: TGG
cggatactctttatcactgc

SEQ ID NO: 99517 - DNA, 20 bp, Artificial Sequence
  Description of Artificial Sequence: Synthetic oligonucleotide
  Target: LAMA2; (-) strand; PAM type: NRG; PAM sequence: CGG
tctgaaattctcaaattatg

SEQ ID NO: 99518 - DNA, 20 bp, Artificial Sequence
  Description of Artificial Sequence: Synthetic oligonucleotide
  Target: LAMA2; (-) strand; PAM type: NRG; PAM sequence: GGG
tataatgccgtagccacatg

SEQ ID NO: 99519 - DNA, 20 bp, Artificial Sequence
  Description of Artificial Sequence: Synthetic oligonucleotide
  Target: LAMA2; (-) strand; PAM type: NRG; PAM sequence: GGG
atataatgccgtagccacat

SEQ ID NO: 99520 - DNA, 20 bp, Artificial Sequence
  Description of Artificial Sequence: Synthetic oligonucleotide
  Target: LAMA2; (-) strand; PAM type: NRG; PAM sequence: TGG
catataatgccgtagccaca

SEQ ID NO: 99521 - DNA, 20 bp, Artificial Sequence
  Description of Artificial Sequence: Synthetic oligonucleotide
  Target: LAMA2; (-) strand; PAM type: NRG; PAM sequence: TAG
tttctttgcatataatgccg

SEQ ID NO: 99522 - DNA, 20 bp, Artificial Sequence
  Description of Artificial Sequence: Synthetic oligonucleotide
  Target: LAMA2; (-) strand; PAM type: NRG; PAM sequence: TAG
tacccctccatatgtagctg

SEQ ID NO: 99523 - DNA, 20 bp, Artificial Sequence
  Description of Artificial Sequence: Synthetic oligonucleotide
  Target: LAMA2; (-) strand; PAM type: NRG; PAM sequence: TAG
tgtgcttacccctccatatg

SEQ ID NO: 99524 - DNA, 20 bp, Artificial Sequence
  Description of Artificial Sequence: Synthetic oligonucleotide
  Target: LAMA2; (-) strand; PAM type: NRG; PAM sequence: GAG
atcattagcatggcaaggaa

SEQ ID NO: 99525 - DNA, 20 bp, Artificial Sequence
  Description of Artificial Sequence: Synthetic oligonucleotide
  Target: LAMA2; (-) strand; PAM type: NRG; PAM sequence: AAG
aaatcattagcatggcaagg

SEQ ID NO: 99526 - DNA, 20 bp, Artificial Sequence
  Description of Artificial Sequence: Synthetic oligonucleotide
  Target: LAMA2; (-) strand; PAM type: NRG; PAM sequence: AGG
aacaaatcattagcatggca

SEQ ID NO: 99527 - DNA, 20 bp, Artificial Sequence
  Description of Artificial Sequence: Synthetic oligonucleotide
  Target: LAMA2; (-) strand; PAM type: NRG; PAM sequence: AAG
taacaaatcattagcatggc

SEQ ID NO: 99528 - DNA, 20 bp, Artificial Sequence
  Description of Artificial Sequence: Synthetic oligonucleotide
  Target: LAMA2; (-) strand; PAM type: NRG; PAM sequence: TGG
tgaataacaaatcattagca

SEQ ID NO: 99529 - DNA, 20 bp, Artificial Sequence
  Description of Artificial Sequence: Synthetic oligonucleotide
  Target: LAMA2; (-) strand; PAM type: NRG; PAM sequence: TAG
caggatgaataacaaatcat

SEQ ID NO: 99530 - DNA, 20 bp, Artificial Sequence
  Description of Artificial Sequence: Synthetic oligonucleotide
  Target: LAMA2; (-) strand; PAM type: NRG; PAM sequence: AGG
actagctcccaaatgcagtc

SEQ ID NO: 99531 - DNA, 20 bp, Artificial Sequence
  Description of Artificial Sequence: Synthetic oligonucleotide
  Target: LAMA2; (-) strand; PAM type: NRG; PAM sequence: CAG
cactagctcccaaatgcagt

SEQ ID NO: 99532 - DNA, 20 bp, Artificial Sequence
  Description of Artificial Sequence: Synthetic oligonucleotide
  Target: LAMA2; (-) strand; PAM type: NRG; PAM sequence: CAG
cctacactagctcccaaatg

SEQ ID NO: 99533 - DNA, 20 bp, Artificial Sequence
  Description of Artificial Sequence: Synthetic oligonucleotide
  Target: LAMA2; (-) strand; PAM type: NRG; PAM sequence: TAG
tcttgcttgaaagcctacac

SEQ ID NO: 99534 - DNA, 20 bp, Artificial Sequence
  Description of Artificial Sequence: Synthetic oligonucleotide
  Target: LAMA2; (-) strand; PAM type: NRG; PAM sequence: AAG
catgaccttctcttgcttga

SEQ ID NO: 99535 - DNA, 20 bp, Artificial Sequence
  Description of Artificial Sequence: Synthetic oligonucleotide
  Target: LAMA2; (-) strand; PAM type: NRG; PAM sequence: GAG
ggtgatttctccacactgca

SEQ ID NO: 99536 - DNA, 20 bp, Artificial Sequence
  Description of Artificial Sequence: Synthetic oligonucleotide
  Target: LAMA2; (-) strand; PAM type: NRG; PAM sequence: CAG
ctggtgatttctccacactg

SEQ ID NO: 99537 - DNA, 20 bp, Artificial Sequence
  Description of Artificial Sequence: Synthetic oligonucleotide
  Target: LAMA2; (-) strand; PAM type: NRG; PAM sequence: TGG
tgtctccatattttcttatc

SEQ ID NO: 99538 - DNA, 20 bp, Artificial Sequence
  Description of Artificial Sequence: Synthetic oligonucleotide
  Target: LAMA2; (-) strand; PAM type: NRG; PAM sequence: AAG
ttagaatagccttttagcta

SEQ ID NO: 99539 - DNA, 20 bp, Artificial Sequence
  Description of Artificial Sequence: Synthetic oligonucleotide
  Target: LAMA2; (-) strand; PAM type: NRG; PAM sequence: TAG
ggattattagaatagccttt

SEQ ID NO: 99540 - DNA, 20 bp, Artificial Sequence
  Description of Artificial Sequence: Synthetic oligonucleotide
  Target: LAMA2; (-) strand; PAM type: NRG; PAM sequence: TAG
ttttatttggattattagaa

SEQ ID NO: 99541 - DNA, 20 bp, Artificial Sequence
  Description of Artificial Sequence: Synthetic oligonucleotide
  Target: LAMA2; (-) strand; PAM type: NRG; PAM sequence: TAG
tcatattttatttggattat

SEQ ID NO: 99542 - DNA, 20 bp, Artificial Sequence
  Description of Artificial Sequence: Synthetic oligonucleotide
  Target: LAMA2; (-) strand; PAM type: NRG; PAM sequence: TGG
ggccactgtcatattttatt

SEQ ID NO: 99543 - DNA, 20 bp, Artificial Sequence
  Description of Artificial Sequence: Synthetic oligonucleotide
  Target: LAMA2; (-) strand; PAM type: NRG; PAM sequence: TGG
ttgttgctactattttcatc

SEQ ID NO: 99544 - DNA, 20 bp, Artificial Sequence
  Description of Artificial Sequence: Synthetic oligonucleotide
  Target: LAMA2; (-) strand; PAM type: NRG; PAM sequence: GAG
cattagatcatcagttccat

SEQ ID NO: 99545 - DNA, 20 bp, Artificial Sequence
  Description of Artificial Sequence: Synthetic oligonucleotide
  Target: LAMA2; (-) strand; PAM type: NRG; PAM sequence: CAG
cgaggtatccattagatcat

SEQ ID NO: 99546 - DNA, 20 bp, Artificial Sequence
  Description of Artificial Sequence: Synthetic oligonucleotide
  Target: LAMA2; (-) strand; PAM type: NRG; PAM sequence: TAG
ctcttatccgaggtatccat

SEQ ID NO: 99547 - DNA, 20 bp, Artificial Sequence
  Description of Artificial Sequence: Synthetic oligonucleotide
  Target: LAMA2; (-) strand; PAM type: NRG; PAM sequence: AGG
ctagaggcctctcttatccg

SEQ ID NO: 99548 - DNA, 20 bp, Artificial Sequence
  Description of Artificial Sequence: Synthetic oligonucleotide
  Target: LAMA2; (-) strand; PAM type: NRG; PAM sequence: GAG
cctagaggcctctcttatcc

SEQ ID NO: 99549 - DNA, 20 bp, Artificial Sequence
  Description of Artificial Sequence: Synthetic oligonucleotide
  Target: LAMA2; (-) strand; PAM type: NRG; PAM sequence: AGG
tgccaaggtcagcaacctag

SEQ ID NO: 99550 - DNA, 20 bp, Artificial Sequence
  Description of Artificial Sequence: Synthetic oligonucleotide
  Target: LAMA2; (-) strand; PAM type: NRG; PAM sequence: GAG
ttgccaaggtcagcaaccta

SEQ ID NO: 99551 - DNA, 20 bp, Artificial Sequence
  Description of Artificial Sequence: Synthetic oligonucleotide
  Target: LAMA2; (-) strand; PAM type: NRG; PAM sequence: TAG
aattgccaaggtcagcaacc

SEQ ID NO: 99552 - DNA, 20 bp, Artificial Sequence
  Description of Artificial Sequence: Synthetic oligonucleotide
  Target: LAMA2; (-) strand; PAM type: NRG; PAM sequence: CAG
attcactcaattgccaaggt

SEQ ID NO: 99553 - DNA, 20 bp, Artificial Sequence
  Description of Artificial Sequence: Synthetic oligonucleotide
  Target: LAMA2; (-) strand; PAM type: NRG; PAM sequence: AGG
tgtcattcactcaattgcca

SEQ ID NO: 99554 - DNA, 20 bp, Artificial Sequence
  Description of Artificial Sequence: Synthetic oligonucleotide
  Target: LAMA2; (-) strand; PAM type: NRG; PAM sequence: AAG
ctgtcattcactcaattgcc

SEQ ID NO: 99555 - DNA, 20 bp, Artificial Sequence
  Description of Artificial Sequence: Synthetic oligonucleotide
  Target: LAMA2; (-) strand; PAM type: NRG; PAM sequence: AGG
tgtatttctcgtttcatctg

SEQ ID NO: 99556 - DNA, 20 bp, Artificial Sequence
  Description of Artificial Sequence: Synthetic oligonucleotide
  Target: LAMA2; (-) strand; PAM type: NRG; PAM sequence: GAG
ctgtatttctcgtttcatct

SEQ ID NO: 99557 - DNA, 20 bp, Artificial Sequence
  Description of Artificial Sequence: Synthetic oligonucleotide
  Target: LAMA2; (-) strand; PAM type: NRG; PAM sequence: AAG
aatttgaaatgacaacaatg

SEQ ID NO: 99558 - DNA, 20 bp, Artificial Sequence
  Description of Artificial Sequence: Synthetic oligonucleotide
  Target: LAMA2; (-) strand; PAM type: NRG; PAM sequence: AAG
ataaatattgtataacacag

SEQ ID NO: 99559 - DNA, 20 bp, Artificial Sequence
  Description of Artificial Sequence: Synthetic oligonucleotide
  Target: LAMA2; (-) strand; PAM type: NRG; PAM sequence: CAG
tgaataaatattgtataaca

SEQ ID NO: 99560 - DNA, 20 bp, Artificial Sequence
  Description of Artificial Sequence: Synthetic oligonucleotide
  Target: LAMA2; (-) strand; PAM type: NRG; PAM sequence: CAG
tggatatctctaatgggttc

SEQ ID NO: 99561 - DNA, 20 bp, Artificial Sequence
  Description of Artificial Sequence: Synthetic oligonucleotide
  Target: LAMA2; (-) strand; PAM type: NRG; PAM sequence: GGG
tcagcctggatatctctaat

SEQ ID NO: 99562 - DNA, 20 bp, Artificial Sequence
  Description of Artificial Sequence: Synthetic oligonucleotide
  Target: LAMA2; (-) strand; PAM type: NRG; PAM sequence: TGG
ttcagcctggatatctctaa

SEQ ID NO: 99563 - DNA, 20 bp, Artificial Sequence
  Description of Artificial Sequence: Synthetic oligonucleotide
  Target: LAMA2; (-) strand; PAM type: NRG; PAM sequence: TGG
tgtattttatgtattcagcc

SEQ ID NO: 99564 - DNA, 20 bp, Artificial Sequence
  Description of Artificial Sequence: Synthetic oligonucleotide
  Target: LAMA2; (-) strand; PAM type: NRG; PAM sequence: CAG
aactctgtattttatgtatt

SEQ ID NO: 99565 - DNA, 20 bp, Artificial Sequence
  Description of Artificial Sequence: Synthetic oligonucleotide
  Target: LAMA2; (-) strand; PAM type: NRG; PAM sequence: TGG
attactatgacttcagttaa

SEQ ID NO: 99566 - DNA, 20 bp, Artificial Sequence
  Description of Artificial Sequence: Synthetic oligonucleotide
  Target: LAMA2; (-) strand; PAM type: NRG; PAM sequence: CAG
ttcatccattactatgactt

SEQ ID NO: 99567 - DNA, 20 bp, Artificial Sequence
  Description of Artificial Sequence: Synthetic oligonucleotide
  Target: LAMA2; (-) strand; PAM type: NRG; PAM sequence: TGG
tttctcctccacatttacct

SEQ ID NO: 99568 - DNA, 20 bp, Artificial Sequence
  Description of Artificial Sequence: Synthetic oligonucleotide
  Target: LAMA2; (-) strand; PAM type: NRG; PAM sequence: TGG
gacgcccttaattctaactt

SEQ ID NO: 99569 - DNA, 20 bp, Artificial Sequence
  Description of Artificial Sequence: Synthetic oligonucleotide
  Target: LAMA2; (-) strand; PAM type: NRG; PAM sequence: CGG
tgatgtttctcctacttctg

SEQ ID NO: 99570 - DNA, 20 bp, Artificial Sequence
  Description of Artificial Sequence: Synthetic oligonucleotide
  Target: LAMA2; (-) strand; PAM type: NRG; PAM sequence: CAG
tggcttctttaagagtaagc

SEQ ID NO: 99571 - DNA, 20 bp, Artificial Sequence
  Description of Artificial Sequence: Synthetic oligonucleotide
  Target: LAMA2; (-) strand; PAM type: NRG; PAM sequence: AAG
cccatggcttctttaagagt

SEQ ID NO: 99572 - DNA, 20 bp, Artificial Sequence
  Description of Artificial Sequence: Synthetic oligonucleotide
  Target: LAMA2; (-) strand; PAM type: NRG; PAM sequence: GAG
agcccccatggcttctttaa

SEQ ID NO: 99573 - DNA, 20 bp, Artificial Sequence
  Description of Artificial Sequence: Synthetic oligonucleotide
  Target: LAMA2; (-) strand; PAM type: NRG; PAM sequence: AAG
ccagcccccatggcttcttt

SEQ ID NO: 99574 - DNA, 20 bp, Artificial Sequence
  Description of Artificial Sequence: Synthetic oligonucleotide
  Target: LAMA2; (-) strand; PAM type: NRG; PAM sequence: TGG
gctgccgtgcccagccccca

SEQ ID NO: 99575 - DNA, 20 bp, Artificial Sequence
  Description of Artificial Sequence: Synthetic oligonucleotide
  Target: LAMA2; (-) strand; PAM type: NRG; PAM sequence: CAG
caggcgggagctgccgtgcc

SEQ ID NO: 99576 - DNA, 20 bp, Artificial Sequence
  Description of Artificial Sequence: Synthetic oligonucleotide
  Target: LAMA2; (-) strand; PAM type: NRG; PAM sequence: GAG
agtgttgggattacaggcgg

SEQ ID NO: 99577 - DNA, 20 bp, Artificial Sequence
  Description of Artificial Sequence: Synthetic oligonucleotide
  Target: LAMA2; (-) strand; PAM type: NRG; PAM sequence: GGG
aaagtgttgggattacaggc

SEQ ID NO: 99578 - DNA, 20 bp, Artificial Sequence
  Description of Artificial Sequence: Synthetic oligonucleotide
  Target: LAMA2; (-) strand; PAM type: NRG; PAM sequence: CGG
caaagtgttgggattacagg

SEQ ID NO: 99579 - DNA, 20 bp, Artificial Sequence
  Description of Artificial Sequence: Synthetic oligonucleotide
  Target: LAMA2; (-) strand; PAM type: NRG; PAM sequence: AGG
tcccaaagtgttgggattac

SEQ ID NO: 99580 - DNA, 20 bp, Artificial Sequence
  Description of Artificial Sequence: Synthetic oligonucleotide
  Target: LAMA2; (-) strand; PAM type: NRG; PAM sequence: CAG
ctcccaaagtgttgggatta

SEQ ID NO: 99581 - DNA, 20 bp, Artificial Sequence
  Description of Artificial Sequence: Synthetic oligonucleotide
  Target: LAMA2; (-) strand; PAM type: NRG; PAM sequence: GGG
ccctggcctcccaaagtgtt

SEQ ID NO: 99582 - DNA, 20 bp, Artificial Sequence
  Description of Artificial Sequence: Synthetic oligonucleotide
  Target: LAMA2; (-) strand; PAM type: NRG; PAM sequence: TGG
gccctggcctcccaaagtgt

SEQ ID NO: 99583 - DNA, 20 bp, Artificial Sequence
  Description of Artificial Sequence: Synthetic oligonucleotide
  Target: LAMA2; (-) strand; PAM type: NRG; PAM sequence: AAG
ctgcctgccctggcctccca

SEQ ID NO: 99584 - DNA, 20 bp, Artificial Sequence
  Description of Artificial Sequence: Synthetic oligonucleotide
  Target: LAMA2; (-) strand; PAM type: NRG; PAM sequence: TGG
accccgtgatctgcctgccc

SEQ ID NO: 99585 - DNA, 20 bp, Artificial Sequence
  Description of Artificial Sequence: Synthetic oligonucleotide
  Target: LAMA2; (-) strand; PAM type: NRG; PAM sequence: AGG
ggggtttcaccatgctggcc

SEQ ID NO: 99586 - DNA, 20 bp, Artificial Sequence
  Description of Artificial Sequence: Synthetic oligonucleotide
  Target: LAMA2; (-) strand; PAM type: NRG; PAM sequence: CAG
cggggtttcaccatgctggc

SEQ ID NO: 99587 - DNA, 20 bp, Artificial Sequence
  Description of Artificial Sequence: Synthetic oligonucleotide
  Target: LAMA2; (-) strand; PAM type: NRG; PAM sequence: TGG
aagacggggtttcaccatgc

SEQ ID NO: 99588 - DNA, 20 bp, Artificial Sequence
  Description of Artificial Sequence: Synthetic oligonucleotide
  Target: LAMA2; (-) strand; PAM type: NRG; PAM sequence: GGG
tcgtattttcagtaaagacg

SEQ ID NO: 99589 - DNA, 20 bp, Artificial Sequence
  Description of Artificial Sequence: Synthetic oligonucleotide
  Target: LAMA2; (-) strand; PAM type: NRG; PAM sequence: GGG
ttcgtattttcagtaaagac

SEQ ID NO: 99590 - DNA, 20 bp, Artificial Sequence
  Description of Artificial Sequence: Synthetic oligonucleotide
  Target: LAMA2; (-) strand; PAM type: NRG; PAM sequence: CGG
tttcgtattttcagtaaaga

SEQ ID NO: 99591 - DNA, 20 bp, Artificial Sequence
  Description of Artificial Sequence: Synthetic oligonucleotide
  Target: LAMA2; (-) strand; PAM type: NRG; PAM sequence: AAG
taattttcgtattttcagta

SEQ ID NO: 99592 - DNA, 20 bp, Artificial Sequence
  Description of Artificial Sequence: Synthetic oligonucleotide
  Target: LAMA2; (-) strand; PAM type: NRG; PAM sequence: CAG
ccagttaattttcgtatttt

SEQ ID NO: 99593 - DNA, 20 bp, Artificial Sequence
  Description of Artificial Sequence: Synthetic oligonucleotide
  Target: LAMA2; (-) strand; PAM type: NRG; PAM sequence: CAG
caggcatgcgtaaccatgcc

SEQ ID NO: 99594 - DNA, 20 bp, Artificial Sequence
  Description of Artificial Sequence: Synthetic oligonucleotide
  Target: LAMA2; (-) strand; PAM type: NRG; PAM sequence: AGG
tcctgagtagctgagattac

SEQ ID NO: 99595 - DNA, 20 bp, Artificial Sequence
  Description of Artificial Sequence: Synthetic oligonucleotide
  Target: LAMA2; (-) strand; PAM type: NRG; PAM sequence: CAG
ctcctgagtagctgagatta

SEQ ID NO: 99596 - DNA, 20 bp, Artificial Sequence
  Description of Artificial Sequence: Synthetic oligonucleotide
  Target: LAMA2; (-) strand; PAM type: NRG; PAM sequence: GAG
cctcagcctcctgagtagct

SEQ ID NO: 99597 - DNA, 20 bp, Artificial Sequence
  Description of Artificial Sequence: Synthetic oligonucleotide
  Target: LAMA2; (-) strand; PAM type: NRG; PAM sequence: TAG
tcctgcctcagcctcctgag

SEQ ID NO: 99598 - DNA, 20 bp, Artificial Sequence
  Description of Artificial Sequence: Synthetic oligonucleotide
  Target: LAMA2; (-) strand; PAM type: NRG; PAM sequence: GAG
ttctcctgcctcagcctcct

SEQ ID NO: 99599 - DNA, 20 bp, Artificial Sequence
  Description of Artificial Sequence: Synthetic oligonucleotide
  Target: LAMA2; (-) strand; PAM type: NRG; PAM sequence: CAG
ttcaagcgattctcctgcct

SEQ ID NO: 99600 - DNA, 20 bp, Artificial Sequence
  Description of Artificial Sequence: Synthetic oligonucleotide
  Target: LAMA2; (-) strand; PAM type: NRG; PAM sequence: AAG
aacctctgcctcccaggttc

SEQ ID NO: 99601 - DNA, 20 bp, Artificial Sequence
  Description of Artificial Sequence: Synthetic oligonucleotide
  Target: LAMA2; (-) strand; PAM type: NRG; PAM sequence: AGG
cactgcaacctctgcctccc

SEQ ID NO: 99602 - DNA, 20 bp, Artificial Sequence
  Description of Artificial Sequence: Synthetic oligonucleotide
  Target: LAMA2; (-) strand; PAM type: NRG; PAM sequence: CAG
tcactgcaacctctgcctcc

SEQ ID NO: 99603 - DNA, 20 bp, Artificial Sequence
  Description of Artificial Sequence: Synthetic oligonucleotide
  Target: LAMA2; (-) strand; PAM type: NRG; PAM sequence: CAG
ggagtgcagtggcaccatct

SEQ ID NO: 99604 - DNA, 20 bp, Artificial Sequence
  Description of Artificial Sequence: Synthetic oligonucleotide
  Target: LAMA2; (-) strand; PAM type: NRG; PAM sequence: TGG
gtagtcaggctggagtgcag

SEQ ID NO: 99605 - DNA, 20 bp, Artificial Sequence
  Description of Artificial Sequence: Synthetic oligonucleotide
  Target: LAMA2; (-) strand; PAM type: NRG; PAM sequence: CAG
tctgtagtcaggctggagtg

SEQ ID NO: 99606 - DNA, 20 bp, Artificial Sequence
  Description of Artificial Sequence: Synthetic oligonucleotide
  Target: LAMA2; (-) strand; PAM type: NRG; PAM sequence: GAG
ctcgctctgtagtcaggctg

SEQ ID NO: 99607 - DNA, 20 bp, Artificial Sequence
  Description of Artificial Sequence: Synthetic oligonucleotide
  Target: LAMA2; (-) strand; PAM type: NRG; PAM sequence: TGG
gtctcgctctgtagtcaggc

SEQ ID NO: 99608 - DNA, 20 bp, Artificial Sequence
  Description of Artificial Sequence: Synthetic oligonucleotide
  Target: LAMA2; (-) strand; PAM type: NRG; PAM sequence: AGG
gacagtctcgctctgtagtc

SEQ ID NO: 99609 - DNA, 20 bp, Artificial Sequence
  Description of Artificial Sequence: Synthetic oligonucleotide
  Target: LAMA2; (-) strand; PAM type: NRG; PAM sequence: CAG
agacagtctcgctctgtagt

SEQ ID NO: 99610 - DNA, 20 bp, Artificial Sequence
  Description of Artificial Sequence: Synthetic oligonucleotide
  Target: LAMA2; (-) strand; PAM type: NRG; PAM sequence: TAG
tttgagacagtctcgctctg

SEQ ID NO: 99611 - DNA, 20 bp, Artificial Sequence
  Description of Artificial Sequence: Synthetic oligonucleotide
  Target: LAMA2; (-) strand; PAM type: NRG; PAM sequence: CAG
tcttttttttttttttgaga

SEQ ID NO: 99612 - DNA, 20 bp, Artificial Sequence
  Description of Artificial Sequence: Synthetic oligonucleotide
  Target: LAMA2; (-) strand; PAM type: NRG; PAM sequence: GAG
tctttctttttttttttttt

SEQ ID NO: 99613 - DNA, 20 bp, Artificial Sequence
  Description of Artificial Sequence: Synthetic oligonucleotide
  Target: LAMA2; (-) strand; PAM type: NRG; PAM sequence: TGG
ttctggatactctcttccca

SEQ ID NO: 99614 - DNA, 20 bp, Artificial Sequence
  Description of Artificial Sequence: Synthetic oligonucleotide
  Target: LAMA2; (-) strand; PAM type: NRG; PAM sequence: TGG
tagccattgatagatatttc

SEQ ID NO: 99615 - DNA, 20 bp, Artificial Sequence
  Description of Artificial Sequence: Synthetic oligonucleotide
  Target: LAMA2; (-) strand; PAM type: NRG; PAM sequence: TAG
aggttttctgtagccattga

SEQ ID NO: 99616 - DNA, 20 bp, Artificial Sequence
  Description of Artificial Sequence: Synthetic oligonucleotide
  Target: LAMA2; (-) strand; PAM type: NRG; PAM sequence: TAG
cctcatatgtaggttttctg

SEQ ID NO: 99617 - DNA, 20 bp, Artificial Sequence
  Description of Artificial Sequence: Synthetic oligonucleotide
  Target: LAMA2; (-) strand; PAM type: NRG; PAM sequence: AGG
aatcatcaggcctcatatgt

SEQ ID NO: 99618 - DNA, 20 bp, Artificial Sequence
  Description of Artificial Sequence: Synthetic oligonucleotide
  Target: LAMA2; (-) strand; PAM type: NRG; PAM sequence: TAG
caatcatcaggcctcatatg

SEQ ID NO: 99619 - DNA, 20 bp, Artificial Sequence
  Description of Artificial Sequence: Synthetic oligonucleotide
  Target: LAMA2; (-) strand; PAM type: NRG; PAM sequence: AGG
aagcaaaacttacaatcatc

SEQ ID NO: 99620 - DNA, 20 bp, Artificial Sequence
  Description of Artificial Sequence: Synthetic oligonucleotide
  Target: LAMA2; (-) strand; PAM type: NRG; PAM sequence: CAG
aaagcaaaacttacaatcat

SEQ ID NO: 99621 - DNA, 20 bp, Artificial Sequence
  Description of Artificial Sequence: Synthetic oligonucleotide
  Target: LAMA2; (-) strand; PAM type: NRG; PAM sequence: AAG
ccataagatctttgttgcta

SEQ ID NO: 99622 - DNA, 20 bp, Artificial Sequence
  Description of Artificial Sequence: Synthetic oligonucleotide
  Target: LAMA2; (-) strand; PAM type: NRG; PAM sequence: AAG
ataataccaggatgacccat

SEQ ID NO: 99623 - DNA, 20 bp, Artificial Sequence
  Description of Artificial Sequence: Synthetic oligonucleotide
  Target: LAMA2; (-) strand; PAM type: NRG; PAM sequence: AGG
tcaccattaaacataatacc

SEQ ID NO: 99624 - DNA, 20 bp, Artificial Sequence
  Description of Artificial Sequence: Synthetic oligonucleotide
  Target: LAMA2; (-) strand; PAM type: NRG; PAM sequence: CAG
ttcaccattaaacataatac

SEQ ID NO: 99625 - DNA, 20 bp, Artificial Sequence
  Description of Artificial Sequence: Synthetic oligonucleotide
  Target: LAMA2; (-) strand; PAM type: NRG; PAM sequence: TGG
tctccctttaaacaggcttc

SEQ ID NO: 99626 - DNA, 20 bp, Artificial Sequence
  Description of Artificial Sequence: Synthetic oligonucleotide
  Target: LAMA2; (-) strand; PAM type: NRG; PAM sequence: AGG
ctcccattctccctttaaac

SEQ ID NO: 99627 - DNA, 20 bp, Artificial Sequence
  Description of Artificial Sequence: Synthetic oligonucleotide
  Target: LAMA2; (-) strand; PAM type: NRG; PAM sequence: CAG
tctcccattctccctttaaa

SEQ ID NO: 99628 - DNA, 20 bp, Artificial Sequence
  Description of Artificial Sequence: Synthetic oligonucleotide
  Target: LAMA2; (-) strand; PAM type: NRG; PAM sequence: TGG
aaagacattgtttacattcc

SEQ ID NO: 99629 - DNA, 20 bp, Artificial Sequence
  Description of Artificial Sequence: Synthetic oligonucleotide
  Target: LAMA2; (-) strand; PAM type: NRG; PAM sequence: AAG
attttcgataagcttttaaa

SEQ ID NO: 99630 - DNA, 20 bp, Artificial Sequence
  Description of Artificial Sequence: Synthetic oligonucleotide
  Target: LAMA2; (-) strand; PAM type: NRG; PAM sequence: AAG
atttctatcctattttcgat

SEQ ID NO: 99631 - DNA, 20 bp, Artificial Sequence
  Description of Artificial Sequence: Synthetic oligonucleotide
  Target: LAMA2; (-) strand; PAM type: NRG; PAM sequence: AGG
tcttaaaaaaaaaatctgtg

SEQ ID NO: 99632 - DNA, 20 bp, Artificial Sequence
  Description of Artificial Sequence: Synthetic oligonucleotide
  Target: LAMA2; (-) strand; PAM type: NRG; PAM sequence: GAG
gtcttaaaaaaaaaatctgt

SEQ ID NO: 99633 - DNA, 20 bp, Artificial Sequence
  Description of Artificial Sequence: Synthetic oligonucleotide
  Target: LAMA2; (-) strand; PAM type: NRG; PAM sequence: AAG
attaatatttgaaattggtc

SEQ ID NO: 99634 - DNA, 20 bp, Artificial Sequence
  Description of Artificial Sequence: Synthetic oligonucleotide
  Target: LAMA2; (-) strand; PAM type: NRG; PAM sequence: TGG
ttctcattaatatttgaaat

SEQ ID NO: 99635 - DNA, 20 bp, Artificial Sequence
  Description of Artificial Sequence: Synthetic oligonucleotide
  Target: LAMA2; (-) strand; PAM type: NRG; PAM sequence: AGG
atctttattccctcctttgc

SEQ ID NO: 99636 - DNA, 20 bp, Artificial Sequence
  Description of Artificial Sequence: Synthetic oligonucleotide
  Target: LAMA2; (-) strand; PAM type: NRG; PAM sequence: CAG
catctttattccctcctttg

SEQ ID NO: 99637 - DNA, 20 bp, Artificial Sequence
  Description of Artificial Sequence: Synthetic oligonucleotide
  Target: LAMA2; (-) strand; PAM type: NRG; PAM sequence: TGG
aagctactccactcctaaat

SEQ ID NO: 99638 - DNA, 20 bp, Artificial Sequence
  Description of Artificial Sequence: Synthetic oligonucleotide
  Target: LAMA2; (-) strand; PAM type: NRG; PAM sequence: AAG
ttgtttccgtcctttgtctg

SEQ ID NO: 99639 - DNA, 20 bp, Artificial Sequence
  Description of Artificial Sequence: Synthetic oligonucleotide
  Target: LAMA2; (-) strand; PAM type: NRG; PAM sequence: CAG
tggtttcctggcaaacaatt

SEQ ID NO: 99640 - DNA, 20 bp, Artificial Sequence
  Description of Artificial Sequence: Synthetic oligonucleotide
  Target: LAMA2; (-) strand; PAM type: NRG; PAM sequence: TGG
tggatgctcccttggtttcc

SEQ ID NO: 99641 - DNA, 20 bp, Artificial Sequence
  Description of Artificial Sequence: Synthetic oligonucleotide
  Target: LAMA2; (-) strand; PAM type: NRG; PAM sequence: TGG
ctctaatttggatgctccct

SEQ ID NO: 99642 - DNA, 20 bp, Artificial Sequence
  Description of Artificial Sequence: Synthetic oligonucleotide
  Target: LAMA2; (-) strand; PAM type: NRG; PAM sequence: TGG
gagataagaaagctctaatt

SEQ ID NO: 99643 - DNA, 20 bp, Artificial Sequence
  Description of Artificial Sequence: Synthetic oligonucleotide
  Target: LAMA2; (-) strand; PAM type: NRG; PAM sequence: AAG
ccctactttaagagataaga

SEQ ID NO: 99644 - DNA, 20 bp, Artificial Sequence
  Description of Artificial Sequence: Synthetic oligonucleotide
  Target: LAMA2; (-) strand; PAM type: NRG; PAM sequence: AAG
cttaccctactttaagagat

SEQ ID NO: 99645 - DNA, 20 bp, Artificial Sequence
  Description of Artificial Sequence: Synthetic oligonucleotide
  Target: LAMA2; (-) strand; PAM type: NRG; PAM sequence: GAG
tacaccttaccctactttaa

SEQ ID NO: 99646 - DNA, 20 bp, Artificial Sequence
  Description of Artificial Sequence: Synthetic oligonucleotide
  Target: LAMA2; (-) strand; PAM type: NRG; PAM sequence: AAG
tctacaccttaccctacttt

SEQ ID NO: 99647 - DNA, 20 bp, Artificial Sequence
  Description of Artificial Sequence: Synthetic oligonucleotide
  Target: LAMA2; (-) strand; PAM type: NRG; PAM sequence: CAG
cctcagcctcccaacgtgcc

SEQ ID NO: 99648 - DNA, 20 bp, Artificial Sequence
  Description of Artificial Sequence: Synthetic oligonucleotide
  Target: LAMA2; (-) strand; PAM type: NRG; PAM sequence: CAG
ctcaggtgatccacccacct

SEQ ID NO: 99649 - DNA, 20 bp, Artificial Sequence
  Description of Artificial Sequence: Synthetic oligonucleotide
  Target: LAMA2; (-) strand; PAM type: NRG; PAM sequence: AGG
ggtcttgaactcctgacctc

SEQ ID NO: 99650 - DNA, 20 bp, Artificial Sequence
  Description of Artificial Sequence: Synthetic oligonucleotide
  Target: LAMA2; (-) strand; PAM type: NRG; PAM sequence: CAG
tggtcttgaactcctgacct

SEQ ID NO: 99651 - DNA, 20 bp, Artificial Sequence
  Description of Artificial Sequence: Synthetic oligonucleotide
  Target: LAMA2; (-) strand; PAM type: NRG; PAM sequence: TGG
tttcaccatgttggccaggc

SEQ ID NO: 99652 - DNA, 20 bp, Artificial Sequence
  Description of Artificial Sequence: Synthetic oligonucleotide
  Target: LAMA2; (-) strand; PAM type: NRG; PAM sequence: AGG
ggggtttcaccatgttggcc

SEQ ID NO: 99653 - DNA, 20 bp, Artificial Sequence
  Description of Artificial Sequence: Synthetic oligonucleotide
  Target: LAMA2; (-) strand; PAM type: NRG; PAM sequence: CAG
tggggtttcaccatgttggc

SEQ ID NO: 99654 - DNA, 20 bp, Artificial Sequence
  Description of Artificial Sequence: Synthetic oligonucleotide
  Target: LAMA2; (-) strand; PAM type: NRG; PAM sequence: TGG
gagatggggtttcaccatgt

SEQ ID NO: 99655 - DNA, 20 bp, Artificial Sequence
  Description of Artificial Sequence: Synthetic oligonucleotide
  Target: LAMA2; (-) strand; PAM type: NRG; PAM sequence: GGG
ttgtatttttagtagagatg

SEQ ID NO: 99656 - DNA, 20 bp, Artificial Sequence
  Description of Artificial Sequence: Synthetic oligonucleotide
  Target: LAMA2; (-) strand; PAM type: NRG; PAM sequence: GGG
tttgtatttttagtagagat

SEQ ID NO: 99657 - DNA, 20 bp, Artificial Sequence
  Description of Artificial Sequence: Synthetic oligonucleotide
  Target: LAMA2; (-) strand; PAM type: NRG; PAM sequence: TGG
ttttgtatttttagtagaga

SEQ ID NO: 99658 - DNA, 20 bp, Artificial Sequence
  Description of Artificial Sequence: Synthetic oligonucleotide
  Target: LAMA2; (-) strand; PAM type: NRG; PAM sequence: GAG
aattttttgtatttttagta

SEQ ID NO: 99659 - DNA, 20 bp, Artificial Sequence
  Description of Artificial Sequence: Synthetic oligonucleotide
  Target: LAMA2; (-) strand; PAM type: NRG; PAM sequence: TAG
ctaattttttgtatttttag

SEQ ID NO: 99660 - DNA, 20 bp, Artificial Sequence
  Description of Artificial Sequence: Synthetic oligonucleotide
  Target: LAMA2; (-) strand; PAM type: NRG; PAM sequence: TAG
aggctaattttttgtatttt

SEQ ID NO: 99661 - DNA, 20 bp, Artificial Sequence
  Description of Artificial Sequence: Synthetic oligonucleotide
  Target: LAMA2; (-) strand; PAM type: NRG; PAM sequence: AGG
caggcacataccaccacgcc

SEQ ID NO: 99662 - DNA, 20 bp, Artificial Sequence
  Description of Artificial Sequence: Synthetic oligonucleotide
  Target: LAMA2; (-) strand; PAM type: NRG; PAM sequence: CAG
acaggcacataccaccacgc

SEQ ID NO: 99663 - DNA, 20 bp, Artificial Sequence
  Description of Artificial Sequence: Synthetic oligonucleotide
  Target: LAMA2; (-) strand; PAM type: NRG; PAM sequence: AGG
tcccgagtagctggtactac

SEQ ID NO: 99664 - DNA, 20 bp, Artificial Sequence
  Description of Artificial Sequence: Synthetic oligonucleotide
  Target: LAMA2; (-) strand; PAM type: NRG; PAM sequence: CAG
ttcccgagtagctggtacta

SEQ ID NO: 99665 - DNA, 20 bp, Artificial Sequence
  Description of Artificial Sequence: Synthetic oligonucleotide
  Target: LAMA2; (-) strand; PAM type: NRG; PAM sequence: TGG
gcctcaccttcccgagtagc

SEQ ID NO: 99666 - DNA, 20 bp, Artificial Sequence
  Description of Artificial Sequence: Synthetic oligonucleotide
  Target: LAMA2; (-) strand; PAM type: NRG; PAM sequence: TAG
tcctgcctcaccttcccgag

SEQ ID NO: 99667 - DNA, 20 bp, Artificial Sequence
  Description of Artificial Sequence: Synthetic oligonucleotide
  Target: LAMA2; (-) strand; PAM type: NRG; PAM sequence: GAG
ttctcctgcctcaccttccc

SEQ ID NO: 99668 - DNA, 20 bp, Artificial Sequence
  Description of Artificial Sequence: Synthetic oligonucleotide
  Target: LAMA2; (-) strand; PAM type: NRG; PAM sequence: GGG
acctctgcctcctgaataaa

SEQ ID NO: 99669 - DNA, 20 bp, Artificial Sequence
  Description of Artificial Sequence: Synthetic oligonucleotide
  Target: LAMA2; (-) strand; PAM type: NRG; PAM sequence: AGG
aacctctgcctcctgaataa

SEQ ID NO: 99670 - DNA, 20 bp, Artificial Sequence
  Description of Artificial Sequence: Synthetic oligonucleotide
  Target: LAMA2; (-) strand; PAM type: NRG; PAM sequence: AAG
caacctctgcctcctgaata

SEQ ID NO: 99671 - DNA, 20 bp, Artificial Sequence
  Description of Artificial Sequence: Synthetic oligonucleotide
  Target: LAMA2; (-) strand; PAM type: NRG; PAM sequence: TGG
ggagtgcagtggcaccatct

SEQ ID NO: 99672 - DNA, 20 bp, Artificial Sequence
  Description of Artificial Sequence: Synthetic oligonucleotide
  Target: LAMA2; (-) strand; PAM type: NRG; PAM sequence: TGG
tcgcccaggctggagtgcag

SEQ ID NO: 99673 - DNA, 20 bp, Artificial Sequence
  Description of Artificial Sequence: Synthetic oligonucleotide
  Target: LAMA2; (-) strand; PAM type: NRG; PAM sequence: CAG
ctgtcgcccaggctggagtg

SEQ ID NO: 99674 - DNA, 20 bp, Artificial Sequence
  Description of Artificial Sequence: Synthetic oligonucleotide
  Target: LAMA2; (-) strand; PAM type: NRG; PAM sequence: GAG
gagctctgtcgcccaggctg

SEQ ID NO: 99675 - DNA, 20 bp, Artificial Sequence
  Description of Artificial Sequence: Synthetic oligonucleotide
  Target: LAMA2; (-) strand; PAM type: NRG; PAM sequence: TGG
cagagctctgtcgcccaggc

SEQ ID NO: 99676 - DNA, 20 bp, Artificial Sequence
  Description of Artificial Sequence: Synthetic oligonucleotide
  Target: LAMA2; (-) strand; PAM type: NRG; PAM sequence: AGG
gagacagagctctgtcgccc

SEQ ID NO: 99677 - DNA, 20 bp, Artificial Sequence
  Description of Artificial Sequence: Synthetic oligonucleotide
  Target: LAMA2; (-) strand; PAM type: NRG; PAM sequence: CAG
tgagacagagctctgtcgcc

SEQ ID NO: 99678 - DNA, 20 bp, Artificial Sequence
  Description of Artificial Sequence: Synthetic oligonucleotide
  Target: LAMA2; (-) strand; PAM type: NRG; PAM sequence: GAG
ttttttttttttttgagaca

SEQ ID NO: 99679 - DNA, 20 bp, Artificial Sequence
  Description of Artificial Sequence: Synthetic oligonucleotide
  Target: LAMA2; (-) strand; PAM type: NRG; PAM sequence: CAG
ttttttttttttttttgaga

SEQ ID NO: 99680 - DNA, 20 bp, Artificial Sequence
  Description of Artificial Sequence: Synthetic oligonucleotide
  Target: LAMA2; (-) strand; PAM type: NRG; PAM sequence: GAG
tttttttttttttttttttt

SEQ ID NO: 99681 - DNA, 20 bp, Artificial Sequence
  Description of Artificial Sequence: Synthetic oligonucleotide
  Target: LAMA2; (-) strand; PAM type: NRG; PAM sequence: AAG
tttccaatatgacaaggtac

SEQ ID NO: 99682 - DNA, 20 bp, Artificial Sequence
  Description of Artificial Sequence: Synthetic oligonucleotide
  Target: LAMA2; (-) strand; PAM type: NRG; PAM sequence: AGG
tctggttttccaatatgaca

SEQ ID NO: 99683 - DNA, 20 bp, Artificial Sequence
  Description of Artificial Sequence: Synthetic oligonucleotide
  Target: LAMA2; (-) strand; PAM type: NRG; PAM sequence: AAG
atctggttttccaatatgac

SEQ ID NO: 99684 - DNA, 20 bp, Artificial Sequence
  Description of Artificial Sequence: Synthetic oligonucleotide
  Target: LAMA2; (-) strand; PAM type: NRG; PAM sequence: TGG
ataacaatgtgaaatgaatc

SEQ ID NO: 99685 - DNA, 20 bp, Artificial Sequence
  Description of Artificial Sequence: Synthetic oligonucleotide
  Target: LAMA2; (-) strand; PAM type: NRG; PAM sequence: CAG
aaattatattgtgacattta

SEQ ID NO: 99686 - DNA, 20 bp, Artificial Sequence
  Description of Artificial Sequence: Synthetic oligonucleotide
  Target: LAMA2; (-) strand; PAM type: NRG; PAM sequence: TGG
tcatttattttttacatttt

SEQ ID NO: 99687 - DNA, 20 bp, Artificial Sequence
  Description of Artificial Sequence: Synthetic oligonucleotide
  Target: LAMA2; (-) strand; PAM type: NRG; PAM sequence: TAG
gacattgccacagtgaattt

SEQ ID NO: 99688 - DNA, 20 bp, Artificial Sequence
  Description of Artificial Sequence: Synthetic oligonucleotide
  Target: LAMA2; (-) strand; PAM type: NRG; PAM sequence: CAG
gtgaaactatgacattgcca

SEQ ID NO: 99689 - DNA, 20 bp, Artificial Sequence
  Description of Artificial Sequence: Synthetic oligonucleotide
  Target: LAMA2; (-) strand; PAM type: NRG; PAM sequence: CAG
agagtttatgctatttcttg

SEQ ID NO: 99690 - DNA, 20 bp, Artificial Sequence
  Description of Artificial Sequence: Synthetic oligonucleotide
  Target: LAMA2; (-) strand; PAM type: NRG; PAM sequence: GAG
cttctattaactctttttga

SEQ ID NO: 99691 - DNA, 20 bp, Artificial Sequence
  Description of Artificial Sequence: Synthetic oligonucleotide
  Target: LAMA2; (-) strand; PAM type: NRG; PAM sequence: GAG
aacttctattaactcttttt

SEQ ID NO: 99692 - DNA, 20 bp, Artificial Sequence
  Description of Artificial Sequence: Synthetic oligonucleotide
  Target: LAMA2; (-) strand; PAM type: NRG; PAM sequence: TGG
ttccaccacagatattgcca

SEQ ID NO: 99693 - DNA, 20 bp, Artificial Sequence
  Description of Artificial Sequence: Synthetic oligonucleotide
  Target: LAMA2; (-) strand; PAM type: NRG; PAM sequence: CAG
agctgacgtcatttccacca

SEQ ID NO: 99694 - DNA, 20 bp, Artificial Sequence
  Description of Artificial Sequence: Synthetic oligonucleotide
  Target: LAMA2; (-) strand; PAM type: NRG; PAM sequence: TAG
tggcaattcacaacaaacaa

SEQ ID NO: 99695 - DNA, 20 bp, Artificial Sequence
  Description of Artificial Sequence: Synthetic oligonucleotide
  Target: LAMA2; (-) strand; PAM type: NRG; PAM sequence: TGG
aattgttggtagggaatgtg

SEQ ID NO: 99696 - DNA, 20 bp, Artificial Sequence
  Description of Artificial Sequence: Synthetic oligonucleotide
  Target: LAMA2; (-) strand; PAM type: NRG; PAM sequence: GGG
tggccagacaattgttggta

SEQ ID NO: 99697 - DNA, 20 bp, Artificial Sequence
  Description of Artificial Sequence: Synthetic oligonucleotide
  Target: LAMA2; (-) strand; PAM type: NRG; PAM sequence: AGG
atggccagacaattgttggt

SEQ ID NO: 99698 - DNA, 20 bp, Artificial Sequence
  Description of Artificial Sequence: Synthetic oligonucleotide
  Target: LAMA2; (-) strand; PAM type: NRG; PAM sequence: TAG
aatggccagacaattgttgg

SEQ ID NO: 99699 - DNA, 20 bp, Artificial Sequence
  Description of Artificial Sequence: Synthetic oligonucleotide
  Target: LAMA2; (-) strand; PAM type: NRG; PAM sequence: TGG
tctaatggccagacaattgt

SEQ ID NO: 99700 - DNA, 20 bp, Artificial Sequence
  Description of Artificial Sequence: Synthetic oligonucleotide
  Target: LAMA2; (-) strand; PAM type: NRG; PAM sequence: CAG
ttcatgtgtcttctaatggc

SEQ ID NO: 99701 - DNA, 20 bp, Artificial Sequence
  Description of Artificial Sequence: Synthetic oligonucleotide
  Target: LAMA2; (-) strand; PAM type: NRG; PAM sequence: TGG
atgtttcatgtgtcttctaa

SEQ ID NO: 99702 - DNA, 20 bp, Artificial Sequence
  Description of Artificial Sequence: Synthetic oligonucleotide
  Target: LAMA2; (-) strand; PAM type: NRG; PAM sequence: AAG
gcttcatttagtcaatcaag

SEQ ID NO: 99703 - DNA, 20 bp, Artificial Sequence
  Description of Artificial Sequence: Synthetic oligonucleotide
  Target: LAMA2; (-) strand; PAM type: NRG; PAM sequence: AAG
tctgcttcatttagtcaatc

SEQ ID NO: 99704 - DNA, 20 bp, Artificial Sequence
  Description of Artificial Sequence: Synthetic oligonucleotide
  Target: LAMA2; (-) strand; PAM type: NRG; PAM sequence: TAG
agactgggctctgcttcatt

SEQ ID NO: 99705 - DNA, 20 bp, Artificial Sequence
  Description of Artificial Sequence: Synthetic oligonucleotide
  Target: LAMA2; (-) strand; PAM type: NRG; PAM sequence: GGG
tggatgatatcccatagact

SEQ ID NO: 99706 - DNA, 20 bp, Artificial Sequence
  Description of Artificial Sequence: Synthetic oligonucleotide
  Target: LAMA2; (-) strand; PAM type: NRG; PAM sequence: TGG
ttggatgatatcccatagac

SEQ ID NO: 99707 - DNA, 20 bp, Artificial Sequence
  Description of Artificial Sequence: Synthetic oligonucleotide
  Target: LAMA2; (-) strand; PAM type: NRG; PAM sequence: TAG
tgaacttggatgatatccca

SEQ ID NO: 99708 - DNA, 20 bp, Artificial Sequence
  Description of Artificial Sequence: Synthetic oligonucleotide
  Target: LAMA2; (-) strand; PAM type: NRG; PAM sequence: TGG
cgaagccgccagcttgaact

SEQ ID NO: 99709 - DNA, 20 bp, Artificial Sequence
  Description of Artificial Sequence: Synthetic oligonucleotide
  Target: LAMA2; (-) strand; PAM type: NRG; PAM sequence: CAG
agctggagccacgaagccgc

SEQ ID NO: 99710 - DNA, 20 bp, Artificial Sequence
  Description of Artificial Sequence: Synthetic oligonucleotide
  Target: LAMA2; (-) strand; PAM type: NRG; PAM sequence: AAG
taatctcagctggagccacg

SEQ ID NO: 99711 - DNA, 20 bp, Artificial Sequence
  Description of Artificial Sequence: Synthetic oligonucleotide
  Target: LAMA2; (-) strand; PAM type: NRG; PAM sequence: GAG
cttcctgataatctcagctg

SEQ ID NO: 99712 - DNA, 20 bp, Artificial Sequence
  Description of Artificial Sequence: Synthetic oligonucleotide
  Target: LAMA2; (-) strand; PAM type: NRG; PAM sequence: TGG
gacttcctgataatctcagc

SEQ ID NO: 99713 - DNA, 20 bp, Artificial Sequence
  Description of Artificial Sequence: Synthetic oligonucleotide
  Target: LAMA2; (-) strand; PAM type: NRG; PAM sequence: CAG
aattgacttcctgataatct

SEQ ID NO: 99714 - DNA, 20 bp, Artificial Sequence
  Description of Artificial Sequence: Synthetic oligonucleotide
  Target: LAMA2; (-) strand; PAM type: NRG; PAM sequence: TAG
tacaaactagatggacatgt

SEQ ID NO: 99715 - DNA, 20 bp, Artificial Sequence
  Description of Artificial Sequence: Synthetic oligonucleotide
  Target: LAMA2; (-) strand; PAM type: NRG; PAM sequence: TGG
aaagtcagttacaaactaga

SEQ ID NO: 99716 - DNA, 20 bp, Artificial Sequence
  Description of Artificial Sequence: Synthetic oligonucleotide
  Target: LAMA2; (-) strand; PAM type: NRG; PAM sequence: TAG
caaaaaagtcagttacaaac

SEQ ID NO: 99717 - DNA, 20 bp, Artificial Sequence
  Description of Artificial Sequence: Synthetic oligonucleotide
  Target: LAMA2; (-) strand; PAM type: NRG; PAM sequence: CAG
aagttgagaaacaaaaaagt

SEQ ID NO: 99718 - DNA, 20 bp, Artificial Sequence
  Description of Artificial Sequence: Synthetic oligonucleotide
  Target: LAMA2; (-) strand; PAM type: NRG; PAM sequence: AAG
agaaaagttgagaaacaaaa

SEQ ID NO: 99719 - DNA, 20 bp, Artificial Sequence
  Description of Artificial Sequence: Synthetic oligonucleotide
  Target: LAMA2; (-) strand; PAM type: NRG; PAM sequence: GAG
acaatatcgaaagaaaagtt

SEQ ID NO: 99720 - DNA, 20 bp, Artificial Sequence
  Description of Artificial Sequence: Synthetic oligonucleotide
  Target: LAMA2; (-) strand; PAM type: NRG; PAM sequence: AAG
tataaacaatatcgaaagaa

SEQ ID NO: 99721 - DNA, 20 bp, Artificial Sequence
  Description of Artificial Sequence: Synthetic oligonucleotide
  Target: LAMA2; (-) strand; PAM type: NRG; PAM sequence: AAG
catcttataaacaatatcga

SEQ ID NO: 99722 - DNA, 20 bp, Artificial Sequence
  Description of Artificial Sequence: Synthetic oligonucleotide
  Target: LAMA2; (-) strand; PAM type: NRG; PAM sequence: TAG
aggatttggagtggtcaaaa

SEQ ID NO: 99723 - DNA, 20 bp, Artificial Sequence
  Description of Artificial Sequence: Synthetic oligonucleotide
  Target: LAMA2; (-) strand; PAM type: NRG; PAM sequence: TGG
ttataagacaggatttggag

SEQ ID NO: 99724 - DNA, 20 bp, Artificial Sequence
  Description of Artificial Sequence: Synthetic oligonucleotide
  Target: LAMA2; (-) strand; PAM type: NRG; PAM sequence: GAG
attttataagacaggatttg

SEQ ID NO: 99725 - DNA, 20 bp, Artificial Sequence
  Description of Artificial Sequence: Synthetic oligonucleotide
  Target: LAMA2; (-) strand; PAM type: NRG; PAM sequence: TGG
ggattttataagacaggatt

SEQ ID NO: 99726 - DNA, 20 bp, Artificial Sequence
  Description of Artificial Sequence: Synthetic oligonucleotide
  Target: LAMA2; (-) strand; PAM type: NRG; PAM sequence: AGG
ttagctggattttataagac

SEQ ID NO: 99727 - DNA, 20 bp, Artificial Sequence
  Description of Artificial Sequence: Synthetic oligonucleotide
  Target: LAMA2; (-) strand; PAM type: NRG; PAM sequence: CAG
tttagctggattttataaga

SEQ ID NO: 99728 - DNA, 20 bp, Artificial Sequence
  Description of Artificial Sequence: Synthetic oligonucleotide
  Target: LAMA2; (-) strand; PAM type: NRG; PAM sequence: AAG
gaattttagctggattttat

SEQ ID NO: 99729 - DNA, 20 bp, Artificial Sequence
  Description of Artificial Sequence: Synthetic oligonucleotide
  Target: LAMA2; (-) strand; PAM type: NRG; PAM sequence: TGG
atttggaattgaattttagc

SEQ ID NO: 99730 - DNA, 20 bp, Artificial Sequence
  Description of Artificial Sequence: Synthetic oligonucleotide
  Target: LAMA2; (-) strand; PAM type: NRG; PAM sequence: TAG
gggaatttggaattgaattt

SEQ ID NO: 99731 - DNA, 20 bp, Artificial Sequence
  Description of Artificial Sequence: Synthetic oligonucleotide
  Target: LAMA2; (-) strand; PAM type: NRG; PAM sequence: TGG
gaaaaaggaagaagggaatt

SEQ ID NO: 99732 - DNA, 20 bp, Artificial Sequence
  Description of Artificial Sequence: Synthetic oligonucleotide
  Target: LAMA2; (-) strand; PAM type: NRG; PAM sequence: GGG
gagttgagaaaaaggaagaa

SEQ ID NO: 99733 - DNA, 20 bp, Artificial Sequence
  Description of Artificial Sequence: Synthetic oligonucleotide
  Target: LAMA2; (-) strand; PAM type: NRG; PAM sequence: AGG
agagttgagaaaaaggaaga

SEQ ID NO: 99734 - DNA, 20 bp, Artificial Sequence
  Description of Artificial Sequence: Synthetic oligonucleotide
  Target: LAMA2; (-) strand; PAM type: NRG; PAM sequence: AAG
gagagttgagaaaaaggaag

SEQ ID NO: 99735 - DNA, 20 bp, Artificial Sequence
  Description of Artificial Sequence: Synthetic oligonucleotide
  Target: LAMA2; (-) strand; PAM type: NRG; PAM sequence: AAG
tttgagagttgagaaaaagg

SEQ ID NO: 99736 - DNA, 20 bp, Artificial Sequence
  Description of Artificial Sequence: Synthetic oligonucleotide
  Target: LAMA2; (-) strand; PAM type: NRG; PAM sequence: AGG
gcatttgagagttgagaaaa

SEQ ID NO: 99737 - DNA, 20 bp, Artificial Sequence
  Description of Artificial Sequence: Synthetic oligonucleotide
  Target: LAMA2; (-) strand; PAM type: NRG; PAM sequence: AAG
tgcatttgagagttgagaaa

SEQ ID NO: 99738 - DNA, 20 bp, Artificial Sequence
  Description of Artificial Sequence: Synthetic oligonucleotide
  Target: LAMA2; (-) strand; PAM type: NRG; PAM sequence: GAG
gatccttgcatttgagagtt

SEQ ID NO: 99739 - DNA, 20 bp, Artificial Sequence
  Description of Artificial Sequence: Synthetic oligonucleotide
  Target: LAMA2; (-) strand; PAM type: NRG; PAM sequence: GAG
aatgcgatccttgcatttga

SEQ ID NO: 99740 - DNA, 20 bp, Artificial Sequence
  Description of Artificial Sequence: Synthetic oligonucleotide
  Target: LAMA2; (-) strand; PAM type: NRG; PAM sequence: GAG
ggaatgcgatccttgcattt

SEQ ID NO: 99741 - DNA, 20 bp, Artificial Sequence
  Description of Artificial Sequence: Synthetic oligonucleotide
  Target: LAMA2; (-) strand; PAM type: NRG; PAM sequence: GGG
aacattgaatgttatcttgt

SEQ ID NO: 99742 - DNA, 20 bp, Artificial Sequence
  Description of Artificial Sequence: Synthetic oligonucleotide
  Target: LAMA2; (-) strand; PAM type: NRG; PAM sequence: TGG
caacattgaatgttatcttg

SEQ ID NO: 99743 - DNA, 20 bp, Artificial Sequence
  Description of Artificial Sequence: Synthetic oligonucleotide
  Target: LAMA2; (-) strand; PAM type: NRG; PAM sequence: AAG
caaaaaataaacatggcagc

SEQ ID NO: 99744 - DNA, 20 bp, Artificial Sequence
  Description of Artificial Sequence: Synthetic oligonucleotide
  Target: LAMA2; (-) strand; PAM type: NRG; PAM sequence: CAG
ctgacaaaaaataaacatgg

SEQ ID NO: 99745 - DNA, 20 bp, Artificial Sequence
  Description of Artificial Sequence: Synthetic oligonucleotide
  Target: LAMA2; (-) strand; PAM type: NRG; PAM sequence: TGG
cacctgacaaaaaataaaca

SEQ ID NO: 99746 - DNA, 20 bp, Artificial Sequence
  Description of Artificial Sequence: Synthetic oligonucleotide
  Target: LAMA2; (-) strand; PAM type: NRG; PAM sequence: GGG
tagaaatttacttagacttt

SEQ ID NO: 99747 - DNA, 20 bp, Artificial Sequence
  Description of Artificial Sequence: Synthetic oligonucleotide
  Target: LAMA2; (-) strand; PAM type: NRG; PAM sequence: TGG
ctagaaatttacttagactt

SEQ ID NO: 99748 - DNA, 20 bp, Artificial Sequence
  Description of Artificial Sequence: Synthetic oligonucleotide
  Target: LAMA2; (-) strand; PAM type: NRG; PAM sequence: TAG
ctaccttctagaaatttact

SEQ ID NO: 99749 - DNA, 20 bp, Artificial Sequence
  Description of Artificial Sequence: Synthetic oligonucleotide
  Target: LAMA2; (-) strand; PAM type: NRG; PAM sequence: TAG
tgaaagaacatcctaccttc

SEQ ID NO: 99750 - DNA, 20 bp, Artificial Sequence
  Description of Artificial Sequence: Synthetic oligonucleotide
  Target: LAMA2; (-) strand; PAM type: NRG; PAM sequence: AAG
tgcactgaaacaggcaatga

SEQ ID NO: 99751 - DNA, 20 bp, Artificial Sequence
  Description of Artificial Sequence: Synthetic oligonucleotide
  Target: LAMA2; (-) strand; PAM type: NRG; PAM sequence: AGG
tacatggaatgcactgaaac

SEQ ID NO: 99752 - DNA, 20 bp, Artificial Sequence
  Description of Artificial Sequence: Synthetic oligonucleotide
  Target: LAMA2; (-) strand; PAM type: NRG; PAM sequence: CAG
ctacatggaatgcactgaaa

SEQ ID NO: 99753 - DNA, 20 bp, Artificial Sequence
  Description of Artificial Sequence: Synthetic oligonucleotide
  Target: LAMA2; (-) strand; PAM type: NRG; PAM sequence: TGG
aggagttaggaagagctaca

SEQ ID NO: 99754 - DNA, 20 bp, Artificial Sequence
  Description of Artificial Sequence: Synthetic oligonucleotide
  Target: LAMA2; (-) strand; PAM type: NRG; PAM sequence: GAG
atgcaataaggagttaggaa

SEQ ID NO: 99755 - DNA, 20 bp, Artificial Sequence
  Description of Artificial Sequence: Synthetic oligonucleotide
  Target: LAMA2; (-) strand; PAM type: NRG; PAM sequence: AAG
ttatgcaataaggagttagg

SEQ ID NO: 99756 - DNA, 20 bp, Artificial Sequence
  Description of Artificial Sequence: Synthetic oligonucleotide
  Target: LAMA2; (-) strand; PAM type: NRG; PAM sequence: AGG
caattatgcaataaggagtt

SEQ ID NO: 99757 - DNA, 20 bp, Artificial Sequence
  Description of Artificial Sequence: Synthetic oligonucleotide
  Target: LAMA2; (-) strand; PAM type: NRG; PAM sequence: TAG
tcaattatgcaataaggagt

SEQ ID NO: 99758 - DNA, 20 bp, Artificial Sequence
  Description of Artificial Sequence: Synthetic oligonucleotide
  Target: LAMA2; (-) strand; PAM type: NRG; PAM sequence: GAG
ataatcaattatgcaataag

SEQ ID NO: 99759 - DNA, 20 bp, Artificial Sequence
  Description of Artificial Sequence: Synthetic oligonucleotide
  Target: LAMA2; (-) strand; PAM type: NRG; PAM sequence: AGG
caataatcaattatgcaata

SEQ ID NO: 99760 - DNA, 20 bp, Artificial Sequence
  Description of Artificial Sequence: Synthetic oligonucleotide
  Target: LAMA2; (-) strand; PAM type: NRG; PAM sequence: AAG
acaataatcaattatgcaat

SEQ ID NO: 99761 - DNA, 20 bp, Artificial Sequence
  Description of Artificial Sequence: Synthetic oligonucleotide
  Target: LAMA2; (-) strand; PAM type: NRG; PAM sequence: CAG
aaattaaaattttcatgaag

SEQ ID NO: 99762 - DNA, 20 bp, Artificial Sequence
  Description of Artificial Sequence: Synthetic oligonucleotide
  Target: LAMA2; (-) strand; PAM type: NRG; PAM sequence: AAG
ttcaaattaaaattttcatg

SEQ ID NO: 99763 - DNA, 20 bp, Artificial Sequence
  Description of Artificial Sequence: Synthetic oligonucleotide
  Target: LAMA2; (-) strand; PAM type: NRG; PAM sequence: TAG
gcttcagaatagtgtgcaaa

SEQ ID NO: 99764 - DNA, 20 bp, Artificial Sequence
  Description of Artificial Sequence: Synthetic oligonucleotide
  Target: LAMA2; (-) strand; PAM type: NRG; PAM sequence: TAG
aaatgagaatagcttcagaa

SEQ ID NO: 99765 - DNA, 20 bp, Artificial Sequence
  Description of Artificial Sequence: Synthetic oligonucleotide
  Target: LAMA2; (-) strand; PAM type: NRG; PAM sequence: CAG
caaagaaatgagaatagctt

SEQ ID NO: 99766 - DNA, 20 bp, Artificial Sequence
  Description of Artificial Sequence: Synthetic oligonucleotide
  Target: LAMA2; (-) strand; PAM type: NRG; PAM sequence: TAG
tttccacaaagaaatgagaa

SEQ ID NO: 99767 - DNA, 20 bp, Artificial Sequence
  Description of Artificial Sequence: Synthetic oligonucleotide
  Target: LAMA2; (-) strand; PAM type: NRG; PAM sequence: GAG
acacctttccacaaagaaat

SEQ ID NO: 99768 - DNA, 20 bp, Artificial Sequence
  Description of Artificial Sequence: Synthetic oligonucleotide
  Target: LAMA2; (-) strand; PAM type: NRG; PAM sequence: AAG
ccctttaacacctttccaca

SEQ ID NO: 99769 - DNA, 20 bp, Artificial Sequence
  Description of Artificial Sequence: Synthetic oligonucleotide
  Target: LAMA2; (-) strand; PAM type: NRG; PAM sequence: GGG
ttgcataataagagacattg

SEQ ID NO: 99770 - DNA, 20 bp, Artificial Sequence
  Description of Artificial Sequence: Synthetic oligonucleotide
  Target: LAMA2; (-) strand; PAM type: NRG; PAM sequence: GGG
cttgcataataagagacatt

SEQ ID NO: 99771 - DNA, 20 bp, Artificial Sequence
  Description of Artificial Sequence: Synthetic oligonucleotide
  Target: LAMA2; (-) strand; PAM type: NRG; PAM sequence: TGG
gcttgcataataagagacat

SEQ ID NO: 99772 - DNA, 20 bp, Artificial Sequence
  Description of Artificial Sequence: Synthetic oligonucleotide
  Target: LAMA2; (-) strand; PAM type: NRG; PAM sequence: GAG
ttcttatgcttgcataataa

SEQ ID NO: 99773 - DNA, 20 bp, Artificial Sequence
  Description of Artificial Sequence: Synthetic oligonucleotide
  Target: LAMA2; (-) strand; PAM type: NRG; PAM sequence: AAG
ctttcttatgcttgcataat

SEQ ID NO: 99774 - DNA, 20 bp, Artificial Sequence
  Description of Artificial Sequence: Synthetic oligonucleotide
  Target: LAMA2; (-) strand; PAM type: NRG; PAM sequence: CAG
caatctaaaactagcaatct

SEQ ID NO: 99775 - DNA, 20 bp, Artificial Sequence
  Description of Artificial Sequence: Synthetic oligonucleotide
  Target: LAMA2; (-) strand; PAM type: NRG; PAM sequence: TAG
cagaggagtcaatctaaaac

SEQ ID NO: 99776 - DNA, 20 bp, Artificial Sequence
  Description of Artificial Sequence: Synthetic oligonucleotide
  Target: LAMA2; (-) strand; PAM type: NRG; PAM sequence: GAG
ggttcttcataaatacagag

SEQ ID NO: 99777 - DNA, 20 bp, Artificial Sequence
  Description of Artificial Sequence: Synthetic oligonucleotide
  Target: LAMA2; (-) strand; PAM type: NRG; PAM sequence: AGG
gtggttcttcataaatacag

SEQ ID NO: 99778 - DNA, 20 bp, Artificial Sequence
  Description of Artificial Sequence: Synthetic oligonucleotide
  Target: LAMA2; (-) strand; PAM type: NRG; PAM sequence: GAG
ggtggttcttcataaataca

SEQ ID NO: 99779 - DNA, 20 bp, Artificial Sequence
  Description of Artificial Sequence: Synthetic oligonucleotide
  Target: LAMA2; (-) strand; PAM type: NRG; PAM sequence: CAG
taggtggttcttcataaata

SEQ ID NO: 99780 - DNA, 20 bp, Artificial Sequence
  Description of Artificial Sequence: Synthetic oligonucleotide
  Target: LAMA2; (-) strand; PAM type: NRG; PAM sequence: TGG
gtggaaagcatagatgtagg

SEQ ID NO: 99781 - DNA, 20 bp, Artificial Sequence
  Description of Artificial Sequence: Synthetic oligonucleotide
  Target: LAMA2; (-) strand; PAM type: NRG; PAM sequence: AGG
aaggtggaaagcatagatgt

SEQ ID NO: 99782 - DNA, 20 bp, Artificial Sequence
  Description of Artificial Sequence: Synthetic oligonucleotide
  Target: LAMA2; (-) strand; PAM type: NRG; PAM sequence: TAG
caaggtggaaagcatagatg

SEQ ID NO: 99783 - DNA, 20 bp, Artificial Sequence
  Description of Artificial Sequence: Synthetic oligonucleotide
  Target: LAMA2; (-) strand; PAM type: NRG; PAM sequence: TAG
ccacctcaaggtggaaagca

SEQ ID NO: 99784 - DNA, 20 bp, Artificial Sequence
  Description of Artificial Sequence: Synthetic oligonucleotide
  Target: LAMA2; (-) strand; PAM type: NRG; PAM sequence: AAG
tgaaaccacctcaaggtgga

SEQ ID NO: 99785 - DNA, 20 bp, Artificial Sequence
  Description of Artificial Sequence: Synthetic oligonucleotide
  Target: LAMA2; (-) strand; PAM type: NRG; PAM sequence: TGG
tttctgaaaccacctcaagg

SEQ ID NO: 99786 - DNA, 20 bp, Artificial Sequence
  Description of Artificial Sequence: Synthetic oligonucleotide
  Target: LAMA2; (-) strand; PAM type: NRG; PAM sequence: AGG
ggctttctgaaaccacctca

SEQ ID NO: 99787 - DNA, 20 bp, Artificial Sequence
  Description of Artificial Sequence: Synthetic oligonucleotide
  Target: LAMA2; (-) strand; PAM type: NRG; PAM sequence: AAG
gggctttctgaaaccacctc

SEQ ID NO: 99788 - DNA, 20 bp, Artificial Sequence
  Description of Artificial Sequence: Synthetic oligonucleotide
  Target: LAMA2; (-) strand; PAM type: NRG; PAM sequence: GGG
cttggcacatgcccactagt

SEQ ID NO: 99789 - DNA, 20 bp, Artificial Sequence
  Description of Artificial Sequence: Synthetic oligonucleotide
  Target: LAMA2; (-) strand; PAM type: NRG; PAM sequence: TGG
ccttggcacatgcccactag

SEQ ID NO: 99790 - DNA, 20 bp, Artificial Sequence
  Description of Artificial Sequence: Synthetic oligonucleotide
  Target: LAMA2; (-) strand; PAM type: NRG; PAM sequence: TAG
tggccttggcacatgcccac

SEQ ID NO: 99791 - DNA, 20 bp, Artificial Sequence
  Description of Artificial Sequence: Synthetic oligonucleotide
  Target: LAMA2; (-) strand; PAM type: NRG; PAM sequence: TGG
tgctacaaatactgtggcct

SEQ ID NO: 99792 - DNA, 20 bp, Artificial Sequence
  Description of Artificial Sequence: Synthetic oligonucleotide
  Target: LAMA2; (-) strand; PAM type: NRG; PAM sequence: TGG
aaaaggtgctacaaatactg

SEQ ID NO: 99793 - DNA, 20 bp, Artificial Sequence
  Description of Artificial Sequence: Synthetic oligonucleotide
  Target: LAMA2; (-) strand; PAM type: NRG; PAM sequence: AGG
ctctatgagatgttagaaaa

SEQ ID NO: 99794 - DNA, 20 bp, Artificial Sequence
  Description of Artificial Sequence: Synthetic oligonucleotide
  Target: LAMA2; (-) strand; PAM type: NRG; PAM sequence: AAG
gctctatgagatgttagaaa

SEQ ID NO: 99795 - DNA, 20 bp, Artificial Sequence
  Description of Artificial Sequence: Synthetic oligonucleotide
  Target: LAMA2; (-) strand; PAM type: NRG; PAM sequence: TAG
gttttagctctatgagatgt

SEQ ID NO: 99796 - DNA, 20 bp, Artificial Sequence
  Description of Artificial Sequence: Synthetic oligonucleotide
  Target: LAMA2; (-) strand; PAM type: NRG; PAM sequence: GAG
atcccaggttttagctctat

SEQ ID NO: 99797 - DNA, 20 bp, Artificial Sequence
  Description of Artificial Sequence: Synthetic oligonucleotide
  Target: LAMA2; (-) strand; PAM type: NRG; PAM sequence: TAG
tttcttcatatcccaggttt

SEQ ID NO: 99798 - DNA, 20 bp, Artificial Sequence
  Description of Artificial Sequence: Synthetic oligonucleotide
  Target: LAMA2; (-) strand; PAM type: NRG; PAM sequence: AGG
tttatgtttcttcatatccc

SEQ ID NO: 99799 - DNA, 20 bp, Artificial Sequence
  Description of Artificial Sequence: Synthetic oligonucleotide
  Target: LAMA2; (-) strand; PAM type: NRG; PAM sequence: CAG
atttatgtttcttcatatcc

SEQ ID NO: 99800 - DNA, 20 bp, Artificial Sequence
  Description of Artificial Sequence: Synthetic oligonucleotide
  Target: LAMA2; (-) strand; PAM type: NRG; PAM sequence: AGG
taaaatttattatttcttct

SEQ ID NO: 99801 - DNA, 20 bp, Artificial Sequence
  Description of Artificial Sequence: Synthetic oligonucleotide
  Target: LAMA2; (-) strand; PAM type: NRG; PAM sequence: TAG
ctaaaatttattatttcttc

SEQ ID NO: 99802 - DNA, 20 bp, Artificial Sequence
  Description of Artificial Sequence: Synthetic oligonucleotide
  Target: LAMA2; (-) strand; PAM type: NRG; PAM sequence: GAG
taaattggggaatagacttc

SEQ ID NO: 99803 - DNA, 20 bp, Artificial Sequence
  Description of Artificial Sequence: Synthetic oligonucleotide
  Target: LAMA2; (-) strand; PAM type: NRG; PAM sequence: TAG
tcctactctaaattggggaa

SEQ ID NO: 99804 - DNA, 20 bp, Artificial Sequence
  Description of Artificial Sequence: Synthetic oligonucleotide
  Target: LAMA2; (-) strand; PAM type: NRG; PAM sequence: GGG
ttttctcctactctaaattg

SEQ ID NO: 99805 - DNA, 20 bp, Artificial Sequence
  Description of Artificial Sequence: Synthetic oligonucleotide
  Target: LAMA2; (-) strand; PAM type: NRG; PAM sequence: GGG
tttttctcctactctaaatt

SEQ ID NO: 99806 - DNA, 20 bp, Artificial Sequence
  Description of Artificial Sequence: Synthetic oligonucleotide
  Target: LAMA2; (-) strand; PAM type: NRG; PAM sequence: TGG
atttttctcctactctaaat

SEQ ID NO: 99807 - DNA, 20 bp, Artificial Sequence
  Description of Artificial Sequence: Synthetic oligonucleotide
  Target: LAMA2; (-) strand; PAM type: NRG; PAM sequence: GAG
cgtagctacactgacaataa

SEQ ID NO: 99808 - DNA, 20 bp, Artificial Sequence
  Description of Artificial Sequence: Synthetic oligonucleotide
  Target: LAMA2; (-) strand; PAM type: NRG; PAM sequence: AAG
atcgtagctacactgacaat

SEQ ID NO: 99809 - DNA, 20 bp, Artificial Sequence
  Description of Artificial Sequence: Synthetic oligonucleotide
  Target: LAMA2; (-) strand; PAM type: NRG; PAM sequence: TAG
aaactaatactgtgctatcg

SEQ ID NO: 99810 - DNA, 20 bp, Artificial Sequence
  Description of Artificial Sequence: Synthetic oligonucleotide
  Target: LAMA2; (-) strand; PAM type: NRG; PAM sequence: GAG
ttaaaggaactctttgattt

SEQ ID NO: 99811 - DNA, 20 bp, Artificial Sequence
  Description of Artificial Sequence: Synthetic oligonucleotide
  Target: LAMA2; (-) strand; PAM type: NRG; PAM sequence: AGG
tttgatataaatatttttaa

SEQ ID NO: 99812 - DNA, 20 bp, Artificial Sequence
  Description of Artificial Sequence: Synthetic oligonucleotide
  Target: LAMA2; (-) strand; PAM type: NRG; PAM sequence: AAG
ctttgatataaatattttta

SEQ ID NO: 99813 - DNA, 20 bp, Artificial Sequence
  Description of Artificial Sequence: Synthetic oligonucleotide
  Target: LAMA2; (-) strand; PAM type: NRG; PAM sequence: CAG
tttatcactgacagagaact

SEQ ID NO: 99814 - DNA, 20 bp, Artificial Sequence
  Description of Artificial Sequence: Synthetic oligonucleotide
  Target: LAMA2; (-) strand; PAM type: NRG; PAM sequence: GAG
cacacactttatcactgaca

SEQ ID NO: 99815 - DNA, 20 bp, Artificial Sequence
  Description of Artificial Sequence: Synthetic oligonucleotide
  Target: LAMA2; (-) strand; PAM type: NRG; PAM sequence: CAG
cacacacactttatcactga

SEQ ID NO: 99816 - DNA, 20 bp, Artificial Sequence
  Description of Artificial Sequence: Synthetic oligonucleotide
  Target: LAMA2; (-) strand; PAM type: NRG; PAM sequence: TAG
gtaatttatcatacagtccc

SEQ ID NO: 99817 - DNA, 20 bp, Artificial Sequence
  Description of Artificial Sequence: Synthetic oligonucleotide
  Target: LAMA2; (-) strand; PAM type: NRG; PAM sequence: CAG
ttagaatgtaatttatcata

SEQ ID NO: 99818 - DNA, 20 bp, Artificial Sequence
  Description of Artificial Sequence: Synthetic oligonucleotide
  Target: LAMA2; (-) strand; PAM type: NRG; PAM sequence: TAG
gtttttaatttagtgatagt

SEQ ID NO: 99819 - DNA, 20 bp, Artificial Sequence
  Description of Artificial Sequence: Synthetic oligonucleotide
  Target: LAMA2; (-) strand; PAM type: NRG; PAM sequence: TAG
gtttgtttttaatttagtga

SEQ ID NO: 99820 - DNA, 20 bp, Artificial Sequence
  Description of Artificial Sequence: Synthetic oligonucleotide
  Target: LAMA2; (-) strand; PAM type: NRG; PAM sequence: TAG
gaagaagtttgtttttaatt

SEQ ID NO: 99821 - DNA, 20 bp, Artificial Sequence
  Description of Artificial Sequence: Synthetic oligonucleotide
  Target: LAMA2; (-) strand; PAM type: NRG; PAM sequence: AAG
tgtaaaggaaaagggagaag

SEQ ID NO: 99822 - DNA, 20 bp, Artificial Sequence
  Description of Artificial Sequence: Synthetic oligonucleotide
  Target: LAMA2; (-) strand; PAM type: NRG; PAM sequence: AAG
ttctgtaaaggaaaagggag

SEQ ID NO: 99823 - DNA, 20 bp, Artificial Sequence
  Description of Artificial Sequence: Synthetic oligonucleotide
  Target: LAMA2; (-) strand; PAM type: NRG; PAM sequence: GAG
caattctgtaaaggaaaagg

SEQ ID NO: 99824 - DNA, 20 bp, Artificial Sequence
  Description of Artificial Sequence: Synthetic oligonucleotide
  Target: LAMA2; (-) strand; PAM type: NRG; PAM sequence: GGG
gacaattctgtaaaggaaaa

SEQ ID NO: 99825 - DNA, 20 bp, Artificial Sequence
  Description of Artificial Sequence: Synthetic oligonucleotide
  Target: LAMA2; (-) strand; PAM type: NRG; PAM sequence: AGG
tgacaattctgtaaaggaaa

SEQ ID NO: 99826 - DNA, 20 bp, Artificial Sequence
  Description of Artificial Sequence: Synthetic oligonucleotide
  Target: LAMA2; (-) strand; PAM type: NRG; PAM sequence: AAG
ttgacaattctgtaaaggaa

SEQ ID NO: 99827 - DNA, 20 bp, Artificial Sequence
  Description of Artificial Sequence: Synthetic oligonucleotide
  Target: LAMA2; (-) strand; PAM type: NRG; PAM sequence: AGG
tgatgttgacaattctgtaa

SEQ ID NO: 99828 - DNA, 20 bp, Artificial Sequence
  Description of Artificial Sequence: Synthetic oligonucleotide
  Target: LAMA2; (-) strand; PAM type: NRG; PAM sequence: AAG
gtgatgttgacaattctgta

SEQ ID NO: 99829 - DNA, 20 bp, Artificial Sequence
  Description of Artificial Sequence: Synthetic oligonucleotide
  Target: LAMA2; (-) strand; PAM type: NRG; PAM sequence: CAG
tcgttcacagaagtcaccag

SEQ ID NO: 99830 - DNA, 20 bp, Artificial Sequence
  Description of Artificial Sequence: Synthetic oligonucleotide
  Target: LAMA2; (-) strand; PAM type: NRG; PAM sequence: CAG
acatcgttcacagaagtcac

SEQ ID NO: 99831 - DNA, 20 bp, Artificial Sequence
  Description of Artificial Sequence: Synthetic oligonucleotide
  Target: LAMA2; (-) strand; PAM type: NRG; PAM sequence: AAG
caagagcacatcgttcacag

SEQ ID NO: 99832 - DNA, 20 bp, Artificial Sequence
  Description of Artificial Sequence: Synthetic oligonucleotide
  Target: LAMA2; (-) strand; PAM type: NRG; PAM sequence: CAG
atccaagagcacatcgttca

SEQ ID NO: 99833 - DNA, 20 bp, Artificial Sequence
  Description of Artificial Sequence: Synthetic oligonucleotide
  Target: LAMA2; (-) strand; PAM type: NRG; PAM sequence: GAG
gacaattccatagtatccaa

SEQ ID NO: 99834 - DNA, 20 bp, Artificial Sequence
  Description of Artificial Sequence: Synthetic oligonucleotide
  Target: LAMA2; (-) strand; PAM type: NRG; PAM sequence: AAG
ttgacaattccatagtatcc

SEQ ID NO: 99835 - DNA, 20 bp, Artificial Sequence
  Description of Artificial Sequence: Synthetic oligonucleotide
  Target: LAMA2; (-) strand; PAM type: NRG; PAM sequence: TAG
gcaatcccttgacaattcca

SEQ ID NO: 99836 - DNA, 20 bp, Artificial Sequence
  Description of Artificial Sequence: Synthetic oligonucleotide
  Target: LAMA2; (-) strand; PAM type: NRG; PAM sequence: TGG
gcacattgctgacagtcatt

SEQ ID NO: 99837 - DNA, 20 bp, Artificial Sequence
  Description of Artificial Sequence: Synthetic oligonucleotide
  Target: LAMA2; (-) strand; PAM type: NRG; PAM sequence: CAG
gagggcaggcacattgctga

SEQ ID NO: 99838 - DNA, 20 bp, Artificial Sequence
  Description of Artificial Sequence: Synthetic oligonucleotide
  Target: LAMA2; (-) strand; PAM type: NRG; PAM sequence: AGG
actggaagaaatcagagggc

SEQ ID NO: 99839 - DNA, 20 bp, Artificial Sequence
  Description of Artificial Sequence: Synthetic oligonucleotide
  Target: LAMA2; (-) strand; PAM type: NRG; PAM sequence: CAG
tactggaagaaatcagaggg

SEQ ID NO: 99840 - DNA, 20 bp, Artificial Sequence
  Description of Artificial Sequence: Synthetic oligonucleotide
  Target: LAMA2; (-) strand; PAM type: NRG; PAM sequence: GGG
tgttactggaagaaatcaga

SEQ ID NO: 99841 - DNA, 20 bp, Artificial Sequence
  Description of Artificial Sequence: Synthetic oligonucleotide
  Target: LAMA2; (-) strand; PAM type: NRG; PAM sequence: AGG
ttgttactggaagaaatcag

SEQ ID NO: 99842 - DNA, 20 bp, Artificial Sequence
  Description of Artificial Sequence: Synthetic oligonucleotide
  Target: LAMA2; (-) strand; PAM type: NRG; PAM sequence: GAG
cttgttactggaagaaatca

SEQ ID NO: 99843 - DNA, 20 bp, Artificial Sequence
  Description of Artificial Sequence: Synthetic oligonucleotide
  Target: LAMA2; (-) strand; PAM type: NRG; PAM sequence: CAG
tacttgttactggaagaaat

SEQ ID NO: 99844 - DNA, 20 bp, Artificial Sequence
  Description of Artificial Sequence: Synthetic oligonucleotide
  Target: LAMA2; (-) strand; PAM type: NRG; PAM sequence: AAG
tcaatcttacttgttactgg

SEQ ID NO: 99845 - DNA, 20 bp, Artificial Sequence
  Description of Artificial Sequence: Synthetic oligonucleotide
  Target: LAMA2; (-) strand; PAM type: NRG; PAM sequence: TGG
ttctcaatcttacttgttac

SEQ ID NO: 99846 - DNA, 20 bp, Artificial Sequence
  Description of Artificial Sequence: Synthetic oligonucleotide
  Target: LAMA2; (-) strand; PAM type: NRG; PAM sequence: TGG
gcgtttctgattgggaaata

SEQ ID NO: 99847 - DNA, 20 bp, Artificial Sequence
  Description of Artificial Sequence: Synthetic oligonucleotide
  Target: LAMA2; (-) strand; PAM type: NRG; PAM sequence: GGG
gacagatggcgtttctgatt

SEQ ID NO: 99848 - DNA, 20 bp, Artificial Sequence
  Description of Artificial Sequence: Synthetic oligonucleotide
  Target: LAMA2; (-) strand; PAM type: NRG; PAM sequence: TGG
agacagatggcgtttctgat

SEQ ID NO: 99849 - DNA, 20 bp, Artificial Sequence
  Description of Artificial Sequence: Synthetic oligonucleotide
  Target: LAMA2; (-) strand; PAM type: NRG; PAM sequence: TGG
cagcccatgtgctagacaga

SEQ ID NO: 99850 - DNA, 20 bp, Artificial Sequence
  Description of Artificial Sequence: Synthetic oligonucleotide
  Target: LAMA2; (-) strand; PAM type: NRG; PAM sequence: CAG
tagacagcccatgtgctaga

SEQ ID NO: 99851 - DNA, 20 bp, Artificial Sequence
  Description of Artificial Sequence: Synthetic oligonucleotide
  Target: LAMA2; (-) strand; PAM type: NRG; PAM sequence: TAG
atcatagacagcccatgtgc

SEQ ID NO: 99852 - DNA, 20 bp, Artificial Sequence
  Description of Artificial Sequence: Synthetic oligonucleotide
  Target: LAMA2; (-) strand; PAM type: NRG; PAM sequence: CAG
aaaaatagccaaatcataga

SEQ ID NO: 99853 - DNA, 20 bp, Artificial Sequence
  Description of Artificial Sequence: Synthetic oligonucleotide
  Target: LAMA2; (-) strand; PAM type: NRG; PAM sequence: TAG
tggaaaaaatagccaaatca

SEQ ID NO: 99854 - DNA, 20 bp, Artificial Sequence
  Description of Artificial Sequence: Synthetic oligonucleotide
  Target: LAMA2; (-) strand; PAM type: NRG; PAM sequence: TAG
ttttgtctacatggaaaaaa

SEQ ID NO: 99855 - DNA, 20 bp, Artificial Sequence
  Description of Artificial Sequence: Synthetic oligonucleotide
  Target: LAMA2; (-) strand; PAM type: NRG; PAM sequence: TGG
aattgagatttttgtctaca

SEQ ID NO: 99856 - DNA, 20 bp, Artificial Sequence
  Description of Artificial Sequence: Synthetic oligonucleotide
  Target: LAMA2; (-) strand; PAM type: NRG; PAM sequence: GAG
aaatatctctatcttaaatt

SEQ ID NO: 99857 - DNA, 20 bp, Artificial Sequence
  Description of Artificial Sequence: Synthetic oligonucleotide
  Target: LAMA2; (-) strand; PAM type: NRG; PAM sequence: GAG
caaaggaaaaatgaaccata

SEQ ID NO: 99858 - DNA, 20 bp, Artificial Sequence
  Description of Artificial Sequence: Synthetic oligonucleotide
  Target: LAMA2; (-) strand; PAM type: NRG; PAM sequence: TAG
ttcaaaggaaaaatgaacca

SEQ ID NO: 99859 - DNA, 20 bp, Artificial Sequence
  Description of Artificial Sequence: Synthetic oligonucleotide
  Target: LAMA2; (-) strand; PAM type: NRG; PAM sequence: AGG
tacttgggacagagtttcaa

SEQ ID NO: 99860 - DNA, 20 bp, Artificial Sequence
  Description of Artificial Sequence: Synthetic oligonucleotide
  Target: LAMA2; (-) strand; PAM type: NRG; PAM sequence: AAG
ttacttgggacagagtttca

SEQ ID NO: 99861 - DNA, 20 bp, Artificial Sequence
  Description of Artificial Sequence: Synthetic oligonucleotide
  Target: LAMA2; (-) strand; PAM type: NRG; PAM sequence: GAG
agtattatttacttgggaca

SEQ ID NO: 99862 - DNA, 20 bp, Artificial Sequence
  Description of Artificial Sequence: Synthetic oligonucleotide
  Target: LAMA2; (-) strand; PAM type: NRG; PAM sequence: CAG
taagtattatttacttggga

SEQ ID NO: 99863 - DNA, 20 bp, Artificial Sequence
  Description of Artificial Sequence: Synthetic oligonucleotide
  Target: LAMA2; (-) strand; PAM type: NRG; PAM sequence: GGG
ttaataagtattatttactt

SEQ ID NO: 99864 - DNA, 20 bp, Artificial Sequence
  Description of Artificial Sequence: Synthetic oligonucleotide
  Target: LAMA2; (-) strand; PAM type: NRG; PAM sequence: TGG
attaataagtattatttact

SEQ ID NO: 99865 - DNA, 20 bp, Artificial Sequence
  Description of Artificial Sequence: Synthetic oligonucleotide
  Target: LAMA2; (-) strand; PAM type: NRG; PAM sequence: AAG
gtacttcaattttaattaat

SEQ ID NO: 99866 - DNA, 20 bp, Artificial Sequence
  Description of Artificial Sequence: Synthetic oligonucleotide
  Target: LAMA2; (-) strand; PAM type: NRG; PAM sequence: TGG
aatatgtcttacattaatat

SEQ ID NO: 99867 - DNA, 20 bp, Artificial Sequence
  Description of Artificial Sequence: Synthetic oligonucleotide
  Target: LAMA2; (-) strand; PAM type: NRG; PAM sequence: TGG
gctatatgcaagcattagac

SEQ ID NO: 99868 - DNA, 20 bp, Artificial Sequence
  Description of Artificial Sequence: Synthetic oligonucleotide
  Target: LAMA2; (-) strand; PAM type: NRG; PAM sequence: TAG
gcagagctatatgcaagcat

SEQ ID NO: 99869 - DNA, 20 bp, Artificial Sequence
  Description of Artificial Sequence: Synthetic oligonucleotide
  Target: LAMA2; (-) strand; PAM type: NRG; PAM sequence: AAG
ttatgggcagagctatatgc

SEQ ID NO: 99870 - DNA, 20 bp, Artificial Sequence
  Description of Artificial Sequence: Synthetic oligonucleotide
  Target: LAMA2; (-) strand; PAM type: NRG; PAM sequence: GAG
catagatgatattatgggca

SEQ ID NO: 99871 - DNA, 20 bp, Artificial Sequence
  Description of Artificial Sequence: Synthetic oligonucleotide
  Target: LAMA2; (-) strand; PAM type: NRG; PAM sequence: CAG
ttcatagatgatattatggg

SEQ ID NO: 99872 - DNA, 20 bp, Artificial Sequence
  Description of Artificial Sequence: Synthetic oligonucleotide
  Target: LAMA2; (-) strand; PAM type: NRG; PAM sequence: GGG
tccttcatagatgatattat

SEQ ID NO: 99873 - DNA, 20 bp, Artificial Sequence
  Description of Artificial Sequence: Synthetic oligonucleotide
  Target: LAMA2; (-) strand; PAM type: NRG; PAM sequence: TGG
atccttcatagatgatatta

SEQ ID NO: 99874 - DNA, 20 bp, Artificial Sequence
  Description of Artificial Sequence: Synthetic oligonucleotide
  Target: LAMA2; (-) strand; PAM type: NRG; PAM sequence: TAG
tgcacccgaacaatccttca

SEQ ID NO: 99875 - DNA, 20 bp, Artificial Sequence
  Description of Artificial Sequence: Synthetic oligonucleotide
  Target: LAMA2; (-) strand; PAM type: NRG; PAM sequence: CAG
acacataaaataaatggaaa

SEQ ID NO: 99876 - DNA, 20 bp, Artificial Sequence
  Description of Artificial Sequence: Synthetic oligonucleotide
  Target: LAMA2; (-) strand; PAM type: NRG; PAM sequence: TGG
aattaaacacataaaataaa

SEQ ID NO: 99877 - DNA, 20 bp, Artificial Sequence
  Description of Artificial Sequence: Synthetic oligonucleotide
  Target: LAMA2; (-) strand; PAM type: NRG; PAM sequence: AAG
attttttggagcataacaat

SEQ ID NO: 99878 - DNA, 20 bp, Artificial Sequence
  Description of Artificial Sequence: Synthetic oligonucleotide
  Target: LAMA2; (-) strand; PAM type: NRG; PAM sequence: GAG
ccgggagatgacattttttg

SEQ ID NO: 99879 - DNA, 20 bp, Artificial Sequence
  Description of Artificial Sequence: Synthetic oligonucleotide
  Target: LAMA2; (-) strand; PAM type: NRG; PAM sequence: TGG
ttccgggagatgacattttt

SEQ ID NO: 99880 - DNA, 20 bp, Artificial Sequence
  Description of Artificial Sequence: Synthetic oligonucleotide
  Target: LAMA2; (-) strand; PAM type: NRG; PAM sequence: GAG
aaaggaggctgtgattccgg

SEQ ID NO: 99881 - DNA, 20 bp, Artificial Sequence
  Description of Artificial Sequence: Synthetic oligonucleotide
  Target: LAMA2; (-) strand; PAM type: NRG; PAM sequence: GGG
aaaaaggaggctgtgattcc

SEQ ID NO: 99882 - DNA, 20 bp, Artificial Sequence
  Description of Artificial Sequence: Synthetic oligonucleotide
  Target: LAMA2; (-) strand; PAM type: NRG; PAM sequence: CGG
gaaaaaggaggctgtgattc

SEQ ID NO: 99883 - DNA, 20 bp, Artificial Sequence
  Description of Artificial Sequence: Synthetic oligonucleotide
  Target: LAMA2; (-) strand; PAM type: NRG; PAM sequence: AGG
agaccatcttaagaaaaagg

SEQ ID NO: 99884 - DNA, 20 bp, Artificial Sequence
  Description of Artificial Sequence: Synthetic oligonucleotide
  Target: LAMA2; (-) strand; PAM type: NRG; PAM sequence: GAG
cagaccatcttaagaaaaag

SEQ ID NO: 99885 - DNA, 20 bp, Artificial Sequence
  Description of Artificial Sequence: Synthetic oligonucleotide
  Target: LAMA2; (-) strand; PAM type: NRG; PAM sequence: AGG
ctcagaccatcttaagaaaa

SEQ ID NO: 99886 - DNA, 20 bp, Artificial Sequence
  Description of Artificial Sequence: Synthetic oligonucleotide
  Target: LAMA2; (-) strand; PAM type: NRG; PAM sequence: AAG
gctcagaccatcttaagaaa

SEQ ID NO: 99887 - DNA, 20 bp, Artificial Sequence
  Description of Artificial Sequence: Synthetic oligonucleotide
  Target: LAMA2; (-) strand; PAM type: NRG; PAM sequence: AAG
taccaagctcagaccatctt

SEQ ID NO: 99888 - DNA, 20 bp, Artificial Sequence
  Description of Artificial Sequence: Synthetic oligonucleotide
  Target: LAMA2; (-) strand; PAM type: NRG; PAM sequence: CAG
tgtttccatggtaccaagct

SEQ ID NO: 99889 - DNA, 20 bp, Artificial Sequence
  Description of Artificial Sequence: Synthetic oligonucleotide
  Target: LAMA2; (-) strand; PAM type: NRG; PAM sequence: AAG
ggctgtgtttccatggtacc

SEQ ID NO: 99890 - DNA, 20 bp, Artificial Sequence
  Description of Artificial Sequence: Synthetic oligonucleotide
  Target: LAMA2; (-) strand; PAM type: NRG; PAM sequence: TGG
ttcttagggctgtgtttcca

SEQ ID NO: 99891 - DNA, 20 bp, Artificial Sequence
  Description of Artificial Sequence: Synthetic oligonucleotide
  Target: LAMA2; (-) strand; PAM type: NRG; PAM sequence: GGG
ccagcttttgtttcttctta

SEQ ID NO: 99892 - DNA, 20 bp, Artificial Sequence
  Description of Artificial Sequence: Synthetic oligonucleotide
  Target: LAMA2; (-) strand; PAM type: NRG; PAM sequence: AGG
tccagcttttgtttcttctt

SEQ ID NO: 99893 - DNA, 20 bp, Artificial Sequence
  Description of Artificial Sequence: Synthetic oligonucleotide
  Target: LAMA2; (-) strand; PAM type: NRG; PAM sequence: TAG
ttccagcttttgtttcttct

SEQ ID NO: 99894 - DNA, 20 bp, Artificial Sequence
  Description of Artificial Sequence: Synthetic oligonucleotide
  Target: LAMA2; (-) strand; PAM type: NRG; PAM sequence: CAG
agcactgaaataagatattc

SEQ ID NO: 99895 - DNA, 20 bp, Artificial Sequence
  Description of Artificial Sequence: Synthetic oligonucleotide
  Target: LAMA2; (-) strand; PAM type: NRG; PAM sequence: AAG
tgttcagacagcactgaaat

SEQ ID NO: 99896 - DNA, 20 bp, Artificial Sequence
  Description of Artificial Sequence: Synthetic oligonucleotide
  Target: LAMA2; (-) strand; PAM type: NRG; PAM sequence: CAG
accagtgcagaatgttcaga

SEQ ID NO: 99897 - DNA, 20 bp, Artificial Sequence
  Description of Artificial Sequence: Synthetic oligonucleotide
  Target: LAMA2; (-) strand; PAM type: NRG; PAM sequence: CAG
ataaaccagtgcagaatgtt

SEQ ID NO: 99898 - DNA, 20 bp, Artificial Sequence
  Description of Artificial Sequence: Synthetic oligonucleotide
  Target: LAMA2; (-) strand; PAM type: NRG; PAM sequence: CAG
catcaatgtataaaccagtg

SEQ ID NO: 99899 - DNA, 20 bp, Artificial Sequence
  Description of Artificial Sequence: Synthetic oligonucleotide
  Target: LAMA2; (-) strand; PAM type: NRG; PAM sequence: CAG
gttttcatcaatgtataaac

SEQ ID NO: 99900 - DNA, 20 bp, Artificial Sequence
  Description of Artificial Sequence: Synthetic oligonucleotide
  Target: LAMA2; (-) strand; PAM type: NRG; PAM sequence: GGG
aaggtaaatgaaaacaccta

SEQ ID NO: 99901 - DNA, 20 bp, Artificial Sequence
  Description of Artificial Sequence: Synthetic oligonucleotide
  Target: LAMA2; (-) strand; PAM type: NRG; PAM sequence: AGG
aaaggtaaatgaaaacacct

SEQ ID NO: 99902 - DNA, 20 bp, Artificial Sequence
  Description of Artificial Sequence: Synthetic oligonucleotide
  Target: LAMA2; (-) strand; PAM type: NRG; PAM sequence: TAG
aaaaggtaaatgaaaacacc

SEQ ID NO: 99903 - DNA, 20 bp, Artificial Sequence
  Description of Artificial Sequence: Synthetic oligonucleotide
  Target: LAMA2; (-) strand; PAM type: NRG; PAM sequence: AGG
tgcaggtagtgtgggcaaaa

SEQ ID NO: 99904 - DNA, 20 bp, Artificial Sequence
  Description of Artificial Sequence: Synthetic oligonucleotide
  Target: LAMA2; (-) strand; PAM type: NRG; PAM sequence: AAG
gtgcaggtagtgtgggcaaa

SEQ ID NO: 99905 - DNA, 20 bp, Artificial Sequence
  Description of Artificial Sequence: Synthetic oligonucleotide
  Target: LAMA2; (-) strand; PAM type: NRG; PAM sequence: GGG
acagaaagtgcaggtagtgt

SEQ ID NO: 99906 - DNA, 20 bp, Artificial Sequence
  Description of Artificial Sequence: Synthetic oligonucleotide
  Target: LAMA2; (-) strand; PAM type: NRG; PAM sequence: TGG
aacagaaagtgcaggtagtg

SEQ ID NO: 99907 - DNA, 20 bp, Artificial Sequence
  Description of Artificial Sequence: Synthetic oligonucleotide
  Target: LAMA2; (-) strand; PAM type: NRG; PAM sequence: TAG
cacttaacagaaagtgcagg

SEQ ID NO: 99908 - DNA, 20 bp, Artificial Sequence
  Description of Artificial Sequence: Synthetic oligonucleotide
  Target: LAMA2; (-) strand; PAM type: NRG; PAM sequence: AGG
aatcacttaacagaaagtgc

SEQ ID NO: 99909 - DNA, 20 bp, Artificial Sequence
  Description of Artificial Sequence: Synthetic oligonucleotide
  Target: LAMA2; (-) strand; PAM type: NRG; PAM sequence: CAG
aaatcacttaacagaaagtg

SEQ ID NO: 99910 - DNA, 20 bp, Artificial Sequence
  Description of Artificial Sequence: Synthetic oligonucleotide
  Target: LAMA2; (-) strand; PAM type: NRG; PAM sequence: AAG
tctataaatcacttaacaga

SEQ ID NO: 99911 - DNA, 20 bp, Artificial Sequence
  Description of Artificial Sequence: Synthetic oligonucleotide
  Target: LAMA2; (-) strand; PAM type: NRG; PAM sequence: CAG
gaagtctataaatcacttaa

SEQ ID NO: 99912 - DNA, 20 bp, Artificial Sequence
  Description of Artificial Sequence: Synthetic oligonucleotide
  Target: LAMA2; (-) strand; PAM type: NRG; PAM sequence: AAG
aaaactaccctgccttactg

SEQ ID NO: 99913 - DNA, 20 bp, Artificial Sequence
  Description of Artificial Sequence: Synthetic oligonucleotide
  Target: LAMA2; (-) strand; PAM type: NRG; PAM sequence: GAG
ttttcaaaagcaaattctta

SEQ ID NO: 99914 - DNA, 20 bp, Artificial Sequence
  Description of Artificial Sequence: Synthetic oligonucleotide
  Target: LAMA2; (-) strand; PAM type: NRG; PAM sequence: TAG
tattttcaaaagcaaattct

SEQ ID NO: 99915 - DNA, 20 bp, Artificial Sequence
  Description of Artificial Sequence: Synthetic oligonucleotide
  Target: LAMA2; (-) strand; PAM type: NRG; PAM sequence: AAG
ctgccatacattattttcaa

SEQ ID NO: 99916 - DNA, 20 bp, Artificial Sequence
  Description of Artificial Sequence: Synthetic oligonucleotide
  Target: LAMA2; (-) strand; PAM type: NRG; PAM sequence: CAG
aacactcaagataaagtgtc

SEQ ID NO: 99917 - DNA, 20 bp, Artificial Sequence
  Description of Artificial Sequence: Synthetic oligonucleotide
  Target: LAMA2; (-) strand; PAM type: NRG; PAM sequence: AAG
gctgtttaacactcaagata

SEQ ID NO: 99918 - DNA, 20 bp, Artificial Sequence
  Description of Artificial Sequence: Synthetic oligonucleotide
  Target: LAMA2; (-) strand; PAM type: NRG; PAM sequence: AAG
tctgtggctgtttaacactc

SEQ ID NO: 99919 - DNA, 20 bp, Artificial Sequence
  Description of Artificial Sequence: Synthetic oligonucleotide
  Target: LAMA2; (-) strand; PAM type: NRG; PAM sequence: TGG
acattgtccaaattgctctg

SEQ ID NO: 99920 - DNA, 20 bp, Artificial Sequence
  Description of Artificial Sequence: Synthetic oligonucleotide
  Target: LAMA2; (-) strand; PAM type: NRG; PAM sequence: AAG
agtgagtaggcacaggtgca

SEQ ID NO: 99921 - DNA, 20 bp, Artificial Sequence
  Description of Artificial Sequence: Synthetic oligonucleotide
  Target: LAMA2; (-) strand; PAM type: NRG; PAM sequence: AGG
agaagaaagtgagtaggcac

SEQ ID NO: 99922 - DNA, 20 bp, Artificial Sequence
  Description of Artificial Sequence: Synthetic oligonucleotide
  Target: LAMA2; (-) strand; PAM type: NRG; PAM sequence: CAG
aagaagaaagtgagtaggca

SEQ ID NO: 99923 - DNA, 20 bp, Artificial Sequence
  Description of Artificial Sequence: Synthetic oligonucleotide
  Target: LAMA2; (-) strand; PAM type: NRG; PAM sequence: AGG
agattaagaagaaagtgagt

SEQ ID NO: 99924 - DNA, 20 bp, Artificial Sequence
  Description of Artificial Sequence: Synthetic oligonucleotide
  Target: LAMA2; (-) strand; PAM type: NRG; PAM sequence: TAG
aagattaagaagaaagtgag

SEQ ID NO: 99925 - DNA, 20 bp, Artificial Sequence
  Description of Artificial Sequence: Synthetic oligonucleotide
  Target: LAMA2; (-) strand; PAM type: NRG; PAM sequence: GAG
ccgaagattaagaagaaagt

SEQ ID NO: 99926 - DNA, 20 bp, Artificial Sequence
  Description of Artificial Sequence: Synthetic oligonucleotide
  Target: LAMA2; (-) strand; PAM type: NRG; PAM sequence: AAG
aaagccgaagattaagaaga

SEQ ID NO: 99927 - DNA, 20 bp, Artificial Sequence
  Description of Artificial Sequence: Synthetic oligonucleotide
  Target: LAMA2; (-) strand; PAM type: NRG; PAM sequence: AAG
acacaaagccgaagattaag

SEQ ID NO: 99928 - DNA, 20 bp, Artificial Sequence
  Description of Artificial Sequence: Synthetic oligonucleotide
  Target: LAMA2; (-) strand; PAM type: NRG; PAM sequence: AAG
tgcacacaaagccgaagatt

SEQ ID NO: 99929 - DNA, 20 bp, Artificial Sequence
  Description of Artificial Sequence: Synthetic oligonucleotide
  Target: LAMA2; (-) strand; PAM type: NRG; PAM sequence: AAG
tcagaatgcacacaaagccg

SEQ ID NO: 99930 - DNA, 20 bp, Artificial Sequence
  Description of Artificial Sequence: Synthetic oligonucleotide
  Target: LAMA2; (-) strand; PAM type: NRG; PAM sequence: AAG
atgttttcagaatgcacaca

SEQ ID NO: 99931 - DNA, 20 bp, Artificial Sequence
  Description of Artificial Sequence: Synthetic oligonucleotide
  Target: LAMA2; (-) strand; PAM type: NRG; PAM sequence: CAG
tgatttacaggaaatgtttt

SEQ ID NO: 99932 - DNA, 20 bp, Artificial Sequence
  Description of Artificial Sequence: Synthetic oligonucleotide
  Target: LAMA2; (-) strand; PAM type: NRG; PAM sequence: AGG
aggaaaaggagatgatttac

SEQ ID NO: 99933 - DNA, 20 bp, Artificial Sequence
  Description of Artificial Sequence: Synthetic oligonucleotide
  Target: LAMA2; (-) strand; PAM type: NRG; PAM sequence: CAG
gaggaaaaggagatgattta

SEQ ID NO: 99934 - DNA, 20 bp, Artificial Sequence
  Description of Artificial Sequence: Synthetic oligonucleotide
  Target: LAMA2; (-) strand; PAM type: NRG; PAM sequence: GAG
aggagctttcagaggaaaag

SEQ ID NO: 99935 - DNA, 20 bp, Artificial Sequence
  Description of Artificial Sequence: Synthetic oligonucleotide
  Target: LAMA2; (-) strand; PAM type: NRG; PAM sequence: AGG
agaggagctttcagaggaaa

SEQ ID NO: 99936 - DNA, 20 bp, Artificial Sequence
  Description of Artificial Sequence: Synthetic oligonucleotide
  Target: LAMA2; (-) strand; PAM type: NRG; PAM sequence: AAG
aagaggagctttcagaggaa

SEQ ID NO: 99937 - DNA, 20 bp, Artificial Sequence
  Description of Artificial Sequence: Synthetic oligonucleotide
  Target: LAMA2; (-) strand; PAM type: NRG; PAM sequence: AGG
caaaaaagaggagctttcag

SEQ ID NO: 99938 - DNA, 20 bp, Artificial Sequence
  Description of Artificial Sequence: Synthetic oligonucleotide
  Target: LAMA2; (-) strand; PAM type: NRG; PAM sequence: GAG
acaaaaaagaggagctttca

SEQ ID NO: 99939 - DNA, 20 bp, Artificial Sequence
  Description of Artificial Sequence: Synthetic oligonucleotide
  Target: LAMA2; (-) strand; PAM type: NRG; PAM sequence: CAG
caacaaaaaagaggagcttt

SEQ ID NO: 99940 - DNA, 20 bp, Artificial Sequence
  Description of Artificial Sequence: Synthetic oligonucleotide
  Target: LAMA2; (-) strand; PAM type: NRG; PAM sequence: GAG
ttccagccaacaaaaaagag

SEQ ID NO: 99941 - DNA, 20 bp, Artificial Sequence
  Description of Artificial Sequence: Synthetic oligonucleotide
  Target: LAMA2; (-) strand; PAM type: NRG; PAM sequence: AGG
gattccagccaacaaaaaag

SEQ ID NO: 99942 - DNA, 20 bp, Artificial Sequence
  Description of Artificial Sequence: Synthetic oligonucleotide
  Target: LAMA2; (-) strand; PAM type: NRG; PAM sequence: GAG
tgattccagccaacaaaaaa

SEQ ID NO: 99943 - DNA, 20 bp, Artificial Sequence
  Description of Artificial Sequence: Synthetic oligonucleotide
  Target: LAMA2; (-) strand; PAM type: NRG; PAM sequence: AAG
tgtgattccagccaacaaaa

SEQ ID NO: 99944 - DNA, 20 bp, Artificial Sequence
  Description of Artificial Sequence: Synthetic oligonucleotide
  Target: LAMA2; (-) strand; PAM type: NRG; PAM sequence: CAG
ctgtaaaaggcttgtgattc

SEQ ID NO: 99945 - DNA, 20 bp, Artificial Sequence
  Description of Artificial Sequence: Synthetic oligonucleotide
  Target: LAMA2; (-) strand; PAM type: NRG; PAM sequence: AGG
gacatttgacaccctgtaaa

SEQ ID NO: 99946 - DNA, 20 bp, Artificial Sequence
  Description of Artificial Sequence: Synthetic oligonucleotide
  Target: LAMA2; (-) strand; PAM type: NRG; PAM sequence: AAG
tgacatttgacaccctgtaa

SEQ ID NO: 99947 - DNA, 20 bp, Artificial Sequence
  Description of Artificial Sequence: Synthetic oligonucleotide
  Target: LAMA2; (-) strand; PAM type: NRG; PAM sequence: CAG
atattatcctcttcaatatc

SEQ ID NO: 99948 - DNA, 20 bp, Artificial Sequence
  Description of Artificial Sequence: Synthetic oligonucleotide
  Target: LAMA2; (-) strand; PAM type: NRG; PAM sequence: AAG
ttggtccctggatgaacaat

SEQ ID NO: 99949 - DNA, 20 bp, Artificial Sequence
  Description of Artificial Sequence: Synthetic oligonucleotide
  Target: LAMA2; (-) strand; PAM type: NRG; PAM sequence: TGG
tacacatactacttggtccc

SEQ ID NO: 99950 - DNA, 20 bp, Artificial Sequence
  Description of Artificial Sequence: Synthetic oligonucleotide
  Target: LAMA2; (-) strand; PAM type: NRG; PAM sequence: TGG
tttttcatacacatactact

SEQ ID NO: 99951 - DNA, 20 bp, Artificial Sequence
  Description of Artificial Sequence: Synthetic oligonucleotide
  Target: LAMA2; (-) strand; PAM type: NRG; PAM sequence: GAG
aaggagaaattagggaaaga

SEQ ID NO: 99952 - DNA, 20 bp, Artificial Sequence
  Description of Artificial Sequence: Synthetic oligonucleotide
  Target: LAMA2; (-) strand; PAM type: NRG; PAM sequence: GAG
tcaaggagaaattagggaaa

SEQ ID NO: 99953 - DNA, 20 bp, Artificial Sequence
  Description of Artificial Sequence: Synthetic oligonucleotide
  Target: LAMA2; (-) strand; PAM type: NRG; PAM sequence: AAG
catcaaggagaaattaggga

SEQ ID NO: 99954 - DNA, 20 bp, Artificial Sequence
  Description of Artificial Sequence: Synthetic oligonucleotide
  Target: LAMA2; (-) strand; PAM type: NRG; PAM sequence: GGG
ggggcatcaaggagaaatta

SEQ ID NO: 99955 - DNA, 20 bp, Artificial Sequence
  Description of Artificial Sequence: Synthetic oligonucleotide
  Target: LAMA2; (-) strand; PAM type: NRG; PAM sequence: AGG
cggggcatcaaggagaaatt

SEQ ID NO: 99956 - DNA, 20 bp, Artificial Sequence
  Description of Artificial Sequence: Synthetic oligonucleotide
  Target: LAMA2; (-) strand; PAM type: NRG; PAM sequence: TAG
tcggggcatcaaggagaaat

SEQ ID NO: 99957 - DNA, 20 bp, Artificial Sequence
  Description of Artificial Sequence: Synthetic oligonucleotide
  Target: LAMA2; (-) strand; PAM type: NRG; PAM sequence: GAG
aaataaatcggggcatcaag

SEQ ID NO: 99958 - DNA, 20 bp, Artificial Sequence
  Description of Artificial Sequence: Synthetic oligonucleotide
  Target: LAMA2; (-) strand; PAM type: NRG; PAM sequence: AGG
ttaaataaatcggggcatca

SEQ ID NO: 99959 - DNA, 20 bp, Artificial Sequence
  Description of Artificial Sequence: Synthetic oligonucleotide
  Target: LAMA2; (-) strand; PAM type: NRG; PAM sequence: AAG
attaaataaatcggggcatc

SEQ ID NO: 99960 - DNA, 20 bp, Artificial Sequence
  Description of Artificial Sequence: Synthetic oligonucleotide
  Target: LAMA2; (-) strand; PAM type: NRG; PAM sequence: GGG
taaaacaattaaataaatcg

SEQ ID NO: 99961 - DNA, 20 bp, Artificial Sequence
  Description of Artificial Sequence: Synthetic oligonucleotide
  Target: LAMA2; (-) strand; PAM type: NRG; PAM sequence: GGG
ttaaaacaattaaataaatc

SEQ ID NO: 99962 - DNA, 20 bp, Artificial Sequence
  Description of Artificial Sequence: Synthetic oligonucleotide
  Target: LAMA2; (-) strand; PAM type: NRG; PAM sequence: CGG
tttaaaacaattaaataaat

SEQ ID NO: 99963 - DNA, 20 bp, Artificial Sequence
  Description of Artificial Sequence: Synthetic oligonucleotide
  Target: LAMA2; (-) strand; PAM type: NRG; PAM sequence: TGG
ttaaatttttctaatccaaa

SEQ ID NO: 99964 - DNA, 20 bp, Artificial Sequence
  Description of Artificial Sequence: Synthetic oligonucleotide
  Target: LAMA2; (-) strand; PAM type: NRG; PAM sequence: GGG
ttattatagtgtactcacca

SEQ ID NO: 99965 - DNA, 20 bp, Artificial Sequence
  Description of Artificial Sequence: Synthetic oligonucleotide
  Target: LAMA2; (-) strand; PAM type: NRG; PAM sequence: AGG
tttattatagtgtactcacc

SEQ ID NO: 99966 - DNA, 20 bp, Artificial Sequence
  Description of Artificial Sequence: Synthetic oligonucleotide
  Target: LAMA2; (-) strand; PAM type: NRG; PAM sequence: CAG
ttttattatagtgtactcac

SEQ ID NO: 99967 - DNA, 20 bp, Artificial Sequence
  Description of Artificial Sequence: Synthetic oligonucleotide
  Target: LAMA2; (-) strand; PAM type: NRG; PAM sequence: TAG
atctcctgtagcttttatta

SEQ ID NO: 99968 - DNA, 20 bp, Artificial Sequence
  Description of Artificial Sequence: Synthetic oligonucleotide
  Target: LAMA2; (-) strand; PAM type: NRG; PAM sequence: TAG
cttctcttgtatatctcctg

SEQ ID NO: 99969 - DNA, 20 bp, Artificial Sequence
  Description of Artificial Sequence: Synthetic oligonucleotide
  Target: LAMA2; (-) strand; PAM type: NRG; PAM sequence: TGG
cagtgagctcctccaaaaaa

SEQ ID NO: 99970 - DNA, 20 bp, Artificial Sequence
  Description of Artificial Sequence: Synthetic oligonucleotide
  Target: LAMA2; (-) strand; PAM type: NRG; PAM sequence: GAG
taacacacaggttttacagt

SEQ ID NO: 99971 - DNA, 20 bp, Artificial Sequence
  Description of Artificial Sequence: Synthetic oligonucleotide
  Target: LAMA2; (-) strand; PAM type: NRG; PAM sequence: CAG
cccttaacacacaggtttta

SEQ ID NO: 99972 - DNA, 20 bp, Artificial Sequence
  Description of Artificial Sequence: Synthetic oligonucleotide
  Target: LAMA2; (-) strand; PAM type: NRG; PAM sequence: AGG
gttgataccccttaacacac

SEQ ID NO: 99973 - DNA, 20 bp, Artificial Sequence
  Description of Artificial Sequence: Synthetic oligonucleotide
  Target: LAMA2; (-) strand; PAM type: NRG; PAM sequence: CAG
agttgataccccttaacaca

SEQ ID NO: 99974 - DNA, 20 bp, Artificial Sequence
  Description of Artificial Sequence: Synthetic oligonucleotide
  Target: LAMA2; (-) strand; PAM type: NRG; PAM sequence: AAG
tttgaattttctttacattt

SEQ ID NO: 99975 - DNA, 20 bp, Artificial Sequence
  Description of Artificial Sequence: Synthetic oligonucleotide
  Target: LAMA2; (-) strand; PAM type: NRG; PAM sequence: TGG
gaagcttccagtattaagtg

SEQ ID NO: 99976 - DNA, 20 bp, Artificial Sequence
  Description of Artificial Sequence: Synthetic oligonucleotide
  Target: LAMA2; (-) strand; PAM type: NRG; PAM sequence: AAG
ttcttgaagcttccagtatt

SEQ ID NO: 99977 - DNA, 20 bp, Artificial Sequence
  Description of Artificial Sequence: Synthetic oligonucleotide
  Target: LAMA2; (-) strand; PAM type: NRG; PAM sequence: CAG
tcatatgttcttgaagcttc

SEQ ID NO: 99978 - DNA, 20 bp, Artificial Sequence
  Description of Artificial Sequence: Synthetic oligonucleotide
  Target: LAMA2; (-) strand; PAM type: NRG; PAM sequence: AAG
tttcttttcatatgttcttg

SEQ ID NO: 99979 - DNA, 20 bp, Artificial Sequence
  Description of Artificial Sequence: Synthetic oligonucleotide
  Target: LAMA2; (-) strand; PAM type: NRG; PAM sequence: AAG
aatcctgaaattaattgttt

SEQ ID NO: 99980 - DNA, 20 bp, Artificial Sequence
  Description of Artificial Sequence: Synthetic oligonucleotide
  Target: LAMA2; (-) strand; PAM type: NRG; PAM sequence: CAG
taatttcctactattcccac

SEQ ID NO: 99981 - DNA, 20 bp, Artificial Sequence
  Description of Artificial Sequence: Synthetic oligonucleotide
  Target: LAMA2; (-) strand; PAM type: NRG; PAM sequence: AAG
gcacatgccttgtattttgt

SEQ ID NO: 99982 - DNA, 20 bp, Artificial Sequence
  Description of Artificial Sequence: Synthetic oligonucleotide
  Target: LAMA2; (-) strand; PAM type: NRG; PAM sequence: AGG
tccaaattctgttacttatt

SEQ ID NO: 99983 - DNA, 20 bp, Artificial Sequence
  Description of Artificial Sequence: Synthetic oligonucleotide
  Target: LAMA2; (-) strand; PAM type: NRG; PAM sequence: TAG
ttccaaattctgttacttat

SEQ ID NO: 99984 - DNA, 20 bp, Artificial Sequence
  Description of Artificial Sequence: Synthetic oligonucleotide
  Target: LAMA2; (-) strand; PAM type: NRG; PAM sequence: TGG
atttaaggatttctacaata

SEQ ID NO: 99985 - DNA, 20 bp, Artificial Sequence
  Description of Artificial Sequence: Synthetic oligonucleotide
  Target: LAMA2; (-) strand; PAM type: NRG; PAM sequence: AGG
atttcttagactggtattta

SEQ ID NO: 99986 - DNA, 20 bp, Artificial Sequence
  Description of Artificial Sequence: Synthetic oligonucleotide
  Target: LAMA2; (-) strand; PAM type: NRG; PAM sequence: AAG
tatttcttagactggtattt

SEQ ID NO: 99987 - DNA, 20 bp, Artificial Sequence
  Description of Artificial Sequence: Synthetic oligonucleotide
  Target: LAMA2; (-) strand; PAM type: NRG; PAM sequence: TGG
taaataactatttcttagac

SEQ ID NO: 99988 - DNA, 20 bp, Artificial Sequence
  Description of Artificial Sequence: Synthetic oligonucleotide
  Target: LAMA2; (-) strand; PAM type: NRG; PAM sequence: TAG
aaaattaaataactatttct

SEQ ID NO: 99989 - DNA, 20 bp, Artificial Sequence
  Description of Artificial Sequence: Synthetic oligonucleotide
  Target: LAMA2; (-) strand; PAM type: NRG; PAM sequence: TAG
tgtagtgtttccttattaca

SEQ ID NO: 99990 - DNA, 20 bp, Artificial Sequence
  Description of Artificial Sequence: Synthetic oligonucleotide
  Target: LAMA2; (-) strand; PAM type: NRG; PAM sequence: TAG
tttttcaaaataaaaacttg

SEQ ID NO: 99991 - DNA, 20 bp, Artificial Sequence
  Description of Artificial Sequence: Synthetic oligonucleotide
  Target: LAMA2; (-) strand; PAM type: NRG; PAM sequence: TGG
ataatagttttcctaaaatg

SEQ ID NO: 99992 - DNA, 20 bp, Artificial Sequence
  Description of Artificial Sequence: Synthetic oligonucleotide
  Target: LAMA2; (-) strand; PAM type: NRG; PAM sequence: TAG
tatactcaattctatgataa

SEQ ID NO: 99993 - DNA, 20 bp, Artificial Sequence
  Description of Artificial Sequence: Synthetic oligonucleotide
  Target: LAMA2; (-) strand; PAM type: NRG; PAM sequence: TGG
tagtatactagccttttaat

SEQ ID NO: 99994 - DNA, 20 bp, Artificial Sequence
  Description of Artificial Sequence: Synthetic oligonucleotide
  Target: LAMA2; (-) strand; PAM type: NRG; PAM sequence: TAG
ttttgcccatgctagtatac

SEQ ID NO: 99995 - DNA, 20 bp, Artificial Sequence
  Description of Artificial Sequence: Synthetic oligonucleotide
  Target: LAMA2; (-) strand; PAM type: NRG; PAM sequence: TAG
taattatcttttgcccatgc

SEQ ID NO: 99996 - DNA, 20 bp, Artificial Sequence
  Description of Artificial Sequence: Synthetic oligonucleotide
  Target: LAMA2; (-) strand; PAM type: NRG; PAM sequence: TGG
ttattactattacctacttc

SEQ ID NO: 99997 - DNA, 20 bp, Artificial Sequence
  Description of Artificial Sequence: Synthetic oligonucleotide
  Target: LAMA2; (-) strand; PAM type: NRG; PAM sequence: AAG
aattagtttccgaatctgta

SEQ ID NO: 99998 - DNA, 20 bp, Artificial Sequence
  Description of Artificial Sequence: Synthetic oligonucleotide
  Target: LAMA2; (-) strand; PAM type: NRG; PAM sequence: TAG
cctcacccctcacatctaat

SEQ ID NO: 99999 - DNA, 20 bp, Artificial Sequence
  Description of Artificial Sequence: Synthetic oligonucleotide
  Target: LAMA2; (-) strand; PAM type: NRG; PAM sequence: CGG
acctgtcttcaacttctgcc

SEQ ID NO: 100000 - DNA, 20 bp, Artificial Sequence
  Description of Artificial Sequence: Synthetic oligonucleotide
  Target: LAMA2; (-) strand; PAM type: NRG; PAM sequence: GGG
aatagcaccaccatttttgg

SEQ ID NO: 100001 - DNA, 20 bp, Artificial Sequence
  Description of Artificial Sequence: Synthetic oligonucleotide
  Target: LAMA2; (-) strand; PAM type: NRG; PAM sequence: GGG
taatagcaccaccatttttg

SEQ ID NO: 100002 - DNA, 20 bp, Artificial Sequence
  Description of Artificial Sequence: Synthetic oligonucleotide
  Target: LAMA2; (-) strand; PAM type: NRG; PAM sequence: GGG
ttaatagcaccaccattttt

SEQ ID NO: 100003 - DNA, 20 bp, Artificial Sequence
  Description of Artificial Sequence: Synthetic oligonucleotide
  Target: LAMA2; (-) strand; PAM type: NRG; PAM sequence: TGG
gttaatagcaccaccatttt

SEQ ID NO: 100004 - DNA, 20 bp, Artificial Sequence
  Description of Artificial Sequence: Synthetic oligonucleotide
  Target: LAMA2; (-) strand; PAM type: NRG; PAM sequence: TAG
ggtttctccatttcagttaa

SEQ ID NO: 100005 - DNA, 20 bp, Artificial Sequence
  Description of Artificial Sequence: Synthetic oligonucleotide
  Target: LAMA2; (-) strand; PAM type: NRG; PAM sequence: CAG
ctctcctggtttctccattt

SEQ ID NO: 100006 - DNA, 20 bp, Artificial Sequence
  Description of Artificial Sequence: Synthetic oligonucleotide
  Target: LAMA2; (-) strand; PAM type: NRG; PAM sequence: TGG
cttctctaacggctctctcc

SEQ ID NO: 100007 - DNA, 20 bp, Artificial Sequence
  Description of Artificial Sequence: Synthetic oligonucleotide
  Target: LAMA2; (-) strand; PAM type: NRG; PAM sequence: CGG
aaattatctttcttctctaa

SEQ ID NO: 100008 - DNA, 20 bp, Artificial Sequence
  Description of Artificial Sequence: Synthetic oligonucleotide
  Target: LAMA2; (-) strand; PAM type: NRG; PAM sequence: CAG
tttgcatatttccattcaga

SEQ ID NO: 100009 - DNA, 20 bp, Artificial Sequence
  Description of Artificial Sequence: Synthetic oligonucleotide
  Target: LAMA2; (-) strand; PAM type: NRG; PAM sequence: CAG
gctatttgcatatttccatt

SEQ ID NO: 100010 - DNA, 20 bp, Artificial Sequence
  Description of Artificial Sequence: Synthetic oligonucleotide
  Target: LAMA2; (-) strand; PAM type: NRG; PAM sequence: CAG
tttcagatttccatttcctg

SEQ ID NO: 100011 - DNA, 20 bp, Artificial Sequence
  Description of Artificial Sequence: Synthetic oligonucleotide
  Target: LAMA2; (-) strand; PAM type: NRG; PAM sequence: CAG
tcatctgctcctgcaatttt

SEQ ID NO: 100012 - DNA, 20 bp, Artificial Sequence
  Description of Artificial Sequence: Synthetic oligonucleotide
  Target: LAMA2; (-) strand; PAM type: NRG; PAM sequence: GGG
gccttggataacattagcct

SEQ ID NO: 100013 - DNA, 20 bp, Artificial Sequence
  Description of Artificial Sequence: Synthetic oligonucleotide
  Target: LAMA2; (-) strand; PAM type: NRG; PAM sequence: TGG
cgccttggataacattagcc

SEQ ID NO: 100014 - DNA, 20 bp, Artificial Sequence
  Description of Artificial Sequence: Synthetic oligonucleotide
  Target: LAMA2; (-) strand; PAM type: NRG; PAM sequence: TAG
atactcgccttggataacat

SEQ ID NO: 100015 - DNA, 20 bp, Artificial Sequence
  Description of Artificial Sequence: Synthetic oligonucleotide
  Target: LAMA2; (-) strand; PAM type: NRG; PAM sequence: TGG
ttctttctatatactcgcct

SEQ ID NO: 100016 - DNA, 20 bp, Artificial Sequence
  Description of Artificial Sequence: Synthetic oligonucleotide
  Target: LAMA2; (-) strand; PAM type: NRG; PAM sequence: AAG
ttttctcctttcccaacata

SEQ ID NO: 100017 - DNA, 20 bp, Artificial Sequence
  Description of Artificial Sequence: Synthetic oligonucleotide
  Target: LAMA2; (-) strand; PAM type: NRG; PAM sequence: TGG
tcttctgactgctcctgcct

SEQ ID NO: 100018 - DNA, 20 bp, Artificial Sequence
  Description of Artificial Sequence: Synthetic oligonucleotide
  Target: LAMA2; (-) strand; PAM type: NRG; PAM sequence: GGG
tgtcaatggcagtgccgcct

SEQ ID NO: 100019 - DNA, 20 bp, Artificial Sequence
  Description of Artificial Sequence: Synthetic oligonucleotide
  Target: LAMA2; (-) strand; PAM type: NRG; PAM sequence: TGG
gtgtcaatggcagtgccgcc

SEQ ID NO: 100020 - DNA, 20 bp, Artificial Sequence
  Description of Artificial Sequence: Synthetic oligonucleotide
  Target: LAMA2; (-) strand; PAM type: NRG; PAM sequence: CAG
ctctcccttggtgtcaatgg

SEQ ID NO: 100021 - DNA, 20 bp, Artificial Sequence
  Description of Artificial Sequence: Synthetic oligonucleotide
  Target: LAMA2; (-) strand; PAM type: NRG; PAM sequence: TGG
cttctctcccttggtgtcaa

SEQ ID NO: 100022 - DNA, 20 bp, Artificial Sequence
  Description of Artificial Sequence: Synthetic oligonucleotide
  Target: LAMA2; (-) strand; PAM type: NRG; PAM sequence: TGG
ttcactgctcttctctccct

SEQ ID NO: 100023 - DNA, 20 bp, Artificial Sequence
  Description of Artificial Sequence: Synthetic oligonucleotide
  Target: LAMA2; (-) strand; PAM type: NRG; PAM sequence: CAG
ttgggtctcccttgtgagag

SEQ ID NO: 100024 - DNA, 20 bp, Artificial Sequence
  Description of Artificial Sequence: Synthetic oligonucleotide
  Target: LAMA2; (-) strand; PAM type: NRG; PAM sequence: GAG
tcattgggtctcccttgtga

SEQ ID NO: 100025 - DNA, 20 bp, Artificial Sequence
  Description of Artificial Sequence: Synthetic oligonucleotide
  Target: LAMA2; (-) strand; PAM type: NRG; PAM sequence: GAG
attcattgggtctcccttgt

SEQ ID NO: 100026 - DNA, 20 bp, Artificial Sequence
  Description of Artificial Sequence: Synthetic oligonucleotide
  Target: LAMA2; (-) strand; PAM type: NRG; PAM sequence: GGG
caattgccaccatattcatt

SEQ ID NO: 100027 - DNA, 20 bp, Artificial Sequence
  Description of Artificial Sequence: Synthetic oligonucleotide
  Target: LAMA2; (-) strand; PAM type: NRG; PAM sequence: TGG
tcaattgccaccatattcat

SEQ ID NO: 100028 - DNA, 20 bp, Artificial Sequence
  Description of Artificial Sequence: Synthetic oligonucleotide
  Target: LAMA2; (-) strand; PAM type: NRG; PAM sequence: TAG
atttatttgctcaattacaa

SEQ ID NO: 100029 - DNA, 20 bp, Artificial Sequence
  Description of Artificial Sequence: Synthetic oligonucleotide
  Target: LAMA2; (-) strand; PAM type: NRG; PAM sequence: AAG
ttctatgtgcttcaggcggc

SEQ ID NO: 100030 - DNA, 20 bp, Artificial Sequence
  Description of Artificial Sequence: Synthetic oligonucleotide
  Target: LAMA2; (-) strand; PAM type: NRG; PAM sequence: CGG
tggcttctatgtgcttcagg

SEQ ID NO: 100031 - DNA, 20 bp, Artificial Sequence
  Description of Artificial Sequence: Synthetic oligonucleotide
  Target: LAMA2; (-) strand; PAM type: NRG; PAM sequence: AGG
tattggcttctatgtgcttc

SEQ ID NO: 100032 - DNA, 20 bp, Artificial Sequence
  Description of Artificial Sequence: Synthetic oligonucleotide
  Target: LAMA2; (-) strand; PAM type: NRG; PAM sequence: CAG
ttattggcttctatgtgctt

SEQ ID NO: 100033 - DNA, 20 bp, Artificial Sequence
  Description of Artificial Sequence: Synthetic oligonucleotide
  Target: LAMA2; (-) strand; PAM type: NRG; PAM sequence: TGG
gaagccagtgccaacgttat

SEQ ID NO: 100034 - DNA, 20 bp, Artificial Sequence
  Description of Artificial Sequence: Synthetic oligonucleotide
  Target: LAMA2; (-) strand; PAM type: NRG; PAM sequence: CAG
gcctttcttttctccgaagc

SEQ ID NO: 100035 - DNA, 20 bp, Artificial Sequence
  Description of Artificial Sequence: Synthetic oligonucleotide
  Target: LAMA2; (-) strand; PAM type: NRG; PAM sequence: AAG
taaagcctttcttttctccg

SEQ ID NO: 100036 - DNA, 20 bp, Artificial Sequence
  Description of Artificial Sequence: Synthetic oligonucleotide
  Target: LAMA2; (-) strand; PAM type: NRG; PAM sequence: AAG
tgctgaacaattttgcagta

SEQ ID NO: 100037 - DNA, 20 bp, Artificial Sequence
  Description of Artificial Sequence: Synthetic oligonucleotide
  Target: LAMA2; (-) strand; PAM type: NRG; PAM sequence: CAG
ctccttgctgaacaattttg

SEQ ID NO: 100038 - DNA, 20 bp, Artificial Sequence
  Description of Artificial Sequence: Synthetic oligonucleotide
  Target: LAMA2; (-) strand; PAM type: NRG; PAM sequence: CAG
catatcccaaattagggaga

SEQ ID NO: 100039 - DNA, 20 bp, Artificial Sequence
  Description of Artificial Sequence: Synthetic oligonucleotide
  Target: LAMA2; (-) strand; PAM type: NRG; PAM sequence: GAG
tccccatatcccaaattagg

SEQ ID NO: 100040 - DNA, 20 bp, Artificial Sequence
  Description of Artificial Sequence: Synthetic oligonucleotide
  Target: LAMA2; (-) strand; PAM type: NRG; PAM sequence: GGG
cttccccatatcccaaatta

SEQ ID NO: 100041 - DNA, 20 bp, Artificial Sequence
  Description of Artificial Sequence: Synthetic oligonucleotide
  Target: LAMA2; (-) strand; PAM type: NRG; PAM sequence: AGG
ccttccccatatcccaaatt

SEQ ID NO: 100042 - DNA, 20 bp, Artificial Sequence
  Description of Artificial Sequence: Synthetic oligonucleotide
  Target: LAMA2; (-) strand; PAM type: NRG; PAM sequence: TAG
accttccccatatcccaaat

SEQ ID NO: 100043 - DNA, 20 bp, Artificial Sequence
  Description of Artificial Sequence: Synthetic oligonucleotide
  Target: LAMA2; (-) strand; PAM type: NRG; PAM sequence: CAG
ccaatcagactctgccaagc

SEQ ID NO: 100044 - DNA, 20 bp, Artificial Sequence
  Description of Artificial Sequence: Synthetic oligonucleotide
  Target: LAMA2; (-) strand; PAM type: NRG; PAM sequence: AAG
ccctccaatcagactctgcc

SEQ ID NO: 100045 - DNA, 20 bp, Artificial Sequence
  Description of Artificial Sequence: Synthetic oligonucleotide
  Target: LAMA2; (-) strand; PAM type: NRG; PAM sequence: CAG
caaatttgaagccctccaat

SEQ ID NO: 100046 - DNA, 20 bp, Artificial Sequence
  Description of Artificial Sequence: Synthetic oligonucleotide
  Target: LAMA2; (-) strand; PAM type: NRG; PAM sequence: AAG
actgtaagtgatcaaatttg

SEQ ID NO: 100047 - DNA, 20 bp, Artificial Sequence
  Description of Artificial Sequence: Synthetic oligonucleotide
  Target: LAMA2; (-) strand; PAM type: NRG; PAM sequence: AAG
gcctcaatataccttactgt

SEQ ID NO: 100048 - DNA, 20 bp, Artificial Sequence
  Description of Artificial Sequence: Synthetic oligonucleotide
  Target: LAMA2; (-) strand; PAM type: NRG; PAM sequence: GGG
ccattggcccagaagatcca

SEQ ID NO: 100049 - DNA, 20 bp, Artificial Sequence
  Description of Artificial Sequence: Synthetic oligonucleotide
  Target: LAMA2; (-) strand; PAM type: NRG; PAM sequence: AGG
tccattggcccagaagatcc

SEQ ID NO: 100050 - DNA, 20 bp, Artificial Sequence
  Description of Artificial Sequence: Synthetic oligonucleotide
  Target: LAMA2; (-) strand; PAM type: NRG; PAM sequence: CAG
gtccattggcccagaagatc

SEQ ID NO: 100051 - DNA, 20 bp, Artificial Sequence
  Description of Artificial Sequence: Synthetic oligonucleotide
  Target: LAMA2; (-) strand; PAM type: NRG; PAM sequence: AAG
tgaggggtccattggcccag

SEQ ID NO: 100052 - DNA, 20 bp, Artificial Sequence
  Description of Artificial Sequence: Synthetic oligonucleotide
  Target: LAMA2; (-) strand; PAM type: NRG; PAM sequence: CAG
aaatgaggggtccattggcc

SEQ ID NO: 100053 - DNA, 20 bp, Artificial Sequence
  Description of Artificial Sequence: Synthetic oligonucleotide
  Target: LAMA2; (-) strand; PAM type: NRG; PAM sequence: TGG
ttcagaaatgaggggtccat

SEQ ID NO: 100054 - DNA, 20 bp, Artificial Sequence
  Description of Artificial Sequence: Synthetic oligonucleotide
  Target: LAMA2; (-) strand; PAM type: NRG; PAM sequence: GGG
ggaactccttcagaaatgag

SEQ ID NO: 100055 - DNA, 20 bp, Artificial Sequence
  Description of Artificial Sequence: Synthetic oligonucleotide
  Target: LAMA2; (-) strand; PAM type: NRG; PAM sequence: GGG
tggaactccttcagaaatga

SEQ ID NO: 100056 - DNA, 20 bp, Artificial Sequence
  Description of Artificial Sequence: Synthetic oligonucleotide
  Target: LAMA2; (-) strand; PAM type: NRG; PAM sequence: AGG
ttggaactccttcagaaatg

SEQ ID NO: 100057 - DNA, 20 bp, Artificial Sequence
  Description of Artificial Sequence: Synthetic oligonucleotide
  Target: LAMA2; (-) strand; PAM type: NRG; PAM sequence: GAG
attggaactccttcagaaat

SEQ ID NO: 100058 - DNA, 20 bp, Artificial Sequence
  Description of Artificial Sequence: Synthetic oligonucleotide
  Target: LAMA2; (-) strand; PAM type: NRG; PAM sequence: CAG
cctggacattggaactcctt

SEQ ID NO: 100059 - DNA, 20 bp, Artificial Sequence
  Description of Artificial Sequence: Synthetic oligonucleotide
  Target: LAMA2; (-) strand; PAM type: NRG; PAM sequence: TGG
caaaatcaaaacctggacat

SEQ ID NO: 100060 - DNA, 20 bp, Artificial Sequence
  Description of Artificial Sequence: Synthetic oligonucleotide
  Target: LAMA2; (-) strand; PAM type: NRG; PAM sequence: TGG
acagggacaaaatcaaaacc

SEQ ID NO: 100061 - DNA, 20 bp, Artificial Sequence
  Description of Artificial Sequence: Synthetic oligonucleotide
  Target: LAMA2; (-) strand; PAM type: NRG; PAM sequence: GGG
ccccttgaaccaacaagaca

SEQ ID NO: 100062 - DNA, 20 bp, Artificial Sequence
  Description of Artificial Sequence: Synthetic oligonucleotide
  Target: LAMA2; (-) strand; PAM type: NRG; PAM sequence: AGG
tccccttgaaccaacaagac

SEQ ID NO: 100063 - DNA, 20 bp, Artificial Sequence
  Description of Artificial Sequence: Synthetic oligonucleotide
  Target: LAMA2; (-) strand; PAM type: NRG; PAM sequence: CAG
ctccccttgaaccaacaaga

SEQ ID NO: 100064 - DNA, 20 bp, Artificial Sequence
  Description of Artificial Sequence: Synthetic oligonucleotide
  Target: LAMA2; (-) strand; PAM type: NRG; PAM sequence: AAG
attcctccccttgaaccaac

SEQ ID NO: 100065 - DNA, 20 bp, Artificial Sequence
  Description of Artificial Sequence: Synthetic oligonucleotide
  Target: LAMA2; (-) strand; PAM type: NRG; PAM sequence: AGG
ttttgacctctaacaacacc

SEQ ID NO: 100066 - DNA, 20 bp, Artificial Sequence
  Description of Artificial Sequence: Synthetic oligonucleotide
  Target: LAMA2; (-) strand; PAM type: NRG; PAM sequence: CAG
attttgacctctaacaacac

SEQ ID NO: 100067 - DNA, 20 bp, Artificial Sequence
  Description of Artificial Sequence: Synthetic oligonucleotide
  Target: LAMA2; (-) strand; PAM type: NRG; PAM sequence: TAG
tgtagcccaggcatgttcaa

SEQ ID NO: 100068 - DNA, 20 bp, Artificial Sequence
  Description of Artificial Sequence: Synthetic oligonucleotide
  Target: LAMA2; (-) strand; PAM type: NRG; PAM sequence: AGG
agctgcaagtcatgtagccc

SEQ ID NO: 100069 - DNA, 20 bp, Artificial Sequence
  Description of Artificial Sequence: Synthetic oligonucleotide
  Target: LAMA2; (-) strand; PAM type: NRG; PAM sequence: CAG
aagctgcaagtcatgtagcc

SEQ ID NO: 100070 - DNA, 20 bp, Artificial Sequence
  Description of Artificial Sequence: Synthetic oligonucleotide
  Target: LAMA2; (-) strand; PAM type: NRG; PAM sequence: TAG
gccaaaagctgcaagtcatg

SEQ ID NO: 100071 - DNA, 20 bp, Artificial Sequence
  Description of Artificial Sequence: Synthetic oligonucleotide
  Target: LAMA2; (-) strand; PAM type: NRG; PAM sequence: AAG
ataacagagccaaaagctgc

SEQ ID NO: 100072 - DNA, 20 bp, Artificial Sequence
  Description of Artificial Sequence: Synthetic oligonucleotide
  Target: LAMA2; (-) strand; PAM type: NRG; PAM sequence: AAG
tttaggtataacagagccaa

SEQ ID NO: 100073 - DNA, 20 bp, Artificial Sequence
  Description of Artificial Sequence: Synthetic oligonucleotide
  Target: LAMA2; (-) strand; PAM type: NRG; PAM sequence: GAG
gttaccttttaggtataaca

SEQ ID NO: 100074 - DNA, 20 bp, Artificial Sequence
  Description of Artificial Sequence: Synthetic oligonucleotide
  Target: LAMA2; (-) strand; PAM type: NRG; PAM sequence: CAG
aagttaccttttaggtataa

SEQ ID NO: 100075 - DNA, 20 bp, Artificial Sequence
  Description of Artificial Sequence: Synthetic oligonucleotide
  Target: LAMA2; (-) strand; PAM type: NRG; PAM sequence: AGG
aaaatgtcaagttacctttt

SEQ ID NO: 100076 - DNA, 20 bp, Artificial Sequence
  Description of Artificial Sequence: Synthetic oligonucleotide
  Target: LAMA2; (-) strand; PAM type: NRG; PAM sequence: TAG
caaaatgtcaagttaccttt

SEQ ID NO: 100077 - DNA, 20 bp, Artificial Sequence
  Description of Artificial Sequence: Synthetic oligonucleotide
  Target: LAMA2; (-) strand; PAM type: NRG; PAM sequence: AAG
cctgttgataacaaaatgtc

SEQ ID NO: 100078 - DNA, 20 bp, Artificial Sequence
  Description of Artificial Sequence: Synthetic oligonucleotide
  Target: LAMA2; (-) strand; PAM type: NRG; PAM sequence: GGG
ctacaggaccaaccaaaacc

SEQ ID NO: 100079 - DNA, 20 bp, Artificial Sequence
  Description of Artificial Sequence: Synthetic oligonucleotide
  Target: LAMA2; (-) strand; PAM type: NRG; PAM sequence: CGG
actacaggaccaaccaaaac

SEQ ID NO: 100080 - DNA, 20 bp, Artificial Sequence
  Description of Artificial Sequence: Synthetic oligonucleotide
  Target: LAMA2; (-) strand; PAM type: NRG; PAM sequence: AGG
gactctgagagtgtaactac

SEQ ID NO: 100081 - DNA, 20 bp, Artificial Sequence
  Description of Artificial Sequence: Synthetic oligonucleotide
  Target: LAMA2; (-) strand; PAM type: NRG; PAM sequence: CAG
tgactctgagagtgtaacta

SEQ ID NO: 100082 - DNA, 20 bp, Artificial Sequence
  Description of Artificial Sequence: Synthetic oligonucleotide
  Target: LAMA2; (-) strand; PAM type: NRG; PAM sequence: GAG
aaattcatcaatgactctga

SEQ ID NO: 100083 - DNA, 20 bp, Artificial Sequence
  Description of Artificial Sequence: Synthetic oligonucleotide
  Target: LAMA2; (-) strand; PAM type: NRG; PAM sequence: GAG
caaaattcatcaatgactct

SEQ ID NO: 100084 - DNA, 20 bp, Artificial Sequence
  Description of Artificial Sequence: Synthetic oligonucleotide
  Target: LAMA2; (-) strand; PAM type: NRG; PAM sequence: TGG
aattctgctttcattattga

SEQ ID NO: 100085 - DNA, 20 bp, Artificial Sequence
  Description of Artificial Sequence: Synthetic oligonucleotide
  Target: LAMA2; (-) strand; PAM type: NRG; PAM sequence: TAG
atcctgctaaccaatcaggg

SEQ ID NO: 100086 - DNA, 20 bp, Artificial Sequence
  Description of Artificial Sequence: Synthetic oligonucleotide
  Target: LAMA2; (-) strand; PAM type: NRG; PAM sequence: GGG
ttgatcctgctaaccaatca

SEQ ID NO: 100087 - DNA, 20 bp, Artificial Sequence
  Description of Artificial Sequence: Synthetic oligonucleotide
  Target: LAMA2; (-) strand; PAM type: NRG; PAM sequence: AGG
attgatcctgctaaccaatc

SEQ ID NO: 100088 - DNA, 20 bp, Artificial Sequence
  Description of Artificial Sequence: Synthetic oligonucleotide
  Target: LAMA2; (-) strand; PAM type: NRG; PAM sequence: CAG
tattgatcctgctaaccaat

SEQ ID NO: 100089 - DNA, 20 bp, Artificial Sequence
  Description of Artificial Sequence: Synthetic oligonucleotide
  Target: LAMA2; (-) strand; PAM type: NRG; PAM sequence: GGG
ttgatattttgattctttca

SEQ ID NO: 100090 - DNA, 20 bp, Artificial Sequence
  Description of Artificial Sequence: Synthetic oligonucleotide
  Target: LAMA2; (-) strand; PAM type: NRG; PAM sequence: AGG
tttgatattttgattctttc

SEQ ID NO: 100091 - DNA, 20 bp, Artificial Sequence
  Description of Artificial Sequence: Synthetic oligonucleotide
  Target: LAMA2; (-) strand; PAM type: NRG; PAM sequence: CAG
atttgatattttgattcttt

SEQ ID NO: 100092 - DNA, 20 bp, Artificial Sequence
  Description of Artificial Sequence: Synthetic oligonucleotide
  Target: LAMA2; (-) strand; PAM type: NRG; PAM sequence: AAG
atgcaatcaataaagtttga

SEQ ID NO: 100093 - DNA, 20 bp, Artificial Sequence
  Description of Artificial Sequence: Synthetic oligonucleotide
  Target: LAMA2; (-) strand; PAM type: NRG; PAM sequence: AAG
tacagtggatgcaatcaata

SEQ ID NO: 100094 - DNA, 20 bp, Artificial Sequence
  Description of Artificial Sequence: Synthetic oligonucleotide
  Target: LAMA2; (-) strand; PAM type: NRG; PAM sequence: TGG
taaaaaagtgtatcttacag

SEQ ID NO: 100095 - DNA, 20 bp, Artificial Sequence
  Description of Artificial Sequence: Synthetic oligonucleotide
  Target: LAMA2; (-) strand; PAM type: NRG; PAM sequence: CAG
atataaaaaagtgtatctta

SEQ ID NO: 100096 - DNA, 20 bp, Artificial Sequence
  Description of Artificial Sequence: Synthetic oligonucleotide
  Target: LAMA2; (-) strand; PAM type: NRG; PAM sequence: AAG
ttctggcttatgatataaaa

SEQ ID NO: 100097 - DNA, 20 bp, Artificial Sequence
  Description of Artificial Sequence: Synthetic oligonucleotide
  Target: LAMA2; (-) strand; PAM type: NRG; PAM sequence: TGG
cacaagtttttgtgtgtttc

SEQ ID NO: 100098 - DNA, 20 bp, Artificial Sequence
  Description of Artificial Sequence: Synthetic oligonucleotide
  Target: LAMA2; (-) strand; PAM type: NRG; PAM sequence: AAG
atttagatatctacacacac

SEQ ID NO: 100099 - DNA, 20 bp, Artificial Sequence
  Description of Artificial Sequence: Synthetic oligonucleotide
  Target: LAMA2; (-) strand; PAM type: NRG; PAM sequence: TAG
tggtgtataatacatatatt

SEQ ID NO: 100100 - DNA, 20 bp, Artificial Sequence
  Description of Artificial Sequence: Synthetic oligonucleotide
  Target: LAMA2; (-) strand; PAM type: NRG; PAM sequence: TGG
acaaaattaaataaatggca

SEQ ID NO: 100101 - DNA, 20 bp, Artificial Sequence
  Description of Artificial Sequence: Synthetic oligonucleotide
  Target: LAMA2; (-) strand; PAM type: NRG; PAM sequence: TGG
aaataacaaaattaaataaa

SEQ ID NO: 100102 - DNA, 20 bp, Artificial Sequence
  Description of Artificial Sequence: Synthetic oligonucleotide
  Target: LAMA2; (-) strand; PAM type: NRG; PAM sequence: TGG
gaaatccattgagtaggttt

SEQ ID NO: 100103 - DNA, 20 bp, Artificial Sequence
  Description of Artificial Sequence: Synthetic oligonucleotide
  Target: LAMA2; (-) strand; PAM type: NRG; PAM sequence: AGG
actcatgaaatccattgagt

SEQ ID NO: 100104 - DNA, 20 bp, Artificial Sequence
  Description of Artificial Sequence: Synthetic oligonucleotide
  Target: LAMA2; (-) strand; PAM type: NRG; PAM sequence: TAG
gactcatgaaatccattgag

SEQ ID NO: 100105 - DNA, 20 bp, Artificial Sequence
  Description of Artificial Sequence: Synthetic oligonucleotide
  Target: LAMA2; (-) strand; PAM type: NRG; PAM sequence: GAG
agtgactcatgaaatccatt

SEQ ID NO: 100106 - DNA, 20 bp, Artificial Sequence
  Description of Artificial Sequence: Synthetic oligonucleotide
  Target: LAMA2; (-) strand; PAM type: NRG; PAM sequence: AAG
caagctttagatggtgatat

SEQ ID NO: 100107 - DNA, 20 bp, Artificial Sequence
  Description of Artificial Sequence: Synthetic oligonucleotide
  Target: LAMA2; (-) strand; PAM type: NRG; PAM sequence: TGG
aatacgtcccaagctttaga

SEQ ID NO: 100108 - DNA, 20 bp, Artificial Sequence
  Description of Artificial Sequence: Synthetic oligonucleotide
  Target: LAMA2; (-) strand; PAM type: NRG; PAM sequence: TAG
gcctaatacgtcccaagctt

SEQ ID NO: 100109 - DNA, 20 bp, Artificial Sequence
  Description of Artificial Sequence: Synthetic oligonucleotide
  Target: LAMA2; (-) strand; PAM type: NRG; PAM sequence: AAG
taattagcctaatacgtccc

SEQ ID NO: 100110 - DNA, 20 bp, Artificial Sequence
  Description of Artificial Sequence: Synthetic oligonucleotide
  Target: LAMA2; (-) strand; PAM type: NRG; PAM sequence: TAG
taggtcttcactttgttaat

SEQ ID NO: 100111 - DNA, 20 bp, Artificial Sequence
  Description of Artificial Sequence: Synthetic oligonucleotide
  Target: LAMA2; (-) strand; PAM type: NRG; PAM sequence: AGG
cttctcttctcacaatttat

SEQ ID NO: 100112 - DNA, 20 bp, Artificial Sequence
  Description of Artificial Sequence: Synthetic oligonucleotide
  Target: LAMA2; (-) strand; PAM type: NRG; PAM sequence: TAG
tcttctcttctcacaattta

SEQ ID NO: 100113 - DNA, 20 bp, Artificial Sequence
  Description of Artificial Sequence: Synthetic oligonucleotide
  Target: LAMA2; (-) strand; PAM type: NRG; PAM sequence: TGG
cctcttttctttgccctggc

SEQ ID NO: 100114 - DNA, 20 bp, Artificial Sequence
  Description of Artificial Sequence: Synthetic oligonucleotide
  Target: LAMA2; (-) strand; PAM type: NRG; PAM sequence: TGG
agtgcctcttttctttgccc

SEQ ID NO: 100115 - DNA, 20 bp, Artificial Sequence
  Description of Artificial Sequence: Synthetic oligonucleotide
  Target: LAMA2; (-) strand; PAM type: NRG; PAM sequence: AAG
tgtttttatgtcttggggag

SEQ ID NO: 100116 - DNA, 20 bp, Artificial Sequence
  Description of Artificial Sequence: Synthetic oligonucleotide
  Target: LAMA2; (-) strand; PAM type: NRG; PAM sequence: GAG
atctgtttttatgtcttggg

SEQ ID NO: 100117 - DNA, 20 bp, Artificial Sequence
  Description of Artificial Sequence: Synthetic oligonucleotide
  Target: LAMA2; (-) strand; PAM type: NRG; PAM sequence: GGG
gaatctgtttttatgtcttg

SEQ ID NO: 100118 - DNA, 20 bp, Artificial Sequence
  Description of Artificial Sequence: Synthetic oligonucleotide
  Target: LAMA2; (-) strand; PAM type: NRG; PAM sequence: GGG
agaatctgtttttatgtctt

SEQ ID NO: 100119 - DNA, 20 bp, Artificial Sequence
  Description of Artificial Sequence: Synthetic oligonucleotide
  Target: LAMA2; (-) strand; PAM type: NRG; PAM sequence: TGG
cagaatctgtttttatgtct

SEQ ID NO: 100120 - DNA, 20 bp, Artificial Sequence
  Description of Artificial Sequence: Synthetic oligonucleotide
  Target: LAMA2; (-) strand; PAM type: NRG; PAM sequence: CAG
agcctcctccatctattcct

SEQ ID NO: 100121 - DNA, 20 bp, Artificial Sequence
  Description of Artificial Sequence: Synthetic oligonucleotide
  Target: LAMA2; (-) strand; PAM type: NRG; PAM sequence: CAG
agtcataaattgagatatct

SEQ ID NO: 100122 - DNA, 20 bp, Artificial Sequence
  Description of Artificial Sequence: Synthetic oligonucleotide
  Target: LAMA2; (-) strand; PAM type: NRG; PAM sequence: GAG
acagattgaagtcataaatt

SEQ ID NO: 100123 - DNA, 20 bp, Artificial Sequence
  Description of Artificial Sequence: Synthetic oligonucleotide
  Target: LAMA2; (-) strand; PAM type: NRG; PAM sequence: AAG
ctcactgactgcacagattg

SEQ ID NO: 100124 - DNA, 20 bp, Artificial Sequence
  Description of Artificial Sequence: Synthetic oligonucleotide
  Target: LAMA2; (-) strand; PAM type: NRG; PAM sequence: CAG
catatttctcactgactgca

SEQ ID NO: 100125 - DNA, 20 bp, Artificial Sequence
  Description of Artificial Sequence: Synthetic oligonucleotide
  Target: LAMA2; (-) strand; PAM type: NRG; PAM sequence: CAG
ctaatgccgtggaaatgagt

SEQ ID NO: 100126 - DNA, 20 bp, Artificial Sequence
  Description of Artificial Sequence: Synthetic oligonucleotide
  Target: LAMA2; (-) strand; PAM type: NRG; PAM sequence: GAG
tgaactaatgccgtggaaat

SEQ ID NO: 100127 - DNA, 20 bp, Artificial Sequence
  Description of Artificial Sequence: Synthetic oligonucleotide
  Target: LAMA2; (-) strand; PAM type: NRG; PAM sequence: TGG
gaggacttgaactaatgccg

SEQ ID NO: 100128 - DNA, 20 bp, Artificial Sequence
  Description of Artificial Sequence: Synthetic oligonucleotide
  Target: LAMA2; (-) strand; PAM type: NRG; PAM sequence: AGG
tgttttggtaagagataatg

SEQ ID NO: 100129 - DNA, 20 bp, Artificial Sequence
  Description of Artificial Sequence: Synthetic oligonucleotide
  Target: LAMA2; (-) strand; PAM type: NRG; PAM sequence: GAG
ttgttttggtaagagataat

SEQ ID NO: 100130 - DNA, 20 bp, Artificial Sequence
  Description of Artificial Sequence: Synthetic oligonucleotide
  Target: LAMA2; (-) strand; PAM type: NRG; PAM sequence: GAG
taccatatttgttttggtaa

SEQ ID NO: 100131 - DNA, 20 bp, Artificial Sequence
  Description of Artificial Sequence: Synthetic oligonucleotide
  Target: LAMA2; (-) strand; PAM type: NRG; PAM sequence: AAG
tctaccatatttgttttggt

SEQ ID NO: 100132 - DNA, 20 bp, Artificial Sequence
  Description of Artificial Sequence: Synthetic oligonucleotide
  Target: LAMA2; (-) strand; PAM type: NRG; PAM sequence: TGG
aatttctaccatatttgttt

SEQ ID NO: 100133 - DNA, 20 bp, Artificial Sequence
  Description of Artificial Sequence: Synthetic oligonucleotide
  Target: LAMA2; (-) strand; PAM type: NRG; PAM sequence: GAG
gcactgccactccgtcataa

SEQ ID NO: 100134 - DNA, 20 bp, Artificial Sequence
  Description of Artificial Sequence: Synthetic oligonucleotide
  Target: LAMA2; (-) strand; PAM type: NRG; PAM sequence: AAG
gagcactgccactccgtcat

SEQ ID NO: 100135 - DNA, 20 bp, Artificial Sequence
  Description of Artificial Sequence: Synthetic oligonucleotide
  Target: LAMA2; (-) strand; PAM type: NRG; PAM sequence: GAG
ggaaacttctaagggtgtgt

SEQ ID NO: 100136 - DNA, 20 bp, Artificial Sequence
  Description of Artificial Sequence: Synthetic oligonucleotide
  Target: LAMA2; (-) strand; PAM type: NRG; PAM sequence: GGG
aaggcactggaaacttctaa

SEQ ID NO: 100137 - DNA, 20 bp, Artificial Sequence
  Description of Artificial Sequence: Synthetic oligonucleotide
  Target: LAMA2; (-) strand; PAM type: NRG; PAM sequence: AGG
gaaggcactggaaacttcta

SEQ ID NO: 100138 - DNA, 20 bp, Artificial Sequence
  Description of Artificial Sequence: Synthetic oligonucleotide
  Target: LAMA2; (-) strand; PAM type: NRG; PAM sequence: AAG
ggaaggcactggaaacttct

SEQ ID NO: 100139 - DNA, 20 bp, Artificial Sequence
  Description of Artificial Sequence: Synthetic oligonucleotide
  Target: LAMA2; (-) strand; PAM type: NRG; PAM sequence: TGG
atctttccttgggaaggcac

SEQ ID NO: 100140 - DNA, 20 bp, Artificial Sequence
  Description of Artificial Sequence: Synthetic oligonucleotide
  Target: LAMA2; (-) strand; PAM type: NRG; PAM sequence: AGG
agtctgatctttccttggga

SEQ ID NO: 100141 - DNA, 20 bp, Artificial Sequence
  Description of Artificial Sequence: Synthetic oligonucleotide
  Target: LAMA2; (-) strand; PAM type: NRG; PAM sequence: AAG
gagtctgatctttccttggg

SEQ ID NO: 100142 - DNA, 20 bp, Artificial Sequence
  Description of Artificial Sequence: Synthetic oligonucleotide
  Target: LAMA2; (-) strand; PAM type: NRG; PAM sequence: GGG
aaagagtctgatctttcctt

SEQ ID NO: 100143 - DNA, 20 bp, Artificial Sequence
  Description of Artificial Sequence: Synthetic oligonucleotide
  Target: LAMA2; (-) strand; PAM type: NRG; PAM sequence: TGG
caaagagtctgatctttcct

SEQ ID NO: 100144 - DNA, 20 bp, Artificial Sequence
  Description of Artificial Sequence: Synthetic oligonucleotide
  Target: LAMA2; (-) strand; PAM type: NRG; PAM sequence: GAG
gagggtttctaatgctcaaa

SEQ ID NO: 100145 - DNA, 20 bp, Artificial Sequence
  Description of Artificial Sequence: Synthetic oligonucleotide
  Target: LAMA2; (-) strand; PAM type: NRG; PAM sequence: AAG
cagagggtttctaatgctca

SEQ ID NO: 100146 - DNA, 20 bp, Artificial Sequence
  Description of Artificial Sequence: Synthetic oligonucleotide
  Target: LAMA2; (-) strand; PAM type: NRG; PAM sequence: GGG
aaaggtagtcagattacaga

SEQ ID NO: 100147 - DNA, 20 bp, Artificial Sequence
  Description of Artificial Sequence: Synthetic oligonucleotide
  Target: LAMA2; (-) strand; PAM type: NRG; PAM sequence: AGG
gaaaggtagtcagattacag

SEQ ID NO: 100148 - DNA, 20 bp, Artificial Sequence
  Description of Artificial Sequence: Synthetic oligonucleotide
  Target: LAMA2; (-) strand; PAM type: NRG; PAM sequence: GAG
ggaaaggtagtcagattaca

SEQ ID NO: 100149 - DNA, 20 bp, Artificial Sequence
  Description of Artificial Sequence: Synthetic oligonucleotide
  Target: LAMA2; (-) strand; PAM type: NRG; PAM sequence: CAG
ctggaaaggtagtcagatta

SEQ ID NO: 100150 - DNA, 20 bp, Artificial Sequence
  Description of Artificial Sequence: Synthetic oligonucleotide
  Target: LAMA2; (-) strand; PAM type: NRG; PAM sequence: CAG
ttggagcctggaaaggtagt

SEQ ID NO: 100151 - DNA, 20 bp, Artificial Sequence
  Description of Artificial Sequence: Synthetic oligonucleotide
  Target: LAMA2; (-) strand; PAM type: NRG; PAM sequence: TAG
gggcttggagcctggaaagg

SEQ ID NO: 100152 - DNA, 20 bp, Artificial Sequence
  Description of Artificial Sequence: Synthetic oligonucleotide
  Target: LAMA2; (-) strand; PAM type: NRG; PAM sequence: AGG
tgagggcttggagcctggaa

SEQ ID NO: 100153 - DNA, 20 bp, Artificial Sequence
  Description of Artificial Sequence: Synthetic oligonucleotide
  Target: LAMA2; (-) strand; PAM type: NRG; PAM sequence: AAG
ttgagggcttggagcctgga

SEQ ID NO: 100154 - DNA, 20 bp, Artificial Sequence
  Description of Artificial Sequence: Synthetic oligonucleotide
  Target: LAMA2; (-) strand; PAM type: NRG; PAM sequence: TGG
ggagttgagggcttggagcc

SEQ ID NO: 100155 - DNA, 20 bp, Artificial Sequence
  Description of Artificial Sequence: Synthetic oligonucleotide
  Target: LAMA2; (-) strand; PAM type: NRG; PAM sequence: GAG
agaatggagttgagggcttg

SEQ ID NO: 100156 - DNA, 20 bp, Artificial Sequence
  Description of Artificial Sequence: Synthetic oligonucleotide
  Target: LAMA2; (-) strand; PAM type: NRG; PAM sequence: TGG
atagaatggagttgagggct

SEQ ID NO: 100157 - DNA, 20 bp, Artificial Sequence
  Description of Artificial Sequence: Synthetic oligonucleotide
  Target: LAMA2; (-) strand; PAM type: NRG; PAM sequence: GGG
attatatagaatggagttga

SEQ ID NO: 100158 - DNA, 20 bp, Artificial Sequence
  Description of Artificial Sequence: Synthetic oligonucleotide
  Target: LAMA2; (-) strand; PAM type: NRG; PAM sequence: AGG
cattatatagaatggagttg

SEQ ID NO: 100159 - DNA, 20 bp, Artificial Sequence
  Description of Artificial Sequence: Synthetic oligonucleotide
  Target: LAMA2; (-) strand; PAM type: NRG; PAM sequence: GAG
gcattatatagaatggagtt

SEQ ID NO: 100160 - DNA, 20 bp, Artificial Sequence
  Description of Artificial Sequence: Synthetic oligonucleotide
  Target: LAMA2; (-) strand; PAM type: NRG; PAM sequence: GAG
acttggcattatatagaatg

SEQ ID NO: 100161 - DNA, 20 bp, Artificial Sequence
  Description of Artificial Sequence: Synthetic oligonucleotide
  Target: LAMA2; (-) strand; PAM type: NRG; PAM sequence: TGG
aaacttggcattatatagaa

SEQ ID NO: 100162 - DNA, 20 bp, Artificial Sequence
  Description of Artificial Sequence: Synthetic oligonucleotide
  Target: LAMA2; (-) strand; PAM type: NRG; PAM sequence: TAG
atgccaaacttggcattata

SEQ ID NO: 100163 - DNA, 20 bp, Artificial Sequence
  Description of Artificial Sequence: Synthetic oligonucleotide
  Target: LAMA2; (-) strand; PAM type: NRG; PAM sequence: TGG
agtgcaagaaatgccaaact

SEQ ID NO: 100164 - DNA, 20 bp, Artificial Sequence
  Description of Artificial Sequence: Synthetic oligonucleotide
  Target: LAMA2; (-) strand; PAM type: NRG; PAM sequence: AAG
aatgatgtctagataagtgc

SEQ ID NO: 100165 - DNA, 20 bp, Artificial Sequence
  Description of Artificial Sequence: Synthetic oligonucleotide
  Target: LAMA2; (-) strand; PAM type: NRG; PAM sequence: AAG
actgctaatgatgtctagat

SEQ ID NO: 100166 - DNA, 20 bp, Artificial Sequence
  Description of Artificial Sequence: Synthetic oligonucleotide
  Target: LAMA2; (-) strand; PAM type: NRG; PAM sequence: TAG
agcagactgctaatgatgtc

SEQ ID NO: 100167 - DNA, 20 bp, Artificial Sequence
  Description of Artificial Sequence: Synthetic oligonucleotide
  Target: LAMA2; (-) strand; PAM type: NRG; PAM sequence: CAG
gtctgagggaatagcaagag

SEQ ID NO: 100168 - DNA, 20 bp, Artificial Sequence
  Description of Artificial Sequence: Synthetic oligonucleotide
  Target: LAMA2; (-) strand; PAM type: NRG; PAM sequence: GAG
attgtctgagggaatagcaa

SEQ ID NO: 100169 - DNA, 20 bp, Artificial Sequence
  Description of Artificial Sequence: Synthetic oligonucleotide
  Target: LAMA2; (-) strand; PAM type: NRG; PAM sequence: AAG
ggattgtctgagggaatagc

SEQ ID NO: 100170 - DNA, 20 bp, Artificial Sequence
  Description of Artificial Sequence: Synthetic oligonucleotide
  Target: LAMA2; (-) strand; PAM type: NRG; PAM sequence: TAG
acagggattgtctgagggaa

SEQ ID NO: 100171 - DNA, 20 bp, Artificial Sequence
  Description of Artificial Sequence: Synthetic oligonucleotide
  Target: LAMA2; (-) strand; PAM type: NRG; PAM sequence: GGG
atttcacagggattgtctga

SEQ ID NO: 100172 - DNA, 20 bp, Artificial Sequence
  Description of Artificial Sequence: Synthetic oligonucleotide
  Target: LAMA2; (-) strand; PAM type: NRG; PAM sequence: AGG
gatttcacagggattgtctg

SEQ ID NO: 100173 - DNA, 20 bp, Artificial Sequence
  Description of Artificial Sequence: Synthetic oligonucleotide
  Target: LAMA2; (-) strand; PAM type: NRG; PAM sequence: GAG
agatttcacagggattgtct

SEQ ID NO: 100174 - DNA, 20 bp, Artificial Sequence
  Description of Artificial Sequence: Synthetic oligonucleotide
  Target: LAMA2; (-) strand; PAM type: NRG; PAM sequence: GGG
aaaataaattagatttcaca

SEQ ID NO: 100175 - DNA, 20 bp, Artificial Sequence
  Description of Artificial Sequence: Synthetic oligonucleotide
  Target: LAMA2; (-) strand; PAM type: NRG; PAM sequence: AGG
aaaaataaattagatttcac

SEQ ID NO: 100176 - DNA, 20 bp, Artificial Sequence
  Description of Artificial Sequence: Synthetic oligonucleotide
  Target: LAMA2; (-) strand; PAM type: NRG; PAM sequence: CAG
taaaaataaattagatttca

SEQ ID NO: 100177 - DNA, 20 bp, Artificial Sequence
  Description of Artificial Sequence: Synthetic oligonucleotide
  Target: LAMA2; (-) strand; PAM type: NRG; PAM sequence: TAG
aaatgcctttaaaaataaat

SEQ ID NO: 100178 - DNA, 20 bp, Artificial Sequence
  Description of Artificial Sequence: Synthetic oligonucleotide
  Target: LAMA2; (-) strand; PAM type: NRG; PAM sequence: GGG
taggttttgtggcagaggta

SEQ ID NO: 100179 - DNA, 20 bp, Artificial Sequence
  Description of Artificial Sequence: Synthetic oligonucleotide
  Target: LAMA2; (-) strand; PAM type: NRG; PAM sequence: AGG
ataggttttgtggcagaggt

SEQ ID NO: 100180 - DNA, 20 bp, Artificial Sequence
  Description of Artificial Sequence: Synthetic oligonucleotide
  Target: LAMA2; (-) strand; PAM type: NRG; PAM sequence: TAG
gataggttttgtggcagagg

SEQ ID NO: 100181 - DNA, 20 bp, Artificial Sequence
  Description of Artificial Sequence: Synthetic oligonucleotide
  Target: LAMA2; (-) strand; PAM type: NRG; PAM sequence: AGG
atggataggttttgtggcag

SEQ ID NO: 100182 - DNA, 20 bp, Artificial Sequence
  Description of Artificial Sequence: Synthetic oligonucleotide
  Target: LAMA2; (-) strand; PAM type: NRG; PAM sequence: GAG
tatggataggttttgtggca

SEQ ID NO: 100183 - DNA, 20 bp, Artificial Sequence
  Description of Artificial Sequence: Synthetic oligonucleotide
  Target: LAMA2; (-) strand; PAM type: NRG; PAM sequence: CAG
gctatggataggttttgtgg

SEQ ID NO: 100184 - DNA, 20 bp, Artificial Sequence
  Description of Artificial Sequence: Synthetic oligonucleotide
  Target: LAMA2; (-) strand; PAM type: NRG; PAM sequence: TGG
tgtgctatggataggttttg

SEQ ID NO: 100185 - DNA, 20 bp, Artificial Sequence
  Description of Artificial Sequence: Synthetic oligonucleotide
  Target: LAMA2; (-) strand; PAM type: NRG; PAM sequence: AGG
atacattctgtgctatggat

SEQ ID NO: 100186 - DNA, 20 bp, Artificial Sequence
  Description of Artificial Sequence: Synthetic oligonucleotide
  Target: LAMA2; (-) strand; PAM type: NRG; PAM sequence: TAG
aatacattctgtgctatgga

SEQ ID NO: 100187 - DNA, 20 bp, Artificial Sequence
  Description of Artificial Sequence: Synthetic oligonucleotide
  Target: LAMA2; (-) strand; PAM type: NRG; PAM sequence: TGG
acaaaatacattctgtgcta

SEQ ID NO: 100188 - DNA, 20 bp, Artificial Sequence
  Description of Artificial Sequence: Synthetic oligonucleotide
  Target: LAMA2; (-) strand; PAM type: NRG; PAM sequence: TAG
atgattgaaataattctgta

SEQ ID NO: 100189 - DNA, 20 bp, Artificial Sequence
  Description of Artificial Sequence: Synthetic oligonucleotide
  Target: LAMA2; (-) strand; PAM type: NRG; PAM sequence: AAG
agtaaatgttcatctcctga

SEQ ID NO: 100190 - DNA, 20 bp, Artificial Sequence
  Description of Artificial Sequence: Synthetic oligonucleotide
  Target: LAMA2; (-) strand; PAM type: NRG; PAM sequence: TAG
gttgggatgaagtatatgct

SEQ ID NO: 100191 - DNA, 20 bp, Artificial Sequence
  Description of Artificial Sequence: Synthetic oligonucleotide
  Target: LAMA2; (-) strand; PAM type: NRG; PAM sequence: AAG
ttattcatagtgttgggatg

SEQ ID NO: 100192 - DNA, 20 bp, Artificial Sequence
  Description of Artificial Sequence: Synthetic oligonucleotide
  Target: LAMA2; (-) strand; PAM type: NRG; PAM sequence: GGG
tatcttttattcatagtgtt

SEQ ID NO: 100193 - DNA, 20 bp, Artificial Sequence
  Description of Artificial Sequence: Synthetic oligonucleotide
  Target: LAMA2; (-) strand; PAM type: NRG; PAM sequence: TGG
ttatcttttattcatagtgt

SEQ ID NO: 100194 - DNA, 20 bp, Artificial Sequence
  Description of Artificial Sequence: Synthetic oligonucleotide
  Target: LAMA2; (-) strand; PAM type: NRG; PAM sequence: TAG
tatcttttatcttttattca

SEQ ID NO: 100195 - DNA, 20 bp, Artificial Sequence
  Description of Artificial Sequence: Synthetic oligonucleotide
  Target: LAMA2; (-) strand; PAM type: NRG; PAM sequence: AGG
gatatgtacacatacaggac

SEQ ID NO: 100196 - DNA, 20 bp, Artificial Sequence
  Description of Artificial Sequence: Synthetic oligonucleotide
  Target: LAMA2; (-) strand; PAM type: NRG; PAM sequence: CAG
agatatgtacacatacagga

SEQ ID NO: 100197 - DNA, 20 bp, Artificial Sequence
  Description of Artificial Sequence: Synthetic oligonucleotide
  Target: LAMA2; (-) strand; PAM type: NRG; PAM sequence: AGG
acacagatatgtacacatac

SEQ ID NO: 100198 - DNA, 20 bp, Artificial Sequence
  Description of Artificial Sequence: Synthetic oligonucleotide
  Target: LAMA2; (-) strand; PAM type: NRG; PAM sequence: CAG
gacacagatatgtacacata

SEQ ID NO: 100199 - DNA, 20 bp, Artificial Sequence
  Description of Artificial Sequence: Synthetic oligonucleotide
  Target: LAMA2; (-) strand; PAM type: NRG; PAM sequence: CAG
ttacaattctgtgtgagaca

SEQ ID NO: 100200 - DNA, 20 bp, Artificial Sequence
  Description of Artificial Sequence: Synthetic oligonucleotide
  Target: LAMA2; (-) strand; PAM type: NRG; PAM sequence: GAG
aagaatttacaattctgtgt

SEQ ID NO: 100201 - DNA, 20 bp, Artificial Sequence
  Description of Artificial Sequence: Synthetic oligonucleotide
  Target: LAMA2; (-) strand; PAM type: NRG; PAM sequence: AAG
agacattatgtttaccttca

SEQ ID NO: 100202 - DNA, 20 bp, Artificial Sequence
  Description of Artificial Sequence: Synthetic oligonucleotide
  Target: LAMA2; (-) strand; PAM type: NRG; PAM sequence: AAG
tcttgaataaagaaagaaat

SEQ ID NO: 100203 - DNA, 20 bp, Artificial Sequence
  Description of Artificial Sequence: Synthetic oligonucleotide
  Target: LAMA2; (-) strand; PAM type: NRG; PAM sequence: AAG
aactttttcttgaataaaga

SEQ ID NO: 100204 - DNA, 20 bp, Artificial Sequence
  Description of Artificial Sequence: Synthetic oligonucleotide
  Target: LAMA2; (-) strand; PAM type: NRG; PAM sequence: AAG
cattaactttttcttgaata

SEQ ID NO: 100205 - DNA, 20 bp, Artificial Sequence
  Description of Artificial Sequence: Synthetic oligonucleotide
  Target: LAMA2; (-) strand; PAM type: NRG; PAM sequence: GGG
gccatgcctagcattgagtt

SEQ ID NO: 100206 - DNA, 20 bp, Artificial Sequence
  Description of Artificial Sequence: Synthetic oligonucleotide
  Target: LAMA2; (-) strand; PAM type: NRG; PAM sequence: TGG
agccatgcctagcattgagt

SEQ ID NO: 100207 - DNA, 20 bp, Artificial Sequence
  Description of Artificial Sequence: Synthetic oligonucleotide
  Target: LAMA2; (-) strand; PAM type: NRG; PAM sequence: GAG
gaagagccatgcctagcatt

SEQ ID NO: 100208 - DNA, 20 bp, Artificial Sequence
  Description of Artificial Sequence: Synthetic oligonucleotide
  Target: LAMA2; (-) strand; PAM type: NRG; PAM sequence: TAG
ccagtacgaagagccatgcc

SEQ ID NO: 100209 - DNA, 20 bp, Artificial Sequence
  Description of Artificial Sequence: Synthetic oligonucleotide
  Target: LAMA2; (-) strand; PAM type: NRG; PAM sequence: GAG
ttatatattcccagtacgaa

SEQ ID NO: 100210 - DNA, 20 bp, Artificial Sequence
  Description of Artificial Sequence: Synthetic oligonucleotide
  Target: LAMA2; (-) strand; PAM type: NRG; PAM sequence: AAG
acttatatattcccagtacg

SEQ ID NO: 100211 - DNA, 20 bp, Artificial Sequence
  Description of Artificial Sequence: Synthetic oligonucleotide
  Target: LAMA2; (-) strand; PAM type: NRG; PAM sequence: CAG
tttgttcacttatatattcc

SEQ ID NO: 100212 - DNA, 20 bp, Artificial Sequence
  Description of Artificial Sequence: Synthetic oligonucleotide
  Target: LAMA2; (-) strand; PAM type: NRG; PAM sequence: AGG
tccagaaggctaggaaacac

SEQ ID NO: 100213 - DNA, 20 bp, Artificial Sequence
  Description of Artificial Sequence: Synthetic oligonucleotide
  Target: LAMA2; (-) strand; PAM type: NRG; PAM sequence: CAG
ctccagaaggctaggaaaca

SEQ ID NO: 100214 - DNA, 20 bp, Artificial Sequence
  Description of Artificial Sequence: Synthetic oligonucleotide
  Target: LAMA2; (-) strand; PAM type: NRG; PAM sequence: AGG
aatacaagctccagaaggct

SEQ ID NO: 100215 - DNA, 20 bp, Artificial Sequence
  Description of Artificial Sequence: Synthetic oligonucleotide
  Target: LAMA2; (-) strand; PAM type: NRG; PAM sequence: TAG
aaatacaagctccagaaggc

SEQ ID NO: 100216 - DNA, 20 bp, Artificial Sequence
  Description of Artificial Sequence: Synthetic oligonucleotide
  Target: LAMA2; (-) strand; PAM type: NRG; PAM sequence: AGG
taaaaaatacaagctccaga

SEQ ID NO: 100217 - DNA, 20 bp, Artificial Sequence
  Description of Artificial Sequence: Synthetic oligonucleotide
  Target: LAMA2; (-) strand; PAM type: NRG; PAM sequence: AAG
ataaaaaatacaagctccag

SEQ ID NO: 100218 - DNA, 20 bp, Artificial Sequence
  Description of Artificial Sequence: Synthetic oligonucleotide
  Target: LAMA2; (-) strand; PAM type: NRG; PAM sequence: CAG
cttataaaaaatacaagctc

SEQ ID NO: 100219 - DNA, 20 bp, Artificial Sequence
  Description of Artificial Sequence: Synthetic oligonucleotide
  Target: LAMA2; (-) strand; PAM type: NRG; PAM sequence: AAG
tactctcttataaaaaatac

SEQ ID NO: 100220 - DNA, 20 bp, Artificial Sequence
  Description of Artificial Sequence: Synthetic oligonucleotide
  Target: LAMA2; (-) strand; PAM type: NRG; PAM sequence: TAG
gtctcctttatttctcctgg

SEQ ID NO: 100221 - DNA, 20 bp, Artificial Sequence
  Description of Artificial Sequence: Synthetic oligonucleotide
  Target: LAMA2; (-) strand; PAM type: NRG; PAM sequence: TGG
tgagtctcctttatttctcc

SEQ ID NO: 100222 - DNA, 20 bp, Artificial Sequence
  Description of Artificial Sequence: Synthetic oligonucleotide
  Target: LAMA2; (-) strand; PAM type: NRG; PAM sequence: GAG
ttcatcactctaagttcctt

SEQ ID NO: 100223 - DNA, 20 bp, Artificial Sequence
  Description of Artificial Sequence: Synthetic oligonucleotide
  Target: LAMA2; (-) strand; PAM type: NRG; PAM sequence: AAG
aatcataccttcatcactct

SEQ ID NO: 100224 - DNA, 20 bp, Artificial Sequence
  Description of Artificial Sequence: Synthetic oligonucleotide
  Target: LAMA2; (-) strand; PAM type: NRG; PAM sequence: TGG
tcatctgtttgtgaagatca

SEQ ID NO: 100225 - DNA, 20 bp, Artificial Sequence
  Description of Artificial Sequence: Synthetic oligonucleotide
  Target: LAMA2; (-) strand; PAM type: NRG; PAM sequence: AAG
acaagtctcatctgtttgtg

SEQ ID NO: 100226 - DNA, 20 bp, Artificial Sequence
  Description of Artificial Sequence: Synthetic oligonucleotide
  Target: LAMA2; (-) strand; PAM type: NRG; PAM sequence: AAG
caccattcacatttctgcac

SEQ ID NO: 100227 - DNA, 20 bp, Artificial Sequence
  Description of Artificial Sequence: Synthetic oligonucleotide
  Target: LAMA2; (-) strand; PAM type: NRG; PAM sequence: TGG
tcttcctgcaggtattcaca

SEQ ID NO: 100228 - DNA, 20 bp, Artificial Sequence
  Description of Artificial Sequence: Synthetic oligonucleotide
  Target: LAMA2; (-) strand; PAM type: NRG; PAM sequence: AGG
gaggggactgttcttcctgc

SEQ ID NO: 100229 - DNA, 20 bp, Artificial Sequence
  Description of Artificial Sequence: Synthetic oligonucleotide
  Target: LAMA2; (-) strand; PAM type: NRG; PAM sequence: CAG
tgaggggactgttcttcctg

SEQ ID NO: 100230 - DNA, 20 bp, Artificial Sequence
  Description of Artificial Sequence: Synthetic oligonucleotide
  Target: LAMA2; (-) strand; PAM type: NRG; PAM sequence: GGG
cagtgacttttttctctgag

SEQ ID NO: 100231 - DNA, 20 bp, Artificial Sequence
  Description of Artificial Sequence: Synthetic oligonucleotide
  Target: LAMA2; (-) strand; PAM type: NRG; PAM sequence: GGG
gcagtgacttttttctctga

SEQ ID NO: 100232 - DNA, 20 bp, Artificial Sequence
  Description of Artificial Sequence: Synthetic oligonucleotide
  Target: LAMA2; (-) strand; PAM type: NRG; PAM sequence: AGG
tgcagtgacttttttctctg

SEQ ID NO: 100233 - DNA, 20 bp, Artificial Sequence
  Description of Artificial Sequence: Synthetic oligonucleotide
  Target: LAMA2; (-) strand; PAM type: NRG; PAM sequence: GAG
gtgcagtgacttttttctct

SEQ ID NO: 100234 - DNA, 20 bp, Artificial Sequence
  Description of Artificial Sequence: Synthetic oligonucleotide
  Target: LAMA2; (-) strand; PAM type: NRG; PAM sequence: CAG
ggtctgtctcagggccagtg

SEQ ID NO: 100235 - DNA, 20 bp, Artificial Sequence
  Description of Artificial Sequence: Synthetic oligonucleotide
  Target: LAMA2; (-) strand; PAM type: NRG; PAM sequence: CAG
gcatgggtctgtctcagggc

SEQ ID NO: 100236 - DNA, 20 bp, Artificial Sequence
  Description of Artificial Sequence: Synthetic oligonucleotide
  Target: LAMA2; (-) strand; PAM type: NRG; PAM sequence: GGG
ccaagcatgggtctgtctca

SEQ ID NO: 100237 - DNA, 20 bp, Artificial Sequence
  Description of Artificial Sequence: Synthetic oligonucleotide
  Target: LAMA2; (-) strand; PAM type: NRG; PAM sequence: AGG
gccaagcatgggtctgtctc

SEQ ID NO: 100238 - DNA, 20 bp, Artificial Sequence
  Description of Artificial Sequence: Synthetic oligonucleotide
  Target: LAMA2; (-) strand; PAM type: NRG; PAM sequence: CAG
tgccaagcatgggtctgtct

SEQ ID NO: 100239 - DNA, 20 bp, Artificial Sequence
  Description of Artificial Sequence: Synthetic oligonucleotide
  Target: LAMA2; (-) strand; PAM type: NRG; PAM sequence: GGG
tcctgttatctgccaagcat

SEQ ID NO: 100240 - DNA, 20 bp, Artificial Sequence
  Description of Artificial Sequence: Synthetic oligonucleotide
  Target: LAMA2; (-) strand; PAM type: NRG; PAM sequence: TGG
ctcctgttatctgccaagca

SEQ ID NO: 100241 - DNA, 20 bp, Artificial Sequence
  Description of Artificial Sequence: Synthetic oligonucleotide
  Target: LAMA2; (-) strand; PAM type: NRG; PAM sequence: AAG
ctggcctcctgttatctgcc

SEQ ID NO: 100242 - DNA, 20 bp, Artificial Sequence
  Description of Artificial Sequence: Synthetic oligonucleotide
  Target: LAMA2; (-) strand; PAM type: NRG; PAM sequence: TGG
tcactctgttccaaccaccc

SEQ ID NO: 100243 - DNA, 20 bp, Artificial Sequence
  Description of Artificial Sequence: Synthetic oligonucleotide
  Target: LAMA2; (-) strand; PAM type: NRG; PAM sequence: TAG
gctttgctgacttcatctcc

SEQ ID NO: 100244 - DNA, 20 bp, Artificial Sequence
  Description of Artificial Sequence: Synthetic oligonucleotide
  Target: LAMA2; (-) strand; PAM type: NRG; PAM sequence: GAG
ggagagttagatattcatta

SEQ ID NO: 100245 - DNA, 20 bp, Artificial Sequence
  Description of Artificial Sequence: Synthetic oligonucleotide
  Target: LAMA2; (-) strand; PAM type: NRG; PAM sequence: TAG
caggagagttagatattcat

SEQ ID NO: 100246 - DNA, 20 bp, Artificial Sequence
  Description of Artificial Sequence: Synthetic oligonucleotide
  Target: LAMA2; (-) strand; PAM type: NRG; PAM sequence: TAG
tttttagccctcaggagagt

SEQ ID NO: 100247 - DNA, 20 bp, Artificial Sequence
  Description of Artificial Sequence: Synthetic oligonucleotide
  Target: LAMA2; (-) strand; PAM type: NRG; PAM sequence: GAG
aagatttttagccctcagga

SEQ ID NO: 100248 - DNA, 20 bp, Artificial Sequence
  Description of Artificial Sequence: Synthetic oligonucleotide
  Target: LAMA2; (-) strand; PAM type: NRG; PAM sequence: GAG
ggaagatttttagccctcag

SEQ ID NO: 100249 - DNA, 20 bp, Artificial Sequence
  Description of Artificial Sequence: Synthetic oligonucleotide
  Target: LAMA2; (-) strand; PAM type: NRG; PAM sequence: AGG
ctggaagatttttagccctc

SEQ ID NO: 100250 - DNA, 20 bp, Artificial Sequence
  Description of Artificial Sequence: Synthetic oligonucleotide
  Target: LAMA2; (-) strand; PAM type: NRG; PAM sequence: CAG
actggaagatttttagccct

SEQ ID NO: 100251 - DNA, 20 bp, Artificial Sequence
  Description of Artificial Sequence: Synthetic oligonucleotide
  Target: LAMA2; (-) strand; PAM type: NRG; PAM sequence: TAG
tcttgccactggaagatttt

SEQ ID NO: 100252 - DNA, 20 bp, Artificial Sequence
  Description of Artificial Sequence: Synthetic oligonucleotide
  Target: LAMA2; (-) strand; PAM type: NRG; PAM sequence: AAG
aagccacctcttgccactgg

SEQ ID NO: 100253 - DNA, 20 bp, Artificial Sequence
  Description of Artificial Sequence: Synthetic oligonucleotide
  Target: LAMA2; (-) strand; PAM type: NRG; PAM sequence: TGG
accaagccacctcttgccac

SEQ ID NO: 100254 - DNA, 20 bp, Artificial Sequence
  Description of Artificial Sequence: Synthetic oligonucleotide
  Target: LAMA2; (-) strand; PAM type: NRG; PAM sequence: AAG
ccactggattatcctgtacc

SEQ ID NO: 100255 - DNA, 20 bp, Artificial Sequence
  Description of Artificial Sequence: Synthetic oligonucleotide
  Target: LAMA2; (-) strand; PAM type: NRG; PAM sequence: TGG
gcttccatcaataacaccac

SEQ ID NO: 100256 - DNA, 20 bp, Artificial Sequence
  Description of Artificial Sequence: Synthetic oligonucleotide
  Target: LAMA2; (-) strand; PAM type: NRG; PAM sequence: TGG
ctcctatctgcaaatgctgc

SEQ ID NO: 100257 - DNA, 20 bp, Artificial Sequence
  Description of Artificial Sequence: Synthetic oligonucleotide
  Target: LAMA2; (-) strand; PAM type: NRG; PAM sequence: TGG
atttgctctgccaaaaacca

SEQ ID NO: 100258 - DNA, 20 bp, Artificial Sequence
  Description of Artificial Sequence: Synthetic oligonucleotide
  Target: LAMA2; (-) strand; PAM type: NRG; PAM sequence: CAG
attttccccatcccagtcaa

SEQ ID NO: 100259 - DNA, 20 bp, Artificial Sequence
  Description of Artificial Sequence: Synthetic oligonucleotide
  Target: LAMA2; (-) strand; PAM type: NRG; PAM sequence: CAG
ttccctaattttccccatcc

SEQ ID NO: 100260 - DNA, 20 bp, Artificial Sequence
  Description of Artificial Sequence: Synthetic oligonucleotide
  Target: LAMA2; (-) strand; PAM type: NRG; PAM sequence: CAG
ctccccctccaaaaatacac

SEQ ID NO: 100261 - DNA, 20 bp, Artificial Sequence
  Description of Artificial Sequence: Synthetic oligonucleotide
  Target: LAMA2; (-) strand; PAM type: NRG; PAM sequence: AAG
accttcgcagatctaaaagt

SEQ ID NO: 100262 - DNA, 20 bp, Artificial Sequence
  Description of Artificial Sequence: Synthetic oligonucleotide
  Target: LAMA2; (-) strand; PAM type: NRG; PAM sequence: AAG
gcctaccttcgcagatctaa

SEQ ID NO: 100263 - DNA, 20 bp, Artificial Sequence
  Description of Artificial Sequence: Synthetic oligonucleotide
  Target: LAMA2; (-) strand; PAM type: NRG; PAM sequence: CAG
aaatattgtgcctaccttcg

SEQ ID NO: 100264 - DNA, 20 bp, Artificial Sequence
  Description of Artificial Sequence: Synthetic oligonucleotide
  Target: LAMA2; (-) strand; PAM type: NRG; PAM sequence: GGG
atgatctcacttagtcctaa

SEQ ID NO: 100265 - DNA, 20 bp, Artificial Sequence
  Description of Artificial Sequence: Synthetic oligonucleotide
  Target: LAMA2; (-) strand; PAM type: NRG; PAM sequence: AGG
aatgatctcacttagtccta

SEQ ID NO: 100266 - DNA, 20 bp, Artificial Sequence
  Description of Artificial Sequence: Synthetic oligonucleotide
  Target: LAMA2; (-) strand; PAM type: NRG; PAM sequence: AAG
gaatgatctcacttagtcct

SEQ ID NO: 100267 - DNA, 20 bp, Artificial Sequence
  Description of Artificial Sequence: Synthetic oligonucleotide
  Target: LAMA2; (-) strand; PAM type: NRG; PAM sequence: TAG
ctcctctgaatgatctcact

SEQ ID NO: 100268 - DNA, 20 bp, Artificial Sequence
  Description of Artificial Sequence: Synthetic oligonucleotide
  Target: LAMA2; (-) strand; PAM type: NRG; PAM sequence: CAG
tcttaacgtgcttcacaatt

SEQ ID NO: 100269 - DNA, 20 bp, Artificial Sequence
  Description of Artificial Sequence: Synthetic oligonucleotide
  Target: LAMA2; (-) strand; PAM type: NRG; PAM sequence: TGG
agtttcctttgttggatcta

SEQ ID NO: 100270 - DNA, 20 bp, Artificial Sequence
  Description of Artificial Sequence: Synthetic oligonucleotide
  Target: LAMA2; (-) strand; PAM type: NRG; PAM sequence: TGG
tccttttcagtttcctttgt

SEQ ID NO: 100271 - DNA, 20 bp, Artificial Sequence
  Description of Artificial Sequence: Synthetic oligonucleotide
  Target: LAMA2; (-) strand; PAM type: NRG; PAM sequence: CAG
gttcattggttgttcctttt

SEQ ID NO: 100272 - DNA, 20 bp, Artificial Sequence
  Description of Artificial Sequence: Synthetic oligonucleotide
  Target: LAMA2; (-) strand; PAM type: NRG; PAM sequence: TGG
tggtttttatcccagttcat

SEQ ID NO: 100273 - DNA, 20 bp, Artificial Sequence
  Description of Artificial Sequence: Synthetic oligonucleotide
  Target: LAMA2; (-) strand; PAM type: NRG; PAM sequence: CAG
tttccttctggtttttatcc

SEQ ID NO: 100274 - DNA, 20 bp, Artificial Sequence
  Description of Artificial Sequence: Synthetic oligonucleotide
  Target: LAMA2; (-) strand; PAM type: NRG; PAM sequence: TGG
tcctggaaaccatttccttc

SEQ ID NO: 100275 - DNA, 20 bp, Artificial Sequence
  Description of Artificial Sequence: Synthetic oligonucleotide
  Target: LAMA2; (-) strand; PAM type: NRG; PAM sequence: TGG
gcagagataaatgggcttcc

SEQ ID NO: 100276 - DNA, 20 bp, Artificial Sequence
  Description of Artificial Sequence: Synthetic oligonucleotide
  Target: LAMA2; (-) strand; PAM type: NRG; PAM sequence: GGG
tggacactgcagagataaat

SEQ ID NO: 100277 - DNA, 20 bp, Artificial Sequence
  Description of Artificial Sequence: Synthetic oligonucleotide
  Target: LAMA2; (-) strand; PAM type: NRG; PAM sequence: TGG
atggacactgcagagataaa

SEQ ID NO: 100278 - DNA, 20 bp, Artificial Sequence
  Description of Artificial Sequence: Synthetic oligonucleotide
  Target: LAMA2; (-) strand; PAM type: NRG; PAM sequence: GAG
catctcctatggacactgca

SEQ ID NO: 100279 - DNA, 20 bp, Artificial Sequence
  Description of Artificial Sequence: Synthetic oligonucleotide
  Target: LAMA2; (-) strand; PAM type: NRG; PAM sequence: CAG
gtcatctcctatggacactg

SEQ ID NO: 100280 - DNA, 20 bp, Artificial Sequence
  Description of Artificial Sequence: Synthetic oligonucleotide
  Target: LAMA2; (-) strand; PAM type: NRG; PAM sequence: TGG
gctctctgtgtcatctccta

SEQ ID NO: 100281 - DNA, 20 bp, Artificial Sequence
  Description of Artificial Sequence: Synthetic oligonucleotide
  Target: LAMA2; (-) strand; PAM type: NRG; PAM sequence: GAG
cagaatttttaaaatttaca

SEQ ID NO: 100282 - DNA, 20 bp, Artificial Sequence
  Description of Artificial Sequence: Synthetic oligonucleotide
  Target: LAMA2; (-) strand; PAM type: NRG; PAM sequence: CAG
aacagaatttttaaaattta

SEQ ID NO: 100283 - DNA, 20 bp, Artificial Sequence
  Description of Artificial Sequence: Synthetic oligonucleotide
  Target: LAMA2; (-) strand; PAM type: NRG; PAM sequence: CAG
taattccaaactcccctcaa

SEQ ID NO: 100284 - DNA, 20 bp, Artificial Sequence
  Description of Artificial Sequence: Synthetic oligonucleotide
  Target: LAMA2; (-) strand; PAM type: NRG; PAM sequence: TGG
ccatcttttacatttcccta

SEQ ID NO: 100285 - DNA, 20 bp, Artificial Sequence
  Description of Artificial Sequence: Synthetic oligonucleotide
  Target: LAMA2; (-) strand; PAM type: NRG; PAM sequence: TGG
aaatccttgtgcttttctca

SEQ ID NO: 100286 - DNA, 20 bp, Artificial Sequence
  Description of Artificial Sequence: Synthetic oligonucleotide
  Target: LAMA2; (-) strand; PAM type: NRG; PAM sequence: CAG
attttgtctgcagggctact

SEQ ID NO: 100287 - DNA, 20 bp, Artificial Sequence
  Description of Artificial Sequence: Synthetic oligonucleotide
  Target: LAMA2; (-) strand; PAM type: NRG; PAM sequence: GGG
caattatcattttgtctgca

SEQ ID NO: 100288 - DNA, 20 bp, Artificial Sequence
  Description of Artificial Sequence: Synthetic oligonucleotide
  Target: LAMA2; (-) strand; PAM type: NRG; PAM sequence: AGG
tcaattatcattttgtctgc

SEQ ID NO: 100289 - DNA, 20 bp, Artificial Sequence
  Description of Artificial Sequence: Synthetic oligonucleotide
  Target: LAMA2; (-) strand; PAM type: NRG; PAM sequence: CAG
ctcaattatcattttgtctg

SEQ ID NO: 100290 - DNA, 20 bp, Artificial Sequence
  Description of Artificial Sequence: Synthetic oligonucleotide
  Target: LAMA2; (-) strand; PAM type: NRG; PAM sequence: GAG
ttccatctcacttgaagctt

SEQ ID NO: 100291 - DNA, 20 bp, Artificial Sequence
  Description of Artificial Sequence: Synthetic oligonucleotide
  Target: LAMA2; (-) strand; PAM type: NRG; PAM sequence: AAG
tagggattccatctcacttg

SEQ ID NO: 100292 - DNA, 20 bp, Artificial Sequence
  Description of Artificial Sequence: Synthetic oligonucleotide
  Target: LAMA2; (-) strand; PAM type: NRG; PAM sequence: GGG
aaggtcttctggagggagta

SEQ ID NO: 100293 - DNA, 20 bp, Artificial Sequence
  Description of Artificial Sequence: Synthetic oligonucleotide
  Target: LAMA2; (-) strand; PAM type: NRG; PAM sequence: AGG
aaaggtcttctggagggagt

SEQ ID NO: 100294 - DNA, 20 bp, Artificial Sequence
  Description of Artificial Sequence: Synthetic oligonucleotide
  Target: LAMA2; (-) strand; PAM type: NRG; PAM sequence: TAG
aaaaggtcttctggagggag

SEQ ID NO: 100295 - DNA, 20 bp, Artificial Sequence
  Description of Artificial Sequence: Synthetic oligonucleotide
  Target: LAMA2; (-) strand; PAM type: NRG; PAM sequence: GAG
cataaaaggtcttctggagg

SEQ ID NO: 100296 - DNA, 20 bp, Artificial Sequence
  Description of Artificial Sequence: Synthetic oligonucleotide
  Target: LAMA2; (-) strand; PAM type: NRG; PAM sequence: GGG
cacataaaaggtcttctgga

SEQ ID NO: 100297 - DNA, 20 bp, Artificial Sequence
  Description of Artificial Sequence: Synthetic oligonucleotide
  Target: LAMA2; (-) strand; PAM type: NRG; PAM sequence: AGG
tcacataaaaggtcttctgg

SEQ ID NO: 100298 - DNA, 20 bp, Artificial Sequence
  Description of Artificial Sequence: Synthetic oligonucleotide
  Target: LAMA2; (-) strand; PAM type: NRG; PAM sequence: GAG
atcacataaaaggtcttctg

SEQ ID NO: 100299 - DNA, 20 bp, Artificial Sequence
  Description of Artificial Sequence: Synthetic oligonucleotide
  Target: LAMA2; (-) strand; PAM type: NRG; PAM sequence: TGG
atatcacataaaaggtcttc

SEQ ID NO: 100300 - DNA, 20 bp, Artificial Sequence
  Description of Artificial Sequence: Synthetic oligonucleotide
  Target: LAMA2; (-) strand; PAM type: NRG; PAM sequence: AGG
gtttccttatatcacataaa

SEQ ID NO: 100301 - DNA, 20 bp, Artificial Sequence
  Description of Artificial Sequence: Synthetic oligonucleotide
  Target: LAMA2; (-) strand; PAM type: NRG; PAM sequence: AAG
tgtttccttatatcacataa

SEQ ID NO: 100302 - DNA, 20 bp, Artificial Sequence
  Description of Artificial Sequence: Synthetic oligonucleotide
  Target: LAMA2; (-) strand; PAM type: NRG; PAM sequence: TGG
ttcaaattatgatattatgg

SEQ ID NO: 100303 - DNA, 20 bp, Artificial Sequence
  Description of Artificial Sequence: Synthetic oligonucleotide
  Target: LAMA2; (-) strand; PAM type: NRG; PAM sequence: TGG
tttttcaaattatgatatta

SEQ ID NO: 100304 - DNA, 20 bp, Artificial Sequence
  Description of Artificial Sequence: Synthetic oligonucleotide
  Target: LAMA2; (-) strand; PAM type: NRG; PAM sequence: TAG
ggaatgtagtaattcttgaa

SEQ ID NO: 100305 - DNA, 20 bp, Artificial Sequence
  Description of Artificial Sequence: Synthetic oligonucleotide
  Target: LAMA2; (-) strand; PAM type: NRG; PAM sequence: TAG
gtgtttactgtataggaatg

SEQ ID NO: 100306 - DNA, 20 bp, Artificial Sequence
  Description of Artificial Sequence: Synthetic oligonucleotide
  Target: LAMA2; (-) strand; PAM type: NRG; PAM sequence: AGG
taataaagtgtttactgtat

SEQ ID NO: 100307 - DNA, 20 bp, Artificial Sequence
  Description of Artificial Sequence: Synthetic oligonucleotide
  Target: LAMA2; (-) strand; PAM type: NRG; PAM sequence: TAG
ataataaagtgtttactgta

SEQ ID NO: 100308 - DNA, 20 bp, Artificial Sequence
  Description of Artificial Sequence: Synthetic oligonucleotide
  Target: LAMA2; (-) strand; PAM type: NRG; PAM sequence: AAG
atgtcaataaaaaaataata

SEQ ID NO: 100309 - DNA, 20 bp, Artificial Sequence
  Description of Artificial Sequence: Synthetic oligonucleotide
  Target: LAMA2; (-) strand; PAM type: NRG; PAM sequence: TAG
gattaaattacatttcgtta

SEQ ID NO: 100310 - DNA, 20 bp, Artificial Sequence
  Description of Artificial Sequence: Synthetic oligonucleotide
  Target: LAMA2; (-) strand; PAM type: NRG; PAM sequence: CAG
caagagaaactctaaagagc

SEQ ID NO: 100311 - DNA, 20 bp, Artificial Sequence
  Description of Artificial Sequence: Synthetic oligonucleotide
  Target: LAMA2; (-) strand; PAM type: NRG; PAM sequence: GAG
atttcaagagaaactctaaa

SEQ ID NO: 100312 - DNA, 20 bp, Artificial Sequence
  Description of Artificial Sequence: Synthetic oligonucleotide
  Target: LAMA2; (-) strand; PAM type: NRG; PAM sequence: AAG
acatttcaagagaaactcta

SEQ ID NO: 100313 - DNA, 20 bp, Artificial Sequence
  Description of Artificial Sequence: Synthetic oligonucleotide
  Target: LAMA2; (-) strand; PAM type: NRG; PAM sequence: GAG
acagattttagacatttcaa

SEQ ID NO: 100314 - DNA, 20 bp, Artificial Sequence
  Description of Artificial Sequence: Synthetic oligonucleotide
  Target: LAMA2; (-) strand; PAM type: NRG; PAM sequence: AAG
aaacagattttagacatttc

SEQ ID NO: 100315 - DNA, 20 bp, Artificial Sequence
  Description of Artificial Sequence: Synthetic oligonucleotide
  Target: LAMA2; (-) strand; PAM type: NRG; PAM sequence: TAG
gggctctaagaaacagattt

SEQ ID NO: 100316 - DNA, 20 bp, Artificial Sequence
  Description of Artificial Sequence: Synthetic oligonucleotide
  Target: LAMA2; (-) strand; PAM type: NRG; PAM sequence: CAG
catatatgggctctaagaaa

SEQ ID NO: 100317 - DNA, 20 bp, Artificial Sequence
  Description of Artificial Sequence: Synthetic oligonucleotide
  Target: LAMA2; (-) strand; PAM type: NRG; PAM sequence: AAG
cttatacatatatgggctct

SEQ ID NO: 100318 - DNA, 20 bp, Artificial Sequence
  Description of Artificial Sequence: Synthetic oligonucleotide
  Target: LAMA2; (-) strand; PAM type: NRG; PAM sequence: GGG
acacactcttatacatatat

SEQ ID NO: 100319 - DNA, 20 bp, Artificial Sequence
  Description of Artificial Sequence: Synthetic oligonucleotide
  Target: LAMA2; (-) strand; PAM type: NRG; PAM sequence: TGG
cacacactcttatacatata

SEQ ID NO: 100320 - DNA, 20 bp, Artificial Sequence
  Description of Artificial Sequence: Synthetic oligonucleotide
  Target: LAMA2; (-) strand; PAM type: NRG; PAM sequence: AAG
atttttagctcattcattta

SEQ ID NO: 100321 - DNA, 20 bp, Artificial Sequence
  Description of Artificial Sequence: Synthetic oligonucleotide
  Target: LAMA2; (-) strand; PAM type: NRG; PAM sequence: TAG
gacacactctgccaaatttt

SEQ ID NO: 100322 - DNA, 20 bp, Artificial Sequence
  Description of Artificial Sequence: Synthetic oligonucleotide
  Target: LAMA2; (-) strand; PAM type: NRG; PAM sequence: AAG
atagtacatgaatgagtaat

SEQ ID NO: 100323 - DNA, 20 bp, Artificial Sequence
  Description of Artificial Sequence: Synthetic oligonucleotide
  Target: LAMA2; (-) strand; PAM type: NRG; PAM sequence: GAG
tacatcaatagtacatgaat

SEQ ID NO: 100324 - DNA, 20 bp, Artificial Sequence
  Description of Artificial Sequence: Synthetic oligonucleotide
  Target: LAMA2; (-) strand; PAM type: NRG; PAM sequence: TAG
cttctaatgcgttacatcaa

SEQ ID NO: 100325 - DNA, 20 bp, Artificial Sequence
  Description of Artificial Sequence: Synthetic oligonucleotide
  Target: LAMA2; (-) strand; PAM type: NRG; PAM sequence: AGG
ccttttggtcaggtgccatt

SEQ ID NO: 100326 - DNA, 20 bp, Artificial Sequence
  Description of Artificial Sequence: Synthetic oligonucleotide
  Target: LAMA2; (-) strand; PAM type: NRG; PAM sequence: TAG
tccttttggtcaggtgccat

SEQ ID NO: 100327 - DNA, 20 bp, Artificial Sequence
  Description of Artificial Sequence: Synthetic oligonucleotide
  Target: LAMA2; (-) strand; PAM type: NRG; PAM sequence: AGG
gcccacagctccttttggtc

SEQ ID NO: 100328 - DNA, 20 bp, Artificial Sequence
  Description of Artificial Sequence: Synthetic oligonucleotide
  Target: LAMA2; (-) strand; PAM type: NRG; PAM sequence: CAG
ggcccacagctccttttggt

SEQ ID NO: 100329 - DNA, 20 bp, Artificial Sequence
  Description of Artificial Sequence: Synthetic oligonucleotide
  Target: LAMA2; (-) strand; PAM type: NRG; PAM sequence: TGG
gccaggcccacagctccttt

SEQ ID NO: 100330 - DNA, 20 bp, Artificial Sequence
  Description of Artificial Sequence: Synthetic oligonucleotide
  Target: LAMA2; (-) strand; PAM type: NRG; PAM sequence: CAG
aggtgtataggccaggccca

SEQ ID NO: 100331 - DNA, 20 bp, Artificial Sequence
  Description of Artificial Sequence: Synthetic oligonucleotide
  Target: LAMA2; (-) strand; PAM type: NRG; PAM sequence: AGG
ggcaataaggtgtataggcc

SEQ ID NO: 100332 - DNA, 20 bp, Artificial Sequence
  Description of Artificial Sequence: Synthetic oligonucleotide
  Target: LAMA2; (-) strand; PAM type: NRG; PAM sequence: CAG
aggcaataaggtgtataggc

SEQ ID NO: 100333 - DNA, 20 bp, Artificial Sequence
  Description of Artificial Sequence: Synthetic oligonucleotide
  Target: LAMA2; (-) strand; PAM type: NRG; PAM sequence: AGG
aaacaggcaataaggtgtat

SEQ ID NO: 100334 - DNA, 20 bp, Artificial Sequence
  Description of Artificial Sequence: Synthetic oligonucleotide
  Target: LAMA2; (-) strand; PAM type: NRG; PAM sequence: TAG
aaaacaggcaataaggtgta

SEQ ID NO: 100335 - DNA, 20 bp, Artificial Sequence
  Description of Artificial Sequence: Synthetic oligonucleotide
  Target: LAMA2; (-) strand; PAM type: NRG; PAM sequence: AGG
gatgctgaaaacaggcaata

SEQ ID NO: 100336 - DNA, 20 bp, Artificial Sequence
  Description of Artificial Sequence: Synthetic oligonucleotide
  Target: LAMA2; (-) strand; PAM type: NRG; PAM sequence: AAG
tgatgctgaaaacaggcaat

SEQ ID NO: 100337 - DNA, 20 bp, Artificial Sequence
  Description of Artificial Sequence: Synthetic oligonucleotide
  Target: LAMA2; (-) strand; PAM type: NRG; PAM sequence: AGG
aatcagttgatgctgaaaac

SEQ ID NO: 100338 - DNA, 20 bp, Artificial Sequence
  Description of Artificial Sequence: Synthetic oligonucleotide
  Target: LAMA2; (-) strand; PAM type: NRG; PAM sequence: CAG
aaatcagttgatgctgaaaa

SEQ ID NO: 100339 - DNA, 20 bp, Artificial Sequence
  Description of Artificial Sequence: Synthetic oligonucleotide
  Target: LAMA2; (-) strand; PAM type: NRG; PAM sequence: CAG
tttttgctgcttcactaaat

SEQ ID NO: 100340 - DNA, 20 bp, Artificial Sequence
  Description of Artificial Sequence: Synthetic oligonucleotide
  Target: LAMA2; (-) strand; PAM type: NRG; PAM sequence: AAG
aaacatgtatctgtggcaga

SEQ ID NO: 100341 - DNA, 20 bp, Artificial Sequence
  Description of Artificial Sequence: Synthetic oligonucleotide
  Target: LAMA2; (-) strand; PAM type: NRG; PAM sequence: CAG
ttaaaaacatgtatctgtgg

SEQ ID NO: 100342 - DNA, 20 bp, Artificial Sequence
  Description of Artificial Sequence: Synthetic oligonucleotide
  Target: LAMA2; (-) strand; PAM type: NRG; PAM sequence: TGG
aaattaaaaacatgtatctg

SEQ ID NO: 100343 - DNA, 20 bp, Artificial Sequence
  Description of Artificial Sequence: Synthetic oligonucleotide
  Target: LAMA2; (-) strand; PAM type: NRG; PAM sequence: TGG
tgaatgatgcattggaaact

SEQ ID NO: 100344 - DNA, 20 bp, Artificial Sequence
  Description of Artificial Sequence: Synthetic oligonucleotide
  Target: LAMA2; (-) strand; PAM type: NRG; PAM sequence: TGG
gataaaactgaatgatgcat

SEQ ID NO: 100345 - DNA, 20 bp, Artificial Sequence
  Description of Artificial Sequence: Synthetic oligonucleotide
  Target: LAMA2; (-) strand; PAM type: NRG; PAM sequence: TAG
tctctcagctgcattcccgt

SEQ ID NO: 100346 - DNA, 20 bp, Artificial Sequence
  Description of Artificial Sequence: Synthetic oligonucleotide
  Target: LAMA2; (-) strand; PAM type: NRG; PAM sequence: CAG
gggttgttacaaacttctct

SEQ ID NO: 100347 - DNA, 20 bp, Artificial Sequence
  Description of Artificial Sequence: Synthetic oligonucleotide
  Target: LAMA2; (-) strand; PAM type: NRG; PAM sequence: GGG
ctatattagcatgtagtttt

SEQ ID NO: 100348 - DNA, 20 bp, Artificial Sequence
  Description of Artificial Sequence: Synthetic oligonucleotide
  Target: LAMA2; (-) strand; PAM type: NRG; PAM sequence: TGG
actatattagcatgtagttt

SEQ ID NO: 100349 - DNA, 20 bp, Artificial Sequence
  Description of Artificial Sequence: Synthetic oligonucleotide
  Target: LAMA2; (-) strand; PAM type: NRG; PAM sequence: TAG
aactaaactatattagcatg

SEQ ID NO: 100350 - DNA, 20 bp, Artificial Sequence
  Description of Artificial Sequence: Synthetic oligonucleotide
  Target: LAMA2; (-) strand; PAM type: NRG; PAM sequence: TAG
acttgaaaactaaactatat

SEQ ID NO: 100351 - DNA, 20 bp, Artificial Sequence
  Description of Artificial Sequence: Synthetic oligonucleotide
  Target: LAMA2; (-) strand; PAM type: NRG; PAM sequence: AAG
taaaaaaaaaaagactccac

SEQ ID NO: 100352 - DNA, 20 bp, Artificial Sequence
  Description of Artificial Sequence: Synthetic oligonucleotide
  Target: LAMA2; (-) strand; PAM type: NRG; PAM sequence: AAG
cttattccattaaaaaaaaa

SEQ ID NO: 100353 - DNA, 20 bp, Artificial Sequence
  Description of Artificial Sequence: Synthetic oligonucleotide
  Target: LAMA2; (-) strand; PAM type: NRG; PAM sequence: TGG
cagccagtctgtcttgctcc

SEQ ID NO: 100354 - DNA, 20 bp, Artificial Sequence
  Description of Artificial Sequence: Synthetic oligonucleotide
  Target: LAMA2; (-) strand; PAM type: NRG; PAM sequence: CAG
caatgctggtagaccacagc

SEQ ID NO: 100355 - DNA, 20 bp, Artificial Sequence
  Description of Artificial Sequence: Synthetic oligonucleotide
  Target: LAMA2; (-) strand; PAM type: NRG; PAM sequence: CAG
actacaatgctggtagacca

SEQ ID NO: 100356 - DNA, 20 bp, Artificial Sequence
  Description of Artificial Sequence: Synthetic oligonucleotide
  Target: LAMA2; (-) strand; PAM type: NRG; PAM sequence: TAG
tgtttttactacaatgctgg

SEQ ID NO: 100357 - DNA, 20 bp, Artificial Sequence
  Description of Artificial Sequence: Synthetic oligonucleotide
  Target: LAMA2; (-) strand; PAM type: NRG; PAM sequence: TGG
caatgtttttactacaatgc

SEQ ID NO: 100358 - DNA, 20 bp, Artificial Sequence
  Description of Artificial Sequence: Synthetic oligonucleotide
  Target: LAMA2; (-) strand; PAM type: NRG; PAM sequence: AGG
tatggtattttctaataatt

SEQ ID NO: 100359 - DNA, 20 bp, Artificial Sequence
  Description of Artificial Sequence: Synthetic oligonucleotide
  Target: LAMA2; (-) strand; PAM type: NRG; PAM sequence: TAG
ttatggtattttctaataat

SEQ ID NO: 100360 - DNA, 20 bp, Artificial Sequence
  Description of Artificial Sequence: Synthetic oligonucleotide
  Target: LAMA2; (-) strand; PAM type: NRG; PAM sequence: TGG
ctatgaaaatgactatttta

SEQ ID NO: 100361 - DNA, 20 bp, Artificial Sequence
  Description of Artificial Sequence: Synthetic oligonucleotide
  Target: LAMA2; (-) strand; PAM type: NRG; PAM sequence: AAG
attcagtgtgaggaaaggga

SEQ ID NO: 100362 - DNA, 20 bp, Artificial Sequence
  Description of Artificial Sequence: Synthetic oligonucleotide
  Target: LAMA2; (-) strand; PAM type: NRG; PAM sequence: GGG
tgtgattcagtgtgaggaaa

SEQ ID NO: 100363 - DNA, 20 bp, Artificial Sequence
  Description of Artificial Sequence: Synthetic oligonucleotide
  Target: LAMA2; (-) strand; PAM type: NRG; PAM sequence: AGG
atgtgattcagtgtgaggaa

SEQ ID NO: 100364 - DNA, 20 bp, Artificial Sequence
  Description of Artificial Sequence: Synthetic oligonucleotide
  Target: LAMA2; (-) strand; PAM type: NRG; PAM sequence: AAG
aatgtgattcagtgtgagga

SEQ ID NO: 100365 - DNA, 20 bp, Artificial Sequence
  Description of Artificial Sequence: Synthetic oligonucleotide
  Target: LAMA2; (-) strand; PAM type: NRG; PAM sequence: AGG
aagtaatgtgattcagtgtg

SEQ ID NO: 100366 - DNA, 20 bp, Artificial Sequence
  Description of Artificial Sequence: Synthetic oligonucleotide
  Target: LAMA2; (-) strand; PAM type: NRG; PAM sequence: GAG
aaagtaatgtgattcagtgt

SEQ ID NO: 100367 - DNA, 20 bp, Artificial Sequence
  Description of Artificial Sequence: Synthetic oligonucleotide
  Target: LAMA2; (-) strand; PAM type: NRG; PAM sequence: CAG
gaacacaaagtaatgtgatt

SEQ ID NO: 100368 - DNA, 20 bp, Artificial Sequence
  Description of Artificial Sequence: Synthetic oligonucleotide
  Target: LAMA2; (-) strand; PAM type: NRG; PAM sequence: AAG
tacattttaccttgaacaca

SEQ ID NO: 100369 - DNA, 20 bp, Artificial Sequence
  Description of Artificial Sequence: Synthetic oligonucleotide
  Target: LAMA2; (-) strand; PAM type: NRG; PAM sequence: CAG
tatcttttctaatttacatc

SEQ ID NO: 100370 - DNA, 20 bp, Artificial Sequence
  Description of Artificial Sequence: Synthetic oligonucleotide
  Target: LAMA2; (-) strand; PAM type: NRG; PAM sequence: TGG
gtgtgaatacatgtttcact

SEQ ID NO: 100371 - DNA, 20 bp, Artificial Sequence
  Description of Artificial Sequence: Synthetic oligonucleotide
  Target: LAMA2; (-) strand; PAM type: NRG; PAM sequence: AAG
cactggtgcttcaagacgtg

SEQ ID NO: 100372 - DNA, 20 bp, Artificial Sequence
  Description of Artificial Sequence: Synthetic oligonucleotide
  Target: LAMA2; (-) strand; PAM type: NRG; PAM sequence: AAG
caaatggccactggtgcttc

SEQ ID NO: 100373 - DNA, 20 bp, Artificial Sequence
  Description of Artificial Sequence: Synthetic oligonucleotide
  Target: LAMA2; (-) strand; PAM type: NRG; PAM sequence: TGG
aactcagcccaaatggccac

SEQ ID NO: 100374 - DNA, 20 bp, Artificial Sequence
  Description of Artificial Sequence: Synthetic oligonucleotide
  Target: LAMA2; (-) strand; PAM type: NRG; PAM sequence: TGG
tcttgaaaactcagcccaaa

SEQ ID NO: 100375 - DNA, 20 bp, Artificial Sequence
  Description of Artificial Sequence: Synthetic oligonucleotide
  Target: LAMA2; (-) strand; PAM type: NRG; PAM sequence: CAG
aattttttttcttgaaaact

SEQ ID NO: 100376 - DNA, 20 bp, Artificial Sequence
  Description of Artificial Sequence: Synthetic oligonucleotide
  Target: LAMA2; (-) strand; PAM type: NRG; PAM sequence: GGG
tatctcttaggttaaaaaaa

SEQ ID NO: 100377 - DNA, 20 bp, Artificial Sequence
  Description of Artificial Sequence: Synthetic oligonucleotide
  Target: LAMA2; (-) strand; PAM type: NRG; PAM sequence: AGG
atatctcttaggttaaaaaa

SEQ ID NO: 100378 - DNA, 20 bp, Artificial Sequence
  Description of Artificial Sequence: Synthetic oligonucleotide
  Target: LAMA2; (-) strand; PAM type: NRG; PAM sequence: AAG
aatatctcttaggttaaaaa

SEQ ID NO: 100379 - DNA, 20 bp, Artificial Sequence
  Description of Artificial Sequence: Synthetic oligonucleotide
  Target: LAMA2; (-) strand; PAM type: NRG; PAM sequence: AGG
gctattacttaatatctctt

SEQ ID NO: 100380 - DNA, 20 bp, Artificial Sequence
  Description of Artificial Sequence: Synthetic oligonucleotide
  Target: LAMA2; (-) strand; PAM type: NRG; PAM sequence: TAG
agctattacttaatatctct

SEQ ID NO: 100381 - DNA, 20 bp, Artificial Sequence
  Description of Artificial Sequence: Synthetic oligonucleotide
  Target: LAMA2; (-) strand; PAM type: NRG; PAM sequence: TAG
cacattgtctgatagtggaa

SEQ ID NO: 100382 - DNA, 20 bp, Artificial Sequence
  Description of Artificial Sequence: Synthetic oligonucleotide
  Target: LAMA2; (-) strand; PAM type: NRG; PAM sequence: TGG
ttatgcacattgtctgatag

SEQ ID NO: 100383 - DNA, 20 bp, Artificial Sequence
  Description of Artificial Sequence: Synthetic oligonucleotide
  Target: LAMA2; (-) strand; PAM type: NRG; PAM sequence: TAG
aatttatgcacattgtctga

SEQ ID NO: 100384 - DNA, 20 bp, Artificial Sequence
  Description of Artificial Sequence: Synthetic oligonucleotide
  Target: LAMA2; (-) strand; PAM type: NRG; PAM sequence: TAG
aatcaaaagaaaaatctgac

SEQ ID NO: 100385 - DNA, 20 bp, Artificial Sequence
  Description of Artificial Sequence: Synthetic oligonucleotide
  Target: LAMA2; (-) strand; PAM type: NRG; PAM sequence: AAG
tcctattgttcactaatcaa

SEQ ID NO: 100386 - DNA, 20 bp, Artificial Sequence
  Description of Artificial Sequence: Synthetic oligonucleotide
  Target: LAMA2; (-) strand; PAM type: NRG; PAM sequence: CAG
ccatgaatatactaaacatc

SEQ ID NO: 100387 - DNA, 20 bp, Artificial Sequence
  Description of Artificial Sequence: Synthetic oligonucleotide
  Target: LAMA2; (-) strand; PAM type: NRG; PAM sequence: CAG
ggaatttaataatgatgtga

SEQ ID NO: 100388 - DNA, 20 bp, Artificial Sequence
  Description of Artificial Sequence: Synthetic oligonucleotide
  Target: LAMA2; (-) strand; PAM type: NRG; PAM sequence: TGG
cacaaagcatgttaatattc

SEQ ID NO: 100389 - DNA, 20 bp, Artificial Sequence
  Description of Artificial Sequence: Synthetic oligonucleotide
  Target: LAMA2; (-) strand; PAM type: NRG; PAM sequence: AAG
gattaaaaatgcatcacaca

SEQ ID NO: 100390 - DNA, 20 bp, Artificial Sequence
  Description of Artificial Sequence: Synthetic oligonucleotide
  Target: LAMA2; (-) strand; PAM type: NRG; PAM sequence: TGG
atatattgtttggtttatga

SEQ ID NO: 100391 - DNA, 20 bp, Artificial Sequence
  Description of Artificial Sequence: Synthetic oligonucleotide
  Target: LAMA2; (-) strand; PAM type: NRG; PAM sequence: TGG
gtaaacaaatatatattgtt

SEQ ID NO: 100392 - DNA, 20 bp, Artificial Sequence
  Description of Artificial Sequence: Synthetic oligonucleotide
  Target: LAMA2; (-) strand; PAM type: NRG; PAM sequence: CAG
caatgaaaaaccattaataa

SEQ ID NO: 100393 - DNA, 20 bp, Artificial Sequence
  Description of Artificial Sequence: Synthetic oligonucleotide
  Target: LAMA2; (-) strand; PAM type: NRG; PAM sequence: AGG
tgaagttcttatttaaggct

SEQ ID NO: 100394 - DNA, 20 bp, Artificial Sequence
  Description of Artificial Sequence: Synthetic oligonucleotide
  Target: LAMA2; (-) strand; PAM type: NRG; PAM sequence: TAG
ctgaagttcttatttaaggc

SEQ ID NO: 100395 - DNA, 20 bp, Artificial Sequence
  Description of Artificial Sequence: Synthetic oligonucleotide
  Target: LAMA2; (-) strand; PAM type: NRG; PAM sequence: AGG
attgctgaagttcttattta

SEQ ID NO: 100396 - DNA, 20 bp, Artificial Sequence
  Description of Artificial Sequence: Synthetic oligonucleotide
  Target: LAMA2; (-) strand; PAM type: NRG; PAM sequence: AAG
tattgctgaagttcttattt

SEQ ID NO: 100397 - DNA, 20 bp, Artificial Sequence
  Description of Artificial Sequence: Synthetic oligonucleotide
  Target: LAMA2; (-) strand; PAM type: NRG; PAM sequence: AAG
catctttataattattgctg

SEQ ID NO: 100398 - DNA, 20 bp, Artificial Sequence
  Description of Artificial Sequence: Synthetic oligonucleotide
  Target: LAMA2; (-) strand; PAM type: NRG; PAM sequence: TAG
tattgggacatacttttagg

SEQ ID NO: 100399 - DNA, 20 bp, Artificial Sequence
  Description of Artificial Sequence: Synthetic oligonucleotide
  Target: LAMA2; (-) strand; PAM type: NRG; PAM sequence: AGG
ggttattgggacatactttt

SEQ ID NO: 100400 - DNA, 20 bp, Artificial Sequence
  Description of Artificial Sequence: Synthetic oligonucleotide
  Target: LAMA2; (-) strand; PAM type: NRG; PAM sequence: TAG
aggttattgggacatacttt

SEQ ID NO: 100401 - DNA, 20 bp, Artificial Sequence
  Description of Artificial Sequence: Synthetic oligonucleotide
  Target: LAMA2; (-) strand; PAM type: NRG; PAM sequence: GGG
tatccatgatcaaggttatt

SEQ ID NO: 100402 - DNA, 20 bp, Artificial Sequence
  Description of Artificial Sequence: Synthetic oligonucleotide
  Target: LAMA2; (-) strand; PAM type: NRG; PAM sequence: TGG
ctatccatgatcaaggttat

SEQ ID NO: 100403 - DNA, 20 bp, Artificial Sequence
  Description of Artificial Sequence: Synthetic oligonucleotide
  Target: LAMA2; (-) strand; PAM type: NRG; PAM sequence: AGG
agtattcctatccatgatca

SEQ ID NO: 100404 - DNA, 20 bp, Artificial Sequence
  Description of Artificial Sequence: Synthetic oligonucleotide
  Target: LAMA2; (-) strand; PAM type: NRG; PAM sequence: AAG
tagtattcctatccatgatc

SEQ ID NO: 100405 - DNA, 20 bp, Artificial Sequence
  Description of Artificial Sequence: Synthetic oligonucleotide
  Target: LAMA2; (-) strand; PAM type: NRG; PAM sequence: TAG
aatccatttattttataaaa

SEQ ID NO: 100406 - DNA, 20 bp, Artificial Sequence
  Description of Artificial Sequence: Synthetic oligonucleotide
  Target: LAMA2; (-) strand; PAM type: NRG; PAM sequence: AAG
aaagaaaaggattgcaaaaa

SEQ ID NO: 100407 - DNA, 20 bp, Artificial Sequence
  Description of Artificial Sequence: Synthetic oligonucleotide
  Target: LAMA2; (-) strand; PAM type: NRG; PAM sequence: AGG
gaaactgaatcagaaagaaa

SEQ ID NO: 100408 - DNA, 20 bp, Artificial Sequence
  Description of Artificial Sequence: Synthetic oligonucleotide
  Target: LAMA2; (-) strand; PAM type: NRG; PAM sequence: AAG
tgaaactgaatcagaaagaa

SEQ ID NO: 100409 - DNA, 20 bp, Artificial Sequence
  Description of Artificial Sequence: Synthetic oligonucleotide
  Target: LAMA2; (-) strand; PAM type: NRG; PAM sequence: AAG
ggggctgaaactgaatcaga

SEQ ID NO: 100410 - DNA, 20 bp, Artificial Sequence
  Description of Artificial Sequence: Synthetic oligonucleotide
  Target: LAMA2; (-) strand; PAM type: NRG; PAM sequence: CAG
aagaggggctgaaactgaat

SEQ ID NO: 100411 - DNA, 20 bp, Artificial Sequence
  Description of Artificial Sequence: Synthetic oligonucleotide
  Target: LAMA2; (-) strand; PAM type: NRG; PAM sequence: GGG
gtccttctgcgacacaagag

SEQ ID NO: 100412 - DNA, 20 bp, Artificial Sequence
  Description of Artificial Sequence: Synthetic oligonucleotide
  Target: LAMA2; (-) strand; PAM type: NRG; PAM sequence: GGG
agtccttctgcgacacaaga

SEQ ID NO: 100413 - DNA, 20 bp, Artificial Sequence
  Description of Artificial Sequence: Synthetic oligonucleotide
  Target: LAMA2; (-) strand; PAM type: NRG; PAM sequence: AGG
aagtccttctgcgacacaag

SEQ ID NO: 100414 - DNA, 20 bp, Artificial Sequence
  Description of Artificial Sequence: Synthetic oligonucleotide
  Target: LAMA2; (-) strand; PAM type: NRG; PAM sequence: GAG
caagtccttctgcgacacaa

SEQ ID NO: 100415 - DNA, 20 bp, Artificial Sequence
  Description of Artificial Sequence: Synthetic oligonucleotide
  Target: LAMA2; (-) strand; PAM type: NRG; PAM sequence: AAG
gtcaagtccttctgcgacac

SEQ ID NO: 100416 - DNA, 20 bp, Artificial Sequence
  Description of Artificial Sequence: Synthetic oligonucleotide
  Target: LAMA2; (-) strand; PAM type: NRG; PAM sequence: AAG
gccgtgcagcggtagtcgtc

SEQ ID NO: 100417 - DNA, 20 bp, Artificial Sequence
  Description of Artificial Sequence: Synthetic oligonucleotide
  Target: LAMA2; (-) strand; PAM type: NRG; PAM sequence: TAG
gtggacaagccgtgcagcgg

SEQ ID NO: 100418 - DNA, 20 bp, Artificial Sequence
  Description of Artificial Sequence: Synthetic oligonucleotide
  Target: LAMA2; (-) strand; PAM type: NRG; PAM sequence: CGG
cccgtggacaagccgtgcag

SEQ ID NO: 100419 - DNA, 20 bp, Artificial Sequence
  Description of Artificial Sequence: Synthetic oligonucleotide
  Target: LAMA2; (-) strand; PAM type: NRG; PAM sequence: CAG
atccccgtggacaagccgtg

SEQ ID NO: 100420 - DNA, 20 bp, Artificial Sequence
  Description of Artificial Sequence: Synthetic oligonucleotide
  Target: LAMA2; (-) strand; PAM type: NRG; PAM sequence: AAG
gccttcatatccccgtggac

SEQ ID NO: 100421 - DNA, 20 bp, Artificial Sequence
  Description of Artificial Sequence: Synthetic oligonucleotide
  Target: LAMA2; (-) strand; PAM type: NRG; PAM sequence: TGG
tactggccttcatatccccg

SEQ ID NO: 100422 - DNA, 20 bp, Artificial Sequence
  Description of Artificial Sequence: Synthetic oligonucleotide
  Target: LAMA2; (-) strand; PAM type: NRG; PAM sequence: TGG
gttggtacctttcacagtac

SEQ ID NO: 100423 - DNA, 20 bp, Artificial Sequence
  Description of Artificial Sequence: Synthetic oligonucleotide
  Target: LAMA2; (-) strand; PAM type: NRG; PAM sequence: CAG
atggctgttggtacctttca

SEQ ID NO: 100424 - DNA, 20 bp, Artificial Sequence
  Description of Artificial Sequence: Synthetic oligonucleotide
  Target: LAMA2; (-) strand; PAM type: NRG; PAM sequence: TGG
tctgtacgtttcatggctgt

SEQ ID NO: 100425 - DNA, 20 bp, Artificial Sequence
  Description of Artificial Sequence: Synthetic oligonucleotide
  Target: LAMA2; (-) strand; PAM type: NRG; PAM sequence: TGG
tcattactctgtacgtttca

SEQ ID NO: 100426 - DNA, 20 bp, Artificial Sequence
  Description of Artificial Sequence: Synthetic oligonucleotide
  Target: LAMA2; (-) strand; PAM type: NRG; PAM sequence: TAG
tattgtgaccctttaccata

SEQ ID NO: 100427 - DNA, 20 bp, Artificial Sequence
  Description of Artificial Sequence: Synthetic oligonucleotide
  Target: LAMA2; (-) strand; PAM type: NRG; PAM sequence: AAG
taaaggatatgcaaatattg

SEQ ID NO: 100428 - DNA, 20 bp, Artificial Sequence
  Description of Artificial Sequence: Synthetic oligonucleotide
  Target: LAMA2; (-) strand; PAM type: NRG; PAM sequence: AGG
attgtaatttaaacttctaa

SEQ ID NO: 100429 - DNA, 20 bp, Artificial Sequence
  Description of Artificial Sequence: Synthetic oligonucleotide
  Target: LAMA2; (-) strand; PAM type: NRG; PAM sequence: AAG
cattgtaatttaaacttcta

SEQ ID NO: 100430 - DNA, 20 bp, Artificial Sequence
  Description of Artificial Sequence: Synthetic oligonucleotide
  Target: LAMA2; (-) strand; PAM type: NRG; PAM sequence: AAG
agatacacaagtggttttga

SEQ ID NO: 100431 - DNA, 20 bp, Artificial Sequence
  Description of Artificial Sequence: Synthetic oligonucleotide
  Target: LAMA2; (-) strand; PAM type: NRG; PAM sequence: TGG
caaattctaagatacacaag

SEQ ID NO: 100432 - DNA, 20 bp, Artificial Sequence
  Description of Artificial Sequence: Synthetic oligonucleotide
  Target: LAMA2; (-) strand; PAM type: NRG; PAM sequence: AAG
ggacaaattctaagatacac

SEQ ID NO: 100433 - DNA, 20 bp, Artificial Sequence
  Description of Artificial Sequence: Synthetic oligonucleotide
  Target: LAMA2; (-) strand; PAM type: NRG; PAM sequence: AAG
actttctttggacaaattct

SEQ ID NO: 100434 - DNA, 20 bp, Artificial Sequence
  Description of Artificial Sequence: Synthetic oligonucleotide
  Target: LAMA2; (-) strand; PAM type: NRG; PAM sequence: TGG
tggaaataaacaactttctt

SEQ ID NO: 100435 - DNA, 20 bp, Artificial Sequence
  Description of Artificial Sequence: Synthetic oligonucleotide
  Target: LAMA2; (-) strand; PAM type: NRG; PAM sequence: TGG
gataaagtctaaacatacgg

SEQ ID NO: 100436 - DNA, 20 bp, Artificial Sequence
  Description of Artificial Sequence: Synthetic oligonucleotide
  Target: LAMA2; (-) strand; PAM type: NRG; PAM sequence: CGG
tttgataaagtctaaacata

SEQ ID NO: 100437 - DNA, 20 bp, Artificial Sequence
  Description of Artificial Sequence: Synthetic oligonucleotide
  Target: LAMA2; (-) strand; PAM type: NRG; PAM sequence: AAG
atagtttggaatctttgata

SEQ ID NO: 100438 - DNA, 20 bp, Artificial Sequence
  Description of Artificial Sequence: Synthetic oligonucleotide
  Target: LAMA2; (-) strand; PAM type: NRG; PAM sequence: TGG
ttagataattgtaaatagtt

SEQ ID NO: 100439 - DNA, 20 bp, Artificial Sequence
  Description of Artificial Sequence: Synthetic oligonucleotide
  Target: LAMA2; (-) strand; PAM type: NRG; PAM sequence: TAG
ataagttagataattgtaaa

SEQ ID NO: 100440 - DNA, 20 bp, Artificial Sequence
  Description of Artificial Sequence: Synthetic oligonucleotide
  Target: LAMA2; (-) strand; PAM type: NRG; PAM sequence: TAG
atatatactaaagcataagt

SEQ ID NO: 100441 - DNA, 20 bp, Artificial Sequence
  Description of Artificial Sequence: Synthetic oligonucleotide
  Target: LAMA2; (-) strand; PAM type: NRG; PAM sequence: AAG
atatatatatactaaagcat

SEQ ID NO: 100442 - DNA, 20 bp, Artificial Sequence
  Description of Artificial Sequence: Synthetic oligonucleotide
  Target: LAMA2; (-) strand; PAM type: NRG; PAM sequence: AAG
ttatatatatatatatacta

SEQ ID NO: 100443 - DNA, 20 bp, Artificial Sequence
  Description of Artificial Sequence: Synthetic oligonucleotide
  Target: LAMA2; (-) strand; PAM type: NRG; PAM sequence: AAG
tattagtagtaactactgct

SEQ ID NO: 100444 - DNA, 20 bp, Artificial Sequence
  Description of Artificial Sequence: Synthetic oligonucleotide
  Target: LAMA2; (-) strand; PAM type: NRG; PAM sequence: TAG
tgtagccagtttcttattag

SEQ ID NO: 100445 - DNA, 20 bp, Artificial Sequence
  Description of Artificial Sequence: Synthetic oligonucleotide
  Target: LAMA2; (-) strand; PAM type: NRG; PAM sequence: TAG
aagtgtagccagtttcttat

SEQ ID NO: 100446 - DNA, 20 bp, Artificial Sequence
  Description of Artificial Sequence: Synthetic oligonucleotide
  Target: LAMA2; (-) strand; PAM type: NRG; PAM sequence: CAG
taaaataagaaaagtgtagc

SEQ ID NO: 100447 - DNA, 20 bp, Artificial Sequence
  Description of Artificial Sequence: Synthetic oligonucleotide
  Target: LAMA2; (-) strand; PAM type: NRG; PAM sequence: TAG
gcattaaaataagaaaagtg

SEQ ID NO: 100448 - DNA, 20 bp, Artificial Sequence
  Description of Artificial Sequence: Synthetic oligonucleotide
  Target: LAMA2; (-) strand; PAM type: NRG; PAM sequence: AAG
ccagtgcattaaaataagaa

SEQ ID NO: 100449 - DNA, 20 bp, Artificial Sequence
  Description of Artificial Sequence: Synthetic oligonucleotide
  Target: LAMA2; (-) strand; PAM type: NRG; PAM sequence: AAG
attttccagtgcattaaaat

SEQ ID NO: 100450 - DNA, 20 bp, Artificial Sequence
  Description of Artificial Sequence: Synthetic oligonucleotide
  Target: LAMA2; (-) strand; PAM type: NRG; PAM sequence: CAG
tacttccagacaatattttc

SEQ ID NO: 100451 - DNA, 20 bp, Artificial Sequence
  Description of Artificial Sequence: Synthetic oligonucleotide
  Target: LAMA2; (-) strand; PAM type: NRG; PAM sequence: CAG
gacgtgaattcagttacttc

SEQ ID NO: 100452 - DNA, 20 bp, Artificial Sequence
  Description of Artificial Sequence: Synthetic oligonucleotide
  Target: LAMA2; (-) strand; PAM type: NRG; PAM sequence: CAG
tcagaacaatgacgtgaatt

SEQ ID NO: 100453 - DNA, 20 bp, Artificial Sequence
  Description of Artificial Sequence: Synthetic oligonucleotide
  Target: LAMA2; (-) strand; PAM type: NRG; PAM sequence: CAG
gctggtgtagtcatagtgtt

SEQ ID NO: 100454 - DNA, 20 bp, Artificial Sequence
  Description of Artificial Sequence: Synthetic oligonucleotide
  Target: LAMA2; (-) strand; PAM type: NRG; PAM sequence: TAG
tacacttgctggtgtagtca

SEQ ID NO: 100455 - DNA, 20 bp, Artificial Sequence
  Description of Artificial Sequence: Synthetic oligonucleotide
  Target: LAMA2; (-) strand; PAM type: NRG; PAM sequence: TAG
tatgtatacacttgctggtg

SEQ ID NO: 100456 - DNA, 20 bp, Artificial Sequence
  Description of Artificial Sequence: Synthetic oligonucleotide
  Target: LAMA2; (-) strand; PAM type: NRG; PAM sequence: TGG
tgagttatgtatacacttgc

SEQ ID NO: 100457 - DNA, 20 bp, Artificial Sequence
  Description of Artificial Sequence: Synthetic oligonucleotide
  Target: LAMA2; (-) strand; PAM type: NRG; PAM sequence: GAG
cttgatactatttatatttt

SEQ ID NO: 100458 - DNA, 20 bp, Artificial Sequence
  Description of Artificial Sequence: Synthetic oligonucleotide
  Target: LAMA2; (-) strand; PAM type: NRG; PAM sequence: GGG
taacaaatactttattgtct

SEQ ID NO: 100459 - DNA, 20 bp, Artificial Sequence
  Description of Artificial Sequence: Synthetic oligonucleotide
  Target: LAMA2; (-) strand; PAM type: NRG; PAM sequence: TGG
ataacaaatactttattgtc

SEQ ID NO: 100460 - DNA, 20 bp, Artificial Sequence
  Description of Artificial Sequence: Synthetic oligonucleotide
  Target: LAMA2; (-) strand; PAM type: NRG; PAM sequence: AGG
atattgtttgcctattgaaa

SEQ ID NO: 100461 - DNA, 20 bp, Artificial Sequence
  Description of Artificial Sequence: Synthetic oligonucleotide
  Target: LAMA2; (-) strand; PAM type: NRG; PAM sequence: AAG
aatattgtttgcctattgaa

SEQ ID NO: 100462 - DNA, 20 bp, Artificial Sequence
  Description of Artificial Sequence: Synthetic oligonucleotide
  Target: LAMA2; (-) strand; PAM type: NRG; PAM sequence: GAG
tttcataagcaatatggtaa

SEQ ID NO: 100463 - DNA, 20 bp, Artificial Sequence
  Description of Artificial Sequence: Synthetic oligonucleotide
  Target: LAMA2; (-) strand; PAM type: NRG; PAM sequence: AAG
gatttcataagcaatatggt

SEQ ID NO: 100464 - DNA, 20 bp, Artificial Sequence
  Description of Artificial Sequence: Synthetic oligonucleotide
  Target: LAMA2; (-) strand; PAM type: NRG; PAM sequence: TGG
atgagatttcataagcaata

SEQ ID NO: 100465 - DNA, 20 bp, Artificial Sequence
  Description of Artificial Sequence: Synthetic oligonucleotide
  Target: LAMA2; (-) strand; PAM type: NRG; PAM sequence: AAG
catgcattatgagatttcat

SEQ ID NO: 100466 - DNA, 20 bp, Artificial Sequence
  Description of Artificial Sequence: Synthetic oligonucleotide
  Target: LAMA2; (-) strand; PAM type: NRG; PAM sequence: GAG
cagctgtatacatgcattat

SEQ ID NO: 100467 - DNA, 20 bp, Artificial Sequence
  Description of Artificial Sequence: Synthetic oligonucleotide
  Target: LAMA2; (-) strand; PAM type: NRG; PAM sequence: CAG
acactgagaattcaatttaa

SEQ ID NO: 100468 - DNA, 20 bp, Artificial Sequence
  Description of Artificial Sequence: Synthetic oligonucleotide
  Target: LAMA2; (-) strand; PAM type: NRG; PAM sequence: GAG
tttaccatttggattacact

SEQ ID NO: 100469 - DNA, 20 bp, Artificial Sequence
  Description of Artificial Sequence: Synthetic oligonucleotide
  Target: LAMA2; (-) strand; PAM type: NRG; PAM sequence: TGG
gtactccttaatttaccatt

SEQ ID NO: 100470 - DNA, 20 bp, Artificial Sequence
  Description of Artificial Sequence: Synthetic oligonucleotide
  Target: LAMA2; (-) strand; PAM type: NRG; PAM sequence: TGG
acttttctagacaatcagtt

SEQ ID NO: 100471 - DNA, 20 bp, Artificial Sequence
  Description of Artificial Sequence: Synthetic oligonucleotide
  Target: LAMA2; (-) strand; PAM type: NRG; PAM sequence: CAG
ttgcaacttttctagacaat

SEQ ID NO: 100472 - DNA, 20 bp, Artificial Sequence
  Description of Artificial Sequence: Synthetic oligonucleotide
  Target: LAMA2; (-) strand; PAM type: NRG; PAM sequence: TAG
gatattaattgcaacttttc

SEQ ID NO: 100473 - DNA, 20 bp, Artificial Sequence
  Description of Artificial Sequence: Synthetic oligonucleotide
  Target: LAMA2; (-) strand; PAM type: NRG; PAM sequence: AAG
tacagaaaatatatatctgg

SEQ ID NO: 100474 - DNA, 20 bp, Artificial Sequence
  Description of Artificial Sequence: Synthetic oligonucleotide
  Target: LAMA2; (-) strand; PAM type: NRG; PAM sequence: TGG
tcttacagaaaatatatatc

SEQ ID NO: 100475 - DNA, 20 bp, Artificial Sequence
  Description of Artificial Sequence: Synthetic oligonucleotide
  Target: LAMA2; (-) strand; PAM type: NRG; PAM sequence: CAG
tatccaggatactgatctta

SEQ ID NO: 100476 - DNA, 20 bp, Artificial Sequence
  Description of Artificial Sequence: Synthetic oligonucleotide
  Target: LAMA2; (-) strand; PAM type: NRG; PAM sequence: AGG
ggtgacaagtttgaatatcc

SEQ ID NO: 100477 - DNA, 20 bp, Artificial Sequence
  Description of Artificial Sequence: Synthetic oligonucleotide
  Target: LAMA2; (-) strand; PAM type: NRG; PAM sequence: CAG
tggtgacaagtttgaatatc

SEQ ID NO: 100478 - DNA, 20 bp, Artificial Sequence
  Description of Artificial Sequence: Synthetic oligonucleotide
  Target: LAMA2; (-) strand; PAM type: NRG; PAM sequence: AAG
ataccaaaagtggtggtgac

SEQ ID NO: 100479 - DNA, 20 bp, Artificial Sequence
  Description of Artificial Sequence: Synthetic oligonucleotide
  Target: LAMA2; (-) strand; PAM type: NRG; PAM sequence: TGG
ctaaaatataccaaaagtgg

SEQ ID NO: 100480 - DNA, 20 bp, Artificial Sequence
  Description of Artificial Sequence: Synthetic oligonucleotide
  Target: LAMA2; (-) strand; PAM type: NRG; PAM sequence: TGG
tatctaaaatataccaaaag

SEQ ID NO: 100481 - DNA, 20 bp, Artificial Sequence
  Description of Artificial Sequence: Synthetic oligonucleotide
  Target: LAMA2; (-) strand; PAM type: NRG; PAM sequence: AAG
taatatctaaaatataccaa

SEQ ID NO: 100482 - DNA, 20 bp, Artificial Sequence
  Description of Artificial Sequence: Synthetic oligonucleotide
  Target: LAMA2; (-) strand; PAM type: NRG; PAM sequence: AAG
agtaactctctgttacatta

SEQ ID NO: 100483 - DNA, 20 bp, Artificial Sequence
  Description of Artificial Sequence: Synthetic oligonucleotide
  Target: LAMA2; (-) strand; PAM type: NRG; PAM sequence: TAG
ataatgttagtagttaacat

SEQ ID NO: 100484 - DNA, 20 bp, Artificial Sequence
  Description of Artificial Sequence: Synthetic oligonucleotide
  Target: LAMA2; (-) strand; PAM type: NRG; PAM sequence: TAG
tcatgtgtgtataatgttag

SEQ ID NO: 100485 - DNA, 20 bp, Artificial Sequence
  Description of Artificial Sequence: Synthetic oligonucleotide
  Target: LAMA2; (-) strand; PAM type: NRG; PAM sequence: TAG
ctatcatgtgtgtataatgt

SEQ ID NO: 100486 - DNA, 20 bp, Artificial Sequence
  Description of Artificial Sequence: Synthetic oligonucleotide
  Target: LAMA2; (-) strand; PAM type: NRG; PAM sequence: TGG
ttggaattgagcgaagtcta

SEQ ID NO: 100487 - DNA, 20 bp, Artificial Sequence
  Description of Artificial Sequence: Synthetic oligonucleotide
  Target: LAMA2; (-) strand; PAM type: NRG; PAM sequence: AAG
tgaactgttggaattgagcg

SEQ ID NO: 100488 - DNA, 20 bp, Artificial Sequence
  Description of Artificial Sequence: Synthetic oligonucleotide
  Target: LAMA2; (-) strand; PAM type: NRG; PAM sequence: GAG
gtagctgaactgttggaatt

SEQ ID NO: 100489 - DNA, 20 bp, Artificial Sequence
  Description of Artificial Sequence: Synthetic oligonucleotide
  Target: LAMA2; (-) strand; PAM type: NRG; PAM sequence: TGG
atggaatgtagctgaactgt

SEQ ID NO: 100490 - DNA, 20 bp, Artificial Sequence
  Description of Artificial Sequence: Synthetic oligonucleotide
  Target: LAMA2; (-) strand; PAM type: NRG; PAM sequence: TAG
tagatgaggaaaatggaatg

SEQ ID NO: 100491 - DNA, 20 bp, Artificial Sequence
  Description of Artificial Sequence: Synthetic oligonucleotide
  Target: LAMA2; (-) strand; PAM type: NRG; PAM sequence: TGG
gagattatagatgaggaaaa

SEQ ID NO: 100492 - DNA, 20 bp, Artificial Sequence
  Description of Artificial Sequence: Synthetic oligonucleotide
  Target: LAMA2; (-) strand; PAM type: NRG; PAM sequence: AGG
gattcctgagattatagatg

SEQ ID NO: 100493 - DNA, 20 bp, Artificial Sequence
  Description of Artificial Sequence: Synthetic oligonucleotide
  Target: LAMA2; (-) strand; PAM type: NRG; PAM sequence: GAG
tgattcctgagattatagat

SEQ ID NO: 100494 - DNA, 20 bp, Artificial Sequence
  Description of Artificial Sequence: Synthetic oligonucleotide
  Target: LAMA2; (-) strand; PAM type: NRG; PAM sequence: TAG
atcaatgattcctgagatta

SEQ ID NO: 100495 - DNA, 20 bp, Artificial Sequence
  Description of Artificial Sequence: Synthetic oligonucleotide
  Target: LAMA2; (-) strand; PAM type: NRG; PAM sequence: GAG
gtggcctatcaatgattcct

SEQ ID NO: 100496 - DNA, 20 bp, Artificial Sequence
  Description of Artificial Sequence: Synthetic oligonucleotide
  Target: LAMA2; (-) strand; PAM type: NRG; PAM sequence: TGG
caatattagtgtaaagtagg

SEQ ID NO: 100497 - DNA, 20 bp, Artificial Sequence
  Description of Artificial Sequence: Synthetic oligonucleotide
  Target: LAMA2; (-) strand; PAM type: NRG; PAM sequence: AGG
tcacaatattagtgtaaagt

SEQ ID NO: 100498 - DNA, 20 bp, Artificial Sequence
  Description of Artificial Sequence: Synthetic oligonucleotide
  Target: LAMA2; (-) strand; PAM type: NRG; PAM sequence: TAG
gtcacaatattagtgtaaag

SEQ ID NO: 100499 - DNA, 20 bp, Artificial Sequence
  Description of Artificial Sequence: Synthetic oligonucleotide
  Target: LAMA2; (-) strand; PAM type: NRG; PAM sequence: AAG
attgtcacaatattagtgta

SEQ ID NO: 100500 - DNA, 20 bp, Artificial Sequence
  Description of Artificial Sequence: Synthetic oligonucleotide
  Target: LAMA2; (-) strand; PAM type: NRG; PAM sequence: TAG
cacacttattgtcacaatat

SEQ ID NO: 100501 - DNA, 20 bp, Artificial Sequence
  Description of Artificial Sequence: Synthetic oligonucleotide
  Target: LAMA2; (-) strand; PAM type: NRG; PAM sequence: CAG
gtgcctaggcagggcaccaa

SEQ ID NO: 100502 - DNA, 20 bp, Artificial Sequence
  Description of Artificial Sequence: Synthetic oligonucleotide
  Target: LAMA2; (-) strand; PAM type: NRG; PAM sequence: GGG
tcagtgtaggtgcctaggca

SEQ ID NO: 100503 - DNA, 20 bp, Artificial Sequence
  Description of Artificial Sequence: Synthetic oligonucleotide
  Target: LAMA2; (-) strand; PAM type: NRG; PAM sequence: AGG
ttcagtgtaggtgcctaggc

SEQ ID NO: 100504 - DNA, 20 bp, Artificial Sequence
  Description of Artificial Sequence: Synthetic oligonucleotide
  Target: LAMA2; (-) strand; PAM type: NRG; PAM sequence: CAG
cttcagtgtaggtgcctagg

SEQ ID NO: 100505 - DNA, 20 bp, Artificial Sequence
  Description of Artificial Sequence: Synthetic oligonucleotide
  Target: LAMA2; (-) strand; PAM type: NRG; PAM sequence: AGG
aggcttcagtgtaggtgcct

SEQ ID NO: 100506 - DNA, 20 bp, Artificial Sequence
  Description of Artificial Sequence: Synthetic oligonucleotide
  Target: LAMA2; (-) strand; PAM type: NRG; PAM sequence: TAG
aaggcttcagtgtaggtgcc

SEQ ID NO: 100507 - DNA, 20 bp, Artificial Sequence
  Description of Artificial Sequence: Synthetic oligonucleotide
  Target: LAMA2; (-) strand; PAM type: NRG; PAM sequence: AGG
tggagagaaggcttcagtgt

SEQ ID NO: 100508 - DNA, 20 bp, Artificial Sequence
  Description of Artificial Sequence: Synthetic oligonucleotide
  Target: LAMA2; (-) strand; PAM type: NRG; PAM sequence: TAG
ttggagagaaggcttcagtg

SEQ ID NO: 100509 - DNA, 20 bp, Artificial Sequence
  Description of Artificial Sequence: Synthetic oligonucleotide
  Target: LAMA2; (-) strand; PAM type: NRG; PAM sequence: CAG
ttctgttggagagaaggctt

SEQ ID NO: 100510 - DNA, 20 bp, Artificial Sequence
  Description of Artificial Sequence: Synthetic oligonucleotide
  Target: LAMA2; (-) strand; PAM type: NRG; PAM sequence: AGG
tgcctcttctgttggagaga

SEQ ID NO: 100511 - DNA, 20 bp, Artificial Sequence
  Description of Artificial Sequence: Synthetic oligonucleotide
  Target: LAMA2; (-) strand; PAM type: NRG; PAM sequence: AAG
ctgcctcttctgttggagag

SEQ ID NO: 100512 - DNA, 20 bp, Artificial Sequence
  Description of Artificial Sequence: Synthetic oligonucleotide
  Target: LAMA2; (-) strand; PAM type: NRG; PAM sequence: GAG
tttctgcctcttctgttgga

SEQ ID NO: 100513 - DNA, 20 bp, Artificial Sequence
  Description of Artificial Sequence: Synthetic oligonucleotide
  Target: LAMA2; (-) strand; PAM type: NRG; PAM sequence: GAG
cctttctgcctcttctgttg

SEQ ID NO: 100514 - DNA, 20 bp, Artificial Sequence
  Description of Artificial Sequence: Synthetic oligonucleotide
  Target: LAMA2; (-) strand; PAM type: NRG; PAM sequence: TGG
ggcctttctgcctcttctgt

SEQ ID NO: 100515 - DNA, 20 bp, Artificial Sequence
  Description of Artificial Sequence: Synthetic oligonucleotide
  Target: LAMA2; (-) strand; PAM type: NRG; PAM sequence: AGG
ggaagggcgggtaaacattc

SEQ ID NO: 100516 - DNA, 20 bp, Artificial Sequence
  Description of Artificial Sequence: Synthetic oligonucleotide
  Target: LAMA2; (-) strand; PAM type: NRG; PAM sequence: CAG
aggaagggcgggtaaacatt

SEQ ID NO: 100517 - DNA, 20 bp, Artificial Sequence
  Description of Artificial Sequence: Synthetic oligonucleotide
  Target: LAMA2; (-) strand; PAM type: NRG; PAM sequence: GGG
tgggccactgcaggaagggc

SEQ ID NO: 100518 - DNA, 20 bp, Artificial Sequence
  Description of Artificial Sequence: Synthetic oligonucleotide
  Target: LAMA2; (-) strand; PAM type: NRG; PAM sequence: CGG
atgggccactgcaggaaggg

SEQ ID NO: 100519 - DNA, 20 bp, Artificial Sequence
  Description of Artificial Sequence: Synthetic oligonucleotide
  Target: LAMA2; (-) strand; PAM type: NRG; PAM sequence: GGG
gtcatgggccactgcaggaa

SEQ ID NO: 100520 - DNA, 20 bp, Artificial Sequence
  Description of Artificial Sequence: Synthetic oligonucleotide
  Target: LAMA2; (-) strand; PAM type: NRG; PAM sequence: AGG
agtcatgggccactgcagga

SEQ ID NO: 100521 - DNA, 20 bp, Artificial Sequence
  Description of Artificial Sequence: Synthetic oligonucleotide
  Target: LAMA2; (-) strand; PAM type: NRG; PAM sequence: AAG
tagtcatgggccactgcagg

SEQ ID NO: 100522 - DNA, 20 bp, Artificial Sequence
  Description of Artificial Sequence: Synthetic oligonucleotide
  Target: LAMA2; (-) strand; PAM type: NRG; PAM sequence: AGG
ggttagtcatgggccactgc

SEQ ID NO: 100523 - DNA, 20 bp, Artificial Sequence
  Description of Artificial Sequence: Synthetic oligonucleotide
  Target: LAMA2; (-) strand; PAM type: NRG; PAM sequence: CAG
tggttagtcatgggccactg

SEQ ID NO: 100524 - DNA, 20 bp, Artificial Sequence
  Description of Artificial Sequence: Synthetic oligonucleotide
  Target: LAMA2; (-) strand; PAM type: NRG; PAM sequence: GGG
ctctcacgctggttagtcat

SEQ ID NO: 100525 - DNA, 20 bp, Artificial Sequence
  Description of Artificial Sequence: Synthetic oligonucleotide
  Target: LAMA2; (-) strand; PAM type: NRG; PAM sequence: TGG
actctcacgctggttagtca

SEQ ID NO: 100526 - DNA, 20 bp, Artificial Sequence
  Description of Artificial Sequence: Synthetic oligonucleotide
  Target: LAMA2; (-) strand; PAM type: NRG; PAM sequence: TAG
ttttgtactctcacgctggt

SEQ ID NO: 100527 - DNA, 20 bp, Artificial Sequence
  Description of Artificial Sequence: Synthetic oligonucleotide
  Target: LAMA2; (-) strand; PAM type: NRG; PAM sequence: TGG
ggacttttgtactctcacgc

SEQ ID NO: 100528 - DNA, 20 bp, Artificial Sequence
  Description of Artificial Sequence: Synthetic oligonucleotide
  Target: LAMA2; (-) strand; PAM type: NRG; PAM sequence: TGG
ccacttaggggccaaagagc

SEQ ID NO: 100529 - DNA, 20 bp, Artificial Sequence
  Description of Artificial Sequence: Synthetic oligonucleotide
  Target: LAMA2; (-) strand; PAM type: NRG; PAM sequence: GAG
tgttccacttaggggccaaa

SEQ ID NO: 100530 - DNA, 20 bp, Artificial Sequence
  Description of Artificial Sequence: Synthetic oligonucleotide
  Target: LAMA2; (-) strand; PAM type: NRG; PAM sequence: AAG
cttgttccacttaggggcca

SEQ ID NO: 100531 - DNA, 20 bp, Artificial Sequence
  Description of Artificial Sequence: Synthetic oligonucleotide
  Target: LAMA2; (-) strand; PAM type: NRG; PAM sequence: GGG
tcaaaacttgttccacttag

SEQ ID NO: 100532 - DNA, 20 bp, Artificial Sequence
  Description of Artificial Sequence: Synthetic oligonucleotide
  Target: LAMA2; (-) strand; PAM type: NRG; PAM sequence: GGG
ctcaaaacttgttccactta

SEQ ID NO: 100533 - DNA, 20 bp, Artificial Sequence
  Description of Artificial Sequence: Synthetic oligonucleotide
  Target: LAMA2; (-) strand; PAM type: NRG; PAM sequence: AGG
tctcaaaacttgttccactt

SEQ ID NO: 100534 - DNA, 20 bp, Artificial Sequence
  Description of Artificial Sequence: Synthetic oligonucleotide
  Target: LAMA2; (-) strand; PAM type: NRG; PAM sequence: TAG
atctcaaaacttgttccact

SEQ ID NO: 100535 - DNA, 20 bp, Artificial Sequence
  Description of Artificial Sequence: Synthetic oligonucleotide
  Target: LAMA2; (-) strand; PAM type: NRG; PAM sequence: AAG
agtgctctggagcataaaat

SEQ ID NO: 100536 - DNA, 20 bp, Artificial Sequence
  Description of Artificial Sequence: Synthetic oligonucleotide
  Target: LAMA2; (-) strand; PAM type: NRG; PAM sequence: GAG
tgattccatggagtgctctg

SEQ ID NO: 100537 - DNA, 20 bp, Artificial Sequence
  Description of Artificial Sequence: Synthetic oligonucleotide
  Target: LAMA2; (-) strand; PAM type: NRG; PAM sequence: TGG
cctgattccatggagtgctc

SEQ ID NO: 100538 - DNA, 20 bp, Artificial Sequence
  Description of Artificial Sequence: Synthetic oligonucleotide
  Target: LAMA2; (-) strand; PAM type: NRG; PAM sequence: GAG
agtcttagcctgattccatg

SEQ ID NO: 100539 - DNA, 20 bp, Artificial Sequence
  Description of Artificial Sequence: Synthetic oligonucleotide
  Target: LAMA2; (-) strand; PAM type: NRG; PAM sequence: TGG
ccagtcttagcctgattcca

SEQ ID NO: 100540 - DNA, 20 bp, Artificial Sequence
  Description of Artificial Sequence: Synthetic oligonucleotide
  Target: LAMA2; (-) strand; PAM type: NRG; PAM sequence: TAG
ttcaggtgatgtcccagtct

SEQ ID NO: 100541 - DNA, 20 bp, Artificial Sequence
  Description of Artificial Sequence: Synthetic oligonucleotide
  Target: LAMA2; (-) strand; PAM type: NRG; PAM sequence: CAG
tatgatttcaggtgatgtcc

SEQ ID NO: 100542 - DNA, 20 bp, Artificial Sequence
  Description of Artificial Sequence: Synthetic oligonucleotide
  Target: LAMA2; (-) strand; PAM type: NRG; PAM sequence: AGG
ctaatcaagggtatgatttc

SEQ ID NO: 100543 - DNA, 20 bp, Artificial Sequence
  Description of Artificial Sequence: Synthetic oligonucleotide
  Target: LAMA2; (-) strand; PAM type: NRG; PAM sequence: CAG
tctaatcaagggtatgattt

SEQ ID NO: 100544 - DNA, 20 bp, Artificial Sequence
  Description of Artificial Sequence: Synthetic oligonucleotide
  Target: LAMA2; (-) strand; PAM type: NRG; PAM sequence: GGG
aaaagaaaagctctaatcaa

SEQ ID NO: 100545 - DNA, 20 bp, Artificial Sequence
  Description of Artificial Sequence: Synthetic oligonucleotide
  Target: LAMA2; (-) strand; PAM type: NRG; PAM sequence: AGG
gaaaagaaaagctctaatca

SEQ ID NO: 100546 - DNA, 20 bp, Artificial Sequence
  Description of Artificial Sequence: Synthetic oligonucleotide
  Target: LAMA2; (-) strand; PAM type: NRG; PAM sequence: AAG
ggaaaagaaaagctctaatc

SEQ ID NO: 100547 - DNA, 20 bp, Artificial Sequence
  Description of Artificial Sequence: Synthetic oligonucleotide
  Target: LAMA2; (-) strand; PAM type: NRG; PAM sequence: AAG
aagcaggacatggaaaagaa

SEQ ID NO: 100548 - DNA, 20 bp, Artificial Sequence
  Description of Artificial Sequence: Synthetic oligonucleotide
  Target: LAMA2; (-) strand; PAM type: NRG; PAM sequence: AAG
gggtgaagcaggacatggaa

SEQ ID NO: 100549 - DNA, 20 bp, Artificial Sequence
  Description of Artificial Sequence: Synthetic oligonucleotide
  Target: LAMA2; (-) strand; PAM type: NRG; PAM sequence: TGG
ggagtgggtgaagcaggaca

SEQ ID NO: 100550 - DNA, 20 bp, Artificial Sequence
  Description of Artificial Sequence: Synthetic oligonucleotide
  Target: LAMA2; (-) strand; PAM type: NRG; PAM sequence: AGG
agcaaaggagtgggtgaagc

SEQ ID NO: 100551 - DNA, 20 bp, Artificial Sequence
  Description of Artificial Sequence: Synthetic oligonucleotide
  Target: LAMA2; (-) strand; PAM type: NRG; PAM sequence: CAG
tagcaaaggagtgggtgaag

SEQ ID NO: 100552 - DNA, 20 bp, Artificial Sequence
  Description of Artificial Sequence: Synthetic oligonucleotide
  Target: LAMA2; (-) strand; PAM type: NRG; PAM sequence: AAG
atctagcaaaggagtgggtg

SEQ ID NO: 100553 - DNA, 20 bp, Artificial Sequence
  Description of Artificial Sequence: Synthetic oligonucleotide
  Target: LAMA2; (-) strand; PAM type: NRG; PAM sequence: GGG
ggagaatctagcaaaggagt

SEQ ID NO: 100554 - DNA, 20 bp, Artificial Sequence
  Description of Artificial Sequence: Synthetic oligonucleotide
  Target: LAMA2; (-) strand; PAM type: NRG; PAM sequence: TGG
aggagaatctagcaaaggag

SEQ ID NO: 100555 - DNA, 20 bp, Artificial Sequence
  Description of Artificial Sequence: Synthetic oligonucleotide
  Target: LAMA2; (-) strand; PAM type: NRG; PAM sequence: GAG
cctaggagaatctagcaaag

SEQ ID NO: 100556 - DNA, 20 bp, Artificial Sequence
  Description of Artificial Sequence: Synthetic oligonucleotide
  Target: LAMA2; (-) strand; PAM type: NRG; PAM sequence: AGG
ttcctaggagaatctagcaa

SEQ ID NO: 100557 - DNA, 20 bp, Artificial Sequence
  Description of Artificial Sequence: Synthetic oligonucleotide
  Target: LAMA2; (-) strand; PAM type: NRG; PAM sequence: AAG
gttcctaggagaatctagca

SEQ ID NO: 100558 - DNA, 20 bp, Artificial Sequence
  Description of Artificial Sequence: Synthetic oligonucleotide
  Target: LAMA2; (-) strand; PAM type: NRG; PAM sequence: TAG
taagtgttcctaggagaatc

SEQ ID NO: 100559 - DNA, 20 bp, Artificial Sequence
  Description of Artificial Sequence: Synthetic oligonucleotide
  Target: LAMA2; (-) strand; PAM type: NRG; PAM sequence: GAG
taccatttaagtgttcctag

SEQ ID NO: 100560 - DNA, 20 bp, Artificial Sequence
  Description of Artificial Sequence: Synthetic oligonucleotide
  Target: LAMA2; (-) strand; PAM type: NRG; PAM sequence: AGG
cttaccatttaagtgttcct

SEQ ID NO: 100561 - DNA, 20 bp, Artificial Sequence
  Description of Artificial Sequence: Synthetic oligonucleotide
  Target: LAMA2; (-) strand; PAM type: NRG; PAM sequence: TAG
gcttaccatttaagtgttcc

SEQ ID NO: 100562 - DNA, 20 bp, Artificial Sequence
  Description of Artificial Sequence: Synthetic oligonucleotide
  Target: LAMA2; (-) strand; PAM type: NRG; PAM sequence: AAG
tacaaagaagcttaccattt

SEQ ID NO: 100563 - DNA, 20 bp, Artificial Sequence
  Description of Artificial Sequence: Synthetic oligonucleotide
  Target: LAMA2; (-) strand; PAM type: NRG; PAM sequence: AAG
attagtttatatttacaaag

SEQ ID NO: 100564 - DNA, 20 bp, Artificial Sequence
  Description of Artificial Sequence: Synthetic oligonucleotide
  Target: LAMA2; (-) strand; PAM type: NRG; PAM sequence: AAG
agtattagtttatatttaca

SEQ ID NO: 100565 - DNA, 20 bp, Artificial Sequence
  Description of Artificial Sequence: Synthetic oligonucleotide
  Target: LAMA2; (-) strand; PAM type: NRG; PAM sequence: TAG
tggatgctgataattagtat

SEQ ID NO: 100566 - DNA, 20 bp, Artificial Sequence
  Description of Artificial Sequence: Synthetic oligonucleotide
  Target: LAMA2; (-) strand; PAM type: NRG; PAM sequence: TAG
cttaagtggatgctgataat

SEQ ID NO: 100567 - DNA, 20 bp, Artificial Sequence
  Description of Artificial Sequence: Synthetic oligonucleotide
  Target: LAMA2; (-) strand; PAM type: NRG; PAM sequence: TGG
tataaaacaagactcttaag

SEQ ID NO: 100568 - DNA, 20 bp, Artificial Sequence
  Description of Artificial Sequence: Synthetic oligonucleotide
  Target: LAMA2; (-) strand; PAM type: NRG; PAM sequence: AAG
ttatataaaacaagactctt

SEQ ID NO: 100569 - DNA, 20 bp, Artificial Sequence
  Description of Artificial Sequence: Synthetic oligonucleotide
  Target: LAMA2; (-) strand; PAM type: NRG; PAM sequence: AAG
tgttgctggttatataaaac

SEQ ID NO: 100570 - DNA, 20 bp, Artificial Sequence
  Description of Artificial Sequence: Synthetic oligonucleotide
  Target: LAMA2; (-) strand; PAM type: NRG; PAM sequence: TGG
atgattaatacagctgttgc

SEQ ID NO: 100571 - DNA, 20 bp, Artificial Sequence
  Description of Artificial Sequence: Synthetic oligonucleotide
  Target: LAMA2; (-) strand; PAM type: NRG; PAM sequence: CAG
acttattgccatgattaata

SEQ ID NO: 100572 - DNA, 20 bp, Artificial Sequence
  Description of Artificial Sequence: Synthetic oligonucleotide
  Target: LAMA2; (-) strand; PAM type: NRG; PAM sequence: TAG
aaagcttaaccctaattatt

SEQ ID NO: 100573 - DNA, 20 bp, Artificial Sequence
  Description of Artificial Sequence: Synthetic oligonucleotide
  Target: LAMA2; (-) strand; PAM type: NRG; PAM sequence: AAG
aaattgcattgggatttata

SEQ ID NO: 100574 - DNA, 20 bp, Artificial Sequence
  Description of Artificial Sequence: Synthetic oligonucleotide
  Target: LAMA2; (-) strand; PAM type: NRG; PAM sequence: GGG
aaatgtataaaaattgcatt

SEQ ID NO: 100575 - DNA, 20 bp, Artificial Sequence
  Description of Artificial Sequence: Synthetic oligonucleotide
  Target: LAMA2; (-) strand; PAM type: NRG; PAM sequence: TGG
caaatgtataaaaattgcat

SEQ ID NO: 100576 - DNA, 20 bp, Artificial Sequence
  Description of Artificial Sequence: Synthetic oligonucleotide
  Target: LAMA2; (-) strand; PAM type: NRG; PAM sequence: TAG
ttaccacatacggatttatt

SEQ ID NO: 100577 - DNA, 20 bp, Artificial Sequence
  Description of Artificial Sequence: Synthetic oligonucleotide
  Target: LAMA2; (-) strand; PAM type: NRG; PAM sequence: CGG
gtgtttagagttaccacata

SEQ ID NO: 100578 - DNA, 20 bp, Artificial Sequence
  Description of Artificial Sequence: Synthetic oligonucleotide
  Target: LAMA2; (-) strand; PAM type: NRG; PAM sequence: GAG
aatattggatactgtgttta

SEQ ID NO: 100579 - DNA, 20 bp, Artificial Sequence
  Description of Artificial Sequence: Synthetic oligonucleotide
  Target: LAMA2; (-) strand; PAM type: NRG; PAM sequence: TAG
caaatattggatactgtgtt

SEQ ID NO: 100580 - DNA, 20 bp, Artificial Sequence
  Description of Artificial Sequence: Synthetic oligonucleotide
  Target: LAMA2; (-) strand; PAM type: NRG; PAM sequence: TGG
ttttatatatatgcaaatat

SEQ ID NO: 100581 - DNA, 20 bp, Artificial Sequence
  Description of Artificial Sequence: Synthetic oligonucleotide
  Target: LAMA2; (-) strand; PAM type: NRG; PAM sequence: TGG
gctgctaatttctgttggta

SEQ ID NO: 100582 - DNA, 20 bp, Artificial Sequence
  Description of Artificial Sequence: Synthetic oligonucleotide
  Target: LAMA2; (-) strand; PAM type: NRG; PAM sequence: TGG
taattgctgctaatttctgt

SEQ ID NO: 100583 - DNA, 20 bp, Artificial Sequence
  Description of Artificial Sequence: Synthetic oligonucleotide
  Target: LAMA2; (-) strand; PAM type: NRG; PAM sequence: GAG
tttagatttggtgttgctat

SEQ ID NO: 100584 - DNA, 20 bp, Artificial Sequence
  Description of Artificial Sequence: Synthetic oligonucleotide
  Target: LAMA2; (-) strand; PAM type: NRG; PAM sequence: TGG
aatggaaatatttttagatt

SEQ ID NO: 100585 - DNA, 20 bp, Artificial Sequence
  Description of Artificial Sequence: Synthetic oligonucleotide
  Target: LAMA2; (-) strand; PAM type: NRG; PAM sequence: TAG
agaacaaatggaaatatttt

SEQ ID NO: 100586 - DNA, 20 bp, Artificial Sequence
  Description of Artificial Sequence: Synthetic oligonucleotide
  Target: LAMA2; (-) strand; PAM type: NRG; PAM sequence: TGG
gtatatatcttcagaacaaa

SEQ ID NO: 100587 - DNA, 20 bp, Artificial Sequence
  Description of Artificial Sequence: Synthetic oligonucleotide
  Target: LAMA2; (-) strand; PAM type: NRG; PAM sequence: CAG
ccaaaagatgtatatatctt

SEQ ID NO: 100588 - DNA, 20 bp, Artificial Sequence
  Description of Artificial Sequence: Synthetic oligonucleotide
  Target: LAMA2; (-) strand; PAM type: NRG; PAM sequence: AAG
tcacctatatctatatccaa

SEQ ID NO: 100589 - DNA, 20 bp, Artificial Sequence
  Description of Artificial Sequence: Synthetic oligonucleotide
  Target: LAMA2; (-) strand; PAM type: NRG; PAM sequence: AAG
gctcactggtgggtattaac

SEQ ID NO: 100590 - DNA, 20 bp, Artificial Sequence
  Description of Artificial Sequence: Synthetic oligonucleotide
  Target: LAMA2; (-) strand; PAM type: NRG; PAM sequence: GGG
gaataccaaagctcactggt

SEQ ID NO: 100591 - DNA, 20 bp, Artificial Sequence
  Description of Artificial Sequence: Synthetic oligonucleotide
  Target: LAMA2; (-) strand; PAM type: NRG; PAM sequence: TGG
tgaataccaaagctcactgg

SEQ ID NO: 100592 - DNA, 20 bp, Artificial Sequence
  Description of Artificial Sequence: Synthetic oligonucleotide
  Target: LAMA2; (-) strand; PAM type: NRG; PAM sequence: TGG
ccatgaataccaaagctcac

SEQ ID NO: 100593 - DNA, 20 bp, Artificial Sequence
  Description of Artificial Sequence: Synthetic oligonucleotide
  Target: LAMA2; (-) strand; PAM type: NRG; PAM sequence: AAG
tagtctaaccatgaatacca

SEQ ID NO: 100594 - DNA, 20 bp, Artificial Sequence
  Description of Artificial Sequence: Synthetic oligonucleotide
  Target: LAMA2; (-) strand; PAM type: NRG; PAM sequence: TAG
aaggtacaggaaataaatat

SEQ ID NO: 100595 - DNA, 20 bp, Artificial Sequence
  Description of Artificial Sequence: Synthetic oligonucleotide
  Target: LAMA2; (-) strand; PAM type: NRG; PAM sequence: AGG
ctactggtgtttaaaggtac

SEQ ID NO: 100596 - DNA, 20 bp, Artificial Sequence
  Description of Artificial Sequence: Synthetic oligonucleotide
  Target: LAMA2; (-) strand; PAM type: NRG; PAM sequence: CAG
cctactggtgtttaaaggta

SEQ ID NO: 100597 - DNA, 20 bp, Artificial Sequence
  Description of Artificial Sequence: Synthetic oligonucleotide
  Target: LAMA2; (-) strand; PAM type: NRG; PAM sequence: AGG
accatcctactggtgtttaa

SEQ ID NO: 100598 - DNA, 20 bp, Artificial Sequence
  Description of Artificial Sequence: Synthetic oligonucleotide
  Target: LAMA2; (-) strand; PAM type: NRG; PAM sequence: AAG
caccatcctactggtgttta

SEQ ID NO: 100599 - DNA, 20 bp, Artificial Sequence
  Description of Artificial Sequence: Synthetic oligonucleotide
  Target: LAMA2; (-) strand; PAM type: NRG; PAM sequence: TGG
gcttttagtcaccatcctac

SEQ ID NO: 100600 - DNA, 20 bp, Artificial Sequence
  Description of Artificial Sequence: Synthetic oligonucleotide
  Target: LAMA2; (-) strand; PAM type: NRG; PAM sequence: TAG
ttggtgtccagcgatgcttt

SEQ ID NO: 100601 - DNA, 20 bp, Artificial Sequence
  Description of Artificial Sequence: Synthetic oligonucleotide
  Target: LAMA2; (-) strand; PAM type: NRG; PAM sequence: CAG
tagataatctttttggtgtc

SEQ ID NO: 100602 - DNA, 20 bp, Artificial Sequence
  Description of Artificial Sequence: Synthetic oligonucleotide
  Target: LAMA2; (-) strand; PAM type: NRG; PAM sequence: TGG
attactgtagataatctttt

SEQ ID NO: 100603 - DNA, 20 bp, Artificial Sequence
  Description of Artificial Sequence: Synthetic oligonucleotide
  Target: LAMA2; (-) strand; PAM type: NRG; PAM sequence: TAG
ttttttttcatgaattactg

SEQ ID NO: 100604 - DNA, 20 bp, Artificial Sequence
  Description of Artificial Sequence: Synthetic oligonucleotide
  Target: LAMA2; (-) strand; PAM type: NRG; PAM sequence: TAG
gtaactacagtgtataaatg

SEQ ID NO: 100605 - DNA, 20 bp, Artificial Sequence
  Description of Artificial Sequence: Synthetic oligonucleotide
  Target: LAMA2; (-) strand; PAM type: NRG; PAM sequence: CAG
tttgtagaaaatggtaacta

SEQ ID NO: 100606 - DNA, 20 bp, Artificial Sequence
  Description of Artificial Sequence: Synthetic oligonucleotide
  Target: LAMA2; (-) strand; PAM type: NRG; PAM sequence: TGG
acacatgcttttgtagaaaa

SEQ ID NO: 100607 - DNA, 20 bp, Artificial Sequence
  Description of Artificial Sequence: Synthetic oligonucleotide
  Target: LAMA2; (-) strand; PAM type: NRG; PAM sequence: TAG
attctatacacatgcttttg

SEQ ID NO: 100608 - DNA, 20 bp, Artificial Sequence
  Description of Artificial Sequence: Synthetic oligonucleotide
  Target: LAMA2; (-) strand; PAM type: NRG; PAM sequence: TAG
gttattttagtgtacccttc

SEQ ID NO: 100609 - DNA, 20 bp, Artificial Sequence
  Description of Artificial Sequence: Synthetic oligonucleotide
  Target: LAMA2; (-) strand; PAM type: NRG; PAM sequence: TAG
taacacaataattgttattt

SEQ ID NO: 100610 - DNA, 20 bp, Artificial Sequence
  Description of Artificial Sequence: Synthetic oligonucleotide
  Target: LAMA2; (-) strand; PAM type: NRG; PAM sequence: TGG
ttttatcgattaaatactac

SEQ ID NO: 100611 - DNA, 20 bp, Artificial Sequence
  Description of Artificial Sequence: Synthetic oligonucleotide
  Target: LAMA2; (-) strand; PAM type: NRG; PAM sequence: CAG
ctctatgctacacaaactga

SEQ ID NO: 100612 - DNA, 20 bp, Artificial Sequence
  Description of Artificial Sequence: Synthetic oligonucleotide
  Target: LAMA2; (-) strand; PAM type: NRG; PAM sequence: TGG
cactcacatttgatactgta

SEQ ID NO: 100613 - DNA, 20 bp, Artificial Sequence
  Description of Artificial Sequence: Synthetic oligonucleotide
  Target: LAMA2; (-) strand; PAM type: NRG; PAM sequence: AAG
gaggactggaaaaacacttt

SEQ ID NO: 100614 - DNA, 20 bp, Artificial Sequence
  Description of Artificial Sequence: Synthetic oligonucleotide
  Target: LAMA2; (-) strand; PAM type: NRG; PAM sequence: TGG
ctataacaatgtttgaggac

SEQ ID NO: 100615 - DNA, 20 bp, Artificial Sequence
  Description of Artificial Sequence: Synthetic oligonucleotide
  Target: LAMA2; (-) strand; PAM type: NRG; PAM sequence: AGG
caaagctataacaatgtttg

SEQ ID NO: 100616 - DNA, 20 bp, Artificial Sequence
  Description of Artificial Sequence: Synthetic oligonucleotide
  Target: LAMA2; (-) strand; PAM type: NRG; PAM sequence: GAG
gcaaagctataacaatgttt

SEQ ID NO: 100617 - DNA, 20 bp, Artificial Sequence
  Description of Artificial Sequence: Synthetic oligonucleotide
  Target: LAMA2; (-) strand; PAM type: NRG; PAM sequence: AAG
tgttagagatgatgaatgca

SEQ ID NO: 100618 - DNA, 20 bp, Artificial Sequence
  Description of Artificial Sequence: Synthetic oligonucleotide
  Target: LAMA2; (-) strand; PAM type: NRG; PAM sequence: GAG
acctgatcatttatatgtta

SEQ ID NO: 100619 - DNA, 20 bp, Artificial Sequence
  Description of Artificial Sequence: Synthetic oligonucleotide
  Target: LAMA2; (-) strand; PAM type: NRG; PAM sequence: TAG
taacctgatcatttatatgt

SEQ ID NO: 100620 - DNA, 20 bp, Artificial Sequence
  Description of Artificial Sequence: Synthetic oligonucleotide
  Target: LAMA2; (-) strand; PAM type: NRG; PAM sequence: GAG
ctgaataaagcaatttttca

SEQ ID NO: 100621 - DNA, 20 bp, Artificial Sequence
  Description of Artificial Sequence: Synthetic oligonucleotide
  Target: LAMA2; (-) strand; PAM type: NRG; PAM sequence: CAG
agctgaataaagcaattttt

SEQ ID NO: 100622 - DNA, 20 bp, Artificial Sequence
  Description of Artificial Sequence: Synthetic oligonucleotide
  Target: LAMA2; (-) strand; PAM type: NRG; PAM sequence: AAG
tggtttaatatagctgaata

SEQ ID NO: 100623 - DNA, 20 bp, Artificial Sequence
  Description of Artificial Sequence: Synthetic oligonucleotide
  Target: LAMA2; (-) strand; PAM type: NRG; PAM sequence: TAG
ccaagaactttggtttaata

SEQ ID NO: 100624 - DNA, 20 bp, Artificial Sequence
  Description of Artificial Sequence: Synthetic oligonucleotide
  Target: LAMA2; (-) strand; PAM type: NRG; PAM sequence: TGG
aaaaatttaaccaagaactt

SEQ ID NO: 100625 - DNA, 20 bp, Artificial Sequence
  Description of Artificial Sequence: Synthetic oligonucleotide
  Target: LAMA2; (-) strand; PAM type: NRG; PAM sequence: AAG
gttacaataaaaatttaacc

SEQ ID NO: 100626 - DNA, 20 bp, Artificial Sequence
  Description of Artificial Sequence: Synthetic oligonucleotide
  Target: LAMA2; (-) strand; PAM type: NRG; PAM sequence: AGG
ctggaacaaatttatttgga

SEQ ID NO: 100627 - DNA, 20 bp, Artificial Sequence
  Description of Artificial Sequence: Synthetic oligonucleotide
  Target: LAMA2; (-) strand; PAM type: NRG; PAM sequence: AAG
actggaacaaatttatttgg

SEQ ID NO: 100628 - DNA, 20 bp, Artificial Sequence
  Description of Artificial Sequence: Synthetic oligonucleotide
  Target: LAMA2; (-) strand; PAM type: NRG; PAM sequence: TGG
agcactggaacaaatttatt

SEQ ID NO: 100629 - DNA, 20 bp, Artificial Sequence
  Description of Artificial Sequence: Synthetic oligonucleotide
  Target: LAMA2; (-) strand; PAM type: NRG; PAM sequence: TGG
atttaagaagctctcagcac

SEQ ID NO: 100630 - DNA, 20 bp, Artificial Sequence
  Description of Artificial Sequence: Synthetic oligonucleotide
  Target: LAMA2; (-) strand; PAM type: NRG; PAM sequence: CAG
taaatgatttaagaagctct

SEQ ID NO: 100631 - DNA, 20 bp, Artificial Sequence
  Description of Artificial Sequence: Synthetic oligonucleotide
  Target: LAMA2; (-) strand; PAM type: NRG; PAM sequence: AAG
gatgatttaaatgatttaag

SEQ ID NO: 100632 - DNA, 20 bp, Artificial Sequence
  Description of Artificial Sequence: Synthetic oligonucleotide
  Target: LAMA2; (-) strand; PAM type: NRG; PAM sequence: AAG
aaagatgatttaaatgattt

SEQ ID NO: 100633 - DNA, 20 bp, Artificial Sequence
  Description of Artificial Sequence: Synthetic oligonucleotide
  Target: LAMA2; (-) strand; PAM type: NRG; PAM sequence: AAG
gatcagtctgagcaggtcga

SEQ ID NO: 100634 - DNA, 20 bp, Artificial Sequence
  Description of Artificial Sequence: Synthetic oligonucleotide
  Target: LAMA2; (-) strand; PAM type: NRG; PAM sequence: AGG
ctaacctgatcagtctgagc

SEQ ID NO: 100635 - DNA, 20 bp, Artificial Sequence
  Description of Artificial Sequence: Synthetic oligonucleotide
  Target: LAMA2; (-) strand; PAM type: NRG; PAM sequence: CAG
cctaacctgatcagtctgag

SEQ ID NO: 100636 - DNA, 20 bp, Artificial Sequence
  Description of Artificial Sequence: Synthetic oligonucleotide
  Target: LAMA2; (-) strand; PAM type: NRG; PAM sequence: GAG
agacctaacctgatcagtct

SEQ ID NO: 100637 - DNA, 20 bp, Artificial Sequence
  Description of Artificial Sequence: Synthetic oligonucleotide
  Target: LAMA2; (-) strand; PAM type: NRG; PAM sequence: CAG
agttttagacctaacctgat

SEQ ID NO: 100638 - DNA, 20 bp, Artificial Sequence
  Description of Artificial Sequence: Synthetic oligonucleotide
  Target: LAMA2; (-) strand; PAM type: NRG; PAM sequence: TAG
tcaagaaatttaagcagttt

SEQ ID NO: 100639 - DNA, 20 bp, Artificial Sequence
  Description of Artificial Sequence: Synthetic oligonucleotide
  Target: LAMA2; (-) strand; PAM type: NRG; PAM sequence: CAG
ggatactcaagaaatttaag

SEQ ID NO: 100640 - DNA, 20 bp, Artificial Sequence
  Description of Artificial Sequence: Synthetic oligonucleotide
  Target: LAMA2; (-) strand; PAM type: NRG; PAM sequence: AAG
cagggatactcaagaaattt

SEQ ID NO: 100641 - DNA, 20 bp, Artificial Sequence
  Description of Artificial Sequence: Synthetic oligonucleotide
  Target: LAMA2; (-) strand; PAM type: NRG; PAM sequence: AAG
tctatattacagggatactc

SEQ ID NO: 100642 - DNA, 20 bp, Artificial Sequence
  Description of Artificial Sequence: Synthetic oligonucleotide
  Target: LAMA2; (-) strand; PAM type: NRG; PAM sequence: GGG
ggagaggtttctatattaca

SEQ ID NO: 100643 - DNA, 20 bp, Artificial Sequence
  Description of Artificial Sequence: Synthetic oligonucleotide
  Target: LAMA2; (-) strand; PAM type: NRG; PAM sequence: AGG
aggagaggtttctatattac

SEQ ID NO: 100644 - DNA, 20 bp, Artificial Sequence
  Description of Artificial Sequence: Synthetic oligonucleotide
  Target: LAMA2; (-) strand; PAM type: NRG; PAM sequence: CAG
gaggagaggtttctatatta

SEQ ID NO: 100645 - DNA, 20 bp, Artificial Sequence
  Description of Artificial Sequence: Synthetic oligonucleotide
  Target: LAMA2; (-) strand; PAM type: NRG; PAM sequence: AGG
tgaaaataaagtatgaggag

SEQ ID NO: 100646 - DNA, 20 bp, Artificial Sequence
  Description of Artificial Sequence: Synthetic oligonucleotide
  Target: LAMA2; (-) strand; PAM type: NRG; PAM sequence: GAG
ttgaaaataaagtatgagga

SEQ ID NO: 100647 - DNA, 20 bp, Artificial Sequence
  Description of Artificial Sequence: Synthetic oligonucleotide
  Target: LAMA2; (-) strand; PAM type: NRG; PAM sequence: GAG
tattgaaaataaagtatgag

SEQ ID NO: 100648 - DNA, 20 bp, Artificial Sequence
  Description of Artificial Sequence: Synthetic oligonucleotide
  Target: LAMA2; (-) strand; PAM type: NRG; PAM sequence: AGG
agtattgaaaataaagtatg

SEQ ID NO: 100649 - DNA, 20 bp, Artificial Sequence
  Description of Artificial Sequence: Synthetic oligonucleotide
  Target: LAMA2; (-) strand; PAM type: NRG; PAM sequence: GAG
gagtattgaaaataaagtat

SEQ ID NO: 100650 - DNA, 20 bp, Artificial Sequence
  Description of Artificial Sequence: Synthetic oligonucleotide
  Target: LAMA2; (-) strand; PAM type: NRG; PAM sequence: AAG
ttacaagagtattgaaaata

SEQ ID NO: 100651 - DNA, 20 bp, Artificial Sequence
  Description of Artificial Sequence: Synthetic oligonucleotide
  Target: LAMA2; (-) strand; PAM type: NRG; PAM sequence: GAG
gttcaaagagtttattacaa

SEQ ID NO: 100652 - DNA, 20 bp, Artificial Sequence
  Description of Artificial Sequence: Synthetic oligonucleotide
  Target: LAMA2; (-) strand; PAM type: NRG; PAM sequence: AAG
atgttcaaagagtttattac

SEQ ID NO: 100653 - DNA, 20 bp, Artificial Sequence
  Description of Artificial Sequence: Synthetic oligonucleotide
  Target: LAMA2; (-) strand; PAM type: NRG; PAM sequence: GAG
agattgattaaatgttcaaa

SEQ ID NO: 100654 - DNA, 20 bp, Artificial Sequence
  Description of Artificial Sequence: Synthetic oligonucleotide
  Target: LAMA2; (-) strand; PAM type: NRG; PAM sequence: AAG
tcagattgattaaatgttca

SEQ ID NO: 100655 - DNA, 20 bp, Artificial Sequence
  Description of Artificial Sequence: Synthetic oligonucleotide
  Target: LAMA2; (-) strand; PAM type: NRG; PAM sequence: CAG
aattgtattctaagcagatt

SEQ ID NO: 100656 - DNA, 20 bp, Artificial Sequence
  Description of Artificial Sequence: Synthetic oligonucleotide
  Target: LAMA2; (-) strand; PAM type: NRG; PAM sequence: CAG
taaaataattgtattctaag

SEQ ID NO: 100657 - DNA, 20 bp, Artificial Sequence
  Description of Artificial Sequence: Synthetic oligonucleotide
  Target: LAMA2; (-) strand; PAM type: NRG; PAM sequence: AAG
aggtaaaataattgtattct

SEQ ID NO: 100658 - DNA, 20 bp, Artificial Sequence
  Description of Artificial Sequence: Synthetic oligonucleotide
  Target: LAMA2; (-) strand; PAM type: NRG; PAM sequence: AGG
aatggcttcttaacatttat

SEQ ID NO: 100659 - DNA, 20 bp, Artificial Sequence
  Description of Artificial Sequence: Synthetic oligonucleotide
  Target: LAMA2; (-) strand; PAM type: NRG; PAM sequence: TAG
aaatggcttcttaacattta

SEQ ID NO: 100660 - DNA, 20 bp, Artificial Sequence
  Description of Artificial Sequence: Synthetic oligonucleotide
  Target: LAMA2; (-) strand; PAM type: NRG; PAM sequence: TGG
tttaagtaagtccacttaaa

SEQ ID NO: 100661 - DNA, 20 bp, Artificial Sequence
  Description of Artificial Sequence: Synthetic oligonucleotide
  Target: LAMA2; (-) strand; PAM type: NRG; PAM sequence: AAG
actgaaagtagcatttaagt

SEQ ID NO: 100662 - DNA, 20 bp, Artificial Sequence
  Description of Artificial Sequence: Synthetic oligonucleotide
  Target: LAMA2; (-) strand; PAM type: NRG; PAM sequence: AAG
aaatactgaaagtagcattt

SEQ ID NO: 100663 - DNA, 20 bp, Artificial Sequence
  Description of Artificial Sequence: Synthetic oligonucleotide
  Target: LAMA2; (-) strand; PAM type: NRG; PAM sequence: TAG
aagagtacaaatactgaaag

SEQ ID NO: 100664 - DNA, 20 bp, Artificial Sequence
  Description of Artificial Sequence: Synthetic oligonucleotide
  Target: LAMA2; (-) strand; PAM type: NRG; PAM sequence: AAG
tgaaagagtacaaatactga

SEQ ID NO: 100665 - DNA, 20 bp, Artificial Sequence
  Description of Artificial Sequence: Synthetic oligonucleotide
  Target: LAMA2; (-) strand; PAM type: NRG; PAM sequence: GAG
gattatttttttcaatgaaa

SEQ ID NO: 100666 - DNA, 20 bp, Artificial Sequence
  Description of Artificial Sequence: Synthetic oligonucleotide
  Target: LAMA2; (-) strand; PAM type: NRG; PAM sequence: AAG
ttgattatttttttcaatga

SEQ ID NO: 100667 - DNA, 20 bp, Artificial Sequence
  Description of Artificial Sequence: Synthetic oligonucleotide
  Target: LAMA2; (-) strand; PAM type: NRG; PAM sequence: AGG
agaaaacgatttgtgacatt

SEQ ID NO: 100668 - DNA, 20 bp, Artificial Sequence
  Description of Artificial Sequence: Synthetic oligonucleotide
  Target: LAMA2; (-) strand; PAM type: NRG; PAM sequence: TAG
aagaaaacgatttgtgacat

SEQ ID NO: 100669 - DNA, 20 bp, Artificial Sequence
  Description of Artificial Sequence: Synthetic oligonucleotide
  Target: LAMA2; (-) strand; PAM type: NRG; PAM sequence: AAG
gttagaaaaggcaaaacatg

SEQ ID NO: 100670 - DNA, 20 bp, Artificial Sequence
  Description of Artificial Sequence: Synthetic oligonucleotide
  Target: LAMA2; (-) strand; PAM type: NRG; PAM sequence: AGG
caccctgtgctggttagaaa

SEQ ID NO: 100671 - DNA, 20 bp, Artificial Sequence
  Description of Artificial Sequence: Synthetic oligonucleotide
  Target: LAMA2; (-) strand; PAM type: NRG; PAM sequence: AAG
tcaccctgtgctggttagaa

SEQ ID NO: 100672 - DNA, 20 bp, Artificial Sequence
  Description of Artificial Sequence: Synthetic oligonucleotide
  Target: LAMA2; (-) strand; PAM type: NRG; PAM sequence: TAG
ttaattcaccctgtgctggt

SEQ ID NO: 100673 - DNA, 20 bp, Artificial Sequence
  Description of Artificial Sequence: Synthetic oligonucleotide
  Target: LAMA2; (-) strand; PAM type: NRG; PAM sequence: TGG
aaagttaattcaccctgtgc

SEQ ID NO: 100674 - DNA, 20 bp, Artificial Sequence
  Description of Artificial Sequence: Synthetic oligonucleotide
  Target: LAMA2; (-) strand; PAM type: NRG; PAM sequence: AAG
atctgcatggctgactgtga

SEQ ID NO: 100675 - DNA, 20 bp, Artificial Sequence
  Description of Artificial Sequence: Synthetic oligonucleotide
  Target: LAMA2; (-) strand; PAM type: NRG; PAM sequence: TGG
ctgagactgtgaaatctgca

SEQ ID NO: 100676 - DNA, 20 bp, Artificial Sequence
  Description of Artificial Sequence: Synthetic oligonucleotide
  Target: LAMA2; (-) strand; PAM type: NRG; PAM sequence: GAG
tagaccatctttagctgcct

SEQ ID NO: 100677 - DNA, 20 bp, Artificial Sequence
  Description of Artificial Sequence: Synthetic oligonucleotide
  Target: LAMA2; (-) strand; PAM type: NRG; PAM sequence: TAG
agataatcatagaccatctt

SEQ ID NO: 100678 - DNA, 20 bp, Artificial Sequence
  Description of Artificial Sequence: Synthetic oligonucleotide
  Target: LAMA2; (-) strand; PAM type: NRG; PAM sequence: TAG
aaatactggcaagataatca

SEQ ID NO: 100679 - DNA, 20 bp, Artificial Sequence
  Description of Artificial Sequence: Synthetic oligonucleotide
  Target: LAMA2; (-) strand; PAM type: NRG; PAM sequence: AAG
caaaagctataaatactggc

SEQ ID NO: 100680 - DNA, 20 bp, Artificial Sequence
  Description of Artificial Sequence: Synthetic oligonucleotide
  Target: LAMA2; (-) strand; PAM type: NRG; PAM sequence: TGG
gagccaaaagctataaatac

SEQ ID NO: 100681 - DNA, 20 bp, Artificial Sequence
  Description of Artificial Sequence: Synthetic oligonucleotide
  Target: LAMA2; (-) strand; PAM type: NRG; PAM sequence: AAG
cagtaggggattggagccaa

SEQ ID NO: 100682 - DNA, 20 bp, Artificial Sequence
  Description of Artificial Sequence: Synthetic oligonucleotide
  Target: LAMA2; (-) strand; PAM type: NRG; PAM sequence: GAG
tgagagacagtaggggattg

SEQ ID NO: 100683 - DNA, 20 bp, Artificial Sequence
  Description of Artificial Sequence: Synthetic oligonucleotide
  Target: LAMA2; (-) strand; PAM type: NRG; PAM sequence: TGG
gttgagagacagtaggggat

SEQ ID NO: 100684 - DNA, 20 bp, Artificial Sequence
  Description of Artificial Sequence: Synthetic oligonucleotide
  Target: LAMA2; (-) strand; PAM type: NRG; PAM sequence: GGG
aggaagttgagagacagtag

SEQ ID NO: 100685 - DNA, 20 bp, Artificial Sequence
  Description of Artificial Sequence: Synthetic oligonucleotide
  Target: LAMA2; (-) strand; PAM type: NRG; PAM sequence: GGG
gaggaagttgagagacagta

SEQ ID NO: 100686 - DNA, 20 bp, Artificial Sequence
  Description of Artificial Sequence: Synthetic oligonucleotide
  Target: LAMA2; (-) strand; PAM type: NRG; PAM sequence: AGG
tgaggaagttgagagacagt

SEQ ID NO: 100687 - DNA, 20 bp, Artificial Sequence
  Description of Artificial Sequence: Synthetic oligonucleotide
  Target: LAMA2; (-) strand; PAM type: NRG; PAM sequence: TAG
gtgaggaagttgagagacag

SEQ ID NO: 100688 - DNA, 20 bp, Artificial Sequence
  Description of Artificial Sequence: Synthetic oligonucleotide
  Target: LAMA2; (-) strand; PAM type: NRG; PAM sequence: CAG
tatgtgaggaagttgagaga

SEQ ID NO: 100689 - DNA, 20 bp, Artificial Sequence
  Description of Artificial Sequence: Synthetic oligonucleotide
  Target: LAMA2; (-) strand; PAM type: NRG; PAM sequence: GAG
caagtatgtgaggaagttga

SEQ ID NO: 100690 - DNA, 20 bp, Artificial Sequence
  Description of Artificial Sequence: Synthetic oligonucleotide
  Target: LAMA2; (-) strand; PAM type: NRG; PAM sequence: GAG
ggcaagtatgtgaggaagtt

SEQ ID NO: 100691 - DNA, 20 bp, Artificial Sequence
  Description of Artificial Sequence: Synthetic oligonucleotide
  Target: LAMA2; (-) strand; PAM type: NRG; PAM sequence: AAG
caacaggcaagtatgtgagg

SEQ ID NO: 100692 - DNA, 20 bp, Artificial Sequence
  Description of Artificial Sequence: Synthetic oligonucleotide
  Target: LAMA2; (-) strand; PAM type: NRG; PAM sequence: AGG
gttcaacaggcaagtatgtg

SEQ ID NO: 100693 - DNA, 20 bp, Artificial Sequence
  Description of Artificial Sequence: Synthetic oligonucleotide
  Target: LAMA2; (-) strand; PAM type: NRG; PAM sequence: GAG
tgttcaacaggcaagtatgt

SEQ ID NO: 100694 - DNA, 20 bp, Artificial Sequence
  Description of Artificial Sequence: Synthetic oligonucleotide
  Target: LAMA2; (-) strand; PAM type: NRG; PAM sequence: AAG
agaatttttgttcaacaggc

SEQ ID NO: 100695 - DNA, 20 bp, Artificial Sequence
  Description of Artificial Sequence: Synthetic oligonucleotide
  Target: LAMA2; (-) strand; PAM type: NRG; PAM sequence: AGG
agttagaatttttgttcaac

SEQ ID NO: 100696 - DNA, 20 bp, Artificial Sequence
  Description of Artificial Sequence: Synthetic oligonucleotide
  Target: LAMA2; (-) strand; PAM type: NRG; PAM sequence: CAG
cagttagaatttttgttcaa

SEQ ID NO: 100697 - DNA, 20 bp, Artificial Sequence
  Description of Artificial Sequence: Synthetic oligonucleotide
  Target: LAMA2; (-) strand; PAM type: NRG; PAM sequence: TAG
gtgtaaatataacaaacagt

SEQ ID NO: 100698 - DNA, 20 bp, Artificial Sequence
  Description of Artificial Sequence: Synthetic oligonucleotide
  Target: LAMA2; (-) strand; PAM type: NRG; PAM sequence: CAG
gtcagtgtaaatataacaaa

SEQ ID NO: 100699 - DNA, 20 bp, Artificial Sequence
  Description of Artificial Sequence: Synthetic oligonucleotide
  Target: LAMA2; (-) strand; PAM type: NRG; PAM sequence: CAG
caacaagttttatatatggt

SEQ ID NO: 100700 - DNA, 20 bp, Artificial Sequence
  Description of Artificial Sequence: Synthetic oligonucleotide
  Target: LAMA2; (-) strand; PAM type: NRG; PAM sequence: TGG
tggacaacaagttttatata

SEQ ID NO: 100701 - DNA, 20 bp, Artificial Sequence
  Description of Artificial Sequence: Synthetic oligonucleotide
  Target: LAMA2; (-) strand; PAM type: NRG; PAM sequence: AAG
agtgtcccagattggacaac

SEQ ID NO: 100702 - DNA, 20 bp, Artificial Sequence
  Description of Artificial Sequence: Synthetic oligonucleotide
  Target: LAMA2; (-) strand; PAM type: NRG; PAM sequence: TGG
tttaatatagtgtcccagat

SEQ ID NO: 100703 - DNA, 20 bp, Artificial Sequence
  Description of Artificial Sequence: Synthetic oligonucleotide
  Target: LAMA2; (-) strand; PAM type: NRG; PAM sequence: CAG
ctgtttttaatatagtgtcc

SEQ ID NO: 100704 - DNA, 20 bp, Artificial Sequence
  Description of Artificial Sequence: Synthetic oligonucleotide
  Target: LAMA2; (-) strand; PAM type: NRG; PAM sequence: TAG
aacactgcctgtttttaata

SEQ ID NO: 100705 - DNA, 20 bp, Artificial Sequence
  Description of Artificial Sequence: Synthetic oligonucleotide
  Target: LAMA2; (-) strand; PAM type: NRG; PAM sequence: TGG
tttcctattacctgttgttt

SEQ ID NO: 100706 - DNA, 20 bp, Artificial Sequence
  Description of Artificial Sequence: Synthetic oligonucleotide
  Target: LAMA2; (-) strand; PAM type: NRG; PAM sequence: AGG
ccatacattctggtttgccc

SEQ ID NO: 100707 - DNA, 20 bp, Artificial Sequence
  Description of Artificial Sequence: Synthetic oligonucleotide
  Target: LAMA2; (-) strand; PAM type: NRG; PAM sequence: CAG
gccatacattctggtttgcc

SEQ ID NO: 100708 - DNA, 20 bp, Artificial Sequence
  Description of Artificial Sequence: Synthetic oligonucleotide
  Target: LAMA2; (-) strand; PAM type: NRG; PAM sequence: TGG
gctagcagggccatacattc

SEQ ID NO: 100709 - DNA, 20 bp, Artificial Sequence
  Description of Artificial Sequence: Synthetic oligonucleotide
  Target: LAMA2; (-) strand; PAM type: NRG; PAM sequence: GGG
aactttacacaatgctagca

SEQ ID NO: 100710 - DNA, 20 bp, Artificial Sequence
  Description of Artificial Sequence: Synthetic oligonucleotide
  Target: LAMA2; (-) strand; PAM type: NRG; PAM sequence: AGG
taactttacacaatgctagc

SEQ ID NO: 100711 - DNA, 20 bp, Artificial Sequence
  Description of Artificial Sequence: Synthetic oligonucleotide
  Target: LAMA2; (-) strand; PAM type: NRG; PAM sequence: CAG
gtaactttacacaatgctag

SEQ ID NO: 100712 - DNA, 20 bp, Artificial Sequence
  Description of Artificial Sequence: Synthetic oligonucleotide
  Target: LAMA2; (-) strand; PAM type: NRG; PAM sequence: TAG
ttggtaactttacacaatgc

SEQ ID NO: 100713 - DNA, 20 bp, Artificial Sequence
  Description of Artificial Sequence: Synthetic oligonucleotide
  Target: LAMA2; (-) strand; PAM type: NRG; PAM sequence: TGG
gtgttatgacactggaagtt

SEQ ID NO: 100714 - DNA, 20 bp, Artificial Sequence
  Description of Artificial Sequence: Synthetic oligonucleotide
  Target: LAMA2; (-) strand; PAM type: NRG; PAM sequence: AAG
actccgtgttatgacactgg

SEQ ID NO: 100715 - DNA, 20 bp, Artificial Sequence
  Description of Artificial Sequence: Synthetic oligonucleotide
  Target: LAMA2; (-) strand; PAM type: NRG; PAM sequence: TGG
ttcactccgtgttatgacac

SEQ ID NO: 100716 - DNA, 20 bp, Artificial Sequence
  Description of Artificial Sequence: Synthetic oligonucleotide
  Target: LAMA2; (-) strand; PAM type: NRG; PAM sequence: AAG
atctatgcatccattcacct

SEQ ID NO: 100717 - DNA, 20 bp, Artificial Sequence
  Description of Artificial Sequence: Synthetic oligonucleotide
  Target: LAMA2; (-) strand; PAM type: NRG; PAM sequence: CAG
aactggatgaaccctaaatg

SEQ ID NO: 100718 - DNA, 20 bp, Artificial Sequence
  Description of Artificial Sequence: Synthetic oligonucleotide
  Target: LAMA2; (-) strand; PAM type: NRG; PAM sequence: TGG
aagtagaaagagaatccaac

SEQ ID NO: 100719 - DNA, 20 bp, Artificial Sequence
  Description of Artificial Sequence: Synthetic oligonucleotide
  Target: LAMA2; (-) strand; PAM type: NRG; PAM sequence: GAG
ctgatttggaaaagtagaaa

SEQ ID NO: 100720 - DNA, 20 bp, Artificial Sequence
  Description of Artificial Sequence: Synthetic oligonucleotide
  Target: LAMA2; (-) strand; PAM type: NRG; PAM sequence: AAG
cactgatttggaaaagtaga

SEQ ID NO: 100721 - DNA, 20 bp, Artificial Sequence
  Description of Artificial Sequence: Synthetic oligonucleotide
  Target: LAMA2; (-) strand; PAM type: NRG; PAM sequence: TAG
ataacactgatttggaaaag

SEQ ID NO: 100722 - DNA, 20 bp, Artificial Sequence
  Description of Artificial Sequence: Synthetic oligonucleotide
  Target: LAMA2; (-) strand; PAM type: NRG; PAM sequence: AAG
tatataacactgatttggaa

SEQ ID NO: 100723 - DNA, 20 bp, Artificial Sequence
  Description of Artificial Sequence: Synthetic oligonucleotide
  Target: LAMA2; (-) strand; PAM type: NRG; PAM sequence: TGG
caaaatatataacactgatt

SEQ ID NO: 100724 - DNA, 20 bp, Artificial Sequence
  Description of Artificial Sequence: Synthetic oligonucleotide
  Target: LAMA2; (-) strand; PAM type: NRG; PAM sequence: GGG
tcatgtgtatctgtggaagt

SEQ ID NO: 100725 - DNA, 20 bp, Artificial Sequence
  Description of Artificial Sequence: Synthetic oligonucleotide
  Target: LAMA2; (-) strand; PAM type: NRG; PAM sequence: TGG
ttcatgtgtatctgtggaag

SEQ ID NO: 100726 - DNA, 20 bp, Artificial Sequence
  Description of Artificial Sequence: Synthetic oligonucleotide
  Target: LAMA2; (-) strand; PAM type: NRG; PAM sequence: AAG
tttttcatgtgtatctgtgg

SEQ ID NO: 100727 - DNA, 20 bp, Artificial Sequence
  Description of Artificial Sequence: Synthetic oligonucleotide
  Target: LAMA2; (-) strand; PAM type: NRG; PAM sequence: TGG
ggatttttcatgtgtatctg

SEQ ID NO: 100728 - DNA, 20 bp, Artificial Sequence
  Description of Artificial Sequence: Synthetic oligonucleotide
  Target: LAMA2; (-) strand; PAM type: NRG; PAM sequence: TGG
ttgccatatcttcctcaaga

SEQ ID NO: 100729 - DNA, 20 bp, Artificial Sequence
  Description of Artificial Sequence: Synthetic oligonucleotide
  Target: LAMA2; (-) strand; PAM type: NRG; PAM sequence: AAG
ctttttgccatatcttcctc

SEQ ID NO: 100730 - DNA, 20 bp, Artificial Sequence
  Description of Artificial Sequence: Synthetic oligonucleotide
  Target: LAMA2; (-) strand; PAM type: NRG; PAM sequence: CAG
ttaagtggcaataggctact

SEQ ID NO: 100731 - DNA, 20 bp, Artificial Sequence
  Description of Artificial Sequence: Synthetic oligonucleotide
  Target: LAMA2; (-) strand; PAM type: NRG; PAM sequence: AGG
gaggcaagttaagtggcaat

SEQ ID NO: 100732 - DNA, 20 bp, Artificial Sequence
  Description of Artificial Sequence: Synthetic oligonucleotide
  Target: LAMA2; (-) strand; PAM type: NRG; PAM sequence: TAG
agaggcaagttaagtggcaa

SEQ ID NO: 100733 - DNA, 20 bp, Artificial Sequence
  Description of Artificial Sequence: Synthetic oligonucleotide
  Target: LAMA2; (-) strand; PAM type: NRG; PAM sequence: TGG
ggcaaaagaggcaagttaag

SEQ ID NO: 100734 - DNA, 20 bp, Artificial Sequence
  Description of Artificial Sequence: Synthetic oligonucleotide
  Target: LAMA2; (-) strand; PAM type: NRG; PAM sequence: AAG
tgaggcaaaagaggcaagtt

SEQ ID NO: 100735 - DNA, 20 bp, Artificial Sequence
  Description of Artificial Sequence: Synthetic oligonucleotide
  Target: LAMA2; (-) strand; PAM type: NRG; PAM sequence: AAG
accaatgaggcaaaagaggc

SEQ ID NO: 100736 - DNA, 20 bp, Artificial Sequence
  Description of Artificial Sequence: Synthetic oligonucleotide
  Target: LAMA2; (-) strand; PAM type: NRG; PAM sequence: AGG
ttttaccaatgaggcaaaag

SEQ ID NO: 100737 - DNA, 20 bp, Artificial Sequence
  Description of Artificial Sequence: Synthetic oligonucleotide
  Target: LAMA2; (-) strand; PAM type: NRG; PAM sequence: GAG
attttaccaatgaggcaaaa

SEQ ID NO: 100738 - DNA, 20 bp, Artificial Sequence
  Description of Artificial Sequence: Synthetic oligonucleotide
  Target: LAMA2; (-) strand; PAM type: NRG; PAM sequence: AAG
taattttaccaatgaggcaa

SEQ ID NO: 100739 - DNA, 20 bp, Artificial Sequence
  Description of Artificial Sequence: Synthetic oligonucleotide
  Target: LAMA2; (-) strand; PAM type: NRG; PAM sequence: AGG
acccattaattttaccaatg

SEQ ID NO: 100740 - DNA, 20 bp, Artificial Sequence
  Description of Artificial Sequence: Synthetic oligonucleotide
  Target: LAMA2; (-) strand; PAM type: NRG; PAM sequence: GAG
aacccattaattttaccaat

SEQ ID NO: 100741 - DNA, 20 bp, Artificial Sequence
  Description of Artificial Sequence: Synthetic oligonucleotide
  Target: LAMA2; (-) strand; PAM type: NRG; PAM sequence: CAG
ttccctatactcatgaattt

SEQ ID NO: 100742 - DNA, 20 bp, Artificial Sequence
  Description of Artificial Sequence: Synthetic oligonucleotide
  Target: LAMA2; (-) strand; PAM type: NRG; PAM sequence: GGG
gcaattctatattgacttct

SEQ ID NO: 100743 - DNA, 20 bp, Artificial Sequence
  Description of Artificial Sequence: Synthetic oligonucleotide
  Target: LAMA2; (-) strand; PAM type: NRG; PAM sequence: TGG
tgcaattctatattgacttc

SEQ ID NO: 100744 - DNA, 20 bp, Artificial Sequence
  Description of Artificial Sequence: Synthetic oligonucleotide
  Target: LAMA2; (-) strand; PAM type: NRG; PAM sequence: GAG
cctcttgtataattagagat

SEQ ID NO: 100745 - DNA, 20 bp, Artificial Sequence
  Description of Artificial Sequence: Synthetic oligonucleotide
  Target: LAMA2; (-) strand; PAM type: NRG; PAM sequence: GAG
taagtcctcttgtataatta

SEQ ID NO: 100746 - DNA, 20 bp, Artificial Sequence
  Description of Artificial Sequence: Synthetic oligonucleotide
  Target: LAMA2; (-) strand; PAM type: NRG; PAM sequence: TAG
gttaagtcctcttgtataat

SEQ ID NO: 100747 - DNA, 20 bp, Artificial Sequence
  Description of Artificial Sequence: Synthetic oligonucleotide
  Target: LAMA2; (-) strand; PAM type: NRG; PAM sequence: AAG
agatcataaacttttttgtt

SEQ ID NO: 100748 - DNA, 20 bp, Artificial Sequence
  Description of Artificial Sequence: Synthetic oligonucleotide
  Target: LAMA2; (-) strand; PAM type: NRG; PAM sequence: TAG
tagtttgtctgtgactgctc

SEQ ID NO: 100749 - DNA, 20 bp, Artificial Sequence
  Description of Artificial Sequence: Synthetic oligonucleotide
  Target: LAMA2; (-) strand; PAM type: NRG; PAM sequence: TAG
caaatttggcctgtgggtca

SEQ ID NO: 100750 - DNA, 20 bp, Artificial Sequence
  Description of Artificial Sequence: Synthetic oligonucleotide
  Target: LAMA2; (-) strand; PAM type: NRG; PAM sequence: GGG
atgggccaaatttggcctgt

SEQ ID NO: 100751 - DNA, 20 bp, Artificial Sequence
  Description of Artificial Sequence: Synthetic oligonucleotide
  Target: LAMA2; (-) strand; PAM type: NRG; PAM sequence: TGG
aatgggccaaatttggcctg

SEQ ID NO: 100752 - DNA, 20 bp, Artificial Sequence
  Description of Artificial Sequence: Synthetic oligonucleotide
  Target: LAMA2; (-) strand; PAM type: NRG; PAM sequence: TGG
aatcagaaatgggccaaatt

SEQ ID NO: 100753 - DNA, 20 bp, Artificial Sequence
  Description of Artificial Sequence: Synthetic oligonucleotide
  Target: LAMA2; (-) strand; PAM type: NRG; PAM sequence: GGG
tgccatacagaatcagaaat

SEQ ID NO: 100754 - DNA, 20 bp, Artificial Sequence
  Description of Artificial Sequence: Synthetic oligonucleotide
  Target: LAMA2; (-) strand; PAM type: NRG; PAM sequence: TGG
gtgccatacagaatcagaaa

SEQ ID NO: 100755 - DNA, 20 bp, Artificial Sequence
  Description of Artificial Sequence: Synthetic oligonucleotide
  Target: LAMA2; (-) strand; PAM type: NRG; PAM sequence: CAG
aattgagtgccatacagaat

SEQ ID NO: 100756 - DNA, 20 bp, Artificial Sequence
  Description of Artificial Sequence: Synthetic oligonucleotide
  Target: LAMA2; (-) strand; PAM type: NRG; PAM sequence: CAG
gttcttaattgagtgccata

SEQ ID NO: 100757 - DNA, 20 bp, Artificial Sequence
  Description of Artificial Sequence: Synthetic oligonucleotide
  Target: LAMA2; (-) strand; PAM type: NRG; PAM sequence: GAG
tgtaacaacagttcttaatt

SEQ ID NO: 100758 - DNA, 20 bp, Artificial Sequence
  Description of Artificial Sequence: Synthetic oligonucleotide
  Target: LAMA2; (-) strand; PAM type: NRG; PAM sequence: CAG
taaatgctgacctgtaacaa

SEQ ID NO: 100759 - DNA, 20 bp, Artificial Sequence
  Description of Artificial Sequence: Synthetic oligonucleotide
  Target: LAMA2; (-) strand; PAM type: NRG; PAM sequence: TAG
ccttcatttgggttataact

SEQ ID NO: 100760 - DNA, 20 bp, Artificial Sequence
  Description of Artificial Sequence: Synthetic oligonucleotide
  Target: LAMA2; (-) strand; PAM type: NRG; PAM sequence: GGG
tttgaaattatccttcattt

SEQ ID NO: 100761 - DNA, 20 bp, Artificial Sequence
  Description of Artificial Sequence: Synthetic oligonucleotide
  Target: LAMA2; (-) strand; PAM type: NRG; PAM sequence: TGG
gtttgaaattatccttcatt

SEQ ID NO: 100762 - DNA, 20 bp, Artificial Sequence
  Description of Artificial Sequence: Synthetic oligonucleotide
  Target: LAMA2; (-) strand; PAM type: NRG; PAM sequence: AGG
gaagaattggattcttcctg

SEQ ID NO: 100763 - DNA, 20 bp, Artificial Sequence
  Description of Artificial Sequence: Synthetic oligonucleotide
  Target: LAMA2; (-) strand; PAM type: NRG; PAM sequence: GAG
agaagaattggattcttcct

SEQ ID NO: 100764 - DNA, 20 bp, Artificial Sequence
  Description of Artificial Sequence: Synthetic oligonucleotide
  Target: LAMA2; (-) strand; PAM type: NRG; PAM sequence: TGG
aggctactaatgagaagaat

SEQ ID NO: 100765 - DNA, 20 bp, Artificial Sequence
  Description of Artificial Sequence: Synthetic oligonucleotide
  Target: LAMA2; (-) strand; PAM type: NRG; PAM sequence: AAG
aatatcaggctactaatgag

SEQ ID NO: 100766 - DNA, 20 bp, Artificial Sequence
  Description of Artificial Sequence: Synthetic oligonucleotide
  Target: LAMA2; (-) strand; PAM type: NRG; PAM sequence: GAG
tgtaatatcaggctactaat

SEQ ID NO: 100767 - DNA, 20 bp, Artificial Sequence
  Description of Artificial Sequence: Synthetic oligonucleotide
  Target: LAMA2; (-) strand; PAM type: NRG; PAM sequence: AGG
ttaaattactttgtaatatc

SEQ ID NO: 100768 - DNA, 20 bp, Artificial Sequence
  Description of Artificial Sequence: Synthetic oligonucleotide
  Target: LAMA2; (-) strand; PAM type: NRG; PAM sequence: CAG
gttaaattactttgtaatat

SEQ ID NO: 100769 - DNA, 20 bp, Artificial Sequence
  Description of Artificial Sequence: Synthetic oligonucleotide
  Target: LAMA2; (-) strand; PAM type: NRG; PAM sequence: TGG
aagcattctgctgttgttga

SEQ ID NO: 100770 - DNA, 20 bp, Artificial Sequence
  Description of Artificial Sequence: Synthetic oligonucleotide
  Target: LAMA2; (-) strand; PAM type: NRG; PAM sequence: AAG
gaaaaagaaataaaattcta

SEQ ID NO: 100771 - DNA, 20 bp, Artificial Sequence
  Description of Artificial Sequence: Synthetic oligonucleotide
  Target: LAMA2; (-) strand; PAM type: NRG; PAM sequence: AAG
atcaagattatgccgtgaaa

SEQ ID NO: 100772 - DNA, 20 bp, Artificial Sequence
  Description of Artificial Sequence: Synthetic oligonucleotide
  Target: LAMA2; (-) strand; PAM type: NRG; PAM sequence: AAG
tgcaggacataggaaaaatc

SEQ ID NO: 100773 - DNA, 20 bp, Artificial Sequence
  Description of Artificial Sequence: Synthetic oligonucleotide
  Target: LAMA2; (-) strand; PAM type: NRG; PAM sequence: AGG
cagtaggctttgcaggacat

SEQ ID NO: 100774 - DNA, 20 bp, Artificial Sequence
  Description of Artificial Sequence: Synthetic oligonucleotide
  Target: LAMA2; (-) strand; PAM type: NRG; PAM sequence: TAG
acagtaggctttgcaggaca

SEQ ID NO: 100775 - DNA, 20 bp, Artificial Sequence
  Description of Artificial Sequence: Synthetic oligonucleotide
  Target: LAMA2; (-) strand; PAM type: NRG; PAM sequence: AGG
tagtaaacagtaggctttgc

SEQ ID NO: 100776 - DNA, 20 bp, Artificial Sequence
  Description of Artificial Sequence: Synthetic oligonucleotide
  Target: LAMA2; (-) strand; PAM type: NRG; PAM sequence: CAG
atagtaaacagtaggctttg

SEQ ID NO: 100777 - DNA, 20 bp, Artificial Sequence
  Description of Artificial Sequence: Synthetic oligonucleotide
  Target: LAMA2; (-) strand; PAM type: NRG; PAM sequence: AGG
agggtcagatagtaaacagt

SEQ ID NO: 100778 - DNA, 20 bp, Artificial Sequence
  Description of Artificial Sequence: Synthetic oligonucleotide
  Target: LAMA2; (-) strand; PAM type: NRG; PAM sequence: TAG
aagggtcagatagtaaacag

SEQ ID NO: 100779 - DNA, 20 bp, Artificial Sequence
  Description of Artificial Sequence: Synthetic oligonucleotide
  Target: LAMA2; (-) strand; PAM type: NRG; PAM sequence: CAG
gtaaagggtcagatagtaaa

SEQ ID NO: 100780 - DNA, 20 bp, Artificial Sequence
  Description of Artificial Sequence: Synthetic oligonucleotide
  Target: LAMA2; (-) strand; PAM type: NRG; PAM sequence: TAG
ttttcctgtaaagggtcaga

SEQ ID NO: 100781 - DNA, 20 bp, Artificial Sequence
  Description of Artificial Sequence: Synthetic oligonucleotide
  Target: LAMA2; (-) strand; PAM type: NRG; PAM sequence: CAG
taacttttcctgtaaagggt

SEQ ID NO: 100782 - DNA, 20 bp, Artificial Sequence
  Description of Artificial Sequence: Synthetic oligonucleotide
  Target: LAMA2; (-) strand; PAM type: NRG; PAM sequence: GGG
tagttaacttttcctgtaaa

SEQ ID NO: 100783 - DNA, 20 bp, Artificial Sequence
  Description of Artificial Sequence: Synthetic oligonucleotide
  Target: LAMA2; (-) strand; PAM type: NRG; PAM sequence: AGG
ttagttaacttttcctgtaa

SEQ ID NO: 100784 - DNA, 20 bp, Artificial Sequence
  Description of Artificial Sequence: Synthetic oligonucleotide
  Target: LAMA2; (-) strand; PAM type: NRG; PAM sequence: AAG
attagttaacttttcctgta

SEQ ID NO: 100785 - DNA, 20 bp, Artificial Sequence
  Description of Artificial Sequence: Synthetic oligonucleotide
  Target: LAMA2; (-) strand; PAM type: NRG; PAM sequence: TAG
gatagcaagagtccatacat

SEQ ID NO: 100786 - DNA, 20 bp, Artificial Sequence
  Description of Artificial Sequence: Synthetic oligonucleotide
  Target: LAMA2; (-) strand; PAM type: NRG; PAM sequence: GAG
tgcaacaaaactgatagcaa

SEQ ID NO: 100787 - DNA, 20 bp, Artificial Sequence
  Description of Artificial Sequence: Synthetic oligonucleotide
  Target: LAMA2; (-) strand; PAM type: NRG; PAM sequence: AAG
gatgcaacaaaactgatagc

SEQ ID NO: 100788 - DNA, 20 bp, Artificial Sequence
  Description of Artificial Sequence: Synthetic oligonucleotide
  Target: LAMA2; (-) strand; PAM type: NRG; PAM sequence: TAG
ttttgatgcaacaaaactga

SEQ ID NO: 100789 - DNA, 20 bp, Artificial Sequence
  Description of Artificial Sequence: Synthetic oligonucleotide
  Target: LAMA2; (-) strand; PAM type: NRG; PAM sequence: TGG
tgtctccacattgttgtgtg

SEQ ID NO: 100790 - DNA, 20 bp, Artificial Sequence
  Description of Artificial Sequence: Synthetic oligonucleotide
  Target: LAMA2; (-) strand; PAM type: NRG; PAM sequence: AAG
aagcaaaagaggttaatagc

SEQ ID NO: 100791 - DNA, 20 bp, Artificial Sequence
  Description of Artificial Sequence: Synthetic oligonucleotide
  Target: LAMA2; (-) strand; PAM type: NRG; PAM sequence: TAG
gacaaagcaaaagaggttaa

SEQ ID NO: 100792 - DNA, 20 bp, Artificial Sequence
  Description of Artificial Sequence: Synthetic oligonucleotide
  Target: LAMA2; (-) strand; PAM type: NRG; PAM sequence: AGG
aaacagtgacaaagcaaaag

SEQ ID NO: 100793 - DNA, 20 bp, Artificial Sequence
  Description of Artificial Sequence: Synthetic oligonucleotide
  Target: LAMA2; (-) strand; PAM type: NRG; PAM sequence: GAG
gaaacagtgacaaagcaaaa

SEQ ID NO: 100794 - DNA, 20 bp, Artificial Sequence
  Description of Artificial Sequence: Synthetic oligonucleotide
  Target: LAMA2; (-) strand; PAM type: NRG; PAM sequence: AAG
ttgaaacagtgacaaagcaa

SEQ ID NO: 100795 - DNA, 20 bp, Artificial Sequence
  Description of Artificial Sequence: Synthetic oligonucleotide
  Target: LAMA2; (-) strand; PAM type: NRG; PAM sequence: AAG
cctgaattgaaacagtgaca

SEQ ID NO: 100796 - DNA, 20 bp, Artificial Sequence
  Description of Artificial Sequence: Synthetic oligonucleotide
  Target: LAMA2; (-) strand; PAM type: NRG; PAM sequence: CAG
ggggcacacctgaattgaaa

SEQ ID NO: 100797 - DNA, 20 bp, Artificial Sequence
  Description of Artificial Sequence: Synthetic oligonucleotide
  Target: LAMA2; (-) strand; PAM type: NRG; PAM sequence: GGG
tggactgccagtatagccag

SEQ ID NO: 100798 - DNA, 20 bp, Artificial Sequence
  Description of Artificial Sequence: Synthetic oligonucleotide
  Target: LAMA2; (-) strand; PAM type: NRG; PAM sequence: GGG
ctggactgccagtatagcca

SEQ ID NO: 100799 - DNA, 20 bp, Artificial Sequence
  Description of Artificial Sequence: Synthetic oligonucleotide
  Target: LAMA2; (-) strand; PAM type: NRG; PAM sequence: AGG
cctggactgccagtatagcc

SEQ ID NO: 100800 - DNA, 20 bp, Artificial Sequence
  Description of Artificial Sequence: Synthetic oligonucleotide
  Target: LAMA2; (-) strand; PAM type: NRG; PAM sequence: CAG
gcctggactgccagtatagc

SEQ ID NO: 100801 - DNA, 20 bp, Artificial Sequence
  Description of Artificial Sequence: Synthetic oligonucleotide
  Target: LAMA2; (-) strand; PAM type: NRG; PAM sequence: TAG
ggttgcctggactgccagta

SEQ ID NO: 100802 - DNA, 20 bp, Artificial Sequence
  Description of Artificial Sequence: Synthetic oligonucleotide
  Target: LAMA2; (-) strand; PAM type: NRG; PAM sequence: CAG
tccagggttgcctggactgc

SEQ ID NO: 100803 - DNA, 20 bp, Artificial Sequence
  Description of Artificial Sequence: Synthetic oligonucleotide
  Target: LAMA2; (-) strand; PAM type: NRG; PAM sequence: TGG
caggagcctccagggttgcc

SEQ ID NO: 100804 - DNA, 20 bp, Artificial Sequence
  Description of Artificial Sequence: Synthetic oligonucleotide
  Target: LAMA2; (-) strand; PAM type: NRG; PAM sequence: GGG
attcttggcaggagcctcca

SEQ ID NO: 100805 - DNA, 20 bp, Artificial Sequence
  Description of Artificial Sequence: Synthetic oligonucleotide
  Target: LAMA2; (-) strand; PAM type: NRG; PAM sequence: AGG
cattcttggcaggagcctcc

SEQ ID NO: 100806 - DNA, 20 bp, Artificial Sequence
  Description of Artificial Sequence: Synthetic oligonucleotide
  Target: LAMA2; (-) strand; PAM type: NRG; PAM sequence: CAG
acattcttggcaggagcctc

SEQ ID NO: 100807 - DNA, 20 bp, Artificial Sequence
  Description of Artificial Sequence: Synthetic oligonucleotide
  Target: LAMA2; (-) strand; PAM type: NRG; PAM sequence: GAG
cacactcacattcttggcag

SEQ ID NO: 100808 - DNA, 20 bp, Artificial Sequence
  Description of Artificial Sequence: Synthetic oligonucleotide
  Target: LAMA2; (-) strand; PAM type: NRG; PAM sequence: AGG
atcacactcacattcttggc

SEQ ID NO: 100809 - DNA, 20 bp, Artificial Sequence
  Description of Artificial Sequence: Synthetic oligonucleotide
  Target: LAMA2; (-) strand; PAM type: NRG; PAM sequence: CAG
gatcacactcacattcttgg

SEQ ID NO: 100810 - DNA, 20 bp, Artificial Sequence
  Description of Artificial Sequence: Synthetic oligonucleotide
  Target: LAMA2; (-) strand; PAM type: NRG; PAM sequence: TGG
agggatcacactcacattct

SEQ ID NO: 100811 - DNA, 20 bp, Artificial Sequence
  Description of Artificial Sequence: Synthetic oligonucleotide
  Target: LAMA2; (-) strand; PAM type: NRG; PAM sequence: GGG
ggcacaggcagtgagccata

SEQ ID NO: 100812 - DNA, 20 bp, Artificial Sequence
  Description of Artificial Sequence: Synthetic oligonucleotide
  Target: LAMA2; (-) strand; PAM type: NRG; PAM sequence: AGG
gggcacaggcagtgagccat

SEQ ID NO: 100813 - DNA, 20 bp, Artificial Sequence
  Description of Artificial Sequence: Synthetic oligonucleotide
  Target: LAMA2; (-) strand; PAM type: NRG; PAM sequence: TAG
agggcacaggcagtgagcca

SEQ ID NO: 100814 - DNA, 20 bp, Artificial Sequence
  Description of Artificial Sequence: Synthetic oligonucleotide
  Target: LAMA2; (-) strand; PAM type: NRG; PAM sequence: GAG
ggtcacagggcacaggcagt

SEQ ID NO: 100815 - DNA, 20 bp, Artificial Sequence
  Description of Artificial Sequence: Synthetic oligonucleotide
  Target: LAMA2; (-) strand; PAM type: NRG; PAM sequence: CAG
acagggtcacagggcacagg

SEQ ID NO: 100816 - DNA, 20 bp, Artificial Sequence
  Description of Artificial Sequence: Synthetic oligonucleotide
  Target: LAMA2; (-) strand; PAM type: NRG; PAM sequence: AGG
gtgacagggtcacagggcac

SEQ ID NO: 100817 - DNA, 20 bp, Artificial Sequence
  Description of Artificial Sequence: Synthetic oligonucleotide
  Target: LAMA2; (-) strand; PAM type: NRG; PAM sequence: CAG
tgtgacagggtcacagggca

SEQ ID NO: 100818 - DNA, 20 bp, Artificial Sequence
  Description of Artificial Sequence: Synthetic oligonucleotide
  Target: LAMA2; (-) strand; PAM type: NRG; PAM sequence: GGG
aatcctgtgacagggtcaca

SEQ ID NO: 100819 - DNA, 20 bp, Artificial Sequence
  Description of Artificial Sequence: Synthetic oligonucleotide
  Target: LAMA2; (-) strand; PAM type: NRG; PAM sequence: AGG
gaatcctgtgacagggtcac

SEQ ID NO: 100820 - DNA, 20 bp, Artificial Sequence
  Description of Artificial Sequence: Synthetic oligonucleotide
  Target: LAMA2; (-) strand; PAM type: NRG; PAM sequence: CAG
agaatcctgtgacagggtca

SEQ ID NO: 100821 - DNA, 20 bp, Artificial Sequence
  Description of Artificial Sequence: Synthetic oligonucleotide
  Target: LAMA2; (-) strand; PAM type: NRG; PAM sequence: GGG
acgtgcagaatcctgtgaca

SEQ ID NO: 100822 - DNA, 20 bp, Artificial Sequence
  Description of Artificial Sequence: Synthetic oligonucleotide
  Target: LAMA2; (-) strand; PAM type: NRG; PAM sequence: AGG
cacgtgcagaatcctgtgac

SEQ ID NO: 100823 - DNA, 20 bp, Artificial Sequence
  Description of Artificial Sequence: Synthetic oligonucleotide
  Target: LAMA2; (-) strand; PAM type: NRG; PAM sequence: CAG
gcacgtgcagaatcctgtga

SEQ ID NO: 100824 - DNA, 20 bp, Artificial Sequence
  Description of Artificial Sequence: Synthetic oligonucleotide
  Target: LAMA2; (-) strand; PAM type: NRG; PAM sequence: CAG
tggctccaggtcggcacgtg

SEQ ID NO: 100825 - DNA, 20 bp, Artificial Sequence
  Description of Artificial Sequence: Synthetic oligonucleotide
  Target: LAMA2; (-) strand; PAM type: NRG; PAM sequence: CGG
tccttcccgtggctccaggt

SEQ ID NO: 100826 - DNA, 20 bp, Artificial Sequence
  Description of Artificial Sequence: Synthetic oligonucleotide
  Target: LAMA2; (-) strand; PAM type: NRG; PAM sequence: AGG
cacttccttcccgtggctcc

SEQ ID NO: 100827 - DNA, 20 bp, Artificial Sequence
  Description of Artificial Sequence: Synthetic oligonucleotide
  Target: LAMA2; (-) strand; PAM type: NRG; PAM sequence: CAG
acacttccttcccgtggctc

SEQ ID NO: 100828 - DNA, 20 bp, Artificial Sequence
  Description of Artificial Sequence: Synthetic oligonucleotide
  Target: LAMA2; (-) strand; PAM type: NRG; PAM sequence: TGG
gccgtcacacttccttcccg

SEQ ID NO: 100829 - DNA, 20 bp, Artificial Sequence
  Description of Artificial Sequence: Synthetic oligonucleotide
  Target: LAMA2; (-) strand; PAM type: NRG; PAM sequence: CAG
cgcgtgcatgccagtgcttg

SEQ ID NO: 100830 - DNA, 20 bp, Artificial Sequence
  Description of Artificial Sequence: Synthetic oligonucleotide
  Target: LAMA2; (-) strand; PAM type: NRG; PAM sequence: CAG
cccagccctcgcgtgcatgc

SEQ ID NO: 100831 - DNA, 20 bp, Artificial Sequence
  Description of Artificial Sequence: Synthetic oligonucleotide
  Target: LAMA2; (-) strand; PAM type: NRG; PAM sequence: CAG
tatacgtacaaacacactcc

SEQ ID NO: 100832 - DNA, 20 bp, Artificial Sequence
  Description of Artificial Sequence: Synthetic oligonucleotide
  Target: LAMA2; (-) strand; PAM type: NRG; PAM sequence: TAG
tccaaaactaacagcaaagt

SEQ ID NO: 100833 - DNA, 20 bp, Artificial Sequence
  Description of Artificial Sequence: Synthetic oligonucleotide
  Target: LAMA2; (-) strand; PAM type: NRG; PAM sequence: AAG
ggcctccaaaactaacagca

SEQ ID NO: 100834 - DNA, 20 bp, Artificial Sequence
  Description of Artificial Sequence: Synthetic oligonucleotide
  Target: LAMA2; (-) strand; PAM type: NRG; PAM sequence: CAG
atcaaggcctccaaaactaa

SEQ ID NO: 100835 - DNA, 20 bp, Artificial Sequence
  Description of Artificial Sequence: Synthetic oligonucleotide
  Target: LAMA2; (-) strand; PAM type: NRG; PAM sequence: AGG
atgagacagaactggaatca

SEQ ID NO: 100836 - DNA, 20 bp, Artificial Sequence
  Description of Artificial Sequence: Synthetic oligonucleotide
  Target: LAMA2; (-) strand; PAM type: NRG; PAM sequence: AAG
aatgagacagaactggaatc

SEQ ID NO: 100837 - DNA, 20 bp, Artificial Sequence
  Description of Artificial Sequence: Synthetic oligonucleotide
  Target: LAMA2; (-) strand; PAM type: NRG; PAM sequence: TGG
cattggaaatgagacagaac

SEQ ID NO: 100838 - DNA, 20 bp, Artificial Sequence
  Description of Artificial Sequence: Synthetic oligonucleotide
  Target: LAMA2; (-) strand; PAM type: NRG; PAM sequence: CAG
ctttctcattggaaatgaga

SEQ ID NO: 100839 - DNA, 20 bp, Artificial Sequence
  Description of Artificial Sequence: Synthetic oligonucleotide
  Target: LAMA2; (-) strand; PAM type: NRG; PAM sequence: GAG
cactctttctcattggaaat

SEQ ID NO: 100840 - DNA, 20 bp, Artificial Sequence
  Description of Artificial Sequence: Synthetic oligonucleotide
  Target: LAMA2; (-) strand; PAM type: NRG; PAM sequence: TGG
ggagagtcactctttctcat

SEQ ID NO: 100841 - DNA, 20 bp, Artificial Sequence
  Description of Artificial Sequence: Synthetic oligonucleotide
  Target: LAMA2; (-) strand; PAM type: NRG; PAM sequence: GAG
aaaaaaaaggcgggcgggga

SEQ ID NO: 100842 - DNA, 20 bp, Artificial Sequence
  Description of Artificial Sequence: Synthetic oligonucleotide
  Target: LAMA2; (-) strand; PAM type: NRG; PAM sequence: GAG
aaaaaaaaaaggcgggcggg

SEQ ID NO: 100843 - DNA, 20 bp, Artificial Sequence
  Description of Artificial Sequence: Synthetic oligonucleotide
  Target: LAMA2; (-) strand; PAM type: NRG; PAM sequence: GGG
aaaaaaaaaaaaggcgggcg

SEQ ID NO: 100844 - DNA, 20 bp, Artificial Sequence
  Description of Artificial Sequence: Synthetic oligonucleotide
  Target: LAMA2; (-) strand; PAM type: NRG; PAM sequence: GGG
aaaaaaaaaaaaaggcgggc

SEQ ID NO: 100845 - DNA, 20 bp, Artificial Sequence
  Description of Artificial Sequence: Synthetic oligonucleotide
  Target: LAMA2; (-) strand; PAM type: NRG; PAM sequence: CGG
aaaaaaaaaaaaaaggcggg

SEQ ID NO: 100846 - DNA, 20 bp, Artificial Sequence
  Description of Artificial Sequence: Synthetic oligonucleotide
  Target: LAMA2; (-) strand; PAM type: NRG; PAM sequence: GGG
gcaaaaaaaaaaaaaaaggc

SEQ ID NO: 100847 - DNA, 20 bp, Artificial Sequence
  Description of Artificial Sequence: Synthetic oligonucleotide
  Target: LAMA2; (-) strand; PAM type: NRG; PAM sequence: CGG
tgcaaaaaaaaaaaaaaagg

SEQ ID NO: 100848 - DNA, 20 bp, Artificial Sequence
  Description of Artificial Sequence: Synthetic oligonucleotide
  Target: LAMA2; (-) strand; PAM type: NRG; PAM sequence: AGG
tattgcaaaaaaaaaaaaaa

SEQ ID NO: 100849 - DNA, 20 bp, Artificial Sequence
  Description of Artificial Sequence: Synthetic oligonucleotide
  Target: LAMA2; (-) strand; PAM type: NRG; PAM sequence: AAG
ctattgcaaaaaaaaaaaaa

SEQ ID NO: 100850 - DNA, 20 bp, Artificial Sequence
  Description of Artificial Sequence: Synthetic oligonucleotide
  Target: LAMA2; (-) strand; PAM type: NRG; PAM sequence: GAG
atagtgtcagaaagaatgaa

SEQ ID NO: 100851 - DNA, 20 bp, Artificial Sequence
  Description of Artificial Sequence: Synthetic oligonucleotide
  Target: LAMA2; (-) strand; PAM type: NRG; PAM sequence: AAG
agatagtgtcagaaagaatg

SEQ ID NO: 100852 - DNA, 20 bp, Artificial Sequence
  Description of Artificial Sequence: Synthetic oligonucleotide
  Target: LAMA2; (-) strand; PAM type: NRG; PAM sequence: AAG
ggtggatagatagtgtcaga

SEQ ID NO: 100853 - DNA, 20 bp, Artificial Sequence
  Description of Artificial Sequence: Synthetic oligonucleotide
  Target: LAMA2; (-) strand; PAM type: NRG; PAM sequence: CAG
agaaggtggatagatagtgt

SEQ ID NO: 100854 - DNA, 20 bp, Artificial Sequence
  Description of Artificial Sequence: Synthetic oligonucleotide
  Target: LAMA2; (-) strand; PAM type: NRG; PAM sequence: TAG
aacagcagaaggtggataga

SEQ ID NO: 100855 - DNA, 20 bp, Artificial Sequence
  Description of Artificial Sequence: Synthetic oligonucleotide
  Target: LAMA2; (-) strand; PAM type: NRG; PAM sequence: TAG
ggtgaacagcagaaggtgga

SEQ ID NO: 100856 - DNA, 20 bp, Artificial Sequence
  Description of Artificial Sequence: Synthetic oligonucleotide
  Target: LAMA2; (-) strand; PAM type: NRG; PAM sequence: TGG
agcaggtgaacagcagaagg

SEQ ID NO: 100857 - DNA, 20 bp, Artificial Sequence
  Description of Artificial Sequence: Synthetic oligonucleotide
  Target: LAMA2; (-) strand; PAM type: NRG; PAM sequence: AGG
atcagcaggtgaacagcaga

SEQ ID NO: 100858 - DNA, 20 bp, Artificial Sequence
  Description of Artificial Sequence: Synthetic oligonucleotide
  Target: LAMA2; (-) strand; PAM type: NRG; PAM sequence: AAG
aatcagcaggtgaacagcag

SEQ ID NO: 100859 - DNA, 20 bp, Artificial Sequence
  Description of Artificial Sequence: Synthetic oligonucleotide
  Target: LAMA2; (-) strand; PAM type: NRG; PAM sequence: CAG
cgcaatcagcaggtgaacag

SEQ ID NO: 100860 - DNA, 20 bp, Artificial Sequence
  Description of Artificial Sequence: Synthetic oligonucleotide
  Target: LAMA2; (-) strand; PAM type: NRG; PAM sequence: CAG
acacgcaatcagcaggtgaa

SEQ ID NO: 100861 - DNA, 20 bp, Artificial Sequence
  Description of Artificial Sequence: Synthetic oligonucleotide
  Target: LAMA2; (-) strand; PAM type: NRG; PAM sequence: AGG
aggatggacacgcaatcagc

SEQ ID NO: 100862 - DNA, 20 bp, Artificial Sequence
  Description of Artificial Sequence: Synthetic oligonucleotide
  Target: LAMA2; (-) strand; PAM type: NRG; PAM sequence: CAG
caggatggacacgcaatcag

SEQ ID NO: 100863 - DNA, 20 bp, Artificial Sequence
  Description of Artificial Sequence: Synthetic oligonucleotide
  Target: LAMA2; (-) strand; PAM type: NRG; PAM sequence: CAG
cagcaggatggacacgcaat

SEQ ID NO: 100864 - DNA, 20 bp, Artificial Sequence
  Description of Artificial Sequence: Synthetic oligonucleotide
  Target: LAMA2; (-) strand; PAM type: NRG; PAM sequence: TGG
ctgttcttggctcagcagga

SEQ ID NO: 100865 - DNA, 20 bp, Artificial Sequence
  Description of Artificial Sequence: Synthetic oligonucleotide
  Target: LAMA2; (-) strand; PAM type: NRG; PAM sequence: AGG
tcagctgttcttggctcagc

SEQ ID NO: 100866 - DNA, 20 bp, Artificial Sequence
  Description of Artificial Sequence: Synthetic oligonucleotide
  Target: LAMA2; (-) strand; PAM type: NRG; PAM sequence: CAG
ctcagctgttcttggctcag

SEQ ID NO: 100867 - DNA, 20 bp, Artificial Sequence
  Description of Artificial Sequence: Synthetic oligonucleotide
  Target: LAMA2; (-) strand; PAM type: NRG; PAM sequence: CAG
tttctcagctgttcttggct

SEQ ID NO: 100868 - DNA, 20 bp, Artificial Sequence
  Description of Artificial Sequence: Synthetic oligonucleotide
  Target: LAMA2; (-) strand; PAM type: NRG; PAM sequence: TGG
aggattttctcagctgttct

SEQ ID NO: 100869 - DNA, 20 bp, Artificial Sequence
  Description of Artificial Sequence: Synthetic oligonucleotide
  Target: LAMA2; (-) strand; PAM type: NRG; PAM sequence: CAG
aagcacactgaggattttct

SEQ ID NO: 100870 - DNA, 20 bp, Artificial Sequence
  Description of Artificial Sequence: Synthetic oligonucleotide
  Target: LAMA2; (-) strand; PAM type: NRG; PAM sequence: AGG
gaactgactaaagcacactg

SEQ ID NO: 100871 - DNA, 20 bp, Artificial Sequence
  Description of Artificial Sequence: Synthetic oligonucleotide
  Target: LAMA2; (-) strand; PAM type: NRG; PAM sequence: GAG
tgaactgactaaagcacact

SEQ ID NO: 100872 - DNA, 20 bp, Artificial Sequence
  Description of Artificial Sequence: Synthetic oligonucleotide
  Target: LAMA2; (-) strand; PAM type: NRG; PAM sequence: AAG
gtctttcaatgaactgacta

SEQ ID NO: 100873 - DNA, 20 bp, Artificial Sequence
  Description of Artificial Sequence: Synthetic oligonucleotide
  Target: LAMA2; (-) strand; PAM type: NRG; PAM sequence: AGG
gcctccaggagcttcattgt

SEQ ID NO: 100874 - DNA, 20 bp, Artificial Sequence
  Description of Artificial Sequence: Synthetic oligonucleotide
  Target: LAMA2; (-) strand; PAM type: NRG; PAM sequence: TAG
tgcctccaggagcttcattg

SEQ ID NO: 100875 - DNA, 20 bp, Artificial Sequence
  Description of Artificial Sequence: Synthetic oligonucleotide
  Target: LAMA2; (-) strand; PAM type: NRG; PAM sequence: GAG
atcaaataaaatgcctccag

SEQ ID NO: 100876 - DNA, 20 bp, Artificial Sequence
  Description of Artificial Sequence: Synthetic oligonucleotide
  Target: LAMA2; (-) strand; PAM type: NRG; PAM sequence: AGG
aaatcaaataaaatgcctcc

SEQ ID NO: 100877 - DNA, 20 bp, Artificial Sequence
  Description of Artificial Sequence: Synthetic oligonucleotide
  Target: LAMA2; (-) strand; PAM type: NRG; PAM sequence: CAG
caaatcaaataaaatgcctc

SEQ ID NO: 100878 - DNA, 20 bp, Artificial Sequence
  Description of Artificial Sequence: Synthetic oligonucleotide
  Target: LAMA2; (-) strand; PAM type: NRG; PAM sequence: TGG
caaaactgtaaaccctgaga

SEQ ID NO: 100879 - DNA, 20 bp, Artificial Sequence
  Description of Artificial Sequence: Synthetic oligonucleotide
  Target: LAMA2; (-) strand; PAM type: NRG; PAM sequence: GAG
gaggcaaaactgtaaaccct

SEQ ID NO: 100880 - DNA, 20 bp, Artificial Sequence
  Description of Artificial Sequence: Synthetic oligonucleotide
  Target: LAMA2; (-) strand; PAM type: NRG; PAM sequence: AGG
acaaaggcaatgccaacttg

SEQ ID NO: 100881 - DNA, 20 bp, Artificial Sequence
  Description of Artificial Sequence: Synthetic oligonucleotide
  Target: LAMA2; (-) strand; PAM type: NRG; PAM sequence: GAG
cacaaaggcaatgccaactt

SEQ ID NO: 100882 - DNA, 20 bp, Artificial Sequence
  Description of Artificial Sequence: Synthetic oligonucleotide
  Target: LAMA2; (-) strand; PAM type: NRG; PAM sequence: AGG
acatctttaatctgtcacaa

SEQ ID NO: 100883 - DNA, 20 bp, Artificial Sequence
  Description of Artificial Sequence: Synthetic oligonucleotide
  Target: LAMA2; (-) strand; PAM type: NRG; PAM sequence: AAG
cacatctttaatctgtcaca

SEQ ID NO: 100884 - DNA, 20 bp, Artificial Sequence
  Description of Artificial Sequence: Synthetic oligonucleotide
  Target: LAMA2; (-) strand; PAM type: NRG; PAM sequence: AGG
cagtcgattacaaattcagg

SEQ ID NO: 100885 - DNA, 20 bp, Artificial Sequence
  Description of Artificial Sequence: Synthetic oligonucleotide
  Target: LAMA2; (-) strand; PAM type: NRG; PAM sequence: GAG
ccagtcgattacaaattcag

SEQ ID NO: 100886 - DNA, 20 bp, Artificial Sequence
  Description of Artificial Sequence: Synthetic oligonucleotide
  Target: LAMA2; (-) strand; PAM type: NRG; PAM sequence: AGG
gtccagtcgattacaaattc

SEQ ID NO: 100887 - DNA, 20 bp, Artificial Sequence
  Description of Artificial Sequence: Synthetic oligonucleotide
  Target: LAMA2; (-) strand; PAM type: NRG; PAM sequence: CAG
tgtccagtcgattacaaatt

SEQ ID NO: 100888 - DNA, 20 bp, Artificial Sequence
  Description of Artificial Sequence: Synthetic oligonucleotide
  Target: LAMA2; (-) strand; PAM type: NRG; PAM sequence: CAG
caaggcttaaagtatctgtc

SEQ ID NO: 100889 - DNA, 20 bp, Artificial Sequence
  Description of Artificial Sequence: Synthetic oligonucleotide
  Target: LAMA2; (-) strand; PAM type: NRG; PAM sequence: AAG
cagttgtcattcaaggctta

SEQ ID NO: 100890 - DNA, 20 bp, Artificial Sequence
  Description of Artificial Sequence: Synthetic oligonucleotide
  Target: LAMA2; (-) strand; PAM type: NRG; PAM sequence: AGG
gaaacatcagttgtcattca

SEQ ID NO: 100891 - DNA, 20 bp, Artificial Sequence
  Description of Artificial Sequence: Synthetic oligonucleotide
  Target: LAMA2; (-) strand; PAM type: NRG; PAM sequence: AAG
agaaacatcagttgtcattc

SEQ ID NO: 100892 - DNA, 20 bp, Artificial Sequence
  Description of Artificial Sequence: Synthetic oligonucleotide
  Target: LAMA2; (-) strand; PAM type: NRG; PAM sequence: CAG
aaagctgggaaaagaaacat

SEQ ID NO: 100893 - DNA, 20 bp, Artificial Sequence
  Description of Artificial Sequence: Synthetic oligonucleotide
  Target: LAMA2; (-) strand; PAM type: NRG; PAM sequence: AAG
attttcataaaagctgggaa

SEQ ID NO: 100894 - DNA, 20 bp, Artificial Sequence
  Description of Artificial Sequence: Synthetic oligonucleotide
  Target: LAMA2; (-) strand; PAM type: NRG; PAM sequence: GGG
catggattttcataaaagct

SEQ ID NO: 100895 - DNA, 20 bp, Artificial Sequence
  Description of Artificial Sequence: Synthetic oligonucleotide
  Target: LAMA2; (-) strand; PAM type: NRG; PAM sequence: TGG
ccatggattttcataaaagc

SEQ ID NO: 100896 - DNA, 20 bp, Artificial Sequence
  Description of Artificial Sequence: Synthetic oligonucleotide
  Target: LAMA2; (-) strand; PAM type: NRG; PAM sequence: AAG
atgcccatggattttcataa

SEQ ID NO: 100897 - DNA, 20 bp, Artificial Sequence
  Description of Artificial Sequence: Synthetic oligonucleotide
  Target: LAMA2; (-) strand; PAM type: NRG; PAM sequence: TGG
attatgaagcagtatgccca

SEQ ID NO: 100898 - DNA, 20 bp, Artificial Sequence
  Description of Artificial Sequence: Synthetic oligonucleotide
  Target: LAMA2; (-) strand; PAM type: NRG; PAM sequence: CAG
ttcaagagaaaattatgaag

SEQ ID NO: 100899 - DNA, 20 bp, Artificial Sequence
  Description of Artificial Sequence: Synthetic oligonucleotide
  Target: LAMA2; (-) strand; PAM type: NRG; PAM sequence: AAG
tagttcaagagaaaattatg

SEQ ID NO: 100900 - DNA, 20 bp, Artificial Sequence
  Description of Artificial Sequence: Synthetic oligonucleotide
  Target: LAMA2; (-) strand; PAM type: NRG; PAM sequence: GAG
ttacgggttttgtagttcaa

SEQ ID NO: 100901 - DNA, 20 bp, Artificial Sequence
  Description of Artificial Sequence: Synthetic oligonucleotide
  Target: LAMA2; (-) strand; PAM type: NRG; PAM sequence: AAG
gcttacgggttttgtagttc

SEQ ID NO: 100902 - DNA, 20 bp, Artificial Sequence
  Description of Artificial Sequence: Synthetic oligonucleotide
  Target: LAMA2; (-) strand; PAM type: NRG; PAM sequence: TAG
gttactgcttacgggttttg

SEQ ID NO: 100903 - DNA, 20 bp, Artificial Sequence
  Description of Artificial Sequence: Synthetic oligonucleotide
  Target: LAMA2; (-) strand; PAM type: NRG; PAM sequence: GGG
acttcattgttactgcttac

SEQ ID NO: 100904 - DNA, 20 bp, Artificial Sequence
  Description of Artificial Sequence: Synthetic oligonucleotide
  Target: LAMA2; (-) strand; PAM type: NRG; PAM sequence: CGG
gacttcattgttactgctta

SEQ ID NO: 100905 - DNA, 20 bp, Artificial Sequence
  Description of Artificial Sequence: Synthetic oligonucleotide
  Target: LAMA2; (-) strand; PAM type: NRG; PAM sequence: GAG
gctctccacttactgtacgt

SEQ ID NO: 100906 - DNA, 20 bp, Artificial Sequence
  Description of Artificial Sequence: Synthetic oligonucleotide
  Target: LAMA2; (-) strand; PAM type: NRG; PAM sequence: GAG
aaaaaagagagacagcaaga

SEQ ID NO: 100907 - DNA, 20 bp, Artificial Sequence
  Description of Artificial Sequence: Synthetic oligonucleotide
  Target: LAMA2; (-) strand; PAM type: NRG; PAM sequence: GAG
agaaaaaagagagacagcaa

SEQ ID NO: 100908 - DNA, 20 bp, Artificial Sequence
  Description of Artificial Sequence: Synthetic oligonucleotide
  Target: LAMA2; (-) strand; PAM type: NRG; PAM sequence: AAG
taagaaaaaagagagacagc

SEQ ID NO: 100909 - DNA, 20 bp, Artificial Sequence
  Description of Artificial Sequence: Synthetic oligonucleotide
  Target: LAMA2; (-) strand; PAM type: NRG; PAM sequence: CAG
tcagtaagaaaaaagagaga

SEQ ID NO: 100910 - DNA, 20 bp, Artificial Sequence
  Description of Artificial Sequence: Synthetic oligonucleotide
  Target: LAMA2; (-) strand; PAM type: NRG; PAM sequence: GAG
agaatcagtaagaaaaaaga

SEQ ID NO: 100911 - DNA, 20 bp, Artificial Sequence
  Description of Artificial Sequence: Synthetic oligonucleotide
  Target: LAMA2; (-) strand; PAM type: NRG; PAM sequence: GAG
ccagaatcagtaagaaaaaa

SEQ ID NO: 100912 - DNA, 20 bp, Artificial Sequence
  Description of Artificial Sequence: Synthetic oligonucleotide
  Target: LAMA2; (-) strand; PAM type: NRG; PAM sequence: AAG
atccagaatcagtaagaaaa

SEQ ID NO: 100913 - DNA, 20 bp, Artificial Sequence
  Description of Artificial Sequence: Synthetic oligonucleotide
  Target: LAMA2; (-) strand; PAM type: NRG; PAM sequence: AAG
ctagcgaatccagaatcagt

SEQ ID NO: 100914 - DNA, 20 bp, Artificial Sequence
  Description of Artificial Sequence: Synthetic oligonucleotide
  Target: LAMA2; (-) strand; PAM type: NRG; PAM sequence: CAG
ggcactagcgaatccagaat

SEQ ID NO: 100915 - DNA, 20 bp, Artificial Sequence
  Description of Artificial Sequence: Synthetic oligonucleotide
  Target: LAMA2; (-) strand; PAM type: NRG; PAM sequence: CAG
caatatggcactagcgaatc

SEQ ID NO: 100916 - DNA, 20 bp, Artificial Sequence
  Description of Artificial Sequence: Synthetic oligonucleotide
  Target: LAMA2; (-) strand; PAM type: NRG; PAM sequence: TAG
atgtactttcaatatggcac

SEQ ID NO: 100917 - DNA, 20 bp, Artificial Sequence
  Description of Artificial Sequence: Synthetic oligonucleotide
  Target: LAMA2; (-) strand; PAM type: NRG; PAM sequence: TGG
atttcaatgtactttcaata

SEQ ID NO: 100918 - DNA, 20 bp, Artificial Sequence
  Description of Artificial Sequence: Synthetic oligonucleotide
  Target: LAMA2; (-) strand; PAM type: NRG; PAM sequence: TAG
caagatccaagaattatatt

SEQ ID NO: 100919 - DNA, 20 bp, Artificial Sequence
  Description of Artificial Sequence: Synthetic oligonucleotide
  Target: LAMA2; (-) strand; PAM type: NRG; PAM sequence: AAG
tttgaatgtatgcaagatcc

SEQ ID NO: 100920 - DNA, 20 bp, Artificial Sequence
  Description of Artificial Sequence: Synthetic oligonucleotide
  Target: LAMA2; (-) strand; PAM type: NRG; PAM sequence: AAG
ttttggatttgaatgtatgc

SEQ ID NO: 100921 - DNA, 20 bp, Artificial Sequence
  Description of Artificial Sequence: Synthetic oligonucleotide
  Target: LAMA2; (-) strand; PAM type: NRG; PAM sequence: TGG
aatttataaataacctattt

SEQ ID NO: 100922 - DNA, 20 bp, Artificial Sequence
  Description of Artificial Sequence: Synthetic oligonucleotide
  Target: LAMA2; (-) strand; PAM type: NRG; PAM sequence: GAG
aggaaaagaatactatagaa

SEQ ID NO: 100923 - DNA, 20 bp, Artificial Sequence
  Description of Artificial Sequence: Synthetic oligonucleotide
  Target: LAMA2; (-) strand; PAM type: NRG; PAM sequence: AAG
tgaggaaaagaatactatag

SEQ ID NO: 100924 - DNA, 20 bp, Artificial Sequence
  Description of Artificial Sequence: Synthetic oligonucleotide
  Target: LAMA2; (-) strand; PAM type: NRG; PAM sequence: TAG
ccttgaggaaaagaatacta

SEQ ID NO: 100925 - DNA, 20 bp, Artificial Sequence
  Description of Artificial Sequence: Synthetic oligonucleotide
  Target: LAMA2; (-) strand; PAM type: NRG; PAM sequence: AAG
aaataaatttccttgaggaa

SEQ ID NO: 100926 - DNA, 20 bp, Artificial Sequence
  Description of Artificial Sequence: Synthetic oligonucleotide
  Target: LAMA2; (-) strand; PAM type: NRG; PAM sequence: AGG
tgctaaaataaatttccttg

SEQ ID NO: 100927 - DNA, 20 bp, Artificial Sequence
  Description of Artificial Sequence: Synthetic oligonucleotide
  Target: LAMA2; (-) strand; PAM type: NRG; PAM sequence: GAG
gtgctaaaataaatttcctt

SEQ ID NO: 100928 - DNA, 20 bp, Artificial Sequence
  Description of Artificial Sequence: Synthetic oligonucleotide
  Target: LAMA2; (-) strand; PAM type: NRG; PAM sequence: AGG
taggtaaatgttgaaataaa

SEQ ID NO: 100929 - DNA, 20 bp, Artificial Sequence
  Description of Artificial Sequence: Synthetic oligonucleotide
  Target: LAMA2; (-) strand; PAM type: NRG; PAM sequence: AAG
ataggtaaatgttgaaataa

SEQ ID NO: 100930 - DNA, 20 bp, Artificial Sequence
  Description of Artificial Sequence: Synthetic oligonucleotide
  Target: LAMA2; (-) strand; PAM type: NRG; PAM sequence: AGG
tgcacaaatactattacaat

SEQ ID NO: 100931 - DNA, 20 bp, Artificial Sequence
  Description of Artificial Sequence: Synthetic oligonucleotide
  Target: LAMA2; (-) strand; PAM type: NRG; PAM sequence: TAG
atgcacaaatactattacaa

SEQ ID NO: 100932 - DNA, 20 bp, Artificial Sequence
  Description of Artificial Sequence: Synthetic oligonucleotide
  Target: LAMA2; (-) strand; PAM type: NRG; PAM sequence: AAG
ctcaaacaatatgctaaaac

SEQ ID NO: 100933 - DNA, 20 bp, Artificial Sequence
  Description of Artificial Sequence: Synthetic oligonucleotide
  Target: LAMA2; (-) strand; PAM type: NRG; PAM sequence: TAG
tttaagatactattaagatt

SEQ ID NO: 100934 - DNA, 20 bp, Artificial Sequence
  Description of Artificial Sequence: Synthetic oligonucleotide
  Target: LAMA2; (-) strand; PAM type: NRG; PAM sequence: AAG
cttctatttaagatactatt

SEQ ID NO: 100935 - DNA, 20 bp, Artificial Sequence
  Description of Artificial Sequence: Synthetic oligonucleotide
  Target: LAMA2; (-) strand; PAM type: NRG; PAM sequence: AAG
aaacaaaaattcttctattt

SEQ ID NO: 100936 - DNA, 20 bp, Artificial Sequence
  Description of Artificial Sequence: Synthetic oligonucleotide
  Target: LAMA2; (-) strand; PAM type: NRG; PAM sequence: TAG
gaggttaactcttataaaac

SEQ ID NO: 100937 - DNA, 20 bp, Artificial Sequence
  Description of Artificial Sequence: Synthetic oligonucleotide
  Target: LAMA2; (-) strand; PAM type: NRG; PAM sequence: AGG
taatccagctttagcttctg

SEQ ID NO: 100938 - DNA, 20 bp, Artificial Sequence
  Description of Artificial Sequence: Synthetic oligonucleotide
  Target: LAMA2; (-) strand; PAM type: NRG; PAM sequence: GAG
ttaatccagctttagcttct

SEQ ID NO: 100939 - DNA, 20 bp, Artificial Sequence
  Description of Artificial Sequence: Synthetic oligonucleotide
  Target: LAMA2; (-) strand; PAM type: NRG; PAM sequence: TAG
tgtattttttaatccagctt

SEQ ID NO: 100940 - DNA, 20 bp, Artificial Sequence
  Description of Artificial Sequence: Synthetic oligonucleotide
  Target: LAMA2; (-) strand; PAM type: NRG; PAM sequence: CAG
ttttggtgtattttttaatc

SEQ ID NO: 100941 - DNA, 20 bp, Artificial Sequence
  Description of Artificial Sequence: Synthetic oligonucleotide
  Target: LAMA2; (-) strand; PAM type: NRG; PAM sequence: TGG
aacacccagtcttaactttt

SEQ ID NO: 100942 - DNA, 20 bp, Artificial Sequence
  Description of Artificial Sequence: Synthetic oligonucleotide
  Target: LAMA2; (-) strand; PAM type: NRG; PAM sequence: CAG
ctattttcccaaataacacc

SEQ ID NO: 100943 - DNA, 20 bp, Artificial Sequence
  Description of Artificial Sequence: Synthetic oligonucleotide
  Target: LAMA2; (-) strand; PAM type: NRG; PAM sequence: AAG
ttaaagatggttaaaataca

SEQ ID NO: 100944 - DNA, 20 bp, Artificial Sequence
  Description of Artificial Sequence: Synthetic oligonucleotide
  Target: LAMA2; (-) strand; PAM type: NRG; PAM sequence: TGG
taatacattttcattaaaga

SEQ ID NO: 100945 - DNA, 20 bp, Artificial Sequence
  Description of Artificial Sequence: Synthetic oligonucleotide
  Target: LAMA2; (-) strand; PAM type: NRG; PAM sequence: AAG
agtgtaatacattttcatta

SEQ ID NO: 100946 - DNA, 20 bp, Artificial Sequence
  Description of Artificial Sequence: Synthetic oligonucleotide
  Target: LAMA2; (-) strand; PAM type: NRG; PAM sequence: CAG
cctaccttcacatttatttt

SEQ ID NO: 100947 - DNA, 20 bp, Artificial Sequence
  Description of Artificial Sequence: Synthetic oligonucleotide
  Target: LAMA2; (-) strand; PAM type: NRG; PAM sequence: CAG
gacaatataaatgtatttga

SEQ ID NO: 100948 - DNA, 20 bp, Artificial Sequence
  Description of Artificial Sequence: Synthetic oligonucleotide
  Target: LAMA2; (-) strand; PAM type: NRG; PAM sequence: TAG
tcattatacttgggaagaat

SEQ ID NO: 100949 - DNA, 20 bp, Artificial Sequence
  Description of Artificial Sequence: Synthetic oligonucleotide
  Target: LAMA2; (-) strand; PAM type: NRG; PAM sequence: AAG
aatatatcattatacttggg

SEQ ID NO: 100950 - DNA, 20 bp, Artificial Sequence
  Description of Artificial Sequence: Synthetic oligonucleotide
  Target: LAMA2; (-) strand; PAM type: NRG; PAM sequence: GGG
taaaatatatcattatactt

SEQ ID NO: 100951 - DNA, 20 bp, Artificial Sequence
  Description of Artificial Sequence: Synthetic oligonucleotide
  Target: LAMA2; (-) strand; PAM type: NRG; PAM sequence: TGG
ttaaaatatatcattatact

SEQ ID NO: 100952 - DNA, 20 bp, Artificial Sequence
  Description of Artificial Sequence: Synthetic oligonucleotide
  Target: LAMA2; (-) strand; PAM type: NRG; PAM sequence: TAG
aatattataaaatactttga

SEQ ID NO: 100953 - DNA, 20 bp, Artificial Sequence
  Description of Artificial Sequence: Synthetic oligonucleotide
  Target: LAMA2; (-) strand; PAM type: NRG; PAM sequence: AAG
taataatttatttgacttga

SEQ ID NO: 100954 - DNA, 20 bp, Artificial Sequence
  Description of Artificial Sequence: Synthetic oligonucleotide
  Target: LAMA2; (-) strand; PAM type: NRG; PAM sequence: TAG
aagaatatctatatattatc

SEQ ID NO: 100955 - DNA, 20 bp, Artificial Sequence
  Description of Artificial Sequence: Synthetic oligonucleotide
  Target: LAMA2; (-) strand; PAM type: NRG; PAM sequence: AAG
attcaaggactgtttacatt

SEQ ID NO: 100956 - DNA, 20 bp, Artificial Sequence
  Description of Artificial Sequence: Synthetic oligonucleotide
  Target: LAMA2; (-) strand; PAM type: NRG; PAM sequence: AGG
aagtgatgattaataattca

SEQ ID NO: 100957 - DNA, 20 bp, Artificial Sequence
  Description of Artificial Sequence: Synthetic oligonucleotide
  Target: LAMA2; (-) strand; PAM type: NRG; PAM sequence: AAG
aaagtgatgattaataattc

SEQ ID NO: 100958 - DNA, 20 bp, Artificial Sequence
  Description of Artificial Sequence: Synthetic oligonucleotide
  Target: LAMA2; (-) strand; PAM type: NRG; PAM sequence: AAG
tgcttctggatagttaataa

SEQ ID NO: 100959 - DNA, 20 bp, Artificial Sequence
  Description of Artificial Sequence: Synthetic oligonucleotide
  Target: LAMA2; (-) strand; PAM type: NRG; PAM sequence: TAG
atttcaagtttgcttctgga

SEQ ID NO: 100960 - DNA, 20 bp, Artificial Sequence
  Description of Artificial Sequence: Synthetic oligonucleotide
  Target: LAMA2; (-) strand; PAM type: NRG; PAM sequence: TGG
ttttatttcaagtttgcttc

SEQ ID NO: 100961 - DNA, 20 bp, Artificial Sequence
  Description of Artificial Sequence: Synthetic oligonucleotide
  Target: LAMA2; (-) strand; PAM type: NRG; PAM sequence: AAG
taatatgatctttttatttc

SEQ ID NO: 100962 - DNA, 20 bp, Artificial Sequence
  Description of Artificial Sequence: Synthetic oligonucleotide
  Target: LAMA2; (-) strand; PAM type: NRG; PAM sequence: CAG
tcccattatattatctaccc

SEQ ID NO: 100963 - DNA, 20 bp, Artificial Sequence
  Description of Artificial Sequence: Synthetic oligonucleotide
  Target: LAMA2; (-) strand; PAM type: NRG; PAM sequence: AAG
agaatgccaattctctttaa

SEQ ID NO: 100964 - DNA, 20 bp, Artificial Sequence
  Description of Artificial Sequence: Synthetic oligonucleotide
  Target: LAMA2; (-) strand; PAM type: NRG; PAM sequence: CAG
aagccattgttgttgatggg

SEQ ID NO: 100965 - DNA, 20 bp, Artificial Sequence
  Description of Artificial Sequence: Synthetic oligonucleotide
  Target: LAMA2; (-) strand; PAM type: NRG; PAM sequence: GGG
aaaaagccattgttgttgat

SEQ ID NO: 100966 - DNA, 20 bp, Artificial Sequence
  Description of Artificial Sequence: Synthetic oligonucleotide
  Target: LAMA2; (-) strand; PAM type: NRG; PAM sequence: TGG
gaaaaagccattgttgttga

SEQ ID NO: 100967 - DNA, 20 bp, Artificial Sequence
  Description of Artificial Sequence: Synthetic oligonucleotide
  Target: LAMA2; (-) strand; PAM type: NRG; PAM sequence: AAG
atcatcaacaataaatgaaa

SEQ ID NO: 100968 - DNA, 20 bp, Artificial Sequence
  Description of Artificial Sequence: Synthetic oligonucleotide
  Target: LAMA2; (-) strand; PAM type: NRG; PAM sequence: AAG
atgtattcaaaatgttaaaa

SEQ ID NO: 100969 - DNA, 20 bp, Artificial Sequence
  Description of Artificial Sequence: Synthetic oligonucleotide
  Target: LAMA2; (-) strand; PAM type: NRG; PAM sequence: AAG
cccacatatgtgatagggaa

SEQ ID NO: 100970 - DNA, 20 bp, Artificial Sequence
  Description of Artificial Sequence: Synthetic oligonucleotide
  Target: LAMA2; (-) strand; PAM type: NRG; PAM sequence: GGG
agaaacccacatatgtgata

SEQ ID NO: 100971 - DNA, 20 bp, Artificial Sequence
  Description of Artificial Sequence: Synthetic oligonucleotide
  Target: LAMA2; (-) strand; PAM type: NRG; PAM sequence: AGG
tagaaacccacatatgtgat

SEQ ID NO: 100972 - DNA, 20 bp, Artificial Sequence
  Description of Artificial Sequence: Synthetic oligonucleotide
  Target: LAMA2; (-) strand; PAM type: NRG; PAM sequence: TAG
ttagaaacccacatatgtga

SEQ ID NO: 100973 - DNA, 20 bp, Artificial Sequence
  Description of Artificial Sequence: Synthetic oligonucleotide
  Target: LAMA2; (-) strand; PAM type: NRG; PAM sequence: TAG
cacatgggacaagtggagat

SEQ ID NO: 100974 - DNA, 20 bp, Artificial Sequence
  Description of Artificial Sequence: Synthetic oligonucleotide
  Target: LAMA2; (-) strand; PAM type: NRG; PAM sequence: GAG
aatatcacatgggacaagtg

SEQ ID NO: 100975 - DNA, 20 bp, Artificial Sequence
  Description of Artificial Sequence: Synthetic oligonucleotide
  Target: LAMA2; (-) strand; PAM type: NRG; PAM sequence: TGG
ttaatatcacatgggacaag

SEQ ID NO: 100976 - DNA, 20 bp, Artificial Sequence
  Description of Artificial Sequence: Synthetic oligonucleotide
  Target: LAMA2; (-) strand; PAM type: NRG; PAM sequence: AAG
ttcttaatatcacatgggac

SEQ ID NO: 100977 - DNA, 20 bp, Artificial Sequence
  Description of Artificial Sequence: Synthetic oligonucleotide
  Target: LAMA2; (-) strand; PAM type: NRG; PAM sequence: GGG
cccttttcttaatatcacat

SEQ ID NO: 100978 - DNA, 20 bp, Artificial Sequence
  Description of Artificial Sequence: Synthetic oligonucleotide
  Target: LAMA2; (-) strand; PAM type: NRG; PAM sequence: TGG
gcccttttcttaatatcaca

SEQ ID NO: 100979 - DNA, 20 bp, Artificial Sequence
  Description of Artificial Sequence: Synthetic oligonucleotide
  Target: LAMA2; (-) strand; PAM type: NRG; PAM sequence: TGG
tagctttgtaactggaggat

SEQ ID NO: 100980 - DNA, 20 bp, Artificial Sequence
  Description of Artificial Sequence: Synthetic oligonucleotide
  Target: LAMA2; (-) strand; PAM type: NRG; PAM sequence: AGG
tggtgtagctttgtaactgg

SEQ ID NO: 100981 - DNA, 20 bp, Artificial Sequence
  Description of Artificial Sequence: Synthetic oligonucleotide
  Target: LAMA2; (-) strand; PAM type: NRG; PAM sequence: GAG
ctggtgtagctttgtaactg

SEQ ID NO: 100982 - DNA, 20 bp, Artificial Sequence
  Description of Artificial Sequence: Synthetic oligonucleotide
  Target: LAMA2; (-) strand; PAM type: NRG; PAM sequence: TGG
aactggtgtagctttgtaac

SEQ ID NO: 100983 - DNA, 20 bp, Artificial Sequence
  Description of Artificial Sequence: Synthetic oligonucleotide
  Target: LAMA2; (-) strand; PAM type: NRG; PAM sequence: TAG
taagaattataaaactggtg

SEQ ID NO: 100984 - DNA, 20 bp, Artificial Sequence
  Description of Artificial Sequence: Synthetic oligonucleotide
  Target: LAMA2; (-) strand; PAM type: NRG; PAM sequence: TGG
gcaaataagaattataaaac

SEQ ID NO: 100985 - DNA, 20 bp, Artificial Sequence
  Description of Artificial Sequence: Synthetic oligonucleotide
  Target: LAMA2; (-) strand; PAM type: NRG; PAM sequence: AAG
ggggcaagaataaagcaaat

SEQ ID NO: 100986 - DNA, 20 bp, Artificial Sequence
  Description of Artificial Sequence: Synthetic oligonucleotide
  Target: LAMA2; (-) strand; PAM type: NRG; PAM sequence: AAG
ttccttgtggggcaagaata

SEQ ID NO: 100987 - DNA, 20 bp, Artificial Sequence
  Description of Artificial Sequence: Synthetic oligonucleotide
  Target: LAMA2; (-) strand; PAM type: NRG; PAM sequence: AAG
aatacatttccttgtggggc

SEQ ID NO: 100988 - DNA, 20 bp, Artificial Sequence
  Description of Artificial Sequence: Synthetic oligonucleotide
  Target: LAMA2; (-) strand; PAM type: NRG; PAM sequence: GGG
tgtaaatacatttccttgtg

SEQ ID NO: 100989 - DNA, 20 bp, Artificial Sequence
  Description of Artificial Sequence: Synthetic oligonucleotide
  Target: LAMA2; (-) strand; PAM type: NRG; PAM sequence: GGG
ctgtaaatacatttccttgt

SEQ ID NO: 100990 - DNA, 20 bp, Artificial Sequence
  Description of Artificial Sequence: Synthetic oligonucleotide
  Target: LAMA2; (-) strand; PAM type: NRG; PAM sequence: TGG
cctgtaaatacatttccttg

SEQ ID NO: 100991 - DNA, 20 bp, Artificial Sequence
  Description of Artificial Sequence: Synthetic oligonucleotide
  Target: LAMA2; (-) strand; PAM type: NRG; PAM sequence: CAG
gaatataaacacttccagtc

SEQ ID NO: 100992 - DNA, 20 bp, Artificial Sequence
  Description of Artificial Sequence: Synthetic oligonucleotide
  Target: LAMA2; (-) strand; PAM type: NRG; PAM sequence: CAG
aaaaagaatataaacacttc

SEQ ID NO: 100993 - DNA, 20 bp, Artificial Sequence
  Description of Artificial Sequence: Synthetic oligonucleotide
  Target: LAMA2; (-) strand; PAM type: NRG; PAM sequence: AAG
aaaactgctattcttttaaa

SEQ ID NO: 100994 - DNA, 20 bp, Artificial Sequence
  Description of Artificial Sequence: Synthetic oligonucleotide
  Target: LAMA2; (-) strand; PAM type: NRG; PAM sequence: TGG
tataatttaatatttttttc

SEQ ID NO: 100995 - DNA, 20 bp, Artificial Sequence
  Description of Artificial Sequence: Synthetic oligonucleotide
  Target: LAMA2; (-) strand; PAM type: NRG; PAM sequence: TAG
tgtgctttagcaaaagagtc

SEQ ID NO: 100996 - DNA, 20 bp, Artificial Sequence
  Description of Artificial Sequence: Synthetic oligonucleotide
  Target: LAMA2; (-) strand; PAM type: NRG; PAM sequence: GAG
ttaactgtgctttagcaaaa

SEQ ID NO: 100997 - DNA, 20 bp, Artificial Sequence
  Description of Artificial Sequence: Synthetic oligonucleotide
  Target: LAMA2; (-) strand; PAM type: NRG; PAM sequence: AAG
aattaactgtgctttagcaa

SEQ ID NO: 100998 - DNA, 20 bp, Artificial Sequence
  Description of Artificial Sequence: Synthetic oligonucleotide
  Target: LAMA2; (-) strand; PAM type: NRG; PAM sequence: TAG
taagataattaactgtgctt

SEQ ID NO: 100999 - DNA, 20 bp, Artificial Sequence
  Description of Artificial Sequence: Synthetic oligonucleotide
  Target: LAMA2; (-) strand; PAM type: NRG; PAM sequence: AAG
aatctatacagcataattat

SEQ ID NO: 101000 - DNA, 20 bp, Artificial Sequence
  Description of Artificial Sequence: Synthetic oligonucleotide
  Target: LAMA2; (-) strand; PAM type: NRG; PAM sequence: CAG
cagtatatggaaaatctata

SEQ ID NO: 101001 - DNA, 20 bp, Artificial Sequence
  Description of Artificial Sequence: Synthetic oligonucleotide
  Target: LAMA2; (-) strand; PAM type: NRG; PAM sequence: TGG
taatgcttaagagcagtata

SEQ ID NO: 101002 - DNA, 20 bp, Artificial Sequence
  Description of Artificial Sequence: Synthetic oligonucleotide
  Target: LAMA2; (-) strand; PAM type: NRG; PAM sequence: CAG
aaatcactaatgcttaagag

SEQ ID NO: 101003 - DNA, 20 bp, Artificial Sequence
  Description of Artificial Sequence: Synthetic oligonucleotide
  Target: LAMA2; (-) strand; PAM type: NRG; PAM sequence: GAG
tggaaatcactaatgcttaa

SEQ ID NO: 101004 - DNA, 20 bp, Artificial Sequence
  Description of Artificial Sequence: Synthetic oligonucleotide
  Target: LAMA2; (-) strand; PAM type: NRG; PAM sequence: AAG
agtggaaatcactaatgctt

SEQ ID NO: 101005 - DNA, 20 bp, Artificial Sequence
  Description of Artificial Sequence: Synthetic oligonucleotide
  Target: LAMA2; (-) strand; PAM type: NRG; PAM sequence: TGG
aaaacattcctagaagtaag

SEQ ID NO: 101006 - DNA, 20 bp, Artificial Sequence
  Description of Artificial Sequence: Synthetic oligonucleotide
  Target: LAMA2; (-) strand; PAM type: NRG; PAM sequence: AAG
gagaaaacattcctagaagt

SEQ ID NO: 101007 - DNA, 20 bp, Artificial Sequence
  Description of Artificial Sequence: Synthetic oligonucleotide
  Target: LAMA2; (-) strand; PAM type: NRG; PAM sequence: AAG
tgaagagaaaacattcctag

SEQ ID NO: 101008 - DNA, 20 bp, Artificial Sequence
  Description of Artificial Sequence: Synthetic oligonucleotide
  Target: LAMA2; (-) strand; PAM type: NRG; PAM sequence: TAG
aggtgaagagaaaacattcc

SEQ ID NO: 101009 - DNA, 20 bp, Artificial Sequence
  Description of Artificial Sequence: Synthetic oligonucleotide
  Target: LAMA2; (-) strand; PAM type: NRG; PAM sequence: GAG
ttagtttagtgaaaggtgaa

SEQ ID NO: 101010 - DNA, 20 bp, Artificial Sequence
  Description of Artificial Sequence: Synthetic oligonucleotide
  Target: LAMA2; (-) strand; PAM type: NRG; PAM sequence: AAG
agttagtttagtgaaaggtg

SEQ ID NO: 101011 - DNA, 20 bp, Artificial Sequence
  Description of Artificial Sequence: Synthetic oligonucleotide
  Target: LAMA2; (-) strand; PAM type: NRG; PAM sequence: AGG
cttagagttagtttagtgaa

SEQ ID NO: 101012 - DNA, 20 bp, Artificial Sequence
  Description of Artificial Sequence: Synthetic oligonucleotide
  Target: LAMA2; (-) strand; PAM type: NRG; PAM sequence: AAG
tcttagagttagtttagtga

SEQ ID NO: 101013 - DNA, 20 bp, Artificial Sequence
  Description of Artificial Sequence: Synthetic oligonucleotide
  Target: LAMA2; (-) strand; PAM type: NRG; PAM sequence: TAG
aacaattcttagagttagtt

SEQ ID NO: 101014 - DNA, 20 bp, Artificial Sequence
  Description of Artificial Sequence: Synthetic oligonucleotide
  Target: LAMA2; (-) strand; PAM type: NRG; PAM sequence: TAG
tgtgtaacaattcttagagt

SEQ ID NO: 101015 - DNA, 20 bp, Artificial Sequence
  Description of Artificial Sequence: Synthetic oligonucleotide
  Target: LAMA2; (-) strand; PAM type: NRG; PAM sequence: GAG
actctgtgtaacaattctta

SEQ ID NO: 101016 - DNA, 20 bp, Artificial Sequence
  Description of Artificial Sequence: Synthetic oligonucleotide
  Target: LAMA2; (-) strand; PAM type: NRG; PAM sequence: TAG
atactctgtgtaacaattct

SEQ ID NO: 101017 - DNA, 20 bp, Artificial Sequence
  Description of Artificial Sequence: Synthetic oligonucleotide
  Target: LAMA2; (-) strand; PAM type: NRG; PAM sequence: AAG
gagaaaagatgaaaagtcta

SEQ ID NO: 101018 - DNA, 20 bp, Artificial Sequence
  Description of Artificial Sequence: Synthetic oligonucleotide
  Target: LAMA2; (-) strand; PAM type: NRG; PAM sequence: AAG
agaagaagagaaaagatgaa

SEQ ID NO: 101019 - DNA, 20 bp, Artificial Sequence
  Description of Artificial Sequence: Synthetic oligonucleotide
  Target: LAMA2; (-) strand; PAM type: NRG; PAM sequence: AAG
gaaattttagaagaagagaa

SEQ ID NO: 101020 - DNA, 20 bp, Artificial Sequence
  Description of Artificial Sequence: Synthetic oligonucleotide
  Target: LAMA2; (-) strand; PAM type: NRG; PAM sequence: GAG
cgggagaaattttagaagaa

SEQ ID NO: 101021 - DNA, 20 bp, Artificial Sequence
  Description of Artificial Sequence: Synthetic oligonucleotide
  Target: LAMA2; (-) strand; PAM type: NRG; PAM sequence: AAG
aacgggagaaattttagaag

SEQ ID NO: 101022 - DNA, 20 bp, Artificial Sequence
  Description of Artificial Sequence: Synthetic oligonucleotide
  Target: LAMA2; (-) strand; PAM type: NRG; PAM sequence: AAG
cataacgggagaaattttag

SEQ ID NO: 101023 - DNA, 20 bp, Artificial Sequence
  Description of Artificial Sequence: Synthetic oligonucleotide
  Target: LAMA2; (-) strand; PAM type: NRG; PAM sequence: TAG
ttccataacgggagaaattt

SEQ ID NO: 101024 - DNA, 20 bp, Artificial Sequence
  Description of Artificial Sequence: Synthetic oligonucleotide
  Target: LAMA2; (-) strand; PAM type: NRG; PAM sequence: GAG
ggcatatttttccataacgg

SEQ ID NO: 101025 - DNA, 20 bp, Artificial Sequence
  Description of Artificial Sequence: Synthetic oligonucleotide
  Target: LAMA2; (-) strand; PAM type: NRG; PAM sequence: GGG
atggcatatttttccataac

SEQ ID NO: 101026 - DNA, 20 bp, Artificial Sequence
  Description of Artificial Sequence: Synthetic oligonucleotide
  Target: LAMA2; (-) strand; PAM type: NRG; PAM sequence: CGG
catggcatatttttccataa

SEQ ID NO: 101027 - DNA, 20 bp, Artificial Sequence
  Description of Artificial Sequence: Synthetic oligonucleotide
  Target: LAMA2; (-) strand; PAM type: NRG; PAM sequence: TGG
aggccaagatcatagaatca

SEQ ID NO: 101028 - DNA, 20 bp, Artificial Sequence
  Description of Artificial Sequence: Synthetic oligonucleotide
  Target: LAMA2; (-) strand; PAM type: NRG; PAM sequence: TAG
cctgggaaaggccaagatca

SEQ ID NO: 101029 - DNA, 20 bp, Artificial Sequence
  Description of Artificial Sequence: Synthetic oligonucleotide
  Target: LAMA2; (-) strand; PAM type: NRG; PAM sequence: AAG
accgaatcctgggaaaggcc

SEQ ID NO: 101030 - DNA, 20 bp, Artificial Sequence
  Description of Artificial Sequence: Synthetic oligonucleotide
  Target: LAMA2; (-) strand; PAM type: NRG; PAM sequence: AGG
tagaaaccgaatcctgggaa

SEQ ID NO: 101031 - DNA, 20 bp, Artificial Sequence
  Description of Artificial Sequence: Synthetic oligonucleotide
  Target: LAMA2; (-) strand; PAM type: NRG; PAM sequence: AAG
gtagaaaccgaatcctggga

SEQ ID NO: 101032 - DNA, 20 bp, Artificial Sequence
  Description of Artificial Sequence: Synthetic oligonucleotide
  Target: LAMA2; (-) strand; PAM type: NRG; PAM sequence: GGG
agaagtagaaaccgaatcct

SEQ ID NO: 101033 - DNA, 20 bp, Artificial Sequence
  Description of Artificial Sequence: Synthetic oligonucleotide
  Target: LAMA2; (-) strand; PAM type: NRG; PAM sequence: TGG
tagaagtagaaaccgaatcc

SEQ ID NO: 101034 - DNA, 20 bp, Artificial Sequence
  Description of Artificial Sequence: Synthetic oligonucleotide
  Target: LAMA2; (-) strand; PAM type: NRG; PAM sequence: TAG
ttcaaaactaggagtagaag

SEQ ID NO: 101035 - DNA, 20 bp, Artificial Sequence
  Description of Artificial Sequence: Synthetic oligonucleotide
  Target: LAMA2; (-) strand; PAM type: NRG; PAM sequence: AAG
gatttcaaaactaggagtag

SEQ ID NO: 101036 - DNA, 20 bp, Artificial Sequence
  Description of Artificial Sequence: Synthetic oligonucleotide
  Target: LAMA2; (-) strand; PAM type: NRG; PAM sequence: TAG
tctgatttcaaaactaggag

SEQ ID NO: 101037 - DNA, 20 bp, Artificial Sequence
  Description of Artificial Sequence: Synthetic oligonucleotide
  Target: LAMA2; (-) strand; PAM type: NRG; PAM sequence: GAG
ttatctgatttcaaaactag

SEQ ID NO: 101038 - DNA, 20 bp, Artificial Sequence
  Description of Artificial Sequence: Synthetic oligonucleotide
  Target: LAMA2; (-) strand; PAM type: NRG; PAM sequence: AGG
ttttatctgatttcaaaact

SEQ ID NO: 101039 - DNA, 20 bp, Artificial Sequence
  Description of Artificial Sequence: Synthetic oligonucleotide
  Target: LAMA2; (-) strand; PAM type: NRG; PAM sequence: TAG
attttatctgatttcaaaac

SEQ ID NO: 101040 - DNA, 20 bp, Artificial Sequence
  Description of Artificial Sequence: Synthetic oligonucleotide
  Target: LAMA2; (-) strand; PAM type: NRG; PAM sequence: CAG
aaggaaaattgagaataagt

SEQ ID NO: 101041 - DNA, 20 bp, Artificial Sequence
  Description of Artificial Sequence: Synthetic oligonucleotide
  Target: LAMA2; (-) strand; PAM type: NRG; PAM sequence: AAG
ttaaaaggaaaattgagaat

SEQ ID NO: 101042 - DNA, 20 bp, Artificial Sequence
  Description of Artificial Sequence: Synthetic oligonucleotide
  Target: LAMA2; (-) strand; PAM type: NRG; PAM sequence: GAG
aatatattaaaaggaaaatt

SEQ ID NO: 101043 - DNA, 20 bp, Artificial Sequence
  Description of Artificial Sequence: Synthetic oligonucleotide
  Target: LAMA2; (-) strand; PAM type: NRG; PAM sequence: AGG
ggatacagaaatatattaaa

SEQ ID NO: 101044 - DNA, 20 bp, Artificial Sequence
  Description of Artificial Sequence: Synthetic oligonucleotide
  Target: LAMA2; (-) strand; PAM type: NRG; PAM sequence: AAG
aggatacagaaatatattaa

SEQ ID NO: 101045 - DNA, 20 bp, Artificial Sequence
  Description of Artificial Sequence: Synthetic oligonucleotide
  Target: LAMA2; (-) strand; PAM type: NRG; PAM sequence: CAG
actaatttagcttaaggata

SEQ ID NO: 101046 - DNA, 20 bp, Artificial Sequence
  Description of Artificial Sequence: Synthetic oligonucleotide
  Target: LAMA2; (-) strand; PAM type: NRG; PAM sequence: AGG
tcttgcactaatttagctta

SEQ ID NO: 101047 - DNA, 20 bp, Artificial Sequence
  Description of Artificial Sequence: Synthetic oligonucleotide
  Target: LAMA2; (-) strand; PAM type: NRG; PAM sequence: AAG
ctcttgcactaatttagctt

SEQ ID NO: 101048 - DNA, 20 bp, Artificial Sequence
  Description of Artificial Sequence: Synthetic oligonucleotide
  Target: LAMA2; (-) strand; PAM type: NRG; PAM sequence: TAG
tttggtctcttgcactaatt

SEQ ID NO: 101049 - DNA, 20 bp, Artificial Sequence
  Description of Artificial Sequence: Synthetic oligonucleotide
  Target: LAMA2; (-) strand; PAM type: NRG; PAM sequence: TGG
ccccaggtgaatccattttt

SEQ ID NO: 101050 - DNA, 20 bp, Artificial Sequence
  Description of Artificial Sequence: Synthetic oligonucleotide
  Target: LAMA2; (-) strand; PAM type: NRG; PAM sequence: AGG
tcctgcagatcaaacacccc

SEQ ID NO: 101051 - DNA, 20 bp, Artificial Sequence
  Description of Artificial Sequence: Synthetic oligonucleotide
  Target: LAMA2; (-) strand; PAM type: NRG; PAM sequence: CAG
gtcctgcagatcaaacaccc

SEQ ID NO: 101052 - DNA, 20 bp, Artificial Sequence
  Description of Artificial Sequence: Synthetic oligonucleotide
  Target: LAMA2; (-) strand; PAM type: NRG; PAM sequence: CAG
atgtgctaaaacaggtcctg

SEQ ID NO: 101053 - DNA, 20 bp, Artificial Sequence
  Description of Artificial Sequence: Synthetic oligonucleotide
  Target: LAMA2; (-) strand; PAM type: NRG; PAM sequence: AGG
atgattacatgtgctaaaac

SEQ ID NO: 101054 - DNA, 20 bp, Artificial Sequence
  Description of Artificial Sequence: Synthetic oligonucleotide
  Target: LAMA2; (-) strand; PAM type: NRG; PAM sequence: CAG
catgattacatgtgctaaaa

SEQ ID NO: 101055 - DNA, 20 bp, Artificial Sequence
  Description of Artificial Sequence: Synthetic oligonucleotide
  Target: LAMA2; (-) strand; PAM type: NRG; PAM sequence: AGG
cctcccttactctcaccccc

SEQ ID NO: 101056 - DNA, 20 bp, Artificial Sequence
  Description of Artificial Sequence: Synthetic oligonucleotide
  Target: LAMA2; (-) strand; PAM type: NRG; PAM sequence: CAG
acctcccttactctcacccc

SEQ ID NO: 101057 - DNA, 20 bp, Artificial Sequence
  Description of Artificial Sequence: Synthetic oligonucleotide
  Target: LAMA2; (-) strand; PAM type: NRG; PAM sequence: AAG
taaattctcttgctagagcc

SEQ ID NO: 101058 - DNA, 20 bp, Artificial Sequence
  Description of Artificial Sequence: Synthetic oligonucleotide
  Target: LAMA2; (-) strand; PAM type: NRG; PAM sequence: GAG
acatctaaattctcttgcta

SEQ ID NO: 101059 - DNA, 20 bp, Artificial Sequence
  Description of Artificial Sequence: Synthetic oligonucleotide
  Target: LAMA2; (-) strand; PAM type: NRG; PAM sequence: TAG
ctacatctaaattctcttgc

SEQ ID NO: 101060 - DNA, 20 bp, Artificial Sequence
  Description of Artificial Sequence: Synthetic oligonucleotide
  Target: LAMA2; (-) strand; PAM type: NRG; PAM sequence: CAG
tatactaacaacaagcactg

SEQ ID NO: 101061 - DNA, 20 bp, Artificial Sequence
  Description of Artificial Sequence: Synthetic oligonucleotide
  Target: LAMA2; (-) strand; PAM type: NRG; PAM sequence: AAG
gtcagtactatactaacaac

SEQ ID NO: 101062 - DNA, 20 bp, Artificial Sequence
  Description of Artificial Sequence: Synthetic oligonucleotide
  Target: LAMA2; (-) strand; PAM type: NRG; PAM sequence: CAG
gaaagtttatttcctgtagt

SEQ ID NO: 101063 - DNA, 20 bp, Artificial Sequence
  Description of Artificial Sequence: Synthetic oligonucleotide
  Target: LAMA2; (-) strand; PAM type: NRG; PAM sequence: TAG
aggagaaagtttatttcctg

SEQ ID NO: 101064 - DNA, 20 bp, Artificial Sequence
  Description of Artificial Sequence: Synthetic oligonucleotide
  Target: LAMA2; (-) strand; PAM type: NRG; PAM sequence: AAG
ttattctaagcaataggaga

SEQ ID NO: 101065 - DNA, 20 bp, Artificial Sequence
  Description of Artificial Sequence: Synthetic oligonucleotide
  Target: LAMA2; (-) strand; PAM type: NRG; PAM sequence: GAG
ttacttattctaagcaatag

SEQ ID NO: 101066 - DNA, 20 bp, Artificial Sequence
  Description of Artificial Sequence: Synthetic oligonucleotide
  Target: LAMA2; (-) strand; PAM type: NRG; PAM sequence: AGG
gtttacttattctaagcaat

SEQ ID NO: 101067 - DNA, 20 bp, Artificial Sequence
  Description of Artificial Sequence: Synthetic oligonucleotide
  Target: LAMA2; (-) strand; PAM type: NRG; PAM sequence: TAG
tgtttacttattctaagcaa

SEQ ID NO: 101068 - DNA, 20 bp, Artificial Sequence
  Description of Artificial Sequence: Synthetic oligonucleotide
  Target: LAMA2; (-) strand; PAM type: NRG; PAM sequence: AAG
actgagtgtttacttattct

SEQ ID NO: 101069 - DNA, 20 bp, Artificial Sequence
  Description of Artificial Sequence: Synthetic oligonucleotide
  Target: LAMA2; (-) strand; PAM type: NRG; PAM sequence: GAG
acaatacatgctactaaact

SEQ ID NO: 101070 - DNA, 20 bp, Artificial Sequence
  Description of Artificial Sequence: Synthetic oligonucleotide
  Target: LAMA2; (-) strand; PAM type: NRG; PAM sequence: AAG
cccagggaagtaactaaagg

SEQ ID NO: 101071 - DNA, 20 bp, Artificial Sequence
  Description of Artificial Sequence: Synthetic oligonucleotide
  Target: LAMA2; (-) strand; PAM type: NRG; PAM sequence: AGG
tttcccagggaagtaactaa

SEQ ID NO: 101072 - DNA, 20 bp, Artificial Sequence
  Description of Artificial Sequence: Synthetic oligonucleotide
  Target: LAMA2; (-) strand; PAM type: NRG; PAM sequence: AAG
atttcccagggaagtaacta

SEQ ID NO: 101073 - DNA, 20 bp, Artificial Sequence
  Description of Artificial Sequence: Synthetic oligonucleotide
  Target: LAMA2; (-) strand; PAM type: NRG; PAM sequence: AAG
ctaaattatatttcccaggg

SEQ ID NO: 101074 - DNA, 20 bp, Artificial Sequence
  Description of Artificial Sequence: Synthetic oligonucleotide
  Target: LAMA2; (-) strand; PAM type: NRG; PAM sequence: GGG
agtctaaattatatttccca

SEQ ID NO: 101075 - DNA, 20 bp, Artificial Sequence
  Description of Artificial Sequence: Synthetic oligonucleotide
  Target: LAMA2; (-) strand; PAM type: NRG; PAM sequence: AGG
cagtctaaattatatttccc

SEQ ID NO: 101076 - DNA, 20 bp, Artificial Sequence
  Description of Artificial Sequence: Synthetic oligonucleotide
  Target: LAMA2; (-) strand; PAM type: NRG; PAM sequence: CAG
tcagtctaaattatatttcc

SEQ ID NO: 101077 - DNA, 20 bp, Artificial Sequence
  Description of Artificial Sequence: Synthetic oligonucleotide
  Target: LAMA2; (-) strand; PAM type: NRG; PAM sequence: CAG
cacaaatccatgatgtggat

SEQ ID NO: 101078 - DNA, 20 bp, Artificial Sequence
  Description of Artificial Sequence: Synthetic oligonucleotide
  Target: LAMA2; (-) strand; PAM type: NRG; PAM sequence: TGG
aaatacacaaatccatgatg

SEQ ID NO: 101079 - DNA, 20 bp, Artificial Sequence
  Description of Artificial Sequence: Synthetic oligonucleotide
  Target: LAMA2; (-) strand; PAM type: NRG; PAM sequence: AGG
atcacacaatgatcaggctt

SEQ ID NO: 101080 - DNA, 20 bp, Artificial Sequence
  Description of Artificial Sequence: Synthetic oligonucleotide
  Target: LAMA2; (-) strand; PAM type: NRG; PAM sequence: TAG
gatcacacaatgatcaggct

SEQ ID NO: 101081 - DNA, 20 bp, Artificial Sequence
  Description of Artificial Sequence: Synthetic oligonucleotide
  Target: LAMA2; (-) strand; PAM type: NRG; PAM sequence: AGG
cctgagatcacacaatgatc

SEQ ID NO: 101082 - DNA, 20 bp, Artificial Sequence
  Description of Artificial Sequence: Synthetic oligonucleotide
  Target: LAMA2; (-) strand; PAM type: NRG; PAM sequence: CAG
acctgagatcacacaatgat

SEQ ID NO: 101083 - DNA, 20 bp, Artificial Sequence
  Description of Artificial Sequence: Synthetic oligonucleotide
  Target: LAMA2; (-) strand; PAM type: NRG; PAM sequence: GAG
caccaatatgcaaattacct

SEQ ID NO: 101084 - DNA, 20 bp, Artificial Sequence
  Description of Artificial Sequence: Synthetic oligonucleotide
  Target: LAMA2; (-) strand; PAM type: NRG; PAM sequence: TAG
ctaaatttacagtgagtgta

SEQ ID NO: 101085 - DNA, 20 bp, Artificial Sequence
  Description of Artificial Sequence: Synthetic oligonucleotide
  Target: LAMA2; (-) strand; PAM type: NRG; PAM sequence: GAG
gcctaaactaaatttacagt

SEQ ID NO: 101086 - DNA, 20 bp, Artificial Sequence
  Description of Artificial Sequence: Synthetic oligonucleotide
  Target: LAMA2; (-) strand; PAM type: NRG; PAM sequence: CAG
aagagcctaaactaaattta

SEQ ID NO: 101087 - DNA, 20 bp, Artificial Sequence
  Description of Artificial Sequence: Synthetic oligonucleotide
  Target: LAMA2; (-) strand; PAM type: NRG; PAM sequence: GAG
ttatatactttgagaaataa

SEQ ID NO: 101088 - DNA, 20 bp, Artificial Sequence
  Description of Artificial Sequence: Synthetic oligonucleotide
  Target: LAMA2; (-) strand; PAM type: NRG; PAM sequence: AAG
ttttatatactttgagaaat

SEQ ID NO: 101089 - DNA, 20 bp, Artificial Sequence
  Description of Artificial Sequence: Synthetic oligonucleotide
  Target: LAMA2; (-) strand; PAM type: NRG; PAM sequence: GAG
agcagaattttatatacttt

SEQ ID NO: 101090 - DNA, 20 bp, Artificial Sequence
  Description of Artificial Sequence: Synthetic oligonucleotide
  Target: LAMA2; (-) strand; PAM type: NRG; PAM sequence: CAG
gttttgcctgatctcttcag

SEQ ID NO: 101091 - DNA, 20 bp, Artificial Sequence
  Description of Artificial Sequence: Synthetic oligonucleotide
  Target: LAMA2; (-) strand; PAM type: NRG; PAM sequence: CAG
tttgttttgcctgatctctt

SEQ ID NO: 101092 - DNA, 20 bp, Artificial Sequence
  Description of Artificial Sequence: Synthetic oligonucleotide
  Target: LAMA2; (-) strand; PAM type: NRG; PAM sequence: TGG
tcctttcacagttcctgcat

SEQ ID NO: 101093 - DNA, 20 bp, Artificial Sequence
  Description of Artificial Sequence: Synthetic oligonucleotide
  Target: LAMA2; (-) strand; PAM type: NRG; PAM sequence: CAG
gtccaagggaagtcctttca

SEQ ID NO: 101094 - DNA, 20 bp, Artificial Sequence
  Description of Artificial Sequence: Synthetic oligonucleotide
  Target: LAMA2; (-) strand; PAM type: NRG; PAM sequence: AAG
gggaccaaggtgtccaaggg

SEQ ID NO: 101095 - DNA, 20 bp, Artificial Sequence
  Description of Artificial Sequence: Synthetic oligonucleotide
  Target: LAMA2; (-) strand; PAM type: NRG; PAM sequence: GGG
ttagggaccaaggtgtccaa

SEQ ID NO: 101096 - DNA, 20 bp, Artificial Sequence
  Description of Artificial Sequence: Synthetic oligonucleotide
  Target: LAMA2; (-) strand; PAM type: NRG; PAM sequence: AGG
tttagggaccaaggtgtcca

SEQ ID NO: 101097 - DNA, 20 bp, Artificial Sequence
  Description of Artificial Sequence: Synthetic oligonucleotide
  Target: LAMA2; (-) strand; PAM type: NRG; PAM sequence: AAG
ttttagggaccaaggtgtcc

SEQ ID NO: 101098 - DNA, 20 bp, Artificial Sequence
  Description of Artificial Sequence: Synthetic oligonucleotide
  Target: LAMA2; (-) strand; PAM type: NRG; PAM sequence: AGG
taagtatcttttagggacca

SEQ ID NO: 101099 - DNA, 20 bp, Artificial Sequence
  Description of Artificial Sequence: Synthetic oligonucleotide
  Target: LAMA2; (-) strand; PAM type: NRG; PAM sequence: AAG
ataagtatcttttagggacc

SEQ ID NO: 101100 - DNA, 20 bp, Artificial Sequence
  Description of Artificial Sequence: Synthetic oligonucleotide
  Target: LAMA2; (-) strand; PAM type: NRG; PAM sequence: GGG
gaagctataagtatctttta

SEQ ID NO: 101101 - DNA, 20 bp, Artificial Sequence
  Description of Artificial Sequence: Synthetic oligonucleotide
  Target: LAMA2; (-) strand; PAM type: NRG; PAM sequence: AGG
ggaagctataagtatctttt

SEQ ID NO: 101102 - DNA, 20 bp, Artificial Sequence
  Description of Artificial Sequence: Synthetic oligonucleotide
  Target: LAMA2; (-) strand; PAM type: NRG; PAM sequence: TAG
tggaagctataagtatcttt

SEQ ID NO: 101103 - DNA, 20 bp, Artificial Sequence
  Description of Artificial Sequence: Synthetic oligonucleotide
  Target: LAMA2; (-) strand; PAM type: NRG; PAM sequence: AAG
caactgtccctggaagctat

SEQ ID NO: 101104 - DNA, 20 bp, Artificial Sequence
  Description of Artificial Sequence: Synthetic oligonucleotide
  Target: LAMA2; (-) strand; PAM type: NRG; PAM sequence: AAG
tcactggcaactgtccctgg

SEQ ID NO: 101105 - DNA, 20 bp, Artificial Sequence
  Description of Artificial Sequence: Synthetic oligonucleotide
  Target: LAMA2; (-) strand; PAM type: NRG; PAM sequence: TGG
gggtcactggcaactgtccc

SEQ ID NO: 101106 - DNA, 20 bp, Artificial Sequence
  Description of Artificial Sequence: Synthetic oligonucleotide
  Target: LAMA2; (-) strand; PAM type: NRG; PAM sequence: TGG
cagtaaaatccaggggtcac

SEQ ID NO: 101107 - DNA, 20 bp, Artificial Sequence
  Description of Artificial Sequence: Synthetic oligonucleotide
  Target: LAMA2; (-) strand; PAM type: NRG; PAM sequence: GGG
ttggatccagtaaaatccag

SEQ ID NO: 101108 - DNA, 20 bp, Artificial Sequence
  Description of Artificial Sequence: Synthetic oligonucleotide
  Target: LAMA2; (-) strand; PAM type: NRG; PAM sequence: GGG
tttggatccagtaaaatcca

SEQ ID NO: 101109 - DNA, 20 bp, Artificial Sequence
  Description of Artificial Sequence: Synthetic oligonucleotide
  Target: LAMA2; (-) strand; PAM type: NRG; PAM sequence: AGG
ttttggatccagtaaaatcc

SEQ ID NO: 101110 - DNA, 20 bp, Artificial Sequence
  Description of Artificial Sequence: Synthetic oligonucleotide
  Target: LAMA2; (-) strand; PAM type: NRG; PAM sequence: CAG
attttggatccagtaaaatc

SEQ ID NO: 101111 - DNA, 20 bp, Artificial Sequence
  Description of Artificial Sequence: Synthetic oligonucleotide
  Target: LAMA2; (-) strand; PAM type: NRG; PAM sequence: CAG
aaaaaattccattttggatc

SEQ ID NO: 101112 - DNA, 20 bp, Artificial Sequence
  Description of Artificial Sequence: Synthetic oligonucleotide
  Target: LAMA2; (-) strand; PAM type: NRG; PAM sequence: TGG
tgctgcaaaaaattccattt

SEQ ID NO: 101113 - DNA, 20 bp, Artificial Sequence
  Description of Artificial Sequence: Synthetic oligonucleotide
  Target: LAMA2; (-) strand; PAM type: NRG; PAM sequence: AGG
agtgaaaatccacatataaa

SEQ ID NO: 101114 - DNA, 20 bp, Artificial Sequence
  Description of Artificial Sequence: Synthetic oligonucleotide
  Target: LAMA2; (-) strand; PAM type: NRG; PAM sequence: AAG
tagtgaaaatccacatataa

SEQ ID NO: 101115 - DNA, 20 bp, Artificial Sequence
  Description of Artificial Sequence: Synthetic oligonucleotide
  Target: LAMA2; (-) strand; PAM type: NRG; PAM sequence: TAG
gtatacattcttcatgatag

SEQ ID NO: 101116 - DNA, 20 bp, Artificial Sequence
  Description of Artificial Sequence: Synthetic oligonucleotide
  Target: LAMA2; (-) strand; PAM type: NRG; PAM sequence: TAG
tttgtatacattcttcatga

SEQ ID NO: 101117 - DNA, 20 bp, Artificial Sequence
  Description of Artificial Sequence: Synthetic oligonucleotide
  Target: LAMA2; (-) strand; PAM type: NRG; PAM sequence: CAG
ataggttcctaacgtggaca

SEQ ID NO: 101118 - DNA, 20 bp, Artificial Sequence
  Description of Artificial Sequence: Synthetic oligonucleotide
  Target: LAMA2; (-) strand; PAM type: NRG; PAM sequence: TGG
gtctaaataggttcctaacg

SEQ ID NO: 101119 - DNA, 20 bp, Artificial Sequence
  Description of Artificial Sequence: Synthetic oligonucleotide
  Target: LAMA2; (-) strand; PAM type: NRG; PAM sequence: AGG
agagactgtgatgtctaaat

SEQ ID NO: 101120 - DNA, 20 bp, Artificial Sequence
  Description of Artificial Sequence: Synthetic oligonucleotide
  Target: LAMA2; (-) strand; PAM type: NRG; PAM sequence: TAG
gagagactgtgatgtctaaa

SEQ ID NO: 101121 - DNA, 20 bp, Artificial Sequence
  Description of Artificial Sequence: Synthetic oligonucleotide
  Target: LAMA2; (-) strand; PAM type: NRG; PAM sequence: GAG
atttaggtcactaactatga

SEQ ID NO: 101122 - DNA, 20 bp, Artificial Sequence
  Description of Artificial Sequence: Synthetic oligonucleotide
  Target: LAMA2; (-) strand; PAM type: NRG; PAM sequence: GAG
gaatttaggtcactaactat

SEQ ID NO: 101123 - DNA, 20 bp, Artificial Sequence
  Description of Artificial Sequence: Synthetic oligonucleotide
  Target: LAMA2; (-) strand; PAM type: NRG; PAM sequence: AGG
tgcatggtggggctgaattt

SEQ ID NO: 101124 - DNA, 20 bp, Artificial Sequence
  Description of Artificial Sequence: Synthetic oligonucleotide
  Target: LAMA2; (-) strand; PAM type: NRG; PAM sequence: TAG
ctgcatggtggggctgaatt

SEQ ID NO: 101125 - DNA, 20 bp, Artificial Sequence
  Description of Artificial Sequence: Synthetic oligonucleotide
  Target: LAMA2; (-) strand; PAM type: NRG; PAM sequence: GGG
ggaactgactctgcatggtg

SEQ ID NO: 101126 - DNA, 20 bp, Artificial Sequence
  Description of Artificial Sequence: Synthetic oligonucleotide
  Target: LAMA2; (-) strand; PAM type: NRG; PAM sequence: GGG
aggaactgactctgcatggt

SEQ ID NO: 101127 - DNA, 20 bp, Artificial Sequence
  Description of Artificial Sequence: Synthetic oligonucleotide
  Target: LAMA2; (-) strand; PAM type: NRG; PAM sequence: TGG
caggaactgactctgcatgg

SEQ ID NO: 101128 - DNA, 20 bp, Artificial Sequence
  Description of Artificial Sequence: Synthetic oligonucleotide
  Target: LAMA2; (-) strand; PAM type: NRG; PAM sequence: TGG
gctcaggaactgactctgca

SEQ ID NO: 101129 - DNA, 20 bp, Artificial Sequence
  Description of Artificial Sequence: Synthetic oligonucleotide
  Target: LAMA2; (-) strand; PAM type: NRG; PAM sequence: AGG
taaattgcttagttatgctc

SEQ ID NO: 101130 - DNA, 20 bp, Artificial Sequence
  Description of Artificial Sequence: Synthetic oligonucleotide
  Target: LAMA2; (-) strand; PAM type: NRG; PAM sequence: CAG
ataaattgcttagttatgct

SEQ ID NO: 101131 - DNA, 20 bp, Artificial Sequence
  Description of Artificial Sequence: Synthetic oligonucleotide
  Target: LAMA2; (-) strand; PAM type: NRG; PAM sequence: TAG
ttgaaggtgaataaattgct

SEQ ID NO: 101132 - DNA, 20 bp, Artificial Sequence
  Description of Artificial Sequence: Synthetic oligonucleotide
  Target: LAMA2; (-) strand; PAM type: NRG; PAM sequence: AGG
agagaatgcctggaatttga

SEQ ID NO: 101133 - DNA, 20 bp, Artificial Sequence
  Description of Artificial Sequence: Synthetic oligonucleotide
  Target: LAMA2; (-) strand; PAM type: NRG; PAM sequence: AAG
tagagaatgcctggaatttg

SEQ ID NO: 101134 - DNA, 20 bp, Artificial Sequence
  Description of Artificial Sequence: Synthetic oligonucleotide
  Target: LAMA2; (-) strand; PAM type: NRG; PAM sequence: TGG
aagggactttagagaatgcc

SEQ ID NO: 101135 - DNA, 20 bp, Artificial Sequence
  Description of Artificial Sequence: Synthetic oligonucleotide
  Target: LAMA2; (-) strand; PAM type: NRG; PAM sequence: GAG
gtgtggtaaaagggacttta

SEQ ID NO: 101136 - DNA, 20 bp, Artificial Sequence
  Description of Artificial Sequence: Synthetic oligonucleotide
  Target: LAMA2; (-) strand; PAM type: NRG; PAM sequence: TAG
ctgtgtggtaaaagggactt

SEQ ID NO: 101137 - DNA, 20 bp, Artificial Sequence
  Description of Artificial Sequence: Synthetic oligonucleotide
  Target: LAMA2; (-) strand; PAM type: NRG; PAM sequence: GGG
atgaaccctgtgtggtaaaa

SEQ ID NO: 101138 - DNA, 20 bp, Artificial Sequence
  Description of Artificial Sequence: Synthetic oligonucleotide
  Target: LAMA2; (-) strand; PAM type: NRG; PAM sequence: AGG
gatgaaccctgtgtggtaaa

SEQ ID NO: 101139 - DNA, 20 bp, Artificial Sequence
  Description of Artificial Sequence: Synthetic oligonucleotide
  Target: LAMA2; (-) strand; PAM type: NRG; PAM sequence: AAG
tgatgaaccctgtgtggtaa

SEQ ID NO: 101140 - DNA, 20 bp, Artificial Sequence
  Description of Artificial Sequence: Synthetic oligonucleotide
  Target: LAMA2; (-) strand; PAM type: NRG; PAM sequence: TGG
ctattatgatgaaccctgtg

SEQ ID NO: 101141 - DNA, 20 bp, Artificial Sequence
  Description of Artificial Sequence: Synthetic oligonucleotide
  Target: LAMA2; (-) strand; PAM type: NRG; PAM sequence: GAG
ggtaagttctcagtcaaggt

SEQ ID NO: 101142 - DNA, 20 bp, Artificial Sequence
  Description of Artificial Sequence: Synthetic oligonucleotide
  Target: LAMA2; (-) strand; PAM type: NRG; PAM sequence: AGG
aaatggtaagttctcagtca

SEQ ID NO: 101143 - DNA, 20 bp, Artificial Sequence
  Description of Artificial Sequence: Synthetic oligonucleotide
  Target: LAMA2; (-) strand; PAM type: NRG; PAM sequence: AAG
caaatggtaagttctcagtc

SEQ ID NO: 101144 - DNA, 20 bp, Artificial Sequence
  Description of Artificial Sequence: Synthetic oligonucleotide
  Target: LAMA2; (-) strand; PAM type: NRG; PAM sequence: CAG
cctggcaaatggtaagttct

SEQ ID NO: 101145 - DNA, 20 bp, Artificial Sequence
  Description of Artificial Sequence: Synthetic oligonucleotide
  Target: LAMA2; (-) strand; PAM type: NRG; PAM sequence: AAG
tatagtgcctggcaaatggt

SEQ ID NO: 101146 - DNA, 20 bp, Artificial Sequence
  Description of Artificial Sequence: Synthetic oligonucleotide
  Target: LAMA2; (-) strand; PAM type: NRG; PAM sequence: TGG
ttaatatagtgcctggcaaa

SEQ ID NO: 101147 - DNA, 20 bp, Artificial Sequence
  Description of Artificial Sequence: Synthetic oligonucleotide
  Target: LAMA2; (-) strand; PAM type: NRG; PAM sequence: TGG
aaaatgcttaatatagtgcc

SEQ ID NO: 101148 - DNA, 20 bp, Artificial Sequence
  Description of Artificial Sequence: Synthetic oligonucleotide
  Target: LAMA2; (-) strand; PAM type: NRG; PAM sequence: TAG
cacgtgtaaaatgcttaata

SEQ ID NO: 101149 - DNA, 20 bp, Artificial Sequence
  Description of Artificial Sequence: Synthetic oligonucleotide
  Target: LAMA2; (-) strand; PAM type: NRG; PAM sequence: AAG
tgggaatgttacaagaatga

SEQ ID NO: 101150 - DNA, 20 bp, Artificial Sequence
  Description of Artificial Sequence: Synthetic oligonucleotide
  Target: LAMA2; (-) strand; PAM type: NRG; PAM sequence: AAG
ataaggaatgggaatgttac

SEQ ID NO: 101151 - DNA, 20 bp, Artificial Sequence
  Description of Artificial Sequence: Synthetic oligonucleotide
  Target: LAMA2; (-) strand; PAM type: NRG; PAM sequence: GGG
cagtggggatgataaggaat

SEQ ID NO: 101152 - DNA, 20 bp, Artificial Sequence
  Description of Artificial Sequence: Synthetic oligonucleotide
  Target: LAMA2; (-) strand; PAM type: NRG; PAM sequence: TGG
acagtggggatgataaggaa

SEQ ID NO: 101153 - DNA, 20 bp, Artificial Sequence
  Description of Artificial Sequence: Synthetic oligonucleotide
  Target: LAMA2; (-) strand; PAM type: NRG; PAM sequence: AGG
atcacacagtggggatgata

SEQ ID NO: 101154 - DNA, 20 bp, Artificial Sequence
  Description of Artificial Sequence: Synthetic oligonucleotide
  Target: LAMA2; (-) strand; PAM type: NRG; PAM sequence: AAG
tatcacacagtggggatgat

SEQ ID NO: 101155 - DNA, 20 bp, Artificial Sequence
  Description of Artificial Sequence: Synthetic oligonucleotide
  Target: LAMA2; (-) strand; PAM type: NRG; PAM sequence: GGG
agttctcttatcacacagtg

SEQ ID NO: 101156 - DNA, 20 bp, Artificial Sequence
  Description of Artificial Sequence: Synthetic oligonucleotide
  Target: LAMA2; (-) strand; PAM type: NRG; PAM sequence: GGG
cagttctcttatcacacagt

SEQ ID NO: 101157 - DNA, 20 bp, Artificial Sequence
  Description of Artificial Sequence: Synthetic oligonucleotide
  Target: LAMA2; (-) strand; PAM type: NRG; PAM sequence: TGG
tcagttctcttatcacacag

SEQ ID NO: 101158 - DNA, 20 bp, Artificial Sequence
  Description of Artificial Sequence: Synthetic oligonucleotide
  Target: LAMA2; (-) strand; PAM type: NRG; PAM sequence: CAG
aattcagttctcttatcaca

SEQ ID NO: 101159 - DNA, 20 bp, Artificial Sequence
  Description of Artificial Sequence: Synthetic oligonucleotide
  Target: LAMA2; (-) strand; PAM type: NRG; PAM sequence: CAG
tgacttaacctacctaaatt

SEQ ID NO: 101160 - DNA, 20 bp, Artificial Sequence
  Description of Artificial Sequence: Synthetic oligonucleotide
  Target: LAMA2; (-) strand; PAM type: NRG; PAM sequence: GAG
ggatctactgaaaagtcact

SEQ ID NO: 101161 - DNA, 20 bp, Artificial Sequence
  Description of Artificial Sequence: Synthetic oligonucleotide
  Target: LAMA2; (-) strand; PAM type: NRG; PAM sequence: AAG
caaatcacggatctactgaa

SEQ ID NO: 101162 - DNA, 20 bp, Artificial Sequence
  Description of Artificial Sequence: Synthetic oligonucleotide
  Target: LAMA2; (-) strand; PAM type: NRG; PAM sequence: CGG
actgacccatgctcaaatca

SEQ ID NO: 101163 - DNA, 20 bp, Artificial Sequence
  Description of Artificial Sequence: Synthetic oligonucleotide
  Target: LAMA2; (-) strand; PAM type: NRG; PAM sequence: AAG
gttaagaaaataagatttgt

SEQ ID NO: 101164 - DNA, 20 bp, Artificial Sequence
  Description of Artificial Sequence: Synthetic oligonucleotide
  Target: LAMA2; (-) strand; PAM type: NRG; PAM sequence: AAG
agcatagaggttaagaaaat

SEQ ID NO: 101165 - DNA, 20 bp, Artificial Sequence
  Description of Artificial Sequence: Synthetic oligonucleotide
  Target: LAMA2; (-) strand; PAM type: NRG; PAM sequence: AAG
cagtagccagcatagaggtt

SEQ ID NO: 101166 - DNA, 20 bp, Artificial Sequence
  Description of Artificial Sequence: Synthetic oligonucleotide
  Target: LAMA2; (-) strand; PAM type: NRG; PAM sequence: AGG
tttatcagtagccagcatag

SEQ ID NO: 101167 - DNA, 20 bp, Artificial Sequence
  Description of Artificial Sequence: Synthetic oligonucleotide
  Target: LAMA2; (-) strand; PAM type: NRG; PAM sequence: GAG
gtttatcagtagccagcata

SEQ ID NO: 101168 - DNA, 20 bp, Artificial Sequence
  Description of Artificial Sequence: Synthetic oligonucleotide
  Target: LAMA2; (-) strand; PAM type: NRG; PAM sequence: TAG
ctgtttatcagtagccagca

SEQ ID NO: 101169 - DNA, 20 bp, Artificial Sequence
  Description of Artificial Sequence: Synthetic oligonucleotide
  Target: LAMA2; (-) strand; PAM type: NRG; PAM sequence: CAG
tttctctgtttatcagtagc

SEQ ID NO: 101170 - DNA, 20 bp, Artificial Sequence
  Description of Artificial Sequence: Synthetic oligonucleotide
  Target: LAMA2; (-) strand; PAM type: NRG; PAM sequence: TAG
ttgctttctctgtttatcag
